United States Patent Application Publication US 2026/0242817 A1 - sequence listing, part 3

SEQ ID NO: 8169 - protein, 650 aa, Zea mays
  VARIANT 534: note = Ancestral polymorphism is S, Derived polymorphism is F
MVQGEESSWRMERAALPLNQALAYGVQAHAAAAAAPPTCFLYNFALLYSPSPPPTALPAGLLLVVELAVAMVQGEESSWRMERAALPLNQLALAYGVQAHAAAAAAAAAPPTCFLDFQPAAASAAYFGFGELEEALIHGGGAASAGGGVDPGVIIKNDVAQAKSAAGYLAGAGTGRPPTLEIFPSWPMRHQQQLHSGNSQSVGSTGTDSSSAQNTMSQMELVSPASSAPRQEVMMVTTDDYSYKPGLAAAPAAAAPPSFQQHHPLPLQLHGGEGGGDHDKRKHGSTRKDGKLVDAKTERRLAQNREAARKSRLRKKAYVQQLETSRIRLQQVEHELQRARSQGLFVGGCSAAGDMSSGNAQHRPSASSIHSQYHCSKASSFLPCSCGLQLQLSCRSRSRPQRGAAMFDMEYARWLDDDTKRLAELRGGLQAHLLDGNLGLIVEECMQHYDELFQLKAALARSDVFHLLTGSWATPAERCFFWMGGFRPSELLKILIPQLDPLTEQQLLGICNLQQSSEQAEEALAQGLHQLHQSLADTVAAGTLNDGAAAPNYMNIMAVALEKLASLENFYQQADNLRHQTLHQMRRILTTRQAARCFLSIGEYYSRLRALSNLWASRPRDNFIGTESLSPTATELQALHHQQQNQFAGF

SEQ ID NO: 8170 - protein, 383 aa, Zea mays
  VARIANT 78..383: note = Derived polymorphism lacks residues 78 to 383
MASETTKNVKATLDEQEVTSHQRDQSAAEEEEVVVVVDPLARQSSVMSLTLEELQSSLCEPGRNFGSMNMDEFMANIWNAEEFQAATATGGCSKQEGTQREPMMPVANGTGENGGLVRQANAAAQAVVQPQTGSGGGGGGVAASGRQQVTLADMTLEDFLVKAGVVRGAFAGHGHAVVGMAPIPAGRMGIQQQHAAPTMSYQVAAPAPNAVYPVMGNGTGYHNGYPRAIAVVPPSQCVTAAVSPGSSDGVSAMTQAEMMSCIGNEGAGTVRNYGGGGGGGSARKRDSPEDACTEKTVERRQRRMIKNRESAARSRARKQAYTVELEAELNHLKEENDRLRAEQKTILLSKKKKLVEKMVEQARENVSAKKGGRGLRRSGSAMW

SEQ ID NO: 8171 - protein, 360 aa, Zea mays
  VARIANT 92: note = Ancestral polymorphism is E, Derived polymorphism is V
MIALSKIALVSAVALLGLGWAYQATRPPPPAILGAPGGPPISSPRIRLKDGRHLAYREEGVRRENARFRIVFIHGFSSTKESGFPVSQELVEQLGIYMLFFDRAGYGDSDANPKRCLKSDATDVEELADALQLGDRFYVVGCSVGGYPAWSCLKYIPNRLAGVALAAPAVNYWWPLPANVSRAAYGRLHARDRRTFWIAHHAPALLHAWLAQKWFRVSPIVRAERDAFTAKDWEILTALWRKQRESGQVDPAKATQQGTYESLCRDATILFGTWEFDPTEIENPFPDGEGGVSIWQGRQDKIVQVEIQRYVAQKLPWVRYHEHPEAGHALPDMDGIGDEIIRELLLGESELHQEPRAQDA

SEQ ID NO: 8172 - protein, 194 aa, Zea mays
  VARIANT 6: note = Ancestral polymorphism is R, Derived polymorphism is H
  VARIANT 17: note = Ancestral polymorphism is A, Derived polymorphism is V
  VARIANT 32: note = Ancestral polymorphism is Y, Derived polymorphism is S
  VARIANT 37: note = Ancestral polymorphism is G, Derived polymorphism is R
  VARIANT 38: note = Ancestral polymorphism is L, Derived polymorphism is H
  VARIANT 51: note = Ancestral polymorphism is A, Derived polymorphism is S
  VARIANT 53: note = Ancestral polymorphism is G, Derived polymorphism is S
  VARIANT 60: note = Ancestral polymorphism is A, Derived polymorphism is V
  VARIANT 61: note = Ancestral polymorphism is G, Derived polymorphism is D
  VARIANT 66: note = Ancestral polymorphism is H, Derived polymorphism is N
  VARIANT 97: note = Ancestral polymorphism is K, Derived polymorphism is M
  VARIANT 101..194: note = Derived polymorphism lacks residues 101 to 194
  VARIANT 106: note = Ancestral polymorphism is G, Derived polymorphism is E
  VARIANT 110: note = Ancestral polymorphism is H, Derived polymorphism is L
  VARIANT 139: note = Ancestral polymorphism is G, Derived polymorphism is S
  VARIANT 150: note = Ancestral polymorphism is T, Derived polymorphism is I
MSPLPRIVLLLTVVVAAAAARRGAANDLLPKYGLPKGLIPDSVASYSFDESTGAFEIHLAGTCYVHFGSHLVYYERTITGKLSKGAISDLSGVQAKKLFLWVYVTGMVALPDQGTIEFQSGFISESLSASMFDEVPTCGSSVGAQLRGATGVIGELGLLPVAQVGGLGRFAVDGRVGPAVIRGGGVLRAGGVRV

SEQ ID NO: 8173 - protein, 398 aa, Zea mays
  VARIANT 378..398: note = Derived polymorphism lacks residues 378 to 398
  VARIANT 309: note = Ancestral polymorphism is I, Derived polymorphism is T
  VARIANT 294: note = Ancestral polymorphism is F, Derived polymorphism is S
  VARIANT 290: note = Ancestral polymorphism is S, Derived polymorphism is N
  VARIANT 161: note = Ancestral polymorphism is A, Derived polymorphism is D
  VARIANT 109: note = Ancestral polymorphism is G, Derived polymorphism is E
MGKSGKKPRESHRQGRGRRASHFCDEDDYDLPSSAYDATPRQNEESSEDNDDTSEATAEDEPERDTEAGEQDQWQGSMPSKFHLYQLSVQSPKGDISYLQKFFLMYVGGRAPLHLQEDFCGTALLSTEWIRTDARRTAIGLDLDLESLEWCLENNLSKIGADGYSRMLLFHGNVLQPMESRLVKQKFTNLVHGLDLNSNNGTGSNSCKQMGLADSKCLANLTMSEADFPARDIICAFNYSCCCLHSRKDLVLYFRHVRSVLSERGGIFVMDVYGGISSERKLRLQRKFPSFTYFWEQDEFDIISRQTRISLHFQGGKKQMMRYAFTYHWRLWSIPEIKDCLEEAGFKWVHVWMREMPNTQSGGNAKEYNANRDVKYEESQHFNQGDAWNAYVVGVANV

SEQ ID NO: 8174 - protein, 280 aa, Zea mays
  VARIANT 229: note = Ancestral polymorphism is D, Derived polymorphism is Y
  VARIANT 207..280: note = Derived polymorphism lacks residues 207 to 280
  VARIANT 118..280: note = Derived polymorphism lacks residues 118 to 280
MSLGPHLSMLGPNRTSSSPPPLRLGHRKSLGLLRGSRSCPTSRAASSAPCSTTPSTSVLASSPSGTHHTFSHHPSIAKELLSIPNARHAPPPTMNGCFRFTKTMARLRQGASDSLPSETCRAKAIIRSSSTFGLLLTSGRVSYTSPIPPFNVVSVESSTSYSEQGHTDEGRDDMDFSRSSIRFCALIMVCSLFKSADNRVLQEQLLQKEAKIEKMKYEHLAREAALVEDLLEEEYKKKFDEANKELSLENDLASMWVLVAKLKRGALDTSDLNVDDRTKV

SEQ ID NO: 8175 - protein, 610 aa, Zea mays
  VARIANT 152: note = Ancestral polymorphism is H, Derived polymorphism is R
  VARIANT 222..610: note = Derived polymorphism lacks residues 222 to 610
  VARIANT 475..610: note = Derived polymorphism lacks residues 475 to 610
MADSTAMTVDFLRARLLSERSVSRAAKERADELAKRVAELEEQVRAVTAQRRQAEWAAAEVLAVLESQGFGDHLSDGADDSDGSEVQDGEEEDGKSRGDTAGAAGEDGEGEPSAAKGEAEDALSGTTAQPGGLSWKGRSVSPRKARQLKQRHRRSFFYLLSSADPSPKYRVGQSCRKNKRRMELSNVSRSVATEEDGEGGGSQRGRQDGPDFTDDGEVGVDERSPGAGGGVGQYVIRYEKDGGEMARVLERQAELIGQYEEEENAQREWEKQYNENRNANKGDVEPKNNAKNVPSTNNPSAERLPNKESSNNSAVPRQDQTSDGDSGYSRDTRSPKRDTTVSAPSDGSPSSDTLNSKASGWSSSRFHDCTDRQLDDTPAPCSIADIESVLQALQRARISLSAKLSKPVPPSQVTLALPAPGDEHREYDDEDLPTDEGSYGDEKLSGSSPSCQEMLALPAPEDYHGHEREGSPLVSHVEKASTSSPPREEMLALPAPRDEYRNRKEAEDYMRIPAGIPGLFRLPVDSFPVDEKMFSGTACGSGFRLGLRAAAPTSGRCISVPTPPDLTVGSAPFLSGIPGLQSLSRGMPLADEDLFMQRGIDCTVSNMWML

SEQ ID NO: 8176 - protein, 416 aa, Zea mays
  VARIANT 12..416: note = Derived polymorphism lacks residues 12 to 416
  VARIANT 36..416: note = Derived polymorphism lacks residues 36 to 416
  VARIANT 50: note = Ancestral polymorphism is R, Derived polymorphism is Q
  VARIANT 57: note = Ancestral polymorphism is R, Derived polymorphism is W
  VARIANT 67: note = Ancestral polymorphism is A, Derived polymorphism is V
  VARIANT 107: note = Ancestral polymorphism is D, Derived polymorphism is N
  VARIANT 117: note = Ancestral polymorphism is F, Derived polymorphism is S
  VARIANT 132: note = Ancestral polymorphism is Y, Derived polymorphism is C
  VARIANT 211: note = Ancestral polymorphism is P, Derived polymorphism is S
  VARIANT 299: note = Ancestral polymorphism is R, Derived polymorphism is G
MRPTRAASRGGWALYELYRTTSRVAAPAVLLWRRLQGLEHPTRWPERLGRPSAARPRPGSPLVWFHAVSLGEGMAALPIVRHCVRLRPGLPVLFTTTTLSSSEVIMDLLPDGVIYQFAPLDCPTAIDSFIGYWKPSLVLLLESELWPNLIMSAAAKGIAVALLNARISLKSFNHWSMPLMFPLVSLMLSKLSLVVPLSTIQAVRFQLLHTPPGIIHFAGDLKYGILKFFILRIHEELVNVYPVLLLILVPRHPEDCKNISLALKKQKVNFVLRSTREVVSSITRVYMVDTLGELRMLYRVTPIAVVGGSFLPGLAGHNFSEAAAAGCAVMTGPHVGHFYHMLVEMWQINPLAVKQVSGEFELLQTLKELLGDASTLGARQRAAKDAFSIMSDGVVNRVWDLVCRLGIDSQTNTLSS

SEQ ID NO: 8177 - protein, 152 aa, Zea mays
  VARIANT 18: note = Ancestral polymorphism is D, Derived polymorphism is N
  VARIANT 19: note = Ancestral polymorphism is A, Derived polymorphism is T
  VARIANT 20: note = Ancestral polymorphism is T, Derived polymorphism is I
MAASLWRAVMGTGAASTNTTDSSGGGVEFWRAPERVGWLTKQGEYIKTWRRRWFVLKQGRLFWFKESTVTRASVPRGVIPVASCLTVKGAEDVLNRPYAFELSTPRETMYFIADTEKEKEEWINSIGRSIVQHSRSVTDAEVVDYDSRPGDK

SEQ ID NO: 8178 - protein, 468 aa, Zea mays
  VARIANT 18: note = Ancestral polymorphism is P, Derived polymorphism is Q
  VARIANT 55: note = Ancestral polymorphism is A, Derived polymorphism is P
  VARIANT 56: note = Ancestral polymorphism is G, Derived polymorphism is R
  VARIANT 76: note = Ancestral polymorphism is V, Derived polymorphism is I
  VARIANT 164: note = Ancestral polymorphism is P, Derived polymorphism is L
  VARIANT 245: note = Ancestral polymorphism is Y, Derived polymorphism is N
  VARIANT 276: note = Ancestral polymorphism is G, Derived polymorphism is A
  VARIANT 287: note = Ancestral polymorphism is L, Derived polymorphism is V
  VARIANT 402: note = Ancestral polymorphism is R, Derived polymorphism is W
MATPDLSPVSPVRRDDKQCAPSSSSCTILRVQDASAAEAYEQYLRLPELSSLWEAGCFPEWASEGLVKPALQALEVTFRLASLALSDPRGYASRRELARRLESLAAREVGLVSALCEGDRSAPLAELGASGGVLPRERSASEVWQLPGSAAAVVCQVSEASLLPRLAAWDKSETLAAKIMYAIESQMQGCAFTLGLGEPNLAGKPVLEYDRVVRPHELHALKPKPAPEPKSGYLNRENETLFTMYQILESWLRAASQLLARLNERIEAKNWEAAAADCWILERVWKLLADVEDLHLLMDPDDFLRLKGQLAVRAAPWSDASFCFRSRALLHVANTTRDLKKRVPWVLGVEVDPNGGPRVQEAAMMLYHSRRRGEGEEAGKVELLQAFQAVEVAVRGFFFAYRQLVAAVMGTAEALGNRALFVPAEGMDPLAQMFLEPPYYPSLDAAKTFLADYWVQQMAGASAPSIQS

SEQ ID NO: 8179 - protein, 523 aa, Zea mays
  VARIANT 377: note = Ancestral polymorphism is Q, Derived polymorphism is L
MGIQVAAVVIPPPCSSPSSSSSSPASPSSSAIATSPQHAVLGARLARSQSSLACWNAAGLGRRRGGEHTIRRALSASIDSVGSDGGDDEEFSRRIQELAVGQHPGAGGCGWPASVERSASSVGLPLSLRMLKRRKQQQLEQGRWDERLVDSAGESARAAVGRAFSSMVLIIRELQSFTLQMRETLLYEDLQGVLARVHAEMHASFVWLFQHIFSGTPALMVSLMLLLANFTVYSMGDSVAAAASLLPPHAAVAAVEMVDTQQPEQSHSQQQRFDTPALKTFSTGRTASVGGNGGGGGKVRPVAGATGDGQSDESSSYRQSGAVLPQDVSQATPLGAGAGAGSEASVSDSMAVEEAQQTVQDELVIWKRISDEAIRMQASVRAEELMDPEILEQLVAPVEAPKPDVAYPSEEHVATAQRYEQAVSEEPNSSLLLANFAQFLYQVQGDLDRAEHFFRRAVRAEPADAEALGRYAAFLWQARNDLAAAEETYQEAIAADPGNAHHAAAYAHFLWNTGGEDTCYPLD

SEQ ID NO: 8180 - protein, 80 aa, Zea mays
  VARIANT 71: note = Ancestral polymorphism is T, Derived polymorphism is S
  VARIANT 51: note = Ancestral polymorphism is G, Derived polymorphism is V
  VARIANT 33: note = Ancestral polymorphism is S, Derived polymorphism is N
  VARIANT 25: note = Ancestral polymorphism is R, Derived polymorphism is S
  VARIANT 21: note = Ancestral polymorphism is T, Derived polymorphism is I
  VARIANT 12: note = Ancestral polymorphism is G, Derived polymorphism is R
  VARIANT 11: note = Ancestral polymorphism is G, Derived polymorphism is E
  VARIANT 8: note = Ancestral polymorphism is G, Derived polymorphism is R
MGDEENIGEIGGAIGIENGNTGEARKWCGVVTSSYGRIAGHHRLRETHLLVRFILDACFRQGKCPHILWCTSNKLKNELL

SEQ ID NO: 8181 - protein, 156 aa, Zea mays
  VARIANT 28: note = Ancestral polymorphism is P, Derived polymorphism is L
  VARIANT 29..156: note = Derived polymorphism lacks residues 29 to 156
  VARIANT 35: note = Ancestral polymorphism is P, Derived polymorphism is L
  VARIANT 63: note = Ancestral polymorphism is W, Derived polymorphism is C
  VARIANT 68: note = Ancestral polymorphism is R, Derived polymorphism is H
MQLCAATPERTPWFVPTPEWGAGAAAFPQTPKRSPRFAATPDWGTGFMMPPDATAVPRTPERWPALPRTPEYAPAPRREQARWGGESKAEAPALYESGAESLRPAFLPTVAFALCFSLALRGSAQRANHRLAEKEIVVVLSSASVVLVDSSVAVVD

SEQ ID NO: 8182 - protein, 426 aa, Zea mays
  VARIANT 38: note = Ancestral polymorphism is S, Derived polymorphism is P
  VARIANT 137: note = Ancestral polymorphism is Y, Derived polymorphism is H
  VARIANT 300: note = Ancestral polymorphism is Y, Derived polymorphism is F
MRHHQACSRAHQVGALVLVSATFLLTRLFDRFLLDTYSSAPINPGRPFSSADLRIYVYAEDEIQGLRALLRGRDGTINAATCLKGQWGTQVKVHQFLLKSRFRTFNKDHANLFFVPSYVKCVRMTGALSDKEINQTYVKVLSQMPYFRRSGGRDHIFVFPSGAGAHLFRSWAIFLNRSIILTPEGDRTDKRGTSAFNTWKDIIIPGNVDDSMVKSDAPAVQPIPLTKRKYLANFLGRAQGKAGRLQLVELAKQYPDKLESPELKLSGPNKLGRIEYFKHLRNAKFCLAPRGESSWTLRFYESFFVECVPVILSDEVELPFQNVIDYSEISIKWPSSRIGPELLEYLESISDERIEEMIGHGREMRCLWVYAADTEPCSAMSGILTELQKKVRRFHQSPETFWLHNRTIVNRDLIEFHSWKTPVPLP

SEQ ID NO: 8183 - protein, 136 aa, Zea mays
  VARIANT 22: note = Ancestral polymorphism is M, Derived polymorphism is V
  VARIANT 12: note = Ancestral polymorphism is S, Derived polymorphism is C
  VARIANT 5: note = Ancestral polymorphism is G, Derived polymorphism is R
MRRKGSECTRISPAEIDVVMPMISLSSRSGRRAPSDRDRPRRQVRGGCGSRLLRTARWTAARFYRRARVSIDRAFRSSSTSKKAAATAAASPDCTPARHGSRRQQSAPPVAVDDSHKSEAVEECIRFMNSSSRKYR

SEQ ID NO: 8184 - protein, 499 aa, Zea mays
  VARIANT 380: note = Ancestral polymorphism is D, Derived polymorphism is G
  VARIANT 280..499: note = Derived polymorphism lacks residues 280 to 499
  VARIANT 248: note = Ancestral polymorphism is Q, Derived polymorphism is P
  VARIANT 39: note = Ancestral polymorphism is E, Derived polymorphism is G
MNNIISPIADVGGDDTFQPDIFDPRHNLAFRGTTSKLYGDSNGNFLGLIEMLAEFDPVMQEHVRRITNNETHNHYLDHKIQNELIHMLAFAIKSEIIKKIKKAKYFSVILDCTPDASHQEQMSLVIRYVDLSSSNVCINESFMGFLEVNDTTGQGLFDVLQDELKKLDLDIDDVRGQGYDNGSNMKGCKKGVQKKFLDINPRAFYSACSCHSLNLTLCDMAQAGGKKDFFGIIQRIYTIFAKSTKRWQILKDNISGLTLKLVSATRWESRIESVKAIRFQCADIREALLQVSDSDNDPKITSEARGLANTELGDYSFILEIVIWYEVLYAVNSVSKHLQAKDMLIDVALEKMQGLISFFKEYRETGFQKALEAAKDIALDMDIDATFRKPRQIKRKRFFDENPDDTNRTQSAEEVFRINNFITVVDQAISSLTRRFEQYQGFQKLFGFLFTSEALQSLDNKDLKSSCDNLETALKKDGKSDVDANELVFRANVLLASRF

SEQ ID NO: 8185 - protein, 286 aa, Zea mays
  VARIANT 171: note = Ancestral polymorphism is S, Derived polymorphism is Y
MSSSSEGMDVVLLLPVLHSLFSALSLLCSSFLFVQQGLDSGGRAAIMMFDVADMHGHHGDGRRAAAVQVIFPQSQIARGKASSVAETGSTDHVPSTSSTAADSSTLADKAIAGLPPDLLNKLTIRSGRLSHRTLAGSSHLASGFGDTMKCARVLEVVSKDMQAYLKKNTRSALVLDDDESIEGEDDAAAAAPVQSEPSSGTKYKQAKKKVSQAAMSSFVVSAPPKPTTQKCVDKQPAVQFVSWTCANPMRRFTVCPLRFSNPNGKYELYQWNDPDFSEFQKKTMQS

SEQ ID NO: 8186 - protein, 87 aa, Zea mays
  VARIANT 59: note = Ancestral polymorphism is A, Derived polymorphism is V
  VARIANT 45: note = Ancestral polymorphism is A, Derived polymorphism is T
  VARIANT 39: note = Ancestral polymorphism is K, Derived polymorphism is N
MRVTVLSHSPHLLFFTREKELAVVKINPADVEIIASELKLDKKIAKRTLCEHKGDAVAAVSFIDSWVLSLSPMRRAFLKAMRKSNNH

SEQ ID NO: 8187 - protein, 82 aa, Zea mays
  VARIANT 21: note = Ancestral polymorphism is S, Derived polymorphism is Y
  VARIANT 22: note = Ancestral polymorphism is Q, Derived polymorphism is K
MAARKKLFSPLLLLAMLLIASKEAGNMRMVGAEQCDGIRDNMCPDISKSFLICVHSGDCNKCCQEQGYVHGYCSFLSCKCCR

SEQ ID NO: 8188 - protein, 598 aa, Zea mays
  VARIANT 202: note = Ancestral polymorphism is T, Derived polymorphism is K
  VARIANT 171: note = Ancestral polymorphism is S, Derived polymorphism is Y
  VARIANT 148: note = Ancestral polymorphism is V, Derived polymorphism is A
  VARIANT 43: note = Ancestral polymorphism is A, Derived polymorphism is T
MGGEVPEPRRLSRALSFGCGGVPEEALHLVFGYMDDPRDREAASLVCRLWHRIDALSRKHVTVGFCYAVEPARLLARFPRLESLALKGRPRAAMYGLIPEDFGAYAAPWVAELAAPLDCLKALHLRRMTVTDEDIAVLVRARGHMLQVLKLDKCSGFSTDALCLVARSCRSLRTLFLEECIIEDEGSEWLHELAVNNSVLVTLNFYMTELKVEPADLELLAKNCKSLISLKMGDCDLSDLIGFFQTSKALQEFAGGAFFEVGEYTKYEKVIFPPRLCFLGGLTFMGKNEMPVIFPYSTMLKKLDLQFTFLTTEDHCQLIAKCPNLSVLEVRNVIGDRGLEVVAATCKKLRRLRIERGDDDPGQEEQGGVSQIGLTAVAVGCRELEYIAAYVSDITNGALESIGTFCKNLYDFRLVLLDKQKKITDLPLDNGVRALLRNCVKLRRFAFYLRPGGLSDVGLGYIGLYSGNIQYMLLGNVGESDNGLIQFATGCTNLRKLELRGCCFSERALAVAVLQMPSLRYIWVQGYRASRTGQDLMLMARPYWNIEFAPPIPESAYRVMADGQPCVDTHAQVLAYYSLAGRRPDCPQWLVTLHPASL

SEQ ID NO: 8189 - protein, 187 aa, Zea mays
  VARIANT 1: note = Ancestral polymorphism is M, Derived polymorphism is I
  VARIANT 28: note = Ancestral polymorphism is R, Derived polymorphism is H
  VARIANT 42: note = Ancestral polymorphism is G, Derived polymorphism is D
  VARIANT 44: note = Ancestral polymorphism is S, Derived polymorphism is N
  VARIANT 45: note = Ancestral polymorphism is A, Derived polymorphism is T
  VARIANT 52..187: note = Derived polymorphism lacks residues 52 to 187
  VARIANT 142: note = Ancestral polymorphism is P, Derived polymorphism is L
MAAFAAPSLSSRILLASPHSPPTLLRLRRAGGRSLELSSRRGGSARLRVVRRAVTEEDSGTARGDEEVEEAPEEPVAGRDLITLAACLVGLLTGVSIVLFNLSIDVYSFGIVMWELLTREEPYSGMRAAEIIGGIVNDSLRPQIPSWCDPEWKGLMESCWSSDPAERPSFTDISQRLRKMAAAMNVK

SEQ ID NO: 8190 - protein, 120 aa, Zea mays
  VARIANT 4: note = Ancestral polymorphism is A, Derived polymorphism is G
  VARIANT 23: note = Ancestral polymorphism is F, Derived polymorphism is S
  VARIANT 37: note = Ancestral polymorphism is N, Derived polymorphism is S
  VARIANT 44: note = Ancestral polymorphism is A, Derived polymorphism is V
  VARIANT 47: note = Ancestral polymorphism is D, Derived polymorphism is G
  VARIANT 53: note = Ancestral polymorphism is C, Derived polymorphism is R
  VARIANT 61: note = Ancestral polymorphism is Y, Derived polymorphism is C
  VARIANT 69: note = Ancestral polymorphism is R, Derived polymorphism is W
  VARIANT 74: note = Ancestral polymorphism is K, Derived polymorphism is N
  VARIANT 84: note = Ancestral polymorphism is A, Derived polymorphism is V
  VARIANT 101: note = Ancestral polymorphism is L, Derived polymorphism is S
  VARIANT 104: note = Ancestral polymorphism is F, Derived polymorphism is L
  VARIANT 120: note = Ancestral polymorphism is S, Derived polymorphism is F
MLQAQMVRITGFLDERSACLTKSAKDADSEFYMIGQNAMKELDAVGDQVSVSCNQNSAYCCPLFAIKLRCLVRKILERLGKMKAFEDTAEVNAITFINYQSAIFLGYQVLIAMFYKEKLF

SEQ ID NO: 8191 - protein, 905 aa, Zea mays
  VARIANT 289..905: note = Derived polymorphism lacks residues 289 to 905
  VARIANT 465..905: note = Derived polymorphism lacks residues 465 to 905
MTPPGQLLPLSRLPPGLSSRCPPPAHAQARVSLLHPWAHRLHGRFMPSPHLFRSPACPPRAPTPPGLSAAAGGEAQAAAVAEFVTSERVKVAAMLGLALALCNADRVVMSVAIVPLSQAYGWTPSFAGVVQSSFLWGYLMSPIIGGALVDYYGGKRVMAYGVALWSLATFLSPWAAGRSIWLFLFTRVLLGIAEGVALPSMNNMVLRWFPRTERSSAVGIAMAGFQLGNTIGLLLSPIIMSRTGIFGPFVIFGLFGFLWVLVWIPAISGTPGEHAQISAYELKYITKGQKLVKPQIGSEKTKKGYFVILSWMPVYFKTIYHVNLREAAWFSALPWVMMAVLGYVAGVVSDMLIRNGTDITLTRKIMQSIGFLGPGIALLCLNAAKSPIIASAWLTVAVGLKSFGHSGFLVNLQEIAPQYAGVLHGMSNTAGTFAAILGTIGAGTVFLPPTIKKLFAPEDKQLQLRLYSIGFNFLKHALSCHLRIPSAMQAARDRTSPAGHGGFSGFNSESQSDPGFSWTSTYTPRSRMVNRKARSSISFRERVAAILGSCANCFTPRPEVKKAHENPPIEAHDVSASPSNFGTVYKAKLRDGSIIAVKRATKMHGGHLSEEFRSEIQSLSKVEHLNLVKFLGYVEYEDERLILVEYVNNGTLRQHLDGSKGEPLEFAQRLNIAIDIVHAIAYLHGYTASLCLTNIFLRWEADHPIIHRDIKSSNILLTEHLRAKVADFGFARLAPENPEATHVSTLVKGTAGYVDPEYLRTSQLTDRSDVYSFGVLLVELVTGRRPIERGRGRGRHQRLTTEWALRKCREGFAVVVMDPRMRRTSAVVAAVEKVMVLAAECTAPDRAARPAMRRCAELLWSVRRDLQQEQQRASAASAGARRHDGSTYAPPSVTSLRQDRFQNLR

SEQ ID NO: 8192 - protein, 262 aa, Zea mays
  VARIANT 24: note = Ancestral polymorphism is L, Derived polymorphism is V
  VARIANT 16: note = Ancestral polymorphism is D, Derived polymorphism is Y
MPDQTSAAAAGGAAFDRCLLALYLISPLTVLALRFISAPYGKLSRPGWGPVLPAPLAWFLMESPTLWLPPLVLLRWPPPPLSGPLAALPAALYAFHYVHRTLVHPLRLARLRRAPAPVPLLIAACALGFNILNAYLQARSFALHAGRQASPFRCLAGLALFAWGMRTNIAADKELLRLKEAGGGYKIPRGGWFDLVTSPNYFGETVEWLGFAVVAWTPAAWAFFLYTCANLGPRARDHRRWYVQKFRGEYPASRKAFIPYIY

SEQ ID NO: 8193 - protein, 329 aa, Zea mays
  VARIANT 171: note = Ancestral polymorphism is G, Derived polymorphism is S
  VARIANT 219..329: note = Derived polymorphism lacks residues 219 to 329
MEAASNGGLLYHEVQEGKLCAVHCVNTTLQGPFFSEFDLAALAADLDQRERLVMLEGSRSPGADNATAGDFFAEGEGSHNVSLGGDFSIQVLQKALEVWDLQVIPLDSPAAGSSQFDPEQEVAFICHLQDHWFCIRKVNGEWYNFNSLYPAPEHLSKFYLSAFIDTLKGSGWSIFAVRGNFPKECPMATEGSNGFGQWLTPDDARRITASCNQVQAPTQQVQPPLLGDRSGGMSEMDMIVAQQEEADLNAAIAASLMDTGGPFASYDADQEYSNSQDAPAAGPARSKEEADKSEPSAPPCEEETQELASGSDTKREVSSVEEKGTAREE

SEQ ID NO: 8194 - protein, 1031 aa, Zea mays
  VARIANT 118: note = Ancestral polymorphism is R, Derived polymorphism is P
MVTQCPICPGHRYTYRFRITGQEGTLWWHAHSSLLRATVYGALIIRPSSGSAYPFPAPDEEKTVLLGEWWNAETVPLTNPVADAYTINGRPGDSYSCETTAKRIEKFEVRHDSTYMLRIINAALNTAFFLKVAGHTFTVVAADASYTTQYETDVIVIAPGQTVDALMVANASPGPGRYYMAISSYQSAAPLRPGSYNANITTAVVEYVGAAASAGQQAPTPALPEMPEVNDTATANRFYTGMTALVRPGRRTVPLAVDTRMFVTIGLGFVSCDQDQAPCPVVASMNNQSFKLPDADTMSMLDARYRDTPDGVYTRDFPDQPPVAFDYTNQTERLLLGGVAAALLFPGPQSTKVRTLAYNATVEVVLQNTALVGRESHPMHLHGFNFFVVAQGFGNYDTAAKQHFNLVNPQERNTIAVPTGGWAVIRFVADNPGMWFMHCHIDAHLSIGLAMVFEVGSMQISQLCSSTSIIAVNGQLPGPSIEVNEGDDVVVKVVNNSPYNVTIHWHGVLQLMTPWADGPSMVTQCPIQPSSSYTYRFSVPGQEGTLWWHAHSSFLRATVYGAFIIRPRRGNAYPFPAPDKEVPIVLGSDREIVYYTDETFTAVVEPSTRVLLRVVNAGLNSHLFFKLAGHNFTVVAVDAGYTSNLNTDTLVLAPGQTVDALVTTAAAPGSYYMAVLAHDTMSPLAFAASDTTTATAILQYNGTSSTNPPAMPAMPSSSDSGTANAFYFGLRGLGAPAVPAPVDVSMTIELGLGQLPCDPSQTRCNGTAAAAAMNGVSFRLPSPETSLLGAHVDGVAGVFTADFPDGPPPSGTAMSVGTKLKKLSYNSVVEIVLQNPAAVPTENHPIHLHGFNFFVLAQGMGTFAPGSVAYNLVDPVARNTIAVPGGGWAVIRFVANNPGMWFFHCHLDPHVPMGLGMVFQVDSGTTPGSTLPTPPGDWVGVCDAQHYAAAAAVAAAPVPVPAPAPVPAPILAPAPAESPLPPPRAVDHKPSPNLPQRREHTELGSAAANSSVASSSSSTLIKGRALEFILR

SEQ ID NO: 8195 - protein, 202 aa, Zea mays
  VARIANT 56: note = Ancestral polymorphism is T, Derived polymorphism is M
  VARIANT 151: note = Ancestral polymorphism is T, Derived polymorphism is I
  VARIANT 164: note = Ancestral polymorphism is P, Derived polymorphism is L
MAEEEQTQTEALRQPQPYHLSAPPSGEDDDEATAFGAPVGGGAVAFAFTTATTTNTTMEERALVAQEEDCIIMIAHVVHGNKWACIAKLLDMRTDNAIKNHWNSTLRRRYYNDGRCKHGGSMERSIPKVSRAVSEAVLEEPWHLKDLSSFTAMDVRDAPVQIVPETFARACHNIDQFLLLKVLIHPTCPDQLQRLVLSDHTV

SEQ ID NO: 8196 - protein, 246 aa, Zea mays
  VARIANT 47: note = Ancestral polymorphism is P, Derived polymorphism is L
  VARIANT 67: note = Ancestral polymorphism is P, Derived polymorphism is L
  VARIANT 70: note = Ancestral polymorphism is P, Derived polymorphism is L
  VARIANT 92: note = Ancestral polymorphism is P, Derived polymorphism is L
  VARIANT 111: note = Ancestral polymorphism is A, Derived polymorphism is T
  VARIANT 112: note = Ancestral polymorphism is R, Derived polymorphism is L
  VARIANT 121: note = Ancestral polymorphism is A, Derived polymorphism is T
  VARIANT 135: note = Ancestral polymorphism is A, Derived polymorphism is S
  VARIANT 155: note = Ancestral polymorphism is A, Derived polymorphism is V
  VARIANT 161: note = Ancestral polymorphism is R, Derived polymorphism is C
  VARIANT 184: note = Ancestral polymorphism is S, Derived polymorphism is L
  VARIANT 191..246: note = Derived polymorphism lacks residues 191 to 246
MGLGAGEGWDVADAVAPPGLAPDHTFLRWIIGGEDASAAMGSVMDSPVLELDHAPSMMSLAFGSTMPFALTMEDAKPCCPAATLKGTALVSPASHHLLELNLIHENLSGFARELGMFLQFATYNVDALDPAELVAITSGDAVAVHLPVGSAHVAAMPAVLRLVKRLGAKVVVSVDRGCDRTELSFATHLLQAFQPCVSLLDSSDAVGGADAEAVGRIERFMVQSDVELRVVSRHRCRGGPSSRRRG

SEQ ID NO: 8197 - protein, 147 aa, Zea mays
  VARIANT 63: note = Ancestral polymorphism is I, Derived polymorphism is K
  VARIANT 77..147: note = Derived polymorphism lacks residues 77 to 147
MLNAVARQKELCVAINVCWGDQREKVCDATEDGRSSISSRSSWLAVASARSKDLQAHEVLLLIAGFLLSYGECYMRLDRNRYQNTNSVFGLQDDRSEIIRFKHRSCWNCLVNVVEPTRPSQTRSATYQICRLGRFLQFRQTSMTSVC

SEQ ID NO: 8198 - protein, 573 aa, Zea mays
  VARIANT 444: note = Ancestral polymorphism is S, Derived polymorphism is L
  VARIANT 488..573: note = Derived polymorphism lacks residues 488 to 573
MGSAGEEEREARSEAAFTDSASIDGSSSSSDAASTDEWLPAAPVPVPAARKPGGCASDTDVARQQHKHKRRAPSEMEMMKERFAKLLLGEDMSGSGKGVCTALAISNAITNLCGQNSSPLLGAELSKFLNDASIFRSAATIFGQLWRLEPLPPEKKAMWRREMDWLLCISDHIVELVPTWQSFPDGTRLEIMTSRPRSDLYINLPALRKLDHMLLEILESFRDPEFWYVEQGIAAPDCDGSASFRVAFHRRDEKWWLPVPRVPPGGLHNKTRKQLQHKRDCANQILKAAMAINSNTLAEMEVPEPYLDSLPKNGRSTLGDIIYRYITSDQFSPECLLDCLDLSTEYQALEVANRVEASVYVWRRRVAAKPVNGLGRSSSARSSWGMVKDMMVDSEKRELLLAERAEGLLICLKQRFPGLTQTSLDMSKIQYNKDVGKSILESYSRVLESLASNIVTRIDDLLNIDELNGHAEHFAATGDADCKIAVSQTAVPSFPVPASGTPFMMAYTTPSFSPAQLASPSKKEKTSLTPGRRSQHSRGAGTKKGLMDRVGTEIKGMMISNGMMIDVSTTTEL

SEQ ID NO: 8199 - protein, 118 aa, Zea mays
  VARIANT 50: note = Ancestral polymorphism is T, Derived polymorphism is M
  VARIANT 54: note = Ancestral polymorphism is R, Derived polymorphism is C
  VARIANT 64..118: note = Derived polymorphism lacks residues 64 to 118
  VARIANT 70: note = Ancestral polymorphism is R, Derived polymorphism is C
  VARIANT 82: note = Ancestral polymorphism is D, Derived polymorphism is H
MELQARCVCVVAMLLVASFAGLDTAHGAGECGRVPVDQVALKLAPCAAATQNPRAAVPPSCCAQVRAIGRVPKCLCAVMLSDTARKAGVKPAVAMTIPKRCAIANRPVGYKCGPYTLP

SEQ ID NO: 8200 - protein, 82 aa, Zea mays
  VARIANT 10: note = Ancestral polymorphism is S, Derived polymorphism is A
  VARIANT 27: note = Ancestral polymorphism is E, Derived polymorphism is K
  VARIANT 29: note = Ancestral polymorphism is Y, Derived polymorphism is H
  VARIANT 30: note = Ancestral polymorphism is T, Derived polymorphism is M
  VARIANT 33: note = Ancestral polymorphism is T, Derived polymorphism is A
  VARIANT 35: note = Ancestral polymorphism is R, Derived polymorphism is H
  VARIANT 50: note = Ancestral polymorphism is L, Derived polymorphism is S
MDTLREVDWSTPSCPISEFFSRFTTPESYTKWTRHLKCNLYYYRTNYYILVIFVLGMGFLRKPVAILAALASSNWPQHCVSE

SEQ ID NO: 8201 - protein, 108 aa, Zea mays
  VARIANT 38: note = Ancestral polymorphism is S, Derived polymorphism is N
MRPQVLLVALAVFAVLVALPLGKAHEEEEEEGLELEASRRRWPCCDQCGICTRSQPPICECRDTSTTGCHPACKACALSISDGLFVCKDKIVNFCKRRCTRRTDDDDA

SEQ ID NO: 8202 - protein, 250 aa, Zea mays
  VARIANT 139: note = Ancestral polymorphism is R, Derived polymorphism is C
  VARIANT 133: note = Ancestral polymorphism is K, Derived polymorphism is R
  VARIANT 127: note = Ancestral polymorphism is P, Derived polymorphism is A
  VARIANT 91..250: note = Derived polymorphism lacks residues 91 to 250
  VARIANT 25: note = Ancestral polymorphism is Y, Derived polymorphism is H
  VARIANT 21: note = Ancestral polymorphism is S, Derived polymorphism is I
MVLPWILCYCSRVHQSRNNLSVKLHRCSDLAPEDVPLAIDITLNDLQLDYLDLYLIHWPFQIKRGSELSPENFVHLDMPKTWQAMERLYGSGKARAVGVSNFSTRKLADLLAVARVTPAVDQVECHPGWQQARLRAFCCSSGVHFSAYAPLGRMKAVASDPVVASVAESLGKTPAQVALRWGIQQGQSVLPKSANESRLKENIDLFGWSIPDELCAKFSEIEQVKQIRNDAFVHPQSIYKTIDELWDGEI

SEQ ID NO: 8203 - protein, 310 aa, Zea mays
  VARIANT 247: note = Ancestral polymorphism is H, Derived polymorphism is Y
  VARIANT 184..310: note = Derived polymorphism lacks residues 184 to 310
  VARIANT 150: note = Ancestral polymorphism is A, Derived polymorphism is G
  VARIANT 40: note = Ancestral polymorphism is Y, Derived polymorphism is F
MARHFVLNTGAKIPSVGLGTWQSDPGVVGNAVYAAVKAGYRHIDCARVYGNEKEIGLALKKLFEEGVVKREDLFITSKLWNDHHAPEDVPEALNDSLNDLQLEYLDLYLIHWPFRVKKGTNTSPENFVTPDFPATWGAMEKLYDAGKARAIGVSNFSSKKLGDLLAVARVPPAVDQVECHPGWQQTKLHSFCQSTGVHLTAYSPLGSPGTTWMNGNVLKEPIIISIAEKLGKTSAQVALRWNIQMGHSVLPKSTNEERIKQNLDVYDWSIPDDLLAKFSEIKQARLLRGNFIVNPESVYKTHEELWDGEL

SEQ ID NO: 8204 - protein, 396 aa, Zea mays
  VARIANT 193..396: note = Derived polymorphism lacks residues 193 to 396
  VARIANT 226: note = Ancestral polymorphism is H, Derived polymorphism is Y
  VARIANT 276: note = Ancestral polymorphism is G, Derived polymorphism is R
MDRYLRVERSRNESTIEENEIRITAQGLICNYVSYASSLLQFLNFQKKTAFCRKSWSLFVVLGMHSKVSETIWSPLAVLPFSKVNGTQMGNNRSILCCGSCALLLWPLTLTFSFWSNLHSFRPLCWVEHMSLDNETGLDIPGIRVRSVTCLVAADYFVPGYFFWAVLIASLARIGYEEKTMYMVVYDWRLSFQNTEVRDQTLSRIKSNIELMVATNGGNRVVVFPHSMGVLYFLHFMKWVEAPMGGGGGPNWCENHIKDVMNIGGPFLGVPKAVAGLFSSEAKDVAVARYKFWYVQSSVLPHLSDASGWSFFLSAPKPSSGPHKSRECLPLILIIRNKLKYALTYREVISILMQHHVLVDGRVRTDKTYPAGFMDVISIPKTNENYRLLPSSPNQG

SEQ ID NO: 8205 - protein, 205 aa, Zea mays
  VARIANT 173..205: note = Derived polymorphism lacks residues 173 to 205
  VARIANT 120: note = Ancestral polymorphism is E, Derived polymorphism is K
  VARIANT 116..205: note = Derived polymorphism lacks residues 116 to 205
  VARIANT 72: note = Ancestral polymorphism is P, Derived polymorphism is S
MEPAGMCHLGREASAQESTTKLESMERAECTSLAPVVVPKTGFYILVWYTFSTYLMPHQTDGMLLREAMVDPLLEKYKVIVLDETHERTFNCSDIESRLRGPYGHKGSRTGYVAIQRPREQIVDENAVGPYHLFGTIRPDCSSFGIGAFQEIGPFHVDTTARPSAISNTPGTQIVDSVIALFRVDFSGRGELAERQWLLLVLLNI

SEQ ID NO: 8206 - protein, 154 aa, Zea mays
  VARIANT 1: note = Ancestral polymorphism is M, Derived polymorphism is K
  VARIANT 86: note = Ancestral polymorphism is G, Derived polymorphism is D
MTEVAGRPGTSGGLALRAGQFVFAAASICAMASAPGFTNYTAFCYLVASMGLQALWSLGLGCLDYYALTLRRDLQQALLMSLFVVGDCVTAILSFAAACSAAGVVVLFERDAYLCRRDPQLPCGRFEVAAAFAFLCWTFSAASALVMSWLLASL

SEQ ID NO: 8207 - protein, 361 aa, Zea mays
  VARIANT 66: note = Ancestral polymorphism is D, Derived polymorphism is N
MKALILVGGFGTRLRPLTLSFPKPLVDFANKPMILHQIEALKEVGVTEVVLAINYRPEVMINFLKDFEDKLGITITCSQETEPLGTAGPLALARDKLADGSGQPFFVLNSDVISEYPFAELIKFHKCHGGEATIMVTKVDEPSKYGVVVMEEATGRVERFVEKPKIFVGNKINAGIYLLNPSVLDRIELRPTSIEKEVFPQIAADQQLYAMVLPGFWMDVGQPRDYITGLRLYLDSIRKKSAAKLATGAHVVGNVLVHESAKIGEGCLIGPDVAIGPGCVVEDGVRLSRCTVMRGVRIKKHACISNSIIGWHSTVGQWARIENMTILGEDVHVCDEVYSNGGVVLPHKEIKSSILKPEIVM

SEQ ID NO: 8208 - protein, 355 aa, Zea mays
  VARIANT 60..355: note = Derived polymorphism lacks residues 60 to 355
  VARIANT 166: note = Ancestral polymorphism is P, Derived polymorphism is H
MAALLRLIAESQVTSAPAAEPNRDRGAKENGQAYGVVFACAGGRVAAGVLLLIVVGIVVQLLVALRGRLRGQLRLVIVVLIDHLGDVVVVRIVLVLRLVPEKGMDMALSKLNSGGWVHIFPEGSRSRDGGKTIAPAKRGVGRLVMDADSLPVVIPFVHTGMQDIMPVIVVVGDPINFDDLLIDNCGDTQDIPRGILYDKVTQRIGQRLQELKVEVDRLAAEQEPELQNRNVGDDGYRLWQQVDWEGFGIGSSMLPSEPSAAAQVPSREAEPEPHLEVEQSVSPAPSAATFYDVAVPHWFQRHVDPSELMGFASHGLIKHGKFLEEGYREFQQSATTLHTWWVSRANNAAHRWSTA

SEQ ID NO: 8209 - protein, 68 aa, Zea mays
  VARIANT 39: note = Ancestral polymorphism is R, Derived polymorphism is I
MCGMNLAFDRELIGPAMYFGLWVMASLLDLFCSHLTGLRKLSSRNPNQRHKRLASLQLWYITFVWDGS

SEQ ID NO: 8210 - protein, 684 aa, Zea mays
  VARIANT 594: note = Ancestral polymorphism is M, Derived polymorphism is I
  VARIANT 583: note = Ancestral polymorphism is R, Derived polymorphism is S
  VARIANT 323: note = Ancestral polymorphism is S, Derived polymorphism is I
  VARIANT 300: note = Ancestral polymorphism is N, Derived polymorphism is I
  VARIANT 230..684: note = Derived polymorphism lacks residues 230 to 684
MDLTSPSPAARRAAAIARHLAAAAAPIPASSPLEPSCCLSYVPPESTERPAAFAPADLRLLLDGHDLPTRDWLFRAMEESPLFRSRSSRTGSRVFVAPDFNDGKEGQREATMRRIAYLNRRGVFRGWLTEDGAAAELRKLALLDCIAIYDHSLAIKIGVHFFLWGSAIKFLGTKRHHDKWLVATENYDIKGCFAMTELGHGSNVRGIETIATYDSETREFIINTPCESAQKYWIGGAANHATHTIVFCQLHINGRNEGVHAFVAQIRDEDGTVLPNIHIADCGHKIGLNGVDNGRIWFQNIRVPRENLLNLVADVLPDGRYVSMIDNPDQRFAAFLSPLTLGRVNIAVNSVYISKVSLAIAVRYSLSRRAFSIAPDAPEMLLLDYPSHQRRLLPLLAKVCLMSSAGNFMKNMYVKRTPEMSKDIHIYSSALKATLTWQNMITIQECREACGGQGLKTENRIGIFKSEFDVQSTFEGDNNVLMQQVSKALYAEFLGAQKKQQPFKGLGLEHLNGSSPVIPDKLTSSILRSSKFQMDLFCLRERDLLKQFVEEVSLHLAQGESREKALMLSYQVAEDLARAFTERTILQIFLEDEMNVPSGSLKEVLGLLRSLYVMVNIDESTSFLRYGHLSRDNVALVRKEVLKLCSELRPHALAVVSSFGIPDAFLSPLAFDWIEANALSTGSH

SEQ ID NO: 8211 - protein, 474 aa, Zea mays
  VARIANT 436..474: note = Derived polymorphism lacks residues 436 to 474
  VARIANT 374: note = Ancestral polymorphism is F, Derived polymorphism is V
  VARIANT 316: note = Ancestral polymorphism is W, Derived polymorphism is L
  VARIANT 256..474: note = Derived polymorphism lacks residues 256 to 474
  VARIANT 216: note = Ancestral polymorphism is C, Derived polymorphism is W
  VARIANT 165..474: note = Derived polymorphism lacks residues 165 to 474
MAGEPIATVPSGPESVAEADRLLALAESELSMGRHALRAQVRPPRHPPVPDLPARPVVATAANVLLADASSHHAALLLPEPDDPDASPLSVSELCRHFKSLIKSLRVGLDATTAAAYPSVAAAAEEALGRATKAYEALTAPAPGTFWTACAGCRLLHEFERKWMQRPSFTDDLLIAFFQSKMVHASSTPSTYSFLPPVSQQEAIRVKEKLKKEMECLEVVFKQETYSTQQEQIQTFQKQLAVATEKLKVSYLAADQFFPEWNVWTQFLEESTIGFKLDALAGSHPIEAANIITLYDVSNIWRIPLLLHVSHICFLLSESFLVWYGEWGDHVTLQAAADKRLRISSPSTPALGTINKESKSKYVILRWNIPVIHFKHFFIILGGNIPVIHFKHFFVILWLEGKLSRQAGRRIKTSMDDSVISSRNVTPYMKVSVQIGVKDMVQAALQMERMVVVAAECPCEMQKTGQMEPQSLLW

SEQ ID NO: 8212 - protein, 89 aa, Zea mays
  VARIANT 10: note = Ancestral polymorphism is D, Derived polymorphism is G
  VARIANT 11: note = Ancestral polymorphism is R, Derived polymorphism is W
  VARIANT 14: note = Ancestral polymorphism is T, Derived polymorphism is I
  VARIANT 15: note = Ancestral polymorphism is E, Derived polymorphism is D
  VARIANT 33..89: note = Derived polymorphism lacks residues 33 to 89
  VARIANT 60: note = Ancestral polymorphism is E, Derived polymorphism is D
MGDHLALIVDRLLTESKLEAAIGSGKHMVDLRQEIVDVEYCHRGLMGDHLALIVDRLLTESTLEAAIGSGKHMVDLRQEIVDVEYCHRG

SEQ ID NO: 8213 - protein, 76 aa, Zea mays
  VARIANT 38: note = Ancestral polymorphism is D, Derived polymorphism is H
  VARIANT 37: note = Ancestral polymorphism is A, Derived polymorphism is T
  VARIANT 35: note = Ancestral polymorphism is R, Derived polymorphism is L
  VARIANT 19: note = Ancestral polymorphism is R, Derived polymorphism is K
MELFAAAASAEDQKPCSSRLFSRKRSGGKAGMGVRGADKGRSSFSGRCARLVKEQRARFYIMRRCVTMLVCWREYA

SEQ ID NO: 8214 - protein, 582 aa, Zea mays
  VARIANT 231: note = Ancestral polymorphism is G, Derived polymorphism is A
MGARRGLRRGQAAAAAFSACPFLALAVVLLALPELAAGDTHYYTFNVQMTNVTRLCVTKSIPTVNGEFPGPKLVVREGDRLVVKVHNHINYNVSFHWHGVRQLRNGWADGPSYITQCPIQGGQSYVYDFTVTGQRGTLWWHAHFSWLRVHLYGPLVILPKRGEGYPFPRPYKEVPILFGEWFNADTEAVINQALQTGAGPNVSDAYTFNGLPGPTYNCSSKDTYKLKVKPGRTYMLRLINSALNDELFFGIANHTLTVVEADASYVKPFTVSTLVISPGQTMNVLLTTAPSPASPAYAMAIAPYTNTQGTFDNTTAAAVLEYAPTTTRNNTLPPLPALPLYNDTGAVSNFSRNFRSLNSARYPARVPVAVDRHLLFTVGLGTDPCPYTNQTCQGPNGTKFAASVNNNSFFRPRTALLEAHYRRRYAGVLLADFPTAPPHPFNYTGTPPNNTFVQHGTRVVPLRFNASVELVLQGTSIQGAESHPLHLHGYNFFVVGQGFGNFDPVNDPPGYNLADPVERNTISVPTAGWVAVRFLADNPGVWLMHCHFDVHLSWGLSMAWLVNDGPLPNEKMLPPPSDLPKC

SEQ ID NO: 8215 - protein, 601 aa, Zea mays
  VARIANT 23: note = Ancestral polymorphism is S, Derived polymorphism is F
MATPYRLPCCCYALVTVLVLFFSVDATEGAIREYQFDVQMTNVTRLCSSKSIVTVNGQFPGPTVFAREGDFVVIRVVNHVPYNMSIHWHGIRQLRSGWADGPAYITQCPIQSGQSYVYKFTITGQRGTLWWHAHISWLRATVYGPIVILPKPGVPYPFPAPYDEVPVLFGEWWTADTEAVISQALQTGGGPNVSDAFTINGLPGPLYNCSAKDTFKLKVKPGKTYMLRIINAALNDELFFSIAGHPLTVVDVDAVYIKPITVETIIITPGQTTNVLLTTKPSYPGATYYMLAAPYSTARPGTFDNTTVAGILEYEDPTSSPPPHAAFDKNLPALKPTLPQINDTSFVANYTARLRSLATAEYPADVPREVHRRFFFTVGLGTHPCAVNGTCQGPTNSSRFAASVNNVSFVLPTTALLQSHFAGKSRGVYSSNFPAAPLVPFNYTGTPPNNTNVSNGTKLVVLPYGTSVELVMQGTSILGAESHPLHLHGFNFFVVGQGFGNFDPAKDPAKYNLVDPVERNTVGVPAAGWVAIRFRADNPGETLGVVHALPLGSSRQLGPENGMAGAGRRTPQREAAASAIGSAHMLDDTRNCWPSRRHQRP

SEQ ID NO: 8216 - protein, 585 aa, Zea mays
  VARIANT 1: note = Ancestral polymorphism is M, Derived polymorphism is I
  VARIANT 25: note = Ancestral polymorphism is V, Derived polymorphism is I
MAMAISSALPCSLLVAALMLLASVVQVQGITRHYDFNVTMANVTRLCASKSIITVNGQFPGPKIVAREGDRLVIRVTNHAQHNISLHWHGIRQLRTGWADGPAYITQCPIQTGQSYVYNYTVVGQRGTLWWHAHISWLRATVYGPLVILPKLGVPYPFPAPYKEVPVIFGEWWLADTEVVIKQALQLGAGPNVSDAHTINGLPGPLYNCSAKDTYKLKVKPGKTYMLRLINAALNDELFFSVANHSLTVVEVDAVYVKPFTVDTLLIAPGQTTNVLLAAKPSYPGANYYMSAAPYSTARPATFDNTTVAGILEYELYPDAPRPSASAGSFNEALPLYRPTLPQLNDTSFVGNFTAKLRSLATPRYPAAVPRTVDRRFFFAVGLGTHPCPANATCQGPTNTTQFAASVNNVSFVLPTKALLHSHFTGLSSGVYSPDFPVAPLAPFNYTGTPPNNTNVASGTKLMVVPYGANVELVMQGTSILGVESHPLHLHGFNFFVVGQGYGNYDPVNDPSKFNLVDPVERNTVGVPAGGWVAIRFLADNPGVWFMHCHLEAHTTWGLRMAWLVLDGSLPHQKLLPPPSDLPKC

SEQ ID NO: 8217 - protein, 797 aa, Zea mays
  VARIANT 642..797: note = Derived polymorphism lacks residues 642 to 797
  VARIANT 677..797: note = Derived polymorphism lacks residues 677 to 797
MMGPSTMAARAAGCCSSAALAFFRLHPLRCAVRPAAALVGGCSSGLRGGCRSRLAHSIVDLVMEELRSRRRVRVSAKIGLQGTKELPDNKIVKRTLQKGLLLEFQKDPERSLLAVVERPDGKKNWMVTDQNGVMSSIKPQQVTYVVPGIMNFDYSKIDEFLEKTQNLLDPTILECAWMELSEKDKSITVEEFAEIVYGTKESLESYCAHLLLSRDVVYFVKVESRDYSMYQPRSPAQVEELLRRKLAKEAADKELEEFVHLLKSAKALPMESKPPKASWLVEEKVRQKIESLQAYAVDACDDEQRRLAGNILKAMGFTRTSSAALKLLINVGYFPVHVNLDLFRYDVRIRYTDEVLSAAEELLVDSPDTDMHIRKDLSTLKVYAIDVDEADELDDALSATRLPDGRIKVWIHVADPTCLVKPHSIIDREAMHRGTSIFLPTTTFPMFPERLAMNSMSLQQGKECKSVTVSVILNLDGSAFIDIPHSVCAVNSIAEYTLENSVIKPTYMLTYESATELLYMNLEEEEELRILQEAARIREQWRRSQGSIDTAMIEPRIKVSNPDDPEPNINLYVEDQANPAMQLVSEMMILCGEAVAAFGFDNNLPLPYRGHPQSNTAVSVFSHLPEGPARSFANISVLRAAEMDFQKPVPHGVLGIPGYVQFTSPIRRYVDLLAHYQVKAFLRGDSPPYSAGDLEGMTFIASMHVKVARRLHSNSLRYWLLEYLRRQPKGRKYRALILKFVKDRMGALLLVEVGMQVTTTISRGKVGDQVSVTVETAHPRDDILSVREVVEDTKDSE

SEQ ID NO: 8218 - protein, 563 aa, Zea mays
  VARIANT 1: note = Ancestral polymorphism is M, Derived polymorphism is L
MRAMAEVMQEGCVENRQPLAASSSSVSDGSSCGGGERAGTSPPVSSSGNCISVLRRTSGPIRRTKGGWTLKEDETLRKAVEAFKGRNWKKIAEFFQDRTEVQCLHRWQKVLNPELIKGPWTQEEDEKIIDLVRKYGPTKWSIIAKSLPGRIGKQCRERWHNHLNPEIRKDAWTPEEERALIDAHQVFGNKWAEIAKVLPGRTDNSIKNHWNSSLKKKLEAYSNSSVLSVSKLFVHDDFKDKMKPVATDGHLDLNQMPSIGSKDSSGRAYHSIVSPLSQAYNLDSSCLSLSIPTMQPLTSHEMSSLIDGSAVTLVVQCLESDSVRDKDQEIDSVQEKGVEVSSTPDPVGVELESAPAKRGAELSSKNELHSTLGPLCYQILNMEDVIPISTPLCSEHNGAHQTSQQCMSPNGYTSLSPTIGKVSSQLTVDSILRMAADSFPCTPSILRKRKRNKATPGSGNELKTGGVNNDSFYTPNGTNGKDTTPRSFKTAASFSSLGSVDGLLTSVRSFDSSPPYQKRSKRMAIIKSVEKQLDFSADGLDTSGSEIMNSPCHNSQGVDSNRM

SEQ ID NO: 8219 - protein, 304 aa, Zea mays
  VARIANT 45: note = Ancestral polymorphism is A, Derived polymorphism is T
  VARIANT 137: note = Ancestral polymorphism is E, Derived polymorphism is D
  VARIANT 157: note = Ancestral polymorphism is K, Derived polymorphism is N
  VARIANT 177: note = Ancestral polymorphism is P, Derived polymorphism is A
MMRETYMDVLPPVDHIAASRSGGWFPGAARLWTAAENKQFERALAGLDLCRPDWEKVARAIPGRTVREVVSHFKSLQVDVQQIESGLVPMPVYGAGAGSFTLQWDGCYGPADSRHNGYRFGSGGCGRRHHGRTPEQDRKKGVPWTEEEHRLFLLGLKKYGKGDWRNISRNYVQTRTPTQVASHAQKYFIRLNSGGKDKRRSSIHDITTVNLTDDERAPSPSRSSLITTTSQPNAPAPAAAVIGGPFSSAAAAEAKQHQHGAGNLPPNRTSVVPAVYRMDDSQDHGLQCGPLRHQLVASHHSVLF

SEQ ID NO: 8220 - protein, 178 aa, Zea mays
  VARIANT 125: note = Ancestral polymorphism is G, Derived polymorphism is S
  VARIANT 33: note = Ancestral polymorphism is G, Derived polymorphism is R
MPRAPLLDDEFSTHPSLTTPNSPPQVGPGTPFGSVPPSPIIVVSSPPGSGPDPGSGSGGGGSGSGGGPFQPPIIYPPPLAPPLAPGAGQTLWCVAKPTVPDPIIQEAIYYACGAGAGCDSILPSGSCYRPNTVLAHASFAFNSYWQQAKATDGTCDFGDTATIVTRDPSYEECKFDLL

SEQ ID NO: 8221 - protein, 189 aa, Zea mays
  VARIANT 142: note = Ancestral polymorphism is G, Derived polymorphism is R
  VARIANT 177: note = Ancestral polymorphism is V, Derived polymorphism is A
MHKTAQARFTGRTAAFSGPTAESQLPCSSMASTVRGREGPASPVRHWPRSKRSDAENTGEAQRRHQGRRPPRRRPKVTVPTISLPSASWRTHGRSAICRLIPRPTTAEADPQPTEPTEVMYRTRADDFLGRCKSIVYQNNNGLCPLLTICNVLLLKNVISLNPDAEEVSQKRLLSLVAERLIDPNIAGQ

SEQ ID NO: 8222 - protein, 269 aa, Zea mays
  VARIANT 140..269: note = Derived polymorphism lacks residues 140 to 269
  VARIANT 120: note = Ancestral polymorphism is D, Derived polymorphism is G
MDAPFFHELRRQASSYLTGKIRSARLALTDVTPTQLMTEEATNGDASPPNVKTMGLIARQAFEVDEYVRITDILHRRFASFDPRQGQGQWQWREAYKALLLLDHLLTHGPRSVAVEFQKDREAIERMATFQHIDERGFNWGRTVTSKSERVLKLLERGPFLEEERERARKIAREIKGFGSFNLSSASHAAPQPPPGDEGSRGYGRSNSQFEQRWRHKDGDDSDKENLIQSPEPARVAREVEAEPEEPHHHPFHGLGQKQRPEAMLLLSQ

SEQ ID NO: 8223 - protein, 648 aa, Zea mays
  VARIANT 430..648: note = Derived polymorphism lacks residues 430 to 648
  VARIANT 11: note = Ancestral polymorphism is I, Derived polymorphism is T
MAKGEGPAIGIDLGTTYSCVGVWQHDRVEIIANDQGNRTTPSYVAFTDTERLIGDAAKNQVAMNPTNTVFDAKRLIGRRFSDPSVQSDMKLWPFKVIPGPGDKPMIVVSYKGEEKQFAAEEISSMVLIKMKEIAEAYLGSTIKNAVVTVPAYFNDSQRQATKDAGVIAGLNVMRIINEPTAAAIAYGLDKKASSSGEKNVLIFDLGGGTFDVSLLTIEEGIFEVKATAGDTHLGGEDFDNRMVNHFVQEFKRKHKKDISGNPRALRRLRTACERAKRTLSSTAQTTIEIDSLFEGIDFYSTITRARFEELNMDLFRKCMEPVEKCLRDAKMDKSSVHDVVLVGGSTRIPKVQQLLQDFFNGKELCKSINPDEAVAYGAAVQAAILSGEGNEKVQDLLLLDVTPLSLGLETAGGVMTVLIPRNTTIPTKKEQVFSTYSDNQPGVLIQVYEGERARTKDNNLLGKFELSGIPPAPRGVPQITVTFDIDANGILNVSAEDKTTGQKNKITITNDKGRLSKEEIEKMVQEAEKYKAEDEEVKKKVDAKNTLENYAYNMRNTIKDDKIASKLSADDKKKIEDAVDSATSWLDSNQLAEVDEFEDKMKELEGICNPIIAKMYQGAGAGMGDAAGMDEDAPSGGSGAGPKIEEVD

SEQ ID NO: 8224 - protein, 311 aa, Zea mays
  VARIANT 189: note = Ancestral polymorphism is P, Derived polymorphism is S
  VARIANT 41: note = Ancestral polymorphism is V, Derived polymorphism is I
  VARIANT 37: note = Ancestral polymorphism is G, Derived polymorphism is D
  VARIANT 16: note = Ancestral polymorphism is S, Derived polymorphism is F
MSVDSERSTTESSTASGLGYEDADGLTKYFTVGDSRGRVFVFSTAGDMLLELEAAASGGECRVIALLAYLSLRRHQLLLSRAARHRGRLSIRRSPPAAASSPLSPVASSSLPSGRRRSLPDARAHCPATPCARGPAVCAVGIGLPVYSTFRAIEKKDEQEKERMLLYWAAYGSFSIAEVFADKLLSSVPLYYHVKFAILVWLQFPSNSVSFPCPFHPPSKFHILFNFTILPLHRSSWIYTDESNTVQNQTKFVSSHEDEIRFIENMAIRGATTANHIVNGLDQPEETQAVNTIEGPNTTVTEEAGVSGTET

SEQ ID NO: 8225 - protein, 87 aa, Zea mays
  VARIANT 76..87: note = Ancestral polymorphism lacks residues 76 to 87
MALLAPAISGEVGLRLLLAPLSSNIVMRTASCTFLAFFETGITRSNEDLYKTIWFHARKINHVSHFLNKRSDGAILGAEEGHAHGFH

SEQ ID NO: 8226 - protein, 160 aa, Zea mays
  VARIANT 29: note = Ancestral polymorphism is T, Derived polymorphism is I
  VARIANT 40: note = Ancestral polymorphism is T, Derived polymorphism is I
  VARIANT 65: note = Ancestral polymorphism is C, Derived polymorphism is W
  VARIANT 78..160: note = Derived polymorphism lacks residues 78 to 160
  VARIANT 83..160: note = Derived polymorphism lacks residues 83 to 160
  VARIANT 85: note = Ancestral polymorphism is R, Derived polymorphism is C
  VARIANT 107..160: note = Derived polymorphism lacks residues 107 to 160
  VARIANT 131: note = Ancestral polymorphism is C, Derived polymorphism is Y
  VARIANT 133..160: note = Derived polymorphism lacks residues 133 to 160
  VARIANT 135: note = Ancestral polymorphism is F, Derived polymorphism is L
MASPKPLLLLATSFLSCGLLVAADYAPMTLTVVNNCPYPTSYGVSVVDGFNVGLSVTPHEGRGNCPVLACRKNLTETCPGELQLRSPAGSVLACKSGCEAFRTDELCCRNMYNSPHTCRASKYSEFFKRECPQAFTYAHDSPSLTHECAAPRELKVIFCH

SEQ ID NO: 8227 - protein, 432 aa, Zea mays
  VARIANT 212: note = Ancestral polymorphism is G, Derived polymorphism is D
  VARIANT 195: note = Ancestral polymorphism is R, Derived polymorphism is S
  VARIANT 151: note = Ancestral polymorphism is G, Derived polymorphism is S
  VARIANT 85: note = Ancestral polymorphism is L, Derived polymorphism is P
  VARIANT 82: note = Ancestral polymorphism is V, Derived polymorphism is D
MRPAEIMDRRRFAETEGKRAHDPLYSPRRAARATATGFPVGEHGEVLAGPVIVGAGPAGLAVAACLTMRGVPYVLLERHGCVASLWRHRTYRRLRLHLPKRFCELPLMPFPPSYPAYPTREQFLAYLEDYIATFGIRPFFRQAVVSAEHDGDFWCVRTLDGGGTSREYRSKWLVVATGENAEPVVPDIDGIHAFRGLVIHSSDYRSGESYRGKKVLVIGCGNSGMEVSLDLSNHNVHTSMVVRDSVHVLPREIMGVSTFGLSLWLLTHLSIQKVDQILLVLTQLVLGDTARLGIPRPNIGPMELKRVSGKTPVLDVGTIAKIKSGDIKVYPAIQSFQEHGVQFIDGKSESFDVVILATGYKSNVPYWLKDKDLFSEKNGFPHNSNEWKGKNGLYAAGFSRRGLLGVSMDATNIADDILGCWNDFGYERHKRK

SEQ ID NO: 8228 - protein, 137 aa, Zea mays
  VARIANT 17..137: note = Derived polymorphism lacks residues 17 to 137
  VARIANT 46: note = Ancestral polymorphism is S, Derived polymorphism is T
  VARIANT 73: note = Ancestral polymorphism is S, Derived polymorphism is P
  VARIANT 91: note = Ancestral polymorphism is A, Derived polymorphism is D
MAPKAEKKPAEKKPTEEKAEKKPRAEKRVPGKEGGEKKGKKKAKKSVETYKIYIFKVLKQVHPDIGISSKAMSIMNSFINDIFEKLAAEAAKLARYNKKPTITSREIQTSVRLVLPGELAKHAVSEGTKAVTKFTSS

SEQ ID NO: 8229 - protein, 460 aa, Zea mays
  VARIANT 394..460: note = Derived polymorphism lacks residues 394 to 460
  VARIANT 36: note = Ancestral polymorphism is G, Derived polymorphism is S
MPHRDVISATAAIGALTRGGRHRDALALFSRVLADGVAPNEFTFGTVLRSATALRVRAPRVGVQLHACAAKLGLCSNVFVGSALLDHYAKMGAMTEAQRALDDTREPNVVSYTALIAGLLKNGMFDEADRLFRRMPERNVVSWNAMIGGYSQAGLGEEAVNLFLEMCRGGVSPNESTFPCVLTSVASAGTLGVGRSIHASAIKFLGKLDVYIGNSLVSFYARCGSLEDSVLAFKKINRKNVVSWNALICGYAQNGKGEEALDAYRMMRATGLKPDNVTLLGLLFGCNHTGLVDEGYALFKTAEREQPGILKPEHYACVVDLLSRAKRFDEARRFLEELPFEPGIGFWKALLGGCQIHWNSKLAESVAKRIRALDPKDTSSYILLSNVYSASGSWQSVSMVRWEIKEKGLKRITGCSWIEVQEKVHVFFNGDCRHHQSDEIYSMLESCFYSMEDEGEHSIV

SEQ ID NO: 8230 - protein, 182 aa, Zea mays
  VARIANT 94..182: note = Derived polymorphism lacks residues 94 to 182
MVMTLTRDEAEGSKDMQGVRAHAEELSTLSSAVAAGTDGTPRPPSSGAAARRAMAAEGVFECKTCSKRFPSFQALGGHRTSHTRLQARTMLSDQAAAERDRARAHECAVCGLEFAMGQALGGHMRRHRGEAPPPAAQPADRDMPDLNLPPLDDGNGSADGQGPRRSEDDRGSSKPQLLNLLV

SEQ ID NO: 8231 - protein, 74 aa, Zea mays
  VARIANT 9: note = Ancestral polymorphism is D, Derived polymorphism is N
  VARIANT 31: note = Ancestral polymorphism is R, Derived polymorphism is W
MPLFHVRSDRSRPVAFRSFPVPACAPTVRARRQERQVQGGGSEELGSRHWVRPWREGDGRRFYANLLAPHAASL

SEQ ID NO: 8232 - protein, 191 aa, Zea mays
  VARIANT 68: note = Ancestral polymorphism is K, Derived polymorphism is E
MDDDASSSPAASYIRLVQHLIEKCICYKLNKEECMETLEKHAKIMPVVTSTVWKELEKENREFFETYKKDRGGGGGGPRNLQEAAAAGHHPPPRLQVQQSCCSQEPALEQKKHPPSDGVQEHNRVVVEKEKRKQDPPSASASADGQEQRVVEKKEKRKDPPSDGQERRVMAKENSRKDPSASSKRSDKDND

SEQ ID NO: 8233 - protein, 142 aa, Zea mays
  VARIANT 130: note = Ancestral polymorphism is A, Derived polymorphism is T
  VARIANT 118..142: note = Ancestral polymorphism lacks residues 118 to 142
  VARIANT 105: note = Ancestral polymorphism is S, Derived polymorphism is G
  VARIANT 103: note = Ancestral polymorphism is P, Derived polymorphism is R
  VARIANT 65: note = Ancestral polymorphism is N, Derived polymorphism is K
  VARIANT 62: note = Ancestral polymorphism is L, Derived polymorphism is I
  VARIANT 61: note = Ancestral polymorphism is I, Derived polymorphism is T
  VARIANT 47: note = Ancestral polymorphism is Y, Derived polymorphism is N
  VARIANT 42: note = Ancestral polymorphism is I, Derived polymorphism is S
  VARIANT 41: note = Ancestral polymorphism is D, Derived polymorphism is H
  VARIANT 38: note = Ancestral polymorphism is L, Derived polymorphism is I
MEGGAGDAQVEGRWSIARWQGRRAAAMEKGAHASATVLMMDIECFSYLNRALESPLSPIVIIATNRGICNVSICISELMFSMRLILRKLEVSVRMPNPRLVWPRSNRTDTSPRFFLLLKARRKCSCQLKAMLYCIDLLHMFL

SEQ ID NO: 8234 - protein, 309 aa, Zea mays
  VARIANT 216: note = Ancestral polymorphism is M, Derived polymorphism is V
  VARIANT 59: note = Ancestral polymorphism is A, Derived polymorphism is G
  VARIANT 39: note = Ancestral polymorphism is L, Derived polymorphism is P
MDRQSEDVNYEEEFVVNPRGNKLFVCSWTPQQDRQPKALIFICHGIAAECSISMRDTAARLVRAGYGVYGIDHEGHGRSSGSRCYVPNFGNIVADCSSHFTSICEKPQNRGKRRFLYGISMGGSVALLLHRKAPGYWDGAILLAPMCKISDDMRPHPIVVSALTMVCAVAPGWKVIPTPDIIDKVCKDPEMRKEVRSNPYIYRGKLPLKTCHELLMVSLDIEKNLDQVTMPFLVLHGGDDVVTDPSVSKLLFEKAPSKDKTFKLYPGMWHALTAELPDDVERVYADIITWLEERAVICAASVSSATPRV

SEQ ID NO: 8235 - protein, 253 aa, Zea mays
  VARIANT 112: note = Ancestral polymorphism is C, Derived polymorphism is R
  VARIANT 98: note = Ancestral polymorphism is S, Derived polymorphism is A
MAPPSSDGQLGSEPTMEDTKSLLPYRTADSSLRALAGQAEGFGRHAIGGLHGDVYHVTTLDDDGPGSLREGCRRREPLWIVFDVSGTIQLSSGVVVSSYKTIDGRGQRVRLRGWGLLLRECEHVIVCALEVEGGRGHDADAVQIKPRSRHVWVDRCSLRGFEDGLVDVTGGSTDVTVSRCHLAAHDKAVLIGASSAHVEDRCIRVTIHHCFFDGTRQRQPRVRFGRVHLYNNYTRDWGIYAVCASVESQAQTI

SEQ ID NO: 8236 - protein, 522 aa, Zea mays
  VARIANT 333..522: note = Derived polymorphism lacks residues 333 to 522
MVELGLTLTLRTLPVPLLSVSLAASVLYLLHRSHGRKNPKKNGKASQPPLPPGPPTATLLAKLLSLMRRPRFDIGPYLRELHARHGPVISLRLHTTTVFVADRRLAHRVLVREGAAFADRPPLVEPNPLFNAGNINSAPYGAYWRLVRRNLAAETLHRARLGLLAPARRWACDALVASLLRDASSSSESGGGVVTARPLLRRAMSELLAYMCFGERLPPDVLDEIDALERHALLTATSFPVFAIFPPVTKRLFRRRWGAHVAVRRRQEELYASLIHATSAVADGDQPPCYAKSLLALRVADDGDRPLTDAEMVSLCSEFLSAGTDTTVTLLEWIMAELVNHPDVQAKVYDEVTRAEPQLLDDAVNLQALPYLKAVVLEGLRLHPPGHYLVPHAVRSDAEIGGYTAPKGAEVNFMVAVIGRDESVWTAAREFRPERFLVGGEGNDVDITGSREIKMMPFGAGRRMCPGYALGTHHAEFFVGSLVRELNWLPAEEGETVNMEETVEFTTVMKYPLRARIIPRNN

SEQ ID NO: 8237 - protein, 140 aa, Zea mays
  VARIANT 23: note = Ancestral polymorphism is T, Derived polymorphism is M
  VARIANT 13: note = Ancestral polymorphism is R, Derived polymorphism is W
MKTFDPWPVFFHREWKRNCPFLTGFTITGFIITKMTANFTEEDLKNSKFVQNIFSLLAQRELSPRTKNQAKNLWTKPPRLDACPIESKFWGTYAQHDLLSWAEAEFLHWWIPKDCPLTPSSKATIAAAFSTDGRVLASTR

SEQ ID NO: 8238 - protein, 103 aa, Zea mays; identical to SEQ ID NO: 2445
  VARIANT 55: note = Ancestral polymorphism is T, Derived polymorphism is P
  VARIANT 51: note = Ancestral polymorphism is I, Derived polymorphism is L
  VARIANT 8: note = Ancestral polymorphism is G, Derived polymorphism is W
  VARIANT 1: note = Ancestral polymorphism is M, Derived polymorphism is I

SEQ ID NO: 8239 - protein, 196 aa, Zea mays
  VARIANT 39: note = Ancestral polymorphism is G, Derived polymorphism is D
  VARIANT 117: note = Ancestral polymorphism is P, Derived polymorphism is A
MEGADGKQESETTSIIKVPKEPAIIINGVPDFPFDCTTGSQSAVKNDAESHVDPRFGEWLEGRKVRKLFGDTYFVGKVAKYDIESNWYTVIYDDGDQEDLEWRELEKVLLPLDITVPLKTLVIDKCKLKGSVSDSKPKGAEDTPGSVALVPVQDDTQESSRKQNSTLIRNAMTARAERLKRENLRVQSRRSRTRLS

SEQ ID NO: 8240 - protein, 834 aa, Zea mays
  VARIANT 377: note = Ancestral polymorphism is W, Derived polymorphism is R
  VARIANT 393: note = Ancestral polymorphism is R, Derived polymorphism is C
MKAKALPFIAFEHKRDAYGFAVRPQHLQRYREYANIYKEEEEERSDRWKNFLDRQAEDGESSGEDAKVAPSNEEDGVAAKDGRTEPRPHKIQIWSEIRPSLGHIKEMMNSRVKKQSSSVNDGYTRDEPHPGNSEGSKPSEDSDDEFYDVEKVDPSQEVPATDIANAESGTNRGAEQEHYPWKEELECLVRDGLPMALRGELWQAFIGIGARRVEGYYEGLLAADSESQDNKYPGSPTSECGDGKPKPSQTFSSEKWKGQIEKDLPRTFPGHPALDEDGRNALRRLLTAYARHNPPVGYCQAMNFFAGLLLLLMPEENAFWALTGIMDDYFDGYFSEEMIESQVDQLVLEELVRGRFPKLVNHLDYLGVQVAWVTGPWFLSIFMNMLPWESVLRVWDVLLFEGNRVMLFRTALALMELYGPALVTTKDAGDAVTLLQSLAGSTFDSSQLVLTACMGYQAVGEARLQELRNKHRPSVISSMEQRAKGLRVWRDTNRLASRLYNFKRDTEPLVSLSEEQSNDLTDGDKNQEANCSNVDDMYHGLTVNSEIDSLPDPKDQVVWLKGELCQLLEERRSAVLRADELETALMEMVKQDNRRELSAKVEQLEQELSELRQALSDKQEQEQAMLQVLMRVEQEQKVTEDARIFAEQDAAAQKYAAHILQEKYEGAMASLAQMENRAVMAETMLEATIQYQSSQQKAQLPSPSPSPRTPTRDASPGQGNQDSSQEFQPRRISLLAPFSSLGWRDKNKGKQNGSDESTNGKLNNSTDQGVETPKKDDEKKADSPKESEQIVRTPERDNELRLGTPKMDSEVPSVEMAANSTNGLEDQLEEIKLD

SEQ ID NO: 8241 - protein, 54 aa, Zea mays
  VARIANT 15: note = Ancestral polymorphism is E, Derived polymorphism is A
MEHGYPCNGCGGNKEKRPPLKRGQLKVQIVKTLLGSLAVPAGAGAANRERSFGR

SEQ ID NO: 8242 - protein, 88 aa, Zea mays
  VARIANT 12: note = Ancestral polymorphism is G, Derived polymorphism is D
  VARIANT 84: note = Ancestral polymorphism is S, Derived polymorphism is Y
MATGGCEAAPLGRARLVLVKTPSGNPLPRRRGQVKERIVRDIADALATAAVLACGDRTVVGAGKKGEGGRAPASPSPGAKKKWYPRES

SEQ ID NO: 8243 - protein, 235 aa, Zea mays
  VARIANT 134: note = Ancestral polymorphism is A, Derived polymorphism is V
  VARIANT 91: note = Ancestral polymorphism is R, Derived polymorphism is L
  VARIANT 60: note = Ancestral polymorphism is L, Derived polymorphism is P
  VARIANT 50: note = Ancestral polymorphism is G, Derived polymorphism is D
MIFLNSLFSYLALLILIKWCTGSQADLYHVMIYMFLDPAGDLGENQLFWGQKKLQILLLPLALVVVPCMLFPKPFILKRLHKERFQGHTYRFLGTSEMDPDSEPDSNRTRHDDFNFSEVFVYQMIHSIEFVLGVVSNTASYLRLWALSLAHSELSTVFYEKLLLLAWGYDSLIVKLVGLIVFSFATYFIVLMMETLSAFLHALCLHWVEFMNKFYHGDGSKFKPFSFALLADDED

SEQ ID NO: 8244 - protein, 219 aa, Zea mays
  VARIANT 70: note = Ancestral polymorphism is L, Derived polymorphism is R
  VARIANT 71: note = Ancestral polymorphism is A, Derived polymorphism is G
  VARIANT 102..219: note = Derived polymorphism lacks residues 102 to 219
  VARIANT 105: note = Ancestral polymorphism is D, Derived polymorphism is V
MYADPGEKTRGAESSLDRSDRLPWRPDTAPAFCASWPGVRQCAPAGRVTKLVLDALNLTGSLTVALLAPLAELRVLSLKSNALTGLITEALPRALPNLKLLYLADNRLQGCVPATLAMLHQATVIVLSGNRLTGQISPSLAALRRLTSLLLDRNLLTGVVPLLAQRTLRALNVSANRLSGEIPRSLAARFNASSFLPNLGPSTISCRTGHGSRPSSLLL

SEQ ID NO: 8245 - protein, 525 aa, Zea mays
  VARIANT 25: note = Ancestral polymorphism is V, Derived polymorphism is A
  VARIANT 139: note = Ancestral polymorphism is L, Derived polymorphism is H
MELVGGFASNTSTTPLLCCCIAFFVSLIFLFHRRGKSTKSKSALPPGPPALVFLAKFLALRRSIFDLTPLLRDLHARHGPVISVHLFTTLVFVADRRLAHRVLVRDGATFADRPPLSEPDPLFSAGDINTASYGPYWRLVRRNLAADALHRARVGLFAPARRWACEALVTSLLTRSQERGSSFEEAEPVTVRPFLRRAMFELLVYMCFGARLSQGTVDEIEALERHVLASFTAFPVFAFFPPLTKRIFRKRWEAHVAVRRRLDELFAPLIHAARRHGEDGRPPCYAESLLALRVPGEGGRPLTDAEIVSLCSEFLNAGTDTTVTLVEWIMAELANNPGVQAKVYEEVTRVKPDALDDSAGNLQSLPYLKAVVLEGLRLHPPAHFLIPHGVRSDGDAAEIGGYTVPEGAEVNFLVAEIGRDEAVWTAAREFRPERFLDGGEGCDVDITGSREIKMMPFGAGRRMCPGYALGMHHAEYFVGSLVRELEWLPAAEGEAVNMEETVDFTTVMKHPFRARIVPRNKSLLT

SEQ ID NO: 8246 - protein, 479 aa, Zea mays
  VARIANT 338: note = Ancestral polymorphism is D, Derived polymorphism is V
MPRHWSSSPMAMRHQFGASVLLHLLVLAGAGAMVTADQESDRIRELPGQPPNVGFSQYSGYVTVNPARGRALFYWLVEAVPAAGPIAPLVLWLNGGPGCSSVGYGASEEVGPFRIRPDGQTLYLNPNSWNKAANLLFLESPAGVGFSYSNSSLDLYTAGDAKTALDAYAFLVNWLERFPQYKYREFYIAGESYAGHYVPQLAQLIYEKNKGIQNPTINFKGFMVGNAVTDDYHDYLGTFEFWWTHGLISDKTYHNLKATCLLESSQHPSPDCVKNLNLASAEEGNIDPYSLNTKPCNDTASLKLGLGGRYVSAFLFCLLEFPLCNLVAVSFHISTSPDFHFLVTEIAIPFTFDTIHTHQRAMQCHDIVGSYWADSPRSMLPIYQELIAAGIKIWVFSGDTDAVVPVTATRYSIDALKLPTLVNWYPWYDHGKVGGWSQVYKGLTLITIAGAGHEVPLHRPRQALIMFRHFLQNKPMPAQ

SEQ ID NO: 8247 - protein, 657 aa, Zea mays
  VARIANT 15..657: note = Derived polymorphism lacks residues 15 to 657
MPPTTAPAAAAALPSPSHRRLPAAKSVWLNPNLPSSHPLHQRHKSAAELQQRQHDDRTIDVPALVTALSAARTAPDLAAVLATHRPVSARLLGALLSRLPDPRRGVALLDLLAPDLPAPTLLIPYNLLLRSACRAGELRLASGLLLEMRERGVTPDAFSYSTLLAALTRAGHLDHALTFLPLMEDDAVAPDLILFSNLIHLALRGGDAPKALALFSRLRAAGIRPDLKAYNAAVAAYCKSDLLRDAKRMLLHDMPADGVAPDAETYSPILAALARRGRHLAAVSLFSHMRAVARVKPDISVFNIILNAYGQLDLAREADRLFWSMRRAGVPPSVVTYNTMLRVYGDAGLFGEAVHLFDLMRSTSDGNGGAGSSVKPNVVTYNTMITIYGKSLEDEKAGRLVQEMQAIGVQPDAITYSTILSIWVKAGKLDRAARLFEKLREAGTEIDPVLYQTMVVAYERAGLVSQAKRLLRDLKDPEGIPKETAIKILASAGRLEEAAWLFRRAVNTGEIKDSSVHRAMMDLYAKNRRHRNVIEVFDEMRKLGQLPDSEIIATAMNAYGKLKEFDKAAALYQAMREAGCVFSDRVHFQMISLLGAQKDFKALEVLVGELSHDPSIDKRELYLVAAGVYERAYKFDKASQIISQIRSSNEFDVQKLR

SEQ ID NO: 8248 - protein, 742 aa, Zea mays
  VARIANT 607..742: note = Derived polymorphism lacks residues 607 to 742
  VARIANT 570..742: note = Derived polymorphism lacks residues 570 to 742
MAAPGLDKVMAFLTDHGFAGAASALRDDVLERTAAGDESHDAALDPHLPPLRMPASAGGAGAGAGAGAGAGTPTPASPGSSSGSASSSAFVSLRSTPSGLLNPYGLWSPRHSQSDASSSEMEFGTARQYDTTDLFFQEDWLYDDHLFPSKLDDEDDEGKEEDKFVLDAHDGSEQVEIGKLGAGHNHRHEHIGGDRCEGCAEVYICSSPLCGCCGGGLKNDGLDVARSSSSTVYGRYKIMDDQTEILDDCAQDAFQLKQSRDIMFECGMTRDPGRGYDDSGLSVVEKELQILSSFDTVVKAIFCLCAGLILFMNFIDHGTYDFTENGELNGSCDKNLKSSIHKEYPKGHRIQPFPESGDLDEADEFRHVGSLNTDVQHSTALKAEEDAETNIDLALSDFHREYEVFELRIIHRKNRTGFEENKDFPIVLNSVVAGRYYITEYLGSAAFSKVVQAHDLRTGMDVCLKIIKNDKDFFDQSLDEIKLLKFVNKYDPLDEHHVLRLYDYFYHQEHLFIVTELLRANLYEFQKYNQESGGEVYFTLPRIQVIARQCLEALVYLHRLRIIHCDLKPENILIKSYSRCEIKVIDLGSSCFLTDNLCLYVQSRSYRAPEVILGLPYDQRIDIWSLGCILSELYTGEVLFPNEPVSVMLAQMIGITGPIDMEMLELGQETQKYFTDDYDLFTENEETDQLEYLIPEKSSLRQHIQCPDSEFVDFLSYLLQINPRKRPTADEALQHPWLSFSY

SEQ ID NO: 8249 - protein, 374 aa, Zea mays
  VARIANT 249: note = Ancestral polymorphism is V, Derived polymorphism is A
  VARIANT 2: note = Ancestral polymorphism is A, Derived polymorphism is V
MADCMQEWPEPVVRVQALAESGLSVIPRCYVKPPCDRPAVSPAAATTVQETTEPSDMSIPVVDLGALLAADGGAAVTEAVAAACREWGFFQVVGHGVRPELLRAAREAWRGFFRRPLAERQRYANSPRTYEGYGSRLGVQKGAALDWGDYFFLHLAPEAAKSTPKFWPAVPGNCKEVSEEYGREVVRLCELLMRVMSVSLGLDEAHLQRAFGGAGCCGATLRANYYPRCPQPDLTLGLSAHSDPGVLTALLADEHVRGLQVRRSAGDWVDVRPVRDAFIVNVGDQVQIMSNSVYKSVEHRVVVNAEEERISLAIFYNPKGDVPISPAPELVTAAKLPPLYPTMTFDEYRLYVRSKGARGKAQIEALKGQASPEN

SEQ ID NO: 8250 - protein, 661 aa, Zea mays
  VARIANT 90..661: note = Derived polymorphism lacks residues 90 to 661
  VARIANT 161..661: note = Derived polymorphism lacks residues 161 to 661
  VARIANT 447..661: note = Derived polymorphism lacks residues 447 to 661
  VARIANT 454..661: note = Derived polymorphism lacks residues 454 to 661
MMNPVVTAALYRLVKESAAMYCELTEMSGPNKAPFSGVADDLKGRAGCYKQDWNHGFRSGLRILAPTLYIFFASAVPVIAFGEQLSKDTCWLSCSHHSALTTVETLASAAICGIVHSIIGGQPLLIVGVAEPTIIMYTYIYNFAKNQPNLGEKMFLPWATWVYIWTAVMLFLMAIFNVAAILNKFTRFAGELFVMLITVLFMQEAIKQERKVIAGTAWQRSLIADYGVPLMVILWTSLSYSLPSRIPSGVPRRLFTPLPWEPKSLQHWTVAKDLFSVPTVHIFLAIVPATMVAGLYFFDHTVASQMSQQKEFNLKNPSAYHYDILVLSLTTLICGLLGIPPSNGVLPQSPMHTRSLAVLKRQLLRKKMVQTAKEGMMNNATSSEVYVKMQDVFIKMDHGGDTVSAHKEPKDLKDAIIPEGNGSGTVPEVFDPEKHVDAYLPVRVNEQRVSNLLQSLLIAGCIRVTPLIQKIPTSVLWGYFAYMSIDSLPRNQFWERIQLLFITPQRRYKVLEGAHASFMESVPFNTICTFTLFQLIYLLIVFGMTWIPVAGILLPLLFFFFLIIIRQHFIPKYFDPSHLRELDAAEYEELKGFTPDPSVCEDESVRSGDAQPGYASEILEEFTTHRGELKRRNSTFHDGRLLQLNSVKMTRELSRVPSWLT

SEQ ID NO: 8251 - protein, 249 aa, Zea mays
  VARIANT 29..249: note = Derived polymorphism lacks residues 29 to 249
  VARIANT 55..249: note = Derived polymorphism lacks residues 55 to 249
  VARIANT 103: note = Ancestral polymorphism is A, Derived polymorphism is T
  VARIANT 139: note = Ancestral polymorphism is D, Derived polymorphism is Y
  VARIANT 149: note = Ancestral polymorphism is W, Derived polymorphism is S
  VARIANT 171..249: note = Derived polymorphism lacks residues 171 to 249
  VARIANT 191: note = Ancestral polymorphism is G, Derived polymorphism is R
MGDRRVLLVASPEVAVLGYDGVVSFASVQDTVDAVPPNNQVRTVIRIGPGVQRQQVCIPRTKNFITLCGSSIKDTLICWNNKTTTCIKHTQVSGQAATVRVTADRCAFYGCRFLDWQKTLHLHGGKQLLKNCYVEGSCDFIFGDSTAFWSIAISTTNQRGILLLMARNPRQNQLDLCSSKTFMDRCIEPARWHNWDKPENEQTVCFYEYRCSSPGSSVSGRTSIDPDIENPWLVHRLGTPVPVSVSSLQ

SEQ ID NO: 8252 - protein, 259 aa, Zea mays
  VARIANT 228..259: note = Derived polymorphism lacks residues 228 to 259
  VARIANT 224: note = Ancestral polymorphism is S, Derived polymorphism is L
  VARIANT 197..259: note = Derived polymorphism lacks residues 197 to 259
MMSGRSGGRDAEGEWEVRPGGMLVQRRDGEAAGPVIRIRVSHGANFREVVVPAQATFGELKRILVQTTGLEPERQRLFFRGKEKSDREFLHTAGVKDGAKLLLLEKPAPANIEQKVEPVIMDESMMKACAAVARVRVEVDKLSAKVCDLEKNVLGGRKVEDKEFVVLTELLMMQLLKLDGIEAEGEARAQRKAEVRRVQSLVETLDKLKARNANPFSDHNKAVSVTTQWETFENGMGSLSAPPPRVSSTQANTDWEQFD

SEQ ID NO: 8253 - protein, 21 aa, Zea mays
  VARIANT 2: note = Ancestral polymorphism is M, Derived polymorphism is I
  VARIANT 13: note = Ancestral polymorphism is L, Derived polymorphism is P
  VARIANT 19: note = Ancestral polymorphism is V, Derived polymorphism is M
MMIYGKQLMRSFLLLYLAVEK

SEQ ID NO: 8254 - protein, 236 aa, Zea mays
  VARIANT 42: note = Ancestral polymorphism is V, Derived polymorphism is A
MAASASTTLFSPCALTSKLGAGHASYGSVRRANVRRRGRLSVVAVQTGPQKPSPLSSQAAAAEDEADALQKLLKREYKYGVGEFYSVALTKDCQQADTGTKMIHKGKNSRSRIISKGISAGKSRNCYRGLVLMNSSAENAYNSSQCDSLLIGDNAAANTYPTIQVGCTSGRVEHEASTSKIGEDQLFYFQQRGVDHEKAVAAMIGGFCRSVFEHLPYEFAQEVDALMNLKLEGSVG

SEQ ID NO: 8255 - protein, 329 aa, Zea mays
  VARIANT 76..329: note = Derived polymorphism lacks residues 76 to 329
  VARIANT 78..329: note = Derived polymorphism lacks residues 78 to 329
  VARIANT 195..329: note = Derived polymorphism lacks residues 195 to 329
  VARIANT 222..329: note = Derived polymorphism lacks residues 222 to 329
MAVGAEVPRRGALRGLGHDIRVQRMLIWSGTWKEHHGHGVYGSLRRRDTVVGSQSVGFYVPPQEDIIDDVGLGARYSERSPIVEGNMSVGSVLASDGCDVPLQGSITEPFFQQDKHDHTVIVGPKSCKRKSPILSYCADGDGADGGGSSNQSSKVSIREGPSTHATVTPGFDRISDVLPTDASESEHLPECITAQDTTISQPDSRKAHLSALQQERGEKVTQDLEDISANIGSVEKDHIHGDLTLPSTSVLLSISCNGANQGSKYETNLQPGTATEKVLFQNSDPASINKHSVLQNNNKTPVKDPEKKQQAVNEEARKEGGNDNSSHET

SEQ ID NO: 8256 - protein, 289 aa, Zea mays
  VARIANT 174: note = Ancestral polymorphism is A, Derived polymorphism is T
  VARIANT 96: note = Ancestral polymorphism is P, Derived polymorphism is R
  VARIANT 88: note = Ancestral polymorphism is P, Derived polymorphism is L
MSACFLPSAPDLKIEQIPASSSLSPTSARTPPLMWLPWVKTRPSSATSTSNSPSTALVAAASPRLSFSSPSLKDLQALLLSDAATPSPPPAAPCSPSSSVRVFHRVRVAASALRALRTLQAPPSSGGGAAFEADRRVVLYFTSLHVVRSTYEDCRAVRAILRGLRVAVDERDLAMDTRYFQELAALLPRPVAPRRVTLPQVFVGGRHLGGADEVRRLHEAGELRRVVAGAVAASLATCGRCGGERYVLCGSCNGSHKRYSAKGGSGFRTCAVCNENGLVRCPDCSPPDV

SEQ ID NO: 8257 - protein, 188 aa, Zea mays
  VARIANT 123: note = Ancestral polymorphism is A, Derived polymorphism is T
  VARIANT 100..188: note = Ancestral polymorphism lacks residues 100 to 188
  VARIANT 19: note = Ancestral polymorphism is D, Derived polymorphism is G
MKTFPLSRGSTISLALFSDVSNSRELLDLMQSGKLEPAVALLNASLVPDVFPILAAALKALLSKTRESLTTRTLHSELVYNYSGSKHVIDLAAVGAFALRVGPITESLKRCGISDNTTYILAACFDASDEEMKAVEKLISGTEIDLTELERRANQPQILKHYKIPPQELSISTLPDAIVCRIAARDAL

SEQ ID NO: 8258 - protein, 568 aa, Zea mays
  VARIANT 238..568: note = Derived polymorphism lacks residues 238 to 568
  VARIANT 244: note = Ancestral polymorphism is A, Derived polymorphism is V
  VARIANT 250..568: note = Derived polymorphism lacks residues 250 to 568
  VARIANT 253..568: note = Derived polymorphism lacks residues 253 to 568
  VARIANT 269: note = Ancestral polymorphism is L, Derived polymorphism is S
MTSLLLPPPQAAAAAYGCCHCLLLASTTVPARSGCVGRASRITLALRCLPITGHRLRSRKVACQATTETEPEGNGDEEDKKEFGDDASSPSVYNVAEANGPGENDSSLDNKKDETTNAEAALLSSGDTVQDMDADATSTNGIQENVEVIEVASGSPLPGMKQQLDDSVRIPKATIDILKDQVFGFDTFFVTSQEPYEGGVLFKGNLRGKPAKSYEKITSRLQNKFGDEYKLFLLINPEDEKPVAVVIPKQTLQPETTGDKNLSVPSVASVVLRVIPLYEEENIYSLKYLVCKKPQLSTPSSSKPYTYRSTFDNLELLKDGLSGALVTGLIIGVHEIGHILAARESGIKLGVPYFVPSWQIGSFGGITRIVNIVRNREDLLKLAAAGPLAGFSLGFVLLLLGFVLPPSDGLGLVIDPTVFHESFLVGGLAKLLLGDVLKEGTQLSINPLVLWAWAGLLINAINSIPAGELDGGRIALAMWGRKVSSRISSLAIGLLGVAALFNDVAFYWVVLIFFLQRGPIAPLSEEITDPENSYIGIGAAILLFGLLVCLPYPFPFDPSQLTDMDFNF

SEQ ID NO: 8259 - protein, 695 aa, Zea mays
  VARIANT 654: note = Ancestral polymorphism is D, Derived polymorphism is V
  VARIANT 649..695: note = Derived polymorphism lacks residues 649 to 695
MAIYSFLSVRKRPVVVVAAVTLFIVVSSLFLLFSPAPTALPFFSSSSSHLSSQASIAAVSSNAFPPETPTSVVSNWVSSNTSADRVSADASPPVVGTAIASDAVSNSTADPPRPDTTAAAGDAKADVSQPDHGMPPAATEASGSAGNGETAAGVSSERDEEGQGGGGAVEELPSWELCKVGKGVAAADYIPCLDNVKAVKALKSLRHMEHRERHCPTDPRPRCLVPLPERYRRPVPWPRSRDMIWYNNVPHPKLVEYKKDQNWVRKSGNYFVFPGGGTQFKNGVASYIKFIEQILPNIQWGIHTRTVLDVGCGVASFGGYLLDRNVITMSVAPKDEHEAQIQFALERGIPAFLAVIGTQKLPFPDNSFDVIHCARCRVHWYADGGKPLLELNRVLRPGGYYIWSATPVYRKNPRDIDDWNAVVALTKSICWRTVVRSRDINKIGVVIYQKPTSNSCSLERKNNEPPLCSESDGSRFPWYKPLDSCLFPAVPSSGEGNSWAVSWPERLNIKHSATSNNSSIQFPQEKIDSDTSYWKDLVSEIYLNEFAVNWSSVRNVMDMNAGFGGFAASIINRPLWVMNVVPVDQPDTLHIIFNRGLIGVYHDWCESFNTYPRTYDLIHMSYLLGPLTKRCHIIEVAAEIDRILRPGRWFVLQDTIDMIRKMDPVLRSLHYKTTIVKHQFLLATKGFWRPGSIGS

SEQ ID NO: 8260 - protein, 251 aa, Zea mays
  VARIANT 110: note = Ancestral polymorphism is G, Derived polymorphism is S
  VARIANT 101: note = Ancestral polymorphism is A, Derived polymorphism is T
  VARIANT 57..251: note = Derived polymorphism lacks residues 57 to 251
MEADEDSAGGLLCVTGGSGFIGSWLKELLEPALKGTLSVLRAAKDCGVQRVVLMSSKSAMLPNPAWPADKAMVEDDCWADVELLKRRQLWYNVSKTLAEKAAWEFAERESLQLVVLNPGTTLGPFFTPSVNTSLNILLQLLRGQELELDAVYTGWVDVRDVAQSAIVLYENPSAQGRHLCLASMERLVDFADRIADMYPEFPVHRIEEDKQGWLMRAKEPSKKLVDLGVRFLPFDVTIRETVDCFRSKGLI

SEQ ID NO: 8261 - protein, 1078 aa, Zea mays
  VARIANT 310..1078: note = Derived polymorphism lacks residues 310 to 1078
MPPPPVAPSAAAAMPPVTSLERTVRTLDRQISQFVAMDRLIWADSADADAFLEAVDDLIGTVQELDAAGTNRGLLDRADELLSRCMARLEDEFRALIERPDDAAPQVTGGFGSDESEEDEYDADDGFGDEPIPIARPVSDFDIVIDALPPGSVSDVHQIARRMVDAGFGRECAEAYAAARRGFIDESVARLGIRSRTVDEVHSLPWEELEFDIARWIPAFKMVFRILIPSERRLCDRVFEGLAPYGDLAFVAAVRTQALQLISFGDAVAAASRAPERLFRVIDMYEAVRDLLSDLDPVFSDPYSAALRAEVSAVCNTLGSSIKGIFMELENLIRRDPARVAVPGGGIHPITRYVMNYLRAACGSRQTLEEVMEGDLGAVGTAAIAVDPDRPTSSLAVHIAWIMDVLHKNLETKSKIYRDPPLASIFLMNNGKYIIHKVNDSELGVLLGDEWMKQIMSRVRRWSVEYQRGAWAKVISVLQTGGPGVGSITAKSMLQKMQMFNSYLEEICAVQSDWVIADEQLRADVKSVCFVALVIGMDETLQALDDLISQFLSLDRSLWSSSDDAEAFLEAVDELTSTIHGLESTSADHALLESFDLLLERCSARLKDEFQRLVGTSGFSDDDHGDRSSKRSQNEDANDHTFVAQPVRNFDIIVDALPEGVVTEANRVARRMIAAGFGDTCAETYASARRSFIDESIARLGVDAHWEEEELCNKSTTAWEELETRIMRWIPATRVVFHILIPSERHLCDCIFEGFTSYADLAFATACRPFLQPLSFAEAIAAAAGHRPESLFRMVDMYDALTDILPVLDEALDHEVVAAPRERLGLSIKGIFVALEKLIRGDPCESSPPDGGLHPITRYVMNYLMAACVSRHTLEEVMLVEFGRADETCPVDPDRPTSSLAICFAWIVDVLIANLESKSRIYGHAPLGCVFLINNGIYIIKKVSGCELKILLGEDWTRVMSAKVHQWVLEYRRATWGRAVAILETDRRPGSSSSSVMLEKLNRFHTFLEAICQVQSRWVLVDKQQAVDLSVMVEELVAPVYRDTVEMLKATEDVGVSYVRPEDVKSRIQRLFKAMAKS

SEQ ID NO: 8262 - protein, 255 aa, Zea mays
  VARIANT 140: note = Ancestral polymorphism is V, Derived polymorphism is M
  VARIANT 196: note = Ancestral polymorphism is V, Derived polymorphism is A
  VARIANT 209: note = Ancestral polymorphism is R, Derived polymorphism is M
MCCTVASSFSSPFSAIGRRAWSPDASPLPSISVSALVPLVDDACLRIDRVIPADAADAGAPRPRAALSHLLESVLLAVLKPFAHCDAKSASPQKHAQQQQQHHSPAQVLRNFSSIRSLRMELPVSDVGTDDGVVLRWKAVFGSTLQSCVILDGTRVDRAAAAGPPHAPSSAPPAGDDDGGSIPESLYTNGGLKLRAVWTISSLIAAATRHYLLREIVKEHPTLERVALTDADGPMKEAVATLGKRHAYLLEMNGF

SEQ ID NO: 8263 - protein, 220 aa, Zea mays
  VARIANT 51: note = Ancestral polymorphism is A, Derived polymorphism is T
  VARIANT 81: note = Ancestral polymorphism is S, Derived polymorphism is L
  VARIANT 85: note = Ancestral polymorphism is R, Derived polymorphism is H
MASAATPAPLLPVTSTAAGGGSAPSSATGLSDAALATPAFRLFVSRLAETARRSLADRRPWTELLDRSAFSRPDSLSEATSRLRRNLGYFRVNYAAVVAFSLAASLLAHPFSLLVLLSILGAWCFLYVFRAPDQLVVLFGRTFTDRETLLGLTVASVLAFFLTSVASLIISGLLVGGAIVAAHGACRIPEDLFLDDPSAASSGNTTSRLISFLASPGSGV

SEQ ID NO: 8264 - protein, 572 aa, Zea mays
  VARIANT 138: note = Ancestral polymorphism is A, Derived polymorphism is D
MASSSSSRLLLLLLPCLALTLLGAADAEVHHHEFVIQETPVKRLCKTHNIITVNGQYPGPTLEVREGDTLVINVVNRAQYNATIHWHGIRQIRTGWADGPEFVTQCPIRPGGSYKYRFTIQGQEGTLWWHAHSSWLRATVYGALIIRPRENKTYPFAKPSREVPVILGEWWDANPIDVIREAQRTGGGPNVSDAFTINGQPGDLYKCSNKETTAIPVKAGETALLRFINAALNHELFVTIAQHKMTVVATDASYTKPFTTSVLMLAPGQTTDVLVTMDQPPTRYYVAARAYVSGQNVAFDNTTTTAVLEYDCGCASDFGPKIQPAFPAALPAFNDTSAATAFAAGIRSPDRVKVHENVDEYLFFTVGLGLFNCKPGQLCAGPNNNTRFAASMNNVSFVFPQTDSLLHAHYYKIPGVFTTDFPAYPPVQFDYTGQNVSQALWQPVPATKLYPLRFGSVVQLVLQDTSIVTPENHPIHIHGYDFFILAEGFGNFDPKKDVEKFNYVDPPQRNTVAVPVNGWAVIQFVADNPGVWLMHCHLDVHITWGLAMAFLVEDGYGELQSLEPPPVDLPMC

SEQ ID NO: 8265 - protein, 242 aa, Zea mays
  VARIANT 26: note = Ancestral polymorphism is D, Derived polymorphism is N
  VARIANT 67: note = Ancestral polymorphism is R, Derived polymorphism is H
  VARIANT 88: note = Ancestral polymorphism is R, Derived polymorphism is Q
  VARIANT 112: note = Ancestral polymorphism is N, Derived polymorphism is I
  VARIANT 117: note = Ancestral polymorphism is H, Derived polymorphism is N
  VARIANT 124..242: note = Derived polymorphism lacks residues 124 to 242
  VARIANT 197: note = Ancestral polymorphism is Y, Derived polymorphism is H
MMRVLSSFSKISIALMNDKPALYQTDPSGTISAWKANATGRNSNSMREFLEKNYKDLRQETIKLAIHALLEGASLSYLLHFSTVYRLRTELKSGIQYWSLERKLCQALLRTIQFIGHVSTCFRYAYPWWKEKVIDSDLKRKDGLCPLTPKETALVLGALDIDRGMQIYIVAGEIYGGKRRITSLTSAYPNVVCAQIYYASIVAYLLYKNSLTYDEDKGAWFLEKELTVNVYARNRLKVHQYP

SEQ ID NO: 8266 - protein, 511 aa, Zea mays
  VARIANT 125..511: note = Derived polymorphism lacks residues 125 to 511
  VARIANT 150..511: note = Derived polymorphism lacks residues 150 to 511
MMATEPLSPGNLVEDVETLPLDSSSTLAATTDPLLRPPPPSSTFSPTAGENHGAFLDEEDEDVVDDFTPPLAPHAATAATKSREASPWFAEITVSEPRKHAEPATGAVGVIPGSASYVSYLIATQVPDGGEFRVRRRFRDVVALADRLAETHRGLFVPARPDKSIVEGQVMQRHDFVNQRCVTLQRYLRRLAAHPVVGRNPILHAFLTEPSGIPTSDGESPRWSPAMSAATSMAASAPVTPTKSGRDFFGVFKGLKQTVTNGWVAVRPPLVEEEIDTKYLVHKAKLEDLEKHLVTASQQAEAFVKAFDDLRSTTGLLGMSFIKLAMFEKEQAACSSQKRRAADISNFASAVIRVSRSQTKLNTEIVKHLGIIHEYMETMASVHNAFTDRSNALLRVQNLSADLYFLHTRAGKLESVSARGMDQERSRYQKIEELKETVRATEDAKTRALKELELIKENNMNEIKRFNKERRQDLVEMLKGFVLDQATYSDHFATIWTKVAEETKGYANSSS

SEQ ID NO: 8267 - protein, 622 aa, Zea mays
  VARIANT 58: note = Ancestral polymorphism is A, Derived polymorphism is T
MYPSGAMVGAAPAARPSASSRVEKATSHLLMGPDWAVNLEICDILNADVWQTKDVVKAVKKRLQNKDPKVQFFALTLLETMMKNCGEYVQFEVAEQHVLQEMVKIIQKKNDMQVRDKILLLLDSWQEAFGGPGSKYPQYHWAYLEVKTTGVVFPKRPMDAPPIFTPPATHNSETYGSPRYSAGSLSDRMSSDVETLSLGDLNKIRNVTDLLNDMVYALNPSDRMAINDEIITDLVTQCRSNQQKLLQFVSSSGNEQLLKQGLETNDLLQSVLSKYDAVASGAPLAVEASVREAIEAPAVKSYAPPEHNDNVNEEEDEFAQLAQRKNKSVVSSSDDASSSTLGDLALVPIDQAVSESPSSVASNALVLLDPAPSTSTESKELDMIDLLSLTLCSPTPETSTDSSAQDQNGPQQPAVTHNQKGLQEPTVTNGQQYPSSVPQYPSNYQPHTANQAYAPQTSNYVAPWAQTGAYPPQPPAYASGYAYPAPPWVAPTHPVDSNPFLSVNYQDPRPAATSVAQTATYAPPPASYPPSISYAQFATPQSIQHSNSVASPSNGQIANQAQMNVNQQPKDSSAASSRPYYIPDNLFSDLIDAKSFGGGNKMGGPTTMGSSNGGQPMIGGKK

SEQ ID NO: 8268 - protein, 161 aa, Zea mays
  VARIANT 9: note = Ancestral polymorphism is A, Derived polymorphism is D
  VARIANT 20: note = Ancestral polymorphism is W, Derived polymorphism is R
  VARIANT 35..161: note = Derived polymorphism lacks residues 35 to 161
  VARIANT 40: note = Ancestral polymorphism is R, Derived polymorphism is H
  VARIANT 51: note = Ancestral polymorphism is S, Derived polymorphism is L
  VARIANT 62..161: note = Derived polymorphism lacks residues 62 to 161
  VARIANT 128: note = Ancestral polymorphism is P, Derived polymorphism is L
MDVSVGSRARHLTDVDGDLWDLVRRDLQLKATFLYIDLNRCRQSNIDYTSSQVPFRITATGWVQEFNNTARIVKKIKLTGTPCKIFKKTALIKGMFTSDLEVARFEGASIRTVSGIRGQVKKAAKIEPRDMLKRKGENTEGIARCTFEDRILMSDIVFLRA

SEQ ID NO: 8269 - protein, 237 aa, Zea mays
  VARIANT 114: note = Ancestral polymorphism is L, Derived polymorphism is P
  VARIANT 46: note = Ancestral polymorphism is G, Derived polymorphism is D
MSTERERLDEIGKIKREPDTAALAVAAASASTVPADNHIPRRLGHGGALNTLTPCAACKLLRRRCAQECPFAPYFSPHEPHKFAAVHKVFGASNVSKMLLEVVEGERADTASSLVYEANLRLRDPVYGCMGAISILQQQVNALEAELEAVRAEILKHRYRQATGNRLMDDVRATASFVLAPASAPMHVNDVVSVVEAGQEVTATGGASGVYIAEAEQPSSTNNYSSLNPSEHPAYFG

SEQ ID NO: 8270 - protein, 995 aa, Zea mays
  VARIANT 200..995: note = Derived polymorphism lacks residues 200 to 995
MDGRRTILMGRYEIGKQLGQGTFAKVFYARNLTTGLAVAIKMINKDKVMKVGLMEQIKREISIMRLVKHPNILQLYEVMASKSKIYFVLEYAKGGELFNKIAKGGKLSEDAARKYFQQLVSAVDFCHSRGVYHRDLKPENLLLDENENLKVSDFGLSALAESKRQDGLLHTTCGTPAYVAPEVLSRKGYDGAKSDVWSCGVILFVLVAGYLPFHDTNLIEMYRKISRAEFRCPRFFSTELKDLLHKILVPDPSTRISISRIKRSAWYRKPVEAHAKKNEAETSENTCTGEGTTSVSTECSTSEGNQGPLSLPNLNAFDIICLSTGFNLSGFFEDKYGRREERFTTRQPVTTVFTKLKELAKRLKLRVKKKENGTLKLAAPKEGKKGMLELDAEIFEVAPSLLLVELKKTNGDTLEYQKLVKEEIRPALKDIVWVWQDDQHQCSQSPESLLSPPETQDELRLSLPQQEDRSTLAVHVLQRNVSPGDIQRHPDMSPSKKQLTNNNDSLYWSNEKYDYSCSWLDDRAMISALLDVVIEEDSARALSPLPLVAGVEAELHPVSVGHKSMDAEMKQPLEGSMSLNIDSEGEPHIGNGSIVVENPASDLVKSESDRIKTFYQTVLSAIMVFVTAALSSYKDMKPLYSTTSHGKAHLSNLLVDEGLFIFMTFLCAMVLMMSEFVVHQHGRRGHVWCWVRTILVAVTGVMLIVADTILLIVTNRSNMLLSVLLVPEVLLFGVAVSVGAWMQESLPSSELGSRYDSAMKGTFDIATVGTIVSFTLQGGIVFGYLKTPDSNQVKHDPPLDLAACYATSTLSLTGMTMCAMPLAYLPNGMLEVLVRVVERLRSAVLAALAMMALVVSVEFLDGFVVVSFFPDAVTIALYYVVKLFSACQPREEISQLDFTFRIVAAAGFTLMTGLYAAFTGTDHYGFNLKTAMFILLLAVVSSLSRLAIPLHMPEAGVGGVIEFGIVSIALSFPLLALLAAIPLVFKVFVDHYINR

SEQ ID NO: 8271 - protein, 140 aa, Zea mays
  VARIANT 62: note = Ancestral polymorphism is W, Derived polymorphism is L
  VARIANT 52: note = Ancestral polymorphism is G, Derived polymorphism is E
  VARIANT 40: note = Ancestral polymorphism is S, Derived polymorphism is C
MECSRGRQRQMQRWRWCGRSMLKLAGLCVAVAICLCGVRSWACSGSGSGCRGSTVLLRSESLRRGRAAASCGNQGCYTTGQWRRLLADGPGSYPPRCTSKCGDCSPCYPVHVAVPPGVPVTTEYYPEAWRCKCGNRLYMP

SEQ ID NO: 8272 - protein, 295 aa, Zea mays
  VARIANT 78: note = Ancestral polymorphism is L, Derived polymorphism is P
  VARIANT 81: note = Ancestral polymorphism is T, Derived polymorphism is M
  VARIANT 83..295: note = Derived polymorphism lacks residues 83 to 295
  VARIANT 85..295: note = Derived polymorphism lacks residues 85 to 295
  VARIANT 91: note = Ancestral polymorphism is P, Derived polymorphism is L
  VARIANT 93: note = Ancestral polymorphism is G, Derived polymorphism is D
  VARIANT 95: note = Ancestral polymorphism is R, Derived polymorphism is W
  VARIANT 99: note = Ancestral polymorphism is R, Derived polymorphism is W
  VARIANT 100: note = Ancestral polymorphism is A, Derived polymorphism is V
  VARIANT 101: note = Ancestral polymorphism is T, Derived polymorphism is I
  VARIANT 120: note = Ancestral polymorphism is A, Derived polymorphism is V
  VARIANT 142: note = Ancestral polymorphism is L, Derived polymorphism is P
  VARIANT 150: note = Ancestral polymorphism is P, Derived polymorphism is S
  VARIANT 162: note = Ancestral polymorphism is A, Derived polymorphism is V
  VARIANT 165: note = Ancestral polymorphism is T, Derived polymorphism is I
  VARIANT 210..295: note = Derived polymorphism lacks residues 210 to 295
  VARIANT 214: note = Ancestral polymorphism is D, Derived polymorphism is H
  VARIANT 237: note = Ancestral polymorphism is T, Derived polymorphism is M
  VARIANT 252: note = Ancestral polymorphism is T, Derived polymorphism is I
  VARIANT 262..295: note = Derived polymorphism lacks residues 262 to 295
  VARIANT 287..295: note = Derived polymorphism lacks residues 287 to 295
MSHSDDDPDAGPDDNDEAPTSTSSSAATGDHYDCGAAWTTANYRLQPRVTRWKAKRRRWLHQNPGFPSRDARGGPRVLLVTASPQGPCGSPDGDRFLLRATKNRLDYCRLHGVDMVHATARLEDPELRSAGYGDGWAKLALLRRLMLAHPEVEWLWWLDVGALVTDMGFELPLARYEGAHLVVRGDSYQLFQRRAWDAASTASFLLRNCQWSLDLLDAWVVMAPKGRARHDAGELLTATLAGRPTTSPRLYTCSSPRRSGGWTGCTSRTSTTCTASGRRWSAREGHGEAPPGVRR

SEQ ID NO: 8273 - protein, 438 aa, Zea mays
  VARIANT 143..438: note = Derived polymorphism lacks residues 143 to 438
  VARIANT 187..438: note = Derived polymorphism lacks residues 187 to 438
  VARIANT 244..438: note = Derived polymorphism lacks residues 244 to 438
MEPAKGKPRRASSSLLLRITDICKVHSVAVAENVGEKPNAGSTTGGGSSEDGAHLKVYPHQVSDHESCSGTSTARYEEAVVERLLGAVSGLKLAYVKVQQAHVPYDPERVAVAGERFASELEETAGLKDLYFGADKWSNPMHQSRVSSRIHERQRLALELQADICKKDSELVLLRAELEELERRNLELKEEADQRASQMNKEISFGIGKVGSVDTFIELFENSSKCIHDFTKLVVSWMKVSAGWDLDCSKFPADRSLVFEKRAHRKYCVEAYFARAMLAATKEEYFSMDSFYRVMSSKDPFDALVESPNSAFGRFCREKYLVAVPSTMEVSFLGTLDHRAFVEAGGHPRTQFYQTFARMARSVWALLTVARLLKPRAEMFFVKSGVRFQRKHMESVPARLTAEEAKIGVGFTVMPGFKIGCTIVRCRVYLSMLNARGI

SEQ ID NO: 8274 - protein, 272 aa, Zea mays
  VARIANT 228..272: note = Derived polymorphism lacks residues 228 to 272
  VARIANT 192..272: note = Derived polymorphism lacks residues 192 to 272
  VARIANT 168..272: note = Derived polymorphism lacks residues 168 to 272
  VARIANT 153: note = Ancestral polymorphism is G, Derived polymorphism is S
MLKQQGMRTTWEYPFAVAGSCWAFSTIAAVEGINQIVTGDLISLSEQELVDCDTSYNQGCNGGLMDYAFEFIINNGGIDTEKDYPYKGTDGRCDVNRKNAKVVTIDIYEDVPANDEKSLQKAVANQPVSVAIEAAGTTFQLYSSVIRAHLAAGVDMMFYGPIQKCPVCEGQLEFKEWKYKCTGNCTGNYTEWARCTFRTDDPSRRSGPIKVPDDIKDDFIRKWLKQQEGKGKEFPKHDVDEEAHILSSMMIDLSGQMTRLHVIPLNNLICYS

SEQ ID NO: 8275 - protein, 123 aa, Zea mays
  VARIANT 5: note = Ancestral polymorphism is K, Derived polymorphism is N
  VARIANT 19: note = Ancestral polymorphism is V, Derived polymorphism is A
  VARIANT 89: note = Ancestral polymorphism is N, Derived polymorphism is T
MAAPKLATLALAVLLAATVVAPPAAVRAAMSCSTVYSTLMPCLPFVQMGGAMPPQPCCGGIRSLLQQANNTPDRRTICGCLKNVANGANGSGTYISRAAALPSKCGVALPYKISTNVNCNTIN

SEQ ID NO: 8276 - protein, 29 aa, Zea mays
  VARIANT 9: note = Ancestral polymorphism is A, Derived polymorphism is D
  VARIANT 10: note = Ancestral polymorphism is R, Derived polymorphism is I
  VARIANT 14: note = Ancestral polymorphism is S, Derived polymorphism is R
  VARIANT 25: note = Ancestral polymorphism is R, Derived polymorphism is Q
MQNVVARSARKLPSLMVKPFCNSSRELFK

SEQ ID NO: 8277 - protein, 350 aa, Zea mays
  VARIANT 266: note = Ancestral polymorphism is T, Derived polymorphism is R
  VARIANT 285..350: note = Derived polymorphism lacks residues 285 to 350
MARIPSLKSLNAFPHAEEHLLKKTYSGAVVTILGLLIMITLFVHELQFYLTTYTVHQMSVDLKRGETLPIHVNMSFPSLPCEVLSVDAIDMSGKHEVDLHTNIWKLRLDKHGHIIGTEYLSDLVEKEHGAHHDHDHEQEHHDEQKKHEQTFNEEAQKMIKSVKQALGNGEGCRVYGTLDVQRVAGNFHISVHGLNIFVAEKIFEGSSHVNVSHVIHELSFGPKYPGIDNPLDDTSRILHDTSGTFKYYIKVVPTEYKYLSKKILPTNQYSVTEYFLPIRPTERAWPAVYFLYDLSPITVTIKEERRNFLHFITRLCAVLGGTFAMTGMLDRWMYRLVESVTNSKTRSVLR

SEQ ID NO: 8278 - protein, 566 aa, Zea mays
  VARIANT 252..566: note = Derived polymorphism lacks residues 252 to 566
  VARIANT 383..566: note = Derived polymorphism lacks residues 383 to 566
  VARIANT 473..566: note = Derived polymorphism lacks residues 473 to 566
MPARDPFHRKPRIFSAVPMMGCFTVLRSKKKKSHFDNPLVPSKKSVDARESTSSRLPEPEVHVPSLQSAPPSFRNRVKISESSNEVSNRNSRARVLSAPSALIVVDQFGFPYSEYRDQDDSRDKEGLTKGHRFSNPLPLPLPSREGHSFRNSGSFKASNVSGPLEMSGPLPLPLKKCDGLRIFSYEEISSACQRFSSDQCVSETLGSTSYKATFRDEFIDTRTTEATVARLLPSTQSLKEFKTQATTLASLQHPNLCKLIGYYAKEDSNERMLVYERLYHGSLDKLLFGRSDGRFMDWSKRLKVALGAARGLAFLHDEGPFQAMYSEFSTLNIQIDKGFTAKLSGYGCVGFNTEEISNAPVSAANLSVETLEKGLLTPKSNVWSFGVVLLELITGRKNLDPNYSKEERNIVNWSRPFLTDDSRLSLIMDSRIKGRFPTKAARIVADIILKCLRKDPSERPTMRDVVEALARVQEIKVPCRYPLQEPSAAPRKVMLKSTSLNGIVPHHPVITFSPSPPSHNQHLISPRSSTSALFHPRACSSTLDDPSVSSIKKTPPIMRRSSVEGF

SEQ ID NO: 8279 - protein, 153 aa, Zea mays
  VARIANT 70: note = Ancestral polymorphism is G, Derived polymorphism is D
  VARIANT 47: note = Ancestral polymorphism is E, Derived polymorphism is K
  VARIANT 22..153: note = Derived polymorphism lacks residues 22 to 153
  VARIANT 10..153: note = Derived polymorphism lacks residues 10 to 153
MNQPWKTPLWPRSSTTTVISYWSWRLLILGLKFPSMELERKAEGGRKVGEAPCPIFPNTTMQSEPSPSSGRSRRDGTGRWSMRASSCDEILQFAPVLDTSGNRIRRHVLGHYEIVRVDFCCCINQTPGDLLDPDLVRLAGKGENGTKWYRTSG

SEQ ID NO: 8280 - protein, 382 aa, Zea mays
  VARIANT 29: note = Ancestral polymorphism is H, Derived polymorphism is D
  VARIANT 156..382: note = Derived polymorphism lacks residues 156 to 382
  VARIANT 160: note = Ancestral polymorphism is S, Derived polymorphism is I
  VARIANT 308..382: note = Derived polymorphism lacks residues 308 to 382
MAATLLHAATASLQSSSQPARAGAATAFHPLASTPSIRLARSSFSSNRRLEVSLRAVSAGHCFAGRGAPRGRRVVAALAGEQTEGSEVGDDKDNSNEEIKPEEAQEAWKVMLEQFKAEALRMQALSMQAYDVYSKRAREVLLEASEKLKIQADKAQKDLSVIATEVSQEGQEYLVMAARNSPDSIKDITTTFRALGRLNWPSEYEDYHVGIPFGTFLTVGGFLNFMLTGSTSALRFGIVLGLALLTLGISSLRSHREGDRRPRLLVKGQAAIALVIFFREFSVLLQNGWFPKIFIVLLSPQTSLLDIQLAFCICIYLDRPKTCDISSKQLLQPFLFGLKKESLVVYEANSQLCCSGVVAAFYFYRIATGNPKDLSSKNDSAN

SEQ ID NO: 8281 - protein, 286 aa, Zea mays
  VARIANT 176..286: note = Derived polymorphism lacks residues 176 to 286
  VARIANT 168..286: note = Derived polymorphism lacks residues 168 to 286
  VARIANT 110: note = Ancestral polymorphism is G, Derived polymorphism is A
MTLDTPAAVVLELMTMGQQSASHLGDLLRAASPAAASPHQELAAEILRCCGRVIDALRAAGRKRKAAEYQDAAAARCAWSSPPPPPGPPAKRARGAEATMEVTSGTAVDGFIWRKYGQKDINGHKHPRQVDSFTRGSGRELSCRLYYRCAHKDQGCNATRRVQQTREQPAAYEIAYYGEHTCRGAWQQGGAAAAAVAPPAVVDFGSSSWGSAADTSRSSPSQGGWSSPSASSEAGVGFGPQLAHEWHDTAAPDPVTEFLDGCFGWESVLQDRFDFGGLSDVATFQQ

SEQ ID NO: 8282 - protein, 182 aa, Zea mays
  VARIANT 164: note = Ancestral polymorphism is T, Derived polymorphism is I
MIIYHWLQHVMLLMLLQDEASCEKLRWIGSGLSCVCIKRKGTYERICKNFRPVQLNVFIQLVVNCLGHLITTAELFSALRGRLYDSNKNLVMATLSTIGGLVSAMGPSVEKSSKGILADVLKCLGDNKKHMRECTLTALDSLVAAAQLEKMVPYIIVSLGDQKTVQKGEKISLIGCLSMFQK

SEQ ID NO: 8283 - protein, 823 aa, Zea mays
  VARIANT 341: note = Ancestral polymorphism is S, Derived polymorphism is L
  VARIANT 407: note = Ancestral polymorphism is P, Derived polymorphism is L
MFKFLKEVVAGSGSGLKDFPYTIGETYASAWGSWTHHRGTSKDDGSPVSIFSLSGSNPQDRHMVAGRNGVKRLRTVRHPNILSFLHSTEAEVADGPAIKHTIYIVTEPVMPLSEKLKELNLGGTQRDEYFAWGLHQISKAVSFLNNDCKLVHGNVCLASVVVTQTLDWKLHAFDVLSEFDANNEASGSPMLQFEWLVGMQYKPMELSKSDWASIRKSPPWAIDSWGLGCLIYELFSGAKLARTEDLRNTASIPKSLLPDYQRLLNSTPTRRLNPSKLIDNSEFFQNKLVETIQFMEILNLKDTFEKDSFFRKLPNIAEQLPREIVLKKLLPVLASSLEFGSAAAPALTVLLKMGSWLPTDQFSIKVLPTIVKLFASNDRAIRACLLHHIDQFGESMSAQTVDEQVFPHVATGFSDTDGTIRELTLKSMLILAPKLSQRTISGSLLKYLSKLQVDEEPGIRTNTTILLGNIASYMNDGTRKRVLINAFTVRALRDTFPPARAAGIMALSVTGSYYEMTEIATRILPNIVVLTFDPDSDVRTKAFQATDQFLQIAKQHHEKLNTGDNRVAESTGVKLKPGNAGLLGWAMSSVTQKGKPSDHAPISTANANNSQASTALTAAPETQASTPAYAQSTSSSLDQAAPASARSSEDGWGELEDDNIHEENSDKDGWDDVDPFEDKPSPSLLSNIQAAQKRPVAQPKQAVANSSKSNPLKAPKSEDDPLWGPIAAAPPKSAAKPADIKPSTSHNDEDDLWGSIAAPPPKSSGKPLKPAAANSDDLWGAIAAPPPGTKARPLASSGKGRGTKPAQPKLGAQRIGRTSSTGM

SEQ ID NO: 8284 - protein, 648 aa, Zea mays
  VARIANT 184: note = Ancestral polymorphism is P, Derived polymorphism is L
MTNDSPWSMATESSAVAFAGDANSTESWSARVRTLTRLGRHKESIALLRHGGPSPPPHALALPASVISCAALSLPTGVAQIHALAAKRGLLPAADAYLLSALLTAYSRLGCLRLAHQLLDETPIESTSHTTLRTAFNSLISGCARHSLPVACFALFRRMRAIAVRFDAVTLLALVPAAPLSVVPQVHALAAQVGLATETSVANCLMSTYARGGAFGAALARRVFDEMPLASRDLVSWNAVLSAHAQNGLAVDALDLYRRMRSPEGSGVEPDAVTIVGVLSSAAHLGARGVGFDAEHYVVQRLPGFRTNVQLCNALINFHARCGSLPRAQQLFDEMPAKSIVSWTALITGHGMHGNGGVAVSLFERMVSEGIHPDNVAMVGVLSACSHAGLYDEGRMYFSTMESVYKLRPTLEHYTCIVDLLGRAGRLEEARELISSMPMPADGAVWGALLGACKIHKNVEIGEEAFARVVELEPRNVGYYVLMSNIYTDTGQLDCVARVRAVMRKRGLKKEPGCSYVEHNGRVHLFMADDHSHPQARRIYELVTRLELMVKEKSGVRESVVAVPKGRMEKEAAQPLVGFHSEKLAVAFGLLNTEAGSEIVVIKNLRVCGDCHSFLKAVSATTNRSFLVRDASRFHRFDGGVCSCKDYW

SEQ ID NO: 8285 - protein, 446 aa, Zea mays
  VARIANT 17: note = Ancestral polymorphism is R, Derived polymorphism is H
MQTEEGKSRFGRCPYCRAMIYQDLSAIIFYCSRCRTPIRGKNPQPTDETEYALAQLEILSADTASVFSDDAEPPNPRSAWAVDDDGGRPPLQSRSAATGRSSVPSRQGTGAASSSSYRELGPVRTGPRSSGGSLSSGLNRDRQTEAAGSASPLHGRVTQLRPSSRRTRRSSGGSDAGSGTESDSDAPAPATSYTSRSSPLSSQELEVATVLSGIQPSDLTRTPLSDPAFQKDLLQALDNLRKLIAAVDHPRSIDGHWQGVTMPRLSASCNDESSGKRTITRRSSRLMRRLESQLTRALPAERPRRNASTSSSSSASSSRRDGTRPRAHQCRPVLGGAPFVVCGECSEILQLPPALPAGRATTLQCGGCGEAFQVTLPTIGSVDLPKKIFSAPQPAVFVGQDAEEYPLARSSNLSGEQPRPAGPLHRVLGYSSVSSVLRSRRYGDNS

SEQ ID NO: 8286 - protein, 222 aa, Zea mays
  VARIANT 187..222: note = Derived polymorphism lacks residues 187 to 222
  VARIANT 135..222: note = Derived polymorphism lacks residues 135 to 222
  VARIANT 105: note = Ancestral polymorphism is L, Derived polymorphism is P
  VARIANT 103: note = Ancestral polymorphism is N, Derived polymorphism is T
  VARIANT 90..222: note = Derived polymorphism lacks residues 90 to 222
  VARIANT 52: note = Ancestral polymorphism is G, Derived polymorphism is A
MYPPAKLEQFYDFFTFSHLTPPLHYIRRSSRPFVDDKREDDFFQIDVQVFNAKSVTIVASQEGFYPAGKRALISRSLVGLLQQTSRAFDGAYKALMKAFVEHNKLRRGKSETERLSYSTVCLCDVAVLKAVASIQQLISNHTSLHETANGTIGSVLHTEQVGDMKIMITKDKIGASSKLDIKLDGSQAPGMSSDELAQRNLLKGITADESATVHDTATLNVN

SEQ ID NO: 8287 - protein, 273 aa, Zea mays
  VARIANT 70: note = Ancestral polymorphism is T, Derived polymorphism is I
MEWVDRTKASAAAAAAAADERAGGAEGLAGYVKVMTDEQMEVLRKQISIYATICEQLVEMHRALTEHQDTIAGIRFSNLYCDPQIIPGGHKITARQRWQPTPMQLQILENIFDQGNGTPSKQRIKEITAELSHHGQISETNVYNWFQNRRARSKRKQAASLPNNAESEAEVDEESLTDKKPKSDRSLQDNKAMGAHNADRISGMHHLDTDHDQIGGMMYGCNDNGLRSSGSSGQMSFYGNIMPNPRIDHFPGKVESSRSFSHLQHGEGFDMFG

SEQ ID NO: 8288 - protein, 145 aa, Zea mays
  VARIANT 28..145: note = Derived polymorphism lacks residues 28 to 145
  VARIANT 38: note = Ancestral polymorphism is G, Derived polymorphism is S
  VARIANT 61: note = Ancestral polymorphism is E, Derived polymorphism is V
  VARIANT 101: note = Ancestral polymorphism is T, Derived polymorphism is I
MGAMDIMVDQFEHCASTKIFQSNLGSFQSAFISFITAGDPDLATTSKALKILNSCDSDVIEVGVPYSDPLADGPVIQASATRALKKGTTLDSVIEMLKGVTPELSFPIVLFTYYNLILKRGVGNFMSIIKQAGIHPNLSNCYRYL

SEQ ID NO: 8289 - protein, 461 aa, Zea mays
  VARIANT 309: note = Ancestral polymorphism is P, Derived polymorphism is H
MLSTPAAGWRFRRGGLPWRLHTCSCLASPLSSSGGEPEKARPLLAERYRDGVVKRYISDGSSKLQLRLEKHESPVNGVEDENADSLIPQAILDFVLPAGFPADFRLVQAVGVGSFTGTSAAASAAAIRWVSKDGIGAFGRLLIGGRFGALFDDDPKKWRMYADFIGSAGSIFELSTTLYPGYFLPLASLGNLAKAIARGFKDPSFRVIQNHFAESGNLGEVAAKEEVWEVGAQLLGLSIGVLIMDKTGVKSSYLTLVLTWLSVRLLHLWLRYQSISVLKFRTVRCLTQIINLKRGRILVKSHVAQHTVPGYVACNEEENILTWERYLRPQVSFGVPMERMLGGDKSSDMVNRLLKLYKNEKYILFFEQFGSREPTFLVTFKESATSMSVLRSLWQAHWLHKNQLRQDEVFPWLEESIVALENGFTDFLEQLGSAGWDQDLIILKVPKEPVLVLEHLEDQEV

SEQ ID NO: 8290 - protein, 70 aa, Zea mays
  VARIANT 9: note = Ancestral polymorphism is D, Derived polymorphism is Y
  VARIANT 17: note = Ancestral polymorphism is I, Derived polymorphism is V
MEEMTTKDDPKARKMFIGGLPPSLTEEKDLIVLAKTGFGRTGAFVLPILQELPILQVKYSRCLFSERYSQ

SEQ ID NO: 8291 - protein, 176 aa, Zea mays
  VARIANT 66..176: note = Derived polymorphism lacks residues 66 to 176
  VARIANT 95..176: note = Derived polymorphism lacks residues 95 to 176
MQQRQVHPASPSSMKQPSNMKSISPARSGGSMPIMHECRTSESVKVKMDYLIEHKAREKKIVNADKGKIKSQTELEPREKGTLCTSDEDIGCKSEMGSLNQNKDVILTMVSTMQYSRRPAPTNCWRGCFHVFNAGEKLNLVEFKAYFPSKVSSRVIDIVKMMPTVLQLELLHRMDD

SEQ ID NO: 8292 - protein, 554 aa, Zea mays
  VARIANT 26: note = Ancestral polymorphism is P, Derived polymorphism is S
MAAALRVPLQAIFSRSSPPSAGLLLPLHAHLVVSGRLAASPAAITSLVSLYARGPAALNSSIPLLLPASAPPPLPCFNAALSLPHAFALPLFRRLLVAHSPDAFSFPPLFSSAPSSPHLLALHALALRFGLAHDLFCASALLRGCLRFGLADHAHRLFDELRHRDVVVWNSMVNGFVKLGCFDRATECFRKMREEGEVEISSFTVTGILSVCTATADLGSGAAVHGLSVRSGFDKEASVCNALIDLYGKCHQVHDATMVFEGLPDTDKDLFSWNSMLSAHQYSADHAGTMCLFARMRRTTLLPDSVTVAAVLPACAQTAALKVGRVVHGYIVTSGLACDGALDVFACNALADMYTKSGGLDEARCVFDWTRLRDVASWNIMIDGYASHGRGREALMLFHQMIEEGLVPDEITLLGALSACSHSGLVEEGKGFLMRMKEEFGLEPQLEHYACVTDMLGRAGRLDEARKVIEEAGDVGAGAWRTYLAACRMHGDKERAQQAARMLMMAEESGSGGWVLLANTYGSDGNFEELEEVREEMKRQGVQKAVGCSWVEVG

SEQ ID NO: 8293 - protein, 315 aa, Zea mays
  VARIANT 43: note = Ancestral polymorphism is T, Derived polymorphism is I
  VARIANT 27: note = Ancestral polymorphism is P, Derived polymorphism is Q
  VARIANT 21: note = Ancestral polymorphism is R, Derived polymorphism is G
  VARIANT 20: note = Ancestral polymorphism is R, Derived polymorphism is H
  VARIANT 6: note = Ancestral polymorphism is T, Derived polymorphism is M
  VARIANT 1: note = Ancestral polymorphism is T, Derived polymorphism is M
MQMAKTSVEFCVISARGLGRGSSLLKPQWFSVAWVDPNSKYCTKVDASGSSDPSWGMKFSVSVDEHGLSNLQQMVLTVEVYRREPIFLREHLQGAAVVQMKEYFDKFQHGGEQPGVVEETASFQLRRKKSDKAHGFVDISICIYKEKDVHTQFSGSHDGPKHPNQVGITLAIEDGPVYNYPPLSSSHYRDHSKGDGRYSNTMPKSPTTRPDPSPSGSNGYSYQPPLIPQTLPPPTSNPSYFSPPYPTRGQVPQSYINMPPRRFAGQNGSSNLGMGLGAGALAAGTLIFGENLLPGPNFIAGHDGVSLTLSSDAPF

SEQ ID NO: 8294 - protein, 433 aa, Zea mays
  VARIANT 12: note = Ancestral polymorphism is T, Derived polymorphism is M
MMERSLLEVLATAAQGGTEGTSVLSMLKYAVLPIAKVFTVCFMGFLMASKYVNILQPNGRKLLNGLVFSLLLPCLIFSQLGRAITIEKMIQWWYIPVNIVVGAVSGSLIGFVVASIIRPPYPYFKFTVIHIGIGNIGNIPLVLIAALCRDPSNPFGDSDKCNQDGNAYISFGQWVGAIIVYTYVFKMLAPPPGQTFDGSEEDGIPIKASGENTVPQVGKYPMNTNSSTVPENEPLLSAGEVQKERATSVGTKIMGYVKCVVKFLKDKQLLQPPIIASAFAIAIGVIPFLKNFVLTDDAPLFFFTDSCLILGEAMIPCILLAVGGNLVDGPGEGSKRLGVRTTVAIIFARLVLVPLAGVGITMLVDKLGFIPEGDRMFKFVLLLQHSMPTSVLSGAVANLRGCGKESAAILFWVHIFAVFSMAGWIIFYLSLLF

SEQ ID NO: 8295 - protein, 661 aa, Zea mays
  VARIANT 588: note = Ancestral polymorphism is S, Derived polymorphism is L
  VARIANT 487: note = Ancestral polymorphism is R, Derived polymorphism is G
  VARIANT 401..661: note = Derived polymorphism lacks residues 401 to 661
  VARIANT 359..661: note = Derived polymorphism lacks residues 359 to 661
  VARIANT 339..661: note = Derived polymorphism lacks residues 339 to 661
  VARIANT 325: note = Ancestral polymorphism is G, Derived polymorphism is A
  VARIANT 316: note = Ancestral polymorphism is P, Derived polymorphism is S
  VARIANT 259: note = Ancestral polymorphism is D, Derived polymorphism is Y
  VARIANT 243: note = Ancestral polymorphism is G, Derived polymorphism is S
  VARIANT 238..661: note = Derived polymorphism lacks residues 238 to 661
  VARIANT 233..661: note = Derived polymorphism lacks residues 233 to 661
  VARIANT 90..661: note = Derived polymorphism lacks residues 90 to 661
  VARIANT 46: note = Ancestral polymorphism is R, Derived polymorphism is C
MADAPYARVARSYETRRHNRLASARGDRSIMDFPSSFAASNRHRLRSRLHYRRSAQHTHITIPLEKTYIDALRGACKKRFIYNTTQTCIQSLLQGGKINLEPYQRPPSVLADLLSFDGDARSKRFLRLIRAYNSLFAFTSFGAAIDKAINNGTAPYVFKINGIVHHRIGTLLPRRGAMPKFAQLYIHDTDHETQNRLNMFEVDDGVAEQPEREITMALLDMLNDNNKLVKAFRYARERLEQAGNQKITLRLLGCDARQDVQYNLPSGGEVAAIVVGDYTADEYTYDVLVHDRNCGLRRVSCLHPSYMALQYPLLFPYGENGYHLGIRYCDDEDSVGTKRKYVTMLEFVRRHLHYRLHESNPYTCYGRLSAQVIVDAYSTIEGSRLQFIADHQKDLRSESVQGIADAIDRGLISADAVGGKMGDVLIPSLRCGNLSVTICVRVSRFWDFSDPQDDARLLHCDMVLLDEECEVWTTWLFLPCVLLDVCRGASVNVVLWGAQATLFPGERIYEDGQNSPQIVLFVGTLVKKYADGLCLTGSSPCKWYINPSIPEAETLMSSARGDHKPVKWNATVTSSQLISPVAEDQKVSYIKYLHPFENKGKEFLVTVTIRKIDNKWWYNSCRKCACTAVTHGDSYKCTNCDCANIAMPVQRKPLKLETQSV

SEQ ID NO: 8296 - protein, 581 aa, Zea mays
  VARIANT 327..581: note = Derived polymorphism lacks residues 327 to 581
  VARIANT 238..581: note = Derived polymorphism lacks residues 238 to 581
  VARIANT 205..581: note = Derived polymorphism lacks residues 205 to 581
  VARIANT 181: note = Ancestral polymorphism is D, Derived polymorphism is N
  VARIANT 99: note = Ancestral polymorphism is D, Derived polymorphism is Y
MASSWTLPDHPKLPKGKPVAVVVLDGWGEANPDQYNCIHVAQTPVMDSLKNGAPEKWRLVKAHGTAVGLPSDDDMGNSEVGHNALGAGRIFAQGYMFSDLTEYCILFVYSAKLVDQALASGKIYDGDGFNYIKESFENGTLHLIGLLSDGGVHSRLDQLQLLLKGVSERGAKKIRVHILTDGRDVLDGSSVGFVETLENDLLELRGKGIDAQIASGGGRMYVTMDRYENDWDVVKRGWDAQVLGEAPYKFKSALEAVKTLRAQPNANDQYLPPFVIVDDSGKAVGPVLDGDAVVTINFRADRMVMLAKALEYADFNNFDRVRVPKIRYAGMLQYDGELKLPSRYLVSPPEIDRTSGEYLVKNGIRTFACRQGNLLAAEDETVKFGHVTFFWNGNRSGYFDETKEEYVEVPSDSGITFNVAPKMKALQIAEKARDALLSGKFDQVRVNLPNGDMVGHTGDIEATVVACKAADEAVKIILNAVEQVGGIYLVTADHGNAEDMVKRNKSGKPLLDKNGGIQILTSHTLQPVPVAIGGPGLHPGVKFRNDIQIPGLANVAATVMNLHGFEAPADYEQTLIEVADN

SEQ ID NO: 8297 - protein, 292 aa, Zea mays
  VARIANT 89: note = Ancestral polymorphism is A, Derived polymorphism is V
MSSMWRVSRRLLRAAASASTSAIGRGAEPRRWVPPPFALQRCGHASLPDAARRDGEEEVTAAEARRLMRLTNVDALKRRLGDGEVIPYADLLRACQDSGAARTRAEAAALAGALDEAGVVLLFRDRVYLQPDKIVDLVRKAMPLALTPENDVGKEELKQLQVQLEDINKLAHKQVRRILWSGLGFLITQVGLFFRLTFWEFSWDVMEPITFFTTTTGLIVGYAYFLITSRDPTYRDFMERMFESRQRKLIERQNFNLDKYLELQRRCKDPLEKACGTTNTDMAHLHELSIHK

SEQ ID NO: 8298 - protein, 557 aa, Zea mays
  VARIANT 286: note = Ancestral polymorphism is A, Derived polymorphism is V
MVWSAGMAMRGASAALLVLALVATVARAEDPYHFFEWKVTYGTKTIMGTPQKVILINDMFPGPTINCTSNNNIVINVFNMLDQPLLFTWHGIQQRKNSWQDGMLGTMCPIQPNTNFTYHWQPKDQIGSFFYYPSTGMQRAAGAYGLISVHSRDLIPVPFDTPADDFPVLVGDWYTKDHTVLAKNLDAGKGIGRPAGLVINGKNEKDASNPPMYNVEAGKTYRFRVCNVGIKASFNIRIQNHIMKLVEMEGSHTMQNDYDSLDLHIGQCLSFLVTADQKPGDYLLAVSTRFIKEVNSITAVIRYKGSNAPPPAKVPESPSGWAWSINQCRSFRWNLTASAARPNPQGSYHYGQINITRTIKLAMGRGKVDGKERFGFNGVSHVDPETPVKLAEYFNTTDGVFQYDIIGDVPPSKSAPTKMAPNVIRAEFRTFIEVVFENPEKSIDTIHIDGYAFFAVGMGPGKWTPASRSTYNLLDTVSRHTIQVYPRSWTAVMMTFDNAGMWSIRSNIWERQYLGEQLYVSVISPERSLRDEYNMPETSLRCGKVVGLPMPPSYLSV

SEQ ID NO: 8299 - protein, 180 aa, Zea mays
  VARIANT 101..180: note = Derived polymorphism lacks residues 101 to 180
  VARIANT 150..180: note = Derived polymorphism lacks residues 150 to 180
  VARIANT 159: note = Ancestral polymorphism is L, Derived polymorphism is H
MSKETRSLALSPPQQAANFRSVPAPTDAFPSRPLGSSDQGDKSEDTTPRPKLKPLHWDKVQASSDRVMGDPVNAPAKEATRRLVLPTPRAENKVLDPKKAQNIAILLRALNVSKKEVCDALCEDSIADKGLTILPEAESDWRSHAAAVAQSVKLIKKRLKESMKDLADMRRSAKEKDFQS

SEQ ID NO: 8300 - protein, 1400 aa, Zea mays
  VARIANT 232..1400: note = Derived polymorphism lacks residues 232 to 1400
  VARIANT 341..1400: note = Derived polymorphism lacks residues 341 to 1400
  VARIANT 401: note = Ancestral polymorphism is A, Derived polymorphism is T
MAMVAAAEGSGRRDAEAELNLPPGFRFHPTDEELVVYYLCRKVARQQVPVPIIAEVDLYKFDPWDLPEKALFGRKEWYFFTPRDRKYPNGSRPNRTAGKGYWKATGADKSIVPMGSTRAAGIKKALVFYSGKAPRGVKTDWIMHEYRVAQADHTLGKKGSQKLDEWVLCRLYNKRNNWDKVKVEEQELEAAPRRQHHLQSAEDSMSNSFQTHDSDIDNVFELQNCYGNNMVQGQAMTPRNDIGVVTVKEDNDWFTDMNLDDLQASYNMAHTTAVLRLASGDLRPPSPAAVLCHGPWTVVRQQQGSSLCPTACPPPASATSASGLWAPVSRLCPRRSSSGLRHQALSYSSTAPVPATARSSTPPSRTALKVFDQSPAPWRAFLKAYSHGPFPLEALHLFKHARQHLADDTFVFTFVLKACAGLGWHRAGAQLHALVVQKGFEFHAYVHTALINVYVMSRCLVEARKVFDEMPVKNVVSWNVMITGFAGWGEVEYARLLFDQMPCRNVVSWTGLIDGYTRACLYAEALTLLRHMMAGGISPSEITVLAVIPAISNLGGILMGEMLNGYCEKKGIMSDARVGNSLIDLYAKIGSVQNSLKVFDEMLDRRNLVSWTSIISGFAMHGLSVEALELFAEMRRAGIKPNRITFLSVINACSHGGLVEQGLAFFKSMVYEYNIDPEIKHFGCIIDMLGRAGRLCEAEQIIEGLPMEVNVTVWRILLGCCSKYGEVAMGERAIKMISDLERESGGDFAVLSNVLTELGRFSDAEQARKLLDQRKIVKLQEAVMEAVKKLHAHLVVSGLHNCQYAMSKVIRLYALHQSDLVSAHKVFKQIESPTTFLWNTLLRGLAQSDAPKDAIVFYKKAQEKGMKPDNLTFPFVLKACAKTCAPKEGEQMHNHVIKLGFLLDIFVSNSLIYLYAACGALACARSVFNEMLVKDVVSWNSLIGGYSQHNRLKEVLTLFKLMQAEEVQADKVTMVKVISACTHLGDWSMADCMVRYIEHNHIEVDVYLGNTLIDYYCRIGQLQSAEKVFSQMKDKNTVTLNAMITAYAKGGNLVSAKKIFDQIPNKDLISWSSMICAYSQASHFSDSLELFRQMQRAKVKPDAVVIASVLSACAHLGALDLGKWIHDYVRRNNIKADTIMENSLIDMFAKCGCVQEALQVFTDMEEKDTLSWNSIILGLANNGFEDEALDIFHSMLTEGPRPNEVTFLGVLIACANRQLVEEGLDHFERMKSVHNLEPQMKHYGCVVDILSRAGQLEKAVSFISEMPLAPDPVVWRILLGACRTHGNVAVAEMATKKLSELDPGNSADSMLLSNIYASADRWSDAMNVRRWTADNAVGESELVPDRDDSVLELGIVRKLTTSCAKAGRSISLALEAFPCDIQEQLNRFMDGRLLQLPYLA

SEQ ID NO: 8301 - protein, 178 aa, Zea mays
  VARIANT 55: note = Ancestral polymorphism is A, Derived polymorphism is P
MPGARGTSHSPQFPHFICVVAEDWEGPTQPFFFVCVKDRERRSTNRAVSLPCVFPLSCGLRWPQLRRAVMEFTSKKTASLALLCLKLSCLLLLLLLPRSSSAAPLSRSLSLTRNRLQPADDPAPEVPAPAQQGAGAGAGAVGARDPGGEVAVRMDIEVNDYPGSGANNRHEPRSPGRP

SEQ ID NO: 8302 - protein, 306 aa, Zea mays
  VARIANT 201: note = Ancestral polymorphism is L, Derived polymorphism is V
  VARIANT 225: note = Ancestral polymorphism is F, Derived polymorphism is S
MDFLQEQSVETTVAVAVAVAAVAAGGAFLLLRSRKPKGCLDPENFRKFKLVEKKQISHNVARFKFALPTPTSVLGLPIGQHISCRGQDATGEEVIKPYTPTTLDSDLGYFELVIKMYPQGRMSHHFREMKVGDYLSVKGPKGRFKYHVGQVRAFGMLAGGSGITPMFQVARAILENPNDNTKVHLIYANVTYEDILLKDELDDMAKTYPGRFKIYYVLNQVCVTFFRKFEAHCFQRHPTYTVFLLVQPPENWNGGVGFVSKEMIQSHCPAPAEDIQILRCGPPPMNKAMAAHLDELNYTKEMQFQF

SEQ ID NO: 8303 - protein, 71 aa, Zea mays
  VARIANT 11: note = Ancestral polymorphism is I, Derived polymorphism is N
  VARIANT 24: note = Ancestral polymorphism is G, Derived polymorphism is V
MDALSRPTVVIDNGTGYTKMGFAGNVEPCFITPTVVTVNDSFSGSAQPAARGTPARGTGSLSTAPTSWLTS

SEQ ID NO: 8304 - protein, 184 aa, Zea mays
  VARIANT 124: note = Ancestral polymorphism is P, Derived polymorphism is L
MFEMFNVPGLYIAVQPILALAAGYTTTKVSHRSLALHFCIGIGGTVSHREYQIELLLNSAFVQPPADQTPDSSPPAFKHVLRQPIIENGRLKKKHWVIDHLVHEGFESTARHVDIPYLPMLVPLKKWKGVNRRVHDVVETIWSQGGGIAGLVDKANIPLPERPESEDPDEMQKWKYQHKEGKEN

SEQ ID NO: 8305 - protein, 330 aa, Zea mays
  VARIANT 13: note = Ancestral polymorphism is R, Derived polymorphism is C
  VARIANT 171: note = Ancestral polymorphism is L, Derived polymorphism is M
  VARIANT 176..330: note = Derived polymorphism lacks residues 176 to 330
MSASDLPDELWARVLELGAASSALGFRDLCSIAIASRRLGRLSVYPALWSKLLSRDFPSQSEPSTSSASTSQPPPQRLHPKSLYKTKFERHKVRMAEARRRAVFEAEARVLASRRRLVELEESIREEGERMKTAAQELDNLERVSTYRWLVDAGDMCEDCVAAAVPEKALLSSMGQCDLDERDLACACCSVALESGFYWLSLLLTMSARHGSDCGHKQEEKARRPNGRRRSETRRASVALNVWQPQVVRGRQKQLVQQCTVPVDSRLSDLNMELKVCKQQIATYKNAYSKEKHKLNDCEEALKRAKYHPLQDSHTSGTINEPRAKRKKLK

SEQ ID NO: 8306 - protein, 94 aa, Zea mays
  VARIANT 79: note = Ancestral polymorphism is A, Derived polymorphism is T
  VARIANT 63: note = Ancestral polymorphism is A, Derived polymorphism is T
  VARIANT 51: note = Ancestral polymorphism is A, Derived polymorphism is T
  VARIANT 40: note = Ancestral polymorphism is Q, Derived polymorphism is H
  VARIANT 39..94: note = Derived polymorphism lacks residues 39 to 94
  VARIANT 38..94: note = Derived polymorphism lacks residues 38 to 94
  VARIANT 11..94: note = Derived polymorphism lacks residues 11 to 94
  VARIANT 2: note = Ancestral polymorphism is P, Derived polymorphism is S
MPRRHGEQERQPVETALERDAAAGTGEVTLIQIALAHRRQQRLLGHRRRDAVLAHVPGVHEPAVGPEEAANAEAGAERTRRCEAEEAGEPSYED

SEQ ID NO: 8307 - protein, 162 aa, Zea mays
  VARIANT 147..162: note = Derived polymorphism lacks residues 147 to 162
  VARIANT 143: note = Ancestral polymorphism is G, Derived polymorphism is R
  VARIANT 137: note = Ancestral polymorphism is G, Derived polymorphism is D
  VARIANT 125: note = Ancestral polymorphism is R, Derived polymorphism is H
  VARIANT 114: note = Ancestral polymorphism is D, Derived polymorphism is G
  VARIANT 106..162: note = Derived polymorphism lacks residues 106 to 162
  VARIANT 105: note = Ancestral polymorphism is A, Derived polymorphism is T
  VARIANT 93: note = Ancestral polymorphism is P, Derived polymorphism is T
  VARIANT 85: note = Ancestral polymorphism is E, Derived polymorphism is V
  VARIANT 74: note = Ancestral polymorphism is I, Derived polymorphism is T
  VARIANT 71: note = Ancestral polymorphism is A, Derived polymorphism is T
  VARIANT 49: note = Ancestral polymorphism is L, Derived polymorphism is H
MPMNLHMLSLVVHLSELAASLPGEFRDLAEPVRLPGCVPILGPDIVSSLQDRFDPSYVVMLHLVVRCREAAEAILINSFDAIKPEAVEVLRHPAKSGGHQCTLSTQILQAEPNDGGSVDVDFLQREEAERRERGDGGKEVSWGRKKWGGGDLLAAAGWEIWW

SEQ ID NO: 8308 - protein, 508 aa, Zea mays
  VARIANT 4: note = Ancestral polymorphism is T, Derived polymorphism is I
  VARIANT 6: note = Ancestral polymorphism is A, Derived polymorphism is V
  VARIANT 264: note = Ancestral polymorphism is M, Derived polymorphism is T
MAATFAFIPLLLLVCVQSAAPVLGFTRSEFPEDFVFGSATSAYQYEGAVGEDGRSPSIWDTFTHAGRMPDKSNGDVAADGYNKYKDDVKLIIDNNLEAYRFSISWSRLIPNGRGAINPKGIEYYNNLIDELVTHGVQVHVMIYQLDLPQILEDEYGGWLSPMVVEDFTAYADVCFREFGDRVSHWTTLDEVNVAAIGSYDNGQIAPGRCSDPFGTKKCTVGNSSVEPYIAAHNMLLAHASATRLYREKYQAVQKGVVGINIYTMWSYPLTNSTADLEATQRFLDFYSGWILEPLVFGDYPSVMKKNVGSRLPSFSKVQSEAIRGTLDFIGINHYYSFYVNDRPLEKGIRDFSLDIAADYRGSRTDPPIGQHAPTSIPADPRGLQLLVEYLSEAYGNLPIYIQETGYATTNGSLHDTDRVDYMKTHISSTLAALRNGANVKGYFAWCFLDVFEYLSGFMSQYGLYRVDFEDEALPRQARLSARWYSKFLENKGIHVEDELDDAGSHVEQ

SEQ ID NO: 8309 - protein, 98 aa, Zea mays
  VARIANT 67: note = Ancestral polymorphism is T, Derived polymorphism is I
  VARIANT 62: note = Ancestral polymorphism is L, Derived polymorphism is P
  VARIANT 53: note = Ancestral polymorphism is A, Derived polymorphism is T
  VARIANT 50..98: note = Derived polymorphism lacks residues 50 to 98
  VARIANT 40: note = Ancestral polymorphism is T, Derived polymorphism is I
  VARIANT 31: note = Ancestral polymorphism is T, Derived polymorphism is M
  VARIANT 29: note = Ancestral polymorphism is G, Derived polymorphism is S
  VARIANT 19: note = Ancestral polymorphism is H, Derived polymorphism is Y
  VARIANT 14: note = Ancestral polymorphism is S, Derived polymorphism is G
MFSLFYGVWNYVFGKTEFHVFILGVHKAGKTLLVEAHGSTRILILNRPKQLDALSSRMIKGPLWYFTAFDKDDGARLLIMKFMSRHSGATPLPSACLF

SEQ ID NO: 8310 - protein, 129 aa, Zea mays
  VARIANT 76: note = Ancestral polymorphism is A, Derived polymorphism is V
  VARIANT 72: note = Ancestral polymorphism is G, Derived polymorphism is V
  VARIANT 66: note = Ancestral polymorphism is I, Derived polymorphism is T
  VARIANT 47: note = Ancestral polymorphism is T, Derived polymorphism is A
  VARIANT 32: note = Ancestral polymorphism is A, Derived polymorphism is V
MAIGTSVKGFGLATKTSNTKLILNGGQRVTFARPDGYFAFHNVPAGTHLIEVSSIGYFFSPVRVDISVRNLGYIQAALTETRRVLNELVLEPLKEEQYYEVDPEEMKQAQEQMRNNPVSLSGLLARVQG

SEQ ID NO: 8311 - protein, 462 aa, Zea mays
  VARIANT 395: note = Ancestral polymorphism is C, Derived polymorphism is Y
MLAVPPSPSCPNKGKGSDPGAVESEAAAVQGSRLNSALATLAMTKPHSPSSWAASSLSCVFSSSGSCYVPPSWSPKRSSKKKRSSRRRAKNGAAVATRRTSSIYKGVTRHRATGKYEAHLWDKNARNRTGTKKGRQGAFDNEEAAARAYDLAALKYCGWGSHSTLNFPLESYRHEHENMQRMTREAYLAALRRRSSCFSRGASGYRGVANFLQPPLLPVKPCSSKSDERVLVRRHHHNGRWEARIGYPCGKKYVYLGTFGTQEEAARAYDLAALELRGHAAVTNFDISSYTADKDYQQRRHEPAVRTAQPKPKPKVELVDEAPLPQARRPAPTFLTPKPEPEYELGEPLALPPGPVLRDADDADHAIAEILPALCMDPADFEARYPARRARALGCPPDDQLRGLALPDSVRFEDDIETLFDAPGEVRVQFPPAAAVPDVSAADAVSYAAATISSLASGRWWP

SEQ ID NO: 8312 - protein, 333 aa, Zea mays
  VARIANT 55: note = Ancestral polymorphism is P, Derived polymorphism is T
MGSQTIASQAGGGGRGMGSSGGAGAAQRGQMQSLARQGSLYNLTLDEVQSHLGEPLHSMNLEELLKSVFPDDLDPDGGTTSQYEQSSGLLRQGSITMPPELSRRTVDEVWKDIQDAPNRNVGESGRRKRERQPTLGEMTLEDFLVKAGVVAEGYLKDLNGIGSVEQVGSTGAAGLTAGAQWLDHYQQRITAIEPHQHRQHSLPGAYIPGQLSLQSLNVGPSAILESYSDGHISSPMMGALSDSPMPGRKRGSPGDVADKLVERRQKRMIKNRESAARSRARKQAYTNELENKVSRLEEENKKLTTLKELENILFSEPLPEPKYQLRRTGSATF

SEQ ID NO: 8313 - protein, 162 aa, Zea mays
  VARIANT 45: note = Ancestral polymorphism is T, Derived polymorphism is N
  VARIANT 62: note = Ancestral polymorphism is Q, Derived polymorphism is E
  VARIANT 85: note = Ancestral polymorphism is I, Derived polymorphism is L
  VARIANT 143..162: note = Derived polymorphism lacks residues 143 to 162
MRRNSPPTASGNRLAVIASHLSLPPLGSPAAISGEKEAALATDLNSTPTIFDKIIRKEIPSEVVYEDEKVLACRDISPQAPTHIIIIAKVKYGLSRLSKAEEGHVELLGNLLYAAKVVAEQEGLADGFRIVMDDGPRGCEYSSLILTGPILLVPCLLLGLHK

SEQ ID NO: 8314 - protein, 220 aa, Zea mays
  VARIANT 18: note = Ancestral polymorphism is S, Derived polymorphism is F
MASSSLLLLAAVALFAASADAATFNVINRCKNTLWPAALPGGGARLDPGKTWTVQVPAGTAHARVWARTGCSFDGSGRGTCQTGDCGGALACTVSGRTPATLAEYTLNRNGPDYIDISLVDGFNVPMSFQCRGRGPSCKADINAQCPAALKVPGGCASACEKLGGDTYCCRGQYKDKCPPTDYSRFFKRLCPDAYSYAKDDQTSTFTCPQGSNYDVVLCP

SEQ ID NO: 8315 - protein, 143 aa, Zea mays
  VARIANT 45..143: note = Derived polymorphism lacks residues 45 to 143
MEEGFIGARRRSCNGYQRLRAPPPPTPGRGTCRLERRAVLGSGGWRFVRLRRCRAIAPRWSSPLQLLSRILDTYITSMLSQPLNILKPLNMPPPKLRRDASPGTGSSRRRDAGGSGRGVLLAEAAPENATTEGGGGDSSSRKA

SEQ ID NO: 8316 - protein, 355 aa, Zea mays
  VARIANT 13..355: note = Derived polymorphism lacks residues 13 to 355
  VARIANT 43: note = Ancestral polymorphism is R, Derived polymorphism is I
  VARIANT 48: note = Ancestral polymorphism is P, Derived polymorphism is L
  VARIANT 50: note = Ancestral polymorphism is R, Derived polymorphism is W
  VARIANT 53..355: note = Derived polymorphism lacks residues 53 to 355
  VARIANT 105..355: note = Derived polymorphism lacks residues 105 to 355
  VARIANT 180..355: note = Derived polymorphism lacks residues 180 to 355
  VARIANT 187: note = Ancestral polymorphism is P, Derived polymorphism is L
  VARIANT 240: note = Ancestral polymorphism is P, Derived polymorphism is L
MIIWKNVMKITEQLSKTASNCYISFHSICVVVLTKVDLITIYRSESFPLWVTGWSVELMAYAFLVVSPPDMSQCFEEMAAAASNKTSSWRWRMSSSGPAIVMPCWSSMPQMTDEVIYSSPNFDPKVFLSWVHKDTSAADLEAGALTLKTDPKGRTQQKKLLVKENFDCFVSCKTTIDGICVVIEEDPEGVGTAHLYSVTLKISGVANRAFEPLFERQAQAEKIRSVQGMLQRFRTLFNLPSAIRGNIRKGEYDLAVREYQKAKSIVFPSHISSLLTLHFSCSLGSFPSLLEYSAHTGFSFLSAWHVTAAQRATAGVAAATAGMTRIRPPSLSTMKRHPILGADERWRPRAGYRAE

SEQ ID NO: 8317 - protein, 350 aa, Zea mays
  VARIANT 334: note = Ancestral polymorphism is A, Derived polymorphism is T
  VARIANT 299: note = Ancestral polymorphism is G, Derived polymorphism is V
  VARIANT 251: note = Ancestral polymorphism is S, Derived polymorphism is F
  VARIANT 193..350: note = Derived polymorphism lacks residues 193 to 350
  VARIANT 137: note = Ancestral polymorphism is N, Derived polymorphism is Y
  VARIANT 37: note = Ancestral polymorphism is R, Derived polymorphism is C
MQAKARIHADPVHEFDQFDCLHDSLVLLILNKLEDVRSLGRCSAVSKRFSGLVLLVHDVRVKIDHVVTVDGGADDALNLSSPKPHNIISHLFKMMLFAIAKPFHDMRSPISAGRLLFPQLSQHSPVQVLKNFSHVRNLQVELPSGDVAVEEGVLLKWRAEYGSTLQSCVILGGTLVDRKAAGSGHEPSPDDKGSMPESFYTNGGLKLRVVWTISCLIAASTRHYLLRSIINDHPTLRSLVLADAEGQGALSMGAEQLNDFREHQLSASPCSNRTQVPACNMKLKYAQYLELPGGLALQGATLLVTKPASDGHGNRKEVEAFVSSAFDGPLRFAAKALMKRRTYLLEMNGF

SEQ ID NO: 8318 - protein, 1052 aa, Zea mays
  VARIANT 14..1052: note = Derived polymorphism lacks residues 14 to 1052
MFSSIHTLPLCSSQLNLSIFFSLVVGLCWRIRGLHAMALEAKQAALCFKEVLRLSIRKSYRFVSEHPILFGLGVFLYLFYRSSPRLFVFLLSSSPVNICTALLLGILLSYGEVNLPEASKDHRDTTEVSTSMVGNSSSDVHFEANQRPSVLEFRENASNFKERETKQKVSFRERASEHVDLDDYIPLLKRAGEEDERGDRGNISRTLTPFPSMVNIRQESVIGEDLTFTKKRQSEGSFFMQDRADCQTSLFDEACLCGLNDKDIPFGLFSSSENVNKNDEMEEKFNQQRVFADSTATKERDSSEAMPTEELAGTSKQAASVPIDQWENNGRLNVDTSNVFEDNLLDSSLGSPWARVSSHDGSSGFDSDQAESSPDASMTDIAPVLDEIDPLLRADSNHPDPVPNDDSDTDSHVSEDHQIDDDSNDEGDDIDAKDNVEGEKENDGKEAAFLWTADDEKNLMDLGYSEIERNRRLEILMARRRSWKNMAFEIDNNLIDVHSSGSGTSLDDLSRFRAQVPPIAVPRRNPFDLPYDSEEAAIPGSAPSILHARKNPFDLPLEQSNDSVVVHAHDILNSGEPATSRRDMIFRRHESFNFGRMDVIQEKRFSRLKPYFVPETVEWNASNFERQFNDKSESKMSSVTKSDIASSVADQEDHKDQDEKDLADVGSECSDGINSIDVELDHSDIDDREIALQQFVFERAQEREAHLVSTKGKGREEDYAPESAGSSTMPFHAVPDLLSWEDGDGDNSLGAKPSFQLNTEVKCSEWVSSSRPPVEGESDSGDLPEYLDTEVASSSNTAILGANNAAEKGGNVDRMSYSNDEMPLDNLIHRSMELPSEFFTETLPVISRDLHPIPEERVVENFNVQENHEAAIFTDSVVALTGLHVIEEHFDDGTDRTLSSEVVSSYPRANGVTQSPSSEHAEILNPFVLMAAEHNKVDISDMHGEATAGYLLDSDDEAGKIYPEPMEGSGIDESFLSELDVVGDFGVEPMRLDQQVTDQASHGDNTTDSVTADSVISPQTSDDVSLIMSEVGAEESREQSPLVDDLNGSELY

SEQ ID NO: 8319 - protein, 318 aa, Zea mays
  VARIANT 60..318: note = Derived polymorphism lacks residues 60 to 318
  VARIANT 90: note = Ancestral polymorphism is W, Derived polymorphism is C
  VARIANT 138: note = Ancestral polymorphism is H, Derived polymorphism is R
MITGPYKLIRQCEVTAILILYELPRLLTGSILAHEMVHAYLRLTVLACCQTLDILGSTKWRVNRRVHDVVETILSQGGGFAGLVDKANKWKWSLKKAKKTNRELHAERCDSELKLLILWCSLYAIALLELYLFLFCKRVARKLRDKDGFYYPHNLDFRGRAYPMHPHLSHLGSDLCRGVLEYAEGRPLGKYGLCWLKIHLANKYGGGIEKLSHEGKLAFVENQLFDIFDSAANPVDGNCWWTNVEDPFQCLAPCMDLSDALRSPSPYHAVSHLPIHQDGSCNGLQHYAALGRDYMGAVAVNLVPGEKPADIYSEIASG

SEQ ID NO: 8320 - protein, 296 aa, Zea mays
  VARIANT 241: note = Ancestral polymorphism is D, Derived polymorphism is Y
  VARIANT 228..296: note = Derived polymorphism lacks residues 228 to 296
  VARIANT 173: note = Ancestral polymorphism is G, Derived polymorphism is S
  VARIANT 170: note = Ancestral polymorphism is G, Derived polymorphism is S
  VARIANT 98: note = Ancestral polymorphism is R, Derived polymorphism is G
  VARIANT 97: note = Ancestral polymorphism is R, Derived polymorphism is H
MQIDSDEQPMMMHGNGHGHGRVHPASSSSDFSGEMNQSAVSDPSSSPLYSFHFEKPVPPPPPAGTYVVQVPKDKVFRVPPPENARLFDHYTRRARRRRRGSCSCACLLVGAAVALAAALAGVLACLVLGPKPPAYAVQALAVSGLVNASSSPAALSPGFDATVRADNRNGRLGVRYEGGRGRVSVSYGGALLADGAWPALYQAPRNVTVVVARARGSGVRLSRSVRGQLAAAERLRSVPFDMDVDVPVRLQLGVVRTWAVPLRARCTVAVDRLAADARVVSNSCDVKVRLLSWWRN

SEQ ID NO: 8321 - protein, 1267 aa, Zea mays
  VARIANT 1004..1267: note = Derived polymorphism lacks residues 1004 to 1267
  VARIANT 882..1267: note = Derived polymorphism lacks residues 882 to 1267
  VARIANT 553..1267: note = Derived polymorphism lacks residues 553 to 1267
MALVAKQAPLCFKKVLRLSIRKGYRFVSEHPILFGFGVLLYLFYRSSPRLFVFLLSSSPVIICTALLLGILLSYGEVNLHEASKDHRDTPEVSTSMAGNSSSDVHFEANQRPSVLEFRENASNFKERETKQKVSFRERASEHVDLDDYIPLLKRAGEEDERGDRGNISRTLTPFPSMVNLRQESVIGEDLTFTKKRQSEGSFFMQDRADCQTSLFDEACRSGLNDKDIPFGLFSSSENVNKNAEMEEKLNQQRVYVDSAAIKERDISEAMTTEELAGTSKQAASVPIDQSENNGRLNVDTSNVFEDNLLDSSLGSPWARVSSQDGSSGFDSDETESSPDASMTDIAPVLDEIDPLLRADSNRPDPVPNDDSDTDSHVSEDHQIDDDSNDEGDDIDAKDNVEGEKENDGKEAAFLWTADDEKNLMDLGYSEIERNRRLEILMARRRSRKNMTFEIDNNLIDVHSAGSGRSLDDLSRFRAQVPPIAVPRRNPFDLPYDSEEAAIPGSAPSILHARKNPFDLPLEQSNDSVVVHAHDILNSGEPATSPRRDMIFRRHESFNFGRMDVIQEKRFSRLKPYFVPETVEWNASNFQRQFSGKSESKMSSVTESDIASSVADQEDHKDQDEKDLADVGSECSDGINSIDVELDHSDIDDREIALQHFVFERAQEREAHLVSTKGKGCEEDYAPESTGSSTMPFHAVPDLLSWEDGDGDNSLGAKPSFQLNTEVKCSEWVSSSRPPVEGESDSGDLLEYLDIEVASSSNTAILGANNAAEKGGNVDLMSYSNDEIPLDNLIHRSMELPSEFVIETLPVISRDLHPIPEERVAENFNVQENHEAAIFTDSVVALTGLHVIEEHFDDGTDRTLCSEVVSSYPRANGVTQSPSSEHAEILNPFVLMAAEHNKVDISDMHGEATAGYLLDSDDEAGKIYPEPMEGSGIDESFLSELDVVGDFGVEPMRLDQQVTDQASHGDNTTDSVTADSVISPQTSDNVSLTMSEVGAEESREQSPLADDLNGSEFGYSFGASHDDPEQTVYNPRRRILEASPYEAMIMNVEMKLPHGESEVPADDTPSPATLAAGSSEPEATINELATTTADPDITVLDAKSLEDIETAFRLVSDGVVSEATMGTETLQISGADAAEPKGAAGELHVIDAKSVDDIHAAFQKHFDAIVNSSLEENEDKDRHVEMAESMKPDQLTEAIHAESQHNLGDAREALPAEEGTSDMSTSEAESHNNIGAASDKVSDSSAKNTAQAVVLEVSSEREEESEQQ

SEQ ID NO: 8322 - protein, 521 aa, Zea mays
  VARIANT 106: note = Ancestral polymorphism is P, Derived polymorphism is S
  VARIANT 109: note = Ancestral polymorphism is G, Derived polymorphism is V
  VARIANT 271: note = Ancestral polymorphism is F, Derived polymorphism is S
MAGKQFPSPAHSRSASASSRRLLAAVAASLILLTASYFLLLSPSSHRSAPAILANPSATTSFLASLDRFLSDPHPSASAAAPVELDAAIRVQEDARLYGDPTWPAPAAGLLRVYVYEMPSKFTYDLLRLFRDSYRDTDNLTSNGSPVHRLIEQHSIDYWLWADLIALDSQRLLKSVIRVQQQEEADIFYVPFFTTISYFLLEKQECKALYRVWEHLLRFIFQKMSVLGHPHGQSSEALKWVTDQPAWQRSEGRDHVIPVHHPWSFKSVRRSVKKAIWLLPDMDSTGNWYKPGQVYLEKDVILPYVPNVDLCDHKCVLETQSKRSILLFFRGRLKRNAGGKIRSKLVEELKSAKDIVIEEGSTGAQGKAAAQDGMRKSFFCLSPAGDTPSSARLFDAIVSGCIPVIISDELELPFEGILDYREIALFVSASDAVQPGWLLKYLRGINAKRIREIQSNLVKYSRHFLYSSPAQPLGPEDLTWRMIAGKLVNIKLQIRRSQRLVKESRSICTCECRVGNTTRML

SEQ ID NO: 8323 - protein, 257 aa, Zea mays
  VARIANT 165: note = Ancestral polymorphism is S, Derived polymorphism is L
  VARIANT 136..257: note = Derived polymorphism lacks residues 136 to 257
MSSIGTGYDLSVTTFSPDGRVFQVEYATKAVDNSGTVVGIKCKDGIVLGVEKLVTSKMMLEGSNRRIHSVHRHSGLVMPLQANQAVAGLAADGRQIVSRTKSEAASYEKVYGEPISVKELADRVASYVHLCTLYWWLRPFGCGVILGGYDRDGPQLYMIEPSGVSYKYFGAALGKGRQAAKTEIEKLKLSELTCREGIVEVAKIIYAVHDEAKDKAFELELSWICEESKRQHQKVPNDLLEHAKAAAQTALEEMDAD

SEQ ID NO: 8324 - protein, 162 aa, Zea mays
  VARIANT 62: note = Ancestral polymorphism is E, Derived polymorphism is K
  VARIANT 46: note = Ancestral polymorphism is G, Derived polymorphism is D
  VARIANT 42: note = Ancestral polymorphism is G, Derived polymorphism is E
  VARIANT 39..162: note = Derived polymorphism lacks residues 39 to 162
  VARIANT 16: note = Ancestral polymorphism is S, Derived polymorphism is C
  VARIANT 12: note = Ancestral polymorphism is A, Derived polymorphism is T
  VARIANT 9..162: note = Derived polymorphism lacks residues 9 to 162
  VARIANT 5: note = Ancestral polymorphism is E, Derived polymorphism is K
  VARIANT 4: note = Ancestral polymorphism is A, Derived polymorphism is T
  VARIANT 3: note = Ancestral polymorphism is T, Derived polymorphism is I
MATAELREQLNALLSSMITSGLVEHPIMDFDKVDPYVHQLKGSTPGPTIVVQLCLSTPFREEMATGSNNSSTSVAMGHEVQTIGIAWLPNELSFMKLILSKARLLRTLYVDRNPDDFDNQASTIHNFLPFPFIDEYKSSQFGQSSYAVNHLWELCAENDIDC

SEQ ID NO: 8325 - protein, 121 aa, Zea mays
  VARIANT 77: note = Ancestral polymorphism is L, Derived polymorphism is F
  VARIANT 72: note = Ancestral polymorphism is G, Derived polymorphism is S
MSDEELMEQCDMGTFKASGLGGQHRNKRESAIRLKHLPTGIIAQGMQALLDLLFAVEGSVLDAAKILGLSTGALSRLILSDDSLRTAANELRASKVTLQICELATNAYSLIRGYRIPNFRL

SEQ ID NO: 8326 - protein, 304 aa, Zea mays
  VARIANT 110..304: note = Derived polymorphism lacks residues 110 to 304
MSNRDEVSVVVKCLRLGAAEYLVKPLRTNELLNLWTHVWRRRRMLGLPEKNFFNDNFELVLSEPSDANTNSTTLLSDETDDRPKGNTNQETGTSKQLEYESNPSVAEPDQREKMEGVPGSALDASKKSSPRRAFSRPIKTNLRVAESSAFLAYVKSSTPATSSFDSELQRGGSRLDSLDNQGNCSSATDRSDTGTDVNIRNKEAFEMPAQYPMVWFSSSNMHMERSSEGHNDTSGTPPAYHFPFYYPGMVEHNMALSSAQDFQANINNAQAHTPQEGTFKVCHYAGELFYMQHDSGPDWLIFIP

SEQ ID NO: 8327 - protein, 75 aa, Zea mays
  VARIANT 25: note = Ancestral polymorphism is T, Derived polymorphism is I
  VARIANT 31..75: note = Derived polymorphism lacks residues 31 to 75
MSSSSVASIGQRRLRRRRRKIMKKTCPNDLWIYVEGQDVVDMENVSSEKLRSGGSSCTQASSLRLTSSSFILITT

SEQ ID NO: 8328 - protein, 531 aa, Zea mays
  VARIANT 467..531: note = Derived polymorphism lacks residues 467 to 531
  VARIANT 462..531: note = Derived polymorphism lacks residues 462 to 531
  VARIANT 449..531: note = Derived polymorphism lacks residues 449 to 531
  VARIANT 448..531: note = Derived polymorphism lacks residues 448 to 531
  VARIANT 438..531: note = Derived polymorphism lacks residues 438 to 531
  VARIANT 377..531: note = Derived polymorphism lacks residues 377 to 531
  VARIANT 326: note = Ancestral polymorphism is C, Derived polymorphism is Y
  VARIANT 295: note = Ancestral polymorphism is G, Derived polymorphism is R
  VARIANT 258: note = Ancestral polymorphism is D, Derived polymorphism is Y
  VARIANT 250: note = Ancestral polymorphism is F, Derived polymorphism is L
  VARIANT 229: note = Ancestral polymorphism is Q, Derived polymorphism is P
  VARIANT 221: note = Ancestral polymorphism is T, Derived polymorphism is N
  VARIANT 189..531: note = Derived polymorphism lacks residues 189 to 531
  VARIANT 184: note = Ancestral polymorphism is L, Derived polymorphism is I
  VARIANT 175..531: note = Derived polymorphism lacks residues 175 to 531
  VARIANT 23: note = Ancestral polymorphism is K, Derived polymorphism is T
MHDIVFCVIMSSRRYLSGSEKRKRKKRVDDLIDSQRGAIDKFFKSNASASTNSNDAFALAIIPVRTEEPTNENSREEEHVDINADDNNVSDHDNMSNSSDAHAQFGSVDDQPDIYDPRNWDNLDNKARDILIEKGPIREEEEEQLYSDSNGNFLACVEMIAEFDLVMQDHLRRIQNKEIHYHYLSPKIQNELIVLLSSNITRSIIKIVKEAKYFSVILDCTPDISHQEQMTLLVRCVNLSNGKINIEEYFLGFLNVDDTSGLGLFSVLLDSMKSLGLNINDIRGQGYDNGSNMKGKHQGVQKRLLDINPRALYMPCACHSLNLTLCDMAKSCGKAVSFFGIVQRIYVLFAGSTKRWNVLCKHVPIFTLKSLSNTRWESRISSITAIRYQAKELRSALFELSRASDIEPKDKSDAKSLFDALGNFEFLLGMVIWHDILYSVNKVSKKLQSPDMCIDSALNQIQGMVQYFEAYRNEGFPSSLIISKGIADEMGLEASFPVKRRALRKKQFDESNDQEEILEAERVFKVKYFWL

SEQ ID NO: 8329 - protein, 183 aa, Zea mays
  VARIANT 109: note = Ancestral polymorphism is V, Derived polymorphism is L
MADQLSEEQIAEFKEAFSLFDKDGDGCITTKELGTVMRSLGQNPTEAELQDMIAEVDSNGSGTIDEQEFLGLMARKMRDAESEEELREAFRVFDKDQNGVISAAELRHLMTNLGEKLSEQEVAEMVREADVDRDGHINYDEFVKVMTAKRRSKRTEEKATRGKKKPAAAPSDAGKRGQKCVIL

SEQ ID NO: 8330 - protein, 227 aa, Zea mays
  VARIANT 89: note = Ancestral polymorphism is P, Derived polymorphism is L
MANPRRAIALHIQTQPPPLPSTAAALPPHTLASSLLHFLKRPASFPFLLSLFVLLTWLSLRFHHPSPPPSLGGRPSVVHEPQANLVRFPAELYPTPIARDGRGWLLDPVAAARDAGLPGGALVCLLLHVGQIQPGGLRGNHRHHTCNETFVIWGAKTKFRLENAGIKDEGYGEAMIAADEVAIVASARSTAHALINMDVRPTFFLGCQDTPINPNSSNTDYKVWKDL

SEQ ID NO: 8331 - protein, 487 aa, Zea mays
  VARIANT 130: note = Ancestral polymorphism is Q, Derived polymorphism is L
MGPPAMAFQALTLTPLPFSLHSSSRRVRVLAVAADQTPPPAPPSEPANSPSRLLRELAQRKKAVSPKKKHPPRRFILKPPLDDERLTRRFLSSPQLSLKALPLLSSCLPSAPLSTADRTWMDEYLLEAKQALGYPLAPSETLGEGDDCPARHFDVLFYLAFQHLDPSSERTRMRHVRNGHSRLWFLGQYVLELAFCEFFLQRYPRESPGPMRERVFALIGKKVLPRWLKAASLHNLVFPYDDLDKMIRKDREPPSKAVFWAIFGAIYLCFGMPEVYRVLFEAFGMDPDDESCQPKLRRQLEDVDYVSVEFEKRQLTWQDVAAYRPPPDALFAHPRLFRACVPPGMHRFRGNIWDFDSRPKVMTTLGYPLPMNDRIPEITEARNIELGLGLQLCFLHPSKHKFEHPRFCYERLEYVGQKIQVAGGEASEDVDEQVLWTVPAGQAPAALHYLRGDSARQIRTQSTSKESFNDLCPASATWACILCVWQT

SEQ ID NO: 8332 - protein, 369 aa, Zea mays
  VARIANT 199: note = Ancestral polymorphism is P, Derived polymorphism is L
  VARIANT 115..369: note = Derived polymorphism lacks residues 115 to 369
MAGREVVVVEAAPSFGTGTSSRNSEVIHAGIYYPPRSLKARLCVRGKEMLYKYCEERGVAHKRISKLIVATGAAEVPKLDMLLRNAKENGVDDLQLMEGSEAMEMEPELRCLKALLSPSTGIIDSHSLMLSLLADAENLGTTISYNTSVISGHVGSNGLELHVCESKELQNYHVGSHVNAQLVLLPKLVINSAGLSAVLLAKQFHGLDQEFVPTPHYARGCYFTLSQTKSPFSRLIYPLPEDGGIGVHVTLDLNGLVRFGPDVEWISDGGKDHVSCFLNKFDYSVNPNRCSVFYPVVRKYFPNLKDGSLEPGYSGIRPKLSGPGQPPSDFVIQGWDVHGVPGLVNLFGIESPGLTSSLAIAEHIVSKYL

SEQ ID NO: 8333 - protein, 204 aa, Zea mays
  VARIANT 161: note = Ancestral polymorphism is R, Derived polymorphism is W
  VARIANT 160: note = Ancestral polymorphism is E, Derived polymorphism is K
  VARIANT 60: note = Ancestral polymorphism is R, Derived polymorphism is T
  VARIANT 13..204: note = Derived polymorphism lacks residues 13 to 204
MQAVGGTGTSAGRTQSCHRRRPYPEFFTSTQQMAMPSFAVTSPPSHGTTLWAPHARRPQRLHKRHVCSQVRAAAQAQLQYQKLGDSDFLISEVTLGTMTFGEQNMEKEAHDIIAYSFDQGYPVPMNKETQGRTDLYIDRWMQSKPRDKIILATKVAGYSERSTFLRDNAKVVRVDAANIKVELLFMERSVDSHCPGMVVRMAER

SEQ ID NO: 8334 - protein, 422 aa, Zea mays
  VARIANT 230: note = Ancestral polymorphism is I, Derived polymorphism is N
MESRRGGSVAEDASGAMTSFGPPQHGINTDVNSMQPSRVTDFGALAQSAGFRIEDLVNLNANALFNLKSNTHTINNIPLQFGSYGKPISPHINTTEAATAATRIDPQSLEQQTGAQPNMVALPTGNIENWGESAMAGSPMTDTSTDPDTDERNQMNIHTKVCCFGASDSSDKSRDKLDQKTLRRLAQNREAARKSRLRKKAYIQNLESSRLKLTQLEQELHQTRQQGIFISTSGDQPQSTSGNGALAFDMEYARWLEEHNKHVNELRLAVNAHAGDNDLRGIVGSVMAHYDEFFRLKGVAARSDVFHVLSGMWKTPAERCFMWLGGFRSSEVLKLLAGHLEPLTDQQLVGISNLQQSSQQAEDALSQGMEALQQSLAETLASGSLGPAGPSGNVANYMGQMAMAMGKLGTLENFLRQTISAT

SEQ ID NO: 8335 - protein, 613 aa, Zea mays
  VARIANT 230..613: note = Derived polymorphism lacks residues 230 to 613
  VARIANT 308: note = Ancestral polymorphism is S, Derived polymorphism is L
MAAPAVEAPEASDFNGGGGGLSTGRKLVPWSSWTEWRFVRDGLFSPFPAAALRRIAAWRSRGSLPIPVDVTAAFVDIRLRDPFFRNGLAGDDALDSEEMLAMLYSMAIMRLVNGFVENPYKKTGLSISELADAVGIPRVLVDIRHESSHRSLPSLRLLRLASIKAFDWLKCIYWDRQTNSIPDVQAELRLRLHEIARFLKENNSQESKPGSKRKREYRQSFEAAGRYSLQGRLMTCSEKLVSKAMKYVRRLYYACPSEVVSVLLDLMELDAAGFESSDMQETDSLSVNHSSDTQLSISDMKTIILKLSEKEPRLLLSVLKSVIEMIDAKEDLAYKDESRSCLPAGPSKAKGLCPLVLWLVTNIKEHKDSGYIGLVHEKGVLSSDKNAIPHFCLAKLLQKLLNLSTTSERYLIDAAWLLIEMVNDSNTKEKLRKLPVLSLGRMAKSSSLPDSRTICNEQGSVENATETLELFKVQLKRQKNGGTEGSFSTSTPKKHDRWSIAKSWTPCPIGTAPCSFSSCAVLPAFDSIGHEQNSTLEHGTFEEVDHSERFEPQPEELEDESILEMPRSSPENEISDVKELMCPLKGRLLVGGFWKMVDEEELLLIKSKMKILL

SEQ ID NO: 8336 - protein, 496 aa, Zea mays
  VARIANT 171: note = Ancestral polymorphism is R, Derived polymorphism is S
MLAAATAAYGYFNPALLPTPHSPPASSRLPDLARSAPVASQFGSSHTSAKMREILHIQGGQCGNQIGAKFWEVVCDEHGIDPTGRYTGNSDLQLERVNVYYNEASCGRFVPRAVLMDLEPGTMDSVRTGPYGQIFRPDNFVFGQSGAGNNWAKGHYTEGAELIDSVLDVVRKEAENCDCLQGFQVCHSLGGGTGSGMGTLLISKIREEYPDRMMLTFSVFPSPKVSDTVVEPYNATLSVHQLVENADECMVLDNEALYDICFRTLKLTTPSFGDLNHLISATMSGVTCCLRFPGQLNSDLRKLAVNLIPFPRLHFFMVGFAPLTSRGSQQYRALTVPELTQQMWDAKNMMCAADPRHGRYLTASAMFRGKMSTKEVDEQMINVQNKNSSYFVEWIPNNVKSSVCDIPPRGLSMASTFIGNSTSIQEMFRRVSEQFTAMFRRKAFLHWYTGEGMDEMEFTEAESNMNDLVSEYQQYQDATADEEEYEDEEEVQADDM

SEQ ID NO: 8337 - protein, 539 aa, Zea mays
  VARIANT 98..539: note = Derived polymorphism lacks residues 98 to 539
  VARIANT 217..539: note = Derived polymorphism lacks residues 217 to 539
  VARIANT 389: note = Ancestral polymorphism is M, Derived polymorphism is T
MTRVIHDSGDGMQKEALDLVSSDVNFPKGCFPDYRIGPNNQIIDPEETHEAVPLKEVVAKETAQLLEQHRRLSVRDLKEKFEKGLSSASKLSEEAKRREAASLDRQVLLKKLRDVLDTLKGRVAGRNKDDAEEAISLVEALAVQLTQREGELIYEKAEVKKLANFLKQATVDARKVAEEERALALAEIEKARAAIEKVEKAFHVHDSTKSSREEEIEELRKEVREARRIKMLHQPIKVMDMEFELQALRTLISQKTQLCNQLNKELATIKRLEVDSSDLFELEGSNTLGSQFCIIPRVDGAPNIANCPIQWYRVISGGSRGLISGATKFTYAPEPFDVGRLLQAEIILNADKIIVQTDGPIDNAAGLEHYVDSLMKRTDIEFNVVVTQMNGKDYSSNSVHVFHIGKLRIKLQKGWSTKARELYSTTMKLCGSRGGGNAAARAVFWQARKGLSYTLAFETDRDRNAAIMIARKFASNCNIVFPIILENDMAYTFWWLCRSLSLAQVTKTPDEVIMRVLTETLYIIRCRLADFFGSLFVCL

SEQ ID NO: 8338 - protein, 484 aa, Zea mays
  VARIANT 39: note = Ancestral polymorphism is R, Derived polymorphism is P
MASRNHNAAAPQLHHHNRGGGRCFLRGILTLWSKRSLAPMILTTNISCHADLLLSLVRWSAGVPALGKTKAVPARPDALNRRPPLGDIGNLVSVRPATGNPQEQVNRPITRSFGAQLVKKAQAKAAIKNAAILPARHAPRQERKAPVKQHPPPEDIIVLSSDSEQSRAQSESSASSVRSRRKAINTLSSVLSARSKAACGIAGKPRQVVDDIDKLDVNNELAVVEYIEDIYTFYKIAQHERRPCDYIDAQLEINSKMRAILADWIIEVHHKFELMPETLYLTMYIIDQYLSLQPVLRKELQLVGVSSMLIACKYEEIWAPEVNDFILISDSAYSREQILSMEKGILNRLEWNLTVPTVYMFLVRFLKAATLGGKVEKEMENMVFFFAELALMQYDLVTRLPSLVAASAVYAARLTLKRAPLWTDTLKHHTGFRESEAELIECTKMLVIAHSTAPESKLRVVYKKYSSEQFGGVALRPPAEEICK

SEQ ID NO: 8339 - protein, 474 aa, Zea mays
  VARIANT 442: note = Ancestral polymorphism is A, Derived polymorphism is P
  VARIANT 223..474: note = Derived polymorphism lacks residues 223 to 474
  VARIANT 104: note = Ancestral polymorphism is E, Derived polymorphism is D
MAAAAGGTGGCGCHIVAVPFPGRGHVNAMMNLSRLLAARGAAVTFVVTEEWLGLIRSSSAAAAAEPAGIRIRTIPNVIPSEHGRAANHSGFLDAVATEMEAPFDRLLDGLEGPPPAALVADAYVPWVVGVGNRRGVPVWSLFPMSAAFFFAYYHFDRLPAWLTNSEHAPESGETIGNSDQRLGHYIAGQASSSIRLSDLEPLIHNKRTVKHILTTISSIRNAQSLLFTTMYELEASVIDSLRSVLSCPVYPIGPCVPYMMLEDHTVSSGKVARQGDYFTWLDSQPVNSVLYVSLGSFVSVSASQLEEIALGLIASEVRFLWILREQSPRVQELFSGINNGMILPWCEQLEVLCHHSVGGFMTHCGMNSTLEGVFAGVPMLALPLFFDQPIDGRLIVEEWKIGLAVRDWASKGGLIGREDIARAVKKLMSSDETGTKALRERALELKEASRRAVNEGGSSYCNLSSLMETVCTPK

SEQ ID NO: 8340 - protein, 470 aa, Zea mays
  VARIANT 112: note = Ancestral polymorphism is P, Derived polymorphism is S
  VARIANT 98: note = Ancestral polymorphism is P, Derived polymorphism is S
  VARIANT 90: note = Ancestral polymorphism is A, Derived polymorphism is V
  VARIANT 76: note = Ancestral polymorphism is S, Derived polymorphism is F
  VARIANT 75: note = Ancestral polymorphism is P, Derived polymorphism is L
  VARIANT 66: note = Ancestral polymorphism is R, Derived polymorphism is S
  VARIANT 58: note = Ancestral polymorphism is P, Derived polymorphism is L
MATAAAARHVVAVPYPGRGHVNPMLVVCRLLAAADAALSVTVVVTEEWHALLAAAGVPGTLPDRVRLATIPNVIPSERVRGADFAGFVEAVHIKMVAPVERLLDRLSLERKPDAIVADTFLAWGVGVGSARGIPVCSLWTQPATFFLALWHLDRWPPVDGHQGEEGLSCRSLDQYLPFPALAPVKCSDMKTLRSMVLPMKRLAQVFSNLRKAQCVLFTSFYELETGAIDGTSQVVPCPIYAVGPSIPYMPLEGDSGEFHHEEDYFGWLDAQPRSSVLYVSFGTHVSMPSSQLEEVALGLHESTVRFFWVARDRASTATLEQISAGGKGLVVPWCDQLKVLCHPSVGGFLSHCGWNSTLEAVFAGVPMLAFPVAWDQLVIGHLVADEWKIGVDLRERRREDGVVGRAAICDTVTKLMDLTDDDSLEMRRRAAELREASRRAVQEGGSSRCSLNSFVRDVIEGRLNVAETSR

SEQ ID NO: 8341 - protein, 211 aa, Zea mays
  VARIANT 7: note = Ancestral polymorphism is L, Derived polymorphism is S
  VARIANT 9: note = Ancestral polymorphism is R, Derived polymorphism is H
  VARIANT 18: note = Ancestral polymorphism is L, Derived polymorphism is R
  VARIANT 20: note = Ancestral polymorphism is V, Derived polymorphism is I
  VARIANT 25: note = Ancestral polymorphism is P, Derived polymorphism is S
  VARIANT 36: note = Ancestral polymorphism is T, Derived polymorphism is I
  VARIANT 43: note = Ancestral polymorphism is V, Derived polymorphism is I
  VARIANT 49: note = Ancestral polymorphism is R, Derived polymorphism is H
  VARIANT 58..211: note = Derived polymorphism lacks residues 58 to 211
  VARIANT 61: note = Ancestral polymorphism is L, Derived polymorphism is V
  VARIANT 73..211: note = Derived polymorphism lacks residues 73 to 211
  VARIANT 115: note = Ancestral polymorphism is P, Derived polymorphism is L
  VARIANT 127: note = Ancestral polymorphism is P, Derived polymorphism is L
  VARIANT 131..211: note = Derived polymorphism lacks residues 131 to 211
  VARIANT 155: note = Ancestral polymorphism is P, Derived polymorphism is L
  VARIANT 161: note = Ancestral polymorphism is Q, Derived polymorphism is R
MLKSAVLWRKRFGIDELLGVDLGLPELEKVVFYRGTDREGHPVYYNVWRIQLLERSIWEQLDFSPSGICSMVQITDLKYSPPMLGKDHGVTHQALALLQDNYLEFVAKKVFINVPWWYLATNKVMSLFLTQRTKSKIIFYSPDRSAETLFRYVAPEQVPVRFGGLYKEDDTEFSASNAVTELTVKPSSKETVEVPATEGSTVVWPCGSSAC

SEQ ID NO: 8342 - protein, 169 aa, Zea mays
  VARIANT 32: note = Ancestral polymorphism is R, Derived polymorphism is S
  VARIANT 33: note = Ancestral polymorphism is A, Derived polymorphism is S
  VARIANT 94: note = Ancestral polymorphism is N, Derived polymorphism is S
  VARIANT 100..169: note = Derived polymorphism lacks residues 100 to 169
MALALASPMASLSFHSGRISAASIGGVGRTRRAAPVGVSASPFLRSSFVSSSSTSSASASASPASLAAAVSASLAFTSSSAFAGSSLGIEFSYSIMTTRRSRGMQIRAGKAALCMTKRSRSRKSLARTHGFRRRMRTTSGRKVLKRRRAKGRKVLCTRTNSNSGKKRMF

SEQ ID NO: 8343 - protein, 135 aa, Zea mays
  VARIANT 112: note = Ancestral polymorphism is V, Derived polymorphism is A
  VARIANT 103: note = Ancestral polymorphism is E, Derived polymorphism is V
  VARIANT 99: note = Ancestral polymorphism is V, Derived polymorphism is A
MRKHRIVSLVAALLVLLALAAVSSTRSAQKESAADNAGMLAGGIKDVPANENDLQLQELARFAVNEHNQKANALLGFEKLVKAKTQVVAGTMYYLTIEVKDGEVNKLYEAKVWEKPWENFKQLQEFKPVEEGASA

SEQ ID NO: 8344 - protein, 123 aa, Zea mays
  VARIANT 26: note = Ancestral polymorphism is S, Derived polymorphism is L
  VARIANT 84: note = Ancestral polymorphism is R, Derived polymorphism is C
MAPPSPSTPRVGVPLPYGCLATVKSSMAAVADGAEGVEEDVGASSSMGSAAAESPAASPSSMGSAASTGVTMPPPSPSPPRQSRSGTPSQLVYLSSMPAHPCRGRVCRPLPHRVAHAPHPRRA

SEQ ID NO: 8345 - protein, 180 aa, Zea mays
  VARIANT 68: note = Ancestral polymorphism is P, Derived polymorphism is L
MAAEAQAEGPALAPPPLAHGSSSASPEKRGLPIPGDDDGAAAAAEEEEEQLPEPKRRRPCVATLDNVPGAAVSLVLVTEETEDSPGSGSGGDGASFSFQHARGGFVALETTPKFGSFNPPGEAELAALDLKHARHEADAEGSTEADDEVPAASAPGAGAEAKGESSQLPGGEVDGQVQTF

SEQ ID NO: 8346 - protein, 129 aa, Zea mays
  VARIANT 105..129: note = Derived polymorphism lacks residues 105 to 129
  VARIANT 100..129: note = Derived polymorphism lacks residues 100 to 129
  VARIANT 74..129: note = Derived polymorphism lacks residues 74 to 129
  VARIANT 60: note = Ancestral polymorphism is P, Derived polymorphism is L
  VARIANT 59: note = Ancestral polymorphism is M, Derived polymorphism is K
  VARIANT 57..129: note = Derived polymorphism lacks residues 57 to 129
  VARIANT 49: note = Ancestral polymorphism is N, Derived polymorphism is H
  VARIANT 19..129: note = Derived polymorphism lacks residues 19 to 129
MGSMAITVSNNYFTHHNKWLDFSSNGEGQDNACDSYVEDKAMQVTIAFNHFCEGLIQRMPRHLEDSVLLRSALQATTSEVLKVVEDGLREASFEIGLDDRKVHKEMDEIYTMATIISRIPWNLRSGSLS

SEQ ID NO: 8347 - protein, 341 aa, Zea mays
  VARIANT 6: note = Ancestral polymorphism is P, Derived polymorphism is Q
MAEMRPIYREPGKPRRPPRSHGSGSFSVPLWEKKFCTDACAIPWAKLCETKRLMSLYKSVVDWDDSAALEAFNDAKARFCAVYHGQCYDIPLPDPNMFIDIINPDEYVDPELVADLEKSRRSVPRKDNGVPDVWDSFIFSDKPVPVTGWGDTETSFTHGQQLSVNWDNQLEHSVEANHKQMSASWDYSVKQPSQRIGQQNSGNWEVYKEQQDQASNWGEQTNPCSTNWVMDGSQDAWKHGYGWGPAAIQTDPWDNCQYSYQVPDSQGTYGHWTHWRRRNNDLGRRNTRNRGDPISSKPMKSKYQTDEHSGANNGWRNCRVKNDMYYYSYEQADYTKQSLAM

SEQ ID NO: 8348 - protein, 381 aa, Zea mays
  VARIANT 138: note = Ancestral polymorphism is P, Derived polymorphism is S
  VARIANT 66..381: note = Derived polymorphism lacks residues 66 to 381
  VARIANT 64..381: note = Derived polymorphism lacks residues 64 to 381
  VARIANT 18: note = Ancestral polymorphism is V, Derived polymorphism is M
MGVLSSRVYLIPGIKRIVVNMNSTSSQRGYPAKRWCAANMSSTSMRHSAWKSEPWTHLTHKQRRPQWIAYNPRTMRPPPLSTDTNSMKILSWNVNGLQAIVQSGFSADELVARENFDVLCLQETHLEASCFGVSIAAPSYTASSWAVGCFDVYMGFLNNPIYHDMERNVDLFKNLVHEYDYTCWSCSVARLGYSGTAVISRVQPISVQYGLGIPEHDQEGRLITLEFDDFYLVNAYVPNSGRGLRRLNYRINDWDPCFSDFIKKLECSKPVIVAGDLNCARQSIDIHNPQAKTEAAGFTIEERESFEVNFSRKGLVDTFRKQHPNAVAYTFWGENQRITNKGWRLDYFLASESIADKVHDSYTLPDVALSDHSPIGLLLKL

SEQ ID NO: 8349 - protein, 268 aa, Zea mays
  VARIANT 252: note = Ancestral polymorphism is R, Derived polymorphism is Q
  VARIANT 242: note = Ancestral polymorphism is K, Derived polymorphism is N
  VARIANT 239: note = Ancestral polymorphism is A, Derived polymorphism is T
  VARIANT 235: note = Ancestral polymorphism is G, Derived polymorphism is R
  VARIANT 213: note = Ancestral polymorphism is A, Derived polymorphism is S
  VARIANT 204: note = Ancestral polymorphism is G, Derived polymorphism is V
  VARIANT 167: note = Ancestral polymorphism is V, Derived polymorphism is F
  VARIANT 162: note = Ancestral polymorphism is P, Derived polymorphism is T
  VARIANT 153: note = Ancestral polymorphism is L, Derived polymorphism is Q
  VARIANT 150: note = Ancestral polymorphism is G, Derived polymorphism is V
  VARIANT 148: note = Ancestral polymorphism is L, Derived polymorphism is M
  VARIANT 143: note = Ancestral polymorphism is S, Derived polymorphism is P
  VARIANT 127: note = Ancestral polymorphism is T, Derived polymorphism is M
  VARIANT 117: note = Ancestral polymorphism is V, Derived polymorphism is G
  VARIANT 109: note = Ancestral polymorphism is A, Derived polymorphism is S
  VARIANT 104: note = Ancestral polymorphism is P, Derived polymorphism is S
  VARIANT 102: note = Ancestral polymorphism is A, Derived polymorphism is S
  VARIANT 100: note = Ancestral polymorphism is C, Derived polymorphism is F
  VARIANT 97: note = Ancestral polymorphism is S, Derived polymorphism is F
  VARIANT 93: note = Ancestral polymorphism is F, Derived polymorphism is L
  VARIANT 87..268: note = Derived polymorphism lacks residues 87 to 268
  VARIANT 62: note = Ancestral polymorphism is A, Derived polymorphism is T
  VARIANT 40: note = Ancestral polymorphism is A, Derived polymorphism is V
  VARIANT 34: note = Ancestral polymorphism is A, Derived polymorphism is D
MDDESEARAMPRRPTPPSPPPWEALHLVAPFLDAASLAAASCVSTSWHTAFAADDLWARLCAQHFPSALGLLPDTDSDRRCSSPPHRRLFKLFRSASVRCRALPAPRLALADVSFAVDVVTAGGDSTLSFLVAADKAAHVENSAGLFLFGVDLSGRNGAIGPGEWRVRWTAVRTAARRGEEPAAVLMMDAKVPAARAAGAVAFGGRGEAGVSARLPAPGCGGAKLDAEVVVELAGEEKAVGKVRLGVMCECRYVCADEGLRYLQHFLV

SEQ ID NO: 8350 - protein, 515 aa, Zea mays
  VARIANT 225..515: note = Derived polymorphism lacks residues 225 to 515
  VARIANT 244: note = Ancestral polymorphism is A, Derived polymorphism is V
MAALSHNGNGTTRRSVGGGPPIPANPSRPSARREGVDQVPGRRPTAAARQGVDGVLGLPFLSGLAAGGDAKDLRFDLSTAFPSVPALRLSYRPNEPLQPFALSVRTGSPIRAPFALAAEFNLTSSNPPAFSLLFKPRIGDFAVASSVHSPPTPPPTSTPPPLAIKMVDLTTNSDDHDCEAHGNDLSFAENVFGANVAAATGTNGGGVGALLSGMRLTTRSVLPLWSKASLWFQWGLRVPPEIKATLADNGYGRKAGSLAISKLPLLVMNKITIEHTPKVPSQSEADKKRKKDTPPAAEDEEFSLMKRQLDKLNAESTMLRRAVEDLSAEIGAGKGNDRKLPTAVPPQQHTLVSKPDRHFHINAKELVDSGTKPASNEASEELKKVLEGRRNCYTNPYVVSWPLNIMKQATTAISFSEVSPFDTILHLLQLMWSFKPCLYMDFGLASAVTTLWTCTDVTHLVHVLLQFRLVWCGKLIRYARAVAAHYVCSVKGLCFDLFIIRGRNRTFNACWRCTM

SEQ ID NO: 8351 - protein, 372 aa, Zea mays
  VARIANT 201..372: note = Derived polymorphism lacks residues 201 to 372
MASALVPASFSLAHPAARRPVNSTGPAAMLMLRRAGLATVCPPERSLGSDCLRAGADPRLAIHVALRCRSASSTGRGTRAAATMTKKSVGDLTAADLEGKRVLVRADLNVPLDDSQNITDDTRVRAAIPTIKHLISNGARVILTSHLVIKADDVVGPEVEKLVSALPNGNVVLLENVRFYKEEEKNDPEFAKKLASLADLYQELDYLVGAVSNPKRPFAAVIGGSKVSSKIGVIESLLEKCDILLLGGGMIFTFYKAQGHSIGSSLVEDDKLELATSLLRKAKEKGVSLMLPFDLVVADKFAPDASSQAIAKKLAELSGKGVTTIVGGGDSIAAVEKVGVADSLSHISTGGGASLELLEGKELPGVAALDEA

SEQ ID NO: 8352 - protein, 377 aa, Zea mays
  VARIANT 164..377: note = Derived polymorphism lacks residues 164 to 377
MCNSNVKSAGVAQIDGRPVLQPAGNRVAAPDAARPLKKSLHKSFSMPPSYDNNATVPARPAPAENTRAAPAPPSLLPPTTPAPAPAAARATKAAGAVPAEKPRSKARKPGAVLPVATFAAPEAFEPAGSIAAARREHAAQAQAQRKSRIAHYGRTASFSRVEGRVGATATAEPAVPASPTTGLDEKRCSFITPYSDPLYVAYHDEEWGVPVHDDELLFEMLTLSGVQVGADWTSILKKRHVYREAFSGFDVDAVAKYTEKQMASLSADYGLDLGTVRGTVNNACRILEVRRDFCSLDKYVWAFVNNKPLSPSYKYSRKIPVKTSKSESISKDMVRRGFRFVGPTVIHSFMEAVGLTNDHLVSCPRHRVCSAAARVNN

SEQ ID NO: 8353 - protein, 299 aa, Zea mays
  VARIANT 250: note = Ancestral polymorphism is M, Derived polymorphism is T
  VARIANT 120: note = Ancestral polymorphism is E, Derived polymorphism is A
  VARIANT 115: note = Ancestral polymorphism is K, Derived polymorphism is R
  VARIANT 43: note = Ancestral polymorphism is G, Derived polymorphism is E
MASYYSSWRQRQTIRFPRLQTINHGQVISFQHMLGLLVRPDVGVIVIQGIAGSGKTWAAKAAYRAARTSNLFQEYVWVPLSINCSMRQCLNKIAASLSCNKGDNLSVERTKAIIKEYLTARKFLIVLDNVYFTEEGILEYLGVPRPRQQSLGSKIFVTTRTVRGESIMEPDVVIMPQPLTYEESYDLLREKIGKDINFAHDLISCCFGMPLTVILLAGVLYGSPTQEAFDELVAKAHVTLEAQTSALNTMKRLVKFGYQQLPNNNVRRCLLYCLLFPEDQGISVKNLALENRWSTPENY

SEQ ID NO: 8354 - protein, 839 aa, Zea mays
  VARIANT 420..839: note = Derived polymorphism lacks residues 420 to 839
  VARIANT 639..839: note = Derived polymorphism lacks residues 639 to 839
MVVGQGRRLPPGHGAVEVERRRCHREGEAGMGLLCCLYGARLRVLRAAETMPGLSDGVIAKTSMSQERTLDEVVFPFLMQLERARVVPLGPDEDSSHSDILLLFENIKKEACEVKDILLRVSKWENEIINDFGGIARHLDEIIEEGNQLNSIHSTLQIVNTEMSKLKDRMQLPLHVPMIKPIAPTTLPSSVPSKWVHAKVSEQWKRLEIERKILESSTISNLQVSYDNLDLQLKLCLLCFSVFPENSIISKRAMIHWWIGEGLVAATRSQTAEDVGKACFEKLIALEMIEPVYQKCRYGVNQCKLHPWIRRMLIKVAKQARFFEFDSDGNATWDCSATHRACLVEEHQQEIDVASLRNLLTIFNINEQYLQFEKSWFLDLRKIAVLQLGRWHNLCRHHIEVDSTEFLEGLQSSNQLKYLCLRGISRIIELPASIGGLSNLRILDLHACHNLERLSTSITYLQMLTHLDVSECYLLEGMPRGIGLLTELQVLKGFVIGGSTGNYNCRVAELARLDKLKKLTIYIGSKVAVTENELNELENIKGLCVLKITWAVSLSKKERVHQTSDSTPLITSLSLPLNLEKLDLCCFPGEKVPDWLSPSKLLRLKRLYFTGGMLKTFGNKNMLEVWSVEVLRLKFLNDLSVQWTQVHEIFPKLTFLEVFRCRKLESFPCDKDGVGDEDQQNNGNKGIGNALADPNVDATKSKQSSTHGMQDNAGKFSGKKVVDLDSILVDGSSGSGIFQGLGLGDELQEGLGEEEVGRTRSQPDGVPGSLLSAYEMVKKNGQVTPEVAVCAAVPAVYTGSSVSYRSKRRAATSAGDSLERASKLKASRNLDSDFMEGEV

SEQ ID NO: 8355 - protein, 411 aa, Zea mays
  VARIANT 349..411: note = Derived polymorphism lacks residues 349 to 411
  VARIANT 170: note = Ancestral polymorphism is G, Derived polymorphism is V
MAVEVVQFLVKKFVDSFTEEAADAEAELPFRAQFHDMRTDLEKAAVSPANADELRECLYELNDLLAECRRLANRPNQQRWCFAQSDAWRFPKTKKRVTAVRRRVLECVENDSGGNAAASQEDAAAGLDRWTTSWLEGSRIHGFDQQLAELESMAFRDCGAGKLNGVGIVGMGGIGKTVLAQLLFSSPRAKGRFFPRIWMCMSRTASAGADRRKEVLQGMLMALGHEEDAILSMNGSDSLTELTIAVHEQLEGKRFLIVFDDVWHIDSWYSDVVGVGPQNAMRRADDLSVLSERLAFALPKGRGGLVIVTSRLEQAAEAMVRKSCLYRVRPLVDSASWAIFMDVVLSQPQEKKAVDLVTVNHMKQEILETCGGFPSAAKTMGDIFASSSVSPPASTSTSEELGKSDHIITAR

SEQ ID NO: 8356 - protein, 707 aa, Zea mays
  VARIANT 191: note = Ancestral polymorphism is T, Derived polymorphism is K
  VARIANT 560: note = Ancestral polymorphism is R, Derived polymorphism is L
MDANWTYMDSFLTTWNEWEIRMLVLTSLALQVFLLFSAGIRKRNVSAVLSLLLWLAYLLADSIAIYALGYLSQTRVPKGVDPQSFERTHRVQAFWAPFLLLHSAARTPSPPSPPKTTSSGSATCSASSPSLVSASKYSLDEKLLLFFARSREKKQVALAVYVFAKSHPGNNVLAPALFMFLSGIVKYAERTWALKCASMDNLRSSMVTTPDPGPNYAKFMEEYRFTRDCERRAKTAAAVTVAVAEEAVPYTTVITEASHFFVIFKRLFVNLILSFQERTQSQSTFLRLTPEQAYKIIEIELSLMYDTLHSKAAVIHTWYGRLFRCLTLLSTSTACVLFNMLDRGKHKSHSRIDICITNILFGGALCLEVYAIGMMLVSYWTYAALHDCNYRSLGSLVFRSIQYFRPESRAKWSNLMAQHNLIGFCLLDKPTKLTKVLSVLGLKVHWDRWLYIRHIDVSSELKTLVFRELKDKTVSIVDAESYRKFSNHRGQWALQCKGYYKELGWSVEVEFDESILLWHIATDLCFHSGDGDDNDAKMIPHYVDISRAISNYMLFLLVARPFMLTAGIGQIRFGDTCAEAKNFFKRAEMARPSASAAARMVLDVNAEIAPRDVKGDRSKSVLFDACRLAKSLLELQPHKRWRVIRVVWVEMLCYAANKCQSNFHAKQLSTGGELLTVVWFLMAHFGVGEQYRIEAGHARAKLIVQKN

SEQ ID NO: 8357 - protein, 530 aa, Zea mays
  VARIANT 127: note = Ancestral polymorphism is R, Derived polymorphism is M
  VARIANT 11: note = Ancestral polymorphism is L, Derived polymorphism is P
MSPMALLTPLPIPLLSPYCQRVSSPSLLAAGAVIRPLICLSPHNHRHHDALYPSVPNVWPRHRRRRRGAVASVDQEESSASETAVAPEEDLGPPVSSDAAAEDGVATSAQPAEASPEDLENIREIKRVLELLKKNRDMTFGEVKLTIMIEDPRDIERKRTLGIEDPDEITRDDLADALAEVNEGKIPENRVALQLLAKEMAEWPDIEIEAPKKKSKPGKSVYAKATDTGIDPETAAKRLNLDWDSAADIDGEEEDDDETEVPSAVGYGALYLLTAFPETADHSCVDRIAGSLAQPPMAPSFRIRSSEKSTEQLTDTAWPGDNVESSGKLTFPCAMSQEDASSFKREAEARVADDEEEGRRFRSGSSVTDLSSNASSINYRKARQGKIGGDGFWCGVLCMYLPGLSRRRSMQQQQSMSLSEANTAGPAGDRSSTVSKVASMERFKYSSSSSGAAFERTGASEEEEEVSAYFDLPLELLRISSVDTESPVTAAFVFDGNRGRSAKKIVPEIPDLDFSFPAPPVFSNPSSPRS

SEQ ID NO: 8358 - protein, 483 aa, Zea mays
  VARIANT 58: note = Ancestral polymorphism is G, Derived polymorphism is V
MVGSGADGGGGGDDARSKEAAGMMALHEALRNVCLDSDWTYSVFWTIRPRPRCRGGNGCMVGDDNGSLMLMWEDGFCRPRVAECLADMSGGEDPVRKAFIKMSIQLYNYGEGWVLYWVGAVQVQVQAVELMGKVASDKCHKWVFKEPSECEPNISNYWQSSFDALPPEWTDQFASGIQARELFDSPAEFSFVFIINIVLVTFVFFLSALQTIAVIQAGHGLLQLGSCKIIPEDLHFVLRMRHTFESLGYQSGFFLSQLFSSARGASPTPPPPAARPPPAQLFNWPGAHQPQLFPPGPGAFHHPSARAMPPLFPGGGKDEGHMFHIPPAHHGSKPLHMDELQHRHQQTMGAGGEAPDGELRWPNGLSFFTALTGRDDDAKLLFGGPGAADDEKAAPDAQTGHGGAGNVEEYLSLESHSDKAPSKVENGAQHSTKSKRSFTLPARVSSSTTTSPSVSASTAPQGMEYRGTHEGGVYSDLMETFLE

SEQ ID NO: 8359 - protein, 237 aa, Zea mays
  VARIANT 56: note = Ancestral polymorphism is S, Derived polymorphism is I
MAPRVADKSPLPPATGLGLGVGGGVGGVGMGPHYRGVRKRPWGRYAAEIRDPAKKSRVWLGTYDTAEEAAKAYDSAAREFRGAKAKTNFPFPSQCSVASGAAGSASSNSTVDSSGGGSGCGIQAPMQAMPLPPALDLDLFHRAAAVNAVSTGMRFPFKGYPVACPTPQQYFFYEQAAAAASGYRMLKVAPPAVTVAAVAQSDSDSSSVVDHSPSPPAVTANKVGFELDLNWPPPAEN

SEQ ID NO: 8360 - protein, 298 aa, Zea mays
  VARIANT 217: note = Ancestral polymorphism is P, Derived polymorphism is R
MPAQKRRLPSPSSKPRDDVAATASDAAAGGGVGEGRGGRPPLPSRDAAKRWLTDPEPQQGFEDDSDAEDDGGADGDSEFSQSDGGGNDGFMLVKLAEIRKEVQCPICLGIIRKTRTVMECLHRFCRDCIDKSMRLGNNECPSCRTHCASRRSLRDDPNYDALIAALYPDIDKYEEEELAFNEQEMTRNQKFQLYLVLLPVDGQTIPHLEKPYLSCQPTLSIQHLVELIALQLSRKVEELEMYIRMDGDHGSVGSMACSIGEFDGLERLREDKLLSELHPSFASSNGDLELRYALKTRD

SEQ ID NO: 8361 - protein, 753 aa, Zea mays
  VARIANT 23..753: note = Derived polymorphism lacks residues 23 to 753
MVLQCHRIASLSVRFRRARFLPRSRTAVRSRIIVRVRRTPSGSSVLPPASPCPLPFPTTIPPPPPSATLKSPSFPTPPQRRNFSTPATPLKSSSLRQGIPPPMRLLPLLLLLLAGAGARASDDPFLSGASANAVWSPPSLPGPGAAANHSYNIDCGGAADFTSALGRRWLADRFFSAGGAAGMVAEPHRFPQPQERTLRFFPPSSAGKSSCYSLPLPPGRYYLRLFSVYDNYDSKLRTPSFDVSAAATLVLSFRSPWPEPAARYGAYSDLIFPSATEPASDLCFYSLSTDAPAVASIEVSPVHPLAYDGATTGADLVLVNYGRVTCGNSLFGPGFTRDADAFSRVWQADVDFRNNDLSYDAITAGGRKVFGSNQPPNYFPTKLYESAVTTGGDAANEIEYLMPVDTRLSYMVWLHFAEIDAGIGSPGQRVFDVVLAGENVTRIDIFKQVGGFTAFKWTYIVKNLTSSTLSVRLVPVVGRPILCGLENYAMVPLEMRTVPSQVAAMKALKESLKIPARMGWNGDPCAPRAWDAWEGVTCHRGDKGLVITQLDLASQGLKGYITDEISHLKDLVSLNLSYNSLTGSLPPGLGQPSLVSLDISSNEFTGSIPGTIGSSKLQTALLNNNQLDGQVPERLYSIGVHGGVIDLSGNKGLCGVPTLPACALFWEKGGLNKTGKIALGASFGFVLLVILIVVYILCIRRGPYDYDFDFPQDLTSISAISAKRNRYQRAKSVMLAEMEAHNPDGFYTNGSPH

SEQ ID NO: 8362 - protein, 639 aa, Zea mays
  VARIANT 210: note = Ancestral polymorphism is T, Derived polymorphism is K
MALCSSMRAHLALLLCFCLLLSGVNGRSRKTYIVYLGDVKHEHPNDVIASHHDMLTAVLRRLAQQDLAGAIAAQTNCAFLPWLNPTEFPEVISVEPSRSYTTMTTRSWDFLGLNYQMPNELLHRSNYGEDIIIGVIDTGIWPESRSFSDEGYGPVPSRWKGVCQVGEGWGSNNCSRKIIGARFYSAGVAEEELKIDYLSPRDANGHGTHTASTAAGSVVEAVSFHGLGAGAARGGAPRARIAVYKAIWGSGRGAGAGNTATLLAAIDDAIHDGVDVLSLSLASVENSFGALHAVQKGVAVVYAATNFGPASQVVRNTAPWVITVAASQIDRSFPTTVTLGNKQQIVGQSMYYYGKNSTGSSFRPLVHGGLCTADSLNGTDVRGQVVLCAYITAPFPVTLKNVLDAGASGLIFAQYYNIHIIYATTDCRGIACVLVDLTTALQIEKYMVDASSPAAMIEPARTITGKETLAPTIASFSSRGPSIDYPEVIKPDIAAPGASILAAVKDAYAFGSGTSMATPHVSGIVALLKALHPSWSPAALKSAIMTTASVSDERGMPILAQGLPRKIADPFDYGAGHINPNRAADHGLIYDIDPNDYNMFFGCSFRKPVLRCNATTLPGFGPFARRHRPWRRANTAIEI

SEQ ID NO: 8363 - protein, 50 aa, Zea mays
  VARIANT 40: note = Ancestral polymorphism is S, Derived polymorphism is R
  VARIANT 29: note = Ancestral polymorphism is T, Derived polymorphism is I
  VARIANT 9: note = Ancestral polymorphism is V, Derived polymorphism is I
  VARIANT 8: note = Ancestral polymorphism is D, Derived polymorphism is G
  VARIANT 1: note = Ancestral polymorphism is T, Derived polymorphism is M
MEVHVEEDVARRDAALVMRTTPKMDESRTEGDPDPTGSGSGILGPSVAER

SEQ ID NO: 8364 - protein, 130 aa, Zea mays
  VARIANT 32: note = Ancestral polymorphism is V, Derived polymorphism is M
MPSNYLPQEQGRPFCAMQRKAMLITLKKPSVMPSLSSLADKRSSAAGSGMWETKTLSLLNPMSSLSIDERGFTKFVRAEYLKYKSEGRIAPDGVNATAFRAVNIQASALTTFFCRFNYEVFGSTPLKTKV

SEQ ID NO: 8365 - protein, 159 aa, Zea mays
  VARIANT 127: note = Ancestral polymorphism is D, Derived polymorphism is H
MSDLDVQLPSAFDPFAEANAEDSSAGAGSKDYVHVRIQQRNGRKSLTTVQGLKKEYSYNKILKDLKKEFCCNGTVVQDPELGQVIQLQGDQRKNVATFLVQVLKLRKLVGLRNISSRYSSEYVSLFDLIRLVLMQVVLAVCFVSVTCMKVSFVWGTVYY

SEQ ID NO: 8366 - protein, 121 aa, Zea mays
  VARIANT 82: note = Ancestral polymorphism is S, Derived polymorphism is R
MGNCAVTQHAVTSWADDGEWDVPSAAAAAADEEGAGGAVAAAGTSGRKDHAAGAAEVTIRITRKQLQQLMEKRAGGLHGLKRRRAAAQLLADVMDAGQVFHHCRAAHWKPALQSIPEAVES

SEQ ID NO: 8367 - protein, 243 aa, Zea mays
  VARIANT 12: note = Ancestral polymorphism is T, Derived polymorphism is M
MGNCLRLRRAATWADGDEWEEEAEPCSKAKAAPAAVEDKVEVKIRVTRRQLQELLEKASRRQVEEVLAELMTSGTVYYPRQRDEIRRHWRPALYSIPEGVEESPSSSRYIAVPSMGNCTASQRAAESWADDGEWEEAASSSPLSSEGDHHHHHHHRDERREDHHDSEVTIRITKRQLHELIEKNGGGHGLPLPGSGRRRRSSAEQLLADIMDSGEVHHRDHHREDHWHWKPALQSIPETVESS

SEQ ID NO: 8368 - protein, 382 aa, Zea mays
  VARIANT 5: note = Ancestral polymorphism is E, Derived polymorphism is Q
MASKEFLLAFLVIILHGAAATTTVHAANIIDRCWRRQPNWAANRQRLAACSVGFAGKMRQNRGPGVTAYTVTDPGDDPVRPRPGTLRYGATVLGGKVWITFERGMHIRLAQPLFVRSFTAIDGRGADVHIAGGAGIVLHEVSGVIIHGLHIHDIRSQPEGPAVRPGGAVRPAGGGGGSGSGTDGDAIRVVASSKVWIDHNSLSRCEDGLVDVTVGSNDVTVSNNWFFNHDKVMLLGHDDGHAADSRMRVTVAFNRFGPNVNQRMPRIRHGYAHVVNNVYLGWRDYAIGGSMGPSVKSEGNLFVASGTAENRKVTRRMPFAGRDWDWASVGDSFENGAFFKQTGSRVQPNYNKHQAFAAASSNQVRSLTKDAGALSCSVGSAC

SEQ ID NO: 8369 - protein, 91 aa, Zea mays
  VARIANT 35: note = Ancestral polymorphism is E, Derived polymorphism is K
MAPKKDKAPPPSSKPAKSGGGKQKKKKWSKGKQKEKVNNAVLFDQATYDKLLSEVPKYKQITPSVLSERLRVMYIAFSASHGGNYVSVPDD

SEQ ID NO: 8370 - protein, 118 aa, Zea mays
  VARIANT 47: note = Ancestral polymorphism is R, Derived polymorphism is C
MATRAASRFLQRRLLSSGGKVLSEEEKAAEKVYIKKMEQEKLEKLARKGPSSGEQPSSTTVSAASDVKTGAGPTESASANVSTDKNRNYAVLAGTIAALSGLGWYLLSKPKKSEEVVD

SEQ ID NO: 8371 - protein, 75 aa, Zea mays
  VARIANT 46: note = Ancestral polymorphism is S, Derived polymorphism is F
MSCCGGNCGCGAGCKCGSGCGGCKMYPDMAEQVTTTQTVIMGVAPSKGGFEAAAGAENGGCKCGANCTCDPCTCK

SEQ ID NO: 8372 - protein, 597 aa, Zea mays
  VARIANT 279..597: note = Derived polymorphism lacks residues 279 to 597
MASMSHLIAKPAPAATFPLSLPRTSSGFRPRRVTVQRVSCASPRGERYELDARKHDRRDVLLGLGALGASATATLASARRAGADPVATPDISSCGQANLPVSANVLTCCPPPSSALPVDFILPDATSLPLRTRPAAHSVTTDYVAKFNAGIAAMKALPADDPRSFAAQASVHCAYCDGSYSPEGFPGVELQVHNSWLFFPFHRCYLYFFERILGSLIGDPGFAVPFWNWDAPDGMRMPAMYADRSSQLFDPRRDSRHAPPKLINLDYNANVREPRFTYKQQVDHNLRVMYRQMVSLSPTPSLFFGSAYRAGDDPNQGPGPVESIPHGPVHIWCGDPNQPDGEDMGNFYSAGFDPLFYAHHANIDRMWSVWKGLDVRRHTDLTDPDWLDASFLLYDETPKLVRIRVRDVLDTDRLRYRYQDVPLHWTAARPTVTAGTRRADSFLAPAAQAAPAAARKAGEFPITLDEATIVTVKRPVAGKRSKAEKDSKEEVLVIDGIEVDRDVAAKFDVFVNTEDHGAVGSGGRELAGSFVNVPHRHGHGHGHAKKGRGIKTKLRLALNEQLEDLEAEGDESVVVTLVPRQGKGRVKIGGVKIELMH

SEQ ID NO: 8373 - protein, 437 aa, Zea mays
  VARIANT 154..437: note = Derived polymorphism lacks residues 154 to 437
MGMFASAAKRYSNGKNFLRSAGVCCCSPSASAQLGGVRGKEETSTSAPAFAPDSNKKRWRKRRFWRKKMKARKEIGGLVDLVNDISAKSEESLGVSNQNMPSRALTFSQLSAATDGFSSQNLLGEGGFGRVYKGLLEDTGEVIAVKQLNRDGLQGNGEFLVEVLMLSLLHHPNLVKLLGYSTDSNQRILVYEYMPRGSLEDHLLDLPPSWKPLPWHTRMRIAVGAAKGIQYLHEVANPPVIYRDLKASNILLDADFNAKLSDFGLAKLGPMGDQSHVSTRVMGTYGYCAPEYAMTGKLTKMSDIYSFGVVLLELITGRRAIDMARPSEEQVLLNWASPLLRDKRRFVKLADPLLGNRYPVKALYQALAVASMCLQEDAASRPGISDVVAALSFLADPQYYPPGGTEAEHKSTHSGTDNDSSPPRAEMVRADDDMKHR

SEQ ID NO: 8374 - protein, 220 aa, Zea mays
  VARIANT 169: note = Ancestral polymorphism is R, Derived polymorphism is L
MASATGGSSSEMAVDHATGLGTVEKPRFDALMPSEMSGGRTQFRKVTVPQHRFAPLKRCWMEIYTPVYEHMKIDIRMNLKARRVELKTRQDTPDVSNLQKCADFVHAFMLGFDIADAVALLRLDDLYVDSFEIKDVKTLRGEHLSRAIGRLSGKGGKTKYAIENSTRTRIVIADTKIHILGSFVNIKVARDSLCSLILGSPAGKVYSKLRAVSARLAERY

SEQ ID NO: 8375 - protein, 214 aa, Zea mays
  VARIANT 125: note = Ancestral polymorphism is D, Derived polymorphism is G
  VARIANT 106: note = Ancestral polymorphism is F, Derived polymorphism is V
  VARIANT 76: note = Ancestral polymorphism is N, Derived polymorphism is K
  VARIANT 5: note = Ancestral polymorphism is R, Derived polymorphism is Q
MAHGRMMMGCVFLACLLVAASVPSTASAFVFKAGGTGEWRVPAAAAGSNVSAYNAWAQRNRFRVGDAIAFTYQPGKDSVLLVDERSYDACDASSPTDTFADGSTVFTFNRSGPFYFISGNKGNCDRGEKLVVVVMAERAAIGTGGTGLAPSPSSSSSPNGPFSAFSPPPPPFGIDISPSPTAAYPPPSAAPPKMAGLAGAAAFAIIGALFYALV

SEQ ID NO: 8376 - protein, 267 aa, Zea mays
  VARIANT 231: note = Ancestral polymorphism is D, Derived polymorphism is G
  VARIANT 170..267: note = Derived polymorphism lacks residues 170 to 267
  VARIANT 145..267: note = Derived polymorphism lacks residues 145 to 267
  VARIANT 90: note = Ancestral polymorphism is G, Derived polymorphism is D
  VARIANT 55: note = Ancestral polymorphism is P, Derived polymorphism is A
  VARIANT 36: note = Ancestral polymorphism is A, Derived polymorphism is T
  VARIANT 27..267: note = Derived polymorphism lacks residues 27 to 267
MDAPAAAEGCGKHIVLVHGACLGGWSWYKVATLLRAAGYRVDAPDMAASGADPRPLREVPTFRDYTRPLLDLLASLPDGDRVVLVGHSLGGVNVALAAETFPDKVSAVVFLCAFMPDCTARPSHVLEKFIEGKWLDWMDTEMKPQDQDGEGKLPTSMLFGPRIIREKFFQLCSPEDLTLSASLMRVSSMFVEDLALRQPYSKERYGSVRRVYVVCTEDYAIVEGFQRWMVDNSPVDEVKEIAADHVVMLSRPDELVRCLTDIADKYA

SEQ ID NO: 8377 - protein, 152 aa, Zea mays
  VARIANT 122..152: note = Derived polymorphism lacks residues 122 to 152
  VARIANT 89: note = Ancestral polymorphism is G, Derived polymorphism is R
  VARIANT 66: note = Ancestral polymorphism is R, Derived polymorphism is K
  VARIANT 61: note = Ancestral polymorphism is S, Derived polymorphism is L
  VARIANT 34: note = Ancestral polymorphism is P, Derived polymorphism is L
  VARIANT 28: note = Ancestral polymorphism is P, Derived polymorphism is S
MLNLKGLAYEYAEEDLGNKSALLLSSNPVHKTVLVLLHAGRPVNKSQIILQYIDKAAKEKLKEIDRLAREQKAEERQKQRGKEPDVEARIEIPEERGLGSMTIIVIVSMSKVVEKTNPMIREREREDQSTEAISTEMGGILKESVIDTGVVI

SEQ ID NO: 8378 - protein, 133 aa, Zea mays
  VARIANT 54: note = Ancestral polymorphism is G, Derived polymorphism is R
MKRLLEDRDIFIYLGEKAFYSDECRNGLIEEAAEEEDNMENFNPLSENGEQGTGWAFTPPTTENMLWVCIGASFTLPWFYCIDHLGWAALPELKGRQHTGSAAAPDRRRDGIASRGWRLCINDVPHSPTCIYP

SEQ ID NO: 8379 - protein, 354 aa, Zea mays
  VARIANT 123: note = Ancestral polymorphism is V, Derived polymorphism is L
  VARIANT 139: note = Ancestral polymorphism is M, Derived polymorphism is K
MALRRRLLLLVVVVAAAVARCRADDPAVSMLLPGLPVAGLAVGFYNEKCPQAEDLVLAEMRTLVDKDETIGPALLRFMFHDCLVRGCDASIMLVSRNGTAERDAFPSYGLRGYAEIEHIKAKLEDACPLTVSCADIIVMAARDAVYLSNGPRYAVETGRRDGKVSAEYDADNDLPPPSSKIVDLKTYFSFKGLGWKDLVVLSGTIQPMSCPTTAGSHTIGRAQCTTFASDRLYNYSGHVGQDPSLNKAYAAQLREMCEPGLADDTTMVEMDPRSPYTFDLSYYRNVRANRGLFTSDQALLDDPWTSAYVERMADAASPDEFFADYAAAITNMGRIEVLTGDNGEIRSACAAYVD

SEQ ID NO: 8380 - protein, 99 aa, Zea mays
  VARIANT 24..99: note = Derived polymorphism lacks residues 24 to 99
MKVNESRLAEDLEQTWEVLAEPIQTVMRIYGIPEPYEKLKELTRGQAVTKDNMQQIINGLDIPEEVRSKLSKLTPHSYTGPAEDLARDIMKWVDLESGF

SEQ ID NO: 8381 - protein, 333 aa, Zea mays
  VARIANT 160: note = Ancestral polymorphism is T, Derived polymorphism is I
  VARIANT 224: note = Ancestral polymorphism is V, Derived polymorphism is G
MTSFLTKKNCQAQLIYWDSKVSEVDMDAMWKHPDVYKEWIKSGERRGNVRFSHDAKNRPYLSHVEVKVMGFIKPIASIKRLSVSVMLAPDLPLCAIGDEKRLMQTILNISGNAVKFTKEGHITLVASIVKADSLREFRTPEFHPTASDEHFYLKVQVKDTGCGVSPQDLPHVFTKFAHPQSGGNRGFNGSGLGLAICKRFVSLMGGHIWIDSEGTGRGCTATFVIKLGGLSLGIEKDRTSTVAMGFVDDSKVVTCSPPSINEKNDRTLVKLVEQFGPRKWSYIAQLLPARVGKRCRERWHKHLRPNIKGTIFQCLLYRSSARGARGGGYVKMS

SEQ ID NO: 8382 - protein, 203 aa, Zea mays
  VARIANT 71: note = Ancestral polymorphism is A, Derived polymorphism is S
MAVKIYVVYYSMYGHVGKLAEEIKKGALSVEGVEAKIWQVPEILSEEVLGKMGAPPKPDVPVITPQELAEADGILFGFPTRFGMMAAQMKAFFDATGGLWREQSLAGKPAGMFFSTGTQGGGQETTPLTAITQLTHHGMVFVPVGYTFGAKLFGMDQVQGGSPYGAGTFAADGSRWPSEVELEHAFHQGKYFAGIAKKLKGSA

SEQ ID NO: 8383 - protein, 71 aa, Zea mays
  VARIANT 3: note = Ancestral polymorphism is L, Derived polymorphism is M
  VARIANT 7: note = Ancestral polymorphism is R, Derived polymorphism is C
  VARIANT 19..71: note = Derived polymorphism lacks residues 19 to 71
  VARIANT 22: note = Ancestral polymorphism is A, Derived polymorphism is T
  VARIANT 29: note = Ancestral polymorphism is T, Derived polymorphism is M
  VARIANT 36..71: note = Derived polymorphism lacks residues 36 to 71
  VARIANT 42: note = Ancestral polymorphism is G, Derived polymorphism is R
  VARIANT 45: note = Ancestral polymorphism is E, Derived polymorphism is G
MFLQYLRDYPTFAATARYWTEAFAKSASTGMEEKVQKLVEMGFPEDQVRSALNSVDGDENMALEKLCSGSG

SEQ ID NO: 8384 - protein, 659 aa, Zea mays
  VARIANT 186..659: note = Derived polymorphism lacks residues 186 to 659
  VARIANT 248..659: note = Derived polymorphism lacks residues 248 to 659
  VARIANT 327..659: note = Derived polymorphism lacks residues 327 to 659
  VARIANT 337..659: note = Derived polymorphism lacks residues 337 to 659
  VARIANT 354..659: note = Derived polymorphism lacks residues 354 to 659
  VARIANT 443..659: note = Derived polymorphism lacks residues 443 to 659
  VARIANT 457..659: note = Derived polymorphism lacks residues 457 to 659
  VARIANT 529..659: note = Derived polymorphism lacks residues 529 to 659
  VARIANT 559..659: note = Derived polymorphism lacks residues 559 to 659
MEPLPSATAAGVGGPGPGYPESTESSPRSRGGDSWDEPFPSSAAAAAAAAGGGGRLRLMCSFGGRIVPRPTDKSLCYLGGETRIVAVDRHASLADVHARLSRSLLGGRPFTLKYQLPNEDLDSLISVSTDEDLDNLVDEYDRIAATSSGGGTSRTSRIRLFLFPAKPESSSSLGSLLDDSSKSENWFVDALNSAISGSLDGIPRGISTDSASVNCLLGLEDDSSVHSRSGVTNSAPTEDQRASQPKLQAGAAAAAVGTGRHPHDVQSVPDSPMLDKNSSFGSTSSAPSLSNLPPIRVRPEDRPSDARIMQPTAVEDHFAQMGISEQQLPMYIQAQQQVPIPAMTGMSPSEASSRMFSDDDKSDHGGGGGRKPQPPKQDVPPVVDPTNRAVYYNDRSPPAELKRDMPVGTEAASYRLPVSAPDAAAAAAATAATQAPPGYVLAQMHAPPPPQQPPPQQQPQQPAPQQIVAAGNQHFIHNPATGTFIPIQSYYHHPVHQQAPQTMQRQQQAPTFDPNTGMYYVPMQQNAHQAYGVPPGAQVTLPPPTLVDTTPKPTVPIPQMAVRPELQQPGVYRTTAAATPAPAPNAAPGYAGMAYHHVIQSHHHHHPAPQPVANMAGNYGYEFADPTRPQVYYSQAAAPPTLPQYPPIVSPDAGQAEKH

SEQ ID NO: 8385 - protein, 852 aa, Zea mays
  VARIANT 66: note = Ancestral polymorphism is N, Derived polymorphism is I
MRACALPLVLLATAAFFPLSTSTDTLGTSASIAGNNQTLVSAGDVFQLGFFSPDGARTYLGIWYYNITVRTIVWVANRQSPVLSSPAVLRLSGADGRLLVLDGQNGTVWASAAPTRNVTAGATARLLDSGNLVLSSDGSGSDQSVAWQSFDYPTDTLLPGMKLGVDARAGITRNITAWRSASDPSPGDVTFKLITGGLPQFFLLRGKARLYTSGPWNGEILTGVPYLSSNDFTFRVVWSPDETYYTYSIGVDALLSRLVVDEAAGQVQRFVMLNGGWSNFWYYPTDPCDTYAKCGPFGYCDGTGQSPACFCLPGFEPRSPQQWNLRDGSAGCVRRTSLGCGGGANASSDGFWVVDQMKLPEATNATVYAGLTLEQCRQACLSNCSCRAYAAANVSGGVDRGCVIWAVDLLDMRLYTTDVEDVYIRLAQSEIDALNAAANRRAPSKRVVVIAVVATVTGVLLLLLSAGCCCVWRRKRRERHGETDPCPAPPSGGGDDALPFRARKQQALDEDWRSAEKDVDLPLFDLAAVLAATGSFSASNKIGEGGFGPVYMGKLEDGQEVAVKRLSRRSMQGAVEFKNEVKLIAKLQHRNLVRLLGCCIDEDERMLLYEYMHNQSLDTFIFDEGKRRLLGWQKRFDIILGVARGLQYLHEDSRFRIVHRDLKASNVLLDTNMVPKISDFGIARMFGGDQTTAYTLKVIGTYGYMSPEYAMDGVFSMKSDVYSFGVLVLEIITGKRNRGFYEEELDLNLLRYAWMMWKEGRGADLLDPVMDGGGSVNHSEVLRCVQVALLCVEVLPRNRPLMSSAVMMLASENATVAEPNEPGVNVGKNTSDTESSHGFTANSVTITAIDAR

SEQ ID NO: 8386 - protein, 121 aa, Zea mays
  VARIANT 61: note = Ancestral polymorphism is G, Derived polymorphism is C
MLPTHSRCGVCPPNPCIALCRFRLIIGDGVVVPAAAHEVGSSSNLAQFRNSGGSFPGRLGCCGPANVGGVEGDLHRWRALHAHPPSPIPAASSDADSAAETTLEYCISLFIFCFDLGLNLP

SEQ ID NO: 8387 - protein, 520 aa, Zea mays
  VARIANT 251: note = Ancestral polymorphism is R, Derived polymorphism is I
MFGKISFCRECTLVNLLILSVIASRCLSAPTERLGSIFQNQSILDGQTLVSMSRIFVLGFFSPGASSKRYVGIWHNDVSERRVVWVANRNDPLQDTSGILKFDNSSNLIVLDGRGNSFTVAYGRGVQDVEAAMLDNGNFILRSITNQAKIIWQSFDSPTDTWFPGINITLGAKLLTSWKSYDDPAVGDYSFGPGITNASQLIIWWKGIQFWTSLRWNGDTNSLIPELTSLGIIPVLFQCDNLTCTYTANPRDTMTKIVLDPNGSLNIAQFSPVTESWTLLWRQPPSCEVSNICGVFGICNNNMSPICHCPLGFEQQAGDTRKGCTRQIQLQCNGDRFVNMSNMRFPDSRVKLSVMGDGKCQLECMKNCSCTAYTYSVLDGCSLWYGNLTNMQDGYKSGAGTLYLRVANSSGHKLLWIAGVLPSIGFLIFCLILFIWISRSKNKGKGKQDGHHSIMTSDAIKLWEGEKTSTYFAVFSFSQIRNGTDKFSTENMLGEGGFGPVYKKHVVMCLWVYPYLVIAI

SEQ ID NO: 8388 - protein, 338 aa, Zea mays
  VARIANT 106: note = Ancestral polymorphism is G, Derived polymorphism is E
MAAGFGPRFAAGDAPARRCNLERFLEATTPVVASSSCSSKETANGWGQRQSDDADGSSPFFALGDLWDSFKECSAYGTAVPLALNGCSDGVVQYYVPYLSAIQLYGALRRHIGPSRTGAEESDSDAERETSSSTNTLSAREEASESSTSGSEASGDEGEPGPGSWCQERLLFEFLESEPPYQREPLADKACHSDESPVQICSLAQRFPELKTLRSCDLSPASWISVAWYPIYRIPTGPTLRDLDACFLTYHSLSTQFAAGASSNGPRPATAATATAMMWLPTFAMASYKLKAAAWTPGWRDRQVAASLAQAADAWLRLLRADHPDHRFFAARRPPRRW

SEQ ID NO: 8389 - protein, 93 aa, Zea mays
  VARIANT 5: note = Ancestral polymorphism is L, Derived polymorphism is V
  VARIANT 19..93: note = Derived polymorphism lacks residues 19 to 93
  VARIANT 43: note = Ancestral polymorphism is L, Derived polymorphism is F
  VARIANT 54: note = Ancestral polymorphism is M, Derived polymorphism is K
  VARIANT 59: note = Ancestral polymorphism is D, Derived polymorphism is Y
  VARIANT 62: note = Ancestral polymorphism is G, Derived polymorphism is R
MVRKVGVEGLIQELCKGFQLLMEPRTGKITCQSLKQNAARFGLGELHGDELPEMIREGDLDGDGALDQMEFCILMVRLSPKLMEEEAHMMFQY

SEQ ID NO: 8390 - protein, 201 aa, Zea mays
  VARIANT 44: note = Ancestral polymorphism is A, Derived polymorphism is T
MASPSRKVLLGVTFERRLRSRTRQLFWAADLPVATTSRSLAAAAATTLPSGGSPAALLFSLRTISSTRLSKLSAFSDAPGPSVVDHKSIMQEDEFHKLADETIHDLLETLEEYGDSIQMDGFDIDYGNQVLTLRLGDLGTYVVNKQSPNRQIWLSSPVSGPSRFDWDAATNGWIYKRTGSNLVQLLEKEIGELCGTPVQLS

SEQ ID NO: 8391 - protein, 69 aa, Zea mays
  VARIANT 46: note = Ancestral polymorphism is E, Derived polymorphism is Q
  VARIANT 37: note = Ancestral polymorphism is R, Derived polymorphism is Q
  VARIANT 36: note = Ancestral polymorphism is H, Derived polymorphism is Y
  VARIANT 35: note = Ancestral polymorphism is R, Derived polymorphism is W
  VARIANT 32..69: note = Derived polymorphism lacks residues 32 to 69
  VARIANT 31..69: note = Derived polymorphism lacks residues 31 to 69
  VARIANT 14: note = Ancestral polymorphism is S, Derived polymorphism is F
MITEYILRRMYCYSRVDQVHHALGEAGSGHWWNQRHRAVGCSIIAEQEHQVKVAPKRSRKGIILIWQVG

SEQ ID NO: 8392 - protein, 261 aa, Zea mays
  VARIANT 53: note = Ancestral polymorphism is A, Derived polymorphism is V
  VARIANT 73: note = Ancestral polymorphism is R, Derived polymorphism is C
MAAKLSTSADAPASVRLSAAAQAAAIQPSSPRFFFSSLAGTNPASPHRRIAIAVDLSDESAFAVKWAVQNYLRPGDAVVLLHVRPTSVLYGADWGSIPVSVADEADAAEDAAAAAEGGPSEEELQKKREEEYDAFTSTKAQDLAQPLVDAQIPFKIHVVKDHDMKERLCLEAERLGLSAMIMGSRGFGASRKGGKGRLGSVSDYCVHHCVCPVVVVRYPDDAADASGDASGATDELHTVPEDEPVYHDAPEVQKGLPLFFF

SEQ ID NO: 8393 - protein, 78 aa, Zea mays
  VARIANT 10: note = Ancestral polymorphism is P, Derived polymorphism is A
  VARIANT 31: note = Ancestral polymorphism is Y, Derived polymorphism is C
  VARIANT 40: note = Ancestral polymorphism is K, Derived polymorphism is R
  VARIANT 42: note = Ancestral polymorphism is R, Derived polymorphism is W
MGLWLALLLADHGSLMYLFLGDLGCMLYTGCFRWELGSDKARRAKQALLDELGGDTIIDVLYLEFWTTPIVAEQVNFT

SEQ ID NO: 8394 - protein, 154 aa, Zea mays
  VARIANT 61: note = Ancestral polymorphism is P, Derived polymorphism is S
  VARIANT 57: note = Ancestral polymorphism is K, Derived polymorphism is N
  VARIANT 54: note = Ancestral polymorphism is M, Derived polymorphism is L
  VARIANT 36: note = Ancestral polymorphism is E, Derived polymorphism is D
  VARIANT 17: note = Ancestral polymorphism is D, Derived polymorphism is V
MRQRQTGRVADALSLLDDMLLCGYQPNVVRYIVLQEAMCKNSGFEQAMAVLDELLAKGCTPNIVMYNVITNDVFREGCVDDAREILNRLSSYGYGFQTNTVSYTTLLKGLCASKRWDDILEFFVEMMEKNCMPNEVTFDMLIIFFCRVGMFLNE

SEQ ID NO: 8395 - protein, 87 aa, Zea mays
  VARIANT 41: note = Ancestral polymorphism is V, Derived polymorphism is M
  VARIANT 45: note = Ancestral polymorphism is E, Derived polymorphism is G
MASRGSAALVVACLLVAVTVAAAVPPPVSVSQLFCRKVYGMHERETCFAVAQAAGLTLKQFLRFNPNVNCRKLFIGQWVCLDAILVS

SEQ ID NO: 8396 - protein, 680 aa, Zea mays
  VARIANT 260..680: note = Derived polymorphism lacks residues 260 to 680
MAAVHGRVLLLLLSTLTFLAVHAVTAAAATATSCAPRTCGNLTIAYPFWLPVPDQQASSSSLPPCGPSAFQVDCRGGRASLARSFRGAYKILRVSYADRTVVVANDNVQTDASGCPVPRIDVSASLSLAPFTASGANAQLVFLFNCSKPPPAGFVNVTCPGAQAVVRLDPRYNTTDARAVAGACDYSVVPVLVSPGGGASAGDYPRLLRGGYLLEWRASPGNCTACNASGGQCGYDSDTDAFACLCDDGSSHPARCGAKKSDRKVILIVSVSIAFGLLLALLVLILKFHRQITRSFSFLLDRSSSGDTADVEKLLQKYGSLAPKRYRYAELKRITKSFQRKLGEGGYGAVYSGVLAAGAGGTRAREVAVKVLHHARPNGEEFLNEVVSIGRTSHVNIVTLLGFCLEGSKRALVYEYMPNGSLDRYIRSESDPAGTAALGWEALQEIAAGIARGLEYLHEGCNTRIIHFDIKPQNVLLDADFRPKIADFGMAKLCNPKESILSMADARGTIGFIAPEVFSRGFGVISTKSDVYSYGMLLLEMVGGRSNAKACAADKSSGGELFFPLWVYDHLLLEDGVGVLRGGGGGGAGGSGEAAAGEEIARKMALIGLWCIQTVPASRPSMSRVLEMLERSVHDLAIPPRPYHTSPSNSPSPSHPSSYPSSTSDFTQRSSRLRTPESTG

SEQ ID NO: 8397 - protein, 399 aa, Zea mays
  VARIANT 300: note = Ancestral polymorphism is E, Derived polymorphism is V
MNGSSGSQGHHVSGEKKQVCHVSRPILNNGPKHRPLTPMRRCRGVACVVIILSTAFLLVVYLAPITTFAVRLFSVHYSRKATSFLFGMWLSLWPFLFEKINKTKVVFSGENVPPKRRVLLFANHRTEVDWMYLWDLALRKGHLGYIKYILKSSLMKLPIFSWAFHIFEFIPVERKWEIDEAIIQNKLSKFKNPRDPIWLAVFPEGTDYTEKKCIMSQEYASEHGLPMLEHVLLPKTKGFICCLQELRSSLDAVYDVTIAYKHRLPDFLDNVYGVDPSEVHIHVRMVQLHHIPTTEDKITEWMVERFRQKDQLLADFFMKGHFPDEGTEGDLSTPKCLANFLTVVCLTAICLYLTLFSFVWFKVYVVASCAYLSFVTYYSILPPQLIGSPEGDVKAKKVV

SEQ ID NO: 8398 - protein, 203 aa, Zea mays
  VARIANT 162..203: note = Derived polymorphism lacks residues 162 to 203
  VARIANT 150..203: note = Derived polymorphism lacks residues 150 to 203
  VARIANT 134..203: note = Derived polymorphism lacks residues 134 to 203
  VARIANT 73: note = Ancestral polymorphism is S, Derived polymorphism is F
  VARIANT 32: note = Ancestral polymorphism is A, Derived polymorphism is T
  VARIANT 18: note = Ancestral polymorphism is T, Derived polymorphism is M
  VARIANT 17: note = Ancestral polymorphism is V, Derived polymorphism is M
MPPKLDPSKVVEVFVRVTGGEAKVSVIPSAAALVIKALKELERDRKKVKNIKHSDNISLDDVIEIAKTMRHRSMAKELAGTVKEILGTCVSVGCTVDGKDPKDLQQEIDDGEAKGRLHRWDFETEEEWAKYNDQKEAMPKAAFQFGVKMQDDRKTRKQNKDQKLTNDLHKINKILARKKGEKDGVEDGGHYDDDLPSSKKQRG

SEQ ID NO: 8399 - protein, 213 aa, Zea mays
  VARIANT 188: note = Ancestral polymorphism is Q, Derived polymorphism is H
  VARIANT 174: note = Ancestral polymorphism is A, Derived polymorphism is T
  VARIANT 150: note = Ancestral polymorphism is T, Derived polymorphism is A
  VARIANT 15: note = Ancestral polymorphism is L, Derived polymorphism is P
MEVKLWNDKRERELLESYADLYAIIKAVEKLERAYVRDLVSAADYEAECLKLISQFNSLSSSLAGAVTVPRFVQAYRLDCPAALNRLLQSGVPATVELRAASASSAPAATAASASAIAHCVQTFITAMDAVKLNMLANDQVRPLLQDVATSMARLGSLLPPDFEGKVKVNEWLAKLHKMGAADELTEQQARQLNFDLDSAYSAFLAALPAAGL

SEQ ID NO: 8400 - protein, 287 aa, Zea mays
  VARIANT 56: note = Ancestral polymorphism is T, Derived polymorphism is M
MAGRYDRNPFEEDDVNPFAGGSVPPASNSRMSALPHEPAGFYNDRGATVDIPLDSTKDLSKKEKELQAKEAELNKRERELKRKEEAAARAGIVIEDKNWPPFMPIIHHDISNEIPIHLQRMQYLAFSSLLGLTACLFWNIIATTAAWIKSEGVMIWLLAIIYFISGVPGAYVLWYRPLYNAMRTESALKFGWFFLFYLLHILFCVWSAVAPPFPFKGKSLAGILPAIDIIGRSAIVGIFYFIGFGMFCLESLLSIVVIQQVYMYFRGSGKAAEMKREAARGAMRNAF

SEQ ID NO: 8401 - protein, 983 aa, Zea mays
  VARIANT 288..983: note = Derived polymorphism lacks residues 288 to 983
MAAAAVAAAGSSNVEFIRARSDKREYRRVVLANALEILLISDPDTDKAAACMEVEVGSFSDPEGLEGLAHFLEHMLFYASEKYPGEHEYTKYIIEHGGSYNAYTSSETTNFFFDVNVDNFEEALDRFAQFFIKPLMSQDAVLREIKAVDSENTRKICCLMAGGCISFNFILFSSQLQKHFASKDHPYHKFSTGSWETLETKPKARGLDIRLELLKFYKNYSANVMHLVVYGKENLDCIQGLVERMFSDIKNTDQRSLKCPSHPLSEEHLQLLVKALPIVEGDYLRIIWPITPSIQFYKEAPCHYLSHLIGHEGEGSIFHIIKELGWAMNLMAGECSDSNEYSFFSVSMRLTDAGHERMEDIVGLIFKYLHLLKEDGVHEWIFNELAAINEMEFHYQDKVRPINYVMRTVSTMRLFPPEEWLVGAALPSKYASQRINMILNQLIPETVRIFWESKKFEGSTSSAEPWYNTPFSVENVTPSVIQEWIEKAPTEKLHLPKPNIFIPKDLSLKEVHEKVTFPTVLRKSPLSQLWYKPDMLFSTPKVHIIIDFHCPLSSHSPEAVVATELFVDLLVDYLNAYAYDAQIAGLFYSIYVTSAGFQVSLGGYNDKMRVLLNAILVQIVKFEVKPNRFSALKETSVKDYQNFNFRQPYSQASYYVSLILGDKKWPVAEKLEALSKLESDYFAKFVPHLLSKTFLECYVQGNIEPSEAKSIVEEIENTIFTTPNSLFKSMSPSEYLIKRVIMLENDLKCYYQTEGLNQKNENSSVIQYIQVHQDDAILNIKLELFSLIAKQPAFNQLRTVEQLGYITSLSLRSDYGVLALQVVIQSTVKDPSYLDVRVDEFFKMFESKIYELSDKDFKRNVKSLIDSKLEKFKNLWEESHFYWGEIEAGTLKFDRVESEVAMLRELKKEEFIEYFNQYIKVDAPQRRTLSVQVFGGNHLVEFKKAINEANPPKMYRITDIFGFKRSRPLYSSLKGGPGRITMD

SEQ ID NO: 8402 - protein, 80 aa, Zea mays
  VARIANT 6: note = Ancestral polymorphism is R, Derived polymorphism is P
  VARIANT 17: note = Ancestral polymorphism is V, Derived polymorphism is E
MRCKRRPRLGMGWLRSVLSPLRKLWCRVNAVQRKKRGIYILYDDVKSCQCEDVHVLWAILVESHGLPTPTPTPPLLSLKR

SEQ ID NO: 8403 - protein, 408 aa, Zea mays
  VARIANT 282: note = Ancestral polymorphism is E, Derived polymorphism is A
MKEAMAVAALDEIWWREPEEEAPVEWTWSWGAGTDGQLGNGGFDDHHLPQPLLLPTRCRSRVSFVAGGGAHAIALTSDGEVFTWGRGTHGQLGHGNLDNMPHPKLVKFLENHTVTCVSAGWNHSGFATDSGQLFMCGDGSFGQLGTGDNLSRNFPFEVAYFNATHIEKLAFGMRHSLVLLKDNSVYGFGSARRGQVGKCASRIQKSYNVPRLIDGFPNCKIVNIYANGDHSAALDESGHLYVWGRALIGQHDDDQPSEILPSLSVSQVALGWHHALVLSAGELYTLGVYRHQKCDLPGLGNVLGQQSDTRATSSSHDCSSSLSVLETVPFLDGEQVAQIASGTEHSALVTDKGTVFTWGWGEHGQLGLGDTSDHVAPQRVNVGDNGQGMSGSFAVYCGSGFTVAVKSP

SEQ ID NO: 8404 - protein, 188 aa, Zea mays
  VARIANT 8: note = Ancestral polymorphism is P, Derived polymorphism is S
  VARIANT 11: note = Ancestral polymorphism is P, Derived polymorphism is S
  VARIANT 158: note = Ancestral polymorphism is S, Derived polymorphism is R
MSKKQTFSFESYSFRGKQRGDSEGMARRKDGWGDGDKIKIGVCVMEKKVSCSPMEQILERLRAFGEFEIIIFGDKVILEDPIESWPICDCLIAFYSSGYPLEKAEKYAALRRPFLVNELAPQYLLHDRSKVYQQLKLYGVPVPTYAVVRREYPNQELSYFLEEDDFIEIHGKRFCKPFVEKPIDGNSS

SEQ ID NO: 8405 - protein, 558 aa, Zea mays
  VARIANT 78..558: note = Derived polymorphism lacks residues 78 to 558
MDLEHNFHTPLSPQAAQEYHAFHELVRNLQNSRVDKDKWTYPWGNSAFSSSKFYSLTFQSIQPLLPLTGFDSLSTDYWSYVGFHWNHDLDFSMIQDAKDAFGHSFSWKFWPWWYYDDAACILRKIFLDEKAPHIPSTIPTNLPWKISEPAQASDTARCRERVTVGLSRPSEELRCVIAVIRHGDRTPKQKVKLKVTEEKLLKLMLKYNGGKAHAEAKLKSALQLQDLLDATRILVPRARSGRESDSDIEVEHAEKLRQVRAVLEEGGHFSGIYRKVQLKPSNWVRVPKDNREGEEYPVEALMVLKYGGVLTHAGRKQAEELGRYFRNNMYPTIATLSFYLVRVVVFFIGEGPGLLRLHSTYRHDLKIYSSDEGRVQMSAAAFAKGLLDLEGELTPILVSLVSKDSSMLDGLQDGTIDINEAKAQLHDIITSSEVAHYNEPMEFPWMVDGARVPKNAAQLLTDLAELTKEITAQVKMLSDDEDEKAAIGSDSPNPPYDIAKALGKAEIDTDRLLAGLPCGSESFLLMFARWKKLERDLYNERKKRFDTTQIPDIYDSCK

SEQ ID NO: 8406 - protein, 494 aa, Zea mays
  VARIANT 133..494: note = Derived polymorphism lacks residues 133 to 494
MAAADSATASSSSPPECPAAPSIPTDPDFLSCVLQPPTSSSSRPDADYATLRRLLLRRKPPSALQHRMEWRCNDNGYVAYRNFLLRRIDGGSAQSTPSNSGRWAPSPVHAILSEADSWNYMRDLRSNSGVLNQAISIGSKQSDTERHVRFAEPAYSFVGVHCIFDNCKASVTILKFGRANSDLLAYGAADGSLMVCQVSEPPSVLQKMIGHSKNITDFDFSSNNQYIASCSLDKTVRVWEISKGTCIRVVYGVSSQLCICFHPVNNNLLLVGNANKEINRKTNYLSFAISFVIDDAINFSTGRVISKLNFDDAVTALDIDHTGQFIFAGDAQGYIYTVSVNSHTGSLSRTHKNKSSKSKSPITTIQYRTFSLMARCPVLLSCAQDGNLSFFSITTDAKGYLTLICSLKLASRVQTIRASFCPLLSLEKGEFIVTGSEDANVYFYDLARPKNSCVNKLQGHGSPVIGVAWNHGENFLASSDSDGTVIVWKRSKTS

SEQ ID NO: 8407 - protein, 517 aa, Zea mays
  VARIANT 253..517: note = Derived polymorphism lacks residues 253 to 517
MRRAGAGGSALPGFQRMPCDNSSFVGFRRRFGSYSYREHGAGAATPPGSGCLVAVMPTVPPPDRDSRHNYVAGLRNGFLLEWTAVSGDCSKCTASGGECMYPANGLAFSCNCPDGIHYPVSCGSKRTGRRTIMSIVLMAVAGTLLLPCIYLLICHIKGQKPRFLISKMTVNKNERNIEALISSHGSLAPKRYKYSEATKITSCTNNKLGEGGYGVVFKGRLNDGRLVAVKFLHDYKAKGEEFVNEVMSIGRTSHVNIVSLYGFCLEGSKRALIYEYMANGSLDKHIYSENPKQILGWERLYAIAVGIARGLEYLHYCCNTRIVHFDIKPQNILLDHNFCPKIADFGLAKLCHTKESKLSVTGARGTIGFIAPEVHSRAFGVASTKSDVYSYGMLLLEMVGGRKNMKLMVEKSSQTYFPDWIYDHYAQNDGLLACEVTHEDEEIARKMILIGLWCIQILPMHRPTMTEVLDMFERGLDELDMPSKQNFSQVLEDLAYNMNAESTNPSSTARTQASVAC

SEQ ID NO: 8408 - protein, 541 aa, Zea mays
  VARIANT 319: note = Ancestral polymorphism is G, Derived polymorphism is S
MTRCLMFTLLFLVSSLISTVGLPVEPPAELLQLGGGDVGGGRLSVDASDIAEASRDFGGVARAEPMAVFHPRAAGDVAGLVGAAFRSARGFRVSARGHGHSISGQAQAAGGVVVDMSRGRGPGAAVARALPVHSAALGGHYVDVWGGELWVDVLNWTLSHGGLAPRSWTDYLYLSVGGTLSNAGISGQAFHHGPQISNVYELDVVTGKGEVVTCSETENPDLFFGVLGGLGQFGIITRARIALERAPKRVRWIRALYSNFSEFTADQERLISLGSGGGRRFDYVEGFVVAAEGLINNWRSSFFSPQNPVKLTSLKHHSSVLYCLEVTKNYDDETAGSVDQDVDTLLGELNFLPGTVFTTDLPYVDFLDRVHKAELKLRAKGMWEVPHPWLNLFVPASRIADFDRGVFRGVLGGRTAGAGGPVLIYPMNKHKWDPRSSAVTPDEEVFYLVAFLRSALPGAPESLEALARQNQRILDFCAGAGIGAKQYLPGHKARHEWAEHFGAARWDRFARLKAEFDPRAILAAGQGIFRPPGSPALAADS

SEQ ID NO: 8409 - protein, 191 aa, Zea mays
  VARIANT 112..191: note = Derived polymorphism lacks residues 112 to 191
  VARIANT 72: note = Ancestral polymorphism is N, Derived polymorphism is K
MGTSQTTEPEQQGCSPKACGSLNISYPFWLEEPGQPPCGSPPFQLKCNSSGAFLTHSMFQAYRVVNIFNENNSLHVVDENLPLAAGCPAPCFNISIAMEFMGAFAVSRANSELRFLSRCDEPVPEALLCLGSSACPATTPRSSGLDGGSGATATESTGRGRQHRRARAALSPSCLPSRRQTGTAGTTTSRA

SEQ ID NO: 8410 - protein, 715 aa, Zea mays
  VARIANT 230..715: note = Derived polymorphism lacks residues 230 to 715
  VARIANT 124: note = Ancestral polymorphism is T, Derived polymorphism is N
MGAAPSTPRLGAAGAAPSPSAAEQMFTALVGEKAYPISSEFWKQLLELPLTLQWPRDRVLQACHAFAENNYQTKHLAKILIHLVWCLQECTSTTSVSSVVYRRAINAAYISSIFLKFIIENAKTDSWQELCLVIDRSEKGLENFPAENTVEYFLIRGVLEYIGSVGVSPESCYLHHELLNLMLVLMSTQLCSGPSPEPKDVHPFIDAAMLQDSSIVASVVQKLLLNFVTRPKLPLNASHPVFSDDARPGVLQRVGSAAANVVLLPYYTFNYLVSSTPEGATSQLADNSLLVLLIMIHYRKCFSTNESIPTNNVYTMDSNTNDKDAPVFHDNPYCKALNSAKDIQYDRADVEGNAQNGPVVRLSFALLFDALGRFLNDEIPVLLLYSLVHGNCDFQEYVLVRTDLDTLLMPILETLYNASRKTSNQIYMLLIILLILSQDSTFNASVHKLVLPGVPWYHERLMHQTSMGSLMVVILIQTIKYNLSKLRDVYLHTNCLAILANMAPHVHRLSAYASQRLVSLFDMLSRKYAKLAELKNDKSLKVISDQMEADNIADDMSTELHIYTDFLRIVLEIINAILTYALPRNPEVVYAVLHRQEVFEPFKNHPRFNELLENIYTVLDFFNSRMDMQQLDGEWSVDKVLEVINKTCRSWRGEGMKMFTQLRFTYEQESHPEEFFIPYAWRLVLSRGFSFNPSAINLFPVEIHLEDAPAGEQKV

SEQ ID NO: 8411 - protein, 390 aa, Zea mays
  VARIANT 294: note = Ancestral polymorphism is A, Derived polymorphism is G
  VARIANT 113: note = Ancestral polymorphism is P, Derived polymorphism is L
MRRKQLLPPWLLVVLFLSWSSAAPVPASSTTTTTTTLPGQMRRRRYYDSIFSLGDSYADTGNGPVVFGWHALASPVMRPPYGSTFFGRPTGRNCDGRLVIDFLAESLGLPLVPPFLQAQARHGTGSFRRGANFAVGGATALDASFFHRWDPPGGSVFPLNASLGVQLQWFQSLKRSLCATPKGMCCDRLLRRSLFFVGAFGANDYLLAMAATSLEQVGSLVPAVVRTISAAVERLIVEHGAATVVVPGVIPVGCAPPVLATFADPDPAGYDPRTGCLRSINEVATRHNALLQDGLRELRARHAAATVVYADFFGPVIDMVTSPAKFGFDEDVLTLCCGGPGRFNYNRHVFCGDPGASECKDPSARLFWDGVHLTEAAYRYVAAGWLSAIT

SEQ ID NO: 8412 - protein, 342 aa, Zea mays
  VARIANT 50..342: note = Derived polymorphism lacks residues 50 to 342
MWFGGGPIDAAGALRGFVREAGGCAVVDGGLGTELEAHGADLHDALWSAKCLASAPHLIRKVHLDYLEAGADVIISASYQATIEGFQSRGFSRDESEELLRRSVHVAQEARRVFAAEGDRSSRRGRPPALVAASVGSYGAYRADGSEYSGDYGKSMTKEDLKNFHRRRLQVLAGAGPDLIAFETIPNKLEAQVYAELLEENGIRIPAWFSFTSKDGVNAASGDPINECAAVADSCPRVAAVGVNCTAPRFIHGLILSIKKVTSKPIVVYPNSGESYVAETNEWVDSDGATGTDDFVSRVGEWRRAGAALIGGCCRTSPATVRAIARAVREAEYDDIPAVAVL

SEQ ID NO: 8413 - protein, 494 aa, Zea mays
  VARIANT 423: note = Ancestral polymorphism is K, Derived polymorphism is T
  VARIANT 400: note = Ancestral polymorphism is R, Derived polymorphism is W
  VARIANT 398..494: note = Derived polymorphism lacks residues 398 to 494
  VARIANT 338..494: note = Derived polymorphism lacks residues 338 to 494
MVLAQLGGSISRALAQMSNATVIDEKVLNDCLNEISRALLQADVQFKMVRDMQANIKRIVNLEALAAGTNKRRIMQQAVFTELCNMLDPGKPSFTPKKGKPSVVMFVGLQGSGKTTTCSKYAYYHQKKGFKPALVCADTFRAGAFDQLKQNATKAKIPFYGSYMESDPVKIAVEGVERFKKENCDLIIVDTSGRHKQEAALFEEMRQVSEATKPDLVIFVMDSSIGQAAFDQAQAFKQSVSVGAVIITKMDGHAKGGGALSAVAATKSPVIFIGTGEHIDDFEVFDVKPFVSRLLGMGDWSGFMDKIHEVIPTDQQPDLLQKLSEGSFSLRLMYEQFQNLLKMGPIGQVFSMLPGFSAELMPKGHEKESQAKIKRYMTMMDSMTDAELDSTNPKLMTESRIIRIARGSGRPVRDVMDMLEEYKRLAKIWGKMKGLKLQKKGDMSALTRNMNVQQMSKALPPQMLKQIGGMGGLQSLMKQMGSKEMSGMFGGMGG

SEQ ID NO: 8414 - protein, 431 aa, Zea mays
  VARIANT 236..431: note = Derived polymorphism lacks residues 236 to 431
  VARIANT 225: note = Ancestral polymorphism is L, Derived polymorphism is Q
  VARIANT 198: note = Ancestral polymorphism is S, Derived polymorphism is A
  VARIANT 153: note = Ancestral polymorphism is R, Derived polymorphism is W
  VARIANT 57..431: note = Derived polymorphism lacks residues 57 to 431
  VARIANT 52: note = Ancestral polymorphism is S, Derived polymorphism is P
  VARIANT 26: note = Ancestral polymorphism is G, Derived polymorphism is S
  VARIANT 17: note = Ancestral polymorphism is Y, Derived polymorphism is C
  VARIANT 5: note = Ancestral polymorphism is E, Derived polymorphism is K
MDILEDGNYTLIFNDTYTYIRLDDTSFVRFGKQGDCDSILWSAPESLCDYDPYCGPYSLCTLSGSGSCICPVGFNSVSTDAWITAGCSRNDSLNCENVEVTFYPIDGIHRYPLEAFALEVTNMSECESACLRDCTCTAFAYNASCLLWFSELRNTIVLDSGLNGIRISKPYSARTVGDHGSLVVFSFAQIKNSTKRFSEKLGEGGFGCVFKGMLPGCTPVAVKKLKDHRQDEKQFRAEVRTIGMIQHINIVRLLGFCAEELCPKIADFGMAKLLGRDYSRVLTTVRGTIGYLAPEWISGLPITHKADVYSFGMILLEILSGRRNSEKIEEGRFTYFPSYVAVKLSEGDDVMWLLDSSLESNADAEQLQRACRVACWCIQDAEDHRPMMGQAVHMLEGAMDAQVPPVPRSLQNYVGVEDSTTAEFYISEGSC

SEQ ID NO: 8415 - protein, 1228 aa, Zea mays
  VARIANT 195..1228: note = Derived polymorphism lacks residues 195 to 1228
  VARIANT 92..1228: note = Derived polymorphism lacks residues 92 to 1228
MYKSRLQELCQKRRWAPPLYEPTREGPAHAPLFRATVVVNGERFSSRDEGEKSLKEAYNLAAMAAFDNLIALPAAALAPAPAAPAPPSSETQLPYKSQLQIYAQKRGKLLPSYRPIHGGSLHAPLFKSEVTIDGQTFESPEYCHTMKEAETVAAKVALMSLPQEANPTQQLLLYQFDGPFYLSQLPSVNYKNLLQELVQKEGFPLPIYNTASDVSNYSAAFVSTVEIHGVTFHGKPGNTKKQAEMNAAKSAFEHFKNINHDAGSSGSANPLPVAATKQSVDGNTLRAKLEVNKSHLAEPSTEVEAIYSSTEVDKLPLPGPSMDIEVMDSTLEVDKLPLPERSMDVKVVNSSLKVDKLHFAEPITEAEVIHSSLQVDEPLIPKPGMSSSLENTPAVNGHSAPISPTITPTLISVPTATMPVSNDRCGCYMSTNRIQVYPRHTDMVIPEGAAVLPISDNQWVAVSLPYSMEQSTLPQQDLCVECIERTELERSPIRVNCLVKCFPVECQTSFRTVCKCNKCCFHLPALFQRVPPNVPSESTALAYRSRHLAPPLPLPASPVRACARQGRQLSSAPARNRLQSELRAHPLPLPLLRYAEYMKYKDPKQPINSRIRDLIGRMTLAEKIGQMTQIERQVASANVMKQYFIGSILSGGGSVPSPQASPAIWVNMVNEFQKGALSTRLGIPLIYGIDAVHGNNNVYNATLFPHNIGLGATRDPGLIKRIGEATALEVRATGIQYTFAPCIAVCRDPRWGRCYESYSEDHKVVQQMTDIILGLQGEIPVNHTKGVPYVAGKDKVAACAKHYVGDGGTHNGINENNTIIDEHGLLSIHMPPYYDSIIKGVATVMVSYSSLNGVKMHANHDLVTGYLKSKLHFRGFVISDWLGVDRITSPPGANYTYSVQAGINAGIDMVMVPYNYTDYINDLTSLVHKGVINISRIDDAVKRILRVKFTMGLFENPLADLSFAEQLGKKEHRELAREAVRKSLVLLKNGNSPDQQFLPLPKRARSILVAGSHASNLGYQCGGWSIQWMGDSGNITTGTTILDAIKSTVADSTSVVYSENPDDSFMKHNDFSFAIVVVGEPPYAETVGDSTDLTMLDPGPDTIRTVCAAVKCAVVIISGRPIVIEPYVPLVEALVAAWLPGTEGQGVADVLFGDYGFTGKLPHTWFKSVDQLPMNVGDLQYDPLYPFGFGLMINSSLPGFSGVDNLGYRKQRVLFAVLCSLLSLVLIS

SEQ ID NO: 8416 - protein, 342 aa, Zea mays
  VARIANT 103: note = Ancestral polymorphism is T, Derived polymorphism is P
  VARIANT 67: note = Ancestral polymorphism is V, Derived polymorphism is D
MAVAADAVRQKLRFFLCKKTSSSIQENIEALISSYGSLAPKRYKYSEVTKITSCINNKLGEGGYGVVFKGMLDDSRLVAVKFLHDSKGDGEEFVNEVMSIGRTSHINIVSLFGFCLEGSKRALIYEYMPNGSLDKYIYSDNPKEVLGWDRLYTIAIGIARGLEYLHHSCNTRIVHFDIKPQNILLDQNFQPKIADFGLAKLCHTKESKLSMTGARGTPGFIAPEVHSRTFGVVSTKSDVYSYGMMLLEMVGGRKNVKSFAQVSSEKYFPHWIYDHFGQNDGLLACEGTPEKEEIAKKMALVGMWCIQILPLHRPTITKVLEMFDRGLDELDMPPRQNFSQTL

SEQ ID NO: 8417 - protein, 1117 aa, Zea mays
  VARIANT 42..1117: note = Derived polymorphism lacks residues 42 to 1117
MVVPRAPEQTQQDQDEEMLVPHQDAIEGLQKDVLEGPQPMEEFASAVENQIIPDTSTSRFTWYIENFSKRNVRKHYSDDFTVGGYKWRVLVFPRGNNVDYLSMYLDVADSNLMPPGWSRNAQFSLAVVNQLDSKASLRKEATHQFNSRESDWGFTSFMPLLDLYDSSKGYVVNDKCIIEAEVAVRKTLDFWNYDSKRMTGYVGLKNQGATCYMNSLLQTLYHIPYFRKAVYHMPTTENDTPSGNIPLALQSLFYKLQHSDNSVATKELTKSFGWDSYDSFMQHDVQELNRVLCEKLENKMKGTTVEGAIQKLFEGHHMNYIECINVESKSTRKESFYDLALDVKGCSDVYASFDKYVAVERLEGDNKYQSEEHGLQDAKKGMLFIDFPPVLQLQLKRFEYDFVRDTMLKINDRYEFPLQLDLDRDDGKYLSPDADRSVRNLYTLHSVLVHSGGVHGGHYYAFIRPKLSDQWYKFEDERVTKEDMKRALEEQYGGEEELPHTNPGLDTAPLRFTKHSNAYMLVYIRESDKDNIICDLDDEDISEHLKVRLRKEHEEKEYKKKEKAEAHMFTALKVARDFDIKEQIGRHMHFDLVDFDRVNSFRAPKNMSINEVKEELSKEFGIPVECQRFWVWAKRQNCTYRPSRPLTSQEETSTIGVLKDATVAKLPNSEVRLFLEVHFRQENQPIAPWNTKEDILLFFKLYDPEKEDLRYVGNFFVKASGKPSDIVERLNQIAGFLSDEDIELYEEIKFEPVVMCVPIESNASFRSSQIDNGDIICYQKHCLPDSMDRYRYPTVPSFFEYIHNRQIVHFRLLEKPKEEGFSLELSKCSTYDDVVEKVAKQLRMDDPSKIRLTQHNPSSQQPKPHFIKYRSLNYLSDMLHNHNQMCDILYYDILDIPLPELESMRSLKVAFQNAANHEMSFHIMRLPKSNSLLDLIEDLKSKVEISCNDAEFRFFGVYLHKICKVYQPGDKIDSVNDHGPLYIEEVPEDEKNAGPHDRLVHVYHFEYNHHIQYFGEPFFFLIRDGEALSDMKVRIQKRLQVPDEQFLKWKFAHVTFSKPEYLQDSDIVMNRFHKQRPVYGGWEQHLGLEHTATTPKRSYLGNNQNRHSFEKPVRIYN

SEQ ID NO: 8418 - protein, 285 aa, Zea mays
  VARIANT 115: note = Ancestral polymorphism is G, Derived polymorphism is S
  VARIANT 91: note = Ancestral polymorphism is T, Derived polymorphism is A
  VARIANT 42: note = Ancestral polymorphism is T, Derived polymorphism is M
  VARIANT 27: note = Ancestral polymorphism is A, Derived polymorphism is V
  VARIANT 15: note = Ancestral polymorphism is P, Derived polymorphism is L
  VARIANT 4: note = Ancestral polymorphism is C, Derived polymorphism is R
MHACRVPAAGPLLCPAIAMLLLALLLASLPTTAAAAAVKMSMVPCAPAQCGNLSIYYPFWLTGTHQRHCGYKAFEVTCEERKVYLKNSYWAYQVLDISYENSSFVVTNVNLQKDGSFCNLNLVSNASSGLSAAPFRISSRNLELFFLSGCPGQARQRQPSPPSSWAQMNCSDYDNGSAAKSFAWLAGKYRPDDTLKPPLPLNCTVSSLMPVLGYQGAGPADYDRLMNLGFLLEHNFTAEDCAACASTGDRCSVDPDDDQLVCNCSDGQYWFFCGQYVNLPALTIQ

SEQ ID NO: 8419 - protein, 741 aa, Zea mays
  VARIANT 294..741: note = Derived polymorphism lacks residues 294 to 741
MGVGLKGNGDESIAAPSCCSARKSKDTPIRSPAAAPQMRERDACWEYCDKLDGNKVRCRFCHKVLNGGISRLKFHLSQIPSKGVNPCTKVKEDVVDRVKAVISAKEEYKEFQLLKRQRVADLSSAAAPAKWAPEAPPSLSTSPGRVASPAAVITRAAEQSRLLAPEASAPVPRPSAAAANNKPRAAAASEWETERCIAEFFFENKLDYSIADSVSYQQMLEALGGPGFRGPPADVLRDKWLQRLKSEILQKTKEIEKDWATTGCTILADSWTDNKLKALINFSVASPMGTFFLKTVDASSHFKTHRGLYDLFDEVIQEVGPENVVQIIADRNINYGSTDKLVAQNYGGAIFWSPCASFCVNAMLDDFSKIDWVNQCICQAQTVTRFIYNSRWVLDLARKCVAGQELVCSGITKSVSDFLTLKSLLRHRPKLKQMFHSAEFSSSSYASRSIPCVEILDDDELWRAVEEIAAVSEPLLRVMRDVSGGRQAIGYIYESMTKVTDSIRTYYIMDEGKCKSFLDIVEQRWQTELHSPLHSAAAFLSPGIQYNPEVKFFRTIKEEFYQVLDKVLTTPDQRHDITAQLHAFRKAQGLFGSNIAKEARNNTPPGMWWEQYGDSAPSLQRAAVRITSQVCSTLTFQRDWGVILQNHYEKRNKLDKEALADQAYVHYNLTLHSEPKARRRPDADPIALDAVDMTSAWVEDSDGPILTQWLDRFPSALDGGDLNTRQFGGSIFGTNDNLFGL

SEQ ID NO: 8420 - protein, 248 aa, Zea mays
  VARIANT 203: note = Ancestral polymorphism is G, Derived polymorphism is D
  VARIANT 205: note = Ancestral polymorphism is N, Derived polymorphism is K
  VARIANT 214: note = Ancestral polymorphism is A, Derived polymorphism is P
MLRRAAPTSAALCRRALSTTPSSSRTAAETAAVSSELNSVLLRSLKEHYLEVCKMTPPPKVSPPKPFTIVKGALDQPSGPVLRREYGEDGEEISISVARLANILPAGADSDSDGTGEGGGMSASISQLLLHVDISKPGIGKSMQFLCGLYPDALGIHSVCLRSKNADPFDGDMTSKGEYRGRIFQELDEKVRDALHLYIEARGINEKLFRFLQAWLYVKDHRNLVRWFKSVGSFISDQSQSKMSRTPR

SEQ ID NO: 8421 - protein, 223 aa, Zea mays
  VARIANT 43: note = Ancestral polymorphism is R, Derived polymorphism is H
MAIVGAEYCDPEERVLTVRKTSHFSPGDGFAAYDHRTGGLSFRADTYGRGHGGGAASAGELALLGPAGEPLLTVRRRRPSLHQRWEGFLGARADGQKAIFSARRPSILGGAAAGAVIELLPPAPAAAPVLLRVDGSFPRRCCRVVLAPRAEGEKAKVVAEIGRKVDEGARVVMGRDVFVLRVSPGFDAAFAMGIVLVLDQIVGDESGGVDAGADVIDAKPKVW

SEQ ID NO: 8422 - protein, 231 aa, Zea mays
  VARIANT 77: note = Ancestral polymorphism is T, Derived polymorphism is A
  VARIANT 56: note = Ancestral polymorphism is P, Derived polymorphism is Q
  VARIANT 45: note = Ancestral polymorphism is N, Derived polymorphism is S
  VARIANT 39: note = Ancestral polymorphism is P, Derived polymorphism is S
  VARIANT 17: note = Ancestral polymorphism is V, Derived polymorphism is A
  VARIANT 15: note = Ancestral polymorphism is P, Derived polymorphism is L
  VARIANT 6: note = Ancestral polymorphism is S, Derived polymorphism is F
MALVPFSLLLFLVSLSVWVALPLPLPVAAAHGGPGEHCSPFLCGNVSISFPFGIIQKDAEQTNCGAGIGFQVRCHNTIPHLGYYQNEITLRILSIFYHNRSLLIADRPRWPTYFNTTTSTEGCRIPTANTSSRLVPPLSVSSDNQNLIFYSCTKPPSPGEGLVATVCHNNTFVRAADGRRSDESGGYVLQGCTATRVPVLGVSGKVNASNYDQLVWDGFLATWQLPPTPSG

SEQ ID NO: 8423 - protein, 194 aa, Zea mays
  VARIANT 26: note = Ancestral polymorphism is S, Derived polymorphism is F
  VARIANT 41: note = Ancestral polymorphism is S, Derived polymorphism is F
  VARIANT 43: note = Ancestral polymorphism is T, Derived polymorphism is P
  VARIANT 47: note = Ancestral polymorphism is Q, Derived polymorphism is H
  VARIANT 66: note = Ancestral polymorphism is S, Derived polymorphism is F
  VARIANT 97: note = Ancestral polymorphism is C, Derived polymorphism is F
  VARIANT 104: note = Ancestral polymorphism is N, Derived polymorphism is K
  VARIANT 107: note = Ancestral polymorphism is A, Derived polymorphism is V
  VARIANT 108: note = Ancestral polymorphism is T, Derived polymorphism is I
  VARIANT 111: note = Ancestral polymorphism is G, Derived polymorphism is E
  VARIANT 113: note = Ancestral polymorphism is R, Derived polymorphism is I
  VARIANT 119: note = Ancestral polymorphism is I, Derived polymorphism is F
  VARIANT 133: note = Ancestral polymorphism is R, Derived polymorphism is M
  VARIANT 166..194: note = Derived polymorphism lacks residues 166 to 194
  VARIANT 167: note = Ancestral polymorphism is M, Derived polymorphism is T
  VARIANT 181: note = Ancestral polymorphism is C, Derived polymorphism is F
MQAHKRVVDKPITEVREAGICMRENSFYVDTLRRHLNYFPSLTSLLQDMVVLYDSLQLAHKCILNSFYGYVMHKGARWYSMEMAGVVTYWCKDYPKCSITCRKNWKVTGTGYRWHLAMFLPASKEEGILIKKRYDVFNEDGTLAELKGFEIKRRGELKLIKVFQRYMDSEICAIMAHYMPCTTKETLTKGDMRQ

SEQ ID NO: 8424 - protein, 401 aa, Zea mays
  VARIANT 21..401: note = Derived polymorphism lacks residues 21 to 401
  VARIANT 33: note = Ancestral polymorphism is V, Derived polymorphism is A
  VARIANT 275: note = Ancestral polymorphism is C, Derived polymorphism is W
MEAARQQQEECPCGGAEAADQFERLHDAVLLDVLNRIGDVKALGRCALVSRRFHALVPLVDSVFVRVDCVIPDDPPPSSSSSAAPGTSPRQAPAPAARGRGALAHIARVLLGGIARPIHALGQILSPAAAAVSRRSEALPASPRAPVADVSHHSPSEVLRSFKELRRLHIELPTGELGIDDGVLLKWKADFGSTLVSCVILGASSISSKPPTGYTQAESETAAAATPDTSRETEEPGSLPDSLYTNGGLKLRVVWTISSLIAASARHYLLQPIICNHELLESLDLTDADGQGVLTMDKRQLQELRVRPVFPSGSSHRTLMPALSMRLHYAPLIELPGGTLLKGATLVAIKPSEDALREGQGAGAAGPVGTCWISEAFEEPYRTAAKVLLKRRAYCLEMNSF

SEQ ID NO: 8425 - protein, 837 aa, Zea mays
  VARIANT 623: note = Ancestral polymorphism is Y, Derived polymorphism is N
MLGVEPESGGAASSSAAENFDAGQYAFFGKEPLEGFELGGLEEAGSDGNGGGFSGPDEGLYRLNSVGDEVQILEPGRLVRGVIQNIFPWAARAKFSGIEIDDQSNLSDIDDLASTFAKLNRSISGIRNPGVIGDRRSISRGSSLTLDWPEDVEFSNWVDQDVFENEEFQESKRWWSSNSSVQQGDSNSRPLSRTSSYPQQPLQHRSSEPIVLPKTSSFTSFPPPVAGGGRAPYPAQGLTRHGSIPSIGAGLQMGSPSMSLSASPYHMVGPSHGLPYTGGMPYGALNLPVNNPVQNDWSNHVNPFTGEHLNLLPNLLHKQLSLPNSPMSSLLFSQHQQRLAQVQSSHQNYLNIMPHVLYPHHSAEITSRFGSVGSSHSSRDKRSRSGKGKHNIRFSQLPSDTGSQNGDSGGIKFRSKYMSSEEIESILRMQHSASHSSDPYIVDYYHQACMAKRGATSKQKTNFSPTSMKDVPSKSRSSSDQHTYLQVDALGRVSFSSIRRPRSLLEVDHPSSADGSHDQKSTVRPLEKEPMLAARVTVEDALCLVLEVDDTDRLLQSSQSQDNIFELKRRRQVLLEGLAASLQFVDPLGPSKSGHSSGSALKDDVIFLRIVSLPKGRKFLARYLRLLVPGSELTRIVCMAIFRHLRFLFGGLPSDSSAAETTVALAKTVSSCVHHMELGALSACLAAVVCSSEQPPLRPLGSSAGDGASLVIKSVLDRATELLTDRHAAASYTVPNRALWQASFDAFFGLLTKYCVSKFESIQQMFVTQTPSSGIGPEASKATSKEMPVELLRASLPHTNEQQRQRLLDFAQRSMPVTGFNPSGARGGHITSESVPG

SEQ ID NO: 8426 - protein, 1378 aa, Zea mays
  VARIANT 279..1378: note = Derived polymorphism lacks residues 279 to 1378
MAAEPREPTSSLDAQLAASSSSAAGVGGPNPCCATQWKNCQKLVRSRTALREAVKLLQAENEKLRKENSELSKVCKEEHLRGDSAEAARATESDARDLLEKEIIELKTQNMSLKQTQNTCKNNDELLRISELEEENRKLIQILGEERKKITSEKKKIEEEKCKTLEMQRIWKSEAQKSEEYRRVADTERKVANDWRASCERLRSEANELRAQLTAQIQKTEEILKRAEAEKQKVAREKKRADSEKSLSEKNRTLVEVEKKKVTEEKCRADNLFAKLEEQKKLNEHLRTSIQVETKNAIEEKKRGDHLFQKLEEMREQTECLQRKANEFSAGRDVISSGKCGRRHIDRISENANVKLLKEKLKLKKEQLKHVKNVSKLDKAKTALIRRELQSLKQDWTQLLGRFNMLDDHLARGVEDIHVLTQLNQHPEIHGFEQKLLPNDSVPAPYFRLQAGTVPFGSSIPSEYTSYQLPRESCSRSISGTSSELCPPLGSSHRLLKSKCQHRSSCPTSISDEKFMGSQGKDNLFVSSTDIRKKQDSVVPELAPKIRNDRALPCGTLTDRRETLGGDRKRKHTKMSQDPSAFLPSKNDLLHLKSKVPATTSNVALSFDDDPLCLQQGNNTICVTEGDMDKAPSFSFPSKVSCGGNGCTSSKFASLIPFEEMVRENCLKLLNLDDDADEEKFRKAKERPHSPNLSIIRPRRTKLPTYAEPHSLGRSLNGCPALGSDAIDSKTRSKASEVKEPVIQKSTQNYIQLDPSSNTIECSGIAKPLFVNDKSNAAVNVSCSTSLVVVPASTSFDSLLHEHVAQNSVASSAEALDSISRPMLSGGGHSDSILHLSKEVSNKNNSHLICDKSSPGLQANVRTSETTVTKPNNSVSNSLLRHHHGSENPPLHLVGFTRMKRSKMINIFRYWEILSSQSQKHSDEASVDGPLLDKVSTDTMLPIDEKVSLIFSLLLWDTRFTEETFVDGNFASSAFSSSVKSHMETRWTILRGNDLDLLNSLIEDFLLNKEVVVCEKTGQKVFGANKDHELDDETGVQLSVKPAKINEFIAACILLASICGEVGRVDIVLEVSYKVLQMGKSNILWTLLALHVFASMCGDKFLAPKSCNFLMTTIRLVVLLLESNDTSLCLVSSYIQSNKPTTLPSCAHCLFNVDTVSIDGFISSLLDELDLCSLQWNNRTCSNENITRCSSHMVSSGLDTRCSETCNIFKQGKLSEDTHNYPAEINLCYFTELISLLELFGIYMSCEWTYNNVVIRLLEILELCMCRDYSAALLVLVSQLGRSFVDDVGYEERSVSKLRNKLSLLLTGAHFTKSWSLSVQFTAIGALVSVLPLPFDKIVATGSRQLSGSFDVEMKQISEWFVQLSSEHQYLARSFFSC

SEQ ID NO: 8427 - protein, 683 aa, Zea mays
  VARIANT 134..683: note = Derived polymorphism lacks residues 134 to 683
MVQWWGREASGGRGTSVVVKMESPEWTIPAESEVAAGGKAGRGKNARQITWVLLLKAHRTAGKLTGAASAVLSIAGAAWRRVAAGRTDEDEDEDAGAAPPGESPALRSRFYGFLRASLVLSVLLLAADVAAHLQGWHLAVDVPDLLAVEGLFAAGYASWARVRLEYLAPALQFLANACVVLFLVQSADRLILCLGCLWIKHRGIRPVPKAGGKGSDDVEAGTGNFPMVLVQIPMRNEKEVYQQSIGAVCGLDWPRPNFLVQVLDDSDDAATSTLIKEEVEKWQREGVRILYRHRLIRDGYKAGNLKSAMNCSYVKDYEFVVIFDADFQPQPDFLKRTVPHFKGNEDVGLVQARWSFVNKDENLLTRLQNINLCFHFEVEQQVNGIFLNFFGFNGTAGVWRIKALEDSGGWMERTTVEDMDIAVRAHLKGWKFLFLNDVECQCELPESYEAYRKQQHRWHSGPMQLFRLCFVDIIKSKIGFWKKFNLIFLFFLLRKLILPFYSFTLFCIILPMTMFIPEAELPAWVVCYIPATMSLLNILPAPKSFPFIVPYLLFENTMSVTKFNAMVSGLFQLGSAHEWVVTKKSGRSSEGDLVVEKQPRQQRAGSASNLGSLAKEPSSSLRKDSQRKKHNRIYRKELALSFLLLTAAARSLISVQGIHFYFLLFQGVSFLVVGLDLIGEQVE

SEQ ID NO: 8428 - protein, 168 aa, Zea mays
  VARIANT 63: note = Ancestral polymorphism is T, Derived polymorphism is A
MVERDRVSGELGKGFRNNPSPFTNGASNSERRLCLENSYSRSCSQGGDRCVNRCRYGCCFRSANIFIRRLGLHLNSQRTTDISFGSNLEVDYGSEENASIVYRTLAVDKELQPDKVKREMTLSGSKLAVHFAAVEARFLRASFSSFVDLMGLVTKLVEEYGVANAGHS

SEQ ID NO: 8429 - protein, 178 aa, Zea mays
  VARIANT 6: note = Ancestral polymorphism is G, Derived polymorphism is V
MKKKGGGGGGCLGAPMRALSRACDSACDLYVRGMSGCARGVPRGSSAGIVGRGFGGGGSGAATLRLRVSSDKADDDLVRAAAAAAAARRQRRVAAEPDTATAEARKVGSAGGGLPVRAPPARKRAAAATMGTIAEDAPCEFVGLDGGGGACAAPVPSLNPPRRGGFVAVKAGGDVFAR

SEQ ID NO: 8430 - protein, 138 aa, Zea mays
  VARIANT 7: note = Ancestral polymorphism is K, Derived polymorphism is R
MARELEKELTKATEEFTIEIQSLKGKISGLISEKESIYDELKSTQEKVQLEMSQRKGLEDQILRFKQSVSDSCAEESKTSCSMVRSGSGLGNTAFVSKSEKLREALSGQRGTISKIFEEGSLMAFGVLQVHSGTNVGC

SEQ ID NO: 8431 - protein, 293 aa, Zea mays
  VARIANT 161..293: note = Derived polymorphism lacks residues 161 to 293
  VARIANT 41..293: note = Derived polymorphism lacks residues 41 to 293
MQMGSMEFVAPALEELLPELSLEEQPRLQNQSHERDRIRKRHNKHSPPPRPSLTSVRYVMDMGSMGMDFVAPALEELLPDLSREEQLRLQNKSRGRDRISKPRNKHAPRPRPSPFSEWDQCNFIKIPQVLHALAHYNARHPGGEFDVVKPLKQSRVGFRGQAWFHVNFWARPSSSSSNNNKTIKRFFAEVHYKPTPISSPSSSSSSLAITAVPIVEICIIIEEPLSQYRRSCAFCPSYRDILHPKGCRKFVCGNDKDRFEQRLDPCCCTGMGIGKMPFTARPDMSAFLNISPK

SEQ ID NO: 8432 - protein, 83 aa, Zea mays
  VARIANT 11: note = Ancestral polymorphism is D, Derived polymorphism is Y
  VARIANT 38: note = Ancestral polymorphism is R, Derived polymorphism is W
  VARIANT 61: note = Ancestral polymorphism is M, Derived polymorphism is I
  VARIANT 71: note = Ancestral polymorphism is L, Derived polymorphism is R
MSIGKMAQAMDREASNQEKARDENPQQKLREKAINEVRRLEFTCSEVFKAAAMFVRMLDQMGMLFALPEPRRREHIVGMLRGN

SEQ ID NO: 8433 - protein, 216 aa, Zea mays
  VARIANT 137: note = Ancestral polymorphism is R, Derived polymorphism is C
MGSMEVSKPSKRLSPKRSSSFKLSLFCGQCKATAVSSPPDSPTAAAAGARSLSSSSASASASSSGTSRGRDRTAELREIFRHFDRDMDGRISGAELREFFASMGDGGSLQALGLKDGGGAGGAVDLTLTLGFDDFVCVVESKGGEEEEREDLRRAFEAFEAVKGSGRITPRGLQRVLSQLGDEPSVAECEAMIRAYDDDGDGELDFHDFHRMMSQG

SEQ ID NO: 8434 - protein, 393 aa, Zea mays
  VARIANT 282: note = Ancestral polymorphism is S, Derived polymorphism is L
MMAPLSPRLVVPVDVKKLPREQKVPLHNRWHPDIPPVADVTEGELFRVEMVDWSGGRVRDDNSADDLKFMDFTIAHYLSGPLRIVDSEGVPASPGDLLAVEICNLGPLPGDEWGYTAILERENGGGFLTDHFPSARKAIWYFEGIYACSPQIPGVRFPGLTHPGVVGTAPSLELLNIWNEREKSLSETSLETIKLCEVLHQRPLAHLPTPENCLLGKVQEGTAEWHIIANEAARTIAGRENGGNCDIKNLSRGSRIYLPVFVEGANLSTGDMHFSQGDGEISLCGAIEMSGFLELKCEIIRGGMKEYLTPVGPTPLHVSPIFEIGPVEPRFSEWLVFEGISVDESGKQHFLDASVAYKRAVLNAIEYLSKFGYSKEQVESRVTDYYLQVYHAC

SEQ ID NO: 8435 - protein, 604 aa, Zea mays
  VARIANT 437: note = Ancestral polymorphism is Q, Derived polymorphism is L
  VARIANT 257: note = Ancestral polymorphism is H, Derived polymorphism is Q
MAPTTATAAAVGTKATALGVAACERDVEKLEFIEDKTRNFDAEQVRVLAEILARNNGAEYLRRHGMEGRTDRLAFKACVPVVTYEDLRPEIERIANGDRSNIISSHPITEFLTSSGTSAGERKLMPTIEDELNRRQMLYSLLMPVMNLYVPGLDKGKGLYFLFIKSETKTPGGLPARPVLTSYYKSDHFKHRPYDPYNVYTSPTAAILCTDSFQSMYSQMLCGLVARAEVLRVGAVFASGLLRAIRFLQLHWQELAHDLRTGTLSAKVTEPSIREAVAEVLRPDAGLADLVEAECGKESWEGIITRVWPNTKYLDVIVTGAMAQYIPTLKYYSGGLPMACTMYASSECYFGLNLRPMCDPSEVSYTIMPNMGYFELLPHDPDAVPPSRDDPPPRLLDLADAEVGRDYELVITTYAGLCRYRVGDILHVTGFHNAAPQFRFVRRKNVLLSVDSDKTDEAELQAAVERAARLLAPYDAAIAEYTSQADATTIPGHYVVYWELMVREGGASPDAAVFERCCLEMEEALNAVYRQGRNGDAIGPLEIRVVRGGTFEEVMDYAISRGASINQYKAPRCVSFGPIIELLNSRVVSSHFSPACPTYSPHKK

SEQ ID NO: 8436 - protein, 174 aa, Zea mays
  VARIANT 116: note = Ancestral polymorphism is T, Derived polymorphism is A
MRLLQAEELFRKVLEVGSKNKAARLLGLDVGSKYVGVAISDEKNRVAMPLSVLCRTKTNINLMADDFKTLVSMYSIAGFVVGYPFKIYGQPCASAIQVSLAGELCKTGKLDDLPYAYWDENFTSKCVEALLHPLNLKDLDDAKTMTDKFAAVCILQGYLDNMNRKLRSTDKSEA

SEQ ID NO: 8437 - protein, 658 aa, Zea mays
  VARIANT 533..658: note = Derived polymorphism lacks residues 533 to 658
  VARIANT 520..658: note = Derived polymorphism lacks residues 520 to 658
  VARIANT 408..658: note = Derived polymorphism lacks residues 408 to 658
  VARIANT 407: note = Ancestral polymorphism is I, Derived polymorphism is S
  VARIANT 395: note = Ancestral polymorphism is P, Derived polymorphism is S
  VARIANT 369..658: note = Derived polymorphism lacks residues 369 to 658
  VARIANT 335..658: note = Derived polymorphism lacks residues 335 to 658
  VARIANT 305: note = Ancestral polymorphism is T, Derived polymorphism is I
  VARIANT 282..658: note = Derived polymorphism lacks residues 282 to 658
  VARIANT 260..658: note = Derived polymorphism lacks residues 260 to 658
  VARIANT 181..658: note = Derived polymorphism lacks residues 181 to 658
  VARIANT 142..658: note = Derived polymorphism lacks residues 142 to 658
MEGVSSAPEMDEAISTDQSSRSTKRRAKVWDHVDSELIDGKEKAVCKYCKAHLSSAAGKGTTHLNRHISVYCHAIPPEERQRFLATQKTKPDVAHVFDPVVFRGLIAKYFLSAEISFRKCEDPSWKEMINYCQPSFRLVGRQTVRSDCMLLYEEEKLQLIEQFTKLKSHVSLTADLWSSNQNLGYLGVTAHFISEDFELHKKIIAFKKISFPHTSYAVQDGITSCLLEWGLVGDLFTLTLDNASVNNRAMKDMRDALGSQMFFSGEHLHVRCSSHVLNIMVQAGLKVVPNAVGKVRDIIKVVISTPSRLQIFNSIVQTLGLRSKSGLILDVPHRWNATYDMLNEALKYKAALNRYAVEQHHECPTEEDWSKAEALHGFLQEFSDATKAFSADRHPTAHLFLKMLLVIRGVLLDENYNSNELLNEMANVMYTKFQKYWINPNIVLLIAAVLDPSMKTEFVKFYFYTVGDNVDMKMRELKRYLKKYYLEYEKIMRSHSLHVFITPDDQMRSEPSTSSPLCGKRRVEHAFAQFASQNANARPERTEMDTYLEDPRILIKPDECFNVLGWWKKNSDAYPILSLMARDFMAIPVSTVSSESAFSAAGRVLGKNRTSLSPETLEALVCAKDWLIGFNDEEEGKLSYKSRLLYDNELNCLRHFTR

SEQ ID NO: 8438 - protein, 217 aa, Zea mays
  VARIANT 116: note = Ancestral polymorphism is G, Derived polymorphism is C
  VARIANT 119: note = Ancestral polymorphism is P, Derived polymorphism is L
  VARIANT 169: note = Ancestral polymorphism is V, Derived polymorphism is G
MAKEVAQEQPRPTAPRTVRCIVKLGGAAITNKGELESINEENLRLACAQLRHAMSEANGDGAMEKVTSLNQEIVRALAREGIPSVGMSSFACGWSTHQRKLASTNASQIIQPFHAGFVLVLHGDAVLDELLDCTILSGDVIITNLAQLLSPKYVVFWYCYLSSFTALKVFCYQWKMVLYTITVFFNCLYRLPWDTENVHGVYDRPPTDSNAVLLRGI

SEQ ID NO: 8439 - protein, 193 aa, Zea mays
  VARIANT 23: note = Ancestral polymorphism is F, Derived polymorphism is L
MATAARLLLVVVLLSAAIPIPSFATSFVVGDKRHRWAPNVNYTDWADRHQFHVGDWLEFRYERDRFDVVQVNETAYAACDASSPILSYSRGHNFVFRLNHTGRFYFICSRGYCWSGMKVSVLVQPPPPPPSLPPASHSHASSASARVRPAAGLWCAALSTLLGWAVLTPPLSFRVWSSGRPGAHTSLNSKAVC

SEQ ID NO: 8440 - protein, 379 aa, Zea mays
  VARIANT 310: note = Ancestral polymorphism is I, Derived polymorphism is N
  VARIANT 106: note = Ancestral polymorphism is S, Derived polymorphism is G
MGRLRACCRLHRFLAPPPAQVPSPGQSLARGSNTATAHVAPFSRLLSSAAAVAPHDTRDSGLGGSAYWAWIRAATESAPAPSPPQEEEDEGPARYIPVKAYFLSTSIDLKSMQAEHGNDIVPPSTRLLNYIALRYSEFPPEIMNIGVKDNRFCYRYVVVFQYGSAVLFNIADHEAEYYLDIIRKHASGWLPEMRKDDYAVVEKPSLTTWMKGGLDYIVLKSLDTDGIRIISSVLGQSIALDHYIRQVDDMVEEFTEINRVMEKTGNFTMQRKKLFQLVGKANSNLADVIIRLGLFDRSEIAWKNANYAQILEYLREEYELNQRFGSLDFKLKFVEHNIHFLQEVLQNRRSDLLEWGVIILLIIEIAISLYEIAKDSMID

SEQ ID NO: 8441 - protein, 122 aa, Zea mays
  VARIANT 109: note = Ancestral polymorphism is S, Derived polymorphism is F
MKHSHCLFLLFLVSILVASSAVTVSPNKAAAREKAWKARAPVQLADEAFLARLCDDREQQRRRGRPPRILPLCTQLHARRQAGAHQYQHLPMPPPSRNDEQIDPRYGVSKRLVPSGPNRLHN

SEQ ID NO: 8442 - protein, 71 aa, Zea mays
  VARIANT 50: note = Ancestral polymorphism is S, Derived polymorphism is L
  VARIANT 48: note = Ancestral polymorphism is C, Derived polymorphism is Y
  VARIANT 40: note = Ancestral polymorphism is G, Derived polymorphism is E
  VARIANT 33: note = Ancestral polymorphism is T, Derived polymorphism is M
  VARIANT 32: note = Ancestral polymorphism is Y, Derived polymorphism is F
  VARIANT 28: note = Ancestral polymorphism is P, Derived polymorphism is L
  VARIANT 22: note = Ancestral polymorphism is P, Derived polymorphism is S
  VARIANT 16: note = Ancestral polymorphism is A, Derived polymorphism is V
  VARIANT 8: note = Ancestral polymorphism is S, Derived polymorphism is L
MSPLRSASPRLKLINALVVPAPDLGPGPDGSYTIYMKIVGDDNEELSCISFGFSISFVASEPGHERQPAHG

SEQ ID NO: 8443 - protein, 188 aa, Zea mays
  VARIANT 170: note = Ancestral polymorphism is V, Derived polymorphism is G
MEPLVFVLLLVAMPLRGSDGAWCVCRPDVSDAALQKTLDYACGHGADCAAVLPTGPCYSPTTVRAHCSYAANSYFQQNSQANGGATCDFGGTANLTDTDPSSGTCKYPATPSEAGTSGNATGTGTAPPGSTSNPATTPSMGGSVTTTPVGAFGPAPSTFSAATATAAAFGGRRALLLAVVSVLSFLAR

SEQ ID NO: 8444 - protein, 70 aa, Zea mays
  VARIANT 64: note = Ancestral polymorphism is T, Derived polymorphism is K
  VARIANT 43: note = Ancestral polymorphism is S, Derived polymorphism is R
  VARIANT 24: note = Ancestral polymorphism is A, Derived polymorphism is V
  VARIANT 14: note = Ancestral polymorphism is A, Derived polymorphism is V
  VARIANT 7: note = Ancestral polymorphism is G, Derived polymorphism is R
MGGALIGRHYALSAAAVDSTDPPAEKHEYQAEVNRLMDLIVHSLYSNKEVFHRELVRWVIVTHTIFFQLT

SEQ ID NO: 8445 - protein, 121 aa, Zea mays
  VARIANT 36: note = Ancestral polymorphism is W, Derived polymorphism is S
  VARIANT 63: note = Ancestral polymorphism is K, Derived polymorphism is N
  VARIANT 70: note = Ancestral polymorphism is A, Derived polymorphism is T
MYAVRRVRMRASEFHLGDQTVTAAQGRGEVGGFVLWQKTPEVWFFEFELIMAGHKMSAGSDGKVAWRQSAAEHSHVSRGPPRPLRRSPQGLDPRSIANLFSVAVRTGEKILNDEECFIGSS

SEQ ID NO: 8446 - protein, 639 aa, Zea mays
  VARIANT 512..639: note = Derived polymorphism lacks residues 512 to 639
  VARIANT 502..639: note = Derived polymorphism lacks residues 502 to 639
  VARIANT 474..639: note = Derived polymorphism lacks residues 474 to 639
  VARIANT 360..639: note = Derived polymorphism lacks residues 360 to 639
  VARIANT 193: note = Ancestral polymorphism is P, Derived polymorphism is L
MLDFRKLMLNHRFPSIWYDMVFIIFTSLGKVHNMMAAELVKQYSNITLGEDNKICDIKQALKALRKKILSLDFDNSMHVHDPQDSFEYLEVLRKIKQLSEKLRTLDPGGEAKQLDELTVYAYEISEMAMARLEEEFIYLLTHFKQPLEQEVLSFRSTEDGSVEDFSSSSFSEEPSDGKATPNDISGGPEYFVPDLIQPGALSAVKSIAKFMFLNGYDKECLQAYINSRQTAIDEYFGSLRLEKLSIEELMNTSWNKLNSLIKRWNRAMRGFIRVYLVSEKRLSNHVFSELTDSTADLCFSEISFNSVVQLLSFYVSVAIGPPKTEKLFRLLDMYEVLDDLLPEVESLFEPKYGDMILNEYHEALLQLGESARKTFAEFKCAIQSYTSSNAVARGEVHPLTKYVMNYIKALTAYSKPLDSLLKDTDRRCLTSDIQLMANTYPNFTATALHLQSVTAVLEANLEAGSRLYRDDRLQNIFMLNNTHYMVQKVKNSDLKSFLGDDWIRIHNRKFQQQAMRYERASWNNVLSYLSDDGLCASGDAASRKTIREKIKNFNLSFEEVYRVQTAWSVPDDQLRDDVRISISLKVIQAYRTFVGRYSGFLDGSRHRDRYVKYRAEDLETLLLDLFEGTQKTLQHSCRV

SEQ ID NO: 8447 - protein, 166 aa, Zea mays
  VARIANT 18: note = Ancestral polymorphism is Q, Derived polymorphism is R
MALMLRCTTVTLTLQRQQKCFTAAAPADARARRRSWRAFARPRRSDHRECEAATETRSNSRKKTMSLYLQLQPVRHATPLSVGSYRGFVQHEGDVRADGTRHGRGVRVQRGARGEPHKNWPVDTLSLDLARFGMVDEAVSYLVRSVCVLEIDGDVGSVEWYQVQLD

SEQ ID NO: 8448 - protein, 288 aa, Zea mays
  VARIANT 22: note = Ancestral polymorphism is S, Derived polymorphism is C
  VARIANT 34: note = Ancestral polymorphism is W, Derived polymorphism is R
  VARIANT 249: note = Ancestral polymorphism is C, Derived polymorphism is R
MPLARSCLHLLLLFSSIAAAASAATERIPNSTTWPSSCPSYRCGHAVDIRYPFWIDDASNASSSSSSSSSSDCGYPSLRLECRRETPVLPLPSGDYAVTRVMYGDRTVSLFDLGVFSLSNTCPLVGRNLSLPAGSPLSLTPRDANLTFFVHCSFAGVPARHLVACLEGDGRHHSYVFCDGDELAPYAYAGLCQSVIAMPVLRRSLLGTGSTTRSPLDAIVPALNMGFELSWRPEADGECGQCESAGGLCGRRRLAGQHGAWTFACFRAAAAANPALISPKTPDPLFGA

SEQ ID NO: 8449 - protein, 593 aa, Zea mays
  VARIANT 116..593: note = Derived polymorphism lacks residues 116 to 593
MEMSAMEEALPKAMERRKGGLRTIPFIILNEIFEKVATFGLSANMILYLTERYLMTNAFATVVLYFWHAFSNFLPILGAVLADARLGRFRVITLGSCVSLFGMCLLWLTAILPVYKNTPECAPGRPVGCAVLPWQLPLLFTSFAFMSLGSGGIRPCTLAFGADQLDKRDNSANNVRTLQTFFNWYYTVLGLSIVFASTVIVYIQQARGWVVGFAVPVVLMVTALTLFLLGSPFYIKAAANSSVVIGFVQVLVASYNNRHEPLPPETADSSSFYNKAGCKPRTPTNKLMYLNRACVLRNPSKEISPDGAACDPWRLCTVQQVEDTKAVIRVLPIWSTGIMPGVVVGQQMFPTLQAKTMERRVGKLEIPPASFGVFAILTLTVWVAVYDRVLVRPLSRLTGHARGLSLRQRMGAGLVLFAVAMAVAAHTESVRRAAALAEGLRDSNPLTGERPVRMSAMNLVPQHCLTGLAEGLNLIGQIEFYYSEFPKTMSSIGVSLLALGLGFGAVLGSAIVGVIDAGTRSGGSHDGWLPSNLNRGHYDYYYLVLAVLCAANVLYFAVCGWAYGDEGQNRVVAADAAVDDVDDKEEEQKAVII

SEQ ID NO: 8450 - protein, 286 aa, Zea mays
  VARIANT 4: note = Ancestral polymorphism is C, Derived polymorphism is R
  VARIANT 12: note = Ancestral polymorphism is L, Derived polymorphism is P
  VARIANT 15: note = Ancestral polymorphism is C, Derived polymorphism is R
  VARIANT 16: note = Ancestral polymorphism is P, Derived polymorphism is L
  VARIANT 101: note = Ancestral polymorphism is S, Derived polymorphism is R
  VARIANT 107: note = Ancestral polymorphism is N, Derived polymorphism is I
MHGCRVPAAGLLLLCPAAMLLLALLLLASLPTTAAAVNTSTLPCEPAQCGNLSIYYPFWLTGTHQRHCGYKAFQVTCEERKVYLKNSYWAYQVLDISYENSSFVVTNVNLPEDGGSFCDLSLIGNASSDLSAAPFKISGRNRELFFLSDCQGQGQARQPSPPSSWAQMNCSDYGDGSAAAKSFAWLAGKYRPDDTLKPPLPLNCTVSSLMPVLGYQGAGPADYDRLMNLGFLLEHNFTAEDCAACASTGDRCSVDPDDDQLVCNCSDGQYWFFCGQYVNLPALTIQ

SEQ ID NO: 8451 - protein, 258 aa, Zea mays
  VARIANT 4: note = Ancestral polymorphism is P, Derived polymorphism is R
  VARIANT 5: note = Ancestral polymorphism is T, Derived polymorphism is I
  VARIANT 9: note = Ancestral polymorphism is L, Derived polymorphism is H
  VARIANT 17: note = Ancestral polymorphism is L, Derived polymorphism is M
  VARIANT 76: note = Ancestral polymorphism is W, Derived polymorphism is R
MTQPTLLFLLPLLATSMLLQFHDHASADCEPAAACGDLTLRYPFWLGSSSANDTHHDTPSPSPPPCAHHHPGFEVWCSDDGRVASLKGTYIHVLSINYSAGSLVASHARIAGAGGVCQADFNVSSSIALSVFTFSPRKNRALCFLYACNGTAPPSGPGYANATSSCAAPVYAFLADGDFYWDRPPAVAAGACKYSYVPVLGSEAAVMTAANYSRLLKDGFVLNWEVAGVADCQDCNASAEQCRHGNRSAAAGSTCAGE

SEQ ID NO: 8452 - protein, 208 aa, Zea mays
  VARIANT 13: note = Ancestral polymorphism is V, Derived polymorphism is A
  VARIANT 16: note = Ancestral polymorphism is S, Derived polymorphism is P
  VARIANT 28: note = Ancestral polymorphism is A, Derived polymorphism is P
  VARIANT 33: note = Ancestral polymorphism is G, Derived polymorphism is W
  VARIANT 45: note = Ancestral polymorphism is C, Derived polymorphism is R
  VARIANT 154: note = Ancestral polymorphism is K, Derived polymorphism is M
MALVPSSLLLFLVSSSVWVALSLPLPVAAAHGGQAGGQRCSPFLCGNVSIAFPFGLIPDGAAQTSCGAGFGFQVRCYDAIPHLGFSQSEINLKILSIFYHNRSLLLADRPWFTYFNRTSTKGCRIPTANTSSRLAPPLSVSSDNQNLIFYNCTKPPSPFEGLVATTCHDNTFVRAADGRRSDESGDYVLEGCTATKVPVLGVSGKVES

SEQ ID NO: 8453 - protein, 853 aa, Zea mays
  VARIANT 141..853: note = Derived polymorphism lacks residues 141 to 853
  VARIANT 313..853: note = Derived polymorphism lacks residues 313 to 853
  VARIANT 372..853: note = Derived polymorphism lacks residues 372 to 853
MTATATRPVPWLSLVSSLWTAWVAWTLPVVLATAAPPDRQGAEPACSPTLCGGVNISFPFWIVADHATETSCGLIGFQVICSNNTTPYIGSYKTPYSFRILNIFYSNASLLVADVHKLGDFVNVNGSTSASASAPAPSKPCHSPTGNSSSKLGLPFSISPANQNMVFYDCVEPPAQAVRRSRGLVDTACGNRTLVGVARRPDVPGSYSLEGCHATVVPVLVRSGQANPANYEELIRDGFLLTWQLPLLPPPSPAGGPWPPNYRLQNPSHSPSPIRYATGSSSSYCSLPSSSRRRRPARQAAGPRNAGGLNITYPFWLEEPGQPPCGPPSFRLRCSSGGGSFLSIFPGNRSFHVVDHNLPLATGCPPPTVNVSLLSPAGTFAFSRANRELLFLGKCTAFPPPDSAGFRSLPCDNRSFVRVGVGRDLSIPHGCLFTVVPILRVPEGGPKGRTSKVVGIVCGVVAVSLLAACFFFVWHKRKRRKQARAPNGFMHSESSLQSYSKDLELGGSPQIFTYEELEEATDGFSDSRELGDGGFGTVYKGKLQDGRVVAVKRLYKNNYKRVEQFKNEVDILSRLLHQNLVILYGCTSRSSRDLMLVYEFVPNGTVADHLHGSRASERDLTWPLRVNIAIETAEALAYLHAVEIIHRDVKTNNILLDNSFHVKVADFGLSRLCPPEVTHVSTVPQGTPGYVDPVYHQCYKLTEKSDVYSFGVVLVELISSKPAVDMSRTHSDINLANMALNRIQNHEVDRLVDPELGYETDDGTKKSIDLVMELAFQCLQLERDSRPSMKEVVVALNCIKNGDSPENKMDRSSSSPKEDAHLLTNSIQYSPDSVIHRFHSQSTTHSAASNASG

SEQ ID NO: 8454 - protein, 611 aa, Zea mays
  VARIANT 116..611: note = Derived polymorphism lacks residues 116 to 611
  VARIANT 419..611: note = Derived polymorphism lacks residues 419 to 611
MEGNEQGCGGLPQRPPVLGASMQPPIKKLVRQLDFNSAALAGNPAMAVAAAAVSRVLQPKASSVGFQHPQHVGAAMPMGVPQQLHQRVLPVMRLHQVVGHVPLAVSVPQLRPVPPQPVQRPPVAVPLKPESPKLRARLYEGKDSTPTKKKCCNCRNSKCLKLYCECFASGTYCDGCNCTNCFNNPDNEVARREAVEAILDRNPDAFRPKIGSSPHMHRNNVSSVEVPSDLPLVGKHNKGCHCKKSGCLKKYCECFQANILCSENCKCMDCKNFEGSEERRNLFQGDHKNAINMQQVTNAAVNGAIGATGFPSPSTSRKRKHNDPSLDHFNKEHIAHKNYHIPQKNAVPDGSIPISQSAHPPTLGPFTYKPLLADTVQAEDIKELCKLLVVVSGEAAKTYAGQKTKEERVGEKEDEIGGQKEDDRVGSLALTNHDREGNNQDQDQKAPIDDHSSRGTHTGKAIIEESRPNCVDDHKTHRPMSPGTLALMCDEEAFEKMCDEQDTMFTTSQNAAPQQTVIVNHNQSALYAEQENVVLTEFRDCLRKFVRYGRMKEERYSMAIKSETSGHPGQVNGVSQVPYSKVDVPAVKTYPQSSSSHLVAGKPVTGLLDKN

SEQ ID NO: 8455 - protein, 79 aa, Zea mays
  VARIANT 39: note = Ancestral polymorphism is L, Derived polymorphism is H
  VARIANT 37: note = Ancestral polymorphism is P, Derived polymorphism is S
  VARIANT 25: note = Ancestral polymorphism is G, Derived polymorphism is S
  VARIANT 11: note = Ancestral polymorphism is S, Derived polymorphism is Y
MEPGVDEAFVYREELEEELEERLKGWLKNWPGDTLSPDHARFGTVDEVVSYLVSSSSITIFSSCQRGNNYSRDDDCRTS

SEQ ID NO: 8456 - protein, 171 aa, Zea mays
  VARIANT 134: note = Ancestral polymorphism is L, Derived polymorphism is R
MMACALAVAWPAASLAPSGKRNLSGGRPPWLPSPRPSGSRRASLLLPRRRSQKTAFVVGGAASFCTASLKRSPRMRGHGEQVCATRRRRADIQSDTYVLMEPGMDEAFVSREELEERLKGWLKNWPRDTLPPDLARFGTVDEAVSYLVRSVCVLEIDGDVGSVEWYQVQLD

SEQ ID NO: 8457 - protein, 91 aa, Zea mays
  VARIANT 14: note = Ancestral polymorphism is D, Derived polymorphism is N
  VARIANT 23..91: note = Derived polymorphism lacks residues 23 to 91
  VARIANT 26: note = Ancestral polymorphism is R, Derived polymorphism is S
  VARIANT 37: note = Ancestral polymorphism is N, Derived polymorphism is K
  VARIANT 59: note = Ancestral polymorphism is D, Derived polymorphism is N
MAQQRMVLEVIHLDHANVSKMELKERLAKMYKVKDRNTIFVFKFRAGSTGSGLIYDNLDSKKFEPKYCLIWVCCRLALPFVACRYNVLILG

SEQ ID NO: 8458 - protein, 459 aa, Zea mays
  VARIANT 375: note = Ancestral polymorphism is D, Derived polymorphism is G
MAPANVRAAQAQAPSADRRLSTLVGHLLPSSPRRAAADTSATSTLESFPTMASQGSSVFAALEQAPEDPILGVTVAYNKDPSPVKVNLGVGAYRTEEGKPLVLNVVRRAEQMLINNPSRVKEYLPITGLAEFNKLSAKLIFGADSPAIQENRVATVQCLSGTGSLRVGGEFLARHYHERTIYIPQPTWGNHPKVFTLSGLNVRSYRYYDPATCSLHFEGLLEDLGSAPSGSIVLLHACAHNPTGVDPTIEQWEQIRQLMRSKSLLPFFDSAYQGFASGSLDKDAQSVRMFVADGGELLMAQSYAKNMGLYGERVGALSIVCKSADVAVRVESQLKLVIRPMYSNPPLHGASIVATILRDSEMFNEWTLELKAMADRIINMRQQLFNALKSRGTPGDWSHIIKQIGMFTFTGLNSEQVAFMRQEYHIYMTSDGRISMAGLSMRTVPHLADAIHAAVTQLK

SEQ ID NO: 8459 - protein, 523 aa, Zea mays
  VARIANT 17..523: note = Derived polymorphism lacks residues 17 to 523
MNAGAQLERRSSVRRSQSMVQEEDRGQPPDEELMSRSQGSSTEPSGGALRTGGAVPDKDSATPKPRLAEQSAGPSEMDLMKEKFAKLLLGEDMSGSGKGVPSALALSNAVTNLAASVFGEQRKLEPMAPDRKGRWKREVGWLLSVADHIVEFVAKKQVLDNGTEMEVMGTQQRRDLQANIPALRKLDTMLLDYLDNFKERNEFWYVKRDSCSESENEERSDEKWWIPIVKVPPGGLSKTSRGWLLHQKELVNQVLKAAMAINANCLMEMSIPDTYIDTLPKNGRASLGDALYRIITDVEFDPDDFLSTVDLTSEHKILDLKDRIEASVIIWNRKVHNKDGKSSWGSAVSQEKREQFEERAQTLLLIIKHRFPGIPQSTLDIAKIQENRDVGFALLESYSRVLESLAFNVMSRIEDVIQADNLAREKAKKNAPPAADPAAGRRGPQEAGGDDDDQSKTTLLDFMGWTGDSEGKNDDASPPPPPELPAQDDGRLMKLPNIMTNLKQTYMDKLDFLSGNRSPSGRH

SEQ ID NO: 8460 - protein, 346 aa, Zea mays
  VARIANT 39: note = Ancestral polymorphism is A, Derived polymorphism is V
  VARIANT 50: note = Ancestral polymorphism is R, Derived polymorphism is M
  VARIANT 66: note = Ancestral polymorphism is W, Derived polymorphism is R
  VARIANT 80..346: note = Derived polymorphism lacks residues 80 to 346
  VARIANT 117..346: note = Derived polymorphism lacks residues 117 to 346
  VARIANT 148..346: note = Derived polymorphism lacks residues 148 to 346
MAAPDVLPSAPRPPDPMMKAVSLPRVEKGSVFGKRLMLAYLKCGDLGEARTVFDGMPPQAADVRVRTSLMSAYAKAGDLQKVVLLFRQMQVLRGQSRCTCCFLCPQVRCQFGQPYERACAVANALIAVYSRCGRMEDAKRVFDSMHPWDAISWNSMIGGCFSNGWHGTAVDFFSKMWSQGLDSVQSGIDDAALGSKLVFMYVKCGDMGSARRVLDAMSSKGNVHVWNLIMGGDGLVAHGYIVKLGFRAECAVCNALISFYAKSNMIGDAVLVFDIMPRQDTISWNYVISGCSSNGLNSEAIELFIRMWTQGHELDLVTLLSVFASLCSHAIGLQEGWFMVTRLKLD

SEQ ID NO: 8461 - protein, 93 aa, Zea mays
  VARIANT 68: note = Ancestral polymorphism is F, Derived polymorphism is I
  VARIANT 56: note = Ancestral polymorphism is W, Derived polymorphism is G
MLEGKAVVEDTDMPAKMQAQAMSAASRALDRFDVLDCRSIASHIKKEFDAIHGPGWQCVVGSGFGCYITHSKGSFIYFRLESLRFLVFKGAAA

SEQ ID NO: 8462 - protein, 138 aa, Zea mays
  VARIANT 2: note = Ancestral polymorphism is A, Derived polymorphism is V
  VARIANT 34: note = Ancestral polymorphism is A, Derived polymorphism is V
  VARIANT 100: note = Ancestral polymorphism is A, Derived polymorphism is T
MAVKLNKPPKAKSLWILVRRLLRRSRNPPPPASAALEDGEGEKSGLLSRSSLEQLLVMTDDCAPGDDGDGDGDVCRCAKKPHGQPVAVLLPALARPEASAAAVPSAAGAAHRRFVFGGFRRRLLIRRPWRPMLVAIPE

SEQ ID NO: 8463 - protein, 154 aa, Zea mays
  VARIANT 21: note = Ancestral polymorphism is F, Derived polymorphism is I
MSLVRRGSVFDPFSVDLFDPFDSVFRSIVPSSSSAAAASETAAFASARIDWKETPEAHVFKADLPGVKKEEVKVEVEDGNVLLISGQRSREKEDKGDKWHRVERSSGQFVRRFRLPENAKTEEVRAALENGVLTVTVPKAEVKKPEVKSIQISG

SEQ ID NO: 8464 - protein, 468 aa, Zea mays
  VARIANT 430..468: note = Derived polymorphism lacks residues 430 to 468
  VARIANT 411..468: note = Derived polymorphism lacks residues 411 to 468
  VARIANT 391..468: note = Derived polymorphism lacks residues 391 to 468
  VARIANT 275..468: note = Derived polymorphism lacks residues 275 to 468
  VARIANT 139: note = Ancestral polymorphism is S, Derived polymorphism is N
  VARIANT 137: note = Ancestral polymorphism is I, Derived polymorphism is T
  VARIANT 132: note = Ancestral polymorphism is D, Derived polymorphism is G
  VARIANT 81..468: note = Derived polymorphism lacks residues 81 to 468
  VARIANT 74..468: note = Derived polymorphism lacks residues 74 to 468
  VARIANT 70..468: note = Derived polymorphism lacks residues 70 to 468
  VARIANT 23..468: note = Derived polymorphism lacks residues 23 to 468
MEMKPNRKPLGRNPLSDTLYRNQGMVLTGQGLGRHPFGGAPCHDLDAVSSKLRELVNAASRRCVSILCVQETKWKGQKAKEVENTGFKLWYSGIVANKNGVGIPIDKTLKDGVVDVKRQGDKIILVKLVLEGVVLMIISAYAAQVGLSESEKWEFLEDLYGMVRAVPTNEKFFIGEDLNGHVGSTNVGYERTHGGFGYGSRNREGEDILDFVVAYNLVIANTFFRKRDSHLVTFISGHRLSQIDFVLTRREDKQACLDWDTSEVFRERDFVEGAWSEEEDANNMWVKMETCIRKVASEVFGVTKGSNGESKDTWWWTEDVQKAIKEKKECYRNAVNIERYKVAKKTAKRVVSEAKGRAYDDLYRRLSTKEGEKDVYKIARIQERKMRDLNQVKCVKDEMDQLLVKGQYIKQRWIQESKVKEALKRMKGGKAMGPDGIPIEVWKCLGGYCYRLANQVVQPYFSIKQDAR

SEQ ID NO: 8465 - protein, 297 aa, Zea mays
  VARIANT 159..297: note = Derived polymorphism lacks residues 159 to 297
  VARIANT 124: note = Ancestral polymorphism is T, Derived polymorphism is A
  VARIANT 42: note = Ancestral polymorphism is R, Derived polymorphism is W
  VARIANT 26: note = Ancestral polymorphism is A, Derived polymorphism is V
  VARIANT 13..297: note = Derived polymorphism lacks residues 13 to 297
  VARIANT 11: note = Ancestral polymorphism is R, Derived polymorphism is Q
MDMARYESCYRHWIAGQEAGLAELEAASANAAAGRATDAELRTVVERCMLGYQDYATRRRALSREDGVAFFAPPWCTAFENSVLWLGGCRPSLTVRLLYNLSGEGLEAQVEELLGGLSNGVIPTGALGITSAQLVLINDLHSRTVHQENALSDRLATLQEDIADRPLLPIVRQRELAAAARLGAAAAASGSCDGAARRRLRAARLGAADAEVDAALDSYKAALSRLLVEADELRMATARALATEILTPRQAVEMLAAGKHLHLSVRDWSRRREAAAGAQQQLGGQSAGTDNTVRPST

SEQ ID NO: 8466 - protein, 270 aa, Zea mays
  VARIANT 2..270: note = Derived polymorphism lacks residues 2 to 270
MESDTERDVHNSSRSTNPSGHHQRPLRLVKSTAFKREERRKRKDRKRQRHLVDELVRWQPLGAPTPLPAATGSVSPSQAQPDTPWPCDPPPPPDPAEADSWSWGPPAVPSPTPTQPTVDVAGAVPLHPQVVAVRSCRAFFESQFEEDEEEENEGSAARFFSELLGSDAALRGFYEAERDKGHFLCLVCEGSGARLGKRFAGCAALVQHAGSIARTKWRLAHRAFADSVGLLLGWGAGRIAPPPVPPPADSDSDGSFDQVGSSQMVEMELS

SEQ ID NO: 8467 - protein, 277 aa, Zea mays
  VARIANT 250: note = Ancestral polymorphism is W, Derived polymorphism is R
MRLFLDNFMECTLVVSKLENWHHLKNTLKCKMPKIKSLSNACRVSFSPEGPISEEALERVRALLDMIRPLDVGLDNEAQIARNWSSSTRPSNGRRGRNGANQFAAPIKYLHIHECESFSMGIFCMPPSSVIPLHNHPGMTVLSKLLYGRLHAESYDWVDIPDHPIDQLQTRPAKLVKDCEMTAPETTILYPNAGGNIHTFRAITPCALFDVLSPPYSAEDGRHCSYFRKSQMNQPPVVLPAEIDSSQVVWLEELEDHQPPEGFVVARGLYKGPVIRR

SEQ ID NO: 8468 - protein, 822 aa, Zea mays
  VARIANT 522..822: note = Derived polymorphism lacks residues 522 to 822
  VARIANT 34: note = Ancestral polymorphism is G, Derived polymorphism is C
  VARIANT 18: note = Ancestral polymorphism is A, Derived polymorphism is V
  VARIANT 3: note = Ancestral polymorphism is A, Derived polymorphism is V
MTALQFLLLALVAVTQVASATTVTYNDRALVIDGQRRIILSGSIHYPRSTPQMWPDLINKAKEGGLNTIETYVFWNGHEPRRRQYNFEGSYDIIRFFKEIQNAGMHAILRIGPYICGEWNYGGLPAWLRDIPGMQFRLHNAPFEREMETFTTLIVNKMKDVNMFAGQGGPIILAQIENEYGNIMGQLKNNQSASQYIHWCADMANKQEVGVPWIMCQQDNDVPHNVINTCNGFYCHDWFPNRTGIPKIWTENWTGWFKAWDKPDFHRSAEDIAFAVAMFFQKRGSVHNYYMYHGGTNFGRTSGGPYITTSYDYDAPLDEYGNIRQPKYGHLKDLHDLIRSMEKILVHGKYNDTSYGKNVTVTKYMYGGSSVCFINNQFVDRDMKVTLGGETHLVPAWSVSILPNCKTVAYNTAKIKTQTSVMVKKANSVEKEPETMRWSWMPENLKPFMTDHRGSFRQSQLLEQIATSTDQSDYLWYRTSLEHKGEGSYTLYVNTSGHEMYAFVNGRLVGQNHSADGAFVFQLQSPVKLHSGKNYVSLLSGTVGLKNYGPSFELVPAGIAGGPVKLVGTNGTAIDLTKSSWSYKSGLAGELRQIHLDKPGYKWQSHNGTIPVNRPFTWYKTTFEAPAGEEAVVVDLLGLNKGVAWVNGNSLGRYWPSYTAAEMPGCHVCDYRGKFIAEGDGIRCLTGCGEPAQRFYHVPRSFLRAGEPNTLILFEEAGGDPTRAAFHTVAVGPVCVAAVELGDDVTLSCGGHGRVVASVDVASFGVARGSCGAYKGGCESKAALKAFTDACVGRESCTVKYTAAFAGAGCQSGALTVQATCS

SEQ ID NO: 8469 - protein, 128 aa, Zea mays
  VARIANT 94: note = Ancestral polymorphism is V, Derived polymorphism is I
  VARIANT 82: note = Ancestral polymorphism is L, Derived polymorphism is P
  VARIANT 73: note = Ancestral polymorphism is G, Derived polymorphism is S
  VARIANT 64: note = Ancestral polymorphism is A, Derived polymorphism is V
  VARIANT 60: note = Ancestral polymorphism is G, Derived polymorphism is D
  VARIANT 54: note = Ancestral polymorphism is P, Derived polymorphism is S
  VARIANT 23: note = Ancestral polymorphism is R, Derived polymorphism is H
  VARIANT 14: note = Ancestral polymorphism is R, Derived polymorphism is W
MPGFAQRLAGIPWRSIARQGLSRVFLVAKAYCVIHIANEHLCSVALVRGASMLPALNLADDVVAVDRVSVRFGRVAPADIVLMISPEDPRKWLIKRVVGMQGDSITYLVDPGNSDSSRTIVVSWSPLG

SEQ ID NO: 8470 - protein, 123 aa, Zea mays
  VARIANT 18..123: note = Derived polymorphism lacks residues 18 to 123
  VARIANT 74: note = Ancestral polymorphism is S, Derived polymorphism is I
  VARIANT 77..123: note = Derived polymorphism lacks residues 77 to 123
MSLVRRSNVFDPFSMDLWDPFDTMFRSIVPSATSTNSETAAFASARIDWKETPGAHRSREKEDKDDKWHRVERSSGQFVRRFRLPENAKVDQVKAGLENGVLTVTVPKAEEKKPEVKAIEISG

SEQ ID NO: 8471 - protein, 198 aa, Zea mays
  VARIANT 63: note = Ancestral polymorphism is G, Derived polymorphism is R
METIKCCIACILPCGALDVVRIVHSNGRVEEISGGPVLAGEIMKAYPKHVLRKPPSTCPADGGIVVQKPVILPHNAELQKGKIYFLMPVMATPAPEKPAAKPQPPPAAGQSAAAASVARRRRRRKDHAAARPDGGGAAPACSSGAGARPPEGEKERLLANERYLSEIMKEKASTARDRRRGRVAVWRPHLESITEDDL

SEQ ID NO: 8472 - protein, 524 aa, Zea mays
  VARIANT 444..524: note = Derived polymorphism lacks residues 444 to 524
  VARIANT 331: note = Ancestral polymorphism is R, Derived polymorphism is W
  VARIANT 196: note = Ancestral polymorphism is R, Derived polymorphism is C
  VARIANT 162: note = Ancestral polymorphism is P, Derived polymorphism is S
  VARIANT 107..524: note = Derived polymorphism lacks residues 107 to 524
  VARIANT 106: note = Ancestral polymorphism is G, Derived polymorphism is R
  VARIANT 77: note = Ancestral polymorphism is R, Derived polymorphism is W
  VARIANT 71: note = Ancestral polymorphism is T, Derived polymorphism is M
  VARIANT 39: note = Ancestral polymorphism is P, Derived polymorphism is S
  VARIANT 35: note = Ancestral polymorphism is R, Derived polymorphism is G
  VARIANT 13: note = Ancestral polymorphism is D, Derived polymorphism is N
MDQKDRLSCLPDDVLQSILRKLSLKQAVRTGALSRWWESQWIRALAGSPVVNLTDDPDFARGQPPALSAATVDRCLRLHAELGTPLEVFRVALVCPSDLDGQDVIGWIAAGLRRGAKAVEVDLAPPLPEEEEEEEEEGEEEVEEEEEEDPHAGHEAPLLELPADLFQARNSLERLALGRFSLRAVPLPAVGLAGLRSLSLSHVDVTDEALRGLVANCPALERLSLRRCSRLAMVSVASETLRVLELVGCQALKQLCVDAPALESFALHCNVFVTNRDASCEWDWDTPVEVDLLGPPALRDAYLSHIGCDTRLDTEHNMLYPSLCLDVVLARILTICSVVLLHVDSLSWLDPFKDMPNLEELQLLMDYEGYCLEAVSGFFKLIPLPVLQRLFVRLHIDHEPEGEGSSSAAVWSVENDDSEDMAPREEIVLDQLTFVKFVNFSGTWCQLQLLSFFLDKSPVLQQLVLVTPEGEEALGDDRLKVIYERVAALEKASSEASITMCRPKEDDTPNHPHTRYFHEEYETM

SEQ ID NO: 8473 - protein, 430 aa, Zea mays
  VARIANT 319..430: note = Derived polymorphism lacks residues 319 to 430
MQRDTSSSDVSASHVGRVRRRKHPTEATTDGNRANGQPLLVNDQNKYKSMLTRTYSTVWMIGGFAFIIYMGHLYIWAMVVVIQIYMARELFNLLRKSSEEKQLPGFRVLNWHFFFTAMLYTYGRFLSRQLVNTVTSDHLLYKVVSGLIKYQMFICYFLYIAGFVWFILTLKKKTYKYQFKQYAWTHMILLTVFAQSAFTVANIFEGIFWFLLPASLIVINDIFAYLFGFFLGRTPLIKLSPKKTWEGFIGASVTTIISAFLLANVMGHSQWLTCPRKDLLTGWLYCDPGPMFKPEHYSLGEWVPHWFPWKELAIMPVQWHALALGLFASIIAPFGGFFASGFKRAFKIKDFGDSIPGHGGITDRMDCQMVMAVFAYIYHQSFIAPQNFSVEIILDQIIRNLTYEEQKYVYEQLGEMFRERQLAHWLKAES

SEQ ID NO: 8474 - protein, 155 aa, Zea mays
  VARIANT 54: note = Ancestral polymorphism is K, Derived polymorphism is N
MTLVEMCVHMDCPGCEKKIRKAVQRLEGVHDVEVDMAQQKVTVSGDVEQKKVLKAVRRTGRRAVLWPLPYAAGAAAGAAHVLAQQQPAAGAGAGAGPAHASHAARPTSSYNYYKHGYDDSSLYGAYYHHGANSAVAGTRSTDYFSDENAQGCSVM

SEQ ID NO: 8475 - protein, 296 aa, Zea mays
  VARIANT 9: note = Ancestral polymorphism is S, Derived polymorphism is P
  VARIANT 58: note = Ancestral polymorphism is Q, Derived polymorphism is R
  VARIANT 96: note = Ancestral polymorphism is A, Derived polymorphism is T
  VARIANT 115..296: note = Derived polymorphism lacks residues 115 to 296
  VARIANT 128..296: note = Derived polymorphism lacks residues 128 to 296
  VARIANT 131: note = Ancestral polymorphism is L, Derived polymorphism is S
  VARIANT 139: note = Ancestral polymorphism is G, Derived polymorphism is E
  VARIANT 166: note = Ancestral polymorphism is R, Derived polymorphism is K
  VARIANT 189: note = Ancestral polymorphism is E, Derived polymorphism is V
  VARIANT 222: note = Ancestral polymorphism is Y, Derived polymorphism is C
MFCLRNYWSPAFASVKEGPVRHHIKFNCVVVCGARGPRPRYPRVWKTRKKIGTISKSQKLVECIKGLSNVKEEVYGALDSFVAWELEFPLIVVKKALKKLEDEKEWKRIIQVIKWMFNKGQGKTMGSYYTLLNALIEDGRIEEAEELFRMVFSRYMEGLPRTFFMRIISFYYSAGEHDKMFEIFADMEELGVRPDGSIIRMLGDVFQKIEMMDKYEKLKKKYPPPKWEYRYIKGKRIRIRVYPDSKTEETAKGDHDNDELGEVESIQLDNELEEEASSGLDRSVLDDATCGDLEYI

SEQ ID NO: 8476 - protein, 219 aa, Zea mays
  VARIANT 34: note = Ancestral polymorphism is R, Derived polymorphism is C
  VARIANT 36: note = Ancestral polymorphism is V, Derived polymorphism is I
  VARIANT 38: note = Ancestral polymorphism is A, Derived polymorphism is V
  VARIANT 71: note = Ancestral polymorphism is T, Derived polymorphism is I
  VARIANT 77: note = Ancestral polymorphism is W, Derived polymorphism is R
MSAGELRLELDELRRLESLAKHPRVQILLANEIRNVEAKLAKATEPSPEPLAAASAPAPAPAARPVLSYVTLGSFSWEQDNEKIRIYVSLEGVEQEKVETTFKPTSVDIKFHDVKGKNYRCAIPKLNKEIVPEKCKVVVKPTRVVVTLFKGSKGNWLDLHFKEDKFKPNMDKEKDPMSGIMDLMKNMYEEGDEDMKRTIAKAWSDARSGKTTDSMSGLR

SEQ ID NO: 8477 - protein, 125 aa, Zea mays
  VARIANT 110..125: note = Derived polymorphism lacks residues 110 to 125
  VARIANT 84..125: note = Derived polymorphism lacks residues 84 to 125
  VARIANT 75: note = Ancestral polymorphism is S, Derived polymorphism is F
  VARIANT 65: note = Ancestral polymorphism is A, Derived polymorphism is T
  VARIANT 64: note = Ancestral polymorphism is D, Derived polymorphism is G
  VARIANT 62: note = Ancestral polymorphism is G, Derived polymorphism is D
  VARIANT 57: note = Ancestral polymorphism is A, Derived polymorphism is T
  VARIANT 37: note = Ancestral polymorphism is R, Derived polymorphism is S
  VARIANT 30..125: note = Derived polymorphism lacks residues 30 to 125
  VARIANT 27: note = Ancestral polymorphism is A, Derived polymorphism is V
  VARIANT 26: note = Ancestral polymorphism is V, Derived polymorphism is A
  VARIANT 23: note = Ancestral polymorphism is G, Derived polymorphism is D
  VARIANT 19..125: note = Derived polymorphism lacks residues 19 to 125
  VARIANT 8: note = Ancestral polymorphism is Q, Derived polymorphism is H
MRGKGGPHTAACEYRAVRQRTWGKWVAEIREPNKRTRLWLGSFATAEEVALAYDNAARRLYGPDAFLNLPHLRAFVVSSAATHQRLRWLAASARGAAAVPAYGLLNLNAQHNVYNLLAHVPLMDF

SEQ ID NO: 8478 - protein, 415 aa, Zea mays
  VARIANT 109: note = Ancestral polymorphism is R, Derived polymorphism is C
MDFKGFWESRFGGKKEPEPEQNGHANGVQNQKRTSDLAVYEQFEQQARQTQVRAAAIRDGDADVIQKPLLPSFESAEMRNLAETLLRDIIRGSPDVKWESIKGLENAKRLLKEAVVMPIKYPKYFTGLLSPWKGILLFGPPGTGKTMLAKAVATECKTTFFNISASSIVSKWRGLENLMSFSYVSAGDSEKLVKVLFELARHHAPSTIFLDEIDAIISQRGEARSEHEASRRLKTELLIQMDGLTKTNDLVFVLAATNLPWELDAAMLRRLEKRILVPLPEGEARQAMFEELLPATTSKLEIPYDILVEKTEGYSGSDIRLVCKEAAMQPLRRLMSVLEASDELVPEEELPEVGPLKPDDIELALRNTRPSAHLHAHRYEKFNQDYGSHVDVSFNHGTRAELIYVLLRRISLLAC

SEQ ID NO: 8479 - protein, 331 aa, Zea mays
  VARIANT 185: note = Ancestral polymorphism is P, Derived polymorphism is H
MVVLAKPPVVDQIPLLRSPGPRDSFSGVPVVDLSSHGAARAIVDACERFGFFKVVNHGVAAATMDRAESEAVRFFAQAQADKDRAGPAYPFGYGSKRIGLNGDMGWLEYLLLAVDAASLSDACPVPSSAAFRSALNEYVAAVRKVAARVLEAMAEGLGIADADALSSMVSGAGSDQVFRVNHYPPCPALQGLGCSTTGFGEHTDPQIISVLRSNGTSGLQIALRDGAQWVSVPSDRDAFFVNVGDSLQVLTNGRFRSVKHRVVTNSLKSRVSFIYFAGPPLGQRIAPLPQVLAEGEESLYKEFTWGEYKKAAYKTRLGDNRLAQFEKRSNI

SEQ ID NO: 8480 - protein, 74 aa, Zea mays
  VARIANT 57: note = Ancestral polymorphism is P, Derived polymorphism is A
  VARIANT 7: note = Ancestral polymorphism is T, Derived polymorphism is I
MAASTKTVAVLLAAVLLALVASAAASRKLEEDALLGSLAPAPAPAVGGAAGLPGGKPGAWAVAALVSLVAFLVI

SEQ ID NO: 8481 - protein, 289 aa, Zea mays
  VARIANT 65..289: note = Derived polymorphism lacks residues 65 to 289
  VARIANT 194..289: note = Derived polymorphism lacks residues 194 to 289
MAPVDQRTMLVNPATAFVAVIYAYFMSRFRVAQAARPQITYGPLSAMDEERQANLNKIYKTQVQLVLACCIFHNWILDHGQDEVFPEESTWEPNSNNSSQLDGTDVVDNVAWDLCMISLEDEHYNGHIKAHPKDAEFLNKPIENYKEMMTIFGTGLATGKYAMGSNEALGSPCEGATSSVKTDSLDEDKSAMAWYVVHVGRQTGVYSSWEACHAQVNGFKGACYKRYNSREEAMTAFNGHDNEDKQQEVPVLLRNKASAITIKDVIIFAGGVVILVQALIITILVSKLM

SEQ ID NO: 8482 - protein, 460 aa, Zea mays
  VARIANT 194..460: note = Derived polymorphism lacks residues 194 to 460
MLGRPALPGGYIGASAPLISLTGMDGQAPPLLDAVVLEPLAVGDELHPRRPVEVEDAPAAAPPSGMDGQVPPLYNVTRDPLTVSDELQPTGEVVDDALLVAPDIVKGEVMEDDILPVATDIINDAASECPEAGSDGVVLTDELRNRIVKQVEYYFSDENLPTDEFLLNYVKKNNKGFVPIEIIASFRRMKKLVQDLSVIEAALRTSSKLVVSSNGKRVRRLHPLPHKELKDSKKSTVLVENLPPDFSMESIQEKFATVGKVVNITINDPESVKEFSTAKKPDFNLSFKAHVLVEYEAVEAAEKAVTALSDESNWRTGMKVRLLSKQSVMGPGKYKKPSKENQDAVSKMIDQNQHSKEDQLKTLEKISGADAVGITKDRDNLKPVFITETEHQDQKPNARGRKGWYKGQGQMQQNANKQGSCGSESLNKPISGPRMPDGTRGFTLGRGRSLPLQKSEKAEE

SEQ ID NO: 8483 - protein, 230 aa, Zea mays
  VARIANT 18: note = Ancestral polymorphism is R, Derived polymorphism is L
  VARIANT 106: note = Ancestral polymorphism is D, Derived polymorphism is Y
MEDVDVSRQLKQMTNFIRQEAVEKAAEIEAAAAEEFQIEKLQLVEAEKKKIRQEYDRKEKQVGIKKKIDYSMQLNASRIKVLQAQDDLVTDMLESARKELLCISRDHPTYKKLLKTLIVQSLLRLKEPAVLLRCRKEDLQLVDLVLESARNEYADKAKVYPPEIVVDRQIYLPSAPSHYQAPGPSCSGGVVLASRDGKIVCENTLDARLQVVFRKKLPEIRQSLFGQVAA

SEQ ID NO: 8484 - protein, 664 aa, Zea mays
  VARIANT 87: note = Ancestral polymorphism is G, Derived polymorphism is V
MPRPSPPLSESLFNSLIASRSRTGRVVDALSLLTRMLAAGVAPTAFTFSPILASPSATACCAAQLHPHILKRGLLHCEPYSGTSLVGFFGRSGRFDEALKVFGEMTVRSVVTWNCLIYSFVQFGHSRAAVSWFRELVRSGDGLSDGSFVAILPSFGLPEQVHGVMNKIGMGSLSAVANALLNSYCTCGAIDVAEKLFNEIMFRDVVCWNTMITGFARSHVPERAFELFLSMQRQGIFPNEITFASVLYACTVIDGHKHGRFVHAKIIKHNLSTSVSVNTSLVGFYANCSRGDAHKVLEGVHGNSTTCWNALISGHSDCDDPTYLVIVRHMLQSGIKPNEVTLSSLKDPSLLDLQQVHSLVIRLGHGGNDYVSSAIISSYASHGIIFDALSYGAALDPDSCSVSMNVLAGVCNKAHMYQETKDLLLHKRDRDTISWSILITACARNGDFIEAFGFFRQMRIFGHRFDSYVCVSLLGICTKNNSLYLGKLIHGLFIKTNSSCSDSYVDNMLLDMYAKCGRIEDCLRVFEEMEDRNLISWTTVISGLGLNGFSRKALALFKAMEKDGCKPDKVAILAVLSSCRHGRLVQEGMKIFKNLKADYSIEADMEHYICVVDMLCKCGYLKEAEVVIRGMPFQPSTAICRTFLQGCKTYGVTEAQVFSQPWIK

SEQ ID NO: 8485 - protein, 86 aa, Zea mays
  VARIANT 19: note = Ancestral polymorphism is V, Derived polymorphism is A
MAARVGIVVLCSLLLLLIVGAATAAEARVVPPGYAAPDIDVARAAGTGGGRRGGIPRGSRWNVQSVQGDSARKREVPGGPDPQHHG

SEQ ID NO: 8486 - protein, 121 aa, Zea mays
  VARIANT 38: note = Ancestral polymorphism is P, Derived polymorphism is L
MAAVARSFLRSSGSSSLRSAAARAASRAGPVPLPRRIPSSGPRVLLRSPVDINSVCLESLMPMHSATASALMTSLLAAPACKGLGWLSEGLWLVRWRSSLMRTRPRAICFALCCLDFAHYK

SEQ ID NO: 8487 - protein, 279 aa, Zea mays
  VARIANT 216..279: note = Derived polymorphism lacks residues 216 to 279
MGSSARARHLFFLAALVAVAAPRSADAWGGGRFFFSKTTRAEATAEPDKKAAGGDTVAAPAFSRPSTAGSGGRGYGLYGRLEEKYPADYFRRGVHRNTEKLTTTTGGERVRTTFPEDSGRGRPPTDVPGATEEEGGGAGGDLEGVRPYPENGSGRGRPPWYYTAFHRGRQQEQEQRDFGMSDTRLYQNGRYYYDVDAGRYGYGRESNPMRTRPDEGEFGSGYGRPRGPAGGRRGSSYGDAAGYQQRYGNDEEFGDGAMDQNTNGAFQEEAGQNGRRYTP

SEQ ID NO: 8488 - protein, 152 aa, Zea mays
  VARIANT 18..152: note = Derived polymorphism lacks residues 18 to 152
  VARIANT 84: note = Ancestral polymorphism is G, Derived polymorphism is S
  VARIANT 103: note = Ancestral polymorphism is S, Derived polymorphism is I
  VARIANT 114: note = Ancestral polymorphism is P, Derived polymorphism is T
MSLVRRSNVFDPFSMDLWDPFDTMFRSIVPSATSTNSETAAFASARIDWKETPEAHVFKADLPGVKKEEVKVEVEDGNMLVISGQRSREKEDKDDKWHRVERSSGQFVRRFRLPENTKVDQVKAGLENGVLTVTVPKAEEKKPEVKAIEISG

SEQ ID NO: 8489 - protein, 211 aa, Zea mays
  VARIANT 26..211: note = Derived polymorphism lacks residues 26 to 211
  VARIANT 100: note = Ancestral polymorphism is R, Derived polymorphism is C
  VARIANT 111: note = Ancestral polymorphism is N, Derived polymorphism is H
  VARIANT 116: note = Ancestral polymorphism is A, Derived polymorphism is D
  VARIANT 155: note = Ancestral polymorphism is A, Derived polymorphism is T
  VARIANT 162: note = Ancestral polymorphism is G, Derived polymorphism is R
MDGRGSLAGLLPFGDANDIVLQMANEVLPVVKGVPVLAGVCATDPFRRMEYFLRQLETIGFCGVQNFPTVGLFDGNFRHNLEETGMGYNMEVEMISMAHRMGFLTTPYAFNPDEAAAMAKAGAHIIVAHMGLTTAGSIRAMTAATLDDSVLCVQAIADAAFGVKLISLFSITEFLMFPRELQLLGESVKLMKLVEAVAKGTINNETLGYFT

SEQ ID NO: 8490 - protein, 770 aa, Zea mays
  VARIANT 82..770: note = Derived polymorphism lacks residues 82 to 770
  VARIANT 536..770: note = Derived polymorphism lacks residues 536 to 770
MPEPQSSVASSGSVDRLRNAFGGVLCIFTLLLIGVLAFSIRLFSVIKYESVIHEFDPYFNYRVTQFLSKNGIYEFWNWFDDRTWYPLGRVIGGTVYPGLTLTAGTIWWLLNSLNIPLSVETVCVFTAPVFSVNASWATYLLTKETKGPGAGLMAATILAMVPSYISRSVAGSYDNEAVAIFALIFTFYLYVKTLNTGSLFYAALNSLSYFYMVCSWGGYTFIINLIPMHVLLCIVTGRYSSRLYIAYAPLVVLGTLLAASVPVVGFNAVMTSEHFASFLVFIILHVVALVYYIKGLLTPRLFKVAMTFVITVGLAVCFAAAAILIALIASSPTKGWSGRSLSLLDPTYASKYIPIIASVSEHQPPTWPSYFMDINVLAFLVPAGIVSCFLPLSDASSFLVLYLVTSVYFSGVMVRLMLVLAPAACILSGIALSEAFGVLTRSMKFQRPTLDDGSFTAGDGSSDTPTNSEMGLKEKTSKKNRKKDKESEGSSPVDHRTEEKLLVLPCGPSAVGIMLLTILSGFYVIHCVWAAAEAYSAPSIVLTSRSHDGFHVFDDFREAYGWLRHNTDADDKVASWWDYGYQTTAMANRTVIVDNNTWNNTHIATVGTAMASPEKVAWEIFNSLDVKYVLVIFGGLIGYPSDDINKFLWMVRIGGGVFPQIKEADYLKDGNYRVDAHSTPTMLNSLMYKLCYYRFVETDGKGFDRVRRYEIGKKHFKLTHFEEVFTTHHWLVRIYKLKPQKNRVRGKLKFKSSLKASFMRKTGGKKSPWK

SEQ ID NO: 8491 - protein, 166 aa, Zea mays
  VARIANT 108: note = Ancestral polymorphism is G, Derived polymorphism is A
MSLVRLLDTLALDSWVRNPFTIFGTAVAADAWLASDTSAFANTHIESRDTAAAYVFSAALPPGVKKEEVTVELDEGNVLVIAGERSVCRQERSDGCHHIERSRATFLARFHLPEDAAVDGVRAALDAGRLTVTVPKVGAAAAAIVPEKPAADAPALAPVPVEAGPC

SEQ ID NO: 8492 - protein, 453 aa, Zea mays
  VARIANT 318: note = Ancestral polymorphism is Q, Derived polymorphism is L
MAVGSGLALYHVLGVATCVALLYFTFGEVDLRHISLPSLPVSRPSPFRAAAVAAPFVERRGAQLFLAGRPFYVNGWNSYWLMDQAVEPRSRDRVSRMFRTGAEMGLTVCRSWAFNDGAYNALQVSPGHFDERVFKALDRVVVEAGRHGVRLILSLANNLEAYGGKTQYVRWAWEEGVGMSASNDSFFYDPAIRDYFKVYLKTLLTRKNHLTGVEYRDDPTILAWELMNEPRCTTDPSGDTLQRWMEEMSAYVKSIDKKHLLTVGTEGFYGPTSPQEKLDVNPGTWKDNNYGSDFIRNAKIPDIDFASIHLYPDTWLLQQHATVDEKLKFVKRWVASHIEDGDKELGKPVLATEFGLSHRAKGFHHSHRDVFYKAVYDTVYRSAARGGAGAGAFVWQLAVEDMEEFHDDFSVVPSEHPSLHRLIKSQSCRLAKLRHGVGEEAKRTLSVCAAGSS

SEQ ID NO: 8493 - protein, 284 aa, Zea mays
  VARIANT 154: note = Ancestral polymorphism is S, Derived polymorphism is N
  VARIANT 175: note = Ancestral polymorphism is A, Derived polymorphism is S
MVMEETIDDSEMSLSNMVLGFLEDFERDERRPENDDDNNEEEGSSGGDTAESKAFWQTQHLQLREALAKGSPAESRIRADTEEAVKSMRAAACSCSCTGRPAARDCRPCMLRHVADRLRDAGYDSALCKSKWTRSPDIPSGEHSYVEVAVQTRSGKSVRVVVELSFRAEFEVARASAGYRALVTALPEVFVGRADRLRGVVKVMCAAAKQCMKDNNMHMGPWRKHKYMQAKWLGTPERGAAAVAAAETPVVAVPSVTVGSPEKQTKFRASMLTFDFGRTALEVA

SEQ ID NO: 8494 - protein, 401 aa, Zea mays
  VARIANT 106..401: note = Derived polymorphism lacks residues 106 to 401
MQAAVNTTTVGAHPHPTKSSFLRPSPPCRVYFHASPRPNLRAIAMASKSQLQDQLIITRPDDWHLHLREGGVLEAVVPHSARHFGRAIIMPNLKPPVTTTARAVEYREEIMRALPPGSSFEPLMTLYLTDNTSPEEIKLARKSGIIFAVKLYPAGATTNSQDGVTDIFGKCLPVLEEMVRQEMPLLVHGEVTDPHVDTFDREKVFIDKILAPLVQKLPQLKIVMEHITTMDAVNFIESCEEGHVAATVTPQHLLLNRNALFQGGLQPHNYCLPVLKRETHRQAIVSAVTNGSRRYFLGTDSAPHDKRNKECSCGCAGIYSAPVALSLYVKVFEEAGALDKLEAFTSFNGPDFYGLPRNTSKIILRKNAWKVPATYKHSSGEIVPMFNGSTLEWLPSDQPKE

SEQ ID NO: 8495 - protein, 172 aa, Zea mays
  VARIANT 148..172: note = Derived polymorphism lacks residues 148 to 172
MEEEESVMDPAWSHLQIVYELFLRFIQSPETNAKLAKRYIDHGFIIRLLDLFDSEDPREREYLKTILHRIYDKFIRKAINNIFYRFIFETEKHNGIAELLEILGSIINGFALPLKEEHKLFLVCHFHMSSRIDHSRLPLPHDGMLVLWELRSVPILFVLFSSTPEYNSYFFF

SEQ ID NO: 8496 - protein, 23 aa, Zea mays
  VARIANT 17: note = Ancestral polymorphism is T, Derived polymorphism is I
  VARIANT 11: note = Ancestral polymorphism is M, Derived polymorphism is T
  VARIANT 6: note = Ancestral polymorphism is V, Derived polymorphism is I
  VARIANT 5: note = Ancestral polymorphism is T, Derived polymorphism is I
MYDITVAALGMLSTIATGLAIDA

SEQ ID NO: 8497 - protein, 1577 aa, Zea mays
  VARIANT 763..1577: note = Derived polymorphism lacks residues 763 to 1577
MGRKGSEVSPSKRYPLRSAHSSGRVLRSALANNNKDSEPLNAAAATQAAVKKRSGNQLDSPNSTVRLLRSTSKNKDEAHSGPLNDRIIDKPAANKRKHANPSQVGSPSSSVRVLRSAIKNKDMARSEPQSDRTAGEAATNKRKNANSSKVGSLSSGLSVLRSASKAKDETCIKPLNDSAAVEPASSKRKCTSPSKVGSPSNSVRVLRSTSKYKNETCTEPLNDSGAVEPAANRRKGVSRSKEGSPNSSVRVLRSASNNKIDVSIEPLNNSTTGQPAAKRRKNGSSFKSSARVLCSTSERANEASSEPLNDSTAAQPAARKKKGGAMPKTDNPKIGVRVLRSASGKKNETCTEPVNGSTSAEPTVTKKRNCKPSKDRSPKKDYLKICQRIKYILNRMKYEQAFIQAYASEGWKGQSLEKIRPEKELERAKAEILQCKLRIREAFRNMDSLLSKGKLEESLFDSAGQISSEDIFCAICGSKDVTSQNDIILCDGACDRGFHQNCLSPPLLTEEIPPGDEGWLCPACVCKADYIDALNELQGSKLSIHDSWVKVFPEAASTANGSKQVDASDLLPDHIKDSANLALVGTHMVNEIRFSEEDDSKADDLGLPSEDSGDGDFDPAGPDSSEDQNDGLNSEESDFTSDSDYFCAEIAKSCGQDEVSASPLSNVINRTDRMKLRAYSRRSNEENHNHAFMDMELEQDIVLPVPSRRQVERLDYKKLYDEAYEEESSNSSDEEEWSGKELLEGSGTDSLDERLRPVKRCSRRAPAGQQNNELTPQSRPHGSNSEQKTEVLRSNGSSSTGRKYDPEVTQKLKVHFEKDPYPSRETKENLSEELGLTFNQVSKWFSSTRHYSRVASAKKEMHPDSHTCENNDETTVDSMQAKQPNAGVMEKLTGDRNGIVPEKPMVQDNLNQGAMEKLTRDKNDIVPEKPVMQSSLNQCNNEDIPLSGTEIEMESYEQESSDSSDEEWSILSTPRKTRLQDHGKSSVTESLRSAKRCSRRAPAREQNNERIQSEQLHGSASEQQTEFLRSNVSSGKVSKYHFGPIVSQKLKEHFEKDPYPCRATKESLAQELGLTFNQISKWFSGTRHYSRDAVAKNQKRPGENTTVNNNSTTFDDIQVIEPNVGLIDKPAADVNDMISEKLMVQINLNEGIEEDIPPSQYARCEEKITMTPAAISREAGLPGYGPGPGENFLQVSSRNTSCEQSVILAPTAIAREVGPPGYATGENQGNGAPWNTSYERRLFMNPVTSSRAVSPPGYGPEESRGSGISWNTSSEQILFMSPTTISRELGPPGYGPREDQCSGTSWNASCELGVFMSPVTTSREDSPPGYGPRENQENDNMRCELRMFTSPTTISREVGPPGYELTGKNKGNGASCTTNYQQGAFTSPEAFPREACPPGFVSGENQGNDTPWYMSSKQMAFTSPTTNPRVGPPGYGQENQGSRVSWNTSYEQGVFMSSTNISREAGPPGYGPGESQGNITSWISTGGQRMFTGPSTIPNEVGQQGYGPSGIPGTDGSRSMDLKAFPPGYGPAGENQGGGASGSVISPQARSAENVEFSDDARKKAIQRELRRRQKFR

SEQ ID NO: 8498 - protein, 215 aa, Zea mays
  VARIANT 28: note = Ancestral polymorphism is E, Derived polymorphism is D
MGASEVWSPVPAWLAIAVGLAAVVSSSEAHVFYAGGRDGWVLDPTESYNHWAGRSRFQVNDTIVFTHEEGVDSVLLVTEQDFDTCNTRNPVRRLQAVGSSGSSERSVFKLDRSGPFFFISSDEERCQKGQKLYIIVMAVRRSTTPAAPAPDAAFPPAASPVPDSAFPPAPSPVWASAPDNAHAPPPTAGASRLDDGAIIGSVLGVIGALVLCTVY

SEQ ID NO: 8499 - protein, 354 aa, Zea mays
  VARIANT 110: note = Ancestral polymorphism is S, Derived polymorphism is F
  VARIANT 107..354: note = Derived polymorphism lacks residues 107 to 354
  VARIANT 78: note = Ancestral polymorphism is R, Derived polymorphism is C
  VARIANT 39: note = Ancestral polymorphism is T, Derived polymorphism is M
MSKSSSHRPSKSSTPSHAPGRLTLSLTSPFASPLLLLLTAAAAAAVFLYSLTAARSYGARGEAPPLSSPTVETMERARAIWELPAAGPARAVLFVAHGCRCRPENFWPPSPRCPGCVGLPEDVAITDRALRRRFAVLAVASAGECWSPGKEVDVAKRVIRSWAAKNGLEGLPVVALGASSGGYFVSRLAAKMSLAAVVIMIAEGAFGSSAGALPAVYPPAMFIHMPKDKRRAVLVDKNSKMLMKNGVEVKELQSLELPLTPTLLSERIPGLDRGLSERIWTVFREEAFVDDKGYMKEDGRETPWKDALVKRGLWEEVSALADHIQEELNLAYGYHEMTSLHADEMFDWVDKHLR

SEQ ID NO: 8500 - protein, 150 aa, Zea mays
  VARIANT 117..150: note = Derived polymorphism lacks residues 117 to 150
MEEFQEADMLWPDVALAHNHGYHRPADSSHGRCRQHLTDQPQQPRPGAAVVHPLQSSPVRIPSMPPMGPRPTSRGSWTRSYKEEEDDDDDGAEEVGVVPPHVLAARRCGEERRVASSVCVGHGRTLKGRDLRAVRNAVLHMTGFLSSSDK

SEQ ID NO: 8501 - protein, 154 aa, Zea mays
  VARIANT 30: note = Ancestral polymorphism is C, Derived polymorphism is R
  VARIANT 22: note = Ancestral polymorphism is A, Derived polymorphism is E
MDEFQEADILWPDTEDELAPFAPMDTEELCEAAGSVSSVAPVFGRRFEVFFLSGAGPSSLSADGDDGEEWQEADVLWPEPDTADERRGSGGSVWPFSGSSSFSGRAGRRVKPAAATRDGWTTGPAASSPINIPANIAPRAPPRCQFRTVMNRRS

SEQ ID NO: 8502 - protein, 65 aa, Zea mays
  VARIANT 17: note = Ancestral polymorphism is T, Derived polymorphism is I
  VARIANT 46: note = Ancestral polymorphism is P, Derived polymorphism is L
MRKNKFMGSNKNQAKKTDINCDTTLKSLFGGRDKVGMLEISKLLSPDFPKISKLPWSMEPGMSLW

SEQ ID NO: 8503 - protein, 149 aa, Zea mays
  VARIANT 115: note = Ancestral polymorphism is K, Derived polymorphism is R
  VARIANT 102: note = Ancestral polymorphism is G, Derived polymorphism is C
  VARIANT 97: note = Ancestral polymorphism is V, Derived polymorphism is A
  VARIANT 71: note = Ancestral polymorphism is N, Derived polymorphism is D
  VARIANT 37: note = Ancestral polymorphism is N, Derived polymorphism is T
MSPASSSNPLSLDFWASSADPFGVVRPLAEQCPVLTNVRVDWKETPEAHVFRADLPGVRKEAAKVEVEDGNVLVISGERAREEEEAGKDEAWRWRLVERSSGRFQRRFRLPRGARLDQVHASMENGVLTVTVPKEEAKKPQVRAVEISG

SEQ ID NO: 8504 - protein, 578 aa, Zea mays
  VARIANT 185..578: note = Ancestral polymorphism lacks residues 185 to 578
MSLTGSALEAALQAVGRGLDAAGDHRLLYCKGGGRLVALEEDRARDLPLPDGGVLPSVPPDVEVEQCRRDPERIRPFPSGPSSAAADGPFVCSFDKMAEYFNRKSCLSETVPLGSFNSLFSFTGSWKNDAAATKALAIDGYSLPLFRVKIRSSELTLLESVKHAIPNVWDPSALARSVVLYTPYYLKPEGLVSLVCSFIENYGTHIIISVTVGGKDEVYIKQHSSSQLSGLEFKNYVREIGRERFSDVENKSNATPINYSEKDITVIFRRRGGCDLVQSFSDWKGTVASAPDVIGMTFLSIVSLVDDVPGKKHLARAVELYLTYKPPIEELQYFLDFQVPLVWAPAPPGIASHHRKEPVCPSLQFSLMGPKLFISTEQISVGRRPVVGLKLLLEGAKQNRLAIHLQHLVSLPKIFLPHWDSHITIGPPKWQGPEEQDSRWFEPIKWKNFAHVSTAPIEYTETNITDLSGVYIVTGAQLGVWDFGAKSVLHLKLLFSRVPGCTIRRSVWDHSPSSSSIHKADESSSSSSDNAKLLKIIDMTETLKGPQDAPGHWLITGAKLGVEKGRIVVRAKYSLLNY

SEQ ID NO: 8505 - protein, 252 aa, Zea mays
  VARIANT 117..252: note = Derived polymorphism lacks residues 117 to 252
MASSDGKPLPTPASVGGGGGSSTAPPGQPTTVASKVLDMGAAAMQSLRPVKQAKQHMCTFALYAHDPKRQVETHHYVSRLNQDFLQCAVYDSDKADARLIGVEYIVSRKIFDSLPAEEQRLWHSHAHEIKSGLWTSPHVAGLLEKAELDHMAATFGKFWCTWQVDRGDRLPLGAPALMVSPQADPAAAVRPDLVRKRDDRYGLSTEELRAARADVEAPAEEHPGQADYWLRHRKGFAVDVVPHEMKRHAPFP

SEQ ID NO: 8506 - protein, 477 aa, Zea mays
  VARIANT 283: note = Ancestral polymorphism is V, Derived polymorphism is I
MPSSTIRSISITVSDDDGAAAAPSRRPRAGRRKAVARSLGQRAVRLVARWWPVLLLLPAVALLLFEASRLRASSPGPSPPVSSLGRLDPTTRLVHGVREPCLKLLSPKSLANVVFPEGTRLDSVVSRITYKTDDDDYDTYHSEANSTYLLQHAEATRFDLFTGFQTLAEREDSFKVVNETVSVHCGFYSDNGGFKISEEDRRYMRACKVVVSTCAFGGGDDLYQPIGMANSSIGRVLHSPLFSELNVRVCYVAFWDEVTLAAQEAEGKVIGDDSMIGRWRIIVVRSLPFVDQRLNGKIPKMLTHRLFTEARYSIWVDSKYQLRRDPIGMLEALLWRTNSTFAISEHGARSNIYDEGKAIVQKHKATPEEVEVQLTRYRQDGMPDTKRLHGLKALAEASVIVRELTPATNHFMCAWFNEVVRFTSRDQLSFPYVLWRLNMHGLSMFPVCTRRDLVNSLGHTRKVKPLTQTNSGSSTTS

SEQ ID NO: 8507 - protein, 912 aa, Zea mays
  VARIANT 858..912: note = Derived polymorphism lacks residues 858 to 912
MMSRSYTNLLDLAEGNFAALGPVGGSGRQRHGSFGLRRMSRVMTVPGTLTELDGEDESEPAATSSVASDVPSSVAADRLIVVSNQLPIVARRRPDGRGWSFSWDDDSLLLQLRDGIPDEMEVLFVGSLRADVPAAEQDAVSQALLDRFRCAPVFLPDHLNDRFYHGFCKRQLWPLFHYMLPFSSPASASAAATSSSVATSSPGNGCFDRSAWEAYVLANKFFFEKVVEVINPEDDYVWVHDYHLLALPTFLRRRFNRLRIGFFLHSPFPSSEIYRTLPVRDEILKALLNCDLIGFHTFDYARHFLSCCSRMLGIEYQSKRGYIGLDYFGRTVGIKIMPVGVHMGQLESGLRLPDREWRLSELQQQFQGKTVLLGVDDMDIFKGINLKLLAFENMLRTHPKWQGRAVLVQIANPARGRGKDLEAIQAEIEQSCQRINVDFGQSGYSPVVFINRDVSSVEKVAYYTIAECVVVTAVRDGMNLTPYEYIVCRQGAPGSESVSEVSGPKKSMLVVSEFIGCSPSLSGAIRVNPWNIEATAEAMNEAISMPEQEKQLRHEKHYRYVSSHDVAYWSKSFILDLERACRDHFKRTCWGIGLGFGFRVVALDPHFRKLNMDSIVNAYEISESRAILLDYDGTLVPQTSINKEPSPEVLNIINTLCSDSRNIVFLVSGRDKDTLGKWFSSCPKLGIAAEHGYILRWSSKEEWQTCTQAMDFGWMQMAKPVMNLYTEATDGSYIERKESALVWHHQDADPGFGSSQAKELLDHLESVLANEPVSVKSGQFIVEVKPQGVSKGIVAERILASVKERGKQADFVLCIGDDRSDEDMFENIADIIKRNMVAPRTSLFACTVGQKPSKAKFYLDDTFEVVAMLSALADATGAELKSDSADELAASISSLDIGDEQSESSDTPIGGS

SEQ ID NO: 8508 - protein, 912 aa, Zea mays
  VARIANT 141: note = Ancestral polymorphism is S, Derived polymorphism is L
MMSRSYTNLLDLAEGNFAALGPAGGSGRQRHGSFGLRRMSRVMTVPGTLSELDGEDESEPAATSSVASDVPSSVAVDRLIVVSNQLPIVARRRPDGRGWSFSWDGDSLLLQLRDGIPDEMEVLFVGSLRADVPAAEQDEVSQTLLDRFRCAPVFLPDHLNDRFYHGFCKRQLWPLFHYMLPFSSPASASAAATSSSVATSSPGNGRFDRSAWEAYVLANKFFFEKVVEVINPEDDYVWVHDYHLLALPTFLRRRFNRLRIGFFLHSPFPSSEIYRTLPVRDEILKALLNCDLIGFHTFDYARHFLSCCSRMLGIEYQSKRGHIGLDYFGRTVGIKIMPVGVHMGQLESGLRLPDREWRLSELQQQFQGKTVLLGVDDMDIFKGINLKLLAFENMLRTHPKWQGRAVLVQIANPARGRGKDLEAIQAEIEESCQRINGDFGQSGYSPVVFIDRDVSSVEKIAYYTIAECVVVTAVRDGMNLTPYEYIVCRQGAPGSESVSEVGGPKKSMLVVSEFIGCSPSLSGAIRVNPWNIEATAEAMNEAISMPEQEKQLRHEKHYRYVSSHDVAYWSKSFILDLERACRDHFKRTCWGIGLGFGFRVVALDAHFRKLNMDSIVNAYEISGSRAILLDYDGTLVPQTSINKEPSPEVLNIINTLCSDSRNIVFLVSGRDKDMLGKWFSSCPKLGIAAEHGYFLRWSSEEEWQTCTQAMDFGWMQMAKPVMNLYTEATDGSYIETKESALVWHHQDADPGFGSSQAKELLDHLESVLANEPVSVKSGQFIVEVKPQGVSKGIVAERILASVKERGKQADFVLCIGDDRSDEDMFENIADIIKRNMVAPRTSLFACTVGQKPSKAKFYLDDTFEVVAMLSALADATGAELESDSADELAASISSLDIGDEQSETSDTPIGGS

SEQ ID NO: 8509 - protein, 382 aa, Zea mays
  VARIANT 150: note = Ancestral polymorphism is C, Derived polymorphism is Y
  VARIANT 149..382: note = Derived polymorphism lacks residues 149 to 382
  VARIANT 141: note = Ancestral polymorphism is R, Derived polymorphism is C
  VARIANT 89..382: note = Derived polymorphism lacks residues 89 to 382
MADWQPSGLALVAWSDGRGSVTAAVGVAYSLGERGVVRVWCLESCVCVFEQQTSDVTVNSENEETRRGFTSAVMLPNDQGLLCVTADQQFLFYCPKRTDDGDFELSLYRRLIGYNDEILVLKFIGEEEQCIAVATNLEQVRVYDVASMSCSYVLAGHTEIVVCIDTFVIPSWFLYGRIGEESRLRVAQLYSDLVKAGKQARPEKFEIPTKIKLTLQPWTSSLRGGHQEGIRDGPCPVKKAEDYRNSLQQEAQAKSQALHFEDELARKRMPVTARDMHSRYIPQQDYFSEGLYTFDIGQNDLAGEFYSRTEDQVIVSIPTILLEFENGLKKLYDQGARKFWIHNTGPLGCLPQNIALFGKDPSQLDELHCVAKHNRAAKLFNL

SEQ ID NO: 8510 - protein, 195 aa, Zea mays
  VARIANT 1: note = Ancestral polymorphism is I, Derived polymorphism is M
  VARIANT 38: note = Ancestral polymorphism is F, Derived polymorphism is L
  VARIANT 62: note = Ancestral polymorphism is S, Derived polymorphism is F
  VARIANT 79: note = Ancestral polymorphism is D, Derived polymorphism is N
  VARIANT 93: note = Ancestral polymorphism is E, Derived polymorphism is D
  VARIANT 182: note = Ancestral polymorphism is G, Derived polymorphism is R
MTTSMSNSAASEKQSQQAGHRQRPPAASAADAEMQRVFCRIDADGDGRISASELAAVTRAISPPASSSHGRREVAAMMDELDTDRDGFVDLGEFRAFHARGGGGVDDDAELRAAFDVYDVDGDGRVTAAELGKVLARIGEGGCSAEECERMVAGVDADGCVGFEDFKKMMCPQPQAEAGAAGRDKAEAEAEDKEE

SEQ ID NO: 8511 - protein, 950 aa, Zea mays
  VARIANT 40: note = Ancestral polymorphism is P, Derived polymorphism is A
MTAGAGEPRRIVLLLDLDTFLPTSSSSTPAAASYLAEVLPAATSLLAACRSPASLSAGRLFFSSLSPILSSSLLPRPLPAAPTPLSFDLHPATLASLAPLRCLALRATPAHPRAPASSSVAKSLLQLEHDYSWDHDPPRRRRCRGFDPPPNLVALFTPVTEFDLFGDDASFVEKFRKVFGPVRDRLSAIGLQVCWVVVPSASVSASAAASEGIRRAVTELGWWFTTADAVALGSAVAPPALVWGGVGLGGGEGGRRGEVVLEIADVEGKPLVCKGCEVEVVGSSRLQQASGNAVSRIHVRSVCEAGNWERLMDGDVAVVRGFQREGSKADGEEAVDKEYFPHRILELVLGDEKDRLGVAKPIWQLILVFLSRRNYCAVVSVSDGDGNSVDGVLMPFSMNCALLHLEKNVMSAKASETPSCGASDETKVQSDKKRRSRLVGKLLEVTTWSTFCDMLRKRADGSMPVVDLEDLYFSRYGTTSKKLRFLKCWMKQVKQSRLSTLSSIHTEGEQRLPSKDDSEARVLVSEEDASASLVNFSLDEADCQKVDALVDVAGCSEVGIPVDEADCSKVDISVGEESSMFSSMEELEAFLGAVPHKIEQSLCSEDADLGSLAERLVDLSVHAMLVKHGKIAVRYFEHNEAEDGSSAKIACELSNILLRKPKELVSKYRESNSASAASEQTAKHSTCYKIREHELQILLRMEMIKSELGSAIEEGSKQKMIKDICSLLQFIDINLQGDSFQSDGILEYAEKTIKSRYINSMEDVIKKIYREMEFDLFDDDDGVDYSDSLPSSSNQDDGRCRSQRGSDSASASALHLLQRDARSSRQREDDDRHDKLTARARERRDRQRRLSSFTSWVPDLRRVWALKHPGKEPCAWVPRSRSRSCAKRRRAACTDVVLETPVTSGKRHMSGSESDDARQVAARRSAALGAVSKTLFDDEVVETDVSSSST

SEQ ID NO: 8512 - protein, 983 aa, Zea mays
  VARIANT 153..983: note = Derived polymorphism lacks residues 153 to 983
MMESAAAQSCAACGDDARAACRACSYALCRACLDEDAAEGRTTCARCGGDYAAINPARASEGTEAEEEVVENHHTAGGLRERVTMGSHLNDRQDEVSHARTMSSLSGIGSELNDESGKPIWKNRVESWKEKKNEKKASAKKTAAKAQPPPVEEQIMDEKDLTDAYEPLSRVIPISKNKLTPYRAVIIMRLIVLGLFFHYRITNPVNSAFGLWMTSVICEIWFGFSWILDQFPKWYPINRETYVDRLIARYGDGEESGLAPVDFFVSTVDPLKEPPLITANTVLSILAVDYPVEKISCYVSDDGSAMLTFESLAETAEYARKWVPFCKKYAIEPRAPEFYFSQKIDYLKDKIHPSFVKERRAMKRDYEEYKVRINALVAKAQKTPDEGWIMQDGTPWPGNNPRDHPGMIQVFLGETGARDFDGNELPRLVYVSREKRPGYQHHKKAGAMNALVRVSAVLTNAPYILNLDCDHYVNNSKAVREAMCFMMDPTVGRDVCYVQFPQRFDGIDRSDRYANRNVVFFDVNMKGLDGLQGPVYVGTGCCFNRQALYGYGPPSLPALPKSSICSWCCCCCPKKKVERSEREINRDSRREDLESAIFNLREIDNYDEYERSMLISQMSFEKSFGLSSVFIESTLMENGGVPESANPSTLIKEAIHVISCGYEEKTEWGKEIGWIYGSVTEDILTGFKMHCRGWRSIYCMPVRPAFKGSAPINLSDRLHQVLRWALGSVEIFFSRHCPLWYGYGGGRLKWLQRLSYINTIVYPFTSLPLVAYCCLPAICLLTGKFIIPTLSNAATIWFLGLFMSIIVTSVLELRWSGIGIEDWWRNEQFWVIGGVSAHLFAVFQGILKMIAGLDTNFTVTAKATDDTEFGELYLFKWTTVLIPPTSILVLNLVGVVAGFSAALNSGYESWGPLFGKVFFAMWVIMHLYPFLKGLMGRQNRTPTIVVLWSVLLASVFSLLWVKIDPFVGGTETVNTNNCNTIIC

SEQ ID NO: 8513 - protein, 414 aa, Zea mays
  VARIANT 72: note = Ancestral polymorphism is S, Derived polymorphism is L
MDAAALFFSHLLPIVVVAAIAGAAPLDPQQLLALRALGLGAHPRADPCGAAAVVAAVNASCDAGEPFRRVTSLALTNCSDTTSVSAAALEALAPSLRALAFSDCPAAPPRALPPEQLASGLRAFSCTASLHRLSAVWLSHLTNLTELAVADTPLATGSPTELAVVVSHMEHLTRLTVSNANLSGFLPHHWHCPNLTHLDLSGNRITGAIPDTLTLLAGITHINLSSNALDGPIPTSIGDLISLTALDLSNNRLSGGIPDTLSTLPELEVLDLGSNRLNGSIPPFLAEMHGLRELNLENNDFDGMVPFTAKFLSRLRVFRAAGNGKLCYNRSVLPAELAMSVAPCDKYGFPVLPPPATARSERSADYDDGGGDGEADGGADTRGGPSATVLGVAIGLSCLAFLIILLVCICKVCR

SEQ ID NO: 8514 - protein, 207 aa, Zea mays
  VARIANT 178..207: note = Derived polymorphism lacks residues 178 to 207
  VARIANT 176: note = Ancestral polymorphism is P, Derived polymorphism is S
  VARIANT 164: note = Ancestral polymorphism is L, Derived polymorphism is F
  VARIANT 147: note = Ancestral polymorphism is P, Derived polymorphism is R
  VARIANT 136: note = Ancestral polymorphism is P, Derived polymorphism is L
  VARIANT 129: note = Ancestral polymorphism is G, Derived polymorphism is R
  VARIANT 127: note = Ancestral polymorphism is P, Derived polymorphism is S
  VARIANT 121: note = Ancestral polymorphism is T, Derived polymorphism is I
  VARIANT 119..207: note = Derived polymorphism lacks residues 119 to 207
  VARIANT 114..207: note = Derived polymorphism lacks residues 114 to 207
  VARIANT 112: note = Ancestral polymorphism is I, Derived polymorphism is F
  VARIANT 88: note = Ancestral polymorphism is L, Derived polymorphism is I
  VARIANT 78: note = Ancestral polymorphism is V, Derived polymorphism is I
  VARIANT 50: note = Ancestral polymorphism is V, Derived polymorphism is M
  VARIANT 37: note = Ancestral polymorphism is L, Derived polymorphism is F
MAAAEARRRSAVWALLPLLLRLLHPVALVLANTEGAFVAGQFSGRASVSVFGYATQSDLNFNNIFSIHGWHFLLNLSVADFSRHFMLLLHFCLPLSDAHLHLSRHHIVPQLIDWHEGGYLTVDLPMSRGEVVIGGPNVSSFLPTAVPLLQNTVKQKSFIGSSHLGSHAVLEYQFLPEQPSDAYERGSQLRFYDALAEVLNSRKEEQM

SEQ ID NO: 8515 - protein, 413 aa, Zea mays
  VARIANT 268..413: note = Derived polymorphism lacks residues 268 to 413
  VARIANT 154..413: note = Derived polymorphism lacks residues 154 to 413
  VARIANT 151..413: note = Derived polymorphism lacks residues 151 to 413
MDLLGKGGAQQKKSKKSSPTSRKSTVVPAMASAGSAGVAAPSTGGRSSSHPFSVVWDGMALGGSFASESSPTSSEWLYPPGGFVNSLRMPFPYATYPNGSQLPENSHFVGCTSNKGTPSPTNDKGTPIAEVHDSIDIDADDTLEPARTDKRLNWSHEEDVRLVSSWLQNSLDPVDGNDKKSDYYWTDVTNTYNSTTPSNRRRNRNQLKIRWDRVKKPLSEFHGCWVRTTRVFQSGQSDDQRTDNALQLYASEHNGKPFLLQHIWRVVRHERKWAAYVDKLINAKDNRATPSPVVNVEDSPTKRPTGKKKAKEERFGKRKAPEAISAIGEKLEKFIEASSKVEKMAQVQQCLADKKLEVAKINHKAAQEQTKCKMIDLYKDLLCGSTAGLSEEALAERSKALECMRLSLFAPDN

SEQ ID NO: 8516 - protein, 110 aa, Zea mays
  VARIANT 24: note = Ancestral polymorphism is A, Derived polymorphism is T
  VARIANT 25: note = Ancestral polymorphism is L, Derived polymorphism is Q
  VARIANT 27: note = Ancestral polymorphism is R, Derived polymorphism is H
  VARIANT 42..110: note = Derived polymorphism lacks residues 42 to 110
  VARIANT 53: note = Ancestral polymorphism is A, Derived polymorphism is T
  VARIANT 55: note = Ancestral polymorphism is E, Derived polymorphism is K
  VARIANT 63: note = Ancestral polymorphism is P, Derived polymorphism is L
  VARIANT 68: note = Ancestral polymorphism is T, Derived polymorphism is M
MASSSSSSSVAPWPRPDKHRGAGALVRRAQLVLSREVGWCGQRAWRKLLRRLAQETRCVCSSPTAAATGRPITFGYDAASYAKNFDDGRSPAPRRVVVGANAGDKPSGNN

SEQ ID NO: 8517 - protein, 262 aa, Zea mays
  VARIANT 142..262: note = Derived polymorphism lacks residues 142 to 262
MDPRARSDADPLPRSHGSVVAGSGSGGHTSIRAPPIHGALGAGRGYAAGLAAAHGGVHGLSFTNSTFLPTAPSMAAFFHGAAHGGGPGHGAALAAAQAAALGTQVAGAGHGAALAAAQAAALGTPMAVAGHGSPMDNELPAWFQGEATSAFGADWMSEGSSHVAATPSTTVGEQRTFEAASTRRKGGRAPRPPPVATRSLDVNLTDNSFTRQNSVLLPPYPLPFVSPGMGIAPLKIQNCEPDGADAVSQLMQFQTDGAASLQ

SEQ ID NO: 8518 - protein, 384 aa, Zea mays
  VARIANT 157: note = Ancestral polymorphism is R, Derived polymorphism is W
MAQQQTNPEEVVLGQEVGAARVATLNRPRQLNGISDRVVYLLAQFLEKWEKDENAKFVIFKGAGRAFSAGGDLKMFYEGKSNDSCLEVVYRMYWLCYHIHTYKKTMVALVNGLVMGGGAAMVAPLKFAVVTEKTIFATPEASVGLHTDCSFSYIHSRLPGYLGEYLALTGARLNAKEMISAGLATHFVSSEKLEELEKRLLDLDTGAESAVRAVIEEFSTDVQTDEDSILNKLSTINKCFSAETVEDIIKAFESEASIDGNQWIAPVLKGLRRSSPTALKITLRSIREGRKQSLPECLTKEFRLTMNILRSVVNGDVYEGIRALSIDKDNAPKWNPTTLEEVKYEDIDRLFQPFSPELELQVPSDDSNRWSGKYENTVYGRASQ

SEQ ID NO: 8519 - protein, 509 aa, Zea mays
  VARIANT 487..509: note = Derived polymorphism lacks residues 487 to 509
  VARIANT 475..509: note = Ancestral polymorphism lacks residues 475 to 509
MLLRWIAAEGRRRARPSRPLARSLSYGRVVDAAARDGELRVFVVAGEVSGDSLASRLMAALRALSPVPVRFAGVGGELMCKEGLQSLFPMEEIAIMGMWELLPHIYSIKRKIEDSANAAMLFQPHAVVTIDSKGFSFRLLKQLKCRSNQKVQSPLHIHYVSPSFWAWKGGESRLSKLHNFVDHMLCILPFEEEICRLNGLPATYVGHPLLDDAIGLNMGTELCSDKSKYQRSCEAFRLEHGLSPGATIITMLPGSRMQEVVRMLPIFLHTVQNLRHTFDELSLVIPVAPHRDVRTYIENVVQSEPFPVVLIPGGSLKERYNAFSASRAALCTSGTAVMELMLARLPCVVAYQAHFITECFIHLRKKINFISLPNILLNSLVVPEILFGACTAKNLAAKLSEVISNDQIRQMQIESAGQVFRVLYEPIKKRDTLLREEIDYSGLSSNFLSPSMIAALTVLYMDKHQNTACRNLVVESEAKKSLVLPTWSGFHACCSCTTGVTRQQATGYV

SEQ ID NO: 8520 - protein, 144 aa, Zea mays
  VARIANT 4: note = Ancestral polymorphism is L, Derived polymorphism is V
  VARIANT 3: note = Ancestral polymorphism is S, Derived polymorphism is F
MTSVGFNFPSSDGVARLNSFLRRQRAVVAVLAAGDRTAERPTKLVLSDASKSVSLIVAAICYAWMLPSKGDGQAAVLVVNMRRSRMAWCRQAAWLLYHVGVDASALLFTDEVDMDGLIMDQRVSLLVVGQDVLKSKAEVIMCTY

SEQ ID NO: 8521 - protein, 163 aa, Zea mays
  VARIANT 3: note = Ancestral polymorphism is R, Derived polymorphism is W
MGRGKFKGKPTGRRNFSTPEEIAAGTSGRPRTFKKKEEEEEEEEEREESEEEESEDESDDKPKHKGTEGIIQIENPNLVKVKNIKAKEVDLGKTTELSRREREELEKQKAHERYMKLQEQGKTEQARKDLERLALIRQQRADAAKKRDEEKAAKEQRKSEARK

SEQ ID NO: 8522 - protein, 361 aa, Zea mays
  VARIANT 246..361: note = Derived polymorphism lacks residues 246 to 361
  VARIANT 54: note = Ancestral polymorphism is R, Derived polymorphism is H
MGVKKLIKEKNDGAGISEYTDINKELQEEELTAYGISCNPISTELQYCNLQIWRMSDFKYTLVSLTLFSGGNIDGRNAFGLSALHLATWRNHLPIVRRLLDAGADPDARGGESGWSSLHRALHFGHLCIAGVLLQFGASLALEDTRGRTPVDLISCPVSQANGDFPDAVAASKFHSVAVSSNGELYTWGFGRGGRLGHPDIHSGQTTVVITPRQVTVGLGRKRVSVVAAAKHHTVIATELGELFTWGSNREGQLGYPSVDTQPTPRRVGSLKQRIISVAAANKHSAAVADTGEVLTWGCNKEGQLGYSTSNSASNCIPRMVEYLKGKVLRGVSAAKYHTIVLGADGEVFTWGHRLVTHGVS

SEQ ID NO: 8523 - protein, 549 aa, Zea mays
  VARIANT 393..549: note = Derived polymorphism lacks residues 393 to 549
  VARIANT 321..549: note = Derived polymorphism lacks residues 321 to 549
MGKVPSSRAGSRHQQFRARAMTRVDDLQEVFSGLQSARKDSRPTDAAILEAQLQQMLREWRSELSAPSPASSLQGNARELSDPPSDTLRMLQLAAAEEEDDATSKMVEQQQQPPPPANQNQGHAQVCQDMKREPREEAVDVAVEKPQPLSQGVLLNGAATASAVFHDQMYYVNQELTVEDFLYDDDYKIDLSGSNLDVLNNLEGIVQLEYPQLNLPQELAPNVYIDMSYCGQNAGGVLLHMTDLFTTMTSAPSAFLKPKCALWDCPRPAVGSERWHDYCSMYHADLAVQEEGPPGTMPVIRPRGIDLKDGPLFAALSAKIQGKNVGIPICEGAATAKSPWNAPELFDLYIFEGESIREWLFFDKPRRAFVSGNRKQRSLPDYGGRGWHESRKQAMKDFGGLKRSYYMDPQPSNSYEWHLYEYEINECDAFALYRLEFKSSDAKKIVKSKLACNPLNEIQQQMVRLSADSPVDNKRTARGRQHANPTDVDTNIYSVPNTTAQANVPNAYQPGSQVDQMTYLNGSVVYGPHLPYGYSTERSDFYWNSADGT

SEQ ID NO: 8524 - protein, 72 aa, Zea mays
  VARIANT 42: note = Ancestral polymorphism is L, Derived polymorphism is P
  VARIANT 7..72: note = Derived polymorphism lacks residues 7 to 72
MDTSLVQQWPLLTSALAWVCMTREMSPPSSFPRAWIEGSSSLSVFALQTWICMLLPPKRRETLIWIIGFMHK

SEQ ID NO: 8525 - protein, 383 aa, Zea mays
  VARIANT 236: note = Ancestral polymorphism is R, Derived polymorphism is L
MSTASFVTYLQRPRELPAPEFRAPPPSPVTGVLTGSSSSGSSGYGECQDDDDIGRFLRCSARVPVLRLPEGPRPGPRRNKNKTVAAWAPPVVDMRLLDPVPSGDGGSAVEAMRAAAVAFGCFQMVGHGVHASLLSAASRAAKSRRSPALETEGMRAGDEDELWWLRGEGDQEMAGTQPLRNGPNQFRNEADDLFTQLEQASTKLLHALQHASSAAAESLPKAEANGSLLCIRKHRLGGSSASGPISQDDVLRMLVRSSRCSRALALHLCPGASAFHVFSRRGWSRFSPLDGALVVTVGDQLQCGLYKSVSGKPAYNSDLQGDSSDAIAAEFFLSCSSAAAAKEAPPNMDMDAMKTVPLNLQIMVAACLVLVYYVFLSCSYAIW

SEQ ID NO: 8526 - protein, 466 aa, Zea mays
  VARIANT 263: note = Ancestral polymorphism is A, Derived polymorphism is V
  VARIANT 166: note = Ancestral polymorphism is I, Derived polymorphism is V
MAHGKLKFLAYRRMQPEEIFLASVASAGAVSTSSNIMDSEVVHVVESSFVVPSEPTPSEGLSLSPLDLVLPSRGHTPTVYLYSPSDVAAADGFFDVARLKEAMAKTLVAFYPLAGRLGVNNDGRVEITCTGEGALFVVAHADLSVGDIEDDFRPSPELRRLFVPCVEPASIILAIQVTFLKFGGVVLGTALHHTASDASSAFHFFQTWSALCKYGDRATVELPCHDRTLLRARSPPTVHPDALSRFYPKLTFSDDPLGSGPLAIEVFAISKDQVASLKRLCGGTSTFCAIGALVWQCALVVRRLPPDAEARLTFPANVRRRVRPPLPSHYFGNALVRLGATGAVRDVASEALASVAGRIKDAVDRVDDELVRSAVDYYEMTEMDSRPVKGTLPETDLQIISWLGMPMYDVDFGWGKPAVMSRADSVRGGLVYLTSDGPTGGGGVRVLMCMEAANMKELERLLYAKL

SEQ ID NO: 8527 - protein, 178 aa, Zea mays
  VARIANT 161: note = Ancestral polymorphism is L, Derived polymorphism is V
  VARIANT 92..178: note = Derived polymorphism lacks residues 92 to 178
  VARIANT 63: note = Ancestral polymorphism is S, Derived polymorphism is T
MDYSNLRRQAASMKKTLFDQACIILDVDISNQYFIFMLAQGPFSYGYLDEQFCQVEDLQDEASPNFAEEVVTLFFKDSARLISNAEQALEKYPKDFNRWDAYMQQLKGSCSSIGASRMKSECVSFRDYCGQGNVEGCMRSFQKVKREHGALRQKLEAYFQLLRQAGPAGAATRPGCKN

SEQ ID NO: 8528 - protein, 417 aa, Zea mays
  VARIANT 151: note = Ancestral polymorphism is A, Derived polymorphism is T
MNSAATSTAGAASGASCGRGEMAERDRVLERERRQMEQILELDMEELQVEEVDDDGSSSSSDVDTFLRNTHGDGGINTYEELSIDTSTVSLQDHTYLGAKVDGARGKFAFLHGDRVLNLPMFYLQGVVLFPEASLHLRVFQPRLVEAIDKAINHVDAPCMIGVVYVYRHTNDGHYTIASVGTMAEILKIQQLYDGSSCIFSHGQQRFRLLRHWLDVDGVPWGEVQIIEEDTPQRTPRDAFAQLAAPNSFRQCASSIMPSLHVYCSTQLDHVDSDMDRDSLSPTSTSSDHSITDKRIYLLGSRSSGLVRCGIADESSNEGQNSVHEQSCQSHDSVKEIDGYGQPDKNTNTGDEDNLCFISSKSFQRTRKKDTKQQKHYFTTKNASQAPLSFWPHWAYEMYDSYSLSRRAAGKLYIFIL

SEQ ID NO: 8529 - protein, 409 aa, Zea mays
  VARIANT 136: note = Ancestral polymorphism is I, Derived polymorphism is V
  VARIANT 245: note = Ancestral polymorphism is D, Derived polymorphism is Y
MGTPRARLLARIAVAAVVLLAPTTTCGVAGHSRALRPGGGRGQQQPSSLFPANATRAEAIERQFVEWVRYVGGLRHSTFQHAVARASPSYSLVVDKDPALGDFTTIQAAVDSLPAINLVRVVIRVNAGTYTEKVTVSAMRAFITLEGAGADKTVVQWGDTADSPTGPKGRPLGTFNSASFAVNAQYFLARNITFKNTSPVPKPGAAGKQAVALRVSADNAAFVGCRFLGAQDTLYDHSGRHYYKDCYIQGSVDFIFGNALSLYEVRTHASVLYSDKCWVDREDCHVHAIARDYGALTAQNRQSMLEDTGFSFVNCRVTGSGALYLGRAWGTFSRVVFAYTHMDDIIVPNGWFNWGDPNRELTVFYGQYKCTGPGATYAGRVAWSHELTDDEAKPFISLSFIDGTEWVRL

SEQ ID NO: 8530 - protein, 506 aa, Zea mays
  VARIANT 359: note = Ancestral polymorphism is E, Derived polymorphism is G
MAKGGAVVGTAVVVCAAAAAAVGVAVVLSRRRSRRREAEDERKRKAAAVIEEVEQRLSTPTALLRGIADAMVEEMERGLRAEPHAPLKMLISYVDNLPTGDEHGLFYALDLGGTNFRVIRVQLGGRDRRVVKQQYEEVSIPPHLMVGTSTELFDFIAAELEKFVRTEGEDFHLPDSKQRELGFTFSFPVHQTSISSGTLIKWTKGFCINGTVGEDVVAELSRAMERQGLDMKVAALVNDTVGTLAGGRYADNDVVAAVILGTGTNAAYVEHANVIPKWTGLLPRSGNMVINMEWGNFRSDKLPRSEYDKSLDFESLNPGEQIYEKMISGMYLGEIVRRILLKLAHDASLFGDVVPPKLEQLFILRTPDMSAMHHDTSHDLKHLGAKLKDILGVPDTSLEARYITLHVCDLVAERGARLAAAGIYGILKKLGKDKLLGDFSQQRTVVAIDGGLYEHYKKFSACLEATLTDLLGEEVASSVVVKLANDGSGIGAALLAASHSQYAEAA

SEQ ID NO: 8531 - protein, 1054 aa, Zea mays
  VARIANT 888..1054: note = Derived polymorphism lacks residues 888 to 1054
  VARIANT 777..1054: note = Derived polymorphism lacks residues 777 to 1054
MAPPRRACPCARACFVLLLALLPCCRVRRAGAQSQPADDKHLLLRIKSAWGDPPALAVWNASSPGAPCAWTFVGCDTAGRVTNLTLGSAGVAGPFPDAVGGLSALTHLDVSNNSISGAFPTALYRCASLQYLDLSQNKLTGELPVDIGRRLGANLSTLVLSNNQFDGSIPASLSSLSYLQHLTLDTNRFVGTVPPGLGSLTRLQTLWLAANRFVPAQLPASFKNLTSIVSLWASQCNLTGGFPSYVLEMEELEVLDLSNNMLTGSIPAGVWSLKNLQQLFLYDNNFSGDVVINDFAATSLTHIDLSENYKLTGPIPEAFGLLKNLTQLYLFSNNFSGEIPASIGPLPSLSIFRFGNNRFTGALPPELGKYSGLLIVEADYNELTGAIPGELCAGGKFRYLTAMNNKLTGSIPAGLANCNTLKTLALDNNQLSGDVPEALWTATLLNYVTLPGNQLSGSLPATMASNLTTLDMGNNRFSGNIPATAVQLRKFTAENNQFSGQIPASIADGMPRLLTLNLSGNRLSGDIPVSVTKLSDLTQLDMSRNQLIGEIPAELGAMPVLSVLDLSSNELSGAIPPALANLRLTSLNLSSNQLSGQVPAGLATGAYDKSFLDNPGVCTAAAGAGYLAGVRSCAAGSQDGGYSGGVSHALRTGLLVAGAALLLIAAAIAFFVARDIRKRRRVAARGHWKMTPFVVDLGFGEESILRGLTEANIVGRGGSGRVYRVTFTNRLNGAAGAVAVKQIRTAGKLDGKLEREFESEAGILGNVRHNNIVRLLCCLSGAEAKLLVYDYMDNGSLDKWLHGDALAAGGHPMATRARSARRTPLDWPTRLKVAVGAAQGLCYMHHECVPPIVHRDVKTSNILLDSEFRAKVADFGLARMLAQAGAPETMSAVAGSFGYMAPECAYTKKVNEKVDVYSYGVVLLELTTGKEPNDGGEHGSLVAWARHHYLSGGSIPDATDKSIKYAGYSDEIEVVFKLGVLCTGEMPSSRPTMDDVLQVLLKCSEQTQHKGKTERVPEYEEAPLLQPQRGSRRKQPSNGTGIDIESKSDFDSIV

SEQ ID NO: 8532 - protein, 673 aa, Zea mays
  VARIANT 19: note = Ancestral polymorphism is S, Derived polymorphism is F
  VARIANT 145..673: note = Derived polymorphism lacks residues 145 to 673
MPPHRLLPLLLLLLPLGVSGAAAAGGNATSAPLPCSELSRVCTAFIAFPTAGAGPANATVLESMFDAAPGDLTADAAASPRYAFVRKNCSCLPSRTYLANTTYTIPSSATTSFPNTTAADVAAAAYSGLAVPPPGGAAQRPPRPGAVVALHLLCGCSSGPWNYLLTYVGVEGDTVESLSSRFGASMDAIETANAMAGPDPITAGKVYYIPLNSVPGQAYVTLPAPPAPAPAPTDYTLSGTPDYHSSKFPYGWVIGSMGVALALIVIAVLALVLWKFFGYKPQDRNGQRKSPDRHKFQLLKSGSFCYGSGRYLCCQFGNAKPTRADGGEHHINVPKGVAADVFDREKPIVFTHEEILISTDSFSDANLLGHGTYGSVYYGVLREQEVAIKRMMATKTKEFIVEMKVLCKVHHASLVELIGYAAGKDELFLVYEYSQNGSLKNHLHDPERKGCSSLSWIFRVQIALDAARGLEYIHEHTKDHYVHRDIKSSNILLDGSFRAKISDFGLAKLVVKSNDAEASVTKVVGTFGYLAPEYLRDGLATTKSDVYAFGVVLFELISGKEAITRAEGMGASSNSERCSLASVMLAAVRKCPNSTYMGNLKDCIDHNLRDLYPYDCAYKMAMLAKQCVDEDPVLRPDMKQVVITLSQILLSSIEWEATQAGNSQVFSGLVAGR

SEQ ID NO: 8533 - protein, 743 aa, Zea mays
  VARIANT 666..743: note = Derived polymorphism lacks residues 666 to 743
MATSRCGKQRQPLLHSPTPADANGGGAAKRRRFVSFLAVTAALVASYHLLVPTNSSHYHALFLSLGSNATAAAHLRALTLRPHVAGTEANAATARYVLHAFSSLSFPAHITPYSVLLSYPVHRSLSLAAAPGLAARPFSLVQETYKGDPYAEAAAEVLPTYFAYSGSGSVTAEVVYANYGHNEDYAYLASRGVDVVGKVALVRYGDIHCEDMVRNARAAGAAAAIVYTDAKDFGGSAAKGEKRKWFPDARWLPPTGVQVGTLYYGNGDPTTPLWPSCAAGDDCERLSMEELDGSEEMPGIPALPVSARDGETILKAMGGDVAPPKWQGGDGAPVYRLGPGPAVLNLTYIVSASVGNETLATIENVFAVIEGKEEPDRYVIIGNHRDAWTFGAVDPNSGTAAMLEIAERLSKLQAKGWRPRRTIILCSWDAEEFALIGSTEWAEENMDTLASRAIAYLNVDISVFGPGGLMPRATPQLDELIKEASKMVPDPDEPSQTLYDTMMRHHPPITRVAGAGTDFAAFVQHIGVPSLDMSYGLFEEYPVYHSLYDDYVWVERFGDPLFHRHVAVASVWGLIALKLADDEIIPFNYVSYASELEECTKDIVDKCKGFPVSFSPLQNSIKQLESAATKIYKEKKLLQAENWSLKTSKYTLKVREINDRLMMAERAFTNREGLVGRPWYKHMIYASSDQDDWGTKAFPGIVSAMDKAKKSNTTETWRLLQHEIYRVARAVSKASAVLDGKLT

SEQ ID NO: 8534 - protein, 732 aa, Zea mays
  VARIANT 340: note = Ancestral polymorphism is T, Derived polymorphism is I
MSHLDAASLLAPSPPLAKPHPRSRFLCLISSMLAVLGASLAGLLLFALHPAPNPVPNYASLFLSLGSNDTAASHLRALTLHPHVAGTKANALTARYVFDALSALSFPTHITPYSVLLSYPVHRSLSLSAPGRGVVTSFSLKQETYPNDPYAAAAAETIPTFYAYSASGSVSAEAVYANYGREEDFSYLASRGVDVAGKVAFARYGRIHCEDIAHNARAAGAAAAVVYTDPLQYGGAPGEGWFPDSRWLPPSGVQVGSLFRGVGDPTTPMWASSEGCERVSLEEAMNTDDMPLIPALPVSAQDAMEIHRAMGGAVAPEDWQGREDGPVYRLGPGPAVLNLTYLGNDSMATIENVFAIIEGAEEPDRYVILGNHRDAWTFGASDPNSGTAAMIELAKRFSMLQKQGWRPRRTIIFCSWDAEEYGLTGSTEWVEENREMLYSRAVAYLNIDVSVVGPGFLPSTTPQLDELLQQVTKVVQDPDNSSQTVYDSWIKSSTPLRVLRLGDGGSDYSAFVQHVGIPSMNIIFGEGPGYPVYHSLYDDYVWMAKFGDPAFRRHVAAASIWGMMALRLANEDILPFNYMSYAIELEAYTKTVENEVKGTTVTCSPLYNSIRTLGAAATKVNNEQKELQKLLLSKQLNKDSLKIRQLNDRLMQTERAFTSREGIFKLEWFKHLVYGPSDQNDWDTAVYPGIANAIASARSSNTSESWKFVQHEIYRVARAVTQASAILSGRLT

SEQ ID NO: 8535 - protein, 447 aa, Zea mays
  VARIANT 258..447: note = Derived polymorphism lacks residues 258 to 447
MDPCAFVRVTVDQLLLKLPAVPRPSSSAGVYPSNSPCFCTLTLQDHPSSLSRTALLPLACASGPAAAAAHADPVVLSLDADAVRRLSARPAAELVVSVHAGPTGTTCGMGASRALGRVRVAVDVARAAAGETVVARDGWVDVGKPASGPSAPPRASARAQIHMVVRAEPDPRYVFQFGGEPECGPVVYQVPGGAARGGQRQPVFTCRFSAGRRAARSRSLTPQSSMSRSTSRRLRSWLSSTLHGEGRDGAHSRREQRKGWTVTIHDLSGSPVAAASMVTPFVPSPGSGRVSRANPGAWLILQATGAGPSSWKPWARLEAWRERGPVDALGYRLELVFDSGAHECAVPIAESSISTKRGGQFVIDPATFPEAAAGAAWPLAGGFVMGSTVEGERRASRPTVQVGVQHVACMGDVAVFVALSAAVDLCMDACRLFSQRLRKELCQDQDE

SEQ ID NO: 8536 - protein, 225 aa, Zea mays
  VARIANT 3: note = Ancestral polymorphism is E, Derived polymorphism is K
  VARIANT 10: note = Ancestral polymorphism is M, Derived polymorphism is V
  VARIANT 32: note = Ancestral polymorphism is R, Derived polymorphism is I
  VARIANT 71: note = Ancestral polymorphism is A, Derived polymorphism is V
  VARIANT 73: note = Ancestral polymorphism is V, Derived polymorphism is L
  VARIANT 78: note = Ancestral polymorphism is D, Derived polymorphism is G
  VARIANT 80..225: note = Derived polymorphism lacks residues 80 to 225
  VARIANT 85: note = Ancestral polymorphism is G, Derived polymorphism is D
  VARIANT 91: note = Ancestral polymorphism is D, Derived polymorphism is Y
  VARIANT 111..225: note = Derived polymorphism lacks residues 111 to 225
MDKGTILKTMPPEPSSQNPSMQIEVIRHVVSRILLHNTIYDVVPLSSKLTVLDTQLPVKQAFKIMHDEGLALVPLWDDRQGTITGMLTASDFVLILRKGILCIGVLKCSRQQKAISREQAAKDLQELEKWREELEALLLAEWSELRGEELLAYWWREDHWLKAMFLHMRSVIKVEEELVGVPVKDGLYEIRDTSALVRLRPTWEDLRSYLIARGRKCFEVCVYNS

SEQ ID NO: 8537 - protein, 132 aa, Zea mays
  VARIANT 51: note = Ancestral polymorphism is I, Derived polymorphism is V
  VARIANT 38: note = Ancestral polymorphism is T, Derived polymorphism is A
  VARIANT 32: note = Ancestral polymorphism is T, Derived polymorphism is S
  VARIANT 24: note = Ancestral polymorphism is A, Derived polymorphism is S
  VARIANT 15: note = Ancestral polymorphism is I, Derived polymorphism is V
  VARIANT 14: note = Ancestral polymorphism is E, Derived polymorphism is D
MSWQTYVDEHLMCEVEGHHHLTSAAIIGHDGTVWAQSAAFPLFKPEEMANIMKDFDEPGFLAPTGLFLGPTKYMVIQGEPGAVIRGKKGSGGITVKKTGEALVVGIYDEPMTPGQCNMVVERLGDYLVEQGL

SEQ ID NO: 8538 - protein, 340 aa, Zea mays
  VARIANT 220: note = Ancestral polymorphism is R, Derived polymorphism is W
  VARIANT 205: note = Ancestral polymorphism is A, Derived polymorphism is V
  VARIANT 202..340: note = Derived polymorphism lacks residues 202 to 340
  VARIANT 200: note = Ancestral polymorphism is P, Derived polymorphism is L
  VARIANT 182: note = Ancestral polymorphism is P, Derived polymorphism is L
  VARIANT 181: note = Ancestral polymorphism is T, Derived polymorphism is A
  VARIANT 179: note = Ancestral polymorphism is N, Derived polymorphism is S
  VARIANT 167: note = Ancestral polymorphism is T, Derived polymorphism is A
  VARIANT 164: note = Ancestral polymorphism is G, Derived polymorphism is R
  VARIANT 162: note = Ancestral polymorphism is G, Derived polymorphism is R
  VARIANT 113: note = Ancestral polymorphism is L, Derived polymorphism is S
  VARIANT 65: note = Ancestral polymorphism is D, Derived polymorphism is G
  VARIANT 46: note = Ancestral polymorphism is R, Derived polymorphism is M
MRICESGDGDDVAGLVFQQEQQEEVQASGELVRLKAKHALVGAGARVLFYPTLLYNVLRNRFEADFRWWDRVDQFILLGAVPFPSDVPRLKQLGVQGVVTLNEPYETLVPTSLYQANEIEHLVIPTRDYLFAPSFEDISQAIDFIHRNASQGGTTYVHCKAGRGRSTTIVLCYLIKYRNMTPEAALDHVRSIRPRVLLAPSQWHAVNSFGALTGGQLPVRSTNLACFLEAIEAGCTNTTGNDDYHVMEFDCEDSGLPLYQIMLPRPASPTGSGCTDAVLVTEADLEGYDTYIGTRKDAVSLEVATRSPIMRRLSCLFGSLKLSNSNCEPASSRFTEVRAC

SEQ ID NO: 8539 - protein, 728 aa, Zea mays
  VARIANT 229: note = Ancestral polymorphism is Q, Derived polymorphism is E
  VARIANT 268: note = Ancestral polymorphism is P, Derived polymorphism is A
MTLLLAQQLLSFSFAFPPLRALHLGSPLKAYPSSKCFVYSHCPSQFQTWWPRSRPAAHPAHSFFEEQESEGSDYGDEAVGCLGEPATHGTWEDTDDEGSWLGPTRCGASEDEDEDCGEEVGHWDPPVSRFRPQREEPYQAEEDDDEECEWLDPTSFLRCQEVVSGVCSTTAAMDEILAFARCSAAAGEQGFAEFMAGYSHGNLSEEECIELMWRMSNEGLALGCAHLFQWLREKQPVPVSSMVWLMAFVSLGRCDMADVVLEIVARLPLERDFREVVLYNAAISAVAYCRRYDGAWEIFELMEKNNVQPDHGTSAIMLNIMKKSKVSAKDAWEFFKRMNRKGVNWSFDVGAALINIFCSDGLKKEALIIQSEMEKRGIASNTSIYETLMKAYCKSNQIEEAEGLFVEMKEKSLQATTTTYNILMDAYSRRLQTEVVESLLLEMQDLGIRPSARSYNCLISAYGRQKKMSGKAENAFLRMKRDGIKPLSSSYNALLFAYAANGLHEKAHAIYMDMKREGLKPTLETYTALLDTLRRAGDTEKLMETWKTMVDEKFGGTRVIFHMVIDCLAKHGLYLQVRDVIYEFGKMGLKPTVMTYNILMNAYGRGGQHYKLPQLLKEMTALELKPDSITYCTMIYAYARVRDFSRAFYYHKQMVRNGQIPDPRSYKKLLNTLDVKAARKNIKDKSAIQGIIKGKSGLKPRKEKKDEFWKNRKKQSMLNHGHQRKEFL

SEQ ID NO: 8540 - protein, 249 aa, Zea mays
  VARIANT 53: note = Ancestral polymorphism is S, Derived polymorphism is R
MGSECKGYGVGVATSPQQEQEQAGAAVAPFVAKTFHMVSDPATDAVVRWGGASNTFHVLDPATFSDYLLPSYFKHRNFASFVRQLNTYGFRKVDTDRWEFAHESFLRGQARLLPLVVRKRKKAGAGAGGGGRELCEAGEEVRGTIRAVQRLREQQRGVEDELRAMDRRLRAAESRPAQMMAFLAKLADDPGLVLRAMLAKEEELALIDKGSEAQPAKRRRIGAEAVDLAHSRGGGAVPFPFSVLGQVFY

SEQ ID NO: 8541 - protein, 456 aa, Zea mays
  VARIANT 307..456: note = Derived polymorphism lacks residues 307 to 456
MERLIAGLLGFLLVASVGSHAARAPDQYWKSALPNTPMPTSLSQLLDAAPAGGGTTVNVGWGGVHVDAGHGKPGGTTVDVGKGGVGVNVNPGRSGKPGGTTVGVGKGGVGVNVNPGYGKPGGTTVGVGKGGVGVNVNPGKPGGTTVGVGKGGVGVNVNPGKPAGGAGTTVGVGKGGVGVGVNPGHGKPGGTTVGVGKGGVGVHVNPGKKPVHVNVSPFIYTYAASETQLHDDPSVALFFQETDLRPGKKMTVQFASTGTTGTKFLPRSEAEAIPFSSQKVPEILARLSVDPDSVEAAEMAQTLRDCEAPAAKGEKKACATSLESMVDFATASLGTRHVRAVSTVVAKEGSPKQEYTVTGVERAAGGTDDDGRVVACHAEPYAYAVFACHLTPQTRAYSVSMLGRDGTAVDAVAVCHADTSGWNPKHVAFQVLNVKPGTVPVCHFLPQDHVVWTRSG

SEQ ID NO: 8542 - protein, 523 aa, Zea mays
  VARIANT 289: note = Ancestral polymorphism is S, Derived polymorphism is Y
MAPSSAEADSAVSSSGRLLVLYASQTGNAMDAAERVGREAERGGCPAVDVLSMDSFDPSRLPSERFVVFVVSTTGQGDPPDSMKGFWRYMLRKDLDRQWLEGIHHAVFGLGDSGYQKYNFAAKKLDRRLLHLGAEPVLEIGLGDDQHPSGYEGALDPWLLSMWKSLNEINPSLLPRVSDINDPNLSFLGDPKVHVIYYSSNEVTQDPILLDSNKIISSARSMSPALRFHADGEPPYMLQMIPLNLAVELGLNSEKLATSIYIGIKVKKQCLTKEGTDRDVRHFELEDPSSVCHLYYTVMSFFATSEREKERLQYFASPEGRDDLYQYNQKESRTVLEVLEDFPSVQMPFEWLVQLTPPLKKRAFSISSSPLAHPNQIHLTVSVVAWVTPFKRTRRGLCSTWLAGLNPNKGNLIPCWIHQGSLPPPRPLVPLVLIGPGTGCAPFRAFVEERAAQAAAEPTAPVLFFFGCRNQENDFLYKDFWLTHAQDEGVLSSKRGGGFFVAFSRDQPQKALRRKCLPMLQLR

SEQ ID NO: 8543 - protein, 458 aa, Zea mays
  VARIANT 66..458: note = Derived polymorphism lacks residues 66 to 458
  VARIANT 70: note = Ancestral polymorphism is G, Derived polymorphism is D
  VARIANT 116: note = Ancestral polymorphism is M, Derived polymorphism is K
  VARIANT 128: note = Ancestral polymorphism is Y, Derived polymorphism is H
  VARIANT 143: note = Ancestral polymorphism is T, Derived polymorphism is I
  VARIANT 151..458: note = Derived polymorphism lacks residues 151 to 458
  VARIANT 272: note = Ancestral polymorphism is N, Derived polymorphism is Y
  VARIANT 304: note = Ancestral polymorphism is P, Derived polymorphism is L
  VARIANT 346: note = Ancestral polymorphism is W, Derived polymorphism is S
MALGPHFKLATHEFQEETQEQDPASGRATGDNGRPRGRKQMPNKPLSALTLQDRDIEIQIEVHRKWEFRGAIDNGPILHIDMILTDCIGNAIHCQIPSFPAAKRGDEFQVGKIYKMSRFPVARAKSSYKPVDGDLMLYVTPYTTLELCHNSPSSFPLYVYSLTSYDKIDPNEPNARNFHDVISIITEISAIKPVGNARIPSSYNRHVLIKNLSDSILKITLWGKRAQEFYLTNTYDPQKQTLVIVLFVGCLPKEFQGEVLLSGGAAYHWYFNPSIEEATAFYNKIESEKINIELPSLDGQEITPPQLPQREHHDLKYILPLNPHDVPDEGYECTVTITSIPEGKTWYYIACNTCPNKPSIDPIIRQCSTCGSTKYCFRYKLTFKASDGTAEAEMFAFDTVARTIIGKPCPMVSRKLTYSPAKDKPETNPLDADKNRAPATTLESPTKRIKQDPKNQQE

SEQ ID NO: 8544 - protein, 76 aa, Zea mays
  VARIANT 3: note = Ancestral polymorphism is S, Derived polymorphism is P
  VARIANT 55: note = Ancestral polymorphism is D, Derived polymorphism is A
MRPLWIERINAGTRLHGVNYGNFIHGLMKENIQLNRKVLSELSMHEPYSFKALVDVSRTGFPGNRPVKKEGLAAIL

SEQ ID NO: 8545 - protein, 586 aa, Zea mays
  VARIANT 446..586: note = Derived polymorphism lacks residues 446 to 586
  VARIANT 461..586: note = Derived polymorphism lacks residues 461 to 586
  VARIANT 510..586: note = Derived polymorphism lacks residues 510 to 586
MDDVVPATAKQTVVLYPGGGAGHVAPMTQLAKVFVRHGYDVTMVLLEPPIKSNASGASFVESFAASNPSITFHLLPPIPPPDLASSTKHPFLVVLELLGQYNDKLESFLRTIPRERLHSLVIDMFCTDAIDVAAKVGVPVYTFFAANAGALAVLTQTVALLDGRQTGLKELGDTPIEFLGVPPIPASHIIREMLEDAEDEVRTAMAKIWKRDTDTRGVLINTFYSLEAQALQAFSDPLCVPGKVLPPVYPIGPLVGKGGSGTDGGEAAERPHECLAWLDAQPERSVVFLCWGSRGLLSEEQLKEIAAGLEKSGQRFLWVVRTPASSDDPKRFWLPRPEPDLDALLPEGFLERTKDRGLVIKSWAPQVDVLSNPAVGAFVTHCGWNSSLEAITAGVPMLCWPQGAEQKINKVLMTEAMGIGLELEGYNTDVVRYYKQNADETWFDVSLNSLLPGSVLNCQRQVSGCLIQKKPNGYSKVSAQHLQAVGGKQQFCSCKEVLTIDSELVNALTQATCLLGITCRSNLILPFLPWWDQSDTKWPRTADDDDDMATIAALWTSTTIHKRNAKKEDTTVYRNNKQFFFSDCSI

SEQ ID NO: 8546 - protein, 447 aa, Zea mays
  VARIANT 125: note = Ancestral polymorphism is D, Derived polymorphism is Y
MRPLIRTARCWLLRARVRAMATLPMASPAAAIPSSATRPVASPSSRSHRPLTRFFSVAPAPVGAKGLRAAASAVEVGGVKIAREDVVKEDDPTNNVPDTIFAKIGLQLHRRENHPLGILKNTIYDYFDKNFTGQFDKFDDLCPLVSVKQNFDDVLVPSDHVSRSYNDTYYVDDQTVLRCHTSAHQAELLRDGRTHFLVTGDVYRRDSIDSTHYPVFHQMEGFRVFSPDEWSGSGLDGTAYAAAELKKTLEGLARHLFGAVEMRWVDTYFPFTNPSFELEIYFQDDWLEVLGCGVTEQEILKRNGRRDHVAWAFGLGLERLAMVLFDIPDIRLFWSNDKRFTSQFSEGKLGVKFKPFSKFPPCYKDMSFWINGAFTENNLCEVVRGIAGDLVEEVKLIDNFTNKKGMTSHCYRIAYRSMERSLTDEEINNLQLNVREAVKDKLKVELR

SEQ ID NO: 8547 - protein, 253 aa, Zea mays
  VARIANT 58..253: note = Derived polymorphism lacks residues 58 to 253
MATATATAVPYNAAAAAAAAGKEETTRPIAVASPTVHPAATGDEEEAATATRRWRPTQYLRKRRCLLWCCGCCATSVVLLGITVLVLALTVFRVKDPVLTMNGVTLEGVDGGPGSTPEHPVSVNATLSADISIKNPNVASFAFGRSETDFYYGGETVGVAYAPRGEVGADRTVRMNVTLDVLADRVSPSVNATDLIFGKEYNLTSYTEIAGRISVLGIYKRDLDIKMNCSITLEVGAFTTVQSKATDCVANVS

SEQ ID NO: 8548 - protein, 193 aa, Zea mays
  VARIANT 149..193: note = Derived polymorphism lacks residues 149 to 193
MPLLSSLSNLGLGYSIAIALGFLILFASFLLAFYFCFGRGGDYWAGEAVTTASSSGHLSITVPRVLFVAEGSESPEDDAYPSSAAAAACSPVGLDAAAIASYPKVAFSSRAAEADAMCSICLSEYRDGETLRVMPECRHGFHVACLDAWLSRSASCPVCRSSPVPTPNATPLATPLSELVPLSQYAADRRRRR

SEQ ID NO: 8549 - protein, 307 aa, Zea mays
  VARIANT 200: note = Ancestral polymorphism is S, Derived polymorphism is F
  VARIANT 160: note = Ancestral polymorphism is Q, Derived polymorphism is L
  VARIANT 140: note = Ancestral polymorphism is A, Derived polymorphism is E
  VARIANT 130: note = Ancestral polymorphism is R, Derived polymorphism is S
  VARIANT 41: note = Ancestral polymorphism is R, Derived polymorphism is G
  VARIANT 33: note = Ancestral polymorphism is P, Derived polymorphism is L
  VARIANT 20: note = Ancestral polymorphism is P, Derived polymorphism is S
MANVMDSEAVQVVESSFVVSSEPTPSEGLWLSPLDLILANRGHTPTVYLYSSSSNAVAAADGFFDVARLKEAMAKTLVAFYPLAGRLGVNNDDGRAEITCTGEGALFVVAHADLTVGDIEDDFRSSPELRRLFVPRIEPASIILAIQHMHALVCRVCLMQWSSRARSPPTVHPDALSRFYPRLTFSDPSGPLAFQVFVIFKDQVTSLKRLCGGTSTFCAIGALVWPCTLVARRLPPDSEARLTFSANVQRRVRPPLPSPEPLLRQCIGQAGRHRCSSRCCFGGSGVRGRPHQRRRRSGGRRVDDELV

SEQ ID NO: 8550 - protein, 204 aa, Zea mays
  VARIANT 29: note = Ancestral polymorphism is N, Derived polymorphism is K
  VARIANT 46: note = Ancestral polymorphism is R, Derived polymorphism is H
  VARIANT 102: note = Ancestral polymorphism is R, Derived polymorphism is W
MATEIQGYYDDGTAVVSFDVHNIDTTLTNLGSVVEWWLGETYRLHHRGHIAGLDVEWRPARVPGPVPVAVLQICVDHRCLVFQILQADYIPDALSRFLADRRFTFVGVGISGDVAKLRAGYRLGVASAVDLRVLAADTLEVPELLRAGLQTLVWEVMGVQMVKPHHVRVSAWDTPTLSEDQLKYACADAFASFEVGRRLYEGDY

SEQ ID NO: 8551 - protein, 470 aa, Zea mays
  VARIANT 71: note = Ancestral polymorphism is T, Derived polymorphism is M
  VARIANT 46: note = Ancestral polymorphism is A, Derived polymorphism is S
MDPSPQSTPPTGDDPAAAADPDLPRLTVTQVEQMKVEARVGDIYRSLFGAAPNTKSIMLELWRDQHIEYLTPGLRHMGPAFHVLDANRPWLCYWMVHPLALLDEALDDDLENDIIDFLARCQDKDGGYSGGPGQLPHLATTYAAVNTLVTIGSERALSSINRCFQVRNLSAWIMYRYHFLSCSPSEVMPATHFFLCPRMHDGGEIDVRASYTAISVASLVNILDFKLAKGVGDYIARCQTYEGGIAGEPYAEAHGGYTFCGLAALILLNEAEKVDLPSLIGWVAFRQGVECGFQGRTNKLVDGCYSFWQGAAIAFTQKLITIVDKQLKSSYSCKRPSGEDACSTSSYGCTAKKSSSAVDYAKFGFDFIQQSNQIGPLFHNIALQQYILLCSQVLEGGLRDKPGKNRDHYHSCYCLSGLAVSQYSAMTDTGSCPLPQHVLGPYSNLLEPIHPLYNVVLDKYHTAYEFFSEE

SEQ ID NO: 8552 - protein, 102 aa, Zea mays
  VARIANT 18: note = Ancestral polymorphism is G, Derived polymorphism is S
  VARIANT 19: note = Ancestral polymorphism is S, Derived polymorphism is F
  VARIANT 57: note = Ancestral polymorphism is P, Derived polymorphism is L
MAAAAGGVRRALAALRSGSPSTISATLSRQAAARSLELAAASLPRASRRRLAISRVPVAALGGVQASLMPMHNATASALLTSMLGLKPGSWGWLSEGFATPL

SEQ ID NO: 8553 - protein, 513 aa, Zea mays
  VARIANT 319: note = Ancestral polymorphism is P, Derived polymorphism is L
MAAQNAGIIIDCRQAMSPDPPAVELEVIGSSSPSITPCPAAAAPADADFDHDGCTAELSSSTDRELQDHIRQWEGSYGQGVLRRMPDGGEKMHSRVLRMKKELERRRARQRMDVTPLRQTVQAKRTGGSSGEIYNLKSDDETMDSTASKHYPNSSCTTSTKTYTQVKGAAYEEQSSLSHGKYAYPKNGGQISKESLRHQSKTWNLAKNKASPLEIKKLCCPFQDVVLLDDDDDIEPARSADVQISNKWEESNIHYPSSTDPEAVELTYSDMKCLEPEEYLKSPVINFYLQYLKKARPRRDLHMFNTYFYSKLEEALSMPGHHDSEFSKLRRWWRGVDIFKKAYIILPINESMHWSLIIVCMPTKEADSGPIILHLDSLGLHSSQKLFDIVARYIQAERWHLGMDSSYDIPFSGRIWRRLSKNINREKIEVPRQRNEYDCGLFMLYYIDRFIQDAPERLTKEGLGMFGRRWFNHEEASAFRGGIRALLIDLFHSALDDDGPSEAELEDKDIQMD

SEQ ID NO: 8554 - protein, 91 aa, Zea mays
  VARIANT 52..91: note = Derived polymorphism lacks residues 52 to 91
MRCSETDRSTSSSKRGCASCMHVCSSFLLICCWSFNLSPPPPSWLVATTMAGWKRASFSPLRGGARVELAADSFTHMPSKRPWKPALQMSE

SEQ ID NO: 8555 - protein, 299 aa, Zea mays
  VARIANT 226..299: note = Derived polymorphism lacks residues 226 to 299
  VARIANT 223: note = Ancestral polymorphism is G, Derived polymorphism is W
  VARIANT 222: note = Ancestral polymorphism is P, Derived polymorphism is L
  VARIANT 215: note = Ancestral polymorphism is K, Derived polymorphism is M
  VARIANT 114: note = Ancestral polymorphism is D, Derived polymorphism is N
  VARIANT 83..299: note = Derived polymorphism lacks residues 83 to 299
MSCIFNDLQKKEIDIVAIFFPFLSVLQLLLHQESDNSAQLSQVCDSECPTTTQSKQCNYWCYSKEGRYKGRKFSSVCHFFGYQARGSTPSNFDCDYAYALGRISLHMIAVGLTDYMAIVANLKDPAMMSVKRHLRGPGAIPIGRPSIHPSPIDLKGNAYELLREKASSFLLDDFYRTPGGIQFEGPGSDAKPITLTIENQDYMGDIEILKEYLGKVRTMVKPGCSWEILKAAISSMVSVTDVLTVMSHPLNAELPLYHFKLHIFNIMNAWFVYFLCHFDFTNTLCFMFYNFHVMHFIFT

SEQ ID NO: 8556 - protein, 113 aa, Zea mays
  VARIANT 36..113: note = Derived polymorphism lacks residues 36 to 113
  VARIANT 81: note = Ancestral polymorphism is S, Derived polymorphism is L
MGCAGSTPKTDDNGKNLKKPKPWKHTQAITPAQLRQMRDEFWDTAPHYGGQKEIWDALRAAADSDLALAQTIVDSAGIIVSNSDMTLCYDERGAKYELPKYVLSEPTNLIRDG

SEQ ID NO: 8557 - protein, 83 aa, Zea mays
  VARIANT 74: note = Ancestral polymorphism is G, Derived polymorphism is V
  VARIANT 60: note = Ancestral polymorphism is E, Derived polymorphism is Q
  VARIANT 52..83: note = Derived polymorphism lacks residues 52 to 83
  VARIANT 47: note = Ancestral polymorphism is A, Derived polymorphism is V
  VARIANT 41: note = Ancestral polymorphism is G, Derived polymorphism is E
  VARIANT 35: note = Ancestral polymorphism is D, Derived polymorphism is N
  VARIANT 27: note = Ancestral polymorphism is A, Derived polymorphism is T
  VARIANT 20: note = Ancestral polymorphism is G, Derived polymorphism is S
  VARIANT 2: note = Ancestral polymorphism is R, Derived polymorphism is Q
MRCPPKEADVDALLSGDVIGLKGLESALLLRLQHDLANSAGDDDLTAAIDIWLAIAFDLQRKREYSGLQWGQAGRFTLKYEVL

SEQ ID NO: 8558 - protein, 258 aa, Zea mays
  VARIANT 5: note = Ancestral polymorphism is A, Derived polymorphism is T
  VARIANT 11: note = Ancestral polymorphism is P, Derived polymorphism is S
  VARIANT 17: note = Ancestral polymorphism is S, Derived polymorphism is L
  VARIANT 25: note = Ancestral polymorphism is A, Derived polymorphism is V
  VARIANT 32: note = Ancestral polymorphism is P, Derived polymorphism is L
  VARIANT 50: note = Ancestral polymorphism is R, Derived polymorphism is C
  VARIANT 78..258: note = Derived polymorphism lacks residues 78 to 258
  VARIANT 82: note = Ancestral polymorphism is S, Derived polymorphism is R
  VARIANT 94: note = Ancestral polymorphism is P, Derived polymorphism is L
  VARIANT 97: note = Ancestral polymorphism is R, Derived polymorphism is Q
  VARIANT 105: note = Ancestral polymorphism is L, Derived polymorphism is Q
  VARIANT 122: note = Ancestral polymorphism is A, Derived polymorphism is V
  VARIANT 151..258: note = Derived polymorphism lacks residues 151 to 258
MSIAAVRSSSPALLARSCCNLRRSADSSPFKPITSPLSKASTSASLGGHRMASSSLSSPSFASAKGSSAAKKATKELRFWQSWRPTRLRCRRPPLARLPSSTGAQKVETTLEESTELWILLACGSDDVDHRTAEAWAWMAWTQCSPCQRRWRWCGLGAVFSFTAMAEVVPVGCRGRARGWSCVREPSSFLGDWGKVEEEVVICVSRDERGMLVEGRIQSGVPMTEAKGMARVVRGQRPGRAWLISEAKGGSRCAEAEA

SEQ ID NO: 8559 - protein, 137 aa, Zea mays
  VARIANT 28..137: note = Derived polymorphism lacks residues 28 to 137
  VARIANT 40: note = Ancestral polymorphism is S, Derived polymorphism is W
MEGDAVLSSMDSLWFYSSVFLRQPSKHKGSECAEEPQQDWAGTNKTTSGRPCCQAPKCAKEAAGRRAEGGTVRIAPATGRGEWDERMVAWQKEQRRRALVAAAARCSPATMPPPGGEGVAMKAHLRSWAHAVACSVR

SEQ ID NO: 8560 - protein, 325 aa, Zea mays
  VARIANT 304: note = Ancestral polymorphism is S, Derived polymorphism is L
  VARIANT 273..325: note = Derived polymorphism lacks residues 273 to 325
  VARIANT 237..325: note = Derived polymorphism lacks residues 237 to 325
  VARIANT 187..325: note = Derived polymorphism lacks residues 187 to 325
  VARIANT 60..325: note = Derived polymorphism lacks residues 60 to 325
MAPLLSPPLLADTVTITGLAGAGRRDRGWRRRAWGRTSSRVKAVAAESRSSAGGIAEDYYAVLGVMPDATPKQIKKPYYNCMKSCHPDLSGNDPDVTNFCMFINEVYTVLTDPIQRAVHDEIHGYAATATNPFLDDSAPRDHVFVDEFSCIGCKNCANVCSKVFQIEEDFGRARVYDQSGSTELIQEAIDSCPVDCIHWTLAAQLSLLEDEMRRVERVNVGLMLAGWEAQLMCFGCCCASSRWKKRQAKVLEKVRRRMSQDDSRKGGSWSDIWGAPTRYEKNEAEAKERAKRAAAAARRWREYSRKGTDKYPAFKLPEAVPSSKE

SEQ ID NO: 8561 - protein, 135 aa, Zea mays
  VARIANT 29: note = Ancestral polymorphism is S, Derived polymorphism is P
  VARIANT 25: note = Ancestral polymorphism is A, Derived polymorphism is T
  VARIANT 13: note = Ancestral polymorphism is L, Derived polymorphism is V
  VARIANT 8: note = Ancestral polymorphism is V, Derived polymorphism is A
MKIAHTAVLPLLLLLIFSPAAMSSALAPSGPGAYIVFVSRADYVDSVDYDLRAPLRLLASVVGRSVALTTSVRACNISPMRPRTSGDLASTDLRTPLLRCSTAEAKAALLYHYSSIGFAARLAPEHAHRLSSQCS

SEQ ID NO: 8562 - protein, 131 aa, Zea mays
  VARIANT 97..131: note = Derived polymorphism lacks residues 97 to 131
  VARIANT 83: note = Ancestral polymorphism is L, Derived polymorphism is H
  VARIANT 44: note = Ancestral polymorphism is M, Derived polymorphism is I
  VARIANT 36: note = Ancestral polymorphism is S, Derived polymorphism is L
MAATSITTTAHFVLLTPTHTTPSVTPPTTPQPNYPSPLALSVSMPPQHLGPHRCARHNPHGPLPHDAQGPGRDHLTPNLPNYLVYLNVALLLVVAVYNLNPASFAYTRGGHTDVTYLNVEVGVTKIDPGTC

SEQ ID NO: 8563 - protein, 368 aa, Zea mays
  VARIANT 54: note = Ancestral polymorphism is V, Derived polymorphism is G
MEEARQRRRLCLCLLVAAVSWALLAAVARCDPQVPCYFIFGDSLVDNGNNNYIVSLARANYPPYGIDFAAGPSGRFTNGLTTVDVIAQLLGFDNFIPPFAATSADQLLGGANFASAAAGIRAETGQQLGGRIPFAGQVQNYQTAVQTLVSILGDQDTASDHLSRCIFSVGMGSNDYLNNYFMPAFYNTGSRYTPEQFADSLIADYRRHLRVLYNYGARKVVMIGVGQVGCSPNELARYSADGVTCVDRIDDAIQMFNRRLVGLVDEFNALPGAHFTFINAYNIFDDILANAASYGFTVTNAGCCGVGRNNGQVTCLPYQAPCANRDQHIFWDAFHPSEAANIIVGRRSYRAESPNDVYPMDISTLASI

SEQ ID NO: 8564 - protein, 215 aa, Zea mays
  VARIANT 197: note = Ancestral polymorphism is I, Derived polymorphism is V
  VARIANT 156: note = Ancestral polymorphism is A, Derived polymorphism is V
  VARIANT 131: note = Ancestral polymorphism is A, Derived polymorphism is T
  VARIANT 102: note = Ancestral polymorphism is T, Derived polymorphism is I
  VARIANT 91: note = Ancestral polymorphism is D, Derived polymorphism is N
  VARIANT 80: note = Ancestral polymorphism is L, Derived polymorphism is P
  VARIANT 74: note = Ancestral polymorphism is R, Derived polymorphism is W
  VARIANT 64: note = Ancestral polymorphism is R, Derived polymorphism is S
  VARIANT 44: note = Ancestral polymorphism is A, Derived polymorphism is G
  VARIANT 32: note = Ancestral polymorphism is R, Derived polymorphism is C
MTVAGAIRRRRAPRPHLPLFVLVLLFSTLTPRTSALRVPLRQAATLVSLSHSLLSRVAITRAARGDAAAAARVRRIASLLSSRGAWGLGWDYLRHYAFSSATGCGLSCAAAASRLIAAAAEASRLRSATDAAQWMRLHYGDIRDAAAQLLNGLLLAFSEEGPLREVFMDIKWEVEEGELLKDCLEVGAKDLKGLLVIAKDLFAGVSRTSTQHSEL

SEQ ID NO: 8565 - protein, 806 aa, Zea mays
  VARIANT 47..806: note = Derived polymorphism lacks residues 47 to 806
MTRRIQREKMRATWALPSLLLFLAFSSSFCKASASASTKQDKVYIVYLGKHGGAKAEEAVLEDHRTLLLSVKGSEEEARASLLYSYKHTLNGFAAILSQEEATKLSERSEVVSAFQSEGRWAPHTTRSWRFLGFEEGLDRRPPDDGGDQWLLPSSLDKASEDIIVGILDSGIWPESRSFSDQGLGPVPARWKGTCQGGDSFPSSSCNRKIIGARYYLKAYEAHYNGGLNATYAYRSPRDHDGHGTHTASTAAGRAVAGASALGGFARGSASGGAPLARLAVYKACWPIPGPDPNVENTCFEADMLAAMDDAVGDGVDVLSVSIGSSGAPPRFADDGIALGALHAAARGVVVSCSGGNSGPRPATVSNLAPWMLTVAASSIDRAFHAPVRLGNGVTVMGQTVTPYQLPGDKPYPLVYAADAVVPGTPANVSNQCLPNSLASDKVRGKIVVCLRGAGLRVGKGLEVKRAGGAAILLGNPAASGSEVPVDAHVLPGTAVAAADADTILRYINSSSSPTAVLDPSRTVVDVRPSPVMAQFSSRGPNVLEPSILKPDITAPGLNILAAWSGASSPTKLDGDHRVVQYNIMSGTSMSCPHASAAAALVKAAHPDWSSAAIRSAIMTTATTSDAEGGPLMNGDGSVAGPMDYGSGHIRPRHALDPGLVYDTSYHDYLLFACAASSAGSGSQLDRSVPCPPRPPPPHQLNHPSVAVRGLNGSVTVRRTVTNVGPGAARYAVAVVEPAGVSVTVSPRRLRFARAGEKRAFRIKLEAASRGRSGARVARGQVVAGSYAWSDGGAHVVRSPIVVIFD

SEQ ID NO: 8566 - protein, 126 aa, Zea mays
  VARIANT 96: note = Ancestral polymorphism is R, Derived polymorphism is I
  VARIANT 68: note = Ancestral polymorphism is F, Derived polymorphism is L
  VARIANT 61: note = Ancestral polymorphism is I, Derived polymorphism is F
  VARIANT 40: note = Ancestral polymorphism is A, Derived polymorphism is T
  VARIANT 37: note = Ancestral polymorphism is Q, Derived polymorphism is H
  VARIANT 35: note = Ancestral polymorphism is P, Derived polymorphism is L
  VARIANT 12: note = Ancestral polymorphism is P, Derived polymorphism is S
MDGDLWDKVLQPENEYRRQLIDQVVSTALPESKSPEQVSAAVKAFMTADLPHELIELLEKIVLQNSAFSGNFNLQNLLISTAIKADPSRVMDYVNRLDNFDGPAVGEVAIDSMLPLYCLPNIAFMH

SEQ ID NO: 8567 - protein, 191 aa, Zea mays
  VARIANT 175: note = Ancestral polymorphism is S, Derived polymorphism is Y
  VARIANT 149: note = Ancestral polymorphism is D, Derived polymorphism is G
  VARIANT 146: note = Ancestral polymorphism is R, Derived polymorphism is C
  VARIANT 110..191: note = Derived polymorphism lacks residues 110 to 191
  VARIANT 97: note = Ancestral polymorphism is I, Derived polymorphism is V
  VARIANT 92: note = Ancestral polymorphism is P, Derived polymorphism is S
  VARIANT 86: note = Ancestral polymorphism is A, Derived polymorphism is E
  VARIANT 39: note = Ancestral polymorphism is M, Derived polymorphism is K
  VARIANT 27: note = Ancestral polymorphism is W, Derived polymorphism is S
  VARIANT 10: note = Ancestral polymorphism is A, Derived polymorphism is T
  VARIANT 9: note = Ancestral polymorphism is A, Derived polymorphism is P
MALQRLVQAAVWFLGENANYAASEYAWESATPPGTALMKLDADKMVAAASSRNPTLASALTRLQRCAFSGSWEIRIAAVQALTTIAIRSGEPYRLQIYEFLHALALGGVQSNFSELQLSNGENQGASGTGLGSLISPMLKELRDIRQHDNSKQEWSDEEIKKLYETHERLLDFVSLFCFVPRAKYLPLGPT

SEQ ID NO: 8568 - protein, 552 aa, Zea mays
  VARIANT 243: note = Ancestral polymorphism is R, Derived polymorphism is S
  VARIANT 177: note = Ancestral polymorphism is K, Derived polymorphism is T
MRVYITATATAGEGDATKPKAPPPHQQQQQQARRGCRSAAATGLLAGLLLFRAALLAIEAGASLCPSTAAGCLDWRAGLGRWLYGDGGDATEEFMEEWRRRSREATLLDPVVVEAAPDSMDALLAEMATMLASYDRVDVEAVAIKMMAMLSKMDRKVKSSRTRALLNRHLASLGVPKSAHCLALRLAEEFAVNAAARSPVPPPEHAPRLTDASRLHVALVTDNVLAAAVAVASAARSAADPARLVLHVLTDRKSYVPMHSWFALHPVEPAVVEVRGLHQLAWRDAGAVASVMRTVEEVRRSSLDWYRRQCGGGSSAEETRPSAFSLLNYLKIHLPELFPELGRVVLLDDDVVVREDLAGLWEQDLDGNVIGAVGAHEGGGVCVDKTLGDHLNFSDPDVSGSGPLHSSRCAWSWGVNVVDLDAWRRTNLPGASEQFVADGLAATGGGSESDISSRGHVQNRESGFRLWQMASLPPALLAFDGRVQAIDPRWNLPGLGWRVPHPDLVRLSAVLHFSGPRKPWLEVAFPELRQLWLAHLNASDSFLQGCGVVEWQ

SEQ ID NO: 8569 - protein, 127 aa, Zea mays
  VARIANT 30: note = Ancestral polymorphism is L, Derived polymorphism is R
  VARIANT 24: note = Ancestral polymorphism is S, Derived polymorphism is L
  VARIANT 11: note = Ancestral polymorphism is C, Derived polymorphism is F
MGMEWKQKCFCIVQVQRIYYKEYSSVKEKLFSRNSSMANLGSKVRREVNARIASVSRMMERLETSGNSRTSDRPTTSTFEVPPATKSSNERVTESNSDAAIAGGGTTTTSSSASNFSAPCVAMSGSN

SEQ ID NO: 8570 - protein, 238 aa, Zea mays
  VARIANT 18: note = Ancestral polymorphism is V, Derived polymorphism is I
  VARIANT 173: note = Ancestral polymorphism is S, Derived polymorphism is R
  VARIANT 199..238: note = Derived polymorphism lacks residues 199 to 238
  VARIANT 205: note = Ancestral polymorphism is V, Derived polymorphism is F
MASASLSSQASLAVAALVAAALLVAASHATPADDKARAPTSAITNKPAEHSAYGSAMPRGSPSPASPAPVNKGVPSPGGTAAPPPGYNSNNATPPSLPLVPPPRPLPFVIVEGVIYCKSCKGKGYNTGIDASPLQGATAMMVCYGRKVVNATGTVTDANGYFLIMFYDMASFSSKTCKMYLVSSPTPQCSKPFYPPNQWIGLSLVRETRTVPPAGLQGIYTPTSVLFYAPAAKGQCPY

SEQ ID NO: 8571 - protein, 177 aa, Zea mays
  VARIANT 1: note = Ancestral polymorphism is M, Derived polymorphism is T
  VARIANT 6: note = Ancestral polymorphism is R, Derived polymorphism is T
MARLARCLAASLSAVILAVVCLPSRGEAMGGLPQPPPDVNFTVAVEGTVWCKSCRYAGYVQSSMDASPLPDAAALLQCRRGDGRAVSVWNTTGADGHFLIQADWQSAPFNSKDCRVKAYAPRSSPPAARACTVAVNPSPNKGAPLKFRRFVPLSGEMQALYSAGDFTFAPEDPASKC

SEQ ID NO: 8572 - protein, 791 aa, Zea mays
  VARIANT 667..791: note = Derived polymorphism lacks residues 667 to 791
  VARIANT 649..791: note = Derived polymorphism lacks residues 649 to 791
MEPSRGATGGARRWGEAETEVDAAEEGRRAEDGGEVSLREWLDRPGRAVEAAECVHVFRQVAEAVAVAHAQGVAVGSARPSCFVVSPPFARVAFIESASGSDASGSCSGSDASEDADPDASPPRRGDGAGRGEERAGKSFPLKSVLAMELNWYTSPEEADDSAATFASDVYRLGVLLFELFCTFETMEDKMRAMANLRHRVLPPQLLLKWPKEASFCQLLMHPVPETRPKMSEVLQSEFLNQSRNSLEEREAALRLREEIEEQELLLDFLQQLQKRKQDMADSLQDTVAFLSSDINEVLHQQSALGHCVNFSPDLDKEVCSGTVEDQSDCGSRKRFRPELQGVDMEENNRSVEECSRTVPSSELIQENVLSKSSRLMKNLKKLETAYFLTRSKLAKQVGNQINSCNRVVKRTTGSAVGTEASSIDDFSLERQYGRRQRGWVNSFLEGLCKYLSFSKLKVRAELKHCDSLNSSNLVCSVGFDRDREFFATAGVNKKIKVFEYNMIVNEHRDIHYPVVEMSNRSKLSCISWNSYMKSHIASSDFEGIVQVWDVTRSQVFVEMREHERRVWSVDFSIVDPTKLVSGSDDGSVKLWDMNQAILFLHLLYAGSIGTIKTRANVCSVQFQPDTARSIAIGSADHKIYCYDLRHIRAPYCTLVGHTKTVSYVKYLDASTIVSASTDNSLKLWDLSMSPGRIIDSPVQTFKGHTNTKNFVGLSISDGYIATGSETNEVFVYHKEFPMPVLAYKFSVTDPISGQEIDDQSQFISCVCWRGQSSTLLSANSSGNIKILEMD

SEQ ID NO: 8573 - protein, 179 aa, Zea mays
  VARIANT 130: note = Ancestral polymorphism is H, Derived polymorphism is N
  VARIANT 7: note = Ancestral polymorphism is R, Derived polymorphism is L
MDHDASRQEAAAAVWRGTVRAVASGPTPDEAWALLGDFCSLHRWVSTVRACRRVEVEGAAAAEPEPEGRPAPGCVRYCEGPVNMAAPGELVGWSKERLLEMDHAGRWYSYELLESNKGFGRYRATVRVEHDPAGCAVRWSFEADPVKGWTLDGFLGFLEKLARGVAQRLQEEIMMIRPR

SEQ ID NO: 8574 - protein, 1488 aa, Zea mays
  VARIANT 395..1488: note = Derived polymorphism lacks residues 395 to 1488
  VARIANT 323..1488: note = Derived polymorphism lacks residues 323 to 1488
  VARIANT 41..1488: note = Derived polymorphism lacks residues 41 to 1488
  VARIANT 6..1488: note = Derived polymorphism lacks residues 6 to 1488
METLSRGLHGMSSPDATPYFSGASSRRRSGADEVDDEEALQWAAMERLPSFERLRTGLVRPADASDGGSDSGRRGRRRRHAHEEVDVRAMGLAQRQAFVERVFRVADEDNERFLRKLRARIDRAGIQIPTVEVRFRGVNVQAECHVGTRALPTLANVSLDVADSLLGRVGVKLGKRKTLHILKDVSGVVRPSRMTLLLGPPSSGKTTLLLALAGKLDPTLEVSGEVTYNGYGLDEFVPQKTAAYISQNDIHDGEMTVKEVLDFSARCQGVGQRYELLKELAKKERQQGIYPDPEVDLFMKATSVHGATLQTDYILRILGLDMCADIIVGNELMRGISGGQKKRLTTGEMLVGPTKVLFMDEISTGLDSSTTFQIVKCIQQIVHLGEATVLASLLQPAPEVFELFDDVMLLSEGQIVYQGPREYVLEFFEVCGFRCPQRKGVPDFLQEVTSKKDQEQYWIQNEKPYHYVSVPEFVAKFKKFHMGKSLKKQLSVPFHKRKIHKSALVFSEKSVSTLELLKVSWSKEWLLMKRNSFVYIFKIVQGILVALVASTVFLRTQMHTRNEEDGQIYIGALLYVMIVNMFNGFAESSILLARLPVLYKHRDFLFYRPWTIVLPNVLMRVPASIFESIIWVAVTYYSIGFAPEASRFFKHLVAVFFIQQMAAGLFRLVTGLCRTVIITNTAGSLAVLFMFTLGGFILPKDAISKWLIWAYYCSPLTYAYIALASNEMHSPRWMDQFAPDGRRLGVAILENSSIFTGKEWYWIATGALLGFTVLFNVLFTLSLMYLNRKYLLYTLIISVGKPQAILPEETDTSLEDSEEGKKMTDITQRTKIPTPEPLSSNSMITLDKVLEQLRGQSPNTSDRSHMNASVRITPGRGMILPFEPLSMSFNEINYYVDMPAEMKSQGVTADKLQLLSGISGAFRPGVLTALMGVSGSGKTTLMDVLSGRKTGGYIEGEIYISGYPKNQETFARISGYCEQNDIHSPQITIRESLLFSAFMRLPKEVTDQEKKIFVDEVMELVELNGLKDAIVGLPGVNGLSTEQRKRLTVAVELVANPSIIFMDEPTSGLDARAAAVVMRTVRNTVNTGRTVVCTIHQPSIDIFEAFDELLLMKRGGQIIYSGPLGRNSHKVVEYFEAVPGIPKIKEGCNPATWMLDVTSASTEVQLNIDFAEHYKSSTMHQRNKALVKELSKPPPGSSDLYFPTQYSQSTFDQFRFCLWKQWLTYWRSPDYNLVRMFFALFTALLLGIIFWRVGSKMKSSSDLLIIVGSMYFAVAFIGFENCITAQPVIAVERTVFYRERAAGMYSAIPYAFSQVVAEIPYVFVESVIYTVIVYPMMSFQWTLAKFFWFFYISFLSFLYFTYYGMMGVAITPNPQVASIFAASFYTLFNLFSGFIVPRSRIPVWWIWYYWICPVAWTVYGLIVSQYGDVEDLIKVPGKPDQQVKAFIKDYFGYDPDFMGVVAAVLAGFTALFAFIYVYCIKRFNFQQR

SEQ ID NO: 8575 - protein, 358 aa, Zea mays
  VARIANT 174: note = Ancestral polymorphism is P, Derived polymorphism is L
MATATSASASASASPGAFGAKTPAPARGLSTHPVLTPSPAFARPSPRTPACSRSRASLHLGGLGSTSSSSAAAAGNGTGLHVPPTVAPLAVPKMAGSMKTHKNVLLFYCEEMRDLAQQVVARNDDIELRSISWRNPLGSQLGFESRLAKESYYGTTFVAGGSHICSQIILYVILQQQLFVSAEERFYFGDSVLPCFESGIPLLKSKLQELPDSHNITIAFPDDGAWKRFYKQLQHFPMVICNKVREGEQRIVRIKEGDPRGRHVVIVDDLVQSGSTLIECQKVLAAHGAAKVSAYVTHGIFPNSSWEKFQHDNGEGPEHGLSHFWLTDSCPLTVKAVKGRRPFEILSLAGPIASALQI

SEQ ID NO: 8576 - protein, 367 aa, Zea mays
  VARIANT 58: note = Ancestral polymorphism is P, Derived polymorphism is A
  VARIANT 114: note = Ancestral polymorphism is K, Derived polymorphism is M
  VARIANT 241: note = Ancestral polymorphism is G, Derived polymorphism is E
MGGAGELDAFDAGRCADGYALGLAVGRRFAEVIQSRMRQDLVLREQLLPFASTAQAQALLAALQSANRQRYPRYWDELVGTADGSGVPLLHVILVNFRKEVLPFIPKQEEEKEKEEAGGDCSDVLIVSDSTAIAAHNEDGDVALLGHTYLVRATLPDGASFTAYTCAGELPSCAFGFNTNGVAFTLNSVPPANDEIVAGAIARNFVSRDLLEAKNLEDAMHRVCSPAVSVGHSYNLTDVRGRRIVNVETASGNRFAVREAGAVPFFHANMYRHLQVKQVPDENSMSRERRAAQCSSAVDVDSKEAALSLLGDTADEKYPIYMTGPRLYTLCTVLVDLDEATMTIYKGNPRDGNAAHVLRIRADPPAG

SEQ ID NO: 8577 - protein, 537 aa, Zea mays
  VARIANT 34..537: note = Derived polymorphism lacks residues 34 to 537
  VARIANT 40: note = Ancestral polymorphism is S, Derived polymorphism is L
  VARIANT 138..537: note = Derived polymorphism lacks residues 138 to 537
  VARIANT 362: note = Ancestral polymorphism is P, Derived polymorphism is L
MRVREMREMIIVREKTENKRRRGIEIHVGSSVVQLYAKESSKMMLEVLRKGPRTTAELEAPVADTSLVSADAPRVLADIVLDISGGEHAFIEADETKELLSPLTKPGNSYKRICFSNRSFGIGAANVAGPILDSVKNQLTKVDISDFVAGRSEDEALDVMRIFSKALEGSVLRYLNISDNALGEKDVRAFNELLKSQESLEELYVMNDGISEEAAKALYELIPATEKLKVLHFHNNMTRDEVELNKQISCTLPLTNKTNKQVTFKFKYHGGTNFGRTSGGPYITTSYDYDAPLDEYGNIRQPKYGHLKDLHDLIRSMEKILVHGKYNDTSYGKNAIFVDRDVKVTLSGGTHLVPAWSVSILPDCKTVAYNTAKIKTQTSVMVKKANSVEKEPEALRWSWMPENLKPFMTDHRDSFRHSQLLEQITTSTDQSDYLWYRTSLEHKGEGSYTLYVNTSGHEMAKLLGRWSVRLPAPVSGEAPLRKELRFSPQRHSRTQGTSCASIDQLVPSLFTIAQRHWSLLWRILISSELLLFLLTSS

SEQ ID NO: 8578 - protein, 137 aa, Zea mays
  VARIANT 75: note = Ancestral polymorphism is S, Derived polymorphism is A
MADSKATSAVTLRTRKFMTNRLLARKQFVLEVIHPGRANVSKAELKERLAKAYEVKDPNTIFVFKFRTHFGGGKSTGFGLIYDNLEAAKKFEPKYRLIRNGLATKVEKSRKQMKERKNRAKKIRGVKKTKAGDAKKK

SEQ ID NO: 8579 - protein, 504 aa, Zea mays
  VARIANT 360: note = Ancestral polymorphism is Y, Derived polymorphism is D
MRKPAALVVSTAVFAAAAVVAVMARQRLREARRWARAGAVLRDLQERCAAPVERLRQVADAMVAEMRAGLASNDSEGDSGSSVLLKMLVTYVDSLPSGDEKGLFYALDLGGTNFRVLRIQFGGKEQRIVKQESKTVSIPQHLMSRGSNELFDFIAAALAKFIASEGEGFYLPEGMQRQLGFTFSFPVKQNSVASGTLIKWTKGFAIDEMVGKDVVAELNKAIKRQGVDMEVTVLVNDTVGTLAAGRYVDNDTVAAVILGTGTNAAYIEHMDSIPKWCGPPPESGNMVINMEWGNFRSTHLPLTEFDVALDAESLNPDEQIYEKLISGMYMGEIVRRVLLKMAQDASLFSDNVPLELEVPYILRTYHVLMMHQDTSPDLRTVGNKLKEVFRIEDTCFKTRKLVVDVCEVVASRAARLAAAGIHGILKKLGRDVASPDKQKTVIAVDGGVYKHYTFFAQCMESTLRDLLGEGVASSLVIKLAEDGSGTGAALLSASYSQRLQAVDD

SEQ ID NO: 8580 - protein, 435 aa, Zea mays
  VARIANT 235..435: note = Derived polymorphism lacks residues 235 to 435
  VARIANT 129: note = Ancestral polymorphism is R, Derived polymorphism is C
  VARIANT 38: note = Ancestral polymorphism is G, Derived polymorphism is V
MDSEVVHVVESSLVVPSEPTPSEGLSLSPLDLVLPSRGHTPTVYLYSPSDVAAADGFFDVARLKEAMAKTLVAFYPLAGRLGVNNDGRVEITCTGEGALFVVAHADLSVGDIEDDFRPSPELRRLFVPCIEPASIILAIQVTFLKFGGVVLGTALHHTASDASSAFHFFQTWSALCKYGDRATVELPCHDRTLLRARSPPTVHPDALSRFYPKLTFSDDPLGSGPLAVEVFAISKDQVASLKRLCGGTSTFCAMSALVWQCTLIARRLPPDSETRLIFPANVRGRMRPPLPNRYFGNALIRLGVTGAVQDIASEALVSVAGRIKDTIDRMDDELVRSAVDYCEMAEMDSRPVKGTLLETELMLISWLGMPMYDTDFGWGKPAVMSRAESIRGGFVYIIDDGPTNGVGSGSGGVRVLMCMEAANMKELERLLYAKL

SEQ ID NO: 8581 - protein, 108 aa, Zea mays
  VARIANT 72: note = Ancestral polymorphism is S, Derived polymorphism is L
  VARIANT 43: note = Ancestral polymorphism is V, Derived polymorphism is I
  VARIANT 23: note = Ancestral polymorphism is G, Derived polymorphism is C
MRREGRQHGWVFTVDPSLVDAEGKCRSRAVQVEGAAAANGGFVRASRKPTNHSKPAVGRAYKSLIGKGEAGSGKQGRHKFKHDEVKMYSLYLEGAHDAYADAMLEFDS

SEQ ID NO: 8582 - protein, 316 aa, Zea mays
  VARIANT 252: note = Ancestral polymorphism is P, Derived polymorphism is L
  VARIANT 195: note = Ancestral polymorphism is A, Derived polymorphism is V
  VARIANT 91: note = Ancestral polymorphism is D, Derived polymorphism is G
MGRSPCCDKTKVKRGPWSQEEDAVLRSFVQRFGNAGNWIALPQKAGLKRCGKSCRLRWLNYLRPELRHGGFTDEEDSLILSLYGEIGSKYDAWSVIASRLPGRTDNDVKNYWNTKLKKRYLASSTSTGEARPPPPPPAPPSASGDDSSAAADSHQAQQDEPSLPLTPPAFSTDLDTTFAVVDDDMLLFKSDQLYAELVGLVEKKSQATAGPSTGGGGDEANSTATPSSSSYGTGTTNSPTVSSSSGSCALWPTDVHGTTLLSEPTSSSLFDDAYGVGDDAFGAAALPAYSFQDLLASSYDDATAAVVTQELMQYYQ

SEQ ID NO: 8583 - protein, 237 aa, Zea mays
  VARIANT 173: note = Ancestral polymorphism is G, Derived polymorphism is S
  VARIANT 153: note = Ancestral polymorphism is P, Derived polymorphism is R
  VARIANT 130: note = Ancestral polymorphism is W, Derived polymorphism is R
  VARIANT 77: note = Ancestral polymorphism is R, Derived polymorphism is L
  VARIANT 66: note = Ancestral polymorphism is G, Derived polymorphism is R
  VARIANT 61: note = Ancestral polymorphism is A, Derived polymorphism is V
  VARIANT 51: note = Ancestral polymorphism is R, Derived polymorphism is L
  VARIANT 31..237: note = Derived polymorphism lacks residues 31 to 237
MSQLLHLPDLAAPRTRMGSALAAGARVKQGEAGTARGRVLRVADPVRRECLVPVPPPPVLAAGRRGDDDDVDEERQRYYLNLGYAIRTLREELPDVLCKDHSFDIYREDIVFRDPLNTFKGLGNYKRLFWALRLTGRVFFRASWVEVVSIWQPAENSILLRWTAHGVPRVPWGWWDAAHARFDGASVYKLDRNGKIYEHKVHNVATNPPAKSKVLPVHELVRSLGCPSTAQPTCSDF

SEQ ID NO: 8584 - protein, 254 aa, Zea mays
  VARIANT 162: note = Ancestral polymorphism is G, Derived polymorphism is C
  VARIANT 168: note = Ancestral polymorphism is C, Derived polymorphism is Y
  VARIANT 191: note = Ancestral polymorphism is S, Derived polymorphism is L
  VARIANT 210: note = Ancestral polymorphism is K, Derived polymorphism is N
  VARIANT 218: note = Ancestral polymorphism is I, Derived polymorphism is V
  VARIANT 224: note = Ancestral polymorphism is E, Derived polymorphism is K
  VARIANT 226: note = Ancestral polymorphism is A, Derived polymorphism is T
  VARIANT 234: note = Ancestral polymorphism is K, Derived polymorphism is N
MVESSGHRSTVPAAVGFFRVPGLFVRLSGKGGASNAVDPEDSVWSPTSPLDLKHVIRCSPPRACLGLADALTADGTGSLHSGGRSSFVDSIKPFLERALPKAACGKEAAAAASSSAGVVAATLGKQASEYADCEEYTCVISRGADPRTTHILAGETVEVRRGDVGGGCRKVVFIIEPLALSDRQPRASSSSSPAAPARVVASGRCCCCMKRLLEDRDIFIYLGEKAFCSDECRNGFIEEAAEEELMILDPARNL

SEQ ID NO: 8585 - protein, 313 aa, Zea mays
  VARIANT 74: note = Ancestral polymorphism is N, Derived polymorphism is I
  VARIANT 60: note = Ancestral polymorphism is P, Derived polymorphism is S
MGALDLHLDFASAQHGQAKLKEYAKSSLLSDGNYNTDKINGSNPDDYEKFEKGIMHYGCPHYRRRCRIRAPCCNEIFDCRHCHNETKNSIKIDKMKRHELPRHEVQQVVCSLCGTEQEVRQVCINCGVCMGKYFCGLCKLFDDDVSKQQYHCNGCGICRIGGRENFFHCSKCGCCYSIALKNSHACVEGAMHHDCPICFEFSYFPTDLFREFQYLFDSTNDVSVLPCGHTIHVKCLKEMEEHCQFACPLCSKSVCDMSKAWERLDMELATLSDSCDHKMVRILCNDCGAISDVQFHLIAHKCQNCKSYNTRQI

SEQ ID NO: 8586 - protein, 157 aa, Zea mays
  VARIANT 2: note = Ancestral polymorphism is G, Derived polymorphism is V
MGRKLGLDRVLDCFSLSLCSSACACVHSVEEEEQEDEDERKALVSSQLEELVKLSRDLVGGAAKTLAFHLEPKTVELKVSMHCYGCAKKVQKHISKMDGVTSFEVDLEKKKVVVIGDVTPYEVLASISKVKFAELWVAPQQPQAASRCGKAPAGGVV

SEQ ID NO: 8587 - protein, 348 aa, Zea mays
  VARIANT 168: note = Ancestral polymorphism is G, Derived polymorphism is R
MTSQKDIFDVAGPTYLTYVNWNCPHHRRSVMASLVQGVYVLERDRQCNRQGADARAPAWWRFFRFEPRQVLTDAADGSIFGAVYAFQPPLHLLDPTAAASAPHYVVAFRGTITKKGSAKRDLELDLQLVRNGLEGRSRFRAAMQAIQDTLAAAAGQHGRVWLAGHSLGSAIATLGAKTLVRAGAPALPTFLFNAPFVSAPVERIGDRRLRQGIRIANSFVTAGVAAVLQRAGGGAHDAAFAAMAAWMPNLFVNPADPISAEYVGYFDHRRKMEAIGAGAVGRLATRNSVKDLLLGIGKGRSGCEPLHLFPSAVLTVNRGPSPDFKTAHGIHQWWRPDLSLECTAHYYT

SEQ ID NO: 8588 - protein, 452 aa, Zea mays
  VARIANT 171: note = Ancestral polymorphism is M, Derived polymorphism is K
MASPDALPLRFLLVVLVACTADATQRPTTLHIPVVHRDAVFPPRRGAPPGSFRCRHAAPHTAQLESLHSATAAADLLRSPVMSGVPFDSGEYFAVIGVGDPPTHALVVIDTGSDLIWLQCLPCRRCYRQVTPLYDPRNSKTHRRIPCASPQCRGVLRYPGCDARTGGCVYMVVYGDGSASSGDLATDTLVLPDDTRVHNVTLGCGHDNEGLLASAAGLLGAGRGQLSFPTQLAPAYGHVFSYCLGDRMSRARNSSSYLVFGRTPELPSTAFTPLRTNPRRPSLYYVDMVGFSVGGERVAGFSNASLALNPATGRGGVVVDSGTAISRFTRDAYAAVRDAFVSHAAAAGMRRLRNKFSVFDTCYDVHGNGPGTGVRVPSIVLHFAAAADMALPQANYLIPVVGGDRRTYFCLGLQAADDGLNVLGNVQQQGFGVVFDVERGRIGFTPNGCSGE

SEQ ID NO: 8589 - protein, 89 aa, Zea mays
  VARIANT 47: note = Ancestral polymorphism is Y, Derived polymorphism is N
  VARIANT 42: note = Ancestral polymorphism is Y, Derived polymorphism is N
METVAASYGGGGEKRELQQQNKQAGGCGHHHHFQMPLHYPRYRREDYEGMPEWQLDRLLSEYGLPVAGGSVQQKRAFAMGAFLWDAGDN

SEQ ID NO: 8590 - protein, 92 aa, Zea mays
  VARIANT 84: note = Ancestral polymorphism is G, Derived polymorphism is C
  VARIANT 79: note = Ancestral polymorphism is E, Derived polymorphism is K
  VARIANT 62: note = Ancestral polymorphism is G, Derived polymorphism is S
  VARIANT 56: note = Ancestral polymorphism is L, Derived polymorphism is R
  VARIANT 53: note = Ancestral polymorphism is R, Derived polymorphism is G
  VARIANT 37: note = Ancestral polymorphism is E, Derived polymorphism is K
MEKNKHYVVDPPTIDKCKDLSKQLFYTRLASLPGRYESFWKEVDGAKLLWKNGSRLKIEDASVAAMFGIELYAWFCLGEIVGRGFTVTGYHV

SEQ ID NO: 8591 - protein, 132 aa, Zea mays
  VARIANT 76: note = Ancestral polymorphism is A, Derived polymorphism is S
MALLPRTARLAFLSTPRSYSAAAAAAAGASPTSPAPYGGAPPPAMSKTAEFVVSKVDDLMNWARKGSIWPMTFGLACCAVEMMHAGASRYDFDRFGVIFRPSPRQSDCMIVAGTLTNKMAPALRKSVTHSSS

SEQ ID NO: 8592 - protein, 276 aa, Zea mays
  VARIANT 161: note = Ancestral polymorphism is I, Derived polymorphism is T
MAGVVVVFDFDKTIIDVDSDNWVVDSLGFTEPFERLLPTMPWNTLMDTMMGELHAHGRTLDDVAEALRAAPVVAGVPAAIKAAYALGCDLRVLSDANAFFIDTVLAHHGLLGCFSQINTNPSHPDADADGRLRIGPYHDLHGCGVGTCPPNMCKGQVLDRILREASSSAAGRKRVVYLGDGRGDYCPALRLAREDFVMPRRGFPVWDLICEDPARLQAEVHPWADGAELEETLLRLVGRARVEEAALLPPLDCKLESMPVAAQEGMGPIMPLGVKH

SEQ ID NO: 8593 - protein, 522 aa, Zea mays
  VARIANT 155: note = Ancestral polymorphism is M, Derived polymorphism is T
  VARIANT 160: note = Ancestral polymorphism is L, Derived polymorphism is Q
  VARIANT 176: note = Ancestral polymorphism is H, Derived polymorphism is L
MELIVSAVLGDLIGRSISFAIDRYCHRRDEGTVQDSLQRLRRVLLRIQITVEETERRRVTNQAMLQQLHLMREAMYRGYYLLNAVTRQVNAREVSRHKHSSLALSEFNPAKRICILPARTTTTTTTTVTASYTAGEAEAELQEALVDLERMASDMKELVQFLSCYPPLFREPCSRLLWLENRMFGREAEYERIVSFLLEPEPVGAQDLAVLPVIGSTRVGKSTLVEHVWRDERVRKHFSLIVFFRESDIVDGEPRLAPLGDCGVIRYRNDDPASTSGSSLVVIELVDSVDERTWRRALSILKSERTAPVSKVVVTSRSETVGSFGTVEALELKPLSREAFWYFFKTIAFGSTAGAEEQQQELASVCMEITDQLGRSFLGANIIGGLLRSNICAGFWRRVLKGIKDQTRMHLHLFGEGPVDRLKKGQPIYLWRLLKSDSVLIAYRNYEACSVQQPDLPKITVQDVHAGSTTPRGKFEVLAWRSCIPPYSIYLWRCGVQTPSSSLRVSSRNKQIRQRQARLALT

SEQ ID NO: 8594 - protein, 277 aa, Zea mays
  VARIANT 19..277: note = Derived polymorphism lacks residues 19 to 277
  VARIANT 170: note = Ancestral polymorphism is R, Derived polymorphism is W
MELIVSAIMSDLLNRALSKAIQRYRRSKAEDTEHKLRRLHRVLLQIDATVERAEGRHITNQAMLRQLQMLRQGMYQGHHMLDTTLKYRCSDDANSSGDLPVALPGFSSARRLLSRPFRFSSDTYSVPAPGTALGAESSKQLEKTLDDLERLVGDMAEFTLFLEGYPRISRKPYSAHLVLGSVMFGRQMEMETVIDFLLRTEAAGNESPGVLPIVGAARVGKSTLVEHVCLDERLRGHFSSIVVFTVEDTGAAFRGDAVVKHPRFTKPFSLKKTATHR

SEQ ID NO: 8595 - protein, 211 aa, Zea mays
  VARIANT 34: note = Ancestral polymorphism is Q, Derived polymorphism is H
  VARIANT 48: note = Ancestral polymorphism is G, Derived polymorphism is E
  VARIANT 56: note = Ancestral polymorphism is P, Derived polymorphism is A
  VARIANT 85: note = Ancestral polymorphism is A, Derived polymorphism is T
  VARIANT 103: note = Ancestral polymorphism is T, Derived polymorphism is M
  VARIANT 106: note = Ancestral polymorphism is H, Derived polymorphism is D
  VARIANT 179: note = Ancestral polymorphism is S, Derived polymorphism is F
MENGSKIVVTTHKQVGEDSSSWDNRGSQARGPLQRSLYWYVFKSLVFGAANPGDQPKLASLGKQIAELLDGSFVAGNIVASLMRTNMSAGFWLRVLHCLRHYTRKHLLMFGERPSHLLQKGESVNLWSRRMARAHDVVTICNVYQLPYAQDDVPNVTVQDLLSGRVTREGNFSAVAWRSTIPPYYTYLVRCTSQTAGCSTVKKKRPRDARE

SEQ ID NO: 8596 - protein, 197 aa, Zea mays
  VARIANT 55..197: note = Derived polymorphism lacks residues 55 to 197
  VARIANT 102: note = Ancestral polymorphism is A, Derived polymorphism is V
  VARIANT 118: note = Ancestral polymorphism is T, Derived polymorphism is R
  VARIANT 120: note = Ancestral polymorphism is S, Derived polymorphism is R
MCCSKWCWNIMQDVPPLHLTEIVTYLVRQSGPFLDQLGIQRDLCDKLVEMLCSKRNGRLMYHSLSQDRPLAENISDELDLRIARVLESTGYHTDEGFWNDPAKYKISDNRQYVAIVTTASLPWMTGTTINPLFRAAYLARSAKQKVTLVVPWLSKSDQELVYPNNITFSSPEEQETYIRTHSWNKLNSLNWEHIVED

SEQ ID NO: 8597 - protein, 341 aa, Zea mays
  VARIANT 7: note = Ancestral polymorphism is I, Derived polymorphism is T
  VARIANT 10: note = Ancestral polymorphism is S, Derived polymorphism is W
  VARIANT 67: note = Ancestral polymorphism is V, Derived polymorphism is F
  VARIANT 83..341: note = Derived polymorphism lacks residues 83 to 341
  VARIANT 129..341: note = Derived polymorphism lacks residues 129 to 341
  VARIANT 159..341: note = Derived polymorphism lacks residues 159 to 341
MAIWYSIVTSSVQFILKVASHFLLADNYEKIFSHMKPNNILVLSHGFLLGHLQSLGLNFPKNISVIVVCPKGMGPSVSRLYVQGKEVNGTGINSSFVVHQDVDGRATDVALAWLVALGSPFTFATTLEQEYKSDIFGERGILLGAVHGIVEALFRRYTEQGMDEESAYKNTIEGITGIISKTISKKLLYNSLSEEGKKEFNKAYNASFYPCMDILYECYEDVASGSEIRSVVLAGRRFYEKEGLPTFPMGNIDQTRMWKVGEKVRSTRPEGDLGPLHAFTAGVYIALMMAQIEILRKKGHSYSEIINESVIESVDSLNSFMHARGVAFMVDNCSTRPQRLA

SEQ ID NO: 8598 - protein, 434 aa, Zea mays
  VARIANT 203: note = Ancestral polymorphism is R, Derived polymorphism is W
  VARIANT 178..434: note = Derived polymorphism lacks residues 178 to 434
  VARIANT 173: note = Ancestral polymorphism is H, Derived polymorphism is D
  VARIANT 158: note = Ancestral polymorphism is G, Derived polymorphism is R
  VARIANT 42: note = Ancestral polymorphism is G, Derived polymorphism is V
  VARIANT 39: note = Ancestral polymorphism is A, Derived polymorphism is P
  VARIANT 27: note = Ancestral polymorphism is E, Derived polymorphism is V
MANVMDSEVVQVVESSFVVPSEPTPSEGLWLSPLDLILANRGHTPTVYLYSSSSNAVAAADGFFDVARLKEAMAKTLVAFYPLAGRLGVNNDGRAEITCTGEGALFVVAHADLTVGDIEDDFRPSPELRRLFVPRIEPASVVLAIQVTFLKSGGVVLGTALHHAAIDASSAFHFFQTWSALCKHGDRATVELPCHDRTLLRARSPPTVHPDALSRFHPKLTFSDPSGPLAFQVFAISKDQVTSLKRLCGGTSTFCAIGALVWQCALVARRLPPDSEARLTFPANVRRRVRPSLPIRYFGNALVRLGATAAVRDIASEVLASVAGRIKDAVDRVDDELVRSAVDYYEMTEMDSRPVKGTLAETDLQIISWLGMPMYDADFGWGKPAVMSRAESVRGGFVYLMSDGPTDGGGGVRVLMCMEAANMKELERLLYAKL

SEQ ID NO: 8599 - protein, 1114 aa, Zea mays
  VARIANT 348..1114: note = Derived polymorphism lacks residues 348 to 1114
  VARIANT 397..1114: note = Derived polymorphism lacks residues 397 to 1114
MESPGLFAVVALFVVVVAAAAADDAQLLEQFKEAVPSQATDLRGWSASDGACRFPGAGCRGGRLTSLSLAAVPLNADFRAVAATLLQLASLETLSLRGANVSGTLAAVPRCGAKLQSLDLSANAGLRGSVSDVEALVAACAGLSALNLSGGSIGGPRSAGVVASGFARLDALDLSGNKISGDGDLRWMVGAGVGAVRQLDLSGNKISSLPEFTNCSGLEYLDLSGNLIAGEVAGRTLADCRGLRTLNLSGNHLVGPFPPDVAALTSLAGLNLSNNNFSSDLPADAFTELQQLKVVALSFNHFNGSIPDSLAALPELDVLDLSSNTFSGTIPSSICQGPNSSLRMLYLQNNYLSGAIPESISNCTRLESLDLSLNNINGTLPASLGKLGELRDLILWQNFLEGEIPASLENLDKLEHLILDYNGLTGSIPPELSKCKELNWISLASNQLSGPIPAWLGQLSNLAILKLSNNSFSGPIPAELGNCQSLVWLDLNSNQLNGSIPAELAKQSGKMNIGLVIGRPYVYLRNDELSSECHGKGSLLEFTSIRPEELSRMPSKELCNFTRVYMGSTEYTFNKNGSMIFLDLSFNQLDSEIPKELGNMYYLMILNLGHNLLSGVIPPELAGAKKLAVLDLSHNQLEGPIPNSFSTLSLSEINLSNNQLNGSIPELGSLFTFPKISYENNSGLCGFPLLPCGHNAGSSSSDGHRSHRNQASLAGSVAMGLLFSLFCIVGIVIIVVECKKRKQINEEASTSRDIYIDSRSHSGTMNSNWRLSGTNALSVNLAAFEKRLQKLTFNDLIVATNGFHNDSLVGSGGFGDVYKAQLKDGKVVAIKKLIHVSGQGDREFTAEMETIGRIKHRNLVPLLGYCKCGEERLLVYDYMRFGSLEDVLHDRKKTGIKLNWAARKKIAIGAARGLAYLHHNCIPHIIHRDMKSSNVLIDEQLEARVSDFGMARMMSVVDTHLSVSTLAGTPGYVPPEYYQSFRCTTKGDVYSYGVVLLELLTGKPPTDSTDFGDDNNLVGWVKQHSKSRLTDLFDPELVKEDPALELELLEHLKVACACLDDRPSKRPTMLKVMAMFKEMQASSTVDSKTSACTDDACFADVEMTTLKEDKEEKD

SEQ ID NO: 8600 - protein, 565 aa, Zea mays
  VARIANT 390..565: note = Derived polymorphism lacks residues 390 to 565
  VARIANT 239..565: note = Derived polymorphism lacks residues 239 to 565
  VARIANT 227..565: note = Derived polymorphism lacks residues 227 to 565
MGVNMEKTQFLQRGFEENNSMERDTLFLNLDSNSKDNDGKEDGDSQNSMSYSASQGVVNQTMAMLPMQPGAMVGGVPSSTARAIQRSQQLLQNTRIQILHFLNELGWLFQRASACTLSTRPDVSDLDLTQFSITRFKYRLLFSSERDWCSLTKTLLDILAKRSLVSEELSKETMEMLAEIHLLNRAVKRKSRRMVHLHVQFVVLCLDNSKVYPFLPNFPGHTHRYKQTEQETGPYLSLQLFGSTQEDFPPKMDSVNKYLSYESSNPLDERSPSSLPITRKFFPIHSVDEEVRHPHITDYGEDAMMGEVSTNQAWLAPPLDHFKDSERPIKNGSPPNPGYQSCYASTSCSDHSTSTSNSDGQLEENLLQRVNSLVQSSDLDFWRKGRFLVRTNSQLVSYKAGITCLSKSWRTWNTPELTLVSPIAVVGGQKTSLILKGHNLSIPGTQIHCTSIGKYISKEVLCSAYPGTIYDDSGVETFDLTGKPDLIIGRCFVEVENRFRGNSFSVIGGLCTLCFFEEDVVLTITTPRELNNYPRKDTFYLCLTVQVAIVQQFTDIFIKDRLFTV

SEQ ID NO: 8601 - protein, 169 aa, Zea mays
  VARIANT 6..169: note = Derived polymorphism lacks residues 6 to 169
  VARIANT 21: note = Ancestral polymorphism is P, Derived polymorphism is L
  VARIANT 22: note = Ancestral polymorphism is G, Derived polymorphism is E
  VARIANT 37: note = Ancestral polymorphism is S, Derived polymorphism is L
  VARIANT 115..169: note = Derived polymorphism lacks residues 115 to 169
MARKSWKASETQNSGTALNAPGIPIAIGLYLYGYCYSGHGVFPNIYSSLKIRNQFPSILFTCTHICFLFLVSIGLSTFLYAGAAVTGYKMFGEATESQFTLNLPDNSVISKIAVWTTTYILPCACFLAILKTKVGWHQIAACSFIIVVGVCCAYVGTYSSLSKIIQNYA

SEQ ID NO: 8602 - protein, 107 aa, Zea mays
  VARIANT 12: note = Ancestral polymorphism is A, Derived polymorphism is S
  VARIANT 36: note = Ancestral polymorphism is D, Derived polymorphism is H
  VARIANT 39..107: note = Derived polymorphism lacks residues 39 to 107
  VARIANT 70: note = Ancestral polymorphism is G, Derived polymorphism is R
  VARIANT 88: note = Ancestral polymorphism is Q, Derived polymorphism is R
MFEILLCIGNKADLIPDHSVQNIEYIEAFASNADFDKYRSVDGDSQGLVDGDSQGLERLLGALSAHMWPGIILKSRNRITTPFLVEKQESKYDEFNYDLEYEVVSWI

SEQ ID NO: 8603 - protein, 230 aa, Zea mays
  VARIANT 69: note = Ancestral polymorphism is T, Derived polymorphism is M
  VARIANT 83: note = Ancestral polymorphism is V, Derived polymorphism is A
  VARIANT 88: note = Ancestral polymorphism is S, Derived polymorphism is F
  VARIANT 109: note = Ancestral polymorphism is T, Derived polymorphism is I
MPLPLTTMRSPPLPNHKFFDKSWRKLHDAIREIYNHNCTGLSFEELYRYFEALVFINILLKFVVLVLATDTVHYNPFDLSSWVESMLSELNAPPSPLPPVTPAPRLASTMIARRCFYSTKIILSTFFVETPKMIKKSKDLDAIGEMKSRVTWIDKQLTSHPPKNIESKILREHIKKEREAAKAGKRSYYLKKSELCERKLVNKYNELKVKSTRFKGMLVNIDTNNGDPQV

SEQ ID NO: 8604 - protein, 146 aa, Zea mays
  VARIANT 53: note = Ancestral polymorphism is L, Derived polymorphism is P
  VARIANT 84: note = Ancestral polymorphism is R, Derived polymorphism is W
MISSASGTRASGSEIGALIEERRLDMLEKKALECSEPTVPSSKQNCQRFYFSPLYRWCHVHSSRHSGKRRCQGWNSGLTTVYPRMYLCDRANPPIPCELLRGHLDYTPHAWNIVPVKKRNGWVRMIVDACYPTNIKEETDPEYFCR

SEQ ID NO: 8605 - protein, 301 aa, Zea mays
  VARIANT 176: note = Ancestral polymorphism is T, Derived polymorphism is M
  VARIANT 172: note = Ancestral polymorphism is P, Derived polymorphism is H
  VARIANT 138..301: note = Derived polymorphism lacks residues 138 to 301
  VARIANT 83: note = Ancestral polymorphism is D, Derived polymorphism is Y
  VARIANT 62..301: note = Derived polymorphism lacks residues 62 to 301
  VARIANT 48: note = Ancestral polymorphism is V, Derived polymorphism is D
  VARIANT 34: note = Ancestral polymorphism is K, Derived polymorphism is N
  VARIANT 30..301: note = Derived polymorphism lacks residues 30 to 301
  VARIANT 24..301: note = Derived polymorphism lacks residues 24 to 301
  VARIANT 23: note = Ancestral polymorphism is P, Derived polymorphism is L
  VARIANT 11: note = Ancestral polymorphism is W, Derived polymorphism is C
MNWTCLIQGTWLMCSSSRGYLAPEYTIQGQLNKKSDVYSFGVLLLEIVSGRCHTDPRLPVDEQFLLEKVWTLYEFDDLESIIDRTLKRDFDTEEALWLLKVSLVCIPDSPKIKSSMSMVAKMLQGSSIKVEWMQSKLEGCAPSRITAAKAIVKAGIVVMAPQAISVLGGFRPQGKTIDNVVKVFFHGRIIVDWWCQVFFHGRCPGAPDCLTYLTSNKGRRLELCGLCGGDTGQEHFICLWPKLPCLILQTSNADPFSLMDMLIFKAVEEQVKKRVENKAMIFEQNATDSQRQDKPIALYEF

SEQ ID NO: 8606 - protein, 486 aa, Zea mays
  VARIANT 287: note = Ancestral polymorphism is T, Derived polymorphism is M
  VARIANT 123: note = Ancestral polymorphism is P, Derived polymorphism is L
  VARIANT 5: note = Ancestral polymorphism is E, Derived polymorphism is K
MEAAEERPRRRPAGLGVLALLCSSLLLNVLFLAYYYFLSPPSQLADGGSCGLSWALRAARDAEALAATDSCSGHGQVFLDGVVGEDGRPGCECNRCFDGPHCSIRTPNCTADATSGDPLFLEPYWKRHAAASAVLVPGWHRLSYATTDGLFQSVELENHIRRLHRAVGNAVVDGKRLVFGAGSTQLINALVHALSPDANAAAASPPARVVATAPYYPPYRTQTAMFDGREYRWEGTTAAAWANASRNSSSFIEFVTSPNNPDALLRAPVLRGSAVIADHAYYWPHFTHIAAPADEDVMLFTMSKPSGHAGSRLGWALIRDEKVAKRAYEYVQSSIMGASRDTQLRMLEIVKVMLANLHGEEDIFAFGHDVMRTRWRRLSAVVSRSRRISLQRINPQYCTYFNRVREPSPAYAWVKCEREEDDDCYEALLKARIITRSGAGYDASSRYTRVSLLKSDDDFEVLVERVTDLVNAENYDDDVPRGSSSM

SEQ ID NO: 8607 - protein, 382 aa, Zea mays
  VARIANT 367: note = Ancestral polymorphism is R, Derived polymorphism is S
MVAIENQSQAAVAAEAVAAPASRIPREARRLLHELAAAWADVADCRALEVVPLKGAMTNEVYQARWLTAGPAGQKEEPRAEREVRKVLVRIYGDGVDLFFDREDEVRTFECMSRHGQGPRLLGRFPNGRVEEFIHARTLSAADLRDPEISALVASKLREFHNLDMPGPKSVLIWDRLRNWLRTAKSLCPPEEAKEFRLDSLENQITALENECSGDYQWIGFCHNDLQYGNIMIDEETNVLTIIDYEYASFNPVAYDIANHFCEMAADYHSSKPHILDYSRYPDVDEQKRFVKTYLNISGNSELTVGLMVLYCSSVLHNCEEPDAEVVENLLQSIEKHTLASHLVWGLWGIISDHVNDIDFDYKEYARQRFEQYWHKSAILTS

SEQ ID NO: 8608 - protein, 275 aa, Zea mays
  VARIANT 175: note = Ancestral polymorphism is L, Derived polymorphism is Q
  VARIANT 174: note = Ancestral polymorphism is C, Derived polymorphism is W
MAGLYEKPSETYAKKRPQYPKEWFSMLAGLTAGHQRAWDAGCGTGQAAIGMAEHYESVVATDVSEGQIQHAIAHPKVRYLQTPEHLSEDEVVSLVGGEGSLDLVVVATSIHWFDVPLFYAVVKRALRKPGGVLAVWGYNYEIHPFEDALHGQLYPALRPYQDPRAVLAMERYRCLPFPFEPVGVGAEGAPADVDMEVEMTLEDLVGFLNTGSVVTTARAKGADLEAVCRDALKRVEDEWAGAPTVPRKLVFKAFMLAGRPPSAEKRSYRTEAPSC

SEQ ID NO: 8609 - protein, 653 aa, Zea mays
  VARIANT 497..653: note = Derived polymorphism lacks residues 497 to 653
  VARIANT 316: note = Ancestral polymorphism is V, Derived polymorphism is G
  VARIANT 298: note = Ancestral polymorphism is Y, Derived polymorphism is C
  VARIANT 257..653: note = Derived polymorphism lacks residues 257 to 653
  VARIANT 251..653: note = Derived polymorphism lacks residues 251 to 653
MWRELEHPRTDADQPFDREPYPDNADREHERVRQIEGMTGGRAVARCRPCARRGGRSDSEAGEPLVLGTGMLLVHLGRASVLILSFFQGSICGITFTFTNRCGDTVWPGLLSGSGTPPLETTGFALAPGQLRSLYVPQGWSGRFWGRSGCTFDASGKGSCATGDCGSGEVECHGAGASPPTTLAEFTLDDDGGKDFYDDNVCHRVQGEVGSLNDARYLENILLLLTGRQLDTATEIAASRGDVRLAILLSQAGGSMSNRSDLAQTLDQRKMNGLDFDYIEEDWLKAAFLDLPIDWKRYLGLIMWYQLSPDTPLDIVIRSYDQLLDEGPLDEAPQWSSGDHFDISFYLMLLHANKDEKFGLLKTMFSAFSSSFDPLDYHFIWHQRSILEAVGAFSSNDLHLLDLSFVYQLLCLGRCHWAIYVILHMPYLDDAPYIHEKLIREVLSQYCESWSRDDAQRQYIVEPGIPEEWMHEALALYHEYYGDKQGALENLIQCGNWKKAHTIFVTSVAHSMFLSFTSFIVILAQLTIRRSGGSQVPWRTTNFYVLKNSMQERNAMDDSGSLEEMSESCRSFFGRLNESLLVWGSKLPVESRACYSKMAEELCALLVDTPSETLNLPMGCLLTMLNAPLPDESRSSYLQDALSVFTKILCSDP

SEQ ID NO: 8610 - protein, 277 aa, Zea mays
  VARIANT 16: note = Ancestral polymorphism is L, Derived polymorphism is V
  VARIANT 103: note = Ancestral polymorphism is G, Derived polymorphism is R
MGPGLYSDIGRKARDLLTGGFNTGQQLVLITHCSNGTRIAASSTKSNEFIISEIQAQLKNKNVTVDVKANSEANLSTTVTVEELGVLGLKKIITIPYPHPAFGRLEIQYLHDYAGINASSTMNRKPLVNLSAVFGNKAIAAGADVVYDGATGDFTKYNAGLSFTNADLNAAVTLNNKGDSLTASYYHLVDTEKNTAVGVEVARNFSTKANRVTFGMRHALDPTTTVKARYSSNGMASALIQHEWRPKSFCTLSTEVDVNRFDFLQTPKFGLSLVLKP

SEQ ID NO: 8611 - protein, 267 aa, Zea mays
  VARIANT 224: note = Ancestral polymorphism is N, Derived polymorphism is I
MAFAEPWVRALSADQLRAAVEARLRGLVSRYAGRFPHYEVNNEMLHGAFYQQRLGDDINAHMFRETAQIDPAPALFVNDYNVESANDPNATPEKYVALVTDLQRRGAPVGGIGVQGHVTHPVGDIICDALDKLAVTGLPIWITELDVSAADESVRADDLEIVLREAFAHPAVEGIMLWGFMQGHMWRSHGQLVNADGKYTQAGNMFAGLRREWTSHARGKVDSIGNFKFRGFHGTYQVLLTTPAGEVKKRTFDVHKGDAPLVLDMDF

SEQ ID NO: 8612 - protein, 71 aa, Zea mays
  VARIANT 62: note = Ancestral polymorphism is G, Derived polymorphism is R
MKSPLIPPACRRHRHVIISALLASSPSSCNHISSPGAGAGSCHRLPLETVDDTSRYNCFEPGTVVLWSSTT

SEQ ID NO: 8613 - protein, 316 aa, Zea mays
  VARIANT 117: note = Ancestral polymorphism is R, Derived polymorphism is L
MGEEQVVAPKPEAAAAAAATSVELTGFVMGAEDAERAAAAAGVATVQDLLPLLVPSARKRAQVPISGFPVGAVGLGASGRVYVGVNLEFRGLPLCHSVHAEQFLVANAAAAGEPELRAVAVSHMPCGHCRQFLQEIRGAASIRILVTSDAAEGCAPEWRTVASLLLRPFGPHDLLPGDVPLVLEAHDNALGDPVANGLARSDLDARLRQAAEAAARAAHAPYSKCPSGFAVADGDGRIYAGGCLESAAYNPTLGPVQAAIIAMVAAGGCSAGDVVAAALVEKEQASVAQEATARIFLDAVAPHASFHVYNYRPSDA

SEQ ID NO: 8614 - protein, 469 aa, Zea mays
  VARIANT 41: note = Ancestral polymorphism is L, Derived polymorphism is F
  VARIANT 175: note = Ancestral polymorphism is P, Derived polymorphism is T
  VARIANT 202: note = Ancestral polymorphism is P, Derived polymorphism is A
MDASQGVLLSSSLVGGAKGSASWPELLGSAHWEGLLDPLDLTLRRLILLCGDLCQVTYDSFNSDTHSKYCGSCRYSRSTLFARTLFPAAADIFPAAYLYATSQSSFPGGIMVFSLSREAWNKESNWIGYVSVSTDAAAAATGQRVIYVAWRGTIRTLEWVDVLKPELVSPDAILPEGDPARGHARVMEGWYLIYTSSDERSPFSKYSAREQLLAAVRELVARYKGESLSIVCTGHSLGASLATLSAFDFAVNGVSRVGGADIPVTAIVFGSPQIGNPEFKKRFEELPNLRALHVRNMPDVIPLYPSGLLGYANAGDLLAVDSKKSPYVKHDSTNVGDYHNLQGILHTVAGWNGKDGEFKLQVHRSVALVNKSSAFLTDDNLVPESWWVERNKGMVIGETGLWQLEPPGEEPVPPFVTGKVIDDDDHVAATTTTTATASKETKTPVKDKNRLGTQLFSACFRGVNQSVDN

SEQ ID NO: 8615 - protein, 504 aa, Zea mays
  VARIANT 240: note = Ancestral polymorphism is W, Derived polymorphism is L
MVATKPRVAVVGAGVAGLTAAHRLCAAGGERFEVTVVEAGARAGGRVLTSEFAGHRVEMGATWVQGVDGSPVYALARDAGALACGKDLPPYERMDGFPGRVLTVAEGGEEVDADRVASPIEELYRGMMEAARAGEAGGGGGVEEYLSRGLRAFQAARPGGGKELEEVEDALLAMHINRERADTSADDLGDLDLATEGEYRDFPGEHVTIPAGYSRVVDHLVAALPPDTVRLGLRLRRLDWSETPLRLHFDDGATAISADHVILTVSLGVLKASLGKDAHAAGGIAFDPPLPQFKREAVARLGFGVVNKMFMELEAVPAARPEGDRGGGGEHPLAASAPPEFPFLHMAFRGHVSEIPWWMRGTESICPVHAGSSVALAWFAGREAEHLESLPDDEVIRGVHSTLDSFLPAPSRWRVKRIKRSGWATDQLFLGSYTYVPVGSSGEDLDRMAEPLPRRLDADVDVARAPPPRVLFAGEATHRTHYSTTHAAYLSGVREAERLLQHYA

SEQ ID NO: 8616 - protein, 849 aa, Zea mays
  VARIANT 737..849: note = Derived polymorphism lacks residues 737 to 849
MGRRGGGRGAGGGRFRGCALLAAAFVVSTFVIQGAGGLKQSHAPAVAHKVLLSITNWHPQNYLDDVLHPSEVQDRILERLGPAASPETAAHPAKHGKDHGAPVAAPSNVSHHHSMPANIVHGKTHATPVVVPEKRRHHHLPANITNVKGPAVSPSKSPIIHRKEHGIPVAAPPKEHSSYLPPANHRHHKGSPRPAPHKSNSTSAPSHGYPGSTAPAPVRLPPPKGKGEGNFAHAPNHPNQYHSTSYSPGSALPPAHPPDIPAFRKPKILAPAPSQSLLPPPTNSYCTTPCSDPLTNSPPGMTCLCVLPIKVELRFGIALYTFFTLVPELAQDIASGVFMNQSQVRVMGANAAPDDPEKTIVFIDLVPLGPKFDNATAFSVFERFCNKQVIINHNHFGKYDVLYVLYQGLPPSPPAASMNNGLSNVNGPSLHPLAADVGNYRERKGRHVIIIIILSSVCAFILCAGAALVLYFKLRNHIHLTEASLVPTKPTGPVSAMVGNRLESRPISASPSFSSSLVAYKGSAKTFNLVEMERATLGFDESRIIGEGGFGRVYEGILEDGERVAIKVLKRDDQQGTREFLAEVEMLSRLHHRNLVKLIGICTEGHSRCLVYELVPNGSVESHLHVDSIPSTHITKFWSISLRYLAPEYAMTGHLLVKSDVYSYGVVLLELLTGRKPVDMLRPPGQENLVAWAGSLLTSRDGLESIIDHSLGRSIPFDSIAKVAAIASMCVQPEVDQRPFMGEVVQALKLVCNEGGEFNESTFSQDLHIQDVEVMSRASTDVDVDPTLSAELFTSSARYDAIDAPGSFRRYSSSGPLRVGRTGLNKERGLSTGSSSEHVGLQRFRIDGE

SEQ ID NO: 8617 - protein, 169 aa, Zea mays
  VARIANT 160: note = Ancestral polymorphism is P, Derived polymorphism is S
  VARIANT 133..169: note = Derived polymorphism lacks residues 133 to 169
  VARIANT 116: note = Ancestral polymorphism is A, Derived polymorphism is S
  VARIANT 114: note = Ancestral polymorphism is L, Derived polymorphism is Q
  VARIANT 111: note = Ancestral polymorphism is I, Derived polymorphism is T
  VARIANT 105: note = Ancestral polymorphism is L, Derived polymorphism is H
  VARIANT 103: note = Ancestral polymorphism is T, Derived polymorphism is M
  VARIANT 60: note = Ancestral polymorphism is V, Derived polymorphism is F
  VARIANT 55: note = Ancestral polymorphism is N, Derived polymorphism is I
  VARIANT 49..169: note = Derived polymorphism lacks residues 49 to 169
  VARIANT 46..169: note = Derived polymorphism lacks residues 46 to 169
  VARIANT 43: note = Ancestral polymorphism is G, Derived polymorphism is R
  VARIANT 30..169: note = Derived polymorphism lacks residues 30 to 169
  VARIANT 8: note = Ancestral polymorphism is S, Derived polymorphism is L
MRDKVIYSSPNFDPKVFLSWVHKDTSAADLEAGALTLKTDLKGRTQQKKQLVKENFDYFVSCKTTIDDIESKLRQIEEDPEGATIRCYGCCSPLLHVNYVLNTILSLNMAIAFLVALVLDNTVPGGRQERGLYVWSEAEAAMREPTFMKDYELPFKIGRPFRWVKCVGL

SEQ ID NO: 8618 - protein, 317 aa, Zea mays
  VARIANT 10..317: note = Derived polymorphism lacks residues 10 to 317
  VARIANT 31: note = Ancestral polymorphism is G, Derived polymorphism is R
  VARIANT 40: note = Ancestral polymorphism is G, Derived polymorphism is E
  VARIANT 124..317: note = Derived polymorphism lacks residues 124 to 317
  VARIANT 162: note = Ancestral polymorphism is A, Derived polymorphism is V
  VARIANT 211: note = Ancestral polymorphism is H, Derived polymorphism is R
  VARIANT 265: note = Ancestral polymorphism is Q, Derived polymorphism is L
MPDDSLGGPWNYTNAASFIRYTVSKGYDVHGWELEIVAAGNELSGSGVRARIDADQYAADVIALKHIVDSAYQGKPSKPLVLASGGFFDAVWFTQLVSKTKPDQMDAITHHIYNLGPATFSNLQGILKSAGTSAVAWVGEAGGTYNSCHHLVTDAFVFSFCALLWHRLMGTKVLSTTFNSTNKIRAYAHCVKNSEGIALLLINLDGISTNRIYVTSQGAHAQSERKKGSGTSDVHIIPVGLGEAAAALTRQEYHLTPKDGNLQSQQLLLNGNVLATDADGEIPELEPVQVEGTQPITVGPYSTVFAHVPSFYAPTCL

SEQ ID NO: 8619 - protein, 439 aa, Zea mays
  VARIANT 7..439: note = Derived polymorphism lacks residues 7 to 439
  VARIANT 42..439: note = Derived polymorphism lacks residues 42 to 439
MGASGKWIRTLVGLRPAAERERPGAVAKGRKWSRLWRSSSSQRGSSAPASEAPSEASSTADMLSSSVVAAVVRAQPRDFRVIRQEWAAVRIQSAFRAFLARRALRALRGIVRLQALVRGRHVRKQLSVTLKCMNALVRVQERARERRFRISADGRHSQDILDDRSGLADPVKEAEAGWCDSQGTVDDLRSKMHMRHEGAVKRERAIAYALSHQRSSSHSGRPSSPAASLRNHGTGRSNKDWSHLDGSMATKPWESRLMEQTHTEHSNNSRCSESIEEMNAASSKLSDASSVKVRRNNMTTRVAAARPPPSTISASSSDFVCDASCSPSTSSVTPAASGTSFLTSDRRSDYGPNYMNWTKSAKARLNGSGTAHRLPLQRQRSSDLHHRISRIALSSADAQSTAGSEVSVTSKRLNSLTLRGRGARRSLDRKNDDQPVALF

SEQ ID NO: 8620 - protein, 238 aa, Zea mays
  VARIANT 85: note = Ancestral polymorphism is E, Derived polymorphism is G
  VARIANT 89: note = Ancestral polymorphism is K, Derived polymorphism is N
  VARIANT 91: note = Ancestral polymorphism is I, Derived polymorphism is F
MGDSAAGAPEPSRFGRICVFCGSNPGNRAVYGDAALDLGKELVAKGIDLVYGGGSVGLMGLIAQTVLGGGCSVLGVIPRALMPLEVCIKIINCPFLLFSSLCVPLISGASVGEVKVVSDMHERKAEMARQADAFIALPGGYGTMEELLEMITWSQLGIHDKPVGLLNVDGYYDPLLMLFDRGATEGFIKLDCRDIIVSAPTAHELLKKMEHYTRSHQEVAPRTSWEMSELGYGKASES

SEQ ID NO: 8621 - protein, 464 aa, Zea mays
  VARIANT 131..464: note = Derived polymorphism lacks residues 131 to 464
  VARIANT 71: note = Ancestral polymorphism is V, Derived polymorphism is A
MEPRVGNKFRLGRKIGSGSFGEIYLGTNIQTNEEVAIKLENVKTKHPQLLYESKIYRILQGGRQVGLTIFVLTAGIPNVRWFGVEGDYNVLVMDLLGPSLEDLFNFCSRKLSLKTVLMLADQMILSQIISSWVLEDELIRENKNLTGTARYASVNTHLGIEQSRRDDLESLGYVLMYFLRGSLPWQGLKAGTKKQKYEKISEKKVATSIEALCRGYPTEFASYFHYCRSLRFDDKPDYSYLKRLFRDLFIREGFQFDYVFDWTILKYQQAQIATAPPRAVVSFSNVPLLSYPPNMHICVTVCRDNFDVLPLLQGHGAGPSGLAPALQNDRQPGPEEARTSGWSSMDRRRAPLPITSVGTLSKQKAPISGPNFLGRSSGSSRRPVISSSRDAVVTDSSEPSRARTTDASPGVFRRASGPQRSSPVHSAEQKRSSSGRHPSNAKNYDSALKGIEGLTLDGDERVQY

SEQ ID NO: 8622 - protein, 433 aa, Zea mays
  VARIANT 176: note = Ancestral polymorphism is R, Derived polymorphism is C
MAAPNSNDAASASGTGPAGEEDISIEALARRVQEHMTLSSNPAARRHKFWETQPVGQFRDVADTSLPDGPIEPPTPLSEVRADPYPLPAAFEWLTCDLDDDALLADLYSLLAHNYVEDDENMFRFNYSPAFLRWALKPPSFFRAWHIGVRAKESKKLVAFISGVPARIRARDDVVRMAEINFLCVHKKLRSKRLAPVLIREVTRRVHQENIWQAAYTAGVVLPTPITTCRYWHRSLNPKKLIDVGFSRLGPRMTMSRTVRLYKLPDAPLTPGFRRMELRDVAAVTRLLRAYLARFVVAPDFDEVDVEHWLLPQEDVVDSYLVESPETHEVTDFCSFYTLPSSVLNNANYATLKAAYSYYNVSTKTALQQLMNDALIVAKQKNYDVFNALDVMENESFLKELKFGPGDGQLHYYLYNYRIRNGIKPSELGLVLL

SEQ ID NO: 8623 - protein, 242 aa, Zea mays
  VARIANT 180: note = Ancestral polymorphism is T, Derived polymorphism is I
MSEVFEGYERQYCEASASLSRKCTAASALDGEKKKQKLSEIQSGVEEAESLIRKMDLEARNLQPSIKAGLLAKLREYKSDLNNVKSELKRISAPNARQATREELLESGMADTLAVSTDQRGRLMMTTERLNQSTDRIKESRRTMLETEELGVSILQDLHQQRQSLLHAHTTVCTCLNSSTYYIDLISGFLIFSGCKAAIILANRTSITALIVNCPCSVLVLFIAISAWILFYAEHFFIKIEC

SEQ ID NO: 8624 - protein, 62 aa, Zea mays
  VARIANT 27: note = Ancestral polymorphism is D, Derived polymorphism is E
  VARIANT 9: note = Ancestral polymorphism is V, Derived polymorphism is I
MASKAFRAVAAAALAASALAGVAMAADAPAPSPTSGAAAVSSSVVAAVLCPAVALLFGSLRH

SEQ ID NO: 8625 - protein, 664 aa, Zea mays
  VARIANT 35: note = Ancestral polymorphism is D, Derived polymorphism is N
  VARIANT 67: note = Ancestral polymorphism is P, Derived polymorphism is L
  VARIANT 175: note = Ancestral polymorphism is L, Derived polymorphism is P
  VARIANT 215..664: note = Derived polymorphism lacks residues 215 to 664
MGAEGEGAVEEATGFEVCIVLPKLSRAAATGPTEDCVARLVRELEGAGLLVERVRGVPAEFIKLAAPMGTLGRAAADMQMKKLTYIGMELQFQWDQVAAFVRQPDGSLFSWRERYCCFRYLIYGIVNKTNSEIAIKFDGKEFHWKQSESLLTMLEAEGVVKRIFPLHDEIKRKQLLRNWALNWLDFTWQPIDEIYSYFGTKIATYFAFLGMYTRWLFFPAVFGLTTQLIDFGSLQWLVLPAFFIFVISWAVFFLQFWKRKNSALLARWGINCSLSEYKNLGIELSSLSDSLTVEEKKFCDVSAEKSKLQRNEWFGVLLRIRNNAIIVLAIICLQLPFELAYAHLYEITETEAMKYLLTAVYLVAIQYYTRIGGKVSVNLIKYENNQGEESSSASLVYKVFGLYFMQSYIGLFYHASLYRDILALRQVLIQRLIVSQVLENLIENSIPYLKYSYKKYIAVHKKKHEKESPVGRSVRLSTRVEKEYLKPSYTASIGAELEDGLFDGKYVLFGSYFLELALQFGMIMMFACAFPLIFCFAALNNVTEIRADALKLLVMLKRPEPRAAATIGAWLNIFQFLVVMAICTNCLLLVCLYDEEGKWRIEPGLAAILIMEHALLLIKFGFSHFVPEEPAWVKANRVRYVAQAQNVCSKQLLRSISKFDGKLD

SEQ ID NO: 8626 - protein, 96 aa, Zea mays
  VARIANT 48: note = Ancestral polymorphism is E, Derived polymorphism is D
  VARIANT 26: note = Ancestral polymorphism is R, Derived polymorphism is C
MPDGEKTTEATAKDVGGGSQPKPPSRRGSARFERLLSGLGAGPLVDVEPDKVKDEIRRWAKKVAALVRQLSFGAWAEKSDGGSSENHGAGDDGYES

SEQ ID NO: 8627 - protein, 401 aa, Zea mays
  VARIANT 2: note = Ancestral polymorphism is A, Derived polymorphism is T
  VARIANT 20: note = Ancestral polymorphism is L, Derived polymorphism is S
  VARIANT 30: note = Ancestral polymorphism is E, Derived polymorphism is V
MANLVNEWLSILYDQSVHYLHYGLLAARAEVLKSGNGNGYNNCMLEGYQGQYKYGSETFEASASPSGASYSKCKNDVVKSLKVDEACTHLKCSFGGIWNGGGGAGQKKLFVASFFFDMADEENGSHATKRGTYDENLVNGQIAQQLTGTHLVAIFLNISYLSPGASARSQDSQLRRREQNRLWQLGGVGMDEATKKVEATVLEIPRGSDMESVTENKVRTAAADRLGIDLSVSNRKLFVRGVVDEYLLSLSSQEEAKAAEEGDAGRESKDKERKEDEEEDEGKGGGKREYGDQGDLILCRLSSKRRVTLSEFKGRSLVSIREFYVKDGKEMPSAKEKSEEIISAGELICKSTFPPYSNQIHTGADLHPGPPGISMTMEQWEAFCNAAPAIEDAIKKLEDSD

SEQ ID NO: 8628 - protein, 467 aa, Zea mays
  VARIANT 64: note = Ancestral polymorphism is R, Derived polymorphism is C
  VARIANT 59: note = Ancestral polymorphism is F, Derived polymorphism is L
MAWSETDAALFAAVLGRDAAHHLSTTPPHQDAPAASAPELQARLQDLVERGGAWTYGIFWQESCAGGRAVLGWGDGHCRDGGAPHHDDADRSVARKRALLRLHALYGGGDDEGADYALRLDRVTAAEMYFLASMYFSFPEGAGGPGHALATARHAWATVDPAPGWYVRASLAQSAGLRTVVFLPCKGGVLELGSAVPVRETPETLRALQTALAVARPPAREECMRIFGQDLSPGGSARAPRSVDNWAPHPHLAAQATAASALASKEAAAGHKAPEPPRSIDFSKPGKPGHGQAGGEERRPRKRGRKPANGREEPLNHVEAERQRREKLNQRFYALRAVVPKISKMDKASLLSDAIAYIQELEDRLRGGGGGGGGCSAARPDSPDVEVKAMQDEVVLRVTTPLYAHPVSRVFHAIRDAELIVAASDVAVADEAVTHTLVLRSPGPEQLTAETVLAAMSRGMTSATPSP

SEQ ID NO: 8629 - protein, 185 aa, Zea mays
  VARIANT 42: note = Ancestral polymorphism is M, Derived polymorphism is T
  VARIANT 45..185: note = Derived polymorphism lacks residues 45 to 185
MAMAVASFVAASHHHGSHLAAGVPFSARVGRSLGRSGVTIYMRAQKKRNSESGSSSGGGDVRASSGRRVWRRRKLTKEDDMLRYKLDRIPFLEEKVRKVRENGKIICLDINQLMLSQENRFAFTMEVAEEANVYLEKNRHEYGLKKPILHVLSDRMNEAGFSRPEGYLYPYPIKPGPYFIKEEGN

SEQ ID NO: 8630 - protein, 74 aa, Zea mays
  VARIANT 38: note = Ancestral polymorphism is T, Derived polymorphism is K
  VARIANT 2: note = Ancestral polymorphism is P, Derived polymorphism is R
MPKDTFALGIILLILLFNVSAGQTIVVENDNPVTARLTKGHSRKILTEVQDYDYGGANSRHDPRRRPGTGGRNG

SEQ ID NO: 8631 - protein, 88 aa, Zea mays
  VARIANT 35: note = Ancestral polymorphism is R, Derived polymorphism is W
MAGLQRSSETFRRSGSSGTVWEDKHQSGELAKPARSRQQRSGSSRGYRASHVQPALDPPSPRVAACGFCSLFGKDKHHQPPRGKGRRR

SEQ ID NO: 8632 - protein, 390 aa, Zea mays
  VARIANT 324..390: note = Derived polymorphism lacks residues 324 to 390
  VARIANT 182: note = Ancestral polymorphism is G, Derived polymorphism is S
  VARIANT 136: note = Ancestral polymorphism is G, Derived polymorphism is S
  VARIANT 87: note = Ancestral polymorphism is P, Derived polymorphism is L
MAIGEAGDSSVGRLHEPRHQGAGGGGVRAWARKGVRICYENRSNRNGYKAGDMREGLKKHYARDCEFVAIFDADFLRRTVPLLQRDPGVGLVQARWRYINANECILTRIQEMSLNYHFAVEQEVGSACHAFFGFNGTAGVWRVAALADAGGWKERTTVEDMDLALPSTFKAYRYQQHRWSCGPANLFRKVLPEILHSDRVSLGKKFHLLYAFFFVRKVVAHLVTFLFYCVIIPACMLVQGDVCLPKYVAMYVSALITLLNAACTPRSCHLLIFWILFENVMSMHRSKAAVIGLLEASRANEWVVTDKLGSSKAAAAVVAKKKKQQLVRSRCCSTRREMHVLELTMGACLLYCAVYDIVFFGRNHYYMYLLLQSAAAFIVGFGYVGTLAPS

SEQ ID NO: 8633 - protein, 61 aa, Zea mays
  VARIANT 27: note = Ancestral polymorphism is S, Derived polymorphism is F
  VARIANT 19: note = Ancestral polymorphism is A, Derived polymorphism is T
MGRLGGGLGAATPSSFVRAAWQAVRWSVVVPTLQLAVYICAAMSLMLFLERLYMAVVVTGL

SEQ ID NO: 8634 - protein, 537 aa, Zea mays
  VARIANT 327: note = Ancestral polymorphism is S, Derived polymorphism is L
  VARIANT 325: note = Ancestral polymorphism is R, Derived polymorphism is W
  VARIANT 298..537: note = Derived polymorphism lacks residues 298 to 537
  VARIANT 296: note = Ancestral polymorphism is R, Derived polymorphism is C
  VARIANT 277: note = Ancestral polymorphism is G, Derived polymorphism is C
  VARIANT 262: note = Ancestral polymorphism is G, Derived polymorphism is D
  VARIANT 210..537: note = Derived polymorphism lacks residues 210 to 537
  VARIANT 202: note = Ancestral polymorphism is L, Derived polymorphism is H
  VARIANT 152: note = Ancestral polymorphism is R, Derived polymorphism is H
  VARIANT 114: note = Ancestral polymorphism is G, Derived polymorphism is R
  VARIANT 110: note = Ancestral polymorphism is R, Derived polymorphism is W
  VARIANT 27: note = Ancestral polymorphism is S, Derived polymorphism is F
  VARIANT 25: note = Ancestral polymorphism is R, Derived polymorphism is Q
  VARIANT 21..537: note = Derived polymorphism lacks residues 21 to 537
  VARIANT 18: note = Ancestral polymorphism is R, Derived polymorphism is H
MGRLGGGLGAATPPSFVRAAWQAVRWSVVVPALQLAVYICAAMSLMLFLERLYMAAVVTGLWLRRRRRHRVAGDGQRVLDDDDDLEADAGRCCPMVLVQIPMFNEGQVYRLSIGAACGMSWPSERLVIQVLDDSTNPAIRELVEVECARWARKGVRICYENRSNRNGYKAGAMREGLKKHYARDCEFVAIFDADFQPDSDFLRRTVPLLQRDPGVGLVQARWRYVNADECILTRIQEMSLNYHFAVEQEVGSACHAFFGFNGTAGVWRVAALADAGGWKERTTVEDMDLAVRASLRGWRFVYVGDLVVRNELPSTFKAYRYQQHRWSCGPANLFRKVLPEILRSDRVSLGKKFHLLYAFFFVRKVVAHLVTFLFYCVVIPACVLVQGDVRLPKYVAMYVPALITLLNAACTPRSCHLLIFWILFENVMSMHRSKAAIIGLLEASRANEWVVTDKLGSSKAAAAVVAKKKKQQLVRSRCCSTRREMHVLELAMGVCLLYCAVYDIVFFGRDHYYMYLLLQSAAAFIVGFGYVGTTTPS

SEQ ID NO: 8635 - protein, 197 aa, Zea mays
  VARIANT 33: note = Ancestral polymorphism is L, Derived polymorphism is P
  VARIANT 100: note = Ancestral polymorphism is L, Derived polymorphism is Q
MFNEGQVSLGKKFLLLYAFFFVRKVVAHLVTFPFYCVVISACVLVQGDVRLPKYVAMYVPALITLLNAACTPRSCHLLIFWILFENVMSMHRSKAAVIGLLEASRANEWVVTDKLGSSKAAAAVVAKKKKQQLVRSRCCSTRREMHVLELAMGACLLYCVVYDIVFFGRDHYYMYLLLQSATAFIVGFGYVGTSAPS

SEQ ID NO: 8636 - protein, 205 aa, Zea mays
  VARIANT 9: note = Ancestral polymorphism is I, Derived polymorphism is V
  VARIANT 21: note = Ancestral polymorphism is S, Derived polymorphism is F
MFRYLAALILVVALATCTNKSVDARVVHPIVTLEADGSSPTSGDGRRLISSTNQDELGALCQQMHYKTLCSTMTTLPGVTTPEQLLDASLRITAVKAAMAEMKLDNAIKSGSAQGNPMMSSLKTCKESYASLVDSINTTRNTLKSGGSNADLMSELSAADTFATDCGDTFDERPDLNSPIPGAQRHVNRLISNCLDLAATIKEQP

SEQ ID NO: 8637 - protein, 429 aa, Zea mays
  VARIANT 225: note = Ancestral polymorphism is A, Derived polymorphism is V
MAGAVSALFLLDIKGRVLVWRDYRGDVSALQAERFFTKLLDKEGDSEVHSPVVYDDAGVTYMFIQHNNVFLLTAARQNCNAASILLFLHRVVDVFKHYFEELEEESLRDNFVVVYELLDEMMDFGYPQYTEAKILSEFIKTDAYRMEVTQRPPMAVTNAVSWRSEGIRYKKNEVFLDVVESVNILVNSNGQIVRSDVVGALKMRTYLSGMPECKLGLNDRVLLEAQGRATKGKAIDLDDIKFHQCVRLARFENDRTISFIPPDGSFDLMTYRLSTQVKPLIWVEAQIEKHSRSRIELMVKARSQFKERSTATNVEIEVPVPSDATNPNIRTSMGSAAYAPERDAMVWKVKSFPGGKEYMCRAEFSLPSITAEEGAPEKKAPIRVKFEIPYFTVSGIQVRYLKIIEKSGYQALPWVRYITMAGEYELRLI

SEQ ID NO: 8638 - protein, 229 aa, Zea mays
  VARIANT 99: note = Ancestral polymorphism is D, Derived polymorphism is E
MGRHAGSGGGVQQKLRKGLWSPEEDEKLYNHIIHYGVGCGKSCRLRWINYLRPDLKRGSFSQQEEDAIVGLHEILGNRQQPAQRLLGDRHHQQQQQVFDPFPLTDSFGGGFDDAAGAALYGHMGGGGKQQDAAAFVDYSSVLDVSENLGYGESSSNSSNNWNCAPEVNNNNNALDGGDAPLHWASESKAAPFAGYGAEEQSLLEHKLLPHFDFDIGRAAVVGDFSLDFF

SEQ ID NO: 8639 - protein, 645 aa, Zea mays
  VARIANT 202..645: note = Derived polymorphism lacks residues 202 to 645
MKASGALGDGGTPPPSQADLSSPRDYVGHGSHTLSTAGGSLVPGASVLGHHGRGVAAGGSPGARVAAYKACYGPGCSGVDILAAIVAAVADGVHVLSLSLGAPPADYLTDLTALGAFFAVQSGVTVVCAAGNSGPQPSTATNLAPWILTVGASTMDRDFPANVSFNGDTIQGQSLADSTLPIGQPYPIISGGKANAANQPTGNSCASDSQPAVCCSDRRVPYELNVLLVPACLPACRSLCLPSSLDPAKVKGKIVVCVRGVNARAEKGFVVKQAGGVGMVLCNDASTGDTVVADAHVLAAAHCSYSQCVRLFNYLQSTNDPLGYINATDASFGVKPAPKIAAFSSRGPNAITPQILKPDITAPGVSVIAAYSGAVSPTELPFDDRRVPYNIMSGTSMSCPHVAGIVGLLKTKYPAWSPAMIKSAIMTTANTTANDGNPIQDETGAVATPFGYGSGHVDPVKALDPGLVYDTTLLDYTNFLCSLKPTQNPLPSLPVDLLPLLGNLSQPLVGLLLPLFDAAGEPCKCSKGPYGRPEDLNYPSIAVPCLSGSATVKRRLKNVGAPGKYRVKVTEPAGIKVTVVPSELYFGVGEEKEFTVKMDVDVNAPAANNDYVFGSVVWSDAAAYASDVSKAHRVRSPVVVKTKCG

SEQ ID NO: 8640 - protein, 549 aa, Zea mays
  VARIANT 72: note = Ancestral polymorphism is T, Derived polymorphism is M
  VARIANT 146: note = Ancestral polymorphism is N, Derived polymorphism is Y
MKPKRVSFKKRAVTVGYKFRHSLWRKSKMKNDNHVASIDDIRDGQELEIVERFRECLIDEGLLPEHHDDYHMMLRFLKARKFNIDKAKQMWSEMLRWRKEFGADDIEEFDYTELDEVVKYYPQLYHGVDKGGRPIYIELIGKVDTNKLVQITTIDRYVKYHVKEFERCLQMRFPACSIAAKRHIDSSTAILDVKGVGVRVAINLFLQIKGLKNFTKVARELIMRLQNINNNNYPETLQQLCIINAGQGFKMLWGTIKSFLDPETASKIHVLGNKYQTKLLEIIDDSELPEFLGGKCRCEEYGGCLKSNKGPWKDPEIVKKVINGEANYVRQVIAVSNINQKEVSCTEHSTSKFRGHASSSDAPPFIRGSIPVASEVVDACSNPRNSSMPSSSGSFSLRNIPATLGGLKTRIFKWPTVLILSLLAFLHSVLSVVIKRLSQQAITCDFQGYTGNGTLTSVLARLGELEEKVQAIEAKPPQVPFEKQELLHTFVNRVGVLEAELISMKKVLYETLVRQDELLAYIDQQRTAKFCVSYNRLYSLHFPFKSVSF

SEQ ID NO: 8641 - protein, 380 aa, Zea mays
  VARIANT 224: note = Ancestral polymorphism is S, Derived polymorphism is L
MASSLLHCPDKLPFLDVEAILHMKEGLGETSYAQNSSLQKRGMDTLRSLITSTATDVYVSQMPERFTVADLGCSSGPNALCLAEDIVGSIGRACGRSSRPPPEFSVLLNDLPTNDFNTIFFSLPEFADRLEAAARTDEWGRPMVFLSGVPGSFYGRLFPRTSVHFICSCSSLHWLSQVPPGLFDETDNRPVNKGKMYISSTSPAAVPLAYLRQFRRDFGVFLRSRAAEVVPGGRMVLAMLGRQTEGYVDRRTTFLWELLSESFAALVSQGLVEQEKVDAYNVPFYAPSVREVEEEVRREGSFRLDHVQTYEINLSSSGDAKEDGRTVSMAIRAIQESMLSHHFGTDIVDALFHRYTELVTESMEREDVKSVQIGVVLTRL

SEQ ID NO: 8642 - protein, 375 aa, Zea mays
  VARIANT 15: note = Ancestral polymorphism is L, Derived polymorphism is I
  VARIANT 59: note = Ancestral polymorphism is L, Derived polymorphism is V
  VARIANT 67: note = Ancestral polymorphism is C, Derived polymorphism is Y
MDASVAKQLRRVRTLGRGASGAVVWLASDDASGCLLTVKAAGAGGAAQLQREERVLEDLCSPHIVPCLGSRTAAGGEYQLFLEFAPGGSLADRAAQSGGRLAQPAIQAYTRDITRGLAYLHGRSLVHGDVKARNVVIGGDGRARLTDFGCARSVQPSPSRPIGGTPAFMAPEVARWEEQEPAADVWALACTVIEMATGRAPWTDVGDVFAAVHKIGYTDEVPELPAWLPAQAKDFLRQCLARDPRNRPTASQLLEHPFLASALCDGNGNNADPTKHDWTSPNSTLNAAFWESDEDEDEETSERAFERISSLASHCTDLPDWDLELEEGWIQARGDCSRVSEAPAAMLTTSFALGCEALDAAAAVVVVEGRSAFAT

SEQ ID NO: 8643 - protein, 341 aa, Zea mays
  VARIANT 99..341: note = Derived polymorphism lacks residues 99 to 341
  VARIANT 8: note = Ancestral polymorphism is S, Derived polymorphism is I
MPDHHLHIYFRYLVDHPQLLKDDADAVGTNKGSTEREHASSGGALSLLGTTYDSGDEDEGTLPRSSESMNPRNSMTSEALMCRAIPSHMVEVLTTRTKEILVTGGTEEILRVTTEALLSALTTVLDQDALSERISNGEADASLTVASKEADSSEASMTKEQKLKAERLRRAKMFAAIIKSGDKKMNDLAVFAAIIKSGDKKMNDLAASSDPTSEAAKAIPDMNVSGLDQQSVAKEREGSSDPFEHEGPNLTNHNKDSDDEPNRVRKYRKKHRESHEEKDESEDIYKHSRKRHHPEHSRGPSKDVHKHKHKSLKVAQKCPRLDQVPSLNQTSCSMTLHNQLR

SEQ ID NO: 8644 - protein, 214 aa, Zea mays
  VARIANT 31: note = Ancestral polymorphism is D, Derived polymorphism is Y
  VARIANT 39: note = Ancestral polymorphism is A, Derived polymorphism is V
  VARIANT 41: note = Ancestral polymorphism is A, Derived polymorphism is V
  VARIANT 72: note = Ancestral polymorphism is P, Derived polymorphism is S
  VARIANT 79..214: note = Derived polymorphism lacks residues 79 to 214
  VARIANT 83: note = Ancestral polymorphism is D, Derived polymorphism is N
  VARIANT 85: note = Ancestral polymorphism is R, Derived polymorphism is H
  VARIANT 87: note = Ancestral polymorphism is A, Derived polymorphism is V
  VARIANT 88: note = Ancestral polymorphism is R, Derived polymorphism is W
  VARIANT 102: note = Ancestral polymorphism is G, Derived polymorphism is R
  VARIANT 125: note = Ancestral polymorphism is T, Derived polymorphism is M
  VARIANT 131: note = Ancestral polymorphism is A, Derived polymorphism is T
  VARIANT 145: note = Ancestral polymorphism is G, Derived polymorphism is S
MSALSWVDVMAASGMEDEIVSGEVREQEDDDDNVPQLSAAAMEALREFLAGQHRPEEQNEAGGGEDGVELVPEDWRLSQFWYDEHTARELVEEVVRLVSPSRSGSAAGAVACIACPTLYAYLKKTVPGVPAQLLEYEERFGQYGGDFTFYDYNRPEELPAAMKHAYRVIVADPPYLSKECLEKVAKTVSFLARPEGSFLLLLTGNCSSWQCSVE

SEQ ID NO: 8645 - protein, 200 aa, Zea mays
  VARIANT 30: note = Ancestral polymorphism is V, Derived polymorphism is A
  VARIANT 54: note = Ancestral polymorphism is G, Derived polymorphism is D
  VARIANT 65: note = Ancestral polymorphism is Y, Derived polymorphism is H
  VARIANT 71: note = Ancestral polymorphism is G, Derived polymorphism is R
  VARIANT 81..200: note = Derived polymorphism lacks residues 81 to 200
  VARIANT 96: note = Ancestral polymorphism is S, Derived polymorphism is F
  VARIANT 106: note = Ancestral polymorphism is C, Derived polymorphism is Y
  VARIANT 133: note = Ancestral polymorphism is T, Derived polymorphism is M
MPFGSKAKAYIDSKSLAYLTAKQALADFAVQLTDLKRNLSAEGSPVVLFGDSYGGMLAAWIRLKYPHIAIGALASSAPILQFEDIVPSTIFYDLVSDDFRRESLSCFLKIKDSWKELDDQANKQDGLLKLSKTFHLCQTLKTSGDLSDWLSSAYSYLAMVDYPLSSKFLRPLPANPIKKLVCRNIDSQPKGTGTLERICA

SEQ ID NO: 8646 - protein, 133 aa, Zea mays
  VARIANT 106: note = Ancestral polymorphism is E, Derived polymorphism is K
  VARIANT 92..133: note = Derived polymorphism lacks residues 92 to 133
  VARIANT 75: note = Ancestral polymorphism is P, Derived polymorphism is L
  VARIANT 64: note = Ancestral polymorphism is G, Derived polymorphism is A
  VARIANT 60..133: note = Derived polymorphism lacks residues 60 to 133
  VARIANT 58: note = Ancestral polymorphism is P, Derived polymorphism is L
  VARIANT 38: note = Ancestral polymorphism is T, Derived polymorphism is I
  VARIANT 37: note = Ancestral polymorphism is A, Derived polymorphism is V
  VARIANT 13: note = Ancestral polymorphism is A, Derived polymorphism is V
MMHGLDLSPYFLAVAAQKEEKLSRPKPIRWVHANGEVTGLSSDSFDLVSLAYVCHECPARAITGLVKEAFRVLRPGGTIALTDNSIYFHVFQELSPVLFTLMKSTEPFPGRVLHAGFGGDDEKSGALLTFAPS

SEQ ID NO: 8647 - protein, 479 aa, Zea mays
  VARIANT 143..479: note = Derived polymorphism lacks residues 143 to 479
  VARIANT 186: note = Ancestral polymorphism is A, Derived polymorphism is V
  VARIANT 210: note = Ancestral polymorphism is R, Derived polymorphism is C
MEATAAETGLAQRPVVLYPSPGMGHLVSMIELGKLLGARGLPVTIVVVEPPFNTGATAPFLAGVSAANPSISFHRLPKVERLPLVSTKHQEALTFEVIRVSNPHLREFLAAATPAVLVVDFFCSIALDVAEELRVPAYFFFTSGAEVLAFFLHLPALHERATASFQDMGEEPVQVPGIPPFPATHAILPVMERDDAAYDGFVKGCADLCRSQGVLVNTFRLLEQRAVETVAAGHCTPPGLPTPPIYCIGPLIKSEEVLGKGGEECLAWLDAQPRASVVLLCFGSIGRFSAEQIREVAAGLEASRQRFLWVVRAPPSDDPAKKFEKPPEPDLDALLPEGFLARTKDRGLVVKSWAPQRDVLAHASVGGFVTHCGWNSVLEAIMAGVPMVAWPLYAEQRLNRVFLEKEMQLAVAVAGYDSDKGLVPAEEVAAKVRWIMDSEGGRMLRERTLAAMRQAKDALREGGESEATLAGLVDDWKRT

SEQ ID NO: 8648 - protein, 125 aa, Zea mays
  VARIANT 19: note = Ancestral polymorphism is L, Derived polymorphism is S
  VARIANT 30: note = Ancestral polymorphism is E, Derived polymorphism is D
  VARIANT 32..125: note = Derived polymorphism lacks residues 32 to 125
  VARIANT 38: note = Ancestral polymorphism is G, Derived polymorphism is S
  VARIANT 45: note = Ancestral polymorphism is R, Derived polymorphism is I
  VARIANT 57: note = Ancestral polymorphism is A, Derived polymorphism is V
  VARIANT 87: note = Ancestral polymorphism is A, Derived polymorphism is V
MCLGEMATQDDENRVRKLLSAIGKVWTAEEKYFDAVTGLRYPIYRIPTGPTLKDLDACFLTFHCLATPCKDCDPPTLACPGFGELTAAQLQLGNYLCLSLGWHLTNYVPPFGHLTKPKNGTASPL

SEQ ID NO: 8649 - protein, 154 aa, Zea mays
  VARIANT 135: note = Ancestral polymorphism is R, Derived polymorphism is M
  VARIANT 118: note = Ancestral polymorphism is A, Derived polymorphism is V
  VARIANT 98: note = Ancestral polymorphism is E, Derived polymorphism is K
  VARIANT 88..154: note = Derived polymorphism lacks residues 88 to 154
  VARIANT 82: note = Ancestral polymorphism is S, Derived polymorphism is F
  VARIANT 28..154: note = Derived polymorphism lacks residues 28 to 154
  VARIANT 27: note = Ancestral polymorphism is G, Derived polymorphism is C
  VARIANT 22: note = Ancestral polymorphism is D, Derived polymorphism is V
  VARIANT 14: note = Ancestral polymorphism is G, Derived polymorphism is R
  VARIANT 11: note = Ancestral polymorphism is P, Derived polymorphism is L
  VARIANT 9: note = Ancestral polymorphism is P, Derived polymorphism is L
MTDTATVLPLPDIRIKDATTKDFFLQCWFIFGPDVVISYAYRSIRARSSPIKKAANKLFTIEIRNEDVAGESRVENPKRWGSVREPRGFGFIQYFDPEDASDAKYHMDGKMLLGREIVVVFAEENRKKPSDMRAREKNKWQRPFLLWEVALKVT

SEQ ID NO: 8650 - protein, 108 aa, Zea mays
  VARIANT 25: note = Ancestral polymorphism is D, Derived polymorphism is V
  VARIANT 24: note = Ancestral polymorphism is R, Derived polymorphism is W
MPLGDGAEAADFVLSDELLAALPRVPYKQLDLARRITALAVSDRVSGLEREAGRLRAEATGKDRENAELRERVVLLDTALQETNARLRSPMLTMADLPTGTRDPAREF

SEQ ID NO: 8651 - protein, 366 aa, Zea mays
  VARIANT 139: note = Ancestral polymorphism is G, Derived polymorphism is C
MAFAVTLTPLRATAVLAGWRRRPGVTPPRFAVVLATSTGVGGERTPPTFRRLREELLQLHAEADLTQSKANSERVRLVRLTEAAENLKKRAATSVRMGKESEAVDLLVQKKKLTKALENIKERIEVLDMLSAKISEVNGMVFYLVKSQNWYFGQLLLSIYSTVEYSGTYCCEFLFLNLMVYATLNDQFCWIQVISMKQNMLIEYALRPETSNGEDSDDKIRVFSSTVNVGTNGAGSSDSHPKSVEKESFELRNEAHAIASMADDAEQSALQMSDSFSFLNNSDPANYIKNHSAYDDLIEHINLQMKSLEYEIEQFINSQSVEEVGSEKQRSDKWQRLSDIQMLIKETREKIARILGMIVEETESGT

SEQ ID NO: 8652 - protein, 1278 aa, Zea mays
  VARIANT 1113..1278: note = Derived polymorphism lacks residues 1113 to 1278
  VARIANT 1101..1278: note = Derived polymorphism lacks residues 1101 to 1278
MAGGARHGSEDDAETTTTNEGRRSSDHAAGATTNYSEHKQLVPFLDMLKYADRTDAALMAVGTVAAVANGMTEPLMTVVFAAVIECFGAGDDATILHRVSKSNVIRYHTKTDTVIFKLFTVEVSCWTVAGERQSTRLRSLYLEAVLRQDIAFFDVEMTTAEAASRMSADTVLIQDALGEKVGKYIQLLTTFVGGFIIGFIRGWMLALVMLACIPPSILSFATVSRLRAQISRKRQESYEDAGNIVEQTIGAIRTVVSFNGEKKAIAMYNNHIKKAYKATIMEGIITGLGVGSIFFVVFSSYSLAFWYGAKLIISKGYTGGQVINIVFAILVGSMAIGTASPSISAIAEGQSAAQRLFEIINRKPNIDINDTSGIVLEDIEGDVELKDVFFRYPARPEQLILDGLCLQVPSGTTMAIVGESGSGKSTVISMVERFYDPQAGEVLVDGVNIKSLQLQWLRGKISLVSQEPLLFMTSIKDNITYGKADATIEEIKRAAELANAATFIEKLPDAYETTVGQHGSQLSGGQKQRIAIARAILKNPKILLLDEATSALDVESERVVQEALNRIMVGRTTLIVAHRLSTIRSADCIAVVHQGKVVERGVHDKLIKDPDGAYSQLIRLQQAHATERHEVPDTDVSGSIYKSRSLPLEQSTGRDSPRNKGHHSFTKTTGLSKELNRQDFTDRQEDQEHGNSKAPKKAPIGRLFKLNKPEAPVLLLAAIVAFVHGLLFPSFSIMMSGGIRTFYYPPHQLRKDSRFWALTCLLFAVIALISIQLEYFLFGVAGGKLIQRVRSLSFQSIVHQEVAWFDEPSNSSGALGARLYIDALNIRRLVGDNLAILVQCIVTIAAGFSIAFASDWKLTLIVICVIPVMGSQNYIQVKFLKGFSEDAKVMYEDASQVVTEAIGSIQTVASFCAEKRVITSYIQKCQASMKHGIRSGMVGGLGFSLSNLIMYLTYALCFYVGALFVHEGKTTFKDVFRVYFALIFTAFGVSQTSATATDSTKAQESTISILTIIDRRSKINSTSDEGVIIEKVDGNIDFRHVSFKYPSRPDVQVLSNFTLAIPARKTVALVGESGSGKSTIISLLERFYDPDSGTISLDGTELKKLKLSWLRDQTGLVSQEPVLFNNTIRTNIAYGKQGEVREDEIVAAAKAANAHEFISSLPQGYSTIVGERGTQLSGGQKQRVAIARAILKDPKILLLDEATSALDAEGEHIVQDALDQVMVSRTTIVVAHRLSTIKGADMIVVMKDGEVAEKGKHEYLVGKGGVYASLVELHSKSA

SEQ ID NO: 8653 - protein, 440 aa, Zea mays
  VARIANT 52: note = Ancestral polymorphism is S, Derived polymorphism is L
  VARIANT 71: note = Ancestral polymorphism is V, Derived polymorphism is E
MRPTPALVAGGRMVTSFLSATEWMLPSPATQVHTISVLPSRRDFAFSNLTMLLRNSGGNEGESGSTKFHVVRDDLLHPLANGNKARKLDALLPILRRCGVTDIVTCGGCQSAHAAAIAVHCAEWGIRPHILLRGEQLDVPTGYNLISLMFGNVTYVSRSLYAQRDEMLYEHAIKVAGYSGTVMWADEVIGKGLGVDEDTTDGNGSRRVMIVKEGAGSVQALLGVMRLLKYLSGLTLFRKDEKVHIVVDSGTGTTAVGLALGACYSPCIFATYHISFNSLTCRLQWRVTAVMLADTLEGYKQRERSLLSDFEKVFPEIYHGMVEDATHDNLVQWVERFSPRRSQHIQNQTLILEDNIQDSTYPDYGFGKVLDGEIAMCRQVAQQTGILLDPMYTLAAWEQAVDICCGDSEAKVLMIHTGGTLGLFGLAQRYSSQFNTGEQP

SEQ ID NO: 8654 - protein, 391 aa, Zea mays
  VARIANT 243: note = Ancestral polymorphism is F, Derived polymorphism is S
  VARIANT 199: note = Ancestral polymorphism is P, Derived polymorphism is L
  VARIANT 89: note = Ancestral polymorphism is G, Derived polymorphism is E
MPVKRSASALALPPVGRRARARLCIRLAAPLSFLLLFVALFHAQPLLGVPPAAQPPSAGPGKVAFLFLVRAGVPLDFLWDAFFRNGEEGKFSVYVHSAPGFQLDRTTTGSPYFYGRQLARSVKVVWGEATMVEAERMLFAAALQDPANQRFVLLSDSCVPLYNFSSIYTYLMASPKSFVDSFVDKTEKRYNQNMSPAIPKDKWRKGSQWVVLIRKHAEVVVGDKNVLKVFRRHCKMVVTKSLFRRRPNARQLGFTFRRKQILKGVAQQEHDCIPDEHYVQTLFSIKGLEDELERRTLTYTSWNQSSNPKDKMTWHPMKFEYDTSSPEHINAIKRIDHVNYQMEHRTEWCQCNGTSAPCFLFARKFSYSAAMHLLEQGAIGTPKSAQLMINF

SEQ ID NO: 8655 - protein, 176 aa, Zea mays
  VARIANT 153..176: note = Derived polymorphism lacks residues 153 to 176
  VARIANT 137: note = Ancestral polymorphism is G, Derived polymorphism is V
  VARIANT 113: note = Ancestral polymorphism is G, Derived polymorphism is R
  VARIANT 48..176: note = Derived polymorphism lacks residues 48 to 176
MLKTTKTKIRYVGYGKRFILKKIRDFKDFLDNVQYKTSGILRYERIFGEGYVSTGGIEIIKEFVDKLDLKPGYKVLEVGCGIGEDKPFLFKSFFKWLKPRGKVLISDYCKCPRKPSEEFAAYIKQRGYDLHDVEAYGQMLKSAGFRDVIAEDRTDHVSLQLAFALRPCLDAYVFTT

SEQ ID NO: 8656 - protein, 627 aa, Zea mays
  VARIANT 196..627: note = Derived polymorphism lacks residues 196 to 627
  VARIANT 157..627: note = Derived polymorphism lacks residues 157 to 627
  VARIANT 141: note = Ancestral polymorphism is R, Derived polymorphism is C
  VARIANT 133: note = Ancestral polymorphism is A, Derived polymorphism is V
  VARIANT 11: note = Ancestral polymorphism is Y, Derived polymorphism is H
MAALQSWRKAYGALKDTTTVSLANLNSDFKDLDVAIVRATNHVESPPKERHLRKIVAATSIARPQADVTYCIHALARRLAKTRNWIVALKTLVVIHRLLREGDPAFREEFLTFTQRVRILQLSNFKDDSSPVAWDYASWVRTYGLFLEEKLECFRVLKYDIEAARLSKQGQGPEKGHSRTTELNSQDLLEQLPALQQLLYRLIGCRAEGAAKNNYLVQYALAQVLKESFKIYCAINDGIINLIDKFFEMPKHEALKALDVYKRAVHQAGNLSDFYESCQGLELARNFQFPTLREPPQTFLSTMEEYVKEAPRMMPVVEPLVISWALVNHLDFCMTPSHFITSSSLNVVNVTHSFWEINDYRQVKFIPADLLIVEWILKYGLSFLFHQELPERLLLTYKPEEEVHDTVPIVAEKLQVVEEIAPVPSSQIALPPKPEIADTGDLLGLGDSTPTVLAIEESSALALAILPTGIDNSTTTTQQDSGFDPTGWELALVTTSSNATPLSMESNLGGGFDKLTLDSLYDDGTYRQMQQQQLYGSAPPNPFMASDPFAVSNQVAPPPSVQMAAMAPQPQHLPMMIEPNPFGPPQQHHAGVAPAANPFLDAGFGAFPAVNGMHPQTNPFGGAAQLL

SEQ ID NO: 8657 - protein, 85 aa, Zea mays
  VARIANT 73..85: note = Derived polymorphism lacks residues 73 to 85
  VARIANT 71: note = Ancestral polymorphism is V, Derived polymorphism is L
  VARIANT 66: note = Ancestral polymorphism is D, Derived polymorphism is V
  VARIANT 61..85: note = Derived polymorphism lacks residues 61 to 85
  VARIANT 57: note = Ancestral polymorphism is D, Derived polymorphism is N
  VARIANT 52: note = Ancestral polymorphism is K, Derived polymorphism is N
  VARIANT 47: note = Ancestral polymorphism is M, Derived polymorphism is T
  VARIANT 41: note = Ancestral polymorphism is M, Derived polymorphism is T
  VARIANT 36: note = Ancestral polymorphism is D, Derived polymorphism is N
  VARIANT 33: note = Ancestral polymorphism is R, Derived polymorphism is K
  VARIANT 22: note = Ancestral polymorphism is M, Derived polymorphism is V
MPVSLAKPRCKPPYVVLRVVQVCDLKCMFLEDRKFDSEKAMQMWWEMMRWRKEFGADTVLEDFEFDELDDVLQYYPQGYHGIDRE

SEQ ID NO: 8658 - protein, 1339 aa, Zea mays
  VARIANT 1032..1339: note = Derived polymorphism lacks residues 1032 to 1339
MEFGAGGSRWPLPRGDAAEARPPPPPGDREEVASPRFDSSRALRLLRELGTNVTEDLVVLMPNLLSFLKHDDPATVKQSIASGTNLFPAVLEEMTLQVNKCGKLETWLEDMWACMKQFKDAVCGVMNEPGPIATKLLALKFVETWILCCTPQANSDQVQPTEGKNWRFDTSRSSQFHPSLDPAILEADAHRALLLLLDILRTAYAHRGSFLVGTINSLAAVVKIRPIYYDRVLPVLLDFDPGLETAKGAHSASLRYAVRAAFLGFLRSPHQAMIESKDILVRRLRVLSPGEAMEQNIRQAEKMSRNIERASRASKDESTSWEMPYGDINRKKPAVRSSDTFTTSDGIAKRARFDMSATSNLPVLGLSDYSDMQADNDASVGHSSDPAILNNEVSPVEKMIEMIGALLAEGERGAESLGILVSTVEADVMADIVIETMKHLPEASFHLATNNGVQQLNFKYSSGLVTQNLPANSDSTLFTAQSTPTADGVSISPSDAFVMTSVHDAKRDPRRDPRRLDPRRIVSSSAVNSIQVKMETNSVHQTDNLSNTLYSNSRKAENYSDYQGDLHKNEGEQQSASQPNQTIAKDKLELLDVVTEPEPTFEVEAPVDVRIHSSDVDEDIVKPMSSVVNSLDESDSMDLEVDPFLPAPKAPTPDDTNDDLPIITSQLELSEKGKISINKLAIGRILDDYKKNSFNARFSLLAHLIAQSAADDNIMDLIQRHIIFHSHDQEGYELAMHVLYQLQSISVANSPESSTSTSKHYEKFFISLARSLIDSLPASDKSFSKLLCDAPYLPESLFRLLEDLCMSEDNSQQLKDGDGDRVTQGLGTVWSLILGRPPLRHVCLDIALKCAAHSQDEVRGKAVRLVAKRLYDLTYATEKIEQFAIESLVGVANEHTVDTDINSKSLKESTAEIEVGSQGTSVSGSQIPDTEFSENGPFKTSSVSTKQSAVSVSEAKRRTSLFFALCTKRSSLLQHLFNAYGRSPKVVKQCIHWHMPNLIRNLGPSCPELLNIIHNPPEGSEHLITLELILIWDKGSTNRFHNLIVCFLILKTLQTLTEDSNPSADLVAAVKQLYNTKLKDASILIPLLPSFPKEEVLPIFPRLVDLPLERFQDVLARILQGTAHTGPALTPAEVLIAIHDINPEKDKVALKKVMFTLHTSASRAADGDSFQVTDACTACFEQRTVFTQQVLEKSLNQLVDRIPIPLLFMRTVIQALDAFPALVDFVMGILSRLIDKQIWKMPKLWVGFLKLSFQTQPRSFDVLLQLPPPQLEFMLNKYPNLRTPLSSFVNQRNMHNTLPRQILNILGIFSETQQAPMAFVTATLQTADATTSLPGATLM

SEQ ID NO: 8659 - protein, 730 aa, Zea mays
  VARIANT 129: note = Ancestral polymorphism is R, Derived polymorphism is C
  VARIANT 115: note = Ancestral polymorphism is S, Derived polymorphism is A
MLRCTRYSLQLLQPHPSFPGGATCSCSCPCSPPSSSFGNQHQRLHQPAALSPATSRSSTPLTHAPDHDEDGPSDDALLALLRAHDTDAAYSLFSSKPSLLPSSPTTASRLLAQLSFNSNGPDGFPRAARLLQSLRARGALDLLDANSLSLAAAAAARCRDARLAHSLLLYMLRQGLLPDRRAYTAAVSRLTPPTKALRLFDAVLRNLRSAPPELVSPSCLPDAAAFNAALSACADAGDCRRFRQLFDAMSEWSAAADALTYNVVIKMCARAGRKDLVARVLERMLFSGLTPCATTFHSLVAAFVGFGDIATAERIVQAMREERKDICLLLRAVSMDCDGVTDVEEGAVLLDDIVAGAKQGQGSDEVPLLPKAYPPNARVYTTLMKGYTNAGRVDDVLAVLRAMRQEAQTAPASRPDHVTYTTVISALVGAGDMARARAVLNEMAAARVPANRVTYNVLLKGYCQQLQIGQARELFEEMVTDAGIQPGVVTYNTLMDGCVLTDDSAGALAFFNEMRSRGIAPSTVSYTTLMKAFAVSGQPKVAHKVFEEMERDPRVTVDRAAWNMLVEGYCRLGLVETAKQVVERMKERGVQPDVATYGSMAKGIAVARKPGEALVLWNEVKERCLKEADEELLGALADVCVRAAFFKKALEIVACMEEKGIAPNKTKYKKMYIEMHSRMFTSKHASQARQDRRRERKRAAEAFKFWLGLPNSYYGSEWQIEPLLDGDDLS

SEQ ID NO: 8660 - protein, 672 aa, Zea mays
  VARIANT 18: note = Ancestral polymorphism is V, Derived polymorphism is A
  VARIANT 13: note = Ancestral polymorphism is V, Derived polymorphism is I
  VARIANT 8: note = Ancestral polymorphism is V, Derived polymorphism is A
MIVPPSSALCLSVLFLLAVSCSADDVDFIYQGFQHANLTLDGSASVLHGGALQLTNDSNRLVGHAFHGSPVRFLEVGGGGRPPSSFSTAFVLDIVTVGSGGGHGLAFVVAPSTVLPGASPEVYLGVLGPTTNGNPANHVLAVEFDTVLDLELNDTNGNHVGVDVNSLVSNVSEPVAYYAGGNAKVPVMLESAQPIQAWIDYDGDSGVLNVTVAPVYVADRPLRPLISTKLDLRPILREEMYVGFSSATGKLASSHYILAWSFRTNGLARSINLRRLPKVPKPRAALSKLVIIKLAAVACAGTLTLIAAAMAILFWLRKRAKLADTLEDWELKHPHRFAYKDLYKATKGFKASELLGAGGFGQVYKGVLRPRCGRDEVAIKRMSAGTTQGMKEFVAEIASLGRMRHRNLVELRGWCKHGQDLFLVYEFMPNGSVDAHLFGTDRRAPLLTWAQRFAVLGGVARGLLYLHEEWEHVVVHRDVKANNVLLGADMGARLGDFGLARLYEHGANHATTRVAGTLGYMAPELTVTSRATTATDVFSFGALLLEVACGRRPVVPPSEATDDSDVILVRWVRACGVDGDLLRAVDPRLEGCYDEGEAKLVLWLGLMCSQARPEARPSMRQVCRYLSGEEALREDAALVFSGADSVEFIGSSLSIAWSSGGTMSAGSVNGGR

SEQ ID NO: 8661 - protein, 389 aa, Zea mays
  VARIANT 171..389: note = Derived polymorphism lacks residues 171 to 389
  VARIANT 242..389: note = Derived polymorphism lacks residues 242 to 389
MDSASSLVDDTSSGGGGGASTDKLRALAVFAAASGTPLERMGSGASAVVDAAEPGAEADSGSGAAAVSVGGKLPSSRYKGVVPQPNGRWGAQIYERHQRVWLGTFAGEADAARAYDVAAQRFRGRDAVTNFRPLADADPDAAAELRFLASRSKAEVVDMLRKHTYFDELAQNKRAFAAASASAATASSLANNPSSYASLSPATATAAAREHLFDKTVTPSDVGKLNRLVIPKQHAEKHFPLQLPSAGGESKGVLLNLEDAAGKVWRFRYSYWNSSQSYVLTKGWSRFVKEKGLQAGDVVGFYRSAAGADTKLFIDCKLRPNSVVVASTAGPSPPAPVAKAVRLFGVDLLTAPATAAAPAEAVAGCKRARDLGSPPQAAFKKQLVELALV

SEQ ID NO: 8662 - protein, 239 aa, Zea mays
  VARIANT 52: note = Ancestral polymorphism is L, Derived polymorphism is M
  VARIANT 179: note = Ancestral polymorphism is R, Derived polymorphism is K
  VARIANT 196: note = Ancestral polymorphism is P, Derived polymorphism is S
  VARIANT 210: note = Ancestral polymorphism is A, Derived polymorphism is G
  VARIANT 218: note = Ancestral polymorphism is A, Derived polymorphism is D
  VARIANT 227: note = Ancestral polymorphism is A, Derived polymorphism is T
MAAAGGGVGDSELRLLGKSSSPWVFRVRVALGLRGLSYEYIEEDLGNKSELLLRSNPVHKKVPVLIHGGRPVCESLVILQYVDEIWRGTGPPLLPSDPYDRATARFWAAYVDDKFFPAFSALFRSRTDEQRAEALQNALLVAETLERAFTECSRGKAFFGGDAVGLVDVTLGSHPIWIRAVDQTAGTNLLDGARFPDLAAWAERFMALGAVNEVVPDAGKLLEQYRASRAKWTAAADSS

SEQ ID NO: 8663 - protein, 253 aa, Zea mays
  VARIANT 3: note = Ancestral polymorphism is E, Derived polymorphism is D
  VARIANT 43: note = Ancestral polymorphism is V, Derived polymorphism is M
  VARIANT 46: note = Ancestral polymorphism is G, Derived polymorphism is A
  VARIANT 85: note = Ancestral polymorphism is P, Derived polymorphism is S
  VARIANT 91: note = Ancestral polymorphism is V, Derived polymorphism is A
  VARIANT 118: note = Ancestral polymorphism is A, Derived polymorphism is T
  VARIANT 146: note = Ancestral polymorphism is A, Derived polymorphism is G
  VARIANT 150: note = Ancestral polymorphism is Q, Derived polymorphism is R
  VARIANT 155: note = Ancestral polymorphism is A, Derived polymorphism is E
  VARIANT 162: note = Ancestral polymorphism is A, Derived polymorphism is T
  VARIANT 163: note = Ancestral polymorphism is F, Derived polymorphism is L
  VARIANT 200: note = Ancestral polymorphism is G, Derived polymorphism is C
MIEQSKHLQTVMAAPVGANAIGAGDELLLLGTWSSPWVIRARVAMGLKGLSYEYLEEDLGNKSGLLLRSNPVHKKVPVLIHGGRPLCESLVILQYLDEAWPTAGPPLLPADPYDRATARFWAAYINDTFFPAFRALFRSLTDEQRAEALRNALPAVETLERTLAECSAGKAFFGGDAVGIVDVALGSHLVWIRVVDEVGGTSLLDAAKVPGLAAWAERFLAVDAVKKVMPDATKVLEQYKGFRAKWIAGAGCT

SEQ ID NO: 8664 - protein, 235 aa, Zea mays
  VARIANT 6: note = Ancestral polymorphism is E, Derived polymorphism is D
  VARIANT 29: note = Ancestral polymorphism is G, Derived polymorphism is E
  VARIANT 85: note = Ancestral polymorphism is G, Derived polymorphism is R
  VARIANT 95: note = Ancestral polymorphism is D, Derived polymorphism is N
  VARIANT 139: note = Ancestral polymorphism is T, Derived polymorphism is A
MAAGGELQLLSSWYSPYVIRAKVALGLKGLIYEFIEEDLFSKSDLLLKLNPVHKKVPVLVHGGRPVCESLVIVQYVDETWAAGTGTPLLPADAHDRATARFWAAYVDDKFCKEWIKLYRSTTAEKAAEALGGVVPVVETLEQAFRECSRGKPFFGGDAVGLVDIALGSFVVWIRVVDEAAGVKLLDEAKFPALTAWAERFLAVDAVREVMPDAGRLLEHYKGFLAKRAPPSPAGY

SEQ ID NO: 8665 - protein, 87 aa, Zea mays
  VARIANT 16: note = Ancestral polymorphism is P, Derived polymorphism is T
  VARIANT 25: note = Ancestral polymorphism is R, Derived polymorphism is C
  VARIANT 33: note = Ancestral polymorphism is R, Derived polymorphism is G
  VARIANT 45: note = Ancestral polymorphism is P, Derived polymorphism is A
MAECAAACCVLCACLPVAVLCCVARAPLRVARRCCGRWTRRRLAPGVSSSFSDAEVGEFLQGGAGGRAMGAAALGAVGGGSAKLASY

SEQ ID NO: 8666 - protein, 162 aa, Zea mays
  VARIANT 139: note = Ancestral polymorphism is D, Derived polymorphism is G
  VARIANT 100: note = Ancestral polymorphism is G, Derived polymorphism is D
  VARIANT 87: note = Ancestral polymorphism is M, Derived polymorphism is I
  VARIANT 83: note = Ancestral polymorphism is H, Derived polymorphism is Y
  VARIANT 74..162: note = Derived polymorphism lacks residues 74 to 162
  VARIANT 72: note = Ancestral polymorphism is V, Derived polymorphism is A
  VARIANT 71: note = Ancestral polymorphism is R, Derived polymorphism is C
  VARIANT 24: note = Ancestral polymorphism is P, Derived polymorphism is L
  VARIANT 15: note = Ancestral polymorphism is K, Derived polymorphism is I
MSVSGYRDDKKKKAKTVGEALNKLVLEAFGNAKNYQEQFKSFWNFFVEIQFDANGKISRAAIRAYLVERSRVCQISDPERNYHCFCMLCSAPSEDFFLQGWFIFGPDVRSLFLTIFPFLAPMVVFYIFVPKHFINDFPGHWGVLVMVIAIVFTIYILCIPIY

SEQ ID NO: 8667 - protein, 266 aa, Zea mays
  VARIANT 149: note = Ancestral polymorphism is Y, Derived polymorphism is F
  VARIANT 115: note = Ancestral polymorphism is Y, Derived polymorphism is N
  VARIANT 86: note = Ancestral polymorphism is Y, Derived polymorphism is H
  VARIANT 80: note = Ancestral polymorphism is D, Derived polymorphism is G
  VARIANT 56: note = Ancestral polymorphism is Y, Derived polymorphism is H
MAAFRSLRRRLPLALLLAVCVAASRSDPSGDDFYNRSICKLQPYRCGEVNITYPFYLSDDTADVLGNSSSYCGYPGLAIDCVDDEYPTIQLGGNSSNTGYSYNVTDIDYPTSTIYLADPDVLDDASCPRVDHNVTVSPSPTLWLNLSDYTVRYLLFFANCSINVLHVPNQSDINPIACASGSDGDYSFVIPSEMPHQLLLQMCSQQVILVPVLQNASLTPVDPQWSTSGYRDALKQGFQLQWDSDRKTERCAECEGSNGRSVTDGS

SEQ ID NO: 8668 - protein, 1050 aa, Zea mays
  VARIANT 455..1050: note = Derived polymorphism lacks residues 455 to 1050
  VARIANT 467..1050: note = Derived polymorphism lacks residues 467 to 1050
MVMVKPACSDAVPPCRPRLPRQGEFPTGHSPLPSNDLINRHRGREKEEGRKRKTLLTYSAMAALCSPRRRLPLPLLLPLLLAVLVAASRGDDPSGDEYFNRSICKLQPYRCGEVNITYPFYLSDDTADVLGNSSSYCGYPGLAIDCVDDEYPTIQLGGGSSTGYSYNVTDIDYPTSTIYLADPDVLDDASCPRVDHNVTVSPSPTLWLNLSDYTVRYLLFFTNCSVHVLHVPNQSDISPIACASGSDGDDYSFVVPSEMPHQLLSQQCGQVTLVPVLQNATLTPVDPLWSTSGYRDALKQGFQLQWDSDMKTERCDDCERSSGKCAYNTSGEFVACLCADGHVTDHGCTNELRAAMRSPSHHDRDLLLLLLVLAAAVGSRSDDTHACRSRPYLCGGVNISYPFHLASDATAVPGHDGESYCGYPGLAVSCDGGNKAVLNLGDHDYTVSRIDYANQTVSLADAGASSGCPVVDHNVTIPQDVRLSLLHSIDYLLFFAGCSFGPGAGPDPRPPKPPSIEPVTCGESGDLGKPAAAMTFVLPRAEVPPGDWASACRKVFQVPVLKGSVPPDAQHDPLWTSGGGYGEALRAGFQLGWDRGSGPCARCEQSGGKCGYGRAGEFLGCLCAGSRVDGGGDCSKMSAGSSDLPWFGPKSKTAVIAGVAAGAGVAILAAAIFLFVRRKRKQKRVVNSSSKLLKYSGSGGTPRSRVGDMESGSIEDPPTHLFTYEELEEATSCFDENRELGDGGFGTVYKGYLKDGRVVAVKRLYNNSYRRVEQFQNEAAILSGLRHPNLVMFYGCTSSQSRELLLVYEFVANGTVADHLHGQRAAERALPWPLRLGVAVESAAALTYLHAIEPPVVHRDVKTTNILLDADYHVKVADFGLSRLFPLDVTHVSTAPQGTPGYVDPEYHQCYQLTDKSDVYSFGVVLVELISSKPAVDVTRHRNEINLAGMAISKIQKCQLEELVDIDLGYETDPATKKAMTAVAELAFRCLQQNGEMRPPIKEVLEVLRSIQGEYQTGKDGDKNKDGPLSPTTVHAPWESRATTPNTSRD

SEQ ID NO: 8669 - protein, 370 aa, Zea mays
  VARIANT 89: note = Ancestral polymorphism is Y, Derived polymorphism is H
  VARIANT 23: note = Ancestral polymorphism is T, Derived polymorphism is N
MGGVTSTIAARFAFFPPTPPSYTVVVADAATGRLAIPEISRALSRRRRRDGAGAGGSSSASSVAAAENEEGAEVVRLRTRRGNEIVGVYVRHARASATLLYSHGNAADLGQMYGLFVELSRRLRVNLFGYDYSGYGRSTGKPTECNTYADIEAAYNCLKEKYSVADEDIILYGQSVGSGPTIDLASRLPDLRAVVLHSPILSGVRVLYPVKRTFWFDIYKNIDKIGLVNCPVLVIHGTSDDVVDCSHGKQLWEHCKVKYSPLWLNGGGHCNLELYPDYIKHLKQFVSSVSKKTSKPDQKEIMAKDGTTSKEREEAYSEKPQPAAKCSQSQISRKSIDSRVGKSKTVDVPDKSRMSSDDIDKFRRRRCLVW

SEQ ID NO: 8670 - protein, 1246 aa, Zea mays
  VARIANT 95..1246: note = Derived polymorphism lacks residues 95 to 1246
MATPTPMPGSEGTLVAVMPRSPSPTPAEAGTSATETPVLIFLYFHKAIRAELEALHGAAVLLATERTGDVAALAERCRFFFSIYKHHCDAEDAVQMLATPCFISFELQVIFPALDIRVKNVAGTYSLEHKGESDLFSQLFDLLELDIQNDDALRRELASCTGAIQTCLSQHMSKEEEQVFPLLTKKFSCEEQADLVWQFLCNIPVNMVAEFLPWLSTSVTSDEHQDIRDCLCKVVPDEKLLQQVVFTWMEGKAAREVAESFATGNLVRNHSAEDVSDHGEIYVCSQQESKLGSKNCAESNGSQADRHPIDDILYWHNAIRMELHDIKKETRRVQQSGNFSDISAFNERLQFIADVCIYHSIAEDQVVFPAVDSELSFVQEHAEEEHRFNNFRCLIQQFQIAGAKSTALDFYSKLCSHADKILETIEKHFSNEETKVLPQARMFFSPEKQRELSYKSLCVMPLKLLERVLPWLVSKLSDEQATSFLQNIRLAASPSETALVTLISGWACKGRDKSKSGEYLCLTSGTARCLSDDVDDQGKCRSFCPCASHNSSDLSLQLQTENGSRPGKRGKDAVSFPGTNGSYCSQTADIDASPCSKKPCCIPGLRVKSSNLGIGSLASVKSFRSLPYNSTAPSIYSSLFSWETDASLSCSDGISRPIDTIFKFHKAIRKDLEYLDVESGRLIDGDESCLRQFIGRFRLLWGLYRAHSNAEDEIVFPALESRETLHNVSHSYTLDHKQEEQLFEDISDVLFQLSQLHDSQGHAQTKVNEVKQSCFHSSNDVDFTRKYNELATKLQAMCKSIRVALTNHVHREELELWPLFDKHFSVEEQDKLVGRIIGSTGAEVLQSMVPWVTSALTQEEQNKMLDTWKQATKNTMFGEWLNEWWKGAGTSDSSAEAPSAPEDSHLQDKLEQNDQMFKPGWKDIFRMNQSELEAEVRKVSRDPTLDPRRKAYLIQNLMTSRWIAAQQKLPEPNSEECSDDASIPGCAPSYRDQEKEIYGCEHYKRNCKLVAACCNKLFTCRFCHDKVSDHTMERKATQEMMCMVCLKIQPVGPFCQTPSCNRLSMAKYYCNICKFFDDERTVYHCPFCNLCRLGKGLGVDFFHCMKCNCCLGMKLTEHKCREKGLETNCPICCDFLFTSSAAVRALPCGHFMHSACFQAYTCSHYTCPICCKSLGDMAVYFGMLDALLAAEELPEEYRDRCQDILCNDCERKGRCRFHWLYHKCGSCGSYNTRVIKTDTADCSTPN

SEQ ID NO: 8671 - protein, 439 aa, Zea mays
  VARIANT 80: note = Ancestral polymorphism is R, Derived polymorphism is W
  VARIANT 11..439: note = Derived polymorphism lacks residues 11 to 439
MMQQRAAYTAYWAGRRSRANTSAALEFGGSGIMMQQPQAHASALAVAHPHDPAGGDAPPKQVAQAMERLGRAGRLIADIRLGADRLLEALFVSGDAPPYSVRQHVDRMEHIIVKEDAAMRLHFQDLRALGRKLVTVVWNCFALGLGLITLHTKICHGRQLEESGVLNGALKARGNSWGLHMPLVCPDGAVVAYAWKRQLAGQAGASAVDRTRCAQVFYNFELTHAFRLALKAFTDQKRRFFPHLEDEVVSHLHDGEPGGTKKPKLFTSNGDLEEKSLSDILKNLEHEASNIKIFTYWHLDWSKRASSLASLLDDDFVDPSKELNLQNMGKSRSGALTTSIDQVAVIELLVPSVFRAVVSLHPAGSTDPDAVAFFSPTERWIASYQTLFTKVCSKCGRLLMMDKSLALLLPPVHRPYHQTSNIGPDLQEAYHIGCSSYDG

SEQ ID NO: 8672 - protein, 344 aa, Zea mays
  VARIANT 7..344: note = Derived polymorphism lacks residues 7 to 344
  VARIANT 63..344: note = Derived polymorphism lacks residues 63 to 344
MCTLLYSFFQVVPTVVNGGIMAFYFVLWGKGLLACGPLVYVSSSLSTMIFSRSCMVYGAVHLCQGISSSITTYVQLLYWQSMQVLFLEFSLLLYMEGKLTSGKRQVADFKIEFVLYDDSVSLLCVCSLIGGLAAMLVAYYLLSIGWSTRTHSPLYSFGSEPIEKARQTFGVKEMVVPITAGILSALRRVLARRVSLKNQLKRRLHAITIASATCFLFPFAMWDTILGSASDSIVKFQLPNWAYLSTVLFGMVLIFYVDNVTEEKLHLVFSSPRHLMVSTGCIIVLEIVYQMDFSLFGFLVCSVILGLGIFETTSLERSKKSPLETHELSNGVFHNQLPITELPS

SEQ ID NO: 8673 - protein, 403 aa, Zea mays
  VARIANT 321: note = Ancestral polymorphism is W, Derived polymorphism is R
  VARIANT 215: note = Ancestral polymorphism is A, Derived polymorphism is S
MKDTKKPTRASSRLGGRVVGVASMLLFVSLGFVLGVTSSNAMFIRYYLPFMPPLRSSAAPSSSPPPLTTPLTPSQTPPPPPPLPQNPQLRSAGFLSPSGVMHNMTDEELYWRASMAPMVRRTPDSRVPKVAFLFLVRGELPLRPLWEKFFAGHEGRYSIYVHAHPSYTGSPPTDSPFYGRYIPSQITKWGDASLVEAERRLLANALLDLGNERFALFSEACIPVYDFPTVHAFLTGSDTSFVDCYENGGSRSRYRPFFATRNITLARWRKGAQWFEMDRALALESVADGSCFPAFRDFCVGRRECLIDEHYLPTLVSLLGWGRRNANRTLTYADWKRPVNRHPHTHGPDEVTEERIREIREEGGRRCFYNGARRGICNLFARKFSPDTLEPLLRLAPKVMGFG

SEQ ID NO: 8674 - protein, 79 aa, Zea mays
  VARIANT 65: note = Ancestral polymorphism is G, Derived polymorphism is R
  VARIANT 59: note = Ancestral polymorphism is D, Derived polymorphism is G
  VARIANT 56: note = Ancestral polymorphism is A, Derived polymorphism is V
  VARIANT 50..79: note = Derived polymorphism lacks residues 50 to 79
  VARIANT 15..79: note = Derived polymorphism lacks residues 15 to 79
  VARIANT 13: note = Ancestral polymorphism is S, Derived polymorphism is F
  VARIANT 12: note = Ancestral polymorphism is A, Derived polymorphism is T
  VARIANT 9: note = Ancestral polymorphism is A, Derived polymorphism is T
  VARIANT 8: note = Ancestral polymorphism is S, Derived polymorphism is Y
MLGSLFISAVTASEWVKGKQVEEVVAIKNTEIAKHLSLPPVKLHCSMLAEDAIKSAVKDYEAKKGKKMAKAEEQDTPCP

SEQ ID NO: 8675 - protein, 110 aa, Zea mays
  VARIANT 24: note = Ancestral polymorphism is S, Derived polymorphism is I
MRLLLKLSDKENLTEKQLAKLCKSVSNVGLQMEKTVDINEGIHFLKDLEMLGSVTGEQIPNLVGETSPGFQMGSNTLEKLGLYVKNDEDDEDGDFTDEPVADVEEGEIAR

SEQ ID NO: 8676 - protein, 310 aa, Zea mays
  VARIANT 203: note = Ancestral polymorphism is P, Derived polymorphism is S
  VARIANT 218..310: note = Derived polymorphism lacks residues 218 to 310
  VARIANT 222..310: note = Derived polymorphism lacks residues 222 to 310
MDEVTQAVENLKKEWGQAVSQLDENITAIESCGKTGKGTEEANYLPRLNGSAQDALQLLKSLQFQLGLLAQQLPTFDEVQSGQATLKSWDEQYKNMSSQRFFMYSFKFKSTIETNAALDFCNFPGKISKKMTSGQVYGVPLYGSLLIKPGVYPEQRPCNEDTRRKWIEALAQPNKRLCSLSEHVPHGYHRKSLFEGLIRYNVPLLRATWFIKVTYLNQLQTRQTPNSISVAGSDNQRSQWTKDVVEYLQHMLDEFCSKEGAFVHPSFREQSSPGPTAGTNQKKMKTEASPAAGDIEEHLVHFKWWYMVAK

SEQ ID NO: 8677 - protein, 84 aa, Zea mays
  VARIANT 54: note = Ancestral polymorphism is R, Derived polymorphism is H
  VARIANT 13: note = Ancestral polymorphism is D, Derived polymorphism is N
  VARIANT 4: note = Ancestral polymorphism is R, Derived polymorphism is W
MDLWEAAVCHAHNELLALSSAAAAEDFLRWQFPESPRGKGWWSAARQLVEDAWRSLGKAKNAAKLMDNAVLCEFFTTWMILTRA

SEQ ID NO: 8678 - protein, 481 aa, Zea mays
  VARIANT 249: note = Ancestral polymorphism is P, Derived polymorphism is Q
  VARIANT 167..481: note = Derived polymorphism lacks residues 167 to 481
  VARIANT 121: note = Ancestral polymorphism is R, Derived polymorphism is S
MSQESTPACHAVVAPPPPHVLLVSAPFQGHVNPLLALGQRLASMGLLVTFTTAVHTGLRFKHQQHGEDGAAVDAVGRGAMRFEHLRGGEVWAPDDPRYHVADDVGRNLDAVASVALSELIRRQADAGRPVTCVVANVFAPWALRAAGAMGVPGAMLWTQSCTVMSLYYHYFQSLAAFPSKEAGPDAPVDVPGLPTLAAGDLPALIHEPEENIWRQALLSDFRSLRETVSWVLVNTADELEHAAIEALRPHLPVLPLPVGPLLDMEKISAADDADDECTAWLDAQPPRSVVFVAFGSLVKLDRDEMAELAGGLASTRRPCLWVVRDDSRDLLPDTAVASGDSWGRGKLVSWCDQRRVLSHSAVGCFITHCGWNSTTEALAAGVPVVAYPVFSDQRTNAAFLVDVCGVAVRLPTSPTRDALRQSVEVVMGDGAQGKHIRARAQGWRDKTCAALAEGGSSDMATQEFVDAVLSIGMNYSSMPFV

SEQ ID NO: 8679 - protein, 281 aa, Zea mays
  VARIANT 15: note = Ancestral polymorphism is P, Derived polymorphism is L
  VARIANT 34: note = Ancestral polymorphism is C, Derived polymorphism is Y
  VARIANT 60..281: note = Derived polymorphism lacks residues 60 to 281
MNPLSSSFSEPTGPPEWKEVFDDPLLPLMVDIGCGSGRFLIWHAKNSGKSQNYLGLEIRQKVNRIRELPQNSKIIATHTNSPDVLIWDVEAQPNRHVLGASESRPDLILIGHKEIVEFVLAMCPAEPYVLSGGKWQQEYNDVAYLGESPSEASEFIELAQLPESENFHRTVLIWDVEAQPNRHAVLGASESRPDLEIVEFALAMCPAEPYVLSEGKDKSVVLWSIQDHISALGDSSSSPGASDSKQSVKTTNEKESPKVDPRGIFHGHDSRVEDVQFYPSR

SEQ ID NO: 8680 - protein, 569 aa, Zea mays
  VARIANT 116: note = Ancestral polymorphism is I, Derived polymorphism is N
MATRRAFSSILRSASRIRSASPSPCPRAPLHHRPSPAGFILNRVAAYASSATAQAAPAPPPPSTGKKTGGGKITDEFTGAGAIGQVCQVIGAVVDVRFDEGLPPILTALEVLDNNIRLVLEVAQHLGENMVRTIAMDGTEGLVRGQRVLNTGSPITVPVGRATLGRIINVIGEPIDEKGDITTNHFLPIHREAPAFVEQATEQQILVTGIKWLLCIVLTQGFYFYQVVDLLAPYQRGGKIGLFGGAGVGKTVLIMELINNVAKAHGGFSVFAGVGERTREGNDLYREMIESGVIKLDDKQSESKCALVYGQMNEPPGARARVGLTGLTVAEHFRDAEGQDVLLFIDNIFRFTQANSEVSALLGRIPSAVGYQPTLATDLGGLQERITTTKKGSITSVQAIYVPADDLTDPAPATTFAHLDATTVLSRQISELGIYPAVDPLDSTSRMLSPHVLGEDHYNTARGVQKVLQNYKNLQDIIAILGMDELSEDDKLTVARARKIQRFLSQPFHVAEVFTGAPGKYVELKESVKSFQGVLDGKYDDLPEQSFYMVGGIEEVIAKAEKIAKESAS

SEQ ID NO: 8681 - protein, 369 aa, Zea mays
  VARIANT 263: note = Ancestral polymorphism is R, Derived polymorphism is C
  VARIANT 254: note = Ancestral polymorphism is A, Derived polymorphism is G
  VARIANT 82: note = Ancestral polymorphism is P, Derived polymorphism is L
  VARIANT 68: note = Ancestral polymorphism is N, Derived polymorphism is I
  VARIANT 55: note = Ancestral polymorphism is G, Derived polymorphism is A
  VARIANT 52: note = Ancestral polymorphism is R, Derived polymorphism is G
  VARIANT 23: note = Ancestral polymorphism is T, Derived polymorphism is K
MASISKFPNMIYTPFVASLPFPTPPPPPPTPSPPRPPPLPATPLLPAPRNLGRMGLMDLLAPSGVIHNMTDEELFWRASMAPKGHRTPYHRVPKIAFLFLVRGELPLRPLWEKFFAGNDQELYSIYVHPDPSYTGSPPRDSVFYGRMIPSKETKWGHVSLVEAESRLLASALLDHSNERFVLLSEACIPVYNFSTVYAFLAGSATSFVDSYGNGDCRARYDRFFAERTNITIEHWRKGAQWFEMDRALALEVVGDEPYIQMFRDFCVGRWRCLTDEHYLPTLLNLLGWARNANRSLTYADWKRPQGMHPHTHDGAEVTEELLNRIREDGGNRCFYNGARAGICSLFARKFSPDTLQPLLRLAPKVMGFG

SEQ ID NO: 8682 - protein, 1397 aa, Zea mays
  VARIANT 173..1397: note = Derived polymorphism lacks residues 173 to 1397
  VARIANT 464..1397: note = Derived polymorphism lacks residues 464 to 1397
  VARIANT 482..1397: note = Derived polymorphism lacks residues 482 to 1397
MASLLSSPDDSKSLSVTTSSLFLSSIASLPSSHAFSIFTSASTPLPPVPVSVPPAALIPGSRFLVDAFRHAGNFSVAYFLSHFHSDHYSGLGPSWRRGLVFCSAPTARLVSSVLSVPPQLVVSLDIGVRITVDGWGVTAVDANHCPGAVQFLFASPGPRAERYVHTGDFRYTESMTRDPNLLEFVRADAVFLDTTYCNPKFTFPSQEDSVDYIVNAIKRVKEESSVSGERVLCLIATYAVGKEKILLEVAQRCGCSIHVDSRKMKILTLLGFGGKNSVFTEDATGTDVHVLGWNLLGETSPYFQPNFVKLKEIMMERGYAKAVGFVPTGWMYETKKEGFAVRVKDSLEIHLVPYSEHSSYNELRDYVKFLHPKSVIPTAGVDAGKLDSKEAVALQKHFAGLVDETANKQEFLMAFHRRSIDATRSCKDVVVNCSSQLDGEDAALLPAISSASEQQDKLMENTMQETLKELSDFLPSWVSQEQITDLLMSSEGDVVKAASIFFERERDFFEEANVSCNGTPKTEKNHSSNHGSSADVSSQQESSLFSQKPVEYSAKLVNLSPMRMKPNTPKKVNKRGSSNTNKPKKKGRLTSSTESGGRKQSTITNYFIRATEAAFKRCRPERVTVEAHQNNVENSDQLADTEKTQDQIVDQLLQIVDGSMSREYAVYLLEKANGDVAVAVDIFYSSSEGNNVIEVDKNIMLQNAQGETADNCSETDMASGYSQATPKMSNLHVGTSLAHGDSANTSLLIEKYLPIEHACWIAGQPAPYLHLARTFDLVEKEKGKIKTIAIFCNMFRSLLALSPDDVLPAVYLCTNKISPDHENMELNIGGSLVVTTLEESLGTSRSKIHEMYKTYGDLGTVAQECRQNQTLIAPPRSLSICDVYSTLRKLSAISGSGSAGRRKNLVLHLIRSCRETEMKFLVRTLVRNLRIGAMMKTILPALAHAVVFDRNCAADPAVSLEGIKSQLQSLSTEVAEAYNVTPNLDLLIPSLLREGTAFSASSLAMVPGTPIPPMLARITNGLTQSLKAFHGRSFTCEYKYDGQRAQIHKALDGSVRIFSRQMKESTSRFPDLVNMIKELCKPEVSSFILDAEVVGINRKKGNELMSFQELSSRERGNKHSSISIENIKVDICVFVFDIMFHDGERLLDCPLRQRRKYIHDLFHEKPGYFELAQQLNIEACEASPDNSSTLARMDTFFRNACQSSCEGIMLKTLDVDAGYSASKRCDSWLKVKRDYVQGLGDSLDLVPIGAWYGNGRKAGWYSPFLMACYNPETEEFQSVCRVMSGFSDEFYKEMKEFYSGERILPKKPVYYKTDEQPELWFTAEQIWEIRGADLTLSPVHHAAIGLVHPSRGISVRMPRYIRSVPDRSPEDCGTAADIASMFKAQTRKMDVSSEGQE

SEQ ID NO: 8683 - protein, 320 aa, Zea mays
  VARIANT 35: note = Ancestral polymorphism is G, Derived polymorphism is A
  VARIANT 24: note = Ancestral polymorphism is L, Derived polymorphism is V
MGRAPCCDKTSVKRGPWSPEEDDLLRSYVQNHGTGGNWIALPHKAGLNRCGKSCRLRWLNYLRPDIKHGGYTEQEDRVICSLYSSIGSRWSIIASKLPGRTDNDVKNYWNTKLKKKAIAMQQQQQQQQEYYQQQHSSGGRGRRAAAAAAAPRSQCASVQPSPASASSAVTTASASDACSFGAMYPSPSALQAAPVLARYDSTAAAPAPLSLPQQASSLAAEFVPPAPPPVGASWAGGLPLDDMFLPELLGDSEFPPGDGDFFGAGAGAGLLAPLLLQDRFPAASLQELSACYFPNAPAEMWAAADHAHAKPPAGLCHSLT

SEQ ID NO: 8684 - protein, 446 aa, Zea mays
  VARIANT 303: note = Ancestral polymorphism is M, Derived polymorphism is I
  VARIANT 246: note = Ancestral polymorphism is N, Derived polymorphism is K
  VARIANT 148: note = Ancestral polymorphism is S, Derived polymorphism is N
MVAAVSLPSQAQAVLRSRLCDPVFIHSALSSSLDTNYSKLKYLVASSVSEACNNSVLLLGPRGCGKAAVVDMVLDDLKEEHPDAISVEIARQLCLEHQLSFSKMASSDDNTEFMIDMLRECGLAHKTILFILEEFDLFAQGKQRLLYSLLDAMQSLTSQAVVIGVSCRLDADQLLEKRVRSRFSHRKLLFISPSLDDIQRLVEHLLILAKDSGLPSKYIADYNSRLTVSFLRPDCYGAYLILFEVKKLGRTTANKLHNGILLSYTLQSIFSDKKFKGCLNSLMDADATTSNIQRFLFRAVSYMDMESGFLSVESFLKALSSMQRQPKMDSLQDLSILELYILVCMHRLESKEQTSYNFTSIMKGRESIQDAYKTSDKYASTVCFRAFEHLSDRELISFGDNRWRNQALEYRPVKLLISSRELAESLKLNTTCPAVLQKLFDRERYM

SEQ ID NO: 8685 - protein, 904 aa, Zea mays
  VARIANT 639: note = Ancestral polymorphism is G, Derived polymorphism is V
  VARIANT 507..904: note = Derived polymorphism lacks residues 507 to 904
  VARIANT 351..904: note = Ancestral polymorphism lacks residues 351 to 904
MDAFLSCLDDGPTASPPRAAPPPSPALSARDLYSFICSGPLVDRIGYTKEKVADSIGRWLRCGVDVARLLRLDELQLSEAEKARVYQFYIPVFLWCEDQVIEHRAKYSEGDDIPPLVIGVSAPQGSGKTTLVFALDYLFQVAGRKSATLSIDDFYLTAKEQNELRDRYPGNALLELRGNAGSHNLQFSVETLESLMKLTKEGIKMKVPRYDKSAFGGRGDRADPSVWPEVEGPLELEVVNNNLEAYYDAWDRFIDSWIVIKIREPSSVYQWRLQAEIAMRADGKPGMSDEEFQTGLTESPFRPQNFDFRNQTKPLSYYSSRPPSRSLHRTGELLLLVSSHTTHFVGIREPYRRIFAAAAEMANPLAGLQDHIKLARDYALEGLYDTSIIFFDGAIAQINKHLTTLDDALVRTKWMNCKKAISEEVESVKQLDAQLKSLKEAPGTRRSSSPPIRSNKSFVFQPLDEYPTSSPAPFDDPDVWAPPRDTPTRRPTRGQSSARKSSQDGAWARGSSRTGTPSRSSKPNGSKGGSVVKSSTASNSSVRKGKPSSSKADSASSDAEEGKSKKGQYEGPDMDLAAMLERDVLDSTPGVRWDDVAGLSEAKRLLEEAVVLPLWMPEYFQGIRRPWKGVLMFGPPGTGKTLLAKAVATECGTTFFNVSSATLASKWRGESERMVRCLFDLARAYAPSTIFIDEIDSLCTSRGASGEHESSRRVKSELLVQIDGVNNSSTTEDGQPKIVMVLAATNFPWDIDEALRLANSYSHIHFILGQVDHQSLEDWWLRRRLEKRIYIPLPDFESRKALININLRTVQIAADVNIDEVARRTEGYSGDDLTNVCRDASMNGMRRKIAGKTRDEIKNMSKDDIAKDPVAMCDFVEALVKVQKSVSPADIEKHEKWMAEFGSA

SEQ ID NO: 8686 - protein, 504 aa, Zea mays
  VARIANT 432..504: note = Derived polymorphism lacks residues 432 to 504
MASTVLEATRAAHEDLERLERLAVSELQREPANPRDRLFQSHRVRHMLDLVVSTSGKLVEIYEDKDNARKDEINTHLTAPTQSGLFSKYYERLKEIREYHRRNPSARFVSTTDDYEELLKEEPVIEFTGEETFGRYLDLHELYNEFINSKFGTLMEYSAYVGCFSQTDKISHSHKATRKYREYLEHILEYLTSFLYRTEPLQDIDKIFLKLESEFEEQWANEGILGWGNKGTEKESEIDLDYYSTVEELVELGPEKLKQALAARGLKSGGTVQQRADRLFLLKVTPLEQLDRKHFAKVPHTKDGSNTAPNGNAFKEDMKKEIALMEVKMKRLCELLDEAFVRTKENAEKKLTLTYEEMEAEREEEEVQVDTESDDEEQQIYNPLKLPMGWDGKPIPYWLYKLHGLGQEFKCEICGNHSYWGRRAYERHFKEWRHQHGMRCLGIPNTKNFNEITSIEEAKALWEKIQARQGVNKWRPDLEEEYEDQEGNIYNKKTYTDLQRQGLI

SEQ ID NO: 8687 - protein, 148 aa, Zea mays
  VARIANT 19: note = Ancestral polymorphism is G, Derived polymorphism is C
MGNTVPPRVSREATGGRRGAGTARRRRRSENVAVTEAAPPATPSRVVGTARKQDGDVEEETTRAGRALRAGGGDGAAASSKVLAVRIVMERKDAEALVARLMEAQSARVRKARMAELRSELRAGSCSGAAARAETLGLGGNRMLPPID

SEQ ID NO: 8688 - protein, 447 aa, Zea mays
  VARIANT 408: note = Ancestral polymorphism is S, Derived polymorphism is F
MAETSTYQILVRLLDGRTRCLRFSTPTVSGAVLLDAVASISRVPAAALRLVTGGIDVSPSSVLASAADGQFPYASALLRLRGGKGGFGSLLRGAASKAGQKKTSNFDACRDINGRRLRHVNAERRLEEWKAEAADRQLEKLAENFIKKKAKEAGRGGGPSTAEVDKYLEKYRKDAEICVNVVEESVRASLGKRKTAPKLPSGADAKKLKFWLGKNKVEEDESDSDTDVDDEDIEDLKSADAKSVVVDEGNYSNGCRKNEEKLDLGSVSGSSHSEGESSGEKSQLTTSSGAEGGDFESGDSAELEVGMLDHPISVAAASEEVTADEDNTALATSNQNNPEVPQVEEVRKADKDNTASATSNQNNQEVPQVEQHVGISNSYSEPLDLAKYSSSAELEVLGLEKLKIELQSRGLKCGGTLQERAARLFLLKTTPLDKLPKKLLAKTNGRK

SEQ ID NO: 8689 - protein, 526 aa, Zea mays
  VARIANT 105: note = Ancestral polymorphism is W, Derived polymorphism is L
MASPSYRLAAAITAPSTGEFLVVRQPRPPSPPEEEEDYRRFVDSDLYDLPSAPLGPLEGAPRSEVAIGGADSVASRLDLSRLDVSAALDQIFHQFGLPAGMSGEWRLLKYVEEAEFGPDAGINTVYIVGSLELRLDDLPESCKWMSKECALRLLSEAKPGNDRIGQYAYIGLLNSELSSNCTASPALPFQEYPPGITLVPMKSRTLAPFRTTNLVVVRSTNGAGGSTCSDFFASGEALLIDPGCSSQVHAELADLIDSLPKRSIYAMHHKQIESIWFKTVGLSVVQRCNPNAVLLTHQSTMDRIGKGTWQIDYTSVTGGEKICIGDQELQVVFAPGHTDGHMGLLHVNTNTLVVGDHCVGHGSATLDSRNGGNMKDYFETTYKFLELSPHVLIPMHGRINLWPKYMLCGYLRNRRAREASILHSIENGAQTLFDIVSKTYSDVDRKLWIPASFNVRLHVDHLNSLHKLPKDFSLENFKESCGVHFMLRWAVAYVHSRSSPAILAASALAGGLAIACALRRNYCKQS

SEQ ID NO: 8690 - protein, 664 aa, Zea mays
  VARIANT 237..664: note = Derived polymorphism lacks residues 237 to 664
  VARIANT 269..664: note = Derived polymorphism lacks residues 269 to 664
MVTGSMKHLVQVEPAREAAAEGGAPSAGPTYRCAAGGNAASPPAVPGLECCWDIFRLSVEKCPDNKMLGRREIVHGKAGSYTWLTYKQVYDTVLDVGSAIRSCGVGKGGRCGIYGANSPEWVISMQACNAHGIYCVPLYDTLGAGAVEFVLCHAEVQIAFVEEKKIGEMLKTFPNATKYLKTLVSFGKVDPGHKEKVEQNGLSIYSWEEFLQLGGKEKFELPPKEKDDICTIMYTSGTTGDPKGVLISNKSIVTIVSAVDEFLNNSNEQLNMDDVYISYLPLAHIFDRVIEEVFIRHGASIGFWRGDVKLLVEDIGELKPTVFCAVPRVLDRIYGGLQDKITAGGFLKKTLFNVAYKYKQGNMLKGNKHEEAAAMFDRLVFTKVKRGLGGRVRLILSGAAPLSRHVEEYLRVVTCSHVLQGYGLTETCAGSFVSLPNNMSMLGTVGPPVPYVEVRLESVPEMGYDALSSETPRGEICIRGDTLFSGYYKREDLTKEVLVDGWFHTGDIGEWQSDGSMKIIDRKKNIFKLSQGEYVAVENLENIFGQTPAVDSIWVYGNSFESSLVAVVNPNTQALERWAESNGVTGEFATICEDPRAREFILGELTKMGKEKKLKGFELIRAVHLDPAPFDMERDLITPTYKKKRPQLLKHYQTIIDGMYNSMK

SEQ ID NO: 8691 - protein, 713 aa, Zea mays
  VARIANT 445..713: note = Derived polymorphism lacks residues 445 to 713
  VARIANT 178..713: note = Derived polymorphism lacks residues 178 to 713
  VARIANT 173..713: note = Derived polymorphism lacks residues 173 to 713
MSERQDPVWVHGDNIYPGFKCKYCKKQWKGGGATRFKQHLASCGGNVQGCRTVPPDTADYFRRELDKVHDKRKARVAEEARKLQAAGSHRVSDDDDDAELQAAMRASREEELRMRARASGGTYETGGGSYQGGLRAAFGRIGSRKEKPHMVQTRIDTGPFSKAGKNAVHFVGQQWAKWFHAEAIPGHKANSPYFINAFRETQKHVDATGKSQDANYLYKEAIGGELVQWNATRFGTNYVFLESFLRRKDKFMVWMGSQGFLQSKFSSMPEGRYTHQTLTSLSWWDELKYVVDATEPLFGFLCFADEDRKGTLSEVLLQYTLVKSQYESLFQGRPSEYKKCHTAAALNPRTHYAYGTTVSVMSDLRHAFEYMTDVDTAAAALQEVEFYRRKQGEFGRPLAEKMAYDHNTSPASWWDMFGSDTPTLQKLALRLVSQCCSSSGCECNWSTFALVHTKVRNRLSHKKLHKLVYVNYNLRLRLKDAIGFTSVQGEDDPFSQLMELSLYDTNNPIRQWMEMGRSNADPLLDEEDTESDPPLPSSIVAQGTSKDNLVKWTKKNVGDTHVGKRKAQFVQRKTSKKGKKAVASDDDSDSGDKSPQYIESADSSSTTSSDDGGGGGGGGGGGGGSGGGGSGGAGGSQMAPIQFTGESQFEYATQDQDHGAPEERRTTHTGIRHQGLQQAYWTPDSSNERQGSSSPLLPYVNYLVGEVTQQPTR

SEQ ID NO: 8692 - protein, 685 aa, Zea mays
  VARIANT 518: note = Ancestral polymorphism is P, Derived polymorphism is R
  VARIANT 190..685: note = Derived polymorphism lacks residues 190 to 685
  VARIANT 183..685: note = Derived polymorphism lacks residues 183 to 685
MKDPFEAAVEEQDSPPDSPAPPEEEPGAAGLADDAEDYDGGPPPRQPSAPASHAASAAAKAKGRVQREQQEDDDDDEDQMEVDLDKLPSSTGDPDKLAKMKFVPKLFTFFFNLANGTALLSVQIRWLLWRATSAPGCSDKCARVFASVSMGVRGSWNVGSLVGKLRELIDAASRRRVNILCVQETKWKGQTAKEVENTGFKLWYSGTMANKNGVGILIDKGLKDGVVDVKSAYASQVGLSESEKRKFWEDFDGLVRAVPNNEKLFIGGDLNSHVDSTNAGYELAHEGFGYGSRNQEGKDILDFVVAYNLVIANAFFRKRDSHLVTFSSGYCSSQIDFVLTRREDKQACLDCKVIPGESVVPQHNRVVADFCFRIRTHRDKQAKFARTKWWKLKGETSKLFKERIFMEGAWYEEDANNMWVKIYRAHLWYRAGARDLSNILMLQLSTKEGDKDVYKMARIRERKMRDLNQVKCIKDEMDQLLVKGQDIKQRWQRIQESEVKEALKRMKGGQGDGPGWYPNRDADEWRRSTLVLIFKKKGDIQSCTNYREIKLMNHTMKLWNRVIEHRLRGMMHITMNQSGFMPGRSTIAILSQFTQQQMNRYESFRRSGFQKSNMKRLLASITGSQKISIPTSIVVSGIAKIFVARVVMSERKDSGPIRPCHIREAYRRLKLEGKIPRRSVPRLFR

SEQ ID NO: 8693 - protein, 293 aa, Zea mays
  VARIANT 55..293: note = Derived polymorphism lacks residues 55 to 293
  VARIANT 59: note = Ancestral polymorphism is F, Derived polymorphism is S
  VARIANT 64: note = Ancestral polymorphism is G, Derived polymorphism is R
  VARIANT 207..293: note = Derived polymorphism lacks residues 207 to 293
  VARIANT 247: note = Ancestral polymorphism is P, Derived polymorphism is Q
MASPSDRTSGFSISSHGGAPEANGDAKDNVPYTSSFVYYSLHFVEKKETNREGRGRRVFKKREGKKRIKEEAEKRATIEKGVSDTSLDVDSKETHDRVQEGENKVGHVNCIKQGVRDDIEVVAVDDPFVDAKYMLWKIHDWSSLSMDENSQMIAKIVVVCNDAIIGHSEHQYVATGMPTKAALKPLSLSFASLFHDRFSRTEPRRKQLSTVRYSTVQETVMEEASPGTVEELLLVSAIRGKKVERAPIWLMRQAERYMNAMPQDSEGFRQPDMHHGMEVRLGLSKGPICPSFS

SEQ ID NO: 8694 - protein, 675 aa, Zea mays
  VARIANT 16..675: note = Derived polymorphism lacks residues 16 to 675
MPNWRLVYLALQRWTEQARLPAAPGRPSFAVELEDTRSNAGFFCGELWCGLMEPKGELAQKPIEEAINSLEIDASTKASNVNLPAKKDASSSDAVSCISSGDAASTAKESEMNRETSFGDQGMYYYGYYYPGSYGGWDENGYFVGYNGVEVHPAVVQTDNGSYLCHLPGYENGYASYSQVVPGGIASVDGQYVSKEPYYSTALPIQDPRTPGIFAQPIAYRTELASAYSWDPSFVLLDGVQGHPVGVHQTNYAARPKYSFNKHVIPSSKATRSAKSAADTVKGSSSALETVTNAVNSSPPSKSANKTPGASITKGYLPYSKSVMHTNNQEKNSVYQSKGINVKESGRSWNSREKLGRSKLNGQGDSESNENNHTDNLKHSLSHRSDVVGLSSAGDANASIPSPVAISKNACNLSDFVTKYEQALFFVIKSYSEDDIHKSVKYNVWASTPNGNKRLDNAYRVAQERIAEKGTKCPVFLFFSVNASGQFCGVAEMVGPVDFNRNMNFWQQDKWNGFFSVKWHIIKDVPNPQFRHIILENNENKPVTNSRDTQEVNFSQGTEMLNIFKNFTCKTSILDDFDFYENRQKVMQDRRGKLLTTSFDHPLPKAEKSPEIKSQTQLISGPEVGRAKSDEGQGNNVGMVLDTTKKNEEQSSNVPEILDAACSNKEQPNKIAIEG

SEQ ID NO: 8695 - protein, 1695 aa, Zea mays
  VARIANT 1036..1695: note = Derived polymorphism lacks residues 1036 to 1695
  VARIANT 1054..1695: note = Derived polymorphism lacks residues 1054 to 1695
MSPPLQAPDYKHITDESLREWKGQSAGAFRIPDPVPMARFLYELCWAIVLGDLPPQKSRVALESVVFVEEARREEELGSVLVDIIAHLGQDITISGEYRSRLVKMTKSFVESLITVPKLLQERCEVRVNTRLLYQQTKFNLLREESEGYAKLVTLLCQVGSDLACQNSSSVTISIIKSLIGHFDLDPNRVFDIVLECFELYQDSNIFNQLIPLFPKSHAAQILGFKFQYYQRLDVNSPVPSGLFRTAALLIKSGFIDLDNVYSHLLPNDDEAFEHFDSFISRRIDEANKIGKINLAATGKDLMDDEKQEITIDMYTALEMENDIVGERAPEMEKNQKLGLLLGFLSVHDWYHAQLLFERLGHLNPVEHIEICDGLFRMIEKTMSSAYHIVCHLYYYLPPRNDADQTGTSAVSVSSFDLLKEFFQMLTACGPYLHRDTQLFQKVCRVLKAYYHSSKESTRVANVVSPESRIEEALGSCLFPSLQLIPANPAVDMEIWGVLSLLPYEARYRLYGEWEKETEQNPIVLAARQTAKLDTRRLLKRLAKENLKPLGRMVAKLAHANPMIVLRTIVQQVEAYRDMITPVVDAFKYLTQLEYDILQYIVIERLAQGGRAKLKDDGLNLSDWLQCLASFWGHLCKKHNAVELKSLLQYLVNQLKKGVGIELVVLEELIQQMANVQYTENMTEEQVDAMAGSETLRQQASLFGATRNYKVLSKSTNRLRDSLLPKDEPKLAVPMLLLIAQHRSKIIINADATYIKMVSEQFDRCHGILLQYVEFLSSAVTPTAYAQLIPPLQDLVHKYHIEPEVAFLIYRPVMRLFKSTNGGDTCWPLDDNEEGESVSSDDLILHLDSFQEPIMWSDLLNAVQSILPAKAWNSLSPDLYAAFWGLTLYDLHFPKDRYDTEIKKLHENLKQLEDNSDNSSIAISRRKKDKERIQDLLDRLNSESQKHQQHVASVVQRLAREKDKWLSSSPDAMKINMEFLQRCIFPRCVFSMQDAVYCATFVQTLHSLGTPFFNTVNHIDVLVCKTLQPMICCCTEFEAGRLGRFFHDTLKMAYYWKSDESVYERECANKPGFAVYFRYPNSQRVSYSQFVRVHWKWSSRITKALNQCMESKEYMEIRNALIVLTKISSVFPVIRKSGVNLEKRSSWLSEEEFGGGHIDLKPATARSVLGNQSADLSMAKDQNARAKSVENRHERSEGAMKPDVQQKKSTVASNGSDILIQSSSVQGKSSVVARAMDEPPKPVSDEGVKVSTKSTSEFETRATQKRAGNAGKVMKHDVAKEDAKAGKPTSWNVNQQVSTVDREVSHAADAAQETSTTISNGNLHPAPHKVSSSSQRNAVTHNGAANPSVESTDMIDSPVRQQKRPPVEEQDRSGKRRKGENEPDLSEHHVDKEKSLDSRGGDKFRSVDHEKSANEEQNLRAGKIKEKSDDKYDRDPREKLDRGERRRGEDAIERSTDRLSDRRERSIERMQERGTDKALEKGREDRNKDERNKVKYAEPSVDRTHSSDERFRGQSLPPPPPLPASFVPQSVGANRREEDADRRGGSSRHVQRSSPRHDEKERRQSEENISSFQDDGKHRREEDIRDRKREDRDTLSNKVDDRDREKGTSLKEDSDPSNVSKRRKIKREQTLEAGEYAPSAPQPPSHGSGSSQLSDIRERERKGVISQHRISHADDLPRTHGKDMTSKSSRRESDQ

SEQ ID NO: 8696 - protein, 205 aa, Zea mays
  VARIANT 86: note = Ancestral polymorphism is R, Derived polymorphism is C
  VARIANT 79: note = Ancestral polymorphism is E, Derived polymorphism is K
MEATGAASQPSAPQTTHPAVAPLAFLLGKWRGEGEGSFPTISSFRYGEELLFSHHPSKPVISYTQKTWKTASGEPMHAESGYWRPRPDGSVDVVIAQSTGLAEVQVSSSLLRPVGFFSLSLFFSKKRVLPLLFRKKKKQTPLVLRPTDHLPFCHMISENLSSAPCQRNLALMLSSAHEFFPAAYKSSYGKVGYCLNKNLLGSVCL

SEQ ID NO: 8697 - protein, 195 aa, Zea mays
  VARIANT 125: note = Ancestral polymorphism is S, Derived polymorphism is I
  VARIANT 9: note = Ancestral polymorphism is S, Derived polymorphism is N
MSGRNFGDSMELSSSGRSSGSRRGKRGGGGGGTDRPKQPQRGLGVAQLEKIRLQSEMVEYFHPLGQHPSLIHRTGSLSLEDARASTSSLSSSSPSSSFHATAISPPFSIHPNLAMPYGERDVRYSEFQAPIIRSPSSSAVHGTPHYAQHPNNITLSLFEPQESARLKGHHDRSQSADSTSLNSDDPQDVDLELKL

SEQ ID NO: 8698 - protein, 329 aa, Zea mays
  VARIANT 60: note = Ancestral polymorphism is Q, Derived polymorphism is K
MTHSPLAAIKPPRPFFQSHPSHTELVDSYLRTWVEDGVKTGAFIHDADVYGSDPADLLQQFAPVVAHNGERAWYFYSLLRYKHSSGKRKKRSTGSGTWHSEAKPKPVFMASKSNWHQIGLRQTFSFVVRNETGALFRTGWIMMEHRLLNDDGEEKQQEEEGFLVYRVLCKVYRSPRKPEPSGNKAAAAASPGHKIEADDDESNDATLDENDDDESNDATLDENDDGSNAAPPAASGRKRKSDDVEPSEAKASDVIAGGAAAAPAPKKKSDGSSSPVATSPTTEMQCPGCGHHVLVTMNRAEPKSQTEIAKDESAPGARQQGEIRMYEFL

SEQ ID NO: 8699 - protein, 269 aa, Zea mays
  VARIANT 156: note = Ancestral polymorphism is M, Derived polymorphism is K
MSPPLEPHDYIGLSAVAAAAPPTPTPTSSSSSSSSPAPRLTLRLGLPGSESPDRDRDCCEDVAATLSLGPLPAAAAVSAKRAFPDPAQRPGASKASDAKQQASPAAPPAAKAQVVGWPPVRNYRKNTLAAATASRSKAPAEEAASGAGPMYVKVSMDGAPYLRKVDIKMYSSYEDLSLALEKMFSCFIAGQSGLHKSSSKDRLTNGSKVDALKDQEYVLTYEDKDADWMLVGDLPWDYFTSICRKLKIMRGSDAVGIAPRTVEQTGQNK

SEQ ID NO: 8700 - protein, 370 aa, Zea mays
  VARIANT 349: note = Ancestral polymorphism is A, Derived polymorphism is V
MLGVGLGVRLMVAVAPAPPVPAPPGKPPLPLCSSLRHRSSGWWFSNGDAHGRDSTAATTSSRATRRKWWSDPDGSQEDYGSSSLEEDEYGYGYDYDYEDEAAFPGFGGAGEMFDEPWFSKVFKTYGFMLPVMLASMFAVTGLKAFLMAMAIPLGQSAISFIIDAVWPRRKGNRDDRWRRPVQEEEEEEEDFPRDATDFATGGRGRYSSSYYEGRRGRQSYQSSVSNDFADAASAAVGADDSTKSSSSGDGGGNKSSGGYGGWDELLDNNNNTAAAREAKRSSNSFSAGNTYYSTKSRPSATGEADADYTAAGGGGRAEQGVGAPPERMRMRRRRVPRTMGLGSTRYKQAPLLMRLLVAVFPFLGSWFSVL

SEQ ID NO: 8701 - protein, 186 aa, Zea mays
  VARIANT 30: note = Ancestral polymorphism is P, Derived polymorphism is L
  VARIANT 151: note = Ancestral polymorphism is L, Derived polymorphism is P
  VARIANT 170: note = Ancestral polymorphism is W, Derived polymorphism is R
  VARIANT 178: note = Ancestral polymorphism is S, Derived polymorphism is N
MAPPPSYPVSTSVTAFVKEEDAPTPLVASPMAPPLSYPTSSSLRSRRSRRKLLHAREVKRKEFVARVKEAMDREPQQLTPEQRYNLSWEAATERFMEYSDLDKVLNNEAAQPKQGRKRKNKRTSQPNLFDIMDGGLALAHRCLTGNEVLRLATEAIPGTRDYDKSNVWIWVSCLLKYNTLYMAGDD

SEQ ID NO: 8702 - protein, 235 aa, Zea mays
  VARIANT 66: note = Ancestral polymorphism is S, Derived polymorphism is I
  VARIANT 68: note = Ancestral polymorphism is V, Derived polymorphism is D
MALSKPPATDDDQAEREYLASCLMPLSRGLCDGGATDAKRAGAAPTASNKADGQHHPHGYECSMCSKVYASYQALGGHKTSHQKPPAAAAPRDEASSSGTAHEKEEKLHQCSLCLRTFLSGQALGEHMTSHRKPPPAAAPGDEASSGGSAHAKEENTFTSGQALGGHKRLHCEAKDKGKDAARTNKASVAATAVLRDFDLNLSAEAESATPEAKRARTMLLVADDPALFPTAARC

SEQ ID NO: 8703 - protein, 197 aa, Zea mays
  VARIANT 65: note = Ancestral polymorphism is C, Derived polymorphism is Y
  VARIANT 71: note = Ancestral polymorphism is S, Derived polymorphism is L
  VARIANT 83..197: note = Derived polymorphism lacks residues 83 to 197
MALSKSLVNKAGQHHRHGYKCSVCDKVMTSHWKLSSPLAATPRDKVLSGGTAHAKEEKLHQCSLCHRTFPSGQALGRHKTSHWKPPSAVPRDEDEASFGDTAHTKEEKLHQCSLCHRTFPSGQALGAWAGTSGCTTRRTRTRTPPGTKEASVAAVATAVVRDFDLNLSAEADGVPPDAKRACTDDSAAMMAVLRDFD

SEQ ID NO: 8704 - protein, 436 aa, Zea mays
  VARIANT 218..436: note = Derived polymorphism lacks residues 218 to 436
  VARIANT 350..436: note = Derived polymorphism lacks residues 350 to 436
MAPYGSSSTLDWNLSSIDPAHATGNARQVSRTMQAPKPCTGGETQARTFKVDRRAAIHAKMKRQHDERQRRRDEAIHPPHASPSRRRAMVETTARCRHMILFASLLSSLECMASKQKALESRKLAQQSVPQTIMNGIKGDRMDVDPMSVEAFDDQPSVPKRLKTHHPSPSGLENDMSVVSNYHVNSGFALQETQPEQLDHNNKTSYLKREVDAKADMRAPQKPIKISYGIDGNLSASRCNVIPGVPSEINSHIKQENLSVDKETSETALEVKNETNGPTDATVSKSGKPNVNVGNIKFVLYLMEEGTMEDKLNILAPIAMLRSHDIESGQGWRCEICPDFDVCNSCFQKGVVTHPHKLTNHPSTAVRDAQNAEARQMLLQQLRKMLDLLDAAVQQQRQRAELIQQQQRRSGQLQAQLPGRPREAEARGVRDTGAEP

SEQ ID NO: 8705 - protein, 89 aa, Zea mays
  VARIANT 62: note = Ancestral polymorphism is V, Derived polymorphism is I
  VARIANT 58: note = Ancestral polymorphism is A, Derived polymorphism is V
  VARIANT 56: note = Ancestral polymorphism is G, Derived polymorphism is R
  VARIANT 29: note = Ancestral polymorphism is A, Derived polymorphism is V
  VARIANT 23: note = Ancestral polymorphism is E, Derived polymorphism is D
  VARIANT 1: note = Ancestral polymorphism is M, Derived polymorphism is T
MEIIAIAGYITDEKMHIARDYLDKNTRQVCGIKPDQVEVTDTALLALIENYCREAGIVLQIVRQRVSNEPDHESVGATVTEESGSGEFY

SEQ ID NO: 8706 - protein, 234 aa, Zea mays
  VARIANT 20: note = Ancestral polymorphism is L, Derived polymorphism is P
  VARIANT 23: note = Ancestral polymorphism is G, Derived polymorphism is D
  VARIANT 40: note = Ancestral polymorphism is D, Derived polymorphism is G
  VARIANT 41: note = Ancestral polymorphism is A, Derived polymorphism is V
  VARIANT 46: note = Ancestral polymorphism is G, Derived polymorphism is V
  VARIANT 80: note = Ancestral polymorphism is F, Derived polymorphism is L
MQQQQQSSVAGGSSAAAMPLLHGRQPTCAPVAMPGLVELDAVAHHGSIGWSSPSVVVPAASSGGGGKDARLGLGVGGRRFGSRGKYLVLHMQVDVFSFGIILWKILTGEEPYANMHCGAIIGLQWTVVRDRKGSEGGEQVLREWYIQGAPLLGNSAAASDEILAVDTPSDGGDVVIVSSSENSTSTPSAVSWRARFVGQGYKQVCGRAVVWGDDVVREMAAHLDYLSINFLRIK

SEQ ID NO: 8707 - protein, 378 aa, Zea mays
  VARIANT 153..378: note = Derived polymorphism lacks residues 153 to 378
MPRHTAPAAPPSERGEMDEVVEADPDTEAEDQEERWATLLPELLSDVLLRVEASGAEQWPARKDIVSFACVCRWWRKAAVSVVRPPAESAKITFPSSLKQCHSVSYLTSVFLNLTPFLKTQPGPRENPMQCFIMRNKNSTFYLYLGFTSSPVYKGKFLMAARRLRRGPHTEYIISLDAEDLSQGSNSYMGKLRSDFWGTNFKIYDSKPPYDGAKASSSRSSRRFGSRRISPQVSSGNYEVGQVSYKYNLLKSRGPRRMNCTLECPSAQETWENSLKTKFRRPLGPTTLRNKAPRWHEQLQCWCLNFHGRVTVASVKNFQLVTAAGPSDPTSNVDEETVLLQFGKVDDDIFTMDYRQPLSAFQAFAISLSSFGNKLACE

SEQ ID NO: 8708 - protein, 235 aa, Zea mays
  VARIANT 175..235: note = Derived polymorphism lacks residues 175 to 235
  VARIANT 162..235: note = Derived polymorphism lacks residues 162 to 235
  VARIANT 126..235: note = Derived polymorphism lacks residues 126 to 235
  VARIANT 115: note = Ancestral polymorphism is L, Derived polymorphism is H
  VARIANT 112: note = Ancestral polymorphism is L, Derived polymorphism is I
  VARIANT 106: note = Ancestral polymorphism is T, Derived polymorphism is S
  VARIANT 105: note = Ancestral polymorphism is I, Derived polymorphism is T
  VARIANT 104: note = Ancestral polymorphism is R, Derived polymorphism is T
  VARIANT 101: note = Ancestral polymorphism is A, Derived polymorphism is T
  VARIANT 98: note = Ancestral polymorphism is E, Derived polymorphism is K
  VARIANT 97: note = Ancestral polymorphism is S, Derived polymorphism is F
  VARIANT 96..235: note = Derived polymorphism lacks residues 96 to 235
  VARIANT 84: note = Ancestral polymorphism is T, Derived polymorphism is K
  VARIANT 80: note = Ancestral polymorphism is E, Derived polymorphism is K
  VARIANT 78: note = Ancestral polymorphism is K, Derived polymorphism is E
  VARIANT 74: note = Ancestral polymorphism is R, Derived polymorphism is I
  VARIANT 67: note = Ancestral polymorphism is L, Derived polymorphism is I
  VARIANT 61: note = Ancestral polymorphism is N, Derived polymorphism is I
  VARIANT 60: note = Ancestral polymorphism is C, Derived polymorphism is S
  VARIANT 57: note = Ancestral polymorphism is H, Derived polymorphism is Y
  VARIANT 53: note = Ancestral polymorphism is H, Derived polymorphism is Y
  VARIANT 50: note = Ancestral polymorphism is R, Derived polymorphism is C
  VARIANT 48: note = Ancestral polymorphism is S, Derived polymorphism is L
  VARIANT 33: note = Ancestral polymorphism is R, Derived polymorphism is C
  VARIANT 21: note = Ancestral polymorphism is G, Derived polymorphism is D
  VARIANT 16: note = Ancestral polymorphism is K, Derived polymorphism is N
MGSSTPSTAVVEEWRKMINSGDGQKRRNPNIIRFQHHIEFDPKFFDKSWRKLHDAIHEICNHNCIGLSFEELYRLELKIEAVATKEELEHLVMLCRSEADAMGRITAGILRLLKLDKSLGQGTIEQLRNLGSGGMDNIFSPRRLSRLNSFGSIGTPRTPTMQAIADVMSSKTTLEATISSLQGEISESKAKCMALISQASSTEDQNRAEDIRQLSEKLESMQSLVTQLKNFDLTI

SEQ ID NO: 8709 - protein, 99 aa, Zea mays
  VARIANT 82: note = Ancestral polymorphism is T, Derived polymorphism is K
  VARIANT 50: note = Ancestral polymorphism is T, Derived polymorphism is I
  VARIANT 46: note = Ancestral polymorphism is G, Derived polymorphism is R
  VARIANT 45: note = Ancestral polymorphism is A, Derived polymorphism is V
  VARIANT 38: note = Ancestral polymorphism is T, Derived polymorphism is S
  VARIANT 20: note = Ancestral polymorphism is G, Derived polymorphism is D
  VARIANT 14: note = Ancestral polymorphism is K, Derived polymorphism is N
MLASATRAGTSSTKPGLAEGAVRRARARARAGDGGSGTPIVVTDAGQEVTVSQFVAQLDEAARRRLDSMHQRLRLLEQQMETLEAEVGKASSSRIDTYA

SEQ ID NO: 8710 - protein, 318 aa, Zea mays
  VARIANT 16..318: note = Derived polymorphism lacks residues 16 to 318
MDGKLPPPNPNLPYREDCWSEGETAALVDAWGSRYLDLNRGSLRQPQWREVADAVNSRPGASARRRPPRTDIQCKNRVDTLKKKYKAERARGGPSQWNFYAQLDLLVGPTLTGIKKPSPPRAALPVFRRRLTPPRSPSPQSPPPLPVALPLHNYRRGSDLPSANLIHKAAAAAAAAAAESDSEDGYNNNDYDDDEGSQQSPSRSVSSGFGGGGGGAPPAVGSKRKMSSGSGGFGELARAIETFADMYERMEAAKQQHAEEMERQRIKFLKDLELKRMQAFVDMQLQLARTKHARKGDASSDTLMSLAALPFLSSPAYL

SEQ ID NO: 8711 - protein, 522 aa, Zea mays
  VARIANT 367..522: note = Derived polymorphism lacks residues 367 to 522
MEVQVFDLSSDSEGEVTAHSPDHKRPSRQPGADPNRGGGETGSSALDSLFEQAGAAKPQRHPSDALKKGKEKAVEGESAGPPKHSGELLGAAGRVLGSGSGPWSALMSKCKAGDGGNNGAGCWGSWGDRGDQLTNSTPMPRLGSERKGFDETYELRGMPQLHSDSAASSDHWKGILGASPGDVSPLWCSRDTSMKDNEDETFSQRSVSARSCDYFLVEDTSPSWLSKVKGLNFPLPDEHQSRTRQIETDEMFARRLQEQLNQQQLGSQHSEAVVTLDYSSLIAYRTDTTIAWTLHEQDAEHARFAAREGQSSSVKPEGQINGTPIFLWTSFTRSKFFSLGIQSYSNSNAKKRRFAKKLQLSSSGATQCETRKFISWAPPLSRALTFSHCQMLISQLTRGCFREDMDLETRLAVLDSLSEAFKNCEDTLSPDSDDDDYEDLIALDDDNHHRGASDDQINSLPLSLIEGENCSDEPCNICLDCPSAGDSLRHLPCLHKFHKECIDRWLGMKIWCPICKLNVFSQ

SEQ ID NO: 8712 - protein, 169 aa, Zea mays
  VARIANT 16: note = Ancestral polymorphism is R, Derived polymorphism is G
  VARIANT 21: note = Ancestral polymorphism is P, Derived polymorphism is L
  VARIANT 23: note = Ancestral polymorphism is P, Derived polymorphism is S
  VARIANT 31: note = Ancestral polymorphism is E, Derived polymorphism is D
  VARIANT 122: note = Ancestral polymorphism is V, Derived polymorphism is A
  VARIANT 143: note = Ancestral polymorphism is I, Derived polymorphism is T
MANSNLPRRIIKETQRLLSEPAPGISASPSEENMRYFNVMILGPAQSPYEGGVFKLELFLPEEYPMAAPKVRFLTKIYHPNIDKLGRICLDILKDKWSPALQIRTVLLRSLYLSMCVSIHYVFANKNALLSAPNPDDPLSDNIAKHWKSNEVEAVETAKEWTRLYASGA

SEQ ID NO: 8713 - protein, 597 aa, Zea mays
  VARIANT 66..597: note = Derived polymorphism lacks residues 66 to 597
MAREATNAWPRPSPSARKRSKGKRAVLSPAPPTQAAATEMEAEASVPATDYVYDALPGLHLAFSPEETLDDAAAGQDEDDATATYAVFRNEITEAGDVLADIPAADFFSLDVSTSASVEPEPEPEPPSPAPTAAAATPSISRALEDQPPQGSERAWFRGGRRFRSPMLQLHKEILDFCDFISPSTEEQSSRAAAVQDVSDVVKHIWPQCKVEVFGSFRTGLYLPTSDIDVVIFESRVKTPQVGLYALAKALSQKGVAKKIQVIAKARVPIVKFVERKSGIAFDISFDIDGGPQAADFIKDAVKKLPALRPLCMILKVFLHQRELNEVYTGGIGSYALLTMLITHLQLVWGGKDILGYHRSKEHNLGILLVRFFDFYGRKLNNWDVGVSCNSSRTFFLKSDKDFMNHDRPHLLAIQDPMAPDNDIGKNSFNYFKVKSAFSKAYSVLTDANLFISLGHNRSILGTIVRPDSVLLDRKGWNNEDMLAEPWEPITQQFDTENDAVYNWHVIDEDEPLPRNSQSTSEDTSSSPSKKRKSPKSRRKSRKKSKATASGSSDVANGFRKDRSSKREAGSSKRRKGPKEYDRFTNTLPKYTHVSKW

SEQ ID NO: 8714 - protein, 1779 aa, Zea mays
  VARIANT 68..1779: note = Derived polymorphism lacks residues 68 to 1779
  VARIANT 73..1779: note = Derived polymorphism lacks residues 73 to 1779
  VARIANT 81..1779: note = Derived polymorphism lacks residues 81 to 1779
  VARIANT 119..1779: note = Derived polymorphism lacks residues 119 to 1779
  VARIANT 218: note = Ancestral polymorphism is T, Derived polymorphism is M
  VARIANT 252..1779: note = Derived polymorphism lacks residues 252 to 1779
  VARIANT 262..1779: note = Derived polymorphism lacks residues 262 to 1779
  VARIANT 265..1779: note = Derived polymorphism lacks residues 265 to 1779
  VARIANT 266..1779: note = Derived polymorphism lacks residues 266 to 1779
  VARIANT 269..1779: note = Derived polymorphism lacks residues 269 to 1779
  VARIANT 292..1779: note = Derived polymorphism lacks residues 292 to 1779
  VARIANT 322..1779: note = Derived polymorphism lacks residues 322 to 1779
  VARIANT 349..1779: note = Derived polymorphism lacks residues 349 to 1779
  VARIANT 364..1779: note = Derived polymorphism lacks residues 364 to 1779
  VARIANT 432..1779: note = Derived polymorphism lacks residues 432 to 1779
  VARIANT 520..1779: note = Derived polymorphism lacks residues 520 to 1779
  VARIANT 581..1779: note = Derived polymorphism lacks residues 581 to 1779
  VARIANT 601..1779: note = Derived polymorphism lacks residues 601 to 1779
  VARIANT 617..1779: note = Derived polymorphism lacks residues 617 to 1779
MTTPRGTQRRAAAPAAAAGGEPYNILPIHDLLAEHPSLRFPEVRAAAAALRAVGGLRPPPFSQWRADQDLMDWLGAFFGFQRDNVRNQREHLVLLLANAQMRLSSADFSDTLEPRIARQIRKKLLRNYTSWCGFLGRRPSVYVPEGDPRADLLYTGLHLLVWGEAANLRFMPECLCYIYHHMATELHRILEGFIDTATGRPANPAVHGENAFLVRVVTPICDVIRAEAESSRDGKAPHAAWRNYDDINEYFWRRDVFDRLGWPMEQSRQFFRTPPDRSRVRKTGFVEVRSFWNIYRSFDRLWVMLLLYLQAAAIVAWEGAKWPWDDLLSSRGSESKDTQVRVLTVFITWAALRFLQSLLDIGTQFRRAFRDGRMLAVRMVLKAVVAAAWVVAFAVLYMRVWNQRTDNGQWSSAADSRMRSFLYAAAAFVIPEVLAIVLFIVPWVRNALEKTNWKICYALTWWFQSRSFVGRGLREGTFDNVKYSIFWVLLLAVKFAFSYFLQIRPLVKPTKEIYNLNGIQYTWHEFFGQSNRFAVFVLWLPVVLIYLMDIQIWYAIFSSLSGAFVGLFAHLGEIRDMKQLRLRFQFFASAMSFNIMPEEQQVNESFLPSRFRNFWQRLQLRYGFSRSFRKIESNQVEARRFALVWNEIISKFREEDIVSDREVELLELPPELWNVRVIRWPCFLLCNELSLALGQAKEVTGSDRRLWRKICKNDYRRCAVIEVYDSAKHMLLEIIKEGTEEHGIVTQLFSDFDGSMKMEKFTVEYKMTELHNIHTRLVALLVLILKPTKDVTKIVNALQTLYDVVVRDFQAEKRSMEQLRSEGLAQSRPTRLLFVDAVVLPEEDNATFYKQVRRMHTILTSRDSMINVPQNLEARRRIAFFSNSLFMNIPRATQVEKMMSFSVLTPYYKEEVLYSKDQLYKENEDGISILYYLKQIYPDEWEYFVERMKREGMSDINELYSEKERLRDLRHWVSYRGQTLSRTVRGMMYYYEALKMLTFLDSASEHDLKTGSRELATMGSSRIGSSRHDGVAGGSGYYSRASSSHALSRASSSVSSLFKGSEYGTVLMKYTYVVACQVYGQQKAKNDPNAFEILELMKNYEALRVAYVDERQINGNEKEFFSVLVKYDQQLQREVEIYRVKLPGELKIGEGKPENQNHALIFTRGDAVQTIDMNQDNYFEEALKMRNLLEEFNRYYGIRKPKILGVREHVFTGSVSSLAWFMSAQETSFVTLGQRVLADPLKVRMHYGHPDVFDRLWFLGRGGISKASRIINISEDIFAGFNCTLRGGNVTHHEYIQVGKGRDVGLNQVSMFEAKVASGNGEQTLSRDVYRLGHRLDFFRMLSFFYTTVGFYFNTMMVVLTVYAFVWGRFYLALSGLEDYINKNTSSSNNAALGAVLNQQFVIQLGLFTALPMIIENSLEHGFLTAVWDFMKMQLQFASVFYTFSMGTKTHYYGRTILHGGAKYRATGRGFVVEHKKFAENYRLYARSHFIKAIELGVILTLYASYGSASGNTLVYILLTLSSWFLVSSWILAPFIFNPSGFDWLKNFNDFEDFLNWIWFRGGISVQSDQSWEKWWEDETDHLRTTGLWGCILEIILDLRFFFFQYAIVYRLHIADNSRSILVYLLSWTCILLAFVALVTVAYFRDRYSAKKHIRYRLVQAIIVGSTVAAIVVLLEFTKFQFVDTFTSLLAFLPTGWGIISIALVFKPYLRRSEMVWKTVVTVARLYDILFGVIVMAPVAVLSWLPGLQEMQTRILFNEAFSRGLHISQIITGKKAHVF

SEQ ID NO: 8715 - protein, 187 aa, Zea mays
  VARIANT 43: note = Ancestral polymorphism is T, Derived polymorphism is A
  VARIANT 95: note = Ancestral polymorphism is A, Derived polymorphism is E
MATPAQQQGDQHQPRLQKVMVAVDESECSRHALEWALRNLAPTLAPPLLVLTVQPHFPLGYVSAASFGAPLGTVPPVAPELIRSMQEQQRELTQELLDKARAICAEHGVCADPVPFFLPSASVAVEAIVEVGDAKEVICEVAEKKNVDLLVLGSHSRGPIQRLFLGSVSNYCVHHSKCPVLVVKNQG

SEQ ID NO: 8716 - protein, 258 aa, Zea mays
  VARIANT 17: note = Ancestral polymorphism is I, Derived polymorphism is T
MAEAAGGGPLLPEELVIWEILTRLPAKPLLRCRAVCLSWRRRLTSDAKFLLAHHRRQPSLPLLTQGDRSTEDRRIDALDYRTGERLPVARTTGRTAANADDLNVLASCDGLLVLIANGGLHICNPATRQRAPLALLHGASCISALYPYRPSGSYRVAGALLLRESRGRPRRVPRAHRRVARAQVRRRTSRAVGVRRRGDGDADDVVLSPARRGRQQDLLAAGKAARRQREGQQHARVRYSDRVLPATAVAPARGGPLP

SEQ ID NO: 8717 - protein, 102 aa, Zea mays
  VARIANT 20: note = Ancestral polymorphism is S, Derived polymorphism is F
  VARIANT 21: note = Ancestral polymorphism is E, Derived polymorphism is K
  VARIANT 27..102: note = Derived polymorphism lacks residues 27 to 102
  VARIANT 29: note = Ancestral polymorphism is D, Derived polymorphism is H
  VARIANT 62: note = Ancestral polymorphism is M, Derived polymorphism is I
  VARIANT 69: note = Ancestral polymorphism is R, Derived polymorphism is H
  VARIANT 72: note = Ancestral polymorphism is T, Derived polymorphism is I
  VARIANT 76..102: note = Derived polymorphism lacks residues 76 to 102
  VARIANT 80: note = Ancestral polymorphism is T, Derived polymorphism is S
  VARIANT 83: note = Ancestral polymorphism is D, Derived polymorphism is H
MVMGDPGRQGLCENLTNVRSEVSFLEWPDDLEGFVLKGYGVMQRSIIRHRRTGIPPSQNRTMRANLRLRAVTVTFQGCCTYQDDFPYVKQSLFSFYMYRSDS

SEQ ID NO: 8718 - protein, 563 aa, Zea mays
  VARIANT 437..563: note = Derived polymorphism lacks residues 437 to 563
  VARIANT 266..563: note = Derived polymorphism lacks residues 266 to 563
  VARIANT 255..563: note = Derived polymorphism lacks residues 255 to 563
MLQVIEPTFKEAIKRNVSIELSAGRYPKNGATDMIRANYHSEVGSSSSTPSATSDSITAYSDSFKVELGRNDFEKTAISKRADIFLKWMWREFYNQELTCAMKYGKKRCSELLHSCNCCYQIYLAEERHCSSCHKTFKSIYNFSDHTTQCEEKQRTEPFWNMQNTDYSVPIGMVLLKLQLVSIEAYIPSEALQPFWTDVYRKSWSVKLYTTKSIAEIFQLLTVLEGAIRPDCLSSDFETSECLNSQVGSASVLPWVPDTTSAVMLRMLDLDSAILYVQNQKMDRDDGGFMKFPSRYTVAKSKQETTPETAGLDLYDGRWLPGSGRRGRGRGSRGGSRGGRGRSRGGRIPRGVSSSSRIEFKGGIVASDKAPRKNVRRGRGRGRGRRRGRRTVRPRQPSVGRARSIPKENLLGSFSMLSSSKAATIEESPRSSGADEWGLETRTTYTECDENSSGSQSEDNEENGQPMDDDYEDQVPDYSIGYSTGSRHHVMMSMMDHDSDEEDEDAEGDENVEEDADLAVDDADVEMDEDDEIGDDGEDGGVGGEMNADEDPDATSYSSDYSD

SEQ ID NO: 8719 - protein, 96 aa, Zea mays
  VARIANT 47: note = Ancestral polymorphism is A, Derived polymorphism is T
  VARIANT 44: note = Ancestral polymorphism is W, Derived polymorphism is R
MSKAGSGPGSDGATAAAASAAVQKQKSLMSTIRQCTTHRRPFRWRCALSAWGIEVLGQQAKGTERMLERIGQEVAASLKELEAHYYSYVVRSPSYD

SEQ ID NO: 8720 - protein, 66 aa, Zea mays
  VARIANT 44: note = Ancestral polymorphism is P, Derived polymorphism is L
  VARIANT 19: note = Ancestral polymorphism is G, Derived polymorphism is S
  VARIANT 11: note = Ancestral polymorphism is P, Derived polymorphism is L
MKEAELMRGNPLININNVGSFSVKRRWDDDVVFKNQARGETKTLKRFINDAIRSDFHRKFLQRYMK

SEQ ID NO: 8721 - protein, 157 aa, Zea mays
  VARIANT 143..157: note = Ancestral polymorphism lacks residues 143 to 157
  VARIANT 137: note = Ancestral polymorphism is W, Derived polymorphism is S
  VARIANT 133: note = Ancestral polymorphism is P, Derived polymorphism is R
  VARIANT 114: note = Ancestral polymorphism is G, Derived polymorphism is R
  VARIANT 112: note = Ancestral polymorphism is G, Derived polymorphism is R
  VARIANT 66..157: note = Derived polymorphism lacks residues 66 to 157
  VARIANT 46..157: note = Derived polymorphism lacks residues 46 to 157
  VARIANT 43: note = Ancestral polymorphism is A, Derived polymorphism is D
  VARIANT 41: note = Ancestral polymorphism is K, Derived polymorphism is N
  VARIANT 39: note = Ancestral polymorphism is D, Derived polymorphism is G
MIQGGDIVRGDSKGSESIYGGIFPDENFTVKHTHPATPDFKKALYRDLLSCLSATSPNILGLLLWRILDLILMDLSLHNYYQDKLLCRLDGEHVVFGRVIQGMDTVYAIEGGAGTYNGKPRKKAVITDAGEIPKEKWGDQEAQGVFYFLSPCHFQIR

SEQ ID NO: 8722 - protein, 213 aa, Zea mays
  VARIANT 81..213: note = Derived polymorphism lacks residues 81 to 213
  VARIANT 90: note = Ancestral polymorphism is R, Derived polymorphism is W
MGPGLPALGRQTRTDPNLPCPISSRRSYSLSSRFRHPIRVALSMQPTFRLSPPPGRTLAGADAPLATGAVITTAGTGASVQWDCCGSEPRQARLREAKSWRDLVAEHTGGAPLRFRDTGSMARAGVEDQNLPLRGWRCQTFLPWSSHAGMAMAGSDLPSLEQPRGDGERGRQPRGDGDGGVGPSFLGAVARGWRERESGPSMMAAERGERGRG

SEQ ID NO: 8723 - protein, 708 aa, Zea mays
  VARIANT 181..708: note = Derived polymorphism lacks residues 181 to 708
MAGIDLNTVEEEDEEEAEALPLPGPGGRGAVCLELWHACAGPVPPLPRKGSAVVYLPQGHLEHIGGDAARGAAASAVPPHVLCRVVDVTLHADGATDEVYARVSLLPEDEDAEKRAQAQARVREDEDRRDGEDGGAMRPLARTPHMFCKTLTASDTSTHGGFSVPRRAAEDCFPPLDYSQQRPSQELVAKDLHGTEWKFRHIYRGQPRRHLLTTGWSAFVNRKKLISGDAVLFLRGEDGVLRLGVRRAAQLKIVTPIPAPHNQCSSNSNLGNVAQAVATKTVFHIYYNPRLTQSEFIVPYWKFTRSFNQPISVGMRCRMRYESDDASERRCTGIIIGSREADPIWYGSKWKCLVVRWDDGIECRWPNRVSPWEIELTGSVSGSQMCAPSSKRLKPCLPQVNPEIVLPNGSVSSDFAGSARFHKVLQGQELLGFKTHDGPAISASQATEARNLQYSDERSNNNLGIPRLGVRSPTGIPGFPYHCSGFGESQRFQKVLQGQEVFHPFRGGCLADGHIRTAGMYQPDGRHVSGAAYKWSAPQGYDFPQPAKPVFLLQESSPSSVMMFPQTRSKITHLEYEYSRHEDGRLDRTVPTQDMGRSNQTLSLWPHLVSGEAIEECTGTVNMHSPVSGAEHESNNESTVENGCKIFGISLAEKIRSCDEADSCSAKCNSRLQPLKSQMPKSLGSCWATVHEQRPVVGRVVDVSATDM

SEQ ID NO: 8724 - protein, 597 aa, Zea mays
  VARIANT 294..597: note = Derived polymorphism lacks residues 294 to 597
  VARIANT 291..597: note = Derived polymorphism lacks residues 291 to 597
  VARIANT 201..597: note = Derived polymorphism lacks residues 201 to 597
  VARIANT 129..597: note = Derived polymorphism lacks residues 129 to 597
  VARIANT 5..597: note = Derived polymorphism lacks residues 5 to 597
MTELQCLPPTCEPRVTEHIEHIIELITKVQYCYELKKGQTLCSLFRTCIRYSWWGKDLIFPHHENELAQSRAAYPESEVKCWMHNGFVNKDDKKWQTQIITFSRLEISDVNHSDQALEIASDRVYYIYQTLYDCEEVLATYREEGIFFSVSFEEQNLIDKHHSEFLKYMSNDLKTIDVLDRCFMELLKAINGSLNDLKKLQQKIEQQKKKQQQQKKQQQKQQQLQKQPEHYIQALIAMEIELKNKLSILGLMPSSSLAEVLKQLKDKALKRAGLTEEKLQEQIEQINVARKNKQFEISNGIRKNFATKGIALMNEPSSTLLNTEAPDLYIRQNPVPNAYTLAINGKKPFIVVHTSLVELLTPRELQAVLAHEMGHLKCDHGVWLTFANILTMGAYTVPGFGMVAGFLEEQLYRWLQAAELTCDRAALLVVQDPKVVISVPMKLSRGYSFFRFSYSHGMVAAFARAAWLKEYHEKVSMTLNILADLSPLFTWDTKQVFVFVTAECETPHDAFIQYVICTITVVFTFKAVYASIVNVHCTFTLLAQLCLTTFVFKYGSGLIIVAIFVLKLTSVKEKSLGLLTQNFVKLFFTMKVETISL

SEQ ID NO: 8725 - protein, 628 aa, Zea mays
  VARIANT 46..628: note = Derived polymorphism lacks residues 46 to 628
  VARIANT 208..628: note = Derived polymorphism lacks residues 208 to 628
MIPVLGCTLGFGIKEHGLKDGWYDGIGIFLVVFLVAAVSAVSNHGQARRFDRLATESDNIVVAVVRGGRRQELSIFDVVVGDVVVLNIGDAVSADGVFMKGHALQVDESSMTGESHPVDIDAEESPFLASGFKVIDGCGHMLVTAVGTGTAWGEMMGSITREKTEPTPLQERLEALTSSIGKVGIAVAVLVFAVLTARHFTGSTRDEQGNPTFDRHHAITIIVVAIPEGLPLAVTLTLAFSMKRMVKEHALVCTLSACETMGSVTAICTDKTGTLTLNQMKVTEFWVGTDRPKAAATVAAAVVSFLRQGAGLNTTRSVYKPNNVSPPEISGNPTEKALLSWAVAELGMDADALKRSCKVLHVEAFNSDKKRSCVMIRDNATGTLTAHWKGAAEMVLASCSAYVGSDGAARELDAGKRRKLQEIISGMAAASLRCIAFAYKHVDSEHSKIDDEGLTLLGFVGLKDPCRPEVTHLHGQERSGRISSAWAWAAPVGSGPPLDPPLVEHLDPRLPASRPLGYVHRIWIPRERVARWWRRCWGRGGGGKGRRGGGESSRRWWRVIPHRERRERTEVGQLRTGRPTHGVNVGAARVGDVGRQRLQSDKREEGRWAAHWAAGPHVQLLGYTNDRT

SEQ ID NO: 8726 - protein, 201 aa, Zea mays
  VARIANT 73..201: note = Derived polymorphism lacks residues 73 to 201
  VARIANT 28..201: note = Derived polymorphism lacks residues 28 to 201
  VARIANT 25: note = Ancestral polymorphism is R, Derived polymorphism is G
MEFVRGGELFARVAKGRRKEDTARRYFQQLISVVGFCHAHDVFHRDLKPENLLVDERGDLKVSDFGLSVVADQFHPEGFLSSVHVTEELAIAEVGFGHPDHLSRAEKMQSLIECSLQHVLGCNVEIRFKLVPCPVRKYARLKRHSFSFLSCSGRKQELSDSVVTDEDEAVRPGARETPLKGYKGQQIQFCQLRQGYKGDTA

SEQ ID NO: 8727 - protein, 159 aa, Zea mays
  VARIANT 45: note = Ancestral polymorphism is A, Derived polymorphism is G
  VARIANT 69: note = Ancestral polymorphism is S, Derived polymorphism is R
MYQAIPYSSARAWLMPAAAAEAGVAAVKPEPVATVAEPAAEEERARPDAAAGDDDDGGRAEVGRAVAERPVLVVGRRGCCLSHVVKRLLQGLGVNPAVHEVADESALAGLVPAGAGAAAGALPAVFVGGRLLGGLDRLMAVHISGELVPILKKAGALWL

SEQ ID NO: 8728 - protein, 253 aa, Zea mays
  VARIANT 39..253: note = Derived polymorphism lacks residues 39 to 253
MLGCLVACTASRCCMRSCNTPSPAWLRRNAWSSRFSSAWLAAHASGRARAPKGGSRHAAAFAREAPRVTASFRANLWYMYPSVASQPSFVPSSFSLHFFLSVRAGFVVISVRVLDQKAQMEPMDQRTLLVNQATAFVAVIYAYFMSRLRVAQATPMAWYVVHVGRQTGVYSSWEACHAQVNGCKGACYKRYNSREEAMTAFNGHDNEDKQQEVPVLLRNKASAITIKDVIIFAGGVVILVQALIITILVSKLM

SEQ ID NO: 8729 - protein, 220 aa, Zea mays
  VARIANT 68..220: note = Derived polymorphism lacks residues 68 to 220
  VARIANT 45: note = Ancestral polymorphism is S, Derived polymorphism is C
  VARIANT 38: note = Ancestral polymorphism is E, Derived polymorphism is K
  VARIANT 21: note = Ancestral polymorphism is G, Derived polymorphism is R
MASGYRAEEEYDYLFKVVLIGDSGVGKSNLLSRFARDEFSLETRSTIGVEFATKTVQVDDKLVKAQIWDTAGQERYRAITSAYYRGAVGALVVYDVSRRTTFDNAERWLRELRDHTDANIVVMLVGNKADLRHLRAVSPEDAAAFAERHGTFSMETSALDATNVERAFAEVLRQIYHVVSRNALDIGDDPAAPPRGKTIDVSAAKDEVSPVNAGGCCSSA

SEQ ID NO: 8730 - protein, 329 aa, Zea mays
  VARIANT 259: note = Ancestral polymorphism is D, Derived polymorphism is Y
  VARIANT 274: note = Ancestral polymorphism is M, Derived polymorphism is I
  VARIANT 298: note = Ancestral polymorphism is S, Derived polymorphism is F
MVLQLRLIPRLAAAARLTPATSCAPRLLLRRAPLPPALAMASAYSAGYGAGRRLLFRQLFEKESSTYTYLLADVADPDRPAVLIDPVDRTVDRDLNLIKELGLKLVFAMNTHVHADHVTGTGLIKTKVPGVKSVISKASGAKADHFVDHGDKIHFGNLFLEVRATPGHTSGCVTYVTGDADGQPSPRMAFTGDALIIRACGRTDFQIFTLPKDTLLYPAHDYKGFTVSTVEEEAAYNARLTKDKETFKTIMNSKFSQVDMYIWFIPNSHISADMLTLLAKLILLFWDERKKSDNLVSSWADLNLSYPKMMDVAVPANLVCGIQDPPPKI

SEQ ID NO: 8731 - protein, 178 aa, Zea mays
  VARIANT 32: note = Ancestral polymorphism is W, Derived polymorphism is S
  VARIANT 48: note = Ancestral polymorphism is R, Derived polymorphism is K
  VARIANT 82: note = Ancestral polymorphism is R, Derived polymorphism is H
MVAFRFHQYQVVGRALPTPGDEHPKIYRMKLWATNEVRAKSKFWYFLRKLKKVKKSNGQVLAINEIFERNPTTIKNYGIWLRYQSRTGYHNMYKEYRDTTLNGAVEQMYNEMASRHRVRSPCIQIIKTATVHFKLCKRDNTKQFHNSEIKFPLVYRKVRPPTRKLKTTFKASRPNLFM

SEQ ID NO: 8732 - protein, 286 aa, Zea mays
  VARIANT 53..286: note = Derived polymorphism lacks residues 53 to 286
MALCFFGITADSVSHPSDSTRRSLEPPCCSVGCVAPEEDGAVAAGNDIAAVPYVPRGWVRRLAARRSINSMACSFPPSSATRLHALDAAAAGVKNGRVPLKASVAPAQRALGCCRATARQEGATQEPSVAASSARAQLDLLEQLTSATPDDTAAGKDPYCTCTQGYKYSVIEPNSHDKRSSSGLENGMPPPEPRRRATIREQLSALANGKVDEFTLPLGKRLKEGLKRLNSLTVSQRRNIKRQALLTQVSGRNDSVFFATVGAFVLVPPLAILAIGVLTGYIQLFP

SEQ ID NO: 8733 - protein, 139 aa, Zea mays
  VARIANT 97: note = Ancestral polymorphism is C, Derived polymorphism is R
  VARIANT 84: note = Ancestral polymorphism is A, Derived polymorphism is T
  VARIANT 40: note = Ancestral polymorphism is A, Derived polymorphism is T
MKTRSQTSPKPLKTVAMAPRPSSTKRKPRPKPAGKGDPRAPKKPPTAFFYFMEDFRKIYKQEKPSVKSMQEIGKACGEKWNTMTFEVSIFSLQPDSRVPLVIYHLMLPADEKVKYYDIATEKRAEFEKAMIEYNKKKES

SEQ ID NO: 8734 - protein, 95 aa, Zea mays
  VARIANT 4: note = Ancestral polymorphism is A, Derived polymorphism is T
MSLAWTAMGSTPKDGPSAGCTMITSMLSLVMGKTVKKDLAMTGEVTLTGRILPIGGVKEKTIAARRSAIKTLIFPAANKRDFDELASNVKDLIVN

SEQ ID NO: 8735 - protein, 219 aa, Zea mays
  VARIANT 66: note = Ancestral polymorphism is P, Derived polymorphism is S
  VARIANT 86: note = Ancestral polymorphism is L, Derived polymorphism is P
  VARIANT 124: note = Ancestral polymorphism is N, Derived polymorphism is I
  VARIANT 187..219: note = Derived polymorphism lacks residues 187 to 219
  VARIANT 195: note = Ancestral polymorphism is I, Derived polymorphism is V
  VARIANT 196: note = Ancestral polymorphism is A, Derived polymorphism is T
  VARIANT 203: note = Ancestral polymorphism is R, Derived polymorphism is W
MQYLFDEDGRRYLDAFGGIATVCCGHCHPDVVEAIVNQAKRIQHSTVLYLNHAIADFAEALASKMPGDLKVVFFTNSGTEANELALMIARLYTGCNDIISLRNGYHGNAAGTMGATAQSNWKFNVVQTEVRAFFDVHDQEGSHPGGIHLEMTGQNVTECIGGSRTVTFDDLSDRYHTHCDPRLNASQSLELAFIIAERLRKRRMRSGLYNSLPLPPLAF

SEQ ID NO: 8736 - protein, 85 aa, Zea mays
  VARIANT 39: note = Ancestral polymorphism is G, Derived polymorphism is R
  VARIANT 35: note = Ancestral polymorphism is T, Derived polymorphism is I
MTVWENMHKAEAAIQKLVIKLEKKRPYSLERIFNTLRSGSRKTQVVRSTSTANQNQHISRTIKTAPNLSKNGQMSSLSGCFRQDL

SEQ ID NO: 8737 - protein, 492 aa, Zea mays
  VARIANT 240: note = Ancestral polymorphism is N, Derived polymorphism is Y
MSSSNNSVSAALSGTTPVFRLRVWQLIAIAVGIVMAILLVIALCLSLRRKKKTVKGFDNTSLAEIPIVSKEINVDRVDAQSLHDGEAPFMPVQDKYSQTKGAGQLGGRRSVDVDAFSQCSSVYNIEKAGSSYSEDYSYSSSGPARKGSSPYAYSASPLVGLPELSHLGWGHWFTLRDLECATNRFAKSNVLGEGGYGVVYKGRLVNGTEIAVKKILNNVGQAEKEFRVEVEAIGHVRHKNLVRLLGYCVEGIHRMLVYEYVNNGNLEQWLHGVNQHGVLSWENRMKILLGTAKALAYLHEAIDPKVVHRDIKSSNILIDDEFNSKVSDFGLAKLLNSDKSHINTRVMGTYGYVAPEYANSGMLNEKSDIYSFGVVLLECVTARDPVDYSKPADEVNLIEWLKMMVTSKRAEEVVDPNLDVKPPKRALKRAILVGFKCVDPDADKRPKMSHVVQMLESVQNAYHQDQRKLSQVGSIDIESQQSLEETSNSADA

SEQ ID NO: 8738 - protein, 842 aa, Zea mays
  VARIANT 645..842: note = Derived polymorphism lacks residues 645 to 842
  VARIANT 647..842: note = Derived polymorphism lacks residues 647 to 842
MSSGGGGGGARGPSGPVPASARKLVQGLKEIVNRPDAEIYAALRECNMDPDEAVSRLLSQDTFQEVKSKRDRKKEVKETPEPRSRGASNSSRSSRGGVDRAGRGNSVQSGSSGTDYMASRSSILGPAVAATNAMQKPTVPSLSTNKDVVPNGSVGAQQSSSGFQHNWFGVPGQMSMADIVKMGRPQVRSSGKPMAAGDTSYAGQTPSLSSSINQNSKQSASTALPTTFDQGFPALPDPIPHTVNSSHGSAGNNHTHENDWFPQDDLPSGVQPTCIEASGDQSLFVASLDQSMLVADASYSQEISHAEENNSTAVEATLSSERHLEIVEDDNHFNDGLLQNSSAYQAQVHSYVDNEVGISNVDAESASMNFQHLSLQNEDIAATKSAEDNPAVILPDHLQAANADCAHLSFGSFESGAFSGLLSSKVPKGSLEDDEVLIPDESRSVNRIDVRNQDYYDDDALNSSENVDVETRIGNMDNIDGPSVSESDALRQGAIDVPGLQYDLPSVSSHAYSNTTQPSTMEEPQGNTQAQPLSHFSGLLQANTLPNNLLGSNLTPLREFDFSQFLQTQSATKYNPSVAPNNLPPISMQETSKQGGFPNTQSTQHVPSTSISSGLPLPQQLPVYSQPTLPLGPFTSLVGYPYLPQNYYLPSAPFQQAYSSNGPFHQSAAPAVPGAGMKYPMPQYKSSPPASTLPQPSSLSGYGGFGSANNIPGNFSQNQGAPAAPTTLGFDEALGTQFKHPNHYAALQQSDNSTMWLHGGAGSRTISAVPPGNFYGFQGQSQHGGFRQAHQPSQYGGLGYPSFYQSQTSLPQEHPQNPTEGSLNNPQGVPSQPSHQLWQHIY

SEQ ID NO: 8739 - protein, 190 aa, Zea mays
  VARIANT 27: note = Ancestral polymorphism is W, Derived polymorphism is C
MIRTATVRARLLLSRSYVAQAQAASRWPLVRWKASHLGSVRSFYQMDITRQYKNKSLTARGCHSSPESQELAMKSCVPCNSKDLGPMSEDSAKKLLEQVNGWELITEGGVLKLHRTWKVKNFVKGLEFFQLVAAIAEEEGHHPDLHLVGWNNVKIDVWTHSVRGLTSNDFILAAKINHLTLDGIIRKKAK

SEQ ID NO: 8740 - protein, 426 aa, Zea mays
  VARIANT 239: note = Ancestral polymorphism is A, Derived polymorphism is V
  VARIANT 41: note = Ancestral polymorphism is D, Derived polymorphism is G
  VARIANT 6: note = Ancestral polymorphism is G, Derived polymorphism is E
  VARIANT 2: note = Ancestral polymorphism is G, Derived polymorphism is D
MGLRGGALALLLLLFVHGGQRAAEAGGDAFVRVQGTRFVQDGKPFFANGFNAYWLMTFGADPARRGKVTSALSQAAGAGLSVARTWAFSDGGGGGGSALQYSPGRYNENTFQGLDFVLSEARKHGIKMILSLVNNYDSFGGRKQYVQWARERGQTIGSDDEFFTNPFVKGIYKNHIKAVLTRVNTITGVAYKDDPTIMAWELMNEPRCQSDVSGHAIQSWITEMAAHVKSIDGNHLLEAGLEGFYGASSARRSANPSGYQVGTDFIANNRAPGIDFATVHSYPDQWLGGLDAQAQLRFLGAWLDAHIADARAVLRKPLLVAEFGESRHDPGYSGGQRDAVFGTVYARVYDSARAGGPAAGALFWQLLAEGMDSYGDGYEVVLPQAPSTAGVIATQSRRLQGLARAFVRARKAHQGKAGKGAKGGGN

SEQ ID NO: 8741 - protein, 120 aa, Zea mays
  VARIANT 79: note = Ancestral polymorphism is P, Derived polymorphism is T
  VARIANT 73: note = Ancestral polymorphism is S, Derived polymorphism is R
  VARIANT 50: note = Ancestral polymorphism is P, Derived polymorphism is L
  VARIANT 38: note = Ancestral polymorphism is T, Derived polymorphism is I
  VARIANT 33: note = Ancestral polymorphism is P, Derived polymorphism is L
  VARIANT 27: note = Ancestral polymorphism is W, Derived polymorphism is S
  VARIANT 24: note = Ancestral polymorphism is Q, Derived polymorphism is E
  VARIANT 14: note = Ancestral polymorphism is R, Derived polymorphism is M
  VARIANT 13: note = Ancestral polymorphism is R, Derived polymorphism is C
  VARIANT 7: note = Ancestral polymorphism is L, Derived polymorphism is M
  VARIANT 4: note = Ancestral polymorphism is M, Derived polymorphism is L
MCDLCVLILCSLRRLGVDYINLYQIHWPDRYVPMFGETEYDPNRQYTSVPMEEQLEALGRAIDAGKVMSSRISLLAYSTMTMGILSGKYHLSDNCGPPNARMNLFKGRYSEGESRYKLHL

SEQ ID NO: 8742 - protein, 87 aa, Zea mays
  VARIANT 58: note = Ancestral polymorphism is R, Derived polymorphism is H
  VARIANT 62: note = Ancestral polymorphism is I, Derived polymorphism is T
MSESRSSFRNVNTDCNWSKKENKLFEEALARYREGTPDRWLKVSRAMGGIKTADEVRRHYEILNEDVTLIVSGGIPFPNYNTQGAWN

SEQ ID NO: 8743 - protein, 218 aa, Zea mays
  VARIANT 60: note = Ancestral polymorphism is R, Derived polymorphism is W
  VARIANT 102: note = Ancestral polymorphism is R, Derived polymorphism is P
MDRPHRHRNEDLTGGRAGVRRGGGGGAMEASRRGRFHRHDGPAAPVPVVDQADCTAQTCRSCVAVTLADAIALGCCPCAVVSLLGLALVKAPLALARRCLRRLRGELRHRKRVRDMHGPADKAKCRSSDAGAASRGAWALEAAARARASNSSSSGSGRLDAEKVWMEEMYRVGHWGFGRLSVSVSVSVTPPPPVWPGRSPDGDGGGGGRKDVDLRCES

SEQ ID NO: 8744 - protein, 239 aa, Zea mays
  VARIANT 212: note = Ancestral polymorphism is V, Derived polymorphism is I
  VARIANT 72: note = Ancestral polymorphism is I, Derived polymorphism is K
  VARIANT 31..239: note = Derived polymorphism lacks residues 31 to 239
MELRRPAPSPLVDNYVVPGDVVLDLSEMNNQTIKLGAGLRQECDTIEATSAGKLRQLKPNKYCIENSQKRYKPSVEDTVLGIVVDTKPDNFLVDIKGPNLAFLPVLSFEGGTRRNIPKFKIGTLIYARVVKANSIMNPELSCMDATGKAAKFGQLKDGYMFDTSTGMSRMLLSSPTCPVLEVLGKKLSFEIAVGLNGRVWVNAPAASTVILVSNAIMRSESLSGIKQRAMVENLLERLS

SEQ ID NO: 8745 - protein, 193 aa, Zea mays
  VARIANT 76..193: note = Derived polymorphism lacks residues 76 to 193
  VARIANT 69: note = Ancestral polymorphism is S, Derived polymorphism is I
  VARIANT 67: note = Ancestral polymorphism is T, Derived polymorphism is I
  VARIANT 41: note = Ancestral polymorphism is A, Derived polymorphism is V
MHYDLPPWSINAKDFTFSVDIAQNEQFLSNGKNPMLTVMSAGHALHIFVNGQLTGTVYGSVEDPKLTYIGNVKLWSGSNNISCLSIAVGLPVGLKGEALSLHSLSGSSSVEWGEPVQKQPLSWFKAFFNAPDGDEPLALDMSSMGKGQLWINGQGIGRYWPGYKASGTCGICDYPGEYDGKKCQTNCGDSSQR

SEQ ID NO: 8746 - protein, 189 aa, Zea mays
  VARIANT 20: note = Ancestral polymorphism is P, Derived polymorphism is L
  VARIANT 24: note = Ancestral polymorphism is G, Derived polymorphism is S
  VARIANT 31..189: note = Derived polymorphism lacks residues 31 to 189
  VARIANT 49: note = Ancestral polymorphism is R, Derived polymorphism is C
  VARIANT 54: note = Ancestral polymorphism is Q, Derived polymorphism is H
  VARIANT 67: note = Ancestral polymorphism is G, Derived polymorphism is D
  VARIANT 73: note = Ancestral polymorphism is D, Derived polymorphism is Y
  VARIANT 99: note = Ancestral polymorphism is P, Derived polymorphism is H
  VARIANT 101: note = Ancestral polymorphism is E, Derived polymorphism is K
  VARIANT 116: note = Ancestral polymorphism is W, Derived polymorphism is S
  VARIANT 117: note = Ancestral polymorphism is S, Derived polymorphism is I
  VARIANT 140: note = Ancestral polymorphism is F, Derived polymorphism is S
  VARIANT 141: note = Ancestral polymorphism is H, Derived polymorphism is R
  VARIANT 144..189: note = Derived polymorphism lacks residues 144 to 189
  VARIANT 154: note = Ancestral polymorphism is T, Derived polymorphism is M
  VARIANT 155: note = Ancestral polymorphism is A, Derived polymorphism is T
MSSSLYLVFEYMEHDLAGLPATPGLKFSEPQVKCYMQQLLCGLDHCHNRGVLHQDIKGANLLLDNNGILKIADFGLATFFNPKQKQHLTSHVVTLWYRPPELLLGATNYGVVVDLSSVGCILVESLSGKHIMPGRIEFIFHNLGCVSRVGNSYTAWIKQYIISAMVTRCRLPLLSLIQVEQLHKIFKLC

SEQ ID NO: 8747 - protein, 226 aa, Zea mays
  VARIANT 164: note = Ancestral polymorphism is A, Derived polymorphism is V
  VARIANT 43: note = Ancestral polymorphism is L, Derived polymorphism is P
MKLMRSAPSPLVDNYMVPGDVVLDLSEMNNQTIKLDAGLRQGLSYDIEDRLDSFMVRMEGLDSTKRKTIMGFIQQTHGLVTKFRIRHGISDNIKDIESKVKKVKERYGRSNVHRIVASLVATTVDPRLLAMHNLFEDGDEPAKKIKTVFVVNFGGLGKTTLVKAVYDKVKEFDCSAFVSIGQKCDLNKVFKDVLYYLDKQHHENIIASKMNEKQLIDKLLEFLADK

SEQ ID NO: 8748 - protein, 239 aa, Zea mays
  VARIANT 111: note = Ancestral polymorphism is G, Derived polymorphism is S
MELRRPASSPLVDNYVVPGDVVLDLSEMNNQTIKLGAGLRQECDTIQATSAGKLRQLKPNKYWIENSQKRYIPSVEDTVLGIVVDTKPDNFLVDIKGPNLAFLPVLSFEGGTRRNIPKFEIGTLIYARVVKANSIMNPELSCMDATGKAAEFGQLKDGYMFDTSTGMSRMLLSSPTCPVLEVLGKKLSFEIAVGLNGRVWVNAPAASTVILVSNAIMRSESLSGIKQRAMVENLLERLS

SEQ ID NO: 8749 - protein, 327 aa, Zea mays
  VARIANT 2..327: note = Derived polymorphism lacks residues 2 to 327
  VARIANT 112..327: note = Derived polymorphism lacks residues 112 to 327
  VARIANT 180..327: note = Derived polymorphism lacks residues 180 to 327
MRGSRVDSASSPRGPRPPPRDTRSQCSGVRARRREVRLAPLDPPRQPLAMSSLSRQSPGRTPSRLLHRPPTASRLSSSSRLPTHPRCALGPGSGPTNNESLSRAQRHSRRSQWQPPSQTIEPHRCCRPWNGADCRRVEPLVEWNWQPPPPPPPPAVATSKCTTPMTLRGRNRSYLMNKARAFLELFFAMWFVMGNVWVFDARLGSFQRAPRLYALCVSLLAWNTVVYSLTFLSAASALRSTGRRRRFGSCRAHTCFISSAYTGGSGSSPLALSASKSSSELYIHYTHDILAYSLDQGVSILDTTDIFQLTREIKEELIFILAGGCNH

SEQ ID NO: 8750 - protein, 305 aa, Zea mays
  VARIANT 197: note = Ancestral polymorphism is I, Derived polymorphism is N
MASPTRTPSPPPAVEPIAPSLSSEHPPVNPSCDGSFSPENPAPAPPPPPATPHPHTPSDSSPSSTPHPSAPQPLPSPPPHTPDDSSPSSTPHPSAPQPPPSPPPPSADASPPLSRQGETSPPRPSPPPSPAPVSPPTPAPASSEAKSEQEEAESASESGSMTLAIVLAKTEDATPPKASSAEASPTRSPQKESAVTIAKLLSAEDLAAMEAKATPDKVTPPSDAGSLAAAAAVTTVGGVSGGVGSKRWLLGGVPEKVRRAELRRAELGFRVSAAVFCLVALSVMAADTTTGWSGDSFRRYNEYRC

SEQ ID NO: 8751 - protein, 200 aa, Zea mays
  VARIANT 75: note = Ancestral polymorphism is C, Derived polymorphism is Y
  VARIANT 99..200: note = Derived polymorphism lacks residues 99 to 200
MAATKVCNVRFEGNVITTTVTASGAAVESWLDEILSVHRRRLHKLVVGLDVEWRPSFSRAYSKTAILQLCVGRRCLIFQLLHADYVPNTLDEFLSDPDYTFVGVGVAADVERLENDYDLEVANAEDLAELAAKEMGHPDLRNAGLQGIARVVMDAHVEKPQWVRTGPWDASSLSDEQIEYATIDAFVSFEVGRMLLSGYY

SEQ ID NO: 8752 - protein, 577 aa, Zea mays
  VARIANT 238..577: note = Derived polymorphism lacks residues 238 to 577
MAAQVVAAAGTPVARPLGGGSGADALRPAARMPRERRTGAVAARGRRESQVVSVISRAPRPDAGVLPVSPDDDAAVKEEANFQHLKAIQQLATAANGVWSKPNVRRKTKIVCTIGPSTNTRDMIWKLAETGMNVARLNMSHGDHASHQKVIDLVKEYNASHADNVIAIMLDTKGPEVRSGDLPQPIFLESGQEFTFTIKRGVGTDTCVSVNYDDFVNDVEVGDMLLVDGGMMSFLVKSKTEDSVKCEVIDGGELKSRRHLNVRGKSATLPSITGNNKDWDDIKFGVDNQVDYYAVSFVKDAQVVHELKDYLKSCNADIHVIVKIESADSIPNLHSIITASDGAMVARGDLGAELPIEEVPLLQEEIIRMCRSMGKAVIVATNMLESMIVHPTPTRAEVSDIAIAVREGADAVMLSGETAHGKFPLKAVKVMHTVALRTEATIPGGETPADLGQAFKNHMSEMFAYHATMMSNTLRTSIVVFTRTGFMAILLSHYRPSGTIFAFTDEERVRQRLALYQGVCPVQMEFSDDAEKTFGNALSYLLKHGMVKDGEEVALVQSGKHPIWRSQSTHNIQVRKI

SEQ ID NO: 8753 - protein, 295 aa, Zea mays
  VARIANT 143: note = Ancestral polymorphism is A, Derived polymorphism is V
MAANLKWAPVLALVVVVAAMVGTTSAGNIAVYWGQNGNEGSLADACNSGLYAYVNIAFLTTFGNGQTPVLNLAGHCDPGSGSCTGQSSDIQTCQSLGIKVLLSIGGASGSYGLSSTDDANSVADYLWDNFLGGSGSSRPLGAAVLDGIDFDIENGQSAHYDDLANALKGKGSVLLTAAPQCPYPDASLGPALQTGQFDNVWIQFYNNPGCAYANGDDTNLVNAWNTWTSSITAGSFYLGVPASPQAAGSGYIDPGTLTGTVIPAIRGIGNYGGIMVWDRFNDVQNNYSSQVKGSV

SEQ ID NO: 8754 - protein, 402 aa, Zea mays
  VARIANT 3: note = Ancestral polymorphism is D, Derived polymorphism is G
MEDHSSWDYLPVEHIRTPVFNSGVVSEASNGGNDFSISLDAVVPDDILERIFTFLPIASMMRATSVCKRWHDIICSRRFLWTHMLPQRPWYFMFTSNKTAAGYAFDPILRKWYDLELPYIDKSSCFISSSCGLVCFMDNDNRNTISVCNPITKHSRRLLEPPGETLPDYSTIAMNVDRLSHKYSIALAKSKQIPEDFVRWDFSVYKYDSSSGSWVTSVREVFVGWRGGDNSVICDGVLYCLIHSTGALGNVNPRHGLIMYDLAGEPSETSLMQTSISVPCSLTCGRLVNLKEKLVLVGGIAKHNRPDIIKGIGIWELHERQWHEVARMPHKFFQGFGEFDDVFACSGIDDLVYIQSYGATALLVFDMMQKQWRWSVKCPVSKRFPLQLFTGFCFEPRLDITV

SEQ ID NO: 8755 - protein, 110 aa, Zea mays
  VARIANT 25: note = Ancestral polymorphism is E, Derived polymorphism is Q
  VARIANT 27: note = Ancestral polymorphism is V, Derived polymorphism is G
  VARIANT 29: note = Ancestral polymorphism is H, Derived polymorphism is Y
  VARIANT 34: note = Ancestral polymorphism is S, Derived polymorphism is Y
  VARIANT 79: note = Ancestral polymorphism is D, Derived polymorphism is N
MLLMREADHSNITRLLLGARVIALEEVPHFIVFSVTEVFQGFSRTIQCDIIQNDLLGALPEDEEEVSPYPNNGQELPFDFFGLGQPLVQMEMGLGKPMENVGLDLSLPQA

SEQ ID NO: 8756 - protein, 275 aa, Zea mays
  VARIANT 129: note = Ancestral polymorphism is H, Derived polymorphism is L
MGFMDAEELVVTLAPVAVYWAYAGMYEALLARTTALDKYRLHSRRDEETKNIASRKDVVRGVLLQQCIQVAISVAVLKLEGHGHGHGHGHGAAADGLAAAPAEAEPFLVSAARFGVAMLVLDAWQYFMHRLMHSVPYMYRRFHSWHHRVAAPYAYAAQYGHPVDAVLTETLSGAAAYLASGMSPRVAAAFFVFATVKGVDDHCGVAAPWNPFHAAFRNNTAYHDVHHQRGGGRRNFSQPFFVVWDRLLGTHTPYALRQRDGGGLEVKAFKGRQMQ

SEQ ID NO: 8757 - protein, 217 aa, Zea mays
  VARIANT 73: note = Ancestral polymorphism is Q, Derived polymorphism is H
  VARIANT 192: note = Ancestral polymorphism is R, Derived polymorphism is Q
MRMLRWIYGDIRSGQVRNDDVCDRLGVAPFEEKLAQHRLRCFGHIQRKPQVTPMRSRILSLQPVRETREKQVQLWKDLILDYCRSQKIHTISLEEDFPLFSNAKIERSLSYEAKEVFLAALVSEGRAEWMDKGHKKCLILWLRIQDWANFILNFVKDNGLEVMTIEEIRSGIDTRGTELEGIDRGVLMRALRQLEQKGKAAIFKGTSADDEGVKFSV

SEQ ID NO: 8758 - protein, 235 aa, Zea mays
  VARIANT 159: note = Ancestral polymorphism is L, Derived polymorphism is F
  VARIANT 165: note = Ancestral polymorphism is S, Derived polymorphism is G
  VARIANT 186: note = Ancestral polymorphism is V, Derived polymorphism is A
MASKRIQKELKDLQKDPPTSCSAGPVGEDMFHWQATIMGPSDSPYSGGVFLVTIHFPPDYPFKPPKVAFRTKVFHPNINSNGSICLDILKDQWSPALTISKVLLSICSLLTDPNPDDPLVPEIAHMYKTDRHKYENTARTWTQSTVPRVVLNAAVLCHLEAVILSVKKNWYLEPFCVGWRCRPVHACVLLPFTSHRVGRNITFCLLSNWYETIMIVGDLVAADEANLNGSFTRDL

SEQ ID NO: 8759 - protein, 521 aa, Zea mays
  VARIANT 329..521: note = Derived polymorphism lacks residues 329 to 521
  VARIANT 160: note = Ancestral polymorphism is C, Derived polymorphism is R
MSSGADASDVDAALALLSGPDLVAHLRVTCRRADYEAAARVLGDRDRRHAQTEAALAEARTGLADLTAEVQALQERYLELKAASRGPSSRSSGGAIAAAAPRVNRRAQEPAPKSTIDLCSSSDNDEFEEGEFRPGVAGVSGTRKDSASKGQEGRRARVSRKRKAPASACSSDDDEISLSQLIKKRSSAKPWANGEPKKGHGDVQANSAGPLGFDRPVISPAIRGIPEAVSEHMVASPDDPKVSVFMQGTGNGQSGKNEGLSRTMPSPAPTGSGAGNGPHKNGPHKNGSECQTRIGEKQSPVAPPGNDASVQVRTPSVTNMARTNVGSARVVAETPMQHTHSTSDGTVNVALKSMEGQEKAIGLVHKTKVSLDTNGTGDKARIVLKDTREQQKPAGLVLHTKVLPRSDGIKEQGGKLSPFRSQVDAHGGRSTTSDKPVLATLQKNQLELHPEQMSVESSLSSAVTRQWKSSSALLFSCLGNKELCMQAACALHRQKKFTTQLTGGITKFDAERSVKIEYLGG

SEQ ID NO: 8760 - protein, 335 aa, Zea mays
  VARIANT 47: note = Ancestral polymorphism is V, Derived polymorphism is L
MEGVPDEKCALVAELVQVLEMARHLETRMAVLQQQGGGEHQQCRALLSTMRASIDRAVHLAVSCRAEAARPESPPSGGDGSPRSGSGGSDQAGEVRGRGNATGQCKKRSYHRIRTRRKALPKSSIQVRVSTVQDVSPLDDGLSWRKYGQKDILGAKYPRHTQSCQASKQVQRTDGDPLLFDVVYHGTHTCAQAAAAAAHHHGNNHPATDQATSPGCVVAGPAALPFSLRPAASNKPTGAAADDGATSSRFIATGCTVVTASPFVYPATPDCQLVSGGGGGGYAVGGGGGVAGVPNVPDVELASTTNSPMAMGEMDFMFPLDAADFLELENPASYF

SEQ ID NO: 8761 - protein, 131 aa, Zea mays
  VARIANT 113: note = Ancestral polymorphism is D, Derived polymorphism is N
  VARIANT 112: note = Ancestral polymorphism is S, Derived polymorphism is L
  VARIANT 62: note = Ancestral polymorphism is G, Derived polymorphism is R
  VARIANT 56: note = Ancestral polymorphism is K, Derived polymorphism is R
  VARIANT 36: note = Ancestral polymorphism is A, Derived polymorphism is V
  VARIANT 33: note = Ancestral polymorphism is E, Derived polymorphism is G
  VARIANT 31: note = Ancestral polymorphism is L, Derived polymorphism is F
  VARIANT 25: note = Ancestral polymorphism is H, Derived polymorphism is L
  VARIANT 22: note = Ancestral polymorphism is L, Derived polymorphism is P
  VARIANT 18: note = Ancestral polymorphism is S, Derived polymorphism is L
  VARIANT 15: note = Ancestral polymorphism is R, Derived polymorphism is W
MCNINHLLLFFQIKREISTMKLIKHPNVVQLHEVMASRTKIYMVLEFVDGGELFDRIFSDPGMSILEGEDEARIYFHQLINAVDYCHSRGVYHRDLKPENLLLDSNGALKVSDFGLSAFASQTNVRSLVSS

SEQ ID NO: 8762 - protein, 410 aa, Zea mays
  VARIANT 188: note = Ancestral polymorphism is L, Derived polymorphism is H
  VARIANT 186: note = Ancestral polymorphism is L, Derived polymorphism is V
MSSSEASTQDHGVPALEAQDSTDDHGVPALEAPTPEATDKVLAAMARLARRRRLELRRLGRTAPVGAEGEVAMRVRPVSGTSADTSRESAKVAPEPHEGASAVAGWPKPVSHGAVSVIGRRREMEDAVAVAVPFLVAAAGEEGDGGGEKEAEMEFFAVYDGHGGSRVADACRERLHVVLAEEVARLHLVKGGDGARWREVMEACFARVDGEVAVVEGEVNNAGHTVGSTAVVAVVGPRHIVVANCGDSRAVLSRGGVPVPLSSDHKPDRPDELERVESAGGRVINWKGYRVLGVLATSRSIGDYYMKPFISAEPEVTVTERTHKDEFIILGSDGLWDVMSNEVACKVARNCLCGRAASKYPETVHGSSASDAAAVLVEFAMARGSTDNISVVVVELKRLKWKGGRQNGRT

SEQ ID NO: 8763 - protein, 580 aa, Zea mays
  VARIANT 216: note = Ancestral polymorphism is F, Derived polymorphism is S
MRESARAVQSEKEVLESSFNKLKMESEMCKQEMEATLQCQLKELEALQSRKVELEAKVGSLEADLSKAVARNHELELEVGKLEAEMAVTKEEVEKLQAWFAEQDQKQFVVAAEVARLQSEIDQSAKANKAAVVAHEAELEMLKVNVDMVLEITRQRQLAAENELELSRVKQDFESLRTYVSTLVGILGNAADFQDNDLSSSTIASNNDRRKMMIAFDMRCVGFIMAKMVLRELMDPSTFFKFKSFLTKMLDRQWGAGWNLLALLLATKPEERISCVDALRHPFLCGPKWRINPSANLIRWGLGSTAVRMAEDYIYGRHQRRRLSYFVELMEVLNPSLRTQNWLHLLPGRWRLLYCTGRHIGLTLRQPSPRVLISAVYLTVSSESVDQVFSLTSDVGFRIMPEPNWPHDKSGSEGVLSVTASARIAAGRIYINEHDSKEDMVTSSMRYLHGNKWRKFSQIKELPSSLPAVNIAMDEIHVSISCTSTMTVNSAQKALKEIRTQTPPEMFDLSKIVCGTYIDARLMILRGVNGSTANCNPVSLKKDFFLQALHWWRSDVFLIQGATVGLSMYLLLSFDLVVVV

SEQ ID NO: 8764 - protein, 256 aa, Zea mays
  VARIANT 211: note = Ancestral polymorphism is R, Derived polymorphism is C
  VARIANT 34: note = Ancestral polymorphism is P, Derived polymorphism is S
MIFKRNQRSEILALGRCNAANDGREDEGGGDLRPRKRWRGDEFFPVELLGDVPASSIPYVALGLRWSEEPEAPTEPVQPPLAARPPVVRTSRGRTQEERDPESFCTFKERLCYLQKTEHGRVCFGRSGIHRWGLFARRDIQEGEMICGVKNIDFPLGNCILSKYNAYVLFKISEEVVVDATDKGNMARLINHSCTPNCYARIMSVGHDESRIVLIAKKNVCAGDELTYDYLFDPDEGDEREVPCLCQTANCRKFMN

SEQ ID NO: 8765 - protein, 85 aa, Zea mays
  VARIANT 30: note = Ancestral polymorphism is T, Derived polymorphism is M
MSGAQGAHPVGQTTPTTYESVGGGENRTRTDLRSREDQGAIQIEKVQDKVDDAAGRGVDHSTFGANKEGRDDKADAGATGTGTGA

SEQ ID NO: 8766 - protein, 1455 aa, Zea mays
  VARIANT 615..1455: note = Derived polymorphism lacks residues 615 to 1455
MLRLRAFRPTSDKVVKIQLHPTHPWLVTADANDRVSVWDWEHRQVIYELKAGGVDERRLVGAKLEKLAEGDDSKGKPTEAIRGGSVKQVSFYDDDVRFWQHWRNCSAAAEAPTAVSQQSSTFIAPAPSTRGRHFVVICCENKVIFLDLVTMRGRDVPKQELDNRSLLCMEFLSRTSSSDAPLVAFGSSDGVIRVLSMLTWKLVRRYTGGHKGAIACLMTYMSAAGEVHLVSGGSDGLLILWSADHIHDSRELVPKISMKAHDGGVVAVELSRVMGSAPQLITIGADKTLAIWDTVTFKEIRRIKPVPKLACHSVASWCHPRAPNLDILTCVKDSHIWAIEHPTYSALTRPLCELSSLVPPQVLALHKKLRVYCMVAHPLQPHLVATGTNIGIILSEFDPRALPAIAPLPTPTGNKEHSAVYIVERELKLLNFQLSNTANPSLGNAGVASDAGRSMNNSIEQLIVKQTKKHISTPAPHDSYSVLSVSSSGKYVAIVWPDIPSFAVYKANDWSVVDSGTGKLFAWDTCRDRYALVESALAPRMPLVVKGGSSKKAKEAAAAAAQAAAAAASAASAATVQVRILLDDGTAHVLQRSIDGRNEPVSNLCFPFIVFSTNWSSIRIFSLLSVFWISELIFCRYPNIVSKTCCSEIKTLNFLSISISSAAESLLSSVMAMIFQVIGLHGGALLGVTYRTSRRISPLTATAISTVQSMPLSGFGGSGSSFASDDPFSSKEGPPQNFQLYSWETYQPVSGLLAQPEWTVWDQTVEYCAFAYQQYIVISSLRPQFRYLGDVSIPFATGAVWHRRQLFVSTPTTIECVFVDAGVAAIDIETKRIKQEMKAREAQSRAAEEHGDLALITVEAPQVTVSEKVSLRPPMLQVVRLASFQYAPSIPPFIVPKQSKFDGDDSVFQKELDDRRYAEVAVAGGGVSVAVTRFPPEQKRPIGPLVVVGVRDGVLWLVDRYMCAHALSLSHPGIRCRCLAAYGDPVSAVKWATRLGREHHDDLAQFMLGMGYATEALHLPGISKRLEFDLAMQSNDLKRALACLLTMSNSRDVGQETAAADATDVTQILSLAVAKQAKQESLTDAVQGIVKFVKEFFDLIDAADATGQSDIAREVLKRLAAAASVKGALHGQMLRGLALRLGNHGELTRLSGLVSNLITAGHGREAAFAAAVLGDNALMEKAWQDTGMLAEAVLHAQAHGRPSLRNLVITWNKMLQKELDHTPTVKTDAAAAFLASLEDPKLTSLGETEKKPPIEILPPGMPPLSAPPIVIKKAGAKPGLPNAAKASNGPIGAPMAQGAPMAHGTPGPQGVPMNQVTPSQGSHDEARPSDATVADAAAAVAEGTAAPPAAEGTSAPPAAEGTATPSSEEAKAAPGNEEGTSNPINEEATAAAVSVAAGSPDSAAAPAADTSSDAPAVNPTEDTVSAPSTEAPPELTDKPSSAEASLPPPPSVSGV

SEQ ID NO: 8767 - protein, 90 aa, Zea mays
  VARIANT 72: note = Ancestral polymorphism is S, Derived polymorphism is R
MSTRGGEAARQATVKIIETVHVEADRYSFKSIVQRLTGRDAVVGGGGDYSEGAPDRGSYEEAAAQRAAGFTSKQASRPFADRHACKDESC

SEQ ID NO: 8768 - protein, 87 aa, Zea mays
  VARIANT 44: note = Ancestral polymorphism is Q, Derived polymorphism is R
  VARIANT 41: note = Ancestral polymorphism is F, Derived polymorphism is V
  VARIANT 13..87: note = Derived polymorphism lacks residues 13 to 87
  VARIANT 9: note = Ancestral polymorphism is W, Derived polymorphism is L
  VARIANT 3: note = Ancestral polymorphism is L, Derived polymorphism is H
MYHDVLKHLIKCQYALYNHLGCVYHVHLYIKCPAAPRSRIFLEQVMHICRSTTTSLVSMLCSARILCALPGCFWRDVCLENFRCIVW

SEQ ID NO: 8769 - protein, 390 aa, Zea mays
  VARIANT 4: note = Ancestral polymorphism is C, Derived polymorphism is R
  VARIANT 169: note = Ancestral polymorphism is Y, Derived polymorphism is H
  VARIANT 326: note = Ancestral polymorphism is E, Derived polymorphism is K
MVLCFKLLFGPTAAIFLSAVVILSCFTNVPQLQLSLKYTGELDSSYVAPAPVPKCDIFRGEWVPDPAPPQYTNETCDFIQEHQNCMLYGRPDLEFLKWRWKPDGCDLPRFDPHRFLQVVANKSVAFVGDSLARNHMQSLFCLLAKVEKPKDVSVTDRADPNMILYYEGYNFTMYLFWSPFLVRSEEDVAGVFKLYLDEPDSRWLSVASQLDYVLLSGANWFTRQSYFYEGGQLVGGVYVPLNFTSSLTNQHSHRMAFRTALRALAGARFRGKVILRTLSPMSHFEGGAYDAGGDCRRTRPYRADETAPMGGLELEFYTSQLEEFREAKGLDVVLMDPTAAMLMRPDGHPSRYGHWPDEKRTLYNDCIHWCLPGPIDAWNDMLLHMLSHSS

SEQ ID NO: 8770 - protein, 126 aa, Zea mays
  VARIANT 51: note = Ancestral polymorphism is R, Derived polymorphism is G
MAIATMWLSGKGCSTGGWTGKATSPHLSLIPQANGMCFHPDQDITVRECARSQPHRASPDSYEFAGNIQNKHRQIGNAVPPPPPPPPPLAYALGRKLKEAADKRQEASVGVPALHYERSMTHEAKR

SEQ ID NO: 8771 - protein, 136 aa, Zea mays
  VARIANT 80: note = Ancestral polymorphism is V, Derived polymorphism is L
  VARIANT 79: note = Ancestral polymorphism is Y, Derived polymorphism is H
  VARIANT 74: note = Ancestral polymorphism is V, Derived polymorphism is L
  VARIANT 40: note = Ancestral polymorphism is I, Derived polymorphism is V
MAERAGGVVKKGHEEGLKMAVSLLEEFGLPLGLLPLADVIEVGFVRATGYMWIAQRKKVEHQFKLVGKQVSYDVEVTGYVSARRIKKLKGVKAKELMLWPPVNEITVDDPPTGKIHFKSLAGVTKTFPVEAFAAGQ

SEQ ID NO: 8772 - protein, 579 aa, Zea mays
  VARIANT 182: note = Ancestral polymorphism is L, Derived polymorphism is P
MAAATSSSTYLAIGRKTLNPAPSVATAATSVSFPATQHPCLVAASADRRRAVAAKVSSPSVIGTAMPSLDFETSVFKKEKVSLAGHEEYIVRGGRDLFPLLPEAFKGIKQIGVIGWGSQGPAQAQNLRDSLVEAKSDIVVKIGLRKGSKSFEEARAAGFTEESGTLGDIWETVSNSDLVLLLISDSAQADNYEKIFSHMKPNSILGLSHGFLLGHLQSLGFDFPKSISVIAVCPKGMGPSVRRLYVQGKEINGAGINASFAVHQDVDGRATDVALGWSVALGSPFTFATTLEQEYRSDIFGERGILLGAVHGMVEALFRRYTEQGMDEDSAYKNTVESITGIISKTISKKGMLEVYNSLTEEGKKQFIEAYSAAYYPCMDILYECYEDVSSGSEIRSVVLAGRRFYEKEGLPAFPMGKIDQTRMWKVGERVRSTRPQGDLGPLHPFTAGVYVALMMAQIEVLRKKGHSYSEIINESLIESVDSLNPFMHARGVAFMVDNCSTTARLGSRKWAPRFDYILTQQAFVTVDKKAPINQDLISNFMSDPVHGAIEVCAQLRPTVDISVTADADFVRPELRQSS

SEQ ID NO: 8773 - protein, 168 aa, Zea mays
  VARIANT 141: note = Ancestral polymorphism is A, Derived polymorphism is S
  VARIANT 89: note = Ancestral polymorphism is S, Derived polymorphism is R
  VARIANT 84: note = Ancestral polymorphism is P, Derived polymorphism is T
  VARIANT 58: note = Ancestral polymorphism is F, Derived polymorphism is V
  VARIANT 43: note = Ancestral polymorphism is T, Derived polymorphism is I
MSSEELRASFSDLAVGSPTQTEGKTYPSGDLSSEEVMQVTCFTEDLHDVVLHFQIVRFSKQIYVWVGCNTAKFGHLYAAATTRPDNRVSVTSVLGGTSDNTGSSMARRLGCILHVPVLKTGLNIVLACSIPKDSPILEAAAERKLVEKLKGLGYIKTAAVNANTSTAP

SEQ ID NO: 8774 - protein, 392 aa, Zea mays
  VARIANT 134: note = Ancestral polymorphism is R, Derived polymorphism is S
MAAKQRHRQLPLLPLLAAAVAWSLLRAAAAAGTGTGTLGLRHKPARQHNSTRHGGGRRAQRGGAPGTGMASCNLFQGSWVYDDTLPMYDAAGCPFVEPEFDCQKYGRPDKLYLKYRWRPASCELPRFNGQDLLRRWKGKKILFVGDSISLNQWESLACMLRAAAPASSRVAYARGNPVSSVTFQDYGVSVAYYRSTYLVDIVEESVGRVLKLDSITGDAWLGADVLVFNTWHWWTHTGRDQPWDYVQDGGQVMKDMDRLTAFSKGMSTWARWVDSSVDTSRTKVYFQGISPTHYNGADWGEGSRSCAQQTQPVPGPAYPAGPVPAQAAVRAALAAMSKPVYLLDVTLLSQLRRDAHPSAYSGGHPGNDCSHWCLAGVPDTWNQILYASLLLA

SEQ ID NO: 8775 - protein, 639 aa, Zea mays
  VARIANT 84..639: note = Derived polymorphism lacks residues 84 to 639
MVTGRVKAAMGFQRSPKSQVPEAASPSRAPTSGSVSTAGSAPSKASALARSFGAYFPRSSAQVRPAARAPPQVAELLRAIEQLQERESRLRVELLEQKILKETVAIVPFLEAELAAKKAELQRCRDTAERLEAENGRLCAELDAAALEVTSRKQRIVELEKEMAELRTRQDAAADADDCSSSASAPSERLESSSAAPKPNRASLAQLDPPAPPAPGPAPLKSKSYFSASSSHPSPASSSPPPSPSSSTSTSSSPAHSRSSSDTAAAPRPRVVELSKLPPIPPPPPPCPPPPPPSRSKRSSPPNSASVDGSAAAAPPPPPPPPPPPPPPARRQFGAAPAPPAGASSGQGDVRRVPEVVEFYHSLMRRESKRDGSGTASEAANGGGGGAAATRDMIGEIENRSAHLLAIKSDVERQGDFIRFLIKEVEGAAFVDIEDVVSFVKWLDDELSRLVDERAVLKHFEWPENKADALREAAFGYCDLKKLEREAASFRDDARQPCAAALKKMQALFEKLEHGVYNLARVRDAATGRYTRFQIPWEWMKQDTGIVSQIKLQSVKLAMKHLKRVSSELEVIKGGPEEEEQELMLQGVRFAFRVHQFAGGFDVDTMRAFQELKEKASMCRVQRQKQHRHLRQHRLVARA

SEQ ID NO: 8776 - protein, 354 aa, Zea mays
  VARIANT 59: note = Ancestral polymorphism is C, Derived polymorphism is W
MQALALPTMESELRALAWATLLTPACAVYARFAARRLRPGVPRLAALFPTFPVFVYMPCMFSSLHLRLFSTFFHTWLAINRLVLLALDLGPLHPRLPLLPFVLCAGLPIKVRLQQPTKNQASSSSSSPPPSAEFLRPCVRSVLLLSCLAMAYPYTRWLPLYALHYLYCVQIFLTLDLVFSSIALVSAALMGASLERQFSTPLAVTSLNSFWGQQWNLMAVDLLRESVYAPVRARWGRDVGVLAAFLMSGLLHEFLYWYLTLQQPRGEMLLFFVFHAAFQIAERRARAAGLWRPPRAAAYLLVTAFMVVTISEMFFAPFVRAGTDVRLTEETTAMVELIWGTRKYLLHPFRVASS

SEQ ID NO: 8777 - protein, 399 aa, Zea mays
  VARIANT 28: note = Ancestral polymorphism is G, Derived polymorphism is R
  VARIANT 34: note = Ancestral polymorphism is A, Derived polymorphism is V
MHSSASARGGRGLLLPAAAAAVVVLLLGAVAPAAGCYPRVFNFGDSLADTGNYPFVYGNDSAKLRPPYGETFFHRATGRASNGRLVVDFIADTLGLPFVRPYLSGRSAEDFAGGANFAVGGATALSPDFFRARGFHNMGNRVDLDMEMKWFRGLLDLLCPGNLAGCSDMMNQSLFLVGEIGGNDYNGPLLSGVPFEEIRAITPSVVAKISSTISELIQLGAKTLVVPGNLPIGCVPKYLMIFKSNKKEDYDPQTGCLRWMNEFSQYHNKLLVEQLKKLRRLHPGVTIIYADYYGAAMEIFLSPERYGIEYPLVACCGAEGPYGVSPTTSCGLGEYKLCDNPERYGSWDGLHPTESAYKVIAMGLLLGSYTRPPIASTTTSCPQLMELGSSAEYKRLYDL

SEQ ID NO: 8778 - protein, 426 aa, Zea mays
  VARIANT 33: note = Ancestral polymorphism is P, Derived polymorphism is T
  VARIANT 35: note = Ancestral polymorphism is S, Derived polymorphism is L
  VARIANT 289: note = Ancestral polymorphism is T, Derived polymorphism is I
MASSAPGRGGRQLILLPAAAAAVAVMVLIGAEPALACYPRVFSFGDSLADTGNFRFYYGNSSGEPALRQPYGETFFRRATGRFSNGRLILDFIADTMGLPFVRPYLSGRRAEDFASGANFAVGGATALGPDFFRSRGFDIGDGRVHLGMEMKWFHDLLELLCRSGRSGCSDIMSQSLFIVGEIGGNDYNLPMLSRVPIEKIRSFTPNVIAKISSTITELIGLGAKTLVVPGNLPIGCVPKYLLIFKSDDKEDYEPETGCLRWMNEFSEYHNKLLLEELEKLRKTNPTVTIIYADYYGAAMEIFRSPERFGIEEPLVACCGGEGPYGVSLSTACGYGDYKVCDNPDKYGSWDGFHPSEAAYKAIAMGLLRGTYTQPSIASTTSSCPQLTELGSSVEYKSCGTVLHFSAVAQAIGWVLFYLLFFSHSF

SEQ ID NO: 8779 - protein, 360 aa, Zea mays
  VARIANT 2: note = Ancestral polymorphism is R, Derived polymorphism is G
  VARIANT 16: note = Ancestral polymorphism is S, Derived polymorphism is W
MGGAILLVSLVLLLNSPVGLCGCFKRIFSFGDSIIDTGNFASTVRSTPIKELPYGITYFNRSTGRVCDGRVIIDFYAQALGLPVIPPSIPGEATSPFPTGANFAVLGATGLSPDYYKANYNFTMPLPSSLDLQLQSFRKVLARIAPGDDNTKSLLGESLVVMGEIGGNDYNFWFFARNSRDTPSQYMPEVVGRIGAAVQEVVDLGAKTVLVPGNFPIGCVPQYLSAFQSNDASSDYDQYGCLVWFNDFSKKHNQLLQQEVGRLRSQNPGVKIIFADYFGAAMQFVQNPKNYGIDDPLVACCGGGGRYHTGKGCDKNATLWGNPSAFASWDGLHMTEKAYSIIADGVLNGPFADTPLLKTC

SEQ ID NO: 8780 - protein, 412 aa, Zea mays
  VARIANT 10: note = Ancestral polymorphism is R, Derived polymorphism is Q
  VARIANT 102: note = Ancestral polymorphism is P, Derived polymorphism is L
MFVTGDMAAQWKELQGSNHWEGLLDPLDVGLRRCLVTYGEMIMATYEAFIGESRSPNAGMCRYRRADLFQRVDVSHPGWYEATRYLYATASAEVRGKVLLRPLCRERCARECNWMGYVAVATDEGAAALGRRDIVVAWRGTQRALEWVADLKLALASAAGILGPEGGGGGSGGSDPSVHRGYLSLYTSDYEGSNLSKQSARMQVLTEIVRLMDKYKGEETSITVVGHSLGATMATLNAVDIAANAYNKIPGYDSRRAPVTAIVFGSPRTGDQDFRDVFHRTPDLRMLRVRNRPDRIPHYPPVGYADVGVELLIDTRRSPFLKHHGSESQSHDLEVHLHGIAGWQGDRGGFELVVDRDVALVNKFDDCLADEYPVPVRWKVHHNKSMVKGGDGRWVLEDHDPDYEDEDGNINL

SEQ ID NO: 8781 - protein, 431 aa, Zea mays
  VARIANT 65: note = Ancestral polymorphism is Y, Derived polymorphism is H
  VARIANT 47: note = Ancestral polymorphism is S, Derived polymorphism is F
  VARIANT 35: note = Ancestral polymorphism is L, Derived polymorphism is V
MGDHPVAGEHHHPSAATALGALLLLPSELLHEILLRLAVPELLRVRSVARPLSSLISSPDFRRLYHLSSASSGPGPAAAWLLLFKKLPPRDAAIRGFHGPSGRWFRIPVSAILAPAVPPGEDLYFLAASGSSFLFAANGRRELVVVDLTARAARRLPPSPLGPRGTSSWRRFGLKLVADPPGSNRFRFLFAELVNNTPFLFEYRSETDTWQESEAVLVAEGAAEAADPDGDGDGGTYLCAAHAGADCVMVYAGPRTDERPVFFRPRFPNAGAAGAGHGERLHVYGDGSAAVVRSAAAAAGEDPTSRSRGKVVTGVELYGVGAVGGDWQLVASVPGGLVEGFRKPYAVMTGLLAEREGVVRLVLISNCRGAWDLVWLSYDRARREWRWVPVPDWGGSKGLNMAGIAVSSTFSRLWPLAAPPPATSSSSSSHR

SEQ ID NO: 8782 - protein, 279 aa, Zea mays
  VARIANT 54..279: note = Derived polymorphism lacks residues 54 to 279
  VARIANT 36..279: note = Derived polymorphism lacks residues 36 to 279
  VARIANT 27: note = Ancestral polymorphism is P, Derived polymorphism is A
MTQHVSMISITLSPRELDKHTPGYQAPVYVEQPRQQQVPPPHRQPRRPPAQFQQLEYEDSYARGRGRGVGVEGAGVEVATVAMVDMETTKVAIIRVVGIMTIKVEIMAMIIKTDIVAMIIKVGMVVDMAITKADMGTIKKMVDITETQEVVCEEEAIGVTEESVVVDWVNQAQKHQLMLMWYFKPCLYMDAGLASAVTALRTCTDVAHVLEQFRLAWCSKLARDARTVVPLRTSASTYSSLGVETELSMHAGGARCDRYYPCLINDDNGDGYDIWSILY

SEQ ID NO: 8783 - protein, 80 aa, Zea mays
  VARIANT 71: note = Ancestral polymorphism is D, Derived polymorphism is G
  VARIANT 18: note = Ancestral polymorphism is P, Derived polymorphism is A
  VARIANT 14: note = Ancestral polymorphism is H, Derived polymorphism is Q
  VARIANT 4: note = Ancestral polymorphism is S, Derived polymorphism is F
  VARIANT 1: note = Ancestral polymorphism is M, Derived polymorphism is V
MQSSALGFLLAQKQFTNALVVVTSAVSVVRMHGCLLKTCTVQGLAGNTIVAVAALGLFLAKRNINTPQVLDFVLHHLLLR

SEQ ID NO: 8784 - protein, 166 aa, Zea mays
  VARIANT 63: note = Ancestral polymorphism is R, Derived polymorphism is M
  VARIANT 17: note = Ancestral polymorphism is Y, Derived polymorphism is N
  VARIANT 13: note = Ancestral polymorphism is G, Derived polymorphism is A
MEAEAFPIRFTKGIRSYWRRRADGSGAAGRGRRRHGLVRLGDGSGPKPWAARIGGMFRARRVRATAPAAPSRAATVAKVPMRVLGRIRDAYVDVMLGAAKTRPAAARALPSAPEALWQKRVPVRRSSSSQAGRKPDELGQRLVMEMYKSVLASRNISGMLQASVAR

SEQ ID NO: 8785 - protein, 74 aa, Zea mays
  VARIANT 40: note = Ancestral polymorphism is P, Derived polymorphism is L
MAFVPVCVQCGTRSNPCRCKVVGPTLGFVAFVVAGVIEWPLGAAVYLFRHRKGRRIMAHPATVVYPRVTRAIPI

SEQ ID NO: 8786 - protein, 133 aa, Zea mays
  VARIANT 39: note = Ancestral polymorphism is T, Derived polymorphism is I
  VARIANT 33: note = Ancestral polymorphism is C, Derived polymorphism is Y
  VARIANT 9: note = Ancestral polymorphism is R, Derived polymorphism is C
MMAVSLQLRPIPRLPPSRNRCAGTSPRMAALSCRYNQPTNVQGRTRLTSHITRRDALSFMSSGVLAAFVLVVASPAEARPSRLENKRKALEKLEKLREKALGPKEKSGATGNGKEMPPPANLLIPPAAVEAFL

SEQ ID NO: 8787 - protein, 187 aa, Zea mays
  VARIANT 93..187: note = Derived polymorphism lacks residues 93 to 187
MADRPPPGPRAAALLPNPVTRRGHAASSTDRQHSLLGRAVQTLHAHGSTQLLRFLALAVTLTALLVLASVTLTAALAALVLLSPLVLLTVPLWAPVAVLALLTGAASLVACCAGLAAVAAGTWAHRYFTGRYSVGAHRVQSADQYARGGTVADVASRVRGYYDAYAREYGGYPPRPHSRVKDAAPGA

SEQ ID NO: 8788 - protein, 224 aa, Zea mays
  VARIANT 62: note = Ancestral polymorphism is G, Derived polymorphism is S
  VARIANT 149: note = Ancestral polymorphism is S, Derived polymorphism is L
  VARIANT 184: note = Ancestral polymorphism is A, Derived polymorphism is T
MEVEAAAATSSRSSTPSRVVRKGNATVSVCGVKKKSTPSSRTPGVPGATSMLSPDTEKNRKGMWIQIDATVGIGHVVGIDPLQQPVTSAANFGGHIVCTHNSIAPLHFSEFLIMVHGVQYHQTVMVPRESILKTEAEWLNSIKADLVVSDVVPVVCRAATDAGIRSVCVTNFSWDFTYAEYVVAAGHHHRSIVWQSSPMDLEKSVPRVDLFGGVDVTLREGKLE

SEQ ID NO: 8789 - protein, 275 aa, Zea mays
  VARIANT 1: note = Ancestral polymorphism is M, Derived polymorphism is T
  VARIANT 248: note = Ancestral polymorphism is P, Derived polymorphism is T
MEEAPELISPRISFSHDLAAATPPPAPAPALLAGRRSDASLLGSRPRLPEPDFDFDFDFANATAAADVAPADRLFAGGKLLPLPPLPPAPKPNNPCKPQACSSSSTSVKQAQQQACQQRRPGSWASSFSRSSSANSATTGAPRSAGRFGCPPFPLMRSWSVGSAASVARGAAAATLGDDGAAPDAAAASHRPHHHQYHKKFGIVAGAATSNNGGSSRTYYYGGSRKGGGGGGSSGSHGVRVRPVLNVPFIGTSVSNVLSYLLCDCSHGTKKSRGL

SEQ ID NO: 8790 - protein, 290 aa, Zea mays
  VARIANT 197: note = Ancestral polymorphism is A, Derived polymorphism is V
  VARIANT 208: note = Ancestral polymorphism is G, Derived polymorphism is E
MRTIMARSPHESSFSFSRRNFKWPVLVKSSSHGAAAGAEDGSGKGSEADDEDEAAMAFSSSCPSFHSEDFVSPSYKAPPPPKQRSKKCRAAVSRLRTALASAIAGRHRQVGLGARLTGTLYGHRRGHVHLAFQVDPRACPAVLLELAAPTASLVREMASGLVRIALECDRAKGACALSSAAAATNGGGCRKLVEEKVWRAYCNGKGCGYAVRRECGAADWRVLRALEPVSMGAGVIPAACGGGEGDVMYMRARFERVVGSRDSEAFYMMNPDSSAGGNGGPELSIYLLRV

SEQ ID NO: 8791 - protein, 653 aa, Zea mays
  VARIANT 391..653: note = Derived polymorphism lacks residues 391 to 653
MATAAKLPSLYAELAAKSSRVAELEVRISALETENAGLREALAVARRESMGSTGKEEDPISRQLAARLRGIEHGAVEKPGWGVARRDAIEVSDDEEGAAAVGANKGESPDEGVGAVPALRKRVVAGESVGEADAEDAEGGGGNNGESSAGLEDDDVSVTPRGKKRGRRSAVAQVVTSDSEDDGVNGGGGVEDQFGSAKDGSGDQEGLMSSRKRAFRGVSDSEDEDAYEGVAPRHTESGEEDVDDMVPIDELLKRVPKERASEDDGESEGHSTPVTRRSARLVKNQSKSYRMFRGVSDSEDEDDNEGTAAPQGKSGDKEEEDMVPVYKLLKRMPNERASEDDDESDLAKGHSAPATRRSARLAKNQSKSYRVFCGVSDSEDKDGDEGTTAPQTENRDEDEEDMVPIYKSLKRMPKERVSEDGDESDVAKGHSAPASRRSARLVKNQSIRPRAACPGLHFVEPPKDVEGSEDDMEEDDDMNEFINDESSDNASDSAEKSCDESDVPSVMNEKSSPGLEVSDGEVDYKDVMACIGRKKKAKEWDYEADMLAAFGEHPELCLKAVCALYRKQTEDEQVEKASLVHNKQGFSHKDAPRGSRIAEFLLDGDLVGPLKKTVSDLDEYDRYAFEFCRKVASHYSKQLFAIYQNKEDPYFHP

SEQ ID NO: 8792 - protein, 404 aa, Zea mays
  VARIANT 227: note = Ancestral polymorphism is A, Derived polymorphism is T
MRASVEEAGALLARSDSAGRRRRSPPPVQTASPRPGSLRRQSSSFREDVGHAASETYLVSRLTFTLLQYLGLGYRWMSQLLSLTIYAIVLMPGFIQVGYYYFFSSQVRRSVVYGDQPRNRLDLYIPEDNSRPCPVVAFVTGGAWIIGYKAWGALLGRRLAERGIIVACIDYRNFPQGTIGDMVHDASQGISFVCNNIASHGGDPNQIYLIGQSAGAHIAACALMEQAVKESGGNPVSWSLTQIKAYFGLSGGYNMHNLVDHFHERGLNRSIFLSIMEGEESLSRYSPEIVAKTSSAETIALLPLVVLMHGTEDYSIPSSSSQTFVDVLQQAGAQARLLLYEGKTHTDIFVQDPLRGGRDPLVEDVLSIIHADDANACQKIALAPTPRRLVFEWQLKLARKISPF

SEQ ID NO: 8793 - protein, 357 aa, Zea mays
  VARIANT 68..357: note = Derived polymorphism lacks residues 68 to 357
MRDAFSSSWLSTVATAAYDYQQIRGGRSTLRAPPSCRTSSPTPMSARTSSKSSTAASSYVLLHSAMPQFSHLRAPPGACDDSDFSVGGMSSTTSIQPSASSGGASTSADENARPPDSGTNSSGPARSILSLQLDQRSLHFSVSAWVLIVALIGIFPLAPHSLQYKGYRLSLLGTTCTTGYALFALYRLPRAGNMQAVQVWCHHVTASKDFIPFMYCLMFSTSKLHLKLVLVPVICWALEHVARFLRRHFTSSSLYRTYLEQPCTWVETNTNAVQFLRSNAEILTGFLLILSLFSRQRNLMQTFMYWQLLKLMYHSPFTAAYHRAIWLKIGRTINPYIHRYTPFLHDPINAGMRWWFR

SEQ ID NO: 8794 - protein, 395 aa, Zea mays
  VARIANT 103: note = Ancestral polymorphism is A, Derived polymorphism is D
MRQPTSAGGDAGFLRADQIDLKSLDEQLERHLGHPAERVVGPVSGTGSRRGETAKLGPEELTPLQRCREDWEIDPTKLIIKGVIARGTFGTVHRGVYDGQDVAVKLLDWGEDGHRSEQEIGALRAAFAQEVAVWHKLEHPNVTKFIGAIMGARDLNIQTEHGQLGMPSNICCVVVEYLAGGALKNFLIKNRRRKLAFKVVVQIALDLARGLRRYNCDICRFNRLCYLHSKKIVHRDVKTENMLLDKTRTVKIADFGVARVEASNPSDMTGETGTLGYMAPEVLNGHAYNRKCDVYSFGICLWEIYCCDMPYPDLSFSEVTSAVVRQNLRPEIPRCCPSSLANVMKRCWDANPDKRPEMAEVVSMLEAIDTSKGGGMIPKDQTQGCLSCFRQYRGP

SEQ ID NO: 8795 - protein, 105 aa, Zea mays
  VARIANT 53: note = Ancestral polymorphism is A, Derived polymorphism is D
  VARIANT 54: note = Ancestral polymorphism is V, Derived polymorphism is A
  VARIANT 61: note = Ancestral polymorphism is D, Derived polymorphism is G
MSSLGMGQPFHNIDNVIKASAIMVHEQGHFSPRKVTVSTSGFVPQLGTQLLAAASLNARTDEVRNWIMTINRKENLNLLLGTLRGQISALVSLLTVSVYYESLSI

SEQ ID NO: 8796 - protein, 239 aa, Zea mays
  VARIANT 176: note = Ancestral polymorphism is D, Derived polymorphism is H
  VARIANT 146: note = Ancestral polymorphism is L, Derived polymorphism is F
  VARIANT 54: note = Ancestral polymorphism is C, Derived polymorphism is W
  VARIANT 44: note = Ancestral polymorphism is E, Derived polymorphism is Q
MDDPVERLKDGFHKFKTEVYDKKPELFEPLKAGQAPKFRGDRWENALFFFWGPCLQAVASNTIVLPSALTYVVFACSDSRVCPSVTLGLQPGEAFTVRNIAAMVPAYDKTKYTGIGSAIEYAVCALKVEVLVVIGHSCCGGIRALLSLQDGAPDNFHFVENWVKIGFPAKIKVKKDHASVPFDDQCSILEKEAVNLSLENLKTYPFVKEGLANGTLKLVGGHYNFVSGEFLTWDNKQPS

SEQ ID NO: 8797 - protein, 452 aa, Zea mays
  VARIANT 192: note = Ancestral polymorphism is H, Derived polymorphism is Y
MSSCLCLPKKKEGPAKEKPSTDTPTSSLLQNQKPSQPPPPPSKASSKGMDPTVERLKSGFQKFKTEVYDKKPELFEPLKSGQSPRYMVFACSDSRVCPSVTLGLQPGEAFTVRNIASMVPPYDKIKYAGTGSAIEYAVCALKVQVIVVIGHSCCGGIRALLSLKDGAPDNFHFVEDWVRIGSPAKNKVKKEHASVPFDDQCSILEKEAVNVSLQNLKSYPFVKEGLAGGTLKLVGAHYDFVKGQFVTWEPPQDAIERLTSGFQQFKVNVYDKKPELFGPLKSGQAPKYMVFACSDSRVCPSVTLGLQPGEAFTVRNIAAMVPGYDKTKYTGIGSAIEYAVCALKVEVLVVIGHSCCGGIRALLSLQDGAPDTFHFVEDWVKIGFIAKMKVKKEHASVPFDDQCSILEKEAVNVSLENLKTYPFVKEGLANGTLKLIGAHYDFVSGEFLTWKK

SEQ ID NO: 8798 - protein, 604 aa, Zea mays
  VARIANT 417: note = Ancestral polymorphism is T, Derived polymorphism is I
  VARIANT 286: note = Ancestral polymorphism is A, Derived polymorphism is S
  VARIANT 40: note = Ancestral polymorphism is L, Derived polymorphism is I
  VARIANT 19: note = Ancestral polymorphism is A, Derived polymorphism is T
MSGKKASEFSGEEQQQVIAEFERLTRDAAAVQPETLRRILDENAGVEYLQGLGLDGRTDPDTFRACVPLATHDDLEPYIARLADGDTSPVLTAKPITSISLSSGTTQGRRKYLPFNDELFKLTMHVYRTSFAFRNRAFPVEGGGKALQFVYGSRQLTTKGGLTVASATTHLYRNEGYKAAVRGIQLPCCSPDEVVFAADFAQSLYCHLLCGLLYADEVRTVFAVFGHNLVLALQTLERAWEELCHDIRRGALSPARVTEPELRQAVSALLAKPNPALADEVARRCAEARLGGWRGLVHALWPNARYVHTIVTGSMEHYVRKLRHYAGGLPLVAMDYGASEGMVGANVEPEVPPDSATFAVLPNIAYFEFIPLKTTTNGGGGSRADCTDTGGTSYSSGADPVGLTEVTVGEHYEVVMTTFAGLYRYRLGDVVKVAGFYNSTPKLKFVSRGSIGPTLCINVDKNTEQDVQLAVDGAAEILTSSSRLEVVDYTSHADVSTDPGHYVVFWELSGEAAADGVLQRCCDELDRRFVDAGYVSARKTRAIGPLELRVLRRGAFQKVLHHCLSLGAPANQFKLPRCVARSNSGVLQVLSDNTIKIFFSTTYD

SEQ ID NO: 8799 - protein, 372 aa, Zea mays
  VARIANT 153: note = Ancestral polymorphism is T, Derived polymorphism is M
  VARIANT 232: note = Ancestral polymorphism is A, Derived polymorphism is S
  VARIANT 305: note = Ancestral polymorphism is Y, Derived polymorphism is H
  VARIANT 325: note = Ancestral polymorphism is L, Derived polymorphism is Q
  VARIANT 343: note = Ancestral polymorphism is R, Derived polymorphism is M
MGVLRSTQSLQAEVDELRAALLAGGGHEAAGGWRRSAGHADAKRSPGGDAGGAAARAVCVTGGISFVGFAVVDRLLRHGYTVRLALETQEDMDKLREMEMFGDDGRDGVWTVMANVMDPESLHRAFDGCAGVFHTSAFVDPGGMSGYTKHMATLEAQAAERVIEACVRTGSVRKCVFTSSLLACVWRQNNPHGRRCPTIIDESCWSDESFCRDNKLWFALGKTAAEKAAWRAARGRDLKLVTICPALVTGPGFRRRNSTASIAYLKGARAMLADGLLATANVETVAEAHVLAYEAMGDNTAGGRYICYDHVVKRPEEFAELERQLGLPGGAAAAQGSDDRPARFELCKRKLSRLMSSRRRCTYDTYYSVAFD

SEQ ID NO: 8800 - protein, 170 aa, Zea mays
  VARIANT 81: note = Ancestral polymorphism is L, Derived polymorphism is P
MATPTPARPYRFPALPEEEDEQAATRCSRRSCGTCGASAVASCVALCCCPCAAVSCLTLALVKAPYVAGRRCVARLARRRLRKGRARRVRDMGEDDDERQGPRCSKESCDLPRAAAADERAKVSSRIDASSEKVWVDMYQVGLWGFGRLSFSAAAGAGSDSDKDGDTAPE

SEQ ID NO: 8801 - protein, 563 aa, Zea mays
  VARIANT 41: note = Ancestral polymorphism is A, Derived polymorphism is P
MDKRGSFGGTSSDDVEAPLLPPPARDDGAQELRLPPSWVRALLAHRYPAVAAGPAAAAAVCALVDLAVGGGAHAHHHREARNMLAVLAWVFLWWVTGAVPLAVASMAPLFLFPLFGVSSADAVAKAYMDDVISLVLGSFILALAIEHYQIHRRLALNITSLFCGDPVRPPLLLLGITGTTFFVSMWIHNTACTVMMMPVATGILQRLPRGGAGAGTGAHDEVRRFSKAVVLGVVYASAIGGMATLAGTGVNIILVGMWSTYFPEQEPITFSSWMSFGLPMALILFLALWITLCLMFCSNNTGKALSGYLDRSHLRRELSLLGDYLSEETILLNHAGPMVFAEKMVLAVFGGLIVLWMTRNLTADIPGWGALFHNNVGDGTVTIMMATLLFIIPSRKNKGEKLMDWDKCRKLQWDIILLLGAGFAIAEGFRSSGLTDILSDGLRFLKGAETVVIVPVACIVSGVVTEFTSDDATTTLLLPLFAELAKAIDVHPALLMVSGAVGAQLSYLLPTGSPSNVIGFSTGHITIKDLVTTGLPLKLVGIAALTVLMPTLGSQVFGTNSKF

SEQ ID NO: 8802 - protein, 340 aa, Zea mays
  VARIANT 104: note = Ancestral polymorphism is Q, Derived polymorphism is L
  VARIANT 274: note = Ancestral polymorphism is L, Derived polymorphism is H
MVNLVEAQKPLLHFLVRRAGLRQHAVDVDGAGTVMTFWVPKDKVPKEKGTVQDITGSGPATAEAAASKVPAAPAAAKEGSSSSRPAVVLVHGFAAEGIVTWQFQVGVLAKQYDVYVPDLLFFGGSTTPSTDRSPGFQAECLAAALRKLGVGACTVVGFSYGGMVSFKMAEAHPDLVRSLVVSGSVVAMTDSLSEATLEGIGVKSSAELLLPESVKGLKALLSVATYRKLWFPDRLHRDYLEVMFTNRKERGELLEGLVVSNKDATVPVLPQKILLLWGENDNIFNIELAKTMKEQLGEKTTLQSISKAGHLVHLERPCVYNRLLKEFLACVTATETTNKE

SEQ ID NO: 8803 - protein, 89 aa, Zea mays
  VARIANT 18: note = Ancestral polymorphism is G, Derived polymorphism is R
MSSSLYLVFEYMEHDLAGLAATPSLKFSEPQVKCYMQQLLCGLDHCHNRGVLHRDMKGANLLLDNNGILKIADFGLATFFNIIPNKNNI

SEQ ID NO: 8804 - protein, 93 aa, Zea mays
  VARIANT 47..93: note = Derived polymorphism lacks residues 47 to 93
MASMSLSSSRAQWTAKQNKLFEQALAVYDRDTPDRWHNIARAVGGKSADEVRRYYELLVKDLEHIEAGKVAFPAYRCPGGYDDADSDRLKHLT

SEQ ID NO: 8805 - protein, 95 aa, Zea mays
  VARIANT 86: note = Ancestral polymorphism is A, Derived polymorphism is V
MSSASNSAKGSSPSSSTSSQWTKPQNKLFERALAVYDTDTPDRWHNVARYMGGTTSVEEVRRRYQQLAVDVAQIESGEVPFHYWYAAAPPLHPGM

SEQ ID NO: 8806 - protein, 236 aa, Zea mays
  VARIANT 228: note = Ancestral polymorphism is K, Derived polymorphism is N
  VARIANT 23: note = Ancestral polymorphism is T, Derived polymorphism is I
  VARIANT 18: note = Ancestral polymorphism is E, Derived polymorphism is V
  VARIANT 8: note = Ancestral polymorphism is T, Derived polymorphism is I
MESAVKETLVPFVFRLSETPVQTNQIKHSMQGITKALRLHGRQLRHAVLQHMNMNKGIFSWATLISRIQSESPAVIIPHMGLENITVNEILRAKGEAEAGAVYWCSTAHLVHEAVQHMAAHNVGALVVLKSGDMNQLAGIVTERDFARKILLPGRPSQQTRVEDIMTEEDKVITVSGRTNILRAMEVMTDKRIRHVPVFDDKVVGMISIGDVVRTIVDQQHQEVKQLKKYIRGDYY

SEQ ID NO: 8807 - protein, 494 aa, Zea mays
  VARIANT 196..494: note = Derived polymorphism lacks residues 196 to 494
  VARIANT 157..494: note = Derived polymorphism lacks residues 157 to 494
  VARIANT 62: note = Ancestral polymorphism is S, Derived polymorphism is L
MAIAVLPILSVLILAATKQMGRTVFAPPKRREPPVAEGAPLLGVLPAILTRSLQGVICDQYLKLGSVFTLSSLGVKVTFLVGPEVSAHFFHAAESEISIGDVYKVTVPIFGKGVGYDVDNDTRNEQHRFFADTLRPAKLRSHARLMVREVEEYFARWGQSGTVDLKQQVEDVLLLIASRCLLGKEVRDHMHDEVSSLLRELIGGLHLVSLFFPYLPTPAHRRRDRARARLEEIFSGIARLRKSSCSSGRGAGDDGDRDHDMLQGLLDSRYRDGRGTTEAEVTGLLVALLFAGHHTSATVTTWTAARLLRHTEWLHAATEEQRLLQRNDQNDAAAIDYDVLLRMDVLHRSVKEALRLHPVTPMILRRARRPFTVRTQDGSEYEVPEGRMLASPLVVNNLLQGIYRDPDVFDPDRFAAWREEDRVGGDLAYTSFGAGKHACMGEGYAYLQIKVILSHLLRNFELRLLSPFPETENMISMRPKGEVMVSYRRRSLLQ

SEQ ID NO: 8808 - protein, 407 aa, Zea mays
  VARIANT 93: note = Ancestral polymorphism is I, Derived polymorphism is F
MAREAASEATASRESGAEAAGECWSEALKSFLDHIPVSSVPGALQPTASPAVEVKLHGSVLGALDAMYSSNAAGAVIIDVVHSSLGKYVDRDIGFVEFSSLVLWALEELGKVESEPTDSTSDFLSTLKQHHQIAETKIAWLAKLFLWEPFFPVRTHDTLFHAMLLFSKHHRLNVAPVVESMNSSVIGFVTQDAVMELLLQSSGLEWLDKIADKQLSEFRFANVRKPVLVYSDQTLADGLHILSKEKTGVAVIDRKTSRLIGSLQCSDLYLFLDDSTLFSKRTTTTLEELISLNNKTDRKCSTAENSCAPGRNILALRSRQSGMVGLPATNLESDTLKQAMEKLTTLRSSCSFIVDEHGRVQGVVTTRDIISVFSPLCMDSRIDGATFFSAALEQAGCRVENGQMFQN

SEQ ID NO: 8809 - protein, 658 aa, Zea mays
  VARIANT 98: note = Ancestral polymorphism is P, Derived polymorphism is L
MGGQCCELEQCGNVGGSGDTLRERKEAGTSGRAMRRMSSKPLCIANSSGRKVSKTMNGLQKAKAKGKIGTLMMVGCMSLSITCKKCEPLFLSSPPVCPLILYINTSTASQLATRSLREASAISISQPPFFCSVVYLVVGGDMQFALALDTNSGPHQIRSCEGDGIDRLEKLSIGGRKQEKALRNRCFGGRVAATTQCILTSDACPETLHSQTQSSRKNYADANRVSAIILGGGTGSQLFPLTSTRATPAVRDNTEHPTLIDIPMSNCFNSGINKIFVMSQFNSTSLNRHIHRTYLEGGINFADGSVQVLAATQMPEEPAGWFQGTADSIRKFIWVLEDYYSHKSIDNIVILSGDQLYRMNYMELVQKHVEDDADITISCAPVDESRASKNGLVKIDHTGRVLQFFEKPKGADLNSMRVETNFLSYAIDDAQKYPYLASMGIYVFKKDALLDLLKSKYIQLHDFGSEILPRAVLDHSVQACIFTGYWEDVGTIKSFFDANLALTEQPSKFDFYDPKTPFFTAPRCLPPTQLDKCKMKDAFISDGCLLRECNIEHSVIGVCSRVSSGCELKDSVMMGADTYETEEEASKLLLAGKVPVGIGRNTKIRNCIIDMNARIGKNVVITNSKGIQEADHPEEGYYIRSGIVVILKNATINDGSVI

SEQ ID NO: 8810 - protein, 130 aa, Zea mays
  VARIANT 114: note = Ancestral polymorphism is R, Derived polymorphism is M
MTLSLSTSFLPIPAAARTTARTLRSVVPSQGMRCSMRKKGLHPEIYEDAKVYCNGELVLVTGGTKPEYTVDVWSGNHPYYVGDTSALVVMDSQIEKFRKKWGHIKEYWPEDQWREMHPDGDPEFEPEGDN

SEQ ID NO: 8811 - protein, 248 aa, Zea mays
  VARIANT 2: note = Ancestral polymorphism is A, Derived polymorphism is G
  VARIANT 172..248: note = Derived polymorphism lacks residues 172 to 248
MAAAEAIARGALSRSRVVARGLVHAAQVVGLAVFLRAFAEFPWTAAAAPPILRAAASFLAPPRLYFLAANVIVVALATLFRRDAASSSPPGSSGGDAQHPFLAFLGPALPPITEAEEPSGQEAPPEVVFEDKEAVHVRTLRAQPPRRSMSEKTGGGGGGGAAGSAASPELRRAKSENGRRRQRRSSSSAAAAAVAELGVDDGEAFRLAVEAFIAKQQTWFHREESLVARADAGGEDGPAIAGAAVAVQ

SEQ ID NO: 8812 - protein, 412 aa, Zea mays
  VARIANT 47: note = Ancestral polymorphism is R, Derived polymorphism is S
  VARIANT 19: note = Ancestral polymorphism is S, Derived polymorphism is A
MLTARILPSQVSSYSLSLALSLFLSPPLPRKEPVIRRAGVVTFIYIRHGRRESTALLYTSSSCGSCPHRIARCWGFACIGFLWRRNGSEAARPLGGLPSCRRRRRCPLWRNRAADSRGGGWSEPAQAAGHRLGVQAVVPHGCHHADVSLRRRPGLQAVLLHVPVAGDRERRCRCRCRCRRWWCSCRQWRGRRDVVRGQPERQPDRAAGRAGLRLRLRRGLLRDPAGRELLQPGHRPRPRVLRLQQLLPEEPRPDQLRLRRHGHHHQHRSQFRVVPVPIIKRRRRRSEHGAPAIPDDDHAADSPQYRPDDPDADGAGHRYPGLRAVPARLQRLNFPSRLRIDVSPGLQRRQRRRREGEAAGRRGAGADASVRRRRDSVAARLQMRARGARWRLYRAVSGETYVTWRAPYVVAG

SEQ ID NO: 8813 - protein, 209 aa, Zea mays
  VARIANT 12: note = Ancestral polymorphism is F, Derived polymorphism is L
  VARIANT 19: note = Ancestral polymorphism is F, Derived polymorphism is L
  VARIANT 22: note = Ancestral polymorphism is R, Derived polymorphism is Q
  VARIANT 23: note = Ancestral polymorphism is R, Derived polymorphism is C
  VARIANT 25: note = Ancestral polymorphism is R, Derived polymorphism is H
  VARIANT 26: note = Ancestral polymorphism is R, Derived polymorphism is C
  VARIANT 36: note = Ancestral polymorphism is T, Derived polymorphism is A
  VARIANT 47: note = Ancestral polymorphism is R, Derived polymorphism is C
  VARIANT 75..209: note = Derived polymorphism lacks residues 75 to 209
  VARIANT 138: note = Ancestral polymorphism is H, Derived polymorphism is Y
MPKRMVPPCPLFWTYLNLFLRRRARRLLNVVDPYVTIDISEPGGEVRYSRYGPVSDNDSTYEEVKAYLSGAVRSQDARELRVEGAREGNGLVVSMRDGQDVADEFRGVPLWWSSVVAAEREEVAWEWSRLLRSAVGRHRGGSQRRMRRRWYEASATPSRRPTAAIGEGEFWRRERDAGSLRVTAWADPESETEREGARGGRNSIVLLLD

SEQ ID NO: 8814 - protein, 56 aa, Zea mays
  VARIANT 35: note = Ancestral polymorphism is R, Derived polymorphism is T
  VARIANT 28: note = Ancestral polymorphism is R, Derived polymorphism is Q
  VARIANT 12: note = Ancestral polymorphism is G, Derived polymorphism is R
MVVPYFLDEETGWALEVDELKKQLEEARSKGISVRALVVINPGNPTGQVIIYLFVT

SEQ ID NO: 8815 - protein, 545 aa, Zea mays
  VARIANT 144: note = Ancestral polymorphism is A, Derived polymorphism is G
MVFPAILPKVAVRLLFTFYRAARKLRRHAFQLYNRRTAAKPPSFSVSQQQAGAATFKTDAAIPDAAGRTVVCDVHGALLRSSALFPYFMVVAYEGGSLLRAMLLLCAFPLVWALGERSGGAGAVRVMAFVTFAGLRPRDMDLVGRAVLPKHYMEQLNALVYGSLWLPARRKVAVTGAPRVMSEWFLKEYLAADAVVGLELQLVTVGRCRYFTGLLSGPATGPELRHKALMEALGAEDDTVADVGIISNSNPLDHLFVPYCKEVYVVNTENDKLPRVKYPKPLIFHDGRLAFLPTPAAMLAFFLFLPLGVILSVIRINIGIVLPYKVNFVAAAIFGVRFRASGLRAPPADGEQRRGVLYVCTHRTLVDPIMLTTALQKPVPALTYSLSRLSELIAPIKTVRLTRDRARDADTMSRLLKQGDLAVCPEGTTCREPYLLRFSPLFAELADDMEPVALDAQVTMLYGTTASGHKWLDPVAFFANPVPSYRVEFLGTVPREWTRAGGRTGVEVANWVQRRLGEALEFECTELTRRDKYMMLAGNDGVVAK

SEQ ID NO: 8816 - protein, 379 aa, Zea mays
  VARIANT 36: note = Ancestral polymorphism is R, Derived polymorphism is H
MALAVRTPRFQPRPASISAPTTPASTSLAAGNARPRPCAGAAVRASPFTEATSSSRYRRDAWSYAADGSSNSASPSSAAAAAAGRRDDEIALQLPELRRLLDVLRASRGRGAEEGGGPGRVALVGTGPGDPELLTLKAVRAIEAADLVLYDRLVSNDVLDLVGEGARLLYVGKTAGYHSRTQEEIHELLLSFAEAGANVVRLKGGDPLVFGRGGEEMDFLQQQGIKVEVIPGITSASGIAAELGIPLTHRGVATSVRFLTGHSRNGGTDPLYVAGNAADPDTTLVVYMGLSTLPSLAPKLMKHGLPPDTPAVAVERGTTPQQRTVFASLKDLVDEVKSADLVSPTLIIIGKVVSLSPFWVESSEHDALKVQSSYANEAR

SEQ ID NO: 8817 - protein, 265 aa, Zea mays
  VARIANT 119..265: note = Derived polymorphism lacks residues 119 to 265
MLRLTFRWVIRKGNVEEFSCVPYILALLNCLLYTWYGLPVVSSGWENLPVATINGLGILLERFALQLVLPALALFGLTAALSSFAARTHRSRKAFVGSVGLVASVSMYTSPMVAAVSIYRSPNPLPPADFPLYFTASAGTKISGWSPTTPVDRYCMQKRVIATKSVEFMPFSLSLFSFLSSALWMAYGLLGRDLFIASPNFIGVPVGVLQLLLYCIYRRDHGAAAGAEAQAHGPAAAADQEKGMKAAAPVAVQPQEVAARVSEYK

SEQ ID NO: 8818 - protein, 148 aa, Zea mays
  VARIANT 11: note = Ancestral polymorphism is V, Derived polymorphism is L
  VARIANT 12: note = Ancestral polymorphism is R, Derived polymorphism is T
  VARIANT 101: note = Ancestral polymorphism is D, Derived polymorphism is G
MEDLQHHVEGVRARGRHHHQHQLVRERGRRRIVKAAAAEERALVVPPEEETSTEDKLLEGPRDHEGDDEEVVVEQKVALLRQLVPGGEGMAVEGLLEETADYIAALKAQVGAMRALTCLLSGSGSGSDLDALRPESLAAGVLTPDNPM

SEQ ID NO: 8819 - protein, 371 aa, Zea mays
  VARIANT 189: note = Ancestral polymorphism is Y, Derived polymorphism is N
  VARIANT 110: note = Ancestral polymorphism is L, Derived polymorphism is Q
  VARIANT 19..371: note = Derived polymorphism lacks residues 19 to 371
MSGAAVEAFPCADLGASAWASLLRLGPSASVAASASVAAGASLLVRSVPISSLLSSLRCGPVKKLIKEKKNDAGIFEYIDINKELQEGKTTSHFAAMFSGSGRAYYVGGQRNLGNNCFLNVILQALASCDGFISFLDNLLATDGLLPEEKAVRIPLLLALSSLLEDLSIVRDERTVLNPHGVMHALSLYVGRFNLTRQQDASEAFLHLLISLRDEFAHCYVPHRSSLANITLSDSKVYKQREGNLPECKRWKQNLFGPFDVTVGIILSCRNCSSVLSLDFENFHCLPLSPVLNANGDITSGCSLVDCLKYFTVVEHLDNYRCDRCWHIIAAKYLSLRSEVDELQGYVPPGVTAMFIIFTSNKAADYQSVPE

SEQ ID NO: 8820 - protein, 558 aa, Zea mays
  VARIANT 452: note = Ancestral polymorphism is P, Derived polymorphism is L
  VARIANT 451: note = Ancestral polymorphism is P, Derived polymorphism is L
  VARIANT 349: note = Ancestral polymorphism is V, Derived polymorphism is A
  VARIANT 319: note = Ancestral polymorphism is D, Derived polymorphism is G
  VARIANT 302: note = Ancestral polymorphism is N, Derived polymorphism is I
  VARIANT 275: note = Ancestral polymorphism is G, Derived polymorphism is R
MATGALLQPWSLLGFLAALAALWWACRVLQSTLIVPRRLGRALRSQGLRGTTYRFPFGDLKELARLAVAARAKAMPLSHDITPRVNRLYYNVIGEHGKVSVTWLGPTPRVIVNDPKLVREILANKLGHFQKRKHDGIVRRLASGLVNHEGEKWAAHRKLISPAFHLEKLKKMLPAFASCSDELIARWAGYVGSDGAREIDVWPEFQNLTGDVISRTAFGSSFSEGRRIFEIQCEQVQNLVKLMNTLYLPGFRFLPTQLNRRLKANAREVQALLRGIVSKRERAMKEGRANNDDLLGVLMESNIAETRQDGSSEPVMTMDDIIGELKLFYFAGMDTTAVLLTWTMVVLSAHPEWQERAREEVRRVFGNNRPDLDGIQQLKTVSSSLAGLCSAVCSHNTTSHASLTDTVVSVLVWSSLQVTMILYEVLRLYPPVVQLDRQTHNEVELGGVTYPPGVLLSLPIVFVHHDKDVWGEDADEFSPERFKDGVSRASKDSPAFFPFGWGPRICVGQNFALVEAKMALSSILQHFSFALSQSYTHAPFPVSTLQPEHGAHLMLKKL

SEQ ID NO: 8821 - protein, 158 aa, Zea mays
  VARIANT 79..158: note = Derived polymorphism lacks residues 79 to 158
  VARIANT 74: note = Ancestral polymorphism is R, Derived polymorphism is S
MRSACYITEKASQTFDRIRRWRVTPAQNPSLQLIYLLLAPTRINFRRRPFLFVARLTPTPPPLPWPRRRIRPRRRRPSQPSPEAGSSKRRSGARVSKRRRSTTLCSSTRPPMTSCSPMCPSTSRSPHPSSPSVSGQEQVYNLFLTQATSVRHCSSYES

SEQ ID NO: 8822 - protein, 471 aa, Zea mays
  VARIANT 7: note = Ancestral polymorphism is E, Derived polymorphism is G
MAIAALELLYVLGSLVALRLAWQVLEWGWLSPRRLGRALRAEGLRGTAYRFPAGDAKDEERLLAAARAKPMPSLSHAISARVGPLVHNAIHEHGKISVVWIGPTPKVILSDPKLVREVLSKSSKFGDFQKPKLPSHFIKLIAQGLTVHEDVWPEMQDLTGDAISRAAFGSSLIEGRRIFRIQAEQIKIANEMTNLYIPGYTYLPTKPNRRIKANAREVEALLRGIITKRETAMKNGHADDSDLLGKLMQSNVEEAHGGGGSSKPMMTMEDIIGELKLFYFAGMETTSALLAWTLIVLSMHPEWQDRAREEVLEVFGKNEPNINGTNSLKVVTMVLYEVLRLYPPIIDLERQTWKEMELGGVRYPPGVTLLLPILAIHHDPDLWGEDVDQFRPERFADGISKASRDTPAFFPFGWGPRICVGQNFALLEAKVALAMLLQRFSFGLSPSYTHAPFSVSTVQPEHGAQIVVKKI

SEQ ID NO: 8823 - protein, 578 aa, Zea mays
  VARIANT 489..578: note = Derived polymorphism lacks residues 489 to 578
  VARIANT 323: note = Ancestral polymorphism is E, Derived polymorphism is D
MASSGEAALLGGSVGDARAPPLPWKLLALLCAALAVAWCAVRALEWAWWRPRRLARALRSQGLCGTSYRSLAGDAPLTEELNREARSRPLPLGCHDVAPRAMPLFHQTMKEHGKTSITWFGPVPRVTITKPELVREVLSNKFGHYEKLKLRKLQRMLHNGLGSHEGDKWAKHRRIINPAFHLEKLKVTTTHTTCTAETMNMHVPAARVYSCFDSLCLLFPQRMLPAFAACCTDLVERWEGLVADGQQPCEVDVWPEMQNLTGDVISRAAFGSSYLEGRRIFQLQGEQVQLVVQAMHKLHIPGYLYLPTKTNRRMKRIASEIQELLKGIIAKRENALRTGGGAASDDLLGLLLESNMEHCRGDGGKSKASGITTDDVIGECKLFYFAGMETTSVLLTWTMVVLSMHPEWQDRAREEVLHVFGDRTTPDYDGLSRLRIVTMVLYEVLRLYTPLTALQRQTYKPMELGGVRYPAGVMLMLPLLCIHHDKDVWGPDASEFRPQRFAEGVSRASRDAPAFFPFGWGPRTCIGQSFALLEAKMGLSMILQRFAFELSPAYTHAPFAHGMLQPEHGAQVMLRRLP

SEQ ID NO: 8824 - protein, 390 aa, Zea mays
  VARIANT 271: note = Ancestral polymorphism is Y, Derived polymorphism is D
  VARIANT 225: note = Ancestral polymorphism is A, Derived polymorphism is T
  VARIANT 222..390: note = Derived polymorphism lacks residues 222 to 390
  VARIANT 217: note = Ancestral polymorphism is V, Derived polymorphism is A
MGDGLASHEGARWAKHRRILGPAFQLEKLKRMLPAFSACCQELVSRWAECLGPDGSCELDVWPELQNLTGDVISRTAFGSSYHQGRRIFQLQTEQASLVMTNIQNIVIPGYRYLPTANNRKLRKNNREVESILRGIIGKRIRAMERGESSEDDLLGVLLETTSTRDDADDDGNNNSQSTAGMGLTIQDVIEECKLFYFAGMETTSVLLTWTMVVLSAHPEWQDRAREEVLGLFGRDKPEHHGLSRLKTVTMVLYEVLRLYPPATTLVRRTDKEMEVGGVTYPAGVLLDLPVLLIHHDPDIWGDDAHEFRPERFSEGVSRASSRDPGAFLPFGRGPRVCIGQNFALLEAKMALCMILQRFQFELAPSYAHAPHTVITLHPMHGAQLKLRAI

SEQ ID NO: 8825 - protein, 529 aa, Zea mays
  VARIANT 83: note = Ancestral polymorphism is R, Derived polymorphism is W
  VARIANT 277: note = Ancestral polymorphism is S, Derived polymorphism is W
MVLGALASAVASTGLLIVYGVLGALLLWKAARLLDRLWWEPRRLERALRAQGLRGTSYRFLTGDLREYRRSKEEAGARPLPLRCHDIAGHVEPFIHGAVLEHGKTCFTWFGPVPRVTVVDPDLARDVMANKFGHFEKPKFPALTKLFSDGVANHEGEKWVKHRRILNPAFHLEKLKLMLPAFSACCEELVSRWAQSLGPDGSCELDVDPELQTLTGDVISRTAFGSSYLEGRKIFQLQAEQAERLMSIIDKFAVPGYMSLPTKNNRRMRQIKSEIDWILRGLIGKRMQAMKEGESDKDDLLGLLLESNARETGDQSGQPGQGLTMEEVMEECKLFYFAGMETTSVLLTWTMVLLSMHPEWQDRAREEVLGLFGKKNQPGYDGLSRLKTVTMILYEVLRLYPPAIAFSRKTYKEMVVGDVTYPAGVTLELPVLFIHHDPDIWGSDAHEFRPERFAEGVARASKDRLAFFPFGWGPRICIGQNFALLEAKMALSMILQRFQFELAPTYTHAPRRVIMLRPMHGAQIKLRAI

SEQ ID NO: 8826 - protein, 527 aa, Zea mays
  VARIANT 329: note = Ancestral polymorphism is C, Derived polymorphism is S
  VARIANT 338..527: note = Derived polymorphism lacks residues 338 to 527
  VARIANT 341: note = Ancestral polymorphism is S, Derived polymorphism is P
  VARIANT 355: note = Ancestral polymorphism is P, Derived polymorphism is L
  VARIANT 357..527: note = Derived polymorphism lacks residues 357 to 527
MATCVLLMLREVSPWALASVVASVSLLWLVVWTLEWAWWTPWRLERALRVQGLKGTRYRLFTGDLRETARANREARKKPLPLGSHDIAPRVQPMHHSTIKEYGKLSFTWFGPTPRVMIPDPELVKEVLSNKFGHFGKPRSNRIGRLLANGLVNHDGEKWAKHRRILNPAFHHEKIKGMMPVFSTCCIEMITRWDNSMPSEGSSEIDVWPEFQNLTGDVISRTAFGSNYQEGRRIFELQGELAERLIQSVQTIFIPGYWFLPTKNNRRMRAIDVEIRKILREIIGKREKDTKNRETNNDDLLGLLLESNTRQSNGNASLGLTTEDVIEECKLFYFAGMETTSVLLTWTLIVLSMHPEWQERAREEVLSHFGRTTPDYDSLSRLKTITMILHEVLRLYPPATFLTRRTYKEMELGGIKYPAGVDLLLPVIFIHHDPDIWGKDASEFNPERFANGISSATRHQAAFFPFGGGPRICIGQSFALLEAKMTLCTILQRFSFELSPSYTHAPYTVITLHPQHGAQIRLKKLSP

SEQ ID NO: 8827 - protein, 304 aa, Zea mays
  VARIANT 9..304: note = Derived polymorphism lacks residues 9 to 304
  VARIANT 51..304: note = Derived polymorphism lacks residues 51 to 304
  VARIANT 138..304: note = Derived polymorphism lacks residues 138 to 304
MDSARSWLQKLQPRDKDIEWGAKTPTPAPTSPKRGEAFTSFSACLLKTNAQQFRLLDVPQRPNGQSAQQTKGMSGLPLYDSHNVEDENGSQKFVCRLCGLKFDLLPYLGRHHKVAHMVSGVVGHILLGHGKYQLNRGRHYYSAFKKSLRPTSTLKKSSSSGINKNFKFQISGLTSQIVEYETSSLGKLQDFQCSDVAQTLFSKIQKTRPHPSNFDVLSVARSVCCKTSLLAALEVKYGSLPKNIFVKAAKLCSDNGIQIDWHQEGFICPKGCKSRYNSNALLPMQLTTVDFLEAPVDSLNDDEM

SEQ ID NO: 8828 - protein, 426 aa, Zea mays
  VARIANT 27: note = Ancestral polymorphism is R, Derived polymorphism is S
MRTPFVDKSPQYRRDSAAGRLKQRLARILTRSTCTTNNAAAASSGGTATATAFVSLAKTNNAHTAASSSHPEPEAPPSPYFCTPCTYDYERPKADRGTRPRRSRTRSASLVHISVDCTGGAASGRRSAHSDAPLLQHLLSEQVPARDVVGGTKQSKGGGGRSKLTTARSSPSASRRHCSSSSSSWGRARARRPSSTPTPYSWSSSSRSSATATDDELAPFSGSDDEAGGQAADMRTLFSSLSFSSDPTSSEFYRTNGGRSGNGNASRRSHRNTASRRRGRRARAPRRALSRSSGGDPAAPPDAFRPLVSVETTRRTTERSERSKEDKGLNNAKKLTMTMLGAAAAAEEEEEEAIAAGAGMAVVKRSSNPYLDFRSSMVEMVVERRIASVGKMEELLGSYLSLNSPRHHPAILAAFEDVWEAVFGEE

SEQ ID NO: 8829 - protein, 331 aa, Zea mays
  VARIANT 58: note = Ancestral polymorphism is P, Derived polymorphism is A
MDGLHTELALGLLECGVVGSGGETAPFVAKTYQMVCDSRTDALVRWGRGNNSFVVADPAGFSRLLLPCFFKHSNFSSFVRQLNTYGFRKVHPDRWEFAHESFLRGQTHLLPRIVRRKKRGGGGGACSSGGDAPQAGCCISTMGEDHRPEADPDEKQEADAEAALLEEVQRLRQEQTAIGEELAQMSRRLQATERRPDQLMSFLDRLAEDPDGVTRNLVEQAAEKKRRRMQLASQSQPARPPLPPAPPPPVLHPLLALGGAAAKGLDGWQWAELQKPSVVLPAFDFDPAASCCGAQHAPNLGGAGIIGMGLTADETTVETPFPFCLLGQGFF

SEQ ID NO: 8830 - protein, 361 aa, Zea mays
  VARIANT 194..361: note = Derived polymorphism lacks residues 194 to 361
MAASDLESKAKEAFVDDDFELATELYSQAIDAGPATADLYADRAQAHIKLGNYTEAVADANKAIELDPMMHKAYYRKGAACIKLEEYQTAKAALELGSSYASGDSRFARLLKECDERIAEESSQAPVKNVEATVAATIEDKEDFTNMENTPPVIEPPSKPKYRHDYYNSATEVVLTIFAKGVPADSVVIDFGEQMLSVSIEVPGEEPYHFQPRLFSKIIPEKCKYQVLSTKVEIRLAKAEQVTWTTLDYSGRPKTVPQKISTPAETAPRPSYPSSKAKKDWDKLEAEVKKEEKEEKLDGDAALNKFFRDIYKDADEDMRRAMMKSFVESNGTVLSTNWKDVGAKKVEGSPPDGMELKKWEY

SEQ ID NO: 8831 - protein, 217 aa, Zea mays
  VARIANT 93: note = Ancestral polymorphism is H, Derived polymorphism is Y
  VARIANT 2..217: note = Derived polymorphism lacks residues 2 to 217
MQHAQIVAGARLTLSASRKGTHCLRSACGKILPHSPNMRGAEEERSGTATDAGGEEEKQERSVGLMAGLMDKAKGFVVEKVMQIPKPEAALDHVSFRSISREGVELHSHVDISNPYSHRIPICEITYTFKSAGKVIASGTMPDPGWIAASGSTKLDLPVKVPYDFIVSLMKDLGGDWDIDYMMEVGLTVDLPAIGAFTIPLTTEGEIKLPTFRDLLF

SEQ ID NO: 8832 - protein, 785 aa, Zea mays
  VARIANT 13: note = Ancestral polymorphism is G, Derived polymorphism is R
MEASSSLRFQVSRFSSFKIWLCLFLVLVLQNCSPALSDSPYLVGMGSYDITGPAADVNMMGYANAEQIASGIHFRLKARAFIVAEPNGKRVVFVNLDACMASQLVTIKVLERLKARYGDLYNENNVAISGIHTHAGPGGYLQYVVYIVTSLGFVRQSFDVIVNGIEQCIVEAHNNLHPGKIYVNKGDLLDASVNRSPSAYLNNPAEERGKYKYNVDKEMTLIKFVDDESGPIGSFNWFATHGTSMSRTNSLISGDNKGAAARFMEDWAEQNGIPKQAAHVNHDGLESSHMTSRLPRRVSPIIPEPNEITDDLVQLASSYEASGGRRLSSSSITKRIRSTQQNRPKFVSAFCQSNCGDVSPNVLGTFCIDTGLPCDFNHSTCNGKNELCYGRGPGYPDEFESTHIIGNRQFQKAVDLFSSASEEIQGKIDYRHTYLDFSKLEVNVRTSTGSQQVVKTCPAAMGFAFAAGTTDGPGAFDFKQGDVKGNPFWRLVRNLLKTPGKEQVECQAPKPILLDTGEMKEPYDWAPAILPIQIIRIGQLAILCVPGEFTTMAGRRLRDAVKAVLTSDNSGEFNNIHVVLAGLTNTYSQYITTFEEYEIQRYEGASTLYGPHTLSAYIQEFQKLATAMVANKEVPTNFQPPDMLDKQIGLLPGVVFDSTPPGVEFGDVSSDVPASSTFRKGSVVNATFYSACPRNDLLTDGTFALVEKLDGSNSWVPAYDDDDWSLRFKWSRPSKLSPRSFATLEWTVPGDAPSGVYRLRHFGASKPLIGSIKHFTGTSRAFAVR

SEQ ID NO: 8833 - protein, 93 aa, Zea mays
  VARIANT 85: note = Ancestral polymorphism is G, Derived polymorphism is S
  VARIANT 79: note = Ancestral polymorphism is S, Derived polymorphism is Y
  VARIANT 65: note = Ancestral polymorphism is W, Derived polymorphism is C
  VARIANT 64: note = Ancestral polymorphism is E, Derived polymorphism is V
  VARIANT 61..93: note = Derived polymorphism lacks residues 61 to 93
  VARIANT 43: note = Ancestral polymorphism is S, Derived polymorphism is F
  VARIANT 32: note = Ancestral polymorphism is S, Derived polymorphism is R
  VARIANT 30: note = Ancestral polymorphism is N, Derived polymorphism is S
  VARIANT 29: note = Ancestral polymorphism is P, Derived polymorphism is H
  VARIANT 23: note = Ancestral polymorphism is L, Derived polymorphism is M
  VARIANT 22: note = Ancestral polymorphism is N, Derived polymorphism is I
  VARIANT 9: note = Ancestral polymorphism is D, Derived polymorphism is N
MPGDNDYLDMVFTQVSLEEVENLCRYELPNESWEVNLPAEKVSHVLLEPTLGINFARDGIQEKEWLSMVAAHSDTWLLYVAFYLGARFGFNKN

SEQ ID NO: 8834 - protein, 201 aa, Zea mays
  VARIANT 155: note = Ancestral polymorphism is N, Derived polymorphism is I
  VARIANT 46: note = Ancestral polymorphism is K, Derived polymorphism is N
  VARIANT 17: note = Ancestral polymorphism is R, Derived polymorphism is I
  VARIANT 13: note = Ancestral polymorphism is E, Derived polymorphism is Q
MYPLDVSLLKSIEKQPRRPAAAVKRELSGEEEGKITMLDHLVGLLKLRVVRGVNLAVRDLRSSDPYVVVRIGKQKLKTRVVKKSVNPEWDDELTLSIEDPAVPIRLEVFDKDTFVDDTMGNAEVDIRPLVEIVKMKLQDVADRTVVKKLVPNRQNCLAEESSIYISEGKVKQDMVVRLRNVESGEIELQLQWIDLPGSKGV

SEQ ID NO: 8835 - protein, 181 aa, Zea mays
  VARIANT 172..181: note = Derived polymorphism lacks residues 172 to 181
  VARIANT 153: note = Ancestral polymorphism is R, Derived polymorphism is H
  VARIANT 138: note = Ancestral polymorphism is L, Derived polymorphism is F
  VARIANT 125: note = Ancestral polymorphism is V, Derived polymorphism is I
  VARIANT 98: note = Ancestral polymorphism is Y, Derived polymorphism is N
  VARIANT 88: note = Ancestral polymorphism is K, Derived polymorphism is N
  VARIANT 84: note = Ancestral polymorphism is R, Derived polymorphism is C
  VARIANT 78: note = Ancestral polymorphism is S, Derived polymorphism is L
  VARIANT 68: note = Ancestral polymorphism is G, Derived polymorphism is S
  VARIANT 67: note = Ancestral polymorphism is S, Derived polymorphism is F
  VARIANT 66: note = Ancestral polymorphism is I, Derived polymorphism is F
  VARIANT 65: note = Ancestral polymorphism is R, Derived polymorphism is H
  VARIANT 51: note = Ancestral polymorphism is G, Derived polymorphism is C
  VARIANT 50..181: note = Derived polymorphism lacks residues 50 to 181
  VARIANT 41: note = Ancestral polymorphism is D, Derived polymorphism is A
  VARIANT 39: note = Ancestral polymorphism is D, Derived polymorphism is N
  VARIANT 38: note = Ancestral polymorphism is S, Derived polymorphism is C
  VARIANT 33: note = Ancestral polymorphism is S, Derived polymorphism is L
  VARIANT 26: note = Ancestral polymorphism is Q, Derived polymorphism is R
  VARIANT 20: note = Ancestral polymorphism is V, Derived polymorphism is M
  VARIANT 16: note = Ancestral polymorphism is E, Derived polymorphism is K
  VARIANT 15: note = Ancestral polymorphism is I, Derived polymorphism is V
  VARIANT 3: note = Ancestral polymorphism is L, Derived polymorphism is F
MGLSLNIDMSSTAFIEPLPVIDFVAQLLNRDISVRPLSDSDRVKIKKALRGVKVEVTGNMRRKYHISGLTSQATRELSFPVDDRGTVKTVVQYFMETYGFSIQHTTLPCLQVGNQQRPNYLPMEVCKIVEGQHYSKRLNEKQITALLKVTCQRPQERELDILQVAVYHMFYQCLHLMISNV

SEQ ID NO: 8836 - protein, 524 aa, Zea mays
  VARIANT 463: note = Ancestral polymorphism is G, Derived polymorphism is V
  VARIANT 312..524: note = Derived polymorphism lacks residues 312 to 524
  VARIANT 124: note = Ancestral polymorphism is M, Derived polymorphism is T
MGNRASRHHRHATEQQPETPTLPKPQIQPPPPPTQTQQYQQAPPPPKPKPAADARAVGRVLGRPMEDVKATYTFGRELGRGQFGVTYLVTHRETGQRFACKSIATRKLVHRDDIEDVRREVQIMHHLTGHRNIVELRGAYEDRRSVNLAMELCEGGELFDRIIARGHYTERAAAALCREIVAVVHSCHSMGVFHRDLKPENFLFLNNKEDSPLKATDFGLSVFFKPGDTFKDLVGSAYYVAPEVLKRHYGAEADIWSAGVILYILLSGVPPFWAENEDGIFDAVLHSHIDFSSDPWPSISNGAKDLVKKMLRQDPKERLTAAEILNHPWIREDGEAPDKPLDITVISRMKQFRAMNKLKKVALKVVAENLSDEEIMGLKEMFRSLDTDNSGTITLEELRSGLPKLGTKISESEIKQLMEAADVDGNGTIDYAEFISATMHLNRLEKEDRILKAFEYFDKDHSGYITVDELEEALKKYDMGDDKTIKEIIAEVDTDHDGRINYQEFVAMMRNNTPEIVPNRRRMF

SEQ ID NO: 8837 - protein, 619 aa, Zea mays
  VARIANT 188..619: note = Derived polymorphism lacks residues 188 to 619
  VARIANT 193: note = Ancestral polymorphism is S, Derived polymorphism is Y
  VARIANT 225: note = Ancestral polymorphism is G, Derived polymorphism is E
  VARIANT 390: note = Ancestral polymorphism is T, Derived polymorphism is I
  VARIANT 396: note = Ancestral polymorphism is Y, Derived polymorphism is N
  VARIANT 420..619: note = Derived polymorphism lacks residues 420 to 619
  VARIANT 459: note = Ancestral polymorphism is D, Derived polymorphism is Y
MDSSAADDPMADEARVEDAFTQEITDYSYVPRYHVLSWMETVEGMVAGVAALPPVYLILNRALLRCPCQDLLETGWGWKRLVPYRPGYVEWHVFKKYLGDYFDHNREAFLCAEQKPDPFGWIIAKKSALIAAAKLLQINLHHCKNNQNAFQCLKMEKALLRYCASFLTPDDKRLILRIKDQAKQMIQSEGDQSLVVTICLEVVGAERAVVVQLVGPVRRAAARGGRSPRAEEVRREERAEAEDAAGQQVLQRGEVLVLVLEQGLGLGALHEEHIGMVLQAMVQMGVLVPTGDMTVVRRTAQFFLNSFQECLTAQRKEREMATAELGFKKQLTKEEKFEKRKQRLAAIGEDLLAIAADQPFRFPATFTFVVRAFSVLDGTGKGLDPRFHITEIAKPNAKELLRFNDAGVEIVVKASFNIWSKLLTYLYDSTSPKGVWRDMCIPPMTNSLGSMKERRAQLDSIHVKSEAAARSCFAFMWIYLANGMWIRSRGNEPCSQRVPRISTAKHKKVFEIKNLHSFNHNVFPIKHNLVSISVYLHSVGKLQPHCNKVYKRFAMRKNKFMGSNKNQAKKTDINCDATLKSLFGERDKVGMLEISKLLSRGFPKISKLLWSMEPGMALW

SEQ ID NO: 8838 - protein, 245 aa, Zea mays
  VARIANT 78: note = Ancestral polymorphism is C, Derived polymorphism is F
  VARIANT 85: note = Ancestral polymorphism is W, Derived polymorphism is L
  VARIANT 91: note = Ancestral polymorphism is V, Derived polymorphism is D
  VARIANT 148: note = Ancestral polymorphism is V, Derived polymorphism is A
  VARIANT 150: note = Ancestral polymorphism is S, Derived polymorphism is C
MGFHEDEDEMAITRCRGRFGLFWYLCEKETGKVHGTEEETREAIWGASSALIEHILDALANSEDPPSATVQKYVLGQCRKWNLVWVGRHRVAPLEPDEIEFLLGFPKDHTRGINSTERYRSLGNSFQVHTVAYHLSVLREMFPNGMNVLSLFSEIGGAKIALHKLGIRMKTMVSVESITSDWLESTIKEIGGLDLVIGGSPCNNFTGSNRYHRGGLEGEHSSLFYHYSRILDCVKYSSQSVMQRV

SEQ ID NO: 8839 - protein, 1047 aa, Zea mays
  VARIANT 204: note = Ancestral polymorphism is P, Derived polymorphism is L
  VARIANT 220..1047: note = Derived polymorphism lacks residues 220 to 1047
  VARIANT 264..1047: note = Derived polymorphism lacks residues 264 to 1047
  VARIANT 278..1047: note = Derived polymorphism lacks residues 278 to 1047
  VARIANT 284: note = Ancestral polymorphism is R, Derived polymorphism is W
  VARIANT 291: note = Ancestral polymorphism is P, Derived polymorphism is L
  VARIANT 296: note = Ancestral polymorphism is P, Derived polymorphism is L
MGSLENGAGAGAAAAAGSYKRGPGPALRAGGARKARARSRLARFLLLEKVDYLQWIAAAAAFFFVAIVFVAFLPGSGVIERPRLTLPSSRAGEGRVGGGVEDRSGLVRWEAGAAFEFEPARLREKWARERREEAKSLAELGTPVRRLGVRKPRLAMVFGDLYPSAMQLQMVSVASVLEAMGYEMKVFSLEDGPCGNIWGAIGVPVSILPEDANLPISVDWLDYDGILVNSIEARPVFSSLLHEPFKSIPIIWTVHEYSLAHRAKEYNVSGMIQLINAWKDVFSRTNVIVFPNYILPVMYAAFDSGNYFVIPGPPSEAFQVDSFIAKSYHEDVKISLGLNPKDFLIAIVGNSFSYGDNLMEEALVLQALSPLLQRYRSENSAQSELKVKIFTGNITEKHRMALESVALSVGFPRGAVEHVAAEDKDNLLGTADLVIYYSCLEEQLFPSVLVQAMSLEKLVIAPDLAIIRKHINDGVNGLLFPRKNIGMLAQVLLRAVSNSKVSLSGQKIASAGKAHAKNLMASETIEGYAMLLKNVVKLPTDALSPLTADEIPLALKQEWKWHLFDDVKHLHRVNTSLSGYKILQKLEQEWHSNQMENSSLSTKNINDAFSAIAWEEQRVNEVMDIKRKMEEDELKDRNDQPHGTWEEVYRNVKRVERLKNELHERDDKELERTGQPLCIYEPFFGEGTWPFLHQSSLYRGVGLSSKGRRPGADDIDASSRLPLLNNVYYRDILGEFGAFFALANRIDRIHKNSWIGFQSWRATARKANLSTNAESAILEAIQSQKHRDSFYFWVRMDQDPRNHANKDFWSFCDVINAGNCRLAVLEAFQRMYGVHLDRDLDTLLHMPNDGDTWSVMQSWVLPTRSFLEFVMFSRMFVDALDAQMYDKHHQTGHCILSLHKDQHCYSRLLELIVNVWAFHSARRMVYVNPATGQMQEQHHLSGRRGQMSVQFFSYATLKSMDEELAEEFDLDHPDRRWLWPQTGEVFWQGLYERERSMRQHEKERRKQQSREKIQRIKSRARQKTLGKYIKPPPDDTVVSNDTTTVDL

SEQ ID NO: 8840 - protein, 644 aa, Zea mays
  VARIANT 94..644: note = Derived polymorphism lacks residues 94 to 644
MDTTTQGLEFGGGINSPKPYCYWSTTQDTTVHKDSTPEAYSTFSISNSKASKRKQGAMSGAKGGNPLLTLGLGCSPSSSYNSKLSSGTACITSSSLLKEIDEESSIDLGLNLGLYIGNDIGHCQQKSHAGFENVLSTNSPKLDLQLSLSTSSPESVVIDANRSPDGLAMPMANSPLAIVEEGSVPHSWVFEHSIVSSSHASKATHGFPLSKKTNGGNASVPSHVMSSTMFTSVKGPVASASETTNSQQRNSNAKSCQFPGCVKGARGASGRCIAHGGGRRCQKPGCEKGAEGRTIYCKAHGGGRRCQFLGCTKSAEGRTDHCIAHGGGRRCSHEGCSRAARGKSGLCIKHGGGKRCQKENCTKSAEGHSGLCIAHGGGRRCQFPDCTKGAQGSTKFCKAHGGGKRCTFVGCTRGAEGSTSFCKGHGGGKRCAFQGGGVCPKSVHGGTQYCVAHGGGKRCASFGCTKSARGRTEYCVRHGGGKRCKFESCTKSAQGSTDFCKAHGGGTRCLWGQADTSFGAGAQQCDKFVRSKTGLCSAHSALIQDHCVHGGGTLGSAIYQSVHVKPTEMINGDKTLLDPAIPVTNSGVHPPVLAQSMIDPLPEGRVHGGGLLALLSRGGSRTSAGGSELCFGQDRVDLRLSGSP

SEQ ID NO: 8841 - protein, 137 aa, Zea mays
  VARIANT 68: note = Ancestral polymorphism is V, Derived polymorphism is A
  VARIANT 46: note = Ancestral polymorphism is K, Derived polymorphism is R
  VARIANT 45: note = Ancestral polymorphism is D, Derived polymorphism is H
  VARIANT 38: note = Ancestral polymorphism is A, Derived polymorphism is D
  VARIANT 17: note = Ancestral polymorphism is S, Derived polymorphism is R
MSSRKHHELPEGGAGGSGAGRTAVWDTGSSLYDSYELAAVRRLLDKRLLALRDDAEETRGKEGRQLVVVPVASSSRRVHHRRKATLRALFRAVVATWAARPRQAPPLACACAAGMVRDDHQGGSAVEPEDLPSHGQL

SEQ ID NO: 8842 - protein, 78 aa, Zea mays
  VARIANT 23: note = Ancestral polymorphism is A, Derived polymorphism is V
  VARIANT 28: note = Ancestral polymorphism is Q, Derived polymorphism is H
  VARIANT 30: note = Ancestral polymorphism is F, Derived polymorphism is L
  VARIANT 42: note = Ancestral polymorphism is F, Derived polymorphism is S
  VARIANT 54: note = Ancestral polymorphism is I, Derived polymorphism is L
MDSSSGSQDKKFRDNDRPEAKEANSTAQHLVDFTEAEEDLVSRMHRLVGNRWEIIAGRIPGRTAEEVEMFWSKKYQER

SEQ ID NO: 8843 - protein, 650 aa, Zea mays
  VARIANT 15: note = Ancestral polymorphism is P, Derived polymorphism is S
  VARIANT 42: note = Ancestral polymorphism is K, Derived polymorphism is M
  VARIANT 113: note = Ancestral polymorphism is A, Derived polymorphism is T
  VARIANT 208: note = Ancestral polymorphism is P, Derived polymorphism is L
MASGGQPQFRYTQPPSKVLHLRNLPWDCTPEELVELGTPFGKVVNTKCGVGANRNQAFIEFVSTTSFPSCLWGGDDLSSGETAVICDCMFFLIPFIVLQGDQNQAIAMISYYASSTEPAQVRGKNVYLQYSNRQEIVNNKATGEGSGNVLLVGMEGVAPDSVSIDVLHVQAVVTEYHGRKHLEHMSVFVSSPLLIAALLLPYPPSPAPLLPTFPLPYPFIQVFSAFGFVHKIATFEKASGYQALIQFSDAETATSAKAALDGRCIPSYLLPELDVACTLRITYSAHSVLNVKYQSHRSRDFTNPYLPFLDSAKDGSGPDGKKQEAESNILLASIENMQYVVTIDVLHEVFSAFGFVQKIAIFEKNGFQALIQYPDIQTAYAAKEALEGHSIYEGGYCKLHLTFSRHTELNVKVNNERGRDYTKGNATPSSDQPSILGPQPIPSVGAAIPPAQGSVPSAATNSVMPPGDPSVALPSNPSSEPLLQAPVVSSGGPPHYPNQAILQGPLGVVARFPGYGALQFAQGSAQAQMVQPSGQGSQHMSGHVNYQLPPGSAQFMQYLSNGSHPLPNAPGPQTMPYPALSGQQLPPGLQMMQAQGFGGLPFSQGPGQPMPQFPMYGTQQFPPGMEPKMMRFSEQGGQQFTFAPRGPNSR

SEQ ID NO: 8844 - protein, 696 aa, Zea mays
  VARIANT 100..696: note = Derived polymorphism lacks residues 100 to 696
MATFPVTTAPTPHQSTPPTAGLPGHLRLPTAASADAALITLSAFLSSGRLTTSSPSLLHRTLRAAADHRLPRLGLQLHAFLVKTRLLADPFSASALLHLYSTIAPLHRTRLLFDRIPKSTYPVPWNTMILRYAQDGFLDEAFDLMVAMEESGIPIGASTWNAVIAGCVRAENGELAIELLGKMVSVGGVVPSVATFNTVLHVISALRGVNVLRELHAFVLRNAEVVGLGPVDLDRLQESLAAGYMCSSCVQYAGRVFRDVRISTCFLGNLMISGFLDTGQRNQALGVLREMAFGCGHEAQHLPSASLTLVLPEVNLATKRGLEIHAYAYRHGFECDTSVCNALMAMYARGGKICRSDKVFQGLDAKDVVSWNTMISGYATVHDFDLSFELFREMQRNGTRPDDYTFTSVLNACSFACNHRTVMALHGQMIRMGLCHSYVDDMNSLMDAYGKCGFIAEAQKIFDETERKDTVSWNIIISCYGYSGFPQRAIRLFHQMQDQSYKPTRVTFIAVLAACSHAGLVDEALRYFEAMHGDYSITADEAHYACIVDCFGRAGQLQRAYEFIRGMPVVPNACVWGALLSSCRIHGNIGLAEIAAKKLVELDPQHSGYWMLLKDMYSKAKRWNDVSQLRAAMRDNGVKKCPGYSWIEGRDSEVHRFLTADKLHSQSHQIYEVLGGLTEQLMDEGYEIDVDLTYTE

SEQ ID NO: 8845 - protein, 677 aa, Zea mays
  VARIANT 420: note = Ancestral polymorphism is G, Derived polymorphism is W
  VARIANT 359: note = Ancestral polymorphism is R, Derived polymorphism is W
  VARIANT 39..677: note = Derived polymorphism lacks residues 39 to 677
MVATVAAAGAAAAAASGRRRGARREPATMHAGIRRSRSEPHLRCPRRGGAAGAALTTSRSIGVFPFQFGAAPLRPPPLPDGGGDGSRLLTVADDADPPEPCPEMPPARRPEAHWLDRLLEVRSRFHDPTWRDVLDHDDDDDDEDLYRLDADHHHDGGCGVSYEDDGEEEDARWDRDSFAKLLARAPLGEARLFAQLAFLCNMAYVIPEIKVEELKRHYGLRFVTSSLEKKAEAGIISAKLDADSTRPRTAPAYEVASGPQPRRPIRSSHLAYEVAASAASYVHARARGLLSFGAPTRQQQQAAGQGRLYNSGVAAYMAASTVTAVVAAEDEARQEAARDLRSPLSSPCEWFVCDEADARTRCLVIQGSDSLASWQANLLFEPTEFEGTGVLVHRGIYEAAKGIYEQVMPEIEAHLRAHAGRAPPRLRLTGHSLGGSLAVLVSLMLLARGVVTPDALHPVVTFGAPSVFCGGNRVLEALGVGEAHVRSVAMHRDIVPRAFSCRYPGHAIALLKRLNGVLRTHPCLNTHKALYTPMGSTYILQPDSSVSPRHPFLPEGAALFRLDSDDAGLRGGAERPPRALVASALRAFLNSPHPLETLSDLSAYGAGGAILRDHESSNYFRALSALARAPPRRRKQPEVVWQLPGVERLQQYWWPGIASTVIPAPLAVSKKELVSEA

SEQ ID NO: 8846 - protein, 118 aa, Zea mays
  VARIANT 11: note = Ancestral polymorphism is R, Derived polymorphism is K
  VARIANT 27: note = Ancestral polymorphism is N, Derived polymorphism is I
MRGPKRASKIRKLFNLAKDDDVRKYANTYRRTFTTKNGKKVSKAPKIQRLVTPLTFQRKRARIADKKKRIAKKKSEAAEYQKLLAQRLKEQRDRRSESLAKRRSKLSAAAKASAATSA

SEQ ID NO: 8847 - protein, 342 aa, Zea mays
  VARIANT 75: note = Ancestral polymorphism is G, Derived polymorphism is R
  VARIANT 204: note = Ancestral polymorphism is G, Derived polymorphism is R
MEQAAMPQVPRVKLGIQGLEVSKLGFGCMGLTGTYNAPLGDEAVAAVVAHAFRRGITFFDTSDAYGPRTNETLLGKALKQLPREQVQVATKFGIGQGAAGMTVCGTPEYVRACCEASLRRLDAGYIDLYYQHRVDTTVPIEDTIGELKKLVEEGKVKYIGLSEASPDTIRRAHAVHPITAVQMEWSLWSRDIEPEIVPLCRELGIGIVAYSPIGRGFFGGRGVIQQVSSESSLQRHPRFTTESLEKNKQIYLKIEDLAKKYQCSPAQLALAWVLRQGDDVVPIPGTTKTKNLDANVDSLKVKLTAEDLKEIGSQIRAEDVAGGRQYNSYAHTSWKYADTPKK

SEQ ID NO: 8848 - protein, 558 aa, Zea mays
  VARIANT 66: note = Ancestral polymorphism is V, Derived polymorphism is A
MAIECLVLGAGQEVGKSCVVVTIGGKRVMFDCGMHMGYHDDRHYPDFARALAAWGAPDFTTAISCVVITHFHMDHIGALPYFTEVCGYHGPIYMTYPTKALAPFMLEDYRKVTMGQRGEEKQYSYEDILRCMKKVTPMDLKQTVQVDKDLVIRAYYAGHVIGAAMIYAKVGDAAMVYTGDYNMTPDRHLGAAQIDRLKLDVLITESTYAKSIRDSKPAREREFLKAVHKCVSGGGKVLIPTFALGRAQELCMLLDDYWERMGLKVPIYFSAGLTIQANVYYKMLIGWTSQKIKDSHTVHNPFDFKHVCHFERSFINNPGPCVLFATPGMITGGFSLEAFKKWAPSEKNLVTLPGYCVSGTIGHKLMCGKPTRVDYEDTHIDVRCQIHQLAFSPHTDSKGIMDLTEFLSPKNVILVHGEKPQMAFLKERIESELGMPCYYPGNNESVSIPTTQNLKMSATERFITGCAVEQGKRSLHKRNLIYGTGLSEEIGSDEAAGEGVLLMQKHKSPKILCEDELLEVLGMGRHLVQFEPMVSRIVAAVESELQRAKAADLDNDGK

SEQ ID NO: 8849 - protein, 341 aa, Zea mays
  VARIANT 191..341: note = Derived polymorphism lacks residues 191 to 341
MAGALLSSPHYLWSPTSQPSLRPRHALALPLTRFPTRRPFVLLCTEYPPSLTAAPDCWMVGSWVLRRSRGPLGTGAVRVLPPRRRARVLASCSREPAAMNRGLEVERRRLLMSGLVSSFTIVLPISGAYAVMETNEDVKMNTQVDEINAYSFLYPVELPGKKFSFKWDKLVTYKLLSCYSVPRVESRKPERYSSAAPLSLSIGPPNSRFLPSKDKSLWDPKDVADCILSDRSTLKVTTGQRMTESSVLDAHATEVDGEPYWYYEYLVRKSPTKSASEPNLFRHNVTCTAERDGYLYSLNASTLSKQWESMGPFLQQTVASFRLLPPTENYVPPYKDPWRFW

SEQ ID NO: 8850 - protein, 188 aa, Zea mays
  VARIANT 37: note = Ancestral polymorphism is E, Derived polymorphism is V
MGEPSKELLDLPSDPRPPASFIESLLAGREQQQQDKEGKRKLGASTDPLPKSQVIGKVKDFLGEIARANQKLQLDAQNKPPVEYDIEALTGNEEQYIEMDLLLGVADLHSEQAVEAAEATINGRQTSEMSFACSSSDSEDDSDDSDEDADDKPVMSDKDNKCKSPDDAEMGPAKGKKPNKRQKIVVLN

SEQ ID NO: 8851 - protein, 664 aa, Zea mays
  VARIANT 395..664: note = Derived polymorphism lacks residues 395 to 664
  VARIANT 208..664: note = Derived polymorphism lacks residues 208 to 664
  VARIANT 104..664: note = Derived polymorphism lacks residues 104 to 664
  VARIANT 5: note = Ancestral polymorphism is C, Derived polymorphism is R
MRFLRSKPVPVVDQSKLSNISDPITFFMTLDRLEEAEEEIKRLNGEAEKRTLNFDPVDEPIRQPGLRGRKSVRSFKVIEDVGTQDPNEAPASQTATMTGSQLSQDVMHAVAGKNGRSVSSRSSEAISEKEVSLAEKDGRDDLTYILTSIQDLDESEEEEFIRKTLGIKETRKERVSLRNSILGVRSLRSNTEQKGSMKVHPPESHLPQTRQDRISELEKHLFPGGAANAKCTDDESEGSPDIVMGEPSLVHYSSDVLMTDENFTASDVDRETPNLGARAADPVLDPEPNLPDHAYERQPGGSSLGLYRDTEVGVAKENETCNRSNISVEEDDVPIDYITIGRSTNETEVSSSHPLEGSSTEELVTKPGRHAAPDGICRTSHAAEDSIQHLVLASWHRKRSKRVVSYKEQKIFVWYSGNECQICSMFVEVCSIYFFSTDKSSQLLEMPQEDINPLNQAQMHGGSTKKSAPDLSPTKQKKQQAVQERKRKQQSKRGKKVAGITSSNSTLYLYFVTPSDSIVMKCIFFTGESLEIPQTNFESENQPHNDDVNIEKQTITSSTLSPNGAKGQKGAQRRNQTKKRNQRKILGDADLACQPGVRKSSRTRSRPLEYWLGERLLYGPIHDNLHGAIGIKAYSPGQDGKRSLKVKSFVPEQYSDLVAKSARY

SEQ ID NO: 8852 - protein, 112 aa, Zea mays
  VARIANT 38: note = Ancestral polymorphism is E, Derived polymorphism is D
MDAADPLCAISSTARLLPRTLGPAIGPSPSNPRDALLEAIALARSLKGSEELVKQATMVPKEHGDIQALYHDDGVKGWPPANGSKEQQGRRPALDRKRARFAMKDTGRQAIC

SEQ ID NO: 8853 - protein, 910 aa, Zea mays
  VARIANT 99..910: note = Derived polymorphism lacks residues 99 to 910
  VARIANT 123..910: note = Derived polymorphism lacks residues 123 to 910
  VARIANT 652..910: note = Derived polymorphism lacks residues 652 to 910
  VARIANT 696..910: note = Derived polymorphism lacks residues 696 to 910
MGSSLPPKEANLFKVIVKSYETKQYKKGLKAADSILKKFPEHGETLSMKGLTLNCMDRKSEAYELVRRGLKNDLKSHVCWHVYGLLYRSDREYREAIKCYRNALRIDPDNIEILRDLSLLQTQAQMRDLSGFVETRQQLLSLKPNHRMNWIGFAVAHHLNSNSSKAVEVLEAYEGTLEDDYPPENERYEHNEMLLYKISLFEECGMLDRALEEMQKKESKIVDKLSFKEQMASVLFKLGRFDESESIYRSLLFMNPDNYKYFIAVQKCLGLYSDNGQYSAADVERLSALYNSLKEKYAWSSAVKRIPLDFLEGEKFQEAADNYVRPLLTKGVPSLFSDLSPLYEHPGKANILEQLFLKLEDSIRDSGCFPGCPQKEPPSTLLWTLFLISQHYDRRGQYDIALNKIDEAISHTPTVIDLYSVKGKILQHAGNFTAAAALADEARSMDLADRYLNSECVMQMLQADQVGLAEKTAVLFTKDGDQHNNLHDMQCMWYELASGESYYRQGDLGRALKNFLAVEKHYADMTEDQFDFHSYCLRKMTLRAYVSMLKFQDRLHAHEYFHKAAAGAIRCYMKLHDSPTKSSKEENDEISKLPPAQRKKLRQKQKKAEARAKREAEEKQEDETASSNSSKSGKKQHARPVDLDPHGEKLIQIEDPLAEATKYLKLLQNNSSDSLETHILSFELSMRKQKVLLAFQAVKQLIKLDEDNPDSHRCLIKFFHKINSLPGPVTDSEKLIWNVLEAERPDMRQLHGKSLVEVNRSFLEKHNASLMHRAAGAEMMYLLEPNKKMEAINLIEDSTNITSSGHSLLGPVKTWQIQDCIDVHKLLETVFGDQNVANRWKARCAEYFPYSTYFEGIKSAISTYAIDHSLESPPENGIASNPHLKSKDGEQGSLNGTLHIVDDLSSLSIR

SEQ ID NO: 8854 - protein, 293 aa, Zea mays
  VARIANT 72: note = Ancestral polymorphism is G, Derived polymorphism is E
MTMAGSCAAPPVACLPSLRTLPPTHVRLSGFLPCSAAARCRGAAVLGCALGAKRQTPGVLNRLLCGYMRRDGHEGDVSCQGRDGTVMFGPDDDGVKIPTQVETLVKGTAMVAEPEYKASPDLDYLQELLAIQQQGPRAIGFFGTRNMGFMHQQLIEILSYAMVITKNHIFTSGASGTNAAVIRGALRAEKPELLTVILPQSLKKQPPESQELLSKVQNLIEKPQHDHLPLIEASRIPPLYLVATVAIFRLCNMDIISKVQQVICFAFHDSKLLMETCQEAKNLRKIVTLFYLD

SEQ ID NO: 8855 - protein, 182 aa, Zea mays
  VARIANT 142..182: note = Derived polymorphism lacks residues 142 to 182
MVYYALLVGAELDGLTNLQPSGGCDDPSFPYYLKLKCENCGEVTAKSTYVTLSEQVDLPKGHGTAHLVQKCKLCGRDGTIVMIPGQGTPLTIEQSQKEEKTCLMVFDCRGYEPVEFSFGAGWKAESVLSFFKVHGTPFEIDCSEDEFSEYDEKGECPVELSKLQSTFKVVKKHEKGGKTRFV

SEQ ID NO: 8856 - protein, 81 aa, Zea mays
  VARIANT 60: note = Ancestral polymorphism is S, Derived polymorphism is G
MVANGDAPARGSAAAAASLRRRRTTSGAAAGGGGASSMLQFYTDEAAGRKMSPNTVLIMSIGFIAVVAMLHVFGKLYRTSN

SEQ ID NO: 8857 - protein, 154 aa, Zea mays
  VARIANT 124..154: note = Derived polymorphism lacks residues 124 to 154
MRARNVCVASVDLFSQNSAVATAAREDGIQCVTLLTYLAAAQIYRTNRSRHYRVMVLDNAHHSTPAGVSCSAADGVRDLDLAKASVDTDISWRTTEGELWATATYGSAVEVNNDISNLDGIIDCYNQFCRSNTKSYDEDNGSEGPHPFPLEKPC

SEQ ID NO: 8858 - protein, 927 aa, Zea mays
  VARIANT 22: note = Ancestral polymorphism is L, Derived polymorphism is S
MLSFSRSAILSYLLWCLLFLTLASSNGAVATAKPKAGCGYKLVSLVQLPNGGGLVGYLQVKQRTSTYGPDIPRLRLFVKHETRERVRVQITDADKQRWEVPYNLLPREPAPPVTGGKVTGAPFTGAEYPGEELVFTYGRDPFWFAVHRRSTRQPLFNTSAGALVFKDQYLEVSTALPKNAALYGLGENTQPGGIRLRPNDPYTIYTTDISAINLNTDLYGSHPVYMDLRSLGGRGVAHAVLLLNSNGMDVFYRGTSLTYKVIGGLLDFYFFSGPTPLAIVDQYTSMIGRPAPMPYWAFGFHQCRWGYKNLSVVEGVVEGYRNAQIPLDVIWNDDDHMDAAKDFTLDPVNYPRPKLLAFLDKIHAQGMKYIVLIDPGIAVNSSYGVYQRGMERDIFIKLDGQPYLAQVWPGPVYFPDFLNPNGVSWWIDEVRRFHDLVPVDGLWIDMNEASNFCTGKCTIPKTHQCPIPDTKTPWLCCLDCKNLTNTRWDEPPYKINASGQTARLGFNTIATSATHYNGILEYNAHSLYGFSQAIATHTALQGLQGKRPFILTRSTFVGSGAYAAHWTGDNKGTWENLRYSISTMLNFGIFGMPMVGSDICGFYPSPTEELCNRWIELGAFYPFSRDHANFASPRQELYVWDSVAKSARNALGMRYKLLPYLYTLNYQAHLTGAPVARPVFFSFPDFTPCYGLSTQFLLGPGVMVSPVLEQGATSVSAMFPPGTWYNLFDMSKVVVSRSGAPVKLDAPLNEINVHVYQNTILPMQRGGFVSKDARATPFTLVVAFPFGATQADAEGAVYVDDDERPEMVLAEGQASYVRFHASVRGKAVTVRSEVLMGSYSLHKGLVVEKLSVLGLEGTGKDLAIQVDGTDATAVATSSPYFAAGGNAKLQGEEGVEDSKNGVMVEIGGLALPLGKSFTMTWNMRIEA

SEQ ID NO: 8859 - protein, 370 aa, Zea mays
  VARIANT 187..370: note = Derived polymorphism lacks residues 187 to 370
  VARIANT 198..370: note = Derived polymorphism lacks residues 198 to 370
  VARIANT 204: note = Ancestral polymorphism is C, Derived polymorphism is Y
MFETDDGAGGQPDPEMASSLLDMLNENNSLVKAFRYAIERLEREGDQKITLRLLGCNTRHDVQYSLPSNAYMPLQYPLLFPYSEHGFHLGIRLSDQIDVDAYSTIEGNRLQFIANHKSDLRSETVQAISDTIDKGFLNADSIGGRVVVPVSFAGGRSNSSVNVVLWGGQASLFPGEQIYTDGQSSPQILMFVGTLVKKYAGSPCKWYINPDVPEASALMASVRKAHSPIKWNEVLSLNQPMPHVPEEQKITYIRDLHPFENKTIALGGNTVVLGATPARTKELTSTPRMRTRSSPAKTTAKRLFTDVDGGITISKGTADNVAATRLPLDHGSPSMLCTNHVRVLHFLTWMCFSPFMFKPKQLDMLVPKTF

SEQ ID NO: 8860 - protein, 406 aa, Zea mays
  VARIANT 261: note = Ancestral polymorphism is P, Derived polymorphism is S
  VARIANT 69: note = Ancestral polymorphism is P, Derived polymorphism is S
  VARIANT 37: note = Ancestral polymorphism is F, Derived polymorphism is S
  VARIANT 17: note = Ancestral polymorphism is S, Derived polymorphism is R
MASASHQSEPLDSAATSDTDAPSGAALASASPSRPLFILLVARLSQCCSARGVNSGGSGRCDPAARCAPMDQFYLLCFDHLSSLADNIPELPCPPCHIVTKPGQLPVEFLEPSAAQKLVIGFDCEGVDLCRNGALCIMQLAFPDAVYLVDAIEGGKELIQACKPALESDHITKVIHDCKRDSEALYFQFGIKLHNVMDTQIAYSLIQEQEQKGKKKTSDDYNYISFVSLLADKRYCGIPYPEKEEVRILLRQDPNFWTIRPLSDMMVRAATDDVRFLLNIYEKMMEKLNKVSLWRLAVRSELYCRCFCLNDNQFADWSPLPPVPDGIEADVYVPEVDILSVLDVPHGKMGRVIGRKGSTIMVVKESCNVEIHIGGAKGPPDRVFIIGSVNEVRKAEAIFRGRMLEF

SEQ ID NO: 8861 - protein, 120 aa, Zea mays
  VARIANT 104: note = Ancestral polymorphism is S, Derived polymorphism is N
  VARIANT 58: note = Ancestral polymorphism is G, Derived polymorphism is R
MDRSKSYAGGRMQIEPYYGGGGGGGGGARADFRSYSYSAGGTGPSSYSYNQYEYGGPGAGEEEVKRSKSKRRWLADPDMDRKRRVAAYKAYGVEGRVKGSLRKSFRWVKDRYLDLVYGWS

SEQ ID NO: 8862 - protein, 159 aa, Zea mays
  VARIANT 95: note = Ancestral polymorphism is R, Derived polymorphism is H
MDATGTGAGGKAKKGAAGRKAGGPRKKSVTRSVKAGLQFPVGRIGRYLKKGRYAQRVGSGAPVYLAAVLEYLAAEVLELAGNAAKDNKKTRIVPRHVLLAIRNDEELGKLLTGVTIAHGGVLPNINPVLLPKKTAEKASSGGSKEAKSPKKAAKSPKKA

SEQ ID NO: 8863 - protein, 148 aa, Zea mays
  VARIANT 70: note = Ancestral polymorphism is K, Derived polymorphism is E
  VARIANT 63: note = Ancestral polymorphism is I, Derived polymorphism is V
  VARIANT 47: note = Ancestral polymorphism is E, Derived polymorphism is K
  VARIANT 14: note = Ancestral polymorphism is P, Derived polymorphism is S
  VARIANT 7: note = Ancestral polymorphism is K, Derived polymorphism is E
MAPKAEKKPAEKKPAAEEKAEKTTAGKKPKAEKRLPASKSSGKEGGEKKGKKKAKKSVETYKIYIFKVLKQVHPDIGISSKAMSIMNSFINDIFEKLAGEAAKLARYNKKPTITSREIQTSVRLVLPGELAKHAVSEGTKAVTKFTSN

SEQ ID NO: 8864 - protein, 1168 aa, Zea mays
  VARIANT 100..1168: note = Derived polymorphism lacks residues 100 to 1168
MATSLYTPSQLRPSHSQARRLGSHPRVCSARCPARRRRAAAISVRASTDGDAAVTVRRFPAAPTKAGGLSGVKKIMILGAGPIVIGQACEFDYSGTQACKALVEEGYEVVLVNSNPATIMTDPGLAHRTYIGPMTPTLVERIIDAERPDALLPTMGGQTALNLAVSLADSGALDRLGVRLIGASLPAIRAAEDRQLFKQAMDRIGLQTPPSGIGTTLEECLTIAEDIGEFPLIVRPAFTLGGTGGGIAYNRAEFEDICRAGLTASHTQQVLVEKSLLGWKEYELEVMRDMADNVVIICSIENIDPMGVHTGDSITVAPAQTLTDKEYQRLRDYSVAIIREIGVECGGSNVQFAVNPADGEVMVIEMNPRVSRSSALASKATGFPIAKMAAKLSVGYTLDQIPNDITKKTPASFEPSIDYVVTKIPRFAFEKFPGSEPILTTQMKSVGEAMALGRTFQESFQKAVRSLETGFAGWGCGPIKELDWDWEQIKYSLRVPNPDRIHAIYAAFKKGMRVEDIHEISFIDKWFLTELRELVDVEQFLLSRSLDQLSKDDFYQVKRRGFSDKQIAFATSSSESDVRSRRLALGVTPSYKRVDTCAAEFEANTPYMYSSYEYECESAPTNKKKVLILGGGPNRIGQGIEFDYCCCHASFALREAGYETIMMNSNPETVSTDYDTSDRLYFEPLTVEDVLNVLDLERPDGIIVQFGGQTPLKLALPIQQYIEENKMVSASGTGNVKIWGTSPDSIDAAEDRKRFNAILEELGIEQPKGGIARSESDALAIASEIGYPVVVRPSYVLGGRAMEIVYNDEKLIKYLATAVQVDPERPVLVDKYLIDAVEIDVDALADTAGNVVIGGIMEHIEQAGIHSGDSACSLPTRTVSAKCLEVIRSWTTKLAKCLNVCGLMNCQYAISTSGDVFLLEANPRASRTVPFVSKAIGHPLAKYASLVMSGVTLPELGFTEEVIPKHVSVKEAVLPFEKFQGCDILLGPEMRSTGEVMGIDYEFSGAFAKAQIAAGQKLPLSGTVFLSLNDLTKRHLAEIGRGFRELGFSIVATSGTAKVLQLEGVPVEPVLKIHEGRPNARDMLKNGQIQIMVITSSGDALDSKDGLQLRRLALAYKVPITTTVDGARASIDAIKSLKNKSIEILALQDYFQTADASEDLQAVARTAP

SEQ ID NO: 8865 - protein, 519 aa, Zea mays
  VARIANT 4..519: note = Derived polymorphism lacks residues 4 to 519
  VARIANT 220: note = Ancestral polymorphism is S, Derived polymorphism is C
MVSQHGILLAVNIISDHFGPIVSVSPLPSPPSPLPAVPRTLSLTLASPILSSTESVWLPSAPRRAVVAGYRPPPRTLARAGAGDRTVTLYLAIFDNVLHRLRFSKFLSVVRVDIPESEVLLEGLLQNGRLTFEQLVERTIFKVSEDSPLPTREEVRMNFNKLVYAHYVERCPKPEPFFDPLAVEQPTSTRKRAPKTVEAVLSLEQKVVCTAALSDAERFSEIPYFMDGSSSAKDGHHAVAGNKMCYFVHLLIILSFSQRKHETLEVDEDDSIIAESEVLWRINFERFIFCLKKKFCAERKKAKMRLGTLAIWEAFFEANVTNNDNKTVTSPIDGILERVGQKEGGMSMTLDHITSVLNDLECTSTANNPEEFTFEIIESLVKKKHGQEAYTIFRLLLKQGSPVETDEITDRTILDKQVVHETLYKLWKDEYIDSERVPSTSATGTGSAQFFVWRVKNIYREHFMDNLYHAALNLRQMVNYMAELLLEGSKDEIKLRNRKNILILALTRHDESLMLFHDF

SEQ ID NO: 8866 - protein, 279 aa, Zea mays
  VARIANT 47..279: note = Ancestral polymorphism lacks residues 47 to 279
MFFQRKKSKKAKDSRGSQKKGKDGRGKNDLFDRAKGGLDALAGSLQEAKKDAETATEKLQGDVKSGMETIRHKGSGLLEKAKEELGSHSDASRSSKELERGSEEQGNNKDMDAFSAVMDKVKGHPEAMEKVSAVMDKVKSHPEVVDKVKDEVMSLAGALRLRRHGSEDKEAESEEKAEGAQSADEGASDGMAGEPSVLEQAVQEIQAVAAALQQTAEPEAEIPAETAAAAAAETSAGGDKPEETNGEVEQDDPKKRLDFAGFFAMLLERFCSPASKKKD

SEQ ID NO: 8867 - protein, 137 aa, Zea mays
  VARIANT 12: note = Ancestral polymorphism is G, Derived polymorphism is R
MATAAKTLARAGSSLFGRILASPSIIRPGLPLAGLRPHFPPPAPAGLDAYEAETVARLSSLPGEISFPCGLPSLRFFIDDVEDPVANDPLQLLPKRTYQPSTIKRKRTHGFLTRKSTKGGRKVIARRIAKGRHRISV

SEQ ID NO: 8868 - protein, 402 aa, Zea mays
  VARIANT 229..402: note = Derived polymorphism lacks residues 229 to 402
  VARIANT 139: note = Ancestral polymorphism is S, Derived polymorphism is Y
MVETRRSSAAAAGKRTSPSPSSSSVPPPKRPKAESSGSPTASASGRAEEDSMAGAAPARSAGSVDDAAAVTQKDQGVDKQSSAAAESSKRRKEQEQQQPAVPWAKLLSECSQKMVVFVMRQAVWNAVTNNEVVQGFRRSLHDETRLSYMLSCGSLERLLNMRNLKLWMVRMTMMKTMMMIMIQRRTRELLEGKGNRENDLQSASSSEILCSYAWGEDGCHSAAAVCSLQSLGAASPAKSELAEIVPQEKSPKGQAESLGTELLEMVPSREEEIKLKEYREDVVSTFVVDDYVRLEFKGSTFTGSWKSFSSPKISSTFLLVIAIVSNGIVIYVWMMKTVLLDVKSTNTIVQIKSKIGALEGIVDSPIFLVNDAYQQMFERKIGRLSTLFLAMEEGFLALVSSL

SEQ ID NO: 8869 - protein, 511 aa, Zea mays
  VARIANT 12: note = Ancestral polymorphism is C, Derived polymorphism is Y
MSKKHAIQCKYCDKVIHGGITRVKYHLANIGGFNVTKCKKVPAHVKQEMEALLTKKTGEKEQRKKEKQRERDEIDLDKSDGSDEEEKEHENDIIVLKSTRESNNCSNSRPPTSGGSGTIDNFYKPQSVEESVHKNKIQTKLSTQKREERRDRACEYICQFFYEAGIAHNTVTLPSFGHMLEAIGAFGRGLRGPSAYEMSGPFLKRAKQKDNKKDIARLFRSDELNELGYLKKAKGKKANKVVALEGFWKNVDMAINFFEPLANVLRRMDSDVPAMGFFHGCMLEAKKEIATRFDNNESKYRAAWDIIDKRWDNKLKTPLHLAGYYLNPYFYYPNKSSIELDGSFRAAVISCITKMFDDEDTQDSIIEELNIYQDQQGAFGHDIAVRQRRNKTFNPAKWWMNHGTTTPHLRILATRILNLTCSSSGCERAWSVFEQIHTKKRNKLLHDRMRDLVFVKFNSKLREKRDNKSKDPIEKELNDILEDDGNEFITGVVLDENVDQDEDQEGAHDEP

SEQ ID NO: 8870 - protein, 299 aa, Zea mays
  VARIANT 120: note = Ancestral polymorphism is H, Derived polymorphism is D
  VARIANT 116: note = Ancestral polymorphism is D, Derived polymorphism is V
  VARIANT 104: note = Ancestral polymorphism is L, Derived polymorphism is Q
  VARIANT 103: note = Ancestral polymorphism is E, Derived polymorphism is V
  VARIANT 76: note = Ancestral polymorphism is C, Derived polymorphism is Y
MMDNVFPLTTEPNILKEMITPPNIVNKMLNVVTGKSSTLGSKLPDAAASFVPWRRTTVNDANNEVYVNIVAELDACVNREGVLVKCEAYGEVQVNCSLPGVPELTMSFANTAIINDVTFHPCVRFRPWESNQILSFVPPDGQFKLMSYRVQKLKKTPIYVKPQLTSDSGNCRVSVMVGIRNDPGKPIDSITVQFQLPPLIVSADLTTNYGTVDILADKTCLWTIGQIPKDKAPALSGNLRLEEGLAQLHALPTFQVKFGIMGVAISGLQNDKLDVKNTPNAPYKGFRAQTQAGKYEVRS

SEQ ID NO: 8871 - protein, 426 aa, Zea mays
  VARIANT 101: note = Ancestral polymorphism is L, Derived polymorphism is R
MDEVWCGLDLQLQADGIHAGPDLHGHDHDPFWSALAECAASFLASDADDTGGLVASAGDVVHAKADGMDTSSFFADNDHHGLTQRRDEQQQQQPVHSSSSLSSKRSLSIDSGGSSSSTLIPPLDGAAAAAFSPAPPQPQDPFAGDDEAIMLAMMAVISSASPSSSESSSPPHRAAGAGAVQPRVHLHGGDDSAGHVTVRTSSLAVAPTSAAARQQDDACMAAGSNNSSQVYHMISERKRREKLNDSFHTLRSLLPPCSKKDKTTVLTNAASYLKALEAQVSELEEKNAKLERHVPRDDGGGGTAATAAAVAHRRARVHVARAAPGEPQVSVTVMVMVECDIVDLVLRVLECLRWMGGVVSVLSVDADTYSPQAMLKALANIKLHIVDGDCWNEALFHEAMTKAVHDATSPSSSPSCAAVAPLVAAA

SEQ ID NO: 8872 - protein, 493 aa, Zea mays
  VARIANT 20..493: note = Derived polymorphism lacks residues 20 to 493
  VARIANT 121..493: note = Derived polymorphism lacks residues 121 to 493
  VARIANT 142..493: note = Derived polymorphism lacks residues 142 to 493
  VARIANT 168..493: note = Derived polymorphism lacks residues 168 to 493
MRLGRLNMKRGGDIASLFRKHEAKKLATSPAYPSSTPAVNQGQPSNEQEEGVIEENQNHMPSSPPPAASQSSAPPVYDINRLPHDPGERQPISSYHVNDHGNSKSICSESIKNDTVFCFVCYLFKNKKSKGKGTNAFTVGGWRNWNIGSKSLLKHAGSMAHKTAQEKYIGYMNPIASIDNQIEKWSDEDIHLYKIRLTYSIRCLKYLLHQGLAFHGHDESKESSNMGNFIELLKFLATNSEEVNKVVLNNALGNCTLTSPMIQAQIIHCCAMETRKKIIEELGEEPFATLADESSDVSHKEQLALCLRLENIIKALECGQIESGSGLNQEMGLPRPGETRWGSHYKIVCNIIAMYPIIRDVLITLGEDTTIRSDWSKIHFMVGAFESFDFVFDAHIMFIIFEYTNELSECLPRREQDILNAISLITVAKRRMQQLRCDGWEQFLQKVALFCNKHGVNVPAMEDNYIPYGRSTRFVQNQRNDYHFRREVYIGGH

SEQ ID NO: 8873 - protein, 696 aa, Zea mays
  VARIANT 440..696: note = Derived polymorphism lacks residues 440 to 696
MASARLVALAAFLLLLLFALGPGEARAADDGEVRALLALGAALDPTGRLLPSWAPGRDPCAPAPSGGFEGVACDARGAVANVSLQGKGLAGTLPPAVAGLRSLTGLYLHYNALRGGIPRELAALAALTDLYLDVNNFSGPIPSEIGAMASLQVVQLCYNQLTGSIPTQLGNLTRLTVLALQSNRFNGAIPASLGDLPLLARLDLSFNRLFGSIPVRLAQLPCSLVVLDVRNNSLTGSVPAELAAKLQAGFQYGNNSDLCGAGLPALRPCTPADLIDPDRPQPFSAGIAPQVTPSDGRGNGRVPSTRALAAVVVVAVALLLTTGVGLFALSWRRWHRQKVAGASPSTISGGRCSTEVVPSAAKASSARKSASSALASLEYSNAWDPLADARGGLGFVSQDVQLAQSLRISTEEVESATRYFSELNLLGGHGKKAGGLAATYRGTLRDGTSVAVKRLGKTCCRQEEADFLSGLRLLAELRHDNVVALRGFCCSRARGECFLVYDFVPNGSLSQFLDADTTAGGSGRVLQWSTRISIIRGIAKGIEYLHSTRTNKPALVHQNISADKVLLDYAYRPLVSGCGLHKLLVDDLVFSTLKASAAMGYLAPEYTTVGRLSEKSDVYAFGVIVLQVLTGRRKVTATAQLLAGNVDDDELVDGNLQGSYSAAEAAMLAKIGSACTSEDPDQRPTMAELLQELDTI

SEQ ID NO: 8874 - protein, 294 aa, Zea mays
  VARIANT 224: note = Ancestral polymorphism is F, Derived polymorphism is C
  VARIANT 56: note = Ancestral polymorphism is T, Derived polymorphism is I
MGDQSGSRNGPQQKYVSGAQNAWDMFSDELSQKHITTGSGDLNDILGGGIHCKEVTEIGGVPGVGKTQLGIQLAINVQIPVECGGLGGKAVYIDTEGSFMVERVYQIAEGCIRDILEHFPHSHEKSSSVQKQLQPERFLADIYYFRICSYTEQIAVINYMEKFLREHKDVRIVIIDSVTFHFRQDFEDLALRTRVLSGLSLKLMKIAKTYNLAVVLLNQVTTKFTEGSFQLTLALGDSWSHSCTNRLILHWNGNERYAHLDKSPSLPVASAPYAVTGKGIRDAVSSNHKRARVT

SEQ ID NO: 8875 - protein, 1921 aa, Zea mays
  VARIANT 453..1921: note = Derived polymorphism lacks residues 453 to 1921
MGKPCFSGLVAIELCSMGGIAECGVSIDTKASPRRAAIEKAQDELRQEYDVREERRRELEFLEKGGNPLDFKLGHVASLSVQSTSVTEQIAEQNVISEAKGSSAFATSPHGDSVESNDKPGNSLCREGNTADNITLLDGDASSMGVDKIVKRGTKRTNSAQAEQFLHCDGQNNAKEEDSGLYRLGPKSQAYARRRSKPIRENAYSVSVRYPPIPPLSSQQKDVTGLIPETKTEDNGVSSIGDSKPTSPNSKNLVTNASLLNDKVEMETENVQAIPEGNQAPKNELSNSNNGSPAIEISPNSVPDNSRLTVSDQMVTAFVSVESPDAISKVAASRIVCSLPYISNEILKEAQTLEKAGNNPSMVSVVDVHAYGMDNNGAAPYSAVKSASLNENEVDPIHEYAAKAVTEHPDQNENLVPVNADEMADEGLNKILPDDKDDKKDCQLEVSSGPVILNDSSTPVYPEFSNSFYARDGTEVSNNAVDSKNNAEQLASSNQGKGNMEECKDSDGNNASELSVAQKLVSVIVPPASDAGDVSNFVENDVDKSSRDQEKVAKKEYEDSVVAKKDHEDAILRRARYIEANIKRAGEWSLCNISLEKKQKSHWDFVLEEMVWMANDFTQERLWKNTVAAQMSHWISSRGRAVFEEASIQRKQKSVARVLANGIMNFWCSVHTLRASGGIPKPIKIEQPNELEENKLGGFKSGKADEECLEQEKSRQSPIQSFALRFLEYNINASEFLPLAEAPSTPDRLNDFGILKVPDQLSEANLFYGVAPGAMQAYRESMDRLLIYNNKKIGDTVLKDDYEPSTYASVTDVPMENAYGDDESEAHTYLLPGAYNGGLASKNSHKKKHHLPQRMNGARSYEIGVDSPYEPLYLESKSGNQQLLSNGKQTDFLSIPIKRIRTAARQRVVSPFPAGASGTPQFTNKTDASSGDTNSCQDDQSSLHGGSFSRKNADIESTVDFDRQLLYDGSEVSTKSKKKKKTKHPGYKALPNVSESCSLRAPGKGNYDHRSQIDMIAQYEQKDYIKKRQETNGNFGVIDLSTVVNGLHAAKKPKLLNQAPDISLEALKPIGPMASLAASQMSNMANPTRVIKISTRGRKSKGLKMRAGHSGPGSPWSSFEDQALVVLVHDMGENWELVSDALNSIIQLKCIYRRPNECKERHKLLTDRSCGDGADSADDSGSSQHYPSALPGIPKGSARQLFQRLQGPFEEGTLKTHFEKIILLGQKLHQTRRKDEIHELRQKNPLHTSHGFALSQACPGNLSGVILTPLDLCDGPSNSDALTGSNTSGLGLSNNNCSVGPTLPTSNMNLRLPGSPGMVLGSNSPLPLNAPSRDVQRYGVPRPTSIQGDEQSRIHYNQMVNGRNLQQPGVPVPGVLPSGVDRGARMMPPAHGVGIMAGLNRGTPITRPGFPRLGSLGNMSPTDGQGLKNTVNVHPGAILGPGSTMLRPRDPMQMFRPGQNSEEHRQMMMPEFQLQVSQGNNHAVHFSGPPYSNTGASSPVQSLPAQQSQPHQMPQQSHMYGNTHLLHTQGTNQSNPQQQQAYAMRLAKERHMQQMMPQQQRPLSVASAVSAVQNGSPMQQQSQGSATCVIPATQTQHKQQYPAQNAQDNSMLPHQPSATTTHKQKKQQGQQQPRQNQQQRNQGSQQAKLMKSLGRGNMMQQSPVDVIQASGISTSCKDQVPDKNMMQQGPGHFVVSKGSIPLIPQPGNQPNVYTSQMPPSPMQTPDISNQGAVKGSSNHALLTSQQGSLHTPSQLAQQQQQQLRFMNPSQNNMQRLIMQQNRHVNTDGRIELPADQVQHNQVMSSASLARSTDSGSPGISSISQRKQESSHDPSAITSTSQLASSPQDTFVGSDRVLPSSSQSMPQRQMSGGVPVHGYGIGGQVQLQQSRQQLQSQQQQQQQQRPVVQGGVYAHPSNSGQG

SEQ ID NO: 8876 - protein, 693 aa, Zea mays
  VARIANT 174..693: note = Derived polymorphism lacks residues 174 to 693
MVGRGSLGTVYRAVLSEGCMVAVKRLRDANPCARDEFHRYMDLIGRLRHPHLVPLRAFHYARQEMLLIYDYLPNGNLHDRLHSHKMSGESALDWTTRVRLLLSATRGLACIHREYRTSGVPHDNVKSTNVLLDKDGATRVADFGLALLLSPTHAIARLGCYTAPEQQDDKRLSQEADVYSFGVLVLEALTGKAPAQHPQPDACKKGATTTSLSLPGARRSASSPMAAAPGQNSEEHRQMMMPEFQLQVSQGNNHAVHFSGPPYSNTGASSPVQSLPAQQSQPHQMPQQSHMYGNTHLLHTQGTNQSNPQQQQAYAMRLAKERHMQQMMPQQQRPLSVASAVSAVQNGSPMQQQSQGSATCVIPATQTQHKQQYPAQNAQGSSMLPHQPSATTTHKQKKQQGQQQPRQNQQQRNQGSQQAKLMKSLGRGNMMQQSPVDVIQASGISTSCKDQVPDKNMMQQGPGHFVVSKGSIPLIPQPGNQPNVYTSQMPPSPMQTPDISNQGAVKGSSNHALLTSQQGSLHTPSQLAQQQQQQLRFMNPSQNNMQRLIMQQNRHVNTDGRIELPADQVQHNQVMSSASLARSTDSGSPGISSISQRKQESSHDPSAITSTSQLASSPQDTFVGSDRVLPSSSQSMPQRQMSGGVPVHGYGIGGQVQLQQSRQQLQSQQQQQQQQRPVVQGGVYAHPSNSGQG

SEQ ID NO: 8877 - protein, 87 aa, Zea mays
  VARIANT 66: note = Ancestral polymorphism is L, Derived polymorphism is Q
  VARIANT 54: note = Ancestral polymorphism is P, Derived polymorphism is R
  VARIANT 45: note = Ancestral polymorphism is V, Derived polymorphism is A
  VARIANT 1: note = Ancestral polymorphism is M, Derived polymorphism is L
MYSLCLEPINHILSRQGLPQGCEFTLAEIEHFVDPEDKSHPIFYVANLEFLMFRRELQLPGESVKLMKLGEAVAKGAVNNDTLGYFT

SEQ ID NO: 8878 - protein, 272 aa, Zea mays
  VARIANT 111: note = Ancestral polymorphism is Y, Derived polymorphism is C
  VARIANT 172: note = Ancestral polymorphism is V, Derived polymorphism is A
MAEQLASQDAPNPPAPAQRVLMTNTHGEKLVGLLHHMGSDKVVVLCHGFTGSKDYSLITDLAAALTKQGISVFRFDFSGNGESEGEFQYGNYKKEAADLHSVVLYLRQEKYDVAAIVGHSKGGDVVVLYASIYKDVPMVVNLSGRFHLEKGIEERLGKEFMDRINKEGYIDAKDKSGNVLYRVTKESLMERLSHDLHATSLSISKECRFFTIHGSADEIIPVEDAYEFARLIPNHKLRVIEGANHCYTAHRRELSDAVVEAITTSEAGETTP

SEQ ID NO: 8879 - protein, 371 aa, Zea mays
  VARIANT 184..371: note = Derived polymorphism lacks residues 184 to 371
  VARIANT 51: note = Ancestral polymorphism is G, Derived polymorphism is R
  VARIANT 28..371: note = Derived polymorphism lacks residues 28 to 371
MRCLYRSPVPATPRANPPFLLPATKPKRRSGDQPQPEAVEPQNDASSSAAGSKKIKKSKARGKVHSGLGVKLVNLDAGNKDLLLSRVGEQQRHNRKGARDACIRMRLAFFIFLFYNSVSQERVVITNKHGERLVGLLHHTASNKIVVLCHGFIATKNDSLILDLAEALTKEGISVFRFDFSGNGESEGQFEYGNYRKEADDLHSVVLYLCQKSYDIAAVVGHSKGGDVVILYASVHDDVGTIVNLSGRFDLRKGIEERIGEGSIDKINKEGYLDVKDKSENASYRVTKESLMERLNTDMRAASVSISKGCRFLTVHGSADKTIPVEDAHEFAKHIPNHELRVIEGANHNYTSHRKEVADAVVDFITSNVTV

SEQ ID NO: 8880 - protein, 830 aa, Zea mays
  VARIANT 172: note = Ancestral polymorphism is W, Derived polymorphism is C
  VARIANT 385: note = Ancestral polymorphism is S, Derived polymorphism is Y
  VARIANT 582..830: note = Derived polymorphism lacks residues 582 to 830
MAPAAPAGLASVAVAVAVAVLAAAASAAVTYDRKAVVVNGQRRILMSGSIHYPRSVPEMWPDLIQKAKDGGLDVVQTYVFWNGHEPSRRQYYFEGRYDLVHFIKLVKQAGLYVHLRIGPYVCAEWNFGGFPVWLKYVPGISFRTDNEPFKAEMQNFTTKIVDMMKSEGLFEWQGGPIILSQIENEFGPLEWDQGEPAKAYASWAANMAVALNTSVPWVMCKEDDAPDPIINTCNGFYCDWFSPNKPHKPTMWTEAWTSWYTGFGIPVPHRPVEDLAYGVAKFIQKGGSFVNYYMYHGGTNFGRTAGGPFIATSYDYDAPIDEYGLLREPKWGHLKELHKAIKLCEPALVAGDPIVTSLGNAQQASVFRSSTDACVAFLENKDKVSYARVSFNGMHYDLPPWSISILPDCKTTVYNTASVGSQISQMKMEWAGGFTWQSYNEDINSLGDESFATVGLLEQINVTRDNTDYLWYTTYVDIAQDEQFLSNGKNPMLTVMSAGHALHIFVNGQLTGTVYGSVEDPKLTYSGNVKLWSGSNTISCLSIAVGLPNVGEHFETWNAGILGPVTLDGLNEGRRDLTWQKWTYKVGLKGEALSLHSLSGSSSVEWGEPVQKQPLSWYKAFFNAPDGDEPLALDMSSMGKGQIWINGQGIGRYWPGYKASGTCGICDYRGEYDEKKCQTNCGDSSQRWYHVPRSWLNPTGNLLVIFEEWGGDPTGISMVKRIAGSICADVSEWQPSMANWRTKGYEKAKVHLQCDHGRKMTHIKFASFGTPQGSCGSYSEGGCHAHKSYDIFWKSCIGQERCGVSVVPDAFGGDPCPGTMKRAVVEAICG

SEQ ID NO: 8881 - protein, 267 aa, Zea mays
  VARIANT 23: note = Ancestral polymorphism is K, Derived polymorphism is N
MIPLKLVFRVYTTQRALDAICRKFLLEMRVTIIFCTQGDTALIDWIKEIPCEAKFNFLKRDGDVETKTDELYPIKDMSQISSAERRVLLYLDHDMVFIPINIREMHWYLAVINVRNMEIQVLDSLGKSSGRNDLINTIKGLQRQIDMVSQRKELKDHRWPDLRVASWPLREMEMKYAKQTDSSSCGLFLLNYIEYWTGDELSDNFTQDDMLHFRKKLAAILLFSDINKRKGCPLYKYDKEVDAGSSSDVQILDSPTNPKKRKLLCVS

SEQ ID NO: 8882 - protein, 949 aa, Zea mays
  VARIANT 300..949: note = Derived polymorphism lacks residues 300 to 949
MEGQVRRSPASSAADDGGPSTSGSADAHARYADADDNAAGAGGPKVWVLVLLFALLLLPFLPSAMRRGGGGGGTVWAGGGRGTEGGYRYRRGGISFKSGWDVVNLCLVLFAILCGLLGRGGDGDSSSSATSAYASAKDDRHRLASSAAPAAEPVTVAATTTSSGDWEQEGYDSMSAIYASLSRTTNHAHASGIRRMKSSSSYPELRLGSDGVWALASPDSAWRFYDDAELYRARRPERQERTWDVDPHGRAAAAEVKTIPVDTFVERGRASQSQSQSQPRRTRRRSVERLPEMAEERPLQQQSGGARAPPRLRRWNSEVVDVMLEQEAAPARSRRWDSEVVGAMPEQDAAVAPARLRRWNSESLDSILEQEARVAAARSTRWGSEVMDAMPEQEAAVAPARLRRWNSESLDSILEQEARVAPARSTRWGSEVMDAMPEQEAAVAPARLRRWNSESLDSILEQEARVAAARSRRWDSEVMDAMPEQEAAVAPARLRRWNSESLDSILEQEARVAAARSRRWDSEVVDVMPEQEAAVAPVKSRRWNSDAVDVIPEQEAPVALARSGRWSSGAVDVVPEQEKPVMMAPAAPPPPPPPPRRRRRSVEKLPTSEELEQEIVVEEVRNPPMPPPSLAMFPPGTPPPPPPPLPPPSTVSRSKKKRSGSVGGAKELASAIATFYQKKRKSITMKAKRRPHAHHHHHSDGQYYSSPSSDASASPDSTARTTTAPPRPPPPPPPPPPPSSIFSNLFRNKKGGSKNRRIHSVAPPQPPPPPPPARRSKKPPPPPSRPAPPAPPPPPQPVRTRPQRAHVHASTQQPPLYPRRVYYTYYPLPPPSPPLPPPPPPPPPLVPEGEDDSPSVTASPAPAYCASPDVNTKADRFIESFREGLKLEKLNSYREKWQRQIQENAAVEIGEEEEGEFMVIGSLFGDDDEEDEDGISLPQTPATAVAVGF

SEQ ID NO: 8883 - protein, 373 aa, Zea mays
  VARIANT 221..373: note = Derived polymorphism lacks residues 221 to 373
MASEVEDEAATPLLANGAADVRRRRDQAKAILSTQAVRIATKAEQHERFIFKVTHLLGVLGFGGFCYLLGARPQDVPYVYCLFYVIFVPLRWIYYRYKKWHYYLLDFCYYANTFLLVMILFYPEDEKLFMVCFSFAEGPLAWALIVWRCSLVFSSFDKLVSVLIHLLPGIVLFTIRWWNPQTFAAMHPEGRDARVTWPYVEDKSYLWTWLFFVPLAAYTLWQLMYFLIVNVLRRQRLLRDPEVMTSYRELSKKAQKANNIWWRLSGLLGDRNRQVMYILLQALFTVATMALTVPIFLSYRMHVVFLILKVCASTWNGGSFILEVMPRQVVQKQLKKLDMKPMEQGSSTQGAPGGDGGTLGNHHQHTSEEHIQE

SEQ ID NO: 8884 - protein, 139 aa, Zea mays
  VARIANT 62: note = Ancestral polymorphism is R, Derived polymorphism is H
MRLCAVPLSSALAALAFALFLLNSGVATRRALGRGDAWVVAFVAAATVLVTALVATVRAHDRAREEGRRGLFRAVAWAQSAALTAMFAHRVAALPQAPAMACLVWTMAGGTIAGGFYCIFLHGRDGAVVGAGGRDARQA

SEQ ID NO: 8885 - protein, 189 aa, Zea mays
  VARIANT 40: note = Ancestral polymorphism is K, Derived polymorphism is Q
MAAIPAAIPGCCSSSRLPQLAGLPASTSRRRFKVTAMAPKKKVNRYDESWSKQWFGAGIFAEGSEEVSVDVFKKLERRKVLSTVEKAGLLSKAEELGLTLSSLEKLGLLSKAEDLGLLSLVETAAGTSPSVLASISLPLLVAAVAAVVVVPDDSVALVALQAVVAAVLAAGAAGLFVGSVVLAGLQESD

SEQ ID NO: 8886 - protein, 384 aa, Zea mays
  VARIANT 329: note = Ancestral polymorphism is S, Derived polymorphism is L
  VARIANT 320..384: note = Derived polymorphism lacks residues 320 to 384
  VARIANT 279: note = Ancestral polymorphism is T, Derived polymorphism is M
  VARIANT 178..384: note = Derived polymorphism lacks residues 178 to 384
  VARIANT 58: note = Ancestral polymorphism is P, Derived polymorphism is L
  VARIANT 43: note = Ancestral polymorphism is L, Derived polymorphism is R
  VARIANT 32..384: note = Derived polymorphism lacks residues 32 to 384
MASPPHSFEVRTPGDSPRPTAALLSPSVAAPQPSTASRLLLLLTAAVAAATAFVLLHLPTTVVTAASATARPLSKLSKPVVLLISSDGVRFGYQYKAPLLHIRHLFANGTSAAEGLVPVFPTLTFPNHYSIVTDLYPSSHGIINNYFPDPISGDYFTMKNHDPKWWLVEPLWATAAAQGVLSATFFWPGSEVTKGSWNFPDKGHQVGPDDPSITDAVVHIDEMLGRLIAGLEARGMFEDVNIILVGDHGMVGTCDRKLVFLEELAPWIELKSDWVLSMTPLLAIRPPDGVSPDEVVAKMNEGLGSGKVKNGEYLKMYLKEELPTCLHYSESYRIPPIIGLIGEGYKIEMKRSKRNECGGAHGYDNAFFSMRTIFATHGPRFSGW

SEQ ID NO: 8887 - protein, 874 aa, Zea mays
  VARIANT 339..874: note = Derived polymorphism lacks residues 339 to 874
  VARIANT 602..874: note = Ancestral polymorphism lacks residues 602 to 874
MFWRMTGLSAASPVDTILDKENFTLEELLDEDEIIQECKALNSRLINFLRDKSQVEQLLHYILEEVPEDAERKRSFKFPFIACEIFTCEIDVILRTLVEDEELMDLLFSFVKPDHPHSTLLSGYFSKVVICLMLRKTAPLMSYVQGHPKIVVQLVDLIGITSIMEVLIRLIGADETIYSNYGDTLQWLENTDVLEMIADKFGSSDSPEVHANAAEVLCAVTRCAPPSLAAKICSPSFVGRLFHHALEESRPKSVLVHSLSVCISLLDPKRLASASYQAFRSNLSHGALVTASPETVDGMLDSLGNLLKLLDTSATESGLPTTYGSLRPPLGKHRLKTLQVPRRAAARKRMCLTGFKCYCGATFCGVHVGTFGFQASGRDTIVWPTVNNLDDLTDVIVEFISVLLTIGSETAEKELRRQSAIKRSIDLFFEYPYNNFLHHHVENIIVACLEGKRPEVVEHVLHECDIVGKILVSERFSSLSTESNGPTVPSEGKTPPRIGNVGHMTRIANKLIQLGNSNNTIQAHLQENNDWVEWQTNVLVKRNEVENVYHWACGRPTSLHDRGRDSDDDDFRDRDYDVAALANNLSQAFRYGIYSNDDIEEYFSRKCGHSRVLLHIIDACLFCQCRHKDHLNEMMSGLFFFILFQDVYFDDESAEVVISSLRLGDDQDSSLFTNSNWFTFDGERGIDDRLSASVPSSSPNSLETSLEAEEADDGKVIGTEDEMETVYLGNGSAEEVKDVAECNEQPNCCTEDERLKNTEGIERHPDVSNHYTDICTNEAASAAAESSAPSVEIVAKKTVDEPSEAERTVDEPAESSLDSSVSIPLPAPVNGSEPANSEASSEQVAHDTDVQQPVKEAPDEDVNAKKTDVAKASE

SEQ ID NO: 8888 - protein, 107 aa, Zea mays
  VARIANT 83: note = Ancestral polymorphism is G, Derived polymorphism is R
  VARIANT 55: note = Ancestral polymorphism is Q, Derived polymorphism is R
  VARIANT 53: note = Ancestral polymorphism is K, Derived polymorphism is N
  VARIANT 46: note = Ancestral polymorphism is G, Derived polymorphism is E
  VARIANT 39: note = Ancestral polymorphism is I, Derived polymorphism is V
  VARIANT 31..107: note = Ancestral polymorphism lacks residues 31 to 107
MASCEPKGSAKGARGAPEACAVADIDPKLELYDGANTYVIRLNLPGFKKEDFKVQLNSGGWLTVRGERPAGYVRFHRRPTSTGSPAASTAPCCTSPCPSSRCARPTW

SEQ ID NO: 8889 - protein, 247 aa, Zea mays
  VARIANT 133: note = Ancestral polymorphism is R, Derived polymorphism is S
MTTVNVNPVYEWLDDGASHLLRLDLPVPGEAWHDGKALWLHNTFQLPDTANHDTITYSFDSNVLTLTMPKLPAAPAPPPPPQAKEEARVAGGKKPADQEGKLGAKVGGGHGGAATEERTTAEAEERTTSLTASSKEEDEKARPTAPPPPPPQSNEKAQDHQDGKARAGHREMVAREAARRIEAARARVAEAKAKAELERKWEHWKERAVEEGVKLAEALNKNKEVIATAVAAFALGVLVSNRIFCRN

SEQ ID NO: 8890 - protein, 275 aa, Zea mays
  VARIANT 86: note = Ancestral polymorphism is T, Derived polymorphism is I
MAPGLYTDIGKKTRDLLYKDYNTHQKFSLTTCSPHGIAITAAGTRKNESTFGDLHTQIKNNKLTVDVKANSESDLLTTITVDEIGTPGLKSILTLVVPDQRSGKLELQYLHEYTGVNASIGLNSNPMVNLSGAFGSKALSVGVDVSFDTETSNFTKYNAALSLANPDLIASLHLNNHGDTLVASYYHLVKHHSGTAVGAELSHSISRNESTLIFGSQHSLDPHTTVKARFNNYGMASALVQHEWRPKSFITVSGEVDTRAIEKSTKVGLSLVLKH

SEQ ID NO: 8891 - protein, 188 aa, Zea mays
  VARIANT 146: note = Ancestral polymorphism is N, Derived polymorphism is S
MTNTYTNIKNMCHTAPDVLRLQLAQCIKLLYLVIMIVNRIKKECPHVPLMLYINGNGGLLERMKDTRVDVIGLDWTVDMADGRKRLGNGISVQGNVDPAFLFSPLPVLTDEIRRRLYLVACIELDVVTSLLLWVVKAAGTKGHILNLGHGVLQKTPEEAVAHFFDVTRSLRYDTHFQGSVAEELQPVA

SEQ ID NO: 8892 - protein, 285 aa, Zea mays
  VARIANT 26: note = Ancestral polymorphism is Y, Derived polymorphism is C
  VARIANT 60: note = Ancestral polymorphism is A, Derived polymorphism is V
  VARIANT 67..285: note = Derived polymorphism lacks residues 67 to 285
  VARIANT 71..285: note = Derived polymorphism lacks residues 71 to 285
  VARIANT 149: note = Ancestral polymorphism is L, Derived polymorphism is S
  VARIANT 265: note = Ancestral polymorphism is I, Derived polymorphism is T
MVSEWANQPIAEYMEEVLTNPQSGFYINVTCLGNQGITSPRRRSARCLERAKQTPTIIIAHEFYDALPIHQFQKASRGWCEKMVDLAEDSSPSASTSLCDILDDPGSADLTACVDFASIKRDPLRKLAVCTLVLSPTPVLSVGNIKQHSHEIFSHDFLGSLGISFRVEALLQKCAEEQAETTGDGAAPFWEGPDPTLRTRHLLEWPWAAGTWPMAHGHCQQKASRARPFRCSENPGRLVFPLSGIHQVTTNMITSMLTCRGILVINLKKKKEREKEDGSYAWKKK

SEQ ID NO: 8893 - protein, 270 aa, Zea mays
  VARIANT 160: note = Ancestral polymorphism is P, Derived polymorphism is S
MAGLFTEQAAVYAAARPAYPKDLFAKLSALTAHHRRAWDVGTGNGQAAIGVAEHYDSVVATDVSAEQLRHATPHPKVRYLHTRDATPGEEDLVAMLGGGEASVDLITVAQAVHWFDLPAFYGAARRVLRRPGGVIAVWGYNYRVSPVEDMMARFFSTTLPYWDPRARYCTDGYRDLPFPFEDIGLGKEGEPASLDVEHEMSFEGLIGMLRSWSAVTTAKQQGVDLLGARVVKELEEGWGGAELVRKHPAAFSPSWLLAKLYPQLATDLSK

SEQ ID NO: 8894 - protein, 189 aa, Zea mays
  VARIANT 180: note = Ancestral polymorphism is L, Derived polymorphism is V
MSLAPSIPSIKVKVGAVSVAPPHRACRSFAVIRSSKAEGPIRRPAAPPLSPPPPMPPKTPALSTPPTLSQPPTPVKPAAPPTSSQPMPPSPEPKPVDATAQMRKPVAGAMTLEYQRKVAKDLQEYFKKKKLEEADQGPFFGFLPKNEISNGRWAMFGFAVGMLTEYATGSDFVQQMKILLSNFGIVDLD

SEQ ID NO: 8895 - protein, 1058 aa, Zea mays
  VARIANT 667..1058: note = Derived polymorphism lacks residues 667 to 1058
MHRKVRVPPLPHLTLRCASSSSAAASVSPPPPRRLPPPVPLCDLLAHRLGPPRSPLSPPPPRPHADLLPLLRRGGDANSPENLHVELIKRGLNHDLFLCNHLVNSYAKGARLAAASQVFDEMPERNAVSWTCLVSGYVLHGIAEEAFRVFRAMLREVQAGCRPTSFTFGTLLRACQDGGPDRLGFAVQVHGLVSKTEYASNTTVCNALISMYGSCTVGPPILAQRVFDGTPIRDLITWNALMSVYAKKGDVASTFTLFKDMQRGDSRIQLRPTEHTFGSLITAASLSSGSSAVLDQVLVWVLKSGCSSDLYVGSALVSAFARHGLTDEAKDIFLSLKQKNAVTLNGLIVGLVRQDFSEEAVKIFVGTRNTVDVNADTYVVLLSALAEYSISEEGLRIGRVVHGHMLRTGLTDLKIAVSNGLVNMYAKCGAIESASKIFQLMEATDRISWNTIISALDQNGNCEEAVMHYSLMRQSCISPSNFALISSLSSCAGLKLLTAGQQVHCDAVKWGLDLDTSVSNVLVKMYGECGAMSDYWKVFNSMAEHDEVSWNTMMGVMASSQTPISEIVKVFNNMMRGGLIPNKVTFINLLAALSPLSVLELGKQVHAAVMKHGVMEDNVVDNALISCYAKSGDMGSCEHLFTNMSDRRDAISWNSMISGYIYNGNLQEAMDCVWLMIHSGQIMDCCTFSIILNACASVAALERGMELHAFGIRSHLESDVVVESALVDMYSKCGRVDYASKLFNSMTQRNEFSWNSMISGYARHGLGRKAIEIFEEMLRSRESPDHVTFVSVLSACSHAGLVERGLEYFEMMPDHGILPQIEHYSCVIDLLGRAGKIDKIKEYIQRMPIEPNALIWRTVLVACRQSKDGSNIDLGREASRVLLEIEPQNPVNYVLASNFHAATGMWEDTAKARTAMRQATEKKEAGRSWVTLNDGVHTFIAGDRSHPNTKEIYEKLNFLIQNIRNAGYVPLTEYALYDLEEENKEELLSYHSEKLAIAFVLTRSSSGPIRIMKNLRVCGDCHIAFRYISQMISRQIILRDSIRFHHFKDGKCSCGDYW

SEQ ID NO: 8896 - protein, 103 aa, Zea mays
  VARIANT 10: note = Ancestral polymorphism is R, Derived polymorphism is T
MQATNKRPQRRYPVAPIVMCLVLAWASCLHGDDTKLLAAAVPLPRRPAATSSVAAAGGMPVVVGYRPRPQAGAAAGRSAPRSTAWIGDDKRQIPSCPDALHNR

SEQ ID NO: 8897 - protein, 236 aa, Zea mays
  VARIANT 117..236: note = Derived polymorphism lacks residues 117 to 236
MGARRKLKTHIRNQRWADKAYKKSHLGNEWKKPFAGSSHAKGIILAKIGFEAKQPNFTIRKCARVQLVKNGKKIAAFVPNDGCLNYIEENVSSISPAHRTLDHGQLYLSRSYDFSPWAYMLTTMLFTKERRITNETYKWYLPLECFDLSKTQFISSKECANCTCHVNFSMFQFCDAPFWMLCARVAAKAQEKRLELLYIQLNSTKSSAPQKPSAPRSNGDIGDPQDLKPGIQISKN

SEQ ID NO: 8898 - protein, 168 aa, Zea mays
  VARIANT 127: note = Ancestral polymorphism is C, Derived polymorphism is R
MDASQDVWDWEVVLPDHRSFSLSHGGKNLDDKETEEHDLLPPSGDVDVHDECKGIGVVLDETCKSAVPSVADPIMNPEGGEEEKAIQSPDAEESVTADSKFAQEEEEEEDIKKDGDDKVGALIGALCSFGVAAATACVFLIGGRLHHHHMQQHKIQLQFFGDDKEDFL

SEQ ID NO: 8899 - protein, 210 aa, Zea mays
  VARIANT 5..210: note = Derived polymorphism lacks residues 5 to 210
  VARIANT 102: note = Ancestral polymorphism is E, Derived polymorphism is K
MNYPWRSFTKVSGALRHCSFAVMALHGCILSEIQAPPESRRVFSAEIQRVGQEGAKVLRELGSRVKTMTKLSSSGILFEVHMAAEELQKKIDEKSYLLVNTKRWDASKQAQGIKEVVNGTRAVETENKNKENKDDGTSAVEKENKAKENNNGGLEPTIVDQTLVHQSKSFLANSFLSRYDSASTIDGFTRNPFTQDKHVSEKRKGKTAVR

SEQ ID NO: 8900 - protein, 298 aa, Zea mays
  VARIANT 36: note = Ancestral polymorphism is N, Derived polymorphism is K
MRMSCNGCRVLRKGCSDNCAIRPCLQWIRSPDAQGNATVFLAKFYGRAGLINLITAGPEHVRPAIFRSLLYEACGRMLNPVYGSVGLLWSGNWQLCQAAVESVLRGIPIAQPPPTATAVPPLRSCDIRHVARREAGRGAVDAGLHRMANSSRGQFKRSGAQHRSADSGSIELVFSQPSAASSMLVDIRQAQPLNWAPRHPSPHQYYSASHDDDAVRESDDSKASVDTVDVSHVSQSEPAEPPRESNERADGLDLTLGLPPTAHKVERLETSSDVDDDQTSHRGEPTKLGFAMADSRAR

SEQ ID NO: 8901 - protein, 232 aa, Zea mays
  VARIANT 31..232: note = Derived polymorphism lacks residues 31 to 232
MDASQDVLDWDWEVVMPDHRSFSTSQSHGSKNLDGKDDHLLCFTYVILVTTFLNCMPDKETEEHDLLSPSGNFDDVQVECKDIGVVLDETCKSVVPSVVDPIMAPDGGEEEKAIQSPDPIMAPDGKFAQEEEEDEEDIKDGDDKVGALIGALCSFGVAAATACVFLIGGRLHHHHTQHHKFQLQFFGDDKRIQQVVRQTSRLNQKAMSFAMGAGASRHFGRARVKRSKNINY

SEQ ID NO: 8902 - protein, 736 aa, Zea mays
  VARIANT 34..736: note = Derived polymorphism lacks residues 34 to 736
MASAVPRALRMSHAQFIEHLRCAASSDRTPRTGEALHGWALKSGAASHAPVSNSLITFYCSLPRPLLGAAYVVFADIPAALRDVASWNSLLNPLSRHHPVSALSHFRSMMSSPEAVLPSPHSFAAAFTAAARVPSASAGAVTHALACKLPSSCGSNNVFVSTALLNMYCKLGAVSDAKRVFDGMLHRNAVSWAAMVSGYATGKCSEEAFELFRLMLQKCPLEKNEFVTTAVLSAVSVPLGLLMGTQLHGLVLKDGLVGFVSVENSLVTMYAKAECMDAAMRVFGSSKERNSITWSAMITGYAQNGEANCAARMFLQMHSSGFTPTEFTFVGVLNACSDMGALVVGKQTHCLMVKLGFETQVYVKSALVDMYAKCGCIGDAKDGFHQLYDVDDVVLWTAMITGHVQNGEHEEALMLYSRMDKQGIIPSYLTVTSVLRACACLAALDLGKQLHAQILKCRFSLGGSVGTALSTMYSKCGNLEDSMVVFRRMPDRDVISWNSIISVFSQHGRGSDALDMFEEMKLEGTAPDHITFINLLSACSHMGLVDRGWFYFRAMTKDYNLIPTLDHYACMVDILSRAGQLKEAKDFIDSITIDHGTCLWRIVLGACRSLRDFDVGAYAGEQLMELGTEDSSAYILLSNIYAAQRKWNDVERVRHLMRLRGVSKDLGCSWVELYNRVHVFVVGEQQHPEAENINVELIRLAKHMKDEECFLFDDEKDELGDSHEGEQMELISTTYY

SEQ ID NO: 8903 - protein, 129 aa, Zea mays
  VARIANT 114..129: note = Derived polymorphism lacks residues 114 to 129
  VARIANT 87: note = Ancestral polymorphism is K, Derived polymorphism is N
  VARIANT 40: note = Ancestral polymorphism is R, Derived polymorphism is W
  VARIANT 15: note = Ancestral polymorphism is E, Derived polymorphism is G
  VARIANT 10..129: note = Derived polymorphism lacks residues 10 to 129
  VARIANT 1: note = Ancestral polymorphism is M, Derived polymorphism is V
MDASQDVWDWVVLPEHRRFYMSHGSKNLDGKDRLLFHAIRSPDTKESATAADNFAQEEVEEGIKKDDYDDKTWPQPQCPVFSVGKLKVNVIRAVLVWGSSRHRLHISHWRQAASSPPAAAENPAAVLRR

SEQ ID NO: 8904 - protein, 253 aa, Zea mays
  VARIANT 167: note = Ancestral polymorphism is G, Derived polymorphism is V
  VARIANT 184: note = Ancestral polymorphism is S, Derived polymorphism is N
MAEAVAVAYEEQRRRQIEMNKRKLEELQLHHLSAAVREAAAAAKPSSAKKRKAPVPRDAATEPPRRSDRLANLPEKPMYREVRVNLPFPEGSKSNARVPLDAANSVVVEPLRWSDRLANLPKKPMYHEDSDEERSYAISKAEELVQELGSSFPIFTQPMTLSHVSGGFWLGLPKHFCREHLPKSDETITLVDEEDDESDTFYLAMQAGLSTGWKEFAIQHKLLDGDCLVFQLIERTKFKVYIIRATLYFESDH

SEQ ID NO: 8905 - protein, 66 aa, Zea mays
  VARIANT 27: note = Ancestral polymorphism is Q, Derived polymorphism is H
  VARIANT 13: note = Ancestral polymorphism is A, Derived polymorphism is P
MASVMAYVLLFTAFFSSGLMQLSMAAQEKPATAMATARAVVDAKAIDQAIAYLLMLAALFITYLAH

SEQ ID NO: 8906 - protein, 107 aa, Zea mays
  VARIANT 104..107: note = Derived polymorphism lacks residues 104 to 107
  VARIANT 93: note = Ancestral polymorphism is V, Derived polymorphism is L
  VARIANT 89: note = Ancestral polymorphism is A, Derived polymorphism is V
  VARIANT 76: note = Ancestral polymorphism is P, Derived polymorphism is L
  VARIANT 57: note = Ancestral polymorphism is I, Derived polymorphism is T
  VARIANT 40: note = Ancestral polymorphism is D, Derived polymorphism is H
  VARIANT 35: note = Ancestral polymorphism is G, Derived polymorphism is R
  VARIANT 27: note = Ancestral polymorphism is L, Derived polymorphism is F
  VARIANT 9..107: note = Derived polymorphism lacks residues 9 to 107
  VARIANT 4: note = Ancestral polymorphism is Q, Derived polymorphism is H
  VARIANT 2: note = Ancestral polymorphism is R, Derived polymorphism is W
MRLQMISIGLHMQLRISFNICVLAELLLGQPLFPGESGVDQLVEIIKVLGTPTREEIKCMNPNYIEFKFPQIKAHPWHKIFHKRMPAEAVDLVSRLLQYSPKLRSTA

SEQ ID NO: 8907 - protein, 797 aa, Zea mays
  VARIANT 188: note = Ancestral polymorphism is V, Derived polymorphism is A
MAASEREAALLTRVAANHLFLAQFEPLRAVLLSLRRRDPVLCADFLRAVAAAGGRVPGVLWSAPPACPSPSHLAWLAVLELAALPSTPNPEALRLKAEFLVLLQPIADDPAIGAEAREILTKLLDLGVTRLKLEVEGGGDAGASAEEASVKDLRGLWEVFLDNAFVFDALCIGVSRQIALDRGFGVDVLLWLRRNVQLAHLDAVKTLVTEGDLDAAPGHLRFLCLDHGLEKDEYKVVIAELLRKGWAKTSNYGGTWSELQNRITKLYGAALQSTSPELVQLVQLILDNILSEEIEDHDVSDANGMPLPFEKFLETLLLERDTDSDDKVLLDAAITSCKKDLYHYCRLSGKHMLEVVLETALSSIKREQLLEAVDVVSLFPLLHPLVAVLGWDILKGKTGLRRKLMQLFWTSKSQGLRLQEYSHYRSPTDETSCEEYLCDLLCFHLDLARFVSSVNSGCLWNLRNSLLFTQQEQGSDVNNAEILDPFVENLILERLAVQSPMRVLFDVVPGIKFQDAIELVGMQPLPSTTAAWKRMHDIELMHMRYSLQSVALALGEMEKCTGDENECYYHKALSYLREMQNFMEAIKSSPRKVGSSVICSYSGALFVGEDILLFLEIFMVSIILSLLHMDDCAKLSQSVPSECYVSHECHDINIESEGKNVVVYFVGLLLDILRHNLESKGSDTDHLSSTGLSPAGRQALEWRLKHAKHSIEDLDWRLSVLKRLPPLSERQWSWKEALVLLRAAPSKLLNLCMQRENYDIGEEAVQRFSLPAEDKASLELAEWVAGAYKRALVCLLM

SEQ ID NO: 8908 - protein, 2701 aa, Zea mays
  VARIANT 188: note = Ancestral polymorphism is V, Derived polymorphism is A
MAASEREAALLTRVAANHLFLAQFEPLRAVLLSLRRRDPVLCADFLRAVAAAGGRVPGVLWSAPPACPSPSHLAWLAVLELAALPSTPNPEALRLKAEFLVLLQPIADDPAIGAEAREILTKLLDLGVTRLKLEVEGGGDAGASAEEASVKDLRGLWEVFLDNAFVFDALCIGVSRQIALDRGFGVDVLLWLRRNVQLAHLDAVKTLVTEGDLDAAPGHLRFLCLDHGLEKDEYKVVIAELLRKGWAKTSNYGGTWSELQNRITKLYGAALQSTSPELVQLVQLILDNILSEEIEDHDVSDANGMPLPFEKFLETLLLERDTDSDDKVLLDAAITSCKKDLYHYCRLSGKHMLEVVLETALSSIKREQLLEAVDVVSLFPLLHPLVAVLGWDILKGKTGLRRKLMQLFWTSKSQGLRLQEYSHYRSPTDETSCEEYLCDLLCFHLDLARFVSSVNSGCLWNLRNSLLFTQQEQGSDVNNAEILDPFVENLILERLAVQSPMRVLFDVVPGIKFQDAIELVGMQPLPSTTAAWKRMHDIELMHMRYSLQSVALALGEMEKCTGDENECYYHKALSYLREMQNFMEAIKSSPRKIFMVSIILSLLHMDDCAKLSQSVPSECYVSHECHDINIESEGKNVVVYFVGLLLDILRHNLESKGSDTDHLSSTGLSPAGRQALEWRLKHAKHSIEDLDWRLSVLKRLPPLSERQWSWKEALVLLRAAPSKLLNLCMQRENYDIGEEAVQRFSLPAEDKASLELAEWVAGAYKRALVEDAVNRVTDNTNAAHELDILSLRTQLGSLTTILLCVDVAATSAKSVHMCRFLLDEVLLNGSPGNPIFHRRGLRQGDPLSPMLFVMVMDVLSSLFRVAENRGLLQGLGGADVRSRVSIYADDVVLFIKPIEADLNCAKIMLNCFGSASGLVTNMLKSSAIPIRCDDQQVLAGCSVLHCSPAAFPCRYLGLSISDKKLRKCDLKLWIEKIADRLPNWKARLLNLAGRTALVKFVLSAIPTYLLIAINVPQWVIKSIDKIRRGFLWRGRKEVNGGSCLVPWEVVTRPLRLGGLGIPNLKLKSWALQAKWLWLEKTDQSRPWRGLSLPVQRQATSMLSEIFPGRSPKVGPTYWDQIQELATISVIKRILQRLHDILDLDTLPSLQVFFTEMSISSSTECSRVGQKQRPLGLLHQMIDDAFKGKRQFLSGKLHNVARAIVDEDFDTVYSKEGVNLEKKDILSSEKGILLGHGLRILKQASRSDLASSNVVDSGPEHKGSANRYLGPLSTKPSTYLSNFIIYTATIGDIVDGTDTTHDFNYFSLVYEWPKDLLTRLVFERGSTDAAAKVADTMSVDFVHEIISACVPPVLPPRTGQGWACIPVIPTICNISSENRLCTKSSPAQGWSAHDSSLSSRQEPLYPLQLNLVKHLAQLSSVRAVLACVFGSSILSGDNESSFTHVKDSTQAPETERSFFEFALEQSERYPTLNRWIQMQSNLHRVSESSITDKSEVSLHQSKGKFCMKRTRESDSDGESELEENVISGNTSSSSLESTKHEDARLEPTTFISFDWENEAPYEKAVERLISEGKLSDALAVSDRCLRNGASDNLLQLLIEQKEEKGPGTGQIHPYGSHSLGNDTSQYCLRLRDKKVAAQLALKYLHSWDLDAATNVLTMCMCHLPENDPMRSEVLHMKQSLQRYGHIMSADEHYTRWQEVEADCEDDPEGLALRLAAKGAVSAALEVAESASLSIDLRRELQGRQLVKLLITDPLNGGGPAAASRFLSTLRDSNDALPVAIGAMNLLPDLRSKQLLVHFFLKRTVGNLSDAEIARLNLWALGLRVLSLLPLPSQQRCSSLHEHPQLIVEVLLMMKQLQSASLILKEFSSLRDDKLIIAYAKKAISINVSSAPRERRSNISASRAKQKKATTPAKTNFVQSFGNFQREARKAFSWVPRDSGTKTPPKDILRKRKSSGSGGDRSSWEAMPGLQEERTPVYPSEAQERLPFVSAPDEWVLTGDPDKDDATRSSHKYETSPDITLFKALISLCTNESVAAKGALELCMTQMKVVLSSQQLPLDASMDNIARAYHATETYVQALSYAKNLFKKLVGSSDLSSGSERSKEVDDVSVDTGSSSTGSQYLDELSDFLTQADMWLGRAELLQSLLGSGIIASLDDIADKESSSRLRDRLVNDERYSMAVYTCRKCKIDAVPVWVAWGHALVRMEHYAQARVKFKQALQQYKGDATSVVTEIINTIEGGPPVDVSSVRSMYEHLAKSAATIFDDSLSADAYLNVLYMPSTFPRSERSRQSRGHVDSQFRTASSYLEDGPRSNLDSVRYAECIHYLQDYARPQMLAFMFRHGHYTEACSLFFPFSQPTTEGETSLSSAPWSDPLTTDYGTIDDLCDLCLGYGAMAVLENTIRTITQSPTYHEAHMIQYMNTIITRICNYCETHRHFNYLYNFLVLKDDHVASGLCCIQLFMNSMSQEEALRHLGHAKTHFEEALSVRDRTIEATKLVLRSARNKGAPGKMTRETIMKYSTRVSYQMDVVKALNSIDGSQWKTSLFGNPTDPETLRRRCMVVETLAEKHFDLAFRMLHEFDLPAVDIYAGVAASLAERKKGGQLTEFLKNIRGTIDDDEWDQVIGAAINVYANKHKERPDRLIDMLISNHRKVLACVVCGRLKSAFQIAARSGSVADVQYVAHQALHANALTVLDMCKQWLAQYM

SEQ ID NO: 8909 - protein, 326 aa, Zea mays
  VARIANT 199..326: note = Derived polymorphism lacks residues 199 to 326
MFYGAMVWDPWLIVSQIVCLQCLYYLSLGVAMALLVGTRVPRLTLLYFFDFATLTPRTPTGWCAIASFILAAVAGAGFMLYVIERAKKCLDFAATLYIIHLFICIVYGGWPASITWWVVNITGLAIMALLGEYLCIRRELKEIPISRLRASYKASMAKTIGDLAGRGGKKWEQLWVPGLDSDKLSVSGFGFYIDHCSTEAYATWDQLLYLNLEAIVCQSEQMLSCIITGSSPSGSETVYAYKTNLIFDLVECPSVFLPIIIVNIVKKCDTEMRVVSISTQLSIGENNNVRADLVDRIHEGIHIHQISPKFLSTPAINFNMVFNLTW

SEQ ID NO: 8910 - protein, 197 aa, Zea mays
  VARIANT 8: note = Ancestral polymorphism is R, Derived polymorphism is T
  VARIANT 96: note = Ancestral polymorphism is A, Derived polymorphism is V
  VARIANT 133: note = Ancestral polymorphism is A, Derived polymorphism is T
  VARIANT 140: note = Ancestral polymorphism is R, Derived polymorphism is Q
  VARIANT 157..197: note = Derived polymorphism lacks residues 157 to 197
MEVQVQQRGSPAPAAELEVSLREFTLSDADAEAFMSWASDPRVVRFQRRDAYEHVDQARRYIADHVLPHPWYRAICAGAGAPLPVVGSISVKAGPAEDGRLFRASVGYRLAHAHWGRGIATRAVRAAAAAVFTAWPWLLRLEAVADVDNPASQRVLEKAGFAREGVLRKYVLLKGRPRDMVMFSIVVETEQDNPDGL

SEQ ID NO: 8911 - protein, 213 aa, Zea mays
  VARIANT 136: note = Ancestral polymorphism is D, Derived polymorphism is Y
  VARIANT 70..213: note = Derived polymorphism lacks residues 70 to 213
MEVIAKPNVATKDGASKFNVGMEDTTSKLTVADTAAVEPTLLETSIAAGSTVVAGNEQCDNSNSSGASLQQQAIDNVLMSTVMLAEDIATPVATAELKPARRFTRLLLKNHEPNKEESAACESQATPDGSKDTSFDFALLLEKPQRRFTRSLLKTKVESNLVGSDDALDSASDARPSVKKMEMKMSAHLMKAEALSISCCLPSQREPIHLQNV

SEQ ID NO: 8912 - protein, 132 aa, Zea mays
  VARIANT 62: note = Ancestral polymorphism is P, Derived polymorphism is H
  VARIANT 79: note = Ancestral polymorphism is C, Derived polymorphism is Y
  VARIANT 80: note = Ancestral polymorphism is R, Derived polymorphism is S
  VARIANT 83: note = Ancestral polymorphism is A, Derived polymorphism is V
  VARIANT 109: note = Ancestral polymorphism is Q, Derived polymorphism is P
  VARIANT 111: note = Ancestral polymorphism is P, Derived polymorphism is L
MVGGFQHRLWDELLIGIGIGSVVRGSGRIRSMERLDDVTEGLVMAISESSRLHSSLQKESVPIRRLIVNQVLPPSTSDCRFCAIKRKDQTHALDMIRTGLELKGLNIIQAPLVDMEIRGVLAHNFLGDILWK

SEQ ID NO: 8913 - protein, 604 aa, Zea mays
  VARIANT 354..604: note = Derived polymorphism lacks residues 354 to 604
  VARIANT 351..604: note = Derived polymorphism lacks residues 351 to 604
  VARIANT 163..604: note = Derived polymorphism lacks residues 163 to 604
  VARIANT 40..604: note = Derived polymorphism lacks residues 40 to 604
MVVAAARGTGPPETLRSRVEVAGRGGWEVATPGALVEAARGNAPPVTPRSRAAAGPRCRPEAAGRGTVPLVTPRSREVAAMEMVEVATAVGEKEEEVMGMEVEETAVGEKEEEGMGTGVEETAEEVKVVEEMVEEAKVGEGMVMAEEGMVGEAKAAVETATGWRRQDELLALEGIAVDVVVVPEEVALLWRPLVGAVGDAVPAVVKALDVQADGRLAGDEVVGIGEVLEVRQAADLLRHVADEAVVAEVELLDAVEARELVGDGAHQLVEAEVEHGEAHERAELRRHAGLEPRVHEDDLVERGRHVGDGGREAAAEVVVGEHEHGGRRVAEVVGDLETESVGVDEDGVERSVEELAGHGSLEVVEAQVEVSEAGQAEHDVGEGADEAVVAEVELVERVELVQRPGHEAAEAVGVEVENGEVSEQAQLLREVSGEVGVVEVDGGDDGEVGVLRRGRAVDAGVGAHVGARPRARHVVRVGEDGAPPRLQRHVRVAEARVRERVGRVDDHAAAIAGAAAVVLQQLAPPDVGGVGRAEAAASKRRRCGEEVRREQEEDKEDGEGRVARWRRHRGARIGSGAEWNGKKHRKGSGYMISRPRGIEGGARE

SEQ ID NO: 8914 - protein, 642 aa, Zea mays
  VARIANT 218: note = Ancestral polymorphism is R, Derived polymorphism is L
  VARIANT 406: note = Ancestral polymorphism is P, Derived polymorphism is L
  VARIANT 544: note = Ancestral polymorphism is S, Derived polymorphism is T
MTTPPRNATLPVLLVLLLLAPHLLATAPAFASRGLSASDAAHIRRRQLLQYHGGGAGNGSGVVVDPSYAFPNPRLRDAYVALQAWRRAILSDPHNVTGSWTGPDVCAYAGVYCAPSPQDPDLTVVASVDLNHADLAGHLPEELGLLADLAVLHLNSNRFCGLVPRSLDKLHALHELDLSNNRLVGAFPDVVLRLPSLRYLDLRFNDFEGPVPSELFDRPLDAIFINSNRFRFQIPDNFGNSPASVLVLANNDFGGCLPASVANMSSTLNEIILMNTGLKSCVPPELGALMGLTVLDLSFNKLMGAIPDELARLHSIEQLDLGHNRLVGDVPEEICRLPHLQNFTYSYNFITGEPPVCLHVKSLDDRRNCIPYRPDQRSPEQCNFFRNHHHVNCDAFKCKKFILPSPPLPPPPSPPPPSPPPPSPSPPPPSPPPPSPPPPSPSPPPPSPPPPSPPPPSPPPPSPPPPSPSPPPPSPPPPSPPPPSPSPPPPSPPPPSPPPPSPSPPPPYYEVSPEERYLSPPPPAYTEVPPPPYYEVSPEERYLSPPPPAHQESPPPIHHDPPPPPYYEVSPEDRYLSPPPPPSPASLPKYDYSSPPPPSSPPYSEVSPEERYPSPPPPPRALPKLPVYDYSSPPPPAAAWTP

SEQ ID NO: 8915 - protein, 454 aa, Zea mays
  VARIANT 103..454: note = Derived polymorphism lacks residues 103 to 454
  VARIANT 23: note = Ancestral polymorphism is G, Derived polymorphism is C
  VARIANT 18: note = Ancestral polymorphism is P, Derived polymorphism is S
MAAGRAVAVAMVAAAALPLLVGGAYADCYNYCFNDCMNKDKSMRDYCSYACDKTCAPDAAPRRPVAGLPINCQLACVRDSCRRRRADANDMKACYGQCYDRCETKAGLPRPLRAGGGVGIVWPAALPDHPFHKKQDAVWPAALPDHPFHKKQDTGGPAAELPDHPFHKKQDAVWPAALPDHPFHEKQDVVWPAALPDHPFHKKQDTGGPAAALPDHPFHKKQGAVWPAALPDHPFHKKQDVVWPAALPDHPFHKKQDTGGPVAALPDHSFHKTKQGAVWPAALPDHPFHEKQDAVWPAALPDHPFHKKQDAVWPAALPDHPFHKKQDTGGPAAALPDHSFHKTKQGAVWPAALPDHPFHKKQDTGGPTAALPDHSFHKTKQGAVWPAALPDHPFHEKHDAVWPAALPDHPFHKKEDAVGPAALQVDHKMHDAVKRAGEPDPGYVMYPAWSPVRP

SEQ ID NO: 8916 - protein, 685 aa, Zea mays
  VARIANT 12: note = Ancestral polymorphism is C, Derived polymorphism is Y
  VARIANT 385..685: note = Derived polymorphism lacks residues 385 to 685
MRNASDSSWSSCVAVLQRALGPQQASHGFFGFGLHQQRLGDAYSPGGMELEPDAVMPPLLFRSLASLNLLLLVGYLLLVLLAKLFARLHHRATAKDRTSNWYDGRCDHRTEALATDEAEYAAAAADIVQAQQADTLSWFDEAAFEDSTLVLGDEGKDHPYAATAATARCCLQVVESNFPMQESARISPRNQNRRVDVDVEAEPMQQQQHVLEEAKGIAVDVQQATVLEPERRRSAPAPVVVSPEDVSIQGSLLGNKQESNRPGEDTRRDAHAEHEDEEGQQGKSLAEGHHNVKLFVNNRALADARKLLLEGAVNGAQAQLQLQLQDDKDNKNGDSCRLDASTLTSGSSTSKSSVEWQSSTVTKDSETEYPFSCSSRRSSARWEPYTLFRKYDEDMVYFHRVGAQKLTETESFRSIKYQPRSVSERIVHKLTPSWPSTRIVGLRDPYPELERAYVAQVCLTWEALNWNYTSFRRHNGSDDGSVAARCCPARVAQEFQQFQVLLHRFVENEPYEHGRRPEVYARTKNSTPKLLLVPEFRDEDDEKDDLISAVQFLLILEESIRTFMAFLRADKRSHYEMFRETVKRRASAMDQTPVVTLKKANKKKKSRLKDLTRPRRCLRRTRLRQQEELSILLGLIDLKVVARVLRMPEITDQQLHWCEEKMNMVRIDLVGKMQRDSAPLFYPAH

SEQ ID NO: 8917 - protein, 197 aa, Zea mays
  VARIANT 24: note = Ancestral polymorphism is A, Derived polymorphism is V
  VARIANT 4: note = Ancestral polymorphism is Y, Derived polymorphism is C
MAGYKAQGGALGVVLAVAALFAAAAMAMAVDDEHMYHWKCFKSCTGNCRDEDAFDDVVARHSEGSSHVVVAAVSGGKCKDRCLSECFEDLPALCYHQCVATNCLCYPPFSNEKVMCLKSCCNKCFHHGPPAPKPRPPMPGPPKPPAPAKPKPPPTPTPTPTPRPPAPKPPTPRAPPPPKKPCPCPPGSDEVEASENN

SEQ ID NO: 8918 - protein, 155 aa, Zea mays
  VARIANT 142: note = Ancestral polymorphism is A, Derived polymorphism is V
  VARIANT 137: note = Ancestral polymorphism is A, Derived polymorphism is V
  VARIANT 110: note = Ancestral polymorphism is S, Derived polymorphism is F
  VARIANT 108: note = Ancestral polymorphism is E, Derived polymorphism is K
  VARIANT 29..155: note = Derived polymorphism lacks residues 29 to 155
MSKVKNNNGYHGVTEPISLSGPTEKYLMQTAEVEKTVKAWIKKATRISRYGEQFVHEANAKIFTFGSYRLRVHGPGADIDTLCVGPRHATRNEYFFRWLHDILAEMPEVSELHPVPDAHVPVLGFKINGVSIDLLYANLAHAVIPEVSLSYCTAV

SEQ ID NO: 8919 - protein, 164 aa, Zea mays
  VARIANT 109: note = Ancestral polymorphism is H, Derived polymorphism is R
  VARIANT 40: note = Ancestral polymorphism is A, Derived polymorphism is S
MARRAVGVLLAVAALLAAATARAADDDDKTQPWQCFKSCSRGCHHHHDHDHDNGAAAVADFLSGAAAKVSAAVTRECKNNSCHDNACFKDLPAITYPQCAIATCLSHPHHSRKKTACLKDCCEKCFINGPPAPGPPAPGPPVPGPPAPGPPAPGPSPTPPSPPN

SEQ ID NO: 8920 - protein, 165 aa, Zea mays
  VARIANT 52: note = Ancestral polymorphism is A, Derived polymorphism is T
  VARIANT 51: note = Ancestral polymorphism is S, Derived polymorphism is I
  VARIANT 45: note = Ancestral polymorphism is R, Derived polymorphism is W
  VARIANT 44: note = Ancestral polymorphism is A, Derived polymorphism is S
  VARIANT 43: note = Ancestral polymorphism is A, Derived polymorphism is T
  VARIANT 41: note = Ancestral polymorphism is E, Derived polymorphism is K
  VARIANT 35..165: note = Derived polymorphism lacks residues 35 to 165
  VARIANT 32: note = Ancestral polymorphism is R, Derived polymorphism is C
  VARIANT 29..165: note = Derived polymorphism lacks residues 29 to 165
  VARIANT 19: note = Ancestral polymorphism is D, Derived polymorphism is G
  VARIANT 16..165: note = Derived polymorphism lacks residues 16 to 165
  VARIANT 12..165: note = Derived polymorphism lacks residues 12 to 165
  VARIANT 11: note = Ancestral polymorphism is E, Derived polymorphism is K
  VARIANT 1: note = Ancestral polymorphism is M, Derived polymorphism is I
MQPFSPVVQFEQDPVQILDALLLLYLNSQLLRALQESLASELAARMSAMSSATDNAIELRKNLSRRSILLLGRSRRHGYRCSVSWRRVWRVGENGSGCGDDYRGEGGGHREQGGRSGRASSVEAKAVAGGRRGRGRRGEWKRTSIAVGIPLSMLDSGPILWRRRR

SEQ ID NO: 8921 - protein, 100 aa, Zea mays
  VARIANT 37..100: note = Derived polymorphism lacks residues 37 to 100
MAAAAGEEALSSTTKQKVAATKQYIEKHYKSQMKSLQEHKERHWMLERKLADADVFEEEQNNILKDLEKRRQNTCAYEGIKWALMTLNCSPLLGEVRLGR

SEQ ID NO: 8922 - protein, 311 aa, Zea mays
  VARIANT 81: note = Ancestral polymorphism is K, Derived polymorphism is N
  VARIANT 234: note = Ancestral polymorphism is A, Derived polymorphism is T
MYLNPRIVGSGERTLVLSHGYGGSQAIWDKVLPHLSRTNKVLLFDWDFSSTAAAAGEEEDAEHSCYTFSRFAEELVALMDKMKLSGAVYVGHSMAGMVGCIASITRPDLFTHLVLVGASPRYMNSEDYEGGFDELDIKAMLSRISSDFRGWAEGFVPLAIGGSADDQPSAAELLARSFFAMDPRVAHGLARMIFLGDQRELLGDVAVPCTLVHVSGDFAAPPCVGRYMQARMRTASMYTIDSVGHFPQLVTPDEMLRILDRILVGSAASQEEETTAAAAAAAKTETTSSEVVSSGGVADALESKGRIDVAT

SEQ ID NO: 8923 - protein, 404 aa, Zea mays
  VARIANT 131: note = Ancestral polymorphism is G, Derived polymorphism is R
  VARIANT 165: note = Ancestral polymorphism is A, Derived polymorphism is V
  VARIANT 178: note = Ancestral polymorphism is R, Derived polymorphism is W
MTTGEATPPYDCTLRLICGTHYKDVSDGLATRARAAGKDDAMPEHFPSALGLLPDTDSDRRCSSSPHRRLFKLFRSASVRCRALPAPRLALADVSFAVDVVTAGGDSTLSFLVAADKAAHIENSAGLFLFGVDLSGWNGAIGPGEWRVRWTAVRTAARRGEEPAALLMMDAKMPAQGRQEPSPSAAEVRRGSRRVWAQWRGWLCRPLGRLPPLCRAGIRFACPPHLCSTIPYAESVAESLYGNTTPLTRRPSSAPPSTPPSRPPLPLLRDPLRTPPVLPQARIHWGRLADPGPGRARRGQVPAGTRHGLRVQGTGLWLISSPVKHDLLDSSYLWRAQEYDRLGHTLALYELEHCERWASVTVLGVGEGEHGRRQGPGKKKMGGCPGMGSKSKSLFCGAFNLFSR

SEQ ID NO: 8924 - protein, 236 aa, Zea mays
  VARIANT 194..236: note = Derived polymorphism lacks residues 194 to 236
MGCLQTKHASRSPHLLDTREAVALAAETSCEKVDLPDFVNIATGTLRLTVSEVEALHDLFRKISNSVIRDNLIHKEEFQLALFRGKKQQNLFVDRVFDLFDQKRNGVIEFGEFVRSLGVFHPDAPEDQKVAFAFKLYDLKQTGFIERHELKEMVLALLDESDLDIASDAVEMIVDRTFDQADTKGDGKIDQEEWTEYAKDNPYVLRNMTLPYLKDITMVFPSFVMHSEISETDMAV

SEQ ID NO: 8925 - protein, 122 aa, Zea mays
  VARIANT 23: note = Ancestral polymorphism is G, Derived polymorphism is R
MAAKLAQLRTQVTRAAEFASKHGCSYYKEVMEKNKQYVVQPPTVEKCQELSKQLFYTRLASLPGRYESFWKELDCVKQVWKNRKDLTVEDLGIASLFGVELYAWFCVGEIVGRGFTLTGYKV

SEQ ID NO: 8926 - protein, 553 aa, Zea mays
  VARIANT 105: note = Ancestral polymorphism is P, Derived polymorphism is L
  VARIANT 175: note = Ancestral polymorphism is S, Derived polymorphism is L
  VARIANT 180: note = Ancestral polymorphism is P, Derived polymorphism is S
  VARIANT 307..553: note = Derived polymorphism lacks residues 307 to 553
  VARIANT 376..553: note = Derived polymorphism lacks residues 376 to 553
MAAGSIVVDFPSMGAALCFPSLDSLLRDSASGFLAAVSNAPAPGAADLTNFHRVFSRVLSAYPDPPLEAVWFFSALSFHDRPDDLRSLLQLLSAFTASSPGTAKPLALLAPVVSELFHADKPRRETETLVEAVLSYISICSNRSAPSSTVGATADAVSLLPAFGELVKVWSVRYSRERCPFQVLFPLAGDEARRELMKEGCSVDYLAGVVLAEAFLLRLCLKVQNATGVPRSELQKELKIWAVSSIPVFQNHRFFGVLLNMLLNSPLPVYSLVPDLWFVLVYLFVSDHDYVFLCVVIRVVFGSLVTQSADDEILLRDVLYDSLILVDYSFINNGVGVDLLPIYVLRLVITLDAVNDARRKGDQGRAVSFINAFSTSNVPNFLIKWATFQAGSGALSKPIANTPQSIIKWLVDLEVKGLKVFGDYSSCIMERFAYDGVKNGHGNMIHSDADLFFFDKQSGREFMDTKGSEDEAVDEMETAGNNAFMAAAQSMKGVTDGMRKRKSCGYEDATAVKFVKYKVEDSSLKDYLSAANGISSGSEVENPQSDDEMEESN

SEQ ID NO: 8927 - protein, 327 aa, Zea mays
  VARIANT 218: note = Ancestral polymorphism is Q, Derived polymorphism is R
  VARIANT 157: note = Ancestral polymorphism is G, Derived polymorphism is S
  VARIANT 71: note = Ancestral polymorphism is C, Derived polymorphism is F
  VARIANT 56: note = Ancestral polymorphism is A, Derived polymorphism is P
MASASAPEVVVVFDFDRTIIDWDSDDWVITKLGAADAFQRLRPTMRWNPLMDRMMAELHARGKTPEDIRDCLRSAPLDTHVVSAVKTAAALGYARHNHTMPTTFSPAAAALAFGTDRPMFFDAGNGMAAAAPVCRCDLKVVSDANTFFIETVLAHHGVLGCFSEIVTNPASVDADGRLRISPFHDPASAPHGCSLCPDNMCKGKILGRIQATGSDKKRRRRFIYIGDGKGDYCPSLKLGEGDHVMARENYPLWHLICDNKQLLKAEVHPWNSGEELEKTLLKLAGEVISPPAQASQFDYSKCEMSNPASCPPSCAALITDQLLVRKY

SEQ ID NO: 8928 - protein, 530 aa, Zea mays
  VARIANT 26..530: note = Derived polymorphism lacks residues 26 to 530
  VARIANT 30: note = Ancestral polymorphism is C, Derived polymorphism is F
  VARIANT 36..530: note = Derived polymorphism lacks residues 36 to 530
  VARIANT 72..530: note = Derived polymorphism lacks residues 72 to 530
  VARIANT 121..530: note = Derived polymorphism lacks residues 121 to 530
  VARIANT 263: note = Ancestral polymorphism is Q, Derived polymorphism is L
MSRDSILVAELPSAYSRFSWQGLSPRDLLCSFCRLQRLPEPHFAVSRVSCDTLMSALSSKERGAPAGSAENQYTNDVRINKEKPDLFKCEVNIRSRKQEILLEYSAADTWSKESDAIQNSSLKVLIWFNNYFKKLTSKTGKLYLSESTADVKVHSNIFLQEFAMCLSVYGKNGGSDSAMCSAVGPFSMDTQKKHLESTAKLTHIEGPDSGVFPSHGSLTCISYTASLVTKDKAKTYLLESHNEFEFEIGTGVVSNQLESCVTQLSVNQTARFVAELPPRDLIMAASCEFSHDLSNVSSESCFLEFSVKVLQVTEPLEDRMEKALFSPPLSKQRVEFDVRHINELHGTTLVDFGCGSGSLLDSLLEHPTTLEKLVGVDISRKGLTRAAKVIEHVEEDQATLFGNIVLSSFRPTVLIVSTPNYEYNPILQGSAMPNKDDEADESTGPYKFRNHDRKFEWTRLQFQCWATGLAVKHSYSVEFSGVGGSGEELGYASQIAIFRRLVQGQEAMCLDKDGDQPYEVLWEWPNACVN

SEQ ID NO: 8929 - protein, 130 aa, Zea mays
  VARIANT 85: note = Ancestral polymorphism is R, Derived polymorphism is S
  VARIANT 48..130: note = Derived polymorphism lacks residues 48 to 130
  VARIANT 20: note = Ancestral polymorphism is G, Derived polymorphism is R
MKSFLLIHRNGSCVSFSFIGTVDAVYLLIRSSSPSVASRRQHEEREEQVEGEECSDCGGTGLYDRCKGECFVFKQLSKETTTRARKAAKNMATRYTSGLSTNGPTAKSAPPPACLYKMEGVLPTINTHVK

SEQ ID NO: 8930 - protein, 144 aa, Zea mays
  VARIANT 113..144: note = Derived polymorphism lacks residues 113 to 144
  VARIANT 80: note = Ancestral polymorphism is V, Derived polymorphism is I
  VARIANT 74: note = Ancestral polymorphism is G, Derived polymorphism is A
  VARIANT 73: note = Ancestral polymorphism is C, Derived polymorphism is Y
  VARIANT 71: note = Ancestral polymorphism is P, Derived polymorphism is S
  VARIANT 46: note = Ancestral polymorphism is R, Derived polymorphism is C
MGFVAPRFLLFVKCIINEVFLLIHRNGSCVSFSFIGTVDAACLLIRSSSPSIASRRQHEEREEQVEGEECPDCGGTGLYIRCKGECFVFKQLSKETATRHARPPRTWPPDTLQGYPPMDLLQKVLLHPRACIKWKGFYQQSTHM

SEQ ID NO: 8931 - protein, 304 aa, Zea mays
  VARIANT 40: note = Ancestral polymorphism is R, Derived polymorphism is Q
MSNRDEVSVFVKCLRLGAAEYLVKPLRTNELLNLWTHVWQRRRMLGLPKKNFFNDNFELVLSEPSDANTNSTTLLSDETDDRPKGNTNQETGTSKQLEYESNPLVAEPDQREKMEGVPGSALDASQKSSPRRVFSRPIKTNLRVAESSAFLAYVKSSTPATSSFDSELQRGGSRLDSLDNQGNCSSATDRSDTGTDVNIRNKEAFEMPAQYPMVWFSSSNMHMERSSEGHNDTSGTPPAYHFPFYYPGMVEHNMALSSAQDFQANINNAQAHTPQEGTFKICHYAGELFYMQHDSGPDWLIFIP

SEQ ID NO: 8932 - protein, 234 aa, Zea mays
  VARIANT 94: note = Ancestral polymorphism is G, Derived polymorphism is R
  VARIANT 89: note = Ancestral polymorphism is D, Derived polymorphism is N
  VARIANT 77..234: note = Derived polymorphism lacks residues 77 to 234
MQSPRPEEDRVRDGSATAPPPVLPATATTSTTTARTKRSASMPLSGASAGTGRDRDPSPAPAPAPAPGGRSRLRDEQLSQLRELFIRFDLDGDGSLTKLELAALLRSLGLRPAAGDEIHTLIAAMDADGNGTVEFDELSSSLAPLLLGPCRPAVAVDHAQLAEAFRAFDRDGNGFISAAELARSMALMGHPICYAELTDMMKEADTDGDGVISFQEFTAIMAKSAVDFLGLAAL

SEQ ID NO: 8933 - protein, 166 aa, Zea mays
  VARIANT 30: note = Ancestral polymorphism is E, Derived polymorphism is Q
MTTTAAGYGCCWAGIPPFALLPRILSTRRETPPPPPPRASLVASSSKLRALAPRLRVSNRPRRLIVSASSSGEANSDAAPSPTEAAIDIKLPRRSLLVQFTCNACGERTKRLINRVAYERGTVFLQCAGCQVYHKFVDNLGLVVEYDLREENELQGENAVDTSSED

SEQ ID NO: 8934 - protein, 259 aa, Zea mays
  VARIANT 62: note = Ancestral polymorphism is R, Derived polymorphism is Q
  VARIANT 11: note = Ancestral polymorphism is L, Derived polymorphism is F
MWRRAGAGPLLHHLAAAASAAAAGRCINGRPLPPMPTASWSPLFQHNLGISWGSASVGAPFRSLSNQSSGGGACWSCGATGAFLSCGSCGSVQPVDPAVDYFQIFGLKREYNITDNNLEGKYKDWQKKLHPDLVHSKSEKERGYAAEQSALVIDAYRTLSKPLSRALYLLKLEGIHVDEEKTINDPELLMEMMEIREAVSDASDSQTLEKIQSQIKAKLETWSDSFQEAFDRKDFDRAVEATQRMRYYERAVEETVKKL

SEQ ID NO: 8935 - protein, 636 aa, Zea mays
  VARIANT 2: note = Ancestral polymorphism is A, Derived polymorphism is V
  VARIANT 4: note = Ancestral polymorphism is G, Derived polymorphism is R
  VARIANT 359..636: note = Derived polymorphism lacks residues 359 to 636
MAMGVMWSLCLLVCSLIGAARSESRALQNAPAPPRVARALSAPSIAHDGRLVACSGKDLLGFEPNGSFAWIVPLGHTCNDSIGPVFQGEQVVQSNHVRVVQVYLVAEDKVIKVTPRNVHTAKPASEVFFSHNATSSGRSEEIIGLAVSGSYSSLFLTIRNRGLFAFSLRGELQWSAGPALDFFGYRLGCKRNVSGCYFDSAPVVDQCEGVLYISNTEGQLYSLYIDNRGVRWIQDLSSHGKVMTVAPGNSGCLYIVFPRKSIVVGINASTGNISWTQNTGPISNEKNLPTVDSNGWMSIGSLDGALYSISPDGEMRKFLGETANGSVIHVGPVLDCSGLSMYVAKTIAEGKSIQTTGDYTYVSVKKPSFILFTLLAPATGTIYWTGEYPGELSNLLSSSDLDDFTVDETVVLTLLSASRQKIASTCRQAKAKFVQADSGEPSYVLLLIFLLVVIVIEAVAISLCCIFWAKKRLQGNGLQKFLEKRHSLHSKRRILGKKISELEQKAAEDVSSNEALGKLGEMVKAKESVERKLSGSYSLGRDEPSLQQQGSLPLYHGKYSSHSFHSSQKESITVFNVLSDTSTSGDGTSSCSSDDSDYESCSGTSSGEMELDVWPSRSAEEAGHSNTANVEEESPT

SEQ ID NO: 8936 - protein, 782 aa, Zea mays
  VARIANT 441: note = Ancestral polymorphism is G, Derived polymorphism is R
  VARIANT 440: note = Ancestral polymorphism is A, Derived polymorphism is T
  VARIANT 305: note = Ancestral polymorphism is G, Derived polymorphism is D
MPVVTRSRLSAARGDGAGALPWGSASAAPALRHDAGAPREGVASKNHHHHHGLKEKLRALTQDYEQQKQKLAASQLRRSIRCLNAWEAINDENAEEEEDGGRVAKFRYDAFAQVPESAVLRENVAPPQARAPSNDGAVLARTTEPQAKENAVGRGANAMSCPIKKAVPALPVLPVPPARKLSLGGAVGGKLKAAGEVGAGTAEAAESRILVFVRLRPMSRKEKEAGSRSCVKIVNRKEVFLTESASENDYLRLKRGRDSHFCFDSVFPDSTTQAEVYSTSTADLVEGVLQGRNGTVFCYGATGAGKTYTMLGTMENPGVMVLAINDLFSKVTQKYHSIKLSYLEIYNETVRDLLSPGSPLNLREDKQGIVAAGLTQRSVYSTDEVMELLQKGNKNRTTEPTRVNETSSRSHAVLQVVVEYRSLDGVNVKRAGKLSLIDLAGSERALATDQRTQRSIEGANINRSLLALSSCINALVEGKKHIPYRNSKLTQLLKDSLGGACNTVMIANISPSNLSFGETQNTLHWADRAKEIKTKTQQTTVNEEVLDQPDSETMLVLELQKENRVLREQLAKQQQKLLTAEAQLLASKTSPQRSPAPSSHVSTPGSTQRKTRRSILAAGGGNYFSTLDSKRHAADNAQVRELQRKVSTLESEIEKMKKEHLLQLKRKDEFIRDLINRKDPNNNSEETATVDRRVVTRASVRKAQRDASAAVELKSPSRVFTSPAPTAKKRTFWDIGGNSPSVLAANGRKTRSHVATETPKKASSKLLQPGFARQTSTHQRFT

SEQ ID NO: 8937 - protein, 122 aa, Zea mays
  VARIANT 18: note = Ancestral polymorphism is R, Derived polymorphism is H
  VARIANT 19: note = Ancestral polymorphism is M, Derived polymorphism is V
MDILYQCKEVLKIQKFRRMVSYAGFYCFTSLITYAYTSNTTRAGMSRADQYYSSYPAGTELLTDTAKLYKAALGNCFEVDEWGPIEFSIMAKHFDRQGKPPYAYHAQYLAHLLSHGQLDGSG

SEQ ID NO: 8938 - protein, 124 aa, Zea mays
  VARIANT 1: note = Ancestral polymorphism is M, Derived polymorphism is T
  VARIANT 30: note = Ancestral polymorphism is H, Derived polymorphism is N
MTLPPAHLGRHHLQAQLRPPRVVWVPPLPHLCGARGYSYTRMARRIPIARPDGYSSSDGEAEDPDAGEAGEITEPVGEGAEGDNSEGSETEVEGFMLDLSSDNLFGDSDGDGDGDEEGTEEGGK

SEQ ID NO: 8939 - protein, 324 aa, Zea mays
  VARIANT 17: note = Ancestral polymorphism is V, Derived polymorphism is A
MAFHPATLFLLLVLAAVAPIPSNARHIITFAPSRAVNPASLAWDPTAQHFVVAGGGDAVLSVSDAGVTESIVSSGASCVAVDDRRRRLLVASPGSVSAFDLRSPRPHRLILSTPVADPAPPGGIAVDPHTGNAFLTVGARIYKLSVEGELATLASAPALGSVPLASLTAHVSRGFLLVGQPSSGSVLRVDMEDGATRTVSCALTPTAVAVRTDGAVAVGGAAGLRLVVSNDGWASCGVRDEAAPAPDGPVAAVAVRERRRVYALVGAAAMDGGNKWRIEEASWKSESEGEMVVVLVFVGVALTIFMFWRFQMRQLAGNMNKKIR

SEQ ID NO: 8940 - protein, 141 aa, Zea mays
  VARIANT 2: note = Ancestral polymorphism is L, Derived polymorphism is M
MLLPLQVAVVVTMLASPAGVLGIATDEDCRCFMCVCDLDPYPPPPEAPTHHSPPAQPQPQPVPSPPPPPPPPPAPALPAYYPPQPYGYPWPTTYGPPAGEMYPRDDRRRESKSGAPPRHGGCGRASLALASTSLALLLWLE

SEQ ID NO: 8941 - protein, 159 aa, Zea mays
  VARIANT 4: note = Ancestral polymorphism is G, Derived polymorphism is E
  VARIANT 56: note = Ancestral polymorphism is R, Derived polymorphism is C
  VARIANT 79: note = Ancestral polymorphism is T, Derived polymorphism is I
MEEGFIGARRRSCTGYQRLRAPPPTTPGRGTCRLGRRAVLGSGGWRFVRLRRRRRRRASAPRWSSPLQLLSRILDTYITSMLSQPPPNILKPLNMPPPKLRRDASPGTGSSRRRDAGGSGRGVLLNICVAEVLLRRTTSEVRRSPLQPTKDARRRSVRA

SEQ ID NO: 8942 - protein, 160 aa, Zea mays
  VARIANT 7: note = Ancestral polymorphism is L, Derived polymorphism is I
  VARIANT 10: note = Ancestral polymorphism is M, Derived polymorphism is V
  VARIANT 15: note = Ancestral polymorphism is R, Derived polymorphism is W
  VARIANT 17: note = Ancestral polymorphism is T, Derived polymorphism is S
  VARIANT 30: note = Ancestral polymorphism is P, Derived polymorphism is R
  VARIANT 54: note = Ancestral polymorphism is V, Derived polymorphism is I
  VARIANT 69: note = Ancestral polymorphism is V, Derived polymorphism is I
  VARIANT 111: note = Ancestral polymorphism is N, Derived polymorphism is I
MMDESFLDRMVSQLRSTCKYYTGYPKDLGRSRIIPFTSERQFVQLLHEGRPVVVAFTIKCTYTQHLDKVLEEAAAKFYPHIKFVRVECPKYPGFCLTRQRNEYPFVEVFYNPEQAASPGKSVDPNITKYSVKVLPFNYDQSVYGFREYFKKHGFKYSETN

SEQ ID NO: 8943 - protein, 164 aa, Zea mays
  VARIANT 81: note = Ancestral polymorphism is Y, Derived polymorphism is S
  VARIANT 71: note = Ancestral polymorphism is V, Derived polymorphism is A
  VARIANT 49: note = Ancestral polymorphism is G, Derived polymorphism is A
  VARIANT 27: note = Ancestral polymorphism is A, Derived polymorphism is S
MPLYDCMLLLKTTVTREVLAELVTRVARRACQRNGVVTDVKSFGKVSLAYGIRKLDGRHFQGHLMQMTMMVPPSFPQELHYLNKEDRLLRWLVVKHRDTVYGLEFLNADGGRDELRSFSLGHTKGDYDIEIDSDDEDYDDSDDEEYAIEEEEEEEEAAKDEEKK

SEQ ID NO: 8944 - protein, 252 aa, Zea mays
  VARIANT 173: note = Ancestral polymorphism is R, Derived polymorphism is G
MAVAETSSGGGGEVHISIPPMAATTTPDGIRESSAAPSPLRSRGSTPPRQLKAAPAPAVADTPATAIDKTLASVANLAKLLPTGTALAFQSLSPSFTNRGACLPSNRYLTAALLYLCLVSCVFFSFTDSFVGTDGKLYYGLATVKGFLVFNYTGDEDDEGDAERRRQVFKDLRRLRIRWVDYVHAGFSAVVFLTVAFGTAAVQSCFFPNAGENVNQMLINLPLGAGFFSTMVFLVFPTTRKGIDYTGHFTNV

SEQ ID NO: 8945 - protein, 121 aa, Zea mays
  VARIANT 3..121: note = Derived polymorphism lacks residues 3 to 121
  VARIANT 38: note = Ancestral polymorphism is V, Derived polymorphism is I
  VARIANT 48: note = Ancestral polymorphism is L, Derived polymorphism is I
  VARIANT 51..121: note = Derived polymorphism lacks residues 51 to 121
  VARIANT 61: note = Ancestral polymorphism is H, Derived polymorphism is L
  VARIANT 77: note = Ancestral polymorphism is E, Derived polymorphism is K
  VARIANT 94..121: note = Derived polymorphism lacks residues 94 to 121
  VARIANT 95..121: note = Derived polymorphism lacks residues 95 to 121
  VARIANT 109: note = Ancestral polymorphism is G, Derived polymorphism is E
MNLRSLRSLVMTSMATWLACPLCLQTGKKGHFMKGDAVIVIKGDLKNLEGWVEKVEDETVHIRPKISDLSKTLAFNEKELCKYFKPGDHVKVISGVQEGATGMVVKVEGHVLIILSDTTKE

SEQ ID NO: 8946 - protein, 300 aa, Zea mays
  VARIANT 186..300: note = Derived polymorphism lacks residues 186 to 300
  VARIANT 166..300: note = Derived polymorphism lacks residues 166 to 300
  VARIANT 137..300: note = Derived polymorphism lacks residues 137 to 300
  VARIANT 116..300: note = Derived polymorphism lacks residues 116 to 300
  VARIANT 27: note = Ancestral polymorphism is R, Derived polymorphism is H
MARSTPAPLGARKPCLATVQSRHPPGRRRRGRVGLSVAGAHGAGSFWRRRQRPLHACCHPRLGCHDVDILAILAHALAASVDRFIIRKGVLPRLLEEILSTRIMVKQAMKKLSPSQQVLHRSLQTALFSVAVEHSKQQYHLSTSIFCGKLGLCMVILTVSYPISKEKSQGLDPNMRDIESKLRQIEEDPEGAGKPACVMVQAAATEDSSCAKELQKDGTSNLNFELELDSLSRDVVIEKAKIENGWATKFFEDAARGRAPTLMFMTFVDNFPACRQLEALPFLDPLKHFRGALFYYQRLA

SEQ ID NO: 8947 - protein, 178 aa, Zea mays
  VARIANT 69: note = Ancestral polymorphism is S, Derived polymorphism is I
  VARIANT 112: note = Ancestral polymorphism is N, Derived polymorphism is D
  VARIANT 117: note = Ancestral polymorphism is L, Derived polymorphism is H
  VARIANT 118: note = Ancestral polymorphism is S, Derived polymorphism is L
  VARIANT 173..178: note = Derived polymorphism lacks residues 173 to 178
MGAGDGEVAASKDKASGGGAERTSLDGVRDKNVMQLKKLNTALFPVRYNEKYYQDAIASKDFSKLAYFSDICVGAIACRLEKKEGGAVRVYIMTLGVLAPYRGLGIGTKLLNHVFDLSAKQNISEIYLHVQTNNDDAIAFYKKFGFEITQTIHNYYMNITPPDCYVLMKFIGQAATKK

SEQ ID NO: 8948 - protein, 572 aa, Zea mays
  VARIANT 167..572: note = Derived polymorphism lacks residues 167 to 572
  VARIANT 110..572: note = Derived polymorphism lacks residues 110 to 572
MRLASYAFLRRAAAMSSPSSYSRTGYPRPRRGYSGRPSPPPPPPPPDAASEIVSRDYHLSAVHAANESLRRGGGGDIRWPPPPYRQGPHPHQPHYGYGYGYGYGYGQTWQPGPSYGFVPYNYGHPQQQPPGPQYGYGAPNPYVHGHLQPQPHVRGAASPGFRPGAPQLTPRLADYLRRWRFAKQRPPHQAGRFIILSYNILADYLAQEHRFLYEKISPFILDWNWRKDKLLFEFGLWSPDILCLQEVDKFTDLEQEMASQGYNGTWKIRTGDAADGCAIFWRTTRFQLRYEEDIEFTKLGLRDNVAQLCVLESVGLQYVQTDSVSLSTSSNHPQQAKQVIICNIHVLYNPKRGDIKLGQVRTLLDKANALSKMWNDAPVIVCGDFNSTPKSPLYNFMLGQKLNLSGLARNTISGQQIGGSSQGLYTGPNISGCTSKLDKQGLSNLLEDPVKGACTSDADEECKPADKSSEGSPGRIKTESGEGHDITDAPSAPAICTDILRSGSCKIIDRIQLLSSDNLAGDVISEELTDQLFTVPQDKPQEKENTIDSMLSAEENCAANEPESSHFNGSNF

SEQ ID NO: 8949 - protein, 154 aa, Zea mays
  VARIANT 9: note = Ancestral polymorphism is S, Derived polymorphism is N
  VARIANT 13: note = Ancestral polymorphism is S, Derived polymorphism is C
  VARIANT 28: note = Ancestral polymorphism is S, Derived polymorphism is L
  VARIANT 77: note = Ancestral polymorphism is L, Derived polymorphism is S
  VARIANT 78: note = Ancestral polymorphism is R, Derived polymorphism is C
  VARIANT 91: note = Ancestral polymorphism is A, Derived polymorphism is S
  VARIANT 111: note = Ancestral polymorphism is G, Derived polymorphism is E
  VARIANT 145..154: note = Derived polymorphism lacks residues 145 to 154
MCDVRVTDSPVSSQLSPIVCQVVGAPLSEELNTCSAVEGSDPSKEKNSLAGQKDGGGLLEVYIKWESGNLIKGLKLLCNSCLSDLRKLIEAHFKEVGSKQQQQQFIFLLLGVCHSALSMSCFHPSALCYVLLITMALIYDHVLSWGNGTHVTID

SEQ ID NO: 8950 - protein, 121 aa, Zea mays
  VARIANT 114..121: note = Derived polymorphism lacks residues 114 to 121
  VARIANT 82: note = Ancestral polymorphism is E, Derived polymorphism is V
  VARIANT 47..121: note = Derived polymorphism lacks residues 47 to 121
  VARIANT 42: note = Ancestral polymorphism is D, Derived polymorphism is G
  VARIANT 40: note = Ancestral polymorphism is R, Derived polymorphism is C
  VARIANT 38: note = Ancestral polymorphism is S, Derived polymorphism is F
  VARIANT 37: note = Ancestral polymorphism is E, Derived polymorphism is K
  VARIANT 23: note = Ancestral polymorphism is R, Derived polymorphism is C
  VARIANT 21: note = Ancestral polymorphism is A, Derived polymorphism is T
MVAETKPAAGSGVAGEMEVEAYRRLFPVAFLERHLSESVRIDSRRLREARPTTVALGAVSSVHGSALARLGDTAMLASVKLEVMSPPAEHPDEGSIAVEFHMPPICSPLVRPGRPRHLQGP

SEQ ID NO: 8951 - protein, 325 aa, Zea mays
  VARIANT 5: note = Ancestral polymorphism is G, Derived polymorphism is R
MALARAAALPLLLLPFLAVTTCLDVPSHVLCEATGSTDEIETIANFYEGAIGLVAKANGLESVLLATSWILSQMIVTVFVWSQKALHAFHCTHISIVANQLILIPSPWHKTGTPKVTNKCGHCKSKLDFGKEFICCSDCSDPTIMDKNSKLGYCKSGADLTMQLKLQETFRWVAGPWMTCSSPCDGGIRYRDVACYGNLDDDTIKHYPVDDASCSADKMPARQEACNQQSCSDPEMTQSVNPKESGMSGWLVVLVVILGLSAAAGIAFTSYTYYVRSLTHYRKKYWVFGNLVKAYALALENLWDEWFCLCHDGSLFLRIERNDFL

SEQ ID NO: 8952 - protein, 381 aa, Zea mays
  VARIANT 72: note = Ancestral polymorphism is Q, Derived polymorphism is H
  VARIANT 146..381: note = Derived polymorphism lacks residues 146 to 381
  VARIANT 284: note = Ancestral polymorphism is Y, Derived polymorphism is C
  VARIANT 324..381: note = Derived polymorphism lacks residues 324 to 381
MRRVALLLVAAVCALAAPAAAVVTDGLLPNGNFEDGPPKSALVNGTVVSGAHAIPRWETSGFVEYIESGHKQGDMLLVVPQGAHAVRLGNEASIRQRLAVARGAYYAITFSAARTCAQAERQRLNVSVSPEWGVLPMQTIYGSNGWDSYAWAFKAKMDAVTLVIHNPGVEEDPACGPLIDGVAIRALYPPALARRAGGNNLLKNGGFEEGPYFLPGASWGVLVPPNIEDDHSPLPAWMIVSSKAVKYVDAAHFAVPQGARAVELVGGRESALVQEVRTVPGWTYRLAFAVGDSGDGCAGSMAAEAYAARATVKVPYQSRGTGGYKRAVLDFTAIANRTRVVFQSTFYHMKPDGTLCGPLVDDASLVGLRKKKPARRLMQLL

SEQ ID NO: 8953 - protein, 118 aa, Zea mays
  VARIANT 89..118: note = Derived polymorphism lacks residues 89 to 118
  VARIANT 53: note = Ancestral polymorphism is R, Derived polymorphism is G
MHRSSSYYLQQSSSSSSSVSSSSLAATGGAASPGPSSTAGVMDVDQLPTYDPRSDVAKKEALDASRADLARALVHLIPVGVLLCGLLLWSFSDTDFPAASALRLLGQQQLHNQLEFRN

SEQ ID NO: 8954 - protein, 580 aa, Zea mays
  VARIANT 306: note = Ancestral polymorphism is A, Derived polymorphism is G
  VARIANT 325: note = Ancestral polymorphism is F, Derived polymorphism is L
MAMDDLAGASSSSSMAAAASSDPSHGWQTVSYPKRNRKQAQPPRTTAPDLALQSNGKPGGVFDAVEKRSQERHRALQQQLASRAADLDDARIAVATGAAYSDDDDSDEAAAPRQEGEVKKPKKPKVKKPKVTVAEAAVLIDAENLAAHLFEISASYENQQDIQLMRFADYFGRAFAAVSASQFPWAKMFKESTVSKMVDIPLCHISEAVIKTVSDWISQRSSDALGDFVLWCIDSIMSELSGPSAGPKGSKKVAQQSPRAQVAIFVVLAMTLRRKPDVLVNVMPKIMGNNKYLGQEKLPIIVWVIAQASQGDLVSGMFCWAHSLFPTLCAKSSGNPLARDLVLQLLERILSVTKARSILLNGAVRKGERLVPPVSFDLFMRATFPVSNARVKATERFEAAYPIIKELALAGPPGSKTVKQASQQLLPLCAKAMQENNAELTREAVDVFIWCLTQNAESYKQWERIYLENIEASVAVLSKVVIDWRDVSPKLSSEALKATVKNFKAKNEAALESTTDAGKQASIKEADKHCKAIFGKLTRGATCLKSSLVVIALAVAASYVLSPGMDLEKVQAMVSSHLSF

SEQ ID NO: 8955 - protein, 767 aa, Zea mays
  VARIANT 418..767: note = Derived polymorphism lacks residues 418 to 767
MRPTRLLAAASSTFRRRRLYTAAAVSTVAPSSAAPPPQSAVQPLSTQFARPSPARGHGVADDLASSLRALLASSPTVQHAFHLLRSAALDTRLPPNELVDAVLSTVDAGSPAAVTLLSHVLTCLSRAASDCAAAAAAYSRMVTRGVVPDAKSRTDLLVTTARGASAADALTLFDEMRGKGCYADAKMYDVVIRACVRGGMHCDAVRLFDEMAGAGVKPDERVYAITISGLCKLRDADRALQVLGKMREAGFEPWELTYSSVVDVLVKVGRMDEALRLKDQMLLATGKKMDVVLATMLMHGYCLHGEVGKALDLFDEVVSDGVTPTNVTYGVLIKGCDAEGMSDETYKLCRQMIEQGLLLSTYEFNLVIKGLLRDKRWKDAIGLLELVVDTGVPDVFTYGCLIHWLCKHQKLHEAVNLWDKMKEAGVKPSIVTYHSLLLGYCEKGRMDEALKLYSEMPDKGFPPNEVTYTTLMKGYIKKKAFDNAYALLNEMRQNGVSCGDYTYNILINGLYMVNRVCEVDEMLKRFLSEGFVPTTMTYNSIINGFVKAGMMGSAFGMYRQMRKKVKLLIYVRRDGIQPDIAAYNAFIDTFCKQGNMSRALHFLVLLLKDGLTPDVTVYNSFVTGYKNLKMMAEASKFYYSMIKQRVVADTEIYTTLIDGFSKVGNVAFALELYSEMMANHVIPDDKTFTALTHGLCRSGDIDGAKRLLDDMRRLDVSPNIVTYNMLINACVRDGKLQEAFQLHDEMLSSGVVPDDTTYDILPRTNNS

SEQ ID NO: 8956 - protein, 226 aa, Zea mays
  VARIANT 102: note = Ancestral polymorphism is I, Derived polymorphism is T
  VARIANT 137: note = Ancestral polymorphism is V, Derived polymorphism is D
MWRRLHTLAPALRRATAAAAGAPAASASSAARAAPLSSAAAAFRRTSPLLSGDKPASVEDVMPIATGLEREELEAELKGKKRFDMDPLVGPFGTKGSSFIGIAMKRLGMYSSDVYLGSVGHTDIWFDKYCMVIRVLDSVDTVNGYNVLHSGNRVLDEEPSVVESYYNKRIVGCPGGEGEDEHDVVWFWLKKDEPHECPVCSQYFVLKVIGDGGDPDGHDDEDDGHH

SEQ ID NO: 8957 - protein, 311 aa, Zea mays
  VARIANT 238: note = Ancestral polymorphism is F, Derived polymorphism is S
MPKDRSSRVSSYESRRAGASPYFSSSHGQSSSCRRSEESCGAAAAAAAKQAAEWEDVRCPVCMDHPHNAVLLVCSSHEKGCRPFMCDTSSRHSNCYDQYRKASKDSRTECSECQQQVQLSCPLCRGPVSDCIKDYSARRFMNTKVRSCTTESCEFRGAYQELRKHARVEHPTGRPMEVDPERQRDWRRMEQQRDLGDLMSMLRSGFNSNIEDDSGGLGDTEEGGEEAEMTPASITMVFIMPSRGSIMQYLSERSRTIILVSRRRASSSSGGDAEATAPDSEEGDDPMPSAEASAGSQHSSEQEEADGDPAQ

SEQ ID NO: 8958 - protein, 136 aa, Zea mays
  VARIANT 127: note = Ancestral polymorphism is G, Derived polymorphism is V
  VARIANT 124: note = Ancestral polymorphism is A, Derived polymorphism is V
  VARIANT 122: note = Ancestral polymorphism is M, Derived polymorphism is I
  VARIANT 121: note = Ancestral polymorphism is A, Derived polymorphism is P
  VARIANT 110: note = Ancestral polymorphism is Y, Derived polymorphism is F
  VARIANT 109: note = Ancestral polymorphism is W, Derived polymorphism is L
  VARIANT 104: note = Ancestral polymorphism is P, Derived polymorphism is S
  VARIANT 97: note = Ancestral polymorphism is P, Derived polymorphism is T
  VARIANT 94: note = Ancestral polymorphism is G, Derived polymorphism is R
  VARIANT 57: note = Ancestral polymorphism is P, Derived polymorphism is L
  VARIANT 55: note = Ancestral polymorphism is H, Derived polymorphism is Y
  VARIANT 52: note = Ancestral polymorphism is R, Derived polymorphism is H
  VARIANT 51: note = Ancestral polymorphism is I, Derived polymorphism is T
  VARIANT 5: note = Ancestral polymorphism is S, Derived polymorphism is Y
MALASTSATAPAVVLKTRSSAPGARSPMPSRPSPRHTLLAIAVAAAKKLWTRRVHQPALARQIVSLCRDEEGGWSSKLAVTPPPRLCRLPGDFGFDPLGLGKDPAFLKWYREAELIHGRWAMAAVLGIFMGQPRAE

SEQ ID NO: 8959 - protein, 289 aa, Zea mays
  VARIANT 23..289: note = Derived polymorphism lacks residues 23 to 289
  VARIANT 25: note = Ancestral polymorphism is A, Derived polymorphism is T
  VARIANT 34: note = Ancestral polymorphism is P, Derived polymorphism is S
  VARIANT 39: note = Ancestral polymorphism is A, Derived polymorphism is S
  VARIANT 55: note = Ancestral polymorphism is G, Derived polymorphism is E
  VARIANT 72: note = Ancestral polymorphism is D, Derived polymorphism is Y
MATGGGNEQPPAEAEPLELVLFQVAECYVYLIPPRKTSASYRADEWNVNKWAWEGALKVVSKGEECIIKLEDKKTGELYARAFLREGEPHPVEPVIDSSRYFVLRVEENIDGRQRHAFIGLGFRERPEAYDFQAALHDHMKYLNKKKAAEEMIQHYEKQSSVDYSLKEGETLVLQLKNKETGTKTKSTFFEQGLNKLSVNEKTSAKEAPVSLKLPPPPPSPVSPTDSGVAASPFKAEFPSQEQPPAEPVSRTSALPSKGEPAPELPAAAEKMKEQESVDEDFGDFQAAG

SEQ ID NO: 8960 - protein, 192 aa, Zea mays
  VARIANT 126: note = Ancestral polymorphism is G, Derived polymorphism is R
  VARIANT 49: note = Ancestral polymorphism is R, Derived polymorphism is G
MLETSLAVRKGSGSSSRSADRKGSKEFEQEQPVQKAPSVVRPATSYHSGRNGEGAAGLAATGGTKSKADEWEKAKLGRVTEEYEKMMETIAEWETEKKCTINSVFPSSKGYHVNVDYLFVLTLTAGLEGYHVNVDGQHVTSFPYRTGFVLEDATGLSLNGDLHGRNEVNVELKKEAEFFGDIVIVPFMDNDI

SEQ ID NO: 8961 - protein, 240 aa, Zea mays
  VARIANT 113..240: note = Derived polymorphism lacks residues 113 to 240
MPKTKVHPNAAAAEPVLTVSTACARADPGEEEPPTVLTVWRKSLLFNCDGFTVYDARGDLAFRVDSYDATGRRRAEVVLMDGAGTPLLTVRRKRRLGVLAEHWVIYDGDAAAEAKETPSSRISRPLLSVRRHRASASASKAKAKALAHVTPLPASSSSLSGYHRASAEASYVMEGSYGRRACVVRDRAHGDAVVAEVSRKEAAVGDDVFRLVADPRLGATLAMGLVVALDEMFARGRSTN

SEQ ID NO: 8962 - protein, 428 aa, Zea mays
  VARIANT 54: note = Ancestral polymorphism is G, Derived polymorphism is V
MAAAPTTVTKSPPSLVPPAGPTPGGSLPLSSIDKTAAVRVSVDFIQVFPAPTSGKEDRSPSSTIAAMREGFAKALVPYYPVAGRIAEPVPGEPEIECTGEGVWFVEAEASCSLEEARNLERPLCIPKEELLPRPPAGVRVEDTLLLAQVTKFTCGGFAVGICFSHLVFDGQGAAQFLKAVGEMARGLPEPSIKPIWARDAIPNPPKPPLGPPPSFTAFNFEKSVLEISPDSIKNVKDQVASETNQKCSTFDVVTAIIFKCRALAVDFAPDAEVRLGFAASTRHLLSNVLPSVEGYYGNCVYPGGLTKTSQEVKEASLVEIVTVIREAKEALSSRFLDWLSGGAKENHYNVSLDYGTLVVTDWSHVGFNEVDYGFGEPSYVFTLNDDVNIVPSVVYLKPPKPKQGIRLVLQCVEGHHSAVFGEELQKHA

SEQ ID NO: 8963 - protein, 609 aa, Zea mays
  VARIANT 379..609: note = Derived polymorphism lacks residues 379 to 609
MEEATVMSQLGRSKDSGGGRRRQRYRIETRALSYVLPPRALLVPWSSATKGKEERLLLRGVTCEAPPGELLAVVGPSGAGKTTLLSVLAGSADPARVVAGEVLVNGVPMDAAGFRRVSGYVPQDDALFPALTVEESLVYSARLRLRLRGGGGGGTPSGAEHRARELMAELGLAHVAASRVADVSGGERRRVSIGMDLVHDPAVLLLDEPTSGLDSGSALHIVKMLRDMAAAHAKTVVLTIHQPGFRILELIDRVVLLADGAVRHHGSLDFLQSRLIATGHAIPAHVNVLEYAMETIDSLKPDVAVATAVTTITAATPANRQDGPRAGYANSPAAEVRILAGRFVKTVLRTPQLFAARMAQSVLVGAFLGSIFLGTTDLQSRLGFFAFNLTYLLTSTTEALPVFLHERRILERETSRGAYRVSSYVASNAAVFLPFLLAAAVLYAAPVYWLVGLAREPAAFAYFALVVWLVMLTANSFVACLSALAPNYIVGNSIVAGLIGCFFLFSGYFVASKNIPRYWVFMHYASLFKYPFEALVVNEYGGARGARECLASAGGAGGLCVLDGAGLLRQQGMREGMRWSNLGVMLGFVVGYRVLCFVILSFRCHRTGR

SEQ ID NO: 8964 - protein, 419 aa, Zea mays
  VARIANT 13: note = Ancestral polymorphism is A, Derived polymorphism is V
  VARIANT 37..419: note = Derived polymorphism lacks residues 37 to 419
  VARIANT 40: note = Ancestral polymorphism is G, Derived polymorphism is R
MAVLIQLKAFLRVHNQINRDAYDRWSEASPSPCGSWQGVGCDADGRVSSLDLSSSSISVPLFGNANATRSQIRSRSSSFLAAISLHLRALSPAPASAPPRRAVVRNPHSVSLAASSSPAPGGAGARKRTAADSARRLTAAISTSGSAARMDRTRAAQPPHIMPLTSSNAVVALAAPSPAAASSTDDGSVVARGRSAAMSMFNRIFGKPKEQANSSALATLDKLNETLDMLEKKEKVLDKKAAAELERAKEFSKAKNKRAAIQSLKRKKLYEQQIEQLGNFQLRIHDQMIMLEAAKATTETVDALRTGAAAMKAMQKATNIDDVDKTMDEINEQTENMKQIQDALSTPLGASADFDEDELEAELEELEGAELESQLLEPVAALPVHPVHVPGNKQPARPAPQKATAEDDELAALQAEMAL

SEQ ID NO: 8965 - protein, 257 aa, Zea mays
  VARIANT 157..257: note = Derived polymorphism lacks residues 157 to 257
  VARIANT 149..257: note = Derived polymorphism lacks residues 149 to 257
MLGLLDIPGALIVVAFEFLLDGIMFTLIAFYKCPVMLFKGWKRLIQDMIGREGPFLETACVPFVGLAILLWPFAIVGSVLASVLSSVPLGAYAVVVAYQESSLILGIAYVFSAVSIFDEYTNDVLDMAPDLKIVRAKMSLHTDTVSIIQTILIQQGEARRERPPSRVTSFKNNIDDFNPFKLQGITKSISRYPTSKSRFDVLVKALLSELERTMGQSGNGSQSQTHRLRNSVAWMLSQKSMGKTANIREKRKRRNYL

SEQ ID NO: 8966 - protein, 713 aa, Zea mays
  VARIANT 50..713: note = Derived polymorphism lacks residues 50 to 713
MAFFFANPSSLSQSPPNRLASVALPTPLSPPKTPLALPCPRARARASTPSARVSVRAGGFLAKNCRAGRGIEEESVGGGGGDDDGFFWPEIPGQGNMKYVLVTGGVVSGLGKGVTASSIGVVLKACGFRITSIKIDPYLNTDAGTMSPFEHGEVFVLDDGGEVDLDLGNYERFLDIKLTRDNNITTGKIYQSVIDKERKGEYLGKTVQVVPHITNAIQEWIERVAMIPVDGMEGPADVCVIELGGTIGDIESMPFIEALGQFSYRVGPGNFCLVHVSLVPVLNVVGEQKTKPTQHSVRGLRGLGLTPNILACRSTKELEDSVKEKLSQFCHVPAANIITLYDVSNIWRIPLLLCDQKAHEAILKVLNLERVDSIAREPKLDEWVARAAIFDTLHDTVRIAMVGKYTGLSDSYLSVLKALLHASVDCRRKLVVDWVASTDLEDSTAIEVWHSSLLFSVLSLEANQEFSLQGADGILVPGGFGDRGVEGKILAAKYAREKNVPYLGICLGMQIAVVEYARHVMNFTDANSTEFDPNTKTPCVIFMPEGSKTHMGATMRLGSRRTFFKIADCKSSKLYGNVTYVDERHRHRYEVNPDMVPEFEKAGLQFVGKDDTGRRMEMIEIPNHRYFVGAQFHPEFKSRPSKPSPLFVGLIAAASGQLDRVLQDRCNGHVGSAKHVLSNGSYTSAVHQNGNPKKLTNGLSNGTYYANGNGVHA

SEQ ID NO: 8967 - protein, 231 aa, Zea mays
  VARIANT 48: note = Ancestral polymorphism is P, Derived polymorphism is L
  VARIANT 11: note = Ancestral polymorphism is P, Derived polymorphism is L
MLPRLPIRLAPPLAGVLRGICATALPQSKPPPQPLSPSDLDAISALLPRLLYAGHVPAAGRLLSAALLLPGSQDGLPLDSLAAHLASLPTLSAAFALLTALRHHPARPSPLLLASPLLGSLLSLRRARDASSVLRWLCRPDSPRRPDAATYADAVEGLCRLEDPRGALAALREMATDGLQATRELREAVRDAMLQDARIEEAWALEQAMRQPEETGKLVELIDKLLSEWEP

SEQ ID NO: 8968 - protein, 624 aa, Zea mays
  VARIANT 195: note = Ancestral polymorphism is R, Derived polymorphism is L
MAAATFSAAGRRLLSTAAAAAEKTELPVPIARLRQLARAGRLDDIDATLAPLFPSHPVAALSALSTLGLPDRASALLGTMTSPNTAHLNAVLGPLLRRRRLAGLVPSILAAHASVPRDAVTDSILAKSLCLTSGADSALHLLRKPSSGAPPSLQLFTTIIDSFYKQRLPHRAEEMWRAMVQDHGIAPDTAAYNALLTYKSTNGTVDEVKEVIRVMREEASLRPDVGSYNALMRAMARHKRLDEAVEVYRSLEAGKKADVVPDCATYSCVVGALCGAGRWSEAEDVFYAGVKRRKVADLGTVRVLVRGLKDAGKGRAARRVVVGLCKKFPEMFDGPWRELEVAAGLNSSGKEDGDVEDGADEKLAMTRATVAVVSHCNTWLVSGLVSHGPQLGDGYKSSIREMGRGEEKNRVLSPSVAGFRPKADSACDTDNLSAEPVFDDVVFEDIETNFDDLAELDKGPVFDTDSITDHITVSVTWSLSVFDTEPVHDVVLAVFNQGNDGSSTAHTGVLNGHPAFDVELVFDSIFNTSAPFMCLTNCLSYIDDMEGPIFDKEAVVEAIQEESGRDYYTAHGENAMFIARTYYHTISALRHLCSNSGGISSVSVKDTIHMIGCSHRFILDYCVH

SEQ ID NO: 8969 - protein, 337 aa, Zea mays
  VARIANT 288..337: note = Derived polymorphism lacks residues 288 to 337
  VARIANT 257: note = Ancestral polymorphism is S, Derived polymorphism is R
  VARIANT 249..337: note = Derived polymorphism lacks residues 249 to 337
  VARIANT 199..337: note = Derived polymorphism lacks residues 199 to 337
MPAAAYPARHHQWCPSFPGTRNPPAPREPPAGYPPPPRPRQLRARRQLRASAAVMPRDEGRTGETLGKPLLPALQWGRPQLCHAPAPSETPTTTQDSRFPSTSVIFPAKLTTPPFYLGVLVLVWTLYEFDDLESIIDRTLKRDFDTEEALWLLKIGLVCIPDSPKIKPSMSMVAKMLQATIKFKLYGRVWMAASHATAWQANDPSHTTGIGNRTLIKSIEVQEADKLRRIVLDAPSTGHTLKLLSVSDWIEMFLTLSIKVASNNSGLENFRQFHHILAPPSSDPGGNWSRCKSDPGGCSATQIATLQGLRSGMLTSLRQSESKPKAGVFINSCFAHC

SEQ ID NO: 8970 - protein, 503 aa, Zea mays
  VARIANT 210: note = Ancestral polymorphism is V, Derived polymorphism is D
MVADRLRLALLLSACLCSAWARPRLEPTIRLPSERAAADDAVGTRWAVLIAGSNGYYNYRHQADICHAYQIMKKGGLKDENIVVFMYDDIAHSPENPRPGVIINHPQGGDVYAGVPKDYTGREVNVDNFFAVLLGNKTALRGGSGKVVDSGPNDHIFVFYSDHGGPGVLGMPTYPYLYGDDLVDVLKKKHAAGTYKSLVSLVCSVLLFNVVICIVKQGLEVFYLEACESGSIFEGLLPNDINVYATTASNAEESSWGTYCPGEFPSPPPEYDTCLGDLYSVAWMEDSDFHNLRTESLKQQYNLVKDRTAVQDTFSYGSHVMQYGSLELNVKHLFSYIGTNPANDDNTFIEDNSLPSFSKAVNQRDADLVYFWQKYRKLADSSPEKNEARKELLEVMAHRSHVDSSVELIGSLLFGSEDGPRVLKAVRAAGEPLVDDWSCLKSTVRTFEAQCGSLAQYGMKHMRSFANICNAGILPEAVSKVAAQACTSIPSNPWSSIHKGFSA

SEQ ID NO: 8971 - protein, 642 aa, Zea mays
  VARIANT 357..642: note = Derived polymorphism lacks residues 357 to 642
MELSPLPMLAASRFLSLSPLLAPTCPQRTAPSVRVATQTLEAPEAPKPPRPSPRRSAVAEVKGALDPIAALNRFEEVLQTQDCNIILRHCGDIRRWDDLSKVFEWMQEREMTNAASYSSYFKYLGLSRDPARVLRVYGAIKDRTLRVHVSVCNSVLGCLVKNGRLDSSFKLYDEMIREGLSPDPFTYSTLLAGCMKLKQGYTKAMGLINEMKSRGLQMDIVIYGTLLAICASHNYCEEAEVYFQKMKDEGHSPNLFHYSSLLNAYSENSDYGKAELLMKDLRSSGLTPNKVMLTTLLKVYSKGGLFEKAKGLLTELEASGFAQDEMPYCILIDGLVKGGKIQEANILFNEMKEKGVKSDGYAFSIMISALHRGGHHQESKQLAKEFESENASYDLVMLNTSLRTYCSTNDMESVMRMLKKMDESNISPDNITFNTLIRYFCNAKVCHLAYKTVEDMHAKGHQLNEELCSHVMVQLGKAGFPSEAFSVYNMLRYSKRTVHKSLHEKVLGILVPAELLKAAYIVVKDNADLISPSSLEKFAKSFMVSGNINLINDVMKALNRSGWRISQDIFGRAIKRYIQKPDKKQLLLCLLDWMIGQGYSVDSSSRNLLLKNAQLFGEKQVIAEILSKQQIASRTIGLRHKK

SEQ ID NO: 8972 - protein, 222 aa, Zea mays
  VARIANT 55: note = Ancestral polymorphism is G, Derived polymorphism is V
MACLHDHSCEDHNCAADWSLYNHIDVPKVVALNESVPGSVKSVFKPWEQRLDTSGGFLESNEGDPELLIFIPFTSDVKIKSISVVGGADGTSPSRMRAFINREGIDFSDAQNMQPVQEWELAENLQGALEYQTRYSRFQGVANLTLHFSDNFGGDTTKIYYIGLRGEATQKKQWNAILILIASCCLSQNKRDVVATIVYEVMPNPSDHKTKSETGGGFSHVE

SEQ ID NO: 8973 - protein, 308 aa, Zea mays
  VARIANT 58: note = Ancestral polymorphism is S, Derived polymorphism is Y
  VARIANT 186: note = Ancestral polymorphism is D, Derived polymorphism is H
  VARIANT 189..308: note = Derived polymorphism lacks residues 189 to 308
  VARIANT 247..308: note = Derived polymorphism lacks residues 247 to 308
MEAAATLPPLLLLILLAATAVPAPSHAWGVDGHLMVCQIAQARVILSHHCTIVTVCESGRLSGAAAAAVKDLLPSYAGNNLSSLCSWADDVKFRYPWSSPLHYIDTPDGLCTYRYDRDCKDEDGVEGRCVAGAINNYTSQLLAYRRSSPTEYNLTQALLFLSHFIGDIHQPLHVGFTSDKGGNTIDVHWYTRKTVLHHVWDASIIQTAEDDFYGDSVAGYIDTLKKNITQGEWSEQVSSWEACGTNQTACPDIYASESVAAACDWAYKGVEEDSTLEDPYFSSRLPVVSLRLAQGGVRLAATLNRIFG

SEQ ID NO: 8974 - protein, 188 aa, Zea mays
  VARIANT 113: note = Ancestral polymorphism is I, Derived polymorphism is T
MQISGFVTPIGPLSEENHTIDKNLLPLECEGTMECHTRDNDAVGLDARAEGVVCELTDLQNNIQVYDIELTVLGNYTGHGLPLDFLESKTTGGPIKGYPVVVDVLEDCSSVSIHDHLPVARRVGKKRQRRRHDGRWTKRTPLRFPAASTAVRAISTTVQTKKNSNKDPVLEECSLLLALAAKASLLHT

SEQ ID NO: 8975 - protein, 733 aa, Zea mays
  VARIANT 242..733: note = Derived polymorphism lacks residues 242 to 733
MNSMDEINLLRQAQRQHQHHLMVRGIGEEIDLEIGPVDDPSFSGASLVAVTSTHDTVVHADDHKSLLIPCSQPGAADGLAPQQHLSQGEEHDGMLRSPSGHTKKKKKVVKKWREEWADTYKWAYVAVHDTTTRIFCSVCKEYGRKHRRNPYGNEGSRNMQMSALEEHNNSLLHKEALRLQMASKEKLQPPEIEGPVYVKALSKTAASILECVLRRDPHEAEYIQSIQEVVHSLEPVLVKNAQYIQILERLLEPERCFIFRVPWIDDRGEAHVNRGFRVQFSQALGPCRGGLRFHPSMSLSVAKFLAFEHTLKNALSLYKLGGAAGGSDFDPKGKSDNEIMRFCQSFMDELYRYLGPDQDFPAEDIGVGPREMGYLFGQYRRLSGHFQGNFTGPKIFWSGSSFRTEATGYGLVKCYLNFRLAGDSVFCGCYSCFTSNISVACVDWTIVLVQSETLYEIILSMQVFFARLLLAEMNKELKGLRCVISGSGKIAMHVLEKLLPCGAIPITVSDSKGYLLDEDGFDYMKYSLLRDIKAQQKSLKEYLKSYPHAKYIDDAKPWSQRCDVAFPCASHNEIDQGEAVAISNSGCRVLVECSNMSCTVQAVDILRKAKVIVAPAKATAAGGVALGEIELNPEFNLMQLSVEDFENRIQVNSAAPDHLAVIFRFCFPIVIPCEFSLFSVGFKQDAIKQTYERSVKAAQDYGIMKESPEFLVHGANICAFLNIAQAMTDQGCV

SEQ ID NO: 8976 - protein, 485 aa, Zea mays
  VARIANT 341..485: note = Derived polymorphism lacks residues 341 to 485
  VARIANT 212..485: note = Derived polymorphism lacks residues 212 to 485
  VARIANT 191..485: note = Derived polymorphism lacks residues 191 to 485
  VARIANT 162..485: note = Derived polymorphism lacks residues 162 to 485
  VARIANT 58: note = Ancestral polymorphism is S, Derived polymorphism is F
MVAMGKKQQLADDEENCCYGVGSSEAECGVDAEFRATDLRPLSLLSPHTQAFHLAWLSLFACFFAAFAAPPILPALRPALVLAPSDAPAAAVGSLSATLVGRLAMGPACDLLGPRRASGFASLLAALAVAVTAVTASSPAGFVALRFVAGLSLANFVANQHWMSGIFAPSAVGLANAVTAGWANVGSAAAQLVMPLAYELVLRLGVPITVAWRVTYLLPCALLITTGLAVLAFPYDLPRGAGVGGGAKTGKSLWKVVRGGVSNYRAWVLALTYGYCYGVELIMENVAADFFRKRFHLPMEAAGAAAACFGAMNAVARPAGGLASDAVARLFGMRGRLWLLWAVQTTGAALCVLVGRMGAAEAPSLAATMAVMVLCAAFVQASSGLTFGIVPFVSKRSLGVVSGMTASGGAVGAIVTNRLFFSGSRYTIEEAISLTGAASLVCTLPLALVHFPRHGGMLCGPTAVVDGDDAGYDNDNSAGDYTLLK

SEQ ID NO: 8977 - protein, 141 aa, Zea mays
  VARIANT 22..141: note = Derived polymorphism lacks residues 22 to 141
  VARIANT 30..141: note = Derived polymorphism lacks residues 30 to 141
  VARIANT 44: note = Ancestral polymorphism is A, Derived polymorphism is G
  VARIANT 73: note = Ancestral polymorphism is R, Derived polymorphism is H
  VARIANT 102: note = Ancestral polymorphism is P, Derived polymorphism is L
MAEEQIEEASMAAAAVTPFQLQFDKPTSFQNGKMLRTTKSHDVAIVSLNWAEDDPLSKSDKDEFLSYEDRTTRFFPPPVMPRIGGLRSGDTGLADENEEAIPEFSNASCQRFNIVCSGGKDGCVCFSIFGIFPVGKIGTDN

SEQ ID NO: 8978 - protein, 701 aa, Zea mays
  VARIANT 80..701: note = Derived polymorphism lacks residues 80 to 701
  VARIANT 93..701: note = Derived polymorphism lacks residues 93 to 701
  VARIANT 95..701: note = Derived polymorphism lacks residues 95 to 701
MSLGAEVIELSSDEDEEPVPSTTALIHHAPSSPPDVKPHLLADVDVKPLLLLPPPLHPPGYGALVPVKTEEPVPVATVSSPPRALPPPRLCRQFWKSGDYVVARRNPDVAGPGGRNRLRINPKFLHSNATSHKWAFGAIAELLDNAIDEVNNGATFVRVNKFKNPRDGNPSLLVQDDGGGMDPEALRRCMSFGFSDKQSDAFIGQYGNGFKTSTMRLGADVIVFTQNQNNWVPTRSIGLLSYTFLMETGCDDVLVPTVDYQYDLTTTSYVQMLRHDQKLFSSNLAILLKWSPFSTEAELLKQFDDMGDHGTKIIVFNLWFNDDGDMELDFNSDKKDILITGAHKKVKTNSLDKIAAQNYVSTRLRYSLRAYASILYLHVPDTFRIILRGCDVEPHNVVNDLMYRECVLYKPQIAGLTESSVITTIGFVKGAPDIDVQGFNVYHKNRLILPFWKVANNSYGKGRGVVGILEANFIKPTHDKQDFEKSVLYQRLEFRLKEMTYEYWDLHCHRVGYDNKKLPKATRAINRANHMNGGSSPTSAPPRLLAVDIPTSSSSIPRLSASAAREKISSLDSLPKSMIGLKRKFNPFGAVAASADQDGLHHMDKIDVSQRRRFNEYKTLTLENDKLRNECLQYEGSEKQLVLKPQLVERLKYLAMCLSPLQPWLVERLKWLACKIVCSFGSCWLILDPDWRPLVISQCSL

SEQ ID NO: 8979 - protein, 144 aa, Zea mays
  VARIANT 83..144: note = Derived polymorphism lacks residues 83 to 144
MARGSTWLAHVAPGVRKGAIPRKWWSTAGLGRIFTGVGRNGTTGDQSDWGWVWGEAGRKAGMTEASPRAKTGRGRRMTTNDRWRSSGVVWVMWQGRLADGASSAKIREATASFKDHVGILGMNREALKVHSHDGNGMAVMERRG

SEQ ID NO: 8980 - protein, 131 aa, Zea mays
  VARIANT 83: note = Ancestral polymorphism is P, Derived polymorphism is S
  VARIANT 72: note = Ancestral polymorphism is T, Derived polymorphism is A
  VARIANT 65: note = Ancestral polymorphism is F, Derived polymorphism is C
  VARIANT 44: note = Ancestral polymorphism is H, Derived polymorphism is Y
  VARIANT 42: note = Ancestral polymorphism is G, Derived polymorphism is V
  VARIANT 37: note = Ancestral polymorphism is T, Derived polymorphism is K
  VARIANT 31..131: note = Derived polymorphism lacks residues 31 to 131
MKLPTALLTLKGMIDGDKAEATEQVAAALAQLEDAFTACNKVQHFLVGDDIGFLDIIIESYVGWCRAVERIAAQSVLDEMRTPRLATWAARFCEHEAISQDMMPDTRRLVEFGEALRAALVANANANAQRM

SEQ ID NO: 8981 - protein, 650 aa, Zea mays
  VARIANT 324..650: note = Derived polymorphism lacks residues 324 to 650
MPGCGVAGRGDVGVSSAARRTPPQGKSRPCLWMTIARGYGRQHELKYCTSPQSKSLLLEARFGRHVTRSTAYLLQNSRSTAMTRLQKSGKFLQPVLDSSRNYLTSTFYNASLKRRVLSRVECFVSSDPINNGWLKPRRSENFTSLESACVQPEYKLPVRTRADCKAEQYEITGSPLSPSDVPADAVMIGDTNEISPWWQEFPKRWTVVLLCFFAFLLCNMDRVNMSIAILPMSSEFSWNPATVGLIQSSFFWGYLLTQILGGIWADRFGGKVVLGFGVVWWSFATVLTPLAAKIGLPCLLTMRAFMGIGEVLLRKKFLVVTVQCCILLFLFPFILLIFSYISMVLQGVAMPAMNNILSKWIPVSERSRSLALVYSGMYLGSVTGLSLSPLLISRFGWPSVFYAFGSLGTVWFALWQSKAHSSPDDDPELSKAEKRHILGGSALKEPVTSIPWRLILSKAPVWALIISHFCHNWGTFILLTWMPTYYNQVLKFNLTESGLLCVLPWLTMAVFANIGGWIADTLVQRGVSVTNVRKIMQSIGFLGPALFLTLLSKVRTPAMAVLCMACSQGSDAFSQSGLYSNHQDIGPRYAGVLLGLSNTAGVLAGVFGTAATGYILQKGSWDSVFKVSVVLYIVGTVVWNVFSTGEKILE

SEQ ID NO: 8982 - protein, 281 aa, Zea mays
  VARIANT 133: note = Ancestral polymorphism is D, Derived polymorphism is G
MDGARVLIAASATAVCCLACAVWIFRSSSSSFPASSNKHQPPPANFCGCASCGCRDAKSANGEMAVGGENKKKAPEPAPPEAPSMMEQLVPEITTHALSYLDYTSLCRLSMTNSAMRRAADDDGAWKALYHKDFTVEQGTINPPNGWKAYYAATKAIINLNAEFYNIIREGSLPAMSRFWLNADYVKCIHATGEFCTGYNAVMESWGMLLNWGQDGGGGQGIALQIRDVRVRVLGEVAWVNMKANVLFHVTNVYELCNGRWYMVHHHSSLMADPPPHNMFA

SEQ ID NO: 8983 - protein, 365 aa, Zea mays
  VARIANT 323: note = Ancestral polymorphism is Y, Derived polymorphism is H
MEGYDREFYQFSDQLRLQTAAFSGLSLGDSIWSPAGRRNNSNDVLFAASASPADAAAKSNAVVGLKLNDGGPGLIGSGKLAFGGGAGGGGTNKADRYNNNNLPNTDNKTVYNTSSSSFMGNGSSYAKNNNNNADMLAFDKMGSYGYNGGGNTNNNSNGVEVKSYFNKSAGRAASNNNNNNNSHAGGGNKKGGAGEYGRKKHAKSEGAAAATDKQRFKTLPASEALPRGQAIGGYIFVCNNDTMDENLRRELFGLPSRYRDSVRAIRPGLPLFLYNYSTHQLHGIFEAASFGGTNIDPTAWEDKKCPGESRFPAQVRVATRKIYDPLEEDAFRPILHHYDGPKFRLELSVTEALALLDIFADKDDA

SEQ ID NO: 8984 - protein, 867 aa, Zea mays
  VARIANT 694..867: note = Derived polymorphism lacks residues 694 to 867
MSQELQGRSADPMAADHALPLASSAPSWPVSTHPSAASAAAAAVYYFGLSFALAQGRASGGFDLGGARRRGCRWSRAMELALQEKVAALERQVAELRCRRAEDARANEKVAGIFASHEQRWFAERKSLRRQVHAVVAAARAREAKREEETAELRRQLEEQRDTVALKDRALEQEVQRRQGAEERLRAAEKAEEELRERAGKEAMEHAAEVRKHKAAFVELVSAQRQLEADLARAARLADTAEAELRAALERRDEAASTAADLSAEAARLRRDADHKDKILSAMLRKSKIDMEDREMLVREVKMCKARRKQAELEADRWRKMWESRGHRRGSSRSSARGVADLPAGSSDKLLATDAAVACATNETKILFVDHAEGDAKKDHRKTPAKELNAIECVDRYASHVVDDKPAVEEYQGLQEWFQMETEKYTALIQHRHTAEIEAFTEQLRLKDEKLEAFRWRAVSMDVEAARLRSRIHELEGRLARHEKHSAALEALLQDRESENRALEEQLETLQAQALGVEICTPARGSGQDDGLDDQCIACSPVDAVQRTMSSGSSRHQEGAEVSKYETKLDELVTLSPEDHKEDATEALVVSVGDLACAVAAAATSVEHERRHDAPASRQSFRSEIEEEEEVYTEPGNAHTTGSSQEATSELALVVVPPGHKSSAWKTDIHALAVSYKIKRLKQQLLVLERLANECKDEEAAATKPSGSEASCSGGGGSRQQPRSRYHTMMSFLSKHVRRYQSLDDKIDDLCARMEESKRSAGRGAGEESQSQSAALGQFLEETFQLQRFMVATGQKLLETQSRIAAGLARDRCCCGDGEDGVDMKRLMEVAGALLRDVQRGLEVRIARIIGDLEGTLTFHGILRSTR

SEQ ID NO: 8985 - protein, 327 aa, Zea mays
  VARIANT 14: note = Ancestral polymorphism is T, Derived polymorphism is A
MSGATVEEVQIQEALLFSETIKGLKTLRSQLYSAAEYFELAYTQQDEKQAVTNNLKEYAVKALVNTVDHLGSISFKVSSLIDQRFSEATDADLRISCIHQRTQASQACVDREGISQQSLVITAPKYHKRYILPAQGQSMPSAMPNFREMNKVVVTGRASQMHQVFSAETRAKEKKQPSLRKLQSIARLPSQRARSASPAQRAHPMAPAKNATPTNRDQLTHDFNPHSVSATADKRSESPVPSTAPAPLTRSASLSKKASLLKTSSVRAQAAVSQPKKLAPMRTQVDRSDDSKDGERTPKKSKKFLKSILSRRKSRKDEPLPSYFDDY

SEQ ID NO: 8986 - protein, 137 aa, Zea mays
  VARIANT 29: note = Ancestral polymorphism is A, Derived polymorphism is V
  VARIANT 54: note = Ancestral polymorphism is V, Derived polymorphism is I
  VARIANT 60: note = Ancestral polymorphism is R, Derived polymorphism is S
  VARIANT 94: note = Ancestral polymorphism is D, Derived polymorphism is E
  VARIANT 101: note = Ancestral polymorphism is C, Derived polymorphism is S
  VARIANT 105: note = Ancestral polymorphism is S, Derived polymorphism is L
  VARIANT 112: note = Ancestral polymorphism is S, Derived polymorphism is N
  VARIANT 116: note = Ancestral polymorphism is T, Derived polymorphism is I
MPPVGCVPSQRTLGGGLATRACEPKRNEAALLYNARAQEMIAAFNNNNSDVLVVFLDIYRILDDLMERGEEYGFSETTRGCCGTGTIEVTGLCDSRFVSVCDDVSQHVFFDSYHPTERAYRIIVNDIFLNYGHVLFS

SEQ ID NO: 8987 - protein, 132 aa, Zea mays
  VARIANT 116: note = Ancestral polymorphism is Q, Derived polymorphism is L
  VARIANT 94: note = Ancestral polymorphism is G, Derived polymorphism is S
  VARIANT 22..132: note = Derived polymorphism lacks residues 22 to 132
MAVDTTQPEYWLNWRFLLCALWVYSCMALAFFLIKKSDGAEPHLMNIQFQKKMQLQVPTSVGMLFPLACDATRPARSPSGLVMASTTSSSWYFGVSKWPSSKDGRERSGVVGQQVQVLGGIWTPTLCQKEAA

SEQ ID NO: 8988 - protein, 289 aa, Zea mays
  VARIANT 179: note = Ancestral polymorphism is R, Derived polymorphism is H
  VARIANT 103..289: note = Derived polymorphism lacks residues 103 to 289
  VARIANT 81: note = Ancestral polymorphism is G, Derived polymorphism is R
  VARIANT 49: note = Ancestral polymorphism is T, Derived polymorphism is M
  VARIANT 21: note = Ancestral polymorphism is E, Derived polymorphism is K
MAEKTIWGDDLVKHLIDVCKEEILAGNRPQGIFTRIGWKNVEDKFFARTKKKCTKTQLKNKLDNLKKDFTQFMELKIAATGLGWNEANQTVDCSNTWWDEHLEKCNNPERGTKCNHVRFRKHGPKHLDDLHFLFDKVHVTGATAMCPGDVSSCDSSSDDVLEVTEKTDEACNKPKPKKRKQMSGAAQEKEEKSPFYQMYKNTCMKIESAVEKISTSVEASSAPLQANLVPTIAEAMKMVKACGIQEKTAMMHTATSLIMKAEFREILFALETNEGRFDLIEREHKKSTT

SEQ ID NO: 8989 - protein, 140 aa, Zea mays
  VARIANT 62: note = Ancestral polymorphism is Y, Derived polymorphism is H
MEKMNVVASRKQGGDWICRSCQYVNFCKRDACQRCGEARLGVERTDYGALGGDWDVKPGDWYCYRCGVNNYASRAGCFKCGAAKNESPPAAVAQGWGYTAAGQAGMKPGDWICPRLGCNVQNYANRTECFRCSMPKSYYG

SEQ ID NO: 8990 - protein, 375 aa, Zea mays
  VARIANT 31: note = Ancestral polymorphism is L, Derived polymorphism is M
MEGNKDDAAKCLRIGKGALEAGDRARAIKFMSKAKRLDPSLPIDDLLTSLLNAQDDSPASSSSSPPPPPQTAAAGASEAAETDGLRERKHKGKKREEEEEATPAAREYTAEQLEVVRQVKKHTRDYYQILGLEKDCSVEDVRKAYRKLSLKVHPDKNKAPGAEDAFKAVSKAFQCLSDAESRKRYDLVGSDEPVTHHRRASTARAYNGFYEDDFDPDEIFRNFFFGGMAPATTRQFGQFGTFHFRTGGMHAHAHAQQNSGGSTVRMLIQLLPVLLLLLLNFLPSSEPVYSLSRSYPYEHKFQTPRGVAYYVKMSNFEEQYPYQSTERATLERHVERDYYSIITQNCRVELQRRQWGLSYQTPHCDMLKNFEAAAK

SEQ ID NO: 8991 - protein, 591 aa, Zea mays
  VARIANT 178..591: note = Derived polymorphism lacks residues 178 to 591
MDGKKVQERAAWGASDGGGNLVQDAVDYRGCRADKSSTGGWVAAALALGIELCERLATMGIAVNLVTYLTDTMHLPSAAAANVVTDFMGTSFLLCLLGGFLADSFLGRYLTIAIFALIQAIGTGLLAVSTEVRQLRPPPCGPGAAGPCEQATGFQMGVLYVCLYLIALGTGGLKSSVSGFGTDQFDERDARERAAMGLFFNRFFFFISVGTLLAVTVLVYVQDHVGRSWAYGICAAAMLAAIAVFLSGTRRYRYRRSSGSPIVHILQVLVAAARKRNIAKHPLAVSALYEDRPEHARIPHTAQFPCLDRAAVMAGDDDNEVGHDGRPTPNPWKLCSVSRVEEVKMVARLMPVWATTILFWTIYAQMITFSVEQATTMDRRMGGFEIPAASLTVFFVGAIMLTLAFYDRVFVPLCRSLMTGRQGLTNLEKIGIGLVLSIVGMAAAAISEKKRLAVAATSGVAGHGSLPISVFMLTPQFLLVGAGEAFIYTGQLDFFITRSPKSMKTMSTGLFLTTLSLGFFLSSALVSLVKSCTRWLGDTINHSRLDYFYWLLAVLSVVNLVAYLVCAMWATAPTSSQAEQPQPAMVADEKC

SEQ ID NO: 8992 - protein, 240 aa, Zea mays
  VARIANT 186: note = Ancestral polymorphism is S, Derived polymorphism is L
MMVMFYMLTTLNELSLQDKDVTVQVEVNRRWEFRGITDDGHVLHVDMILTDAMENAIYVEVPAKLLEQKGSLLQLNKVYYIRRFRVANAKSQYKVINAPLMIYFTVYSIIEVCRDPPSTFPLYVYNLIPYEAIDANGPKSKDFHVSEINPIQLNGKSSIYRNVFIKNLSHDIIKVTLWGNQALKFSYEAIYDQQIQHAVVVLFVGCLPKEYKGSVYLSGGAACHWYFNPSINEAQPYYQR

SEQ ID NO: 8993 - protein, 633 aa, Zea mays
  VARIANT 351..633: note = Derived polymorphism lacks residues 351 to 633
  VARIANT 214..633: note = Derived polymorphism lacks residues 214 to 633
MDRSPALEGKDAGRGSGSWPRTPRFAVGDEVEVLFTGSGFRGARFEATVTARFPDSRRYEVVGVSELRPRPPPPQPGREFELFDLVEAYNNDGWWPGVVSDIRPKRRRNQAKRFAVSLPLFREVLELSASFVRPRREFVYGSWIDAQEVLVASYKILHALVTNYLPDGTLSHASQTVHGMERLVSAKVYLSYQGGMPGNGEQWRHALRSWIRRRGETSGWVDHCVKDQTLVVVAEKKQKEELKEVLGDGRVVVTDDKKKRVQRAKKKPATFHGEGKLRGIPQYAEGSRVEVMCDKQGRVWRPATIKNMVGGTNYVVSYGNGQSSIEVLHTMFIRRPEPIQMEVEAPNDSNQMEIKNERMGMSLVVAERFHLETCTNSANDITIVSSQHPWAEPLQPVSEKSPGPSSLLHPVVMADTSAFMALAVPNSSDLSTAFSTTSLLLMPNDKMEVFQKLPQIPHFREAWNCPPELREGRALGLMVCFANMAKSIKDMRIQEEPRLYQEKMNILLEMEENGFETGPLKVRLHNLLCTRNHHMNLKSRKVRLEKEILEIEAINCGLEQRLKFLDMCIMGMEEKKYQEMKGSLDIQKTENCSLISKLQVYLCQVEESLKYAEADFCSIATAPWQPHVVPSIP

SEQ ID NO: 8994 - protein, 332 aa, Zea mays
  VARIANT 133..332: note = Derived polymorphism lacks residues 133 to 332
  VARIANT 311..332: note = Derived polymorphism lacks residues 311 to 332
MLVEMGSRAAFVVAFLLRAIYAGTQILTKAAFDEGMNTSVFVFYRHLTGILFLVPIAFVLERISGAINIYGLGLSYSSATSSSAIFNLLPAVAFFLAVLLGMETLNLKRFHGIAKAAGVLFSTAGVTVLAFYQGPAFRSFIHHTAFSHHNVHAGVVTAAHPKSVWILGIFLTTLSTASWALWTVLQGPMLEAYPSKLLNTTLQMIFATVQCFFIALAAERDLSRWKLALDIRLYAVIYSGILVSGVAYYMQVWVIEKSGPVFLAMTMPITLLVTIILSLFLGEPVTLGSILGGLIMVGGLYSVLWAKRSEQVHASKQQMAAPTPPPAEATQV

SEQ ID NO: 8995 - protein, 587 aa, Zea mays
  VARIANT 18: note = Ancestral polymorphism is R, Derived polymorphism is S
MTKHGLLFFLAIALLLHRHYTSASSTGQPTRSSSTASRSTAEWQPLHCSPVSSCGSFLYVTPGGRNLSEIASVFNGNASLIQPVKRLSGSEDLLMAVACECQAISNTTTAAAFLHDTQYKVEPDAIPDDVKSNTFSGLAMDVGDGFPLTPGATVTVRLPCGCSSSTASKGVLSYSVQEEDTLSTIASLFSSSPEAILNLNPSVKNPDFIKPGWILFVPMGVAGSSKKKRVGSTTITIAASVSAIILSVCVLTVILRLRRRPSQQNAEAPEIKMERAPNIDPFQTERPVIFSLKVVGDATANFDEKRKIGEGGYGSVYLGFIGTHEIAVKKMRASKSKEFFAELKALCKVHHINVVELIGYAAGDDHLYLVYEYVQNGSLSEHLHDPLLKGHQPLSWTARTQIALDAARGIEYIHDHTKACYVADFGLVKLVERSDEEEWVATRLVGTPGYLPPESVLELHMTTKSDVYAFGVVLAELITGLRALIRDNKEVNKTKSIISIMRKAFDSEDLERSLETIIDPNLKDSYPIEEVCKMANVSMWCLSEDPLNRPEMRDTMPALCQIHLASIEWEASLGGDGEVFSGVSYGR

SEQ ID NO: 8996 - protein, 560 aa, Zea mays
  VARIANT 39: note = Ancestral polymorphism is A, Derived polymorphism is D
MRGNLPSLAVASNGAALPLSFSQTKQLHARLIVASPFSASGPAYLRLLVLRSYAARGDLSSARRLLDEAPRPASPLLYNALIRAHARRLDLPAALALFARMRRSATPPDAHTFACVLRACAESSRPDAVKVVHGIATTCGMCSRPIVLSSLVSAYAKLGLVDNARSLFDGLCEPDLVIWNSMMSAYGYQGMWYDGLQMFSLMRRAGQHPDGYSMVSLVSCFWNPEILAFGQAVHGICVKGGYDSGHHVRSTLVSMYMRFGCVESGQRLFGSLSDVDLITWSSLITGLIQTGKYEESFDLFRKMCFTGRRPDSILIASVLSVFASTAAISYTKEVHCYAVKLGADIDIRVSSSLMDAYAKCGFTELGYWVFRQVPNKNSVMYNTVISNLGSHGFATKAIEVLDEMVNDKLRPDSATFSSLLAACCHVGHLEEGWKLFRRMRDEFKIVVEMEHYVYMVRLLATFGQLKEAYDLIQTMQIQPDCGVWGALLWGCCVHRDSSFGRIVAEKLCELNSDKAAYRVMLSNMYASQEMWWDAEEVRDELSKENMYKNTGTSWVGEVKK

SEQ ID NO: 8997 - protein, 680 aa, Zea mays
  VARIANT 218..680: note = Derived polymorphism lacks residues 218 to 680
MDATALVDLDCRRPRRASGAGAGLAGAGAPRRFVRARREGSSTPCGSNAEGSTPPSSPNLPHRVADGSAATGLLPGHHLVRPSVAVCFIDRSDDISGEEDSLATSLLVRAGNGRRDIPIAEARRAFLALPGVRAGDFELRPSHPDNFLLPASAGVRDLLLGARPVVVHGTTLVLHPWTRLAHATRVELFFKVKLEIVGIPPHAWSRDTASKILAPACWIEKVDAASADKTDQSFFGVTAWTNDPSAIPRSVSLLIAENELRVVHSDEVLHRIFDHLPSYLRKKVTLKYGVMVHLREVEDLAPSSSSSPSPPSSDDDSGLGENPGRRFLSSGRGWGSRRWRFPCSRGVPDGGSASGGAGPPANGGVGENAGGARELSASGELAGQGSKAVALSSDQPVVGASRDGPCFPSGDSWEAVFLESLVSHSPSGLSTLESGAALLLDPMLDEAGQRHMTALPVCLPEAVDVPDRDASHELSPSLGEPLASSLEPCTGVDTSVLGPTSAAGLVGEAAGMSVDVGVGGGAVSSGARPASETRPADLGGAPAQECALRSFIDSIQATPRPLLGAPPLVAPATIVVTGRGQPILPPRSRRIAAQQLAGVPVYKRGEVLLMRKFGILKDGAPVTAVAKDLYDSLYRSELKLEHINAIRELFPDRGSGTSTWPGDVVDACSEDGAPTLEDAV

SEQ ID NO: 8998 - protein, 252 aa, Zea mays
  VARIANT 36: note = Ancestral polymorphism is L, Derived polymorphism is R
MVQFGKWLRRQIERSLPEWQDQFLRYKELKRCVKARSGGCPPLPAEEAEFVAEIDAETEKINAFFLDQEEEFIIRHRELQNHIERALGRGRPAPAPALHEAEVAAIRREIVNFHGVMVLLLNYSSINYIGLAKILKKYDKRTGAMLRLAVMESVLQQPFFKTETVSHLVRECESLMEAVFPEARDRGQAAAAALAVAEAEQGIFRNTVAALLTMQDVRAGSSTRGSHSLPPLNLPDSDWLRSFDPPFPIPTR

SEQ ID NO: 8999 - protein, 461 aa, Zea mays
  VARIANT 205: note = Ancestral polymorphism is R, Derived polymorphism is S
MEEGGRHDHDAGDRISSLPDDLLFSILLRIGSIRAAARTSVLSRRWRHVWARLPELRLGTCDEQPGATFLDFVDAVLDACSAPAVHRLEVAMYCHGLRVHACRLVPWLRFASQRRVGDIHIQVPSQKKFFLSKPIKEELELPVCDGATRITLSLERRWSLRLCPAGSFMSLTDLHISCATMAGSELGNLVSEQCPLLRNLYLFVRLAAASNVSIHSNSLQSLSFNVQNTQKLEVMAPKLEVLAVCDATKAHISAPKLSVVSWDNDTGYNPLCHHFANAARHLRLLHLGSKCVSASLMRQFDEVDVLKLKLNLLNIKGTEAYTNLLNETAALPKCEELKLRVSLRASQHNFASIMFHILRSCNNTRRISIKIDSSMVYLCPSSCFCLGPQIFKADGIILESLEEVKITFIRHCYGQVQFVEEFARCHAPSLKKLVVNSPTKGLQEMVGGLFDPDVTVKCNVI

SEQ ID NO: 9000 - protein, 253 aa, Zea mays
  VARIANT 70..253: note = Derived polymorphism lacks residues 70 to 253
  VARIANT 97..253: note = Derived polymorphism lacks residues 97 to 253
  VARIANT 116: note = Ancestral polymorphism is S, Derived polymorphism is L
  VARIANT 127: note = Ancestral polymorphism is G, Derived polymorphism is D
  VARIANT 165: note = Ancestral polymorphism is G, Derived polymorphism is D
  VARIANT 180..253: note = Derived polymorphism lacks residues 180 to 253
MPIPARPPPLRNPSVESPPARLLCACPANSPRKPRERRPYLVSGCRDLTDAERWRSEILREIGAKVDEIQNEGLGEHRLRDLNDEINKLLPAVTSYQGAQEGASHYALLVTTSLLSVLLFTFDLLCGVLGGASFNPTDFAVSYAAGLDSPSLFSVALRFLVQVVGVVGGALAISELMQAQYKHTLAGPSLKVDPHTGALAEGMLTFIITLTVLWVIIKGPSNVILKALLLSTSIVSVILPGAEYKGPSMNPAN

SEQ ID NO: 9001 - protein, 122 aa, Zea mays
  VARIANT 1: note = Ancestral polymorphism is M, Derived polymorphism is I
  VARIANT 34: note = Ancestral polymorphism is R, Derived polymorphism is H
  VARIANT 40: note = Ancestral polymorphism is V, Derived polymorphism is I
  VARIANT 51: note = Ancestral polymorphism is G, Derived polymorphism is C
  VARIANT 52: note = Ancestral polymorphism is R, Derived polymorphism is C
  VARIANT 55: note = Ancestral polymorphism is V, Derived polymorphism is M
  VARIANT 80: note = Ancestral polymorphism is R, Derived polymorphism is K
  VARIANT 92: note = Ancestral polymorphism is G, Derived polymorphism is R
MVVDTVSASTSIIAPHLFDHRSRGAAASHHHHLRRTFHVVACRPLPTAFAGRRLVARVTRQPSSRLADWPVRALAMGSRRRPGPALAGSIGGSPGMVATWGTLGSPAPRRHGLHGTGQMTPN

SEQ ID NO: 9002 - protein, 998 aa, Zea mays
  VARIANT 881..998: note = Derived polymorphism lacks residues 881 to 998
MNPLSGSSSTISCFSTQLRSLAQVLLSGRAGSRLRRVLPAAHARAIISDGLGFLFLANLLLDGYSKLGRIHDARRLFDGMPHRNLVSWSSAISMYAQHGADGQALALFAAFRRSSDEAPNEFVLASVVRACMQSRDVPFGEQVHGKIINLGLDVNLYVGTALVNLYAKVACMDAAMRVFHALPTKNPVTWTAIITGYSRIGHGELALGLFQTMVAQGVQPDRFVLASAVSACSALAFLQGGRQIHGYAYRSAAEVDASVINALIDLYCKCSRPLVARKLFDRMKNHNLVSWTTMIAGYMQNSLDAEAIQMFWQMCQAGWQPDAFACTSILNSCGSMEAISQGTQIHAHAIKVNLENDEYVKNALIDMYAKCAHLTAARVAFDALAHDDVVSYNAMIEGYARQGDLTEAVHIFRKMKYYSIRPNLLTFVSLLGMSSLLSSIEWSKQIHGLIIKSGTSVDLYVGSALIDAYSKSSLVDDAKAVFFMMQNRDMAIWNAMIFGHTQNEQGEEAVKLFNQVRVSGMTPNEFTFVALVTVASNLASMFHGQQFHAQIIKAGCDINPHVSNALVDMYAKCGFIKEGWMLFESTCGKDVICWNSMITMYAQHGHAEEALCAFQLMREAKVEPNYVTFVGVLSACAHAGLVDEGLHHFNSMKSKYGIDPGTEHYASVVNLLGRSGKLHSAQEFIEKMPIKPAAAVWRSLLSACRLFGNVQIGRYAAEMALLEDPSDSGPYVLLSNIYASKGLWVDVQQLRLRMDYAGAVKEPGYSWIEVMKEVHMFIARGTEHPQAELIYAVLDELTGLLKDFGYHPDISELALLGETGYELLTGMVPYTHLRAEAQAHTVLEMTYTEQQLTAAFVSQASPLAESDLKNLWSGCFDQSSEYHPTLNWGSFATSGRRETIEDTHFVPPFMSEEKEVFSFGIFYGHRADAEFSVRAVPGFHKQFGHGASPTYALSEAFVRTDIAFREELIVHRKSKMIIQKRLASRLHGSNSPDSDGLW

SEQ ID NO: 9003 - protein, 374 aa, Zea mays
  VARIANT 34: note = Ancestral polymorphism is R, Derived polymorphism is H
MPMRGVDFKWYDGFFLSMLATSVIIVSINWKRYRLCAHPLHIWIVVDYTTVFIFRLLMFVDNGLAAGMGLDLGWQQRYARFCGRIIVLSVLVLLLYPFLWVWTVIGTLWFSTARGCLPEEGQKWGFLIWLLFSYCGLACIACVAIGKWLHRRHALQQRAQQGIPVSEHGVLVDMIRVPDWAFEAVGLEMRVGQDTAYHPGLYLTDAQREAVEALIQELPKFRLKAVPTDCSECPICLEEFHVGNEVRGLPCAHNFHVECIDQWLRLNVKCPRCRCSVFPNLDLSALNNLRSTSEPDHPSASASNVTTATAATRYVRSQPAGQSYLVRLQGLLLRPVRHDSVESDGEPAVGNSRLVGTEELPSILVDDGHQLPDR

SEQ ID NO: 9004 - protein, 766 aa, Zea mays
  VARIANT 620: note = Ancestral polymorphism is S, Derived polymorphism is L
  VARIANT 306: note = Ancestral polymorphism is L, Derived polymorphism is P
MGTSVQVTPLSGAYGEGPLCYLLAVDGFRFLLDCGWTDLCDTSQLQPLAKVAPTVDAVLLSHPDMMHLGALPYAMKHLGLSAPVYATEPVFRLGLLTMYDHFLSRWQVSDFDLFTLDDVDAAFQNVVRLKYSQNYLLNDKGEGVVIAPHVAGHLLGGTVWKITKDGEDVVYAVDFNHRKERHLNGTVLGSFVRPAVLITDAYNALNNQGYRKKQDQDFIESLIKVLATGGSVLLPVDTAGRVLELLLLLDMYWDERRLQYPIYFLTNVSTSTVDYVKSFLEWMGDQIAKSFESSRANAFLLKKVTLIINKEELEKLGDAPKVVLASMASLEVGFSHDIFVEMANEARNLVLFTEKGQKIFALQFGTLARMLQVDPPPKALKVTMSKRIPLVGNELKAYEEEQERIKKEKSLKASLVKEEELKASHGSNTKASEPMVIDASSSRKSVNASHFGGNNDILIDGFVPPLTSVAPMFPFFENTAEWDDFGEVINPDDYMMKQEEMDNTLMLGPGDGLDGRIDDGSARLLLDSTPSKVISNEMTVQVKCSLVYMDFEGRSDGRSVKSIIAHVAPLKLILVHGSAEATEHLKMHCAKNLDLHVYAPQIEETIDVTSDLCAYKVQLSEKLMSNIISKKLGEHEIAWVDAEVGKEDEKLILLPPSSTPPPHKPVLVGDLKLSDFKQFLENKGWQDFSVERERIKYVEIQSLRKELLQVEFAGGALRCGEYIMVRKVGDSILKGSTGSQQIVIEGPLCEDYYKIRELLYSQFYLL

SEQ ID NO: 9005 - protein, 501 aa, Zea mays
  VARIANT 133..501: note = Derived polymorphism lacks residues 133 to 501
  VARIANT 105: note = Ancestral polymorphism is C, Derived polymorphism is R
MVGGGGGGPLRRVGKYEVGRTIEEGTFAKVKFAQNTETGESVAMKVLDRSSILKNKMAEQVLASRKKIFIILEFITGGELFDKIVPYVHQLWMVFVVLILISFERVTVTPTCMYQSKEFNLKTHIVYYTLSYLGLVETISLHEKKTNDTETYKFQIRHGRLSEADARRYFQQLIDGVDFCHKKGVYHRDLKPENLLLDSQGNLKISDFGLSAWPAQGSFLLRTTCGTPNYVAPEVLSHKGYNGALADTWSCGVILYVLLAGYLPFDEVDLTTLYGKIESAEYSFPAWFSGGAKSLIRRILDPNPETRIRIEEIRSDEWFQKNYEPIKEIENEEVNLDDVNAAFDDPEDDNEDAFEDETGPLTLNAFDLIILSQGLNLAALFDRRQDCDKLQNRFLSRNPAKVILSSMEVVAQSMGFKTHIRNYKMRVEGLNADKTSHLSVMVEVFEVAPSIFMVELQRAAGDTSEYNTFVNNYCSKLDDIIWKFPTEKGKSRIPRLSKSHS

SEQ ID NO: 9006 - protein, 511 aa, Zea mays
  VARIANT 102: note = Ancestral polymorphism is S, Derived polymorphism is L
  VARIANT 218..511: note = Derived polymorphism lacks residues 218 to 511
MAPPVAGVVRLAAASRVLVLSLYLLARLLLRPYDTSATLHPPCLSSFSSSPDPNTPVSAAISSLAVWDGVHFARPAECGYEYEQSFAFLPLLPASLVLLARLLFAPLVPILGYRAVLVLSGYVLNNVAFVAAAAYFYRLSVLILKDQKAAYRASVLFCFNPASVFYSSLYSESLYALFSLGGIFYVFSGANTVAVIMLALSGSARSNGALNAGYFCFQALLQAYDATVQKKRPLLAIHALVAGALRSIFIFLPFFAFQAYGYLNICVHGSSDELRPWCKAKVPLLYGFIQSHYWGVGFLRYFQVKQLPNFLLASPVLSLAVYSIVHYAKLLHRCFQRTSVHKQIITALEKRPVVSYRRSDDATILSEPPAGLTKKAQDGDKHTAVPYSICWTGSSKAKQRKPVATEIAPATFHDSTTPANQNIEEDQDTCSILLLPFVLHLAFMAFTALFVMHVQVSTRFLSASPPVYWAAAHVLASPSRANRRWGYLICVYFIAYILLGSLLFSNFYPFT

SEQ ID NO: 9007 - protein, 95 aa, Zea mays
  VARIANT 90: note = Ancestral polymorphism is P, Derived polymorphism is S
  VARIANT 72: note = Ancestral polymorphism is K, Derived polymorphism is M
  VARIANT 68: note = Ancestral polymorphism is C, Derived polymorphism is W
  VARIANT 67: note = Ancestral polymorphism is A, Derived polymorphism is T
  VARIANT 66: note = Ancestral polymorphism is A, Derived polymorphism is P
  VARIANT 61: note = Ancestral polymorphism is E, Derived polymorphism is K
  VARIANT 56: note = Ancestral polymorphism is T, Derived polymorphism is I
  VARIANT 43: note = Ancestral polymorphism is S, Derived polymorphism is L
  VARIANT 42..95: note = Derived polymorphism lacks residues 42 to 95
  VARIANT 34: note = Ancestral polymorphism is R, Derived polymorphism is C
MFLSWRTLNTTRCLNLGSYNYLGFAAADEYCTPRVIESLKKYSASTCSVRVDGGTTKFHNELEELPACFVGKLAAILFGMGYVTNSAIIPCLIGK

SEQ ID NO: 9008 - protein, 92 aa, Zea mays
  VARIANT 84: note = Ancestral polymorphism is T, Derived polymorphism is I
  VARIANT 56..92: note = Derived polymorphism lacks residues 56 to 92
  VARIANT 46: note = Ancestral polymorphism is A, Derived polymorphism is V
MTLIMIEDRLQWKEHSMIFAMPNKPGEFSRFDFPETLPAPINGIWAILRNNEMLTWPEKVKFAIGLLPAMVGGQPYVEAQDGLTVSEWMKKQ

SEQ ID NO: 9009 - protein, 112 aa, Zea mays
  VARIANT 3: note = Ancestral polymorphism is A, Derived polymorphism is E
  VARIANT 19..112: note = Derived polymorphism lacks residues 19 to 112
  VARIANT 42..112: note = Derived polymorphism lacks residues 42 to 112
  VARIANT 43..112: note = Derived polymorphism lacks residues 43 to 112
  VARIANT 53..112: note = Derived polymorphism lacks residues 53 to 112
  VARIANT 86: note = Ancestral polymorphism is T, Derived polymorphism is I
MLAEELLRTGGGMTTDTSQKPSSGRERVQIEALRQELEGAKRQIGALKSEKSQIEAEANNQRNLSVKLESDLKSLSEAYNSIEQPTTAWMPRVLAMTLPFQMMTMKDEDDEE

SEQ ID NO: 9010 - protein, 1323 aa, Zea mays
  VARIANT 134..1323: note = Derived polymorphism lacks residues 134 to 1323
MTGDDRRERTEASAGGRDDDAGDGGGGGSAGREISSKPAVVGRVPLYRLFAFADRTDAVLMAVGAVAAVANGMAQPLMTFIFGDVIDAFGSSASPDDVLHRVVKVIMNFVYLAIGAGLASTFQVSCWIITGERQAARIRALYLKAILRQDIAFFDMEMSTGQVVERMAGDTFLIQDAIGEKVGKSIQLLSTFIGGFIIAFVKGWLLALVMLSSIPPIAIAGAIVSRLMTRLSTRMQAKYGDAGNVVEQMLGAIRTVVSFNGEKQAIRTYNKFIRKAYESALQEGAVNGLGLGSVMAVLFCSYGLAVWYGSRLIVERGYNGGMVISVIMAVMIGAMSLGQATPSVTAFAEGQGAAYRMFKTIERKPDIDIYDTTGVILEDIKGDIELKDVYFSYPTRSEHLVFDGFSLQVPNGTTMALVGESGSGKSTVISLVERFYDPRAGQVLIDGVDIRRMHLGWIRGKIGLVSQEPVLFSTTIRENIAYGMENSTLEEIKRATELANAAKFIDKLPNGLDTLVGERGTQLSGGQKQRIAIARAIVKNPRILLLDEATSALDMESERVVQEALNRVMLERTTIIVAHRLSTVKNADVISVLQHGKVVEQGSHVELMKKIPEGAYSQLIHLQETRQGAEFSSVDPDIVLTNGIGSRSINSKPRSQSISRRSTSKGSSSFGHSGRHSFPAPLGLPDPMELNGSPDVEETVDKTSRAPKKAPLGRLLYLNKPEALVLALGSITAAMHGVIFPIYGTLISTAIKVFYEPPAELLKDSRFWASMFVALGACAFVLIPVEYFLFGLAGGKLVERVRSLTFQSLMRQEISWFDEPEHSSGSIGARLSTDAMNVKRLVGDNLALNVQTLSTVISGFTIATVANWKLALIITVVVPFVGFQGYAQMKFLKGLNRNAKLKYEEASQVATDAVGGIRTVASFSGEKKAVDAYERKCESPIKQGIREGVVGGLGFGFSFLAFYLTYALCFYVGAKFVEQGTATFPQVFRVFFVLVLATSGISRTSAVGADSTKANDAAASVLEILDRKSKIDYSCEEGITIAGVSVRGEIDFQNVCFKYPLRPNVQIFKDLSLSIPSGKVNKSNSTPEQEMESELIFPDTVAVAVACLQTVALVGESGSGKSTAIALLERFYDPDSGKVLFDGVELRALRVSWLRQQVGLVSQEPVLFNDTIRANIAYGKQGEASEEEIVAAAGAANAHQFVSALPDGYSTLVGERGIQLSGGQKQRVAIARAVVKDPKVLLLDEATSALDAESERVVQEALDQAVVGRTTVVVAHRLSTVRGADVIAVLKNGAVAEKGRHEDLMRVKGGTYASLVELSSTSS

SEQ ID NO: 9011 - protein, 1902 aa, Zea mays
  VARIANT 1767..1902: note = Derived polymorphism lacks residues 1767 to 1902
MEAGPSSSAAMSAARRRRDALAQTLASRRLPEGMAEAGELVPGALAPEVMPFLRAADEIEPYNPRVAFLCRKYAFKKVQTLDPSSTQRGVRQFKTYMSIKLDQDDTQVLGNDANEIQQFYKKYCASMSHISKKRNFEEMARYYQVVYALYEVLQDVTNKNIDDQVLRCADMVEENGRHFKNYKYNIIPLNFPGSSEEIMELPEIRGAIDAISDIDGLPMPDMSSIQRHEDKSIQDLIEYLSLAFGFQKSNVENQRENMVLLLANISTRTAAQEGHPLVDTVNELWKKIFGNYKSWCCYLHITSSIIISHDITEHKKQQLKLLHIGLYLLIWGEASNVRFMPECLCYIFHHMAKQLHDMVDENNFQPPQAPVEEGSFLKNVIEPIFKVLQKEAQKSRGGTAGHSAWRNYDDLNELFWSEKCFTELNWPPDLSSNFFYKGCGMARKPKTNFVEVRTFLHIFRSFNRMWMFFILAFQAMLIVSWSSSGSLSGITDGTVLKNVLSVFITAALLNFITVTLDIMFTVQAWGSMEWTKLVRYLLKFVVAIAWIIILPLTYSSSIKYPSGAGKILNSWIGDWYNQSVYNIAIVIYMVPDILAALFFLLPQLQNVMERSDSRVLVLLMWWIQPRLYVGRGMHGDILSILKYVFFWAVLLISKLAFSFYVEISPLIDPTKFILDQQVGNYEWHQIFPFLPRNLGVVITIWAPIVMVYFMDTQIWYAIFSTVFGGVSGALSHVGEIRTLGMLRARFKSIPEAFSQCNAIKQREQAFEHRSFFRVWNSFINSLREEDFISDREKDMLMAPSYSSNLSIIQWPPFLLASKVPAAVHMAMNSKEGDEHELIEKIKLDGDRYDAVIECYKSLMIILNSLLLDTNDQNIVNDIDKKVTYSMIKKTFLEDFEMAEIGKVSSTLARLLQLLKSEPINDVGERKIVNALQDFMEITTRDFMKDGQSFKDEDERNQRFMNLNMNMIKEDYWREKFVRLHLLLTMKDSAMDVPINLDARRRITFFANSLFMKMPRAPRVHDMISFSVLTPYYNEEVLYSSHDLNRKNEDGISILFYLQKIYPDEWNNFLERIGVESNNEVSIKGRMDDIRLWASYRGQTLARTVRGMMYYRRALELQCYEDMINDQGYGLADLDTAKAARSKAIADIKFTYVVSCQLYGVHKTSKDSRERGLYENILNLMLTYPALRIAYIDEKEVQLRNGKIEKQYYSVLVKGDDEVEIYRIRLPGKPTEVGEGKPNNQNHAIIFTRGEALQAIDMNQDNYLEEAFKMRNLLEEFLLTHGKSEPTILGVREHIFTGSVSSLAWFMSSQETSFVTIGQRVLANPLKVRFHYGHPDVFDRLFHLTRGGISKASKIINLSEDIFAGFNSTLRRGNVTHHEYIQLGKGRDVGMNQISNFEAKVANGNGEQTLCRDIYRLGHRFDFYRMLSLYFTTVGFYFNSMVAVLTVYVFLYGRLYLVLSGLEKSILQDPNIQNIKPFENALATQSVFQLGMLLVLPMMMEIGLEKGFGRALAEFVIMQLQLASVFFTFHLGTKTHYYGRTILHGGAKYRATGRGFVVRHAKFAENYRMYSRSHFVKALELLILLVVYLAYGSSYRSSSLYLYVTVSIWFLVFCWLFAPFVFNPSCFEWHKTVDDWNDWWKWMGNRGGIGLAPEQSWEAWWVSEHDHLRNATIRSLLLEFILSLRFLIYQYGIVYHLHIVHGNKSFLVYALSWLVIAVALVSLKVVSMGREKFVTRIQLVFRILKGIVFLVLIGLLVLLFVGFDLAVSDVGASILAFIPTGWFILLVAQLCGPLFRRLIIEPLHLLCCPYGTGGACRGPCCARFRQRTGAALRKMGPWDSIQEMARMYEYTMGLLIFLPIAVLSWFPFVSEFQTRLLFNQAFSRGLQISRILAGQNGSGTKSD

SEQ ID NO: 9012 - protein, 284 aa, Zea mays
  VARIANT 139: note = Ancestral polymorphism is S, Derived polymorphism is L
  VARIANT 129: note = Ancestral polymorphism is W, Derived polymorphism is R
MATARLLRCASSTFLFSTCTTNPLRSCSPLVRRQHPRAAMATDSSAASFQKIQIQREDTTFDAYVVGKENAPGIVVLQEWWGVDYEIKNHAIHISQLGGGYRALIPDLYRGKVALDVAEAQHLMEGLDWQGAVKDIQASVKWLKSNGSPKVGVTGYCMGGALSIASGVLVPEVDAVVAFYGTPSSELADPSKAKAPIQAHFGEHDSFVGFSDVTAAKSLEEKLKSSGIPYEVHIYPGCSHAFMNTSPEALKRKKGMGLTDENQEAVDLAWSRFSSWMGRFLGSA

SEQ ID NO: 9013 - protein, 90 aa, Zea mays
  VARIANT 51: note = Ancestral polymorphism is D, Derived polymorphism is N
  VARIANT 38..90: note = Derived polymorphism lacks residues 38 to 90
  VARIANT 16: note = Ancestral polymorphism is K, Derived polymorphism is T
MQNEEGKTVDLYVPRKCFCSCGSATNRIITAKDHASVQINIGHLDANGMYNVTSPRLLSLGLSMLKVMLTARWTGRGRRRSLRSSSRSCM

SEQ ID NO: 9014 - protein, 347 aa, Zea mays
  VARIANT 45: note = Ancestral polymorphism is L, Derived polymorphism is F
MGKKIRNTDGTSTPARPMNQAVSLREETSGRTRVDDASLLRVKHLQRLAAWAGPEAGVRPIGALLGRRLAASAEAAGVPLNAATFLCQRCETILKPGFNCTVRIRNKRNKAKRRKKSNCCQNSVSYACHFCGDQNLILGSGKGVVQSLLLSRGHATMNSSHIIVRGNGSNTRAHDKKEVLELSQAAILQVESSSLLRQSTTESDEHGERLNCNLDEQMRETSHIFPEKVRICEATLQAELAPGSSFVTPQKMKPPVVTVAKDSAGLLKTGSGMISGSAIDALSGSSKSASNGSRNNVKYAARDSSQVSGSSRKRARKGWTTLKQMAEKDELERKEKMGNFVIPFFMQ

SEQ ID NO: 9015 - protein, 494 aa, Zea mays
  VARIANT 448: note = Ancestral polymorphism is M, Derived polymorphism is V
MAPGSSSSRKAKALKASYRLVADNFLAVLAMVSVVAVLFAAWPISIEDLACRLHAVRPLHVLTAAILTAALAKLRRMSRPSDVYLVEYGCFWPKPCFRAPFATCLEHVRLLPYLVNEDDISWGWRLLQRSGIGEETCVPYAYHYLPPDRSFRASLDETELVIFSAVDDVFARTTAVTPADIGVVIVNCSIFTPTPVFTDMIVNRYKLRADVRSVNLSGMGCSAALISIGLARNMLQVAPPGTHALIVSTEILSSQYYVGMDRSMLLPNCLFRMGAAAMIMSNTAARGARFRLARVVRTVASARDAAYRCVFQVEDEESNTGIRLSKDLVPTAAQTLKSNIVAFGPLVLPASEKLLVALSILRRRLVQSSRGRVYRPDFRTAFEHFCIHAGGRGVIDEVQRGLGLSDEDVEASRMTLHRFGNTSSSSVVYELAYIEAKGSMRKGDRVWMISFGAGFDCSSVAWECIEPAADAAGPWADCIHRYPVQLPKLMEALD

SEQ ID NO: 9016 - protein, 487 aa, Zea mays
  VARIANT 324: note = Ancestral polymorphism is G, Derived polymorphism is A
  VARIANT 277: note = Ancestral polymorphism is E, Derived polymorphism is K
  VARIANT 210: note = Ancestral polymorphism is G, Derived polymorphism is W
  VARIANT 199: note = Ancestral polymorphism is L, Derived polymorphism is F
  VARIANT 50: note = Ancestral polymorphism is R, Derived polymorphism is W
  VARIANT 14: note = Ancestral polymorphism is N, Derived polymorphism is T
MAKLLKPWYAAFVNRFLAMVAVASIVAAALRRAWPAFSMDDVVGSLGAARPVHVLMAVILAAGVAKLRRLRRPRDVYLVEYGCFRPRPCFRAPFATCLEHVHLLPYLVDDESVSFAIRLLERSGLGDETCLPYSYHYMPPDRSLEAAREEAELVIFSAVDEVFARASVRPEEIDVLIVNCSIFTPTPVFADMVVNRYGLRADVQCLNLSGMGCGAGLVSIGLAKNLLQVAPPGTRVLTVSTEILSSQYYVGSERAMLLPNCLFRMGAAATILSNSPERARFRLGRLVRTMTAARDADYRCIFQEEDGEGILGVRLSKDLTTTAGHALKRNIAAFGPLVLPVSEQLLVAMSLLKRKFMSGRRARVRLYRPDFRKAFEHFCIHAGGRAVIDEVQRGLGLSDEDVEASRMTLHRFGNTSSSLVLYELAYIEAKARMRAGDRVWMISFGAGFECSCVALECVKPPADAGGPWADCIDRYPVHLPEVAKDNI

SEQ ID NO: 9017 - protein, 437 aa, Zea mays
  VARIANT 377: note = Ancestral polymorphism is P, Derived polymorphism is R
  VARIANT 350: note = Ancestral polymorphism is T, Derived polymorphism is I
MEDPPALPLPEPESEPDPDPEASPAPPQRLLRLRCAVQHYEWGQRGAASLVARLADQNPDPARPYAELWMGTHPSAPSTLLDDGTLLSDWLARNPDALGPAVAARWGVDLPFLFKVLSVAKALSIQAHPDKKLAEVLHALRPSTYKDDNHKPEMAIAITEFRALCGFAGIEELKDVLRAFPEIEGLVGHEDTGKLMNMKEDDGVSEVKSSLQSAFAKLMTASKDMVSEAVAKLISRLNTKSKIRTLTDKEQLVLSLERQYQDDVGVIAALFFNYVKLSPGEALYIGANEPHAYLSGECIECMATSDNVVRAGLTPKYRDVQTLCSMLTYKQGFPEILRGVPVQPHVRRYTPPFNEFEVDWCLVPPGGLVVISPVPGPSIFLVITGEGEIQLDFMSDGEKAEEGDVFFVPAYTEVKISACGPESVQLYRAGVNSRFFS

SEQ ID NO: 9018 - protein, 1928 aa, Zea mays
  VARIANT 1319..1928: note = Derived polymorphism lacks residues 1319 to 1928
MASAGAGPSGPVRSISQTGRSRTMGRMPTRAFTIRPDGSSGEDGVDIVEEELVPSSLAPIVPILRAANEIEEENPRVAYLCRFTAFEKAHHMDQNSSGRGVRQFKTYLLHRLEKDEHETKRSLATTDAREIQKFYAQYCRKYLEQDHDKRKPEEMARYYQIASVLYDVMKTVTPGKNEYDDYAKDIENEKASFSQYNILPLNISAREQPIMKIPEIKAAVKLLEQINGLPMPRIELPQSSDRKTVSDKMDRPVVKDLLDWLRQTFGFQKDSVANQREHLILLLANIDMRQQGTADHSERHVHMIRSSTVIYLRNKIFHNYNSWCRYLHLESNIRIQRDAPTQQPELLYIGLYLLIWGEASNVRFMPECLCYIFHHMARDLHDIISDTSQGSFEPPFQGEGSDDAFLQLVIQPIYSVMQKEAARSKRGKVSHSLWRNYDDLNEYFWSKKCFKKLGWPMDPTADFFAEPTRAKNETEQHGHVIRRRRASKTNFVEVRTFLHMFRSFDRMWAFFILGFQAMVIIAWSPSGSLSSIFEPNVFKNVLTIFITAAFLNFLQATLELILNWKAWKSLECSQRIRYILKFAVAVAWLIILPTTYSSSIQNPTGLVKFLSNWIQNLQNESIYNYAVALYMLPNIFSALFFMFLPIRRALERSNSRIIRFLLWWTQPKLYVARGMYEDTCSLLKYTTFWILLLICKLAFSYYVEIAPLVEPTRIIMSLERPPYEWHEFFPNLRHNLGVVVTVWAPIVMVYFMDTQIWYAIFSTICGGVYGAFSRLGEIRTLGMLRSRFEAIPRAFGKKLVPDHGSHLKGDEEDKNPPFDKFADIWNAFINSLREEDLLNNREKDLLVVPSSGGQTSVFQWPPFLLASKIPIALDMAKSVKKKDDELMKRIKQDPYTEYAVIECYDTLLDILYSIIVVQSDKKVVDRIRESIKDSIHRKSLVKEFRLDELPQLSAKFDKLLNLLKEYDENDPVNRNTHIANLLQDIMEIITQDIMKNGKGILKDEGQKQQLFAKLNLDSLKHVAWREKCIRLQLLLTTKESAIYVPTNLEARRRITFFANSLFMRMPRAPPVRSMMSFSVLTPYFKEEVLFSPEDLHRKNEDGISILFYLRKIYPDEFRNFLQRIDFEVKDEEELKDKMDEICNWASYRGQTLTRTVRGMMYYRKALEIQCLQDMTDPAKVDRDRSIGSYQELQYDIEMAQAIADIKFTYVVSCQVYGMQKKSKDLNEKRRYQNILNLMIMNPSLRVAFIEEIEGLTRNGATEKTYCSVLVKGGEKYDEEIYRIKLPGNPTDIGEGKPENQNHAIIFTRGEALQAIDMNQDNYIEEAFKMRNVLEEFESRKYGKSKPTILGLREHIFTGSVSSLAWFMSNQETSFVTIGQRVLANPLKVRFHYGHPDIFDRLFHITRGGISKASKTINLSEDIFSGFNSTMRGGNVTHHEYMQVGKGRDVGMNQISSFEAKVANGNGEQTLSRDIYRLGRRFDFYRMLSFYFTTVGFYFSSMVTVLTVYVFLYGRLYLVMSGLEKSIMLDPRNQQNVKALENALASQSIFQLGLLLVLPMVMEVGLEKGFRTALGEFVIMQLQLASVFFTFQLGTKTHYYGRTILHGGAKYRPTGRGFVVYHAKFAENYRMYSRSHFVKGLELLILLVVYLVYGSSYRSSNIYLFVTCSIWFLVASWLFAPFIFNPSCFEWQKTVEDWTDWRKWMDNRGGIGMSVEQSWEAWWVTEQDHLRKTSIRAFVLEIILSLRFLIYQYGIVYHLNIADHHKSIMVYGVSWVVMLLVLVVLKMVSIGRQKFGTDLQLMFRILKGLLFLGFVSVMAVLFVVLHLTISDVFASILGYLPTGWCLLLIGQACSPLIRRTLLWDSIMELGRSYENIMGLVLFLPIGFLSWFPFVSEFQTRLLFNQAFSRGLQISRILAGQKDVSEFEFK

SEQ ID NO: 9019 - protein, 276 aa, Zea mays
  VARIANT 165: note = Ancestral polymorphism is A, Derived polymorphism is P
  VARIANT 10: note = Ancestral polymorphism is L, Derived polymorphism is R
MSRLFLGAALTAAAAGVLSSATSWKLSSPIPLSASPSSSPSAPVGPAAVTGHLALVRAHPALLELNAMLTPASFLVDATQALLVCALRCPPVYPEKLRKRRESFNAQILSAESDGHATAERAAMARANIAVIDAREGRLQDARDVMVQLAAERPGNTTLHLFAAAFCRVLGRHAEGGQCLHDPAVPDLSRHEHKILFATAVLSATTGSVPRAVAASEELVLTSTLGLLEISMWYFFKHGDLPERLQVLALMAFLRGVVAKKLNRDDERPAPSHRWY

SEQ ID NO: 9020 - protein, 250 aa, Zea mays
  VARIANT 165: note = Ancestral polymorphism is H, Derived polymorphism is Y
  VARIANT 79: note = Ancestral polymorphism is A, Derived polymorphism is E
  VARIANT 32: note = Ancestral polymorphism is G, Derived polymorphism is E
MSGRVLLRAAAFGLAAAGAASLHAVSKWTPPGEIPPFDLSVKFNLLESANGLQAALLRAHPLFGVHLHDVRARAELDLARVDMEIGHGGDPAAAADLRLLLALLAVRDGRADEAMRLYEEAFRHAPFDPRPRALAYNLCFLCGREDESAAWRSAYDRLVPGSIQYPGWESDKTRELVHELVIAATLGGVNVLLDPEWYLVMHVASKAMDKALVAALQDKALSATERLQFRLLRVFLDNFMEVEAELAEDD

SEQ ID NO: 9021 - protein, 271 aa, Zea mays
  VARIANT 88: note = Ancestral polymorphism is G, Derived polymorphism is D
MSRFFHGAALTAAAAVAGLSSAFSRSLTSSLPLAASPSSPSTPIGPVAASGHLALVRAHPGLRELDAMLTPGSFLVDATQAFLAVALGCLPTIPETLRKSRDFHTALSSREGRLEDAKMEGQAAVARTIIALVDAREGRLEDARDAFVRLAAERPFESTLRLFAAALCHVLGHHEEGGQWLHDSAVPDLSRLDHKNQFAQAVLAATIGSAPRAVVGSEELVLVSALGLLERSMWSIFTHGDLPARLHVLAFMAFLRAVVARKLHRDDATPN

SEQ ID NO: 9022 - protein, 272 aa, Zea mays
  VARIANT 112: note = Ancestral polymorphism is G, Derived polymorphism is S
  VARIANT 123: note = Ancestral polymorphism is A, Derived polymorphism is S
  VARIANT 208: note = Ancestral polymorphism is P, Derived polymorphism is T
  VARIANT 222: note = Ancestral polymorphism is T, Derived polymorphism is M
MSRFFRGAALTAAAAVAGLSSAFSRSLISPLPLAASPSSPSTLIAASGHLALVRAHPGLRELDAMLTPASFLVDATQAFLIVALRCPPIFPETIRRSPESLAEQILSAESEGHTAMEEAALKARTIMALMDAREGRLDDALDAIVLLAAERPGDTTLRLYAAALCYVLSRHEEGGQWLQDSAVPDLSRYEHKFHFVEAVLNAAIGSAPRAVVGSEELVLVSTLWLLEMSMWSIFTHGNLRERLLVLAMMAFLRGVVARKLHRDDGPATKQGS

SEQ ID NO: 9023 - protein, 911 aa, Zea mays
  VARIANT 631..911: note = Derived polymorphism lacks residues 631 to 911
MAFKGLPRDSRGSLEVFNPDAPVSDRATTSPFLLPPAAASHPSLLAAGDGGDADVGRATQRAAEWGLVLQTDEHTGRPQGVVARPSGSNRTSESGNSIDERAAAAGAGRALPRVSEELRAALSAFQQTFVVSDATRPDHPILYASAGFFNMTGYSSNEVVGRNCRFLQGSGTDPVEISKIRQALAAGSNYCGRILNYKKDGTPFWNLLTVAPIKDEDGRVLKFIGMQVEVSKYTEGNKDTALRPNGLPESLIKYDARQKDHARSSVSELLLALKDPRSLSESRNNTLKRKSQESAGSALVPGKRSSETGSRRNSHSGMRNSLQKISEVPEGGNKTRKSGLRSFMGLIGMGHGNVEKNILKPREDPLLDSDDERPDSFDDDFRKKEMRKGIDLATTLERIEKNFVITDPRLPDNPIIFASDSFLRLTEYCREEILGRNCRFLQGPETDRGTVKKIRDAIDNQTEVTVQLINYTKSGKKFWNLFHLQPMRDQKGDVQYFIGVQLDGTERVREAAAKDGAILVKKTADNIDEAAKELPDANLRPEDLWANHSKPVLPKPHMKDTASWRAIQKVLENGESIDLKHFRPVRPLGSGDTGSVHLVELLGTGEYFAMKAMDKSVMLNRNKVHRATAERQILDMLDHPFLPTLYASFQTKTHICLIVDYCAGGELFMLLDRQPMKVLKEDAVRFYAAEVVTALEYLHCQGIIYRDLKPENILLHRDGHISLTDFDLSCLTSCRPQVFLPHDIDKKKKRRKSRSNPIFFAEPMRASNSFVGTEEYIAPEIITGAGHTSAVDWWALGILLYEMLYGYTPFRGKTRQRTFANILHKDIRFPASIQVSLAARQLIYRLLHRDPANRLGSYEGAMEIKQHPFFRGINWALVRAATPPELEAPLQDTLEATLPPPAADGAHTDMF

SEQ ID NO: 9024 - protein, 1419 aa, Zea mays
  VARIANT 27..1419: note = Derived polymorphism lacks residues 27 to 1419
MDDYAREMMELKTLVTRTLEKKGVLAKIRAELRASVFEAIEEEDRVENDDGGNPALLGSCNDRAKQLHASPSGRLLTALVCEYLEWAQLSHTMKVYLPECNLPKDFWKNELKDFSNKSGAEGSRSAESGPMLLDVLEGYLKYENLSQTRMGGRRMMSSESDPSLNVEHRSMRRAPLSSAGNLPPMGRPISSSQQASDRRGGSSASNTRKDEYNWRYDTTDDISEEVLRASTALESVQLDRKSRNLPTSWRTTMSDDGDRTCPLCAEEMDITDQQLKPCKCGYDICVWCWHHIIDMAEKEETVGRCPACRTCYDKDRIVKMAATCDRTVAEKNAEKKHRTQKVKPKAAPSAAATSTVESKKHLASVRVIQRNLVYIIGLPAHLCNESVLECREYFGQYGKILKVSVSRPTGPPSQQASANSNISVYITYAKEEEAIRCIQAVHNFVLEGKVLRACFGTTKYCHAWLRNMTCGNPDCLYLHDVGSQEDSFTKDEIISAYTRTRVPQMASGVSQRRTGTVLPPPGDDFSYSAVVSAKHTFKNGTLNTTSQPRLSPPNSSSGRSTLPSAASWGQRDLNARTTATGATSSQSHTKPKSESQSNPFSSSSVFSCTKTPSSWNDDTSTAAKISEGQQLSEKESRTLQPYKPGISKETQALSSLESSLDIDFSTIPSAWNDDDIVVPDVMPKGSDENQVANKNGELTHPASKSLVLSKKDIKMNITSKTPSDFVSSPAISKSDVSTSDGDHSLTNITPKCLASNAVECQSSHTAVEKMLEDIGSKDTDMEKLSAQISSVTLGGNDEIQSMAGNQQPDVMPCTSVDVLMDQNFGRDLAHPNPDELLLPSENKDSIVSCQYSSDKRLDWSLEMQNCSVTPLNDRMDSALLTDKIHSRQLDGSEQSSYSSFVEFPSTVDTSLWNDTENNAALTIDNITSSQMQPGFSSTDNTYALLNGGQDGLGTVYTHDNVSVYTHGNVSGHPGMGSHHHRAMGSLRNNSIGSFDKTISVNKYERRIISDTLSEFNPWDDSYSTANNFARMLRESKNNDVHCIAPSWKSGTGIKESRFSFARQDNQGNLFDSSLRNCGTGTEQNFSLLPQNSRGNIYQNGLAFQSLENEFSNNNSPGVLDMATTGTSMSKISAPPGFSAPTRVPPPGFSTAFPSQDSLNPTPVFPSGILCHGGSIPPPRFSSFSSGISTQEVSKPPTRPPSPFSSRFSSQDGLDPSSRFPFSSGFSSHDGSNQSYGSTNPENLLRGTVQGGNSNHYQSQFGRHSSDMEFDDPAILAMGKGLMPGIGDSGLEMKNTPAFQAQLQPASSDPRFQLHVQPNVQSRQNMRFTDPMQDGLNHMNDNYLASRFLAQNQGPLSPYVQIPQQPRNSQVINGHWDGWSDLRQGNNAPMSDMSRILYPSEVNKLHMLGSNDVHNRAFGM

SEQ ID NO: 9025 - protein, 824 aa, Zea mays
  VARIANT 513..824: note = Derived polymorphism lacks residues 513 to 824
MASPDDPVLSACKKNLSHFRIKELKDVLHQLGLSKQGKKQDLVDRVMAVLLSQQDQAFETNGLPKAKSAVKIVEDTFRKMQDPTNTVAVSRSHELGDSVTCKKKPDDSAQAVKVRCPCGDSKPNDSMIKCIDPQCNIWQHVGCVVIPDTEKSADNISPELPSCFYCEVCRLSRADPFWVTVNHLLLPILIGPSTVAADGSYTVQYTAKSFQLSRANREILQQAECNIQVWCILLSDKVPFRMHWPLHSDMQVNGIYVRVVNRQPTQKLGANGRDDGPLLTDYLKEGPNKISLSRNDTRTFCLGIRIAKRRSLEQVLNLVPKEQDGENFDDALARVRRCVGGGAEANNADSDSDIEVVADFVSVNLRCPMTASRIQIAGRFKSCAHMGCFDLEAFIEINQRSRKWQCPICLKNYSLENIIIDPYFNRITSLIKSCGDDTSEIDVKPDGSWRVKGRPKLKDLTQWHLPDGTLSLSTDTAAKPGMCIVKHEVKEEPLSEEVGCHLKLGLRKKSNGQWEISKRVDADLVPSSGNDHDHSGHDENKNCITHSSNIDDTNIADEGYNLEPATNGYPMTHVHDLDSSSADENGPPASTGQDIVVLSDSDDDAIMVLSPGAVNCGSMHNTGNLFPPNTPENLGVCSGETGGCPKETSFLALKEDFGDPGLSFWESHGSPRDASTSQIPDASTKAVDNPGEVDNYPANDQSKQGQVSGADFGVAANPVPLEDGHDSALQPCSMSERDSAMGLASLGADTQSCVDVHSDNWTSVSISGRDEVLTAAKIASRKRSNPGDRIEDLDDDFESAPIVPTVSSPSLCHCTNVSESLAGL

SEQ ID NO: 9026 - protein, 114 aa, Zea mays
  VARIANT 3: note = Ancestral polymorphism is L, Derived polymorphism is S
  VARIANT 28: note = Ancestral polymorphism is S, Derived polymorphism is N
  VARIANT 77: note = Ancestral polymorphism is L, Derived polymorphism is F
  VARIANT 103: note = Ancestral polymorphism is H, Derived polymorphism is Y
MSLFHQRETEEEAMYYLPKEANDGRVNNVFFLMPCHSTPYYSTLHYKNLPPMRFCTALLVIAKGSWMSQIVSLQVDLSLWARFFFGNLSAFSHIVLFEFKERHAPFLRQHAIVP

SEQ ID NO: 9027 - protein, 402 aa, Zea mays
  VARIANT 76: note = Ancestral polymorphism is A, Derived polymorphism is P
  VARIANT 60: note = Ancestral polymorphism is S, Derived polymorphism is N
  VARIANT 55: note = Ancestral polymorphism is H, Derived polymorphism is P
MQMTADQESAAKATEDDTMSGRRRVDDDHDHDVVFDAGKPPPFRIGDVRAAVPEHCWRKNPWRSLWYVARDVAVVAALGAAAAGMDSWAVWPLYWAAQGTMFWALFVLGHDCGHGSFSDSATLNSVVGHLLHSFILVPYHGWRISHRTHHQNHGHIHRDESWHPITEKLYRQLEPRTKKLRFTVPFPLLAFPVYLLYRSPGKSGSHFLPSSDLFSPKEKSDVMVSTTCWCIMLASLLAMACAFGPLQVLKMYGIPYLVFVMWLDLVTYLHHHGHHQLPLPWYRGQEWSYLRGGLTTVDRDYGWINNVHHDIGTHVIHHLFPQIPHYHLVEATKAAKPVLGRYYREPHKSGPLPLHLLVVLLRSLRVDHFVSDHGDVVYYQTDHDLNTSSAHRWANQNHHKQK

SEQ ID NO: 9028 - protein, 303 aa, Zea mays
  VARIANT 47: note = Ancestral polymorphism is Y, Derived polymorphism is N
  VARIANT 58: note = Ancestral polymorphism is P, Derived polymorphism is H
  VARIANT 139: note = Ancestral polymorphism is Q, Derived polymorphism is K
MPCCQLMLDAIMSMNHTATSTPSWLRRLHAKKGISVPSNLQIDDFINGDGSQPSLCLPVPTSSYHHHKNLLDISKNQHQKATETEQCKPPNSQTQQSPRFEKPHMPQPQPKAMISNVLGTPSIDPMDTLPLKAFRKKKKSTSSTLCNKSINKEMQTTFMMSNVLDVPSCNSIETTPYNPICKQPKPNTNVTNALAIPSSTPMNTIQPRKGMKMNTKGKNRYEGKWNGNIYYTIVDTSIDKCKGTKKSICSNDFMVSSKNPKQTFEQHDSIIKGKRRFNLLSNLQEKYEKDKEVTLQEKVELSC

SEQ ID NO: 9029 - protein, 197 aa, Zea mays
  VARIANT 9: note = Ancestral polymorphism is P, Derived polymorphism is L
  VARIANT 41: note = Ancestral polymorphism is G, Derived polymorphism is D
  VARIANT 55: note = Ancestral polymorphism is V, Derived polymorphism is I
MAAVMGWFPRHATSVQPACCTTRAAVEERDVDVGVGDLARGDDGAGVEREERPAVEVEADAERGGGGVLGGARVGKGRQAGDGGGGGFGRRACEERGGGWRWAIVKAGERGEILARMGRKGAELPPDEDGGVECGDAHGERGRVAGGRIRGGGGGSRGEIRCGRCGLLEEICVVRAARAGAVYSSLLIVVEIVTLSY

SEQ ID NO: 9030 - protein, 217 aa, Zea mays
  VARIANT 208: note = Ancestral polymorphism is N, Derived polymorphism is I
  VARIANT 171: note = Ancestral polymorphism is K, Derived polymorphism is M
  VARIANT 158: note = Ancestral polymorphism is S, Derived polymorphism is L
  VARIANT 127: note = Ancestral polymorphism is C, Derived polymorphism is S
  VARIANT 117: note = Ancestral polymorphism is R, Derived polymorphism is H
  VARIANT 115: note = Ancestral polymorphism is Y, Derived polymorphism is H
  VARIANT 98: note = Ancestral polymorphism is W, Derived polymorphism is C
  VARIANT 90..217: note = Derived polymorphism lacks residues 90 to 217
  VARIANT 87..217: note = Derived polymorphism lacks residues 87 to 217
  VARIANT 69: note = Ancestral polymorphism is E, Derived polymorphism is D
  VARIANT 45: note = Ancestral polymorphism is G, Derived polymorphism is E
MVVTMKCCFSYVAGTTPYYSRCSSGPFSDDDFHAVSTAISGKPQGSTREATLIKLVDALESFMLHGLVENKHSIVWLSSHLLAQLIWLKQSRLLKAMWDVIHPKSGSNVFFPFTYYRILQADAGRSCRIVNTWGNGGSKNKLFLDMQELKAKISGLALNLSAEVGGKGVDMKNLADQRDLFQLFTPKHLVLLCLSVNESKLDTRSLVNLEVSARALP

SEQ ID NO: 9031 - protein, 1713 aa, Zea mays
  VARIANT 532..1713: note = Derived polymorphism lacks residues 532 to 1713
  VARIANT 557: note = Ancestral polymorphism is P, Derived polymorphism is L
  VARIANT 629..1713: note = Derived polymorphism lacks residues 629 to 1713
  VARIANT 642..1713: note = Derived polymorphism lacks residues 642 to 1713
  VARIANT 663..1713: note = Derived polymorphism lacks residues 663 to 1713
  VARIANT 694..1713: note = Derived polymorphism lacks residues 694 to 1713
  VARIANT 718..1713: note = Derived polymorphism lacks residues 718 to 1713
  VARIANT 812..1713: note = Derived polymorphism lacks residues 812 to 1713
  VARIANT 1308..1713: note = Derived polymorphism lacks residues 1308 to 1713
MAAANAPIAMREALTLTSLGIAPQFVTFTHVTMESEKYICVRETSPQNSVVIIDMAMPMQPLRRPITADSALMNPNTRILALKAQIPGTTQDHLQIFNIEAKTKVKSHQMPEQVVFWKWITPKLLGLVTQTSVYHWSIEGDSEPLKMFDRTANLANNQIINYRCDPAEKWLVLIGIAPGAPERPQLVKGNMQLFSVDQQRSQALEAHAASFATFKVVGNENPSTLICFASKTTNAGQITSKLHVIELGAQPGKPGFSKKQADLFFPPDFQDDFPVAMQVSQKYGLIYVITKLGLLFVYDLETAAAVYRNRISPDPIFLTAESSSTGGFYAINRRGQVLHATVNDATVVPFVSGQLNNLELAVNLAKRANLPGAENLVVQRFQELFAQTKYKEAAELAAESPQGLLRTPETVAKFQSVPVQAGQTPPLLQYFGTLLTRGKLNAFESLELSRLVVNQNKKNLLENWLAEDKLECSEELGDLVKTVDNDLALKIYIKARATPKVVAAFAERREFDKILIYSKQVGYTPDYLFLLQTILRTDPQGAVNFALMMSQMEGGCPVDYNTITDLFLQRNMIREATAFLLDVLKPNLPEHAFLQTKVLEINLVTYPNVADAILANGMFSHYDRPRIAQLCEKAGLYLRALQHYSELPDIKRAIVNTHVIEPQALVEFFGTLSREWALECMKDLLLVNLRGNLQIVVQAAKEYSEQLGVDACIKLFEQFKSYEGLYFFLGSYLSSSEDPDIHFKYIEAAARTGQIKEVERVTRESNFYDAEKTKNFLMEAKLPDARPLINVCDRFGFVPDLTHYLYTNNMLRYIEGYVQKVNPGNAPLVVGQLLDDECPEDFIKGLILSVRSLLPVEPLVDECEKRNRLRLLTQFLEHLVSEGSQDVHVHNALGKIIIDSNNNPEHFLTTNPFYDSRVVGKYCEKRDPTLAVVAYRRGQCDDELINVTNKNSLFKLQARFDRYVVERMDGDLWDKVLQPENEYRRQLIDQVVSTALPESKSPEQVSAAVKAFMTADLPHELIELLEKIVLQNSAFSGNFNLQNLLILTAIKADPSRVMDYVNRLDNFDGPAVGEVAVEAQLYEEAFAIFKKFNLNVQAVDVLLDNIRSIERAEEFAFRVEEDAVWSQVAKAQLREGLVSEAIESFIRADDAAHFLDVIRAAEEANVYNDLVKYLLMVRQKAREPKVDGELIFAYAKIDRLSDIEEFILMPNVANLQNVGDRLYDEELYEAAKIIYAFISNWAKLAVTLVKLKQFQGAVDAARKANSAKTWKEVCFACVDAEEFRLAQICGLNIIVQVDDLEEVSEYYQNRGCFNELIALMESGLGLERAHMGIFTELGVLYARYRSEKLMEHIKLFSTRLNIPKLIRACDEQQHWKELTYLYIQYDEFDNAATTIMNHSPDAWDHMQFKDVCVKVANVELYYKAVHFYLQEHPDLINDMLNVLALRLDHTRVVDIMRKAGQLHLVKPYMVAVQSNNVSAVNEALNELYVEEEDYERLRESVDMHDNFDQIGLAQKLEKHELLEMRRIAAYIYKKAGRWKQSIALSKKDNMYKDCMETCSQSGDRELSEDLLVYFIEQGKKECFASCLFICYDLIRPDVALELAWMNNMVDFAFPYLLQFIREYTSKVDDLVKDKIESQNEERAKEKEEKDLVAQQNMYAQLLPLALPAPPMPGMGGPPPPMGGMGMPPMGGMGMPPMGPGPMPAFGMPPMGSY

SEQ ID NO: 9032 - protein, 249 aa, Zea mays
  VARIANT 229: note = Ancestral polymorphism is S, Derived polymorphism is L
MPKSKRNRPVTLSKTKKKPGLERKGKVVAEIKDAVDKYSSAYVFTYDNMRNQKLKDLREQLKSSSRIFLAGKKVMQIALGRSPADEAKTGLHKLSKFLQGNSGLLFTNLPRDDVERMFREFEEHDFARTGSTAIDTALGVNVLPVYTDTITHTVVELKEGPLEQFTHEMEPFLRKQGLPVRLNKGVVELVADHVVCEEGKPLSPEAAQTLRLLGIQMATFRLYLVCRWSGDDFEVYKEGLMHLGADESS

SEQ ID NO: 9033 - protein, 70 aa, Zea mays
  VARIANT 58: note = Ancestral polymorphism is N, Derived polymorphism is D
MRFAGWYLKIAAVGASIGAAMELFMIHTGFYEKVTVLESEKRAWESSPEAQAMREALNPWRKHDEQEQQK

SEQ ID NO: 9034 - protein, 287 aa, Zea mays
  VARIANT 256: note = Ancestral polymorphism is R, Derived polymorphism is S
MALGDSATTPPVAKLSISGAALAALLHRCAAAAGDCDGLLFGRASHLPAPPAALSDYDDAAAAAAPPAPALSISVSGHCSLSHPSSLSDSLGRFQPHSSPAPASAPAPIGFFSSRRRTALRPSMREAVLAHSLSATLASAHPLLLILVSPSASPNHSTHSYDYRAFLLHGGRLVPASLAIVNVGPGFRDQYHAFTAESPMPWLPSAPAPGHAHTLVEQKAVDEMVDGFGIGRLQELLGAAAGQAAEIDDMYAGMLSKLEKLAREVEKSNLRVLEQNCALLDMDTRKL

SEQ ID NO: 9035 - protein, 704 aa, Zea mays
  VARIANT 347..704: note = Derived polymorphism lacks residues 347 to 704
MAMAAQQHRHHKRRRIALSPSPSPSLAPIPGAPTPPLDSLADELLFLVLDRVAQADPRALKSFALASRACHAAESRHRRTLRPLRADLLPAALARYPSATRLDLTLCARVPDAALASAAVSGSSALRAVDLSRSRGFGAAGVAALAAACPDLADLDLSNGVHLGDAAAAEVARARALRRLSLVRWKPLTDMGLGCVAVGCTELKDLSLKWCLGLTDLGIQLLALKCRKLTSLDLSYTMITKDSLPSIMKLPNLQELTLVGCIGIDDGALVSLERECSKSLQVLDMSQCQNITDVGVSSILKSVPNLLELDLSYCCPVTPSMVRNFQKLPKLQALKLEGCKFMANGLKAIGTSCVSLRELSLSKSSGVTDTELSFVVSRLKNLLKLDITCCRSITDVSLAAITSSCTSLISLRMESCSHVSSGALQLIGKHCSHLEELDLTDSDLDDEGLKALARCSELSSLKIGICLKISDEGLSHIGRSCPKLREIDLYRCGVISDDGIIQIAQGCPMLESINLSYCTEITDRSLISLSKCAKLNTLEIRGCPSVSSIGLSEIAMGCRLLSKLDIKKCFGINDVGMLYLSQFAHSLRQINLSYCSVTDVGLLSLSSISGLQNMTIVHLAGITPNGLTATLMVCGGLTKVKLHEAFRSMMPPHTIKNVEARGCVFQWIDKPFKVFYCSPGCFTHSVEVEPCDVWKQQSQDVLVR

SEQ ID NO: 9036 - protein, 508 aa, Zea mays
  VARIANT 41: note = Ancestral polymorphism is K, Derived polymorphism is N
MGVSLAGLSSLDNHTTNHEGITFNTGGAIYIFCGNKSSITKSIDSVDDSYSADGVEDSQLFLSVPALNQAASYLAQTASFLTQCLPVPGFVGLSEEGQELLTLPPASASGRLSVQTSSVEPSGTNSSLGQSDCGGNPSQENAGQMVPSHVFQNGASLFQGLVERARKTVRGSADDIGWLQRDQSLPTTEDGTARFLEILDSVRKNEHKLSDSLVYLLVPGLFSNHGPLYFVKTKAYFSKMGLACHIAKIHSESSVSKNAREIKEYIEEIYWGSRKRVLLLGHSKGGVDAAAALSLYWPQLKDKVAGLALAQSPYGGSPVASDILREGQLGDYVRLRKIMEILVSKVLKGDLQALEDLTYERRKEFLRRHPLPQDVPIVSFHTEASITPSVLTALSHVAHLELPIAGDGNSTRIPVVMPLSAAMAACSQLLVARYGEKSDGLVTRKDAEVPGSVAVRPERKLDHAWMVYSSLKEESGDQADTSQVCEALLTLLVEVAQKRRHEMAMKDE

SEQ ID NO: 9037 - protein, 379 aa, Zea mays
  VARIANT 248..379: note = Derived polymorphism lacks residues 248 to 379
  VARIANT 282: note = Ancestral polymorphism is G, Derived polymorphism is S
  VARIANT 347: note = Ancestral polymorphism is R, Derived polymorphism is C
MAPTRHADEGGQLQLIDAASVDEEEECFESIDKLISQGINAGDVRKLQDAGIYTCNGLMMHTKKNLTGIKGLSEAKVDKICEAAEKLLNQGFMTGNDLLLKRKSVVRITTGSQALDELLGGGIETLCITEAFGEFRSGKTQLAHTLCVSTQLPIHMHGGNGKVAYIDTEGTFRPERIVPIAERFGMDANAVLDNIIYARAYTYEHQYNLLLGLAAKMAEEPFKLLIVDSVIALFRVDFSGRGELAERQQKLAQMLSRLTKIAEEFNVAVYITNQVIADPGGGMFITDPKKPAGGHVLAHAATIRLMLRKGKGEQRVCKIFDAPNLPEGEAISFLLCLSMFTACANGRLTFTACQNLARLPCIPNSTDSEPFLLSANCHD

SEQ ID NO: 9038 - protein, 658 aa, Zea mays
  VARIANT 122..658: note = Derived polymorphism lacks residues 122 to 658
  VARIANT 149..658: note = Derived polymorphism lacks residues 149 to 658
MLLTVSDWVSSNFSCSPFSEEKKKEEPETPRYRDRAKERREDQNPDYEPTELGSFHAVAPPGSDLRLADAHKISIEKSKYLGDAPTERNPRKTCHALSCWLYFHVFRTGSFSDRDNTDYIAWNNVTILSHLLLLAQAVPHLTVHYLSNWSMGKATRQHLAIGYQTDLIMEYAGDLEHTHLVKGLGYALLHKVRSEIEKKPEAEDGKDAKSRATKEDQAVSFRTATAKSVYQWIIKPQSIIKENELFLPGRMSFIYNLEEVVTNDIPTTLHRSKADCPVQEEMVTVSVDGSVLDRIAKIMTYLRLGSSGKVLKKKKKERDIKGKNNLASGDCDESVKPSKINGSTQKHQSDMPPPPARPPQNNNFTGKEKQPVPVARADDDDIFVGDGVDYTVPNEEMSQSPVSDMDESPHNHQKQSNFIEPMYGPVPPSEPAQAWQQPNGYDAVQAQMAAAGYQGDWSSYVYAEQQLGYPEQYVQQSTQEYDVLADPSISQDPRFMTQADKDRGLGSVFKRDDQRLNQLREKDERERDPNFISDSYSECYPGYQEYNNEIAGSDDEDDLSKMDMGGRAKGRLHRWDFETEEEWAKYNDQKEAMPKAAFQFGVKMQDGRKTRKQNKDQKLTNDLHKINKILARKKGEKDGAEDGGHYDDDLPSSKKQRG

SEQ ID NO: 9039 - protein, 526 aa, Zea mays
  VARIANT 325..526: note = Derived polymorphism lacks residues 325 to 526
  VARIANT 266: note = Ancestral polymorphism is H, Derived polymorphism is L
MAPLANDEDHKIYGEGCGSHFLVVAYSIQGHVNPARTLAHRLAQTSGCTATLSVPLSCHRRMFPSSSDDDGEATTIISDGLISYLPFSDGKDDGSWPVDSEDRARRRDANFRTLSAVVSRLASGGSRPPVTCVVCTLSMPMVREVARAHGLPLAVYWIQPATVLATYYHYFHGHDALLRLLGLDDGGGRGHGQHEVTLPGLHRPLRARDMPTFLSEEKSQDGLSKMVLQSLRELFQKMDQEQEENKPVVLVNTFGELEDVALRAVHPYMDVFAVGPAVPVPGVLGGSRHQGEMNSASELAQIHLVPHDDETKKAYMEWLDAQPEKSVVYLSFGSLLGYTKRQAEEVLHGLQASGRPYLWVVRKEGRAEEVDLWLTEVEEEKKDISKGMVVAWCDQQRVLAHPSVGCFVTHCGWNSTLEAVVCGVPMVAVPSWSDQPVNAWLVEEEWGVGVRAERDGEGVLTRGELARCVELLMGGGDRAVQVRANASGLKERARRAVAAAGPLEACLESFVETMQGLGRSGKQIAF

SEQ ID NO: 9040 - protein, 262 aa, Zea mays
  VARIANT 82: note = Ancestral polymorphism is L, Derived polymorphism is I
  VARIANT 187: note = Ancestral polymorphism is P, Derived polymorphism is L
  VARIANT 201: note = Ancestral polymorphism is A, Derived polymorphism is S
  VARIANT 203: note = Ancestral polymorphism is R, Derived polymorphism is W
  VARIANT 220: note = Ancestral polymorphism is G, Derived polymorphism is C
MDDFDPVPSDCDDGDGGVAAASSSSPGRSICHAGCGRPSRVCLCPYLPASPLQTSTTIVILHHPHALRRNPLSTLPLLARCLSNLRLVPGRRLLPSSTAPAPGPVLLLYPSPAASDLVSWCRSTPRPARAAPTLLLLDGTWRQAREMHAASLAVLASLGAVPVALPVDSRADGDSMFESDLVVRKEPRKGCVSTMEAVARALRLLEPEREGAVVEETMLGVLRAMVAFQTEHLLHRTVKPRAKMRKKKELRREQEMQRDAVD

SEQ ID NO: 9041 - protein, 242 aa, Zea mays
  VARIANT 33: note = Ancestral polymorphism is P, Derived polymorphism is S
  VARIANT 16: note = Ancestral polymorphism is E, Derived polymorphism is A
MAMGAASILLMMVSLETLLLAAGAGAGGTIRLSSDVGGVAADLVTAMARARARAKHQLRDEERPWGECCDLAVCVKTYPLTCSCFDRVERCSDACKECVETEDSRHVCVDRYRGDPGPRCHDEDGRSGGPADDDAGGQATPTAVMADDKKAGGGDDDKKKRPWKCCDVPICTRSWPPVCRCADTVERCASTCQHCEQVEEGGPRRYRCLDTHRGDPGPRCGDGEDDGGEWSPTPRLARGHRF

SEQ ID NO: 9042 - protein, 89 aa, Zea mays
  VARIANT 10: note = Ancestral polymorphism is V, Derived polymorphism is M
MKSRSSTLLVILVLQALLLSAAVAKGPAGPKKQCWCGECTSWSGVWTCDDLLTKCAATCKNCVPVSTGKGATKYRCRDFLPENCGCKIH

SEQ ID NO: 9043 - protein, 728 aa, Zea mays
  VARIANT 5: note = Ancestral polymorphism is R, Derived polymorphism is L
MAACRPSGLSVLCSLYRLYICMLFIHVPRAHSLSFDLSFSKPQSPDLSSQKINFNGDAYPTPETLELTRNQHDQSSTNSIGRATYAQPVPLWDGATGETASFTTTFTFRIRPDSWSPYPGDGMAFFLGHYGSDIPVQSGGGMLGLVPTHTNGTGNGTVVAVEFDTFQNPTNDDISSNHVGIDVDSLNSTASTDTTSPTKNLTSGYLMAATVRYENVTRLLALELTVNDTSYYVNATVDLKGYLPERVAVGFSAATGNGGEQHQVLSWSFTSTLPEPPAPAPAPPPHATPDNNQPPKKKRSVGTTGLIIAVLVPLLSLLACAAGVLARRKLRGRRRRRPPNGSSDDDNDYQEQDNGSRAELERGVAATGPRRYAYRDLAAATDNFAEDGKLGRGGFGSVYRGKLTVAGEERPVAIKVLSSESSAQGRKEFEAEVRIISRLKHRNLVQLLGWCDSRHGLLLVYELVAQGSLDRHLHGSERFLAWPDRHQIILGLGSALRYLHQEWEQRVVHGDIKPSNIMLDDSLGAKLGDFGLARLGDHGGRWHTTKAVLGTAGYIDPEFVNTRHPSTHADVYSFGIVLLEVVSGRSPVVLLPGEPPFVLLKWVWGLYGRNAVLDAADEQLRGGGDDDECIERALVVGLWCAHPEQSERPSIAQAMHVLQSADARLPALPPQMYKTASDLAVTGRSYGVLSVESYSGGDSSTTTTTAGYSKTSSGSSTTALLRDSKERP

SEQ ID NO: 9044 - protein, 494 aa, Zea mays
  VARIANT 55: note = Ancestral polymorphism is C, Derived polymorphism is R
MGSDEEAALLVPAVEEGCPGCVMERRKASSNGRIPYRELFFVAATSLASALPITCLFPFLYFMVRDFRVAETEEDIGFYAGFLAASYMVGRGFSSIFWGVIADRVGRKPVITFSILSVYVRIVRSSIYQKLIWISITDALYCRVVFSALFGLSTTYWMAIATRLVLGALNGLLAPIKVNTAWALGLIVGPALGGYLSQPAEKYPHVFSKDSVFGRFPYLLPCLSVSAFATLVLISCEWLPETIHKHKVPEMDTKAFKALSSKEGYCDPPRKKKSLLQNRPWISTLLPYCFFSLHDTAYSEILSLWAVSDRKYGGLSFSTEDTGQVLAMAGASLLVYQLVIYRWVHRILGTVNSARIASAVSILVLATYPFMTYLSGVKLSLALCSAAMMRSALAITVTTGISLLQNNAVVRMKSSESLCQEQRGTANGISTTAMSFFKSIAPVGAGALFSWAQKRQDVAFLPGDQVVFMVLNLVQLLGLISTFEPFLVLPALPE

SEQ ID NO: 9045 - protein, 294 aa, Zea mays
  VARIANT 142: note = Ancestral polymorphism is K, Derived polymorphism is N
  VARIANT 124: note = Ancestral polymorphism is K, Derived polymorphism is M
MSAAATKVKRRVGKYELGRTIGEGTFAKVRFAKNTETGEPVAVKILDKEKVLRHKMAEQVTFPALKPNMGFGILVQSSVSRFGGTSHFADDDTNYYMVMGSKTKVYIVLEYVTGGELFDTINLKPSYLQPENLLLDSYGNLNVSDFGLSALSQQIKDDGLLHTTCGTPNYVAPEVLEDQGYDGAMADLWSCGVILFVLLAGYLPFEDSNLMTLYKKISNAEYTFPPWTSFPAKRLLTRILDPNPMTKFSHFHDPISSKVDFMYQLTRIEKEANWVILTGLVVAKPTDNKGLWCN

SEQ ID NO: 9046 - protein, 539 aa, Zea mays
  VARIANT 79..539: note = Derived polymorphism lacks residues 79 to 539
MQQQQPGAEGAVMKPSEPAEDEQHQQKPGLEGAVMKPSKPAEDEQHQQKPGLEGAVMKPSEPAEDEQQQEEAERRRLYQAWKGNNVRKPQHELLLSSSLLRYQFQMIFLCGGRLMFGPDAASLLLTTFLIVAPTIVFCYQIKSTFYGSGGRQQQQMHQAAALVVTVTTIMDLVFLSMTSTRDPGIVPRNSRAPPEADEFLGCNTPSMDWSGGRTPRMRLRRTKDVIINGFTVKVKFCETCLRYRPPRSSHCSICNNCVHKFDHHCPWVGQCIGLRNYRFFFLFIATSTFLCIFVFIFSWLSVYSQMEENGGSIWKALRKEACSFALIIYTSIVVWFVGGLTVFHLYLIGTNQTTYENFRYHYDKKDNPYRKSIAANFAEVFFTKIPPPMNDFRSWVGEGALEAGFYTPYIGLDVTNPREKIDLDMESKEVLVGGIQIPTALQNIDYGSFEESSGDKNRNAGQKSAHFPIAWAQGNEAAGTSAGATVTFNNKTSDDGVNEFDSPNTTTTQASTKANTEPPGRVDKMEGTMDRYDRRCNTI

SEQ ID NO: 9047 - protein, 689 aa, Zea mays
  VARIANT 30: note = Ancestral polymorphism is S, Derived polymorphism is F
MPCFSNRHTHCISAYAYRKWKPMDLKQAFSGTIFCLLLLFCVGCRCRTLEIEATQTAALKVDASPQLARKIPETLFGIFFEEINHAGAGGIWAELVSNRGFEAGGSHTPSNIDPWSIIGDDSSVFVATDRTSCFSRNIVALRMEVLCDDCPAGGVGVYNPGFWGMNIEDGKAYNLVMYVQSPETKDLTVSLTSSDGLQNLASATITVSGTSNWTKVEQKLVAKGTNRTSRLQITTNKKGVVWLDQVSLMPEDTYKACYIILLGHGFRTELISMLLDLKPRFLRFPGGCFVEGDWLRNAFRWRESIGPWEERPGHFGDVWHYWTDDGLGYYEFLQLAEDLGAAPIWVFNNGISHNDEVDTVAIAPFVKDVLDSLEFARGSADSTWGSVRAAMGHPEPFLVKHVAIGNEDCGKKFYRGNYLKFYNAIREAYPDIQMISNCDGSSRPLDHPADLYDFHVYTDSKTLFNMRSTFDRTSRSGPKAFVSEYAVWRSDAGRGSLLASLAEAAFLTGLEKNSDIVQMASYAPLFVNDNDQTWNPDAIVFNSWQHYGTPSYWMQTIFRESSGAMIHPVNISSRYSSSLAASAITWQDAENSFLRVKASSRVVNFGSDTVNLTVSTSGLGASVNALGSTATVLTSGNVMDENSFSNPNKVAPVKSQLSNAAEQMQVTLAPHSFTAFDLALAEPKLVAEI

SEQ ID NO: 9048 - protein, 80 aa, Zea mays
  VARIANT 7: note = Ancestral polymorphism is N, Derived polymorphism is S
  VARIANT 12: note = Ancestral polymorphism is K, Derived polymorphism is M
  VARIANT 17: note = Ancestral polymorphism is E, Derived polymorphism is K
  VARIANT 29: note = Ancestral polymorphism is A, Derived polymorphism is T
MDSSALSNPRLMALIEEEKKRAMANELVAKLTFVCWDKCVTGSVGSSLSRSETSCLSNCAKRFAEVKMMALQRFTTTGRG

SEQ ID NO: 9049 - protein, 187 aa, Zea mays
  VARIANT 112: note = Ancestral polymorphism is T, Derived polymorphism is K
MSYMRGDLLTRMRKLVKGLARPEPRWLKALERAPPVTFPRPEGKIKTLVLPEDVYVTKFNRIHPDSLYHDAIKISGFDPPPARVFAWRVLELKEQGVDEDVAMAVADNEYRTEKKAKKKAYKELKEIARSEGRKPPPNPYPSAIKEIQAEEKKYVMDRLHNPKVIEIANKMKEERDRMLRDRAAGQR

SEQ ID NO: 9050 - protein, 840 aa, Zea mays
  VARIANT 126..840: note = Derived polymorphism lacks residues 126 to 840
  VARIANT 199..840: note = Derived polymorphism lacks residues 199 to 840
  VARIANT 652..840: note = Derived polymorphism lacks residues 652 to 840
MTNPLIMLLLTIICATLGLTAGAPQPLGGIVCIPSERAALLSFKKGITRDKTNRLGSWHGQDCCRWRGVTCSNRTGNVLMLNLAYPSYPYDDSYDRDVCGDSRTLFGEISPSLLLLRQLEHIDLSWNCLLGPNGRMPSFLGSMKNLRYLNLSGVPFKGSVPPQLGNLSRLQYLDLGNSYLAYGIYSKDITWLTNLPLLQYLGMRYVNLSGIAGDWPHILNMIPSLRFDKYRHSRVDGQITTVHKGKQKLTVTGAPSGPSSIGYFRSLRILDLSYNNLRGSVPTEIGTLTNLTYLDLSNNNLGGVITEEHFVGLMNLKEIDLSFNNLSVVVDADWIQPFRLESAGFASCHLGPLFPVWLRQQLLHITKLDISSTGLVGNIPDWFWSFSKAASLDMSYNQLNGNLPTDMSGMAFLELNLGSNNLTGQMPPFPRNIRKLDISNNSFSGIMPHKIEAPLLQTLVVSSNQIGGTIPESICELKNLLFLDLSNNLLEGEIPQCSDIERLEFCLLGNNNLSGTFPAFLRNCTSMVVLDLAWNNLSGRLPSWIRELYSLQFLRLSHNSFSGNIPSGITSLSCLQYLDLSGNYFSGVIPPHLSNLTGMTMKGYCPFEIFGEMGFKFDDIWLVMTKGQQLKYSLGLVYFVSIDLSGNGLTGEIPLGITSFDALMNLNLSSNQLGGKIPNKIGAMMSLESLDLSINKLSGEIPWSLSNLTSLSYMNLSYNNLSGRIPSGRQLDTLNADNPSLMYIGNSGLCGPPLQNNCSGNGSFTPGYYHRSNRQKIEFASFYFSLVLGFVVGLWMVFCALLFMNTWRVAYFGLLDELYNKIYVFVAVKWASMTMSAAAE

SEQ ID NO: 9051 - protein, 965 aa, Zea mays
  VARIANT 245: note = Ancestral polymorphism is S, Derived polymorphism is I
  VARIANT 237: note = Ancestral polymorphism is S, Derived polymorphism is R
MSNPLPMLTLTIICATLWLTSGAGGTGTDTGGDNSSGGGCIPSERAALLSFKKGITSDNTSRLGSWHGQDCCRWRGVTCSNLTGNVLMLHLAYPMNPDDDLYYTDVCDDYTTLFGEISRSLLFLRHLEHMDLSWNCLIGPKGRMPSFLGSMKNLRYLNLSGVPFKGSVPPQLGNLSRLQYLDLGSSYLGYGIYSKDITWLTNLPLLQYLGMGSVNLSGIAGHWPHILNMLPSLRVISLSFCWLGSANQSLAFFNLTKLEKLDLSFNNFHHTYISSWFWRATSLKHLVLKDTGLFGELPDALGNLTSLVVLDLSGNANITITQGLKNLCGLEILDLSANRINRDIAELMDRLPLCTRENLQLQELHLEYNSFTGTLTSSIGHFRSLSILELNNNNLRGSVPTEIGTLTNLTSLDLSNNNFGGVITEEHFVGLMNLKKIHLSFNNLSVVLDADWIQPFRLESAGFASCHLGPMFPVWLRQQLVYITTLDISSTGLVGNIPDWFWSFSRAGSLDMSYNQLNGNLPTDMSGMAFLELNLGSNNLTGQMPPFPRNIVLLDISNNSFSGIMPHKIEAPLLQTLVMSSNQIGGTIPKSICKLKNLSFLDLSNNLLEGEIPQCSDIERLEYCLLGNNSLSGTFPAFLRNCTSMVVLDLAWNNLSGRLPSWIWELKDLQFLRLSHNSFSGNIPSGITNLSFLQYLDLSGNYFFGVIPRHLSNLTGMTMKGYYPFDIFDKTVSKFDDIWLVMTKGQQLKYSREIAYFVSIDLSGNYLTGEIPLGITSLDALMNLNLSSNQLGGKIPNNIGAMRLLASLDLSINKLSGEIPWSLSNLTSLSYMNLSYNNLSGRIPSGRQLDTLNVDNPSLMYIGNSGLCGPLQNNCSGNGSFTPGYHRGNRQKFEPASFYFSLVLGLVVGLWTVFCALLFINTWRVAYLGLLDKVYDKIYVFVAVKWASMTMSAAAAEREHTTNTM

SEQ ID NO: 9052 - protein, 1133 aa, Zea mays
  VARIANT 75..1133: note = Derived polymorphism lacks residues 75 to 1133
MDPSPRQCHAHTLLLLLCTSVLVFLSNNSAFSSAQPGNRSEADRQALLCFKSGISDDPRRVLTSWSADSLSFCGWRGVSCSSSLPLRVLSLELRSVRLHGTLLHNCMANLTSLVRLDLSGNHISGTIPEEVATLPGLQTLMLAGNILSGSIPPSLGVASPSLRYVNLAGNNLSGVIPDSLPKAPSLRVLNLSMNILAGMIPVTIFNSNSSKLVTVDLQLNHLTGPIPSLQNPTSLQFLGLTGNVLSGRVPPSLGNVSSLNTILLAENNLSGPIPEALGHILNLNILDLSENMLSGNVPRFQKATSLQLLGLNGNILSGRIPASLGNVSSLNTIRLAYNTLSGPIPEALGHILNLNILDLSENMLSGNVPAAIYNVSSFRYLHLGNNLLDGQILPNTGHSLPNLMSLIMRGNRFTGVVPSSLANMSKLQEIDLSRNLLNGSVPSLGSLSNLSRLILGSNMLQAEDWVFLTSLTNCSQLSMLSIDGNSLEGSLPESVGNLSRNLERLNFRGNWISGTIPAAIGNLVNLTLLAMDHNMLSGSIPSTIGNLKNLVVLALSTNRLSGEMPSTIGDLPQLNQLYMDDNLLSGNIPASLGQCKRLNMLNLSVNNLDGSIPSEILNISSLSLGLDLSNNNLNGTIPPQIGNLINLGLLNVSSNRLSGEIPTELGQCVLLSYLQMESNMFSGIIPQSLSELKGIEQMDLSENNLSGQIPEFFESFRTLYHLDLSHNKLVGPIPTSGIFTNPNAVMLDDNLGLCQQSTIFALPICPTTSSVTKRKNDARLLLIVAPPATIALLSFLCVLATVTKGIATQPPESFRETMKKVSYGDILKATNWFSPVNKISSSHTASVYVGRFEFDTDLVAIKVFHLDEQGSLNGFFNECEVLKQTRHRNLIQAITLCSTVDFENNEFKALVYEFMANGSLDMWIHPSLHQGRRRRVLSLGQRISIAADVASALDYLHNQLIPPLIHCDLKPSNVLLDYDMTSRLGDFGSAKFLSSSLTSSSPEGFVGASGTIGYIAPEYGMGCKISTDADVYGFGVLLLELLTAKRPTDEIFGNDLSLHKYVDIAFPDKIDEILDPQMQNEGEVVCNLRMQNYLIPLVEIGLMCSMESPKDRPGMQAVCAKIIAIQEAFIQTF

SEQ ID NO: 9053 - protein, 167 aa, Zea mays
  VARIANT 147: note = Ancestral polymorphism is A, Derived polymorphism is T
  VARIANT 130: note = Ancestral polymorphism is E, Derived polymorphism is K
  VARIANT 103: note = Ancestral polymorphism is V, Derived polymorphism is I
  VARIANT 80..167: note = Derived polymorphism lacks residues 80 to 167
  VARIANT 52: note = Ancestral polymorphism is P, Derived polymorphism is H
  VARIANT 15: note = Ancestral polymorphism is P, Derived polymorphism is S
MASGGAFPVQLLHLPGGVGGGGGHWSNLGAAYAAVTFLRPQGKSLVLYAAGPDADGQCQQQHPQGRIVFAYPILPGDAFERLDGATLSWAEPESGAEFALCFVDEAACAAVCGAISASVSSRVSPAAGVEGVAERLARLRVAREEAAPALGGADIAARLAQLSIGRP

SEQ ID NO: 9054 - protein, 418 aa, Zea mays
  VARIANT 392: note = Ancestral polymorphism is T, Derived polymorphism is I
  VARIANT 387: note = Ancestral polymorphism is S, Derived polymorphism is L
  VARIANT 386: note = Ancestral polymorphism is S, Derived polymorphism is I
  VARIANT 374: note = Ancestral polymorphism is A, Derived polymorphism is S
  VARIANT 373: note = Ancestral polymorphism is S, Derived polymorphism is Y
  VARIANT 366..418: note = Derived polymorphism lacks residues 366 to 418
  VARIANT 351..418: note = Derived polymorphism lacks residues 351 to 418
  VARIANT 350: note = Ancestral polymorphism is E, Derived polymorphism is K
  VARIANT 338: note = Ancestral polymorphism is A, Derived polymorphism is V
  VARIANT 308..418: note = Derived polymorphism lacks residues 308 to 418
  VARIANT 295: note = Ancestral polymorphism is R, Derived polymorphism is C
  VARIANT 286..418: note = Derived polymorphism lacks residues 286 to 418
  VARIANT 283: note = Ancestral polymorphism is M, Derived polymorphism is I
  VARIANT 275..418: note = Derived polymorphism lacks residues 275 to 418
  VARIANT 267: note = Ancestral polymorphism is M, Derived polymorphism is T
  VARIANT 264: note = Ancestral polymorphism is T, Derived polymorphism is M
  VARIANT 255: note = Ancestral polymorphism is D, Derived polymorphism is N
  VARIANT 231: note = Ancestral polymorphism is R, Derived polymorphism is C
  VARIANT 230: note = Ancestral polymorphism is D, Derived polymorphism is V
  VARIANT 218: note = Ancestral polymorphism is L, Derived polymorphism is I
  VARIANT 217..418: note = Derived polymorphism lacks residues 217 to 418
  VARIANT 216: note = Ancestral polymorphism is L, Derived polymorphism is F
  VARIANT 214: note = Ancestral polymorphism is E, Derived polymorphism is K
  VARIANT 201: note = Ancestral polymorphism is M, Derived polymorphism is I
  VARIANT 167: note = Ancestral polymorphism is R, Derived polymorphism is C
  VARIANT 104: note = Ancestral polymorphism is D, Derived polymorphism is V
  VARIANT 96: note = Ancestral polymorphism is D, Derived polymorphism is N
  VARIANT 65: note = Ancestral polymorphism is R, Derived polymorphism is W
  VARIANT 61: note = Ancestral polymorphism is P, Derived polymorphism is T
  VARIANT 58: note = Ancestral polymorphism is S, Derived polymorphism is F
  VARIANT 56..418: note = Derived polymorphism lacks residues 56 to 418
  VARIANT 52: note = Ancestral polymorphism is A, Derived polymorphism is V
  VARIANT 48: note = Ancestral polymorphism is H, Derived polymorphism is L
  VARIANT 47: note = Ancestral polymorphism is A, Derived polymorphism is T
  VARIANT 42: note = Ancestral polymorphism is A, Derived polymorphism is T
  VARIANT 41: note = Ancestral polymorphism is C, Derived polymorphism is F
  VARIANT 15: note = Ancestral polymorphism is R, Derived polymorphism is C
  VARIANT 11..418: note = Derived polymorphism lacks residues 11 to 418
  VARIANT 8: note = Ancestral polymorphism is E, Derived polymorphism is K
  VARIANT 3: note = Ancestral polymorphism is R, Derived polymorphism is C
MVRELRVESFYARLRSTTATAAVSSSPLLILPSVADVDSLCAVRVLAHVLSVDSIRFSIHPGAHRDLHVLLHATAFVVNSHRLVHLHNLCASNDRDVVLLTADDEHTTDLSYDFDLSTLVDAYDISVDANSDDHLSGASNPDASGSDDSDADEDGADAAGDDRRKRCRLFDDPDLVRFFGRLRREYYHLSTFHGKPSGCLMYDLAHAMRKNTNKLLWLACVALADQFIHDRITKERYQATVIELEQHINGSGNLDLSSAGNVVTLKMGFPLVDCQKNFQYISMEVKRKMRDEFDRFLSEHGLTEFYYRSFLKVYGYRSKVSVVDVVYGVIALLESLDAESKDAKESSAAEQFWVAYSALSLGNAGQLRKGMQSSIAIQRVILRQGSSVITKTWFIRSAKKFRWVRLNDPMDTIKLCHP

SEQ ID NO: 9055 - protein, 479 aa, Zea mays
  VARIANT 133: note = Ancestral polymorphism is P, Derived polymorphism is L
MAPRGRTLLLPLAAATVLVASTIFLFAAVGARWRPADTGLPVPPDAFPTAVTIALPNATTGKELSFLDENGRPDDSSSASASGATAVRCDPRAAAVRVFMYDMPPEFHFGLLGWSPPSPASVWPDVTDGSLPPPRYPGGLNQQHSVEYWLTLDLLSSSSFSLSPPCGRHSAVRVTDPRDADLVFVPFFASLSYNRHSRPLPPEKVGRDKALQEKLVGYLTARPEWRRFGGADHVIVAHHPNSLLHARAALSPAVFVLSDFGRYPPRVASLEKDVIAPYKHMAKTFVNDSAGFDDRPTLLYFRGAIYRKEGGTIRQELYYMLKDEKDVYFSFGSVQDHGASKASQGMHSSKFCLNIAGDTPSSNRMFDAIVSHCVPVIISDDIELPYEDVLDYSKFSIFVRSSDAVEKGHLMRLLSGVSKQRWTEMWSRLREVDRHFEYQYPSQKDDAVQMIWRSLSRKVPSIKLKVHRSGRFSRSGRGK

SEQ ID NO: 9056 - protein, 377 aa, Zea mays
  VARIANT 142..377: note = Derived polymorphism lacks residues 142 to 377
MATRYWIVSLPVQSPGATATSLWSRLQDGISRHSFDTPLYRFNVPDLRVGTLDSLLALSDDLVKSNVFVEGVSHKIRRQIEDLERAGGVDSGALTVDGVPVDTYLTRFVWDEGKYPTMSSLKEIVGSIQSQVAKIEDDMKVRAAEYNNVRSQLTAINRKQSGSLAVRDLSNLVKPEDMVCSEHLVTLLAIVPKYSQKDWLSSYESLDTFVVPRSSKQLYEDNEYALYTITLFAKVVDNFKVRAREKGFQVRDFEYSPEAQESRKQEMEKLLLEQEVMRTSLLQWCYASYSEVFSSWMHFCAVRIFVESILRYGLPPSFLSAVLAPSTKGEKKVRSILEDLCGNVHSIYWKGEDDVAVAGLGGESEVHPYVSFTINFV

SEQ ID NO: 9057 - protein, 757 aa, Zea mays
  VARIANT 17..757: note = Derived polymorphism lacks residues 17 to 757
  VARIANT 130..757: note = Derived polymorphism lacks residues 130 to 757
MCKGLSSLMILVAWEVWKHRNDSVFENLSPSTQAVLRSVSMEQHMGGEVAGLRRGSMARPVSVQAPTPLPARSRDVRVLHEVLPSLRSARPVPSSVADGVPDARKEELAAPDCTEEGSPEAKHCTSVEVKKGDSVHPDGDWGTVEFNVVEHGVEVASDDPQRLKHVETSNAAGQEEDSGFKIDEEGSFRPLQVSGDVAEDQTVGVKTEVAVSDVAVQRENMEDKQDGIVKAASLPTAALEAEGQFGADAELEDLESILNELSVAEPEEFESPVVEDKHSRRLSCTGVTDSYKSASRKGRSRSMDASTDSVANEFLDMLGIEHSPVGQPSDSDSESPRERLWKQFEKEALASGNAILGLDFDDGIEGPICDNVVEDFDLSAMIHEAELELQNGSQPIDTKFRAKSLEDEETEALMRQFGLNEKSFQSSPPESRSGFGSPISLPPEQSLELPPLAEGLGPFIQTKDGGFLRSMNPALFKNAKNKCSLVMQASSPIVLPAEMGSGIMDILHGLASIGIEKLSMQANKLMPLEDVNGKMMQQIAREAAPALESAERYDALDYHSIGALVEGCGNAPSGKKTGRCADLSSLGGENASEYVSLEDLAPLAMEKIEALSIEGLRIQSGMSEEDAPSNISAKPIGEFSSLQGKCAENTWSLGLEGTAGLQLLDVKQSGEVDGLMGLSITLDEWMRLDSGVVDEEEQYSDRTSKYKIRSDMCRCSSERTPVATHGHTPSKRIKGGHTNKPTLSLTQTLIDSEALIA

SEQ ID NO: 9058 - protein, 310 aa, Zea mays
  VARIANT 180: note = Ancestral polymorphism is E, Derived polymorphism is G
  VARIANT 162: note = Ancestral polymorphism is L, Derived polymorphism is P
MSLWRAAASRLLLTRHSPSSPSAATAALLLHARSFSPPPPRPAQAQPEAEVTPAEARRLVRLVGVEALKRRLRDGRDEVVGYDQLLDACVEAGAARTHAEAEALARALDHAGVVLLFRDKAYLHPEKVAFLERYITLSLHRHRFFVRSHLVPNSNSKLLAAPVTVVDLVRRAVPLALAPENDPRKEEFELLREKKEAIDRLAHKQVRRILWSGLGFFMCQVGLFFRLTFWEFSWDVMEPIAFFTTASGLLVGYAYFLITSRDPTYQDFMERLFLSRQRKLCAAHKFDMERFMELQKHCRCPLEGHGPRGP

SEQ ID NO: 9059 - protein, 279 aa, Zea mays
  VARIANT 68: note = Ancestral polymorphism is R, Derived polymorphism is C
MSTRIHPSSSDAAGRARLRAAEERERERRPAVYTVWKRSSMGFQGTDGFCVYDDAGGLAFRVDNYSRRRKLCAGELLLMDGTGTPLLSLRPQRFGQIKHKLTTTAAANQGAKNAVQQLLSLHDRWNCYTATEDAAVDKKTTSPAQQQVFTMSRCSALRSSDDAEVHMAGSAAAAASSSSLSCKRPQAVAAAAPGYRVEGSFSGRSCKIRRGSDGREAARVTRKSAGVASRPAATLGDDVFSLVVQPGVDVATVMAIVVVMDRICRRRPYTPMVCSSSSQ

SEQ ID NO: 9060 - protein, 218 aa, Zea mays
  VARIANT 188: note = Ancestral polymorphism is R, Derived polymorphism is S
MAKVYPNSAAVAAEPATRAAAGDQQPEPPTVLTVWRKSLLFNCDGFTVYDARGDLAFRVDCYATSRRRAEVALMDAAGAPLLTLHRKRLSLAERWLIYEDGAGTTQPQPQPRRPLLSVHRHVGLRASGGKTLAHVFAPSSAAQEAFVVEGSYGRRDCAVRDARGDVVAEVRRKEAVGDDVFRLVVSPRFGAPLAMGLVIVLDEMFGGRSSWSWLRRAC

SEQ ID NO: 9061 - protein, 254 aa, Zea mays
  VARIANT 82: note = Ancestral polymorphism is W, Derived polymorphism is C
MFSSSSKIFPAPQARSSPSSSSLLTITVRNSRPVKLSKTEEKQVWLEIAVPSLRKNAQHTGSVVTQAPHFDGYQWRKYRQKCISKAKHSRYPCILILICSCLPRNYYRCANSKDQGCPATKTVQQKETDGSGAVKLFDVDYYGQHTCNKDGVIHPYVVDTAHDSVPTVDHNQSCSTPTSSAHNNGVHGILQDDESFENLFMVPSIPEHLTDESFENLVMVSSIPEYYLADFTDVEMAEGALEVASMMISEDIWA

SEQ ID NO: 9062 - protein, 239 aa, Zea mays
  VARIANT 41: note = Ancestral polymorphism is A, Derived polymorphism is G
  VARIANT 110: note = Ancestral polymorphism is L, Derived polymorphism is F
MDDCDEEQRRCAVGSETETVNVEGIPFPAEITVGNPLSLLGTGITDIEIHFLQIKYNAIGVYLHNAGGGDSTTPTLLGHLGAWKGKTAEELLADAAFWAALVAAPVEKLFRVVVIKEIKGSQYGVQLESSVRDRLAAADLYEDDEEEALEKVADFFQSKYFKPGSVVTFHFPAPASASPGPAAEITFATEGKGDARIAVENGNVAGMIQTWYLGGDSAVSPSTVRSLANRFAALLAVAA

SEQ ID NO: 9063 - protein, 217 aa, Zea mays
  VARIANT 43..217: note = Derived polymorphism lacks residues 43 to 217
  VARIANT 61..217: note = Derived polymorphism lacks residues 61 to 217
MICSTVVILSVICTATGVLIAALGDFSFDLYGYCMALTSVFFQTMYLILVEKSGAEDGLSSVDLMFYNSILSLPFLFFLIIATGEFPHSLTVLSAKAASLMFGVILVISLVMGIVLNFTMFWCTIVNSALTTTIVGVLKGVGSTTLGFDLLGGVEVLALNVTGLVINTFGGLWYSIWMPQLLAAMPLYGCPNYLLLCPYMDASLIVGHHGHGTTTPP

SEQ ID NO: 9064 - protein, 185 aa, Zea mays
  VARIANT 168: note = Ancestral polymorphism is A, Derived polymorphism is T
  VARIANT 147: note = Ancestral polymorphism is A, Derived polymorphism is V
  VARIANT 146: note = Ancestral polymorphism is T, Derived polymorphism is I
  VARIANT 132: note = Ancestral polymorphism is M, Derived polymorphism is I
  VARIANT 131..185: note = Derived polymorphism lacks residues 131 to 185
  VARIANT 128..185: note = Derived polymorphism lacks residues 128 to 185
  VARIANT 49: note = Ancestral polymorphism is T, Derived polymorphism is M
MAAVLNSRKTPQAVVAVLVAAALLASSASAAITCGQVGSSLAPCIPYATGRASALPASCCSGVKSLNSAARTSADRQAACRCLKSLANSVKSVNMGTVATIPGKCGVSVGFPISMSTDCNKFTKVIEWFKRMYAVDNVLPDEVTYTVVLDFYMQLDMKREVLTLFDRARAAASSLTTSPSLSSPK

SEQ ID NO: 9065 - protein, 119 aa, Zea mays
  VARIANT 65: note = Ancestral polymorphism is K, Derived polymorphism is Q
  VARIANT 25: note = Ancestral polymorphism is T, Derived polymorphism is I
MARTQSAVAVAVVAAVLLLAAAATTSEAAITCGQVSSAIAPCLSYARGTGSGPSASCCSGVRNLKSAASTAADRRAACNCLKNAARGVSGLNAGNAASIPSKCGVSIPYTISTSTDCSR

SEQ ID NO: 9066 - protein, 318 aa, Zea mays
  VARIANT 58..318: note = Derived polymorphism lacks residues 58 to 318
  VARIANT 110: note = Ancestral polymorphism is P, Derived polymorphism is L
  VARIANT 182: note = Ancestral polymorphism is P, Derived polymorphism is L
MPCLFLTTSPPRSRLAADCSPPWSHHPLNPHATPSSSCPCLVFILVSPPHPEVVLLAQSQLVPLPHPIVFLPGPTPLPPPLAHASPRLSWSRIKRARARTRGGWELAQAPVVALTVMLIEAKEYGEMMESVNEVMFTLDGLRPIAQKRMRRASLSATLPSVATCYGPKGECIEGAYFPCAQLRTSIGFLLIFLGNFDQKIEKRDVEEEQGLGPEAREEGHNVTVTLASFIISCLLLVAHEDFGLLCLVSILKSLADWEQLQRYSLKQGSIVESHEEDASRRVITDETESQEDGQDQFERAKTQNMETAISEVGCLQFS

SEQ ID NO: 9067 - protein, 892 aa, Zea mays
  VARIANT 44..892: note = Derived polymorphism lacks residues 44 to 892
MVDIIDAYPAVPEPAPAHPDPSSIPRDAWRRFESAALGILYTIQPSATSEHLRAAIIDYVQRLLASHSGVQVFPFGSVPLKTYLPDGDIDLTTFGPAISDEKLANEVCAILKSEEHRKDSEFDVKDVQYIHAEVKLVKCVVQNIIVDISVNQIGGLCTLCFLEKVDENFGKKHLFKRSVMLIKDWCYYETRILGAHHGLISTYALEILVLYIFHIFHKSLNGPLAVLYRFLDYYSQFDWDAKGISLFGPVSLSSLPDLVTDPPVIHDDGFLLREKFLRECADAFSVPPRNSEKDAQLFSRKFLNIVDPLKQSNNLGRSVSRGNFYRIRSAFDFGARKLGKILQRPVCYTVDEVNQFFGNTLKRNRIGFRQDVLVSSSDDGTLTYHATNGSLSLGLDCKRVNNCSAPLYSNPCGDFSYRFNNINISDSINHDDSIKQKQCNSIAGEKAIKSISDGLLDSEGSSHASTDDSVSVRNSGDFYEALTTISPSGRRYAPHQFYQLENGKVVVRHNTNMSHHGMPTKQFTSRSYHSFEDAKYHNEFSGSFLPPIEHNAYSSAGFVNVLATSNSACTHENSQLGGANNNILKDLTGDFETYFHNLQYAQGFQQDNPVNPFSSGRPAPPSLQCQNTCPSNGRGRKNPYSYASMNGAVPCPPYPSGYLVWSPFIQPDDPMAMRTRGTGTYFSDRKLRKNRPPTGRVERGRNQFASNNYQRFHHHVRTDMPADMGSGLELRHELPQIHIPGATDHGMPSPMSIPMSSSSLNSPRDQLKVPAHSPSSQVRRNNFHGNGFMLLQDSKLESRTFNSKLESGILGPLPLEVTSKDHASRSESASSNQVSGPVSTVSAPRNTTTTDSNLMRYVWHIIFIASTNNNWMALNHIASRTAETSPHCPVEC

SEQ ID NO: 9068 - protein, 481 aa, Zea mays
  VARIANT 104..481: note = Derived polymorphism lacks residues 104 to 481
MNWKKSPPAVSDGAPDDADDGRLRELGYKQELKRHLSVLSNFSISFTVISVLTGVTTLYNTGLAFGGPATMTLGWFVAGAFTMAVGLSMAEICSAFPTSGGLYYWSARLSGRRWAPFASWITGWYGTASIDFSLAQLIQVIVLLSTGGNNGGGYLASKHVVFAFHAGILLSHAAINSLSITWLSLLGQFAALWSMLGVLVLMIAVPVVATERASAKYVFTHFNTDNSAGIHSNLYIFVLGLLMSQYTLSGYDASAHMTEETKNAGRNGPVGIITAIGVSLVVGWGYILGITFAVKDIPALLSTGNDAGGYAIAQVFYLAFKGRMTYAFSRDGAMPFSSVWHKVNEQEVPVNAVWLSAFVSLCMALPSLGSLVAFQAMASVATTAVYIAYALPILFRVTLARSRFVPGPFSLGRYGVLVGWTAVLWVATITVLFSLPVSYPVTKDTINYTPVAVAGLFALILSSWIVAARRWFTGPVTNLGG

SEQ ID NO: 9069 - protein, 86 aa, Zea mays
  VARIANT 59: note = Ancestral polymorphism is F, Derived polymorphism is L
MCPLRVILIFLSATVAGFFLIRGLNAEPDQFDADADDSGSPRAPLPLHSKVGSAVKAGFWTMVDMASGRYLWRTLAAQAQPSKSAR

SEQ ID NO: 9070 - protein, 807 aa, Zea mays
  VARIANT 149..807: note = Derived polymorphism lacks residues 149 to 807
  VARIANT 129..807: note = Derived polymorphism lacks residues 129 to 807
  VARIANT 61..807: note = Derived polymorphism lacks residues 61 to 807
  VARIANT 40..807: note = Derived polymorphism lacks residues 40 to 807
  VARIANT 33..807: note = Derived polymorphism lacks residues 33 to 807
MCTLCAVQRWSRRVATMLPWLVVPLIVIWAATQLLLPAAYRFEVTSPRLACVSVLLLTLFWYEILLPRLSLWRSRRSARLREERRAHALELHKLRKTATRRCRNCSNPYRDQNPGGGKFMCSYCGHVSKRPVLDLNSAGKAPTGWPCAQDCGYWLDLHCSSSNNSSFLGFSWRLLSSFCSTAMRWLLRNIFRFTLSGDGEGLNIDGKRLAKSGENGGKTEESRTNKARRKAEEKRLARLEREMLEEEERKQREEMAKLVEERRKLRDEKAEAEERSKSATPVGEKDARREVEKRCQERKKKEDKGSSKSNSDCEDIDRRLNQEGDRKRDFDRKSDLDRRESYKPRYFDANSHSNKTGESRSRYFGRVTGGFLSSSRGFGGGSFFGRSAQAPAPQVSKVSRSVVPATDQGNAIKRDVQHAATQATDKSATAGETRNAWTNFNRPVSPNVQPHPTGLKKSWHQLFIRSASVAPYPDVTTSAHDMIRKPEPNGAQINNAHTFLSQYPPLDCKPSSSQSMQYPGFPPLNGAPPSNPLFHFSAGHMPFYDDAESTLLEESEQFEDPCYDPDAIALLGPVSESLDNFPPDLDCGFFSSDVAKEPHGWPSPIESPLSRSHTVEEKLTKPSHSSVARGSGGPILPVTSSEQGTWQMWSTPLVQESLGLQGPQSQWFQQNTNQFNHSANLFSSGGRARSPLGTGLNDSDPWLQKAPFQQLPPDTSSLFLSHEMPGKLHNDLAFGSPNKSAREHPFGPPGYLLPKEELVLDGAQEGGGGHVLSPSGAHVGLFSPTSPDVQPLWPFSEKREHRTNRLL

SEQ ID NO: 9071 - protein, 280 aa, Zea mays
  VARIANT 170: note = Ancestral polymorphism is P, Derived polymorphism is Q
  VARIANT 180: note = Ancestral polymorphism is M, Derived polymorphism is T
  VARIANT 226: note = Ancestral polymorphism is P, Derived polymorphism is L
  VARIANT 232..280: note = Derived polymorphism lacks residues 232 to 280
MAAMANTSRLPTPCSLPTISIGAKSRRLAVAAVRCGPGGSRSHRRSLGVLLCRSSSTAGAQGSTRMEDYNTAMKRMMRNPYEYHHDLGMNYAVISESLIVGSQPQKPEDIDRLKNEERVAYILCLQQDKDIEYWGIDFQSIVNRCKELGIQHIRRPAVDFDPDSLRSQLPKAVSALEWATSQRKGRVYVHCTAGLGRAPAVAIAYMFWFENMDLNTAYQKLTSIRPCGPSKRAIRAATYDLAKNDPSKEPFENLPEHAFEGVADWERKLIHDRVRALHEA

SEQ ID NO: 9072 - protein, 442 aa, Zea mays
  VARIANT 40: note = Ancestral polymorphism is A, Derived polymorphism is P
  VARIANT 53..442: note = Derived polymorphism lacks residues 53 to 442
  VARIANT 87: note = Ancestral polymorphism is P, Derived polymorphism is S
  VARIANT 107: note = Ancestral polymorphism is G, Derived polymorphism is D
  VARIANT 118..442: note = Derived polymorphism lacks residues 118 to 442
MLPGSPVKRLLRRAAKGRREKAELAGLAAAAAALLLLCAASLRCSATARGRLWAGGVSIAAAGSGGEEECDLFDGDWVWAGGGGGYPLYDSRDCPFLDVGFRCAENGRPEASYTKWRWQPSRCHLPRFDAKSMLEKLRNKRVVFVGDSIGRNQWESLLCMLSSAVHNKSSIYEVNGSPITKHMGFLIFNFRDYNCTVEYYRSPFIVLQGRAPAGAPEIVRYSIRVDAMDWMSDRGKWKDADVLIFNTGHWWNNEKTIRGGAYFQVGDEVKMGMSVAEAYRRSIETLSDWLRKEVNTSKTHVIYRTYAPVHFRDGDWKTGGSCHLETLPDAMPVKSLDEWADLLQPVDEFLGSDLGSELAGVDLLRVTGMTAQRKDGHLSVYLSPSGPVPRYRQDCSHWCLPGVPDAWNELLYALVMRRHKKMAGTRTPDAEEGDVFSSGSSS

SEQ ID NO: 9073 - protein, 633 aa, Zea mays
  VARIANT 34..633: note = Derived polymorphism lacks residues 34 to 633
  VARIANT 240..633: note = Derived polymorphism lacks residues 240 to 633
  VARIANT 377..633: note = Derived polymorphism lacks residues 377 to 633
MDAVAFPPPPAPFLDDDLDFGDFTFASAPQPQPQPPTAAFDDDWGDFVASGLGSDAGASAPTDAPAAAPSSSPWEKPRGPLPLSLFGADADDDGQEEEEGPAGPPPMDTAPQCAPSVPSNGSRPADLKDLIAGLYGYQPPHTADAVPQVKAEEDDQGFGDDDWEFTAATGQPAADQDGGGPGHADGFGKIEDISKSLSTDQEDWSSFTSADGKLNHVRLTTDGLGNHESTGEFVRASTYSPANSSAILNLYKGSKRVDDVVIAQGSAESVQSSSDLFSNNEMNSSLETDDNHSSRSTSDCILIEFYQRLREESLTAISRHVKDLRGAQKGSTISDENNKATAMGGDIQEIYDKLKDSSLPEGFFTEEQPWKDIYITELLNCIKEEHLKDFEQEYCLAEKIEGATEDTDIAVELYKLSISTLDLLKLASKEEQGDYVGAWYSMLLSCAQELKHGVALWQEFYHANVCDRVVSEGGHYFIALGEIYRVAQILYLSLQRFKPWVLADPGMLSKMLSCLDSCTYAWTSGLETALKMVIDSSHIDSSLAKALMESIKNITKLEVPNLQKNIPNNEMQCRLTLLPSSLLPGLNLVIWNGGHYFVKVANLWANRISPDPPLLPSNPTSSMNNAATHSQSC

SEQ ID NO: 9074 - protein, 563 aa, Zea mays
  VARIANT 164..563: note = Derived polymorphism lacks residues 164 to 563
MAKGDDALARKRNRVRRKRLRSSENAVSARVAAIIASKHRRKSGKRRACEGMCFSLPTPDDPFNERHGRKHKLDDEPADDTAADAAEDSGNPKKKGANTKKQQPVAKYGAEAKSKAVRERETGAEVVRGDFDRPSKFLVVCLNAIRDAVAPEEGGGSIHGAGDWGVELWRCCSAQAPSDVLDASGACATVAQTAWLVSTACDIVARKERHGMVVSCPFLLYLVSSQDKAAQVRSICKPLKPLGIHSVSLHPGASIEHQISGYVLLKTCEPEFLIATPERLLELVSLKAIDISGVSMLVSERGNRSERLDELCHSDCDYESGVLSKDDNFNWQVIDGLKCFVDHNVSDKIFSIRDAISNNLQITIFTDPSDKNIATMAKNLLRGRITKLSINDSVSSRSAFIAQHVHFCPSEELKTTKVKEILEQILQDHPKKTSKVLLVAASDKKARLMSLSLKLENCTVIDDSCGNSFTICSSVGLMNVIVKDRENMSVTDVEAFETVLVVDLPPSVDEYIEILTGAALHVIGGEVHSIFCNTDASVAKPLAQLLADCGQVVPEFLKSLKSS

SEQ ID NO: 9075 - protein, 207 aa, Zea mays
  VARIANT 117: note = Ancestral polymorphism is R, Derived polymorphism is H
MAGSDADREKSCCCSCCTPLISLGVVVLMYWAIFQPHQIRARVDYAELSSLSVSNASSGSSPSPVTVSYHVAVNLSLYNPSKRVGIYYDTLDAALRYRGAVLSPAASAASPAEFHQRRKAGRAVRLVFDGERVAVPGDAGTQLDGEVRAKAELGLELSVEARVRYVFGIVKVRQRPAVWCALSIPVPPVPGGLGVLGSGDRCRVKYR

SEQ ID NO: 9076 - protein, 487 aa, Zea mays
  VARIANT 295..487: note = Derived polymorphism lacks residues 295 to 487
MAHNVAIRLRKEGGIEGYDDMGKELLGAEPTDPGYRAIFDPTWEFICGGKFGLDHHYVNPMASPEELRQLGTRRALVTMADQCWFVERARAYSEGIKKCGSEEELELYETKGEAPVFFLPKHDNEKAVKELALCYDQKSPLRCHALCALALIAASHPRDVVAPLVPRILAAALCRVRDQDSSVRTAAVASASTSAVLRPLTDALLHEQDQCAQLAAALAMAAAVEASAVTVDLASYLHRLQPRLLKLLRSNAFKAKPAHITLIGACATMGADVEVTASISCLRDAIASDDWATRKAAAEALAALALEHTDLLTTYKSSCVTFFKARRFDKVKVVRESINRMIEAWKEIPGSASDGRYPAASLGSNSVPSATRKSILSVSRSSSPDVSTSVTKTNSPSSIRNKKLSPPSYHKVRQANNCDYKVNIVVSPDATPIKVVTEEKLLKGRGVRDRLESRRTLFKGSEDRSAKLAAHKAGSRVVLYEGGGNLE

SEQ ID NO: 9077 - protein, 206 aa, Zea mays
  VARIANT 15: note = Ancestral polymorphism is C, Derived polymorphism is S
MPNKQLTVFLSAFACSIQSEHFLCKIQIPVTPTMSRSVEPLIVGRVIGEVLDSFNPCVKMIVTYNSNKLVFNGHEIYPSAIVSKPRVEVQGGDLRSFFTLVMTDPDVPGPSDPYLREHLHWIVTDIPGTTDASFGREVISYESPRPNIGIHRFIFVLFKQKGRQTVTVPSFRDHFNTRQFAEENDLGLPVAAVYFNAQRETAARRR

SEQ ID NO: 9078 - protein, 394 aa, Zea mays
  VARIANT 19..394: note = Derived polymorphism lacks residues 19 to 394
  VARIANT 33: note = Ancestral polymorphism is N, Derived polymorphism is I
MEGEAVHMLQSGHHQWNKGQPTLQAFPATQRLNSRLHQISEETKKMAPKLVFVLPVVLLALALQAILRPPPPKLCGSPGGPPLTSPRIKLRDGRYLAYKEDGVQRDKARYKIITVHAFDSTKDFPSPVSKELVEGLGIYLLAYDRAGYGESDPNPNRHVKSEALDIEELADQLGLGHKFYVLGASMGGYSVWGCLQYIPHRQTLAGAALVVPIINYWWPSFPAELSKQAFNRLIVPEQRTLWIAHNIPSLLYLWMTQRWFPSSAAAMHHPEIFSKHDMEVLQKMMAMPRTIENKSRQQGIYESIHRDLLVAFGTWEFDPMNVTNPFPQNEGSVHIWQGREDRLVLVELQRYIAKKLPWIKYHEVPEGGHMFVMVDGWTDRILKALLLGEEPLDV

SEQ ID NO: 9079 - protein, 363 aa, Zea mays
  VARIANT 147: note = Ancestral polymorphism is P, Derived polymorphism is L
MKDSQDIQSTTELQSPVQGTNEVQSQQPNSMAADAPAGNSGSLSVASNDNKKVSREDIELVQNLIERCLQLYMNKGEVVRTLSTRARIEPGFTTLVWQKLEEENSEFFRAYYIRLKLKRQIILFNHLLQHQYNLMKYPAPPNIPLAPIQNGIHHMPVSNLPMGYPVLQQPIMPAPGQPHMDPMACGLSSGHVVNGIPAPGGYHPMRMNSGNDMVLDNGAPEAPHAGATGSAMSSEMAVSPSSAASSNHAPFTPSDIPGMTMDVSALDSAFGCDVGNPESLQLGPDGSSRDSIRSLGQLWNFSLSDLTADLTSLGADLDVLENYTGTPFLPSDSDILLDSPDQDDIVEYFADAINGSPSDEEKP

SEQ ID NO: 9080 - protein, 270 aa, Zea mays
  VARIANT 213: note = Ancestral polymorphism is A, Derived polymorphism is E
  VARIANT 160: note = Ancestral polymorphism is A, Derived polymorphism is V
  VARIANT 141: note = Ancestral polymorphism is R, Derived polymorphism is G
MALAASHHGLLPFAPAATPTPSRGHLRFRAARPLPRPARRICCQSINSANVLGASSTTSDEAVPVPVVQIDQDSDRDATIVQLSFGDRLGALLDTMKALKDLGLDVTKGSVTTDSAVTQTKFHIMRFGRKVEDPDMLERIRLTIINNLLQYHPESSEKLAMGEFFGIKPPEKKVDVDIATHIVVEDDGPKRSILYIETADRPGLLLEIIKIIADTNIDVESAEIDTEGLVAKDKFHVSYRGGKLNSSLSQALTNCLRYYLRRPETDEDSY

SEQ ID NO: 9081 - protein, 274 aa, Zea mays
  VARIANT 28: note = Ancestral polymorphism is K, Derived polymorphism is N
  VARIANT 38: note = Ancestral polymorphism is I, Derived polymorphism is M
  VARIANT 48: note = Ancestral polymorphism is A, Derived polymorphism is V
  VARIANT 171..274: note = Derived polymorphism lacks residues 171 to 274
  VARIANT 237..274: note = Derived polymorphism lacks residues 237 to 274
MSKKWTTLGYCHHLHAPLATQGDAFVLKPILMTAVPAILDRVRDGVDVKGELVKRLFDISYSHRLAVVNGSCFGGSPIQAESHPRPKSSLQSTATSHLHQDQEAHAAEVGPTTALFKAKVPWSSQIGNLSEKQRVFKTVKGWTPSLPVLGSLVPIVGGVVLASMTEVSFNWIGFWSAMTSNLMNQSRNVYSKKILADKEDSLDDINLFSIISVMTFLLSAPLMLCVEGIKFSPPYLQNAGVNVKELFVRAALAGTSFYFYQQVRPVCLRSKHFL

SEQ ID NO: 9082 - protein, 210 aa, Zea mays
  VARIANT 182: note = Ancestral polymorphism is L, Derived polymorphism is F
  VARIANT 178..210: note = Derived polymorphism lacks residues 178 to 210
  VARIANT 176: note = Ancestral polymorphism is A, Derived polymorphism is T
  VARIANT 127: note = Ancestral polymorphism is V, Derived polymorphism is M
  VARIANT 123: note = Ancestral polymorphism is A, Derived polymorphism is T
  VARIANT 122: note = Ancestral polymorphism is R, Derived polymorphism is C
  VARIANT 74..210: note = Derived polymorphism lacks residues 74 to 210
  VARIANT 59: note = Ancestral polymorphism is P, Derived polymorphism is S
  VARIANT 57: note = Ancestral polymorphism is K, Derived polymorphism is N
  VARIANT 48: note = Ancestral polymorphism is R, Derived polymorphism is K
  VARIANT 41: note = Ancestral polymorphism is G, Derived polymorphism is R
  VARIANT 34: note = Ancestral polymorphism is L, Derived polymorphism is M
  VARIANT 14..210: note = Derived polymorphism lacks residues 14 to 210
MDKLEALLRPKEGQSNPVSDKMNPSDLVKLIEILDPSNKPGRITIITRMGAENMRVKLPHLIRAVRNAGLIVTWITDPMHGNTIKAPCGLKTRPFDSILEYGMIPEVPICSFALCFYFAEVRAFFDVHDQEGSHPGGIHLKMTGQNVTECIGGSRTVTFDDLSDRYHTHCDPRLNASQSLELAFIIAERLRKRRMRSGLNNSLPLPLLAF

SEQ ID NO: 9083 - protein, 170 aa, Zea mays
  VARIANT 46: note = Ancestral polymorphism is G, Derived polymorphism is D
  VARIANT 44: note = Ancestral polymorphism is R, Derived polymorphism is M
MGNVLPCLVQQAGTAAGALPAMNPKRRLISLKLLTKAIHKMKKRLGPGKAAKIDSKPLPSSAAVEGGEVRVEARSKATSSTNSRKGAVLRTRLHGRSSGLINKQGKKGVVRVKVVLTKEEAARLLALTVGGQRHTAAQIVAEMKKMEARRAAAGSAAWRPALASIPEESS

SEQ ID NO: 9084 - protein, 405 aa, Zea mays
  VARIANT 349..405: note = Derived polymorphism lacks residues 349 to 405
  VARIANT 39..405: note = Derived polymorphism lacks residues 39 to 405
MGKAFSLLRPPQPPREDDTEMMELRKRPRPRRLDPDFLSSPPPMPPRKRARKQAAAPKPVEAAGALKWQPPRKGSRRATVGIGCPVAGLHPATCGRQPPLRMSTRVLFRPRHPFNWYEPDLWTEVAKHLCGFDLLRLSLTCRWFHRLLADDSIWRYAFFRDLNLTDANPHVHRPLSRSWRYLYFAAFVTRVLPSLLLTDGSHAFSLCQNGEHRSSWRIGSFVLDSPHMVLIGKLPLPKWLPSCPEDVRLTIAILGACKLLNVRPGIWITDMHVMRCPLCKRNSCRGNKQILDARHSELFLEKAYWDETLEYESLGEHFQDEEVAAAFCAVVNAKQFASPSTASVLNRAWTGKHDDPMTRHCASATAAAIHTNLQSNGGLLSTFEAMRDTARDGQIVSIRISQVLF

SEQ ID NO: 9085 - protein, 598 aa, Zea mays
  VARIANT 513: note = Ancestral polymorphism is L, Derived polymorphism is R
  VARIANT 77: note = Ancestral polymorphism is G, Derived polymorphism is R
MVAARAQLAALLLLVAAVCSATGFRPGGGGPPSVTEDTLEKVAASLEMYVDALPQMPKVLGYSIKHGRPTPTHLTIGMYQKKWKFHRDLPPTTVFVFGTSVESATFPGPTIEALQGVPLQVTWDNHLPDRHILPWDPTVPTAIPRGGGVPTAVHLHGGVHPPQSDGHAYAWFTAGFRERGPAWTTPTYAYPNVQSPGGALWYHDHALGLTRANLLAGLLGAYVVRNPAAEAPLGLPRGDAFDRVLVLADRSFYADGSLYMNRTGDNPGVHPQWQPEYFGEAVTVNGKAWPFLRVARRRYRFRVINASNARFFNLSLSASSDGLSLSLIPLHVVGSDTSYLPRPVAVTHLLVAAAEAFDVVVDFSECAAPEAELVNTAPYPYPDGDAPNHLNGKVMKFVVEPARVRDDDDDSRVPARLLDYVKVAEEDAARRRYIVLYEYEDEATGDPTHLYINGKRLEDPATETPRPGSTEVWEVINLTQDNHPLHLHLATFQAVRARELDGLEEFKHCMERLNDAVRCDVGRHAVGEEVAVPEHERTWKNVVKIAPGFMTTVVVKFLMVDTGRSYPFDATAEPGYVYHCHILDHEDNAMIRPLKLIK

SEQ ID NO: 9086 - protein, 114 aa, Zea mays
  VARIANT 6..114: note = Derived polymorphism lacks residues 6 to 114
  VARIANT 12: note = Ancestral polymorphism is T, Derived polymorphism is I
  VARIANT 35: note = Ancestral polymorphism is R, Derived polymorphism is G
  VARIANT 49..114: note = Derived polymorphism lacks residues 49 to 114
  VARIANT 55: note = Ancestral polymorphism is P, Derived polymorphism is L
  VARIANT 73: note = Ancestral polymorphism is Q, Derived polymorphism is H
  VARIANT 78: note = Ancestral polymorphism is D, Derived polymorphism is N
MAWWRWSSSCLTAPSHPPPRRRPHALMLSPLQPLGMAAAAALAMSHVASPSLFAPASSTTLDLPPYSSSCFFQVPRADIWLFGITALELAIGHAPFSIQPPAKVFLMTLQHAPP

SEQ ID NO: 9087 - protein, 221 aa, Zea mays
  VARIANT 85..221: note = Derived polymorphism lacks residues 85 to 221
  VARIANT 120..221: note = Derived polymorphism lacks residues 120 to 221
  VARIANT 180..221: note = Derived polymorphism lacks residues 180 to 221
MVPLSTGRSLSQGTPGDNGELRLGVRRAAQLKNGSAFLALYNQCSNLGSLPNVAHVVATKSVFHIYYNPRRVCVRGGNVKWSALRLDTGNYSWGSEALTHKTHILDVVYNASNNELVRTQTLVKSAIVQVDAAPFKQWYLTRYGMDIGRKKKVHVAKKDATEGQAGEAIVEETKKSNHVQRKIEKRQQDCALDTHIEEQFGSGRLLACISACPGQCGQADG

SEQ ID NO: 9088 - protein, 56 aa, Zea mays
  VARIANT 10: note = Ancestral polymorphism is I, Derived polymorphism is T
  VARIANT 13: note = Ancestral polymorphism is C, Derived polymorphism is S
  VARIANT 15: note = Ancestral polymorphism is A, Derived polymorphism is V
  VARIANT 19: note = Ancestral polymorphism is G, Derived polymorphism is R
  VARIANT 22: note = Ancestral polymorphism is P, Derived polymorphism is L
  VARIANT 23: note = Ancestral polymorphism is R, Derived polymorphism is K
  VARIANT 25: note = Ancestral polymorphism is M, Derived polymorphism is L
  VARIANT 26: note = Ancestral polymorphism is S, Derived polymorphism is L
  VARIANT 27: note = Ancestral polymorphism is V, Derived polymorphism is D
  VARIANT 30: note = Ancestral polymorphism is P, Derived polymorphism is L
  VARIANT 31: note = Ancestral polymorphism is K, Derived polymorphism is E
  VARIANT 32: note = Ancestral polymorphism is L, Derived polymorphism is P
  VARIANT 36: note = Ancestral polymorphism is R, Derived polymorphism is Q
  VARIANT 51: note = Ancestral polymorphism is L, Derived polymorphism is S
MWALIKNKETVVCNARVLGLGPRFMSVYVPKLAMEQRIYYDEVEGLSVEWLEVTER

SEQ ID NO: 9089 - protein, 213 aa, Zea mays
  VARIANT 99..213: note = Derived polymorphism lacks residues 99 to 213
  VARIANT 148: note = Ancestral polymorphism is R, Derived polymorphism is C
MDDGEGKVRECSQKTKRCVKIHVATHEQGSGRPKCSTMPRTAGIATGILASTSTTTTKFRALLPLFPPCSAGRCGMAGPASASPSACGHAFSCSSLPWYAVLAGHPRRALAHGTRTDSTTCSSAKQRLKPVAPPHARTCGSFCRRAWRSNTSIPHAQLHTAYVHGTNDNANAPCETEVFVCVSSLYKQRQWSCRSILERDEERKGEEPGTPEA

SEQ ID NO: 9090 - protein, 131 aa, Zea mays
  VARIANT 6: note = Ancestral polymorphism is R, Derived polymorphism is H
MLVLLRQARRQKLPHVRACGGATGFSRCFALEHVVESVRVPCANARRGCPAKTAYHGKEEHEKACPHAEGEADAGPAIPQRPAEQGGNRGSRARNLVVVVLVLASIPVAIPAVRGIVEHFGLPDPCSCVAT

SEQ ID NO: 9091 - protein, 1427 aa, Zea mays
  VARIANT 713..1427: note = Derived polymorphism lacks residues 713 to 1427
MPATRIPLKRCTAVVPGVEDPGPAASMPPAKRRRERVVPSRFRGSMPPPAPVGEEVEVEDRDGDVYNVEVRMAEPKGDTFGPVETAVWTPVLPAPMDADLYRACRNINKSGSCGGAASGSVLTSVSNAASDGGAGGNGTTVRLSNAGSGGGGGGNGGLEGRPVVVECKPKREVSGRKEDFYWPQDFVLGDVVWARSGKKSPTWPALVIDPLLHAPEVVLNSCVPGALCVMFFGYSANGHGRDYGWVKQGMIFPFVDYLDRFQGQPLYKLRPSKFRAAIEEAFLAERGFFDLETDGVCSPRKSVNKQSDPIGFQEEAASNNEQECQSESQVVGKSALCCDSCGNRLPSKVSKKRKQAGEQMLCMHCEKLLQSKQYCGICKKIWHHTDGGNWVCCDECQIWVHVECDLTCNNVEDLENADYFCPDCKSKSKTVPATENLNTSTSECASTSKGKLTAMIAVCCNGEDALYVPEKHMILCQCKSCKERMMSLNEWEKHTGSRKKNWKMSIRQKSTGELLINLLDDIPCGTSKYSNPGIKKEELLQLQANPYSPVCAKWTTERCAVCRWVEDWDYNKIIICNRCQIAVHQECYGACAVQDLTTWLCRACESPQQKRECCLCPVKGGALKPTDIDGLWVHVTCAWFQPKVSFPVDETMEPAMGIMSIPVEYFKKLIFAFSPINCRLASYASKCMVPAHNATNALPITTQYVRQELDIAWRLNTAHFALQCSERSGRHITKMVSYCDFHSTPDPDNVLIVKTPEGVFSTKFFLQNGEKQTAARLVRKENHQEKVLPPIISDCLVAKCLTYEMSKYKKQPGEAIAHRIMGPRHHSQDFIDGLNACMDRKDDQSFSTFKERLRYLQKTENLRVSCGRSGIHGWGLFAARNIQEGQMVIEYRGEQVRRCVADLREAQYHREKKDCYESLSRQGRAAVDAGPKQGHRRCTMTRLLLACLALLLARAAVAREYAAVFSFGDSLSDTGNLCVDGIPDYLATAHAPYGMTYFGYPTGRVSDGRVVIDFIAQELGLPLLPPSKAKNATFRRGANFAITGATALDMAFFEEHGLARAVWSSGSLHTQIGWFRDMKPNICSSPQECRELFRRSLFVVGEFGGNDYGSTIFSFRPLEEVHALVPHVVDVIARGVEELIAEGAADLVVPGLLPTGCFPMFLSTFVGKPAAAYGPRSGCNRELNTLSWVHNAALQRKVEELRARHPDVRIVYADYYTPAIRFVLHAEDFGDSFADTGNDIVVFAANSLANPAARLPYGMTFFGRPTGRNSNGRLIIDFIAQKLGLPLPPPFLQPQQQHDGRQGSNFAVAGAFARDASFYRDIPVVGAFALNTSSSVQLRWFQSLCGRHHPYQADECRGQFRDALFFMGEFGVNDYSLSLFGKNLSQIRSFVPDVVKTISTATEVMLAALFSRCMCMHGHGLLLLADS

SEQ ID NO: 9092 - protein, 224 aa, Zea mays
  VARIANT 189: note = Ancestral polymorphism is P, Derived polymorphism is Q
  VARIANT 174: note = Ancestral polymorphism is G, Derived polymorphism is R
  VARIANT 167: note = Ancestral polymorphism is K, Derived polymorphism is R
  VARIANT 166: note = Ancestral polymorphism is L, Derived polymorphism is P
  VARIANT 157: note = Ancestral polymorphism is R, Derived polymorphism is G
  VARIANT 136: note = Ancestral polymorphism is L, Derived polymorphism is V
  VARIANT 109: note = Ancestral polymorphism is I, Derived polymorphism is T
  VARIANT 84: note = Ancestral polymorphism is S, Derived polymorphism is R
  VARIANT 79: note = Ancestral polymorphism is D, Derived polymorphism is H
  VARIANT 68: note = Ancestral polymorphism is T, Derived polymorphism is A
  VARIANT 21..224: note = Derived polymorphism lacks residues 21 to 224
  VARIANT 18: note = Ancestral polymorphism is G, Derived polymorphism is S
  VARIANT 11: note = Ancestral polymorphism is K, Derived polymorphism is T
  VARIANT 1: note = Ancestral polymorphism is M, Derived polymorphism is V
MCKNGHSVCAKCCIRTNGKCWTCSERIGDIRCRPLEKLLAAATTSCMFKSNGCYDVISYLEKVTHEETCQRAPYKCPVHGCAYSGLRLGYHVAQDHGHDDDGLASVVFIYGKAVATVRKDEPFRVLLQRNTERVFLLLNGHDLLQGRSLSLLCLGPRFQDGVEVELKYKMEVSGGAPGALTLSASGTIPFARRLDGFQAKGFLFVPDAYWGSAGSISVTVRIYV

SEQ ID NO: 9093 - protein, 355 aa, Zea mays
  VARIANT 49..355: note = Derived polymorphism lacks residues 49 to 355
  VARIANT 113: note = Ancestral polymorphism is G, Derived polymorphism is C
  VARIANT 145: note = Ancestral polymorphism is P, Derived polymorphism is L
  VARIANT 190: note = Ancestral polymorphism is S, Derived polymorphism is L
  VARIANT 206: note = Ancestral polymorphism is R, Derived polymorphism is T
  VARIANT 226: note = Ancestral polymorphism is S, Derived polymorphism is F
  VARIANT 248: note = Ancestral polymorphism is E, Derived polymorphism is V
  VARIANT 254: note = Ancestral polymorphism is Y, Derived polymorphism is H
  VARIANT 303..355: note = Derived polymorphism lacks residues 303 to 355
  VARIANT 306..355: note = Derived polymorphism lacks residues 306 to 355
  VARIANT 310..355: note = Derived polymorphism lacks residues 310 to 355
MMEAGDSTTMARFATRVTGDDDALECPSVASSFITISLRNIMLASLALQRRSMPHSWSSTSFNRPPDRSDEDALFPDHQIAAMEPDPVAAGASSSPASLTDRSDGAGSGRRWGILLAAAFTSAGHVPAVANARDYAESGSVYVTPDSGGECGVAYESYFRMPAVSKDKPWYSIEQGSVHFVVMSTEHKWSEMSEQVYNQLELFMHRPMYSSHVGIPVNVDLTFVASVEPLLLKDQVDLVFFGHVHNYERTCAVYKNRCKGKPKKDASGIDTYDNSKYTAPVHATVRAGGFSLDKFPRIVLNKWSLSRVSEFGYARVHATRGDMLVQFVSSSTMEVLDQFRIVKPDPARRLRNKPV

SEQ ID NO: 9094 - protein, 164 aa, Zea mays
  VARIANT 101..164: note = Derived polymorphism lacks residues 101 to 164
  VARIANT 57: note = Ancestral polymorphism is S, Derived polymorphism is G
  VARIANT 15: note = Ancestral polymorphism is L, Derived polymorphism is P
MTSCEFAAVRLPGHPALRPSRSRPSPTPPPPPAVANKKPAASSVRCTSSRRDDAEFGCNGGGGRIVDEGMVVLRRRIHEMEAAERGWDPPEEWAAWEKEWYATYDADVCQQLVGVLQAFLVNSRPGVGVGLVAVLMLAVPASAFVLVSLLLDASRAVVSNLHHH

SEQ ID NO: 9095 - protein, 202 aa, Zea mays
  VARIANT 119: note = Ancestral polymorphism is T, Derived polymorphism is M
MGNTPSCIPLAPAGGGASAAATSAATEVIHADGTVTRLARPVRASELMLHHPGRFVCDSSRLAVGCRVPGVAAAELLRPRHAYFLLPMDMLYSVLTDDEMAALSESHSHAASSWKRITTSTRRGSRSATGGRGRGHAKDEACSSDGARVYPMLGLLETAGLQGADSTKKHEVRAGPAGKSSGGGLRRHRSWQPVLDTIEEVP

SEQ ID NO: 9096 - protein, 554 aa, Zea mays
  VARIANT 61..554: note = Ancestral polymorphism lacks residues 61 to 554
  VARIANT 322..554: note = Derived polymorphism lacks residues 322 to 554
MEAAAVVQKLAEPVVPLHLTMELVQRGPVDIEANNYSVLDDVAPSLAPSILQLAVHAEEEQVLVTTPTKCSTMDLNRGAYSVPNLPVVCIVGGPNSNEYGTNRVLHHTIGIPRGGSGPRATWAVARGAAQNSATEHPGLLPGAPGLPGYHLLPGHHQQLARDLYVKCGTVELTRHAFDRMPERHLASWNAMALALANHGRGKDSLDLFNRMTRVENVRHVDMTTSRRAYEVDADHPGSEVAAVMAAATAVFHWAGDAHYAHLLLHHAQQLFDFANTYRDTTTPRCRCSGESIGVNKIHVKPQFFDVGKDYNWARGIRSTEIQLADGKNCELHRCWADILDAISKAQHSTDITGWLTILVRDDSNSVDLLTKEGLLTTHDVEIAKGEQEIMNEVFPAESRSSGFGVAMDLPDIWPCYESKPSDAQGYAVKGIPNLRNTCYRSAVLQCLFMLGKLLERILTSTWRHHQSSDDDSEKDKVKSRHGKPLRSSDEDAKSDSNRHQMVELLMNQRRLEMAKGRTRMATDTTIKDIIPWFFFPKVWAQLNIPAIIEPQFSR

SEQ ID NO: 9097 - protein, 682 aa, Zea mays
  VARIANT 355: note = Ancestral polymorphism is T, Derived polymorphism is M
MGMDAGGGKLPYSYPAHQDGKLVKSFSRVEPRKFGLALVAGFLLVTCAYFSTAKFDAIHVAMTVSPVSGNAAGIGPLVGAANADTSDSKQRLDLGKQDPDDALSRSEEEEGSRADEVLEKDDGKASSSSGTDSGSNAPLEDTRRDETFVGDSGGASSAAGARSEAVPARHEHDDDAPAAALLPPVTSEGAANSTQGSGVLEDEELQVQDAVANPSKRSNDSAATRSSSSGRSPSVVHSDPAILPAPSQQIAPAAPQEADKALAVQHIPAIPEVKQSDSETPAREWKPLCDITSNRRIDWCELDGDVRVLGANASVTLVAPPGGADGRTFRAESWRIKPYPRKADPNAMRVVRVLTVRSVPGEAPACTDRHGVPALVFSDRGYTGNYFHAFTDVILPLFLTARQYAGEVRLLVTDLQAWWVGKFAPVFRSISNYELVDLDRDPRVHCFRHVQVGLTSHDDFSIDPRRAPNGYSMLDFTGFMRAAYGLPRGDVAAAAGPSSKRRPRLLLIARARTRRFVNAEEIVRGAEKLGFEVVVSEGTHEVAPFAELANSCDAIMGVHGAGLTNMVFVPTGGVVIQVVPLGGLEFVAGYFRGPSRDMGLRYLEYRITPEESTLINQYPRDHPIFTDPNGIKSKGWESLKDAYLDKQDVSLDMKRFRPTLKKAIAHIRKARAKANAGGGGNN

SEQ ID NO: 9098 - protein, 465 aa, Zea mays
  VARIANT 299: note = Ancestral polymorphism is I, Derived polymorphism is V
MKSLVQSHINVGVIAGVLFVLLTYLVVSQQTAISRPNVVTTVAQWLSNKQQIGGGPGEKVVTTGEQQIADKQLIQGPSKTEKANKVVCSTEERLSDYCEVDGDVRVNGKAWSVDIVPPSGWSERREWKIRPYSRRSAANVDRLNVTQLQDPAAAPPCTVTHHVPGVVFALGGYSGNAFHDHADVLLPLFLASLRYGREVQFLVINRVQPWWLGKYRLALRRLSRYDVVNLDGDAHVRCFPHLTVGLRLHKDFGVVPEWVPGKRRVSMPDFTRFLREAYALPRGAPVSREPGKRPRLMLIQRQRSRRFLNGEEMARAAEAAGFEVVVTELMLDAAVDEQARVVNSFDVMVGIHGAGMTNEVFLPPGGVLIQVVPWGKLDLMARIEYGEPATDMGLKYLCYNVTLEESSLLELLGRDHPAIKDPDSVHRSGWAAMYDIYMTKQDVRLDITRFALTLAEAMDHLRRLQ

SEQ ID NO: 9099 - protein, 461 aa, Zea mays
  VARIANT 72: note = Ancestral polymorphism is L, Derived polymorphism is P
MATELRSPLLPPPPPQRRLSPRAAAWAALAVSATVLLLPFLIGSTTRTTSSSSTRHPRPRSSPPSNPVELTLLTGARDKGAVCLDGSPPGYHLQAGSGAGSGSWLIHLMGGGWCDTVRSCSDRRTTYLGSSLFMQKVMDFTGILSNDPAQNPDFYSWNRVFVRYCDGASFSGDSQREAGPGNGTLFFRGLRIWEAVLDELMHKGLAHSKQALLTGCSAGGLATLLHCDDFRARFPPEVPVKCLSDAGFFVDAKDLSGQRSMRSVYSGVVHLQNVTKVLPKDCLLANKDDPTQCFFPAELIKSISTPTLIVNSAYDSWQVRFVVAPDSSSPDESWRGCRDDVRRCNSSQIQVLNAFRKTMVDDLVEAADGTNSSWFIDSCFTHCQTIFDTSGWNSAAAPRIGNKTLTEVIGDWYFGRSPSPVVRQVGCEYPCNPTCNSQPPVAGFYNKALPPRQQANILVLG

SEQ ID NO: 9100 - protein, 341 aa, Zea mays
  VARIANT 14: note = Ancestral polymorphism is D, Derived polymorphism is N
  VARIANT 15: note = Ancestral polymorphism is K, Derived polymorphism is N
  VARIANT 28: note = Ancestral polymorphism is P, Derived polymorphism is A
MPDIKMVTVTQLEDKSSAPPCTVTYNIPAVLFALGGLTGNFWHDFGDVLVPLFIASRRYDGEVQFLISNMKPWWPAAYKTILQRLSKYDAVDLDGDGDGDAHVVRCFPHVTVGIHMHNGLSIVPEWAPGPPGGRGLTMADFTRFMREVYALPRDAPASLVREEPGKQSPPPRLLLIHREHSRRFMNEREILQAAEAAGFEAVALDLRRDVTVDAQARVVNSFDVLLGVHGAGLTNSVFLPPGAVLVQVVPYGKMDVIATLEFGLPAKEMGLKYLDYVVSAEESTLLEMLGPEHPAIKDPDSIHRSGWDKMTEFYLNMQDVRIDVARFAPVLTQAFDHLRQQ

SEQ ID NO: 9101 - protein, 275 aa, Zea mays
  VARIANT 194: note = Ancestral polymorphism is P, Derived polymorphism is L
  VARIANT 144..275: note = Derived polymorphism lacks residues 144 to 275
  VARIANT 71..275: note = Derived polymorphism lacks residues 71 to 275
  VARIANT 68..275: note = Derived polymorphism lacks residues 68 to 275
  VARIANT 45: note = Ancestral polymorphism is T, Derived polymorphism is K
  VARIANT 44: note = Ancestral polymorphism is G, Derived polymorphism is D
MGALDAVGVRSGLRGFPAGLVGSRIRHRVSSVVWLQPWRIVVIGTCVMCLTEGSEDLRKELVSNLPIWRCWLSKFRSVRSFCASMIRVSASLSKLRRTPFQVAPAAGPAPAILAPTPVIPSISAPYITISGDRMDASALAIGTQSECFVACVSGYLSFSTCIGLMNAQDHKGLTELAKKLKSTTEFVSVGFLGPGIALLCLNEAKSPIIASAWLTVAVGLKSFGHSGFLVNLQEGLYFGHSFLSYKYKDLRLYCKLEFLINYGISNYSSKPKTMV

SEQ ID NO: 9102 - protein, 506 aa, Zea mays
  VARIANT 342: note = Ancestral polymorphism is A, Derived polymorphism is P
MGGEMKPGRGLRTWAQRHLNVTFAVGFLLVLLTYLVVSRQLAVAAPGGAASRVVAGKQVVVRDAGDNAEGASKRRQEWQPKQAAAEEEETSGAVPTEEEESYPKRDEADGKPSAEAETTTTTTSKAVCNTDGPVSETCDLDGDVRTNGSALSVTFVPASPSERREWKVRPYSRRTMVGVDRVTVTRLGSPDDPAAPCAVAHSVPGVLFALGGLTGNYWHDFSDVLMPLYAASRRYGGEVLFLVSNMQPWWLGKYEAVVRRLSRYDAVDLDRDARVRCFRRLTVGLRLHKELGVAPELTAPDRLTTADFTAFLRETYALQRGAPAAVPTTEGRKPRLMLIHRAHYRRFVNVPEITRAAEAAGFEVAVASPRGDAPVEETARAVNSCDALLGVHGAGLTNAVFLPPGAVLIQVVPYGRLERMARRDFGDPAEDMGLRYLEYSVSAEESTLLEMLGPEHPVIRDPDSVHRSGWDKVAEYYLGKQDVRIDVDRFAPTLAQAMDHLRHRHQ

SEQ ID NO: 9103 - protein, 624 aa, Zea mays
  VARIANT 150..624: note = Derived polymorphism lacks residues 150 to 624
  VARIANT 152..624: note = Ancestral polymorphism lacks residues 152 to 624
  VARIANT 299: note = Ancestral polymorphism is K, Derived polymorphism is M
  VARIANT 423: note = Ancestral polymorphism is Q, Derived polymorphism is L
MAANQEEQEQEQRRRLIAAATRFPLPSGCRFSYGTAGFRADGATMAPAVCRAGILAALRSVKLAGAAVGIVITASHNPIGDNGVKIADPDGGMMAQHWEPFADALANAPDPDALLQVMDQAVRPRLFLSFVPLVSIRIQRQLHRLIHTNKYWYLLGVNKNKIRESCKPPFVLPTQMVLQFAKDEGIPLGGEDTAQVLLGRDTRPTGAYLLDAALQGINAIVGARAVDMGILTTPQLHWMVRSKNKGVMASESYYFRQLIGSFRRMLELVPKGKGGDEVAKKLIVDGANGIGGVKLEQIKVELSGIDISVRNSGKEGEGILNHMCGADFVQKERVTPHGFNPEDVGVRCASLDGDADRLVYFRLSSASDNRVDLVDGDKILSLFALFIREQLDIVNNNGGQANKSLSARLGIVQTAYANGASTLFLKSLGLEVVFTPTGVKYLHKRALEYDIGIYFEANGHGTVVFSEDFISQLESLSNELSSQADIGSAQYHAVMRLLAASQLINQAVGDALSGLLLVEAILQYKGWSFQDWCGLYSDLPSRQLKVKVKDRSVIVTTDAETKVSQPSSLQELIDKETANYTHGRCFVRPSGTEDVVRVYAEASTQVEADGLAKSVAHHVERLLG

SEQ ID NO: 9104 - protein, 570 aa, Zea mays
  VARIANT 337: note = Ancestral polymorphism is C, Derived polymorphism is F
MAALARGAAMKGGGDKNKKVAAGGRLLSVVAVGCFLLFVVVVFTLSSRRYATLVLDARDRRGDFHPSQLQGGSHGGGGGEGDLKHLLVAQRSNDDDDKAVTEAELEESGIRGKISINVVGAGGQAEMEEAAPESSAAAAAAADATSNSDDDRARPGDIMTRAAAAASVKQQRQPLCDLSGSRADVCDLTGDIRLNATASEFIVVDPAAADDGPTTAYEIRPYARKGDATSMGRVTAVTVRVRATADAAPRCTVTHAEPAVAFSVGGYTGNLFHDFTDVIVPLYGTAQRYRGDVRLVVTDAGSSSSWWLAKYDAVLRGLSRHPPLHLHLAKAAGEVHCFGHVVLGLRARRELMVEPDPDPDRGRPDGVGMADFARFLRRALSLPRDAPTRPAAASSDDRRKPRLLVVSRRGTRRLLNADAVARVAEEVGFEAVVSELEVSRDAAGVGRLINSFDALVGVHGAGLTNMVFLPPGATVVQIVPWGGLQWIARMDFGDPADAMGLRYIQYEIAVHESSLADKYPRDHEIFTNPTALHKKGFKFLRHTFLIGQDITLDVDRFRVVLLQALRNLTE

SEQ ID NO: 9105 - protein, 423 aa, Zea mays
  VARIANT 96: note = Ancestral polymorphism is S, Derived polymorphism is P
  VARIANT 93..423: note = Derived polymorphism lacks residues 93 to 423
MGVNGHHEPRRGCNGTVCNGSVRSLDHFGDVDPWTAWAYKPRTISLLLMGTCFLIWASGALDPERSSSADRVSSVKRGVFAMIAVFLAYSFLQAPSTVLIRPHPAIWRLVHGMAVVYLVALTFLLFQTRDDARQFMKYLHPDLGVELPERSYGTDCRIYVPDHPKSRFNNVYEIIFDEFVIAHILGWWGKAIMIRNQPLLWVLSIGFELMELTFRHMLPNFNECWWDSIVLDILICNWFGIWTGMRTVRYFDGRTYEWVGLSRQPNIISKVKRMLGQFTPAQWDKDEWHPTRGPWRFIQVLSLCVVFMAVELNTFFLKFCLWIPPRNPLIVYRLVLWWLIAIPTIREYNTYLQDSKPFKKVGSFCWLSLAICIVELLICIKFGHGLFPKSMPSWLITFWSAVALLLVLFVWTWKYRTMKRKMI

SEQ ID NO: 9106 - protein, 34 aa, Zea mays
  VARIANT 26: note = Ancestral polymorphism is T, Derived polymorphism is P
MKAMKMAWVPYVPLEDRLSRIDSLKPKIFTLGCT

SEQ ID NO: 9107 - protein, 401 aa, Zea mays
  VARIANT 278: note = Ancestral polymorphism is V, Derived polymorphism is A
  VARIANT 193: note = Ancestral polymorphism is Y, Derived polymorphism is N
  VARIANT 62: note = Ancestral polymorphism is A, Derived polymorphism is S
  VARIANT 49: note = Ancestral polymorphism is R, Derived polymorphism is L
MASPAAVKKVLVPIAAGSEPAEAFVPIAVLRRAGADVTVAAAGAGTGLRVHAMYGVTVVADASVADCADASYDLVVLPGGVPGADNLGGCAALEGIVRRHALGGGLCAAICAAPPLALARWGLLDGVKATAHPEFVDKFPAEVAGVDANVVVDGRVVTGRGPAAAMEFALALVDQLYGKGKVDEIAKPMMVRYEPGYAFEELNPVQWRCSGTPRVLIPVANGSEEMEVLVTVDVLRRAKADVVVASAEEVVVARHGTRIVADALLQDAAGQQFDLIVVPASGRQLLCSSGGMPGVKTTLADKVELMALLKEHAAAGRAYGAIGAATAQVLEPHGLIGGSMKATTCASRADRPSECGSRVVVDGNLATSGSTGTAMEFALAVVEKLLGPEAAREVAEALLFV

SEQ ID NO: 9108 - protein, 1407 aa, Zea mays
  VARIANT 111..1407: note = Derived polymorphism lacks residues 111 to 1407
MALTMVTFVLRFTHPCACAGPRCSCRCVRRDTTPQTPLVSDLPSHYQGLLTPFLTAIRHPILSFETRVAAARRHSPDHAAQSPSRFYAGVSVFSRSADPQSLTLQRRTLRRAGFPRRAQSSGTGGGLHETCEPAVAATALVVMLLTSVLRGRVRLLHRHRSLTMPSPLFLSRNPNTSLGTTNPHLSSPPVSAAMSTTGVYVPPMRRLRSVIASTNGSLAPPPSAAAQAQQTRTPEWLVDGRSLSPQSPPQLRRRDIPPLPRPPLPEHYRQQSAGFARYAYDDFSEDDSDKDIDRTSVSSKGASTLDNVDEWKWKLHMLLRNDDEQEIISRERKDRRDFEQLAQLADRMRLHSRQYSRVVVFSKVPLPNYRSDLDDKRPQREVSIPAGLQREVDALLAGYVARKGTYIGNFPSSAFSRSSSTDSFATDEGFFEQQDNQTSTSAVMDRIQRRKSLQLRNQQAAWQESNDGQSMMEFRRSLPAYKEKQTLLEAISQNQVIVVSGETGCGKTTQLPQYILESEIDAARGATCSIICTQPRRISAIAVSERVAAERGEKIGESVCARRDIQTKIVRTKWWKLKGEVQRSIREKKECYRHLYYDRSVNNIDKYKVTKNTAKRANVGLQKDDMVGYKVRLEGMRGRDTRLLFCTTGVLLRRLLVDRNLKGVTHVIVDEIHERGMNEDFLLIVLKDLLPRRPELRLILMSATLNAELFSSYFGGAPMIHIPGFTYPVRSHFLEDILEITGHWLTPYNQIDDYGQEKSWKMQKQALQKRKSQIASVVEERSGAILVFMTGWDDINALKEQLQANPLLGNPSAVLLLACHGSMASSEQKLIFDKPEPGVRKIVLATNLAETSITINDVVFVVDCGKAKETSYDALNNTPCLLPTWISKASARQRRGRAGRVQPGECYHLYPRCVYDAFADYQLPELLRTPLQSLCLQIKSLRLGSISEFLSRALQSPESLSVQNAIEYLKVIGAFDQNEELTVLGKHLSMLPVEPKLGKMLIFGAIFNCLDPILTIVSGLSVRDPFLTPFDKKDLAESAKLQFSCRDYSDHLALVRAYDGWREAERDRAGYDYCWKNFLSVQTLKAIDSLRRQFLFLLKDTGLVDENMTMCNKWSRDENLVRAVICAGLYPGVSSVLNKEKSISLKTMEDGQVMLYSSSVNGKETKIPFPWLVFNEKVKVNSVFLRDSTAISDSILLLFGGCIKQGGLDGHLKMLGGYLEFFMNRDLASTYVSLKRELENLIHCKLQNPRMDIQTSEELLSAIRLLVTEDPCSGRFVYGRQEPRSKKAKTMLSPSSLSEAGGNGGDNAKNQLQTYLTRAGHSNPTYKTKQIKSYLFRSTVEFNGMQFVGQPCANKKLAEKDAASEALNWLTGDGGAITDSRGAQDADPMSLLMQPPRRRRHSHRRRN

SEQ ID NO: 9109 - protein, 447 aa, Zea mays
  VARIANT 414..447: note = Derived polymorphism lacks residues 414 to 447
  VARIANT 361..447: note = Derived polymorphism lacks residues 361 to 447
  VARIANT 345: note = Ancestral polymorphism is L, Derived polymorphism is P
  VARIANT 298: note = Ancestral polymorphism is P, Derived polymorphism is L
  VARIANT 47: note = Ancestral polymorphism is R, Derived polymorphism is P
  VARIANT 42: note = Ancestral polymorphism is R, Derived polymorphism is L
  VARIANT 11..447: note = Derived polymorphism lacks residues 11 to 447
MRVDSSSADSEGQSSHPKTTPQAMSTVTTASSPPTYAYKWQRLFAERCNQARIGVSGIPGVTHLIRNAKGGGVRRLPPLSATRHHGCSQSYNAIYSFGDSIADTGNLCTGSGGCPSWLTTGQPPYGNTHFGHPTGRCTDGRVILDFLADHFGLPLLPPSKAIGAGDVRKGANMAIIGATTMDLEFFNKHGLGSSIWNNGPLGTQIQWFQQLMPSICGADCQSYFNSSLFVVGEFGGNDYNAPLFGGKAMAEYTTCRRDSSSLPPPPAGRNLNAHARTHALQTLIGLGAVDVVVPGVLPIGCFPLYLTLYPGSSKDGDYDEAGCLRSYNNLSSYHNELLRQAVSGLQSKHGGGVRLMYADFYAQVADMVRSPESYGLQYGLRVCCGAGGQGSYNYYNKARCGMAGSSACGDPEKYLVWDGIHLTEAAYRSIADGWLKGTYCSPGILRR

SEQ ID NO: 9110 - protein, 387 aa, Zea mays
  VARIANT 85..387: note = Derived polymorphism lacks residues 85 to 387
  VARIANT 168..387: note = Derived polymorphism lacks residues 168 to 387
MAMATAKLNSPATSLVAGGRTRRSAPARCTTVIRAAAGSYSDELISTAKSVASPGRGILAIDESNATCGKRLSSIGLDNTEVNRQAYRQLLLTTAGLGEYISGAILFEETLYQSTTDGKKFVDCLKDQNIMPGIKVDKGLVPLPGSNNESWCQGLDGLASRCAEYYKQGARFAKWRTVVSIPCGPSALAVKEAAWGLARYAAIAQDNGLVPIVEPEILLDGDHGIEGALEVAEKVWSEVFFYLAENNVLFEGILLKPSMVTPGAEHKEKASPEAIAKYTLTMLRRRVPPAVPGIMFLSGGQSEVEATLNLNAMNQSLNPWHVSFSYARALQNSVLKTWQGRPENVEAAQKALLVRAKANSLAQLGRYTGEGESDDAKKGMFQKGYTY

SEQ ID NO: 9111 - protein, 163 aa, Zea mays
  VARIANT 119: note = Ancestral polymorphism is R, Derived polymorphism is W
  VARIANT 58: note = Ancestral polymorphism is G, Derived polymorphism is S
  VARIANT 51: note = Ancestral polymorphism is E, Derived polymorphism is K
MNWVLESLLCPTSLGCIPYVRALEFMPTGECSASANRVTEGYNKKLKRMVEKMNQEMGPESKFVYVNTKEFGSAEAEEGTRSNGKNDDLGGSSSTKPEGGLIQKLSEEASTVATKILMRHASDGLPRGRYWKTFQRAKYRHRERVGVEVELPRRFLVSRLRRN

SEQ ID NO: 9112 - protein, 255 aa, Zea mays
  VARIANT 4..255: note = Derived polymorphism lacks residues 4 to 255
MLPQTRGGPTTAIPADTPTSTPAHALARDQSVGASDGWHAEAANLAHQIQPTARRRRSPGGVRSSPPRIRYASTQPRHTSNPEQQRLPSRRVGAAIGPASWTRTQPQARCLSGRTPPPWAGRATTDKAASIRPTPSPLAVRATRQLAPAAARQRDGEGGELAAARVTRGRSRGRPRRRATHGDLGGRARPDPLEGDEDAPPPPSPQAAGPSGGQLRQRRGRERPTKGRWRLLGIMGSVRVTRRGGNQDAAFPVKL

SEQ ID NO: 9113 - protein, 56 aa, Zea mays
  VARIANT 14: note = Ancestral polymorphism is A, Derived polymorphism is V
MDLESSEILAVKQAVLFDQRYTGTTWEENTLNILLEFVPGGSIQSLLGRLGSFLEV

SEQ ID NO: 9114 - protein, 88 aa, Zea mays
  VARIANT 16: note = Ancestral polymorphism is L, Derived polymorphism is P
  VARIANT 19: note = Ancestral polymorphism is R, Derived polymorphism is H
  VARIANT 26: note = Ancestral polymorphism is R, Derived polymorphism is L
  VARIANT 28..88: note = Derived polymorphism lacks residues 28 to 88
  VARIANT 30..88: note = Derived polymorphism lacks residues 30 to 88
  VARIANT 42: note = Ancestral polymorphism is R, Derived polymorphism is C
  VARIANT 62: note = Ancestral polymorphism is V, Derived polymorphism is I
MASTKVQRIMTQPINLIFRFLQSKARIQIWLFEQKDLRIEGRIIGFDEYMNLVLEDAEEINVKKNTRKTLGRILLKGDNITLMMNSGK

SEQ ID NO: 9115 - protein, 162 aa, Zea mays
  VARIANT 14: note = Ancestral polymorphism is W, Derived polymorphism is L
  VARIANT 15..162: note = Ancestral polymorphism lacks residues 15 to 162
  VARIANT 22: note = Ancestral polymorphism is M, Derived polymorphism is T
  VARIANT 26: note = Ancestral polymorphism is G, Derived polymorphism is E
  VARIANT 77: note = Ancestral polymorphism is L, Derived polymorphism is M
  VARIANT 131: note = Ancestral polymorphism is C, Derived polymorphism is Y
  VARIANT 159: note = Ancestral polymorphism is T, Derived polymorphism is I
  VARIANT 160: note = Ancestral polymorphism is P, Derived polymorphism is L
MSRCPTGSRLACVWWQGLHAVTWRPGRLVMASVGDRRRRRLAVPSPAHGCCRCCQFSRVQCAIQMMVWCIGTGEWKLGLLLQQVGQSAWVCVRTQKGEEKATTPFRVGRTQEEGDVASRCHTVFGLGTSHCLEEQKLNEDSRWRSAPEATRRPLSRPCTPVL

SEQ ID NO: 9116 - protein, 86 aa, Zea mays
  VARIANT 78: note = Ancestral polymorphism is T, Derived polymorphism is I
  VARIANT 54: note = Ancestral polymorphism is G, Derived polymorphism is R
  VARIANT 50: note = Ancestral polymorphism is C, Derived polymorphism is Y
  VARIANT 49: note = Ancestral polymorphism is R, Derived polymorphism is Q
  VARIANT 28: note = Ancestral polymorphism is V, Derived polymorphism is L
  VARIANT 22: note = Ancestral polymorphism is V, Derived polymorphism is A
  VARIANT 10: note = Ancestral polymorphism is C, Derived polymorphism is W
MKHQNQNQRCWCSFLSRKLLAVLISVALLAAMLTGSVTGAYALLNLQYRCTWAGEWTACRLRRRPPAGVLIQLLFFQTMASPKSEH

SEQ ID NO: 9117 - protein, 165 aa, Zea mays
  VARIANT 32: note = Ancestral polymorphism is R, Derived polymorphism is G
MVAWSNGVDLQRLQNSIDHANLSHIKRRLRLGARQSSRRREGGRVTSPYTGPLLLILARFITMVMKKLLSSLPAMVAIMLAIAMLFCSVVVVHSSEVKQANDATRAHLEGSHQGVPPPAPQGGRVHAYGDVPPPPQLSSLSNSTRTGRTDRLGGDINSYVTDRHV

SEQ ID NO: 9118 - protein, 189 aa, Zea mays
  VARIANT 80: note = Ancestral polymorphism is C, Derived polymorphism is Y
  VARIANT 47: note = Ancestral polymorphism is V, Derived polymorphism is M
  VARIANT 41: note = Ancestral polymorphism is A, Derived polymorphism is V
  VARIANT 30: note = Ancestral polymorphism is V, Derived polymorphism is M
  VARIANT 29: note = Ancestral polymorphism is A, Derived polymorphism is V
  VARIANT 27: note = Ancestral polymorphism is D, Derived polymorphism is N
  VARIANT 20: note = Ancestral polymorphism is T, Derived polymorphism is M
  VARIANT 17: note = Ancestral polymorphism is A, Derived polymorphism is T
MPFGSKAKAYSDSKSPTYLMAKQALADFVVLLTDLKRNLSAEGSPVVLFGGSYGGMLAAWMRLKYPHIAIGVLHHQLRSYSLRTLFLLLYSMISYLMILGTLKTSGDLSDWLSSAYSYLAMVDYPLPLEFLRPLPANPIKEVCGNIDSQPKGTGTLERIYAGVNVYYNYTDIVDCFDLNDDPHGMGGWD

SEQ ID NO: 9119 - protein, 211 aa, Zea mays
  VARIANT 193..211: note = Derived polymorphism lacks residues 193 to 211
  VARIANT 163: note = Ancestral polymorphism is T, Derived polymorphism is M
  VARIANT 161..211: note = Derived polymorphism lacks residues 161 to 211
  VARIANT 160..211: note = Derived polymorphism lacks residues 160 to 211
  VARIANT 106: note = Ancestral polymorphism is P, Derived polymorphism is L
  VARIANT 105..211: note = Derived polymorphism lacks residues 105 to 211
  VARIANT 41: note = Ancestral polymorphism is I, Derived polymorphism is K
MDSTNVTIRERDDKEQIRVDINEVASMDILDLAKYAYVPVINGLTDYNHPCQIMADALTMLEQIGRIENTKVVYVGDGNNIVHSWLLLADVLPFHFVCACPKGFEPDAHTVEMARGAGISKIEITNSPREAVKGADVVYTDVWASMGQKEEVDYRKQKFQGFTAYLMHCLLAERGVEVTDGAIEAPNSIVFPQVENRMHAQNAIMLHVLGA

SEQ ID NO: 9120 - protein, 128 aa, Zea mays
  VARIANT 116: note = Ancestral polymorphism is F, Derived polymorphism is S
  VARIANT 97: note = Ancestral polymorphism is A, Derived polymorphism is E
  VARIANT 77: note = Ancestral polymorphism is A, Derived polymorphism is V
  VARIANT 72: note = Ancestral polymorphism is F, Derived polymorphism is S
  VARIANT 55: note = Ancestral polymorphism is N, Derived polymorphism is S
  VARIANT 47: note = Ancestral polymorphism is L, Derived polymorphism is H
  VARIANT 21: note = Ancestral polymorphism is G, Derived polymorphism is D
  VARIANT 12: note = Ancestral polymorphism is R, Derived polymorphism is C
MPHKFYHGRTSRVRNTKCAIGVEINKQVTVAGVFSRSLVPFSRLVMLLRVLVINNKCYDGAKGDMWSCGVIFFVLMAGYLPFEDSNLMSLYKKIFKEDFSCPSWLSTGLITMYHRSVAYVDNSYCGAH

SEQ ID NO: 9121 - protein, 44 aa, Zea mays
  VARIANT 31..44: note = Derived polymorphism lacks residues 31 to 44
  VARIANT 26..44: note = Derived polymorphism lacks residues 26 to 44
  VARIANT 19: note = Ancestral polymorphism is G, Derived polymorphism is C
  VARIANT 12: note = Ancestral polymorphism is A, Derived polymorphism is T
  VARIANT 11: note = Ancestral polymorphism is T, Derived polymorphism is M
  VARIANT 6: note = Ancestral polymorphism is C, Derived polymorphism is Y
MDFIYCLWKVTTLGESTKGWTCWNSGPNGNWIVDCLCRKSNQNS

SEQ ID NO: 9122 - protein, 190 aa, Zea mays
  VARIANT 144..190: note = Derived polymorphism lacks residues 144 to 190
  VARIANT 54..190: note = Derived polymorphism lacks residues 54 to 190
  VARIANT 53..190: note = Derived polymorphism lacks residues 53 to 190
  VARIANT 33: note = Ancestral polymorphism is R, Derived polymorphism is W
  VARIANT 32: note = Ancestral polymorphism is R, Derived polymorphism is P
MRRRHGEQEGRRVEAALERDSSAACASHSKRRRGSAPRCLTVAMDGDAFDLNSQAPETDGFPGLQLYGNILSDSDGLFDGRASGSVLPPYRPPCAGGGDARAATAAPYARQLLFDGSTSRGRQHSSSAGELGRSSTRPSSTAQQHSASSHQQPRRTASATTEGTEGSEDTEGTQECSPWASIRLRRSLVS

SEQ ID NO: 9123 - protein, 364 aa, Zea mays
  VARIANT 192: note = Ancestral polymorphism is P, Derived polymorphism is S
  VARIANT 252: note = Ancestral polymorphism is H, Derived polymorphism is R
  VARIANT 253: note = Ancestral polymorphism is A, Derived polymorphism is V
  VARIANT 304: note = Ancestral polymorphism is R, Derived polymorphism is Q
  VARIANT 340: note = Ancestral polymorphism is K, Derived polymorphism is T
MESPEACSSGDASPVSPAAPAGERPSEAAALRALVDRVRAGEVDAAREVRRLTRASARHRRKLAAAVDPLVAMLRSAAPEAGEAALLALLNLAVRDERNKTKIVDAGALEPLLGYLRSSDPNLQEYATAALLTLSASSTTKPVISASGAIPLLVEVLKGGNPQAKNDAVMALYNLSTIADNLQAILSAQPIPPLIELLKGGKRSSKTADKCCALLESLLAFDQCRVALTSEEGAVLAVVEVLEEGSLQGREHAVGALLTMCESDRSRYRDLILNEGAIPGLLELTVHGTPKSRMKAHVLLDLLRNSPYSRPKLPADTLENIVTNIASQIDGEDRGGKAKKMLAEMVKVSMEQSLRHLQRRASFA

SEQ ID NO: 9124 - protein, 378 aa, Zea mays
  VARIANT 184: note = Ancestral polymorphism is R, Derived polymorphism is H
  VARIANT 267: note = Ancestral polymorphism is G, Derived polymorphism is R
  VARIANT 296: note = Ancestral polymorphism is S, Derived polymorphism is L
  VARIANT 314: note = Ancestral polymorphism is D, Derived polymorphism is G
MTLLAAITNPAADSRSGSSERAHPIVLTPGVTPPPPPSSTLPTPIPSSTWSLSPADPTLATAASYLAASLASCSSLPQLRALLTTFITTLSRSLALPTPPAALPAAIRAVAPYFPAAIASLVASKAVSLAGHDILLALAESRLLPHPPPELISSLCDNDWVDLVCVLLRQAADIRSSEILAALRCFLSPASDKAYDAMMDVKCRWKDAAVLAVNRCREKSAVKRKKVDAAARLAALLLMMGHDGFTSPEVCLHYLFASGNVDSVVLGAALAELDGGEVVRLMRYLNKWIRKYWSFSEAHTCPEAVENLRLEQCDSVPSFGAVARALGVLLDNHFSHLVLNADVREDLRAADLMVRELAAEAESSGPILDLLHRFQLDK

SEQ ID NO: 9125 - protein, 157 aa, Zea mays
  VARIANT 2: note = Ancestral polymorphism is A, Derived polymorphism is T
MATAHGGRLFLFEAMLFSALLLLLLLLQAHTASAADGSTYPADCPYPCLPPPAAPAVVTANCPPPPPSSSYNTPPSSSWSYPPPPPPSGGYIPYLNPPAGGGAGYGYPAPPPPNPILPWYPWYYKTPPPPPSAAARGTGSSVLGLAAVLAAGQLIVA

SEQ ID NO: 9126 - protein, 101 aa, Zea mays
  VARIANT 56: note = Ancestral polymorphism is P, Derived polymorphism is S
  VARIANT 7: note = Ancestral polymorphism is R, Derived polymorphism is Q
MPPALRRTILLAAAAATTAVLLLWPAACVADDDGTTFPPSAFPFCPTRPAGVSTGPFPWSPPPPSSVAVFPQDPGFLTSDACAVPRLPLLAVFSVLLVFLQ

SEQ ID NO: 9127 - protein, 180 aa, Zea mays
  VARIANT 153: note = Ancestral polymorphism is F, Derived polymorphism is S
  VARIANT 152: note = Ancestral polymorphism is A, Derived polymorphism is V
  VARIANT 117: note = Ancestral polymorphism is P, Derived polymorphism is L
  VARIANT 91: note = Ancestral polymorphism is L, Derived polymorphism is Q
MARFVDPLVVGRVIGEVVDLFVPSVSMTVAYGPKDISNGCLLKPSATAAPPLVRISGRRDDLYTLIMTDPDAPSPSDPTMREYLHWYELLQHATIVTNIPGGTDANKGEEVVEYMGPRPPVGIHRYVLVLFEQKTRVHAEGPGERANFNTRAFAAAHELGLPTAVVYFNAQKEPANHRRR

SEQ ID NO: 9128 - protein, 240 aa, Zea mays
  VARIANT 48..240: note = Derived polymorphism lacks residues 48 to 240
MERLAMATRAFSASASGRGTGGEVGHSMGRKTTAARGGHWRRVRVGCRLPALLPHQRSTDWASMVEFHDELMKGRSDPSKVASKISLSSVPSTIKSNSSRSTLTLPSMRDRNELPTPRTEGEILSSSNLKAFTFNDLKNATKNFRPDSLLGEGGFGHVYKGWIDEHMLAPSRPGSGMVVAVKKLKPEGFQGHKEWLVDYLGQLHHKNLVKLIGYCSDGDNRLLVYEFMPKGSLENHLFRS

SEQ ID NO: 9129 - protein, 422 aa, Zea mays
  VARIANT 8: note = Ancestral polymorphism is R, Derived polymorphism is L
MLLEELLRCQIHEWYPAFRRHSIPTVIIPLPAAFLRYLAGQRAYPNADADAEDGADEEPLPFLLPAITSGRQPFAPIHAHHPDPDSLLNSDLFFGSSSEDVFDPDADHPLRPEFPELEVAIDAAIAELGGAALPKLNWSAPKDATFMSADGTSRCTCFAEVAMLLRSSDCVAHDLASARQSCKDFVRPEGARRNAQKVSAGSEEGARPNADGIRGCEGTNGAPSNSSKTGAEGGKTNDGDCDVEDATEEEHNENTWVDDGFQYYLALRKWYPGLRPESEFRCFVREQKLVAVSQRDPSAYYPSLPGWSSEVQPKIEAFFNEVIEPQFASNNYTFDVYVRTDGRVKLIDFNPWGGYTLPLLFTWEELEEKGRGSELEFRVVMQQGAVRPGLMTAVPYDMLDWGEGSGWDVFLKKADEELDRQI

SEQ ID NO: 9130 - protein, 202 aa, Zea mays
  VARIANT 73..202: note = Derived polymorphism lacks residues 73 to 202
MHGEPEGGGGGGGRGRRAVGAAVGRRQLHPRQRLHHAAPRLPAGAVAQEAPPPPPRRLPARARLQGPLQRHRRGQGGDRGDGGGARGDGGGDGEPARRLHARRRPPRQELPLQGAEPVQPSHQEPGLQGPRRPAARHGAGRLPERRAHPDRDREPAHTTAKDPVPDVHAPPWRDMEKIEAEKVILKLRGRRRNSRTGTARQA

SEQ ID NO: 9131 - protein, 247 aa, Zea mays
  VARIANT 26..247: note = Derived polymorphism lacks residues 26 to 247
  VARIANT 8: note = Ancestral polymorphism is Q, Derived polymorphism is H
MDAKRFLHLVEEKKRRVLEKKEAPLKWEQKLETAAKAKVDAEAKVKKLNSRKHRRRGDLSSDSDSDYGSDVDRKHLKRKNRRRNKKHEHSDSDDARRRNRRSRRSTDSSDESNSEYETRSEEERPRKKRSHRRRHHRHSSKSDSENYSSDEEQRRPAKDHSQSRRRHHRSSDDDSDKDKVKSRHGKGLRSRDEDARADFNSNKHLRSQSLEESSDDRDADESEKMRNGKRSHKNGGHRHHHHRHHHE

SEQ ID NO: 9132 - protein, 197 aa, Zea mays
  VARIANT 61: note = Ancestral polymorphism is G, Derived polymorphism is A
  VARIANT 65: note = Ancestral polymorphism is V, Derived polymorphism is I
MGNTPSCIPLGGGGGGASSSSSATDATTVIHADGTVTRLARPVRASELMLDHPGRFVCDSGRLAVGCRVPGVAADELLRPRHAYFLLPMDMLYSVLTDDEMAALSESHAATAAAASWKRIATSTHRSATGAHAKDDDCSSDGARVYPMLGLLETASLAADNNSKHELRAGPAGKSSGAGFRRHRSWQPVLDTIEEVP

SEQ ID NO: 9133 - protein, 240 aa, Zea mays
  VARIANT 224: note = Ancestral polymorphism is S, Derived polymorphism is F
  VARIANT 154: note = Ancestral polymorphism is G, Derived polymorphism is R
  VARIANT 145: note = Ancestral polymorphism is A, Derived polymorphism is D
  VARIANT 110..240: note = Ancestral polymorphism lacks residues 110 to 240
  VARIANT 86: note = Ancestral polymorphism is C, Derived polymorphism is Y
  VARIANT 78..240: note = Derived polymorphism lacks residues 78 to 240
MASRRANPKTSQAEGKRSCERGAPLPLPLPSLRQPAHPSLACSGFRNGSRGRDQKDAGERGGCRRGGDLRSHPGMVLRDQPHVARCILLLCASYSLRSSVAHHDALLSCRPHTLSLRSSDILLSSLPAHADPRVFALARGSILVATKWQSSTYGKVLVLDGVIQVTERDECAYQEIITHLPFAPSKTPRSIKMCTLMLFASIEIDVLVIGGGDSGVLPEVSRHSSVEQIDICEIDKMVVD

SEQ ID NO: 9134 - protein, 148 aa, Zea mays
  VARIANT 33: note = Ancestral polymorphism is T, Derived polymorphism is A
MCSDLRGRGGKMPRANEMFRADSRMMVVFGALTSKPEQLTFEETLRFVKKVKARDYMLYLSLFDILGRMELSQLDAYRELQLLFGNHPDLCEELEKFRPPVPTKQAANNIWPWVIVCAVPLVAVSLIPALGNPVLWFVQQTVGEKMAA

SEQ ID NO: 9135 - protein, 290 aa, Zea mays
  VARIANT 22: note = Ancestral polymorphism is H, Derived polymorphism is N
MAAPLLRQWRSLAVLGALLGLHLIAAVAQSPPTTPTTPAAPTTPAAPTTPAAPTTPATPTTPAAPTTPAAPTTPAAPTTPAAPTTPIAPTTPAAPTTPAATPVAPANPPPAPTTPAPTATPVAPAKPPPVAPAVAPAKPPPVTPPPVTPPPATPPPATPPAVLPPAVLPPAAAPPPTATPPAEAPASLPPATTPPPVAEAPAELPPAEAPSKGKNKHKRRRKQHGKKEAPAEAPQPLSPPAPAAPSPADLEDVSGPAPSADVNASCRQHQNWASVVVQTAMAALLLSLAW

SEQ ID NO: 9136 - protein, 691 aa, Zea mays
  VARIANT 442..691: note = Derived polymorphism lacks residues 442 to 691
MASSPSPSPGTIRAPLPPSSATPSPATTTPTPASPAPVTQPNATPADPPSSPVAPPPVPSASTPPPQLTSPPPSLPPPPPDAVPPPPLVASPPPAPAAVVPPPSPPAPVAVPPPPTPAAPPKASPIHIRPPAAASPPPTILPTPNPPADPTPPTLAQPPPPRRRPPRTPQTEPPPLAPPPSGIPVKPSTSSPSPTSADPLIPTPSSPSPPGTTTPGSGSTPSVPAPAMAADPVRPVTTGGSNKSSSPASQSSGSPVDSGGMSSGAKAGIGAVVAILVLISFVGAAFWYRKKRRRVHGYHAGFLMPSPASTTTQVLAKTNFSAGSPESKDSMPEFSMGNCRFFTYEELYQVTNGFSAQNLLGEGGFGSVYKGCLADGEFAVKKLKDGGGQGEREFHAEVDIISRVHHRHLVSLVGYCISDEQRLLVYDFVPNNTLHYHLHGLGVPVLEWPSRVKIAAGSARGIAYLHEDCHPRIIHRDIKSSNILLDNNFEALVADFGLARIAMDACTHVTTRVMGTFGYLAPEYASSGKLTERSDVFSFGVVLLELITGRKPVDASKPLGDESLVEWARPLLTQALETGNAGELVDARLNRNYNEVEMFRMIEAAAACIRHSASRRPRMSQVVRVLDSLADVDLTNGVQPGKSEMFNVANTAEIRMFQRMAFGSQDFRTDFSQSSWSSQSRGLDASGSRPL

SEQ ID NO: 9137 - protein, 1034 aa, Zea mays
  VARIANT 650..1034: note = Derived polymorphism lacks residues 650 to 1034
MLDTTDDIAEGISFQAFEDDCRLLASLLHDVLLRELGPRFIKILERNRILAQSAVSMRAAGMEDTAAVVERQLETDLAAMPLEDALCLARAFSHYLNLMGIAETHHRVRKARNMEQLSKSCDDIFNKLIQSGVPSEQLYDTVCKQEVEIVLTAHPTQINRRTLQYKHLRVAHLLEFNGRPDLSHEDKEMLIEDLVREITAIWQTDELRRHKPTPVDEARAGLHIVEQSLWKAVPHYLRRVSSALKKHTGSPLPLTCTPIKFGSWMGGDRDGNPNVTAKVTRDVSLLSRWMAIDLYIQELDNLSFELSVNGCSDKVASLANDILLKAAEDLKANTWNKTVPQNNAKLHNLALPAQLPSGADLPSCTECSDGESQFRMINLPRNSNRPGALNLTEKFEDSPLSSPTGRQSHIARTPSGRQPRKLFKESNIGRSSSFQKLLEPSLSDRPGITPYRVVLGNLKEKLVKTRRRLELLLEDLPCDYDTEEYCETSDQLLEPLLLCHQSLQSCGSSVLADGRLADLIRRVATFGMVLMKLDVRQESGRHTEALDSVTSYLDLGVYSEWDEEKKLDFLTRELKGKRPLVPQNIEVAADVKEVLDTFKVAAELGSDSLGAYVISMASNASDVLAVELLQKDARLAVSGDLGRPCPGGTLRVVPLFETVKDLQAAGSAIRKLLSIDWYREHIIKNHNGHQEVMVGYSDSGKDAGRFTAAWELYKAQEDVVAACNEFGIKVTLFHGRGGSIGRGGGPTYLAIQSQPPGSVMGTLRSTEQGEMVQAKFGLPQTAVRQLEIYTTAVLLATLRPPHPPRDANWRNVMEEISRVSCAHYRSTVYEDPEFITYFHEATPQAELGHLNIGSRPAKRKPAGGISSLRAIPWVFAWTQTRLVLPAWLGVGTGLQDALDRGHGEELRAMYAEWPFFQSTLDLIEMVTAKADAPMAAHYEEMLVARERRGVGAGLRRELARTERCVLAVSGHSKLTAHNRSLRRLIESRLAYLNPINMLQVEVLRRLRRDDDNRRLRDALLITINGIAAGMRNTG

SEQ ID NO: 9138 - protein, 531 aa, Zea mays
  VARIANT 103: note = Ancestral polymorphism is V, Derived polymorphism is A
  VARIANT 101: note = Ancestral polymorphism is A, Derived polymorphism is V
MRRARGRRGLLLLLGVALSAAALLRGCAGQQGEDGSDAPAAAAAETAPMEEKERRALYAAIESFVGKGWNGSGLYPDPCGWSPIQARPCPSCAFPFASIYVTVLFDFLARGVSCDLFNGLWYPTVMSIGPVLDNSLQCGPDAKFSAQLFDLRRLRTLSFYSCFPASNPTAIPTGSWEKLAGTLETLEFRTNPGLNGAIPASLGRLASLQSLVLVENNLTGPVPAELGALSRLRRLVLSGNGLSGPIPVTLGNDRRADELLLIVDLSRNYLTGSLPSSLGGLTGLLKMDLSSNLLQGSIPPELAGLRSLTLLDLRNNSLTGGLPQFVQGMASLQDLLLSNNPLGGGLPQSGWGALAGLATLDLSNVGLVGAIPGSMAALTGLRFLALDHNRLTGAVPPELARLPSIGALYLNGNNLTGTLEFSAGFYQRMGRRFASWDNPGLCYNVAAVDAAHAPSGVVVCKDLQEPSVGGGARDGDGDGDAEEDGTKPEAGSSLVASSSSGMPVGSVGGLRYLVVVRGMAAAVLGLVSLLQ

SEQ ID NO: 9139 - protein, 151 aa, Zea mays
  VARIANT 49: note = Ancestral polymorphism is R, Derived polymorphism is G
MPSGYFLGTRQDCIMLNIVNLIPSDIYLCSGIVPPSPEEYPILRLSLLRLLIHNRIAEFHTELELLPVKALEHPCSKHAVELKHSFMEGVYNRVLRVWQAVPHETYVYVMDLIAKTARDEIARYSEKGYDSLYVSDEKQMLMFISDQDLHD

SEQ ID NO: 9140 - protein, 191 aa, Zea mays
  VARIANT 6: note = Ancestral polymorphism is D, Derived polymorphism is H
  VARIANT 13..191: note = Derived polymorphism lacks residues 13 to 191
  VARIANT 14: note = Ancestral polymorphism is A, Derived polymorphism is T
  VARIANT 15: note = Ancestral polymorphism is E, Derived polymorphism is V
  VARIANT 22: note = Ancestral polymorphism is D, Derived polymorphism is N
  VARIANT 49: note = Ancestral polymorphism is S, Derived polymorphism is L
  VARIANT 61..191: note = Derived polymorphism lacks residues 61 to 191
  VARIANT 70..191: note = Derived polymorphism lacks residues 70 to 191
  VARIANT 71..191: note = Derived polymorphism lacks residues 71 to 191
  VARIANT 80..191: note = Derived polymorphism lacks residues 80 to 191
  VARIANT 81..191: note = Derived polymorphism lacks residues 81 to 191
  VARIANT 84..191: note = Derived polymorphism lacks residues 84 to 191
  VARIANT 140..191: note = Derived polymorphism lacks residues 140 to 191
  VARIANT 153: note = Ancestral polymorphism is T, Derived polymorphism is N
  VARIANT 155: note = Ancestral polymorphism is T, Derived polymorphism is I
  VARIANT 168..191: note = Derived polymorphism lacks residues 168 to 191
  VARIANT 180: note = Ancestral polymorphism is G, Derived polymorphism is R
MGLLRDLHKAIKQTELALISVNPTIQSIRNYEKVSQILSKMYRVQTSYSWKFFNNRHRIWWLRQSQTNIQWACEDVARQQQEIQNQAASMLKHEASLKRDDKVQYQLHVAEMEAVSVAMPPVYVNHGNDGGPAVKDIHMENFSVTIDLIQEATLTIVFGRHYGEYFVLFDIFQYVRLCPRPRKHACTVVPL

SEQ ID NO: 9141 - protein, 271 aa, Zea mays
  VARIANT 226: note = Ancestral polymorphism is R, Derived polymorphism is H
  VARIANT 35: note = Ancestral polymorphism is E, Derived polymorphism is K
MHPYLRNLMVLGLSFRQDHNIITNQALKRHSVDPEWWMCPAIPVKDITPAPPPSVAMAKVTDKKKTKKKSLGTIYEEGSPEPANGDDDGALALPETGLGLSLNTDGVLKAWCGRGSAFADGNGPDLPLSPAHVIGLRLFNIDMIREHPLLVKQLTPLQDLHDMTSASPRPRSTQRGRHYWGGTCLASQGACLNLLGVRGPNRDSPGANDRDAGVVHILGNTVIRARRDSGFIKKIAINYLYAFLRKICRENNTIFNVPHESLLNVGQVFYV

SEQ ID NO: 9142 - protein, 488 aa, Zea mays
  VARIANT 412: note = Ancestral polymorphism is S, Derived polymorphism is I
  VARIANT 336..488: note = Derived polymorphism lacks residues 336 to 488
MGEYCPSPQGDSALAAPPLTLPSSSPATAVRPSYGSCDRSYVKQVFDNLHGSISVDPLALQFVDTEEFQRLRDLKQLGLTYLVYPGAVHTRFEHSLGVYSLAGKAINNLKTYQGVELGIDPVDMQTVKLAGLLHDIGHGPFSHLFEHEFLPRVDPGSSWSHEKMSVLLLDSIVDKHAIDIENDYLKMVKDMITASSDPASTTSAKEKHFLYDIVANGRNGIDVDKFDYIGRDCRACGLGCNFQYWRLMEGMRVMGDEICYPAKDYLSIHKLFSTRADLHRTVYTHAKVKAVELMLVDALVEANDYLGISLHAHDPEDFWKLDDTIIKTIETAPNNELKKAKEIIQRIRRRELYKFCNQYSVPKDKLEHFKNITAQDIVCSQKSSEVLLKEEDVAVCNVKIDLTRGKYNPLESIKFFMDFGCDEKFPIIDDRVSHLLPAYNEDRIVRVYAKNPELVDVVSEAFENLQMRMYGEKTQVHETPKKKKIRSN

SEQ ID NO: 9143 - protein, 212 aa, Zea mays
  VARIANT 13: note = Ancestral polymorphism is S, Derived polymorphism is Y
  VARIANT 35: note = Ancestral polymorphism is P, Derived polymorphism is T
  VARIANT 73: note = Ancestral polymorphism is A, Derived polymorphism is D
MSSSSGGILLYSSVLQSSSFILQSFILDNVEVIFPESHVVGSGNPSSVADNTVLASASSASAAADSAALVDKAIAKLPADVRAHATDSKRKAKSQDPGWKFGWWPDPTKKDFIRCIFCLKVVPSGIKRFKQHLAGGFSDTTKCSMVPEVVSKDINAAATAQDIREEDDNSPAEDEQEQETARQTNDDEDEGGQESGGRGAAGDEFQLDEDLL

SEQ ID NO: 9144 - protein, 392 aa, Zea mays
  VARIANT 62: note = Ancestral polymorphism is I, Derived polymorphism is N
  VARIANT 66: note = Ancestral polymorphism is T, Derived polymorphism is I
  VARIANT 190: note = Ancestral polymorphism is S, Derived polymorphism is L
  VARIANT 196: note = Ancestral polymorphism is S, Derived polymorphism is F
  VARIANT 219: note = Ancestral polymorphism is S, Derived polymorphism is F
  VARIANT 228..392: note = Derived polymorphism lacks residues 228 to 392
  VARIANT 249..392: note = Derived polymorphism lacks residues 249 to 392
  VARIANT 263..392: note = Derived polymorphism lacks residues 263 to 392
  VARIANT 275..392: note = Derived polymorphism lacks residues 275 to 392
MAEQDGDAGQRPPDSVPVKLERNLHMLVDFFEPKMGLYDNSGTFLGANEDSTRTLAEIEKKIARATVLPRNHGEIMLFGHCETNFFCISRSPILQLKIILAVEPLTPSEGPRIGENIFGYTIVDIFSSSCRGHHKNPPSEPYVLEVNRDVSFYNFRTKQVHEFTARLLDIHDKMMLINNKEDIRLILHRLDYMLDSEINSLLQIENSRSYILPPTLQLSVVPSDFSFQVVGNAVMLGEIINYVQSLQRQVEFMSMKLATVNPQVDLNSLPNVLPKDVRTHKHDRSLHVTTFGFRYGSRGPSSHFVPVCDHVHQSCGPPHFSLETSGASLSYLSQPHHGSPLGCMDNQSCMHPLDTTFCLAINLQYHFLNGVSDASSQTSMESKEEHYPSMTN

SEQ ID NO: 9145 - protein, 602 aa, Zea mays
  VARIANT 270..602: note = Derived polymorphism lacks residues 270 to 602
  VARIANT 265..602: note = Derived polymorphism lacks residues 265 to 602
MTTLSSGVLLKLLDGMKSGAAKPVGEHRTAVLQVTDIVPAELDEKDLFPKHGKFYVKVSDASHSIYATLPLAQADLVLSNKLHLGQFVHVDRLDPASPVPVIVGARPLPGRHPLVVGTPDPAARAKPAAPRRGSWGPEQNAAIKPTTLNFDAERMTPVKERPALSTPVKDRAGGATPARERGAAATPGRERTAVASPALSSASLRKSSSVLPRLTRSKSFVADRDQQHPRIPKSPFPTVRSQPQLKSIGSQVESRLCLQINVDFQFVFAQEKSSVSCTASRATRRVAKEEEPSSPPSDDELGSSATSTKKRSATAARVPVPGKLSLLGKDAMEQREQAQKVALEALRNASATDNVARIYKLFSEVSKTARPEAPATCFDSFLSFHQEAVQAVTDIEAIQAATSMAAAVASDEQQLEDAPPVLQEIAQNRTVVRRRGIGLGSVSKSVSFAPGTLDPKQDDGGGKAIRSSSASRKCLATDKIGEDGGDEKRSSSSGPSSATTTTAHSALGSSLKLAKKIQAEAGSWFMDFLEAALETGLKKSKASSMGDGRKQSSCCCPQSLMLRVINWVEMEQSSGDSSGRKTAHPRAAAVARKLRIKAKNPS

SEQ ID NO: 9146 - protein, 229 aa, Zea mays
  VARIANT 108: note = Ancestral polymorphism is A, Derived polymorphism is S
MKSRRQSSGGSSGACAAGERNAHSSGGGCKLERKDVEKNRRLHMKGLCLKLSSLIPPAAATTHASLLSDAASAAVSSNPGNKQDAVTQLDQLDSAAAYIKQLKERIEALKQRKAGCCNGGGAATEAATAAAGSTGGGGGVRMPVIEVRCQDGTLDVVLISEAARPFKLHEVITVLEQEGAEVVSASFSVIGDKIFYTVHSQALSPRIGVDAARVSQRLHALLLAPTILV

SEQ ID NO: 9147 - protein, 255 aa, Zea mays
  VARIANT 38: note = Ancestral polymorphism is Q, Derived polymorphism is R
  VARIANT 62..255: note = Derived polymorphism lacks residues 62 to 255
  VARIANT 85: note = Ancestral polymorphism is A, Derived polymorphism is T
  VARIANT 140: note = Ancestral polymorphism is P, Derived polymorphism is H
  VARIANT 205..255: note = Derived polymorphism lacks residues 205 to 255
MTVYELKLQARASGGHDAKDQFPVGMRMLQMVSNFTAQSTASSAAMHGHSGILGETDSPKLQEAPFLSCDSEVADKGFWTKLKDAIHQFIEELMAPPTKSAIIGFVVGLVSWLKSLIVGYRAPFKVIQDSLQLMGDDTIPCITLILGGNLTQGLRKLALKCVVIVAILCVRFVLLPLIGIAVVRATYGLGFLSRDPLYRYVLMVQFVVPPAMSIGTMSQLFDIGREECSVIFLWMYLFVAVALTAWSTVFMSVLS

SEQ ID NO: 9148 - protein, 172 aa, Zea mays
  VARIANT 49: note = Ancestral polymorphism is G, Derived polymorphism is R
  VARIANT 51: note = Ancestral polymorphism is G, Derived polymorphism is D
  VARIANT 56: note = Ancestral polymorphism is T, Derived polymorphism is I
  VARIANT 116: note = Ancestral polymorphism is S, Derived polymorphism is N
  VARIANT 135: note = Ancestral polymorphism is L, Derived polymorphism is R
  VARIANT 154: note = Ancestral polymorphism is R, Derived polymorphism is H
MPPFRLEDEVIFRWCVTLVLSLMQHLQELLWYVRFGLWWIILGVASSIGLGSGLHTFIMYLAPHVALFTIKAVQCGRVDLKSAPYDTILLERRPSWLEKDCLQFGPPIYHETIPFSKILQEVYLEAILWGIGTALGELPPYFLSRTGSVHTALRTKYNIIYLITAVFSCLST

SEQ ID NO: 9149 - protein, 199 aa, Zea mays
  VARIANT 141: note = Ancestral polymorphism is E, Derived polymorphism is D
  VARIANT 37: note = Ancestral polymorphism is Q, Derived polymorphism is E
MEMRAKKSSRSSTSNTSGSTTTTAVERKEIERRRRQQMKSLCAKLASLIPKEHYSSKDAMTQLGSLDEAATYIKRLKERVEELRHKSASARLLAAGSGTRRGGGGGGASTSSAATTTASGGAGSSEEAGRREDDMPPAVVEVRQHNDGSSLDVVLISSAARPFKLHEVVTVLEEEGAETVNANLSVAGTKIFYTIHCKV

SEQ ID NO: 9150 - protein, 183 aa, Zea mays
  VARIANT 26: note = Ancestral polymorphism is R, Derived polymorphism is C
  VARIANT 27: note = Ancestral polymorphism is R, Derived polymorphism is H
  VARIANT 41: note = Ancestral polymorphism is R, Derived polymorphism is C
  VARIANT 122: note = Ancestral polymorphism is P, Derived polymorphism is S
MSLRPSEREQMRKGNYKQTVDAEESRRRREGQMMDMRKAKREESLQKKRCDGFPASAAGVPPMGHSTALQQKAVHSNDPSGQLEATTQFRKLLSIVEIGILFSINFSRSPPIEEVISTGVVSRFIEFLTREDHPQLQFEAAWALTNIASGTSENTKVVVESGAVRLCPSLSSYSTPSSEDVRE

SEQ ID NO: 9151 - protein, 144 aa, Zea mays
  VARIANT 47: note = Ancestral polymorphism is G, Derived polymorphism is V
MAARRQHRRGFPLVPLLLSLLAAAAYGRLISDGGPSAQLLSVIRLSGSSPAAGAAAKAEEKCEQSYGFLPCTTTVLGNLFLVLTYGYLMYKAATYLSAGSELLLEIMGPGLVGGLLLPILGALPDALLVLGSLSVPLARLISVL

SEQ ID NO: 9152 - protein, 947 aa, Zea mays
  VARIANT 500..947: note = Ancestral polymorphism lacks residues 500 to 947
MEKLEESETKVGFLWYEHIYKLDKGPETQMHTLAKNIAGTSLVYTKYFKMIEEGTYYILEICSCTSHVIVQIRKGKLSFEQLNNIKYRALYGITITKLTQGVTADEEELMDEGIRSLIPFMSWSIQKENPLLRLTVENCELSSIGVIILLDCLTNAKQLLDVLSIADNHLGSPVAAALARFLGSHVRALNATDIGLGTVGFQILEETLPTEVALSHINISVSLGSAPAIADSLAIRVGGQAMSRFWKPGSEKPSTLLVDDEEGGVVFLPSSSSVSSSGFGYASLERQRQRLPVYKYRKAILYLVERHATTIVVGETGSGKSTQIPQYLKEAGWADGGRLIGCTQPRRLAVQYFLLLYADVSPSHLLLIIAFSTHLTIEQMVASRVAEEVGVKLGEEVGYTIRFEDQTNPGMTMIKFLTDGVLIREMMEDPLLTKYSVIMVDEAHERSISTDMLLGLLKKPCQVKMRIAYLTSHTIEIQKDFLNNCHVTNTQSVVAMIHALVINLSILPYWRKNSLLGSSDNLPSPEPAVLSVEGKGYTVEIHYVEEPVSDYLQATVNTVLLIHEKARFFMQEPPGDILVFLTGQDDIEAAVKLLNEEIQHLGRHYLVGQREAPDLSLVSDQLPPAIMRGLEDLIFAPTSKGKRKVVLSTNIAETSLTLEGVVYVVDSGFSKQKCYNPISDIESLVVAPISKASARQRAGRAGRVRPGKCFRIYTEEYYLTEMQSEGIPEMQRSNLVSCIIQLKALGIDNILGFDWPASPSPEAMIRALEVLFSLGILDEDAKLTVPIGFQVAEIPLDPMISKMILSANDFGCSDEILTIASFLSVQSVWVSVRGVKKEFDEAKLRFAAAEGDHVTFLNIYKGFHQSGKSSQWCYKNFLNYQALKKVVDIRGQLLRIVKSFGIQLKSCDRDMQAVRKAIIAGSFTNACHLELTNGNLSVSPGKHSQGD

SEQ ID NO: 9153 - protein, 622 aa, Zea mays
  VARIANT 107..622: note = Derived polymorphism lacks residues 107 to 622
  VARIANT 373..622: note = Derived polymorphism lacks residues 373 to 622
MSPACATPAAARPLNTVPTRRSPPSAARPPSAIPARRSAGCCFCASSSSSASSPSTWDWTRWSRHFDEVDQAESYASLLQFQLEEAVENEDFAEAAKLKRDIIAATGNDAVAHVMAELKSAIEEQRYQDASRLTRLAGTSLVGWWVGYAKGIDDSIGRIVRISPGVGRYVAKSYSPRQLVTASSGTPLFEIFLVREDDKTYTMKVVHLRPTKGTLGASSISSAITESPATVETPESSAISDSITEEANIDTPVKGNGDAEEKEQDVGSSKDTSVDGFKSLLNFFKSRIPEFKVQVINVDVSEETELAANSSEESVQDDVKSTPEGSLEEPTTEELEQEEDVPEEDMDEESKSTKVKLFISGVVHNKEDAGTKSYVRVPAEINNMEKDSFDLYIPGNGSGHDLPETKAAKQKVADMAAKLASELMPSDVAKALWGTTKSSSKINKEVQELLRLTLSKARVKLTDDTFFNRIIMDTNSMDPFNGLYVGAFSPYGPEIVQLRRKFGHWNSSDDVEFFEYVEAVKLTGDLSVPAGQITFRAKIGKGKRLENRGAYPEEFGVIASYKGQGRIAQPGFKNPRWVDGELLVLNGKSTIPHLGGAELGFLYSVPEQSFLVLFDRLNLPEC

SEQ ID NO: 9154 - protein, 640 aa, Zea mays
  VARIANT 474..640: note = Derived polymorphism lacks residues 474 to 640
MIASQPRRVRPLAAVSLVLFLLLLYSRSDGGSPRAARLLGSGFYPVHRRFLSDADPAGPASSAANPSASGTVPLNGEQPEDPSVACAGIALHEGFGTQCEFLRAHPQCSSDGFVDYLGFFYCRCERFRVLGYAVLGVCLAALFYMLGNTAADYFCCSLEKMSALLRLPPTLAGVTLLPFGNGAPDVFASIAAFMGSGAGDVGLNSVLGGAVFVTCVVVGAVSLCVAEKNVQIDRRCFVRDVGFFLVTLLALSIVLTIGKVTVWGAMMFVSIYVVYAFVVAANEVLRKHARRLKFDVFTPLLPVRASIFEQGAEQDESAYSSLLEEDADGEVTQMNTSVPQWMWASHVAIYSNHGNRDGSPDSSRPLWGWSEGEVDNSTFNIYKLFSFMELPLTIPRKLTIPIVEEDRWSKEYAVASSCLAPVLLAFLWSSQDTVSTKVSIAAYVMAVMLGIALAALVFLFTSNERPPRRFLFPWVFGGFVMSIIWFYIIANELVALLVALGVILGINPSILGLTVLAWGNSMGDLMSNVALAMNGGDGVQIAMSGCYAGPMFNTLAGLGISMLLGAWSTAPNSYVLPQDHSLIYTMSFLVAGLIWALVMLPRGDMRPNKILGVGLIALYSIFLFIRVGSAVGILPLPGSS

SEQ ID NO: 9155 - protein, 49 aa, Zea mays
  VARIANT 47: note = Ancestral polymorphism is V, Derived polymorphism is A
  VARIANT 8..49: note = Derived polymorphism lacks residues 8 to 49
  VARIANT 7: note = Ancestral polymorphism is R, Derived polymorphism is C
  VARIANT 3: note = Ancestral polymorphism is Q, Derived polymorphism is K
  VARIANT 2: note = Ancestral polymorphism is R, Derived polymorphism is S
MRQPPPRWYNPYHGYPYRSYGAPYFPPYGYERAPRFRRLMRYIAYHVQG

SEQ ID NO: 9156 - protein, 316 aa, Zea mays
  VARIANT 20: note = Ancestral polymorphism is A, Derived polymorphism is T
MRAITGGVVSSQPCPLHKAALFLKRFTESAASHLPSSDCCNYLRNAADATTQLSRFRKELGGSHKQGAANSDAHYYDDPVKGNRNHEDQESKGDMAIAADDSNRDSAAEAKLDVASGKKGNKKKNGDPLEDRAVARANSHIPPSPEIATEKRKKNHPNKEIIVDVKQEPNSHILPSPEIATEKSKKKSRPNKEIIVDVKQEPSFVVEEELVSEKKSKKKKEKDHVKLEENVNEVEEKIVNDSAAEQRVAITERERKKKKHKQEECTEVVKEKKITDGDLDREKKRKKKRDRGDNYDNAPEQVEHINKKQKKHLGIS

SEQ ID NO: 9157 - protein, 309 aa, Zea mays
  VARIANT 217: note = Ancestral polymorphism is P, Derived polymorphism is L
MASEKSKILVVGGTGYLGRHVVAASARLGHPTSALVRDTAPSDPAKAALLKTFQDAGVTLLKGDLYDQASLVSAVKGADVVISVLGSMQIADQSRLVDAIKEAGNVKRFFPSEFGLDVDRTGIVEPAKSILGAKVGIRRATEAAGIPYTYAVAGFFAGFALPNIGQLLAPGPPADKAVVLGDGDTKAVFVEEGDIATYTVLAADDPRAENKVLYIKPPANTLSHNELLSLWEKKTGKTFRREYVPEEAVLKQIQESPFPLNIILAIGHAAFVRGEQTGFEIDPAKGVDASELYPDVKYTTVDEYLNRFL

SEQ ID NO: 9158 - protein, 123 aa, Zea mays
  VARIANT 108: note = Ancestral polymorphism is S, Derived polymorphism is I
  VARIANT 75: note = Ancestral polymorphism is I, Derived polymorphism is F
  VARIANT 72: note = Ancestral polymorphism is G, Derived polymorphism is S
  VARIANT 70: note = Ancestral polymorphism is A, Derived polymorphism is V
  VARIANT 67: note = Ancestral polymorphism is V, Derived polymorphism is I
  VARIANT 61: note = Ancestral polymorphism is L, Derived polymorphism is I
  VARIANT 59: note = Ancestral polymorphism is A, Derived polymorphism is T
  VARIANT 55: note = Ancestral polymorphism is I, Derived polymorphism is T
  VARIANT 49: note = Ancestral polymorphism is E, Derived polymorphism is K
  VARIANT 47: note = Ancestral polymorphism is H, Derived polymorphism is D
  VARIANT 31: note = Ancestral polymorphism is C, Derived polymorphism is Y
  VARIANT 26: note = Ancestral polymorphism is T, Derived polymorphism is N
  VARIANT 18: note = Ancestral polymorphism is L, Derived polymorphism is S
  VARIANT 14..123: note = Derived polymorphism lacks residues 14 to 123
  VARIANT 11: note = Ancestral polymorphism is R, Derived polymorphism is G
  VARIANT 10: note = Ancestral polymorphism is S, Derived polymorphism is L
  VARIANT 3..123: note = Derived polymorphism lacks residues 3 to 123
MLKVLIKIRSRKSEQVMLYLNRRCTTSTRTCGGRSRSSVTSTTPTFHDEERVVLILEHATLGEINKILHATGRSIFHGRLTEVDARRYFQQLIDGVDFCHKKRSLPLSLKGDHWIGKILSMRS

SEQ ID NO: 9159 - protein, 516 aa, Zea mays
  VARIANT 23: note = Ancestral polymorphism is P, Derived polymorphism is S
  VARIANT 40..516: note = Derived polymorphism lacks residues 40 to 516
  VARIANT 42: note = Ancestral polymorphism is R, Derived polymorphism is L
  VARIANT 62: note = Ancestral polymorphism is H, Derived polymorphism is Y
  VARIANT 120: note = Ancestral polymorphism is G, Derived polymorphism is D
  VARIANT 148: note = Ancestral polymorphism is I, Derived polymorphism is N
  VARIANT 176: note = Ancestral polymorphism is L, Derived polymorphism is H
  VARIANT 201: note = Ancestral polymorphism is S, Derived polymorphism is L
  VARIANT 216: note = Ancestral polymorphism is R, Derived polymorphism is G
  VARIANT 220: note = Ancestral polymorphism is R, Derived polymorphism is W
MAAQSLSVPVPMPSSLDLRAAAPFLVAAVALYFLMEQVSYHRKKGPLPGPALVVPFLGSVAHMIRDPTGFWDAQAARAKRSGAGLAADFLVGRFVVFIRDSELSHRVFANVRPDAFHLIGHPFGKKLFGDHNLIYMFGEDHKDLRRRIAPNFTPRALSTYAALQQRVILAHLRRWLDRSGGGGGGAFPIRVPCRDMNLETSQTVFVGPYLAGEARRRFERDYNLFNVGLMALPIDLPCFAFRRAREGVARLVRTLGECARQSKARMRAGGEPECLVDFWMQDTLREMDEAAAAGRPPPAHTDDEEIGGFMFDFLFAAQDASTSSLCWAVSALDSHPEVLARVRAEVSAAWSPDSGEPMTAETIQGMRYTQAVAREVVRHRPPATLVPHIAGEAFQLTEWYTVPKGAIVFPSVYESSFQGFPDAEAFDPERFFSEARREDVAYRRNFLAFGAGPHQCVGQRYALNHLVLFMALFVSVVDFRRERTPGCDDPVYMPTIVPKDGCSVYLKQRCAKLPSF

SEQ ID NO: 9160 - protein, 445 aa, Zea mays
  VARIANT 63..445: note = Derived polymorphism lacks residues 63 to 445
  VARIANT 56: note = Ancestral polymorphism is S, Derived polymorphism is L
MSKLQSECQIRQANPPHLGFFVLLEEKQLAFLLGGGYPYYLPLASHVDCTVKVRFSSFYGGGYKVSQLRTIVPRPSRRRHAIQVVTAFDDDPGDFSLVHDDGDEQFGVPQYSSESEWSDDDVILTAFTDVELPMAVKSRAEGALTIAAHRFATIDKGHKKSRTQQGLMNNVGLVAFLVMLLFFVDWCSWKIVRLPLDSFYLTRPFLTSAVLSALAGFLFAPVADSLKIHHFRRRGKSVSPSSRKPTPGMGGLFFVPVGIFVAKREVGSNSNGVNGAAMITLIFAMVGLLDDISSLAVDHNYKIPRWIRFLVQIVAGIYFSNWLGSTDISTPYSMKYLVPLPPPFGLALIGKVYMVLAAACSLSMGPAVTLVDGLDGLAGGIAALALIALSVAALPICSEFSVFGASMSGACIGFLFHNRYRASVVMSRVRHSVVYFTSVVAVPKK

SEQ ID NO: 9161 - protein, 375 aa, Zea mays
  VARIANT 184: note = Ancestral polymorphism is K, Derived polymorphism is N
  VARIANT 268: note = Ancestral polymorphism is A, Derived polymorphism is G
  VARIANT 298: note = Ancestral polymorphism is P, Derived polymorphism is S
MGAEAAHGHPQQQPPSSLRPGREAAAPPAVVGLQLSALIDHVARVDWSLLDRVPGDRGGSQQVSIDELNHILDEVNAHILPSRNDLTPVTTIAGGSVANTIRGLSAGFGISTGIIGACGDDNQGLLFVNNMSFSGVDLTRLRAKKGHTAQCVCLVDASGNRTMRPCLSSAVKIQANEFRKEDFKGSKWLIVRYAQQNMEQIVEAIRIAKQEGLSVSLDLASFEMVRDSRSKLVNLLETGNIDLCFANEDEAREVIGGSLESDPEEALAFLGKYCKWAVVTLASKGCMAKHGKQVVRVPAIGESNAVDTTGAGDLFASGFLYGLVKGLPLEECCKVGACSGGSVTRALGGEVRPENWQWMYKQMHARGLLLPELKN

SEQ ID NO: 9162 - protein, 130 aa, Zea mays
  VARIANT 25: note = Ancestral polymorphism is A, Derived polymorphism is G
  VARIANT 26: note = Ancestral polymorphism is A, Derived polymorphism is V
  VARIANT 65: note = Ancestral polymorphism is K, Derived polymorphism is E
MSSSVLRAAADRAIRRQALTLTNAAVSRIRQLLSLRQRPYLRLGVKARGCNGLSYTLNYADEKGKFDELVEEKGVKVLIDPKALMHVIGTKMDYVDDPLKSEFVFINPNSKGQCGCGESFMTTGSKGSTS

SEQ ID NO: 9163 - protein, 460 aa, Zea mays
  VARIANT 286..460: note = Derived polymorphism lacks residues 286 to 460
MMAASSSSSFNLSDHLVQDDLPWPASSSSSSQLPFAPSHPPHGAIIGGSQQWWQQPQMLNCADRHPSDELEVLLSAQGSHHHHHHPSSSVIHPQLSSLLMMQDLGFQWSSCGSFVDTSSSSPMPPPLVNGQQHDGHNKIKEWDRPLTANNSSRSSCASTAMACRDVVLDGGGGGGLPAMAAVAADLDDGTVLPASVNVPRTTTTRQRPFPAAPPPLPGDAFEILASSRLCKTLLLSQASSSVLLHNGTTMPLLRSEHVPYGPPAPAHPQGPSIGNYKQRSSIVSDEHACVRAPLQCMQMGASCGGRAQHEAACQSMAAAAARPALPVVPSSKKPRVEQRSSTIVPSFKVRKEKLGDRIAALQQLVSPFGKTDTASVLMEAIGYIKFLQDQVETLSRPYLKSSRSKKPRPTPRGSSNASAGELEETRPDLRSRGLCLVPLSCTSYVTNENGVWVPPNFRAN

SEQ ID NO: 9164 - protein, 81 aa, Zea mays
  VARIANT 8: note = Ancestral polymorphism is G, Derived polymorphism is D
  VARIANT 21: note = Ancestral polymorphism is R, Derived polymorphism is W
  VARIANT 26: note = Ancestral polymorphism is G, Derived polymorphism is R
  VARIANT 30: note = Ancestral polymorphism is P, Derived polymorphism is L
  VARIANT 35: note = Ancestral polymorphism is A, Derived polymorphism is V
  VARIANT 37: note = Ancestral polymorphism is Y, Derived polymorphism is C
  VARIANT 40: note = Ancestral polymorphism is A, Derived polymorphism is V
MSSTGGGGRGKAKPATKSVSRSSKAGLQFPVGRIVRCLKAGKYAERVGAGPPCTSPPFSSISPPRCWSWPGTLLVTTRTVS

SEQ ID NO: 9165 - protein, 475 aa, Zea mays
  VARIANT 87: note = Ancestral polymorphism is P, Derived polymorphism is L
  VARIANT 89: note = Ancestral polymorphism is D, Derived polymorphism is A
MEKEAAAELEIPGECQYAGDPVLVRPSQPTPRHTLHLSNLDDQRFLRFSIKYLYVFGADAAVPADALRAALGRVLADYYPLAGRLRPSAEEDGKLVVDCNAEGALFAEGRLPGLAAADFLSGSDRPHKSWRKLHYRVEAQSFVAVPPLVVQVTWLACGGMVLCTAINHCICDGIGTAQFLHAWARAVRGGGGRDALDAGGDDTALPFHDRRALRPRCPPRVAFAHPEYSTRGIINAAVANGNGNGSANEAPSLLARLLGQPLAPVSLTFTAAHLLRLKRQCVPSLKCTSFEALAAHVWRAWVRALDPPGALRVKLLFSVNVRRRLRPELPRGYYGNGFVLGCARSTAAQLTSPSCGSAARYGVRLVQDAKACVDDDYVRSMVDLLEERRGARPDLAASLVISAWTRLGLEDLDFGAGKAAHMGPLTSEIYCVFLPVVGDPHAVTVLVSVPQAAADKFQHFCLGFLKDVEVDAKLT

SEQ ID NO: 9166 - protein, 218 aa, Zea mays
  VARIANT 35: note = Ancestral polymorphism is E, Derived polymorphism is V
  VARIANT 135: note = Ancestral polymorphism is R, Derived polymorphism is L
MARRASLLLAAALLVAVAAAAVPPTCERIECPAYEVVDSANGFEIRRYTDAMWITTAPIEDISFVAATRTGFLQLFDYIQGKNAYNQTIEMTAPVLTRVSPSDGPFCASAFAVSFYVPAKNQADPPPAEGLRVDRWAGARYAAVRRFGGFVADADVGEQAARLEASLQGTRWAAAVNDARRADPASPYTVAQYNSPFEFTGRVNEIWMLFDADDDASM

SEQ ID NO: 9167 - protein, 394 aa, Zea mays
  VARIANT 206: note = Ancestral polymorphism is H, Derived polymorphism is L
  VARIANT 115..394: note = Derived polymorphism lacks residues 115 to 394
MSSICPFAGATTGGGVCPVKSDKSNTGVCPAKSDKSISGVCPVTGKDHGSKLKESGDHGEEKGTDPRVVPAKCPFGYDSNTFKLGPLSCIVCQALLHESSKCKPCAHKFCKACISRFKDCPLCGADIEGIEPDAELQALVDRFIDGHARIKRSHAAGDVEAADGKNKVIYEDVSMERGAFLVQQAMRVIFNYLKSFPNLLPTFKRLDIRTLGDVPAAITYYEESAEFLSKPPAKDLELVHTLSVSLNKIGDLRYYDGDLQSARNYYARSLDVRRNAVKEHSAVASQVNCSINSWVTWNRNAIVLNRIAQKVFCFQGNRFVSSLFLVGHIVIDLATSLAKVADVDRNLGNESTAVEGFEEAIRCLEKLKLDSEQTTLEQRRLSVLDFLHNQLADK

SEQ ID NO: 9168 - protein, 1250 aa, Zea mays
  VARIANT 731..1250: note = Derived polymorphism lacks residues 731 to 1250
  VARIANT 719..1250: note = Derived polymorphism lacks residues 719 to 1250
MEIENRRIKIERRSDSPCGGPPNKNHHRPPAPPRSSSMELERIPAASAMDWSIDLDRGLRSRQPATRVRAVDAAGPRLRQLCTCATAPAPVASAYGVLPGEARVFAETMLLRLATEFRSADVAMRVRIIKTLLNSATGPGALAGARITEPDQLLRRVKVVYDTGNKRDRALALRMFGCFADIAKDSVHVRSLILSSLSASSALEVTTFLHLSHSVKAAIFAASCICHLSDDFSRIILEVFRRLICSQTSEPQVIMSAAKAFWKLGSTLAVIHKVHEVGKQMVLGTLEDVFKSEMLFSLSRLSSKSIILFSDQVDLLLLFMDHNSSSMKSVALKCMCFMFRRNICHFPVIRNVFGRLFPLIDDEDFPLDCKSDVLRILQKMLCSKTSSNHRANGSELSKLLLAAESSLDSSCLEVQGTALEILVEIFCILKEVGSDNISVLKGSSFAHAEWQGITNNVPLTEDNSMNGPLCKIIAMIVNHIISLANEVASRDICISSAVDKAYKTPFRLMLKLVSCYPSAAAVTLHILKSLVKELFLINGSDYSEVSVTSVEPFQTSVALKELSTSDDNVQLLATCIKASCIGTLIGNGKLDFLKIDCKNRKSIMHDLICCMLKFANACHEVLCETSGARYNLHDSIKGLIKYVRQDAPQHWSTYESFHLIMCACVTRNTCKINRGNQESGDSKEHHNTLFTPSVWITQELCALRMTKMLIKKQKYWEAYRSSMYCCCKGLWFTASFVFRKLADAFEAGSFSFWLKSLLLFSAGEIEMKLLFFSSATIKLVGELKMEGDLSEDLYCNETDADSTLSRSSELHGFQAKISDICGRTLLANNALASSASSDHDFVFQRWFISLRSSFLEVLTKVLDILNAHSSYEARGDHLSLSGEFVKDQVLALDHCSLRLSDLAKSYDLLAASHMDLERHGSSSIARLAFMCSLLAFCTAYSVYFSKACNYVEYCKLPKRFSHASILQDLYGRVDGSDWQVVSQLRQFMSTSFDELDSLQSSTWISGSCNLEKDLYSLCHFAVASLLGVCDSAEAEKIQNGEDCLSALQGGLQVLSSILQKYLELPFVVPKYFFRVKPCLGAELYIFDSNHLNEKGMSIEPGFLLSLTLCMKWKCVLERSTIRIVKLYCILAASLETCLDTAGTRSKQFDQHRTAEMVELNSKLLQYIKNDLRKARNEKKNSHSVMEMVTAFACFEPTDSGQGFSGCLLDVSSFPEGSYQIKWQACCVDENGSYFSLLPLNDGSIFSVQKS

SEQ ID NO: 9169 - protein, 456 aa, Zea mays
  VARIANT 40: note = Ancestral polymorphism is P, Derived polymorphism is S
  VARIANT 203: note = Ancestral polymorphism is A, Derived polymorphism is S
  VARIANT 211: note = Ancestral polymorphism is P, Derived polymorphism is R
  VARIANT 289: note = Ancestral polymorphism is E, Derived polymorphism is G
  VARIANT 391: note = Ancestral polymorphism is Q, Derived polymorphism is L
MGWPVRVRSPSVLQSKLLCLSLLYLLTTLPLALYVSFTDSGRRRRCLQPVPSPPKPLFQYPAGYGEHRHALPTSRALCSNPVAFADYKTALEEIHGLCRDTSASPALRYQSGRRATFAGNLSTQERRSFFNHTDDQVAVPCGFFREFPVPEPDRLAMEKCRGVVVASAIMNDHDKVRQPRGLGAETLRAACFFLFIDDATRAALARQGVLPARGGGGHTTVGAWRVVTVGRRRAGGGGLPYEDPAMNGVVAKHLLHRLFPGARFSVWVDGKVQLTVDPVLLVHALLVRERADVAVSRHPFNRHTMEEAIATARWRKCRDVDAVRAQMETYCGNGLRPWSPSKLPYPSDVPDTAVIIRRHGVASDLFSCLLFNELEAFSPRDQLAFAYVRDQMSPKLSINMFEVEVFEQIAVEYRHNLKPGRGKRQQGGTRMASSRDIAGSSCEEYLHQMWGESAAE

SEQ ID NO: 9170 - protein, 661 aa, Zea mays
  VARIANT 286..661: note = Derived polymorphism lacks residues 286 to 661
MAPASETELQAPPPPPASAKEIKSPEVLPEPGSLSALQRKKLGAHFMESDERRVSRARTPLGAAYEPPSAAAGGGGTTPVNIRGEPIQDLSRTGGWVAAFFIFGNEMAERMAYFGLSVNMVIFMFKVMHRPFASSANAVNNFLGISQASSVLGGFLADAYLGRYWTIAIFTTMYLLGLIALTVSASVPALVPPQEGCDKLAMLLGACAPAAPWQMAYLQTALYVTALGAAGIRPCVSSFGADQFDERSPEYKRRLDRFFNLFYLAVTLGAIAAFTAVVYIQMQHGWAAAFGTLALAMGTSNALFFVGTPLYRHRLPGGSPLTRVAQVLVAAFRKRDAAFDSGDFVGLYEVAGAKSAIRGSAKIDHTDDFRWLDKAALQLEGDLAGGEDEEAVNPWRLCTVTQVEEVKILLRLLPVPACTVMLSVVLTEFLTLSVQQAYTLNTRVAALHLPVTCMPVFPCLAIFLILALYYQTFAPLARRLTGHPHGASQLQRVGLGLFFSILSVAWAGLFERYRRGYAVRHGYLGLFLTPMPDLSAYWLLIQYCLIGVAEVFCLVALLEFLYQEAPDAMRSVGSAYAAVAGGLGCFVASAINTAVDAATRDDEEGRPSWLAQNINVGRFDYLYWLLAVLSTVNLLIFVFFAKRYKYRVRVDVPTTVAVDKQ

SEQ ID NO: 9171 - protein, 333 aa, Zea mays
  VARIANT 20: note = Ancestral polymorphism is R, Derived polymorphism is G
MHGAQDDAMDKSKRWKKKRRREDRPPSDQLQTSDRQTELNDPAKRMEPSLCTPHATVTAANAAPLSVRAHRGARRARAAVRAHSHHQGAGAREPEPEPADPQGAVPAKGRGPPALPNAALRVGAGVALALALGGVSWTARGGSAGAGPGPVTQPAMVCALNAVTDAAVRASAEQRGSATMKTSVDALSDSLFRREDSPRDRATLMDLVFEQVTKEHITDRGKLTSLLQKEFSASRDSERKLDLGLLLTDVLINQRDWQRAKEVCQQITGRYQRDSRPYLHLAVINMMIAVEAMLSPDTATTDDIEKMTKTAVDAWKEFKNKSELAKGSADSTA

SEQ ID NO: 9172 - protein, 620 aa, Zea mays
  VARIANT 139..620: note = Derived polymorphism lacks residues 139 to 620
MEPAENDTSSPPEYGAGKAAATVPARSYWRWRRDDFFPEPSFASWGAYRRALRETPARLRDRLAGRSTDAAELGALRRRSEHEMRRCLTWWDLTWFGFGSVIGAGIFVLTGQEARDHAGPAIVLSYVASGLSAMLSVFCYTEFAVEIPVAGGSFAYLRVELGDAAAFVAAANLILESVIGTAAVARSWTSYLASLVNRPASALRIHAPGLAGGYDELDPIAVLVIAVTATLAMLTAKGTSRVNWVASAVHVLVIAFVIVAGFAHADAANLRPFMPQGVPGVFRAAAIVYFAYGGFDNIATMAEETRNPSRDIPLGLLGSMTAITAIYCVMALVLSMMQPYTAIDRSAAYSVAFASVGMRWAQYVVALGALKGMTTVLLVGALGQARYTTHIARSHIIPPVFALVHPRTGTPVHATALIAVCSACIALFSSLDVLASLLSVSTLFIFMMMATALLVRRYYVRGVTSRTHALRLTALLLLIIASSIGIAACWGTSPERWQGYVVLVPAWAAGTLGIQLLVPAARAPKVWGVPLVPWLPSLSIATNLFLMGSLGKDAFIRFGVCTAVMLVYYVLVGLHATYDVAHGACGWEEEDDGDAAAADEDKKVVAAADVEKADAAGGTR

SEQ ID NO: 9173 - protein, 230 aa, Zea mays
  VARIANT 147..230: note = Derived polymorphism lacks residues 147 to 230
MKKIFGAKKDKGPPPSIQDATERINKRGETVDEKIKKLDEELARYKEQIRKTRPGPSQEAIKARAIRLLKHKRMYEEQRNMLYNQTYNLDQVGFAADGLKDAQQTMNAMKAANKELKGMMKTVKIDEIDNMQDEMTDLMDVSNEIQETLGRSYNIPDDVDEEELMGELDALESDMEFDSAAVPSYLQPDSDFDADLNLPAAPSRPAMVPAGGLQEDELGLPAVPRASLRS

SEQ ID NO: 9174 - protein, 530 aa, Zea mays
  VARIANT 107: note = Ancestral polymorphism is E, Derived polymorphism is G
  VARIANT 219: note = Ancestral polymorphism is A, Derived polymorphism is V
MATGSPRRRPLPLLLLFLLLFAANGRANAARPGGPSPIKNVVVLALENRSFDHMLGWMRRLLGLPVDGLNGTECNPNSNSTSSICVSADADLVVPDDPGHSFEDVLEQVFGNVSAAAAQPQPSMSGFVRSALSVNAVLSSAVMRAFRPSLLPAFSALAPQFAVFDRWFSSIPGPTQPNRLFLYSATSRGAVAHDKLDLLLGYPQRTIFESLAADGHDFAVYFKTIPTVLFYRRLRALRYAARAFHRYDAAFKEHARRGVLPALSVIEPRYFDLTGTPADDDHPAHDVANGQRLVKDVYEALRASPQWNQTLLIVTYDEHGGFYDHVATPTAGVPSPDGIRGPPPFFFKFDRLGVRVPTIMVSPWIKKGTVVGRALGPTDTSEFEHSSIPATIKKIFNLSSDFLTKRDAWAGTFDHIFTELDQPRTDCPETLPEVPFERPTPPKEHGWLSDFQRELVELASFLNGDYMLTSLAQENRKKKMTVKQADAYVRRAITSFLQASKQAVRLAANESAIVTMRSSLTSKSTRSSSP

SEQ ID NO: 9175 - protein, 251 aa, Zea mays
  VARIANT 139..251: note = Derived polymorphism lacks residues 139 to 251
  VARIANT 153..251: note = Derived polymorphism lacks residues 153 to 251
  VARIANT 178: note = Ancestral polymorphism is L, Derived polymorphism is P
  VARIANT 185: note = Ancestral polymorphism is S, Derived polymorphism is Y
  VARIANT 194: note = Ancestral polymorphism is G, Derived polymorphism is R
  VARIANT 210: note = Ancestral polymorphism is V, Derived polymorphism is M
  VARIANT 217: note = Ancestral polymorphism is S, Derived polymorphism is F
MTLRKCQEDVTNKVQATIDKHAERGLTVTRQEVPKKRNKDDDTGGPSQFVALPLLPLLDPAPTEDNGGSARARPDVATSSKKKKKEERRNSSGANRSRNRVPSSITDVQHERLEALGAKKPPRFMIGKSLMASDVDPKQACLLFSLKLESLSQVTRVLTQTEMGLVTVFDRDGRSYHPTCKYLESNFGYRFVAGWKAYIQDNSLGASMRVDLWCFRSLKLHDRYELRDGTEKVPLTMDSGHPDRVETCSKR

SEQ ID NO: 9176 - protein, 163 aa, Zea mays
  VARIANT 19: note = Ancestral polymorphism is C, Derived polymorphism is Y
  VARIANT 38: note = Ancestral polymorphism is R, Derived polymorphism is W
  VARIANT 87..163: note = Derived polymorphism lacks residues 87 to 163
  VARIANT 110: note = Ancestral polymorphism is D, Derived polymorphism is V
MEMGGMSDAERLFFFEMACKNSEVAYEQNPNDADNLTRWGGALLELSQVRTGPDSLKLLEDAEAKLEEALQIDPNKSDALWCLGNAQTSHGFFTPDNALWCISMTSFLNVDSFKAINDEGMPMYQRPFMKGKLYIHFSVEFPDSLSPKQCKALEAVLPPKPVS

SEQ ID NO: 9177 - protein, 688 aa, Zea mays
  VARIANT 13: note = Ancestral polymorphism is S, Derived polymorphism is I
MPAHPTPPAARLSGVTSRRHAELLLHSGVDGVSVKDLRLRRIVPPAAGSLDTSPKCVSPVKPGSVDSTPPEAVSSAAAAAAGDLDRKLAPPRSKLVRDPRSFGYRRLLPFLNEMTKNNSSIGKEVFLQDTAAHPTDELSRSDSRLADESIGVSHSEPDAMDPVEPAVVSTGGDTDGKATCGNVMEETKTAPHDLTNKPLLARCTRSRFVHHPSSFSYKRMLPFLMEDEIYAQESGRVKIRKVAEERQFAANKHDASANGQQCLAVSDDSSQEGNRAQFKIVEEEKPLKADVNHILDDRQLKPPVIEASPDCSATEVQNVMQQEALASSQVPLTSFDGELTSDGDNVQSIGQHQLVVSEESQEECKRDEVNRSIHDEAVQSDGGYALDSREFQPAASEVSCSENSMAGVQGAAQEEPLPLDGVQENSDMGDDVSTEQAQLCVTSESLSAQLQNNAEFAEVLPCQDLDSGCHDIGFGSPTKRVVPSLHRHCAQQPQDSVVSHDDQLLDDDIQMVGRLSDPCAADRSSSMEEMSGRILFTQSASSKAAISWPSGAHSMEKRARSPKELSPKKGILKRSTRGCKGICMCLDCCTFRLHADRAFEFSRKQMREADDIISNLLKEVDSLRSLLEKHAGQAARRQACRVQEVARNRCQQMFADLNSHCRIPGPRVRFAEYVEEKAASSPRRSSRR

SEQ ID NO: 9178 - protein, 295 aa, Zea mays
  VARIANT 264..295: note = Derived polymorphism lacks residues 264 to 295
  VARIANT 252: note = Ancestral polymorphism is R, Derived polymorphism is P
  VARIANT 248..295: note = Derived polymorphism lacks residues 248 to 295
  VARIANT 231: note = Ancestral polymorphism is D, Derived polymorphism is Y
  VARIANT 147..295: note = Derived polymorphism lacks residues 147 to 295
  VARIANT 131: note = Ancestral polymorphism is P, Derived polymorphism is H
  VARIANT 127: note = Ancestral polymorphism is K, Derived polymorphism is E
  VARIANT 58..295: note = Derived polymorphism lacks residues 58 to 295
  VARIANT 7: note = Ancestral polymorphism is S, Derived polymorphism is F
MFLFALSFSNLSSSLSTNVGHGYLHFLFGALSGCLKRVTVVKICIFPFEVLPEGALEQPVLSDEAMMSRLVGALITFKPLYSVLKLASREVIIRDVDYLNPFHAYDKGNLSWLAAAEAKPATMSIAKRAIPEATSIEEANQIVRGNWLNVIEEHHLKYLGSSQVNDILDIGCSVGVSTRYLVEKFPSAQAVGLDLSPYFLAVEAQKEEKLSRPKPIRWVHANGEATGLSSDSFDLVSLAYVCHECPARAITRLVKEAFRVLRPGGTIALTDNSVGVSFVSLFIEYKCANLFKNRL

SEQ ID NO: 9179 - protein, 145 aa, Zea mays
  VARIANT 44: note = Ancestral polymorphism is R, Derived polymorphism is W
  VARIANT 56: note = Ancestral polymorphism is D, Derived polymorphism is G
  VARIANT 57: note = Ancestral polymorphism is G, Derived polymorphism is D
  VARIANT 60: note = Ancestral polymorphism is G, Derived polymorphism is D
  VARIANT 63: note = Ancestral polymorphism is F, Derived polymorphism is S
  VARIANT 86: note = Ancestral polymorphism is R, Derived polymorphism is C
  VARIANT 94: note = Ancestral polymorphism is R, Derived polymorphism is H
  VARIANT 96: note = Ancestral polymorphism is D, Derived polymorphism is N
  VARIANT 100: note = Ancestral polymorphism is R, Derived polymorphism is W
  VARIANT 104: note = Ancestral polymorphism is S, Derived polymorphism is F
MRDLARRLGPLMLLRLGELRVVVASSADAAREVMRTHDLAFATRPLSPTAMALLGDGSLGLVFAPYGDGWRQLRRLCTAELLSARRVRSFRVVRENEVRRLLRSVAAKASPVRQQKQQALVDRSSSRRLSHLLLAPTVRVPLQGE

SEQ ID NO: 9180 - protein, 307 aa, Zea mays
  VARIANT 174: note = Ancestral polymorphism is G, Derived polymorphism is C
  VARIANT 165: note = Ancestral polymorphism is G, Derived polymorphism is D
MGMALPLPPASQGLLRSRRMSFLASPPLSLKAAGGISIPCPWRLDGRRPRAAPASVPRLASVRSVVLDIEGTTSPISFVTDVLFPYARDNVRTHLDATYSTRETKDDIALLRAQVEQDLAEGVPGAVPVPPDGAGKDRVVDALVANVEAMIAADRKITSLKQLQGHIWRTGFECQEIKGVVFDDVPPALERWHASGIKTYIYSSGSREAQRLIFGNTTYGDLRRHLCGFFDATIGTKRDARSYYEIWQTVGVDRPSQILFLTDVCQEATAAQAAGLEVLISIRPGNAPLPAENHGFGTVESFAEILT

SEQ ID NO: 9181 - protein, 335 aa, Zea mays
  VARIANT 217: note = Ancestral polymorphism is A, Derived polymorphism is V
  VARIANT 214: note = Ancestral polymorphism is G, Derived polymorphism is C
  VARIANT 207: note = Ancestral polymorphism is A, Derived polymorphism is T
  VARIANT 206: note = Ancestral polymorphism is G, Derived polymorphism is R
  VARIANT 187: note = Ancestral polymorphism is G, Derived polymorphism is V
  VARIANT 179..335: note = Derived polymorphism lacks residues 179 to 335
  VARIANT 176: note = Ancestral polymorphism is K, Derived polymorphism is R
  VARIANT 175: note = Ancestral polymorphism is P, Derived polymorphism is L
  VARIANT 133: note = Ancestral polymorphism is L, Derived polymorphism is V
MAASPACAPGLISGPTLPPLPVAFRCYWAQKPSSASTSSRRPCRRRFVPVAAASTRTSSAAARGLDADDFRHPLDKQNTLLLRAIPGLNDVGKALLGPVSEQVMVLQNIGTSVLVSPNQLPDLHQLLVEAAKLLNTEAPDLYIRQNPVPNAYTLAINGKKPFIVVHTSLVELLTPRELQAVLAHELGHLKCDHGVWLTFANILTMGAYTVPGFGMVAGFLEEQLYRWLRAAELTCDRAALLVVQDPKVVISVLMKLAGGCPSLADKLNVDAFLEQARSYDKAASNPVGWYIRNAQTRELSHPLPVMRAREIDEWSRSQEYKTVMQKMFQMGLNRV

SEQ ID NO: 9182 - protein, 268 aa, Zea mays
  VARIANT 97: note = Ancestral polymorphism is R, Derived polymorphism is C
  VARIANT 100: note = Ancestral polymorphism is R, Derived polymorphism is H
MRPAAPPCQLSQPKLRRVPQSPPPSPMTPRAPQLRHHPPHLLLAEAVASWHPFHKKPCRSDRSTAPPSSARLPDAETPTPAPSGGASGGSFRWFGLRKRRRRGAGSRSVSGRSSDRRRSGTCSDFHFTCGGGGGGGGGGGGATDSSGEMWASDVGEVRMRDVSMATEFGPAPVSGVGVGGGGVGAAAEAAATDSGYGSEPGYRGDVELGYGDEMDEEDEDGRQQLFWDGVIGDMTKMKIDGDNNFGEQKSHHRCRRKKHDARVLDSLS

SEQ ID NO: 9183 - protein, 413 aa, Zea mays
  VARIANT 58: note = Ancestral polymorphism is L, Derived polymorphism is H
  VARIANT 233: note = Ancestral polymorphism is P, Derived polymorphism is S
MAASNAGPEAAATAAGHRFNFDVIVVGAGIMGSCTAHAAASRGARVLLLERFDLLHHLGSSHGESRTIRDAYPKAQYPPMVRLARRLWAEAEAESGYSVLTPAPQLSLGPRSNASLLAAVRSAGAEEADLTRRWGGAFRVPDGWVAAVSERGGGVLNATKAVAMFQALAVRKGVVVRDKTEVLGVRKALEEGGVVVTTSTGAEFRGAKCVVTVGAWASKMVRSIAGLELPIQPLHTMVLYWRIKPGHERELAAESGFPTFSSYGDPHVYSTPSLELPGLIKINYDGGPPCDPDARDWADGGGGVAERVARWIEEFLPDHVDTAGGPVSRLSCMYSMTPDKDFVIDFLGGEFGKDVVVGAGFSGHGFKMAPAVGRILAEMAMYGKESTATEAGVELGHFRINRFEGNPLGNAAN

SEQ ID NO: 9184 - protein, 112 aa, Zea mays
  VARIANT 32..112: note = Derived polymorphism lacks residues 32 to 112
  VARIANT 13: note = Ancestral polymorphism is M, Derived polymorphism is I
  VARIANT 2: note = Ancestral polymorphism is A, Derived polymorphism is E
MAWWTSGMALGTMAWQPGGRGGLDLASRASRSDSGASPASGRYAVPRIPCARSARSRRRGFSHAHSAARAAHHATTTARTAHSGSSCCTFHGEEGSPSNPSGTLVAMTRALG

SEQ ID NO: 9185 - protein, 302 aa, Zea mays
  VARIANT 14: note = Ancestral polymorphism is S, Derived polymorphism is C
  VARIANT 25: note = Ancestral polymorphism is G, Derived polymorphism is D
  VARIANT 35: note = Ancestral polymorphism is E, Derived polymorphism is D
  VARIANT 67: note = Ancestral polymorphism is V, Derived polymorphism is M
  VARIANT 109: note = Ancestral polymorphism is A, Derived polymorphism is V
  VARIANT 149: note = Ancestral polymorphism is S, Derived polymorphism is C
MLPAFASCCADLVSTWERLVVAADGEPCEVDIWPDMQRLTGDVISRVAFGSSYLEGRRIFELQEEQVHLAMLVAGKIHIPGYMMLPTRVNRRMKRIAAEIEGILRRMIATRESSLRAGKATSDDLLGLLLESNMEQLRGEGGGGGGGTSSGGMSTDDIIGEEEVLRVFGGASCRVLDYDGLSRLKIVTMVLYEVLRLYTPLPALHRRTYKPMELGGVRPERFAEGVARASSAGDAPPSFFPFGWGPRTCVGQTFALLEAKIGLAMILGSFTFELSPSYSHAPFPVVLLKPEHGAQVKLRKLP

SEQ ID NO: 9186 - protein, 290 aa, Zea mays
  VARIANT 59..290: note = Derived polymorphism lacks residues 59 to 290
  VARIANT 46..290: note = Derived polymorphism lacks residues 46 to 290
  VARIANT 40: note = Ancestral polymorphism is T, Derived polymorphism is I
  VARIANT 35..290: note = Derived polymorphism lacks residues 35 to 290
  VARIANT 27: note = Ancestral polymorphism is T, Derived polymorphism is I
  VARIANT 9..290: note = Derived polymorphism lacks residues 9 to 290
  VARIANT 1: note = Ancestral polymorphism is M, Derived polymorphism is I
MCYIYIILSKFLPLFDLCSFKAIWDKTMEMRFLLQKAFSTSNKLPQESIRTRFCNHDKQIEQAYDDLLNSTKHTLSSMMELQEALLESNQATKDANEIPSASNGDNDEWSEVQRLQARITTFRNTEIDKWHRKIQVTTGAAALKGKLHAFNQNISDQVAGYMRDPSRMINRMYLTNSAVRVFGKDVGEPGTAEEGHIMEGDPELIDDSEFYQQLLKEFLESCDRGASKSAFYSLKKQQVKKRKLVDRRASKSRKIRYHVHEKITNFMAPEPMVLPPMAPKLFENLFGNSS

SEQ ID NO: 9187 - protein, 718 aa, Zea mays
  VARIANT 83: note = Ancestral polymorphism is D, Derived polymorphism is V
MPQVKSSYDGAGGDYIKWMCGAGGRPGGAMASLHRGVGSLVRDISDPCLNPSPVKVAIDPYSKLVLLFSSSTIYYGLLDRITDHLQHLLRHKIPRRGNRMLKPERWHACFDSDGKAICFRKALKFIVLGGVDPSIRAEVWEFLIGCYTLSTTAEYRGKLRAARREKYRYLIKQCQSMHTSIGTGELAYAVGSKLMDVRTLPKETEGGEVSTSQQAEHEVPCSLAENSNLIYGSGCTTRPHKRKICSKSAETVGFNQHNDNSRGSGDCDVIGEPRYDSDAFIDFPSLTGTNLVANGDGDSNGVEENPCNFLVSEHRVRPHDEHMHSFQINNNIDLIIESNTFSNDIFRPSSSDSAIFHSDAYKHDRWLDDTGYSEEIIDSLRISDAPESDLVDGMKSNGSIADKDRVSEWLWTLHRIVVDVVRTDSHLDFYGESRNMARMSDILAVYAWVDPSTGYCQGMSDLLSPFVVIYEDDADAFWCFEMLLRRMRENFQMEGPTGVMKQLQALWKIMELTDAELFEHFSAIGAESLHFAFRMLLVLFRRELSFEESLIMWEMMWAADFDEEAVRHLEENCLEPLLVDLSNGLSSEVKEVHRINSSTRRKPRTRKCHSRNGEICGACHPGMKSSTRNHLCGLSGATIWARPQQMPHPSASVLAKGGDYELPIFCVAAILIINRQKIIRGTHSIDDAIKASSSGNLYILYLKTTDEAVELKKRNQVH

SEQ ID NO: 9188 - protein, 328 aa, Zea mays
  VARIANT 83: note = Ancestral polymorphism is A, Derived polymorphism is D
  VARIANT 113..328: note = Derived polymorphism lacks residues 113 to 328
  VARIANT 126..328: note = Derived polymorphism lacks residues 126 to 328
  VARIANT 137: note = Ancestral polymorphism is P, Derived polymorphism is L
  VARIANT 152: note = Ancestral polymorphism is P, Derived polymorphism is L
MAAVEGTKKKSTNRTEPLFDGADDAMAIFLALRSPELEVLGLTTTFGNVHTALATRNALHLLEAVGRTDIPVAEGSHVTIKKATKLRIASFVHGSDGLGNQDFPPPATKPVDQSAAAFLVEQANLYPGQVSVVALGPLTNLALAVELDPAFPEKIGQIIILGGAYSVNGNVNPAAEANIFGDPDAADIVFTCGADILAVGLNVTHQVVLTDADREKLEQCDSKYARYLCKLMGVYFDYHRDGYFIKGAYLHDPTTVIAAVNPSLLTYTEGVVRVQTVGITKGLTVFDNTKKRYGEITAWSGMPTVKVAVTVDAPAVVELIVQRLMTDD

SEQ ID NO: 9189 - protein, 226 aa, Zea mays
  VARIANT 162: note = Ancestral polymorphism is G, Derived polymorphism is R
  VARIANT 19: note = Ancestral polymorphism is L, Derived polymorphism is V
MGSRLGRRVIHFANLPLKVMLPPAPLSSVQEFAVRTVPSASKVDIRRCLESMYGFSVAEVRTLNMEGKKLRRGPFLSAKPDYKKAYVTLRAPLAVSRDLFPIGAILAERERKASAAAARRKAVEGAEVEGESKGKHWMEDEREGFSRAGCGKVVYGNPGRLGRKRRGGDKVKEQAGDEAAKFPWSGMRLATEKPRRVRRSPSKKGIVLKQKSRKVSLQHRSKKLKA

SEQ ID NO: 9190 - protein, 470 aa, Zea mays
  VARIANT 101..470: note = Derived polymorphism lacks residues 101 to 470
  VARIANT 39: note = Ancestral polymorphism is Y, Derived polymorphism is H
MDEYGRLALTVAVVAAVTTSGAAAWGWQQQPQPLAPCMYVFGDSLVDNGNNNNILSLARANYRPYGIDFYEGPPGRFTNGRTMVDFISDMLRLRPPLLPPYATARPEDLPRGVNFASGASGILPDTGNNLGGHYPFSEQVDHFRAAVSDMGNRSEFRGNATKLADHLGRCIFYVGMGSNDYLNNYFMPDYYDTARRYSPRDYAALLLQGYSTQLTQLHGLGARKFVIAGVGLIGCIPYELARMNDDDSRPSGPNNNQSAASQEDIAISIGIGGGGGGGGVGVGGGGGGGDDWRSPSMPPPYADGGSGNGSGNGNADGGNGNGNSSGSRTGTGTTNPAPAGGGSCNETINSAIDIYNRGLLAMVKRLNNRGGLRGAKLVFLDTVQSGKDLMANAAAHGFAVLDRGCCGVGRNNGQITCLPLQRPCDDRGKYMFWDAFHPTEAAHRIYAAKAFGSNSTAEVYPINISQLAAI

SEQ ID NO: 9191 - protein, 231 aa, Zea mays
  VARIANT 42..231: note = Derived polymorphism lacks residues 42 to 231
MAGAEVGEDKYRSFIHGEGERDTVWRYGAPPNYDVVNKLFEEERTQVWPEGSLEEKVQRLLKSWEMELVHKARPEDQKTVNSEKYSASTNGMSALTRAEVMAIGGYNNFLRTKLPPEHRIYDPDSETVESAMATFTTAFPRGFAIEVLDVYSGPPRIAFKFRHWGYMEGPFKGHPPHGQRVELFGVCIFHVDEDMKVDKSEYFYERGNFLAGFLSAPAPDGSGGCPVMRGN

SEQ ID NO: 9192 - protein, 78 aa, Zea mays
  VARIANT 11: note = Ancestral polymorphism is C, Derived polymorphism is F
  VARIANT 21: note = Ancestral polymorphism is L, Derived polymorphism is M
  VARIANT 27: note = Ancestral polymorphism is D, Derived polymorphism is V
MAASKFYVASCALLLIGVVLLGQQGIDGAVACPQFCLDVDYVTCPSSGSEKLPARCNCCMTPKGCTLHLSDGTQQTCS

SEQ ID NO: 9193 - protein, 213 aa, Zea mays
  VARIANT 20: note = Ancestral polymorphism is D, Derived polymorphism is N
MAAPRLAAASCHALRGVLHDKLRAVELQLRACRRSLAGASGSSSTTAAAVAALVCAAAAFPRAAAFFLPLVASTSLCCTAACLFAAVERSAAKEAVEAVVVDGEGKAEAGLLQVIGEANTSAYGDRLGSVQVGCFIRRSARRGVDEDGEEVVFAGTLAPCTAGFVGAGHAQRRGAALEEELTAMRVDRLAEGVWNSYFGGWSRWHHIDTACSL

SEQ ID NO: 9194 - protein, 286 aa, Zea mays
  VARIANT 7: note = Ancestral polymorphism is L, Derived polymorphism is R
  VARIANT 14: note = Ancestral polymorphism is F, Derived polymorphism is L
  VARIANT 21: note = Ancestral polymorphism is A, Derived polymorphism is V
  VARIANT 107: note = Ancestral polymorphism is M, Derived polymorphism is I
  VARIANT 221: note = Ancestral polymorphism is W, Derived polymorphism is C
MAKLHLLALCAFFFLLGGSVAAAQWTPAFATFYGGSDASGTMGNCTFRFITSLLLCYSHRPGFALKRTMLTKLKWSGGACGYGNLYDAGYGTRSTALSTALFNNGAMCGACFAIACDAGRSQWCKPGAASVTVTATNLCPPNWALPGDAGGWCNPPRRHFDMSQPAWEAIAVYRAGIVPVNYRRVPCRRAGGVRFTVQGRSYFELVTVANVGGSGVVAQAWVKGSATGWMAMSRNWGANWQSNAYLNGQGLSFRLRADDGRVVTAYNVAPAGWWFGATYTSNVQFY

SEQ ID NO: 9195 - protein, 605 aa, Zea mays
  VARIANT 514: note = Ancestral polymorphism is Q, Derived polymorphism is L
  VARIANT 229: note = Ancestral polymorphism is Y, Derived polymorphism is C
  VARIANT 175: note = Ancestral polymorphism is W, Derived polymorphism is C
  VARIANT 45..605: note = Derived polymorphism lacks residues 45 to 605
MSKTMLPIAAALFSFYAAVALLGGSAGGQAAVVEHTFVVKQVYIRHLCNDTLATVVNGQFPGPPVEATEGDTVIVHLVNESPFEITIHWHGVKQRLTCWADGAGMVTQCPIQPNSTFTYRFKVDGQEGTLWWHSHVSILRATLHGIIIIRPKSGSYPFQNHQPHVDVPIIIGEWWQRDLMKVDKNFSNGGSFSDNPAGATINGKLGDLYNCSGVVEDNFVLNVEQGKTYMLRLVNAALFSEYYFKVAGHKFTVVGADANYITPYTTDVVAIAPGETFDVLMVADAPPCRYYMAALANQPPAPDPQIPVFVSRGIVQYANDDTTGAAASGCRDGRPPPMPEMPDQHDTTTTFHFHGNLSGLPTHPLLPQLRGRVDDRLFISLGKGTICPGDRPSCRRGGGDEAEAIEVAYMNNVSFRLPERMSMLEARQYGGNAGLAVQELPARPPSVFNFTDPALIPVGPGVPLEKIEATRKATTVRRFAHNATVEVVFQSTATMQSDSNPMHLHGHDFFVLAQGHGNYDPAKHVRTYNLVDPLLKNTVQVPRLGWAVVRFVADNPGAWFMHCHFEFHIAMGMATVFEVANGATPDDTLPPPPPDLPKCIPHKKE

SEQ ID NO: 9196 - protein, 252 aa, Zea mays
  VARIANT 186: note = Ancestral polymorphism is A, Derived polymorphism is V
  VARIANT 15: note = Ancestral polymorphism is S, Derived polymorphism is A
  VARIANT 14: note = Ancestral polymorphism is T, Derived polymorphism is A
MEKALLLLLLSLCASLSLLDGAVAQQYWTPATATFYGGSDASGTMGGSCGYGDLYSAGYGTQTTALSTALYGDGASCGACYLVTCDASRTQYCKPGSPSVAVTATNFCPPNYGDADGWCNSPRQHFDMSQPAWETIGLYQAGIIPVNYRRVPCQRSGGIRFGISGHDYFELVTITNVGGAGAVAAAWVMGTGTDWLTMSRNWGENWQSGAYLTGKALSFKVQTDDGKVVVAYNVAPANWQFGSTYQASVNFY

SEQ ID NO: 9197 - protein, 154 aa, Zea mays
  VARIANT 5: note = Ancestral polymorphism is S, Derived polymorphism is L
  VARIANT 16..154: note = Derived polymorphism lacks residues 16 to 154
  VARIANT 39: note = Ancestral polymorphism is G, Derived polymorphism is R
  VARIANT 86: note = Ancestral polymorphism is E, Derived polymorphism is K
  VARIANT 125: note = Ancestral polymorphism is S, Derived polymorphism is F
MREASMFFCGDPSTPQWVDQHHQHVEIHRDANGSTLLKGFRKPSPNNNLLECTQHAYDICTVDQGSLLKQLANKSISGGVAAVLAERDKEEMEMDIAKLEVGSMETSVICRSDGPLILAYLRKVSVSKAQAIIVLTSDENADQVSIFVLHTSPE

SEQ ID NO: 9198 - protein, 243 aa, Zea mays
  VARIANT 8: note = Ancestral polymorphism is R, Derived polymorphism is P
  VARIANT 34: note = Ancestral polymorphism is L, Derived polymorphism is P
  VARIANT 70: note = Ancestral polymorphism is L, Derived polymorphism is M
  VARIANT 97: note = Ancestral polymorphism is S, Derived polymorphism is L
  VARIANT 195..243: note = Derived polymorphism lacks residues 195 to 243
MEKNPTARIDVLKLDLSSLKSVRAFVDQFNSIKLPLNILINNAGVMFCPFQLSKDGVEMQFATNHLGHFLLTNLLLDTMKATAKSTGIEGRIVNLSSVAHHHTYPKGIDFDNLNDEKIYNDKMAYGQSKLANLLHAKELSRRLKGAATTCYVGLSPQLKGVTGKYFAGCNVEKTSKLARSERQSSDYHCPQLHQQTRHNHSRHHSPEDFEVALFHSRGCRGAVRTHQAVEEIEVAEVLFGLTR

SEQ ID NO: 9199 - protein, 220 aa, Zea mays
  VARIANT 17: note = Ancestral polymorphism is H, Derived polymorphism is Y
  VARIANT 32: note = Ancestral polymorphism is L, Derived polymorphism is H
MPLIIPAADELRIICAHGSFIYTYVLNAFCSLILLQKIVIKADLIGEKCKSEILAIVSKNQGIKSMTIDAEKCTLTVVGTVDPVRVVQRLKKKCFEATIVSVEDDKPAKKDPCKEACEKLCKERCDKVTCCKECKERCEKECKEKCEKECKAWLCKRRCCSSSSCRPSSSACGGCSYDQCAAVPSSHPYYSYYNHGSAGGYPPYYGCYEERSHDGACTIQ

SEQ ID NO: 9200 - protein, 74 aa, Zea mays
  VARIANT 48: note = Ancestral polymorphism is L, Derived polymorphism is I
  VARIANT 40: note = Ancestral polymorphism is I, Derived polymorphism is T
  VARIANT 34: note = Ancestral polymorphism is V, Derived polymorphism is M
  VARIANT 9: note = Ancestral polymorphism is L, Derived polymorphism is P
MHQCYNESPPRCPEIWDALRVAAESDLALAQTIVDSAGIIVSNPDMTLCYDERDSKYELPKYVLSEPANLIRDG

SEQ ID NO: 9201 - protein, 399 aa, Zea mays
  VARIANT 387: note = Ancestral polymorphism is V, Derived polymorphism is D
  VARIANT 380: note = Ancestral polymorphism is I, Derived polymorphism is T
  VARIANT 324: note = Ancestral polymorphism is G, Derived polymorphism is R
MADHDPRAAAASSSAGGDEDDEGTDTDVSDSNLGNPQGQDPLPFPDAAWVPPHPLAPAHEPAGALPPPLPQGPSAGASATTDDSRRLFQRLWTDEEELLILRGFLDFTARRGTTFASHQYDTGPFYEEIRRRLSFEFTKSQLIEKLRRLKKKYRVCAARVAAQGDAFAFRSVHEGAIYDVARHIWRPAFRRGEGGGAADASDEDDINPVAAAAMEDGGGGSASTPVPTARGRGGRCVRRRTAQELEAPALPATSALLLSDAAEDRHVVAVENLAPPPPLQVPTVSLTGATPSPMPVCTGGAAEEAIKSIMSPLLKEFINSVAVGGQSGFGLGLGTGFGGIGGFDILGLGTGVPGPNPGMPSDDKWRQQQILELEVYLKRIELVREQVTAALEDLRSSEG

SEQ ID NO: 9202 - protein, 910 aa, Zea mays
  VARIANT 241..910: note = Derived polymorphism lacks residues 241 to 910
MNDQTNEKCPLCLNKMDLTDKQLKPCKCGYEICLWCWHRIIDESGGRCPGCRSVYNKDKILETSARNQMHELCADKSNYQKEQVKSHKQTSAKVQLGQSEPKDPNSIRVIQRKLVYIVGMPTEFASEKLLRQKSFLGQYGKIENIIIDNVGANQQVPDSGRVYVTFAKEVEAIRCIQAVDGYSLDGRPLKATFGVTRYCHIWLSNKDCYKPNCSYVHYKAPAEEICTKDDVSVVCARSSFCAVAMAAAVSNRLVVAIARKADETGEGFEVEPWGQMIYEFMETIHINMLISPLFLSEVRLQHSMGMSTKCLQHRSGRTLPPPCDCSSRNTTASGISKDICINDDRLLPNGAIKYTSLPSVTTPRDSSLSSGSPPSPASIVLHQRNDHERLHNNQQNLSDLKPQRYIPPGGRNCSSEMTTSVKHMQPIEGAWLHSSSNEHLGSNNDKSQASSQLGNDNSNPKQITSAENGTSDTVQQKPQYADVVSQGQVAPVRRLTVLNRPSIASSDTRPKATGQVVNGTSTSFTKLTLVQKAQGSCITIPRNHPVPQIPEEPAHLFASASVKSHAGVEIMNECSDIKEKIVLGGYKQLPESTVSHRLTASQNMSSGTLPSNLSASYAKTQGSAGSHNLSDLNMKLVAKNRSQLVNQQNAPVSVSNTGIARASFCCSTLNKNASLSDGDSSHNRRWDTIRSGHIVSSHSSDSTMLSRPASAVSSTDVASLHRKERRQACPPGFEKPHLYSGSGKACSGHCSAPDALVQDCGIPDQQDFTSLTTDCLKDDGDVTQNLSMNISSPPSLTDTNRNWSQSHRQFPGTLFGWSNDPQYSFYPGGSSHPRQEAENWDGTSTSYMATATGGYKVFSQGTTSDMRGGMAGTLLQQPIMSTHDRWTDGSSDSGRNCPQVDISYRMYSLF

SEQ ID NO: 9203 - protein, 601 aa, Zea mays
  VARIANT 571: note = Ancestral polymorphism is N, Derived polymorphism is I
  VARIANT 35: note = Ancestral polymorphism is G, Derived polymorphism is R
MSLSSARQRRATAASPPTDDGYAKDAKDRRRRPGGDGDSEDEGIKWFLPFLALGLLRHMSASSNLIHDCDEVFNYWEPLHFLLYRSGFQTWEYSSDFALRSYLYLFFHALVAGPASLIFGEHKVRVFYSVRIFLGLISTITETVLVVALSRRYGKRLACYVLAMLCLSSGCFFASTSFLPSSFSMYAVTLSSALFLLEKYAGAVSVAAAGVILGWPFSILVFLPVTVYSLIRGSFRRVFLSGFVTSLCFLVLSFVADYYCYGRLTFSVFNLLKYNVIGGGESHLYGTEGFSFYFRNGFNNFNFAFILALLFLGVVPFARKKYAPDLLIVVSPVYIWLAFMSLQAHKEERFLYPIYSLICVAAAAVIDSLPDFFHDKYSSDQSIFEKIAKGLRPLILGFILCASHSRTFSMLNGYGAPLQIYQHLEHHDDTGPGSILCVGSEWHRYPSSFFIPSYISEVRWIDDGFRGLLPFPFNETLGGTTAAPSYFNNKNKAAEGQYLKDIGACNLLVELDLRRPYPSRGSDLSTWEALAALPFLDRELSPALYRSFFIPYRWQQNNVFGLYKLLRSLQIFTAIDFLIPMCNGVPIFVPLILPSYKFITR

SEQ ID NO: 9204 - protein, 298 aa, Zea mays
  VARIANT 166..298: note = Derived polymorphism lacks residues 166 to 298
MHAQVAVLLAAGAPPPPWPPHPSWHHRQIPCRRPFKPPHSLRDGGGGQPPPPVVVPASKRRAWPAVSAALFGAGFLLGPLLDGIHSRVGLQVYGNGALEAGALRTHVLVPPLLGAFYLTVGLLHLFLDERAPPKSRATGTARRTATSLLCVLDRYARSSSFFFVLCHALHCVLALFIETSAEMYRAGVASNVEAYVLFAGAEFAWLFLDGSWLGFAVACLVGTVCPLAEIPLIKLLGCWSYPNADVHLLGEQGLVSWTTTCYFVYTPFLANLARWLDSRLAINKDVADAEGGDEAARS

SEQ ID NO: 9205 - protein, 323 aa, Zea mays
  VARIANT 129: note = Ancestral polymorphism is D, Derived polymorphism is N
MATRNRTPLYRKYRDALRHVRAPPGAPSSSGGGGGGGGPVIEMASLLRSDRPYAPLSTDDPSASSRGAATVGLPPAWVDVSEEISANMQRARTKMAELAKAHAKALMPSFGDGRDDQRAIEVLTHEVTDLLKRSEKRLQKLSMKDSSEDSNVRKNVQRSLATDLQNLSMEFRKKQSSYLKQLRQQKEGQDGVDLEMNINGAKSTFEDDEFDDVGFTEVQMSKLKKSEAFTREREREIEQVVESVNELAQIMKDLSVLVIDQGTIIDRIDYNIQNVAASVEEGYKQLQKAERTQKKGGMVMCATVLVILIFIMIVLLILKEIIF

SEQ ID NO: 9206 - protein, 542 aa, Zea mays
  VARIANT 42: note = Ancestral polymorphism is P, Derived polymorphism is S
  VARIANT 129: note = Ancestral polymorphism is G, Derived polymorphism is C
MAMKSSSLCNPFVSLFFFLLRKLAGHRYHRGRMAVPTKPSPPPPPLPTLDMLHGQTLVVDVEAWILRPPVSAFPYFMLVAVEAGGFLRGLLLLLLYPLMLLLLGDGARAKAMATVALVGLEEKEVARVGRAVLPKFFLEATAAEGVAAVQAAARVVAVTATFPRVMVDGFLREYVGVDAVVGPEVRSVGGVLAGLMDDEDADEVAAKTLRAVFGDDLEAARKKGAVGLVGPASSGRVHYLLCPYYCKETFAVSETDTRGWRPLPRDKYPRPLVFHDGRLAFAPTPPAALAMYTFLPFGIVLVVFRIIAFSFLPYRVCFPVGALTGVHYRLVAGHEPTATRQGGGGRLYVCNHRTLLDPVIVAAALGKPVTAVTYSLSPVSELIAPIRTARLTRDREKDQRNMAAVLARGDLVVCPEGTTCREEYLLRLSPLFAELGVDVNPVALDTRVGMFYGTSTKPGRKWMDPFYFMMNPRPAYRVEFLPRAATAPVDNGGRGHSIDVANRVQRELGKALGFELTGLTRKDKYLTLAGNEGVVPTAPKNH

SEQ ID NO: 9207 - protein, 95 aa, Zea mays
  VARIANT 26: note = Ancestral polymorphism is E, Derived polymorphism is K
  VARIANT 56: note = Ancestral polymorphism is P, Derived polymorphism is L
  VARIANT 58: note = Ancestral polymorphism is R, Derived polymorphism is W
  VARIANT 61: note = Ancestral polymorphism is E, Derived polymorphism is K
  VARIANT 62: note = Ancestral polymorphism is A, Derived polymorphism is P
  VARIANT 67: note = Ancestral polymorphism is Y, Derived polymorphism is D
  VARIANT 69: note = Ancestral polymorphism is C, Derived polymorphism is Y
  VARIANT 74: note = Ancestral polymorphism is G, Derived polymorphism is S
MEPPHAVAAVAAGGEGGTASPGTGLEGPVLRRGLDGGGEGEDGELGAGQEADARIPERPSEADCGYYLCTGACGFRDRCRYNHPRDRGGTEVRAS

SEQ ID NO: 9208 - protein, 182 aa, Zea mays
  VARIANT 5: note = Ancestral polymorphism is R, Derived polymorphism is W
MAGAWALLIVLAAAVAVLAARPASAGGGAAAVAEICMKTPSPDLCTRTAGKHANKYKVVDAVTVLEMQVDAFKKRVKAARRLAKEEVKTAATPEARRALNLCKTYYLDAADNLGACKRAIGFRDAVTIRATMSMVAQDTQNCDEEFRKAVSKNPMEDHNRSLIEMSEICRTLSNMIPYEHVH

SEQ ID NO: 9209 - protein, 120 aa, Zea mays
  VARIANT 83: note = Ancestral polymorphism is L, Derived polymorphism is I
MSDRSSPAAPTFFLLARRPRRGTSPSRSNMVIHLKGFMVVSMGIIFYMNLSTLRARIDTAFKFGPDVDFVLTYTDEDGDIVMIDDDDDLRDAALRQKLNPLRITVQLKKNQPTAKKILLP

SEQ ID NO: 9210 - protein, 529 aa, Zea mays
  VARIANT 280: note = Ancestral polymorphism is A, Derived polymorphism is V
MSLRPSERVEVRRNRYKVAVDAEEGRRRREDNMVEIRKSRREESLLKRRREGLQAQVPAPPSGVEKKLESLPAMVSGVYSDDNNLQLEATTQFRKLLSIERSPPIEEVIKSGVVPRFVQLLTREDLPQLQFEAAWALTNIASGTSENTKVVIDHGAVPIFVKLLGSGSDDVREQAVWALGNVAGDSPKCRDLVLANGALMPLLAQLNEHAKLSMLRNATWTLSNFCRGKPQPSFDQTKPALPALARLIHSNDEEVLTDACWALSYLSDGTNDKIQAVIEAGVCPRLVELLLTCSHPSPSVLIPALRTVGNIVTGDDQQTQCIIDHQALPRLLNLLTQNHKKSIKKEACWTISNITAGNKDQIQAVISAGIIAPLLQLLQGAEFDIKKEAAWAISNATSGGSHEQIKYLVSEGCIVPLCDLLVCPDPRIVTVCLEGLENILKVGEHDKTMGATGDINVFAQMIDDAEGLEKIENLQSHDNNEIYEKAVKLLETYWMEEEDDAMATAGEAAPAVFDFSQGGNPPGGGLNLN

SEQ ID NO: 9211 - protein, 86 aa, Zea mays
  VARIANT 15: note = Ancestral polymorphism is L, Derived polymorphism is M
MDTSSPAALVNAKIMNMFVGQRVRTVVQVQHNDGGMLVGQSPDGHQLSIKSAMDVPVSHFMEVYGIAENSQTIRAEVCTDFGPDFG

SEQ ID NO: 9212 - protein, 231 aa, Zea mays
  VARIANT 217: note = Ancestral polymorphism is P, Derived polymorphism is A
  VARIANT 172: note = Ancestral polymorphism is A, Derived polymorphism is V
  VARIANT 133: note = Ancestral polymorphism is A, Derived polymorphism is V
MASVCSRPPFSFLAAACIACFICCFLIRLPAACCSSAGPRFFACSALKSSHIRHGSMLLITALVRTYVRNSCICRIADGGAAAAFHGQKTDAASIVGRALSCFNDRYIYSGCQGALRLGPEGALDVPPGSVDAFCGGPCLVETHLVLRCVDDGIVAGFRFYNGASAADVRLVLARGWCGRSGLRGDFDDVLQRLGGDGHLYGRGSDARVSSLAQAMPLLLSAAAAVVLVWT

SEQ ID NO: 9213 - protein, 1125 aa, Zea mays
  VARIANT 105..1125: note = Derived polymorphism lacks residues 105 to 1125
MSSLSRELVFLILQFLDEEKFKETVHKLEQESGFFFNMKYFEEKVHAGEWDEVERYLSGFTKVDDNRYSMKIFFEIRKQKYLEALDRHDRAKAVDILVKDLKVFSTFNEELYKEITQLLTLENFRENEQLSKYGDTKSARSIMLVELKKLIEANPLFREKLVFPTLKASRLRTLINQSLNWQHQLCKNPRPNPDIKTLFTDHTCSPPNGARASPVSVPLAAVPKAGAAYPPLTAHTPFQPPPGPSLAGWMANAAASSSVQSAVVAAASIPVPPNQAVSMLKRPALTDYQSAESEQLMKRLRPGGHGIDEATYPAPTPQPAWSVDDLPRTVACSLSHGSNVTSMDFHPTRHTLLLVGSANGEFTLYEIGLRETLLSKPFKIRDINACSPQFQNAVVKDSSISINQVTWSPDGEMIGVAFTKHLIHLHGYQPPNETRHLLEIEAHSGGVNDIAFSRPNKQLCVVTCGDDKLIKVWDMHGHKLFTFEGHEAPVYSICPHHKESIQFIFSTSLDGKIKAWLYDNMGSRVDYDAPGKWCTTMLYSADGTRLFSCGTSKEGDSYLVEWNESEGSIKRTYSGFRKRSAGVAGVVQFDTAQNHILAAGEDNHIKFWDVDNNNMLICTDAEGGLPALPRLRFNKEGNLLAVTTADNGFKILANADGLRTLRALGSRPPFEAFRPQYEASSMKVSGAPVVASISPNIGRMDHLDRNSPAKPSPILNGGDTASRSIDIKPRISEEKPDKAKPWELMEVLNPQQCHVATMPETPDQARKVVRLLYTNSGVGLLALGSNAIQRLWKWSRNEQNPSGKATASVVPHHWQPNSGLVMTNDTADTNPEEAVPCIALSKNDSYVMSACGGKVSLFNMMTFKVMTTFMPPPPASTFLAFHPQDNNIIAIGMEDSTIHIYNVRVDEVKTRLKGHQRRITGLAFSTNLGILVSSGADAQLCVWTNDTWEKKRTVSIQMPAGKTPSGDTRVQFSSDQSHLLVVHETQLAIYDASKMERIYQWIPQDTLSASISHASYSCNSQLVFAAFTDGNLGVFDAENLRLRCRIAPSVINSNPPVHPLVVAAHPHEPNQFAVGLSDGSVKVLEPLESEGKWGAPAPADNGIIPNGKTPASSATSNPAADQIQR

SEQ ID NO: 9214 - protein, 194 aa, Zea mays
  VARIANT 64..194: note = Derived polymorphism lacks residues 64 to 194
MNGAGNGEPSLVVVAEEGPPNDGNGAGVHAPNFGANEADTLLVVATLITALTYQLGTNIPGGYWQDDLKGHDGLAGHVAGDPIMRDKHRRRYWLFMAASWVGFGTSMLLTVGLITGVPARSRFVRFAFLLAYSSLVLTFVTSQPRTSLFWDLIIWAVVMALLAIATKYLRLDRLPRWARTLCPAPPSAFCCSRS

SEQ ID NO: 9215 - protein, 128 aa, Zea mays
  VARIANT 64: note = Ancestral polymorphism is T, Derived polymorphism is I
  VARIANT 21: note = Ancestral polymorphism is L, Derived polymorphism is P
  VARIANT 1: note = Ancestral polymorphism is V, Derived polymorphism is M
MPYHQGGLSHLMWLLLVDSLLISRQSLLSFGVPIEVIQRADIVLEDIHSKKPTRRVISEKLPTTDKRSTKYAKKDDPLGLQHLALCHACYRPNDNTMEYGDGKNYLCRNRLNEYFDDAWVEQTWWADK

SEQ ID NO: 9216 - protein, 187 aa, Zea mays
  VARIANT 123: note = Ancestral polymorphism is D, Derived polymorphism is Y
  VARIANT 90: note = Ancestral polymorphism is P, Derived polymorphism is L
  VARIANT 59: note = Ancestral polymorphism is D, Derived polymorphism is V
MGSEKGGAKVIGGGGIFNLFDWKRKSRKKLFSNSPKGSKLVKRSEETLLSGRLHLGDDDEWIGVSSFKGSSDYSCASSVTDEEVREMKAPGVVARLMGLDAMPTSGVPEPYCTPFRDTRLFRYSHNLKRSPEYSMNDQFSHVPQRVDGYIRKPLDLQAPKMPSSPIERFQMEALPPRSAKHLPMSHQ

SEQ ID NO: 9217 - protein, 356 aa, Zea mays
  VARIANT 35: note = Ancestral polymorphism is V, Derived polymorphism is A
MAAAVEGVRHRTLEANGVRLHVAEAGPEEGSAPVVLLLHGFPDLWYGWRHQMSALAARGYRAVAPDLRGYGDSDSPPDASSYTTFHVVGDLVALISDLGQRQVFVVGHDWGATVAWQLCLLRPDLVRALVNLSVVYHPRRPEMSPLQAIRAACGEDHYMCRFQVNKWSTVLPFPLHTATAAPMGQAGSINGCIQEFGVAEAEFALYDIKWVFKKTFGMRKPAPLILPKDKSFFDSLDSDGTCPPWLSEEDISYYAEKFAKTGFTGGLNYYRCIDRSWELSAAWTGAPIKVPSKFIVGDLDITYNAPGVPDYIHKGGFKASVPNLEDVVVMEGVSHFINQEKPNEVSDHICEFFSKF

SEQ ID NO: 9218 - protein, 95 aa, Zea mays
  VARIANT 13: note = Ancestral polymorphism is A, Derived polymorphism is T
MALSLSGTSARFALASLVPRARAYAASAASGAMRRAAEGAAAGEAKEAGRAAAAAAEGSWVPDPVTGHYRPANWAAAVDPADLRAAHLARTYARA

SEQ ID NO: 9219 - protein, 579 aa, Zea mays
  VARIANT 173: note = Ancestral polymorphism is A, Derived polymorphism is D
  VARIANT 168: note = Ancestral polymorphism is A, Derived polymorphism is V
MSSPPPAVASPASEQAKSKKKKHKSKNDTVAADPPSLAEAEEKTDGYLIKPQSLVPSLDTSTWPLLLKNYDRLNVRTGHYTPLPSGHSPLKRPLAEHLRYGVINLDKPSNPSSHEVVAWIKRILRAEKTGHSGTLDPKVTGNLIVCIDRATRLVKSQQGAGKEYVCVARFHAAVPDTARVARALEALTGAVFQRPPLISAVKRQLRVRTIYESKLLEHDPERHLAVFWISCEAGTYVRTLCVHLGLLLGVGAHMQELRRVRSGILGEQDNMVTMHDVMDAMWSLDNYKDESYLRRVVMPLEVLLTSYKRLVVKDSAVNAICYGAKLMIPGLLRFENDIETGEEVVLMTTKGEAIAIGIAEMTTAVMATCDHGAVAKIKRVVMDRDTYPRKWGLGPVALKKKKLVAEGLLDKHGKPNEKTPAEWLRNVVLPTGGDVSIASIAAAPEPEKVKVEQDTAVTEEVKENKKKRRKDDEDNDADASIPAKKIKVEEAAEAVEGEKSEKKKKKGKGESRSAKAVEVKEEVDAADEKGSEKKKKKKSKEGSDADPESAQNGDDGTHAERSEKKKEKKKKNRDTEGTQ

SEQ ID NO: 9220 - protein, 240 aa, Zea mays
  VARIANT 223: note = Ancestral polymorphism is W, Derived polymorphism is G
  VARIANT 90: note = Ancestral polymorphism is D, Derived polymorphism is Y
  VARIANT 69: note = Ancestral polymorphism is A, Derived polymorphism is T
  VARIANT 39: note = Ancestral polymorphism is R, Derived polymorphism is H
  VARIANT 36: note = Ancestral polymorphism is A, Derived polymorphism is V
  VARIANT 26: note = Ancestral polymorphism is G, Derived polymorphism is D
MESSSKGMCTVERRGRVHLITMTGAGEHRLNPDLLAALRSAVAASAGAGALVLAAEGKFFSNGFDLAWARAAPPGLHGAMDGGLRALLADLLALRVPTVAAVTGHAAAAGCALALAHDAALMRASRGLLYMSEVDVGIKFVDFVAAVLRDKVPDAAARRDLVLRGDRVAAAEAVRRGLVDAAVDGGPEDVVAAAVAEAERLAARGWDGEAVAEIRKAAWPQLWAQVKDHGAGPAPARPRL

SEQ ID NO: 9221 - protein, 100 aa, Zea mays
  VARIANT 68: note = Ancestral polymorphism is F, Derived polymorphism is I
  VARIANT 62: note = Ancestral polymorphism is V, Derived polymorphism is I
  VARIANT 52: note = Ancestral polymorphism is G, Derived polymorphism is S
  VARIANT 51: note = Ancestral polymorphism is P, Derived polymorphism is R
  VARIANT 44..100: note = Derived polymorphism lacks residues 44 to 100
  VARIANT 42: note = Ancestral polymorphism is G, Derived polymorphism is S
MVNLPRGHGYIAFKKRADAEKALLYMDGHLHEGSQLHHMRNGLQIKGLNHPGVHLTHHLGVVLILHLFVTDQILLLSGVVAHLLARDHYLQLEGTRLNVT

SEQ ID NO: 9222 - protein, 78 aa, Zea mays
  VARIANT 11: note = Ancestral polymorphism is V, Derived polymorphism is L
  VARIANT 17: note = Ancestral polymorphism is A, Derived polymorphism is T
  VARIANT 19: note = Ancestral polymorphism is R, Derived polymorphism is W
  VARIANT 43: note = Ancestral polymorphism is E, Derived polymorphism is K
  VARIANT 48: note = Ancestral polymorphism is G, Derived polymorphism is S
  VARIANT 61: note = Ancestral polymorphism is D, Derived polymorphism is Y
  VARIANT 63: note = Ancestral polymorphism is S, Derived polymorphism is N
MRIVEKPDEFVDSVLSAQREAASLFGVNTLLIEKYITQPRHVEVEVFGDQHGNAIYLYERDCSLQRRHQKIIEEAPAV

SEQ ID NO: 9223 - protein, 138 aa, Zea mays
  VARIANT 119: note = Ancestral polymorphism is P, Derived polymorphism is S
  VARIANT 3: note = Ancestral polymorphism is R, Derived polymorphism is S
MARLLRAAAVLALLAVSTAALSAPAWAGGVSAGDLAHLGAAVVIRRGGGRACRGGTTVGECMEYLDVDAEGEADVAGMATGGSKRRVLQGGSGYIGYDALRRDNVPCSQRGASYYNCQPGAEANPYSRGCSAITQCRG

SEQ ID NO: 9224 - protein, 147 aa, Zea mays
  VARIANT 24: note = Ancestral polymorphism is T, Derived polymorphism is A
  VARIANT 54: note = Ancestral polymorphism is R, Derived polymorphism is W
  VARIANT 93..147: note = Derived polymorphism lacks residues 93 to 147
  VARIANT 114: note = Ancestral polymorphism is T, Derived polymorphism is S
MLPGVQTRKQFQIDEAWHYWRVTATLNRSLTTTPNRTNGTPGHGPWPCSQKKPRRRGGGSKRATSIKAATATRANATRMLSSTVSRHTFPMDGLAAWGMAVQRGLQLQAGKLKSDAWMRVLVLVIVVEVSPSLWVNCSSKALLFFFL

SEQ ID NO: 9225 - protein, 208 aa, Zea mays
  VARIANT 186..208: note = Derived polymorphism lacks residues 186 to 208
MGYEDGDVSLNGQVVPKKDTFPYLGSMLQKEGDIDEDVSHRIKAGWLKWRQAASVLCDPRVPQKLKGKFYRTAIRSAMLYGAECWPTKRRHVQQLSVAEMRMLRWICGHTRRDRVWNDDIRERVGVAPIEEKLMQHRLRWFGHIQQRPEEAPMHIGIIRRLENVKRGRGRPTLTWTEAVKRDLKEWNIDKELAMDRKGWKCAIHVSEP

SEQ ID NO: 9226 - protein, 230 aa, Zea mays
  VARIANT 20: note = Ancestral polymorphism is D, Derived polymorphism is N
  VARIANT 8: note = Ancestral polymorphism is R, Derived polymorphism is C
MEIEQAMRGSSDVRLRAKYDAAVYIVRRAYALYPASSGGDVDDDSTVLQTVKNCPMRTIYFEDPDAFPEIDCFTYETASTYGLPLESIRTGYKSGLEALLKEKPTKAILLGTRNGDPNAVGQQEFSPSSPDWPPFMRVNPILDWSYSDVWSFLLTCKVQYCSLYDQGYTSIGSVHNTVPNQLLRDGPGGSYRPAYTLSDGSLERAGRAKKTGKRDGSANGTKNNGNETKQ

SEQ ID NO: 9227 - protein, 226 aa, Zea mays
  VARIANT 79: note = Ancestral polymorphism is V, Derived polymorphism is A
MVKAKARVRYEPGPAFEEVKEEAMLDISPTDSTEFWLIQWPKDQIDVLDFHGKELSLKLHSDGNLGNLENSSGKSYEIASFAAQKPDATVFLPSGSETKAVGKISRRVSLVRYPKPEEFTKPSFGSLTPSIKKSAGSKKTMSRFTGVSKNPSSQGSALSLGQRSAEPTPKHKGKRKDESSLGHSNVSGKATEGSEARGAGSNTASEMPQSPPEKSKKRRKKDKIVE

SEQ ID NO: 9228 - protein, 528 aa, Zea mays
  VARIANT 333: note = Ancestral polymorphism is H, Derived polymorphism is Y
  VARIANT 34: note = Ancestral polymorphism is S, Derived polymorphism is C
MEMQAHHRIKRGDMEVQEQREDRLSRLPDDILHSILRGIPLKHAARTSALSRRWARTWLRALASSRVLDFTDRDFARGQAPARAAATVSRCLQLHAEYGAPLDVFRLAVTAPAPAPGSTGAFERDVVGWVVSAVARGAREVEVDLRPPPPPLAAKADAGDESAAFVELPGDLFVATNSLARLALGGFRLRAVPAGLAEGLRSLSLSHADVTDEAVRDIVSSCRALEVLSLQGCNLLRSVRIDGETLRSLEIVRCLGVRELRVNAPSLESFAFHGDNVYSTSDDDDDDLSSAVDLGSTPALRDAYLSHIGFDDAKNAYDEREYAYSNFLSCVAHARVLTLCSVGLLHLWAQLSYDPLVEIDMTSVQELQLLMSSLGEDDEGLHSFSSFFELYPLPLLGRLFVSLPSHTAEATTALPGEVVDDSKMMFYCYDDDFVLDQLSYIKLVNFRGTRFELQLLAFLLKRTPALEQLVLVTVGEEGGAPGDERVIQGWVSAIQKASPEAQLTVCQSSEDRSQNPVHTRFYHELLEE

SEQ ID NO: 9229 - protein, 1217 aa, Zea mays
  VARIANT 942..1217: note = Derived polymorphism lacks residues 942 to 1217
  VARIANT 916..1217: note = Derived polymorphism lacks residues 916 to 1217
MLTKFETKSNRVKGLAFHPRRPWILSSLHSGVVQMWDYRMGTLLNRFDEHDGPVRGVHFHATQPLFVSGGDDYKIKVWNYKTQRCLFTLHGHLDYIRTVQFHHECPWIVSASDDQTIRIWNWQSRTCVAVLTGHNHYVMCASFHPKEDLVVSASLDQTVRVWDIGALRKKSASPADDILRLTQMNTDLFGGIDAVVKYVLEGHDRGVNWASFHPTLPLIVSGADDRQVKIWRMNDTKAWEVDTLRGHMNNVSCVMFHAKQDIIVSNSEDKSIRVWDATKRTGIQTFRREHDRFWILAAHPEMNLLAAGHDSGMIVFKLERERPAFCVSGDTVFYVKDRFLKFFEYSTQKEVQLAPIRRPGSVSLNQSPRTLSYSPTENAVLICFDADGGSYELYIAPKDSAGKADYLQEAKKGAGGSAVFVARNRFAVLERSSNQVLVKNLKNEIMKKSPLPIATDAIYYAGTGNLLCKAEDRVAIFDLQQRLVLGELQTPAVKYIVWSSDMESVAFLSKHVVVIASKKLVHQCTLHETTRVKSGAWDENGVFIYTTLNHMKYCLPNGDSGIIKTLDVPIYITRVIGNNIFCLDRDGKNKLIAVDATEYIFKLALLRKRYDHVMSMIKNSQLCGQAVISYLQQKGFPEVALHFVKDEKTRFNLALESGNIQIAVASAKEIDDKDHWYRLGIEALRQGNVGIVEYAYQRTKSFERLAFLYLITGYLDKVGFMYKIAGQNNNLMGQFHNALYLGHVNKRVEILENAGQLPLAYVLAVTHGLTEIAERIAAELGEHVPLLPEGKSHSLLIPPAPLTACGDWPLLRVVRGIFEGGLDSTGRAELEEDDEASGADWGDEDLDIVDASEVVANGGDYFDAEGEPNEEEGEEGGWDLEDLELPPDTETPKSAGNARSPVFVTPTAGIPVSQIWTQKSSLAGEHAAAGNFDTAMRLLSRQLGIKNFAPLKPLFLDLHMGSHSYLRALAAAPVISVAVEKGWNESASPNVRGPPALIFSFSQMEDRLKAAYKATTEGRFPEALRQFLSILHTIPVIVVDSRREVDEVKELIEIVREYILGLKMELKRKELRDDVTRQQELAAYFTNCKLQRIHMRLVLSSAMALCFKQKNYATAAHFARMLLENSPQEAQARKARQVLQACQDKDDSHQLNYDFRNPFIVCGATYVPIYRGQKDISCPYCGSRFAPSIEGQLCTICELAIVGADASGLVCSPTQMK

SEQ ID NO: 9230 - protein, 836 aa, Zea mays
  VARIANT 579..836: note = Derived polymorphism lacks residues 579 to 836
MDGKSGNIVQSLPDTLSSLMGLNKYLAPRTSYIESVSHIIEELSPTKPKMKVMVHTAQNICSDDTDSDAEAAKVQEELVLLDGKLKQITLQRRQSLNNYLDLKGNIRVFCRVRPFHHEENYQSRTLYTLDESNIFLKVAETKIKQYKFDKVFNQCSTQGDVFAEVEPVIKSALDGYNVCIFAYGQTGSGKTYTMEGKPTDLGVIPRGIQALFDRTSESNRRFLFTFSMLEIYMGNLRDLLVPRGKAQGFKKVPSLSIKTDPDGGIEIENLVAVTVSSFHEVKRLYEVGTHFRSTASTMANSTSSRSHCLIRISLTSFDAPERKRARNKLWMIDLGGSERLVKTKATGKRLKEGKAINLSLSALADVIDALQTKKSHIPYRNSKLTQILKDSIGCESKTLMLVHIRPNEDDLCESICTLGFATRVRSIRLENEEPQEVKARKEHLLMELEKEISDLEQECEGIVRKIKKLKETMEHFKGHQPSAEANFDISHPSSEELKTVMPKNTKDSKNRRDVSSRLPRFMKPTASSQHRIDLNKQIPVSNKTKPPVPPKRRPSSVYAESVRLPVNAATWQSECSSECSISMTSDMNWIPSIQDGTECSQDTSEYETKQVIFSEHEKPPQSQVISFEESGEMQDKTKEMGIIDIDSWIHQQIIENTGICQCHTERTLDVIEVNEYETYNSNTASPVQKEFTNGSKPSLDEDSNLNLCPPTQNTEDSKETRAVNQFTKTELYTPPLKELCGSAKIKEHKNEKLGRHGSCRRSLQEELGNCKPEQPDKEPKADPNMQPEIEFHDNKHHIGKLTKFIQALRTAWIGALLGLGTMNLGLEQDFFKSLTL

SEQ ID NO: 9231 - protein, 317 aa, Zea mays
  VARIANT 147: note = Ancestral polymorphism is S, Derived polymorphism is L
MRRRGLPSFCHGVASTSTVQQLHGKELAAGSAAGADAASSSFVAVPPSVVGSCVAETEVSGTGGDGGSAVTLEQMILQLDLEEEAARKARRAATGEGTSAEEQGWCPRRMSCVDGGPADHVLRSARDALTQYPRFSLDGRDAMYRASFSGFYQGMGRDGDGANRPARASVCCAAGAGCAALACSVGGYEMDLERTLRLPATVAGESVVWCKPGVVAKLMGLEAVPVPLRGGLRRRKAGGHPVAACGGVGGGVRKQKPRRTGQDELALHREKLFMALHGYDLVGTGGRHAGGLRSGVAPDVVGAMDADGDVWESRLRR

SEQ ID NO: 9232 - protein, 308 aa, Zea mays
  VARIANT 281: note = Ancestral polymorphism is V, Derived polymorphism is L
MDGGGGGVGGGGVGAGVMVGGGVGPGGGVGGGGDVELVSKTLQFEHKLFYFDLKENPRGRYLKISEKTSATRSTIIVPVDGVAWFLDLFDYYIRTDERDAFSKELRLQTKVFYFDIGENKRGRFLKVSEASVNRNRSTIIVPAGSSGEEGWEAFRSVLLEINNEATRLYVLPNHPNQQHMEPPERLPGLSDDVGAGFIAGHGSQSASGPEVDVERLVDLPPQEEISGMGMSKVIRADQKRFFFDLGSNNRGHYLRISEVAGADRSSIILPLSGLKQFHEMVGHFVDIMKDRLEGMTGANVRTVEPSQR

SEQ ID NO: 9233 - protein, 398 aa, Zea mays
  VARIANT 51..398: note = Derived polymorphism lacks residues 51 to 398
  VARIANT 55..398: note = Derived polymorphism lacks residues 55 to 398
  VARIANT 57..398: note = Derived polymorphism lacks residues 57 to 398
  VARIANT 92: note = Ancestral polymorphism is Q, Derived polymorphism is R
  VARIANT 116..398: note = Derived polymorphism lacks residues 116 to 398
  VARIANT 125..398: note = Derived polymorphism lacks residues 125 to 398
  VARIANT 190..398: note = Derived polymorphism lacks residues 190 to 398
  VARIANT 229..398: note = Derived polymorphism lacks residues 229 to 398
  VARIANT 333: note = Ancestral polymorphism is G, Derived polymorphism is S
  VARIANT 379: note = Ancestral polymorphism is P, Derived polymorphism is S
MEMKLNRKPLGRNPLSDVPYRNPGKLRGLVDATSRRRVNILCVQETKWKGQRVKEVENTSLLWYSGTVVDKNGLGILIDKSLKDKVVDVKRQGDMIILVKLVWGCSLEHYKCICPQVGLRESEKKQYPTNEKLFIGGDLNGHVGSTNVGYELARGGFGDKQAKFARTKWWKLKEDISKVFKERVFVEGTWSEEEDAKNMWVKMATCIKKVASEVFGVTKGSKGEPKDTWRWTEDVQKAIKEKKECYRSLFHDRSTINIETYKVAKKTAKRVEGKNDVYKMVRIRERNTRYLNQVKCIKDEMDQLLVKGQDIKQRWQRIQELEVKEALKRMKGGKAMGPDGIPIEVWRCLGDTAIVWLTKLFNHIFQSNKMLDEWSTLVPIFKYKGDIKVVPTIKGLSS

SEQ ID NO: 9234 - protein, 194 aa, Zea mays
  VARIANT 91: note = Ancestral polymorphism is A, Derived polymorphism is D
MTAAAAPAVASRVWEWEGKVASAVAEATADEAWALLSDFLAFHRWHPRVAACRLASGTPRAPGCVRYCEGTTAGGEPAPDWAHETLLEHDAERRFFRYEMNDNNMGFGLFFATFRVVPAAAAAGGCELRWEFECEPVRGTPRDALVARLQAGLDGMAARVRDHVLAARAAPAVVPAGAAGELVVVKLDSSIAAV

SEQ ID NO: 9235 - protein, 413 aa, Zea mays
  VARIANT 30: note = Ancestral polymorphism is Y, Derived polymorphism is N
  VARIANT 70: note = Ancestral polymorphism is W, Derived polymorphism is S
MATHRHWLLLLFLPWALLSRRGAQPPDALYPVVLLPGNTCSQLEARLTDAYEPPPESPQCGAGSNERGRWFRLWRNATAMDDPAVAPCLADQLRVVYDPAARDFRNEPGVETRVLGFGSTADFLADTEANKDLCMGRLVEALQQAGYRDGETLFGAPYDFRQAPAARGQPCRAFARFTRRLRALVERASRENGGRPVVIVSHSQGGYFALEFLNRSPLPWRRRYVKHYVMASTGAGGFLLPLRNLASVPRDALEAPDALVALPSPAVFGPGTPPLVVTRARNYTARDIPEFLAAIGVPPLGVTLYETRALPLQLGFRAPVVPTTCINGVGQPTMEQLVYWDGNFSETPQVVYGDGDGFLPVASIVALDTVIGGDPRQEYYKSIKLAGTSHAGVVSDAAALKRVVDEILWSPPI

SEQ ID NO: 9236 - protein, 400 aa, Zea mays
  VARIANT 125: note = Ancestral polymorphism is R, Derived polymorphism is K
MERGGGGGDEMMMTSGATGRIVPVFRSVLSRRALLRVAVALHSLFLWLLLLARGLRRHRAGTGADASASEAGAGAGTWSARRWRLRLQAAEEEDVRRRRALAEEVPMEEDRGTRWATFLVTGARRNALFCRLWAPAVDEMRGILVIIHGLNEHSGRYVHFAEQLTACGFGVYAMDWIGHGGSDGLHGYVPSLDYVIEDIEVLVDRILMENPGVPCFLLGHSTGGAVVLKASLYPHIREKLEGIVLTSPALRVKPAHPIVGAVAPIFSLVAPRFQFKGANKRGIPVSRDPAALLAKYSDPLVYTGPIRVRTGHEILRISSHLLHRLEKVTVPFLVLHGTADRVTDPLASRELYGAAASAHKDLRLYDGFLHDLLFEPERDEVGAEIVAWMDGMLRLRRQAG

SEQ ID NO: 9237 - protein, 458 aa, Zea mays
  VARIANT 76: note = Ancestral polymorphism is L, Derived polymorphism is P
  VARIANT 87: note = Ancestral polymorphism is N, Derived polymorphism is D
  VARIANT 89..458: note = Derived polymorphism lacks residues 89 to 458
  VARIANT 301..458: note = Derived polymorphism lacks residues 301 to 458
MADSSRPSVNIICAGRLLGCSGLGRRLGGTCTQGSSSDVVAVRRASAVACPAPPRMPARSVSRSTHTEWPVFKVVLILSSWLNETINVWMFIDLLGFMLFFDLTLVHLGQYFTKVSGMIGHLSWDLCLEDGDLNLTDLHWWINMQKKRRPSPKKQRYMLKWFFLKDCNVIRVSEIQKVLDIADERSLIDTIFFCYLGCNARYAYSLNSLMSAIFAAKVVDNGVRGGELAAQPGDEAIALVDEPGDGLGHGGAGGRRGDDGGGGGHRRASLTTAGRSIAQPAMPRFLQENPEYVAQGVTLAQFSFQIPIPLRQDYVKKKPKLINASDEASTITSKSSEPDEVNPIAWAVPTKHEGDASEEASLADETLASEVIDASIVYDPWTRESRMFGFVTMAATKEADHCIKYLDCSVLQGQNILLFCLHHRESKSASHSLHIHKVLLDCDDVQADALIVDRLASL

SEQ ID NO: 9238 - protein, 234 aa, Zea mays
  VARIANT 57: note = Ancestral polymorphism is T, Derived polymorphism is I
  VARIANT 11: note = Ancestral polymorphism is G, Derived polymorphism is S
MVAENLAPGYGLEQRLPNGSSKKGTPRSASQRWMPDKPRTPSSRRTYSIGEPGKLTTGFSRSARMGNLNPRDRAFASLSNIADLKSAADAATEDLDNEFDHIDESHYVARRAYHSPLCSSQAVSLEVAATATGTGAKPSRVSVRAPAAGAQQIAGLQILPRIKCRKIIFKDAEWSANWPIWKGILQQDMNHLYVVIQTTLFVVQNNLCTPKNGEILVASTQDFLTSSFLYMFSN

SEQ ID NO: 9239 - protein, 405 aa, Zea mays
  VARIANT 320..405: note = Derived polymorphism lacks residues 320 to 405
  VARIANT 315..405: note = Derived polymorphism lacks residues 315 to 405
  VARIANT 279: note = Ancestral polymorphism is G, Derived polymorphism is E
  VARIANT 269: note = Ancestral polymorphism is P, Derived polymorphism is S
  VARIANT 128: note = Ancestral polymorphism is A, Derived polymorphism is G
  VARIANT 73: note = Ancestral polymorphism is L, Derived polymorphism is F
  VARIANT 40: note = Ancestral polymorphism is S, Derived polymorphism is L
  VARIANT 38: note = Ancestral polymorphism is T, Derived polymorphism is I
MVQLFLQVPTECDSVNTVAVEGRRSLCHNVESIIKSLTKSAGMYEARLWLCATVSLVHSLSDCGQRDLFLDLLERKNSRRDVAARLLRMIFDKKPRMVGSILARKGHILEDFFRGNPNRIMQWFGHFAVTGESTHRKGAKALLQFAFVNCDSCYQASLFRDLDVLETVENFLEYVPDFWSSDELANSIKDGEILQIDEEYFVDKFLYLMYEENSKDVWHVVEDFLMDEQFSSLCQHLLIHLDEERLLGFLNSLGKLINPTMQCKELTFPCCWLEVLLSGHYDHISLDDLVFLNCVTAKGRQLWRLMNDEEQHEEWGQMEELLKGVNHLTDADHFALMKELVETELPAIKGERGIGESAIGTSLMRTSDELLELGSSDGKNGVESQRGSWRLSTDGFSASWDIVCE

SEQ ID NO: 9240 - protein, 439 aa, Zea mays
  VARIANT 268: note = Ancestral polymorphism is V, Derived polymorphism is A
MASPSFAAAATSPASSPLTLDAIPLASRPAPGAAAAQRKRSVFLLNHRPHPVSPTPPLQPTAAASAQHARRKKTSHPPRPRWQTVLSIAAKNAALLAALLYLGDLAWRWSHPPPPSPPPDRAALEGYAARVDEVEASLTRTFRMIQVQLEAVDRKIDGEVGAARGDLLALLEDKRLALERQLTRLDARAGELGDALAGLKRMEFLRKDEFEKFWDEVKGSLGSSSESEVDLDQVRALAREIVMREIEKHAADGIGRVDYAVASGGGRVVRHSEAYVPKRGFMVWMSGVDVGPKPEKMLQPSFGEPGQCFALQGSNGFVEVKLKSGIIPEAVTLEHVSKDVAYDRSTAPKGCRVYGWYEETPGETQSGHAAKMALAEFAYDLEKNNVQTFDVTAPDVGVINMVRLDFTSNHGSSQLTCIYRLRVHGHEPVSPGSSAGSQA

SEQ ID NO: 9241 - protein, 392 aa, Zea mays
  VARIANT 182..392: note = Derived polymorphism lacks residues 182 to 392
MFKPVHIDKMIHFTYHTIIKASLDSPSTFPRYVYHLTPLHQIESYIQKNEYFLDVLGVITQVSALKSVRTQTQESSNVIKEIIIKDINDVTMRLTLWAQQAKAFKLDDVYNPLEQKPIGILFVGCLAKNFQGAYLNGGTTCRWYFNPDIKEAAPYYQRYKLTFMGLDATATTQMFCFDTVARHIVGRPCETVLKQATEAAPIPLDLAQIVSLKFTFHVTASNQTFDQREKQPTVLQINSIVVVHGRQHSLPSGIQNTIDQGPSTPNKEATLKLLKESSSTAMERLSTKVSKDVGRKLTYSTHDEDIIGSQVLDVTQGTNADKGIPTDKGKEIEPHLQSPPKRLTEAPFVLSEHDYTISVFSSTIICNESMYVIGRGVYIMSHVMGKRSDLPQ

SEQ ID NO: 9242 - protein, 79 aa, Zea mays
  VARIANT 74..79: note = Ancestral polymorphism lacks residues 74 to 79
  VARIANT 57: note = Ancestral polymorphism is E, Derived polymorphism is K
  VARIANT 45: note = Ancestral polymorphism is D, Derived polymorphism is Y
  VARIANT 7: note = Ancestral polymorphism is D, Derived polymorphism is N
MLRRLSDATMEQSNNSDSSIDESIPLDVLSDKLTKISKEAFERRDFIATVVASALQEALISVSVIRNIYKLMLRLLIRY

SEQ ID NO: 9243 - protein, 172 aa, Zea mays
  VARIANT 81: note = Ancestral polymorphism is G, Derived polymorphism is R
  VARIANT 76: note = Ancestral polymorphism is G, Derived polymorphism is E
  VARIANT 10: note = Ancestral polymorphism is R, Derived polymorphism is M
MSDLALELARDSKKQAATPADADAAKLQQLPAIAEQQQQQQTAEEEEEELARCECCGMQEECTPQYVRRVRDRYCGRWVCGLCAAAVSAEAEGGRATTEAALAAHMAVCGRFNRVGRANPVLLQTEAMRQILRKRGARCDSPRVRDRGARPAAAAALARSSSCIPAITKDFN

SEQ ID NO: 9244 - protein, 307 aa, Zea mays
  VARIANT 244..307: note = Derived polymorphism lacks residues 244 to 307
  VARIANT 206: note = Ancestral polymorphism is R, Derived polymorphism is W
  VARIANT 163: note = Ancestral polymorphism is P, Derived polymorphism is T
  VARIANT 147..307: note = Derived polymorphism lacks residues 147 to 307
  VARIANT 140: note = Ancestral polymorphism is A, Derived polymorphism is V
MERLQRIFGASGMGQPPTDSPLLDSSEQVYISSLALLKMLKHGRAGVPMEVMGLMLGEFVDDYTVRVVDVFAMPQSGTGVSVEAVDHVFQTNMLDMLKQTGRPEMVVGWYHSHPGFGCWLSGVDINTQQSFEALNPRAVAVVIDPIQSVKGKVVIDAFRLINPQTMMLGQEPRQTTSNVGHLNKPSIQALIHGLNRHYYSIAINYRKNELEEKMLLNLHKKKWTDGLILKRFDTHSKTNEQTVQEMLNLAIKYNKAVQEEDELPPEKLAIANVGRQDAKKHLEEHVSNLMSSNIVQTLGTMLDTVVF

SEQ ID NO: 9245 - protein, 208 aa, Zea mays
  VARIANT 26: note = Ancestral polymorphism is S, Derived polymorphism is L
MAPTGDAAAAQAPAPKKQSAKSRRISIEGLQRAMSDLALELARDSKKQAATPADADADAAKLQQLPAIAEQQQQQQQTAEEEEEELARCECCGMQEVCTPQYVRRVRDRYCGRWVCGLCAAAVSAEAEGGRATTEAALAAHMAVCGRFNRVGRANPVLLQTEAMRQILRKRGARCDSPRVRDRGARPAAAAALARSSSCIPAITKDFN

SEQ ID NO: 9246 - protein, 160 aa, Zea mays
  VARIANT 35: note = Ancestral polymorphism is V, Derived polymorphism is A
  VARIANT 45: note = Ancestral polymorphism is G, Derived polymorphism is D
  VARIANT 60: note = Ancestral polymorphism is A, Derived polymorphism is V
  VARIANT 88: note = Ancestral polymorphism is V, Derived polymorphism is M
  VARIANT 112: note = Ancestral polymorphism is E, Derived polymorphism is K
  VARIANT 118: note = Ancestral polymorphism is G, Derived polymorphism is E
MSPPSESPPMSPAAAAAALRRGAWPGVGGSPVNEVLASLRQLRLGGGSPRSAPSGGSFLAGGYPFGSPKSPAGLYSLPSTPPTRSCPVMVTTASGATIMTVECLNLGLLVDEEPVESGRALREKVFERLSKESVVPNDTVASANTEGAAPNVGWVSDLIN

SEQ ID NO: 9247 - protein, 807 aa, Zea mays
  VARIANT 313..807: note = Derived polymorphism lacks residues 313 to 807
MPAAMGTPILTLPAPDGNGTGGGDANQQLLQAPPKPPPPGAKTDPPATVATHTRTIGIIHPPPDIRVIIEKTATFVAKNGPEFERRIISLNQGNAKFNFLQPSDPYHAYYQHRVSEIAATPPSADGLSGAETDTAPAEAPASTPADGAAAVPADGAAVDTKADHSAPFRVVPPPKVLVPPKAELYTVRLPEGITGEELDIIKLTAQFVARNGKNFLTSLAQRESNNMQFHFIRPTHSMFPFFTELTDAYSRVLRPAEGVPALLKELREGSKDLTTVLERCLNRLEWDRSQEQARQQAEDEVEQERMQMSMIDWHDFVVVETIEFADDEYEGLPVPLTLEELKRQKRMENLGEEEAMDLTEPAKEVEMEMDEEEMQLVEEGMRAAQLEENDGGSQVNVAGDDETPMRIVKNYKRPEERIPAERDPTKFVVSPITGELIPISEMEEHMRISLIDPKYKEQKERMLAKIKETTLAPDDEISRNIVGLARTRPDIFGTTEEEVSNAVKAEIEKKKDEQPKQVIWDGHSGSIGRTATHALSQIQGGEEQFDASNVDGRPVPGPAPLVRPGMPLPRPPQPLPLVNVPRFIAPPAPYSVPPPGSHMPGVPQMMPHMHLHPQQIPGQPPMVRMPGQMVHMPTSIPPPPGQTQFMPGPPPHTFAMPPSSHMPHMINPIGIPQPPAPPLPPQPPAEEQPPPPDEPEPKRQRTDDGSLIPAEQFLAQHQGPASISVSVPNLDEGNLRGQVLQIPVQSLSDTVGSLKEQIAGELQLPANKQKLSVRTSFLKDNLTLAYYNVGPGVVINLTLRERGGRKK

SEQ ID NO: 9248 - protein, 454 aa, Zea mays
  VARIANT 187..454: note = Derived polymorphism lacks residues 187 to 454
MGKKRKLEPKSAAGFTPVKASPTTRSATAKAAGLSEVLAPVEATMEKLPQGAGGEDVEEIEEVEVEEEVEVEEEEEGESDQASIQALLDSFPKDQLVELLRDAAIAHGDVLTTIRRVADADPAQRKIFVHGLGWDTTTDTLTEAFGPYGEIEDLKVVTDRNTGKCKGYGFILFRHRSGARAALREPQKKIGNRSTACQLASVGPVPGGAPNSAAPAPVQLQLPPVSEYTQRKIFVSNVGADIDPQKLLQFFARFGEIEEGPLGLDKVTGKPKGFALFVYKTIESAKKALEEPHKHFEGVMLHCQKAIDGPKPNKLGGAGGFFGAGASSGGKGFAGYGATSHSLPGTVGIVQPMSPLAPGLASLPGGISAAPGVDPALGQALTALLATQQGGGLSFNSILGVGANGSGLPPQGPTGALGGSSVQGMQGGYMGGYGGSGGYGGASSGGPGRHYMGH

SEQ ID NO: 9249 - protein, 244 aa, Zea mays
  VARIANT 194..244: note = Derived polymorphism lacks residues 194 to 244
  VARIANT 108..244: note = Derived polymorphism lacks residues 108 to 244
  VARIANT 107: note = Ancestral polymorphism is C, Derived polymorphism is Y
  VARIANT 66: note = Ancestral polymorphism is H, Derived polymorphism is R
  VARIANT 37: note = Ancestral polymorphism is R, Derived polymorphism is C
MAASSSRGGAAASADDDDEPYLLGFIISKIVGMLYYRGKVAGREPLNQYDNNAIVVFNARNDQVGHLPGVLAAVLAPLLDSHLLVVAQGIMPRSGSKINPNAYSLPCQVHLFARPAAASVVEAALHEAGIDLIHVDHPEFTLSQAGVVMEQFKKPDRDHDVDKLFSLVGKEGKNQTQRMDPPGDVVLSELFGHQKEALGWMVHREESADLPPFWQEGEDGGFENVLTNQKTEKRPPPLKGRDLC

SEQ ID NO: 9250 - protein, 406 aa, Zea mays
  VARIANT 7..406: note = Derived polymorphism lacks residues 7 to 406
  VARIANT 17..406: note = Derived polymorphism lacks residues 17 to 406
MSRHRVETCDSWRPPRKNHAGAPPLLRAGPRLLAFASLSVRDGGDSAAAVAKAVEEAVVVRSDEVKEAVAGEERKKTKSTERRLPPAAQLVSHPLALLALVPNSAAIFAAGAAAGTVAKTVTAPLDRVKILMQARHPPCGSNSTHSVRVAGESAKKGVGFLEAMADIGKKDGLKGYWKGNLPQVIRIIPYSAVQLFSYEVYKKIFRRKDGELSVFGRLAAGACAGMTSTLVTYPLDVLRLRLAVQSGHSTLSQVALNMLREEGLASFYGGLGPSLVAIAPYIAVNFCVFDLMKKSVPEKYKNRPETSLATALLSATFATLMCYPLDTVRRQMQMKGTPYNTVFDAIPGIVERDGLTGLYRGFVPNALKNLPNSSIKLTVFDTVKTLIATGQKEMDKLIQENEEKRS

SEQ ID NO: 9251 - protein, 445 aa, Zea mays
  VARIANT 355: note = Ancestral polymorphism is R, Derived polymorphism is C
  VARIANT 344: note = Ancestral polymorphism is T, Derived polymorphism is M
  VARIANT 308: note = Ancestral polymorphism is A, Derived polymorphism is P
  VARIANT 174: note = Ancestral polymorphism is S, Derived polymorphism is I
MAAAACYSPARIIISCSATTTSSSSSARTLRVAVVGGGPAGASAAEALASAGARTFLLERSPAGAKPCGGAIPLCMLDEFAIPRDLVDRRVTRMRVLSPSNLAADFSRALPPGAHIPMLRREVLDSFLRRRAVEAGAELVPGLVTSLSLPAGPADPYLVHYISSSPEGVGAGRSVLEVDAIVGADGANSRVAREVGAGDYTTAIAFQERIRLPDAGMAYYDDLAEMYVGGDVSPDFYGWVFPKCDHVAVGTGTVAAKPEIKRLQSGIRARAGPKIAGGRVVKVEAHPIPEHPRPRRVVGRVALVGDAAGYVTRCSGEGIYFAAKSGRLCGQAMAEEWARTGSVTEAGLRRGYLRRWDDEFLLMFRFLDLLQRVFYGGNAGREALVEMCSDDYVQRRTFESYLYKRMVPGEPWGDLRLLWRTVASMVRCGVIGREVERLRRLELQG

SEQ ID NO: 9252 - protein, 361 aa, Zea mays
  VARIANT 276: note = Ancestral polymorphism is G, Derived polymorphism is R
  VARIANT 134..361: note = Derived polymorphism lacks residues 134 to 361
  VARIANT 128..361: note = Derived polymorphism lacks residues 128 to 361
  VARIANT 92..361: note = Derived polymorphism lacks residues 92 to 361
MASSATREVLMLEAPPPSDPAAGPWRAVPDAEAIDALPYIDGDYGDAAVKREVDRLVEEEMRRGKRKPADFLRDLPPVPTAGFENHPMLSKEYERVRAGKPPFMLDMSRYGLEPPPMNKRNDVGAWRQALRNAQSQLQHQIIRIENLELMLKYGVDVWKLQNRQMESVLSRMQKMAVEYNERIENVNRERKFHQQNTGGQLHALKMEWQELCQKNIAIQAACVDLQNHIDQLKLEAKELRYLDNPAFPSHLCCLFVPSGSGVHDWLPLIIYFHGGGYVLFRVAYDLLYDTCMALTATTLAVVVSVGECPWTTTQEPTHKHHEDLRYRGGKEEATLHLSLAAGRFISHCDYLSCNCHMGQSV

SEQ ID NO: 9253 - protein, 510 aa, Zea mays
  VARIANT 439..510: note = Derived polymorphism lacks residues 439 to 510
  VARIANT 187: note = Ancestral polymorphism is P, Derived polymorphism is L
MLNDEFNGITRNPGLDLYPAHLRASIDEANELVYDAINNDVYKCGFAKKKDDRVLVPDLGSLTSIHDRARELFYYLKGGQVDYGEEHSKACSHNRFGRIYHTGHYPICYEHNPVHFVGHSAGAQVVRVLQQMLADKIEHTPFNRIGETQTILGLLSVVLHSTPDRDNYWKMMHKYIGSDVTSLVTLPVIIFEPMTMLQKMAELMEYCELLDKAEECEDPYMRMVYASTWAVSVYFAYQRTWKPFNPILGETYEMVNHQGITFLAEQVKTKFLGNSLEIYPVGRTRVTLKKSGVVLDLVPPLTKVNNPIFGRTWVDSPGEMVMTNLTIRDKVVLYFQPCGWFGYLNEGSDGDNAPETSSDVSNESDNDNGRSIGRTTQCLAQNICTDQERLSSDDCDSSNQEPPPVFQYMEHDAPYGRQPLADMDKPTTCGKKQKKQSAQIDVTTQQLGEPRPAFNNGIQRKAVEPERVSRAASSTRTTKPARGVPAPPPSRTGKERKVAVKLSRFQTATA

SEQ ID NO: 9254 - protein, 221 aa, Zea mays
  VARIANT 148: note = Ancestral polymorphism is E, Derived polymorphism is K
MRAREMNARSALDEVTDTGAFGRSPSTFRSSVSRDRRFPAVAGRYHLYVSYACPWASRCLAFLKLKGLDHAIGVTVVKPIFERTKESDEHLGWVFPAADDEEPGAEPDLLNGARSVRELYEIARSNYAGKPTVPVPWDKQLKTVVNNESSEIIRMLNDEFNGITRNPGLDLYPAHLRASIDEANELVYDAINNDVYKCGFAKKKDDRVLVPDLGSLTSIHD

SEQ ID NO: 9255 - protein, 215 aa, Zea mays
  VARIANT 101: note = Ancestral polymorphism is K, Derived polymorphism is N
MDAGAATAARERPAPPSPVPVPQASPDPSNPFPTTFVQADTTSFKQVVQILTGTPETAAAAASGGTQASPPAPQKAAPAPPGPKKPAFKLYERRSSMRSLKMLCPLLPAAAAFAAAGGSAGAGFSPRGFSPRGLEVLSPSMLDLPSLALGSPVTPLPPLPGSQEAAAAEDRAIAEKGFYLHPSPRGNAGAGADLQPPPRLLPLFPVQSPSPTGRS

SEQ ID NO: 9256 - protein, 145 aa, Zea mays
  VARIANT 3: note = Ancestral polymorphism is R, Derived polymorphism is H
MARLGAGAVLTLLLAVAAAAAFLAVPASAKVGDLSAVEFVAARGSSIPGQRSSKCSGAVGECGVDEEEELGLSGGGGIGAGDALRRTLAQRKPTNRYISYAALRADQVPCNKRGRSYYTNCAAQTAANPYRRGCSAITRCARSMN

SEQ ID NO: 9257 - protein, 227 aa, Zea mays
  VARIANT 75: note = Ancestral polymorphism is Q, Derived polymorphism is K
  VARIANT 21: note = Ancestral polymorphism is T, Derived polymorphism is I
MARRIAGVAALNLLSVLMAATCAAGRDFYVGGRAGWAPNPAEPFNAWAERNRFQVNDTLVFRYSKDADAVLLVSQGHYDACNAAQPAQRLDGGDSRFVFDHSGPYYFISPDAARCRAGERLVVVVLAVRGDGDGDGTPSSSPPPVATPAPSALPTPPPPPHHVPGKNASSPSQGPAPSPALAPAPAPDANGTSSSPPSPSSAVAAFRGGFLLACLLSVTAGAAIILV

SEQ ID NO: 9258 - protein, 90 aa, Zea mays
  VARIANT 17: note = Ancestral polymorphism is T, Derived polymorphism is I
  VARIANT 41: note = Ancestral polymorphism is F, Derived polymorphism is S
  VARIANT 44: note = Ancestral polymorphism is S, Derived polymorphism is F
  VARIANT 75: note = Ancestral polymorphism is G, Derived polymorphism is R
MAATPDRVNADLRRCLTVDTPPPPQVARDKILSRMGEGLGFLQSVVSSSAGYLRYYSNEEGYELDFFVGLEVKPGPIVKCVLGHDFILHF

SEQ ID NO: 9259 - protein, 490 aa, Zea mays
  VARIANT 5..490: note = Derived polymorphism lacks residues 5 to 490
  VARIANT 107: note = Ancestral polymorphism is T, Derived polymorphism is M
  VARIANT 117: note = Ancestral polymorphism is L, Derived polymorphism is P
  VARIANT 173: note = Ancestral polymorphism is R, Derived polymorphism is H
  VARIANT 174: note = Ancestral polymorphism is A, Derived polymorphism is T
  VARIANT 289: note = Ancestral polymorphism is L, Derived polymorphism is Q
  VARIANT 291..490: note = Derived polymorphism lacks residues 291 to 490
  VARIANT 299: note = Ancestral polymorphism is T, Derived polymorphism is M
  VARIANT 306: note = Ancestral polymorphism is A, Derived polymorphism is T
  VARIANT 382..490: note = Derived polymorphism lacks residues 382 to 490
  VARIANT 438: note = Ancestral polymorphism is R, Derived polymorphism is W
MLARQPNRRSRTPAKPPLPQRPRASNPRPHTPAQLPPARAADLAPATASRTPRRSPLPKRPAVLRYLNAASATKSVLSHYAAKWLPDVAPPTSPSASGHFLPPESPTATWLKKRLLLESLVAALPLDPPAGGDGCCAAAVADDGITCDFLLKLLRVGSMVGADAALLQDLEARAARRLDQATLGAVMIPAFGHSGEHASALLLDMPLVLRLVRGFLKEGGGAVAARVAKLVDAYLAEAALEAGLRPVEFEELARAVPAHAHPADDAMYRAVDTYLKAHPGTAKEERKSLAWLIDACKLTVEAAAHTVQNERMPVRAVVQVLFSEHDKLNRLAELSASFSGQRSPSPSPNSTLELPSRCPSKREVLVQHQEVRRLRDDVARLQVRPSACLEFPSPHMYTNFGGAPTDAETYVCSMQRAAGPGGQAGLREAPAQRGRRWRLLQVERVLVRRRHGADVARVDDSESGMERRMPPKGKKSATATPNAKWRKSTS

SEQ ID NO: 9260 - protein, 224 aa, Zea mays
  VARIANT 190: note = Ancestral polymorphism is H, Derived polymorphism is Y
  VARIANT 187: note = Ancestral polymorphism is E, Derived polymorphism is K
  VARIANT 185..224: note = Derived polymorphism lacks residues 185 to 224
  VARIANT 179: note = Ancestral polymorphism is K, Derived polymorphism is M
  VARIANT 98: note = Ancestral polymorphism is S, Derived polymorphism is F
  VARIANT 74..224: note = Derived polymorphism lacks residues 74 to 224
  VARIANT 38..224: note = Derived polymorphism lacks residues 38 to 224
MAFRSHYTLQEMLWQTARANQEPEDSTQNSWNNRESGQSSGRFCQDDGTWRRELYKDSRGTQTSSELTSRNLQSNKKSQAQQKVVKKLPVSDLRGKLSGVASQRPQLSSTVQVPKPVKEVIKSNKPVQKRDPTPTTTPPDIKKPSAPAPVPAPSALPKQSQNKIDASLDSLLKSLDLEKYLINFQAEEAHSIYVAILYCGCDCYHKFKPDALKRKLEIISSLWL

SEQ ID NO: 9261 - protein, 473 aa, Zea mays
  VARIANT 208: note = Ancestral polymorphism is A, Derived polymorphism is V
MAKTPSFAVAAVAGGRGPVHNRTQLLLLLLVAVAASASTAGFLLRGALRDPCDGRGDPAALNTAVASGSPLGFMRSKLVLLVSHELSLSGGPLLLMELAFLLRHVGSQVVWITNQRSQETNDVTYSLEHRMLNHGVQVLPARGQEAVDIALKADLVILNTAVAGKWLDPVLKDHVPKVLPKILWWIHEMRGHYFKVEYVKHLPFVAGAMIDSHTTAEYWNSRTSDRLKIQMPQTYVVHLGNSKELMEVAEDNVARRVLREHIRESLGVRSEDLLFAIINSVSRGKGQDLFLQAFYQALQLIQHEKLKVPRIHAVVVGSDVNAQTKFETQLRDFVVKNTIHDRVHFVNKTLAVAPYLAAIDVLVQNSQGRGECFGRITIEAMAFKLPVLGTAAGGTTEIVLDGSTGLLHPAGKEGVAPLAKNIVRLASHAEQRVSMGEKGYGRVKEMFMEHHMAERIAAVLKDVLRKSQEHSRS

SEQ ID NO: 9262 - protein, 329 aa, Zea mays
  VARIANT 73..329: note = Derived polymorphism lacks residues 73 to 329
MVPGIATKTAARPVAWAPQPRNMFVFGAGFVGRYVSERLLAQGWQVSGTCTTVTTKRELEMLGMNASVFDGTEDSLENIHSLRQATHLLISIPPIPGVGDPLLINLDEDLRRILGHGNLEWLCYLSSTSVYGDCGGVLVDEDHTVNPKSESAKLRYNAEKGWLNLIDDPKLSAFVFRLGGIYGPGRSALDTLAKSKSLSRKQKLRESKQYTARIHVADIYQAVLASMSIRCARKIFNVVDDDPAPRAEVFAFATSLIQRRYPDMITETIDAKPAGLDYQEMIVPAEKRVSNARMKQELGVNLLHPTYRSGLQSILDAWQIQPPLPNTSQ

SEQ ID NO: 9263 - protein, 110 aa, Zea mays
  VARIANT 96: note = Ancestral polymorphism is P, Derived polymorphism is R
  VARIANT 60: note = Ancestral polymorphism is E, Derived polymorphism is K
  VARIANT 49..110: note = Derived polymorphism lacks residues 49 to 110
  VARIANT 26..110: note = Derived polymorphism lacks residues 26 to 110
  VARIANT 21: note = Ancestral polymorphism is A, Derived polymorphism is V
  VARIANT 20: note = Ancestral polymorphism is V, Derived polymorphism is I
  VARIANT 17: note = Ancestral polymorphism is N, Derived polymorphism is K
  VARIANT 16: note = Ancestral polymorphism is S, Derived polymorphism is R
  VARIANT 15..110: note = Derived polymorphism lacks residues 15 to 110
  VARIANT 9: note = Ancestral polymorphism is T, Derived polymorphism is I
MDQMVVCFTKKIKDWSNVVVAYEPVWAIGTGKVATVAQAQEVHASLRDWLKTNVSPEVAESTRIFYGGSVTAANCKELAAQPDVDGFLVGGASLKPEFIDIINAATVKSA

SEQ ID NO: 9264 - protein, 364 aa, Zea mays
  VARIANT 253: note = Ancestral polymorphism is L, Derived polymorphism is P
  VARIANT 214: note = Ancestral polymorphism is H, Derived polymorphism is Y
  VARIANT 103: note = Ancestral polymorphism is A, Derived polymorphism is V
MGCPYNPYLLRLFNCHINVEACGSIKAVKYMFKYIYKGHDRASVVMRDVSKADEDVDEIKQYRDARSVTPPEALWRIYGFELSQISPPVMQLQLHLSNMHMVAFHERQMVERVVKCPGVDRSMLTTYFEANSLHKEARGILYHDFPEWYTWQSGKGKVWQQRKRDTGGQVGRIVSAHPAEGESYYLRVLPNHVTGTTSYVDLRTVDGVTLLTFHEAAERRGLLESDNTLDECLTERALFQMPSALRRLFATILVYCEPSDVAVLWQKHLDSMSEDYQHRNPCKTHVEQMVLIDIRNMLQSMGKDIKTFPLPPIMDAYDDAIGTAREVYEEEIIEPAAEDVALKDCLNKEQRAAYDKIMSAVDTD

SEQ ID NO: 9265 - protein, 247 aa, Zea mays
  VARIANT 3: note = Ancestral polymorphism is S, Derived polymorphism is Y
  VARIANT 19: note = Ancestral polymorphism is L, Derived polymorphism is H
MGSLGLLVVVAVAAVVLELTAADSWNGGRATFYGGGDASGTMGGACGYGNLYSAGYGKNTAALSTALFNNGQSCGACFEIRCTGSGSCLPGGSAVVTATNFCPPNYALPNNDGGWCNPPQPHFDLAEPAFTQIAVAGAGVVPVQYRRVACTKQGGIRFTVNGHSYFVLLLITNVGGAGELTAVSVKGSRTGWQTMSHNWGANWQNGALLDGQALSFQVTGSDGRTLTSENAAPAGWSYGQTYTGKQF

SEQ ID NO: 9266 - protein, 261 aa, Zea mays
  VARIANT 236..261: note = Derived polymorphism lacks residues 236 to 261
  VARIANT 237: note = Ancestral polymorphism is Q, Derived polymorphism is R
MEIERAVRGSGDARLRAKYDAAVYIIRRAYALYPFEELAFSFNGGKDSTVLLHLLRAGYYLHRTSSGDVDSTALQTVKNCPMRTIYFEDPDAFPAIDRFTYETASTYGLPLETIRTGYKSGLEALLEEKPTKAIFLGTRNGDPNAVGQQEFSPSSPGWPPFMRVNPILDWSYSDVWSFLLTCEVQYCILYDQGYTSIGSVRDTVPNELLRDGGSGGYRPAYTLSDGSLERAGRGKKQAGKRDASVSTRNGSGSGPRQRSKL

SEQ ID NO: 9267 - protein, 533 aa, Zea mays
  VARIANT 254: note = Ancestral polymorphism is C, Derived polymorphism is W
  VARIANT 258..533: note = Ancestral polymorphism lacks residues 258 to 533
MSTIAASRRSSSSSSSATAKRPAIADGPGGPKATAAQAKKRVALGNITNVAARGGRASVGGSLGNVMAPTSSAKLNPTVPLKKPSLATSARSVSSSIRGSADKPASIKPAPPVARHGSATQRHNNVPPPKVPTIADVPSRAPALVSCTGLVSPGRSGDSVSSDETMSTCDSMKSPDFEYVDNQDTSMLASLQRRTSEHLRISEDRDVEENKRKKNAVAPMEIDRICDVDSEYEDPQLCATLASDIYMHLREAECFTFSQTKKRPSTDFMETIQKDVNPSMRAILIDWLVEVAEEYRLVPDTLYLTVNYIDRYLSGNEISRQRLQLLGVACMLIAACHYDVSVLIWHVGNFKFRKYEEICAPQVEEFCYITDNTYFRDEVLDMEASVLNYLKFEMTAPTAKCFLRRFARAAQACDEDPALHLEFLANYIAELSLLEYSLLSYPPSLIAASAIFLARFILQPTKYPWNSTLAHYTQYKPSKLSECVKALHRLCSVGSGSNLPAIREKYSQHKYKFVAKKQCPPQIPTEFFRDTTC

SEQ ID NO: 9268 - protein, 187 aa, Zea mays
  VARIANT 34: note = Ancestral polymorphism is P, Derived polymorphism is T
MAASNSSALLPVLALAGVVFLLVAPAVVAEAAAPQGLEFHVGGPRGWRVPDANTSYGWWTMKNRFRVGDHLYFKYTNDSVLLVDRTAFDACNTTEPLATFDDGGTKFVLDRPGFFCFISGEPGHCEEGQRLIVRVMVQPAIVATPGPASGPATSAQPDHGGGHSSGAATAVAAAAVAAALAVFASLV

SEQ ID NO: 9269 - protein, 353 aa, Zea mays
  VARIANT 141: note = Ancestral polymorphism is R, Derived polymorphism is Q
  VARIANT 145: note = Ancestral polymorphism is Q, Derived polymorphism is P
  VARIANT 152: note = Ancestral polymorphism is W, Derived polymorphism is R
  VARIANT 154: note = Ancestral polymorphism is G, Derived polymorphism is R
  VARIANT 189..353: note = Derived polymorphism lacks residues 189 to 353
  VARIANT 275..353: note = Derived polymorphism lacks residues 275 to 353
MCRSGMPRCTTVAAAPRPHNCIDLSIDLEKQQIDFTACHSVVISAKINSLTSIETELPFSYYNLPYCKPLDGVKKSAENLGEILMGDQIDNSSYRFQVNVNESVYLCTTDPLINEQAELLKRRARDLYQVNMVLDNLPVMRFTEQNDVIIQWTGFPVGYNLGYNPIWSNEDYIINHLKFRVLVHQYQAQGDVVVTSEDGVAMVESDSKSGFQIVGFEVVPYSVRRDPESMSKLKMYDKADSVNCPLELEKSQAIRENERITFTYEVEYVKSNINWSSRWDAYLKMDGAKVHWFSIMNSMMVVFFPAGIVFVIFLRTVRRDLTRGKVINAATAYPISQREQASVAKLLQPSTSM

SEQ ID NO: 9270 - protein, 254 aa, Zea mays
  VARIANT 36..254: note = Derived polymorphism lacks residues 36 to 254
  VARIANT 60: note = Ancestral polymorphism is P, Derived polymorphism is L
MGLCSSSSLCLTPFCGGKKSTGALPISLLFTLLALWFYISGPLTLIGGLLGTRAASIDYPVRTNQIPREVPERKFPPSLLVLGVGTLPFGTLFIKLFFILSSIWLGRFYYVFGFMFIVLFLLVIFYGFRRISGLVDRVPLQNEEVKLVTVDDPFNTTDYMGKYDSIIVEVKRYYTVASAGCVARPYHPALGTSASTDCKALSPDNTYGVDSGGNPNEIPKLTFEESMEFNSKYYHPSNARIWFYGDDDPKEYTF

SEQ ID NO: 9271 - protein, 482 aa, Zea mays
  VARIANT 178: note = Ancestral polymorphism is R, Derived polymorphism is C
  VARIANT 184: note = Ancestral polymorphism is A, Derived polymorphism is T
  VARIANT 361..482: note = Derived polymorphism lacks residues 361 to 482
MTRGENQESQTGNVPAASAAAPGPKPASAGGGKGAEGQSVVRRLQSELMALMMGGDPGVSAFPEGDNMLHWVGTIDGSAGTAYEGTSYRLALAFTAEYPYKPPKVRFDTPCFHPNVDVHGNICLDILQDKWSSAYDVRTILLSIQSLLGEPNNDSPLNTQAAALWANQEAPANEKAYRRAMKRACLAAAAVLREGSGTSLDVVAAAIQILELELRTKLDRNLLLVMVGTRVVIRIAVGTVLEILEVGVALGEDEGEVDNEAGDSGGYRGRGRGGRGQYGGRGRGRDNGWRNGDGPKWDGGDNWNATNPPSNQPWSSSGGTKSYGQNQPSTWNNSEDNKPSVGEQGDPWASKVSSTEGKGQQNDSWSSKMTSRGAEDTRGISINHMKEVDSHAPVKQKLQLFPINEATLKPFEKVDLLDSPIARLPDIETTTLGATYVASLDAGVWTKEQVFADLNGLHRLSHQHRQLEKLNFRSAALLENFA

SEQ ID NO: 9272 - protein, 264 aa, Zea mays
  VARIANT 222: note = Ancestral polymorphism is S, Derived polymorphism is P
MERFDSKFHEKYTVLKKRKLLDEGLERKREAELKELYDAMKDWVSELKKDNAELNDKLMEKQDELEKARQEFLEDILTRDTEILRLKQLLDEKAEKNNSTASGFHCLTPEAILENSTSMSPKRKTPLSHGKEKRVQLSENAPHSSPAKESQELVCSRRRTCIRGNGTNEIRSAHMLRLLLQSLVRMKVSVNDESEIFSVSVSHEASGYSFTLTWLEKSDEWSYKLSSLGTLGRIAADWMRQDIRFSTKMCRMFVERISSIITKG

SEQ ID NO: 9273 - protein, 173 aa, Zea mays
  VARIANT 39..173: note = Derived polymorphism lacks residues 39 to 173
  VARIANT 6: note = Ancestral polymorphism is Q, Derived polymorphism is K
MAPPKKKPRMRVGPRGVPKHQLASRTVETGSSSRKPPLQRCLDAAHILELLAKKKQLQKELAEQKKQLAATMRSREVAFGCENHLRGRFQDLVLAYNDLEDYSNELHEEVHQLYYQLQPDDAPGATEAEGSVVLADGGERDTDLEEEAAPMVAPGGGSLGRTGMSEIDTDVEE

SEQ ID NO: 9274 - protein, 262 aa, Zea mays
  VARIANT 84: note = Ancestral polymorphism is R, Derived polymorphism is H
  VARIANT 56: note = Ancestral polymorphism is R, Derived polymorphism is H
MLNMMTDLSCGPSSKAKGGQPAAAPGSGGDRQGRGKIEIKRIENTTNRQVTFCKRRNGLLKKAYELSVLCDAEVALVVFSSRGRLYEYANNSVKSTIERYKKANSDTSNSGTVAEVNAQHYQQESSKLRQAIDSLQNANRTIVGDSIHTMGLRELKQMEGKLEKAINKIRARKNELLYAEVEYMQRREMDLQTDNMYLRSKIAENNNETGQPAMNMIGVPSTSEYDHMASFVDSRNFLQVNMQQQQPQHYSHQLQPTTLQLG

SEQ ID NO: 9275 - protein, 410 aa, Zea mays
  VARIANT 53..410: note = Derived polymorphism lacks residues 53 to 410
  VARIANT 112..410: note = Derived polymorphism lacks residues 112 to 410
  VARIANT 187: note = Ancestral polymorphism is S, Derived polymorphism is L
  VARIANT 197..410: note = Derived polymorphism lacks residues 197 to 410
  VARIANT 232..410: note = Derived polymorphism lacks residues 232 to 410
  VARIANT 243: note = Ancestral polymorphism is C, Derived polymorphism is Y
  VARIANT 269: note = Ancestral polymorphism is A, Derived polymorphism is T
  VARIANT 276: note = Ancestral polymorphism is G, Derived polymorphism is E
  VARIANT 282: note = Ancestral polymorphism is M, Derived polymorphism is K
  VARIANT 290..410: note = Derived polymorphism lacks residues 290 to 410
  VARIANT 386..410: note = Derived polymorphism lacks residues 386 to 410
MLGNITWQYFSLLLNMIALSYHVLRKWSSLTYPLVSFCRGTIRYASVHAHLGCTGSRRDDLESLSYTLIFLIRGRLPWQGYQGDTKSFLVCKKKMATSPEMLCCYCPAPFKQFLEIVTNMKFDEEPNYAKLISLFDGLIEAPASRQIRIDGALKVGQKCGRLVADLEEVEQPKKKVRLGSPAAQWISVYNARWPMKQRYHYNVADSRLSQHIEKGNDDGLYISSVASSANLWALIMDARTGFCSQVYELSPVFLHKIMEQWEKSYYITAIAGSSNGSSLVVMSKGTPYTQQSYKVSESFPYKWINKKWKEGFHVTSMATAGNRWGVVMSRNSGFSTQVVELDFLYPSEGIHRRWESGYRITSTAATNNQAAFILSMPKRKPMDETQETLRTSAFPSSHVKEKWAKNLYIA

SEQ ID NO: 9276 - protein, 85 aa, Zea mays
  VARIANT 9: note = Ancestral polymorphism is S, Derived polymorphism is I
  VARIANT 16: note = Ancestral polymorphism is S, Derived polymorphism is L
  VARIANT 17..85: note = Derived polymorphism lacks residues 17 to 85
MIIKTESCSAFEAERSGYKFSVQQRIGTYFLKGILYGSVGFFCGLVGQGIANLLNDSQTVQKHLLLGHCKKRRGIGLNCSNEAFF

SEQ ID NO: 9277 - protein, 555 aa, Zea mays
  VARIANT 352: note = Ancestral polymorphism is G, Derived polymorphism is S
MAEAAADSSNSAVDGGGSNVQNDYPTIDPTSFDVVLCGTGLPESVLAAACAAVGKTVLHVDPSPFYGSLYSSIPLSSLTSFLSPEASPPTSSAAAAASDSRTVVDLHRRSVYSDVETSGTVPEPARRFTVDMVGPRVLYCADEAVDLLLRSGGSHHVEFKSVEGGSLLYWEGCLYPVPDSRQAIFKDTTLKLKEKNILFRFFKLVQAHIAAASASSDETGQGDASTKIPEEDLDLPFVEFLKKQGLPPKMRAVVLYAIAMVDYDQDGADPCDKLTTTREGIQTIALYSSSIGRFANAEGAFIYPMYGHAELPQAFCRCAAVKGALYVLRMPVVALLMDEEKKHFLGARLASGQDILCQQLIIDASYKIPTLDVPFDGSDSWKVVRGVCIISKSVKQGSSNVLVIFPPKSLEEQQVAAVRLLQLSSNLAVCPPGMFISYLSTPCTDVSAGKQSIKKAIDTLFSPQASDGSEGHFETTNESTEDVKPTLIWSCLYVQEITQGTSGSLLSCPMPDEYLDYRNVLGSTKKLFASIYPDEEFLPKKSAPVYADDASDSAE

SEQ ID NO: 9278 - protein, 315 aa, Zea mays
  VARIANT 31: note = Ancestral polymorphism is Q, Derived polymorphism is E
MQGGVSGFQNAPVTRAVVVASGLLSVVFSAQRRARALGISYQDTITNFRLWKIFPSVFAFQSTPELMFGLYLLYYFRVFERQIGSNKYSVFCLFTITASSLLEILSLVILKDTNYISTLASGPYGLIFASFVPFFLDIPITSRFRIFGLNFSDKSFIYLAGFQLLLSSWKRSLIPGIFGLVAGSLYRLNVLGIRKMKYYNCECIYFSFLFGVIKFLPLVQLPQVISSFFARYFAPSPGSTSRPSRSLVGNTPSHRGRAVQNQPSTGFAPIVEPPESSVAMLVSMGFDGNNARQALVRARNDINVATNILLEAQSH

SEQ ID NO: 9279 - protein, 103 aa, Zea mays
  VARIANT 1: note = Ancestral polymorphism is M, Derived polymorphism is T
  VARIANT 43: note = Ancestral polymorphism is V, Derived polymorphism is I
  VARIANT 50: note = Ancestral polymorphism is I, Derived polymorphism is T
  VARIANT 61: note = Ancestral polymorphism is M, Derived polymorphism is T
  VARIANT 66: note = Ancestral polymorphism is E, Derived polymorphism is K
  VARIANT 68: note = Ancestral polymorphism is D, Derived polymorphism is G
  VARIANT 72: note = Ancestral polymorphism is R, Derived polymorphism is T
MGKDFNSSSSVGDHGVDVEVTMVIGEDEIEGAKWTMDNVKFSVKERIEAIATKEELEHLVMLCRSEADAMGRITAGILCLLKLDKSLGQGTIEQLRNLGMELP

SEQ ID NO: 9280 - protein, 284 aa, Zea mays
  VARIANT 66: note = Ancestral polymorphism is S, Derived polymorphism is I
MTHPARRPTTSTDTAEIAFLGATAIPDPQSTLATPMPLPEIPFLHTSTPPPPPPPAPVTQKQKHGSGKQRSRPGRLMRSVRAAFRSFPVIQAPSCRGMPSLHLSGLQGAGVRSHFHGATHATGTLYGHRRARITIALHESPGMPPCVLLDIGVPTAKFIQDVSAAGMVRVTLECEKQHHAVDAGMRRLLDEPVWTTEVNGESVGYASRREATERDECVMRMLHSTSMGVGVLPADMTHPSDGELTYMRVHFDRLVGSKDSETYYMHNPEGSATGPELTIFFIRT

SEQ ID NO: 9281 - protein, 167 aa, Zea mays
  VARIANT 136: note = Ancestral polymorphism is M, Derived polymorphism is T
  VARIANT 66: note = Ancestral polymorphism is Q, Derived polymorphism is K
  VARIANT 64: note = Ancestral polymorphism is P, Derived polymorphism is Q
  VARIANT 63: note = Ancestral polymorphism is N, Derived polymorphism is I
  VARIANT 61: note = Ancestral polymorphism is W, Derived polymorphism is R
  VARIANT 59..167: note = Ancestral polymorphism lacks residues 59 to 167
  VARIANT 13: note = Ancestral polymorphism is K, Derived polymorphism is E
MGRITAGILRLLKLDKSLGQGTIEQLHNLGLNFLYDFIFVGTSGPWNGENTKNCIHKLWTWSIPQQCQQHLPQSKLLHQIMSACPRPHYLLTSSVAQLSASFPSGLSNVGSTMDPPTILANPPQSAQAKGYLIHQMPSSAPQPSHHPNIWPYLMLLHSIPMFHRIYL

SEQ ID NO: 9282 - protein, 541 aa, Zea mays
  VARIANT 94..541: note = Ancestral polymorphism lacks residues 94 to 541
MGGGNGETTQLGEPLLAKKAKAYRPRCPGCRVDRLNAEREGVFPLKDLFLIWLVTITCTLPIQSLFPFLYFMIRDLHIAKQTQDIGFYAGFVVETYGAFSINEGASYMCGRAVSSTVWGIVADKYGRKPVIVLTLIAIVIFNTMFGLSSNYWMALITRCLLGIMCGYLGPIKAYATEVCRKEYNHLALAVVSSSRGIGLIIGPAIGGYLAQPADKYPSIFSQTSIFGRFPYFLPCLCISILAVIALIACIWFPETLHKHNGDAVDNSVETVEESLAGTDTEENGGGGCLKLFTNWPLMSAITLYCIFSLQDVAYAETFSLWAVSDRSFGGLSFTTTDVGNVLAMSGLFLFLYQMLIYPFLAKTVDHITLVRAVALLTLPVLASYPFFPSLSGFGLMVVVNCASFLKNTFSVSAPFLFRDTAGFHSVMPKQARLPALSVQNLSCVLLNCFQVTTITVFNILMNEAVTQDVRAAANGIAVTLMSISKAVAPAVAGIIFSWAQRRQTAAFLPGDHLVFFILNIFTFIGFVFTFRPFFVRGSAKH

SEQ ID NO: 9283 - protein, 278 aa, Zea mays
  VARIANT 144: note = Ancestral polymorphism is K, Derived polymorphism is N
  VARIANT 41: note = Ancestral polymorphism is K, Derived polymorphism is N
MAAPPVAAALSALHEAQETHGHDDSRAGHARGHWRPAEDAKLKDLVALYGPKNWNLIASKLHGRSGKSCRLRWFNQLDPRVNRRPFSAAEEQRLVAAHRAHGNKWALIARLFPGRTDNAVKNHWHVLTARRQRERTGAPPRRRKPSSSSPAAHHHRAPSPLPFCAGKATRPRSCGDGDGDGGGSDESASSTSSGTDLSSLGSVCAAAVPCFHFHRRRQSQSSCDGTTCACLLGSSSASPLLRCIMLRSVPSPAAASDGGGCGKLAALPFFDFLGVGAT

SEQ ID NO: 9284 - protein, 283 aa, Zea mays
  VARIANT 59..283: note = Derived polymorphism lacks residues 59 to 283
MDHFSPALPPTHDLVPFQEENKHIFITEEAYDGHVEEHDGSNSHDGISNQGKHIVRGHWRSFEDEKLKELVAQYGPKNWSHISKKLEGRSGKSCRLRWINQLDPHLNHDTFSMVEEERLLVAHHAYGTKWSLIARLFPGRTDNAVKNHWHVMMARKSRAIQGIKMMSSSNPSPSAKESPHFMPTININQNYGKNMHSQLDAQVEVATTPHIYHAIEFKNSLSTNTTNLSIEGASNMDPHVKTPMQSNFIAITHSGFSTPSLATEKSGDKFTSPFFDFLGVGDA

SEQ ID NO: 9285 - protein, 901 aa, Zea mays
  VARIANT 457..901: note = Derived polymorphism lacks residues 457 to 901
MESHNGEANDLPPPPPLIAGVEPLKADETKMPLKPRSLVQRNGFGRKGQPIKLITNHFKVSLVNAEEFFYHYYVNLKYEDDTPVDRKGSGRKVIEKLQQTYAAELANKDFAYDGEKSLFTIGALPQVKNEFTVVVEDFSTGKTPANGSPGNDSPPGSDRKRVRRPYNTKTYKVELSFAAKIPMSAISQALRGQESEHTQEAIRVIDIILRQHSAKQGCLLVRQSFFHNNPSNFVDLGGGVVGCRGFHSSFRATQSGLSLNIDVSTTMIVKPGPVIDFLLDNQKVGDPSMIDWAKAKRALKNLRIKISPANQEQKIVGLSERTCREQLFTLKHKNGNNGDSEEITVYDYFVKQRGIVLQYSGDLPCINVGKLKRPTYFPIELCSLVPLQRYTKALNTLQRSSLVEKSRQKPQERMSVLSDVLQRSNYDAEPMLKACGITIARNFTEVDGRVLQPPKLKAGNGEDIFTRNGRWNFNNKRLIRACSVEKWAVVNFSARCNVRDLVRDLIKCGGMKGIMVDAPFAVFDENPSMRRSPAIRRVEDMFEQVKTKLPGAPKFLLCVLAERKNSDIYGPWKKKCLAEFGIVTQCVAPTRVNDQYLTNVLLKINAKLGGMNSLLQIETSPAIPLVSKVPTIILGMDVSHGSPGHSDVPSIAAVVSSREWPLISKYRASVRTQSPKMEMIDSLFKPREAEDDGLIRECLIDFYTSSGKRKPDQVIIFRDGVSESQFNQVLNIELQQIIEACKFLDEKWNPKFTLIIAQKNHHTKFFIPGKPDNVPPGTVVDNKVCHPKNFDFYMCAHAGMIGTTRPTHYHILHDEIGFSPDDLQELVHSLSYVYQRSTTAISVVAPICYAHLAAAQVGQFIKFDEMSETSSSHGGHTSAGSVPVQELPRLHEKVRSSMFFC

SEQ ID NO: 9286 - protein, 266 aa, Zea mays
  VARIANT 55..266: note = Derived polymorphism lacks residues 55 to 266
  VARIANT 90: note = Ancestral polymorphism is R, Derived polymorphism is G
  VARIANT 129: note = Ancestral polymorphism is L, Derived polymorphism is P
  VARIANT 149: note = Ancestral polymorphism is W, Derived polymorphism is S
  VARIANT 150: note = Ancestral polymorphism is T, Derived polymorphism is I
MTSGTTMTSKTSDSITTSLSTKGKLSSVGSSFMASAGSRNTSGGFDEGAKYSDDQILEAPNLRTFTFIELKTATKNFRPDSVLGEGGFGRVYKGWVDEKTMAPTKNDTGMVVAVKKLNSESMQGFEEWPCSLNLIAFPVHFLKRISMAWTAQVLTLLETTSKREPPACASTPCDLCLGSSFHEAHFCSTICFHLTALYINILYFSRSIELSLFIPSHSCIEISSLIIFSWVSGKEKTRLISDFGLAKKYRDTSTHQHIPYRTKPEG

SEQ ID NO: 9287 - protein, 357 aa, Zea mays
  VARIANT 54..357: note = Derived polymorphism lacks residues 54 to 357
  VARIANT 163..357: note = Derived polymorphism lacks residues 163 to 357
  VARIANT 210..357: note = Derived polymorphism lacks residues 210 to 357
  VARIANT 215..357: note = Derived polymorphism lacks residues 215 to 357
  VARIANT 223..357: note = Derived polymorphism lacks residues 223 to 357
  VARIANT 286: note = Ancestral polymorphism is L, Derived polymorphism is P
  VARIANT 311: note = Ancestral polymorphism is G, Derived polymorphism is D
  VARIANT 314..357: note = Derived polymorphism lacks residues 314 to 357
  VARIANT 326: note = Ancestral polymorphism is S, Derived polymorphism is F
MLPFATTCAAAIAKSPVLQTINSECQCLDCFEQHDPVFDPVVSSSYRNVTCGDQRCDLVVPPEALRACRRPAEDSCPYYYWYGDQSNTTGDVALESFTVNLTAPCASRRVDGMVFGCEHRNPRPLPRRGGAAGARPGPAVVRVPAPPHVRAHLLVLPGGARQRRRQQGGVRGGRLGAGASATQVHGVHAHVVAGGHILLREAQGRVGGRRAAENQLGHVGRGQGRVRRHDHRLRHDAELLRGAGVPGDSASVRRSHEQVVPSDPGLPGVEPCYNVSGVERPEVPKLSLLFPDGAVWDFPAENYFVRLDPDDIMCLAVLGTPRTGMSIIGNFQQQNFHVVYDLQNNRLGFAPWRCTEV

SEQ ID NO: 9288 - protein, 122 aa, Zea mays
  VARIANT 5: note = Ancestral polymorphism is A, Derived polymorphism is E
  VARIANT 28: note = Ancestral polymorphism is A, Derived polymorphism is V
  VARIANT 31: note = Ancestral polymorphism is T, Derived polymorphism is I
  VARIANT 41: note = Ancestral polymorphism is T, Derived polymorphism is I
  VARIANT 71: note = Ancestral polymorphism is L, Derived polymorphism is F
  VARIANT 78: note = Ancestral polymorphism is T, Derived polymorphism is M
  VARIANT 85: note = Ancestral polymorphism is E, Derived polymorphism is K
  VARIANT 86: note = Ancestral polymorphism is K, Derived polymorphism is N
  VARIANT 112: note = Ancestral polymorphism is R, Derived polymorphism is C
MSFGAMGFPILLNILKEDREDVELVRGALETFMSALTPIETSQGPNTQLQPAESCSKDVSIVHVDMHNYSLDEKIRMTLEAHIVEKTDEVHEVSFVDFRFNVEHIQYLKVFRVELVLLLANC

SEQ ID NO: 9289 - protein, 183 aa, Zea mays
  VARIANT 107..183: note = Derived polymorphism lacks residues 107 to 183
  VARIANT 64..183: note = Derived polymorphism lacks residues 64 to 183
  VARIANT 62..183: note = Derived polymorphism lacks residues 62 to 183
MGSSVSQASAPPPPPPTYASTPPSFVHAAADVAAPPPKPHEEEATEEKVDYLNLPCPVPYEEIQREAFMTLKPDLFEGMRFDFTKMITPYFALTHSVAMGSIDIPAQKSGVIKIPTSNYEFGANFINQKTMLMGRVAHDGRENIRVKHDITDNLSLKINAQLTSEPHYSKGMLYFDYKVSLLL

SEQ ID NO: 9290 - protein, 509 aa, Zea mays
  VARIANT 218..509: note = Derived polymorphism lacks residues 218 to 509
MAAGGELAWGEEPVARRRPKTKIVCTLGPASRSVEMISRLLRAGMCVARFNFSHGSHEYHQETLDNLHAAMELTGILCAVMLDTKGPEIRTGFLKDGKPIQLIKGQEITISTDYSIQGDEKMISMSYKKLAVDLKPGSVILCADGTITLTVLHCDKEQGLVRCRCENTFKLGERKNVNLPGVIVDLPTLTDKDKEDILKWGVPNKIDMIALSFVRKGSDLVEVRKVLGEHAKSIMLMSKVENQEGVANFDDILANSDAFMVARGDLGMEIPIEKIFFAQKVMIFKCNIQGKPVVTATQMLESMIKSPRPTRAEATDVANAVLDGTDCVMLSGETAAGAYPELAVQTMAKICLQAESCVDHAAIFKSIMASAPIPMSPLESLASSAVRTANSARAALILVLTRGGTTARLVAKYRPSMPILSVVVPELKTDSFDWACSDEGPARHSLIVRGVIPMLSAATAKAFDNEATDEAIGFAIENAKTMGLCNTDQSVVALHRIGISSVIKLLTVK

SEQ ID NO: 9291 - protein, 513 aa, Zea mays
  VARIANT 9..513: note = Derived polymorphism lacks residues 9 to 513
  VARIANT 63: note = Ancestral polymorphism is S, Derived polymorphism is F
MAAPGGLDQDCAQDAAIKLFGRSIPVLHSSVFAATAAAASEVSTKLSNDVRSNDGMPCLPNMSLIVKTNPFPSKSNMKNGLQAISSQHGKMEADSNSEEAKNSLQAIISQPGKRYDSKSEEAKTESGGSGQEKVLKKPDKILPCPRCNSMETKFCYFNNYNVNQPRHFCRNCKRYWTAGGTMRNVPVGSGRRRNKDPSHHHHFTKVCDYTIATNGDVSDATQRQSVAAKPCLLQGSGKQNETACKSVSPVSNIKEQNNADLISLVSGDNKEEKSCASSAVVSGSSENWMPENTVKKEEDNTSAYGNGVKVPDHKMQPHHAGPVSVFSRNPAAVMATNQCSEDGIHTPGNGTVSPLSLPPLPMVPTPGICAPAVPFPFPLVPAFVSCIPGWPSGLWGAPWPGSSAPTLLSLPPNGLALSGSNSGVLGKHTRVANLQEEQKAEKKFWVPKALRIDNPEEAAKSSIWASLGIKPDDRIIFKSFQSKDLKNSATKTPESLQANPAAFSRSQTFQERA

SEQ ID NO: 9292 - protein, 1178 aa, Zea mays
  VARIANT 690..1178: note = Derived polymorphism lacks residues 690 to 1178
MASERPLLIATTPGASTPDDAPSPHPPAASLLPPAQSEPPLRADRLAFSVEIPDPFRSYRRGDGPAADPSASLERERDVGDDESREVIVGESSPEFSGNAIRTAKYSFLTFLPRNLFEQFRRLSYVYFLAITVLNQLPQVAVFGRGASVLPLAFVLFVTAVKDAYEDFRRHRSDRQENNRLATVLALGTAGEFQPKRWKHIRVGDVVRIESNETLPADMVLLATSDPTGVAHVQTVNLDGETNLKTRYAKQETHVMFSQNGGVGGVLHCERPNRNIYGFQANLEIDGKRVSLGPSNIVLRGCELKNTTWAIGVVVYAGKETKVMLNSSGAPSKRSRLETQLNRETVILSIMLIGMCTTASVLAGIWLLNHRRELEFTQFFREKDYTTGKNYNYYGVGMQIFITFLMAVIVYQVIIPISLYISMELVRLGQAYFMGADKDLYDESSRSKFQCRALNINEDLGQIRYVFSDKTGTLTENKMVFQCASIRGVDYNSGKDTGGYSVVVGDHLWTPKMSVKIDPELVKLLRDGGSNEEPKLVLEFLLALASCNTIVPLVLDTRDSKQKLIDYQGESPDEQALAYAAASYGIVLVERTSGYIVIDVLGDRQRFDILGLHEFDSDRKRMSVIVGCPDKTVKLYVKGADSSVFGITNNSSELDIVRATEAHLHKYSSLGLRTLVVGMRKLSQSEFEEWQLAYENASTAVLGRGNLLRSVAANIEINVNILGATGIEDKLQDGVPEAIESIRQADIKVWILTGDKQETAISIGYSCKLLTNDMTQIVINNNSKESCQRSLVEALATTKKLRAASSIGTQGPLLASETSNVTLALIVDGNSLVYILETDLQDELFKLATECSVVLCCRVAPLQKAGIVALIKNRTNDMTLAIGDGANDVSMIQMADVGIGISGQEGRQAVMASDFSMGQFRFLVPLLLVHGHWNYQRMAYMILYNFYKNAMFVLVLFWYVLYTAFTLTTAITEWSSLLYTVLYTSLPTIVVGILDKDLNKATLIAYPKLYGSGQRDDKYNVNLFVLNMLEALWQSLVVFYLPYFAYRRSTIDMSSLGDLWALAPVIVVNMQLAMDIIRWNWIIHAFVWGTIAATTVCLFVIDSIWVLPGYGAIFHIMGTGLFWFLLLIIVVTAMVPHFVFKAFTEHFRPSDIQIAREMEKFANVNQVNRLEFPTRGLS

SEQ ID NO: 9293 - protein, 97 aa, Zea mays
  VARIANT 89: note = Ancestral polymorphism is L, Derived polymorphism is P
  VARIANT 76: note = Ancestral polymorphism is G, Derived polymorphism is R
  VARIANT 70: note = Ancestral polymorphism is A, Derived polymorphism is T
  VARIANT 66: note = Ancestral polymorphism is A, Derived polymorphism is T
  VARIANT 63..97: note = Derived polymorphism lacks residues 63 to 97
  VARIANT 56: note = Ancestral polymorphism is G, Derived polymorphism is V
  VARIANT 48: note = Ancestral polymorphism is R, Derived polymorphism is C
  VARIANT 44: note = Ancestral polymorphism is A, Derived polymorphism is E
  VARIANT 43: note = Ancestral polymorphism is K, Derived polymorphism is N
  VARIANT 41: note = Ancestral polymorphism is E, Derived polymorphism is D
  VARIANT 25: note = Ancestral polymorphism is P, Derived polymorphism is S
  VARIANT 20..97: note = Derived polymorphism lacks residues 20 to 97
MRLHGYYTAGGKKISATSIYFESLPYKVSATTGYIDYEKLEEKALDFRPKLIICGGSAYPRDWDYARLRAVADKVGALLLCDMAHISGLVAAQIPAG

SEQ ID NO: 9294 - protein, 267 aa, Zea mays
  VARIANT 52: note = Ancestral polymorphism is S, Derived polymorphism is F
MDGGGGLGGLRWTAEEASTIGGIATVSLLHSFIPTHWLPFSIVARAQRWPLSRTLLVSQYPPPFRVPRSPHLLRLPLVTVHRLGASRSGYLLILRAAFGGVLHVVSTALLGITAVTMANTIAGEETVHKLASLLLIFLGASYILLFALGKGGHSHAHNHPMEKMAVAGLVLVPALSPCATTLPVFLAVGNSSSMMILAIIVLLFSTITVMTSLVALSFYGASQIKFHWVERYDKILVGTVLCLVGVLTYVFHHHDGDEHVHQKLVSP

SEQ ID NO: 9295 - protein, 294 aa, Zea mays
  VARIANT 57: note = Ancestral polymorphism is R, Derived polymorphism is L
MTTLATDTAAWTREEDKAFENAVAASAAPPADGPPDDGWFTALVASVPARTAEEVRRHYEALVEDVAAIEAGRIPLPRYAGEESSAATPEGSGAAGPSTPKDGGGGSGHRREERKGGVGADAGKSCSKAEQERRKGVPWTEEEHRLFLLGLDKFGKGDWRSISRNFVISRTPTQVASHAQKYFIRLNSMNRDRRRSSIHDITSVTAGEVATAGAPITGGGPTAAGAMPMGPGGMKHHHPVPPMGMYGHAPMGHPVAGHMVAPAAVGTPVMFPPGHHSPYVLPVGYPAPPTKMHQ

SEQ ID NO: 9296 - protein, 213 aa, Zea mays
  VARIANT 40: note = Ancestral polymorphism is P, Derived polymorphism is R
MALSAARRLSTTASSSSVADAPPKLSSLFQNPKPRPLPVRGVEEPRRGARPRPRQPWEEEAGALLLRLHKGRYLPGPDLSSAPHAVSPDAVKTAAEWFGHDHQPVAKWLSGSDLKKLALFGCPTVERRTVFASKRLRAFFNIQEDKICGSCKLRSSCKFVNQEVARHNRVILSDTMRIISLFVLDACPQELEITAELKASVCKLLKDAINLSS

SEQ ID NO: 9297 - protein, 169 aa, Zea mays
  VARIANT 148: note = Ancestral polymorphism is R, Derived polymorphism is H
MALLLSPPIVSFVSPSAPRSRPISAVANVSFSALPAAIPAANRWFKVYERFDCALVAPRAFLRVCDPAGSSPLNVTATCASFAEKRSAPVHATAEGSEAGAAEQPEEPKPATKIEEMPLESKQKMIMEQRARMKLAKKLRQRRKRLVRKRKLRKKGRWPPSKMKKLKNV

SEQ ID NO: 9298 - protein, 474 aa, Zea mays
  VARIANT 38..474: note = Derived polymorphism lacks residues 38 to 474
MIDRERADFKQQQSFDLMSTLKFFAIPADYPGPSAFHSGPYLFDAEEMQVNNEAPLGCLKPNISQYNSPEQIGGVEGFPENNEKRNDIVAAEKIWEATPNQGLSRPIYRQEFYAWPYIYSDYQIVRQPLPYGFDNQFYQINRDHGFPIENRVQYLPFKMLPQGHPHDAQLQEFQYFVVIDFEATCDKVNNPFPQEIIEFPSVLVNSATGKLEECFQTYVRPTYHQFLTDFCKELTGIQQIQVDRGVPLGEALLMHDKWLEDKGIKNTNFAIVTWSNWDCRIMLESECRFKRIRKPPYFNRWINLRVPFQEVYGDVRCNLKEAVQLAGLTWEGRAHCGLDDARNTARLLALLMHRGFKFSITNSLVWQPAAAPQSTAATCHFSPDRSPDPVVVQLQHQQQQHKPKEALGSPASLVNPSYATPAGGKDRAMYCYCGVLSRWSVVRKPGPMQGRYFFGCGNWTATRRAICPYFAWAS

SEQ ID NO: 9299 - protein, 613 aa, Zea mays
  VARIANT 316: note = Ancestral polymorphism is T, Derived polymorphism is I
MWALRRAGNPLRFHAQKVVSPRGCASLEVLLTADAKNVEEHHEADCQKVCYCHKPKPPSFLLSFSSGQFAWSRGFSSQPGANSSDKDDELEDVFSDLNVPPEAGKKDAGLTSEDTSDEDATDEIGLPSMDADAKPETEHIKRTFGSTLLKTVLEAPRHQVTSALEKWAKDGNALDRGELYYVLLNLRKRKWYHKALELVEYVQNSQLLELGERDYAARVDLTAKVYGLHKAEQYIEKIPASHRSEVVYRTLLANCVAEGNVKKSEQVFNRMKDLGFPVTTFSSNQLLLLYKRLDKKKIADVLTMMEKEDVKPSIFTYKVLVDAKGMVGDVEAMEKVVESMVKDGIEPDLTFNATIARQYIFNGQRDKAETLLESMEGDDIQKNRAACKFLLPLYAFLGNGDAVERIWKVCEDNTRIDECLSAIDAFGKLGNVEKAEKVFEDMFVKWKNLSSKYYTALLKVYANQNLLDKGEELAKRMDEEGAKFGTPTLNALVKLYADAGEVEKAESLLHKLSLKNNVKPSYSSYMTLLDSYSKKGDVHNSEKVFNKLRQIGYTGRIRMYQFLLHSYLHAKAPAYGFKERMKADNIFPNSAVATLIAATDPFVKKKSVSDLLD

SEQ ID NO: 9300 - protein, 103 aa, Zea mays
  VARIANT 83..103: note = Derived polymorphism lacks residues 83 to 103
  VARIANT 78: note = Ancestral polymorphism is G, Derived polymorphism is R
  VARIANT 8: note = Ancestral polymorphism is R, Derived polymorphism is S
  VARIANT 4..103: note = Derived polymorphism lacks residues 4 to 103
  VARIANT 1: note = Ancestral polymorphism is M, Derived polymorphism is I
MKGKAPRRAVTSIAVPSSSAWAGSLHPFHLQETEEAITDLISSMVQDLDFFTSWVSERTLRLLPKEPRQEALLNFATRRIGEWRPIELPVTCIAECSQVAFVS

SEQ ID NO: 9301 - protein, 405 aa, Zea mays
  VARIANT 319: note = Ancestral polymorphism is G, Derived polymorphism is S
MLAPLLAAFAVVFLLLLSRPCARDMRLFLASLCQQLVLSLLGFLAGLRLLSGVAAASAATETMPLMPSFKRKRAAATVENAEEAAATAGGGETSVLDLPELAIDCILEKLRPAELRSMAAVCRSMRERCRGDHLWERHMTNRWGRVLGRAARDEWRTHLASASESRAAGGGGKRRKWLAALSCVCPVVSWMRPRADGGKSSAPVLDDSIMSWYLSVESGKFWFPAQVYNREQHGHVGFMMSCYDAALSYDFHTDTFRARYPPHGRRTVVLEDGVQWDRVRAPPVDTLAHDLHTSDCLHELRPGDHIEIQWRRNKEFPYGWWYGVVGHLESCDGSEHFCRCHLSDTVVLEFNQYTPGSRWRQALVKRKEHREEGNEGDGFYGGIRKLRGKDDISKWRQLWPTDVLE

SEQ ID NO: 9302 - protein, 511 aa, Zea mays
  VARIANT 195..511: note = Derived polymorphism lacks residues 195 to 511
  VARIANT 187..511: note = Derived polymorphism lacks residues 187 to 511
  VARIANT 185..511: note = Derived polymorphism lacks residues 185 to 511
MAVVDQSLLPQIHALFSDPLRVVSYKWLSRNFSVSSNDAKRLLQDFVNKHGTDLQVIYSVSGWLKSNPQNYCVKLISGPKLEEARQIFKDSCSVQIYSIQACIPKDTAVLWNPEFVQAEELFNQPFDYENCLRDNRFCGVLNSFVKRTSNGKHVSSLPPKPLNSAAAAAQSKPSVTPKEQFVTARRQDLPVSSKQGADTKSEKDNSTVLDKAGNGPVVKEQSVDAHASKSKAQNGKAMPSNGGSLANMWGRASAKPKPPSTTNSTAVASVAATADAQICAKEEADGNSSDDEHGIKYKRGSTNANNRKRRAVFDYSDDEEDDNIVSIASPELPKQHTPDPVVGIAEDAEVNQKNLETEHHVPNNGKGSSTGVDSDFTSECKIKTIDPMNDSGITLKEKSSDPPINDKKQDSAAEPASTSPKRRKVLKTRIDERGREVTEVVWENEASADDKAEQNVNTIDATASGATVPSKPKPATNADKSKAPSKTAAGNKKAAKAGAKQGSIMSFFKKA

SEQ ID NO: 9303 - protein, 398 aa, Zea mays
  VARIANT 130..398: note = Derived polymorphism lacks residues 130 to 398
  VARIANT 132: note = Ancestral polymorphism is G, Derived polymorphism is W
  VARIANT 293: note = Ancestral polymorphism is E, Derived polymorphism is D
  VARIANT 304: note = Ancestral polymorphism is G, Derived polymorphism is D
  VARIANT 319: note = Ancestral polymorphism is G, Derived polymorphism is C
  VARIANT 365: note = Ancestral polymorphism is R, Derived polymorphism is C
MTSLLLGNQIARSAVGLCSDRRRELRADGPATVLAIGTANPPNCVRQEEYADYYFRVTKSEHLTSLKDKLKRICHKTAIKKRYFHHTEELLRGHPALIDRSMPSLHERQDIMASAVPELAAAAAVDAIAEWGRPATEITHLVVTTYSGAHMPGVDWLVASLLGLRSTVRRTMLYMNGCSSGCVALRLAKDMAENNRGARVLVACAELTLAHFRAPHEAHVDTLILQSLFGDGAGAVIVGADPVSVEEPDFEMLSASQTMIPESKQVAAGQLCEDGFHFNPSRDIPSLVRENIEQCMVDALSLLGIGGSWNDLFWAVHPGGRAFLDSVEAGLRLEPHKLEASRRVLSEYGNMSGPSVIFVLDELRRQQERKGMGVILGLGPGVSVETMVLQATDSQKKI

SEQ ID NO: 9304 - protein, 146 aa, Zea mays
  VARIANT 67: note = Ancestral polymorphism is T, Derived polymorphism is R
MAVPLKLKKRGMPALGRWLMAVGSLRSAFTWSCFFGSASLCSATYSEIQVTGVHGRTVAVWTLLSCTLCFLCAFNLSSKPLYAATFLSIVYAIGHLSVECVVYHTISAASLAPFTFIAVTTMVWMLLQWNSDGHNPRPGRSTSKQP

SEQ ID NO: 9305 - protein, 297 aa, Zea mays
  VARIANT 262: note = Ancestral polymorphism is L, Derived polymorphism is V
  VARIANT 203: note = Ancestral polymorphism is G, Derived polymorphism is D
  VARIANT 135: note = Ancestral polymorphism is V, Derived polymorphism is D
  VARIANT 2: note = Ancestral polymorphism is P, Derived polymorphism is A
MPSLHERQDIMASVVPELAAAAAVDAIAEWGRPATEITHLVVTTYSGAHMPGVDWLVASLLGLRPTVHRTMLYMNGCSSGCAALRLAKDMAENNRGARVLVACAEVTLTLFRAPHEAHVDTLILQSLFGDGAGAVIVGADPVSVEEPDFEMLSASQTMIPESKHVAAGQLCEDGLHFHPSREIPSLVRENIEQCMVDALSLLGIGGSWNDLFWAVHPGGRAVLDSVEAGLRLEPHKLEASRRVLSEYGNMSGPSVIFVLDELRRQQERKGMGVILGLGPGVSVETIVLQATDSQKKL

SEQ ID NO: 9306 - protein, 149 aa, Zea mays
  VARIANT 3: note = Ancestral polymorphism is T, Derived polymorphism is A
  VARIANT 24: note = Ancestral polymorphism is K, Derived polymorphism is N
  VARIANT 43: note = Ancestral polymorphism is F, Derived polymorphism is V
  VARIANT 66..149: note = Derived polymorphism lacks residues 66 to 149
  VARIANT 70: note = Ancestral polymorphism is V, Derived polymorphism is I
MQTGYGGSFLPGIKQRLLSYIFCKTWNEVPDQTLRVQHLKKKFYFRFQDYVDLIIWKLKSSFNYLRAITVLLARSFSHKTFFSRGPYSMVVDEAQFLDRHHLFVKFGSVDGGVSRSTNQNLAFFAVYNMETTDIVSLHQNSSEDIYAWY

SEQ ID NO: 9307 - protein, 312 aa, Zea mays
  VARIANT 238..312: note = Derived polymorphism lacks residues 238 to 312
  VARIANT 74: note = Ancestral polymorphism is R, Derived polymorphism is W
  VARIANT 49..312: note = Derived polymorphism lacks residues 49 to 312
  VARIANT 26..312: note = Derived polymorphism lacks residues 26 to 312
MLGVSHLRNRRLLSNGFVSLGKEDLQLMYSDGDKAFGTSTDLCIDERLRIASDGIIFVSHMERMVAEILRKMVRKYSGKRPDIIAVAMENTTASFSEHLDAKSSGNFEPSSATSHLSRSPAMSLEGSYKTHPDNLEVDAKETLPEATRTAPDDATTSSNGEAFFSSDLHQPKTLEYLWESFKSPTAVKIARIVNGGKKHNLGKIGIMGKDSAIQSAPAPAKSSKKNKWKPEEIKSLIQMRGEMNGRFQSVKGRMESKKDVESMKTWPYFSAMDRILSQQGESWECFQTADEQDMKAALFQKQSFGDVHGAFA

SEQ ID NO: 9308 - protein, 181 aa, Zea mays
  VARIANT 52: note = Ancestral polymorphism is M, Derived polymorphism is I
  VARIANT 51: note = Ancestral polymorphism is L, Derived polymorphism is R
MERSNTTLALRPSRTVSSILAWTLLPRVPKASMAVPLKLKKRGMPALGWWLMAVGSLRSAFTWSCFFGSASLCSATYSEIQVTGVHGRTVAVWTLLSCTLCFLCAFNLSSKPLYAATFLSIVYAIGHLSVECVVYHTISAASLAPFTFITVTTMCLDAASVELGWPQPPSRSVYFQATMTC

SEQ ID NO: 9309 - protein, 120 aa, Zea mays
  VARIANT 91: note = Ancestral polymorphism is E, Derived polymorphism is D
  VARIANT 75: note = Ancestral polymorphism is V, Derived polymorphism is L
MLCSLQARIAGYALSGGGRGIERVDVSADGGKTWVEARRYQKDNVAYVSDGPQSDKWAWVLFEATLDVPANPEIVVKAVDSAANVQPEKVEDIWNLRGILNTSWHRIKIQRSSCVERSKL

SEQ ID NO: 9310 - protein, 396 aa, Zea mays
  VARIANT 307..396: note = Derived polymorphism lacks residues 307 to 396
  VARIANT 249..396: note = Derived polymorphism lacks residues 249 to 396
  VARIANT 130: note = Ancestral polymorphism is G, Derived polymorphism is W
  VARIANT 128..396: note = Derived polymorphism lacks residues 128 to 396
  VARIANT 7: note = Ancestral polymorphism is G, Derived polymorphism is V
MTSLLLVSQIAAVGLCSDRRRELRADGPATVLAIGTANPPNCVRQEEYADYYFRVTKSEHLTSLKDKLKRICHKSAIKKRYFHHTEELLRGHPAFIDRSMPSLHERQDIMASAVPELAAAAAVDAIAEWGRPATEITHLVVTTYSGAHMPGVDWLVASLLGLRPTVRRTMLYMNGCSSGCAALRLAKDMAENNRGARVLVACAEVTLAIFRAPHEAHVDTLILQSLLGDGAGAVIVGADPVSVEEPDFEMLSASQTTIPETKHVAAGQLCEDGLHFNPSREIPSLVRENIEQCMVDALSLLGIGGSWNDLFWAVHPGGRAVLDSVEEGLMLEPHKLEASRRVLSEYGNMSGPSVIFVLDELRRQQERKGMGVIVGLGPGVVVETIVLQATDSQKKI

SEQ ID NO: 9311 - protein, 194 aa, Zea mays
  VARIANT 83: note = Ancestral polymorphism is K, Derived polymorphism is N
  VARIANT 16: note = Ancestral polymorphism is P, Derived polymorphism is A
MSDKYNQYLSTCVLAPNHTLGNATILPQHCFSAPVIKPSATNVANSRAIGTTLSPPPGVMVPVHNAVPSDLSVKDERELKREKRKQSNRESARRSRLRKQAETEELATQVESLAAENTSLRSEIGRLTESSEKLRLENSALMVKLKDTAEPSPSKAAASPSSPRASAENFLSMIDSANAPSVSRHTEHVGPRLR

SEQ ID NO: 9312 - protein, 147 aa, Zea mays
  VARIANT 68: note = Ancestral polymorphism is T, Derived polymorphism is R
  VARIANT 39: note = Ancestral polymorphism is A, Derived polymorphism is V
  VARIANT 33..147: note = Derived polymorphism lacks residues 33 to 147
  VARIANT 28: note = Ancestral polymorphism is S, Derived polymorphism is L
MAHVPLKLKKRGMPALGWWLMAVGSLRSAFTWSCFFGSASLCSATYSEIQVTGVHGRTVAVWTLLSCTLCFLCAFNLSSKPLYAATFLSIVYAIGHLSVECVVYHTISAASLAPFTFITVTTMVWMLLQWNSDGHNPRPGRSTSKQP

SEQ ID NO: 9313 - protein, 191 aa, Zea mays
  VARIANT 12: note = Ancestral polymorphism is V, Derived polymorphism is G
  VARIANT 143: note = Ancestral polymorphism is A, Derived polymorphism is V
MAASNSSALLPVLALAGVVFFLVAPAVVAEATAPQGLEFHVGGPRGWRVPDANTSYGWWAMNNRFRVGDHLYFKYANDSVLLVDRTAFDACNTTEPLATFADGATKFVLDRPGFFCFISGKPGHCEEGQRLIVRVMVQPAIVATPGPASAPATSAPQPGHGGGHSSGAATAVAAAAGVAAVAALAVFVSLV

SEQ ID NO: 9314 - protein, 230 aa, Zea mays
  VARIANT 6: note = Ancestral polymorphism is G, Derived polymorphism is S
MVLSGGLVVPWLAAVAALAITAAPLGADAYKNYTVGDDKGWYDGLSLPGVDYQAWADGKNFSLGDFLIFNTDKNHSVVQTRNVTLYESCDYNDSGPDDTVEWAAAPPEFSKDAVTVAVPLLDEGRAYFFSGNYDGEQCESGQRFAVDVAHGQGLPPDLRPPVADAPAPSSAGPADGAAALDFSHPKNVTTPSATDDDDEQLGGGSASSSLRSALPVTATLLITLLFAFAV

SEQ ID NO: 9315 - protein, 190 aa, Zea mays
  VARIANT 58: note = Ancestral polymorphism is I, Derived polymorphism is L
MAAHQDSAASGSGPPRRPRVLLAASGSVAAIKFEVLCRSVAEWADVHAVATASALEFIDVASFPGGVPLYTDDQEWSSWKRVGDKVLHIELRRWADVLVIAPLSANTLAKVAGGLCDNLLTCVVRAWDYSKPVYVAPAMNTFMWGNPFTARHLAVLRDLGMSVVPPVNGAMAEPSEICKTLMLFFGPQHL

SEQ ID NO: 9316 - protein, 503 aa, Zea mays
  VARIANT 79: note = Ancestral polymorphism is D, Derived polymorphism is Y
  VARIANT 72: note = Ancestral polymorphism is V, Derived polymorphism is G
  VARIANT 36..503: note = Derived polymorphism lacks residues 36 to 503
MAKKDNGKALISIVGGILGKEQRSIAFGGANIKEEGVSAGLRIQFEEWVEKEEGFLLPSFEPQIIPSRLDVVIGDHYLYLKFGVGHFGMDENGDEIRDLKVAKEEQDIGFYAGFVGATYFLGRTISAVPWGIFADKYGRKPCIVISILSVIVFNTLFGLSTTYWMAIVTRGLLGLLCGILGPIKAYASEVSRKEHQALGISFVTSSRAIALVIGPSIGGFLAQPAQKYPKLFSEESIFGRFPYFLPCFVISVLAVGSCIACIWLPETLHFHDDEKAECIQELESQVGGSKSTENLLKNWPLMSAIILFSIFSLHDTAYLEIFSLWAVSSRKFQGLSFTSQDVGTVFAFSGLSVLVYQLTIYPLLSKYFGPVKIFRPAVILSIILLITYPFMSNLHGLELKILVNIASILKNVFAATITIACNILQNTAVTQKQRGTANGISVTMMSMFKAAAPAAAGIIFSWAQKHIYGLFLPGNQILFLTLNMVSIIGLVLTFKPFLSQPIQ

SEQ ID NO: 9317 - protein, 268 aa, Zea mays
  VARIANT 218..268: note = Derived polymorphism lacks residues 218 to 268
MATAAVTMTMATHNPRARAPLRVCAAWDMNPGAATVATPKPSKAKAKPPPPPATTTPARPPPLTHADLFARSSEAQGGVKKSTYMGFEKWWLPPAPVVKKPRSLYSAVSLAYLGDCIYELYARRHFFFPPLSINEYNKRVMDVVKCESQDLLLNKLLGEDFLTEEERDILRWGRNIVSSKTRTRKRAGIAVYNRASSLETLVCNTLTLYWISLPHKFQTVGTTDVSIGLHKWCLITAYCRRAALKFPENNPRFGHTSTTCNTVNRSEV

SEQ ID NO: 9318 - protein, 232 aa, Zea mays
  VARIANT 182: note = Ancestral polymorphism is S, Derived polymorphism is P
MMMSSENSSAAGAADDESRLEPWRELFRDRDIYDVISKAILVAATDSPQEFRRRRDGIVEQIYTAPTVPVPQGRAAGERSGRAALEVSDKGSKVASCTVVAPADEGNNSKKKGTAAAHHQHANGNGDSADTDAFGASGMDWLQSLAEEMDAETQQIDEVLRIKEILLNHHELAWFFVIVAQSSDTLFDSLRRLQLMQLTADKIKSTEIGGAIAAMRKHKSHKIRMLVHKIVK

SEQ ID NO: 9319 - protein, 504 aa, Zea mays
  VARIANT 242: note = Ancestral polymorphism is G, Derived polymorphism is W
MSTTTLQLVPWPPEPARAAVLLVAAVVCLWVLLSRRRAAGGSKDKERAARLPPGSFGWPLVGETLDFVSCAYSSRPEAFVDKRRLLHGSAVFRSHLFGSATVVTSDAEVSRFVLHSDARAFVPWYPRSLTELMGESSILLINGSLQRRVHGLVGAFFKSPQLKAQVTADMQRRLAPALAAWKVRCASAPPLRIQDHAKTQIVFEILVRGLIGLEAGPEMQQLKHQFQEFIVGLMSLPIKLPGTRLYRSLQAKKRMATLIQGIIQEKRRRRRAALEDGGEGEGEAGPPRDVIDVLISGGDELTDELISDNMIDLMIPAEDSVPVLITLAVKYLSECPLALQQLEEENMQLKRRKTDVGETLQWTDYMSLSFTQHVITETLRMGNIINGIMRKAVRDVEVKGHLIPKGWCVFVYFRSVHLDDKRYDEPYRFNPWRWKEKDTSTMGFTPFGGGQRLCPGLDLARLEASIFLHHLVTSFRWVAEEDHIVNFPTVRLKRGMPVRLTSKD

SEQ ID NO: 9320 - protein, 83 aa, Zea mays
  VARIANT 62: note = Ancestral polymorphism is Q, Derived polymorphism is R
  VARIANT 42: note = Ancestral polymorphism is D, Derived polymorphism is N
  VARIANT 28: note = Ancestral polymorphism is R, Derived polymorphism is K
  VARIANT 27: note = Ancestral polymorphism is F, Derived polymorphism is L
  VARIANT 26: note = Ancestral polymorphism is M, Derived polymorphism is T
  VARIANT 25: note = Ancestral polymorphism is A, Derived polymorphism is V
  VARIANT 3: note = Ancestral polymorphism is S, Derived polymorphism is C
MASTFIGNSTSIQEMFRRVSEQFTAMFRRKAFLHWYTGEGMDEMEFTEAESNMNDLVSEYQQYQDATADEEAEYEDEEAIQDE

SEQ ID NO: 9321 - protein, 222 aa, Zea mays
  VARIANT 199: note = Ancestral polymorphism is C, Derived polymorphism is W
  VARIANT 160: note = Ancestral polymorphism is P, Derived polymorphism is A
  VARIANT 147: note = Ancestral polymorphism is M, Derived polymorphism is V
  VARIANT 144: note = Ancestral polymorphism is G, Derived polymorphism is R
  VARIANT 140: note = Ancestral polymorphism is G, Derived polymorphism is R
  VARIANT 127..222: note = Derived polymorphism lacks residues 127 to 222
  VARIANT 124: note = Ancestral polymorphism is A, Derived polymorphism is D
  VARIANT 119: note = Ancestral polymorphism is V, Derived polymorphism is I
MREILHIQGGQCGNQIGSKFWEVVCDEHGIDPTGRYVGTSDLQLERVNVYYNEASCGRFVPRAVLMDLEPGTMDSVRTGPYGQIFRPDNFVFGQSGAGNNWAKGHYTEGAELIDSVLDVVRKEAENCDCLQGFQVCHSLGGGTGSGMGTLLISKIREEYPDRMMLTFSVFPSPKVSDTVVEPYNATLSVHQLVENADECMVLDNEALYDICFRTLKLTTPSY

SEQ ID NO: 9322 - protein, 468 aa, Zea mays
  VARIANT 425..468: note = Derived polymorphism lacks residues 425 to 468
  VARIANT 275..468: note = Derived polymorphism lacks residues 275 to 468
  VARIANT 245..468: note = Derived polymorphism lacks residues 245 to 468
  VARIANT 236: note = Ancestral polymorphism is T, Derived polymorphism is M
  VARIANT 172..468: note = Derived polymorphism lacks residues 172 to 468
  VARIANT 136..468: note = Derived polymorphism lacks residues 136 to 468
  VARIANT 58: note = Ancestral polymorphism is P, Derived polymorphism is S
  VARIANT 40: note = Ancestral polymorphism is L, Derived polymorphism is P
  VARIANT 32..468: note = Derived polymorphism lacks residues 32 to 468
MASPPHSVEVRTPGDSPRPTAALLSPSVAAPQPSNASRLLLLLTAAVAAATAFVLLRPPITVVTAASATARPLSKLSKPVVLLISSDGFRFGYQYKAPLPHIRRLFANGTSAAEGLIPVFPTLTFPNHYSIVTGLYPSSHGIINNYFPDPISGDYFTMKNHDPKWWLGEPLWATAAAQGVLSATFFWPGSEVTKGSWNCPDKYCRHYNGSVPFEERVDTILGYFDLPPNQMPQFMTLYFEDPDHQGHQVGPDDPSITDAVVHIDEMLGRLIAGLEARGMFEDVNIILVGDHGMVGTCDRKLVFLEELAPWIELKSDWVLSVTPLLAIRPPDGVSPAEVVAKMNEGLGSGKVKNGEYLKMYLKEELPTRLHYSESYRIPPIIGLVGEGYKIEMKRSKRNECGGAHGYDNAFFSMRTIFAAHGPRFQGGRTVPSFENAEIYNVMASILNLKPAPNNGSASFPGTILLPNK

SEQ ID NO: 9323 - protein, 80 aa, Zea mays
  VARIANT 74..80: note = Derived polymorphism lacks residues 74 to 80
  VARIANT 66: note = Ancestral polymorphism is P, Derived polymorphism is S
  VARIANT 48: note = Ancestral polymorphism is T, Derived polymorphism is M
  VARIANT 26: note = Ancestral polymorphism is V, Derived polymorphism is F
MFNVGIGVKECVVTSGVGSRVVALRFHGCSRFGAYCSQEPARCLLDSTKVEFSYDADTGLVSVALPMLEQELYQWTLEIL

SEQ ID NO: 9324 - protein, 112 aa, Zea mays
  VARIANT 100: note = Ancestral polymorphism is T, Derived polymorphism is I
  VARIANT 96: note = Ancestral polymorphism is T, Derived polymorphism is A
  VARIANT 81: note = Ancestral polymorphism is A, Derived polymorphism is T
  VARIANT 80: note = Ancestral polymorphism is M, Derived polymorphism is R
  VARIANT 78..112: note = Derived polymorphism lacks residues 78 to 112
  VARIANT 70: note = Ancestral polymorphism is A, Derived polymorphism is V
  VARIANT 65: note = Ancestral polymorphism is L, Derived polymorphism is R
  VARIANT 60: note = Ancestral polymorphism is S, Derived polymorphism is F
  VARIANT 59: note = Ancestral polymorphism is C, Derived polymorphism is R
  VARIANT 58..112: note = Derived polymorphism lacks residues 58 to 112
  VARIANT 54: note = Ancestral polymorphism is A, Derived polymorphism is V
  VARIANT 50: note = Ancestral polymorphism is A, Derived polymorphism is T
  VARIANT 49: note = Ancestral polymorphism is A, Derived polymorphism is T
  VARIANT 48: note = Ancestral polymorphism is L, Derived polymorphism is F
  VARIANT 43..112: note = Derived polymorphism lacks residues 43 to 112
  VARIANT 40: note = Ancestral polymorphism is M, Derived polymorphism is V
  VARIANT 16: note = Ancestral polymorphism is V, Derived polymorphism is I
MEHGPASEDDDDGGLVHGDLTTSNMMIKNSNNQLVALILMINQMEKILAAYRKASKQWCSTQNKLAQGMAWSCWPLWQRMAFVASCTDVSSDFLSTLRKTMRQRGRKRTMVG

SEQ ID NO: 9325 - protein, 215 aa, Zea mays
  VARIANT 17: note = Ancestral polymorphism is H, Derived polymorphism is R
  VARIANT 18: note = Ancestral polymorphism is Y, Derived polymorphism is N
  VARIANT 52..215: note = Derived polymorphism lacks residues 52 to 215
  VARIANT 65: note = Ancestral polymorphism is C, Derived polymorphism is Y
  VARIANT 68: note = Ancestral polymorphism is N, Derived polymorphism is T
  VARIANT 72: note = Ancestral polymorphism is L, Derived polymorphism is M
  VARIANT 84: note = Ancestral polymorphism is S, Derived polymorphism is L
  VARIANT 86: note = Ancestral polymorphism is P, Derived polymorphism is L
  VARIANT 89: note = Ancestral polymorphism is S, Derived polymorphism is L
  VARIANT 94: note = Ancestral polymorphism is T, Derived polymorphism is N
  VARIANT 100..215: note = Derived polymorphism lacks residues 100 to 215
  VARIANT 110: note = Ancestral polymorphism is Y, Derived polymorphism is C
  VARIANT 114: note = Ancestral polymorphism is S, Derived polymorphism is L
  VARIANT 115: note = Ancestral polymorphism is V, Derived polymorphism is M
  VARIANT 118: note = Ancestral polymorphism is E, Derived polymorphism is G
MLRPFLDADATITSVSRNYSSSLGCLTSALPLRMRCGRTVAPVVARPHLQSQAHYLIDVEEVHRCYRNGFVLVVFFGDKSTGGSSPASSSPSRTASPRRWPTPRPSTRKYSLYSVLMGLILAWNIFQNHFGANIVVTRGPLSCRDGSYPPYYAANITSRYFFYCKNPQCRLQAKHKGITSQIEIENLSMLKTKNVKVKDIDVCGTLGACFLCSQT

SEQ ID NO: 9326 - protein, 287 aa, Zea mays
  VARIANT 189: note = Ancestral polymorphism is V, Derived polymorphism is E
MASPSTEAPLPHPTIRDVMGHDDDDDYYGDHTIAEEEEGDEEEEEWDMSKRMSRLSLEGSDGGDADDEAGVDEEEDDEFEVPERSDVNAATAYRAWPPYEDPQQAPSSASLPGTPDRGAQAAGWPGASAKEYASETEARWPPGADGRGGRRQRQHQRRWQRMGREAWLERAWRMRKQRRQLQEEVVPVVVLGGGGDSPASRGGVAMDMEEVRACRDLGLDLPCDWTVEIPSYYALSGVDTASSGGNSPASAGSWRISSPGDDPKDVKARLKVWAQVVALASASRLGS

SEQ ID NO: 9327 - protein, 120 aa, Zea mays
  VARIANT 75: note = Ancestral polymorphism is E, Derived polymorphism is K
  VARIANT 54: note = Ancestral polymorphism is G, Derived polymorphism is R
  VARIANT 50..120: note = Derived polymorphism lacks residues 50 to 120
  VARIANT 43: note = Ancestral polymorphism is C, Derived polymorphism is S
  VARIANT 37: note = Ancestral polymorphism is E, Derived polymorphism is K
  VARIANT 30: note = Ancestral polymorphism is E, Derived polymorphism is A
  VARIANT 23: note = Ancestral polymorphism is V, Derived polymorphism is I
  VARIANT 12: note = Ancestral polymorphism is V, Derived polymorphism is M
  VARIANT 4: note = Ancestral polymorphism is R, Derived polymorphism is H
MTNRLLSRKQFMLEVIHPGRPNVSKAELKERLAKIYEVKDPDCIFVFKFRTNFGGGKSTGFGLIYDNLEAAKKFEPKYRLIRNDLATKVEKSRKQMKERKNRAKKIRGVKKTKAGDAKKK

SEQ ID NO: 9328 - protein, 281 aa, Zea mays
  VARIANT 103..281: note = Derived polymorphism lacks residues 103 to 281
  VARIANT 23: note = Ancestral polymorphism is E, Derived polymorphism is D
MGRHSCCYKQKLRKGLWSPEEDEKLMNHITKHGHGCWSTVPKLAGLQRCGKSCRLRWINYLRPDLKRGAFSEEEEDLIVELHAVLGNSNEFGNKNGASNNSLWFNHNETSGSTISTVMPPVSPSTLSTSTGLNRSPDNPHSGGTGIQSTQFYWDTANPSSCSSRGSSGSNGLGFELQSTSSLLESSVFPWTELTPDKNSQVHLGEELKWPDLLHGTFTDTPATMQNLSQSLYEDVIKAESQFNIEGLCAAWSQNLQPQQHLQVSDLYDKDLQRMSLSFENI

SEQ ID NO: 9329 - protein, 140 aa, Zea mays
  VARIANT 65: note = Ancestral polymorphism is Y, Derived polymorphism is N
  VARIANT 60: note = Ancestral polymorphism is M, Derived polymorphism is K
  VARIANT 32: note = Ancestral polymorphism is A, Derived polymorphism is V
  VARIANT 31: note = Ancestral polymorphism is T, Derived polymorphism is I
MNCYGSWTEQARSLSARSNIYIGNLFYLSSTAGPVTVPLSILHGATYFLGRAISAVPWGMFADKNGRKPGIVISILSVIVFNTLFGLSTTYWMAIVTRGLLGLLCGILGPIKVTSSRAIALVIGPAIGGFLAQVKIMEFR

SEQ ID NO: 9330 - protein, 421 aa, Zea mays
  VARIANT 24: note = Ancestral polymorphism is P, Derived polymorphism is L
  VARIANT 72: note = Ancestral polymorphism is V, Derived polymorphism is A
  VARIANT 75: note = Ancestral polymorphism is A, Derived polymorphism is V
  VARIANT 128: note = Ancestral polymorphism is G, Derived polymorphism is S
  VARIANT 154: note = Ancestral polymorphism is R, Derived polymorphism is S
  VARIANT 199: note = Ancestral polymorphism is S, Derived polymorphism is L
MASGEGWEAAVRAEVGAVAWWDDLDSADLRARFKAFTGQRSDWPQPTVLFWKDLLLRVARRLRVCSAPAHHVTSAWFARPGGLTPLCLPQVLEEMRADGDVLLKSELIDPSSTNLHQLVRRVRLMTISSRKAVWQEDILVFKLLIEERAADIARQLSDSHWTSTCVVTISKFNSFFVDMDDAHIALCFLTQHGKARYLLGRKQDPIEACSLFSRALCYSAEARSQIPTFGCWMLFSVENYVTQSLCKNLLTCKELSFDSSRRRALASFKSGDKLAAYRYVRQSKLFSQSRSRCTQLLERIEEVISLIASAESNKKVYEAIQIGILAMKDNTVSIDEVNIHMKEIDELVAAQREVDAALVPLQSLDDEGDIDEEFSKLEAELQDDVPHIHVQEPMAPSNEESPDEVVESLSHNMSRIRLEPI

SEQ ID NO: 9331 - protein, 163 aa, Zea mays
  VARIANT 127: note = Ancestral polymorphism is T, Derived polymorphism is P
  VARIANT 67: note = Ancestral polymorphism is P, Derived polymorphism is L
MGRARTGGGGRKPSAPRPALGLPGMLMIHEIEEREVGGLGWSGLQLPLPQHEPRRVRVPKNQVILQLAVHLRARIQSIEHFNFTPPQESDKKTPGRQRGAYPSSGRSTGVMLPPERARASVTSTSPTPCRLDSACAVQRPLMPPPTTTQSAYSCAPVEAGASA

SEQ ID NO: 9332 - protein, 159 aa, Zea mays
  VARIANT 43: note = Ancestral polymorphism is V, Derived polymorphism is G
  VARIANT 128: note = Ancestral polymorphism is R, Derived polymorphism is W
MVAATAMATAASAASPLLNGSRRLRGSAIADSGYSALSRRHGVGDVLVTEARARSGGNITPVERPEEGFQGREESVEEFVRRSLGAEVFERLIEPFCSGVYAGDPSKLSMKAAFGKVWRLEEAGAVFRRQKTVASFRKGLAMLPNSITSRFAFIVLYIY

SEQ ID NO: 9333 - protein, 181 aa, Zea mays
  VARIANT 133: note = Ancestral polymorphism is K, Derived polymorphism is E
  VARIANT 135: note = Ancestral polymorphism is R, Derived polymorphism is C
  VARIANT 140: note = Ancestral polymorphism is A, Derived polymorphism is T
  VARIANT 165..181: note = Derived polymorphism lacks residues 165 to 181
MAECKDDDSGRRSPSSSMDSSTHPPALSTASSASRRPPERRDQLSPDLQLGLSLSPASSALLVAETNNSIVPSTPRNQALPDWPPIKPFLRSALTASARRRRTLFVKVYMEGVPIGRKLDMLLLDGYSSLLAKLCHMFKASITYADAVEYHQRVPHEKAAHVLTYEDHDGDWMMVGDVPWE

SEQ ID NO: 9334 - protein, 564 aa, Zea mays
  VARIANT 388..564: note = Derived polymorphism lacks residues 388 to 564
  VARIANT 94: note = Ancestral polymorphism is P, Derived polymorphism is L
  VARIANT 55: note = Ancestral polymorphism is L, Derived polymorphism is P
  VARIANT 35: note = Ancestral polymorphism is A, Derived polymorphism is T
MSTGGGTTLRELTALLSTLRRARLQHPAHAAQLHARLLISAGARPHPHPVLLTQLVSLYAAAGRLADALRAFRAHLPSANLHTYAVLVSAFARPYPDLAFSLFSGSRRQLRPSPHVISAVLAACAGLQPLCGRQVHTCAAKVVPPGDVFVYTGMVDVYAKGGDMESSRKVFDEMLNRGAASWNALLVGYARNKMCLEALSVFRELAAQGREVSLDQVSVSSVLSACAVAGALNYGRQVHACATKVGLELSAVCVSNALLDMYTRCGCSRESSALLNAVGCRDVVTWNIIIRSCIHDNRFKEACVLFRSMVRNGTLPDDVAFATVLQASACMSAWAIGASMHASVVKTGFLYSDGVTSSLITMYSKCGCLDDAHRAFVGAKDHLHIMSWTAMITALQQHGHGMQAIDVFENMLENGIPPDHITFVSVLSSCSHSGLVEQGRRYFDSMTRVHKITPQNEHYACMVDMFGRAGLLTEAKRFIHQMGPKQDASVLGALLWACMNCRDLEMGKEVAKKLFVIEPGNTGNYVLLANIYTSHGRLEEAKEVRRWMMFQELRKEKGCSLINN

SEQ ID NO: 9335 - protein, 50 aa, Zea mays
  VARIANT 1: note = Ancestral polymorphism is M, Derived polymorphism is L
MCDIDYALDISIVFLIFLKATVLIVTAFLSRRIFHTDPLFLFRFVIFYHY

SEQ ID NO: 9336 - protein, 57 aa, Zea mays
  VARIANT 11: note = Ancestral polymorphism is I, Derived polymorphism is N
MKEGTANCVDILIAIILPPLGVFLKFGCKVEFWLCLLLTFLAYLPGIIYAIYAITKD

SEQ ID NO: 9337 - protein, 122 aa, Zea mays
  VARIANT 98: note = Ancestral polymorphism is L, Derived polymorphism is P
  VARIANT 65..122: note = Derived polymorphism lacks residues 65 to 122
MGSWVRTITTPFRKACTIFGPQKDGGGGGKRSQQPNPAEDPESDSIVYGCSDDGTARRRRRREGQAARGGDGVRLRRRAGHVVHARPDNKDWGSQWQLVTAGNCPFMHFPRATKVEMQTWCT

SEQ ID NO: 9338 - protein, 170 aa, Zea mays
  VARIANT 34: note = Ancestral polymorphism is A, Derived polymorphism is V
  VARIANT 58: note = Ancestral polymorphism is A, Derived polymorphism is V
  VARIANT 63: note = Ancestral polymorphism is R, Derived polymorphism is S
  VARIANT 67: note = Ancestral polymorphism is R, Derived polymorphism is C
  VARIANT 138: note = Ancestral polymorphism is G, Derived polymorphism is A
  VARIANT 149: note = Ancestral polymorphism is T, Derived polymorphism is I
  VARIANT 159: note = Ancestral polymorphism is P, Derived polymorphism is Q
MDYSTQLLSDLLTTHIGHNLYESAKRLRLPELPAFALEHLPNRNSLIYGDLYGISKEASTIYRATLRYEGFSEIMATLTKIGFFDAANHPLLEDTNHPTHKGFLDELLNNISTTNTDFDIEASGGYDDELIARLLKLAHCKDTEIAVKTVKTIKLVLIPCYKIHIFYELL

SEQ ID NO: 9339 - protein, 88 aa, Zea mays
  VARIANT 22: note = Ancestral polymorphism is G, Derived polymorphism is E
MGRGKSSFFASLFGCKKHGSGGRQDQVEAAAATRPPPQGYYHGTRVRPSDDDEYYGKNWYADRDINQKASEYIERMHRVMLISQHDDE

SEQ ID NO: 9340 - protein, 134 aa, Zea mays
  VARIANT 60..134: note = Derived polymorphism lacks residues 60 to 134
  VARIANT 76: note = Ancestral polymorphism is G, Derived polymorphism is C
MEMNEERKVSLLGLADILSASIGGFSWAPLISKICKNKVEAEAWFTGLSALICRGQHGSQVQHIDGIRIAGLPFDGARESSLSGSSTFSSDSFENKLSSLARLAKMEVEYRCIQIIEIGLPMGKHIRMRDTPGV

SEQ ID NO: 9341 - protein, 329 aa, Zea mays
  VARIANT 303..329: note = Derived polymorphism lacks residues 303 to 329
  VARIANT 300: note = Ancestral polymorphism is C, Derived polymorphism is W
  VARIANT 229: note = Ancestral polymorphism is S, Derived polymorphism is L
  VARIANT 103..329: note = Derived polymorphism lacks residues 103 to 329
MKTFDPWPVFFHREWKRNCPFLTGFTITGFIITKMTANFTEEDLKNSSSFRNTRSADQPAQRELSPRTKNQAKNLWTKPPRLDACPIESKFWGTYAQHDLLSWAEAEFLHWWIPKDCPLTPSSKATICEHICSLPSAVNTFWFIYLLARETYMTRICFDSYAIVSDMSAAGLGLNKFCYAGLITAFKNKTPTTEETMAKILDFVGQSKGWQYVERVSKDIAENIMMNVLEEELYNLPTAEYVNRRGGFVFKQHTVYHVALQACAELRSKETLEALLEMFNKDNRDGSTYDAYMVMQAMRCYLRCGDIDSAVKMFEEYSSSRSPPAELYA

SEQ ID NO: 9342 - protein, 480 aa, Zea mays
  VARIANT 151: note = Ancestral polymorphism is Y, Derived polymorphism is C
  VARIANT 78: note = Ancestral polymorphism is L, Derived polymorphism is I
MASDPAPDDAAAAVNGHGNDNGHGNGPSPSKRPRAVISEAEIRVEFAHHDAAVARVNNGSFGCCPASVLAAQAHWQRLFLAQPDAFYFHVLQQGLLRSRAAVAEVVGAGDVSEVSLVDNATTAAAIVLQHAAWSFAEGHFARGDAVLMLHYAYGAVKKSIHAYVARAGATVVEVPLPFPVASADAIIAEFRAALAVAKEGGRRVRLAVIDHITSMPSVVIPVKELVAICREEGVDKVFVDAAHSIGQVPVDVRDIGADFYTSNLHKWFFCPPAVAFLHTRKDDPIASQLHHPVVSHEYGNGLPMESGWIGTRDYSAQLVVSEAIDFVNRFEGGIEAIRNRNHEKVIEMGRMLAEAWGTFLGSPPELCGSMVMVGMPGCLGVESDDDAMRVRTMLRKDFQVEVPVYYNSRRVEGQEMTKDKNGDPVTGYVRISHQVYNVTEDYERLRDVVNKLVSEGFTSSKLRPSEKVHSQLKILAYLVP

SEQ ID NO: 9343 - protein, 859 aa, Zea mays
  VARIANT 804..859: note = Derived polymorphism lacks residues 804 to 859
  VARIANT 786..859: note = Derived polymorphism lacks residues 786 to 859
  VARIANT 784..859: note = Derived polymorphism lacks residues 784 to 859
  VARIANT 740..859: note = Derived polymorphism lacks residues 740 to 859
  VARIANT 474: note = Ancestral polymorphism is A, Derived polymorphism is V
  VARIANT 382..859: note = Derived polymorphism lacks residues 382 to 859
  VARIANT 377..859: note = Derived polymorphism lacks residues 377 to 859
  VARIANT 371..859: note = Derived polymorphism lacks residues 371 to 859
  VARIANT 354..859: note = Derived polymorphism lacks residues 354 to 859
  VARIANT 81..859: note = Derived polymorphism lacks residues 81 to 859
  VARIANT 48..859: note = Derived polymorphism lacks residues 48 to 859
MRKRRVLQANTFNHVSITMEDPTYSPEVVQPTADATKPDGSSVTACNWVIPEFVRTPFPPASTPAEVVGSFDMSTESIRRKHHVLRGERQAILAHRNQQFQASIARNVTTSNGDTIGDAEINNNDDDDDEDVIFGEDDDDDEGYIFASQYEETSEDIEIDGTQHESTGTDVPDPYKKVYNNLPEETHMLKPVPNCGYCTGKKFEYEPPGFCCRGGKVDQLAPLDTPPQLRRLWDSADSDAKHFRDNISMTTNVGDSGIYTFRAQGMMYHNIKSFGKEESPTRLCVSARDYYCYKFHIRLGDRLRADLYQGLVDSMLNGYIRAEKVGKRTMLSTSFVGGPRDMRCRYMDAMALVRKFGKSGIFLTMTCNPNWDEIRREILPRQTTQDRPDLVACGSIKAVKYLFKYIYKGHDRASVVMRDVSKADDDVDEIKQYKDARWVTPLEVLWRIYDFELSQNSPPMMQLQLHLPNMHMVAFHERQMLEQVVNHSVLIGHCSRHILKQIGYMRGLVASYIVTSLSGTLGRVEHVAVNGKDIKTFPLPPSIDAYDDAVGTAREVYEEEGIEPAAGDVALKDSLSEEQRVAYDKILSTIDTDQGKLFFVDGPSGTRKSYLYRVMLAMLCSQGKIAVATATSSVAASIIPRGRTAHSRFKIPLTIDDGVLVTNMRAKNDPWFVEYLLHVGGGTEDTNSDGDTCLPDDLKIGCPVILRRNIDPANGLCNGTRLVVRGFQRNSIDTEIILGQHVGKRTFLPRIPLCPSDEEMFPFQFKRKKFHVRLSFAMTINKAQGQTIPNVGVYLPEPVFSHGQLYVALSRAMARSNIKILAILVVDGNKRSRKGVRKNPTVGCETCTKNIVYKEVLTN

SEQ ID NO: 9344 - protein, 224 aa, Zea mays
  VARIANT 108: note = Ancestral polymorphism is T, Derived polymorphism is R
  VARIANT 111: note = Ancestral polymorphism is F, Derived polymorphism is I
  VARIANT 139: note = Ancestral polymorphism is V, Derived polymorphism is L
  VARIANT 147: note = Ancestral polymorphism is T, Derived polymorphism is I
MAAEKPAPVRVLYCGVCGLPAEYCEFGPDFQRCKPWLRAHAPGVYPDDLVAGPSSSGGAGGDRDVDKVGERLQGVGISDGSSSAAGDASASKPEEVKRLPGGKLKKKTVFFICGTMNFVSDIVPFQLQEKQEVVIEKIVRNKRKCVTVVKGLELFGVKLSDASKKLGKKFATGASVVKGPTEKEQIDVQGDISYDIVEFITDTWPDVPESAIFFIEDGRKVPAA

SEQ ID NO: 9345 - protein, 336 aa, Zea mays
  VARIANT 69: note = Ancestral polymorphism is G, Derived polymorphism is D
MSSNGKPTPQPPAGGNGPPKMYQRPIYRPQQAPAKRRRGGRSCPFSCCCCFFWTALVVLLLAFLAAVAGGAFYLLYRPQRPAFTLTAARVTRLSLSPSATAPALSDAIDVTLTARNPNRKLAYLYDDFAVTAATAANAVPLGEASAPGFAHGAGNVTVIRATVSASALAVDPAAAASDVKRSGEFTIALDLETRAGVRVGALKTKKIGILVHCDGVKVAAPAPAPAAPAKSKKKLAKAAVAAAVAPAADAPAPAASAAVDDAPAPPAAATSVARVCQVPGRPDAYNVVFYQFIHGDDAYHNACFKIAKLRRRAGMGFWVSSVKVVNHSQQQDHASD

SEQ ID NO: 9346 - protein, 74 aa, Zea mays
  VARIANT 9: note = Ancestral polymorphism is K, Derived polymorphism is N
  VARIANT 17: note = Ancestral polymorphism is C, Derived polymorphism is Y
  VARIANT 22: note = Ancestral polymorphism is Q, Derived polymorphism is P
  VARIANT 23: note = Ancestral polymorphism is Q, Derived polymorphism is H
MFVRWLLSNGCFVVANCVHALQQMWALEAANLEAERLRHCIANHWIKEFSEWSQCMFLSWHQSSFHLIITKYLT

SEQ ID NO: 9347 - protein, 358 aa, Zea mays
  VARIANT 309: note = Ancestral polymorphism is V, Derived polymorphism is M
  VARIANT 304..358: note = Derived polymorphism lacks residues 304 to 358
  VARIANT 292: note = Ancestral polymorphism is S, Derived polymorphism is L
  VARIANT 216: note = Ancestral polymorphism is E, Derived polymorphism is K
  VARIANT 74..358: note = Derived polymorphism lacks residues 74 to 358
  VARIANT 66: note = Ancestral polymorphism is I, Derived polymorphism is N
  VARIANT 48..358: note = Derived polymorphism lacks residues 48 to 358
MEGPPPPPWPAAKMAWEPDLLSHYRARMIWKVPDILSPLPRAASGSASATWRSTADLGAHYEANNNVLASFASQLLANAPALPWDDRAGGRTPSDEMDDELYGVAGCDSHVVASLRCPSQSRAMAVWSSSKKSYDICTSAGGSVTVPAHDTYHLAGAGLSNEGGLHYPLAACSGANASAVATRELSLTLCSNSIASSNSTLNTTELRLEEAKSLAEKLCDGPLSSAANLWILRASMEINSLATASGSSPLNKENLSSLFDLFGTCRHRLLALPRPSLKLMQYCIELEVSLASLGNHGALTNARRLYDSVVDMYPQEREVWRSYYSLELKMGTSESVNAVYARARKVLGDSTVHAYPRA

SEQ ID NO: 9348 - protein, 130 aa, Zea mays
  VARIANT 26: note = Ancestral polymorphism is S, Derived polymorphism is R
  VARIANT 27: note = Ancestral polymorphism is Y, Derived polymorphism is C
  VARIANT 57: note = Ancestral polymorphism is N, Derived polymorphism is I
MFLAPGSPPSSCSVFLYPLFPRLLVRCARRIFASSTEIYNKNMELRRDSQVPYSIFNLIEGCKIHGVVRELIPVKAMATENKKKMAFTFSRSGDNLNFVQSSTDMFRAKDYSQWEEENTVSKAIMSKKKH

SEQ ID NO: 9349 - protein, 1335 aa, Zea mays
  VARIANT 370..1335: note = Derived polymorphism lacks residues 370 to 1335
  VARIANT 299..1335: note = Derived polymorphism lacks residues 299 to 1335
  VARIANT 11..1335: note = Derived polymorphism lacks residues 11 to 1335
MHELGGKEQPYEGEQSREHTARRASSIAQSRGGERFVSAEARIFDAATAAMPESWRPAEANASSQPAAGTSGPSAQSPGNDAKGRAAGETPGAAEAAATRVPFHKLFAFADSTDVALMLLGALGAVANGAAMPFMTVLFGNLIDAFGGALSIHDVVNRVSMVSLDFVYLAIASAVASFVRKSTFSEVTCWMITGERQAARIRNLYLKTILRQEIAFFDKYTSTGEVVGRMSGDTVLIQDAMGEKVGKFIQLVVTFFGGFIVAFAQGWLLTLVMMATIPPLVVAGAVMSNVVTKMASLGQAAYAESSVVVEQTIGSIRTVASFTGEKRAVEKYNKSLKSAYKSSVREGLATGLGMGTVMLLLFCGYSLGIWSGAKLILEKGYTGAKVMNVIFAVLTGSLALGQASPSMKAFAGGQAAAYKMFETINRAPEIDAYSTTGRKLEDIRGEIEFRDVHFSYPTRPDEPIFRGFSLAIPSGTTIALVGQSGSGKSTVISLIERFYDPQLGDVLIDGVNLKEFQLRWIRSKIGLVSQEPVLFAASIKENIAYGKASATDQEVRAAAELANAAKFIDKMPQGFDTSVGEHGTQLSGGQKQRIAIARAILKDPRILLLDEATSALDAESERIVQEALDRVMSNRTTVIVAHRLSTVRNADTIAVIHQGTLVEKGPHNELLRDPEGAYSQLIKLQEANQQNNRKGDGNARLGKQMSMNKSASRRLSRDNSSHHSFSVPFGMPLGIEIQDGSSNKLCDEMPQEVPLSRLASLNKPEIPVLVLGSIASVISGVIFPIFAILLSNVIKAFYEPPHLLRRDSQFWASMFLVFGAVYFLSLPVSSYLFSIAGCRLIRRIRLMTFEKVVNMEVEWFDHPENSSGAIGARLSADAAKVRGLVGDALQLVVQNSSTLVAGLVIAFVSNWELSLIILALIPLIGLNGWIQMKFIQGFSADSKMMYEEASQVANDAVSSIRTVASFSAEEKVMDLYKKKCEGPLRTGIRTGIISGIGFGVSFFLLFGVYAASFYAGARLVEDRKTTFPKVFRVFLALAMAAIGVSQSSTLTSDSSKAKSAASSIFAIVDRKSRIDPSEDAGVTAETLRGNIEFQHVSFRYPTRPDVQIFRDLCLTIHAGKTVALVGESGSGKSTAISLLQRFYDPDVGHILLDGVDIRKFQLRWLRQQMGLVSQEPALFNDTIRANIAYGKDGQATESEIVSAAQLANAHKFISSALQGYDTMVGERGAQLSGGQKQRVAIARAIVKDPRILLLDEATSALDAESERIVQDALDRVMVNRTTVVVAHRLSTIQNADLIAVVRNGVIIEKGKHDALVNVKDGAYASLVALHSAASS

SEQ ID NO: 9350 - protein, 169 aa, Zea mays
  VARIANT 102: note = Ancestral polymorphism is R, Derived polymorphism is S
MEDAEAGAARKRKRGGAGEEAGGGAYDGKEKELLGEDGDDGRYEGIAEEAVAEVMRWLEAEIADDSAPQPAAGFVTINGNEESCGPSFSAAASTVMASVDTRAGAPPPPPVPWPWPEPDPEPERVVPAPGVGVDVAAMEVEAGTGTGGEAADEEWLARLLTCGALLEGV

SEQ ID NO: 9351 - protein, 83 aa, Zea mays
  VARIANT 54: note = Ancestral polymorphism is N, Derived polymorphism is K
  VARIANT 53: note = Ancestral polymorphism is G, Derived polymorphism is E
  VARIANT 49: note = Ancestral polymorphism is G, Derived polymorphism is R
  VARIANT 48: note = Ancestral polymorphism is E, Derived polymorphism is K
  VARIANT 42: note = Ancestral polymorphism is L, Derived polymorphism is P
  VARIANT 27: note = Ancestral polymorphism is A, Derived polymorphism is V
  VARIANT 23..83: note = Derived polymorphism lacks residues 23 to 83
  VARIANT 22: note = Ancestral polymorphism is A, Derived polymorphism is T
  VARIANT 16: note = Ancestral polymorphism is G, Derived polymorphism is R
MPCPPSPMPSPSPQAGSLSRLAWLYVVGRVIGKKTIEVEMDLTKAKSERYLWGNNTAAMNSDKKQQFTLGLAPVSKETSVSVS

SEQ ID NO: 9352 - protein, 346 aa, Zea mays
  VARIANT 280..346: note = Derived polymorphism lacks residues 280 to 346
  VARIANT 40: note = Ancestral polymorphism is C, Derived polymorphism is Y
MYPAPRSSPFGELHGCEGDGCASDQDTWPLHHVLRSGVHCRLCCSCILLSHRSLYCCRCFLLVTSPSCNYDNGDTLMAPPAPTVTCQVCHDAVAHLPCLYPPPTDGVFVCPPCTAAQNGRPFTYAPPCRQPLDERNARVLVLGAWIALALLQRHATAAREAAERLAMEARDARARAHDALIVAFDLDAEEDLSCVVPQPTENDLAASEEEEEEEEEDSEAETDEGEVMLVRRNVMPPLVTPTIDTGGSVVPLASAEAKHMPPLSQPKLLFDLNENAAENEIDDAQAEPMRHQALNSFNVKEVAMAAGAEATRASPSTPQTLQLFPITYQDIVPRTLQLFNDDDEEM

SEQ ID NO: 9353 - protein, 359 aa, Zea mays
  VARIANT 243..359: note = Derived polymorphism lacks residues 243 to 359
  VARIANT 233: note = Ancestral polymorphism is W, Derived polymorphism is C
  VARIANT 216: note = Ancestral polymorphism is S, Derived polymorphism is C
  VARIANT 209..359: note = Derived polymorphism lacks residues 209 to 359
  VARIANT 144..359: note = Derived polymorphism lacks residues 144 to 359
  VARIANT 90: note = Ancestral polymorphism is F, Derived polymorphism is C
  VARIANT 77: note = Ancestral polymorphism is A, Derived polymorphism is V
  VARIANT 58: note = Ancestral polymorphism is K, Derived polymorphism is I
MINNISISNMEAKAKEFNEVIQEQYYPWFAQYMVMKRASIEPNFHDLYLKFFDKVNSKSLNKEILKATYENCKFRGALLAKNLGSWLGKFTIGRNQALRAKEIDPKSLIVEAYEKGLMIVVIPFTSKILEPCQSSIAYRPPNPWTMGILSLLAEIYNLPNLKMNLKFDIEVLFKNLTVDILMELVNVTKFFQMPKYLLPAHVCHWCGTWKGDKICSSCKKARYCSEKHQALHWRTGHKNDCLQIISSSAASNSVLPTIGKVPANTSWPEFEIKIDYEGIFDSNSGDENNSKLLVMQRHGKPDAMMQSWMDQFEADSDNKCWTSFQERVSRAPNQVLRYCREPNAKRNMCIMQVLSRTKC

SEQ ID NO: 9354 - protein, 214 aa, Zea mays
  VARIANT 187: note = Ancestral polymorphism is H, Derived polymorphism is R
MLVSESTAIPSSLSCSLELDPLLRDLVEKKLSLKRNVTAMATELRDARNRLASQELLLAQEIEARKFRNELDGFRSQLPVMTTLLHCSYLLGKLNDRNNSMSEGEFPVNNLAEQLNHLEKCLESRDPTLRQFKDCYSLRTESDITDAFARVAFDNDDGVAKPGEDIRALSAHWVNRSKELESQLDQHRRTAQELKRRVMRLELCILEPYGNSIG

SEQ ID NO: 9355 - protein, 75 aa, Zea mays
  VARIANT 39: note = Ancestral polymorphism is G, Derived polymorphism is R
  VARIANT 46: note = Ancestral polymorphism is G, Derived polymorphism is R
MGFRKATNTVSLPDSQISAIADGSLLSETLFSTANESIGVVSGYPGFLHSIKGAANFHPSSLYDHHMNSVDGDVS

SEQ ID NO: 9356 - protein, 333 aa, Zea mays
  VARIANT 11: note = Ancestral polymorphism is L, Derived polymorphism is H
  VARIANT 200: note = Ancestral polymorphism is T, Derived polymorphism is I
MKRSSTRVAQLAALTILLSWIAVSSVASSESEAPLQVGYYSRTCPRAEDLVRNVVRAAIRRDPGNGPGLVRLFFHDCFVRGCDASVLLDAAPGSNASTVEKASQANNPSLRGFSVINRAKRVLERRCRRTVSCADIVAFAARDACGILGGIDFAMPAGRRDGRVSNASEVLNNLPGPFTNVQLLVASFAAKNLTADDMVILSGAHSFGRSHCSAFSFRLYPQIAEDMNATYGRYLRTRCPAATGRRDRVVDLDQRTELLLDNQYYKNVQTREVLFTSDVTLLSQNDTAALVDLYARNRTLWASRFASAMVKMGHLDVLTGTQGEIRKFCNRVN

SEQ ID NO: 9357 - protein, 145 aa, Zea mays
  VARIANT 103: note = Ancestral polymorphism is R, Derived polymorphism is W
  VARIANT 95: note = Ancestral polymorphism is V, Derived polymorphism is M
  VARIANT 86: note = Ancestral polymorphism is E, Derived polymorphism is G
  VARIANT 51: note = Ancestral polymorphism is G, Derived polymorphism is S
  VARIANT 39: note = Ancestral polymorphism is V, Derived polymorphism is I
MNPRTETVAAHLRCGHGGGGEDGGVENRDAAAEELNGGVLCTVLVQAFGRGHGAPISAPRSPGTGGALCGGHATFPRAWCRGMEGGEKSDRKTTVMIAWVLERKGDLLVWPGLWSEVVPGRGEFGGLFAPFSDGCRRRKRDRGSQ

SEQ ID NO: 9358 - protein, 348 aa, Zea mays
  VARIANT 24: note = Ancestral polymorphism is P, Derived polymorphism is L
  VARIANT 259: note = Ancestral polymorphism is G, Derived polymorphism is W
MKLSAAVLCALVAVQAAVLLATVPTAQASELEVGYYSKKCKGVENVVKWHVIKAIKANRRTGAALVRLIFHDCFVRGCDGSVLLDASYDNPHPEKEAPVNIGLAAFDVLEEIKAAVEKRCPGVVSCSDILIYAARDAASILSNGHVHFAVPAGRLDGFVSKAEEAQAELPDSTHDVQQLIDNFARKNFTVEELVILTGAHSIGQGHCSSFTGRLSEPPSQINPAYRDLLNYKCPQGSNPPVANNVRDEDYGVVARYMPGFTSRVRKIPDFLDNSFYHNNLAKIVTFHSDWTLLTNKEAFGHVVEYAENATLWDEDFSDSLLKLSKLPMPAGSTGEIRNKCSVVNHRLY

SEQ ID NO: 9359 - protein, 115 aa, Zea mays
  VARIANT 4: note = Ancestral polymorphism is G, Derived polymorphism is A
  VARIANT 23: note = Ancestral polymorphism is M, Derived polymorphism is V
MSAGAARSVLVVVFFALPLLVSMTHGGHQQPAHVGADPRSPPIDGGEHAEQRQQLSRLGSRPPCCDRKCGACAPCKAVQVRAGAGAAAERRLRPRCANYEPVGWKCRCGAAVFDP

SEQ ID NO: 9360 - protein, 211 aa, Zea mays
  VARIANT 73: note = Ancestral polymorphism is D, Derived polymorphism is E
MAATLLPTLSPPVSRAAAAFLLRRAPLKPSHYVHPPSTLRRLLISSYPAIPAMCPLSTMSSTTAARAVPVRRDLLMLGIETSCDDTAAAVVRGDGEILSQVVSSQADLLARYGGVAPKMAEEAHALVIDQVVQKALDDAKLSESDLSAVAVTIGPGLSLCLRVGVHKARQVAKAFGLPIVGVHHMEAHALVSRYLTHMALCCSINRDLKLY

SEQ ID NO: 9361 - protein, 473 aa, Zea mays
  VARIANT 69: note = Ancestral polymorphism is A, Derived polymorphism is P
  VARIANT 84: note = Ancestral polymorphism is R, Derived polymorphism is W
  VARIANT 114: note = Ancestral polymorphism is G, Derived polymorphism is D
  VARIANT 285: note = Ancestral polymorphism is M, Derived polymorphism is T
MVVARKPHAGSGGGGGVRVGPERLEGLPAAWPGAAAAVKVKWPAPGGALSQMLTGRWARGVTAVEAVGAGGTVRWDPRDVNRFRLGVVGPAAAGRPERGVFFSVLYGFQGQGRGKELVRLEEVGTAMISLEECCWEMQLQQRHQQLVVVPVRVRKDGWASDAMLYVNVELVGVDTRPDIERAVSFGEKPRTSMAPPPLPTTRDGRKSLEAATYHDVLDLKQLLDLADKEGRVAVYGNKRNSDTSSVSSVSSSSSGSITSTSSASTSGGASPEPASTSKRRFLPWMRRSRDFDKRSTDTESLSQELPTKSTVSSCPGTVAFVGFFQPESFASLSGAMSFDDIWREIGGGDGEREPGRADVYIVSWNDHFFVLKVESDCYYIIDTLGERLYEGCDKAYMLRFDGSSQMQAEGTDEVIATGKECCREFIKRFLAAIPLREELEIERRGAGGGDGGGAPHRRLQIEFHFTVLQDDNR

SEQ ID NO: 9362 - protein, 156 aa, Zea mays
  VARIANT 141..156: note = Derived polymorphism lacks residues 141 to 156
  VARIANT 84: note = Ancestral polymorphism is P, Derived polymorphism is L
  VARIANT 72: note = Ancestral polymorphism is G, Derived polymorphism is C
  VARIANT 37: note = Ancestral polymorphism is P, Derived polymorphism is L
MASSSSYPSSAVLADSVLGQKAGVIVDEVSAPESSTLGARTGRYAMIFDAGSIGIRVHVFRFDRKLDLLEICDDGIKVFAKVKPGLSSYAGQPQEAANSMLPLLDKAKSVVPKQLTKRTPLRLRVRNLIHIKSKFQYKPEWINVIEGSQEGSYLWV

SEQ ID NO: 9363 - protein, 303 aa, Zea mays
  VARIANT 44: note = Ancestral polymorphism is G, Derived polymorphism is A
  VARIANT 51: note = Ancestral polymorphism is E, Derived polymorphism is D
  VARIANT 79: note = Ancestral polymorphism is R, Derived polymorphism is P
MDALWNGSSCDWPAPTVIISDDDAAAAELRRGPWTVDEDALLAAHVAAHGEGRWNELARDAGLRRTGKSCRLRWLNYLRPGVRRGGFTPREQLLILDLHSRWGNRWSKIAAHLPGRTDNEVKNYWRTRVQKHAKQLHCDVGSRRFHDAMRNLWMPRLIERIHADDSAAVAANATGDVSHFYSASPSHELSSSSQPAPAYRNAAPNGSCARAPSPDASCVTGPSSWSREASPASQFQSSGSTIAGPSTSTELCQNGCSSATSVDMFDESWSELLARANHDDTDFGLGETGDNWWGLEDIWEQPL

SEQ ID NO: 9364 - protein, 212 aa, Zea mays
  VARIANT 21: note = Ancestral polymorphism is E, Derived polymorphism is G
  VARIANT 30..212: note = Derived polymorphism lacks residues 30 to 212
  VARIANT 48..212: note = Derived polymorphism lacks residues 48 to 212
MPWLEAGAIVLADRGVVFIDEFDKMNDQDRVAIHEVMEQKTVTIAKAGIHASLNARCSVIAAANPIYGTNIGLPDSLLSCFDLLFTVLDQMDPEIDRQISEHVARMHRYCTDDGGARSLDKEGYAEEDDGDANAAIFVKYDRMLHGQDRRRGKKSKQDRLTLKFLKKYIHYAKNLIQPRLTDEEFFGPSDDQAPKILGAGTLPKISGPSDGR

SEQ ID NO: 9365 - protein, 356 aa, Zea mays
  VARIANT 168: note = Ancestral polymorphism is I, Derived polymorphism is M
  VARIANT 157..356: note = Derived polymorphism lacks residues 157 to 356
MAHAKAGASLPVPNVQALAQTWHGSGEPVPFRYVRTEEIVAGEVVAGCAIPVVDLSRLLDPRSSEEELANLGSACQHWGFFQLINHGVPDEVIQDTKKDMVEFFKLPVEAKKVHAQVPGGIEGYGQAFVFSETQKLDWADMIYLMISPKESRDLRFWPTRPPSFRDSIERYSAETAKVTACLLRFMAKDLGVEPERLLEEFRGLPQSMRTTYYPPCRLAADVLGLSPHTDATGLTLLLHVNDVQGLQIRRDGKWLAVDPLDGALVVSIGDILEILSNGRYRSIEHRAIVHPDKERISAAMFHQTCPNTTVGPLQELVERDSGGARYRSMDYMDFMKGFFAAKLDGRRSHMDALRIY

SEQ ID NO: 9366 - protein, 126 aa, Zea mays
  VARIANT 73: note = Ancestral polymorphism is E, Derived polymorphism is K
MEHVVDAPMQVSVPQVYVPIGPLCSSKKKQIWSHSILFQYYHVVQMQPGQPSMSANRVYYQRSLVREIEARLKAKCDTLADLFAMDERYGLKVRMELLMAKALCGGICGRKVCDGGDKNFVVRKGL

SEQ ID NO: 9367 - protein, 988 aa, Zea mays
  VARIANT 705..988: note = Derived polymorphism lacks residues 705 to 988
MRAPSFSPSSDIPFVYPVFAPFFLPNLLPPLTVAAVSRLTLIDADAQVFVVSFSDNEQQYLSILNKHRLMGPAKGSRTINKTIVKGYEDQQQHDDPSSSSKAKQKKRKISDLDPKWSKDELTRFYEAYRQHGKDWKKISIAIGGKSSDMVRSLYSAHRTFLSLPEHQATAMGFIALVTGHHNASVSLSRLLEKTTSHRGYDHIARASGKARKHGEQQKSIDGPDLHNCHEGEITGFSASFKKRYYGELVRNSRNHAVQRRTPLIPVIAPADRSTIDEPTPGIENVINFNSTKRKYEAANHGCAVAPTNKYSSDRVSGFAETCKADQGHSYLDTMEIGDIAMCQQHFKKTRIQQTVEESQTGIVEHETTMASKEGNKLVSSVNNNQILIDSISEGIFSNWFILFTSIVNILFLKMKIFGCLCPVMAADDMLVLDVLNSLVNAPSKMSELEINIPSGSLGKTDSVLREEGHPTIDLSKQGKPVRKSSASKTRKKKHKKILGAEVPAEAQKKCDDNLVLPETLRVGITDDSSLCTDSGRARTPEASEDISAEVPNTQTEAKPEFIMSGRTRLKSQMHCKTKPMSCNEGSDNFQAKKLLHCLSSEPLRRWCTYEWFYSAVDYPWFSNNEFVHYLDHAKLSHLSRLTRSEWSAIRSSLGKPRRFSNHFLAVEKEKLEDYREKVRKIYAQLNDGSRDSLPADLARPFSIGQQVIVRHPSSRELCDGKVVMMGPDCYKVHFDDPDLGVDTVKDTDCMPVNWLHNRPDNMRRNYLSNDVYNILEMDHIPDLTPSENRNHAINGTTVFEELKSLRLTSDRQPKAESIIHSERPPYRSTSDGPTSSSGFSCPDNNAGHNGELESYVAAFFENSLSQARQMVDEAIQANSGGSDDEKVCMLNQVTGCLGSDSRGVQLPSDLISNCIATVISIKRLSDSRHPFGNVAGVLEHALSMLRPSCPQNLGVYTEIKRDLCTIANQIFALVPTASGNCSPPVSPM

SEQ ID NO: 9368 - protein, 620 aa, Zea mays
  VARIANT 83: note = Ancestral polymorphism is R, Derived polymorphism is W
MERRRKAMWLYPKVVGFNPPERWGHSACFFEGFVYVFGGCCGGLHFGDVLKLNVETMAWSLVATTGQCPGTRDSHGAALVGHRMLVFGGTNGGRKVNDLHVLDLRTGEWTRPQCKGAPPPSPRESHTVTVVGGDRLVVFGGSGEGEGNYLCDVHVLDVPTMTWSSPEVRGGHAPAPRDSHSAVAVGRRLFVFGGDCGDRYHGDVDVLDVDTMAWSMFPVKGASPGVRAGHAAMSVGSKVYIIGGVGDKHYYSDVWVLDVTNRSWSQLEVCGQRPQGRFSHTAVAMNTDIAIYGGCGEDERPLNELLILQLGSEHPNGRYNISMCKVLSNHWSQEKRKFLRSEARDASVSNGEMAQKPREAETEQRNPFLRGLENGRVKRRRTGEARPKEAESEQEEHSLSLSQHSSPSQSDQEQTGAHKLPASANTSPSALQPFARLNGNGAQLRAAGPGGVSSRPLKADQLLRTIAPQHRREVQFLSSDHQPQPRGPPGPPHLIGAEVHGTVDGAFDSGYLVTAVVNGQLFRGVLFAPGPGVTAPRPAVHHQILTSSAVPPQQRPLLAHAIPVHARPVPLPQATGFVLPDCAHHARQGFPAKAVKSEPERGSSDLHDVVLTLGGPGGGK

SEQ ID NO: 9369 - protein, 268 aa, Zea mays
  VARIANT 1: note = Ancestral polymorphism is M, Derived polymorphism is K
  VARIANT 29..268: note = Derived polymorphism lacks residues 29 to 268
  VARIANT 159: note = Ancestral polymorphism is G, Derived polymorphism is S
MTVVSIMWSLVQVQVLAAMALAFLVGGAWCGPPKVPPGKNITANYGSDWLDAKATWYGKPTGAGPDDNGGGCGYKDVNKAPFNSMGACGNVPIFKDGLGCGSCFEIKCDKPAECSGKPVVVYITDMNYEPIAAYHFDLAGTAFGAMAKKGEEEKLRKAGIIDMQFRRVKCKYGSKVTFHLEKGCNPNYLALLVKYVDGDGDIVAVDIKEKGSDTYEPLKHSWGAIWRKDSDKPIKGPITVRLTTEGGTKTVYDDVIPAEWKPNTAYTT

SEQ ID NO: 9370 - protein, 269 aa, Zea mays
  VARIANT 1: note = Ancestral polymorphism is M, Derived polymorphism is K
  VARIANT 6: note = Ancestral polymorphism is I, Derived polymorphism is T
  VARIANT 32: note = Ancestral polymorphism is P, Derived polymorphism is L
  VARIANT 45: note = Ancestral polymorphism is Y, Derived polymorphism is H
  VARIANT 102: note = Ancestral polymorphism is S, Derived polymorphism is F
  VARIANT 159: note = Ancestral polymorphism is G, Derived polymorphism is D
MTVVSIMWSLVQVQVLVAVALSFLVGGAWCGPPKVPPGKNITANYGSDWLDAKATWYGKPTGAGPDDNGGGCGYKDVNKAPFNSMGACGNVPIFKDGLGCGSCFEIKCDKPAECSGKPVVVYITDMNYEPIAAYHFDLAGTAFGAMAKKGEEEKLRKAGIIDMQFRRVKCKYGSKVTFHLEKGCNPNYLALLVKYVDGDGDIVAVDIKEKGSDTYEPLKHSWGAIWRKDSDKPIKGPITVRLTTEGGTKTVYDDVIPTDWKPNTAYTTK

SEQ ID NO: 9371 - protein, 229 aa, Zea mays
  VARIANT 169..229: note = Derived polymorphism lacks residues 169 to 229
MEQEEACSSSLRQCRICHDEEDERRSAMESPCACSGSLKYAHRGCVQRWCDEKGSAVCEICLQNFEPGYTVPPKKTQPADVAVTIRDSVGVPRPQHEPEEEEEQELVDVALIGASDPEYAECARAAGRSASWCRSVAVTFTVVLLLRHLVTVVTVGAANQFAFGLLTVYLLRASGILLPFYLVMRLISVIQQGQRQYRLRLLQEQRRHALRSGRLHGQEQQQQHVILVR

SEQ ID NO: 9372 - protein, 159 aa, Zea mays
  VARIANT 20: note = Ancestral polymorphism is V, Derived polymorphism is I
  VARIANT 101: note = Ancestral polymorphism is G, Derived polymorphism is R
  VARIANT 110: note = Ancestral polymorphism is P, Derived polymorphism is T
  VARIANT 135: note = Ancestral polymorphism is A, Derived polymorphism is S
  VARIANT 139: note = Ancestral polymorphism is A, Derived polymorphism is T
MGNLVSQCVGNGAGARPLVIGATDGSRTMVEENTAVAELMIDAPGHVVARATDVARERRLRAMAADEVLRAGVVYLLVPAGRAGARLGGREVEAIGRLVSGKKGSRKSRPGGGRRVFPDVSAEEDAAERKEVVCAVKRAHDHGFGPRQWRPALDTIYEA

SEQ ID NO: 9373 - protein, 437 aa, Zea mays
  VARIANT 135: note = Ancestral polymorphism is P, Derived polymorphism is L
  VARIANT 120..437: note = Derived polymorphism lacks residues 120 to 437
  VARIANT 92: note = Ancestral polymorphism is P, Derived polymorphism is R
  VARIANT 31: note = Ancestral polymorphism is H, Derived polymorphism is Y
MEVLTTLLLSVASLHSSAASPPLGYRSTLTHVDSHGSFTKTELMRRAAHRSRHRASMMLSRYFTMSTSSDAGPARLRSGQAEYLMELAIGTPPVPFVALADTGSDLTWTQCQPCKLCFPQDTPIYDTAVSSSFSPVPCASATCLPIWSSRNCTASSSPCRYRYAYGDGAYSAGVLGTETLTFPGAPGVSVGGIAFGCGVDNGGLSYNSTGTVGLGRGSLSLVAQLGVGKFSYCLTDFFNTSLGSPVLFGALAELAAPSTGAAVQSTPLVQSPYVPTWYYVSLEGISLGDARLPIPNGTFDLRDDGSGGMIVDSGTTFTFLVESAFRVVVDHVAGVLRQPVVNASSLDSPCFPAATGEQQLPAMPDMVLHFAGGADMRLHRDNYMSFNQEESSFCLNIAGSPSADVSILGNFQQQNIQMLFDITVGQLSFMPTDCGKL

SEQ ID NO: 9374 - protein, 354 aa, Zea mays
  VARIANT 13: note = Ancestral polymorphism is K, Derived polymorphism is T
MGRAPCCEKVGLKKGRWTKEEDEVLARYIKEHGEGSWRSLPKNAGGLRLVLLAGLLRCGKSCRLRWINYLRAGLKRGNISEEEEDMIIKLHATLGNRWSLIAGHLPGRTDNEIKNYWNSHLSRRAADFRDGVVVDIDLSKLPGGGKRRGGRASRGAVVAAAKEKKAKEKDDRGNSKVAEAEQQLRDTEDDDGGSVSTPRPQSDDCGTAQSEEEQAQASASGLTSDGHGPEEEEEEDPLALSEEMVSALLAPESPKLEVGPDGSCMDSYSGPPSGESGCGSSGPSGDVAQDLDLDDDKAIMDWDLMGLDISTAGDMWDQLVWDYDETLVTEPEGGEEGHQQQDDVMSDLFFLDNL

SEQ ID NO: 9375 - protein, 154 aa, Zea mays
  VARIANT 140: note = Ancestral polymorphism is G, Derived polymorphism is A
MPKIVLNYATDCKPSALHVPSSLPPYSLWPSSFLHRQSRGDLFRPSTAPDPSTSFPERLFPREICTTASVPPPPQHPWQQLAMALPAPSAPPQVTARRRCGVPGVRTGCFGDPEMKRRRRVAGYKAYAVGGKVKASLRRGLRWFKRKCSRILNI

SEQ ID NO: 9376 - protein, 224 aa, Zea mays
  VARIANT 67: note = Ancestral polymorphism is V, Derived polymorphism is M
  VARIANT 93: note = Ancestral polymorphism is M, Derived polymorphism is K
  VARIANT 131: note = Ancestral polymorphism is A, Derived polymorphism is V
MSYPEDMASFYDAWVGREEQIVADLTTALALPPRRRSDALAPLVDAAVAHVVAYYEHKSRLADRDVVAALDPCWLNPLERTFLWAWGWKPALMFRFVEGGVGVRPEQRRALEELRAATAANEREVDMQVAAVQESLAGPRVLAALRRQPPLNGEADEAVAVVARSLRVLLAAADALRDRTLRGVVGLLAPDQAGAVVAAMLGFHLAVHRAGRDWTSSHGGQRLV

SEQ ID NO: 9377 - protein, 445 aa, Zea mays
  VARIANT 185: note = Ancestral polymorphism is P, Derived polymorphism is T
  VARIANT 270: note = Ancestral polymorphism is D, Derived polymorphism is G
  VARIANT 295: note = Ancestral polymorphism is R, Derived polymorphism is S
  VARIANT 341: note = Ancestral polymorphism is P, Derived polymorphism is S
MSASGDPLDVLPAAVLADVLGRVADAGDIAACRLASRTLLAASYICPRVRLCAADRARRRREGGGGSPAFRATTANLASLLGPHLRSLSLDTAGGQGSPDDAMWVEEGEFDEADGLHLTCGEAVAAWATTSAGTVLRELDIADYWPQACWRKAEALPLISHYCQNLVKLCLKNAWLSVDRLKKMPNLTYLTLEFIRLDDEDLNQLNECFPCLHTLNLIGVGGLKDPKIHLLQLKACCWEVSNVPRSLVVHAPDLVFLELKCIRPDTLILDTPSLSTLKLTIDKLGATARVDGLLRLSNLRIESLDFSSLFPAFMDNQAIRTLELELPESSSQYELLEAVNPDYLLRRLASFSEVKLGPRFSRELKLCLAQYKDIQFGSCLKKLLIHVPQSGSCFHLMPLFEICAPLCEVTVLFHAESADAVRRQDAMSICMQNFPEIRWQWGTWQ

SEQ ID NO: 9378 - protein, 291 aa, Zea mays
  VARIANT 106: note = Ancestral polymorphism is S, Derived polymorphism is F
MEFGVHRSVAMAFPIAQQHFGGDPHGAISLPKGGPYPYVLTTCTFPITPTLTELEGKHCASRANDGEHGAGGAKQTTARDYLRADGVARCDGSPSGQARRRQVRLFPIDGATVFGRCGQWMARAPSDLWAEPASLSPSDSTLPTGVDLEATIDIDTGLSLIICPDCRDVRVFAATTKFGSNEGKRYFKCPRKTYGHGTCTRYWFEEEYVVFFHYNGYLPMTSSIVAAASTIEVPKIVRRIVSLEKNLNEVKDKVGNNREGMGSCICLVCGCVNVTLFLLLAIVLLVVVVLK

SEQ ID NO: 9379 - protein, 324 aa, Zea mays
  VARIANT 139..324: note = Derived polymorphism lacks residues 139 to 324
  VARIANT 125: note = Ancestral polymorphism is A, Derived polymorphism is V
  VARIANT 119: note = Ancestral polymorphism is G, Derived polymorphism is V
  VARIANT 118: note = Ancestral polymorphism is S, Derived polymorphism is L
  VARIANT 108: note = Ancestral polymorphism is E, Derived polymorphism is K
  VARIANT 107: note = Ancestral polymorphism is T, Derived polymorphism is I
  VARIANT 96: note = Ancestral polymorphism is C, Derived polymorphism is S
  VARIANT 73..324: note = Derived polymorphism lacks residues 73 to 324
  VARIANT 58: note = Ancestral polymorphism is L, Derived polymorphism is I
  VARIANT 52: note = Ancestral polymorphism is P, Derived polymorphism is L
  VARIANT 33..324: note = Derived polymorphism lacks residues 33 to 324
  VARIANT 32: note = Ancestral polymorphism is S, Derived polymorphism is L
  VARIANT 20: note = Ancestral polymorphism is A, Derived polymorphism is T
  VARIANT 18: note = Ancestral polymorphism is A, Derived polymorphism is T
  VARIANT 17: note = Ancestral polymorphism is A, Derived polymorphism is T
  VARIANT 11: note = Ancestral polymorphism is M, Derived polymorphism is I
  VARIANT 10..324: note = Derived polymorphism lacks residues 10 to 324
MDPKMTEVTQMFARFKAAYARNDLNTCVTLLSQLKVHLTQFPSLPPLFQQTPNIVEELKLAKSQICSKLFLTYVFVLMTKLSSDLVAEKIKRSLNCYAVLLVTLPSTEQVLNSAQNISGDIYEHAVVLSVKLEDQDAFERDFCQLKPYYMDTCGIIPASPEEYPILGLNLLRLLVQNRIAEFHTELELLPAKALEHPCIKHAVELEQSFMEGAYNRVLSARQAVPHETYVYFIDLLAKTVRDEIAGCSEKGYDSLSVSDAKQMLMFSSDQDLHEYITEEHPEWEIKNGAVFFQKAKESQPCKEIPSLQLINQTLSYARELERIV

SEQ ID NO: 9380 - protein, 285 aa, Zea mays
  VARIANT 108: note = Ancestral polymorphism is K, Derived polymorphism is N
MESRDVKAEQRQQQPELPKKRRRQKLLESAQASGGSSMSVAESSHSRTSAPAPPAGSDDAGAGGNGHQHQQGKRPRLIWTRRLHDLFVEAYEKSLGEDDAVPKRILENMREKMSPAETSEITREQVASHLQKYKLNLRSKEAERPPGGVQQQQASAEASTSQPRPRSLPPATPSAEVSQVAANLQPVPQLSGLPIWDRQAQPAEAMQRIPADSSCPVVEGRNPILLPETNTEAAVTLTRLARATQDGNVVGPEPAPACDIIERYWKSPRNEAFLSWDLFGLSPGK

SEQ ID NO: 9381 - protein, 227 aa, Zea mays
  VARIANT 208: note = Ancestral polymorphism is P, Derived polymorphism is R
  VARIANT 193: note = Ancestral polymorphism is R, Derived polymorphism is W
  VARIANT 190: note = Ancestral polymorphism is R, Derived polymorphism is W
  VARIANT 110: note = Ancestral polymorphism is R, Derived polymorphism is W
  VARIANT 108: note = Ancestral polymorphism is W, Derived polymorphism is L
  VARIANT 103: note = Ancestral polymorphism is P, Derived polymorphism is L
  VARIANT 97: note = Ancestral polymorphism is A, Derived polymorphism is T
  VARIANT 75: note = Ancestral polymorphism is P, Derived polymorphism is L
  VARIANT 58: note = Ancestral polymorphism is S, Derived polymorphism is N
  VARIANT 45: note = Ancestral polymorphism is F, Derived polymorphism is C
  VARIANT 42: note = Ancestral polymorphism is G, Derived polymorphism is R
  VARIANT 18: note = Ancestral polymorphism is G, Derived polymorphism is R
  VARIANT 14: note = Ancestral polymorphism is G, Derived polymorphism is R
  VARIANT 5: note = Ancestral polymorphism is A, Derived polymorphism is T
MVVGADLSKHPVDGFSTGLVDDSNVFEWQVTIIGPPDTLYDGGYFNAIMSFPQNYPNNPPSVRFTSEMWHPNVYPDGWVCISILHPPGEDPNGYELASERWTPVHTIWLRIIILFLVWIWNGLGSTTMMRQSCSKDWMISIPPLPIRLGSPSPLCPTGTKQPMELEEWPVVAANNDRVRKPEGRGAWLTRNGRQDTAGGSLQPHVWWPVWEGAHCSSSDGFRSFSGQ

SEQ ID NO: 9382 - protein, 361 aa, Zea mays
  VARIANT 337: note = Ancestral polymorphism is D, Derived polymorphism is H
  VARIANT 333..361: note = Derived polymorphism lacks residues 333 to 361
  VARIANT 326: note = Ancestral polymorphism is I, Derived polymorphism is N
  VARIANT 304..361: note = Derived polymorphism lacks residues 304 to 361
  VARIANT 293..361: note = Derived polymorphism lacks residues 293 to 361
  VARIANT 175..361: note = Derived polymorphism lacks residues 175 to 361
  VARIANT 24..361: note = Derived polymorphism lacks residues 24 to 361
  VARIANT 21..361: note = Derived polymorphism lacks residues 21 to 361
MRLHKLDFFVLMVFCHVTISQMMQYSCKRYFVLEDTTLRWFKFAPSSKREYLMTKPRTLLGHIVSTDIFIRFSVIGGSSSLSTFSWSLNSLQRGSKRSGGWLLAPSSHGGWSTDIYQEEMEVVYLCSVSNNFTSHQVLGLSSTISMLQATTGKTHDWKDIFPDLIYMQTTTMDRKVCQVDNTAVQAIMFFEINLGTNLTAFLEILVATYRSNNGKDLEKEQRRQPSLKTALVSMKASFANVMSKSIQRGAVPGVTSPIRPLRPTYTRIIDALNAFSEQMAREGHVPNTEDVFQDIEEEHKSYVLCVHSEKLAIVFGIISTPAGTKIRVMKNLRVCIDCHTVTKFISKLADREIVFCNPSKY

SEQ ID NO: 9383 - protein, 175 aa, Zea mays
  VARIANT 64: note = Ancestral polymorphism is R, Derived polymorphism is H
  VARIANT 34: note = Ancestral polymorphism is P, Derived polymorphism is H
MDRTYYKGGIKAYWKRRGYYRIDAAAAQRRPPLPTAELGGGVGVAQAQPPAPTLEGASGRRRCRGWRVRRGQLRRRLLRALSPRRWLMRLRDAYVSAMLRLASSPAVGYGAGQPYCGTAAFARPAQLKEYEDKVLVEIYRSILAGGGPGPIAVTTGSNGAGAPAAATLRLPTAAA

SEQ ID NO: 9384 - protein, 265 aa, Zea mays
  VARIANT 173: note = Ancestral polymorphism is A, Derived polymorphism is V
  VARIANT 84..265: note = Derived polymorphism lacks residues 84 to 265
  VARIANT 83..265: note = Derived polymorphism lacks residues 83 to 265
  VARIANT 77: note = Ancestral polymorphism is R, Derived polymorphism is Q
  VARIANT 47: note = Ancestral polymorphism is R, Derived polymorphism is W
MPDSWKTADIDEAMSWLILPVRCVSSSRDLVFSVKKMDATPQRHVARVVECIHSAVLARPTVVARRRLWLLQALWRRRQGKEWQLLPKPRDVPLISFVPPAPVIGKSGANVRRVEEQTGARIKVQEIDKDASGERLIIVSSNEIPTEPISPTIEALILLHDKVITEMRRRTGAEIRVYWKADKPKYLSFGDELVQVAGPPAIARGALTEIGSRLRTRTLRDTSTANNPPPFAPSDDPPGILNKVYMNILLASPLLKAILKDATAV

SEQ ID NO: 9385 - protein, 59 aa, Zea mays
  VARIANT 12: note = Ancestral polymorphism is R, Derived polymorphism is H
MSSYTNEKEPLRVALYSNLRNLIQNLMSGSETIEQLIHTLINDNLDLGCAIIEVVATRQ

SEQ ID NO: 9386 - protein, 245 aa, Zea mays
  VARIANT 148..245: note = Derived polymorphism lacks residues 148 to 245
  VARIANT 178..245: note = Derived polymorphism lacks residues 178 to 245
MDREQLLASFDDVLVAPVLTDLAHRGGGKGGAAGATASAKPPGITPHARSSRRSPLGITQIVEVGTQLAAWPNVQSTIGPLDPLIDYHFVRTIMVFKRTTINSFYKKDIVVDVPREQGQNSSCSEEDEIANWLAAQQEDDQEEKAPEQPSPKNRLCHIEPTIEMQTSEEVKANRLRLRTSIDTIRWLAFQGCPFRGHDESANSKSQVVSSTKRNDDLRANQVAEIEHLIELNEIETGRGYIPFTL

SEQ ID NO: 9387 - protein, 238 aa, Zea mays
  VARIANT 1: note = Ancestral polymorphism is M, Derived polymorphism is I
  VARIANT 41: note = Ancestral polymorphism is Y, Derived polymorphism is C
  VARIANT 163: note = Ancestral polymorphism is P, Derived polymorphism is T
MTAKSEQTPRITELHVRVDCNGCENKIRKALRAIDGVSEVYIDQASHKITVVGMADPWRMVKAIRKAKRVPTIFSHTDPAAAAEADQPPPPAAEAEEAEAKGEAQAPAPAPPPPADPPAAGDRAEETAPADTSAPEEHKEAKPAETPAAVDATVVVRTVRDHPYGYGAGGHGHRMCSEANHPVDSFYSHHRPTSPYVAEYGAGGGYAGFPVQEGRGKEDAINITCMFSDENPNACSIA

SEQ ID NO: 9388 - protein, 155 aa, Zea mays
  VARIANT 71..155: note = Derived polymorphism lacks residues 71 to 155
  VARIANT 101: note = Ancestral polymorphism is A, Derived polymorphism is G
MRAHLVEVPAGRDVLSCVSAFARRGRCGAMVLGAAGHVTDVVLREPALVLRGTMEILSLSGCFFPFPGPGSVAATGTAVFMAGPRGSVLGGGVALGGLVAAGPVVVMVATFVAAALDRLPLAKGDEAGKDVHGHHRACGWAAVCRKKKQQQLGAN

SEQ ID NO: 9389 - protein, 1024 aa, Zea mays
  VARIANT 83..1024: note = Derived polymorphism lacks residues 83 to 1024
MEQRDATQPEAAAEERDQERPSIIPPPKAGKRVTREGGLVGKSELLSAPGHGCEMQLLFAGHWSDLGLVRHMPNLATIFLVRQGKLTARLIPVQVEHIMDENEDKDLKLPSRVVSLLFGGDISTSAQTFEKWLSLVRKRSGAFRPSGFPHRGSRIEVMPSGSFSLFGSGDLRFALWNPLVSYYPLEVTSYHLVDYLEHLIREAPTRKDPLDCDQSPEISLWERLGNSSALDIESSEFSWDVLLSLHHTEHSSSSEQTEDEMNKALEVTVNSGGVVFFALFSSPGNIGVPEAAAVIKFSSSKMATQAERLGYEFARLLGVHTPQARVVYNSSSEWLAIRHAAENARTVAVSNNDEVGEMTCSELLEALELSRCLLLMSYIHGSPLLESSKAFHSREAACVTASSLGRVLMLDLILRNEDRLPCRQLGWRGNPANLMISDKSSLPNLDRLDDFKSSTDSSNQLITHFLHREKRSHSLNGKFGSPGLDPMSPKLEPLINEKENAERTNGDFRIVAIDTGVPRRPPVGRRVKDHERYPKVVELILNSSDYSASILYEISGCKLGHPRPDEVTSSDSCCSLSDEDNAGVIHEFRGSFRAALRDLEGFHLFLLQLYQKLDGVLRVFLSIITKTSEESDNNDAALSDFPSPGASYSTPRLPSKHLNNELHSDSEMLKSAMKSSSVGSRGSSDSVSPLPRESWNNKSFKGSAEAPRSLRMTMKLRDFYKTPKVDPELLKEIEQWNEALKNDVIKFCQENNFHSGFFDGTENNMVADAYELKVRLEHIIERIALISDAANTERPSLVVNNLFIGGALAARSKYTLQHLGITHVLCLCSNEIGQSDSQFPDLFEYKNFSISDDDDANISDLFEEASDFIDHVDHVGGKVLVHCFEGKSRSATVVLAYLMLREGFTLAKAWNLLKKVHRRAQPNDGFAKALLALDKRLHGKVSMDWQHKRPEMKVCPICSKNVGLSTSSLKLHLQKAHKRLSAGSVDSAMTMEIQKSIESLQISRGGSLSPSQKLTKVFSNELSF

SEQ ID NO: 9390 - protein, 111 aa, Zea mays
  VARIANT 62: note = Ancestral polymorphism is S, Derived polymorphism is I
  VARIANT 21..111: note = Derived polymorphism lacks residues 21 to 111
  VARIANT 20: note = Ancestral polymorphism is L, Derived polymorphism is M
MCQAIRQFGPGIEPPTMFDLRGRLLEEEYARTKSLLQEREAEKMKNVCSIMTDVWSDKKRRIIMNVCTNCADGASFISSKGMSDVSHTSEVIFELVDKAIENIGPDVWCKL

SEQ ID NO: 9391 - protein, 61 aa, Zea mays
  VARIANT 38: note = Ancestral polymorphism is L, Derived polymorphism is Q
  VARIANT 9: note = Ancestral polymorphism is S, Derived polymorphism is N
  VARIANT 5: note = Ancestral polymorphism is P, Derived polymorphism is S
MSHLPCWYSKGYIYHILKMWITLGCPCQLSCFSYDISQKYWLRIADDCFPASNFASTFSFP

SEQ ID NO: 9392 - protein, 78 aa, Zea mays
  VARIANT 22: note = Ancestral polymorphism is E, Derived polymorphism is V
  VARIANT 27: note = Ancestral polymorphism is P, Derived polymorphism is H
  VARIANT 33: note = Ancestral polymorphism is V, Derived polymorphism is M
MAHEAEAVELVAYTVVHCVRLEGKDRPAMADIVANLETALALCEGSATGGGDHGTDGFRNISSSASLCHVHGPLEALS

SEQ ID NO: 9393 - protein, 563 aa, Zea mays
  VARIANT 31: note = Ancestral polymorphism is P, Derived polymorphism is L
  VARIANT 406: note = Ancestral polymorphism is N, Derived polymorphism is I
MPPIPKRGEHLLVLLIVACAATAATAAGTVPFYPSAESAAAAHCDGTLYPELCLSTLADIPDLHKKPLPDVICAAVNRTEDVVVATSSNCSYYLQDRSLSARDRLAINDCLELLSTTMDELRASTADLASPAGRGSASAGVSQGARRATMEHVMTVLSAAITNQYTCLDGFAYQSGGRVRRYIEPTFHHVSRMVSNSLAMAKKLPGAGASAAPAPPRQPFTGYGQMVKGFPRWVRPGDRRLLQAPASAVAADAVVAKDGSGDYTTVAAAVAAAPTNSKKRHVIYIKAGAYMENVEVGKKHVNLMFVGDGIGKTVIKASRNVVDGYTTFRSATVAVVGNNFLARDLTIENSAGPSKHQAVALRVGADLSAFYRCSFVGYQDTLYVHSLRQFFRDCDVYGTIDFVFGNAAVVLQGCNLYARKPLPNQSNIFTAQGREDPNQNTGISIQRCKVAAAADLAAAQSSTKTYLGRPWKQYSRTVYLQSELDSLVDPAGWLEWNGSFALDTLYYGEYMNTGPGAGTSGRVKWKGYRVITSAAEASAFTVGNFIDGDLWLAGTSIPFTTGL

SEQ ID NO: 9394 - protein, 462 aa, Zea mays
  VARIANT 156: note = Ancestral polymorphism is G, Derived polymorphism is R
MGGKLLLGASQSRHAHAVASPPLSKVATSGLHGEDSPYFAGWKAYDENPYDAVSNPGGVIQMGLAENQVSFDLLEGYLRDHPEAAGWGGSGSGVASFRDNALFQDYHGLKAFRKAMANFMEKVRGGKARFDPDRIVLTAGATAANELLTFVLANPGDALLIPTPYYPGFDRDLRWRTGVNIVPVHCDSANGFQVTAAALQAAYEEAEAAGTRVRAVLLTNPSNPLGTTVTRPALEDVLDFVARNNIHLISDEIYSGSVFAAPDLVSVAELVESRGDPGVAERVHIVYSLSKDLGLPGFRVGVVYSYNDAVVTAARRMSSFTLVSSQTQKTLAAMLSDAGFADAYVRTNRQRLRARHDHVVAGLARAGVPCLRGNAGLFVWMDMRRLLGEATTVAGELRLWDRMLREAKLNISPGSSCHCSEPGWFRVCFANMSLDTLDVALARMSRFVDTWNKETTASTQQH

SEQ ID NO: 9395 - protein, 237 aa, Zea mays
  VARIANT 75: note = Ancestral polymorphism is P, Derived polymorphism is L
  VARIANT 97..237: note = Derived polymorphism lacks residues 97 to 237
MCGGAIIFDYIPARRRVSAADFWPDSEADAEDSDSHAPDPERAPLPTVPSRAVPRPRGKAKRGRKNQYRGIRQRPWGKWAAEIRDPVKGVRVWLGTYPTAEAAARAYDRAARRIRGAKAKVNFPNDASSSSVTAPTAASGVAAQAPAVFLPAPKVEARAQVSDEVKELSEELMAYENYMNFLGVPYMEGGNAAVSATTAAAAAAAVPEEAQVPAPAPAGLWSFEDYYYPPSLSLFTE

SEQ ID NO: 9396 - protein, 370 aa, Zea mays
  VARIANT 188: note = Ancestral polymorphism is K, Derived polymorphism is R
  VARIANT 42: note = Ancestral polymorphism is S, Derived polymorphism is L
  VARIANT 24: note = Ancestral polymorphism is K, Derived polymorphism is E
MKRRGLLLVTILLAACTTATAGKKTAIRRTHEQLQPQARGSSCDVYRGSWVVDASYPLYDAASCPFVRKEFDCRRMGRPDSTYLKYRWQPDPPCSLPRFDGVKLLNLWRGKKVMFVGDSLVVNQYESLLCMLHAAAPGARTNQSWASSSGENPSTTVRFEDYGVTLVYYLSHYLVDLTNDTAGRTVLRLDGMDEGRAWIGADVLVFGSWRWWWRKSWDYIQGDSTVVQDMDRTQAFTKGLQTWARWVDANLAQTSTKVFFQGYSPNHLDGRQWGAAAGKTCIGETQPLNNAAAYHGQPNPQDTIVRSVLAGMAKPVLLLDITSMSQLRKDGHTTRYNGDSLGRDCTHWCVAGVPDTWNTVLYAALAGGDS

SEQ ID NO: 9397 - protein, 125 aa, Zea mays
  VARIANT 38: note = Ancestral polymorphism is I, Derived polymorphism is T
MSEVKDSNVPAALDGNPQPMDQTEDNSMPSAQQQEEAIKKKFGGLMPKKPPLISKDHERAYFDSADWALGKQGVAKPKGPLEALRPKLQPTRQQQQQRARRPIYTSSENEGMYFYLAFWLWSLCT

SEQ ID NO: 9398 - protein, 175 aa, Zea mays
  VARIANT 143: note = Ancestral polymorphism is H, Derived polymorphism is Y
MKTLISSTPAASSAPAPCSPPPAATTALRPPPLASLHRPAPPLVDRPSPTDEELVSYYLRRRVLGHRLRVDAIAEIDLYRLEPWDLPSLSRIHSRDAQWYFFARLDRKVAGAGAGGRGGPGNMTNRATPRGYWKTTGKDREVHRRDKPVRQLGNRLLPWTRSSKTRDLEPEPRWR

SEQ ID NO: 9399 - protein, 102 aa, Zea mays
  VARIANT 42: note = Ancestral polymorphism is A, Derived polymorphism is T
MERVASSYCVSLLAQSRRAYTVAAAMAKKGAAARRVDEKKAAAALTKRVMGKKEVNTAAAAAAEEKAWVPDPVTGYYRPAGSAKEVDAAELRAKLLTEAAAN

SEQ ID NO: 9400 - protein, 558 aa, Zea mays
  VARIANT 164..558: note = Derived polymorphism lacks residues 164 to 558
  VARIANT 257..558: note = Derived polymorphism lacks residues 257 to 558
MSIHQSAVLSPHCRYRNEQHCVGTSSRHLRRKMLRLHHHSAPVSPHAAICPPSRLACSCICNKPNSRITASQGWSSIRRRITTVASGQSVPGYTPDDGDQCLETGNKLSFATVKEAFISLNSVGVRSELILLALPAVLGQAIDPIAQLMETAYIGRLGALELASAGIGISIFNIVSKIFNIPLLSIATSFVAEDISRSATKHPSSGKLELTSVSSALILAAGIGIMEALALFLGSGLFLKLMGVSPLARFLILVFIQVSPMHRPAKLFLSLRALGAPANVIMLAVQGLGNLSAVALLPLLIYGFKLGITGAAISTVVSQYIITVLLLWSLSKRAVLLPPRIDQLEFGGYLKSGGMLLGRTLSILLTMTIGTSMAARQGPTAMAAHQICLQVWLAVSLLADALAVSAQALIASSYAILDYKKVQKTAMFALQIGVFSGLALAIGLYASFGNIARLFTSDPEVLTVVKSCALFVCASQPINALAFIFDGLHYGVSDFEYVAQATIVVGVTSSLVLLWAPSVFGLAGVWAGLTTLMGLRMAAGILRLLQKAGPWSFLHEEP

SEQ ID NO: 9401 - protein, 451 aa, Zea mays
  VARIANT 213..451: note = Derived polymorphism lacks residues 213 to 451
MASELTYRGGSVAPGSASNGGEYSPKSSKPLSWLARAARYAAAEHRPVFALAGMLFAAAIFTFSSPSTLSPSEPAASVGFNHLAVSGHPSFRESVGGKVPLGLRRRALRVLVTGGAGFVGSHLVDRLLERGDSVIVVDNFFTGRKGNVAHHLQNPRFEVIRHDVVEPILLEVDQIYHLACPASPVHYKYNPIKTIISLLAFVYGLILFVSDVLYRWHKTNVVGTLNMLGLAKRIGARFLLTSTSEVYGDPLQHPQVETYWGNVNPIGVRSCYDEGKRTAETLTMDYHRGANLEVRIARIFNTYGPRMCIDDGRVVSNFVAQALRKEPLTVYGDGKQTRSFQYVSDLVEGLMKLMEGEHIGPFNLGNPGEFSMLELAKVVQDTIDPEAHIEFRPNTADDPHKRKPDISRAKELLGWEPKVPLREGLPRMVTDFRKRIFGDQEGSTESAGGLS

SEQ ID NO: 9402 - protein, 347 aa, Zea mays
  VARIANT 34: note = Ancestral polymorphism is S, Derived polymorphism is Y
  VARIANT 37: note = Ancestral polymorphism is G, Derived polymorphism is E
MGDSSGSVSVDVERIFFGGKEHRVRTRHGSLSVSVYGDEDKPALVTYPDVALNHMSCFQGLFFCPEAASLLLHSFCVYHITPQGHELGAAPISADVPVPSVDDLADQVADVLDFFSLGSVMCLGVTAGAYVLTLFATKYRERVLGLMLVSPVCKAPSWSEWLYNKVLSNLLYYYGTRGLVKESLLQRYFSMDVRGNGQDPESEIVQACRSLLDERQGANVWRFLQAISRRHDLTESLKKLKCRTLIFVGENSQFHADAVHMTTKLDRRYCALVEVQACGSLVTEEQPHAMVIPMEYFLMGYGLYRPSQQESSPRSTLSPFCISPELLSPESMGVKLKPIKTRISLNV

SEQ ID NO: 9403 - protein, 139 aa, Zea mays
  VARIANT 15..139: note = Derived polymorphism lacks residues 15 to 139
  VARIANT 31: note = Ancestral polymorphism is P, Derived polymorphism is S
  VARIANT 37: note = Ancestral polymorphism is F, Derived polymorphism is S
  VARIANT 54: note = Ancestral polymorphism is A, Derived polymorphism is S
  VARIANT 67: note = Ancestral polymorphism is S, Derived polymorphism is F
  VARIANT 76: note = Ancestral polymorphism is E, Derived polymorphism is K
  VARIANT 83: note = Ancestral polymorphism is A, Derived polymorphism is S
  VARIANT 126: note = Ancestral polymorphism is T, Derived polymorphism is I
  VARIANT 129..139: note = Derived polymorphism lacks residues 129 to 139
MPISSCPFVRLKNFWQQLMNLMKSLFQNIRPSLEKFSANTRTRLHLLLTIRLIAQFTKLSGGLEGGSDPPAFQRAEKKRLEAAKRAEEAAAAKEAALEECLCDAQNSEVESAMTPRKVLEIRNIPTVRWIPCEAQQSNR

SEQ ID NO: 9404 - protein, 114 aa, Zea mays
  VARIANT 92: note = Ancestral polymorphism is G, Derived polymorphism is R
  VARIANT 79: note = Ancestral polymorphism is T, Derived polymorphism is M
  VARIANT 59: note = Ancestral polymorphism is T, Derived polymorphism is I
  VARIANT 48: note = Ancestral polymorphism is S, Derived polymorphism is N
  VARIANT 41: note = Ancestral polymorphism is T, Derived polymorphism is I
  VARIANT 40: note = Ancestral polymorphism is H, Derived polymorphism is Y
  VARIANT 27: note = Ancestral polymorphism is A, Derived polymorphism is V
MLTPCRFLPFQVVCKPGSLKTYKKFEAEIYVLTKDEGGWHTAFVTNYSPQFYFRTTDVTGRVELLGEMKMVLPGDNVTTNFELISLVPLEPGQRFVLREGGRPVGVGVVSKVLS

SEQ ID NO: 9405 - protein, 285 aa, Zea mays
  VARIANT 240..285: note = Derived polymorphism lacks residues 240 to 285
MFCFRVRFPRPRLTRNLRCRAHARDIHHPDLAPHPRKFRPRDPSAHRWKAPLTTCETRYRPHDAIPCPRPHPPHRSTKRPPPRPRSCPSSASTSPRHGLHSSAPLAAAVLGHLRASGVAVLPGLTELELAGAEAEMGFAFPLDLRAVLATGLPLGPKFPDTRSRVGLRSAFDLPIAAAALQITRGTLWLRCWGARPADLDCVLRPARSAICRAGEASIPRRRRSGPCRSRLSTRLIHALWKKRARSRVTDFRFPRPSPSTRPRCWQPPGLQGGRAPGPDGAGAGA

SEQ ID NO: 9406 - protein, 456 aa, Zea mays
  VARIANT 195: note = Ancestral polymorphism is D, Derived polymorphism is G
  VARIANT 150..456: note = Derived polymorphism lacks residues 150 to 456
  VARIANT 1: note = Ancestral polymorphism is M, Derived polymorphism is V
MSTTSSSSSFQWRPWVALSSIPVVVGANNERARRLAPGASDLFLDIQLPQHGASYLFLPERIIPEPRNSYSGRHPFTILSACSDRFLFIAVGGTRAEGVSNPACFLGNAQASTAVRLPDVPAHLGVNIILRNSIGLIADPRHGGHYMVAQLHPTCKTRHKTLLCYSTVTGQWTARPLASAERHEPWGANGVLAHGGLLWWIDICYGMLVCDPFAADDNLHLRFIRLPVSSMRIGGLVPRPEIIAQRRLIRPSQGKLRYVEIQGFPNDLMATNQQPTLKPQVRMFTLVFSQEGQQHCWVHEYTVSFPDIWSHYIYAGAGLPWGVVPSLAFIDPNNPNTLYFFQGRTLFAVDGYARQVLHHLRYSVDSTHGDLMFQNSLFVAAWELPLTLFVNGRAPDGESSSREIKQEEMDTSDFSVPDIDQEPAEQATDDQATESDSDDQAIDSDSDSDDQANTEP

SEQ ID NO: 9407 - protein, 357 aa, Zea mays
  VARIANT 184..357: note = Derived polymorphism lacks residues 184 to 357
  VARIANT 108: note = Ancestral polymorphism is P, Derived polymorphism is L
  VARIANT 104..357: note = Derived polymorphism lacks residues 104 to 357
MYSAATHRRHIGTTPPTKSSGFTAPRPPGSTHGHDLHGTTHGHGFQASTESRPRSLHGFNGIQPATAPRLRPNPAAPLHGATASRLPRTGSTASRLRRRKLQKQLSLPVKVLTYYSESFKFKYQEAIGDRSCNIHGTKEPLKWKVRFKIALGIAEGLLYLHEGCHRRIIHRDVKASNILLTEDYQPQISDFGLAKWLLDKLTHHVVYPIEGTFGERLCVRVTRTWDFYDPGDDKKLLHSDLVLLDEEVHKAWLPPWLAAQYAHYVGEEAKMTVWENMQKAEAEAAIQKLVIKLEKKRPYSLERIFNTLRSGSRKTQVVRSTSTANQNQHISRTIKTAPNLSKNGQMSSLSGCFRQDL

SEQ ID NO: 9408 - protein, 114 aa, Zea mays
  VARIANT 46: note = Ancestral polymorphism is G, Derived polymorphism is R
  VARIANT 64: note = Ancestral polymorphism is R, Derived polymorphism is W
  VARIANT 98: note = Ancestral polymorphism is V, Derived polymorphism is I
MSRKLKIFSDQINRAGLRSSVRPALEPDIDLEELEGVHQGAHGHSGVRFVSGIILKSKALAFERMLFRATRGNMLFNQASAGEPVTDPISGEEVEKAVFVVFFWGTSKSKDTKN

SEQ ID NO: 9409 - protein, 279 aa, Zea mays
  VARIANT 32: note = Ancestral polymorphism is T, Derived polymorphism is I
  VARIANT 33: note = Ancestral polymorphism is L, Derived polymorphism is P
  VARIANT 60: note = Ancestral polymorphism is S, Derived polymorphism is L
  VARIANT 128..279: note = Derived polymorphism lacks residues 128 to 279
  VARIANT 139..279: note = Derived polymorphism lacks residues 139 to 279
  VARIANT 242: note = Ancestral polymorphism is T, Derived polymorphism is R
  VARIANT 244..279: note = Derived polymorphism lacks residues 244 to 279
  VARIANT 245..279: note = Derived polymorphism lacks residues 245 to 279
  VARIANT 267: note = Ancestral polymorphism is K, Derived polymorphism is N
  VARIANT 272: note = Ancestral polymorphism is E, Derived polymorphism is K
MSVLLCVVLSFLFCLLPNFLFHKNLMRAHIVTLVLDAEKVLTILFTNESSRYCVHIFRVSDNLLKVNKPTLPLASGEFSVPTTVLLIVAFLVMSISIGIRSKSAPLMCDLLVSFLLGSAYSIDVPLLWWKRHAFLATFCIIFVRAVVVQLAFFAHMQCLVVLFVATCSEEALGTYKDIPNVDGDRDFGIQSMTVRLGQQRVHRLCINILMTAYATAILVGASSMNLYQKIVIVSGHGLLASTLWQRAQQFDIENKDCITQFYMFIWKLFYAEYFLIPFV

SEQ ID NO: 9410 - protein, 421 aa, Zea mays
  VARIANT 3: note = Ancestral polymorphism is D, Derived polymorphism is N
  VARIANT 208: note = Ancestral polymorphism is V, Derived polymorphism is E
MADRPSLPALIIAIAVLAGSYCRVASSASPAVEDELRGGGGAGGPTTMRRRAASVMVPITILKSAVSDGAVCMDGTPPAYHLDPGSGAGSRSWIVNLEGGAWCNSAKTCRLTRSSGRGSSDHMDKEIPFTGIMSSSRAVNPDFYNWNRVKVRYCDGGSFAGEAFDKDTGIYFRGQRIWNAVIRHLLSIGMANADQVLLAGCSSGGLAVILHCDQLRAFFPSGSTVVKCISDGGLYLDAVDVSGGRSLRSYFGDIVAMQGIAQNLPPACTARLDATSCFFPQNIIDGVKTPLFLLNAAYDFIQIVLSLAPDRADPSGAWRACKSNRTACSASQMSFLQDFRDQMVASVKGFSGSRSNGVFLSSCFAHCQSEQLGTWNTKPGGSPTIQNKGISKSVGDWYFDRAEVKAVDCRYPCDNTCHHII

SEQ ID NO: 9411 - protein, 474 aa, Zea mays
  VARIANT 9: note = Ancestral polymorphism is P, Derived polymorphism is S
  VARIANT 17..474: note = Derived polymorphism lacks residues 17 to 474
  VARIANT 108: note = Ancestral polymorphism is A, Derived polymorphism is V
  VARIANT 135: note = Ancestral polymorphism is A, Derived polymorphism is T
  VARIANT 146..474: note = Derived polymorphism lacks residues 146 to 474
  VARIANT 173..474: note = Derived polymorphism lacks residues 173 to 474
  VARIANT 178: note = Ancestral polymorphism is D, Derived polymorphism is G
  VARIANT 200: note = Ancestral polymorphism is A, Derived polymorphism is V
  VARIANT 285: note = Ancestral polymorphism is T, Derived polymorphism is I
  VARIANT 290: note = Ancestral polymorphism is G, Derived polymorphism is R
  VARIANT 335: note = Ancestral polymorphism is Y, Derived polymorphism is C
  VARIANT 370..474: note = Derived polymorphism lacks residues 370 to 474
MKGGKKRGPDGIPIEVWKCLVDIAIVWLTKLFNRIFRSNKMPDEWRSSLVPIFKNKGDIQSCTNYRRINLMSHTMKLWARVIEHRLRGMTHITMNQFGFMPVRSTMEAIFFIRQVMERYKEQKDMHMVFIDLEKTYNKIPRNLMWWTLDKHNVLTKYVTLIKDIYDKVVTSVRTTDSDTNVFPINIGLHQGSALSPYLFALLIDEITRDIQEDIPWCMLFADDVVLVDESREGVYIKLELWRTLESKGFRISRTETKYMRCDFGTTISDDVDVSLGGQVVPKKDTFRYLGLMLHIDGDIDEDVSHRIKAEWIKWRQAPGVLYDKRVPKKLKDKFYRVTIRPVMLYEVECWTTKRRHIQQLSVAEMRMLRWICGHTRLDRVRNDDIRDRLVVAPIEEKLIQHRLRLFGCVHQRPPEAPVHKGIIRQDNNVKRGRGRPNLTWKEAIKRDLKEWNIQRSCVWIEVLGKKLSTCPNCD

SEQ ID NO: 9412 - protein, 281 aa, Zea mays
  VARIANT 47: note = Ancestral polymorphism is P, Derived polymorphism is L
  VARIANT 52: note = Ancestral polymorphism is A, Derived polymorphism is T
  VARIANT 69: note = Ancestral polymorphism is R, Derived polymorphism is W
  VARIANT 103: note = Ancestral polymorphism is E, Derived polymorphism is Q
  VARIANT 105: note = Ancestral polymorphism is R, Derived polymorphism is M
  VARIANT 122: note = Ancestral polymorphism is L, Derived polymorphism is P
  VARIANT 124: note = Ancestral polymorphism is G, Derived polymorphism is E
  VARIANT 134: note = Ancestral polymorphism is E, Derived polymorphism is K
  VARIANT 136: note = Ancestral polymorphism is S, Derived polymorphism is F
  VARIANT 140: note = Ancestral polymorphism is A, Derived polymorphism is T
  VARIANT 143: note = Ancestral polymorphism is V, Derived polymorphism is E
  VARIANT 144: note = Ancestral polymorphism is L, Derived polymorphism is Q
  VARIANT 237: note = Ancestral polymorphism is A, Derived polymorphism is V
  VARIANT 243: note = Ancestral polymorphism is T, Derived polymorphism is I
MDIDLRFMSKVADIEDAEKQKMRDKVQKIIAHGINYFVNRQLIYNFPEELFADAGILAIEHADFEGIERLALITGGEIASTFDNPESVKLGHCKVIEEIMIGEDMLIHFTGIEVGQACTIVLRGTSEHVLDEVERSLHDTLCVLSETVNDTRVLFRGGWPEMTPRKKSHDIDAFSHALQAIPTTIADIVGFDRAELISQLQAEHHKENCTARIDVITGNVGDMQKLGIQESFKEKQAILLFATEAAKMILKVGEIITCAPCRREDKMSAVCLYCDWRRVDV

SEQ ID NO: 9413 - protein, 197 aa, Zea mays
  VARIANT 4: note = Ancestral polymorphism is K, Derived polymorphism is R
  VARIANT 10: note = Ancestral polymorphism is D, Derived polymorphism is H
  VARIANT 11..197: note = Derived polymorphism lacks residues 11 to 197
  VARIANT 14: note = Ancestral polymorphism is A, Derived polymorphism is V
  VARIANT 24: note = Ancestral polymorphism is R, Derived polymorphism is H
  VARIANT 52: note = Ancestral polymorphism is E, Derived polymorphism is K
  VARIANT 57: note = Ancestral polymorphism is G, Derived polymorphism is R
  VARIANT 68: note = Ancestral polymorphism is G, Derived polymorphism is R
  VARIANT 121..197: note = Derived polymorphism lacks residues 121 to 197
  VARIANT 151: note = Ancestral polymorphism is D, Derived polymorphism is G
  VARIANT 179: note = Ancestral polymorphism is P, Derived polymorphism is L
MQHKLRKTPDQVVAIAREMVAYARSLGCTDVEFSPEDADRSNREFLYHILGEVIKAGATTLNIPDTVGYNLPYEFGKLIADIRANTPGIEKAIISTHCQNDLGLATANTLAGARAGARQLEVTINGIGERAGNASLEEVVMAIKCRRELLDGLYTGIDSRHITLTSKMVQEHSGLHVQPHKAIVGANLFAHESGIHQ

SEQ ID NO: 9414 - protein, 158 aa, Zea mays
  VARIANT 6: note = Ancestral polymorphism is G, Derived polymorphism is E
  VARIANT 7: note = Ancestral polymorphism is C, Derived polymorphism is F
  VARIANT 38: note = Ancestral polymorphism is N, Derived polymorphism is T
  VARIANT 44: note = Ancestral polymorphism is E, Derived polymorphism is Q
  VARIANT 60..158: note = Derived polymorphism lacks residues 60 to 158
  VARIANT 63..158: note = Derived polymorphism lacks residues 63 to 158
  VARIANT 66: note = Ancestral polymorphism is A, Derived polymorphism is V
  VARIANT 76..158: note = Derived polymorphism lacks residues 76 to 158
MIFIQGCSFVTEDHAEPINPIATSANITTSMDMRLMMNKIKIVEFISVLLSIGSAAAKTRLIQLGAIKYAIDLFFEYPFNNFLHHHVENIIGSCLESKQDRLIDHVLDDCKLVTRILEAEKNSALSSDLTKVKSNSYIVFRGKISTMNRNCWSYDTDS

SEQ ID NO: 9415 - protein, 370 aa, Zea mays
  VARIANT 111: note = Ancestral polymorphism is Y, Derived polymorphism is N
MMMMGEGVSMPPWSHHVPVSGVDEGDEMTPYLLAALRQYLPCNDAGAEAEEDEAAAAAAAMAAGVDGYGCDEFRMYEFKVRRCARARSHDWTECPFAHPGEKARRRDPRKYHYSGAACPDFRKGGCKRGDGCDMAHGVFECWLHPARYRTQPCKDGTACRRRVCFFAHTADQLRVLPPTPQQQSSPRGAACSSPLAESYDGSPLRRQAFESYLTKSIMCSSPTSTLLSPPKSPPSESPPLSPDFRRGCWPGAGSPVNDVLASLRQLRLSRANSSPSGGWCGYPASAVAYGSPTGGALYGLSSTPRATAASCYMANLDPLDVSFGGDDEPVERVESGRALRAKVFERLSREGAVSGDAGGPDVGWVSDLIN

SEQ ID NO: 9416 - protein, 743 aa, Zea mays
  VARIANT 40..743: note = Derived polymorphism lacks residues 40 to 743
  VARIANT 226..743: note = Derived polymorphism lacks residues 226 to 743
  VARIANT 272..743: note = Derived polymorphism lacks residues 272 to 743
  VARIANT 363..743: note = Derived polymorphism lacks residues 363 to 743
  VARIANT 418..743: note = Derived polymorphism lacks residues 418 to 743
  VARIANT 497..743: note = Derived polymorphism lacks residues 497 to 743
MRANRVTPACNRSATRRSSSSPPWVALSSIPVVLDATDEQASMLAPGVSDFLIHIQHPWIRKDQPCSDCILFRVTRDDGVCDYAYFLGDVHARTAALLPDVPTDLGVHTFPQRSIAFIADTRHVGHYMVAQLQPTPTTLLCYCTITDKWTARPLASDMNHEPWGADGVLLAHGDLLWWIDIDYDMLVCDPFADDDDLHLHFIPLPVGCQMQGLAERVRPSELMHQRRLVRPSEGKLRYVVIHEVPNGPAANEKPTPQVCMFTLFSQDGQHYWVHEYTVSFADIWSNDFLAVMPWGEVPSLTLVDPESPNILYFFQDTTLYIVDERARLVVRRLEGCLIDFDNRELRFQTSRFIDVWELPPKREESLPIFKRRLLGDLLDFSARELQVQMDSANRINERCLELQKNKKSTKTKFEDDKRKVRPAKRSCGCPTILSRHMRVKYLQRFLHNSLPGSYGTLHCYATDMLAVASNLLVAVTWMINVVTARTLILIVWSSLSQFDAIPPEIGISRNSGSKKTKEEEGARRKAGAVKISPWTLARLNAEEVSKAAAEARKKSKILKPVGKHGAPENSSKPDHLPTDKRRLDRRGFPAELSLDPLATLSASGTESNYSDAATEICGSLAPLQLEARSAFQPSTAASTRNVASSPESSFDSPNLHPFRTSSATADEMQGAMMHTAHRGIEFKRSSSDGYEASRGEDSDRIPSRIVHRPSNWASVFLNSSQGDPPADLLSASAEGFVANGSGS

SEQ ID NO: 9417 - protein, 334 aa, Zea mays
  VARIANT 95..334: note = Derived polymorphism lacks residues 95 to 334
MDRYLTVERPRNESTIEENGIRITAQGLICNYVSYATSLLQSRPCRFEEIPSNVREVFLTGPTSKFGRAIALYLCRKKIRVLMFTVSSERFLKIQREAPPEYQQYLVQVTKYQAAQNCKICKNKVEAEAWFTGLSALICRRQHGSQVQHIDGIRIAGLPIDPDKLKIWVGKACLFIFNKLVQLFCLRNFRICLVYELVSKIGDAISYCAKAISLCKSRIQNLKSSKDALLDGIDGGDASAAEAEGGSEKSTIEKELEQLTSILPDLEKKLEDLSEANPSADMDEMVKAIVSRVTEVMPKAASFTSSQIATSSNGFDSSVMSTTATTGSSGSTVN

SEQ ID NO: 9418 - protein, 374 aa, Zea mays
  VARIANT 98: note = Ancestral polymorphism is A, Derived polymorphism is G
MGCFSCCCVADDDNVGRRKKHDDPYVPIPAHVYNFGPSRFPAPTPVISTGRAQPIAVPAIHLEELKEITKNFSSDALIGEGSYARVYFGVLKDGTKSAVKKLDSSKQPDQEFLVQVSAVSRLKHENVVQLVGYCAEGSTRVLAYEYATRGSLHDILHGKKGVKGAQPGPVLSWMQRARIAVCAARGLEFLHEKADPRVVHRDIKSSNILLFDHDVAKIGDFDISNQAPDMAARLHSTRVLGTFGYHAPEYAMTGQLSTKSDVYSFGVVLLELLTGRKPVDHTLPRGQQSLVTWATPRLSEDKVRQCVDPRLGDEYPPKAVAKMAAVAALCVQYEGEFRPNMSIVVKALNPLLHSRSGNRPTASSASHAAERSGL

SEQ ID NO: 9419 - protein, 394 aa, Zea mays
  VARIANT 353: note = Ancestral polymorphism is N, Derived polymorphism is I
MAAESFLFTSESVNEGHPDKLCDQVSDAVLDACLAQDPDSKVACETCTKTNMVMVFGEITTKATVDYEKIVRDTCREIGFTSDDVGLDADRCKVLVNIEQQSPDIAQGVHGHFTKRPEEIGAGDQGHMFGYATDETPELMPLSHVLATKLGARLTEVRKNGTCAWLRPDGKTQVTVEYVNEGGAMVPVRVHTVLISTQHDETVTNDEIAADLKEHVIKPVIPEKYLDEKTIFHLNPSGRFVIGGPHGDAGLTGRKIIIDTYGGWGAHGGGAFSGKDPTKVDRSGAYVARQAAKSIVASGLARRCLVQVSYAIGVPEPLSVFVNSYGTGTIPDKEILKIVKENFDFRPGMISINLDLKKGGNRFIKTAAYGHFGRDDADFTWEVVKPLKFDKASA

SEQ ID NO: 9420 - protein, 163 aa, Zea mays
  VARIANT 103: note = Ancestral polymorphism is S, Derived polymorphism is C
  VARIANT 93: note = Ancestral polymorphism is T, Derived polymorphism is I
MAPFPSTDTEAGAVAEWRPFLRRIARRGEDGGGVGSRATSNLPAALQLCSCPDRLSSQRPRGGLGVLMGLFFGALENPIMAEEMTARQQIVYTAKQMGSRSICNAKTFAVMGLIFSAAKCTIEKVQAKHDTTNTAVAGCVTGGALAVKDYFPIPLNSREPYKA

SEQ ID NO: 9421 - protein, 441 aa, Zea mays
  VARIANT 295: note = Ancestral polymorphism is R, Derived polymorphism is W
  VARIANT 285: note = Ancestral polymorphism is N, Derived polymorphism is S
  VARIANT 284: note = Ancestral polymorphism is A, Derived polymorphism is T
  VARIANT 176: note = Ancestral polymorphism is R, Derived polymorphism is W
  VARIANT 150..441: note = Derived polymorphism lacks residues 150 to 441
MPWPAMCMTPQSAAAARTASTHSSRCCWLAAAVEEGGDVDDGDPRRVVVIGMGARQVEGVPEAGSLVEKLDALNRVAAVASRLGRQCVAPALTGFDHVYADVLAGRADAGALAVVASRSDAAPLVRRRNRVAAATVALYAELDALAELEQSARRPPTDQARRALEQRAVDHPDMSWPVSFRSSCGASPRKMFMHYLSLSSSAPWTDGLEDEFSEDSSCISSTIRSGMLAPFSSEQGVPTTTTTPPPPNSGSIGRKARRFGPKSTVTSLAPASMVGGSALALHYANIIIVIEKLLRYPHLVGEEARDELYQMLPWSLKLALRRSLRARARSTAIYDMFLAHDWRETLQKMTLAWLAPMAHNTVRWQAEWSFEFEQQQQRVVSERSVLLLQTLYFTDREKTEATVCELLVGLNYICRYERQQNALLDCPISLGLDDCVEWQVQ

SEQ ID NO: 9422 - protein, 81 aa, Zea mays
  VARIANT 45: note = Ancestral polymorphism is W, Derived polymorphism is C
MPTTPPPAACRATAAASPPTPAGSASEDYLFHLVHPDGLADHALWPAYPPDYVAATRDFGRARPIAALVGVGLLVAARLAE

SEQ ID NO: 9423 - protein, 367 aa, Zea mays
  VARIANT 32: note = Ancestral polymorphism is R, Derived polymorphism is L
MAKESKLTAGVAAALTVVAACALCLLLPATARAQLRVGFYDTSCPNAEALVRQAVAAAFAKDAGIAAGLIRLHFHDCFVRGCDGSVLLTVNPGGGQTERDALPNNPSLRGFDVIDAAKTAVEQSCPRTVSCADIVAFAARDSISLTGSVSYQVPAGRRDGRVSNATETVDLPPPTSTAQSLTDLFKVKELSVEDMVVLSGAHTVGRSFCASFFKRVWNTSTNPATAIVDAGLSPSYAQLLRALCPSNTTQTTPITTAMDPGTPNVLDNNYYKLLPRGMGLFFSDNQLRVNPQMAALVSSFASNETLWKEKFAAAMVKMGRIQVQTGTCGEVRLNCGVVNPSSYSSSSAVELGSSAPAAVGEEGYAAS

SEQ ID NO: 9424 - protein, 250 aa, Zea mays
  VARIANT 24: note = Ancestral polymorphism is A, Derived polymorphism is T
MGRTPCCDRAAVKRGPWSPEEDEALRSYVQRHGSGGNWITMPKKAGLKRCGKSCRLRWLNYLRPDIRHGGFTAEEDAVIMSLYAQLGSKWSLIASQMEGRTDNDVKNHWNTKLKKRLLAAAAASSAPPPAPAPAPLSSTTLTSSLFPSLAIPTVKTEAYTCDDFLAPALGLGDPFAAAAAAADGSTSAASAASSASNNWSAAENGAGEASLFLLDFCAGPDLAGADQLHLPGGYYYPLDPILPSSPRRYS

SEQ ID NO: 9425 - protein, 1710 aa, Zea mays
  VARIANT 1426..1710: note = Derived polymorphism lacks residues 1426 to 1710
  VARIANT 1435..1710: note = Derived polymorphism lacks residues 1435 to 1710
MLTSYFEANMLHDEARCILYRDFPEWYTWQSGKGKVWQRRKRDTGGQVGRIVSAHPAEGERYYLRVLLNHVTGATSSVDLRTVDGVTLPAFREAAERRGLLESDNTLDDCLTERALFQMPSSLRRLFATILVYCEPSDVAVLWQKHKDSMSEDYQHKSQNKTHVEQMVLIDIRNMLQSMGKDIKTFPLPPIIDAYDDAIGTAREVYEEESIEPTAGDVALKDSLNEEQRAAYDKIMSAVDTDQGGLFFVDGPVLLATLRNQGKIAVATATSGVAASIMPGGRTAHSRFKIPLTIDDGAVCSFTKQSGTAELLRKASLIIWDEASMTKRQAVEALDNSMRDIMGRPALPFGGKTIVFGGDFRQVLPVVRKGSRAQVVASSLRMSYLWESMSHLKLVSNMRAKNDPWFAKFLLRVGGGTEDTNGDGDIRLPDDVCVPYSGSDSDLDNLIDFAFPNLNENMSDSTYITSRAILSTRNDWVDMINVKMIDRFQGEHMVYHSFDSAMDDPHNYYPPEFLNTLTPNGLPPHVLTLKIGCPVILLRNIDPANGLCNGTRLVVRGFQRNIIDAEIVLGQHVGKRIFLPRIPLCPSDEEMFPFQFKRKQFPVRLSFAMTVNKAQGQTIPNVGVYLPEPVFSHGQLYVAPSRATARSNIKILVMPAIDGRKKSRKGVKKTPTVDCGTYTKNIVYKEEIPCEPRVEVVLIDDAFVERKWMECLFQPSAYLGDEVIDCYINLIKAQKHLKCRSGGRVHIENAFQFNFLKRDGDLEIKTEELYPIKDMAHICSAERRVLLYLDHDMIKGLQRQIDMISQRKELKDHRWPDLQVASWPLREIDMGYAKQTDSSSCGLFLLNYIEYWTGDELSDSFTQEKMAVILLSSDLNKRRGCLLYKNEKEVDSGSSSDVEILENPTDSNKRKLRHVLDDSEVVYEDEEGPITQADLQRWFVDGWDKRAPVKVSTDGCTNDFLMVGLSTKDMPVTKADSIDVLCDYIMAIEDDTTLERTWVQSFNPFKIEISVKDLQNILTTTQDMILRCFDMAVRLLANKESRKPKEEIINNRKHYMDMRFWRIVGFGKLPKYHQDPTTEELPKTLDCWPSMNYYITGCRYVLMPWKFNGCYALFVIDHVKKHVTFIDFTPTQDWCKHMPYKRFVEAIIMASKKYKIAYSKKRSRWAEDIFKWEHTIQTGVPIDLRGFNTSYLVLQAMAMWGNDRRLKFVGDAKTLRRNFVIDLLKTLSTRSKLSIGVVCPYNAQVRAIQEKVGKACRRNDYFSVKVKSVDGFQGAEEDIIIISTVRSNGAGTVGFLSNLQRTNVALTRAKLGKTLHSITLLYTLLCQGFDDKPMVKRAVIVTPTSLVSNWESEIIKWLKGRVQVLALCESTRADVLFGIESFLKPLSRLQVFFCLLIISHAFLLRARELQQLNFVIIFSNWGGTAQAHWRNLLHRMQLKNSAGQKLMLHHGCDAPLRIGHSSHENMRHRSNDLPPLSHTVITQGYRVGNPGASHAPFVHCHAGSSSSHLPEPAVNYPHMSEEGFAPVGSHMDNRRAATKRKDPIVHPAGISATGKDINALEQHIKNLLSPSTPFFFNTLYDPYRVGADFVRGYPYSLREGVPTAISPRLWLNIPDYDAPTQLVKPLERNTRWPPFANWCFFLAIRYVDAILTIPKGTLFPTCGMNLAFDRELIGPAMYFGLMGDGQPIGLVLQPFDWIKKTFFEKPQPEA

SEQ ID NO: 9426 - protein, 105 aa, Zea mays
  VARIANT 7: note = Ancestral polymorphism is G, Derived polymorphism is V
  VARIANT 69: note = Ancestral polymorphism is G, Derived polymorphism is S
  VARIANT 70..105: note = Derived polymorphism lacks residues 70 to 105
  VARIANT 75: note = Ancestral polymorphism is T, Derived polymorphism is I
  VARIANT 85: note = Ancestral polymorphism is E, Derived polymorphism is K
MKPDCAGCATNNAAPAATPMYEITFSTIDKPKLLSELTSLLGELGLNIQEAHAFSTNDGYSLDVFIVVGWHDEEIEDLIEAVQKEIGRIEENGPRFELQMQDVTG

SEQ ID NO: 9427 - protein, 124 aa, Zea mays
  VARIANT 108: note = Ancestral polymorphism is S, Derived polymorphism is F
  VARIANT 83..124: note = Derived polymorphism lacks residues 83 to 124
  VARIANT 69: note = Ancestral polymorphism is A, Derived polymorphism is V
  VARIANT 60: note = Ancestral polymorphism is R, Derived polymorphism is W
MVFISSNSWSTPVEKMQIAENSAADRVEIPTDGASEWEIDVKLLKFGNKVASGSYGDIYRGTYCSQDVAIKVLKPERINADMQREFAQEVYIMRLSAVDILPNLLLTSINVAHCVSKMHRTIST

SEQ ID NO: 9428 - protein, 124 aa, Zea mays
  VARIANT 63: note = Ancestral polymorphism is P, Derived polymorphism is A
MSWVGSWVIRMLRSVGREPRGCVIDRQAIVTELHTSYASPSGMWCKRPPRSRPSCPARSLPRPMVESLDLGPKRWVFLCVDQATRFVHALGKNQRSCLLDILDCVREAMEFIVQRGTSTTLAIA

SEQ ID NO: 9429 - protein, 105 aa, Zea mays
  VARIANT 75: note = Ancestral polymorphism is G, Derived polymorphism is D
  VARIANT 28: note = Ancestral polymorphism is A, Derived polymorphism is V
  VARIANT 23: note = Ancestral polymorphism is C, Derived polymorphism is Y
  VARIANT 8: note = Ancestral polymorphism is S, Derived polymorphism is I
MEKRSNGSASLVLGLLMAASLSCQCHGARDVPAEKPLRPQNVFGFGGFYPGPTVNWVFPGPNGVTPQVGFGGMPGSSAFPGGGGVVGIHGGAGAGAGAGAVAKKP

SEQ ID NO: 9430 - protein, 149 aa, Zea mays
  VARIANT 52: note = Ancestral polymorphism is R, Derived polymorphism is W
MAMAARAPSTASTPSTASAPNTGPRRLESSVGQEESLGRQPWAEARRRTGPRWNLATQSNIFRSHSDGISNFSVWGQDVVSISRNKIALTSLSRPESEIGHQQLALQNLYSADRGVKHKNLSVLSTIAVLPLSRLFVVGTEDGFLKMCH

SEQ ID NO: 9431 - protein, 1504 aa, Zea mays
  VARIANT 1099..1504: note = Derived polymorphism lacks residues 1099 to 1504
  VARIANT 916: note = Ancestral polymorphism is W, Derived polymorphism is L
MLHGLAPAPPIQSGHRAPAMGCSPEGGSAACPDCLRRLVLRDLAGSGLSFVYGLSDSPLPFAASAVVQIASDGDEGSIGRQHISSFVLVGLCGGKVPFNSQQCDNSSLENCIHKDPQAEQTLYNGDNEYTEQSDSSSCIECIEGCKSSSGPCKQPLAISTITKLAPACYLSIGHTSEVRELITGYLTSSSEEYVINSLNLLFENKISGSAGLDFLSFVGFSAFDDLHSSGCVRHPNILPVLGILETSDCCYMLQPKAPYTLENIMHYSPEAFCSDWHIRFLVYQIISAVAYLHDLGVHHGNLRPSKILMSDSLWPYLSISDTCPVKHSWGVANHKCSPNSCCFMEDCSSKAIYSGFKLQSSLDWHSHFKQWWKGELSNYEYLLVLNKLAGRRWGDPGFHTVMPWVIDFTGIPDESSDNGWRDLTKSKWRLAKGDEQLDFTYSSSEVPHHVSDECLSELAVCSYKARRLPKTILRSAVRSVYEPNEYPSSMQRLYQWTPDECIPEFYSDPQIFTSLHSEMSDLALPSWATSAADFIYLHRDALESDRVSQQLHHWIDITFGYKLSGEASVEAKNVMLPSNDPSRPKSIGRHQLFTRPHPKRLVSTPHAVYHNNLDSCARCCGKRSGATTDAVLNGCGSPNMVSEIGRLEEFEKATLFAELEYQLNPVYDYADGDPSTCFSSNKYPKKQNADQILQHDNALPAAPNFDLGSFLECFESDDNSHMGYQELLLWNKKSNSQNECHANDVFSIGCILAEIYVQKPLFDNALLSAYKEIGIMPGALQGLPSHVTLLVESCIQREWKRRPSAKHLLESSYFPPSVRSAYMFLAPLQVLSTSRERIKYAAKLASEGALKAMGEFAAEMCAPYCLSLLSSSLSDVDTESALSLLKEFLGSLTIQATKDLVLHIIQKILQASKSKWKVLVYTIIILCITDGCLHFIQTILPLIHCFGKGLCADGINTLVRIGGLLGENFVVKQILPLLLNVIFSCIDSSKMSKPEPQHSWNSFALIDSLSALEGLVLVLPVKTVIKELLQDQACLYVKVLMQIPLDLRVIQVAATALIDLCQRIGPENTSIYVLPQLKELFAELAFSHDSSGLNHPIKGFKSSDENKNKPIKVESRIDLLLLLYPFLASLVGIEKLRESCSTWFLLEQALQRLYNWKWEPSGDCSKNAENMKGQRLQPGNYMSSEFVPTKLLFNGVGWSMPQSETTKKNGRNTAASNLENETSSDNLSTSSSGNQPWFWFPTPDSSWGVPEFLGRGGGLRDELPWKIKASILYSARAHPGALRSLAVHDDECTVFTGGVGPGFKGSIQRWELPNMNCTSGYYGHEEVVNSICILSITGRVASCDGTIHIWNGQSGKLIAAHAESSTTFPLQTPSIEQANMLNQDALSGGILSNAFRGSLYTTMHYMESEGILVAGMGNGSIRFIDISQDQKLHLWKSDTAEISFSSLVSAICSCGSNKLRKGSLMASSWIAAGLSSGYCRLLDKRSGNIIAVWRAHDGHITKVC

SEQ ID NO: 9432 - protein, 59 aa, Zea mays
  VARIANT 12: note = Ancestral polymorphism is H, Derived polymorphism is Y
  VARIANT 10: note = Ancestral polymorphism is H, Derived polymorphism is N
  VARIANT 1: note = Ancestral polymorphism is T, Derived polymorphism is M
MYTKPKKIKNKYKKVKLAVLQFYKVDDATVKVTGLRKECPTPSVMRGCSWPTTSTATTA

SEQ ID NO: 9433 - protein, 120 aa, Zea mays
  VARIANT 55: note = Ancestral polymorphism is P, Derived polymorphism is A
MLAGEAEILEDKPDLSRWTLKYEVLGRDVEFSWLARNMTPIKNQKIHWRSLEGLANRGAVRFFPKSSSSCRVQLTVAYEVPEILAPVASALKPFLESLLLKGLERFATFAKERNSKIPQA

SEQ ID NO: 9434 - protein, 326 aa, Zea mays
  VARIANT 65: note = Ancestral polymorphism is W, Derived polymorphism is C
MAIATESRGCEDRDSAHANEEKRWVLSDFEVGKPLGRGKFGHVYLAREKRLIILVSSAVLAMFTCPEKRGELLCLTVLFFVWKQSNQIVALKVLFKSQLKQSQVEHQLRREVEIQSHLRHPNILRLYGYFYDQTRVYLILEYAAKGELYKELTRCKHFSERRSATYIASLARALIYLHGKHVIHRDIKPENLLVGAQGEIKIADFGWSVHTFNRRRTMCGTLDYLPPEMVEKTEHDYHVDIWSLGILCYEFLYGVPPFEAKEHSETYRRIVKVDLKFPLKPFVSPAAKDLISQMLVKNSAQRLPLHKVLEHPWIVQNADPSGVCRG

SEQ ID NO: 9435 - protein, 289 aa, Zea mays
  VARIANT 194..289: note = Derived polymorphism lacks residues 194 to 289
  VARIANT 185..289: note = Derived polymorphism lacks residues 185 to 289
  VARIANT 135: note = Ancestral polymorphism is P, Derived polymorphism is L
  VARIANT 87..289: note = Derived polymorphism lacks residues 87 to 289
  VARIANT 85: note = Ancestral polymorphism is P, Derived polymorphism is L
  VARIANT 73..289: note = Derived polymorphism lacks residues 73 to 289
MKFNGGCGLANNVEVLFPESNVVGSASGSASVPPVALNADSTGPVSALSAATDCKTLVEKAIIALPPELSAQENDPKRKARSHDPGWQFGWWPDTIKKDFVQCVFCKKIVLSGIKRFKQHLAGGFGDTMKCARVPELVSKEMHTYLRRNMRVVITADGDEGEEEGEQIDVRPLPSSRTKTKQAKKQISQASMSSFVVSAPIKPNTKKASKSVSAMLCKTPEEVVAERHKNKTSQATLEHCSKKGTEVKQIVDDHVADFLYENKIPLNVVNSRSWQIMMESIGQYGPGYR

SEQ ID NO: 9436 - protein, 592 aa, Zea mays
  VARIANT 348: note = Ancestral polymorphism is V, Derived polymorphism is A
MKKCSGVLFILTLAVVLFLLSPSPSPTPPPNTAPNGPITDLLPTLPGLSDLYPPAPNSTAHLSWGLLRPLLCRSDALPGTSAGVLEAAEAWRNLTLAVTAAASEEEARLQGLRCSSSVGGDLRTGRATLPCGLSEGAALTVVGILREGAAKFWVEMLGANGEVVLHVNVSLGAAGVLVEQNSWTPEEGWGEWERCPPVGDVGSSNSSLQLSPVDGLVHCNEKVGARIVQESNNTVVNITGNQPEDWQSQTGHGQLSGRFSIVEGEPFTVTLWAGVEGFHMTVNGRHETSFAYRERSEPWLVAEVMFSGDLELLSFLANELPVSEDIDMENVAVLKAPPLPKKQTFLLVGVFSTGNNFKRRMALRRTWMQYEAVRSGDVVVRFFTGLHKNEQVNMELWREAQLYGDIQLMPFVDYYTLITLKTISICIFGTKIVPAKYIMKTDDDAFVRIDEVISSLKKSNSNGLLYGLISFQSSPHRDKGSKWFISRKEWPFDMYPPWAHGPGYVISRDIAKFVVQGHQELTLQLFKLEDVAMGIWIQQYKNSGQQVNIVTDDRFYNEGCEADYVLAHYQTPRLMMCLWEKLKTEYHAICCE

SEQ ID NO: 9437 - protein, 118 aa, Zea mays
  VARIANT 62: note = Ancestral polymorphism is L, Derived polymorphism is V
  VARIANT 7..118: note = Derived polymorphism lacks residues 7 to 118
MTFKCARGLPPEAAAEQIVKEAVEAKGLRDDTTCIVIDIISPYKPKRTIQSQRTPGKGLVLLKNFFLRKTTSDSLTLPDEDNYPEPDLEEVFEDGCPSLSRRFVPLPHLDCGCIIAGK

SEQ ID NO: 9438 - protein, 383 aa, Zea mays
  VARIANT 12: note = Ancestral polymorphism is A, Derived polymorphism is E
MAAGGAGAAVAAVLTTAVAAVLVAVLTTTVSGQDDPAPEPAPAAACARRPVVFAFGDSNTDTGGVAAGLGHYYPLPEGRVFFRRSTGRLCDGRLVIDYLCESLNMSYLSPYLEAVGSDFTGGANFAISGSSTLPRNVPFALHVQVQQFLHLKQRSLDLAAHGGTAPVDADGFRNALYLIDIGQNDLSAAFGSGAPYDDVVHHRIPAIVSEIKDAIMTLYYNGAKNFWVHGTGPLGCLPQKLAAPRPDDSDLDYNGCLKTLNDGAYEFNGQLCAACDGLRSQLRGATIVYTDVLLVKYDLIANHTAYGFEEPLMACCGYGGPPYNYNANVSCLGPGFRVCEDGTKFVSWDGVHYTDAANALVAAKIFSGQFSTPQMPFDYFCQA

SEQ ID NO: 9439 - protein, 627 aa, Zea mays
  VARIANT 66..627: note = Derived polymorphism lacks residues 66 to 627
  VARIANT 178..627: note = Derived polymorphism lacks residues 178 to 627
  VARIANT 235: note = Ancestral polymorphism is T, Derived polymorphism is I
  VARIANT 244..627: note = Derived polymorphism lacks residues 244 to 627
  VARIANT 266: note = Ancestral polymorphism is S, Derived polymorphism is F
  VARIANT 284: note = Ancestral polymorphism is N, Derived polymorphism is I
  VARIANT 289..627: note = Derived polymorphism lacks residues 289 to 627
  VARIANT 292: note = Ancestral polymorphism is V, Derived polymorphism is A
  VARIANT 294: note = Ancestral polymorphism is T, Derived polymorphism is I
  VARIANT 323: note = Ancestral polymorphism is I, Derived polymorphism is K
  VARIANT 345..627: note = Derived polymorphism lacks residues 345 to 627
  VARIANT 356: note = Ancestral polymorphism is G, Derived polymorphism is A
MNGQTPMGLAAVAVRPCCSRLISSASAAAASKTAAGTATSLFPRLPHPHHPPYGRRLPFLVSAASQSQAGPGTPPTPVPAPVPSDPRAAVSGNLPFFDRVLFPDSFPLETPPSKEEEDAAALQTDEAVAPAVPLREETETEREAWRLLRRAVVSYCGEPVGTVAAEDPECTEMLNYDQVFIRDFVPSALAFLMRGETEIVRNFLLHTLQLQSWEKTVDCYSPGQGLMPASFKIRTVPLDENNEGFEEVLDPDFGEAAIGRVAPVDSGLWWIILLRAYCKITGDNALLERVDVQTGIQLILSLCLADGFDMFPTLLVTDGSCMIDRRMGIHGHPLEIQALFYSALRCSREMLVVNNGSKNLIRAINNRLSALSFHIREYYWVDMKKINEIYRYKTEEYSHDATNKFNIYPEQIPSWLVDWIPEKGGYLIGNLQPAHMDFRFFSLGNLWAIASSLTTPKQAEGILSLIEEKWDDLVANMPLKICFPAMEDDEWRIITGSDPKNTPWSYHNGGSWPTLLWQFTLACIKMGRPELARRAIAVAEERLSDDKWPEYYDTRSGRFVGKQSRSYQTWTIAGFLTSKMLLENPELASILTCDEDLELLQGCACCLSKKRTRCSRRVAKPHAGVKL

SEQ ID NO: 9440 - protein, 171 aa, Zea mays
  VARIANT 106: note = Ancestral polymorphism is K, Derived polymorphism is T
MDYAFEFIINNGGIDTEKDYPYKGTDGRCDVNRKNAKVVTIDSYEDVPANDEKSLQKAVANQPVSVAIEAAGTTFQLYSSGIFTGSCGTALDHGVTVVGYGTENGKDYWIMKNSWGSSWGESGYVRMERNIKASSGKCGIAVEPSYPLKEGANPPNPGPGARRVRQLLLVP

SEQ ID NO: 9441 - protein, 349 aa, Zea mays
  VARIANT 136: note = Ancestral polymorphism is V, Derived polymorphism is E
  VARIANT 121: note = Ancestral polymorphism is A, Derived polymorphism is S
  VARIANT 88: note = Ancestral polymorphism is P, Derived polymorphism is R
  VARIANT 63: note = Ancestral polymorphism is A, Derived polymorphism is S
MVAPSAAAGRDMAPESLPLGIIPTVDMSAPSGRGELARRLVRACAERGFFKAVNHGVPPRVSARLDAATSAFFARPAPVKQAAGPPDPLGYGSRNIGANGDVGELEYLILHAQPAAVARKAMVIDAEDPSRFSVAVNEYVDAVRRLACRVLDLLGEGLGLGDPTSLSRFVSAVVDSDSVLRINHYPTSSAAADVSAKGIGFGEHTDPQILSLLRANDVDGLQVLLPDARGGSGGDQWVQVPADPSAFFINVGDALQALTNGRLVSIRHRVMASTTRPRLSTIYFAAPPLDARIAALPETVVAGAARRYRTFTWAEYKKAMYALRLSHNRLDLFHADASSGGSGDKKHDI

SEQ ID NO: 9442 - protein, 505 aa, Zea mays
  VARIANT 7: note = Ancestral polymorphism is G, Derived polymorphism is E
MYRVASGLGALKRHGANAQMMNAAIRCASTSVAQRSSGGFWTWLTGARSNEIPPPDFTLPGVTIPPPLPDHVEAGKTRVTTLPNGVKIASETSAGSSCSVGVYVDCGSVYEAPETTGASQLLKTMAFTTTANRSELRVVREIEAIGGSAKASASREMMSYTYGALKTYMPEMVEVLIDCVRNPAFLDWEVKEQILRLQAELAKSSSFPENFLLEALHSTGYSGALANPLIVPEYSVSRLNADVLEQFITENYTASRIVLAASGVDHDELVSIAEPLLSDIPSVSGTTRPKSTYIGGEYRRSADSSSTDVALAFEVPSGWLKEKDCVTVSVLQALLGGGGKFSWGRQGKGLHSRLNRLVNEFDQIKSISAFKDVHSNTGIFGIHTSTDASFVPKAIDLAARELTSLATPGQVDQSQLDRAKASAKYAILANLESQASLTEDMGRQVLAFGERKPAEHLLKAVDGVTMKDITSVAEKIISSPLTMASHGNVLNMPTYESVSGKFRSK

SEQ ID NO: 9443 - protein, 156 aa, Zea mays
  VARIANT 5: note = Ancestral polymorphism is D, Derived polymorphism is A
  VARIANT 43: note = Ancestral polymorphism is E, Derived polymorphism is Q
  VARIANT 44: note = Ancestral polymorphism is S, Derived polymorphism is C
  VARIANT 47: note = Ancestral polymorphism is P, Derived polymorphism is L
  VARIANT 48: note = Ancestral polymorphism is T, Derived polymorphism is A
  VARIANT 71: note = Ancestral polymorphism is S, Derived polymorphism is F
  VARIANT 81: note = Ancestral polymorphism is F, Derived polymorphism is L
  VARIANT 100: note = Ancestral polymorphism is T, Derived polymorphism is M
  VARIANT 101: note = Ancestral polymorphism is T, Derived polymorphism is I
  VARIANT 123: note = Ancestral polymorphism is P, Derived polymorphism is H
  VARIANT 145: note = Ancestral polymorphism is S, Derived polymorphism is I
MVLIDIMNMLQSMGNDIKAFPLPAIIDMYDDAIGTAREVYQEESIELAAAYVALKDTLNEEQRVAFDTIMSVIDTDHGGLFFVNGHGGTGKTYLYRVILMTLRSRDKIVVATSTSGVVDSIMPGGRTTYSHFKIPLTIDDIVVCSFMKQSGTAELL

SEQ ID NO: 9444 - protein, 496 aa, Zea mays
  VARIANT 104: note = Ancestral polymorphism is P, Derived polymorphism is T
MATMAGRLVARTSSSSAKRQRFSSAVLLLALFQSSWCYDDAAATTTVDYGYNNEHEADRVAFLPGQPRSPPVSQFAGYVTVNERNGRALFYWFFEAQTSPAHKPLLLWLNGGPGCSSVGYGAASELGPLRVNRHGAGLEFNNFAWNKEANLLFLESPAGVGFSYTNTSSDLTKLDDAFVAEDAYSFLVNWLKRFPQYRSHEFYISGESYAGHYVPQLAELVYDRNKGNTNTHINLKGFMVGNPLTDDYYDSKGLAEYAWSHSVVSDEVYERIKKVCDFRVSNWTDDCDTAMSAVFSQYQEIDIYNIYAPRCNLPPSSAALALAVDKAVVANRQEHFRRRIRMFSGYDPCYSSNAEKYFNDAGVQTAFHANASGARKWEVCSDSILRSYNFSVLSVLPIYSKLIKAGLRVWLYSGDADGRVPVIGSRYCVEALGLPVKTQWQPWYLNKQVAGRFVEYHGMTMVTIRGAGHLVPLNKPAEGLALIDTFLQGKQLPTHR

SEQ ID NO: 9445 - protein, 786 aa, Zea mays
  VARIANT 318..786: note = Derived polymorphism lacks residues 318 to 786
MDIVVGALSGIVDALPGKLGELLEQEYALLSGVRGDVIFLKDELSSMRAAIHYCESLDHHDSQTTGWISLVREVAYDIEDWVDLFSIRVHGGAQSTSGFRAWLSRSVDKLTALPARHTIASELQGLKERVLEISRQRNRYRLGQMVGTTSQHPHDPRLSALFVDPGRLVGFDGKVEDVSKTVMDAGGSNGLRIVSIVGMAGSGKTTLANAVYRRLQADNTFQCSAFVSIGPKPDMVKTVKDMLSRLGDGHRGGEDISQLIPRVRGILEKKRYLAWIDDIWSSEQWGVIRCCFPDNSLGSRIITTSRNDALPTNHHYGSSKFVYKIGLLTDNEARELFLKKAFSSRNDCPQHLVDAFTKVLRRCAGLPLAVVSVAAKLAHKQSREEWEKHGLNLLYSSHSDGSDGLKQILHLSYSDLQPQLRSCLLYLSIFPENSEVETDRLVRRWIAEGLIAASNEDTAISSLNELIGRNLVQPLDLNHDSIPRCCRVHPVIYDFIVCMSMQDNFATVTDAQHVPINNKTVRRLSLNLKSNSKQDQPAARNETTDLSHARSVTVFGHASATPHLTDLKVVRVLDLEGCKGPVCLDGLCKLVLLRYLSLRGTDVSELPAAIGDLRCLETLDVRSTKVEELPPSIVRLQKLMHLLAGSAKLPDGMDKMKALRSLSCAATTKSSANVVEELSKHHNLRQLELYYYATETPGNEKQIKFPADGLQTVKQLCIRCTSPSVTFEPRVLPKVQALVLRFEKGRADDTIGVSGLEHLSSLKHLVLEFEQHDAGAMATVTAFWGP

SEQ ID NO: 9446 - protein, 128 aa, Zea mays
  VARIANT 113: note = Ancestral polymorphism is L, Derived polymorphism is W
  VARIANT 47: note = Ancestral polymorphism is G, Derived polymorphism is S
  VARIANT 15: note = Ancestral polymorphism is S, Derived polymorphism is L
MVDICCFDKIGTLTSDDMVGDPLEKAAIKGLDWIYTSDEKAMSKKPGGQPVQIVHRYHFASHLKRMSIIVCIQQKFYAFIKGAPETIQEKLVDLPAAYVETYKKYTRQGSRVLALAYKLLPEMPVSFC

SEQ ID NO: 9447 - protein, 903 aa, Zea mays
  VARIANT 492..903: note = Derived polymorphism lacks residues 492 to 903
  VARIANT 365: note = Ancestral polymorphism is P, Derived polymorphism is L
  VARIANT 354..903: note = Derived polymorphism lacks residues 354 to 903
  VARIANT 212: note = Ancestral polymorphism is R, Derived polymorphism is C
  VARIANT 63: note = Ancestral polymorphism is D, Derived polymorphism is G
  VARIANT 45..903: note = Derived polymorphism lacks residues 45 to 903
MVKHPSSRWFNDCRPQLRLDVPVCRKMLIWARMMLVNHEDRSMLQKSDIYRGVLASLYCFQADPSLVAAFLTYWNVDGHTLVTSQGEMGYPLHTISDAMGIPISGRLYEEFIPPCSDVHGHLETLYAIYASLCPSELQPGPGLVSLTAWLDHFFDDKADSFGSPLLDGFADPKDPLLQKLRFHVAVQGDCLAAILGAETLSYRSIYPSTVYCAAFIAAWLCTYCIHVEAGQYIRPEVFHMAVQISEGVRRAIGVASLAFLYNCLDNIHDNIISGTRSASECSLFLPGHFIMGWFASFWKQARKSATLHCPVKFPPFVIDLTKLEQPMPITEAHHIFWDFDGDGRGLRSLDFLGRSSLRFPGGHRLVFIRDGRTKNEKQPFSISVSAMELLMSSLFGGITHRRGERSDNLVYYPHRSAHIFNYDQLIPYFDYRAADNVIDSLNFRSYSPSSRKETLQICVRRHLSYYDQPEGHALVVQPSNLGTRRSYNYIIWCNNAFRFLRDPSFFCDRIFMSAVIETTVAAPAEGDIDQPAKGTAVVKYSLLPGDSEPDREDTTPTTVSGLDGSLACPPDDPDFLNDFVFTGALEPFTDLFTDLPNEVMEMQASHTQVLTSGHLEQTDMVHVSQPVSSTGLMSSLDQDVLSTQPGSSQASVRKILKQLWNEVEQAISLFRAQASATDVIGEKPNYSEFDARQPVHISEPTDVPAPRFMQYAHGDLDRFQRRIRERPFNKDIVISEIADTMKWWKEWFNPAPPKIQRLIDGFNALHETLSEDPEHSTTSIIDKRKQVRQKIDDIKASQASVATACSSMISITKSLEAQINLHELRRQQHVSRAEELQAQIKKLSSQLKETEDELEASSVKSQSQLQDAEKTIAGFTDQDEEGLTNYVHSLLDFFASCTFGPYA

SEQ ID NO: 9448 - protein, 748 aa, Zea mays
  VARIANT 109..748: note = Derived polymorphism lacks residues 109 to 748
MFDVDSALDDLGNAGVIAAAVLAVLLVALSTYGRRLCRHPAVRFFVWGVSIVFLPLTSAILSALLSRVRAAKCKSSSNAHAPTPCDPPPPPPGQPRNPDVQDMWTLLLWLVLILTVKCNANIAATAVTAAASTPGDGDASIDGYRIRPPVQNLAEYAWLAYLICLCVPVATWLGHLNIAIFFLFSALGLAKLALKLAAFYSASGSFALGKNARLIAGYMEQLVVDGGREQVPRYIVMGEKEKHVEESPQGYRIKRDVLQDRFSDLVTLTLDRVWRLAEHGDGILAERAELRDLCLSYSLFKILRLRLSGHPLANAGSDEALSFVLRGMDSSGTSRARAVNVDRLFRVLVDELGFASDFYYSPIPLCIFGGWCAALNYICSLLIIVGAIAVGWIYHREIYQDWGVIHYTSYNVITYSLLLTVVLVEAWEIVAGMCSNWTKMALLGHYIRHQSMWRRSSCVHAALTAVMHLRPARRWRDKLGQYSVLEPRRFRRRIGLLSELLYGSSGLMMSIRVSPLVRDAVFRSLLSSYRCGASEDSAAARRVGGKVDSAMYGSQKSWAWDASKRSSNTELILVWHVATRLFEMKTMSASPDMIAACHLSYYCAYLVAAVPELLPDSAAWTKRRYKEVSDDVRAALGADYCGDGESTAERYERLVAELSKDSRDMVLRRGAELGRHLVEEYGEDVASACRILADFWSNMVLFVAPSENGNGHVQAMAGGGEFITIIWALLLHAGITTRPPNTPGGDIP

SEQ ID NO: 9449 - protein, 476 aa, Zea mays
  VARIANT 162: note = Ancestral polymorphism is R, Derived polymorphism is C
  VARIANT 183: note = Ancestral polymorphism is S, Derived polymorphism is P
  VARIANT 218: note = Ancestral polymorphism is S, Derived polymorphism is C
MARNEPLDFENEDDPLLPAPRPAKRSKVIGMDDLLLDYFQSGKKDKLKVKAAKSKHGPKGGYDSGEEDDRATQQEITVCKIFEEVQQKGKVMDARDDVPPWGQQFFRCQNPPSNLSNGGVENCHLLQSFSAIEDIGFDLEMHQGEGFLEGMLLDGWLLNLVRICGFVEDSVASWTLTNLLHSPNEKLQVSAADFWDGILSLDEAGEPLVNLGYFPSYSVLKRAMLSYGYLFDTSGTKASISGSTAAGGPDDSLPHNIIAWLRVVSACCKIRKVHSIFSPSEAEELLAIAISLFLDRRLEGLLLVLGDCLNSLILYFNTSEWETSCVMVAESIAQRVTLDLNCLRVVDCITGTNKRSKILRSQVALQLLKISFGLKVANVEKILKLVTSINVKEKECDFFRLYVYLVLMDNLLFSSDAFRDKTGMVDAWRNYLRNCSTQIGCTDWRFYAPKARNKASYLLQGSILKKSSGDGKSCVR

SEQ ID NO: 9450 - protein, 503 aa, Zea mays
  VARIANT 410: note = Ancestral polymorphism is G, Derived polymorphism is R
MAAAALAMAEQVVAELRVRCETPPSMLREVAVEMAREMGAGLEKDGGSRVKMLLSYVDKLPTGREEGLFYGLDLGGTNFRVLKVQLGGNAKHVVDRDSREVGIPPHLMSGSSSELFGFIASELAKFVDDDEKCANISNGKKREIGFTFSFPVKQRSVASGTLVKWTKAFSINDAVGEDVVAELQTAMEKQGLDMHVAALINDAVGTLAGARYYDKDVVAGVIFGTGTNAAYVEKANAIPKWEGELPHSGDMVINMEWGNFFSSHLPITEYDQELDKESLNPGEQIYEKLTSGMYLGEIVRRVLLKISLQSAIFGDIDHTKLQTHFLLRTPHISAMHHDETSDLKIVAENFEENLEITGTSLEARKLVVEICDIVATRAARLAAAGLAGILMKIGRDHSVEDQRSVIAIDGGLFEHYTKFRRCLETTLGELLGDEASKAVAIKHADDGSGIGAALIAASQSQYKNDLVAVKHADDGSGVKYAEDKRADDGSEIGAALIAASQSQ

SEQ ID NO: 9451 - protein, 229 aa, Zea mays
  VARIANT 162: note = Ancestral polymorphism is G, Derived polymorphism is R
  VARIANT 137: note = Ancestral polymorphism is G, Derived polymorphism is R
MAWRGPLGAGEEALDSGLELSLGLPAYFARPSGLDAAREEPAEASAYAIQAASGSNVSKARVRPAGAAPVVGWPPVRSFRRNLAASSSRPSSGKHTRQEGSAKDGLFVKINMDGVPIGRKVDLTAYGGYADLSAAVGKLFRGLLAAQRDRAATAGGEEEEEGEGPVIGGDYTLVYEDDEGDRVLAGDVPWEMFVATAKRLRVLKSSDVPASSVTLGAGGPERSAADCCC

SEQ ID NO: 9452 - protein, 236 aa, Zea mays
  VARIANT 158: note = Ancestral polymorphism is S, Derived polymorphism is W
MSCSSPPPLEHHHDAARPTIAPALDLLDEHWFFGNTLVTNSSAKKKKKPPPHLPRSPSTATATATGEKASGSAGPPARLGGRQLLRTPSLPSSRVGMTTELPLPTNNNKDDDDDLNWSSIYEGVLRTRLAEGGRSALRRAPSMPVPTSATAMGLLRHSHKAEAEQRTPGGGSSGNEPRRSKKQTTSPRRPYLSEAWQRPALVRVQSAAEMKDLLRMWAQAVACNVRHDTVSNHKPF

SEQ ID NO: 9453 - protein, 325 aa, Zea mays
  VARIANT 301: note = Ancestral polymorphism is I, Derived polymorphism is L
  VARIANT 218: note = Ancestral polymorphism is G, Derived polymorphism is S
  VARIANT 150: note = Ancestral polymorphism is Y, Derived polymorphism is C
MASFFRDARLPQQRVVEGVPFPAVLVPSAPAGGGLDEFLAAVRSERASRLEPLVRHAGALLLRGFPATTAADFDRAVDAFGYEELPYVGGAAPRTNVVGRVFTANESPPDQKIPFHHEMAQVPTFPSKLFFFCEVEPKSGGETPIVLSHYVYKRMQEEFPEFVEKLEKEGLVYTRVLGEGDDPSSPIGRGWQSTFLTKDKAVAEERAAKLGMKLEWTGDGVRTVMGPIPAVKWDESRGRKVWFNSMVAAYTGWKDARNDPVKAVTFGDGSPLPADVVAACGRVLEEECVAVPWRRGDILLLDNWAVLHSRRSFEPPRRILASLCK

SEQ ID NO: 9454 - protein, 193 aa, Zea mays
  VARIANT 70: note = Ancestral polymorphism is D, Derived polymorphism is G
  VARIANT 72: note = Ancestral polymorphism is G, Derived polymorphism is D
  VARIANT 80: note = Ancestral polymorphism is V, Derived polymorphism is M
  VARIANT 87: note = Ancestral polymorphism is K, Derived polymorphism is N
MFLWDWFYGVLASLGLWQKEAKILFLGLDNAGKTTLLHMLKDERLVQHQPTQHPTSEELSIGKIKFKAFDLGGHQIARRVWKDYYAKVDAVVYLVDAYDKERFAESKKELDALLSDDSLANVPFLILGNKIDIPYAASEEELRYHLGLSNFTTGKGKVNLGDSNVRPLEVFMCSVVRKMGYGDGFKWVSQYIK

SEQ ID NO: 9455 - protein, 180 aa, Zea mays
  VARIANT 21: note = Ancestral polymorphism is S, Derived polymorphism is L
  VARIANT 23: note = Ancestral polymorphism is Y, Derived polymorphism is H
  VARIANT 32: note = Ancestral polymorphism is E, Derived polymorphism is V
  VARIANT 34: note = Ancestral polymorphism is S, Derived polymorphism is F
  VARIANT 43: note = Ancestral polymorphism is R, Derived polymorphism is W
MYIEFSTLNIQINKGFTAKLSGYGCVDFNTEVIFNAPVICFLRSAANLSVETLEKGLLNQFVYCCNKSGLDRSKVNVNGGVIALGHPLGATGARCVATLLNEMKRRGRECRFGVVTMCIGSGMGVAAVFELCSARLEVSTITRHCNPMVIGDRELPCYCVLILKTFIMTMYEILSLISTG

SEQ ID NO: 9456 - protein, 699 aa, Zea mays
  VARIANT 456: note = Ancestral polymorphism is E, Derived polymorphism is G
MPREPWQRAHAHSGLGPRHRSTPGSRCALFRPRDEDGGENHRDDRVRGGWLGHTAASSQFPSDMEGCVHEGRPSRRYYLPIAGDSCVRGSYPASSRYLTGGNSSRGSMASCAREEADSLERELHSIERSIVIPICLNREAREFFPDRGRGTPELLDRYLAAAKRLQRLDTSGDIDQRKKSLLKTVMSCLADEFCHLKVWKLDDAAMRDHSPASIWDAAASARRSRGGRSLDDSRMSYSSSGSFTASGGTSDASYGSYCRGLGEEPSVHSHNTFAAGMIYVDPRSLSILRDIASAMFGSRHEDVLRAAFDRHCAQLARYIEILDIDNIFGYQMEESREVLLEAWTSTMHIIISFLSEMQRQLNRHDFGSFDRIKEEYFLAIARVTAMKLLSSASSIGFQVSPPTDKPCENSYGGAARRGLSKMVDVVMVYQALDHGLPAILSLLSGETKELVVAEAEGLIKRLSEAFAKSSDELNKTVRSQLLFIADTGVHRFTKRIVDHVRFLVQHRRAVYPMLLADGRRRLEPFGELVTRLVLSLEFTLSVNSKSLQLRQGQEQIFLLNNVHFILVEAEKDAELVLILGESWFLRCQDQFDQFIAGYLDVSWTPVLSSLERKTRFSVMLWPHQLLCKLTSAFEVTCSAHKNWKVADPLLRDRLREAVSHKVLPLLYRMQVECGSEKLHKSATYSVDQIKSQLLKLFEG

SEQ ID NO: 9457 - protein, 355 aa, Zea mays
  VARIANT 335: note = Ancestral polymorphism is A, Derived polymorphism is V
  VARIANT 331: note = Ancestral polymorphism is I, Derived polymorphism is T
  VARIANT 326: note = Ancestral polymorphism is G, Derived polymorphism is S
  VARIANT 324..355: note = Derived polymorphism lacks residues 324 to 355
  VARIANT 293: note = Ancestral polymorphism is A, Derived polymorphism is V
  VARIANT 284..355: note = Derived polymorphism lacks residues 284 to 355
  VARIANT 272..355: note = Derived polymorphism lacks residues 272 to 355
  VARIANT 270: note = Ancestral polymorphism is K, Derived polymorphism is E
  VARIANT 233: note = Ancestral polymorphism is A, Derived polymorphism is S
  VARIANT 12..355: note = Derived polymorphism lacks residues 12 to 355
  VARIANT 7: note = Ancestral polymorphism is D, Derived polymorphism is G
MASFFRDARLPQQRVVEGVPFPAVLVPSARAGSCAGGVDKFLAAVRCERASRLEPLVRDAGALLLRGFPATTAADFDRAVDAFGYEELPIVGSVAPRTNVVGRVFTANDSPPDQKIPFHHEMAQSAVWWHWHLVFETLPLVFDRMYLAYQHVPTFPSKLFFFCEVEPKSGGETPVVPSHYVYKRMKEKFPGFVEKLEKDMIVYTRVLGEGDNPSSSIGRGWQSTFLTKDKAVAEERAAKLGIKLEWTDDGVKTVMGPIPAVKWDESRGRKIWFNSIVAAYIGWKDARNDPMKAVTFGDGSPLPADVIDACGQVLEEESVAVPWQHGDILLIDNWAVLHSRRSFEPPRRILASICK

SEQ ID NO: 9458 - protein, 83 aa, Zea mays
  VARIANT 30: note = Ancestral polymorphism is E, Derived polymorphism is K
MDSLAIASLLLPALPPTAASLPTRPRRRAELSAPRFSLNKPQPSSSASPPRALLALYRALIPCRVSLVLCAGRSSELRVRLPP

SEQ ID NO: 9459 - protein, 185 aa, Zea mays
  VARIANT 119: note = Ancestral polymorphism is Y, Derived polymorphism is H
MQNPSGHHPATAAPTSAPSKGKSSAPNPSGNHAATPAPSGTPSKGKSAAAQAAALGHGSSSHHHSAGGGGGGADASATTLKRKRGVFQKDLQHMMYGFGDDPNPLPETVALVEDIVVEYVTDLVHKAQNVASKRGKLLTEDFLYLIRKDLRKLHRATELLSMNEELKQARKAFDVDEETLATTNI

SEQ ID NO: 9460 - protein, 24 aa, Zea mays
  VARIANT 11: note = Ancestral polymorphism is A, Derived polymorphism is D
MNEELKQARKAFDVDEETLATTNI

SEQ ID NO: 9461 - protein, 519 aa, Zea mays
  VARIANT 79: note = Ancestral polymorphism is F, Derived polymorphism is S
MGRPQPARAGAINIEACARPIAVDHRISLPYYFRIAGSLLRQANIYRNESNLLDLYVILLRYSSLLCETIPKHRDYHAFKLREKAFFDKLIDIIKELETLKPVVQRQVVEHNRGSTVEFNTNSLNGNYGTTRRIEQCTPSSYTPQTFVGSSNGALQKPFHAGRQVASLSSVQKQFMNLPYPKEETLARHSILGPNGLNGRWNGPVTGIKVQYPSNFELTQNGITSLVPSILNQDDLHGSNTAPAPPPPSSSSNDNDNMKSVLSLDDGRWSVPAEEHTPLPSANLEEELFQLNIKQPSPPPVLAEVQRPISPSRVADPTPGLPTSGTARFQNLHVPIKLMECFLRVAESNTKRSLETCGVLAGTLKNRTFYVTTLIIPKQKSTSDTCEATNEEELFEVQDTYSLFTLGWIHRKYHILRCFFFQTHPTQSCFLSSIDVHNHYSYQVMLPEAIAIVMAPTDTRKHGIFHLTDPGGMGVIHDCQERGFHPHKAPLDGSPIYEQCSHVYMDTDIKFDMIDLRQR

SEQ ID NO: 9462 - protein, 407 aa, Zea mays
  VARIANT 308: note = Ancestral polymorphism is T, Derived polymorphism is A
  VARIANT 173: note = Ancestral polymorphism is K, Derived polymorphism is E
MVQPPGRRSLPDWRSGLPEDLLESIGKRLASGHDAAAFRSACSPWRAAVPFAIFGPLLLLPFDADSDRVGFYCVSEKKVFSKTLPDVRGKVPCGSSCGWLALMDEAAAVTLLNPFAGAGAGAGAGARRIELPPAGEHVAAASSSEPVYKVHGRWVLRSTDDYGGDIDAGRVIKLQDMRDVFFREIVLSAPPDAGSECVAMAMLGCSTEVAFCRVGVDNAWTLLDTKLDFSVASIVHCQDKFLAIDYTGEISVFSSNAGAWTLLPSLSPPAGLCHRSYLESNGELHIVGAMVSTSHETQTFTYSSAIYACNLHDRTPEWSRVKDIGDQTLFVSKHFNGSFSGTSVSEYKENTIYFSEPLYGDPYDMVHRLEIVDVVTGRSEVKPVHEKMQGSEILGWIRPNLWKGGTC

SEQ ID NO: 9463 - protein, 523 aa, Zea mays
  VARIANT 432..523: note = Derived polymorphism lacks residues 432 to 523
  VARIANT 420: note = Ancestral polymorphism is I, Derived polymorphism is T
  VARIANT 418: note = Ancestral polymorphism is L, Derived polymorphism is Q
MDAFMGSVLGALLAVLASTLLIGALFFLVWKPYVVTRWFRGQGIGGPSYRFLVGSLPEIKRMKAAGSKITLDVGSHDFVPIVQPQYRRWVSDYGKTFLYWFGAVPTICVAEVGLVKQVLAERTGLFPKDYMNDSMEVLLGKGLVLANGEDWKRHREVVHPAFKPDKLKTMSVVMADLVQRMMQQWRSQIQRASNHEAEIELSSEFSELTSDVIAHTAFGTSYKEGKEVFVAQKELQELTFSTWLDIPAPACLRKLKLPTSKSSRRVEELDKKVRSMLMAIIEGRLAARGTSGYGNDLLGLMLQARALEQEGHQMLTTEEIVDECKTFIFAGQDTTSHLLTWTMFLLSRYSEWQHRLREEVLRECGDAVPNPDTVTKLKLVNMVLLESLRLYSPVVFIRRAVGSDILLRSTRVPKGTMLSIPIALLHRDKDVWGQDADEFNPDRFEHGVSNAAAKHPNALLSFSQGPRACIGQNFAMLEARIGIAMILQRFSFELSPNYVHAPKEAVTLMPRFGLPIILRNLHD

SEQ ID NO: 9464 - protein, 367 aa, Zea mays
  VARIANT 12: note = Ancestral polymorphism is A, Derived polymorphism is D
MAISQISRIFLAILLLAAAFAAAPAALADGDDVVALTESTFEKEVGKDRGALVEFYAPWCGHCKKLAPEYERLGASFKKAKSVLIAKVDCDEHKSLCSKYGVSGYPTIQWFPKGSLEPKKYEGQRTAEALAEFLNTEGGTNVKLATIPSSVVVLTPETFDSIVLDETKDVLVEFYAPWCGHCKSLAPTYEKVASVFKLDEGVVIANLDADKHRDLAEKYGVSGFPTLKFFPKGNKAGEDYDGDRDLVDFVKFINEKSGTSRDTKGQLTSEAGRIASLDVLAKEFLGASGDKRKEVLSSMEEEADKLSGSAARHGKVYVTIAKKILEKGNEYTEKETKRLDRILEKSISPSKADEFIIKKNVLSTFSS

SEQ ID NO: 9465 - protein, 737 aa, Zea mays
  VARIANT 78..737: note = Derived polymorphism lacks residues 78 to 737
MGHNDGEHEHEGDDLSADDSSWSDGVWSEDDDEETLSFEDSGSGSDGESHEAAVAEESDSSEDEVAPRNTVGDVPLEWYKDEEHIGYDIDGRKIKKRDREGRIEAYLRNADDAKNWRKIYDEYNDEEVQITKDEAKIISRLLKGKTPHTNVDPYPDYVDWFEYEDKGHPLSNAPEPKRRFVPSKWEQKKVVKLVRAIRNGWIKFDKPKEEQNLYLLWGDETDTTDNKRHGLSYIPPPKPKLPGHEESYNPSVEYIPTQEEIDSYQLMYEEDRPKFIPKRFECLRSVPAYEKALREGFDRCLDLYLCPRTRKKRINIDPESLKPKLPSKKDLRPYPKTCYLEFKGHMSPVKSISVEITGQWLASGSCDGTIRVWEVETGRCLKVWDVGGDVRHIAWNPSPDRPILAAVVGHDLLLINAEVGSEEMQTMVKDLLKVDEMALQDDTDDKKPAVRWLKHDKLDGITLVHQKAVSNVEWHYKGDYFTTVVPTDILYESCLVSVLFPSVPVSFFFKCGTSPLVGIFTLNIQDQCYHRFKFPLSIVHLNSNVRDTRAVLLHQLTKKHSHHPFRKMPGLPVAATFHPSQKMFFVATKKFVQIYDLQKAQLVKKLESGLREISSISIHPGGDNVIVGSRDGKLCWFDTDLSTRPYKTLKIHSKDVTSVAFHRKYPLFASSSEDCTAYVCHGMVYSDLNQNPLIVPLGILRGHSSSDGRGVLDCKFHPKQPWLFTAGADSVIRLYCD

SEQ ID NO: 9466 - protein, 280 aa, Zea mays
  VARIANT 230: note = Ancestral polymorphism is T, Derived polymorphism is A
  VARIANT 221: note = Ancestral polymorphism is T, Derived polymorphism is I
MWNKSYIYRQVKPWVKTSLTPGSVVATEYLKHSGLQDYLNQQGFHVAAHGCATCVGNSGDLDGSVSAAIIENGTALSIYHCCCGAVSYYLLNLGDSITTDHISYSGKIPEGTPAAKYLLEYGVEPKNFSSYGGRRGNNEVVMRGAFANMRIVNKLLNGEAGPWTIHVPTGEKLYVYDAAMKWKEMLSVLPNYRVKEYMKKLYKTSVEKMVLLACGWRYTITVRDSSNLYTYGWRKYVQLGHIDFEDDLVPHKLEALKDSTISQEKIEWNSNFGGCTSVET

SEQ ID NO: 9467 - protein, 144 aa, Zea mays
  VARIANT 29: note = Ancestral polymorphism is H, Derived polymorphism is P
  VARIANT 30..144: note = Derived polymorphism lacks residues 30 to 144
  VARIANT 35: note = Ancestral polymorphism is H, Derived polymorphism is R
  VARIANT 59: note = Ancestral polymorphism is P, Derived polymorphism is L
  VARIANT 66: note = Ancestral polymorphism is M, Derived polymorphism is R
  VARIANT 68: note = Ancestral polymorphism is R, Derived polymorphism is I
  VARIANT 73: note = Ancestral polymorphism is S, Derived polymorphism is P
  VARIANT 75..144: note = Derived polymorphism lacks residues 75 to 144
  VARIANT 98: note = Ancestral polymorphism is S, Derived polymorphism is L
  VARIANT 112..144: note = Derived polymorphism lacks residues 112 to 144
MSRGGSAGGGHSSLGYLFGSGEPPNQQWHQLQVLHLLRNHLLQRLMRPSRLLLGLPAKPITTTGLMVRTLSTSLRPSEDLETKKTSIAVIIVVSVLASVLVVTALFGGFRYWQKKKRERDQARFLKLFEEGDDLEDELGLSNEF

SEQ ID NO: 9468 - protein, 149 aa, Zea mays
  VARIANT 124..149: note = Derived polymorphism lacks residues 124 to 149
  VARIANT 93: note = Ancestral polymorphism is A, Derived polymorphism is V
  VARIANT 68..149: note = Derived polymorphism lacks residues 68 to 149
  VARIANT 63: note = Ancestral polymorphism is H, Derived polymorphism is Y
  VARIANT 54: note = Ancestral polymorphism is G, Derived polymorphism is R
MSRGCSASGGQSSLGYLFGSGEPPKPVVAPAASAPPVEKPSAAKTDATKQVAAGVTSQTNNYHRADGQNTGNFLTVCYFIPSEDLETKKTSIAVIIVVSVLASVLVVTSLFEGFKYWQKKKRERDQARFLKLFEEGDDLEDELGLSNEF

SEQ ID NO: 9469 - protein, 147 aa, Zea mays
  VARIANT 11: note = Ancestral polymorphism is G, Derived polymorphism is V
MGSADRSKIDGIVVPEKGARSCVECRATTTPMWRSGPTGPRQYFLDTEIGNTKCSSQSVVTSLCNACGIRYRKKRRQELGLEHNKQQQQQQNNGEAKTGVKDSSSNSSSGSSNFHVVQKRRLLMEVEEAALLLMTLSSSPASTLLHG

SEQ ID NO: 9470 - protein, 184 aa, Zea mays
  VARIANT 4: note = Ancestral polymorphism is S, Derived polymorphism is L
  VARIANT 23: note = Ancestral polymorphism is L, Derived polymorphism is V
  VARIANT 24: note = Ancestral polymorphism is A, Derived polymorphism is V
  VARIANT 69: note = Ancestral polymorphism is D, Derived polymorphism is N
  VARIANT 89: note = Ancestral polymorphism is T, Derived polymorphism is I
  VARIANT 93: note = Ancestral polymorphism is F, Derived polymorphism is L
  VARIANT 100: note = Ancestral polymorphism is S, Derived polymorphism is F
  VARIANT 101: note = Ancestral polymorphism is G, Derived polymorphism is R
MSMSILQMDLKDSLSKFKRQYVLAFLSRSNVCLVFENLTTTGVKINEDFIGEIRTQHKSGRTTVDVIINSDCKVSTTITVNETLTGLKISFALKVLGHKSRKEVLIELYLTCILLICNIPTIIFSMNTTTDLTSTHLVELATTVGTSELVIGAEVGFDITSDAVTKYNSGAGYNKFDFSASLLM

SEQ ID NO: 9471 - protein, 287 aa, Zea mays
  VARIANT 63: note = Ancestral polymorphism is S, Derived polymorphism is F
  VARIANT 43: note = Ancestral polymorphism is A, Derived polymorphism is T
MILRSAPRRLHLLRPHHLRLLSAAALASAVPIPAPAQSPIEWAEAPLASVRPATADASLFHVSLDLSAHRGLLASHTAAGQFLRFRLPASSYHIFLAIASPPPPPALETLALAGPPSCFEFLVKRLPGTPSARLCDLRPGDLVHVGASVVGRGFDVARISDARDVLVFATGSGISPIRSLIESGFAENKKTDVRLFYGVRNLQRMAYQERFEDWESRGVKIVPVLSRPDSQWTGERGYIQNVFSRMKNTVNPPSVGVILCGHKQMSEEITRVLVADGLSKDRILTNF

SEQ ID NO: 9472 - protein, 751 aa, Zea mays
  VARIANT 381..751: note = Derived polymorphism lacks residues 381 to 751
  VARIANT 259: note = Ancestral polymorphism is R, Derived polymorphism is T
  VARIANT 187: note = Ancestral polymorphism is V, Derived polymorphism is M
  VARIANT 14: note = Ancestral polymorphism is S, Derived polymorphism is F
MSSASGLGGKEVPSAFSVDLAAAARRLLLFLRAAPAGVGPRSVRRYEELWMPLAAEKAGVGGEAAMLVPPPDVHLVWLCHCFHHESYSAYCTSRFGRLINRPSIFDMENEEYAEDLCRDVWATHFPSEPFDLDSNEIGGNSVDNITCDNVNGEIVKMVRQYAGLADRFASLFVQEGVYHVAARRRYVRFLDLMKKVACATQECTRLVPSLDILLMWLAHQVYSFPVCYATDMVAMGISDNVAKVGVCYGEVVSNEAVRRTKELWEDAYDEPYDMAGSEVDVGAVSTAREAFYWVPAASEEDANRLYKSLQPRFLIEQPSICFWTTYGTMPTTQVYVFLKGEFDKEPTSKEFLRLRTQRCHRSLKLNISMSNLSCKSWQKVWHLYCEFATRGLFIEFRRTLSGCFRKSKFLKNISFSWSDVLHEKALALTEELDVRMRAMASITPPVQAPYLLKCVPDRVTDDGGAMISDVILRMRNYRPQEGRWLTRTVLDHSGRECFVIRMRVGRGIWRRGAETPMAVKWEDRSIEVREGSWSYIASTSSVGYAPEKIVGTGTVMKDHQENKVVWSLSTGDTLTIRLGDELSFQLKNDSSEEEARLLVGRRLSYRVNTDNASSNLVEEEQYLTLVRKSPYHHGDRATVLLNWKLLAVEFLPEEDAVFVLLLCMVIARTMTEIRREDVAGLLVRRRISEARAGQRDWGSVMLPGSLSPDPHLQPWYRNATQVLSSAETGPVLTKYSPADGKDMLYRQALIP

SEQ ID NO: 9473 - protein, 102 aa, Zea mays
  VARIANT 34: note = Ancestral polymorphism is L, Derived polymorphism is R
  VARIANT 39: note = Ancestral polymorphism is A, Derived polymorphism is S
  VARIANT 46: note = Ancestral polymorphism is A, Derived polymorphism is V
  VARIANT 60: note = Ancestral polymorphism is A, Derived polymorphism is T
  VARIANT 91: note = Ancestral polymorphism is A, Derived polymorphism is T
MAHHFLGNKHHGGEATKVTDWRKEEKHHKHMEQLGQLGAVAAGAYAMHEKHKAKKDPEHAHSHKIKEGVAAAVAVGSAGFAFHEHHQKKDAKKHRHHGHHHH

SEQ ID NO: 9474 - protein, 106 aa, Zea mays
  VARIANT 46: note = Ancestral polymorphism is A, Derived polymorphism is V
  VARIANT 74: note = Ancestral polymorphism is S, Derived polymorphism is N
MAHHFLGNKHHGGEAAKVTDWRKEEKHHKHMEQLGQLGAITAGAYAMHEKHKAKKQGPRARALAQDQGRGRRCSRRGQRRLCLPRAPPEERRQEAPPPWTPPLASY

SEQ ID NO: 9475 - protein, 102 aa, Zea mays
  VARIANT 32: note = Ancestral polymorphism is E, Derived polymorphism is D
  VARIANT 46: note = Ancestral polymorphism is A, Derived polymorphism is V
  VARIANT 49: note = Ancestral polymorphism is E, Derived polymorphism is K
MAHHFLGNKHHGGEAAKVTDWRKEEKHHKHMEQLGQLGAVAAGAYAMHEKQKAKKDPEHAHSHKIKEGVAAAAAVGSAGFAFHEHHQKKDAKKHRHRGHHHH

SEQ ID NO: 9476 - protein, 810 aa, Zea mays
  VARIANT 145..810: note = Derived polymorphism lacks residues 145 to 810
MRRKLPGDAPLSAAGPGHALSASAPSEVDLAQLSAAIAAGEDLGPFVRRAFACGRPEPLLASLRGAARDREAEIEELCRAHFHDFIRAVDDLRSLLADADALKGSLSASHSALLSSAAPLLASLESFLAARSLAGNLSSALASSRRCVRLLALAARANAHLQAGNHGLYLALRAVDAIDRDLASGPEPLPLPTLRRMLLSVVPAVRAHAEREISREFSDWMVSIRAASRHLGQVAISRSAAARQRQEELRSKHRPLEECITLDDDGVGDLDDFAAAAATAEAADGAAAASFDLTPLYRAMHIHQTLALGERFKKYYLENRKLQLTSDFDVIAATPFLESHQVFFSQIAGFFIVEDRVFRTGGGLTSRPDVDALWDAAVGKMVSVMEDNFSRMQTANHLLLITDYAALLSATMRRYGYPVGMLLDVLAKHRDKYHDLLLADCRRQVAEALTADKFDQMLMRKEYEYSMNVLAFGIQSSDITPAFPYVAPFSCTVPDICRIVRSFIEDSVSFMAHGGGGDTYAAVKKYLGRILSEVVDASIKKLLDSGSGLSVSQAMQVAANMSVMERACEFFTRHAAQLCGVPLRAVERGRRDFPLRRSRDAAEALLLRLLRAKVDEFMRQSDGINWMADDSPPGGNEYANEVIIYLETLTSTAQQILPLPVLHRVLVAVLAHISERIIELFLNDSVKRFNANAVTGIDTDLKMFETFAEGMSSLFVDSGQESAKNEMKAALVEARQLVNLLMSNSPENFLNPVIREKSYNKLDYRKVAIISEKFRDTSESYFSTFGTRGARQNPKKKSLDTLIKRLREAS

SEQ ID NO: 9477 - protein, 93 aa, Zea mays
  VARIANT 45: note = Ancestral polymorphism is A, Derived polymorphism is V
MLYVSPPPLADHHVLVSCSRCRSAHTLPTSSSGVIGFTAMFTSMAPVPEMTGLRQRCPKPCPCSHRGGESEGDRSPGGYMVAFTPRERLDYDC

SEQ ID NO: 9478 - protein, 919 aa, Zea mays
  VARIANT 376..919: note = Derived polymorphism lacks residues 376 to 919
MDDSVPFNDLGPSKPPSASFYDDMFESYFNRAAEAPEPAPKASSSPSTPPPVFDKPVFDDDPYTADPFDAIPLFGGGGGGEEEDLHGGVRSAAKPERTELEVVGFDEDLFPGLAGSTNFPMEKPAREVERDRQPVGFDDELIPGFDGSMKPAPQMEPETVAFDDDVIPDCSGGTSYPSSAREEPITRQESESISSSKISMSMPEDPFVTLGGTHKSGYSSLGLFSNLLNNIGMPRKEADTTPDNTSGIFQGSDIFTEFPKAMPPFSFTSENQSDRTERRYTENIISTSHSDRLPQEKTVQQASTEAPANTLTEMNFPEASVVHEVPVTTSFQTLNPFVEEDDLLEVNQSSQTTNDVWLTVLDIALVTLPTSAPPPSRPPPPLAAKKPPTESVTSEAYAHHCNQRYHHSICSSNTSKTSQIDELEDFFLTKPANSAIGHPQVLKHEGNGHYPSAATASFMDWTEMGHCKRGNQGAFDSMFTSSQYRQPEIDEKAEVCAHETESTDEEKRLENEQIQREHKEEQIRAEREMEEELERERENVRQREQEEQRRREKERVARQAVDKAIREARERSAAEARMQAEKEARQRAERAAVWKAATEARERAAVEAKERAAKAAAEAKEREAAEARERAATESRERDAKVAADARERAARAAAEAREKETAEFQEKATAEARAKAERAAVEKAAAEARWRAERAAFERVATEVKQRAFNDARERAAAAAAAEALARENQQRRATTEPDLESFFGMPSRSSSLPRSYNNTTTNPFDVQPGNAGSGGVRRTPSGSGFPFTQPSSSNLMDGLSSIFGAPLPSAVFQEVDGESEERRKARLERHQRTMERAAKALAEKNERDLQAQQEQEERHRIGESLDFEIKRWAAGKEGNLRALLTTLQYVSTPRCMLDGILPNLNGVLVLIMEKCTF

SEQ ID NO: 9479 - protein, 493 aa, Zea mays
  VARIANT 449: note = Ancestral polymorphism is G, Derived polymorphism is V
  VARIANT 434: note = Ancestral polymorphism is S, Derived polymorphism is L
MGALTDSRKRLSADHCLSADHRLPYPSLSPPSLIPPFKRAKLSPIPEHDPSTSDFPPIRPSPQIIHSAAAASTSSTPGPSPSSITASTPLPHRRRLPPPPFQRSIHGPQRILRVFQLGGAARAYATGHSWFSPQSPPPRPLGLQQYVELVNSVTHPSPPTPAAITNATRQAEVAPFEVVAIEEDEDERKQQNEEEVMGSVVVRRVPPYKELYEASRQKRDAKLKTLEFEVRLTEQGRLSLERLAEALPRITPKKEEVPEPFVPLTDEDEEMVRQALHGKNRHERLAVHEPSNIVITREIMQCLNNQEWLNDEAINLYLDLLKERELREPCRFLKCHFFNTFFYKKLISSGYDYKAVRRWTTKRKLGYSLIDCDKIFVPIHKEVHWCLAVINIRDKKFQYLDSLGGMDMKVLNVLAKYIVDEVKDKSGQQMDVLSWKQEGVKNLPLQENGWDCGMFMLKYIDFYSRDMDLIFGQKQMHYFRRRTAKEILSLRAE

SEQ ID NO: 9480 - protein, 197 aa, Zea mays
  VARIANT 115: note = Ancestral polymorphism is R, Derived polymorphism is Q
MYQITNDEDKKSTRNKYVPEIIEGDMDSIRPEVKLFYSSQGSKISDKSHNQETTDLHKCISRIHHCTPDDEKPNLCVLVTGALGGRFDHEAANINVLYLFSDMRIVLLSDDCLIRLLPRTHRHELYIESSVEGPHCGLFPVGAPSTSTTTTGLKWNLSESKMRFGSMISTSNIVQSEKVTVESDADLLWTISLRNLT

SEQ ID NO: 9481 - protein, 113 aa, Zea mays
  VARIANT 38: note = Ancestral polymorphism is W, Derived polymorphism is R
MARPTRALLLPLLLLVLALAALARASGSGDVPASSLSWDLGVVGAGEDEEFGFPGGDSVARRVLQGGGYLSYGALRRDNVPCSVRGASYYNCRPGGQANPYSRGCTAITRCRG

SEQ ID NO: 9482 - protein, 899 aa, Zea mays
  VARIANT 139..899: note = Derived polymorphism lacks residues 139 to 899
MADTVTGSSRRSQDDTATLIPHSGNLGGSSRKGVKAARFKDDDEVVEITIVQRDSMAIEDVRVVDDGGSGHGGGFDGLSLVSPSSSRSGKLASKFRQVKNGLKMNNSSNKAPQTQLGKNVRKRLDRSKSGAAVALKGLQFVTAKVGHDGWAAVEKRFNQLQVDGVLLRSRFGKCIGMDGSDEFAMQVFDSLARKRGITKQVLTKDELKDFWDQLSDQGFDNRLRTFFDMVDKNADGRITAEEVKEIISLSASANKLSKLKERADEYTALIMEELDRDNLGYIELEDLEALLLQSPSQAAARSTTHSSKLSKALSMKLASNKGTGPFYHYWQEFMYFLEENWKRIWVMTLWLSICICLFIWKFIQYRNRAVFHIMGYCVTTAKGAAETLKFNMALVLFPVCRNTITWIRSKTKIGAVVPFNDNINFHKVRHMYSVIAAGVAVGVALHAGAHLTCDFPRLLHASDAAYEPMKPFFGDKRPPNYWWFVKGTEGWTGVVMVVLMTIAFVLAQPWFRRNRLKDSNPLKKMTGFNAFWFTHHLFVIVYALLVVHGICLYLSRKWYKKTTWMYLAVPVLLYVSERILRLFRSHDAVRIQKVAVYPGNVLALYMSKPPGFRYRSGQYIFINCRAVSPYEWHPFSITSAPGDDYLSVHIRTRGDWTSRLRTIFSEPCRPPTDGESGLLRADLSKGITESSARFPKLLIDGPYGAPAQDYREYDVLLLIGLGIGATPLISIVKDVLNHTQHGGSVSGTEPEGSGKAKKRPFMTKRAYFYWVTREEGSFEWFRGVMNEVAEKDKDGVIELHNHCSSVYEEGDARSALIVMLQELQHAKKGVDILSGTSVKTHFARPNWRSVFKHVAVNHENQRVGVFYCGEPVLVPQLRQWSADFTHKTNTKFEFHKENF

SEQ ID NO: 9483 - protein, 220 aa, Zea mays
  VARIANT 72: note = Ancestral polymorphism is S, Derived polymorphism is F
METPTPRVKPGFNGVGVGMGSSVNGSSRRAGYYMGPAGAVAVAGGGRAAAAAPVDGCSVALRVFVLAATLVSAVVMGVDRQTSTIRITVTDALPPLEVPLTANWSYSSAFVYFVVANAMVCLFSAAALAACRSRAAMVPVMVGDLLALALLYSAVGAAAEFGILGERGNSHVRWPKVCNVYGRFCERAMAAVIVSLIAAFANLVLLMLNILTIHKSSSYY

SEQ ID NO: 9484 - protein, 533 aa, Zea mays
  VARIANT 7: note = Ancestral polymorphism is L, Derived polymorphism is P
  VARIANT 18: note = Ancestral polymorphism is A, Derived polymorphism is E
  VARIANT 24: note = Ancestral polymorphism is L, Derived polymorphism is P
MAVVYYLLLAGLIACSHALAAGTPALGDDRGRPWPASLAALALDGKLRTDSNATAAASTDFGNITSALPAAVLYPSSTGDLVALLSAANSTPGWPYTIAFRGRGHSLMGQAFAPGGVVVNMASLGDAAAPPRINVSADGRYVDAGGEQVWIDVLRASLARGVAPRSWTDYLYLTVGGTLSNAGISGQAFRHGPQISNVLEMDVITGHGEMVTCSKQLNADLFDAVLGGLGQFGVITRARIAVEPAPARARWVRLVYTDFAAFSADQERLTAPRPGGGGASFGPMSYVEGSVFVNQSLATDLANTGFFTDADVARIVALAGERNATTVYSIEATLNYDNATAAAAVDQELASVLGTLSYVEGFAFQRDVSYTAFLDRVHGEEVALNKLGLWRVPHPWLNMFVPRSRIADFDRGVFKGILQGTDIVGPLIVYPLNKSMWDDGMSAATPSEDVFYAVSLLFSSVAPNDLARLQEQNRRILRFCDLAGIQYKTYLARHTDRSDWVRHFGAAKWNRFVEMKNKYDPKRLLSPGQDIFN

SEQ ID NO: 9485 - protein, 409 aa, Zea mays
  VARIANT 231: note = Ancestral polymorphism is W, Derived polymorphism is S
MPISSTLATRLRTGHSSAPKPARRSPYTRPKPSGGAKASRPSPRLDPATTRPLEPSQKAVRSGLGRRAEPDVPDARAAESKPKLAHGDDRPPLEEKRRCSGEGGFVFLCALAGHTEAIGGISLPSGSNKLYSGSVDGSVRIWDCNSGKVAWFSASDDVSDYARVTNNISDMHGLPTISLTMDEGDFAWYKAWNTKTGMKLRFQGPSSLVCSMAITDEMLFAGTGDGRIMAWRFPAKESNTEPVLILSGHQRPVISLSISARRLYSGSLDKTIKAWDLTTRQCVQTLSEHKAAVTSVLCWDEKLLSCSLDKTVKLWTLSESGNLQVKYTHAEENGLRTLFGMHRVGKTPVLLCSLHNSNRVRLLDLPSFDGIGTLLSTKEVRTIELAAGGLLFTGDCSGELKVWRWAPKD

SEQ ID NO: 9486 - protein, 380 aa, Zea mays
  VARIANT 317..380: note = Derived polymorphism lacks residues 317 to 380
  VARIANT 260..380: note = Derived polymorphism lacks residues 260 to 380
  VARIANT 227..380: note = Derived polymorphism lacks residues 227 to 380
  VARIANT 179..380: note = Derived polymorphism lacks residues 179 to 380
  VARIANT 127: note = Ancestral polymorphism is S, Derived polymorphism is Y
  VARIANT 119: note = Ancestral polymorphism is R, Derived polymorphism is W
  VARIANT 111..380: note = Derived polymorphism lacks residues 111 to 380
  VARIANT 73..380: note = Derived polymorphism lacks residues 73 to 380
  VARIANT 61: note = Ancestral polymorphism is D, Derived polymorphism is Y
MDASRPEPDRPTPLSDQHNIAFRGSNSRLYQGNNGNFLGLIETLAKFDPVIKEHVDRITNDKIRDHYLGPSIQNELINLLASVIKSAIIAKVKEAKYFSVILDYTPDASHQEQMSLIIRYVDATTDSTCIEESFLGFLDVNDTTDQGLFDVLQEELKSLDLDVDNVRGQGYDNGSNMKGKHQGVQKKLLDINPRAFYSACGCHSLNLTLCDMAKSCRKATYFFGVIQRIYTTFANSTKRWNILKENIKGLTLKSLSSTRWESRVDSVKAIRFQLPEIREALLQVAESDNDPLASSEAKSLAENELGGFEFLVSIIIWYEILSKVDSISKELQSKDMLIDIAIESVQGLISFFTRYREDGFSKSLEDAKEIAAGMDIHPMF

SEQ ID NO: 9487 - protein, 791 aa, Zea mays
  VARIANT 73..791: note = Derived polymorphism lacks residues 73 to 791
  VARIANT 109..791: note = Derived polymorphism lacks residues 109 to 791
MPVAALRPPPVAVGAGRRSARLQARFALRASSLEASAAVTVTVNGSAEAAVERKEKVQEDKDNEGLPVKEEQERGLEVLYDDGFGSVTVKDYFAAAKVLCRDDGGPPRWFSPVECGHPAVDQAPLLLFLPGMDGVGTGLILHHKSLGKVFEVRCLHIPVNDRTPFEGLVQIVENLIKHEHDLSPDRPIYLVGDSFGGSLALAVAARNPQIDLVLILVNPGSYIICKDSIAASIASTGISAKRVSCYSAVSSQFCHGRYVSTGDPLKMAAVSIENNLSPPETLQKLSDSLTSMLPLLSVCHPLNCLILYQGILFYGSSNFSRQEQPMQILVSMPCKPRFYFLPGPWLQYLLSILHSFCSPIRRLLASCLGPEHRSIMLPVFSGKDNLLPSGEEADRLFKALKNCRVRYFKDNGHTLLLVQSITLNSSPVIPISLSDYTYMYVCKRQCISSAIIFVPAQEDGVNLLTVIKGANMYRRGRQRDSVTDYLPPTLSEFRQTFDVDHRLFHLALSPVMMSTLKDGKIVRGLAGVPDKGPVLFVGYHALMGIELSPLYEEFLREKRTVVRGMAHPFLFGKKFESSRQETSRFDTVSMYGGLPVTPINMYRLFQRNQFVLLYPGGVREALHRKGEEYKLFWPDQPEFVRMAARFGVTIIPFGCVGEDDVLELVLDYNDQKNIPGLREWIQSINKEAERVRDSVKGEDGNQDMYLPALLPKVPGRFYYLFGQPIEMKGMGNLVRDRKSANEVYLRIKSQVEEIMSYLKRKREEDPYRSLPQRALYQATWGASAQVPTFEP

SEQ ID NO: 9488 - protein, 638 aa, Zea mays
  VARIANT 270: note = Ancestral polymorphism is S, Derived polymorphism is L
MATLSLRLHTKAGAAPLWRQRQRRHGSLERTTSHPVKHAGKLQASYRGLEALYDDGYQNVKDLGYYYESLGELVEHDTGPARWFCPVHPGSPIEDAPLMLYLPGEKLSGIDGMGMGLFMHHKALGRIFELRCMHVPLHDRTPFEDLVTMVEDVVTEEHATSPNKPIYLLGNSFGGCLALAVAARNPHINLVLVLVNPATSYEKSRIQQLLSLLSLFSDQACMAVTALLNYNIDNELDMANILDKIPEDTLKWKMKLIKRAASYANYRLQSVQADVLLLVRLLPSKDEADRLQRLLPKCKIYFFEKHGHSLLLEYGVHVASIIKCTDLYRHSRQHHRVFDYIPPSATELNEVDKATCDLRFRTCPAMYSTLEDGTVVRGLAGVPQDGPVLLVGNHMLLGIELISLAAEFLRLKRVVVRGIAHPLLFPNKKRAWSEGHDFFDFLNLWGGVPMRYKSIYDLLRAGEFVLLYPGGHREALHCKGEEHRLFWPTQTEFVRLAAQFNATIVPFGVVGEDDLLELLCTFDDIRNAPFGKEMIQAYSNHLKLRDVDHEVIFPGMYLKMPGRFYYQFGKPIPTRGRQDVLTDKHAAHHLYMHVKSEVERIISYLLEKRVEDRYRNLIPRMLYQAARGPTCEVPAFDP

SEQ ID NO: 9489 - protein, 494 aa, Zea mays
  VARIANT 164: note = Ancestral polymorphism is A, Derived polymorphism is T
MAIVLLALLLFPSAYAQPWSVCGNTGNYTAASTYQDNLSQLAASLPKKASSNTSPLFATGTAGAVPDLVYALALCRGDINASACKDCVTIGFEDAQQLCAFNKEATVYYDSCLVSFSNEDFLSTTVNGNENEVTVLMDAQNFTESADYIRLLLFTLLNDTSESAINSIRRFTTARMDISSLPTIYCAVQCTPDLTADECAACLQDFPQVTLQYLDGQRGGRLLGVRCNMRYEIYKFYQGDPMLRIISLASAVPTIGKTPPGTPVTVYPQPPPAAPPAPQMITTPIAAQEETGVLSSQDRAGANRIEENALVWTIEQKSSEFTLFDLSELLEATKSFAEENRLGQGGFGPVYKGQLSDGQEIAVKRLASHSGQGFTEFRNEVELIAKLQHTNLTWHLWEIGRWLDLVEASISKEMHEAEARRYINIALMCVQENADDRPTMSDVVAALNSESVVLPEPKHPAYFNLRVSKSVESAVVVEACSLNEMTITQDPQGR

SEQ ID NO: 9490 - protein, 146 aa, Zea mays
  VARIANT 31: note = Ancestral polymorphism is V, Derived polymorphism is A
  VARIANT 8: note = Ancestral polymorphism is R, Derived polymorphism is S
  VARIANT 2..146: note = Derived polymorphism lacks residues 2 to 146
MWVLKCYSPCFAKLLGLLPWMVVKKTSSICVYRPSFLRPKQPVPPFSTLEATVSSSGAFSLPLTHTLVLQSLHRRGVSGFAHRAMGSGSCCCIGCNGGGGDEGGVDAGGGLDPKGFLLAMMIALVLLMLCHVRPPRRNSYVVYRSY

SEQ ID NO: 9491 - protein, 372 aa, Zea mays
  VARIANT 304: note = Ancestral polymorphism is I, Derived polymorphism is T
  VARIANT 81: note = Ancestral polymorphism is P, Derived polymorphism is L
MRAAAAASFHLAPATKPAHRRGCTTESCSLKPAPTARPPRLRSLAGRAPLVCASLGISHDKGFDISDPNVVGQNDLLIVGPGVLGRIIAEKWKKEHPSCKVYGQTASKNHHNELTDLGIIPSLKGTTIHQKVPHVIFCAPPSGSDDYPRDVRARAWDLLCLDKLNHHSIMHSDRERGCKTWVISQFLRLAASNWTGEGSFLFTSSTALYDCSDNSMCNEDCLSVPIGRSPRTDILLKVENVVLEAGGCVLRLAGLYKIDRGAHVFWLRKGTLDTRPDHIINQIHYEDAASLAVAIMKKGLRSRIFLGCDNKPLSRQEIMDAVNNSGKFDTKFGGFTGTDGPLGKRMENSKTRAEIGWEPKYPSFTEFLGISS

SEQ ID NO: 9492 - protein, 206 aa, Zea mays
  VARIANT 28..206: note = Derived polymorphism lacks residues 28 to 206
  VARIANT 31..206: note = Derived polymorphism lacks residues 31 to 206
  VARIANT 32: note = Ancestral polymorphism is L, Derived polymorphism is F
  VARIANT 35: note = Ancestral polymorphism is E, Derived polymorphism is G
  VARIANT 64: note = Ancestral polymorphism is G, Derived polymorphism is D
  VARIANT 69: note = Ancestral polymorphism is P, Derived polymorphism is L
  VARIANT 94: note = Ancestral polymorphism is V, Derived polymorphism is I
  VARIANT 108..206: note = Derived polymorphism lacks residues 108 to 206
  VARIANT 113: note = Ancestral polymorphism is L, Derived polymorphism is V
  VARIANT 114..206: note = Derived polymorphism lacks residues 114 to 206
  VARIANT 161..206: note = Derived polymorphism lacks residues 161 to 206
  VARIANT 179: note = Ancestral polymorphism is L, Derived polymorphism is P
MHEPAKSTGKGKAQLDRHLVFPLLEFLQERQFYSESEILEAKIRLLNGTNMVDYAMDIHKSLYDTDDVLEDMVKRRAEVVSRLRSLEEAAAPLVAFLQNPLVAPFSERNVSALWGKLAAEILMQNWDVALEELNCLKEIIDSKNFSSPLNQLQNRIWLMHWAMFIFFNHENGRNGIIDPFFQDRYLNAMQTNAHHLIRSTIATRIP

SEQ ID NO: 9493 - protein, 1429 aa, Zea mays
  VARIANT 71..1429: note = Derived polymorphism lacks residues 71 to 1429
  VARIANT 48..1429: note = Derived polymorphism lacks residues 48 to 1429
  VARIANT 12..1429: note = Derived polymorphism lacks residues 12 to 1429
MACHICPLFNLRLLLLLGAVLGNGGLGRGGGAEASDRADPDPYSILMWHDYSPPSPPLPPPDPPSPTATCEGDLHGKGDFHTRCEVSEEVELDGDVYITGNGSLVLLSGASLTCEKYGCVISANFSGEVRLSRGVRVTAGRVSLVATNITVADTVVVNTTALAGDPPDRTSGVPTGTHGDGGGHGGRGASCFVKEGQTQEDSWGGDAYAWSDLEHPWSYGSKGGSTSVEKDYGGDGGGIVWLFAEDLVMNGTVLANGGDSNEKGGGGSGGSIFIRAASMHGGGKISASGGDGLAGGGGGRVSINVFSRHDDTQIFVHGGRSSGCPDNAGAAGTLYEAVPKSLIVSNNNLSTQTDTLLLEFPNQPLWTNVFVRNRAKVAVPLLWSRVQVEGQLSLLSGAILTFGLTRYPYSEFELMAEELLMSDSTIKVFGALRMSVKMLLMWNSRMEIDGGGDSIVATSLLDASNLIVLKESSVIHSNANLGVRGQGLLNLSGDGDTIEAQHLILSLFYSIQVGPGSVLRGPLVNRSSDDVAPKLNCEADSCPVEIIHPPEDCNLNSSLSFTLQVCRVEDIDVWGLVQGTVIHFNRARSVTVHTSGTISASGLGCRTGVGQGKMLSRGICGGGGHGGKGGDGFYKGNLAEGGAIYGNADLPCELGSGSGNDSTELSTAGGGIIAMGSWEYSLPSLALYGSVESNGGSYTNGSVGGPGGGSGGTILLFVHTLSLAESSVLSSVGGFGNAGSGGGGGGRIHFHWSNIPTGDEYVPVAAVKGSILASGGVSKGLGYSGGNGTVTGKACPKGLYGTFCKECPLGTYKNVTGSSKSLCFPCPPGELPHRAIYINVRGGAAETPCPYRCMSDRYRMPHCYTALEELIYTFGGPWLFGLFLSGLLILLALVLSVARMKFVGTDELPGPAPTQQGSQIDHSFPFLESLNEVIETNRAEESHGHVHRMYFMGPNTFSEPWHLPHSPPEQITEIVYEDAFNRFVDEINTLAAYQWWEGSIYSILCILAYPVAWSWQQWRRRKKLQRLREFVRSEYDHSCLRSCRSRALYEGLKVTATPDLMLGYLDFFLGGDEKRPDLPPRLRQRFPMSLIFGGDGSYMTPFLLNSDSVLTSLMSQAVPSWIWHRLVAGLNAQLRLVRCGNLKVTCLPVINWLETHANPSLAENGIRVDLAWFQATALGYCQFGLLVYAVEGDAALTEPDGSPRIKTEQQTPTQNMLVETQLSQSRIKDALMRRRITGGVLDSNSLRTLNDRRDLFYPFSLILHNSKPVGHQDLVGLVISILLLADFSLVLLTFLQLYSYSMVDVLLVLFILPLGILSPFPAGINALFSHGPRRSAGLARVYALWNITSLVNVVVAFICGFVHYKSSTKTHPSVQPWNLGTDESSWWLFPTGLMVLKCIQARLVDWHVANLEIQDRAVYSNDPNIFWQS

SEQ ID NO: 9494 - protein, 43 aa, Zea mays
  VARIANT 41..43: note = Derived polymorphism lacks residues 41 to 43
  VARIANT 31: note = Ancestral polymorphism is S, Derived polymorphism is T
  VARIANT 28: note = Ancestral polymorphism is V, Derived polymorphism is I
  VARIANT 18: note = Ancestral polymorphism is F, Derived polymorphism is L
MTVEDTLKLLGVAEGASFDEILRAKNVVLASCKDDQDAVAQAR

SEQ ID NO: 9495 - protein, 199 aa, Zea mays
  VARIANT 38: note = Ancestral polymorphism is R, Derived polymorphism is Q
  VARIANT 43: note = Ancestral polymorphism is P, Derived polymorphism is R
MQVLSSTNLAADFSRALPPGAPIPMLRREVLHSFLRRRGRARPGPHHLRREVLHSFVFKLSPQGCASARCGEPADQGNRPWPPQALHLHWLLLVTSKNNQRCSSLRMEFAESAAVTDSAMAEAGAVDPDLALALQMSVQDANMSSDTDMSKVFEDRTFVSSILNSFPGVDPNDPSVKDLLASLHSQKETIALFSFTLTK

SEQ ID NO: 9496 - protein, 136 aa, Zea mays
  VARIANT 1: note = Ancestral polymorphism is V, Derived polymorphism is M
  VARIANT 8: note = Ancestral polymorphism is P, Derived polymorphism is L
  VARIANT 30: note = Ancestral polymorphism is C, Derived polymorphism is Y
  VARIANT 32: note = Ancestral polymorphism is E, Derived polymorphism is K
  VARIANT 57: note = Ancestral polymorphism is T, Derived polymorphism is I
  VARIANT 61: note = Ancestral polymorphism is P, Derived polymorphism is L
  VARIANT 80: note = Ancestral polymorphism is S, Derived polymorphism is F
  VARIANT 127: note = Ancestral polymorphism is I, Derived polymorphism is L
MYGDEDKPALITYPDVALNYMSCFQGFFFYPEVASLPLQNFCVYHINPQGHEETLRTEKAPAALGPNSEAIKANNLVFVSRVLGLNPETRKFIYDVSTLLHSNDLLAYKDVTTKVVYDMIRIFENIINHAACFIIH

SEQ ID NO: 9497 - protein, 103 aa, Zea mays
  VARIANT 63: note = Ancestral polymorphism is S, Derived polymorphism is G
MEHVARLASQRAVVIFSTSSCCMCHTVTQLFRELGVNTMVVELDKDPRGNEMEKGLARLLGRSAGVPAVFIGGRLVGSTDKVMSLHLSGNLVPLLRNAGALWV

SEQ ID NO: 9498 - protein, 285 aa, Zea mays
  VARIANT 255: note = Ancestral polymorphism is G, Derived polymorphism is D
MAMAYRVLEVTLVSANDLKKVSLFSRTRIYAVASISGFDLRIPSHSTQADHSNGCNPCWNAVVHFPIPAAADTRGLALHVRLRAQRLYLGDRDIGEVFVPIDDLLAGADKGGDPRPVSYQVRRPHSGRAHGVLYFCYKFTEVPAVSCVSEPESKQVQYAKKYVQDSKNTTDKTMVPPTVYPPPQAMASAYPPQQYCSPYAAYPRQPYGYPAPPPYGYNAASPQPAMYNYAAQPVAAPARHGGGMGMGLGLGLLGGAVGGMMLGEAIGDYETDAAYDAGFNDALAF

SEQ ID NO: 9499 - protein, 334 aa, Zea mays
  VARIANT 12: note = Ancestral polymorphism is V, Derived polymorphism is M
  VARIANT 14: note = Ancestral polymorphism is E, Derived polymorphism is D
MASLLRWKDKYVKERLQGLSCSSAAATSVVPSNGRAIDRHSPHLRDPHRRLPPPVPKPPRPSSSFSTTKDSSSSSYKQRQQICHFDVDGKDKRKNKKKKSTAAAAAGSGSSPSEHRRNGKEKALQLQQVSPASSSRFLLNSSRLMMQSDDETTAVDSLPPLPSPRRPSFVDAAAEDDTDTFPSSHGDAASPAVPSRRPQLVAPAPPLELFAEPSASGAGSSSSSSSEITGGHVVAAADNTVVVRSCSTRTGQHQVVVLRVSLHCKGCAGKVKKHLSKMEGVTSFDIDIATKKVTVVGDVTPLGVLNSISKVKSAQFWPDSRSSFSTPPRASASF

SEQ ID NO: 9500 - protein, 188 aa, Zea mays
  VARIANT 81..188: note = Derived polymorphism lacks residues 81 to 188
  VARIANT 80..188: note = Ancestral polymorphism lacks residues 80 to 188
  VARIANT 71: note = Ancestral polymorphism is E, Derived polymorphism is D
  VARIANT 62: note = Ancestral polymorphism is N, Derived polymorphism is K
  VARIANT 34: note = Ancestral polymorphism is V, Derived polymorphism is M
  VARIANT 32: note = Ancestral polymorphism is R, Derived polymorphism is C
  VARIANT 25..188: note = Derived polymorphism lacks residues 25 to 188
  VARIANT 23: note = Ancestral polymorphism is R, Derived polymorphism is W
  VARIANT 16: note = Ancestral polymorphism is P, Derived polymorphism is L
  VARIANT 14: note = Ancestral polymorphism is P, Derived polymorphism is L
  VARIANT 11: note = Ancestral polymorphism is D, Derived polymorphism is N
MENGGIEETDDVLPDLALLNGQRYWLVGSNDRAMIQMTSMEPGSSPVTIDVVMTSSRQGDAKFIHICKLHEQFVVSIQCQQISYVLNSEVQTELPTAPSDLSNVEVPDSDTGTPTSVAITGDKKVAASSEELRKETDGAKTRSVSPRSHRLDPDTKEINTQESPLKGNTVICLQHLDRPIKRLSGAMQ

SEQ ID NO: 9501 - protein, 580 aa, Zea mays
  VARIANT 89..580: note = Derived polymorphism lacks residues 89 to 580
  VARIANT 97..580: note = Derived polymorphism lacks residues 97 to 580
MEREMADAPAAAIPAAEPLAAVAEEGEGEAAAEAVGSTLTMERVAAAKKFIESHYRSQMKNIQERKERRFRLERQLASSQVPKEQQINLMKDLERKETEYMRLKRHKICVDDFELLTIIGRGAFGEVRLCRERTSGNIYAMKKLKKSDMVVRGQVEHVRAERNLLAEVASHHCIVKLYYSFQDTEYLYLIMEYLPGGDIMTLLMREDTLTEHVARFYVAETILAIESIHKHNYIHRDIKPDNLLLDKNGHMKLSDFGLCKPIDCSKLSTLNEDEPMSDDNLRESMDIDSSLSDTANGRRWRSQHEQLQHWQMNRRKLAFSTVGTPDYIAPEVLLKKGYGMECDWWSLGAIMYEMLVGYPPFYADDPITTCRKIVHWRNHLKFPEDAKLSNEARDLISRLLCDVDHRIGSAGADQIKAHPWFRGVAWDKLYEMEAAFKPQVNDELDTQNFMKFEEVSESLCTFFTALQLFKWEHLNIFMHDALMNLVSPTSLFSVAVGKSSSQNRLWTFKEEVQSSRALERTSITAVRYMHIYFSFAFSILCIFYGTNLQTMLNSKDLSFVGYTYKNFDAVKAIKISGLPP

SEQ ID NO: 9502 - protein, 222 aa, Zea mays
  VARIANT 23: note = Ancestral polymorphism is T, Derived polymorphism is I
MDFFNKLTSSLASTTNSYGGLITRVLSFTGSFNDRTSLLREHDDAELGGRSSTQTEAASAPPPPPPTTAPEAAAAPAAAPPGTTPTAAGHSIDIEAAGHEEDPGSDQQQDAESKRVGKAVQTVCLFAASASLVLFVNLPSQQRQPGAALPPPALLYGADMAFIVLGFFSSLGLSMFSIVARPGGEKAAAVASSAQKWGMVVAVASVVVAFTLRVCMVPAAGV

SEQ ID NO: 9503 - protein, 83 aa, Zea mays
  VARIANT 3: note = Ancestral polymorphism is P, Derived polymorphism is L
  VARIANT 17: note = Ancestral polymorphism is P, Derived polymorphism is A
MKPRRTQTDLKFVSSSPHEAFRFCTTGLPSDVTVEVGDMSFHLHKFPLLSKSAFLERSIEENSDQEECIIKLNDIPGVPSHLS

SEQ ID NO: 9504 - protein, 216 aa, Zea mays
  VARIANT 22: note = Ancestral polymorphism is E, Derived polymorphism is D
  VARIANT 16: note = Ancestral polymorphism is S, Derived polymorphism is C
MLCDGAGEKAMQLLECGLKVKDNELLRRNFSDTGCFGCGIQEHIDLGINGYHKKYTSSSSKVQASEKKQSNPMREMKVQKLVLNISVGESGDRLTRAAKLGRACSIYSRPADTRQMEMFFGSFLSESVSPQNLFGHPDVERCPFLRNINGATTFSLSSALPVAAQGGKGPIFEEGSGFESAFKLFHGRDGIVPLSERSYVSSDENRNESIDVKLYT

SEQ ID NO: 9505 - protein, 98 aa, Zea mays
  VARIANT 4: note = Ancestral polymorphism is K, Derived polymorphism is R
  VARIANT 20: note = Ancestral polymorphism is Y, Derived polymorphism is H
  VARIANT 25: note = Ancestral polymorphism is G, Derived polymorphism is V
MVNKFSCIALAGVAAEYLLYGRAEGGLADINKLDGLLKGLGFTQKKADSQVRWAVLNTVLILRRHEKARSQLAEAMSTGKSVGSCIQVIEECISTDDI

SEQ ID NO: 9506 - protein, 969 aa, Zea mays
  VARIANT 701..969: note = Derived polymorphism lacks residues 701 to 969
MILEKPSWIRHEGLQIFSIDIQTGGLRFATGGGDQKVRIWSMESVHKDNTNNDSKQRLLATLRDHFGSVNCVRWAKHGRYLASGSDDQVILIHERKAGSGTSEFGSGEPPDAENWKVIMTLRGHTADVVDLSWSPDDSTLASGSLDNTIHIWNMNNGICTAVLRGHTSLVKGVTWDPIGSFIASQSDDKTVMIWRTSDWSLAHKTEGHWTKSLGSTFFRRLAWSPCGHFITTTHGFQKPRHSAPVLERGEWAATFDFLGHNAPIVVVKFNNSTFRKNFSNDQDPKAAPVGWANGASKTPTKEQQPYNVIAIGSQDRTITVWTTASARPLFVARHFFSQSVVDLSWSPDGYSLFACSLDGSAANFHFEVKELGHRLSDSEMDEWKRNRYGDVGGRQSNLAESPAQLLLEQASAKQSAGEKVTSIVEQGKAPPKVSAGVPNPGLVVLSLEVPEVSHEDSKKTAGPTADDVKKGNQLSSPVKQREYRRPDGRKRIIPEAVGFASNQDNIPNHSQNHPVNFSSLDQRMNGTKPSYGSNSNSNNCGVKDRTSVTARANITESLVIQKASAGAGNDGRLSIEHTRSMAPSSLTPCSALSIHVINKNGNEDALPVCLEARPVERGAGDMIGVGALSTKETEIKCIKGTKTLWSDRISGKVTVLAGNANFWAVGCEDGFLQVYTRCGVRAMPAMMMGSAAVFIDCDDSWKLLLVTRRGLMYIWNLYDRACILHDSLASLVASPDESSAKDAGTVKVISATFSRCGSPLVVLASRHAFLYDMSLKCWLRIADDCFPASNFASSFSFPQGGELGKLQIDIGKFMARKPIWSRVTDDGLQTRAHLENQLASSLALKSAQEYRQCLLSYVRFLAREADESRLREVCESFLGPPMGMVGSASPTDPKNLAWDPDVLMATLQGMKKHKLLKEDILPSMASNRKVQRLLNEFMDLLLEYETDVTLIPQPGTEGNGNGNDKVMTS

SEQ ID NO: 9507 - protein, 400 aa, Zea mays
  VARIANT 72: note = Ancestral polymorphism is S, Derived polymorphism is L
  VARIANT 151..400: note = Derived polymorphism lacks residues 151 to 400
  VARIANT 187..400: note = Derived polymorphism lacks residues 187 to 400
  VARIANT 188..400: note = Derived polymorphism lacks residues 188 to 400
MFYTGGLPFNLARNPYFRNAFMFATNNPIGGYVPPSYKKLRTTLLVQERTHVERMLQPLKETWSSKGVSIVSDGWEIEDVLYMEFQWISEVIGDASMIKNFIMNHSMRLSMFNEQSNLKFLAIADTRFASAIVVLKRLIAIKDALSVMVMWDTMIEKVKSVIYRHEMKETHEESIFYSAVHDILVSRWTKSNTPLHCLAHSLNPKYYTDAWINEVPNRQAPHNDDEISEMRNTCFRRYFSGEELKKIKLQYANFSLFGHGFNSFDSFEDRNYMEPKMWWGIHGHSAPELKKLALKLLGQPASSSCAQRNWSTYGLIHSSLRNRLNPRHAEDLVFTHQNLRLLSRKSDEYRCGPSAMWDVGADFEGGADFLEQADLSLDEPELEERLFEDLEALGLTEDAE

SEQ ID NO: 9508 - protein, 402 aa, Zea mays
  VARIANT 356: note = Ancestral polymorphism is I, Derived polymorphism is T
MATSGAGDHGQGQGQGHGRFASSLTARYSDWVLETLDELPGSFLLTDPALPGHPIVYASRGLAALTGYAPRDVLGRNARLFQGAATDRATVAGVREAVRAHRPHQAAILNYRRDGAPHWVLLHLAPLFHARDGTLLHFLAVQVPIAPAAVARGATCHTTGHLLAACRDEASRVAEDFPCATHAGKVFVDMDKRGLETEEPRVPSDSEKDMAISTANSIVSALNSYSKLTGLVVSRKRCDSIGIPALSSSLKLSLGRIKQSFVLTDSRLPNMPIIYASDAFTSLTGYSREEILGCNCKVLNGPGTSLEVLEEINQHICSEQACTVDLLSYRKDGSSFCDHLHVSPIRDASGKVAFHIWVHLDMGAKHDFSGLTPEKWLLGAVGAVRVAVRGLSASGSLLRPSQ

SEQ ID NO: 9509 - protein, 547 aa, Zea mays
  VARIANT 270..547: note = Derived polymorphism lacks residues 270 to 547
MEVAVVESPRPPPPPPQAKEEKRSDATKPEIAASMVGSALPIVFESFPSTQREAAAAGVKQEERRLEAARAEMGEVREENERLKSMLSRIVGQYQSLQTHFLDVVKVRELASSSAKAAAENKIPAAPALLPGTDDGDEPYDDLVSLSLGTRANSSGGGPRRKGHDDRSASSSGTADEMPNTADDERRHQISLGLGFARGLPPSGTAAAADDDKASHDASTAPVLNLSSDSSGSAGDTDTTKPALAAAGAARKSPSAGAGDGSADDEVQQQAKKARVSVRVKCDTPTMPDGCQWRKYGQKISKGNPCPRAYYRCTVAPHCPVRKQVQRCAEDTSVLITTYDCAHNHPLPPAATAMASTTSAAVAMLTYGSTTSAASASLVHGHQYHSLAAAAGLLGPTTMVSTAASCPTITLDLTSPAAPHSLVHSSLPYAAAAAAAAAGFESKAVPAAWSSGYLAYGGAHPSYDTKISSALGHLFGGSLGVPSRPEQLYAQSYLQRANSLGDGHGAVAPAVTDTLAKAITSDPSFQSVLAAAITSVMGRGGAAATQK

SEQ ID NO: 9510 - protein, 154 aa, Zea mays
  VARIANT 28..154: note = Derived polymorphism lacks residues 28 to 154
  VARIANT 53: note = Ancestral polymorphism is P, Derived polymorphism is L
  VARIANT 58: note = Ancestral polymorphism is D, Derived polymorphism is E
  VARIANT 86: note = Ancestral polymorphism is A, Derived polymorphism is V
  VARIANT 91: note = Ancestral polymorphism is A, Derived polymorphism is E
  VARIANT 102: note = Ancestral polymorphism is Q, Derived polymorphism is H
  VARIANT 105: note = Ancestral polymorphism is G, Derived polymorphism is R
  VARIANT 109: note = Ancestral polymorphism is A, Derived polymorphism is E
  VARIANT 114..154: note = Derived polymorphism lacks residues 114 to 154
  VARIANT 124: note = Ancestral polymorphism is P, Derived polymorphism is L
  VARIANT 142: note = Ancestral polymorphism is A, Derived polymorphism is V
MRACHLAAGLVILSLAVEERLTVLVELQLGDDHLGGVDTHVHGGAVHLLAGDPLDVDDPAAAVYLHHLPLTALVGAAHDLHLVVLADRDGEHAVLVAELRRQPDGHENAADGGQGREVRLAALPAGARDAGIALHGGGGMDAPAYLGGRFGGGG

SEQ ID NO: 9511 - protein, 125 aa, Zea mays
  VARIANT 83: note = Ancestral polymorphism is R, Derived polymorphism is Q
  VARIANT 83: note = Ancestral polymorphism is R, Derived polymorphism is W
  VARIANT 78: note = Ancestral polymorphism is V, Derived polymorphism is F
  VARIANT 71..125: note = Derived polymorphism lacks residues 71 to 125
  VARIANT 50: note = Ancestral polymorphism is R, Derived polymorphism is H
  VARIANT 45: note = Ancestral polymorphism is R, Derived polymorphism is L
  VARIANT 39: note = Ancestral polymorphism is R, Derived polymorphism is C
  VARIANT 34: note = Ancestral polymorphism is L, Derived polymorphism is M
  VARIANT 27: note = Ancestral polymorphism is R, Derived polymorphism is L
  VARIANT 12: note = Ancestral polymorphism is R, Derived polymorphism is Q
MKRNPRVTSSCRKCRKAHFTALSSVRRVLMSVGLSTELRHKYSVLSIPIRKDDEVQVVRGTYKGREGKVVQVYRRRWVIHVERITREKVNSSTVNVGIHPSKVIVTKLKLDKDRKALLDRKAQNN

SEQ ID NO: 9512 - protein, 279 aa, Zea mays
  VARIANT 249: note = Ancestral polymorphism is G, Derived polymorphism is V
  VARIANT 27: note = Ancestral polymorphism is R, Derived polymorphism is W
  VARIANT 13: note = Ancestral polymorphism is E, Derived polymorphism is K
MRVESSGGLPLPELERQQAGAKRRRRRARAAAAAAAPRTMAAPATAVQRLFEACREVFTGAGPGAVPPPAGVERIKSVLDSITAADVRLTSSMPYFRRVDPYGTPKITYLHLYKCEAFSIGIFCLPSRGVIPLHNHPGMTVFSKLLFGAMHIKSYDWAASQQDTPDVQLQAGPRLAKVKVDGILTAPHETAVLYPEDGGNMHCFTAQNACAVLDVLGPPYDDGSGRHCQYYNVRSSAISVAGSTILPGGDRYEWLEESEPSRDFYLVGSTYMGPKILDH

SEQ ID NO: 9513 - protein, 486 aa, Zea mays
  VARIANT 130: note = Ancestral polymorphism is T, Derived polymorphism is I
  VARIANT 38: note = Ancestral polymorphism is P, Derived polymorphism is L
MSAPPVRTLADLDGDVLAHCAGYLGARDVASLAMACRPLRAAAYCDAVWYRLFRDQWPFEKVPCDALGLRELYIHRHTEIHQMKFGDPISALYYLDPAGTTPSHVMMDRNSIWFCQGPAAKKLNIDLPETEIVETHRNHSARITCLRLFPLIDTPLFRSDTQKNEKALVTSSTDRTIRLCWKGYSRCYKGHSAPVTALADRLLMDGESKLLASGGEDCTIRLWSMSTRAKNHPLIATFHGHEKALSFLSVAWHKSSLLVSCSKDSKVKVWDTVSPSSGSSSCVGSAHLNSNGPPIAMKCHESLCYIAAGAEVTAIDLRTMKKASVLALQNHRILSCEMMPSEWLICTGTKDRALLWDIRKAQELPNTVAEMQSSGPVTLLHLDQYKVVTGVPSDGQVHVWETRTGHSLNTLGCGEPSRLGVRSRVSAMAVDGCRIAMAGSSPEGCMLHYRDFATASAPVVSLPGKEKEVSRFWRPQEFDDSEEEEY

SEQ ID NO: 9514 - protein, 417 aa, Zea mays
  VARIANT 134: note = Ancestral polymorphism is P, Derived polymorphism is A
  VARIANT 118..417: note = Derived polymorphism lacks residues 118 to 417
  VARIANT 84: note = Ancestral polymorphism is P, Derived polymorphism is L
  VARIANT 82: note = Ancestral polymorphism is G, Derived polymorphism is R
  VARIANT 73: note = Ancestral polymorphism is G, Derived polymorphism is S
  VARIANT 70: note = Ancestral polymorphism is P, Derived polymorphism is L
  VARIANT 60: note = Ancestral polymorphism is A, Derived polymorphism is P
  VARIANT 47: note = Ancestral polymorphism is R, Derived polymorphism is W
MAGFKVTRISEGPVKPASATPEETLPLAWVDRYPTHRGLVESMHIFRSGAGEAPAVIRAALAKALAFFYPLAGRIVEGEQPGRPAIRCTADGVYFAEAEADCSLEDVRFLERPLLLPKEDLVPYPGDDRWPVEPHNTIMMMQITKFTCGGFVMGLRFNHASADGMGAAQFINAVGDMARGLAEPRVLPVWHREKFPDPSIKPGPLPELPVLALDYVVLDFPTAYIDGLKREYKAHSGRFCSGFDVLTAKLWQCRTRALALDPAAEVKLCFFASVRHLLKLDRGYYGNSIFPVKMSAPADKVLASSLVEVVDIIREAKDRMAVEFSRFAGEETDQDPFQMTFNYESIYVSDWSKLGFSEVDYGFGPPIFAGPLVNNDFIASVVFLKAPLPLDGTRMLASCVTKEHSEEFARGMKEDLP

SEQ ID NO: 9515 - protein, 263 aa, Zea mays
  VARIANT 83: note = Ancestral polymorphism is A, Derived polymorphism is V
  VARIANT 174..263: note = Derived polymorphism lacks residues 174 to 263
MAAVASVTAPLANFETTRSACIALLFGHKTRQQITQLLVKDTSDKLKQASEADHRVQVSVSLLHSHHLRAPFATKKIAKDFQAVLKEFQKAQRLAVCTVCFSSGSATELTNLVWIVVCSYNSSESNNGADKLAEQRTQLLESRRWDDCLVHASSWIMRQLVEERDQGIQEIQHQITEVNEIFKDLAVLVHGQGAMIDDIDSHIDNAAASTMQAKGQLSKAAKNSSLVHHELFDTLLISLNLPLFLISNPPSCFLQICLLLSSS

SEQ ID NO: 9516 - protein, 712 aa, Zea mays
  VARIANT 98..712: note = Derived polymorphism lacks residues 98 to 712
  VARIANT 28..712: note = Derived polymorphism lacks residues 28 to 712
MAWISDIRGTISWAVIFDLLILCEAVTEVHLQAGTTDKHFWRFSTSGQYSAKAAYELFFLGSTAFGPLKGFGKLGLLPNASSFCGWSCITDAGQQIVWQKGISLTLRSVLSVISKRKQSNTFSFLVFLQDNSGSRCCKRWGLPNLSPDLDATNLDSWWNSAAEKLPGDLQAGFNSIVILGAWSIWRPRNDCVFNGMSPSVTTAITLASDELRMWSLAGAKESSAQIKDENKDVDSDDRPGMPAAVSVYEQKVNSKSTARKVKRQPEISNSEMVTRKKAKVTKDPHHDGSTTSDVKQQACTCGVKTEKKKRKSSTTKVSAEEGKVSSNIGTTTQGDTTQADLSSKGKSCRKIGIQQALIEECKSTKVANDTGSDKFSHSVNNVIDLKDKLSHCLSSRLLRRWCMFEWFYSAIDYPWFAKSEFVEYLNHVKLGHVPRLTRVEWGVIRSSLGKPRRLSKQFLHEEREKLSQYRDSVRQHYAELRSGVREGLPTDLARPLAVGQRVIACHPRTRELHDGNILTVDNNRCRVQFDRPELGVEFVMDIDCMPLHPMENESLRQKNIVNKYLSEVKLEDQMNDLGSGGAARFASNVNVNCGDAAFQIPSSHPVNSLTKQAKVGTVDSIVQAKATVNEVAIAAQQAMYNQPCSLSQIQEREADIRALAELSRALDKKEALLVELRHMNEEVSRKQKDGETVRVEAFQDAICYGACAAKRF

SEQ ID NO: 9517 - protein, 191 aa, Zea mays
  VARIANT 83: note = Ancestral polymorphism is C, Derived polymorphism is F
MRFGLPTVNVSMLICHRWQMAMRRTLMKNSLVLQMSPLATCRISHWRVSLLANGANCLMIFFFEHLPPGLDKGKVKATRQSKCGVCGEYGHRTGSAKCRYTGAKTRKRCRKVNAKQVENASTTPDDLQLHEGTNESQEWAQFASSSGKKLTPRRKPIVQVEHDTKSGERRPSDGDTFEELHARTASGGQNC

SEQ ID NO: 9518 - protein, 339 aa, Zea mays
  VARIANT 3: note = Ancestral polymorphism is R, Derived polymorphism is W
  VARIANT 9..339: note = Derived polymorphism lacks residues 9 to 339
  VARIANT 28: note = Ancestral polymorphism is P, Derived polymorphism is S
  VARIANT 65..339: note = Derived polymorphism lacks residues 65 to 339
  VARIANT 74: note = Ancestral polymorphism is E, Derived polymorphism is K
  VARIANT 99: note = Ancestral polymorphism is F, Derived polymorphism is S
  VARIANT 210: note = Ancestral polymorphism is R, Derived polymorphism is C
  VARIANT 229: note = Ancestral polymorphism is D, Derived polymorphism is V
  VARIANT 247: note = Ancestral polymorphism is L, Derived polymorphism is S
MSRLILSARRVSSSPDFADDQDSPQPPPTLQFVPFIVADHKIIGSVYNPFASMYFGASYLAWLSQYEGREQSYEFIVQVYLGGPENVSLHKTGPFWNQFWESLTQHQDPKKYAYAFGIDFIPNPFFNYIFLFTNINDYAFLFIFNLMTTLATEMQFLLRIIYECSSTFLPNFKSPPKGFGNWQTILLAGQHEQIVPHVLNSFLDQDSRVRYYACEALYNIAKDIVTESDQFSIEEFIPLLRERMNVLNPYVRQFLVGWITVLDSVPDIDMLGFLPDFLDGCLHIYAFNTDYHTLNGKNVDYGRMAEIIVRRAGSTDEFTRLTSITWVICLSCFSCDRKT

SEQ ID NO: 9519 - protein, 214 aa, Zea mays
  VARIANT 49..214: note = Derived polymorphism lacks residues 49 to 214
MSGNPVGVDNTSRRKFDKEEYLERARQREQREKDEARKGKERGPPVQRQPLKHRDYEVDLDSRLGKTQVVTPIAPLNQQAGYYCSVCECVVKDSANYLDHINGKKHQRALGMSMRVERASLEQVLHLSLTLDLQLKVQKRFEALKKRKDPSAFTEEDLDERIMKQQQDEEERKRQRKEKKKEKKREQATQHEPEDVDPDIAAMMGFGGFGSSKK

SEQ ID NO: 9520 - protein, 916 aa, Zea mays
  VARIANT 412: note = Ancestral polymorphism is R, Derived polymorphism is C
  VARIANT 379: note = Ancestral polymorphism is D, Derived polymorphism is Y
MQNIRQYNCLFAFTSMGAHIDRSVNDGHGPPIFKICGQVHHRIGSLLPINDQPPKFLQLYVYDTTHEVNNRINSLSTADGPTSSIRQDIVQELSKMLDEHNPFAKKFRLARERLNEHTNEEFIIRIIGAREGDPVQYNMPTTDDLAMLVIGDFSLDTFKRDIIIETRNSELRCISSLHPAYMALQYPLLFPYGERGFQVGVAYSDTRVRGTNSRAHITMQEYYCYQFHYKVGQPNPFLSYGTLSNQAKVDARACIDENRLMYILNNQDKLRIENLQGISDAVSKGCINGDEMGKTIVLLASHIGGRRYMIQNYHDSIAICRVHGPPDFFVTFTCNAKWPEIVDGLQHSGQKSSDAPDIPLYVAISRVTSQNGLFILIEDDSGNCSTKTRNIVYKEVFTQLDPRNINVVIRVRVIRKWEFRGATNDGPLRHINLILADEQGTTIHAEIPAALATEKGSLIQIEKVYEIRRFRVVSSRSYFRPVQNNLMIQFTLYTQAKVVKDPPHIFPIYIYNLTSFEKIEESVDNKNYLIDAIGMLTQIGAPHVAGYNNSSIVRDIFIKNISDASLKITLWGDQASGFSTDNVCNQGNNKPIVIMFVGCLAKQFKGQSYLSGTAATTWYFNPDIPEAQEYYIKLQSSDLQMIKPTVAEEEFEVSQKPNIEDKTIQELLEMDPDMFPPQGFKCTATISRLIQDSKWWFPSCTKCKKSSPQTSTGYRCTSCGCTDVKFSYKLSFVATNGTCEVEFFCFDTIAKRIVGKPCDTLITTPIASQGFPPDLAAIVSLKFTFVVTLNMSAFSVTNRVFSILYVLTNHGRQTSVPSTMLNYPQEQLLTQDDMFESTATQDSPATSFAKLSTSARQENTVRRVLEYYDASKNSENVDEYTDRLTNNELSSPTKRIKHTQVSKAMPDSTCSKNDNI

SEQ ID NO: 9521 - protein, 139 aa, Zea mays
  VARIANT 64: note = Ancestral polymorphism is V, Derived polymorphism is D
  VARIANT 48..139: note = Ancestral polymorphism lacks residues 48 to 139
  VARIANT 25: note = Ancestral polymorphism is R, Derived polymorphism is K
  VARIANT 12: note = Ancestral polymorphism is S, Derived polymorphism is L
MWMGEDFSHLRSGEESIFKVVPTLRRRVTEYISITTFCYFPYKSENSRSVDVLGLKTAFATFMVSLPFPQVPEKKAREWCASKGDIPYFETSAKEDHNVDTAFLCIARLALEHEHDQDIYFKTVVEQVPDTEQTSGCAC

SEQ ID NO: 9522 - protein, 796 aa, Zea mays
  VARIANT 460: note = Ancestral polymorphism is S, Derived polymorphism is F
MGTGGDGDKAGPALPLEALLALGLDQRTAENALVNAKVTANLAAVIAEAGIKECDKSIGNLLYAVATKYPTNALVHRPVLISYVLSTKIKSPAQLDAALSFLTNTGPDSLDVDKFEEACGVGVVVSIEEIKSTVTDILEENMEAIKEQRYHINVGMLCGQVRKRHPWGDAKAVKEEIDKRLAEILGPKTEADSIKPVKKKKEKTAKVEEKKVAVATTAPPSEEELNPYTIFPQPEENFKVHTEIFFSDGNIWRAHNTKEILEKHLKATGGKVMTRFPPEPNGYLHIGHAKAMFIDFGLAKERNGHCYLRFDDTNPEAEKKEYIDHIQEIVHWMGWEPYKVTYTSDYFQPLYEHAVELIRKGLAYVDHQTAEEIKEYREKKMNSPWRDRPIEESLNLFEDMRRGLIAEGAATLRMKQDMQNENKNMSDLIAYRIKFTPHPHAGDNWCIYPSYDYAHCMVDSLENITHSLCTLEFDIRRPSYYWLLVALGLYQPYVWEYSRLNISNTVMSKRKLNRLVTENWVDGWDDPRLLTLAGLRRRGVSSTAINSFIRGIGITRSDNSLIRVDRLEYHIREELNKTAPRTMVVLRPLKVVITNLEEGKVLDLDGKMWPDASDTDASSHYKLPFSRTVYIEKTDFRLKDSKDYYGLAPGKSVMLRYAFPIKCTDVIYGDTPDDIVEIRAEYDPLKTSKLKGVLHWVAEPAPGVEPLKVEVRLFEKLFMSENPAELEDWLGDLNPHSKEVIKDAYAVPSLATAVLGDKFQFERLGYFAVDTDSTPEKLVFNRTVTLRDSFGKAGPK

SEQ ID NO: 9523 - protein, 291 aa, Zea mays
  VARIANT 88: note = Ancestral polymorphism is G, Derived polymorphism is R
  VARIANT 70: note = Ancestral polymorphism is E, Derived polymorphism is K
MAMVQAGMGLGRIVLLIGVGAVGGPIAVRSGKLGELLRDLQESLSEKGAAAVNDDVNTVVAKALAQMTKEINHIATRISQPMIHVDTGNGVAASALIVPAAAVGTVGYCYMWWKGISFSSLMYVTKRNMANAVESMTKHLEQVQSSLAAAKKHLSQRIQNVDDKLEQQKEISVQIKDQVIDAKLKFKNIGSDMDKLKNMVMGLDDKMDSIEAKQNYSCVAVDYLCQFIEERVDKLPEQLEGLQQTVKRIGYRSPELPPGLGGLQQLLATGSATHSSTRMLRSTGAARLILP

SEQ ID NO: 9524 - protein, 128 aa, Zea mays
  VARIANT 9..128: note = Derived polymorphism lacks residues 9 to 128
MSATGALGRLHHRAALRPVAAVSNWLTPTRSCITSFTDYEFTVYLHSVGKLQPHCNKVYKRFAMRKNKFMGSNKNQAKKTDINCDATLKSLFGGRDKVGMLEISKLLSPDFPKISKLPWSMEPGMSLW

SEQ ID NO: 9525 - protein, 79 aa, Zea mays
  VARIANT 57: note = Ancestral polymorphism is Y, Derived polymorphism is C
  VARIANT 56: note = Ancestral polymorphism is R, Derived polymorphism is H
  VARIANT 3: note = Ancestral polymorphism is P, Derived polymorphism is S
MTPFMYFSMAERGNMKSSNPDLPTTEIAKKLGEMWQKMSSEEKQPYVQQAQVDKKRYEKESAVYRGEAAGDVDSGNESD

SEQ ID NO: 9526 - protein, 271 aa, Zea mays
  VARIANT 45: note = Ancestral polymorphism is Y, Derived polymorphism is H
  VARIANT 69: note = Ancestral polymorphism is D, Derived polymorphism is H
  VARIANT 129: note = Ancestral polymorphism is G, Derived polymorphism is R
  VARIANT 134: note = Ancestral polymorphism is P, Derived polymorphism is L
  VARIANT 143: note = Ancestral polymorphism is T, Derived polymorphism is M
  VARIANT 173: note = Ancestral polymorphism is P, Derived polymorphism is L
  VARIANT 211: note = Ancestral polymorphism is T, Derived polymorphism is M
  VARIANT 234..271: note = Derived polymorphism lacks residues 234 to 271
MRSRQMTARSALDEVTDTSAFDRSPSTFRSSVSRDGRFPAVVGRYHLYISYACPLASRCLAFLKLKGLDHAIGVTVVKPIFERTKESDEHRGWVFPAAADEELGAEPDPLNGARSVRELYEIASSNYAGKPTVPVLWDKQLKTVVNNESSEIIRMLNAEFNGIARNPRLDLYPAHLWASIDEANELVYDAINNDVYKCGFAKKKDDRVLVTDLGSLTSIHDRARELFYYLKGAQVDYGEEHSKACGHNRLSLVMILLKIVVVVMDGGNGWF

SEQ ID NO: 9527 - protein, 225 aa, Zea mays
  VARIANT 10: note = Ancestral polymorphism is S, Derived polymorphism is L
  VARIANT 47: note = Ancestral polymorphism is L, Derived polymorphism is F
  VARIANT 51..225: note = Derived polymorphism lacks residues 51 to 225
  VARIANT 129: note = Ancestral polymorphism is G, Derived polymorphism is R
MRSRQMTAWSALDEVTDTSAFVRSPSTFRSSVSRDGRFPAVAGRYHLYISYACPLASRCLTFLKLKGLDHAIGVTVVMPIFERTKESDEHRGWVFPAAADEEPGAEPDPLNGARSVRELYEIASSNYVGKPTVPVLWDKQLKTVVNNESSEIIRMLNTEFNGIARNPRLDLYPAHLWASIDEANELVYDTINNDVYKCGFAKKKDDRVLMSDLGSLTSIHDRWVL

SEQ ID NO: 9528 - protein, 179 aa, Zea mays
  VARIANT 27: note = Ancestral polymorphism is R, Derived polymorphism is C
  VARIANT 33: note = Ancestral polymorphism is I, Derived polymorphism is N
  VARIANT 56: note = Ancestral polymorphism is P, Derived polymorphism is L
  VARIANT 61..179: note = Derived polymorphism lacks residues 61 to 179
  VARIANT 66: note = Ancestral polymorphism is A, Derived polymorphism is V
  VARIANT 73: note = Ancestral polymorphism is P, Derived polymorphism is L
  VARIANT 75: note = Ancestral polymorphism is T, Derived polymorphism is M
  VARIANT 79: note = Ancestral polymorphism is F, Derived polymorphism is S
  VARIANT 97: note = Ancestral polymorphism is N, Derived polymorphism is K
  VARIANT 102: note = Ancestral polymorphism is R, Derived polymorphism is W
  VARIANT 123: note = Ancestral polymorphism is P, Derived polymorphism is L
  VARIANT 138: note = Ancestral polymorphism is A, Derived polymorphism is T
  VARIANT 151: note = Ancestral polymorphism is T, Derived polymorphism is M
  VARIANT 157: note = Ancestral polymorphism is R, Derived polymorphism is L
  VARIANT 159: note = Ancestral polymorphism is C, Derived polymorphism is F
  VARIANT 163..179: note = Derived polymorphism lacks residues 163 to 179
  VARIANT 172: note = Ancestral polymorphism is S, Derived polymorphism is L
MLPAPPPLHRDNAVLTSYVALTPRDCRRLLPAIAALHHQGHDFTEGLQGHLLDINLVLNDCDATFAPFYVDYPPTLPCFLYGESLGGAIALLLHLRNRDLWWYGAMLNDTMCGHVAFTWGNIPESFFKVDWKRALVLASSRRTMAPPRATTVLERLRVCYELQHRFEEVQLSFLGMHDV

SEQ ID NO: 9529 - protein, 148 aa, Zea mays
  VARIANT 66: note = Ancestral polymorphism is P, Derived polymorphism is Q
  VARIANT 63: note = Ancestral polymorphism is T, Derived polymorphism is I
  VARIANT 40: note = Ancestral polymorphism is A, Derived polymorphism is T
MPGTPGRPGPGKDRDKGRVRVLAINGCGSGPSDALLASAALARLEERPSPLRRVFGDATLKDTVAPLLVPSYDLATVAPFLFSRADAVESDSFDFRLRDVCAATRGCNYVRIEASCSGRKALRSLDAKNAAAAANGMLAQRNMEAELF

SEQ ID NO: 9530 - protein, 308 aa, Zea mays
  VARIANT 244: note = Ancestral polymorphism is G, Derived polymorphism is E
  VARIANT 218: note = Ancestral polymorphism is Q, Derived polymorphism is H
  VARIANT 174: note = Ancestral polymorphism is F, Derived polymorphism is I
  VARIANT 127..308: note = Derived polymorphism lacks residues 127 to 308
  VARIANT 126: note = Ancestral polymorphism is F, Derived polymorphism is L
  VARIANT 107: note = Ancestral polymorphism is R, Derived polymorphism is T
  VARIANT 98: note = Ancestral polymorphism is L, Derived polymorphism is F
  VARIANT 63: note = Ancestral polymorphism is R, Derived polymorphism is W
  VARIANT 60: note = Ancestral polymorphism is A, Derived polymorphism is V
  VARIANT 58: note = Ancestral polymorphism is C, Derived polymorphism is Y
  VARIANT 7: note = Ancestral polymorphism is Q, Derived polymorphism is P
MLTGWSQIVEVAVSRRMSLFEDCSQLLFELLDASLNATTSPDCSVKMAYVLTNVSLTYMAKLRDERFICPAGTDYDVVTCLDIISSKQLTNAACNSLLFKLVMATLTNESSEILRRRQYALLLSYLQYCSSILDSDVPPSVLWFLLLEEQDGDDEDITLQKVLKEHNELAHANISIIRKEAQAIVDLIQNPRKRSIIISLMIEGKMDTSSPATLVNAQMLNMFVGRRVRTVVQVQHNEGGVLVGQSTDGHQLCVKSAMDVPVSHFMEVYGIAENSETIRAEVCTDFGPNFGEISNAFGVCLDPLIAIV

SEQ ID NO: 9531 - protein, 245 aa, Zea mays
  VARIANT 89..245: note = Derived polymorphism lacks residues 89 to 245
  VARIANT 151..245: note = Derived polymorphism lacks residues 151 to 245
  VARIANT 152..245: note = Derived polymorphism lacks residues 152 to 245
MWQQGVQDNVEQMKDKQTATLDDVLASAQVDSCNTDGASTIVASSSRGSYAQHKCKMNKHKLRKLQKRLCRRHESSLLSSSRPCFGGRRPRSHQASAELSWSMERDYSSMGSEMPGKKARKPYTITKPHERWSTEEHARFVDALLMFGRDWKKIEEHVGTKTTVQLPGSIILLTTAAPSLFAHTFRDDLVGVFICLAIGCYLLQEHIRASDGLRNAFRKGNGMSNSIGILPLFIYPVWTGVLQIL

SEQ ID NO: 9532 - protein, 174 aa, Zea mays
  VARIANT 120: note = Ancestral polymorphism is I, Derived polymorphism is V
  VARIANT 95: note = Ancestral polymorphism is L, Derived polymorphism is P
  VARIANT 87: note = Ancestral polymorphism is D, Derived polymorphism is G
  VARIANT 86: note = Ancestral polymorphism is C, Derived polymorphism is S
  VARIANT 73: note = Ancestral polymorphism is P, Derived polymorphism is S
  VARIANT 51: note = Ancestral polymorphism is R, Derived polymorphism is Q
  VARIANT 49: note = Ancestral polymorphism is P, Derived polymorphism is H
  VARIANT 23: note = Ancestral polymorphism is R, Derived polymorphism is H
MARAEQESLAAPPLESTATARQRVPSVEVHLYRRGAGPVAIFRSDLAGPRRDRLDVRRIQASHGLRALFAFRPEGSRRGRGLRIRCDPAAGYSALPFRDGAAIALDGEPGESWTKPVSVIVAGLLVLAVMAAVAANGVPEPLRSSRLANGIFAPWILFSAVIIFARARTRPRAP

SEQ ID NO: 9533 - protein, 165 aa, Zea mays
  VARIANT 24: note = Ancestral polymorphism is D, Derived polymorphism is N
  VARIANT 56: note = Ancestral polymorphism is A, Derived polymorphism is V
  VARIANT 67: note = Ancestral polymorphism is A, Derived polymorphism is V
  VARIANT 83: note = Ancestral polymorphism is K, Derived polymorphism is R
  VARIANT 94: note = Ancestral polymorphism is I, Derived polymorphism is V
MDGRMFGLETPLMVALQHLLDVPDGDAGAGGDKASGAAAGGGPTRTYVRDARAMAATPADVKELPGAYAFVVDMPGLGTGDIKVQVEDERVLVISGERRREEREDAKYLRMERRMGKFMRKFVLPDNADMDKISAVCRDGVLTVTVEKLPPPEPKKPKTIEVKVA

SEQ ID NO: 9534 - protein, 397 aa, Zea mays
  VARIANT 317: note = Ancestral polymorphism is S, Derived polymorphism is C
  VARIANT 125: note = Ancestral polymorphism is L, Derived polymorphism is S
MAGARGRATPTRTPPRSSSPAPRTEAVVPPDWDSAVSTVSSHPSPPVVVVCGPKNSGKHGKVAYLDTDVGQPEFGPPGCLSFNVLDEAIADLMNPSLREAERCYFFGDISSKRDPEAYLNCLFHSYDYFVGKYRCDENEMLPLIVNTPGWVKGAGFDMLVEMLRYICPTIVVQIRITIKNKNLPDGGFWLDGGQTGPMMINIDAAFHDASNRSPVSAPFVDSCIWEVEVYMFSRLLIQKDSCGMRERRLVEYLKQCFPSNISLSTNKELAYALASLPPYQVPFSDVAIVHLHCKVPAGEIWHSLNATIVGLAVSNASEGTRSIPYCVGLGIIRGVDIQKGLLYLITPVPLQRLQCVDLLQQGLIEIPTALLQVRGCVSPYMSTNVLHKISERDLYAG

SEQ ID NO: 9535 - protein, 350 aa, Zea mays
  VARIANT 213: note = Ancestral polymorphism is K, Derived polymorphism is E
  VARIANT 70..350: note = Derived polymorphism lacks residues 70 to 350
  VARIANT 32: note = Ancestral polymorphism is D, Derived polymorphism is Y
MVELLVGRNGGSCHRISVSGLLRDSLFSFIADNCTKIGARALEVFGRHCRSLVGLRRVMHPIDLADKVCQHDEAHTIARSMPRLQHLEMGVKQDANASDIKKAYYKLSLKHHPDKNPDPESRKLFVKIANAYEILKDESTRAQYDFAIEHPEEVFYNTAQYYRAYYGHKTDPRAVLIGLLLIVSAFQYINQLTRYNQAMKSVKQTPAYKNRLKALEYERTGGIASKKKGIKQVDKKVEEELSNEVELQIHGVEKPSVWRLFGVQFILWPYSVGKALTWKICWFWRYRVKKLPYTWEDACYLTWISLQIPANAWKNMDESRKEDLVRRHLWEKSNMERYTSGTRKEPKRRR

SEQ ID NO: 9536 - protein, 184 aa, Zea mays
  VARIANT 101: note = Ancestral polymorphism is P, Derived polymorphism is L
  VARIANT 35: note = Ancestral polymorphism is W, Derived polymorphism is R
MEPVFTVAHGYETPVMAPAPQHGSGQMEEQGRRGWRVGRVPCAVVARLLLFLGVTVGFAFAIYRACHNHNKRDLVFAIVTYFLVVVFACCFAKLQQLRRDPAATEAEMRRVRIAAWVVSTALGIAATLRVADAVHGLALKLVVWAVSIVLHGLGFYFLFLRKGANVARQPESALPGRVSPEEKV

SEQ ID NO: 9537 - protein, 317 aa, Zea mays
  VARIANT 146..317: note = Derived polymorphism lacks residues 146 to 317
  VARIANT 105..317: note = Derived polymorphism lacks residues 105 to 317
  VARIANT 28..317: note = Derived polymorphism lacks residues 28 to 317
MARSSFKLEHPFGSSLRFLIPPSSSELQLMLLVMLGFRLFGCAENGDALPVVAKTPKRRTTLESQLIKFEDEDSEKARAAADAMSPVQEVTSLQFDEILYGSGDQYRKVNKGTRHQNEGKQESKRPRESQSTRRGTRELGIVKRARGDELLRFMDGASKEPLRKSTCSVPQFDSEKKQIFTFIAIKQDIRDLKVAKEEQDIGFYAGFVGATYFLGRAISAVPWGMFADKYGRKPCIVISILSVIVFNTLFGLSTTYWMAIVTRGLLGLLCGILGPIKAYASEVCRKEHQALGISLVTSSRAIALVIGPAIGGFLAQG

SEQ ID NO: 9538 - protein, 181 aa, Zea mays
  VARIANT 63: note = Ancestral polymorphism is R, Derived polymorphism is C
  VARIANT 50: note = Ancestral polymorphism is G, Derived polymorphism is D
  VARIANT 35: note = Ancestral polymorphism is W, Derived polymorphism is R
MEPVFTVAHGYQTPVTAPAPQHGSGQMEGQGRRGWRVPCAVVARLLLFLGVTVGFAFAIYRACHNHNKRDLVFAIVTYFLVVVFACCFAKLQQLRRDPAATEAEMRRVRIAAWVVSTALGIAATLRVADAVHGLALKLVVWAVSIVLHGLGFYFLFLRKGANAARQPESALPGRVSPEEKV

SEQ ID NO: 9539 - protein, 188 aa, Zea mays
  VARIANT 35: note = Ancestral polymorphism is W, Derived polymorphism is R
MEPVFTVAHGYETPVMAPAPQHGPGQMEGQGRRGWRVPCAVVARLLLFLGVTVGFAFAIYRACHNHNKRDLVFAIVTYFLVVVFACCFAKLQQLRRDPAATEAQMRRVRIAAWVVSTALGIAATLRVADAVHGLALKLVVWAVSIVLHGFGFYFLFLRKGANAARQPGGEGLVNPMSAPIYCNCNIMD

SEQ ID NO: 9540 - protein, 376 aa, Zea mays
  VARIANT 79: note = Ancestral polymorphism is A, Derived polymorphism is D
  VARIANT 92: note = Ancestral polymorphism is H, Derived polymorphism is L
  VARIANT 159: note = Ancestral polymorphism is I, Derived polymorphism is T
  VARIANT 184: note = Ancestral polymorphism is W, Derived polymorphism is G
  VARIANT 194: note = Ancestral polymorphism is A, Derived polymorphism is S
  VARIANT 267: note = Ancestral polymorphism is G, Derived polymorphism is S
MASSSLPAPAAGRAELLKAFDDARTGVRGLVESGVSSVPELFRHADPYASIPLAPPGVSIPVVDLSLPPHLAAAAAASAARTWGFFHLVNHHHALPAAAAAADDDYPERAFAAVRAFNELPAHERAPHYSRAVDGGVNYSSNVDLYNSPAASWRDTIQILLGPNRHPDLADRIPAACRAEVLEWEVRATAVARALLRLLSQGLGLRPEALEDASCADGKLMVCHYYPHCPEPERTMGIVPHTDPGVLTVLAQDGVGGLQVKHQDEDGKISWVDVKPVPGALVINVGDLLQIMSNDKYTSVEHRVVMNTREEPRVSIGIFFSPGKRGDSVFYGPLPELVSSENPPKYRNFTMSEFYGTFFSRDLASKALLDNFKLSP

SEQ ID NO: 9541 - protein, 369 aa, Zea mays
  VARIANT 317..369: note = Derived polymorphism lacks residues 317 to 369
  VARIANT 300..369: note = Derived polymorphism lacks residues 300 to 369
  VARIANT 277: note = Ancestral polymorphism is K, Derived polymorphism is E
  VARIANT 124: note = Ancestral polymorphism is A, Derived polymorphism is S
  VARIANT 41: note = Ancestral polymorphism is S, Derived polymorphism is F
  VARIANT 11: note = Ancestral polymorphism is S, Derived polymorphism is N
MLFLQLVEVLNYIGIRVVKSELKPQPRCLEVCSSGMADWASIQTDILGIIIKKLPIPDYIRFRAVCTSWNNVCKDVSYCPRVDPWLMLPPNQNPLGAQFFCIPERKNQSIRLPNTASLFESVWAPVGSSNGWLIYFSHTYGTMQLVNPVSGKHIQLPPIGRRTFSKAKLLEISERNFIVAVLYGDEKGYKITRKGSSNWSSVESKFILDDIIKHGGRLYTCDMYGTVEMWAEPPRAWPDEEVTHRWRFRCLIETPAGDLVRVKRLCQNKFAVWILDKASSSWVGTENIGDLALFVSHYNSFCFPASGQPNLKANCIYFIDIYNNLCAFNLEHGTKELVQTLTIGRGQGRNDYHRWPERDQVLWFIPSLK

SEQ ID NO: 9542 - protein, 318 aa, Zea mays
  VARIANT 301: note = Ancestral polymorphism is I, Derived polymorphism is T
  VARIANT 209: note = Ancestral polymorphism is P, Derived polymorphism is S
  VARIANT 104..318: note = Derived polymorphism lacks residues 104 to 318
  VARIANT 16..318: note = Derived polymorphism lacks residues 16 to 318
  VARIANT 2: note = Ancestral polymorphism is A, Derived polymorphism is V
MAAAWAGLAVLLVAAQLASAAQVTAPAFLWAPKNYGVTYLKMGRAISLWKHMQTMVKEKAPVMVPLESLSFLSICAHPDDIQRRQLNESTGLSVHQVKFWFENKRTHVKHLSGREENYRLKAENEMLKEENNRLIRQEQSNAPAPAPCPRCINDAGHLLLEKEVERLKALNQMLQQELQLQGTDGETHRHSSLSDLVYWSIKVSTAYNPLCFYQLSFTRSEFSMAFPYVSTSVNEKLEDSLLSSFAENYNNGFGRNRITYTDTCTGQDLKKYHNMDAINDLVVSGVASRRVNHPSGQTDIIVFCSGGFENPGTAKSKG

SEQ ID NO: 9543 - protein, 112 aa, Zea mays
  VARIANT 6: note = Ancestral polymorphism is G, Derived polymorphism is D
  VARIANT 10: note = Ancestral polymorphism is G, Derived polymorphism is V
  VARIANT 34: note = Ancestral polymorphism is H, Derived polymorphism is Y
MEGRVGREAGVVGGAPTAGERAAGGVILRPGFIHGTRRVGSVKIPLGLVGSPMQMVLQNIKPLTRLPLIGPLLTPPVSAASVGKVAVRAATDPVFPPGIVDVYGIMRYSEQN

SEQ ID NO: 9544 - protein, 259 aa, Zea mays
  VARIANT 113..259: note = Derived polymorphism lacks residues 113 to 259
MPRRIRVRQQPTPCLTVHARYLPLPPPPLRKALHYPHAGSPSTPILPVSTLSSPPPRSWWPRKAQQEGRAGDPPPRSRCSGFLSEVELRLLCCNLPAHPRLRPQSFPLPLHIYSLATASALAGVEPTIARQLSTPLQILDRTSRQQEMATKTAIPRKKMCIPLMPFFATSHIAPFTDLTFHLVTARPDDVEATVAVTPAKALVVQSTLARRGASHLATVKVATYPFPSVDGLPPEWRTTPRSRPPPTRGASMLSPRTRS

SEQ ID NO: 9545 - protein, 485 aa, Zea mays
  VARIANT 238: note = Ancestral polymorphism is N, Derived polymorphism is S
  VARIANT 240: note = Ancestral polymorphism is Y, Derived polymorphism is H
MAAWSSPPSLRHLLMLRPCLPLSPTCLAGSLRRHIHSRCRLFSSAASSSTLTHGDIASTHGDADGVVEVNPPRGTRDFPPEDMRLRTWLFDQFREVSRLMAFEEVDFPVLESEALFIRKAGEEITQQLYNFEDKGGRRVVLRPEITPSLARLVIKQGKSVSLPLKWFTIGQCWRYERMTRGRRREHYQWNMDIFGVPKVRAEAELLHAIVLLFQRLGITSSDVGIRVSSRKVLQAVLNMYSIPDHLFTQVCVIVDKLGKMTREEIEKELVSTGLSSEAVQGIIDVLSIKSLSKLEEVLGSDVEAVADLKKLFSFAEQYGYADWICFDASVVRGLAYYTGIVFEAFDREGKLRAICGGGRYDRLLSTFGSEDIPACGFGFGDAVIVELLKEKGLLPDMSRQIDDIVFPLDEELEGPASSIASSLRKKGRSVELVEDKRLKWVFKHAERINASRLILVGNSEWERGMVRVKVLSTREEFEVKTSELE

SEQ ID NO: 9546 - protein, 101 aa, Zea mays
  VARIANT 8: note = Ancestral polymorphism is E, Derived polymorphism is D
  VARIANT 24: note = Ancestral polymorphism is D, Derived polymorphism is G
  VARIANT 29: note = Ancestral polymorphism is R, Derived polymorphism is W
  VARIANT 48: note = Ancestral polymorphism is S, Derived polymorphism is C
MGEAHLDECCHCQGCAGKYTLLRDEENPRWTIFERRLPCCGCGIGWSSFLLGFLCPLIWYFATTLYCCKYYNKDPRERPGLAASAVAVRPNPEHVTSQYEL

SEQ ID NO: 9547 - protein, 203 aa, Zea mays
  VARIANT 131: note = Ancestral polymorphism is G, Derived polymorphism is S
MSPATADEPSVAMEEQPGKESEEAADAMEEQLGKESEEAAESAEEVGQVEEEPEEGVDPAEAMEKAGEEAEAEEGASLRPALPVGRVKRIMRVDRDIKKVTSEAALLIAAATELFLGSLATGAHAAAARRSRRTVRAVHVRAAARAHRPTADFLLDCLAAEEEAPRARQTAGSARGGGGGGGGNAKPLPRGTRRIDAFFQKVT

SEQ ID NO: 9548 - protein, 1117 aa, Zea mays
  VARIANT 231..1117: note = Derived polymorphism lacks residues 231 to 1117
MEAVSMSPSTVSSHTHDDHDAASVTEAMSLQEGLLFSDTLKDLRNLRSQLYSAAEYFEVFYRNNSHKSTVMTSLKDYTVEALVSTVDHLGFVSYKVDNLVSEKAVEVKETEFLVSSVEQMIVLLTQSASLDLLESSIHPVSEPPRYSRQYTGRKMHKSQSSISTPVRRQATMRNKGRLPDTKFQPDGTVRLYGCKKTAFELEAFETSFHAVAQRLGAAGEKLKQRQEGFPQLTPIPANSSFSWLTPHSPLWLFEDRHLLPLDAPAVFEEVQRPRSGNSHTSSKPAEQISHRWQFHLSLDEDGTDNSSLFKEKLTHALRYFKESTDQHLLVQVWAPVKNGDRYVLTTSGQPFVLDHQSIGLLQYRAVSMTYMFSVDAENVGDLGLPGRVYKQKVPEWTPNVQYYSSGEYQRLNHAISYNVHGTVALPVFDPSAHSCIAVVELIMTSKKINYACEVDKVCKALEAVNLKSTEIHDHPNVQICNEGRQAALVEILEILTVVCEEHKLPLAQTWVPCKYRSVLAHGGGLKKSCLSFDGSCMGEVCMSTSDVAFHVIDAHMWGFRDACVEHHLQRGQGVPGKAFISHKPCFSKDIRKFCKLAYPLVHYARMFGLAGCFAICLQSSYTGNDDYILEFFLPPDCSDEDDQNALLESVLTLMKRCLRSLKVVGDRDLSGVSLHLSNVLKLENEEFKTDAQFDNSDGSLCQSPNGDRHGGSHEFDGGNKKVLDVPEGQLLTDDFSQGNGTSAGRPNGSGASDSSVLHKTNKPPERKRGKAEKTISLEVLQQYFSGSLKNAAKSLGVCPTTMKRICRQHGISRWPSRKINKVNRSLSKLKQVIESVQGSDAAFNLTSITGPLPIPVGPSLDSLNVEKLTQSKVAELSNIAVDGDRDSLQKSLGNDGHFGIVMPQQGSTDHNNDTQLEADKASHSRSSSGEGSINSRTSEGSCQRSPANQTFVCKPIASTFAEPQLNPEEFNKEPFQEPQLPLSRMLIEDSGSSKDLKNLFTSTSDQPFLAPPNNLVPMKHSGSVTIKASFKEDIVRFRFSCSGSVIVLKEEVAKRLRMDVGTFDIKYLDDDHEWVKLTCNSDLEECMEISRLSGSHVIRLSVSDIATHFGSSCGSSG

SEQ ID NO: 9549 - protein, 617 aa, Zea mays
  VARIANT 87..617: note = Derived polymorphism lacks residues 87 to 617
MFNWNDEQQQAGDAIWAEFNDSGDHIVPYPKGVEDSTIVSARDLKNNEEEVASIAGISEHSTGVQTGLQVMEKQTANQTCAHFSATQIDMESWPDLPSLNPTLDRNYSDDNIASTYLAFSAEPSLQKVTGNATGQIDGESEVFGNDQEEKSNSFLDCDWGNIGDFDDFDRLFSNSDSIFGNGIVASDNDFLSASSNLMDNAVQSIPIPQLPLNKRPSSDRGPSLVLTKEISSGVTITKQENKVANANAKSGEEAEIKIHLACEYSGKPIQFLQEVEVHKRPARSRRKPEERGKSKISSSASGFSPSKLENSSSNLQAPMQHVQTPQYALFQDSKKIGKVQHANQFMFPEYGYPAYPFPTIPLVSNIQADGYQTKSAGTSCRTSEDSPKQSSSIEMSQDIPSRPLSMTPQEKIEKLRRRQQMQALIAIQRQQQQFGQQGSGSDPMVSQAYSLRNKNLDSLGSSIVIDENTNEIFSPEMIPTYHGPLDTKTRLCIRDSLLRLAHSATERQIDGDRSSTNKTNKDEDEASEDAFTRRTRSPTKEEETITNPTDRIVAYLLFHRHCSQVAAATKEEIISSTPLTLEPAYESIVVLLMSIQMLIDQLFRINMIANPVMMTVC

SEQ ID NO: 9550 - protein, 136 aa, Zea mays
  VARIANT 25: note = Ancestral polymorphism is A, Derived polymorphism is V
  VARIANT 34..136: note = Derived polymorphism lacks residues 34 to 136
  VARIANT 111: note = Ancestral polymorphism is L, Derived polymorphism is P
  VARIANT 119: note = Ancestral polymorphism is A, Derived polymorphism is T
  VARIANT 121: note = Ancestral polymorphism is A, Derived polymorphism is T
MPIAPYEFPIRSFNTHLCVLFQVVAVGDLCAICQEKMIVLGSSSTRCVRQGSSSSAHPWRTSSSSPAIRPGMPSQNGTFNLVLLQRLELSEVMVRSGMNPTVSDQAILLDLIAKSRCVAAAKKYFLDLPETSKTYF

SEQ ID NO: 9551 - protein, 115 aa, Zea mays
  VARIANT 12: note = Ancestral polymorphism is T, Derived polymorphism is I
  VARIANT 81: note = Ancestral polymorphism is G, Derived polymorphism is S
MASRFTCWTSPTERACGRSRSLRPDWRPFSSVTSVLQAIKVNHMPSSSSDCSGGSDVRTVSMAMEMLMKPRLVILDEPTVGLDRNSFRHELTVLEKVRHCTMLFSSSELSLRTYL

SEQ ID NO: 9552 - protein, 160 aa, Zea mays
  VARIANT 64: note = Ancestral polymorphism is G, Derived polymorphism is C
MDGGGYSPRFQRQASCSCAPSISRRGFVRAGFDLDGDGDDDAAAAVVFHSSSSSSSSSFSKADGPGAPYYYYSAAGAPRPSARARLRALWRRVVREKKRILLCSTGCVPAPHRDREPYDAYSYAQNFDDGEAWVEEPDNLSRSFSARFAVPSRVFQRVAV

SEQ ID NO: 9553 - protein, 178 aa, Zea mays
  VARIANT 14: note = Ancestral polymorphism is R, Derived polymorphism is C
  VARIANT 24: note = Ancestral polymorphism is G, Derived polymorphism is W
  VARIANT 29: note = Ancestral polymorphism is R, Derived polymorphism is I
  VARIANT 58: note = Ancestral polymorphism is G, Derived polymorphism is S
  VARIANT 76: note = Ancestral polymorphism is A, Derived polymorphism is D
  VARIANT 100: note = Ancestral polymorphism is K, Derived polymorphism is N
  VARIANT 101: note = Ancestral polymorphism is S, Derived polymorphism is R
  VARIANT 103..178: note = Derived polymorphism lacks residues 103 to 178
  VARIANT 105: note = Ancestral polymorphism is E, Derived polymorphism is K
  VARIANT 116: note = Ancestral polymorphism is H, Derived polymorphism is Y
  VARIANT 124..178: note = Derived polymorphism lacks residues 124 to 178
  VARIANT 127..178: note = Derived polymorphism lacks residues 127 to 178
  VARIANT 130: note = Ancestral polymorphism is R, Derived polymorphism is G
  VARIANT 133: note = Ancestral polymorphism is S, Derived polymorphism is N
  VARIANT 149: note = Ancestral polymorphism is M, Derived polymorphism is I
  VARIANT 164..178: note = Derived polymorphism lacks residues 164 to 178
MCDLVARTGRHLQRYENGRRLVAGCIPFRYMDIDDGASDDEQKKLVEVLMISSQSGPGLLFPKGGWENDEAVEETAAREAIEEARVRGDLVQLLGFYDFKSKQPEATCRAAIFALHVKEERASWPEQSTRQRSWLTVPEAAERSCYLWMQEALVTGFSSWLENWRNGGGGGCVDRTER

SEQ ID NO: 9554 - protein, 312 aa, Zea mays
  VARIANT 6..312: note = Derived polymorphism lacks residues 6 to 312
  VARIANT 93: note = Ancestral polymorphism is P, Derived polymorphism is L
  VARIANT 118: note = Ancestral polymorphism is S, Derived polymorphism is P
MQEEGRCLQPPATISSTSPRPTRCPCRRQRRSASRASCLSRPRSHPPRRPRPPRRVIVSHRLPLRASPFGFAFSVDAGTVAYQLRSGLPANAPVLHIGTLPAEAASDELSDYLLANFPCLPVYLPFGIDMGQLRSVVSAPETKDVVRRVTEAYKGRRIMGIELKFLVMGAAARGGRELRGRAVLVQIANPTRSEGRDMQGVQDEARAISAWVNARFGTPGYTPIMLIDALVTPQEKAAYYAAAECCVENTALGDDSPKRSVIVLSEFVSCSSSLSGAIRVNPWSVESVAEAMNAALRMPEAEQRLQKHYRFR

SEQ ID NO: 9555 - protein, 505 aa, Zea mays
  VARIANT 61: note = Ancestral polymorphism is D, Derived polymorphism is N
  VARIANT 117: note = Ancestral polymorphism is S, Derived polymorphism is L
  VARIANT 236..505: note = Derived polymorphism lacks residues 236 to 505
  VARIANT 283..505: note = Derived polymorphism lacks residues 283 to 505
  VARIANT 317..505: note = Derived polymorphism lacks residues 317 to 505
MASPAKRAKPSSPAKPSSSPPQEEATAAAVSEDPVVLLRRRWELASVLHFLRVFEPVIEANLGLSADEIEMALASNNRDLARIHIALLKGIPPVNKHLKDEDGWIIVTAKKLTDWWSWVAEGANPFRNNSGYEKEVEMYKQQDPIKRLLILKALCEVRSEQDDAVWYVNDEMKKGTHISNFRKDKLGSGSSGTTYWYDGDSTIGHRLYTEDVTVNFKQNWMGKGGRLTKPVTNIYWETVATNLDEFLEISEKLSRKGRAESAIADYLKTEVIPAVENFQKKKERRLKRQEKKDKLLAFTNTFQTRSLRERRPVSYNYSDFDRSIEEAIRAVQKGKVQGSREAGTEEKPASHHGDKGADGRSDINSENNKNGGQEDAKYLSDLSSGDEEDGDYSDRGVSSADSDGDNNASDSYKSDMEEDVSVPRKRTRLAARLANDKPRPGLRRSQRNMKNDEETMHPGQVTPPPMAKKTLRQRPTPVSKQPDITFSSSEDDLAQVVADSEDESG

SEQ ID NO: 9556 - protein, 207 aa, Zea mays
  VARIANT 101: note = Ancestral polymorphism is A, Derived polymorphism is V
  VARIANT 106: note = Ancestral polymorphism is R, Derived polymorphism is H
MQLNPRQTASQAAKRIVRRRRSARMTIQSCRLHVQLGPARPRCEARSLLGVVRAARSASLRAASSSAWASAAATSFASRASSPGGSGKRSARRGISSRIRASGRHRRRRRKSRSCDAGRWGARETAASASGGDRSSACARPAAVCVRWRWCGGAAATSAAASAGRSSSGAGEGASEATGSAEVAVLWEWEWAWSSSATRWVSRKTQA

SEQ ID NO: 9557 - protein, 219 aa, Zea mays
  VARIANT 117: note = Ancestral polymorphism is A, Derived polymorphism is T
  VARIANT 112..219: note = Derived polymorphism lacks residues 112 to 219
MLPASHPLLYACVFRDTHLVAELDHAHSHSQSTATSADPVASDAPSPAPDDDLPALAAALVAAAPPHHRHLTHTAAGRAHALLLSPPLALAAVSRAPHLPASQLLLFLRRLRCLPEARMRDEMPRLALRLPLPPGDDAREANEVAAAEAHAEEEAARRDADLAARTTPKRDRASHRGRAGPSWTWRRQLWMVILADLLLLTILFAAWLAVCRGFSCIGR

SEQ ID NO: 9558 - protein, 85 aa, Zea mays
  VARIANT 46: note = Ancestral polymorphism is M, Derived polymorphism is I
  VARIANT 40: note = Ancestral polymorphism is M, Derived polymorphism is T
MSTDHHGLMSVDDIASRLFASEPEADVEGCTCGVSGSVYTGVEFCIKLFAVSIVQRADELQTVLMEMVKQDSRHQLSAKGELKEL

SEQ ID NO: 9559 - protein, 355 aa, Zea mays
  VARIANT 267: note = Ancestral polymorphism is G, Derived polymorphism is W
MLRRMVPDPSSPDSSGGGGDARPRGGGGALFAVPRLFVGFAAKRVAPDGESSRSPTSPLDPKALLLRSPRSPRRTWGAPGLVDALAADTAAANCLLSPRLRLVRQHSSPPKGCGGHSQPELGKTMSCCPAPDTAAAGAGAGAGMSVPCPCSRFQLRHGDLKSGPEATGSADTGAHLASKRHSFDLGKLPGPGSLPVPASASASSSAARRFVGSVSASEIEQSEDYTRIIARGPNPKTTHIFGDCILEPRTVGCGDSKAVESGEGGAGCYFVVKRAAPGAGDFLSSCFACKKKLEGNDIYIYRGEKAFCSANCRDQEIQLEEEAENNTSSGSPGSSSSSSSSSNDDIFMAGMVVAT

SEQ ID NO: 9560 - protein, 142 aa, Zea mays
  VARIANT 87: note = Ancestral polymorphism is S, Derived polymorphism is L
  VARIANT 83: note = Ancestral polymorphism is S, Derived polymorphism is L
  VARIANT 70: note = Ancestral polymorphism is M, Derived polymorphism is I
  VARIANT 65: note = Ancestral polymorphism is S, Derived polymorphism is F
  VARIANT 64: note = Ancestral polymorphism is A, Derived polymorphism is P
  VARIANT 55: note = Ancestral polymorphism is T, Derived polymorphism is I
  VARIANT 52: note = Ancestral polymorphism is A, Derived polymorphism is V
  VARIANT 47: note = Ancestral polymorphism is R, Derived polymorphism is H
  VARIANT 33: note = Ancestral polymorphism is L, Derived polymorphism is V
  VARIANT 27: note = Ancestral polymorphism is A, Derived polymorphism is T
  VARIANT 26: note = Ancestral polymorphism is E, Derived polymorphism is Q
  VARIANT 25..142: note = Derived polymorphism lacks residues 25 to 142
  VARIANT 9: note = Ancestral polymorphism is I, Derived polymorphism is V
MGLGTHSDIMSMITEMLDGMPPGLEEALVLSKVIKSIDVQEADILRRIVLDAPSTGHTLKLLSASDWIEMFLTLSIKGINVASSMPSFNMYLEDVQFIGSHPYSSYPMQSPNGTVQTPTAMIIETNSKKNAPSIDSKAHVLL

SEQ ID NO: 9561 - protein, 114 aa, Zea mays
  VARIANT 54: note = Ancestral polymorphism is G, Derived polymorphism is R
  VARIANT 53: note = Ancestral polymorphism is T, Derived polymorphism is I
  VARIANT 42: note = Ancestral polymorphism is R, Derived polymorphism is W
MVAASLEKLHCGEAGSGDKEKEVAGRDDAEVMSPQLSDEPLREKAQRIQVMLTGGMSERLPDRGKKLLTTLDAIHREQDRRQARGDGARAPGELGEEVESRANVKLLFNEIMQK

SEQ ID NO: 9562 - protein, 253 aa, Zea mays
  VARIANT 208..253: note = Derived polymorphism lacks residues 208 to 253
  VARIANT 140: note = Ancestral polymorphism is S, Derived polymorphism is L
  VARIANT 104..253: note = Derived polymorphism lacks residues 104 to 253
MSSLEEPLGLGDLSKLSINRLRRFVSLGARRPPADDDDHSTGKFVSGADDIAAVVNGLVTASRSCKLKPSMRISSWNRSKSWSDEITVLIDSDMLKSLPKLSRQELEVACEDFSNIIGSTPETVVYKGTMKDGPEVSVISLCTFEGHWTSHHELFYQNKVIDLARLNHENIAKFLGYCRESDPFSRMLVFEWRGRPIFLAQVNEDSHWNCPGEQMVAEKERELEEGEAQKSPSKLNRPHLKKTKVCCARPKRN

SEQ ID NO: 9563 - protein, 130 aa, Zea mays
  VARIANT 119: note = Ancestral polymorphism is G, Derived polymorphism is C
  VARIANT 100: note = Ancestral polymorphism is S, Derived polymorphism is P
  VARIANT 83: note = Ancestral polymorphism is P, Derived polymorphism is S
  VARIANT 69: note = Ancestral polymorphism is R, Derived polymorphism is Q
  VARIANT 59: note = Ancestral polymorphism is G, Derived polymorphism is R
MAEAVASAGRLAMDSSTSVSPNQAHHNMAITEFFLDGFPDSNRLLKILGDFKEVKTGPGLESTWMHAMRYLLIQLLLQVLLHPDEYWEATFDVAICCKKSFPVIAQGDNSCAQEFVEHGIHGLHQGHSKH

SEQ ID NO: 9564 - protein, 52 aa, Zea mays
  VARIANT 14: note = Ancestral polymorphism is A, Derived polymorphism is V
  VARIANT 24: note = Ancestral polymorphism is T, Derived polymorphism is M
  VARIANT 25: note = Ancestral polymorphism is A, Derived polymorphism is V
  VARIANT 26: note = Ancestral polymorphism is P, Derived polymorphism is L
  VARIANT 34: note = Ancestral polymorphism is N, Derived polymorphism is K
MAAAWAGLALLLVAAQLASVAQVTAPAFLWAPKNYGQNCNPAAAYAMALATS

SEQ ID NO: 9565 - protein, 98 aa, Zea mays
  VARIANT 1: note = Ancestral polymorphism is M, Derived polymorphism is V
  VARIANT 9: note = Ancestral polymorphism is G, Derived polymorphism is R
  VARIANT 21: note = Ancestral polymorphism is T, Derived polymorphism is M
  VARIANT 62: note = Ancestral polymorphism is G, Derived polymorphism is C
  VARIANT 68: note = Ancestral polymorphism is S, Derived polymorphism is F
  VARIANT 74: note = Ancestral polymorphism is R, Derived polymorphism is H
  VARIANT 81: note = Ancestral polymorphism is G, Derived polymorphism is D
  VARIANT 89: note = Ancestral polymorphism is P, Derived polymorphism is L
MAGTAAGTGVTIDDNSGVRTTMMFWMVEKIPPEDRATCPSTATPTMESKLKASRMHIYVRRGGPNYQSGLAKMRKLGAELGVPIEVYGPEATMTGICK

SEQ ID NO: 9566 - protein, 488 aa, Zea mays
  VARIANT 6: note = Ancestral polymorphism is E, Derived polymorphism is G
  VARIANT 66: note = Ancestral polymorphism is A, Derived polymorphism is T
  VARIANT 145: note = Ancestral polymorphism is A, Derived polymorphism is D
MPAMVEEGLVRRAAPEPHFLVVTFPAQGHINPARHLARRLLRATGARVTVCTAVSALRKMFPGAEADAEEGHRDGAGVRYVPYSDGYDDGFDGAVHDATRYMDQVKVVGSRTLGDVLARLRGAGRPATLVVYTLLLSWVADVARAHAVPAALYWIQPATVLAVYLHFFRATGGVDAAVAAAGGDPWAGVRFPGLPPLRVRDLPSFIVSTSEDDPYAFVADAFRELVGRLDGGEDSPSVLANTFDAVEPEAVASLREHGVDVVPVGPVLSFLDDDAAAGGNNDLFTQDGKGYLEWLDAQAPGSVVYISFGSLSVMRRRQIEEVARGMSESGRPFLWVLREDNRRSEGADADAATLAGGGRGMVVGWCDQVRVLSHPAVGCFVTHCGWNSTLESTACGVPVVCVPQWTDQGTNAWLVERIGTGVRAAVSDKDGVLEAGELRRCIDLATSDMVRAKAAVWREKARAAASKGGSSERNLKAFVAKQIAGGNN

SEQ ID NO: 9567 - protein, 104 aa, Zea mays
  VARIANT 19..104: note = Derived polymorphism lacks residues 19 to 104
  VARIANT 12: note = Ancestral polymorphism is H, Derived polymorphism is Q
MHVYVHFLLQVHKAWLPPWLVAQYAHYVASEKLAHAKKWVETHIEATKMVMPICSCSSFSFVLYWTDSWLTLLPPMIEEWISVKEKLVALKNAEPYVQKVSTRC

SEQ ID NO: 9568 - protein, 354 aa, Zea mays
  VARIANT 164: note = Ancestral polymorphism is S, Derived polymorphism is Y
  VARIANT 149: note = Ancestral polymorphism is L, Derived polymorphism is F
MVHRTSIADVHVMCMDLSPKKPNKASASDGGAYYDWSPADLPMLGVASIGAAKLCLTAGGKGIFGVVLPEATKEKVISVKEGDALALPFGVVTWWHNNADAAISDLVVLFLGDTSTGHKPGQFTNFQLTGSTGIFTGFSTEFVARAWDLTQDDAAKLVSTQPGSGIVRVKDGHKMPEARDEDRQGLVLNCLEAPLDVDIKNGGRVVVLNTQNLPLVKEVGLGADLVRIDAHSMCSPGFSCDSAYQVTYIVRGSGRVQVVGIDGTRVLETRAEGGCLFIVPRFFVVSKIADETGMEWFSIITTPNPIFSHLAGRTSVWKAISPAVLQSSFNTTPEMEKLFRSKRLDSEIFFAPSN

SEQ ID NO: 9569 - protein, 107 aa, Zea mays
  VARIANT 106: note = Ancestral polymorphism is F, Derived polymorphism is C
MYLNLLEDDAWACTTLDSIVVCLAHDNDHRKVEQALLKKEAIQNLVKFFQDCPEQFFGHILDAFLKIITKSSRLNTAMATNGLATLLIARLDHSNLVVAKVWRLKFI

SEQ ID NO: 9570 - protein, 227 aa, Zea mays
  VARIANT 141: note = Ancestral polymorphism is P, Derived polymorphism is L
  VARIANT 65: note = Ancestral polymorphism is D, Derived polymorphism is V
  VARIANT 15: note = Ancestral polymorphism is S, Derived polymorphism is P
  VARIANT 14: note = Ancestral polymorphism is L, Derived polymorphism is M
MAKQQNPIPIPMPLSLSLPLVLVALLLPAARGAAETPQYTTVHAESDFEVRLYGDTVWMSAPTPDIPSFHVATKLGFHRLFQYLMGANLNSSRIRMTTPVLTSVVPGAGPLRSSAYSVRLYLPAKFQASPPVPLPELNLHPDRWPGHCVAARSFSGRARDKNVVEEAEKLAMSLSRSPWANSTDYSSKSAYSVAQYSSPFRIIGRVNEVWFDVNCRSTSTAAGVESY

SEQ ID NO: 9571 - protein, 397 aa, Zea mays
  VARIANT 224..397: note = Derived polymorphism lacks residues 224 to 397
  VARIANT 162..397: note = Derived polymorphism lacks residues 162 to 397
  VARIANT 31..397: note = Derived polymorphism lacks residues 31 to 397
MEKTKYEVARDETVKHVQQVFNTLGIHVLAQTIRDVISPKKKEGRGKAIDSYNDYDPCSDIENQSDTDDDYDDDLNNEVNTEATQMVPGTRPHQKKQKAGTMPAANHQPPRTPVRLTRQSAAMPLPGGRPPPKPRHPLPPKTTSKATPKRNAISSSTQQQVQASTTTTETTETTNPVSFPPKMTRSTQAMSSQVPNTMPRPTRYTRTSGTISTPGGHTMHSPPRFTRASAAMSSPGANPHHSPPRFTRASAAMSSPSANPHHSTPAATAIVSQQPTPTTSVNKTVPTDNSPGEHNSRQSNAINESAEQFDAATSEGNPNEGEPVGDLVPEKMLNRGNRLAIHVAERKKRPEVPLQAAKLASETGVALRDNLLIYKSWKLYDNAVGQSEVGKVLDKVA

SEQ ID NO: 9572 - protein, 324 aa, Zea mays
  VARIANT 97..324: note = Derived polymorphism lacks residues 97 to 324
  VARIANT 65..324: note = Derived polymorphism lacks residues 65 to 324
  VARIANT 24: note = Ancestral polymorphism is A, Derived polymorphism is V
  VARIANT 11: note = Ancestral polymorphism is A, Derived polymorphism is V
MVGGGRRGGAAEEVKLNTGNVFAALESLKKKKKGDKGKAAGSSSRKKHGEGAAQRQEPPQKELFWAPAPLTTKSWADVEDDDDDDYFATTAPPRPVWGTAGEPAKEEEDVDDAVRAALQEDIESDDGDLDDEVDDGPEDEPEHDAEDAPAEPAIRTAAAPAAPPKDTERQLSKKELKKKELAELDAVLAELGLSANSSSTAQDAEKKGTNQIGDAEKKEDAPAPPESKASKKKKKKDKSSKEGKETQEALDGSEETASAGPDEDTSAVDVKERLKKMASMKKKKSSRETDTAAKIAAAEAAARSARLAAAKKKEKSHYNQQPVR

SEQ ID NO: 9573 - protein, 343 aa, Zea mays
  VARIANT 24: note = Ancestral polymorphism is S, Derived polymorphism is R
MIPTRSAQASFRDRTNEFRAAVERARRHAVPSSSSAPAAPSSSSTGPLDGLIAATSARSEFNNRASKIGLGIHQTSQKLSRLAKLAKRTSVFDDPTVEIQELTAVIKKDITALNSAVVDLQALCNSQNESGSLSKDTSNHSTTVVDNLKNRLMSATKEFKEVLTMRTENLKVHENRRQMFSSSAAKDASNPFIRQRPLVARDPSESSVPPAPWASDSASTPLFQRKKTNGDHGASSSQPFAQQQQLAVQQDSYMQSRAEALQNVESTIHELSNIFTQLATMVSQQGELAIRIDENMEETVANVEGAQGQLLKYLNSISSNRWLMMKIFFVLMVFLMIFIFFVA

SEQ ID NO: 9574 - protein, 456 aa, Zea mays
  VARIANT 54: note = Ancestral polymorphism is R, Derived polymorphism is G
  VARIANT 382: note = Ancestral polymorphism is Y, Derived polymorphism is N
MAAANKSIDRLAARRVVPAEPTPTGPLRLSWLDRYPTQMALIESLHVFKAAPDRPATKTGSTDAAASPARTIERALARALVRYYPLAGRLVLSESGAQQAVDCSNAGVWFTEAEAACTLEDVDYLEAPLMVPKDELLPPTPAGDGEDERALVLLVQVTAFACGGFVVGFRFSHAVADGPGAAQFMTAVGELARAAGQGLALAVPSVEPQWGRDAVPDPAAALVGRLPAPGPGSQRRRLEYLAIDISADYVAHYKAQYSAAAHGGGGAAWCSAFEVLIAKAWRSRTRAAGFDDPDSAVHLCFAVNARPMLHASLPRGGAGFYGNCYYIMRVSAPAGKVAGASVAEVVRMIKDGKRRMPAEFARWAAGELGAGGVDPYQITSDYRTLLVSDWTRLGFAEVDYGWGPPAHVVPLTNLDYIATCILVKPWAHKPGARLITQCVTPDRVAAFHEAMLDTSC

SEQ ID NO: 9575 - protein, 279 aa, Zea mays
  VARIANT 114: note = Ancestral polymorphism is L, Derived polymorphism is I
  VARIANT 164: note = Ancestral polymorphism is T, Derived polymorphism is I
  VARIANT 195: note = Ancestral polymorphism is E, Derived polymorphism is K
  VARIANT 201..279: note = Derived polymorphism lacks residues 201 to 279
  VARIANT 210: note = Ancestral polymorphism is T, Derived polymorphism is I
  VARIANT 214..279: note = Derived polymorphism lacks residues 214 to 279
  VARIANT 223: note = Ancestral polymorphism is G, Derived polymorphism is R
MDALSVFLHGSSPVLAAVKEHEMEIGCPTDVKHVVHIGWDSAAGGASPSWMNDIMASSDLSSLGNFAALTGTSWVSQVARIMRMSWSFALSIPLGTFLSNFYGSYIHDSRIGVLIEVNCETDFVSRGDIFKELVDDLALQIAACPQVQYISIDDVPEEVVKKETELEMQREDLLTKPEQVQAKIVEGRVKKRLGELTLFEQPFIKNDKVTISEWLKQTIGTTGENMKVRRFARYNLDSQEDGVVHISRTAGTPNKVYRSAFFASSNLQVQLAASLCSSN

SEQ ID NO: 9576 - protein, 113 aa, Zea mays
  VARIANT 63: note = Ancestral polymorphism is P, Derived polymorphism is R
  VARIANT 61..113: note = Derived polymorphism lacks residues 61 to 113
  VARIANT 55: note = Ancestral polymorphism is H, Derived polymorphism is N
  VARIANT 51: note = Ancestral polymorphism is T, Derived polymorphism is N
  VARIANT 46: note = Ancestral polymorphism is C, Derived polymorphism is R
  VARIANT 1: note = Ancestral polymorphism is M, Derived polymorphism is K
METTSVLLTSLVVLSMHPEWQEGASEEVLSHFGRTRPDFDSLSRKCKTKVTMILHEALRLYPPATFLTRRTYKKMELIGIKYLAGVDLFLPVIFIHSDPNIWGKIQKEKSRMS

SEQ ID NO: 9577 - protein, 585 aa, Zea mays
  VARIANT 468..585: note = Derived polymorphism lacks residues 468 to 585
  VARIANT 96..585: note = Derived polymorphism lacks residues 96 to 585
MASTKRSSRSFLYDATRPATYAIMSASLSGAPRRRTTHDAGTSPASSSGSLRPHTCMMTRRNTHAQSPTACRGPLGRLPEDGGVLDGRVRQQDGLQLGRGDLEALVLDELLDAVHDEHVAVVVDVPDVARVEPPRGVDGALRLLLLPVVALHHGLAPHADLPRRVLGQRPPRVGVHELHLQVGQDEADRLLLGDLHRRPHVLAAAAGVRQRDAAVLREPVRLLHLHARELALERRQEVRRERRGGRHDGPEGQAGQVELVGHGALHHGQHDRRHDGREHDAVRQQRAQERAQVEAVHHHHRALVPQRGAADAGDAVDVEEGHQAQGDHLPDQLLPDGEHGGAEAGHQVPVAQHHALGHPRRTRRVGERAQVGLLRRLKRHHRRARAVRHGEELVPAYGAGKPRHVPDADHRHASVLHLVVGHRVGDHEPGLGVLHLLLDLGGDGARVHAGEDRSGGHDPEAHHGVHRQVRERDHHDVAPADADGPQRPGEPRHVPDQLAVGVGPATRRGLHERRLVRVGLGVRQHELRHGDVVWYGHGREPAPEDVLLLRLMQMHGGDGRVAHPQLLLVVVVVGMELKEGRCVGI

SEQ ID NO: 9578 - protein, 366 aa, Zea mays
  VARIANT 179: note = Ancestral polymorphism is S, Derived polymorphism is G
MGSNAAGKPPPPPAAAVSWEFHATGPRNLTSPGWRDLIRSSWRDPSYRRIAVSCFVQAAYLLELDRQEGRAGEAALAPNWWKPFKYKLVRPLIDSRDGSIYGALLEWDQLAALADLIVAKPQGAPKVVLALRGTMLRQLTVVRDLEDDLRLFALESLRGSVRFTGALEVLKSAIHRHGSANVCVAGHSLGAGFALQVGRALAKDGTFVECHLFNPPSVSLGTGLRKIQEKASSVLKRYISRSGGGGSSSSSNVSPGPGEELQAAAARDGVGEEVMSREVKRWVPNLYVNSCDYICCFYADRSGVATVTEEKRSGMHSKLYVIAKGPSKFLEAHGLQQWWSDDSELHLAVHDSKLMYRHLKSLYVEQ

SEQ ID NO: 9579 - protein, 177 aa, Zea mays
  VARIANT 28: note = Ancestral polymorphism is L, Derived polymorphism is V
MRAVVQRVLSASVEVEGRIVSAIGPGLLVLVGVHEADTDSDADYICRKVLNMRLFSNDKTGKAWDQSVMQRNFEVLLVSQFTLYGILKGNKPDFHVAMSPAKAKPFYASLVEKFQRSYSADSVKDGVFGAMMKVSLVNDGPVTMQIDSPSLQGAAQSSNGYDDLVADGEARVAKETC

SEQ ID NO: 9580 - protein, 344 aa, Zea mays
  VARIANT 3: note = Ancestral polymorphism is A, Derived polymorphism is V
MLATGGGGGDIGKRIGHGGGDGGDDDGDDDDYFDDFDEGEEEGGLFRRRIVVQELFNREFVEAVLQEWYKTMSDLPTGLRQACEMGLVSSAQMVRYLSIFARPTNARSFSRALPGWLSRGLVGRTLADPSFPHKMSLEFIATIASSIWCEMNIRKERFKQEWDLVIVNALTAACCNLMVLGLLAPCRSYASTSRFDFQNAIEKLPNNIFEKSYPLREFDLAKRISAFFYKAAELSLVGFVAGSVQGGMSIVLSARKERRLMNIQIGEASRRTWLGEEADPQYSDRLLRAYKRPVEVDADQSRWFISKDAIVSGLGLLGIKQGGPEATFSKSRRKRVIRKKVTSG

SEQ ID NO: 9581 - protein, 677 aa, Zea mays
  VARIANT 504..677: note = Derived polymorphism lacks residues 504 to 677
MTEGQSEETASAPEGVSVLRRNSDDVGWEYGVLVDVNNKDKVKCILCDKQMCGGVYRLKQHIAQEGKNAKKCQGMKTTKEKLLEAQEKCKKALDGAKRKREVKTVRELELREEVHVSRVGGSEEVTCVGSSEPHKLGPMDKWTKAIDPTATKYESLTQQRLNKELWKERLHEVHKYIARWAFNHAISFNACDNDEFKQMCEAIGQFGPGIEPPTMFDLRGRLLEEEYARTKSLLQEREAEKMKNGCSIMTDAWSDKKRRSIMNVCTNCADGTSFISSKEMSDVSHTSEVIFELVDKAIEDIGPDDVVQVVTDNASNNMGAKKLLHVKRPHIFWTSCATHTINLMLQGIGNMPRFKKVIDQAKAFTIFVYGHTRTLECIRYFTEGKEIVRPRVTRFASNYLTLDSIQEKKDQLRKMVVHSRWDSLKDVKSKKGKNATATILNPTFWKDVKLTLAVFAPLFKVLCLVDGDVKPSMGFVYGEILKAKRHVKEALGNVETQRYFISASWWRLYGTETPALQKMATKILSLTASSSGCERNWSGFDGVHTKKRDRLTTDRLNKLVYIQFNNRLINKRAKIKSKKITDVLLSSGTTEAQGFLQENGDDCALVSFRDDEDEEEVMEGTGIPWSVLGDAEGAEEQLELRRSARLRELNEEEFESEEEEFDEDEDEDEDEMDETGV

SEQ ID NO: 9582 - protein, 206 aa, Zea mays
  VARIANT 161: note = Ancestral polymorphism is A, Derived polymorphism is T
  VARIANT 153: note = Ancestral polymorphism is T, Derived polymorphism is M
  VARIANT 142: note = Ancestral polymorphism is L, Derived polymorphism is V
  VARIANT 125: note = Ancestral polymorphism is R, Derived polymorphism is H
  VARIANT 115: note = Ancestral polymorphism is R, Derived polymorphism is H
  VARIANT 113: note = Ancestral polymorphism is A, Derived polymorphism is T
  VARIANT 109..206: note = Derived polymorphism lacks residues 109 to 206
  VARIANT 84: note = Ancestral polymorphism is P, Derived polymorphism is S
  VARIANT 83: note = Ancestral polymorphism is F, Derived polymorphism is S
  VARIANT 48..206: note = Derived polymorphism lacks residues 48 to 206
  VARIANT 25: note = Ancestral polymorphism is P, Derived polymorphism is L
MAPSAPPVRSSSPNTHVTNRSLPPPPGAPATTTLSLMPGADVGADEQQESAAARAEEMPGPATAAAPPLTIFYGGMVVVFEDFPAEKAAEVMRLAGGDDLPIARKASLQRFLAKRKDRLIEPYARPSSPAEEPEKKTVKTALALASWLGLGSTEANRLTITLFCGSAHPDGWAPSSRLCLLLQLARRPTPKIFAVLATWSAPPSSP

SEQ ID NO: 9583 - protein, 124 aa, Zea mays
  VARIANT 89: note = Ancestral polymorphism is R, Derived polymorphism is Q
  VARIANT 84: note = Ancestral polymorphism is R, Derived polymorphism is C
  VARIANT 26..124: note = Derived polymorphism lacks residues 26 to 124
MASSRVMASSSPPQHAGAGSSADLARFKSSGVGSMNMDDIIHNIYDPEAVNTATAESAGLGPAEPSLAALEAAARRTSEERQKRMIKNRESAASSRDRKQAALEEILYQFEEKLQAEREEAARK

SEQ ID NO: 9584 - protein, 327 aa, Zea mays
  VARIANT 224: note = Ancestral polymorphism is P, Derived polymorphism is S
MAKFSFNDADEDPPTFSSEGEKRKRDDGPGEAAASGGPSKARILTVEGEEQDGGAVVGAGRAEGNGSKGVETVVGGEADGISVRIDPDVLDCSICFDPLQPPLYQCQNGHVACFSCWSRLTNKCHICSSDANFVRNIALEKVVESVKSSCSYAKWGCNKLVSYACRNAHEESCLFAPSMCPIPGCGYRGFTGWWSGHFLTNHNSDGLRFSYGQCFDVSLEMSVPFLVLLAEDDHLFIFINKNVIPFGHALSVCCLRTGNLNWNFLYEMRATSKGNTKNSLQLKASVTNTREWRGLNPTEVFLLVPYAFSKSSKLTLNVSIERVADVK

SEQ ID NO: 9585 - protein, 357 aa, Zea mays
  VARIANT 180: note = Ancestral polymorphism is G, Derived polymorphism is D
  VARIANT 3..357: note = Derived polymorphism lacks residues 3 to 357
MGQCYARNVHGVDADDGGMEATTIMVSAAGGPEDAGSVGGGQGGEGRRSARPSPAGKPRGGRAGATPERLSTAGSPWTGSPLDLPDGIAPSPATSVSTPRRFFRRPFAPPSPAKHIKASLARRLDHRSPPSASQVPRPPVEVPIPEQGASGAGEVERELDKSFGYDRHFAAKYELGKEVGRGHFGHTCLACPCKGDMRGQVMAVKVISTGVAIINFIFSLQNSPHSFVFLLQMTTTISIEDVRKEVKILKALSGHSNLVKFYDACEDALNVYIIMELCEGGELLDRILSRGGRYNEGDAKIIVEQILKVVAFCHLQGVVHRDLKPENFLFSTREDVKTILIQHFTLFTQIKASLTPP

SEQ ID NO: 9586 - protein, 393 aa, Zea mays
  VARIANT 154..393: note = Derived polymorphism lacks residues 154 to 393
MLSEPWWSHAPGFVPKSHSIPSPDTHPLHRSHHRMDDAANPTPPPSTSAASAAAAAAQHQQLQRQLFLMQQAQSHPQQLSQQAMSRFPSNIDAHLRPLGPLRFQQPQPQPQPSHSQGPSQSPSQATQQASPQQQQQQAAAAAAAAQAQAQAQAQAARVRSPEMEMALQDAMRVCNPDVKTPFQSIEDAVNRLLPYHVVADYEAEEDDRILDSDTTGQIPSRLQQWDHNILVKIAEFTTTFDKQVLAYNIMTKKRAIGEFRSEERLMLEQALLQEEKQAMLGLRAEMESREKAGREAAEVKMRLAMEHARAEAQAHSEMMNHGPIRASAVASQGEDGPSHDMVQEHGEDGWGNSQRDDEDPSEDFLNDENEPENGNSDGQEDWRRSGEFDLNSR

SEQ ID NO: 9587 - protein, 238 aa, Zea mays
  VARIANT 205: note = Ancestral polymorphism is P, Derived polymorphism is S
  VARIANT 198: note = Ancestral polymorphism is E, Derived polymorphism is G
  VARIANT 193..238: note = Derived polymorphism lacks residues 193 to 238
MVTLLRPHRHAHGPAAVSVRRLSTRHSQHQLPPPPPLPGPGSVVVVLRPMAQDPSHPHRQSKDDTAAPPQQPEIPRDVREAAASTSASSGGSDAGSSWLQLGIGGPSSASPPPSPPHRLKRPRPDDDAGPSVSVSVQPAAAPLLPPPQLQLQLSLQPGPSSSSSAAPVGAVVAAAPPPPAHEAGLWFLLRAAQNQRREPPLLQIPRSFLRVSREGRMTVRVVMRYLVNKLGLDDDSQV

SEQ ID NO: 9588 - protein, 844 aa, Zea mays
  VARIANT 198: note = Ancestral polymorphism is R, Derived polymorphism is W
  VARIANT 41..844: note = Derived polymorphism lacks residues 41 to 844
  VARIANT 29: note = Ancestral polymorphism is C, Derived polymorphism is Y
MAAAACAGAEAGRGCGGKDALFVELWKACAGPLSCVPPLGEKVYYLPQGHIEQVEASTNQLAEQQGTPLYNLPWKIPCKLMNIELKVEPDTDEVYAQLTLLPDKKQDENTSTTVEEEEVVVPPALPATNEGPHIHSFCKTLTASDTSTHGGFSVLRRHADECLPPLDMSQHPPNQELVAKDLHGAEWRFRHIFRGQPRRHLLQSGWSVFVSAKRLVAGDAFIFLRGENGELRVGVRRALRHQTTIPSSVISSHNMHLGVLATAWHAVNTDSMFTVYYKPRTSPAEFVVSRDRYYESLKRNYSIGMRFKMRFEGEEAAEQRFTGTIVGIGASDPSGWADSKWRSLKVRWDEPSSISRPERVSPWQIEPSVSPCHVNPLPVRFKRSRSSVNALPSDVSTVTREVTSKVMADSQQNSLTRALHNQGRTQLTVRYHDNSDVKTTQDLTVWSSGTEQQRNNIAAQTKLCLEGWTPTRSPEGYNQIFSAFKPLKDIHNPLGPFPSQISGTHSNSWDTADARYPVQQANYSMLPGTWSLRPHNSGFRMNQQNYLVMPEGANFTGKSAFTSLQDHGTDKCSTGCFGHIESSSHTDHASSSLIRPQPLVLGNGVQKSKGTSFKLFGIPLGSPEKSEPLVSPPSVAYDGKLQTSPSEKGNQLDVVEVDNCSHPSKTVKPLDGPQSDSITENNQPSPEATLNIQNKVQSSSTRSCKKGSCVACCDQAFSFQVHKQGSALGRSIDLTKFACYDELIAELDQMFDFDGELKSPCKSWLVVYTDNEGDIMLVGDDPWNEFCDMVHKIFIYTREEVERMNPGALNSRSEDSLSDSLGRGVASRDPRGGGSTSALDSENC

SEQ ID NO: 9589 - protein, 60 aa, Zea mays
  VARIANT 23: note = Ancestral polymorphism is Y, Derived polymorphism is H
  VARIANT 39..60: note = Derived polymorphism lacks residues 39 to 60
  VARIANT 48..60: note = Derived polymorphism lacks residues 48 to 60
MPDDLFDSLINLPGFEQTHISLYFNYLVAQPHIARAFNKLPFDHKLIWARNFVSEKFLGV

SEQ ID NO: 9590 - protein, 220 aa, Zea mays
  VARIANT 139: note = Ancestral polymorphism is D, Derived polymorphism is N
MSVETERSSTESSGASGLDFEDTALTLTLRLPGSAPSAAAAAAASLSLSSSSSSAFPDPDRKRASSDADPGRSSPLAASSDAAPAPKARVVGWPPVRSYRKNALADAAGSSKAAKFVKVAVDGAPYLRKVDLQAYAGYDQLLRALQDKFFSHFTIRKFADDERKLVDAVNGTEYVPTYEDKDGDWMLVGDVPWKMFVETCQRLRLMKGSEAVNLAPRAAR

SEQ ID NO: 9591 - protein, 104 aa, Zea mays
  VARIANT 34: note = Ancestral polymorphism is W, Derived polymorphism is L
  VARIANT 62: note = Ancestral polymorphism is A, Derived polymorphism is S
MGSHKASGGGGGYECSSDHDGGLHKPLLPNSGRWYWTGSRQSSLNAAGTSSMVVPLKFHVSAFLCTLMVALCLIQFAFTSGYSSPTQDNVIRDLSLSVAAVSTS

SEQ ID NO: 9592 - protein, 308 aa, Zea mays
  VARIANT 134: note = Ancestral polymorphism is R, Derived polymorphism is M
MDHGGGGGSGIWIRAAVAVAAGAAIAARAVRRKSVDSSAVFVGVPAMVAHTVAGYRFAGLLLVFFFTSSRVTRVGEARKRALDPEFKEGGQRNCLGYDGGVQPTLIGRKQVLSNSGIASILVVLIASVTGGTDRCLDSKESTLVTALIGGVIGHYACCNGDTWSSELGILSKAEPRIITTFKRVRKGTNGGVTIDGLLAAAAAGFSIGLAFVLIGFFTTQCAPDVFWNQLLAIPLATAAGLCGSLIDSFLGATVQYSGFCSVRKKVVGVDGPTVTRISGMNILDNNGVNVVSVFLTTALTAVACTYIF

SEQ ID NO: 9593 - protein, 1034 aa, Zea mays
  VARIANT 34..1034: note = Derived polymorphism lacks residues 34 to 1034
MESQRYNYGSGAGTGGKIRRYPPSRAVAASPYARPATAPTHAPGTATAAVSHEGGWLSRIIAAGTSRFLPSLFSFSTSQPQQAAPAPSPTRDQLPVVEPPSPLPPPLVDDRPECEENGGVAANNLCTENPQSCTKEEEENMLRNSDDHGGTALEELLKQRTFTRSEFEYLANLLWSKTIGANSLKLEDGNVRKMIVYDKENASEYSNLPLNFSTTTFSADDQVATPAEIAKAYMGLKSSKGSPLRLRLHDPSSMPITSMEVSMSQKAKPPTIPLAQGSRLHTSKTSDCLESNYTTPNGVICKMSSSPYFKSGVSSKELFGSVSSHYQTSNSVHTFGRQVLKRKSTVSNEFVSAGPIRRIHQRYNRTSPLLETQLGYRRYPVGYGSKLEGSEQLARTQKRRCLDKVGDASLGSVEDKTNVNYPGQVPEKSAEMATKILKQLDTLVPSQKENTSETKQKHESAIYFEEDVSRQKKVQAERDLLEPSPSEVPDGIASNKSISQITLNKEKPPAFSSRGNAPNLVLSDEIGRSKMSTPGNGFTFPAPTVNNAYSQGPPTPTLTSPILTVEKQPSVFCSASVTSAQSDPRISKSVLGGPVTQKLESKLNGDNQRVPSKNSGQVASFTSNPVFKVDGPGHASNSVLSAVQSYNTSTGSVSFQSAGSSTISTNLTSNITQSCSTGGSFTFSNTRFGSLSATSNMFAAKSLALSCTASPGASLGFPPVHTASSPAAHRKSEAANSSISFSSMQQFGIAGSSTVQDKSKAVDSSTPFGFPQKFDTVSSASEDMSKADSPEPTFFSGNHNVQSENCSSLFTQSPGNNLSSKSSENLNSGSSHSFADSPVGSATMCSSPSNSNSLFSWAAGSGARTAPPSSPATSSSFAFSSSPAFSAQPVFASKLTTPASLSYGSPNTGPATSPFSSMPSAVFSFTSATPSIPNPSPTTPIFGDPTVQMNGGNIVIDRNGSPSPATSPFGLPSSSPSTPTFSTPATQFASSTSGSPGVFEIGKYSQASSGGFSMGPSGGNDKSNRRIVRVKRRK

SEQ ID NO: 9594 - protein, 203 aa, Zea mays
  VARIANT 75..203: note = Derived polymorphism lacks residues 75 to 203
  VARIANT 70: note = Ancestral polymorphism is P, Derived polymorphism is S
  VARIANT 37: note = Ancestral polymorphism is V, Derived polymorphism is G
  VARIANT 35: note = Ancestral polymorphism is G, Derived polymorphism is R
  VARIANT 32: note = Ancestral polymorphism is L, Derived polymorphism is R
  VARIANT 29: note = Ancestral polymorphism is Y, Derived polymorphism is C
MVSPKLYGDSRPRLFTYWTSDTYEATGCYNALCPGFVQTSSRIAIGASISPVSSAGGAQYDMRLLVWKDSKLGNWWLRYGDQLVGYWPAQLFTLINSNNTISSPEVGRRSCSALGSRIYLHGTHCYRRPPQEADLDVEWRSVLHFASPRCSHPPAASWVEVGLLWLEGGGDEWIGRWEGVVAEAEEVEEGLAIEEEYGRMAIL

SEQ ID NO: 9595 - protein, 208 aa, Zea mays
  VARIANT 2: note = Ancestral polymorphism is G, Derived polymorphism is D
  VARIANT 50: note = Ancestral polymorphism is A, Derived polymorphism is S
  VARIANT 52: note = Ancestral polymorphism is V, Derived polymorphism is D
  VARIANT 64: note = Ancestral polymorphism is Y, Derived polymorphism is H
  VARIANT 78: note = Ancestral polymorphism is L, Derived polymorphism is F
  VARIANT 114: note = Ancestral polymorphism is D, Derived polymorphism is A
MGSFVKLARRAVETDAPVMVKIQELLRGAKDVMSLAQGVVYWQPPESAMAKVEKIIREPTLSKYGSDDGLPELREALFEKLRRENKLTKSSVMVTAGANQAFVNLVLTLCDAGDSVVMFAPYYFNAYMSFQMTGVTDILVGGSDPKTLHPDVDWLEKVLKENDPIPKLVTVVNPGNPSGAFIPRPMLERISDLCKNAGAWLVVDNTYE

SEQ ID NO: 9596 - protein, 137 aa, Zea mays
  VARIANT 59: note = Ancestral polymorphism is D, Derived polymorphism is G
MADSPTIDAVFHNAVIVTMDDAFRVLQDGAVAVAGDRIAAVGPSADVLAAFPCAVQTLDLGGRIVLPGLVNTHVHTSQQLARGIADDVDLMTWLHGRIWPYESHMTEEDSYASTLLCGIELIRSGVSSSFSLCQHGV

SEQ ID NO: 9597 - protein, 106 aa, Zea mays
  VARIANT 14: note = Ancestral polymorphism is D, Derived polymorphism is E
MRMLGFAPIREMLDSGVCVSLGTDGAPSNNRMSIVDEMYLASLINKGREAYISGTTNPTALPAETVLKMATINGAKAVLWDNEIGSLEVGKKVMLSVASLFMYSSQ

SEQ ID NO: 9598 - protein, 156 aa, Zea mays
  VARIANT 44: note = Ancestral polymorphism is E, Derived polymorphism is G
  VARIANT 56: note = Ancestral polymorphism is D, Derived polymorphism is G
  VARIANT 94: note = Ancestral polymorphism is S, Derived polymorphism is P
  VARIANT 140: note = Ancestral polymorphism is E, Derived polymorphism is G
MNRLLQIAFPNEVDGFHDQLLKVQDNIPICASIIGQRLALYSLEAGPEWIKERVRDLVKNRALLVDALSPLGDDNVRGGQGAIYLWAKLPDTCSDDFEVVRWLANRHGVAVIPGSASGGPGHIRISFGGLKEEDTRLAAERLRRGLQELVADGTVQ

SEQ ID NO: 9599 - protein, 176 aa, Zea mays
  VARIANT 11: note = Ancestral polymorphism is P, Derived polymorphism is R
  VARIANT 31: note = Ancestral polymorphism is E, Derived polymorphism is K
  VARIANT 49: note = Ancestral polymorphism is A, Derived polymorphism is T
  VARIANT 65: note = Ancestral polymorphism is G, Derived polymorphism is D
  VARIANT 66: note = Ancestral polymorphism is L, Derived polymorphism is P
MASTAAGEGHRLGEIAASEGHLLLLKLWQREEDRLGRRACALEAHMDAARRDAFYLCAAFLAFHGLSLALLFAASVVAAATTSPSAACRRWWASSSLSLAASLALAAAVQLLVGAYWRAAARLCRDRGDARALARAVQELRLKGAAFDLSKEPRPLNVGLPPALPSPWPGSAQLFD

SEQ ID NO: 9600 - protein, 237 aa, Zea mays
  VARIANT 65: note = Ancestral polymorphism is A, Derived polymorphism is T
MVHDMFGHEVVGKIKEQYCDAFLTAHFEVPGEMFSLAMEAKRRAMGVVGSTQNILDFIKDHVMGALDRNVDEHLQFVLGTESGMITSIVAAVQELLHLYSSQERANIEVEIVFPVSSDAISKTSNGSHHVGSSMATDLNSLTIVPGVSSGEGCSIHGGCASCPYMKMNTLGSLLKVCHQLPDKNNKLSVYQANRINVRTPLGKSVAEVGCEPILHMRHFQVSPIVLLYIFTLDVQLS

SEQ ID NO: 9601 - protein, 206 aa, Zea mays
  VARIANT 75: note = Ancestral polymorphism is P, Derived polymorphism is Q
MDPEVQGILTAAKKQWPHIQISDSLIMADSAVKMAEAGCDYITVLGVDFMSENVRAVLDQAGFNKVVVYRMSSEQIGCSLADAASSCEYTHFLREASRCYPSLHVIYINTSLETKAHAHELVPTITCTSSNVVPTILQAFAQIPNLNVWYGPDSYMGANIADLFQRMATMSDEEIAKIHPDHNRKSLSSLLPRLHYYQVVILFLTC

SEQ ID NO: 9602 - protein, 148 aa, Zea mays
  VARIANT 134: note = Ancestral polymorphism is R, Derived polymorphism is M
MSARADSGGAHGGTMAVGAAGGTSSCGSMVSGVLGRGSRSMSASATSVGGVGRGGRQVATSGGAQDVVGEETINLDGEQEGGDEGFAPDPKMCQDMALEYGASPDSIEFFACATIVRDEYNREFFCNIPTPEAMLVFLKRWCQMNNMY

SEQ ID NO: 9603 - protein, 1494 aa, Zea mays
  VARIANT 1163..1494: note = Derived polymorphism lacks residues 1163 to 1494
  VARIANT 1275..1494: note = Derived polymorphism lacks residues 1275 to 1494
MWAAEAAFSRSGSWREAEDEREALRWAALQRLPTVTRARRGLLRSPAPDGAAAVEGDDVLCEVDVAGLSSGDRTALVDRLVADSGDSEHFFRRIRSRFDAVQIEFPKIEVRYEDVTVDAYVHVGSRALPTIPNFICNMTEVGPKILTAIFFVNIRFSSYRMTLLLGPPSSGKTTLLLALAGRLGPGLKMSGNITYNGHHLNEFVPQRTSAYVSQQDWHASEMTVRETLEFAGRCQGVGIKYDMLVELLRREKNAGIKPDEDLDVFMKALALEGKQTSLVAEYIMKILGLDVCADTIVGDEMIKGISGGQKKRLTTGELLVGSARVLFMDEISTGLDSATTYQIIKYLRNSTHALDGTTIISLLQPAPETYELFDDVILIAEGQIVYQGPREYAVDFFGAMGFRCPERKNVADFLQEVHTSSLLNSIPTGISRGFTFLSSQVLSKKDQQQYWCHYDYPYQFVSVSKFAEAFKTFIIGKRLHQELTVPYNRHHNHPAALCTSSYGVKRLELLKSNYQWQRLLMKRNSFIYVFKFIQLLLVALITMTVFFRSTMHHDSVDDGIIYLGALYFAIVMILFNGFTEVSMLVTKLPVLYKHRDLHFYPPWAYTLPSWLLSIPTSLYESGMWVLVTYYVVGYDPQFTRFLGQFLLLFFLHQTSLALFRVMASLGRNMIVANTFGSFALLVVMILGGFIITKESIPVWWIWGYWVSPMMYAQNAISVNEFHGHSWNKQFANQNITMGEAILTGYGLFKEKYWFWIGVGALFGYAIILNILFTMFLTLLNPIGNLQAVVAKDQVRHRDSRRKNDRVALELRSYLHSNSLSGISTTMLMYQWYELKKQGVAEDRLQLLVDVTGAFRPGILTALVGVSGAGKTTLMDVLAGRKTGGLIEGSITISGYPKNQETFTRISGYCEQNDVHSPCLTVIESLLYSACLRLPSHVDADTQRAFVEEVMELVELNPLSGALVGLPGVNGLSTEQRKRLTIAVELVANPSIVFMDEPTSGLDARSAAIVMRTVRNIVNTGRTIVCTIHQPSIDIFESFDEVKGVNRSHYLSYRFYKHESLLVQTNIFHTCDESPLVSYAYGLPVSLRSKTLLFMKRGGQLIYAGPLGAKSRNLVDFFEAIPGVPKIRDGYNPAAWMLEVTSTQMEQILGVDFAEYYRQSKLFQQTREIVEALSRPSSESKELTFATKYAQPFCAQYMACLWKHNLSYWRNPQYTAVRFFYTVIISLMFGTICWKFGSRRGTQHDIFNAMGAMYAAVLFIGITNATSVQPVISIERFVSYRERAAGMYSALPFAFSLVTVEFPYILVQSLIYGSIFYSLGSFEWTAAKFLWYLFFMYFTLLYFTFYGMMTTAITPNHTIAPIIAAPFYTLWNLFCGFMIPRKLEGALAALLTDRLFSLVNALHVQRIPVWWRWYYWANPVSWTLYGLLTSQFGDLDQPLLMADGVTSTTVVAFLEEHFGFRHDFLGAVAAMVAGFCVLFAVVFALAIKYLNFQRR

SEQ ID NO: 9604 - protein, 241 aa, Zea mays
  VARIANT 77: note = Ancestral polymorphism is P, Derived polymorphism is T
  VARIANT 95..241: note = Derived polymorphism lacks residues 95 to 241
  VARIANT 146: note = Ancestral polymorphism is T, Derived polymorphism is I
MVKLTMIARVTDGLPLSEGLDDSRDLKDADFYKQQAKLLFKNLSRGQHEASRMSIETGPYLFQYPKTFFSFAKFFVPQLIISKYVIYIIEGRVCYLTLCDRSYPKKLAFQYLEDLKNEFEKVNGSQIETAARPYAFIKFDAFIQKTKKLYLDTRTQRNLAKLNDELYEVHQIMTRNVQEVLGVGEKLDQVSEMSSRLTSDTRIYAEKAKDLNRQALIRKYAPVAIVIGIVVMLFWVKNKIW

SEQ ID NO: 9605 - protein, 364 aa, Zea mays
  VARIANT 159: note = Ancestral polymorphism is G, Derived polymorphism is D
  VARIANT 158: note = Ancestral polymorphism is P, Derived polymorphism is L
  VARIANT 154: note = Ancestral polymorphism is T, Derived polymorphism is I
  VARIANT 143: note = Ancestral polymorphism is A, Derived polymorphism is T
  VARIANT 120: note = Ancestral polymorphism is G, Derived polymorphism is E
  VARIANT 49: note = Ancestral polymorphism is S, Derived polymorphism is Y
  VARIANT 20: note = Ancestral polymorphism is V, Derived polymorphism is A
  VARIANT 17: note = Ancestral polymorphism is V, Derived polymorphism is D
MASCSRMRTTRSSSWNVGEVVVTLDLDLPPQVRVEVVSEVVKFSFQSKSSWTAQGHKQVFKQIYKIENLSVDFNGNFSTLSNFVGHLTLKEDVFLFEIIGDQLTEWLSLSIILYSEMQQGQIIVHLENLWLKMVECLKRIATASVCRVATHGNTTLHPGRLISEFDELLMHRRKARDSSRKTVITSNPTDLTAERYDGSVNVSVGLGRKRLKIMKYSTKPKELNKNRANMGISPDLMLMSGTELFMREDVGLTDGEVEVLAGSMNVFMLASILAAGWVADHLGRRRTLVLANAFLMAGALAMSLGTSFAALMAARFVTSVGSGFARRILGTDADEEGAGEEAVVEGEVQTMRATDASVWFHRIQ

SEQ ID NO: 9606 - protein, 442 aa, Zea mays
  VARIANT 31..442: note = Derived polymorphism lacks residues 31 to 442
  VARIANT 34..442: note = Derived polymorphism lacks residues 34 to 442
  VARIANT 91..442: note = Derived polymorphism lacks residues 91 to 442
  VARIANT 94..442: note = Derived polymorphism lacks residues 94 to 442
  VARIANT 142..442: note = Derived polymorphism lacks residues 142 to 442
MHFTNKHTYDEVHRSFGASTEASSEANTRRWCVQILGLDMCADIIVDNELIRGISGGQKKRLTTGEVLVGPTKVLFMDEISMGLDSSTTFQIVKCIQQIVHLGEATVLASPLQPAPEVFGLFDNVMLLSEGQIVYQGPRSTCLSSSRGVASGARRGKVSLISFRRKEILDRPCEIAPLGLSGKFNDFFSFCHLALWHIQVTSKKDQEQYWIQNEKPYHYVSVPEFVAKFKKFHMGKSLKKQLSVPFHKRKIHKYALVFSKNIDPHLCLMDDCQLVNTSAESSNSEMVYGSEEDENDALAFLSAISEHAMELIETVMCHFREKFENLQEKFNGVEEQLLQEFSLDDLFPLVAPLFMETPHSCSMYAEKAEQCFDEVATDPSQIVDLCYNRYMALVDLQEGNERLFYKLLIDNIEEPLVRPAKSSYGGFIWLCRGKILEVLKTG

SEQ ID NO: 9607 - protein, 357 aa, Zea mays
  VARIANT 29: note = Ancestral polymorphism is E, Derived polymorphism is K
MASESRISQVATTIPVRNVQDLAAYDAGELTADALERYIRPDIDKDAVLYEHSGELPVVDLGRLNPQHWEEEAAAKLRYACEEWGFFQVLSHGVPEEVMVNIKRDIQEFFELPLDVKNAYAQTPGDLQGYGQAYVVSNDQKLDWADMFCIISQPPPARDMKHWPTQPLTFRKSLEDYSVELEKVAHSIVTAIGKILNIDPELMSDKYAVQVLRMNYYPPCTSMPEKVLGFSPHSDASFLTILSQVNSVEGLQIRRHGAWVPVKPHPEALLVNVGDLLEIMTNGKFKSIEHRVMINARKERLSVSAFHNPKFDGVVAPVTVTPTEKLLYRTVKVEDYIKHHLSNKLDGKRALDHVKTF

SEQ ID NO: 9608 - protein, 478 aa, Zea mays
  VARIANT 234: note = Ancestral polymorphism is P, Derived polymorphism is R
MASESRIAQVATTIPVRNVQDLAACDAGELTADALERYVRPDIDKDAVLYEHSGELPVVDLGRLNPQHWEEEAAAKLRYACEEWGFFQVLNHGVPEEVMVSIKRDIQEFFELPLDVKNAYAQTPGDLQGYGQAYVFSNDQKLDWKSLEDYSAEVEKVAHSIATAIGKILNIDPELMSDKYAVQVLRMNYYPPCTSMPEKVLGFSPHSDGSFLTILSQVNSVEGLQIKRHDAWVPVKPHPEALLVNVGDFLELGIDRTGTSSDKFVFGCGTAGDRQIMTNGKFKSIEHRVIINAHKERLSVSAFHSPKFDGVVSPATATPTENLLYRTVKVEVEMQKLSQIKSKKSLEDYSAEVEKVAHSIATAIGKILNIDPELMSDKYAVQVLRMNYYPPCTSMPEKVLGFSPHSDGSFLTILSQVNSVEGFQIKRHDAWVPVKPHPEALLVNVGDFLELGIDRTGTSSDVLSRPYNFEGQLETTLR

SEQ ID NO: 9609 - protein, 116 aa, Zea mays
  VARIANT 47: note = Ancestral polymorphism is E, Derived polymorphism is K
  VARIANT 19: note = Ancestral polymorphism is S, Derived polymorphism is I
  VARIANT 12: note = Ancestral polymorphism is E, Derived polymorphism is K
  VARIANT 5: note = Ancestral polymorphism is R, Derived polymorphism is G
MEVEGFKVDKPEACRHLSSPVVVKPENKSIDQNVGALLQLQLVAGPESCTRKSKTVVAADYSKENIPSLNQNIQANVDANSLVELLTQKLSSISLGEATPDVARAAEEADLGLQDL

SEQ ID NO: 9610 - protein, 165 aa, Zea mays
  VARIANT 1: note = Ancestral polymorphism is M, Derived polymorphism is I
  VARIANT 11: note = Ancestral polymorphism is M, Derived polymorphism is I
  VARIANT 17..165: note = Derived polymorphism lacks residues 17 to 165
  VARIANT 21: note = Ancestral polymorphism is D, Derived polymorphism is E
  VARIANT 23: note = Ancestral polymorphism is T, Derived polymorphism is I
  VARIANT 29..165: note = Derived polymorphism lacks residues 29 to 165
  VARIANT 36: note = Ancestral polymorphism is S, Derived polymorphism is G
  VARIANT 41: note = Ancestral polymorphism is R, Derived polymorphism is Q
  VARIANT 93: note = Ancestral polymorphism is E, Derived polymorphism is K
  VARIANT 97: note = Ancestral polymorphism is M, Derived polymorphism is I
  VARIANT 143..165: note = Derived polymorphism lacks residues 143 to 165
MVKKTLLQIEMHVLRASRQLDWTGVCTLQFPLLSKSAFLERSIEENSDQEECIIKLNDIPRGAKSFELVARFCYGVKIELSPANVVYLRCASKHLEMTEEVAEENLIAQSEMFLNQVVLRNWKDYLAALETRDDLLPHAEDLQIVNRCIEPLASKATRVNRCFCD

SEQ ID NO: 9611 - protein, 184 aa, Zea mays
  VARIANT 116: note = Ancestral polymorphism is S, Derived polymorphism is F
  VARIANT 104: note = Ancestral polymorphism is L, Derived polymorphism is Q
  VARIANT 103: note = Ancestral polymorphism is L, Derived polymorphism is S
  VARIANT 101: note = Ancestral polymorphism is A, Derived polymorphism is T
  VARIANT 84: note = Ancestral polymorphism is N, Derived polymorphism is S
  VARIANT 81: note = Ancestral polymorphism is C, Derived polymorphism is Y
  VARIANT 77: note = Ancestral polymorphism is W, Derived polymorphism is C
  VARIANT 71: note = Ancestral polymorphism is K, Derived polymorphism is E
  VARIANT 70: note = Ancestral polymorphism is T, Derived polymorphism is M
MDIVSPPVVVERSCLAPSPTRLPTSRLARRSAAPGEAAEIVTILHPARYGESHKALKCVDVFKEFYQTRTKHMKLTWMGTCNISVKFDAKPIELIVMTYQATLLLLFNGSDRLRYSEIATQLNLMIRIKVFPVSLFFHYLVDLEFSYYTNIFCCHSFRIPSPPVDEKKKGVENVDKDRRLPMDL

SEQ ID NO: 9612 - protein, 236 aa, Zea mays
  VARIANT 8: note = Ancestral polymorphism is L, Derived polymorphism is F
  VARIANT 180: note = Ancestral polymorphism is S, Derived polymorphism is Y
MNRYILSLSDDKQLVSGLISLIEQGIDVLRVKALLFVALLCKNSRRWLPHFFCNAKLISDVDRLGKEKEGFIHHCTEAFVQLVASLVPGILDTVSSDIQQVMVGKRHGPVTALAGRAHPKSTIHLFPVILHLLGSASFKHRVVTGHVLLQLANLIKILEAPFQVLFKNLTVDIKDVKPTYLLKDRLREVEGNPYFSNKDVTPSQTHVVAEVPSGTIPSLTHMEQQPEISANSCILV

SEQ ID NO: 9613 - protein, 171 aa, Zea mays
  VARIANT 120: note = Ancestral polymorphism is R, Derived polymorphism is M
MACFADVGVLYWHLDPKKSESEEELAKIRRDRGYSYMDLIEICPDKLENYEEKVKNFFREHMHADEEIRYCLEGSGYFDVRDKDDKWIRIRIREGDMIIVPAGIYHRFTLDSAKYTKLMRLFIGEPVWTPLNRPQEDHPARQEYVKNVSAGTGFALAAHFLANTNLPSKPF

SEQ ID NO: 9614 - protein, 373 aa, Zea mays
  VARIANT 174: note = Ancestral polymorphism is C, Derived polymorphism is F
  VARIANT 334..373: note = Derived polymorphism lacks residues 334 to 373
MALKKLLQLFCVGKKDSKKKGKFIDPLWQASASRSSVNVTANKTHLDPCSSGNDTVSVQNHEVESSSTVSSWARTEQGTEIAHHTPFSQFDVVQDFSDHHYAKTSAGKVTKDWVKAIQSEWDLLQKNLPESIYVRVYEDRTDLLRAAIVGPAGTPYHDGLFFFDVRFPCEYPKCPPKVYYHSGGLRLNPNLYESGKVCLSLLNTWWGKGCEKWGKSSSSMLQVLVSIQGLVLNDRPYFNEPGSKNSAETTGGERCSLAYNQTAFVRSCKTMLYSLRKPPMHFETLVLWHFHEHERAILDACRAYMSGTVVGSSAGTGSNRRYVHDKCFAEFHKSLTLYTEHLRAEFAANTRRVMELETEDEIVPSIAASVKSC

SEQ ID NO: 9615 - protein, 241 aa, Zea mays
  VARIANT 19: note = Ancestral polymorphism is R, Derived polymorphism is H
MAANLEDVPSLDLMHELLRRMKCSSKPDKRLILIGPPGSGKGTQSPIIKDEYCLCHLATGDMLRAAVAAKTPLGIKAKEAMNKGELVSDDLVVGIIDEAMKKPSCQKGFILDGFPRTVTQAQKLDEMLAKQGANVDKVLNFAIDDAVLEERITGRWIHSASGRTYHSKFAPPKSPGVDDVTGEPLIQRRDDTAEVLKSRLEAFHRQTEPVIDYYSKKGLVVNLPAEKPPKEVTAEVQKALS

SEQ ID NO: 9616 - protein, 1097 aa, Zea mays
  VARIANT 622..1097: note = Derived polymorphism lacks residues 622 to 1097
MVSANLRLVAAFLLPFLAIASAFDLFHQTGPRMDPKMVPMGGGQPLFIPHEYVRSADVKRQCRSVLSAATELTFDANRANALMPELSFVKGDWKQDDDGVPLMPFDGTDVSGDQAPDPLRLASFMLTHVDVGFRGKTALNVSGVLGVAVSRNGTGPVMGTYVSPELKVWPGSTELKILFEGVYTENGDGESVLCMVGDALLPRRGSDGGNPWDWAKDTGRDSFQPPVTKDGNLLLVLRYPTTLTLTTRAVRGELTSTSAKSDVAYFDAVHLLSQLGAYSNYKFGSEKLVDRACSAHPYRDDILGGGRGLYRGNSFCGILDRFTSEDVLAVVPNWRCNSTDAFCRRLGPFETDKTVDATDGAFTDVRVVMQDVRCEPRNAPGGESTARVSAVFRAVPPWEHKYSAGKRSGLGGTTLSAEGVWRASTGQLCMVGCLGVGAEACHSRVCLYVQTTFTATRRSLTVGQITRVDGGGGGVAHFPLTIKHTVHPMELWSRFGVSGGAPLSMAYNYTKVRQASDFLRRSEPFEFGAALAKSLLSYPKKAEGLNDDAMSLSSLAADLTLHVAAVPDPFPRERFERSFFQLEVLSLGSLVGRTSIEQLATEFPGMPGELGGGKASSWTSSQSESSSTTSSSSQPAESSLLNVSAEVSLSGNPYGNVSSLFMEGVYNPVNGRMYLIGCRSIQATRQTFSALKEVEDGMDCSIEMRVDYPPTTARWLINPTVKVHVASTRDPGDPLHFNATKLQTLPIMYREQRQDILSRRSVEGILRIATLAAAIAVELSQLMYIKANTDVMPYVSLVMLGVQAVGYSVPLITGAEALFARIAAGSDDGAVPPSYEVDKSSLYWTIDCIVKILILAAFLLTLRLAQKVWRSRIRLLTRSPLEPGRVPSDRKVLVYSLGAHLVGFAVVLAAHYVNVYSRPVRDDGSYMDARGRTHALREWAVTLEEYIGMAQDFFLLPQVVGNVVWRINCKPLKKSYYVGVTAVRLLPHLYDYIKAPAINPYFAEEYEFVNTSLDFYSRFGDVAIPLVAVALAAAVYVQQRWNYKIISKTVKTQQKKLQHLGSRVYERLPSMSSGNFEAELVSGVNEGVGLRRDTSLS

SEQ ID NO: 9617 - protein, 813 aa, Zea mays
  VARIANT 87..813: note = Derived polymorphism lacks residues 87 to 813
  VARIANT 113..813: note = Derived polymorphism lacks residues 113 to 813
  VARIANT 175..813: note = Derived polymorphism lacks residues 175 to 813
MMAAAFTEEEKAVDDALGYPKAYARLCRGGGGAVGLPYSHGPPHVFLPYVLQPHEALRGKDLNDMFPVTDAEAPPTANPRGFANLLWKQLDHLGNAGFDPALFRVDAYGNVLYLHADSASPLAWDIDHWFPCARGGKTVPCNLRIMQWQVCRKKQNKLEFLMPWWDLQLGVSVNQFLSIFASKNSDFRNRAFAYLFTHGASEELSSLQVVEAHAFPQHFSEMKTKVGLAPAAIVSSRGSDNSVLKSLDANRPIRPSYPLIAAKKFTGERDENVHLSGQGPNSTKENNNPDADGYISNPYLSIAMARDSLRQREEAKKQQAELAELENEANELRQKNEEERVAIQGLEALLIKRRRRVEKCRRLAEAQSNYKAVLEKMIRDAMHQSVVYKEQLRLNQAATSTLMARLEAQRAMCDSSEGELRKKYQQRDDLERQIKPERKRYRVDDGLLEERHSESVKYLSARRLRGSPLKQELRVFLEEDLRNSDAYLSLGEEEIEEGTSTRTPAFGNARNEPLKVINFPRRSSSIAQNTVDTERGRTLVREKLEELSIKERQHSRRREGKETMRSRTGTPIRSRDDKAKPTMQKCYESEAEKYHASETVSVPRASSLPSPPYRATGMYGTSRYVTDQSVLLQKSEALHHRGFTRAEDGENMNHVGKGNVDRWLHMLMDNQQEDHAVYHSSDEHDNDEENASDEQRTQSRVDQESCRNGVTECSDEIVEVEDEIVSDQGAERGRNSFGIKDREEKKIWFPRSDSTRGFRSLPSSPSMILGMRKGVERMAVDDDRKYGYEDSVSRSSTKFLSRCKQAIKKAVNK

SEQ ID NO: 9618 - protein, 464 aa, Zea mays
  VARIANT 373..464: note = Derived polymorphism lacks residues 373 to 464
  VARIANT 320: note = Ancestral polymorphism is A, Derived polymorphism is V
  VARIANT 295: note = Ancestral polymorphism is R, Derived polymorphism is W
  VARIANT 289..464: note = Derived polymorphism lacks residues 289 to 464
  VARIANT 265: note = Ancestral polymorphism is R, Derived polymorphism is C
  VARIANT 165: note = Ancestral polymorphism is A, Derived polymorphism is G
  VARIANT 164: note = Ancestral polymorphism is A, Derived polymorphism is T
  VARIANT 98: note = Ancestral polymorphism is A, Derived polymorphism is T
MKQSPSQNQSPKTPSRSAPEPWLVAAAAASASDDSCVNDVDSFARTVAAVKSKAASCARPDMLASVLSHYAAKWLPDVAPPTSSSASGRFLPPESPTATWLKKRLLLESLVAALPPDPAAGGGGCCAAAVADDGITCDFLLKLLRAGSMVGADAALLRDLEARAARRLDQATLGAVMIPAFGHGGEHAPALLLDVPLVLRLVRGFLKEGGGSKAGGGAALVGGGGAAAARVARLVDAYLAEAALEAGLRPAEFEELARAVPAHARPADDALYRAVDTYLKAHPGTAKEERKSLARLIDARKLTAEAAAHTVQNERMPVRAVVQVLFSEHGKLNRLAELSASFSGQRSPSPSPNPALELPGRCPSKREVLAQHQEVRRLRDDVARLQVQCNALQAQVDRLGSERRRRGGGGGGFFKWSAFWFGGGMGADVARVDDSESGMERRTPPKGKKSATATPNAKWRKSTS

SEQ ID NO: 9619 - protein, 150 aa, Zea mays
  VARIANT 38: note = Ancestral polymorphism is N, Derived polymorphism is K
MEVAPMAGALVEGKLDPVVGRQDQIERVTQILGRRTKNNPCLIGEPGVGKTAIAEGLAQRIANWDVPETIEGKKSVGSMDEDDDSPASGSGRHKKKLRLIMGLHDGSAKVQTGISLNTLGSLGYEIDHGWRQRIAVCHSKLGDQPKRSHG

SEQ ID NO: 9620 - protein, 102 aa, Zea mays
  VARIANT 40: note = Ancestral polymorphism is G, Derived polymorphism is V
MSSGEDGYCSSDSSRAESPDQPQAAAAADADVESPRAGAGPNKRDLHASPPAKRSRRSMEKRVVSVPLAECGDRPKGGSGGEGPPPSDSWAWRKYGQKPTLE

SEQ ID NO: 9621 - protein, 122 aa, Zea mays
  VARIANT 57: note = Ancestral polymorphism is D, Derived polymorphism is G
MLSAVRCGALRRWRPPPHLLPRILSSSFGTSPARPQVGALLELPEVEKVLRDVRAGDVRVFPVGESGLHGGACADYMVVATGRSDWHVRNIAQALLYKARTPWISFPLPPLERSKMKGITSV

SEQ ID NO: 9622 - protein, 506 aa, Zea mays
  VARIANT 434: note = Ancestral polymorphism is Q, Derived polymorphism is L
  VARIANT 248: note = Ancestral polymorphism is Y, Derived polymorphism is D
MAAAAASATQAALALAHDLEDASERKAHFVLVPLMAQGHTIPMTDMACLLARHGARVSFVTTPLNASRIAGLIDHAAAAGLAIRFVRLRFPAAEFGLPEGCENADMLQSRDLFKNFMDACAALREPLAAYLREQEQPPSCVVSDMSHWWTGDIAREFGVPRLTFNGFCGFASLARYIMVRDNLLEHVEDENELVSFPGFPTPLELTKARCPGSVSVPGLDQIRKKMYEEEMRSSGVVINSFQELEALYIESFEQVTGKKVWTVGPMCLCNQDSNTMAARGNKASMDEAQCLQWLDSMDPGSVIFVSFGSMARTAPQQLVELGLGLESSNRAFIWVIKAGDKFPEVEGWLADGFEERVKDRGLIIRGWAPQVMILWHRSVGGFMTHCGWNSTLEGVCAGVPMITWPHFAEQFVNERLVVDVLKTGVEVGVKGVTQWGHEQEEVTVTKDDVEAAVSRLMDEGEAAEEMRMRAREFGVKARKALVEGGSSYNNINLLIHEMGNRANVST

SEQ ID NO: 9623 - protein, 616 aa, Zea mays
  VARIANT 48..616: note = Derived polymorphism lacks residues 48 to 616
  VARIANT 78..616: note = Derived polymorphism lacks residues 78 to 616
  VARIANT 272: note = Ancestral polymorphism is A, Derived polymorphism is V
MAASAAASSMVAPSANPSDVVRSQYPMATSASTDASSSEDEDEKKPLWRYAEILERTGTGFGGNVRIRCTLCNHVWNGSYSRVKAHMLKIPGFGVKFCRVVTVHVLEQLKAEVAAASVVANRTLPRDIPLPVEGNEKRKRRGVSAIESSFNLDVRRQLDELIARMFYTGGLPFNLARNPYFRKAFMFATNNPIGGYVPPSYNKLRTTLLVQERTHVERMLQPLKETWSSKGVSIVSDGCEVIGDASMIKNFIMNHSMRLSMFNEQSNLKFLAIADTRFASAIVMLKRFIAIKDALSVMVVSEKWSAYREDNPRQAQFVKEKIVNDMWWDKVRYFLSFTEPIYTMIRAANTDKACLHLIYEMWDTMIEKVKSVIYRHEMKETHEESIFYSAVHDILVSRWTKSNTPLHCLAHSLNPKYYTDAWINEVPNRQAPHNDEEISEMRNTCFRRYFSGEELKKIKLQYANFSLFGNGFNSFDSLEDRSYMEPKMWWGIHGHSATELKKLALKLLGQPASSSCAERNWSTYGLIHSSLRNRLNPGRAEDLVFTHQNLRLLSRKSDEYRCGPSAMWDVGADTFEADFEGGADFLEQADLSLNEPELEERLFEDLEALGLTEDAE

SEQ ID NO: 9624 - protein, 525 aa, Zea mays
  VARIANT 7: note = Ancestral polymorphism is V, Derived polymorphism is L
  VARIANT 14..525: note = Derived polymorphism lacks residues 14 to 525
  VARIANT 111: note = Ancestral polymorphism is L, Derived polymorphism is Q
  VARIANT 112: note = Ancestral polymorphism is P, Derived polymorphism is A
  VARIANT 115: note = Ancestral polymorphism is P, Derived polymorphism is L
MAGLHFVLVPLLAQGHIIPMVDLARLLAGRGARVSVVTTPVNAARNGAVVESARRAGLDVELAEVAFPGPGLGLPEGMENVDMVVEKEHFMPFFQATWKMDAPLEEYLRSLPRRPDCVVADSCNPWAARVCARHGIPRLVLHCPSAYFLLATHCLSTHGVYGRVAHELEPFEVPGFPVRAAGNVATFRGFFQWPGMESYERDVAEAEATADGLLINTFRGLEGVFVDGYAAALGRKTTTTCWAVGPTCASSSGGLDAGATAARGNRADVDVGLVLSWLDARPAASVLYVSFGSLAQLSLKQTVELARGLEASGRPFVWAIKEAKSSADVRAWLLAERFEERVRDRGLLVRGWAPQVTILSHPAVGGFLSHCGWNASLEAITHGVPVLTWPNFADQFCSERLLVDVLGVGVRSGVKLPPMSLPDEAEGVQVTSADVEKAVAELMGVGADGTARRARAKELAAKAKAAMEEGGSSYADLDDMLRHVAELNMKKSHEEGTGFSTLPELGTGSKNNDNIGAGAALSVQS

SEQ ID NO: 9625 - protein, 105 aa, Zea mays
  VARIANT 35: note = Ancestral polymorphism is W, Derived polymorphism is C
  VARIANT 75: note = Ancestral polymorphism is C, Derived polymorphism is R
MVAPVVIASAGLGMLAGVAMANRSLGDGLPAAYRCDARPRCATCGGSGRVECLCNRWSDGDSGCRTCAGSGRMPCRSCGGSGTGRPLPARLTVQHQKPPPPAGYN

SEQ ID NO: 9626 - protein, 202 aa, Zea mays
  VARIANT 110: note = Ancestral polymorphism is N, Derived polymorphism is D
  VARIANT 121: note = Ancestral polymorphism is L, Derived polymorphism is Q
  VARIANT 134..202: note = Derived polymorphism lacks residues 134 to 202
MDLANGRDDAQKGGVGVETRRKKKVELVQDSIHGFLEEKWSDGKGEEKRLTSRQEEQELLSSLLTKLGEVENDADSDMLEPNLPHLDHQAAGKGEHSKEVELADIAKELNKIKRQNKVTHLLLGTVIVLTAVWQVNEVSFLLWVRNKLSNPFKSLGDMIKGSLKLRGRRPVLESSPLPLAGVPDVSRPDLPTLVIGSTEDRA

SEQ ID NO: 9627 - protein, 644 aa, Zea mays
  VARIANT 39..644: note = Derived polymorphism lacks residues 39 to 644
  VARIANT 526..644: note = Derived polymorphism lacks residues 526 to 644
MADEEEVKKQYRKLTLQLHPDKNKSVGAEVAFRLISEAWSVLSDKSRKMLYDQKRRDHCVASVSNGLYAYDYDTKLSKRARKNAVASASAAVEATTRLAGADTFWTSCNSCRMQYEYLRVYLNHNLLCPNCHHAFMAVETGFPCNGTSSSFTWTTKSQQQQNHDTVADHSYQSASRTSSIPDTGHGAYQQENTYELYKNQSFQFTQYPKTTCVAATNGYSTHASEKSKRKHEENYIYNYISSGKSNEYPSGRGRHSKRRQNFSNGCASVEVNGQNLAATAGMSGIADGGRFNGTSGEKFRSAVNARKANVLREIFQLDTRGLLLEKAKAEVREKLQVWNILTSSQFVEKRKSDRREKHIQNNIKANGILSDNPTNKCKKCISKDADTEIPVTDVMNPEQMRVPMSIDVPDPDFHDFDKDRTERAFGNDQIWATYDSEDGMPRLYAMVQKAISMKPFRIRMSFLNSKSNNELAPINWIASGFTKTCGDFRIGRYQITETVNIFSHRVCWSKGPRGIIRIIPQKGDTWAVYRNWSPDWNELTPDDVIYKYEIVEVIDDFTEEQGVTVVPLLKVAGFRAVFHRLTGSSVVRRIPKEELFRFSHRVPSCLLTGEERNNAPKGCHELDPAATPVDLLKIITDVKDDTTR

SEQ ID NO: 9628 - protein, 55 aa, Zea mays
  VARIANT 1: note = Ancestral polymorphism is M, Derived polymorphism is V
  VARIANT 3: note = Ancestral polymorphism is G, Derived polymorphism is E
  VARIANT 6: note = Ancestral polymorphism is A, Derived polymorphism is T
  VARIANT 22: note = Ancestral polymorphism is R, Derived polymorphism is G
  VARIANT 40: note = Ancestral polymorphism is R, Derived polymorphism is H
MDGLTAEDKSYALVLFESAINREVFLTTTEHDVREIWLKRKIRFVPTLIPLLLLI

SEQ ID NO: 9629 - protein, 342 aa, Zea mays
  VARIANT 21: note = Ancestral polymorphism is Q, Derived polymorphism is R
MTNLNATVAAVLVMLAFLAGQSVAGRYYYDKVQDKVRKEVEKAMAKNPSVGPALVRLVFHDCWVYGCDGSVLLDSTPTDGTNTEKKAANNIGLAGFEVIDAIKQKVGTDASCADIVAFAARDAADILSGGKIFYTIPGGRKDGVVSSAAVADANLPHPDFNFDELKDNFNASSRGSSFTVEELVVLSGAHSIGVAHLSSYQDRLGPDSTPIDSDYQEALNKATPPGLLKTGQNPTVTNNVRDETDAFQKDAAYNPVAMGVNPKRGVLDNSYYHNNLVNKVLFKSDWVLRTDDFAASKLDEYKNNPAEWNSDFAAAMVKLSSLPAQGNKLEIRKNCRVPNPQY

SEQ ID NO: 9630 - protein, 207 aa, Zea mays
  VARIANT 111: note = Ancestral polymorphism is R, Derived polymorphism is L
MGAAGKPPPLVCFKWPWGPNPIPSASSSPSPCGDLELPWLFKSIRTLAQGLLIAGDIPSPASSPSGGVRGVQRRTGAAVVEVDRGDAEQRALAASLASGRPATVLEFYSPRCRLCASLQGLVRELQDGASGSASFVLADAEDDRWLPELLHYDIRYVPCFVLLDKHGRALAKTGVPTSRQHVVAGLHHLLRMQQPSGLEGNQNAPPS

SEQ ID NO: 9631 - protein, 211 aa, Zea mays
  VARIANT 9: note = Ancestral polymorphism is K, Derived polymorphism is R
  VARIANT 21..211: note = Derived polymorphism lacks residues 21 to 211
  VARIANT 22..211: note = Derived polymorphism lacks residues 22 to 211
  VARIANT 24: note = Ancestral polymorphism is G, Derived polymorphism is D
  VARIANT 45: note = Ancestral polymorphism is L, Derived polymorphism is F
  VARIANT 50: note = Ancestral polymorphism is L, Derived polymorphism is W
  VARIANT 87..211: note = Derived polymorphism lacks residues 87 to 211
  VARIANT 98: note = Ancestral polymorphism is T, Derived polymorphism is I
  VARIANT 120: note = Ancestral polymorphism is A, Derived polymorphism is T
  VARIANT 122: note = Ancestral polymorphism is A, Derived polymorphism is V
MHPFNESSKQYSNQYAFRPDQWHGVGGNLDGITTFTNIGIDIGQLLLNALNKQVRHGLSGFIIRIFCCNATLEREYVEAQLNLNQILCRLAEARKDLTENLKQLQCRTLIFVGENSQFHAEVVHMTAKLDRRYSALVEVQACGSVVTEKQPHAMLIPMEYFLMGYGLYRPRQINYSPRSPLNPFCISPELLSPESMGVKLKPIKTRANLKA

SEQ ID NO: 9632 - protein, 100 aa, Zea mays
  VARIANT 3..100: note = Derived polymorphism lacks residues 3 to 100
MDEDGNLRHSNDPSLVNKRGNNGGRLASHSTVARQDPPRSYPGVVEKVQPRRLELARQEPPMRQANPQTLQSSSLQAKPHGALNKQSNNPSSYESGPGNQ

SEQ ID NO: 9633 - protein, 227 aa, Zea mays
  VARIANT 210: note = Ancestral polymorphism is T, Derived polymorphism is I
  VARIANT 150..227: note = Derived polymorphism lacks residues 150 to 227
  VARIANT 132..227: note = Derived polymorphism lacks residues 132 to 227
  VARIANT 71..227: note = Derived polymorphism lacks residues 71 to 227
  VARIANT 68: note = Ancestral polymorphism is V, Derived polymorphism is A
  VARIANT 63: note = Ancestral polymorphism is T, Derived polymorphism is I
  VARIANT 60: note = Ancestral polymorphism is R, Derived polymorphism is H
MGAPVAAVHEERKPIRTPADLAAAIHAAAAANINTAAALALSVPSDVPLLTHSLVLLLHRLFTTSSIAVAQGLLDKLHPSASLGLTISANHALESESDSDSESLMVSNRESVRRSRRRKQGQLSDHESQVERLKGENATLFQQLSDANQQFSTEVTDNRILKSDVEALRIKVKMAEDMVARSVVSCSLGDLGLAPYVNSRKMCQALNVLTGLDLLGSDAFRGPTAGT

SEQ ID NO: 9634 - protein, 110 aa, Zea mays
  VARIANT 31: note = Ancestral polymorphism is E, Derived polymorphism is A
MHRRGSSRCSSTSTSTSWDGDMKLLTRKKKEKPNTGEEGLGSRRKERENRVQLQAEAEAEEEEEDAAAPRRRLRRSVSMGSRLASAAREQRARLYIMRRCVSMLVRWKHD

SEQ ID NO: 9635 - protein, 86 aa, Zea mays
  VARIANT 19..86: note = Derived polymorphism lacks residues 19 to 86
  VARIANT 32: note = Ancestral polymorphism is T, Derived polymorphism is M
  VARIANT 40: note = Ancestral polymorphism is S, Derived polymorphism is F
  VARIANT 45: note = Ancestral polymorphism is W, Derived polymorphism is R
  VARIANT 54: note = Ancestral polymorphism is S, Derived polymorphism is Y
  VARIANT 57: note = Ancestral polymorphism is R, Derived polymorphism is H
  VARIANT 61: note = Ancestral polymorphism is G, Derived polymorphism is V
MVIPKQLLADPTPFSPNSQRAMQAKKLTLLQTMAATGVFSAISFWYGFMFGRESARRELGGIIDDLRSNKPTNTPAGPDAHSKPWL

SEQ ID NO: 9636 - protein, 211 aa, Zea mays
  VARIANT 180..211: note = Derived polymorphism lacks residues 180 to 211
  VARIANT 171: note = Ancestral polymorphism is R, Derived polymorphism is W
  VARIANT 161..211: note = Derived polymorphism lacks residues 161 to 211
  VARIANT 159: note = Ancestral polymorphism is P, Derived polymorphism is L
  VARIANT 158: note = Ancestral polymorphism is T, Derived polymorphism is M
  VARIANT 126: note = Ancestral polymorphism is W, Derived polymorphism is S
  VARIANT 122: note = Ancestral polymorphism is A, Derived polymorphism is V
  VARIANT 120: note = Ancestral polymorphism is Q, Derived polymorphism is R
  VARIANT 113: note = Ancestral polymorphism is V, Derived polymorphism is I
  VARIANT 98: note = Ancestral polymorphism is K, Derived polymorphism is E
  VARIANT 88: note = Ancestral polymorphism is D, Derived polymorphism is V
  VARIANT 81: note = Ancestral polymorphism is G, Derived polymorphism is R
  VARIANT 42: note = Ancestral polymorphism is A, Derived polymorphism is T
  VARIANT 41..211: note = Derived polymorphism lacks residues 41 to 211
  VARIANT 40: note = Ancestral polymorphism is L, Derived polymorphism is H
  VARIANT 39: note = Ancestral polymorphism is E, Derived polymorphism is Q
  VARIANT 29: note = Ancestral polymorphism is S, Derived polymorphism is R
  VARIANT 24: note = Ancestral polymorphism is A, Derived polymorphism is V
MDMDPRFNVDWSANEIEMVRSLIACHGASNSTNDDIVDELQAMFPGKDKRQVTDLYVELVVEMINSGAEMSSNQLLLNSGGVHSRTMDGYLADEMKAKRMLLEEQRRRKLVVVPRQDNQQRAGRFWTLEEHKNFLRGLRVYMCGNWKNISKDFVTTKTPVQVSSHAQKYFRRQESTTRKQRYNINDVGLYDVEPWEEQQQHNSSIVASVTS

SEQ ID NO: 9637 - protein, 173 aa, Zea mays
  VARIANT 29: note = Ancestral polymorphism is E, Derived polymorphism is K
  VARIANT 34: note = Ancestral polymorphism is R, Derived polymorphism is T
  VARIANT 46: note = Ancestral polymorphism is S, Derived polymorphism is N
  VARIANT 88..173: note = Derived polymorphism lacks residues 88 to 173
MADRRIITWEFWKDAIRSKSGEHGVKLKEKPEFTNPDEFYFKMINSRTVGGIHRPKPEDNKYTEEELLLLKNKDMGYILQSIQCEKRWLFYFREEAKEIQSRIGQSNKMRDLDNIPSRTKKKIASSYRELEEMKQRLQKLEKLYATATSSATQPRWAGLALSPASGCSASAYS

SEQ ID NO: 9638 - protein, 162 aa, Zea mays
  VARIANT 155: note = Ancestral polymorphism is G, Derived polymorphism is V
  VARIANT 112..162: note = Derived polymorphism lacks residues 112 to 162
  VARIANT 90..162: note = Derived polymorphism lacks residues 90 to 162
  VARIANT 72..162: note = Derived polymorphism lacks residues 72 to 162
  VARIANT 22..162: note = Derived polymorphism lacks residues 22 to 162
MNVPGVPHAANRFTDHGASSSRAGSLENRIISSEEVPRRYVVPTNYSDLVPPPAVDLRRLVPEPLNWSSDVRGTAISGSIPPVSRTNNSSTVNPPAGFNHQNLTRRHPRNLSEEIGRLSRALCGHQPPRLRSGFLLERQNDGVWGVPSSTRAREGRRLMEVL

SEQ ID NO: 9639 - protein, 182 aa, Zea mays
  VARIANT 31: note = Ancestral polymorphism is T, Derived polymorphism is I
  VARIANT 44: note = Ancestral polymorphism is K, Derived polymorphism is N
  VARIANT 50: note = Ancestral polymorphism is P, Derived polymorphism is L
  VARIANT 53: note = Ancestral polymorphism is S, Derived polymorphism is L
  VARIANT 81: note = Ancestral polymorphism is P, Derived polymorphism is S
  VARIANT 89..182: note = Derived polymorphism lacks residues 89 to 182
  VARIANT 91: note = Ancestral polymorphism is E, Derived polymorphism is K
  VARIANT 93: note = Ancestral polymorphism is D, Derived polymorphism is N
  VARIANT 94: note = Ancestral polymorphism is E, Derived polymorphism is G
  VARIANT 98: note = Ancestral polymorphism is L, Derived polymorphism is M
  VARIANT 99..182: note = Derived polymorphism lacks residues 99 to 182
  VARIANT 102: note = Ancestral polymorphism is L, Derived polymorphism is F
  VARIANT 103: note = Ancestral polymorphism is G, Derived polymorphism is S
  VARIANT 104: note = Ancestral polymorphism is C, Derived polymorphism is F
  VARIANT 105: note = Ancestral polymorphism is G, Derived polymorphism is D
  VARIANT 112: note = Ancestral polymorphism is P, Derived polymorphism is L
  VARIANT 113: note = Ancestral polymorphism is R, Derived polymorphism is H
  VARIANT 121: note = Ancestral polymorphism is R, Derived polymorphism is C
  VARIANT 128..182: note = Derived polymorphism lacks residues 128 to 182
  VARIANT 136: note = Ancestral polymorphism is S, Derived polymorphism is L
  VARIANT 140: note = Ancestral polymorphism is R, Derived polymorphism is C
  VARIANT 147: note = Ancestral polymorphism is C, Derived polymorphism is Y
  VARIANT 148: note = Ancestral polymorphism is S, Derived polymorphism is I
  VARIANT 150: note = Ancestral polymorphism is S, Derived polymorphism is F
  VARIANT 156: note = Ancestral polymorphism is G, Derived polymorphism is D
  VARIANT 158: note = Ancestral polymorphism is D, Derived polymorphism is Y
  VARIANT 159: note = Ancestral polymorphism is P, Derived polymorphism is L
MALDQQALPVPVPVPVPVLPNPNSTAPADLTSPSASAARKLPIKRRSPRPSSSPPSSSSPASSDPLRAPAPGGGGSDQQQPPFKFQRIWSESDELRFLQGLLGCGTQGLVFPRDLNVFYDRFSESMPQPYTCAQLSEKLCRLKNKFCSISARVAGGIDPARLAPHDRDVLHLYSRMWGHTEE

SEQ ID NO: 9640 - protein, 217 aa, Zea mays
  VARIANT 175: note = Ancestral polymorphism is P, Derived polymorphism is L
  VARIANT 107: note = Ancestral polymorphism is S, Derived polymorphism is W
  VARIANT 69: note = Ancestral polymorphism is A, Derived polymorphism is V
  VARIANT 62: note = Ancestral polymorphism is S, Derived polymorphism is A
  VARIANT 59: note = Ancestral polymorphism is T, Derived polymorphism is I
  VARIANT 40..217: note = Derived polymorphism lacks residues 40 to 217
  VARIANT 19..217: note = Derived polymorphism lacks residues 19 to 217
MLMKDNNAVFHQALPTTSQFLAQDGDRLKLQLSSAVTMSSDRACSTSADDPATNHDYMTVLSLKAATVASQWLELLHQDIRGRHAALKRSRKRVRNALHTELPYLISTEFASNQENESSITNTCDAGCTEKAVPEAHLARWRSLFENRLKQVQEMQSNCDKGLKHMSSEAPLLGPVAELWKLKNPDISESEWAVQAAAASIYSTCNMAMRTENVPCF

SEQ ID NO: 9641 - protein, 150 aa, Zea mays
  VARIANT 111..150: note = Derived polymorphism lacks residues 111 to 150
  VARIANT 109..150: note = Derived polymorphism lacks residues 109 to 150
  VARIANT 106..150: note = Derived polymorphism lacks residues 106 to 150
  VARIANT 103..150: note = Derived polymorphism lacks residues 103 to 150
  VARIANT 102: note = Ancestral polymorphism is P, Derived polymorphism is L
  VARIANT 96: note = Ancestral polymorphism is A, Derived polymorphism is T
  VARIANT 95: note = Ancestral polymorphism is I, Derived polymorphism is N
  VARIANT 81: note = Ancestral polymorphism is D, Derived polymorphism is N
  VARIANT 70: note = Ancestral polymorphism is K, Derived polymorphism is N
  VARIANT 69: note = Ancestral polymorphism is H, Derived polymorphism is Y
  VARIANT 57: note = Ancestral polymorphism is T, Derived polymorphism is I
  VARIANT 34..150: note = Derived polymorphism lacks residues 34 to 150
  VARIANT 4: note = Ancestral polymorphism is S, Derived polymorphism is L
MRSSRRCAACGGFLQGGEHGGGARSSRGTGQEHWRGEEIEEALCFLGVPRQHLGAVTCLSIITIFIIPHKISPVSNLSMFDYNDYHRTIDCILQIAVKKLNPESVQGLQEWQDNMENFNPFGHHRMFWALQYSCTNRGNPIAPVIKLVVV

SEQ ID NO: 9642 - protein, 152 aa, Zea mays
  VARIANT 28: note = Ancestral polymorphism is A, Derived polymorphism is V
MAAAMTGSARASTGSLLVLLFVALAGAAAGASATVAFSSGDSNAAALLTTPASASPGQLNGIIQCLMGCFTQVFGCSFGCMGKQGADLPLCIISCDQKSVVCMVSCGLAPSPPSPSPPTPKPPAPKPPTPKPPGPPYTPPYAAAAVTGRTSA

SEQ ID NO: 9643 - protein, 414 aa, Zea mays
  VARIANT 44..414: note = Derived polymorphism lacks residues 44 to 414
  VARIANT 106: note = Ancestral polymorphism is G, Derived polymorphism is R
  VARIANT 115..414: note = Derived polymorphism lacks residues 115 to 414
  VARIANT 147..414: note = Derived polymorphism lacks residues 147 to 414
  VARIANT 163: note = Ancestral polymorphism is D, Derived polymorphism is G
  VARIANT 170: note = Ancestral polymorphism is L, Derived polymorphism is S
  VARIANT 175: note = Ancestral polymorphism is Y, Derived polymorphism is H
  VARIANT 182..414: note = Derived polymorphism lacks residues 182 to 414
  VARIANT 246..414: note = Derived polymorphism lacks residues 246 to 414
  VARIANT 252: note = Ancestral polymorphism is E, Derived polymorphism is K
  VARIANT 289: note = Ancestral polymorphism is A, Derived polymorphism is V
  VARIANT 299: note = Ancestral polymorphism is P, Derived polymorphism is L
  VARIANT 300: note = Ancestral polymorphism is D, Derived polymorphism is Y
  VARIANT 314: note = Ancestral polymorphism is D, Derived polymorphism is G
  VARIANT 339: note = Ancestral polymorphism is G, Derived polymorphism is A
  VARIANT 352: note = Ancestral polymorphism is T, Derived polymorphism is I
  VARIANT 376..414: note = Derived polymorphism lacks residues 376 to 414
  VARIANT 383..414: note = Derived polymorphism lacks residues 383 to 414
MKSWTINMRHHLRRQLIISMEKACILVLKAKALAEKNMRDILVQREHAEKHRLLNFLILKSRDGQMEKKEMCEHCCPHCNIGPFFEFDFNYWNQTPVQSCIFSSSGQILGSDSGWQAVPLTDLITTASVKKAYRKATLCVHPDKVQQRGATIRQKYICEKVFDLLKVCSLLILLYKLVTYLQLLKFQYLCLRSTLGRWLMVPFVLQKQCNMNLLKIGESAFNARATLFSRLGNSIGSAMGNAKCISVEEVWEDMNITVFASKIDGEVLLKSNRPALVSSTSWSALLNHAVIDIAFFVTPDEDFSILLEAVLMYDRCVAAALGEDDSTDEEQLWIDIKNGKQFVYPRLLFIVTGKGPDRKKYEDQIKRLKLRRVALWTMWLASEDYPLLLGMPADFTSVCTLVAQNLPNLMGTRA

SEQ ID NO: 9644 - protein, 136 aa, Zea mays
  VARIANT 107: note = Ancestral polymorphism is T, Derived polymorphism is I
MAAAAPHAYSSLVPVSAARPLSGSTVSFGASCHKWRKVPAWRLHCVAEDEAEEVKDFGVNMALSMLKFYKREISPLLPSSCRYVPTCSEYSMQAYKRYGVVKGSILTAWRLCRCNPLGGYGYDPPKWFGEEDVPLQ

SEQ ID NO: 9645 - protein, 150 aa, Zea mays
  VARIANT 56..150: note = Derived polymorphism lacks residues 56 to 150
  VARIANT 62: note = Ancestral polymorphism is R, Derived polymorphism is G
  VARIANT 98..150: note = Derived polymorphism lacks residues 98 to 150
MPNNGGSLANMWGRASAKPKPSSTTNSIAVESVSATLDAQICAKEEADGDSNDDEQGIKYKGESTNANNRKRRAVFDFSDDEEVDNIISIASPEVPKQHTPDPVIETAEDTKVNQKNLENKDDVPNTEKGSSMGWILTSLLNVKPKLSIL

SEQ ID NO: 9646 - protein, 1304 aa, Zea mays
  VARIANT 1002..1304: note = Derived polymorphism lacks residues 1002 to 1304
  VARIANT 1027..1304: note = Derived polymorphism lacks residues 1027 to 1304
  VARIANT 1057..1304: note = Derived polymorphism lacks residues 1057 to 1304
MSTVDKMLIKGIRSFDPDNKNVITFFKPLTLIVGPNGAGKTTIIECLKLSCTGELPPNSRSGHTFVHDPKVAGETETKGQIKLRFKTAAGKDVVCIRSFQLTQKASKMEFKAIESVLQTINPHTGEKVCLSYRCADMDREIPALMGVSKAVLENVIFVHQDESNWPLQDPSTLKKKFDDIFSATRYTKALEVIKKLHKDQMQEIKTFRLKLENLQTVKDQAHKLRENIAQDQEKSDASKSQMEQLKEKICGTEREILQMETSLDELRRLQGQIDIKATERSTLLTQQHEKLAALSEENEDTDEELMEWQTKFEERIALLETKISKLVRDMDDEASYSSVLSKQNSELTHEIGKLQAEADAHLTMKHERDSDIKNICTKHNLGPVPEHPFTNDVAMNLTNRIKARLSSLENDLLDKKKSNEDQLDVLWKHYLKINARYSEVDGQIQSKIESMSGILRRRKDKEKERDAAEVELSKFNLSRIDERERHMQIEVERKTLALGERDYDSIISQKRTEVYSLEQKIKVLLREKDIINRNADERVKLGLKKDALESSKDKLNEIVNEHKDKIKKVLRGRNPFEKDMKKEINQAFWPVDKEYNELRSKSQEAEQELKFTHSKVTDAREQLTKLRRDMDAKRRFLDSKLQSILQISANVDMFPKVLQDAMNKRDEQKRLENFANGMREMLAPFEHLARKNHVCPCCERAFTPDEEDEFVKKQRMQNSSTAERSKALAMESSNAEALFQQLDKLRTIYDAYVKLVEETIPLAEKNLNQHLADESQKAQAFDDLLGVLAHVQMDRDAVEALLQPTDTIDRHVHEIQQLVKEVEDLEYALDSSGRGVKSLEEIQLELNFLQRTRDTLIVEVDDLRDQHRMLNEDMSSAQVRWHNAREEKVKASSILERFQKSEEELVLLAEEKEQLIVEKKLLEESLDPLSKEKESLLQEYNALKQKLDEEYHQLAERKREFQQELDALGRLSMKIKGYLDSKKNEKLKELQGRHVLCHSQLQSCMAKQQRISAELNKSKELLQGQGQLKRNIDDNLKYRKTKADVEQLTRDIESLEERLLSIGSLSAIEADLKRHSQEKERLNSEFNRWQGTLSVYQSNISKHKQELKLSQYKDIEKRYTNQFLQLKTTEMANKDLDRYYTALDKALMRFHSMKMEEINKIIKELWQQTYRGQDIDYISINSDSEGAGTRSYSYRVVMQTGDAELEMRGRCSAGQKVLASLIIRLALAETFCLNCGILALDEPTTNLDGPNAESLAAALLRIMEARKGQENFQLIVITHDERFAHLIGQRQLAEKYYRVSKDEK

SEQ ID NO: 9647 - protein, 434 aa, Zea mays
  VARIANT 119: note = Ancestral polymorphism is S, Derived polymorphism is C
MSAATTGPAPSVATPMAPPPSYPASSTASSSISASAEEEEDLYGRLKSLQRHMEFVEIQEEYVKDEQKNLKRELLRAQEEVKRIQSVPLVIGQFMEMVDGNNGIVGSTTGSNYYVRILSTINRELLKPSASVALHRHSNALVDVLPPEADSSISLLGSSEKPNVTYNDIGGCDIQKQEIREAVELPLTHHELYKQIGIDPPRGVLLYGPPGTGKTMLAKAVAHHTTAAFIRVVGSEFVQKYLGEGPRMVRDVFRLAKENAPAIIFIDEVDAIATARFDAQTGADREVQRILMELLNQMDGFDQTVNVKVIMATNRADTLDPALLRPGRLDRKIEFPLPDRRQKRLVFQVCTAKMNLSDEVDLEDYVSRPDKISAADIIEFKCGVKDYRFKIAAICQEAGMHAVRKNRYVILPKDFEKGYRTNVKKPETDFDFYK

SEQ ID NO: 9648 - protein, 666 aa, Zea mays
  VARIANT 349: note = Ancestral polymorphism is T, Derived polymorphism is M
  VARIANT 75..666: note = Derived polymorphism lacks residues 75 to 666
MAAEPADVGDSEPEPFSPSDFLNLGPPTPRLDSPALQLHDDDDDLVLLFISRMLMEEETDGFFEQYHPDHPALLQAQQPFADILAGAAAADGSRGTSVAGSPAFAANAIWPYDPVQLSQLLLSRTYPADTAAYPSAAADSMASSAGSGAGTVNMDMLNLAFLKGMEEASKFLPATSNNHDHRRQATETCDKRVDESSPLLQQSASKGRKNHRHAPYWGEDEEAETGRRSCKVMAVETEESEMVEEFVQSGYDSLHEQMMAMTLSTAGSRKGKGKGKGSANEAVDLRTLLIHCAQAVAAGNRPSAADLLGKIRARSSPRGDATQRLAHCFAGGLEARLAGTGTQQLTAATKRASAVEILRAYQLYLAACSFTAMAYKFSNLAICKAVGGGGRKKVHIVDYGDHYYGFQWPSLLGYWGSLEAGPPEVRITAIDFPEPGFRPDARLQATGRRLTCFARRHGVPLRFHGIEARWDAVSVDELSIERDEVLVVNGLFSLGRMQEQEQDDVDRDSRPSPRDTVLGNVRKMRPDVFVLCVENSSYGAPLFVTRFREALFYYSALFDMMDAVAARDDDDRVLVEQHLFGQRALNAIACEGSDRVERPETYRQWQVRNERAGLRQLPLDPDAVRAIRRKVKDKYHRDLFIDEDQQWLLQGWKGRVLYAMSAWAAK

SEQ ID NO: 9649 - protein, 72 aa, Zea mays
  VARIANT 2: note = Ancestral polymorphism is E, Derived polymorphism is K
  VARIANT 17: note = Ancestral polymorphism is A, Derived polymorphism is V
  VARIANT 37..72: note = Derived polymorphism lacks residues 37 to 72
  VARIANT 42: note = Ancestral polymorphism is L, Derived polymorphism is V
  VARIANT 47: note = Ancestral polymorphism is T, Derived polymorphism is I
  VARIANT 50: note = Ancestral polymorphism is S, Derived polymorphism is Y
MELINEVPPIKVDGRIAVCEGLLKVLDLATQSSTSALIWRHLMCASTVVSVMIKFTITKLGRYCCLPLQKLS

SEQ ID NO: 9650 - protein, 74 aa, Zea mays
  VARIANT 1: note = Ancestral polymorphism is M, Derived polymorphism is R
  VARIANT 33: note = Ancestral polymorphism is G, Derived polymorphism is D
MRPLDKLPSPAVTEEKKDVEVTEVAPADTARFGLVKSRVRLWGCAAPTGATTCATGRGTSGGSTTGPQRKRAWP

SEQ ID NO: 9651 - protein, 259 aa, Zea mays
  VARIANT 148: note = Ancestral polymorphism is I, Derived polymorphism is L
  VARIANT 116: note = Ancestral polymorphism is P, Derived polymorphism is S
MDRALCSTTVEIGREGEFVTSSIGRGMKEFGDGGRVSRNRRALVESRRGPLLHLPWSSEAVSRFRKVISILDRTGHARFRCGPVVEPPLVPLPVAHVVAPVGAAQPQSLTLDFTKPNLAVSAGATSVTSTSFFSSVTAGEGSLSKGRILVSSGKPPLSGHKRKPCAGAGTLPARQCSLYCHRGGRAPTPGGLARAESLGPRPALLWSGYRGCARTDAARRARAPGAAPSALHGRPAPVLLAPVEPAPSRSTSPEDPRPC

SEQ ID NO: 9652 - protein, 175 aa, Zea mays
  VARIANT 38: note = Ancestral polymorphism is R, Derived polymorphism is Q
MAAAAAMMVSGGRAALAVAGVLCAVAAMAAAQQASNVRATYHLYNPAQNGWDLNRVSAYCATWDADKPLSWRQKHGWTAFCGPAGQKGQAACGKCIRVCGSATFTFPPAGLSQAIVGLLQVKNRATGASIVARIVDQCSNGGLDLDYETVFKKIDTNGQGYQMGHLNVDYQFVAC

SEQ ID NO: 9653 - protein, 149 aa, Zea mays
  VARIANT 82: note = Ancestral polymorphism is G, Derived polymorphism is D
MAGMRVGKLALAAVLLCAAAAMATAQQASGVRATYNFYNPQQNNWDLNAVSAYCATWDASKPLSWRMKYGWTAFCGPAGPTGQAACGQCLLVTNTATGASITVRIVDQCSNGGLDLDYDTAFKPIDTNGQGFQAGHLTVNYQFVNCGDN

SEQ ID NO: 9654 - protein, 67 aa, Zea mays
  VARIANT 19: note = Ancestral polymorphism is A, Derived polymorphism is V
  VARIANT 32: note = Ancestral polymorphism is A, Derived polymorphism is P
  VARIANT 40: note = Ancestral polymorphism is R, Derived polymorphism is Q
  VARIANT 42: note = Ancestral polymorphism is C, Derived polymorphism is Y
MCLVVVCDEPERVVATYQVPGRCPYCGGVVVAADVESTPRLCFVPLCFRIRRRFYCSLCSRRLVSVA

SEQ ID NO: 9655 - protein, 150 aa, Zea mays
  VARIANT 1: note = Ancestral polymorphism is M, Derived polymorphism is I
  VARIANT 5: note = Ancestral polymorphism is T, Derived polymorphism is R
MAGMTVGNKLALAAVLLCAAAAMATAQQASGVRATYNFYNPQQNNWDLNAVSAYCATWDASKPLSWRMKYGWTAFCGPAGPTGQAACGQCLLVTNTATGASITVRIVDQCSNGGLDLDYDTAFKPIDTNGQGFQAGHLTVNYQFVNCGDN

SEQ ID NO: 9656 - protein, 1423 aa, Zea mays
  VARIANT 497..1423: note = Derived polymorphism lacks residues 497 to 1423
  VARIANT 482: note = Ancestral polymorphism is S, Derived polymorphism is F
MSAAPDEFLAQGTYLAAPEPFSPSIFLDLPPTPRPNGDDPTSDDPASSDDLVLPFISRMLMEEDIDDKFFYQFPDHPALLSAQQPYAQILSDATASSSSDSATAISSGTVGNSTLSSSSLAAASAEPTWPYDPIELSQLLRSPPYPDMGVGLDDFTTEEVNAVFLPGQDAAFQPSPAFFVTGGSGQRLSASLTAQNVGGVGAQQQRVSLVAQDAGDSVAIQRSAFLNGAEETKTEATTLPAGDGDHAALLSAFLGAQNGENMDMLNVAFLKGMEEAKKFLPTNNSLLVDLDDTYGQSLPTDRDTKPCTAFAATQVKEEEVVVDVISMFGGSSNGRGRKNSHTQEDLESEMGRNSKLMMPEQEETGASELFDELMSCKYDGFLKHMQDLRIAMDSESEKSVRRVSGKGARGKQHGNEFVDLHTMLIHCAQAMATGDRRSATEMLKQIKQHSSLRGDATQRLAYCFAEGLEVRLAGTGSQVYQSLMAKRTSVVEFLKAYKLFLAAISLNKVHIIFSNGNIVDAVAGRSKLHIVAYGVQYGLQWPGLLHFLAGREGGPPEVRFTGIDLPQPGFRPAYQIEETGRRLSNCAREFGVPFKFHAIAAKWEMVSAEDLNIDPDEVLVVNSDCHLSNLMDEGVDADTPSPRDLVLNNIRKMRPNIFIQIVNSGTYGAPFFLTRFREALFYYSALFDMLDATIPRDNDERLLIERDIVGRSALNVIACEGADSIAGLGIFISRAAAMAAAPEAEGLFGDPEPFSPSIFLDLPPTPRPDGNDEVPASSDDLVLPFITRILMEEDINDQFFYQFPDHPVLLRAQEPYAQILSEPATARAASGSPATVSPSSDEDPVQPLLSPPYPDTGLRDINDDGVGASPGFEQSDPGKLRTAALGLPTGDGDRAALAPVFFNSGDADAEMLNKAFLKGMEEAKKFLPTTSSSLLIYPPGAEEELGINGRGRKDRDRLGWDDLEAETFRKSKLMVPEPEETDEMVDQMIFNGLEMCLREMKALRISMGSGEAKKNSRKGKQGRRSSADEAVELSTLLVHCAQAVATDNRRSATELLRQIKQQSSPKGDATQRLAHCFAEGLEARLAGSGSQLYRSLMAERIPAMEYLRAYWLYLAACCFKMTAFSFSNKTILKAIAGRRKVHIVDYGIDYGVQWPSLLGRVATMDMEGGPPEVRITGIDLPQPGFRPAARIDETGRRLSDYARQIGVPFKFRGITARWDAVGADDLSIDPDEVLIVNSIVRFGNLMDEGADIDSPSARDVVLGAIREARPDAFILHVMNVSYGAPFFVTRFREALFFYSAMFDMLDATAPRDSRQRFMVERGFFRQCALNVVACEGVDRVERPETYRQWQARNRRAGLRQLPLDPDTVRALREKVREQYHRDFVIDTDRDWLLEGWKGRILYAMSTWVADDDAVSEHHHTYTY

SEQ ID NO: 9657 - protein, 513 aa, Zea mays
  VARIANT 90: note = Ancestral polymorphism is R, Derived polymorphism is Q
METTAHAAASGTIQNARHRTSALKLCYHLAVSNAMYLLLAPAAAAAAHWLSRHSAAELAGSARSAAAANPPLAVALLVLGAVLATAYLMQRPRGVYLVDFACYKPGGEHVVTRETFMRQSEAAGVFTGDNLAFQRKILERSGLGQGTYFPKAVLNSPPNPCMAEARAEAEAVMFGAIDQVLAKTGVRARDIGVVVVNCSLFNPTPSLSAMIVNHYKLRGNVASYNLGGMGCSAGLISIDLAKQLLQVHRDTYALVVSMENITLNWYWGNNRSMLMSNCLFRMGGAAVLLTNRRSERRRAKYQLVHTVRTHHGADDRAYRCVFQEEDETGRVGVALSKDLMAVAGEALRTNITTLGPLALPMSEQILFLASLVARRVFGARGVRPYIPDFKMAFEHFCIHAGGRAVLDTIEKNLGLSAWHMEPSRMTLYRWGNTSSSSLWYELAYTEAQGRVRRGHRAWQIAFGSGFKCNSAVWRALRTIDPAKEKPAGGNPWVDEIHNFPVEVPKVESVVMSS

SEQ ID NO: 9658 - protein, 771 aa, Zea mays
  VARIANT 601..771: note = Derived polymorphism lacks residues 601 to 771
MAWHLDILVMVTTCLIFFSISEQSSQSELLQQLRKQLEYPRQLEAWGSPSSDPCYTQPTAVLAVTCEENAIRELKIIGDRITKPPKFSGFSVPNVTLSEAFVLDSFVTTLARLTTLRVVILVSLGLWGPLPDKIHRLSSLEVLDLSSNFLYGSIPPKLSVMSKLHTVTLDGNYFNGSVPDWLDSFSNLTVLRLQSNQLKGSIPASIGKAAMLTELALAGNSISGDVPNLVNLNKLEMLDLRDNKLDGELPEMPTSVVTILLSKNSLKGEIPEQFGQLNRLQHLDVSFNFLVGSPPAELFALPNISYLNLAANMLSGSLLSSLTCSSTLGFVDLSTNRLTGDLPSCLNGNLNNKVVKFDGNCFRVDPAHQHEDKYCQQSHNGRGSKKDVGLVVTVVGILFVILVLSLLLMASNKRSCQKVLAEQQIQQKHTQDNLLSGMSSELLVNARCISQAVKLGTQIQPSYHIFSLEELKEATKSFERSAFLGEGAIGKLYKGRLENATLIAIRCLPLHQRYSIRNLKLRLDLLAKLRHPNLVCLLGHCIDSAVDESTVKRVFLVYEYVPGGTLSSYLSACSPDKTLKWCDRLQVLIAIAKAVHFLHTGIIPGSLSNRLKSSSILVDEHHTAKLSDYGLSIITEEIYRHEVIGQKEKYLQNDATEMENLEDDVCSFGYILLEVLMGPKLHEKGGPFILKDLVVSMSTLEERDQVVDPVIIGTCSQDSLSIVVSIMIKCLSIECSARPSMEEVLWNLQYAAQVQTMADSDQRSEVSSQAC

SEQ ID NO: 9659 - protein, 171 aa, Zea mays
  VARIANT 10: note = Ancestral polymorphism is M, Derived polymorphism is I
  VARIANT 13: note = Ancestral polymorphism is G, Derived polymorphism is D
  VARIANT 17: note = Ancestral polymorphism is A, Derived polymorphism is V
  VARIANT 18: note = Ancestral polymorphism is G, Derived polymorphism is D
  VARIANT 26: note = Ancestral polymorphism is A, Derived polymorphism is T
  VARIANT 33: note = Ancestral polymorphism is A, Derived polymorphism is T
  VARIANT 70: note = Ancestral polymorphism is Q, Derived polymorphism is L
  VARIANT 76: note = Ancestral polymorphism is R, Derived polymorphism is C
  VARIANT 97: note = Ancestral polymorphism is R, Derived polymorphism is L
MANPHVFFDMTVGGAPAGRIVMELYANEVPKTAENFRALCTGEKGVGKSGKPLHYKGSTFHRVIPQFMCQGGDFTRGNGTGGESIYGEKFPDEKFVRKHTGPGVLSMANAGPNTNGSQFFICTVETPWLDGKHVVFGQVVEGMEVVKAIEKVGSRSGATSKEVKVADCGQL

SEQ ID NO: 9660 - protein, 159 aa, Zea mays
  VARIANT 8..159: note = Derived polymorphism lacks residues 8 to 159
  VARIANT 10: note = Ancestral polymorphism is G, Derived polymorphism is R
  VARIANT 16: note = Ancestral polymorphism is A, Derived polymorphism is V
  VARIANT 36: note = Ancestral polymorphism is T, Derived polymorphism is I
  VARIANT 56: note = Ancestral polymorphism is P, Derived polymorphism is L
  VARIANT 64: note = Ancestral polymorphism is Y, Derived polymorphism is H
  VARIANT 144..159: note = Derived polymorphism lacks residues 144 to 159
MREVLLYQLGLATAGATSTLFLPEGNPTGAPRPLCTVGKAVGVLVSIGTYLVTARLLDEGLLQHVLDHPTALWFVGPMFIALKQERQRGCPTEYTEVDDEGGKRVAEDASHVVGHGHGMPWKLLDAVRETRLVFFRAPMEDKPQFTYDPARDAISEWYF

SEQ ID NO: 9661 - protein, 270 aa, Zea mays
  VARIANT 19..270: note = Derived polymorphism lacks residues 19 to 270
MADGKGRENSAVALKTSPSVPMARGLRGGSNPLEEWSGRVKAIEAGFRAWMAKQPIHIEAAVSTAVGAVQGGALGGLMGSLTADGGSPFPIPQPPSNANSDAMASFKQAQALAAGPLVQARNFAVMTGANAGISCVMRRLRGQEDIQGSMTAAFGSGALFSIVSGMGTPNPVLNAITTGVAFAVFQGGFFMIGQKFSKPSSEDTYYSLTRSMLHKLGLEKYEKNFRKGLLNDQTLPLLTDSALRDVKIPPGPRLLILDQIKRDPGLVRAK

SEQ ID NO: 9662 - protein, 281 aa, Zea mays
  VARIANT 112: note = Ancestral polymorphism is G, Derived polymorphism is E
  VARIANT 104: note = Ancestral polymorphism is A, Derived polymorphism is T
  VARIANT 92: note = Ancestral polymorphism is V, Derived polymorphism is L
  VARIANT 31: note = Ancestral polymorphism is A, Derived polymorphism is V
  VARIANT 19: note = Ancestral polymorphism is G, Derived polymorphism is S
MATAGCFARIWWELAQLIGGGARATRYLWVAVAVLGLAGRQLRPRRPGVAGRRREDVVACLRASLEDLLRSPLSCAVGGGLGDAELCFCEAVAVDVCVSGQICAGVGARRHGRLGVAGALAAARKTTRWCDCGGALAVRSQLLLPARASVWSGMGRSGALTVAGSAAVSGAFCRGGLLRALGRVVGGPLAKAMPACGRTAVTPAGATPTLLRVPSLVLSPPCGNPRLGLLGVSRWCSSNVRALRVGASADDSRSSEETLLGWYQAGGDDLFLLLEGAAQKT

SEQ ID NO: 9663 - protein, 601 aa, Zea mays
  VARIANT 53: note = Ancestral polymorphism is P, Derived polymorphism is L
MGIAVVALHTMPGAFTTHSPASILSLRPDFTRINSRTNSVPNARTLQGVLRIPRLRSVRRLCQRIDDRVTEGNGPWVKDAMNNASQVLGDISVLGQAVSGNGGLNGSAAKTPPQRRKSSSVEDEAWELLQESMVYYCGSPVGTIAANDPNDSDPVNYDQVFIRDFIPSGIAFLLKGEYEIVRNFILHTLQLQSWEKTMDCHSPGQGLMPASFKVRTIPLDGDEDATEEVLDPDFGEAAIGRVAPVDSGLWWIILLRAYGKCSGDLSVQERIDVQTGMKMILKLCLADGFDMFPTLLVTDGSCMIDRRMGIHGHPLEIQALFYSALLCAREMLTQEDGSADLIRALNNRLIALSFHIREYYWLDMQKLNEIYRYKTEEYSYDAVNKFNIYPDQISPWLVEWIPPKGGYFIGNLQPAHMDFRFFSLGNLWSIVSSLATTHQSHAILDLIESKWSDLVAEMPLKICYPALENQEWKIITGSDPKNTPWSYHNGGSWPTLLWQLTVACIKMNRPELAAKAIEVAERRIATDKWPEYYDTKRARFIGKQSRLYQTWSIAGFLVAKLLIEKPDAARILWNDEDAEILNASSTNRKRGKKVLKKTYIV

SEQ ID NO: 9664 - protein, 157 aa, Zea mays
  VARIANT 57: note = Ancestral polymorphism is Q, Derived polymorphism is H
  VARIANT 103: note = Ancestral polymorphism is S, Derived polymorphism is I
  VARIANT 137: note = Ancestral polymorphism is N, Derived polymorphism is D
  VARIANT 138: note = Ancestral polymorphism is S, Derived polymorphism is I
MAQVSSPASSASHCLRLPRFVSGSRHRWKACGGVAEPALLRAHRRAVSAFGNLTFLQMLNLSYDWFRGEVPATIGCLAHLQVLDLSYNAFSGTLSSNLSSCVSLLVLSLNSNHIHGRIPVELGNRLSNLRGLLVANNILAVAILGSLDNLCSSSTLI

SEQ ID NO: 9665 - protein, 746 aa, Zea mays
  VARIANT 643: note = Ancestral polymorphism is G, Derived polymorphism is R
  VARIANT 515..746: note = Derived polymorphism lacks residues 515 to 746
  VARIANT 438: note = Ancestral polymorphism is Q, Derived polymorphism is L
  VARIANT 425: note = Ancestral polymorphism is T, Derived polymorphism is I
  VARIANT 423: note = Ancestral polymorphism is M, Derived polymorphism is L
  VARIANT 422: note = Ancestral polymorphism is T, Derived polymorphism is S
  VARIANT 339..746: note = Derived polymorphism lacks residues 339 to 746
  VARIANT 133..746: note = Derived polymorphism lacks residues 133 to 746
MAVINGRSKRVRVTAVPRPLELRSFPAAGEGPRPLVLLSFPAAGEGLPPRGAFRDCVRSFLAGSAVPADGAWQVAFGVGNGVVVVMEVVEEDVAKTGIERIYCDHCTVAELFFHISGLLKPVGVEGHMPIGKQILSNEMMIVMAGESQYHRLFFYNLIGWSRHPVCGRRYHFIIRNEYKTCKHCDHCGLMAQSFGTRCPTCKYVISSDDPEDWDYRQLDNPRHLLHGIVHDNGFGHLVRINGREGGSSLLTGIQLMGFWDWLCRYLRVRKVSLMDVSKKYETDYRILHAITTGHSWYGQWGFKLNKGSFGITSEEYLKAMDNLSLTPLSHFFPHSRYPRNQLQDTISFYRSLSKQPLTTIRELFLYVLGLATSKSSNMHYGSMHKEHSHTHVQDTWPDEEIKRATEIAIKVLRAVEKTRWVTMRILKAAMYHSIGSPQLVDYCLKTLGTRTIDGMMVAVRCNSDTNTLEYRLMDEPIVLPNVSMPTQDHLRRDIKFLHDALLHPHTMHPYKPENCYEHGKRSAMVLLDCKQFTKHYDLEQEFLPQNPSMLHLWCQVEVLDQVGDPPCIPPELLTLPQTATVSDLKVEATRTFRGIYLMLHSFVADRLVDCGTASESTQLKLLFGANGTVRVQGRCASGERRVGIYRMERGVDKWTVRCSCGAKDDDGERMLSCDSCHVWQHTRCVGISDFDQVPKKYVCNSCKLLNKRKSRGHGPVYNIGPSKRFKIGAGGFSSRWGIFLRPPADM

SEQ ID NO: 9666 - protein, 374 aa, Zea mays
  VARIANT 232: note = Ancestral polymorphism is G, Derived polymorphism is E
  VARIANT 224..374: note = Derived polymorphism lacks residues 224 to 374
  VARIANT 196: note = Ancestral polymorphism is R, Derived polymorphism is M
  VARIANT 193: note = Ancestral polymorphism is L, Derived polymorphism is Q
  VARIANT 174..374: note = Derived polymorphism lacks residues 174 to 374
  VARIANT 113: note = Ancestral polymorphism is A, Derived polymorphism is D
MRGILFGPRRQPPPLPLFPAAKRSSAPANLLFARLYRFLPASPILRLLLLLALLSLIPPAFFHLRLRRFHQMRERKCGWIARPPMVCAHGGDSTNAFPNSDNGVSSMNPEFIAKALNYHFCGSPESFMIVPFFDLIFSSQVASVSVQHLFCKIGVFALDVIIFHIHGDAAFARWPFDSRSTARWIRILKIKALRTRFQLSKRVQNEEVPMAEEALAMISQSFRQVVLDVKVGPPSFEKGLAEDILSLLRRTNCKNCLVWAKSDDIGREIIKLSKDVIVGYVVMVDKFTNRRTELVRIEGAKVAGIYHPLIHEKVMKVMRRHDRRVFAWTVDDSSSMKKMLYEHVDAIVTSNPSLLQQLMQETRAECMEDGFALP

SEQ ID NO: 9667 - protein, 407 aa, Zea mays
  VARIANT 216: note = Ancestral polymorphism is L, Derived polymorphism is Q
  VARIANT 201: note = Ancestral polymorphism is T, Derived polymorphism is A
  VARIANT 77: note = Ancestral polymorphism is Q, Derived polymorphism is K
  VARIANT 38: note = Ancestral polymorphism is A, Derived polymorphism is P
  VARIANT 18: note = Ancestral polymorphism is P, Derived polymorphism is L
MAHELHDNLMDLILVRVPCKVDRASISLVCRAWRDKVARLGGQAPPPLPWLLLPSRFRNDPTFRAACVLSGCSVHPQHNLLTTMPPGARFVGSYDGAWNFLYFGETRRHRLFNARTRQVRKLPLGIYVNRDGHQTICIMVILAATLSSSPDDSMCVGAAIIARDQGPHEVLQPYNRWIALWRMGWEMAVELDMVDMGMYLAEDVVYHCRARAFYFLLIHGVSYEILVCTPNASPEYPRKLHISFETHHFLPLALEERISPLHSVIARYLVVSRGELLMVVRIKAVADQQTCEFKVFRAKRRPQMPDYHHYPVAQYPWEWIDLDTLDGRILFVGYGCSRSYQADAYPGFKPGIYFLDDGMFYEVPYFGGANTRPYPCTDNGMWSEGRIQRCFPTPNSSDYSPPVWLLP

SEQ ID NO: 9668 - protein, 115 aa, Zea mays
  VARIANT 88: note = Ancestral polymorphism is A, Derived polymorphism is V
  VARIANT 84: note = Ancestral polymorphism is I, Derived polymorphism is M
  VARIANT 71: note = Ancestral polymorphism is G, Derived polymorphism is S
  VARIANT 64: note = Ancestral polymorphism is R, Derived polymorphism is C
  VARIANT 18: note = Ancestral polymorphism is P, Derived polymorphism is S
  VARIANT 3: note = Ancestral polymorphism is D, Derived polymorphism is H
MADELHDNLMDLILVRVPCKVDRASISLVCRAWRDTVARLGGQAPPPLPWLLLPSRFRNDPTFRAACVLSGCSVHPQHNLLTTIPPGARFVGSYDGAWNFLYFGKKMTVAHKDIL

SEQ ID NO: 9669 - protein, 177 aa, Zea mays
  VARIANT 122: note = Ancestral polymorphism is S, Derived polymorphism is L
  VARIANT 114: note = Ancestral polymorphism is S, Derived polymorphism is L
  VARIANT 53..177: note = Derived polymorphism lacks residues 53 to 177
  VARIANT 23..177: note = Derived polymorphism lacks residues 23 to 177
  VARIANT 12..177: note = Derived polymorphism lacks residues 12 to 177
MATSGGGWTGMQREREERGRDDQRNGGCLCGFPDHSSDAVYVELPEVGVSVSQGKNFGAVESVKATSDINLPVSGEVVEVNGKLSEEPGLVNASPYEKGWIIKVKLSDSGELSSLMDGDKYSKFCKEEDAGIPHLKWFGVEGQYNVMVIDLLGPSLKDLFNYCSRKFSLKTVLMLAD

SEQ ID NO: 9670 - protein, 46 aa, Zea mays
  VARIANT 21: note = Ancestral polymorphism is W, Derived polymorphism is R
MGNTLPVHDISESTGTSYWDWEEDEEMIWCYQGQAPSPRNGPSSFA

SEQ ID NO: 9671 - protein, 408 aa, Zea mays
  VARIANT 246: note = Ancestral polymorphism is C, Derived polymorphism is F
  VARIANT 213: note = Ancestral polymorphism is R, Derived polymorphism is T
  VARIANT 18: note = Ancestral polymorphism is P, Derived polymorphism is L
  VARIANT 15: note = Ancestral polymorphism is G, Derived polymorphism is V
MADELHDNLMDLILVRVPCKVDRASISLVCKAWRDKVARLGGQAPPPLPWLLLPSRFRNDPTFRAACVLSGCSVHPQHNLLTTIPPGARFVGSYDGAWNFLYFDETRTHRLFNVRTRQVRMLPEAIFVYHDEHQTQSICNVVILAATLSSSPDDSMCVGAAIIARAQAPHEVLQPFNRWIAFWRMGWEMVAEVDVMDMGVNLYVTEDVVYHGRAFYFLLIHDGRYQILVCTPNANPEDPGDLTINFNGRRFLPLALEERISPLHRVIARYLVVSRGELLMVVRIKAVADQQTCEFKVFRAKRRPQMPDYHYPVAQYPWEWSDLDTLDGRILFVGYGCSRSYQADAYPGFKPGIYFLDDGMFYEVPYFGGANTRPYPCTDNGMWSEGRIQRCFPTPNSSDYSPPVWLLP

SEQ ID NO: 9672 - protein, 142 aa, Zea mays
  VARIANT 58: note = Ancestral polymorphism is L, Derived polymorphism is F
MRPIRLPEPPGVDGMETPEIFSGSGTGGAAVVRRAVLIGNGSPGAENQCLGLARALGLADNLTFYRVTRPRGGINEWLHFLPISMHKFIDQILRQFFRNTRFAIVVQGRKPRVLNGASVGLSAVLEANVKKIVTVARDTYEK

SEQ ID NO: 9673 - protein, 380 aa, Zea mays
  VARIANT 207: note = Ancestral polymorphism is R, Derived polymorphism is C
MSGVGSGRPPAAQKILQSLRPPLSFSTPSRPPFAAPDDYHRFPTPAAATSPAATSGGVGAGAAPPDTVEEGLVIRTPLKRKATSEENAAADSSSCIITSPMLTPVSAKTVKASKAKAKNSKTGPQTPTSNVGSPLNPPTPVGTCRYDNSLGLLTKKFINLLKQAPDGILDLNNAAEVLEVQKRRIYDITNVLEGIGLIEKTLKNRIRWKALDDSSVQLDNGISALQVFVFAEVENLSLQEQALDERISDIREKLRGLTEDENNQRWLYVTEDDIKGLPSFQNETLIAIKAPHGTTLEVPDPDEAGDYLQRRYRIVLRSTMGPIDVYLVSCYSLMFLTLKIKEAQWDEMDFLSEDVVTPRAHNQQLVTVDGPHMEVPSTDP

SEQ ID NO: 9674 - protein, 108 aa, Zea mays
  VARIANT 89..108: note = Derived polymorphism lacks residues 89 to 108
MPRAYSLRSLRSSRAHPTSSLPALCTCPRPPRKPRARRPANPAPDALQTSRPRAANPTNHGATNLENPPASLCSRARSAILWSGWTLSWINLHISKEEHAQRASVRSW

SEQ ID NO: 9675 - protein, 322 aa, Zea mays
  VARIANT 196: note = Ancestral polymorphism is R, Derived polymorphism is Q
MSRSPHLPPRCPPLGPQITRRDDGMFTQSCRFPSGDTFIGEPPCWLDDLLEDSGKAPKLPPLRRACSDSDAILDALSTFQSPIYPIEECDLNSGGEAEDLLGGVEGDESGSVVEASCFYGPNSPRQKSRLTTSESSMVNAVLENVPGNPLQYLTIDACSDVNGNVANVTADACDAFGHPDQDKSFKRRSGQRSRVRKLQYIAELERTVESLQNIGADLAVRMSSLFHLHNALSMENKQLRIHISSLQQAKLIKDGQTQALKNEAERLKQMSARHRRSRSVTSCYDLSSFGADATAVNWQMPDMARLSLNGSSSVSPRSGYGI

SEQ ID NO: 9676 - protein, 139 aa, Zea mays
  VARIANT 39: note = Ancestral polymorphism is R, Derived polymorphism is L
  VARIANT 42: note = Ancestral polymorphism is A, Derived polymorphism is V
  VARIANT 47: note = Ancestral polymorphism is P, Derived polymorphism is L
  VARIANT 51: note = Ancestral polymorphism is P, Derived polymorphism is S
MEHRELRDHAVLVQIANPARSEGRNVQGMQDEVKAISARVNAFFGTPGYTPIVLIDAPVTSQEKAACLWWNQHGLGGDNVFGSCRPLHNELVSLMHWSGKGKPWDRLDADKPCALDHTWKAYDLYIGENDSSSASASSG

SEQ ID NO: 9677 - protein, 332 aa, Zea mays
  VARIANT 298: note = Ancestral polymorphism is P, Derived polymorphism is L
  VARIANT 280..332: note = Derived polymorphism lacks residues 280 to 332
  VARIANT 268: note = Ancestral polymorphism is R, Derived polymorphism is C
  VARIANT 218: note = Ancestral polymorphism is S, Derived polymorphism is L
  VARIANT 36: note = Ancestral polymorphism is T, Derived polymorphism is A
  VARIANT 27: note = Ancestral polymorphism is S, Derived polymorphism is L
  VARIANT 8..332: note = Ancestral polymorphism lacks residues 8 to 332
  VARIANT 5..332: note = Derived polymorphism lacks residues 5 to 332
MATRQLLRLVMAQLIWRLGNLAEQTCSSVTAINVFTTEKLSFFSSPTSIAYNISSWDPLSIWRGIQEIMDEEMEEDVIVKAVDCSNQSEEMNEERKVNLLGLADILSASIGGFSWAPLISKICKNKVKAEAWFTGLSALICRGQHGSQVQHIDGIRIAGIPFDGARESSLSGSSTFTSDSFENKLSSVNSTKDRSSGEYTYSERTDVSDMQLKSVSSSDIRISVSSALSTSSHGSMNKSHQASSSGRSLSYFLLNIGYQGVAILELARLAKMEVEYRCIQIIEIGLPMGNTSSDQHVPAERIEASEVILGKHVLENHIDQMSTDEVEQSINR

SEQ ID NO: 9678 - protein, 83 aa, Zea mays
  VARIANT 45: note = Ancestral polymorphism is E, Derived polymorphism is K
  VARIANT 53: note = Ancestral polymorphism is P, Derived polymorphism is L
  VARIANT 61..83: note = Derived polymorphism lacks residues 61 to 83
  VARIANT 75: note = Ancestral polymorphism is V, Derived polymorphism is I
  VARIANT 76..83: note = Derived polymorphism lacks residues 76 to 83
MNENKIELYVAYGKVMNCGGGGSCGTCIVEIIDGKELLNERTSTENQYLKKKPDSWRLACQTIVGNKENSGKVVVQRLPQWKR

SEQ ID NO: 9679 - protein, 158 aa, Zea mays
  VARIANT 7: note = Ancestral polymorphism is I, Derived polymorphism is T
  VARIANT 25: note = Ancestral polymorphism is Q, Derived polymorphism is H
  VARIANT 49: note = Ancestral polymorphism is P, Derived polymorphism is R
  VARIANT 87: note = Ancestral polymorphism is D, Derived polymorphism is E
MPIEKIIEYLRKDGKLLNHCGMTPQKLPDLVEHNPLIAVDVLSKLINSPDVDAYFDAIVHMDMSLHSMEVVNRLTTAVVLPPGFVHDYISNCIRSCEDIKDKYMQNRLVRLVCVFLQSLIRNKIIDVQDLFIEVQAFCIAFSRIREAVGLFRLLKSVE

SEQ ID NO: 9680 - protein, 258 aa, Zea mays
  VARIANT 27: note = Ancestral polymorphism is I, Derived polymorphism is N
  VARIANT 73: note = Ancestral polymorphism is A, Derived polymorphism is V
  VARIANT 83..258: note = Derived polymorphism lacks residues 83 to 258
  VARIANT 116..258: note = Derived polymorphism lacks residues 116 to 258
  VARIANT 208..258: note = Derived polymorphism lacks residues 208 to 258
  VARIANT 224: note = Ancestral polymorphism is P, Derived polymorphism is L
  VARIANT 247: note = Ancestral polymorphism is A, Derived polymorphism is D
MWRVKTSKGSTSESKQKEILEFYEVLIVSLCFAIFAHGFRHTFSSFALKELNHKKNKDRSTSLDSMPMKKLIVIAQARMFSRSTSFPDNFLNAKYIPETSINIPSKEGPHRQLSPSNRIIRSTSGNDNVNSRSLFDNIQQKKLAAHGANAARRSFKDFLSTLTRTKESISRATRLAMECAKFGIAGEVMYDAFGVRLQAGKQAKVLNQIVYELPSEHPLAETRPLRELLGHTPPQVFAGEVLGFAVATFIAMIAGLGS

SEQ ID NO: 9681 - protein, 304 aa, Zea mays
  VARIANT 144: note = Ancestral polymorphism is G, Derived polymorphism is R
  VARIANT 130: note = Ancestral polymorphism is A, Derived polymorphism is V
  VARIANT 105: note = Ancestral polymorphism is R, Derived polymorphism is G
  VARIANT 82: note = Ancestral polymorphism is S, Derived polymorphism is F
MTRLEDEVRHMLSARALDLEIEAPSGLTLLSMASDRSNSNATKAVVGEEDDGSVSSFVGRRSSYRSLQSIREIDLFPADAISDLHTKVRKDHSWKHGGFIIAFTRAWILVVSFNGENQAITKYNMFIRKVYRSSLQEGAINALGLGSVMAILFSSYGLAVWYGSKLIVERGYNGGMVISVIMSVMIGAMSLGQATRSVTAFAEGQGAAHRMFKIIERKPDIDIDDNTGIILEDVKGDVQLKDVYFSYPTRPEHLIFDGFSLQVPSGTTMALVGDSGSGKSTVISLVERFYDPHAGEVLIDGVDI

SEQ ID NO: 9682 - protein, 114 aa, Zea mays
  VARIANT 3: note = Ancestral polymorphism is L, Derived polymorphism is P
  VARIANT 4: note = Ancestral polymorphism is T, Derived polymorphism is R
  VARIANT 25..114: note = Ancestral polymorphism lacks residues 25 to 114
  VARIANT 46: note = Ancestral polymorphism is A, Derived polymorphism is P
  VARIANT 52: note = Ancestral polymorphism is L, Derived polymorphism is F
MGLRDALEIHPDRIYTFSISFVQFLLSSHLLSQLQHLGSHRQAHLATTYLELHRALVDAPDMVKCQINFKRLSLTDIKIDIKSVPKKTTRIKAMEEADVKTKWENSSWGKKLIV

SEQ ID NO: 9683 - protein, 72 aa, Zea mays
  VARIANT 7: note = Ancestral polymorphism is V, Derived polymorphism is M
  VARIANT 21: note = Ancestral polymorphism is I, Derived polymorphism is T
  VARIANT 22: note = Ancestral polymorphism is I, Derived polymorphism is S
  VARIANT 42: note = Ancestral polymorphism is L, Derived polymorphism is F
MVNGGSVEWFCKTRIVNNEIIILGNDAELGSDIDPEEAQQALEIAEANLSKAEGTKELVEAKLALKRARIRV

SEQ ID NO: 9684 - protein, 147 aa, Zea mays
  VARIANT 59: note = Ancestral polymorphism is P, Derived polymorphism is L
  VARIANT 19: note = Ancestral polymorphism is Y, Derived polymorphism is N
MNWVLESLLCPTSLGCIPYVRALEFMPTGECSASANRVTEGYNKKLKRMVEKMNQEMGPESKFVYVNSKEFGSAEAEEGTRSNGKNDDLGGSSSTKPEGGLIQKLSEEASTVATKILMRHASDGLPRGRYWKTFQRAKYRHRERVGG

SEQ ID NO: 9685 - protein, 269 aa, Zea mays
  VARIANT 3..269: note = Derived polymorphism lacks residues 3 to 269
  VARIANT 55..269: note = Derived polymorphism lacks residues 55 to 269
MNWVLESLLCPTSLGCIPYVRALEFMPTGECSASANRVTEGYNKKLKRMVEKMNQEMGPESKFVYVNTKEFGSAEAEEGTRSNGNNDDLGGSSSTKPMEAMPYAVASILASDAGASSCSLLNWHFELRAERELSKGLFVPECFIFINQNQHLSYLQLRPRMFGKDDVDKAEFFNEIKDICKCWLTPGELSVNKAPGGCASTRNDEHGEVNLGSQVCAAGWFSSDRVLDPLRRAYSSASLLSDRIPVTTSLKRQFSLAWPGPPTSLVTLF

SEQ ID NO: 9686 - protein, 238 aa, Zea mays
  VARIANT 23: note = Ancestral polymorphism is R, Derived polymorphism is Q
  VARIANT 49..238: note = Derived polymorphism lacks residues 49 to 238
  VARIANT 56..238: note = Derived polymorphism lacks residues 56 to 238
  VARIANT 81..238: note = Derived polymorphism lacks residues 81 to 238
  VARIANT 88: note = Ancestral polymorphism is V, Derived polymorphism is A
  VARIANT 105: note = Ancestral polymorphism is V, Derived polymorphism is E
  VARIANT 107: note = Ancestral polymorphism is A, Derived polymorphism is T
  VARIANT 119..238: note = Derived polymorphism lacks residues 119 to 238
  VARIANT 184..238: note = Derived polymorphism lacks residues 184 to 238
MELINNIAKAHGGVSVFGRVGERTREGNDLYMEMKESGVINEKNIEESKVALVYGQMNEPPGARMRVGLTALTMAEAEYFRDVNKQDVLLFIDNIFRFVQAGSEVSALLGRMPSAVGYQPTLSTEMGSLQERITSTKKGSITSIQAVYVPADDLTDPAPATTFAHLDATTVLSRGLASKGNDAELGSDIDPEEAQQALEIAEANLSKAEGTKELVEAKLALRRARIRVEAVNWIPPSY

SEQ ID NO: 9687 - protein, 168 aa, Zea mays
  VARIANT 124: note = Ancestral polymorphism is G, Derived polymorphism is R
  VARIANT 16: note = Ancestral polymorphism is V, Derived polymorphism is M
MASNQHHHLLLALFLMAAAGTTTATTSSSGNSTTPTAYEMLERYDFPRGILPEGVQRYELRPDGSFEVFLSGRSCEFRVGDRYLLRYDRRITGTAREGSIRALQGVSVKVLFVWLGITEVDRSGDQLSFLVGPLAASFPSRNFAESPRCQCGFDCAYGAWDAAAAAAS

SEQ ID NO: 9688 - protein, 429 aa, Zea mays
  VARIANT 127: note = Ancestral polymorphism is L, Derived polymorphism is F
  VARIANT 131: note = Ancestral polymorphism is L, Derived polymorphism is V
  VARIANT 207: note = Ancestral polymorphism is R, Derived polymorphism is H
MNGRLSAEYRGLEVKVPNLFRCPISLDVMHSPVSLCTGVTYERASIQRWLDSGNTTCPATMLTLPSTDLVPNLTLRRLIALWASTAAPSSSSPAASAVGPTPAAAAAELLRRIADPGADPCPPLRKLAAFLSDDDVDEFDKNALARAGGAAETVAFVLRRADREAAEAAVRVLAAIAASDCIEEESKRRVAAALAADAPSAAASLARVLRSGTSLEARVDAARLVESLLRNAAPGARAAVAESEDLVRELVRLVGPADEKKGSLDGQAVAAGMSCLAAVAATRRARAAMVRLGAVAAAVRVLEADAGPPGQALRVLEATVGCAEGRAAVCESALSVVPAVVSKMMKAGVGGAEAAVSVLWAVCHRYRDRRAVEAAAACEGGLTKLLLLMQSGCSAAARQMASELLKIFRVNGKSCVAGYDSKTSHIMPF

SEQ ID NO: 9689 - protein, 91 aa, Zea mays
  VARIANT 6..91: note = Derived polymorphism lacks residues 6 to 91
MEDNPRAGGTFNFIQMESVEHLTSTPSAQSNVPDLSDEKKQIIPFASPLQFVATPLEKTDSSLAFNASSSEVKPTEQKTLQSKLMKWPHFK

SEQ ID NO: 9690 - protein, 153 aa, Zea mays
  VARIANT 10: note = Ancestral polymorphism is L, Derived polymorphism is F
  VARIANT 52: note = Ancestral polymorphism is T, Derived polymorphism is K
MAATLHLHLLVTLLFVATLTVASVADDSPPAPTPPAPPQPTAYQMLERYNFTQGILPQGVTGYVLNADGSFEVYLPADCSFRAGSMRVQYSSRVAGHIQPLSITSLEGVKVKVLFSWVGVKQVDRDGDQLRFSAGPMSKSFPIDTFANSPQCS

SEQ ID NO: 9691 - protein, 489 aa, Zea mays
  VARIANT 257..489: note = Derived polymorphism lacks residues 257 to 489
MVGSVGNGLADLDAGAISMNGVGKALYPAKAAAAAAAETLPVELEPPEAVVAPTGEEAANGKREIVMGRNVHTSCFAVKEPDADDEETGEREATMASILALYRRSLVERTKHHLGYPYNLDFDYGALAQLQHFSINNLGDPFIESNYGVHSRQFEVGVLDWFASLWELEKDEYWGYITNCGTEGNLHGILVGREVFPKGILYASRESHYSVFKAARMYRMDCVKVDTLMSGEIDCADFQRKLLQNRDKPAIINVNIGTTVKGAVDDLDLVIKTLEENGFKGRFYIHCDGALFGLMIPFVKKAPQVTFKKPIGSVSVSGHKFVGCPMPCGVQITRLEYINALSSNVEYLASRDATIMGSRNGHAPIFLWYTLNRKGYRGFQKEVQKCLRNAHYLKDRLKEAGIGAMLNELSSTVVFERPKDEVFVRRWQLACEGNICHVVVMPSVNIDKLDYFLNELVEKRATWYQDGISQPPCIARVVGFENCLCGRHK

SEQ ID NO: 9692 - protein, 136 aa, Zea mays; identical to SEQ ID NO: 3315
  VARIANT 52: note = Ancestral polymorphism is I, Derived polymorphism is N
  VARIANT 64: note = Ancestral polymorphism is R, Derived polymorphism is S
  VARIANT 70: note = Ancestral polymorphism is R, Derived polymorphism is S
  VARIANT 73: note = Ancestral polymorphism is R, Derived polymorphism is G
  VARIANT 84: note = Ancestral polymorphism is R, Derived polymorphism is S
  VARIANT 88: note = Ancestral polymorphism is S, Derived polymorphism is C

SEQ ID NO: 9693 - protein, 955 aa, Zea mays
  VARIANT 588: note = Ancestral polymorphism is R, Derived polymorphism is M
MPETYVDEQPKGVSRNRPPAHMNGDEEKVYPGQLPVLTWEHKLTHVRHDLPPFRLTWREIMQLAGIGLRLSRHILEETSKGRIAVIDPMKKRAARSGQGVPLGGIGAGSIGRSYKGDFQRWQLFPGSCEDNAVLANQFSAFISRQDGKKYSTVLHPGKPDLPKGSDISGIGSWDWNMSGQQSTYHALYPRAWTVYDGEPDPELNIVCRQISPIIPHNYQQSSYPVAVFTFTVTNSGHTAADVTLLFTWANSVGGKSELTGYHSNSSMIEKDGVHGILLHHRTADGQPHVTFVIAAQEKEDILISECPYFVISGSSASDEFTAKDMWNSVKEHGSFDHLDPIKTSMCSRPGSSIGAAIAASVKLAPKATQDISFSLAWACPEVKFSSGKTYHRRYTKFYGTDGDAAAALAHDAILEHASWERQIEEWQDPILQDERFPAWYPVTLFNELYYLNAGGTIWTDGLPPIQSLTAVGWKKFSLDMLNGESDDFNEMVRQNNTASDILHRMASVFERMHASIASNSAIGTTLLQGEENIGQFLYLEGIEYYMWNTYDVHFYASFSLIMLFPKLQLSVQRDFAAAVMMHDPEKLRILHDGKWAARKVLGAVPHDLGLYDPWFKVNAYTLYNTDRWKDLNPKFVLQVYRDVVATGDKSFARAVWPSVYIAMAYMEQFDKDKDGMIENEDFPDQTYDVWSMAGISAYCGGLWVAALQAASALAREVGDKASEKLFWDKYEKAKFVYSKLWNGSYFSYDDGDNKMSTSIQADQLAGQWYAKACGLFPIVDKDKAQSALEKVYSFNVMKFKGGTRGAMNGMWPDGTVDMSAMQSREIWPGVTYALAASMIQEGMVEQGFKTAEGVYHAAWSPGGLGYSFQTPEAWNNDDEYRSLCYMRPLAIWAMQWALSKPKLHNTPQADIPQDSFPKNQFAYARITKLLQLPEDESSKSFVRVVYEIIRNRFRS

SEQ ID NO: 9694 - protein, 260 aa, Zea mays
  VARIANT 55..260: note = Derived polymorphism lacks residues 55 to 260
MPRPATFKSPNLTTYAHIVVASSLLKCRLIGSSLVIIVAVSPGHGSVRDEAGRPQGQGRGAAGRGGRRGGRGREGEGRRDPGGRRRCRPELMSAAGGPSATYSNGTRRPAMGRPATKRQRRSWLGSRRVLSGKRWDHRKHRSRPRSQPSRTTRPKNRRMVFRVATRMRRKKRSEWILNQCKLLSLLMPQKVLRKARLLMTTMTPLPELKNGTSARCVVIDSSFFDGARLVARLLLLWNIGKRCCLAPFASWARVESIPYQ

SEQ ID NO: 9695 - protein, 177 aa, Zea mays
  VARIANT 17: note = Ancestral polymorphism is H, Derived polymorphism is L
  VARIANT 46: note = Ancestral polymorphism is S, Derived polymorphism is L
  VARIANT 54: note = Ancestral polymorphism is E, Derived polymorphism is K
  VARIANT 98: note = Ancestral polymorphism is I, Derived polymorphism is V
  VARIANT 114: note = Ancestral polymorphism is I, Derived polymorphism is T
  VARIANT 140..177: note = Derived polymorphism lacks residues 140 to 177
METSRSQANGVNEMHLHIRLEKLLTLGPDGHQMLAINSLMLDGKWSNQESSVKEVVSTARVQSLKKLVKEKLHQWLICKVNDDGKGPNVLCKEGQGVIHLVAALGYDWAIRPIIIAGVNVNFRDAHGWTTLHWAASLGRERTVSVLIANGAAAGALTDPTSEFPSERSPADLAPNLL

SEQ ID NO: 9696 - protein, 256 aa, Zea mays
  VARIANT 16: note = Ancestral polymorphism is R, Derived polymorphism is C
MTLFSAAGPYPFSYIRLVLTVPAPNQRPALPHACQPPRNSSQPNAPHAHRRRESRPHGRRHETLRYRTAHTLAPENPSGSEPPARHAIRSFLRRSKENLIARQIRVTRQENALCTAASFDRDAANAFQLYVAEFLGFGVKRAGFLYGRVDVETKDVFVDFIDEPPQQGSEDVVHLLRDPDEEARVDTIAEGLGMRRVGFVLTQAVGRKASETGEYTMSNQEVMQILGKGVGLTWEEAKLQVMSSLILTDFVFLLLP

SEQ ID NO: 9697 - protein, 67 aa, Zea mays
  VARIANT 38: note = Ancestral polymorphism is A, Derived polymorphism is T
  VARIANT 32: note = Ancestral polymorphism is R, Derived polymorphism is Q
  VARIANT 27: note = Ancestral polymorphism is S, Derived polymorphism is Y
  VARIANT 18: note = Ancestral polymorphism is V, Derived polymorphism is M
  VARIANT 10: note = Ancestral polymorphism is I, Derived polymorphism is S
MPLHSSSGSIDTFFGVLVAVLPLTLVSYVFSRVCAGHAEGPKERYDCRRLAPRWCGWRAPRRTVLKW

SEQ ID NO: 9698 - protein, 409 aa, Zea mays
  VARIANT 300: note = Ancestral polymorphism is V, Derived polymorphism is L
  VARIANT 145: note = Ancestral polymorphism is A, Derived polymorphism is V
MPASVPLCLGLDTAGVQVPWYFRCPISLELMRDPVTVSTGQTYDRSSIESWVATGNTSCPVTRAPLADFTLIPNHTLRRLIQEWCVAHRSMGVERIPTPKQPADPDLVRSLVAQGPGLPALRRLRALARESDKNRLVMATHETRAALLEAAFGSGSGAASEELEAEAMAVLALVGLGEEEAVEVVGREERVARLGKVLAGGGSLEARVNAGAVVEAAALASGADARAVLGAAEGVMAGLVTLVEEKASARAVRVGIRGLFALCLAKENRPRAVAAGAASALARRVAEGGAGEPERALAAVERLCHAEGGRDGVVAGAGGGPAAVTALVRAMSGRAAEHAAGALVAVVGGSEALQVEAVRAGAMGQLLMMVQGGCSERAKRKAQHLLKLLRSAWPTTDCTANSDDFLQHY

SEQ ID NO: 9699 - protein, 115 aa, Zea mays
  VARIANT 57: note = Ancestral polymorphism is L, Derived polymorphism is I
  VARIANT 52..115: note = Derived polymorphism lacks residues 52 to 115
  VARIANT 43: note = Ancestral polymorphism is K, Derived polymorphism is E
  VARIANT 41: note = Ancestral polymorphism is R, Derived polymorphism is H
  VARIANT 36: note = Ancestral polymorphism is S, Derived polymorphism is I
MGLDLGLDLGLFVVRSAGGMAAAKGAPAEIESCIRSLEEERQKIEVFRRELQLCVRLLVDVIDELKDEAAKKGGDAEAKADDGDKRKWMSTAQLWLDSDAKSDEVEQATLVHHAA

SEQ ID NO: 9700 - protein, 611 aa, Zea mays
  VARIANT 443: note = Ancestral polymorphism is G, Derived polymorphism is E
MELAVGGGMRRSASHTSLSESDDFELTRLLSKPRINVERQRSFDDHSLSDVSHSGGYGRGGFDGMYSPGGGLRSLVGTPASSALHSFEPHPIVGDAWEALRRSLVFFRGQPLGTVAAVDHASEEVLNYDQVFVRDFVPSALAFLMNGEPDIVKNFLLKTLLLQGWEKKVDRFKLGEGAMPASFKVMHDAKKGVETLHADFGESAIGRVAPVDSGFWWIILLRAYTKSTGDLTLAETPECQKGMRLILSLCLSEGFDTFPTLLCADGCCMIDRRMCQQQSAAKVGEGSLEKARGLWKLMQAEAAEVLANMASQGVPEILCKGAVQKNGVYGYPIEIQALFFMALRCALQMLKHDNEGKEFVEKIATRLHALSYHMRSYFWLDFQQLNDIYRYKTEEYSHTAVNKFNVIPDSIPDWLFDFMPCQGGFFVGNVSPARMDFRWFALGNMIAILSSLATPEQSNAIMDLIEERWEELIGEMPLKICYPAIENHEWRIVTGCDPKNTRWSYHNGGSWPVLLWLLTAACIKTGRPQIARRAIDLAERRLLKDGWPEYYDGKLGRYVGKQARKFQTWSITGYLVAKMLLEDPSHLGMIALEEDKAMLKPVLKRSASWTN

SEQ ID NO: 9701 - protein, 33 aa, Zea mays
  VARIANT 25: note = Ancestral polymorphism is A, Derived polymorphism is V
MGDTFDDWLVDKIQLLRKGRIIAFAIKRIEQIL

SEQ ID NO: 9702 - protein, 135 aa, Zea mays
  VARIANT 73..135: note = Derived polymorphism lacks residues 73 to 135
  VARIANT 68: note = Ancestral polymorphism is E, Derived polymorphism is K
  VARIANT 53: note = Ancestral polymorphism is R, Derived polymorphism is T
  VARIANT 52..135: note = Derived polymorphism lacks residues 52 to 135
  VARIANT 51: note = Ancestral polymorphism is D, Derived polymorphism is N
  VARIANT 45: note = Ancestral polymorphism is A, Derived polymorphism is T
  VARIANT 40: note = Ancestral polymorphism is E, Derived polymorphism is D
  VARIANT 39..135: note = Derived polymorphism lacks residues 39 to 135
  VARIANT 37: note = Ancestral polymorphism is A, Derived polymorphism is T
  VARIANT 33: note = Ancestral polymorphism is T, Derived polymorphism is M
  VARIANT 32: note = Ancestral polymorphism is G, Derived polymorphism is R
  VARIANT 31: note = Ancestral polymorphism is P, Derived polymorphism is L
  VARIANT 23..135: note = Ancestral polymorphism lacks residues 23 to 135
  VARIANT 15: note = Ancestral polymorphism is R, Derived polymorphism is W
MAAAAPAACKGKRKRHLSEDDVWLLLHRYHPGTILTALQEVAQHADGRRIDWRAVVAKSATGITSAREYQMLWRHFAYHHDVDESVDADDQPLDDDSDLELELEPDPNLTKEALCEASALAKVSLVWKAYSRMVI

SEQ ID NO: 9703 - protein, 610 aa, Zea mays
  VARIANT 253..610: note = Derived polymorphism lacks residues 253 to 610
MEGPPRTLIHLLLLLLCIASKCLGGASGLNSTQMVTLKVDASPKLARKIPDTFLGVFFEEMGHGGAGGIWAELVSNRGFEAGGPNTPSNIDPWLIVGDDSSVYVETDRSSCFSRNIVALRMEVLCNDCPAGGVGIYNPGFWGMPYVWTRRGSLIIQALLKYWFCRVAGDSKWIKVEKKLVAKGTNRTSRLQITSKKKGTVWLDQVSLMPADTYKGHGFRKGLVSMLMDLKPRFLRFPGGCFVEGGWLRNAFRWRQSIGPWEERPGHFGDCWQYWTDDGLGYYEFLLLSEDIGAAPIWVFNNGISYNDEVNTATIAPFVKNLLEAVRIRHGALLEPKWGIPKPFPVKYVAIGNEDCERKFYRGNYLKFYNAIREVYPDIQLISNCDGSSGPLDHPADIYDFHVYADAKTLFSMKSTFDKSPRSGPKAFVSEYAVWKTDAGRGTLLAALAEAAFLTGLEKNSDAVEMACHAPLFVNDDIEKKWNPDVIVFNTWQHYGTPSYWMQKLFRESSGAMVHPTTTISSGSSADSLAASAITWKDSENNDSFLRVKARLRSVLIPEALVQIVNFGSDAIRVAISTAGLQATIDVLRSTATVLTSTAVMDENSFSNPNK

SEQ ID NO: 9704 - protein, 204 aa, Zea mays
  VARIANT 201: note = Ancestral polymorphism is L, Derived polymorphism is Q
MKIAWGKKSKVKKQSVVVSTIPGLPFGAGSDNDEVETEEKSDANTNCPGTKPVETAELLQSQGDKLAEEGKYHEALAKWEAALILMPDNAILHEQKAQVLLEVGDAWRALTAATRATELDPFWPEAWVTLGRAQLNFGEPDSAILTFDKALAMKVPIYLFFRLNQIIIGHYTYISCLLRLNDLLDALGSLTTPTQKLTVKLLLA

SEQ ID NO: 9705 - protein, 283 aa, Zea mays
  VARIANT 169: note = Ancestral polymorphism is S, Derived polymorphism is N
  VARIANT 241: note = Ancestral polymorphism is A, Derived polymorphism is G
MAALAPSKILGTQLNFAGSSRYATAAPTAGAQKIVSLFSKKPAQKPKPAAVSSSSPDISDELAKWYGPDRRIYLPDGLLDRSEVPEYLTGEVPGDYGYDPFGLGKKPEDFAKYQAYELIHARWAMLGAAGAVIPEACNKFGANCGPEAVWFKTGALLLDGNTLNYFGNSIPINLVVAVIAEVILVGGAEYYRITNGLDLEDKLHPGGPFDPLGLASDPDQAAILKVKEIKNGRLAMFSMFAFFIQAYVTGEGPVENLAKHLSDPFGNNLLTVISGAAERTPSL

SEQ ID NO: 9706 - protein, 601 aa, Zea mays
  VARIANT 94: note = Ancestral polymorphism is S, Derived polymorphism is Y
  VARIANT 43: note = Ancestral polymorphism is R, Derived polymorphism is W
MDETTDASTSLKLHTRLRLWEFPDCYIFEPIDGLADLYLSVSRASGTMNLVQDLPPRGPTTKHKVQTVYGVIGVLKLAVGSYFVVITDRDCVGSYFGHAIFKVTGLKVLPCNSAHNTTSAEQKKMETEFSELLDAAERTIGLHFSYDINLTLSAQRLHDLGDEYRALPLWRQAEPRFLWNAYLLEPLIENKLNQYLLPVIQGSILGFQNIQAEVGSEKVNVILIARRCTRRIGTRMWRRGADAEGFAANFVESEQIMQSKGFTASYVQVRGSMPFLWEQIVDLTYKPSFDIVRQEDAPSVLERHFHDLQKKYGAVLAVDLVNTGGGEGRLREKYAKSIEPILSEDIRYVHFDFHRVCGHIHFERLSQLYDQIKDYLQKHKYFLINDKGEKIEEQTGTVRTNCIDCLDRTNVTQSMIGGKILESQLQRIGVLSAGDTISKHPAFDTNYKILWANHGDAISIQYSGTPALKGDFVRYGKRTTQGILNDLRNALARYYLNNFVDGTKQDAMDLLQGHNMTSVSRDMAVPSKSGLLESYASFRLAFALVMGALVFMMMSLRQARNDARHLMLSFLWAGLCIGISHFVRANGRTFTNRPRFHKSRH

SEQ ID NO: 9707 - protein, 266 aa, Zea mays
  VARIANT 176..266: note = Derived polymorphism lacks residues 176 to 266
  VARIANT 174..266: note = Derived polymorphism lacks residues 174 to 266
  VARIANT 133: note = Ancestral polymorphism is R, Derived polymorphism is C
  VARIANT 122: note = Ancestral polymorphism is R, Derived polymorphism is Q
  VARIANT 102: note = Ancestral polymorphism is A, Derived polymorphism is T
  VARIANT 92: note = Ancestral polymorphism is P, Derived polymorphism is L
  VARIANT 77: note = Ancestral polymorphism is A, Derived polymorphism is V
MMAKKAPVLADAKAKANATVISKEESAAEVEVEEDVVLTKQAEEGINNLIFEFQDLPSRLQETLMPDLARLSQHSKVYLSTVNAGIADGVRLILGGRWVVVAASAASAAVLLPLFMLTALVRRMGPYLPLLHRALLLAQAYLAIYSATLALIVVATGLEPLRFVHVVSPAAYAWTQAAQSLDFMAYLVLQLVDLVVVFRAPPPSRTMATGRRQGPRARADGGAVPRANWRVYAACFAIVCACGRAERRKKGYLAGTDRAAEEWKKS

SEQ ID NO: 9708 - protein, 1214 aa, Zea mays
  VARIANT 255..1214: note = Derived polymorphism lacks residues 255 to 1214
  VARIANT 773..1214: note = Derived polymorphism lacks residues 773 to 1214
MGVPEAVALEIPAVEEGSPTPLARVPPRIRRRLLQAGSGENGGKAPTAEEIETKLRQAHLRRQQFHEALSSKARRSIKSPSGSLQEEDRGQLLEAKLLAARQKRLTLLEKEQSRLAKLDKLRQAVKSDAEMRFEREREELGMKVESRVQKAENNRMQLMHDRLKRQAALEERTKRYFMQRLTWENKYRERVQSAIQKCNAAEKRRLGLLESEKRRAQSRLLQVQLAVKTASNQRETERSKLNEQLEEKLQKAEQQRADYLKQRGNPHSSMHSSSVKNGEFLSRKLARCWRRFRTSRKTTVVLARAFDALGINQRSVVSMPFEELALCIESPAVLQTTKALLDRLESRFVFSQSSTSSKPENIDHLLKHLGSPKRKIPLSNVGTSEATLKNAVGNYDSSTLSRYSQRIALCAYMILGHPKSVLSGQGEQEKFLMESATIFVKEFELLVKTVLDALDGACILSWSVIDDATPVRSSYEESSSIVADLKKFRTQLLAFDKAWCAYLYHFVAWKAKDAKSLEDELIRAACKLELSMIQTCKITEGESDNLGGDLKAIRKQVAEDQKLLRESIQHLGGEAGIGMMESALFETRSKFFQAKEKRSSIATTVANVASPSVTCSSGQSNDSETGIGMMESALFETRSKFFQAKEKRSSIATTVANVASPSVTCYSGQSNDSDTGENCNMDAEKASRVVQSLFGALSSRYENSKGGKLMSNAAPEKMPTENEQIVNEILHDIHGSFADISDGAGTVEGDFKVKVKETMEKAFWDVVADSMRGDMPDYCYLVSLVKEIREALEELSPTGWKEEISDNINLEILTQLLESGSQDRQYLGQILQYSLDKLRKLSSPVKEHEMKKSHDTLLGELVEDSKSNYKDPNSFVLCVIKGLRFTMEELQALKTEVTRARIQLLEPLIKGSGGVEYLQKSFAGRCGSPSDALASLPSTARWIFSLKDVVEEQWNEHVSSLSILPEADHEQVQTLVATLRTGHAVAGVQSVIPAADNTGLPECRGEILGKLIRIGLLQLISSMEGVERESVPETFMLNWLRLRSVQSKFQQVIVIATSMLVLHQVLASENPKITSSELENATSELFNVLTRLLDNFPDVGTEKIIEAMMYSSTSRSLSDHERMNARKEILTRVFLRSLQTDDTVFKKVSQSVYCAFRAVTLGGSGEKGRMLADASLRRVGATKLTARLVKAAEVLIKAAMVSEQVHGPWYTQLL

SEQ ID NO: 9709 - protein, 762 aa, Zea mays
  VARIANT 487..762: note = Derived polymorphism lacks residues 487 to 762
  VARIANT 39: note = Ancestral polymorphism is P, Derived polymorphism is L
MARSVPPRMWRGLPGPDRNRALDYGWHGCCGVIRRCWDPVVWEMREFGIVGVSGLLDFELLCPFCESKFQDAALMWCVFHFLMESFLARFYIRLPFSLVQEQDCITNQLICTVVDYSMQELYGRNESCALFSSAGRILRQMPLFDKKPFSLLEPPKDLDSKEKVFQIRFTKEIFRDYEEYLKRLNLYRQRVWTCNISGKSNLTFEEALVSEHKAMEKAQNLPTELMAQVLRMTQYSPLGLYELVDKIYASLLEEVFEGIELHANKDGNVAPCKILKILDSGGTKMCEVGWIRKGKAITNTSVIKAADLFYRRAPVSRNTLKFFIRDATSQSNPWVIHENLAKKFGITIEPPDSVMKKGRKRQENETVEDGRKKLKTDEEHAYVLIKYPIDDLLVRPNADDPSLFKRPLLATDFRVPRCSVGDLLMVWDFCSSFGRALNLSPFPLTDLENAICHKESNVLLVEIHAALFHLLMKDEGDYFTVPQNKKQKLKVSSVTWAEYLCDFLEMTKNEELSTNIATVRRGYYGLIDTNIKLKILRELVEEAIETSAIREILSDRVDQKQVLNATKRENTRKDKKEQNLNTEIAMKNEENQTDAVQGGHEGVDELVRRKEENDKSNISRGRTEVKRHMVQHLETEIEKLSIRSSPLGKDRQYSRYWFFKREGRLFVETADSREWGYYSTKEELDALMDSLNVKGIRERALKRQLEKFYSKISNALEKRSKDIANKTLLEEGVLRRSTRVRAQPKDNPSMAFLKYVNKWRDN

SEQ ID NO: 9710 - protein, 54 aa, Zea mays
  VARIANT 39: note = Ancestral polymorphism is G, Derived polymorphism is R
  VARIANT 33: note = Ancestral polymorphism is G, Derived polymorphism is S
  VARIANT 1: note = Ancestral polymorphism is T, Derived polymorphism is M
MVSVVYLLPLIPLFGSCGYHLRVVDVNMQVEAGSVSESGAKLADSNSLSEQDFR

SEQ ID NO: 9711 - protein, 150 aa, Zea mays
  VARIANT 9..150: note = Derived polymorphism lacks residues 9 to 150
  VARIANT 28: note = Ancestral polymorphism is R, Derived polymorphism is W
  VARIANT 40: note = Ancestral polymorphism is P, Derived polymorphism is L
  VARIANT 42..150: note = Derived polymorphism lacks residues 42 to 150
MVKEKKRNQHPADSALPLGDEGEGRCGRKARKEKAEATLPSQIKNKDKRREVHAKLKREKKAQKRALARERGQAACHAEELGRRQASALRTVHSTCRVLCLQPSERQVPRTIENTREPDETMCQPDETVCRLETPSQNSEALRQTSSMQT

SEQ ID NO: 9712 - protein, 194 aa, Zea mays
  VARIANT 28..194: note = Derived polymorphism lacks residues 28 to 194
MNDTDKNNSEREESDLALEKESATFTSQKQHLEELSDAKETFIGGPEAEAKSNSTKDSDNPIAKVGSSIASDKMRDGCNANAIPCPATSNHTTEPSSVASQEASPASTKDTAIPEQVERPSSEELLADVSLPQGKVEPKKTEPAPAASSNIQQHGCKQAGNGNTEPKSKENAAADDDPITRLQRAADDYSWRFF

SEQ ID NO: 9713 - protein, 323 aa, Zea mays
  VARIANT 44..323: note = Derived polymorphism lacks residues 44 to 323
MPPPTLEFAQLQSLPAMPSAPPARMMSSTSSKVPKGRLLGTGERAVHDVDSRLPREGQPPQLETDRCEPVVYGLKLGNIRVLNINTTLRSLLRGHTQGGSIHLTGRSAHSPPSTPSMEARSPNTRSSQRRSNPIQSTANNGVQRQRRGDDVRDTALLEPSKQPKSATLSVKVSLAQMLRGMIIMDVVTLDQARIADSKYTALRAFDFYAYIKYNDKSCNVPVFAQMMTISLASLSNMAFIPSYLNICEDGIPHWMMRQAGQYMAEYQASAKGKLTFGHQVRGAPSCEVLRWDFDLKVQGDAYGVDVRHRDNKTGQHVGTGSEP

SEQ ID NO: 9714 - protein, 193 aa, Zea mays
  VARIANT 108: note = Ancestral polymorphism is S, Derived polymorphism is Y
  VARIANT 136: note = Ancestral polymorphism is G, Derived polymorphism is R
MEMNEERKVSLLGLANILSASIGGFSWAPLFSKICKNKVEAESWFTGLSALICRGQHGSQVQHIDGIRIAGLPFDLEYLSEANPSADMDEIVKAIASRVTEVMPKDASFTSSQIATSSNGFDSSVMSTAATTRSSGSTVTDLGVVGRGIKRASIKPISAEPAAKKPALDSPSLQGDSSINSEVVPATQTDESS

SEQ ID NO: 9715 - protein, 174 aa, Zea mays
  VARIANT 9..174: note = Derived polymorphism lacks residues 9 to 174
  VARIANT 13: note = Ancestral polymorphism is H, Derived polymorphism is Y
  VARIANT 18: note = Ancestral polymorphism is T, Derived polymorphism is M
  VARIANT 23: note = Ancestral polymorphism is V, Derived polymorphism is M
  VARIANT 28: note = Ancestral polymorphism is P, Derived polymorphism is H
  VARIANT 31: note = Ancestral polymorphism is V, Derived polymorphism is I
  VARIANT 36: note = Ancestral polymorphism is A, Derived polymorphism is V
  VARIANT 82: note = Ancestral polymorphism is E, Derived polymorphism is G
  VARIANT 83: note = Ancestral polymorphism is E, Derived polymorphism is K
  VARIANT 85: note = Ancestral polymorphism is E, Derived polymorphism is D
  VARIANT 114: note = Ancestral polymorphism is P, Derived polymorphism is L
  VARIANT 137: note = Ancestral polymorphism is T, Derived polymorphism is A
  VARIANT 148: note = Ancestral polymorphism is H, Derived polymorphism is Y
MSLLPSGSWMCSHQELTMEKSTVVVCVPVVIMAEIAEIDYSSSFSVFTMEAYDLLGGDACSTQMYSEAKLASVAATVRRRVEKEERDYLSHDKPRTVLSGKACNDLDGEFCDAPYQVLRDLGGKFVFILYNTLSKSTFVTVGVDSENHLVFSNDARILKTICDNLYMPFPKGNY

SEQ ID NO: 9716 - protein, 182 aa, Zea mays
  VARIANT 89: note = Ancestral polymorphism is K, Derived polymorphism is E
  VARIANT 85: note = Ancestral polymorphism is S, Derived polymorphism is F
  VARIANT 44: note = Ancestral polymorphism is R, Derived polymorphism is H
  VARIANT 43: note = Ancestral polymorphism is R, Derived polymorphism is H
  VARIANT 40: note = Ancestral polymorphism is E, Derived polymorphism is K
  VARIANT 35: note = Ancestral polymorphism is R, Derived polymorphism is Q
  VARIANT 26: note = Ancestral polymorphism is I, Derived polymorphism is M
MTAPKPGGGAVAAARAAAAGPRTVLITGVSRGLGQALALELARRGHAVVGCGRSAEQLRSLEVEITSPSRHFLTVADVRSDSSMSELAKAVLEKKQVPDIIVNNAGTINKNNKTWNVPVEDFDMVVDTNIKGTANVAPYCASKWAIEGLTRSLAKELPPGIAAIALSPGVVNTDMVTSCFGS

SEQ ID NO: 9717 - protein, 120 aa, Zea mays
  VARIANT 73..120: note = Derived polymorphism lacks residues 73 to 120
  VARIANT 62: note = Ancestral polymorphism is A, Derived polymorphism is V
  VARIANT 56: note = Ancestral polymorphism is S, Derived polymorphism is I
MSGKSRPLPKSGRLTTVASKRGGGGAAAAASKQMHRQKIEHHLDDDISIDQLHKLSQKNISAWSMKRPMKIVWYGALTTMDEQLKHATGEDELATEIHSEYKAKVAAKRIFQNVAKPGSK

SEQ ID NO: 9718 - protein, 199 aa, Zea mays
  VARIANT 160..199: note = Derived polymorphism lacks residues 160 to 199
  VARIANT 90: note = Ancestral polymorphism is A, Derived polymorphism is T
  VARIANT 69: note = Ancestral polymorphism is G, Derived polymorphism is S
MIPRRALFPLACHNRSNAPPPTRTLASIPAAEAERECGAQDARVSHDDTAALVEEPTSLAELPRWRLRSMWELTSALNFLHVFRPLLNIAVGVDKWNNGTSFGIAGGLLFSMGLLGYIFSRSTISLVLGIAPGLATLLLGTLSLKFLRSGRSSFLLILAQAALQSVVSTPMCYLREEIPQVSICSFVFVIHCPSIQKAN

SEQ ID NO: 9719 - protein, 630 aa, Zea mays
  VARIANT 413..630: note = Derived polymorphism lacks residues 413 to 630
  VARIANT 247: note = Ancestral polymorphism is T, Derived polymorphism is I
MASAGVAGCSGSAGDALFRELWHACAGPLVTVPRQGELVYYFPQGHMEQLEASTDQQLDQHLPLFDLPPKILCKVVNVELRAETDSDEVYAQIMLQPEADQSEPTSPDSEPPEPERCNVYSFCKTLTASDTSTHGGFSVLRRHAEECLPQLDMTQNPPWQELLAKDLHGNEWHFRHIFRGQPRRHLLTTGWSVFVSSKRLVAGDAFIFLRGENGELRVGVRRLMRQLNNMPSSVISSHNMHLGVLATASHAISTGTLFSVFYKPRTSRSEFVVSVNKYLEAKNHKVSVGMRFKMRFEGDESPERRLSGTIIGLGSMPANSTSPWANSDWRSLRVQWDEPSAILRPDRVSPWELEPLDATNPQPPQPHLRNKRARPPALLSIAPELPQVFGFLKSPAEPAQAFSFSRPQQTQELYHSNPSSIFSSSLNVGFSSKNDRSTPINSHLYWTMRQTRTESYSASINKAPTEKKQESATSGCRLFGIEIVASSERSLNESESRQVRSCTKVIMQGMAVGRAVDLTRLDGYADLHRKLEEMFDIQGELSANLKKWKVIYTDDEDDTMLVGDDPWNEFLRMVKRIYIYSYEEAKSLTRKAKPPVVGDTIKPDPNKLPPESDVPHDSNNNAPVAADYQD

SEQ ID NO: 9720 - protein, 405 aa, Zea mays
  VARIANT 324: note = Ancestral polymorphism is P, Derived polymorphism is L
  VARIANT 271: note = Ancestral polymorphism is S, Derived polymorphism is R
  VARIANT 237: note = Ancestral polymorphism is S, Derived polymorphism is N
  VARIANT 220: note = Ancestral polymorphism is R, Derived polymorphism is S
  VARIANT 187: note = Ancestral polymorphism is G, Derived polymorphism is R
  VARIANT 145: note = Ancestral polymorphism is A, Derived polymorphism is P
  VARIANT 99: note = Ancestral polymorphism is S, Derived polymorphism is C
  VARIANT 40: note = Ancestral polymorphism is T, Derived polymorphism is S
MKVFKGKIWAAIGSLMDPAGTASTTKSSSAAAVPDRALLTDIEAAIERCTGSSGGVNDDRHVHEILFLVSNAPGAITFLSRRITARLENARAPAAALRSLLLVHRLLRAGDRYFEQDFRGLWASRELRVDAPCSPLTAGTGAAVASGACAFVHGYSAYLEERMQWVINQAGNLEPARMTPQTDHGAGKPPHFSSSSSSSSSSSHDASAETLLSKLAMCQSLLDLAIQLLPDNNTSASAAVRSAFGIVLRESFKVYVAFAEGVDVMLLLSRSLAGLSKPSRVTAHEILKKACAQTPELKEFYLKCKRSNASSTSLEYPLVRVVTPAQAFALEMMEPVTMIPIPEQDGYPEEVEAKPEAEAIDSGASPFAHKMETTISTVWVQFDDEDQKLMTTAAAGHSLKAVQPS

SEQ ID NO: 9721 - protein, 160 aa, Zea mays
  VARIANT 13: note = Ancestral polymorphism is A, Derived polymorphism is V
  VARIANT 24: note = Ancestral polymorphism is H, Derived polymorphism is Q
  VARIANT 27: note = Ancestral polymorphism is A, Derived polymorphism is V
  VARIANT 34: note = Ancestral polymorphism is R, Derived polymorphism is M
  VARIANT 43: note = Ancestral polymorphism is D, Derived polymorphism is G
  VARIANT 55: note = Ancestral polymorphism is T, Derived polymorphism is A
  VARIANT 79: note = Ancestral polymorphism is A, Derived polymorphism is S
  VARIANT 80: note = Ancestral polymorphism is A, Derived polymorphism is V
  VARIANT 118: note = Ancestral polymorphism is A, Derived polymorphism is T
MTEDCARSLPALACLLVEFRDTTHLVAFVANQFRTTSFTTARDVVMSARCLCMLAVTALNLCVGCGVGAGKDGARAAPAATVKVLFFARARDLTGVADSAVEVPPGSTAGECLARVLAQFPNLEEIRGSVVLALNEEYAADSTAVADGDELAVIPPISGG

SEQ ID NO: 9722 - protein, 350 aa, Zea mays
  VARIANT 28: note = Ancestral polymorphism is D, Derived polymorphism is Y
MAMEDAASESSDWEVLSATSACGGGDDDEVLIVSGGGGDVVLDHFALTPDTAAAWPGDGEGSWSDDRGAWQGLELLDGFDPIPEASFNLAAGVWNQPLLISGVDDAREGARSATRSADGNQEEVVAAEIQQESNSVFSRGELRPVLQPAYHGVGETLDSDAATRTGASLQGEVSESSLVRLDGGIGTGVERSCLEDAVSSDEIHGEQEEQEQGSKVNAATGCDEPDGEVKDGALPLAHTAGTEEGEKQFVVWWKLPFKLLHYCAWKVKPVWSFSIAAALLGLVVLGRRMYRMKRKARGLPQIKIAFDDKRASQFADRAAYLKEAFLVARRVPMLRTSSGATLPWSMVQER

SEQ ID NO: 9723 - protein, 143 aa, Zea mays
  VARIANT 119: note = Ancestral polymorphism is C, Derived polymorphism is Y
  VARIANT 87: note = Ancestral polymorphism is D, Derived polymorphism is Y
  VARIANT 85: note = Ancestral polymorphism is L, Derived polymorphism is P
  VARIANT 67: note = Ancestral polymorphism is H, Derived polymorphism is Y
  VARIANT 58..143: note = Derived polymorphism lacks residues 58 to 143
  VARIANT 48: note = Ancestral polymorphism is R, Derived polymorphism is C
MDGERATRHAYIDASAPPYANRRSPGCSTPAMPCFSPIHHSTRCRTGCRISIGTTNNQCSVLSLDFHPLSHRLTTAGVDHDVKKLKDAIAMHNTALCSIGPPIGVGDVGVFGIFHSLHCKIVMGTSLVISAGSCAIMPGLVTK

SEQ ID NO: 9724 - protein, 193 aa, Zea mays
  VARIANT 53: note = Ancestral polymorphism is G, Derived polymorphism is D
MENHQLQQQQQQPAAPVAAAASSPQYRGVRRRKWGKWVSEIRQPGTKVRVWLGSFDSAEAAAVAHDVAALCMRGPRDAQLNFPGSAGWLPRPASTDPADIRAAAAEAAERVRREPALVGTDAAAEPGRGPASASRLDLAVGDEFDDDLESPRLWTEMAEAMLLDPPKWGPDGSDGSEGSGSQNWPHGSLWDAC

SEQ ID NO: 9725 - protein, 118 aa, Zea mays
  VARIANT 41: note = Ancestral polymorphism is P, Derived polymorphism is Q
MDGGGTHRTPEDVFRDFRARRAGMIKALTTDVEKFYQQCDPEKENLCLYGLPNETWEVNLPAEEVPPELPEPALGINFARDGMDEKDWLSLVAVHSDAWLLAVAFYFGARFGFDKESR

SEQ ID NO: 9726 - protein, 187 aa, Zea mays
  VARIANT 84: note = Ancestral polymorphism is R, Derived polymorphism is K
  VARIANT 109..187: note = Derived polymorphism lacks residues 109 to 187
MTTAWIRVRRPTAAGRLLPRRRLRPVPRGLCAVPQHVRGAGRRRPAVVASVDYRLAPEHRLPAAFEDVTDAVIRGSETRVMRGRGRRQLLIGGTGGALLDSKEDCDEKRLGDLLIVGYGVSAAGEVKMSLASPTSSHIELKLSLSAILDLGNRRLWGKGSTAVERETSDGILGEEEARERVGGRVRV

SEQ ID NO: 9727 - protein, 543 aa, Zea mays
  VARIANT 145..543: note = Derived polymorphism lacks residues 145 to 543
MASDEFISLDAPCEADAKDEGGDVQVKAPDVSGMEPLVSDLQPEGKAGAVGSNPKTSAGNLDLEEGQVEDMDLADDDVVVGKDQLLDASIQPEISVAAVQTVIGFEVKLDKGDGTENEIIYESNSISIEESPSRGVKRARVESKEPSVRVIYSDLTRESKRKLMQLMQQWSEWQARRMHHLEEAVEVTLESGEETYYPALHVGSEKSCAVVFIHFVLFSCFSYSDKSFWVDNQARESDTVDDGSVPLYDREFTLHSTPLGGSSNTERVDKDDSRCFNCGSYSHAMKDCPKPRDNVAISNARKQHNLKRNQSNVNRVQNRYYQKTPGKFDDLKAGVLGPETRQCLGIGENDPPPWLHRMRELGYPPGYLDVVDDEDRPSGITIFGDGEVKLEYEEGELSEQGEASPPKKKMTVEFPGINAPIPENGDQWLWGSTPPQSSGRHHSLDSRDFHDRGPPGADHYSPRYHSHDFGPLRPSIGRSHSDRGWRSPPRYDNPPADDGAWTPHSYPSRQHLGHYSSSSEMSSRHSRDKDRDRHDSRHYHHRR

SEQ ID NO: 9728 - protein, 476 aa, Zea mays
  VARIANT 319: note = Ancestral polymorphism is Y, Derived polymorphism is H
  VARIANT 228..476: note = Derived polymorphism lacks residues 228 to 476
MARVAAMVVVMVLLQQLASSYSYTVAAHADAAGVLGRKAGVVVDETPVEKSPAGPGRYAVIFDAGSTGSRVYIFRFGRQMDLLRIGDEIEFFAKARRLYKRLSSDQLKPGLSSYAGRPQEAAKSILPLLEKAKSIVPSWLMKRTPVKLGATAGLRLIGNQQADQILDAVRDLVHKKSKFQYKPNWINVLEGSQEASYLWVALNYLLDKLGGEYSQTVGVIDLGGGSVQMAYAVSANAAARAPAVPDGEDPYITKEYFKGKQYNVYVHSYLRYGSFASRAEILMSKNGPFSSCMLRGFSGKYTYNGQQFDATARPEGALYDKCRGEIAKAMNLKAPCKTAKNCTFCGVWKGGGGAGQNDIYVASGFYYLASHVGFIDSKAPSAKAPPAAFRAAAKKACKFDVNRAKVAYPDVSNSDVPYLCMDLTYTYTLLVDGFGLQPMKKITFVSKVKHGEYYIEATWPLGTAIEAVSPTRQIGN

SEQ ID NO: 9729 - protein, 364 aa, Zea mays
  VARIANT 59..364: note = Derived polymorphism lacks residues 59 to 364
  VARIANT 88: note = Ancestral polymorphism is R, Derived polymorphism is C
  VARIANT 105: note = Ancestral polymorphism is S, Derived polymorphism is I
  VARIANT 135..364: note = Derived polymorphism lacks residues 135 to 364
  VARIANT 174: note = Ancestral polymorphism is P, Derived polymorphism is T
MGKGGQDEGKRRAGSAASNPDPAAPVFPAWARTPSECLAELGVSADRGLSSEEAAARLQRYGPNELERHAPPSVWKLVLEQFDDTLVRILLLAAVVSFVLALYDSAEGGEVGVTAFVEPLVIFLILIVNAVVGVWQESNAEKALEALKEIQSEHTTVKRHGRWSHGLPARDLVPGDIVELRVGDKVVCSTASDQRNSVRLLDVEGCPWKENQTPRIAAPASMEGESSRSVSVLSMEETLLSARLHLVCIAHGPTSPNPRNRRFLQQRHRRPVPGPSPERNKHSVFAHSPLSTPTTILYEPTVDVHSTHHAPALPTAQHILPRASVIMNLVYLAIGTELASTLRYKMIERRHAPPPAGSGLAQAT

SEQ ID NO: 9730 - protein, 215 aa, Zea mays
  VARIANT 122..215: note = Derived polymorphism lacks residues 122 to 215
MLIPSESLHLCTTEDDTSKSLVNTSNVEIDSGGTLALVSRYPRKPLKEIYLEHQNYKCIYKSNYNNSPSGWCLEISYANVGRRCLINDDCYLCSENAFEIAFFFWLLVTYGFNSCIMGKPAYVITRVVISVISQVLCGYSTLPLYALISQMGSSFKKAIFDENVSEGLINWAENARRRNRMPTSVGDNSPIGEGIQMSNQTQRESSMEQGTARLI

SEQ ID NO: 9731 - protein, 143 aa, Zea mays
  VARIANT 15: note = Ancestral polymorphism is D, Derived polymorphism is N
  VARIANT 16: note = Ancestral polymorphism is K, Derived polymorphism is N
  VARIANT 27: note = Ancestral polymorphism is E, Derived polymorphism is K
  VARIANT 28: note = Ancestral polymorphism is A, Derived polymorphism is V
  VARIANT 31: note = Ancestral polymorphism is P, Derived polymorphism is L
  VARIANT 34: note = Ancestral polymorphism is R, Derived polymorphism is C
  VARIANT 35: note = Ancestral polymorphism is Y, Derived polymorphism is N
  VARIANT 37: note = Ancestral polymorphism is H, Derived polymorphism is Y
  VARIANT 40: note = Ancestral polymorphism is H, Derived polymorphism is Y
  VARIANT 44: note = Ancestral polymorphism is D, Derived polymorphism is N
  VARIANT 47: note = Ancestral polymorphism is C, Derived polymorphism is R
  VARIANT 58..143: note = Derived polymorphism lacks residues 58 to 143
  VARIANT 62: note = Ancestral polymorphism is G, Derived polymorphism is V
  VARIANT 72: note = Ancestral polymorphism is C, Derived polymorphism is F
  VARIANT 80: note = Ancestral polymorphism is Q, Derived polymorphism is R
  VARIANT 83: note = Ancestral polymorphism is M, Derived polymorphism is V
  VARIANT 86: note = Ancestral polymorphism is G, Derived polymorphism is E
  VARIANT 89: note = Ancestral polymorphism is E, Derived polymorphism is K
  VARIANT 92: note = Ancestral polymorphism is A, Derived polymorphism is V
  VARIANT 96: note = Ancestral polymorphism is V, Derived polymorphism is D
  VARIANT 101: note = Ancestral polymorphism is R, Derived polymorphism is W
  VARIANT 108: note = Ancestral polymorphism is G, Derived polymorphism is S
  VARIANT 115: note = Ancestral polymorphism is E, Derived polymorphism is K
  VARIANT 125: note = Ancestral polymorphism is T, Derived polymorphism is I
MIEVAKVGKGLSKDDKAQKIALQHWLEAIDPCHRYDHNLHLYYDILCASSSCEPFFYWLDVGKGRDLHHQKCPRSKLNSQLIMYLGPNERAAYEVVVEEGRLLYKQSGDLVNTNEESKWIFVLSTSKSLYVRLQSECSVQLAF

SEQ ID NO: 9732 - protein, 125 aa, Zea mays
  VARIANT 49: note = Ancestral polymorphism is W, Derived polymorphism is R
  VARIANT 45: note = Ancestral polymorphism is F, Derived polymorphism is I
  VARIANT 42: note = Ancestral polymorphism is A, Derived polymorphism is V
MTRRSSKATLSRVSAMHLLVHDLLEVVCMNVPRIGMGVGVEAGKFHQHWRHDCHSYPVHTASSLSFVVPLAVLIPEHGCQGEQSKANLPCWSSHRSQGAAVTGPASQDGAIIGPPSSPRQICEVE

SEQ ID NO: 9733 - protein, 138 aa, Zea mays
  VARIANT 83..138: note = Derived polymorphism lacks residues 83 to 138
  VARIANT 54..138: note = Derived polymorphism lacks residues 54 to 138
  VARIANT 51..138: note = Derived polymorphism lacks residues 51 to 138
  VARIANT 47: note = Ancestral polymorphism is S, Derived polymorphism is F
MRLRRHKMGVDDFELLTIIGRGAFGEVRLCREKTTSNVYAMKKLKKSEMLRRGQLLSKKMVDTAKESIGGSATCLELYGKMEEVFIKMDSEENTDSVDRELKNLNDAVLQEGNEEGRLAREFDSRKHIEAHLPVRVNE

SEQ ID NO: 9734 - protein, 263 aa, Zea mays
  VARIANT 1: note = Ancestral polymorphism is M, Derived polymorphism is V
MYPQMVYHADVRAREKELAAAETETETMGCCSCAPLGRMISRCIIKRNVGRERRMRYDERTGMDYAMAYAPPQTCYVRPTDARTVTLATTNAHADHPDPHPQRAHAATTMPLEPAGGAPAQRAGMQPPRKPKKKKKKKQVRFTPPGPPVPARGDDAAAAHDTATAASGGGAYHHGPPPDPSSYSPAPPPASHGYGYGYGQYAPSPLPRWEMLGTPRRHEYFSSEYRWYYPTPVREGIYSFATDANGRLTTIFSEENPNACTIV

SEQ ID NO: 9735 - protein, 91 aa, Zea mays
  VARIANT 42: note = Ancestral polymorphism is G, Derived polymorphism is R
MALPATDDDIGDEHLFDGVRFMLYRSEMVRRGGSDAGPSGNGCAHVIVWNRIYDDPTCVAERAQGKKVVSGLWVEDSLDRGVLADADRVGF

SEQ ID NO: 9736 - protein, 74 aa, Zea mays
  VARIANT 63: note = Ancestral polymorphism is G, Derived polymorphism is V
MLLVAQRVNKKRNRCLQEEMQTELARREKATNIKPDHDIDVYIKKLGLEVCADTLVGNEMMRGISGGQRKRVTI

SEQ ID NO: 9737 - protein, 300 aa, Zea mays
  VARIANT 217: note = Ancestral polymorphism is P, Derived polymorphism is H
MCSIFPSHSVIGVSSQAQAAAAGGGGGFQSPESRASSMSGGGSLPSPSGPACSRSWSISEDSLRRYVSYASESCIQELLAASSDSGRGGDDDGWKVLVYHNGVEISKRRTGPAHVFRSRWLLQDVSPEQFVAAASAVDAAKQWESDQLVESSYIRELGDDLSIIHLKFGDASSSTRRPARRRDLVVYERRQAMDDGTLVVAVASLPKEIAAGLLPPPAATGKGGGGSVVGRSLLLQSGWVVERLDGDAGSCVVTYVVQLDPAAGWLPRCIVSRLNSKLVMIIAKLRRIAQATVPAAAAEV

SEQ ID NO: 9738 - protein, 181 aa, Zea mays
  VARIANT 65: note = Ancestral polymorphism is L, Derived polymorphism is I
  VARIANT 58: note = Ancestral polymorphism is G, Derived polymorphism is D
  VARIANT 39: note = Ancestral polymorphism is R, Derived polymorphism is Q
MDTMRGALERAKMLVGMEVDEESALPPPEEQSFFDDINRHCTLNTTQAKALWFRDMLGCRTDVHILVNACLLQSSEIWGSIHPWQFDGPWKNHLFGSTAFLIGPKRQFDMMLDSVRIYATAIYIASIIIALFCAIYVRSKLLTLVAIILEFGALIWYSLSYIPFARSIVSKVMTSCFDTDF

SEQ ID NO: 9739 - protein, 126 aa, Zea mays
  VARIANT 124: note = Ancestral polymorphism is T, Derived polymorphism is I
  VARIANT 120: note = Ancestral polymorphism is A, Derived polymorphism is T
  VARIANT 96: note = Ancestral polymorphism is A, Derived polymorphism is T
  VARIANT 69: note = Ancestral polymorphism is E, Derived polymorphism is K
  VARIANT 57: note = Ancestral polymorphism is G, Derived polymorphism is D
  VARIANT 51: note = Ancestral polymorphism is D, Derived polymorphism is N
  VARIANT 50: note = Ancestral polymorphism is L, Derived polymorphism is P
  VARIANT 42: note = Ancestral polymorphism is G, Derived polymorphism is S
  VARIANT 35: note = Ancestral polymorphism is L, Derived polymorphism is F
  VARIANT 29: note = Ancestral polymorphism is S, Derived polymorphism is N
  VARIANT 24: note = Ancestral polymorphism is R, Derived polymorphism is C
  VARIANT 20: note = Ancestral polymorphism is L, Derived polymorphism is Q
  VARIANT 15: note = Ancestral polymorphism is G, Derived polymorphism is E
  VARIANT 13..126: note = Derived polymorphism lacks residues 13 to 126
  VARIANT 12: note = Ancestral polymorphism is D, Derived polymorphism is G
  VARIANT 9: note = Ancestral polymorphism is A, Derived polymorphism is T
  VARIANT 5: note = Ancestral polymorphism is A, Derived polymorphism is E
  VARIANT 3: note = Ancestral polymorphism is A, Derived polymorphism is V
MPAVAAAPAAADQCGRHHALILRCPGPSSNRITSLFHALALGSGGTLQGPDLLLEGGLLLVRGLQLVPEPCTPAHFLLMASLLRGEETLEALDLAAERGGLALIGGSSLLDGSDLLRAAATRWTWI

SEQ ID NO: 9740 - protein, 178 aa, Zea mays
  VARIANT 4: note = Ancestral polymorphism is Y, Derived polymorphism is C
  VARIANT 15: note = Ancestral polymorphism is R, Derived polymorphism is C
  VARIANT 21..178: note = Derived polymorphism lacks residues 21 to 178
  VARIANT 38: note = Ancestral polymorphism is D, Derived polymorphism is Y
  VARIANT 107: note = Ancestral polymorphism is P, Derived polymorphism is L
MYHYFDGSEIYNAIRVFIACYVWMTGFGNFSYYYIKKDFSIARFAQDNLLFLAHVAVVLVQDWYRPHSTYGNLLDFKFGSKVQLTCRSPPSFRPASPWRPPPLLLIPCASFKRKANLPTTSSSTPIYNIHCSSGDLAISFQCGVLWWNVSINGVCISDRRMAWGDNHHHHPATCLSQV

SEQ ID NO: 9741 - protein, 56 aa, Zea mays
  VARIANT 38: note = Ancestral polymorphism is D, Derived polymorphism is N
  VARIANT 32: note = Ancestral polymorphism is P, Derived polymorphism is L
  VARIANT 17: note = Ancestral polymorphism is G, Derived polymorphism is S
  VARIANT 4: note = Ancestral polymorphism is R, Derived polymorphism is M
MHYRALLLDFAGSLMSGVVAKSINVLFTYVKPAIKDNDSLIQKRAYKVLSMLLKVC

SEQ ID NO: 9742 - protein, 187 aa, Zea mays
  VARIANT 50..187: note = Derived polymorphism lacks residues 50 to 187
MAGATTPASGALVRLCLPSLLLFLYRCCRCEAVEMERTLAMIKPDGLSGKYTEAIKEVILDSGFHIVKETEVQLDAERASVFYAEHSQRSFFDSLVKYITSGPVLAMVLERPDAVAQWRTLIGPTDAKKAKTSHPNSTLCHFSIRAMCGLDSEKNCVHGSDSPESADREISFFFGEAESVTVEHDEL

SEQ ID NO: 9743 - protein, 239 aa, Zea mays
  VARIANT 23: note = Ancestral polymorphism is R, Derived polymorphism is W
  VARIANT 25..239: note = Derived polymorphism lacks residues 25 to 239
  VARIANT 60..239: note = Derived polymorphism lacks residues 60 to 239
  VARIANT 61: note = Ancestral polymorphism is A, Derived polymorphism is V
  VARIANT 73..239: note = Derived polymorphism lacks residues 73 to 239
  VARIANT 108..239: note = Derived polymorphism lacks residues 108 to 239
  VARIANT 170: note = Ancestral polymorphism is S, Derived polymorphism is L
  VARIANT 177: note = Ancestral polymorphism is S, Derived polymorphism is F
MQSTTFTGRETTSFSFPKFNQNRLQLSTNLTFTGNSTVSQGALQVTPNSGNNFSTYLANQAGRVFYSTPFVLWAAAANSNASSVVADGRRVASFSNGFAAVELDTMKQPYDPDGNHIGLDVNDVRSSSATCPLAALGIELAPGDTGASDGSNFVWVDYDGAARRLQAYISPNGTKPSAAALNASLDLSAVVAARDAYFGFSASTGTDDYQLNCVKMWNMTVEVLHDDDDDDRLPKKLSG

SEQ ID NO: 9744 - protein, 95 aa, Zea mays
  VARIANT 88: note = Ancestral polymorphism is A, Derived polymorphism is T
  VARIANT 78: note = Ancestral polymorphism is D, Derived polymorphism is Y
  VARIANT 68: note = Ancestral polymorphism is S, Derived polymorphism is C
  VARIANT 24: note = Ancestral polymorphism is R, Derived polymorphism is W
  VARIANT 2: note = Ancestral polymorphism is S, Derived polymorphism is L
MSRMSSPRRLHRSPLPHLGIGGLRHMPSSPSAPAHPSLNAICLPAHSSREGIRASAKVVETWDAPDASCAIVAASLADRATDPVLAVARKNGVVT

SEQ ID NO: 9745 - protein, 109 aa, Zea mays
  VARIANT 43: note = Ancestral polymorphism is G, Derived polymorphism is E
  VARIANT 34: note = Ancestral polymorphism is G, Derived polymorphism is A
  VARIANT 23: note = Ancestral polymorphism is R, Derived polymorphism is P
  VARIANT 14: note = Ancestral polymorphism is R, Derived polymorphism is L
MPGAPCNVEPTGRRLRWSGLGRRRRRRLPVARLGGERAGRGRGVLRRLRLRWLTARWLRRAARRLAAIYMAALAGPPAPTGASSSTCPPWIGLEPCFATPFVSCTRPCW

SEQ ID NO: 9746 - protein, 193 aa, Zea mays
  VARIANT 93..193: note = Derived polymorphism lacks residues 93 to 193
  VARIANT 64..193: note = Derived polymorphism lacks residues 64 to 193
  VARIANT 23: note = Ancestral polymorphism is C, Derived polymorphism is S
MSASPSIPILKSRGRLDLDPSSCSTTPADASPIPMAPRVVGALLTATALLAPLLLSSQLPSLPRAAAAGSPAPAPAPAPASHHHLPPPRRVPSPANNGAHARQPPPPPRHQRDGAARHAPPPTVRPSAWWRQLNFGERFGVALAAVAAAMQVALVALLLVLRARQLRRAAAAGKAEEEEQEAASAAASRPAPA

SEQ ID NO: 9747 - protein, 454 aa, Zea mays
  VARIANT 58: note = Ancestral polymorphism is S, Derived polymorphism is R
MEKEGQEIAASDGGKGPAEQHAIDVGHVVQHGDGKGEDDIEKERVAVVEDVQTKKKSSRRVAALDAFRGLTIVLMILVDDAGGAYERMDHSPWNGCTLADFVMPFFLFIVGVAIAFALKRVPNIGAAVKKITTRTLKMLFWGVLLQVLLFTDHLAEMTFVTTVFDGIYLGMYGEGGYSHAPDDLAYGVDMKKIRWCGILQRIALVYFFVALIEALTVKVRPTTVRSGPYAIFDAYRWQWLGGLVAFVVYMVTTFSLYVPDWSFVYHNEGDVNDGKQFTVKCGVRASLEQACNAVGYVDRQTHKERLKHWLLTGFSLLVLGIILHFTNAIPINKQLYSFSYVCFTGGAAGIVLSAFYILIDVWGLRTPFLFLEWIGMNAMLVFVLGAQGILAAFVNGWYYGSPDNTLVNWIVKHVFVNVWHSQRLGTLLYVMFCEIVFWGVAAGVLHKLGIYWKL

SEQ ID NO: 9748 - protein, 332 aa, Zea mays
  VARIANT 90: note = Ancestral polymorphism is G, Derived polymorphism is D
MASSKPLFPFPVPAPDPSDEVVREFGPLLRVYKSGRIERPLVAPPVEPGHDAATGVQSKDVHLGSYSARLYLPPVADAGAKLPVVVFVHGGGFVAESAASPNYHLFLNRLAAACPALAVSVDYRLAPEHPLPAGYDDCLAALKWVLSAADPWVAAHGDLARVFVAGDSAGGNVCHYLAIHPDVVQAQQQGCPPPLKGAVLIHPWFWGSEAVGEEPRDPAVRTMGAGLWFFACPDANSMEDPRMNPMAPAAPGLHTLACERVMVCTAEGDFLRWRGRAYAEAVAAARGGRLGQAAGVELLETMGEGHVFFLFKPDCDKAKEMLDKMAAFINAP

SEQ ID NO: 9749 - protein, 554 aa, Zea mays
  VARIANT 80..554: note = Derived polymorphism lacks residues 80 to 554
MASIPPPSSSVAALTRQPAQFLKWCSVSKETKASVCSFLATNSNSTRVKSVGLRVALSFKNDGGYPADGFSGNGNTLLPKSTSVRGEDHPVADPVLPMDSMMTPEILSANLALVMDKFSDDDTDTELDLDSPTEGFASIPDAIEDVRQGKLVIVVDDESRENEGDLIMAASLVTPEAMAFIVRHGTGIVCVSMKEDDLERLSLPLMVTTKENEEKLCTAFTVTVDAKEGTTTGVSAKDRAKTVMTLASPDSRPEDFNRPGHIFPLKYREGGVLKRAGHTEASVDLAMLAGLPPVAVLCEIVDDADGSMARLPKLRVFAERENLKIISIADLIRYRRKRDRLVERASVARLPSQWGNGHGYCYRSAIDGIEHLAMVKGDIGDGQDILVRVHSECLTGDIFRSARCDCGDQLAMAIEMIEKAGRGVIVYLRGHEGRGIGLGHKLRAYNLQDDGRDTVEANEELGLPVDSREYGIGAQILRDLGVRSMKLMTNSPAKYSGLKGYGLSIAGRVPLVTPITSENRKYLETKRTKMGHVYGLANAQVNQPSGSQSTEEKH

SEQ ID NO: 9750 - protein, 197 aa, Zea mays
  VARIANT 118: note = Ancestral polymorphism is T, Derived polymorphism is I
  VARIANT 95..197: note = Derived polymorphism lacks residues 95 to 197
  VARIANT 78: note = Ancestral polymorphism is D, Derived polymorphism is N
  VARIANT 72: note = Ancestral polymorphism is M, Derived polymorphism is T
  VARIANT 63: note = Ancestral polymorphism is G, Derived polymorphism is W
  VARIANT 54..197: note = Derived polymorphism lacks residues 54 to 197
  VARIANT 38..197: note = Derived polymorphism lacks residues 38 to 197
MESFKRKKEEQCSILSSCNLQMFHILVDVYNSLYITFQALANMLKYSLDENDKEDGVNIEVIGDNKIASPSMPPTSVDEFQIIILAFAVSTLIWQEYKKPGLEDIKEVELFIWSRHLTRGFKLYKVRSVQFGQKGIPYLNTYDGHTIRYPDPLIKANDTIKIDLETNKIMDFIKLYLPFHGLHQVIYLVRLNVSTNS

SEQ ID NO: 9751 - protein, 707 aa, Zea mays
  VARIANT 272: note = Ancestral polymorphism is Q, Derived polymorphism is L
MTASQSSMSGGGEPGVRTVVWFRRDLRVEDNPALAAAARTAGEVVPAYVWSPEEDGPYYPGRVSRWWLSQSLKHLDASLRRLGACRLVTRRSSDAVVALIDLVRSTGATHLFFNRLYDPLSLVRDHRVKEQLSAEGITVQSFNADLLYEPWEVLDDDGFPFTMFAPFWNRCLCMPDPAAPLLPPKRINSGDLSRCPWDELIFEDESEKGSNALLARAWSPGWQNADKALTAFLDGPLVDYSANHKKADSASTSLLSPYLHFGELSVRKVFHQVRMKQLMWSNDGDRAGEESCTLFLRAIGLREYSRYLTFNHPCSLEKPLLSHLRFFPWVVDEVHFKVWRQGRTGYPLVDAGMRELWATGWVHDRIRVVVSSFFVKVLQLPWRWGMKYFWDTLLDADLESDALGWQYISGSLPDGRELDRIDNPQFEGYKFDPHGEYVRRWLPELARLPTEWIHHPWDAPESVLQAAGVELGSNYPRPIVELDAANSRLQGALSEMWELEAASCAAIENGMEEGLGDSTDEPPIDFPQELRMEVDRQPAQPAIIHTPVVAGWRREDQRVPSMTSSLIRAETELTADFGNTSEDSRPEVPSNIHLQARAEREETVDGATGNTVRVNGNQQQQNLQNNMHRVLGIAPSISEASSSWTGREGGLVPVWSPPAASVHSDPYTADEADISSRSYLDRHQQSNTMMNWSQLSQSLTTGWEVDN

SEQ ID NO: 9752 - protein, 154 aa, Zea mays
  VARIANT 6: note = Ancestral polymorphism is R, Derived polymorphism is T
  VARIANT 69: note = Ancestral polymorphism is A, Derived polymorphism is D
MATCITKVTSEVFGVTKGSRGEPKDTWWWTEDVQKEIKEKKEWYRSLFHDRSTINIERYKVAKKTAKRAMSEAKGRAYDDLYQRLSTKEEEKDVYKMARIRERKMRDLNQVKCIKDEMDQLLVKGQGIKQSIQESEVKEALKRMTRRWAQMVSQ

SEQ ID NO: 9753 - protein, 118 aa, Zea mays
  VARIANT 31: note = Ancestral polymorphism is R, Derived polymorphism is Q
  VARIANT 60: note = Ancestral polymorphism is R, Derived polymorphism is C
MPHELPARAARVAASGAPPRRASEPGSALPRRGSEPGGAPPRRFVLSCEASPAARPLVPRLPRRRSPRRGSEPGGPPSATLPGVDPGPRVPRQPTPAPLPQQSSPLPAPLLLVLVSGQ

SEQ ID NO: 9754 - protein, 427 aa, Zea mays
  VARIANT 306: note = Ancestral polymorphism is S, Derived polymorphism is Y
MLLRVGRRAALLLAATAAFSRLRDPDTAVYVSASPPQPPRQAFSSSAAAEGLRSGTCLFSPYLLPYPFQGFPVLNTFTSASVSPANNGDQGSDGSSGDPRCCPACLGRNSIAKAASAVGPAVVNISSMHDMHGWVNEQSIGSGTIIDPDGTILTCAHVVADFQSTKAIVRRKVSVTLQDGREFEGVVLNADRLSDIAVVKIKSMTPLPAARLGSSSQLQPGDWVVALGCPLSLQNTVTAGIVSCVDRKSSDLGLGGLRREYLQTDCAINQGNSGGPLVNLDGEIIGVNVMKVRNADGLSFAVPIDSVIKIVDNFNKNGRVVRPWLGLKMLDLNPMIIAQLKEKSSTFPDVRKGVLVPMVTPASPAEQAGFRPGDVVVEFGGKPVESIKEIIDIMGDKVGIPFKVLVKRANNVTVTLTVIPEEADASR

SEQ ID NO: 9755 - protein, 85 aa, Zea mays
  VARIANT 51: note = Ancestral polymorphism is R, Derived polymorphism is T
MASMMGGDLVEAYVLKNACKEKLRRMEAAAAAADDKTSKQGRLAEKKVSGRGRRLLGLLKKKVHPKAAASSSPPESGAEEAASSS

SEQ ID NO: 9756 - protein, 332 aa, Zea mays
  VARIANT 96: note = Ancestral polymorphism is R, Derived polymorphism is G
  VARIANT 42: note = Ancestral polymorphism is G, Derived polymorphism is V
MVAAEDPEHFFAASPPLRDAAVVAASLQEFVARNSHASSDGVGRRRIVCVTSGGTTVPLEQRCVRYIDNFSSGHRGAASTEYFLKAGYAVIFVHRRGSCQPFSRFLPDDSFLHFFDVTTDSKVQVAESQATVVKRAIGDYRKATEGGSLLKLPFTTIFEYLQLLKMVATSMSCVGLHGMFYLAAAVSDFYVPWDSMAKHKIQSAGGPLDMKLSQVPKMLPVLRNHWAPLAFCVSFKLETDPDILVQKAETALSKYRMDVVVANLLATYKEEVVIISNGKSNTIRRCSKGEDLEEHIIKLLEKSHSKFIYSSTEGCSKNDYEKLIPLGIKSLA

SEQ ID NO: 9757 - protein, 51 aa, Zea mays
  VARIANT 7: note = Ancestral polymorphism is L, Derived polymorphism is M
MVLVKELEMLHWKRYMSLGNSGIMQPTHTLLTLTSFSPIFYCDVSQLDFSY

SEQ ID NO: 9758 - protein, 245 aa, Zea mays
  VARIANT 134: note = Ancestral polymorphism is M, Derived polymorphism is K
  VARIANT 127: note = Ancestral polymorphism is G, Derived polymorphism is E
  VARIANT 107: note = Ancestral polymorphism is G, Derived polymorphism is R
  VARIANT 105: note = Ancestral polymorphism is P, Derived polymorphism is S
  VARIANT 102..245: note = Derived polymorphism lacks residues 102 to 245
  VARIANT 5: note = Ancestral polymorphism is K, Derived polymorphism is N
MLRTKLVGLVVKLLLLIAATAVLIIWLIIGIPGSIFAGLVYGFLAPIMATFDAIAEGKEKPFVHCFVDGTWSTITGSCTVVRDVKDLLFHSYFSLMDDLRLQKPPDGEPYEIRLLDIPGALIAAAFEFLLDGIMFTLIAFYKCPVMLFKGWKRLIQDMIGREGPFLETACVPFAGLAILLWPFAVVGAVLASVLSSVPLGAYAAVVAYQESSLILGIAYVFSLVSIFDEYTNDVLDMAPGSCFPR

SEQ ID NO: 9759 - protein, 201 aa, Zea mays
  VARIANT 24: note = Ancestral polymorphism is T, Derived polymorphism is I
  VARIANT 88: note = Ancestral polymorphism is D, Derived polymorphism is Y
  VARIANT 144..201: note = Derived polymorphism lacks residues 144 to 201
  VARIANT 155: note = Ancestral polymorphism is Y, Derived polymorphism is C
MIKSALKAEQRTIRSILDRGKTTTTLGKVNNDNLSRLLTEYIGMDNMLALVCKTYDGVKGLDKYDKDDIIDKTSGVHGLGRAVGKFLYGRITVFCLENLSKNLKVKFVVTTDVSSLPENVVEMEEQVKRKNWQKEMVLEDMKREEDLLKQVKELYRKQKQELMDYVTQPAVTQTSRDSPATHSPATPGSNPFGAKLSNKWW

SEQ ID NO: 9760 - protein, 288 aa, Zea mays
  VARIANT 47: note = Ancestral polymorphism is G, Derived polymorphism is A
MDSMSFGNALVQIPGRMGRYSPAYSPPRRGHGGRGRSPPPRRGYGGGRGDHGSVSLLVRNIPLRCRPEELRVPFERFGPVRDVYLPRDYHTGEPRGFGFVEFVDAYDASEAQYHMNRQMFAGREITVVLAADTRKRPEDMRRRTGPRGYSGHEGRRPNRHGNLSAGRSRSRSYSRSRSPRPRGRGRSQSYSPAPKRRDDYSASPPRAKEEHPRSSKQPKENNRDRRRSYTPDDINDRRGADNGRDERKRSPAGEEDEEPRRGHHRSPRPASMSPPGSRSRSASPAISD

SEQ ID NO: 9761 - protein, 622 aa, Zea mays
  VARIANT 119..622: note = Derived polymorphism lacks residues 119 to 622
  VARIANT 164: note = Ancestral polymorphism is A, Derived polymorphism is V
  VARIANT 254..622: note = Derived polymorphism lacks residues 254 to 622
  VARIANT 269..622: note = Derived polymorphism lacks residues 269 to 622
  VARIANT 354: note = Ancestral polymorphism is R, Derived polymorphism is W
MEVDRKKNLQKIGSKGKEVQSKNPRREEPLASSEVDMDEPDAPESGDMIVDGNNGSSRESPLQPMDSKNSKGCAVKKPTSVSSDFGEELDLDLGGEKSGTQQERKLSRQDRVELCRSFQLAVSSHDWESAEGLVGMADAQGLNDVLCVAVDAIWFLSDRDELLAIVGLIKRVVSEGAKDFTRAALRTSFLASCVSACRGRSTSLADAVSFMGQKLHERLQESQGDEVLKAEASAKVHRFTEWALKCIGLHSRVRENRGKGNHDTVIEVQLQLSAFKIFLDLADNELTGKDFTEAFDAACFPLTLFSTTFDQGWASGISAAAVQGLLELLVEGGADNVNQCFLEAARYGSTELVRILLQVAQRNSLDIDVDLALGFAAHYGKIETMGCLVEEGNAIGFLGPLMRAAERGCLQVVEWFVNHGCREMELCLALTAATSNSQIAVAAYLLPLVPQHVLAPLSIEIIKAAGERTTGSLQGVDFLLRSDFLNDPAATYAVADSIARCTDEAVDAKLRSFMNEHWSEAAFCAGFESAQQHFVNFMRIMERGESPIRLGDLPLELVIAMAYLPLYKECMNSNGRLLPQRLRGQLVEAASRLEDRQVERDSQSRELLAILEHHIPRFMIQT

SEQ ID NO: 9762 - protein, 83 aa, Zea mays
  VARIANT 1: note = Ancestral polymorphism is M, Derived polymorphism is I
  VARIANT 2: note = Ancestral polymorphism is A, Derived polymorphism is V
  VARIANT 5: note = Ancestral polymorphism is P, Derived polymorphism is S
  VARIANT 9: note = Ancestral polymorphism is L, Derived polymorphism is P
  VARIANT 14: note = Ancestral polymorphism is V, Derived polymorphism is M
  VARIANT 17: note = Ancestral polymorphism is L, Derived polymorphism is M
  VARIANT 28: note = Ancestral polymorphism is L, Derived polymorphism is Q
  VARIANT 31: note = Ancestral polymorphism is R, Derived polymorphism is H
  VARIANT 32: note = Ancestral polymorphism is E, Derived polymorphism is G
  VARIANT 63: note = Ancestral polymorphism is P, Derived polymorphism is Q
MAEEPFKLLIVDSVIALFRVDFSGRGELEEREQKLAHMLSRLTKIAEEFNVEVYITNQVIADPGGGMFITDLGGGIFLFIFGR

SEQ ID NO: 9763 - protein, 151 aa, Zea mays
  VARIANT 38: note = Ancestral polymorphism is P, Derived polymorphism is L
  VARIANT 39: note = Ancestral polymorphism is G, Derived polymorphism is S
  VARIANT 41: note = Ancestral polymorphism is V, Derived polymorphism is F
  VARIANT 47: note = Ancestral polymorphism is D, Derived polymorphism is G
  VARIANT 51: note = Ancestral polymorphism is R, Derived polymorphism is H
  VARIANT 53: note = Ancestral polymorphism is G, Derived polymorphism is E
  VARIANT 66: note = Ancestral polymorphism is H, Derived polymorphism is L
  VARIANT 67: note = Ancestral polymorphism is G, Derived polymorphism is R
  VARIANT 70: note = Ancestral polymorphism is R, Derived polymorphism is H
  VARIANT 92: note = Ancestral polymorphism is S, Derived polymorphism is F
  VARIANT 100: note = Ancestral polymorphism is M, Derived polymorphism is L
  VARIANT 109: note = Ancestral polymorphism is G, Derived polymorphism is S
  VARIANT 112..151: note = Derived polymorphism lacks residues 112 to 151
  VARIANT 115: note = Ancestral polymorphism is V, Derived polymorphism is M
  VARIANT 118: note = Ancestral polymorphism is E, Derived polymorphism is K
  VARIANT 128: note = Ancestral polymorphism is A, Derived polymorphism is T
  VARIANT 129: note = Ancestral polymorphism is D, Derived polymorphism is N
  VARIANT 133: note = Ancestral polymorphism is R, Derived polymorphism is Q
  VARIANT 140: note = Ancestral polymorphism is D, Derived polymorphism is G
MQAVFLSPDLVLLEPGPETGHGALVGVPREDGVAAVAPGVFDELEDDLRLRDGPALVDQHGDFLLHGVVRQQLGALAPEILLHCEGCQKNDSECSLRYIMVIKVSDPTGEAWVSVFNEHAEKIISCNADELDRIRKEEGDDNYVLKLKEVT

SEQ ID NO: 9764 - protein, 188 aa, Zea mays
  VARIANT 160: note = Ancestral polymorphism is T, Derived polymorphism is M
  VARIANT 151: note = Ancestral polymorphism is G, Derived polymorphism is S
  VARIANT 146: note = Ancestral polymorphism is A, Derived polymorphism is T
  VARIANT 143: note = Ancestral polymorphism is A, Derived polymorphism is T
  VARIANT 141: note = Ancestral polymorphism is R, Derived polymorphism is W
  VARIANT 139: note = Ancestral polymorphism is E, Derived polymorphism is K
  VARIANT 135: note = Ancestral polymorphism is G, Derived polymorphism is R
  VARIANT 127: note = Ancestral polymorphism is R, Derived polymorphism is C
  VARIANT 122: note = Ancestral polymorphism is P, Derived polymorphism is L
  VARIANT 121: note = Ancestral polymorphism is C, Derived polymorphism is Y
  VARIANT 118: note = Ancestral polymorphism is A, Derived polymorphism is V
  VARIANT 109..188: note = Derived polymorphism lacks residues 109 to 188
  VARIANT 97: note = Ancestral polymorphism is E, Derived polymorphism is K
  VARIANT 88: note = Ancestral polymorphism is G, Derived polymorphism is E
  VARIANT 86: note = Ancestral polymorphism is G, Derived polymorphism is R
  VARIANT 80: note = Ancestral polymorphism is L, Derived polymorphism is M
  VARIANT 78: note = Ancestral polymorphism is T, Derived polymorphism is M
  VARIANT 69: note = Ancestral polymorphism is V, Derived polymorphism is I
  VARIANT 58: note = Ancestral polymorphism is G, Derived polymorphism is D
  VARIANT 53: note = Ancestral polymorphism is L, Derived polymorphism is H
  VARIANT 50: note = Ancestral polymorphism is G, Derived polymorphism is R
  VARIANT 49: note = Ancestral polymorphism is A, Derived polymorphism is V
  VARIANT 41: note = Ancestral polymorphism is R, Derived polymorphism is W
  VARIANT 30: note = Ancestral polymorphism is L, Derived polymorphism is P
  VARIANT 24: note = Ancestral polymorphism is A, Derived polymorphism is T
  VARIANT 14: note = Ancestral polymorphism is P, Derived polymorphism is S
  VARIANT 9: note = Ancestral polymorphism is R, Derived polymorphism is M
  VARIANT 8: note = Ancestral polymorphism is P, Derived polymorphism is L
  VARIANT 2: note = Ancestral polymorphism is A, Derived polymorphism is V
  VARIANT 1: note = Ancestral polymorphism is M, Derived polymorphism is I
MAVDTEFLRMVYWPAGLAYKLEPAERYRLLRCNVDTLHPVRLGLMLFDARCVLPGGHDGATRLGRTGVVMSRGGYDLTYLVKMMFGTGFGMPGSATEFDAVVKAVLHRWRVFGVGEMARLCPREHLRRGLDSVAGQLNEARFAANAARQASYDSLWTCYTFMKLREIYFDDDGKLAGVDGILAEVTTF

SEQ ID NO: 9765 - protein, 121 aa, Zea mays
  VARIANT 7: note = Ancestral polymorphism is V, Derived polymorphism is L
MFPSKQVAALLVLVVVSSPSPSLLVSGKPSVSKEQKDKILEECDRFIRLGYPIYVVSRHSPCCDAVRAVENRDMDYVVLLLTNDEKDKYSISKILALHGLCELPPASLHHHQQVMGRRALM

SEQ ID NO: 9766 - protein, 364 aa, Zea mays
  VARIANT 311: note = Ancestral polymorphism is K, Derived polymorphism is N
  VARIANT 40: note = Ancestral polymorphism is R, Derived polymorphism is Q
MELSPNNSTDQSLLDAQLELWHTTFAFMKSMALKSAIHLRIADAIHLHGGAASLSQILSKVHLHPSRVSSLRRLMRVLTTTNVFGTQQPAGGSDDDSEPVYTLTPVSRLLIASQSSQLAQTPLAAMVLDPTIVSPFFELAAWFQHELPDPCIFKHTHGRGIWELTKDDATFDALVNDGLASDSQLIVDVAIKQSAEVFQGISSLVDVGGGIGAAAQAISKAFPHVKCSVLDLAHVVAKAPTHTDVQFIAGDMFESIPPADAVLLKSVLHDWDHDDCVKILKNCKKAIPPREAGGKVIIINMVVGAGPSDMKHKEMQAIFDVYIMFINGMERDEQEWSKIFSEAGYSDYRIIPVLGVRSIIEVYP

SEQ ID NO: 9767 - protein, 201 aa, Zea mays
  VARIANT 182: note = Ancestral polymorphism is R, Derived polymorphism is W
  VARIANT 177..201: note = Derived polymorphism lacks residues 177 to 201
  VARIANT 64: note = Ancestral polymorphism is Q, Derived polymorphism is R
  VARIANT 13: note = Ancestral polymorphism is R, Derived polymorphism is C
  VARIANT 12..201: note = Derived polymorphism lacks residues 12 to 201
  VARIANT 8: note = Ancestral polymorphism is P, Derived polymorphism is L
  VARIANT 4..201: note = Derived polymorphism lacks residues 4 to 201
MTRQFALPSIAQRHILAGLASAVGGLSAPYERASRIHERHVVNWLWAVGYHLFGPFSNSSQISQILQDVALVMLSTTFFYFYDMYNEELQFMLKSMLLFAKIRDTSEFVQSFASEHLKTPLGELVKGNKNKFTTELWVEKFYKKVTNLPEPFPHDLVEKLEEYLDKLEGQPVDLSSLLYDHRLVDAYQNSTDILQSTIFTQ

SEQ ID NO: 9768 - protein, 76 aa, Zea mays
  VARIANT 64: note = Ancestral polymorphism is S, Derived polymorphism is G
MSCNCGSSCGCGSSCKCGKKYPDLEETSTAAQATVVLGVAPEKKAAPEFVEAAAESGEAAHGCSCGGNCKCDPCNC

SEQ ID NO: 9769 - protein, 590 aa, Zea mays
  VARIANT 463: note = Ancestral polymorphism is G, Derived polymorphism is C
MWATKKLATTALLVLTSLLAARYLIEHTASSGMSSRYQILHLVHHLEWLKSPADAKETSPGVVITTAASSNTSSEPEDSASKNSSAAAQVFPWLDTWSQMTRLADIASGLPHATEAVDDGRTAWENLTASVHVHQRQRRRLCPYSVRDTPSNKPESGGGGGAFTVGVPCGLTVGSSATLIGTPGLLSGNFWIELVGTTTALPAGETETPAVPLHYGVRLTGDDGATRDRPPVLVQNAFSASSGWGAEARCSCTPGNAAAEGAPPAAVVDGLERCDAMADREEEEDKKHKHLHGGCFPFKQGYLAIATLRVGWEGFHMTVDGKHVTSFAYRAGLEPWYVTQVRISGDFKLASAILSGLPTSEDLENPNLESLKAPPVPNDRDVDLLIGVFSTANNFKRRMAIRRTWMQYDAVRQGAVAVRFFVGLTSVLPAKYLMKTDDDAFVRVDEIHSTVKQLNVSRGLLYGRINSDSGPHRNPESKWYISQEEWPEDKYPPWAHGPGYVVSQDIARTINNWYKASRLKMFKLEDVAMGIWVNEMKKGGLPVKYETDKRINIDGCHDGYIIAHYQEPRHLLCLWEKLLTTHQAECCSTK

SEQ ID NO: 9770 - protein, 279 aa, Zea mays
  VARIANT 88: note = Ancestral polymorphism is S, Derived polymorphism is Y
MAMLARARLPPRTHLPPITTDGGGAGVEFRRKIHFLSSELHVDPFPLLAINPMLRSAPLPLLRDSLRLLTSHGLTTLDAARVFSAFPSLLTSPPEEPLRFLSADAPLPPPLLRSAVVRSPRLLAASVPDTLRPALLFFRRRVSLRREPLPLAAALLLAFNVERTLLPKLLFLRDATGLPDSAVCAVLRRAPAILSYGIETNLRPKLEFLAERMQRDPAAELAEFPHYFAFSLEGRIKPRHEALRERGIEMPLKDMLTSNDDDFRERLVNVTLSDTKARL

SEQ ID NO: 9771 - protein, 216 aa, Zea mays
  VARIANT 173: note = Ancestral polymorphism is R, Derived polymorphism is G
  VARIANT 153: note = Ancestral polymorphism is G, Derived polymorphism is D
  VARIANT 10: note = Ancestral polymorphism is L, Derived polymorphism is R
MATVARHLVLCSSATSSSSTPSQRRRGPLPPDATAGTDRQQPTTRRLAVAASTALAATATAALSARRPAPPPPAMAAEAAAVPAPATPPGPVPRWGTRSYVRERYFEPELTAEEAAARIRQTAEGMRTLRPMLETMSWKYVLFYVRLKSKYLGLDLTTAMAGVPVARRADYVRVANELVDNMTELDRFVRTPKVYESYLFYEKTLKSLDDVAEFLV

SEQ ID NO: 9772 - protein, 91 aa, Zea mays
  VARIANT 11: note = Ancestral polymorphism is Y, Derived polymorphism is C
  VARIANT 15: note = Ancestral polymorphism is C, Derived polymorphism is Y
  VARIANT 25..91: note = Derived polymorphism lacks residues 25 to 91
  VARIANT 31: note = Ancestral polymorphism is R, Derived polymorphism is S
  VARIANT 39: note = Ancestral polymorphism is Q, Derived polymorphism is H
  VARIANT 40..91: note = Derived polymorphism lacks residues 40 to 91
  VARIANT 62..91: note = Derived polymorphism lacks residues 62 to 91
  VARIANT 63: note = Ancestral polymorphism is W, Derived polymorphism is C
MALSAKGKEVCHRSCDVLDINADEWGNENRSMTTELREQQYRLRKALEDRVQVSRETAKMWRWDKLHQIWIGGPYKTQQAQFKIQEEVLKL

SEQ ID NO: 9773 - protein, 316 aa, Zea mays
  VARIANT 148: note = Ancestral polymorphism is A, Derived polymorphism is E
  VARIANT 164..316: note = Derived polymorphism lacks residues 164 to 316
MGRGKIVIRRIDNSTSRQVTFSKRRNGIFKKAKELAILCDAEVGLIIFSSTGRLYEYSSTSMKSVIDRYGKAKEEQQVVTNPNSELKFKGVLKKGLDILRSVRPIVYGGLTDVVLLTSSSILAKGGSKLETTTAQLARKLSVWFETPAQVLSKLFIRNLTTQRQKYNAQACNIQMLLQLLHIHRQLMGEDLSGLNVKELQSLENQLETSLRGVRTKKDHLLIDEIHELNRKASLFHQENTDLYNKINLIHQENAELHKKIYETEGPSGVNREPPTPFNFAVVETRDVPVQLGLSTLPQQNNIEPSTAPKLGLQLSP

SEQ ID NO: 9774 - protein, 382 aa, Zea mays
  VARIANT 134: note = Ancestral polymorphism is A, Derived polymorphism is V
MKCRSDSSGGGDDHRAPAPAATGVGGGSPVGEPSKKQRTEEPVASSSMAGECSSSFLQAPPPLAEQLPQDARVGEQPPPGSEAGGDEQARVPDLGEDLVFEVLMRAEARTLAAAACVSRGWRLLARDERLWEAACVREWAYTGFSEQMLRSVVLSLGGFRRLHEMYIRPVQQRAAGAPPGQQRRQLPVRMGRDQVQVSLSLLSTSFFLKMPNAPPPPPKDKDRDRDKNGGGQSFNSKISLEIRVDSEKYEELIEFMEKVAKTVDSEEHYVLSIAYKIVMEPNVLHGASYPPLSRGKKAVSTWTVSLSLRTTITRLKLNSARSVMESSSSLIPTVSASLTAAESKVFYLKMKGDYYGYLAEFETGSRRKDAARIPWWHTNLLR

SEQ ID NO: 9775 - protein, 282 aa, Zea mays
  VARIANT 16: note = Ancestral polymorphism is R, Derived polymorphism is W
  VARIANT 56..282: note = Derived polymorphism lacks residues 56 to 282
  VARIANT 68..282: note = Derived polymorphism lacks residues 68 to 282
  VARIANT 73..282: note = Derived polymorphism lacks residues 73 to 282
  VARIANT 78: note = Ancestral polymorphism is P, Derived polymorphism is R
  VARIANT 109..282: note = Derived polymorphism lacks residues 109 to 282
MRKNEVSKEYFLKTVRNIVGDKLLKQAASRYQMQAQRSPQTNPSNYSLSGQVSGQQTAPSGSVTGDEQKGYPWAHTIPMRQAIASTRPICIRLMKWETFGGPAAPFRPQMADSNPRAHLIRGAVTTVSGSVPTRSIVSGNAPGEETTIIREFACNRSKGKVGMTGDWLEHLTFAVYLLPFFLLQLNLVLMFAYRETVLEEAHRGMELREHCRHIVDNDDRHYRFHSLCVHQGSSSSTTGAIVGGVAAGAALLFAVPAISFAYWRHRKPQEHFFNVSGFKVSL

SEQ ID NO: 9776 - protein, 169 aa, Zea mays
  VARIANT 19: note = Ancestral polymorphism is T, Derived polymorphism is I
MRPCAHLAALLLLLLLAETVSSRHAHAPAGAAQDVAPSAHLPLPCLEELLPCTAYLKTTKHPSPTCCTAMHNAAAAEMPCMCRLFADPELLATFNVTREQMFKLPARCGLPVGCRTGASHEPVVEAPPPPAPAQQHHHGASSRGVQFSSIWSLVASFVLGQMIPMAAPF

SEQ ID NO: 9777 - protein, 194 aa, Zea mays
  VARIANT 122: note = Ancestral polymorphism is E, Derived polymorphism is K
  VARIANT 78: note = Ancestral polymorphism is G, Derived polymorphism is R
  VARIANT 55: note = Ancestral polymorphism is R, Derived polymorphism is G
  VARIANT 5: note = Ancestral polymorphism is S, Derived polymorphism is F
MDPASEELERRSRYLSSLIRRTKLSAVPAPSQPEPEPGVTQPTPEPEPESAVEKRGEAKAEPVVDEEEKREAKQAGDGKGKEIKGKDDGGPKEDNRRKVSVRVRAADMPLPLQRRAVRLAYEAIAAMPRLDSKRLALALKKEFDTAYGPAWHCIVGTSFGSYVTHSLGGFLYFSVDKAYILLFRTAVEPLVRPR

SEQ ID NO: 9778 - protein, 140 aa, Zea mays
  VARIANT 6: note = Ancestral polymorphism is S, Derived polymorphism is G
  VARIANT 16: note = Ancestral polymorphism is A, Derived polymorphism is T
  VARIANT 46: note = Ancestral polymorphism is V, Derived polymorphism is M
  VARIANT 48: note = Ancestral polymorphism is G, Derived polymorphism is D
  VARIANT 62: note = Ancestral polymorphism is L, Derived polymorphism is P
  VARIANT 63: note = Ancestral polymorphism is G, Derived polymorphism is E
  VARIANT 70: note = Ancestral polymorphism is P, Derived polymorphism is L
  VARIANT 72: note = Ancestral polymorphism is P, Derived polymorphism is T
  VARIANT 86: note = Ancestral polymorphism is P, Derived polymorphism is L
  VARIANT 93: note = Ancestral polymorphism is T, Derived polymorphism is M
  VARIANT 96: note = Ancestral polymorphism is G, Derived polymorphism is R
  VARIANT 112: note = Ancestral polymorphism is G, Derived polymorphism is S
  VARIANT 128: note = Ancestral polymorphism is M, Derived polymorphism is T
MFLPLSDKSRLGCKIARFISKYVIEYFPVTLHVEDYGAFDPNRAYVFGYEPHSVLPIAVGILGDLVGFMPLPKLKILASSAVFYTPFLRQIWTWLGLAPASRKSFYSYLGAGYSCIIVPGGVQEILYMDHDSEVCFVILC

SEQ ID NO: 9779 - protein, 198 aa, Zea mays
  VARIANT 52: note = Ancestral polymorphism is P, Derived polymorphism is S
  VARIANT 107: note = Ancestral polymorphism is V, Derived polymorphism is L
  VARIANT 121: note = Ancestral polymorphism is A, Derived polymorphism is V
MAGFRQGPDDFSFPYTSTRTAHDRLHGCLLAAGFDQEACHSRYQSAMYRRNPGRGPSEHLVSKLRRHEALQRRCGPGTAAYSSALEQLKSGKNAGESPVNLKCRYLVSISYRGLGNRIIAAASVFLYALLTDRVLLVDSSNEMGELFCEPFPDTTWLLPWRSFPLWNFSSDTRPQRRNHHDIHLPFPRARIGGVGKIF

SEQ ID NO: 9780 - protein, 1151 aa, Zea mays
  VARIANT 600..1151: note = Derived polymorphism lacks residues 600 to 1151
  VARIANT 550..1151: note = Derived polymorphism lacks residues 550 to 1151
  VARIANT 64: note = Ancestral polymorphism is G, Derived polymorphism is A
MAELAASLVVTPLVSLLKDKVSSSLLDQYKVMEGMEKHHKTLMRWLPAILEVIGDAERQTPRRGVEKWLEQLKTAAYEANEVFDDFEYEALHRRAKKNGHITKLGIMARVKLFPTHNRAAFHIRMGNRLRGIVDTFKDLVEEMNTFGFNKLQPKATTAWKEWRETDSIIVDPENIVARGLGKTTLAQLIYNDPQVKEHFHLLKWVCVSDDFSVRILANKICNTSEAVLEDALKKLQEHLKGKRYLLVLDDIWYKDIDIDKWRKLKACLMQGVSCAVLVTTREKQVAQLMGTVVDNSLTNSYHEVAILGKEYIQEIIETRAFSLKKSKLDDLVELVSLIADRCAGSPLAAKAIGSVLRNKTTKEEWEDVLRRSTICDDETGILPILKLSYNDLPIDMKQCFAFCALCPKDYHIDMDKLIQLWMANGFISDRNKVPAETVGKWIVNEMVSRSFFQYEEQRRIGYNSTTFLKVHDLMHDVALSVSKKECVCITDEFITNMELLPSAARHILIETSIEKEVHGYLYGSMREMSRPIQTLMFDRSCDDVVVQHLSRISSLRVLSMPLWCHLPIKLKHQCHLRFLHITNSSIKELPDDITILYNLQTLKLSGCFNLIRLPKRMKHMSALRHLYTDGCTRLECMPPELGQITSLRTITWFVVGSGLSCSSLAELKDLNIGGSLKLKQLENVPAGRRNAEAANLVNKKELRQLTLEWTSGKAEEKQCHEVLESLEAHDGLLALEIYSYQGTSFPSWMGMLKNILELRLSDCSKAEQLPPLCQLAELQLLHLEGLGNLRFLCSRCTSLTFGKLKDLKIVGLDVFEGFCETVDGGAVAFPKLEILHIERCGNLAALPKASVLGEAYCGRDYTVARSAFPELKWLTLEDLCSFERWEAALEIEEGHALFPVVEVVVIRKCPKLTTLLRAPKVKELSIHEENEHISVGGIRCMTSLSTLHLIGVKPDGMERWDHPSSVVDMKLWRYCNNLIGYAVANGPDQATSGRNQLLPHLESLEIDTCESLVEVFNLSPALKRMEVEGCCKLESLYGKQELDEEASRSDDMTASAPVEEKLSPSVAPDKPLPSSLEYLSIWDCHGLSEVVNLPSSLRVINIKRCSRLRAMSGQLGALKSLLIVNCPELRSLETCIVDLPSLEILFLSVWL

SEQ ID NO: 9781 - protein, 614 aa, Zea mays
  VARIANT 14: note = Ancestral polymorphism is A, Derived polymorphism is G
  VARIANT 15: note = Ancestral polymorphism is G, Derived polymorphism is R
MTDCQVVAMKKAYARIMLNMAQESAARVLTAERRAVALAASLEAAKEDGVAALLRLKAIMEVRIKEKELESLVHVKMIKELEEQLNGSQNAMASLKVELQRANTELELTRKTLADERMNSLPTSNNVYYSNKNVSPCSKIHPQGGNILLKNKKNADNSDDTCLVLITEENEAVDKLEDKDRRSPDLPSFMKRNKKPKFCHNGCTQRIHALKQQTQSTDAFLKQNQKQATAFNSHSKARKKNAAKNSCHTRSVTEQILQTKFLGKFKRKRGRRNRPSYKHDNSSEHGEAEYKLSDRSESDGNGCLLLLQALEQDLSPPKLSTEHDGEALTDLKEDFEMSGGDAELSRCTAFSELVNVLAVNSVQIKRRKRTKTVRVLEVDFSDTKSVPEPANTQLRTSSKSMSGNQSVSEMTENRSDTPIRNSSPFLKCATANLMHQIAAGNGQFDPEIGSAVSLQSTKSETTDYGNLVVDQQELITPNNNTTSLKEVNEDGSCSLASPKADASTPVQALEKYDISVGSSLNKEEHTKASCGASIQAEGARQIKYTFNRRKRKGMSIDSTPQRAVPEESSDLCSPTNKQKLHPDCVEQDHLIDSPQGHSQLVQVAEQLILLSEHM

SEQ ID NO: 9782 - protein, 331 aa, Zea mays
  VARIANT 52: note = Ancestral polymorphism is V, Derived polymorphism is G
MGLGEAAGRLLAAVDWEREAYPAYDDFLALPVFVLFFPTVRYLLDRFVFEWVARRLINRNGHQSTNNETEEGRKKIRKFKESAWKCVYFLSGELLALSVTYNEPWFTNTRYFWVGPGEQVWPDQKIKLKLKAVYMYAAGFYTYSIFALMFWETRRSDFGVSMSHHVATVVLIVLSYVFRFARVGSIVLAIHDASDVFLEVGKMSKYSHCDWLANVSFLFFVISWVLLRLTYFPFWILRSTSYEVLLTLDKKKHNFDGPIYYYVFNSLLFSLLVLHIYWWVLIYRMLLRQIKTRNVGDDVRSDYERTSICSSRESPKPGYDFFCLDCSFVLY

SEQ ID NO: 9783 - protein, 355 aa, Zea mays
  VARIANT 45: note = Ancestral polymorphism is G, Derived polymorphism is R
MGHLNPQTLGEAVLKVKTKTSRSLQKSGRGNQVQGEGPNWVLVAGGFLLSALSVKIGCKLKQWFNGKQQNNTSKAKRRPEACELHSDLYRFSDQTGCCYSVSGLADSGVEVKQAPASPVPKSVESSLPLVKIPTPESSKENSGVMWISSPDRLEDPRRPFQYSNSSGSPCVSESGSDIYSKREVIQKLRQHLKKRDEMIMEMQTQIADLKNSINIQVTQSTNLQSQLDVANRDLFESEREIQHLRKIIADHCVAEALSHEKPLQAGHWQSDATNGHSNGYADGCVDDADLHCVGIEKRKGEVERVEMLKKEVVELKEVIEGKDFVLQSYKEQKAELCLKIRELQEKLSAQVPNIL

SEQ ID NO: 9784 - protein, 106 aa, Zea mays
  VARIANT 10: note = Ancestral polymorphism is W, Derived polymorphism is L
MWSLVRRWRWGRRRRTARVVDESALGADGDTDGGAAAPAAGGAVVAPTLGGALARALLALACAIRFDGADVSATEEAWAVTGWRPRAADEVSHLMVRESMRYAIYA

SEQ ID NO: 9785 - protein, 250 aa, Zea mays
  VARIANT 185: note = Ancestral polymorphism is R, Derived polymorphism is L
  VARIANT 158: note = Ancestral polymorphism is V, Derived polymorphism is A
  VARIANT 152: note = Ancestral polymorphism is H, Derived polymorphism is R
MEIIVDTISLRVPSGQTAVLVKNLYLSCDPWMRGRMNKQDDGPTVPPHGEAMVNFSVGNVMDSTHPDFTAGDLVWGMTGWEEYTLVIQPESLRKINHTELPLSYYTGVLGMPGLTAYACFFEVGKPRKGDFVFVSAAVGGATLDAVLLQMRRGGRVAACGMISQYNLEEPYGLRNLYCIVAKSIRLEGFYFTSYMHVYARFEEEMAGYIKDGKVTVVEDVVEGIDSAPAALIGLFSGKNVGKQLVAIARA

SEQ ID NO: 9786 - protein, 219 aa, Zea mays
  VARIANT 157: note = Ancestral polymorphism is K, Derived polymorphism is R
MAPTSKLSTGIKRASRSHAYHRRGLWAIKAKNGGAFPKADKAAAAVEPKFYPADDVKPRVPSTRKPKPTKLRSSITPGTVLILLAGRFMGKRVVFLKQLKSGLLLISGPFKINGVPIRRVNQTYVIATSTKVDISGVDVAKFDDKYFAREKKQKVKKTEGELFETEKEASKSLPDFKKDDQKAVDSALIKAIEAVPELKTYLGARFSLRDGDKPHEMVF

SEQ ID NO: 9787 - protein, 219 aa, Zea mays
  VARIANT 157: note = Ancestral polymorphism is K, Derived polymorphism is R
MAPTSKLSTGIKRASRSHTYHRRGLWAIKAKNGGAFPKADKAAAAVEPKFYPADDVKPRVPSTRKPKPTKLRSSITPGTVLILLAGRFMGKRVVFLKQLKSGLLLISGPFKINGVPIRRVNQTYVIATSTKVDISGVDVAKFDDKYFAREKKQKVKKTEGELFETEKEASKSLPDFKKDDQKAVDSALIKAIEAVLELKTYLGARFSLRDGDKPHEMVF

SEQ ID NO: 9788 - protein, 359 aa, Zea mays
  VARIANT 180: note = Ancestral polymorphism is G, Derived polymorphism is R
  VARIANT 22: note = Ancestral polymorphism is R, Derived polymorphism is S
MASSGGDEKAAAVVQNKKVVLRRYVTGLPTEEDMEIVVDTIVLRVPAGQTAVLVKNLYLSCDPWMRDRMSKHDDGDPTVLAPDFVIGEAMVNFGVGKVIDSTHPELTAGDLVWGMSGWEEYTLVTQTEYLSKINHKELPLSYYTGVLGMPGLTAFSCFFELGKPKKGDFVFVSAASGAVGQVVGQLAKIAGCFVVGSAGSDEKVSLLKDKFGYDDAFNYRSETDLGAALRRCLPDGIDVYFDSVGGATLDAALLHMRHGGRVAVCGMISQYGLEEPYGVRNLYCIIGKTVRVEGFNVNGYFHLYTRFEEEMAGYIKDGKVTVVEDVVEGIESAPASLIGLFSGRNVGKQVVAIAHSGTP

SEQ ID NO: 9789 - protein, 193 aa, Zea mays
  VARIANT 163: note = Ancestral polymorphism is I, Derived polymorphism is T
  VARIANT 117: note = Ancestral polymorphism is A, Derived polymorphism is D
  VARIANT 87: note = Ancestral polymorphism is G, Derived polymorphism is D
  VARIANT 82: note = Ancestral polymorphism is D, Derived polymorphism is Y
  VARIANT 57: note = Ancestral polymorphism is A, Derived polymorphism is V
  VARIANT 51: note = Ancestral polymorphism is E, Derived polymorphism is K
  VARIANT 45: note = Ancestral polymorphism is K, Derived polymorphism is M
  VARIANT 31: note = Ancestral polymorphism is E, Derived polymorphism is K
  VARIANT 30: note = Ancestral polymorphism is T, Derived polymorphism is M
  VARIANT 19: note = Ancestral polymorphism is C, Derived polymorphism is G
MASCTGILNQRHVCVFQACCWLSHLGERFMEIVGSPYYMPPEVLKRNYGPEVDVWSAGVILYYIHISAEEVADIKQMFDKMDANKNGKLTFKEFKAGLRKLGNQMHDSDLQILMDAADIDRNETLDYEEFVTVSVHVRKIGNDKHIQKAFAYFDRNKSGYIEIEELREALADELDGSDEDIIGGIIRDVDTDK

SEQ ID NO: 9790 - protein, 357 aa, Zea mays
  VARIANT 201: note = Ancestral polymorphism is R, Derived polymorphism is L
MAKKRKRTDAPAEAAGAEKPDDSAPARPERTLFGFKDLVPDAEPASAGAEAAVAPFRNREKVLITCSRRITYRYRHLMQDVLSLLPHAKKDSKVESKQSKGNALNELLELRSCSSCLFFECRKQKDLYLWMVKSPGGPSVKFLVNAVHTMEELKLTGNHLKGSRPLLTFSTNFDEQPHWKLVKEMITQDFANIQQGQTPLRYFSTGCLNDRWTRTHLSLGHHVIFATPKDHRKAKPFHDHVFVFSIVDGHVWFRNYQISVPHNEIDKVDKGGLDKMTLIEVGPRFCLNPIKIFGGSFGGPTWYENPYYISPNQIRALEKRQKAGKYAKKVKAKVRRKMHEMENTLEPDEFAELWKGE

SEQ ID NO: 9791 - protein, 204 aa, Zea mays
  VARIANT 86..204: note = Derived polymorphism lacks residues 86 to 204
  VARIANT 60: note = Ancestral polymorphism is V, Derived polymorphism is G
  VARIANT 55: note = Ancestral polymorphism is R, Derived polymorphism is W
  VARIANT 29: note = Ancestral polymorphism is C, Derived polymorphism is Y
MAPDIAPSQHLQPDISTPTTSRPGGPWTCSGSGCFRAAGNMVELLWPFLCFYWFREIDEVALFLISRYTVISVKEIGVEEIWSFYWYELGRQPANTKLSSNKTVRRVRVRGGNTKWRALRLDTGNYSWGSEALTRKTRILDVVYNASNNELVRTQTLVKSAIVQVDAAPFKQWYLTHYGVDIGRKKKVHVAKKDDTEFCGLVFQ

SEQ ID NO: 9792 - protein, 713 aa, Zea mays
  VARIANT 7: note = Ancestral polymorphism is T, Derived polymorphism is R
  VARIANT 40: note = Ancestral polymorphism is C, Derived polymorphism is S
MAVFMFRWLLIKVLFCCPLVDTETLENRTEQNKYWYFIICLGIPIMWKLNPFGGKAQSGLDGRTIDVGNLKITVQNAIAQGGFSCVYLACDTVHPSKMYALKHIICNDSESLDLVMKEIQVMNLLKGHPNVVTLVAHDVFDMGRTKEALLVMEFCEKSLVSAMESRGSGYYEEKKVLLIFRDVCNAVFAMHGQSPPIAHRDLKAENVLLGCDGVWKICDFGSTSTNHKCFNKPEEMGIEEDVIRKHTTPAYRPPEMWDLYRREVISEKVDIWALGCLLYRICYFKSAFDGESKLQILNGNYRIPEQPKYSTAVTGLIKDMLEASPNSRPDITQARVWFRVNELLPLELQKSLPDGPSPAVSLSLQDEGAHKRAHVMPRRNPPPPPREQSNSSLSHGSSKAGDAPLGAFWATQHAQGAQAADNRNPLFDEEPSKVSLSSKQNQSRVDTSISIPGDRHGHSGQTSRISKTPNNSLSNDGFRGVSDTEIHNSVKTKVQQPQPKPKCDKDPFNIFVADFDTHNLNIAVGKASELELEVSSLKEQLKKTTLEKAEMTAKYEKLSAICRSQRQEIQELKRTLAEATPPSNKVSSRTQDSGSQRKEKIQGTLWELEQGMLASNTSSASSDVKTWQAFPDTQTQARPKVDHGTNGSQNITKNTTSGASPDAWGFGTDSFRTSSAPVKAATQINRAAQGSSSQRFNSGVAKKVEQPSGWAGF

SEQ ID NO: 9793 - protein, 96 aa, Zea mays
  VARIANT 39: note = Ancestral polymorphism is H, Derived polymorphism is L
  VARIANT 36: note = Ancestral polymorphism is D, Derived polymorphism is N
  VARIANT 4: note = Ancestral polymorphism is T, Derived polymorphism is I
  VARIANT 2: note = Ancestral polymorphism is A, Derived polymorphism is V
MAATGAGAMVIPLSLALSTSKIIAESVPGMGIDLADSELDGIGSFAGNRSGPSSVSSSSYKSPILKKARIESSKIVVCYAKEYFCEVISANKDDLC

SEQ ID NO: 9794 - protein, 610 aa, Zea mays
  VARIANT 53: note = Ancestral polymorphism is R, Derived polymorphism is Q
  VARIANT 71: note = Ancestral polymorphism is G, Derived polymorphism is V
  VARIANT 89: note = Ancestral polymorphism is L, Derived polymorphism is H
  VARIANT 129..610: note = Derived polymorphism lacks residues 129 to 610
  VARIANT 150: note = Ancestral polymorphism is I, Derived polymorphism is N
  VARIANT 194: note = Ancestral polymorphism is P, Derived polymorphism is L
  VARIANT 201: note = Ancestral polymorphism is P, Derived polymorphism is S
  VARIANT 271..610: note = Derived polymorphism lacks residues 271 to 610
  VARIANT 310: note = Ancestral polymorphism is S, Derived polymorphism is R
  VARIANT 421..610: note = Derived polymorphism lacks residues 421 to 610
  VARIANT 431..610: note = Derived polymorphism lacks residues 431 to 610
MITLCWCSIQLNLSTRRVSSLLLKLDISKAFDSVSWAFLFEVLSYLGFGPVWRNMISNILASSSTQVLLNGSPGIPIRHRRGLRQGDPLSPMLFVLVMDILNSLFNLAENRGLLHNLVGANIRNRLSIYADDVVLFVQPFEEDFQCVKTILDCFGSATGLVSNLQKSFVIPIRCNEQAVQMSCNILQCTSSSFPCTYLGLPILDKKLRKSDLMIWVEKVADRLPNWKARLLSLAGRTAMVRFVLSAIPIYLLIAMKIPKWVINSIDKIQRGFIWKGRKKVNGGNCLVSWDIVTRPLDLGGLGISNLLYQRWALQAKWLWLEKTDPNKLWSGLDLSIQQLVKRFFTSSIVSLVGNGYNTLFWTDRWLDGSCIQDFAPAVVANVGKRAISSRTVAHALQNWQWINDIETPLNLPGLQQYLNLWDALRGVVLTQEADRHVWIHSSSGQFSSKSCYRTFFMGSITFEPWKRLWKTWAPPKCKFFLWLAIRNKCWTADRLQKRGLAYPEVCPLCDQDSENIQHLLCTCIFVRQFWFYILSSLGLANLSPTSDESTFADWWEKVCKQVHKSKRRGFNGIIILGAWCLWLHRNKAVFDGVRPSIHGIKSVFLDEFEC

SEQ ID NO: 9795 - protein, 984 aa, Zea mays
  VARIANT 614..984: note = Derived polymorphism lacks residues 614 to 984
MAGGGGGRGESSPAIKPISKAVVHRICSGQVIFDLSSAVKELVENSLDAGATSVEVSLKAYGEEWFKVADNGCGISPSNFRALALKHHTSKISDFSDLGSLVTFGFRGEALSSLCALGKLTVETRSKDELVGTHLEFEHSGVVVSERKTARQVGTTVTVEKLFSTLPVRSKEFSRNIRKEYGKVISLLNVSFHAYALIAKGVRLLCTNTVGKNSKMVVLRTQGSSSMKDTIITVFGPNTFKCLEPFSVTTSDGCQIEGFLSKPGPGTGRSSGDRQFFYVNGRPIDMPKVTKLVNELYRSSNAKQYPVVILDFHIPTTSYDVNIAPDKRKVFFSSESMILQSLRETVENLYSPQQCSFSVNHIKDPEKEGDAVTDRHNEDTNAIVMVNVPSYYNNDDNEETDNEDQVSPENQKLPSVARDASPLSGGTTTQADRSAWLPSFAYDQPKRSPKEGRSLVLGRNCFRTGLAAKPTHSSTVQSSLLNFVSLNKRKHEDDCTLISEAAVLRRETCSEHMRRSSLEANFVTPNKQNHEDDCIISESPVLRSGTCSELYKRTSLEVNFPSPNKQKHDDNCTLISEIPVLRRRTNSEQARGTSLEANSAPEFNLPLETNSLKQHSSQYFGSVRTDVSPQHSKQPNIVTIGAGVTGPCDVDTTESDMDYGDGAAVCYASVQYPIIQFTVAELRRRRKNCFMISHINKSYCLEKTTRCYKAATLDITVPLADEAKSNSLAAATNELDRLFSKHDFREMEVVGQFNLGFIIGKLGQDLFIVDQHASDEKYNFECLSQSTILNVQPLLEPLRLDLSPEEEVIVSMNMSTIRHLIANTEKCVVYFTNNRSCCLTSILPFSQLFRKNGFVLAEDLHASPGNHYLLKAVPFSKNITFGVQDVKELISMLADSQGDCSIISSYKLDTADSVCPSRVRAMLASRACRMSTMIGDPLTKAEMKKILKNMAGLRSPWNCPHGRPTMRHLADLRTMKAKDIAFKR

SEQ ID NO: 9796 - protein, 103 aa, Zea mays
  VARIANT 37: note = Ancestral polymorphism is S, Derived polymorphism is N
  VARIANT 47: note = Ancestral polymorphism is A, Derived polymorphism is T
MAPCKVAAALLLLITTISVNTVTGSRCNAQEKNQIVSLCQMYIQRGTLVQLPSQTGPCCAAVRELERVHRGMQMKCIADLLNAGDLQKYDPTKIKHLDISCYT

SEQ ID NO: 9797 - protein, 109 aa, Zea mays
  VARIANT 92: note = Ancestral polymorphism is A, Derived polymorphism is V
MKGEVAVITIPPEYAFGSTQSKQYIAIVPPNSTVVYEVELASFVKESWDVNNEDKIEAAGLKKQEGNALFKLDKYARASKRYEKLQLKQCAACKLKLKDYKEAMNLCTK

SEQ ID NO: 9798 - protein, 114 aa, Zea mays
  VARIANT 105: note = Ancestral polymorphism is S, Derived polymorphism is R
  VARIANT 109..114: note = Derived polymorphism lacks residues 109 to 114
MATPRKPIKLTLLSHETTIGKFLTHSGTFTDGDLRVNKDDLHIVSWREGGEAPPIEPLDSQLSLDDLDVIKVIGKGSSGNVQLVRHKFTGRFFALKVIQLNIDESIHTQIATVS

SEQ ID NO: 9799 - protein, 99 aa, Zea mays
  VARIANT 15: note = Ancestral polymorphism is V, Derived polymorphism is I
MTEAPSKIESMRKWVVEHKLRAVGCLWLGGISSSIAYNWSRPNMKTSVKIIHARLHAQALTLAALVGSACVEYYDQKYGSSGPKVDKYTSQYLAHSHKD

SEQ ID NO: 9800 - protein, 294 aa, Zea mays
  VARIANT 27: note = Ancestral polymorphism is G, Derived polymorphism is V
MEDVANAHIYAHAHRSKRPQSAAIKDGDGDVDLSMKGARYRGVRRRPWGRFAAEIRDPMSKERRWLGTFDTAEQAACAYDIAARAMRGNKARTNFPGHATAGYWPWGAPQPAAVAHPINPFLLHNLIMSSSNHGCRLLNHAGHGHVHSAAPRPPAPAADATSTTIAAPFPVAAHPAVAMDEDVDDWDGVLRSEPADAGLLQDALHDFYPFTRPRAGGGRRGLSAAGTDARAAAALVAPVKPDAFVVPSPFAGVEGDGEYPMMPQGLLEDVIHSPAFVEVVAAPPSVPTRRGRRG

SEQ ID NO: 9801 - protein, 253 aa, Zea mays
  VARIANT 60..253: note = Derived polymorphism lacks residues 60 to 253
  VARIANT 133..253: note = Derived polymorphism lacks residues 133 to 253
  VARIANT 183: note = Ancestral polymorphism is P, Derived polymorphism is L
  VARIANT 200..253: note = Derived polymorphism lacks residues 200 to 253
  VARIANT 201: note = Ancestral polymorphism is L, Derived polymorphism is P
  VARIANT 241..253: note = Derived polymorphism lacks residues 241 to 253
MEMNEERKVSLLGLADILSASIGGFSWAPLISKICKNKVEAEALFTGLSALICRGQHGSQVQHIDGIRIAGLPFDGARESSLSGSSTFTSDSYENKLSSVNSTKDRSSGEYTYSERTDVSDMQVKSVSSSDIRISVSSALSTSSHQASSSGRSLSYFSAQYLARLAKMEVEYRRIQIIEIGLPMGFSVSPFMYLKKISSQLWKQSNGCGCRKHFKIEASEVILGKHVLENHIDQMSTDEVEQSINRDYKIQTG

SEQ ID NO: 9802 - protein, 202 aa, Zea mays
  VARIANT 13: note = Ancestral polymorphism is A, Derived polymorphism is T
  VARIANT 20: note = Ancestral polymorphism is A, Derived polymorphism is T
  VARIANT 34..202: note = Derived polymorphism lacks residues 34 to 202
  VARIANT 35: note = Ancestral polymorphism is R, Derived polymorphism is Q
  VARIANT 47: note = Ancestral polymorphism is R, Derived polymorphism is C
  VARIANT 178..202: note = Derived polymorphism lacks residues 178 to 202
MVVVFEDFPTEKAAEVMRLATGDDLPIARKASLQRFLAKRKDRLVQRAPYARPSYPTEEPEKKTVKPASALASWLGLGSTEADRLTIALFCGSAHPRQVGPSSSVRFLLQLTRRTAPAAPLPSFLPCSLPGLPRCLPQIVRDLGPPSRYSPPQPPSPGNLRLTLSSSTPSRHCRWCRQMPQGRGRDADGDDLRRRGTGARRG

SEQ ID NO: 9803 - protein, 161 aa, Zea mays
  VARIANT 132: note = Ancestral polymorphism is R, Derived polymorphism is W
  VARIANT 114..161: note = Derived polymorphism lacks residues 114 to 161
  VARIANT 112: note = Ancestral polymorphism is R, Derived polymorphism is W
  VARIANT 102..161: note = Derived polymorphism lacks residues 102 to 161
  VARIANT 92..161: note = Derived polymorphism lacks residues 92 to 161
  VARIANT 42..161: note = Ancestral polymorphism lacks residues 42 to 161
  VARIANT 28: note = Ancestral polymorphism is S, Derived polymorphism is G
  VARIANT 21..161: note = Derived polymorphism lacks residues 21 to 161
  VARIANT 6: note = Ancestral polymorphism is L, Derived polymorphism is F
MDQLNLTLINAMDTLITKFLQSYLNKHSLEPRPVLQGVRMLRQGGFRTFQESMMRFFEDETEKVKGFTSESTVSYRDRLKIMVGLVNPDDLQLGSTERKLVQAYNEKPVLSRPQHSFYEGEDYLEVDLDIHRFSYIARKGLDSFRARLKNGILDLGLTIQA

SEQ ID NO: 9804 - protein, 855 aa, Zea mays
  VARIANT 797: note = Ancestral polymorphism is R, Derived polymorphism is S
  VARIANT 658: note = Ancestral polymorphism is A, Derived polymorphism is T
MDVPLPLLLGSLAVSVMVWCLVLRRGGDGKGKRPLPPGPRGWPVLGNLPQVGAKPHHTMCALAREYGPLFRLRFGSAEVVVAASARVAAQFLRAHDANFSNRPPNSGAEHVAYNYRDLVFAPYGSRWRALRKLCALHLFSAKALDDLRGVREGEVALMVRELARPRRGEGGRAAAVALGQVANVCATNTLARATVGRRVFAVDGGEGAREFKEMVVELMQLAGVFNVGDFVPALAWLDPQGVVGRMKRLHRRYDHMMNGIIRERKAAEEGKDLLSVLLARMRDQQQQPLAEGEDNRINETDVKALLLVSLLALTTSQRANGMDNCSGALRAVEESACDAEVVRPLSKLPNSSIGLYDSSFECDACGVGFVAELSGDYKHVTVNDTIEMLERMAHRGACGCEKNTGDGAGIMVALPHDFFKEVAKDAGIELPPLGEYAVAMFFMPTDEKRRKKGKAEFKKVAESLGHLYILRRLSIISVRASLNIKRGGERDFYMCSLSSRATVGMLLGVEDMHRFPVRSPWMDRGDLIRSPAARQIVSNYFSMFGPVQDVRIPYQQKRMFGFVTFVYAETVKVILSKGNPHFVCDARVLVKPYKEKGKVPGRFRKLQHTHHGGAEFVGCASPTGLLDSRDPYALLLLSGAQNLFTAGTDTTSSTVEWALAELIRHPDVLRKAQQELDAVVGRDRLVSESDLPRLTYLTAVIKETFRLHPSTPLSLPRVAAEECEVDGFRIPAGTTLLVNVWAIARDPEAWPEPLQFRPARFLPGGSHAGVDVKGSDFELIPFGAGRRICAGLSWGLRMVTLMTATLVHALEWDLADGVTAEKLDMEEAYGLTLQRAVPLMVRPAPRLLPSAYAAQ

SEQ ID NO: 9805 - protein, 627 aa, Zea mays
  VARIANT 552: note = Ancestral polymorphism is G, Derived polymorphism is V
MKFMKLGTRPDTFFTAGSVRSVCTEVATDLQILVDNCLYHLHKFPLLSKCMLLQALCADAVAGDVVELRGFPGGGEAFEACARFCYGITVTVSARNLVPLRCAAAHLGMSEATDRGNLAAKLDAFLASCLLRRWKDALGVLHSTRHYAPLCEDLGLTSRCVDAVAALIASPDTALPSRSTSASPWWAHDIAELGVDLFWRIIVAVKATGAIHDRTVGDALKAYARRWLPNVAKDGHGLSAGQPFDHDAGSAVVKQVTTRHRLLLETIVSLLPAERDAVSCSFLLRLLEAANILSASKAELVKRVAWQLEEASVADLLIPSLSCVSETLYDVDAVSAIIDEFALRCAAVPPALALSGSPDDSPAHSAGHRRSRSAESVSFDGTRRSLSAAPVSQGALVQVGRLVDGFLIEAAKDPNMPLDKLLAIAEAVPDSARPEHDGMYKVVDTYLKAHPEMSKSARKRLCRVLNCRKLSEKACTHAAQNELLPLRVVVQVLFFEHARAAALAPGAHALAAADLPSNIRALLSKSGSSEDEEAERADEQRLRALAAGASPGGDWSVEGLRRAASKIATLRMKLAEDEDRDADEFARKAGVARSASLRFRAFCAFPAGKPKRMLSRLWPLGRNGVSH

SEQ ID NO: 9806 - protein, 200 aa, Zea mays
  VARIANT 82: note = Ancestral polymorphism is E, Derived polymorphism is A
MASHIDFRCLDEGLGGERGKRKRREDAEAAAADSMDLDADAHRPSKLRAMPSLSDPSKPASFGQPTYDGVIAGRLSGRRWKEARTRRASAVAVSRKPTPLEQRVREKSLKRAYQARKAELKEEIRQNKVAKRKAREEREKRKQENVLRTGTKLQRVTNPKTIQKIAKSKKRKQLKVVPDEFLGGKKSVANRRMQVPGLEN

SEQ ID NO: 9807 - protein, 243 aa, Zea mays
  VARIANT 233..243: note = Derived polymorphism lacks residues 233 to 243
MARRSTPLLRRLLAPSPSLPTPLADAVSRRTVTYMPRPGDGAPRGVTLIPGDGIGPLVTGAVRQVMEAMHAPVYFETYEVHGDMPTVPAEVIESIRRNKVCLKGGLATPVGGGVSSLNVQLRKELDLYAALVNCFNLPGLPTRHDNVDIVVIRENSEGEYSGLEHEVVPGVVESLKLRNQCVSAFVMEKPAAFLSVHLLCVQQADLPAVNMRFRYWCHWIVDSDTAFHGDLLKCSPKSSERHL

SEQ ID NO: 9808 - protein, 466 aa, Zea mays
  VARIANT 187..466: note = Derived polymorphism lacks residues 187 to 466
MASLTSASTSLLFPQASSSRSRIRLSTPLGFSAQPARLRSQGAAVGARRRGRLLVVRAARGKFERTKPHVNIGTIGHVDHGKTTLTAALTMVLASVGGSAPKKYDEIDAAPEERARGITINTATVEYETETRHYAHVDCPGHADYVKNMITGAAQMDGAILVVSGADGPMPQTKEHILLAKQVGVPKIVVFLNKKDMVDDEELLELVELEVRELLSNYEYDGDDVPIVAGSALKALEALMVNPALKRGDDEWVDYIFSLVDKVDSYIPVPQRQTDLPFLLAVEDVFSITGRGTVATGRIERGTVKIGDTVDIVGIRDTRNCTVTGVEMFQKTMDDAMAGDNVGLLLRGMQKDDIERGMVLAKPGSITPHTKFEAVVYVLKKEEGGRHSPFFPGYRPQFYMRTTDVTGSVTTIMNDKDEEAKMCMPGDRIKMIVQLIQPVACEQGMRFAIREGGKTVGAGVINKIIE

SEQ ID NO: 9809 - protein, 446 aa, Zea mays
  VARIANT 50..446: note = Derived polymorphism lacks residues 50 to 446
MECVTDMPLATLDSRPRKRQRLGWDVVPAEMYQVTRPRLGWDVGPAEMNQFALCGQEVVNAFSAAVLGLSSGCVSSQVNQEQPHDGSPPLREDDKNGHYVFAVGDNLTSRYKINAKMGEGTFGQVLECWDKETKEMVAIKIIRGIKKYRDAAMIEIGMLEKLGKYGESRSSCVQIRNWFDYRNHICIVFERLGPSLYDFLRKNNYRSFPIALVREFAKQLLECIAFMHELRLIHTDLKPENILLVSPEYIKVPDYKVSSQSPKEGSYYKQLPKSSAIKVIDFGSTTYDQHDQSYVVSTRHYRAPEVILGHGWSYPCDIWSVGCILVELCTGEALFQTHENLEHLAMMERVLGPLPYHMLKRADRHSDKYIRKGRLNWPEGCTSRESMKAVMKLSRLQNLVMQNVDQAAGDFIGLLQGLLKYDPASRLTAREALRHPFFTEGFGRRR

SEQ ID NO: 9810 - protein, 58 aa, Zea mays
  VARIANT 16: note = Ancestral polymorphism is R, Derived polymorphism is W
  VARIANT 25: note = Ancestral polymorphism is Q, Derived polymorphism is H
  VARIANT 43: note = Ancestral polymorphism is Q, Derived polymorphism is H
MYLESRGEARDFARVRNTCFEQARQAYLVGNKALAKELSMKGQAYNVQMKAAHEIYLT

SEQ ID NO: 9811 - protein, 1241 aa, Zea mays
  VARIANT 18..1241: note = Derived polymorphism lacks residues 18 to 1241
  VARIANT 186..1241: note = Derived polymorphism lacks residues 186 to 1241
  VARIANT 189: note = Ancestral polymorphism is S, Derived polymorphism is L
  VARIANT 383: note = Ancestral polymorphism is S, Derived polymorphism is W
  VARIANT 427: note = Ancestral polymorphism is S, Derived polymorphism is L
  VARIANT 594..1241: note = Derived polymorphism lacks residues 594 to 1241
  VARIANT 607..1241: note = Derived polymorphism lacks residues 607 to 1241
  VARIANT 732..1241: note = Derived polymorphism lacks residues 732 to 1241
MDGSAAELEAAKRVVMQWDSSLACGGADEPMLFDGGGNRAKADRFLRAVDDLHRLAPPSPAAVGSLRRLSSSSTARSGAMLVAMTQLEDEFRHVLSSRAVDHEIEALTYLSLLSINADRSNSASSADLPAADEDDSVFSSIGHRSTAYRSLRSIREIDLLPDDVIADLRAIASCMAAAGHDRECAQVYSSVRKPAVDASLRRLGVERLSIGDVQRLEWDALEAKIRRWIRAAVRGVFASERRLCFHIFHDLPISAASVPATHDTPFAEAVKGAALQLFGFAEAINIGHRSPKYLFKIIDLHDAAEIQTRLADAVRGIFSEFENTVLRDPPKTAVPGGTVHPLTRYVMNYSSLICDYKATLSELIVSRPSASARLAAEGNELASSLADLELPELENQLPLASHIVWIIVILEHNLEGKAALYKDPALSHLFMMNNVHYIVHKVKDSSDLWGMIADDYLKRLTGKFTMAATNYQHASWLKILNCLRDEGLHVSGGFLSGISKSALRERFKSFNATFEDMHRVEEITWVKNLYIRKLVLVFGLDFFYPDRSPTSKPDAPYGYGGPSHGSAPRRQQATGGEGQRVRVQAGDVLPLPIWHTNLIFSVLFAASLVYLMRRWREKIRASTPLHVVSLAEIFAICGLVASLIYLLSFFGIAFVQSVVSNSNDEEDFIIDSCHGQARAPPPPAPAAPCALLGSLASVPEKMPEEDEEIVAVVVAGKIPSYVLETRLGDCRWAAGIKWEALRRITGREMDGIPLDGFDYASILSQCCELPVGFVQLPVGVTDPLLLDGRRLYVPMATTEGCLVASTNRGCKAIAESSGASSVVLNDGMTRAPAVRSSRFGRLQGVKCVITGRNLYMRFSCSTGDAMGMKMVSKGVQNVLDYLQADFPDMDVINISGVLMQYSRSNLFGMQYSRKRYFVLEDAALRCFKSTSSSKGESAPSSKGGFFHGVRSLSFGVDLQEIRLMGVLQVKCGVRGDTSSGCNAVGMIDRKILGIQHLYGRPVYARSKNYRKNTLAASSSRRKAPAEDATSTAQTMYVKVSMDDAPYLKMVDIKMYSNYEDLSMALEKMFNCFIIGEYCSVLCFCLMHFPLVSTASSNAISAKELSSYRCFQIMFPSTLQGTGENWTMMKTICVTEYLNYKGGEAGQNKKRQRIGDTLDFEIKRWSTGKQGNLRALLSTLQYIRPSDKKVDYQIQKLTNAANNATAREKSGNAEANGKDGHSDEEDLLKYRPNPDMMDTDWS

SEQ ID NO: 9812 - protein, 391 aa, Zea mays
  VARIANT 227: note = Ancestral polymorphism is V, Derived polymorphism is D
MASSLPDHLVEEILVRLPQDEPVHLARASLVCTSWRRVLVSDRDCFLRRCRGFHGAPPLLGYFDLSYGNDAKRFVPATSTTSPVRMPALHRRRWSAVDCRHGRVLIHYEDEDEDRSKRGFIVWDPLTGRQQHLGMPSASYPSHMCLYTSYTGAVLCAKDDGGCDHLDCQAAAGPFRVVCVETNLLRPIFACATSYSSLTGEWNAPAPKPNHDNHDFLRGHAKHSLLVGDAIYFLFQDDRTILRYDLGRHWLSEMDLPPFMWNAALMTAEDGGLGLAALPNNDNRIHTWSWHDDDGSGGGCWVEQRVIEFETLLPRRMRDKHYRVVGSAEGTSTVFVDISFGTIFVLDVKSKKMSRFRKRNGGLFEYVLPYVRFYAPSEDLAIKGQLPPRAI

SEQ ID NO: 9813 - protein, 548 aa, Zea mays
  VARIANT 95: note = Ancestral polymorphism is T, Derived polymorphism is I
  VARIANT 318..548: note = Derived polymorphism lacks residues 318 to 548
MWLVSSLRAALCLLLAVLASHRQPAAAVVTLSTSSRWIVDPAGHRVKLACVNWPSHLESVVTEGLGRQPVGAISGMIVSMGFNCVRLTYPIALVTNASLSVLTVRQSLLANGLAETVGGVEAVVNALGEKNVMVILDNHVSTPGWCCSNDDGNGFFGDRDFDPNVWVDGLGSMATIFADVPNVVGMSLRNELRGPRQNPQDWYTYMQRGAEAVHAASPRALVIMGGLSYDYDLSFLAARQVGVSFAAENKLVFEVHWYSFSDARAWETESANEVCGRAARDFARRGGFLLARGFPLFLSEFGADSRGGDPKDNRFFPCAAAVAAEHDVDWAYWALQGSYALRQGVAGMDEVYGVLDWSWSKPRNETVLPRIQALQRPLQGPGYGEALPYTVLFHPLTGLCAVRRAAAVTTTLELGPCNETDAWAYAPPSSTLVLRDAAAAGLPCLRAEGPGQPARLGIRDCGDPMSTWRLATDSGMHVAVDAALGLGGGEDGGGGGGMLCLDVGTDGRSIVTNPCACQRGDGTCDPEGQWFKLVTSTRRVVRRPPTLA

SEQ ID NO: 9814 - protein, 534 aa, Zea mays
  VARIANT 268: note = Ancestral polymorphism is A, Derived polymorphism is S
MTTRALVAMALRFLREYVRASDLAVAAAVLFACSAARSRLSSRPGEPMLWPVVGIIPTLFAHLAAGDVYDWGAAVLLGRSRGTFAYRGTWGGGSSGVVTSVPANVEHVLKANFDNYPKGPYYRERFAELLGGGIFNADGDSWRAQRKAASAEMHSARFVQFSAGTVERLVRRELLPLLEALSGRGGPESAAAAVDLQDVLLRFAFDNICAAAFGVEAGCLADGLRDVPFARAFERATELSLTRFYTPPFVWKSKRLLGVGSERALVEAARAVRKFAERTVADRRAELRKVGDLAGRFDLLSRLMSSPPPAGYSDEFLRDFCISFILAGRDTSSVALTWFFWLLASHPHVEARVLDDVARGGGDVSAMDYLHAALTESMRLYPPVPVDFKEALEDDVLPDGTLVRARQRVIYYTYAMGRDKATWGPDCLEFRPERWLSKSGAFAGGAESPYKYVVFNAGPRLCVGKRFAYTQMKMAAAAVLARFRVEVLPGQEVKPKLNTTLYMKNGLMVRFVRREQRHELGHPLPAAAADAGED

SEQ ID NO: 9815 - protein, 134 aa, Zea mays
  VARIANT 101: note = Ancestral polymorphism is V, Derived polymorphism is I
  VARIANT 76: note = Ancestral polymorphism is R, Derived polymorphism is C
MTTAGRDKASMAGAKRVVARQWRWQLERRRLEQGERWAAFGSGSRRRAAVAVAAGIPATPPPGHPATATGNHQHQRRVKSRRRRLDSGDEASRGREVYLGVGGRWRLEERRSNLLLVAVFLCFRERWICPGVTL

SEQ ID NO: 9816 - protein, 459 aa, Zea mays
  VARIANT 157..459: note = Derived polymorphism lacks residues 157 to 459
  VARIANT 193: note = Ancestral polymorphism is P, Derived polymorphism is L
MDALSRPAVVIDNGTGYTKMGFAGNVEPCFITPTVVAVNDSFSGSGQPAARGAPARGNWLAQHSAGVMADLDFYIGQEALARSRASSSHSLSYPIRNGQVENWDSMERFWQQCIFNYLRCDPEDHYFLLTESPLTAPEIREYTGEIMFETFNVPGLYIAVQPVLALAAGYTTTKCEMTGVVVDVGDGATHIVPVADGYVIGSSIRSIPITGKDVTQFIHQLLKERGENIPPEESFDVARRIKEMYCYTSSDVVKEFNKHDREPSKYVKHWTGIKPKTGAKYTCDIGYERFLGPEIFFNPEMYNNDFTTPLQVVIDRCIQSSPIDTRRALYKVLLICVLLLLFILRHRIECKEFPMAQNIVLSGGSTMFKDFHRRLQRDLKKIVDARVRASNSRLLSGDAKAQPIEVNVVSHPIQRYAVWFGGSVLASTAEFYEACRTKAEYEEYGASICRSNPVFKGMY

SEQ ID NO: 9817 - protein, 683 aa, Zea mays
  VARIANT 442: note = Ancestral polymorphism is A, Derived polymorphism is S
MTFSMDMDLNASPVPDDDEQQPYNEPVEAEYAQEEHVESAVATLRREREERRKRLKREQQDDGSRLHSQQIRVDYAPQPKRHSRIKEAPQGWLDCPAFGEPIDKIIPSKVPLDETFNESVPPGKRYSSKQLVNKQRKAGREIGLVIDLTNTTRYYSPAEWTKQGTKYAKIACKGRDAVPDNESVNKFVYEAMIFLDRQKHSKNPKYILVHCTHGHNRTGFMIIHYLMRTHVSCVAEAINMFAQRRPPGIYKRDYIEALYSFYHEVPENMMIACPPTPEWKRPDDLDLNGEAKQDDDDDNGDPEPPRNESEDKIITNDDVLGDEVPYDQQEALRVLCYKLLEMPLIRGHSQFPGSHPVSLNSENLQLLRQRYYYATWKADGTRYMMLIMRDGCFLIDRNFCFRRVQMRFPHKSLEGLHDMTLIDGEMIIDTVPDSGLKRRYLAYDLMALGAVSKTKLPFSERWKMLEDEIIRPRYYEKNKFESGSKSNPLYKYDMELFSVRRKDFWLLSTVKKVLKVFIPSLCHDADGLIFQGWDDPYVTRTHEGLLKWKYPEMNSVDFLFELTNDNRQLVFLYERGKKKLMDGARIAFTDDVDPSSIAGRIVECSWNKEEQCWSCMRIRSDKSTPNDINTYRKVMRSITDNITEEKLLEEIDEISLLPMYADRMQQAHTKMAQQQRRRLPPQC

SEQ ID NO: 9818 - protein, 250 aa, Zea mays
  VARIANT 216: note = Ancestral polymorphism is A, Derived polymorphism is T
  VARIANT 175: note = Ancestral polymorphism is Y, Derived polymorphism is C
  VARIANT 168: note = Ancestral polymorphism is G, Derived polymorphism is R
  VARIANT 148..250: note = Derived polymorphism lacks residues 148 to 250
  VARIANT 142: note = Ancestral polymorphism is K, Derived polymorphism is T
  VARIANT 141: note = Ancestral polymorphism is S, Derived polymorphism is N
  VARIANT 138..250: note = Derived polymorphism lacks residues 138 to 250
  VARIANT 120..250: note = Derived polymorphism lacks residues 120 to 250
  VARIANT 119: note = Ancestral polymorphism is I, Derived polymorphism is T
MPQPAAFVSVQPSDGQPTPSNVSNKKMKHGGEALILDGVGEVAVTIGRNSQQPLSTTLHPVNLQVNMLPVTYPQSHNYQQDDFHKIVARTLSQGSTPMSMDFHPLQQTLLLVGTNVGDIGLWDVGTKDRLVVRNFKVWDLSKCIMILQASLVKDPAVSVNHIIWSLDGTLFGVAYSRHIVQIYSYNGGDDIRQHSEIDAHIGGVNDIAFGFYLAWATQHFHSSCFLNFFLHRHPKEFCYYHWFTDLKITP

SEQ ID NO: 9819 - protein, 72 aa, Zea mays
  VARIANT 63: note = Ancestral polymorphism is K, Derived polymorphism is Q
  VARIANT 58: note = Ancestral polymorphism is R, Derived polymorphism is C
  VARIANT 7: note = Ancestral polymorphism is D, Derived polymorphism is Y
MADYNQDGADPCEKLITTREGIETIDLYSSSNGRFANAEGAFIYPMYGHGELPQAFCRCAAVKDAISISTNY

SEQ ID NO: 9820 - protein, 556 aa, Zea mays
  VARIANT 143: note = Ancestral polymorphism is Q, Derived polymorphism is L
MKRSYEYRVLCFCSHPSVECNMQCPMDTAASGTSPVMQFHSNADESIAHSSPLATLIQRSQRHCYGDGSPGEFPLAVSPSIVLHVLSSCDLGPKDLANLEATCVFFGKPASFAPDFALSLPELAAFDMCQKRTMFKQMKQEDQECLKQRCGGSWKHVLGYILVREKNGSRVIAGPGHSIIITSNGDVYSFGANCSGQLGLGDSEDRFKPCVIRSLQGIRITQAAVGSRCTMLVSDTGSVYSFGKEDFRVAELVDGAHFQITTPRIEESLKGVFVVQAAIGGYFSAVLSREGRVYTFSWGKAERLGHSSDPSDVEPRLLPGLEDVPVAYISAGNCYLLMLAYQPNGMSVYSVGCGLGGKLGHGCKTNNGMPKLVEQFQSMSFKPVSIAAGTWHAVALGADGRVCTWGWGHTGCLGHGDEECRAVPTVVEGLRDVKAVHVSTGEYTTFVVAENGDVYSFGSGESLAFQLDDEAEEEPDSSTPSIVSSLKDLNKKVVQISHTNASYWMNSEMGHPHTFAVMDSGDVCAFGGGVRGQLGVKLHEGVEKVRVPMNVPIGLN

SEQ ID NO: 9821 - protein, 146 aa, Zea mays
  VARIANT 28: note = Ancestral polymorphism is G, Derived polymorphism is D
  VARIANT 47: note = Ancestral polymorphism is M, Derived polymorphism is I
  VARIANT 72: note = Ancestral polymorphism is W, Derived polymorphism is C
  VARIANT 98: note = Ancestral polymorphism is T, Derived polymorphism is I
MMIKLRYSKRLFKRSSSSSKQQAAPRGGDNGGGGAGEIEWEVRPGGMLVQKREEGRGGQETVTVRVSTGFSWHHVSIGATSTFGELKVMLSMVTGLKTREQRLLFRGKERDDTDHLHMVGVRDKDKVLLLEDPALKDMKLRALSAP

SEQ ID NO: 9822 - protein, 233 aa, Zea mays
  VARIANT 155: note = Ancestral polymorphism is I, Derived polymorphism is T
  VARIANT 150: note = Ancestral polymorphism is G, Derived polymorphism is S
  VARIANT 144..233: note = Derived polymorphism lacks residues 144 to 233
  VARIANT 112: note = Ancestral polymorphism is A, Derived polymorphism is G
  VARIANT 108: note = Ancestral polymorphism is F, Derived polymorphism is Y
  VARIANT 80: note = Ancestral polymorphism is S, Derived polymorphism is A
  VARIANT 64..233: note = Derived polymorphism lacks residues 64 to 233
  VARIANT 63: note = Ancestral polymorphism is A, Derived polymorphism is D
  VARIANT 50: note = Ancestral polymorphism is S, Derived polymorphism is F
  VARIANT 45..233: note = Derived polymorphism lacks residues 45 to 233
  VARIANT 27..233: note = Derived polymorphism lacks residues 27 to 233
  VARIANT 17..233: note = Derived polymorphism lacks residues 17 to 233
  VARIANT 13..233: note = Derived polymorphism lacks residues 13 to 233
MELLPPVPDPWPQVVEQGFAVLVAMVQAWESSAPDENKTPEKRFWQSGQSAIAQTISLLLQKAWLFQADNMEGSALPPLSCVNDASVLLEFVMSSVTCMEETESLKVFELVATWADAIANWDSWEEMEDQGVFNTIKEVVNFHQRFDLDGLFLKTHFVRCHSTRNGTIKIGLETNKIMDFIKFDVGNVVMMTGGRNTRRVGVIKNREKHKGSFETIHVLLRDFSMSSFLLFVV

SEQ ID NO: 9823 - protein, 98 aa, Zea mays
  VARIANT 62..98: note = Derived polymorphism lacks residues 62 to 98
MPEKTYVLDARQVFDGRINNSNSGIQKPSDWNGIVTNNLNDGIISSDENNLVRGAEHAAITRITYETAVSGSILTLVYGDNGSNLAKLREVLLCNYLT

SEQ ID NO: 9824 - protein, 326 aa, Zea mays
  VARIANT 172..326: note = Derived polymorphism lacks residues 172 to 326
  VARIANT 15: note = Ancestral polymorphism is P, Derived polymorphism is T
MAGTCAHVEFLRAQPAWALVLAAVGLLVAVRAAARFALWVYAAFLRPGKPLRRRYGAWAVVTGATDGIGRAVAFRLAAAGLGLVLVGRNPEKLAAVAAEIRAKHPKVPEVRTFVLDFASEGLAAGVEALKDSIRGLDVGVLVNNAGLSYPYARYFHEVDEELMRSLIRVNVEGVTRVTHAVLPGMVERKRGAIVNIGSGAASVVPSDPLYSVYAATKAYVDQFSRCLYVEYKSKGIDVQCQVPLYVATKMASIRKSSFMVPSTDTYARAAVRHIGYEPRCTPYWPHSVVWFLISILPESLIDSVRLGMCIKIRKKGLAKDAKKKAL

SEQ ID NO: 9825 - protein, 188 aa, Zea mays
  VARIANT 143: note = Ancestral polymorphism is C, Derived polymorphism is F
MMHSSAPSTNSFNVVFVNCHKYLFLTFCSLTVFIIGATNRPDIIDPALLRPERLDQLIYIPLPAEQSRLQIFKACLRKSPVAKDVDLNALAKYTQGFNGADITEICQRACKYAIKENIEKFFIFFIFRVEKNLKLLNQQSMMCKMKLGIMAMRILKLVNTLMRKWILTRNMREQKLCDENKAAEVGIY

SEQ ID NO: 9826 - protein, 125 aa, Zea mays
  VARIANT 41: note = Ancestral polymorphism is A, Derived polymorphism is V
  VARIANT 50: note = Ancestral polymorphism is V, Derived polymorphism is M
  VARIANT 95: note = Ancestral polymorphism is C, Derived polymorphism is G
MILALVYGTIPFIDKTICLHVMFEIGEGPSSPSISFRVLFVVIQDNISSVARELIFHHYEELKESIITREEMVKKMTIVVGEKVLLEALKKLHYCKFAFACIFLFYVKSEDYFQGLCWFFSLQAL

SEQ ID NO: 9827 - protein, 160 aa, Zea mays
  VARIANT 134: note = Ancestral polymorphism is M, Derived polymorphism is T
  VARIANT 125: note = Ancestral polymorphism is E, Derived polymorphism is K
  VARIANT 111: note = Ancestral polymorphism is R, Derived polymorphism is H
  VARIANT 55: note = Ancestral polymorphism is P, Derived polymorphism is Q
  VARIANT 51: note = Ancestral polymorphism is I, Derived polymorphism is T
  VARIANT 41: note = Ancestral polymorphism is P, Derived polymorphism is S
  VARIANT 22: note = Ancestral polymorphism is A, Derived polymorphism is T
  VARIANT 21: note = Ancestral polymorphism is R, Derived polymorphism is C
  VARIANT 1: note = Ancestral polymorphism is V, Derived polymorphism is M
MQMLRGGSEADPPARQGLLRRASLVSGCGGQRDAQPAANMSLTKHLRVAIIDSNQALESRSYLGKNSIPDSRVSTVTPATISFFKGVISSSRLVLPIFNGATYIYEAHVQHYFKICSYVSPSYSEHHRRVLKMMSLDACRSVEHFIDTHGPDALDRIIRA

SEQ ID NO: 9828 - protein, 223 aa, Zea mays
  VARIANT 16: note = Ancestral polymorphism is R, Derived polymorphism is C
  VARIANT 36: note = Ancestral polymorphism is V, Derived polymorphism is A
  VARIANT 39: note = Ancestral polymorphism is R, Derived polymorphism is C
  VARIANT 154: note = Ancestral polymorphism is W, Derived polymorphism is R
  VARIANT 157: note = Ancestral polymorphism is S, Derived polymorphism is L
  VARIANT 212..223: note = Derived polymorphism lacks residues 212 to 223
MMEAGDSTIMARFTTRVTGDDDALECPSVASSFITVSLCNIVLASLARQRRSMPHSQSSTSFNRPPYHSDEDALFPDHQIAAMEPDPVAAGASSSPARLAPHLIYSSSFFFSAGFLLCKKKQVTQGVNVKELFVRVALAGTSFYFYQQSLFISRQVSYSLLARVSPVTHSVPNSLKRVVVIVTSVLFFRTLISRINALGTGVALAGVFLYSQFKKSKPKATAA

SEQ ID NO: 9829 - protein, 111 aa, Zea mays
  VARIANT 48: note = Ancestral polymorphism is A, Derived polymorphism is V
  VARIANT 41..111: note = Derived polymorphism lacks residues 41 to 111
  VARIANT 26: note = Ancestral polymorphism is Q, Derived polymorphism is R
  VARIANT 16: note = Ancestral polymorphism is K, Derived polymorphism is E
MSSRRYASGSEKRKRKKRTEEFIESQRGAMDRFLTSNPRTSTNTYELAIVVVEEQPNINLEDGLPSDENVDINMDDNNVSGHEPIFNSSPTENANVDEQSDFIEDICDPRN

SEQ ID NO: 9830 - protein, 97 aa, Zea mays
  VARIANT 75: note = Ancestral polymorphism is K, Derived polymorphism is E
  VARIANT 62..97: note = Derived polymorphism lacks residues 62 to 97
  VARIANT 58..97: note = Derived polymorphism lacks residues 58 to 97
  VARIANT 57..97: note = Derived polymorphism lacks residues 57 to 97
  VARIANT 52: note = Ancestral polymorphism is S, Derived polymorphism is Y
  VARIANT 27..97: note = Derived polymorphism lacks residues 27 to 97
MIWNNVYEKGLVDVMHDHKDNPKFKGQNGWNHDGWNSITTKFNEKFPLAHFSKQQLQEKERELKGYYKTIRDSRKESRVGWNDTLCMVLAEPEVWPS

SEQ ID NO: 9831 - protein, 367 aa, Zea mays
  VARIANT 188: note = Ancestral polymorphism is R, Derived polymorphism is L
MAASDALQSIVYSRGSLRLLDQRKLPLEMEYIDVKSSADGWNAIRDMVVRGAPAIAIAAALALAVEVSDLDFIGTPEEAASFVSKKLEYLVSSRPTAVNLSDAATKLQTLVSKAAETAKDSKSIFQVYIEAAETMLVDDVADNKAIGSHGAVFLQRQLANSKKISVLTHCNTGSLATAGYGTALGVIRALHSGGVLEKAFCTETRPFNQGSRLTAFELVHEKIPATLIADSAAAALMKQGHVQAVIVGADRIAANGDTANKIGTYNLAISAKHHSVQFYVSAPVTSIDLSLPSGDEIVIEERSPKELLNSEGGLGKQVAASGISVWNPAFDVTPANLITAIITEKGVITKTDADGSFDIKGFLLPAK

SEQ ID NO: 9832 - protein, 265 aa, Zea mays
  VARIANT 249: note = Ancestral polymorphism is P, Derived polymorphism is T
  VARIANT 233: note = Ancestral polymorphism is D, Derived polymorphism is H
  VARIANT 225..265: note = Derived polymorphism lacks residues 225 to 265
MGALSSIGVGLAVVSSLLLLALTAELYYIFVHKRRQRRRAAAVSDAASSPSSSSRELLQLFCFKKPPPELASTYAVPEPASAVAVSVGDDDDDDGETVEAQLMRLGSVVGPTRLLFTIKEETREDLESEDGGRGRSRSRSRSLGELLHCAETPPFFTPRASPSPVPTASMDNSYNPLFESPAASPVPTHAPTVSPPPKFQFLRDAEDKLYRRALAQEEAMRARRSPAAAAEEDGGYITIVVDKNNRVIPMPSPSPSPPTAAAGHQ

SEQ ID NO: 9833 - protein, 251 aa, Zea mays
  VARIANT 154: note = Ancestral polymorphism is D, Derived polymorphism is H
MHDKRRMGTEADAAAVDLLRSQIPFQTDGEFVLPPRGVGLVLVDLCNGFCTVGAGNLAPVAPNKQISKMVEEAARLSKLFCDRNLPIFAFLDTHYPDKPEPPYPPHCIIGTGEEDFVPDLEWLEKEPNVTIKRKSCIDGYISCIEKDGSSVFADWIGKYQIKTVLVLGICTDICVLDFASSTLAARNIDRVPPLQDVVIYSGGCATYDLPVEIATNIKGALAHPQDLMHHIGLYMAKGRGAKIVDRVVIEP

SEQ ID NO: 9834 - protein, 490 aa, Zea mays
  VARIANT 107: note = Ancestral polymorphism is K, Derived polymorphism is N
MEKLDESKFEQRLELLALRIPRELASAVTRLLRSGYLLDKPRVKPVVEDPEGDKNRLVILSERIQKPDLSDMSQQALDSLKQLCNVEVVPYTLTLGYSYWSADHILKRILPAGVEVPSSFETIGHVAHLNISDDLLAYKDVIAKVIYDKNYPRIQTVVNKVGTITNEFRVPKFEILAGKNDMVTEIKQYGATFRLDYGLVYWNSRLEHEHIRLVSLFKKGDVICDMFAGIGPFSIPSAQKGCVVYANDLNPDSVHYLRTNAKINKVEDYIFAYNMDARVFMQKLMTVPGLETRSDSQVATDESYSKEGVPPNEISSSNGNHNDVREDIKNGANESSAASTTTKKRQQTSEEGDEPDCQDADANKTKRQNKKRVRGLGPLPSKPWEHFDHVLMNLPASALQFLDCFDGLIQKKYWTGSLPWIHCYCFIRSCESEESILSEAQNKLSATIAEPIFHRVRDVAPNKAMFCLSFKLPMECLKGDSENHIESVAK

SEQ ID NO: 9835 - protein, 253 aa, Zea mays
  VARIANT 8..253: note = Derived polymorphism lacks residues 8 to 253
  VARIANT 1: note = Ancestral polymorphism is M, Derived polymorphism is I
MKIQCDACEGAAATVVCCADEAALCARCDVEIHAANKLASKHQRLPLEALSASLPRCDVCQEKAAFIFCVEDRALFCRDCDEPIHVPGTLSGNHQRYLATDIRVGFASASSACSDACDAHDDSDHHAPPKAAVSSAAQQVPSPPQFLPQGWAVDELLQFSDCESSDKLHKESPLGFKELEWFTDIDLFHEQTPKAGRRLAEVPELSGTQAANDAAYYRPAKATATAGAGVRQSKKARTEVTDDEDHLIVPDLG

SEQ ID NO: 9836 - protein, 243 aa, Zea mays
  VARIANT 99: note = Ancestral polymorphism is D, Derived polymorphism is G
MMSYFQTTTCKPQSRVVVNKPIPGLGSTSQHPLYSHALRFHRLQQKVYPRLLLVAASHKRLTPVCVLSGKGNAGTADDPLMESLKKAMADAKKPRSIQDLLKEQVAKLREQASGGGGGNGNRRGGSGGSGGPDDESFKEALDEVVQVILATVAFILVYIHIIRGEELYRLARDYTRYLVTGKRTARLKRSMQKWHNFSESFMQKEGSEEDQYEKPTWWQQPQKLVHLMEELCRGNWRPHAQES

SEQ ID NO: 9837 - protein, 130 aa, Zea mays
  VARIANT 56: note = Ancestral polymorphism is G, Derived polymorphism is S
  VARIANT 10: note = Ancestral polymorphism is G, Derived polymorphism is D
MYIFKQPGIGGEVVPHQDNTFLYTEPRTCTGLWLALEDATINNGCLWAIPGSHKKSLVRRMVRDENGTHFDRPSPVYDQKEFVPLEVKSGALVVIHGDLIHQSFENLSPASRHAFSLWILKDVNGPKTTG

SEQ ID NO: 9838 - protein, 285 aa, Zea mays
  VARIANT 89..285: note = Derived polymorphism lacks residues 89 to 285
MAPPRPPTGPILFLPLVFLFLFTTAVASAAAPEDEKFTEELLLRSLPDRKALAHFHFRSSAPPAASVGRHHHLFPKAISQLVKKYHISELELSFTQGRWNYEQWGGFDPMSTNNAKPPVSAPRWGFKLNEGNLRYGALPREAVCTENLTPWLKLLPCRDKARITSLLYRPSIYKGYYHSQKLKLRSSQSLGIILDQTLTVVLQPNNVHGEQLHSNHGQLQPNWSMRHLFNRKLSGKCLVSKSSRVFIEVDKGIADKVNISRSVHSWSNEFFVLSNSPDKLIKGKV

SEQ ID NO: 9839 - protein, 115 aa, Zea mays
  VARIANT 10..115: note = Derived polymorphism lacks residues 10 to 115
  VARIANT 19: note = Ancestral polymorphism is N, Derived polymorphism is K
  VARIANT 25: note = Ancestral polymorphism is F, Derived polymorphism is C
  VARIANT 28: note = Ancestral polymorphism is W, Derived polymorphism is S
  VARIANT 33: note = Ancestral polymorphism is T, Derived polymorphism is M
  VARIANT 37: note = Ancestral polymorphism is D, Derived polymorphism is N
  VARIANT 48: note = Ancestral polymorphism is D, Derived polymorphism is N
  VARIANT 83..115: note = Derived polymorphism lacks residues 83 to 115
  VARIANT 85..115: note = Derived polymorphism lacks residues 85 to 115
MSQGLEPNMRDKVIYSSPNFDPKVFLSWVHKDTSAADLEASALTLKTDLKGRTQQKKLLVKENFDCFVSCKTTIDDIESKLRQIEEDPEGAGTAHLYSVTLKISGVANRAFEPRL

SEQ ID NO: 9840 - protein, 572 aa, Zea mays
  VARIANT 194: note = Ancestral polymorphism is C, Derived polymorphism is Y
MGNAKLAFSLSPPRSPATGGRPERHQPSPSRSPTTPNDLEALDLHYSSSPGEPSSAPASRSNAARVTPKSVDEALAARLPAHVKDKEPAAPRLRSVLVDNRGLSFKDVAAGAPSGSNGGQQPLRPPPRGGGATWHEVRPCYWWRKKRLPVHSRLGPLEPPAARRATPVRDRLGPRFVDFNALLKSKAVRRCFNCFARDHRISGCRDPPRCLLCGQSGHKARYCARPPFQSDFPLSPQPSHLPPRSSSASPRSDSPSPPPPCTSPPCSPPRISPHCRPASPQLAPPLTTTPLEDPKLASGAAGFRTKGVKACVLCTAAMTVYEHDLLSRADHCEVCVEHDLLRRAIIAAMMKVLQSCNLRRAAEHTDNKSSLVLQHDPILLSFSSTPVIWDSSCDPMLDEVRGAALAPAHVSMVTAVVDNAPPHSESGPSNDAGVIAVDVAGAVAVQGDRDVLASLLSPVPSAVLPTPLPPVNKTKRASTMKKMATRSSARIASKPKSNLTMEEQATALLMKRSGTIPDHAEPNEQDHARFRAQFVDELNVEAAAGYQSLFSLGEEDSIDSDPLAPLAVLGTV

SEQ ID NO: 9841 - protein, 316 aa, Zea mays
  VARIANT 45: note = Ancestral polymorphism is G, Derived polymorphism is D
MSSSSSSMDCVISSSKDNEKEITPPPLNSGAAAWWTGDTVAVVTGANRGIGHALAAHLAEQGLCVVVTARDEARGQAAAAALRHGAGPPRGAVRFRRLDVADPASIAAFASWLRDELGGLDILVNNAAVSFNEMDTNSVEHAETVLRTNFYGAKMLTEALLPLFRRSPATSSRILNVSSQLGLLNKVKDPQLRSMLLDEAALTEGDIEGMASRFLAQVADGTWRGRGWPEVWTDYAVSKLALNAYSRLLASRLAGRGVSVNCFCPGFTRTHMTRGLGNRTADEAGRVAAGLALLPPLHLPTGKFFKWRTPQLYSKL

SEQ ID NO: 9842 - protein, 483 aa, Zea mays
  VARIANT 214: note = Ancestral polymorphism is W, Derived polymorphism is S
MSVASSHRLRPSPSGPARRPGSAAPRVAFWPAGASPPYRGRCTVVAAAAAAGAGGEASSAPVAVSAVAPAGAARDKVRRHTISVFVGDESGMINRIAGVFARRGYNIESLAVGLNKDKALFTIVVSGTDRVLNQVIEQLNKLVNVLSVEDLSKEPQVERELMLIKLNVEPDQRPEVMVLVDIFRAKVVDISEKTLTMEVAGDPGKIAAVQRNLWKFGIKEICRTGKIALRRERIGATARFWRFSAASYPDLIDALPKNPLTSVNRTVNGSFGQPSNAGGDVYPVESYESLSVNHVLDAHWGVLDDDDATGLRSHTLSILVNDCPGVLNIVTGVFARRGYNIQSLAVGPAEKEGISRITTVVPGTVESIEKLVQQLYKLIDVHEVHDITHSPFAERELMLIKVSVNTAARKEILDIAEIFRAKPVDVSDHTVTLQLTGDLDKMVALQRLLEPYGICEVARTGRVALVRESKVDSKYLRGYSLPL

SEQ ID NO: 9843 - protein, 451 aa, Zea mays
  VARIANT 24: note = Ancestral polymorphism is K, Derived polymorphism is M
MVWSMDPQVTVHGDWVSAVVPLMKLLCLAVIGLLLANPRVQVVPRATFKLLSKLVFALFLPCLIFVHLGKSVTIDNVLHWWFIPVNVLISTAIGCALGYIVALICRPPPHLFRFTVIMTGFGNTGNLPIAIIGSVCHTNDHPFGPGCDTMGIAYVSFAQWVAVILVYTLVYHMMEPPMQFYEIVGEGNEIQQEPELVSNYSRSLLHEAEWPGMVDKETEHSKTPFIARVFMSISGSSQNTFPDIDFTEEGTSAAGPSSPKSLRCLAEPRVVRRIRVVAEKTPIQHVLQPPTIASLLAITIGMVPVLKDFVFGADAPLSFFTDSLEILAAAVVPSVMLILGGMLAEGPKDNALGMRTIIGIIVARLLVLPCIGIGVVTLADRLHLLVEENHMYRFVLSLQYSTPSAILLGAIASLRGYGVKEASALLFWQHICAVFSLSLYLVVYFKLFSFI

SEQ ID NO: 9844 - protein, 227 aa, Zea mays
  VARIANT 79..227: note = Derived polymorphism lacks residues 79 to 227
  VARIANT 85: note = Ancestral polymorphism is E, Derived polymorphism is K
  VARIANT 105: note = Ancestral polymorphism is R, Derived polymorphism is T
  VARIANT 117: note = Ancestral polymorphism is A, Derived polymorphism is T
MPPAPPRISSPLPPPCPDSCPTRPDPTAMPRSVTRSTGAARCPHSPTRRACVQLPRSQVDHTSVPGSAAVFDHGGTAARGAQLLEHLLGPTEFDAAVGLTALATREKAEAALEKGNTNEAEALLTEVIGFNACGGLHLVHMSRSKARLEMGDIPGALGDAEEAIRIAPRFPQAHLLRGDALFAMGEYSVAEDAYADALDLDPSIRRSKSFRARLERLREKLVSANNP

SEQ ID NO: 9845 - protein, 314 aa, Zea mays
  VARIANT 244: note = Ancestral polymorphism is R, Derived polymorphism is Q
  VARIANT 246: note = Ancestral polymorphism is R, Derived polymorphism is P
  VARIANT 249: note = Ancestral polymorphism is R, Derived polymorphism is W
MELEQKPPPPPAGYWSGVAGGRPCDACAARPARLHCRADGAFLCPGCDARAHGAGSRHARAWLCEVCEHAPAAVTCRADAAALCAACDADIHSANSLARRHERLPVAPLLGALSDAPAPQHFPSAAAAAGEEASAAEEEDGSDEAEAASWLLPEPDNSHEDSAAADSFFAEPDAYLGVDLDFARCVDGVKAIGVPVTPAPLELDMAAGSFFYPQHSMNHSIVQVPSSSEVAVSRGKEREARLMRYREKRKSRRFDKTIRYASRKAYAETRPRVKGRFAKRCSEDDDALEHEEAACFSPAGSASASSDGVVPSLC

SEQ ID NO: 9846 - protein, 121 aa, Zea mays
  VARIANT 85: note = Ancestral polymorphism is K, Derived polymorphism is N
MKLSDFGLCKPIDCSKLSTLSEDEPMGDDNMRESMDIDSSLSNTANGRRWRSQHEQLQHWQMNRRKLAFSTVGTPDYIAPEVLLKKGCGMECDWWSLGAIMYEMLVGYPPFYADDPITTCR

SEQ ID NO: 9847 - protein, 368 aa, Zea mays
  VARIANT 36: note = Ancestral polymorphism is P, Derived polymorphism is L
MLCGAVSVVFDRLVGWFSRFFGHIKEKFDFPIIVYPALGGLGAGIIALKYPGILYWGFTNVEEILHTGKSASAPGIWLLTQLTAAKVVATALCKGSGLVGGLYAPSLMIGAAVGAVFGDSAAYLINSSLPGNAAVAQPQAYALVGMAATLASVCSVPLTSVLLLFELTKDYRILLPLMKLCTEKLQCPYDTTTIGPDQIEALYQYAKFQFECGNYSGAADYLYQYGALCTNSERNVSALWGKLAAEILMQNWDLALEELNRLKEIIDSKNFSSPLNQLQNRIWLMHWALFIFFNHIRYLNAIQTNAHHLIRYLATAVVVHKRRRNMLKELIKVIQQEHHSYKDPVTEFLECLYVNYVVVGFGTITGVI

SEQ ID NO: 9848 - protein, 259 aa, Zea mays
  VARIANT 115..259: note = Ancestral polymorphism lacks residues 115 to 259
  VARIANT 175: note = Ancestral polymorphism is T, Derived polymorphism is R
MAASTASRIFTPFLHRHQRRTKAVVVAAASPPDAEPTPATADGAGPGKKKTVDTRIHWSNPDEGWVGGKAKKEGDGRGSSKNEPLGGRFADLINNAAESHYQLSSSPIHAHMSFWIAVQLFLGIAPEADIEEIKTAYRRLSKEYHPDTTTLPLKVASQKFIRLREVYNVLSKEETRRFYDWTLAQEAESRRLQQLRSRLEDPYEQDIINYKPVPDMVDRLGGKNMKLSDQAMTALTIDIVIIIISICCIIYAVFFKEQY

SEQ ID NO: 9849 - protein, 531 aa, Zea mays
  VARIANT 103..531: note = Derived polymorphism lacks residues 103 to 531
MQGASHMLLEEPFRLASVLSPAKPKVFPSLTKIVGTLGPNSHSVEIIQECLTAGMSVARFDFSWMDAAYHQETLDNLRKAAQNVKKLCPARVETQQKPQVKVQVMLDTLGPEIQVHNSTGEPIELKAGNHVIITPDICKALSAEILPIKFGDLAKAVKKGDTLFMGQYLFTGSETTSVWLEVVETSGENVNCLVKNAATLDGPIFTLHASQVHINLPTLSEYDKHVISTWGSCNSVDIISLSHTRSAEDVRELRAFLQAHALPDTQIYAKIENSEGLDHFDDILNAADGIIISRGDLGIDLPPENVFMFQKTAIHKCNLEGKPVIITRVVDSMIDNLRPTRAEATDVANAVLDGTDGILLGAETLRGLYPVDAAETVYNQPLQFKKVMWHVGDPMPHEESVASAAVGSAIKVKAAAIVVFTFSGRAARLVAKYRPTMPILAVIFPREGSDPSKWRSYGTTQARQCFAVRGVYPLMGSTDEAETGGLTKEEYGIKLAMSYGRSVGIVKPFDRLIIFEKIGDSSVVKIIECEG

SEQ ID NO: 9850 - protein, 152 aa, Zea mays
  VARIANT 29: note = Ancestral polymorphism is T, Derived polymorphism is M
MACSTGLCFLASIPPLSASCSSGSSCFLMIKRVSSAPSLSRWTIQYKQLGHTIYRRSHVLAFASADAPQGKRSSGENVVMVDPLEAKRLAAKQMQEIRAKEKLKRRRQAEAINGALAVIGLTAGLLVEAQTGKDILGQLAGYLTAISSLFGQ

SEQ ID NO: 9851 - protein, 67 aa, Zea mays
  VARIANT 13: note = Ancestral polymorphism is P, Derived polymorphism is R
MPAHGHHRWLFLPICCPSFAAGAEPSSSQSAACSTGRLCWMTRKKRKRLKPRRRASVGCEERLGAAL

SEQ ID NO: 9852 - protein, 150 aa, Zea mays
  VARIANT 130: note = Ancestral polymorphism is F, Derived polymorphism is S
  VARIANT 113: note = Ancestral polymorphism is Y, Derived polymorphism is H
  VARIANT 85: note = Ancestral polymorphism is L, Derived polymorphism is M
  VARIANT 83: note = Ancestral polymorphism is R, Derived polymorphism is P
  VARIANT 82: note = Ancestral polymorphism is L, Derived polymorphism is F
  VARIANT 67: note = Ancestral polymorphism is L, Derived polymorphism is V
  VARIANT 31: note = Ancestral polymorphism is E, Derived polymorphism is V
  VARIANT 14: note = Ancestral polymorphism is G, Derived polymorphism is D
  VARIANT 12: note = Ancestral polymorphism is G, Derived polymorphism is D
  VARIANT 6: note = Ancestral polymorphism is R, Derived polymorphism is C
  VARIANT 5: note = Ancestral polymorphism is S, Derived polymorphism is T
  VARIANT 3..150: note = Derived polymorphism lacks residues 3 to 150
MGQKSRGFRTLGSGLSRLLLSLQGRLAEAIVVDPTSSRVPDYNQPSPPPPSAAPPSAANTPLSRPLVLLLQQDGGGEETLPLRLLIEIKTAPADFRFPTTNQTRHCFTRYVEYHRCLNAKGDDAGVCEKFAKYYRSLCPGEWVSISFSFW

SEQ ID NO: 9853 - protein, 395 aa, Zea mays
  VARIANT 112: note = Ancestral polymorphism is E, Derived polymorphism is G
  VARIANT 119: note = Ancestral polymorphism is A, Derived polymorphism is T
  VARIANT 169: note = Ancestral polymorphism is P, Derived polymorphism is L
MAVLQVAAAAPPPVSVIGFEGFEKRLEISFSEAPVLADPSGRGLRALSRAQIDSVLDLARCTIVSELSNEDFDSYVLSESSLFVYPYKIVIKTCGTTKLLLAIPRILELAEELLLPLAAVKYSRGTFIFPEAQPSPHKNFADEVAFLNRFFGGLKSGGNAYVIGDSAKPGQKWHVYYAAEHPEEPVVTLEMCMTGLDKKKASVFFKTTADGYSLCAKEMTKLSGISDIIPEMEICDFDFEPCGYSMNAVHGPALSTIHVTPEDGFSYASYEVMGFNPGSFSYGDLVKRVLRCFGPTEFSVAVTIFGDRDNAKTWGTKLDAEAYACSNMVEQVLPFGGLLIYQSFTVTAETTHGSPRSVLHDFAGDIVKNRSESDAPWEADAVDESEERDVKKMKC

SEQ ID NO: 9854 - protein, 224 aa, Zea mays
  VARIANT 55..224: note = Derived polymorphism lacks residues 55 to 224
  VARIANT 61: note = Ancestral polymorphism is I, Derived polymorphism is N
  VARIANT 97..224: note = Derived polymorphism lacks residues 97 to 224
MSFIFGKKKTPAELLRENKRMLDKSIREIERERQGLQAQEKKLINEIKKVAKQGQMGAVKIMAKDLIRTRHQITKFYALKSQLQGVSLRIQTLKSTQAMGEAMKGVTKAMGQMNRQMNLPALQKIMREFEMQNEKMEMVSEVMNDAIDDALEGDEEEEETEELVSQVLDEIGIDINSELVKAPATAVAKPVAAGKVPAQAEAAGGPDGGIDDDLQARLDNLRKM

SEQ ID NO: 9855 - protein, 429 aa, Zea mays
  VARIANT 1: note = Ancestral polymorphism is M, Derived polymorphism is L
MAYLPPHKRQPSTTASTPIPAPNPPPPSLSSSLRSLSLSSPRGRGRGAVGRHPLASTKIFRAAGCISRWFPLPPFSPAGDGEEYTLRLEPFPCSPIEHRTGAKPLALVVASTPGQGSSGSTAAAVTSIAEQFLPDLLAAAERAKAEGAPKDELVKLSLVARLGTVLFECQPIRRFIVNYVFRGGSPVSLDELRQAAKAGEDGSRSQLRKTFYTSLSSECLDDMERTMVKRIGLDFDSSKKHYHVKVSDKNRSDSTISCKCTVEEDGSLAIHKVELNQVRHLVEDISCLFKGLDLRLMLSKKRILKNLDSEVENAVKSLVSTAIIDPNVKGGVRWPLGKESIGERFSIVGVWHTGYKAFRNETMRLKLRHADRFDHRTSTGGVSDEVTFKLTAISCKLEEDDLAESAVKEMLESAVQMLWDNALNYRVVP

SEQ ID NO: 9856 - protein, 103 aa, Zea mays
  VARIANT 20: note = Ancestral polymorphism is T, Derived polymorphism is A
  VARIANT 11..103: note = Derived polymorphism lacks residues 11 to 103
MAGRHTIILMQPSQNRASRTFMDYNSINHALDGICGLYERKIRDINPMIPNITYDISDLYNFIDGLADISALVYDHSIQAFLPYDRQWIKQKLFQHLKKLAQR

SEQ ID NO: 9857 - protein, 343 aa, Zea mays
  VARIANT 40..343: note = Derived polymorphism lacks residues 40 to 343
  VARIANT 73..343: note = Derived polymorphism lacks residues 73 to 343
MAALLRTAAALAPPPSSPPSAREPRGRCLRLACSRRAPVRPLRAWPLPTPHVFCLAGGRLRRLGATEADEAAQTATQVVLKRIEIPQCRTVLEDLETEVTGDSAADDSAGSTDETPSIIVTTLQSYREALINDDEAKAAEIESFLLSIEDEKNSLLNKITALDAELATQRERILRISADFDNFRKRTENEKLNMMENVQGELIESFLPVLDNFERAKVQIKVETEGEEKINNSYQSIYKQFIEILNSLGVEDVETVGKPFDPMLHEAIMREESSEFEEGIILQEFRKGFKLGERLLRPAMVKVSAGPGPEKFGDDDPTAVEGSVAPQKVDEVEDDGFGAGDAE

SEQ ID NO: 9858 - protein, 247 aa, Zea mays
  VARIANT 34: note = Ancestral polymorphism is R, Derived polymorphism is S
  VARIANT 64: note = Ancestral polymorphism is R, Derived polymorphism is T
  VARIANT 111: note = Ancestral polymorphism is A, Derived polymorphism is V
  VARIANT 126: note = Ancestral polymorphism is A, Derived polymorphism is V
MAARYTYTYGDGPGGSSCLRIGLTALPCSGVALRLSAVIDCTPGKDRMPPVTVDFLKNLPLQQREAEAPAAVAAQVTTGRFTCSSGDFLLVSQIQRVEAMVAAAGLPRECALSVEEFFRLSASNAVNTFYKAMAITVEAGALGSIVVDEHQHEHEELPPGAVVGECAICYNEYLVGGATSVKLLCGHTFHRRCMDRWTAVNRTCPYCRAPVPEEKQDCWDEDDYCDDSVSEYDEEDDGASTVPGRPQ

SEQ ID NO: 9859 - protein, 157 aa, Zea mays
  VARIANT 131..157: note = Derived polymorphism lacks residues 131 to 157
  VARIANT 93: note = Ancestral polymorphism is G, Derived polymorphism is R
  VARIANT 32: note = Ancestral polymorphism is A, Derived polymorphism is T
MRPRRRLLRRPPWMQNKSVVAIKASSGPLSAAASRLSACSRALPSSRDFHFYNNFPAFKSPVGAAAAKADASLGVIGGASILPTRQQLFPMGRDLDDAHDWLVALNDDLLERFGAFTDEFKALRQKEETFWRRAAPQAGDGFEVDCERAAGGERVQS

SEQ ID NO: 9860 - protein, 205 aa, Zea mays
  VARIANT 15: note = Ancestral polymorphism is G, Derived polymorphism is E
  VARIANT 24: note = Ancestral polymorphism is Q, Derived polymorphism is E
  VARIANT 34: note = Ancestral polymorphism is T, Derived polymorphism is I
  VARIANT 36: note = Ancestral polymorphism is P, Derived polymorphism is L
  VARIANT 41: note = Ancestral polymorphism is E, Derived polymorphism is K
  VARIANT 45..205: note = Derived polymorphism lacks residues 45 to 205
  VARIANT 47: note = Ancestral polymorphism is P, Derived polymorphism is T
  VARIANT 52..205: note = Derived polymorphism lacks residues 52 to 205
  VARIANT 71: note = Ancestral polymorphism is G, Derived polymorphism is R
  VARIANT 73: note = Ancestral polymorphism is G, Derived polymorphism is A
  VARIANT 76: note = Ancestral polymorphism is P, Derived polymorphism is L
  VARIANT 77: note = Ancestral polymorphism is F, Derived polymorphism is S
  VARIANT 79: note = Ancestral polymorphism is G, Derived polymorphism is S
  VARIANT 84: note = Ancestral polymorphism is R, Derived polymorphism is M
  VARIANT 86: note = Ancestral polymorphism is A, Derived polymorphism is E
  VARIANT 87: note = Ancestral polymorphism is L, Derived polymorphism is S
  VARIANT 95: note = Ancestral polymorphism is G, Derived polymorphism is D
  VARIANT 97: note = Ancestral polymorphism is S, Derived polymorphism is P
  VARIANT 99: note = Ancestral polymorphism is L, Derived polymorphism is I
  VARIANT 115: note = Ancestral polymorphism is E, Derived polymorphism is A
  VARIANT 120: note = Ancestral polymorphism is L, Derived polymorphism is I
  VARIANT 126: note = Ancestral polymorphism is S, Derived polymorphism is F
  VARIANT 136: note = Ancestral polymorphism is G, Derived polymorphism is R
  VARIANT 140: note = Ancestral polymorphism is E, Derived polymorphism is K
  VARIANT 150: note = Ancestral polymorphism is A, Derived polymorphism is T
  VARIANT 151: note = Ancestral polymorphism is T, Derived polymorphism is I
  VARIANT 175: note = Ancestral polymorphism is D, Derived polymorphism is N
MAPTRIHVTCALVYGPSPTGRIHQGVCSTWMKNTILLEYSEECSWAPIFVRQSNFKLPDDPSTPIIMIGPGTGLAPFRGFLQERLALKQSGAELGTSILFFGCRNRNMDYIYEDELQTFLEEGALSELIVAFSREGPTKEYVQHKMVEKATKIWNVISNGGYLYVCGDAKGMATDVHKMLRTIVQEQLTLVTQEHEMSALMYLVL

SEQ ID NO: 9861 - protein, 1693 aa, Zea mays
  VARIANT 1008..1693: note = Derived polymorphism lacks residues 1008 to 1693
  VARIANT 974..1693: note = Derived polymorphism lacks residues 974 to 1693
MSQRPRKKNREKTHPEKQTKNPQSMKPTTSAAAAAVAAVTVTTDDPSPSPSDSTSATFTVDRRGDASASCRWTLPDFPRTRARTFYSRYFEVGGFDCRLLLYPRGDSQALPGYLSLYLQVLDPKAPVSSSSSTTTTTSSKWDCFLSYRLSVVHPTDPAKSLGRDSWHRFSSKKRSHGWCDFAPSSSAPFLFQPHDALVISADISVLSEAASFSDADGRFNWKVLNFGLFREMIRTQKIMSPAFFPASASAGGTDCGLRISVYQSNVSGAEHLSVCLESKEPVVQVASGSSALASGGTGSGVPDGDRGCWCLFRISILNQRSGGSHIHKDSYGRFGADSASLGWGEYIKMDEFLAADGGYLVDGAVVFSASVHVIKESNSFSRSLPMVPGICGAGGGRAGARKSDGHFGKFVWRIESFTRLKELLKKRKIAGLCIKSRRFQVGNRDCRLIVYPRGQSQPPCHLSVFLEVTDPRNTTTEWSCFVSHRLSVINQKVEEKSIMKESQNRYSKSAKDWGWREFVTLTSLFDQDAGFLVQDTVVFSAEVLILKETATMQELTDEDSETCSSTYGCQIEALPKRPSFTWKVENFVSFKEIMESRKIFSKFFQAGGCELRIGVYESFDTICIYLESDQSSGYDPDKNFWVHYKMAIVNQKNSAKTVCKESSICTKTWNNSVLQFMKTSDMVDTDAGFLVRDTVIFTCEIIDCCPWFDFSDLEVWASDDDQDELSTDPDELVDSEESEDMSGDEEDMFRNLLLRAGFCLTYKDNYTQPQVILREKIITDATAIAGFLTDLRVYLDNPAKVKRMLLPTKVSTKSGGTKDTSKCDSSSSSTSLITLLMGISALKQAIIDLLLDIMVECCQPSEESGSSASTKAFPDSNGASSPPELSVEGDLTEYACSDVYARVESNSDDIRDSPVICNAGLAATEIAVNNIEHSCFPPETSAADLPADEGSEQASWSKCPEQSEELLGLIVNSLRALDSTVPHGCCEPRRRPQAVRKIALVLEKAPKQLQQDLISLVPKLVDGSEHSLAACALLDHLQRPDAEPSLRLPVFGALSELELESDIWKQASVHALELLSDSNDEPLVAAITYVLKAASQCEHLSVAVRAVRWRLKDLGTEVPHCVLDFLSKTIQTQLDVAEAILKDIDSDCEPENNCLASTSPSSTCSTDGLSAEGMYSWQEQAVHGRSHLSDVFALIEMLSMPGLFVEVAQVIERALLRGSFGLQLVAMVLERRHSYRSSSKSGSVVNDSQNKEVLLDGQFEPLSVQENDFTSVLALGEVLSLSTETKVQDFVRMLYAIIFKIYAEDHHRYRILKGLVERATNTSDNCRAVDIDMDVLVFLVKEEYGIARPVLNMMCEVAEVAQADRANLWHQICATEDENIRLREDMEMEQTNFTNEKIALNQRLTELEATIGSLRSELKAERDRFTREKKALSDQMREIENQLEWVRSEKDDQIAKLSSEKRNLHDRLNDAESQLALVKARKREELKKVTKEKNTLAEQLKNAEASRKRFDDELKRYAAETQTREEIRKSLENEVRRLTQTVGQTEGEKREKEEQITRCEAYIDGMESKLQVCQQYIRTLETSLQEEVARHAPLYGVGVESLSFNELEALANIHEQSLRQIKAIQQRKGSSHLLGGTALSHIPALFSPPPPSAAVGSPASRIPASPMAPNGAGMHGNGHHMNSTTGGRWFNPS

SEQ ID NO: 9862 - protein, 496 aa, Zea mays
  VARIANT 75: note = Ancestral polymorphism is P, Derived polymorphism is L
MAASWRAVALAVAAVGWLLAGAARAFPAEDLVARLPGQPPVTFRQFAGYVDVDAKAGRSLFYYFAEAREDAAAKPLTLWLNGGPGCSSVGGGAFTELGPFYPRGDGRGLRLNKKSWNRASNLLFVESPAGVGWSYSNTSSDYSTGDVRTAHDMYQFLLGWYAKFPEYRSRALFLTGESYAGHYIPQLADVLITHNEKSKGFKFNIKGVAIGNPLLKLDRDVPATYEYFWSHGMISDEIFLAISHSCDFEDYTFNDPHNESKSCNDAIAEANSVVGDYVNNYDVILDVCYPSIVMQELRLREYATKISIGVDVCMSYERFFYFNLPEVQQALHANRTHLKHHWSMCSDILNYSNTDGNINILPTLQRIVEHKIPLWVFSGDQDSVVPLLGTRTLVRELAHAMGLHVTVPYSTWFHKGQPSLLIYAGVVYIYMNKILMQIEVFQVGGWVTEYGNFLTFATVRGASHMVPFAQPDRALGLFRSIVLGQRLPNTTNPHID

SEQ ID NO: 9863 - protein, 309 aa, Zea mays
  VARIANT 24: note = Ancestral polymorphism is K, Derived polymorphism is N
  VARIANT 43: note = Ancestral polymorphism is Q, Derived polymorphism is L
  VARIANT 247: note = Ancestral polymorphism is S, Derived polymorphism is C
MGEEASCDAVSLTEAGTNAKPVGKEVGREPAAAPAAAADPRLQGISDAIRVVPHFPKQGIMFNDITTLLLRPRVFKDAVDLFVERYRGMGIDAVAGIEARGFVFGPAIALAIGAKFIPLRKPRKLPGERFHDHACSVFLLLLNPSPHSALYPAVAFVDLVPSLWRHPDQLQSREWDIKRKMQQTVYTRPIIHSFPTSVHNVVESCADTGSRKQLLLLLLEGEVISEKYVLEYGTDCLEMRVGAIERSGERVLVIDDLVATGGTLCAAIRLLERAGADVVECACVIGLPKFKDLYKLNGKPVYVLVESRE

SEQ ID NO: 9864 - protein, 140 aa, Zea mays
  VARIANT 78: note = Ancestral polymorphism is R, Derived polymorphism is T
  VARIANT 43: note = Ancestral polymorphism is R, Derived polymorphism is C
MTSPWCLSAPPAAPPMAAAPSALGVSTSASALARVPVPGSKRCRWNALVVCAAPDEEKITKRSPLDFPIEWERPKPGRRPDIFPKFSPMKTPLPHPLPADDPLDDDEEEEEEQAPPQEEPQEDDPDTEEPEEDDPDKPTE

SEQ ID NO: 9865 - protein, 381 aa, Zea mays
  VARIANT 27: note = Ancestral polymorphism is P, Derived polymorphism is L
  VARIANT 29: note = Ancestral polymorphism is F, Derived polymorphism is S
  VARIANT 106: note = Ancestral polymorphism is K, Derived polymorphism is E
  VARIANT 158: note = Ancestral polymorphism is F, Derived polymorphism is L
MGLDTPSCHFDSRRATIVCYLAKLLFPISGFTCLLLLVYVLFFKKKTSRRAHLPQLSFGEHFVKVTYNDLAQATGGFSESNLIGRGSYGSVYSGKLMEIKIEVAVKVFDLEMQGAETSFLAECEALRSIHHRNLVSIVTACSSIDMTGNSFKALIYELMPNGNLDKWIHPKGDETVPKRLSLTQRIAVVVNVADALDYLHHDCGRPTVHCDLKPSNILLDDDMNALLSDFGITRLYANPQSIWAGSISSIGVKGTIGYIPPEYGGGGPVSTSGDVYSFGVVFLEILTGKRPTDPMFTGELDIISFVKNNFPHQIFHIIDSHLVEECEHLIQDNKVTNDEMYPCLVALLQVALSCTRSSPSQRSNMKEVARKLHAIRTSQIG

SEQ ID NO: 9866 - protein, 246 aa, Zea mays
  VARIANT 216..246: note = Derived polymorphism lacks residues 216 to 246
  VARIANT 166: note = Ancestral polymorphism is R, Derived polymorphism is C
  VARIANT 71: note = Ancestral polymorphism is T, Derived polymorphism is M
MDDDDVATADDRCCSGWLSSSPSPSPSSSSEATTTASPPPSTREQHRRHAAKDAAANAALAGGGDEKRALTTAAFIGVRKRPWGKFAAEIRDSTRKGARVWLGTFDTPEAAALAYDQAALAARGAAAVLNFPVERVVESLGALALAGAGSPVLALKRRHSKRTRRRKLSAVATTDGDGKDTMKQPRQCSGLPVAVPSYTTVAAVPPQQQHATARGQSHTRYGVVELEDLGTDYLDELLRVSSELEY

SEQ ID NO: 9867 - protein, 108 aa, Zea mays
  VARIANT 20: note = Ancestral polymorphism is M, Derived polymorphism is T
MPHSPRTKGIIQHFVRLVKMHTEGLDNDLQVTNEKMGQLEATQIDTNTKLANVEMTIAHIDKSLVALLRQFDEMHANTNGGRDEDAEGNWDDYVADTEQDDQEAPNRR

SEQ ID NO: 9868 - protein, 465 aa, Zea mays
  VARIANT 134: note = Ancestral polymorphism is W, Derived polymorphism is R
  VARIANT 201: note = Ancestral polymorphism is V, Derived polymorphism is D
MLEARDSEGWQFFDALSKCRYLITLSVSQNHLHGPIPNSIANLSTSLQQLFMDWNNLSGIVPPTIGKLSGLTDLSLQNNNLTCTIEEWVGKMTNLTILTLQWNNFTGKIPPSIGKLTKLTNFSVAENNFFGIVWRRHGFAHASMPCRFEKSRQNKLIDQNIDPNIWVHVTRIAVYFLFLEKRTSRRAYRSELSYGEHFEKVTYNDLAQATRDFLESNLIGRGSYGSVYRGKLKESKMEVAVKVFDLEMRGAERSFLISIVVNIADALDYLHHDCGWPTVHCDLKPNIILKLLDDDMNALLGDFGIARLYLDYQSKWAGSISSIGVKGTIGYIPPEYGEGGHASMSGDVYSFGIVLLEILTSKRPTYPMFKDGMDIISFVENNFPDQVFEVIDAHLLEECRNSTQGNTLVQENEIYQFLVDLLQVALSCLHSLPSERSNMKQVASRMHAIKTSHNEITSNKNKGVP

SEQ ID NO: 9869 - protein, 62 aa, Zea mays
  VARIANT 31: note = Ancestral polymorphism is A, Derived polymorphism is T
  VARIANT 38: note = Ancestral polymorphism is T, Derived polymorphism is A
  VARIANT 40: note = Ancestral polymorphism is P, Derived polymorphism is L
  VARIANT 49: note = Ancestral polymorphism is R, Derived polymorphism is C
MRVIVKIQKIKIQSHHVRITPEDIVPDVDMASREMRITPPKGLLELNSRSDKRSKKERHAMV

SEQ ID NO: 9870 - protein, 105 aa, Zea mays
  VARIANT 3: note = Ancestral polymorphism is C, Derived polymorphism is Y
  VARIANT 16: note = Ancestral polymorphism is S, Derived polymorphism is L
  VARIANT 19: note = Ancestral polymorphism is S, Derived polymorphism is W
  VARIANT 20: note = Ancestral polymorphism is G, Derived polymorphism is R
  VARIANT 26: note = Ancestral polymorphism is R, Derived polymorphism is L
  VARIANT 34: note = Ancestral polymorphism is D, Derived polymorphism is G
  VARIANT 52: note = Ancestral polymorphism is P, Derived polymorphism is S
MIYAISGEVPDEPVVSKKSGLLFERRLIERYIEDHGKCPITKEELTMDDIVPVKTNKAESATAALNCSGVVLGSLPIRLGIEEALEEAQCAQALDARQAWQSFCK

SEQ ID NO: 9871 - protein, 220 aa, Zea mays
  VARIANT 203..220: note = Derived polymorphism lacks residues 203 to 220
  VARIANT 12..220: note = Derived polymorphism lacks residues 12 to 220
MNDTDKNNSEREESDLALEKESATFTSQKQHLEELSDAKETFIGGPEVEAKSNSTKDSDNPIAKVGSSVASDKMRDGCNANAIPCPATSNHTTEPSSVASQEASPASTKDTAIPEQVERPSSEELLADVSLPQGKVEPKKTEPAPAASSNIQQHGCKQAGNGNTEPKSKENTTADDDPITRLQRAAGTAICHLTWFYLLVMRQAALVQMSFCINKRYGFR

SEQ ID NO: 9872 - protein, 881 aa, Zea mays
  VARIANT 426..881: note = Derived polymorphism lacks residues 426 to 881
  VARIANT 76..881: note = Derived polymorphism lacks residues 76 to 881
MAVPIKSIMRNSKPPSKLAMLMVLLFLLCYGVEKVHCSTVHENNQDFHSLLDFKKGITHDPNGAMNDWINNTHFCRWKGVKCTLTPPYRVTELNLSHNNLAGQISSSLGNLTNLNLLALPNNRFGGPIPLLDRLQNLNYLSLDNNSLNGVIPESLANCFNLNKLGLSNNNLTGVIPPNIGSLTKLQVLLLHRNKLSGVIPSSLSNITNLIAISLSENQLNGSIPIELWQMPQLTSLYLHDNYLFGEIPQTLSNVSSLHMLSLAYNMLSNTLPSNFGHALHNLKWLYLEGNLFEGHIPDSLGNVSGLLHLDISSNHFTGKIPSIFGKLSGLSFLNLEENMFEASDSTGWEFFADLATCSYLSEFSLASNNLQGAIPNSIANMSTNLKRLLMSDNHLSGIVPSSIGKFNGLIELDLGGNNFTGTIEDWIPKLTSLQNLYLNDNNFDGRLPDYLNDLKLLNKIDLSYNNFQGEIPKASIFDNATVVSLDGNPGLCGGTMDLHMPSCPTVSRRATIISYLIKILIPIFGFMSLLLLVYFLVLEKKTSRRAHQSQLSFGEHFEKVTYNDLAQATRDFSESNLIGKGSYGTVYSGKLKESKTEVAVKVFDLEMQGAERSFLAECEALRSIQHRNLLPIITACSTVDTAGNVFKALIYELMPNGNLDKWIHHKGDEAVPKRRLSLTQRIAVVVSVADALDYLHHDCGRPTVHCDLKPSNILLDDDMNALLADFGIARLYADPQLTFAGSISSIGIKGTIGYIPPEYGGGGHVSTSGDVYSFGIVLLEILTGKRPTDPMFTGGLDIISFVENSFPDQIFQVIDPHLVEDRQKINQPNEVANNEMYQCLVALLQVALSCTRSLPSERSNMKQVASKLQAIKAAQLGGKSK

SEQ ID NO: 9873 - protein, 592 aa, Zea mays
  VARIANT 74: note = Ancestral polymorphism is C, Derived polymorphism is Y
  VARIANT 495..592: note = Derived polymorphism lacks residues 495 to 592
MSHWKQPSKLAMLVVLLLLLCHAVDKVHCSTHHNNSQDFHSLLEFHKGITSDPNEALSNWNPSIHFCHWHGVNCSFTRPYRVTELNLTGQNLAGQISSSLGNLTFLHTLDLSYNSFSGPLPLLNKLRNLDVLFLGSNHLGDVIPDWLTNSSNLVDLDLSENNLTGHIPSNIGFLTKLEGIALYNNNLTGVIPPTLGNISTLEVVDFSANQLSGSIPNKVWQISNITMLNLGQNNLSGGIPDTLSNFSSLTALGLNNNKLGSALPSNIGDVFRHLNELYLDNNIFVGTIPTSLGNPSSLEALDLSNNHFSGKIPSSFGRLSKLQILNLELNMLEARDSEGWQFFDALANCSSLNILSVSQNLLHGPIPNSISNLSTTLQYLMMASNNLSGTVPPTIGKFSGLIKLSLANNNLTESNLIGRGRYGSVYRGKLKEMEVAVKVFDLEMRGAERSFLSECEALRSIQHRNLIPIITACSIVGTFKALIFEFMSNGNLDTWLRHKGDEEATRCLGLTQRINIVVNIADALDYLHHGCGRPTVHCDLKPSNILLDDDMNALLGDFGIASFYYDFETKWTCSSSSIGIKGTIGYIPPGRN

SEQ ID NO: 9874 - protein, 458 aa, Zea mays
  VARIANT 17: note = Ancestral polymorphism is M, Derived polymorphism is T
MSIISAKSRTTCSRSIMDNHLMSSFTILLLSSFAATVAYPARNELQPNQMKNHHSSVSSYNPQPKDFPTEQLYRAYLIIQRFKNTIISDPKNVTATWIGHDLCGETTYVGFYCGSPAGGDKKLTVTGVILNGYNLHAPTLEGFVNQLPDLALFHAASNNFGGDIPQLTGLGYMYELSVAVKDLQLQARPKRDIPPDSTVGLGGNTHGHGHLGNCIIADFNFSFNVGIGKGHKFPGFTDAKALLLNHNNLSGPLPSNLGFSKLSYLALANNKLTGPIPPSISNLEDSLFEVLLLNNQLSGCLPHELGMLTKAAVIDAGMNQLTGPIPSSFSCLISVEQLNLAGNRLYGQVPDALCKLAGPAGRLANLTLSGNYFTSAGPACAALIKDGVLDVKNNCIPGLTNQRRPAECAAFQSQPKTCPAASTQVTCPAAAASRNAAAPGERKVKDYSSYVTYATLHD

SEQ ID NO: 9875 - protein, 211 aa, Zea mays
  VARIANT 5: note = Ancestral polymorphism is A, Derived polymorphism is V
  VARIANT 11: note = Ancestral polymorphism is T, Derived polymorphism is I
  VARIANT 34: note = Ancestral polymorphism is A, Derived polymorphism is V
MIILASVISSTVSNVLLGARPAFIVPAYELKSAAGLTFLVGMAATLASVCSVPLTSVLLLFELTKDYRILLPLMIGLDQIEALYQYAQFQFECGNYSGAADYLYQYGALCTNSERNVSALWGKLAAEILMQNWDLALEELNRLKEIIDSKLQNRIWLMHWALFIFFNHIRYLNAIQTNAHHLIRPIKFIILNTPKCNFAFSYNLFQVELTM

SEQ ID NO: 9876 - protein, 235 aa, Zea mays
  VARIANT 98: note = Ancestral polymorphism is R, Derived polymorphism is C
  VARIANT 43: note = Ancestral polymorphism is E, Derived polymorphism is K
  VARIANT 40: note = Ancestral polymorphism is F, Derived polymorphism is L
MSRSLSLLDLAGQADSADRMLELPPATAAKGPTDVLVHDLQFEVEQVLSREFLCDENRVAGSGTPSLGHFVIRRGGAGAGDAFCSAQEDGSSGEKTRCRRSHNSIDGGAAPFRAQKRCTGRELRARGGGGDCGMRWEAMLGGGCARRRGLRGGAGTAGAGRGLWAQWEAVLGGVDCGVDRELRARGGDCGRDGAVNAGGGIAGLWGGCARQRRLRGGCMRGWARWQNVGCGRLHY

SEQ ID NO: 9877 - protein, 666 aa, Zea mays
  VARIANT 70..666: note = Derived polymorphism lacks residues 70 to 666
  VARIANT 84..666: note = Derived polymorphism lacks residues 84 to 666
  VARIANT 171..666: note = Derived polymorphism lacks residues 171 to 666
  VARIANT 307: note = Ancestral polymorphism is K, Derived polymorphism is I
  VARIANT 320: note = Ancestral polymorphism is S, Derived polymorphism is F
  VARIANT 404..666: note = Derived polymorphism lacks residues 404 to 666
  VARIANT 406..666: note = Derived polymorphism lacks residues 406 to 666
  VARIANT 479..666: note = Derived polymorphism lacks residues 479 to 666
  VARIANT 551..666: note = Derived polymorphism lacks residues 551 to 666
MDRFLTSNPRTSTNTYELAIVVVEEQPNINLEDQGLPSDENVDINMDDNNVSGHEPIFNSSPTENANVDEQSDFIEDICDPRNWNNLDNKSRDILVEKGAIRDENIVFPLDDNGRHFSYKHYFRKLSNGEVHDRKWLVYSKHVDRVFCFCCKIFNSEKCKSSLAHDGFRDWKHINDRLKEHEASMDHITNMNSWNELRARLNKHETIDKEFQHQITKEKERVRQVLLRIIAVVKFLGKRNLAFRGSSEQLYNDQNGNFLSCVEMIAEFDLVMQDHLRRIKNNEVHYHYLSHKIQNELVYLLASDITKSIIKTVKEAKYFSVILDCTPDVSHQEQMSLLVRCVNMSCGKVEEYFLGFIKVDDTSGEGLFNSLIDSIKYFGLNIEDVRGQGYDNGSNMKGKNKGVQRRLLDINPRALYMPCACHSLNLTLCDMAKSCVKAISFFGIVQRIYVLFSSSTKRWDVLINHVESLTVKSWSNTRWESRIKSVKAIRFQAPKIRSALLQLSKDKDVEAKDRSDAKNLFEVLGTFEFILGMIIWYDILFVVSKVSKKLQSPSMCIDGTLKSIEDTICFFENYRNEGFASSLITAKEIAFELGLQPSFPVKRRATRKKHYDETSNEEENLEAQKAFEVNYFLVMVDIATSSLKSRFEELQSFKVLYLSMAHVMLI

SEQ ID NO: 9878 - protein, 325 aa, Zea mays
  VARIANT 15: note = Ancestral polymorphism is L, Derived polymorphism is F
  VARIANT 18: note = Ancestral polymorphism is L, Derived polymorphism is M
  VARIANT 21: note = Ancestral polymorphism is A, Derived polymorphism is S
  VARIANT 126: note = Ancestral polymorphism is G, Derived polymorphism is S
  VARIANT 161: note = Ancestral polymorphism is I, Derived polymorphism is N
MDAALMPLLVVSLVLCLLAAAPAASAARAFFVFGDSLVDNGNNNYLLTTARADAPPYGIDFPTHQATGRFSNGLNIPDIIKQVNIIRIGDQLQYFREYQRKLRALVGEPQATQLVNQALVLITLGGNDFVNNYYLVPMSVRSRQYALPDYVRFIVSEYRKILSRLYELGARRVIVTGTGPLGCVPAELALHSQNGECAAELTRAVNLFNPQMVDMVRGLNRAIGADVFVTANTYRMNFDYLANPQDFGFTNVQVACCGQGPYNGIGLCTAASNVCDNRDVFAFWDAFHPTERANRIIVAQFMHGDTDYMHPMNLSTILAMDQEGL

SEQ ID NO: 9879 - protein, 172 aa, Zea mays
  VARIANT 103: note = Ancestral polymorphism is K, Derived polymorphism is N
  VARIANT 78: note = Ancestral polymorphism is P, Derived polymorphism is R
  VARIANT 37: note = Ancestral polymorphism is G, Derived polymorphism is S
MKKKTGLKLTKKQLKNKLDNMKKEYKWFMEFKNATTGLGWNEAKQIGWNEAKQTIDCSKDWWDEHLAIHVTRTSASCPGDSSSDDSSDDVVEIERTLENDDVNVAVSKRSKPGKRKHKASCTAAEEKEEKTPFFRLYKNTCLKIETTTEKISTVLKHHHHLQQAKRLALQRL

SEQ ID NO: 9880 - protein, 84 aa, Zea mays
  VARIANT 17: note = Ancestral polymorphism is A, Derived polymorphism is V
  VARIANT 2..84: note = Derived polymorphism lacks residues 2 to 84
MQKEATSQARGKLDSFAFLCSLAEYYINEKGDKVYTTKKESPLGVPTQSAHPARFSPDDKYSRQRYLLKKRFGLLPTQNPGPKY

SEQ ID NO: 9881 - protein, 279 aa, Zea mays
  VARIANT 190: note = Ancestral polymorphism is E, Derived polymorphism is K
  VARIANT 114..279: note = Derived polymorphism lacks residues 114 to 279
  VARIANT 48: note = Ancestral polymorphism is G, Derived polymorphism is C
MEGQFAGWGREEGGWRKGPWTAQEDKLLVEYVRQHGEGRWNSVAKLTGLKRSGKSCRLRWVNYLRPDLKRGKITPQEESVILHLHAMWGNSSVITHTHAQVVDDRAQPAGTDGQRDQELLADALQQKGKPSKNIERARARFLKQRREMQSQQLLLQGQAQQQEEEEEKRPDHDDGPEAAPAVSLARQLEEDLRRMLQQDMDDLMFQFCPMASSCLLPRGSGCTSVSASASEEGSSGDHHQLDGSATWDWGSLWNLDDVVDGGAWDSSSPLLQDQGLAFY

SEQ ID NO: 9882 - protein, 203 aa, Zea mays
  VARIANT 13: note = Ancestral polymorphism is P, Derived polymorphism is S
  VARIANT 19: note = Ancestral polymorphism is G, Derived polymorphism is D
  VARIANT 62..203: note = Derived polymorphism lacks residues 62 to 203
  VARIANT 75: note = Ancestral polymorphism is D, Derived polymorphism is N
  VARIANT 82: note = Ancestral polymorphism is A, Derived polymorphism is V
  VARIANT 89: note = Ancestral polymorphism is V, Derived polymorphism is A
  VARIANT 119: note = Ancestral polymorphism is P, Derived polymorphism is S
MAAAAAGSSRLLSALALAGVVSFLLVADPGVVAAEAAAAPPGLEFRVGGPRGWRVPDANTSYGWWAMNNRFHVGDRLYFKYANDDSVLVVNRLAFDACNASAPLAAFAGGATEFRLHRPGFFCFISGEPGHCEEGQRLIVRVMVHPAALAAAPAPGPGVPTMTRPGMPSGCSDGASSSAVDAAIAAAAGVAMATLVGMGLMLH

SEQ ID NO: 9883 - protein, 111 aa, Zea mays
  VARIANT 11: note = Ancestral polymorphism is D, Derived polymorphism is E
  VARIANT 15: note = Ancestral polymorphism is P, Derived polymorphism is L
  VARIANT 25: note = Ancestral polymorphism is R, Derived polymorphism is H
  VARIANT 74: note = Ancestral polymorphism is S, Derived polymorphism is T
MASGSKPDSMDTDPLGGGLSIAVERNPPESRLQQLGVRSWPKWGCPPGKFPVKFDARQTCYLLKGKVRAHIKGSSECVEFGAGDLVVFPKGLSCTWDVAAAVDKYYKFDSS

SEQ ID NO: 9884 - protein, 152 aa, Zea mays
  VARIANT 43: note = Ancestral polymorphism is G, Derived polymorphism is R
  VARIANT 42: note = Ancestral polymorphism is R, Derived polymorphism is W
  VARIANT 41..152: note = Derived polymorphism lacks residues 41 to 152
  VARIANT 39: note = Ancestral polymorphism is R, Derived polymorphism is C
MSSVQSRITHQFSLPKTSSEMASIENFLQFQDAVPCKIRAKRGCTTHPRSIAERVRRTKISERIRKLQELVPNMDKVRRTKISERIRKLQELVPNMDKQTNTSDMLDLAVDYIKDLQRQVKNSKASSLGIEKDYESPEVLANECPGPDEDDH

SEQ ID NO: 9885 - protein, 507 aa, Zea mays
  VARIANT 36: note = Ancestral polymorphism is I, Derived polymorphism is M
MELSRISTEKFDDAVKSMTDAGFLKETVEQALKKLIILYEENWEHIEADNYSTLVEALLGHSDPKQAGQKKRAEKNLNVDSDHYNKKLKIKGGQTPRSSMHGSAKKELTEEADSLEERTTGNQLQTSRAETTITGENSCTLLESQDPCTSETPTVMCPKVLGSNRHNGIKRQYHDVNDITRGEECVSIPIVCGEDGVLPPPFHYISQNTTFQDACINLSLARIGDENCCSGCFGDCLAEPLPCACARETGGDFAYTRDGLLKEGFLDACVSMLREPLKQPHFYCKGVCPIEQIMKGVSSAKPDACKGHLIKKFIKECWIKCGCTRNCGNRVVQRGITRKLQASEVFLASRKKGWGLRSAENLPRGAFVCEYVGEILTNTELHKRNTELYGKNNKKAGKARHTYPVNLDADWGTEGVLNDEEALCLDGTFYGNVARFMNHRCIDGNIIAIPVEVETPDHHYYHLAFFTTREVEAFEELTWDYGIDFDDVNHPVKAFKCHCGSTFCRGR

SEQ ID NO: 9886 - protein, 131 aa, Zea mays
  VARIANT 36..131: note = Derived polymorphism lacks residues 36 to 131
  VARIANT 45: note = Ancestral polymorphism is R, Derived polymorphism is W
  VARIANT 48: note = Ancestral polymorphism is A, Derived polymorphism is V
  VARIANT 53: note = Ancestral polymorphism is R, Derived polymorphism is C
  VARIANT 65: note = Ancestral polymorphism is E, Derived polymorphism is K
  VARIANT 81: note = Ancestral polymorphism is P, Derived polymorphism is T
MKLQRAQEGAGGHLLTKTPSRHDAERTVTKGCATFWVGEEGEAPRRVAVPVARLGHPRMLELLGEAREEYGFAHQGAVVVPCAVERFMRAVEASASAGNRHEHHRHGHHHHHFRLPHIHIARCFRPSHVVA

SEQ ID NO: 9887 - protein, 92 aa, Zea mays
  VARIANT 39: note = Ancestral polymorphism is Q, Derived polymorphism is K
  VARIANT 32..92: note = Derived polymorphism lacks residues 32 to 92
  VARIANT 6: note = Ancestral polymorphism is G, Derived polymorphism is E
MILGLGGCCGAAAAAAAVSPAAVGKQLGGHLEASERQQKKRGASDEQKMNKGGEQGAAAAAGGKERSKTKDRHKAPPIVVHQFPFHSRPGLL

SEQ ID NO: 9888 - protein, 479 aa, Zea mays
  VARIANT 82..479: note = Derived polymorphism lacks residues 82 to 479
  VARIANT 90: note = Ancestral polymorphism is S, Derived polymorphism is Y
MVRGSLGKLASRALSVAGRWQHQQLRRLNIHEYQGAELMGKYGINVPRGAAAGSVQEVNDALKNMFPSEKEVMTPQLLHLLLFDPSLCSSYHLVIQNAVVHGSVIKTTHIVCSLQFSHSFIVKVFSLQIVVKSQILAGGRGLGTFKSGLQGGVHIVKAEEAESIARKMLGQILVTKQTGPEGKIVSKVYLCEKLSLTNEMYFAITLDRKTAGPLIIACSKGGTSIEDLAEKYPDMIIKVPVDVFKGITDEDAAKVVDGLALKSADRQSSIEQIKKLYELFCKSDCTLLEINPLAETADNKLVAADAKLNFDDNAAFRQKEIFALRDTTQEDPREVAAAKADLNYIGLDGEIGCMVNGAGLAMATMDIIKLHGGTPANFLDVGGSASEGQVVEAFKILTSDDRVKAILVNIFGGIMKCDVIASGIVNAAKQVDLKVPVVVRLEGTNVDQGKRILKESGMTLITAEDLDDAAEKAVKASVK

SEQ ID NO: 9889 - protein, 501 aa, Zea mays
  VARIANT 224..501: note = Derived polymorphism lacks residues 224 to 501
MEHVFGGKFKLGKKIGSGSFGELYLGVNIQSGEEVAIKLYPFQPQDMLPDCCPSHVYQESVKSRHPQLHYESKLYMLLQGGTGIPHLKWFGVDGEYNVMVIDLLGPSLEDVFNQCNRKFSLKTVLMLADQMITRVEYMHTRGFLHRDIKPDNFLVGLGRKANQVYIIDYGLAKKYRDLQTHKHIPYSIFNRSIDGQSLVLTKENLSYIMVGLVIEVYPVLAPTQEQSRRDDLESLGYVLMYFLRGSLPWQGLKAGTKKQKYDKISEKKMLTSIEALCKSYPSEFITYFHYCRSLRFEDKPDYSYLKKNFRDLFIREGYQLDYVFDWTVSRQAVDNNRLRLSGKTGGLVGPSVDRAERAAARQDVPDRFTGQAGAFARRTGSGSGQYGEHTKHRTLLDSLMASKMAVDSDKRKHSSSRNGSTSRKALLSSSRGSGDPSDPNRSSHLVPTTSSSSRPSTNQRLHQSTGLEGRTSSFPKPGRIGQDDPTMRSFERLTISAERRR

SEQ ID NO: 9890 - protein, 229 aa, Zea mays
  VARIANT 57: note = Ancestral polymorphism is S, Derived polymorphism is P
  VARIANT 147: note = Ancestral polymorphism is W, Derived polymorphism is L
  VARIANT 148: note = Ancestral polymorphism is T, Derived polymorphism is A
  VARIANT 153: note = Ancestral polymorphism is C, Derived polymorphism is Y
MAQTVFTPSLEAMKHVKAENGVILTKPFLDVCKQILPVLVQKFSGRVGEMDGLELFSQDTPCFYGPDKFGGAMAIVKSDIGGNITRLENKYTSEPSKYEHLYSMVQEEVQNKTAKGSSSCTNGLLWLTRAMDFLVELFRNLLEHPDWTMGQSCTDSYTKTLKKFHGWLASSSFTVAMKLAPNREKFMEVISGTGDINADIEKFCTTFSPFLKENHNFLASVGLDDLKAS

SEQ ID NO: 9891 - protein, 294 aa, Zea mays
  VARIANT 29: note = Ancestral polymorphism is H, Derived polymorphism is Q
  VARIANT 124: note = Ancestral polymorphism is A, Derived polymorphism is T
MALREIESTLPPGFRFYPSDEELVCHYLHKKVANERIAQGTLVEVDLHAREPWELPEVAKLTATEWYFFSFRDRKYATGSRTNRATRTGYWKATGKDREVRSSSSATAVVVGMRKTLVFYRGRAPNGVKSGWVMHEFRLDTPHSPPREDWVLCRVFQKTKAADGDGDGGAQDGDSSSPPAAFTGPSRPRAVSEPPDHSAPPAGGGYYYGLAFGPRQVEVAQQQCYGGGGATVADHHHGFTRDSGGAAGFGATWGGGVAGGECGAGYLDMDGAFDVMMAGCFGGGDMDEFPQVWR

SEQ ID NO: 9892 - protein, 149 aa, Zea mays
  VARIANT 26: note = Ancestral polymorphism is T, Derived polymorphism is M
  VARIANT 32: note = Ancestral polymorphism is V, Derived polymorphism is I
  VARIANT 36: note = Ancestral polymorphism is D, Derived polymorphism is N
  VARIANT 38: note = Ancestral polymorphism is G, Derived polymorphism is S
  VARIANT 39: note = Ancestral polymorphism is G, Derived polymorphism is D
  VARIANT 47: note = Ancestral polymorphism is M, Derived polymorphism is T
  VARIANT 56: note = Ancestral polymorphism is S, Derived polymorphism is F
  VARIANT 58: note = Ancestral polymorphism is E, Derived polymorphism is G
  VARIANT 64: note = Ancestral polymorphism is S, Derived polymorphism is L
  VARIANT 68: note = Ancestral polymorphism is R, Derived polymorphism is W
  VARIANT 80: note = Ancestral polymorphism is E, Derived polymorphism is K
  VARIANT 85..149: note = Derived polymorphism lacks residues 85 to 149
  VARIANT 100: note = Ancestral polymorphism is P, Derived polymorphism is S
  VARIANT 112..149: note = Derived polymorphism lacks residues 112 to 149
MSVVGLSRECRHKLERLMGLMLDQAMLDDLLVSSDDGGGVYDVNLVTRLVRVFVASEGEADAPSERMWKVGRLVDKYLDEISQDQGLKVSKFLAVAESLPNSARDCYDGVYWVLDIYLEMAYPKTALLKRMANMLIQMSLQNPLTLAHP

SEQ ID NO: 9893 - protein, 202 aa, Zea mays
  VARIANT 83: note = Ancestral polymorphism is R, Derived polymorphism is G
MDLSPNPESPGSGGDGGGGGGGAGGSSSGGASPSAGFGTPQTPSRYEAQKRRDWNTFGQYLRNHRPPLSLAQCSGAHVLEFLRYLDQFGKTKVHTPACPFFGHPNPPAPCPCPLRQAWGSLDALVGRLRAAFEENGGRPESNPFAARAVRLYLREVREHQARARGVSYEKKKRKKAQRPADHASGSGGGQGPHHPPPAGASG

SEQ ID NO: 9894 - protein, 149 aa, Zea mays
  VARIANT 17: note = Ancestral polymorphism is F, Derived polymorphism is L
MDFQKESTFDMWSTVVFLLLTSGFVLLMKVCLLKEKMTLPWKLKLKLKLKFTKAWLSFLMLPLPLDVYKEVLASIHQNVIPSMSNPSILCDFLTRSYGIGCVISVMALSGLFILMTQHSLEYRKFYEKLYALLTLVVFMAKHRSVFLQL

SEQ ID NO: 9895 - protein, 133 aa, Zea mays
  VARIANT 7: note = Ancestral polymorphism is G, Derived polymorphism is R
  VARIANT 115: note = Ancestral polymorphism is R, Derived polymorphism is Q
MLGIFIGFIHLFSVDVYKKIVSKNKMPLFHEGVIETETVGTRVKESETVLVEKEVEVINEPQIQESPPVPALLDDEVDFAESSLAIRESDIPVKKVLIIVTITSVWPQQPYHLNRLAHVLKAVLAPLLWSHYL

SEQ ID NO: 9896 - protein, 260 aa, Zea mays
  VARIANT 77: note = Ancestral polymorphism is A, Derived polymorphism is S
  VARIANT 13: note = Ancestral polymorphism is K, Derived polymorphism is Q
MGRSPCCEKMGLKRGPWTAEEDRILVAHVERHGHSNWRALPKQAGLLRCGKSCRLRWINYLRPDIKRGNFSREEEDAIIQLHQMLGNRWSTIAARLPGRTDNEIKNVWHTHLKKRLEPKPASQQAPKRKPTKKQQPQPEPEPVTTLEGPAGAVPPVAPERSLSTTTSTTTSTADYSPASSLENAGDSFTSEEDYYQIDDSFWSETLAMTTTVDSFESGVQQAEGSFGKSAAAPSSTNDDMDFWLKLFMQASDMQNLPQII

SEQ ID NO: 9897 - protein, 106 aa, Zea mays
  VARIANT 2: note = Ancestral polymorphism is P, Derived polymorphism is Q
  VARIANT 3: note = Ancestral polymorphism is L, Derived polymorphism is F
  VARIANT 4: note = Ancestral polymorphism is P, Derived polymorphism is L
  VARIANT 10: note = Ancestral polymorphism is D, Derived polymorphism is N
  VARIANT 22: note = Ancestral polymorphism is A, Derived polymorphism is T
  VARIANT 24: note = Ancestral polymorphism is A, Derived polymorphism is V
  VARIANT 31: note = Ancestral polymorphism is S, Derived polymorphism is N
  VARIANT 34: note = Ancestral polymorphism is V, Derived polymorphism is I
  VARIANT 35: note = Ancestral polymorphism is T, Derived polymorphism is M
  VARIANT 37: note = Ancestral polymorphism is P, Derived polymorphism is L
  VARIANT 42: note = Ancestral polymorphism is G, Derived polymorphism is V
  VARIANT 46: note = Ancestral polymorphism is A, Derived polymorphism is T
  VARIANT 47: note = Ancestral polymorphism is A, Derived polymorphism is T
  VARIANT 50: note = Ancestral polymorphism is A, Derived polymorphism is V
  VARIANT 58: note = Ancestral polymorphism is A, Derived polymorphism is V
  VARIANT 60: note = Ancestral polymorphism is T, Derived polymorphism is A
  VARIANT 65..106: note = Derived polymorphism lacks residues 65 to 106
  VARIANT 72: note = Ancestral polymorphism is S, Derived polymorphism is L
  VARIANT 90: note = Ancestral polymorphism is A, Derived polymorphism is V
MPLPSSLELDLFHRAADAGTGTAAVRFPFGNIPITHPYYFFGQAAAAVEAGCRVLKLAPAVTVAQSDSDCSLVVDLSSSPPATVSARKPAVFDLDLNCSPLTEAGA

SEQ ID NO: 9898 - protein, 172 aa, Zea mays
  VARIANT 140..172: note = Derived polymorphism lacks residues 140 to 172
  VARIANT 78: note = Ancestral polymorphism is A, Derived polymorphism is D
  VARIANT 56: note = Ancestral polymorphism is P, Derived polymorphism is S
  VARIANT 55..172: note = Derived polymorphism lacks residues 55 to 172
  VARIANT 53: note = Ancestral polymorphism is G, Derived polymorphism is R
  VARIANT 33..172: note = Derived polymorphism lacks residues 33 to 172
  VARIANT 29..172: note = Derived polymorphism lacks residues 29 to 172
  VARIANT 8: note = Ancestral polymorphism is A, Derived polymorphism is T
MRLSVGVAREFLALQDRLGFDKASKTLNWLLAQSKPPIDCLVDAAEQVVVVTGGRPTLVKGREQGSNSSTCCLTVSRAGVLLPVFLAGRGVDEMQRRNAKALVGEAANNLQEYFRTMYKKVTEADIEEFEAKYRGSDYEKTDLKDLYTKYKGNMNRNNYLLYHIVKSETVLL

SEQ ID NO: 9899 - protein, 194 aa, Zea mays
  VARIANT 6: note = Ancestral polymorphism is W, Derived polymorphism is L
  VARIANT 7: note = Ancestral polymorphism is F, Derived polymorphism is L
  VARIANT 8: note = Ancestral polymorphism is Y, Derived polymorphism is C
  VARIANT 69: note = Ancestral polymorphism is A, Derived polymorphism is V
MFLVDWLCDLFVSLRRLWQKEAKILFLGLDNAGKTTLLHMLKDERLSQHAPTQLPTSEELSIGRIKFKAFDLGGHRIARRVWKDYYAKVDAVVYMVDAADGGRFDESKTELGALLSDDALAGVPFLVLGNKIDIPQAAPEHALAYYLGLTGCTTGKGTVDLAGTGVRPVEVFMCSVVRKMGYGEGFKWMSQYIN

SEQ ID NO: 9900 - protein, 298 aa, Zea mays
  VARIANT 35..298: note = Derived polymorphism lacks residues 35 to 298
MSAELKRDYEIGEEIGRGRFGVVHRCTSRATGEAYAVKSVDRSRLGDDLDRELAQLEPKLAQLAGAGNPGVVQVHAAYEDEAWTHVVMDLCPGPDLLEWVGRRRGAPVPEPVAAAIVAQVAQALALCHRRGVAHRDVKPENILIDAAAGSDDDEEDEAEAAPRARLADFGSAAWVGAGGLGRAEGLVGTPHYVAPEVVAGGEYGAKADVWSAGVVMYALLSGGALPFGGDSAAEVLAAVLRGSARFPPRLFGGVSPAAKDLMRRMICRDEWRRFTAEQVLAHPWIVSGGGARAMERPT

SEQ ID NO: 9901 - protein, 342 aa, Zea mays
  VARIANT 258: note = Ancestral polymorphism is I, Derived polymorphism is T
MAASEGVLLGMGNPLLDISAVVDDAFLAKYDIKLNNAILAEEKHSPMYDELASNSNVEYIAGGATQNSIRVAQWMLQTPGATSYMGCIGKDKFGEEMKKNAQAAGVTAHYYEDETAPTGTCAVCVVGGERSLIANLSAANCYKSEHLKRPENWALVEKAKYIYIAGFFLTVSPDSIQLVAEHAAANNKVFLMNLSAPFICEFFYDAQEKVLPYADFIFGNETEAKIFAKVRGWETENVEEIALKISQLPLASGKQKRIAVITQGADPVVVAEDGKVKTFPVILLPKEKLVDTNGAGDAFVGGFLSRLVQGKSIEDCVTAGCYAANVVIQRPGCTYPEKPDFN

SEQ ID NO: 9902 - protein, 177 aa, Zea mays
  VARIANT 142: note = Ancestral polymorphism is S, Derived polymorphism is F
  VARIANT 133: note = Ancestral polymorphism is S, Derived polymorphism is L
  VARIANT 105: note = Ancestral polymorphism is A, Derived polymorphism is S
  VARIANT 93: note = Ancestral polymorphism is A, Derived polymorphism is V
  VARIANT 85: note = Ancestral polymorphism is A, Derived polymorphism is T
  VARIANT 52: note = Ancestral polymorphism is R, Derived polymorphism is C
  VARIANT 13: note = Ancestral polymorphism is R, Derived polymorphism is W
MLAISTAFDVVERTSKDNNKTLQRTSNTTRCLNLGSYNYLGFAAADEYCTPRVIESLKKYSASTCSVRVDGGTTKLHNELEELPARFVGKPAAILFGMCYVTNSAIIPCLIGKEIIQHLKHSCPPHLYATSMSPPGVQHVISAIKVILGEDGSNRGAQKLARIRLRFLQVRAQEDGF

SEQ ID NO: 9903 - protein, 343 aa, Zea mays
  VARIANT 17: note = Ancestral polymorphism is I, Derived polymorphism is T
  VARIANT 22..343: note = Derived polymorphism lacks residues 22 to 343
  VARIANT 36: note = Ancestral polymorphism is R, Derived polymorphism is S
  VARIANT 230..343: note = Derived polymorphism lacks residues 230 to 343
MHNCFSYHDYCRVLEKIEKVCSKRLDNQLLHQNKDRKEFNTLIKEQEFRSFKGHACSYRVHYECVIPITIYHRVKLPKLFFSILLKVFHKYMRSQLIKFVRRQINDRNKEKRIRERWIFEATAGYLKKGEQELKFLGMQSLTTEIEAIASTRELEETITDKDSDIFQLETIIGNLQSSIETNGGAEDGLSVDATECLVDSMSSHFNNAPTEFSEKVGIQASVSSPPQEEGGNVARSCSSFVNDKTLVLSKAVAADLENEPPVRKKQRCMNPDDDALEGSCSRAQRNLPDQSDSDIHEIALHNEEEPQAERLPSANVNQMEQADVAANKEVSSGVTSSFGQVTE

SEQ ID NO: 9904 - protein, 703 aa, Zea mays
  VARIANT 388..703: note = Derived polymorphism lacks residues 388 to 703
MAGNGAIVESDPLNWGAAAAELAGSHLDEVKRMVAQARQPVVKIEGSTLRVGQVAAVASARDASGVAVELDEEARPRVKASSEWILDCIAHGGDIYGVTTGFGGTSHRRTKDGPALQVELLRHLNAGIFGTGSDGHTLPSEVTRAAMLVRINTLLQGYSGIRFEILEAITKLLNTGVSPCLPLRGTITASGDLVPLSYIAGLITGRPNAQAVTVDGRKVDAAEAFKIAGIEGGFFKLNPKEGLAIVNGTSVGSALAATVMYDANVLAVLSEVLSAVFCEVMNGKPEYTDHLTHKLKHHPGSIEAAAIMEHILEGSSFMKHAKKVNELDPLLKPKQDRYALRTSPQWLGPQIEVIRAATKSIEREVNSVNDNPVIDVHRGKALHGGNFQGTPIGVSMDNARLAIANIGKLMFAQFSELVNEFYNNGLTSNLAGSRNPSLDYGFKGTEIAMASYCSELQYLGNPITNHVQSAEQHNQDVNSLGLVSARKTAEAIDILKLMSSTYIVALCQAVDLRHLEENIKTSVKNTVTQVAKKVLTMNPSGDLSSARFSEKELISAIDREAVFTYAEDAASASLPLMQKLRAVLVDHALSSGDAEREPSVFSRITKFEEELRAVLPQEVEAARVAVAEGTAPVANRIADSRSFPLYRFVREELGCVFLTGEKLKSPGEECNKVFLGISQGKLVDPMLECLKEWDGKPLPININ

SEQ ID NO: 9905 - protein, 716 aa, Zea mays
  VARIANT 244..716: note = Derived polymorphism lacks residues 244 to 716
  VARIANT 401..716: note = Derived polymorphism lacks residues 401 to 716
MECDNGRVAATNGDSLCMALPRAADPLNWGKAAEEMMGSHLDEVKRMVAEYRQPLVKIEGASLRIAQVAAVAAGAGEARVELDESARGRVKASSDWVRDSMMNGTDSYGVTTGFGATSHRRTKEGGALQRELIRFLNAGAFGIGTDAGHVLPAEATRAAMLVRINTLLQGYSGIRFEILEAIVKLLNANVTPCLPLRGTVTASGDLVPLSYIAGLVTGRENAVAVAPDGTKVNAAEAFRIADIQSGFFELQPKEGLAMVNGTAVGSGLASTVLFEANVLAVLAEVLSAVFCEVMNGKPEYTDHLTHKLKHHPGQIEAAAIMEHILEGSSYMKLAKKLGELDPLMKPKQDRYALRTSPQWLGPQIEVIRASTKSIEREINSVNDNPLIDVARSKALHGGNFQGTPIGVSMDNTRLAVAAIGKLMFAQFSELVNDYYNNGLPSNLSGGRNPSLDYGFKGAEIAMASYCSELQFLGNPVTNHVQSAEQHNQDVNSLGLISSRKTAEAIEILKLMSSTFLIALCQAVDLRHIEENVKSAVKSCVMTVAKKTLSTNSTGGLHVARFCEKDLLQEIEREAVFAYADDPCSANYPLMKKLRNVLVERALANGTAEFDAETSVFAKVAQFEEELRTALPSAVEAARAAVENGTAAIPNRIAECRSYPLYRFVREELGAVYLTGEKTRSPGEELNKVLVAINQGKHIDPLLECLKEWNGEPLPIC

SEQ ID NO: 9906 - protein, 77 aa, Zea mays
  VARIANT 51: note = Ancestral polymorphism is G, Derived polymorphism is D
  VARIANT 42..77: note = Derived polymorphism lacks residues 42 to 77
  VARIANT 41: note = Ancestral polymorphism is A, Derived polymorphism is V
  VARIANT 29: note = Ancestral polymorphism is A, Derived polymorphism is T
MPFGSKAKAYIDSKSLAYLTAKQALAYFAVLLTDLKRNLSAEGSPVVLFGDSYGGMLAAWMRLKIPILLLGLSHHQL

SEQ ID NO: 9907 - protein, 95 aa, Zea mays
  VARIANT 35: note = Ancestral polymorphism is E, Derived polymorphism is K
MNLQPSIFTAAVLARSGAIAAKGPTDVLVHEFQFEVEQVLSREFLCDENRVAGSGTPSLGHFVIHGGGARAGDAFCSAQEDGSSEEKTRRRRSRK

SEQ ID NO: 9908 - protein, 711 aa, Zea mays
  VARIANT 550..711: note = Derived polymorphism lacks residues 550 to 711
MITFADLTEPAAAGAERCVDRQLWLACAGGMCTVPPVGASVYYFPQGHAEHALGLAGAADLSAARVPALVPCRVTAVRYMADPDTDEVFARIRLVPLRGGDADADAGGVEDDAAAADEQEKPASFAKTLTQSDANNGGGFSVPRYCAETIFPRLDYAADPPVQTVVAKDVHGAAWKFRHIYRGTPRRHLLTTGWSTFVNQKKLVAGDSIVFLRGDSGDLHVGIRRAKRGFCGAGGGGGDDSPAAGWDHYAGLMRGNVSPCAAAKARGKVRPEDVAEAARLAAAGQSFEVVYYPRASTPEFCVRAAAVRVAMRVQWSPGMRFKMAFETEDSSRISWFMGTVAGVQVTDPIRWPQSPWRLLQVTWDEPDLLQNVKRVSPWLVELVSSMPAIHLASFSPPRKKPRIPAYPEFPFEGQLLNPAFPPNPLPHGQHHHHFLHSHSHQHHHPPFFPFPAGSAPAAIQGARHAQFVPPFSELHLTHLQPSLLYPRLRRPDHVGPTTPIPARVSTDLTIGGAAAAARDDDDDDFPCAPPSTGANRQKPDAKPAGLVLFGRTILTEQQMSRSGATSPAATGNSSTCWNAEKGPNASEGSGGSGVIQTSPAKAASSERPPWLGGDGSQQQQASGELGLGLEPGQCKVFVESDTVGRNLDLAALRSFDELYGRLSGMFGVAGAELRSRVLYRGAAGDEPFSDFVRSARRLTVLTDAGSDNLGS

SEQ ID NO: 9909 - protein, 423 aa, Zea mays
  VARIANT 284..423: note = Derived polymorphism lacks residues 284 to 423
  VARIANT 24: note = Ancestral polymorphism is A, Derived polymorphism is V
MSSTTEALAPMMILALAAVLLATAARQPSPVMSTTTTNLTLHNLCPYPVWPLVTANAGNPSIPTDADGEPAGRLDGNGEGLATLAFPPGAWSGRVVARTGCTGGDDNDEADAYDPLLPTPPLRCTTGDAPPVTVAQVSVGGTGGAAAYSVSLVDGFNVAVVVTPHGMPPEGTGPRRRCPTLGCAVDLGAECPRAPARPEEGAAPARPRRRCSSTCAPTRGPTPLTSRTRPRTASTPARSSGDAYKSPAFIALASALCVAVAVLLHHCVLAACCHGGDRRRRRQQHHHRHVVSAVTTSFSAGARRHQHQHQPEEEEADVSVEVSATSRTHLVAAAVVCRYRKEEPWNESTCPVCLADFDDGEAVRVLPECMHYFHAECIDTWLRGSTSCPMCRAETTPTPTPSPASVRHHLELSFSLEEILVRA

SEQ ID NO: 9910 - protein, 320 aa, Zea mays
  VARIANT 38: note = Ancestral polymorphism is P, Derived polymorphism is A
MQMSTDPNHYGVFPHSFCNQHVVSFQTSSVTSVSGAIPVCLDTSSGMNGNMAMLNTTTSTIVSTGSPNMSAEFSCQNLKYTAPLAVEWSYPELQLLNDGLNKYANEPGIMKYIKIAATLPDKTVRDVAMRCQWMAARKEATRRRKPEEHYLGKKIKDRKDKMAEPSSWGTNPPVQTEMRCSSSMPANAKHNGFLSADSQIDHGMLNILEENAKLLNQIEVNILTSQVGLLFLAHNNIELFHHARRNINGLLQSMSQIPGIMSKMPPLPISVDERLASCILPRAPMVNFLCFAYYLHSGALLIVNQYLSCEDTELKNAVWA

SEQ ID NO: 9911 - protein, 221 aa, Zea mays
  VARIANT 40: note = Ancestral polymorphism is E, Derived polymorphism is K
  VARIANT 55: note = Ancestral polymorphism is A, Derived polymorphism is T
MSESKGRDGEEGRRWSVRRKQTRSGSGGKDATRREAVGSKSGRWRRLRGSGGKRTEALRRAARCAWWTWLLHASVVACRVEVEAAAIFFRPPPVGVLPPAPAPAVEGKEKVNGSWIWRARDCTPPAARRCPDLLRFATPRGTTAVVLAGIIAALKSAGGTLADHTFWFFSASYPEPCRTPFILDNAACVDLRVHVFMASGLHRPVLIRAEQRCFHFGPRPS

SEQ ID NO: 9912 - protein, 390 aa, Zea mays
  VARIANT 280..390: note = Derived polymorphism lacks residues 280 to 390
  VARIANT 44: note = Ancestral polymorphism is M, Derived polymorphism is I
  VARIANT 32: note = Ancestral polymorphism is P, Derived polymorphism is L
MPPLRGAKRRRKAALEKKAAAVAMASAAAGDPPGDWWEAFCIRMSGTLSSIEDAQRFESIFKMPRRAFDYVCNLVRDEMMVRSCSYTFLDGTVLCLEDRVAIALRRLNSGGSLVTVGSSVGVNHSTVSLITWRFIEAMEERASHHLRWPDSIEMEKIKSKFEKIHGLPNCCGVVDTTHITMCLSSAEPNCKVWLDQEKNYSMVLQAVVDLDTKFTDIVTGWPGSMKESSILHSSGLFKLCEKGERLNGSKLKVSDGSEIGEYLIGDSGYPLLPWLLTPYQEKDLTESSAEFNIRHSSARTVAPRTLAKFKDTWKFLQGEMWRPDKHKLPRIIHVCCLLHNIIIDLQETAVDEAQAWPSDHDAKYRQQVCQLADENGVRVRDKLSQHLISK

SEQ ID NO: 9913 - protein, 68 aa, Zea mays
  VARIANT 13: note = Ancestral polymorphism is A, Derived polymorphism is T
  VARIANT 11: note = Ancestral polymorphism is H, Derived polymorphism is R
  VARIANT 8: note = Ancestral polymorphism is D, Derived polymorphism is Y
MEYVVTIDVLHEAVNNVNNNIGPAIVGKVEASTNHLFEKQGTSTNHLFEKQGTTSTTCPSSGCETLST

SEQ ID NO: 9914 - protein, 245 aa, Zea mays
  VARIANT 165: note = Ancestral polymorphism is S, Derived polymorphism is F
MSPKGSTTAASAGEISSRVGTAVQSVVQTPLLFGMSFCDILVCGPDTFDIDSRCYWSVIRLFLTDATAQMDVVVITPSRELSKLQPARATHGMLDHIMVENASVKVALNRIAVVSILDAHTLRPHPHGARYVAPPHPPAVARRPASRRQQPSLLTDGCKYFFTLSVTLGIMFAYLLGLFVPWRLLAVIGTLLCIVLISGLFFIPESPRWLAKMNIMDDCETSLQVLRGFDADITSELNDIKMVPF

SEQ ID NO: 9915 - protein, 132 aa, Zea mays
  VARIANT 15: note = Ancestral polymorphism is P, Derived polymorphism is S
  VARIANT 94: note = Ancestral polymorphism is L, Derived polymorphism is M
MTYDALSKDVHHVQPVTDKMLLDPISCEIIQDSGKPEGCLQGCSLLHFACEYGYPIMVELLLLFGADINMQDFHGRTPLHHCVQKKNDELTKHLLKRGARTTIKDGGGLTALERRMELGAITDEDLFILFVR

SEQ ID NO: 9916 - protein, 159 aa, Zea mays
  VARIANT 100: note = Ancestral polymorphism is R, Derived polymorphism is W
MVEQIEIDQFINDVAIFGCCLEDEVPLLVYEFISNGTLHDLLHTDMATKCLLSWDDRIRIATEALGALAYLHYSAASIPIFHRDVKSSNILLDMRLQFLRTMRLRKRHHLPKIDGDIEPLLCEDSKNTLEHTDLINDAPQETSRCYSLEQEFVSSFRPC

SEQ ID NO: 9917 - protein, 752 aa, Zea mays
  VARIANT 49..752: note = Derived polymorphism lacks residues 49 to 752
  VARIANT 115..752: note = Derived polymorphism lacks residues 115 to 752
MAPHTTAGGGGGAEDEVSEAAAASPALRHRHAGKGEGLGGNGGAGADGQASVERVFADKAVPSWREQLTLRAFVVSALLAVMFSVIVMKLNLTTGIIPSLNVSAGLLGFFFVRMWTAAAERMGFLRQPFTRQENTVIQTCVVSAYGIAFSGGFGSYLFGMSDKIAKQATEAKDANNIKDPHLGWMIGFLFLVSFIGLFALVPLRKIMIVDYKLTYPSGTATAYLINGFHTPEGAKLAKKQVKTLGKYFVFSFFWGFFQWFYTAGDECGFKNFPTLGLEAYNNSWAVGVGEKSVEGHFRLANRQFRGIVSNAKHGLLSFRFFFDFSPTYVGVGMICPYIVNVSVLLGGILSWGLMWPLIAKKKGSWYPANLEDSSLHGLQAYRVFISIALILGDGLYNFIKVLIRTIAGFISMVQQNSKSMLPVSDNGSSMSSMEAVSFDDERRIENFLKDQIPKSVAYGGYVAVAAISIGTLPQIFPQLKWYYILVAYVVAPVLAFCNAYGSGLTDWSLASTYGKLAIFVFGAWAGLSHGGVLVGLAACGVMMSIVSTASDLMQDFKTGYLTLASPRSMFISQVIGTGMGCVIGPCIFWLFYKAFGDIGESGTEYPAPYAIVYRNMAILGVDGFGSLPKNCLTLCYIFFAAAITINLVRDLTPYKVSRFIPLPMAMAIPFYIGSYFAIDMFLGSAILFVWERLNKAKADAFGPAVASGLICGDGIWTLPQSILALAKVQPPICMKFLSRSTNAKVDSFLGLS

SEQ ID NO: 9918 - protein, 639 aa, Zea mays
  VARIANT 152: note = Ancestral polymorphism is P, Derived polymorphism is L
MDKNYGELYNILGWGEEYFAVNTEGHLSVKPFGRWTEPGQEIDVHSVIVEALATQPNDSTSKSQFPMILRFPDVLKNRIETLHNAFNSAMESTGYTSRYQGVFPIKVNQNKHVVQDMVRFGQQWNYGLEAGSKPELLIAMSCLPVTEAEPKPYLICNGYKDADYIALALSARAMGLNPIIVLEMEEELAIVLDQYRKLQQKLPDDDAVRKKFEPIIGIRAKLLTKLPGHFGSTAGKHGKFGMLADQIYEVAETLGKEGKLHWLQLLHFHIGSMIPTTGKVYDAVSEAAGIYCNLVNEHGAKWLATLDCGGGLGVDYDGTRSGDSDMSVAYGIQEYASAVVQAVRLKCDYNGVAHPVVCTESGRAMASHHSMIILETLSAIPEPQDEDTSEQLLNRIQDLSYKQPRAPVGGATAAVYSHAADLKKHGIEMYKLGKKLGKRVVADANTVYNYHMNLSVFSLLPDFWGIGQLFPMMPVSRLNEEPTLKGTLVDITCDSDGKIENFISRENTLPLHLFEPSLGGYYVAVLVSGAYQEAIAGKHNLFSGPTLVRVNSSTTKDGGFEIERVDLGPAADEIIGSMRYSVEEDIITVIEKKAKGTEEEERVWAWEMVEPLMTKALTTMPYLNEYKVPEPEPEPEPIP

SEQ ID NO: 9919 - protein, 318 aa, Zea mays
  VARIANT 197: note = Ancestral polymorphism is V, Derived polymorphism is M
  VARIANT 32: note = Ancestral polymorphism is P, Derived polymorphism is R
  VARIANT 13: note = Ancestral polymorphism is D, Derived polymorphism is G
MEKHMAETMIEFDRRIPDALRAAFGIYRASRPTTGQQDDAANLAAVLLAPLDDDGASDPKAIDCDKNPMAMDCASDPIAMGCDLAMELGSCYIKKHDEDDHFGHAEACVIGVADGVGGYRSQGVDASAFSRGLMNNAYAEVAKAPVPGTRFCPRALLERAHQMTAAAHTPGASTAAIVSLVGSTLKWAFVGDSGFAVLRGGRILRRSPTQQHYFNCPYQLSSRQDRTRVADALVGEVAAKEGDIVILGTDGLFDNVFDDEIEGIVRMGTTLGFAPLNMAEVLAGFRLRGCGLRLQRLAVQLLGPETAREESHDGREAG

SEQ ID NO: 9920 - protein, 643 aa, Zea mays
  VARIANT 502..643: note = Derived polymorphism lacks residues 502 to 643
MPSLRAVMVHGGGEKDGGGSTDGVPPPCAHTLVSLLRARSQRSAKADEKVEWVRSQLVGSDAEFETPFGRRALLYADHTASGRSLRYIEDYIVKHVLPFYGNTHTEDSYVGSKTTRMARKAASYIKRCMGAGPDDALLFCGSGATAAAKRLQEAIGVACPPALRARAASQLRAEERWVVFVGPYEHHSNLLSWRQSLADVVQVGAGADDGLVDLAALRRALGSPEYASRPMLGSFSACSNVTGVLTDTRAIARLLHQHGAFACFDFAASGPYVDIDMRSGEMDGYDAVFLSPHKFVGGPGTPGILLMNRALYRLAGMPPSTCGGGTVAYVNGFSEEDTVYYDDIEEREDAGTPPIVQKVRASLAFWVKEHVGRDAVAMRERAYAEAAMARLLANPSVEVLGNVAARRLPIFSFLVYPPDDDDGAAVAAAVAHDDADDDASSASPAPRRRLPLHGRFVAKLLNDLFGIQARGGCACAGPYGHALLGVGEDLSLRIRDAIVRGYHGVKPGWTRVSFAYYLSRDEFRFVLAAIDFVAKHGHRFLPLYSFDWATGNWAFRRRTFKHHVMREELLRERDTSTDDSDDDDDQQHFTKKKTAAAEYQQQDKFQSYLDTATKIALSLPDTYRELVASVPNGLDPDIILFRV

SEQ ID NO: 9921 - protein, 332 aa, Zea mays
  VARIANT 248: note = Ancestral polymorphism is G, Derived polymorphism is S
  VARIANT 187..332: note = Derived polymorphism lacks residues 187 to 332
  VARIANT 186: note = Ancestral polymorphism is K, Derived polymorphism is M
MEKHMAETMIEFDRRIPDALRAAFGIYRASRRTTGQQDDAANLAAVLLAPLDDDGASDPITSDCDKNPMAMDCASDPIAMGCDLAMELGSCYIKKHDEDDHFGHAEACVIGVADGVGGYRSQGVDASAFSRGLMNNAYAEVAKAPVPGTRFCPRALLERAHQMTAAAHTPGASTAAIVSLVGSTLKWAFVGDSGFAVLRGGRILRRSPTQQHYFNCPYQLSSRQDRTRVADALVGEVAAKEGDIVILGTDGLFDNVFDDEIEGIVRMGTTLGFAPLNMAEVLAGFACEAAGCDYRDSPYSYLGRRQLGKSLMTGGKPDDITVVVAYIVPPKI

SEQ ID NO: 9922 - protein, 332 aa, Zea mays
  VARIANT 187..332: note = Derived polymorphism lacks residues 187 to 332
  VARIANT 32: note = Ancestral polymorphism is P, Derived polymorphism is R
  VARIANT 13: note = Ancestral polymorphism is D, Derived polymorphism is G
MEKHMAETMIEFDRRIPDALRAAFGIYRASRPTTGQQDDAANLAAVLLAPLDDDGASDPKAIDCDKNPMAMDCASDPIAMGCDLAMELGSCYIKKHDEDDHFGHAEACVIGVADGVGGYRSQGVDASAFSRGLMNNAYAEVAKAPVPGTRFCPRALLERAHQMTAAAHTPGASTAAIVSLVGSTLKWALVGDSGFAVLRDGRILCRSPTQQHYFNCPYQLSSRQDRTRVSDALVGEVAAKEGDIVILATDGLFDNVFDDEIEGIVRMGTTLGFAPLNMAEVLAGFACEAAGCDYRDSPYSLGRRQLGKSLLTGGKPDDITVVVAYIVSPSKI

SEQ ID NO: 9923 - protein, 304 aa, Zea mays
  VARIANT 95: note = Ancestral polymorphism is F, Derived polymorphism is Y
  VARIANT 211: note = Ancestral polymorphism is A, Derived polymorphism is D
MTPSSALALALQAAASPLPASTPRSSPRSSSLSLGRGTAGNGPRRLAAAAPPRAFFSSSPYQPPQPEGFSPHREYGLVPMVIETTSRGERAYDIFSRLLKERIVCINGPIADDTASLVVAQLLFLESENPLKPVHLYINSPGGVVTAGLAIYDTMQYIRCPVTTLCIGQAASMGSLLLAAGAPGERRALPNARVMIHQPSGGAQGQATDIAIQAKEILKLRDRLNKIYQKHTRQPIDKIEQCMERDLFMDPDEARDWGLIDEVIENRPASLMPDGIVGGLDVPSLGGGGGGGGRGSDVEEPSAV

SEQ ID NO: 9924 - protein, 443 aa, Zea mays
  VARIANT 74..443: note = Derived polymorphism lacks residues 74 to 443
  VARIANT 37: note = Ancestral polymorphism is G, Derived polymorphism is D
  VARIANT 16..443: note = Derived polymorphism lacks residues 16 to 443
  VARIANT 10: note = Ancestral polymorphism is P, Derived polymorphism is L
  VARIANT 5: note = Ancestral polymorphism is A, Derived polymorphism is V
MLDLAIVHLPSTFPLWRAIPDRPAPWSTAASLSFDGGLVLTDRAADKVLWSTAATSASAGDRAVLLNTSNLQIQSTGGSSSPDVVWQSFDYPPKTIVQGQNFTSATKLYSFDRRFAMRLGSNYFGLHIEPPPSSGGVAAAMYFKHMAMEAKAQIVAGGGPTYARVEPDGFPAMYQREGPPADVLSFDTFNRGVRALRRMTLEPNRNLRAYYWNGARWALDYTAINDNDRCELPTTYGAYIVCAEPSGSCECLANATDGSGYAAAVPASFASNLCGTTGGEVGGLYWAVRRWGVEPVNKELLRSEQAASTTDCEARCEHNCSCWGAVYSNRTGVCYVMDYPAQLLVASDDRKMGYFKIMSLEEEGTRGRGDGRTSGVKAALLVVGVVSVVTAAAFGAYRVWDRRRRSAVDARRQMGAADDGLSPGPYKNLGSFSSVELTNSFRR

SEQ ID NO: 9925 - protein, 73 aa, Zea mays
  VARIANT 36: note = Ancestral polymorphism is Q, Derived polymorphism is P
  VARIANT 34: note = Ancestral polymorphism is V, Derived polymorphism is M
  VARIANT 15: note = Ancestral polymorphism is I, Derived polymorphism is V
MGTYLVQLICDDSNIFKWTALIKGPSETPYEGGVFQLAFAIPEQYPLLPPQVRFLTKTFHPNVHFKVRFVWIY

SEQ ID NO: 9926 - protein, 339 aa, Zea mays
  VARIANT 172: note = Ancestral polymorphism is S, Derived polymorphism is L
  VARIANT 212..339: note = Derived polymorphism lacks residues 212 to 339
  VARIANT 279: note = Ancestral polymorphism is T, Derived polymorphism is N
  VARIANT 284: note = Ancestral polymorphism is L, Derived polymorphism is S
MAMLSRTTRVLRKVCGLGPTAAKRRLSTAEAFAACEGSLLRPLPGLDLPPCLPDNLSRSPTRITTLPNGLRVATEDVPDTKHRSHLNLVTELELAGGNVGASASREQMVYSYDTLKGYMPEALEILIDCMRNPLFLQEEVELQLVLAREEVKELQKNPEKFLHEQLNLVGLSGALANPLIAPEDALARINEKIIQKFYHENFTADRVVLAASGVDHEHLLGYVDLLLKDWHKGTPMEKPKSTYVGGDSRHRADLDMTHVALAFEVPGGWLQERDATIMNVIQTLMGGGGSFSSGGPGKGMHSRLYRRVLNKYHLVDSFSAFSNVYDSSGLFGIYLTTVS

SEQ ID NO: 9927 - protein, 470 aa, Zea mays
  VARIANT 158..470: note = Derived polymorphism lacks residues 158 to 470
  VARIANT 211: note = Ancestral polymorphism is G, Derived polymorphism is R
MGDSQYSFSLTTFSPSGKLVQIEHALTAVGSGQTSLGIKAANGVVIATEKKLPSILVDETSVQKIQALTPNIGVVYSGMGPDFRVLVRKSRKQAQQYYRLYKEHIPVTQLVRETAAVMQEFTQSGGVRPFGVSLLIAGYDDNGPQLYQVDPSGSYFSWKASAMGKNVSNAKTFLEKRYTEDMELDDAIHTAILTLKEGYEGQISSNNIEIGIIRADREFKGNVSVYYVFVVGNLRLFDITNSLLLQMVCPSGKLVQIEHALTAVGSGQTSLGIKAANGVVIATEKKLPSILVDETSVQKIQALTPNIGVVYSGMGPDFRVLVRKSRKQAQQYYRLYKEHIPVTQLVRETAAVMQEFTQSGGVRPFGVSLLIAGYDDNGPQLYQVDPSGSYFSWKASAMGKNVSNAKTFLEKRYTEDMELDDAIHTAILTLKEGYEGQISSNNIEIGIIRADREFKVLSPSEIKDFLEEVE

SEQ ID NO: 9928 - protein, 361 aa, Zea mays
  VARIANT 105: note = Ancestral polymorphism is H, Derived polymorphism is L
  VARIANT 244: note = Ancestral polymorphism is A, Derived polymorphism is G
  VARIANT 257: note = Ancestral polymorphism is P, Derived polymorphism is S
MALVTSGSGADQVIAEVAMNGGADPSATTVRATVVQASTIFHDTPATLDKAERLIAEAAGYGSQLVVFPEAFIGGYPRGSTFGFGISISIINPKDKGKEAFRRYHASAIDVPGPEVTRLAAMAAKYKVFLVMGVIEREGYTLYCSVLFFDPLGRYLGKHRKLMPTALERIIWGFGDGSTIPVYDTPLGKIGALICWENKMPLLRTALYGKGIEIYCAPTADSRPVWQASMTHIALEGGCFVLSANQFCRRKDYPPPPEYEFAGLGEEPSADTVVCPGGSVIISPSGEVLAGPNYEGEALITADLDLGEIVRAKFDFDVVGHYSRPEVLRLVVNDQPQLPVSFTSAAERTPAAKSDIDTKSY

SEQ ID NO: 9929 - protein, 218 aa, Zea mays
  VARIANT 70..218: note = Derived polymorphism lacks residues 70 to 218
  VARIANT 72: note = Ancestral polymorphism is G, Derived polymorphism is R
  VARIANT 81: note = Ancestral polymorphism is E, Derived polymorphism is D
MATTRDVSAASAAAMFHVYQPMPMPSTAAAPAKAGKKEGGKDRHSKVNGRGRRVRMPIVCAARVFQLTRELGLKSDGQTIEWLLRQAEPSIVAATGSGTTPAVFVSSSAPSTSSSSHSHYQQQQQQQQATVVVLGKRPREEGGDAAAASVPAFWAAAPRTTAAADASWGFSPLEAQQAAAGYVPMAQAQQQQHHHHHLNLLAALSGAARRAEAAEETR

SEQ ID NO: 9930 - protein, 417 aa, Zea mays
  VARIANT 133: note = Ancestral polymorphism is L, Derived polymorphism is Q
  VARIANT 131: note = Ancestral polymorphism is P, Derived polymorphism is A
MSVPPPAGGGAIINEVLTDDELRAVLRRLGPEAERDAFGLVCRRWLRIQSSERRRLRARAGPDMLRRLAARFPGVLDLDLSQSPSRSFYPGVIDDDLNVIASSFRNLRVLALQNCKGISDVGVAKLGDGLPSLQSLDVSRCIKLSDKGLKAVALGCKKLSQLQIMGCKLVTDNLLTALSKSCLQLVELGAAGCNSITDAGISALADGCHHIKSLDISKCNKVSDPGVCKIAEVSSSCLVSIKLLDCSKVGDKSIYSLAKFCSNLETLVIGGCRNISDGSIQALALACSSSLRSLRMDWCLKITDTSLQSLLSNCKLLVAIDVGCCDQITDNAFMDGEGYGFQSELRVLKISSCVRLTVAGVGRVIESFKALEYLDVRSCPQVTRDSCEQAGVQFPAGCKVNFDGSLLESDPSAEMFF

SEQ ID NO: 9931 - protein, 484 aa, Zea mays
  VARIANT 39: note = Ancestral polymorphism is S, Derived polymorphism is Y
  VARIANT 40: note = Ancestral polymorphism is D, Derived polymorphism is G
  VARIANT 55: note = Ancestral polymorphism is R, Derived polymorphism is G
  VARIANT 405: note = Ancestral polymorphism is C, Derived polymorphism is W
MSTKKVAITRILVAQLYGNIFRSCFLPVKATLDLQLVQSDLYTLVDGFVTRNSARTNPSNPSIELGPEFKKVGSFLGRFKSIPSIVELDSLKVSSDVWFGSGIVLKVHLPKCTLTLSFMVQHLGSLHVVCMGITLSSSRNGIEKRCGYCCWNSWSCQGVCLIFASPAHCIMCSFLRFLMYATSLVQDFIVKGTLNLKCLKFRVLDEADEMLNMGFVDDVELILGMLICKVEDATKVQTLLFSATLPDWVNKHSMRFLKVDRKTVDLVGNEKLKASASVKHLALPCNKAARAQVIPDIIRCYSQDVLPHRWLFFSNTGVAVMLYEPRYKHSVSRLERESGVKFEHISAPQPTDVAQSAGSEAADAIASVSDSVIPIFRQQAEQLLSSSSLSAADLLAKALAKAVVCYNIPVILFLHRRGHICSHWCYLQFDVGNVVMVTGGRNTGRVGVIKNWEKHKGIFEVIDVLLGVFCMLCLVFSYLLYRKT

SEQ ID NO: 9932 - protein, 1267 aa, Zea mays
  VARIANT 324..1267: note = Derived polymorphism lacks residues 324 to 1267
  VARIANT 652..1267: note = Derived polymorphism lacks residues 652 to 1267
  VARIANT 888..1267: note = Derived polymorphism lacks residues 888 to 1267
MVRLLGLRSLSFGPEDSPREIPSTADVAPPVGSSGWLVRFFDSAFFCEWIAVSYLYKHDHAGVRDYLCNRMYTLPLPGLEAYLFQVCYMLVHKPSPSLDRFVIDTCAKSLRIALKVHWLLAAELELEDADDLDGIDKVQEQCQVAATVQGEWPPLVRPSPPSPAASPRGNPMLSRIRSSKQRLLSLASSPSLGLSPPAGGGVNVAEDAMGTGGKQPATPSSEDNKLLKRLSIGPKMRDALLFRRSGEKDEEQDRDGFFKRLLRDSRDKEEEDGDREGFFKRLLSREKDNEEEESDRDGFFRRLLRDSKEEDMELTPSSDGLLKRLFRDKEDRQGEDDEKEGFFRRMFKDKNEERRDSSHARHGNEERLGKSVEDDDREGFFRKIFKDKNEERKDEGHQKPDEREKVGANIEDDKRDGFFRQLFKEKNDEKKEGSTPSKKEEDDKGHKNADDDNFFRRLFKDKNEEKKGIVHDRNEDDKCEEGDKENFFRKLFKDKHEERRTEGPDKNDDYGKGSSGIEEEDNPEFLSFRRLFRVHPEDSKSGHIESSQSNNLSEGSPGSESFFKRLFRDRDRSLEDSEIFGSKMAKEARIWSHVIFLLDTISCVHVIKHPGTTGINEKQSGKPPLPINAVAELRKGSYYASLELVQALCDTSYGLVDIFPIEDRKIALRESLTEINSQIASAEKNGGVCFPMGKGIYRVVHIPEDESVLLNSREKAPYLICVEVLKAEAPSHSKGSSDGHKLSKGGIPLANGDVQLPKPPPWAYPLWSRHETQNYETDRMLKSTSQVIDQAMAQLWETKVKFVNVSFSIEKLGRSRSIVLSETGRRLRHDATDSHDPPGDSQTVADQPIEWVKVTLSAVPGVNMEDVDDNEPTRKKDHRRVPSTIAIEEVKAAALKGEAPPGLPLKGVAQSTQNLDPKATDGGDPKPTDALAGELWAVKRERIRRSSVHGKSPGWDLRSIIVKSGDDCRQEHLAVQLVAHFYDIYQEAGLPLWLRPYEVIVTSAYTALIETIPDTASIHSVKSRFPNISSLRDYYVAKYEENSPNFKLAQVRMTPFGVEANDILVTGESQLIFLQRNFVESMAGYSILCYLLQVKDRHNGNLLIDEEGHIIHIDFGFILSNSPGGVNFESAPFKLTRELLEVMDSDAEGTPSEFFDYFKVLCIQGFLTCRKHAERIILLVEMLQDSGFPCFKGGPRTIQNLRKRFHLSLTEEEQRIHSETNFLVSLEQTMGLHRETDWCRIVLSWDPPSERVEKCTVIGSHLVSALC

SEQ ID NO: 9933 - protein, 441 aa, Zea mays
  VARIANT 329..441: note = Derived polymorphism lacks residues 329 to 441
MNSKRRRSHSPVEYKEGREKDYEASGRKDKSRDLDDTFDAKRGHESGRHSDRHSYGTSRESRRHDDYRRYHDKSGDDYGRSYPRASWSDRESRADTYYDRSKHDSTSGRSRGDQQDVGSRYGEKSVNRDQRSINEEKQEPPRGYQKSDVGEYNKCTDARKQEYRGYGDDRDHYRVVHKNKETIKEEVLKRRNGKEVEKEALVETREKKRSLFSSTGPNVDNPGDAKPSATTEAFDNSAGTVDGVNAAKVAAMKAAELVNRNIAAFGAGTGRLSTDQKKKLLWGNKKGNPSEETSKRWDLFSDRERQEKFNKLMSLRMPWWLWYVAGCEEQCPGSGKHGREQGRELSGRSQETGGARHQPGEALHSRPPQERWQDSRPWPLETLLADDAALKSSDSLLCTIYSIVFILALTNFPGWFMLTVLPGYLEAVKHLCLIDSCIALA

SEQ ID NO: 9934 - protein, 159 aa, Zea mays
  VARIANT 122: note = Ancestral polymorphism is T, Derived polymorphism is I
  VARIANT 22: note = Ancestral polymorphism is R, Derived polymorphism is C
MATATAAVAPPSTSTSSVLLRRRLPSPAPASASAAFPRLPGPPPPPPRRARLLLLQVALTSEVASDDVAAEEAAAAPKIGRRVRVTAPLRVHHVIKAPDLDVQGMEGVVKQYVGVWKGKRVTANLPFKVEVQLAVEGQPKPVRFFVHLREDEFEFVDGE

SEQ ID NO: 9935 - protein, 445 aa, Zea mays
  VARIANT 166..445: note = Derived polymorphism lacks residues 166 to 445
MEPVGGDGGGGRGRGRGRSWKGKGVSSGSAAGRQLAPVLEDAPAAALLRPLKKIRSPDRRLNRSLSSLSPAPPSPDSSSAFNPTPLPSARQIFLAPEASTAGSPRLLPLLQYSSEFQRPMTPPPPDQQQLQQMISFGSSQQPRQEFVAAAAATPLFPPQLVAPEVQQQMLLRYWSEALNLSPRGFRGGAVPLPPARLYQQLLLRASSGPPKLYRGVRQRHWGKWVAEIRLPRNRTRLWLGTFDTAEDAAMAYDREAFKLRGDNARLNFPDLFLGKGRVGGSGRTSAAASCSSSAPPTPDDSHMKQAAQQQQRVRDGEQPCSGEAKPLLPETETERADNSEPKPNPELQSADHQGDGTTAMFQPSGGVWGPADEAWFSAWGPGSSVWDYDMDNAHGLFLQSRFASEATSMDYVPSTPEVPAVGTAVASLSPPPPPPRSPTYMKEKD

SEQ ID NO: 9936 - protein, 207 aa, Zea mays
  VARIANT 183: note = Ancestral polymorphism is D, Derived polymorphism is E
  VARIANT 182: note = Ancestral polymorphism is Y, Derived polymorphism is F
  VARIANT 178: note = Ancestral polymorphism is Y, Derived polymorphism is C
  VARIANT 177: note = Ancestral polymorphism is S, Derived polymorphism is Y
  VARIANT 176: note = Ancestral polymorphism is R, Derived polymorphism is K
  VARIANT 171: note = Ancestral polymorphism is A, Derived polymorphism is T
  VARIANT 162: note = Ancestral polymorphism is G, Derived polymorphism is D
  VARIANT 157: note = Ancestral polymorphism is L, Derived polymorphism is H
  VARIANT 156..207: note = Derived polymorphism lacks residues 156 to 207
  VARIANT 155: note = Ancestral polymorphism is S, Derived polymorphism is L
  VARIANT 150: note = Ancestral polymorphism is V, Derived polymorphism is L
  VARIANT 109: note = Ancestral polymorphism is T, Derived polymorphism is S
  VARIANT 102: note = Ancestral polymorphism is P, Derived polymorphism is S
  VARIANT 89: note = Ancestral polymorphism is R, Derived polymorphism is S
  VARIANT 69: note = Ancestral polymorphism is L, Derived polymorphism is M
  VARIANT 67: note = Ancestral polymorphism is S, Derived polymorphism is T
  VARIANT 63: note = Ancestral polymorphism is D, Derived polymorphism is Y
  VARIANT 61: note = Ancestral polymorphism is D, Derived polymorphism is H
  VARIANT 52..207: note = Derived polymorphism lacks residues 52 to 207
  VARIANT 43: note = Ancestral polymorphism is C, Derived polymorphism is F
  VARIANT 35..207: note = Derived polymorphism lacks residues 35 to 207
  VARIANT 33: note = Ancestral polymorphism is R, Derived polymorphism is K
  VARIANT 22..207: note = Derived polymorphism lacks residues 22 to 207
  VARIANT 10: note = Ancestral polymorphism is G, Derived polymorphism is V
MAAAGECPYGCVFCWIIMDDMQNRQTVLFLLHKLQRLKNLLNCHLRKMKKVKNKHVYVGVDDDKSKTVMISMENRSNRSELLHSLAFARQERASYCALMWLPVDLIFLTWIISCNMTLQMNQRITLTKLVVPHVAAKVTLTKYEFNQKNVPNLQSQLENIVGENYFLNQSAKEAYRSCVLAYDSHSMKDIFNAHQLDLQVNVFQSFH

SEQ ID NO: 9937 - protein, 965 aa, Zea mays
  VARIANT 248..965: note = Derived polymorphism lacks residues 248 to 965
  VARIANT 236..965: note = Derived polymorphism lacks residues 236 to 965
MHGPRVAVVTGGNRGIGLEICRQLASNGVLVVLTARDEKKGSRAVEELQSAGLSDVVFHRLDVADRPSIAQLAEFVKRRFGKLDILGFSRSHVWVVQVNNAGVAGTTIDPERLKDLQKQDPKAGFRAIIFGWFLTFCQHTHTQKKKEQCLSSADKEDLKTFVDGYMGSLQQSYELAKDSLEINFNGTKHVTDCLIPLLLLSKSGRVVNVSSQVAQLKFMSNEGAIKVLSDIDNLSEAKLDEVMSAFMEDFKDGNLAARGWLPVVSAYAVSKALVNAHSRLLARRHPSLVVCCVTPGFVRTGMNYGMGLVSAEEGAAAPVALALRAEPADSGLNFELLDKKKNLTNFNASLKLRCVQNRKCSDGSTYNGQTFIQLLTDKDSSHGKYGRGTQPITLLFGASATNLRRRRGRPSPSIFEDAVELLGSCYWNLDDAISLYLSNAGGSTKPPSDSPADPIFAEEDMSTEEDKNKDHGDAIHGDREGDAGAPRYYGSRSTAVENPCVVGAPPSAVATGWGGADPDGVREGETEATGWGAEPGDIVATGWGEAESAREGEIGATGWGTEPDGARDDGSTADWQWQEDGEYNGEYYDNNTGYGDGSSNWQEHEHGEYNDDEHYDNTGYGDGSTTDWEEHGAYNDEDYDNTGYGEDEEVEAYYPPPYELRYVGYFHGAKVHAAREDRFLLVNLQTCSGAGELPSQMQNRDLWADETVRGVIQDSFVFSLEKGGMSRGSYSLPDECEKVAAFYRLEEDQLPALLVIDPITGQLLAKWSGAMMPDEFMLFVDEYIRSKPSTLSKPKIVRETAVLPASVGAGGEQEPARAPSAAAVEQEPAPPESPAPAADGAGEQEQEISKNDSAAAGGACSEQEHAPVPNATELPAELVDDDDDEPMEGEEMYKLRIRFPSGTVVAKEFGCKRRIASLFAFCRSALRGGGQHVEEKAIRIMRFAGPGYSWEAIQDKDDVYVTSKI

SEQ ID NO: 9938 - protein, 83 aa, Zea mays
  VARIANT 10: note = Ancestral polymorphism is M, Derived polymorphism is I
MRHAPSSPAMLLLLLLATFTYISCRAPKPDAATAARKHGGAVLWTVRPPPRTAPPDVGGDMGARAVQGESKRLVPQGPNPLHN

SEQ ID NO: 9939 - protein, 169 aa, Zea mays
  VARIANT 141: note = Ancestral polymorphism is V, Derived polymorphism is A
  VARIANT 89: note = Ancestral polymorphism is P, Derived polymorphism is Q
MVHGTLEVLLVGAKGLENTDYLCNMDPYAILKCRSQEQKSSIATGKGTTPEWNENFIFTVSDRTTDLVIKLMDSDTGTADDFVGEATIPLEAVYTERSIPPTLYNVVKGEKYCGEIKVGLTFTPEVVSRNLPLCLYLYMNVEIFNLILTLNPFVIYCLHPFSFGCHFGN

SEQ ID NO: 9940 - protein, 173 aa, Zea mays
  VARIANT 3: note = Ancestral polymorphism is S, Derived polymorphism is F
  VARIANT 4: note = Ancestral polymorphism is R, Derived polymorphism is L
  VARIANT 108: note = Ancestral polymorphism is L, Derived polymorphism is V
MAFRLAVAVSVAAPASWPSPVATVAPPRLALRRGLPPTWRAVRALPRSRGAVVVCQAQGGQDTAIQVPDVSKSTWQSLVVESELPVLVEFWASWCGPCKMIDPIVGKLSKEYEGKLKCYKLNTDENPDIATQFGIRSIPTMMIFKNGEKKDSVIGAVPESTLVTCIDKYVGGR

SEQ ID NO: 9941 - protein, 277 aa, Zea mays
  VARIANT 52: note = Ancestral polymorphism is E, Derived polymorphism is D
MASSSTTNTSDGGAKSSSCPRGHWRPGEDEKLKQLVEKYGPQNWNSIAEKLEGRSGKSCRLRWFNQLDPRINKRPFTEEEEERLLNAHRAHGNKWALIARHFPGRTDNAVKNHWHVVMARRSRERSRLLARAASSSSSPSTGGYLFGAVTPATSSLCFGFSKLGGAGSASGSGGLFRSPVPAPPTSLFKNFGTATASKGLLGSSFEASGRYSYSGKQPTAPLSITFSSPREALGMDIGHHGRHEHHQKDYHASDSADEPLKKKDVPFFDFLGVGVSS

SEQ ID NO: 9942 - protein, 229 aa, Zea mays
  VARIANT 110: note = Ancestral polymorphism is S, Derived polymorphism is R
  VARIANT 145: note = Ancestral polymorphism is R, Derived polymorphism is M
MEGDKGNRYGKQVAVVTGGNRGIGLEICRQLASSGVTVVLTARDAERGAGAASTLGQQPNVVFHQLDVGDPSSAARLAGFIEEKFGRLDILIGMPWTFDLPFFVLQHMRSSIIHINNAGITGTASNVDDPEAFRLELAGMDLMQRIEAINRHSTEPYEQAEKCLNTNYHGIKAVTKALLPLLQSSSHGRIVNLSSYYGLLRLLDRVFNTLHENPYLVDNWRGTVITTSS

SEQ ID NO: 9943 - protein, 57 aa, Zea mays
  VARIANT 7: note = Ancestral polymorphism is T, Derived polymorphism is M
  VARIANT 23..57: note = Derived polymorphism lacks residues 23 to 57
  VARIANT 25: note = Ancestral polymorphism is K, Derived polymorphism is R
  VARIANT 27: note = Ancestral polymorphism is Q, Derived polymorphism is H
  VARIANT 46: note = Ancestral polymorphism is D, Derived polymorphism is Y
  VARIANT 47: note = Ancestral polymorphism is T, Derived polymorphism is I
  VARIANT 53: note = Ancestral polymorphism is G, Derived polymorphism is R
MLFNFLTLIYIGVMLSLLVPPLYEKYQDEIDQKVGVAHSVLSRHIDTIITRTRQSTK

SEQ ID NO: 9944 - protein, 189 aa, Zea mays
  VARIANT 95..189: note = Derived polymorphism lacks residues 95 to 189
MEGDTGNRSEKEVAVVTGGNRGIGLEICRQLASGGVTVVLTARDAERGAEAASKLGLPNVVFHQLDVGDPSSAARLAGFIEEKFGRLDILVNNAGITGTTSNVDDPEAFRQELAGMDLMQRIEAINRHSTESYEQAEKCLRTNYHGIKAVTKALLPLLQSSSHGRIVNLSSYYGLLRVKMAIQCCNIDI

SEQ ID NO: 9945 - protein, 255 aa, Zea mays
  VARIANT 106: note = Ancestral polymorphism is M, Derived polymorphism is I
  VARIANT 92: note = Ancestral polymorphism is A, Derived polymorphism is E
  VARIANT 83: note = Ancestral polymorphism is L, Derived polymorphism is I
  VARIANT 44: note = Ancestral polymorphism is A, Derived polymorphism is G
  VARIANT 34: note = Ancestral polymorphism is G, Derived polymorphism is S
  VARIANT 1: note = Ancestral polymorphism is V, Derived polymorphism is M
MLPLLQDFYLDLAEDNRKITPRDYLELALRPVQGGGRDISAKNAIRDSIHALFSNRECFTLVQPVNNEKDLQRLDQLPVRFKLFLSSFAQIAKYPHTYCCIYFLTMYSELLIGLDYFKKFGNFLEGSGLRLLLKHIYTLYSLMACTNYLSNFHPEFRSGLDGFTKFVLDRTRPKQLEASTMTGLILAGLTQSFLDAINNGVVPTISSSCPVLDLFRRQLEHIDTERNALRLKCNSSDDKLALLRKHLEASESHRA

SEQ ID NO: 9946 - protein, 397 aa, Zea mays
  VARIANT 360..397: note = Derived polymorphism lacks residues 360 to 397
  VARIANT 330..397: note = Derived polymorphism lacks residues 330 to 397
  VARIANT 218..397: note = Derived polymorphism lacks residues 218 to 397
  VARIANT 211: note = Ancestral polymorphism is S, Derived polymorphism is I
  VARIANT 164..397: note = Derived polymorphism lacks residues 164 to 397
  VARIANT 144..397: note = Derived polymorphism lacks residues 144 to 397
  VARIANT 73..397: note = Derived polymorphism lacks residues 73 to 397
  VARIANT 66..397: note = Derived polymorphism lacks residues 66 to 397
MCSLAAIRGMSHPHRALAEHHDARSRASTTTTSSSSSSARRDDDPDPPPRSLRDPPYTLGPKIFDWDEQRAAWHRRHSETPPFLNDIKPRVLLVTGSSPKPCENPVGDHYLLKSIKNKMDYCRVHGIEVFYNMALLDAEMAGFWAKLPLMRALLLAHPEVEFLWWMDSDAMFTDMAFELPWERYGPYSLIMHGWDEMVYDDKNWIGLNTGSFLLRNCQWSLDMLDTWAPMGPKGPVRIEAGKVLTKSLKDRPVFGADNQSAMVYILATQREKWGDKVYLENGYYLHGYWGILVDRYEEMLENYKPGLGDHRWPLVTHFVGCKPCGKFGDYPVKRCLKNMDRAFNFGDNQILQMYGLTHKSLASRRVKRIRNETSNPLETKDELGLLHPAFKAVKTST

SEQ ID NO: 9947 - protein, 232 aa, Zea mays
  VARIANT 163..232: note = Derived polymorphism lacks residues 163 to 232
  VARIANT 152: note = Ancestral polymorphism is P, Derived polymorphism is S
  VARIANT 150: note = Ancestral polymorphism is G, Derived polymorphism is R
  VARIANT 146: note = Ancestral polymorphism is E, Derived polymorphism is D
  VARIANT 126: note = Ancestral polymorphism is V, Derived polymorphism is F
  VARIANT 113: note = Ancestral polymorphism is D, Derived polymorphism is H
  VARIANT 102: note = Ancestral polymorphism is V, Derived polymorphism is E
  VARIANT 101: note = Ancestral polymorphism is G, Derived polymorphism is R
  VARIANT 94: note = Ancestral polymorphism is R, Derived polymorphism is S
  VARIANT 92: note = Ancestral polymorphism is A, Derived polymorphism is T
  VARIANT 89: note = Ancestral polymorphism is E, Derived polymorphism is K
  VARIANT 66: note = Ancestral polymorphism is A, Derived polymorphism is S
  VARIANT 55: note = Ancestral polymorphism is P, Derived polymorphism is S
  VARIANT 45: note = Ancestral polymorphism is H, Derived polymorphism is Q
  VARIANT 44: note = Ancestral polymorphism is R, Derived polymorphism is L
  VARIANT 27: note = Ancestral polymorphism is G, Derived polymorphism is R
MVRCAVAAAHEQLPPARKDGSGDNEVGVGLVLNFSSTHAVPSARHLATVFSRFGPVKEVRADNSTALVVFDNASCLLYKVQYIGKSKAEVAAKRVMEWVNGVNIVPHFCRIGDKEIEFYSQFHIVVRGLDSIAHCIEYAHLIKWDEVHPGKPFDGDDAEHMQWIYSKIGNDASQFVGPLVLNLLIKFMDNYGKGRSSVMKTTRLLLDKDGWRGFYRGFGPSFLNMSVSRLTK

SEQ ID NO: 9948 - protein, 278 aa, Zea mays
  VARIANT 27: note = Ancestral polymorphism is R, Derived polymorphism is H
MGCKACDKPKPSYRKGLWSPEEDQKLRDYILLHGHGCWSALPAKAGLQRNGKSCRLRWINYLRPGLKHGTFSPEEEETVMSLHATLGNKWSRIAKHLPGRTDNEVKNHWNSYLKKRVEGPSTPPSNSDDSHCAKPGRGGSTARETGDDRPADYSGSSELREPSSSSSPDTSCLTGPPKVMFVDWLDMDCMGGGGGPPGAAAAAAAPGLGAAAGVTSTGDDQVTMDGSASGRADVSLHGTFGDSGGAGCWEFHESFDQMQAAGFCDLLSSIGEYYFGLD

SEQ ID NO: 9949 - protein, 29 aa, Zea mays
  VARIANT 22: note = Ancestral polymorphism is A, Derived polymorphism is S
  VARIANT 7: note = Ancestral polymorphism is T, Derived polymorphism is S
  VARIANT 3: note = Ancestral polymorphism is G, Derived polymorphism is S
MKSFAITGPIGKECADLWPRIANATNTIV

SEQ ID NO: 9950 - protein, 225 aa, Zea mays
  VARIANT 15..225: note = Derived polymorphism lacks residues 15 to 225
MSTESGELLGIDPVELRFPFELNKQISCTLQLTNKTDKQVAFKVKTTSPKKYCVRPNNGMVAPRSKADVVVTMQAQRDVPPDMQCKDKFLVQSATVAKEVVPKEVTGDMFTKDSGNVVEEVKLKVVYVAPSSSQSERFEDGNLGSLSYQEETKEPKESEKIITEPFALISKLMEEKNSAIELNNKVRQELDFLRRDISRRHGGFSLVLVLVVAILGILLGFLMKR

SEQ ID NO: 9951 - protein, 384 aa, Zea mays
  VARIANT 42: note = Ancestral polymorphism is P, Derived polymorphism is T
  VARIANT 60: note = Ancestral polymorphism is S, Derived polymorphism is F
  VARIANT 84: note = Ancestral polymorphism is H, Derived polymorphism is P
  VARIANT 93: note = Ancestral polymorphism is Y, Derived polymorphism is H
  VARIANT 104: note = Ancestral polymorphism is K, Derived polymorphism is N
  VARIANT 116..384: note = Derived polymorphism lacks residues 116 to 384
  VARIANT 118: note = Ancestral polymorphism is A, Derived polymorphism is V
  VARIANT 122: note = Ancestral polymorphism is I, Derived polymorphism is V
  VARIANT 132..384: note = Derived polymorphism lacks residues 132 to 384
  VARIANT 155: note = Ancestral polymorphism is T, Derived polymorphism is P
  VARIANT 181: note = Ancestral polymorphism is T, Derived polymorphism is I
  VARIANT 194: note = Ancestral polymorphism is C, Derived polymorphism is Y
  VARIANT 203: note = Ancestral polymorphism is R, Derived polymorphism is W
  VARIANT 206: note = Ancestral polymorphism is R, Derived polymorphism is C
  VARIANT 275..384: note = Derived polymorphism lacks residues 275 to 384
  VARIANT 359..384: note = Derived polymorphism lacks residues 359 to 384
  VARIANT 370..384: note = Derived polymorphism lacks residues 370 to 384
MCQVSGMDFVLEPVLSPCYARPELVERALKGRYQDAMNILGPQGRELNLLIVILPDNNGSLYGDVKRICETNLGLVSQCCLTKHVFKVNKQQYLANVALKINVKVVASQDWPEVTKYVGLVIAQAHRQELIQDLFKVWQDPKRGTVSGGMIRYITFVGCAGSFSYLSGGQLDRNQRGSYSTGMASVRDNSTKFCCMNLMPLERPMRHWSLTTSLQLLLSWSRSVITPGCLLIITMIIVLSIKAGTYCLAPWWTRRSAIQLSLISTCAAMLAFREQAALPITMFCGMRTTLRLMGYKLSPTTCVTRNVLLLPSIAFVLLIDFKAEDEPFSGMLGAHAQYRLGWVAYIKKQRSCPCVAVNSHSRESIKEVGQVAASSAVSGGFAIV

SEQ ID NO: 9952 - protein, 366 aa, Zea mays
  VARIANT 162: note = Ancestral polymorphism is R, Derived polymorphism is G
  VARIANT 175: note = Ancestral polymorphism is S, Derived polymorphism is I
  VARIANT 178: note = Ancestral polymorphism is I, Derived polymorphism is N
  VARIANT 205: note = Ancestral polymorphism is S, Derived polymorphism is F
  VARIANT 206: note = Ancestral polymorphism is V, Derived polymorphism is I
  VARIANT 210: note = Ancestral polymorphism is C, Derived polymorphism is Y
  VARIANT 216: note = Ancestral polymorphism is H, Derived polymorphism is P
  VARIANT 217..366: note = Derived polymorphism lacks residues 217 to 366
  VARIANT 225..366: note = Derived polymorphism lacks residues 225 to 366
  VARIANT 237: note = Ancestral polymorphism is Y, Derived polymorphism is N
  VARIANT 259: note = Ancestral polymorphism is S, Derived polymorphism is F
  VARIANT 307..366: note = Derived polymorphism lacks residues 307 to 366
MDRFLTSNPRTSTNTYELTIVVVEEQPNINLEDQGLPSDENVDINMDDNNVSGHEPIFNSSPTENANVDEQSDFIEDICDPRNWNNLDNKSRDILVEKGAIREENIVFPLDDNGRHFSYKHYFIKLRNGEVHDRKWLVYSKHVDRVFCFCCKIFNSEKYHLRRIKNNEVHYHYLSHKIQNELVYLLASDITKSIIKTVKEAKYFSVILDCTPDVSHQEQMSLLVRCVNMSCGKVEEYFLGFIKVDDTSGEGLFNSLIDFIKYFGLNIEDVRGQGYDNGSNMKGKNKGLSKDKDVEAKDMSDAKNLFEVLGTFEFILVKRRATRKKHYDETSNEEENLEAQKAFEVNYFLVMVDIATSSLKSRFEEL

SEQ ID NO: 9953 - protein, 175 aa, Zea mays
  VARIANT 57: note = Ancestral polymorphism is D, Derived polymorphism is H
MLLRVVTRDPLIERMDTFSHVPPGFRFHPTDEELVDYYLRNKVASNKIDLDVIKDVDLYKIEPWDLQEKCKIGTEEQNEWYFFSHKDKKYPTGTRTNRATTAGFWKATGRDKPIYTKSCLVGMRKTLVFYRGRAPNGHKSDWIMHEYRLETTENVTAAPVRKPAALPDPIRTIPS

SEQ ID NO: 9954 - protein, 199 aa, Zea mays
  VARIANT 6: note = Ancestral polymorphism is H, Derived polymorphism is Y
  VARIANT 20: note = Ancestral polymorphism is R, Derived polymorphism is C
  VARIANT 29: note = Ancestral polymorphism is R, Derived polymorphism is G
  VARIANT 101: note = Ancestral polymorphism is G, Derived polymorphism is E
  VARIANT 155..199: note = Derived polymorphism lacks residues 155 to 199
MPRRRHGGFRLGWKLLGVWCWAALCRRRRRGRGYLRLHPRQQGGGSDRSPPLQAGVAAVCATKQKKQQQQQRDDSADSPRMLTWGRSLARRMSLLRRRAGEKGRLLDDEDAAEATTPKGQVAVYVGGAEPGAESMRYVVPVVYFNHPLFGELLREAEEEFGFQHPGGITIPCAASRFERAAAVAAAGGGAGKKVPAGWW

SEQ ID NO: 9955 - protein, 278 aa, Zea mays
  VARIANT 21: note = Ancestral polymorphism is P, Derived polymorphism is R
MHLLISGLVAAALFLHVDAARGTFVYAGCSPSRYAPNTAFESNLNSLLSSMAPTASSGATYSTFTAPGAGLAEAESPAAYGLYQCRGGLRPGECVACVRDTVARIGAVCAGAAAASLQSDGCYVRYGGASAAYHSCGAGTSGDPWFLRSRDAVLSELQGVDATAASGSGSGGYKVSASGPVRGAAQCLGGIAAGDCAACLAQAAAQLRGTCGAALAADVYLVQCSVRYWTDGANQLRSSQDNPEDDAGRTLAIAIGISAGVAALVVFISFLRKACEAH

SEQ ID NO: 9956 - protein, 536 aa, Zea mays
  VARIANT 167: note = Ancestral polymorphism is G, Derived polymorphism is C
MASLSDSAGAGGGRAGAELMVPQFLLKALHAILAVRSPRPHAPPAPAASASAFRRRDRWFHLPIHAPPPPPAAEHLPDPSPGEPLVVDVYLAPSGGGPEEVLERWTVACEPWPSPAAAAAVGEGLAVNRAYKRCITLLRSLYAALRFLPAYRAFRRLCASGQVYNYCMGHRVGSFAAPFSRAEEAAMRTKRLAPVETQLGRLVVSVQYLPSLAAFNFEVTSLASAAIITDYVGSPAAEPMRAFPPSLTEATGSPFPQPSRRPNSWASPAPWPHTLGQPAKFSPPPAHYASPTPSPPTFGYLHSRFSGETAPMTIPQAGGGRGTVHHRNMSEPSRAFMFPPPSPKNVRGEAGMQESPTEINRSFKRADGIRMGDLYSNLPSGSKIKDTKDESGRFSGVFSSSGSPRHGFSRSSSRLSMQDDTDDADFPFAVDDVYPDSRPGSSSGKDTGDQAGSSSHKSQDAAVGYLVHLLKSARPLRDSTYSSHTSRGESTEAGSTSSFLSRRTSDALEEFESFKETRENLLARSRSRLQDSLDKP

SEQ ID NO: 9957 - protein, 89 aa, Zea mays
  VARIANT 6: note = Ancestral polymorphism is G, Derived polymorphism is D
  VARIANT 19..89: note = Derived polymorphism lacks residues 19 to 89
MMALNGGWRKTFVSILTTCFLVVVVIVSLSCEAKGGVVPRLRPPFCFPYDREYCTPFHCGKVCQEYNFPAKNGGYCDKRGDPWKCCCPY

SEQ ID NO: 9958 - protein, 121 aa, Zea mays
  VARIANT 1: note = Ancestral polymorphism is M, Derived polymorphism is V
  VARIANT 20: note = Ancestral polymorphism is A, Derived polymorphism is V
  VARIANT 30: note = Ancestral polymorphism is K, Derived polymorphism is N
  VARIANT 44: note = Ancestral polymorphism is R, Derived polymorphism is W
MPSSCIRGPSSRHECEGLFAIETSVFKKENVSLAGHEEKLARHRQHLSPLLSQTATVSRRTVAAHLADVSGSSSASNATIALLLQSSLTRMISTDFRNECGHLRSHQLLRITSLMVFHRVT

SEQ ID NO: 9959 - protein, 151 aa, Zea mays
  VARIANT 5: note = Ancestral polymorphism is L, Derived polymorphism is P
  VARIANT 14: note = Ancestral polymorphism is C, Derived polymorphism is Y
  VARIANT 17: note = Ancestral polymorphism is V, Derived polymorphism is M
  VARIANT 45..151: note = Derived polymorphism lacks residues 45 to 151
  VARIANT 50: note = Ancestral polymorphism is C, Derived polymorphism is Y
  VARIANT 51: note = Ancestral polymorphism is P, Derived polymorphism is L
  VARIANT 55: note = Ancestral polymorphism is T, Derived polymorphism is N
  VARIANT 69..151: note = Derived polymorphism lacks residues 69 to 151
  VARIANT 86..151: note = Derived polymorphism lacks residues 86 to 151
MNIMLFHLAYLQRCGSVTVAVYRDEDKPALITYRDVALNYMSCFQGFFFYPEVATLLLHNFCVYHINPQGHEISDPGSIPVTRVLQMVAAPMSLDVLVPSVADLADQVAGVLDFFGSRRGASSCGASRWPAHLGLDSIGHEWVIDLGTRRS

SEQ ID NO: 9960 - protein, 96 aa, Zea mays
  VARIANT 1: note = Ancestral polymorphism is M, Derived polymorphism is V
  VARIANT 21: note = Ancestral polymorphism is L, Derived polymorphism is H
  VARIANT 29..96: note = Derived polymorphism lacks residues 29 to 96
  VARIANT 36: note = Ancestral polymorphism is S, Derived polymorphism is F
  VARIANT 39: note = Ancestral polymorphism is R, Derived polymorphism is H
  VARIANT 63: note = Ancestral polymorphism is P, Derived polymorphism is L
  VARIANT 66: note = Ancestral polymorphism is A, Derived polymorphism is T
MVAHANNLSTMTAPANQQPLHIVSTTKLQNLMQYQSVQHVNPTVPTDLDVGTMVTFPVFCQCLATTDNAAALVSYVMQPGDTYTSIAAAFFVAYPQ

SEQ ID NO: 9961 - protein, 549 aa, Zea mays
  VARIANT 3: note = Ancestral polymorphism is P, Derived polymorphism is Q
MEPRSRRLEQLVFLLCFIAAITCRLHAQAQAQTTLQRPKSSAHNGAARRDLSEMGNGSESVLSRRTRRVDPLDGLRKYEGGYNITDRHYWSSAIFTGRFGYLMSGLWITGGIVFAAVLLVSKIFFPRKKERYTDLDYFLERYQVLTVVLCVLLTALVMVSSAAALRGTVQFHSAAESVKEKIGTTALEATAAIYNVTGAIERMQNTSKLYNYTSQAWGHLNSTVEALDSEAVEIEAKAETNMRLVSEGIRALELVTISCVTLNLVALLVLLVGRPLRLQKLCCLCMAFCWILTALFWMYFGLYYFFDKFAGDTCVALDEYQLNPQNSTLAAIIPCSRKLSADVILHDVGAGIHDIIDQVNSNIYTIKSEYPVKQLDYICNPFTGPPQYQYRPENCPSGAATIGDIPQILKRLTCSDFGGGANCRPADLSSAIDYDKVQSYTSSIQNVLDIFPGTERLVSCELVKAGFADIVDNQCAPLRRGARGAWAALAALSASMVLLILLVLVATNARHPGDDRLSVRHLTSSTNSEISEAEFAEMHAKKVRVRVGP

SEQ ID NO: 9962 - protein, 190 aa, Zea mays
  VARIANT 66: note = Ancestral polymorphism is P, Derived polymorphism is L
  VARIANT 42: note = Ancestral polymorphism is N, Derived polymorphism is T
  VARIANT 39: note = Ancestral polymorphism is R, Derived polymorphism is C
MQNYSILSEVDIKRRQEDDINRVSTVLSISKPEACVLLRNYNWSVSKVHDEWFADEERVRKVVGLPEKHIEMTNDRENMHQGYPKETLVRFLKAREWNVAKAHKMIVECLNWRIQNEIDSVLERPIAPVDLYRSICDSQLIGLSGYTKEFSIGKLICRMKIALKRVSQFLALVLGIAHMTKLRLQLQPKS

SEQ ID NO: 9963 - protein, 220 aa, Zea mays
  VARIANT 147: note = Ancestral polymorphism is A, Derived polymorphism is T
  VARIANT 48..220: note = Derived polymorphism lacks residues 48 to 220
  VARIANT 44: note = Ancestral polymorphism is G, Derived polymorphism is R
  VARIANT 35: note = Ancestral polymorphism is T, Derived polymorphism is K
MKPMSCHEQEQHAELAAATTNSGFDWLEDSVSFLTADVDAAGCRGYGWCPPLAHTSPSIASPAVSEPLSKKRKSPAHRASAHSGSNQRRRADQADRPGAGGGKKGGGAGSDRDTRWAEQLLNPCTTAVEAGNLTRVQHLFYVLGELTSFSGDANHRLAAHGLRALARSRLPAAVGPAAATAVRVPPCDCPTPAFAGTEPRLFRASLISVSLYVEVYSKIR

SEQ ID NO: 9964 - protein, 69 aa, Zea mays
  VARIANT 21: note = Ancestral polymorphism is P, Derived polymorphism is L
  VARIANT 53..69: note = Derived polymorphism lacks residues 53 to 69
MVVNKEVVSHEYEDFKQMLTPLWFDLSGRGGCSSSSSFEHVFIGEIKEQRQGESEVSGYLNLNWIQASS

SEQ ID NO: 9965 - protein, 1337 aa, Zea mays
  VARIANT 408..1337: note = Derived polymorphism lacks residues 408 to 1337
MTRVIILLDSDKEDDGTGRQAGRELGGAAIASAGEASKLVKPEVVDDVGSNPVRPGALPTSLRVQGHRAPSSPSPVPAAVRKQPEIIAISDEDNDGSRFRRVRRVKDEASDWVLSAKAKRAMVSGVPPGSSDVKRKRKRGSSGAGDFHALDRNLSASGAGRRTSWMAEDAGSSRNVSSSELSRGGVGDRSGSTKKARGAPGKTRRGGGTRRERSTSAAPANLVGGSATVGSRIRLRSRQQGRVQCATYSARVSSEDTGEDEKHMQEQTRVEDVEFMEVDDDYDDVNVAGNVIDQESEQDEALEGRSSQDSHGYSEDKEGKDSAALSDNEEDVGGKELLEEEEEGADQEESHIIYDGEGEQEEDASEEETQELDETGEAQPFNPSNTMAGSTMRSGGDGKQVFRRRVFEGIYLPENPHRTVGKGIQGRTRSQRKCKDKKLLKRGTFSKPYNIDIPDSTSDSEEEIEPPAPQQGLLSSSEEDNMTFGKRKRRRAAINKRWDKRLSASSDEEDYGASAMDAKERPFRRLKKGLSNLQAAKEGCRNYEGSNPGHARYSGPNGGNLENMSSAQDDISFKRNVHMIRIKKRGRAAKAVYDELLDSLFSGWENHIGNPVHAEAGNSLPLVFSFGDEDAEENTENDKYQEQEDLWMECGIAFQSMNIGSNGCEEDGKEIPPVKVTSCNIGQHEFIIDEQIGVRCKHCHVVDLEIRDVLPTLGKCSAERGSAINPEFDRMLKEMLNVFEQNDVLVSNGHELPCNFGDHKAGSVWNLIPGVKETMFPHQQDAFEFMWTKLAGGTTIEQLKHTIKSDAGGGCVISHAPGTGKTRLAITFVQSYLEVFPHCSPVIIAPRGMLATWEKEFRKWKVKLPFHVLNSTEINWSEDKTLQEQAAKNGTFHRRLLTDKMDQNYRRLVKLGSWMNGTSIIGLSYSLFRKLANHEGMDGDKVRKLLLEKPNLLVLDEGHTPRNKKSLIWKVLKRVHTEKRIILSGTLFQNNFEELYNTLRLVRPKDADALHLETDESKDFWSSLRLNDITKANINEVRKKLDPIVHIHSGRFLQKSLPGLRESVVILNPLLYQKEVIASMEKTVAMGLDAEYKISLASIHPSLLASAKLSMKEESILDKPKLESLRSNPSGGVKTRFVLEIVRLCEALNERVLVFSQYLEPLSLIMEQLKERFSWAEGEEILLMSGKVLVKKRQTMMEVFNNMKSKAKVMLASTKACCEGITLVGASRVVLLDVVWNPSVGRQAIGRAYRIGQRKIVYTYNLIAEGTTEKRKYDRQAKKEHMSKLLFSNELERGGCNLPPELTFNDRVLEELTAREDLKNLFVKIYVDNQTDGSRGK

SEQ ID NO: 9966 - protein, 182 aa, Zea mays
  VARIANT 127..182: note = Derived polymorphism lacks residues 127 to 182
MSRIQMQRCPCITRSAEAGIGSSVGLCISRSSPSKAKIRTKKNKQNKIGDLLLLSGGNKVIGSILPASVLTAFRRGSLVSSSQQYVPPSDGEKKQTGISCREKIFRIANKQRKIRWLSSAGKSAYRSISCRERPVIWSVELEFYRVVTAISLDTKNCLRRTERTMHPPLSGCVLSLEPADLA

SEQ ID NO: 9967 - protein, 315 aa, Zea mays
  VARIANT 181: note = Ancestral polymorphism is P, Derived polymorphism is R
MAPPRRALLVLAALLLSLSLGAASFHSDELLLNDDEEFEGVVARPSAPSPPAAPVVSSSRRRSADAPLPGSGESNAVQFTLEHDLGDGKGFVSAGTFSARLKTFAHGTQTLTKLRFTRNDFTEDDKAAFKKVLQEDGFYTIRLPSNVLDTTKKHHVVSSIRARCIPRDSLDEHIVIHMKFPWCCDSRDTLLLPYLQDGVNILAVNYGSVDGCQYPRPMKLPSKWTFSSYTILKTAEQAPRTPSFADQLIEADNGLGEVMKPPEKSFWAKYWMYIIPLGLIVMNAVTAAANIPEEAAGQGQPGAQRAPAAVAGRRR

SEQ ID NO: 9968 - protein, 302 aa, Zea mays
  VARIANT 68: note = Ancestral polymorphism is E, Derived polymorphism is D
  VARIANT 60: note = Ancestral polymorphism is G, Derived polymorphism is R
  VARIANT 15: note = Ancestral polymorphism is L, Derived polymorphism is P
MSLEPRKARQTAKPLSFLLGLWLPPLPTSPPNRCLFVSFFFYFASSQFLEGKAAAMGGSGTLISVYPDELTFLFELEKPCYCNLKVVNNSEHHVAFKVKTTSPRKYFVRPNASIVQPWDSCTITMFVRLHAFLSGGTVTLQAQKEYPPDMQCKDKFLIQSTKVAASTDMDEIPPDTFNKETDKVIEEMKLRVVYTLPSGGGSDDSSVSSLGSRSFKAASDDLMMLKNASIEEIQTIQRVKEERDNMLQQNQQMQRELDVLRRRRSRKGDAGFSLTFAAFAGLIGVLVGLLMSLIFSSPPVDA

SEQ ID NO: 9969 - protein, 450 aa, Zea mays
  VARIANT 88: note = Ancestral polymorphism is L, Derived polymorphism is S
MASQPPPEPAPAEAGLESMEGLVLDTVISRAGARPAAALACASTRLRTAVADDSLWRRFCGEDLGLDAPVDPEGRPLPSFQVAYKVWSESFGMYPLPMVKRVRQFWTSMKTWLSENFPEAYKTLCEGVSEAQLKSAEDDLGFKLPMPTKLLYRFCNAQLPFSEDHDTNKSISTYGLIGGYAFYDHWVNVHLSPLEQIVEETKDFYREFPDVFHGRKFIVVATSWFHPKTFLLDCSNGELYVGTYNLPIGGMLPCVPKALIKPAGNDLAQDGLLLWLEEHLRRLQSGMIKTRMLMASRYISLYPEAPPSCSSAVTNGIKVVRSSAVFVPEHPGRPGEKFMFTYSIRMSVPEACMLGGVYYSSCQLCSRHWTIRSCDRVVSDVSGGGVIGEYPLLLPGEDEFVYESCTPLPQVPGSVEGSFSFVPGKLSRPEGKPFEVMVAPFPLDVPEYIF

SEQ ID NO: 9970 - protein, 169 aa, Zea mays
  VARIANT 9: note = Ancestral polymorphism is R, Derived polymorphism is C
  VARIANT 12: note = Ancestral polymorphism is P, Derived polymorphism is H
  VARIANT 13: note = Ancestral polymorphism is G, Derived polymorphism is D
  VARIANT 25: note = Ancestral polymorphism is P, Derived polymorphism is L
  VARIANT 26: note = Ancestral polymorphism is I, Derived polymorphism is N
  VARIANT 54: note = Ancestral polymorphism is V, Derived polymorphism is L
  VARIANT 69: note = Ancestral polymorphism is S, Derived polymorphism is L
  VARIANT 87: note = Ancestral polymorphism is L, Derived polymorphism is H
  VARIANT 112: note = Ancestral polymorphism is A, Derived polymorphism is T
  VARIANT 128: note = Ancestral polymorphism is L, Derived polymorphism is Q
MEDRQAMVRLRPDQGRVLVLIFSIPNYEQLFAGVTYPAPPSSWEVQCKKSTVFVIADMFISVSPMELYSKALKSMSSPVVLIVVGLHHEHHIIVKAVNTATKGFAASGEWLADDNINRNHLDLFWFWLLAVPSIFILGKLIQVQASSGLQEKTLSNSKCDPDHSCGYLI

SEQ ID NO: 9971 - protein, 65 aa, Zea mays
  VARIANT 56: note = Ancestral polymorphism is R, Derived polymorphism is Q
  VARIANT 52: note = Ancestral polymorphism is R, Derived polymorphism is Q
  VARIANT 49: note = Ancestral polymorphism is R, Derived polymorphism is W
  VARIANT 45: note = Ancestral polymorphism is R, Derived polymorphism is Q
  VARIANT 28: note = Ancestral polymorphism is A, Derived polymorphism is T
  VARIANT 23: note = Ancestral polymorphism is N, Derived polymorphism is I
  VARIANT 16: note = Ancestral polymorphism is D, Derived polymorphism is N
  VARIANT 13: note = Ancestral polymorphism is D, Derived polymorphism is N
  VARIANT 10: note = Ancestral polymorphism is S, Derived polymorphism is G
  VARIANT 8: note = Ancestral polymorphism is K, Derived polymorphism is N
MGMEWKQKVSLFDVVDETSVSTNLGRAASNGVAATATGGNSYVSRWNGWPTRMALRDPREASCVP

SEQ ID NO: 9972 - protein, 195 aa, Zea mays
  VARIANT 30: note = Ancestral polymorphism is S, Derived polymorphism is W
MAAITAGLLVLLAAAVAAPAHATDYTVGDSSGWSSGVDYATWASGKTFAAGDNLVFQYSAMHTVVEVSSADYGACSASNSIQSYSDQNTKIALTAPGTRYFICGTPGHCGNGMKLAVTVAAGTATTTPASSPPAADSPPETATPSGSTPTATTSPSAPTTKPTSSSTGAACGGEARLAMGVLAWAAGLAGLALMG

SEQ ID NO: 9973 - protein, 377 aa, Zea mays
  VARIANT 154: note = Ancestral polymorphism is A, Derived polymorphism is V
  VARIANT 134: note = Ancestral polymorphism is R, Derived polymorphism is C
  VARIANT 121: note = Ancestral polymorphism is D, Derived polymorphism is Y
MAAAAPACHVHIEALQTALPTRAVEPGRARPVAVAAPALVAGAALQRRARVVLYYRAAADASAPWSPEEALLAKESLSEAVADHPEMAGRLRRRADGLWEVKLNDTGVRLVLATVEAAVDDFVGAGVSEQDRKRREAALAPWTDVDADDPDMCALCFVQLTRFQGDGGYAVGVSCSLMLCDPLSLARFLLSWARTHAAIKARNKAATIPMMRYAGYFQRPNTMTRRIKSVPLDAFAADGVGTDTDTVLFRASGAPDHRALAGACVGEARDRLGAAEVPRFTLLVVARDGVGDNPRAMTVETYAADSLLVPGGSTGDKPEVAQWQDLGLEEFALRESKPVHVSCSIVTSGDEGLVIVMPDGKGFLVTVTVRLSEFVKI

SEQ ID NO: 9974 - protein, 177 aa, Zea mays
  VARIANT 137..177: note = Derived polymorphism lacks residues 137 to 177
  VARIANT 138..177: note = Derived polymorphism lacks residues 138 to 177
  VARIANT 146..177: note = Ancestral polymorphism lacks residues 146 to 177
MAVAACTDAVGADAARTGAWCGFWEAAVGAPVGEDAGRGWSAYDYGWVHGKRRGCEISEALGSVANSTVMEAWRKRRGEGDCEEAMGGAAKWGGSGILLDKSASGQSLADIYYRGAHGIIIVYGMKDQKRVNNVKQWLNEIGRCMSQVNKLLVGNKNDLAANKVVATETTNVSYPFS

SEQ ID NO: 9975 - protein, 272 aa, Zea mays
  VARIANT 78: note = Ancestral polymorphism is F, Derived polymorphism is S
  VARIANT 118: note = Ancestral polymorphism is T, Derived polymorphism is I
MDTKPFLLCLLRFSCAGGAVACLPAWTVLREETLPCLRRTEANAGPTATKASARARTAMTHAGRARGFRSAALDDYLFKLLLIGDSGVGKSCLLLRFADDSYLDSYISTIGVDFKIRTVEQDGKTIKLQIWDTAGQERFRTITSSYYRGAHGIIIVYDVTDQESFNNVKQWLNEIDRYASDNVNKLLVGNKSDLTANKVVATETAKAFADEMGIPFMETSAKNAINVEQAFMAMAASIKDRMASQPAAANARPATVQIRGQPVNQKTSCCSS

SEQ ID NO: 9976 - protein, 548 aa, Zea mays
  VARIANT 418..548: note = Derived polymorphism lacks residues 418 to 548
  VARIANT 31: note = Ancestral polymorphism is R, Derived polymorphism is C
MGAASSREGDAAREHTRRCRERRRLMREAARLRHHLAASHAAYLRSLGVVASALTRFAVGEPLPVSDHTPPAVLAHRPVVAPSTPPPLLRAIDQPQREEARGGASAGVGVGSGSAGAAAGEDMMRMVVRHRSLAEVAAGLEEYFLKASVAGDTVSSLLEASSTAEFNGGSHSFLGALCCLSAPALDRVDSMGSRQRHSATLQQLLAWEKKLYKDVKAREKLQIRHDKKLAALRDQEYSRKVDVDIQKLKAAWDRARAQLEAASQSADAASASIAQLRDTRLARQLLELCHATLDMWRAMRQHHGAQSLFAQQLRGLSSRTSMDPTTEIHHQATRALEAAMAAWAAAMAHMAKHQRDYVHAIHGWLKLTLTLTPVDAAEASPLAAELTAFVERWGKVLDRVNCVDVLKAIKSFAGAAARSTRSRATSCGWRGASGSTPVETSYYDSYLPGVMSMWHWGRPAWRDHLQARDAGNEVAQRRDEIAACRKMVEDEMRRHAKAIDATRTATITGVQGKLPAVFQSMAAFSASLANSLEDACKAPQQNTNDMQS

SEQ ID NO: 9977 - protein, 179 aa, Zea mays
  VARIANT 43: note = Ancestral polymorphism is G, Derived polymorphism is E
  VARIANT 42: note = Ancestral polymorphism is G, Derived polymorphism is D
  VARIANT 28: note = Ancestral polymorphism is R, Derived polymorphism is H
  VARIANT 12: note = Ancestral polymorphism is R, Derived polymorphism is C
MAAFAVPSLSSRILLASPHSPPTLLRLRRAGGRSLELSSRRGGSARLRVVRRAVTEEDSGAARGDEEVEEDPEEPVAGRDLVTLAACLVGLLTGVSIVLFNLSIDVYSFGIVMWEFLTGEEPYSGGIVNDSLRPQIPSWCDPEWKGLMESCWSSDPAERPSFTDISQRLRKMAAAMNVK

SEQ ID NO: 9978 - protein, 605 aa, Zea mays
  VARIANT 506..605: note = Derived polymorphism lacks residues 506 to 605
  VARIANT 336..605: note = Derived polymorphism lacks residues 336 to 605
MEGPPLPWQASLGTSGRRMNGVFLQLLVAAGRRRLPHLARLSPHRRRREGQSGGGFGFLSPKFNSSPNLIADVATTDHRGTLSLSRVSRVLACYSRQPAAAIVSVLGPRTSHVMGTVQLHSSAGAHADRRTRVFPAHKPAPRNVVVINEDDDGDVIIMEHAVARESASAAAALGSEARKGGGSSGDVINIDDDEDEKYGTRGDKAGPSMSRASGSPVAMTPGRGSPRNRYGFDCSYDSSESNLTKGWDSDTDDGSDCEILDDTTGTAWEMWETAASRKKPPHGVDECEDGGATAFTSCAGLETQPGKYSEHLFGVECHPKESMSWSYSVASKYGSQNSSDSTKESPGHAQSSSGTEKDVHGPSVPNTEECSNGDFSSTNGKERAKNRNDSGKDIPTECHLNANISRSFSDARKEGLQNNTGRSKDHHDQFSAPNVKECSMVGSEKASRGVQLPRPDESSAYNFTPANRFFFSGILSVDRNDGSPPIFVSTPEKVDEKIPEDVYSQKDPSPPEASYNTNFYSAQDNGLAKGKDLLQDPKELGQFASVIGEREKHKESVEYKRAAEEEWASRHRQLQIQVQLPPSRSPNRHGHGTRANSTADATAPR

SEQ ID NO: 9979 - protein, 400 aa, Zea mays
  VARIANT 214: note = Ancestral polymorphism is C, Derived polymorphism is S
MEMAGAAEADTPSQEPVRTGRSNTILLPIGGILLAYLLYRFLRPRLRGLRLDLPAWLRCRRAPTGGGAVLPYFAPIADRLGAVALPYLGAFAGPQAALLRFPGGEALSVAAILEAPGEVVAKSAHSTLYRAAVRSGEAAVLLRFVRPACADEAFAAAAARRIGAVRHPNLVPLRAVYVGPRGEKLLVYPFYAAGSLQRFLQEGIAESQRWSIVCKLSIGIARGLDHLHTGLDKPMVHGNLKTSNVLLDASYDECRVSDYGLHLLLSPAAAQEALEAAAAQGYGAPELAKARDATRESDVYSLGVVLLELLATAPAGGDGVGDGILLLPASSSSSFKNLVLERKISDAFGSSGLARQCRSGAGKERSLGAFFELATACCSPSPSLRPSARQVLQRLQEIAR

SEQ ID NO: 9980 - protein, 306 aa, Zea mays
  VARIANT 143..306: note = Derived polymorphism lacks residues 143 to 306
  VARIANT 140..306: note = Derived polymorphism lacks residues 140 to 306
  VARIANT 31..306: note = Derived polymorphism lacks residues 31 to 306
MEEEVESSSAVALLLVLVAPVVVPSMALLVRGQWRRAAPRREEGEGIIIDIMTLESGLREDTHPMGAELRESKLMNKYNELKEAGKLDAFMERRRSKNASKDHWRHSRCGSSATPKSLPRGTTRHDAPAPNTTLASPSIQPTQRGGAAFALGDPTEAEEQCGRVAAAAVMCIGEARRGRYLRPAPRDDDDGWSQVEGGGDGEDVEAVGVAHGGLPPERRQIHVVAGHPGLPCVRRALAPRAAHHQVPTGDFPSKVANHHAGAEPPRHMAHPPLHLKAVTALNAHPGEALITVETEEMYNARSRNLL

SEQ ID NO: 9981 - protein, 228 aa, Zea mays
  VARIANT 88: note = Ancestral polymorphism is T, Derived polymorphism is I
  VARIANT 104: note = Ancestral polymorphism is L, Derived polymorphism is P
  VARIANT 105: note = Ancestral polymorphism is A, Derived polymorphism is P
MAMDDSSSGSEPTSSSSAEAPASPGTTASSSSDSSSSSSATAASSKKRRRTTDGQHHPTYRGVRMRAWGKWVSEIREPRKKSRIWLGTFATAEMAARAHDVAALAIKGRAAHLNFPELADELPRPATAAPKDVQAAAALAAAADFPAPAANNNAAGARDPDGGASPAVAPLDDDALFDLLPDLLLDLRHGASSCQLSCAPSWPYDDVSFSGTAAAGAFRLEEPLLWDY

SEQ ID NO: 9982 - protein, 159 aa, Zea mays
  VARIANT 24: note = Ancestral polymorphism is R, Derived polymorphism is C
  VARIANT 68..159: note = Derived polymorphism lacks residues 68 to 159
  VARIANT 81..159: note = Derived polymorphism lacks residues 81 to 159
  VARIANT 85..159: note = Derived polymorphism lacks residues 85 to 159
  VARIANT 89..159: note = Derived polymorphism lacks residues 89 to 159
MASAVGASTATRFLPRLPDPWRPRRARAALPPLTWRPPAVTVALASPRPGEAEGGRWPMGEDAEAARQGAGARGRRLAKLWSFLYFCLWWNQHGLGGDNVFGSCRPLHNGLVSLMHWSGKGKPWDRLDAGKPCALDHTWKAYDLYIGENDSSLASASSG

SEQ ID NO: 9983 - protein, 429 aa, Zea mays
  VARIANT 296: note = Ancestral polymorphism is W, Derived polymorphism is C
MQHEEVCDTTTCGEGNGRGGEEELEMEGHSLMRMKRRDHLLLTDGAGAGAGAGPLAVQTPMEPMEFLSRSWSVSASEISKVLAGGVGGRRSSNFVVDRLSGMLMPETLALAASSSSAGTNNISPRKRTLRSRSAISAHQVHHTVHAIGKWFHHWDAGSSKVDKARAERARVHAAVSVASVAAAVAAVAVAAGASPEVDVTDDGARMGSALASATQLLASHCVEAAELAGADHDQVASAVETAVDVRSPGDLLTLTAAAATALRGAAAMRHRAQREARSRAAVAPYDKACSYRADVWCKEGALLKRNRKGKRALHWKQVAVYISKKSQVIVKLKSKHIGGAFSKKKKGVVYGVYDDIPAWPAREGVAAQSSAPETCHFGLRTAHGLLEFQCESRAQRRDWVEAVKDLIRQVAGGTALLEHSFESLRLSAS

SEQ ID NO: 9984 - protein, 147 aa, Zea mays
  VARIANT 2: note = Ancestral polymorphism is A, Derived polymorphism is T
MTCMPAVSAPSVLAPAPASTRTHLCYSTEMRRGALSLRPARAIPTLRLGGHRDARGAVVVRATAAEGAVELQAKVTSKCFFDVEVGGEPAGRIVIGLFGEVVPKTVDNFRALCTGEKGYGYKGCSFHRIIKDFMIQGGDFQQNNVSI

SEQ ID NO: 9985 - protein, 149 aa, Zea mays
  VARIANT 56: note = Ancestral polymorphism is D, Derived polymorphism is N
MAGSTTTTAVCSMCGDVGFPDKLFRCARCRRRFQHSYCTNYYGDAAPAQAGAGVCDWCLRDDVGGGTKKRQHSSASAAACGGKQPHRQAEEEEEEEAAAAGWRRSAQHQPASSSSFPPSGGCSKVTGGSEHAEGGRRPRRYKLLKDVLC

SEQ ID NO: 9986 - protein, 158 aa, Zea mays
  VARIANT 4: note = Ancestral polymorphism is K, Derived polymorphism is E
MATEMVLLCRFVAFVAALACLLRPGAPVELHRKLSGWSDDAGATWYGAATGAGSDGGACGYQNAVDQPPFASMIAAGSPSIFLNGKGCGSCYQVKCTGHASCSGSPVTVVLTDECPGGACLDEPVHFDLSGTAFGAMAKPGQADQLRSAGRLRIQYTR

SEQ ID NO: 9987 - protein, 354 aa, Zea mays
  VARIANT 164: note = Ancestral polymorphism is L, Derived polymorphism is Q
  VARIANT 62: note = Ancestral polymorphism is L, Derived polymorphism is M
MATAIVPTDAELLQAQADLWRHSLYYLTSMALKCAVELHIPTAIHNLGGSATLPDLVAALSLPAAKLPFLGRVMRLLVTSGVFASSDDVQYRLNPLSWLLVEGVESEDHTYQKYFVLGTVSRHYVEAGMSLADWFKKEEDEDRQLPSPFEALHGVPLVHESTKLLDEELDRVVEEGVAAHDNLAIGTVIRECGADVFSGLRSLTYCCGRQGNASAAAIVKAFPDIKCTVLNLPRVVEETTTKTITIPPAQAVMLKLVLHFWSDDDCVKILELCRKAIPSRQEGGKVIIIEILLGPYMGPVMYEAQLLMDMLMMVNTKGRQRGEDDWRHIFTKAGFSDYKVVKKIGARGVIEVYP

SEQ ID NO: 9988 - protein, 129 aa, Zea mays
  VARIANT 35: note = Ancestral polymorphism is Q, Derived polymorphism is K
MTMGVAAQQLCKRGGHEGCPDSEDMDSIVETMMQQLLSKEILHEPMKDIVEKYPKWLEDNKNKISKEEYERYNNQLELMVKLIEVYENDPENMTKIFDIMQNMQECGQPPSDLVQDTVPDLDLSKLGQL

SEQ ID NO: 9989 - protein, 165 aa, Zea mays
  VARIANT 138: note = Ancestral polymorphism is A, Derived polymorphism is T
  VARIANT 135: note = Ancestral polymorphism is A, Derived polymorphism is T
  VARIANT 112: note = Ancestral polymorphism is P, Derived polymorphism is L
  VARIANT 96: note = Ancestral polymorphism is A, Derived polymorphism is S
  VARIANT 95: note = Ancestral polymorphism is A, Derived polymorphism is V
  VARIANT 78: note = Ancestral polymorphism is R, Derived polymorphism is Q
  VARIANT 64: note = Ancestral polymorphism is R, Derived polymorphism is C
  VARIANT 60: note = Ancestral polymorphism is C, Derived polymorphism is Y
  VARIANT 59: note = Ancestral polymorphism is T, Derived polymorphism is N
  VARIANT 46: note = Ancestral polymorphism is I, Derived polymorphism is F
  VARIANT 45: note = Ancestral polymorphism is R, Derived polymorphism is H
  VARIANT 42: note = Ancestral polymorphism is G, Derived polymorphism is R
  VARIANT 36: note = Ancestral polymorphism is A, Derived polymorphism is V
  VARIANT 34: note = Ancestral polymorphism is P, Derived polymorphism is L
  VARIANT 32: note = Ancestral polymorphism is G, Derived polymorphism is E
  VARIANT 31: note = Ancestral polymorphism is A, Derived polymorphism is T
  VARIANT 29: note = Ancestral polymorphism is A, Derived polymorphism is T
  VARIANT 23: note = Ancestral polymorphism is A, Derived polymorphism is V
  VARIANT 20: note = Ancestral polymorphism is Y, Derived polymorphism is H
  VARIANT 13: note = Ancestral polymorphism is P, Derived polymorphism is L
MDSYKYLKIRLNPDGSLYRYREVWLLPAAPAEELVAVEDEQGARRIVVHSSDVPLNAATCMGLRLFVSSGSGGHDGGRLPLVVYFHVGGYVLFHAASAPFHNTCAALAAAALAIVASVDYRLAPEHCLPAAFEDAADAVIRGSDTHVMRGRGRRQLWIGGTEGRD

SEQ ID NO: 9990 - protein, 204 aa, Zea mays
  VARIANT 3: note = Ancestral polymorphism is T, Derived polymorphism is N
  VARIANT 9: note = Ancestral polymorphism is R, Derived polymorphism is P
  VARIANT 16: note = Ancestral polymorphism is P, Derived polymorphism is H
  VARIANT 21: note = Ancestral polymorphism is G, Derived polymorphism is D
  VARIANT 28: note = Ancestral polymorphism is A, Derived polymorphism is T
  VARIANT 36: note = Ancestral polymorphism is L, Derived polymorphism is F
  VARIANT 78: note = Ancestral polymorphism is A, Derived polymorphism is S
  VARIANT 147: note = Ancestral polymorphism is R, Derived polymorphism is C
  VARIANT 151: note = Ancestral polymorphism is A, Derived polymorphism is V
MANAATSPPAPALSRPTLLGGVRGFDAAVSLRLHALFLPVPRLLLKALEVAGDGRIWLPVPISLLLLSASPANASGAASPLLAGLVAGLVLDLILVGLVKVFVRRPRPAYNAKDMYVAVSADHWSFPSGHSSRAFLVASFLAAGGFRPREALFLWAAATSASRVLLGRHYVLDVVAGACLGVFEAWLSILLLGFMCAQSTFLVC

SEQ ID NO: 9991 - protein, 135 aa, Zea mays
  VARIANT 15: note = Ancestral polymorphism is G, Derived polymorphism is D
  VARIANT 39: note = Ancestral polymorphism is R, Derived polymorphism is C
  VARIANT 41: note = Ancestral polymorphism is A, Derived polymorphism is G
  VARIANT 42: note = Ancestral polymorphism is V, Derived polymorphism is A
  VARIANT 44: note = Ancestral polymorphism is V, Derived polymorphism is I
  VARIANT 48: note = Ancestral polymorphism is G, Derived polymorphism is E
  VARIANT 51: note = Ancestral polymorphism is R, Derived polymorphism is H
MEGTAPLVVSTASHGPTLFSTRRGSRSDGGALEDARAARRAVAVGGPGGLRLDLRWYGSGGASASVAARRRDQRVRACRRFAVYPDLPRWRPGQHAQVLKSFSSSLLQRFEVILGSTVPRFFMLLWFFGSLQFLG

SEQ ID NO: 9992 - protein, 131 aa, Zea mays
  VARIANT 6: note = Ancestral polymorphism is F, Derived polymorphism is S
  VARIANT 85: note = Ancestral polymorphism is G, Derived polymorphism is D
MACKAFALFLAVNLVVLGVASACSPYCPTPTPTPSTPTTPTPTPSSFGRCPRDALKLGVCANVLGLIKAKVGVPPAEPCCPLLEGLVDLEAAVCLCTAIKGQILGINLNLPIDLSLILNYCGRTVPTGFKC

SEQ ID NO: 9993 - protein, 139 aa, Zea mays
  VARIANT 52: note = Ancestral polymorphism is S, Derived polymorphism is N
  VARIANT 48: note = Ancestral polymorphism is E, Derived polymorphism is G
MSNSASGMAVCDECKLKFQELKAKRSFRFIVFKINENVQQVVVDRLGGPGESYDAFTACFPANECRYAVFDFDFVTDENCQKSKIFFISWAPDTSRVRSKMLYASSKDRFKRELDGIQVELQATDPSEMSMDIVKSRAL

SEQ ID NO: 9994 - protein, 411 aa, Zea mays
  VARIANT 273: note = Ancestral polymorphism is S, Derived polymorphism is F
  VARIANT 272: note = Ancestral polymorphism is A, Derived polymorphism is G
MSRPTGAWRLGMATCTIPAAPRAHVGRLPGIRQAARPALLLPSFSSSTLLCHRLPPILPLVLQLLRVRANHAMAASAGTVYEADAEAVVRRITPALDRARHKGQAGKIAVIGGCREYTGAPYFAAISALKVGADLSHVFCTKDAATVIKSYSPELIVHPILEESYSVRVDERASVSSKILTEVAKWMERFDCIVVGPGLGRDPFLLECVSNIMRHARQANIPTVVDGDGLFLVNNNLNLVEGNPLAILTPNVYEYKRLVQKVLNCDVDEESASEQLIALCQKIGDVTIMQKGKADVISDGKTANTYVVFMFLKSEVTQVSTFGSPRRCGGQGDILSGSVAVFASWARHFVLTNEEPTEKRVNPMTLGCIAASLLLRKAASHAFEKNKRSTVTSDIIEFLGKSLEDICPAEH

SEQ ID NO: 9995 - protein, 246 aa, Zea mays
  VARIANT 115: note = Ancestral polymorphism is N, Derived polymorphism is I
MPPRPVPLFSRLRFRLPSCAAVSISTPPSSAAPLHYGHRTPLASPFPLSPPCPRILRAAVAVSSLDLRPITGGFALFSMAAASSATSVHDFTVKDASGKDVDLSTYKGKVLLIVNVASQCGLTNSNYTELSQLYEKYKDQGFEILAFPCNQFGGQEPGTNEEIVQFACTRFKAEYPIFDKVDVNGDNTAPIYKFLKSSKGSLFGDNIKWNFSKFLVDKEGHVVERYAPTTSPLSIEKDIKKLLGSS

SEQ ID NO: 9996 - protein, 160 aa, Zea mays
  VARIANT 39: note = Ancestral polymorphism is R, Derived polymorphism is H
MAAPTTAVDTTAPPPPPPTAEPAAAPAPDQKVCQATDFRNTDAAREILKEINVVMDLSKKMRLKLGATSEPVKPLEKPSAGSVKDELVKPSEKPSAGPVNDEPVKPSEKPSAGPVKNEPTEPAPAGENNQAPTVGQTTVSPNNAGVGAPVVKHDNSEAQK

SEQ ID NO: 9997 - protein, 198 aa, Zea mays
  VARIANT 42: note = Ancestral polymorphism is V, Derived polymorphism is A
METREGVLELLLVSAEGLKHAHHHPRRSKRHYVTIECGDKIATSKITQGRGKKIWWNEKFRFALSDAERRELAKVTLTIMEMDRVYVGEIISEGSEREFLQTKPAPYNVVLEDGTYKGVLKLGLKFISSVSLEQSSDCVRCPAPAPAPAPTRQTSAGHGLFFLLNSFALPSIPWRRLFSFASRWAWNHGQAPRERCGN

SEQ ID NO: 9998 - protein, 956 aa, Zea mays
  VARIANT 124..956: note = Derived polymorphism lacks residues 124 to 956
  VARIANT 723..956: note = Derived polymorphism lacks residues 723 to 956
  VARIANT 785..956: note = Derived polymorphism lacks residues 785 to 956
MEEWEPLRSARCSPAATPSSLLQDELAAHEVFVAVPEEVSDGRSTLLWALRNLVKDGSKLAIAHVHYCPAPAIAQTACDFRYISDRSHTSMKPEEIKEYRKQKRAKAEKSLDAYVQMAKAVTFQVACAKVIIETDDVAEGLEELISLNNVTEFVMGAAADRHFSREMNTPKSMTALKLFKTAAPSCKMWFTCKGHLICTREANESLPAILASPEKSNAPLSPAHNVSSQMGSMATELEYKESSHKGYISSSSAAAEMTEWDYLFGDWRMIVYGSSGTDDAVSFSETAALPSVIGDTHETTQVVHFTTQEPDSTYLLLASTYNQEDEPSVHEEKYEKLQDSCIEAKLLKDEADDDESNKIRKAEMDLLSALQRVQCDQNSEISLQIKELEDSYIHEVSQRKEIEKTLARQRLEIDEMRRQRCTLSDKLHDSDKHKLVLEQRITQIKSAAKDHVEEITEHFIRQSSEESKKHQKVKMGLLSTLQRVKEVESLLQNEKAQREYMEEKVSRQRTEIEETRRQRDKLYHDLQDLKEQKLKLEQVGMSEETNRRRKAERDRLSYLQRIKDLEHQHIHQVKKQETMEETMTRQKEEIQASKRKLHETHGKHMSEIKSAVKVHEEKLADSKQLLQELQAKHDKLLRERDTAAMEAKESRQKNKQRALGTTETANTEFSIVELQKATRGFDAELKISEDGFASVYRGFVRNTDVAIKLFHSRSLKGQARFYQEVAVLSRVRHPNIVTLVGVCPDDFALVSEFLPNGSLEDWLSCKKSMPPLTWKARTRIVGEICSALAFIHSHKPYPIVHGDLNLGNILLDANFVSKLGGLGICCLLLGGGEDDITATSLRSRPSAADRSKGTLRYTEQGGGFKSAAELMLWSDVNSFGVTILRLLTGRSQQGIGEMVEEAMEKGNLHSIIDASAGEWPLVQASQMAHLLGLGASPWARGASQISPGRCGRRSSN

SEQ ID NO: 9999 - protein, 123 aa, Zea mays
  VARIANT 64: note = Ancestral polymorphism is G, Derived polymorphism is S
MVGQPRRRACAHAVPHSFGLPSLLAEGCGGGVPVPVPGRAMAPRQSAPVRVPAAWPAGGWRAGGRKADEDEEDDEEVVPPHVVAARRHARSSSVLEGTGRTVKGRDLRSVRNAVLRQTGFLDL

SEQ ID NO: 10000 - protein, 154 aa, Zea mays
  VARIANT 19: note = Ancestral polymorphism is Q, Derived polymorphism is R
  VARIANT 23: note = Ancestral polymorphism is R, Derived polymorphism is W
  VARIANT 34: note = Ancestral polymorphism is Q, Derived polymorphism is L
  VARIANT 35: note = Ancestral polymorphism is R, Derived polymorphism is Q
  VARIANT 36: note = Ancestral polymorphism is R, Derived polymorphism is K
  VARIANT 75..154: note = Derived polymorphism lacks residues 75 to 154
  VARIANT 94..154: note = Derived polymorphism lacks residues 94 to 154
MQVWVEPSATKDMMDKVEQVRQRRKAEKSLLSLQRRLATTSAEELENSGCQKTYASPRKSECENQRFTRKNHVEQQLSTKVDISSEKEVDCAQQETIDLKSKLQSKEAKIEKMKYEHLTREAALTENELLEEEYKKKLDEANKELSLENDLAGM

SEQ ID NO: 10001 - protein, 904 aa, Zea mays
  VARIANT 210..904: note = Derived polymorphism lacks residues 210 to 904
MPPWWGKSSSKEVKKTAKENLIDTFQRLISSNEQKGSKKSRGSRRHGKDTAGDKGCWSTAQSRSTSPSKEVSRCQSFAADRPHAQPLPLPKSRARVSRSSSDITNSKSTLEKHGKGQLLPLPPIQPKKTPEATEPVTEVATASVSSNCSIDSDDPGDSRLQIPVGNETENATRITATSSSSVVHKERSSAITRKNTKEVAKPNNVFLSNQILSTSPRGTVADGYQSNLQSPRQIALESAPNSLMSSPSRSPRIICPDQIPTSAFWAVKPHTDVTFLGSGQCSSPGSGQTSGHNSVGGDMLGPIFWQPSRGSPECSPIPSPRMTSPGPSSRVHSGSVSPLHPRAGGVTPESPTNRHAEGNKKQTHRLPLPPLSIANSSTFLPNSSTPASPISRSPGRTENPPSPGSRWKKGKLIGRGTFGHVYAGFNRHVLTFKCYHHHINNGVLASYYMHSPLLSLNNFSCNLSLEVTLFSDDPKSKESAKQLCQEISLLSRLQHPNIVRYYGSETVDDKLYIYLEYVSGGSIHKLLQEYGQFGEQAIRSYTKQILLGLAFLHAKNTVHRDIKGANILVDPNGRVKLADFGMAKHVIKNASGCNLAVDIWSLGCTVLEMATSKPPWSQYEGIAAMFKIGNSKELPPIPDHLSEEGKDFIRQCLQRDPSSRPTAVDLLQHPFVGNAPPLEKSSASNPLEQLTTISCRTNWKVVEHARNMSSLGLEGRYQSILQRRAAKFSLPNSDIRIQSNISCPVSPCGSPLLRSRSPQHQNGRMSPSPISSPRTTSGASTPLTGGSGAVPLNHLRQPAYRNEGFTVTSRGFDDHIPSRLVDPVHGRFIRVQQLSAGRQERVVSEADILSSQFGKMRHANVWDPHDRPLPSERSSQQCFGDHAKLKPSLDLRSGPLHPGRNHGH

SEQ ID NO: 10002 - protein, 213 aa, Zea mays
  VARIANT 12: note = Ancestral polymorphism is N, Derived polymorphism is K
  VARIANT 56..213: note = Derived polymorphism lacks residues 56 to 213
MIRLFAVFHGCNCDHGSRCPSFSTRSSRLPNCLTIFSSFFAGSSSRDETFFETTPWLESDCEDDFYSVNGDLTPAGSFASRTSGRNTPPPRPRDLLTLAAILKAEPLKPPPPQRRLGDLLREAQDDDNDTTVDGLSRDDSLRMGAEANRCCVPQLAWAISCNGRTQRNEVLIRALFNRQEKICRPNVYVHRPNDCTRTVKRKTFMFCMQCTIT

SEQ ID NO: 10003 - protein, 87 aa, Zea mays
  VARIANT 45: note = Ancestral polymorphism is P, Derived polymorphism is S
MYILLFLLRIIACANSVSALALQRGLYIVTFKYKDFPLATGSEVPMSRNNSEEAEIKKRIESFGRATNYWLGCLVLVKLIEMQRTLT

SEQ ID NO: 10004 - protein, 129 aa, Zea mays
  VARIANT 15: note = Ancestral polymorphism is D, Derived polymorphism is G
  VARIANT 12: note = Ancestral polymorphism is C, Derived polymorphism is S
MELEAAAAPATCRRDGRRLVRCPRLQLDTETATAIERSTGESVAAEGAMRVKIVLSKQQLKQVAAAVAAAGSGGAFAGLPPALEQLVSVLKRRQHARKQQAAAADAVAAAGRRRGRWSPALQCIPEECF

SEQ ID NO: 10005 - protein, 230 aa, Zea mays
  VARIANT 45: note = Ancestral polymorphism is R, Derived polymorphism is C
MWSSGSDRDEAVDTANASSVDASSPARQPSTPPPPPRRRRQRARRRAHRLRARNTGAGAEEEGLVEADADADDVWRGLQQQREREAWLRRASRPVVVVAGEEGSPPDASAGSGESGGVGRARSLTDDDLEELKGCVDLGFGFSYREIPELCGTLPALDLCYSMSQRFLDEHHHQQLGKAEEAPPLAPASPAQPAATTNWKISSPGDSPDEVKARLKYWAQAVACTVRLCS

SEQ ID NO: 10006 - protein, 132 aa, Zea mays
  VARIANT 70..132: note = Derived polymorphism lacks residues 70 to 132
MACHVRDLATQSVACGLWLWAMLEYQNVVGGRLKLKGKALDVKDGGVKKKKKYQHEKSSQTESDKNRDEENPHLDYDHLTPAERRYMKQKQKIDMQKIAKVANKSHKDRMQDFNQYLAKLSDHYDVPKVGPG

SEQ ID NO: 10007 - protein, 179 aa, Zea mays
  VARIANT 13..179: note = Derived polymorphism lacks residues 13 to 179
  VARIANT 14: note = Ancestral polymorphism is K, Derived polymorphism is R
  VARIANT 23..179: note = Derived polymorphism lacks residues 23 to 179
  VARIANT 24: note = Ancestral polymorphism is L, Derived polymorphism is F
  VARIANT 57: note = Ancestral polymorphism is D, Derived polymorphism is Y
  VARIANT 63: note = Ancestral polymorphism is D, Derived polymorphism is H
  VARIANT 67: note = Ancestral polymorphism is P, Derived polymorphism is S
  VARIANT 68: note = Ancestral polymorphism is D, Derived polymorphism is E
  VARIANT 73: note = Ancestral polymorphism is S, Derived polymorphism is F
  VARIANT 75: note = Ancestral polymorphism is L, Derived polymorphism is P
  VARIANT 111: note = Ancestral polymorphism is P, Derived polymorphism is L
  VARIANT 123: note = Ancestral polymorphism is I, Derived polymorphism is T
  VARIANT 149: note = Ancestral polymorphism is G, Derived polymorphism is W
  VARIANT 154..179: note = Derived polymorphism lacks residues 154 to 179
  VARIANT 158..179: note = Derived polymorphism lacks residues 158 to 179
MEEHNCFPNIALQKTQPPSMTKLLILLQVLSLESTAGLESVRCMSRTDLKLDGSFADMILIPDIGVPDKSRTSALFISTNPGQLNFYDGGYLFFVQNSKEGNPLPESHKFPVAITTFDPNITITGLYSLTKTEFPNISLKKFCARKNVGHFISENMKWPLTGGVPNEMSLNEDHAVERI

SEQ ID NO: 10008 - protein, 371 aa, Zea mays
  VARIANT 5: note = Ancestral polymorphism is P, Derived polymorphism is L
MATVPVLVVLHVLLLAAAAACAAAGGSSSKVPALYVFGDSTADVGTNNYLPGGAEVPRANFPHNGVDFPTARPTGRFSNGYNGVDFLAVNMGFKRSPPPFLAVANKTNRQVFRGLLGVNFASAGSGILDTTGSSIIPLSKQVEQFASVRRNISSRVGNGSAAADALLSRSLFLVSTGGNDLFAFFARNSTPSDADKRRFVANLVALYQNHVKALYVLGARKFAVIDVPPVGCCPYPRSLHPLGACIDVLNELARGFNEGVRAAMHGLGVSFQGLRYSVGSSHAVVQSIMKHPQRLGFKDVTNACCGSGRFNGKSGCTPNATLCDNRHQYLFWDLLHPTHAASKIAAAAIYNGSLHFAAPMNFRQLAEDDRC

SEQ ID NO: 10009 - protein, 446 aa, Zea mays
  VARIANT 23: note = Ancestral polymorphism is G, Derived polymorphism is D
  VARIANT 50..446: note = Derived polymorphism lacks residues 50 to 446
  VARIANT 223: note = Ancestral polymorphism is L, Derived polymorphism is P
MCAAYDNVGSGLPMYLLATEIIGYGGHDFAFAPYGAYWRALQVVHAGAPQRAQGSIWCFIVSMGFLDLGLWGFFIERRSSLGLRFTVLLMHVMFVGAVFILDPTLDWRIHEEPWYIGLYGVLVLLTLVQYFYTAGSSPGYVIDVMRAGSMMHATFVNTAALSKQSNSRNGNTNSPTSHAQLQKLSAMTPTSWAQMVVDLYPPGSNSSNLFNTHHCLLGIGLALTAGLFRTVPPKSNGVLISTIMSLKNPHILLLLIIRVKVLLPTSFCSHLVLGTAMTVINASFNLIITAYGLEHALAKRTIVVFGEFLMWYISEETILCIWTAVLYIESLRLDVDKAWWKDFVGVILLAVLIFILIFLLLLWLFHSYIAVTNQTTYEVARRKRIFYLRGVPERVHPFSRGICRNLYDFCCSSQKGYILEAVPPREELEARAARYTCRDVICCRCC

SEQ ID NO: 10010 - protein, 108 aa, Zea mays
  VARIANT 35: note = Ancestral polymorphism is L, Derived polymorphism is I
  VARIANT 26: note = Ancestral polymorphism is R, Derived polymorphism is H
  VARIANT 25: note = Ancestral polymorphism is A, Derived polymorphism is T
  VARIANT 24..108: note = Derived polymorphism lacks residues 24 to 108
  VARIANT 22: note = Ancestral polymorphism is P, Derived polymorphism is S
  VARIANT 20..108: note = Derived polymorphism lacks residues 20 to 108
  VARIANT 19..108: note = Derived polymorphism lacks residues 19 to 108
  VARIANT 17: note = Ancestral polymorphism is R, Derived polymorphism is W
  VARIANT 5: note = Ancestral polymorphism is P, Derived polymorphism is S
MRRRPFLDQQRTSFKRWWQQRSWWARLLLSLLLALACVLLLAVLLGSPDPDTSPSTSARVLRMVAEYRQPLVKTEGASLSIAKVAAVATGGGEARVELDESARSQIWF

SEQ ID NO: 10011 - protein, 180 aa, Zea mays
  VARIANT 17: note = Ancestral polymorphism is A, Derived polymorphism is P
  VARIANT 79: note = Ancestral polymorphism is C, Derived polymorphism is S
  VARIANT 112: note = Ancestral polymorphism is T, Derived polymorphism is M
MKGKANASKKDEARLRAGGGGAGKRKKAAASGKPKRPPSAFFVFMSEFRQEYQAQHPGNKSVAAVSHFALCSPFIFFPCASADDVLFFRVGGSGEQGSRGKVALYVRASDSTWVIMHNVEEKQPYVDQAGQKKQDYEKTKANIEKESTSSKKAKTDDDDGSKSEVDDEDGGSDEDNDDDE

SEQ ID NO: 10012 - protein, 361 aa, Zea mays
  VARIANT 231: note = Ancestral polymorphism is G, Derived polymorphism is C
MAATGWSDLPSELLTDIAGGITELADIARFRSVCSSWRSAARDAAAAPPPQPPWLLLPSSPSWLFFCPREDRIYPNLRLPRPAAEAHHRRRRRLYASPHGWALAIDPTDLAASLVHPFTGATRQLPRLPSFFAETDDMAWDWSPHGVMASCGEGLLFCGADPTAAASSWAPIPALADCNASSINYAGGEFFVFEEDVCRTTVVDAVTLAVAAVIPAPAVELPAEARVAVAGDELFLLVKSKWMYLFGDDVDFSKAFHVNHRGVNPPAWQELAGIGDRALFVDSLHGFAVPTAGFGNLENNTIYSVSSKEVNNRRPTTVNYNVSAFSLESRSSKKLACRLNDREMAMRAETPSWILPSLDEG

SEQ ID NO: 10013 - protein, 151 aa, Zea mays
  VARIANT 94: note = Ancestral polymorphism is D, Derived polymorphism is Y
MDDDFTFPTLHAGGQLVPSAFPPHQLGLGGSPSRWFLATVAGEEEEEEEEEEEKMDMLWEDFNEELASVPPLCPLSPVINKERLAMSWLDLDDDDKMVVVDLEKHCKGKHPHHPQDGRVVRRRKWSLMLMLRLLKKLFLVNKSRNPRTAPI

SEQ ID NO: 10014 - protein, 93 aa, Zea mays
  VARIANT 80: note = Ancestral polymorphism is G, Derived polymorphism is R
  VARIANT 73: note = Ancestral polymorphism is S, Derived polymorphism is T
  VARIANT 68: note = Ancestral polymorphism is S, Derived polymorphism is T
  VARIANT 61: note = Ancestral polymorphism is A, Derived polymorphism is V
  VARIANT 55: note = Ancestral polymorphism is T, Derived polymorphism is K
  VARIANT 49: note = Ancestral polymorphism is M, Derived polymorphism is I
  VARIANT 47: note = Ancestral polymorphism is H, Derived polymorphism is N
  VARIANT 33: note = Ancestral polymorphism is K, Derived polymorphism is I
MLVEDHLRSQAQHFCTSLTGFSPMAIKMKGIFKGLKIISQMFVHKEHEMEIEYPTYVKHLVHIGLDTSDTSPSWMVEFKGADDLSIGSMSIAA

SEQ ID NO: 10015 - protein, 93 aa, Zea mays
  VARIANT 56: note = Ancestral polymorphism is R, Derived polymorphism is W
  VARIANT 50: note = Ancestral polymorphism is K, Derived polymorphism is N
  VARIANT 45: note = Ancestral polymorphism is G, Derived polymorphism is R
  VARIANT 31: note = Ancestral polymorphism is R, Derived polymorphism is P
MALILPYNSAQCPPRQIFDASKGDGGGRRLRQRQHGVRRGSGDWRWCRHKRRQEPRCGCRTSAGGGGGTKLPHVLQKSFGEVQGILEHNRVLI

SEQ ID NO: 10016 - protein, 105 aa, Zea mays
  VARIANT 90: note = Ancestral polymorphism is E, Derived polymorphism is K
  VARIANT 56: note = Ancestral polymorphism is G, Derived polymorphism is V
MDDLAALARGEGWTEERHATFLDRLELSFVQQVLGGTDVRQASRRLGVRPAPREEGWRGQVLSPLPLDRPLPDSAVESNRSGLAAARRREANDARRQPVDPAAGW

SEQ ID NO: 10017 - protein, 296 aa, Zea mays
  VARIANT 115..296: note = Derived polymorphism lacks residues 115 to 296
  VARIANT 121: note = Ancestral polymorphism is G, Derived polymorphism is V
  VARIANT 132: note = Ancestral polymorphism is M, Derived polymorphism is V
  VARIANT 134: note = Ancestral polymorphism is I, Derived polymorphism is F
  VARIANT 142: note = Ancestral polymorphism is Y, Derived polymorphism is H
MGTGSSILGADGEWGETSLGDMPESCVAAVLLYLDPPEICQVARLNSAFRGAASADCVWAAKLPANYRYLAALAAAADDEGCGDGDASGKRLTKKEIYARLCRSTFFDAGRKEFWILKNKGALCMSISSKAMTITGIDDRRYWSHLATEESRFHTVAYLQQIWWLEVDGELEFCFPAGAYSLFFHLHLGRPYRRMGRWLCGTEHVHGWDVTPTRFQLTTSDEQQATSEYYLHLHEQGGWKLYHVGDFVISNSDEPMKLKFSMMQIDCTHMKGGLCVDSVFIYPKGYKPEKANIVCT

SEQ ID NO: 10018 - protein, 171 aa, Zea mays
  VARIANT 158: note = Ancestral polymorphism is A, Derived polymorphism is S
  VARIANT 135..171: note = Derived polymorphism lacks residues 135 to 171
  VARIANT 133: note = Ancestral polymorphism is R, Derived polymorphism is C
  VARIANT 103: note = Ancestral polymorphism is G, Derived polymorphism is R
  VARIANT 91: note = Ancestral polymorphism is R, Derived polymorphism is Q
  VARIANT 89..171: note = Derived polymorphism lacks residues 89 to 171
  VARIANT 87..171: note = Derived polymorphism lacks residues 87 to 171
  VARIANT 65: note = Ancestral polymorphism is D, Derived polymorphism is N
  VARIANT 64: note = Ancestral polymorphism is A, Derived polymorphism is T
  VARIANT 44: note = Ancestral polymorphism is P, Derived polymorphism is L
  VARIANT 29: note = Ancestral polymorphism is R, Derived polymorphism is C
  VARIANT 22: note = Ancestral polymorphism is E, Derived polymorphism is K
  VARIANT 15: note = Ancestral polymorphism is D, Derived polymorphism is E
  VARIANT 3: note = Ancestral polymorphism is C, Derived polymorphism is S
MACFADVGVLYWHLDPKKSESEEELAKIRRDRGYSYMDLIEICPDKLENYEEKVNNFFREHMHADEEIRYCLEGSGYFDVRDKDDKWIRIRIREGDMIILPAGIYHRLTLDSAKYTKLMRLFIGEPVWTALNRPQEDHPARQEYVKNVSAGTGFALAAHFLANTNLPSKPF

SEQ ID NO: 10019 - protein, 259 aa, Zea mays
  VARIANT 162..259: note = Derived polymorphism lacks residues 162 to 259
MAEQQPPHSPYPAVQVQRPGPPAGHSRQAGSASASPHSPSPVVQGDYYGTAAAAATSSGEPSPRSSGKHAFYRGIRCRSGKWVSEIREPRKARRIWLGTYPTPEMAAAAYDVAARALRGADAVLNFPGAIASRAAPASASPADIRAAAAAAAQAQLEYSQSQGAASNPLAAAAAQGRHQQQHHGASSTATADAAGYTAPQQEMGTDEFMDEEAIFEMPQLLRNMAAGMMMSPPRLSPDTSDESPDPSEAGESLWSYHDP

SEQ ID NO: 10020 - protein, 117 aa, Zea mays
  VARIANT 58: note = Ancestral polymorphism is R, Derived polymorphism is W
  VARIANT 56: note = Ancestral polymorphism is S, Derived polymorphism is F
MAGQHPHPAWVAPKDVMMQVSLLPFDDPTVMRAFDRLWRAERRYTWSLNLLMEVNSGRLGEDESRIYFHQLINAIDYCHSRGVYHRDLKPQNLLLDSNGALKVSNFGLSAFAPQTNV

SEQ ID NO: 10021 - protein, 185 aa, Zea mays
  VARIANT 22: note = Ancestral polymorphism is S, Derived polymorphism is C
  VARIANT 23: note = Ancestral polymorphism is C, Derived polymorphism is Y
  VARIANT 108: note = Ancestral polymorphism is D, Derived polymorphism is H
  VARIANT 122: note = Ancestral polymorphism is G, Derived polymorphism is R
  VARIANT 125: note = Ancestral polymorphism is P, Derived polymorphism is S
MEDNPRMVERSRGRTVQRSPPSCLRTTSMSGQGVASKAWRGDGLSQPRGEGDGEGGNEMTGSMLLIREFCDRFVPAEKATRTRVVCYAWDLGRLNLSGPLAPELGQLDQLQYMEIFGNSISGPIPSEFGSLANLISLDLSSNSISGAIPAALGNAKSLKFLRLDHNRQTGPIPRELAGLPNLGIV

SEQ ID NO: 10022 - protein, 359 aa, Zea mays
  VARIANT 14: note = Ancestral polymorphism is T, Derived polymorphism is I
  VARIANT 46: note = Ancestral polymorphism is S, Derived polymorphism is L
  VARIANT 48: note = Ancestral polymorphism is K, Derived polymorphism is N
  VARIANT 52: note = Ancestral polymorphism is G, Derived polymorphism is R
  VARIANT 54: note = Ancestral polymorphism is E, Derived polymorphism is G
  VARIANT 87..359: note = Derived polymorphism lacks residues 87 to 359
  VARIANT 90: note = Ancestral polymorphism is L, Derived polymorphism is M
  VARIANT 122: note = Ancestral polymorphism is T, Derived polymorphism is I
  VARIANT 127: note = Ancestral polymorphism is T, Derived polymorphism is I
  VARIANT 193..359: note = Derived polymorphism lacks residues 193 to 359
MDAYAPKDLLVVTTGSQGEPRAALNLASYGGSHALKLSKEDVLLYSAKVIPGNETRVMKMMNRLTDLGPKIIMGKDFGLHTSGHAYREELEEVLRIVKPQHFLHVHGELLFLKEHESLGRSTGIRHTTVIKNGEMLGVSHLRNRRVLSSGDSDKAFGTSIDLCIDERLRIASDGIIFVSMEIFRPQKEHGLAQTGLKGKFKITTRCLWLDNGRLLDALYKAAHAALSSCPVNCPLSHMERMVAEILRKMVRKYTTSHLSRSPAMSLEGSYKTHPDNPEVDAEEALPEATRTAPDDATTLKLEYLQDSDIVMNRFHKQRPVYGGWEQHLGLEHTATTPKRSYLGNNQNRHSFEKPVRIYN

SEQ ID NO: 10023 - protein, 221 aa, Zea mays
  VARIANT 22: note = Ancestral polymorphism is A, Derived polymorphism is T
  VARIANT 23: note = Ancestral polymorphism is D, Derived polymorphism is V
  VARIANT 51: note = Ancestral polymorphism is G, Derived polymorphism is D
  VARIANT 88: note = Ancestral polymorphism is Y, Derived polymorphism is H
  VARIANT 92: note = Ancestral polymorphism is G, Derived polymorphism is A
  VARIANT 94: note = Ancestral polymorphism is P, Derived polymorphism is A
  VARIANT 96: note = Ancestral polymorphism is P, Derived polymorphism is A
MAEDKETDSPQPPAKLPRLSRADTSAGEVTMAASSPLVLGLGLGLGGRGGGGERDADVSPATVTPKRPSALTFMQQQELEHQVLIYRYFAAGAPVPVHLVLPIWKSVAASSFGPQRFPSLMGLGSLCFDYRSSMEPEPGRCRRTDGKKWRCSRDVVPGHKYCERHVHRGRGRSRKPVEAAAAPAAAAGGSSPVLRVAAPQHVLGLSSPTSVLLAHGAARAT

SEQ ID NO: 10024 - protein, 628 aa, Zea mays
  VARIANT 73..628: note = Ancestral polymorphism lacks residues 73 to 628
MPDNTQPMQYGIEEEEVPYTDERITSLCSSVQLLLEQGGNFVVSAPNMAHLCHRFTVGCFVATAQMVTQAQPEFIDLGHGPAPSGFVNHRIRSSGQESCCGCSVRAVEAAACQFGFTTKPLASSLPRPSAQPCPAPSDANSQLRCSFRSSELRNRAKHPSLRRVKPSKLPRFIPFPPPIPRLSPQLRPSVSEAPPPTWPPSAPMALPYLEAVLCFMIFMYIFETYLDIRQHRALKLPTLPKPLLGVISDEKFERSRAYSLDKSYFHFVHEAVTILMDTTILYYRVLPWFWKKSGELVTSVGLSAENEIIHTLAFLAGSMVWSQITDLPFSLYSTFVIEARHGFNKQTIWLFIRDMIKGILLSMILGPPIVAAIIYIVQIGGPYLAIYLWGFMFVLALLMMTIYPIVIAPLFNKFTPLPEGVLREKIEKLAASLKFPLKKLFVVDGSTRSSHSNAYMYGFFKNKRIVLYDTLIQQCSNEDEIVSVIAHELGHWKLNHTVYSFVAVQLLMFLQFGGYTLVRSSKDLFGSFGFKDQPVIIGLIIFQHTIIPIQHLLSFCLNLVSRAFEFQADAFAKNLGYAPQLRAALVKLQEENLSAMNTDPWYSAYHYSHPPLVERLQALEDSDSKKED

SEQ ID NO: 10025 - protein, 382 aa, Zea mays
  VARIANT 61..382: note = Derived polymorphism lacks residues 61 to 382
MFDTVMPDFAGVYSFLGSVFDPSTSDHLQKLKEMNPIDVETALLLMRNLSINLTSPDFEDQRKLLSLYSASDGPELGSSRSSALATSAPFIHRISSCRCSLRLGANNSGTQKKNARISRFLFLLAQSRSPLHRASRKKARPLRHLAHQAPATSSGAMATAPYASSLFLASSPISTAPRASAGSFPPSAQPFSMRLRPRPSPAVAAAVQAEHQPAVAATPKPPALPFRVGHGFDLHRLEPNLPLIIGGIDIPHDRGCEAHSDGDVLLHCVVDAILGALGLPDIGQIFPDSDPRWKGADSSVFMREAVKLMHEAGYELGNLDATLILQKPKISPFKETIRLNLCNLLGADPSVVNLKAKTHEKVDSLGENRSIAAHTVVLLMRK

SEQ ID NO: 10026 - protein, 354 aa, Zea mays
  VARIANT 97: note = Ancestral polymorphism is A, Derived polymorphism is G
  VARIANT 53: note = Ancestral polymorphism is H, Derived polymorphism is N
MHKHGQSGMRIRCRLRPSSRRRCRLLGGDTTAFCASLVEGLAHLESTLEVDHHGGGGGVASPGTVSMRWCADAMRLVKRMQREMLAIFRKADVPVAAAAVSSSGAAADWFEHYMQETAALLDFCNAFKAAVSRMHRYCMVVDFAAQVAGRAAGGRDGGAAAFLVVESAGAAPEPCQAQSSSPPAAFREKMADAKAAVAEAERLGRAIIVSGGAGGDAGGMVVVTLVAKITTSILSMFVLQALTAPATVDSGGVRTTIASAVGVVPELEPWRESLSLIHARFPSPAAVAEHEKVATAVRDLVNGKVDGGEQLLRARSGELREGVEMFDCVLDEVFDEVVRGRNEMLGILRDKALT

SEQ ID NO: 10027 - protein, 238 aa, Zea mays
  VARIANT 165: note = Ancestral polymorphism is A, Derived polymorphism is V
  VARIANT 144: note = Ancestral polymorphism is I, Derived polymorphism is V
  VARIANT 51: note = Ancestral polymorphism is D, Derived polymorphism is E
MASSCQNVEIPGKPTETGTALLETATGTIQGFAPLSQIHQHLCAFHFYADDMGRQVEAHHFCAHLNEDVRQCLIFDGPGAGARLIGVEYIVSETVFLTLPDAEKPLWHTHEFEVKGGVLFMPGVPGVVERRDLEKVCKTYGKTIHFWQVDRGDALPLGLPQIMMVLTREGQLRQDLADCVEKKFGVSFQKERENRAYMSGPEHGIHPLANATGKGLRTEIREVDLPASTTAGAGRVFT

SEQ ID NO: 10028 - protein, 220 aa, Zea mays
  VARIANT 102: note = Ancestral polymorphism is A, Derived polymorphism is S
  VARIANT 97: note = Ancestral polymorphism is R, Derived polymorphism is L
  VARIANT 77: note = Ancestral polymorphism is R, Derived polymorphism is W
  VARIANT 16: note = Ancestral polymorphism is R, Derived polymorphism is L
MGFPVGYSDSETLLPRVLLQALLLLGHLHRFLLWAFHAVGLGDLIDLGCNYPPPPPSASTAAAAQEGRDVAAPLRHWRPEFRPVPAVRIEEALPVVRFDELAAAARGDGYGDCDCDCAVCLDGIGGGDEVRRLGNCRHAFHRACLDRWMAHGQRTCPLCRAPLVPGAAAAGDPWAEAPWLDAADYDVLPYPSTPLLMVPTPTLLRPHELLLVAGLGGGFQ

SEQ ID NO: 10029 - protein, 101 aa, Zea mays
  VARIANT 74: note = Ancestral polymorphism is R, Derived polymorphism is C
  VARIANT 50: note = Ancestral polymorphism is A, Derived polymorphism is D
  VARIANT 48: note = Ancestral polymorphism is A, Derived polymorphism is V
  VARIANT 38..101: note = Derived polymorphism lacks residues 38 to 101
  VARIANT 19: note = Ancestral polymorphism is M, Derived polymorphism is L
  VARIANT 17: note = Ancestral polymorphism is R, Derived polymorphism is H
  VARIANT 16: note = Ancestral polymorphism is C, Derived polymorphism is Y
  VARIANT 13: note = Ancestral polymorphism is S, Derived polymorphism is L
  VARIANT 12: note = Ancestral polymorphism is P, Derived polymorphism is S
  VARIANT 11: note = Ancestral polymorphism is A, Derived polymorphism is T
  VARIANT 10: note = Ancestral polymorphism is S, Derived polymorphism is F
  VARIANT 6: note = Ancestral polymorphism is A, Derived polymorphism is T
  VARIANT 2: note = Ancestral polymorphism is S, Derived polymorphism is F
MSSSIALMRSAPSSACRAMVRAPACSTASPMAALSCVEEFINARYILAEAVDTLFTTFIGTKQYKDIIDDVNIRQGTLFYEHTTQDLAPNVDPKQNDTQKG

SEQ ID NO: 10030 - protein, 126 aa, Zea mays
  VARIANT 90: note = Ancestral polymorphism is G, Derived polymorphism is E
  VARIANT 108: note = Ancestral polymorphism is V, Derived polymorphism is I
MEFMNAINLANGSDTDKGKSTYPATIEDSAIEESKSDLESEPSIKPLLAEEAQILLMNENGDQLATLSQNNISIDIKVFTSSFSIKAALENLKISDDSLLSSHPYFWVCDMRNPGGRSFVEVFHAV

SEQ ID NO: 10031 - protein, 293 aa, Zea mays
  VARIANT 52: note = Ancestral polymorphism is G, Derived polymorphism is S
  VARIANT 197: note = Ancestral polymorphism is H, Derived polymorphism is L
MGRGRVELKRIENKINRQVTFSKRRNGLLKKAYELSVLCDAEVALIIFSGRGKLYEFGSAGVTKTLERYQHCCYNAQDSNNGALSESQSWYQEISKLRAKFEALQRTQRHLLGEDLGPLSVKELQQLEKQLECALSQARQRKTQLMMEQVEELRRTIGLPIYICVFRSLYSSAQQIQPFTLMSKVFATFSWTAQERHLGEMNRQLKHKLEAEGCSNYTTLQHAACWPAPGGTIVEHDGATYQVHPPAHSVAMDCEPTLQIGYPHHQFPPPEAANNIPRSAATGENNFMLGWVL

SEQ ID NO: 10032 - protein, 256 aa, Zea mays
  VARIANT 138..256: note = Derived polymorphism lacks residues 138 to 256
  VARIANT 144..256: note = Derived polymorphism lacks residues 144 to 256
MSMSLRPQSVRHHQMDAGAMPSPDGRHFGMPLARSVILAPSSSPLVWPLDRRLHPQDPPPHALRRPGRPAANQKHPWHRIISIHPSVQEPDDDLFLQPDLLAGRSELPVGRVVRVSARADLGGTRRYVGVGDHQGQSQRGDGRRTPAWCDRVLSYDKGLELLGYRRSELALSDHRPVTATYATKVEVFSSRKLQRALTLTDAEVEGGQVCSPFYRSQSALHFIAHGILDHIMVENASVKVALNRITRCFCHGGDSL

SEQ ID NO: 10033 - protein, 93 aa, Zea mays
  VARIANT 2: note = Ancestral polymorphism is R, Derived polymorphism is K
  VARIANT 6: note = Ancestral polymorphism is R, Derived polymorphism is K
  VARIANT 15: note = Ancestral polymorphism is S, Derived polymorphism is L
  VARIANT 20: note = Ancestral polymorphism is G, Derived polymorphism is S
  VARIANT 62: note = Ancestral polymorphism is R, Derived polymorphism is C
  VARIANT 63: note = Ancestral polymorphism is D, Derived polymorphism is G
MRTPMRIRRWRPNSSSRRLGSFVLCRCTCLSRSVARLGYSGTAVISRVQPISVQYGLDITERDQEGRLITLEFDDFYLVNAYVPNSGRGLRRR

SEQ ID NO: 10034 - protein, 160 aa, Zea mays
  VARIANT 86: note = Ancestral polymorphism is D, Derived polymorphism is Y
  VARIANT 9: note = Ancestral polymorphism is Y, Derived polymorphism is C
MMGIPLVCYCLAVPKPVIAFCRLLSAVRDAALLMLAVVGLCRFPPDGAVDAGHQPGEVKARLPAVEYGQLLAEHDEQQQSGDHDCDGDAASSDCIVCLETLEAADEVRRLGNCAHAFHRACIDRWIDLGRATCPLCRSDLLPRAPGWASRLGLGRLTRVR

SEQ ID NO: 10035 - protein, 532 aa, Zea mays
  VARIANT 491..532: note = Derived polymorphism lacks residues 491 to 532
  VARIANT 215: note = Ancestral polymorphism is P, Derived polymorphism is A
MAIRSKAWISLLLALAVALSARAEEEPAAAAEGEAVLTLDVDSFDEAVAKHPFMVVEFYAPWCGHCKKLAPEYENAAKALSKHDPPIVLAKVDANEEKNRPLATKYEIQGFPTIKIFRDQGKNIQEYKGPREADGIVDYLKKQVGPASKEIKSPEDATALIDDKKIYIVGIFAEFSGTEFTNFMEVAEKLRSDYDFGHTLHANHLPRGDAAVERPLVRLLKPFDELVVDSKDFDVAALMKFIDASTIPRVVTFDKNPDNHPYLMKFFQSSAPKAMLFLNFSTGPFDSFKSAYSAAAEEFKDKEIKFLIGDIEASQGAFQYFGLKEDQTPLILIQDGDSKKFLKVHVEADQIVAWLKEYFDGKLTPFRKSEPIPEVNNEPVKVVVADNVHDFVFKSGKNVLIEFYAPWCGHCKKLAPILDEAATTLQSDEEVVIAKMDPEREGDILRQRQDGGRHRRLHQEEQGDRRRRHHHHHPGATGIREGSRRRARQGRAVSIQGVDGCGCVSMGGKPGANVPPTPSFCGTRGREREGRS

SEQ ID NO: 10036 - protein, 420 aa, Zea mays
  VARIANT 133: note = Ancestral polymorphism is W, Derived polymorphism is C
MDQFAASRRFSRNDGADEEQEDVSNSMREISFMPGAASSSAAASASASGSSCAPFRSASADGAGASGSGGDGDGSGDVEKEHMFDKVVTPSDVGKLNRLVIPKQYAEKYFPLDAAGNEKGLLLSFEDSDGKHWRFRYSYWNSSQSYVMTKGWSRFVKEKRLVAGDTVSFSRSRSAAEVVDDARRHRLFIDWKRRGLDTRGPLRFSGLALPMPLASYYGAPHHYSSWGLGGGGGFFMPPSPPATLYEHRLRQGLDFRGMTTYPALTVGRQLLFFGSPRMPPHHAQPQPRPLPLPLHHYTMQPSAAGVTAASASRPLVVDVDSVPAIESPTTAAKRVRLFGVNLDNKPLSVSDGGREASHQSGSGNALLPLPQMPGGWQQRTPTLRLLELPRHGAESSAASSPSSSSSAKREARSAALDLDL

SEQ ID NO: 10037 - protein, 504 aa, Zea mays
  VARIANT 302: note = Ancestral polymorphism is R, Derived polymorphism is I
MDCAPPRGASFDAVGQRWLAVFAFQAAFSAAASALHLTVSPRGRRHPLLGVPTGLLLGFHPFLACAATGMLALALLLSVSPHPRPTPLPRRALATALFAAAGALCVGAAAAMLPEDAGWAAVAGLGFRGAVLGAIFAARYFGRRRWLLQFPVVQRPLFYGLKMGVLPSGERALKLSMQAFFLSLFMIFFLPWQFRTGGSIGSQILTEISIFIVTTGVSLCLEINHHFVQVVHTRRCSFAPPQSTAAADTNPTEFILESLEQSDPRSLIQYLAYQDLCVASECNLEPWRRAAFFEESGETYKRIVTTCLKPLEEFTSKIAESLEDFSSDKPELMLQQSKLFSAFDDFQICAWCARTLTGLTACSRQEDRYGVAQLTGCNAAVMTTLLSALVAIETCLGKKTNPQPVHSLGPENIRWVNFSTGRKGTGVAIACTQKGGLHKKAYTMADVLRTSVYQIVSAFIDDLRANAKPSSLEKNWISEGRKPVYGSQAVLVQKLILFIEYRAV

SEQ ID NO: 10038 - protein, 228 aa, Zea mays
  VARIANT 103: note = Ancestral polymorphism is R, Derived polymorphism is W
  VARIANT 101: note = Ancestral polymorphism is P, Derived polymorphism is L
MEAYLFFHSGRAHEVACAEQEEDIGSPSDSESPSTSTSRESAGSSSELDDDASSSGSDRFEMSALMTQLPLKRGLSRFFDGKSQSFASVAAVGSLEDLAKPARKRLKPSRSCGGALDAHRGRLLSPRRHWTKPAAASGARKTAARSGGLSVLTAVAPRMPPPVRGLRTWPPRFSSLIEPRISLPELDIDARCRRHSYASAHPPVPELIVFSSVSQCVCDPFCNENPQL

SEQ ID NO: 10039 - protein, 103 aa, Zea mays; identical to SEQ ID NO: 2445
  VARIANT 58: note = Ancestral polymorphism is V, Derived polymorphism is E

SEQ ID NO: 10040 - protein, 202 aa, Zea mays
  VARIANT 24: note = Ancestral polymorphism is G, Derived polymorphism is E
  VARIANT 72..202: note = Derived polymorphism lacks residues 72 to 202
  VARIANT 124: note = Ancestral polymorphism is R, Derived polymorphism is C
  VARIANT 140: note = Ancestral polymorphism is G, Derived polymorphism is W
  VARIANT 163..202: note = Derived polymorphism lacks residues 163 to 202
MSCVQKVYYHSGGLRLNPNLYESGKVCLSLLNTWWGKGCEKWGKSSSTMLQVLVSIQGLVLNDRPYFNEPGYKNSAETTGGERCSLAYNQTAFVRSCKTMLYSLRKPPMHFETLVLWHFHEHERAILDACRAYMSGTVVGSSAGTRSNRRYVHDKCFAEFHKSLTLYTEHLRAEFAANRRRVMELETEDEIVPSIAASVKSC

SEQ ID NO: 10041 - protein, 353 aa, Zea mays
  VARIANT 310: note = Ancestral polymorphism is S, Derived polymorphism is F
MAVQAQYPSDLLFHARCASSHSATRRVPSLLLPLPTPRERGEPERRKEMDMPTPPQLAGVSPAAVYFSGGGASGKSRRKRPREECVSLFTVQPQQSTAFASVALFQTQNMVSSSPSPAATALVSTGLRLAFDEQQQQQESKQTDAFGYPSSPSQSGSVSDELAAQVKRHDEEIDRFVREQGEQLRRAVADRLRRHSRAILAKAERSAAARLREKASEAEREARRGAELEERLARLRGEAGAWQAKALSEQAAAATLHAQLQQQAAARASAEEQLAAGGGDAGAAQSSSSAYVDPRRSDRACLGCRLRPASVVLIPCRHLPLCGECFAAGDADAAMACPVCLCVRTGSVEAILC

SEQ ID NO: 10042 - protein, 232 aa, Zea mays
  VARIANT 189: note = Ancestral polymorphism is L, Derived polymorphism is I
  VARIANT 188: note = Ancestral polymorphism is L, Derived polymorphism is Q
  VARIANT 180: note = Ancestral polymorphism is T, Derived polymorphism is I
  VARIANT 135..232: note = Derived polymorphism lacks residues 135 to 232
  VARIANT 123: note = Ancestral polymorphism is L, Derived polymorphism is M
  VARIANT 112: note = Ancestral polymorphism is L, Derived polymorphism is F
  VARIANT 106..232: note = Derived polymorphism lacks residues 106 to 232
  VARIANT 92: note = Ancestral polymorphism is R, Derived polymorphism is G
  VARIANT 46: note = Ancestral polymorphism is L, Derived polymorphism is I
MLRQLGSGAQYLATDINQHAAETTQATLEAHGVHADVIVTDIMSGLDKRLAGMVDVAVVNPPYVPTHVEEVGCRGIAASWAVGLNGRQVIDRILPAVREMLSERGWLYMVALEDNDPSDICHLMSEMGNLREMFQIDAADYMMSICGDDSLKELSSPGKSGSIFYLSQDERFVIKTLRKTELKILLKLLPKYYNHVRAYDNTLITNFFWRPQDYSERRKKGSLCCDEKYVLH

SEQ ID NO: 10043 - protein, 230 aa, Zea mays
  VARIANT 183..230: note = Derived polymorphism lacks residues 183 to 230
  VARIANT 119..230: note = Derived polymorphism lacks residues 119 to 230
  VARIANT 111: note = Ancestral polymorphism is R, Derived polymorphism is C
  VARIANT 104: note = Ancestral polymorphism is G, Derived polymorphism is R
  VARIANT 98: note = Ancestral polymorphism is G, Derived polymorphism is R
  VARIANT 92..230: note = Derived polymorphism lacks residues 92 to 230
  VARIANT 51: note = Ancestral polymorphism is R, Derived polymorphism is C
  VARIANT 38: note = Ancestral polymorphism is G, Derived polymorphism is S
MECSPPRHSWRLPRSPSPRPRRPAVLVGAGDGCGVLRGGGLRGVPAGGEPRRLRHHRRCRPHVRLRRREAGPIAGPHPHLCDYVTTIKRFLQVLWAIGALGSVGTYLVAARPLDEGLVQYVVDHPAVLWFVGPTFVVLTGLVFKEGMLILLLVHPLYERLLEAHVTCHRVTTPVDQLPRIDAQIAMRPLPMASAAGEAHTRGEELDLFMVSVPKLSRLSSSHGLVVVKLI

SEQ ID NO: 10044 - protein, 124 aa, Zea mays
  VARIANT 8: note = Ancestral polymorphism is F, Derived polymorphism is L
MEDYYYYFTSWGTVGSVEPTGFPAHTLPRNPSSASPKTRRASRGDADAGERLHHYYLDACFRCGRHLGGNKDIFMYRGDTPFCSDECRQQQIEDDEAREKKRSRQHAAATATATATKRERERRS

SEQ ID NO: 10045 - protein, 79 aa, Zea mays
  VARIANT 54..79: note = Derived polymorphism lacks residues 54 to 79
  VARIANT 50: note = Ancestral polymorphism is N, Derived polymorphism is K
  VARIANT 49: note = Ancestral polymorphism is A, Derived polymorphism is T
  VARIANT 21: note = Ancestral polymorphism is F, Derived polymorphism is L
  VARIANT 12: note = Ancestral polymorphism is V, Derived polymorphism is I
  VARIANT 8: note = Ancestral polymorphism is P, Derived polymorphism is T
MEGYALPPLSCVNDAYVLLEFVMSSVTCMEETESLKVFELVATWADAIANWDSWEEMEDQGVFNTIKEAINFHQRFEFI

SEQ ID NO: 10046 - protein, 384 aa, Zea mays
  VARIANT 79: note = Ancestral polymorphism is C, Derived polymorphism is Y
MLAAAWRLSQRAVTSPLLGIGRSQIRNPFSTMASLSPAAASPKRLRVYSSAAADGDGAGSGKRVGTHNGSFHCDEALGCFLIRLTSQFAGADVVRTRDSQILDTLDAVLDVGGVYDPSRHRYDHHQKGFSEVFGHGFNTKLSSAGLVYKHFGKEIIAKELGVNEDHEDVHCLYLAIYKSFVEALDAIDNGINQYDTDQPPKYVNNTHLSSRVGRFNLDWTDPDQSLEKENAAFEQAMVLAGSEFMESVRFHVKSWLPARSIVLECLLSKGNIDPSGEIMVLDRFCPWKLHLFELEEELKTDPLTKYVLYQDERSKSWRVQAVAVAPDRFESRKALPEKWRGMRDDELSAETGIPGCVFVHMSGFIGGNKTYEGALEMARAALKF

SEQ ID NO: 10047 - protein, 152 aa, Zea mays
  VARIANT 127: note = Ancestral polymorphism is R, Derived polymorphism is W
  VARIANT 120: note = Ancestral polymorphism is R, Derived polymorphism is W
  VARIANT 114: note = Ancestral polymorphism is G, Derived polymorphism is D
  VARIANT 110: note = Ancestral polymorphism is D, Derived polymorphism is N
  VARIANT 55: note = Ancestral polymorphism is A, Derived polymorphism is S
  VARIANT 52: note = Ancestral polymorphism is D, Derived polymorphism is E
  VARIANT 49..152: note = Derived polymorphism lacks residues 49 to 152
  VARIANT 29: note = Ancestral polymorphism is R, Derived polymorphism is M
  VARIANT 14: note = Ancestral polymorphism is H, Derived polymorphism is Y
  VARIANT 2: note = Ancestral polymorphism is D, Derived polymorphism is N
MDGLPRELCLKIFHLLDHQSLASSPQVCRKWRALTSDDELWRKLFNDRWGADAAAFYAPEGSKSWKDVFAVQDRCDRYGLGVRIIREGKDYYLIYQGEIQRYLGSRQDTDGDCGEDAPRRDAGDEHRQISDRILFFLGDLEKACADAKRVKA

SEQ ID NO: 10048 - protein, 390 aa, Zea mays
  VARIANT 143: note = Ancestral polymorphism is D, Derived polymorphism is Y
MAKPSRQNLTHASVTSLRRFGGQSSLPPSGASPALRLAAAALLLAAAVALPCAVLYRATVETMEPIHVPRVHRPLLPAPPLPPVQVPEDDSDFDPFPTGDLDSEDLKLELVLQEASMDNKTIILTTLNAAWASPGSVIDLFIDSFRRGVGTSSLLRHLVIVAFDFKAYEHCVKIHPYCYALPTKDVDFSEEKRFQTTGYLEMMWKRLDFLRLVLEKGYSFVFSDADIVWFRNPFPHFYTDGDFQIACDHYVGNATDLRNIANGGFNYVKSNDQSIEFYKFWYSSRFRYPGYHDQDVFNFIKHDRYTTDIGLTIKFLSTTYFGGICEPSRDLNKVCTMHANCCIGLQSKIHDLRIMMEDWSNYMSMPPSLKQFRALSWRVPQNCSLSLLSL

SEQ ID NO: 10049 - protein, 562 aa, Zea mays
  VARIANT 355..562: note = Derived polymorphism lacks residues 355 to 562
  VARIANT 141..562: note = Derived polymorphism lacks residues 141 to 562
  VARIANT 110: note = Ancestral polymorphism is G, Derived polymorphism is D
MGNTCGVTLRSKYFASFRGSASQRRDAPGYSPVATSAAADEPSPHGNGKRATRPSQAAAAADGSAPPPAPGMRRGVPAPAELTANVLGHPTPSLRDHYALGRKLGQGQFGTTYLCTDLATGVDYACKSIAKRKLITKEDVEDVRREIQIMHHLAGHRNVVAIKGAYEDQLYVHIVMEFCAGGELFDRIIQRGHYSERKAAELTRIIVGVVEACHSLGVMHRDLKPENFLLSNKDDDMSLKAIDFGLSVFFKPGQIFTDVVGSPYYVAPEVLRKRYGPEADVWTAGVILYILLCGVPPFWAETQQGIFDAVLKGVIDFDLDPWPVISESAKDLIRRMLNPIPSERLTAHEVLCHPWICDHGVAPDRPLDPAVLSRIKQFSAMNKLKKMALQVIAESLSEEEIAGLKEMFMAMDTDNSGAITYDELKEGLRKYGSTLKDTEIRDLMEAADIDNSGTIDYIEFIAATLHLNKLEREEHLVAAFSYFDKDGSGYITVDELQQACKEHNMPAAFLDDVIKEADQDNDGRIDYGEFVAMMTKGNMGVGRRTMRNSLNISMRDTPAGAL

SEQ ID NO: 10050 - protein, 165 aa, Zea mays
  VARIANT 5: note = Ancestral polymorphism is S, Derived polymorphism is P
  VARIANT 12: note = Ancestral polymorphism is L, Derived polymorphism is F
MKPMSSVLFVLLILPMCSRSSSPLQDTCRSFAAGHPSIGYEYCIRVFQADKDSAEATDARGLAAIAARIAEAKANARRDRLSVCAEAYSDAVDQLGQAEEELARGAEGGAAGIDDAVTQLSAALDAPETCEDAFGEAADTSPLAGEDAEFKKLATVALAVAASLI

SEQ ID NO: 10051 - protein, 960 aa, Zea mays
  VARIANT 557: note = Ancestral polymorphism is R, Derived polymorphism is C
  VARIANT 528..960: note = Derived polymorphism lacks residues 528 to 960
  VARIANT 219: note = Ancestral polymorphism is V, Derived polymorphism is E
MDVRIYGNYFDMDPLNPNSYRKRNYNNACYAPSTLSHAEARRIRKRVLDQRKLASAGSSMPSHHTPTLQCGHFDPDFVKTIKASYHDRSYYGRPSYQCIHCSALFWYNERIRSSVGTRSVIYNNCCKGGKVRIPAYRPRPEPLLSLARFDGDVVSKTFMQNIRQYNCLFAFTSMGAHIDRSLNDGRGPPVFKVCGQIHHRIGSLLPMTDQPPKFLQLYVYDTSHEVNNRIRSLSSDDAPDSPIQPQIVHELLQMLDTHNPFAKKFRIAKERLTEHADEEFIIRIIGAKEGDPVQYDMPTTDDLAMLLIGDFSLETFKRDIIIETRNSELKRISALHPAYMALQYPLLFPYGERGFQIGVMYSGIQNRQANSRVHMTMQDYYCYQFHYKPGQPNQFLSYGILSNQAKVDARACIDENRLTYILNNQDKLRIENLQGISDAVSKGCINSEEMGKTIVLPASHIGGRRYMIQNYHDSIVICRVHGPPDFFVTFTCNAKWPEIIESLYHCGQKNSDAPDIAIRIFHMKLQELLQDIKSGNLFGPCKAELDPKSTNAAIRVRIIRKWEFRGATNDGPLRHVNLILADEQITFIVLRCNTSTKVTLWGHQASSFSVDNIYDDNDNKPVVVLFVGCLAKRFKGEAYLSATAACTWYFNPDIPEAQVYYSKLLNTKLQMIRPQATEKELQASQTLNIEDKTIEELLQLDPDMFPEHGFKCTVTISRLVQDGRWWFPSCIKCNKSSSQTSTGYQCTSCNGTETGFRYKLNFIATDGTSEAEFFCFDSIAKRIVGKSCQTLFSTSDVSRGPPPDLAAIISLKFTFVVTINMSAFSVTNRVFSILSVLTSHGRQASIPCATQNLSQQQMLTQDNIIDVTTTQESPATSIAKLSTSTKQESVPRRRLTYSEMLQDTNVDEQVSAELNEDSLASPPKKYVSTKKLKPNHKHYLNSAGTMTRIVTFGRIMTFGA

SEQ ID NO: 10052 - protein, 156 aa, Zea mays
  VARIANT 74: note = Ancestral polymorphism is H, Derived polymorphism is L
MLQVLVSIQGLVLNDRPYFNEPGYKNSAETTGGERCSLAYNQTAFVRSCKTMLYSLRKPPMHFETLVLWHFHEHERAILDACRAYMSGTVVGSSAGTGSNRRYVHDKCFAEFHKSLTLYTEHLRAEFAANRRRVIELETNRAVTLMVEQQNLAHNK

SEQ ID NO: 10053 - protein, 251 aa, Zea mays
  VARIANT 61: note = Ancestral polymorphism is M, Derived polymorphism is T
MAIDHATPLGLKRRGAMGGGGECDDGSDTRRWPPWLRPLLSASFFVQCRVHADAHKSECNMYCLDCMGGALCALCLAARHRDHHSIQIRRSSYHDVIRVSEIQKVLDIAGVQTYIINSARVVFLNERPQPRPGKGVTNTCEVCERSLLDCFRFCSLGCKIVGTARGYRPGKKKHGGGGGNKKRASPAPALKDVRSDSEDSCTSTSGASSDKSSVVQSSPPPPTSASHRPPGNKRRKGIPHRSPLGSLIVEL

SEQ ID NO: 10054 - protein, 181 aa, Zea mays
  VARIANT 44: note = Ancestral polymorphism is S, Derived polymorphism is R
  VARIANT 46: note = Ancestral polymorphism is E, Derived polymorphism is K
  VARIANT 53..181: note = Derived polymorphism lacks residues 53 to 181
  VARIANT 91: note = Ancestral polymorphism is R, Derived polymorphism is Q
  VARIANT 100: note = Ancestral polymorphism is R, Derived polymorphism is Q
  VARIANT 157: note = Ancestral polymorphism is R, Derived polymorphism is W
MAERWRSRVWRDPNLDEDASPPSRQPHHSGGDEEDDELGNEDLSLEIIARAQRKRRGESAGGVPMFADLLSVSSTDEEGAVVELDEADETRRKQKKKQRRKQRKKHQKETTEAAAAAAVKVDDKAGCSTEEGPIGTAQSMLTENGADAPASDNMVLRKLLNQLAGLQPNGNGYTFRKVSLI

SEQ ID NO: 10055 - protein, 427 aa, Zea mays
  VARIANT 167: note = Ancestral polymorphism is P, Derived polymorphism is L
MRTKHLIPNNAAGLTYAARDYSAGEDHGGGDGVGGDPFEGFPDAVLGLIVSKLPLRSAVAASAISRRWRGAVAAAPALDLDFAAAFPAAPRRRAAFAAAVTAALGSSAPPHRHPLRRLRLALEGFFDQAFAASAADHLASWLTAAAARGVERLELHLPRSRLAVLPPSLLACTSLTSLTLRLDRYALPLPSFTTFTRLSRLHIACVSLNAEDDFFGDLFLHCKEVRYLILEKCRVGALRLTGPSRLCSLAITDCSWTEESALAVFEMPELRILHYSGAIAARHIIDGEVSLEDVLLNIEKPLVKPREAALRELLTLVGNARRLALSPWCIEPSQGKWRRNSGDGGSHGVLGGKRVSVKHLKVVRMKYIDESRSGFKLVKVLLKNASALETMTIVPSMDGLEQAKFRRRVLKLRKSSQNASVQFCTAG

SEQ ID NO: 10056 - protein, 296 aa, Zea mays
  VARIANT 104..296: note = Derived polymorphism lacks residues 104 to 296
  VARIANT 90: note = Ancestral polymorphism is F, Derived polymorphism is S
  VARIANT 35..296: note = Derived polymorphism lacks residues 35 to 296
  VARIANT 30: note = Ancestral polymorphism is T, Derived polymorphism is I
MVFHRVDLVSFLPHDFVAQQVDHWEIMVRTVTRPQPTTHDWGIVLVQPLLEHEVNFHIFDDIIREYLVGFRNVQVRSIQRSHLGQALVRFRFASDRDNSVAMVQQAQPPEPVVNANNVEEQFSYQLSDLEDLPSDESVGFFNDIIIPQEIHFPQHLEQSIPDPAYEDYLARKCLNSWADIFPCNSDLVTVPKVWAAFFMGLLLRSNSFDWAKKFLTSGAISALVEPSMETVSLKIPPKCLPPPSQELHVEPQSPTAAEAVSKHKQPIMVELKLEGVPDFGRRLGASRTAQGLEKCS

SEQ ID NO: 10057 - protein, 372 aa, Zea mays
  VARIANT 300..372: note = Derived polymorphism lacks residues 300 to 372
MQSVAEMASNAYRKPSVSPSATMLKALPMRFLASPEPGGWSRRLPRRSLRSVSAALMTNPAYFEVGRFLGGYGFMNITSYSSSQFGEPSNVAGIQDLGLGYSPEEIERLRVQDIGEGEVTIRLYEGRVVQGPFRGTRAVFKVYPGARADASEADLMALNELRTHAFLQSDASDICENIQFLLGAFETATGEQWLAFRDDGRYSAADYANVTSARQLKEKSGGTPFWNPFDRAYKLELRRYFVLKLLNGAMSGLVHMHNHDRLHQSLGPSSVILKYSSIGAGVLSDGLWRRASAAGASTPLEKRAFGIADDMQMISHDIQTHMLINFQISYRYCLADDQLSEAAMLNPDYRKRPIAEAVLNHRFITGAVLRNY

SEQ ID NO: 10058 - protein, 340 aa, Zea mays
  VARIANT 74: note = Ancestral polymorphism is A, Derived polymorphism is D
MGRGRAPCCAKVGLNRGSWTPQEDMRLIAYIQKHGHTNWRALPKQAGLLRCGKSCRLRWINYLRPDLKRGNFTDEEEEAIIRLHGLLGNKWSKIAACLPGRTDNEIKNVWNTHLKKKVAQREKKKAGAGSGDAGTPATAPLSSATSSTTTHNSSGGSDSGDQCGTSREPDATDVCPLQLEDMDVSDMLVDGAPPAAQPMPSPSSSSSLTTCVGGVEELIELPVIDIEPEIWSIIDGESAVARHGGDAAAPCTGTGTAVSTSEAEEAAANDWWLENLEKELGLWGYAEEDTQAHPDLLDHYTGLSPLCALEGDPVSTYFQTGPAAAEPELLVVVEPSAVLL

SEQ ID NO: 10059 - protein, 769 aa, Zea mays
  VARIANT 600..769: note = Derived polymorphism lacks residues 600 to 769
  VARIANT 539..769: note = Derived polymorphism lacks residues 539 to 769
  VARIANT 123..769: note = Derived polymorphism lacks residues 123 to 769
MGEIGTDHRGLAEAEAGVGGKEEGIVLGGHEEEEETSPVEQVRLTVPSTDDPSLPVWTFRMWSIGLLSCALMSFLNQFFSYRTEPLIVTQITVQVASLPLGHFMARALPRARFRAPALLGGGEWSLNPGPFNVKEHVLISIFANAGFAFGNGSAYAVAIIDIIRAFYHRHISFFTAWLLVVTTQVLGYGWAGLLRKYVVQPAHMWWPGTLVQVSLFRALHEKDESAKASRQISRSKFFLVVLACSFAWYAVPGYLFPTLTSISWVCWVFSRSVTAQQLGSGMSGLGLGAFTLDWSTVSSFLFSPLISPFFATANIFFGYVFFVYVIMPAAYWGFDLYSAKTFPIFSSHLFMSNGSSYDVQSIVNNRFELDLDAYGKNGKVSLSVFFALSYGFSFATIAATITHVGLFYGKEIYYRFRSSQKEKPDIHTKLMERYSEIPAWWFYSLMALSIVVSLLLCTVLKREVQLPWWGLIFACGMAFVFTLPISIITATTNQASNNRLASHTPGLNVITEYAMGLIMPGSPIAVVCFKVYGYMSMAQAVAFLSDFKLGHYMKIPPKSMFLVQFVGTIVAGTVNIGTAWWLLGSIDGICSDSLPPDSPWTCPNDRVFFDASVIWGLVGPRRIFGPDGNYGALNWFFLIGAAGPVIVYALHRTFPGQRWIPLINLPVLFGATAYMPPATAVNYNSWLLVGTVFNFFVFRYRKKWWTRYNYILSAALDAGVAFMGVVLYFSLTMQNKSIDWWGTAGEHCPLARCPTAKGVDLGDGVCPVF

SEQ ID NO: 10060 - protein, 245 aa, Zea mays
  VARIANT 5..245: note = Derived polymorphism lacks residues 5 to 245
  VARIANT 165: note = Ancestral polymorphism is Y, Derived polymorphism is F
  VARIANT 217: note = Ancestral polymorphism is K, Derived polymorphism is N
MKMHEVEEPPAEITRDAHPAHALRLVATDDGAPFRCDGCKEPGSGQGRRYRCGHGCDFDLHVACALAGPTLRHPLFGEGLEFQLLPEAPPPVDKTFCDACGLRAPGLVYHCFDRDLDLHPTCAALKPESAFPGGHLAQLGWEAAEHRCVACDAAAAAAGKRFWAYRWAYGGTHGYLHVACMKKIAFQSWEQAYQASVVGGGLVEASVPTMTAVLHRKRTDEITGGVKIIDTGIRGQYLSSSTWGT

SEQ ID NO: 10061 - protein, 463 aa, Zea mays
  VARIANT 182: note = Ancestral polymorphism is A, Derived polymorphism is V
MAVKARVSPTGLLAAATLLARPAAGSGFVSSDYYLHGFFSASIKLPRGYTAGVVVAFYVSVPSQSMPQRYCRWGGQWRVQTNVYGNGSTSHGREERYLLPFDPTLEAHSYSILWAPTHIIFYVDDTPIREVVRHPDMGGDFPAKPMAVYATIWDGSAWATDGGKYKVNYKHAPFASDFSGLVIVGSRADDPVLRDQEDLLGLVTADYYAAVMTPRERAAMRAFRARRMTYTVCYDAVRYADGPFPECDNSDEERESFSAWGESKTVVVRPRARGRRPRGRKVGAGARRHGTFYVDDTPIREVVRHPDMGGDFPAKPMAVYATIWDGSAWATDGGKYKVNYKHAPFASDFSGLVIVGSRADDPVLRDQEDLLGLVTADYYAAVMTPRERAAMRAFRARRMTYTVCYDAVRYADGPFPECDNSDEERESFSAWGESKTVVVRPRARGRRPRGRKVGAGARRHGTC

SEQ ID NO: 10062 - protein, 190 aa, Zea mays
  VARIANT 27: note = Ancestral polymorphism is S, Derived polymorphism is G
MGHWKEGWLKGYWKGNLPQVIRIIPYSAVQLFSYEVYKKIFRRKDGELSVFGRLAAGACAGMTSTLVTYPLDVLRLRLAVQSGHITLSQVALNMLREEGLASFYGGLGPSLVAIAPYIAVNFCVFDLMKKSVPEKYKNRPETSLATALLSATFATLMCYPLDTVRRQMQMKGTPYNTVFDAIPGSYASIA

SEQ ID NO: 10063 - protein, 445 aa, Zea mays
  VARIANT 371: note = Ancestral polymorphism is R, Derived polymorphism is T
  VARIANT 289: note = Ancestral polymorphism is T, Derived polymorphism is I
MARPQRLAPPSDLRTWGPNSPCASDVDEPAADDDVASSLLEMGALVLSTADPLTKARRTHAAFSRWAIGLPIGQATAPYHPKRKDRLVERAPYARPSSPAEEPEKKTVKPASALASWLGLGSTEADRLTIATWSAPPSSPRSCETWVYPVAARPLAPSTSKPRKYTPERRQKFIGGQRSNHEKIHTATMKILTYQLCNSVAFVHDPKVLHRELKLHILLKDHKTMVLKIVEYVEDIYRFYKSTEDTCLPLSSYMSSQAEISERMRAILIDWIIEVQYRLTLMPETLYLTVYIIDQYLSMESVPRKELQLVGISAMLIASKYEEIWAPLVKDLMCLCDNAFTRDQVLTKEKAILDRLHWNLTVPIMYMFIVRYLKAAMCDTELENMAFFYSELALVHYAMLVYPPSVTAAAAVYAARSTLGMNPPWTDILEHHTGIVEPQLLYVLR

SEQ ID NO: 10064 - protein, 375 aa, Zea mays
  VARIANT 28: note = Ancestral polymorphism is W, Derived polymorphism is L
  VARIANT 118: note = Ancestral polymorphism is P, Derived polymorphism is L
  VARIANT 130: note = Ancestral polymorphism is P, Derived polymorphism is R
MELFPAHPDLQLHISPPPATKPTELGFWKRALDTTPTATTTAAAATTAPSLAFASSAPTAVGHHAAAGAHHNDHHHQVPTTSSHSHLVGLPFLHHTQPILLPEGRGGGLRRDLAAARPIRGIPVYNASQPLLHFLQSHTHCHDAIVGAAGPRLSPKAALRLAAKRGARAPRMRWTTSLHARFVHAVELLGGHERATPKSVLELMDVKDLTLAHVKSHLQMYRTIKTTDHKPANSASSYGMYGQAAAAKPVIDIPDPDDDSLFDLITTSAGSDQSSSSAQHSNPDGGGGNEHGSSMCALWCSSSTSISRGGWFHDRPRDDDAATPGPGDDIKSFEDVQSHSLLDDVADLNSSPFQVVAGMFGSDKKPNLDFTLGRI

SEQ ID NO: 10065 - protein, 634 aa, Zea mays
  VARIANT 139: note = Ancestral polymorphism is G, Derived polymorphism is C
MITVAAPEAQPQVAAAAAVAAPEETVFRSKLPDIDIPTHLPLHDYCFSRAAEAAGAPCLIAAATGRTYTYAETRLLCRKAAACLHGLGVAQGDRVMLLLQNSVEFVLAFFGASFLGAVTTAANPFCTPQEIHKQFSASGAKVVVTHSAYVAKLRHGAFPRIGTVSGGGVDGNALLTVLTIDGDAADTPEGCLAFWELLTSGDGDALPEVSISPDDPVALPFSSGTTGLPKGVVLTHGGQVTNVAQQVDGANPNLYMREGDVALCVLPLFHIFSLNSVLLCAMRAGAAVMLMPKFEMGAMLEGIQRWRVTVAAVVPPLVLALAKNPALENQIATRSPAWVPGTENRQPVTTPGPLVPPTYRYTTLPTTQIVFVPCGRPDTPLHPRSRRQTALFLRDFGGAGPGGSVTVTVTRDADCLARAVPVQGYGMTEAGPVLSMCPAFAKEPAPAKPGSCGTVVRNAELKVVDPDTGLSLGRNLPGEICIRGPQIMKGYLNDPEATARTIDVHGWLHTGDIGYVDDDDEVFIVDRVKELIKFKGFQVPPAELEALLVAHPSIADAAVVPQKDEAAGEVPVAFVVRAADADIAEDAIKEFISKQVVFYKRLHKVYFTPSIPKSASGKILRRELRAKLAAAATA

SEQ ID NO: 10066 - protein, 96 aa, Zea mays
  VARIANT 31: note = Ancestral polymorphism is R, Derived polymorphism is M
  VARIANT 38: note = Ancestral polymorphism is N, Derived polymorphism is K
  VARIANT 40: note = Ancestral polymorphism is Q, Derived polymorphism is K
  VARIANT 42: note = Ancestral polymorphism is L, Derived polymorphism is I
  VARIANT 48: note = Ancestral polymorphism is I, Derived polymorphism is T
  VARIANT 64..96: note = Derived polymorphism lacks residues 64 to 96
MEAFAALGKIQRVSEGVLLQSLEKKVMKTDRMGVSIINWQKLPPKLKIPCAAGIFPMELKMNLRGEKNCLQIIRSACKVFYLVNREGLGLVDGHDE

SEQ ID NO: 10067 - protein, 320 aa, Zea mays
  VARIANT 188: note = Ancestral polymorphism is Q, Derived polymorphism is K
MQRRPEFSFPGSPARGLPPRPPANPMAPRYGDEEVRWLQASPQASPEMDYSSGGSGTPSPQLWAHHHQLHRQYPASAGSSPSRAQAIAGYRREMLDLVRGLPESAYELSLRDIVEHPSPPSPPHAPTNPLPPPTTAGPRASRAVPVPAQEKGESAGARKDAVAAADAEDGGGSRKQGGSKGKKQGRKQRTMRKQRSRSLDRSVSLDTGLLIKLFLPLSLGGKKKVSPKPDAAKDSKKKKRKEKKEAAVQEEEWWTKSEFSEAGNSSRTSSSNSNSSAASLRNANGAANPRAPDRSWSRKRTGCYAFFRANKGKKNEANQD

SEQ ID NO: 10068 - protein, 385 aa, Zea mays
  VARIANT 264: note = Ancestral polymorphism is R, Derived polymorphism is S
  VARIANT 135: note = Ancestral polymorphism is G, Derived polymorphism is S
  VARIANT 60: note = Ancestral polymorphism is N, Derived polymorphism is Y
  VARIANT 24: note = Ancestral polymorphism is V, Derived polymorphism is I
MARWSSPKDPALEAALRRNRRWVVNNQIKRLLLRFPSRTAPVRFLQSRFKTLDLMGRAANWLSKYPSCFEVFSADDGGGEQEPHFGFTKRMAALVHAEEAAVAASEPAMADRLARVLMLARGRRLQVSKLAALRGPLGLPDDYLLRLVPANTDLFRLTNPYPHRRNAAELELVRWAPSLAVSAVEAASDSTPRFSCSLPASWVKSHAKMEDFNASTPYISPYSEWALPGTDAEAEKRSVALVHELLSLTLWRKMSILKLEHFRREFGLPEDTARMLLRHPCLFYVSNRYKIHTVVLREGYEGSELREKDPVVLAKDRLGELMQEGLHEYNQRRRGMNIEKKRRRGEVEVKKEKEVEDEEAARLDSAEKREERRRFYKVLFGDGNR

SEQ ID NO: 10069 - protein, 565 aa, Zea mays
  VARIANT 50..565: note = Derived polymorphism lacks residues 50 to 565
  VARIANT 63..565: note = Ancestral polymorphism lacks residues 63 to 565
  VARIANT 334..565: note = Derived polymorphism lacks residues 334 to 565
  VARIANT 337..565: note = Derived polymorphism lacks residues 337 to 565
  VARIANT 475..565: note = Derived polymorphism lacks residues 475 to 565
MTTNMDCGIYTFRAHGMMCHNVRSFGELGWHANIPKSNVSMDEVDAYLDQHRRSDANNDDTERPSHLCVSVRDYYCYRFQIRPSIFNPILHGKRLFQQFAVDTYIKIESSRLDFIRKNQDKLRADLYKGLVDSLHEGENRADKIGKRTVLSTSFIGGPRDMRHRYMDAMALVRKFGKPDIFLTMTCNPNWDEITRELLPMQSPRDCPDLVVRIFHAKLEELKKRLTKQNILGKRKYKLTCHEQYDLLISAEIPDKKKYPQLYKMLHKTKRDSKVAKKASLIIWDEASMTKRQAIEALDNSMRDIMGRSVLPFGGKTVVFRGDFRQVLPVVRKGSRAQIVAASLRSSYLWESMCHLKLVQNMRAQSDPWFAEYLLRLGDGTKESNNDGDVRLPDEVCVPYTGNDRDLDRLIDDIYPNLNENMSNTSYITSRAILSTWNDWVDMINMRMIDRFQGEQMMYHSFDTAVDDPNNYYPSEFLNTLTPNRLPPHVLKLKVGCPIMLLRNVDPANGLCNGTRLVVHGFQKTVLMLKLSWASMLECEFSCLVYPYAPLMMRCSLSSLKGSSFR

SEQ ID NO: 10070 - protein, 631 aa, Zea mays
  VARIANT 85: note = Ancestral polymorphism is R, Derived polymorphism is C
MYHRNPGRRPSEHLVSKPRRHEALQRRCGPGTAAYSSALEQLKSGKNAGASPRIQSAGTSISYRGLGNRILTAASAFLYALLTDCVLIVDSSNEMGELFCEPFPDTTWLLPWRSFPLWNFSFDTRPQRRNRHDIHLPFPRARIGVMRYFGFIIVATEVEEGNVYVGNTAEPSYEVVASSDYSAQVHTNDTDEHELNIESEDSKVSVGNVAKQSHDVVGVGIDCIFIPVKVSTEAGLGPQPDVILLTSLDVPNESSQISSDAIMLEQNKQDALDTLIRISQHKKPKKLNVARVVSEDYKCTPEDVQLIEYIKTLPGKQVVVNIDNAWLNRNDMECLFHGDIQLSGEALSAYIHCIRDEEHLLHREGGKVFLENTFISSLLKRDGDPKVFIPMNIENFHWYLTVLNAKKVRFKLPAILWDSRLNTKKRHQNLDHNVDEDGESSSDVQIIDTPYCFNMAVRMIACNDALFLLEDKYHYMDLQFCILLPYSFLGHFTLYVLNMDTRSIYIMDSMPIPSWFKGDHPSMHYIHNIHYIANNMNAAMELANPTWKDDIYMWHRIVPTWVARTLNWDLSGFLVINFMHDWNGIRLSCICTNGNVLRTKFLVELLKYKDNESKDNIPEEIQEIIRHIRQI

SEQ ID NO: 10071 - protein, 166 aa, Zea mays
  VARIANT 116: note = Ancestral polymorphism is T, Derived polymorphism is I
MPPKLDPSQVVEVFVRVTGGEVGAASSLAPKIGPLGLSPKKIGEDIAKETAKDWKGLRVTVKLTVQNRQAKVSVVPSAAALVIKALKEPERDRKKVKNIKHSGNISLDDVIEIARTMRHRSMAKELAGTVKEILGTCVSVGCTVDGKDPKDLQQEIDDGEVEIPSA

SEQ ID NO: 10072 - protein, 828 aa, Zea mays
  VARIANT 681..828: note = Derived polymorphism lacks residues 681 to 828
  VARIANT 530..828: note = Derived polymorphism lacks residues 530 to 828
MEAATAMDFHTLSRRELQALCKRNGVRANMTNAAMAEALQGLTSVDGVDEIGTTLCLPTATPGRSAMKSAAKMVAVEEQQHGSPLPRGRRVSVKSPEAIRMEVGGEDEMKENVKTPGVVLRSTRRGIRATPAPLPTPVPASSARATARRTAVRRTGEVAPTPATRRRAASRKAAGAVEVDRPAEDVSEDKTSKMTRALDQEAEVVAVASKEEKGQQDEPRAALSDVKCDDPKGEEKVQQEEPKAVVLDVKCDGPEQEEVVQFLEGDNKVEEVEEGEEVDSSDATTGSAAVLGKSCNDPKVEEVVVVMEEQFTEPHEGIVKEQEPISVERSASVEVMDDSPILGVIEKKQDASVEDCEDLAEFSPAREMTDEAIPVTEDKEVAISEESVTEDNEVAISEEAVTEDKEVAISEEAVTEDKEVAISEEAVTEDKEVAINEEAVTEDKEVAISEEAIEEDGFANTVETDPTPKEILLTEGEIILIEGKEGAANEMPQAGETSEEDEEDYLAELKEGAADQVLQAELADNETSKEDEDDLSEKREGTAAKMLQGELTDDETSEEDDLDEDEEWVSDDDENTEEDYLAELKEGVADQVLQAELANNETGEEDEDALSEEREGTAAKMLQGEPTDDETSEEDDLDEDEGWASDDDENTEEIGSTDETDEDPDETNEESYTSDAVQMMQGSGIAEDANEDASTEDDDFSGDLPPEFENIMIFSGAETESDIAPPVLEENKDAVVSATKTAKSLDDSALKTGQEEEGPEEVDNVVKSLDEEVESKEMQKQQPQDYNSMSLRKLKATHKKYLIAAKEEVTEGKRLPLEEVDENACIDH

SEQ ID NO: 10073 - protein, 877 aa, Zea mays
  VARIANT 675..877: note = Derived polymorphism lacks residues 675 to 877
MKQSPASTAVSDSGMLGRRLALLPAATVGRGGRTTRARMTMGCVLLDHVAPRLAVASATLVGAREVIAAAAAAGAGGSGAVHGAVASTLAQVAVTAVAIASGACLSTKVDFLWPRIDQLPDTLIFEGVEVTGYQIFEDPKVQKAIEFASTAHLGQFRRTGDPYITHCIHTGKILAALVPSTGERAVNTIVAGILHDVVCDTSESLKSIEEQFGADVASLVSGVSKLSYINQLLRRHRQKNTGGSTLTSEEANNLRVMLLGMVDDPRVVLIKLADRLHNMRTIYALPVPKAEAVAQETLAVWCSLASRLGVWALKAELEDLCFAVLQPQIFKKIQSELTLMWNRTGKSKNMRRSSIRNELLASMKDGNMVSINDLFSSCNQERPNMKDLLQAVLPFDIFLDRKRRSYFLSNLNSNSGESIPNPKIVDDAAVALASLASCEEELERELLISTSYIPGMEVTLSSRLKSLYSIYCKMKRKEVGIRQVYDARALRVIVGDKNGAMHGSAVRSCYSILDIVHRLWTPIDGEFDDYIINPKGSGYQSLHTAVQASDSSPLEVQIRTQRMHEYAEHGLAAHWLYKESKVEYRSSMSKRIRQSTSYSSSSSEDESSVQDDIPSKYSSMKVGHPVLRIEGSHLLAAVVVSIDKGGKELIVAVSFSLEASEAVAELRSSFQLKRWEAYARLHKKVSEKWWCAPGHGDWSTNLERYTLCQDGIFHKQDQFGRLLPTFIQIIDLAEEEEEEYWMVVSAIFEGKETCSLPSESSYADKSSSEPPSSTPLSDPINNKVHLLRTMLQWEEQVRRGASLAEKSLSASICTKAILREVAIIFWPNGKIMRMSTGSTAADAARRMGVEGKLLWVNGQLVLPQTELKDGDIVEVRV

SEQ ID NO: 10074 - protein, 194 aa, Zea mays
  VARIANT 98..194: note = Derived polymorphism lacks residues 98 to 194
MGQAFRKLFDAFLGTSEMRVVMLGLDAAGKTTILYKLQIGEVLSTVPTIGFNVEKVQYKNVMFTVWDVGGQEKLRPLWRHYFNNTDGLIYVVDSLDRERIGKAKAEFQAIINDPFMLNSVILVFANKQDMKGAMTPMEVCEGLGLYDLKNRTWHIQGSCALKGDGLYEGLDWMASTLKELQASGRLPSGGTSLF

SEQ ID NO: 10075 - protein, 532 aa, Zea mays
  VARIANT 11: note = Ancestral polymorphism is L, Derived polymorphism is P
  VARIANT 19: note = Ancestral polymorphism is L, Derived polymorphism is P
  VARIANT 35..532: note = Derived polymorphism lacks residues 35 to 532
  VARIANT 38: note = Ancestral polymorphism is D, Derived polymorphism is N
  VARIANT 41: note = Ancestral polymorphism is V, Derived polymorphism is D
  VARIANT 56: note = Ancestral polymorphism is P, Derived polymorphism is H
  VARIANT 101..532: note = Derived polymorphism lacks residues 101 to 532
  VARIANT 121..532: note = Derived polymorphism lacks residues 121 to 532
  VARIANT 172: note = Ancestral polymorphism is C, Derived polymorphism is Y
  VARIANT 173: note = Ancestral polymorphism is G, Derived polymorphism is R
  VARIANT 186..532: note = Derived polymorphism lacks residues 186 to 532
  VARIANT 212: note = Ancestral polymorphism is S, Derived polymorphism is F
  VARIANT 213: note = Ancestral polymorphism is D, Derived polymorphism is Y
  VARIANT 217: note = Ancestral polymorphism is I, Derived polymorphism is V
  VARIANT 302: note = Ancestral polymorphism is L, Derived polymorphism is Q
  VARIANT 401: note = Ancestral polymorphism is A, Derived polymorphism is V
MVGKKRGIISPLDHLAGLLEVRVVRGVDLAIRDLRSSDPYVVLRIGKAQVRFSSPPFWFALLLVGFIGKRSGELKSVAPLRQPRATAPNRRPGSRRGRSRWRLLWWLRGRERERHEGRWPWRRRELRQPSYATSDGADAAAIPVASRKMVQSLKGILANRSEGEIYATLCDCGMDPDIAVERLISQDPCTTKVEPYKARVVACNRPHRGHISDFLVIVQKHLLLGHCKELRGSPLVRFIEAFGTAFSRTTFCVPISEEGTTRRRGPWGGRSLPWLHAQRDFLRAMMLVAERAFQSPDALLVLEKVLAKFLVMYPNYASALDVGRLHDDQYPHLDKHIMEGAAAMETAAAAAAANGKACCHAAKGPGYATPLEAMEKGPREKLVYVTCVYNGTGINKPDYLVTVDLDPSSPTYSKVIHRLPVIHIGDELHHSGWNSCSSSHGDPSAKRRFLILPSLLSGRVYVVDTATDPRAPSLHKVVESEDIAENTGLGFPHTSHCLASGDIMISCLGDKEGNAAGNGFLLLDSEFNVKGR

SEQ ID NO: 10076 - protein, 466 aa, Zea mays
  VARIANT 66: note = Ancestral polymorphism is R, Derived polymorphism is W
MCDYFLQRMEDDRHHHHQAGGDLTDVVRAGGAMHPAAVAELSSTATTGWQLPAEPAGPPGLFPPARSSSSSDGGAFAGLSGPFASDFRADSAGVDPSPADFFDFEAPAVGGGRGGMVEGGGPPQMPALSPREVRPYSVMMGGDTVKIGVPAMMPGGLPVGPPCAFDAIAGMQMPSPHCGGIKRRKNQARKVVCIPAPAASAGGRTTGEVVPSDLWAWRKYGQKPIKGSPYPRGYYRCSSSKGCPARKQVERSRTDPSLLVITYNSEHNHPWPTQRNALAGSTRSHHAKSSKNKYSSHSLPQTPNLKAEPEHHQASGAVPSATAATAATATSTTTTTSTTSNSTPPPPPTMAVKEEAIMVGSEMEKVIDHHDASGWLDHGDLMQQMFSQSYYRPMIPEAAGGGLHADDFFADLAELESDPMSLIFPAGGEPGKENKSLDADPLFNMLDWGATNVAATSSFEQDESGW

SEQ ID NO: 10077 - protein, 330 aa, Zea mays
  VARIANT 20: note = Ancestral polymorphism is R, Derived polymorphism is C
  VARIANT 21: note = Ancestral polymorphism is R, Derived polymorphism is C
  VARIANT 27: note = Ancestral polymorphism is R, Derived polymorphism is G
  VARIANT 57: note = Ancestral polymorphism is P, Derived polymorphism is S
  VARIANT 90: note = Ancestral polymorphism is A, Derived polymorphism is V
  VARIANT 93: note = Ancestral polymorphism is V, Derived polymorphism is A
  VARIANT 104: note = Ancestral polymorphism is R, Derived polymorphism is P
  VARIANT 106: note = Ancestral polymorphism is R, Derived polymorphism is H
  VARIANT 144: note = Ancestral polymorphism is A, Derived polymorphism is T
  VARIANT 183: note = Ancestral polymorphism is S, Derived polymorphism is F
  VARIANT 195: note = Ancestral polymorphism is G, Derived polymorphism is D
  VARIANT 218..330: note = Derived polymorphism lacks residues 218 to 330
  VARIANT 236..330: note = Derived polymorphism lacks residues 236 to 330
  VARIANT 247: note = Ancestral polymorphism is G, Derived polymorphism is E
  VARIANT 266..330: note = Derived polymorphism lacks residues 266 to 330
  VARIANT 269: note = Ancestral polymorphism is R, Derived polymorphism is T
  VARIANT 279: note = Ancestral polymorphism is D, Derived polymorphism is V
MPEFRDWGGLPEFPLSDVLRRLLPSLRSIYAFAATCQSWRRLLRASAADLLSPGLPPLLLDPRSRVVVPFCQDVLVQELAYRADLTAEGAILVSVSRGHHLLLRRRRRGASESEARLVIIDALTGAERGEVTLPSPLFAYHYAALSASHLLVFHSKHAFFSTPFPNPSSPSGPGWTKHSLPRSASFVTGVLEFRGRVLGLTDRAQLLELRLVGSPQSQSVQILPAAGLPDATAFDQWGFGPRLAAVGDRLLLVLFMLEPKSGSVVQARRVNKVSVYGLDVARMRWEEAESVGPYNVFVDYAGKTAAACVGVEENRIYVASPGSRWRSFPP

SEQ ID NO: 10078 - protein, 475 aa, Zea mays
  VARIANT 341: note = Ancestral polymorphism is T, Derived polymorphism is M
  VARIANT 343: note = Ancestral polymorphism is R, Derived polymorphism is C
  VARIANT 346..475: note = Derived polymorphism lacks residues 346 to 475
  VARIANT 360: note = Ancestral polymorphism is R, Derived polymorphism is Q
  VARIANT 403..475: note = Derived polymorphism lacks residues 403 to 475
MGALLLFAVCLLAPIVLACAVRGRKRRAAAPAPAPACGKKALPLPPGSMGWPYVGETLQLYSSKNPNVFFARKQNRYGPIFRTHILGCPCVMVSSPEAARFVLVTQAHLFKPTFPASKERMLGPQAIFFQQGDYHARLRRLVSRAFSPQAIRASVPAVEAVALRSLRSWDGRLVNTFQEMKLYALNVALLSIFGEEEMRYIEELKQCYLTLEKGYNSMPVNLPGTLFHKAMKARKRLSAIVAHIIEARRERPRPRGSDLLASFLDGREALTDAQISDNVIGVMFAARDTTASVLTWMVKFLGDHPAVLKAVIEEQQEIARSKGSSGDEPLTWADTRRMRVTSRAIQETMRVASILSFTFREAVEDVEYQGYLIPKGWKVLPLFRNIHHSPDHFPCPDKFDPSRFEVAPKPNTFMPFGNGTHSCPGNELAKLEMLVLFHHLVTKYRWSTSKSESGVQFGPFALPLNGLPMTFARKD

SEQ ID NO: 10079 - protein, 203 aa, Zea mays
  VARIANT 148..203: note = Derived polymorphism lacks residues 148 to 203
  VARIANT 128: note = Ancestral polymorphism is G, Derived polymorphism is S
  VARIANT 125: note = Ancestral polymorphism is T, Derived polymorphism is I
  VARIANT 89: note = Ancestral polymorphism is A, Derived polymorphism is T
  VARIANT 57: note = Ancestral polymorphism is A, Derived polymorphism is T
  VARIANT 53: note = Ancestral polymorphism is S, Derived polymorphism is W
  VARIANT 15: note = Ancestral polymorphism is W, Derived polymorphism is C
MERVVFTSSVTAVIWSGAGAGAHRVEVADERSWSDLAFCRKFKLWHALAKTLSEKTAWALAMDRGVDMVAINAGLLLAAPEPGLGLTAAHPYLKGAPDMYDGGVLATVDVGFLADAHVAAYESPTVYGRYLCFSNAVCRPEDAVKLAQMLSPAPPRSSPPSDELKVIPQRIQGKKLNKLMLEFASGVYTIQGDGLGRNSLPHR

SEQ ID NO: 10080 - protein, 314 aa, Zea mays
  VARIANT 152: note = Ancestral polymorphism is I, Derived polymorphism is K
MPCLLFLLAPPPRPCLADSVSRSPLPNKYRFFLPQTRRRPSPRLGDGVRMAEMTRVWSGGEPLEVGVSMESDPIVGGEAPSRSRWEASRWAPVEAALNRMIDSNQGLSRLRNFVAKLKKGCIEPKSLPKGTKAPGYSGSSIYRERPLLYLRKAIWKRDAEIMWVLLGAVGNSLLSLVLKKMLNHERPAPALRSDPGMPSSHAQSIFYAATVLALSLYYWLGTNYLTMILGPATLSLAAYLSWLRVSRGLHTLNQVMVGAVVGSAVGALWFVLWHWLVQEAFASSVLVRVAVILGSSAFCVSFVVYMIRHWLKDE

SEQ ID NO: 10081 - protein, 441 aa, Zea mays
  VARIANT 326..441: note = Derived polymorphism lacks residues 326 to 441
  VARIANT 222..441: note = Derived polymorphism lacks residues 222 to 441
MITHYVLTGSPAQVQKSTSKPPPSPPDKGTPVPVAPVRTQTSPASLYATPESTTLPDSPSSFPGTWSPYIINHKRRGASLAKTSRGDVGSGGSQPKLQVMLSALPKGGEPTAAEEPEFAFQQSENGQTEGDSGVEEAPIYGKNEMLLKDKGSMSAKNEQEQPEFEFQRGSLEASVRSVNVGRPLIAGAPKNDESDTFLELQDLISVSSHTEADGAGTQERWWKPSSPLGTSVGTPGAEFYDAFEEISSDGGTRSLRGMDDDLRELRLSLLMEIERRNQAKEALEIWQKEWKKLSHHLSHVALSLPSPCIAEETDYSSMDPGAELCQQITVSQLVAAAIAQGFARSEVESEMETVLAAKNFEIARLSDRVQYYEAANREMSQRNQEAIEMSRQQCKECKKQQKWLWGFAGLAVTLGATAIAWSYLPSSQPQTSADSNSTTSD

SEQ ID NO: 10082 - protein, 372 aa, Zea mays
  VARIANT 158: note = Ancestral polymorphism is A, Derived polymorphism is G
  VARIANT 179: note = Ancestral polymorphism is L, Derived polymorphism is R
  VARIANT 212..372: note = Derived polymorphism lacks residues 212 to 372
MTPAAAISGSSSHVVVSSARLRQPFTLPPRTACPIAAAASPVTRRGVAVAAVSSPVVSAAAGKDAKQAPKDFLQIIDFDKDTIMKILNRAIEVKALIKSGDKSFQPFKGKTMAMIFAKPSMRTRVSFETGFFLLGGHAIYLGPDDIQMGKREETRDVARVLSGYNDIIMARVFAHQDILDLAKYASVPVINGLTDYNHPCQIMADALTMLEQIGRIENTKVVYVGDGNNIVHSWLLLAAVLPFHFVCACPKGFEPDANTVEIARSAGISKIEITNSPREAVKGADIVYTDVWASMGQKEEADYRKQKFQGFTVDEALMEIAGPQAYLMHCLPAERGVEVTDGAIEAPNSIVFPQAENRMHAQNAIMLHVLGA

SEQ ID NO: 10083 - protein, 741 aa, Zea mays
  VARIANT 669: note = Ancestral polymorphism is V, Derived polymorphism is L
MLSAQSNLGHNRHSRNDVSTKHKSGYEPSDTETEWHESPWNDGALASNRNRLPKDSGRNDQVGTRRQNISPNCTLDYHAEKTSNLRYSRTPPRVTEQRRHPSPFTAVKNESRKKSSRTPPRFRSSMETFSRSSIKARFSRNRSISAPKLRPQEKEHPARAPAFPGSNPVSTHPEREVADNIEEDSHAENCSQEISELIANGKLPNSRYNEYAFTSTESIPAGDIFFSRDCRAPLEKTSTKLNNIDQSFTSDSNVHTENDGTVTQSNLGQPSQFVSARTGLSRTTTKSSYATGRHCQMSTTTTLSSPYSNGKLSGESGKFSEITGKLVGGVMKFTSSKVQNDTWLPCMTGKACRKSRTSNNKKNDESESSFIQKALVIEKIRLFWADKYRPQNLNGFTCHREQVQQLKQSVSAEFCPHIIFKGPPGSGKRSLCRAVLTEIFGDSSLNVSHYLKSCNGQQGSISVPILVPVSSSNNHVELHMRFQSKNARYALMTLANEMSDKCKITEPIVRKSFKVIVLYDVDKVSQNNQRLIKWIIDSSSDACKIIMTCQDESNLLDSIKSRCKIISIGVPSTREVVDILTYTSRKESFDLPTSFATTIANQSRKNLREAILALEACKANNYPFIDGQAIPLGWEEVLEELAVEILDDPAPKRLFLARGKLQKLLVEFVPPKLILQKLVELFLKGIQTGVKREVYYWHAYYDKRLPVGASALLKLEEFVAKFMSIHRKSMSHEPKIPEVPQ

SEQ ID NO: 10084 - protein, 90 aa, Zea mays
  VARIANT 38: note = Ancestral polymorphism is D, Derived polymorphism is Y
  VARIANT 28: note = Ancestral polymorphism is Y, Derived polymorphism is D
  VARIANT 22: note = Ancestral polymorphism is S, Derived polymorphism is R
  VARIANT 12..90: note = Derived polymorphism lacks residues 12 to 90
  VARIANT 11: note = Ancestral polymorphism is G, Derived polymorphism is R
MDRVRSFGTQGWKKDGVQIPASDKVYEYILFRGTDIKYLQVKSLPPQPPPPQAASLHNDPTIIQSHYSQPASTSSSLPSTGGAVLPDFSS

SEQ ID NO: 10085 - protein, 394 aa, Zea mays
  VARIANT 376: note = Ancestral polymorphism is W, Derived polymorphism is S
MSVASVAALRTAGSGRRRGAGSQQTGLNGGRFLMMQRRELVTKAGIALAVSCSMATSPASANGAAQGIVSDSVSPVVRAGLEILPFKADGYNFWTWRGRRIHYVEQGAGRPVVLIHGFGASAFHWRYNIPELAKKYKVYAIDLLGFGWSEKALVDYEATIWMEQVSDFLREIVKEPAVLVGNSLGGFTTLFTATEVPELVRGVVLLNSAGQFADPNKPAAAPAEEEEGGSALSRYIVQPLKEAFQRVVLGLLFWQSKQPARVEKVLKSVYIDPSNVDDYLVGSITAPAADPNAGEVYYRLMSRFMSNQSRYTLDRLLGKMSCPLLLLWGDLDPWVGPAKAARIQEFYADTAVVHLQAGHCPHDEAPEQANRALLEWLAALDARAKSAEPSLQTV

SEQ ID NO: 10086 - protein, 436 aa, Zea mays
  VARIANT 7: note = Ancestral polymorphism is V, Derived polymorphism is M
  VARIANT 147..436: note = Derived polymorphism lacks residues 147 to 436
  VARIANT 179: note = Ancestral polymorphism is A, Derived polymorphism is S
MSLKSIVRELKEMRDGIGSMSRRGGSGSDGRAFHGRSGSRHSWPSLWAEQQQSHRQGQGLGPGPEGPHHQHQGRWANLPPELLLDVIQRVESSEATWPARRQVVACAAICRSWREVTKEVVKTLEECGRITFPISLKQPGPREMPVQCFVRRERATSTYLLYLGLSPSMNVEKDKLLLAARKVRRATRTYFVISLVSDDFSHSSSTYVGKLKPNFLGTKFTIFDSQPPPDAVVLPNNKTSKRQSKQVSPRLPLGNYNVATVTYELTVLRNRGPRRMQCTMHSIPAECIQEGGKAPTPTGAIQSLDEPVSSTLPSAKGKEVAVEFSSTSLSADLSGPACVNGTPLVLKNKAPRWHEQLQCWCLNFRGRVTVASVKNFQLVASVDPSLNIPAAEQEKVILQFGKIGKDIFTMDYRYPLSAFQAFAICLTSFDTKPACE

SEQ ID NO: 10087 - protein, 342 aa, Zea mays
  VARIANT 242: note = Ancestral polymorphism is P, Derived polymorphism is R
MARCRGTAESLCQGRLDLDDDKFGAMCTTAFGCLQEWPDLGAMCGANLGVPAMAGNGNESSCSGSGGSRKRKPDAYDGLDATGGANDMSKRPRGKRLSGISEIVAPGKGKQERPKAGTKKKAEAASAAAAAAAAGHKTDYIHVRARRGQATDSHSLAERVRRERISERMRYLQELVPGCSKVTGKAGMLDEIINYVQSLQKQVEFLSMKIAASNPVVSFDIVEDLFGRQLKQSRRSPAAALPAMALPAGQLEPSCLQMSHMPQMHPSAAANSTGFGLDMVVNNPYAPAGASCPVSAAASVSVAAGPSTTEPCLNVNGTAAWDIGSRNLFSGFVAQFQSVESE

SEQ ID NO: 10088 - protein, 605 aa, Zea mays
  VARIANT 159..605: note = Derived polymorphism lacks residues 159 to 605
  VARIANT 160..605: note = Derived polymorphism lacks residues 160 to 605
MLRRLRLRLPGRAASAAAGAAAAMASLTNVAYADGLFRRQSAPSNPGDEDNLGASAFGRDPETLERMARALREINNSPLAKQVFELMRKQEETRLTELEVEKVQYAIYEKLRDIERMQKKAEDYRNSLQQEAQAKAQALRFEDELARKRMQTDHAAQRRQDAELVKMQEASALRREEARRATEQKILEEMIRTEKEKAEIDQETNRVKAIAEAEARVHEDKQSEEVVKRMLLERMKGEKEKWLTAINTTFSHIEGGFKALLTDRSKLMMGIGGVTALAAGVYTTREGARVTWSYINRILGQPSLIRESSMSKFPLPMSRLLKPSSASLSEGAGFEKVILHPSLKRRIEHLARATANTKSHGAPFRNMLFYGPPGTGKTLVAREMARKSGLDYAMMTGGDVAPLGSEAVTKIHQIFDWAKKSKKGMLVFIDEADAFLCERNSTHMSEAQRSALNALLFRTGDQSRDIVLVLATNRPGDLDAAITDRIDEVIEFPLPGEEERFQLLKLYLNQYILKEEGKGSSWSALFKKQQRKIQVNGISDDLLREAARKIDGFSGREIAKLVASVQAAVYGRPDCILDPQLFSEVVDYKVTEHHQRIKLASEGMV

SEQ ID NO: 10089 - protein, 1118 aa, Zea mays
  VARIANT 32..1118: note = Derived polymorphism lacks residues 32 to 1118
  VARIANT 51: note = Ancestral polymorphism is P, Derived polymorphism is L
  VARIANT 55: note = Ancestral polymorphism is G, Derived polymorphism is E
  VARIANT 97: note = Ancestral polymorphism is R, Derived polymorphism is C
  VARIANT 162: note = Ancestral polymorphism is L, Derived polymorphism is P
  VARIANT 173: note = Ancestral polymorphism is R, Derived polymorphism is W
  VARIANT 175: note = Ancestral polymorphism is P, Derived polymorphism is S
  VARIANT 194: note = Ancestral polymorphism is R, Derived polymorphism is W
  VARIANT 206: note = Ancestral polymorphism is R, Derived polymorphism is Q
  VARIANT 669: note = Ancestral polymorphism is P, Derived polymorphism is L
MAEVAARDFDSAAPVALNPRRHCGRRSGSEKQRRRRLTISKLLSCALDRFPYSYGHRLRVLLLARILRLRLHLIRLLILAPRIVAASGPSPAAVGLRFGHMFALLHLLAAWPGPMHGGRARGGRGEIEGGGGEGLAAEGAVAKGAGEGGGGLERAHGSIVLLLLLPLASALDRFPYSYGHRLRVLLLARILRLRLHLIGLLILAPRIVAASGPSPAAVGLRFGHMFALLHLLAAWPGPMHGGRARGGRGEIEGGGGEGLAAEGAVAKGAGEGGGGLERAHGSIVLLLLLPLASALDRFPYSYGHRLRVLLLARILRLRLHLIGLLILAPRIVAASGPSPAAVGLRFGHMFALLHLLAAWPGPMHGGRARGGRGEIEGGGGEGLTVEGAVAKGAGEGGGGLERAHETEHYSQNRKQSVLSCVHLLAGGPRGKAGGGSDGVTKRAAAPAPRWTTDNRRRQLADVGCFPAVASMQPLQKLLEAAAATSTPLAAAHLHANILRSGLLHSSHHLTAHVLACYPPGLARDLFDEIRSPTPRLANALLRAHIRARQWRAAILLGQRLRVRRDGFTLSLLLRACTALPSLTHGRAVHAAAVRSCTASEDAFVATAIVQMYSRCGDMAGAINAYGMLEKPDIVLRTSVVTGYEQNGMAEEALEFFARNVVGQGVLVTPVTLVSVMSAAAQLGHVRKGQACHAYVVRNSLSYDLALVNAVLGFYVKIGDLQASMRLFEGMTDRDVITWSCMIKGYVQHGDAHTGFRMYREMVKARVQPNSVTLVSVLQACALVVDAEEGKRLHRVAVSIGCELELGVATALVDMYMKCSCHEEAMRLFHRMPKKDVVAWAAVIGGLTQNELPGESLHSFKCMLLNDHVPDAVTMVKVLAACSEFGGNRLAICLHGYLVRNGFNNNAFVAAALLDLYSKCGDLDSAVRVFEGTTEKDIVVWGSMIAGYGAHGLGQEAVALYQRMIASSIQPNNVTFLSVLSACSHSGLVQEGIQIFDSMTQVFGVVPNAEHQSAMVDLLGRAGELQEAIRVIRDMDGRAVAHTWCALLAACRKHNNTKMSEVAAKNLLKLDPDHVGYYNLLTNLYAFDEKWENVKDTRDMVKGRDLRKVAGYSSVEVTN

SEQ ID NO: 10090 - protein, 167 aa, Zea mays
  VARIANT 64: note = Ancestral polymorphism is R, Derived polymorphism is Q
  VARIANT 39: note = Ancestral polymorphism is S, Derived polymorphism is F
  VARIANT 22..167: note = Derived polymorphism lacks residues 22 to 167
MMERENERAKLGLQPVNYHGKWPLKRASVFQEPLSAALSALTLVVQFNGWLSFFLLLYYKLPLRLETHKTYYEYTGLWHIYGLLAMNSWFWSAIYHSCDTIWTEKLYFSSDAAFLGYSLILTILRTSSLRDEASRVMVVAPILAFVTTHIMYLNFYELDKGNLGHDR

SEQ ID NO: 10091 - protein, 92 aa, Zea mays
  VARIANT 14: note = Ancestral polymorphism is G, Derived polymorphism is R
  VARIANT 6: note = Ancestral polymorphism is G, Derived polymorphism is V
  VARIANT 3: note = Ancestral polymorphism is A, Derived polymorphism is V
MVADKGSEKSRGFGFVQFATVQDADRAIQQKNGSPVSVQVKDSDAKDEADEISPAEKHKGKSHKADPEQLHLLSNDAKVSKEAPIGTIEKML

SEQ ID NO: 10092 - protein, 177 aa, Zea mays
  VARIANT 57: note = Ancestral polymorphism is V, Derived polymorphism is F
  VARIANT 56: note = Ancestral polymorphism is Q, Derived polymorphism is H
  VARIANT 43: note = Ancestral polymorphism is S, Derived polymorphism is F
  VARIANT 20: note = Ancestral polymorphism is K, Derived polymorphism is M
MADSSAPTRVMMAVNESSLKGYPHPSISCRTAFDWTLSKLVRSNPGGFHFLFVHVQVPDEDGFDDMDSIYASPEDFHQMKQRDKIRGLHLLEYFVNQCHQLGIKCEAWIRHGDPKEVICSEVKRVQPDLLVVGSRGLGPFQRVFVGTVSEFCVKHAECPVITIKRNATEAPQDPVDD

SEQ ID NO: 10093 - protein, 252 aa, Zea mays
  VARIANT 4: note = Ancestral polymorphism is R, Derived polymorphism is C
  VARIANT 34: note = Ancestral polymorphism is D, Derived polymorphism is E
  VARIANT 36: note = Ancestral polymorphism is E, Derived polymorphism is Q
  VARIANT 38: note = Ancestral polymorphism is A, Derived polymorphism is T
  VARIANT 83: note = Ancestral polymorphism is E, Derived polymorphism is G
  VARIANT 91: note = Ancestral polymorphism is L, Derived polymorphism is F
  VARIANT 98: note = Ancestral polymorphism is E, Derived polymorphism is K
  VARIANT 101..252: note = Derived polymorphism lacks residues 101 to 252
  VARIANT 110: note = Ancestral polymorphism is E, Derived polymorphism is K
  VARIANT 129: note = Ancestral polymorphism is S, Derived polymorphism is L
  VARIANT 139: note = Ancestral polymorphism is R, Derived polymorphism is C
  VARIANT 215..252: note = Derived polymorphism lacks residues 215 to 252
MDLRVSVTGGVHFDLVKRVLRDVYLMYKAFIEPDLQTAHIKIINKFNPCSGFQNPMYILKSPRSLAPKKIKIVVGGVHMESNEETYDIYLLPHGEDPEACQSYMRMRNRERKNNLMFEEWVTDNSFIISPRTTFEDSVCLLGGLMALGYTMAAILKRSSRTFSDGKATVKIESLEQLNRQYIQVQGRDQLYVKFVVDQLGLDGSYILCTYIEQIQLEKLINDVMVLPKDLKTKLNIDDELPQIQGSIFSCFC

SEQ ID NO: 10094 - protein, 177 aa, Zea mays
  VARIANT 85: note = Ancestral polymorphism is V, Derived polymorphism is I
  VARIANT 115: note = Ancestral polymorphism is A, Derived polymorphism is E
  VARIANT 117: note = Ancestral polymorphism is T, Derived polymorphism is M
  VARIANT 118: note = Ancestral polymorphism is A, Derived polymorphism is V
  VARIANT 132: note = Ancestral polymorphism is M, Derived polymorphism is T
  VARIANT 135: note = Ancestral polymorphism is S, Derived polymorphism is L
MAAPATGRPHRGRPSSHPLRLPLAPAPPAAAAPAPGPARGSTPRTTTRTSWKKAPQVDVVTITGYEDVLENSEISLLKALAHQPVSIGITAGSRDFQFYRGGVFDGACSVELHHELTAVGYGSSYGQNYITMKNSWGKNWGEQGYVRIKMGTGKPEGVCGIYTMASYPLKNATRWGT

SEQ ID NO: 10095 - protein, 1506 aa, Zea mays
  VARIANT 949..1506: note = Derived polymorphism lacks residues 949 to 1506
MLMDPPVMQMDCKLKNAMDKTPQIAYDRKLTVSHDDYGWAGSDVHLKDDTIVCSPVDLSDACQSGMDRVLDSASKNSSLNLGDLSQGTELREKNSDSSYSDVKLQLNLSAGNYNGLQTDDYSFNKQSFGKKDMHHPQEEIHSSPNTMSLPSPCRLNGDVTPCEAEKIAEDRGKVDGIVDAVSKEVKTDLVGCHARQEELQCTLQDLSEIACSIDLVRNKSSPQEEKKSVSPLNDMGHNVDNNSCNGDTNYKGQELNMGNVGDEDHAVALWVKWRGKWQTGIRCCRADCPLPTLRAKPTHDRKTYIVVFFPRTKTYSWVDMLLVLPIEECPLPLVNGTHRKWRKLVKDLNIPRRFNIQNLAILMINLIDELHIEAVVDNARKATTWKEFALEASCCRDYTDLGKMLLKFQNMILPDCISCEWVQNSIETWNQKCMNAHDAETIEMLCEELRQSILGNKLKELRDASVQPELVPEWKTWKQELLKQYFSLHPAGNVGNFEKTNCYDDPALDQQGSRKRPKLEVRRGEIQILHMGEADYRTPTEDPNQNKLPSNSVMHENIGALGATSQKNAVMFPGSSGTNENTISGSSNAALQNARLDLDSFKSSRQCSAYIEAKGRQCGRWANDGDIYCCVHQSMHFLDHSSREDKTLTIEAPLCSGMTNMGRKCKHRAQHGSTFCKKHRLQTNLDVMHPGNLLDPSEVLHMGEEPPNKWVEGISKSQALYSIDLETDKNVQAVVQVKLMPTVAIENSGEKGCAMEKTDMCAASTSMTNTDDTSLCIGIRSHDSIVECQDYAKRHTLYCEKHLPKFLKRARNGKSRLVSKDVFVNLLKGCSSRKDKICLHQACEFLYWFLRNNLSHQRTGLASEHMPQILAEVSKNPDFGEFLLKLISTEREKLANIWGFGTDRSKQIYSENKEGSVALQEEKTNLSSGPKCKICGHQFSDDQALGLHWTTVHKKEARWLFRGYSCAACMESFTNKKVLERHVQDVHGAQYLQYSILIRCMSCNSNFLNTDLLYPHIVSDHAQQFRLLDVPQRPSGQSAQQTEGMSGLPLYDSHNVEDENGSQKFVCRLCGLKFDLLPDLGRHHKVAHMVSGAVGHIPLGRGKYQLNRGRHYYSAFKKSLRPTSTLKKSSSSGIDKNLKFQISGLTSQIVESETSSLGKLQDFQCLDVAQTLFSKIQKTRPHPSNFDVLSVARSVCCKTSLLAALEVKYGPLPENIFVKAAKLCSDNGIQIDWHQEGFICPKGCKSRYNSNALLPMQLTAVDFLEAPVDSRNDDEMWGMEEYHYVLDSKHFGWKPKNESVVLCEDISFGREKVPIVCVIDVDAKDSLGMKPEELLPHGSSLPWEGFHYITNRVMDSSLIDSENSMPGCACSHPECSPENCGHVSLFDGVYNSLVDINGTPMHGRFAYDEDSKIILQGWAIRAAEPILQGTFVCEYIGEVVKADKAMKNAESVSSKGGCSYLFSIASQIDRERVRTVGAIEYFIDATRSGNVSRYISHRTPEISTVV

SEQ ID NO: 10096 - protein, 137 aa, Zea mays
  VARIANT 79..137: note = Derived polymorphism lacks residues 79 to 137
  VARIANT 65: note = Ancestral polymorphism is G, Derived polymorphism is R
  VARIANT 27..137: note = Derived polymorphism lacks residues 27 to 137
  VARIANT 12..137: note = Derived polymorphism lacks residues 12 to 137
MTKTIASPSRRQPLLAATAAWSWSGPRPPNLTSTCRKSKHMWPTELVGVAEPWSARAAGVTTLSGQYVKIENVKDPYVQGVGEWAVKEHNRQTGESLEFAEVVSGMEQVVAGTNYKLNLATKDPTSSYQAVLPSSCV

SEQ ID NO: 10097 - protein, 154 aa, Zea mays
  VARIANT 9: note = Ancestral polymorphism is P, Derived polymorphism is L
  VARIANT 25: note = Ancestral polymorphism is P, Derived polymorphism is L
  VARIANT 26: note = Ancestral polymorphism is A, Derived polymorphism is T
  VARIANT 48: note = Ancestral polymorphism is G, Derived polymorphism is A
  VARIANT 60: note = Ancestral polymorphism is A, Derived polymorphism is T
  VARIANT 90: note = Ancestral polymorphism is S, Derived polymorphism is C
  VARIANT 97: note = Ancestral polymorphism is N, Derived polymorphism is Y
  VARIANT 103: note = Ancestral polymorphism is L, Derived polymorphism is I
  VARIANT 107: note = Ancestral polymorphism is A, Derived polymorphism is S
  VARIANT 108: note = Ancestral polymorphism is A, Derived polymorphism is S
  VARIANT 127: note = Ancestral polymorphism is S, Derived polymorphism is A
  VARIANT 129: note = Ancestral polymorphism is R, Derived polymorphism is S
MAPKAEKKPAAKKVAEEEPSEKAAPAEKAPAGKKPKAEKRLPAGKSAGKEGGDKKGRKKAKKSVETYKIYIFKVLKQVHPDIGISSKAMSIMNSFINDIFEKLAAEAAKLARYNKKPTITSREIQTSVRLVLPGELAKHAVSEGTKAVTKFTSS

SEQ ID NO: 10098 - protein, 156 aa, Zea mays
  VARIANT 114: note = Ancestral polymorphism is A, Derived polymorphism is V
MPSSCVGETGLVAMDCLVVCCCCPCLVLQVTVFLFVRLPRKVVVKTKRVILRRWHRRRPPAPSSAAGLKLAALLDLDDDGFEAAFGMGEKERCRCFAVGGDGGVDVDVDGVWEAIIEQEGLFWFGSFWGRRGAASEGDDRMDGSFRLPVALERVRE

SEQ ID NO: 10099 - protein, 242 aa, Zea mays
  VARIANT 112: note = Ancestral polymorphism is E, Derived polymorphism is V
MAAARHLRSGLPLLRAHLASSESAAVAQVSRGFASQAAKPTGKEIKVPKALFGGTGNYASALFLTAAKSNALDKVESEIKAIVEASKKSPLFSQFIKDLSVPKATRVKAIAEIFADAGFSDVTKNFLVPNFVLVYEAVLADNGRLKYIERIAERFVDLTMEHKGEMKVVVRTVISLTKEEEKELKETLQDILGENKTILVEQKIDYSIMGGLVIEFGQKVLDISIRNRAKQMEAFLRQPLDF

SEQ ID NO: 10100 - protein, 166 aa, Zea mays
  VARIANT 16: note = Ancestral polymorphism is P, Derived polymorphism is A
MGSMEFVAPALEELLPELSLEEQPRLQNQSRERDRTRKRHTKHSPPPRPSLISVRYVMEMGSMGMDFVAPALEELLPDLSREEQLRLQNKARGHDRILKPHNKHTPRPRPSSFSEWDQCNFFKIPKVLQALAHYNARHPGGEFDDVKPLKQSRVGFRGQAWFHINF

SEQ ID NO: 10101 - protein, 281 aa, Zea mays
  VARIANT 192: note = Ancestral polymorphism is R, Derived polymorphism is C
MARAFRAASPLPLPSSRSAAAAATSGGGRGNFPWLTKKQGSSSSSKPSPSGGGQESKGDEHEGASAAGSVEQSPSPSPSPSRRRADALARLRALFLAAITHRRRRRQLGSCVTGTIFGRRRGRVHVALQTDPRSPPVLLVEMAAYSTGALVREMSSGLVRLALECEKPPLAAGEKRRGLLEEPTWRAYCNGRKCGFAVRRDCGADEWRVLGAVEPVSVGAGVLPDDDVAGSVSGSGAAEGDLMYMRARFERVVGSRDSEAFYMMNPDGSGGPELSIYLLRV

SEQ ID NO: 10102 - protein, 1167 aa, Zea mays
  VARIANT 868..1167: note = Derived polymorphism lacks residues 868 to 1167
  VARIANT 843..1167: note = Derived polymorphism lacks residues 843 to 1167
  VARIANT 822..1167: note = Derived polymorphism lacks residues 822 to 1167
  VARIANT 818..1167: note = Derived polymorphism lacks residues 818 to 1167
  VARIANT 785..1167: note = Derived polymorphism lacks residues 785 to 1167
  VARIANT 706..1167: note = Derived polymorphism lacks residues 706 to 1167
  VARIANT 647..1167: note = Derived polymorphism lacks residues 647 to 1167
MFTPQGKGWTGWSTPTPANQRSGGGAPAASAPLGKGKGRVAELEQELFICVFIPYLQLHEYQYNMGLLLIEKKEWAAKFEEISEVLTQKEEILKREQAAHLNAISEYERREENMRKALGVEKQCVADLEKALRDIRAEIAEVKFTSEKKITDAQSLEASLEEKSLEIEGKLHAADAKLAEANRKKSQADRDLEEAEARQRRLEKEKLYFETERKAREKQLKEQEESLQEWEKKLKESQNRLNELQRSINEREERANKNDQLFKIKQDELEEARRTVEAAKVTLKVKEDDINKRLNELHLQEKDADSKRSALEEQGKKLDEREAKVTNREKEGLQKLLEDHQVELESKRRDFELELERERKSFDQNMTQKQADLLKREKDVKSLEAKLSKSEQALNDKKKSMENLQNDLDAKSKALKSWDESLKNDEKRLLKEKQQMDHEREQLETYKLELEKIKSALEAEKEKISEEQNNLKLTAQERQEHSLLIAKLKKEIEEYRMRSNSLSEEMEDLRKQRQKFEEEWEQLDEKRALLVEEDKRLNIERMNLERWRDNEEKRLNDMKLKMDEEYKQQLESLERKEKALSDDMKHKQMENDEFLKGERADVQRKLQLKRHELEMEMEQKQATKEKELEEKENELNKKIDFVENKLRHAIELNESKIEKLLLEKREVQMERELLLEERKKTETDKADIRRDIESLHSLSKSLKERREAYNRDRSRLIELFEKYKACKNCGISIFEGLDSLLLKDSAEIEHPSLAVEGDDHALTTDTSGPDTGTLVNSGGRFSLLQKCSRLFKFSPRKKGEQSSEQPSERNISFGARLEEATQSDGDYVPTPVYEIAHDSFNAEDELPSDGETRENEESERHDIADNAQMESSVGVADNSIDILGTKSFDGANDMAVEATIVSVDQNGEDSVVPAEAGVEPETSEQGRRQQNQRGRRKGGMKRTRSVNAVVEDAKMILGEVFEEKTDDQGDTVKVGATRKRRFAGATISEQDEEGSEAHSESVSLGGQRRKRRQTAGAVTDAPGERRYNLRHSRAANAGAATAQADKKKSSKARNKHTVEASADDTEGTSKVVEEPAPESKRVSESADYDASQLHEFSQVEVGDAHAVDGEGAGEEDGDILDGQDALPDVPMTPSGSEFGAEQEDEDDDDSERRNQSISKKLWSFFTT

SEQ ID NO: 10103 - protein, 155 aa, Zea mays
  VARIANT 103..155: note = Derived polymorphism lacks residues 103 to 155
MEVAPDHAPSNVRPGLPWKVLCHMEGESPKSSTSAPSMEAAPDMRAPASMEAADNLAPDSNCAPRSLPPRAMRPILWLSADVKKEVLDKLGLDLSPVKSKKNKSITMYFSKRCLPPEEAVNALSASPELRLKSRAIQNGNGGTEAPQINLFPSKQ

SEQ ID NO: 10104 - protein, 176 aa, Zea mays
  VARIANT 114: note = Ancestral polymorphism is S, Derived polymorphism is W
  VARIANT 97: note = Ancestral polymorphism is A, Derived polymorphism is S
  VARIANT 66: note = Ancestral polymorphism is E, Derived polymorphism is D
  VARIANT 35: note = Ancestral polymorphism is D, Derived polymorphism is N
  VARIANT 27: note = Ancestral polymorphism is V, Derived polymorphism is M
MFTNAQRQVERTGRSGTPRDQYLQDLVTQFQNATDEESKEKIVANLANFAYDPFNYAFMRQLNVLELFLDCITEPNERLIEFGIGGICNSCVDPANALIITQCGGIPLVIQCLSSPVRNTVTYALGALYYLCNPSTKKEILKPDVVSTIREYASAGTVNNNFSNLANAFLEKHVDP

SEQ ID NO: 10105 - protein, 174 aa, Zea mays
  VARIANT 102..174: note = Derived polymorphism lacks residues 102 to 174
  VARIANT 70: note = Ancestral polymorphism is S, Derived polymorphism is L
  VARIANT 40: note = Ancestral polymorphism is L, Derived polymorphism is V
  VARIANT 28: note = Ancestral polymorphism is V, Derived polymorphism is M
MAFLSTNALMSVPITAAAAPRHRRSLVVVRAAAVKSNEHLQEEQASVADGARGRRRAMVLLAATAAVTGSSVAICRSARAAGVTTLSGQYVKIENVKDPYVQGVGEWAVKEHNRQTGESLQFAEVVSGMEQVVAGTNYKLNLATKDPTSSYQAVVFDPLPNSSKNRQLMSFKSI

SEQ ID NO: 10106 - protein, 361 aa, Zea mays
  VARIANT 190..361: note = Derived polymorphism lacks residues 190 to 361
  VARIANT 202: note = Ancestral polymorphism is P, Derived polymorphism is L
MPPLRRARSILLLLHYVAASHLLLRAAAATLPDPAPLDPALVATPVQPAAAVPGGTIPAFPAQSDSLAGSSSTCPLAPSPALLPAVRASCAAAAALPPRLRCCPALAAWLFAAYAPAALAERPPARPPAAAAAAVDMPLPPDDSEACAGAADRALRAAGATLPRPTGGNNGTCDVAFCYCGVRLRRLTCGPPPAAEGGLWAPADDAAARRLERDCAQPGVPGCSKCLLALTMIKNTSPGGGAAAEAASKEKQAAVRSGESDRDCELMGLMWLLQRNATRYGATATAVIQALMAVDEASAAGVAVAADAGPAAACSLPVDDMPLPAEYAQVGGASDAPRGVCCFFCLLVLFSVLSFRSVYSL

SEQ ID NO: 10107 - protein, 899 aa, Zea mays
  VARIANT 729..899: note = Derived polymorphism lacks residues 729 to 899
  VARIANT 747..899: note = Derived polymorphism lacks residues 747 to 899
MAQSCSWGILLAVLVAGLAAAVAVPPATAAVASIDLGSEWLKVAAVHLAPGRAPIAVATNEMSKRKSPALAALADGNRLIGEEAAGITARHPSKVFARARDLLAKPFSYVQSVTESLFLPYDLVPDARGAAAVRADDGQVYSLEEIVAMVLHYAAGLADAHVGAPVRDAVIAVPPYFGQAERRALTQATQLAGINVLALINEHAGAALQYGIDKDFSNASRHVIFYDMGAGSTYAALVCYSAYNAKEFGKTVSVNQFQVKDVRWNSELGGVEMEMRLVNYFADQFNKQLGNVVDIRQSPKAMAKLKKQVKRTKEILSANTAAPISVESLYNDVDFRSSITREKFEELCEDLWEQALTPVKEVLTHSGMKIDDIYAVELIGGATRVPKLQAKLQEFLGRRGLDKHLDADEAIVLGASLHAANLSDGIKLNRKLGMIDGSTYALVLEIDGPGYFKDESIDQILVPRMKKMPIKMFRSIRHTKDFDVSLNYDKAYELPPGIPSHKFAEYSVSGLTDASEKYAHRNLSAPIKANLHFSLSRSGIIALDRAEAVIEITEWVEVPKKILTLESNITNQNSSFEVGLANSTTDSNENLSSGSDNNSSTPIDEGNVQEIIAENVLKKRTFRVPLKVVEKTTGAGTILSKELYSEAKNRLEALDKKDAERRKTAELKNNLESYIYSMKEKLEESTGILTVSTEQERESFAQKLSEVQDWLYMDGEDAQANEFKERLGQLKAIGDPILFRLSELKARPAACENARLYLDELQKIVNKWETNKPWLPKKRVDEVVSQAEKVKAWLEEKENLQKNTPVYSSPVFTSEQVYEKVLDLQDKVSSVNRIPKPKPKVEKKTAEEEPASKGKTTSSESAPNEGEYTETSQEPKAREGDHSASANSSDLDPESHDEL

SEQ ID NO: 10108 - protein, 498 aa, Zea mays
  VARIANT 221..498: note = Derived polymorphism lacks residues 221 to 498
MLRTRGPGLVPSSAWMALSSPPLRSILDPPLGGRREAIERELKKLRAEREELDGRIRLLESQLEAGPAGFNGAAAGKGVGDDACGGSGACQSRVGNGFAPDGSLPADMIYRYSRHLLLPDFGVEGQRKLSQSSILVVGAGGLGSPLALYLAACGVGCLGIVDGDDVELNNLHRQIIHKEAYVGQSKVKSAADACREINSSIKVVEHHHTLKPCNALEIARKYDIVVDATDNLPTRYMISDCCVLLNKPLVSGAALGLEGQLTVYHHNGSPCYRCLFPTPPPVAACQRCSDSGVLGVVPGVIGCLQALEAIKVATGVGEPLCGRMLLFDALSARIRVVKLRGSSPDCTHCGENSVFTEEDFQKFDYESFTQSPMSDKAAASVNVLPESARITCREYKKLADDGEPHLLLDVRPAHHFQIASISPSHNIPLSMLEEKLPALEASLKEAGEGSALVVLCRRGNDSQRAVQLLREKGFANAKDIIGGLQAWGQDVDPDFPVY

SEQ ID NO: 10109 - protein, 328 aa, Zea mays
  VARIANT 63: note = Ancestral polymorphism is V, Derived polymorphism is L
  VARIANT 69: note = Ancestral polymorphism is A, Derived polymorphism is G
  VARIANT 96: note = Ancestral polymorphism is V, Derived polymorphism is A
  VARIANT 102: note = Ancestral polymorphism is T, Derived polymorphism is P
  VARIANT 125..328: note = Derived polymorphism lacks residues 125 to 328
  VARIANT 128: note = Ancestral polymorphism is R, Derived polymorphism is T
  VARIANT 129: note = Ancestral polymorphism is K, Derived polymorphism is E
  VARIANT 150..328: note = Derived polymorphism lacks residues 150 to 328
  VARIANT 156..328: note = Derived polymorphism lacks residues 156 to 328
  VARIANT 186: note = Ancestral polymorphism is Q, Derived polymorphism is P
  VARIANT 188: note = Ancestral polymorphism is L, Derived polymorphism is F
  VARIANT 190: note = Ancestral polymorphism is A, Derived polymorphism is V
  VARIANT 213: note = Ancestral polymorphism is C, Derived polymorphism is Y
  VARIANT 216: note = Ancestral polymorphism is S, Derived polymorphism is L
  VARIANT 217: note = Ancestral polymorphism is D, Derived polymorphism is H
  VARIANT 235: note = Ancestral polymorphism is S, Derived polymorphism is R
  VARIANT 252: note = Ancestral polymorphism is T, Derived polymorphism is I
MHRNNGGATALAYLLQSKEQGEEAATRFLYPRYCVYRVRQSRQLPLGLGLGAPSLYAAVLARVSAAFNGPLARAVVFGVHIDGSPSFFVCSQDGSAVLVSHTQWPRDFSGHLIVEGLLIAVIVFQLSTKSYKPLKKPLTEKEIDELCDEWEPELLCPPIKEGAKIDAPTLERNKVVMEGFMTAIIQFLEALESFYVVERDGSIILFLVTLGGCHSSDYIKKMTLSLGLRDMAFHSAQLDLSPEHRRKVSICTVDPKPHFVLVCVQFKLCKVRSVQFGQKVIPYLNTYDDRTIRYPDPLIKANDTIKIDLETNKIMDFIKLTSSSYILS

SEQ ID NO: 10110 - protein, 470 aa, Zea mays
  VARIANT 324..470: note = Derived polymorphism lacks residues 324 to 470
  VARIANT 70: note = Ancestral polymorphism is C, Derived polymorphism is Y
MQVLCDVCGSAPAAVLRCTGEAALCSACDRRVHRADKRRRIPLVHPCGDDSTAAAPLCDVCKEWRGLVFCMEDRAILCPDCDDPIHSAYDLTAKHTRFLLVGAKLSATLVDQAPPSPDDDDDDDDVAKPDAAPAACAAKAYREEALPHSRNHDKPVVLKDLRWGYYLTDEPVVHFVWQPNQESSVLVMPRSFDDYYIENCGVILAPEVTQRRIDNSDQFVILATVRATDRNRHETCNAIPTKFRLQTSGLSGHRAKRQSDGAATVTSPAAKRARDPSAPAFPTNKEVPDMPPKTRIFCDILASRAAFFRWAGHRHLGHEHSPYSWNLFVDILGKNRLFEPMWDTVKSMHSQQLLSLATFASVFSSLAATPGGSPLKAFMDMPRYGMTRDTAALNSLLSALCRANRFDDARAAIPVAALRLARARMPTPTPSSSRAASLPPTCGLRASDSSTAPPEAMGYLNEAPRGSANI

SEQ ID NO: 10111 - protein, 1101 aa, Zea mays
  VARIANT 665..1101: note = Derived polymorphism lacks residues 665 to 1101
  VARIANT 535..1101: note = Derived polymorphism lacks residues 535 to 1101
  VARIANT 405..1101: note = Derived polymorphism lacks residues 405 to 1101
  VARIANT 18: note = Ancestral polymorphism is R, Derived polymorphism is C
MMSGVVPSSLHVLLRAERALRERDVGEVHIPLSELLSGAPDGPVPAKFVAYQVRKISSGKPQGVLNLSYKLGEVANGYAPAPPPSPPTPSLHRPPRTRLLQARLMPTRLPPRTRLLQARPTRSRTIAFYPRVRAHILSYAGFEPTTWLSDMLLSEPVVGVTWICLLSIQRSAMLPMSNPSANPTQLTIFYGGSVCVYDSVPPEKAQAIMLIAAAAAAAAATKGSAATAFNPPMISPLPGGTLSSASLRNVVTGRENNISENRDVPVYYPVLFGKAGHLKIQSQGCKLAPFFFLMVVSKAPYSPAKSFDGMESAGMEMTVDGKQGARPSILKGWGAAKSESAGQHMTTGPWRWCHGVRATASLALLLLLACVSGRSVTCARAQSTAFTGRETTSFSFPKFDQNRLQLSTNLTFTGNSTVSQGALQVTPDSGNNFSTYLANQAGRVFYSTPFVLWASNASSAAAAGRRVASFSTVFQFNLYRTNASVKGEGLAFVVASAIADPPPGSHGGFLGLTNASTDGLGANGFAAVELDTVKQPYDPDGNHIGLDVNGVRSSSATCPLAALGIELAPADTGASDGSNFVWVDYDGAARRLRAYISPNATKPSAAALDASLDLSAVVAARDAYFGFSASTGADDYQLNCVKMWNMTVEVLHDDDDRLPKKLSGWKLGLAVGAPCAAALAALALLAGLYLMKKRRKVGDDPSSVSHSAIDLRSIPGVPKEFDYEALRKGTNGFDDKMKLGQGGYGVVYRATVPGDNGRSMEVAVKQFSGANTKGQEDFLAELGIINRLRHRNLVKLIGWCHQDGVLLLVYDYMPHGSLDRHLFGGREASAAATTTTTLDWKQRYNVVAGVASALNYLHHEFEQTVIHRDIKPSNIMLDSSFHARLGDFGLARALESDKTSYTDKLGVPGTLGYIAPECFHTGRATRESDVFGFGAVVLETVCGRRVSCDNPAGCSQLLELVWRLHGAGRLLEAVDPRLAAGGYGYDGEEAERLLLLGLACSHPNPRQRPKAQAILQNLQTRSVPPLPVPMSKPVFMWPAPLADGEEDATQASSMSRSGVTSSGVTSSSNYPYTWSSSGYNTQTFQVSREVHDAAERDVATV

SEQ ID NO: 10112 - protein, 317 aa, Zea mays
  VARIANT 204: note = Ancestral polymorphism is Q, Derived polymorphism is L
  VARIANT 196: note = Ancestral polymorphism is V, Derived polymorphism is A
MPGMDPGGGGSSRYFHQLLRPQQQQPSPLSPNSHVKMEHHRMSPDKSPVVGEADAGGSGAGGDQPSSSAMVPVEGGGSGTGTPTRRPRGRPAGSKNKPKPPIIVTRDSPNALHSHVLEVAAGADVVDCVAEFARRRGRGVCVLSGGGAVANVALRQPGASPPGSMVATLRGRLEILSLTGTVLPPPAPPGASGLTVFLSGGQGQVVGGSVVGPLVAAGPVVLMAASFANAVYERLPLEGEEEEDETAAGAAGAEPQDQVAQSSAGPPGQQPTASQSSGVTGGDAGMSLYNLAGNVGAYQLPGDSLGGWSGGGVRPPF

SEQ ID NO: 10113 - protein, 93 aa, Zea mays
  VARIANT 66..93: note = Derived polymorphism lacks residues 66 to 93
  VARIANT 55: note = Ancestral polymorphism is G, Derived polymorphism is R
  VARIANT 54: note = Ancestral polymorphism is T, Derived polymorphism is I
  VARIANT 39: note = Ancestral polymorphism is G, Derived polymorphism is C
MNTAEELKFVKDIAASTGIVLDPVYSGKAVYGLLKDMAGNPAKWKGRKVLFIHTGGLLGLYDKADQLSSLVGSWRRMDLEDSVPRKDGTGKMF

SEQ ID NO: 10114 - protein, 105 aa, Zea mays
  VARIANT 48: note = Ancestral polymorphism is L, Derived polymorphism is F
  VARIANT 27: note = Ancestral polymorphism is G, Derived polymorphism is A
MVEYSKGKVLRGVSAAKYHTIVLGADGEVFTWGHRLVTPRRVVVARCLMKGGNTNLKFHRMERLQVISVAAGTTHSTALTADGALFYWVSSYPDIKCQQVWFLTC

SEQ ID NO: 10115 - protein, 536 aa, Zea mays
  VARIANT 452: note = Ancestral polymorphism is S, Derived polymorphism is Y
  VARIANT 194..536: note = Derived polymorphism lacks residues 194 to 536
  VARIANT 191: note = Ancestral polymorphism is G, Derived polymorphism is W
MDVRRLGGRIAAALRALAAGGSLPIPAWITNGLAMISLVLSSCDLLRLCSDRDRRLRFPLGGREFVTVVCQLASIVYLFSPCGTGIPSANPETPACRDQGGSADQTRAAAADAPEALHGGAEGEDEEIVAAVVSGALPSHHLESRLGDCRRAARLRREALRRMTGRGVEGLPLDGMDYQAILGQCCEMPVGYVQMPVGVAGPLLLDGKQYHVPMATTEGCLVASVNRGCRAIAASGGAFSVLLRDAMSRAPVVKLPSIKRAAELKAFVETHTNFETLAAVFNRSSRFGKLQGIHCALAGRNLYMRFTCSTGDAMGMNMVSKGVEDVLGYLQNDFPDMDLISLSGNYCSDKKAAAVNWIEGRGKSVVCEARVKGGVVQSVLKTTVQKLVELNIVKNLAGSAVAGALGGFNAHASNIVTALFIATGQDPAQNVESSQCITMMEAVNDGGDLHISVTMPSIEVGTVGGGTCLASQAACLNLLGVRGPNRDSPGANARILATIVAGSVLAGELSLLAALAAGQLVKSHMKYNRSSKDVPG

SEQ ID NO: 10116 - protein, 368 aa, Zea mays
  VARIANT 354: note = Ancestral polymorphism is G, Derived polymorphism is S
MATQQQHAGPASGSASASSSSSGLHLPASPSAFGDTTHTKVFVGGLAWETNSGRLRRFYERFGDILEAVVITDRHSGRSKGYGFVTFREAESARKACEDPTPVIDGRRANCNLASLGRAQHPVHPGRPSSAGSYFGVPVPRAFYLGGYGHHRPFPLGYYQGFPVPQYSYPSYGTEYISPQGTLNPYPAQQYLPIYGVSAAANTANQTFNQLNPYISGGGNGYMSVHSYNMPGNQYVQLTGSNFSSASPTAQPSCQTPFLVESWKLFKVPLDCSRTKKSSVAVSTAFVLAWQEIILAFIRLSLSWSTDVPGNREVVPMDGASDPRARVALAFPLGLNRIRVMEPDAALMILYLTSSWKCSLCWNGVQHM

SEQ ID NO: 10117 - protein, 437 aa, Zea mays
  VARIANT 208: note = Ancestral polymorphism is P, Derived polymorphism is L
MGLAVAVGRRPTQRSGVSRSRCAGKRPTAAEPRHHRHRTEGRKERNPGGSRRYQRPDSDASRAGEADHTRTRTLSTALLRYAPSRPDRTGPTFLHLSARRRPTRMGAGTNNGLSNGAAAGQRADDGTTVFRGTAYSPLRTTVALALWLGAIHFNAFLVLASLFLFPRRVAALVLATQLFFMFLPLSDKSRLGRKIARFISKYVIGYFPVTLHVEDYGAFDPNRAYVFGYEPHSVLPIAVGILGDLVGFMPLPKMKILASSAVFYTPFLRQIWTWLGLAPASRKSFYSYLGAGYSCIIVPGGVQEILHMDHDSEVAFLKPRKGFVKIAIEMGCPVVPVFAFGQSYVYKWWRPGGKLIVKIARAIKFSPIIFWGKLGTPIPFATPMHVIVGRPIEVVKNPQPTIDEINQVHGQFVVAMQDLFEKYKSRTGYPDLQLRVL

SEQ ID NO: 10118 - protein, 624 aa, Zea mays
  VARIANT 64: note = Ancestral polymorphism is P, Derived polymorphism is L
MDSDYGVPRELSEVQKKRALYQPEVPPCLQGTTVRVEYGDAAIAADQAGAHVISHAFPHTYGQPLAHFLRKTAVVLDAKVISEHPVVRVGIVFCGRQSPGGHNVVWGLYEAIKAHNQNSKLIGFLGGSDGLLAQRTLEITNEVLASYKNQGGYDMLGRTKDQIRTTEQVNGAMASCQALKLDALVIIGGVTSNTDAAQLAETFAEAKCATKVVGVPVTLNGDLKNQFVETTVGFDTICKVNAQLISNVCTDALSAEKYYYFIRLMGRKASHVALECALQSHPNMVILGEEVAASKLTIFDITKQICDAVQARAEKDKNHGVVLIPEGLVESIPELYALLQEIHGLHGKGVSVENISSQLSPWASALFEFLPPFIRKQLLLHPESDDSAQLSQIETEKLLAQLVETEMNRRLVCFLWTLRRALTKERSLMQSVTSLATKLGEHCLPSLTAIMPMQVLGHVCYHIIAAGLNGYMATVTNVKSPVNKWRCGAAPISSMMTVQRWSRGPSATQIGKPAVHMASVDLKGKAYDVLRQNSSRFLLEDVYRNPGPLQFEGPGADSKPISLCVEDQDYMGRIKKLQEYLEKVKSIVKPGCSQDVLKAALSAMSSVTETLNIMTSSSTGQTAL

SEQ ID NO: 10119 - protein, 118 aa, Zea mays
  VARIANT 7: note = Ancestral polymorphism is W, Derived polymorphism is R
  VARIANT 14: note = Ancestral polymorphism is D, Derived polymorphism is Y
  VARIANT 15: note = Ancestral polymorphism is E, Derived polymorphism is K
  VARIANT 24: note = Ancestral polymorphism is A, Derived polymorphism is V
  VARIANT 32: note = Ancestral polymorphism is D, Derived polymorphism is N
  VARIANT 65: note = Ancestral polymorphism is L, Derived polymorphism is P
  VARIANT 66: note = Ancestral polymorphism is N, Derived polymorphism is S
  VARIANT 80..118: note = Derived polymorphism lacks residues 80 to 118
  VARIANT 84: note = Ancestral polymorphism is K, Derived polymorphism is M
  VARIANT 86: note = Ancestral polymorphism is S, Derived polymorphism is C
  VARIANT 88: note = Ancestral polymorphism is K, Derived polymorphism is R
MDYIMDWIETQLDDEAIFPQRLGAAFPPNFHDVVKTVLKRLFGVYAHIYHSHFHMIVKLKEEVHLNICFKHFVLFTLVSWIRTKWSPKSFLKTKLAMGSLLSLTSRKNLITKGSLQHH

SEQ ID NO: 10120 - protein, 113 aa, Zea mays
  VARIANT 78: note = Ancestral polymorphism is R, Derived polymorphism is H
  VARIANT 72..113: note = Derived polymorphism lacks residues 72 to 113
  VARIANT 55: note = Ancestral polymorphism is P, Derived polymorphism is S
  VARIANT 44: note = Ancestral polymorphism is A, Derived polymorphism is P
  VARIANT 43: note = Ancestral polymorphism is R, Derived polymorphism is C
  VARIANT 35: note = Ancestral polymorphism is G, Derived polymorphism is R
  VARIANT 17: note = Ancestral polymorphism is V, Derived polymorphism is A
  VARIANT 13: note = Ancestral polymorphism is K, Derived polymorphism is N
  VARIANT 7: note = Ancestral polymorphism is A, Derived polymorphism is V
MNGGSKAVVVVHKHAGVFISKSKEDALCTKNMVSGESVYREKRASVQVEYRVWNPFRLKLATVVLGGVDNIWIAPGTRVLYLGVASGIIVSHMSDIQNPFPFVVRMCNGRMKR

SEQ ID NO: 10121 - protein, 554 aa, Zea mays
  VARIANT 475..554: note = Derived polymorphism lacks residues 475 to 554
MSDPRGHAAGPDRDGDDPLAEDANSEEAWQTPEKEPVAVSKEAAARGGDTTPDAEPESDDGEGGVGSPDQMEPNADGERAPPVAAAEDPEGIVGSAKVETNGEDAISLDADGEEEDDDDDGDEEEEEEDDDDDDSTPDASPRAEVKVEGESSTGMTQSGAGHRVEVEPDPFLDGDDSGTEEEQGAFMAELERFHREHSLEFKPPKFYGKGLNCLKLWRQVAHLGGHEQVTVCKLWRQVGETFRPPKTCTTVSWSFRIFYEKALLEYEKHKVRTGQLQIPPPGLPQPSGADREVVVNQSSSARVRRDAAARAMQGWHAHRLLTNGTYGDNILKDKDTMPLPNRDKNLSFGVLKRKKASSPEYALKSSRSKTNKSQLRLPMLYENFSVLMIFVLICDTMHNFREDSMVVDVGEPADWVKINVRQTKDCFEVYALVPGLLREEVRKCMFNQILLDVWLSQGIQSSLIILGGSLRSRRWSTCHQESILTKHPLLSRFMVSYSCVHHLVILICRYEILFTSVLLTGDASSSVIFLDITRVYVNSVEEIGFCLSRYMMSS

SEQ ID NO: 10122 - protein, 88 aa, Zea mays
  VARIANT 31: note = Ancestral polymorphism is R, Derived polymorphism is C
  VARIANT 61: note = Ancestral polymorphism is A, Derived polymorphism is G
MAFSKKTLVVLIVPILLALLASTMPASQGGRALLGGEQCSMSNNCNEQLCGATCAVLGENAIGICKVVGGISSCCCVPKPSTSFNNKL

SEQ ID NO: 10123 - protein, 325 aa, Zea mays
  VARIANT 40: note = Ancestral polymorphism is Q, Derived polymorphism is K
  VARIANT 122: note = Ancestral polymorphism is F, Derived polymorphism is S
  VARIANT 126: note = Ancestral polymorphism is R, Derived polymorphism is H
  VARIANT 184: note = Ancestral polymorphism is T, Derived polymorphism is N
  VARIANT 298: note = Ancestral polymorphism is P, Derived polymorphism is S
MEVVAAAKQKAKKHIHLFYCSECEELALKVAASSDVIELQSINWRSFDDGFPNLFINKAHDIRGQHVAFLASFSSPAVIFEQVSVIFALPKLFIASFTLVLPFFPTGSFERVEEEGDVATAFTLAHILSMIPKSRGGPTSVVIYDIHALQERFYFGDDVLPCFETGIPLLLQRLRQLPDAENITIAFPDDGAWKRFHKLLQHFPMIVCNKVREGDKRIVRIKEGNPEGRHVVIVDDLVQSGGTLRECQKVLASHGASKVSAYVTHAVFPKQSYENFMASNSAGPGDQLAYFWITDSCPHTIKAIGQRPPFEVLSLAGSIADALQI

SEQ ID NO: 10124 - protein, 107 aa, Zea mays
  VARIANT 17: note = Ancestral polymorphism is T, Derived polymorphism is R
MAKGGGGGQREGSALKRAAIVAGGLALAWVTVETAFRPLMGRLRAAISSSTDTARDPDQEEPPAPASAAEAEKASAPEEPAAVEEKVEEKVVELEEKVEEAAADKAE

SEQ ID NO: 10125 - protein, 501 aa, Zea mays
  VARIANT 408..501: note = Derived polymorphism lacks residues 408 to 501
  VARIANT 366: note = Ancestral polymorphism is G, Derived polymorphism is R
  VARIANT 357: note = Ancestral polymorphism is G, Derived polymorphism is R
MCTGPDFTSADVVTASHDHIWLLRAQAPVTPCPPLNSASLPGCRRNRGGQAPSSFLLPANPAGTTARFPVRGTGEKGRDRERVRRGVRPICSAPRSSLSRRPHSQQPAKMGAGGRMTEKEREKHEQEQVARATGGGAAVQRSPVEKPPFTLGQIKKAIPPHCFERSVLRSFSYVAHDLSLAAALLYLAVAVIPALPCPLRYAAWPLYWVAQGCVCTGVWVIAHECGHHAFSDHALLDDAVGLALHSALLVPYFSWKYSHRRHHSNTGSLERDEVFVPRTKEALPWYAPYVHGSPAGRLAHVAVQLTLGWPLYLATNASGRPYPRFACHFDPYGPIYGDRERAQIFVSDAGVAAVAFGLYKLAAAFGLWWVVRVYAVPLLIVNAWLVLITYLQHTHPALPHYDSGEWDWLRGALATVDRDYGVLNRVFHHITDTHVAHHLFSTMPHYHAVEATRAIRPVLGEYYQFDPTPVAKATWREARECIYVEPENRNRKGVFWYNSKF

SEQ ID NO: 10126 - protein, 143 aa, Zea mays
  VARIANT 39..143: note = Ancestral polymorphism lacks residues 39 to 143
  VARIANT 51..143: note = Derived polymorphism lacks residues 51 to 143
  VARIANT 67: note = Ancestral polymorphism is G, Derived polymorphism is C
  VARIANT 120: note = Ancestral polymorphism is S, Derived polymorphism is Y
MEPGEVSGITRDNGVSQRRTWARGSGAGAPLYHPQRRAYGLLRGNAASRGGDTPPSPSTYAALHGACVGHGLHRGPGTSSPSADVSQRTSGRVTSSASDPHLLRSSEAVFGQFGCANDNSVGILIRAIGHQLSDLQLIYSVFG

SEQ ID NO: 10127 - protein, 134 aa, Zea mays
  VARIANT 120..134: note = Derived polymorphism lacks residues 120 to 134
MGRGRGRGKKLTTVRSHEDKGSSGEEVVPAKKRRGRPQKRFASKIDQADVENFVEQVDADQEEADDAKLKNSAAAGGTKRGRPLKEGSNIAVEDTNSTVRLSSDESTRTNGFRQIGSRRKNKPRRASEAGLECK

SEQ ID NO: 10128 - protein, 1434 aa, Zea mays
  VARIANT 875..1434: note = Derived polymorphism lacks residues 875 to 1434
  VARIANT 301..1434: note = Derived polymorphism lacks residues 301 to 1434
  VARIANT 108..1434: note = Derived polymorphism lacks residues 108 to 1434
MAGKTKGGKNKGKAQGAGQSASAEPEVPATDGAEVVNPENGEVNEPPVTEDGVKNVEKGDGDALEVVQPARKPAEGELHLYAVPVRTQSGEKLELQLSPGDSVIDVKQFLLDAPETCFYTCYNLILHTEDGSAHQLEDYNEISEIADITSSGCSLEMVAAIYDERSIRSHLRRVRELLSLSSLYVSLSTSLALHQESAQGKSAGPEKGPIQELDGLNFMEDSAGALTNLLASAPAEIKCVGSIVFSSFNPPPSYRRLHGDLIYIDVTTLEGNKYCITGSSKFFYVNSSKGSIFDSKPTKQGLEASTLIGLLQKISTKFKKGFRELLDRRASAHPFENVQSLLPVTSWLGAFPVPVAVTVPLCICGYVGQGFRGSVLHSIFLFVLEHRRDEARAEDSVVLSYGTELIGMQRDWNEELQSCQEFPHGNPQERILRGRARYKVTCDFVDAAVKGAVGVINRCIPPINPTDPECFHMYVHNNIFFSFAVDADYEYISKDHKPDCQNGSSRSTKVSSPDVITKPDHDESAEVVDSKSEEAQITDSEQATYASANNDLKGTKAYQEADVSGLYNLAMAIIDYRGHRVVAQSIIPGILQGDKSDSLLYGSVDNGKKISWNETFHSKVVEAAKRLHLKEHVVLDGSGNPVKLAATVECKGIVGSDDRHYILDLMRVTPRDSNYIGQGHRFCVLRPELIASFVEAESMKQSLKQKVPDAPVASTSDAKATSVEADDKSEESSVHTHKENDNSSSEILFNPNVFTEYKLDGSPEEIAADEELVKRAGTYLIDIVIPKIVQDLCSLDISPMDGQTLTDALHLHGINIRYLGKIAGMVKHLPHLQDLFSAEIIVRSAKHVIKDILRQSLDHDIGPAIAHFLNCFMGKVLGASTEGSLSDMQSKTLKGHENSQTQKSTKGHKLSNAAASRKSLSAYSHLTSDGIWFSIKEFAKSKYQFEVPDDARLSAKRVAVLRNLCQKVGITIAARKYDLDASTPFEASDILNLQPVVKHSVPTCTEAKNLMEAGKVRMAEGTLNEAYALFSEAFSLLQQITGPMHKDAANCCRYLAMVLYHAGDTAGAVVQQHRELIINERCLGLDHPDTAHRHHVLNSTSFNVILLSFNTLFFFSYGNMALFYHGLNQTELALRHMSRTLLLLSLASGPDHPDVAATLINVAMMYQDASNMNTALRYLQEALMKNERLLGPVHVQTAVCYHALAIAFSCMSLYKLSIQHEKKTYDILVKQLGENDSRTEDSKNWLNTFKLREEQVNAQKQKGQEANASDNAVKFLKANPAVLQAMKAAAIQSGGVSANVNRSLNAAVVGEGVPRLRGVDERAARATAEARKKAAARGLNVRNGPVANHASDELAQILKLINAVSGSSTPGSAKTEVSASEGQATNGCIQNGTDTEPKAADTNGLSASVKSTVNAPFGLGTTLESKKQKSKQKS

SEQ ID NO: 10129 - protein, 159 aa, Zea mays
  VARIANT 8: note = Ancestral polymorphism is R, Derived polymorphism is C
  VARIANT 14: note = Ancestral polymorphism is P, Derived polymorphism is L
  VARIANT 16: note = Ancestral polymorphism is L, Derived polymorphism is P
  VARIANT 18: note = Ancestral polymorphism is R, Derived polymorphism is H
  VARIANT 24: note = Ancestral polymorphism is Q, Derived polymorphism is H
  VARIANT 54: note = Ancestral polymorphism is P, Derived polymorphism is L
  VARIANT 59..159: note = Derived polymorphism lacks residues 59 to 159
  VARIANT 64..159: note = Derived polymorphism lacks residues 64 to 159
  VARIANT 75..159: note = Derived polymorphism lacks residues 75 to 159
  VARIANT 102: note = Ancestral polymorphism is G, Derived polymorphism is R
  VARIANT 105..159: note = Derived polymorphism lacks residues 105 to 159
  VARIANT 115: note = Ancestral polymorphism is H, Derived polymorphism is Y
  VARIANT 116: note = Ancestral polymorphism is R, Derived polymorphism is C
MLTALVRRMGPYLLLLHRALLLAQAYLAIYFATLALTAVTSGLEPLRFVHASSPAAYAWTQAAQSLGFMAYLVLQMVDLVVVFSGTTSPENDDNGDAAKALRLTQMVVGLVAVFHRANWRVYAVYAVCFAIVCACARAERRKKAYLAGTDCVVEEWKKS

SEQ ID NO: 10130 - protein, 91 aa, Zea mays
  VARIANT 24..91: note = Derived polymorphism lacks residues 24 to 91
  VARIANT 25: note = Ancestral polymorphism is G, Derived polymorphism is C
  VARIANT 40: note = Ancestral polymorphism is G, Derived polymorphism is R
  VARIANT 70: note = Ancestral polymorphism is G, Derived polymorphism is D
MGMDKCNANGQVWREQRGQRHRTQCGHGNEQVAHQCVHIRDVGVCGDHVHRRLMSKMLGRIGDSPLIRFDTYTCGACAVSGTLKWDMTTVM

SEQ ID NO: 10131 - protein, 68 aa, Zea mays
  VARIANT 56: note = Ancestral polymorphism is A, Derived polymorphism is V
  VARIANT 51: note = Ancestral polymorphism is D, Derived polymorphism is H
MASRAAALLVAVAVAAVLFAAASAQETDLGVPPAPAPVTGAAAGAAASALDVACSVVLSVLVAGGLMQ

SEQ ID NO: 10132 - protein, 105 aa, Zea mays
  VARIANT 9: note = Ancestral polymorphism is C, Derived polymorphism is Y
  VARIANT 54: note = Ancestral polymorphism is S, Derived polymorphism is L
MDDDIDSSCSTPFASAPSSPGRPHAISGGSGGGGYFFSAPASPIHHLLLSTSCSASATPSTGGRGCVGDVEFEFGGPGGPMISADELFHNGQIRPLTLPPLRIER

SEQ ID NO: 10133 - protein, 110 aa, Zea mays
  VARIANT 7..110: note = Derived polymorphism lacks residues 7 to 110
  VARIANT 12: note = Ancestral polymorphism is P, Derived polymorphism is L
  VARIANT 32..110: note = Derived polymorphism lacks residues 32 to 110
  VARIANT 76..110: note = Derived polymorphism lacks residues 76 to 110
MLLGPLQEAVAPALPKVRGHIGSAYGEEDAREAGSSSLFGGDGSSDDTHPSSGSGHRSSVASSQKSLDEFEFGVTWDGDGLQEDEVEQGKIFLGVSRLFRGSVVTSAEVR

SEQ ID NO: 10134 - protein, 158 aa, Zea mays
  VARIANT 35: note = Ancestral polymorphism is F, Derived polymorphism is L
MITLDSVFLKRITVLKMEKEVRSPFIFPDVVQEYFISANSEEILGIVRDNWLQSGHENLHNSIDEAIMLKVLIKIISVRYVPLPRAPVVGDRDPVWPQPPQRSTMKNESSSSSSTRPLARSIRSFMPLAAQMLSGSTVGIFPSTYDLWDSLFGKSIIC

SEQ ID NO: 10135 - protein, 124 aa, Zea mays
  VARIANT 67: note = Ancestral polymorphism is P, Derived polymorphism is L
  VARIANT 110: note = Ancestral polymorphism is V, Derived polymorphism is I
MRTCRHVAGATTWHGSPPPTPRRYKSRPRPRLRSPYYPGKRSSEQRETSSPPSHPAAAVSTVANKPPHPGMEMKKIACAVLVAASATVALAAEAPAPSPTSGSSAVAPAIVGAAVASFFAYYIH

SEQ ID NO: 10136 - protein, 73 aa, Zea mays
  VARIANT 44: note = Ancestral polymorphism is G, Derived polymorphism is S
  VARIANT 1: note = Ancestral polymorphism is T, Derived polymorphism is M
MAGATAEEPLVGDGAGASAASATVAEAATRTAQAIFFISIPGCGGLLATVETAAAGWDGGEEVSLCSDDRLPG

SEQ ID NO: 10137 - protein, 127 aa, Zea mays
  VARIANT 32: note = Ancestral polymorphism is L, Derived polymorphism is H
  VARIANT 46: note = Ancestral polymorphism is K, Derived polymorphism is N
  VARIANT 55: note = Ancestral polymorphism is A, Derived polymorphism is T
MSERRRGAGAGTGTRKDEVVTREYTINLHKRLHGCTFKKKAPNAIKEIRKFAQKTMGTTDVRIDVKLNKHVWSSGIRSVPRRVRVRIARKRNDEEDAKEGQYSLVTVAEIPPEGLKGLGTKVVEDED

SEQ ID NO: 10138 - protein, 163 aa, Zea mays
  VARIANT 96: note = Ancestral polymorphism is G, Derived polymorphism is D
  VARIANT 51: note = Ancestral polymorphism is A, Derived polymorphism is P
  VARIANT 38..163: note = Derived polymorphism lacks residues 38 to 163
  VARIANT 21: note = Ancestral polymorphism is R, Derived polymorphism is C
MASTSPEPAAADETIDTIHIRRLECSDHERGFVALLSQLSPCPDLTTSVFATRFAELAAQGDDHIILVAEDPSASDRRILATGCLFVERKFLRGCGKVGHVEDVVVDAAARGRGLGLRIVRRLVEISRDAGCYKVILDCTPELRAYYAKCGFVEKGVQMAVYF

SEQ ID NO: 10139 - protein, 568 aa, Zea mays
  VARIANT 342..568: note = Derived polymorphism lacks residues 342 to 568
  VARIANT 341..568: note = Derived polymorphism lacks residues 341 to 568
MEAAPMRKASSQASLADPDDFDLTRLLNHKPRINVDRQRSFDDRSLGEISLAGAGTASRGGWGYGGGGMESYESMYSPGGGLRSYCGTPASSTRLSFEPHPLIGEAWDALRRSMVSFRGQPLGTIAAVDHSSGEVLNYDQVFVRDFVPSALAFLMNGEPEIVRNFLLKTLLLQGWEKRIDRFKLGEGAMPASFKVLKDPKRGVDKLVADFGESAIGRVAPVDSGFWWIIILRAYTKSTGDMTLAETPMCQKGIRLIMNQCLAEGFDTFPTLLCADGCCMIDRRMGVYGYPIEIQALFFMALRCALLMLKPDAEGKEIMERIVTRLTALSYHMRSYFWLDFQQLNDIYRFKTEEYSHTAVNKFNVNPESIPDWLFDFMPTRGGYFVGNVSPARMDFRWFALGNCVAILASLATPDQAAAIMDLIEERWEDLVGEMPVKICYPAIEGHEWQIVTGCDPKNTRWSYHNGGSWPVLLWLLTAACIKTGRLKIARRAIDLAEARLARDGWPEYYDGKLGRYIGKQARKLQTWSIAGYLVAKMMVEDPSHLGMISLEEEKPTKPVLRRSASWTG

SEQ ID NO: 10140 - protein, 511 aa, Zea mays
  VARIANT 366..511: note = Derived polymorphism lacks residues 366 to 511
  VARIANT 386..511: note = Derived polymorphism lacks residues 386 to 511
  VARIANT 413..511: note = Derived polymorphism lacks residues 413 to 511
  VARIANT 474..511: note = Derived polymorphism lacks residues 474 to 511
MATSSTTALHSQFRPPLRAPRHLRPLPHSYSSSSRTRGCAPVRASAASASAPAQREIAAGVPWGCEIESLESAASLERWLIDSGLPEQRLAIQRVDIGERGLVALKNIRKGEKLLFVPPSLVITADSEWGRPEVGDVMKRNSVPDWPLIATYLISEASLEGSSRWISYIAALPRQPYSLLYWTRAELDAYLVASPIRKRAIQRITDVIGTYNDLRDRIFSRHPDLFPEEVYNIETFLWSFGILFSRLVRLPSMDGRVALVPWADMLNHSPEVETFLDFDKSSRGIVFTTDRSYQPGEQVFISYGKKSSGELLLSYGFVPKEGTNPNDSVELLVSLDKSDNCYKEKLQALKRNGLSESESFPLRVTGWPVELMAYAFLVVSPPDMSQCFEEMAAAASNKTSSKPGLNYPDLEEQALQFILDCCESNIEKYTKYLEGGAGSPEVPMNAKQANRTLLLKQLARDLCISERRILYRTQYVSQCFDLAAKASDTCMPNQTAVQALGRKFHLDARNK

SEQ ID NO: 10141 - protein, 503 aa, Zea mays
  VARIANT 366..503: note = Derived polymorphism lacks residues 366 to 503
  VARIANT 386..503: note = Derived polymorphism lacks residues 386 to 503
  VARIANT 413..503: note = Derived polymorphism lacks residues 413 to 503
  VARIANT 474..503: note = Derived polymorphism lacks residues 474 to 503
MATSSTTALHSQFRPPLRAPRHLRPLPHSYSSSSRTRGCAPVRASAASASAPAQREIAAGVPWGCEIESLESAASLERWLIDSGLPEQRLAIQRVDIGERGLVALKNIRKGEKLLFVPPSLVITADSEWGRPEVGDVMKRNSVPDWPLIATYLISEASLEGSSRWISYIAALPRQPYSLLYWTRAELDAYLVASPIRKRAIQRITDVIGTYNDLRDRIFSRHPDLFPEEVYNIETFLWSFGILFSRLVRLPSMDGRVALVPWADMLNHSPEVETFLDFDKSSRGIVFTTDRSYQPGEQVFISYGKKSSGELLLSYGFVPKEGTNPNDSVELLVSLDKSDNCYKEKLQALKRNGLSESESFPLRVTGWPVELMAYAFLVVSPPDMSQCFEEMAAAASNKTSSKPGLNYPDLEEQALQFILDCCESNIEKYTKYLEGGAGSPEVPMNAKQANRTLLLKQLARDLCISERRILYRTQYILRRRLRDMRGGELRALSLFNGLRKLFK

SEQ ID NO: 10142 - protein, 612 aa, Zea mays
  VARIANT 242..612: note = Derived polymorphism lacks residues 242 to 612
  VARIANT 224: note = Ancestral polymorphism is G, Derived polymorphism is S
  VARIANT 206..612: note = Derived polymorphism lacks residues 206 to 612
  VARIANT 193..612: note = Derived polymorphism lacks residues 193 to 612
  VARIANT 119..612: note = Derived polymorphism lacks residues 119 to 612
MDNIEISVSNDERRNRTDADISEDEPRHTRMRSLRKKALHASSRLTHSLKKRGKRKVDCRVPRIAIEDVRDAEEEQAVSSFREVLFARGLLPIKHDGYHMMLRFLKARKFDFGKAAQMWADMLRWRKEFGTDTIFEDFEFHELEEVLQYYPHGYHGVDKEGRPVYIELLGKVEPNKLMQITTVERYIKYHVQEFERVFREKFPACSISAKRHIDTTTTILDVHGVGWKNFSKIARDLVRCMQKIDGDYYPETLHQMFIVNAGPGFKLIWSTVKGLLDPKTSSKIHVLGTRYQSRLLEAIDASQLPDYFGGSCTCSNHGGCLRSNKGPWSDPSIMKLVHSMELLKEVAHISDIEETITGSVRLRALKLPEQISDTSNAESGSDVDDLGSPVAPEDVEYPSLAPVREEVRESWSTTYSGSIGMSRMADKVVGSNRRYNSTGNEIRQFNTEQDSLTNGGLPAPAGWRAQNDGEGNDDGFLKYISRRVIAIFLKVLSFLRFFIRRRQHLANDHPHTATAPSNLADLQTFKEDRVNPCLERLDRLELISNQLSRKPPELPQDKDRAIQDSFDRIKSIEFDLEKTKKVLHATVIKQMQMAETLEAVTEPDLRRRKFCT

SEQ ID NO: 10143 - protein, 656 aa, Zea mays
  VARIANT 4: note = Ancestral polymorphism is K, Derived polymorphism is M
  VARIANT 8: note = Ancestral polymorphism is C, Derived polymorphism is R
  VARIANT 20..656: note = Derived polymorphism lacks residues 20 to 656
  VARIANT 32: note = Ancestral polymorphism is P, Derived polymorphism is L
  VARIANT 154: note = Ancestral polymorphism is W, Derived polymorphism is R
  VARIANT 187..656: note = Derived polymorphism lacks residues 187 to 656
  VARIANT 332..656: note = Derived polymorphism lacks residues 332 to 656
  VARIANT 422..656: note = Derived polymorphism lacks residues 422 to 656
MVAKMLPCSWISACVLVLLLSLHPRVHAFYLPGTFMHTYSPGEVISAKVNSLTSIETELPFSYYSLPYCKPLDGVKKSAENLGEILMGDQIDNSPYRFQVNVNESVFLCTTDPLTKEQAELLKRRARDLYQVNMVLDNLPVMRFTEQNGVIIQWTGFPVGYNPIGSNEDYIINHLKFRVLVHQYQAQGDVVVTSEDGVAMVESDRKSGFQIVGFEVVPCSVRRDPESMSKLKMYDKVDSVNCPLELEKSQAIRENERITFTYEVEYVKSNIKWPSRWDAYLKMDGAKVHWFSIMNSMMVVFFLAGIVFVIFLRTVRRDLTRYEEMDKEAQAQMNEELSGWKLVVGDVFREPSFPKLLCVMVADGIQITGMAVVTIVFAALGFLSPASRGMLLTGMIILYLFLGIIAGYVGVRVWRTIKGTSEGWKSVAWLTACFFPGIVFIILTVLNSILWGKKSTGALPISLFFTLLALWFCISVPLTLIGGLLGTRAASIDYPVRTNQIPREIPERKFPSWLLVLGAGTLPFGTLFIELFFILSSIWLGRFYYVFGFLFIVLFLLVIVCGEVSLVLTYMHLCVEDWKWWWKAFFASGSVAFYVFLYSINYLVFDLRSLSGPVSATLYLGYSLIMALAIMLSTGAIGFLLSFYFVHYLFSSVKID

SEQ ID NO: 10144 - protein, 286 aa, Zea mays
  VARIANT 40: note = Ancestral polymorphism is A, Derived polymorphism is S
MSSGRYMAYSPSPSTTPHSPRIHGLRTPSAAVAEQEKYLSELLAERHKLTPFIPVIPHSVRLLNQEIFRVSTLLENASLLNQSGLEHGSPLTTGGLYSNGAATDMNGWPSAFQSESSPAYSWLGGSQGSSSGLIVKKTMKVDIPVDKYPTYNFVGRILGPRGNSLKRVEANTDCRVLIRGRGSIKDPAREEMMRGKPGYEHLNEPLHILVEAELPVDIIDARLMQAREILQDLLKPVDESQDFFKKQQLRELAMLNGTLREEGMQRFGSASPFHNSLGMKRAKTRG

SEQ ID NO: 10145 - protein, 1387 aa, Zea mays
  VARIANT 1265..1387: note = Derived polymorphism lacks residues 1265 to 1387
MTSPSENPNPNPNTPFEIGKLFRPTNPMPNATPNPIFPGVAGGPAPSGPYSYPPVTPPFHRGPYIHYPQDPHAMTRPVVSFPMPNPNLNPNPNANPNAVAPGPNPGARLMQLLGNSGPTQFETAVSMPPPTSEFAQLQLLPAMPSAPPARMLSSTSSKVPRGRLLGTGERAVHDVDSRLPGEAQPPQLEVTPITKYTSDPGLVLGRQIAVNRTYIVYGLKLGNIRVLNINTALRSLLRGHTQRVTDMAFFAEDVHRLASASVDGRIFVWRIDEGPDEENKPQITGKIEIAIQIVGEAEAYHPRICWHSHKQEILFVGIGNCVLRIDTTKVGRGKDFTVEGPVKCHLEKLIDGVRLVGKHDGGVTDLSISQWMSTRLASGSKDGTVKIWDDRKQVPLSIFKPHDGQAVYSVAFLTAPERPNHINLITAGPVNREVKIWASTNEDGWLLPSDSETWKCTQTLELVSSLEPRVEEAFFNQVAVLHQASLILLANAKKNSIYAVHVEYGPDPASTRLDYIADFTVAMPILSLTGTHESQPDGEQVVQVYCVQTMAIQQYGLELSLCSPPTADSTGFGRDPAISRVYEAALEMAGTEPSIGTSCTDSYSVTALSKQPNVDQSAGNAVAFSYLTLSVNSELVISCDSSAELDLKPSAPPLAYSEGDSSMPLPFTALAPKIEVPGSGPAPGTRDIEQSAFNYTNTTNRNMERDALKRQDTPMPIRKDILGKDEPRDGQSNVPMLPNPHMVFQVGGNATRLVTPSEIISGTLSSAENNDVSESGGENRDVSSGSSWVAEVEPKHIDESKPDQNLGLEAVKETQIVCENMAKTSMEQTVEMITKRSVTTDKHSVEESQSSSDRPASDQTCGTDENVLKKFVEMPEKIDYSASREQPSLFTKEKVLHPQTSGQPSPPVSAFNSTEPHEPLSSTYLPVSSFPEDAATQGMLQQKDMEKQLSTVVPVSIAKEGKRLETLLGRTVEKSFKANIDAFWVRLQEENTKREKADRERMQQLCTLITSSINKDLPSNLEKSLKKEISSLGPVVARAITPVVEKSITSVVSDSVQKGVGDKVCNQLEKSITGKLEATLAKQIQMQFHTSGRQALQDALRTSFESLLVPAFEQACKTMFEQVDGAFQKGMSEHSNAIQQQVEAAHTPLALTLKETINSASSITQSFSSELLDGNRKLLALVTSGNAKAHNTSALQPINGPMGGPQEVEAPLDPMRELSRLISERKFDEAFTMALQRSDVSIVSWLCSQVDLRALCAMVPVPLNQGVLLALLQQLAIDIHNETSRKVQWMTDVAMAINPADQIIAVHLGQFGTNSSCLVLVGPHKILKSHVDIVSGGNCKIGVILIEYSMTVDLTLCDDVELESNEPGTQDHQMPTTYLRQHLGIRT

SEQ ID NO: 10146 - protein, 444 aa, Zea mays
  VARIANT 128: note = Ancestral polymorphism is S, Derived polymorphism is F
MPPRAATAKPSWLGDALLFAAGAVVATVALLAFANPFAQPEGYYGDGAVPSSGSGSGSSSVGAAGGGGGAAAHTFYDDPALAYTVDRPITGWDEKRAGWLRAHPEFAGGGEKGRVLMVSGSQPTPCRSPGGDHTLMRLLKNKADYCRLHGVQLLYNMALLRPSMDRYWAKIPVIRAAMVAHPEAEWVWWVDSDAVLTDMDFRLPLRRYRAHNLVVHGWPSLVFEASSWTSLNAGVFLIRNCQWSLDFMDAWAAMGPDSPDYQHWGAVLKSTFKDKVFDESDDQSALVYMLLQEGSRWRDKVFLESGYYFEGYWMEIVGRLANMTERYEAMERRPGAAALRRRHAEREHAEYAVARNAALGGAGLAETGVHGWRRPFVTHFTGCQPCSGQRNEHYSGDSCDQGMRRALNFADDQVLRAYGFRHASSLSDDVQPLPFDYPAKAVTS

SEQ ID NO: 10147 - protein, 211 aa, Zea mays
  VARIANT 163: note = Ancestral polymorphism is C, Derived polymorphism is F
  VARIANT 94: note = Ancestral polymorphism is S, Derived polymorphism is L
  VARIANT 61: note = Ancestral polymorphism is L, Derived polymorphism is P
  VARIANT 45: note = Ancestral polymorphism is L, Derived polymorphism is Q
  VARIANT 39: note = Ancestral polymorphism is L, Derived polymorphism is Q
MKHPKINSSTGSLDGSIYQDRIDIIWKGQKLRFQRILELMTGIDLSGNSLSHCIPDELTNLQGLQFLNLSRNRLSCGIPSSIGSLNVLESLDLSLNKLSGAIPPGLSNMLFLSLNKLSGLYYRVIAGVIFGFWLWYGTLFSVAKLREELEVFTKEVIRFGNYCKDPQWHNLDRYFEKLASELAPRSYLKGKAESVMQKLVTCVQNTVVRMA

SEQ ID NO: 10148 - protein, 406 aa, Zea mays
  VARIANT 23..406: note = Derived polymorphism lacks residues 23 to 406
MVPLCGFCGKQRSMIYCRSDAASLCLSCDRSVHSANALSRRHRRTLLCDRCGLQPASVRCLEDNTSLCQNCDWNGHDAASGASGHKRQAINCYSGCPSSAELSRIWSFIIDIPTVAAEPNCEDGLSMMTIDDSDVTNHHGASDDKRLLEIANTALMSDPPSPDKLKPLIGSSSGDGFDVLPLATDQPAGPVSATPKVPYARDDNKFNDGMYEDLCVDDADLTFENYEELFGTSHIRIEELFDDAGIDSYFEMKETPPFDFNEQPKIVQLQCSDVVPADCAMSNTGERADSSLCIPVRQVRSSISHPLSGLTGESSAGDHQDCGVSPILLMGEPPWYSPGPEGSLAGGSRDSALTRYKEKKKKRMFDKKIRYASRKARADVRKRVKGRFIKAGEAYDYDPLSQTRSY

SEQ ID NO: 10149 - protein, 387 aa, Zea mays
  VARIANT 35: note = Ancestral polymorphism is P, Derived polymorphism is L
  VARIANT 173: note = Ancestral polymorphism is D, Derived polymorphism is N
  VARIANT 217: note = Ancestral polymorphism is R, Derived polymorphism is S
MADQANQPTVLHKLGGQFHLSSSFSEGVRARNICPSFSPYERRFATRNYMTQSLWGPSMSVSGGINVPVMPTPLFANAPAEKGGKNFMIDFMMGGVSAAVSKTAAAPIERVKLLIQNQDEMIKSGRLSEPYKGIADCFKRTIKDEGFSSLWRGNTANVIRYFPTQALNFAFKDYFKRLFNFKKDRDGYWKWFAGNLASGGAAGASSLFFVYSLDYARTRLANDAKAAKGGGDRQFNGLVDVYRKTLKSDGIAGLYRGFNISCVGIIVYRGLYFGLYDSIKPVVLTGSLQDNFFASFALGWLITNGAGLASYPIDTVRRRMMMTSGEAVKYKSSLDAFQQILKKEGPKSLFKGAGANILRAIAGAGVLSGYDQLQILFFGKKYGSGGA

SEQ ID NO: 10150 - protein, 232 aa, Zea mays
  VARIANT 48: note = Ancestral polymorphism is E, Derived polymorphism is D
  VARIANT 164: note = Ancestral polymorphism is K, Derived polymorphism is N
  VARIANT 166: note = Ancestral polymorphism is D, Derived polymorphism is Y
MSSAVEPVSCSKVDVPAAGPDPEDAAAPAGHGEAAPCCHEEEEEEEEEKAPQAIDLGPMVSIKEQLEKDKDDESLRRWKEQLLGGVDLNSVGETLEPDVRITSLSILSPGRRDIVLPLPVDATKGVWFTLKEGSPYRLKFTFSVSSNIVSGLRYTNTVWKTGLKVDRAKEMLGTFSPQPEPYTYVTPEDTTPSGMFARGSYSARTKFLDDDRKCYLEINYAFDIRREWPSAS

SEQ ID NO: 10151 - protein, 211 aa, Zea mays
  VARIANT 173: note = Ancestral polymorphism is G, Derived polymorphism is A
MGSHDHYTSASQFVFAAVDSNPNPRPSHSHKPKTTVQIPITSLPERARAGPPDAAAAAAKIQAALRGYLVRRHAAAVRGADAEATRLERLLRRQETVDAVRGDERERARFSEALMAVLLRLDAVPGRYPAVRDARRAVSRRVVGLQEVFDAVVAAPAAQTCGVPASLEQVLEGIWGVGEAPVPVPPSPAMAAAEEEVRRGGSYWARFFGGV

SEQ ID NO: 10152 - protein, 314 aa, Zea mays
  VARIANT 9..314: note = Derived polymorphism lacks residues 9 to 314
  VARIANT 162: note = Ancestral polymorphism is D, Derived polymorphism is E
MEFFPGAYKKATAALDEAARARLRGPFISDTVAPSPAPSGGAADADDDLMDSVDEFYNGYGEHGTDGGAVAKDAVASRATEWKEALRLTLADAAADAAAVRIRAEAERIVRDAGPAAVGGGGGIRKHLVERLRARGYDARLCRSSWGRTSSIAAPGTYEYVDVTVGSPPPLPSARYIVEVNVAAEFEVARPSAEYQDLLSSLPPVLVSSPPALKELAAAMCAAAAESIRGAGMHVPPWRRASYVQAKWSARFERTEAAAPVAAATGPRAEGGPRAAARARRPGVGKNCGMEMGRRQGVMGREALVRVRPLFRGF

SEQ ID NO: 10153 - protein, 470 aa, Zea mays
  VARIANT 7: note = Ancestral polymorphism is R, Derived polymorphism is Q
  VARIANT 101: note = Ancestral polymorphism is Y, Derived polymorphism is H
MGSPVVRHALLLSLLCAGALGFLLCCHGAAVAPAYVTVSAASFAPSSTCSASDPVAPQQNDTFTVLRLTHRHGPCAPLRASSLAAPSVADTLRADQRRAEHILRRVSGRGAPQLWDYKAAAATVPANWGYDIGTSNYVVTASLGTPGMAQTLEVDTGSDLSWVQCKPCAAPSCYRQKDPLFDPAQSSSYAAVPCGRSACAGLGIYASACSAAQCGYVVSYGDGSNTTGVYSSDTLTLAANATVQGFLFGCGHAQSGGLFTGIDGLLGFGREQPSLVQQTAGAYGGVFSYCLPTKSSTTGYLTLGGPSGVAPGFSTTQLLPSPNAPTYYVVMLTGISVGGQPLSVPASAFAAGTVVDTGTVITRLPPAAYAALRSAFRSGMASYPSAPPIGILDTCYSFAGYGTVNLTSVALTFSSGATMTLGADGIMSFGCLAFASSGSDGSMAILGNVQQRSFEVRIDGSSVGFRPSSC

SEQ ID NO: 10154 - protein, 458 aa, Zea mays
  VARIANT 320: note = Ancestral polymorphism is G, Derived polymorphism is S
  VARIANT 6: note = Ancestral polymorphism is K, Derived polymorphism is N
MASISKFLLALLFSYHTLIAHAADDRRHKVLSVGSLMKSSTACSEPKVTPPSTGVTVPLHHRYDPCSPVPSKKVPTLEERLRRDQLRAAYIKRKFSGAGDIEQSDAATVPTTLGTSLSTLEYVITVGIGSPAVTQTMSMDTGSDVSWVQCKPCSQCHSEVDSLFDPSSSSTYSPFSCSSAPCAQLSQSQEGNGCMSSQCQYIVNYGDSSSTTGTYSSDTLTLGSSAMTDFQFGCSQSESGGFNDQTDGLMGLGGGAQSLASQTAGTFGTAFSYCLPPTSGSSGFLTLGTGSSGFVKTPMLRSTQIPTYYVVLLESIKVGSQQLNLPTSVFSAGSLMDSGTIITRLPPTAYSALSSAFKAGMQQYPPATPSGILDTCFDFSGQSSISIPTVTLVFSGGAAVDLAFDGIMLEISSSIRCLAFTPNGDDSSLGIIGNVQQRTFEVLYDVGGGAVGFKAGAC

SEQ ID NO: 10155 - protein, 96 aa, Zea mays
  VARIANT 12..96: note = Derived polymorphism lacks residues 12 to 96
  VARIANT 15: note = Ancestral polymorphism is P, Derived polymorphism is L
  VARIANT 24: note = Ancestral polymorphism is P, Derived polymorphism is S
  VARIANT 25: note = Ancestral polymorphism is G, Derived polymorphism is S
  VARIANT 28: note = Ancestral polymorphism is C, Derived polymorphism is R
  VARIANT 32: note = Ancestral polymorphism is P, Derived polymorphism is L
  VARIANT 33: note = Ancestral polymorphism is D, Derived polymorphism is N
  VARIANT 39: note = Ancestral polymorphism is R, Derived polymorphism is H
  VARIANT 40: note = Ancestral polymorphism is A, Derived polymorphism is V
  VARIANT 67: note = Ancestral polymorphism is G, Derived polymorphism is D
  VARIANT 69: note = Ancestral polymorphism is P, Derived polymorphism is L
  VARIANT 74: note = Ancestral polymorphism is L, Derived polymorphism is Q
MVDLLGDPAWPQLHPRPCTDTPWPGLQCELAPDDACVLRANRLHLGLDVATPPCRPRARLDPTSLRGLLHLRTQSIFGCFGAAQAPVELSPALFTS

SEQ ID NO: 10156 - protein, 531 aa, Zea mays
  VARIANT 46..531: note = Derived polymorphism lacks residues 46 to 531
  VARIANT 104: note = Ancestral polymorphism is S, Derived polymorphism is Y
MYARHRYLVHHESIAAVVLVGWLRRFRGMHPRFILLPASVSLYKQQVHSEAATHCISDISVAERLNRKSSMTSSIPKLLLLLFFLSHRSPIARAGDDGSYKVLSMGSPRTDSVCSQSKAVPSSSAGAATVPLHHRHGPCSPLPTKKMPTLEETLHRDQLRAAYIQRKFSGGGGAGGDVQRSDATVPTALGTSLNTLEYLITVGLGSPATSQTMLIDTGSDVSWVQCKPCSQCHSQADPLFDPSSSSTYSPFSCGSADCAQLGQEGNGCSSSSQCQYIVTYGDGSSTTGTYSSDTLALGSSAVRSFQFGCSNVESGFNDQTDGLMGLGGGAQSLVSQTAGTLGRAFSYCLPPTPSSSGFLTLGAAGGSGTSGFVKTPMLRSSQVPTFYGVRLQAIRVGGRQLSIPASVFSAGTVMDSGTVITRLPPTAYSALSSAFKAGMKQYPPAQPSGILDTCFDFSGQSSVSIPSVALVFSGGAVVSLDASGIILSNCLAFAGNSDDSSLGIIGNVQQRTFEVLYDVGRGVVGFRAGAC

SEQ ID NO: 10157 - protein, 162 aa, Zea mays
  VARIANT 76: note = Ancestral polymorphism is L, Derived polymorphism is M
  VARIANT 53: note = Ancestral polymorphism is A, Derived polymorphism is G
  VARIANT 24: note = Ancestral polymorphism is S, Derived polymorphism is A
  VARIANT 9: note = Ancestral polymorphism is H, Derived polymorphism is Q
MAMSYTTLHYFAVSCALLVASVSSLPPPAVFQVGDERGWTVPANGTETYNHWAKRNRFQVGDVLDFKYGANDSVLLVAHDDYKQCSTETPLGRFTGGDTKFALDRYGPVYFVSGVAANREWQWQIRRAQPGHLAGRLRLRFQFHFSEPEPEPEPAAAGQRCV

SEQ ID NO: 10158 - protein, 264 aa, Zea mays
  VARIANT 177: note = Ancestral polymorphism is A, Derived polymorphism is S
MDSSFLPAGADNGSAGGANNGGGAAQQAPPIREQDRLMPIANVIRIMRRVLPAHAKISDDAKETIQECVSEYISFITGEANERCQREQRKTITAEDVLWAMSRLGFDDYVEPLSVYLHRYREFEGEARGVGLAPAPPRGDHHHHHHSVPPSMLNKSRGPGSGAVMLPHHHHHDMHASMYGGAVPPPPHHGFLMPHPQGGHYLPYPYEPTSYGGEHALASGYYGGAAYAPGNNGGSGDGSGGSASHAPPGGSGGGFDHPHTFAYK

SEQ ID NO: 10159 - protein, 374 aa, Zea mays
  VARIANT 152: note = Ancestral polymorphism is G, Derived polymorphism is C
MGNALKCFTGEEEGHHFHGRRDRYPYYQPQSYSGGDPHPPAAAHQQGLAAPHGFVTFVPVTQAAGPNAGHQQRSSGVHDRRPVASKYESNTEDIDESSAEGLCSAKSYAKANPLLIQVPVLGTTRKFWRLSDKATRITRKLALILRSHHAVGKHLATPLQVSNVWIGSTGGSVKLRGVSFTAKGFGIERVRDDYRQLSRLLHAIIRISGGGDTAIARLPPDYREFLALLGRDTLAMEDEFLIVNNAALLPMKNRTEAFLMLHDRIVKYLGRTDRQKKRRILSGLPYQSDWLDTARANKRINQWVMNVQHEYKGTHQSDMLRLNRNVRSHLHEHKDDDGIEEALYCEWPELLMAMVKLLHQEGELEATDIENKFG

SEQ ID NO: 10160 - protein, 417 aa, Zea mays
  VARIANT 177: note = Ancestral polymorphism is R, Derived polymorphism is W
MPVTAGARTTLLLFATAVVLACTSAPPACHAAHNITAILSGHRDLAEFGRELAATGLADDIDDRNTITVLAVDDAHMAPLKARGLPRETLRHVLSLHVLVDYYDDAKLHRLPGGSADVSTLFQASGDAPGSAGMVRVAERRGGRVAFAPEDDAGSAAAAVFYVGPVHEAPYNISVLWVSGVISSPAAEAPAAAADRPPSRRNVSDVMSENGCGRFAGLVAATGDAAATFERQADGGGGLTLFCPADRAVEAFQPTLNSLSADARLAVVLYHGAPGHHSMQALRAGDQDLRTAASLDGGRSHLALAVRNVRGRVTLLASATRDVARVTRTLADEEAVAVYMIDAVLVPGNLTAQGTAGGTEHGELTSGSGGEEDGGGGGVRQSSGSRALAPAPCWLPRGWFAAWALLLALLAAFAASG

SEQ ID NO: 10161 - protein, 176 aa, Zea mays
  VARIANT 113: note = Ancestral polymorphism is S, Derived polymorphism is F
  VARIANT 87: note = Ancestral polymorphism is T, Derived polymorphism is I
  VARIANT 78: note = Ancestral polymorphism is W, Derived polymorphism is C
MCILTSRTQGPFINCLMWKEGVMIFCCFCSEKLKEGEDIYIYQGDKSFCSTECRENFMVDEMEGKGGWKHLFCMGAAWRELIGRKQTLTRFLNVPREKGISWDLLFIQGKKISSLLTLHFSRSLGSFPSLLEYSAHTDGSFLSAWPVTAAQRATAGVAAATAGMNRIRPPSLATMK

SEQ ID NO: 10162 - protein, 306 aa, Zea mays
  VARIANT 5: note = Ancestral polymorphism is E, Derived polymorphism is Q
  VARIANT 67: note = Ancestral polymorphism is G, Derived polymorphism is C
  VARIANT 151..306: note = Derived polymorphism lacks residues 151 to 306
MDLWERARAFAGEAAKRSQELSAEAAKRSSALVSETAKKSKEIFSETASKSREIAAEATKQADLLAGQIKHLASDLPVPSIPPIPAIPPIPAAASSVPDAAELECYGITDDLREFVKGMTINTFRDFPLQDEPEVSDVPTVSNVRQDLNEWQARHGTLVLSAVKSEGTGHVICDNKTITFSFFLFRLSNEDEALMDILANGKWFEKKYFEELKVKAEEEKKDSQKEASQASTTAEPKDTKVPSKTSSTNPEHDLDVFLLGDLGSDDEASVGGDDGLDDDFDKIDATSGLESDDDDKKAATGKAEGV

SEQ ID NO: 10163 - protein, 971 aa, Zea mays
  VARIANT 72..971: note = Derived polymorphism lacks residues 72 to 971
  VARIANT 131..971: note = Derived polymorphism lacks residues 131 to 971
  VARIANT 342..971: note = Derived polymorphism lacks residues 342 to 971
MLSVATTNGSQGNSMETVMATMERQTARRTQTNVTQMMESIFASVSLAKDLSARCKSRALQVTDDEIQSTAQDLENVLQNIYDDLCRIPASAFGSSAYMDVPIKSQPMRDCCKADIPINVMGNRPRTRSLRDNDTPRLVDFLKGMYHESHEFSGQMFNTLLEVTEYIEPLYDAFICALTNEIMTDPVMIESGVTCDRRAIEEYIERFADSSEPVYCPVTKMTMQSKTMVSNASLKCVIEEWTMRNEIMRVRIARTALSLSTTDTMVLEAIHELKLLAKLRVKNRELMHKIGVTKFLARLLDNHNDQIQFEALKLLCLLAQDEEGKDIIGKTKAIARTIKLLSSNSTDERHAAISFLLELSESQLLLDNIGSTPGSILILTTMKLNSSDDPIAAARAGAVLKNLEKCPKNIKYMAESGYLEPLQSHLVEGYKTGSEEIQMEMVGYLCELVQEQELTIDINRSTSEILVKMVRGCNPMVRKAALNVLAQLSLHRPNNKMLVDTGAVPVMIEELFIRKVDDEPVNSMANAATVLANIVESGIDPDTTVVNKEGHVLTSKYSIYNFVHMLKCFMPDDLNLSVLRILLALTALAKPLDTVVSVIRENYRGHSIIELMGSPTEVLSLAATRLLITLSPHIGHTIVERLCKTQGQPHKLVKSISHAGRITERQATLATLLAKLPYRNTSLNIALVKDGAVPAMLRAIKEVENGAGRSSRQAVPYMEGLVGTLVRLTATLFSPEVLKAAMDHNLASVLTELLDGAAGSDEVQRLAAVGLENLSYLSIKLSRPPPDELQFKKKNTLLKLLKDSKAHSNKKTSLHQVCVCPVHRGVCSPAATFCLLEAGALEGLLGCLENDNIRVVEAALRALCTLLDERVDVEKSVAALAELDVARRVLAALRQHRQNVLWQKCFCVVEKLLDHGDDRCVREVTGDRMLPTALVSAFHRGDESTKQTAESILRRLHKMPDYSATYVSMEF

SEQ ID NO: 10164 - protein, 897 aa, Zea mays
  VARIANT 37: note = Ancestral polymorphism is K, Derived polymorphism is M
  VARIANT 640: note = Ancestral polymorphism is L, Derived polymorphism is P
MAEAIVGSMLWKLQQVAVSEARTLVAVNEDIRSLRDKLMWMQAFLHDVQPSRRVQPNELIKVWLQQTRDAVFDAEDAVDHFTTQVVVRRDLSSRIRLINGRLEGIIANKDRYRLGESTTLGAIWRPSSSTSPLSEMMDEVVLPLVGREELVRNLKNWLYKGSGNHKNVITVTGESGVGKTKLVRNLYDSKQTLSHFDIYEWVSFGPNLSASDVLKIIIRRITDGEECSKDNIERKLREILKEKKYLLVIDAELSNSEWNRIFAMLPDPKDVDVDAASRIVRISQIPPHKPPPHYQEAKLEVPKFYDQEVVINLFKETFQSCGRNELPDEAIREYRQRILDNTKGLPLAIVLLSGLLRTKEYPSEWETVFEHLDRMQSKQIDKILSLCFDDLHYDLKSCLLYFAALPVNTFIRASNIVCMWMAEGFLVPKATTVEKVGEQYLMELIDRRLVNLAPVGYNVPGYERVAVQSKVHAFLQLEAQEQCFVEIHSGDDIPALSDARRLSLQNHKDKYAALSHPLPKLRAILSNFETEQEAAQVAGEKPPDEAGEGQHGNGCRPGFNKKKMQAKSCVQDLLRNSRFLRVIHFNGLEVDKELPDEIGKVVKPAKMPPSIGRLCNLQTLDVRGTSVRSLPDGFWRIQTLRHVLGDRLILPKRVGDLRNLQTLNSVKPDYGDPHAWDDKTFNHMIRLLYLHIRRGESLGVQEIFSNRKNKAALVKAVSILKYLVVLIIKAPVIPSEVFTRSNLQRLKAMELVGKLDLPKNGIPEMDVRNRLPNLKKLRLMKTMVSQEFINQLGGLQFLSTLELTSNSFRDRELVFTEGFCSLKELTLHEETLERLEIHESALPELGDLDIVGHRDKLHVVIHGHSVLVQHIEAEDEDIFKVTEVITTQQVQVEDHKV

SEQ ID NO: 10165 - protein, 569 aa, Zea mays
  VARIANT 234: note = Ancestral polymorphism is Q, Derived polymorphism is L
MRVLPHVVEQIKSTLVHRYTRLITAASASSPVSLRALLPIHARAIVLGVSANPAFATSLLAGVAPASLAYARRVFDATPVRDAYMWNTLLRAHSHSQLSHAADTLALYKRMRAAGVAPDHYTYPIVLPACAAARELWLGRAVHGDVVRFALAGDGFVHSALITMYFQEGEVADAELVFAESHGSSRTVVSWTSMVAGYVQNYYFGEAVALFGTMIAEGVLPNEITLISFLPCLQGQEWLDAGEMVHGFVIRLGFDANIPLANALIAMYGKCGSIPMAQTLFEGMPARSLASWNTMVAMYEQHADVVEAIKFFRRMLTEKVGFDCVTLVSVLSACARSGALQTGKWVHELARNHGLDTDARIGNVLVDMYAKCGEIASARNVFDCLRMRSVVSWSAMISAYANHGASEEALKLFSLMKNEGVRPNSFTFTAVLVACGHSGLVEEGLKHFNSILSDYQMSPTLEHYACMVDMLGRAGRLIEAYEIIRGMSLCPDKCVWGAFLAGCKLHGNLELAEFVARDLFQSGSNDVTFYVLMSNMYFEAGMLKDAERMRWAMKEMELNKTAGRSAINQ

SEQ ID NO: 10166 - protein, 104 aa, Zea mays
  VARIANT 78: note = Ancestral polymorphism is G, Derived polymorphism is D
  VARIANT 5: note = Ancestral polymorphism is M, Derived polymorphism is T
MWKSTIYKKKFFALSNNFQSKPTNFDDVLWLEAKIEKMKYEHLMREAALTEKELLEEEYKKKFDEAKKELSLENDIAGMWVLVAKLKRGALDISDLNVDDRTKV

SEQ ID NO: 10167 - protein, 174 aa, Zea mays
  VARIANT 89: note = Ancestral polymorphism is K, Derived polymorphism is M
MDSRGNRSPSQQQDDGATSLRHDDRALSSDSDTNTDTARNRRSGSDTDPDTDTLNDAIPFALMLEYQNVVGGRLKLKGKALDVKDGGVMKKKKKYQREESSQTESDKNGDERNPHSDYDHLTPAERRYMEQKQKIDMKKMVKVANKSYKDRMQDFNQYLANLSEHYDIPKVGPG

SEQ ID NO: 10168 - protein, 148 aa, Zea mays
  VARIANT 60: note = Ancestral polymorphism is D, Derived polymorphism is Y
MPFGWAVSLQISRFHLSCSTAVSRSLSTTLLDFFYIKMLEYKNVVGGRLKLKGKALDVKDGGVMKKKKYHREESSQTESDKNGDERNPHSDYDHLTPAERRYMEQKQKIDMKKMAKVANKSYKDRMHDFNQYLANLSEHYDIPKVGPG

SEQ ID NO: 10169 - protein, 112 aa, Zea mays
  VARIANT 29: note = Ancestral polymorphism is K, Derived polymorphism is N
  VARIANT 23: note = Ancestral polymorphism is D, Derived polymorphism is Y
  VARIANT 20: note = Ancestral polymorphism is D, Derived polymorphism is Y
MLEYQNVVGGRLQLKGKALDVKDGGVKKKKKKYQRKESSQTESDKNEDEKNQHSDYDHLTRAERRYMEQKQKIDMKKMAKVANKSYKDRMQDFNQYLANLSEHYDIPKVGPG

SEQ ID NO: 10170 - protein, 124 aa, Zea mays
  VARIANT 76: note = Ancestral polymorphism is C, Derived polymorphism is Y
MSQRDVDYSCGFCGYPLNLSSSNRSTSEVGSSYKKSLKKGLISFISVDLSRFTQVDKVSCFPLTWRSYRPKTKLLCRKCGASIGYGYGEPAALCSFDPASSSSSSTSQKYLIKIQALQPSDGTQ

SEQ ID NO: 10171 - protein, 112 aa, Zea mays
  VARIANT 86: note = Ancestral polymorphism is H, Derived polymorphism is Y
  VARIANT 85..112: note = Derived polymorphism lacks residues 85 to 112
  VARIANT 71..112: note = Derived polymorphism lacks residues 71 to 112
  VARIANT 70: note = Ancestral polymorphism is K, Derived polymorphism is N
MLGYQNVVGGRLKLKGKALDVKDGGVKKKKKKYQREESSQTESDKNGDEGKPHPDYDHLTPAERRYMEQKQEIDMQKMAKVANKSHKDHMQDFNQYLAKLSEHYDIPKVGPG

SEQ ID NO: 10172 - protein, 150 aa, Zea mays
  VARIANT 33: note = Ancestral polymorphism is Q, Derived polymorphism is H
MYPAAEIASVRYLSPAAGAASLRPHYRDDFLFQFQYSDLLLAPAHPSLYQDVADHLVLGASFPAAGDNRSSSEESDAYLQRSLAEERRKRRMVSNRESARRSRVRKQKQLSELWAQVVHLRGTNRQLLDQLKCSTVSSETATVSSVKTPG

SEQ ID NO: 10173 - protein, 372 aa, Zea mays
  VARIANT 155: note = Ancestral polymorphism is P, Derived polymorphism is S
MGSDTETEKKASVALMSIAKPLAGKKLCKRTLKLVRRASEAKCLKRGVKEVVKSIRRGNKGLCVIAGNISPIDVITHVPILCEEANVPYVYVPSKEDLATAGTTKRPTCCVLVLTKPNKGELSGEISVASVCVPGLFDLITRCARDTCVEGTVLSDGSLVAVKRLKDGNAADGEAQFQTELEMISLAVHRNLLQTLWGFCMTSSERLLVYPYMSNGSVALRLKEYDSLITNSNYREDTTGLDHQITRKRIALGAARGLPYLHEQCDPKIIHRDVKAANILLDDCCEAVVGDFGLAKLLDHRESHVTTAVRGTVGHIAPEYLSAGQSSEKTDVFGFGILLLELITGQTALAFGKSSNQKGTMLDWVKKMHEEK

SEQ ID NO: 10174 - protein, 535 aa, Zea mays
  VARIANT 105: note = Ancestral polymorphism is V, Derived polymorphism is D
MAAAAAAAAPSRKTETYTDTKRRDDVRGANIAAARAVADAVRTSLGPRGMDKMICSGDQAQEVIITNDGATILSRMALLQPAARMLAELSRSQDAAAGDGTTTVVVLAGSLLRRAQSLLSAGAHPTAAADALHRLATRAVEILHGMAIPIELSDRESLVKSASTALNSKVVSQYSTLLSPLAVDAALSVVDPAHPDLLDLRDIRIIKKLGGTVDDTELVTGLIFDKKASHAAGGPTRVENAKIAVIQFQISPPKTDIEQSVIVSDYAQMDRILREERNYILGMVKKIKAAGCNVLLIQKSILRDAVTDLSLHYLAKAKILVVKDVERDEMEFITKTLNCLPIANIEHFRTDKLGYADVVEEISVGEGKVVKITGIRDMGRTATVVVRGSNQLVIDEAERSLHDALCVIRCLVNKRFLIAGGGAPEIEMSMQLAAWAKELRGMESYCIKEFADALEVIPYTLAENAGLNPISIVTELRNRHARGEKNAGINVRKGQITNILEENVVQPLLVSTSAITLACECVRMILKIDDIVTVR

SEQ ID NO: 10175 - protein, 140 aa, Zea mays
  VARIANT 16: note = Ancestral polymorphism is T, Derived polymorphism is M
  VARIANT 27: note = Ancestral polymorphism is P, Derived polymorphism is L
  VARIANT 32: note = Ancestral polymorphism is T, Derived polymorphism is M
MVVGDPPAPTTRESSTDSRCRCFCIFPEQSTTGALVNSSIAVRRGRGSQHPASGLPKILVPEAQSAEVIASFSKAATERKSLTVKDPDKYEFKPKQLLKQIATIYVHILRGDKESVFPAAISKDGRAYNDQSPPTENRQL

SEQ ID NO: 10176 - protein, 395 aa, Zea mays
  VARIANT 200: note = Ancestral polymorphism is W, Derived polymorphism is R
  VARIANT 40: note = Ancestral polymorphism is A, Derived polymorphism is V
  VARIANT 27: note = Ancestral polymorphism is W, Derived polymorphism is R
MAPVPVSVSATLAPPPAAPPKATSRSWERRAPADAAFAAASSVAISAALLTLTPAAPAAALSKEDVAGSLTKAVDTVSQAIDVGGKAAEQVAAVLKALGEAVKPALPVLKSASDEALKLAAPVVSAASKQATEALQGAGVDPAPVLSVAKTAAEQSTKVIDAAKPVASAAVETITSLGPEDYVVAAGAAFLAYLLVPPVWSLVSSSLRGYKGDLTPAQALDKVTTQGYVLIDVRSDKDKAKAGLPQLPSNAKNKLVSVPLEDLPSKLKGMVRNAKKAEAEIAALKISYLKKIGKGSNVIIMDSYSDVAKTVAKTLDSVGFKNCWVMAGGFSGRKGWAQSRLGTDSYNLSVVEVVTPSRVIPAVAGRRTGTTAARIGTASSASRATTRKLLPGGVD

SEQ ID NO: 10177 - protein, 339 aa, Zea mays
  VARIANT 138: note = Ancestral polymorphism is L, Derived polymorphism is P
MESGRLIFNAPGSGAGQMLFLDCGAGGGPGGGLLHRGGRPMLGLEEGRGVKRPFYTSPDELLEEEYYDEQLPEKKRRLTPEQVHLLERSFEEENKLEPERKTELARKLGLQPRQVAVWFQNRRARWKTKQLERDFDRLKASFDALRADHDALLQDNHRLRSQVVSLTEKLREKEATEGDANGAAAALPAVGVVRASVADDVEEPEPEPEPEAEAAAFEERQVKSEDRLSTGSGGSAVVDAADALLYNGRIGGAAVDSSVESYFPGAEVQDQYHGCGTMGPVTHGAGGIQSDDDDGAGSDEGCSYYADEEAAAAFLSEHTHHADGDDEDAGQVSWWWMWN

SEQ ID NO: 10178 - protein, 142 aa, Zea mays
  VARIANT 59: note = Ancestral polymorphism is T, Derived polymorphism is A
  VARIANT 97: note = Ancestral polymorphism is G, Derived polymorphism is R
MDGSKGSVGGGDRTQPEKPSADSNPSLDPPQPTAAAVEATDDGAAAAAAAAETARRPFTALSQEEADLALARVLQEQERAYMLLRMNGGGGEGSDYGSSDEGSYEYDEEGEEDYEEELELSLVSAIVSTYDSLPPTPAQFTI

SEQ ID NO: 10179 - protein, 579 aa, Zea mays
  VARIANT 257: note = Ancestral polymorphism is V, Derived polymorphism is L
MASVTDSFVADLDELLEYRTEKTILYAQTNTMKLVNRMKFSMPEESTLGDGLGKGYGLLGQAGSGKLRAAALHRFSTAPASAAAAAEEPIQPAVEVKHTQLLINGNFVDAASGKTFPTLDPRTGEVIARVAEGDSEDIDRAVAAARRAFDEGPWPRMTAYERCRVLLRFADLIERHAEEVAALETWDNGKTLAQAAGAEVPMVARCVRYYAGWADKIHGLVAPADGAHHVQVLHEPVGVAGQIIPWNFPLLMFAWKVGPALACGNTVVLKTAEQTPLSALYVANLLHEAGLPEGVLNVVSGFGPTAGAALCSHMGVDKLAFTGSTGTGQIVLELAARSNLKPVTLELGGKSPFIVMDDADVDQAVELAHQAVFFNQGQCCCAGSRTFVHERVYDEFVEKSKARALKRVVGDPFRDGVEQGPQIDGEQFNKILRYVQSGVDSGATLVAGGDRVGDRGFYIQPTVFADAKDEMKIAREEIFGPVQTILKFSGVEEVIRRANATPYGLAAGVFTRSLDAANTLSRALRAGTVWVNCYDVFDATIPFGGYKMSGVGREKGIYALRNYLQTKAVVTPIKNPAWL

SEQ ID NO: 10180 - protein, 768 aa, Zea mays
  VARIANT 25..768: note = Derived polymorphism lacks residues 25 to 768
  VARIANT 52..768: note = Derived polymorphism lacks residues 52 to 768
  VARIANT 227..768: note = Derived polymorphism lacks residues 227 to 768
  VARIANT 357..768: note = Derived polymorphism lacks residues 357 to 768
  VARIANT 445..768: note = Derived polymorphism lacks residues 445 to 768
  VARIANT 497..768: note = Derived polymorphism lacks residues 497 to 768
MDLEAAGGAEAAHGKRRATLLLAYQSLGVVYGDVATSPLYVYKSAFAGDDIQHSEGNEEIYGVLSFVFWTLTLITLLKYVVIVLRADDGGEGGTFALYSLICRHVRAGLLPGGGTRDELMEEEKATGRRGERPVSRVRAVLEKYRVLQRLLLLFALLGTCMVIGDGVLTPAVSVFSAVSGLELSLEKEQHKYIELPVACAILICLFALQHYGTHKVGFLFAPIVCIWLLCISAIGLYNIIRWDHHVYRALSPYYMYQFLRKTQTGGWMSLGGILLCVTGSEAMYADLGHFSQSAIQIAFIYVVYPALVLAYMGQAAFISQHHNFESSYHIGFYVSVPETLRWPVLVIAILAAVVGSQAIITGTFSIIKQCSSLSCFPGVKIVHTSSTVHGQIYIPEINWMLMILCLAVTIGFRDTKHLANAQGLAVITVMLVTTCLMSLVIVLCWNKSIFLALGFLLFFGAIEVIYFSASLVKFHEGAWVPITLSFIFMVVMCVWHYGTIKKYEFDVQNKVSVNWLLNLGPSLGIVRVRGIGLIHTELMSGIPAIFSHFVTNLPAFHQVLVFLCVKSVPVPHVQPEERFLVGRIGPKEYRLYRVIVRYGYRDVQKDDLEFEKELVGNIAEFIRSSAEYDKNGFAEDTDKPSGKLSTISTGINMWEEDGEPDASSSPRKETDPRDAAPERKKARFMIPKSAQVDSEVRRELQELMDAREAGMSFILGRSYMKAKSGSGFVKRVVINLLYEFLRKNSRGPAYAASIPHASTLEVGMVYQV

SEQ ID NO: 10181 - protein, 179 aa, Zea mays
  VARIANT 143: note = Ancestral polymorphism is L, Derived polymorphism is P
MLAEELLRTGGGTTTDTSQKPSSGRERVQIESLRQELEGAKRQIGALKSEKSQIEAEANNQRNLSVKLESDLKSLSEAYNSIEQANYRLDAEVKALRQGGSVPYPDVEAIKAQAKEEAEKDSEAERNDLLVCLGQEQTKVEKLSTRLTELGEDVDTLLQGIGDDTAIPDDDDEDEDDEE

SEQ ID NO: 10182 - protein, 459 aa, Zea mays
  VARIANT 162: note = Ancestral polymorphism is R, Derived polymorphism is S
  VARIANT 337..459: note = Derived polymorphism lacks residues 337 to 459
MAPHGDIDLAKAYHHVTVSMREHTEKVMVKLTAPHTGKGDTAPLDIVVVLDISGSMRGTKLEHMKHAMTRFIIEKLGIRGDRLAIITFESKAHKVFDLSSMLPDQVKKAVAVVEGLKAGGDTNIKAGLEAGLDVLKTRRGHSHNASCIFLMSDGHENVDKARTLLDRVGEHSVVTFGFGEKSDEQLLYDIAYHSHAGTYHHVREKEDENQLMKAFAFLAIYRSISMLDLKVTVSAHKEAAGAIIRGVDPCRYRVDGPHGDGSFTVHFGDLAREESRRILVDVQLPQVQHEQKDKPVIHVKYEYSSPKKVKVTNTLDIKMNRVQNPGQAAMNPNVSRELARRAQVEHLRKVMDLANKKNLGAAKDEVERARNALNSITHDTDDAVDSLFNELDNIEEFLETYDIYNKLGRSYLLACISSHERQRYAERGGAAPVDLYLTQRMNKYLDQAHKVHKNPKTKI

SEQ ID NO: 10183 - protein, 564 aa, Zea mays
  VARIANT 440: note = Ancestral polymorphism is P, Derived polymorphism is L
  VARIANT 298: note = Ancestral polymorphism is G, Derived polymorphism is V
  VARIANT 112: note = Ancestral polymorphism is C, Derived polymorphism is Y
MTSSVAGTMDIEMPLGNNLWSENMGVDEDNEAITRANKEISAEPTPLDQDSESTEQAEDVVDLTELKEKVIGAVPFPPQRLDGWMQQWPTIYVVPGDLAAGKTDPYAPATVCFGPLFGPARRVTDGMAKLERYKLCCLRKLIVGRSPSPAGTGTRPAEPAVWKPEVHEPMLRSCVDAMTRLLPRIRASYSIASSMDTIAGDENTVREVKMLLYPNPEVAAVMGSTLAENMLLDGCFILHRLLKMASRAAGKRYDDDDDDWTQVFGRRGVWALVTRDLLLLHNQIPLFVIKALLKQLKGPADIEDDDVLVDGGLQLFSSLHPRRRLQPSPDDSLRLRLRDAHHLLHLFYLSITNIPTQSSASASPDKKLPPELTQWVPCAKELEDAGVRFRARKDGTATGFLDIRFSAVGVLEIPPLQLYDYSEPLFRNLIAFEQTYPDTPGHVTAYAIFMDCLVKTSDDMRLLHSRGILLNHMSGDREAATGFFSGICAGAHASADRNYLAPLMDEVVRYQSGRWPQWRAALLRDYFGNPWAVIAFVAAAIVLALTMLQTFYTLYAYYQPPKQS

SEQ ID NO: 10184 - protein, 422 aa, Zea mays
  VARIANT 329..422: note = Derived polymorphism lacks residues 329 to 422
  VARIANT 294..422: note = Derived polymorphism lacks residues 294 to 422
  VARIANT 240: note = Ancestral polymorphism is L, Derived polymorphism is P
  VARIANT 213: note = Ancestral polymorphism is D, Derived polymorphism is G
  VARIANT 202: note = Ancestral polymorphism is K, Derived polymorphism is M
  VARIANT 186: note = Ancestral polymorphism is G, Derived polymorphism is S
  VARIANT 185: note = Ancestral polymorphism is C, Derived polymorphism is Y
  VARIANT 178: note = Ancestral polymorphism is G, Derived polymorphism is R
  VARIANT 177: note = Ancestral polymorphism is A, Derived polymorphism is T
  VARIANT 171..422: note = Derived polymorphism lacks residues 171 to 422
  VARIANT 76: note = Ancestral polymorphism is L, Derived polymorphism is H
MAAAPSPSVPACSDLPAAVSAFADAFVDFAVSGIFFPTFPSSSSPPPRPKTPTTFLPSLSRLVAIGDLHGDLPKSLSALRLAGLVPPSCTPDSPSASSSWAAGPTLAVQLGDILDRGGDELRLLYLLRRLSLSAESRGGAFLPILGNHEVMNVSGDFRFATPQGFQEFSAWAGWYRAGLAIKRRCGEHLDPQPRNPFLGVPKSFPGVKPEFWDGMRSRLAALRPDGPIARRFLADLPTVLVVGDSVFVHGGLLEANVEYGLERINAEVSEWIRGEGGDNARAPEYVRGRDAVVWLRRFSDGFDCDCKRLEGVLGMIPGAKRMVMGHTIQTVGINAVCSAQAVRVDVGLSRGCGNGLPEVLEINAGGTDVRVITTPPSEAWMYRKQEVEKAAAAVAEKSVEVKDGLALLVRESHGLKEVGVKA

SEQ ID NO: 10185 - protein, 251 aa, Zea mays
  VARIANT 111: note = Ancestral polymorphism is A, Derived polymorphism is T
  VARIANT 98: note = Ancestral polymorphism is R, Derived polymorphism is C
  VARIANT 92: note = Ancestral polymorphism is D, Derived polymorphism is N
  VARIANT 89: note = Ancestral polymorphism is K, Derived polymorphism is R
  VARIANT 81: note = Ancestral polymorphism is E, Derived polymorphism is K
  VARIANT 77: note = Ancestral polymorphism is A, Derived polymorphism is V
  VARIANT 76: note = Ancestral polymorphism is R, Derived polymorphism is C
  VARIANT 59: note = Ancestral polymorphism is G, Derived polymorphism is D
MPMQWWLGAESSLLPPSCILAFSASHSLAAAATGTKNPDLAADKALARDFLSNFVGPHGDPKYLSVLQDVANRKIRAVQIELDDPFHHKDVDVVFLLRVIENARRYIDIFADRGHGIGAASITLRNPSMLFIVSSPTYCSVESCVLSAFTLTVIRFSSYLGFAHCIVFKQENNENKPVTNSRDTQEICLEQGLHILKIFKDYHVSKTSILNDLASAMGNTPNPYEQAMSTCVNGQAMMLSHMVWHEPTISL

SEQ ID NO: 10186 - protein, 40 aa, Zea mays
  VARIANT 7: note = Ancestral polymorphism is K, Derived polymorphism is R
  VARIANT 8: note = Ancestral polymorphism is S, Derived polymorphism is Y
  VARIANT 11: note = Ancestral polymorphism is D, Derived polymorphism is V
  VARIANT 12: note = Ancestral polymorphism is A, Derived polymorphism is V
  VARIANT 19..40: note = Derived polymorphism lacks residues 19 to 40
MQTGQFKSVPVVVRLIVAKEGFKGLYAVCVFSHLILLTIF

SEQ ID NO: 10187 - protein, 157 aa, Zea mays
  VARIANT 11: note = Ancestral polymorphism is L, Derived polymorphism is P
MAATAYSTALPGGARLPAAGAAAPPSALLLPRRNKLSPLPLRLQDAPRLSLLRVKASSDDSSAASGDELIADLKAKWDAVENKSTVLTYAGGAVVALWLTSVIVGAINSVPLLPKIMELVGLGYTGWFVYRYLLFKESRKELADDIESLKKKIAGTE

SEQ ID NO: 10188 - protein, 485 aa, Zea mays
  VARIANT 38: note = Ancestral polymorphism is A, Derived polymorphism is V
  VARIANT 50: note = Ancestral polymorphism is R, Derived polymorphism is S
  VARIANT 69: note = Ancestral polymorphism is V, Derived polymorphism is D
MGSSAQLRRLKPLYQLVVNNILTIVAVPLAAAVLLKAAELGPEEILARARALRPAHMLLAGFLPAVATVLYLTLRPRAVYLVDYACFRTNPNCRVPFATFLEHSRVWPGFDERSVRFMTRLLERSGLGEETCLPYAQHYIPPSRDLESSRAEAELVIFSAIDDLLAKTGVSPQDIDILVVNCSLFAPTPSFADMVMRRYGLRGDVRSVHLAGMGCSAGLISVELARNLLQVAPRGARALVVSTETITPNYYMGKERAMLLPNCLFRMGGAAALLSTDGAGARFRLARVVRTLRGASDAAYRCVYQEEDERGNVGINLSKDLMSIAGDALKANITAMGPLVLPASEQLLFALSFIARKVLNDRVKPYIPDFRTAFEHFCIHAGGRAVIDELQRSLTLSDEQVEASRMTLHRFGNTSSSSLWYELAYIEAKGRMRRGDRVWMIGFGSGFKCNSAAWECIRPAANADDGPWANCIHRYPVHIPDVLKH

SEQ ID NO: 10189 - protein, 347 aa, Zea mays
  VARIANT 164: note = Ancestral polymorphism is V, Derived polymorphism is A
  VARIANT 62..347: note = Derived polymorphism lacks residues 62 to 347
MAAVRGAIATLLVVVVALALGTASALDFSVRKTKPQPPRMSTPGDPKKAPGNGKFTTVINKYHKKNYEITCTTDWGASCYVKCPARCPNKCLAYCAYCLTFCMCDLMPGTSCGDPRFTGADGNTFYFHGKKDESFCVVSDDRLHINARFMGNHNADSGRDFTWVQALGVTFGGAHSHRLYVGARRAAEWDEDEDHVVIALDGEPVDVEAAKDARWVSTAVPGLSVTRSHAVNAVVVELNGEFSISANAVPITDEDSRVHGYGKTGKDSLVHLDVSYKFHGLTKDVDGVLGQTYRPDYVNKLDISAKMPVMGGADKYRSSGLFATDCAVSRFHRVGGGADAGFSSFAS

SEQ ID NO: 10190 - protein, 278 aa, Zea mays
  VARIANT 5: note = Ancestral polymorphism is P, Derived polymorphism is S
MGRQPCCEKIGIKKGPWTAEEDQKLVTFLLSHGHCCWRLVPKLAGLLRCGKSCRLRWTNYLRPDLKRGLLSEEEEALVIDLHAQLGNRWSKIAARLPGRTDNEIKNHWNTHIKKKLKKMGIDPVTHGPLAPATQPLALALAQQRDPPQVVREEERCDDDPSKQASSQGLAAVADEDDDVEETPASAAQPHGATTTSPASAAAGSVSPSCSSSASGADADADAAAWPGPIDLFLEVDGIMDMDWAGILSGCGDDDAADISGVDLFDHYAGDGFDEQVWM

SEQ ID NO: 10191 - protein, 442 aa, Zea mays
  VARIANT 51: note = Ancestral polymorphism is G, Derived polymorphism is V
MRTSTATCAILPPPTCSSRSLPLRSFIGLRWSAPRFQVRERAGASVAVVNGKPGCSFRLGVPTLNVCQSRQRSVVIRNEHAQNADLPRKYSKREKKPFPIPVLELRRRAKERMKAAQGKPKQPMPPPKNGMLVRRLIPVAYKVYNARILLINNLKRLMKVVPVKGCKYCSEIHVGSVGHPFRTCRGMSSDQRRGEHDWGSTLVEAVFLPVEAYHLEDRLGNRIPHDQRFTVPRIPALVELCIQAGVDLPEYPTKRRRKPIIKIGRKEFVDANEDDLPEPEPDRFRQPLLEELRYDEIIAPSSPEETVALAEETLEAWEAVRDGALKLMKGYAVRVCGYCPEVHVGPTGHKARNCGAFKHQQRNGQHGWQAAVLDDLIPPRYVWHMPESGEELQRELKTFYGQAPAVVEMCIQGGAKVPEKYKATMRLDIGIPSSLKEAEMVV

SEQ ID NO: 10192 - protein, 394 aa, Zea mays
  VARIANT 2: note = Ancestral polymorphism is A, Derived polymorphism is T
MAALAVVFAITAISGAVAAADDVASSTAARNFTVASPPSPTTTTSGPVTYVFGDSMSDVGNNNYFPTSLAKSNYPWYGIDYPGREATGRFTNGKTIGDYMAEKFGVPPPPPFLSLRMTGKDVLGGVNFASGGAGILNETGVYFVQYLSFDEQISCFEIVKRAMIAKIGKDAAEAAANAALFQIGLGSNDYINNFLQPFMADGTTYTHDQFIRLLITALDRQLKRLYGLGARKVAFNGLPPLGCIPSQRVRSTDGKCLSHVNDYAVQFNAAAKKLLDGLNAKLPGAQMGLADCYSVVMELIEHPEENGFTTAHTSCCNVDTEVGGLCLPNTRPCSDRSAFVFWDAYHTSDAANKVIADRLWADMTSAGHGSASATPHVAASSPDVAPSPSPSQDY

SEQ ID NO: 10193 - protein, 479 aa, Zea mays
  VARIANT 26: note = Ancestral polymorphism is L, Derived polymorphism is H
  VARIANT 27: note = Ancestral polymorphism is Q, Derived polymorphism is E
  VARIANT 32: note = Ancestral polymorphism is T, Derived polymorphism is M
  VARIANT 41: note = Ancestral polymorphism is T, Derived polymorphism is A
  VARIANT 51: note = Ancestral polymorphism is E, Derived polymorphism is V
  VARIANT 181: note = Ancestral polymorphism is S, Derived polymorphism is N
MKVKKLIKEKNDGAGISEYIDINKELQEVLPTTRLHMFVITQFFGVWTTSEGTRSRRLYTIIEEVASFGAYLDLSGGNIDGRNAFGLSALHLATWRNHLPIVRRLLDAGADPDARDGESGWSSLHRALHFGHLCIASVLLQFGASLALEDTKGRTPVDLISCPVSQANGDFPDAVATEVFSWGSGTNYQLGTGNVHIQKLPCKVEALHGSYIKTVAASKFHSVAVSSNGELYTWGFGRGGRLGHPDIHSGQTTAVITPRQVTVGLGRKRVSVVAAAKHHTVIATELGNCLPGDQIEGQLGYPSVHTQPTPRRVGSLKQRIISVAAANKHSTAVADTGEVLTCGCNKEGQLGYSTSNLASNCIPRMVEYLKGKVLRGVSAAKYHTIVLGADGEVSSDPDIKCQQLFGQRQSARQINPVVSHPNTSGDKDVTSDNKSQHESSELPPRAEFIVNKQMTVEGYKAHPGHVNYILGRAKRICDC

SEQ ID NO: 10194 - protein, 154 aa, Zea mays
  VARIANT 3: note = Ancestral polymorphism is R, Derived polymorphism is H
MPRRPYDARHPHPGVPPPPAPLPPPHRRPAPLPSHTHSLPPSPCSAPSPSPLCLRSTSLTASDLTASPHRPNGIFASDAPIDVDAAMEDELREKEDGSPRQLERGSSCTVSGFKKFFRKNEQFRDALAKHRLLTPTTPLARQGSDDMSLVSSVI

SEQ ID NO: 10195 - protein, 177 aa, Zea mays
  VARIANT 152: note = Ancestral polymorphism is A, Derived polymorphism is G
  VARIANT 140: note = Ancestral polymorphism is E, Derived polymorphism is G
  VARIANT 106: note = Ancestral polymorphism is D, Derived polymorphism is G
  VARIANT 39: note = Ancestral polymorphism is I, Derived polymorphism is V
MGLVVSATASCSDIFFSRRRSSSPPPPAAASTPPPTYTIPEPALVRVFRHFDADGDGRISADEMRELCGCTAVEADEMVAVADRDGDGFISLEELEALFEDGDRSDTLRAAFAEYDENGDGVITAEELRRALWRLGIVGEEMTAERCAEMIAVVDIDGDGVVCFDEFKAMMDTAAAS

SEQ ID NO: 10196 - protein, 86 aa, Zea mays
  VARIANT 8: note = Ancestral polymorphism is E, Derived polymorphism is K
MMEKQSREHQEGWRRQKQQQEEEVVMVMHSQVMRIKQEEDERAKVHETYQHHVSEMRRGLRDLDRQRSRSPLGRAARTAISIGGDS

SEQ ID NO: 10197 - protein, 161 aa, Zea mays
  VARIANT 40: note = Ancestral polymorphism is E, Derived polymorphism is K
  VARIANT 74: note = Ancestral polymorphism is L, Derived polymorphism is V
  VARIANT 84: note = Ancestral polymorphism is E, Derived polymorphism is G
MAAVLVARQGRELQRYSQSTGGRIVVGCIPYRVRRDGELEVLVITSQKGHGMMFPKGGWEVDESMDEAARREALEEAGVLGDTGPVLGLWHYKSRRYVDQTYEGFMFPLRVADELHQWPEMASRKRTWATVQQAMDGCPHWWMREALERLVARQAVLQSAL

SEQ ID NO: 10198 - protein, 226 aa, Zea mays
  VARIANT 9..226: note = Derived polymorphism lacks residues 9 to 226
  VARIANT 36: note = Ancestral polymorphism is G, Derived polymorphism is C
  VARIANT 114: note = Ancestral polymorphism is D, Derived polymorphism is V
  VARIANT 214: note = Ancestral polymorphism is P, Derived polymorphism is L
MEVGRTPRRRASPAAAAAAAAAAVPSLLLFAVLFVGRAAAALGGPGPALYKHASFFDRDGDGVVSFAETYGAFRALGFGLGLSSASAAFINGALGSKCRPQNATSSKLDIYIEDIRRGKHGSDSGSYDAQGRFVPEKFEEIFARHARTVPDALTSDEIDQLLQANREPGDYSGWAGAEAEWKILYSLGKDGDGLLRKDVARSVYDGTLFHRLAPRWKSPDSDMERS

SEQ ID NO: 10199 - protein, 269 aa, Zea mays
  VARIANT 4..269: note = Derived polymorphism lacks residues 4 to 269
  VARIANT 25: note = Ancestral polymorphism is E, Derived polymorphism is K
  VARIANT 121: note = Ancestral polymorphism is P, Derived polymorphism is T
  VARIANT 142: note = Ancestral polymorphism is S, Derived polymorphism is Y
  VARIANT 172: note = Ancestral polymorphism is K, Derived polymorphism is N
  VARIANT 222: note = Ancestral polymorphism is I, Derived polymorphism is T
MNSRKLWNMQRIGISPHLLLSTQIEGSLMLYLSWGCLMAYCTFQTIQTCSSEGHKGTISVVYNSRSFLMVNNPDLWEMRSDQFGHEPLVSYRIVEVGIEIFCAYHKYGKLMNHGNPTSHKPELVLNNFTTRLGHRVGRMIQSLFPQDPNFHGRRVVTFHNQRDYILFRHHSKPRTVGGGGTGMWASLHPQAAHLAAAWDLRHEERGVRVGSQAGYGYEQAEILPVMDLRSRRTLIVSSCDGFARFVRLFLFRRRGSKVAVTHPIQEVDG

SEQ ID NO: 10200 - protein, 115 aa, Zea mays
  VARIANT 25: note = Ancestral polymorphism is R, Derived polymorphism is C
MAMKKGGGAAGLKQILRRCSSLGRRQQHGAGYEEEEDEAAATGLPSDVPRGHFAVYVGERRRRFVVPIALLDRPEFRSLLRRAEEEFGFGAGGILVLPCEEVAFRSLTSALACAR

SEQ ID NO: 10201 - protein, 132 aa, Zea mays
  VARIANT 22: note = Ancestral polymorphism is L, Derived polymorphism is V
MALEWVVLGYAAGAEAVMLLLLTLPGLDGLRRGMVSVVRSALKPMMSVVPFCLFLLMDIYWKYETRPTCDDEHACTPSEHLRHHKSVMKSQRNALLIAAALLLYWILFSVTQLVVRLDQMQQRVDKLKKRDD

SEQ ID NO: 10202 - protein, 356 aa, Zea mays
  VARIANT 91: note = Ancestral polymorphism is M, Derived polymorphism is I
  VARIANT 85: note = Ancestral polymorphism is G, Derived polymorphism is D
  VARIANT 77: note = Ancestral polymorphism is I, Derived polymorphism is S
  VARIANT 14: note = Ancestral polymorphism is D, Derived polymorphism is N
  VARIANT 10: note = Ancestral polymorphism is L, Derived polymorphism is R
  VARIANT 2: note = Ancestral polymorphism is A, Derived polymorphism is V
MACLTDLVNLNLSDTTEKIIAEYIWIGGSGMDLRSKARTLPGPVTDPSKLPKWNYDGSSTGQAPGEDSEVILYPQAIFKDPFRRGNNILVMCDCYTPAGEPIPTNKRYSAAKIFSSLEVAAEEPWYGIEQEYTLLQKDTNWPLGWPIGGFPGPQGPYYCGIGAEKSFGRDIVDAHYKACLYAGINISGINGEVMPGQWEFQVGPSVGISSGDQVWVARYILERITEIAGVVVTFDPKPIPGDWNGAGAHTNYSTESMRKEGGYEVIKAAIEKLKLRHKEHIAAYGEGNERRLTGRHETADINTFSWGVANRGASVRVGRETEQNGKGYFEDRRPASNMDPYVVTSMIAETTIVWKP

SEQ ID NO: 10203 - protein, 526 aa, Zea mays
  VARIANT 48: note = Ancestral polymorphism is G, Derived polymorphism is R
  VARIANT 65: note = Ancestral polymorphism is R, Derived polymorphism is C
  VARIANT 69: note = Ancestral polymorphism is P, Derived polymorphism is S
  VARIANT 90: note = Ancestral polymorphism is A, Derived polymorphism is T
MDLPPLSHQALFAAVRSADAPAVRAVLADAEASATSLAALAAAQTDAGETALYVAAEAGSEEVVRLLLPLYDFEAATVRSRLDLDAFHVAAKQGHTGVVKEFLGRWPGLCSVCDSSNTSPLYSAAVKDHLDVVNAILDTDDSCIKIVRKNGKTSLHTAARIGYHRIVKALIERDPGIVPINDRKGQTALHMAVKGKNTDVVEELLMADVSILNVRDKKGNTALHIATRKWRPQMVQLLLSYESLEVNAINSQNETAMDLADKVPYGESKTEIIEWLTEAGAKNARNVGKIDEASELRRTVSDIKHNVQAQLSENAKTNKRVTGIRKELQKLHREAIQNTINSVTLVATLIASIAFVAIFNLPGQYFQDVNSGGDIGEAEIAKLTGFRVFCLLNATALFISLAVVVVQITLVAWETGAQKQVIKIVNKLMWTACLSTGVAFISLAYVVVGPQHAWMAFTASAIGGPIMIGTFLFLAYLLLRPRFKFGEDRQRRIKRASGSKSFSWSIHDGFSDLEAFSDHEKRIYAL

SEQ ID NO: 10204 - protein, 637 aa, Zea mays
  VARIANT 252: note = Ancestral polymorphism is V, Derived polymorphism is G
  VARIANT 294: note = Ancestral polymorphism is I, Derived polymorphism is T
MAACLLHPYPPGLHSSRANPYSASRQPTHLKWELGRWRRHLLLCVAASAGILQRELIMLPSARTTQNPGPVNPRNQFDIMPERSTENTKSAANPLDESLGTGGQIASGRDPHEVGEKSESAVFVALAHAGRHAEVVELFRSMRREGVPVNRFVLPSVFRACADLWDSRMLRAVHGLVINCSLCQHVVVGTALAAAYIDLGLVDDASKVFDDISQPNVVSWSVIIGGYARSSQWDKAWDAFSAMQCSGLPPNGSVLVMAIQACGALGCLVRGKQAHTVAVVLGFERNATVWNCLIDMYGKCGSVESCRRVFDTTVSRDQVSWNTIISCYARLGLCEEALETIVRMQESGFTIDRFVLGSGVAACANLADIDSGRAFHGYLIRRALDTDVIQGSALVDMYGKCGYMDLARLVFDRMDERNDVSWDALLSGFVENGLVDSALDTFRQMESAKIKSNQHTFVNLLRLCGDRRYREYGRQIHGHAIRVINQMNVVLETELIDMYAKCGCIEVSQLLFLRMNERNLVSWNTLLSGYVGDGQPVATVNIYRQMELARVGPDHYTLAGLLNMCRFQGLLRYGRQIHAHLIKTGSEMNVVLQTLLVHMYFKCRRWRDAHNVCTLIRERNSHVYEAFFKVYGDDYLI

SEQ ID NO: 10205 - protein, 364 aa, Zea mays
  VARIANT 282..364: note = Derived polymorphism lacks residues 282 to 364
  VARIANT 116..364: note = Derived polymorphism lacks residues 116 to 364
METATTSPEHPLLRRSSPSSNTNADADSVNLSSPPPSAARPSRLAALIGRVGWPRGPSMMVHEATTLQLHRRRADWAHSRPVVTLDIAWNVACAAAAALVLASSAKDSPVKPLRLWLVGYAAQCLVHVGIVFTRLETRARHAWGPASDVESAGAGTDSSGTDSEDDETAEGRSSHASRCETINRLISFLWWIIGFYWLVSGGEVLEYGAPRLYWLTIVFLAFDVFFAVFCVAMSCFIGIALCCCLPCVVAILYALAGKVGASDGDISVLPRYRYYDPSEDSEEETDEGLMIPILNNSGMSTSERILLREDAECCVCLSSYEDGAELSALPCRHHFHWSCITTWLRMNATCPLCKYNILEISDSA

SEQ ID NO: 10206 - protein, 671 aa, Zea mays
  VARIANT 153..671: note = Derived polymorphism lacks residues 153 to 671
MSAGSTASLLAAVICLALAVLAPVVPGDGATLESVPDLVKAMYLNVESFPCVRLLNLSGEIGCSNPGSEKVIAPIVRLRKGSDQLVQPSTILLSLDQMSDFFLRVSNDPELHQKVAGVLVESNGVNNDLQELSPDRKFPQDDFAPYSNHSHDWNPAGSGIMWNKYNFPVFLLSEESTNTLQKISEKNEKTGNGYKANVAEFDLVMQTTKAQTHDSASCLKEQSCLPLGGHSVWTSLPPLNNGSTEHPKPLILAIASQDSASFFRDRSLGSDSPISGLIALLTAVDALSHIHGLSKLKKQLVFAVFNGEAWGYLGSRKFLQELDEGAASVNGISSLKIDQVLEIGSVGKAILEEYPSFYVHAEGNPSASKEILDALQSASKSLGSDNVKVKQAASSNPGVPPSSLMSFIRKNMSTSGVVLEDFDSHFSNRFYHSYLDNSVNINSSSIAAAAALVARSMYILASDDSVVDLITLNTIKVNVSLVEELIGCLLTCNPGLSCGLVKRFISPSNPCPSHYVGVFLDDPSGTQLPSYADDTSRFVWNFLADRTNSAGNKSSCTGKCGDEGEVCVGAEVEGGGRCVVSTTRYVPAYSTRVKFEDNAWHVLPANSSDPMGAADPVWTESFWNTIGLRVYAVQDPAYDWLILLAGLGITAASYCAVHFGRAYISKVAKLD

SEQ ID NO: 10207 - protein, 90 aa, Zea mays
  VARIANT 57: note = Ancestral polymorphism is R, Derived polymorphism is K
  VARIANT 64: note = Ancestral polymorphism is R, Derived polymorphism is P
MAVLIMNKNLVLPAVIMLVVVMVLSMVLGSAAARPLLGEDDRLPGEAAAAVGDSIVRLIRQLYRQQLSGPGAQVPRVRVRLRTLTTDASS

SEQ ID NO: 10208 - protein, 286 aa, Zea mays
  VARIANT 4..286: note = Derived polymorphism lacks residues 4 to 286
  VARIANT 30: note = Ancestral polymorphism is M, Derived polymorphism is R
  VARIANT 37: note = Ancestral polymorphism is I, Derived polymorphism is T
  VARIANT 75..286: note = Derived polymorphism lacks residues 75 to 286
  VARIANT 140: note = Ancestral polymorphism is Y, Derived polymorphism is H
  VARIANT 144..286: note = Derived polymorphism lacks residues 144 to 286
  VARIANT 229: note = Ancestral polymorphism is R, Derived polymorphism is T
MRSQLWMHHLKLWMEKSVNQNLSRVSQHLMNGLISAIILLRGCIIDIELGLITKDMNQSESSSVARGRGKNKRIWTYYEDEELIKALYEISLDPKWKSEGGFKNGYCSVLENELKARLPGCGLSAIPHIESRVRHFRTKYGAIEDNPDAKGLYGIAFPHFDTLAAIYGKDIATGEGAEGLGEAVINMEKEIAMGEDCPVVEEDMVSMDTPQWSMDNRNSDHSTSSSSKRRKKHKDNMSSDPFLDLASGIRGDLNKTSQHFGRMVEVMEMEAKKKGSNARVTREVCC

SEQ ID NO: 10209 - protein, 549 aa, Zea mays
  VARIANT 523..549: note = Derived polymorphism lacks residues 523 to 549
  VARIANT 440..549: note = Derived polymorphism lacks residues 440 to 549
  VARIANT 413..549: note = Derived polymorphism lacks residues 413 to 549
MKRIVLEADGYQPYLISPEKGLRSLKKGVLEKAKEPSRLCVEEVHRVLLDIVNAAANATPGLGRYPPFKREVIAIASNALDAFKIDAKKMVVALVDMERAFVPPQHFIRLVQRRMERQRREDELKNNRASKKGQDAEQFKMNRASSPQTVSDEGGGNLKSMKDKSNQQDKDTKEGPNLQVAGPGGEITADLCVTLKRSAKNNEWSKRWFVLNEKSGKLGYTKKQEERHFRGVIVLEECNLVEIEEEEISKSSKDSKKANGQDKGPSLVFKITNRVAYKSVLKSLFLYVIWGDTMTRRPADPEEELRWMSQEVRGYVEAVLNSFAANVPKALVLCQVEKSKEDMLNQLYSSIRRSLLNLQSSFTLHKAMQRSKNYSKKTTMLNVGGKNMKNNHPSYQSSLASSAFMTIEQLHMRTIVLELRVAHGLLATLVRTGSPPSTRQQMSLLTGPVHSMRQGQEVLIEADAMKMGMPPLAADAHLTGYHRHHQVGGDTKYVDCSLPVTNQHHMLLPGSHPLQILVEVHIWDQRTESLLEDVDGRCISREPKLFIES

SEQ ID NO: 10210 - protein, 221 aa, Zea mays
  VARIANT 1: note = Ancestral polymorphism is M, Derived polymorphism is T
MHLFDSDGKIRKYDTPEQILEEFFQLRLEFYCKRKEALLKNIKLDLKKLENKVRFIRCVVDNEIIVNNRKRADLFLELRHKNFDPFPKKKKKAEPTAVGAIEEEENVESPETAVGVDPSDYEYLLSMSIGTLTLEKIQELNAEKQKLVDDVVELMNTSPKSLWLKDLDAFEKELDVLDQMDLAEEVQREKRIKEGKKGGSKAAPKKQPKKAAPIKLESSTE

SEQ ID NO: 10211 - protein, 142 aa, Zea mays
  VARIANT 1: note = Ancestral polymorphism is M, Derived polymorphism is I
MGEQVVTEQIQRKLEEVNATVQQHLAGVQDHINFTMQQAYFKCAYGCFDRRHTQEAISNCVENCSVPVLAANNIFESEMAKFQGMLNRSLRVCQDKFEAANLQKLKSDATRELESCVNRSIDDSLRVLPHVVDQIKSTLKIN

SEQ ID NO: 10212 - protein, 185 aa, Zea mays
  VARIANT 179..185: note = Derived polymorphism lacks residues 179 to 185
  VARIANT 171..185: note = Derived polymorphism lacks residues 171 to 185
  VARIANT 156: note = Ancestral polymorphism is T, Derived polymorphism is I
  VARIANT 154: note = Ancestral polymorphism is R, Derived polymorphism is C
  VARIANT 140: note = Ancestral polymorphism is S, Derived polymorphism is L
  VARIANT 135: note = Ancestral polymorphism is R, Derived polymorphism is C
  VARIANT 122..185: note = Derived polymorphism lacks residues 122 to 185
  VARIANT 116: note = Ancestral polymorphism is C, Derived polymorphism is Y
  VARIANT 110: note = Ancestral polymorphism is D, Derived polymorphism is Y
  VARIANT 102..185: note = Derived polymorphism lacks residues 102 to 185
  VARIANT 93: note = Ancestral polymorphism is D, Derived polymorphism is Y
  VARIANT 92: note = Ancestral polymorphism is Y, Derived polymorphism is N
  VARIANT 90: note = Ancestral polymorphism is V, Derived polymorphism is I
  VARIANT 65: note = Ancestral polymorphism is M, Derived polymorphism is I
  VARIANT 64: note = Ancestral polymorphism is L, Derived polymorphism is M
  VARIANT 57: note = Ancestral polymorphism is S, Derived polymorphism is P
  VARIANT 38: note = Ancestral polymorphism is I, Derived polymorphism is V
  VARIANT 30..185: note = Derived polymorphism lacks residues 30 to 185
  VARIANT 10..185: note = Derived polymorphism lacks residues 10 to 185
MILFVNDLYYAYSGRHPWNCYFNNSALVVQSDPSTPLILVPVSSSSNHVELHMRFQSKNSRYALMTLANEMSDKCKITEPVARKSFKVIVLYDVDKVSQNNQRLIKWIIDSSSDACKIIMTCQDESNLLDSIKSRCKIISIGVPSTREAMAPARTTEEWRDETRREIHRAWRLHCIRMQSVGFLV

SEQ ID NO: 10213 - protein, 341 aa, Zea mays
  VARIANT 98: note = Ancestral polymorphism is I, Derived polymorphism is L
MSPSLLLLHSSATPCRGLLPPPSSCFATFSRASSPLRPRHRIRLVCAAEQPNGAASPGSGSGGDATANPTNNGLPKNRRVILLEYVKNVQPEFMELFIKRAPAQVVEAMRQTVTNMMGTLPPQFFAVTVSTVAENLAQLMYSVLMTGYMFRNAQYRLELQQSLEQIALPEPKEEKDYAPGTQKKVTGEVIRWNKATGPEKIDAVKYIELLEAEIDELSRQVARKTSQGSNELLEYLKSLEPQNLKADKGKLLQELTSTAGEDVVFAMNAFIKRLLAVSDSEQMKTAVSETSASQLANLLFWLMIVGYSMRNIEVRLDMERVLGAPPKVAELPPPPSGGENI

SEQ ID NO: 10214 - protein, 628 aa, Zea mays
  VARIANT 214: note = Ancestral polymorphism is A, Derived polymorphism is V
MAALSLRQRQLDLIVRMLHLNKPPPPPGTAAEQEEEVYKILVLDSFCLSLLSPLLRVADLRKHGVTLYFPIDKPRQQVADAPAVYFLRPTQANADRVAADAAASLYASFHLNFSSALPRPLLDRLAAATAASGSAHRVARLADQYLDFVSLEDNLFSLAHPRSYVALNDPKAADADIEALVDAIALGLFCAAATLGTVPVIRCPRGGPAEMVAAALDARLRHHLLAKPNLFTEASASASVASFQRPVLCLFDRNLDLSVGIQHDWSYRPLVHDVLGLKLNKLKMPADKSGPAKAYDLDDSDAFWVANSWSPFPRVAEEIESQLAKYKQDVDEVNQRTGGNKDGIEFDGTDLIGNTQHLMNAVNSLPELTERKKMIDKHTNIATALLGHIKERSLDGYCDCGNDMLTKGTVDRSTLLGLLRGKGTKADKLRLAVTYLLCFETPELEQVEAALRESEVDMSAFQYVKRIKSLNTQFSASSSSSATRSNIVDWAEKLYGQSISAVTAGVKNLLSSGRQLALTRTVEALMEGKPNPEVDNYLLFDPRAPRSGSGGQFKGPFREAIVFMIGGGNYIEYRSLMELAECSQPPSSKHVIYGATEIVNGVEFIEQLAELGQKAGLGLGGGNNPPLQ

SEQ ID NO: 10215 - protein, 453 aa, Zea mays
  VARIANT 349..453: note = Derived polymorphism lacks residues 349 to 453
  VARIANT 13: note = Ancestral polymorphism is L, Derived polymorphism is S
MEFILVCSVSVLSLLVSAVYLYRTTWGRRPLQQLPPAPPGWPVIGHLHLLSDMPHQAMAELAKTMRAPLLRLQLGTVRAVVISKPDVARAALTTNDAALASRPHLLGGHFLAFGSSDVTFAPAGPYHRTVRRVVVSELLSARRVATYQRIRVNEVRRLLGHLAKNASVPDAPPVDLSECVLNLANDVLFRVAFGRGFPHDKAAKLGEVFAVANDFFAGFTTADFFPELEPVDIFVAGSDTSFAALEWVMTELLRHPRILKKAQDEIRRVIGDKGSVEESDVGDLHYLRAIIKETFRLHPVIPLLVTRESVAPCTLGGYHIPAGTRVFINTFAMGRDPEIWDRPLDFSPERFENSNNGGGATADVVMDPDYKLLPFGGGRRGCPGYMFALATLQLSLASMLYHFDWALPSGMRADDVNLDEIFGLATRKKEPLFVVVRNSKEHEFKGGDTDVVV

SEQ ID NO: 10216 - protein, 142 aa, Zea mays
  VARIANT 5: note = Ancestral polymorphism is V, Derived polymorphism is A
  VARIANT 19: note = Ancestral polymorphism is A, Derived polymorphism is T
  VARIANT 27: note = Ancestral polymorphism is G, Derived polymorphism is S
  VARIANT 46: note = Ancestral polymorphism is D, Derived polymorphism is G
  VARIANT 65: note = Ancestral polymorphism is S, Derived polymorphism is G
MGEQVVTERIQRKLEEANATVQQHLAGIQDHVNFTMQQAYFKCAYDCFDRRRTQEAINNCVENCGMPVLAVNNVFESEMAKFQERLNRSLMVCQDKFEAAKLQKMKTDATQELESCVNRSIDDSIRALPYVVQQMKSTLNIN

SEQ ID NO: 10217 - protein, 100 aa, Zea mays
  VARIANT 34: note = Ancestral polymorphism is R, Derived polymorphism is L
  VARIANT 35: note = Ancestral polymorphism is S, Derived polymorphism is L
MYEAMSPRRALLAILLAVALASASSAPQPPPCSRSCAALNCDSLGIRYGKYCGVGWSGCDGEEPCDDLDACCRDHDRCVERKGYVSFIPGLRLLCSLIRV

SEQ ID NO: 10218 - protein, 113 aa, Zea mays
  VARIANT 13: note = Ancestral polymorphism is R, Derived polymorphism is K
MPSEVNRQLLWRRGRAKARRCLLLLLAVPALATVALAAFGRFRNMLDRRDQQQLERLRAERKAKIGSFRGSHHNLQRLVQKYGPDAAAGVDSRTEKLKRTHSRLSFHVGEGDE

SEQ ID NO: 10219 - protein, 339 aa, Zea mays
  VARIANT 132..339: note = Derived polymorphism lacks residues 132 to 339
MALMSLGAAGYTTATAPPRPRRCTLPFRAAASPAALDRRRRPHNVAGDFFVDHRCIDCQTCRWMAPEVFKRVDGKAAVAAQPSSEEERTKALQALLSCPTSSIHTEKPPKDILKVQNMFPLPIDDKLLPGVYLCGYNSEDSYGATSYLVIHPQGNILIDSPRYTPKLANNIEKLGGARYMFLTHIDDVADHRKWAEQLKCERIIHSGDPELLFPLSKKKYARPYPSKKFNLIDLDLGSVCLYFKPLKVLFTGDHVAKSEESDDLNLFLMYSKQSGWKSDCLSVCMLYNKLAVSLQLESIRKLLELEFEWLLPGHGYRIKYKDVRAKNVAMESLLANYTS

SEQ ID NO: 10220 - protein, 423 aa, Zea mays
  VARIANT 8: note = Ancestral polymorphism is R, Derived polymorphism is C
  VARIANT 36: note = Ancestral polymorphism is P, Derived polymorphism is S
  VARIANT 81: note = Ancestral polymorphism is Y, Derived polymorphism is C
  VARIANT 118..423: note = Derived polymorphism lacks residues 118 to 423
  VARIANT 215..423: note = Derived polymorphism lacks residues 215 to 423
  VARIANT 279: note = Ancestral polymorphism is W, Derived polymorphism is R
MRNVDYKRARRFEVDLSALRNILEIDAERMVARVEPLVSMAQITKATCPMNLSLAVAPELDDLTVGGLINGYGISGSSHVYGLFSDTVVSMEVVLADGQVVRATMDNEHSDLFYGMPWSQGTIGLLVSAEIRLVRVKEYMRLTYTPVRGTLKEIAEAYADSLFLPAKVPDFVEGMVYSSSEGVMMTGVYASEQEARRTKGSGRIINRVGWWFKPWFYQHAETALERGEFVEYIPTREYYHRHTRSLYWEGKLIIPFGDQLWLSDALEFAHRELEVYPVWLCPHRLFKLPVKTMVRPEPGFEQHRRKGDTSYAQMFTDVGFYYAPAPVLRGEDFDGAQAVHRLEQWVISNHGYQAQYAVSELSGKDFWRMFDASHYHHCRRKYGAVGTFMSAHYKSKKGKKTQEEIPLARETSQEASSSSAAER

SEQ ID NO: 10221 - protein, 1241 aa, Zea mays
  VARIANT 349..1241: note = Derived polymorphism lacks residues 349 to 1241
MADEAEWNEAEAGIAAPGAGVAPPAPGGGEETKRKRGRPKGSLDTYKRRRRRRRTGDLVSAVPAASLGDMGHSCGCIPAPPLPPPCTVYTVRDGGVAITPQSMEDEAEGVEAESGNAGAASAARDGEETKRKRGSPEGSLNERNKDRTPKPKAKGRRRRRTDDQTLSVSAVSLGDLGLGVAAGTRSIRERRPAPNAFFDVGSDSDTEHDDDDDEEQTTIDQANHESAKTGDSVKKGGRPRKMEAGQLHTRTQISNGKSNGHTNGNPAGKKRGRGRPKKLTVEQAITRCQFSNGETNKFITLYGIFKLEFHQVSNFFLLQSGAEAARSKQSRNRRISQNAKKRKRDEGKESMTKKLNKRSKMLTGENALMCHQCQRKDKPRVVRCQSCKKKRFCLPCIEQWYPNLPEDEFAVKCPYCRKNCNCKACLRMRGVEEPPKKEISKENEIRYAFHIVTMLLPWMRELRQEQLEEKEVEANIQGVSMNEIKVEQAEFDLDDRVYCDRCKTSIVDFHRSCKRCFYDLCLNCCKELRKGEIPGGEEVEYVPPEPKGRSYSFGKIHLLKDADRSKNSSNGESYNGMPAVGNSNNGLLLWKAKSNGSIPCPPKEVGGCGSTLLDLKCLFPEKMFAELEYRADKVLRSGTLAKAMVSRSDRCPCFNQSGKIRTESKSVREAASRKGSSDNFLYCPVAIGIQDDDIVHFQMHWAKGEPVVVSDVLQLTSGLSWEPMVMWRALRERSKGKAEDEQFAVWAIDCLDWCEVEINIHRFFSGYTTGRTHARTHWPQMLKLKDWPPSSSFDKRLPRHGAEFISALPFREYTDPRYGPLNLAAKLPAGVLKPDLGPKSYIAYGFYKELGRGDSVTKLHCDMSDAVNILTHTAEVTCQTDIGLIEKIQKDMREQDLQELYGGLNSRSELKLSPAPTECRDESVDEGLKTSYSREGNCVNRDNYNGLDINALPPDDDGDIAKDKESSPGSEWQSELGQSSDHNNGVNTTDEMYNGAHYISHNQKSTGRKVGIKPQEEKSEKADCSGTCAYLKGSSEDNPEMPIVESSEEQSTGGALWDIFRRQDSDKLQDYLRKHCSEFRHIYCNPVKKVFHPIHDQSFYLTEEHKRKLKEEYGIEPWTFEQKLGEAVFIPAGCPHQVRNLKSCIKVALDFVSPENVGECVKLTEEFRRLPSFHKAKEDKLEIKKMAVHALNEAVNFLDPRSSEELKIGVGENICEDESVDEKELPPRRGVEVSGVDEKPK

SEQ ID NO: 10222 - protein, 319 aa, Zea mays
  VARIANT 8: note = Ancestral polymorphism is L, Derived polymorphism is F
MDSLRSVLESIQAMQIRPVVAQIITLGMILTSALILWKGLVVVTGSESPVVVVLSGSMEPGFRKGDVLFLHMNKDPVRTGDIVVFNVEGRDIPIVHRVIKVHERHDTVDSDILTKGDNNPGDDRVLYAHGQLWLQRQHIIGRAVGYLPYAGWLTIVMTEKPVLKEGHEVRGHVCAGLHGMGKEGIRADTVTWNPLIHGLFKDARVKEAAQLFTEMVATQPGVEDIHPLRLSALGQYSAPKKVFKPNENMKNFCQGSVQSTDLLNEICRIGVCCHHCDQVDETADHLLTNCAYTVLLKIDPLITGGAQTVSGLVQKGLNS

SEQ ID NO: 10223 - protein, 219 aa, Zea mays
  VARIANT 83: note = Ancestral polymorphism is S, Derived polymorphism is F
  VARIANT 77..219: note = Derived polymorphism lacks residues 77 to 219
  VARIANT 75..219: note = Derived polymorphism lacks residues 75 to 219
  VARIANT 67: note = Ancestral polymorphism is R, Derived polymorphism is W
MPLLGLLVAISLNVVATTSPKHGGEFGHGRGVRVRTGAVHHELCPRLHHVGTGRHGAVPGPGVRGHRPPVAPPKQAQWVAPMSTLQERIAEEWRRKEKKGSCSGSATTSGHLAEMHAVERAARELNSVLEEIAEEEEEEEDEGRRRQGIVDEERARDVTERAEELAAACRTLEETCSALWRPALCDPCWTSLPTQRERGIRGWEIREDGRERWGSTRQS

SEQ ID NO: 10224 - protein, 311 aa, Zea mays
  VARIANT 273: note = Ancestral polymorphism is V, Derived polymorphism is D
  VARIANT 240..311: note = Derived polymorphism lacks residues 240 to 311
  VARIANT 235..311: note = Derived polymorphism lacks residues 235 to 311
  VARIANT 160: note = Ancestral polymorphism is P, Derived polymorphism is L
MLVLVLINKILGPRCGYSAGGEEQVKWRRNLLDWRSGFGGYAPKLGMIDQSREREYVHQGFETDVYDFCCNPDANAGSPEDCQVTCFNSCSCSAYTYNDTDCFVWHGDLVNLQEQHTSDGGGTLLFTQACRSELPAAAVHKATLIGIVASGVVAVLLILPVLTRRRCCCRQESVLLVFENTTARLTTFRHNDLQRATDNFSVKLGEGAFGSVFKGQLPAGSSSTPIAVKRLDGFQHGDKQFRAEVSTVGMINHVMNLVRLLGFCAEKTSRLLDYESDTGSLFPCWAAIQQVYSWILLEGTEQPSSQFNFIP

SEQ ID NO: 10225 - protein, 414 aa, Zea mays
  VARIANT 163: note = Ancestral polymorphism is R, Derived polymorphism is L
  VARIANT 167: note = Ancestral polymorphism is S, Derived polymorphism is F
  VARIANT 172: note = Ancestral polymorphism is P, Derived polymorphism is L
MYGHTFSYRLVEHDSDAVSKVVFREDDLVLAHPELKYTAFTPTSSPADTFYYVKLKGVLVGGELLKISSDTWDVGKDGSGGTIIDSGTTLSYFVEPVYQAVPSDPGLLGAEPCYNVSGMERPEVPELSLLFPDGAVWDFPAENYFVRLDPDDIMCLAVLGTSRTGMSIIGFPILLNILKEDREDVELVRGALETFMSALTPIETSQGPNTQLQSAESCNKDVSIVHVDMHNYSLDEKIRMTLEAHIVEKTDEEATNQQCSGCRATPHIWTASVCVSNLFSTKKLFKQKDRITEKDVTVMRLSGGGHSCFRDSDKARLRFKRKFWEKVVEIDDLCGKDGAWWGIKGYMRDNFNHSNKVTSQKEHFQNSRLVKFVLDMYWELRPVTGSSLTHQTRYDPTCAVDPSLKMVTTPCFEA

SEQ ID NO: 10226 - protein, 653 aa, Zea mays
  VARIANT 352..653: note = Derived polymorphism lacks residues 352 to 653
  VARIANT 251..653: note = Derived polymorphism lacks residues 251 to 653
MLLKSKFKLATTIGIVLSMLSLLVHLFIANYSAGGITNYSMHMDDILPFGLRPRPRRLWGPLVPLDHLHPFAKPSKPYAAPSKHNGFIYAKIYGGFEKIQSTICDLVAVARLLNATLVIPEIQATTRAKGISPKFKSFSYIYDEDHFIHALSSDVVIVHGLPKDLREARKKIKFPTLSPRNSATPEYYIEEVLPRLVKSKVLGIIVNGGNCLQSILPASLEEFQKLRCRVAFHALRLRPQIQALGSQIVGRLRASGRPYVAYHPGLLRDTLAFYGCAELFQDIHTELIQYRRNQMIKRGTVKEQLAVDSVSRKMAGLCPLMPEEVGLLLQAVGYPPTTIIFLAGSETFGGQRMLIPLRAMFANLVDRTSLCSQRELFDLVGPEDPRTPDLPQPPPPKSEKQLIEEWRRAGPRPRPLPPPPARPFYAHEKEGWYGWIGENDTEPDASLIEFRRQAHQLLWDALDYFVSVEADAFFPGFHNDGSGWPDYSSLVMGHRLYQTPSGITYRPDRKIIAALFEDVNDHRYHPPRNWTIAAREHLNRSANVEGVVSSAMLSRPVSFLAHPLPECSCSTSKSPAVEPVKDSNGRFLFGGEEECAGWMARSPAMASARNNEPQIEDYEDNLPEEGSSSDMQESDRSDSNKSSEQDEEMDLDD

SEQ ID NO: 10227 - protein, 93 aa, Zea mays
  VARIANT 68..93: note = Derived polymorphism lacks residues 68 to 93
  VARIANT 19: note = Ancestral polymorphism is G, Derived polymorphism is W
  VARIANT 18: note = Ancestral polymorphism is V, Derived polymorphism is L
  VARIANT 17: note = Ancestral polymorphism is A, Derived polymorphism is D
  VARIANT 16: note = Ancestral polymorphism is R, Derived polymorphism is W
  VARIANT 15: note = Ancestral polymorphism is V, Derived polymorphism is I
  VARIANT 7..93: note = Derived polymorphism lacks residues 7 to 93
  VARIANT 2: note = Ancestral polymorphism is G, Derived polymorphism is D
MGSSANQAATLADVVRAVGEQLIAANPIGKCFSIFFIVVSCYPVGCYLIICVGFQVVFGVFKILFPNQTPTEVVFCHTLVAIILVPSVSPNHN

SEQ ID NO: 10228 - protein, 80 aa, Zea mays
  VARIANT 14..80: note = Derived polymorphism lacks residues 14 to 80
MSKKNNLAKRKKQYEFDLQREKEAKEKQAKKLQAKKSKMKIDGAEKKRKGGQFKVGKKKVKTKLSALAKAKAAQAMEVDK

SEQ ID NO: 10229 - protein, 535 aa, Zea mays
  VARIANT 346..535: note = Derived polymorphism lacks residues 346 to 535
MDGAVAIAAAAVLLLCAFIYAAWLAPAAARRRLRGAGFDGPRPSFPFGNLPEITASLQAQAQANNNKSSAVASGDIHAAVFPYFARWRESFGKVFVYWLGTEPFLYVAHPEFLKAATAGALGKRWGKPDVFRRDRMPMFGRGLVMAEGEEWTRHRHIIAPAFSATNLNDMIGLMQETTAKMLAEWGDAVAASGDQQDGAVVDVERGVVRNAAEIIAKASFGVTDDEAGARVFRKLQAMQAMLFQSNRLVGVPLARLLHVRKTYDAWRLGRQIDALLMDIIHDARRRRRQGKDLLSLLLAGTEEATDRRLTTRELVDECKTFFFGGHETTALALSWTLLMLAAHPDWQDALREEVERELGNKDDQGQKLDAAALGRLTKMGWVMSEVLRLYPPSPNVQRQALEDVQVAEGKGAAVVIPRGTNMWVDVVAMHHDVDLWGDDAHEFRPERFARDPMQGGCRHRMGFLPFGFGGRICVGRNLTAMEYRVVLAMLLRRFRVSVAPEYRHAPKIMLSLRPSNGIQLRLTPLVTADAKSSSA

SEQ ID NO: 10230 - protein, 953 aa, Zea mays
  VARIANT 9..953: note = Derived polymorphism lacks residues 9 to 953
  VARIANT 110..953: note = Derived polymorphism lacks residues 110 to 953
  VARIANT 112..953: note = Derived polymorphism lacks residues 112 to 953
  VARIANT 130..953: note = Derived polymorphism lacks residues 130 to 953
  VARIANT 203..953: note = Derived polymorphism lacks residues 203 to 953
MAGAASPPQALPPAPTLQASFLCSLALAFLRAGRLSAASHVVSSLPAPPPARLLRRLIPALASSGLVAAASRFRPVPGDPLTLNSIILSYCSLHALRPALSLLRSSSGPQPQVAADTVSYNIFLAGLSEQGHGRLAPPVLSEMCKRGVPWDGVTMSTALVGLSRTGLVGEAAALAEMLVRGRGIDGLGVVGWNALIDGYCKVQDMAAALAVVERMTTQGLSLDVVGYNTLVAGFFYSGDADAAWEVAERMKADGVEPSVVTHTTLIGEYCKMKRIEEAFTLYEGMVRSGVLPDVVTLSALVDGLCRDGRFSEAYALFREMDKIGVAPNHVTYCTFIDSLAKVQRVNESLGLLGEMVSRGVAMDLVMYTTVMDRLGKEGKIEEAKDVLRHALSDNITPNCVTYTVLVDAHCRAGNIDGAEQMLLQMEEKSVSPNVVTFSSILNGLVKRGCIAKAAGYMRKMKDSGIAPNVVTYGTLIDGFFKCQGQEAALDVYRDMLHEGVEANNFIVDSLVNGLRKNGNIEEAEALFKDMGERGLLLDHVNYATLMDGLFKTGNMPAALKVGQELMERNLSPDAVVYNVFINCLCRLGKFSEAKSFLKEMRNTGLEPDQATYNTMISAQCREGNTSKALKLLNEMKWSSIKPNLITYTTLVVGLLEAGVVEKAKYLLNEMASAGFTPTPLTYRRVLQACSGSRSPYVILEVHELMMGAGLHADITVYNTLVHVLCCHGMTRKATIVLDEMLGRGIAPDTITFNALILGHCKSSHLDNAFATYAQMLHQGLSPNIATFNTLLGGLESAGRIGEADTVICEMKKMGLEPNNLTYDILVTGYAKKSNKVEALRLYCEMVSKGFIPKASTYNSLISDFAKAGMMNQAKELFSEMKRRGVLHTSSTYDILLNGWSKLRNGTEVRILLKDMKELGFKPSKGTISSMSRAFSKPGMTWEARRLLKTLFKV

SEQ ID NO: 10231 - protein, 1164 aa, Zea mays
  VARIANT 147..1164: note = Derived polymorphism lacks residues 147 to 1164
MEPPSPPATHSAAVRVLSRTPPPTSPNPSSTGPAAPSPASRDGVVAVGFVGAAGTARLADRILDAHVFSPGGSAGSLAGRVRYHRDAGKRMVFLHLTPPPPAPLEAVAGCCDDGELPEMLFMFSVCHVIIFLQQGFRFNTQTLKKFRLLQSSKHALAPFVKPLVAAAMPARTVASDTPTRATHRASSVSPPTRRGGHAGRQSSAISLMSGTSSTPSVLPGQCIPVLLFVFEDDAVDVSSAAASPDDIGDASSSNQGSTPDGLPKQSLASKSSGSVIMLSRAANKSEGSSGKKLHSSLEGQIRVLIKKCRVLAGMEPGHIGPRGVSNMSHHLPLFSLDTSRVVALLERYINKKQEPLDTIAGLFEDSLCSKSPLDILSLENNYHPTNHDDFQLIKDFIFRQSDALRGKGGYSSNASAGSVAGVGMVAAAAAAAAASAASGKPVNAPDLPTFDKWLSISTSILTALLSGRNVLRCQSESKTHTSPTEKNGQLPVGSNAIEIALSCLESNNGLNMKFSSSWCQRVLPAAKEIYLKGLPAFYPTRMHEVQLQKALRSFGSMVKGPAVRVFSKKLEDECRAIWESGRQQCDAVSLTGRPCKHRRHGDFFSSDAMEQHSSGYVFLHACSCGRSRRLRDDPFDFQTANVSFNCFQNCDDLLPTLALPRGSNDGSFSVSSWCLVRLGGARYYKPTKGLLQSGFSSKERYLLRWIVSVHKGQVRNDIRSNTITSSARSGMNPQTPPIVTGEVKSAITQVTAQIKYAKLENSGKQAEVEPVSNLGINFGKGLPNFTMKKPFSEVVAGTTSKDTEFPALQQTRPPKPGGRKDEQRQMNIVDQTNGRGHVAVSQGSVAETESAKASRNKSSENADGKPFLQIGSNIVPVIAGNETRETSQPVQQFVVYIGFEHECPYGHRFLLSEKHMKEIESSCLQYQRPHLNKEAEVKHAQKLLQNASGLIASAVDINSARKNSKPLESSGRNSQQQSLQLRIDAETSQPSPRLSDPQNAKRWEHYFRSVTIDDGGEAFSLMNRNLPIYMRCPHCKVSERKEHQDVKFAGVVSQLQRIFIVTPDFPVLLASCPLVQFEGSCLPSNVSDHDREGSFSIGCRVILPPESFLTMRLPFVYGVETKEGSKFPLKYFERQPELTAWLVAGTALQIVSVGDVTEKETVMK

SEQ ID NO: 10232 - protein, 326 aa, Zea mays
  VARIANT 37: note = Ancestral polymorphism is S, Derived polymorphism is L
MAAAPPARHRHRHRHALLIFVVVTAAAAGADAQHPPLPGFYPSKRYRARPFSRDFRTLWGAQHQSVSGGGGGGGVTIWLDSTSGSGFKSRRAFRSGYFGASVKLQAGYTAGVITAFYLSNADAHPGFHDEVDMEFLGTTPGQPYTLQTNVYVLGSGDGGPGRVVGREVKFRLDWFDPTADFHHYAILWSPTHIIFYVDDVPIRRYPRRSETFPRRPMWVYGSIWDASSWATDDGRYKADYRYSPFVARFSGLLLRACSPRAPPRCRAPSGGPTGGGGDALSPQQEAAMRWVQRNHMVYNYCLDPKRDHSLTPECIIHHAAAGDTYY

SEQ ID NO: 10233 - protein, 173 aa, Zea mays
  VARIANT 51: note = Ancestral polymorphism is P, Derived polymorphism is L
  VARIANT 25: note = Ancestral polymorphism is R, Derived polymorphism is Q
MGHTRSLLPLALFFLSSVSERGVNRRGRAPIPTAHPRFDSVLLPLASWVSPWLDGVSPPFDLCGDLDDDDIDEPVTVVPKDRRLPAAAPTPNGHNNHLLRFTRSLQRPAQNPNPSPNSPPSPPLATAEEQVEKVKLDGISVARWRLPLPSTCASTAEFAASTAEFDLVEPTTK

SEQ ID NO: 10234 - protein, 84 aa, Zea mays
  VARIANT 3: note = Ancestral polymorphism is C, Derived polymorphism is F
MVCVACLLPLFLIPVVNALPYLIDLIISKVYRLFGWEYRRPERVPPACPYKPAAQKNDEGASESKPLAEPHGAGAAAAEDKKVE

SEQ ID NO: 10235 - protein, 374 aa, Zea mays
  VARIANT 137: note = Ancestral polymorphism is A, Derived polymorphism is T
MPPPSANGATAAAAAARDDMSPAEARLAMMELANMVSVPMALAAVIRLGVPAAVWAGGANAPMSAADLLPPGHPDPSVLERLLRLLASRGVFSESTESTPTTRRRLFALTAVGRTLVPGPASGASYADYVLQHHQDALVAAWPRLHEAVLDPAGPEPFARANAGVTAYAYYGKDQDANRVMLRAMAGVSEPFMGALLDGYGAAGGFRGVATLVDVGGSSGACLEMIMRRVPTITEGINFDLPDVVAAAPPIAGVRHVGGDMFKSIPSGDAIFMKWVLTTWTDDECTAILRNCHAALPDGGKLVACEPVVPEETDSSTRTRALLENDIFVMTTYRTQGRERSEEEFRHLGVDAAGFTAFRAIYLDPFYAVLEYTK

SEQ ID NO: 10236 - protein, 840 aa, Zea mays
  VARIANT 148..840: note = Derived polymorphism lacks residues 148 to 840
  VARIANT 134..840: note = Derived polymorphism lacks residues 134 to 840
  VARIANT 82..840: note = Derived polymorphism lacks residues 82 to 840
  VARIANT 78..840: note = Derived polymorphism lacks residues 78 to 840
MDEYHHHHQRMGAAADFRRDLEDLVCDHLGGCFSPAPSSSSSCSAAAGGGAADHEPDGEAESSAVRRRRRESRLLSRWVARQAEEVLSSMEREVERRNREAELLALARLHPVSTLDPSSFLLSSTAAPPPPRPQAPSLNAPSSLLQMWRELEHPRADAAHPFDREPSPDNADRDRERVRQIARRLTDTAAAAATATAGGEWLGETERQRVRLVREWVQMASQPRDSRAGTRRDEPAAGTDRDRRGELEPPRLRGRQARLDVISRMARERQRELQGISGYHVVSEFPRRSRNRIQGLLRGRFLRNGALEEERPPSVAARELGQLRQSHRMPALRLVSFSIIQYNSMVTGPIYFDDSVINYVITSMCLRAHSVLDGSIVSFPSLLYHRMLERIHCIIYAILIILMYEVICCTFFRPESIASSQDVSQSDASVVESVRLLDNDESQQGAEVAFTDSEDTTQTVLENVDLQEMGADGAEAHSPSIPMDDMVMMQESLTQGDNMQQDGTEDDTGFWQTSLDASLNRWPSEIGGGADRTWEDNAEDLHSETMEEDDREHGHLQEEHDGWHDNESHGTMENWQDDYQDSALDTGPIPRNENRFIPPDDDNVYSMELRELLSRRSVSNLLSNGFGESLERLIRSYVQQRGHGPLNWNLDAAMHPSNGPNANQEQERNPETQQFQAPVNRPALVIPPPPLPPRQPLWHRELRHNNWNSRHREWDAINDLRADMGRLQQGMSSMQRMLEACMDMQLELQRSVRQEVSAALNRFAGPEGLSMDLCDDGSKWNQVRTGTCCVCCDSQIDSLLYRCGHMCTCSKCANELVRSGGKCPLCRAPIVEVVRAYSVM

SEQ ID NO: 10237 - protein, 288 aa, Zea mays
  VARIANT 133: note = Ancestral polymorphism is R, Derived polymorphism is S
MEGKEEDVRLGANRYSERQPIGTAAQGTEEKDYKEPPPAPLFEAEELTSWSFYRAGIAEFVATFLFLYISILTVMGVSKSSSKCATVGIQGIAWSFGGMIFALVYCTAGISGGHINPAVTFGLFLARKLSLTRALFYMVMQCLGAICGAGVVKGFQEGLYMGAGGGANAVNPGYTKGDGLGAEIVGTFVLVYTVFSATDAKRSARDSHVPILAPLPIGFAVFLVHLATIPITGTGINPARSLGAAIVYNRSHAWNDHWIFWVGPFIGAALAAIYHVVIIRALPFKSRD

SEQ ID NO: 10238 - protein, 182 aa, Zea mays
  VARIANT 84: note = Ancestral polymorphism is E, Derived polymorphism is K
MAVAPSAPSFFPSSPSKISSTWSPCNTLWEQGHQCRRPSSRRSCGLRSTCPTCSATLTWLSEVSRIEEVEEPIKPVLTFASPSERREVLKSEAHAAGDLGAVVHRAYFRMDEMMRGQRGWRELQALGDKINQFSGIIEGLIWSPKASDSNDKHDDWAFEEVLQMHGLRSGLYRQTVKISSKG

SEQ ID NO: 10239 - protein, 883 aa, Zea mays
  VARIANT 737..883: note = Derived polymorphism lacks residues 737 to 883
  VARIANT 108..883: note = Derived polymorphism lacks residues 108 to 883
MRMVRAGAGSRAGAAASLASLRAHTPFSAEAEASPLPMEETAAPLPLTVRAAGAAPDGDERRQPQLEGGGHHQIQSQETEEEHAQAVYCAVGIGTGSGSQEWKDNLRWVLAALAPRRSSSRCLVLAHLRRPTSRINIMGAWVPVSQLAEEEVAAYRQLEEERIGKVLDDLVELCQSQKVNASKIVIASDDIGRGLVQLVDDHGVTELVMGAASDRAYSRKMRTPRSKKALTVQWKANPSCKIWFLCRGNLICTREASEGQAHSRAESSTASTSSRSSTSGYSTPAARDRSIEDQAVGTLDGAAVQLLQEIEEDRPETPTSDAGEMDDALYDKLKRALMEAESLKHEAYEETRRRQMAERELAEASRMVVVTKLHHFLPVKIHADDHIADEAERSNQREARHRKEVEEMVARERAAIEQDRRELDDILEKIRKVDDRSAELELQITSSERTMNDLEARLSESYNLLHTLRQGDPWSTATESASESTEDGGGEQRVSFLQLGYSELDEATKHFDESVRIDGGGDGSRGKVYGGELRGMAVAVKVVNPDVAVHEARFARAVERIGRARHPNLVTLVGACPAARAVVYELVPGGSLEERLDPGGGSGSAPPPLPWHARCGVAYGACSALAFLHSTLPRPTVHGDVRPANILVLADNAPHGWSCKLAGLGARGLVEEREQPRPGAADRAYADPRYLAATGELNPHRDVYALGVVLLRLVTGRPAFLARKAAREAVDGRASWQEVAGGWPTERAREVALLGLRCCGVDVEAEQRPRLPAALLLEEARGVLEAAVSAAPSRSPSSLSESDGAPSYFLCPILKEVMRDPQISGDGFTYEAEAIREWLRSGHDTSPMTNLKLPTQQLVPNHALRSAIHEWRHRQLRAHHRLH

SEQ ID NO: 10240 - protein, 305 aa, Zea mays
  VARIANT 215: note = Ancestral polymorphism is G, Derived polymorphism is R
  VARIANT 204: note = Ancestral polymorphism is R, Derived polymorphism is W
  VARIANT 191: note = Ancestral polymorphism is P, Derived polymorphism is S
MEHGSLTDSTSSTFSIMDEDHTLANSARFVLNQELCSSKPPTNNCYRMMATKDDAQRMKQAANPRVAFCGYTIPHPSEKKVNIRLQTTVPQKGAHTPDVFKLAGDAAKDVLKDALQNLMIMCQHVRGTMDTAVASIFFVLPSCGLPPSPCPQSPPPSTAAAPAVLRSPPPSTAAAVSPRPQCDGGAGEGEPWFYFCPWQEREARGGRPSRTTLLGYWKAAGTLGAVYSADRRAIGVKKTMVFYYGRAPSGTKTKWKMNEYMAFQFETPGPGHDLAAARVAADRSSSSSAHHVADGPAPPPNVGPQ

SEQ ID NO: 10241 - protein, 657 aa, Zea mays
  VARIANT 67..657: note = Derived polymorphism lacks residues 67 to 657
  VARIANT 41..657: note = Derived polymorphism lacks residues 41 to 657
MSLSPLDSSSPPAAAAAAATEVPLAPGFRFHPTDEELVSYYLRRRVLGRRLRVDAIAEIDLYRLEPWDLPSLSRIRSRDAQWYFFARLDRKVAGAGAGGRGGPGNRTNRATPRGYWKTTGKDREVHHRGKPVGMKKTLVFHAGRAPKGERTNWVMHEYRLLDADGPQDLHVVCRIFQKHGSGPQNGAQYGAPYMEEEWEEDDDAIENGSTHDASGQIAATTCAVDEESNEDDENAYCETNRPARVEPSHLPSVHEMLNPPEMAPLQGQDSKETSDGSCSDVAISLEEILQEPLSNISVENMHRLEGQNATDDNISVDNLLSAYPTKDNGYVGQYNTMNGSAPADEAHARWPLRTYSNQNYVNGPLADEFFDTGNDTNGVAYSRQQQADGFPAPRQVDESMVFYDAPSDYNLVDGKDDFVYLNDILNEPLGNESLFDGDDMMAYFDATENDFKYDILGSGQGLDYPLADMPLNFAQKSDKEDKFTFEGISEVPEANPQYGASSSGSHEDLYTDTEFLGVPTDDTADKTYGNRLASMLGSIPAPPAMASEFPPSTGKSAGMLSAVSSSSIRFTAGIIQLDGLTFSSGSGQWPLQKNGDLSLLVSFAVEGDVASKLPVGLGRATRISTVPMVLRSGFYLFFMSAMILLFSYKVGSCIYSR

SEQ ID NO: 10242 - protein, 79 aa, Zea mays
  VARIANT 38: note = Ancestral polymorphism is W, Derived polymorphism is L
  VARIANT 31: note = Ancestral polymorphism is E, Derived polymorphism is K
  VARIANT 21: note = Ancestral polymorphism is I, Derived polymorphism is V
MNKTSATESLSKSLKEVISAVETVTQKIIMKEEKFKNWKAKNIRRKHNYIPFLFNEDACKEATAKTSGRESQTAEVVKP

SEQ ID NO: 10243 - protein, 503 aa, Zea mays
  VARIANT 186..503: note = Derived polymorphism lacks residues 186 to 503
MAGRDRRGAFLASSSSSGSGSGRRAPEHEWWPRSPAWSRPLSDSGGARGRKSGSSTSSSSFRSLFRSIGVWFSSLSTASPSPASSSMKQKSRDAGAKKPPLPGYAGTKTSARGLYSGGGGGRQHRPSFQNSVFSIEEILSATNNFSPALKIGQGGFGAVYKGVLPDGTVVAVKRAKLINLNSGMDGWSQRMQNPHVDVEFRSEIKIMARIEHQSLVRFYGYMECGEERIVVVEYVPNGTLREHLDSKRPPAIAAALLPTPSAISHLARTNSNQAGCNGRFLDFGTRLDIAIDVAHAVTYLHMYSDHPIIHRDIKSSNILLTDSMRAKVADFGFARLGAGLGAGGEATHVTTQVKGTAGYLDPEYLKTCQLTDRSDVYSFGVLLVELASARRPIETKREMKERLTARWAMGRFIGGASADVLDPHLARTPAADRALEAVLELAFRCMGPVRQDRPAMSDCCRALWAIRKTYRDMLAADATPQFSDRRATTSSSSADSSGDLWRI

SEQ ID NO: 10244 - protein, 754 aa, Zea mays
  VARIANT 164..754: note = Derived polymorphism lacks residues 164 to 754
MRWLLLLAFAAAPAAGEMGYAHCGCDGSGGAGGGSGFWSLDNIFKWQKVSDLLIAAAYFSIPLEILYFVAGLRHLLPFRWVLVQFGAFIVLCGLTHLLAAFTYEPHPFMVVLLLTAAKFLTALVSFLTAITLLTLIPQLLRVKVRESLLWIKARELDREVVLMKRQEEASWHVRMLTQEIRRSLDRHTVLYTTLIELSRVLALDNCAVWMPSEDKSGMCLTHELRRGSDDGEAVVGADDADVLEVKGADGVKLLPPGSVLGSASGGGKEGTGTVAAIRMPMLRVADFKGGTPQVIKASYAVLVLVPPSGRKWAPHELEIVEVVADQVAVALSHASLLEESQAMRDRLAEQNRELLQARRDALMANEARDAFQRVMSQGMRRPIHSVQGLVSVVQEEEGLASEQRLVVDAVARTATVVSTLINDVMEMSAATSQERFPLETRPFRLRSMVRDAACVARCLCDLSGRFGFAVHVENVLPDLVIGDERRIFHVLLHMVGNLIGRVDEGDVTFRVRADDEATEDQRWDPWRPSYSGGHSSVRFVVGVKRQQNAGDSLPRFLRRPRTHDGLDLRLSFSMCRKLVQTMQGNIWAVLDGQGLPESMTLVLRFQLQPSLASSNLLGGSFDQEHYSSLPSNQIAGLKVLLIDDDEINLVVARKLLERLGCTVSSGSGLMDSSSACASFQLVMVNLEMSAIDPLDAASRIRQQYRSSHWPLVMAMTSEQNVWEKCAQSGINGVLKKPLVLLEVKEELERILQNT

SEQ ID NO: 10245 - protein, 134 aa, Zea mays
  VARIANT 27: note = Ancestral polymorphism is A, Derived polymorphism is V
  VARIANT 43: note = Ancestral polymorphism is R, Derived polymorphism is G
  VARIANT 44: note = Ancestral polymorphism is L, Derived polymorphism is P
MRRTPSRSASGRSSPSVPPQPPRGCAAPSSKLQRILPTCLLMGLHLHLDKCRMLRLFLIWWQFSKIFLYIHVFHEVAYVLGQLQNKTASDAHSTVVKNVCEHPMARHEAAEALGSMRTKRALCFWRSLQRILSP

SEQ ID NO: 10246 - protein, 459 aa, Zea mays
  VARIANT 19: note = Ancestral polymorphism is P, Derived polymorphism is S
  VARIANT 47: note = Ancestral polymorphism is A, Derived polymorphism is V
  VARIANT 56: note = Ancestral polymorphism is H, Derived polymorphism is Y
  VARIANT 103: note = Ancestral polymorphism is T, Derived polymorphism is I
  VARIANT 153: note = Ancestral polymorphism is A, Derived polymorphism is G
  VARIANT 287: note = Ancestral polymorphism is A, Derived polymorphism is T
MAATKILDRLKVGASPPAPGGALPLTFFDVPWLFTGPVERVFFYPYAHTADHFAAHLLPSLVSSLSATLRAFYPLLGRVRPCPDGGGGYEFFCSDGGEAVELIVAESSDDFDELSAGGPRDVARLYALVPRLPSPGADGSFALAAAQVTVFPARGVAVGVSIHHVACDDSSYTHFIRTWAAQCRVASGGADAVPPPPFLDRGVVADPEGLAGRTLDEMRQLAGNGPPPPPPPAAGPQPKLVIASFALTRDRIDALKRRVAAKVAADGGGTGRVHCSAFTVACALAWACLARVGGGERPRAHLLFSVECRRRLAPPIPQEYLGNCLRPCFVEVGTGELLGGDGVAAAAAAIGAAVAALDGGVLDGAGGWFHKILSLVPERPMSVGGSPRYGVYETDFGLGRPAKVELVSIDKTPGTVSLAEARDAGVEVGVVLQEAEMARFGSCFADALEVLCDSVTELN

SEQ ID NO: 10247 - protein, 310 aa, Zea mays
  VARIANT 262..310: note = Derived polymorphism lacks residues 262 to 310
MDAGRGSSATIFPVPQVPALALLFPPPPPAAAALPSSSLSLSSSSSSRHAPSITSFPILVLTVLGILAACVLILAYYVFVIRCCLTWHRDRSASDAVSRRPQRARARVRTSTGGTPASSAEPRGLEDAVIRALPAFSYRKKPADLPPSAPAPASECAVCLGEFEEGDSVRMLPACLHVFHVGCVDAWLQGNASCPLCRARADVDAASCCRLLPPPPPEEEEDVAAIQVVVVVPGAEEDDRQGTVPQRQRETTVAPAAAAEVEGEDPPQVGGEKERRKDGDVAPRTRSFSTDGDGGEEVQSILQRNGQGLP

SEQ ID NO: 10248 - protein, 350 aa, Zea mays
  VARIANT 317: note = Ancestral polymorphism is P, Derived polymorphism is L
MTEPLSNGAVYQSVPESYVLPEHQRPRSSPPSSAAAIPVVDLGGDDPDRTAEQIVAAGKEFGFFQVINHGVAEDVMASMMSAAEEFFRLPTDEKMAHYSTDSTKLPRFHTSVGKEQEKVLYWRDCLKIGCYPFEEFRHRWPEKPAGLGAALEAYTAAVRSVALRVLRLAASGLGLEDEAHFEGGELTAGPVVMNVNHYVACPDPSLTLGIAPHCDPNVVTVLMDNGVRGLQARRRRGEGEGEGEGGGWVDVDPPPGALVVNFGHQMEAVTNGRVRAGEHRAVTSARAARTSLAAFVMPAMGYVVSPAPGVVAEGEALLFRSYTYQEFVSVYTAATGDRDAVLARFRNNNG

SEQ ID NO: 10249 - protein, 253 aa, Zea mays
  VARIANT 82: note = Ancestral polymorphism is A, Derived polymorphism is D
  VARIANT 118: note = Ancestral polymorphism is L, Derived polymorphism is Q
  VARIANT 139: note = Ancestral polymorphism is R, Derived polymorphism is C
  VARIANT 172: note = Ancestral polymorphism is G, Derived polymorphism is A
  VARIANT 175: note = Ancestral polymorphism is P, Derived polymorphism is T
  VARIANT 183: note = Ancestral polymorphism is I, Derived polymorphism is L
  VARIANT 188: note = Ancestral polymorphism is R, Derived polymorphism is H
  VARIANT 194: note = Ancestral polymorphism is D, Derived polymorphism is V
  VARIANT 213: note = Ancestral polymorphism is W, Derived polymorphism is C
  VARIANT 215: note = Ancestral polymorphism is I, Derived polymorphism is T
  VARIANT 221: note = Ancestral polymorphism is S, Derived polymorphism is L
  VARIANT 224: note = Ancestral polymorphism is F, Derived polymorphism is L
MDPALLDDVIRRLLEVKNLKPGKNAQLSESEIKQLCAAAKEIFLQQPNLLELEAPIKICGDVHGQYSDLLRLFDYGGYPPQANYLFLGDYVDRGKQSLETICLLLAYKVKYPENFFLLRGNHECASVNRIYGFYDECKRRFSVKLWKTFTDCFNCLPVSALIDEKILCMHGGLSPELNKLEQILNLNRPTDVPDTGLLCDLLWSDPSNEATGWAINDRGVSFTFGPDKVSEFLEKHDLDLICRAHQVVVFLKM

SEQ ID NO: 10250 - protein, 429 aa, Zea mays
  VARIANT 113: note = Ancestral polymorphism is A, Derived polymorphism is D
  VARIANT 198: note = Ancestral polymorphism is S, Derived polymorphism is F
  VARIANT 212..429: note = Derived polymorphism lacks residues 212 to 429
MRCLPFLHGDVSEKDPVTKSASVRSMSTTSRSRSGSDFTSLNVSDMSAESIRRTQYPSFTDCPSNLRVFSFAELKSATRNFSRSLMLGEGGFGCVFSGIIKTSDKPNERIEIAVKQLNRKGLQASLGQKEWLTEMNVLGIVDHPNLVKLIGYCAEDDERGVQRLLVYEYMPNGSVDDHLSSRSTTLSWPMRLKVALDSARGLKYLHEEMEFQVIFRDLKTSNILLDENWNAKLSDFGLARHGPTEGLTHVSTAVVGTLGYTAPEYMQTGHLTAKSDIWSYGVVLYELITGRRPIDQNRPKSEQKLLDWVKPYISDVKRFPVIIDPRLEGHYNLKSATKLASVANRCMVRLPKSRPKMSEVYGMVQRIVDGVGTGPPQPPLLHYHHGSASEPGAKRAEKGSLRRRFREFRSGCRHVVLRRGRKPEVVKDL

SEQ ID NO: 10251 - protein, 453 aa, Zea mays
  VARIANT 185: note = Ancestral polymorphism is N, Derived polymorphism is I
  VARIANT 184: note = Ancestral polymorphism is L, Derived polymorphism is P
  VARIANT 48: note = Ancestral polymorphism is P, Derived polymorphism is S
  VARIANT 35: note = Ancestral polymorphism is T, Derived polymorphism is M
MARKKIREYDSKRLLREHLKRLAGIDLTILSAQITQSTDFAELVSQQPWLSTMKLVVKPDMLFGKRGKSGLVALNLDFNQVKEFVKERLGVEVEMGGCKAPITTFIVEPFVPHDQEYYLSIVSERLGSTISFSECGGIEIEENWDKVKTIFLPTEKPMTSDSCAPLIATLPLEVLVAFLLSSNLNTSMLSHFSHWRYSLFADQARGKIGDFIKGVFAVFLDLDFSFLEMNPFTMVNGEPYPLDMRGELDDTAAFKNFKKWGGIEFPLPFGRVLSPTESFIHELDEKTSASLKFTVLNPKGRIWTMVAGGGASVIYADTVGDLGYASELGNYAEYSGAPNEEEVLNYSRVVLDCATADPDGRKRALLIGGGIANFTDVATTFNGIIRALREKESKLKASRMHIYVRRGGPNYQSGLAKMRKLGAELGVPIEVYGPEATMTGICKQAIECIMAAA

SEQ ID NO: 10252 - protein, 347 aa, Zea mays
  VARIANT 109: note = Ancestral polymorphism is R, Derived polymorphism is I
MDYDRLNSPNTSAISLEVMGHRLHISQDPNSKHLGTTVWDASMVFVKFLEKNSRKGRFCPSKLKGKRVIELGAGCGLAGFGMTLLGCDVTTTDQVEVLPLLMRNVERNRSWISQSNSDTDTIGSITVAELDWGNKEHIKAVEPPFDYIIGTDVHAISLFSLIICYNQGFQVDKSSRQDLLRASVATSNGDNYCIIWSQNKNIGTSCPPQKLFLQSSCLGTTEPLPAIQLGYEIRSATVHEKMMEMWKSNFIVKTVSKSKMDVKYQHPNIHLYMMDLKAPLIPEVEATDDNGNDDEEVVSNLGEDEDNGLKSESCSGSSPEAKSGSLDDWEIRRCGAMAARLLKDVKL

SEQ ID NO: 10253 - protein, 222 aa, Zea mays
  VARIANT 199..222: note = Derived polymorphism lacks residues 199 to 222
MACVSTFQSCPIARRAKINTRSRGSSSSVAKGSPPPAFQFQCRASTFAADTSLRLELDENPEAIISGAWPGNCSLLSYDDLRAYLESQETAAQADDQRGVALLSETMSTPVLVATADQTLEDVECHFEAVSGLPVVDSGLRCVGVIVKNDRARASHGSKTKISEVMTSPAITLSSDKTVMDAAVLMLKKKIHRLPVVNQDEKVIGIVTRADVLRVLEGMLKI

SEQ ID NO: 10254 - protein, 483 aa, Zea mays
  VARIANT 281: note = Ancestral polymorphism is N, Derived polymorphism is S
  VARIANT 348: note = Ancestral polymorphism is V, Derived polymorphism is A
  VARIANT 359: note = Ancestral polymorphism is T, Derived polymorphism is I
MSGGGGGSPNNTEWRFNQTLRNVQGMLKGRSFPGKVLLTRRSEPLSPPDYSPSFESEHDEDERKEGSRQEGEGQASGNSFDNASSKKSNILSTSSSNSLPDAQGLVSGARATDSARIAKFTTELSRPAVILDTRKTGDFSVSSAITNCVNYLGVVCLHICDLMYGGFFCWLQGYAPPNKDRREGVLTRKRLEYVECVSQYYDIPDSERSDEEITMLRQIAVDCPRTVPDVTFFQNHQIQKSLERILYTWAIRHPASGYVQGINDLVTPFLVVFLSEHLDGNMDTWSVDNLSAQAISNIEADCYWCLSKFLDGMQDHYTFAQPGIQRLVFRLKELVRRIDGNVPLIPSVYTYGKNTSSFTSYFLLLYAEPVSKHIEEQGLEFLQFAFRWFNCLLIREVPFHLVTRLWDTYLAEGDYLPDFLVYISASFLLTWSDKLQKLDFQEMVMFLQHLPTRTWAHHELEMVLSRAYMWHTMFKSSPSHLAG

SEQ ID NO: 10255 - protein, 329 aa, Zea mays
  VARIANT 102: note = Ancestral polymorphism is E, Derived polymorphism is G
  VARIANT 39: note = Ancestral polymorphism is A, Derived polymorphism is T
MQYKNLGRSGLRVSQLSYGAWVTFGNQLDVKEAKVLLQACRDAGVNFFDNAEVYANGRAEEIMGQAIRDLGWRRSDVVISTKLFWGGQGPNDKGLSRKHVVEGLRGSLRRLALDYVDVVYCHRPDASTPVEETVRAMNWVIDQGWAFYWGTSEWSAQQITEAWAVANRLDLVGPIVEQPEYNLFSRHKVESEFLPLYSTYGIGLTTWSPLASGVLSGKYGKGDIPADSRFALDNYKNLANRSLVDDTLRKVNGLKPIAAELGVSLAQLSIAWCASNPNVSSVITGATKESQIVENMKALDVIPLLTPEVVDRIEAVVQSKPKRNVESYR

SEQ ID NO: 10256 - protein, 1092 aa, Zea mays
  VARIANT 316..1092: note = Derived polymorphism lacks residues 316 to 1092
  VARIANT 336..1092: note = Derived polymorphism lacks residues 336 to 1092
MDIETHAAALARDELRRLLAATLSPDKASVDAAAAGLDALSSDPRFPLAILAVAAGDGDQGMRVAAATYLKNFTRRNLETRLCSSEVYKEFRDQLAQALLRVEPAILRVLIEVFRQVVEKDFVKDNLWPELIPQLKLVIQSSNLISPGQHPECNTINALTVLQSVVRPFQYFLNPKVVKEPVPQQLEQIAAEILVPLQVTFHHFSDKVLLSPDGTNLEYEQLLLITCKCMYFTVRSYMPSRVKQILPSFCKDMFRILDSLNFNSLIEDGSTMKLKIAKRCLIIFCALVTRHRKHTDNQMPHIVNCAIKISKQSIHLSKLDSLPNRIVSLAFDVISRVLETGPGWRLVSPHFSSLLDSAIFPALALNEKDIEEWEEDTDEYMQKNLPSELDDISGWTEDLFTARKSAINLLGVIALSKGPPVASAASKRKKGDKNKGKSEMSSIGELLVTPFLSKFPIPSHGEDASSVAVRNYFGVLMAYGGLQDFLTEKKDLTITLIRNRILPLYSLDPCSPYLISTANWVIGQLAICLPEDMSSSIYESLMKALTMEYVEDITCYPVCASASGAIAELIENSYVPPDWLILLQVVLKRISTGDENESALLFKLLGTIVEGGQEKVLSHIPEIVSNIASTVMELLPPVPDPWPQVVEQGFAALVAMVQAWESSAPDENKTPEKRFWQSGQSAIAQTISLLLQKAWLLQADNMEGSALPPPSCVNDASVLLEFVMSSVTCMEETANLKVFELVATWADAIANWDSWEEMEDQGVFNTIKEAVNFHQRFDLDGLFLKTLPSQSENGSQSSVIGRVSNFVTRAIAAYPSATWRACSCVHTLLHAPKFSLGAQDTRKTISESFAQAAFSRFKSVSDSPAGLWKPLLLAISSCYICYPDAIEQVLNNVDGNGFAIWASALAQVSSSLFNPGLSSESEIKLAVLTLSTVINHLVSLSTGGTKLLQDCYASLMESCIQLKEVQDDGDNDDDDDGAEDVDDNDEEEDTEDDDEDSDDDDDAREETEEEFLERYALAAAAGESVEEGDIDEETQDIELGSLDDVDIQQVVIPLMQKLPALQPAGAFPDSLVERIAETFPEYEQFLQALRRA

SEQ ID NO: 10257 - protein, 153 aa, Zea mays
  VARIANT 100..153: note = Derived polymorphism lacks residues 100 to 153
MDAQPNWRGGPAATRISYKNATIVMCAFNLFVAALLLHNYYSSWTRIAGGNKLDSAQLRYIWESEELRRAMEPVDLIRRVKEIEQEAYGEHGMATDEDPKQTAAVDLSKRLKDLRAGNDGSSQKALEEWRKRKMERARQRAIEKNGTSSVKTK

SEQ ID NO: 10258 - protein, 105 aa, Zea mays
  VARIANT 71: note = Ancestral polymorphism is A, Derived polymorphism is V
  VARIANT 69: note = Ancestral polymorphism is A, Derived polymorphism is V
  VARIANT 65: note = Ancestral polymorphism is V, Derived polymorphism is M
  VARIANT 64: note = Ancestral polymorphism is A, Derived polymorphism is V
  VARIANT 63: note = Ancestral polymorphism is R, Derived polymorphism is W
  VARIANT 51: note = Ancestral polymorphism is A, Derived polymorphism is T
  VARIANT 41: note = Ancestral polymorphism is R, Derived polymorphism is S
  VARIANT 39: note = Ancestral polymorphism is E, Derived polymorphism is K
  VARIANT 38: note = Ancestral polymorphism is G, Derived polymorphism is E
  VARIANT 18: note = Ancestral polymorphism is P, Derived polymorphism is L
  VARIANT 10..105: note = Derived polymorphism lacks residues 10 to 105
MVTKGCAMFWVGEEGEAPRRVAVPVARLGHPRMLELLGEAREEYGFAHQGAVVVLCAVERFMRAMEASASVGNRHEHHRHGHHHHHFCLPHIHIARCFRPSHVVA

SEQ ID NO: 10259 - protein, 376 aa, Zea mays
  VARIANT 24: note = Ancestral polymorphism is A, Derived polymorphism is V
MASASRLVSFAALCLCLGAALQAARGADAAARAFFVFGDSLVDNGNNNYLLTEARADSPPYGIDTPDHRATGRFSNGKNVPDIISEHLGAEPVLPYLSPELDGDKMLVGANFASAGVGILNDTGIQFANIIHISKQLRYFEQYQRRLAALIGPEAASRVVRGALVLITLGGNDFVNNYYLVPYSARSREFSLPDYVTYLLSEYAQVLDRLYDLGARRVLVQGVGPIGCVPAELALHSLDGTCDAELQRAAEMYNPRLMALLEELNARHGGGDPVFVGVNMQRIHNDFIDDPKAYGFQTATDACCGQGRFNGMGLCTMVSSLCADRDTYVFWDAFHPTERANRLIVQQFMSGSTDYITPMNLSTVLAVDLQKQQLRT

SEQ ID NO: 10260 - protein, 268 aa, Zea mays
  VARIANT 168: note = Ancestral polymorphism is V, Derived polymorphism is A
  VARIANT 175: note = Ancestral polymorphism is K, Derived polymorphism is N
  VARIANT 178: note = Ancestral polymorphism is G, Derived polymorphism is E
  VARIANT 202: note = Ancestral polymorphism is R, Derived polymorphism is W
  VARIANT 203..268: note = Ancestral polymorphism lacks residues 203 to 268
  VARIANT 235..268: note = Derived polymorphism lacks residues 235 to 268
  VARIANT 240: note = Ancestral polymorphism is E, Derived polymorphism is G
MEEVGGDMPLPKQKLSAAPYRDGGGVVLVATGSFNPPTYMHLRMFELAKDELELRGYSVLGGYMSPVNDAYKKKDLLPAAHRIRFCELASKSSSFVMVDPWEAMQNGYQRTLTVLSRIRNSLCKDGVADQGSLKVMLLCGSDLLESFTTPGVWILDQVRTICQDFGVVCIRREGKDVGKLIDNSDILQECRRTQAVYGRQWRRHSIAVIEVFGGKLCNRQGSAVDVYLRSQDTIWTVHSGQLLRTNTEINGTGHLNYYYIFVKFDSGG

SEQ ID NO: 10261 - protein, 387 aa, Zea mays
  VARIANT 260: note = Ancestral polymorphism is L, Derived polymorphism is F
  VARIANT 167: note = Ancestral polymorphism is R, Derived polymorphism is H
  VARIANT 160: note = Ancestral polymorphism is L, Derived polymorphism is I
MWATSPPPLPLQLRRPPHPRFIARRRNKRLDRIAASQDPLTALTRVLWGGALPPAQLVVAVRHGWTTAWQLLMRQLAPSDPATGGFARAPARFPAVVGKPSSRLHLYVGLPCPWAHRALVVRALLGLEARLPVSVAVPGDDGAWSFTPGSPDLLYGKRKLREVYALRGGGFEGRASVPMLWDAERCEVVCNESIEIVKFLCDLAGDGAGDLDLWPPELRQDIDRWYSIIYPSVNNGVYRCGFAQSQEAYDAAASELFGALDRLEAHLAGCRYLCGDRLTLADVCLFTTLIRFDLVYNTLFRCTRRKLAEYPSLHAYTRDIYQMPKVAETCDMEAIMAGYFKTLFPLNPGGIQPHPPATCDRESLLRPHGREALSSAAGTPLEAAAVS

SEQ ID NO: 10262 - protein, 140 aa, Zea mays
  VARIANT 109: note = Ancestral polymorphism is K, Derived polymorphism is R
  VARIANT 77: note = Ancestral polymorphism is M, Derived polymorphism is L
  VARIANT 71: note = Ancestral polymorphism is D, Derived polymorphism is N
  VARIANT 68: note = Ancestral polymorphism is G, Derived polymorphism is E
  VARIANT 48: note = Ancestral polymorphism is R, Derived polymorphism is P
  VARIANT 40: note = Ancestral polymorphism is I, Derived polymorphism is V
MSKRGRGGSAGNKFRMSLGLPVAATVNCADNTGAKNLYIISVKGIKGRLNRLPSACVGDMVMATVKKGKPDLRKKVMPAVIVRQRKPWRRKDGVYMYFEDNAGVIVNPKGEMKGSAITGPIGKECADLWPRIASAANAIV

SEQ ID NO: 10263 - protein, 457 aa, Zea mays
  VARIANT 48: note = Ancestral polymorphism is L, Derived polymorphism is I
  VARIANT 86: note = Ancestral polymorphism is E, Derived polymorphism is G
MGWAHPAVTMEEVLRLVRGFVDVLVLAGGRTSSGAAATWSADEIKKALRWALFFEEIFKDLLDSGQYEDSARELDAALLELTSSPEFPKGLAAVRSDLLSMARVLVMRHFLKPNTMSVENFCALLEAVAGMDIDGICASGAHNACQEYAESILNMNTSCFAQTMNACDGGLPTSSYDLRAESTGHSWIIVKEFQKTLDSASCGRLADRGLETFLNSVKRNILENGSNKPCVPAIPKTSQMIDEFLMWKQWRAKCLSYLLDQRTIRVLSGASLIFKAPKEQWMKVFEPLKSIEETCHSGLVETMELCLLGSITRRWNTLIEGFMSHTFCSIPISKKHADLHQCLHRTFQDKFQDEYLNLEEKDILDYARQTLERKPSVLWLLPPVLTAAAIPPQSSLFQIYLAQIDKQIHEAAPADRKCSCRGDEIDRHVNCEITERIQCLYAFLIQQLSYNGSTRLH

SEQ ID NO: 10264 - protein, 641 aa, Zea mays
  VARIANT 88..641: note = Derived polymorphism lacks residues 88 to 641
MASKPGPLSRWPWQDLGNYKYALVAPWAVRSTYRFVRSGSGERDLLAFAVLPVLLLRLLYSQLWITVSRHQTARSRHRIVNKSLDFEQVDRERNWDDQILLTALLFYAVNAAVPVAQSVPWWDSRGLLVAALLHVGPVEFLYYWLHRALHHHYLYARYHSHHHASIVTEPITSVIHPFAEELVYFTLFAIPLLTMVGTGTASVAVANGYLAYIDFMNYLGHCNFELVPRLLFDVFPPLKYLMYTPSFHSLHHTQFRSNYSLFMPLYDHLYGTADKSSDDLYERALQGRAGEDAPDVVHLTHLTTPASLLRLRLGFASLAAAPAPPASRYGAGSSSSSSSSLAAVACPLAALLGWTRTAFRSEANRLHKLKLETWVVPRYTSQYLSKQGLYAVGRVVEKAVADAEASGARVLTLGLLNQANELNKNGELYVIRKPSMRTKIVDGTSLAAAAVLHMIPEGTDEVLLLGDAGGNKMAGVLASALCEREIQVHVVDKDLYESVKQQLRPETHEHLLHLAEWWSHSAKTTKVWLVGDRLTGEEQRRAQGGAHFVPYSQFPPGAVVRADCVYHSTPALVVPDAFEDLHACENWLPRRVMSAWRAAGIVHALEGWDAHECGARVTGVDKAWRAALAHGFRPYDRYGAN

SEQ ID NO: 10265 - protein, 417 aa, Zea mays
  VARIANT 15: note = Ancestral polymorphism is G, Derived polymorphism is D
  VARIANT 23: note = Ancestral polymorphism is S, Derived polymorphism is F
  VARIANT 97: note = Ancestral polymorphism is S, Derived polymorphism is L
  VARIANT 255: note = Ancestral polymorphism is A, Derived polymorphism is T
  VARIANT 263: note = Ancestral polymorphism is D, Derived polymorphism is Y
MALLGEYSSQELLQGQLQLWHQSLGFFKSLALAVAMDLRIADAIHRLGGAATLPQILAEAGIKIDPCNNKLRDLRRVMRALTVSGIFTVVQRPASSSDGGGRRGAEAEGPVYKLTAASRLLVVGEKESSTTATTRQLPPPPSLTVYVQLLLETCRGSAFSRAVREWFQFQQPPQDDGQHQQPAGRLSSPFALACGGQTIWERAERDAHAFPFDDAMASDTAFLMPIVLRECGDEVFGRGLTSLVDVAGGLGGAAATIAAAFPDLSCTVLDLPHVVAKAAAGTTDSNVQYVAGDMFQCIPPADAVLLKWILHDWSDDECVRILKNCKQAIPPRAAGGKVIIIDMVVAGPGSGSADDEPSESDLRHVETQILFDLLMMCVNGVERDEQEWKKIFSEAGFQDYRIMPLLGVRSIIELYPN

SEQ ID NO: 10266 - protein, 313 aa, Zea mays
  VARIANT 218: note = Ancestral polymorphism is A, Derived polymorphism is T
  VARIANT 202..313: note = Derived polymorphism lacks residues 202 to 313
  VARIANT 159: note = Ancestral polymorphism is G, Derived polymorphism is W
MAESAIYRLPEECVAYAISLTTPGDACHSSAVSPAFRAAADSDAVWARFLPPDHADILARADDPGAVTAGCASKKELFSRLCDSPVLLDGATMSFGLERRSGAKCFMLSARALSRKNDPSRWTWAASPPGSRFPEVVKLQDVCWLEISGKLSLSLLSPGTTYAAHLVFAIADDSYGLECHVGMPALKATVTVTVSGKTTMAEHDICLHHMQGEAEAAAHRRTQQYVRLRRGYGGGGKATVLTTTREADPDIRCPRRRGDGWAEVEVGEFAVAGDEGDAADVEVTVQEDSLRWKRGLVVLGVDIRPKQHTPTPC

SEQ ID NO: 10267 - protein, 40 aa, Zea mays
  VARIANT 10: note = Ancestral polymorphism is A, Derived polymorphism is S
MLYNYCTVFAWLTLGRSFRHICLTVHHLFLSTQPCTRTDL

SEQ ID NO: 10268 - protein, 370 aa, Zea mays
  VARIANT 250: note = Ancestral polymorphism is G, Derived polymorphism is D
  VARIANT 31: note = Ancestral polymorphism is L, Derived polymorphism is V
MSSNCGEDEKELVCVTGAGGFIGSWVVNELLQRGYRVRGTARDPADSKNAHLLALEGAKERLTLCRADVLDRASLRAAFAGCHGVFHVASPVSNDPVSLSRRFTCPLPLSLLQFFFQTQCSRLTTPLASAPGPQELVPVAVEGTRNVINAAADEGARRVVFTSSYGAVHMDPSRSPDAVLDETCWSDYDFCKRTDNLYCCAKMMAEVTAAAEADARGLQLAVVLPCMTTGPMLQQTLNFSTNHVARYLMGTKRSIPNAVAAYVDVRDVARAHVLAYERPGARGRYLCIGTVLHRADLVDMLRDLFPQYPVTAKCEEDGKPMAKPFKFSNQRLRDLGLEFTPLRKSLYETVLCLQQKGHLPVIQPQQRAYL

SEQ ID NO: 10269 - protein, 212 aa, Zea mays
  VARIANT 10: note = Ancestral polymorphism is G, Derived polymorphism is V
  VARIANT 12: note = Ancestral polymorphism is V, Derived polymorphism is M
  VARIANT 13..212: note = Derived polymorphism lacks residues 13 to 212
  VARIANT 15: note = Ancestral polymorphism is D, Derived polymorphism is N
  VARIANT 29: note = Ancestral polymorphism is D, Derived polymorphism is G
  VARIANT 34: note = Ancestral polymorphism is P, Derived polymorphism is S
  VARIANT 52..212: note = Derived polymorphism lacks residues 52 to 212
  VARIANT 80: note = Ancestral polymorphism is G, Derived polymorphism is R
  VARIANT 83: note = Ancestral polymorphism is S, Derived polymorphism is R
  VARIANT 94: note = Ancestral polymorphism is P, Derived polymorphism is T
  VARIANT 107: note = Ancestral polymorphism is P, Derived polymorphism is S
  VARIANT 127: note = Ancestral polymorphism is I, Derived polymorphism is K
  VARIANT 128: note = Ancestral polymorphism is M, Derived polymorphism is K
  VARIANT 129: note = Ancestral polymorphism is A, Derived polymorphism is E
MAVEDADVAVTVQLDLGFMVFNRIPDYHGIIKHSMDFSTIRKKLDKGDIPTWSDLSLQMYLVRLVHLVGCYKISVGTDMGIFSQFTLSERILRPPFKNIYCKMLRMSDAYIVVVNTFTILICFTFGIMAKCFHVTNRGLLVIIHAVVNARLSKDSSMGDSLYMRTKKGWFPTGSVYRKAVGLGYKSVAHFLIAKHNNKQLPTDIVNNAEELQ

SEQ ID NO: 10270 - protein, 1020 aa, Zea mays
  VARIANT 689..1020: note = Derived polymorphism lacks residues 689 to 1020
MSSRLKDRGGGRATAAATRPLTPKPFSISSSARQTTAAAGKENTASKPSKPTSAVRWSTSSLPRASRIQSSVDSSKLASTLRAPVLPGRTSISKDPVVEAGLRRSVSGGIRASSVEKGRRSISVVGSRASEARRGSAGAGSDDTGRRARFDAKAKGSDEISRKRGDLDAKGKQTDEIGRKRESFDAKAKQIGGKRDSFCVNVLKQCDENKGKTNAFVTNMKKQCEDVGGQIKGSDSKVKAAEEINMKKEGPNKLMKEMNTKKADPGEAASKSVECCAIQKDDDIGKTSVIPVFTVHVVNSNDVPDPIRKQQKNNEEGRKQEEKVKLADRIGVFEKVAAGGEGGSAKPVSAMNRYPSKLHEKLAALEGRVQKIATDIKKTKEMLDENNPNEPKQILSNIQKEITAIEKAISHVKDDNKIQLGTADSSECESSHPETAEKCTITKPGNLKQAGKGLNADELEARFFPHHKLLRGRISSTSTQQELSVDAKKDCSGKTRPAASDPGDDENSIAMEFLASLDGEENDFFKDRRAKKLEKNKICEVADATSKTSSQGSTKNPVAPNHKDEVELLATEELEEFDDQENKSSMMLQEETEESCNSQLSGIGNKSSTGGWFVSEGEAVLLAHGDGTCSYYDIANHEFKSEYKPPSLVSNNTWGDCWLIRAPGVDGCSGRFVVAASAGNALEPGFCSWDYYTREVKSFHVEEEASQTFAPTSRAILGALSNVGSSRSSSALSNTERQQWWYKPCGPLLLSTASKQKMVTAYDIRDGDVVMKWEVSNLVMGMEYSSPLQWRSRGKVVIAGSESIGLWDVNSLNPQPLLSVASGKKVYCLHVNNTDAEVGGGVRQRVSSSEVEGNDGVFSTQESVNVFDFRVPAGIGLKIARHGGTANSIFSRGDSVFIGSTEGRLQIKGGSRSRVQQYSLRKGKLVATYELPEFNAHIHHSAITQVWGDSNLVLAACGMGLFAFDTFKEDTQPTYSFDRGNTIAAREAIGPDDLYCPTFDYSSSRVLLVSRDRPAHWRYL

SEQ ID NO: 10271 - protein, 227 aa, Zea mays
  VARIANT 126..227: note = Derived polymorphism lacks residues 126 to 227
MSQAPHACNPLWIWMIARRSGGGGWCSARDARGNLSSTFTVKSIHACASLVLVSLTAALFLPVPTRRLSKAMRTLASPSARVAAMAMDDLAGTSSSSTTMAATASSDPSYGWQTMLYPKCNRKQAQPPRATALQSNDTARCSSSSPPGRPTSTMRGSPLSRAPPTPTTTTLTRLLQCCPAPGGRGQEAEGDGRRGRRLDRHREPRSAPLRDLGIVRESTGHSVHEVC

SEQ ID NO: 10272 - protein, 632 aa, Zea mays
  VARIANT 177..632: note = Derived polymorphism lacks residues 177 to 632
  VARIANT 160: note = Ancestral polymorphism is S, Derived polymorphism is F
MDDVSKYAHSPAHLAVLRRDHAALRRLVAALPRLPRAGEVATEEESVAGEAVADAVSAVIDRRDVPRRETPLHLAVRLRDPVAADILMSAGADWSLQNADGWSALQEAVCTREEAIATIIARHYQPLAWAKWCRRLPRILASISRIRDFYMEISFHFESSVIPFIGRIAPSDTYRIWKRGAALRTDMTLAGFDGFRIQRSDQTFLFLGDGARPEDAGGKELHSGSLIVLAHKDKEITDALEGAGVQPTESEVAHEVALMSKTNMYRPGIDVTQAELVPHLNWRRQERTEAVGQWKAKVYDMLNVLVTVKSRRVPGAMTDEELFAMDGEEKNGRGAELDAELDEVLTAEERKQLDSALRMGNNEEESEERGDEGDAGADHTDASGVTKDKKGWFGWGAKKGAKGDDKPSKVGSKDETSDPGKQKEKGSGKKKKGGSSAESVKHESEYKKGLRPVLWLTPDFPLKTDELIPLLDVLANKVKAIRRLRELLTTKLPTGTFPVKIAIPIVPTIRVIITFTKFEELQPLDEFATPPSSPTQFQDAKAKEPEGSGSWYSWVKGGRGTQSGDSGDGRNWKDEVDPFHIPSDYTWVDATEKKRRMKAKKAKSRRTTARKQSSKNTSSEGGHRPMMDGFEE

SEQ ID NO: 10273 - protein, 194 aa, Zea mays
  VARIANT 155: note = Ancestral polymorphism is R, Derived polymorphism is W
  VARIANT 17: note = Ancestral polymorphism is V, Derived polymorphism is A
  VARIANT 16: note = Ancestral polymorphism is V, Derived polymorphism is A
  VARIANT 8: note = Ancestral polymorphism is V, Derived polymorphism is I
MKSQQHVVLAALIVVVVATILVQTTPPPRGAEAAIIPGNVSAPNAVVFGVVPCSTGSSINVATAPPFPNASLQLQCGAASLAGNVSGRATTADSRGNFLVGVGVIRNANSSGGAVLSLSSMLLGNQCSVVVTTPLAACNVSLAGANNGTLSAPVRVVGGGPLLGGLLGLAAGPFSFSFSNRSSSPLGRRRMMGS

SEQ ID NO: 10274 - protein, 913 aa, Zea mays
  VARIANT 141: note = Ancestral polymorphism is T, Derived polymorphism is A
MAPPPTPPTRPAPAPQATGATATPLRTPASKHRLHFPAATPRNANHGGATEHPVEVIGRIRNLASGVSSALEFAGGGTAVRVRGDAGGCRDFTLDGVSVSEEEDLEGFYRRFVRSRIQGVRVGAKCTVMVYGPTGSGKSHTMFGCARQPGIVYRALRDILEGGGGSEGDSAEDDAGLFVQVAVLEIYNEEVYDLLVGSGAAAKGNAPKCIVEASQFCIYGQARLEVMGKKAKNATYISGNEPGRISREVSKVEKRRTVKSTLCNERSSRSHCVIILDVPAVGGRLMLVDMAGSENIEAAGQTGFEAKMQTAKINQGNTALKRVVESIANGDSHVPFRDSKLTMLLQDSFEDDKSKILMILCASPDPKELHKTVSTLEYGAKAKCIIRAAHAATPRDKMSSEESSAMLNSRIVAMNQFIHKLQKENKLREKERNEARNVLKLREEELAQLRAKLNLIERQGKATENEINSKVMEKTQTLRGELMKMEEAMYKQQQELCVLRQRLQEVEREKADSCQPGQQDVIGGRLLARLSEMPAGLDQSMAIDMSMDLDMGDQTSMQDVKVIKEDTCQQGQIWNHTTTAASACTGSLVQEDDVRLSGYPEKTVLSTVFEEGDEDYAEKKCGLQEEVRKEVVDENFKVDIAQHTLSEPDHPATRKHHIENMFRLCGNHREIAKKPKVQSPAKEMFWNENQSPAKQVFGNQNKSPANKIFGDENKEPLAWGAIETPMCDVRVTDSPVSSQLSPIVCQVVDAPLSAQPDTCSAVEESDPNKENSLAGQKDGGLLEVYIKWESGNLIKGLKLLHNSCLSDLRKFIEAHFEEAGSKQKHQFTFLLLGDPSGAPVSRDTEASVQISRLPHWNNQPDSYLACLRAAKKPSADHVPFSPLDSNLNTVHLAGAVSPKVNQMSPSYIRELRA

SEQ ID NO: 10275 - protein, 468 aa, Zea mays
  VARIANT 1: note = Ancestral polymorphism is M, Derived polymorphism is I
  VARIANT 12: note = Ancestral polymorphism is G, Derived polymorphism is V
  VARIANT 21: note = Ancestral polymorphism is G, Derived polymorphism is E
MDHVVGGKFKLGKKIGSGSFGELFLAVNVQTGEEVAVKLENVKTKHPQLHYESKLYMLLQGGTGIPHLKWFGVEGDYNVMVIDLLGPSLEDLFNYCSRKFSLKTVLMLADQMINRVEYMHQKGFLHRDIKPDNFLMGLGRKANQVYIIDYGLAKKYRDLQTHKHIPYRENKNLTGTARYASVNTHLGVEQSRRDDLESLGYVLMYFLRGSLPWQGLKAGTKKQKYDKISEKKMLTPVEVLCKSYPSEFISYFHYCRSLRFEDKPDYSYLKRLFRDLFIREGYQFDYVFDWTILKYPQIGSNPRTRAGERTSGAAGPSMDRIEKTPGEASGRRNPSGPVNQSDSYAQRPRETVSMSLKEIMHSTDRSGERTVERPRTSSRTGSASRRAVASSSRPATSSMEPSEQQYSRASRLFSSNSGSRPSSAQRVNPAPGESRATSLSRAAVARGSRDEPLHRSLELLSLGSGKRK

SEQ ID NO: 10276 - protein, 224 aa, Zea mays
  VARIANT 24..224: note = Derived polymorphism lacks residues 24 to 224
  VARIANT 28: note = Ancestral polymorphism is P, Derived polymorphism is L
  VARIANT 38: note = Ancestral polymorphism is G, Derived polymorphism is S
  VARIANT 80: note = Ancestral polymorphism is G, Derived polymorphism is D
  VARIANT 81..224: note = Derived polymorphism lacks residues 81 to 224
MKGLLKGLRYISQIFGDAKEPEMQIGKPTDVKHVAHIGWDNASVTAPSWVAASVPVPPPTTPFPCSAPRPNVRTPTNSCGWACHVLQMDEFKASPGTARGSDPEPSQPGGSEGCGEEQAGGGEDGGGKAERPRRARGNKGSGGNEPAKRRDCAAEGLRRDRRVAKAADAAEGAEGQGDAAAAAPKQRRRKPRAASGGRSKSSSGGAAASDSAGAPPDEDDRCGC

SEQ ID NO: 10277 - protein, 341 aa, Zea mays
  VARIANT 310: note = Ancestral polymorphism is A, Derived polymorphism is T
  VARIANT 215: note = Ancestral polymorphism is P, Derived polymorphism is L
  VARIANT 202..341: note = Derived polymorphism lacks residues 202 to 341
  VARIANT 178..341: note = Derived polymorphism lacks residues 178 to 341
  VARIANT 149: note = Ancestral polymorphism is I, Derived polymorphism is N
  VARIANT 142: note = Ancestral polymorphism is P, Derived polymorphism is L
  VARIANT 128: note = Ancestral polymorphism is P, Derived polymorphism is S
  VARIANT 126: note = Ancestral polymorphism is T, Derived polymorphism is I
  VARIANT 66..341: note = Derived polymorphism lacks residues 66 to 341
  VARIANT 31: note = Ancestral polymorphism is P, Derived polymorphism is L
  VARIANT 20: note = Ancestral polymorphism is F, Derived polymorphism is S
MFAAEIFMHRFLLSSAVRTFNPEEADWFYTPVYATCDLTPSGIPLPFKSPRMMRSAIELIATNWPYWNRSEGADHFFVTPHDSGACFHYQEEKAIGRGILPLLQRATLVQTFGQKNHVCLKGGSITIPPFAPPQKMQAHLIPVDTPRSIFVYFCGLFYDTGNDPEGGYYARGARASVWENFKNNPLFDISTDHPPTYYEDMQHSVFCLCPLGWAPWSPRLVEAVVFGCIPVIIADDIVLPFAEAIPWEEISVFVAEEDVPKLDNILTSIPTDVILRKQCLLANPLMKHAMLFPQPAQAGDAFHQILNGLARKLPHGESVFLKPGERVLNWTAGPPGDLKPW

SEQ ID NO: 10278 - protein, 298 aa, Zea mays
  VARIANT 29: note = Ancestral polymorphism is H, Derived polymorphism is R
  VARIANT 31: note = Ancestral polymorphism is K, Derived polymorphism is R
MGLRDIELTLPPGFRFYPSDEELVCHYLHGKVANEQLAGAGAAMVEVDLHTHEPWELPDVAKLSTNDWYFFSFRDRKYATGQRANRATRSGYWKATGKDRAIHDPRSAIVVGMRKTLVFYRGRAPNGVKTSWVMHEFRMVEDPHAPPKEDWVLCRVFYKTKADDATADSEQDAVRMPRGGGGSADPSCYSPPPFPAALGGSHHHHHHLPPPPPSSDRRHGAGSPDDDFPGGMALLQHSSGMFDFHGGQPRPHDGVVLAGPAAAAAAPASRDGGDQCGSGALIDLGLDEHYTYNSLLQM

SEQ ID NO: 10279 - protein, 307 aa, Zea mays
  VARIANT 300: note = Ancestral polymorphism is R, Derived polymorphism is S
  VARIANT 221..307: note = Derived polymorphism lacks residues 221 to 307
  VARIANT 219: note = Ancestral polymorphism is R, Derived polymorphism is H
  VARIANT 62..307: note = Derived polymorphism lacks residues 62 to 307
  VARIANT 61..307: note = Derived polymorphism lacks residues 61 to 307
  VARIANT 42..307: note = Derived polymorphism lacks residues 42 to 307
  VARIANT 40..307: note = Derived polymorphism lacks residues 40 to 307
  VARIANT 37..307: note = Derived polymorphism lacks residues 37 to 307
  VARIANT 10..307: note = Derived polymorphism lacks residues 10 to 307
MSKEVARAAWNSTYEKGLVDVLHDYKDNPKLKGQNGWNSEGWKCITAKFNERFSLAHFTKQQLQEKEKELKSSYKAVRDSRKESGTGWNDSLCMILAEPEVWARLISAHPKVARFRKKPFPLFYSLEALYEGSVATGQLNFTSTQQLPPAIIPPLAPPAIVPPAPSFVVPSARSTSEQTLHPFNTNPFDLDGQEMTSEAQSVSAIHEAREGEGSKSRKRKQSHVGAALEDYVEFKKSQTNKALDALKELSMRKCMEEIEAIGGFTEEEKSYAVEVFESGINREAFMSTMNHNVQRMWLKRKIRYVHS

SEQ ID NO: 10280 - protein, 160 aa, Zea mays
  VARIANT 125: note = Ancestral polymorphism is A, Derived polymorphism is T
  VARIANT 123: note = Ancestral polymorphism is R, Derived polymorphism is P
  VARIANT 96: note = Ancestral polymorphism is A, Derived polymorphism is V
  VARIANT 91: note = Ancestral polymorphism is P, Derived polymorphism is S
  VARIANT 88: note = Ancestral polymorphism is S, Derived polymorphism is F
  VARIANT 42: note = Ancestral polymorphism is A, Derived polymorphism is V
  VARIANT 39: note = Ancestral polymorphism is G, Derived polymorphism is S
  VARIANT 37: note = Ancestral polymorphism is P, Derived polymorphism is S
  VARIANT 36: note = Ancestral polymorphism is V, Derived polymorphism is M
MNDCFSSSHISAIFTLLANEKGEGEEEEATGLPSDVPRGHFAVYVGERRRRFVVPIALLDRTEFRSLLRRAEEEFGGGEEEEATGLPSDVPRGHFAVYVGERRRRFVVPIALLDRPEFRSLLRRAEEEFGFAGAAAGGALVLPCEEVAFRSLTSVLACTR

SEQ ID NO: 10281 - protein, 1129 aa, Zea mays
  VARIANT 1046..1129: note = Derived polymorphism lacks residues 1046 to 1129
MPWSRAITVRGWLFALLPPRVFSGAALLSSMMGTECIMATLGGDPEPSIPPGFGPFVALALQGIQNNAKSADAHSSSAQAAHCMEKDVEVLEHGSAHGWSDTPASTSGTHSCRRSLRNRPPIDYSQFDLISDEESDVESAEKGVGLVRRRRQLPKGVLRGCAQCADCQKVVARWNPSGARRPVLEEAPVFYPSEEEFKDTLKYIESIRSTAEPYGICRIVPPPSWKPPCLLKEKNIWECSKFCTRVQKVDKLQNRKSSKKGRRGGMMKKRRKLLELEDNNNINHNQTGVQQNQERFGFEPGPEFTLQTFKKYADDFREQYFKKEVSADSPPSVEDIEGEYWRIVEKPTEEIEVVYGADLETGTFGSGFPKSSPEVKSDVEHKYLESGWNLNNLPRLQGSVLSFEGGDISGVLVPWLYVGMCFSSFCWHVEDHHLYSLNYMHWGAPKMWYGVPGKDAVNLEAAMRKHLPDLFEEQPDLLHNLVTQFSTSLLKSEGVPVYRCVQHEGEFVLTFPRAYHAGFNCGFNCAEAVNVAPIDWLPIGQDAVELYRKQARKITVSHDKLLLGAAREAIRAHWDILFLKKNTADNLRWKSMCGLDSTICKSLKARIDLELAQRQNICSPSQSRKMDAEFDSTDRECALCYYDLHLSASGCPCCPGKYTCLVHAKQLCSCDWDKRFFLFRYDINELNMLADALGGKLSAIHRWGVSHLGLSLRSCVKREKDQDSKTPRRVTDGPRRSYMSQASTVSLAPSLVCNEQNNNGSNMNPSMESSNNSHRLMASNTNATKFYSYKDQMHVTPESQASAASSQPFAGTVLRAQSVSQEASPSVFTSKPLIDSSLLKNTYVGLSSGGAHIGHPNFGNQQPSDECLQRKSESLSGSEAKGHSAALVQPALGNHHNGSGGAHKGLRMANVVHRFKSLVESLEIGVVLSGRLWSSSQAIFPKGFRSRVKYFSIVDPTQMAYYISEILDAGPQGPLFMVTLENCPGELFINVSPAKCWSMVRERLNMEIRRQLSTGRANLPALQPPGSVDGFEMFRLLSPAIVQAIEARDRDRICTEYWRSRPHVVTEDRATAPPQAQGPLHALRGLFQRANRNELLALRSLLVSNISPDDFSRRQATQILDEEIAKQWR

SEQ ID NO: 10282 - protein, 246 aa, Zea mays
  VARIANT 210: note = Ancestral polymorphism is A, Derived polymorphism is T
  VARIANT 209: note = Ancestral polymorphism is S, Derived polymorphism is L
  VARIANT 208: note = Ancestral polymorphism is P, Derived polymorphism is S
  VARIANT 206: note = Ancestral polymorphism is K, Derived polymorphism is M
  VARIANT 205: note = Ancestral polymorphism is R, Derived polymorphism is H
  VARIANT 203: note = Ancestral polymorphism is K, Derived polymorphism is N
  VARIANT 199: note = Ancestral polymorphism is S, Derived polymorphism is I
  VARIANT 198: note = Ancestral polymorphism is I, Derived polymorphism is V
  VARIANT 192..246: note = Derived polymorphism lacks residues 192 to 246
  VARIANT 186: note = Ancestral polymorphism is R, Derived polymorphism is H
  VARIANT 182: note = Ancestral polymorphism is R, Derived polymorphism is W
  VARIANT 180: note = Ancestral polymorphism is A, Derived polymorphism is T
  VARIANT 172: note = Ancestral polymorphism is E, Derived polymorphism is K
  VARIANT 169: note = Ancestral polymorphism is G, Derived polymorphism is D
  VARIANT 158: note = Ancestral polymorphism is G, Derived polymorphism is S
  VARIANT 155: note = Ancestral polymorphism is A, Derived polymorphism is T
  VARIANT 154: note = Ancestral polymorphism is D, Derived polymorphism is N
  VARIANT 148..246: note = Derived polymorphism lacks residues 148 to 246
  VARIANT 111: note = Ancestral polymorphism is L, Derived polymorphism is P
MDHHHHHHHHMIPGQEPPAADSSAPDSFFLGPAGAIIFSGGAGVSGAGSSSGAAALGSSAGAGGGPSPSSSSPSLSRYESQKRRDWNTFGQYLRNHRPPLSLSRCSGAHVLEFLKYMDQFGKTKVHTPVCPFYGHPNPPAPCPCPLRQAWGSLDALIGRLRAAYEENGGTPEMNPFGARAVRLYLREVRESQARARGISYEKKKRKKPSAASAAAPGPSSEGSPPPGPSGGGGGFGTSASPRFIMP

SEQ ID NO: 10283 - protein, 381 aa, Zea mays
  VARIANT 331..381: note = Derived polymorphism lacks residues 331 to 381
  VARIANT 4..381: note = Derived polymorphism lacks residues 4 to 381
MVTSPMLGPIRVSLVCSASPNHHRPRISDISQLQKEGSSRGKGRSYQDKDDSENIDEYDSDIMFSRNGPPISLASTSRPQDTSAPGEREMEIVELFKRVQALLRARVKGREKKPEPAKVHGERGSVDSLIKLLRKHSVDQRRKSSDEKEQNFGVMRRSNDSGNRRGSTIFGTKSDIQEEQKKQPPAPFKRPASNFRRRSPVPGVKFQPVINVDVDTDADRKSMRNNVADAVQMAKTALDERTATDEPDYMSPYEPDSVIEAENISLDDLDDISDDDEESDAGEPDNEYPELSLEIADVTDIDELHESSDLSSLKVAELRELAKSRGIKGYSKTKKNELIEVLSSSMAWWMKTGNYWPALRSRRRAEASCGFVIHAGMGGAA

SEQ ID NO: 10284 - protein, 393 aa, Zea mays
  VARIANT 297..393: note = Derived polymorphism lacks residues 297 to 393
  VARIANT 267..393: note = Derived polymorphism lacks residues 267 to 393
  VARIANT 257..393: note = Derived polymorphism lacks residues 257 to 393
  VARIANT 256..393: note = Derived polymorphism lacks residues 256 to 393
  VARIANT 239..393: note = Derived polymorphism lacks residues 239 to 393
  VARIANT 233..393: note = Derived polymorphism lacks residues 233 to 393
MGLANYCVPAGEAYQKALDIAFEITQKGMEASLLQKTLKKDGISFLSEAVTVVRVRIECRLLTETFMYHRSYCSKVKEQHSANMTHDEDALKNSWVYHVEMMVTEFCAICIKRNLVDKMMDLPWDSEEEKHLHKSLFDSAQEMPMKPNGRQKLFSNEEKILLNKRVSDLETATSDGLPAIHKAILSKKAAIINYLLRNSANPFIQDKDLLARNAMLAEELLRTGGGMTTDTSQKPSSGRERVQIEALRQELEGAKRQIGALKSEKSQIEAEANNQRNLSVKLESDLKSLSEAYNSIEQANYRLDAEVKALRQGGSVPYPDVEAIKAQAKEEAEKDSEAELNDLLVCLGQEQTKVEKLSTRLTELGEDVDTLLQGIGDDTAIPDDDDEDEDDEE

SEQ ID NO: 10285 - protein, 155 aa, Zea mays
  VARIANT 36: note = Ancestral polymorphism is L, Derived polymorphism is S
  VARIANT 47: note = Ancestral polymorphism is W, Derived polymorphism is S
  VARIANT 57: note = Ancestral polymorphism is K, Derived polymorphism is N
  VARIANT 64: note = Ancestral polymorphism is P, Derived polymorphism is H
  VARIANT 72: note = Ancestral polymorphism is G, Derived polymorphism is C
MPVPPSQSDLPRKQLNSMNVEFGFVQRKPGRGDTTSSMSCFDKITRWSVVGIQVVTKCPSGINPLSVHSSTCALLSHILEPLYLSTITIGQLPDGTPERFSIKNNIKKALDARLSSLPTELPPPFKMQKPKVFEAPVPPTEFQQIPGDVRLLTCG

SEQ ID NO: 10286 - protein, 191 aa, Zea mays
  VARIANT 21..191: note = Derived polymorphism lacks residues 21 to 191
  VARIANT 51: note = Ancestral polymorphism is P, Derived polymorphism is S
  VARIANT 55..191: note = Derived polymorphism lacks residues 55 to 191
  VARIANT 58: note = Ancestral polymorphism is A, Derived polymorphism is T
  VARIANT 75: note = Ancestral polymorphism is E, Derived polymorphism is K
  VARIANT 77: note = Ancestral polymorphism is D, Derived polymorphism is Y
  VARIANT 83: note = Ancestral polymorphism is A, Derived polymorphism is T
  VARIANT 92..191: note = Derived polymorphism lacks residues 92 to 191
  VARIANT 103: note = Ancestral polymorphism is A, Derived polymorphism is V
MQYLERRECEYDQKISIDFYKEGDPLKPAVMGVLVFVSTPDPIGNKYYLGPAPLQNMARDYLFSMEKALASISHEDDSIIELANKVRKVLNRTKETKITGANASLKSHAHYVFFIMIWARELFYYLKGKQVDYGEEHSKACGHNRFGRIYHTGHYPVCYEHNPVHFCGALCWRAGCEGAASDACRQEGWFM

SEQ ID NO: 10287 - protein, 524 aa, Zea mays
  VARIANT 383..524: note = Derived polymorphism lacks residues 383 to 524
  VARIANT 133..524: note = Derived polymorphism lacks residues 133 to 524
  VARIANT 120: note = Ancestral polymorphism is N, Derived polymorphism is I
  VARIANT 83: note = Ancestral polymorphism is L, Derived polymorphism is P
  VARIANT 73: note = Ancestral polymorphism is R, Derived polymorphism is W
METPRLVVGAASRAPPPAPRSQRRRILRPCGGAHCSPSARAAPPVLLTRCSSYSSSREGNGDSHDILYINKQRLIAMEEMKKLHDENNLLLEEIQGLETEMQGAVSVANIFRLRNYMDDNVKFLNLQQSYADCIPLEAAQSSSFSELLLRIDTMVISGMISMTEASDLREKLVTNRSIIQSTFCDIHHKPNTELLSELQLFLRKPIDTSSGVGLVIIEPSQLSYFSRDMLRGYPDDFERFSYFSRASLDYIVKSGKRPDIIHIHNWETAIVAPLFWEIFAHQGLGNTRILLTCQDLNSECLEEPNKLEMCGLDPRKLHRPDRLQDTNKTHLVNILKGGIVYSNKVVLMSSTHSKDALIQGSRHELQSTLAAHREKILVASYGLDGELWDPFKDIYLPRRYSANDIEGKSICRQALRRRLRFNGDSSIIVGCICDDNSDVHSLKEAVHVALHRNTQVCGSVVNSILQALKGEIKGDKIAFVEAYDEALAHLIYAGSDIILCSSFQDPSLQIAVCETSLLFSCFFQ

SEQ ID NO: 10288 - protein, 355 aa, Zea mays
  VARIANT 267: note = Ancestral polymorphism is G, Derived polymorphism is V
MLNLAPFETPPLGRQERPTNTIVTATAAIARGNEESSSNTCLQHGHLDLSLGISLSHGGGGGGGSCDASSCGGNKQDSYGGGQGSRDDKDNNVRRMTSCIGGTATANVITAGHSSLAGDLTAAPGGGGGGGWAAAFMPSPTGFMHPWSLAARQQKAAAEQDRTPPATYLSSSDDRVVTSPSAVGWPPVHTSRRNIVSAMHVITNKQTAGASSAVAGNGGTPPGSTTTATHTGGGETNGAAAAALAARPALAASSMFAKVHMEGYAIGRKVNLRAQDGYDSLSRTLTNMATNFFCPADCSGAAEKDAPKSDKFIFLYEDFEGDRMLVGDVPWELFLASAKGLYIVRKPSIRRQRSG

SEQ ID NO: 10289 - protein, 405 aa, Zea mays
  VARIANT 30..405: note = Derived polymorphism lacks residues 30 to 405
MMREQSLLEATCGDLFDHIDDLLDFPKEDSAADVLLLDAPAPGSPLSSARIIDVGRAGSAPAPPALAPSLPAQQDTTAFFAAAGPDVFDPRDVGAHLGSCDDIDMDMDMAQLEWLSGLFDDASIPHEPAFPGAAPIIKSSALAAGALLPPDKMEDALLFRSSSPISVLEHGSFNNANGGGGGCSASSESSSASSSSESFSGSGSGSGEGHAWSAPVSPPPVLVIPARARSKRSRPSAFTRAGAEAPTILVPTPMYSSGPSHSDPESIAESSPHPAPPMKKKKKAKKPPAPPAPASSDDNDGDADYEEGGERAEPQGGAVRRCTHCQIEKTPQWRAGPLGPKTLCNACGVRYKSGRLFPEYRPAASPTFVPSIHSNSHKKVVEMRQKAVRSGDPSCDLLQFIRRRD

SEQ ID NO: 10290 - protein, 306 aa, Zea mays
  VARIANT 281: note = Ancestral polymorphism is F, Derived polymorphism is S
  VARIANT 237: note = Ancestral polymorphism is R, Derived polymorphism is H
  VARIANT 236: note = Ancestral polymorphism is R, Derived polymorphism is W
  VARIANT 235: note = Ancestral polymorphism is A, Derived polymorphism is V
  VARIANT 220: note = Ancestral polymorphism is F, Derived polymorphism is L
  VARIANT 219: note = Ancestral polymorphism is G, Derived polymorphism is S
  VARIANT 55: note = Ancestral polymorphism is P, Derived polymorphism is S
  VARIANT 39: note = Ancestral polymorphism is A, Derived polymorphism is V
  VARIANT 11: note = Ancestral polymorphism is G, Derived polymorphism is S
MRAVVITRGGGGPEVLEAQEVEDPAPLGDGEVLLQVVAAGVNRADTLQRHGRHPPPAGAPPYPGLECSGTILALGPNAPPRWAVGDKVCALLSGGGYAEKVVVPAGQLLPVPEGVSLADAAGLPEIHGGSSGIGTFAIQIAKHLGIMVFVTAGTEEKLAACKGLGADVCINYKTEDFVERVKQETNGKGVDVILDNIGGPYLERNLNSLGVDGRLFIIGFQGGAVAEVNLQAVFAWRLTIQAAGLRGRSAASKTQIVSEVEKNVWPAVAAGKVNPVIYKTFPLSEAADAHRLIESSMHIGKILLLP

SEQ ID NO: 10291 - protein, 447 aa, Zea mays
  VARIANT 243: note = Ancestral polymorphism is G, Derived polymorphism is R
MGSLRVVGWAWTAAAAPEWGVHRRCCRGTPLARPRAATSSLGAGQLRVGTEHGWLWDCRGGGGAGDYAREMEVAVRVVQVACTLCQRVQDSLLRPGPDAAGGDGRVHAKLDRSPVTVADWGVQAIVSWLLSSSFHDEDISIIAEEDDETLSSSDGVTLLESVVEAVNGCLVEAPNYGLRSPEKELRAHDVIQAIRKCSSTGGPKGRFWVLDPVDGTLGFVRGDQYAIALALIEDGEVILGVLGCPNYPMKKEWLNYHQKYYRLMSKVAPPPLGSWHKGCVMYAQKGCGQAWMQPLVHDFGKLNWHHPREIQVSSISDPISATFCEPVEKANSSHSFTAGLAQSVGLRNQPLRVYSMVKYAAIARGDAEIFMKFARAGYKEKIWDHAAGVVIIQEAGGVVTDAGGRPLDFSRGVYLEGLRREWPHVGHSMVNWKTDLSIHCGAVVTMG

SEQ ID NO: 10292 - protein, 95 aa, Zea mays
  VARIANT 16: note = Ancestral polymorphism is G, Derived polymorphism is V
  VARIANT 36: note = Ancestral polymorphism is A, Derived polymorphism is V
  VARIANT 43: note = Ancestral polymorphism is S, Derived polymorphism is N
  VARIANT 61: note = Ancestral polymorphism is E, Derived polymorphism is K
  VARIANT 88: note = Ancestral polymorphism is S, Derived polymorphism is P
  VARIANT 90..95: note = Derived polymorphism lacks residues 90 to 95
MTDIADKNNKWASYVGPGGWNDPDMLEVGNGGMTLAEYRSHFSIWALMKIKAKTISEIHSEAEKNLGLCPGAASVIRNGRSSPGGPLSPGGGFPM

SEQ ID NO: 10293 - protein, 111 aa, Zea mays
  VARIANT 24: note = Ancestral polymorphism is L, Derived polymorphism is F
  VARIANT 45: note = Ancestral polymorphism is G, Derived polymorphism is D
MKTVYPIYRIPTGPTLKDLDACFLTFHCLATPCKDCDPPTLACPDFGGINHGTTAAGKLSLPIFGLAPYKLRASIWTSDKTQERDRVTSLMQEADSWLRTIQVQRGDDLWL

SEQ ID NO: 10294 - protein, 141 aa, Zea mays
  VARIANT 63: note = Ancestral polymorphism is G, Derived polymorphism is R
  VARIANT 53: note = Ancestral polymorphism is T, Derived polymorphism is M
  VARIANT 50: note = Ancestral polymorphism is A, Derived polymorphism is V
  VARIANT 49: note = Ancestral polymorphism is V, Derived polymorphism is A
  VARIANT 39: note = Ancestral polymorphism is R, Derived polymorphism is C
  VARIANT 32: note = Ancestral polymorphism is R, Derived polymorphism is G
MAGASAVAVLPVATPAAPRRGGAGPCSCLAPGGSSFYRRMNCRRDSPSAAAPTRRRVVARLSGRDPGEAGTDAGVGQILKGDDSGYLWTLVLGSLGGAAVIKYGSILLPDITRPNIVVALLMVSLPVVAAVLALLKASSVD

SEQ ID NO: 10295 - protein, 84 aa, Zea mays
  VARIANT 10: note = Ancestral polymorphism is S, Derived polymorphism is P
  VARIANT 12: note = Ancestral polymorphism is S, Derived polymorphism is P
MGNDLLVLLSISSCVQVQPANSCRKVHGSLARAGKVRGQTPKVAKQDKKKKPRGRAYKRMQYNRRFVTAVVGFGKKRGPNSSEK

SEQ ID NO: 10296 - protein, 1195 aa, Zea mays
  VARIANT 989: note = Ancestral polymorphism is P, Derived polymorphism is L
MALRRITPRRRPVLPVPRAFSSSPPFPPPPPPANDPDPDAAQPPSSSPPPNSGAPRNPESSFFQDIKDRLRSSPTSPSPRRIPTTLPRPDPARGAPSSGPPIGDIRRMLQNFRLTGSTSDAPSTSAPGSNPSFMDLLKNHLDQGANARQAELGFNAIGESLKRPRPPKPFITPSSRNIFCRELERTSKALGARQEENGSAIELKGSYSYEELGKRLGELRPAGAGKDGKEWFSLKELQGRIAKLAEQESQLAGPFSEMRRGIRNLQKQGKPGRPVNIQALLNPVGQPTPDYMSGPPQVELLEKYFHPDHMSSEEKMKLELQRVRDEFKMSENDCGSARVQIAQLTLKIKHLSTVLHKKDKHSRKGLQEMVQRRKKYLKYLRRTDWDSYCLVLSKLGLRDVPEYKAPDYKSKATTKAKSKKSKSKGKKRKAATRPAVLGQRLVGCALVPRPPSHHATSKNIPPIPNPSAAAAAAAAVAKEQERDTAYPLVAAPDLAAARLSSMEARSSSSAAAVPPPLSIPSSSDQCVWADASPLLAAACRDLEDGELVHGENFSLFAAMSALEIMDPKMDSGIERSRYNSIDEAIEDGVAPIPLSLDRTLDVQRSIDVMDHLFSCEATWHKGHTLAQTVFTCIYLMRMERTSSHAVLNSFCRILRATCNAVISAVSTARTHEEEDLFTMSFGLPLRDEGDDKCLSILNSVEEIISRQLRACKAQALSKKKTLEGLESLQDNPDLEEDYCRALLCRLRFRKHFYHVIMCMRKPHGRGLELARKHVASCLTELNLMHKSRKFLKSQSSTMVQQSDGNCTTASGCQPVGFDVSLNSRLLSPTPPRAVKVLSWSNAIRYFERLLHDLDVICALSLNPVLDNVLHFIVQFQKTVPDLVPRAFLQTLLVQDGKLYGEYFFSDVISRALSLPDIIGDKEFQMNEFVVQLGQLVINLIKILCTNTAWQRRKLGKSLQDWSTISIQEHAYWVAFRFLTLGFELDLYSPGEYSMVYWYMYVVLTKLIEKMQLRVLASSETSRRKGKKKKDHLKDSARDMAFSSSCLLPQCYLLLSEGLSMMLAVLRNESRSFQLPSIFNTEQERFMQHFDLLLKARVPEHISFYSFKESSSRAGMSDLVKYNFFKEIQKIVPSLRGSFASEPEKLAEVRRIEQVAEHNRIALNIISQVGAGDPSLRVSFEFTHHPHFAVAVVKRS

SEQ ID NO: 10297 - protein, 227 aa, Zea mays
  VARIANT 171: note = Ancestral polymorphism is V, Derived polymorphism is I
MRPWRGVVCDCRPVPSRPFPFFPSTPAKFTAALFGGNYCWIVGRRKEGRGAMGNASSMLTQYDIEEVQEHCSYLSVSQQEIVSLYERFCQLDRSAKGFISEDEFLSIPEFSLNPLSKRLLRMVDGLNFKDFVAFLSTFSAKASLRQKIEFIFKVYDIDGKGKITFKDLLEVLRDLTGSFMSEEQREQVVTEVLEEAGYTRDYAFSLEDFIQIIDHPGLKMEVEVPID

SEQ ID NO: 10298 - protein, 266 aa, Zea mays
  VARIANT 151: note = Ancestral polymorphism is T, Derived polymorphism is I
  VARIANT 31: note = Ancestral polymorphism is P, Derived polymorphism is L
MYDTGDARQPSCAPFAKNASAMFGFSQGCLPLRRWDELNAFFQRTGGAMELNYHERGFFHWLHREQRIRCTWMGARVRAGNELSGSGVGARVDADQYAADVIALKRIIDSTYHQSSSPAKPLVLAPGGFFDAAWFTELVGKTKPEQMDVITHHIYNLGPGVDDHLVQKILDPSYLDGEASTFSDLEGILRSAGSTHLVSLDAQQPNTRLVTDAFVFSFWYLDQLGMSSKYGTKSYCRQTLVGGNYGLLNTTTFEPNPDYYKWTSHA

SEQ ID NO: 10299 - protein, 461 aa, Zea mays
  VARIANT 212: note = Ancestral polymorphism is D, Derived polymorphism is G
MSPLHPPRDAIPKPSAIPPPSRRIPSSPPPLSALAHADLALSARPRRVKTAIGVYLEDAAVPALARKWAGKTAGELAFDAAFFHDVVTDLLICYLCVVVGESALILIRHGESLWNEKNLFTGCVDVPLTPKGVEEAIEAGKRICNIPIDVIYTSSLIHAQMTAMLAMMQHRHKKVCVFPFKFQYGELQGLNKQETVDRFGKEQVHEWRRSYDIPPPNGESLEKCAKRAVAYFKDQVHLARPLYTNWKIHFLLGLLLMEYCELLDKADECEDPYMHMVYACEFSPSLALHSVRCHIMLDLTELLINLFQLHGLFRYTSHISAHGSLLIRSLERLMRWLTTRALHFLPSRSVSHHPPMGVAHCENEHFTYDITPKVKTKFLGNSLKIYPVGRTRVTLKKSGVVLDLVPPLTKVNNLIFGRTWVDSPGEMVMTNLTTGDKVVLYFQPCGWFGYDIWPSIYSCIC

SEQ ID NO: 10300 - protein, 138 aa, Zea mays
  VARIANT 54: note = Ancestral polymorphism is D, Derived polymorphism is N
  VARIANT 10: note = Ancestral polymorphism is W, Derived polymorphism is R
MDTGKLDVARSPVRRSGSRARARPLAPARACFQSTGVRPRPHWITTEYGGYRIDKVLKRFRSNIIFSNGMRDPWSRGGVLKNISSSIVALVMEKGAHHLDLRFATDEDPDWVTEQRRQEVEIIEGWIDQYHRDMAQVS

SEQ ID NO: 10301 - protein, 151 aa, Zea mays
  VARIANT 47: note = Ancestral polymorphism is R, Derived polymorphism is W
MQMRRTATASLPLATAAVFLLVFLAATTVEVEAIRLLDAESRAAANRQQAIVPSASVLVTTQQQQQQHGRRQGETGLTRTVDAPASREERSSSSSPAPAAAAAGENSEAGRSVVAVAVAGQQDQAVEAAAHRLPEFHEDYYGASVHEPRHH

SEQ ID NO: 10302 - protein, 272 aa, Zea mays
  VARIANT 33..272: note = Derived polymorphism lacks residues 33 to 272
MCVEGLDDAAGTLAFGDHENDRRDGAAMERVCENNFVPFIRSGEWSDIGGRDYMEDAHVCISDLAKNFGSNSVDDEVISFYGVFDGHNGKDAAHYVRDNLPRVIVEDADFPLELEKVVKRSFVQTDSKFAEKFSHHKGLCSGTTALTAMIFGRSLLVANAGDCRAVLSRRGTAIEMSKDHRPCCMNERKRVESLGGYVDDGYLNGQLAVTRALGDWHLEVMKGTGRAGGGGAGGGPLSAEPELKMVTLSKDDEFLIIGSDGVWDSFSSQNAV

SEQ ID NO: 10303 - protein, 175 aa, Zea mays
  VARIANT 13: note = Ancestral polymorphism is E, Derived polymorphism is K
MKSTNTSIAPEVEVHPGFSPSRFVKVFMQGEVVGRKINLATHQNYASLSFALKRLGNNYSMPSCELNGLVNNEVDGASDDNNFILFYDTMDGDRLFVGEVPWEIFVISVKRIYIVRVPQEQENDNGEEEDRENGEDNAAVSATALDGDDIPANDDDDDVVDDGDATATTPADGGF

SEQ ID NO: 10304 - protein, 446 aa, Zea mays
  VARIANT 298: note = Ancestral polymorphism is S, Derived polymorphism is C
MPSPSSYHPHHRARLRSRAAPLLIVVVLAVVAVTELLRSRTGLPAPARRAGSATATASPSSLASTNQSVAQRKILLDPAFTPRLPRQSQLSLSLSARNALPPRNRDRFPTLPVGHLKVVLYVHNRPRYLRLVVDSLSRVEGIGEALLIVSHDGYFPEMDRIVQGIGFCQVKQVFAPYSPHLFPDAFPGASPGDCQSKDRAKEKGCQGDPDQYGNHRAPRIVSLKHHWWWMMNTVWDGMEETRDFDGHILFIEEDHYIFPNAYRNAQLLVDLKPKKCPQCYAINLAPSDVKSRGEGWESLVAEKMGNIGYAFNRTVWRKIHAKAKQFCAFDEYNWDITMWATVYPSFGAPVYSLRGSRRSAAHFGKCGLHQGQGSSNVCVDNGSGAVELEDADKVPNIKADWPVRVIQRQEGYQAGFKGWGGWGDRRDRELCLSFAYMYHVKDPSSS

SEQ ID NO: 10305 - protein, 732 aa, Zea mays
  VARIANT 316..732: note = Derived polymorphism lacks residues 316 to 732
MSGWDEGAVFYSDQAQFPRGGPGGDPAADLTRHSALRKFKEFLRGFTGPTGDFPYRESLVHNRDHVTVATEDLDAFDAELSDKIRKSPADYLPLFETAASEVLASLRSKVAGETGEMEEPVPGDVQIFLSSKENCLSMRSVGADYMSKLVKIAGITIAASRVKAKATHVTLICKNCRSVRTVPCRPGLGGAIVPRSCDHVPQPGEEPCPLDPWIAVPDKSKYVDLQTLKLQENPEDVPTGELPRNMLLSVDRHLVQTIVPGTRLTVVGIYSVYQASTTQKGAVGVKQPYIRVVGLEQSRDNNSNGPSNFTLDEEMEFKEFAQRPDAYAKLCSMIGPSIYGHSDVKKAIACLLFGGSKKRLPDGVRLRGDIHVLLLGDPSTAKSQASIFLKFVEKTAPIAVYTSGKGSSAAGLTASVTRDSSSREFYLEGGAMVLADGGVVCIDEFDKMRPEDRVAIHEAMEQQTISIAKAGITTVLNSRTSVLAAANPIAGRYDDLKTAQDNIDLQTTILSRFDQIFIVKDIRMYDQDKRIASHIIKVHASGAAASSANTEGSEGENWLKRYIQYCRATCKPRLSEKAAEMLQNKYIEIRQKMRQQAHETGRAAAIPITVRQLEAIIRLSESLAKMRLTSVATPEHVEEAFRLFNVSTVDAARSGINEHLNLSPEIANEIKQAEAQIKRRMGIGSHISERRLIDGLNRMGMNESIVRRALLIMHQRDEVEYKRERHVIVRKA

SEQ ID NO: 10306 - protein, 736 aa, Zea mays
  VARIANT 375..736: note = Derived polymorphism lacks residues 375 to 736
  VARIANT 273..736: note = Derived polymorphism lacks residues 273 to 736
MDLKTMPQWMRLLVPLVTVPFHMVVLLLAAAVVANSMPPPSSAPRSGCPSTCGEVNITYPFGIGDDCAWPGGSDNFTVTCDHSYSPPRPYLSVYDNHHLYEIINISVETGEVRIFSGFASICFASSNTTDEMRGWYLNYSGSPFLVSPTGNQFTAIGGNTLAFMEGREDLTYYTGCVTSSITLDAAAGDGDDCTGLGCCQTRVAGNLSYVHIYWKNNLVQTPINNAWSYSPCGYAFLAEKGWYRFSRRDLLRNGTDTFASRVGKRSIPVVLDWAIRNGSCQSASSACASSNSYCVNATQGPGYLCKCSQGYAGNPYATGPDDGCTNIDECARPTDFPCNGECKDTQGSYECSCRAGYESDGDPKEKPCRPKLSTSAKLIIGITVGASVLFFIILGTGVCYMLKRIELEAIERKNGSEKLKNVRTLQIFRKEELDKITMNNSVPLGKGGFGEVHKGVLPDKTEVAVKASIEVTKGTLDKFVEEVEIQSGMMHKNILKLLGCCLRVDVPLLVYEYAAKGSLKDLLHGKNDDGQPREPLTLRSRLDIAIGCAQGLAYMHSYTENGIQHADVKPDNILLDGGLVPKISDFGLSKVSVVGKDYTKNVVGCLPYMDPVYKETGRLTPKSDVYSFGIVLLELISRRPAVDGSESSIVRQFKSVYEQADDNNTGKELFDKDIAAEEDIPMLDEIAKLAMRCLKDNVNERPAMVSVASALVILKDSWEETGQGFSSPPPPPPPIK

SEQ ID NO: 10307 - protein, 97 aa, Zea mays
  VARIANT 55: note = Ancestral polymorphism is I, Derived polymorphism is T
  VARIANT 33: note = Ancestral polymorphism is S, Derived polymorphism is L
  VARIANT 22: note = Ancestral polymorphism is P, Derived polymorphism is Q
  VARIANT 9: note = Ancestral polymorphism is T, Derived polymorphism is A
  VARIANT 8: note = Ancestral polymorphism is P, Derived polymorphism is Q
  VARIANT 3: note = Ancestral polymorphism is P, Derived polymorphism is Q
  VARIANT 2: note = Ancestral polymorphism is S, Derived polymorphism is R
MRQACPTQTPRLSLPLYNPHYPPFHAFRLLGFSRRRRRRFVVSAAAMPSHKTFRIKKKLAKKMRQNRPIPYWIRMRTDNTIRYNAKRRHWRRTKLGF

SEQ ID NO: 10308 - protein, 154 aa, Zea mays
  VARIANT 99: note = Ancestral polymorphism is P, Derived polymorphism is L
  VARIANT 115: note = Ancestral polymorphism is E, Derived polymorphism is K
  VARIANT 117: note = Ancestral polymorphism is M, Derived polymorphism is I
MPPRRKRRAPPAKSQRQTEPDPQPQVPPGADAPLEERLIWGSQQESERRITAIKAIKDAEAGNIHYQLQLARSYYSEEQLEGNAMQYFQENLHNLSVVPNEEYDVLELKWNNGGEWMIGDFADDRTLRASIASFTAADGLQFPRDSGLMKSSSY

SEQ ID NO: 10309 - protein, 97 aa, Zea mays
  VARIANT 92: note = Ancestral polymorphism is K, Derived polymorphism is N
  VARIANT 82: note = Ancestral polymorphism is D, Derived polymorphism is G
  VARIANT 74: note = Ancestral polymorphism is P, Derived polymorphism is L
  VARIANT 46: note = Ancestral polymorphism is T, Derived polymorphism is I
  VARIANT 43: note = Ancestral polymorphism is R, Derived polymorphism is K
  VARIANT 36: note = Ancestral polymorphism is T, Derived polymorphism is I
  VARIANT 33: note = Ancestral polymorphism is E, Derived polymorphism is K
  VARIANT 29: note = Ancestral polymorphism is V, Derived polymorphism is A
  VARIANT 27: note = Ancestral polymorphism is T, Derived polymorphism is I
  VARIANT 23: note = Ancestral polymorphism is P, Derived polymorphism is H
MCKFYRDWHANSDGFHGIFLHDPVSFTVALHPEYFTFKKGVVRVEIQGICTGNTLMDQGLKKWNSENPWSGYKPISVAWTVDVPKVISFIKKLLMAP

SEQ ID NO: 10310 - protein, 525 aa, Zea mays
  VARIANT 109: note = Ancestral polymorphism is F, Derived polymorphism is C
  VARIANT 249..525: note = Derived polymorphism lacks residues 249 to 525
MAAAARSRLAGLRLDLASRTAPNPKPLLSSAFSSSTISAPPAAGRVREDESGLLSRRLLRLRFRSPAGTAAAAVERWAQDRVHVSQPELRRAIGMLRRERRYEQALEIFSWMESCSSLRLSSWDHAARLDLIAKAYSTSQAEEYYNKLQSPATRQAASFPLLHCYVMERDVQKAETFMAQLQSHGLPVDPHSFNEIMKLYVATCQYEKVLSVIDLMKRNNIHRNVLSYNLWMNACAEVSGVDSVQSVFQVMLNDETVKVGWSTYCTLANIFRKNGLNNEAQACLVKAEAKLSPAGRLGYSFVMTCYAALNDSDGVMRMWEASKSVPGRIPTAYYMAAMSCSIKVGDISQAECIFGKWEAGCRKHDVRVSNVLLGAYVRNRWIEKAERLHLHMLEKGACPNYKTWEILMEGYVQSRQMDKAVGCMKKGLSLLKSCHWRPPVELMEAIGKHFEEQGSADDAYRYIKVLQRFNLTSLPLYKSLIRAYINADVVPPNVLEMIAKDQIDMDEEMDRLIIIAGKIDITCNG

SEQ ID NO: 10311 - protein, 478 aa, Zea mays
  VARIANT 177..478: note = Derived polymorphism lacks residues 177 to 478
  VARIANT 423: note = Ancestral polymorphism is F, Derived polymorphism is C
  VARIANT 424: note = Ancestral polymorphism is F, Derived polymorphism is S
  VARIANT 427: note = Ancestral polymorphism is P, Derived polymorphism is L
  VARIANT 428: note = Ancestral polymorphism is A, Derived polymorphism is V
  VARIANT 433: note = Ancestral polymorphism is S, Derived polymorphism is F
MAVIAYRRAVLLHGHQRSRTARALDPSVVAVASHGRGRRRTWPSSPTGVRCSCTGTISGRNGGRPHPAPTPSRSGAVPSSEKAKIQPPSSTTTASRALKPITYTCSYHALYSAFRFSTSWTSPASTVSSATSSTANSGARQGTHIFYIVVVFNMMVAASRILFRIFFWKCSSEAIPWFKHSTASWWNDASVRLYAVLLRETRYRQRYLDLMVNHEVRHIFKTRSKVVSFIRKFLDDREFLEVETPMMNMIAGGAAARPFITHHNELNMRLFMRIAPELYLKELVVGGLDRVYEIGKQFRNEGIDLTHNPEFTTCEFYMAYADYNDLMELTETMLSGMVKELTGGYKIKYHANGVTNSPIEIDFTPPFRRIDMIKDLEAMANLNIPKDLASDEAKRYLIEACAKYDVKCPPPQTTSLRPDFLRFFLQPAVRELSFLNYSEHFATEARTVMAFTIASSIVGQTVGSRAECCSKESSNKGY

SEQ ID NO: 10312 - protein, 774 aa, Zea mays
  VARIANT 504..774: note = Derived polymorphism lacks residues 504 to 774
MFDVWSVVGWWDRWQLRVLVLGSLGIQWFLLVAAPMRKYTIRPGLRLCIWLAYISSDALAIYALATLFNRHARATSSSSCDGGANSKARILEVLWAPVLLIHLGGQEELTAYTIEDNELWTRHTVTLVSQVAVALYAFYKSWPNPSDWKLLASAILLFIIGVVSFSEKPWALKKASINRLASVSATIQGTKKRTRLAVYLDDLLFSDWYSCSRATEKSSSSGSSLPAAAAAAGVGWHDCFSFTEPSNKGHGDHVGLSEADKVYMVLSDMSLSAAADDLVLRGRARNVEDVLRPLSTKAEQALKRWLRGAFGLIYTRANLVFTRTYLVYHVLVVPILHVAALTLFATSDKHGYDRTDVKITYVLLCLTAALDVLAVFVRQLLYGAMSAKGVPALCETVPGYNLVDAVTRRRQKDIGWLFRCAAAMGCKEEYLEYCKCGGGQQHYTLYKNVSKMVLADLVDAQGRDLANYRVFTVPYASPASTAAGPAVEQQRASPAGAANWALSEEQQKLCGRKVRDTLRGSFDRSVLVWHIATDLCFRMEQVPPDADKEEDSHWLRIKCTEAISCYMARLLDSHPDMLLTGSRRHLVSEALDELESIFDRTMVDRSGKPPGKDDLHKIIDDVARVRFQVPVGVAHGAADDDGEEAVQSFFHIPEACGLAMELLQLEASTRWRVMYRVWLGMLFYSASMCRGYLHAKSLGEGGEFLSYVWLVLSLKGAKTLADKLQMLEVEGDDRQGRRQGRKWVEMRNEELQIRGDDREPAPRSMPTTSSLFQT

SEQ ID NO: 10313 - protein, 210 aa, Zea mays
  VARIANT 20..210: note = Derived polymorphism lacks residues 20 to 210
MNPRCGGQSGVSSFFPPCFCSISLIAAAAAGFSRRAVVGEVVGVEPLRPNPKQPTGPRHHGPFHALSLPQRCHQFAAPPNGSSPSQSQPFFCRSVPRACRFSPVHLADSSDLSYSPEVREVFDDIAPMVGLSVGSAVGQSSIADEVSSLVPKPKQEFYPTIDEEYVQMEPQTKIDILVATPERLMDHINMTNGFSLEHLQYLVGLWNFVT

SEQ ID NO: 10314 - protein, 490 aa, Zea mays
  VARIANT 2: note = Ancestral polymorphism is E, Derived polymorphism is D
MEQKQGGKNDDTPLCPPHLGFIGGLCFLCGAKEEDAEGGTPRVAVGQGVEGSDSSDDDARCVEAKTEGCAPGVSVGHRMKVEEGDDDALFPLDPEFALAELYYQCGLPGKMMEEEDAEGSASGVTVANIDGGLVRPALAAAMSIASASDMATLMRERKLILVLDLDSTLVNSARLCDFSAQEKRNGFTRYTGDKPHMDLFRLKYSNKARKLTKLRPFVRGFLEQASSMFEMHVYTLAKRAYAKAVIDLLDPNGVYFGGRVVSRKDSTRRDMKSLDVIPGADPVAVVILDDTDVWPAHQDNLILMDRYHYFASTCRKFRYDIPSLAEQGRDEREQDNSLAVVLNVLRRIHQDFFDGDQADVREVIREVRRQVLPECTIAFSYLDDCMEDFPENTLMWTLAERLGAVCRKDVDETVTHVVAEDPGTQKAQWARDHGKFLVNPEWIKASGFRWCRVDEQGFPVTAGPCELNIVSLQLAVRNGIVSLRAADCPC

SEQ ID NO: 10315 - protein, 334 aa, Zea mays
  VARIANT 251: note = Ancestral polymorphism is A, Derived polymorphism is T
  VARIANT 161: note = Ancestral polymorphism is Q, Derived polymorphism is H
MQPSGREMQGGGGGGGQDDFLDQMLSTLPPAWPDLGYGKSSPWELPAGPDAAAAAAAAFDETALLASRLRHHQIGGVDEKPLMLHLSDLHGVAAGGGDDAGFMPLPLFTDRAAFKSPNAAGADQALYNGFGAAGMHAAAVHQPPFGQLRRERIAERMKALQELVPNANKTDKASMLDEIIDYVKFLQLQVKVLSMSRLGGAAAVGPLVASMASEGDDRAGNGTSDDGGDGATNGDNGGGGSSLRVTEQQVARLMEEDMGTAMQYLQGKGLCLMPISLASAISSSTSSSPPPSLLPRPSVGSVEGARGPLHDDSGGAGGDDGSRTIKYAGAGGKQ

SEQ ID NO: 10316 - protein, 131 aa, Zea mays
  VARIANT 75: note = Ancestral polymorphism is A, Derived polymorphism is V
MVLEPSSPPAPPLSSCKGPLAPSTEPTEGRGRRDGGGDDDVEEEMAEAKEIGIRHSPLPCRYCMAVPMSSSISLATCCSVTRRLLPPPPLSPLVAPSPPSSLVPFPALSSPCNKALSLIPLAYTQQQENKN

SEQ ID NO: 10317 - protein, 271 aa, Zea mays
  VARIANT 187..271: note = Derived polymorphism lacks residues 187 to 271
  VARIANT 147..271: note = Derived polymorphism lacks residues 147 to 271
  VARIANT 66: note = Ancestral polymorphism is R, Derived polymorphism is H
MSPTKSSCLADAGAEPFRVFVGYDSREDVAYRVCRRSLLRRSSIPLEITPIVQQELREAGLYWRERGPTESTEFSFTRFLTPYLAGYRGWALFVDCDFLFVADVAGLVALARADPRRAVLCVHHDYTPTEATKMDGAVQTAYPRKNWSSMVLFNCGHPKNRAALTPEAVSTRSGAYLHRFMWLDDDEIGEVPFVWNFLVGHNRVDPADEAGTAPRAIHYTSGGPWFDRYKDCEFADLWVQERDAYEVDKDVDDGSMPIREAPAMVSVDALD

SEQ ID NO: 10318 - protein, 482 aa, Zea mays
  VARIANT 161: note = Ancestral polymorphism is A, Derived polymorphism is V
  VARIANT 263: note = Ancestral polymorphism is V, Derived polymorphism is E
MAPTLVYPVTAMEKFDVTPSPAPAAGQPRALPLTFYDLVFWAIPPVQRLFFYDRADLLDVSDFTLGELPRFRDSLAAALHHFYPLAGKLTCELVHEEGAAPPEVVFSDGDSVPLTVAVSGDDFRDLAGDHARDTARLRALLPALPQHGGSSRSHSQQGVLAVQITVFPRAGVCIGTTVHHAVADGSSYAHFLRTWATAHRLGPERSGAVAVDVPPPLFDRGVVRDDARLREAFLRDHLALGTAGRGGGERLCDWDLSRRPGVVFATFRFTEKRLRALGRRAEAETSARCSPYALACGAAWAGIVRARGIGTGTGTDGAPAPDALFGFVTGCKPRASPPVPANYFGNCLGLCRVAHHAKRGELTAVAASAAIWRAIEGLAEAGSVFRGARGWVRWVREYASARAVTVAGSPKLGLYAAADFGGAWGRPAKVEIASVERTGALALAESGRDGDGGIEVGLALPRAEMETFRAFYLDLLASLDLD

SEQ ID NO: 10319 - protein, 1498 aa, Zea mays
  VARIANT 992..1498: note = Derived polymorphism lacks residues 992 to 1498
  VARIANT 835..1498: note = Derived polymorphism lacks residues 835 to 1498
MADLHFSLGRRCPPLVRARAGELAPWPRLLASRLGYEDTTLALTLRLPGSDSGRSSSLAAPSAAPSPKARVVGWPPVRSYRKNALADSSKANRAANFVKVVVSRRSSASAPPAPGSHRRSLPQRVFFPSRAVPSCFLRTRRAELAPDLCSSLARRVLPCTCPWRPSSQPARPPVLCVARCSSSHGAQPPSRLTGSPSAAPSFFLPQLPRFSLHLPPFSVACPAELPCAPGFSPSLLEFGQARAAPWRPASSVLSLDAHSVPSNSCAVPCSGSMAAPNSLRALAYNSTAHLPTCHGHRALLPDFCSPRALISLFASAHNSPSSMADACEIRAPGAVLLRKSDLPAEKDYANGHADAAVKRKVAAMPAEASTIPRRHPSPSPNAGGRASSPTPAGSQAKRSQSTERRQATPSRPSSGGSRPTTPSRISASASPSSAPSSPSSSSSSSSTPVHDAVSETQSAPRRLSGCRAPDGLWPSMRSLSSSFQVESKGKRNSSTSSAGEAKTRDAAPADRKRSPLRGRATPEQSENPHAKVIDHHRWPAMMGGRVSASTMSKSMDLTDKISRSTVPSVPLRGVSPKRTTMYSAANTLSRSIDLADKIDRLVSSSMSSQGGSPRKSPSNDADDASKKAVVRRDLKLSSLAISSRRVSPTTTAASDGTRTPRKSPSNDAEDASKKAVVRRDLKLSSLAISSRRVSPITTAASDSTKTPRKSPSNDADDVSKKAVVRRDLKLSSSAISSRRVSPITTAASDGTMTLSESVDFTENDNSTLSSPVSSPSIAPSASLSSVFNAASQTSTKSSERLIGPVSNLSSSRGLSPRRTTSGGIADLMKSVDFPEKDRIPASSRGVSPRRRPTSDSVNDIVKNIDFAEKDSRVVSSSIPPRGVSPRRRLASDGLETISRSSVFSGNDNRPSTSSSISHGTSPRRRLASDGISGVTKGMDFGDYANRPSTSSAVSRGISPRLQLASDGVGTVSKGSDLADGLDRPSTSYATPRGVESPSTASGCISDSKLDDTGALVKNIYVTEKLIVSTEYGGDGYDPGRTDSSDIATSAVSSSLASQEPSLRPVTDDDKNASENVVVNQKGNRTLTVKVPSRGASPTRRLASDGTDTISKSMDFAEEDKKPMTVPSRGMSPRRTARSESANIMSKIMDFADECNGPVSSMVPSRVFSTRRVLGPDGVNAMSRSMDLTDKTRQQISLTVQPSRVSPRKTPLAYNRRKGPEILSGDVESPGSADGNEGQEENASSSPDGPSNNSEKSTPPKQLARGSSSPSRVLIRPSSPSNASSSPSFASRRLPSPSRTRPSTPVSPCSSARSDSGSSILSYIVDATRGKKSPAHMEYTMLYSVWDANSRMCDNMVMKRSYVQRLRQEVKLGIVLKEQMDYLDHWAALQTEHSSSLSSATEAIKASTLRLPVSGGAKADVLTVKNAVSSAVDIMQAMGSSICHLLSKLQASHSLVTELSAVAAKESILLNEYRELLATAAALQVQESSLRTQLIQQTE

SEQ ID NO: 10320 - protein, 268 aa, Zea mays
  VARIANT 135..268: note = Derived polymorphism lacks residues 135 to 268
  VARIANT 124..268: note = Derived polymorphism lacks residues 124 to 268
  VARIANT 53: note = Ancestral polymorphism is P, Derived polymorphism is S
  VARIANT 52..268: note = Derived polymorphism lacks residues 52 to 268
  VARIANT 45..268: note = Derived polymorphism lacks residues 45 to 268
  VARIANT 20: note = Ancestral polymorphism is P, Derived polymorphism is S
MEKLLAAWRLWTSLCVDVEPGLFARACVVAHGLQLDVAALNAVGWAGESPSWPAMFDRAAVAEVELATPHPAPSSRDSSLPQLPHPAIPVVQMHGAFHPSILAEDVFLDESILAEDEAALLMLQCDEALTSRLAQWKRTTIPTNLAARCSCAVDNVISLFYARMVCFPRIIVVLSISAAATNRIGYLLLKSVVPDMVVYSLSCSDDLITFVKLLLVAVHAIIHDGLSTRGFRFQPYRSAEFLVINLLVDFFIFETKAYALFPTHEVIP

SEQ ID NO: 10321 - protein, 488 aa, Zea mays
  VARIANT 386..488: note = Derived polymorphism lacks residues 386 to 488
  VARIANT 141..488: note = Derived polymorphism lacks residues 141 to 488
MVQLPGSKKRHAEMATAATVKAEVEGLGCGDGSPHKHVKPMPQPPPQPPPPEDLPFDVLDGPSPLGLRLRKSRSLVDLIQCKLFQDKSAHEQFDGHNNVSDTPMKKEVRSGAPTAGERMKASNFPANVLRIGSWEYISHYEGDLVAKCYFAKHKLVWEVLHNGLKSKIEIQWSDIIALKATCPENEQEGVLDLVLARPPLFFKETDPQPRKHTLWQAASDFTDGQASSKRRHILRCPSSLLSRNFEKLIQCDQRLRELSQQPAAILQNPGFEPKRSIFQNPNESKDCLDIGGLKFEHKATLPKFTAPLSTRVFSSLSNNVGRPINIGFGAGHFGGNVPEESKNCNQWNQLIVPGLEALQGDERSAGGPPLTTNDAISKKAWEDLVQHLFSDTPSLPALDDNNLTSRVDSLYSLLEKDTAPPAMRDPECSSDGGDIGAIQVDSDGFKGRLDPSPPGISRNDSLDELLLNLPKIASIPQFLFNRTEDSDE

SEQ ID NO: 10322 - protein, 447 aa, Zea mays
  VARIANT 15: note = Ancestral polymorphism is P, Derived polymorphism is T
  VARIANT 14: note = Ancestral polymorphism is R, Derived polymorphism is G
MQASSLRRALLLRGPRGAQLFPIPVGNKPRAFSSASPAAARSPKDAHNAPPPIMPTLPWGDALAATQRTFCLPLAGRVLAASATENAAVAPVAVYASLALAAAGARGDTRRQVLQALGGGGGGRGAAVQAANLASRVVKRVFKDRSTSGGPRLAFAGGIWADTSTSLSPGFVEAARSVYSCTARTADFINKPEDAAKLINMWVKQSTKDTVTSLLPDGLIDKNTGLVIGSALYFRGRWLDRTDTRSDAVQKFCCLDRTCVDVPFVEYDRTRPFAVHDGFKVIKLPYQQGNNERKFSMYIFLPDAHDGLFELAKKVFAEPSFLEQHLPTEKRHVDIKIPKFTVSFQVNMKQFLKEMGLELPFLRDADFTDMVKEDGSRNPLYLSDILHKAVLEVNDEGVEETSVRIGIGKPSPGEHFVADHPFFFVIREEVSGSVMFMGHILDPSSQS

SEQ ID NO: 10323 - protein, 156 aa, Zea mays
  VARIANT 102: note = Ancestral polymorphism is A, Derived polymorphism is S
MAADPSRRRPEYHPAVNDVLLTLTNARGTLADVQRRLDLEFRAAYPDHANPAKLVARVKRLEEEAAALKEMCRDLLTQKQELIDQIRVSLMAQRGMTQRLLAASGLPPLSDADETVHNSLNEVIQDWTAQVSPITREIEDLDKKKNANQMLFSAII

SEQ ID NO: 10324 - protein, 81 aa, Zea mays
  VARIANT 53: note = Ancestral polymorphism is R, Derived polymorphism is W
  VARIANT 7: note = Ancestral polymorphism is D, Derived polymorphism is Y
MLLSLCDLSFVKARYCATPLGKAEDSSMTVLGQQEEEGNSLTRHDVIDVDNDREVHCFPRIVVGATFHRDMGVDPRRSLAR

SEQ ID NO: 10325 - protein, 236 aa, Zea mays
  VARIANT 130: note = Ancestral polymorphism is P, Derived polymorphism is L
  VARIANT 88: note = Ancestral polymorphism is A, Derived polymorphism is V
  VARIANT 81: note = Ancestral polymorphism is P, Derived polymorphism is T
MSPSPPPSSGCSLAVLVGGTSTAGSSNKFRHAILRNLLLRLSNKDGAASPSWSSAMSLRERRDAVRHAADAALAAARGAAPRWSRALAAELSSQSQSQQHGRWHWHDDDAPHLLVAGADARPSGHQTCLPCGTAAAVAAAGCRKTVPRRRRLRVRARPKSGATTAWSAGAVARVVARRRARAGALRRMVPGGRGMADECTLLGETLDYAVSLRAQVDAMQLLLRTLQPPGHANNNP

SEQ ID NO: 10326 - protein, 555 aa, Zea mays
  VARIANT 353: note = Ancestral polymorphism is P, Derived polymorphism is L
  VARIANT 137: note = Ancestral polymorphism is N, Derived polymorphism is Y
  VARIANT 121..555: note = Derived polymorphism lacks residues 121 to 555
  VARIANT 34: note = Ancestral polymorphism is A, Derived polymorphism is S
  VARIANT 32: note = Ancestral polymorphism is A, Derived polymorphism is V
  VARIANT 30..555: note = Derived polymorphism lacks residues 30 to 555
MGFLSLVGNSFGCSASGERLVSAARDGDLQEARALLQYNPRLARYSTFGGRNSPLHYAAAQGHHEVMSFVLQRSIIIRVILFAFKYVCSLDVQIVSLLLESGVEINLRNYRGQTALMQACQYGHWEVVQTLILFNANVSFFPLHSTTTFLTVCRISCLGLIWQNGIQVHRTDYLNGGTALHFAALHGHARCLRLVLADYVPSVPNFCTLVNHKSSEEDSTADFDHDALVKMVNQKADGGLTPLHMAALNGHVECVQLLLDLGASVSEVTIEDGTTIDLIGAGSTPLHYAACGGNAVCCQLLIARGACIAVQNASGWTPLMVARSWQRNSVEEILSREPEGRIHTLPSPYLCLPLMSIMNIARECGWRYLNQSPVCIDPCAVCLEGSCSVAAEGCKHEFCTRCALYLCSTSYTSASPAGAIPCPLCRHPIISFNTLPGTSPIRELPRNSLSLSFCTACPAVSSDSSAPVGAHPCRSEFQCVRLPPMGSSSFRSLSCQRIPAMKLHPSFCMGSMDTNPCLIRCSRFGSGLGRSASQREGATRRAWPVTFSPIAATGS

SEQ ID NO: 10327 - protein, 449 aa, Zea mays
  VARIANT 74..449: note = Derived polymorphism lacks residues 74 to 449
  VARIANT 308..449: note = Derived polymorphism lacks residues 308 to 449
MSGGNSSWLMPPPPPASALDNVESEISPSIPFIVAILAIVFFVCGLLHLLVRHLLRLRRRRRAREDADSVTAFQGQLQQLFHMHDAGVDQASIDALPVFLYGSVVVGGGGGGQGKAKAKDPFDCAVCLCEFSPDDRLRLLPQCSHAFHLECIDTWLLSHSTCPLCRRSLLADLSPTLSSPVVVVQLGSGSARDMAASADGTTHDDADDGEPSDRATPAQEVVEVKLGKFVCVEGNSGSASATAADAAADGAGTSGDGDGGASAEEGLGQRRCHSMGSYEYVMDDRASLRVAIKPGPKKKPAASKSRRRGAMSECELGASKRGETSLRLPFPATVPKQQQQSDSDATMSKLAKDSFSVSKIWMVPSSKKDPDAAGERRAVSFRWPVRSKDEGDGRSRKSGSEADWDVEAGSGGGGNSAASSLAEERPSFARRTLLWVVGGRQQSRVGSCS

SEQ ID NO: 10328 - protein, 178 aa, Zea mays
  VARIANT 97: note = Ancestral polymorphism is G, Derived polymorphism is S
MKVCMCIFMLDLARWRGFICYISLRLLSLSDEHLVQSTNCCSQCSVWVARKPPGFAFIDFDDRRDAEDAIRDLDGKNGWKVELSRSTNGRGSRDRHGGSESKCYECGETGHFARECRLRIGSGGLGSGRRRSRSRSRSRSPRYRRSPSYNRRSYSPRYRSPRRRTPSPARGRSYSRSP

SEQ ID NO: 10329 - protein, 1017 aa, Zea mays
  VARIANT 334..1017: note = Derived polymorphism lacks residues 334 to 1017
  VARIANT 311..1017: note = Derived polymorphism lacks residues 311 to 1017
MGRRLLRHHSPSSSSSSLRRRGGLVLAAALLAWCWCQASLPVGAAQAQAQPAPVRVGVILNLTSAVGQRRKVGIEMAVGDYYAARPAASRTRVVLSFRDSAGDVVGAASAAVDLIKNEQVQAIIGPQTSAEAEFVAYLGNRTHVPVLSSSATSPVLSPSQTPFFVRTAANDSYQAAPVAAALAALGWHAAAVVYEDSPYGSGILPALAGALQGVGARIAGRAAVPSGADDDRVDAVLYGLKAMPTRVFVVHMSALPAARLFRRARRAGMMTEDYAWVATDGVGGVVDALGPDDIGAMDGVVSLRPFVRVTERVSNFSARFRARLRREHPSADIYPHDPTVVMLWSYDTAWAIAAAAGVSSPTFQTSQQSAGVTDLDRLRVSATGAALLKAVRETTFRGLAGNFTLVDGQLQPPAYEFVNIVGKSSRAVGFWTPEAGITQTLGAEAAKKGLKKILWPGDSTSVPRGWVVSPNGRKLRVAVPVKHGFKEFVDVAGESTTGGHANVTGYCIEVFDAVMSKMPYPVSYEYVPFPYSSSSYDSLVSLVPRQIADIVVGDVTITASRMGSADFSMPFTDSGWSMVVAVRTETSTSMWIFLRPLTTSLWLASLAFFCFTGFVVWAIEHRINPSSAARRGSSSASSSTSPSPPSSSRTVRARESSSVISTDKLKEKLESNLSRFVVIIWVFVVLILTSSYTASLTSMLTVQKLQPAVTDVRELQRTGAYIGYQEGSFIKNSLKKLGFHEAKMRSYSTAGEYADALSKGPANGGVAAVFDEIPYLKLFLSQYCDGYTMFGPVYKTDGFGFVFPIGSPLTPDVSRVLLTLAEGEKMAQIEKKWFGEPGACPSQGAAALGSSNLSFRSFGGLFLITGVVSSLMLLVYLATFIYQERGEVRPEPEEEGSGSSSSVRRLRAWLRHFDQKDLKCATFRTGDHDSVRDGGNQTQRWAESVRYGRGGNGSVQAAIEEEAVAMGMSPLRFGTSTPSETMNAGSSPASEFGTSFEQRMQEAPHSVSVEMPRSTPS

SEQ ID NO: 10330 - protein, 1124 aa, Zea mays
  VARIANT 871..1124: note = Derived polymorphism lacks residues 871 to 1124
  VARIANT 851..1124: note = Derived polymorphism lacks residues 851 to 1124
MYLAYGWPQSIPLDPDDSDRVVLLRVLGRLLLAVCPASLHLWSAAQHRVRLARSDRSPESLATHGHNAHAAWSPDARTVAVLTSSFYLYVYKVQHSGKQLIVGGKQVPGLCLASISLIITEKVPLANGVAITSNFVCDSKSMLLGLSNGHVQVVSWNAEFSDSFKLGCYVCSSEKPTAAVDALVFDPPSLRESSNARPAPCCTGNSSIVHVELSVKLRLLVALYSGCRIALCTIGKKGLRQPGSTRVERWLDTDDAMCTSVASEQQILAVGCSRGVVELYDLAENTRHIRTISLYDWGYSVEDTGPVACISWTPDNCALAVGWKFRGLTVWSVSGCRLMCTIRQTGSNSASSPMVKPSALKFEPLMGGTSHIQWDDNGYKLFAVEESLSERVLAFSFAKCCPNRGLSGTTYSHQVLYGEDRILLVQPDDADELKILHLNVPISYISQNWPVLHVVASNDGMYLAVAGSHGLVLYDLRNKRWRFFGDVTQEQKIQCKGLLWMRKIVIVCNYVESSNTYELLFFPRYHLDYSSLLYRKQLLGRPIVMDVFQDYILVTYSPFDVHIYHVVVSGELSPASNPVLKLSTLRELSIMSPKSPPVSMRFIPEQNDKGALTEDTHGFSDLLSQQPSRCLILRTNGELSVLDMDDGHEHTLTNSIELFWVTCSQFEEKGSLIKEVSWLDYGHRGMQVWYPSHGADRFKQEDFLQLDPELEFDREVYPLGLLPNVGVVVGVSQRMSFSTAEFPCFEPSPQAQTILHCLLRHLLQRDKIEEALLLANLSAEKPHFSHCLEWLLFTVFDADISRPSASKNQASQKVDSPKKSLLEKTCDLLRNFPEYMDVVVSVARKTDGRHWADLFSAAGRSTEMFEECFQQRWYRTAACYILVIAKLEGPAVSQYCALRLLQATLDESLYELAGELVRFLLRSGRDFENATSDSEKLSPRFLGYFLFRSPYKRQSSDLKSNSTKELSPHIASVMNILERHASYLMSGKELSKLVAFVKGTQFDLVEYLQRERQGSARLENFASALELIGQKLQMDTLQSRLDAEFLLAHMCSVKFKEWIVVLATLLRRTEVLVDLFQHDLRLWKAYSITLQSHDVFREYLDLLNILEEQLSSVSDLTLQNGPLS

SEQ ID NO: 10331 - protein, 184 aa, Zea mays
  VARIANT 51: note = Ancestral polymorphism is P, Derived polymorphism is T
  VARIANT 64: note = Ancestral polymorphism is E, Derived polymorphism is K
  VARIANT 66: note = Ancestral polymorphism is R, Derived polymorphism is G
  VARIANT 120: note = Ancestral polymorphism is R, Derived polymorphism is G
MVFSGLSSRIALSLLSRVQCFNSRSNIESTTDFLELALQFGMIMMFACAFTLIFCFAALNNLTEIRADALKLLVMLKTPEPRAAATIGALLNIFQFLVVMAICTNCLLLVCLYDEEGKWRIEPGLAAILIMEHALLLIKFGFSHFVLEEPAWVKANRVRYVAQAQNVCSKQLLRSISKFDGKLD

SEQ ID NO: 10332 - protein, 782 aa, Zea mays
  VARIANT 672: note = Ancestral polymorphism is S, Derived polymorphism is P
  VARIANT 212: note = Ancestral polymorphism is P, Derived polymorphism is S
  VARIANT 35..782: note = Derived polymorphism lacks residues 35 to 782
  VARIANT 8..782: note = Derived polymorphism lacks residues 8 to 782
MAEEQIEEASMAAAAATPFQLQFDKPIPFQIKMAEWNPEKDLLAMVTDDSKVLLHRFNWQRLWTISPGKCITSICWSPDGKIIALGTEDGLILLHDVENGKMLRTTKSHDVAIVSLNWAEDDPLSKSDKDEFLSYEDRTTRFFPPPPVMPRIGGLRSGDTGLADENEEAIPEFSSASCQRFNILCSGGKDGCVCFSVFGIFPVGKINITKIPINVGSSRKSYQLQDASVSKVSLSRNLQKFVILCFGKLVDTDNLSDSCENSGLHCLYLDTSIFFNRKNELHQVSQQASSIQDMVEVVRASVSLISKQWSNAMSLFHEKFSALPNLISTHGVESSSEDEFLSLLFGTRTSPALHHFLASSLGEAGLKRIAKAVDSAGRDIRGIITEHLQPAVEIISFRLAELRGLSRWRSRFQTIGLDGNLIDGVTESIGMLVVQVERFSRVAATVVYLFQNFFAWVLKSVRILLNEPTDQVPAANSELVVIFLKFLLDKDPIKQLLEADERIECDMDTARHVEQLVVFGGFTDTQFLEKSLVNQFNELEDSLKEAFLMPFTAISSQIQCQGLLPLYPVTSSATLSSSCSPTSISFYKDEDSSHEESSYSLTDYVCLKIPDGSLNKVNCIGVIKGSGNCCTTLSMMSLSGFLLHIPDGYECVDLSLYKDNQVVLLLSETSCSDSPGKSWMVMLQIENFSFMPLSGTFPANIYSLQKLVVTILISPMFDLLALDLQLDTDYGKVRSIPHTVSTPFAVSASRGVACVFSSRRHALVYILDEDEEAEGDETSDME

SEQ ID NO: 10333 - protein, 300 aa, Zea mays
  VARIANT 244..300: note = Derived polymorphism lacks residues 244 to 300
MAVGLLLPMSMGVSSMAVCLVESLNLNLSNLVFIPCSSLLLQPGQIKATMQAAYYAKVLFIFYYFPSSTWNSTFDKQFADEGEEENKRMVKARPKPTPVKAAPEVIFDPMASGARKPRRPGAPSASKEWHSFMGSSLSDMYRKPVLEKSADTSDEEPDIDIMKLLKDVEIIGAPTFKGRKQIENRRVVELGGKSVKKHRTPLSVAKPALKNQKKREQKKMEEEKLLGIFRKRDKDTKPHKTRPEDRVLRATEGRFRNGILNVKHLLAPPKPSGKDMSEPKMRKDKHKGKGKQKGGRRKRR

SEQ ID NO: 10334 - protein, 112 aa, Zea mays
  VARIANT 57: note = Ancestral polymorphism is I, Derived polymorphism is V
MVKGRTGQRVRLYVRGTVLGYKRSKSNQYETTSLVQIEGVNTKEDVAWYCGKRMAYIYKAKTKSSGTHYRCIWGKVARPHGNSGVVRAKFRSNLPPESMGRKVRVFMYPSSI

SEQ ID NO: 10335 - protein, 163 aa, Zea mays
  VARIANT 159: note = Ancestral polymorphism is K, Derived polymorphism is N
  VARIANT 157: note = Ancestral polymorphism is R, Derived polymorphism is C
  VARIANT 155: note = Ancestral polymorphism is F, Derived polymorphism is S
  VARIANT 116: note = Ancestral polymorphism is C, Derived polymorphism is S
  VARIANT 99: note = Ancestral polymorphism is C, Derived polymorphism is Y
  VARIANT 86: note = Ancestral polymorphism is S, Derived polymorphism is R
MRQRRSVAAPLHSNPLATPSGERERGERRHQTPPVSMRQRRHQTSRYPPHPPPVGFVRCENSRVAHRRQLSGCCKPPTVCGYAYASPTAWTSPAADADCVAWSNDPDLLCYACASCKAGVLGGLHEQWRRATIALIFVYVVGCSAFRNAQTEDLFRRYKWGNY

SEQ ID NO: 10336 - protein, 343 aa, Zea mays
  VARIANT 160: note = Ancestral polymorphism is V, Derived polymorphism is M
  VARIANT 149: note = Ancestral polymorphism is P, Derived polymorphism is R
  VARIANT 102: note = Ancestral polymorphism is R, Derived polymorphism is C
  VARIANT 55: note = Ancestral polymorphism is L, Derived polymorphism is R
  VARIANT 41: note = Ancestral polymorphism is R, Derived polymorphism is S
MPPPPPKKKNLLKSFMGNGKDALQQVGTKQRHGGGGGGLPRLSASSKALVLLPLLLLAFIFLFVYPKEFELQAMLSACGPAAAEPAAVRKPEFRLLIGVLTRADLYERRHLLRMVYGLQLASPGGLAAHVDVRFVFCRLYKDDQRVLVPLEILAHGDVIVLDGCEENLNGGKTYTFLSAVAALYADEPYDYVMKADDDIFLRLPQLVGSLGGMPREDMYYGATIPCDSMDPFREYMAGMAYALSWDLVQWIATSDVARNHSVGTEDMLTGLWLRIGGKGKNRFNAKPAIHDYLNPVPVDQCEHEFMPTTIGVHRLKSNPRWAEALKYFNFTAGLQPSKFYKID

SEQ ID NO: 10337 - protein, 457 aa, Zea mays
  VARIANT 152: note = Ancestral polymorphism is L, Derived polymorphism is P
MAPEPEDDIMNEKNPRPLDEDDIALLKTYGLGPYSTSIKKVEKEIKEMAKKINDLCGIKESDTGLAPPSQWDLVSDKQMMQEEQPLQVARCTKIISPNTDDAKYVINVKQIAKFVVGLGDKVSPTDIEEGMRVGYATLYFQFKLSLFSISILSPSFLLQHCDAFIVDRNKYQIQIPLPPKIDPSVTMMTVEEKPDVTYNDVGGCKEQIEKMREVVELPMLHPEKFVKLGIDPPKGVLCYGPPGTGKTLLARAVANRTDACFIRVIGSELVQKYVGEGARMVRELFQMARSKKACIVFFDEVDAIGGARFDDGVGGDNEVQRTMLEIVNQLDGFDARGNIKVLMATNRPDTLDPALLRPGRLDRKVEFGLPDLEGRTQIFKIHTRTMNCERDIRFELLARLCPNSTGADIRSVCTEAGMYAIRARRKTVTEKDFLDAVNKVIKGYQKFSATPKYMVYN

SEQ ID NO: 10338 - protein, 1070 aa, Zea mays
  VARIANT 80..1070: note = Derived polymorphism lacks residues 80 to 1070
MGSAATEGNDTLLGNGVVGILAETCNMWERRAPLTPSHCARLLLGGGKNGPRVNRIIVQPSTRRIHHDAQYEDAGCEISEDLSECGLIIGIKQPKLQMILSDRAYAFFSHTHKAQKENMPLLDKILEERVSLFDYELIVGDDGKRSLAFGKFAGRAGLIDFLHGLGQRYLSLGYSTPFLSLGQSHMYPSLAAAKAAVIVVAEEIATFGLPSGICPIVFVFTGVGNVSQGAQEIFKLLPHTFVDAEKLPEIFQARNLSKQSQSTKRVFQLYGCVVTSRDMVSHKDPTRQFDKGDYYAHPEHYTPVFHERIAPYASVIVNCMYWEKRFPPLLNMDQLQQLMETGCPLVGVCDITCDIGGSIEFINKSTSIERPFFRYDPSKNSYHDDMEGAGVVCLAVDILPTEFSKEASQHFGNILSRLVASLASVKQPAELPSYLRRACIAHAGRLTPLYEYIPRMRNTMIDLAPAKTNPLPDKKYSTLVSLSGHLFDKFLINEALDIIETAGGSFHLVRCEVGQSTDDMSYSELEVGADDTATLDKIIDSLTSLANEHGGDHDAGQEIELALKIGKVNEYETDVTIDKGGPKILILGAGRVCRPAAEFLASYPDICTYGVDDHDADQIHVIVASLYQKDAEETVDGIENTTATQLDVADIGSLSDLVSQAIASMRFRTLVEVVISLLPASFHAAIAGVCIELKKHMVTASYVDESMSNLSQAAKDAGVTILCEMGLDPGIDHLMSMKMIDEAHARKGKIKAFTSYCGGLPSPAAANNPLAYKFSWNPAGALRSGKNPAVYKFLGETIHVDGHNLYESAKRLRLRELPAFALEHLPNRNSLIYGDLYGISKEASTIYRATLRYEGFSEIMVTLSKTGFFDAANHPLLQDTSRPTYKGFLDELLNNISTINTDLDIEASGGYDDDLIARLLKLGCCKNKEIAVKTVKTIKFLGLHEETQIPKGCSSPFDVICQRMEQRMAYGHNEQDMVLLHHEVEVEYPDGQPAEKHQATLLEFGKVENGRSTTAMALTVGIPAAIGALLLLKNKVQTKGVIRPLQPEIYVPALEILESSGIKLVEKVET

SEQ ID NO: 10339 - protein, 43 aa, Zea mays
  VARIANT 2: note = Ancestral polymorphism is A, Derived polymorphism is V
  VARIANT 19: note = Ancestral polymorphism is V, Derived polymorphism is M
  VARIANT 33: note = Ancestral polymorphism is R, Derived polymorphism is K
  VARIANT 39..43: note = Derived polymorphism lacks residues 39 to 43
MAVHESRDHMLQGLLEQQVEKNKVIYEDVSMERGAFLVQQAMG

SEQ ID NO: 10340 - protein, 489 aa, Zea mays
  VARIANT 17: note = Ancestral polymorphism is T, Derived polymorphism is R
  VARIANT 314: note = Ancestral polymorphism is F, Derived polymorphism is L
MLALARALRSLGQAGARREGPLLAWLSSLRSAAFSSSSAPPEYDMPSVTWGVIQGRKERLVSRVLALDFLRSAGVSDPAGELEAVELPSSLEVLQERLDFLLRLGLSTDDLSNYPLLLACSLRKNVIPVLSYLEKLGVTRARLAAFVRAYPACLHASVAVDLAPMVKALRGLDVDRQDLPRVLERYPDVLGLKPDGTISTSVAYLVGIVGVAPRDIGPMVTHFPFFLGMRVGTTIKPFCDYITSLGLPMRILARILEKRPYILGYDLEETVKPNVEALLSFGIQKEALPLVIAQYPSILGLPLKAKLAAQQYFFTLKLQIDPDGFARVIEKLPQLVSLNQNVILKPVEFLRGRGISNEDVARMVVRCPQILLLRIELMKNSLYFFKSEMKRPMSELLEYPEYFTYSLESRIKPRYMRVTSRGIKCSLDWFLNCSDMRFEDRMQGDFIEGDAPGPSFTMGGKLQMPGSQLVSDDDEDTDDEVLYRRTVMI

SEQ ID NO: 10341 - protein, 1376 aa, Zea mays
  VARIANT 906..1376: note = Derived polymorphism lacks residues 906 to 1376
  VARIANT 878..1376: note = Derived polymorphism lacks residues 878 to 1376
MARGGGGRSKKEDEEELRGAKRGYKEASAEGNREEEARWANVIGDIYKRRCEYVEALRWLRADYEVSVKHLPQRHLLPSCQSLGEVYLRLGRFSEALTYQKKHLQLAKESDDLVEQQRATTQLGRTYHEILLRSENDHSAIRNAKKYFKSSMKLARILKERSPSQKSDFLKELIDAYNNMGMLELELDNFEEAEKLLIQGLKICDDEEVDSYDDARTRLHHNLGNVYTELQNWKKARGHIEKDIEICRKIRHLQGEAKGFINLGELHYRVQKYDNAKLCYNKALEVARSLEDEDALIEQIHQNIETVTKAVEVFEQLKEDELKLKKLIRDTSNARGTSKERKLLLDQHAWLDSLIEKARMICAWQKHKEFSKGKKRVANELRDKEKLSDSLLSIGESYQKLRNFSKARKWYMKSWNIYRSIGNLEGQALAKVNIGNVLDSCGDWAGALQAYEEGYRYYLDVFLSKSQKILSKLACCDLKIAVEADLPNVQLSALENMHYSHMVRFDNIEEAKKMQEKIDNLKQTLNQCEARDTVSDYCSETDTEGGCTSDNTLDAQNDHGQAANNYEEPDDDVTLASLVQRSGSSSKIKVPKIRNSSKKFDELCDVTEDIHNSSKKVDELGDMAEGTRAVLSRSRSDHSVGRKRVRVILSDDESDENHENVQFKKTSTSPADSMSVSADHGASSSRNQDTLQVNQTRDAPYPAEESICSFKSSSPIDHAFEGIGLGASSAGKGPTSKSAASFSKLSTPGSNSLNESQNAVGSQSKDADNHFWAFRIGGHLVYLDGRACVHEGAFSIDSLKVEVACVYYLQISDEKRAKGLLPIIGELKFRGKVLEDAVSIYYDDQLASEQKCVDVVIDDWVPKQLMKLYVDFCMKSLEAPNKKLLTKLYNLEVSEDEIIVSDCGLQDMSIVPFLDALRSHKTIAVLDLSHNLLGNQTVERLQHIFASSSHTYGGLTLDLHCNRLGPTALFQICECAVLTDRLEVLNLSGNRLTDACSSYLFTILKKCKALYSLNVEQCSITSRTVQKMTDALHEESVLSHLSLGKNNPISSNTMLNLLSKLASLTRFSELSLTGIKLNKLMVDKLCLLAQSSCLSGLLLGGTSIGPVETTRLTEALSCTSQDFLRLELSNCGLTTPDFTQICTNLSRINILELNLGGNPINLEGCDAVQRMLVNPQCSIRSLSLDKCNLGLAGIVRVIQSLPENSQLEELRVSKNTNLALETTTKYDEDMQEVSTASEQKQCNDPETTNDIAPGNIDFANMQVPDSEDEADNDAHRARSGSRRSCASSSQKNSYSSCQMIEELAKALISAKQLMVLDLSCNGLSEEAVQSLYSAWASVPRGDGMARKHVNKEVVHFSVDGMRCCGLKPCCRRDLQM

SEQ ID NO: 10342 - protein, 466 aa, Zea mays
  VARIANT 148: note = Ancestral polymorphism is G, Derived polymorphism is D
MSGTSSFTTGESSRAGEQPERDEVVEFKARTWVALSSIIVVHSANDEGRRMLALRASDIFLDLQPPQVGASYLVLPDRIVKHPRYADHPVVLSACSDHFLFRATPAEGPSNLICFFVGDVNARTVVRLPEVPFHMAVNTIPHPQYSIGLIADPRSRHGGHYMVAQLHPTFTTHHTTLLCYSSVTDQWTARPLASTESEEHHRWGAHGVLAHGGLLWWIDLFYGMLVCDPFAADDNLHLRFVPLPVGSIRTGRRVPGPENIGRERFIRPSQGKLRYVEIQGAPSGMRTSNYQPPSNPQVRMFTLVSQEGQHHWVHEYTATFLDIWSHRSYAEAGLPQGVVPWLALIDPNNANTLYFFRGTTLFAVDGQTRQVLFRVRCLVLESARGGHRFQNSRFIGAWELPPALEPDVLCTHDVGGGSSIWGSDSEGTDGSDREQAISDQATNSGDQAADSPDQAADSPDQADAEP

SEQ ID NO: 10343 - protein, 338 aa, Zea mays
  VARIANT 198: note = Ancestral polymorphism is G, Derived polymorphism is S
  VARIANT 58: note = Ancestral polymorphism is R, Derived polymorphism is C
  VARIANT 47: note = Ancestral polymorphism is D, Derived polymorphism is V
  VARIANT 33..338: note = Derived polymorphism lacks residues 33 to 338
  VARIANT 23: note = Ancestral polymorphism is D, Derived polymorphism is Y
  VARIANT 1: note = Ancestral polymorphism is M, Derived polymorphism is I
MSAMSSSFIARESSRAGEQPQRDEVVVFHPRPWVALSFIPVVLGANDKRAWMLAPDARARTVVRLPAVPAHLGVRVIRRHSIGLIADPRHGGHYMVAQLQPPTLTTLHKTLLCYSTVTDQWTTRPLASAEEHYRWGAHGGLLWWIDVSCGMLICDPFAADDNLHLRFIPLPVGCMVIRGPVRRPELMAKQRFIRPSQGKLRYVEIRTGVPIGPNRLKQPPEVRMFTLVSQEGQHYWVHEYTATFADIWSHHSYADAGLPWGVVPSLALIDPNNPNTLYFFQGTTLFAVDGKARKVLFHLQYLVDSANADLNFQNSGFVSAWELPQALFVNRHARAGLP

SEQ ID NO: 10344 - protein, 391 aa, Zea mays
  VARIANT 255: note = Ancestral polymorphism is G, Derived polymorphism is R
MSATSSFTAGESSRAGEQPERDEVVEFLDCPWVALSSAIVVIGANDERARMLAPGASDIFLDLQPPLVGASYLVLPERIVAHYRYSGYQPCVLSACSNCLLFLAIQAEGVSNPAFFLGNARARTVVRLPDVPAHLGVNIIRRQSIGLIADQRHDGHYMVAQLHPTWTTLHKTLLCYSTVTDQWTARPLASAEEHPRWGAHGVLAHGGLLWWIDVSYGMLVCDPFAADDNLHLRFIPLPVGSMLMAQPELMAHGLRFISRSGLMAHQRFIRPSQGKLRYVEIQGAPSGMLTTNYQPPSNPQVRMFTLVSQEGQHHWVHEYTATFLDIWSYRSYADAGLPRGVVPSLALIDPNNANIIYFFQGTTLFAVDRYARKVLHHLQYLMILSQITIPR

SEQ ID NO: 10345 - protein, 224 aa, Zea mays
  VARIANT 14: note = Ancestral polymorphism is V, Derived polymorphism is M
  VARIANT 23: note = Ancestral polymorphism is G, Derived polymorphism is E
  VARIANT 25: note = Ancestral polymorphism is A, Derived polymorphism is D
  VARIANT 32: note = Ancestral polymorphism is V, Derived polymorphism is M
  VARIANT 44: note = Ancestral polymorphism is I, Derived polymorphism is T
  VARIANT 45: note = Ancestral polymorphism is R, Derived polymorphism is M
  VARIANT 50..224: note = Derived polymorphism lacks residues 50 to 224
  VARIANT 53: note = Ancestral polymorphism is E, Derived polymorphism is K
  VARIANT 59..224: note = Derived polymorphism lacks residues 59 to 224
  VARIANT 62: note = Ancestral polymorphism is G, Derived polymorphism is D
  VARIANT 66: note = Ancestral polymorphism is A, Derived polymorphism is V
  VARIANT 73: note = Ancestral polymorphism is P, Derived polymorphism is S
  VARIANT 74: note = Ancestral polymorphism is S, Derived polymorphism is L
  VARIANT 93: note = Ancestral polymorphism is C, Derived polymorphism is Y
  VARIANT 99: note = Ancestral polymorphism is A, Derived polymorphism is T
  VARIANT 109: note = Ancestral polymorphism is L, Derived polymorphism is H
  VARIANT 133: note = Ancestral polymorphism is V, Derived polymorphism is G
  VARIANT 136: note = Ancestral polymorphism is R, Derived polymorphism is G
  VARIANT 145..224: note = Derived polymorphism lacks residues 145 to 224
  VARIANT 150..224: note = Derived polymorphism lacks residues 150 to 224
  VARIANT 160: note = Ancestral polymorphism is S, Derived polymorphism is I
  VARIANT 190: note = Ancestral polymorphism is M, Derived polymorphism is T
  VARIANT 191: note = Ancestral polymorphism is T, Derived polymorphism is I
  VARIANT 199: note = Ancestral polymorphism is L, Derived polymorphism is S
MDQLHGNVAKARKVLGSKGKGKGFARLVWSSVVGDSLIKYARLIRDDLNQWLELQELTQSIGNVIASTARSTPSLIGSMTLKEETGIDLDDVCCLLQTALVGRSMLILLDDVWEQDIVDRFTRLYDNDCRYLVTTRDEAIYEIAEAEKVEICKDDIKEISTEILLYHSLLSDGELPVENYRDELEEMKGMTKQEFIAHLRRRSSGFSRGASIYRGVTRHHQKGR

SEQ ID NO: 10346 - protein, 269 aa, Zea mays
  VARIANT 20..269: note = Derived polymorphism lacks residues 20 to 269
  VARIANT 47: note = Ancestral polymorphism is P, Derived polymorphism is T
  VARIANT 71..269: note = Derived polymorphism lacks residues 71 to 269
  VARIANT 145..269: note = Derived polymorphism lacks residues 145 to 269
  VARIANT 146..269: note = Derived polymorphism lacks residues 146 to 269
MDAGVEKCGDAAAEGGGDLYAVLGLKKECSDADLKVAYRKLAKKWHPDKCSSSSISVKHMEEAKEKFQEIQGAYSGLNLPSLSTLHHAPLLLLSDANKRLLYDVGVYDDEDDEDSMQGMGDFIGEMTQMMSQVRPMRQESFEELQQLFVDMFQSDIDSGFCNGTAKGHQVQGQAKSRTCSPRSPPTTIVKEAEVSSCNGFNKRGSSAMDSGKPPRPVECGAGQSQAGFCFGVSDTPKPRGPNANRKRNGRKQKLFPKHYVTSEDDTAGS

SEQ ID NO: 10347 - protein, 170 aa, Zea mays
  VARIANT 123..170: note = Derived polymorphism lacks residues 123 to 170
  VARIANT 99: note = Ancestral polymorphism is K, Derived polymorphism is N
  VARIANT 97: note = Ancestral polymorphism is R, Derived polymorphism is H
  VARIANT 83: note = Ancestral polymorphism is E, Derived polymorphism is V
  VARIANT 75: note = Ancestral polymorphism is G, Derived polymorphism is R
  VARIANT 68: note = Ancestral polymorphism is I, Derived polymorphism is M
  VARIANT 47: note = Ancestral polymorphism is G, Derived polymorphism is S
  VARIANT 38: note = Ancestral polymorphism is T, Derived polymorphism is K
  VARIANT 36: note = Ancestral polymorphism is E, Derived polymorphism is K
  VARIANT 17: note = Ancestral polymorphism is K, Derived polymorphism is E
  VARIANT 13..170: note = Derived polymorphism lacks residues 13 to 170
  VARIANT 11: note = Ancestral polymorphism is E, Derived polymorphism is G
MEDNLPVNVQEYQELAKKLILKKSLHDKKNNVQATEFTIKQGWLHTGDIGYFDEGGQLFVVDRLKELIKYKGFQGPAKISMEEIDAAKLTKDNVDVRLKWLGLFHRYKHQCTPTDSTPPAMERPRERDTDKAAFGVRFDLVSAKFITPTFSQLVSTNYITPFHSYGITVT

SEQ ID NO: 10348 - protein, 76 aa, Zea mays
  VARIANT 62: note = Ancestral polymorphism is S, Derived polymorphism is L
  VARIANT 56: note = Ancestral polymorphism is G, Derived polymorphism is R
  VARIANT 53: note = Ancestral polymorphism is R, Derived polymorphism is T
  VARIANT 48: note = Ancestral polymorphism is R, Derived polymorphism is C
  VARIANT 44: note = Ancestral polymorphism is E, Derived polymorphism is K
MEPGRIPWRANLQWIHGLKVSSPLEDPRYEALNQRREGSIFGVECEKCGMLIRVAGNSIMLSPPLIMTPNEVEEML

SEQ ID NO: 10349 - protein, 254 aa, Zea mays
  VARIANT 27: note = Ancestral polymorphism is L, Derived polymorphism is H
  VARIANT 105..254: note = Derived polymorphism lacks residues 105 to 254
  VARIANT 141: note = Ancestral polymorphism is H, Derived polymorphism is Y
  VARIANT 238: note = Ancestral polymorphism is G, Derived polymorphism is A
  VARIANT 242: note = Ancestral polymorphism is I, Derived polymorphism is T
  VARIANT 243: note = Ancestral polymorphism is V, Derived polymorphism is A
MASVQVSGAGVGAAAFSVKGKASTGALRLRSTLTFGEVCPARRAFRGLVVRAATVVAPKYTTLKPLADRVLVKINSSEEKTTGGILLPTTAQSRPQGGEVVAVGEGRIIGDKKVDVSIQVGAQVVYSKYAGTEVALNDHSHLVLKEDDVIGILETDDVKDMKPLNDRVLIKVAEAEDKTPGGLLLTETAKEKPSIGTVVAVGPGPLDEDGERLALSVSAGSTVLYSKYAGSEFKGADGTNYIVLRASDLMAVLS

SEQ ID NO: 10350 - protein, 495 aa, Zea mays
  VARIANT 200: note = Ancestral polymorphism is W, Derived polymorphism is C
  VARIANT 243: note = Ancestral polymorphism is D, Derived polymorphism is Y
  VARIANT 256: note = Ancestral polymorphism is S, Derived polymorphism is F
MVDTGGGRLYQRRGAVAFVAANKALLAAAWVVGFALVFLWQSASMSFGSAGGGGYLRLLSVPPPPPRPAPRLRPTAYNITDFGAVGDGRAVNTAAFERAVEAIAALAERGGGQLNVPPGRWLTAPFNLTSHMTLFLAEGAEILGITDEKYWPLMPALPSYGYGRERKGPRFGSLIHGQNLRDVVITGHNGSINGQGEVWWMKHRRRILNNTRPPLVQLMWSKDIIVANITLRNSPFWHLHPYDCTNVTVSNVTIMSPVSGAPNTDGIDPDSCQDVLIENCYISVGDDAIAIKSGWDQYGIAYGRPSSDILIRNVTARSLVSAGISIGSEMSGGVANVTVENVRIWESRRGVRIKTATGRGGYIRNISYRNITFDNVRAGIVIKVDYNEHADDGYDRTAFPDITSISFKGIHGQGVRVPVRAHGSDVIPIKDISFQDMSVGISYKKKHIFQCSYLEGRVIRPVFPKPCENLDVYDEQGQLVKRAVALNSTELDYDI

SEQ ID NO: 10351 - protein, 567 aa, Zea mays
  VARIANT 326..567: note = Derived polymorphism lacks residues 326 to 567
MLGVGTAAAVLLGAVALVLADAAARRAHWWYREAAEVVLVGGVALVVVDAAARRAHGWYREAAARLPPGEMGWPLVGGMWAFLRAFKFGRTRTGVYQGFMFSSLTVLMTTAEACKQVLMDEDAFVTGWPKATVALVGPRSFVAMPHDEHRRLRKLTAAPINGFDALTGYRAVGLNANAAAKYFRKVLLLLNSLTSSKEASDFIMKDWSIFSKFDHNGAYLPMLPIDSPISHDVGLGLISQVGNLVECSFQHPRHICATGSGTVQEAFSCLNKFAEAFYFWFSRASNPKLFQRLSAAAGSSSRVCRSHIKQVASCLQHLPGLQFGSQLRKDHAVQMLLARLASTTFGRLWTEVEEHHACNILMLAAATVVPPFENMYEFTTCCFVLVGMGFRSMRIMRVKDLNLYAFGLYIQPDSVCKKLGPKYACIPDAELKDHPDFYEDLLRENIDMTVRLVVSYNGLSIGTVRDAFEKSLAFRLKKMNPNTDYDCLKTFGSCFNEYIRIPAGTKIDFRQTSDGQLITEIDGKQIGTVHSKYLCRTFFDMYIGDPPVSVETKHGIAQNVAGLMRRC

SEQ ID NO: 10352 - protein, 334 aa, Zea mays
  VARIANT 8: note = Ancestral polymorphism is D, Derived polymorphism is G
  VARIANT 44: note = Ancestral polymorphism is P, Derived polymorphism is T
  VARIANT 114: note = Ancestral polymorphism is H, Derived polymorphism is Q
  VARIANT 141..334: note = Derived polymorphism lacks residues 141 to 334
  VARIANT 163: note = Ancestral polymorphism is G, Derived polymorphism is A
MSLFTHSDQDDELRISSIFTRAPVCIAGGSDIFSRFLLLLSFSPASMVSLLPRAPSLAFLAKSASSQRPPAPSMSSPFSAASVAAGSEAAAGTRKLPVLLFDVMDTLVRDPFYHHIPGFFQFRTYRGSSRLLICAVCRVGWIKVLPTILLPFVLMSMKELLEAKHPTAWSEFEKGLIDENELAKKFFKDGRSFDLQGLKECMVRAYEYIDGVEDILCCLKKNNYEMHAFTNYPVWYQLIEDKLKLSKYLSWTFCSCRTGKRKPSPEFYLQAADQLNVDPASCVFIDDRMINIEAALSVGMVGLQFKSAEALQKDLCALGVELSPLVCEGEAQVQ

SEQ ID NO: 10353 - protein, 232 aa, Zea mays
  VARIANT 132: note = Ancestral polymorphism is L, Derived polymorphism is P
  VARIANT 42: note = Ancestral polymorphism is C, Derived polymorphism is S
  VARIANT 29: note = Ancestral polymorphism is F, Derived polymorphism is S
  VARIANT 25: note = Ancestral polymorphism is V, Derived polymorphism is A
MGTVVDAAPAVVAEVTENMLGGKKVTVVFVLGGPGSGKGTQCANIVEHFGFTHLSAGDLLRAEIKSGSENGTMIENMIKEGKIVPSEVTIKLLQEAMIKSENDKFLIDGFPRNEENRAAFENVTKISPAFVLFFDCSEEDMEKRLLGRNQGRVDDNIETIKKRFKTFVDSTLPVIEHYNSKDKVKKIDAAKPIPEVFEDVKAIFAPYSLKAPHKHICDYDGPFNIEQKFWLI

SEQ ID NO: 10354 - protein, 401 aa, Zea mays
  VARIANT 236..401: note = Derived polymorphism lacks residues 236 to 401
MMMMSSGRAGGGATAGRYPFTASQWQELEHQALIYKCLASGKPIPSYLMPPLRRILDSALATSPSLAYPPQPSLGWGCFGMGFTRKADEDPEPGRCRRTDGKKWRCSKEAYPDSKYCEKHMHRGKNRSRKPVEMSLATPAPAPAPAAATTATATSSPAPSYHRPAHDATPSPYHALYGGGGGGGGSPYSASARPGATGGGGAYHHAQHVSPFHLHLETTHPHPPPPYNYSADQRDYAYGHAAAKEVGEHAFFSDGAGERVDRQAAAGQWQFRQLGVETKPGPTPLFPVAGYGHGAASPYGVEMGKDDDEQEERRRQHCFVLGADLRLERPSSGHGHGHDHDDAAAAQKPLRPFFDEWPHQKGDKAGSWMGLDGETQLSMSIPMAATDLPVTSRFRNGGHYE

SEQ ID NO: 10355 - protein, 656 aa, Zea mays
  VARIANT 226..656: note = Derived polymorphism lacks residues 226 to 656
  VARIANT 231..656: note = Derived polymorphism lacks residues 231 to 656
  VARIANT 329..656: note = Derived polymorphism lacks residues 329 to 656
MAAAKLTGNAVAAAMAGDTNLKPVVQVVDLRSIAVTGAPGSGPRFRAIISDGVATGHALFASQLCDLARSGVVRRGSVVQLLDYIVNNVGPTRNRKAIVILNMEVLVAECEIIGNPALPPESGDSSSNSLRADQFNGAPPNGSMAGSTLNKVIKPSDNAPVIQRSMTGNSLNMVPRPSDNAQVFQPTVQPSYRPAPKYRSHGTIMKNDAPARIIPIPALNPYQGRWAIKARVTAKGEIRRYHNAKGDGKVFSFDLLDTDGGEIRATCFNALVDRFYEVVEVGKVYVVSRGNLKPAKKDYNHLNNEWEIFLEPQSTIELCLDENSSIPAQRFSFSSIDKIENSENNAIVDVIGVVTSVNPSTTIQRKNGMEAQKRTITLNDMSGRSVELTMWGDFCNREGSQLQEMVECGAFPVLAVKAGKVNDYSGKSVGTISSSQLHINPDLAEAHSLRQWFDCGGRDASTQSISRDFTPSASWNEVRKTVAQIKDDGLGMGDKPDWVTVKAAISFIKTDSFCYTACPNVIGDRQCGKKVTKSDSGNWLCDKCNQEFPECDYRYLLQLNIQDHTGTTSVTAFQDRGQEILGCSARELNIFKENKDPRYTDVLINCLYQNYLFRLKVKEEQYGDVRQVKNTVAKVERVDPLAESKFLLDSISRFIP

SEQ ID NO: 10356 - protein, 134 aa, Zea mays
  VARIANT 24: note = Ancestral polymorphism is G, Derived polymorphism is R
  VARIANT 25: note = Ancestral polymorphism is I, Derived polymorphism is T
  VARIANT 41: note = Ancestral polymorphism is S, Derived polymorphism is I
MASVCGGCLALQDAGVPIKFPVAGIAMGLVLDTQEFGGDGSPLILSDITGAEDASGDMDLKVVGITLPVMEKALLQAREGRQHILSKSVLRESSCKMRRAKRITTPVCFSPKRYSSKKLLRDIVTSKKVPHDHT

SEQ ID NO: 10357 - protein, 99 aa, Zea mays
  VARIANT 28: note = Ancestral polymorphism is A, Derived polymorphism is V
  VARIANT 62: note = Ancestral polymorphism is C, Derived polymorphism is W
  VARIANT 74: note = Ancestral polymorphism is G, Derived polymorphism is S
MTMRTYNKAVLLVLAMVMAVLSTGICTVPAPAPSLEEFPTTTENTCVKILADSGCVRNHKACHDNCFIKLKGNGVCLRDACWCSYTCKPSLLSPPPAAQ

SEQ ID NO: 10358 - protein, 169 aa, Zea mays
  VARIANT 11: note = Ancestral polymorphism is N, Derived polymorphism is K
  VARIANT 31: note = Ancestral polymorphism is N, Derived polymorphism is D
  VARIANT 67: note = Ancestral polymorphism is E, Derived polymorphism is K
  VARIANT 75..169: note = Derived polymorphism lacks residues 75 to 169
MVFTLQSVEIKELKQKVSELIEIKAQLEDRNQKLLEESTYAKGLVSAAGVELKALSEEVTKLMNQNEKLATELSSLRSLTPAPRRVSNAPRGTRRESMSRRHEPASRRDTNTSHEREKALGTLLMEKEQKEAELQRKVEESKHKEAFLESELANMWVLVAKLKKSQGYL

SEQ ID NO: 10359 - protein, 96 aa, Zea mays
  VARIANT 15: note = Ancestral polymorphism is D, Derived polymorphism is V
  VARIANT 66: note = Ancestral polymorphism is P, Derived polymorphism is A
MDGSAFPSLSPELRDALAKVAVFVLVQGLVYLILRSSSDVFSKDGRLRSLSFRPMRSMSVRRVLAPLSDVPVGTDDASPSLSPAATSSHRKAARED

SEQ ID NO: 10360 - protein, 189 aa, Zea mays
  VARIANT 175: note = Ancestral polymorphism is W, Derived polymorphism is C
  VARIANT 167: note = Ancestral polymorphism is E, Derived polymorphism is K
  VARIANT 166: note = Ancestral polymorphism is A, Derived polymorphism is S
  VARIANT 129: note = Ancestral polymorphism is G, Derived polymorphism is E
  VARIANT 86: note = Ancestral polymorphism is K, Derived polymorphism is N
MALLAPSPRALRVRETAAAALPHSSATAACSTVGGGAARRALWLWDNGGGTGTGRRKEHRERVRPEAYCWDVSRPVEMEEIDSIEKLDDALRWSVENNQPVVIDWMAGWCRKCIYLMPRMEKMAGEYPEVRFYFIDVNKVPQGVVKRGNVTRMPTIQLWKDGEWKAEVIGGHKACLVMDEVREMIENNK

SEQ ID NO: 10361 - protein, 117 aa, Zea mays
  VARIANT 37: note = Ancestral polymorphism is Y, Derived polymorphism is N
  VARIANT 60: note = Ancestral polymorphism is W, Derived polymorphism is C
  VARIANT 102..117: note = Derived polymorphism lacks residues 102 to 117
MGSSKDKTDGGGGGDRGTGGGGRAAGRARVQGAFVGYGGRRSKAGAARDGHGEMGTFRTWSMYSSEEAETKDQLLELAVVVLLQCVLRVQKLFKMAVILTPWKGQMARNFSKTSAYV

SEQ ID NO: 10362 - protein, 104 aa, Zea mays
  VARIANT 83: note = Ancestral polymorphism is Q, Derived polymorphism is R
  VARIANT 75: note = Ancestral polymorphism is R, Derived polymorphism is H
  VARIANT 56: note = Ancestral polymorphism is T, Derived polymorphism is M
  VARIANT 44..104: note = Derived polymorphism lacks residues 44 to 104
  VARIANT 31: note = Ancestral polymorphism is R, Derived polymorphism is C
  VARIANT 29: note = Ancestral polymorphism is S, Derived polymorphism is L
  VARIANT 22: note = Ancestral polymorphism is P, Derived polymorphism is S
  VARIANT 21: note = Ancestral polymorphism is P, Derived polymorphism is L
  VARIANT 12: note = Ancestral polymorphism is D, Derived polymorphism is G
  VARIANT 9..104: note = Derived polymorphism lacks residues 9 to 104
MYPPSKLEQFYDFFTFSHLTLSLHYIRRSSRPFVDDKREDDFFQIDVQVCNGKPMTIVASQEGFYPAGKRALISRSLVGLLQQTSRAFDGAYKALMKAFVEHNK

SEQ ID NO: 10363 - protein, 156 aa, Zea mays
  VARIANT 43: note = Ancestral polymorphism is E, Derived polymorphism is D
MSRECLHDGKVWLAFAQFQNSGGARIGEDGALRWSEWLAKDEESRQKLSTQENSQETETGGWSGWFDPSLGNTDANDLSKKSLEPSLSDGKGAEDLDAENSPAQDDVESLLKKPGIAVDAESYSEAKDAETWNRWALMELSRDNEPWMPLHEKYSN

SEQ ID NO: 10364 - protein, 323 aa, Zea mays
  VARIANT 135: note = Ancestral polymorphism is D, Derived polymorphism is E
  VARIANT 30: note = Ancestral polymorphism is A, Derived polymorphism is T
  VARIANT 28: note = Ancestral polymorphism is R, Derived polymorphism is S
  VARIANT 2: note = Ancestral polymorphism is A, Derived polymorphism is T
MAATVSFPVVNMEKLETEERDTAMAVIRDACENWGFFELLNHGISHELMDEVERLTKAHYATFREAKFQEFAARTLAAAGDEGADVSDVDWESTFFVRHLPASNLADLPDVDDHYRQVMKQFASEVQKLSEKVLDLLCENLGLEPGYLKAAFAGSDGGPTFGTKVSAYPPCPRPDLVAGLRAHTDAGGLILLLQDDQVSGLQLLRGGDGGEWVDVPPLRHAIVANVGDQLEVVTNGRYKSAVHRVLARPDGNRMSVASFYNPGADAVIFPAPALVGEEERAEKKATTYPRFVFEDYMNLYARHKFEAKEPRFEAMKSSAIATA

SEQ ID NO: 10365 - protein, 221 aa, Zea mays
  VARIANT 30: note = Ancestral polymorphism is E, Derived polymorphism is K
  VARIANT 34: note = Ancestral polymorphism is H, Derived polymorphism is Q
  VARIANT 36: note = Ancestral polymorphism is K, Derived polymorphism is E
MKLDVPARQQSSQDAEQSGKTVAAAVLGTEAWSHPELPLLLRDASTDDALVPPLNFAMVDDGIFRSGLPDAANFRFLLSLNLRSIVYLCPEPYAEENARFLRTNGIRLHQFAVEGSKSGPTVLDTMSAQEPFVHIPEETIREALKVVLDVRNQPVLIHCKRGKHRTGCVVGCLRKLQKWCLSSVFDEYLHFAAAKARTTDQRFMELFDASSLMHLTAASQY

SEQ ID NO: 10366 - protein, 648 aa, Zea mays
  VARIANT 551..648: note = Derived polymorphism lacks residues 551 to 648
  VARIANT 579: note = Ancestral polymorphism is W, Derived polymorphism is R
MAASVERHLAPHPWPANAPPKSFDMFRTGSDSDSEDEDSIPAVDWRSLYRPRLEVEPPVHDPRDEATSDAWVRRHPALVRLTGKHPFNSEPPVPRLMAHGFITPAPLHYVRNHGAVPRADWSTWTVEVTGLVTRPAKLTMERLVTEFEAVELPVTLVCAGNRRKEQNMVRQTVGFNWGPGAVSTSVWRGARLRDVLRRCGVMRAADGAANVCFEGAEDLPGGKYGTSLRRGVAMDPARDVILAYMQNGEPLAPDHGFPVRVIVPGFIGGRMVKWLRRVVVASDESDSYYHYRDNRVLPSHVDAELANAEAWWYRPEYIINELNINSVITTPGHDEVLPINALTTQRPYTIKGYAYSGGGRKVTRVEVTLDGGETWQVCSLDHPERPTKYGKYWCWCFWSVDVEVLDVLGAKEIAVRAWDEAMNTQPEKLICNLMGMMNNCWFRVKVNACRPHKGEIGLVFEHPTQPGNQPGGWMARQKHLETSESAQGTLKKSTSTPFMNTATAQYTMSERRFARRLAMVAGGTGITPVYQVIQAVLRDQPDDDTEMHLVYANRTVDDMLLREEINRWVAAYPARLKVWYVVSKVARPEDGWEYGVGRVDEQVLREHLPLGDSETLALVCGPPAMIECTVRPGLEKMGYDLDRACLVF

SEQ ID NO: 10367 - protein, 355 aa, Zea mays
  VARIANT 36..355: note = Derived polymorphism lacks residues 36 to 355
MRHEVLHISEKMARSARARRHVAHRIKSTHPIPSYRWKAKAMKKSNRKQVLPALQKMDWEDANCSVCMEYPHNAVLILCSSHDKGCRPYMCGTSYRHSNCLDQFKKAYTKGALLEEVPANSVGTDLDSAPLDAEKIESIDLACPLCRGKVKGWTVVEPARSYLNGKKRTCMQDGCSFVGTYKELRKHVKLEHPLAKPREVDPVLEQKWRLLEIERERQDALSTITATMGRAVVLGDYVLDLEDGVDLEDVDSDVDVDDDRGTDNTRRMLLFIMRQVAQHHQHQRLHNVTGASENVEDNYVVNNGANGTTPYSYPLEGEDENDMVLAGGRSTDVLRPERRRRRRRRNRGRLFLGAN

SEQ ID NO: 10368 - protein, 522 aa, Zea mays
  VARIANT 182..522: note = Derived polymorphism lacks residues 182 to 522
  VARIANT 198..522: note = Derived polymorphism lacks residues 198 to 522
  VARIANT 246..522: note = Derived polymorphism lacks residues 246 to 522
MNGAHIAAASPEAGGSSSSASSSGVSASGRSWLLKGVHLRRRRRWRRQVAVRGGVRADGGDVQDLALPLGMSFAAVLAQVVNRCAGSEGGLRPDVLSKMCTSAVKESLTNIYGDRFHSFMSNFEKAFGSTLRTIHLINETPVFEQDVEQCSYKDDDSVPQIKLGGADSLPEIKVGGADSQSQIHDVQTDMPSSSMNSQIVLHTGINDQLVHLTCSRSNPEIGQHILSVFERSLNEQARSNELKELEIGLTMRKLQLSRSQLALSSESQMLEKIKVHMGFQKASFKEKKFKTEMEDTKHAELFRKLIDMLLTAVVLMSVCFGYGTYIYSYQRITAATSACAAISREYTSWWMPSSVSAINSGLLLFKCHVIAATRIFFGILMLLLIGWLIFQRSAMTGPNMPVTFNVMILGVLCGYFGSCCVDTLGGDGNVWLIYWEALCSIHLLGNIWPSLLHHMLYGPISVTHRTKAGHLPYWARRYTFYILVSLILPCLAGLLPFASLSDWKELAVQYLKSRFSGINIED

SEQ ID NO: 10369 - protein, 117 aa, Zea mays
  VARIANT 82: note = Ancestral polymorphism is R, Derived polymorphism is W
  VARIANT 45: note = Ancestral polymorphism is R, Derived polymorphism is H
  VARIANT 26: note = Ancestral polymorphism is D, Derived polymorphism is G
  VARIANT 5: note = Ancestral polymorphism is E, Derived polymorphism is D
MLHAEEKKGKVKRGWLAVRVGAAEGDGGSQRFVIPIAHLYHPLFRRLLEAARDAYGYDYSAGPLRLPCSADEFLRLRALVERETPPHAAPAPASSHRVHEGGHYSTLSPCTRAKVTS

SEQ ID NO: 10370 - protein, 1519 aa, Zea mays
  VARIANT 899..1519: note = Derived polymorphism lacks residues 899 to 1519
  VARIANT 222..1519: note = Derived polymorphism lacks residues 222 to 1519
MNGEMARAEALPQEEAPGFGVDLYAQATKAVSLRTPFEGDEAAPRVPTLPARLVSWAGPGDARKKHKKILPPPPDDAAPEPPPQSPVATPAKVGLWDQFEAYFRPVTLADIEMLRPKLPFGYSNVDSCMLIPFLGSGKELINQAETYDVAVAETTSYLGVGGEEVVSNRERGVQSVHLASQKERNDQSDEHDIHDVVVQQMVSDKELNMHRGEHGIHEVSVQLGGRSFGVDQAGSSSGVVLAQCPKEEGTSLNWLLGATGRFVLTSERPNKKRKLLGVDAGLEQLVLLPRVGAEASSSCDVCCLGESSMESNRIVNCSNCKVSVHQKCYGLHAVPDGQWLCAWCTYLESTGWSLKEDAGGTPSMPCALCPKEKGALKPVKVEPTRNAGVGHQKFVHLFCSLWAPEVFVEDMESMEPVFSLENVQENRMKLTCSICKIKHGACVRCSHGTCRTPFHPVCARESKHQMEIWGKSRHPNVELRAFCSKHSAVGYTSSVENSNLASELNPRKSGPDNTTLNSGKIPILRFTRKNKDKFTNCGTSTSSSGNLIRVKTIEQGALANTVRNANTQPIQIWERGTGHPSVGGDHMGSSGDIAVVLRKLIDSGKISVSDIASEVGISSESLEAALVGETTTFSHGLTLKIMKWLQNYVQMHSAQGDVCKGSSEVVQESKSDRLVTTDTVDVKNPLVLDDDKGVGVLVDLLDSSVTEPAQTRSESNSKILNENSATCATGVTILQNGKKNMVKEGYNPECSAKEFANESTQDFSPISNKYVLKDEHGILILNATSGNKEFGTSTEIPNENQGALRGRKINDLTDVELGPCLEKGVSSHDHCFVRGDNGRDRVDSVENSFNARDFAHHSLAVCSFDDSHSYIHPFIQKKISHHWDITFNQNKEALNHYIQESSYPSLEKVPTDSSVEVEGTADTTATGQVLKARSLKILEHSPDDEVEGEMVYLQSRLLDNAVVLKHRYEKLIAMVVQNLSRELDALSKRKWDLIFVNQFLRDVREAKKRGRKEKRHKEAQAVLAAAAAAIASSSRNSTVRKDAKEDAPKSSPKLAAGSSRVGQRTSLPQANDSSKSSNSKISSDKKSGSFLLPISSKENGLYCDVCMRTETLLNRIFVCYRCKAAVHINCYRNLENSIGPWNCELCEDQDISSEAATVSDKSHCNGKKLPFAQCGMCHGTSGAFRKTVDGKWVHAFCAEWLLDTKYVRGQDKPVEGTESLVEGKDTCCVCLHNVGVCLRCSSGDCNITFHPTCARSCGFYMNTKGFGTTPQHKAYCGKHSVQQKEADAQQYGPEELTSMKRMRVSMPDLHYIVSLCLVELEKLRLLCERIIKREKVKRETVLCDHEILAKTKDTVIFSYLACGASSESATTSVNNRSYSGAAQRSDDVTVDSTISGKKTIRFSLNNRGADRNTADSSRTLLSFKRKLSERGPRAGKQLPQRPTIAAEKLEDEDKKTTDKKITMQQREMFQKELIMTSDQASTQNLRLPKGYAYVPRDSLSKEKLWKQNTQPHNPQEPGG

SEQ ID NO: 10371 - protein, 262 aa, Zea mays
  VARIANT 69: note = Ancestral polymorphism is S, Derived polymorphism is C
  VARIANT 81: note = Ancestral polymorphism is D, Derived polymorphism is A
MVKGAQLQDAAADAARNAAAAAARQQGCGGGGPAGCGKRQYKGVRMRSWGSWVSEIRAPNQKTRIWLGSYSTAEAAARAYDAALLCLKGSAADLNFPVHLPFHIPAAAMSPKSIQRVAAAAAANATCGSPLQAGAGAAAAAPHYYSYSSSAASTMAADGATPPCSYGDASSGVSSPETAGNTDDLCYGVAHDDDVDMVAGDADLAALADIESFFRSPKCMEYAMMDPCSTFFAPAPMATDAASEWEWEEEGEIDLWSFSSLN

SEQ ID NO: 10372 - protein, 443 aa, Zea mays
  VARIANT 14: note = Ancestral polymorphism is V, Derived polymorphism is I
  VARIANT 56: note = Ancestral polymorphism is A, Derived polymorphism is T
  VARIANT 132: note = Ancestral polymorphism is S, Derived polymorphism is I
  VARIANT 191..443: note = Derived polymorphism lacks residues 191 to 443
  VARIANT 342: note = Ancestral polymorphism is W, Derived polymorphism is R
MAKSRREISFGLAVVLSLTAAALVRTGHGADAAFARASGTRFTIGGRPFYSNGFNAYWLMYMASDPADRSKATAALDEAARLGATLVRTWAFSDGGYRALQVSPGVYDEEVFRGLDYVISEAKKRGIHLILSLVNNWDGYGGKKQYVQWARTQGHSLNSDDDFFTDSVTKGFYKNHAVLTRVNKMTGVAYKDEPAIFAWELMNEPRCQSDLSGKTLQAWITEMASYVKSVDPNHTVEIGLEGFYGDRVHARPQAPVQPGRVHRRHRLHLQQPDPRRRLRHDPLLPRPMVSCCNDTQGARSNAWRRPRWERLPIDLVPRITCVVHCRVPGASDGAQVAFMRRWMASHAGDAAAVLRKPLLVAEFGWSARSNSYTVSMRDAYFRMVYEAIYASARAGGPLAGGLFWQVMVPGMESWTDGYDVVLDRSPSTAAVVGQECSRMTGLN

SEQ ID NO: 10373 - protein, 182 aa, Zea mays
  VARIANT 54: note = Ancestral polymorphism is R, Derived polymorphism is W
  VARIANT 12: note = Ancestral polymorphism is I, Derived polymorphism is N
  VARIANT 3: note = Ancestral polymorphism is K, Derived polymorphism is N
MDKAWQRNLHLIGGGGGGGEKKACPAAAPALGLQKHKSWSPDIERDEVWERRRRDMRRGGTALRRARSVTDDDLAELRGCIDLGFGFEPAESVCAACGCAVRNRLLDTLPALDLYYAVHGGGGACEAEGPKCSCGAASEASSDESPLGSPMSILSPGDPPETVKMRLKQWAQVVAMSLLSRR

SEQ ID NO: 10374 - protein, 235 aa, Zea mays
  VARIANT 106: note = Ancestral polymorphism is R, Derived polymorphism is S
  VARIANT 154: note = Ancestral polymorphism is A, Derived polymorphism is G
MHFPSPRALAMAAPAVARPRLAPVAHPASTSCLLALWDRRRGHGRAVAAVRAREQGAAPPDPAAFLRRPEVATVTSTEEEREADAGSSFDGPGEDEAPEEEGVRGRRKAPEREWVDWEDLILEDTVPLVGFVRMILHSGKYESGDRLCPEHEKAILERLLPYHPQYNEKIGCGIDYITVGLHPEFENSRCLFIVRKDGEQIDFSFWKCVKGLIRQKYPMYADSFILRHFRRRQDY

SEQ ID NO: 10375 - protein, 230 aa, Zea mays
  VARIANT 90: note = Ancestral polymorphism is R, Derived polymorphism is S
MTSRLESGGFQLPNTEQENALLLRALISVVSGDTAAASLVPEAAAAEAPAAAASACGCPGGCDLAAASSSDSDGAECSASGGGAGKRRRRRSRASSYMGVRRRPWGKWAAEIRDPRRAARKWLGTFDTAEDAARAYDAAAVELRGRRAKLNFPDAAAAAAARDVQPRRPLPGQSLRENCGSNAASPLHVAVARAPTTLQGTGPAPPKDQDIWDGLNEIMTMDDGSFWSMP

SEQ ID NO: 10376 - protein, 102 aa, Zea mays
  VARIANT 25: note = Ancestral polymorphism is S, Derived polymorphism is N
  VARIANT 38: note = Ancestral polymorphism is E, Derived polymorphism is G
MAFMRYYRALPQGETTVEEFRAWLSQFDADGDGRISREELERALRSLNLWFVWWKAREAVRAADANRNGAVDGDEMGRLYAFAHKHLHLKMSQLGLGLGLEE

SEQ ID NO: 10377 - protein, 63 aa, Zea mays
  VARIANT 16: note = Ancestral polymorphism is T, Derived polymorphism is I
MARGIARASSFGGRATTPWCSCRHVTVDVCLGKLVAALLVLRSLTAPAPRFLRAHLSQPLVPS

SEQ ID NO: 10378 - protein, 152 aa, Zea mays
  VARIANT 100: note = Ancestral polymorphism is G, Derived polymorphism is E
MSGSQVGGGGLRGWSPFDVIRSFPSTPESLMSQIDAAIVSTEYARACALLDPSQVSASSPPEIDPEGQGDRGASPLPPACYDARVADEAYRAACAALGAGRPDAAVRSLRAALASCPPDKAAAVAKVRSMLAIASAQLHKQQHQAQQQQSRN

SEQ ID NO: 10379 - protein, 185 aa, Zea mays
  VARIANT 150..185: note = Derived polymorphism lacks residues 150 to 185
  VARIANT 129..185: note = Derived polymorphism lacks residues 129 to 185
  VARIANT 102: note = Ancestral polymorphism is G, Derived polymorphism is R
  VARIANT 64..185: note = Derived polymorphism lacks residues 64 to 185
  VARIANT 42..185: note = Derived polymorphism lacks residues 42 to 185
MSTQGNCETHGVAVPGTKDAGKGKAGQSSGDRQEEKLPKCEQVDYGSEVEGCADDENPGKRAALVTLVGNEYCGDEDERVQVLTIVKKDEPAYDIDDRINPGTVAGCLEAKGVVGASAATSVVRPAGSRSSSFHGVTRHRWSGKYETHLWDSSCRVEGHRRKGKQDCKAARPLFPAREDRLSLQS

SEQ ID NO: 10380 - protein, 402 aa, Zea mays
  VARIANT 316..402: note = Derived polymorphism lacks residues 316 to 402
MEVMSPAPPQEFLLDSAASAAYTPKPAIMNPFACTDDVAVGNPFLATAVTAPSSPNPFEQLPPGASDAGPFDLFEHFTSAPTSPARAAAIYAQFDSVSGGAIGKDDDDDDDVGFQPRVSYSMSKPAVVTTVPFDWEEKPGKPKAEFASVSATVVVEAGETDGADFDFGVLLDKAAQAEELTTADELFNDGKIRPLKPPPRLLEGGSVGSSPRSARSVMWSPRLRGLAGHGSANNANFDPFAAALAKAANAPSPLGAGTKHDAGGVGAAASPPSSPPVTGNGGGRKKWRLRDLLLFRKAAKGRTTAAGSVSKDPVFKYAPVQQRGVPEKAAIAGPVAAEGDASSGKHKKQSKKAAPAEGGMAMPMPMPQRQNLMMGCVRLHPGLHRLAKGFHGHAAPPGRRHE

SEQ ID NO: 10381 - protein, 221 aa, Zea mays
  VARIANT 91: note = Ancestral polymorphism is S, Derived polymorphism is C
MARERREIKRIESAAARQVTFSKRRRGLFKKAEELSVLCDADVALIVFSSTGKLSQFASSSMNEIIDKYSTHSKNLGKAEQPSLDLNLEHSKYANLNEQLVEASLRLRQMRGEELEGLSVEELQQLEKNLESGLHRVLQTKDQQFLEQISDLEQKSTQLAEENRQLRNQVSHIPPVGKQSVADAENVIAEDGQSSESVMTALHSGSSQDNDDGSDVSLKLG

SEQ ID NO: 10382 - protein, 246 aa, Zea mays
  VARIANT 141: note = Ancestral polymorphism is L, Derived polymorphism is S
  VARIANT 122: note = Ancestral polymorphism is A, Derived polymorphism is D
  VARIANT 111: note = Ancestral polymorphism is F, Derived polymorphism is L
MPADIVVIRLPGPRALRVLARSVLFAVALLFLPWLRPAEAPARGRAVDTCGAAAAQAELLLRDLHQEGLPVHGARAVVLVANGVCDSTAPKQDLRRMLMIGESSVDFLLDFGYFNEDADRFAFADRVLKHGGILAAPIDSLSAFSLPQNYRTIYIHRFAEAFIGVKKVAPAEDNSHAGTSTRTELLSPPAFDLKEGVFYSRPDETTNCEFKNMARKLLLSDITGTPTAYSYKRKLLVQMLRKDQES

SEQ ID NO: 10383 - protein, 791 aa, Zea mays
  VARIANT 505: note = Ancestral polymorphism is H, Derived polymorphism is L
MSAADPSAAPAAAADPDGPDSVRLTWNTWPRSKVEASRCVVPLAATISPTRVPDPSAASPPPLPYPPLRCKPPCSALLNPFARVDFAAKIWICPLCFSRNHFPPHYAAISESNVPAELFPQCSTVDYIVGGAGIPGVGGAPPPPPPVFLFVIDTCVIEEELEYVKMAMRKAVALLPEHALVGLVTFGTQVHLHELGFSDLSKIYVFRGTKEISKDQILDQLGLAGAGRPGFPKMPQQPGGPQVNGMHPPSTAGVNRFLLPVSDCEIALSTLLDELQPDQWPVEAGNRAIRCTGVALSVAAGLLGACMPGTGARIIALLGGPCTEGPGMIVSKDLSEPVRSHKDLDKDAAPHFQKAVKFYDGLAKQLVSQGHVLDVFASALDQVGLAEMKVAIERTGGLVVLSESFGHSVFKDSFKRIFEGGEQSLGLSFNGIIEINCSKDIKVQGIIGPCTSLEKKGAMCSDTVVGQGNTSAWKMCGLDRNTSLTVFFDVSPSERSSQPGNQNPHLYIQFVTSYQHPEGQMRIRVTTICRKWVDGSTNTEELVEGFDQETAAVVLARYISLKMEMEEEFDATRWLDRSLIRLCSRFGDYRKDDPSSFSLHSNFSLFPQFMFNLRRSQFVQVFNNSPDETAYFRMLLNRESITNSVAMIQPSLISFSFDSPPSPVFLDVASIAADRILLLDAYFSVVIFHGMTIAQWRNMGYQNQPEHEQFAQLLQAPHEEAQMIIKGRFPVPRLVVCDQHGSQARFLLAKLNPSATYNSAHDVAPGSDIIFTDDVSFQVFCEHLQRLAVQS

SEQ ID NO: 10384 - protein, 250 aa, Zea mays
  VARIANT 234: note = Ancestral polymorphism is S, Derived polymorphism is F
  VARIANT 77..250: note = Derived polymorphism lacks residues 77 to 250
  VARIANT 75: note = Ancestral polymorphism is N, Derived polymorphism is I
  VARIANT 32: note = Ancestral polymorphism is R, Derived polymorphism is H
  VARIANT 28: note = Ancestral polymorphism is K, Derived polymorphism is E
MEKQYADVLAPPKDCVAPKKFGLKVVQKLTKRNSTVPYTVPEDLGILLNTLKRLLDVLRPRIESHLKSWSSCIPNGGNSAAIGEKLSEVTVTLRAKFRNYMQAVVEKLSENTRMQNTTKLKKIIQDSKELVLESDIRTRMQALKDQLIQAINHVHKVSEVHVFVAICRGFWDRMGQDVLSFLENRKENKAWYKGARVAISVLDDTFASQLQQLLGNTIPPKDLEPPRSVVEVRSILCKDAPRQKNSSFYY

SEQ ID NO: 10385 - protein, 177 aa, Zea mays
  VARIANT 96: note = Ancestral polymorphism is E, Derived polymorphism is K
  VARIANT 17..177: note = Derived polymorphism lacks residues 17 to 177
MVMCKAEGARCRRHRQQGAGVCACCLRERLSHLSLPPSVVRGCGEEEGYRHSRYHEEEASSSCSEVSTAYSSEGSSVASASECASPAPGEPRFHDEVRRAARVSLLMRHERVVGDADAVAAFLLARRRRRTAATSFWAKLLHAARAGGGKKDRGCSLAAPGTKTLEERAAAAKWVLF

SEQ ID NO: 10386 - protein, 205 aa, Zea mays
  VARIANT 21: note = Ancestral polymorphism is S, Derived polymorphism is F
MASSWGSRLPLAVVLLLVACFSSTAAATSYTVGDGSGWTTGVDYTSWAASKNFKVGDNLVFNYAKGLHTVVEVSAAEYMACTAANPLGSDSSGATTVALRTPGTHYFVCSITGHCGAGMKLAVTVGGSNSPAATPRTSSPTPTTPYTTPATTTPYTTPTCSGGGGTTATPGMTPFTSYPSAAGLGSAALAGFSLVWCVGVRLALL

SEQ ID NO: 10387 - protein, 345 aa, Zea mays
  VARIANT 201: note = Ancestral polymorphism is G, Derived polymorphism is R
  VARIANT 148: note = Ancestral polymorphism is R, Derived polymorphism is W
MALEAVVFPKEHLAGTAKARSASSLACGFRTEEVEDNGGVVLQGEASDAPGAGAATTWECWDAALCPCSTPPAGAVEECWDDVRHRLSASPPLPPAPSAAVAAPSSGHGKAAAAARRRRRQRPKAVKNTEEVESQRRNHIAVERNRRRQMNEYLSVLRSALPPSYPQRGDQASIVAGAINFVKELEHLLQSLEAQKRRRQGCTEPPAPAPFAGLFTFPQYSTAATGVVAGSGDGAGSGGGACAAGARRGVADIEVAVAESHASVKVVTPRRPRQLLRMVVALQCLGLTVLHLNVTTTADQLVLYSLSLKMEDQCRLSSVDDIAAAVNDILGKISDERASRHLLAA

SEQ ID NO: 10388 - protein, 670 aa, Zea mays
  VARIANT 554..670: note = Derived polymorphism lacks residues 554 to 670
MWVFYLISLPLTLGMVVVTLRYFAGPAVPRYVVATVGYAWFCSLSIIILVPADIWQTLTASAKGGIGFFWSWSYWSTFILTWAVVPTIQGYEDAGDFTVKERLKTSIHMNLLFYSIVGAIGLIGVILLLIMHRAWDGGIVGFAMACSNTFGLVTGAFLLGFGLSEIPRNIWKNAYWSHRQKVLSHRVAKMAVKLDNAHQEYSNAIVVAQATSNQMSKRDILRPYMDIIDNMLSQMLREDPSFKPSGGRFGENDMDYDTDDKSMATLRRQLRRAHEEYYRGKSEYMTCVMEALKLEDTIKNYERRDASGWKYVSSFRDRRSGTLGPILDTIGCCFCTLDVYVHLHILFIIQDWYVDVLFPDSKTNQLCQLAYDLMVARYAPPISYNFLNLIRLGGNAKTTFEKRMGNIDDAVPFFGRGFNKIYPLIMVVYTLLVASNFFGRVIDFLGSWKRFKLQQEEENIDGLDPSGMIIVQKERSWIEQGCKVGEHVIPLARNFNGVNTDIESQNVPLVGNTVEMKVGAASSRNDGRAGQLKYANSRETIASKYTSIREQNRQSGKAVKKEISSNSVSLLEERSSEQWSNTGIPPTGVSATWASMKIGFQNFKANLGSKKFLPLRQDPGFVLNLSVSSPESLDDIFQRLKRRPANVLVDYLDDDDNNNTRDMDVHFQDQ

SEQ ID NO: 10389 - protein, 93 aa, Zea mays
  VARIANT 4: note = Ancestral polymorphism is K, Derived polymorphism is R
  VARIANT 5: note = Ancestral polymorphism is K, Derived polymorphism is Q
  VARIANT 13: note = Ancestral polymorphism is G, Derived polymorphism is E
  VARIANT 36: note = Ancestral polymorphism is L, Derived polymorphism is M
  VARIANT 39..93: note = Ancestral polymorphism lacks residues 39 to 93
  VARIANT 49: note = Ancestral polymorphism is R, Derived polymorphism is Q
MGSRKAHGVLEEGSWRMKRITRSIPLPLLKRERRRLQGWRQMIMGATIRLRRFPSLASSLYPTDSLCCLASLCHTKFDSAEAQVSKKYGFVDV

SEQ ID NO: 10390 - protein, 742 aa, Zea mays
  VARIANT 140..742: note = Derived polymorphism lacks residues 140 to 742
  VARIANT 104: note = Ancestral polymorphism is S, Derived polymorphism is F
MSIAAVSADGLLALADEAERRYDFSAAAACLESALRPPYAAALLPLTEARARLRLASLLLAPRGSSRVPRAGAPAAAKTHLERALLILSPLPSAPPRLKLLAHSHLAGAYAVLGAIASQKHVLHRGLGLLDSASASGLLQREPALLWTCNFQAQLGSVFTNDGDAASALSALSVGASAAAELGSPQLELFFAASELHVHLLCWEDSAAVENAVTRASLLWDALTAEQMEHWVGLFFYTQLLQTFYLLRICDYKAASQHVERLDTAVKSEMQRGRQITALANDLSTLERTLGQSGLKEREMLALSHKQRQLKGQLRALCGYDSLNDVLDYGDKLLLAPPLMHGEWLPRTAVFVLVDLMVVMVGRPKGIFKECGKRINSGLRLIHVLCKCTCSIFTCVALSDLFSLFNYHCYTEADLEHSTIWTAGLYLILLLQFLENKVAVELTRSEFVEAQEALAQMKNWFTRFPTILQGCESIIENLRGQYAHSVGCFDEAAFHFLEAKKLTESKSMQSMCETYAAVSYICKGDAESSSQALELVGPAYRTMDSFVGVREKTCIIFVYGLLLMRQHNPQEARNRLASGLKIAHQQLGNIQLVSQYLTILGTLALQLHDAAQAKEILKSSLTLAKTLFDIPTQIWILSVFTELYRELEEKENEMENSEYEGKKEDDLQRRLSEAYSHSFHHELVEKSRIQPLHMSSKQPEMAVPSANGDLDIPESVGLSAPQPFLKRLVEAEPMRRSTRRRR

SEQ ID NO: 10391 - protein, 266 aa, Zea mays
  VARIANT 84: note = Ancestral polymorphism is D, Derived polymorphism is G
  VARIANT 86: note = Ancestral polymorphism is R, Derived polymorphism is W
  VARIANT 88: note = Ancestral polymorphism is V, Derived polymorphism is M
  VARIANT 105: note = Ancestral polymorphism is A, Derived polymorphism is V
  VARIANT 118: note = Ancestral polymorphism is T, Derived polymorphism is A
MDDEEHEVYGQEIPEDGDMDGADVDMAAAGDDAAKLQELDEMKRKLKEMEEEAAALRDMQAKVAKEMQGGDPSISTAEAKEQVDARSVYVGNELAWRHLMWLVAAGPLISPEWCISMTYLRFNTHLTHIVSHFNGFSCFAIHMPSKVDYACTPEEVQQHFQACGTVNRVTILTDKFGQPKGFAYVEFLEQEAVQEALNLNESELHGRQIKVAPKRTNVPGMKQRPPRGYNPYHGYPYRSYGAPYFPPYGYGRAPRFRRPMRYRPYF

SEQ ID NO: 10392 - protein, 335 aa, Zea mays
  VARIANT 99: note = Ancestral polymorphism is P, Derived polymorphism is L
  VARIANT 66: note = Ancestral polymorphism is Q, Derived polymorphism is R
  VARIANT 31..335: note = Derived polymorphism lacks residues 31 to 335
  VARIANT 20: note = Ancestral polymorphism is A, Derived polymorphism is T
  VARIANT 11: note = Ancestral polymorphism is R, Derived polymorphism is G
  VARIANT 4: note = Ancestral polymorphism is C, Derived polymorphism is S
MGECEDGKEYRCWEELLPDALGLIFRNLPLQEVLTVLPRVCKSWGRVVAGPYCWQEIDIEEWSQQQSKPEQIGRMVELLVGRSGGSCRRISVSGLPCDPLFSFIADNARALGTLEIPRSEISDSVVEAVAPRLSNVTFLDISSCTKIGARALEAFGRHCRSLVGLRRVMHPIDLADKVCQHDEAHAIARSMPRLRHLEMGYMLVATEAVLEILEQCSELKFLDLRGCWAVDDRFLRERHPGLRVLGPRVVDDCYENSYWEECSDYYSDEDEDYDDDVVSWGLFVDDDDDYYYAVGSDDDEAIWDDAQGLENLEVRFYGGGGFGESFAGFDWPPSP

SEQ ID NO: 10393 - protein, 181 aa, Zea mays
  VARIANT 155..181: note = Derived polymorphism lacks residues 155 to 181
  VARIANT 151: note = Ancestral polymorphism is P, Derived polymorphism is L
  VARIANT 122: note = Ancestral polymorphism is R, Derived polymorphism is C
MARLNEGLSLFDAILIVPMFQITWTFFSICIGFVYFQEYQVFDTLRIIMFVLGMTFVFVGISLLAPDDSKGDTKDGSSTAEDSIIDIDMFYSTNLNGKMLMEETDTDDSISFVTSVKVNAKRVLSKAKSACSMSLGLGESTISASSVLAMPMVSSRTTGFRGIENDRPKYVPLRTTDWSNL

SEQ ID NO: 10394 - protein, 403 aa, Zea mays
  VARIANT 153: note = Ancestral polymorphism is R, Derived polymorphism is I
MLNDEFNGITRNPGLDLYPAHLRASIDEANELVYDAINNDVYKCGFAKKKDDRVLVPDLGSLTSIHDRARELFYYLKGGQVDYGEEHSKACSHNRFGRIYHTGHYPICYEHNPVHFVGHSAGAQVVRVLQQMLADKIEHTPFNRIGETQTILRLLSVVLHSTPDRDNYWKMMHKYIGSDVTSLVTLPVIIFEPMTMLQKMAELMEYCELLDKADECEDPYMRMVYASTWAVSVYFAYQRTWKPFNPILGETYEMVNHQGITFLAEQVSHHPPMGVAHCENEHFTYDITSKVKTKFLGNSLEIYPVGRTRVTLKKSGVVLDLVPPLTKVNNPIFGRTWVDSPGEMVMTNLTIRDKVVLYFQPCGWFGSAAALTASALGMSGSTVAPPRRGCGPWPRSSGKWLTV

SEQ ID NO: 10395 - protein, 325 aa, Zea mays
  VARIANT 48: note = Ancestral polymorphism is P, Derived polymorphism is A
MAPPHSHRSFRGWQNASHVALVLVSVLFLSKARPSAGARSLLELYKPPASALLTYHNGAVLQGRIPVTILWYGRFAPAQKAVVTDFLQSLTTTASPPSPSVSQWWGTIDQLYLSKARSGGGGSAQVALVGQAADEGCSLGKRLALSQLPQLAARAGPAAKGGVALVLTAQDVAVDGFCTSRCGLHGSDAGAGAAYVWVGNAETQCPGQCAWPFHQPLYGPQAPALVPPSGDVGMDGMVVNIASMVAGAVTNPFRDGFYQGDKDAPLEAATACTGVYGSGAYPGFAGNLAVDGTTGASYNANGANGRKYLLPALFDPATSTCSTLV

SEQ ID NO: 10396 - protein, 115 aa, Zea mays
  VARIANT 8: note = Ancestral polymorphism is R, Derived polymorphism is G
  VARIANT 20: note = Ancestral polymorphism is L, Derived polymorphism is I
  VARIANT 23: note = Ancestral polymorphism is A, Derived polymorphism is T
MAVISPRRALVAAVSLCLLLGAATSIRTATFSPSQAQENLAEDKSRLGSTPPICRNRCSACNPCMPVQVTTAPAGLGRAARVTDADADAVAGFSRYSDYKPLGWKCGCDGRLYDP

SEQ ID NO: 10397 - protein, 484 aa, Zea mays
  VARIANT 141: note = Ancestral polymorphism is L, Derived polymorphism is H
MGSLGSAAQQQPQQPHAVCLPYPAQGHITPMLNVAKLLHARGFHVTFVNTEYNQARLVRTRGAAAVAGLPGFRFATIPDGLPPSEDDDVTQDIPSLCKSTTETCLGPFRRLLADLSDPPVTCVVSDVVMGFSIDATKELGLPYVQLWTASTISFLGYRHYHLLKSRGLAPLKSVEQLTNGFLDTAVEDVPGLRNMRFRDFPSFIRSTDPDEYMVGYVLQETGRTAGASAVILNTFDELEGEAVAAMRSLGLARKVYTLGPLPLLAREDPPTPRSAISLSLWKEEEECLRWLDGRDPGSVVYVNFGSITVMTSEQLVEFAWGLANSGRPFLWIIRRDLVRGDTAVLPPEFLSETAGRGLMATWCPQQAVLDHPAVAAFLTHSGWNSTLEAMCGGVPVISWPFFADQQTNCRYQCNEWGVGMEIDSNVRRDAVASLIAELMEGEQGKEMRRRALEWRDKAIEVAKPGGTSHRNFDDLVRNVLLPKN

SEQ ID NO: 10398 - protein, 161 aa, Zea mays
  VARIANT 61: note = Ancestral polymorphism is D, Derived polymorphism is G
  VARIANT 56: note = Ancestral polymorphism is A, Derived polymorphism is V
  VARIANT 51: note = Ancestral polymorphism is G, Derived polymorphism is D
  VARIANT 44: note = Ancestral polymorphism is R, Derived polymorphism is C
  VARIANT 41..161: note = Derived polymorphism lacks residues 41 to 161
MATSSSSSGPGGPYHHHRSRFGDTTLTKVFVGGLAWETPSEGLRHHFEAYGDILEAVVITDRETGRSKGYGFVIFRDPGAAALAVQNPNPVIAGRRANCNIAAFGPPRTAQPRGRGGGGGAVREPHGPDQPPQGSPYSYRLPSQMTPPQAAAVFYSPQYGG

SEQ ID NO: 10399 - protein, 323 aa, Zea mays
  VARIANT 3: note = Ancestral polymorphism is R, Derived polymorphism is W
  VARIANT 4: note = Ancestral polymorphism is R, Derived polymorphism is L
  VARIANT 52: note = Ancestral polymorphism is S, Derived polymorphism is W
  VARIANT 86: note = Ancestral polymorphism is Y, Derived polymorphism is C
  VARIANT 111: note = Ancestral polymorphism is S, Derived polymorphism is Y
  VARIANT 175: note = Ancestral polymorphism is S, Derived polymorphism is W
MARLLLWWTALLLPSLLAGVGPAAAAAASPPHDACLVPTIAQSVLRTPDTCSTLDRRLGDPVGVIEGDEVTLARAVNLLHANKDDYIAVLFYASWCPFSQECKPNFETLAYLFPAIRHFAFEESAIRPSIISRYGIHGFPTLFLLNSTMRVRYHGPRTVKSLAAFYTDVSGINASVKSTAGEAMVHPLDDIEHKKDAEQENCPFWWARSPENILQQDTYLALATVFVILRLLYRIFPKIDSFTRWAWRRHNMFAKLMGAHEYFLTYLEQARQKFHRLYPSSSKRGNLQEGAMNATAWASKSLASVSIGEPSAIGRTNSTSELR

SEQ ID NO: 10400 - protein, 161 aa, Zea mays
  VARIANT 97: note = Ancestral polymorphism is R, Derived polymorphism is G
  VARIANT 90: note = Ancestral polymorphism is L, Derived polymorphism is H
  VARIANT 45: note = Ancestral polymorphism is A, Derived polymorphism is V
  VARIANT 40: note = Ancestral polymorphism is R, Derived polymorphism is Q
  VARIANT 27: note = Ancestral polymorphism is A, Derived polymorphism is E
MATMSLAAASPLASIPRGIAAQAPCAAFLSIRLGGATATRFAGLAVASQPAERRAAAMVAMAKREQELEEIRAMTTEQMEEEVVDLKGELFLLRLKRSARQEFKNSEFSRMRKRIARMLTVKREREIEQGINKRLSRKLDRKWKQSIVVRPPPSLRGNKEE

SEQ ID NO: 10401 - protein, 1045 aa, Zea mays
  VARIANT 706..1045: note = Derived polymorphism lacks residues 706 to 1045
MRATGEHTTAVPMPAPPPPPAAASASEEDDKERRKNRRRSSRRSRQAAVAAPQGLHADAAGPRTVRSMPPMHVGSSAGVDAEAEPSAAGTSQSCPLPPTPRPTEAPVSRLGRGAPGTRYFQPHWPERAVEEAVKAYCTIDGVSVDVLITGLAQNRAVEGDLVAITLDPVAHWTRMKGPNVACNPLIGDSVVCEVSETNRNHSWKKGQADDGCKFENCSNGVPVLDRTHPPHKNSGFSQAVKCGNGNATIPERNEIDLNDGKSEVARALQRISATIYSHPSRRPTGKVLSIIKKSPRRDAIVGFLASFSEFPDGEQQKNQMGLNRMNNRTQSVTGLFYLLPTDPKFPQMVVSFSTLPDSVRQSLRGNVAVKKELVAARIDEWNEENLYPYAHVIRFLGKVGHVKTHMDAILFENVICDAEFSPESLACLPDNCWKIPQKELEARKDLRKVLTFTIDPPTASDLDDAISIEILSGGTVRIGVHIADVSYFLHPETALDAEAQSRSTSVYTLKHKISMLPSGFSEVVSLNPGVDRLAFSIIWDIDPHGNLISRWIGRSIIFSCCKLSYELVQDLICNETSQTRPEVSSLEVHGIFGRDDVIKSLRGLYEVSKNLKEIRFKGGALSLDTAKIMILFDEDGDPCDSYRYVRKNACFIVEELMLLANMSAAEVISNAFPDCALLRRHPEPNLRKSREFEAFCAKNGFELDVSSSGQLHLSLSRIKEKLQEDPVMFDIIMFYASKQMQSAEYFCTGDLISKKDDWAHYALSVPLYTHFTSPLRRYPDIIVHRTLNAVIEAEQVYMKQKKSSAGQNGVKASCELMDMCFTGLQLCKDAAESEEGKKALSAAAKKFKVPSSENLGEIAEHCNERKWAGRRAEEAGQKLYMWALIKNKETVVCNARVLGLGPRFMSVYVPKLAMERRIYYDEVEGLSVEWLEVTGTLVLDTCRNKPAQRRGTQMKRRPIEEVAVVVNPSELSEEDEESGATEAGGCTAKSVLLSGDAVKAQTAPAVLPLVIHYLSDIPVVLHAIGGEDCAVDIGVRLYMASYFKL

SEQ ID NO: 10402 - protein, 402 aa, Zea mays
  VARIANT 269..402: note = Derived polymorphism lacks residues 269 to 402
MGYLPSLSSKAAHFVSDLTTVILSPVSERETSHLPEVDEVLENLDDDKDSEHNSDSLDGPDTSSFRAFLISFLSSSSSNNDSMEIIPEQNGDMGYPTLTPMGKGSKGRTGLLSRGKHSIGKIINKAARISGFKQTTAEPKIDREAVTHTEPDAPVLEHQEPKEVASFGSLPTMSEPSVLLSELMQRILYASLPALAQGRNWVLLYSTWRHGISLSTLYRRSMLCPGFSLLVMLLFPKCLKSLSDIISKKGVMDCLLLLFHSSSSDAMLQVVGDKKGTVFGGLVEAPLQPSSSKKYQGTNNSFVFTNLHNRPVIYRPTGANNYFTMCSTDYLALGGGGHFALYLDADLLIGSSSNSETFNNGCLSHSSDFSVKDVELWGFVYPSKYEEMLTLCRTEKPGICRW

SEQ ID NO: 10403 - protein, 199 aa, Zea mays
  VARIANT 132..199: note = Derived polymorphism lacks residues 132 to 199
  VARIANT 20: note = Ancestral polymorphism is T, Derived polymorphism is R
MYSFDLEQDHTAAAARTTATTTYQPCARGARSLQLSGAHHYHPGEQALRTAAAVRPRRAKSSSSRKHAPSSSRRSSTTVVATDVSNFRAMVQELTGFFPPPAAVFRPLPRRVHATSPSVAVAVAAGQGCGWERRGSHGSSEAANSSTAGGGSSPDEGPAVPPPLVVAPQPQFAPLGVFDGLPDLGSPEFGWWGDLSIDF

SEQ ID NO: 10404 - protein, 337 aa, Zea mays
  VARIANT 275..337: note = Derived polymorphism lacks residues 275 to 337
MLHRRSRTLGGSSDRAARRAVATKSGTRGSGNGAATDLLVCFPSRAHLALMPPKAICSPSRPPSASEPVKRRHSTSRAGPTPLPPSWPGLYKSATCTARNPPIHRHRGADRAPVDDEPTSPKVTCAGQIKARPPKPSGGGKKATWLQALGIKKDAMALLDALHGAFRFNVAGCFGSFPGAAGVAGYTSAEDDDDDEEEEEDVPRAEKDTEHGGAARARWFMVLEEGNKKVSTKKLQGQEPERSQEEDAAPPANALMLMRCRSAPAKGLARRVEAEEEREDVKIATNKTPEKETEKERESLVLMTYSPDFFKVSLDIAKETWIVGGDDAVLRCRSWKR

SEQ ID NO: 10405 - protein, 187 aa, Zea mays
  VARIANT 38: note = Ancestral polymorphism is A, Derived polymorphism is T
MAKLAVLLLLLAVAASATVPAHGRDTPTEIKLIKGTDASGVGDDSMECVYTVFIRTGSILKAGTDANVTLELAAADGNGVGISNLPAWGGLMGQGYSYFERSNLDIFSGRGPCMAKAPCWMRLATDGTGDHHGWYCNYVEVTTTGPHKGCGQQLFTVEQWLATDAPPFKLEAVRDYCSGDAKGASAA

SEQ ID NO: 10406 - protein, 248 aa, Zea mays
  VARIANT 59..248: note = Derived polymorphism lacks residues 59 to 248
MSLTLLQGYSSAEDDDDPAAGAGAGTELSESGDSSAEEAGSDEDEESAPPKPPPKLRRRPNPKGGDAGGSDGGSLLPSALEAFADVSGPPDFLRHRVAEPEEGTEALGVLDRRGKEGSKQPPPGAVVVAKPQIVAIRERVTTTGANPPGSVTAGSIDGKRVIGAANPGPEDAADLLRMCLQCGVPKTYSHGKGMVCPQCGGRPMQTKEPEKKKGSTVKDKEKVKRMRGQSSHASWKSETEMALRQQFD

SEQ ID NO: 10407 - protein, 105 aa, Zea mays
  VARIANT 5: note = Ancestral polymorphism is A, Derived polymorphism is D
  VARIANT 74: note = Ancestral polymorphism is A, Derived polymorphism is T
  VARIANT 83: note = Ancestral polymorphism is A, Derived polymorphism is T
  VARIANT 87: note = Ancestral polymorphism is G, Derived polymorphism is V
  VARIANT 90: note = Ancestral polymorphism is I, Derived polymorphism is V
MGSHANGSTCAGDGPPPMEKRKEPAFPLKTMPLHANGWLNNMKLSSPTAVPVNIGNSVAFDPIYRAWTQKYPSALNAFERIAACGKGKKIVMFLVPPKKKMAQEF

SEQ ID NO: 10408 - protein, 356 aa, Zea mays
  VARIANT 118: note = Ancestral polymorphism is A, Derived polymorphism is V
  VARIANT 79: note = Ancestral polymorphism is A, Derived polymorphism is T
MTNQDVVVSEMGIAAGTALPGSSPALLACRGAAAGAMSLRYLDLAAAAARSASCTWVEAMRASSPTRSRAAADVDELTAWMRKHPSALGKFEQIASASQGKKVVMFLDYDGTLAPIVADPDAAYMSDVMRAAVRDVAKHFPTAIVSGRCRDKVRSFVDLSELYYAGSHGMDIEGPSSNPESVLCQPASEFLPVIDEVYKALVEKTKSTPGAKVENNKFCLSVHFRCVDEKRWNALAEQVKAVIKDYPKLKLTQGRKVLEIRPSIMWDKGKALEFLLESLGFASCSDALPVYIGDDRTDEDAFKVLRKRGQGVGILVSKCPKETNASYSLQDPGEVMDFLLRLVEWKRKSTTTRPPV

SEQ ID NO: 10409 - protein, 350 aa, Zea mays
  VARIANT 106: note = Ancestral polymorphism is R, Derived polymorphism is W
MSSANGTTNVHGKEAAPYEEQLFKIGKVRTDLGQLSGKSALYCSDASIARYLIARNWDIRKATKMLKKTLKWRSEYKPDEIRWDDISDEAVTGKTYRTDYFDKIGRSILVMRPGCQNTKNANGQVKYLVYCMENAILNLPHGQDQMVWLIDFAGFNLGNLSIQVTKMTADVLQGHYPERLGVAILFNAPKFFEPFWKMASPLLEKKTRNKVKFVYSDRPDTMKIMEDLFNMDELECAFGGKNPATFNINDYAARMREDDKKMPSFWSPENSALASEPYQMSSQKALGSVSGAKTEDAGSGKMDDMETAPEKSEESGTESGEEVQTRTESSTVEQKNLPGEDNAPADKSGL

SEQ ID NO: 10410 - protein, 341 aa, Zea mays
  VARIANT 290: note = Ancestral polymorphism is S, Derived polymorphism is N
  VARIANT 268: note = Ancestral polymorphism is L, Derived polymorphism is S
  VARIANT 262: note = Ancestral polymorphism is A, Derived polymorphism is S
  VARIANT 254: note = Ancestral polymorphism is V, Derived polymorphism is A
  VARIANT 184: note = Ancestral polymorphism is A, Derived polymorphism is V
MATSTSQHALSSIKLLSTGCLHPDKRNCRVLSVSVGRRCPSARNLGLLCASNSQSSVIEPVQLPRSPKSGVAPKKSGESALILIRHGESLWNEKNLFTGCVDVPLTPKGVDEAIEAGKRICNIPVDVIYTSSLIRAQMTAMLAMMQHRRKKVPIILHNESEQAHMWSQIYSEETKKQSIPVITAWQLNERMYGELQGLNKQETADRFGKEQVHEWRRSYDIPPPNGESLEMCAERAVAYFKDQVRILSDTVVLAELSFLHVSLHHTKLIFTVSVLGVEIVDRPLISQVISLELSTGIPMLYIFKEGKFIRRGSPAGPSEAGVYAYTKNLAQYRQKLDGIVQ

SEQ ID NO: 10411 - protein, 648 aa, Zea mays
  VARIANT 517..648: note = Derived polymorphism lacks residues 517 to 648
  VARIANT 442..648: note = Derived polymorphism lacks residues 442 to 648
MTDTVSDLLPFALASEHHHHSTPPPQLASLPATRSLTSHHPPLLPCSSPRFQLAKLSSRSSPPPPPIHRAALTSDPPGELISDPSMRFPFLFALQLVALAAAASAAEVAVTRSSRMVHRLSDEARLEVGPRVGWWPQRGSGEYYRALVRSDIQRQKRRLAVLSLSKGGSTFSPGNDLGWLYYAWVDVGTPATSFLVALDTGSDLFWVPCDCIQCAPLSGYRGNLLWCKVCTPLCDHKISHGQEQSIYVLMEINFSTVQLQLCSIINGASIMQDRDLRIYRPAESTTSRHLPCSHELCQSVPGCTNPKQPCPYNIDYFSENTTSSGLLIEDTLHLNYREDHVPVNASVIIGCGQKQSGDYLDGIAPDGLLGLGMADISVPSFLARAGLVQNSFSMCFKEDSSGRIFFGDQGVPSQQSTPFVPLYGKLQTYAVNVDKSCIGHKCLEGTSFKALVDSGTSFTSLPFDVYKAFTMEFDKQMNATRVPYEDTTWKYCYSASPLEMPDVPTITLTFAADKSLQAVNPILPFNDKQGALAGFCLAVLPSTEPIGIIAQNFLVGYHVVFDRESMKLGWYRSECRYVEDSTTVPLGPSQHDSPEDPLPSNEQQTSPAVTPATAGTAPLSCATTNLQMLLASSYPLLLLTMSSVFFVS

SEQ ID NO: 10412 - protein, 118 aa, Zea mays
  VARIANT 69: note = Ancestral polymorphism is R, Derived polymorphism is Q
  VARIANT 82: note = Ancestral polymorphism is P, Derived polymorphism is L
  VARIANT 109: note = Ancestral polymorphism is L, Derived polymorphism is F
MASGKEPIEVRFRLFDGTDIGPTKYDPSTTVSSLKEFILARWPQDKDIAPKTVNDLKLINGGRILENNRTLAESRVPVGEIPGGVITMHVVVRPPQADKNSGIADNFSLLFISFSWLP

SEQ ID NO: 10413 - protein, 499 aa, Zea mays
  VARIANT 419: note = Ancestral polymorphism is Y, Derived polymorphism is H
  VARIANT 141: note = Ancestral polymorphism is R, Derived polymorphism is W
MLACPSTSSPWPQRQPPSPCPGGGGGATRHVALAARSKRRGAGPAAAEGVDEAAAEAAELVRSLLRRTAGGKERLVPVLDRHVRVVRTEHCFLLFEELGRRDAWLQCLDVFRWMQKQRWYVADNGIYSKLISVMGRKGQIRMAMWLFSQMRNSGCKPDTSVYNSLIGAHLHSRDKTKALAKALGYFEKMKCIERCQPTIVTYNILLRAFAQAGDTKQVDMLFKDLDESVVSPDVYTYNGVLDAYGKNGMIKEMESVLVRMKSTQCRPDVITFNILIDSYGRKQTFDKMEQVFKSLLRSKERPTHPTFNSMITNYGRARLREKAESVVEKMEELGFKPNYVTQECLIIMYAHCDCVSKARQVFDELVTSQTKVHLSSLNSMLEAYCMNGLHTEADRLLDTALQQCVVPNGSTYKLLYKAYTKANDKLLVQKLLKRMNKQGIVPNKKFFLDALEAFGTSDRKPRTSPGINSASKPSTDSAGDSETATSDKPEVSVWHVAAT

SEQ ID NO: 10414 - protein, 590 aa, Zea mays
  VARIANT 38: note = Ancestral polymorphism is V, Derived polymorphism is A
  VARIANT 66: note = Ancestral polymorphism is I, Derived polymorphism is T
MPLRQRPTMGGGGGGVAKMPAGQLWLLLLGVLLLAFGVPAQASRNTHYDFVITETKVTRLCHEKTILAVNGQFPGPTIYARKDDVVIVNVYNQGYKNITLHWHGVDQPRNPWSDGPEYITQCPIQPGANFTYKIIFTEEEGTLWWHAHSEFDRATVHGAIVIHPKRGTVYPYPKPHKEMPIILGEWWNADVEQILLESQRTGGDVNISDANTINGQPGDFAPCSKEDTFKMSVEHGKTYLLRVINAGLTNEMFFAVAGHRLTVVGTDGRYLRPFTVDYILISPGQTMNMLLEANCATDGSANSRYYMAARPFFTNTAVNVDDKNTTAILEYTDAPPSAGPPDSPDLPAMDDIAAATAYTAQLRSLVTKEHPIDVPMEVDEHMLVTISVNTIPCEPNKTCAGPGNNRLAASLNNVSFMNPTIDILDAYYDSISGVYEPDFPNKPPFFFNFTAPNPPQDLWFTKRGTKVKVVEYGTVLEVVFQDTAILGAESHPMHLHGFSFYVVGRGFGNFDKDKDPATYNLVDPPYQNTVSVPTGGWAAMRFRAANPGVWFMHCHFDRHTVWGMDTVFIVKNGKGPDAQMMPRPPNMPKC

SEQ ID NO: 10415 - protein, 707 aa, Zea mays
  VARIANT 6..707: note = Derived polymorphism lacks residues 6 to 707
  VARIANT 318: note = Ancestral polymorphism is T, Derived polymorphism is I
MLENRQVEQAHAGINALALSQITINKLRENFIDIDKLCQECQTLIENHDKIKLLSNTRNNLNTTLKDVGGMMSISVEAAAAHDSLSNDQELIHTYERLIALDGKRRFALAAAASHKEEVGRLREYFEDVDQTWETFEKTLWGHITNFFKLSKESPQTLVRALRVVEMQEIFDEQVAEEATEAEGAGVIATITNQRRTAKKGAGATATPRKSTQEKSKVQGKGYRDKCYESIRVAVEARFNKLLTELVFVEDLMEALEEAKAIGEELGDIYDYVAPCFPSRYEIFQLMVNLYTERFIQMLRLLSDRANDIQNINILKVTSWVVQYQEDLIGLGVDESLAQVCSESGALDPLMNMYVERMQATTKKWYNNILEADKTQPPKSREDGKLYTPAAVDLFRILTEQVQIVRDNSTYVMLYRIALAVIQVMLDFQAAERQRLEEPIFYVGLACLCALINNNMHCYELSSELSSSTLEALPQNYAEQVNFEDTCKGFLEVAKEAVLQTVTVIFEDPGVHDLLVKLYQRDWLEGMVTEYLVETFADYFGDVKMYIEERPFRRFVEACIEETIVVYVDHLLSQKNYIKEETIERMRLDEEKLMDFFREHVNVTKVESRVRILADMRDLASAGSLDSFTLIFTNILEHQPDCPPEVVEKLVAMREDIPRKEAKEIVQECKEIYENSLVDGNPRKSGFVFGKLKCLTAKKGIWRKRGQ

SEQ ID NO: 10416 - protein, 374 aa, Zea mays
  VARIANT 198: note = Ancestral polymorphism is F, Derived polymorphism is S
  VARIANT 199: note = Ancestral polymorphism is E, Derived polymorphism is A
  VARIANT 201: note = Ancestral polymorphism is L, Derived polymorphism is V
MAPTTATKDDSGYGDERRRELQAFDDTKLGVKGLVDSGVKSIPSIFHHPPEALSDIISPAPLPSSPPSGAAIPVVDLSVTRREDLVEQVRHAAGTVGFFWLVNHGVAEELMGGMLRGVRQFNEGPVEAKQALYSRDLARNLRFASNFDLFKAAAADWRDTLFCEVAPNPPPREELPEPLRNVMLEYGAAVTKLARFVFELLSESLGMPSDHLYEMECMQNLNVVCQYYPPCPEPHRTVGVKRHTDPGFFTILLQDGMGGLQVRLGNNGQSGGCWVDIAPRPGALMVNIGDLLQLVTNDRFRSVEHRVPANKSSDTARVSVASFFNTDVRRSERMYGPIPDPSKPPLYRSVRARDFIAKFNTIGLDGRALDHFRL

SEQ ID NO: 10417 - protein, 357 aa, Zea mays
  VARIANT 147..357: note = Derived polymorphism lacks residues 147 to 357
MSSKDAVLNAFLSCFMHVGLALVLLVYLPAASVLRLLVRPLLANKQAEDLRGKVVLVTGASSGIGEHLVYEYARNGACVALVARTEVALRAVAKAARDLGSPDVLVVPADVTKVDDAKRAVDETLAHFGKLNHLVANAGIWSSCFFEEITNITAFHNVMDLNFWGAVYPTYFALPYLKASRGNIVVTASVAGRVPTARMSFYNASKGAVIRFYETLRAELGSHVRVTILMPGYVVSNLTKGRGLQKDGRVGVDEEARDINVGPMPVGKTESLAEVVVASVRRGDYYVTWPGWYWPFHMVMCAAPELLDWFSRAFYVSKSGGQDGGAALSKKILEAVGGKKFLYPQTIRCQQTTMGAS

SEQ ID NO: 10418 - protein, 96 aa, Zea mays
  VARIANT 2..96: note = Derived polymorphism lacks residues 2 to 96
  VARIANT 20: note = Ancestral polymorphism is I, Derived polymorphism is T
  VARIANT 25: note = Ancestral polymorphism is S, Derived polymorphism is F
  VARIANT 36: note = Ancestral polymorphism is V, Derived polymorphism is M
  VARIANT 42: note = Ancestral polymorphism is P, Derived polymorphism is L
MWKDNIVDVKYKENGQDLYIGLANSETATRKKMGRVAKISVPVMVSVLSLTATSMYLVWICKLRELPFIGFGNNATATDNFSEENMLGQGGFGKVY

SEQ ID NO: 10419 - protein, 92 aa, Zea mays
  VARIANT 24..92: note = Derived polymorphism lacks residues 24 to 92
  VARIANT 28..92: note = Derived polymorphism lacks residues 28 to 92
  VARIANT 39: note = Ancestral polymorphism is E, Derived polymorphism is G
  VARIANT 41: note = Ancestral polymorphism is P, Derived polymorphism is T
  VARIANT 53: note = Ancestral polymorphism is G, Derived polymorphism is E
  VARIANT 64..92: note = Derived polymorphism lacks residues 64 to 92
  VARIANT 65: note = Ancestral polymorphism is A, Derived polymorphism is V
  VARIANT 72: note = Ancestral polymorphism is D, Derived polymorphism is Y
  VARIANT 82: note = Ancestral polymorphism is R, Derived polymorphism is M
MVLASVSGHGASIPQLSSQSSAPQYSSYGGYQGTSKKIEIPNGRVGVIIGKVGETIRYIQLQSGAKIQVTRDHEAKPGALTMQVELSGNLSC

SEQ ID NO: 10420 - protein, 368 aa, Zea mays
  VARIANT 235: note = Ancestral polymorphism is S, Derived polymorphism is F
MGCTGSRHALRGGVRSPHAWGRSRSGRAHHTVALKSSTLGSLSLERDEEMMKWRDDGGAGAAKTPQLMRRQKQVPGSPAREPEVINVWELMDGLDDRDEEGDDANAGGEKPAPGSPAFDPDVVAAFRKALDEIPPPPAPDGPGNDEERIKKPDGPGAGGGGDEVCVRKREIQRFPGIVRARVSAFQQRIDAKLAKLAPPPPAVPPPPDSARKVVVYLTSLRGVRKTYEDCWSTRSVLQSYGVRVDERDLSMHAGFKDELHAALGSSAGRLPQVFADGRHLGGAEEIRRMHEAGELSEALEACEMAPPPSCPGGKGVALEACSGCGGVRFVPCEECSGSCKVFVEEAGTFRRCPECNENGLVRCPLCSL

SEQ ID NO: 10421 - protein, 423 aa, Zea mays
  VARIANT 241: note = Ancestral polymorphism is R, Derived polymorphism is L
  VARIANT 376: note = Ancestral polymorphism is L, Derived polymorphism is S
MLEDQSCLISRSLPGSCEQESRLAYMTYHLLEITRSKRPPGTLSIEHDVVAALTKRTKSSEHQNSEALDCQGSNGQGDSDSSTLISSIGRDNSINCLARCSRSDYGSIASLNRSFRSLVRSGELYKERRQQGISEHWVYFSCNVQEWEAYDPYRSRWMTLPRMPRNECFMHSDKESLAVGTELLVFGKEILSHIILSYSILTHSWSRGVEMNAPRCLFGSASFGEKAIIAGGMDADGRVLRSVELYNSETKRWTTLPSMNKARRKCSGVFMDGKFYVIGGMASNTEVLTCGEEYDLDRGTWRVIENMSEGLNGASGAPPLVAVVENELYAAQYAGKLVRKYNKRDNSWTTLGELPERPEAVDGWGIAFRGCGERLLVIGGPRVLGGGMIELHSWIPSEGPLQWNMIGSKPSGNFVYNCAVMGC

SEQ ID NO: 10422 - protein, 90 aa, Zea mays
  VARIANT 34: note = Ancestral polymorphism is R, Derived polymorphism is H
MSSRRSSSHGNISEDEMNELVSKLQALLPSSRRRRGSGQASTAKLLKETCSYIKSLQREVDDLSDRLSDLLSTMDHNSPAAEIIRSILRS

SEQ ID NO: 10423 - protein, 167 aa, Zea mays
  VARIANT 4: note = Ancestral polymorphism is S, Derived polymorphism is L
  VARIANT 46: note = Ancestral polymorphism is E, Derived polymorphism is K
MEESDVGVDLGKRMKEDKVAGESGDEGKLGMSHSINLNRVPTVAFEARSTQGNGETHGAAVSGTKDADYESDGQEKLPKCEQVDYESEAEGCLVTLVGNEYCGDEDERVQVLTIVNKDEPVHDTSDFINPQTVVGYSEVKGAVGASATTSAVRPAGSRSSCFHGVTR

SEQ ID NO: 10424 - protein, 490 aa, Zea mays
  VARIANT 178: note = Ancestral polymorphism is A, Derived polymorphism is T
MAGARASARRRVALAAVITLILLASVSFLLSATATSSAAAASPASRLAIVQRHAEDHAAVLAAYTAHARHLSAASASQTDAFLSISSRLSALAARLSVSTVAALEKEIKAQVKRARSLAGGAKEAFDTQSKTQKLSDTVFAVGQQLLRARRAGVLNSRIAAWSTPKSLHCLAMRLLEARLANASAIPDEAPVAPPQLADPSLYHYAVFSDNVLAVSVVVASAARAAAEPSRHVFHVVTAPMYLPAFRVWFARRPPPLGAHVQLLSVSDFPFLNATYSPVLRQVEDGNRDVALLDYLRFYLPEMFPALRRVVLLEDDVVVQRDLAGLWRVDMGANVNAALHTCFGGFRRYGKYLNFSEPVVRESFSDRACAWSYGVNVFDLQAWRREQCTEQFHRFMEMNENGTLWDPTSVLPVGLMTFYGKTKPLDKSWHVMGLGYNPHIRPEDIRGAAVIHFNGNMKPWLDVAFNQYKHLWTKYVDTEMEFLTLCNFGL

SEQ ID NO: 10425 - protein, 294 aa, Zea mays
  VARIANT 242: note = Ancestral polymorphism is L, Derived polymorphism is V
  VARIANT 209: note = Ancestral polymorphism is R, Derived polymorphism is G
  VARIANT 158: note = Ancestral polymorphism is A, Derived polymorphism is S
  VARIANT 85..294: note = Derived polymorphism lacks residues 85 to 294
MLCLSLVAPPPMAPAGRRRRRRHPTSVTRRGQTLAALPCHCGRRHVIGASSAAALLPFLAPPSLAAPPVDPDVVLQRVHPSRPDWYEEFYASAMDQGMKSYEAEIAGYKVKLFSQLSPAGKNILELGVGTGPNFKYYASEDGVNVIGVDPNKHMENYARAAVVSAGLASSSFTFRRGVAEALPAEDNSMDVVVGTLVLCSVNNIDMALREIKRVLKPGGLYVFIEHVAAPDGTLLRLVQGALDPLQQFVADGCHLTRRTGQSIRDAGFSSLSLDGVRLSNAYIISPHVYGVACK

SEQ ID NO: 10426 - protein, 597 aa, Zea mays
  VARIANT 8..597: note = Derived polymorphism lacks residues 8 to 597
  VARIANT 78..597: note = Derived polymorphism lacks residues 78 to 597
MISAADLYHVMTAVVPLYVAMILAYGSVRWWRIFSPDQCSGINRFVALFAVPLLSFHFISTNNPYTMNLRFIAADTLQKLMVLAMLTAWGHLSRRGRGSLDLDWTITLFSLSTLPNTLVMGIPLLRGMYGDFSGSLMVQIVVLQCIIWYTLMLFMFEYRAARLLIAEQFPGNAAGAIASIAVDPDVVSLVDHGRGDAIETEAEVREDGRIHVTVRRSSASRSDVVYSRRSVGGFSGATPRPSNLTNAEIYSLQSSRNPTPRGSSFNHTDFYSMVGRSSNFGAADAFGAVRTGAGTTPRPSNYEDDASRPKYPLPVVSAAPGVAGHYPAPWSARKAATNGHAKGEDLHMFVWSSSASPVSDFFGGGAPDYNDHAAAAKSPRKMDGGARDRDDYVERDEFSFGNRGAMEDRDAEDPAAAGGDPNAVAAATAMPPTSVMTRLILIMVWRKLIRNPNTYSSLIGVVWSLVCFRWNFQMPDIVLHSISILSDAGLGMAMFSLGLFMALQPRIIACGNKVATFAMAVRFLTGPAVMAAASFAVGLRGTLLHVAIVQAALPQGIVPFVFAKEYSVHPDILSTAVIFGMLIALPITLVYYILLGL

SEQ ID NO: 10427 - protein, 246 aa, Zea mays
  VARIANT 187: note = Ancestral polymorphism is D, Derived polymorphism is G
  VARIANT 32: note = Ancestral polymorphism is A, Derived polymorphism is T
MHKLGRGSRDKVQQFMAITGASEKAALQALKASDWHLEGAFDVFYSQPQIAVANTRHLEELYNRYKEPDADMIMVEGISQICNDLQVDPQDIVMLVISWHMKASTMCEFTRQEFIGGLQSIGVDSIEKLQAKLPSLRAELKDDQKFHEIYNFAFAWAREKGQKSLALETAIGMWQLLFAERSWPLIDYWCQFLQVRHNKAISRDTWAQLLEFVKTIDPQLTNYDEEGAWPYLIDEFVDYLKENGLA

SEQ ID NO: 10428 - protein, 200 aa, Zea mays
  VARIANT 91..200: note = Derived polymorphism lacks residues 91 to 200
MERREYVTASRGRPRACPCRVRAAWAQLNESTRGHAEDAHASRLQLDPSSRAPRGHFGQAHGGRYVASEYANSGILNERSDIYSFGVVLLECVIARDPVDYANPADDVNLLEWLKMMVTNKRADEVVHPNLEVKPPKCALKQEILVGFKCVDPDVDKSPKMSHVVQMLEGVQNAYHQNQRKLSQVGRMEIESQQPLEDMS

SEQ ID NO: 10429 - protein, 217 aa, Zea mays
  VARIANT 52: note = Ancestral polymorphism is V, Derived polymorphism is A
  VARIANT 106: note = Ancestral polymorphism is I, Derived polymorphism is T
  VARIANT 118: note = Ancestral polymorphism is V, Derived polymorphism is D
MASSASRFIKCVTVGDGAVGKTCMLICYTSNKFPTVSSSFLYLIPVPIGKKVAVRFPVNLGDFITSNGQEDYNRLRPLSYRGADVFVLAFSLVSRASYENIMKKWIPELQHYARGVPVVLVGTKFDLREDKHYLMDHPGLVPVTTAQGEELRRQIGAMYYIECSSKTQQNVKAVFDAAIKVVIQPPTKLREKKKKKSRKGCSMVNILSGRKMLCFKS

SEQ ID NO: 10430 - protein, 168 aa, Zea mays
  VARIANT 36: note = Ancestral polymorphism is A, Derived polymorphism is V
  VARIANT 151: note = Ancestral polymorphism is G, Derived polymorphism is R
MGNCQAAEAATVLLQHPGGRVERLYWSTSAAEVMRANPGHYVALVTLRVAEERQDAPGGERRTVRLTRVKLLKPKEALLLGHVYRLITTQEVARAVRARKEEKQRKAQQLLESRQGVARGAAEGEDDDDEAALDASLDQVTQLLFDRFFKGVSVVQLLVTILITCSCH

SEQ ID NO: 10431 - protein, 382 aa, Zea mays
  VARIANT 92: note = Ancestral polymorphism is W, Derived polymorphism is S
  VARIANT 132: note = Ancestral polymorphism is F, Derived polymorphism is L
  VARIANT 194: note = Ancestral polymorphism is M, Derived polymorphism is V
  VARIANT 205: note = Ancestral polymorphism is V, Derived polymorphism is L
  VARIANT 227: note = Ancestral polymorphism is N, Derived polymorphism is Y
  VARIANT 231..382: note = Derived polymorphism lacks residues 231 to 382
  VARIANT 311..382: note = Ancestral polymorphism lacks residues 311 to 382
MASPDLLFNLRNLFYLGAYQAAINNIDIPGLDADAAAERDAIVFCSYIALGSYQLVINEIDSSAATSLQAVKLLALYLTGDKDWMRFSVAFWHTFCGTSADPFGAPTMTWPWEDGTNSLAMAKRRMRAHFEFMEKLGVNKWCFHDRDIAPDGKTLEETNSNLDEIVQLAKQLQGETNIKPLWGTTQLFMHPRYMHGAATSLEVKVYAYAAAQVKKALEVTHYLGGENYVFWGGREGYQTLLNTDMKRELDHLANFLQAAVDYKKKIGFNGNSVPYDWDVATTFAFLQKYGLTGEFKINVECNHATLSGHRKGWDTDQFMTDIAEATLVMSSVVKNVVTLLYGFNQARKGDFETLEKKVLEWGEPAVASGKQELAEILFQSAL

SEQ ID NO: 10432 - protein, 143 aa, Zea mays
  VARIANT 6: note = Ancestral polymorphism is G, Derived polymorphism is W
  VARIANT 9: note = Ancestral polymorphism is A, Derived polymorphism is V
  VARIANT 53: note = Ancestral polymorphism is R, Derived polymorphism is H
  VARIANT 66..143: note = Derived polymorphism lacks residues 66 to 143
  VARIANT 98..143: note = Derived polymorphism lacks residues 98 to 143
MATPRGREALKFSGHAVGGSSICQSLPCLGTSLTLRRNANSSGIEHLAAQKKRNNTENEGEYKVHRSESTKSLSAKAYSSSYAVVASEDEDVCPTCLEEYTPDNPKIITKCCHHFHLGCIYEWMERSDTCPICGKEMEFCESP

SEQ ID NO: 10433 - protein, 427 aa, Zea mays
  VARIANT 71: note = Ancestral polymorphism is R, Derived polymorphism is T
  VARIANT 91: note = Ancestral polymorphism is F, Derived polymorphism is V
  VARIANT 198..427: note = Derived polymorphism lacks residues 198 to 427
  VARIANT 251..427: note = Derived polymorphism lacks residues 251 to 427
  VARIANT 260..427: note = Derived polymorphism lacks residues 260 to 427
  VARIANT 361..427: note = Derived polymorphism lacks residues 361 to 427
  VARIANT 411..427: note = Derived polymorphism lacks residues 411 to 427
MGAASPAMWAGLVLVALLAVSGPAVAAGLPRFAEAPEYRNGEGCPAPVAGAGVCDPGLVHIAMTLDAHYLRGSMAAIYSLLKHASCPESLFFHFLAAAEGGGAPAASGLRAVVAASFPSLSFEIYPFRADAVAGLISASVRAALEAPLNYARNHLAGLLPRCVPRAIYLDSDVLAVDDVRWLWETRLPAAAVVAAPEYCHANFSRYFTDAFWDDPVLGARVFAGRRRAPCYFNTGVMVIDLRRWRVGNYRQRIERWMEMQKEKRIYELGSLPPFLLVFAGEIEAVDHRWNQHGLGGDNVFGSCRPLHNGPVSLMHWSGKGKPWDRLDAGKPCPLDHTWKAYDLYIGENDSSSSGPSRSALSSLAACAATAAAASQLPPSAVQDSEINLSFTLPFTGDGSSGSRPQECSRKGTYHLKLKPEKNIKAVF

SEQ ID NO: 10434 - protein, 386 aa, Zea mays
  VARIANT 349: note = Ancestral polymorphism is P, Derived polymorphism is R
  VARIANT 162: note = Ancestral polymorphism is R, Derived polymorphism is W
  VARIANT 154: note = Ancestral polymorphism is C, Derived polymorphism is F
  VARIANT 128: note = Ancestral polymorphism is L, Derived polymorphism is H
  VARIANT 70: note = Ancestral polymorphism is R, Derived polymorphism is C
  VARIANT 69: note = Ancestral polymorphism is A, Derived polymorphism is V
MAPPISTSDPALPNTTTTTSSAPKSSSRPFLAPLAASARSLLASARRSPVTTLAAAFFLLALVMYGEDARTIAELSIDDYLYPDADLYNVSGLPPLALPPLTCDLSRGRWVFDNVSVPAYREKDCTFLTKQVSCLANGRPDDMWQYWRWQPNECSLPTIKEWIISPERIEAHTKHWKDVDYLIFNTYIWWMNTADIKVRRSNSRYWSENDEVPRIEAYGRVFKTWSDWLNDNIDPARTSVFFMTISPPHLSPQNWGNPDGIKCVGETLPYQNYSQPLDLYHDMRLYDLVVKVASSMEKVPVTVIDITRMSDYRKDAHTSLYTIRQGKLLTPKQKADPEKFADCIHWCLPGVPDVWNQILYTRILSKSSWHSNFSPPLFQSLPLPPQ

SEQ ID NO: 10435 - protein, 942 aa, Zea mays
  VARIANT 577: note = Ancestral polymorphism is C, Derived polymorphism is R
  VARIANT 453..942: note = Derived polymorphism lacks residues 453 to 942
MASPQESNSLCLKRKLVDDCLSKDCKSRRVKSENEPSSDSFAKRCNCCCTRPNLANDCVNFLKSGAPNRVMYYKKGSWHNFPEQIMNSLIDEFKGNKSSVVSVMDDEPILVDFLSMTLVNLKTRKQRSVAWFDDTGKRFFPSLFFDEESDEMPKQDSGNVNNTAQGIMLDKVTSSPPEVVKQVVLESSPPVPQKPSTVDVLRKKITSVERGSEGFLFVQDLFLSGMNPFATPNNILHVHRYSPNDITAQCRFEAFERQMKSTKEARGDANVKYGWLGSRKSDIVRILINGLGTTANPVEKAGLSAGVYLSPENRAFTSVGLCDVDEKGVQYMLLCRMILGNVEAVEPGSQESFPSSEIYDSGVDDCSNPKCYVMWPSHLSTHIRLEYLVSFKLAPKVRNYLLDLKGLWFNPSLKELGTDICTLQPVMCETGEGPTSPWISFRVLFAVIQDNISSVARELIFHHYEELKESIITREEMVKKMIIVVGEKVLLEALKKLHYCVSLQLHAFSCFMSNPRRIPFKACVGSSPCKLYRKDFTTCFGSQFHCNNLCCIIFSLLFSGMICTLHFFSYWHLASLCYWLLLQPSLWYRPSVEAVSSDSVMAAPGKLSLDKAGGVFSLTLSVNHVDSHAPNGVSEQSTVLSTKGCETLAADMVPNGQDCPAPSGVPETSSSAVAMRGASTSVEPKRRDPPVQIVPPGSSATPCAKNQDSFVGRVTPIARDGLLRTICGSSSSPGGYASLAQANTSQTNGVSAPGVTPRGYESAVPSLSLGNSESTGVKQVNSAPRMTPEGQKFLSLGIAPRSPALRDLVKCQASSTLVAMPPAGLGKSRSMKIEGHDSLAPSVKEPKGNGGLAPSKTPKLHEPVIADMSIKSCDSLALGIAPNGHTHDGPASGSGEAKKEQAALVTGSQSKSSVPSLDASSHVTGAASALVALSTLREKGGR

SEQ ID NO: 10436 - protein, 240 aa, Zea mays
  VARIANT 16..240: note = Derived polymorphism lacks residues 16 to 240
MKHPVRFRTDKYLAGWQMSLLNPMGHLVLINSVLDSHLNYVMGAMKMPKGTICGIDQRRRSFLWAGQKTTTGAHCLVAWDSVTKGRADGGLGVKDLETCNTCLHLRLLHRLHNSTCSSWGAWERQHICLATLTGNLPGAHWHALRSGLPIYRAITTCEVRNGHGTAFWHDAWCSDNDLASTFPALLSHVKNPELGIHDVLTQGLQSTLVTRLSEQARQELAALNEKLNLVTLTAAPDVRH

SEQ ID NO: 10437 - protein, 364 aa, Zea mays
  VARIANT 13..364: note = Derived polymorphism lacks residues 13 to 364
  VARIANT 65..364: note = Derived polymorphism lacks residues 65 to 364
  VARIANT 69..364: note = Derived polymorphism lacks residues 69 to 364
  VARIANT 196: note = Ancestral polymorphism is D, Derived polymorphism is Y
  VARIANT 223: note = Ancestral polymorphism is P, Derived polymorphism is L
  VARIANT 233: note = Ancestral polymorphism is G, Derived polymorphism is D
  VARIANT 253: note = Ancestral polymorphism is G, Derived polymorphism is R
  VARIANT 261: note = Ancestral polymorphism is A, Derived polymorphism is V
  VARIANT 281: note = Ancestral polymorphism is T, Derived polymorphism is M
  VARIANT 282: note = Ancestral polymorphism is S, Derived polymorphism is L
  VARIANT 285..364: note = Derived polymorphism lacks residues 285 to 364
  VARIANT 287: note = Ancestral polymorphism is P, Derived polymorphism is L
  VARIANT 294: note = Ancestral polymorphism is F, Derived polymorphism is S
  VARIANT 305..364: note = Derived polymorphism lacks residues 305 to 364
  VARIANT 326..364: note = Derived polymorphism lacks residues 326 to 364
MASYRPYALPPPQGGYPPQMNPYAPPLPPPQAPYNRMPTPPYHAGPPPPPPPHQPQFNFGPGPPQQHPRRLRCAFLFFIGNNGALISCVQNFPKSHGTIVGILKASPPCPAPPTRAGRRIHIRGLPPHFNTDLLRHCGANALPLADPSAVATSVPPCESLADHGLGPRTHPRNRSWYRNEARLLEAFFHRRILERDCFADDPADVVFLPYYAALDALSYMIDPALLDESTRHGVALAEFLSSDQAHILSRRHGHDHFLVVAGSAWDYAQSPGVEPRLWGSTSLLRLPELANFTSLTLESRTWPWQEHAIPHPTSFHPSSLGHLRAWLARACRSCCATLMLFAGGASRPCRPLLGQTVLGYRWTV

SEQ ID NO: 10438 - protein, 153 aa, Zea mays
  VARIANT 13: note = Ancestral polymorphism is P, Derived polymorphism is L
  VARIANT 44: note = Ancestral polymorphism is M, Derived polymorphism is I
  VARIANT 53: note = Ancestral polymorphism is V, Derived polymorphism is A
  VARIANT 90: note = Ancestral polymorphism is G, Derived polymorphism is R
  VARIANT 102: note = Ancestral polymorphism is D, Derived polymorphism is Y
  VARIANT 124: note = Ancestral polymorphism is E, Derived polymorphism is V
  VARIANT 132: note = Ancestral polymorphism is S, Derived polymorphism is Y
MLDHLESVLANEPVAIKSGQFIVKVKPQGVSKGLVAEKILTLMMEKWRQADFVLCIGDDRSDEDMFENIDDIMKRNIVVLKTPLFACTVGQKPSKARFYLDDAFGVVNILSLLADASEPAHVIELEDDLATSVSSIYISDEPPQLGNRRDEGS

SEQ ID NO: 10439 - protein, 222 aa, Zea mays
  VARIANT 140: note = Ancestral polymorphism is P, Derived polymorphism is A
  VARIANT 73: note = Ancestral polymorphism is R, Derived polymorphism is L
  VARIANT 21: note = Ancestral polymorphism is S, Derived polymorphism is F
MASPAAVLVSNGGISPHAPPSAAAFLVSTPGAYTTAPGTLLWWTRHLRRLAESATLLARSRPNLLGLPLPRSRALDLDLLSIHSLVNPSVRVAIREMRTRLPMTKDEDLALTALVRGADPISGGGGAGLDVFVHVGTYSPPIFGESGARLAAAGRGRDAAAAKYASWARIRKSLEKMRPPGVTELLLTNDGDHILEGAVTNFFVVCQQASPTYFLSMKGTFL

SEQ ID NO: 10440 - protein, 973 aa, Zea mays
  VARIANT 75..973: note = Derived polymorphism lacks residues 75 to 973
MTGVEPAIIGAIANLAAPVLPIAIKGIQGALKKRQVRDSDVETLKSQLSYIQGIIRDTRKTIRSSQDPSDRLQSWAGYLRCLAYDIEDLIEGRRAGTMTGAKLNGKITIIQDLIRCVQSYPEFMAVPTNEAPSQGAASSSTTSSTQGFPLADLVGKKEDLDELLDLLVRRPDNELDKVLKVMVISVVGFGGIGETKLCHTVYTDVQESRRFSLHAYVSAAGKDCSIVLEEIIEQFRLQEDPQDSSGGFFHRFAGAFPGARRTDQVHGLPEYLQRKRYFVVVDGVESEELVSGIASAFPDNSMGSRIIMGMRTAVGRDAERCVGHHHKMWPLEDKQSVVCFLNEAERRRRRHEQDDHSSFIRFQEQDHSSSCLHKVCDGVPLALVSVCEVRRGSIITAAVEEQDRWPHRMPKVLDHSYDGLHIRGAGSCPNQYIPYLQACLLYFAMFPRGNHVKRGSLIRRWQAEGLEFGGSNQAAENLKALVDRNFVWPLHASLNEHAKTFQPPGVVLNYISRRSQEEEFILRSCPSGELNPNYSRRLCLHPAEEEEGEPQPVVITNGSVPPRLRTLAVSWGQQQASRIAECEQLRVLDLASYNGLQPDQLEEICKKLKLLKYLSLLPDIITQVPSSMSNLQCLETLEVGEVNGRAAVLVPIQVLELPRIKHLIGKFELIDNFNGLPIRAYPDALVPKAIKESNLETVSGFFTRRGQGFPPLMRHIRQLRKVKIWFYRDAEPKYLASYLPKAITKFLRNDNVHRSLSLDFQDGPRQTEILQACVAEASGNLYSLKLSSGTNLSRIQLSVIATNKLTGITKLCLSRWKTITLDAEFLNELTKLASLTYLKLDAETIKGTYDQNPTPGGNNQEKVVIETGHIANLRRMCLVARQTLPDIQVKPTALQRLVSLHLISETDDYCPSANVICKANPQDDNEPAPFTSLQEVSLNATVPENLRDSWRNAARDHPKRPRILFIQHPHRAG

SEQ ID NO: 10441 - protein, 804 aa, Zea mays
  VARIANT 201..804: note = Derived polymorphism lacks residues 201 to 804
MIRPGSRDSQNYDNNNQRVHPQPVDENMNQNGDSVDTMIGRIFNNISSLKSAYIQLQEAHTPYDPDKIQEADKLVIEELTNLSELKHAYREKHPKPIAASPQDSRLLSEIQEQQNLLKTYEVMVKKFQSQIQTRDTEITHLQQQIDEAKLRKSKLEKKLKQRGLLNRESEESDEEENYFSIELTPSLFTSAVDNAYQSIHEFSKPLINMMKAAGWDLDGAANAIEPGVVYTRRAHKKFAFESYICQRMFSGFQEESFSIKDSNISVSNEAFFHQFLAVRAMDPLDVLSQNPDSVFGKFCRSKYLLLVHQKMEGSFFGNMDQRNYVMSGGHPRTPFYQAFLKLAKSIWLLHRLAYSFDPKAKVFQVKKGSEFSDIHMESVVKNIILEEGAERPKVGLMVMPGFLIGTSVIQSRVYLSDANKHLPIPLSSKEKQQSKVSHHTTLQFSSHGQSLLSTAAMAAASDSTHLPPSVNHDLDEMAAASDSTHLPPSVNHDLDEDDDDEEFDEDDDDLVDGTADDDGEPSASPSEAARLEAVLRRLTADEVRIRVHQVTIRGCARTRRAAVEAAVGPDVGRAATVRDLVRAAAAAGDRLRRLGAFDTVSITLDAAPPGIPGSAVVVLVDVAEARGRASGDFGVFANTQTRSCSLEGSVKLKNLFGYCETWDASGALELDKTAELSAGVQMPRIGAIPTPLMARISFLSGDWLKSSLKEHLMGVSVGLLSTMNHNIAYNLTWRKFTDPTRMTSNSVQEELGHSLLSSIKYAYKVDQRDSSIRPTRGYAFMSTSQVGGLAPESKYSRFLRQKSL

SEQ ID NO: 10442 - protein, 257 aa, Zea mays
  VARIANT 164: note = Ancestral polymorphism is G, Derived polymorphism is R
MPQAMADAATLSALALFASRLSCRRFGDEDLRVLEAALSAGADVPALLATRSAARRLLRSSAAEALAFTAAGASLDGGDERRSLAVADFFSRAFALVGDVESCLAMRYEALLLRDAKYCNDLHLQVSRQEWLTFATDCLDNGFYTIASKAFANALVHIHPSHTGHLDSANSIEEKDKIIEIKGLQNLAKSLSAQHCVQIKSAEYMERRASGVHEKYNLQSGKPKLTGSSMFRLGIKTRNIKKLLRSQERNLGDLKQS

SEQ ID NO: 10443 - protein, 452 aa, Zea mays
  VARIANT 19: note = Ancestral polymorphism is G, Derived polymorphism is C
  VARIANT 57..452: note = Derived polymorphism lacks residues 57 to 452
  VARIANT 101..452: note = Derived polymorphism lacks residues 101 to 452
MAPEERMKTEASHKAIAAGGGKMTVLHSPVGVRSIVTSLVAFFILASSIVFLLDRGQEEQVQVAVEHGRQEVQVKLESGLQEPAIRGTTQEGDASNEECNWSRGRWVYDNVSRPLYSGLKCSFIFPEVACDKYGRKDAMYQHWRWQPHGHGCDLPRFDAIKLLENLRNKRMVFVGDSVNRNQWVSLVCMVEASIPDDRLKIRTFNGSLISFKALEYNATIDFYWSPLLVESNSDNPIIHRVEYRIIRADRIEKHASVWRDADIIVFNSYLWWRKQKDDMRMKVMYGSFEDGDAKLDEMEMVDGFEIALKKLTEWLGENIDKNKTRIFFAGSSPTHSWASNWGGEDKNKCLNETEPIYKTGYKAATTDYSLMAKAKHYFRTLEPKGIHVQILNITELSDYRKDGHPTVYRKQFAPLTKEQIADPASYADCTHWCLPGVPDVWNEFLYGYLVQK

SEQ ID NO: 10444 - protein, 233 aa, Zea mays
  VARIANT 61..233: note = Derived polymorphism lacks residues 61 to 233
  VARIANT 97: note = Ancestral polymorphism is T, Derived polymorphism is I
MVTAVVALGAAAGRCRAEEKQPLHQHAPSISIREQNVSSGVPPTKASQALMDEPFENVNGQTEELPSELPCSIKRPKFSVAELLEDLQGRSGSYVETTSLSHQHTRAKHWKPKFLSSEKKTIAILGDRSIDSEDPLEHVIDGTSSEEEDATQNHLSLVNKDENQQTMADLFQEVFNPTNMDGAMKSMRSTGAGNYGRMQQIMQMEKDWHVEFLRQYSREHSYSGGALGSSWYL

SEQ ID NO: 10445 - protein, 432 aa, Zea mays
  VARIANT 77..432: note = Derived polymorphism lacks residues 77 to 432
  VARIANT 91: note = Ancestral polymorphism is C, Derived polymorphism is Y
  VARIANT 233: note = Ancestral polymorphism is A, Derived polymorphism is T
MAVPRPQIRALRRGTLLLFLVPLIYSVSRLQPWAPEKGVCLPPPTAPKRPDHLVLGPAAGQDRPDRLQCRGTEDCFENAATVTNAIVAVECFVLRSAFCLSQIRLRALNKIGISSEENYSGEHVSFATVFTTYNSVSAGDDNVPSDSVTVGNSSYSKIERSMAILNTFISFIKEPHIFDLQTLQVSMPRSDLIILTDPGSKISVNQGTATLLPVEGNYSRGNLMLQRIKTYIAFLEQKLVEFDRMERLNHFVLTDSDIAVVGDLGHIFKKYPHFHLAVTFRNNKGQPLNSGFVAVRGTRDGITNAVEFLKQVLGTYSLRYMKASRMLGDQLALAWVVKSHLPSAFGKFSKNEAFTGEVNGTSVLFLPCAVYNWTPPEGAGQFHGVPLDVKVVHFKGSRKRLMLEAWNFYSSTSKLSDMLCLILRSGRTKYDF

SEQ ID NO: 10446 - protein, 121 aa, Zea mays
  VARIANT 10: note = Ancestral polymorphism is V, Derived polymorphism is E
  VARIANT 26: note = Ancestral polymorphism is K, Derived polymorphism is R
MPCLNVSTNVNLEGVDTSAILAEASKSVANIIGKPEAYVMVVLKGSVPMAFGGTQEPAAYGELVSIGGLNPDVNKKLSAGIASILESKLSVPKSRFYLKFYDSKAHPAQENAQCLHALHQE

SEQ ID NO: 10447 - protein, 811 aa, Zea mays
  VARIANT 35: note = Ancestral polymorphism is P, Derived polymorphism is L
MPPPPRRLPPRLAHRRCGIAAASTLLFLLLLLSAPPTIAQHHRHHATGDGVVISQADYQGLQAIKHDLSDPYGFLRSWNDSGLAACSGAWAGVKCVLGSVVAITLPWRGLGGMLSARGLGQLVRLRRLSLHDNAIAGPVPSSLGFLPDLRGVYLFNNRFSGTLPASIGGCVALQAFDASNNRLTGAVPAAVANSTRLMRLNLSRNALSDAVPVEVVASASLMFLDLSYNNLSGPIPDAFAGSYSSPSKLRLNRDAITGSYQLVFLSLAHNSLDGPIPESLTKLTKLQQLHLSANSLNGTIPAQLAALPDLKALDLSGNALAGEIPPGLDNLTATLQSFNVSYNNLSGAAPPSLARKFGEPAFTGNVLLCGYSASTPCPASPSPAPASPAQEPPRGGRKFSRKALVLIVAGVVVGVLVLLLLCCLLLCFLSRNKRSPSGTAGTRSGKQAAKETGGAGAAAAAAGRGEKPGSGAAEVESGGDVGGKLVHFDGPLAFTADDLLCATAEIMGKSTYGTVYKATLEDGSLVAVKRLREKITKGHKEFEAEAAVLGRIRHPNLLALRAYYLGPKGEKLLVFDYMPNGSLHSFLHARAPNTPVDWATRMTIAKGTARGLAYLHDDMSIVHGNLTASNVLLDEQHSPRISDFGLSRLMTTAANSNVLAAAGALGYRAPELSKLKKASGKTDVYSLGVIILELLTGKSPADSTNGMDLPQWVASIVKEEWTSEVFDLELVRDAAAGTAADEQLMDTLKLALHCVDPAPAVRPEAHEVLRQLEQIRPGGSEGGAGPSEEGGGGAAAAHVPAASASAGDDDE

SEQ ID NO: 10448 - protein, 173 aa, Zea mays
  VARIANT 152: note = Ancestral polymorphism is T, Derived polymorphism is K
  VARIANT 136: note = Ancestral polymorphism is C, Derived polymorphism is S
  VARIANT 77: note = Ancestral polymorphism is K, Derived polymorphism is I
  VARIANT 57: note = Ancestral polymorphism is D, Derived polymorphism is V
  VARIANT 51: note = Ancestral polymorphism is A, Derived polymorphism is G
  VARIANT 48: note = Ancestral polymorphism is S, Derived polymorphism is N
  VARIANT 18: note = Ancestral polymorphism is T, Derived polymorphism is K
  VARIANT 13: note = Ancestral polymorphism is R, Derived polymorphism is W
  VARIANT 9: note = Ancestral polymorphism is G, Derived polymorphism is R
MDGDEENVGPFRRTSARTRRMATRMASALASSDNRAQAALARLEALESDNGGVEVVDLNDDEYGSTDEEDPVLMQKKQSKIMKRKTRQGKALEKRAARSLMDVLQEANLESVPPHVPTYSRAAVGPPSTSSRRHYCSVCGSSATYTCVRCGTRFCSCRCQVIHNDTRCLKFVA

SEQ ID NO: 10449 - protein, 361 aa, Zea mays
  VARIANT 230: note = Ancestral polymorphism is V, Derived polymorphism is A
  VARIANT 110: note = Ancestral polymorphism is R, Derived polymorphism is H
  VARIANT 101..361: note = Derived polymorphism lacks residues 101 to 361
  VARIANT 100: note = Ancestral polymorphism is G, Derived polymorphism is V
  VARIANT 93: note = Ancestral polymorphism is T, Derived polymorphism is I
  VARIANT 80: note = Ancestral polymorphism is P, Derived polymorphism is L
  VARIANT 69: note = Ancestral polymorphism is R, Derived polymorphism is C
  VARIANT 55: note = Ancestral polymorphism is A, Derived polymorphism is P
  VARIANT 48: note = Ancestral polymorphism is G, Derived polymorphism is D
  VARIANT 46: note = Ancestral polymorphism is T, Derived polymorphism is M
  VARIANT 45: note = Ancestral polymorphism is R, Derived polymorphism is C
  VARIANT 39: note = Ancestral polymorphism is L, Derived polymorphism is M
  VARIANT 36: note = Ancestral polymorphism is A, Derived polymorphism is V
MGVGRRSEPRPDATGQHHHQHRLLSTLARHGRFAAAATLFCTVHRTTGALNALLAALCCSSRSSPTLLRAAPAVLLRAAPHAAPDAATFRILTAALCRAGQPSAAADLIRCMPPLLLDPDPCHCRAVLASLCRRGAPARDALDFLDDMRRWGVPPARPDHHAVVGALLREGMAAEAYEVVARRMAADGVAPGLPEFEQLLRAFRERGRLDAVEEAFDEMLLRGLVPCARVYGVYLGALCDGGDLAAARRMLGCMERAGCPPDARAFGVVAAGCVAAGDVEAAREVARDAVGRGLRWDAPALSELVAPLRAGGHVARARPLLLDILRDGCCAAPVDAAVFEQLVGGASCAVGEGLGVEAVPR

SEQ ID NO: 10450 - protein, 1387 aa, Zea mays
  VARIANT 602: note = Ancestral polymorphism is R, Derived polymorphism is C
MMTAGGSEAQQASMALGDPMTFRLGHSSSSPSSAAAPVPPLPHHHHSHQNHIADDLPVANGPEPRNELEVAEVEKPAPAAYLSQVVVLCDQRHEGIDEATAAASAASTSGLVSKWRPKERMKTGCVALVLCLNISVDPPDVIKISPCARLECWIVGLCYVHRPIPSFSDPFSMTPLKALESIGKTLHSQLDTSFSWIQQWKMLRIFVILAANMLDQRVLFHYNGHGVPKPTSNGEIWVFNKSYTQYIPLPITDLDSWLKAPSIYVFDCSAAGIIVKAFLERLDWSSTSSASSQKDCILLAACEAHQTLPQSAEFPADVFTACLTTPIKMALHWFSLSPFLSLCVPVYWFCKRTLLCGSLDHSLIDKIPGRQNDRKTILGELNWIFTAITDTIAWNVLPRDVFQRLFRQDLLVASLFRNFLLAERIMRSANCSPVSYPLLPPTHQHHMWDAWDMAAEICLSKLPQLIDDPNAEFQPSPFFTEQLTAFEVWLDHGSEDKKPPEQLPIVLQVLLSQSHRFRALVLLGRFLDMGPWAVDLALSVGIFPYVLKLLPTNTIELRQILVFIWTKILSLDKSCQVDLVKDGGHTYFIRFLDSLDAFPEQRAMAAFVIAVIVDGHRMGQEACMNAGLIDVCLRHLQPENLHAQTEPLLLQWLCLCLGKLWEDFPEAQLLGLQTNAPETVICLLSEPRPEVRAAAVFALGNLTTLSNCPDDDSDDDEKVKAEINVVRSLLQISSDGSPLVRSEVAIALTHFALGHNKNLKSVAAEYWKPQSKSLLKSLPSLANINNPSNVYSPNNILQGSIGPVLRVGSDSGAAGRDGHISTSSPIAASSIMHGSPQSDDSSQHSDSGILLRENASNGGLSYTRSRPVDNVIYSQFISTMCSVSKDPDPRIATIGWRALTLIGVEQVAMKSTRFNSGGLHRGETSASTFGMAHSSSWRDMNSGSNSMKFMTPPVSPPQHDYLLLGLRRVCSMEFGQHPINSPDGFANLLLSSATGPSNAELKKLPESTIYNWSCGHFSRPLLTASDDNEETNARREERERIALDFITKCQRSSACKITSQIASWDTRFELGTKAALLLPFSPIVVAADENEKISVWNYDDAQPVNSFHNHKLSDRGLSKLLLINELDECLLLAASSDGNVRIWKNFACKGGQKLVTAFSSVQGHRAAGRSIVIDWQQQSCYLYASGDMSSILVWDLDKEQLLNTIPSSADSAISALSASQVRSGYFAAGFADGSVRIYDVCSPDRQVHRPVYVARPHAPRTEKVVGIGFQPGFDPYEIVSASQAGDIQFLDVRMAAEPYLTIEAHRGSLTALAVHRHAPVVASSAKQMIKVFSLEGEQLRIIRYLPSFMGQRTGSVNCLSFHPYKSLLAAGAGHNALVSIYAEENYK

SEQ ID NO: 10451 - protein, 109 aa, Zea mays
  VARIANT 90..109: note = Ancestral polymorphism lacks residues 90 to 109
MERMSSSVQSWVEEHKLSSIGAVWATAVGASVAYSRRRAPARATSLRLIHARMHAQALTLAVLGGAALAHRYYGSSERRQRQEDLDYGFKSQLPPATDAEGNENERWSW

SEQ ID NO: 10452 - protein, 320 aa, Zea mays
  VARIANT 104: note = Ancestral polymorphism is A, Derived polymorphism is S
  VARIANT 139..320: note = Derived polymorphism lacks residues 139 to 320
  VARIANT 294: note = Ancestral polymorphism is G, Derived polymorphism is A
MASTRAAATLLLLLALAGTSSAQLSTGFYSYSCPGVYGAVKSVMQSAIAREKRMGASILRLFFHDCFVQGCDASLLLDDTPSFQGEKMANPNNGSVRGFEVIDAVKSAVEKLCPGVVSCADILAIAARDSVVILGGPTWDVKVGRRDSTTASFSGANNNIPPPTSGLANLTSLFAAQGLSQKDMVALSGAHTIGQARCTNFRAHIYNDTDIDAAFARTRQSGCPSTSGAGGDNNLAPLDLQTPTVFENNYYRNLLAKKGLLHSDQELFNGGATDALVQSYVGSQSAFFADFVAGMIKMGDITPLTGSNNGQIRKNCRRVN

SEQ ID NO: 10453 - protein, 59 aa, Zea mays
  VARIANT 26: note = Ancestral polymorphism is I, Derived polymorphism is F
  VARIANT 22: note = Ancestral polymorphism is G, Derived polymorphism is S
  VARIANT 21: note = Ancestral polymorphism is P, Derived polymorphism is L
  VARIANT 2: note = Ancestral polymorphism is G, Derived polymorphism is V
MGSVAYAPERDAMVWKVKSFPGGKGIQVRYLKIIEKSGYQALPWVRYITMAGEYELRLI

SEQ ID NO: 10454 - protein, 802 aa, Zea mays
  VARIANT 109..802: note = Derived polymorphism lacks residues 109 to 802
  VARIANT 314..802: note = Derived polymorphism lacks residues 314 to 802
  VARIANT 670..802: note = Derived polymorphism lacks residues 670 to 802
MCMLCAVQRWSRRVATMLPWLVVPLIAIWAATQLLLPAAYRLEVTSPRLACVSVLLLTLFWYEILLPRLSLWRARRSARLREERRAHALELHKLRKIATRRCRNCSNPYREQNPGGGKFMCSYCGHVSKRPVLDLNSTGKASSRWPCAQDCGDWLDLRCSASPSTSFWGFSWHLLLSFFTTTVRWLLRKTFRFTSSGDGEGLGPDGKRLAKAGDNGGKAEESRVEKARRKAEEKRLARLEREMLEEEERKQREEMTKLVEERRRLRDEKAAAEERSKSATPVGEKDARKEAERRRQERRKKEDKGPSKSNSDCEDIDRRLGREGDMKRAFDRKIESDRREGYKPHYFEANNRSNKTVESRAKYFGRMTGGFLSSSRGFGGGSFFGRSIQAPAPQVNKVSRPIVPATDQGNAAKRDVQHASTQAAAKSTSAGETRNSWTNFNRPVSPNVQPAPTSFKKSWHQLFSRSASVSPCPDATTSARDTNQKPEPNGAQLSNAYTFLFQYPPLDSKPSSSQSMQFPGFPPLNGAPPNKPLPHFPAGHMPFYDDAESVVFEDPEQFEDPCYDPDAIALLGPVSESLDNFPPDLDCGFISSDVVKESHGRPSPIESPLSRSRMVEENPIKPLHLLVAKRPGGPIQPEASSEQRTWQMWSTPLVHESLGLQGHQSQWLQQTNQLNYSANVFNGRTNAPLGTGLNDSDPWLQKAPFKQLPPDTPSLFLPHEIPGKLHNDLVFGSPNKSAREHPFGSPGPSWPKEELSLSGAQEGGGHFSLLSGAHVGGSGDLFCSTSPDVQSLVWSFNEKETA

SEQ ID NO: 10455 - protein, 443 aa, Zea mays
  VARIANT 70: note = Ancestral polymorphism is K, Derived polymorphism is N
MESTGKILMERYEVGRLLGKGTFGKVHYAKNLESNESVAIKMMDKDKVLKAGLSEQIRREITTMRLVAHKNIVELHEVMATRNNIYFVMEYVKGGELFDKIGKSGKLTEAAAHKYFQQLIGAVDYCHSRGVYHRDLKPENLLLDENENLKVSDFGLSALSESKGQDGLLHTTCGTPAYVAPEVISKTGYDGAKSDIWSCGVVLFVLVAGYLPFRAPNMMEMYRKIQNGDFRCPSWFSHKLKKLLYKILDPSPDTRISVQKIKESTWFRKGPVETRTVKEKILSENDTTNAAPAVAMRRKKNVHEDVKPPTVTSLNAFEIISFSTGLDLSGLFIRKECKKETRFTSDKGAVSIISKLEDVAKALNLRVRKKDNGVVKIQGRKVGRKGVLEFDTEIFEITASYHLIEMKQTGGDSLEYKKLLEEDIRPALKDIVWAWHGDDQQQK

SEQ ID NO: 10456 - protein, 198 aa, Zea mays
  VARIANT 126: note = Ancestral polymorphism is T, Derived polymorphism is I
MSIIYTATSHPLPRTVGTKMTTPPRRSPPLRGRGHAGLRALAPMVNIHERSPVPACVPAHPDPSSSISPDDWRRLEGATFSVMCKIHPTVSSQHLRARVIDYVQRLFRLHHDGYQVISFGSVPLKTYLPDGDIDLTLLCAAISDENLENEVCAILKSEEQRKDSEFEVKDVKYVPAEVKLVKVPYSKIVDLYGGRSSL

SEQ ID NO: 10457 - protein, 187 aa, Zea mays
  VARIANT 24: note = Ancestral polymorphism is E, Derived polymorphism is K
  VARIANT 27: note = Ancestral polymorphism is R, Derived polymorphism is H
  VARIANT 29: note = Ancestral polymorphism is R, Derived polymorphism is I
  VARIANT 35: note = Ancestral polymorphism is W, Derived polymorphism is L
  VARIANT 77..187: note = Derived polymorphism lacks residues 77 to 187
  VARIANT 89: note = Ancestral polymorphism is D, Derived polymorphism is G
  VARIANT 104..187: note = Derived polymorphism lacks residues 104 to 187
  VARIANT 107: note = Ancestral polymorphism is A, Derived polymorphism is V
  VARIANT 109: note = Ancestral polymorphism is A, Derived polymorphism is V
  VARIANT 118: note = Ancestral polymorphism is R, Derived polymorphism is Q
  VARIANT 120: note = Ancestral polymorphism is T, Derived polymorphism is I
MTEGPTIQSDKALVALAVAAARHEQRRQRRGSSKWRLQRRSDDKRHERVLVSNKLGAGNPHAAHLSIYVSALPPHQEIGMLSLSPTMTDVYLLLGARAYWLLRRGHAMALVGARRDGRHTHLQRGARVCCACLRAVEKRGQSGSEPSARYYIHPLPHANVLQILQLLLENGIRVNELTRTEVALVVP

SEQ ID NO: 10458 - protein, 374 aa, Zea mays
  VARIANT 158: note = Ancestral polymorphism is T, Derived polymorphism is I
  VARIANT 155: note = Ancestral polymorphism is F, Derived polymorphism is S
MACVADREAAVREVAQVYELIKLHQPLLLLHSQQAPPPPPSTIQLAQNLLGQAQRALNVALSVMKQPAVASSPVTPISVIKAEPHQLSPPSPASADPEATRGAKRRRSSVPPAQGKKAASSSWATLTAVPYDDGYEWRKYGEKKINGALFTRSYFRCTYKDDAGCLATKHVQQVDDDDSSSGDGPLMFHVTYNNDHTCCNASAVDRARAAAPNTGGSSNLAALLAAGCCDGSGRGTGKGLTTSISARPTGHQHAAAMNMKQEEPRPLLLPLPPLVEPPPASFPYGHQTMPIQCQQEPLFPPTSMEQQLVCGALRDHGSPADGGEIPSATGSCISGETCWWDGYSGDMEAQMAAAEDDPLHDLERFLMRDSFMDC

SEQ ID NO: 10459 - protein, 277 aa, Zea mays
  VARIANT 240: note = Ancestral polymorphism is E, Derived polymorphism is K
  VARIANT 200: note = Ancestral polymorphism is S, Derived polymorphism is L
MTSKTSGSITTSLSTTGKLCSVGSSFMASAELSPVPMHHSVLLCSPRWLLKQEVPKVVNSINRQLREKSIKTKVGAFSVLKELVVVLPDCLADHFGSLVPGIEKALNDKSSTSNLKIEALVLTRLVMASHSPSVFHPYIKALSAPILSAIRDRYYKVTTEALRKTAVDFKPYIGPIYNVILGRLANQDQDQNYQHAFPYSLTGWVRNEITRLTAVKAFSVIANSPLRIDLSCVLDHVVSELTAFLRKANRGALRQATLGTLNSLVVTYGLQYVNITK

SEQ ID NO: 10460 - protein, 198 aa, Zea mays
  VARIANT 26: note = Ancestral polymorphism is G, Derived polymorphism is S
  VARIANT 11: note = Ancestral polymorphism is F, Derived polymorphism is S
  VARIANT 7: note = Ancestral polymorphism is Q, Derived polymorphism is R
MFAGITQFLGFLLVQHRNKAISYSSGVNRIGIKHFACGHLITPQIDCLNALAERKNSARTHLLSVWQVGDEVYERLVVLLEGPDGVGVGRIDAASGQVNARDTVASALEEPAELEPAPGPMPFAMNKHEVLLLRHSHHPLGSLPIYLTDVQQQQGGLHFLRQSKLNAKPTRRPVISILNRESLVWTPGVSGMQRCLIW

SEQ ID NO: 10461 - protein, 624 aa, Zea mays
  VARIANT 359..624: note = Derived polymorphism lacks residues 359 to 624
  VARIANT 366..624: note = Derived polymorphism lacks residues 366 to 624
MGMAKEQHFVLVHGEGHGAWCWFKLRWLLEGAGHRVTCVDLAGGGVDPTDPNTIRSFKQYDKPLIDLISNLPDGEKVILIGHGAGGLSVIHAMHEFVDRIGQAFFVAATMLPFGFQADEDKNDGLPTLPENEIELTLGAGADDPPTTIALRPEFQRDRLSQQSPEEESVLASMLMRPWPATAISTASFEGDDERLNRIKRTFIKMERDHMLDPQQQDSMIKKWPPSEEFDDAKLVYFDNGATSQKPCSVMKTLDEYYRSYNSNVHRGIHALSAKATHAYEDARRKVANFVNAADSREIVFTRNATEAINLVAYSWGLSNLKEGDEIVLTVAEHHSAIVPWQFVSQKTGATLKYVGLTKENVPDIEQLKGFLSNKTKIVVVHHVSNVLGSMLPIEEIVTWSNRVGAKVLVDACQSVPHMPVDVQKLGADFLVASSHKMCGPTGVGFLHGKFEILSSMEPFLGGGEMIADVFEDKSTYAEPPSRFEAGTPAIGEAIGLGAAIDYLSCIGMEQIHEYEKELGTYLYESLLSVPNVQIYGPAPSQTVHRAPLCSFNIENVHPTDIAEILDLQHSVAIRSGHHCAQILHRTLGINASARASLHFYNTKDEVDTFVDALKATVDFLTDRY

SEQ ID NO: 10462 - protein, 153 aa, Zea mays
  VARIANT 76: note = Ancestral polymorphism is R, Derived polymorphism is Q
  VARIANT 53..153: note = Derived polymorphism lacks residues 53 to 153
MNSSDADPVIIPRAVRDVFDTVRQADDREFLIRVSYMEIYNEEINDLLTLEGQKLKIHESLDVTNMNFGETNMNMRSSRSHTIFRMVIESSGKDQTDGGDVIRISVLNLVDLAGSERIIKTGATRVCLNEGKYINKSLMILGNVINKLSENGK

SEQ ID NO: 10463 - protein, 220 aa, Zea mays
  VARIANT 175: note = Ancestral polymorphism is G, Derived polymorphism is S
  VARIANT 85: note = Ancestral polymorphism is L, Derived polymorphism is F
MAKVHPNAAESVQAEAEGELPTVLTVWRKSLLFNCDGFTVYDARGDLAFRVDCYAGSFRRRRRADVVLMDATGKPLLTVRRKTRFGLAERWVIYDGDADDGTTAGATPLLSVRRRRIGACCKTLALARPRPRSAAAGTDAPSYVVEGSYGRRACAVRDARGGAVVAEVQRKEAVGDDVFRLVVAGPRLGAPLSMALVIALDDMFRGGWSARSLLRMSSPA

SEQ ID NO: 10464 - protein, 315 aa, Zea mays
  VARIANT 106: note = Ancestral polymorphism is G, Derived polymorphism is A
  VARIANT 159: note = Ancestral polymorphism is E, Derived polymorphism is D
  VARIANT 186: note = Ancestral polymorphism is A, Derived polymorphism is V
  VARIANT 188: note = Ancestral polymorphism is G, Derived polymorphism is S
  VARIANT 228: note = Ancestral polymorphism is C, Derived polymorphism is W
  VARIANT 255: note = Ancestral polymorphism is N, Derived polymorphism is I
  VARIANT 264: note = Ancestral polymorphism is R, Derived polymorphism is G
MAKVHPNAAGSVVATAAAVGRAPAEADGEPSTVLTVWRKSLLFNCDGFTVYDASGDLAFRVDCYAGSTRRWRRAGVVLMDASGKPLLTVRRKTRLGLAERWVIYDADADDGTTTTARATPLLSVRRRIGACCKTLALAHSAAAGTDDAAAAAALSYVVEGSYGRRACAVREERGGAVVAEVQRKEAVGDDVFRLVVAGSRLGAPLSMALVIALDDMFRGGAGGGGWHCCECDGRCIMPGGVNVSVESLEVCGGAIVEIRRHPWRQLLAVTWLQQLRKYKSFLIHIRQTATTHGLIRKSDSDYMTKPCKMIRGGKG

SEQ ID NO: 10465 - protein, 263 aa, Zea mays
  VARIANT 132: note = Ancestral polymorphism is R, Derived polymorphism is G
MHPVPPRSSTTSSIAASATRVHPSDAVGGRATAASSGLQGQAPAVYTVWKRSSMGFQGTDGFSVYDATGSLAFRVDNYSRRRKLFAGELLLMDGRGAPLLALRPQILSMRDQWNCYRATSEEPSGDNDQSFRRRRRQQQLFFSMRQCSLVRGTDEVEVHMAAASGTSAAQQQVPSFTVQGSFWRRSCKIRRGGDGDGDGEEVARISRKKAAGAAPAPVTLGEDVFSLTVVPGADCAMVMAFVVVMDRICQRPYRPLMCSASSS

SEQ ID NO: 10466 - protein, 221 aa, Zea mays
  VARIANT 55: note = Ancestral polymorphism is G, Derived polymorphism is E
  VARIANT 76: note = Ancestral polymorphism is R, Derived polymorphism is H
  VARIANT 94: note = Ancestral polymorphism is H, Derived polymorphism is Q
  VARIANT 95: note = Ancestral polymorphism is P, Derived polymorphism is S
  VARIANT 109: note = Ancestral polymorphism is R, Derived polymorphism is C
  VARIANT 113: note = Ancestral polymorphism is V, Derived polymorphism is A
  VARIANT 142: note = Ancestral polymorphism is E, Derived polymorphism is D
  VARIANT 149: note = Ancestral polymorphism is E, Derived polymorphism is K
  VARIANT 165: note = Ancestral polymorphism is P, Derived polymorphism is S
  VARIANT 172: note = Ancestral polymorphism is A, Derived polymorphism is V
MSLRFGSFPVVVGSSAKVAEVLVKTQDLAYLDQSRMACDKHTVYNYSGMLWSHYEPYWRQLRKLWVTELLSARQLHLTERVRAEEVRAMLRDLHPATSTSTAAVVLKERLLMATLNVISRMVLGKKYVGEDGAGSDAAATPEEFRWMIEEIFFLNGALHVGDMVSWLGWLDAHGYVGRMKRLAQSSTGSSSTCCASTASGGDGRAACSCPGTWSTCCCICV

SEQ ID NO: 10467 - protein, 135 aa, Zea mays
  VARIANT 103: note = Ancestral polymorphism is Y, Derived polymorphism is H
  VARIANT 25: note = Ancestral polymorphism is L, Derived polymorphism is P
  VARIANT 5: note = Ancestral polymorphism is S, Derived polymorphism is P
MTMIPLAGFTALSAAGLLLIFSSFLLQTQGGARSSEEERYVPVRRVVYRSMTPAAASAATTAEAAAAAASYEPFEVCEGCRCCAPSSSSSNGSSSCVDTSCCYAIDCDLPGKPFGTCAFTPQTCGCGSNCTQPSS

SEQ ID NO: 10468 - protein, 448 aa, Zea mays
  VARIANT 187: note = Ancestral polymorphism is M, Derived polymorphism is R
MGNCGTREENAVVAAHAQVQQLHLLQQPSKNANADRKHTCMSSDISDPSTPRKVEDAKNISIYNDVIAFTLFELETITKSFRVDYVLGEGGFGTVYKGYIDENVRVGLKSLPVAVKVLNKDGHQGHREWLTEVNCLGQLRHPNLVKLIGYCCEDDHRLLVYEFMFRGSLENHLFRKTATPLPWGTRMSIALGAAKGLACLHNAQRPVIYRDFKTSNILLDSVECQSLSSPFSVLSIPSNGNAHMFDIFIFLFPITRRIILPNCLTLASQKMALKTFKTIVSTPWAEITYLYHFMCLSVFECHLTARSDVYSFGVVLLELLTGRKSIDKSRPSREQSLVDWALPKLNDKRRLLQIIDPRLEGQYSARAAHKSCSLAFYCLSQNPKARPLMSDVVETLAPLQQGGGGGSDASSGLPDCRGRRRLTGNSVVHFRAIPNPKCTPVVPACRVR

SEQ ID NO: 10469 - protein, 522 aa, Zea mays
  VARIANT 97: note = Ancestral polymorphism is R, Derived polymorphism is W
MQSPEIQQRNRAPTHSRAGSLAPRVPRHLRTAAALAAAVQGLIDASPARGESQTIHAQLLASGLVGSADLSVKLLVLHIRCGSLHNARAVFDGMPSRSRAAHNYLIAGYFRRGRPAEALGILRRLAASTGRLDVFALSMALKLSAALALPGVVAREAHARALRSVEQSDDILFAALVDAYVKSGLLGYARRVHGAMPVRSVVCSTALLVGCMQEGLFEDAEAIFNEMEGKDVVAYNAMVEGYSKTEETAEGSLEVLKAMQRAGLRPTVSTFVSVLGACSLLSSPELGEQVHCQGTKSGLVLDIKVGSALVDMYAKCGRVEDGRRIFNQMAERNVITWTSMIDGYGKNGLSDEALQLFGEMRERRDVRPNHATFLSILSACAHAGLLSQGQEAFQSMESEYLLQPRMEHYACMVDLLGRFGGVRQAYDFVRGMPVRPNSDVWAALLGAATLHGDMDICKVASREVFELSRKGRPGAYMAFSNTLAAAGEWDGVHDVREMMKQRGVLKDTACSWVGSENPPLVD

SEQ ID NO: 10470 - protein, 276 aa, Zea mays
  VARIANT 56..276: note = Derived polymorphism lacks residues 56 to 276
  VARIANT 172: note = Ancestral polymorphism is T, Derived polymorphism is I
  VARIANT 179..276: note = Derived polymorphism lacks residues 179 to 276
MVKAKARVRYELGPTFEEVKEEVMLDISPTDSTKFCLIQWPKDQYYFLMFEILRFQANKILRQKIVEDQFLDLVSVETEVRSVYKELYSIYKTTLKSKSSINEVNQVAQLRIIIKPKSCSGVGPLCTAQQICFHVLGLVHGIWTPVPQALCQHVEDYIVTPKPNGYQSLHTTVIPFLNESMFHLEVQIRTEDMDLIAEIGIAAHYSGRGVVSGPVRPGISSGRNAKGKVICLKNTRFDGRRRDGRDGSRGRGGCGFGNKQSAGTPSAGKKTTFGDD

SEQ ID NO: 10471 - protein, 309 aa, Zea mays
  VARIANT 27: note = Ancestral polymorphism is V, Derived polymorphism is A
  VARIANT 85..309: note = Derived polymorphism lacks residues 85 to 309
MAKKLSRAAVLLLVAAPLFKYLCAVLVGIQVGRALERCPESARFSLGETLHYVTKELWDGNVLGGRRGGGTHSCFTVSGAESSSSEERPYAALASADGVRAPRTNSDANVTQTTTYTYYNHTSPRGVISVGPWGGSGGQPFYMRGASAPRLRSVVLYHSGAIHSLAYEYTLAGDYDYEGPPRRRRVAGPWGLPHSYGSRGVRAEIDLRSGEHVTAVEGTTGHFADVPGVVVTSLTFRTSAGRTYGPYGSVGAGSHRFSVPAADGARIVGFWGRSGWLLDAVGVYMKPPPCSSSDTAAYEKHASRRQRRN

SEQ ID NO: 10472 - protein, 218 aa, Zea mays
  VARIANT 99..218: note = Derived polymorphism lacks residues 99 to 218
  VARIANT 93: note = Ancestral polymorphism is L, Derived polymorphism is P
MKVKRYTDITDNTYTKQQAMVKSFEVSELPVRSAKFISRKQWVVAGADDMFIRVYNYNTMDKVKVFEAHTDYIRCVAVHPTLPYVLSSSDDMLIKLWDWDKGWVNFNPKDINTFASGSLDRTTKIWSLGSPDPNFTLDGHQKGVNCVDYFTGGDRPYLITGSDDSTAKVWDYQTKSCVQTLEGHTHNISAICFHPELPIIITGSEDGTVRIWHSTTYR

SEQ ID NO: 10473 - protein, 148 aa, Zea mays
  VARIANT 11: note = Ancestral polymorphism is A, Derived polymorphism is T
  VARIANT 37: note = Ancestral polymorphism is A, Derived polymorphism is T
  VARIANT 38: note = Ancestral polymorphism is M, Derived polymorphism is T
  VARIANT 41: note = Ancestral polymorphism is V, Derived polymorphism is M
  VARIANT 48: note = Ancestral polymorphism is E, Derived polymorphism is V
  VARIANT 49: note = Ancestral polymorphism is D, Derived polymorphism is N
  VARIANT 70: note = Ancestral polymorphism is L, Derived polymorphism is V
  VARIANT 80: note = Ancestral polymorphism is S, Derived polymorphism is L
  VARIANT 81..148: note = Derived polymorphism lacks residues 81 to 148
  VARIANT 85: note = Ancestral polymorphism is P, Derived polymorphism is L
  VARIANT 92: note = Ancestral polymorphism is T, Derived polymorphism is M
  VARIANT 104: note = Ancestral polymorphism is A, Derived polymorphism is T
  VARIANT 119: note = Ancestral polymorphism is G, Derived polymorphism is W
MNHPEQEQQAAESEKAVTTLLGVWASPYVLQVKWALAMKGVEYEYVEEDLRSKSAQLLAYNPVHKKVPVLVYKGRPVAESQLSPPIWRWFTTEGEEQEAAYEAAVEQLLVLEKELAVSWKPFFGGDKVGFVDLSLGPLAYVLPIDVRG

SEQ ID NO: 10474 - protein, 633 aa, Zea mays
  VARIANT 505..633: note = Derived polymorphism lacks residues 505 to 633
  VARIANT 209..633: note = Derived polymorphism lacks residues 209 to 633
  VARIANT 168: note = Ancestral polymorphism is S, Derived polymorphism is F
MDAWEATKVVFDRVRALDPENASKMMGLLLIQDNSDKELIRLAFGPEHLLHSFVATARAELAAKPASPPSPVLGPLQSGAPWGLPSPGSGAGGGGGGDHHHHSPFAAADQLGYDGGADAFYADEYDCWSPAGAAGAHRRSFSLSDAEAAASWRPCMYYARGYCKNGSSCRFLHGVPEDDAAEREMAVMRAKALAAAPPTQQQQLMASAYPFSPSPKGGVSLSFLLQQQQQSETQRAAAGMLLGGEDMHRFPVRSPRMDRGDLIGSPAARQIYLTFPADSTFSEEDVSNYFSMFGPVQDVRIPYQQKRMFGFVTFVYAETVKAILSKGNPHFVCDARVLVKPYKEKGKVPDRFRKLQHTHHGGAEFVGCASPTGLLDSRDPYDLQQPQIGSRMMYGNIANQHEAFLRRKLEEEQAAELQQAIELEGRRFMGLQLLDLKSRGHHHLGSGAPMPLRQATDGKGSGINGNGNASHLEDAICIQDKRMMSSLAMSAPAAADAEGEHEEQQEEGGGGCDGSSSSSPKQAVNPGEEEVVESGPVTATPNAACGFQESSYGVVEVELVLPDSPFASPTKEEASYADAVTTAAARNGSISSSPRHVALFAPASSTTLELPPYSSSSFFQVPRFSRGHEAIGL

SEQ ID NO: 10475 - protein, 501 aa, Zea mays
  VARIANT 364: note = Ancestral polymorphism is D, Derived polymorphism is A
  VARIANT 255..501: note = Derived polymorphism lacks residues 255 to 501
  VARIANT 3: note = Ancestral polymorphism is K, Derived polymorphism is R
MNKEVRDAVYKFEADFEFSKMETMIHRFPAGAGLGDGLRTRYPHMVAPRFVAIGPYHHGEKRLAKMEGVKSAAAYYVCLRAELAPEMARQAVLAVADEARGKYYDYEHDDGSSDGGGGEEGGKACFAAMMFRDACFLLLYMDAYTRSYGDTEDDVVNKSMRRFLFANRESINSDIMLLENQLPWLVVQALLGAFPGDEVKTDMRRAVGTFVAAMGNSFRISEPCKLVRYEWDDERDPPAHLLALLRRHKTEKPPEAGDDGTHGNGNGNHNAETMRHPLITPPPPAATAAAGRRKDDDGDEENPRPRPQAAAKAPVSVSATSPADLEQIGIKLTPSWTASFSDMGLEKGRLFVSRLTLAPLSLSDARAACLVNMAALEVCCASRFGDRAGAAAVCSYLALLAFLMAGPEDVRRLRALGLLHGPRGDGDTLAFFSAAAEHLPSYGKRFALLMAEVQEYKRTRRVRTALYRWVHNHLATVVKVVSIIAMLVGLYQGLIFLTRNS

SEQ ID NO: 10476 - protein, 904 aa, Zea mays
  VARIANT 463..904: note = Derived polymorphism lacks residues 463 to 904
MAETAIAAVLSKFGGLAASEAKVLLEVGDDMMLLRDRLEWLQAFLRDADHKRRTGDDRLTRVWVRQMRDVAFEAEDAVDEFFRKVDMEGMGYQRWITWLKKCLLGCWAEIILRHELSGRLEKINSRLHQISENQKEYKVEPTPSATVLTSSTTATSAWRDGYKNAVGFEKEVETLKEMLLGKGRPQLTFISILGESGVGKQTLSRILLHDMEKNKQFDVRVWYNMPSGSTTENLLKQIYKKAGGGGQRRHQPCECECDDDDIEDVLRRHLLANKKYLLILVGISSKTMLNCVRASLPDDNNGSRVVLVLDIENEEVAWHANAMNKTTGISHGLIHHLNRLDQDKSVELFCMRALRTNLSDETTVNSMMSKYREVVYNITSGYPLAIVVLAGLLRFKEKPGQWNAVLQQLRTTSSGPAAADQEAHQQDDQGGHTEEKTMSAPTSTTQAANNQLSTRTSIERVFWASFEDLPNALKSCFLYLAAFPKGTFLSTGSIVRLWMAEGFIRPQKGKTIEELGHDYFKELALRCLVQVSGMNEVGGITNVIVHGRLHGFLHSEAREAGFIDVHDMNDVFVPPSVRRLSFMSFQDGYTTFTNRFCKLRSFICWANEKDSDNSIGSRGRVNNEEERWHDLNFLHGSDLLRVLYISGLRIKELPNEIGNKIHLRYLRVNTEHLKELPASIARLPNLQTLDIRDTEVEEIHPSFWEIKTLRHVIAKKLTLPPSIKEEMGELQTLRGVKPSEEEWDQDNCPLLKMSKLRSLELHGLIGARHGAALITALGQMHLLGHLKLKGDKISCCVFTGERLRYLQTVELDGTVQWPPVAEFNDLRFVRPNLVQLSLTNTNDAPEGIQQELRNAGFVRSYQQLQPVYRLSYRQGGALATKPEQQGEAGSNKMEQQHQGEEAEE

SEQ ID NO: 10477 - protein, 371 aa, Zea mays
  VARIANT 23: note = Ancestral polymorphism is P, Derived polymorphism is H
  VARIANT 188: note = Ancestral polymorphism is V, Derived polymorphism is A
MVEPSVKSSEHGGGGIDLLFLPPGFRFHPTDEEVITSYLLQKLLNPSFAPHAIGEVDLNKCEPWDLPSKAKMGEEDSKEWYFFCRKGMKYPTGTRANRATKEGYWKATGKDREIFFKPAAGHDDVDRREQLVGMKKTLVFYTGRAPRGTKTNWVMHEFRLIEGKGKYSRHRTTNDDLLLRFNPKDEWVVCKVHHKGGRHDASAAKKGGGGGGGEEQQYSSAAGTPNVSSVEAGGGGDDDEFLLDSVLLDYSSSCHFNSSGPTACTSSSRSRSMPPPRRHAPPADQQQAIMVGGSYYYTSLHHHHQEMVAPTRFAAAAGLPSACASAAGAGAAQRSSQQHGVLQQQRLPAGNYNYYDDGGNYYAAGYRTSQY

SEQ ID NO: 10478 - protein, 215 aa, Zea mays
  VARIANT 92..215: note = Derived polymorphism lacks residues 92 to 215
  VARIANT 66..215: note = Derived polymorphism lacks residues 66 to 215
  VARIANT 22: note = Ancestral polymorphism is P, Derived polymorphism is Q
  VARIANT 7: note = Ancestral polymorphism is V, Derived polymorphism is G
  VARIANT 6: note = Ancestral polymorphism is A, Derived polymorphism is E
MAAAWEVLAVLLVAAQVASAAQVTAPAFLWAPKNYGFSSDDAKEVVHYQTISPKSLAKSVLEEGGWSNFMCSREDTQNNVDVAIVFIGSKLQSSDISKDKQVDPALADTLKLSFTRSEFSMAFPYVSTTVDERLEDSLLSSFAENCNNGFGRNRITYTDTCTGQDLKKYHNMDAINDLVVSGVASRRANHPSGQTDVIVFCSGGFENPGTAKSEG

SEQ ID NO: 10479 - protein, 362 aa, Zea mays
  VARIANT 340: note = Ancestral polymorphism is S, Derived polymorphism is G
  VARIANT 326: note = Ancestral polymorphism is L, Derived polymorphism is Q
  VARIANT 284: note = Ancestral polymorphism is A, Derived polymorphism is T
  VARIANT 283: note = Ancestral polymorphism is K, Derived polymorphism is N
  VARIANT 275..362: note = Derived polymorphism lacks residues 275 to 362
  VARIANT 224..362: note = Derived polymorphism lacks residues 224 to 362
  VARIANT 149..362: note = Derived polymorphism lacks residues 149 to 362
  VARIANT 141..362: note = Derived polymorphism lacks residues 141 to 362
  VARIANT 44: note = Ancestral polymorphism is C, Derived polymorphism is Y
  VARIANT 31..362: note = Derived polymorphism lacks residues 31 to 362
  VARIANT 26..362: note = Derived polymorphism lacks residues 26 to 362
  VARIANT 24: note = Ancestral polymorphism is C, Derived polymorphism is S
MDVPAVADPGTERGEGALIQCPYCDSEAMHKLAQILLPGLAAVCVDGTTGDPFRSPSAVAVDLRKEMVDYITQRSDSFIADALIESEANQDAPGAEVPDDPFETVSVFMDDFASTKRNIIGHVSGWLLTDSRDDKIDDFVQEMEATKFWPLERREAVAELLLKNVDLKTRFHCPEKYENEERLEDHKAQCSFRPVACANDGCRAKVSVRCVKDHDAACVYKLLQCEQGCDKRLLRRDMDRHCVTVCPMRPMKCPFGCDSSFPDRDLERHCAEFLQPHLLMVLKAIHKKGRSEQDLKDLAQKLEKVLFFSSPLIDLLFQLDSALTVLFASEIRTVIVMRFSFNREAQFGLVTLPIFSTDYYIK

SEQ ID NO: 10480 - protein, 1416 aa, Zea mays
  VARIANT 1082..1416: note = Derived polymorphism lacks residues 1082 to 1416
MERGVAAITLEKTWSGLPLAATKRDCRASKLFARCAGGGHGGVVLLAKASWQWHGCFPNPSRGHVLKVNFGDLLMQDWRRIHEVIYRRKNEEIISRTCLVQFGKEKNSSISSVFVFVCNRQNISLDLEVMANCWQQRAAKPRDRERAMAMADCHDAGRARLGARESPVTFRKGDDLGKGLVVQDLSTASSVLEAVELLAQGTLYRKMTGVEAAAISAVASGILKIVGNKLAPLVIRKYSSIVGVEKDLQKLQLKDVAYAVDDVVDEYQLKAERNDASGDGDFVSRYMRRKPESFIFQCKAAKKIKAIKKRFAAIVKQRADINIIATSLTGSGHSISHMKKTAVGLPSVPTMDATLILGREMEKHQLISKLTETNDQQKTMIVSIVGLGGSGKTTLAKLVFNDGTTIAKHFKVRLWVHVSQEFGFESIVGKLFEAIAHGKSESHNLQHMVRRISDELTEKVFLLVLDDVWTKDRMELEQFMVLVRSGASGSRILLTTRNSDVAEAVESSYLINLPLLSLSDSWQLFIQSFGTTVEGLDREFLDVGNAIVNKCGGVPLAIKVIAGVLHDKKRIQEWQAIRDSNLFDAEGKERRLRDSSTARLLFSQLIHVHHEISLVVPKEGTSLTESYRYFSLTKQSRIVPSKRPFGKARAIYVSNSDDTIFGSTMQNARHLRSITMESMFVATIPNAIFQAKHLKYLEISRLRCEVLPEAISNFWTLQALHLASSDLLDLPESFGKLTRLRTLNLSKSEKFKRLPDSIGDCQMMSTIDLCGCNSLTVLPDTIGRIERLRVLRLSYTKIERLPSNIITLRNLECLDLCTCQELVELPEGIGNLDRLQVLNLKGCKSLGGMPVGVGRLSRLQKLGLFVVGDSEKFAGISELANVPRISEELSIRGIPHGMDPDDAQMACLQQKTSLQSLDLEWMAHKACEVDLEWMAHEAGEANMDLERMAHDAGEVDLDLERMALEAGEVDLDSEWMPLEAGEVDTELEQAVLDGLEPPSQIKELKINGYSGSQHACWMQNQVSGRRGPQELVHFPFLRVVKLSDFPNLKHLDGLVELPCLEDLELRAMPCLESMSGGPFPSLSRLELDTLPSLGEVWLVAETTILPSGEGAGHNVHDTGTPGSGRQVRVGGRLSYLFIQDCPRLRLRPHMPSSLESLHLSESSEQLLQLPADQCLGSSSSYSNFSHLKKLGLWGMTGLGSGRRWELLQHMTALESLEINSSLVLRELPEGLRSLTCLQSLIVFACSDLLVLPEWIGELASLQQLCIWTCDVLSSLPQSLGQLTSLQMLSIEACYELHRLPERIGELCSLRKLRIRDCPRLACLPQMSGLTSLQELLISDCPGLTSLPQGMMSGLASLEKLIVSDCPGIKFLPQDIKGLTTLMELRIRRCPDLERRCETGKGEDWHLISHIPNLRIW

SEQ ID NO: 10481 - protein, 363 aa, Zea mays
  VARIANT 180: note = Ancestral polymorphism is F, Derived polymorphism is L
  VARIANT 116: note = Ancestral polymorphism is S, Derived polymorphism is P
  VARIANT 66: note = Ancestral polymorphism is N, Derived polymorphism is D
MTGVEAAAISSVASGILKIVANKLAPLVTRKYSSIVGVEKDLQELQVLVEDINYWLESAGYQALDDDASVSWFKQLKDVAYAVDDVVDEYQLKAERNDASGDGGFVSRYMCRKPESFIFQWSGCEWKLLQLPADQCLGSSSYSNFGHLKTLRLWGVTELGSGCGWKLLLHMPEGLRSLIFLQSLTVSACSALVVLRVSLPKLHIHICHGLSSLPQSMRQFASLQVLAIDACYGLHRLPECLGELCSLRQLRISDCPRLACLPQSMSGLTSLQQLQIIECQGLASLPRGMMSSLASLENLVVDGCPGIKSLPQDTKGLTTLMGLRIRRCPDLERRCEAGQGEDWHLISHIPTLMIGLSAACIIW

SEQ ID NO: 10482 - protein, 86 aa, Zea mays
  VARIANT 32: note = Ancestral polymorphism is R, Derived polymorphism is S
  VARIANT 34: note = Ancestral polymorphism is H, Derived polymorphism is R
  VARIANT 40: note = Ancestral polymorphism is G, Derived polymorphism is R
MGPQKDRSSSSSSMAARSKDAKKVVQYRECQRNHAASIGGHAVDGCREFMASGAEGTACAACGCHRSFHRREVEAGEDRDCSSTSG

SEQ ID NO: 10483 - protein, 577 aa, Zea mays
  VARIANT 37: note = Ancestral polymorphism is R, Derived polymorphism is W
  VARIANT 58: note = Ancestral polymorphism is C, Derived polymorphism is Y
  VARIANT 133: note = Ancestral polymorphism is M, Derived polymorphism is I
  VARIANT 183: note = Ancestral polymorphism is C, Derived polymorphism is F
  VARIANT 485..577: note = Derived polymorphism lacks residues 485 to 577
MNVHMQQQHHLRQLRAVLLRRGHPVPPPPATHPDPDRAFLAAIRAAASSAPRLVLAACACLRRAGLPAPGPRALPALLRSAARCEGAGAYVAATHALAVRTGALDDGFVGTALAGAYAACGCVRDTRKVFDGMAVRDVVSWGVMLDSYCQTRNYKEALLLFAKMKNSGVVPDQLILATVLPACGHIRHLRIGKAIHSYMLVSDMIIGAHISSALISLYASCANMEMAEKLYNEMPRKDLVSSTAMVSGYARNRKVEIARSIFDGMPEKDVVSWSAMISGYVDSNQPNEALSLFNGMQECGIRSDEITMLSVISACANLGSLDKAKWIHAFIKNSGLNKVLHICNALIDMFAKCGGINLALNVFNEMPLKNVITWTSMISAFAMHGDGKSSLRLFEQMKDEGAEPNEVTFLSLLYACCHAGLVHEGRLLFSSMVQQYGIEPKHEHYGCMVDLLGRAKLMQEAVSLIESMHLEPNVPIWGSLLAACWMHGDLKLGAFAAKKILQLDPNHDGASVLLLKIYMKSDNLNNAQEVRGVMKLHRVSKETGLSWMELNEPFHEFAAGGEKHPESGKIFLQKVVN

SEQ ID NO: 10484 - protein, 528 aa, Zea mays
  VARIANT 177: note = Ancestral polymorphism is V, Derived polymorphism is A
  VARIANT 22: note = Ancestral polymorphism is L, Derived polymorphism is S
  VARIANT 12: note = Ancestral polymorphism is L, Derived polymorphism is P
MAASGRKAVVVLILCMLCCNTSLLPCSASSDSFLQCLSAMMPSELVYQQSSSSFTSVLQSSVQNPKFVTNTTVRPLCIITASDVSHVQTAVRCGRWNGVRLRVRSGGHDYEGLSYRSVQPEVFAVLDLARLRGVQVRPGDDSAWVDAGTTLGELYYAVGTTNPGFLFPGGACATVGVSGFISGGGIGLMMRKYGVGGDNVVDARIVNANGDVLDRFAMGDDLFWAIRGGGGETFGVVVAWRLKLSKVPPTVTVVNVLRTMEQGAADLVAKWETTILQPPVLPDLTIRVVLQYRQAFFQTLFLGGCSDLLNTMRGLFPELGTTAADCHEMSWLRAMAFIYFGNTDTPVEALLNRTNNVGNYYFKSKSDYVRRAVGKAGWDSLYQQWLSQNGNGQIILEPHGAAVGGANTMTTSPYPHRRGVLFNIQYGSNWCCGANGTEAAAALGWLNGLYGFMAQFVTSNPREAFANYRDLDMGQNVIGSDGLSSYWSARAWAERYFMGNYRRLAAVKAAVDPTDYFRNEQSIPPLPK

SEQ ID NO: 10485 - protein, 111 aa, Zea mays
  VARIANT 73: note = Ancestral polymorphism is Y, Derived polymorphism is C
  VARIANT 29: note = Ancestral polymorphism is S, Derived polymorphism is P
MSRNLAQTAETGMDGGAHGHHIETCAVRSVPSAGVQMQPLRFLQHCALCNRALGPELDIYIYKYVFLALLPWCLARYCVDDIKSYSFLAPPPNFDHLAVILEFGTCSHVSF

SEQ ID NO: 10486 - protein, 382 aa, Zea mays
  VARIANT 187: note = Ancestral polymorphism is G, Derived polymorphism is W
MALLLLLVLLRSAASAGAGAEPHRSPATALFVLGDSTVGCAAATASSILSLNLTTTTTTLPSSLSGEPCLFFHEARLRVPDLLAAKMGLPSPPPISALNGTASAAARGVNFGGGGGQLLFYGGGGGVRGPASVFLTGAVGQQVRLASETLQLLRLEAAAPGEPSSSPAAVFVLSFGADAYARLLARGPAEAAAAAPKHGRRGLARLLADRVARAVSELYEAGARRVAVMGVPPLGCAPRVVWERSSPVRDGGAGCVEEANELIQGYNGRLAARLDELRLALAGADVVFCDVYKGMMEIISNPTTEACCGLGPMRATVGCVSKEMACGAPERHVWWDIYSPTEAADALVTNWSWSSDGSGATSICGPISLQQLAAVSPSPPGA

SEQ ID NO: 10487 - protein, 379 aa, Zea mays
  VARIANT 83: note = Ancestral polymorphism is V, Derived polymorphism is E
MASKAIKRRPISAETDTTGEKQMDTALSDPVTEPLLGNTPQEEKSKTYEPITRSGFWDGTAQECLRWTHLLAAFVAQSARNIVLLDSFIIFGQLFMSCHLDVADNDVSLIMMFLETSTYLTFLLKCFGQIVLKEPDFSLAVNVLSEFGYLLARLFGCSSASKSSQNGQTLPVNLSPLQEERLRLLRQRIDVPYDCSSVKHQDALKELWKLAYPNRQLPPLKSDLWKEMGWQNSDPSTDFRAAGFMSLENLIYFARNYPDSFHRLLHKADGKRAEWEYPFAVGGVNISYMLVQMLDLQSGKMRTKAGVHFVQLLDDDGVAFDNLFCVAFQVLDSQWLARRASYMEFNEVLKSTRGQLEQELTIGGISRIQDMPSFRMLRR

SEQ ID NO: 10488 - protein, 435 aa, Zea mays
  VARIANT 239: note = Ancestral polymorphism is I, Derived polymorphism is T
  VARIANT 238: note = Ancestral polymorphism is K, Derived polymorphism is M
  VARIANT 224..435: note = Derived polymorphism lacks residues 224 to 435
MTMERSQPQHQQSPPSPSSSSSCVSADTVLVPPGKRRRRAATAKANKRARKDPSDPPPAAGKRSSVYRGVTRHRWTGRFEAHLWDKHCLAALHNKKKGRQGAYDGEEAAARAYDLAALKYWGPEALLNFPVEDYSSEMPEMEAASREEYLASLRRRSSGFSRGVSKYRGVARAGNSLAILSLFRLGDPNCSVSFFLRKKENGSDHPSNHIMPQEHNYTFPAQKYCPFLDCQDQDLETMILLSYTQEEAAKAYDLAAIEYRGANAVTNFDISCYLDHPLFLAQLQQEQPQVVPALDQEPQADQREPETTAQEPVSSQAKTPADDNAEPDDIAEPLITVDNSVEESLWSPCMDYELDTMSRSNFGSSINLSEWFTDADFDSDLGCLFDGRSAVDGGSKGGVGVADFSLFEAGDGQLKDVLSDMEEGIQPPTIISVCN

SEQ ID NO: 10489 - protein, 331 aa, Zea mays
  VARIANT 89: note = Ancestral polymorphism is D, Derived polymorphism is G
  VARIANT 88: note = Ancestral polymorphism is D, Derived polymorphism is E
  VARIANT 79: note = Ancestral polymorphism is P, Derived polymorphism is S
MGALVWWQATHDTARAPHPPRQGVRGTRASISTTTTFMAVPASASASACARAGPPQPRHRARSAAATAAAFLLRRHQRPPRQIINIVDDRRASSDLRCRRRLLTARGERPSHDDDEDEDEDEEQTSSAGGGYGSFGAAVALFNRGEYHACHDVVEELWYSAEDPARTLLHGLLQCAVGFHHLFNQNHRGAMMELGEGLCKLRKLQLDGDGDNDGGGPFSRFRDEIAAVLQFLYRTQKELAACTDELCLTMDGSPSSYQLLGNFAAGQQLYRLELLEAEEDGACSSILFSAPNGGGGIAAQGAAPRPQRVKLPTLRATEQHLVALQCTYEYT

SEQ ID NO: 10490 - protein, 332 aa, Zea mays
  VARIANT 98..332: note = Derived polymorphism lacks residues 98 to 332
MSALKKSDKKAALDFAAWSFNVTTSVGLIMVNKALMATYGFSFATTLTGLHFVTTTLMTIVFRWLGLSQPSHLPLADLVKFVIFSNLSIVGMNVSLMWNSVGFYQIAKLCMIPASCLLEVVFDHVHYSRDTKLSIMVVLIGVAVCTVTDVSVNARGLIAAVIAVWSTALQQYYVHFLQRKYSLNSFNLLGHTAPAQAGSLLLVGPFADYLLTGKRVDHFSFSSLALFFLALSCFIAIGVNLSQFICIGRFSAVSFQVLGHMKTVLVLSLGFLFFGKEGLNLQVVLGMVLAVLGMIWYGNASAKPGGKERRSVLPLRSASLKGSSEEKGGAEK

SEQ ID NO: 10491 - protein, 297 aa, Zea mays
  VARIANT 221: note = Ancestral polymorphism is R, Derived polymorphism is G
  VARIANT 75..297: note = Derived polymorphism lacks residues 75 to 297
MSNQPPHASLQDDLPDCDGDDPLALAIRLFPAHTTGAGLSPAALGIGRVAEPPRREQEPLANSTYGVRGAGPDPWGLRLSRSVLGGLDGFDVDTFFADDALDGGGEATEGDSPPAHVTAAARGSLANDDASPLPAAMPAVALEAYDACSAPVPAACGGAPPVLIDFPFHALPAVAPPPAMPDGGNGGNNRSSALPVALAPPSGSTGGAVRRRRPVPRPRNRQVQRTCSHCQSSETPQWREGPDGRRTLCNACGLRYRSHRLVPEYRPTTSPSFQIGQHSNRHRRIMQIREQNGTAGS

SEQ ID NO: 10492 - protein, 204 aa, Zea mays
  VARIANT 43: note = Ancestral polymorphism is G, Derived polymorphism is R
  VARIANT 56: note = Ancestral polymorphism is R, Derived polymorphism is Q
  VARIANT 58: note = Ancestral polymorphism is W, Derived polymorphism is G
  VARIANT 115: note = Ancestral polymorphism is R, Derived polymorphism is H
  VARIANT 133: note = Ancestral polymorphism is C, Derived polymorphism is R
  VARIANT 141: note = Ancestral polymorphism is W, Derived polymorphism is L
  VARIANT 161: note = Ancestral polymorphism is K, Derived polymorphism is N
  VARIANT 192: note = Ancestral polymorphism is R, Derived polymorphism is M
MSKRQPGVLGDIQDDDPLHLAHRLFPVYTAADPPPTSSLWALGIGPAYAPPPPSPRLWWWAAIPIPLHALPPVAPPPANPGPGNDENGDGKNRSAALPVALAPLVGTGGGAVRRRRSVPRRRNRQAYRVCSHCQTSETPQWRESPDGSVTLCNACGLRYKKQGLLPEYRPTTAPSFQAGQHSNRHQRIMKMREQKNGSSSSSSS

SEQ ID NO: 10493 - protein, 158 aa, Zea mays
  VARIANT 87: note = Ancestral polymorphism is D, Derived polymorphism is E
MDEMKPGTITTKELGTVMRSLGQTPTEEELQGMVDEVDADGSGAIDFQEFLTLMARQMREASGADEEELREAFRVFDQDQNGFISREELRHVLQNLGERLSDDELAEMLREADADGDGQINYTEFTKVMLAKRRNQELEDHGSESSHSKRLCPSCTIL

SEQ ID NO: 10494 - protein, 707 aa, Zea mays
  VARIANT 25..707: note = Derived polymorphism lacks residues 25 to 707
  VARIANT 242: note = Ancestral polymorphism is D, Derived polymorphism is Y
  VARIANT 294..707: note = Derived polymorphism lacks residues 294 to 707
  VARIANT 311..707: note = Derived polymorphism lacks residues 311 to 707
  VARIANT 595: note = Ancestral polymorphism is M, Derived polymorphism is T
MEDQSPDRTSVGSASAPKKHSASSRGRRRNFSSSTCKDFLRKFVDSELLTSSLEDWFSGHSEDCGFRKPGFDVPFELTELHNFDYALEGVTFQQLVRMPSALYASTSDVFEASAYLALEDFLHAGVKGLWQTFWGPDEAMPFSVACVHSTSSRFYPAEKAISSGRLDGVCATAVLLKNLKPSQGRWDHIVVLALLRPDVGMVSAQGDEEPSPAVLGEALFFALRVLLSRSLSKSSTVLRNSDSVYVLLFDSQFGGVVKVQGDLNRLDFDLNNVYDCAAEWIKKHSRISVCSVDRVWNKLGNANWGDIGTLQVLIAIFHSMIQFYGEPKYSLDELATEHSSRLQSRRSERHLVDRQANGNGLFRFQQRSHSPEIVELQEEAAVDVKPHETLRLEIGSVVLMDDAYTQKGFQISDILTGSDPPIYTSAPVEEPTKTCLLYVGSSPSHLDPAWEDMDSWYQVQRQTKVLTVMKQRCISSRYIPHMESSGRVIHPGPCNNPNSNASCGHPWCSTPMLVTSPVGETISNLIRNGLFGAEEALRCCHDCLSALAAAASAGVRHGDIQPENVICVNNGSTHPYFVLIGWGHAILEDRDRPVMNLFFSSTFALQEGKLCGASDAESLIYLLYFSCGGVCPDLDSVESALQWRETSWSRRVIQQKLGDISAVLKAFADYVDSLCGTSYPMDYEIWLKRLRRTINEDHGKEVDTSSS

SEQ ID NO: 10495 - protein, 274 aa, Zea mays
  VARIANT 250: note = Ancestral polymorphism is D, Derived polymorphism is Y
  VARIANT 223: note = Ancestral polymorphism is Q, Derived polymorphism is L
  VARIANT 215..274: note = Derived polymorphism lacks residues 215 to 274
  VARIANT 210: note = Ancestral polymorphism is Q, Derived polymorphism is H
  VARIANT 208: note = Ancestral polymorphism is A, Derived polymorphism is S
  VARIANT 200: note = Ancestral polymorphism is P, Derived polymorphism is L
  VARIANT 174: note = Ancestral polymorphism is E, Derived polymorphism is V
  VARIANT 172: note = Ancestral polymorphism is V, Derived polymorphism is M
  VARIANT 158: note = Ancestral polymorphism is R, Derived polymorphism is M
  VARIANT 133: note = Ancestral polymorphism is R, Derived polymorphism is C
  VARIANT 110: note = Ancestral polymorphism is L, Derived polymorphism is S
  VARIANT 67: note = Ancestral polymorphism is G, Derived polymorphism is R
  VARIANT 62: note = Ancestral polymorphism is K, Derived polymorphism is N
  VARIANT 47..274: note = Derived polymorphism lacks residues 47 to 274
  VARIANT 28..274: note = Derived polymorphism lacks residues 28 to 274
MLIVPVLRLGGYNPRSRASHGWYQVHRQTKVLTLMKQRGISSRYIPQMASSRWVIHPGTCNKPNSNGNCGHPWCSTPILVTSPVGQTISNLIQNGLFGVEDAMRCCHDSLSALAAVASPGIHHSDIRPENVICVGNGSSHPYFVLIGWGHASAILEDRDRPIMNLFFSSTFVLEEGKLCAGSDAESLMYLLYFSCGGVCPELDSVESSLQWRETSWSRRVIQQKLGDVSVVLKAFADYVDSLCGTPYPMDYNIWLKRSRRTINGDHGKEVDTSS

SEQ ID NO: 10496 - protein, 185 aa, Zea mays
  VARIANT 3: note = Ancestral polymorphism is M, Derived polymorphism is K
MAMAAATANAILLLALFFAGAHANVPCILPVCKTVGGGSRFFDVQFCLAALGSDGRSVDHCLDYQVYSAIAADLLAANLTATAAKINGLLRKSGGSADEATTRCLRSCQALYGDMERRQTGCAAAVRGVRKGEATRCLEEVASAAEECEDGFQRSKVASPVMAENQQVFKLAKLAVALLRTVYAR

SEQ ID NO: 10497 - protein, 831 aa, Zea mays
  VARIANT 479..831: note = Derived polymorphism lacks residues 479 to 831
  VARIANT 416: note = Ancestral polymorphism is F, Derived polymorphism is C
  VARIANT 414: note = Ancestral polymorphism is V, Derived polymorphism is D
  VARIANT 402..831: note = Derived polymorphism lacks residues 402 to 831
  VARIANT 386..831: note = Derived polymorphism lacks residues 386 to 831
  VARIANT 385: note = Ancestral polymorphism is N, Derived polymorphism is I
  VARIANT 346: note = Ancestral polymorphism is Y, Derived polymorphism is D
  VARIANT 42: note = Ancestral polymorphism is C, Derived polymorphism is Y
  VARIANT 36..831: note = Derived polymorphism lacks residues 36 to 831
MNDKLTNCGHQITIMEYAGFPFPTVALKVYTSDLTSLFLWTCPRCKGYTKGFEVIYRDHSTCGEAWVTCSAGDGPHVPVRRGPARAVGRTATAERSGALRQATAAVPCRAATWALAVPSRAGSSSCLRKPLLTAFSALLYLHKREGARLPASPHPIPMPCTRRRGARVFLRMVDACMHGRHAGPTRIDKWKRMGITSNDAAPRAVLLRFLFLLCIGCKCLASEVEATQTATLAVDASPQLARKIPDTLFGIFFEEINHAGAGGIWAELVSNRGFEAGGLHTPSNIDPWSIIGDDSSVFVETDRTSCFSRNIVALRMEVLCDNCPTGGVGVYNPGFWGMNIEEGKVYNLVMFVKSPETTDLTVSLTSSNGLQNLASATVTVSGESNWIKVEQKLVAKGTNRTSRLQITTNKKGVVWFDQVSLMPEDTYKGHGFRTELISMILDLKPRFLRFPGGCFVEGGWLRNAFRWRESIGPWEERPGHFGDVWHYWTDDGLGYYEFLQLAEDLGTEPIWVFNNGVSHNDEVDTVAIAPFVKDVLDSIEFARGSANSTWGSVRAAMGHPEPFPVKYVAIGNEDCGKKFYRGNYLKFYNAIRQAYPDIQMISNCDGSSTPLDHPADLYDFHVYNDSKTLFNMKSTFDRTSRSGPKAFVSEYAVWRGDAGRGSLLASLAEAAFLTGLEKNSDIVSMASYAPLFVNDNDQTYWMQTLFRESSGAMFHPTTISSSYSGSLAASAITWQDSENSFLRVINFGSDAVTLTISTSGLQASINALGSTATVLTSADVMDENSFSNPTKVVPVKSDLSNAAEQMQVTLAPRSFSSFDLALAQSKLVAEM

SEQ ID NO: 10498 - protein, 137 aa, Zea mays
  VARIANT 103: note = Ancestral polymorphism is A, Derived polymorphism is V
MLVERMTKTMSTESIFSRKYGLLGKQEAHENAKRIEELCFASADEHFKNEPDGDGSSAVQLYAKESSKMMLEVLRKGPRTAAELETPIANTSLVSPDAPRVLADTVLDISGGERVLLRQMKQRNCLVHLPNQGIHIK

SEQ ID NO: 10499 - protein, 204 aa, Zea mays
  VARIANT 192: note = Ancestral polymorphism is R, Derived polymorphism is M
  VARIANT 113: note = Ancestral polymorphism is R, Derived polymorphism is G
MSKRQPGVLGDIQDDDPLHLAHRLFPVYTAADPPPTSSLWALGIGPAYAPPPPSPRLWWWAAIPIPLHALPPVAPPPANPGPGNDENDDGKNRSATLPVALAPLVGTGGGAVGRRRSVPRRRNRQAYRVCSHCQTSETPQWRESPDGSVTLCNACGLRYKKRGLLPEYRPTTAPSFQAGQHSNRHQRIMKMREQKNGSSSSSRS

SEQ ID NO: 10500 - protein, 472 aa, Zea mays
  VARIANT 243: note = Ancestral polymorphism is R, Derived polymorphism is C
  VARIANT 334..472: note = Derived polymorphism lacks residues 334 to 472
  VARIANT 407..472: note = Derived polymorphism lacks residues 407 to 472
MSNQPPHASLQDDLPDCDGDDPLALAIRLFPAHTTGAGLSPAALGIGRVAEPPRREQEPLANSTYGVRGAGPDPWGLRLSRSVLGGLDGFDVDTFFADDALDGGGEATEGDSPPAHVTAAARGSLANDDASPLPAAMPAVALEAYDACSAPVPAACGGAPPVLVANNSMPPASCLGARGALYIVSKRTRTHAPPPLAAESMTPAVAPPPAMPDGGNGGNNRSAALPVALAPPSGSTGGAVRRRRPVPRPRNREVQRTCSHCQSSKTPQWREGPDGRRTLCNACGLRYKSHRLVPEYRAAESMTPRDLHPNAGLVGASSGPSSRPSSSSTTTPSQSQIDFPSHALPAVAPPPAMPDPDGGNGGNNRSAALPVALAPPSGSTGGAVRRRRPVPCPRNRQVQRTCSHCQSSETPQWREGPDGRRTLCNACGLRYRSHRLLPEYRPTTSPSFQIGQHSNRHRRIMQIREQNGTAGS

SEQ ID NO: 10501 - protein, 589 aa, Zea mays
  VARIANT 293..589: note = Derived polymorphism lacks residues 293 to 589
MAGRGGASAAAPLLEKTAAAAESGGGCCYVDGCPGCAVDRHKAANPGIPYGNFIYVWIVTLCTARASEREAVAPPPPPMAEEEEEERGAAPLPLPLPLPRNGEAAAAAHRPECPGCVFDRRKDDLLLRRAKPYREFLYIWIISLTAALPISSLFPFLYFMIRDLNVAKRTEDIGFYAGFVGASFMFGRCLTSTVWGIAADRVGRKPVVVFGISSVVVFNTLFGLSVNYWMAIATRFLLGALNGLLGPIKAYAIEVCRPEHEALALSLVSTAWGIGLIIGPALGGYLALLTMWQPAENFPTVFSPDSIFGRFPYFLPCLCTSIFAAVVLISCIWMPETLHKHKVHENRSRNIEALEARLIDSNEKVEESGSLDSKKSLFRNWPLMSSIIVYCVFSFHDMAYTEVFSLWAESDKKYGGLSLSSEDVGQVLAVTGASLLVYQLFLYPSINKVLGPIKSSRVAAILCIPILFAYPYMTYLSEPGLSIVLNIASVIKNNLGVTIITGTFILQNNAVPQDQRGAANGLSMTGMSFFKALAPAGAGIVFSWAQKRQHAFFFPGDQMVFFLLNAVELVGLLLTFKPFLAVPEQYDTR

SEQ ID NO: 10502 - protein, 220 aa, Zea mays
  VARIANT 16: note = Ancestral polymorphism is V, Derived polymorphism is I
MLDMGIPTTVMFRVVVIAVFTLSTAAAAGNATASPSSVTNSTASSTKNTTAPLLPPFGTNHAVGDGAGWIFDWKANASAANYSAWAANRTFFLGDYLSFRTDTSNTVVHTTNATAYRFCSAGVAARGGGGGWKPEEAFLVVMLTAEGTNYFFSDALDGEHCRKGMRFQVGVAHGRGLPSVPPSYYEPLSGAPAGTRARHDGAVAVWGVAMVAAFAALAFS

SEQ ID NO: 10503 - protein, 430 aa, Zea mays
  VARIANT 69: note = Ancestral polymorphism is S, Derived polymorphism is L
MVILYPGCVAPTVHRDFLPRWVLLNNSSRMYCHVFPDRTKPKRQYRHQWVPCFSKGSSFQDPLPSVKPSRLLPAEELKTYPNTVPEEIFNTIILDDSDAFYVLELSTSREFSSSLDKNSAILICLFDVDGDSLLQRVPAIYLGQPTHGFKTEQQIPFQSGSVDIVTFKGSKLKTIKEVWIGLESGTSGSWRLDGLSLKVIHGPVGQPKEINGTPEQKFSGLQYTFENVNVFLGDDGASVAEARPTAITDLSGVGLSDLQQGMLSSRSKASSIQEVREDGLREYADLKQSLLLYDASIVITGFSTFILASNDSAAYSFLIGGIGGFLYLLLLQRSVDGLPVIGSPSEAGGAQPSVKSFSGVRRPWLILSLVLVAGAVALKYGAGGDSFALTPTDLFVGTAGFLANKVAVLLAAFMPMLSDSKSEDGSGDSS

SEQ ID NO: 10504 - protein, 66 aa, Zea mays
  VARIANT 16: note = Ancestral polymorphism is A, Derived polymorphism is S
MGFLDALYRVVMRRNAVYVTFVVAGAFAGERAVDYGVHKIWEMNNLGRSYVSAQINEQCKDYRRPR

SEQ ID NO: 10505 - protein, 276 aa, Zea mays
  VARIANT 34: note = Ancestral polymorphism is P, Derived polymorphism is R
  VARIANT 54: note = Ancestral polymorphism is V, Derived polymorphism is I
  VARIANT 62: note = Ancestral polymorphism is L, Derived polymorphism is I
  VARIANT 80: note = Ancestral polymorphism is T, Derived polymorphism is I
  VARIANT 113: note = Ancestral polymorphism is P, Derived polymorphism is A
  VARIANT 185: note = Ancestral polymorphism is G, Derived polymorphism is E
  VARIANT 194: note = Ancestral polymorphism is E, Derived polymorphism is K
  VARIANT 198: note = Ancestral polymorphism is N, Derived polymorphism is D
  VARIANT 202: note = Ancestral polymorphism is R, Derived polymorphism is L
  VARIANT 204: note = Ancestral polymorphism is D, Derived polymorphism is N
  VARIANT 241: note = Ancestral polymorphism is T, Derived polymorphism is A
MTEGESGVRRWLVDISRWRPSPAQFDAAAALLPPHERPAISRFVKEDDRKRALVSRLLQYSLVHHLLRIPFHLINIRRTTEGKPYLQNNSSAFPNFNFSTSHHGDYVGIASEPLCLVGLDIVSVSEPHGETAAEFVSNFSSCLTDHEWSCIVRAGTPRDVLTEFYRYWCLKEAFVKAIGAGVGFGLRRLEFHHEGWTNISIRIDGEVSKKWRFWLFKLDETHLASIAKGDPEDAINTFKKTLSNVIIAENQLSSALDSPEEGFTLQTVEELTRSQG

SEQ ID NO: 10506 - protein, 475 aa, Zea mays
  VARIANT 34..475: note = Derived polymorphism lacks residues 34 to 475
  VARIANT 22..475: note = Derived polymorphism lacks residues 22 to 475
  VARIANT 15..475: note = Derived polymorphism lacks residues 15 to 475
METSSAPAAATEAGWYVLGPNQEGVGPYALAELREHFANGYFNESTMLWAEGRKEWMPLSSISELHSAVAAKDQSEQDAPDVDDDFEKFQKEVIEAETEVKALKGNDVDQQDDERPATPPDGEEEFTDDDGTIYKWDRTLRAWVPQNDASGSKEDYAVEEMTFAVEEEIFQAPDILGPALEEINNLPESKNKGSDKAEMRGDKKRKSYENPAEKKEANKPPDSWFDLKVNTHVYVTGLPDDVTVEEIVEVFSKCGIIKEDPETKKPRVKIYTDRETGRKKGDALVTYFKEPSVALAVQLLDGTPFRPGGKTHMSVSPAKFEQKGDVFVSKKTDKQKKRKIKKVEDKMLGWGGHDDKKLMIPATVILRHMFTPAELRADEELLPELEADVREECIKFGPVDNVKVCENHPQGVILVRFKDRKDGAKCIEKMNGRWFAGRQIHASEDDGSVNHALIRDYDAEVSRLDRFGQELEEST

SEQ ID NO: 10507 - protein, 218 aa, Zea mays
  VARIANT 73: note = Ancestral polymorphism is G, Derived polymorphism is W
MAAVVRDGLAMPPAVVPAAEEEMRWWKLDSGVSAVSFGFVATAILVSMFLAMAILEHFLCPLAHTLGHAPPRGIHRRLRFFLGRGGERTAAPSSDLEAARKLQGHTPLEDELRDAVLLVFANKQDLPNAMNAAEITDKLGLHSLRQRHWYIQSTCATTGEGLYEAWTGCPATLRARGSKDIFSLCLVRQSPSTRQRKQQFGFDGQNKRKLYSTADGVY

SEQ ID NO: 10508 - protein, 129 aa, Zea mays
  VARIANT 9..129: note = Derived polymorphism lacks residues 9 to 129
  VARIANT 25: note = Ancestral polymorphism is D, Derived polymorphism is N
  VARIANT 40: note = Ancestral polymorphism is D, Derived polymorphism is Y
  VARIANT 56: note = Ancestral polymorphism is T, Derived polymorphism is I
  VARIANT 57: note = Ancestral polymorphism is M, Derived polymorphism is I
  VARIANT 62: note = Ancestral polymorphism is R, Derived polymorphism is T
  VARIANT 65: note = Ancestral polymorphism is E, Derived polymorphism is K
  VARIANT 72: note = Ancestral polymorphism is T, Derived polymorphism is M
  VARIANT 83: note = Ancestral polymorphism is S, Derived polymorphism is F
  VARIANT 84: note = Ancestral polymorphism is G, Derived polymorphism is V
  VARIANT 110: note = Ancestral polymorphism is V, Derived polymorphism is A
  VARIANT 112: note = Ancestral polymorphism is I, Derived polymorphism is L
MSWDIAIVWLTKLFNHIFQSNKMLDEWSSTLVPIFKNKGDIQSCTNYRGIKLMSHTMKLWERVIEHRLRGMTHITMNQFGFMSGRSTMEAIFLIRQVMERYKKQNDLHMVFIDLEKVYDKIPRILCGGH

SEQ ID NO: 10509 - protein, 1858 aa, Zea mays
  VARIANT 408..1858: note = Derived polymorphism lacks residues 408 to 1858
  VARIANT 388..1858: note = Derived polymorphism lacks residues 388 to 1858
MAEPSASSASTAAAAEQTDAERMDALDRMLTRLALADDAHLAPVLARVLPYAVTSLASPAPAVRKLVMEILSHINKRVKHRPEISLPMLELWKIYTEPTSSTMVRNFCILYIEMAFERLPTEEKGNIAPDLLINISNIPPQHQGIILRLVTKAIGECNTHKVDETIASKYRVITESSDGLLFADFCFHTLLYQAPPQGSGCPAGLSVVQSERVTGKQPLKIDVLASRKLGILNVIEAMNFTPEIVYPLYLSASSDSQDAVSKKGDEFLKRKASTVNLEDPDLIKRLFTLFNGTVGAENIAAELKVSPAHASLRMRLMSVFCRSVAAANAFPHTLQCIFGCIYVITSPFWYVTKSVLSFILVGSGTTSRLKQLGMEFTVWVFKHAVTDQLKLIGPVILSGILRSLDGSSTAETDSTGRDTKIFAYQAIGIIFLPQLYCSDKTDMAIRLFTALRLEDQSLRLTIQEAATSLATSYKRASTIVLKDLESLLLENCEAEQSEVRFSAIRWATTLYDTRHCSSRYICMIGASDVKLDIREMALAGLNLMNDGRQSSAGSVDFSYPDIKEMINYICCQRPQLLHSDEQTNGKLLFPSKTFVSMIKFLMKCFESSDNLKLLQEDPSHSAVAKMCVILEHAMSYEGSSELHALALKSLVDLSSREPKLVSLRYAERINWLRSLLGHVDSDAREAVSRLLGIASSALSTSSALNLLSELTSTLSQNRPSRFENYHGVLCAIGYLTAGALKQSCITEDMVKNVVDILVKVVTSEGSALASVAMESLGHIGLRCALPSINQNSSTGTLLSVLRERLTKLLSENDTKAQQKILVSLGHISWNEMSFPHLNDALDLIFSLSRSKVEDVLFAAGEALSFIWGEVPVTADVILETNFVSLSQATNYLTGDASLVSSNSYEKSGCEEAHSIAREEIIKKLFETLIYSSRKEERCAGTVWLVSLTMYCGRHKKILELLPQIQEALSHLLGDPNELTQDLASQGMSIVYELGDASMKEELVHALVNTLTGAARKKKAIKLMEDSEVFQEGTIGNNPTGGKLSTYKELCSLANEMGQPDLIYKFMDLANYQAALNSKRGAAFGFSKIAKQAGEALQPYLNTLIPRLVRYQHDPDKNIQDSMAHIWKLIVSDPKKAIDEHYDAIVEDLLVQSGSRLWRSREASCLALADIIQGRRYSQVCKHLRNIWTTTFRAMDDIKETVRTAGDSLCRAVSSLTIRLCDISLTSTSEANETMNIVLPYLLSEGILSKVSSVQKAAISLVMKLAKGAGPALRPHLPELVSCMLECLSSLEDQRLNYVEMHAGNAGIKTDKLETLRIAVAKDSPMWETLDICIKVVDKNSLDLLVPRLAQMIRSAVGLNTRVGVASFITLLVQKVMVDIKPFAAVLMKLLHSAVLEERSSAAKKAFASSCATVLKYASPPQAQKLIEDTTSLHSGGKNDQLSGAILIKAYLSNASDILGGYNAVVIPVIFVSRFDDDKDTSALYEELWEDIPSSERVTLTLYLPEIVSLLCDGMSLSSWAGKRKSAKAIKKLCDVLGEPLSAHYQNILKSLLKELPGRFWEGKDAILDALASLCACCHVAITAEDSCLPSVILNCVCAACSRKSKLYREAAFLCLHKVFFFKSHLLSFSLADANWFHLPRVFFFFITFQVITAFRDPGFFNSVFPMLFEVSNQSAISKTKGSAELDESEGASVSLDKVLNCATSCISVAFPQDIINQKKNVVELILNSLLPEESWQVKLSSFLCIKELCLKFDNSGDSNTWPQDTAYLVEELFHLVSPKLVDSIRLVKIAQVHVAASECLLDLSKLYRDFPLSNRTEAKFEDELTELCESEKSEQAKAILKECLAILKALPGVTMTTD

SEQ ID NO: 10510 - protein, 229 aa, Zea mays
  VARIANT 143: note = Ancestral polymorphism is W, Derived polymorphism is R
  VARIANT 112: note = Ancestral polymorphism is A, Derived polymorphism is V
MENYHMLFGRPSTQPSSAATSNSYNFMLPTAGSTSGGGGGLRDHDRGGGQHSGHAGGVPSSSSFFAEPSNTSSKDSGAAASSPPPAAGIGRGEEPAAGTPPAAAEVDGRLQAGKRKGEKKERRPRFAFQTRSQVDILDDGYRWRKYGQKAVKNNKFPRSYYRCTHQGCNVKKQVQRLSRDEGVVVTTYEGTHTHPIEKSNDNFEHILTQMQIYSGMGSTFSSSSHNMFH

SEQ ID NO: 10511 - protein, 159 aa, Zea mays
  VARIANT 120..159: note = Derived polymorphism lacks residues 120 to 159
  VARIANT 87: note = Ancestral polymorphism is G, Derived polymorphism is R
  VARIANT 80..159: note = Derived polymorphism lacks residues 80 to 159
  VARIANT 59..159: note = Derived polymorphism lacks residues 59 to 159
  VARIANT 22: note = Ancestral polymorphism is M, Derived polymorphism is I
  VARIANT 15: note = Ancestral polymorphism is I, Derived polymorphism is V
  VARIANT 12: note = Ancestral polymorphism is H, Derived polymorphism is R
MGWKAAEKLIRHWKVLRGDNVMIIRGKDKGESGLIKRVIRSQNRVIVEGKNLVKKHIKQGEGHTGGIFSVEAPLHVSNVQVVDPVTGKPCKIGYKYLEDGTKVRYARGMYASGVVIPRPEILKERRKPRPTSPGPKDTPIELAQEKTYDEKAGIGMPDL

SEQ ID NO: 10512 - protein, 156 aa, Zea mays
  VARIANT 4: note = Ancestral polymorphism is S, Derived polymorphism is C
  VARIANT 12: note = Ancestral polymorphism is E, Derived polymorphism is D
  VARIANT 21: note = Ancestral polymorphism is A, Derived polymorphism is V
  VARIANT 27: note = Ancestral polymorphism is V, Derived polymorphism is G
  VARIANT 31: note = Ancestral polymorphism is A, Derived polymorphism is V
  VARIANT 41: note = Ancestral polymorphism is G, Derived polymorphism is R
  VARIANT 42: note = Ancestral polymorphism is V, Derived polymorphism is F
  VARIANT 45: note = Ancestral polymorphism is C, Derived polymorphism is Y
  VARIANT 57: note = Ancestral polymorphism is M, Derived polymorphism is I
  VARIANT 66: note = Ancestral polymorphism is A, Derived polymorphism is P
  VARIANT 74..156: note = Derived polymorphism lacks residues 74 to 156
  VARIANT 80: note = Ancestral polymorphism is A, Derived polymorphism is V
  VARIANT 85: note = Ancestral polymorphism is R, Derived polymorphism is K
  VARIANT 93: note = Ancestral polymorphism is G, Derived polymorphism is R
  VARIANT 95: note = Ancestral polymorphism is S, Derived polymorphism is F
  VARIANT 104: note = Ancestral polymorphism is K, Derived polymorphism is N
  VARIANT 116: note = Ancestral polymorphism is E, Derived polymorphism is K
  VARIANT 121: note = Ancestral polymorphism is R, Derived polymorphism is I
  VARIANT 123: note = Ancestral polymorphism is L, Derived polymorphism is I
  VARIANT 134: note = Ancestral polymorphism is L, Derived polymorphism is F
  VARIANT 138: note = Ancestral polymorphism is G, Derived polymorphism is E
  VARIANT 153..156: note = Derived polymorphism lacks residues 153 to 156
MNSSMHHLASIEKYVVCLEYASFVGDGLTIAVDPYIVNYTGVVFCQYSSKYWRGPIMLKQVDGSYACFVDSEAWITLGQAKELLRVIGLREEGSSLEFLRRGYKHMMETSRVTIIKFLCCRMLHGGNRTLIRRLRLPGKLEVLHLLAECFLIWNWE

SEQ ID NO: 10513 - protein, 423 aa, Zea mays
  VARIANT 115: note = Ancestral polymorphism is A, Derived polymorphism is V
  VARIANT 130: note = Ancestral polymorphism is L, Derived polymorphism is P
MVDVEEVGNKMQSQMRLHAEPDDAAADLPLPALFDRASRLHALASSSALDQDGIRTGVELLRRCDEMVGRLGLFSPNETKDDVSTANLKYLLVPYYLAEMTEKMAQEDRIPVLKASQDHLKEFIALCEVLELIPEDELELSRQKQSDTMANRRAQKVARFKRQKAAETKLQEIRERKERRGRSLRATALSAPVEAGEEDDLEDDGEEEREAWLATISLAICKAFDLLDMLKKEEEMLLAVKERKAKDGNAFAREMLDERTKKAEAWHHKAASRVAYSKPADPITCATFAQDVIEGRASVSQAHEHKHQPLIFGPASLVGGGLTSERERMAAQVFQPSYRMPTMSIEEAGLREMKMMERWQERTAEMMREANSAWHKGGDSSSSSMPQGEGGDEDAEEAKARAWDDWKDDNPRGAGNKKLTPCG

SEQ ID NO: 10514 - protein, 523 aa, Zea mays
  VARIANT 205: note = Ancestral polymorphism is G, Derived polymorphism is V
  VARIANT 269: note = Ancestral polymorphism is C, Derived polymorphism is W
  VARIANT 281..523: note = Derived polymorphism lacks residues 281 to 523
  VARIANT 464: note = Ancestral polymorphism is C, Derived polymorphism is F
MHAADASQSQPQSSQSHADAELAAALRECVAHVAAGRFDGGANRCFARVSALASLGDGPPQRLARIMADGLVRRLIGSFTGRGISGALIDSCGDYFDRQSVRAARCAFFKLLPALRVAFVAINRAILDAMENEKFVHVIDLSGPAAHPWQWLKLMRAFHGRPGGAPQLRITMVHDDEAFLAHTAALLRREAEALDMAFSFHPVLGRLETLDLGDLHHALAMRSGDARAFSCALQMHRLLAVDDTDTQQQLAAAAVGTGPSVGPRAASSCSCYPPGDVACYYCPPETAKTSLPDPSPTTPFAAQASSSSSPHPQWTAVPRPALLPPLAGFLSAARAASPKVVCVMEQDAGDNVAGGLAARFEEALQHYAAVFEALDDAAGAAGEERAAVERVLLWEEVRDVLARDGPERRERHERLHQWAARMAGAGFAGVPLSYVAKMEADAALRRCGLRGYETRGVGGCLLLCRRGRPLYSVSAWRPWPSRGSASASSSGSGSRSSRLPQLVAAPVQMPWPLLLPPPVYHTH

SEQ ID NO: 10515 - protein, 487 aa, Zea mays
  VARIANT 238: note = Ancestral polymorphism is G, Derived polymorphism is R
  VARIANT 206: note = Ancestral polymorphism is T, Derived polymorphism is I
  VARIANT 190: note = Ancestral polymorphism is I, Derived polymorphism is M
  VARIANT 99: note = Ancestral polymorphism is M, Derived polymorphism is V
MYTPTPPPSSSSSAMHHPVTTPAENDDDVPTCAPALWQERLVQDLCGCAGHVEAGAVERAGRCLARATGLAAAAAGDGPLQRLAVPMADALARRLVRLMLPAVAGALIDPSDSLDPRGVRAARRTFFELCPFPRAAVAVANRAILEAMENEKNVHIVDFAGPTAQPWQWLKLLHDFSRRPGGPPHLRLTIVHDDRDLLAAISARLTEEAEELDVPFQVHRVVGKIEALDPSDLHGVLRLRSGEARAVACTLQLHRLLAVADDDDHPAGGGATLSAGHRSSRTASVAVSRLQRMASTSCPPSDVDDSGSPATPLGFVSPPPSTPPPPQQQRQTPPALASFLAAVARALAPAVVVVTEQEAGHGGVSFRERFGEALGYYAAVYDCLDAAAEAYRRPAAERAEVERAVLGEEIRDVLLRAGAHGAGRVQERGAELRRDEGGERRAGQVRPQRVRGDGEQGAGRLPALVLELVATLLGVGVAAGRIRLVGS

SEQ ID NO: 10516 - protein, 355 aa, Zea mays
  VARIANT 4: note = Ancestral polymorphism is C, Derived polymorphism is R
  VARIANT 17: note = Ancestral polymorphism is P, Derived polymorphism is T
  VARIANT 40..355: note = Derived polymorphism lacks residues 40 to 355
  VARIANT 263..355: note = Derived polymorphism lacks residues 263 to 355
  VARIANT 264..355: note = Derived polymorphism lacks residues 264 to 355
  VARIANT 267..355: note = Derived polymorphism lacks residues 267 to 355
  VARIANT 282..355: note = Derived polymorphism lacks residues 282 to 355
MWSCGVIFFVLMAGYLPFEDSNLMSLYKKIFKADFSCPSWLSTSAKKLFKKILDPNANTISSFVRSHHFNSFCSTSAGGQTTVVITPRQVTVGLGRKRVNAVAAAKHHTVIATELGELFTWGSNRAAANKHSAVVADTGEVFTWGCNKEGQLGYGTSNSASKCIPRMVEYLKGKVLRGVSAAKYHTIVLGADGEVFTWGHRLVTPRRVVVARCLKKGGNTNLKFHRMERLQVISVAGTTHSTALIADGALFYWVSSDPDLKCQQIFSMCGRNIVNISAGKYWTAVATLTGDVFMWDAKKRKDETPIFTRVHGVKRATFVCVGETDMLVLSSIYHPEYPSFLSFTMSKFSHLLLDS

SEQ ID NO: 10517 - protein, 486 aa, Zea mays
  VARIANT 1: note = Ancestral polymorphism is M, Derived polymorphism is V
  VARIANT 6: note = Ancestral polymorphism is L, Derived polymorphism is P
  VARIANT 26: note = Ancestral polymorphism is S, Derived polymorphism is F
  VARIANT 168: note = Ancestral polymorphism is V, Derived polymorphism is E
  VARIANT 261: note = Ancestral polymorphism is A, Derived polymorphism is V
MKMAVLAGAAVVAVAAAAMVAALLSSPDALRDVAVLEIGGGEGRVELVPVDAGAAGPESLAFDPAGGGPYAGVSDGRVLRWVPGERRWEEHSASCAPELLLEIGDAELLPLDGAAGPESLVFAGGYGDGGEGGPRSRACRTAGCLGAGGAALGRALLLRAQTSSFSRETLLVPNQPESSAYGSRLTVVCRPPPSKLDSCRGSQDPGREHECGRPLGLKFNPDTGELYVADAYHGLRMVAPGPGGGKASRPVAPEWWQGARAFSFANGVEVDPGTGAVYFTETSTRFQRREFLRIVVSGDTTGRLLRYDPRGGGGVEVLADGLAFPNGLAMSSDGTHLLLAETTTGRILRYWLRPTAPKAPALLEEVARLPWFPDNIRMSPRGGFWVGLHARRGKLAQYCISYPWLRRLVLALPPRHVQRASSLLSRLGRQVIALRLSEEDGRVVEMASVHGDLRRVFRSVSEVAERNGSIWIGSVMSPFLGVYKLQ

SEQ ID NO: 10518 - protein, 661 aa, Zea mays
  VARIANT 74..661: note = Derived polymorphism lacks residues 74 to 661
  VARIANT 105..661: note = Derived polymorphism lacks residues 105 to 661
  VARIANT 308..661: note = Derived polymorphism lacks residues 308 to 661
  VARIANT 358: note = Ancestral polymorphism is S, Derived polymorphism is I
MAFNAKPYCSTTAKPPTPAAHRSPSGPSPCISVRAAAVSPRARHSAYGLSAAGNASSSTVRLRALAQRTRAQPQPPRRRPEYVPNRIDDPNYVRIFDTTLRDGEQSPGATMTSAEKLVVARQLARLGVDVIEAGFPASSPDDLDAVRSIAIEVGNPPPGDDGGAHVPVICGLSRCNRRDIDAAWEAVRHARRPRIHTFIATSEIHMQHKLRKTPDQVVAVAREMVAYARSLGSNREFLYHILEEVIKAGATTLNIPDTVGYTLPYEFGKLISDIKENTPGIENAIISTHCQNDLGLATANTLAGAHAGARQLEVTINGIGERAGNASLEEVVMAIKCRGELLDGLYTGINSQHITLTSKMVQEHSGLHVQPHKAIVGANAFAHESGIHQDGMLKYKGTYEIISPDDIGLARANEFGIVLGKLSGRHAVRSKLVELGYEISDKEFEDFFKRYKEVAEKKKRVTDEDIEALLSDEIFQPKVIWSLADVQATCGTLGLSTATVKLIGPDGEERIACSVGTGPVDAAYKAVDQIIQFRIVIIKPLRPSVYKDLHRIYHHQLNFMRKDTLIPTVLREYGMTSVTEGIDAIATTRVVVTGDVANNSKHALTGHSFNRSFSGSGAAMDIVVSSVRAYLSALNKMCSFAGAARASSTEVPGSASVQRAE

SEQ ID NO: 10519 - protein, 184 aa, Zea mays
  VARIANT 156: note = Ancestral polymorphism is A, Derived polymorphism is P
  VARIANT 136: note = Ancestral polymorphism is T, Derived polymorphism is I
  VARIANT 131..184: note = Derived polymorphism lacks residues 131 to 184
  VARIANT 129: note = Ancestral polymorphism is G, Derived polymorphism is R
  VARIANT 107: note = Ancestral polymorphism is F, Derived polymorphism is S
  VARIANT 95: note = Ancestral polymorphism is A, Derived polymorphism is T
  VARIANT 94: note = Ancestral polymorphism is L, Derived polymorphism is I
  VARIANT 62: note = Ancestral polymorphism is V, Derived polymorphism is I
  VARIANT 61: note = Ancestral polymorphism is F, Derived polymorphism is S
  VARIANT 37: note = Ancestral polymorphism is R, Derived polymorphism is C
  VARIANT 31: note = Ancestral polymorphism is G, Derived polymorphism is D
  VARIANT 29: note = Ancestral polymorphism is G, Derived polymorphism is S
MRVQDEDVDDDGEVTAPPQHLVFAYYFTGHGFGHATRALEVVRHLVAAGHDVHVVTAAPEFVFTIEIASPSLHICKVLLDCGAVQADTLTVDRLASLKKVCSFGLCSAVYTNNSIAPLRFSEFLILVRGVQYHQTTVVPRESILKTEAEWLNSIKALLHGWSQRSRPRLPASPCPHLQPSSPTS

SEQ ID NO: 10520 - protein, 499 aa, Zea mays
  VARIANT 231: note = Ancestral polymorphism is M, Derived polymorphism is T
MQGHVNPARALAHRLAKLSDVVGGCPILATLSVHVAAHRRMFPAQLDPDAAGEEDEEEASDGVISYVPHSDSFDDGSLPRTPEDWARRRRASRESLSAMLARFAGGGRPVTCVVCTLLVPAAVDAATRHGVPFAVYWIQPATVLAAAYHYFHGYGETVAAADPAHEVSLPGLRRPLRVRDFPSYLVDTTGSPLARSVVGMFRELFESVDRWRPKVLVNTFDELEAGVLSEMKRHLDVFAVGPMVAGAGGGSGSSGASNDEGRIHLYRHDDADRKRYMEWLGAQPESSVVYVSFGSIATHTLQQMEEVVQGLLQAGRPYLLAARSWHGLEDDGARRVLDNAAQSSGGRGTVVDWCDQPEVLAHPAVGCFVSHCGWNSTLEAVAAGVPLVGVPSLFDQPTNTYLVVEEWGVGVRGERDGEGVLAATELARCVELVMGQGTKATAIRERVKALREMAQQAARAGGPAERNLEDFVNSVGDSFRPVGISVAEKTDESRTCSSE

SEQ ID NO: 10521 - protein, 106 aa, Zea mays
  VARIANT 94: note = Ancestral polymorphism is R, Derived polymorphism is G
  VARIANT 68: note = Ancestral polymorphism is P, Derived polymorphism is R
MGSAAASPPPSGKLTQEELKRVAAHRAVEFVEPGMTLGLGTGSTAAHALDRLGDLLRAGALPGFREDPIRSNSIHLHAMEIDYGFCDRLIALFRVDFSGRGELSIR

SEQ ID NO: 10522 - protein, 921 aa, Zea mays
  VARIANT 651..921: note = Derived polymorphism lacks residues 651 to 921
  VARIANT 37: note = Ancestral polymorphism is E, Derived polymorphism is D
MTGFLVSAATGPMNSLLCKLVTLLGDEYKLLKGIRKEIRALRDELSSMNALLRRLSDAGDGELDVQRKEWRNKVRELAYDAEDCIDVFMHQLRRPGGGGSDANKAGLVRKLTAKIKKLRRARRIAVQIQELKSRVVEESGRRDRYKLDDVPVPGKNRRVEIDPRLPAMYSEAKSLVGIDGPRDKIVHRLTGQEQGEQLTVVSIVGFGGVGKTTLANQVYCKIKGSFECTAFVSVSQSPDLSRVLSDMLSQLGCSRVKNLNDLQQLVEKIRERLSNKRYLVVVDDIWSLQAWDIIKCVFVQDNYGSRVIITTRIEQVATKCCSYCHNNIYKMKPLNDLDSRRLFFQRIFGLEDSCPEQYHAISEKILKKCGGVPLVIISIATLLASQECLNREKWEKIQKSLVFELETSPDLGWVRHVLNLSYNDLSHCLKTCFLYLGVYPEDHKIEKVNLLRCWIAEGFVSHEHDLSPEEVAESYFNELVNRSIIQPTGFEYGELAYCKVHDILLNFIMLKSSEENFITRMDEQHIIKGDHEVRRLCLQLKNTHYLFRANMKLSQIRSVTIFGYPDWMTYLPRFQLLRVLDLYNCDRFDGNEFLDLSNICKLFQLRYLRTNSHRLHLPKQIRGLENLQTLDIRDAIIQGIPSDVIHLKSLRHLNIPIDVKLPNGIGRMVTLRSLGFFNVAENSMDNIRDLGELTNLMDLDLISINQVVKGQGPSDKLKISFLIDSLGKLTSLRSLYVSSIDGTKLISPTCDFLSCWSPPPHNLQRFCMSFCTISKVPGWISQLDKLTSLKIKVKELLGDAIQLLGELPCLIYLDLSAAEDPKCDIFFDDNAYPSLREFGFAYTFASVAFGPRTMAKLQVLYLSFYKLTQKEDVSLSGIEYLLNLEKLTARIYNHGKIGVAFMDAILKHPRSETFNILFPRC

SEQ ID NO: 10523 - protein, 117 aa, Zea mays
  VARIANT 23..117: note = Derived polymorphism lacks residues 23 to 117
  VARIANT 27..117: note = Derived polymorphism lacks residues 27 to 117
  VARIANT 88: note = Ancestral polymorphism is S, Derived polymorphism is P
MRLKALWWPITCDLFSWRVVCRQPPRQKEAPSRGSIDPLHPRDYYHFKHSNKVPLPGRIAGYCRKYHSLNIIFWYPNRHFWSQTFGCPFDSNRSACTGPRLATTRLISPMKEYLFYA

SEQ ID NO: 10524 - protein, 277 aa, Zea mays
  VARIANT 35: note = Ancestral polymorphism is R, Derived polymorphism is T
MASADLLRREEEFYSSLFDSAKGDGARSRSQLIERKIEALEDMATRVSNRRSRKWFNDRLLIELVPRLYVEEIKGLFAPPPWGEQVPLSAFYRANVGEWDSFRSIDMDAEARLMQHMKKSLEKPRNHVDEGESIALNAWHRIDRHTREAIKRNFLPDLLGIYEKYDLLNFIYATCTSFSVPHVTLLLPFSCLQERVRAFIEDASDKDALVLNVQDPFQRLLLHGVCEFYNVSSTTTSSVREDGRPWKATTIKKRQGTGVPSRITLVSFLRMKKNGSQ

SEQ ID NO: 10525 - protein, 430 aa, Zea mays
  VARIANT 329..430: note = Derived polymorphism lacks residues 329 to 430
  VARIANT 202..430: note = Derived polymorphism lacks residues 202 to 430
  VARIANT 186..430: note = Derived polymorphism lacks residues 186 to 430
MSVAAGVSDAAIAVRDKLRGKIGQTKVKRYWPGKAPEWADDVDEDVDLRTARVSLDKAFPRDEDGDVPAKDDRRLRRLAETRAENKEELRADHRRIRQAEIVSTAEEENERQEADADEEDEEAQEERRRRIRARQLLREQEELLPQEEEEPVEAEESEEESEYETDSEDEQMGMAMVKPVFIPKSQRDTIAERERLEEEERQLEELVKKRLEARKIETRQIVVEEIRKEEHIEKALNEEANIEDVDTDDELNEAEEYESWKNREIARIKRDREERDARLKEKEEIEKVRNMTEEERREWERKNPKPLRQTKQKWKFMQKYYHKGAFFQEGADDVIQSAGKEDIYTRDFSEPTGEDKMDKSILPKVMQVKHFGRSGRTKWTHLVNEDTTDWNAPWSTNGPLRAKYNAKMAGMNAPIAKPKGSKKLKDWDAK

SEQ ID NO: 10526 - protein, 458 aa, Zea mays
  VARIANT 11: note = Ancestral polymorphism is F, Derived polymorphism is S
  VARIANT 269: note = Ancestral polymorphism is A, Derived polymorphism is V
MHLLMLPWLAFGHIVPFVQLARRLLSSTSSSVRVTFLTAAGNVPRVEAMLSSPSSTGEAAVVVPLRLPHVPGLPEDAASTADLSPEGAELLKAALDAARPQVAALLAELRPDAVLLDFATPWAAEDAAALGAKSLRFSVFSAVAGAYLSVPARRPDAAGQLPSARDLMSAPAGFPGSSPLAAAGVPAYQAADFTYMFTSFGGQPCVHERVVAGIRACDGLVLKTCAEMEGAYIDYLAAQFRKPVLVAGPLVPGPPAGDLDDHWATWLSAFPDGAVVFASFGSETFLPPAAATELLLGLEATGRPFLAVLNSPDGAVPPPGFAERVSGRGLVHAGWVPQQHILRHRSVGCYLTHAGFSSVVEGLVAGCRLVLLPMKGDQFLNAALFARELRVGVEVARRDDDGWFGRQDVCDAIAAAVADVGERDARKWADFLTDDGVQGRFADEFVRQLRELVGAASS

SEQ ID NO: 10527 - protein, 362 aa, Zea mays
  VARIANT 171: note = Ancestral polymorphism is S, Derived polymorphism is A
  VARIANT 101: note = Ancestral polymorphism is A, Derived polymorphism is V
  VARIANT 86..362: note = Derived polymorphism lacks residues 86 to 362
MKPPRLGPSPPSIRIPPSVPRAIPSFIPILVRAAARGSLRPGARMLAVFSGEVVEVPAELVAAGSRTPSPKTKASELVARFLGTSCPAAVSVRLADLGHLAYSHANQALLRPRSFAAKDEVFCLFEGVLDNLGRLSQQYGLSKGANEVLLVIEAYKALRDRAPYPASLMLAQLAGAYAFVLFDASTNSLLVASGGDVPLFWGVTADGCVAFSDDIDVLKGSCGKSLAPFPQGLLPLVPLSESSKKERRGSSSSSSLTEYPLPAPYTGCFYSNALGGLKCYENPKNKVTAVPANEEEICGATFQKGRIQRPEVNLKWMLHNSDVASGRGYGAHSAALGDEVSSSVSRPGLGATVHGAWWCNVT

SEQ ID NO: 10528 - protein, 353 aa, Zea mays
  VARIANT 156: note = Ancestral polymorphism is K, Derived polymorphism is M
  VARIANT 162: note = Ancestral polymorphism is C, Derived polymorphism is S
  VARIANT 163: note = Ancestral polymorphism is I, Derived polymorphism is M
MQMEGREGIAVGRESGHGSMFRAADIAMAEAQEAAAKGYQSSPSSPSTSPTPSPPAAAAGHAGDAAATPLAWSLGGETPSGAVVVDNGTQTAGQSEHASLSSGRRRGRPRGSGRRQILATLGEWYALSAGGSFTPHVIIVGTGEDVAARIMSFSQKGPRSVCILSANGSISNVTLRQPDASGSTFTYEGRFEILQLMGSFTMAEEGRRRTGGLSVSLAGPDGRVVGGVVAGMLRAASPIQVIVGSFLPNSLKQHQRRRMSMQQPSPVPALPAPVAPPPPVLTAATPISQAGPGNGFHAPPPPHSAAPPQPHANAMNLNATTTGFTMVGWPASSPQPMAYRASPDINVSLTPQE

SEQ ID NO: 10529 - protein, 345 aa, Zea mays
  VARIANT 34: note = Ancestral polymorphism is A, Derived polymorphism is D
MSGRGRAQMNTAVQGDLSNGRCVMNVDRTTRKRAKWSHEMKLFLIGLLKDHDVPGFRTHNAWSKEAWTNIVCHLNAKFGCSFTLNQVKQKEQDLKKDYRVVKELQEESGFGWDNERNMVTAPPNVWASFAARKNNTDALTWQDKSFPYFDDLFSLYDGRYAEGRTRHGMDHYANKAKNAPAPSTQQAPATDTYQSPSPTWATQCDSGLQFHFDEEADVIPMQHMKTPPSSTPTPIEAESRRGKKQKTKPGSPEEGFYERYLKLKREEIDRFAAIEEKKLEDPYSINKCIIVLEGLNDLHMGDILLASDIFQNKNNREVFLSFQGDALRLAWVKREIKRLQAEQNY

SEQ ID NO: 10530 - protein, 155 aa, Zea mays
  VARIANT 47: note = Ancestral polymorphism is P, Derived polymorphism is A
  VARIANT 68..155: note = Derived polymorphism lacks residues 68 to 155
  VARIANT 84: note = Ancestral polymorphism is A, Derived polymorphism is P
MAEIAPRSVLHDGKVRSVGACCIRVFVFCKNRVTVGPISFYQVEDLPQLFLRSSIVFISCALFGVTCWYAVRRDLDNIQLETGPPATFAFVRVLALLESGRTLVLSIDTLISVISVTLDAAVSVVDNILIFLPAAVALDYCFKMRFLSPFPRRKQ

SEQ ID NO: 10531 - protein, 154 aa, Zea mays
  VARIANT 13: note = Ancestral polymorphism is R, Derived polymorphism is M
  VARIANT 19: note = Ancestral polymorphism is M, Derived polymorphism is T
  VARIANT 21..154: note = Derived polymorphism lacks residues 21 to 154
  VARIANT 29: note = Ancestral polymorphism is E, Derived polymorphism is K
  VARIANT 33: note = Ancestral polymorphism is T, Derived polymorphism is I
  VARIANT 85: note = Ancestral polymorphism is D, Derived polymorphism is V
MNGRRQSLEELQRSEYEKMMETIAEWETEKKCTINSVFPSSKGYHVNVDYLFVLTLTAGLEGYHVNVDGQHVTSFPYRTGFVLEDATGLSLNGDLDVQSVFAGTLPTTHPSFSPQKHLELLPSWQAHPLPDEPVEIFIGILSAGNHFAERMSAA

SEQ ID NO: 10532 - protein, 197 aa, Zea mays
  VARIANT 120: note = Ancestral polymorphism is R, Derived polymorphism is W
  VARIANT 128: note = Ancestral polymorphism is A, Derived polymorphism is V
  VARIANT 151: note = Ancestral polymorphism is C, Derived polymorphism is Y
  VARIANT 152: note = Ancestral polymorphism is S, Derived polymorphism is L
  VARIANT 156: note = Ancestral polymorphism is E, Derived polymorphism is D
  VARIANT 168: note = Ancestral polymorphism is P, Derived polymorphism is S
  VARIANT 188: note = Ancestral polymorphism is N, Derived polymorphism is T
MDMERSPTFTSTSDNAVPQSTSDNGMPQSAHGSLLPILQPPSSPSGQPHLLEQQEAAGEFPSTSVQPHFQVQQEAAGELHEGASDENDDDDDDNVLETFWILMDVFTGDFLVQPALDTARFLMDAGVADLEKRVFHPTAEPGCDGDDIRACSIYLEDYEDGVEVAVTPCPGRHEFHHRCIANWLRRSNTCPLCRHAL

SEQ ID NO: 10533 - protein, 142 aa, Zea mays
  VARIANT 90: note = Ancestral polymorphism is R, Derived polymorphism is Q
MLLHGTADGYTPLCILGAERLGRSNISAIASSINQISSGSYPSTTGRSIHLLNEGGNIVSIIRSGKAADIASHSETSNGKSKCTLCLSIRQNPTATTCGHVFCWSRTPPAKRPTKEAFWYITMTRKKDKFNVLNDAGPGCGS

SEQ ID NO: 10534 - protein, 170 aa, Zea mays
  VARIANT 54: note = Ancestral polymorphism is E, Derived polymorphism is V
  VARIANT 108: note = Ancestral polymorphism is G, Derived polymorphism is C
  VARIANT 115: note = Ancestral polymorphism is H, Derived polymorphism is R
  VARIANT 122: note = Ancestral polymorphism is E, Derived polymorphism is K
  VARIANT 133: note = Ancestral polymorphism is C, Derived polymorphism is Y
  VARIANT 134: note = Ancestral polymorphism is A, Derived polymorphism is S
  VARIANT 143: note = Ancestral polymorphism is G, Derived polymorphism is D
MDMERSPTFTSDSGVPQSADSSLLPIPQPPSSPSGQQEAAGEPPSASVQPHFQVQQEAAGELHEGASDEDDDDDDHVLETFWILMDVFTGDFLVQPALDTARFLMDAGVADLEKRVFHLTAEPGCDGDDIRACSICLEDYEDGVEVMSSNAGPQLRFFLQQPVRAKRQEL

SEQ ID NO: 10535 - protein, 500 aa, Zea mays
  VARIANT 136: note = Ancestral polymorphism is D, Derived polymorphism is N
  VARIANT 232: note = Ancestral polymorphism is G, Derived polymorphism is C
MKCRGDPAITAAAAIGVLCVASAVLLGLVDGATEGEEPTTQLLNGFTAAHAAGAPAPFQPVLYAPSGAFALGFLRVGAGSLDLAVVHLPSSFPVWRATPARLGDWSRPATFTFDGGLELTGYDGGVLWQTLGAVGDVVVLLNSSNLVVRRYEKTLPEWESFRHPSDTLVLGQNFTASSPPLVSANRRFALRLGKAYMALHMEFYGGQTAPAYWRHTALMAQPENATEPPVYGSLDARGFFGLYLEGGGQRVDVLSFDTFAQNLTAAFRRMTLDDDGNLRAYYWAGGSKAWASDYRAIAERCDLPTPCGAYGLCVPRKAECQCLDNSTSTAAPSCHAEETADLCAGNQLGLGFHVVRRKRVSVAYKEELPFETNRTAEECEAACAGNCSCWAAVHSGASGYCYLIDFPVETLVYEADDRKVGYFKVRKPPARPGVSLSPGVAAATAALSLVLVGLAAAGACIGYQIRERRKQGRAGMEQELVPVPYKDLKSMDSSNNSFGA

SEQ ID NO: 10536 - protein, 146 aa, Zea mays
  VARIANT 61: note = Ancestral polymorphism is P, Derived polymorphism is L
  VARIANT 35: note = Ancestral polymorphism is S, Derived polymorphism is C
MVAPGGEALGGVIGVARHMIQTEGFFSLYKGLVPSLISMAPSGAVFYGVYDILKMAFLYSPEGKKRVSMMKQQKQETNALDQLELGTVRTLLYGAIAGCCAEAATYPFEVVRRQLQMQVKATRMNVLATCLKIVDQGGVPALYAGL

SEQ ID NO: 10537 - protein, 79 aa, Zea mays
  VARIANT 37: note = Ancestral polymorphism is Q, Derived polymorphism is H
  VARIANT 41: note = Ancestral polymorphism is A, Derived polymorphism is V
  VARIANT 57: note = Ancestral polymorphism is L, Derived polymorphism is H
  VARIANT 59..79: note = Derived polymorphism lacks residues 59 to 79
MTLRDHSIPSNGDINESKVSYLLLLYSCWCSLKMKSQLLKAEMKSLMKEQRQKVQYHYYRDYEGDQYCKNGTARKDEYT

SEQ ID NO: 10538 - protein, 319 aa, Zea mays
  VARIANT 29: note = Ancestral polymorphism is C, Derived polymorphism is Y
  VARIANT 150: note = Ancestral polymorphism is A, Derived polymorphism is T
  VARIANT 163: note = Ancestral polymorphism is A, Derived polymorphism is V
  VARIANT 179: note = Ancestral polymorphism is S, Derived polymorphism is C
  VARIANT 194: note = Ancestral polymorphism is P, Derived polymorphism is L
  VARIANT 227: note = Ancestral polymorphism is G, Derived polymorphism is E
  VARIANT 244: note = Ancestral polymorphism is A, Derived polymorphism is S
  VARIANT 246: note = Ancestral polymorphism is R, Derived polymorphism is C
MVSASSLLLPSSVRDLASCVSDGAVRVACTTPASTFTVSSSSPSPPSTLSVAVSYRATPQVASSPPLLLRLTWSHSPRGQPTLSFAGPTASSPAVLLRRRRGTYCLPSSSSSSAHAPPLAIFWDLTGARYDGAGSSSPEPVSGFYVVAVASAEVVLAVGDLAAGFVKAKLEGQIPRARSILAVSRVVVVAAAGPGAAAHTARVRFAEGAPEHEVAVGCCRGLGGRPGEEDELWVSVDGKRAVHARRLRWNFRGNQTVFVDGAPVDVLWDLHGWWFRRDPPGCAVVMLRTRSALESRLWLEEEARAPGFALLVQAFRTPP

SEQ ID NO: 10539 - protein, 31 aa, Zea mays
  VARIANT 23: note = Ancestral polymorphism is D, Derived polymorphism is G
MARRVLLKKVIKAFQVVILHVSGIILYKYRD

SEQ ID NO: 10540 - protein, 219 aa, Zea mays
  VARIANT 144: note = Ancestral polymorphism is R, Derived polymorphism is S
  VARIANT 57: note = Ancestral polymorphism is Y, Derived polymorphism is H
  VARIANT 36: note = Ancestral polymorphism is L, Derived polymorphism is M
  VARIANT 34: note = Ancestral polymorphism is R, Derived polymorphism is Q
MGKGKVHPSPPPAAAAAAAGGGAGETTAEAVLMRLMPAAVLAAAAPLGAEGKEVLAYLVLASLRSSAPPTPARGDGHRPELGCGCFGCYTAYWSRWDGSPEGDREAIHRAIEAFEEHLAEEEKGRGKGGGPRRGRKKRAEGKGRWKVKKEKEVEVGADPLPPPSDLPAPEEAPKAEDGAEYLTAEDEKEEDAPTAAAGAEDEKRRRWWGSVLSWKAWGL

SEQ ID NO: 10541 - protein, 378 aa, Zea mays
  VARIANT 266: note = Ancestral polymorphism is S, Derived polymorphism is W
MDPYHLISVNHHTDSITALTHPARSTMQMARLGALIPLAILLLAAVAATAAPPSDRPPKAQGPKPHKEKEKEKPKPMKVKCRPRKLYPYCPGKPMECPAECSQSCYADCNSCKPVCVCSVPGACGDPRFIGGDGNAFYFHGRRDADFCVLSDRDLHINAHFIGKRGADGMSRDFTWIQAIAVLFDGHELYVGARKTAAWDDDVDRMELTLDGEPVRLLPGTDAAWTSGAVPALSVTRTSAANGVLVSLDGRFTIRANAVPITEEESRVHRYGVTADDCLAHLDLAFKFGALTADVHGVVGQTYRSDYVNRFDVKASMPTMGGDSNYTTSSLFAADCAVARYAPSGGSRDRDDGVAMVSEIAGITCSSGMGGQGVVCKK

SEQ ID NO: 10542 - protein, 78 aa, Zea mays
  VARIANT 1: note = Ancestral polymorphism is I, Derived polymorphism is M
  VARIANT 16: note = Ancestral polymorphism is P, Derived polymorphism is L
  VARIANT 22: note = Ancestral polymorphism is R, Derived polymorphism is S
  VARIANT 25: note = Ancestral polymorphism is S, Derived polymorphism is I
  VARIANT 27: note = Ancestral polymorphism is V, Derived polymorphism is A
  VARIANT 30: note = Ancestral polymorphism is A, Derived polymorphism is V
  VARIANT 44: note = Ancestral polymorphism is P, Derived polymorphism is L
  VARIANT 56..78: note = Derived polymorphism lacks residues 56 to 78
MMGIPLVCYCLAVPKPVIAFCRLLSAAKDAALLMLAVVGLCRLPPDGADTGHQHQQPGEVKTRFPTVEYDQLLAEHEQ

SEQ ID NO: 10543 - protein, 452 aa, Zea mays
  VARIANT 239: note = Ancestral polymorphism is R, Derived polymorphism is W
MGGDAAAMRPVLHLMVGLVLYGVAEEMTVPALVDKVTAALCPAADRSCPEALYLTGLQASVGGIFRTVGFTLMGQLADEYGRKPLILLTASTSIIPFAVLAWNSSRTAVYAYLALRTLSFMVGQGTIFCLAIAYTADAVEPSRRAAAFGFLTGIFSAAHTLGSVLSRFLPGRWIFEVSIVLLICSILYIKVYLVETVQRPPSAPSRHLSMPALLVKLPQERWESIKDNISIVKNSETLRRISYVAFFYKLGMIAISDVLMYYLKSVFGFDKDQFSEILMVVGVGSIFSQILVLPFLSQIIGEKGVLCISILASIAYALLYGVAWASWVPYFSSSLGIIYVLAKPAIYAIISGEVLSTDQGKAQGFIATVQSVAILLAPLFMSPLTSYFISEEAPFDCKGFSFIVASFFLAISFCLAWMLNPGMKDKGTKAAVSDSTDEEAAQAPLLAKWTRP

SEQ ID NO: 10544 - protein, 87 aa, Zea mays
  VARIANT 1: note = Ancestral polymorphism is M, Derived polymorphism is I
  VARIANT 6: note = Ancestral polymorphism is N, Derived polymorphism is S
  VARIANT 44: note = Ancestral polymorphism is K, Derived polymorphism is Q
MERGVNATTSLCLENLLIMQENERLRRKAQQLDQENKALLAELKSKAQGAASATATATAGAGASAGASAATATRPHPNKVSGKQPNK

SEQ ID NO: 10545 - protein, 177 aa, Zea mays
  VARIANT 148: note = Ancestral polymorphism is T, Derived polymorphism is A
  VARIANT 130: note = Ancestral polymorphism is R, Derived polymorphism is K
  VARIANT 110: note = Ancestral polymorphism is S, Derived polymorphism is R
  VARIANT 38: note = Ancestral polymorphism is F, Derived polymorphism is C
  VARIANT 12: note = Ancestral polymorphism is R, Derived polymorphism is Q
MSRSVESLVVGRVIGEVLDCFSPCVKMVVTYNSNRLVFNGHEIYPSAVVSKPRVEVQGGDLRSFFTLVMTDPDVPGPSDPYLREHLHWIVTDIPGTTDASFGREVVSYESPRPGIGIHRFIFVLFKQKRRQQQTVAAVPSSSRDHFITRQFAAENDLGHPVAAVYFNAQRETAARRR

SEQ ID NO: 10546 - protein, 104 aa, Zea mays
  VARIANT 11: note = Ancestral polymorphism is Q, Derived polymorphism is R
MGGYSIWRRLRFQSKAVYAVLIVPTINYWWLSFTFKMSRQAFKKLIVPEQRTLCPLDCKQYTFPSAARAMRHPEIFCGHDMEVLQKMMVMPRTIEKNHSLRYKT

SEQ ID NO: 10547 - protein, 144 aa, Zea mays
  VARIANT 134: note = Ancestral polymorphism is L, Derived polymorphism is P
  VARIANT 132: note = Ancestral polymorphism is D, Derived polymorphism is V
  VARIANT 108: note = Ancestral polymorphism is A, Derived polymorphism is T
  VARIANT 66: note = Ancestral polymorphism is K, Derived polymorphism is N
  VARIANT 62: note = Ancestral polymorphism is L, Derived polymorphism is V
  VARIANT 24: note = Ancestral polymorphism is P, Derived polymorphism is S
  VARIANT 17: note = Ancestral polymorphism is E, Derived polymorphism is D
  VARIANT 15: note = Ancestral polymorphism is F, Derived polymorphism is I
  VARIANT 13..144: note = Derived polymorphism lacks residues 13 to 144
  VARIANT 8: note = Ancestral polymorphism is A, Derived polymorphism is T
MEQNILAAYEILELFCEFVLAKVPSVEVQKECPIELCEAIASIIFASGRCSDLPELMHLHNLFTTKYGKEFVASAMELCPDSSVNRIIIEKLSVNAPSDGSKLKVMKAIAQEYNFEWDSSNTEAEFSKKFEDLLVAFANRLLIP

SEQ ID NO: 10548 - protein, 247 aa, Zea mays
  VARIANT 81: note = Ancestral polymorphism is R, Derived polymorphism is W
MGISKVTGIAATAFLVTSVSLCQLGMRIIMLPFLATGIVASIVTVASHDAINLPWILGKNSVGRFPLWSIILFGPFLTLARTYAMVKRYMRKEAVYDKIVEGLYLGGWPFLLKHLPPGNPSVIDCTCELPRSSFVPANEYLCLATWDTRAPTPHQIEKAARWACEKRSEGKPVYVHCAFGLFFVMDTLGHGRSACVVCAILVALGTAENWKDAENIIRERRKIKMNALHRKTLEEWSKQRVRQKKDK

SEQ ID NO: 10549 - protein, 427 aa, Zea mays
  VARIANT 376..427: note = Derived polymorphism lacks residues 376 to 427
  VARIANT 49: note = Ancestral polymorphism is T, Derived polymorphism is M
  VARIANT 39: note = Ancestral polymorphism is G, Derived polymorphism is R
  VARIANT 27: note = Ancestral polymorphism is I, Derived polymorphism is T
  VARIANT 23..427: note = Derived polymorphism lacks residues 23 to 427
  VARIANT 11: note = Ancestral polymorphism is G, Derived polymorphism is R
  VARIANT 8: note = Ancestral polymorphism is G, Derived polymorphism is D
MGKLLGKGAFGKVHYARDLESNQGVAIKIMDKDRVLKAGLSEQVKREITTMRLVEHKNIVRLHEVMATRNKIYIIMEYAKGGELMDKLKRSGRLTEADAHRYFEQLIDALDHCHNRGVYHRDLKPENLLLDENGDLKVSDFGLSAFSESRRTDGLLHTVCGTPIYIAPEVIMKTGYDGAKSDIWSCGVVLFVLAAGYLPFQGPNLMEIYRKIHDRDFTCPSRFSHKLKRLLYKILNPNPSMRPSIQEIKESTWFRKGPREISAVNEKVLSENATTTNAAPVLASRHKEIAHEDMKSLVATNLNAFEIIALSAGLDLSGLFIKECRKETRFTSDKPALAIISKLEDIAKALNLRIRKKDNNIVSIEGRKEGGNGVLQFDMQIFEITPSCHLVQMKQTSGDLLEYQKLLEEGIRPGLKDVVSAWHGDDL

SEQ ID NO: 10550 - protein, 127 aa, Zea mays
  VARIANT 29: note = Ancestral polymorphism is E, Derived polymorphism is D
  VARIANT 25: note = Ancestral polymorphism is G, Derived polymorphism is D
  VARIANT 12: note = Ancestral polymorphism is D, Derived polymorphism is G
MGNCLVIQQADDRKEIKIVSVVDDGGVLDTPSSSPAGARSLTKVPAAGAAALCEPLLPAAGGAAAVRVKLVISKQELRKMLDKEGVSLDDMVSSLVRKEASGGDREQELCCGGWRPALESIPEGSDL

SEQ ID NO: 10551 - protein, 203 aa, Zea mays
  VARIANT 106..203: note = Derived polymorphism lacks residues 106 to 203
  VARIANT 67..203: note = Derived polymorphism lacks residues 67 to 203
  VARIANT 54..203: note = Derived polymorphism lacks residues 54 to 203
  VARIANT 50..203: note = Derived polymorphism lacks residues 50 to 203
  VARIANT 23..203: note = Derived polymorphism lacks residues 23 to 203
  VARIANT 16: note = Ancestral polymorphism is P, Derived polymorphism is L
  VARIANT 13: note = Ancestral polymorphism is I, Derived polymorphism is T
  VARIANT 9..203: note = Derived polymorphism lacks residues 9 to 203
MGARLAVPQPCDILLPIRNLTTQSTRSATIPAAYRISSARAPSAPYASAWMKGWSWAGKREPERRAQVASAETALTRQEASRGDGEATRGAMRSGRATSEGRRSGWVAVRRAMEAAACAATAGWGEARRAEAALWAAAGRGAGRERRWRKTAPTAWRCSVGFEIRVRSTRWKSTTVVEEGIAMGGGRRWHWPLGRERSWGWFF

SEQ ID NO: 10552 - protein, 592 aa, Zea mays
  VARIANT 106..592: note = Derived polymorphism lacks residues 106 to 592
  VARIANT 166..592: note = Derived polymorphism lacks residues 166 to 592
  VARIANT 203..592: note = Derived polymorphism lacks residues 203 to 592
  VARIANT 209: note = Ancestral polymorphism is H, Derived polymorphism is Y
  VARIANT 224..592: note = Derived polymorphism lacks residues 224 to 592
  VARIANT 399: note = Ancestral polymorphism is S, Derived polymorphism is F
MAVNGKGTCQDKAHLSNVYTDVMHIISKKEGIQRASGLSSIDYIMTPRWMSLGDVDTSGSTVASTEPSDYVRGLDQKAKHLSLGRNNIVSEPEEVLHPQPHHGSFWPRTRSKARADRNSVGITSTNDTRSSWAAPSMHDKEDISSTISDPGPIWDCEPKWDTGPKWDSELTWEPDHPIELPRPQEDMGIGAPMELVPNWDDKWVVRKGHFLGVLAPFSRHCPSRGYKGAMQAFSGGIRRSCKSICCFEFRLRASLSKDGDLSLISRIRNVNGKPFSFSFAYHTYLSVYDIRSDKEKTYVICTLTLEYMYRVFNMHADNNDRSDKKKIPEITSGIKNAQIYYTGTQSNMNANEVDLVHTQFKRAKERSDSCDDDLFNDLMSLYNSSSSASVDADILRRLSEKLQLITIYDLNHESLTLHKMASGGDPGGIVDQTHFSHANTLTPFSYQSDVQTSNERKLRVPQIKTWHQVILLLHAILVIKINNDPMKIDNKGGGLIDLEGERMAYLGRGPRRLQQNYFLSGRGASFPLQRWGRGNVGERGDGRGMQNLRWVMVGGYRMRMLAWSGGRFAEVTAAAETAAGLWRSRLSRRLQL

SEQ ID NO: 10553 - protein, 115 aa, Zea mays
  VARIANT 81: note = Ancestral polymorphism is T, Derived polymorphism is I
  VARIANT 72: note = Ancestral polymorphism is Q, Derived polymorphism is P
  VARIANT 65: note = Ancestral polymorphism is G, Derived polymorphism is D
  VARIANT 61: note = Ancestral polymorphism is R, Derived polymorphism is H
  VARIANT 44: note = Ancestral polymorphism is G, Derived polymorphism is D
  VARIANT 38: note = Ancestral polymorphism is A, Derived polymorphism is D
  VARIANT 36: note = Ancestral polymorphism is Y, Derived polymorphism is F
  VARIANT 25..115: note = Derived polymorphism lacks residues 25 to 115
MAAAGDETKRCLRKFDANSDEQISQSGLVALFEDQYFAIEFMSGLYVQSLHISSVKLNANRLVIGTLRGFDQFMNLVINNTVDVSGNYNTHNGMVFIRGNRVVMIEALELISKSQ

SEQ ID NO: 10554 - protein, 545 aa, Zea mays
  VARIANT 230..545: note = Derived polymorphism lacks residues 230 to 545
MEATALASHSSPFAVHRSTGKPAFAYPHRGGPSMVSSVHLRTSRTPARSAAWRRRRRGTGLVVRAEMFGQLTTGLESAWNKLRGVGVLTKENIAEPMRDIRRALLEADVSLPVVRRFVSSVSDKALGANAIRGVRPDQQLVKIVHDELVQLMGGEVSDIVFAKSGPTVILLAGLQGVGKTTVCAKLAFYLKKLGKSCMLVAADIYRPAAIDQLTILGKQVGVPVYSEGTEAKPTQITKNAMEEAKSKNIDAIVVDTAGRLQIDRSMMDELKEVKKAVNPTEVLLVVDAMTGQEAAALVTTFNIEIGITGAILTKLDGDSRGGAALSVKEVSGRPIKFVGRGERLEDLELFYPDRMAQRVLGMGDVLSFVEKTQEVMRQEEAIELQKKIMSAKFDFNDFLKQSQNVAKMGSMSRIIGMMPGMNKITPAQIREAEKRLAFVESMINAMTAEEREKPELLAESRERRIRVAEESGKTEQEVSQLVAQLFQMRAQMQKLMGMVQGQEAIAGMGDLMDSLKSEEKAPPGTARRKRRNNTSKQRDLDAVLS

SEQ ID NO: 10555 - protein, 341 aa, Zea mays
  VARIANT 230..341: note = Derived polymorphism lacks residues 230 to 341
  VARIANT 58..341: note = Derived polymorphism lacks residues 58 to 341
MAIPVARVHLAMAHAALPALVPTPPKCEMLPLLPTPCVAVVLPKPLAKPSRAGSDERWEWDARKTMTGLAARTDQSSASSMSSPCSSADSVWSSARRRGSASRKIATTPPKPGRADSDERWDARKTMTILAASTDHSSASSTSSPRSTADSVWSSNRRRGSASRKIATTPPKPGRADSDERWDARKTMTGLASSTDQSSASSSPRSTSADRVRGSAQRRGSSCKNATAPSKPGRADSAVRWGAHKKVANPASSSSSSSSSGTSSLASSSAERWDVHKKHRPPQATELLDDDKSSTGSNDIDTDQEEIVWKPRAIYAEPCFISAAPAPSMLPMPTAFLLRIA

SEQ ID NO: 10556 - protein, 253 aa, Zea mays
  VARIANT 15: note = Ancestral polymorphism is E, Derived polymorphism is G
  VARIANT 2: note = Ancestral polymorphism is A, Derived polymorphism is G
MAPHDSGRLDHYKLELHELHYQLTLVQHWCGTSKANQVAVAAPGGRSKLGNLIANDWDLEDPRQNGKIVAHAKGLHVQSSRGEVSDESWHASFDIIFQQGSGLEGSTLQVMGPNVYKGEWSIVGGTGKLTMARGVIYKEELCVVDGMARIGLEIHAFYIPMERKDLAMAHAQLCPGAAPHPCSRRRRSSFPARYPKRSRTDIVGLRARSGKTPAVAAGRSHVASVRLWLATQQWWSKRASSCSRPRAGDGRPR

SEQ ID NO: 10557 - protein, 379 aa, Zea mays
  VARIANT 95..379: note = Derived polymorphism lacks residues 95 to 379
  VARIANT 114..379: note = Derived polymorphism lacks residues 114 to 379
  VARIANT 213..379: note = Derived polymorphism lacks residues 213 to 379
  VARIANT 222: note = Ancestral polymorphism is G, Derived polymorphism is R
MAALRLRESLERNSPCSCFSDPCPCAAPIPISPPPSLGPSRPSASIAPAPDPGLFFLPSRAVDCSRGSDSAPAVSLVVAGSWELLGSGSVPNRCCHGEGQEEQWGRPDRQQRRRQHRLVVHRAVGSTIGSESASVISSPKITESTADSSSVTKRLEEELAKGMPLLSCMIELADGMGSLIGAICIELMSTYLPLPGNITSSAVEQGFNVVDDWMFFFMLCLGVSAMAPHYQAATLIASPSYPNAIAWSSDNIVAVTSGHIVTILKLHEENEKLFDRVTEKSRLGSAPQASSPSANKPANGQGREIGRSDSSKSRSPDVFASPVSQDKTGNSGAIVKSSNELAKTTPAGEYLTSALMDFDPDQFEGFVAIVDGANKLLML

SEQ ID NO: 10558 - protein, 417 aa, Zea mays
  VARIANT 242: note = Ancestral polymorphism is R, Derived polymorphism is P
MSDDSDRQRQCSRGVTVDVELDAAMALADMAGVGPPGGDQNPPVQLAPPTTTTTQEDEEELASTRLSLELGKVGIQASPCSSSSSAGGGPHAHHLQASYQQPAAASPATCYGPRPRNALTEVTYSCSALARDPAEKEAKRLRRVLANRESARQTILRRQAIRDELARKVADLSSQNENMKKEKDVVMQEYLSLKEANKQLKEQAHRFPPCCLGFLLVARTTAKKAPAGSLAAAASPPATPPRPGFLYSAAPPPVPYVWGSWPPSAAAAAGYEQHGSPPPPPLCLQPCAWYYPVVATDPRGSPSSAYPQQQQQPAVAFQDPRGATAEPAGSPAGGGATAAEEDTDDDPCSLTLGLDVDNRSAPVSILAGSGRAAAQQADRDKAATAAEARKRRKELTKLKHMHAASAAAAPRPGGEQW

SEQ ID NO: 10559 - protein, 233 aa, Zea mays
  VARIANT 132: note = Ancestral polymorphism is R, Derived polymorphism is M
  VARIANT 127: note = Ancestral polymorphism is A, Derived polymorphism is T
  VARIANT 126: note = Ancestral polymorphism is P, Derived polymorphism is L
  VARIANT 31: note = Ancestral polymorphism is S, Derived polymorphism is L
MTFLSRALFSLTVATRRTSSDDSATATFALSAALASNSFAMWSLAPRPLPPRIMHANDVAEAAASAARAVSTCFLFASSMPSEAKVVAKIQSVWKLTIITTNPPSTIHQNKCLANRKEEQIVVYIPARLSSRSVPPQPASSTPQSEASSSNHQSQKDQEMQSRNSSDGLVPLPLNADGAVGSGTSTRDLENSLQKAQENFIKSQIEMLQIQLQMVQRGAAGPPSNENTEHTEE

SEQ ID NO: 10560 - protein, 334 aa, Zea mays
  VARIANT 238..334: note = Derived polymorphism lacks residues 238 to 334
  VARIANT 268..334: note = Derived polymorphism lacks residues 268 to 334
  VARIANT 282..334: note = Derived polymorphism lacks residues 282 to 334
  VARIANT 307..334: note = Derived polymorphism lacks residues 307 to 334
  VARIANT 314: note = Ancestral polymorphism is S, Derived polymorphism is L
MRTTHVILFGNLRLRDGAARTSSTPVTSSPTTSTSSATSARSLCTPSLIAHGRNPSPHPVSPLDVSELTPAPPVSHRALCSAAVPAPLRGPLPLRHTRRIARSEPRKRGPLLPAAPPSSSPSSLPLHLTAPAPAPRQSHQTPPPPHSFLSLAEQALVLATSSHPLPTLAAFLASRRDELLRADITSLIKALELSGHWEWALALLRWAAKEGAAAASSAGNKQILDARHYELFLEKAYWDETLEYESLGEHFQDEEVAAALCVVVNAKQFASPSTTSVLNRAWTGKHDDPMTRHCASATAAAIHTNLQSNGGLLSTFEAMQDTARDGQIVSIRIS

SEQ ID NO: 10561 - protein, 94 aa, Zea mays
  VARIANT 17: note = Ancestral polymorphism is G, Derived polymorphism is R
  VARIANT 33: note = Ancestral polymorphism is R, Derived polymorphism is M
  VARIANT 56: note = Ancestral polymorphism is P, Derived polymorphism is L
MRGAIVLAAKHAEAMAGKPLLYGIGTLLVMPLMTLYGVGCVFGAGWFLYNMTNISPSLQIEFSLYEIIRHKWVPAYLTNFFFAELSLTHRVETV

SEQ ID NO: 10562 - protein, 153 aa, Zea mays
  VARIANT 51..153: note = Derived polymorphism lacks residues 51 to 153
MSATALNERSSRSHRTRCCKDQQGGQSCQELMDQLSLLKDTIAKKDDEIDRLQLANSSNSLLKSTKHDGRLSDVSDGGIPAGVETDSSANNVVDQEQDKTCTAGKERLAKVVSRVQKLTVPKVGQASSLRSKPRDPSAPKSSGKIPLCTSVTI

SEQ ID NO: 10563 - protein, 936 aa, Zea mays
  VARIANT 507..936: note = Derived polymorphism lacks residues 507 to 936
MKHNTNKSIDQRTQMASSNGHVIPNVSQNDSKLELFGFDSLVNILGLKSMAGEQPQAPSSPTDSDDVEITIGCPKETEPKLGTLMGVFVPCLQNILGIIYYIRFTWIVGMGGIWQSLVLVAFCGACTFLTGLSLSAIATNGAMKGGGPYYLIGRALGPEVGISIGLCFFLGNAVAGAMYVLGAVETFLDAIPSAGFFQETITVVNNTLVNGTTKSGATTISTPSLHDLQIYGVIVTILLCFIVFGGVKIINKVAPAFLVPVLFSILCIYIGVSIAPEPGASKGITGLSIVTLAENWGSEYQPTNDAGVPDPNGSIYWDFNALLGLFFPAVTGIMAGSNRSASLRDTQSSIPVGTLSATLSTTVMYLLSVFIFGALATREELLTDRLLAAAIAWPGPAMIYIGIILSTLGAALQSMTGAPRLLAAIANDDILPILNCFKAYEGSEPHVATLFTSFICVACVVIGNLDLITPTITMFFLLCYAGVNLSCFLLDLLDAPSWRPRWKIHHWLLSLVGATQCIVIMFMISWTFTVVSLALASLIYYYVSLKGKAGDWGDGFKSAYFQLALRSLRSLGANSVHPKNWYPIPLIFCRPWGKLPENVPCHPKLADFANCMKKKGRGMSIFVSIIDGDYHESVEEANAAYRQLSAYIDYKQCEGVAEIIVARSISDGFRSIVQIMGLGNLKPNIVVMRYPEIWRRENLAQIPSSFTSIINDCIIANKAIVIVKGLDEWPNEFQRLYGTIDLYWIVRDGGLMLLLSQLLLARDGFESCKIQVFCIAEEGTEAEELKADVKKFLYDLRMRAEVIVVTMKSMEAHSEISPNAKKDPQEEYASAQDRIRAYLSQMKEDAQREGRPLMEDGRQVVVNEEKVEKFLYTMLKLNTTIVKYSMMAAVVLVSLPPPPLNHPAYCYMEYMDLLVVNVPRMLIVRGYRRDVVTLFT

SEQ ID NO: 10564 - protein, 323 aa, Zea mays
  VARIANT 22: note = Ancestral polymorphism is V, Derived polymorphism is I
MEASSPACDDAGTTIEDLPADVLALVLRRLDGASLAAVGCASSGLHALATDPATWRALCLAMWPAVRDLPCVDHRALFADAFPPLPARLVSAVDLRHAGGCVLSCVVDTDAASDWFLGAPFRVAGACVLSCVVDTDAASDWFLGAPFRVDVDAPLHEGFASSPAAVAPVDLELSWVLVDPATGRALGAASRRAVSVDRKWLTWDTVARFAVVIGGGVALEAAVTCDVGQYGHVREVSLRVEDADGAGVSGRDGLAAVAAAMAAPRRGCRGAAEDAARARYEDFVRGRRARKEWKARRESILDLCCSGVGAAAFLGFLLMLTFR

SEQ ID NO: 10565 - protein, 148 aa, Zea mays
  VARIANT 43: note = Ancestral polymorphism is G, Derived polymorphism is R
  VARIANT 77..148: note = Derived polymorphism lacks residues 77 to 148
  VARIANT 84: note = Ancestral polymorphism is A, Derived polymorphism is E
  VARIANT 111..148: note = Derived polymorphism lacks residues 111 to 148
MGPLSHNYLLRAAHLSNPIMVDIRVQAKRLKIQMEGYIQLQSGAKIQVTRDHEAEPGALTRQVELSGKPEQISKAEQLIKEVLAEADAGSSGARSGGRKYNATQQGAETYQMKIANNKVGLIIRKGGETIKSMQTKSGARIQVCYLVI

SEQ ID NO: 10566 - protein, 474 aa, Zea mays
  VARIANT 16: note = Ancestral polymorphism is G, Derived polymorphism is R
  VARIANT 10..474: note = Derived polymorphism lacks residues 10 to 474
MPVAGGAFSYLRVTFGEFAAFLTGANLIMEYVFSNAAVARSFTAYLGTAVGVDAPSKWRIPVPGLPQGFNQVDLVAVGVILLLSVCICYSTKESSVVNLVLTGVHVVFILFIIVMGFAHGDARNLSRPADPAHSPGGFFPHGAAGVFNGAAAVYLSYIGYDAVSTMAEEVERPDRDIPAGVSGSVVLVTVLYCLMATSMSMLLPYDAIDPEAPFSGAFKGRDGMAWVSNVIGAGASLGILTSLMVAMLGQARYLCVIGRSGVVPAWLARVDPRTATPINASAFLGLLTAALALFTELDVLLNLVSIGTLFVFYMVANAVVYRRYVGDPCPGSGQKRRAWPALAFIAAFSLIAISFTLLWQFAPGGAAKVGLLSGTAAVAVAAVVAFQALVPQAREPELWGVPGMPWVPAASVFLNVFLLGSLDRPSYVRFGFFSAFAVLFYVFYSVHASYDAEEGGAVDGGGGGDKLQDQGCDV

SEQ ID NO: 10567 - protein, 89 aa, Zea mays
  VARIANT 9..89: note = Derived polymorphism lacks residues 9 to 89
  VARIANT 23: note = Ancestral polymorphism is A, Derived polymorphism is V
  VARIANT 28: note = Ancestral polymorphism is S, Derived polymorphism is Y
  VARIANT 31: note = Ancestral polymorphism is A, Derived polymorphism is V
  VARIANT 46: note = Ancestral polymorphism is A, Derived polymorphism is G
  VARIANT 50: note = Ancestral polymorphism is G, Derived polymorphism is D
  VARIANT 54: note = Ancestral polymorphism is V, Derived polymorphism is M
  VARIANT 56: note = Ancestral polymorphism is V, Derived polymorphism is I
  VARIANT 57: note = Ancestral polymorphism is T, Derived polymorphism is M
MVRGVQYHQTAVVPRESILKTEAEWLNSIKADLVVSDVVPVVCRAATDAGIRSVCVTNFSWDFTYAEYVVATGHHHRSIVWQVPYSHSS

SEQ ID NO: 10568 - protein, 197 aa, Zea mays
  VARIANT 112: note = Ancestral polymorphism is R, Derived polymorphism is M
MHSSRALLLQGFQHVLSTLEDAVTDAPKATKFLGQIFARVVLEDEISLTEGGGLLQEWDGREEPAGQHALEDNLASEDLGSMLESIRVERDKYSLMCFQFPVGRIHRQLKQRTQANGRVGATVAVYSAAILEYLTAEVLELAGNASKDLKVKRITPCHLQLAIHGDEELYTLIKGTIVGGGIIPHIHKSLINKSSKE

SEQ ID NO: 10569 - protein, 210 aa, Zea mays
  VARIANT 190: note = Ancestral polymorphism is C, Derived polymorphism is R
  VARIANT 142: note = Ancestral polymorphism is L, Derived polymorphism is P
  VARIANT 135: note = Ancestral polymorphism is W, Derived polymorphism is R
  VARIANT 30: note = Ancestral polymorphism is A, Derived polymorphism is V
MSPVNFKRVEITEDAKPDWTDKETLHLLEAVLHYGEDWKKVSEHVSSRSEKDCIARFIRLPFGEQFMGHKEDRMRFENTDDNTDEPGANVSKRPRLTPLADASNPIMAQVCIVAFYSDVGEFIASGSDDGRWFIWEKRTGRLTKMLAGDRAAVNCIQSHPLDCAVATSGIDNTIKVYNLCLLIFWNEFGCESFQKVSSVTRADLLSLELL

SEQ ID NO: 10570 - protein, 307 aa, Zea mays
  VARIANT 103: note = Ancestral polymorphism is R, Derived polymorphism is C
MATNHLSQGQHQHPQAWPWGVAMYTNLHYHHQQHHHYEKEHLFEKPLTPSDVGKLNRLVIPKQHAERYFPLSSSGAGDKGLILCFEDDDDDEAAAANKPWRFRYSYWTSSQSYVLTKGWSRYVKEKQLDAGDVVRFQRMRGFGMPDRLFISHSRRGETTATAATTVPPAAAAVRVVVAPAQSAGADHQQQQQPSPWSPMCYSTSGSYSYPTSSPANSQHAYHRHSADHDHSNNMQHAGESQSDRDNRSCSAASAPPPPSRRLRLFGVNLDCGPGPEPETPTAMYGYMHQSPYAYNNWGSPYQHDEEI

SEQ ID NO: 10571 - protein, 140 aa, Zea mays
  VARIANT 94: note = Ancestral polymorphism is C, Derived polymorphism is F
  VARIANT 136: note = Ancestral polymorphism is C, Derived polymorphism is S
MERSLTFTTVDGVAQSEEGDDMETVRILIDRVRILIDRVRSFIDVDLQVMLARARAGEGPHDGVPPRPTRQSPGWRSVSSTPTVEAERDGNRGCAICLDDFVDGVEVAVVPCSGGHQFHPGCIASWLGRSNTCPLCRHAL

SEQ ID NO: 10572 - protein, 265 aa, Zea mays
  VARIANT 20: note = Ancestral polymorphism is E, Derived polymorphism is G
MPQTPSTRWCPTPEQLMILEEMYRSGVRTPNAAEIQQITAHLAYYGRIEGKNVFYWFQNHKARERQRLRRRLCARHQQQYAQQQQQATAAAPASSPNSSATLLAPPAAGGSSAPCVHPAVMQLHHHHHPYATSFSMPHLGYLGQQAATVTPVLNPAAAGMVDLAGAGAGNRATGAGGAYGGGAGLYNSCSSNQLEVWDATEAMDHCNASCGAASGSSDEGGAAHLQLPACCRRPLKTLDLFPTKSTGLKDECSSSKSSSCSTSTN

SEQ ID NO: 10573 - protein, 259 aa, Zea mays
  VARIANT 112..259: note = Derived polymorphism lacks residues 112 to 259
  VARIANT 115..259: note = Derived polymorphism lacks residues 115 to 259
  VARIANT 116: note = Ancestral polymorphism is S, Derived polymorphism is Y
  VARIANT 118: note = Ancestral polymorphism is R, Derived polymorphism is M
  VARIANT 162: note = Ancestral polymorphism is S, Derived polymorphism is F
  VARIANT 188: note = Ancestral polymorphism is I, Derived polymorphism is N
MSSTLGTNGRPQGDLRKLERLWNSLWNEFRRENRVDSWCNQKMQGVAQNVPYPLPQATHIIEMETEENGQQNIGESGVTVVSRGPLVTWAKDLLADDRFTDFVKTMVICGAWSLWSRRNARRFGHDRWNPNATTGKGAGSIVMRNSQGEVLAAATQLYEHTSDALISKALVAHDGVMLAQLLSMKKVILEVDNSVMVALLLSDEGRRCAASRIVISFSTNNKELMSAAERSRACADERQRNHERAGADDAGLPVSGGAK

SEQ ID NO: 10574 - protein, 258 aa, Zea mays
  VARIANT 113: note = Ancestral polymorphism is L, Derived polymorphism is H
MAAVTTVRDVLYHYAFARGVYERFIGDCDRHPQMARNAVALLLWFDQGTNQVISLLPGMSTTALGHLVTEASCVIRCLHMKDVVPGPPTPLLSALCQDSRMDCPRFFDSNRGLIVRGVADLLDGVCTLIFDDRLYHLLRRYQTGLVGRIPELEAPYASAVVVTVPEDYRSMFVTFSRGQSVERDEIFNYFRETWGDCIVRVLMEKTTGGAQPMYGRVIFKRKAFVSLLLNGDDRAPIFIGGREIWLREYTPRSSSNSN

SEQ ID NO: 10575 - protein, 131 aa, Zea mays
  VARIANT 32: note = Ancestral polymorphism is V, Derived polymorphism is A
  VARIANT 28: note = Ancestral polymorphism is P, Derived polymorphism is L
  VARIANT 27: note = Ancestral polymorphism is R, Derived polymorphism is Q
  VARIANT 25: note = Ancestral polymorphism is G, Derived polymorphism is R
  VARIANT 17: note = Ancestral polymorphism is P, Derived polymorphism is L
  VARIANT 10: note = Ancestral polymorphism is E, Derived polymorphism is V
MAAAAGPYKEMLEVLLPDILFLCTGLRPVVLVDYGGTMPQLQENLCGLLYLARQFKLCKVRSVQFGQKGIPYLNTYDGRTIRYPDPLIKANDTIKIDLETNKIMYFIKLYLPFHRLHQVIYLVRLNVSTNS

SEQ ID NO: 10576 - protein, 257 aa, Zea mays
  VARIANT 126..257: note = Derived polymorphism lacks residues 126 to 257
MEMEFVSGGIIELCPGTWLCTDTPFISFRHSCCFNVSCLSLPCRDLALTNSMQDPINCFMKTSMPLFNKLAHSIETPSNPFAPATLSILFFIDKVSQSSPSSIQVLEVSFELTEARGKAVLMTHFQLSLPPNPNPILSSILSRATTLPWRKKSLISTIQVYQIVPKKFPQNENKKHDSKQITQRGTRTRGLTLPWRATTSPGSGRRGPPRSGGGGGSNGEPARSGGGGGSNGEPARSGGDGGSNGEPMAEDPDGEGR

SEQ ID NO: 10577 - protein, 260 aa, Zea mays
  VARIANT 76: note = Ancestral polymorphism is S, Derived polymorphism is N
  VARIANT 43: note = Ancestral polymorphism is L, Derived polymorphism is V
  VARIANT 36: note = Ancestral polymorphism is R, Derived polymorphism is Q
MAAVTTVRDVLYRYAFARGVYERLVGDCGCHPQVARNAVALLLWFDGQAGTSQQQVISRLPGMSTTALDHLITELNCVIHCLLMRDLPGPPTPLLSALCQDSRMDHPHFFPVNRGLVVRGVADLLDGVCTLVFDDRLYHLLRRHQTGLVGRNPELEAPYAAAVVTVPEDCRSMFVTFSRGQPVEREDIFGYFRETWGDCIVRVLMEKTTGGAQPMYGRVIFKSKAFVSLVLNGVDRAPIFIGGREIWLREYIPRSSSSSN

SEQ ID NO: 10578 - protein, 172 aa, Zea mays
  VARIANT 58: note = Ancestral polymorphism is R, Derived polymorphism is Q
  VARIANT 50: note = Ancestral polymorphism is S, Derived polymorphism is C
  VARIANT 40: note = Ancestral polymorphism is V, Derived polymorphism is L
  VARIANT 11: note = Ancestral polymorphism is R, Derived polymorphism is W
MVTAVVESPLRQRQRQRLRSPLAGAGAGVGSSGGDGGLELRHACPAKRGSGSGGMRGRRWVPPEIEIPDVLLPGGGGGRGYTSLRDIMSSPEYAAAKAASSPDEPPGGGGAAAAGDVHMIRHPLVKHAAYAYLQLTPSAREEARRRMLQRRRGPLCRVLFGCLGFLGALFGR

SEQ ID NO: 10579 - protein, 899 aa, Zea mays
  VARIANT 607..899: note = Derived polymorphism lacks residues 607 to 899
MGVPSFFKWLVGKYPNIVVPAKEDDGGAGAGASSPSSPWDEPAAGPNGVYHNLYLDMNAIIHPCFHPEDEVCPPTTFDEVFAAMFEYIDRLFRIVRPTKLLYLAVDGVAPRAKMNQQRSRRFKAAKEAKDAELEEKLLREKFRAEGREVRARPRETHEVSDPNIITPGTEFMEKLSKALEYYVRSRLNSDPGWKGIKVILSDSNVPGEGEHKVMSFIRGQRSLASYDPNTMHCLYGLDADLIMLALASHELHFSILREDGSRQSQPEKCISLSNEMLKTEDSSRKCRGWFPQVIETTPKKPYQFVNIWVLREYLELDLKIPNPVVKTDIERLIDDFIFICFLTGNDFIPRIPSVEIHEGAIDLLLEAYKQTFNKMGGYIVSTEKLKDKHAAYLKVSRLEKFFHELSLCEEKIFLKRYDLRESLQRKFLRQAAEECKETNYDTMEENTDGLNLTAKSFSTNCSISTYSQDESDVKANTLELRRNLKDALRNKQDLIKSGSCKHDMIRLGLAGWKSRYYREKFGVEKLSEVGKLKNDMVQRYMEGLCWVLQYYFTDVPSWSWYYPYYHAPFASDFKGLSQFKICFTTDKPLKPFDQLMAVLPKERHVKYFLSCALPKCYRELMENEESLVQKFYPSDLQIDTHGKRFLWQGIAMLPFIDEKLLVSATKTVEGKLAVHEINRNAVRQEKIFMRNSNTTVPNGSAFSKAFDCSSKKLWLDPSTSELGGWLSPVDDKDTSSGFFHSSVMRDLPDIRNDQTISFLFSNPEAVETIPRLLDDVKKPEKTITETEISKRPLWHTYPGCRLPETNPSVLEPQPMVSSFGRGRGRATAAETMLGGGGRGYGRSFHGAESSQTQSRGSRNDGNSYAGRGTYGGGFQRQQTAWRPAGDAGGRGGSEQRRGW

SEQ ID NO: 10580 - protein, 149 aa, Zea mays
  VARIANT 113..149: note = Derived polymorphism lacks residues 113 to 149
  VARIANT 103..149: note = Derived polymorphism lacks residues 103 to 149
  VARIANT 102: note = Ancestral polymorphism is T, Derived polymorphism is A
  VARIANT 87: note = Ancestral polymorphism is E, Derived polymorphism is K
  VARIANT 59: note = Ancestral polymorphism is S, Derived polymorphism is L
  VARIANT 53: note = Ancestral polymorphism is A, Derived polymorphism is V
  VARIANT 52: note = Ancestral polymorphism is A, Derived polymorphism is V
  VARIANT 43: note = Ancestral polymorphism is A, Derived polymorphism is T
  VARIANT 25: note = Ancestral polymorphism is A, Derived polymorphism is V
  VARIANT 22: note = Ancestral polymorphism is R, Derived polymorphism is P
  VARIANT 14: note = Ancestral polymorphism is F, Derived polymorphism is L
  VARIANT 7: note = Ancestral polymorphism is V, Derived polymorphism is F
  VARIANT 6: note = Ancestral polymorphism is E, Derived polymorphism is D
MVAMLEVIHLHSVFLTDASLRRMVAVCPCLRNLDLRYCCRLAASTSLMSGCAASRASPSSTTSTPPSCGSWPYLMVVDSTHGTFINEIALSLDTIMSYFKRTQSSLATVGYLQIDVGSMDEHSTKSDEEYEGLAMHDVMATGPMMSSKM

SEQ ID NO: 10581 - protein, 168 aa, Zea mays
  VARIANT 46: note = Ancestral polymorphism is G, Derived polymorphism is A
  VARIANT 112..168: note = Derived polymorphism lacks residues 112 to 168
MGGGRELAAGRYFPLQRRRSSSRRRPLLVILLLAVVASGQASAASGSIFGGDSASSECSRACESQRCTAPLMRYGKYCGVSYTGCPGEAPCDALDACCMLHDACVQATDNDYLNMWCNQSLLDCVAAARPTAMADTFEGNRCNVTDVADEITAIVEAAVYARGILHKP

SEQ ID NO: 10582 - protein, 668 aa, Zea mays
  VARIANT 98: note = Ancestral polymorphism is S, Derived polymorphism is R
  VARIANT 95..668: note = Derived polymorphism lacks residues 95 to 668
  VARIANT 68..668: note = Derived polymorphism lacks residues 68 to 668
MEKISVAVRFRPPNLVAANTSPASSGGGGDREWRIDDTRVSLLHRAAGPITGASFAFDHVFDGAANNERIYGTVVRELIGAVVGGFNGTAFAYGQTSSGKTFTMNGSDADPGIIPRAVRDVFDTVRQADDREFLIRVSYMEIYNEEINDLLTLEGQKLKIHESLDRGVYVSGLREEIVNSAEQVFELLQLGEANRHFGETNMNMRSSRSHTIFRMVIESSGKDQTDGGDAIRVSVLNLVDLAGSERIIKTGAEGVRLNEGKYINKSLMILGNVINKLSENGKQRGHIPYRDSKLTRILQPALGGNAKTSIICTAAPEEIHIEETRGTLQFASRAKCVSNCAQVNEILTDAALLKRQKLEIEELRKKLQGSHSEGLEQVVLKLRNDMHKSELERDRLAMELEDERKLRMTLEQHLTEQQKLEAISSDHFTDSIQLDLLKTPDSKSVPDGFVACRSRYSQDVEFSPIPENLDNIAEEDLWTRLNKGCVTDLDMLEMTPNLKRESSFLQEKSSAAPLEEPTNAICQRLAKECIYDQQQLEESKARCANLEKDCDVLRDENLSLQQELSESKLEADSLVAEKQAQLDDLRMRCVALERDLSSSRQEAHRLATEKQELAGQLGTERQKMDELKQDIRVICGDLLQREGQLTSIYTKSKAIIESCKASQVATLL

SEQ ID NO: 10583 - protein, 404 aa, Zea mays
  VARIANT 254: note = Ancestral polymorphism is S, Derived polymorphism is F
  VARIANT 73: note = Ancestral polymorphism is R, Derived polymorphism is L
  VARIANT 56: note = Ancestral polymorphism is L, Derived polymorphism is V
MPAADPPVTDAVPDEDAAPRPSPPPPPPRPRPLSLASALPFWFYFAAAVSLLALLLPHLLPPSSPAPLPPLLLGHLAAGRFLKLDPAPGLFAVTSRPTAAAGDSPAHRVLVLPGLAAGSLSFRRVLSSLSSRGVHAAALDLPGQGLSPASPAATAPARTSALREIMNRGVFHAFEHLVQTGEVPYQEEEPAASAARSPHAPDEAAAAVARAAEALGVGPVHLVLHDSALAAGAAFASANPGAVRSVTLVDATASLPAFPAAVFDVPVLGRLVLRVPALFRGLVRLCCVRGVGAEEAEAYRAAMRGEGKAEAVVEAWKSMNHSFQLGEWRVSSEEVRRLPMLVLWSGSWSDMWIDEGKKVAAALPDAKFIYHSGGRWPQVDAFEEISGVITEFVTSAEEAGSSRW

SEQ ID NO: 10584 - protein, 169 aa, Zea mays
  VARIANT 139: note = Ancestral polymorphism is G, Derived polymorphism is S
  VARIANT 134: note = Ancestral polymorphism is I, Derived polymorphism is T
  VARIANT 110: note = Ancestral polymorphism is V, Derived polymorphism is I
  VARIANT 109: note = Ancestral polymorphism is T, Derived polymorphism is I
  VARIANT 101: note = Ancestral polymorphism is R, Derived polymorphism is W
  VARIANT 99: note = Ancestral polymorphism is S, Derived polymorphism is P
  VARIANT 88: note = Ancestral polymorphism is K, Derived polymorphism is E
  VARIANT 66: note = Ancestral polymorphism is A, Derived polymorphism is V
  VARIANT 38: note = Ancestral polymorphism is C, Derived polymorphism is Y
  VARIANT 22: note = Ancestral polymorphism is A, Derived polymorphism is V
  VARIANT 21: note = Ancestral polymorphism is P, Derived polymorphism is L
MGSFSRRVTSTGEPAASRTALAGAHSPLRASPVPRDSCARAAVRRTPCAASAIGEGVEAESMALLALGCCTAAAALGATRAATGDSIKASGFGLWVAESLRRLGWPDDTVVFALATLPVIELRGAIPLDNVGVIVNPKGDMKGFSITGPIGKECADLWPRIASAANAIV

SEQ ID NO: 10585 - protein, 458 aa, Zea mays
  VARIANT 145: note = Ancestral polymorphism is H, Derived polymorphism is Y
MVATSEAAPLRVSASVGSKHHGGAGTRGPATRRRARDVVVFAAGVAATLLALVGTASVLDPGGRGGLVALRVPVPVPGPEDGPRTFYDDPEVSYAVAAGRRLTGWDAKRAEWLRSRGLGRRSAPERVVMVSGSQPEPCPGGAGDHLMLRFLKNKLDYCRLHGIELLYNREFLHPAMGGYWAKIPIVRAAMLAHPDAEWVWWVDSDAVFTDMDFSLPLAKYGGRNFVVYGWPDKFFVRKSWLGLNAGVFLIRNCQWSLDFMDEWARMGPAYPEDHARWGEVLRATLSDKDSDVACDQSALVYLLLNNWERPGKKTFVETEYFFQGYWKEVVDRLDGVAARYEAVERRSPGLRRRHAEQEHLRYAGARNAALRGVVPGPAGGGEVGWRRPLITHFVGCQPCSGGRNPMYSRESCDDGMRHALGFADDQVLRAYGFRHAAPLNDSVRGLPFDYPAAHARND

SEQ ID NO: 10586 - protein, 479 aa, Zea mays
  VARIANT 459..479: note = Derived polymorphism lacks residues 459 to 479
  VARIANT 410..479: note = Derived polymorphism lacks residues 410 to 479
  VARIANT 409: note = Ancestral polymorphism is G, Derived polymorphism is V
  VARIANT 392..479: note = Derived polymorphism lacks residues 392 to 479
  VARIANT 382: note = Ancestral polymorphism is A, Derived polymorphism is T
  VARIANT 289: note = Ancestral polymorphism is R, Derived polymorphism is W
  VARIANT 148..479: note = Derived polymorphism lacks residues 148 to 479
MAASESVPFCVKGGGGGGGGAPRPHGHLVLPAGRVREGLAFAAGAVVAALVLLSSASVLAPPPVPNIVSLPLSSSSPANANAKAAISSSPAVAVGEGPRTFYDDRELSYAVGGRRVTGWDAKRAAWLRTRGLDGAAVAGRVVMVTGSQPEPCKGPGGDHALLRFLKNKLDYCRLHGIELLYNTALLEPSMVAYWAKIPSVRAAMLAHPDAEWVWWVDADAVFTDMDFSLPLERYRESSLVVYGWEREVYEERSWVGLNAGVFLIRNCQWSLDLMDAWARMGPASPEYARWGKTLREELEGKPNDESDDQSALVYLLSRHLERERWANATFLESGYYFQGYWAEIVDRLDGVATRYEAVERGRAGGRAGLRRRHAEREHLLYAAARRQAVRQQRGTGGGVPGPDGGGQKGWRRPFVTHFTGCQPCGGAPNRMYTRRRCAEGIRRALAFADDQVLRSYGFRHAAPLSDSVTPLPFDYPAAH

SEQ ID NO: 10587 - protein, 96 aa, Zea mays
  VARIANT 76: note = Ancestral polymorphism is S, Derived polymorphism is T
  VARIANT 55: note = Ancestral polymorphism is C, Derived polymorphism is R
  VARIANT 40: note = Ancestral polymorphism is G, Derived polymorphism is R
  VARIANT 32: note = Ancestral polymorphism is G, Derived polymorphism is C
  VARIANT 31: note = Ancestral polymorphism is E, Derived polymorphism is K
  VARIANT 26: note = Ancestral polymorphism is D, Derived polymorphism is N
  VARIANT 16: note = Ancestral polymorphism is W, Derived polymorphism is C
MLLSCAQELKHGVALWQEFYHANVCDRVVSEGGHYLIALREIYRVAQILYLSLQCFKTWVLANPGMLSKMLSCLDSCTYIRKPNKYRADSRVVLGR

SEQ ID NO: 10588 - protein, 34 aa, Zea mays
  VARIANT 20..34: note = Derived polymorphism lacks residues 20 to 34
MRRSSSMNKFRLWRSLVIGWIISATHSSGLTMTF

SEQ ID NO: 10589 - protein, 219 aa, Zea mays
  VARIANT 41..219: note = Derived polymorphism lacks residues 41 to 219
  VARIANT 54: note = Ancestral polymorphism is S, Derived polymorphism is L
MEEKRNADAGALVESSSRVSLGCSGCDTGASTSGSVGGCGEGSRGKNGLDVRVSSLDVAYASGGVGGDDPNPSLKIGESSSQDKEFAKLSEPNLVSSKDISDEEQKLDNLSDEKVDFDPNEDDLLSSQELEEFAKDMEEDQTDFQSKIGAMISIPPNDEIFHDGKGKKPLDMPTNIVDGVRKSSRLEKNDDVKVADKAISRAEGKDAFLNKENFGIPSL

SEQ ID NO: 10590 - protein, 82 aa, Zea mays
  VARIANT 7: note = Ancestral polymorphism is P, Derived polymorphism is L
  VARIANT 16: note = Ancestral polymorphism is T, Derived polymorphism is I
  VARIANT 37..82: note = Derived polymorphism lacks residues 37 to 82
  VARIANT 42: note = Ancestral polymorphism is P, Derived polymorphism is H
MYPSPFPLRLKRPWPTGLPSLHGGKDDDLANSLMWLRDTATPGFQSLNFGGLGMSPWMQPRLDATLLGLQPDMYQAMATAAF

SEQ ID NO: 10591 - protein, 418 aa, Zea mays
  VARIANT 265..418: note = Derived polymorphism lacks residues 265 to 418
  VARIANT 261: note = Ancestral polymorphism is S, Derived polymorphism is F
  VARIANT 238: note = Ancestral polymorphism is P, Derived polymorphism is A
  VARIANT 223: note = Ancestral polymorphism is R, Derived polymorphism is W
  VARIANT 189: note = Ancestral polymorphism is S, Derived polymorphism is F
  VARIANT 184: note = Ancestral polymorphism is G, Derived polymorphism is D
  VARIANT 141..418: note = Derived polymorphism lacks residues 141 to 418
  VARIANT 71..418: note = Derived polymorphism lacks residues 71 to 418
  VARIANT 45: note = Ancestral polymorphism is G, Derived polymorphism is S
MASLLQVPPQSTPLPPASPSLRVRSILGLVQVRLSAPCYAKYDNGDLAYFDNVVRGNLSNGALRGVEGLSQEELFVWLPVKGILVQEELGVILFDIGFAHKSLSRSLFEDPPDYKPSAASGMSAAAASPQRTPQAKQSKPQAAPPAEDAMGHKIARTTQASTEYYLHDLLSTYNLMLLDVDSRGRFLKSVRCKHDEGLLLVKVYFKPVGESIDLKEHDLRLEWIRNAFKGIEGSHVWPFQLIHAVEQSHSDIKCENVLVTSWNWLYLADFASFKPTYIPDDDPFDFSFYFDTRGRRRCYLAPEAFARIENHYFVNKGFLPSDSFLLDNVDKIRHIKGFIVLGRYDVCCPMMSAWDLQRLGLKQNSRIVILKQRLHRDTLRRPWVCDMYRSGPRHTERCFEGTIAAEIEDVLAAKSDLK

SEQ ID NO: 10592 - protein, 396 aa, Zea mays
  VARIANT 9: note = Ancestral polymorphism is T, Derived polymorphism is M
  VARIANT 23: note = Ancestral polymorphism is W, Derived polymorphism is C
  VARIANT 34: note = Ancestral polymorphism is A, Derived polymorphism is T
  VARIANT 46: note = Ancestral polymorphism is T, Derived polymorphism is I
  VARIANT 287: note = Ancestral polymorphism is I, Derived polymorphism is T
MGHQAQHATDDTEELLAAHRELWCHALGYVKSMALKCALDLRIPDIIQRCGGSATLGQLLAASEVPASNLGYLRRVMRTLTAMRIFAVVGHGHGPDKADDPADDDATAVSYRLTPASRLLATSDDDDDASKNNLSIHPNISSHVRPKNVSLLFSMAEWMKDEQALSVSLYETVNRKCMWACVEDDAATRACFYESMDADTRLVMQAVIRKCPAVFDDGLTSLVDVGGARGTAAAAVVAAFPHIQKCTVMDLPHIVAEAPAGTGLCFHGGDMFEHIPSADAVMLKVYIYTNWYQMDWILHDWDDDKCVKIMERCKEAISGKEGRGGKVIIIETVLGSRPDDDATCKETYVLDLQILSFVNGAEREEHEWRRIFLAAGFRDYKITHTRGIPSIIEVFP

SEQ ID NO: 10593 - protein, 296 aa, Zea mays
  VARIANT 16: note = Ancestral polymorphism is A, Derived polymorphism is V
  VARIANT 129: note = Ancestral polymorphism is A, Derived polymorphism is T
MAVQAQFGGLLLPPYAVEDQMRALKDYGVLLSAAQSELTRNVVVGGGGAAAMPLPSRKRHRREDEHRHYNVDVPLPGMGSLAADPTAAASTSGRAPADAEVDALVRAECEQLRAGLEAARARQRRALLARAAASVLARRAREAEARLEAARRRAAELDEWVRLAAAEAQAWCGVARANEAVAAGMRATLDALLLRSSAAAAGREGEGDSSEPGPEDAQSRCSCCYVEDVEATGTAAATPSPLWNGRWACRACGEGEASVLLLPCRHMCLCKACEPRTDACPVCSGAKNASIHIAPS

SEQ ID NO: 10594 - protein, 82 aa, Zea mays
  VARIANT 46: note = Ancestral polymorphism is R, Derived polymorphism is Q
  VARIANT 32: note = Ancestral polymorphism is G, Derived polymorphism is R
  VARIANT 26: note = Ancestral polymorphism is A, Derived polymorphism is G
  VARIANT 22: note = Ancestral polymorphism is Y, Derived polymorphism is C
MQIDDASLWDTTTICSNVCTRYTITAGTNATGFTPIQFLSYAVTKRDSSNSTDKNLLAAHLLSFPRFKIVLLASSPIQNGPV

SEQ ID NO: 10595 - protein, 145 aa, Zea mays
  VARIANT 58: note = Ancestral polymorphism is W, Derived polymorphism is R
  VARIANT 5..145: note = Derived polymorphism lacks residues 5 to 145
MMLGQEPRQTTSNVGHLNKPSIQALIHGLNRHYYSIAINYRKNELEEKMLLNLHKKKWTDGLILKRFDTHSKTNEQTVQEMLNLAIKYNKAVQEEDELPPEKLAIANVGRQDAKKHLEEHVSNLMSSNNVDTTIGWNALINSFSH

SEQ ID NO: 10596 - protein, 142 aa, Zea mays
  VARIANT 103: note = Ancestral polymorphism is S, Derived polymorphism is F
  VARIANT 73: note = Ancestral polymorphism is D, Derived polymorphism is N
  VARIANT 65: note = Ancestral polymorphism is R, Derived polymorphism is C
  VARIANT 61: note = Ancestral polymorphism is A, Derived polymorphism is T
  VARIANT 59: note = Ancestral polymorphism is R, Derived polymorphism is C
  VARIANT 48: note = Ancestral polymorphism is A, Derived polymorphism is T
  VARIANT 45: note = Ancestral polymorphism is V, Derived polymorphism is L
  VARIANT 42: note = Ancestral polymorphism is T, Derived polymorphism is S
  VARIANT 39: note = Ancestral polymorphism is W, Derived polymorphism is R
  VARIANT 26: note = Ancestral polymorphism is R, Derived polymorphism is C
MASWLLLPFSSFPWPTPPPPDSSSCRGSDNDGGGDSGYWRLTVVVAFAGAQVGCALRRRFADLLRSPEVRHLDALTKMGSFWFEGSELFTTFHILAAIGHVFSAPYVCSSALFSGNGSGGRYISNEKLLSRQPRGINSKKRL

SEQ ID NO: 10597 - protein, 297 aa, Zea mays
  VARIANT 215: note = Ancestral polymorphism is S, Derived polymorphism is F
  VARIANT 186: note = Ancestral polymorphism is P, Derived polymorphism is L
  VARIANT 184: note = Ancestral polymorphism is R, Derived polymorphism is W
  VARIANT 16: note = Ancestral polymorphism is L, Derived polymorphism is V
MATARWLQVAAMAVALLAEWATAAAPRKPVDVPFQKNYVPTWAQDHIHYIDGGREVQLYLDKSTGTGFQTRGSYLFGHFSMHMKLVGGDSAGTVTAFYLSSQNSEHDEIDFEFLGNRTGQPYILQTNVFTGGKGDREQRIYLWFDPTKEYHSYSVLWNLYMIAFFVDDVPIRVFKNTSADLGVRYPFSQPMKLYSSLWNADDWATRGGREKTDWSNAPFVASYRGFHVDGCEASAEARFCATQGARWWDQPEFRDLDAAQYRRLAEVRRRYTIYNYCTDRDRYGAAVPPECARDRDV

SEQ ID NO: 10598 - protein, 117 aa, Zea mays
  VARIANT 33: note = Ancestral polymorphism is T, Derived polymorphism is N
  VARIANT 10..117: note = Derived polymorphism lacks residues 10 to 117
  VARIANT 2: note = Ancestral polymorphism is T, Derived polymorphism is P
MTSKVMPHNSTTLEEMDPKQENNKLVKESIFYTVETLGVVLAYMGSLESLLTYHKDVDEKLLYETFSVFGVIVTNPKDGFKNGSDMPIVMVMARVTKKIDWIPIYFYVKDEILNNYF

SEQ ID NO: 10599 - protein, 404 aa, Zea mays
  VARIANT 343..404: note = Derived polymorphism lacks residues 343 to 404
  VARIANT 199: note = Ancestral polymorphism is L, Derived polymorphism is H
  VARIANT 149: note = Ancestral polymorphism is D, Derived polymorphism is E
  VARIANT 86: note = Ancestral polymorphism is V, Derived polymorphism is A
MNGFLCKHPSTILASDFKTLLLNHAGDLDSIARSSVSMVTAAEFPGLNTLGLSMARTDIAPYGVVLPHSHPRASEMMFVHGGSVVVGFLDTEGRLFQKRLGEGEVFVFPRGLLHYVMNYGFGLATAFSVLNSQNPGVVGVAHAMFFASDSDVVEGLMARMLKFGEMEVTSRNCSFSIGKFDEYSLDDTVFCLLLYPVDLYTFCCLALSPGSTSISLTVRDLLLFRAFSFTLKAPAPDQDLEEFIKDDELVPSPPQEKKKMNTNASVSEDVGKNVGVKKGGSMEGELVEGVRRSSRLESTEEMKIADKAAARAMAKDAFINKGVELGSSFNDAVKNLNLIKSLELSRKKLVVQSVKFNVDNSKVDILDSNVDNNSHNESVDNALSDLDDVMVLRKGRKIRHRKKL

SEQ ID NO: 10600 - protein, 304 aa, Zea mays
  VARIANT 256..304: note = Derived polymorphism lacks residues 256 to 304
  VARIANT 220..304: note = Derived polymorphism lacks residues 220 to 304
  VARIANT 210: note = Ancestral polymorphism is I, Derived polymorphism is N
  VARIANT 187..304: note = Derived polymorphism lacks residues 187 to 304
  VARIANT 164: note = Ancestral polymorphism is R, Derived polymorphism is W
  VARIANT 157..304: note = Derived polymorphism lacks residues 157 to 304
  VARIANT 120..304: note = Derived polymorphism lacks residues 120 to 304
  VARIANT 82: note = Ancestral polymorphism is S, Derived polymorphism is F
  VARIANT 65..304: note = Derived polymorphism lacks residues 65 to 304
  VARIANT 57: note = Ancestral polymorphism is P, Derived polymorphism is L
MEGTRLLSPLLSAGEKAVSCGGGGASEIPELAVIRELNLRTIDELGLDKSIVSVFSPLSLNNNSWWMGSVGGVVAALSRKRSVDVRRINPKVPKEEAVTISGRLVQILSDHGPLTIGNTWNNTKGTENGITFFVVYEFRYPINQSVKQSGKSRGAMQASEQQQRRTLMLPSVYGAQYVTSTFPTCRQNSRSSSTRSASSSPPNSFMVLVIIPNILPFLWWVMSSANDALACPIRLWHRNPILDSIEGLQCRHRHSWKSSTDGHRAPRWAVLSTAARTACVGSILTPAPTSAPAAQHSDDTSSSL

SEQ ID NO: 10601 - protein, 657 aa, Zea mays
  VARIANT 265: note = Ancestral polymorphism is Y, Derived polymorphism is H
MLPPRPPRPTPLPSSRPFHFLVVVSVLCFAAILTPAPAAVAAAASGDADGGGGEGGVIRIRTAAVARSAMDTKPFISAKDALKKEPISDVIALKDSMKYFDAEFFNDSKLREMEDGAKEFNVPAFRENRKLVATENGGLHNPSVLLFKSSWSSGSMTSETRSFEYPRASSVHRPTNDEDIAFMSVIELGELIRTKQITSRELTDIFLRRLKRYNPVLEAVITYTEDLAYKQAKEADDLLAQGKYLGKYIANQADPLRHYRHYWQYLHLFPQLHLELCPLHGIPYGLKDIIAVPHYKTTWGSRTFKNQVLDSEAYVYRRLKSAGAVLVAKLVTGSLAYDDIWFGGRTRNPWNIEEFSTGSSAGPAASTSAGMVPFAIGSETAGSIAYPAARCGVTALRPTFGTVARTDVMSISESLDKLGPFCRSAVDCAVVLDTIRGTDAGDPSSREVALGDPFHVDITKLTVGYLDDAEMEVVDVLSSKGVKLVPFKLNYTVESVQSILNITMDTDMLAHFDNWQREGHDDDYEAQDQWPVELRRARLIPAVDYIQAQRARGKLIREIKDSFTVDAFVGNVTDWERVCLGNLVGMPVVVVPTGLKSIENPPKGGTKRRTTVTTGIYAPPDHDHIALALAMAYQSVTDHNKQRPPIDDLGPNDVIQR

SEQ ID NO: 10602 - protein, 212 aa, Zea mays
  VARIANT 55: note = Ancestral polymorphism is S, Derived polymorphism is L
  VARIANT 75: note = Ancestral polymorphism is G, Derived polymorphism is V
  VARIANT 77: note = Ancestral polymorphism is R, Derived polymorphism is L
MYGTSDPTAAERTAFRRAEKQYKLYKTLNVKGRSRSRSRSGCRPSSGEGGGADLSAVVDFHALLAADGELPDGIGRRECPGFDRPVFCFLDRPGFYFIPGALSTEEQCCWIRESLKTFPQPPNRTNLTAIYGSISDLLIAAENQQILVEAENPDIQERNKQNNCGGKTESKYFKFVDSESQKGEEHRSNAATTLVRKLRWSTLGLQFDWSKI

SEQ ID NO: 10603 - protein, 271 aa, Zea mays
  VARIANT 30: note = Ancestral polymorphism is P, Derived polymorphism is R
  VARIANT 65: note = Ancestral polymorphism is R, Derived polymorphism is H
  VARIANT 70: note = Ancestral polymorphism is P, Derived polymorphism is H
  VARIANT 88: note = Ancestral polymorphism is A, Derived polymorphism is T
  VARIANT 98: note = Ancestral polymorphism is P, Derived polymorphism is L
  VARIANT 99: note = Ancestral polymorphism is A, Derived polymorphism is V
  VARIANT 103: note = Ancestral polymorphism is A, Derived polymorphism is T
  VARIANT 114: note = Ancestral polymorphism is L, Derived polymorphism is P
MRQWKSLVPALHLHGPAASCFPHPPSPSPPRGDDEEETDLLPAAPPQLAGAALAVRLVGCDGRVRAYAPPVTARELMQEHPRHLVCRADALLIGERIPAVAPAEELQPGEAYFLLPAHLFRSVLSFVSLASSLLLLLSTTASASGKKPAAARPFELHRTASGTLQIKFSDDFLLPDAAKVAAPPQQQQPAVLLRGDERLAKDYEELVGYGKSRRWAPKLETIQELAAPAAAADPAPPSAGRGRSSRALPFLARLGRRRRRRDACSAVACSG

SEQ ID NO: 10604 - protein, 202 aa, Zea mays
  VARIANT 7: note = Ancestral polymorphism is A, Derived polymorphism is T
  VARIANT 27: note = Ancestral polymorphism is L, Derived polymorphism is P
  VARIANT 34: note = Ancestral polymorphism is M, Derived polymorphism is T
  VARIANT 48: note = Ancestral polymorphism is A, Derived polymorphism is V
  VARIANT 101..202: note = Derived polymorphism lacks residues 101 to 202
  VARIANT 121: note = Ancestral polymorphism is S, Derived polymorphism is F
  VARIANT 128: note = Ancestral polymorphism is S, Derived polymorphism is L
  VARIANT 129: note = Ancestral polymorphism is P, Derived polymorphism is S
  VARIANT 132: note = Ancestral polymorphism is T, Derived polymorphism is M
  VARIANT 144: note = Ancestral polymorphism is E, Derived polymorphism is K
  VARIANT 149: note = Ancestral polymorphism is E, Derived polymorphism is K
  VARIANT 153: note = Ancestral polymorphism is K, Derived polymorphism is T
MLLCCAAWLAEFGADAVVDEDLGFKELEGVVAYMHGWDRDGHPVCYNAYDVFKDRGMYERAFDDGERLARFLRWRVQVTDLRDMPKRELRAASNQILSLFQDNYPEMVARKVFINVPWYFSVLFSMVSPFLTERTKSKFVIAREGNVAETLYKFIRPELVPVQYGGLSRAGELENGPPKPASEFTIKGGVKVFLEIDGIEVP

SEQ ID NO: 10605 - protein, 922 aa, Zea mays
  VARIANT 30..922: note = Derived polymorphism lacks residues 30 to 922
  VARIANT 36: note = Ancestral polymorphism is L, Derived polymorphism is S
  VARIANT 63: note = Ancestral polymorphism is T, Derived polymorphism is I
MSSQDPPPATSTQKGGTDLVLFLHWYLDLRIQQKQSESLVNLLAEASRFYRKAYNELFSGLITEWEPESSTNTPDYMLFGWHLFLTLRSRSPELFKDLVSCIHGLVAVLAILLVHVPAKFRTFTIEGSSHLIKQTEKGVDLIASLCHNYHTSEECLKEMMDKSHKAIEEVFSMKALSASECKTENLDKIDTGMEPFLAYRLMYFKGLIDMECFQSNLEKMEKLCNSNNCEAELDFKLILTNNDYIPCAENLSRDSTNLGCSKCAFETLASPTKTIKNMLTVPSSPLSPTNGGSVKIVQMTPITSAMTTAKWLREVISSLPEKPSSKLQQLMSSCDRDLTNAVTERVSIVLEAIFPTKSSADRGGSLGLNCANAFDTLWADARKMEASKLYYRVLEAICRAELQNSNVNNLTPLLSNERFHRCLIACSAELVLATHKTVIMMFPAVLESTGLTSFDLSKIIENFVRHEETLPRELKRHLNSLEEQILESMAWEKGSSLYNSLIVARPSVASEINRFGLLAESMPSLDDLVARQNIHIEGLPATPSKKRAAGRDDNADPRSPKRPCNESRSTVVEHNLQTPPPKQCHMVLTSLKAKCHPLQSTFASPTVSNPVGGNEKCADVTIQIFFSKILKLAAIRIRNLCERIQYMEQTERVYNVFKQILDQQTTLFFNRHIDQLILCCLYGVAKVCQLELSFREILNNYKKEAQCKPEVFLSIYIGSRNHNGVLISRHVDIITFYNEVFVPAAKPFLVSLISSGTRPEDKKNASGQVPGSPKLSPFPNLPDMSPKKVSASHNVYVSPLRQTKINMAYACLNSTAQYVSTTASMTKLLSPKLGMDLLLSPSSRSFYACIGEGTHAYQSPSKDLAAINSRLNYNGRRVNSRLNFDMVSDSVVAGSLGQPNGGSTSLDPAAAFSPLSKRKPDT

SEQ ID NO: 10606 - protein, 252 aa, Zea mays
  VARIANT 29..252: note = Derived polymorphism lacks residues 29 to 252
  VARIANT 26: note = Ancestral polymorphism is W, Derived polymorphism is S
MREKLNRSWISLLEVPVQLTRRLFQWRREKMALPASPSPVAMVWARQGRLQQRYDGCYRLVSGCIPYTLKEDAVEEGAGKQSCQQDVVGRLQVLMISTPKRSDLIFPKGGWEDDESIDEAASREAFEEAGVKGIISATPLGEWIFKSKSKQNSCGLQGACKGFMFGLQVTELLETWPEQVTHGRRWVPVEEAYGLCRYDWMREALDRLKDQLLLLESSEFRPLLSSEPVGSPSLYMVVPPAAAGGATTLCRC

SEQ ID NO: 10607 - protein, 169 aa, Zea mays
  VARIANT 6: note = Ancestral polymorphism is F, Derived polymorphism is L
  VARIANT 16: note = Ancestral polymorphism is N, Derived polymorphism is S
  VARIANT 45: note = Ancestral polymorphism is G, Derived polymorphism is E
  VARIANT 137: note = Ancestral polymorphism is I, Derived polymorphism is T
  VARIANT 139: note = Ancestral polymorphism is A, Derived polymorphism is S
MSSFFFCKILMLWQRNYDVSLPHNKIPGALASLAKKMAIPAMPSGEEFKPEAAIVNYYGPSDMLGGHVDDMEADWTKPIVSISLGCKCIFLLGGKTRDEVPTAMFLRSGDIVLMAGEARERFHGVPRIFTESDQQEIPALISQLSSGDDVFILEYIKNSRININIRQVY

SEQ ID NO: 10608 - protein, 103 aa, Zea mays
  VARIANT 5: note = Ancestral polymorphism is C, Derived polymorphism is R
  VARIANT 45: note = Ancestral polymorphism is R, Derived polymorphism is C
MAAPCRKRVAETFELQDICFLVLALLSRCKQIDDALHVEDGHLQRCCAAGTVQGWDGISMLEVVFTALQDVFLLLVGTLRITDSRMRKGYCQHDHDKCYLTSR

SEQ ID NO: 10609 - protein, 737 aa, Zea mays
  VARIANT 432..737: note = Derived polymorphism lacks residues 432 to 737
  VARIANT 466..737: note = Derived polymorphism lacks residues 466 to 737
  VARIANT 483..737: note = Derived polymorphism lacks residues 483 to 737
  VARIANT 503..737: note = Derived polymorphism lacks residues 503 to 737
  VARIANT 512..737: note = Derived polymorphism lacks residues 512 to 737
  VARIANT 515..737: note = Derived polymorphism lacks residues 515 to 737
  VARIANT 525..737: note = Derived polymorphism lacks residues 525 to 737
  VARIANT 536..737: note = Derived polymorphism lacks residues 536 to 737
  VARIANT 579..737: note = Derived polymorphism lacks residues 579 to 737
  VARIANT 598..737: note = Derived polymorphism lacks residues 598 to 737
MATTTRSCANSATVLHGIRHRLRADGPAAILGIGTANPKNCVPQDQFADWYLDVTKSEHLAELKAKTKKICDRSGITKRYFYHTEEIIGDHPELIVRDLPSLTTRLSVIADAAPKLAAEAASRAIADWGRPAADITHLVVATNAGANEPGVDQLLAALLGLRPTVRRTLLYLHGCSAGLVALRVAKDVAENNRGARVLVACAQAKILMFGAPDDDARLDKVVPMTLFGDGAGAIIVGADPTSRPMAMEIERPIFHMVSASQTTLPGTDEAVVLSLRENGLVDGRLSAEVPRLVGGSLEQCLAGSLAPLGLVNESDGGGRWNGFFWAVHPGGRAILDSYEATLGLQPGKLAASRHVLSEYGNMMGSTIIFVLDEIRHRRRREEDTKEKDCQFGVMSGVGPGLTVETIVLHAATELEEIAAAGNPGDGATQTRESASSSAELPSGSGDSSEDKCLCFVELARSMGISQDTHESMATDAANYLCHQLQHLLGPISSATSQSGPWEERSVMVRLTQKLQKSKRNKWWRQRRRKHVAELFQKERADYDRVDQEADEWRAKQIAKDIAKRRVESMQQIARKKTNEERKRLESEVPRNTKYMSLGDDRSLCMECLGSAVMDTGECQPLYHSIRDYYEGMKMKLDQQIPMLLVEQQALNEAMEGESRGPHHMPETRGLCLSEEQTVSSILRRPRIGGNRVPVGQGYDLTETCAGAAFTEWDDTTCCYVKVCSTNLMFAGSVNKCS

SEQ ID NO: 10610 - protein, 180 aa, Zea mays
  VARIANT 107: note = Ancestral polymorphism is L, Derived polymorphism is V
MVAALLRRALHLRRVLPSPAVTAAASQRLIPAFSTTPTPTPTTSQQNAATTTIDLSSDESRRRLLNRLVYRSKQRGFLELDLVLGTWVEQHVHAMDEANIRALLQVLDLENPDLWKWLTSQEQPPEDLNSNPVFAAIKSKVTDNLTKHASPETRSTPGQPWVRGWDDIKKGKDGPKYGNQ

SEQ ID NO: 10611 - protein, 282 aa, Zea mays
  VARIANT 118: note = Ancestral polymorphism is R, Derived polymorphism is W
  VARIANT 123: note = Ancestral polymorphism is H, Derived polymorphism is Y
  VARIANT 176: note = Ancestral polymorphism is L, Derived polymorphism is R
  VARIANT 179..282: note = Derived polymorphism lacks residues 179 to 282
MSSASSSAAAANAGEGSGGAEEGVEITYVSYGGEQHLPLVMSLVDEELSEPYSIFTYRYFVYLWPQLTFLAFDARDGKCVGTVVCKMGEHRGAFRGYIAMLVVLKPYRGRGIGAVAARCLLAHPLMFQLRTFQDLWLVLSIDHFLILSISGLLFRQQELCGHLRRSKAAHLCCYSLQFQHCLGLAAVISEFDPGATTKLIVRDIRATELVTRSIRAMMESGCEEVTLEAEVTNKGALALYGRLGFIRAKRLYRYYLNGVDAFRLKLLFPRPDNDPQIFGIID

SEQ ID NO: 10612 - protein, 383 aa, Zea mays
  VARIANT 347: note = Ancestral polymorphism is Q, Derived polymorphism is P
MPSMEPRARQSDGMEAEPALSPSICHAPAAQHAGNNNSTSGASSIISEASSNAEERYSPANGLDMQVNLPGLNTITAQMPAQPTREMQPNSVAEQAQLVNQGTQEVQLNQHHRENTVLTPITSFHNSNIVPNVEVTWLSAAIPELHSSLQCLMNEFKFKINYLNTGPDQAPKLTIDILPRVETTYEMPTLFGNDHLLTFQNHATDPSSAAETMITMHNRIVTKFYTRRPIHLRKRNVHSPQPPIFSAPQTTEVSNTGKRVTSDVSDNKLRRSTRIKLANDGCKTQTGTPRCSCCKEAPHHKGKARTKRGQSSFNIPLPNLISDVTFSSLDEIDKSTNFPPLPVLELQRVATKMCGLAPAEVATELLLSEEEPADAQNKEVING

SEQ ID NO: 10613 - protein, 377 aa, Zea mays
  VARIANT 13..377: note = Derived polymorphism lacks residues 13 to 377
  VARIANT 129: note = Ancestral polymorphism is Q, Derived polymorphism is K
  VARIANT 193: note = Ancestral polymorphism is D, Derived polymorphism is Y
MALSKEQKLTISEQQHTASSEQQVALDAELQLWNHTFGYVKSMALKAALDLGIPDAIHQHGGSATIPQIVTRITLHPSKTPCLRRLMRVLTVTGVFGTQEPHDDGGGCDDELVYTLTPASRLLVGPPGQNVSPLLNVMLCPIFVSSFLDLRGWFQHEMPDPSPFKVTHGRDIWELAAHDAGFSRLFDAGMVADSGFIMNVVVRECGSGTVFQGISSLVDVGGGFGGATQAIAKAFPHLECSVLDLPNVVAGAPADTAVKYVAGDMFESVSSADAVFLKSIIHDWGDADCVKILKNCKKAIPAQGGKVIILDIVVGAGSSSCDRKNVETQCLFDLYIMTINGVERDEREWKKIIFEAGFTSYKIIPVLGTRSIIEVCP

SEQ ID NO: 10614 - protein, 361 aa, Zea mays
  VARIANT 62: note = Ancestral polymorphism is G, Derived polymorphism is D
  VARIANT 129: note = Ancestral polymorphism is Q, Derived polymorphism is K
  VARIANT 193: note = Ancestral polymorphism is D, Derived polymorphism is Y
MALSKEQKLTISEQQHTTSSEQQVALDAELQLWNHTFGYVKSMALKAALDLGIPDAIHQHGGSATIPQIVTRITLHPSKTPCLRRLMRVLTLTGVFGTQELHDDGGGCDDELVYTLTPASRLLVGPSGQNVSPLLNVMLCPIFVSSFLDLRGWFQHEMPDPSPFKMKHGRDIWELAAHDAGFSRLFDAGMVADSGFIMNVVVRECGAVFQGISSLVDVGGGFGGATQAIAKAFPHLECSVLDLPNVVAGAPADTAVKYVAGDMFESVSSADAVFLKILKNCKKAIPAQGGKVIILDIVVGAGSSCDRKNVETQCLFDLYIMTINGVERDEREWKKIIFEAGFTSYKIIPVLGTRSIIEVCP

SEQ ID NO: 10615 - protein, 97 aa, Zea mays
  VARIANT 69: note = Ancestral polymorphism is D, Derived polymorphism is N
  VARIANT 68..97: note = Derived polymorphism lacks residues 68 to 97
  VARIANT 53: note = Ancestral polymorphism is K, Derived polymorphism is N
  VARIANT 21: note = Ancestral polymorphism is A, Derived polymorphism is S
  VARIANT 3..97: note = Derived polymorphism lacks residues 3 to 97
MHQHEMPNTENDDGVMALLPSIVACSLPCLEVLIEMKVVAAKMKVVAAASKEKVQQDEPKAAISDVKCDNPKEEGNVQQTKWLEDFTSSITLVPLFV

SEQ ID NO: 10616 - protein, 156 aa, Zea mays
  VARIANT 10: note = Ancestral polymorphism is R, Derived polymorphism is W
  VARIANT 38: note = Ancestral polymorphism is D, Derived polymorphism is N
METEEEVKDRDVAGGEQAGILSAMATKIGMAMPGANSDDSHGDSGDDAKSSNGEAARGGSNGGEKQGDESNGGGILSAVASRIGVVVSGANGDHSGSAEDGAKTSAGDAGHGSKGKEKGRGVNGGRIVEQIISNLPSDDQAPDADEASLLIAIIKD

SEQ ID NO: 10617 - protein, 111 aa, Zea mays
  VARIANT 90: note = Ancestral polymorphism is G, Derived polymorphism is R
  VARIANT 41: note = Ancestral polymorphism is T, Derived polymorphism is I
  VARIANT 34: note = Ancestral polymorphism is A, Derived polymorphism is S
MAWSGRGGRGGLGVLMGLFFGALENPIMAEEMTSRQQIVYTAKQMGSRSICNAKTFAVMGLIFSAAKCTIEKVQAKHDTTNTAVAGCVTGGALAVKVSGSADDLILALRTT

SEQ ID NO: 10618 - protein, 539 aa, Zea mays
  VARIANT 297: note = Ancestral polymorphism is R, Derived polymorphism is W
MDSPLMKPLLVPNNHSPGPVVAATPGEHGGAAADESSTLVDAASGTDESHRALADADVKMNDDGDVQGDELSASVQRRLDESSAVEGEDEEEEIGDDAEADDMAARMGRRLAALPGNAHESEPFTIFRVAGPMRDRNRHLYEPQMISIGPFHRGAGRHLAAMEEHKWRYLRDILARPGGATLASYARAARSMEASARRRYAEPVLLPAAEFAEMLLLDGCFLVEFFLKGQESAEDALIDASWAMQNVYNDMLLLENQLPFFVLERFYDLATGGLGRDYFVTNVLVNYLTVDMCVGPRDPESTRPPDGEIHHLLHLYYHWFLPPEDRDGSGTGSKDKEDGEALEELMSTSADERMPWQLPPASELKDSGVTFRAKKSPRSMVDVTFDRRSGALEIPAVESYTNHAIFANLLAYEQSRGRWELQRLVSYVLLMASVVDARRDVEVLQRAGVFVRGDEETAAFYAHLGELCPPPEFVNNCYADLFRDVLEYCGRSWNRHRAVLVHDYFSNPWTSMSAAAAVFLLVLTVVQTVYTVLPYYSQN

SEQ ID NO: 10619 - protein, 78 aa, Zea mays
  VARIANT 66: note = Ancestral polymorphism is R, Derived polymorphism is S
  VARIANT 59: note = Ancestral polymorphism is S, Derived polymorphism is C
  VARIANT 46: note = Ancestral polymorphism is S, Derived polymorphism is A
  VARIANT 31: note = Ancestral polymorphism is E, Derived polymorphism is V
  VARIANT 29: note = Ancestral polymorphism is A, Derived polymorphism is T
  VARIANT 16: note = Ancestral polymorphism is C, Derived polymorphism is Y
  VARIANT 11: note = Ancestral polymorphism is G, Derived polymorphism is R
  VARIANT 7: note = Ancestral polymorphism is E, Derived polymorphism is Q
  VARIANT 6: note = Ancestral polymorphism is Y, Derived polymorphism is C
  VARIANT 3: note = Ancestral polymorphism is C, Derived polymorphism is F
MWFMWYQLASGESYYCQGDLGQALKNFLAVEKHYADMTEDQFDFFSYCLRKMTLRAYVSMLKFQDRLHAHEYFHKVAA

SEQ ID NO: 10620 - protein, 582 aa, Zea mays
  VARIANT 321..582: note = Derived polymorphism lacks residues 321 to 582
  VARIANT 96: note = Ancestral polymorphism is V, Derived polymorphism is G
MLVAEVLRAGAYISRFSRRACKVAIFSSIACSPTSQFRRLQFLDLSIKSRPYHFSQSCLMALAAAPASGDSQSGPQRNYQVVVAATRDMGIGKGGVMPWKLLGDLKFFKELTLTTTDPAKKNAVIMGRKTWESIPVKSRPLPGRLNVILTRSGSFDFATVENVVICGSMKSALELLASTPYCLSIEKVFVIGGGQVLREYLNGPACEAIHLTDIQSSIECDTFIPPVDFSVFQPWYSSFPVVESNIRHSFVTFVRVRKSVAETHESNGKESTEIDTKNDKFEIENFSFLPKIVYDRHEEYQYLNLVEDIIRFGAQKNDRTGTGTLSKFGCQMRFNLRKNFPLLTTKRVFWRGVVEELLWFISGSTNAKVLQEKGIHIWDGNASREYLDRIGLAHREEGDLGPVYGFQWRHFGAEYTDMHADYTGKGFDQLMDVIDKIKNNPDDRRIILSAWNPSDLKKMALPPCHMFAQFYVENGELSCQMYQRSADMGLGVPFNIASYSLLTYMIAQVCDLSPGDFVHVIGDAHVYRNHVRALEEQIQKMPKPFPILKINPSKKDIDSFMASDFKLVGYDPHQKLEMKMAV

SEQ ID NO: 10621 - protein, 994 aa, Zea mays
  VARIANT 99..994: note = Derived polymorphism lacks residues 99 to 994
MDDSENNAPSTPGSPGFSTDRLPPNTTTSRGATDPSSYSDDDGEAEVDPHVLPDDDDPAAVAAPDEDEEGEDLFNDNYLDDYRRMDEHDQYESVGLDDSLEDERNLDEIMADRRAAEAELDAREVRTGATADRKLPRMLHDQGNGSKTRDKVQDLDVSYCDFKALSFHGADTDDDTNFRRPKRHRASFRQPSGPRTPRSDDDGDGATPSSPGRSHRGMSSGGDVPMTDQTDDDPYEDEFDEEDEMNMYRVQGTLREWVTRDEVRRFIAKKFKEFLLTYVHPKNDQGEFEYVRLINEMVLANKCSLEIDYKQFIYIHPNIAIWLADAPQSVLEVMEEVAKNVVFDLHKNYRNIHQKIYVRISNLPVYDQIRNIRQIHLNTMIRIGGVVTRRSGVFPQLQQVKYDCNKCGTILGPFFQNSYTEVKVGSCPECQSKGPFTVNVEQACYLKHVFTTIYRNYQKLTLQESPGIVPAGRLPRYKEVILLNDLIDCARPGEEIEVTGIYTNNFDLSLNTKNGFPVFATVVEANYVAKKQDLFSAYKLTDEDKAEIEKLSKDPRIGERIIKSIAPSIYGHEDIKTAIALAMFGGQEKNVKGKHRLRGDINVLLLGDPGTAKSQFLKYVEKTGHRAVYTTGKGASAVGLTAAVHKDPVTREWTLEGGALVLADRGICLIDEFDKMNDQDRVSIHEAMEQQSISISKAGIVTSLQARCSVIAAANPVGGRYDSSKTFTQNVELTDPIISRFDVLCVVKDIVDPFTDEMLARFVVDSHARSQPKGANLEDRVSTDVDDDPLAAARQADPDVLSQDMLKKYITYAKLNVFPKIHDADLDKISHVYAELRRESSHGQGVPIAVRHIESIIRMSEAHARMHLRSYVSQEDVDMAIRVLLDSFISTQKFGVQKALQKNFRKYMTFKKDYNELLLLLLRTLVKDAVHFEEIMAGSASRLTHVEVKLEDLRNKAQEYEIYDLKPFFSSACFRDNGFLLDEGRGIIRHPLAE

SEQ ID NO: 10622 - protein, 86 aa, Zea mays
  VARIANT 69..86: note = Derived polymorphism lacks residues 69 to 86
  VARIANT 38: note = Ancestral polymorphism is P, Derived polymorphism is T
  VARIANT 32: note = Ancestral polymorphism is A, Derived polymorphism is S
  VARIANT 29..86: note = Derived polymorphism lacks residues 29 to 86
  VARIANT 21: note = Ancestral polymorphism is P, Derived polymorphism is S
  VARIANT 7: note = Ancestral polymorphism is V, Derived polymorphism is M
MVVAIAVFSALGFTFYVFFVPFVGTKPFQIVAMAIYTPLITCVVVLYIWCAATNPGDPGIFDSTKNLKLDKNEKHSYVNSDQGINH

SEQ ID NO: 10623 - protein, 335 aa, Zea mays
  VARIANT 310: note = Ancestral polymorphism is G, Derived polymorphism is V
MASSGDPPGSADEKKTPKSEGSSDERQGLPPAGFSNPFDFGSMQSLLNDPSIKEMADQIARDPAFNRMAEQLQRSAQSTGEQGTPPLNPQQYMETMQKVMENPQFMTMAERLGNALMQDPAMSSMLETFSSPSHKEQLEERMSRIKEDPAMKSILDELENGGPSAMMKYWNDPDTLQKIGEAMGASFPFGAGSSAEPSGTEETEEEGGDDDESIVHHTASVGDEEGLKKALDGGADKDEEDSEGRRALHFACGYGELKCAQILLEAGAAVDALDKNKNTPLHYAAGYGRKECVDLLLKHGAAVTLQNLDGKTPIDVAKLNNQDEVLKLLEKDAFL

SEQ ID NO: 10624 - protein, 386 aa, Zea mays
  VARIANT 311: note = Ancestral polymorphism is R, Derived polymorphism is W
MAMMMLARNLCSRLRPPLAAAAAFSTVPAASAAAAEAERSIRDGPRNDWSRPEIQAVYDSPLLDLLFHGAQVHRNVHKFREVQQCTLLSIKTGGCSEDCSYCPQSSRYDTGLKAQKLMNKDAVLEAAKKAKEAGSTRFCMGAAWRETIGRKTNFNQILEYVKEIRGMGMEVCCTLGMIEKQQAEELKKAGLTAYNHNLDTSREYYPNIITTRSYDDRLQTLQHVREAGISICSGGIIGLGEAEEDRVGLLHTLATLPTHPESVPINALVAVKGTPLEDQKPVEIWEMIRMIATARIVMPRAMVRLSAGRVRFSMPEQALCFLAGANSIFAGEKLLTTANNDFDADQAMFNILGLIPKAPSFGEEEAAAAAVAAPVCTERSEQAASM

SEQ ID NO: 10625 - protein, 273 aa, Zea mays
  VARIANT 41: note = Ancestral polymorphism is L, Derived polymorphism is Q
  VARIANT 45: note = Ancestral polymorphism is I, Derived polymorphism is T
  VARIANT 49: note = Ancestral polymorphism is G, Derived polymorphism is E
  VARIANT 163: note = Ancestral polymorphism is S, Derived polymorphism is L
  VARIANT 175: note = Ancestral polymorphism is H, Derived polymorphism is N
  VARIANT 198..273: note = Derived polymorphism lacks residues 198 to 273
  VARIANT 203: note = Ancestral polymorphism is I, Derived polymorphism is T
  VARIANT 211: note = Ancestral polymorphism is T, Derived polymorphism is I
  VARIANT 218: note = Ancestral polymorphism is Q, Derived polymorphism is L
  VARIANT 224..273: note = Derived polymorphism lacks residues 224 to 273
MAEDLRTNPPDGDAPARGDVLAIGRVCRAELALTIANILSLIYLIQDIGILLFLNKLIIYHKKALEGTYQFKKSRIESVKAIRFQCADIREALLQVADVDNDAKTSSEAKVSKHLQAKDMLIDDAIYKVQGFISFFKDYRENGFLEALQIAKAIALDMDIGTSFRKRRVIKRKRHFDENPDDTNNDTQFEEESFRITYFIHIIDQAISSLTRRFEQYQELKFLQNFIPKENMGPVAILKFLKRHDSFPNASIAYRVLLTIHVTVASGEQSFLN

SEQ ID NO: 10626 - protein, 278 aa, Zea mays
  VARIANT 106: note = Ancestral polymorphism is N, Derived polymorphism is Y
  VARIANT 84..278: note = Derived polymorphism lacks residues 84 to 278
  VARIANT 46..278: note = Derived polymorphism lacks residues 46 to 278
  VARIANT 39..278: note = Derived polymorphism lacks residues 39 to 278
MENEGAQDMFDRLILIIGKITGLGGQEIIDHKVVKIMLEAYSPKNENIVTLIRDKKRFDKITPSDVLGKIMNFDIQRDEALERRNIGELQDKLNGIKPKGIAFKAYKVSKHSHSRKLNFSKAMSTNKLKTHKKAKEKIETPSSSSESDSEGAQHEKISDIALFVKKYHKGLKKDRYKFNALHDSCSKSASTNGIHASSSQMQKSNNHDHASLSPHNMHIADINVMRNEIAMLGAIITKGCMNDKSERKEKKRSLKTKVQSTSTKGILSSRMAWPEKER

SEQ ID NO: 10627 - protein, 64 aa, Zea mays
  VARIANT 49..64: note = Derived polymorphism lacks residues 49 to 64
  VARIANT 47..64: note = Derived polymorphism lacks residues 47 to 64
  VARIANT 42: note = Ancestral polymorphism is L, Derived polymorphism is H
  VARIANT 36: note = Ancestral polymorphism is V, Derived polymorphism is D
  VARIANT 15: note = Ancestral polymorphism is V, Derived polymorphism is M
  VARIANT 1: note = Ancestral polymorphism is T, Derived polymorphism is M
MGAGGVFYVAGGVAVSGGGVAGTAAHALHVGSSTRVLDKYQLHEAVQEKERGVDSLAVEDGSNW

SEQ ID NO: 10628 - protein, 298 aa, Zea mays
  VARIANT 46: note = Ancestral polymorphism is K, Derived polymorphism is N
MATSTEPEGAPPAAKGPKGEANTKGSNEHREVGAGSGGGSQKRKRKEVFIYGNYRNYYGYRIDRNVGEDPRLEAFKKQWFEKKDCLDIGCNQGLVTIGLAMKFKCQSILGVDIDSGLIETAKWNLRRIMRQDKVATNNVKAQKSSDSPQSSPEELASELSNGNKHQDLFKIVSFRRENFVASMDGCSEQYDTILCLSVTKWIHLNWGDDGLVTLFVKIWRLLRPGGVFIMEPQPWSSYKRNRLVSEVARNNFNTICIYPGTFREILLDKVGFRSVELLAERLVGTVSGFDRPIEVYHK

SEQ ID NO: 10629 - protein, 517 aa, Zea mays
  VARIANT 187: note = Ancestral polymorphism is D, Derived polymorphism is V
MACSGCSCEAAVGAMASEAYLEGAPVREARELVAELCRHFYAQGWVTGTGGSITVKVNDPTVPLADRLIVMSPSGVQKERMVAEDMYVMAADGKVLSAPVAKPWPNKPPKCTDCAPLFMKAYLMRGAGAVIHSHGIETCIATMLIPGAKEFRVTHMEMIKGIKGHGYHDELVIPIIENTPYEYELTDSLSEAIAAYPKATAVLVRNHGIYVWGESWINAKTQAECYHYLLDACIKLYQLGIDWTTPEHGSINNPRRPHSILSPEICNGCHAADSSKCVVLDIEGTTTPISFVTDVMFPYARDNVRKHLTSTFDFEETKEDIKLLRIQIEDDLQNGVAGAVPVPPDEGGKEEVINSLVANVESMIKADRKITSLKQLQGHIWRIGFQKKELQGVVFEDVPVALKNWHASGIKVYIYSSGSREAQRLLFGNTTYGDLRKFLCGYFDTTTGNKRETRSYFEISQSLGVDSPSQILFITDVFQEAIAAKNAGFEVIISIRPGNAPLPDNHGFRTIKSFSEI

SEQ ID NO: 10630 - protein, 75 aa, Zea mays
  VARIANT 64..75: note = Ancestral polymorphism lacks residues 64 to 75
  VARIANT 22: note = Ancestral polymorphism is S, Derived polymorphism is A
  VARIANT 15: note = Ancestral polymorphism is A, Derived polymorphism is V
  VARIANT 14: note = Ancestral polymorphism is T, Derived polymorphism is A
MPKQIYEIKDFLLTARRKDARSVKIKRSKDVVKFKVRCSKYLYTLCVFDAEKANKLKQSLPPGSVPLKKILFDHR

SEQ ID NO: 10631 - protein, 250 aa, Zea mays
  VARIANT 203: note = Ancestral polymorphism is P, Derived polymorphism is S
  VARIANT 108..250: note = Derived polymorphism lacks residues 108 to 250
  VARIANT 69: note = Ancestral polymorphism is L, Derived polymorphism is F
MGVEEERDGEEQRRPLLSSTPPAAADPQQQQYQFLGRSTSSVLRGGGGGWEGPEVSADEVRSAAGFHTFQGPPPNGDNAYAYPPSIHSAMLSPSPSHAPPSPHPNEGLAIVPQGPYPYGGSYQPSESVGRDVLDEVEIRQLLIDHIGHRCCWGSHPARTWKITSIEDCNVYVGTLETFIEERYIITKKEPFESGNIDGREKGPLPGLWELDLRSKFPVLFVPEKEVTVKIPHSDIIEKCSGTVYFSFSAL

SEQ ID NO: 10632 - protein, 905 aa, Zea mays
  VARIANT 61..905: note = Derived polymorphism lacks residues 61 to 905
MAEDASHGASSSTVIPADGPESTIEINIKTLDSQVHKLRVDKNLRLAIRWRADVNMCVMQWFGRATEGQTSSGASEGNTNANVNVTGNGGLLDDISRSVRDLLGSLGVAMSGGVTNTAFSVPLTSTPEGPNNVPGRTQPMNPAQPGFSVLNHQIQVTQLHPPGAIPRNMIIPDSLTTLSEYMDRIDRVLQNNGVPPSRDSESQQQPTVDDANANPRYPSADVLASVIERAQQLLGGSAASALSRIAQRIRQDGGTADASLRREIQTESVQLGISMQHLGAMFFELGRTMMMLRTGQSPSEAFVNSGPAVYINSTGPNPIMVQPSFQNTPPFGVSNIPVLGGISGAFGIVDPSRHMNIPSNGASATSGSAAGTTTGSEGAIHGNRQDAARTQGGNPPGFLAATRGLPTRTVVAAVPARSSGEAPNHIFSVILPVQVRGQVVVPNQSSQGSQTAVGNGAQGNSTSAIPQASVGGVSGVPLIAAQVANALANAPSQVSLSTQSAADQGFHLTTDNRADVLSSSTPATTPQNGPSGTSGSSLPSQDRNTLNVPSLDSIQQHPQLGDTCADTADLSGDATAISTHDAPSNPSVDSSVLKNKSSDEVGSQTTEPSASGSAEPLGLGGGLIPIPKRRSKAVKPSGSTTDPSRDLSSVSQNQDPISVAQQFLEGFASRNTNGSRSNTLSSGPPSSVPQATEVPPRRQGGGQPDIGSMISGMLNNPVFSNMLSNVATQAGGSSADLKSVMEGLQSPAIVDTISNIVQNVDEQDLGAMFGSGRGQGGMDLSRMLQQMMPVVSQALGGAGGRSAGANGGQHRSRPQRIDGEGNAPASSSQIDLHEARQSIEQHESPENIFRAVLETAAQAHGEDNSIQGMVEELATDQELADDYMKLLMEQVRQRIQSESQSGSQP

SEQ ID NO: 10633 - protein, 1369 aa, Zea mays
  VARIANT 588..1369: note = Derived polymorphism lacks residues 588 to 1369
  VARIANT 1044..1369: note = Derived polymorphism lacks residues 1044 to 1369
  VARIANT 1132..1369: note = Derived polymorphism lacks residues 1132 to 1369
  VARIANT 1167..1369: note = Derived polymorphism lacks residues 1167 to 1369
MMEETMGQPTTPATVELTGSEDEDWHAAATAGRTQQPPPPLTHDDNRSFLRMLRDMKEKLGVDAPKVEVRFERLTVEADVRVGRRAVPTLLNAAINAAQELATSVHMCVTRKRPIRIINEVSGVIRPSRMTLLLGAPGSGKTTLLKALAGKLDSSLKFKGKVMYNGEEINYSTPQTQYLRTYVSQYDLHHAEMTVRETIDFSSKMLGTNNEFDMLGEAIRRKKGVINEVDQDLDSFIKATTFGEGSNLTTNYIIKILGLSECADTLVGDEMRRGISGGQKKRATVGEMLVGLARCFFMDDISTGLDSSTAFEIMKFLQQMAHLMDLTMVISLLQPPPETLELFDDIILLCEGQIVYHGPRENATDLFETMGFKCPDRKNVADFLQEVTSKMDQKQYWTGDQNKYQYHTIENFAESFRTSYLPLLVEDKLCSPNNTGKNKEVKVNAGRRVSRWNIFKACFSRELLLLKRNSPVHIFKTIQITVMALVISTLFLRTKMSHNSVLDANKYMGALFMAVVIVNFNGMTEIAMTIKRLPTFYKQRELLALPGWALLCSVYLISIPISLVETGLWTGLTYYVIGYAPSAIRFIQHFLVLFAMHQMSMGLYRFLAAIGRTQVMANMLGTAALIAIYILGGFVISKDDLQPWLRWGYWTSPFTYAQNAIALNEFHDKRWNSEFYYNGANTVGEAILKIRGLLMEWHWYWICVTILFGYSLVFNIFSIFALEFIGSPHKHQVNIKTTKVNFVYNRQMAENGNSSNDQVILPFRPLSLVFDHIQYFVDMPKEMTKNGATKKKLQLLQDVSGAFRPGVLTALMGITGAGKTTLLDVLAGRKTGGYIEGTIKIAGYPKKQDTFSRISGYCEQSDIHSPNLTVYESLKFSAWLRLPSNVKPHQRDMFIKEVMNLIEITDLKNAMVGIPGATGLSAEQRKRLTIAVELVASPSIIFMDEPTTGLDARAAAIVMRTVRKTVDTGRTVVCTIHQPSIEIFESFDELLLMKRGGQLIYSGSVGPLSSNMIKYFEAIPGVPKINKGQNPATWMLDISSHITEYEIGVDYAEIYCNSSLYRENRVLIDELEQPEPNTDALYFPQGYWQNFTIQCVACLWKQSCAYWKNSEHNVVRFINTFAVSIMFGIVFWKIGSSIKDEQDVLNILGIVYGSALFLGFMNCSILQPVVAMERVVLYREKAAGMYSTMAYAIAQVSVELPYMLVQVMIFSSIVYPMIGFQVTASKFFWFFLYQVMSFMYYTLYGMMTVALTPNIEIAMGLSFLIFIFWNVFSGFIIVREMMPVWWRWVYWADPAAWTVYGLMFSQLADRTEQILVPGLGEQTVREFLEGYLGLQDRYFVLVTCLHLAIIGLFVFLFFLAIKHLNFQRR

SEQ ID NO: 10634 - protein, 489 aa, Zea mays
  VARIANT 323..489: note = Derived polymorphism lacks residues 323 to 489
MSLIEAPSPSPSSSSGSDDFAAFLASELELASGADSAFPGDPSSVFPATDDEGEDEDPEELEVEAIEQNGDKQICPDLSLLGFRASSAGGDDDVEDDSGSIAASIGLYFLRPSLSRLFICRFLSYKMRLRYNISKGKGYSFTAKSDLEIRELARAQHTNHRTKLHLRIFLNNSKGTGMVTEYLSKMEKEVGKKELFSLPVEEFLISSFTCYLKRKLPTQGQVFLSPRTIGFYSSMFGRKTKFYFLWEDIEDIQGIPQSISSWSPSIIITLHKGRGMDAKHGAKSMDNGKLKFCLQSFASFSVANRTIMALWKAISLSIELKVQLAEEQSQINTLQSEDSGVFVGGSLEMKVMEKVGCQKYSATQWESDKPNEYQRHIHYKFSKKLSPVGGEVTGTQQKSLMPNKKGWVIEEVMELQGVLLGDFFTLHIKYQVEDLAPKQRASNVQVSLGIEWSKSTRHQKRIEKNALSSSSARLKEMFNLASRELSHAR

SEQ ID NO: 10635 - protein, 223 aa, Zea mays
  VARIANT 100: note = Ancestral polymorphism is P, Derived polymorphism is Q
MMPPPPSSSSSPSQDAGSPKRAAGRNKFRETRHPVFRGVRRRGRAGGRWRWVCEVRVPGRRGCRLWLGTFAAAEAAARAHDAAMLALRGGAARARCLNFPDSAWLLDVPVLPLPHGAAPWADVRRAVAIAVEGFFRARPAAEDAMSATSEPSSAATEAEAEASSSSGTDGGAPEASPFELDMLSDMGAGLYYACLAQGLLVEPPPLDAPCPDDSDCGLALWSY

SEQ ID NO: 10636 - protein, 309 aa, Zea mays
  VARIANT 84: note = Ancestral polymorphism is T, Derived polymorphism is M
MMMSGNRKQRVALSPVKEAAAVPKEEVWEVRPGGMLVQKRSPDADPPPVPTIRVKVKFNGVYHEIYINSQASFGELKKLVSEKTGLHPDDQKVVYKDKERDSKAFLDMAGVKDRSKMVMLEDPAAKAKRLLEERRTSKAERAAKAIARVALDVDKLATKVSALETVASKGGKVVDADVATLTEALMRELVELDSIAADGDAKAQRRAQERRVQRHVETLDAIRAKNKAAAPSSNRTRRPAHLPPRPQNQQRRQFQPPAPTTATAPAPQTQTAASWDSFDLLSSVPPSTSAAAPVTSTTTPSPRLEWELF

SEQ ID NO: 10637 - protein, 103 aa, Zea mays
  VARIANT 34: note = Ancestral polymorphism is G, Derived polymorphism is C
MALEAATAPRALLAACLVLLVLGGGTGPSSVLRGAGAQAGGQCLPQLNRLLACRAYLVPGAPDPSADCCSALSAVSHECACSTMGIINSLPGRCHLAQANCSA

SEQ ID NO: 10638 - protein, 85 aa, Zea mays
  VARIANT 8: note = Ancestral polymorphism is V, Derived polymorphism is I
  VARIANT 61..85: note = Derived polymorphism lacks residues 61 to 85
MSSASCLVHPAPRFRVWLLPLPSSIAVRPLLGFRPRCGAPAKSSGGAEVKKEEVSSLNGEQEQNLKDDDWFLQLQKASLICLNCL

SEQ ID NO: 10639 - protein, 599 aa, Zea mays
  VARIANT 468: note = Ancestral polymorphism is N, Derived polymorphism is Y
  VARIANT 79: note = Ancestral polymorphism is A, Derived polymorphism is E
  VARIANT 26..599: note = Derived polymorphism lacks residues 26 to 599
MKSLQEERAALVPSPWPQQQRKDGGEHDPEQLMDEDDGDDEEDLQDEQHTRTIRTSTKTAEASSSAERRVPAWWRLRRAQKLLVPTRGVGLVIAGLLVLVLLLVVGGGGGANTSRRRWIHLDYASSFLRGGGLRQHQWPPHHVPSPAADLVPIPFSCGGNGSACPRRQTATSPPSPSPSSSSPPAGTKSSSSKNKQPPPQCPDYFRFIHSDLSPWRETGITREAVERGRHRAAFRLVVVDGRAYVETYHRVFQTRDTFTQWGIAQLLARYPGRVPDLDLMFNCEDMPEVKVKPSEESSAPPLFRYCKDDSTVDIVFPDWSFWGWPEVNIRPWAPLLEEMAAEMGRLPWADREPYAYWKGNPTVSAERADLRRCNDSSSSGGTRVFWQDWGAAIRDGFRDSNLAKQCRYRYKIYVRGRSWSVSLKYILACDSPVLLIATPFKDFFSRGLVAGRHYWPIDPGARKCADINFAVHDWGNAHPEQARRMAEEGSGFARHQLSMDYVYDYMLHLLTQYAGLLRYKPTVPENAVELCAETVACPAAHHSNRREFDFMMQSRERYIADYQPCTLPPPFTDRHIREMTRRDQEVRANVHKMMTTVTP

SEQ ID NO: 10640 - protein, 245 aa, Zea mays
  VARIANT 159: note = Ancestral polymorphism is Y, Derived polymorphism is S
  VARIANT 87: note = Ancestral polymorphism is E, Derived polymorphism is K
  VARIANT 36: note = Ancestral polymorphism is R, Derived polymorphism is C
MALQTPCASRNILTSAPVRHRRLHEVLGFPGRRHDRRTRPPPSLRAFATALAKRPCQGSSQLLPSALQSHQPFCGSALGAALMSLTEAPSPSPSSSSGSDDFAAFLASELELASGADSAFPGDPSSIFPDTDDEGEDEDLEELEGLEVIEAHYLFGAEYDDIEIVIHPQSIIHSMVETQLSWDGQICRYQSYTPYHGQIESIALRSPGPIWIFASMTSSNSCDSCAVQLMLLFGNDLQEFKSYFS

SEQ ID NO: 10641 - protein, 481 aa, Zea mays
  VARIANT 4: note = Ancestral polymorphism is A, Derived polymorphism is S
MVKAVLGDEEHLKAFEETLASPSSPPCQAQVGLVVGKLSSSSDRALVYALLPTPLTDAAAPACSLRAAPKSKPSKGGGKAPSSSDASLDFDVEWISEHARQVSRMLLGGMSVMGAYVWASEASFKATSPAVLSQVIRAICQACYGSASGVRLLVHISYSPRRWACRICEVASGSLRPCDFKYSKLLASLQTFRCTYNFEIRLTSVQAEPFKKIILKAISHLTEEVQNARALVDGQLFSEEMNISTEDPHQVDFLVPFKNAVPVEECSLEGVAGLIRFIGSVSALAYLGPKESISEAISDLKADIVTSLKSRLDIILDEADDGPATAEVEKSPSQKATQVIFHELREPYSFSFPRRVLIPWLSGTYVCDYLQQPETAEDAVDRFKEVIGALETAVERSSILEPESAAAACSVLESFWDMVPGSGSGGQGGSSKLKDSHSIQKDDSSKGQGGLHFSIVAALIVLLVALIAGLFFTGSAGYPVT

SEQ ID NO: 10642 - protein, 1084 aa, Zea mays
  VARIANT 885..1084: note = Derived polymorphism lacks residues 885 to 1084
MPPELGMSSRTVAGAVVNRRPRRLFGRSSERKNPLNLQFVCTFFPLNFLSFTETMCANSALSNALLATFIQERQVARLEARQQQQRCVIVTVIPFNFCYDFKSLSLTESASEDPSSRPTSPEENPETSSSPSILFLHLNAQDVSHRRWQDNSSRLLEDKPTTSNSMSDSDFLVNSFTKPSDNARPSRRKSKKKSKKHRQRCRKPTDGSEAKFREGNGAASAADVGDCEDSTLSPKHVGDIRFEETSPSSSVKEASEEAPESDDDEYHCCSGGSVSSASYCDEMELSKSTTSCPALCGQCPSSNLQYLDNTQNSAPTGPSQETCYAGSKANCNHDTKSLFIFRNERGSDPCEATEFCSSSSGFDENWIEKFDYDSGICSPKSVGTYGGDQAAHLCSDTTGDNDFCLVISRKRARKEKKMSLWKSYGAHASTPALDRNKKYVGHSSMQMTNEFNSNDWSHRQNHVSRIHPQHGNALKSSTKNFMQRPSIGCRETQYGFPAKESKLGASLNHSTGPREKTCGKLTGGFDKTAQQLYLDRDLSNALNSSESIRCETRSISSSEPTTPKSLKGNYTSESGESTDITIGALPMQKRRLQDLVRTDDASETISGRSSPCSESSTTELIAGHSTDSSIEGNHGCQGLCNSRTHLAQMLRVVNDACKVQVGADVLLAAGYPISDLEKFICSATPVIGRAPCMISNTCSLDQVVSDSVCQHDISNVSLRRIWEWYEEPGCYGLEVKALSNLSSKTSSSSSSEFFAYFVPYLSAIQLFGLSRNNMHHSFGVQGRELLISSNTASSMSSHPVHAKAHTLLEESNACLPESSLVVEDPGELIFEYFETEQPSLRPPLFENEFVSNGTFHDQVTMRDFFFWYCIGSTDQDVYELWPKARELILCPYTLYIEKYMYLVEKPKYLVIWNGGSMWHAMIKELVSSANVSDHRVFGDTEKLQNAKLCELHPASWFCVAWYPVYRVPRGNFRAAFLTYHSLGKLVHKKCSMDTNDGHTQVVSPVVGLQSYNDKGEQWFQLRCPDLKQLPIEDSLKTSPAEVHKERLRTLKMGALAMARAVVPKGSGESVNHHPDYEFFLSRCA

SEQ ID NO: 10643 - protein, 193 aa, Zea mays
  VARIANT 11: note = Ancestral polymorphism is G, Derived polymorphism is S
MAIVYALVARGTVVLAEFAAVSGNAGAVARRILEKLPPDAESRLCFAQDRYIFHVLRSDAAGITFLCMANDTFGRRIPFLYLEDIQMRFMKNYGRVAHSALAYAMNDEFSRVLHQQMEFFSSNPSADTLNRLRGEVSEIHTVMVDNIEKILDRGDRISLLVDKTSTMQDSAFHFRKQSKRLRRALWMKNAKLL

SEQ ID NO: 10644 - protein, 222 aa, Zea mays
  VARIANT 54: note = Ancestral polymorphism is R, Derived polymorphism is C
MTSESATATVIQMDDGRAPVVAAPAPAQALGAAPRKTTTGLPFLLRSGAKGFRCCLAVVDLLLRLAALGTTLAAAISTGTADERLSVFTTTFQFHARFDDFPAFTSLLVANAVAAGYLVLSLPFSVVGIVRPSKAATGVGLLLLLVCDVVVMALLTASGAAAAAIVYVAHSGNRRANWVPICMQFHGFCQRTSGSVVATFLAVLIFVVLVLMAACAIRRRPS

SEQ ID NO: 10645 - protein, 552 aa, Zea mays
  VARIANT 251: note = Ancestral polymorphism is R, Derived polymorphism is C
MSPSGELLASISSALAVAFVFLACVELGDAAAAVSVYRLIQYDLAGAPLGSRAAVLNHHAAVLPLPAGADLSRSALVAPLLDLPLSFLREYLVEKKQLGGLLILLPTNQGDKDSADDKGQVKGVLTELEKLLVHEQVPYPVYFALDDDNFGNLLADIHKIASSGQPASATTGGYKLVVSSAEPRKVSSPTISNIQGWLPGLKGEGDSEQLPTIAIVANYDTFGAAPALSLGSDSNGSGVVALLEIARLFSRLYSNPKTRGKYNILFGLTSGGPYNYNGTSKWLRGFDQRVRESIDYAICLNSVGSWSNDLWMHVSKPPENPYIKQIFEEFSDVSKEMGVSVGIKHKKINVSNPRVAWEHEQFSRFRVTALTLSEMSTPPEFLESTGGLHDTRESTDVESVIRTVRLVSESLARHIYGLRGRNIDVFAENSSLAINPRYVRSWLDLLSRTPRVAPFLQKNDPFIAALKKELSEHTSDVHVQSDALEGMFTFYDTTKATLNVYQVASVTFDLLFLLVLGSYLIVLFCFLVISTRGVDDLINIFRRPPSRKLKGA

SEQ ID NO: 10646 - protein, 97 aa, Zea mays
  VARIANT 51: note = Ancestral polymorphism is T, Derived polymorphism is A
MAKSTAMFVAALALVVVMATTSTGGGRAAAACDPKPLVVCDPAFMDGAKPAAACCSTLRAQEACLCVYAKDPKFAKYINNPNTAKTFTSCGIAIPKC

SEQ ID NO: 10647 - protein, 546 aa, Zea mays
  VARIANT 435..546: note = Derived polymorphism lacks residues 435 to 546
  VARIANT 422..546: note = Derived polymorphism lacks residues 422 to 546
MAIVVVVFHNPIAARTHPPPAAPATARRGFKILKMAPPARPPRAGEDLEEGTGESSPPPRSPRASNPDCHEVQRKICERLRQTGRHDRTLADPTFNARFARHLERLPRRYLLDLDLDDKLEDVLLHWGILDECADPNKRPVFRARFIKYKTVPREDDGIGHDQDHEEPCQKLLEDLSLERRKIADRNDSLSISSRGDLKTVLLHEIIFSSIDKPKLLSRMLVQQLTALLSEVGLNIQEAHVYSTKDGFCLDVFVVDGWKTEETDELIAAIKETLTQKNASPSNSTNSSTPEKIVDLQQQVGDYEIDLSMLTRGDKIASGSSADFGVNHENILQFYGACTKHPNYCIVTEYMPGGNIYDFLHKQNNFLDLHKILRFAIDISKGMDYLHQNNIIHRDLKSANLLLGHDQVVKIADFGVARHGSQQGQMTAETGTYRWMAPEIINHKPYDHKADVFSFAIVLWELATSMVPYDNMTPLQAALGVRQGLRLDIPGSVHPRLTKLIRQCWNEDPDARLTFAEITKELQDSLHHIEAPKGASRRSRAKMQKK

SEQ ID NO: 10648 - protein, 456 aa, Zea mays
  VARIANT 109: note = Ancestral polymorphism is P, Derived polymorphism is L
MSFRSIVRDVRESFGSLSRRSLEVRISGLPGLSGGHHRGKSVGSVSDLRDRPVVVDQSRWVGLPPELLRDVMRRLEEGESNWPSRKNVVACAAVCGTWREICKDIVLSPEFCGKLTFPVSLKQPGPRNGIIQCFIKRDKSTSTYYLYLCLSPVVLSEDGKFLLAAKRNRRTTYTEYIISVDPKSISRSSDGCVGKMRSNFLGTKFIVHDTRAPHNAGSLVSCERGSRRISSRRVSPKVPTASYPIARVNYELNLLGTRGPRRMNCTMHSIPASTLDPQGMVPEPGQPKQIFVPGSSSFEDSFRSANNTPSSSRFSVADRSLDWSSSRFSETSGLAQQDDDDSDQAKERPLVLCNKEPRWHEQLQCWCLNFHGRVTVASVKNFQLIAAPQLDSEPSQQAQQQTQPSNSSSASDHDKVILQFGKVANDMFTMDYRYPLSAFQAFAICLTSFDSKLACE

SEQ ID NO: 10649 - protein, 189 aa, Zea mays
  VARIANT 97: note = Ancestral polymorphism is P, Derived polymorphism is A
MVQKIASKSALGCLSRMLADSIHADVTINTTDGVLKAHKAVLAACSPVFKSMFVHDLREKESSTVDIGDMCVESCSALLGFVYGTIEQGQFWKHRLPLLAAADKYGIGDIKDCCEESLLEDIGSGNVLERLHVAWLYRLERLKKGCLTYLFVFGKIYDVRDEMHGFFHHADRELMHDMFQEVLSVWKPM

SEQ ID NO: 10650 - protein, 123 aa, Zea mays
  VARIANT 17: note = Ancestral polymorphism is W, Derived polymorphism is R
  VARIANT 35: note = Ancestral polymorphism is P, Derived polymorphism is H
  VARIANT 55: note = Ancestral polymorphism is K, Derived polymorphism is M
  VARIANT 56: note = Ancestral polymorphism is K, Derived polymorphism is R
  VARIANT 59: note = Ancestral polymorphism is R, Derived polymorphism is M
MSLTTQVFGPPGYRRWWIYYIVNDTDQLSKALNRHDHLVVFMFSAEWNEPCKAMKKPFRDMARARKMQAVFCLVDIDKLKDAVAQQFQVEALPTFVLYKNGIQKERVVGAKVDDLRAAIDRNI

SEQ ID NO: 10651 - protein, 130 aa, Zea mays
  VARIANT 82: note = Ancestral polymorphism is V, Derived polymorphism is I
  VARIANT 79: note = Ancestral polymorphism is A, Derived polymorphism is T
  VARIANT 68: note = Ancestral polymorphism is R, Derived polymorphism is Q
  VARIANT 65..130: note = Derived polymorphism lacks residues 65 to 130
  VARIANT 60: note = Ancestral polymorphism is S, Derived polymorphism is F
  VARIANT 41..130: note = Derived polymorphism lacks residues 41 to 130
  VARIANT 35: note = Ancestral polymorphism is R, Derived polymorphism is I
  VARIANT 21: note = Ancestral polymorphism is T, Derived polymorphism is M
MLASESPLLLNSRSSLPRLVTLCDQTPSTPFDVVRNVVEKQLGKNFDDMFEFFDVEPVGSASIAQVHRARLKLSKTDVTVKVQHLGAEHLMMVDIRNMQAMTLFLQKHDLNFDLFSATKEMEKQVSPPLP

SEQ ID NO: 10652 - protein, 361 aa, Zea mays
  VARIANT 14..361: note = Derived polymorphism lacks residues 14 to 361
  VARIANT 13..361: note = Derived polymorphism lacks residues 13 to 361
MARSVYHHFSPRRRSYLVAAMHMASETISEGGKFDHADRLFQSIESAYINSLSNTSDVKELIPEFFYMPEFLENSNSYHLGVKQDGEPIGDVALPPWAKDDNSSDEFDKDSIESDDRSLEELSWETQNFLWRDATMIGNDGPTNLEKEQVGWRTLLLHFVFRFMYLLFIALYSSGGSPIDVGGGCRMWLDKANDTKCYTRLARSFSLLWEDGDFCSRRVPNTYPELKSSPTSFNLSNFSCTIRRLKCSPGYSFARQRCAFPYSVSNGGHGCIAKWIEYVIRIHDDESKVTLAPATNDYVTSVANRNVENLDTVQQSEVTRANFLNVKSNTKYNLSPTPLICNFKCSTATSQSYLQVHNLTD

SEQ ID NO: 10653 - protein, 170 aa, Zea mays
  VARIANT 119: note = Ancestral polymorphism is G, Derived polymorphism is A
  VARIANT 62: note = Ancestral polymorphism is K, Derived polymorphism is N
  VARIANT 10: note = Ancestral polymorphism is A, Derived polymorphism is T
MALTTDELKTKAEVYYGDEICQLCTQLLLREAGLPNGLLPLKDLIECGYVQETGFVWLKQSKRVDHIFHSLGRLVSYGTEITGYAEKGRIRKVKGIKTRELMLWVPVEEIALDDDPATGKLVCKSIAGITKTFPASAFHIPEKENNVKANCAALKPVVLMERAPRVVKNS

SEQ ID NO: 10654 - protein, 452 aa, Zea mays
  VARIANT 419: note = Ancestral polymorphism is D, Derived polymorphism is Y
  VARIANT 417: note = Ancestral polymorphism is A, Derived polymorphism is S
  VARIANT 409..452: note = Derived polymorphism lacks residues 409 to 452
  VARIANT 407: note = Ancestral polymorphism is K, Derived polymorphism is T
  VARIANT 395..452: note = Derived polymorphism lacks residues 395 to 452
  VARIANT 368..452: note = Derived polymorphism lacks residues 368 to 452
  VARIANT 195..452: note = Derived polymorphism lacks residues 195 to 452
  VARIANT 163..452: note = Derived polymorphism lacks residues 163 to 452
  VARIANT 147: note = Ancestral polymorphism is A, Derived polymorphism is V
  VARIANT 103: note = Ancestral polymorphism is P, Derived polymorphism is L
  VARIANT 95: note = Ancestral polymorphism is G, Derived polymorphism is R
  VARIANT 73: note = Ancestral polymorphism is R, Derived polymorphism is C
MGSGSSKATVMGSGRRQAVLLHLRRRARTFPFIPSVPFPPPSPDQAGLLLPITGVDVTFLYELYTLGSLLPKRGLAVLGSSIVLLCIGQDKKFLGQTGGFMCPLARESGEESVGSFRIGSSMLLGHGVTIRVLLFSSMWHLRGRAYAAISRVRSATLPVAASWLRFKNTHVLLMVVLFALFLRKLSGADLPRCLQCCLCDALPDATSCSQFATDNSMFSFLSLLDLKVENVLAADGAWKLCDFGSVSTNHKCFDKPEEMGIEEDNIRKHTTPSYKLPTLGCLLYRICYFKSAFDGESKLQILNGNYRILELPKYSSSNSTLTKDMLNSSTDARQDITQASALLDWPFTVNRQDKIASESRNEDSRTLQFNYGSFKHKALDKSLTKKFIVLVLKLQRKYLLRDGFSLKVRALHIAKEALDMVLADDNFSTIVAAVGEGRSIYNNMKAFIRSIF

SEQ ID NO: 10655 - protein, 634 aa, Zea mays
  VARIANT 25..634: note = Derived polymorphism lacks residues 25 to 634
MTVAALQAMDALSRRATMLRDSLRRSQGNTDGMVTILGSFDHRLSALEAAMRPTQVRTHAIRTAHENIDRTIKAADGILSQFDLARRAEATILRGPHEDLESYLEAVDVLKGISRFFSSNKNFKSSEGVLNHVNNLLAKSTLKIEEEFKQLMSTYSKPIEPDRLFDCLPKSLRPTKGDHETDGGSHHPSKGLEAAVYRTPTLIPPRILPLMNDIAQQLVQAGNQQTCYKIYRDYRASALEVSLRKLGVEKLTKDDVQKMQWEALEAKIGNWIHFMRIAVKLLLAGERKICDQIFDGVNFNKGHCFAELTANSIITLFSFGDAVAKSKRSPEKLFVLLDMYEVMRELQPEIDEIFEGKPCTEMREAASSLTKRLAQTAQETFADFEEAVEKDASKTIVQDGTVHPLTSYVINYVKFLFDYQSTLKLLFQEFDSGTEAESQLAAVTTRIMQALQNNLDGKSKQYKDPALTHLFLMNNIHYMVRSVRRSEAKDILGDDWIQRHRRIVQQNANQYKRVAWAKILQTLSVQGAGSGGDLTSSSVSRATIKERFKSFNTQFEELHAKQSQWIVPDQELRESLRLAVAEVLLPAYRSFIKRFGNLVDNNKNPQKYVRYSPEAVDQLLGQFFEGQQWAEQKR

SEQ ID NO: 10656 - protein, 694 aa, Zea mays
  VARIANT 169..694: note = Derived polymorphism lacks residues 169 to 694
MSPDVDAAVATAVAPGGGCGGDGEAGAGTSSSPASAANGRALVRWDQILPRRSLRVLLVEHDDSTRQVVTALLRKCGYRVAAVADGMKAWGVMRERAYAFDLVLTEVAMPSLSGIQLLSRIVAADECKNIPVVMMSSQDSIGTVLKCMQKGAVDFLVKPVRKNELRNLWQHVWRRHAMNCQTNGSENNAASNHISANVANGSKTGENSDEESDAQSFGSKRDTEIHSVEAVQDIRRDEVAGSSKNNELQNKSYDGVNTKVDVSKYTNGAPSGSEKNVRSKCLNGITSAKVAEQIMDNALRITDASSRRPTNLGNGLAMTEPAADRKCQSSVMENNAVTENNPGDKSKGAAIGHADSCPSEFMVTNLGKEHHLNGYKNQEFREKDIFNHSNSSAFSRYGNKRIEPSGEIQFFPSPCVIGQGHVNGKNPVFQPNGVLLPPNEHNTGESTRQARISLDSRTEGAAILCSTSAREDAGANSSSHRKDSMSHPSYGFIPVPIPVGATMPYHYGAILQPVYYPQSPLMHCDSAGINKAAIQHASGQPNYHEAPGKPSHVLIEHKQSEENHQLHHSRQILRESGEPIDMARAHVDRANQTASCSQGICKGSGCTCSGEADINANTMVALESGNESGIQNGDRSRREAALMKFRMKRKDRCFEKKVRYHSRKKLAEQRPRVKGQFVSQKLNSATTTDAEADS

SEQ ID NO: 10657 - protein, 207 aa, Zea mays
  VARIANT 72: note = Ancestral polymorphism is P, Derived polymorphism is T
MEGRRAAVSLVAAVSLLLACSRSPFPVVAADEGEPAVGAPDTNQLCVSKCGTCPTICTASPPTILPMTAPPPPALALLPLSAPPPPYLQLVLPPPPTGDVYDLLPPVTPLTSPPESPCTTPPSSSSSSTEPPPSPPSSSSPPSPPPPKSGGDGGSGSSSHFSSPPSSSNPYYYLYLSGGARARGGASSSACAALVLAAFLPAVALFK

SEQ ID NO: 10658 - protein, 214 aa, Zea mays
  VARIANT 47: note = Ancestral polymorphism is S, Derived polymorphism is F
MPSGNRLEIKLTKQDVLRKVKNFVDENQGNGLGSYDLSLVYPKRVFFEQDMEATLSELGIQNRHAMIVVPHRQSGQVSRRHSSASYDMGVNSGADDVGGNSGAGGYFGYLRTVLSYVNPLSYLRGNTNSSNTELQSNEGLRQLRHGSGPWSEPRPLGNRGHEVTDADSANTLRRRPRPFGANIHTLGSEDHGPSDERNVFWNGNSTEFGGDDRK

SEQ ID NO: 10659 - protein, 174 aa, Zea mays
  VARIANT 69: note = Ancestral polymorphism is G, Derived polymorphism is R
  VARIANT 74: note = Ancestral polymorphism is L, Derived polymorphism is Q
MEVQPELSLGFAPAVKIPRRSSSNSEGSGGGAGNKRKHFAWESHGSSLDLQLGDPLPLDWEQCLDLHSGRMYYQNRKTKNKSWDRPSSKEEQGTLNLELGISTTPDTFKSHTSGGHMVAVPCVNCHLLVMLCKSSPACPNCKFVQPSVAGMPKTPPRRRLETVKPLLETLSLLH

SEQ ID NO: 10660 - protein, 599 aa, Zea mays
  VARIANT 47: note = Ancestral polymorphism is P, Derived polymorphism is L
  VARIANT 49..599: note = Derived polymorphism lacks residues 49 to 599
  VARIANT 73: note = Ancestral polymorphism is C, Derived polymorphism is R
  VARIANT 92: note = Ancestral polymorphism is P, Derived polymorphism is L
MATSASTDASSSEGAEGSFPVANNPAIARQVLTAVRIVPPDEDEKKLLWRYAEILERTGKGLGGNVRIRCRLCNHVWNGSYSRVKAHLLEIPGFGVKFCRVVTIHVLEQLKAEVTAASVVANRTLPRDIPLPVEGNEKRKRRGVSAIESSFNLDVRRQLDELIARMFYTGGLPFNLARNPYFRKAFMFATNNPVGGYVPPSYNKLRTTLLVQERTHVERMLQPLKETWSSKGVSIVSDGWSDAQRRPLLNFLAVTEDGPMFLRAINTEGISKTKEYIAEKMLAVIDEWISEVIGDASMIKNFIMNHSMRLSMFNEQSNLKFLAIADTRFASAIVMLKRFIAIKDALSVMVMVKSVIYRHEMKETHEESIFYSAVHDILVSRWTKSNTPLHCLAHSLNPKYYTDAWINEVPNRQAPHNDEEISEMRNTCFRRYFSGEELKKIKLQYAYFSLFGNGFNSFDSLEDRSYMEPKMWWGIHGHSAPELKKLALKLLGQPASSSCAERNWSTYGLIHSSLRNRLNPGRAEDLVFTHQNLRLLSRKSDEYRCGPSAMWDVGADTFEANFEGGADFLEQADLSLDEPKLEERLFEDLEALGLTEDAE

SEQ ID NO: 10661 - protein, 774 aa, Zea mays
  VARIANT 1: note = Ancestral polymorphism is M, Derived polymorphism is T
  VARIANT 701: note = Ancestral polymorphism is M, Derived polymorphism is V
MAAATLALLLVTLAALHGAAPVLAVAGDPPFSCGPSSAEASEGLAFCDVTLAPAQRAADLVSRLTAAEKIAQLGDQAPGVPRLGVPGYKWWNEALHGLATSGKGLHFDAAVRAATSFPQVLLTAAAFDDDLWLRIGQAIGREARALFNVGQAEGLTIWSPNVNIFRDPRWGRGQETPGEDPAVASRYAVAFVRGIQGNSSSSLLQTSACCKHATAYDLEDWNGVARYSFVARVTEQDLEDTFNPPFRSCVVEAKASCVMCAYTAINGVPACANSDLLTGTVRGDWGLDGYVASDCDAVAIMRDAQRYAPTPEDAVAVSLKAGLDIDCGSYVQQHAAAAIQQGKLTEQDIDKALTNLYAVRMRLGHFDGDPRKNMYGVLGAADICTPEHRNLALEAAQDGIVLLKNDGGILPLDRSTVTSAAVIGPNANDGMALIANYFGPPCESTTPLKGLQSYVNDVRFLAGCNSAACDVAATDQAVALAGSEDYVFLFMGLSQKQESEGKDRTSLLLPGMQQSLITAVADASKRPVILVLLSGGPVDITFAQSNPKIGAILWAGYPGQAGGLAIAKVLFGDHNPSGRLPVTWYPEEFTKVPMTDMRMRADPTSGYPGRSYRFYQGNTVYKFGYGLSYSTFSRRLVHGTSVPALSSTLLTGLRETMTPQDGDRSYHVDAIGTEGCEQLKFPAMVEVQNHGPMDGKHSVLMFLRWPNTKQGRPASQLIGFRSQHLKAGETAKLRFDISPCKHFSRVRADGRKVIDIGSHFLMVDNHEMEIRFEP

SEQ ID NO: 10662 - protein, 376 aa, Zea mays
  VARIANT 11: note = Ancestral polymorphism is L, Derived polymorphism is P
MGESDVKEQQPNRLQEELRKEKEKARALDEIQDLQGELEAARDSEKKMLLSLQAQTKQLEQTKVSLEEAKIEIASLRDSRQPFKNFRRRGLMSFSFADPGEAETWSLQRELRLAVESEEKCNKAMDDLAIALTEQTTEAREANVKLSLAQAELNNARTQVETLKASLESTEGKLQLALEEADRLKVESDELAAASKEKERGLVDCIKMFEEDLSKGKEENDKLIESQRVTRDENSRLREMLKHAVGEANVARESLEIARVENSRLNEEMFKKESTLQSINQEYESLKISEAAAQSSIKELKDMIDAMFSSESTKTSAEASPREAKGSKMKETSVAADYVYSDVERSTRLDDIKNPGKQKKKTILRKFGEIMKKRNS

SEQ ID NO: 10663 - protein, 269 aa, Zea mays
  VARIANT 242..269: note = Derived polymorphism lacks residues 242 to 269
  VARIANT 228..269: note = Derived polymorphism lacks residues 228 to 269
  VARIANT 211..269: note = Derived polymorphism lacks residues 211 to 269
  VARIANT 201: note = Ancestral polymorphism is A, Derived polymorphism is G
  VARIANT 185: note = Ancestral polymorphism is V, Derived polymorphism is D
  VARIANT 162..269: note = Derived polymorphism lacks residues 162 to 269
  VARIANT 132: note = Ancestral polymorphism is G, Derived polymorphism is E
  VARIANT 108: note = Ancestral polymorphism is R, Derived polymorphism is C
  VARIANT 104: note = Ancestral polymorphism is A, Derived polymorphism is T
  VARIANT 93: note = Ancestral polymorphism is A, Derived polymorphism is V
MAAAAAAAGTREEMVYMAKLAEQAERYEEMVEFMEKVAAAAELTVEERNLLSVAYKNVIGARRASWRIVSSIEHKEETRGAAGHAAAARGYRARVEAELSGICAGILRLLDERLVPAAAAVDARVFYLKMKGDYHRYLAEFKTGAERKDAADSTLAAYQAAQDIAVKELPPTHPIRLGLALNFSVFYYEILSSPDRACSLAKQAFDEAISELDSLGEESYKDSTLIMQLLRDNLTLWTSDMQVNTWNSAVMSEDGGDEMRDANKPDEEQ

SEQ ID NO: 10664 - protein, 292 aa, Zea mays
  VARIANT 21: note = Ancestral polymorphism is S, Derived polymorphism is L
  VARIANT 240: note = Ancestral polymorphism is R, Derived polymorphism is L
MADEPPPPALARKSAPAQPWSHVETMHLIDAYEERWTALRRGQLKAHQWEEVATEVAARCAANPGVIAQRKTGTQCRHKLEKLRKRYRTEGARPVTSLWPYFRRMDRLERGALAAYPAAASSPPAADGDEEEDEEDVQEEEEVEELVPRNNTRSINGIIREFGTGLAPRHPQLQLHPPPSSITPSTAPPRKRVAYEAFQAKDEAVAVEMTRRGGSGWAVAQLSVVVRDFGEGVMRLERRRMEVQWEIERGWQEADARHARMLKDALRQFRDTAAAAACVLPPKKARRDHGDS

SEQ ID NO: 10665 - protein, 307 aa, Zea mays
  VARIANT 71: note = Ancestral polymorphism is S, Derived polymorphism is P
  VARIANT 59: note = Ancestral polymorphism is P, Derived polymorphism is L
MPHSLFLLVVLLAAAQASAATPRQLFLVSRPPITLTNHHGQLLTGNYSVNLLWYGRFTPAQRAVVADFILSLSGTGPGSVAAWWATTSRYHPGAARLSLGRQVLDPSRSLGRRLSESSLASLATRLAPHRGSVAVVVTAPDVLVDGFCLSRCGLHASSPTPNATRGRGRGRYVYAWVGNPAEQCPGECAWPFHQPLYGPQPAAAPLVAPNADVGMDGAVITLATLLAGAVTNPYGGGFFQGPAEAPMEAVTACAGVFGAGAYQGYPGQLRVDAATGASYNAVGIAGRRFLLPAMWDPETAQCSTPLD

SEQ ID NO: 10666 - protein, 50 aa, Zea mays
  VARIANT 28: note = Ancestral polymorphism is D, Derived polymorphism is V
  VARIANT 42: note = Ancestral polymorphism is C, Derived polymorphism is Y
MQMSLRVVLLHRELPSWFRVHELSGAGDSYVRFFICTRVPNCGCLIDTGN

SEQ ID NO: 10667 - protein, 141 aa, Zea mays
  VARIANT 15: note = Ancestral polymorphism is D, Derived polymorphism is H
MNMPLPPPAYYLAIDGDAACFDELDTIVREAAAHLGGNSNNESPSLSGSGSDSAAAADQERRRRRMVSNRESARRSRVRKQRQLSELWAQVSHLRGANRRLLDDLNRALRSCADARRENARLRDEKAQLANRLHQLLIIAG

SEQ ID NO: 10668 - protein, 213 aa, Zea mays
  VARIANT 42: note = Ancestral polymorphism is A, Derived polymorphism is V
  VARIANT 47: note = Ancestral polymorphism is L, Derived polymorphism is P
  VARIANT 48: note = Ancestral polymorphism is R, Derived polymorphism is H
  VARIANT 60: note = Ancestral polymorphism is R, Derived polymorphism is C
  VARIANT 107: note = Ancestral polymorphism is G, Derived polymorphism is D
  VARIANT 116: note = Ancestral polymorphism is P, Derived polymorphism is H
  VARIANT 190: note = Ancestral polymorphism is L, Derived polymorphism is I
  VARIANT 206..213: note = Ancestral polymorphism lacks residues 206 to 213
MLALLLWLFWLCATDAPTDAGYLFFRDLGSKVERGLSECRPALAVFLHSVGPDVEDRFMRSLGYMLAKWCLLREIEAPAGSAAKLEAPRRRRALPAACLSYATEVHDLWILKGYAPVLAMPCVTGPASTSIAVSPHEVPEEPALRRAPAARGRDIAGDGEEAEEDDDIMDGESHFPSHIRLWVGLRFGIICHWPEPRPLHEEPRTRRRDDVHR

SEQ ID NO: 10669 - protein, 793 aa, Zea mays
  VARIANT 430..793: note = Derived polymorphism lacks residues 430 to 793
  VARIANT 319..793: note = Ancestral polymorphism lacks residues 319 to 793
MAPALSGTLGASSVAALRPCAGRRAPSAASSVAPRGSGVVRCSRGLRWDAHRSRGRLLRVRCDAAVVEKPAGEEAAGEKFEYQAEVSRLMDLIVHSLYSHKEVFLRELVSNASDALDKLRFLGVTDSSLLADGGELEIRIKPDLDAGTITITDTGVGMTKDELKDCLGTIAQSGTSKFLKALKENKDLGADNGLIGQFGVGFYSAFLVAEKVVVSTKSPKSDKQYVWEAVADSSSYVIKEETDPEKMLTRGTQITLFLRPDDKYEFADPSRIQGLVKNYSQFVSFPIYTWQEKSRTVEVEEDEEPKEVEEATKAYFDIQGEKKKKTITEKYWDWELANETKPIWMRNPKEIENTEYNEFYKKTFNEFLDPLAHTHFTTEGEVEFRSVLYVPGMAPLSNEEIMNPKTKNIRLYVKRVFISDDFDGELFPRYLSFVKGVVDSNDLPLNVSREILQESRIVRIMRKRLVRKTFDMIEEIAEKEDKEDYKKFWESFGKFIKLGCIEDTGNHKRLAPLLRFHSSKNEGDLISLDQYVESMPESQKAIYYIATDSLQSAKTAPFLEKLVQKDIEVLYLIEPIDEVAIQNLQTYKEKKFVDISKEDLELGDEEEETKETKQEFTLLCDWVKQQLGDKVAKVQISKRLSSSPCVLVSGKFGWSANMERLMKAQTLGDTSSLEFMRGRRIFEINPDHPIIKDLSAACKNEPESTEARRAVELLYEAALISSGYTPESPAELGGKIYEMMAIALGGRWGRSDMEEAEASTGEASAEADSSEGTVAEVIEPSEVRPESDPWRDQ

SEQ ID NO: 10670 - protein, 418 aa, Zea mays
  VARIANT 208..418: note = Ancestral polymorphism lacks residues 208 to 418
MGGVTSSVASKMAFFPPDPPSYGVVDEEDEDAACNKVATTRRVAMTGVRWSVGVEARRVRTRRGSDIIAVYVRHPGASLTLLFSHGNAADLGKMYGIFVELSERLHVNLMGYDYSGYGQSSGKPSEANTFADIEAAYKCLVDVYGTREEDIVLYGQSVGSGPTLDLAVRFDGVRAVVLHSPILSGLRVMYSVKKTYWFDIYKVCLSDRSVSNIDKIPHVKCPVLVIHGTKDDVVDCSHGKRLYELCQHKYEPLWIEGGDHGNLEKFPVFIRHLKKFLLSIKKLPSEKDAAAEHEPRAAENRTQHGGEAISEAPPRMISRRLESSKKSTIHEAKPRPSSEHTDKRRRSTGHREKARSSTDRRERSRRSVDCFDSILEHEQPEKPRKSFDRIGEKIRAMGLCNVDCFKEPPDSTELSRGS

SEQ ID NO: 10671 - protein, 182 aa, Zea mays
  VARIANT 9: note = Ancestral polymorphism is S, Derived polymorphism is R
MDDWRPVRSRLFELLSLSGMLTDQSWTEILKRRDMYREAFACFDPSAVARMEEDDVAEISGNRELRLAACAGSGASWQTPAASRRWPGSSGSFSGYMWRGPHVNHRWPVVGKHRYHHKYVPFRTPRSEAVSRPPAAPTRRPRHRLLLHVGRRHGRRSPRRLVPRLRPPRRPLQSRGIANVAA

SEQ ID NO: 10672 - protein, 271 aa, Zea mays
  VARIANT 184: note = Ancestral polymorphism is C, Derived polymorphism is F
MATPVRPAAAAPARRPPQPLPLPAAPHHDTMLTLSLALPLPLPPPVFVVRALSPDGGGVARVRSSPTGDDTPPCTECGKRFPSWKALFGHMRCHPERQWRGMTPPHFRQHRTVVAAADLQFTEQERETATSLLMLGGGRPAGAGKGKKSVLGASPSAKKVTCGASKSASSPPPTVPRCDDDHKCSVCARGFATGQALGGHKRCHWERTTACAEGTTTVAAIATPGACSPSATSSSQAAPATTLDLNLPPPLPQKSDGYGSLDATLDLKLGI

SEQ ID NO: 10673 - protein, 217 aa, Zea mays
  VARIANT 201: note = Ancestral polymorphism is A, Derived polymorphism is P
MARALTLTVFLVVIASAVVSFAADEAPAASPKHSASTPSKAPSTSPDKSEKAPTASSEDGAATPAKAPASAASNSEASPSEAPTSGSESGAASPNESAASEEAPTSAPEDSSSASPSTSPSEAEAAVSPDSSSGGGATSKEPSASEAGAAEEPSTAEAGGASADSPPEPTHTSSDSPAESPGPAADHESGSPSMLGGTGLALVMLVATVTSSAMLCF

SEQ ID NO: 10674 - protein, 97 aa, Zea mays
  VARIANT 78: note = Ancestral polymorphism is A, Derived polymorphism is V
  VARIANT 77: note = Ancestral polymorphism is A, Derived polymorphism is T
  VARIANT 73: note = Ancestral polymorphism is G, Derived polymorphism is S
  VARIANT 65: note = Ancestral polymorphism is A, Derived polymorphism is V
  VARIANT 53: note = Ancestral polymorphism is G, Derived polymorphism is R
  VARIANT 39: note = Ancestral polymorphism is G, Derived polymorphism is R
MHLHPYPNPNSSPTPSPTARTPSADSSTQISGQGRFRFGFRVRWGRLTGARSGSMVGGRRRGAVVEEMKLNTGNVFTALESLKKKKKGYKGKAVGSS

SEQ ID NO: 10675 - protein, 228 aa, Zea mays
  VARIANT 204..228: note = Derived polymorphism lacks residues 204 to 228
  VARIANT 184..228: note = Derived polymorphism lacks residues 184 to 228
  VARIANT 52: note = Ancestral polymorphism is A, Derived polymorphism is T
  VARIANT 48: note = Ancestral polymorphism is A, Derived polymorphism is T
  VARIANT 44: note = Ancestral polymorphism is A, Derived polymorphism is V
  VARIANT 29: note = Ancestral polymorphism is R, Derived polymorphism is C
MAGASSCFISSKTLHMFSFELLNFLKLIRTFLAQLAQIRAVVAVAFLASPSATVVIDDKGSDDGSILQLSSIANFIVSHCSSGLDSDTQRRWCSGSGTARRLRAATARCRAPTGSAINTMDTLQEAPSTPLEATAALYTIQFAVYFFFSEEDERISSTLFSTSRRMNILRNQKDPLSSTTQRLWLFTKAVRSDLLHKICESSSWTSGLRLHWQASGSWTLVQEASDYT

SEQ ID NO: 10676 - protein, 144 aa, Zea mays
  VARIANT 119..144: note = Derived polymorphism lacks residues 119 to 144
  VARIANT 108: note = Ancestral polymorphism is R, Derived polymorphism is W
  VARIANT 88: note = Ancestral polymorphism is P, Derived polymorphism is L
  VARIANT 86: note = Ancestral polymorphism is V, Derived polymorphism is L
  VARIANT 83: note = Ancestral polymorphism is R, Derived polymorphism is H
  VARIANT 57: note = Ancestral polymorphism is G, Derived polymorphism is D
  VARIANT 55: note = Ancestral polymorphism is M, Derived polymorphism is I
  VARIANT 49: note = Ancestral polymorphism is P, Derived polymorphism is L
  VARIANT 44..144: note = Derived polymorphism lacks residues 44 to 144
  VARIANT 34: note = Ancestral polymorphism is S, Derived polymorphism is P
  VARIANT 31..144: note = Derived polymorphism lacks residues 31 to 144
  VARIANT 30: note = Ancestral polymorphism is R, Derived polymorphism is W
  VARIANT 29: note = Ancestral polymorphism is A, Derived polymorphism is T
  VARIANT 22: note = Ancestral polymorphism is D, Derived polymorphism is N
  VARIANT 21: note = Ancestral polymorphism is G, Derived polymorphism is S
  VARIANT 20: note = Ancestral polymorphism is R, Derived polymorphism is H
  VARIANT 17: note = Ancestral polymorphism is R, Derived polymorphism is Q
  VARIANT 14: note = Ancestral polymorphism is C, Derived polymorphism is Y
MLLGSEDMHRFPVCSPRMDRGDLIGSPAARQIVSNYFSIFGPVQDVRIPYQQKRMFGFVTFMYAETVKAILSKGNPHFMCDARVLVKPYKEKGKEAAARAPWQSRVRRLRVAHRIAGFQGPLRPPASFRCPGFLLGMKPLGYDV

SEQ ID NO: 10677 - protein, 268 aa, Zea mays
  VARIANT 240: note = Ancestral polymorphism is R, Derived polymorphism is C
  VARIANT 206: note = Ancestral polymorphism is A, Derived polymorphism is V
MLEETQLKFEEERQNLLKVLSNTSKEQCESSLNEEYNKFQETYDTFCKEKDAHMETFRGGSLDCLLLPAYESHPPLRLPRRETSRHPHALTLRESPAAPQAPRSPPAAILFAFFLPPNPPLPWHRSFSRLLRRIPRPPSQSRARASIAPPLHGIAVAGVLPLLSPGPVPAVLAPARGTRRNAIHLGSRGSPPRYRPHHRRPVILFAELELLSDGANVYKLIRPMLVKQDLAEAKANIKKRIEYISAELKRMDRALKDLEEKQNSKKES

SEQ ID NO: 10678 - protein, 364 aa, Zea mays
  VARIANT 229: note = Ancestral polymorphism is V, Derived polymorphism is A
MNVERDLHMTRGDGEHSYASNSRLQEKSILKTRPVLHKAVVAAAHACLSLSSGPGGAMVVADLGCSSGPNTLLVVSEVIKAVADCCRHEQQLAAGGQPQHVQFFLNDLPGNDFNLVFQSLELIRKLAAKDGLEEPLLPPYYVAGLPGSFYTRLFPDRTVHLFHSSYCLMWRSKVPDELAAGAVLNEGHMYIWETTPPAVVALYRTQFQEDLSLFLRLRHRELVTGGHMVLTLVGRKSKDGRVEKEKLDSFNLPFYAPSLDEVRDVIARSQAFDVTHFQLFDSNWDPHDDDDDDDAEMKMEEEDAVQSGVNVAMSIRAAIGPLIARHFGEHILDDLFELYAKNVAVHLQKVKTRYPVIVVSLQAK

SEQ ID NO: 10679 - protein, 376 aa, Zea mays
  VARIANT 346: note = Ancestral polymorphism is D, Derived polymorphism is H
  VARIANT 232: note = Ancestral polymorphism is S, Derived polymorphism is G
  VARIANT 220: note = Ancestral polymorphism is G, Derived polymorphism is A
  VARIANT 47: note = Ancestral polymorphism is S, Derived polymorphism is L
MNVERDLHMTRGDGEHSYASNSRAQEKSILKTRPVLHKAVAAAHALSLSSGPGGAMVVADLGCSSGPNTLLVVSEVIKAVADCRHELATGSQPQHVQFFLNDLPGNDFNLVFQSLELIKLAANKDRQEEPLLPPYYVAGLPGSFYTRLFPDRCVHLFHSSYCLMWRSKVPDELASGAVLNEGNMYIWETTPPAVVALYRRQFQEDLSLFLTLRHTELVSGGHMVLTFLGRKSKDVLRGELSYTWGLLAQALQSLVKEGRVEKEKLDSFNLPFYVPSVDEVRDVIAQSQAFDVIHIQLFDVKWDGGDDDVEMEDYGGVESSVSVARSIRAVVGPLIARHFGEHILDHLFELYAKNVAMHLQKVKTKYPVILVSLQAK

SEQ ID NO: 10680 - protein, 391 aa, Zea mays
  VARIANT 111: note = Ancestral polymorphism is D, Derived polymorphism is Y
  VARIANT 235: note = Ancestral polymorphism is T, Derived polymorphism is M
  VARIANT 250: note = Ancestral polymorphism is S, Derived polymorphism is N
  VARIANT 363: note = Ancestral polymorphism is H, Derived polymorphism is L
MKVERDFHMSRGDGEDSYASNSRVQEKSILKTRPVLHKAVTAAHALSLISAGSGGGAMVVADLGCSSGPNTLLIVSEVLGAVADCRHELATTMMVVGGGGQPQHVQIFLNDLPGNDFNLVFRSLEQFKTLAAKDRREKPLLPPYYVAGLPGSFYTRLFPDRSVHLFHSSYCLMWRSKVPDELTGGAVLNEGHIYIWETTPPAVVALYRRQFQEDLSLFLRLRHTELVTGGHMVLTFLGRKSKDVLRGELSYTWGLLAQALQSLVKQGRVEKEKLDSFNLPFYAPSMDEVTDVIARSQAFDVTHIQLFETNLDPHDDDDMEMEMNEDAAVQSGVNVARTIRAVIGPLIAGHFGEHILDDLFELHANNVAVHLQKVKTKYPVIVVSLEARRAK

SEQ ID NO: 10681 - protein, 136 aa, Zea mays
  VARIANT 74: note = Ancestral polymorphism is L, Derived polymorphism is R
  VARIANT 59..136: note = Derived polymorphism lacks residues 59 to 136
  VARIANT 57: note = Ancestral polymorphism is S, Derived polymorphism is P
  VARIANT 54: note = Ancestral polymorphism is A, Derived polymorphism is V
  VARIANT 31: note = Ancestral polymorphism is E, Derived polymorphism is G
  VARIANT 29: note = Ancestral polymorphism is L, Derived polymorphism is R
  VARIANT 25..136: note = Derived polymorphism lacks residues 25 to 136
  VARIANT 1: note = Ancestral polymorphism is M, Derived polymorphism is I
MEAHLSEFWVFNLHQILEAAYNFSEENKLGEGGFGPVYKGQFPEAAGIGVKRHASHSGQGFVEFKIEVHLMAKLQQTNLVTLDVACRNRRKFGSMSTCQRKAWTSLSLVTHGWIILSSNVTTSGISFHFPAYTDLF

SEQ ID NO: 10682 - protein, 462 aa, Zea mays
  VARIANT 107: note = Ancestral polymorphism is R, Derived polymorphism is W
MEVDPAWANRRVARGWGRWQRTPDAVSVVESLLCLTSTRFISYEELKVATNNFEPSSVLGEGGFGRVFKGVLSDGTIVAIKKLTSGGHQGDREFLVEVEMLSRLHHWNLMFFGSYDLCLAPGLGAPNAKIAVVPPIPCHQHRALSAEIAAPYASVASIFDPLFSSTFATATTPRALPLSPSPRPFPPPSLIHPSYGGTISSLFSTFSPFSVLSRSVCVVASEYALVVVSDPKTEAKPAATSLVLGSVASTLTSAAIPCATAFAEAFRGHFVPPRPDKNTVKSLGMQQDEFVAQRRAALERTRRSATRVSCGEQRTREMTWGQPRQYKGVSLGSTRSSFLGTLRKTPRWTGNVASTKSTELVKQHDRLEFDDPNEVDEEEEVAYEEEEVEYEEPDDKYEQTEVYAKLMLNMTGMGMEKRVMVNFLLFLLMDSKFMLGASPLMSLMMISKTLPVFWTSSGSDYS

SEQ ID NO: 10683 - protein, 202 aa, Zea mays
  VARIANT 12: note = Ancestral polymorphism is M, Derived polymorphism is I
MEPNSSIPPPVMGAAVAYPPAAGAAYSAGPYAHAHAALGALYPPPPAPGPPSSHQGGAAAAQLQLFWAEQYREIEATTDFKNHNLPLARIKKIMKADEDVRMIAAEAPVVFARACEMFILELTHRGWAHAEENKRRTLQKSDIAAAVARTEVFDFLVDIVPRDEPRDADPAAAAMGAAAPGIPQHPAAADPTTMGYYYVQPQ

SEQ ID NO: 10684 - protein, 251 aa, Zea mays
  VARIANT 5..251: note = Derived polymorphism lacks residues 5 to 251
  VARIANT 31: note = Ancestral polymorphism is S, Derived polymorphism is I
  VARIANT 68: note = Ancestral polymorphism is R, Derived polymorphism is W
  VARIANT 130: note = Ancestral polymorphism is L, Derived polymorphism is P
  VARIANT 151: note = Ancestral polymorphism is D, Derived polymorphism is N
  VARIANT 154: note = Ancestral polymorphism is E, Derived polymorphism is G
  VARIANT 170: note = Ancestral polymorphism is N, Derived polymorphism is D
  VARIANT 173: note = Ancestral polymorphism is R, Derived polymorphism is W
  VARIANT 214: note = Ancestral polymorphism is C, Derived polymorphism is Y
MFMHCLSLSSSTPWTDGLEDEFSEDSSCISSTIRSGMLAPFSSEQGIPITTTTPPPSNSGSIGRKVRRFSPKSMVTSLAPTSTVGGSALALHYANIVIVIEKLLRYPHLVGEEARDELYQMLSWSLKLALRRSLRARARSTAIYDAFLAHNWRETLQKTTLAWLVPMAHNTVRWQAERSFEFEQQQQRRVVLERSVLLQTMYFADREKTEAAVCELLVGLNYICMYERQQNALLDCSSSLGLDDCVEWQVQ

SEQ ID NO: 10685 - protein, 725 aa, Zea mays
  VARIANT 8..725: note = Derived polymorphism lacks residues 8 to 725
  VARIANT 51..725: note = Derived polymorphism lacks residues 51 to 725
  VARIANT 196: note = Ancestral polymorphism is L, Derived polymorphism is V
  VARIANT 243..725: note = Derived polymorphism lacks residues 243 to 725
  VARIANT 300: note = Ancestral polymorphism is A, Derived polymorphism is D
  VARIANT 462..725: note = Derived polymorphism lacks residues 462 to 725
  VARIANT 536..725: note = Derived polymorphism lacks residues 536 to 725
MQVPLLPQGLAVAGSCNFFFGNEIWSLASFHPLFLPAQICPCRRTRTPARQLLFFNGCCSELIVRGISFLPQTVAVEDWVRERDVSAGLSRNPEFTSVARMSVSHAQDIEISLCDGNSEDERRRRKIGSLRRKAIHALKKRGRRRVDSRFPPPAISIEDVRDAEEERAVASFRERLAAHGLLPEKHDDYHMMLRFLKARKFEAEKAMQMWSEMLKWRKEFGTDTILEDFDFEELDDVLRYYPQGYHGVDRQGRPVYIERLGKVDPNNLMQITSVDRYIKYHVQEFERAFRERFPACTLAAKRHIDSTTTILDVQGVGFKNFSRTARELVNRMQKIDSDYYPETLHQMFVVNAGSGFKWIWNSVKGFLDPKTSSKIHVLGSNYQSRLLEVIDSSELPEFLGGSCTCSDKGGCLGSNKGPWNDPYILKLIHNLEAGCMRETTKPVSEGGERSSSSFRLEQMKWQGMLSDTSNAESGSDVDDFGPSFVHKVSGYGCLTPVREEVKGTDCATYLSCDDQSHPDMVPEFYHGVQRTTEMVQKQMADFRQYSTNRRPRELGNGSLNANGTAAAQRGWEDVAKLVVTALIKLFSFIRLFLSRAAESRLEKVRRTAPPPAAEKPKPPRAVSEEEVRACLQRLDSLESLCGHLATRPAQIPEDKERVLLSSFERIRSVEADLERTKRVLNATVAKQKALVEEVALESVQELPRAKVHNSSPIQCPPPSSNGLLE

SEQ ID NO: 10686 - protein, 161 aa, Zea mays
  VARIANT 106..161: note = Derived polymorphism lacks residues 106 to 161
MAAGGDDTTIAQVHSGIDSCSAWCASGVPSCTTTRCGPVLWRFPPTRRSATSTAGSPPPSGNSTSGFLRIPASRSASSPSPTASPSAAASSDVMMIRRPRSYIIRSSSLSSFNCLPAAVRCRRQLIMHGSCSFFFCTCTVCVELNIRRCTATTGMQCNIMR

SEQ ID NO: 10687 - protein, 246 aa, Zea mays
  VARIANT 232: note = Ancestral polymorphism is Q, Derived polymorphism is L
MAPSGDTIALVHSGMDSSNKTLLKSEALYKYVLDTSVLPHEPECMRELRLVTDKHEWGFMQSSPDEAQLLRMLIKLTGARRTLEVGVYTGYSLLATALALPDDGKVIAFDVNRDYYDIGRPFIERAGVAGKVDFREGPALGNLDELLADEANLGAFDFAFVDADKPNYVNYHEQLLRLVRVGGTIVYDNTLWCGTVAMPPETPMSDIDRRFSAAIRDLNVRLSADERVEVCQLAIADGVTICRRLV

SEQ ID NO: 10688 - protein, 171 aa, Zea mays
  VARIANT 28: note = Ancestral polymorphism is P, Derived polymorphism is L
  VARIANT 33: note = Ancestral polymorphism is G, Derived polymorphism is V
  VARIANT 36: note = Ancestral polymorphism is K, Derived polymorphism is M
  VARIANT 40..171: note = Derived polymorphism lacks residues 40 to 171
  VARIANT 46..171: note = Derived polymorphism lacks residues 46 to 171
  VARIANT 64..171: note = Derived polymorphism lacks residues 64 to 171
  VARIANT 65..171: note = Derived polymorphism lacks residues 65 to 171
  VARIANT 97: note = Ancestral polymorphism is A, Derived polymorphism is T
  VARIANT 108: note = Ancestral polymorphism is G, Derived polymorphism is R
  VARIANT 110: note = Ancestral polymorphism is P, Derived polymorphism is L
  VARIANT 113: note = Ancestral polymorphism is S, Derived polymorphism is F
  VARIANT 114: note = Ancestral polymorphism is G, Derived polymorphism is R
  VARIANT 124: note = Ancestral polymorphism is G, Derived polymorphism is S
  VARIANT 128: note = Ancestral polymorphism is P, Derived polymorphism is A
  VARIANT 133: note = Ancestral polymorphism is T, Derived polymorphism is I
MATGEEHVAASAVEDTSEKKQASTTELPAPSGVTKKGRTQGCICSQWECESLGLEDFPTSERLRWHGHQPGKPDWSEASRFVAFTMKDETKGEIYVAFNTSHLLVVVGLPECSGFRWEPVVDTGKEAPYDFLTDGLPDRAVTVYQFSHFLNSNLYPMLSYSSIIIVLRPDV

SEQ ID NO: 10689 - protein, 1440 aa, Zea mays
  VARIANT 814..1440: note = Derived polymorphism lacks residues 814 to 1440
  VARIANT 820..1440: note = Derived polymorphism lacks residues 820 to 1440
  VARIANT 848..1440: note = Derived polymorphism lacks residues 848 to 1440
  VARIANT 926..1440: note = Derived polymorphism lacks residues 926 to 1440
  VARIANT 938..1440: note = Derived polymorphism lacks residues 938 to 1440
  VARIANT 1292..1440: note = Derived polymorphism lacks residues 1292 to 1440
  VARIANT 1326..1440: note = Derived polymorphism lacks residues 1326 to 1440
MEDERKAPSFLDAPPKDIPIATAKPLTIRTSAAASGCGGSDRSCPILPAISITPHLYSPSPPSSAFVSALQSPYISPRVLDPPPPPPPPPEPAPQPRQEVRTTAGASASTTAAPSPTSCSNGSHSEDIDASRTPPSERYDYSGVDAAKISDGSGCGGGGGAGLLPPRASFSFPVPRVSFTRGSVASPSSNAKLRSCDVYIGYHGSGGLSRFCKWLKSELELQGIASFVADRAKYSDSQSHEVADRIICSVAFGVVVATVSSFLNPFSLEEIRFFAQKKNLVPILFDTEPAEIAGLFDGRLEDKEAKEAFEGLMRCHEFKLEANESDSRGCVSRTVTLLRSKLGRKNIAEKESEASDGLPFPRNRHFVGREKELSEIEGMLFGSTAAGIQEVDCPRASSTNERSSGVSDGFADEDSDTARKSNARYISLEMRKCKEPTLEAWIDPVIELPSGKSRSLQRQRSRHRRSRFRCNSKGYSGGANIVCINGSPGIGKTELALEFACRYSQRYKMVLWIGGEARYLRQNILNVSMNLGLDISAEAEKERGRIRSFEEQEFDAFQRVKRELFRDVPYLLIIDNLESERDWWEGKDLHDFIPRNTGATHVIVTTRLPRVMNLEPMQLPQLSYIDAMALIQGKRKKDYLPEEAEVLRKFDERLGRLSFGLWVVGSLLSELMIAPSTLFEAVDRISLNENLFPIGANDDGFCRNNSFLVKVLVFCFALMDRAKGGSLTSRMVIAGSWLAPTPVSSTLLAATASKLPMKGSGMHLFGESLRTAFLCGTHCFLAPNGRKAEVESALLLVNLGLARKANRHPGCWIQFHPITQLFGKIRGGLVPTTAAVNGVMRTGNPSVYSDHLWASAFLVFGFKSEPPAVQLKAVDMVLFIKKTALPLAVDSFMSFSRCGSALELLKVCTNVLEEVEKSYASRMQDWSRGSLCWRKKLQPNHRVDELVWQEVTLLKATLLETRAKLLLRGGLFDTGEELCRTCISIRTVMLGHGHAQTLAAQETLAKLVHVIHEWAWAGTPTEGAAWLRLQRLAYTWHRILLIPVSGGVVVGMMHGLLEIFEQIKQSLLSSQREGIDFMAAIFPTIKAIQAAITLGTGCSLGPEGPSVDIGKSCANGCAEMMENNRERRIALVAAGSAAGIASELPLYLILGMLCGVVSVAFRQLVVWFTKTFDLIRKKFGLPAVVCPALGGLGAATALCKGSGLVGGLYAPSLMIGAAVGAVFGGSAAELINSVIPGNTAVADPQAYALVGMAATLASVCSVPLTSALLLFELTKDYRILLPLMGAVGLAIWVPSVVNQSGSKDTFEATSPRHGYSSLLPPTDTNETDWRRQDGDDVELTILDIDSYHYVSNNEEMLLDDLKANSSLVSSCLTRGFQFHGNERGLVTCFPDTDLSTAKVLMEVKGIKQLPVVKRGAGRRNDGRRKVLGLLHYDSIGWCLR

SEQ ID NO: 10690 - protein, 341 aa, Zea mays
  VARIANT 64: note = Ancestral polymorphism is G, Derived polymorphism is R
  VARIANT 280: note = Ancestral polymorphism is R, Derived polymorphism is S
MSAPSDAAAASAAPAPAPTTAAASSSGGFTFKLHPLVIVNVSDHHTRVKAQAACSADSSSPSSGPGAGQPPRVFGCVIGVQRGRTVEIFNSFELVLDPVSGTLDRAFLEKKQELYKKVFPDFYVLGWYSTGSDVHDTDMQIHKALMDVNESPVYLLLNPTINLSQKDLPVTIYESELHVIDGCPQLIFVRSNYTIETVEAERISVDHVAHLKPSDGGSAATQLAAHLTGIHSAIKMLNSRVRVIHQYLVAMQKVQSLLFTAGDIPMDNSLLRQVSSLVRRLPATESQKFQDDFLMEYNDTLLMTYLAMFTNCSSTMNELVEKINTSYERPTTRRGGRGAFM

SEQ ID NO: 10691 - protein, 604 aa, Zea mays
  VARIANT 48: note = Ancestral polymorphism is R, Derived polymorphism is G
MEVTIAEKKPRAAGDGGGLVERLPEALLVEVLARVDVDGACSAAASCRSLYAAANAVLPALTSIDLSAFAPSNAILSRILAGNGAVRSLTVNCSLLDDSAASVIARGSLRDLSLLKCSFSMSFFVALGGACHDLRSLKLEMAVCPYTLYPCLAPVYVGCVHLETLWVKFPLLDPLTTFRSYKAGSPLIPSNIKDLLLQPVSHSRAKTVFLKTTSLNKHITDNLESLSLVLDMVTDELVMLITSNVHKLSELCLEDEPDTQPNLPEDLTNVGLQALGLCHNLKHLSLTRRSYDFRRVNDFGILMLADGCKQLRTIRLGGFSKVSDAGYAALLHSGKDLKKFEVSNGWCLSDLACLDLDKAAPNITEVRLLNCALLTSDTAISLAPCTNLKVLDLSGCKSIADSGLVSISQLPNLTLLDLAGADITDVGLSALGNGRCLISSLCLRGCRRISSNGIASLLCGAGTINKTLVSLDIGNVPRISCRAVTVIAKNCEQISSLCLRNCLLITDSSLEVLGSMGCDSSKCPLRMLDLAYCSKLSRNFLRHFEPPLFRGLRWLGIGKNVAQRRGCSLTIAEVLERKPGLTICCNACDMGCRNKCHPDIRFLQ

SEQ ID NO: 10692 - protein, 769 aa, Zea mays
  VARIANT 619..769: note = Derived polymorphism lacks residues 619 to 769
  VARIANT 682: note = Ancestral polymorphism is N, Derived polymorphism is T
MALRHLVTGQNNCAPDGASSSNPLNALANAFLGQSSKAQSIKELPGSVSVPSTSGFSAPAPLSNIPGSENEFKQDQRPFVQGSDFIHGGPANDWIKSFRPPGVPELGGIEAHFPDFEQIYNNAGTTFQPPLDGPPQRVLSGVLHSFLTSGPAGVPFQPLPVPAALGLSESDKQCIRDRSCIMARHIFSDQPEEYIQAQVNTLLHSLDIDNRMRGPMHGQYPELQEYWNQSQSSMGPALMHNTADKWITEFGKQNNNPENWAKSFEQQYGPNGWASEFEQHQSQMAMGQMGGVNMANLAAMEQSRMLAQTLARPDNTIFFLFEKNSKFFQFVSKMSRGELIIEDNQVKEGLASQSSGWADEFQTQYKANANSWADQFAREELSQGADKWVSEFSSQHNQGALNESWVDEFSKLNVTDEWAEEFSGGGFGESSADPWVDEFQEHLSSFKQSSGASRGVYVYSENNPYVGHPNPMQEGQELFRKGLLSEAVLALEAEVLKNPDNAEGWRLLGITHAENDDDQQAIAAMMRALEANPTNLEVLLALGVSHTNGYLLAIDAELEQGEALRYLYRWLQNHPKYGGLVPPQSTDSPYGPDVVRLFNDAAQMSPEDADVHVVLGVLYNLSREYDKAITSFKTAVQLKPQDYSLWNKLGATQANSIQSADAILAYQQALDLKPNYVRAWANMGISYANQVILLCNWFLPGFLRCIALAHDLITPIDANPSMLLTQGLYEDSIRYYVRAVTMNPKADNAWQYLRISLGYALLACDLPTM

SEQ ID NO: 10693 - protein, 545 aa, Zea mays
  VARIANT 93: note = Ancestral polymorphism is R, Derived polymorphism is G
MGIVKIGSREPAARSGYSCGGEDLTREDRMLLQSFPDPESLGSDQAEVDCELASSRGQMCNIPYGIYDLHGGLAEVLSLETWNSCLTEDDRLRLAAYLPDMEQQDFVTTMKELFSGDAMFFGSPVKSFFHGLSGGLYSPQVSQARELLMMFQRRRHYHFLKWYHDDMVAKFASMSNLLRSSDTSATLGEKLPISRRHVYEKRFPCVSLSSTIPPVTIKDETATVSSPMECAKLAGGPLSTHCSTRHDERAHAAKSVEMNSLESQILRPLSDPMQNCSKLPKGVLKIRTGCASVADGSEGTRHRPGPVLADQPGAQSSRICTPPLVFRHGVHGFSENPSSHTNRINSTSDSSHRTPLQREGTLEPYAPMGKIPPRVQMTVPQEHSAVYPSMTGFYQPAANHSLAYSSEAYGTRERAHMEDLLKNFGCGQNIVAHQISPDPYARAMDGLQTNGYSSSKNAESISDMLSLGTRTYPLHSSASELLETVCNHREGAPSANAVAEAEESRQFTYTYARRKPHKRSTMAERTVPPSAVDGMAIMKAKAIRL

SEQ ID NO: 10694 - protein, 699 aa, Zea mays
  VARIANT 260..699: note = Derived polymorphism lacks residues 260 to 699
MASETETFAFQAEINQLLSLIINTFYSNKEIFLRELISNSSDALDKIRFESLTDKTKLDAQPELFIHIVPDKANNTLTIIDSGIGMTKSDLVNNLGTIARSGTKEFMEALAAGADVSMIGQFGVGFYSAYLVAERVVVTTKHNDDEQYVWESQAGGSFTVARDTSGEQLGRGTKMTLYLKDDQLEYLEERRLKDLIKKHSEFISYPISLWIEKTTEKEISDDEDEEDKKDEEGKVEDVDDEKEEKEKKKKKIKEVSHEWQLVNKQKPIWMRKPEEITKEEYAAFYKSLTNDWEEHLAVKHFSVEGQLEFKAVLFVPKRAPFDLFDTRKKQNNIKLYVRRVFIMDNCEELIPEWLSFVKGIVDSEDLPLNISRETLQQNKILKVIRKNLVKKCVELFFEIAENKEDYNKFYEAFSKNLKLGIHEDSTNRTKIAELLRYHSTKSGDELTSLKDYVTRMKEGQNDIFYITGESKKAVENSPFLEKLKKRGYEVLFMVDAIDEYSIGQLKEFEGKKLVSATKEGLKLDESEDEKKRKEELKEKFEGLCKVIKEVLGDKVEKVVVSDRVVDSPCCLVTGEYGWTANMERIMKAQALRDSSMSGYMSSKKTMEINPENAIMEELRKRAEADKNDKSVKDLVMLLFETALLTSGFSLDDPNTFGSRIHRMLKLGLSIDEDEEAPEADTDMPPLEDDAGESKMEEVD

SEQ ID NO: 10695 - protein, 131 aa, Zea mays
  VARIANT 114: note = Ancestral polymorphism is R, Derived polymorphism is T
  VARIANT 96..131: note = Derived polymorphism lacks residues 96 to 131
MGALGDRLRAFSTNRWLVFVAAMWLQSMAGIGYLFGAISLVNKAALGYNQRQVAALGVTKDLSDCVGFLAGSLSAVLPSWAMLLIGSAQNFLGYGWLWLIVTRQAPALPLWMARGIVQDINAAFTDLGQEI

SEQ ID NO: 10696 - protein, 275 aa, Zea mays
  VARIANT 191..275: note = Derived polymorphism lacks residues 191 to 275
  VARIANT 157: note = Ancestral polymorphism is I, Derived polymorphism is T
  VARIANT 145: note = Ancestral polymorphism is G, Derived polymorphism is S
  VARIANT 133: note = Ancestral polymorphism is A, Derived polymorphism is P
  VARIANT 122..275: note = Derived polymorphism lacks residues 122 to 275
  VARIANT 116: note = Ancestral polymorphism is P, Derived polymorphism is S
  VARIANT 110: note = Ancestral polymorphism is G, Derived polymorphism is R
  VARIANT 104: note = Ancestral polymorphism is G, Derived polymorphism is R
  VARIANT 98: note = Ancestral polymorphism is R, Derived polymorphism is I
  VARIANT 93: note = Ancestral polymorphism is V, Derived polymorphism is I
  VARIANT 88..275: note = Derived polymorphism lacks residues 88 to 275
  VARIANT 40: note = Ancestral polymorphism is A, Derived polymorphism is T
  VARIANT 39: note = Ancestral polymorphism is D, Derived polymorphism is Y
MASPDLLFNLWNLFYLDAYQAAINIDVPGLDTDATTERDTIVFRSYIALGSYQVPGDQLEKKTRRASKRRPMEISTKVRPPKLREVIQVPKKVGRDPRFEPVYGSVDKEGMGEFRPLTYFTQLVFPFIFLLKALLLKCYLVVHSGTSCKLDEFLTLIDLVGMQRLQKMIKKSKDLDAIGEMKSHVTWIDKQLKYHPPKNVESEILCEHIKKEREATKARKRPCYLKKPELHERKLMNKYNELKEAGKLDAFMEKRRRKNASKDHRFMSYQRSGDA

SEQ ID NO: 10697 - protein, 177 aa, Zea mays
  VARIANT 63: note = Ancestral polymorphism is A, Derived polymorphism is V
  VARIANT 147..177: note = Derived polymorphism lacks residues 147 to 177
MDVCSREHQDLALDAARQGIDAARAYDCAAFRMRGAKAILNFPNEVGSRGADFLAPPPPVAVAATSSSQNKRKMRDAEATAGGAAEPAAANKSVKAAEASGSPAPPSLSPATTTTTTTASTVTTCCSPLSGSAAAAHEMFPMTPSSWTWEQLEGVFESLSPLSTTYPQLGFPEVTVN

SEQ ID NO: 10698 - protein, 269 aa, Zea mays
  VARIANT 136: note = Ancestral polymorphism is E, Derived polymorphism is V
  VARIANT 76: note = Ancestral polymorphism is D, Derived polymorphism is G
MEFKAGVFTVAMLAIVVLSTPAAPQKPKSPPAPRSPVVLAPAPAPAPAAPHHVDLADLLSVAGPFHTFLDYLQKTGVIETFQSQANDTKRGGITVFVPKDSAFAALKQTTFANLTQDQLRSLLLCHALPKYYSLAEFDRLSALGPVATLAGSQYTLNLTYDMGTVRVKSMWSDPKISSSVYSTRPVAVYEVGKVLLPMQIFKSDPPLAPAPAPAPDAKASDVAPSPASGKSSASAKAKEKAGEKSSSCRAGVVAHYLAIAVSGGLVLLW

SEQ ID NO: 10699 - protein, 203 aa, Zea mays
  VARIANT 183..203: note = Derived polymorphism lacks residues 183 to 203
  VARIANT 193..203: note = Derived polymorphism lacks residues 193 to 203
  VARIANT 200: note = Ancestral polymorphism is I, Derived polymorphism is T
MAAVRAALRLQRQCLAANPFLFSGHGLRYRKLEVILTTTIDKLGKAGEVVKVAPGHFRNHLMPKMLAVPNLDKFAILIREQRKLYQREEEVAVKQVTEKDDDARLQEERMKQYQTAAKRLDNALLVLRRFISTGNELRTPVTKDEIVSEVARQLNINIHPENLHLHSPLASLGEFELPLRLPQNIPCPEGKLQWTLKVKIRRK

SEQ ID NO: 10700 - protein, 518 aa, Zea mays
  VARIANT 226: note = Ancestral polymorphism is V, Derived polymorphism is L
MICYVLWLAACCLLLLLYSVRFRSRISHGNGPRTYPLIGCLVSFYQNRWRLLDWYTEMLAASPTQTIVVDRLGARRTVVTANPVNVEHILKGNFGNYPKGKPFTDILGDLLGTGIFNVDGELWYAQRKLVSHEFSARALRDLEFAVLEDEARERLVPALGLAAARGDAVDMQDLLRRFSFDVICRVSLGVDPGCLDPALPAPRLAAAFDAAAGIIARRGAAPVAAVWKAKRALGVGSERMLREEIRVIHEAVMDLIRIRKKERGLQVNDADGRRSDLLSRMIECGYPDEMIRDMVISFIMAGRDTTSSALTWFFWLLTRHRDVEREVLREVTGGGGASHAAGGQGKMSVLHAALCETMRLYPPVAWDSKHAAAGDVLPDGTRVERGDRVTYFQYGMGRMESIWGANAADFSVQRWLSIGEDNAPPAAVAGVSPFKYPVFQAGPRTCLGKEMAFVQMKFVASTVLRRFEIVPVDEGRVPVFLPLMTAHMAGGLNVTVRRRGEPIAAAATPLDPSADPVL

SEQ ID NO: 10701 - protein, 236 aa, Zea mays
  VARIANT 160..236: note = Derived polymorphism lacks residues 160 to 236
  VARIANT 117: note = Ancestral polymorphism is C, Derived polymorphism is R
  VARIANT 82..236: note = Derived polymorphism lacks residues 82 to 236
  VARIANT 76: note = Ancestral polymorphism is K, Derived polymorphism is I
  VARIANT 75: note = Ancestral polymorphism is S, Derived polymorphism is C
  VARIANT 72..236: note = Derived polymorphism lacks residues 72 to 236
  VARIANT 45: note = Ancestral polymorphism is I, Derived polymorphism is N
  VARIANT 32: note = Ancestral polymorphism is M, Derived polymorphism is I
MLPVTYPQSQNYQQDDFHKTVARTLSQGSTPMSMDFHPLQQTLLNVGTNVGDIGSWDVGTKDRLVVRNFKVWDLSKCTIILQVLLIQGILYKFIPIMVATILDNTWRPLAPCSHHYCKILSVRPVAAPYSATINFRLEGFNLLNTSSRVICSFEGRCILQEDMDSVAENAEYKDRDIESLSLCCYDEMEEVDEHEGQHGIISRKQLKEMSIMLHVKEAKSPIMLSVKFKERLWKLS

SEQ ID NO: 10702 - protein, 136 aa, Zea mays
  VARIANT 72: note = Ancestral polymorphism is R, Derived polymorphism is Q
  VARIANT 71..136: note = Derived polymorphism lacks residues 71 to 136
  VARIANT 61: note = Ancestral polymorphism is G, Derived polymorphism is S
  VARIANT 40..136: note = Derived polymorphism lacks residues 40 to 136
  VARIANT 38: note = Ancestral polymorphism is Y, Derived polymorphism is N
  VARIANT 33: note = Ancestral polymorphism is T, Derived polymorphism is K
  VARIANT 21: note = Ancestral polymorphism is N, Derived polymorphism is S
MLESVWILLAVRLLMLMCQFSETGVMHSIQIYTKSNLYYQFDNYMYPIVLVNVVGKAVMLGEIINYVQSLQRQVEVNFHYQFTTGMTHFLQFMSMKLPTVNPQVDLNSLPNVLPKDAQKQELARQVHLSARQVEVW

SEQ ID NO: 10703 - protein, 263 aa, Zea mays
  VARIANT 81..263: note = Derived polymorphism lacks residues 81 to 263
  VARIANT 88: note = Ancestral polymorphism is R, Derived polymorphism is Q
  VARIANT 115: note = Ancestral polymorphism is S, Derived polymorphism is L
  VARIANT 123..263: note = Derived polymorphism lacks residues 123 to 263
  VARIANT 150..263: note = Derived polymorphism lacks residues 150 to 263
  VARIANT 197..263: note = Derived polymorphism lacks residues 197 to 263
MLTASFLRFLLLLLLPLTALYFFYMLHLLLTSASSAASNCAPDTVSVSRMSANLTHEVFDIAALSRSRLWDKRKEYIKVWWRPRGAMRGYVWLDREVRESNMSTACTGLPAIRISSDTSAFPYTHRRGHRSAIRISLKFLPYMKKYEYQQAFLHGAVAKASEKDVKEHKEKIGDQNLEIKALRNKAAEWQLKVLENEGILNTKEKERDQRVVENNLKMNTLKSEVESEHKCLAEKEIKIKEKLEKDPFEIALHELPNPVYLGA

SEQ ID NO: 10704 - protein, 30 aa, Zea mays
  VARIANT 8: note = Ancestral polymorphism is P, Derived polymorphism is L
  VARIANT 26: note = Ancestral polymorphism is C, Derived polymorphism is Y
MSDLIYRPEDEVLAELENFKAHLASCAPKN

SEQ ID NO: 10705 - protein, 105 aa, Zea mays
  VARIANT 22: note = Ancestral polymorphism is S, Derived polymorphism is Y
  VARIANT 27: note = Ancestral polymorphism is P, Derived polymorphism is R
  VARIANT 28: note = Ancestral polymorphism is K, Derived polymorphism is E
  VARIANT 37: note = Ancestral polymorphism is Y, Derived polymorphism is C
  VARIANT 41: note = Ancestral polymorphism is L, Derived polymorphism is M
  VARIANT 48: note = Ancestral polymorphism is E, Derived polymorphism is K
  VARIANT 55: note = Ancestral polymorphism is V, Derived polymorphism is I
  VARIANT 59: note = Ancestral polymorphism is E, Derived polymorphism is K
  VARIANT 60: note = Ancestral polymorphism is A, Derived polymorphism is V
  VARIANT 62: note = Ancestral polymorphism is Y, Derived polymorphism is H
  VARIANT 65: note = Ancestral polymorphism is C, Derived polymorphism is F
  VARIANT 75: note = Ancestral polymorphism is S, Derived polymorphism is C
MGMLLISKIGEEYPDRMMLTFSVFPSPKVSDTVVEPYNATMSVHRLVENADECMVLDNEALYDICFRTLKLTTPSFGDLNHLIIATMSGVTCCRNKKNKLAFDLY

SEQ ID NO: 10706 - protein, 243 aa, Zea mays
  VARIANT 188: note = Ancestral polymorphism is F, Derived polymorphism is C
  VARIANT 43: note = Ancestral polymorphism is R, Derived polymorphism is M
MDSTLLLPRLPPPPLPSSLRRRHRQPHCLPPHRRPKTVPRHGRMPPAAREGRADAGTKFRARGLFGGGGGGDRLRAVMRMVKLNSAIQNRSVRELLELLGDECLYFLGNLRSVDVPRLGKDMFLLLHALMVRHHVSFVLKPSPDDEAGFDLGVKWSLEWKGKKLPWDLDCNVSTTHVYRGLLLISLRFLYLLRLQNLDAVVLAVVHKVLPEGTLDEKQRSTMVFCAVIGLLVMLLFYALLKNL

SEQ ID NO: 10707 - protein, 150 aa, Zea mays
  VARIANT 22: note = Ancestral polymorphism is S, Derived polymorphism is F
  VARIANT 6: note = Ancestral polymorphism is R, Derived polymorphism is S
MAPLSRKHQVLIQALLARGPLFERDFHAIFDGAFGKNTANDQQLFNDTLWNINKELAFVSFELQAFINQYDGMVYYGVLEAIIREAGNDGSITSIDALNVQLENQVTTVDGSQDNQSHLPIKNLSLSEKEKALDELIRDCWLSYTSTGKI

SEQ ID NO: 10708 - protein, 101 aa, Zea mays
  VARIANT 24: note = Ancestral polymorphism is I, Derived polymorphism is T
MQYRQPCRLRLPNANFLVKNEPFIQKGVLKRSSRLFEEMSSSSSSSLLSGSNTVSVELHLIPCKLCNGVVIERVSKQPESTSRKFYRCRAKKMVISQFLLN

SEQ ID NO: 10709 - protein, 380 aa, Zea mays
  VARIANT 8..380: note = Derived polymorphism lacks residues 8 to 380
  VARIANT 17: note = Ancestral polymorphism is L, Derived polymorphism is H
MTSMIDRWRPETNTFHHRIGEVTPTLQDVSMLCGLPLKGKPVYSINVRNDWLEDLNKRFSSIPWKEGMNVPEVEKIDTKHSNGPLLHWLKSLSEYWKTKDGLIFNNTVQKHPVERVMRHFSLYQEQLLVAVEDQQEGEQLLVAVEDQQEGVAWPEREPTNVLKEERVHDVDAFKEYLKWFRERSRERDCCPEASPLVFYGDLKQQVSSVTGLDLEKTFKKLRSLWGKYTMTMQASLAHKGIVYGEQKKNELSSKKYALIVEFETELDEIFCFCDEFKTPAVMACRTMSPTNRSSSNTGSIQPFTRQTRRRSSEVGTSESSHRMTHSSAMKYLRQNDIKGDSDQYAIANEVLKDEANLDAFAWLPDIKERMGFVLQTWNVK

SEQ ID NO: 10710 - protein, 63 aa, Zea mays
  VARIANT 55: note = Ancestral polymorphism is S, Derived polymorphism is L
  VARIANT 28: note = Ancestral polymorphism is C, Derived polymorphism is F
  VARIANT 1: note = Ancestral polymorphism is M, Derived polymorphism is L
MPPSSSSSLLSGSNTASAELPLIPCKLCNGVVIERVSKQPESTSRKFYRCRAKKLVISQFLLN

SEQ ID NO: 10711 - protein, 507 aa, Zea mays
  VARIANT 51: note = Ancestral polymorphism is Q, Derived polymorphism is K
  VARIANT 78: note = Ancestral polymorphism is I, Derived polymorphism is N
MAAFIDFFTLSSSSITNSRSDNFFFISLMELNFLDVLSGCLETRSITTPLQSLQGIRGSSALAVLEPESKDDDDDGGISSNSLKDHSNDKLPVNVCSDKFRADLMNIAMTTLSSKILSQDKEYFAELAVDAVLRLKGSTNLEAIQILKKPGGSLKDSFLDEGFILDKKIGIGQPKRIENAKILVANSAMDTDLRLWGMQLIYNFPEELFADAGILAIEHADFEGIERLALVTGGEIASTFDNPESVKLGHCKVIEEIMIREDMLIHLAVTSGGTADDIASRGCEELGGGGRRDPRWYYLNVSLILVDRCVAKRVSISYLVIVSYNICLFFQLLNIILFLKCKVNVVDGPFAHMTMKEQLRAILEASVVIGAHGAGLTHLVSATPDTKVLEIISSMYGPPHFALISHGKSLEYHAINLPGSFARITDVIAVDYCCKIGYGFLDVADATDSTKSETDLVLTEHGLLSLSSAVQISLEICQMMKGCVVYGVSSVLFYFYGAWSCPDLQCW

SEQ ID NO: 10712 - protein, 153 aa, Zea mays
  VARIANT 99: note = Ancestral polymorphism is S, Derived polymorphism is C
  VARIANT 89: note = Ancestral polymorphism is N, Derived polymorphism is T
  VARIANT 19: note = Ancestral polymorphism is S, Derived polymorphism is L
MVMLFSLAWNPLQLYLFSSGKVSMVRVSVLNDALKSMYNAEKIGKRQVMIRPSSKVIIKFLTVMQRHGYIGEFEYVDDHRSGKIVVELNGRLNKCGVISPRFDIGVKDIEGWTARLLPSRQFGYIVLTTSAGIMDHEEARRKSVGGKVLGFFY

SEQ ID NO: 10713 - protein, 240 aa, Zea mays
  VARIANT 169: note = Ancestral polymorphism is G, Derived polymorphism is R
  VARIANT 160: note = Ancestral polymorphism is L, Derived polymorphism is Q
  VARIANT 148: note = Ancestral polymorphism is V, Derived polymorphism is A
  VARIANT 122: note = Ancestral polymorphism is G, Derived polymorphism is D
  VARIANT 65: note = Ancestral polymorphism is W, Derived polymorphism is G
  VARIANT 23: note = Ancestral polymorphism is F, Derived polymorphism is L
  VARIANT 11: note = Ancestral polymorphism is L, Derived polymorphism is S
  VARIANT 2: note = Ancestral polymorphism is V, Derived polymorphism is A
MVNSSLPPPSLLLVLLFIFSNALNLPSAAMDCHSSDRAALLKIKGELGNPPELSSWMPATNCCAWDAAAAAAAVICSPDAGRVYLVALFQLHVDVAAPIPPAYGELPMLQTIQLDTLPGLYGPIPASFAKLAHLEQLDISGTQVSGPVPGFLTKTNLSALTITNSKLTGPIPGSLSRLSSLRYLDLSGNMLSGSIPPGLLHGSSRFLILSSNRLTGEVPAGYADGDMDTLDLSHNQLADP

SEQ ID NO: 10714 - protein, 158 aa, Zea mays
  VARIANT 138: note = Ancestral polymorphism is A, Derived polymorphism is V
MATDAILETIKPRRSEEQLPVTTAAAAGTRLRRRVSSFSAHVRPPPGLSSSAAAAFRRARSMPTAKALAAAGALRRWWEWVTAPFAPRGDDDDEARPLGGCRCACAGGPGGWRHVLVRLRAGARRLLGRDGRPLKAAAPPDFGYDSVSYARNFDDGEA

SEQ ID NO: 10715 - protein, 124 aa, Zea mays
  VARIANT 1: note = Ancestral polymorphism is T, Derived polymorphism is M
  VARIANT 18: note = Ancestral polymorphism is E, Derived polymorphism is K
  VARIANT 23: note = Ancestral polymorphism is P, Derived polymorphism is L
  VARIANT 25: note = Ancestral polymorphism is R, Derived polymorphism is Q
MGQALREVIDAVASCQFEVGAQPTRGGHAHEDVVGGRRMLPRRARGRGQRRGLATVSCHVMHELVRCVLASASDLYPRIQDLICCSTQRKSEGYDASSIQGILSIRSIENPLIQNECPKGFGGN

SEQ ID NO: 10716 - protein, 369 aa, Zea mays
  VARIANT 284: note = Ancestral polymorphism is P, Derived polymorphism is L
MEVRSEQGLMAGRDLFGLTKSPPAPAPPSSAAMQSVRMAYTADGTAVFAPVSSSPATPSYQPQGAAHGASMSAATVVGGNGAPAAPSMGEPLAKKKRGRPRKYGPDGSMALAMVPASAASGSPATGQGFSGPFSPPALNPASSLVVASPDGFKKRGRPKGSTNKPRVDAAGSSGAGFTPHVITVQAGEDVASKIMSFSQHGTHGVCVLSANGSISNVTLRQTATSGRTVTYEGQFEILSLSGSFFLAEDGVQRSRNGSLSVSLAGPDGRLLGGGVAGLLVAASPVQIVLGSFNSGGGKEPQKQAPSEPTSAPPRVAPTAGMGGPSSPSSRGTLSESSGGAGSPPPLHRAMAASASNSNQPPFLSSMPWR

SEQ ID NO: 10717 - protein, 374 aa, Zea mays
  VARIANT 68: note = Ancestral polymorphism is L, Derived polymorphism is Q
  VARIANT 146..374: note = Derived polymorphism lacks residues 146 to 374
  VARIANT 172..374: note = Derived polymorphism lacks residues 172 to 374
  VARIANT 179: note = Ancestral polymorphism is H, Derived polymorphism is Y
  VARIANT 212..374: note = Derived polymorphism lacks residues 212 to 374
  VARIANT 289..374: note = Derived polymorphism lacks residues 289 to 374
MRKVEKLIGEEHSGLRWLVGVHYTKGDGRRQGMLRRVRVREGVQAYLDGLTFVLSALPCSTPILATLLGYVATSRDPIIGGSLLLTYTTGYVARLPTIASFARALQIDCLVLIERPTGRFEHARTLGPKGSECHKAAVIGSVSRSQFSNLISCLFFFYHLKILGVEKTASQQEIKKAYHKLAPRLHPDKNLGDEALVGEAANNLQEYFRTMYKKVTEADVEEFEAKYRGSDSEKTDLKELYTKYKGNMNRLFCTMIFSEPKLDSHRFKDIIDEAISEGELKSTKVYEKWAKKILGMEPPTNPLERRAKKRKNSEENDLILAISQRRAERKKQFNSILSNIMSKCDSKASSSEPTEEEFEQAQQRLESRRAKRRK

SEQ ID NO: 10718 - protein, 381 aa, Zea mays
  VARIANT 58: note = Ancestral polymorphism is R, Derived polymorphism is L
  VARIANT 84: note = Ancestral polymorphism is L, Derived polymorphism is P
  VARIANT 333: note = Ancestral polymorphism is M, Derived polymorphism is I
MEVRGGVGQGSAARHPPAPEPSRAAARVQAGDALPLPIRHTNLIFSALFAASLAYLMRRWREKIRSSTPLHAVGLAEMLAIFGLVASLIYLLSFFGIAFVQSIVSSGDDDEDFLVGSGAPASAAAPSRQHAQAPAPCELLGSPAAAPEKMPEDDEEIVASVVAGKVPSYALEARLGDCRRAAGIRREALRRITGRDIEGLPLDGFDYASILGQCCELPVGYVQLPVGVAGPLLLDGRRFYLPMATTEGCLVASTNRGCKAIAESGGATSVVLRDAMTRAPVARFPTARRAAELKAFLEDPANFDTLSVVFNRSSRFARLQGVQCAMAGRNLYMRFSCSTGDAMGMNMVSKGVQNVLDFLQDDFHDMDVISISGSSCSLGFW

SEQ ID NO: 10719 - protein, 99 aa, Zea mays
  VARIANT 12: note = Ancestral polymorphism is G, Derived polymorphism is R
MAPASGWGRAVGNTRSFVGNALGGLRGWSNLASWTVAGTLAYYLWVKPARQLQKEQEERAALAAATDPYRYVEKRKPIPDPQDTGLIYGKKREPTKSQD

SEQ ID NO: 10720 - protein, 1112 aa, Zea mays
  VARIANT 2..1112: note = Derived polymorphism lacks residues 2 to 1112
  VARIANT 52..1112: note = Derived polymorphism lacks residues 52 to 1112
  VARIANT 104..1112: note = Derived polymorphism lacks residues 104 to 1112
  VARIANT 518..1112: note = Derived polymorphism lacks residues 518 to 1112
  VARIANT 635..1112: note = Derived polymorphism lacks residues 635 to 1112
  VARIANT 649..1112: note = Derived polymorphism lacks residues 649 to 1112
MQREVGPQVAPPLFIHHQIQPMPPHAAAAVKKRGQPCPAAAAAPAEAAAGNWNPRLWDWDSRALTARPSADALRLAGGQPQPQPQQAAEVHRQGAGGSGALKLQLGPREGSTAPTDASPTAPAASLSPSPPASGQDLVVRPSKRVRSGSPGSAGGGGGGAANGGAGYPMCQVDECRADLTGAKDYHRRHKVCETHSKTIRAVVANQAQRFCQQCSRFHPLAEFDEGKRSCRRRLAGHNRRRRKTQPADVSSQLLLPGNQENAANRTQDIVNLITVIAHLHGSSVGKVPSIPPIPDKQNLVEIISKINSFNNMTSADKSPPSEVVDLDALQEQQVQRQDSVGKTTNGIDKQTVPSTMDLLGVFPTGLATSTPETNTSQSQGSSDSSGNNKSKSHSTEPVTVVNSHDKSTRDFSAAGFMRSNSTHESQPHIYKQTEQETRPYLSLQLFGSTEEDFPPKMDSVNKYLSSESSNPLDERSPSSSPPITRKFFPIHSVDEEVRHPHITDYGEDATMGEVSTNQAWLAPPLDLFKDSERPIENGSPPNPGYQSCYASTSCSDHSPSTSNSDGQDRTGRIIFKLFGKEPSTIPGNLRDDIVNWLKHSPTEMEGYIRPGCLVLSMYLLMPGIAWDELEENLLQRVNSLVQSSDLDFWRKGRFLVRTNSQLVSYKAGMTRLSKSWRTWNTPELTLVSPIAVVGGQKTSLILKGRNLSIPGTQIHCTSIGKYISKEVLCSAYPGTIYDDSGVETFDLPGQPDLILGRCFVEVENRFRGNSFPVIVASSSVCQELRNLEVEFEDSQVLDVSSDGQIHDSRQPKTSVQVLHFLNELGWLFQRASACTSSTRSDVSDLDLIRFSTARFRYLLLFCSERDWCSLTKTLLDILAKRSLASEELSKETMEMLAEIHLLNRAVKRKSRNMVHLLVKFVVICPDNSKVYPFLPNLPGPGGLTPLHLAASIENAEDIVDALTDDPQQTGVTCWQTVLDDDGQSPETYAKLRNHNSYNELVAQKLVDMKNNQVTVRVNGDGIRADRLGNDVGDRKRSGVQALQIRSCSQCAILESGVLMQPVRSRGFLARPYIHSMLAIAAVCVCVCVFMRALLRINSGKSFKWERLDYGTI

SEQ ID NO: 10721 - protein, 666 aa, Zea mays
  VARIANT 165..666: note = Derived polymorphism lacks residues 165 to 666
MAVAACGGGGGRGRSPLSRLSPQLGCLLVVSLLCLRAAVVCRAQVQEQGQLQPLPALEIETYNYTSFDEGNSREQRELAFSRDARIYQGAIQVSPDTGNVGSYQDIMVNKSGNVLLQRRFTMWRRLDSGNGNGTGAPPRVQVVSFNSTFSINVFHLPDSSPRPGEGLAFVVAPSRAEPPPGSYGGYLGLTNATLEASSGGGPARSRFVAVEFDTLKQDYDPSDNHVGLNVGSVVSVATADLTAFRIATNSTGPANYTAWVEYDGAARRVAVYMAVRGEPKPAAPVLDSPLDLSQHLPEQAYIGFTASTGADFELNCVLDWALSIEIIPERKSRAWVVAVAAAVPAAAIAASVAAFFLARTLRARRAVEKRQERLERRLTNLPGMPRVFAYDKLRKATGNFDERLRLGRGGYGVVYKGLLPADDARPEGTMEVAVKRFTRDDGKDVNDFLQEVDIINRLRHKNIVPLIGWCFNKGQLLLVYEYMPNGSLDQHLFRRGAHEQRPVLDWASRYAIVRDVAAGLHYVHHEHTRMVLHRDVKASNVLLDAAWRARLGDFGLARVLDQGRESFTDVHVAGTFGFIAPEYSVGHRATRETDVFAFGALVLEAVTGQPALRDGGGDGGGCRLLSDWVWQMHGRGALLGAVDQGLGATGHGIDLVAASMERMVQL

SEQ ID NO: 10722 - protein, 123 aa, Zea mays
  VARIANT 69: note = Ancestral polymorphism is S, Derived polymorphism is F
  VARIANT 66: note = Ancestral polymorphism is F, Derived polymorphism is S
MVGMLGTVSAAIVAVTIGLPMSSVVLCLMGILTAVAIADVTIDASIAKNSIDKPTLAPDMQSLCAFSSSLGALVGYATSGLFVHHLGAQGALGVMAIPPTTVVFLGFFIYELKTHRHNFKEKK

SEQ ID NO: 10723 - protein, 385 aa, Zea mays
  VARIANT 22: note = Ancestral polymorphism is A, Derived polymorphism is S
MAMAAAQLEAEEELRLELEAVAAVYGDDVRVLRDLPPHLFVHVRPRTADDTSQQFVELFLGIKASSQYPKEPPHIYAVESKGLDENRQIYLITSIQNKANELSNCPMLVTLCEEAGEILSNMNHPAGDCPLCLYPLMGEDKVGSELPFMKLMSCYHCFHSDCIMRWWEWLQHGDTNPKEPNTGEYAVSYEMHLDSRLLACFETRIITFCSDKHYNVNQPRGFCPVCRKVFDEKDIEHVRDLLGDNTSRLASLTVDLGEDEKELLHSEAEQNRRKRIESLVNLQQELNGLIEPKKDLAIQPGMYVSVPPSTPDTAEEENADPSQGTATSTSETEQRGQASNASSNKPKNPGHRRRNRANASRRQPHGQGQPARQQWQRKEAGTSHQ

SEQ ID NO: 10724 - protein, 70 aa, Zea mays
  VARIANT 37: note = Ancestral polymorphism is A, Derived polymorphism is G
MAVRRPGNNNLSSDLEQQWRNGGGPACVLGVGTANPANCVQQDEYTDWYFRITKSDHLTDTKATMKKMCK

SEQ ID NO: 10725 - protein, 121 aa, Zea mays
  VARIANT 5: note = Ancestral polymorphism is W, Derived polymorphism is G
  VARIANT 2: note = Ancestral polymorphism is A, Derived polymorphism is V
MAVSWLGMNQAQKHQLMLMWYFKPCLYMDAGLASAVTALRTSTDVAHLAHLLEQFRLTWCGKLVRDARTVAPLRTSASTSSSLEVETELSMHAGGARCDRYYPCLINDDNGDGHDIWSILY

SEQ ID NO: 10726 - protein, 82 aa, Zea mays
  VARIANT 3..82: note = Derived polymorphism lacks residues 3 to 82
  VARIANT 6: note = Ancestral polymorphism is P, Derived polymorphism is L
  VARIANT 15: note = Ancestral polymorphism is T, Derived polymorphism is I
  VARIANT 38: note = Ancestral polymorphism is C, Derived polymorphism is W
  VARIANT 41: note = Ancestral polymorphism is S, Derived polymorphism is L
  VARIANT 48: note = Ancestral polymorphism is G, Derived polymorphism is D
  VARIANT 53: note = Ancestral polymorphism is L, Derived polymorphism is P
  VARIANT 56..82: note = Derived polymorphism lacks residues 56 to 82
  VARIANT 60: note = Ancestral polymorphism is I, Derived polymorphism is S
MAEWNPEKDLLAMVTDDSKVLLHRFNWQRLWTISPGKCITSICWSPDGKIIALGTEDGLILLHDVEILKTSLFHDKLLIILS

SEQ ID NO: 10727 - protein, 399 aa, Zea mays
  VARIANT 348: note = Ancestral polymorphism is S, Derived polymorphism is Y
MAPGGEGKPSTGGGGGGVKGGRKRKFLPHGKPVRKGAYPLRPGVQGFFITCDGGREHQATREALSLLDSFYEDLVDGKGSDEKPKNIPDKPLNKKIKFEDSDSSDDEDEDNSGEEADNGNVNDVEKGETAPSEKQQEVLDTSNTASKDNTALSEKKEEVLDTSDTVSKDNEEQAVTADEPREKKQRVEDPPVFEQAVQKETADEPKESTDKPKESSEKNIDDLIDEDLKEIGDRKKRLFASLETGCNGCIFIQMHKRAGDPGPVEIVQNMMSSAALTRKHMSRFILRVLPVEVACYASEEEITKAISPLIEKYFPKECSSGHKFAVLYEARSNTGIDRMKIINAAAKSVPQPHKVDLKNPDKTIVVQIAKTICMIGVVERYKELSKFNLRQLTSPESEK

SEQ ID NO: 10728 - protein, 175 aa, Zea mays
  VARIANT 9: note = Ancestral polymorphism is K, Derived polymorphism is E
  VARIANT 44: note = Ancestral polymorphism is M, Derived polymorphism is V
  VARIANT 58: note = Ancestral polymorphism is S, Derived polymorphism is N
  VARIANT 59: note = Ancestral polymorphism is F, Derived polymorphism is Y
  VARIANT 69: note = Ancestral polymorphism is G, Derived polymorphism is S
  VARIANT 146: note = Ancestral polymorphism is R, Derived polymorphism is W
MLDASFNTKLGGFGLARLVDHGRASYTTVLAGTMSYMDMDPECMVTGRASTESADIYSFGIVLLEIACGRVPLVVRRDDDVVIHLAQRVSELYHGGQVLGAADPQLNGNFNVEEMECAVVGGLWCVHPDRSMRPSIRQAVTVSMLWSEAEVPKLPVRMPPPAALVGSLLLLGQSN

SEQ ID NO: 10729 - protein, 206 aa, Zea mays
  VARIANT 43: note = Ancestral polymorphism is S, Derived polymorphism is I
  VARIANT 21: note = Ancestral polymorphism is E, Derived polymorphism is K
MAYFQSFEQICLDICPEQGSELVLSPDTWLPFELRLLKFGIESSGGVPPFHRGFSTLDKLEIRGCPKLEALMDLEEMKVLQSLVIVDCPSLYILPEMKFPPLLGSLTVEGCHKLQSLPLNTSDPSMFTELEVSDCQGLMYIASLSRLSNLENLVLLHCPLLELQELLPAIPESVVVFLCPKLKKWCGIQNIEYLENLSDMSQEVNI

SEQ ID NO: 10730 - protein, 1123 aa, Zea mays
  VARIANT 945..1123: note = Derived polymorphism lacks residues 945 to 1123
  VARIANT 839: note = Ancestral polymorphism is R, Derived polymorphism is C
  VARIANT 459: note = Ancestral polymorphism is P, Derived polymorphism is L
MASGGVVASLLSSATKLLDLLRGAPSVSRRAGQQQPVSADVHRLQRLLRRIQATIDDAGEREIRDSSVKLWIAEITVVARDAEDVLEDYRYELIRRRVQRLEGTGGGASTSCKRKHHHDDQGYGIREILLPRGRDKRNCILTLTCFQRMIRKITRRFSISTDRAGFQFRPEGDDGSTSEGIVDITRWFEEIHTDQTAAQLRPEDEDGDISKRIGEIIRRFEEITGDRAALHLGQEDGERNTWSGRDSTWESRVTSHLLDESCVFGRTKEKEHVVKLVKSYSKCPGIHVLPIVGMGGIGKTTVAQMVYREVQESYDLLSWVHVPETFDLRKLAIAITESLSRQPCTYNNFSVVHDVLQQTVLNKRVFLVLDDLWNERQICWQDFLCSLKFADTMTILVTTRSKEVAQLLQTIPHFELGLLPEDHCWQLFQCYAFGHRNIHEESALVQVGRKIMEKCSCLPLAIKSIGCLLRSKMDMQTWMEISDSEFWEYSDNNEEILSALRLSFHRLPGRLKPCFLLCALYPKGEPFTKDDMIHLWTAHGYVQPSGCKTLEKVAGEYFDELNERSLIEMDTYYLVSREGHNYLKKSRVRSPVEISSGEIFDTDVSFYELHIRSLVENFHKGTTESSLPFQLFRLHDMIWDLAKSLSSCLFSAVAVDEGNLYMQNEVQHLFLWLGRGRSKQNTQRGHSELIPISKSRDLFISWINNSLGLESEPFRWRHRSTPRPSHRPQVSDFELLGLSSTALLGIALEAMIQARPDPVQDPMSSARLLAYLPENKHEYILSTQSRRSQLFKIDYLRTLILKQCTFYNIGIYTYLRALILYSCKDSGCIAAIQYLKLLRYLNIRNCDSLTGKNLNHLTQSICHLYSLEKLIVSTCWKEFSIQSCHLFSLRYLQLSVQFNDWSQHPLCHFHNLDTLCLQNCHSIAELPTGIGNLMNLRCLKLIGISEIKKLNHDSLLCQCNNNKCQLMKAIFPALMELELDSLCELQDWCKFQDSDCPKMQSITVRNCNKLRRIPYFGSVRSLMIINSALIGLQLSASNEPSQLQTLDISYCENLESLLGLENLCSLGSLYIAHCPKLFVLRQEKLLFRPQNILIDDCPGLIEWCDEQELYYHVRSYALLFFLF

SEQ ID NO: 10731 - protein, 507 aa, Zea mays
  VARIANT 3: note = Ancestral polymorphism is R, Derived polymorphism is S
  VARIANT 66..507: note = Derived polymorphism lacks residues 66 to 507
  VARIANT 87: note = Ancestral polymorphism is V, Derived polymorphism is D
  VARIANT 251: note = Ancestral polymorphism is G, Derived polymorphism is D
  VARIANT 258: note = Ancestral polymorphism is L, Derived polymorphism is P
  VARIANT 262: note = Ancestral polymorphism is N, Derived polymorphism is S
MTRAHLPAAAQRRPTVALLLGLALAFCLAVLSIQSSFFAAPGAPGRRLDLDADDVRELAGFQSRVQQCVASRGLGLTAHIIDHCKLVLKFPEGTNSTWYNAQFKIFEPLEYKYDVCETILLWEQYRNMTTVLTREYLDVRPDGWLDYAAKRIAQLGADKCYNHTLCDELLSILLPAKPPFHPRQFATCAVVGNSGDLLKTEFGQEIDAHDAVFRDNEAPVNKKYAKHVGLKRDFRLVVRGAARNMAPILKGSCNAVILISSNILFHMWAAFETRCDYLAFPAADEALIIKSLTHKEINAVIKELPNPVYLFQGIVLRRGAKGTGMKSIELALSMCDIVDMYGFTVDPGYTEWTRYFSAPRKGHNPLQGRAYYQLLECLGVIRIHSPMRAQRVEDWSDIPSKEEIRRAHTIAFRLKKHETGQLAELGPFSNCKVWGTVDPDYGPVSGTSDMSETRKNSNYSKWELLPFEKLRREAQEHHIQMGGVSLYKMDGNKLDDLVCVRHQRSSS

SEQ ID NO: 10732 - protein, 509 aa, Zea mays
  VARIANT 136: note = Ancestral polymorphism is L, Derived polymorphism is F
  VARIANT 130: note = Ancestral polymorphism is A, Derived polymorphism is T
  VARIANT 52: note = Ancestral polymorphism is S, Derived polymorphism is C
MPGAFHSLLLPLKRKRKSKRRSRRGHRKENNPNISKNHLAAAGDPSFHLKSCTSVSPRDIGLLVQPLGNLFLSATPRANLRDAGLGALRPLPDDLLLDVLGLLPARDLAALSVASKALYVVASHDPLWRTLVLDELGGAFDFAGSWRATYIAAASGGQAYLIPPRALRIKGFYSDYLFQSWLCANMEMRHEWLARDNIERRRGLSVEQFIAEVEEPNRPVLLEGCIDMWPALQKWNRDYLLEISAGKEFAVGPVSMPLDRYFRYADNVQEERPLYLFDAKFAERVPEMGRDYEVPVYFREDLFSVLGKERPDYRWVIIGPAGSGSSFHVDPNSTSAWNAIIKGAKKWVMFPPEVVPPGVHPSADGAEVTSPVSIMEWFMNFYGACETWEKRPIECVCRSGEVVFVPNGWWHLVINLEESIAITQNYVSRRNLLNVIDFLKKPNASELVSGTEDRVNLHNKFRGAIEAAHPGMIKRLELEAQQKAAARKKKASFWDSAVDAKNGGFKFSF

SEQ ID NO: 10733 - protein, 243 aa, Zea mays
  VARIANT 18: note = Ancestral polymorphism is H, Derived polymorphism is N
MAAQQPRALTVHHHTRRHLVLIVLTVAATAAARAASAHHTAAPAPRAAESPSPAVASFVRARCAATLYPALCYDCLLPYASEVQENPARLARVAADVAAARLHALCARVKDILRHGAPEPNEGGGGGRPSEAAALRDCASTISGAADLARQSSAELTKLEMDLDAAASSAAGGGTSDRRKARWEVSNAKTWLSAAVTNEGTCADGLAEAGAADSPAGKEVAAGVAAVQQCTSNALALVNGIPL

SEQ ID NO: 10734 - protein, 375 aa, Zea mays
  VARIANT 35: note = Ancestral polymorphism is S, Derived polymorphism is L
MASSSLPEELVEEILVRLPQDDPVHLVRASLVCKSWRRVLSDQDCFLRRCRGFHGAAPPLLGYFAINRCYGNDATQFVPATSTASPVRVPAVDHRRRWFLPVDCRHGRVLIHYEDRDRSTKRGFVVWDPLTGSRQHLGMPSASYPSHSCRYTSYTGAVVCAKAGCDDDHLDCQAGPFRVVCVETNLLKPVFACATSYSSVTGAWSAPVPNHDSHDFNYYCLRSYGKQSLLVGDAVYFLFQDDQSILRYDLGRHRLSEIGMPPAMCNTALMKTEGGGLGLAALPNNNRIHIWSRHDEDGCWVEHRVVELETLLPRRMRNRYHRVVGSAEGTNTVFVNVCNTIFMLDVKSNKVRKFSKRKSGQFEYILPYLRFYAPS

SEQ ID NO: 10735 - protein, 719 aa, Zea mays
  VARIANT 683..719: note = Derived polymorphism lacks residues 683 to 719
MGDSTSTGFAAALELWQEHQLSILVVASLAIQWFLFVFAPLRQHRIPGLLRLSIWLAYLGSDAVAIYALATLFNSHRCDTDTGRPGVELLWAPILLVHLGGQDSITAYNIEDNELWRRHVVTAVSQVAAAIYVFVKAWPKSLVTTAHQAVNQATLDKVNAIQAHNEEMEAYGRIFTPALLLFFCGITKCVFKPWDLKRVSVNSLVDSSSGSEEKGGESEMNSLQGYVGAATRYFESRGHGRGAGLQEDDGDDDTCKAGEVWKPYNLCVDLAPPYSGRLSCLKHLARSPADEAHRLVKSSLSATFHQLYTKESLKLHDISHFVFTNNAALNRWKVLTSARGLRTVAAATLLGAIAVFHYGGGAADQVKADVTVTYALLWSAFVMEYVLPTVIHHTFGRVQRLFTGHRTWPDQVAQYNLMGYVARRRKHSWLMEVVGWLGCRDLVDQLWTMDPCKGASSREITGLVHGHVAGGWMEGHIAGADSFRAFNDYRGQWTLNNSSVPSMVLMSVSRPFDESVLVWHLATDFCFHLLQEDPSPSSATARRCREMSNYMAYLLFVKPEMLMPGARRSLFRDTCGELVGLLGEDRPGAPRARGKRGLAHKVVQLLKRDDGGGVLGSAGVGVVRRAWCVAEDLMDSHRGSEEKMWAVIQGVWVEMLCFSASRCKGYLHAKGLGTGGEYLSYVWLLLLYMGMETLAEKMQRTELYEGPTAAASSISGHNV

SEQ ID NO: 10736 - protein, 171 aa, Zea mays
  VARIANT 11: note = Ancestral polymorphism is E, Derived polymorphism is K
  VARIANT 38: note = Ancestral polymorphism is C, Derived polymorphism is Y
  VARIANT 40: note = Ancestral polymorphism is E, Derived polymorphism is K
  VARIANT 48: note = Ancestral polymorphism is R, Derived polymorphism is H
  VARIANT 49: note = Ancestral polymorphism is T, Derived polymorphism is I
  VARIANT 57..171: note = Derived polymorphism lacks residues 57 to 171
  VARIANT 69: note = Ancestral polymorphism is P, Derived polymorphism is R
  VARIANT 70: note = Ancestral polymorphism is A, Derived polymorphism is V
  VARIANT 72: note = Ancestral polymorphism is G, Derived polymorphism is R
  VARIANT 74: note = Ancestral polymorphism is G, Derived polymorphism is W
  VARIANT 77: note = Ancestral polymorphism is C, Derived polymorphism is R
  VARIANT 86: note = Ancestral polymorphism is H, Derived polymorphism is Y
  VARIANT 89: note = Ancestral polymorphism is L, Derived polymorphism is H
  VARIANT 91: note = Ancestral polymorphism is L, Derived polymorphism is S
MRGKKFTGSWEIPPIFSWLQQARTNDLQTSPLIFSSNYSEKHQALHWRTGHKNDCLQIISSAASNSVLPAVGIGFVRWFAKASNVHRLLVLDPLGIIKAYRGTMYRLQRSIRSIFIAEAKCSDDFVFSIVFSVIGSVCTYIDMIYGMASAIFVIFMTSFLIDVCDMNDRSF

SEQ ID NO: 10737 - protein, 735 aa, Zea mays
  VARIANT 70..735: note = Derived polymorphism lacks residues 70 to 735
  VARIANT 383: note = Ancestral polymorphism is L, Derived polymorphism is Q
  VARIANT 534..735: note = Derived polymorphism lacks residues 534 to 735
MSESESSNTAGFAAALELWQENQLRILVLISLATQCFLFVFAPLRQHRIPGPLRLSIWLAYLGSDAVAIYALATLFNSHRCDTGTGTGTARAGVELLWAPIMLVHLGGQDSIPAYNIEDNELWRRHVVTAVSQVAAAIYVFVKSWPKSMAATAAHLVVDQDTRNRINAFMAHKSEMAAYGRILGPALLLFFSGITKCVCKPWDLKRVSVNSLVDSSSSGSSEEKGDAGESEMMDSLQEYVGAAAQYFESVGHEEEEEDDDAACKADEVWKPYNLCVDLAPPYSGRLSCLKHLARSPADEAHRLVKSSLSATFHQLYTKESLKLHDMSHIVLTDNRALNRLKLVTSARGLRTVAAATLLGAIAAFYGEGDVDQDPTDVTITYALLWSAFVMECVLPTVIHHTFAWIERLFTGHRTWPDQVAQYSLMGYVARGRSHSWLMKAVACLGCGDLVDQLWTMKPRMGASSREITGLVHAHVAGAWMQGHIAGADSFRAFNDYRGQWTLGNCREIGVGVSSSMVVLMSSVSRPFDESVLVWHLATDFCFHLLQVQGDPSRANATARRCIEMSNYMAYLLFVKPEMLMPGARRKLFRDACRELVGLLEEDRPDAPRARGKRDLAHKVVQLLKRDGDDVLGSAGVGVVRRAWCVAEKLVDSHSGDEEKMWTVIQGVWVEMLCFSASRCKGYLHAKGLGTGGEYLSYVWLLLLYMGMETLAEKMQRTELYEGSTAAALSISGQNV

SEQ ID NO: 10738 - protein, 742 aa, Zea mays
  VARIANT 33..742: note = Derived polymorphism lacks residues 33 to 742
MRGPGAPLLRPAELPETPGAQPSGRSPSPGEIQPLRDVPPALHQGITELRGWKVLGTAARSLRTTLPVSTLLGAIAAFHYGGGADQVPADVTITHALLWSAIVMESGLLPTVIRHASPRIKRLFTWLRTWPDQVAQYNLMGYAARSRKHSWLMKLAACLRCRDMVDHLWTMEPCKGASSAREITGLVHAHVARAWMEDHIADADSFRAFNDYRGQWTLNNSSSLPSTVVLMSVSRPFDESVLVWHLATDFCFHFLHGDPSRVNATARRCIEVSNYMAYLLFVKPEMLMPGARRNLFKDACRELVGLLQEDRPDAPRGRGMRGLARRVVQQLKRDDDDVLASVRGLTHKLLNLLNKDDDGVLGSGGVGVVRLACCVAKDLMNSHSGNEEKIWTVIQGSDAVAIYALAVLFNRQNRQEWVSTHRSSYSLQVLQHLGGQDGITAYNIEDNELWTRHVVLTAVSQVTVAVYVFCKSWKHWILRKLPTFVKDLIDQLWCMEPYKSSSGITQLVANHVTAGWWQIHGIASYHRFNDSRGQWTLDREGLLDALGWSLNRPFDESLLLWHLATDLFCFHLATPSSTQQRQAACRSMAMSNYMAYLLFVNPEMLIAGARRSLFKDAYEELEGIIPPNEPASSSSIIRRLRETGNSGSGVAHDAWAVTQVLIGLQVGEDMEKVWRVVQGVWVEMLCFSAGRVQGLPARQEHGERRAVPVLRVAPLVLHGHGDIGGEDAEDGHGGPRKTRGWG

SEQ ID NO: 10739 - protein, 528 aa, Zea mays
  VARIANT 306..528: note = Derived polymorphism lacks residues 306 to 528
MSKTESRKLSDDYEVAEVLGRGGFSIVRRGVSKSEGKAAQQVAIKTLRRLGPATTTGGSTLPPQQGSNKGGGLVPTWKQVSSISDALLTNEILVMRRIVEAVAPHPNVIALHDVYEDARGVHLVLELCSGGELFDRIVGRDRHYSEFDAAGVVRQIARGLQALHGAGVVHRDLKPENCLFADRGEASTLKIMDFGLSSVEDFSDPVVTLFGSIDYVSPEALSRQDVSAASDMWSVGVILYILLSGCPPFHAPTNREKQQRILQGEFSFQDHTWKTISSSAKELISSLLSVEPYKRPTASDLLGHPWVIGDCAKQDLMDAEVVTKLQRFNARRKLRAAAIASVLSSKVALRTKRLRNLLGRHDLSSEELDNLRAHFARICADGENATLAEFEQVLRAMRLEALVPLAPRVFDLFDNNRDGTVDMREILCGLSSLRNSRGDDALRLCFQMYDADRSGCISKDELASMLRALPEECLPGDITEPGKLDEVFDEMDANGDGKVSFEEFKAAMQKDSALQDVVLSSLRPPPPP

SEQ ID NO: 10740 - protein, 152 aa, Zea mays
  VARIANT 13: note = Ancestral polymorphism is V, Derived polymorphism is I
  VARIANT 15: note = Ancestral polymorphism is I, Derived polymorphism is V
  VARIANT 16: note = Ancestral polymorphism is D, Derived polymorphism is Y
  VARIANT 37: note = Ancestral polymorphism is R, Derived polymorphism is K
  VARIANT 68: note = Ancestral polymorphism is C, Derived polymorphism is F
  VARIANT 72: note = Ancestral polymorphism is V, Derived polymorphism is L
  VARIANT 137: note = Ancestral polymorphism is I, Derived polymorphism is T
MVHFKNRYMVVEIFIDAGRGEQDPIILTQFNITKVIKDSIQLNFGECGLAGSLGSLQVKYVNPVTKLCIVRVSREDHQKVWAAMTMVRCIGKIPVSFNLLDMSGSIRACKKAALECDEAKFEQYKLVAGDCITAEITQSVEKCFEKIRGLES

SEQ ID NO: 10741 - protein, 360 aa, Zea mays
  VARIANT 163: note = Ancestral polymorphism is S, Derived polymorphism is L
MAVLATERCSSAAKERQDRRRSNVRPSAAEESSDRRRSNVRPSAAEDLSDRRGGNDKQQARISAISSYETLKKIGEGAYGAVTKARHIESGEIVAIKSSNVDNAGGEAEAAALLLREAAMLAACAGNPAVVQLREVARGPDMRELYLVMEYAGRSLSDAISRSRRRGGQRCFSEPEARGAMAQLLAGASTMHAHGIVHRDLKPGNVLVGEKDGRLRFCDLGLARPVDAPAADDVDRLQGTLGYMAPELLLSQDYGAPVDVWALGCIMAEIVVGEPLFAEEDLCQNLISIVHLLGISDDVSMMPLGVSPSPSSKLRERVPEELLSPAGFDVLQGLLEYDPKDRLTASAALNMPWFAAKDGP

SEQ ID NO: 10742 - protein, 817 aa, Zea mays
  VARIANT 526: note = Ancestral polymorphism is L, Derived polymorphism is P
MAAASSSGATVTARGIHIMDSPEGRMSTVPWVSLGVEGAGYEGEEDEEDDAALARARGCDVYIGHGGGVRRMVAWLRAELELLGVPCIASDRRRCFDARALATARVVMDKALAGVVVITPVSLANPYAVEEIQVFLERGALVPVFVGIRQGDFVAEDVVERRSDLWETHGGQLWKAYGGVEAEWREAVEGLARAEHAVEVRLGDLRNRVIDVLQTLGARLGRPAVAPAVRAWRAAADAEIPFPWNTCFAGRERELLDVEAMLRGSAPAAHDDKVAGKRPMPLYGSVTGALFLHGVLCISAASGTGKTELVLEFAHRHAHEYKKVLWVHGEARYLRQSYLKLADHLGVAVGDNVIQTATERARSLREIEGLAIAKIKKELTRDIPYLVVIDNLESERDWWDGRAIKELLPLPLPLGGGRTHVIITTRLPNLQGVRVLELGNLDAPNSMHLMKGARTFRDEDLAVLKDIQDKVRGVPLGLALVGSILSEIAVSPADLRQMMSDAPHRAPTWSPKDDVALHDNPGLVQLLDACFTLLRRRTPAGLGKVAGTLLEASSYFAPVPIPTAMLVHAVSACAAGKQTPWKRLTRELRRCCASPRAPLETGRVEQNALATLLRLGIARRSTRAGCVSMHGLFRTFGRKTGTGRVARAVVETVAERGDVAAQHADDHAWAACLTLFRFDAPDVPVELPPPELGRFVTRSAIPLAARSVAGYSTYGAALELLREATDVVLEAEDLYIGAPRRINDCRYVEIDPEVYKKLARARAELLVMRARIMLRAGERGVAEDHCLSAIGLLEVACGDCHPETLVARAFLEQTVRV

SEQ ID NO: 10743 - protein, 240 aa, Zea mays
  VARIANT 98: note = Ancestral polymorphism is Y, Derived polymorphism is F
MARLLPTAAAAAIVAAVLVAGLPGARAASASPAADDAPPYRNHTVGGGDGWFFDANTNASSGNYSDWAAGETFYLGDYLIFKTNDNSSVVQTTNATTYGLCDASDDLAETTSIYGGGGGGGGGLEQNSTIAVALTAEGANYFFSEADGGAQCQQGMRFEIKVEHGRGLPPSLLHQPPAPKGRVLAPPPAGTAFSGTGGVEPGDGAGDNGGAGTSGACRAASGRFLGVVAAAAAALAVLVL

SEQ ID NO: 10744 - protein, 510 aa, Zea mays
  VARIANT 445: note = Ancestral polymorphism is A, Derived polymorphism is V
MMSAANPQVKSTPLPPPAAPTAASQNPQVAASKASSSSTSAADPNPNKRTNPGNAAAASAPPEPTPSVNGEASRSPLVPSPLPHPHEQHHPPPGASPLLPPLPPSRPLLTVAAVEAVIAAIPPPPRYGLEDLDRRTVALSDGTVRTYFALPREPPPQLRQPPPPIPAHLLAPPPPPLPLPRPSLERWAPPPPMPTLLPAAGLLPLPVPKRKWEDQVNGVVPWESSVSTLQKKSEAHAAKQMKVEKQVKVEETGVDPKVLKSAFLKMVKLMNENEADKKNYWANGKLSQLKCPVCQRDSVDLHALLNHAYYAKNQEHRADHLGFHKALCVLMGWNYSVAPVHKTAYQALSTVDAEANQGDLILWPPTVIIENTYKSKNDGEKDVMSDKEVESKLREMGFAGVNVQPLPGKDGQRSVQAKFSASLDGLNNASRLAELFERQGHGRAAWARVRSAVPTGGGGDNNPMLVKVDGKGERTWVLYGYLATAWDLNVLDPESKQNATVKSRKELDLD

SEQ ID NO: 10745 - protein, 196 aa, Zea mays
  VARIANT 63: note = Ancestral polymorphism is G, Derived polymorphism is R
  VARIANT 105: note = Ancestral polymorphism is S, Derived polymorphism is F
MRPPRGRGGGGRFGGGGGRGRGGGRFSGGGRGGGGGRFGGGFRDEGPPAEVVEVSTFLHACEGEAVTKLTNEKVPYFNAPIYLQNKTQIGKVEEIFGPINESYFSVKMMEGIIATSYNEGDKFYIDPMKLLPLSRFLPQPKGQSQGAPRGGGRGGGRGFGRGRGGGSFRGGRGPPRGGGRGPRGGGRGGFRGRGRF

SEQ ID NO: 10746 - protein, 754 aa, Zea mays
  VARIANT 623: note = Ancestral polymorphism is Q, Derived polymorphism is P
MGESQSSEDASRFRALGNGVSGAGQGSAGDNELHDGSIASQAVRAYPNGGRSLVSDVGLFDTLRVGSNQYFGFSHSASGNPYDEQSLSFAFEGMGFDSRKTNSPTSHHNVPLTNGHYPSERVDGTLSQQHAPATRQCDSLGLQFSVQHAMQNNDVEHQEQSPRFPPQLGTFSRNPELHSFDRNFGVPCHPSIASASSLKMWQSQMYTPHDQNVGSNFMWQQNTGVQPYSIMQPNYACPQMQQVSGFGISRHRSNEQAAVYPPAKGPSSSYIGTPNFHWLENGYSYLNGAASQKRRNSGGLNNTFADSFPSTSYTGSSCGSGDFHHFQWAEKVFNSYGPHHQQGDNLSHPYGLGLSHHQRSDIAHPYGLGFSHHQRSDKLNTASYVERIRMRPDVGNSVNFFDLSSYARLLNSPFLSSQSDTYKSIDEVMGRVCMLSKDQDACRFLQKLLSEGTQEDIDKIFGEIIDNVGDLMVDPTAHYLVQKILEECTNDQRTHMIREITKAPIKLHKASCNVHGTRVVQKVIDTMNTPDQVSMLVSALNTGMMCLMTDSYGNHVVDHCLQKLLPEHKAFILEAAASCYLQLARDRHGCCVLQKCIGHSSDEQRNNLLCKITSSALTLSEDPYGNYVIQFILDLNIEWITVRVVDELAGHFGNLSMQKCGSHVVEHCLKLAPRLICDRIINELMHDPKLLDIILDQYGNFVIQTALKQCQGEHHAAFVETIKPHTAVMQSNMYGKKVLSRICLKNKHCRFDLH

SEQ ID NO: 10747 - protein, 67 aa, Zea mays
  VARIANT 3: note = Ancestral polymorphism is A, Derived polymorphism is V
  VARIANT 8..67: note = Derived polymorphism lacks residues 8 to 67
  VARIANT 21: note = Ancestral polymorphism is P, Derived polymorphism is L
  VARIANT 25: note = Ancestral polymorphism is A, Derived polymorphism is V
  VARIANT 59: note = Ancestral polymorphism is A, Derived polymorphism is T
MLAGLDECDSFIYGGTPAPSPACCVAYEAAFYTDPFCLSYVADGTYGHATGYVVDVAHALQILGFCG

SEQ ID NO: 10748 - protein, 115 aa, Zea mays
  VARIANT 94..115: note = Derived polymorphism lacks residues 94 to 115
MAGAGHGPPMDNELLVWFQGEATTTFGADWMSKGSSHVAATPSTTIGEQRTIEGSGHVALTRRKGGRAPCPPPVATRSLDVNLTDNSGSDDRSGTDDASASDDESGSGDEELRRK

SEQ ID NO: 10749 - protein, 840 aa, Zea mays
  VARIANT 474..840: note = Derived polymorphism lacks residues 474 to 840
MDATGAVGVGGRDGECHAAQVVGADGEMDAAAIERFAAAAGLQGRGLSYAVVSILGPQGSGKSTLLNHLFGTSFREMDALKGRHQTTKGIWIAKAAGIEPFTVVLDLEGTDGRERGQDDTAFEKQSALFALAVSDIVMINLWCHDIGREHAANRPLLRTVFQVLMRLFSPRKTTLLLVIRDKTKTPLEYLTQALKEDIQKIWDSVQKPEAYKEAALSDFFDVEATALSSYEEKEELFKEQVGQLRQRFYHSIAPGGLAADRRGVIPASGFSLSALQIWEVIRENKDLNLPAHEVMVATVRCEEIANENLKQFLSDKGWLDLNAAVESGLPPSFGMRLSAILDSYLSEYDMETMYFDEGVRAAKRQQLESSMLDHAYPVIERVMEHLHLVALDKFKGDLEQSLRHTEGFAESVRRCSQTSMAEFDAGMTVMSDPSFFYADTAVKHVQWDASKVRNKLQEHIQAHVECIRNAKLAELRANFEKKLSDAISGPVQSILETGERDSWACIRRLYRREIENAALSFSASLSEFDLDQTISNKMVSDLREYARSVVETKAREEAGNVLMRMKERFFTVLSHDKDSMPRSWMRDEDIRTITREARLGALRLMSVMAAIRLDDNPDKIERALTTALLDGGPLSHKRSIEFASDPLASSTWEEVFLPTLHLDIYGLGCSTENIFGMFYVFVQVSPKDTLITPVQCKSIWRQFKAETEYSVAQAMSMQEAQRRSKNWLPPAWTILLLAILGYNEFMFLLRNPLYLLGLFVAFLSALLTILSRLLPTIIDIMMQIINMKHKHKSPHPSRHPQHIHAQSFMNQTWGRAQVRYQSPDSPSSSSSVGSNSGDDS

SEQ ID NO: 10750 - protein, 215 aa, Zea mays
  VARIANT 48: note = Ancestral polymorphism is A, Derived polymorphism is V
MEGASRPPLLALACLWLCALLPHGASAAGECGNVSCGMGTCSESSDYAFGFACECKPGWSRYHLAGLQFPFLPCVIPNCTIHSSCQDGSSSSPAPAPSSSPPAGLPPLTVFDPCLMQYCGDGGACEKASDFAHRCSCRDGYSNLLNDTSYPCYRQCSLGPDCKGLGIDVINGSTPSSSPPAPFSFTVKKSGAGAAAAPAGTLLALLAFFGLQAIW

SEQ ID NO: 10751 - protein, 388 aa, Zea mays
  VARIANT 143..388: note = Derived polymorphism lacks residues 143 to 388
  VARIANT 61: note = Ancestral polymorphism is G, Derived polymorphism is R
MASSLPDHLVEEILVRLPQDEPVHLERASLVCTSWRRVLVSDRDCFLRRCRGFHGAPPLLGYFDLSYGNDAKRFVPATSTTSPVRMAALHRRRWSAVDCRHGRVLIHYEDEDRSKRGFIVWDPLTGRQQHLGMPSASYPSHVCLNTSYTGAVVCAKDDGGCDHLDCQAAGPFRVVCLETNLLRPIFVCVTSYSSLTGEWNAPAPKPNHDNHDFLRGHAKQSLLVGDAIYFLFQDDRTILRYDLGRHRLSEMDLPPFMWNATLMTAEDGGLGLAALPNNDIHTWSWHDDDGSGGGCWVEQRVIELETLLPRRMRNKCRRVVGSAEGTSTVFVDISFGTLFVLDVKSKKMSKKFRKRNNGGLFEYVLPYVRFYAPSEDLAIKGQLPPRAI

SEQ ID NO: 10752 - protein, 386 aa, Zea mays
  VARIANT 12: note = Ancestral polymorphism is E, Derived polymorphism is K
MASSLPDHLVEEILVRLPQDEPVHLARASLVCTSWRRVLVSDRDCFLRRCRGFHGAPPLLGYFDGSFYLRYCNDAKRFFPATSTTSPVRMPALHRRRWSAVDCRHGRVLIHYEDEDRSKRGFIVWDPLTGRQQHLGMPSASYPSHVCLNTSITGAVVCAKDDDGCDHLDCQAAGPFRVVCVETNLLRPILTCATSYSSLTGEWNAPAAKLNHDNHDFLRCNAKQSLLVGDAIYFLFQDDRTILRYDLGRHRLSEMDLPPFMWNATLMTAEDGGLGLAALPYNDNRIHTWSWHDDDWVEQRVIELETLLPRRMRNKCRRVVGSAEGTSTVFVDISFGTLFVLDVKSKKMSKFRKRNGGLPVYVLPYVRFYAPSEDLSIKGELPPRAI

SEQ ID NO: 10753 - protein, 127 aa, Zea mays
  VARIANT 30: note = Ancestral polymorphism is M, Derived polymorphism is L
MGAVSCRRRTSRRRCHAAALLAAAIFAAALVVAAGRRPIRLPAAALARRRVDSSTAIAAAADEVLPAARRRWLLAGPGSSPPTCRARCGRCAPCRATRVAIQPGVGPQWEYYPEVWRCKCGNKLFMP

SEQ ID NO: 10754 - protein, 536 aa, Zea mays
  VARIANT 442..536: note = Derived polymorphism lacks residues 442 to 536
  VARIANT 302: note = Ancestral polymorphism is G, Derived polymorphism is E
  VARIANT 301: note = Ancestral polymorphism is H, Derived polymorphism is Y
MEEFATPHYYGCCALCIFLLFLVLAVVGAKPGTIKKLRPNLPPGPWQLPVIGSSHWLLSRLPPHRRMRDLSLRHGPIMQLRICERAVVVVSSAEAAEAVFRDAAFEQRPTSPALDELYSRYGMGIVFAPYGDHWRLLRRVLVNELLSAQRVESFRRIREQEAARLVSSLQQAAASAPGQLANIDERLAAFVTDSAVRAIFGDRTMPDRAALLDTVEQALDFSSLFDLRDLFPSSWLARMLPRNGKAERNRLAVVRLMEGILRLHEERRSSTGQADDGQDMVDVLLRIRNDEGAMGSISLTHGIIVNMLMDVFVAAIKATTCTLRWAMAELMANPRVMEKVQSEIQRVLAGQDRVREEALRDLGYLRAVIKETLRLHPTIPLVPRICTQDDRKIQGYDVPKGTILVANVWAISRDPKYWHSRRQDDDDDPDKFVPERFEAAEQAFSFTGSDLEFMPFGAGRRICPGIAFSQANTEIALASLLYHFDWALPAGRVRPEELDMTDSCGLEVRRNAELLLRPIPRRVRIPQQVADEIYIG

SEQ ID NO: 10755 - protein, 756 aa, Zea mays
  VARIANT 162: note = Ancestral polymorphism is Y, Derived polymorphism is N
  VARIANT 468: note = Ancestral polymorphism is S, Derived polymorphism is L
MWRLKIGGEGGGPWLRSASGFTGRQVWEFDPDAGTQDEIAEVERLRREFTERRRFDKRAVAQDLLLRMQYAKQDHLKMDIGPAAGVNKLGHGAAVTEETILASLRRALAQYSTLQAHDGHWPCDYSGVMFIMPIMVFALHVTGSLNTVLSAEHRHEICRYIYNHQNEDGGWGMQEVGPSTMFSSCLNYVTLRLLGEACAQHDALAKGQAWILSHGSAAAIPQWGKIWLSVIGLYDWNGNNSIVPELWLVPYSLPFHPGRFWCFCRLIYMPMAYLYGKKFVGPITPTILSIRNEIYKIPYDEVDWNKARDTCAKEDLLYPRTFVQNVIWTCVNKIVEPLLNLWPAKMLRDTALKNIMNHIHYEDESTRYLCVCPVNKNPNSDAFKRHLPRIYDYIWLAEDGMKLKVYDGTQAWDTAFIVKAYCSTDLVHEFSPTLRKAHEFIKSLQIPENQPDHENYYRHRSKGSWAHSTLDNGWSVSDSTAEAIQALLLLSKFSSNLVGDPIKEERLFDAVDCLLSFMNKDGTFSTYERKRTASLLEVLNPSETFLNIVVDHPSVECTSSAIQALVMFREMYPRYRDQEIKKCIKGASKFIESKQQKDGTWFGTWGVCYTYGTLFAVQGLVVAGRTYENSSSIRKACRFLLSKQLITGGWGETYPSNGTAVYAEASSPHVVNTAWAMLALIYAGQVQRDPTPLYGAAKELINMQQESGEFPQQEHIGSFNCSFYFNYGNYRNLFPIWALGEFRRRIVAEKKRNQQT

SEQ ID NO: 10756 - protein, 73 aa, Zea mays
  VARIANT 17: note = Ancestral polymorphism is S, Derived polymorphism is C
  VARIANT 25: note = Ancestral polymorphism is A, Derived polymorphism is V
  VARIANT 26: note = Ancestral polymorphism is T, Derived polymorphism is M
  VARIANT 44: note = Ancestral polymorphism is H, Derived polymorphism is Y
MTTVSRRTVATHLAGVSSSSSVSNATFALLLQSLLTRMISTDFHKECRHLRSHPLLRRTHGYGVPQTGILFIH

SEQ ID NO: 10757 - protein, 907 aa, Zea mays
  VARIANT 20: note = Ancestral polymorphism is L, Derived polymorphism is Q
  VARIANT 23: note = Ancestral polymorphism is P, Derived polymorphism is T
  VARIANT 38: note = Ancestral polymorphism is R, Derived polymorphism is W
MCHEEALLLRVGLQGDQAPLRAPLMAAPREGEALQVLRPCRRRLLHNWRIEMFILFCLCRREALMKMPEPAVLPYFKPANYVDILAQIHEELESCPPDEKSCLYLLQFQVFRGLGEAKLSRRSLQSAWEKASTIHEKLIFGAWLKYEKKGEEAISDLLSSCCKCSQEFRLLDFVSQVSTGSHMMNYDDDDDESDEFRGSAVVHFRIRDDMIACDRRKLAALSTPLYAMLNGGFRESYLEVIDMSRNGISPIGMRAISKFSLSGRLPYLSADAILEMLDFANKFCCKGLKDACERKLASFISSRQDAIDFMECALELGCSILAASCLQVLLNELPECLNDEQVVRIFSSANKAQRLTMVGNASFSLYCLLSEVSVSTNPTSDVTVSFLEKLVESASDSRQKQLALHQLACTRFLRKDYPESECLFNAAFSAGHLYSLVGLARLASLRGNKHFALKLLDSVMSSRWPLGWMYQERALYLDGDNKLENLNKATELDPTLTYPYMFRAASLMKRQSVEAALMEINRILGFKLVLECLELRFCCYLALEDYRAALCDVQAILTLAPDYRMIGGRVAAKQLRMLVLENVEQWTPADCWMQLYDRWSSVDDIGSLSVIYQMLESETAKGVLYFRQSLLLLRLNCPEAAMRSLQLAREHAASDHERLVYEGWILYDTGHCEEGLQKAEASIAIQRSFEAFFLKAYALADSSLDPSTTATVVSLLEDALRCPSDRLRKGQALNNLGSVYVDCGKLDLAAECYINALKIGHTRAHQGLARVHFLRNNRVGAYDEMTKLIEKARNNASAYEKRSEYCERELTKTDLQMVTKLDPLRVYPYRYRAAVLMDNHKEKEAVAELTRAIAFKADLNLLHLRAAFHEHIGDISSALRDCRAALLVDPNHQEMLELHHRVNSQEP

SEQ ID NO: 10758 - protein, 184 aa, Zea mays
  VARIANT 137: note = Ancestral polymorphism is A, Derived polymorphism is T
MGAWMSRVWFLMFPAREYKLVVVGLDNAGKTTTLYKLHLGEAVTAAPTIGSNVEEVVFKNLRFEVWDLGGQESLRTSWATYYRGTHAVIVVIDSTDRARINIIKDELFRLLQHADLEGAVVLVFANKQDLKDAMAPAEITDALSLHSIKDHDWHIQASCAITGDGLYDGLGWIAQKVAGKATAS

SEQ ID NO: 10759 - protein, 66 aa, Zea mays
  VARIANT 33: note = Ancestral polymorphism is R, Derived polymorphism is L
MGLAHGDGATEVACNLLHPDAVGADQVQERVSRLAAGLGVGVGQGYFTDLSREKVVELYLQAAQAA

SEQ ID NO: 10760 - protein, 154 aa, Zea mays
  VARIANT 88..154: note = Derived polymorphism lacks residues 88 to 154
  VARIANT 71..154: note = Ancestral polymorphism lacks residues 71 to 154
  VARIANT 45: note = Ancestral polymorphism is V, Derived polymorphism is M
  VARIANT 40..154: note = Derived polymorphism lacks residues 40 to 154
  VARIANT 27: note = Ancestral polymorphism is V, Derived polymorphism is L
MTVGRSASGAAWPRWWAVGAKAGGEVLHGARAQRGEWEEQGHRPMFLPGAKKLWGAANGDFKKRSGIWWISSSRTLAPTERLSLRADWRPQNTSAPRGQCRRWSGSPFPHEADTRLHLGVPRLRLERMEGNVERRAGVLPDRGGVGDAVLRLLR

SEQ ID NO: 10761 - protein, 299 aa, Zea mays
  VARIANT 205..299: note = Derived polymorphism lacks residues 205 to 299
MADKADWCDANVRHFIDVCKGEIDAGNRPMGMFTKTGWKNLRTKHEEKTGQKLTKKQLKNKLDNMKKEYTWFMEFKNYATGLGWDEAKQTVDCSKEWWDEHLARCNNPGKGIKCNHVRFRKQGPKHLDDLHILFDKVHVSGATASCPGDISSDESSDDDVVEVQKTIDNVDVKLAALKKSKLGKRKRKDCSTATEEKDEKSPFFRLYKNTCLKIETAAEKISTSVEASSTPPTNPVPSIAEAMKMVKDCGVQEKTALMHTATFLIVKPEFREVFSLLETNEGRLDLLEREHEKESIKRM

SEQ ID NO: 10762 - protein, 120 aa, Zea mays
  VARIANT 10: note = Ancestral polymorphism is S, Derived polymorphism is F
  VARIANT 14..120: note = Derived polymorphism lacks residues 14 to 120
  VARIANT 17: note = Ancestral polymorphism is K, Derived polymorphism is E
  VARIANT 28..120: note = Derived polymorphism lacks residues 28 to 120
  VARIANT 53: note = Ancestral polymorphism is L, Derived polymorphism is S
  VARIANT 60: note = Ancestral polymorphism is C, Derived polymorphism is Y
  VARIANT 63: note = Ancestral polymorphism is L, Derived polymorphism is F
  VARIANT 64: note = Ancestral polymorphism is D, Derived polymorphism is H
  VARIANT 72: note = Ancestral polymorphism is T, Derived polymorphism is M
MVLLDILRASVCNQSPKMEMIDSLFKPREAKDDGLIRDGVSESQFNQVLNIELQQIIEACKFLDEKWNPKFTLIIDQKKHHTKFFIPRKPDNVPPGTIVDNKVWHPKNFDFYMCSHAGMV

SEQ ID NO: 10763 - protein, 53 aa, Zea mays
  VARIANT 33: note = Ancestral polymorphism is R, Derived polymorphism is W
MLGSRFGSSSAYASNSDLCGPPSESECGVYRRRRRRQRVQRLALLFVFRVVVA

SEQ ID NO: 10764 - protein, 910 aa, Zea mays
  VARIANT 383..910: note = Derived polymorphism lacks residues 383 to 910
  VARIANT 206: note = Ancestral polymorphism is G, Derived polymorphism is R
  VARIANT 158..910: note = Derived polymorphism lacks residues 158 to 910
  VARIANT 60: note = Ancestral polymorphism is G, Derived polymorphism is V
MAEAIILALRKIGSALADETAKKMLAKLSEKVNNLRDLNDKIESIRMQLTAMNNVIRKIGTVYLTDEVVRGWIGEVRKVAYHVEDVMDMYSYHTLQMEEEWFLKKYFIKASHYVLVFSQIAEEVIKVEKEIKKVVELKNLWFEPSHLVADQLIEMERQRSHDNYPLLFKDEDLVGIEDNRRRLTEWLYSDELDSTVITVSGMGGLGKTTLVTNVYEREKTNFSATAWMVVSQTYTIEALLRKLLMKVGREEQVSPNIDKLDVHDLKENIKQKLDNRKCLIVLDDVWDQEVYLQMSDAFQNLQSSSIIITTRKNHVAALAQPTRRLVVHPLRNTQAFDLFCRRIFYNKEDHACPSDLVEVATNIVDRCQGLPLAIVSIACLLSSRTQTYYIWKQVYNQLRSELSKNDHIRAVLNLSYHDLPGDLRNCFLYCSLFPEDYPIPHESLVRLWVAEGFALSKENNTAEEVAEGNLMELIHRNMLVVVENDEQGRVSTCTMHDVVRDLALVVAKEERFGTANNYRAMIQVDKDKDVRRLSSYGWKDSTSLDVRLPRLRTLVSLGTISSSPNMLLSILSESSYLTVLELQDSEITEVPGSIGNLFNLRYIGLRRTKVRSLPDSIEKLLNLQTLDIKQTKIEKLPRGISKVKKLRHLLADRYADEKQSQFRYFVGMQAPKDLSSLVELQTLETVEASKDLAEQLKKLMQLRTLWIDNITNADCANIFASLSSMPLLSNLLLSAKDENEPLRIEALKPGSTGLHRLIIRGQWAQRTLQCPIFQGHGRHLKYLALSWCHLSEDPLEMLAPHLPNLTNLRLNNMRSASILVLPPGSFHNLKLLVLMHMPNVKQLVIGEGALQCIEGLYIVSLVELDKVPQGIESLRSLKKLSLVKLHRDFLTEWNNSGMHQKMQHVQEIRV

SEQ ID NO: 10765 - protein, 281 aa, Zea mays
  VARIANT 24: note = Ancestral polymorphism is R, Derived polymorphism is H
  VARIANT 35..281: note = Derived polymorphism lacks residues 35 to 281
  VARIANT 48: note = Ancestral polymorphism is S, Derived polymorphism is L
  VARIANT 52: note = Ancestral polymorphism is R, Derived polymorphism is W
  VARIANT 86: note = Ancestral polymorphism is R, Derived polymorphism is M
MREMKVQKLALNISVSESGDRLTRAAKVLEQLSDQSPVFSKARYTVRSFGIRRNEKIACYVTVQGEKAMQLLESGLKVKENELLRRNFSDTGCFGFGIQEHIDLGINGYHKKYTSRSSKVQASEKKQSNPMREMKVQKLVLNISVGESGDRLTGAAKAEHVLFTAGQQTPGSNVMYESIIRMEMFFGSFLSESVSPQNLFGHLDVERCPFLRNINGATTFSLSSALPVAAQGGKGPIFEEGSGFESAFKLFHGRDGIVPLSERSYVSDENHNESIDVKLYT

SEQ ID NO: 10766 - protein, 1120 aa, Zea mays
  VARIANT 505..1120: note = Derived polymorphism lacks residues 505 to 1120
MLPPCLAASALPIKEAVTEIEQLKVRVEDVSRRNSRYSLISDSGSKPIMQQQTAPKTIFGTMVLDMMVEARDTAKRQQGLGDLTQLLTKEQADLGVISVWGTGSELGTTSIIRKAYQDPELCQKFECRGWVKLTQPFNPHEFLRSMVAQFYANSCLQNGMVINVDELKRIEEMATTGGGLIGAFMDKVNENRYLIVLENLSTIGDWDTIGTYLPDRKNGSRVIVSTQQCEIASLCIGHSYQVAEVKQYSAEHSVCVFFEEGLQGNGDKSMESDRVVDNNNEMSMQDEITHGTGFLSDRIPTSKRKDASDWVKNFQLVERKSEMNQLGNYIAKARVYGLQILSVWGIAGVGKSALVRNMYFDRIHRNDQLFEKYGWVDVTHPFNLRDFSRSLLLDFHSEPVQAMGIKDPTQECHKILEDNRCLVVIDDLQSIEEWDLIQAALVSRPSRSIIIVITTEASIATYCADNEGVVFNVKGLEDKAALKLFKKQVHRQKPSSPIKDSIDEELQELILKCGGLPKVIVAVANFLAPKTVSWMDSASSMNLKFMQELESSPEFACLQPLFGWLHSYFRTCPDFLKPCIFYLSIFPRDHSIRRRRLVRRWIAEGYARDTDKISAEERGEQFFCRLLDLSIIMQKPYSVTTGFRDSRMTLCQVNSFVREYIISRQMEENLVFELGGSCTLTSQRMGRHLIILKSWDRDRIVFESIDFSRLRSLTVFGEWKPFFISDRMRLLRVLDLEDASDLKDEDLKQMMKLLCRLKYLSLRGCTGIYSLPNSLGCLRQLETLDVRHTAIATMPRTITKLKKLQYLRASTTKPTKEQPTPDTAVTPKPTKKQPNPHTSVSWTSSLFHRHRQLEGVVVPTGLEKLTALLTIGVVNVNSARGRSILKEVRKLTQLRKLGVSGISRNNSKDFCLAISSRAHLDSLSVKLKKDNQDCLCVTPDGYLPPKNLQSFKLYGLADSFPKWINQLENLRKLVLEMTILTQDTIKGLKDLKVCILRLITKQLPDGKLNFCVMLHGQQLRCYETVKILEISCSSSLDVAFGSQSLQNLELLKVSCCSGSGSVMKLSGLEKLSESELKEVQIKGSDDFIVKTDVEEQLARHPKKPVLKVEKVLSSTGDFEL

SEQ ID NO: 10767 - protein, 722 aa, Zea mays
  VARIANT 135..722: note = Derived polymorphism lacks residues 135 to 722
  VARIANT 171: note = Ancestral polymorphism is P, Derived polymorphism is L
  VARIANT 177..722: note = Derived polymorphism lacks residues 177 to 722
  VARIANT 195: note = Ancestral polymorphism is M, Derived polymorphism is K
  VARIANT 198..722: note = Derived polymorphism lacks residues 198 to 722
  VARIANT 211: note = Ancestral polymorphism is H, Derived polymorphism is Y
  VARIANT 218: note = Ancestral polymorphism is G, Derived polymorphism is E
  VARIANT 229: note = Ancestral polymorphism is I, Derived polymorphism is S
  VARIANT 291: note = Ancestral polymorphism is S, Derived polymorphism is N
  VARIANT 293..722: note = Derived polymorphism lacks residues 293 to 722
  VARIANT 294: note = Ancestral polymorphism is T, Derived polymorphism is I
  VARIANT 303: note = Ancestral polymorphism is P, Derived polymorphism is S
MRRGLGSEASLRRRRGPARLWVAVAALVVGTVCLFSSSSVGLLGASYRVQDVDVNKLWRTADSNGWRASSAPRTYWPPPPTESESNGYLRVRCNGGLNQQRSAICNAVVAARIMNATLVLPELDTNSFWHDERIQELEVKEALKRMKVCKMMGPDGIPIEMADEWRSTLVPIFKNKGDIQSCSNSRGIKLMTHTMKLWERVIEHRLRGMSHITMNQFGFMLRRSIMEAIFLIRQVMEQYKEQKDSHIVSIDLEKAYDKILRNIMWWALDKYKVPTKYVKLIKDMYNKVVTSVRITDGDINVFPINIGLHQGLALNPYLFALVIDEVTRDIQGDIPCGFVGIYDVPHFIKTLKYDVRIVMSIPEITTNGKTKKLKGQQLRPPRDAPVSWYATDALETMKKYGAIYLSPFSHRLAEDIDNPELQRLRCRVNYHALRFKPNIMKTSSEIVNKLRSEGHFMSIHLRFELDMLAFAGCFDIFKPQEQKILWKYREEHFAEKELIPMKIRLKGKCPLTPEEVGFILRAMGFDNRTRIYLASGELFGGKRFMKPFKTMFPRLENHSTVGPGKLEENTQGLAGSAVDYMVCLLSDIFMPTYDGPSNFANNLMGHRMYYGFRTTITPNRKALAPILIDRMEGRHIGFERIRRVMSNTHFGAPHKRVHPESFYTNSWPECFCQTDAKNHADRCPPDNINDVLESQFQSEEEMEEARASNQTDPSSQIEELTI

SEQ ID NO: 10768 - protein, 636 aa, Zea mays
  VARIANT 23..636: note = Derived polymorphism lacks residues 23 to 636
MGAAPPGACARSLVLADPLQHCQVQKKSQTSPLMNSNNKELEQLILKCGRLPKVIVAVAKFLAPKTVTCMDSTKTLNHRFMQELESNPEFSVLQDLFAWMHSYFRACPDFLRPCIFYMSIFPGSQIIRRRRLVMRWVAEGYSRDTKDITAEEKGEMFFSMLVNLSMIQPPTCRVITDMKMVLCQVSAFFHEYIISRPVEENIIFALEVFALKGRCLPTTGRTGRHLVIERCWDRDRIVFESIDFSRLRSLTVFGQWESFFISKSMKVLRVLDLENATGVTDKDLEQMVKLLPRLKFLSLRGSTGICHLPSSLGELRQLETLDIRGTFIAKLPASITKLKKLQYMRAGTISLAKESSTSYSSASRLPNLCKSCKLVGVEMPSGIDELTPLHTLGVVNAGIGGGKATLKELKKITQLRKLGVSGVNKKNNKEFCAAISCHVRLESLSVWLSKGNQGLNEISSQDKPLQNLQSLKLYGLGSEVPAWMKDLPKLTKLDLHMTISAEVDIIKVLGEIKELCTLRLCVKPLQDGDGKLDFCVWVNGIQQRCYLNLKILEITCSSKLNISFGSEAMQNLELLRARCCSGSTLKFMEIKNLSKQKLKEVQLIGSHDTALKDDMEKQLKEHPRKPPLKLEEPEGC

SEQ ID NO: 10769 - protein, 434 aa, Zea mays
  VARIANT 246: note = Ancestral polymorphism is I, Derived polymorphism is F
MRKKGRAVPEWLNSPIWSATPPAPAQPDPYGADLAPPPPPKPPPPPATASPVPPPPSYEQAVGVGGGRREEEDDEGAGAVIRAHLLSDFKAALSKKVVNMGELRRLACLGVPDGGTGVRPVVWKLLLGYLPTDRSLWTYELEKKRSQYSAYREEFLLNPSEKLRMIEETKLSRKKDTSIERIGFLSRFEVTNEEHPLSSGKSSLWNQYFQDSELLEQIDRDVKRTHPDISFFSSKSNQESLRRILIIFSKLNPSIRYVQGMNEVLAPLFYVFKNDPDPSNSASAEADAYFCFVELLSGFRDNYCKHLDNSSVGIRSTLSKLSQLLKRHDEELWRHMEVTTKVYPQYYAFRWITLLLTMEFSFNVCIHIWDAILGDPEGPSDTLMRICCAMLILVRKRLLAGDFTANVQLLQHYPATNIDHLLHIANRLRGTVPG

SEQ ID NO: 10770 - protein, 443 aa, Zea mays
  VARIANT 101..443: note = Derived polymorphism lacks residues 101 to 443
  VARIANT 184: note = Ancestral polymorphism is V, Derived polymorphism is L
  VARIANT 283: note = Ancestral polymorphism is G, Derived polymorphism is A
MAAIAEDRQPQHGVNREAATKAVHTQLQMERSDEGDSRSQEEGSYCYCLVKSVSHLSRNNRGFTTLPERYVLPPSDRPDDDGLGRVKLPVVDLARLRDPAYRASELDTLDAACRSSGFFQASTLHAQACHLLGRVCIHTDRPKIKAHACICMYVRVQVVNHGVAPELVEGLLDVARRFFELPLVGRARYMSPDVRAPVRYGTSFNQAKDAVLFWRDFLKLACQPLHAVVASWPDEPADLSWIVYSRACREVAARYAMANQQLFMQLMGAALEALGIPCHRSQGLLRELEAGYSQIMLNCYPACPQPDLTLGLPPHSDYCLFTLLLQDQVKGLQVLRRGHWFTVDAAPGSIIANVGDHLEIYSNGLYKSMLHRVRVNSTQTRISVASFHSVPAERVIGPAAELVDEANPRRYMDTDYATFLNFLASAEGKHKTFLQSRKLPMLS

SEQ ID NO: 10771 - protein, 418 aa, Zea mays
  VARIANT 321: note = Ancestral polymorphism is S, Derived polymorphism is L
MTTRSSMLVLTMISFLLTLPPAYSQHQVFRATMTRHEPTINFTRAAHRSRERLSILATRLGAASAGSAQSPLQMDSGGGAYDMTFSMGTPPQTLSALADTGSDLIWAKCGACKRCAPRGSASYYPTKSSSFSKLPCSSALCRTLESQSLATCGGTRARGAVCSYRYSYGLSSNPHHYTQGYMGSETFTLGSDAVQGIGFGCTTMSEGGYGSGSGLVGLGRGKLSLVRQLKVGAFSYCLTSDPSTSSPLLFGAGALTGPGVQSTPLVNLKTSTFYTVNLDSISIGAAKTPGTGRHGIIFDSGTTLTFLAEPAYTLAEAGLLSQTTNLTRVPGTDGYEVCFQTSGGAVFPSMVLHFDGGDMALKTENYFGAVNDSVSCWLVQKSPSEMSIVGNIMQMDYHIRYDLDKSVLSFQPTNCDSV

SEQ ID NO: 10772 - protein, 545 aa, Zea mays
  VARIANT 399: note = Ancestral polymorphism is G, Derived polymorphism is V
  VARIANT 371: note = Ancestral polymorphism is W, Derived polymorphism is S
  VARIANT 295..545: note = Derived polymorphism lacks residues 295 to 545
  VARIANT 287: note = Ancestral polymorphism is L, Derived polymorphism is I
  VARIANT 282: note = Ancestral polymorphism is V, Derived polymorphism is L
  VARIANT 239: note = Ancestral polymorphism is T, Derived polymorphism is I
  VARIANT 209..545: note = Derived polymorphism lacks residues 209 to 545
  VARIANT 175: note = Ancestral polymorphism is C, Derived polymorphism is F
MSSTAAVALNRRTRSRPPSVASSRRSDDPTAAGAGAPANGNGKVSTKPASPDHTSGERTVKKLRLSKALTIAEGTTVSEACRRMAARRVDAVLLTDAGGLLSGIVTDKDIATRVIAEGLRVEQTIISKIMTRNPSYVMADTPAIEALHKMVQGKFRHLPVVENGEVIAMLDIAKCLYDAISRLEKAAEQGSALAAAIEGVERQLGGNFSGPHNLLETLRERMFKPSLSTIITENTKVATVSLSDPVCVATRKMRDLRVNSVIIMAGNSLHGIFTSKDVLMRVVAQNLSPELTLVEKVMTAHPDCATLDTTILDALHIMHDGKFLHIPVLDGDGQVAACLDVLQLTHAAISMVEGGPGGANDVANTIMQKFWDSALEPPDEDFDSHSELSLVVPSDAGDGRSCIYPPAVGNSFVFKLQDRKGRMHRFTCGSESLDELMSSVIQRLGMGDEKSVIQLLYEDDEGDKVLLTTNSDLTGAVLYAKSSGLKALRLHIDDSDSSNEVTQPLPELASSPHGSQSMHVHYGLMACAIALTGVAVMVYMRHSKA

SEQ ID NO: 10773 - protein, 387 aa, Zea mays
  VARIANT 22..387: note = Derived polymorphism lacks residues 22 to 387
MDAPSSSTSTSTNSSRSASEQQHHHQQQQQRYHHHHQAAGHQPFYYAAASAAGMAQFMGSRAIAPAVPVDVQLAQQQQQSSAAAAAAPAGSSGAAADKTKAVVPAAAAGSKRPTKDRHTKVEGRGRRIRMPALCAARVFQLTRELGHKTDGETIEWLLQQAEPAIVAATGTGTIPANFSSLAVSLRSAAGASHPSSASRAVAFHHLPPPQHEVAAMLGWNHHHPHQQQQQQLLPPPPQQQAPQDPGAGEFMRKRYREGDDDLFKDPAARQHHPDGGDAEEHKARVTPATAMWAVAPNSAGAGAFWMQPTWAFGGGGSTVQAPLQFMSTRSANNFPAGTTMDANIGMLAALNASGGVQQQDEGQTREMAQRHRGANGGDAGRGAASPQ

SEQ ID NO: 10774 - protein, 114 aa, Zea mays
  VARIANT 3: note = Ancestral polymorphism is L, Derived polymorphism is S
  VARIANT 4..114: note = Derived polymorphism lacks residues 4 to 114
  VARIANT 12: note = Ancestral polymorphism is Y, Derived polymorphism is H
  VARIANT 24: note = Ancestral polymorphism is G, Derived polymorphism is C
  VARIANT 31: note = Ancestral polymorphism is V, Derived polymorphism is G
  VARIANT 34: note = Ancestral polymorphism is W, Derived polymorphism is L
  VARIANT 36: note = Ancestral polymorphism is D, Derived polymorphism is E
  VARIANT 44..114: note = Derived polymorphism lacks residues 44 to 114
  VARIANT 47: note = Ancestral polymorphism is T, Derived polymorphism is I
  VARIANT 50: note = Ancestral polymorphism is G, Derived polymorphism is D
  VARIANT 77..114: note = Derived polymorphism lacks residues 77 to 114
MLLSFLPPITFYMEGPWAAMATTCIFLAAVVTDWLDGYIARKMQLGTPFGAFLDPMADNLQESRNLIRVLRFEALPSSGKEAIELLDILLRNDVSESQFNLVLNIELQQIIDGD

SEQ ID NO: 10775 - protein, 260 aa, Zea mays
  VARIANT 94..260: note = Derived polymorphism lacks residues 94 to 260
  VARIANT 91: note = Ancestral polymorphism is Q, Derived polymorphism is K
  VARIANT 35..260: note = Derived polymorphism lacks residues 35 to 260
  VARIANT 34..260: note = Derived polymorphism lacks residues 34 to 260
  VARIANT 8: note = Ancestral polymorphism is C, Derived polymorphism is Y
MGTAHCACFDGATGGRWPRTPGPGTAPSRPASTWRRRGQSSWCTAPVRACTPRPCPNSPPCLGEVVATTLREMATSNPSRGMAQRFNRLGQRRWHQPAVCSQAAVRNNGGLIKEAKAIIRLFPIWAACLLYAVAYSQSSTFFTKQAATLDRRIGRHVQVPPAALQSFISVTIVVIIPIYDRVLVPVSRRYSGKPSGITMLQRIGTGMFLSLLSMVIAALVENRSCDLEAATWRLHPSYGRAIRCYLVDLRSIQARKWRWC

SEQ ID NO: 10776 - protein, 363 aa, Zea mays
  VARIANT 48: note = Ancestral polymorphism is R, Derived polymorphism is H
  VARIANT 75..363: note = Derived polymorphism lacks residues 75 to 363
  VARIANT 86..363: note = Derived polymorphism lacks residues 86 to 363
  VARIANT 167: note = Ancestral polymorphism is L, Derived polymorphism is Q
  VARIANT 183..363: note = Derived polymorphism lacks residues 183 to 363
  VARIANT 203..363: note = Derived polymorphism lacks residues 203 to 363
MPLLGLLVAISLNVVATTSPKHGGEFGHGRGVQARTGAVHHELCPRLRHVDAGRLGAVPGPGVRGHRPPVAPSKQAQWAVPMSALQERIVQGKGEQGHGEAVVDAHWHEHDNVNDFEQSHLKAPEFELAVESLPNAPVTEAVVRNNGGLVKEAKAIIRLFPIWAACLLYAVAYSQSSTFFTKQASTLDRWIRRHVQVPPAALQSFISVTIVVIIPIYDRVLVPVLRQTIRDHHAAVHRHGDVPLALVHGDRGARRESELRSGGRHMEALPFLRESHSMLPRRPTIYPGTKMALVQVCVCAWCGARGEGRGGGRLWRGGALSLPVGWGNGMGFPVGVDSGRYRRPSIARIHGMVQEFHGWRSEE

SEQ ID NO: 10777 - protein, 306 aa, Zea mays
  VARIANT 4..306: note = Derived polymorphism lacks residues 4 to 306
  VARIANT 92..306: note = Derived polymorphism lacks residues 92 to 306
  VARIANT 112: note = Ancestral polymorphism is P, Derived polymorphism is L
  VARIANT 134: note = Ancestral polymorphism is T, Derived polymorphism is I
MNLENVEPHMLGSCKKVSAALDALVNIAGGRINIHVLMALAAFASIFMGNALEGGLLLVMFNLAHIAEEYFTSKSMFDVRELKENHPEFALLLETSGEESVQFSNLSYTKVPVHDLEVGSHILVRAGEDGLKRTVESYPHLQAQNHRSISKASIFLGNGNLAKTVLWEDAKQTVTVLLLLAVIYYHLFTCGYTFITAMAKLLSLTALFLFIHGMLPSNLYSPLFSFSFVEFTYYQMINWFGHKVSLSLLVVSILSSMSSQAAFIIGTALVFTGFKAYEKWEDSIDSMVGDAYTILLHFGSAKKSSS

SEQ ID NO: 10778 - protein, 118 aa, Zea mays
  VARIANT 39: note = Ancestral polymorphism is A, Derived polymorphism is V
  VARIANT 92: note = Ancestral polymorphism is C, Derived polymorphism is R
  VARIANT 106: note = Ancestral polymorphism is F, Derived polymorphism is S
MFHPWFNRFLLEFVGRATSTHHRLCAPSLLRSFLPFFRAKPPSTQAVWPDATSLMVGAGRRGGFGGPRFDVQRATWRWLTSSSTASCSYNYCWPYREMLGLLYQLFKAWTLYNYMFLS

SEQ ID NO: 10779 - protein, 565 aa, Zea mays
  VARIANT 323..565: note = Derived polymorphism lacks residues 323 to 565
MASVAGSGGGASAGAGGLKTYFKTPEGRHKLQYEKTHSPAVVHYNHNGKTVAQMTVAYLKEKPAGQGSTPSTPSAGSGMRSAAARLLGTGNGSRTLSFGSNGTSRAVSGSSRMGGGIGVSTSASGSQGMANYDGKGSYIIFNTADTLFISDLNSHDKDPIKSIHFSSSNPLCHAFDPEAKDGHDLLIGVFSGDVYSMSLRHQLQDPGKKPVSYQHFVNKDKDKDKDPSQGGAASSQCTCVAWVPEREGIFVVSHADGNLYVYDKFKDGNTDWTFPTVKDQSQVLISHAKSSKGNPIARWHICQGAINGISFSPDGAYLATVGRDGYLRVFDFTKEQLIFGGKSYYGALLCCSWSADGKYLLSGGEDDLVQVWSMDDRKIVAWGEGHNSWVSAVSFDPCWSQPNSDETEENVMYRFGSVGQDTQLLLWDLALDEIAVPLRHPSGGSPTFSSGSPSAHWDNACPPTGVLQPSPRMRDVPKLSPLVAHRVHVDPLSGLEFTSESIVTICREGLIKIWARPIHSENNQQPDSSEQVIGSATAKDKMLTSSNKAGAFSSSFKQPPSVLFT

SEQ ID NO: 10780 - protein, 196 aa, Zea mays
  VARIANT 131: note = Ancestral polymorphism is R, Derived polymorphism is C
MDPNYESAEETDEKRTVGKSVDRTRPDTTISRRISRYLSTMQNHPQKVSDCSHHPKNLSTKSTICGSGARSLENSTANRTMYEAGSLSSSGVTMSNDTEPEKVWHYKDPSGNVQGPFTLLQLSKWRSYFPRDLRVWLTFESEERSLLLTEVLSKQQKDFTQAASHTSSKATLVGTGHTRNNPSVDQTNAFSPAGHS

SEQ ID NO: 10781 - protein, 583 aa, Zea mays
  VARIANT 95..583: note = Derived polymorphism lacks residues 95 to 583
MAAAPAGAQNRCVFVGNIPYDATEEQLVQICEEVGPVVSFRLVIDKETGKPKGYGFCEYKDEETALSARRNLQGYEINGRQLRVDFAESGRNTDRNREKVDNPQNYCRRAFPTTLEFSVNMRSCIVFVPVNNNSCAFSDHPVSPVAISYKHVCGRGGPGMASNVDSQKRLAGTSVVGETNFHQPVGLPPAIHAASVMAGVLGGAQTANVQNGLPVQYGLGNDPLTHYLARMSRHQLHEVMAELKFLTTQNKEHSKTLLQGIPQLPKALFQEFPFDRKVDRLRIGCRTDGSAHGTSSMAEQAQIMLGMVTPQMMQMAKSQQPLGSLAQSSSHLNEPYPQPEPDAMVPVVSRPSSLPTNVLPNPVILQEQTAAIHSFPQHQHASQPQVKMFPHGQPSGITAQSPMLHQPLGGSSSVPIQSLVTSVGLTSQVQPPFVPEHPGPPVMPTSVQQLPLTHPHLALVAAAPETLPNEIRVADQASHLTEFTHPSKLRKLEDGTSVPGMVNSSHAIYTAPLQAVGPSGPSGSYSAGAGSLQQPGNEGQITPDVESALLQQVLQLTPEQLSSLPPEQQQQVIELQKMLSAGK

SEQ ID NO: 10782 - protein, 250 aa, Zea mays
  VARIANT 220: note = Ancestral polymorphism is F, Derived polymorphism is S
  VARIANT 73: note = Ancestral polymorphism is A, Derived polymorphism is P
  VARIANT 39: note = Ancestral polymorphism is P, Derived polymorphism is Q
MEFLSDEALAIFVPILVYWVYSGMYMALGQSMDRYRLHPRKEEDSKNLVSKREVVKGVLLQQLLTGDSSSSAASYDKEAAQGYFYYLTVARQFGVAMVVLDGWQYAWHRYMHLNRFLYRHIHSWHHRLVVPYAFGSQYNHPVEGLLLDTLGGALAFVVSGMSPRASIFFFSLCTAKGVDDHCGLWLPAGNLFHLFFWNNTAYHDVHHQLRGSRFNFSQPFFVTWDKLFGTHMPYVLEERPGGGLQARPLC

SEQ ID NO: 10783 - protein, 231 aa, Zea mays
  VARIANT 120: note = Ancestral polymorphism is R, Derived polymorphism is Q
  VARIANT 124..231: note = Derived polymorphism lacks residues 124 to 231
MPTGETLAVETQAPAPQTQTPTTTASSSPSSTHRRHRTFSSSSSSSSSLSTLSSAASSPSPSPRGRAVPFSWEHHPGIPKARFLGGAGAASSAPTPLPLPPPLRVPETSRARHQQHARRRRACGKPMPADDAGGDPFAAALAECTRERGGAGSDAGLMDALFPARPTTSSSVPSSRRWSIASAGGVVGLLDLYGCRSVVGVAEGAFVVRRPVKVVRAVPAGRAGMGRAGRR

SEQ ID NO: 10784 - protein, 213 aa, Zea mays
  VARIANT 106: note = Ancestral polymorphism is R, Derived polymorphism is W
  VARIANT 102: note = Ancestral polymorphism is P, Derived polymorphism is Q
MPARPAGTARTTFTGRRTTKAPSATPTTLLQPYRSRSPTTPPAEAMDHRRLLGTDDDVVGRAGKSASIRPASDPAPPRSLVHSASAAAKGSPPASSAGIGFPQARRRRACCWWRALEVSGTRSGGGSGRGVGAEEAAPAPPRKRALGMPGWCSQEKGTARPRGDGDGEDAAEDSVERDDEDDDDDEKVRWRRWVDDGEDEAVVVGVCVCGAGA

SEQ ID NO: 10785 - protein, 150 aa, Zea mays
  VARIANT 7: note = Ancestral polymorphism is S, Derived polymorphism is T
MAVSRVSLVFLVASLAMFVLAAFDGAKAQEADGVLATYNLYNPESINWDMRKASTFCATWDADMPLAWRQRYGWTAFCGPAGDHGQASCGRCLQVTNSATQASTVARVVDQCDNGGLDLDISVFQQIDTDGGGMANGHLSVDYQFVDCQD

SEQ ID NO: 10786 - protein, 215 aa, Zea mays
  VARIANT 16: note = Ancestral polymorphism is Q, Derived polymorphism is L
  VARIANT 71: note = Ancestral polymorphism is W, Derived polymorphism is R
  VARIANT 101: note = Ancestral polymorphism is R, Derived polymorphism is S
  VARIANT 102..215: note = Derived polymorphism lacks residues 102 to 215
MSLEEAKLEMATLQQQQQASKSCMNFNLFFCISMDDKAVWNKENVKHLCDICKNEVLAGHRPLWHLNKVGWKNVEDKFAEKYVKKLEHLQLKNKWDSLKRSYSCFMDLKNMATRLGWDEARQTVDCDDTWWKDHLARCHDPANSRKCKHVQFRKCGPTNLDSLHIMFGSAHVTGASASIPGDLSDDGSDDEVHELEKKPHECQIVYFAYTKTQEA

SEQ ID NO: 10787 - protein, 105 aa, Zea mays
  VARIANT 91..105: note = Derived polymorphism lacks residues 91 to 105
  VARIANT 52..105: note = Derived polymorphism lacks residues 52 to 105
  VARIANT 51: note = Ancestral polymorphism is G, Derived polymorphism is D
MARSASATAPVSCAIDPTMVTDEALYALAVGACNADAADEKELQLVYHRDDQSSIKILPTFISALNAKTGDGFYMDVPGLHYDPTLLLHGQQYIEIYKLIPSQDN

SEQ ID NO: 10788 - protein, 171 aa, Zea mays
  VARIANT 113: note = Ancestral polymorphism is G, Derived polymorphism is D
MAAAAALLLLLCAASLASAAADDGLTTFKVYFHDVVAGTNPTAVRIAQAASSNTSSTNFGAVVAIDDPLTTGPTRAAGTEVGRAQGTYTFADQQTFGLLMVMNFVFTAGEHNGSTLSILGRNEVLSDVREMSIVGGSGKFRMARGYVQAHTIDSGATSGTTVVQYTVNVKA

SEQ ID NO: 10789 - protein, 1466 aa, Zea mays
  VARIANT 270..1466: note = Derived polymorphism lacks residues 270 to 1466
  VARIANT 298..1466: note = Derived polymorphism lacks residues 298 to 1466
MSVPPRLSVDFYDDDGFDWEAAVQEIDRACAFASASAPAPAPAPAPTPAPVHHPLPPRPPEPSASAPLHRPPAAGGGTARQSTLDRFVDSFTKRRLEKERPAPAPVQAASWGVGVEPVGGGLGRPGVRAGEGCSGQANERAVEDRFIESFTRRQQEKERAASEVAPALAGGQGRPAARAGKGCSGRGNRAGKGCSRRPSMEIEYGLCAVSLDHEAVKTWIYPTNVEVREYQKYMVEKALFTNTLIALPTGLGKTFIAAVVMYNYFRWFPEGKIIFTCPSRPLVTQQIEACHNTVGIPQEWIIDMKGDQCPSIRSVHWKSKRVFFVTPQVLQNDIQSGICMVQQIVCLVIDEAHRASGNYAYCMVIRELLAARVPLRILALTATPGSKHSDIQSVIDNLNISELIYCDEEDSRVNQYVNTRKVELVQVPFGSDATQVADMLLDIIRPHINRLRDAGVIDHRDYSNWTQFELLKFKDKFKEVPPPNIHEIERGEIERSFVILGPLCHTRKLLLSHGTQFAHGYLDKRLKGGSLNLMHKNEFFWRLKEKMKLSSSHSITPKVQELKRLMVEHFNTDSNLKDSRIIIFSHYRESVNEIYCSLQDIDDKLVRPVEFIGQSSAGNQLKGQSQKTQQAILKKFRSGVYNVLVATSIGEEGLDIIEVDLVICFDANVSPLRMIQRMGRTGRKNEGRVVVLAYEGQELQGYRKKQGDCRTMRKLLHNSERFEYHASPRMVPHVYKPEVKYVKLTIDKYIPHAKKMRVAAKEASPIPWKMSEADGQMITRYFSVCKEEVWRPSLVAFPRFQLYPSVVHKVPHSFRTTDMLTDAMKQLQDPSLFRTKCEIPLQEPANVSAVEEGLEHEGLYAANGNEEMPQECDGLEASSSVVWNENVSVPGSPVKKYPVHTFFSGDYVTVDRRGSVLITYVPVLPQKIAFSKDIKSAVWNNKDQNKAKPYRSAAGVCRTTVEFVLGTNTDKHLFVDNLSTVAMHSPECSWHGDNVDDNHVLTTVPSKTLTSPREKMDTPCNVKLPESTYSYQEDMELNSRLTVYMEEGIVPESPVVEVSHLRLEMDEAADFGAVPKRGSPKSRDERAHANVAGSHKGPLNFEKNDQLLCGENEFDGSSRLYMLDQTRAKTEEPMHPSNVKMATTTRHTPGNMLCDSFSGDYQLRSGGDASGSVQQAPKYRRLCKYGDKIKRVSSISLDGCDDRFEECNIANKDRPNQIKHAMGTKRKTKRRLDAYIDEEVGVSEDAYVSEDEDDNQSEDKYEDSFIDDQATPTEFTQTEQGDRHNGDMMGFYRQSLFTQSPVVLPSRYLDVSYNSASRTGNSSYSSEARHNYTETPKEIQTQHHTINPSPSYSFVQDRCERGIANCESSTKLDCRKRRLSFQQPLAIPVINLEPEPAPEPSPHVASRVADHLYFDDGFFENLDLDAIEAQATEQWRQKTTQSTQKPVEIKNASDMSFAPPSFDLGL

SEQ ID NO: 10790 - protein, 303 aa, Zea mays
  VARIANT 59..303: note = Derived polymorphism lacks residues 59 to 303
  VARIANT 62: note = Ancestral polymorphism is K, Derived polymorphism is M
  VARIANT 71: note = Ancestral polymorphism is G, Derived polymorphism is R
  VARIANT 135..303: note = Derived polymorphism lacks residues 135 to 303
MAVNFFEPLANVLRRMDSDVPAMGFLHGCMLEAKKEIAMRFDNNENSFKVAWDIIDKRWDNKLKTPLHLAGYYLNPYFYYPNKSEIELDDSFRATVIACITKTVEDEETQDNIIEELNVYQEQQGTFGHDIAVRQRRNKNFNPAKWWLNHGTSIPNLRLLATRILNLTCNSSGCERNWSDFEQTKAKRENKSKDPLEREMNDVLEDDANEFITGLVPNANSDKDEEHGGAQVGATIHEPQLSQPQPKRKRLVRPRKKKIRSLHSLLYGGLENEAAVSSSESEDNGDGDISMHQYSDSDDLGDE

SEQ ID NO: 10791 - protein, 195 aa, Zea mays
  VARIANT 169..195: note = Derived polymorphism lacks residues 169 to 195
  VARIANT 161..195: note = Derived polymorphism lacks residues 161 to 195
  VARIANT 145..195: note = Derived polymorphism lacks residues 145 to 195
  VARIANT 104: note = Ancestral polymorphism is P, Derived polymorphism is L
  VARIANT 62: note = Ancestral polymorphism is R, Derived polymorphism is C
MVGIETNIQEWDCGGGSKRLDEIVTTRHTGRKVPAVAGVAVAPAAGASGGLPPPHLPQVPPRAGPGGHRPRRRPYRRRRLLLSVLRRLPAPAWVHFRHLLLVGPVPVRLFWHRYDRVSLPDLASRNRSALDCMADDAWALGLTAWEDAAAFAGDPWALLLQLLCLYFRRCLAEASALVLPRNHERLGVVLLAMTR

SEQ ID NO: 10792 - protein, 510 aa, Zea mays
  VARIANT 145: note = Ancestral polymorphism is R, Derived polymorphism is Q
  VARIANT 172..510: note = Derived polymorphism lacks residues 172 to 510
  VARIANT 224: note = Ancestral polymorphism is R, Derived polymorphism is C
  VARIANT 266..510: note = Derived polymorphism lacks residues 266 to 510
MAAEQGRSLAETPTWSVATVTTLMVAACFLVERSLSRFAKWLRKTKRKAMLAALEKIREELMLLGVISLLLSQTARFISEICVPSSLFTSRFYICSESDYQDLLRNTDANQTALDKNMFGGQRLHVCGEGHEPFVSYEGLEQLHRFLFILGITHVLYSFVTVVLSMIKIYSWRKWETLAGPIAAEELKARRTKVMRRQSTFVFNNASHPWSKNKILIWMLCFLRQFKGSIIRSDYLALRLGFVTYHKLPHSYDFHKYMVRSMEDDYNGTIGISWPLWAYAIVCILINVHGINIYFWLSFVPVIKLVLLVGTELQHVIAQLALEVAEATAPYVGSQLKLRDDLFWFGKPRVLWWLIQFISFQNAFELATFLWSLWELSAQTCFMKHYYMVAIRLISGLLVQFWCSYSTLPLNVIISQMGSKFKKSLVSENVRESLHSWCKRVKDRSRHNPLFSRNGTLTTRSVCSLDTTYETDHETNTVCTLSRTASATSLDDQLTVVTVDDEPSCIEKDV

SEQ ID NO: 10793 - protein, 367 aa, Zea mays
  VARIANT 12: note = Ancestral polymorphism is H, Derived polymorphism is Y
  VARIANT 29: note = Ancestral polymorphism is G, Derived polymorphism is W
MFEQAVADFCWHAREVVSSGMGLWGWPWGRRGPSGFGSASTAEEVTAGVDASNITAIVTGATNGIGKETARVLALRGAKVIIPARTLESGLKLKESLADEVPSSKVHVMEMDLSCLSSVRDFARSFNSSHKHLNLLINNAGIMACPYQLSKDGIELQFATNHVGHFLLTSLLLDKMKSTAAETGVQGRIINVSSVAHKRSDGTCFELNKLNDKARYKPFIAYAHSKLANILHTNELSRRFQEEGCNLTANSLHPGVIITNIIRYVAGNSALISALSPVANLVLKSVPRGAATTCYLALHPNVKGVSGKYFADCNEATPTAVARDSELAKRLWSFSEELVKIYADMSQTTQASEEEETTVTKDVFQDK

SEQ ID NO: 10794 - protein, 356 aa, Zea mays
  VARIANT 320: note = Ancestral polymorphism is W, Derived polymorphism is C
MAPYIVVNKTVIAFTAVALTILAVKTMMAEARDLSSTSTGGYGEEAMKVRHQQWMAEHGRTYRDEAEKAHRFQVFKANADFVDASNAAGDDKKSYRMELNEFADMTNDEFMAMYTGLRPVPAGAKKMAGFKYGNVTLSDADDNQQTVDWRQKGAVTGIKNQGQCVDCCCWAFAAVAAVEGIHQITTGNLVSLSEQQVLDCDTEGNNGCNGGYIDNAFQYIAGNGGLATEDAYPYTAAQAMCQSVQPVAAISGYQDVPSGDEAALAAAVANQPVSVAIDAHNFQLYGGGVMTAASCSTPPNLNHAVTAVGYGTAEDGTPYWLLKNQWGQNWGEGGYLRLERGANACGVAQQASYPVA

SEQ ID NO: 10795 - protein, 193 aa, Zea mays
  VARIANT 123: note = Ancestral polymorphism is I, Derived polymorphism is N
  VARIANT 104: note = Ancestral polymorphism is V, Derived polymorphism is M
  VARIANT 101: note = Ancestral polymorphism is A, Derived polymorphism is V
  VARIANT 95: note = Ancestral polymorphism is I, Derived polymorphism is T
  VARIANT 82..193: note = Derived polymorphism lacks residues 82 to 193
  VARIANT 78: note = Ancestral polymorphism is A, Derived polymorphism is T
  VARIANT 77: note = Ancestral polymorphism is R, Derived polymorphism is H
  VARIANT 66: note = Ancestral polymorphism is L, Derived polymorphism is I
  VARIANT 59: note = Ancestral polymorphism is Y, Derived polymorphism is N
  VARIANT 54: note = Ancestral polymorphism is T, Derived polymorphism is I
  VARIANT 44: note = Ancestral polymorphism is D, Derived polymorphism is H
  VARIANT 40: note = Ancestral polymorphism is D, Derived polymorphism is N
  VARIANT 26: note = Ancestral polymorphism is R, Derived polymorphism is W
  VARIANT 19: note = Ancestral polymorphism is E, Derived polymorphism is K
MEVKRQLEQVQVALEGATEDMDLMGRLLDDLDLLQRHSPDVDLDMVDMDLLKHTVVHKYVTPHLHLMISELVKNSLRAVQERYMDYDKLAPPVRIIVADGADDVTIKITDEGGGIPRSGLSRIFTYLYSTTENPPDLDVHNEGVTMAYMVMGFLLVVFMLDISAETCRSSLWKDMELTYLHLSRLGDSEEPLT

SEQ ID NO: 10796 - protein, 98 aa, Zea mays
  VARIANT 1: note = Ancestral polymorphism is T, Derived polymorphism is M
  VARIANT 37: note = Ancestral polymorphism is Q, Derived polymorphism is L
  VARIANT 45: note = Ancestral polymorphism is Q, Derived polymorphism is R
  VARIANT 48: note = Ancestral polymorphism is P, Derived polymorphism is H
  VARIANT 49..98: note = Derived polymorphism lacks residues 49 to 98
  VARIANT 53: note = Ancestral polymorphism is C, Derived polymorphism is Y
MFKDDTARQLYLVVKNEGWERLYGRLMPSLVGTAATQTHKKANKQQIPQGLTCALDKPLEAATAENAPYKTDNEERVSDHCEERGGSKNCSLEMLGHI

SEQ ID NO: 10797 - protein, 109 aa, Zea mays
  VARIANT 7: note = Ancestral polymorphism is A, Derived polymorphism is V
  VARIANT 24: note = Ancestral polymorphism is T, Derived polymorphism is I
  VARIANT 36: note = Ancestral polymorphism is L, Derived polymorphism is R
  VARIANT 50: note = Ancestral polymorphism is L, Derived polymorphism is H
  VARIANT 67: note = Ancestral polymorphism is D, Derived polymorphism is Y
  VARIANT 75..109: note = Derived polymorphism lacks residues 75 to 109
MIGTTSAGASFFLDGTFSLNQTGTANQEKRKAQLSLHKFAGSSSISSSDLFGCPNVDDSNLDLSAADLINRISFQASQDLSSLKDIAGETGKKLTSFASNFISDLDRIL

SEQ ID NO: 10798 - protein, 974 aa, Zea mays
  VARIANT 27..974: note = Derived polymorphism lacks residues 27 to 974
MLDFCAPHGPAKLPVASVAGVRVAGRWLWRSAAVGAVRHGVSARASSFGSRIGLDSQNFHTRDLSQLLWIGPVPGDIAEIEAYCRIFRAAEQLHTAVMSALCDPETGECPVRYDVESEDLPVLEDKVAAVLGCMLALLNRGRNEVLSGRSGVASAFQGSEDSTADRIPPLALFRGDMKRCCESMQVALASYLVPSEPRGLDIWRKLQRLKNTCYDAGFPRADGYPCPTLFANWFPVYLSIVSDDSGMDELEVAFWRGGQVSEEGLAWLLGKGFKTIVDLREEDVKDDLYLSAVQEAVSSGKIEVVNMPVEIGTAPSAEQVQQFAALVSDGAKKPIYLYSKEGVSRTSAMVSRWKQYVTRSERLAVQNHSLNGNGNILTNHKTMQHTGIPSSSPNGAENGMITESDRTMNNGESSEIDIDTARHNLEVTNALCNDQSTQQGEMPDTVAELLSNFKLESNPLKAQFPTCDVFSRKEMTKFFRSKTVYPKSVLNSRRRSSSLVIRRKQNLCTERSGTNDYEAAEFAVLRSSNGKSFDSDYILSVASGITDGKPSNNEASLIEEKEREVSVATIDTRASANSSNRKVQVGSQESAEKNSTPYLERNKSDNVDRNMCASATGVVRLQSRRKAEMFLVRTDGFSCTREKVTESSLAFTHPSTQQQMLMWKSPPKTVLLLKKLGDELMEEAKEVASFLHHQEKMNVLVEPDVHDTFARIPGYGFVQTFYTQDTSDLHERIDFVTCLGGDGLILHASNLFRTSVPPVVSFNLGSLGFLTSHNFEGFRQDLRDLIHGNNTLGIYITLRMRLRCEIFRKGKSMPGKVFDVLNEVVVDRGSNPYLSKIECYEHNHLITKVQADGVIVATPTGSTAYSTAAGGSMVHPNVPCMLFTPICPHSLSFRPVILPDSARLELKIPDEARSNAWVSFDGKRRQQLSRGDSVRISMSQHPLPTVNKSDQTGDWFRSLIRCLNWNERLDQKAL

SEQ ID NO: 10799 - protein, 124 aa, Zea mays
  VARIANT 91: note = Ancestral polymorphism is M, Derived polymorphism is I
  VARIANT 87: note = Ancestral polymorphism is A, Derived polymorphism is T
  VARIANT 75: note = Ancestral polymorphism is V, Derived polymorphism is I
  VARIANT 71: note = Ancestral polymorphism is E, Derived polymorphism is K
MYFCICCRTLRVMMRTLILRLMMELRMNLKHDAEDAPAEPAIKKAMALAAPPKDTERQLSKKEMKKKELAKLDVVLAELGLSRIRAALHRMLRTKVPTRLVIQRKRKMLLPLPRARPPRRRKEG

SEQ ID NO: 10800 - protein, 260 aa, Zea mays
  VARIANT 71: note = Ancestral polymorphism is R, Derived polymorphism is H
  VARIANT 109..260: note = Derived polymorphism lacks residues 109 to 260
  VARIANT 190: note = Ancestral polymorphism is T, Derived polymorphism is M
MSGGTPAASSSLRAALSYCVRQVRAYDYHHYLCLLHLAPAVRKAAFTFRAFNIQTARAMDVVSDPRTGLMRLLWWKEAVDKVFGNKLVEHLVAHALSSVIADHKVSKHWLKRSVEARINDTNREEGTIPGTSAELERYAEDTQSTILYMTLQAGGIQSTVADHAASHIGKASGLLLLLKALPHHVNKQGTVHYIPASVAEECGLLITREGGRSEVRAGVRLPDVVFKVTSVAEAHLHKARELASSVPKEAIPVLLPALPA

SEQ ID NO: 10801 - protein, 452 aa, Zea mays
  VARIANT 147..452: note = Derived polymorphism lacks residues 147 to 452
  VARIANT 135..452: note = Derived polymorphism lacks residues 135 to 452
  VARIANT 74: note = Ancestral polymorphism is A, Derived polymorphism is V
MAGEPIATVPSGPDSAAEADHLLALAESELSAGRLRAARRHTLRAARLYPISPRAPVVATAANVLLADASSHHAVLLLPEPDDPDASPLSTSELRRHFKSLVKSLRVGLDAATAAAYPFVAAAAEEALGRATEAYEAPTAPAPGTFWTACAGCRLLHEFERNCTAHLFREDHTVAFLMFGAFFTVRICVVVLTKVDLITIYRSESFPLWVTGWSVELMAYAFLVVSPPDMSQCFEDKSVRLITDASLLDTSILQINVHDPEFMDNVLHPHVTQKKFLSKLRQIEEDPEGAGTAHLYSVTLKISGVANRAFEPLFERQAQAEKIRSVQGMLQRFRTLFNLPSAIRGNIRKGEYDLAVREYQKAKSIVFPSHLLTRKLSIPAGVLSPYSKLKRSTDQLRRNADALEILRKTRFPHVHGAGEKKSPETILDHETMRGLWQQMFGLGFSGWFYDTL

SEQ ID NO: 10802 - protein, 461 aa, Zea mays
  VARIANT 113..461: note = Derived polymorphism lacks residues 113 to 461
  VARIANT 147: note = Ancestral polymorphism is G, Derived polymorphism is A
MDVLPPLQHAPSLPTPPSHAFGVHNMKTWFIHRTTRMMLQTVMEGSCLSGCPPGTMFPRSRCLGHFWKRDMPVRSRSSLVGSCFMKWMQLERRTSRPTSRGGSPWATGPARPRCRSSGTTPSPPTPLSDSSSSPVYLRYCLNVWDVGGQKTIMSYWRKFFEQTNGLVWFADSSHIRRLDDCRAELHNLLKEERLVGASLLIFANKQDMQGALKPTGIAKFNVGAKGYAKLNVVSSVMLYYGCSEASNFSVVTLRQLIAAWFSRRYTRFKKRSADFHGRAADLVHSLRGTAMPRRQALEEEQCREEKGISTVPKHKYASKACSPKDDAPLNYLPQKRLILTSQLIQQLLPAIPATILRGQAVSTYGSATYTLSMLTLRDACSMVASLSSSYNSCSPVEDENNPSEQTSAKKMEDRVSKVVEVFAGRIQKMENDFISDSLTVVSFTKEGCEATLLSSNKAKVV

SEQ ID NO: 10803 - protein, 352 aa, Zea mays
  VARIANT 19: note = Ancestral polymorphism is L, Derived polymorphism is R
MARVASLLLTVIVAAAASLLLLLAPSAAELARVEHPPKNDGSLAILAVGDWGRRGQFNQTLVAQQMGVVGEKLDIDFVISTGDNIYDDGIANTSDPLFKECFTNIYTAQSLQTPWYIVLGNHDYTGNALAQQDPAIREVDSRYLNLAKSFIVNSGIADFFLLDTSPFYLKYWNSSKYDWRDVAPRDTYIQNLLDDLDDALVQSEAPWKIVVGHHPISSGCEHGNTTELQELLRPILEACMHARGVDMYVNGHDHCLQHISSRNSPVQFMTSGGGSKAWAGKFKTTSDKIEFIYDGQGFMSMQLSSTEAHLVFYDVAGNVLHSYDSTKNEEEDDGWPAGQQAAVRGSIDRGNL

SEQ ID NO: 10804 - protein, 103 aa, Zea mays
  VARIANT 23: note = Ancestral polymorphism is M, Derived polymorphism is L
  VARIANT 26: note = Ancestral polymorphism is T, Derived polymorphism is M
  VARIANT 34: note = Ancestral polymorphism is V, Derived polymorphism is M
MAQLMRSCITEFIAAPLLVLLILASTSPSFQVHVKGDDGRQHGSPALRQRLAAATCFETTAGFCWVKQCQSFCASKGFNAASAFCYKRPGSGRLHLWQCCCQP

SEQ ID NO: 10805 - protein, 115 aa, Zea mays
  VARIANT 18: note = Ancestral polymorphism is A, Derived polymorphism is T
  VARIANT 47: note = Ancestral polymorphism is P, Derived polymorphism is L
  VARIANT 68: note = Ancestral polymorphism is C, Derived polymorphism is S
MAVMTSSAGPSTTTHFIAAIPLVLLLISAASPSRCQAWNHHTSCHALHSRSPRCWGRRRRWHDEDRRCECDATTSTRKRSVQIGTATRFAWSAIESIAREPTALKQDGSVAAHIE

SEQ ID NO: 10806 - protein, 522 aa, Zea mays
  VARIANT 401..522: note = Derived polymorphism lacks residues 401 to 522
  VARIANT 492..522: note = Derived polymorphism lacks residues 492 to 522
  VARIANT 493..522: note = Derived polymorphism lacks residues 493 to 522
MLRRRRAPLLLAAAAAGAALAATSPSGENGRSVASALHQGIARSSRSVYTIGFVMADYKYSLRGLDAGSADYRVKLSKVHLRSAKKLLKLCEVNGGFYVKAGQYVSSLRQVPKEYSSTLSCLQDQATPSKFQDIKAVIEQNFGKELYDIFLEFDEHPIAAASIAQVQYPGLEQRMKIDIMTMSFLSKMVSWVFPDYKFDRILIEFEKSMTMELDFTREAKNSERTASCFRKNSVVKVPYVFWLNLLQQLTTREVLTMEFCYGHKVNDLDFLRKTDISPTKVAKALIELFGEMIFVHGFVHGDPHPGNILVSPEGHGKFSLVLLDHGIYRELDQKFRLDYCRLWKALILLDSNKILELGEQFGVGKYAKYFPVIFTGRTIESKSALGTQMSGEEQRRLKEDLNSLGMDDISSFMESLPPDFYVILRTDGLLRSILGNLGAPRHVRLLTYARCAIHGLEKQHKMESGAIRRMFLNVKTNVSYLRLRVIIEIAVLLAKANGAKQKVVNKLRQMLQETSQGFHRRM

SEQ ID NO: 10807 - protein, 121 aa, Zea mays
  VARIANT 40: note = Ancestral polymorphism is R, Derived polymorphism is H
MSPVTALLAGTVVPPASAPSPARHARHYSVGFSPLHGGGRAALAVECSSRPQKKGTKHHMKTRPKKTQPWDIKRRPTQYPPLPPLPPDWTLVASGATVDVEEAEAPAPAATLVLDVAAATD

SEQ ID NO: 10808 - protein, 265 aa, Zea mays
  VARIANT 174: note = Ancestral polymorphism is G, Derived polymorphism is S
  VARIANT 107: note = Ancestral polymorphism is F, Derived polymorphism is S
MEFISDEALAIFVPILVYWVYSGMYMALGQSMDRYRLHPRKEEDSKNLVSKREVIKGVLLQQLVQAGVAAVVFTVTGDSSRVSSSYDNKEAAHQASYYLLLTVARQFGVAMVVLDGWQYAWHRYMHLNRFLYRHIHSWHHRLVVPYAFGSQYNHPVEGLLLDTLGGALAFVVSGMSPRASIFFFSLCTVKGVDDHCGLWLPGNLFHLFFWNNTAYHDVHHQLRGSRFNFSQPFFVTWDKLFGTHMPYVLEERPGGGLQARPCLLC

SEQ ID NO: 10809 - protein, 438 aa, Zea mays
  VARIANT 339: note = Ancestral polymorphism is G, Derived polymorphism is R
  VARIANT 241: note = Ancestral polymorphism is A, Derived polymorphism is T
  VARIANT 180: note = Ancestral polymorphism is I, Derived polymorphism is T
  VARIANT 98: note = Ancestral polymorphism is P, Derived polymorphism is L
  VARIANT 66: note = Ancestral polymorphism is P, Derived polymorphism is S
MEDSATNGHGVVTAVPASWNFEPNETLLGLPALSVRGVLTRVMAGMLPDGGRAVVRLGSGDPTAFPCFRTVPEAVDAVASAVQSGQYNSYSTSVGLELARRSIAQYLSCDLPYKLSPDDVYLTSGCTQAIEILCSALARPGANILLPRPGFMFYEARAIFNGMEARYFNLLPGNGWEVDIDGVQALADKNTVAMVIVNPGNPCGNVYSYEHLAKASSDMLLLVAETARKLGIFVIADEVYAHLTFGERKFVPMGVFGAVAPVLTLGSISKRWMVPGWRLGWIVTNDPNGVFQRTKVVHSIKSYLDISSDPATFVQGAIPKLVENTKEEFFEKTIEILKRCVDICCEKLKGINAITCPSKPEGSMFVMVKLDLSCLEGIKDDMDFCCRLAKEELVVVLPGCAVGYKDWLRITFAIDPSSLEEGLDRLKSFCLRYRKPTK

SEQ ID NO: 10810 - protein, 107 aa, Zea mays
  VARIANT 7: note = Ancestral polymorphism is L, Derived polymorphism is Q
  VARIANT 9: note = Ancestral polymorphism is I, Derived polymorphism is T
  VARIANT 36..107: note = Ancestral polymorphism lacks residues 36 to 107
MPSYKKLVIVGFALTLLLVSFGMDASAKLCSTTMDLLICGGAIPGAVNQACDDTCRNKGYTGGGFCNMKIQRCVCRKPCALEEQTEARAGDEAAGGAGDMMSRTMAD

SEQ ID NO: 10811 - protein, 110 aa, Zea mays
  VARIANT 8: note = Ancestral polymorphism is V, Derived polymorphism is A
  VARIANT 61: note = Ancestral polymorphism is R, Derived polymorphism is G
MSSSKQVVVATVALALLLHASHLAAGAEGETVTPLSTCETPICVPCWGKNQVCIAACVALRYTGGFCNGDTCVCTKQCLAEAEAVAEAGGPSPPPVQPPPLGKRGMGMLK

SEQ ID NO: 10812 - protein, 110 aa, Zea mays
  VARIANT 11: note = Ancestral polymorphism is A, Derived polymorphism is G
MSFSKRVAVAAALALALQLILASHRITMVAVAAAGAKKDETIAPLQTCETMIKVPCWGKNAICIPICIAMRYTGGFCDVATCMCTKQCLAAAEAEADGASQQAVATPRLN

SEQ ID NO: 10813 - protein, 443 aa, Zea mays
  VARIANT 107: note = Ancestral polymorphism is Y, Derived polymorphism is H
MAAPSGGGGGGAGEGSSSAAAAATIGVHGVDQVAEAMWQMNLEEAMELGPYPERVGEPDCSYYMRTGMCRFGMTCKFNHPADRKLAVAAARMKGEYPQRIGQPECQYYLKTGTCKFGATCKFHHPREKAAMATRVQLNELGYPLRPNEKECAYYLRTGQCKFGSTCKFHHSQPSTMMVAVRGSVYSPGQSATSPGQHAYQGAVTSWPLSRSASFIASPRWPGHSSYAQVIVPPGLVQVPGWSPYTAQIGSSSSEDQQRTPGAAQYYTGSRQSGTSIGDQGMFSSYQAGSVPVGLYAVQRENLFPERPDQPECQFYMKTGDCKFGAVCKFHHPRERIIPTPNCALSPLGLPLRPGEPICSFYNRYGMCKFGPNCKFDHPMGNAMYGQAPSPASEAPAPRRMLAHVPPSHPEASPDGGSGRSRRIAHSDSQQIPSGERSAEREAS

SEQ ID NO: 10814 - protein, 349 aa, Zea mays
  VARIANT 120: note = Ancestral polymorphism is A, Derived polymorphism is V
MEGSAADGPLRTRVCIIGSGPAAHTAAMYAARADLKPVLFEGWMANGVAAGGQLTTTTVVENFPGFPAGIMGRDLMKRCRDQSQRFGTRILTETVTAVDLSARPFRVVASDKSTTVLADAVIVATGAVARRLDFPGSDTYWNHGISACAVCDGPAPIFRDRPLAVVGGGDSAMEESSFLTKYGSRVYIVHRRSTFRASKIMQDMVLKNPKIQVVWNSVVVGAFGGADGDGGRPLLAGVKVENLVSGEVKDLQVAGLFFAIGHTPATEFLGGQLQLDSPSGYVVTKPDSTHTSVKGVFAAGDVQDKKYRQAITAAGSGCMAALDVEHYLQEVAVVGAQEGKSVQPLTMLE

SEQ ID NO: 10815 - protein, 252 aa, Zea mays
  VARIANT 105: note = Ancestral polymorphism is V, Derived polymorphism is A
  VARIANT 123: note = Ancestral polymorphism is V, Derived polymorphism is L
  VARIANT 150: note = Ancestral polymorphism is V, Derived polymorphism is M
MAACDDDVAPSTASAYLDPSYWDARFGKEEHYEWFKDFSHFRHLLAPLLSPSLSVLEVGCGNSRLGEDLLREGVAGGITCVDLSPVAVQRMRDRLAALGTKGVDAVVADMLDLPFEHESFDLVIEKGTMDVLFVDSGDPWDPNPTTVENVMKMLNGIHRVLKPEGIFVSIAFGQPHFRRRFFEAPELTWSIEYSTFGDSFHYFFYTLKKGKRSLESSSYQNTLPSPVAPRINMVHEELESEDFIFLTNLDGL

SEQ ID NO: 10816 - protein, 92 aa, Zea mays
  VARIANT 34: note = Ancestral polymorphism is Q, Derived polymorphism is K
MASSAAYPDADENLEAIITRIEQKSRKIETLLKQSKPVEALKTALEGSPLKTRDERCKSANWIVVHRALMAIRDVDGMFNSLDPEYYDILMK

SEQ ID NO: 10817 - protein, 195 aa, Zea mays
  VARIANT 86: note = Ancestral polymorphism is A, Derived polymorphism is V
  VARIANT 88: note = Ancestral polymorphism is L, Derived polymorphism is P
  VARIANT 93: note = Ancestral polymorphism is Q, Derived polymorphism is K
  VARIANT 106: note = Ancestral polymorphism is A, Derived polymorphism is T
  VARIANT 109: note = Ancestral polymorphism is R, Derived polymorphism is W
  VARIANT 133: note = Ancestral polymorphism is D, Derived polymorphism is V
  VARIANT 136: note = Ancestral polymorphism is N, Derived polymorphism is I
  VARIANT 147: note = Ancestral polymorphism is D, Derived polymorphism is Y
  VARIANT 149: note = Ancestral polymorphism is L, Derived polymorphism is I
  VARIANT 162: note = Ancestral polymorphism is T, Derived polymorphism is I
MLPPDLLLSVIWRSGFAPPHLVAGLLTSTSPRRRRLLFAIAPLASCANDPTNLGSSLCPSIPTPDIKVHSFAGPNVALPMPQAQTAILLWLKQNLPQMLLLVTRRAQRRQVLAHKYHGWDKSGCSFPQDKYYDSRNFGGANKREHTDWLMLGHHGFPYRDVTVPVESAWSSINLYDLLIVMFDVNRHLNLLISFA

SEQ ID NO: 10818 - protein, 134 aa, Zea mays
  VARIANT 95..134: note = Derived polymorphism lacks residues 95 to 134
  VARIANT 86: note = Ancestral polymorphism is K, Derived polymorphism is E
  VARIANT 60..134: note = Derived polymorphism lacks residues 60 to 134
  VARIANT 47: note = Ancestral polymorphism is V, Derived polymorphism is A
  VARIANT 40: note = Ancestral polymorphism is C, Derived polymorphism is R
  VARIANT 26..134: note = Derived polymorphism lacks residues 26 to 134
  VARIANT 18: note = Ancestral polymorphism is T, Derived polymorphism is A
  VARIANT 17: note = Ancestral polymorphism is H, Derived polymorphism is Q
  VARIANT 15: note = Ancestral polymorphism is D, Derived polymorphism is A
  VARIANT 14: note = Ancestral polymorphism is C, Derived polymorphism is G
  VARIANT 5: note = Ancestral polymorphism is A, Derived polymorphism is T
MKLPASNNKFTYNCDGHTFNYLVEDGFRCIRYVLIFGHLCVDLLELAVTRYTALLCFAAYCIVAVESVGQQIPIAFMDRVKEDFTKRLKLKEHMQYCVDHPEEVSKLAKVKAQVLDRGEKIEVLVDKTENLRSQ

SEQ ID NO: 10819 - protein, 161 aa, Zea mays
  VARIANT 127: note = Ancestral polymorphism is G, Derived polymorphism is S
  VARIANT 94..161: note = Derived polymorphism lacks residues 94 to 161
MSKIGQPAKISSSQNENGCSHGEHISTLDEGKRTYTLFQGHSGPVYSVTFSPFGDFLLSSSSDLTIRLWSTKLNANLVCYKGHNYPVWDVQCVQWHVNCNYIATGSSDKTVRLWDVQTGECIRMFIGHRSMVLSLAMSPDGRYMGPLMSAGPRTENRINYG

SEQ ID NO: 10820 - protein, 419 aa, Zea mays
  VARIANT 363: note = Ancestral polymorphism is M, Derived polymorphism is K
MTPSVHADEYVRPPQRPLALMAHDKPASHPQQVHISAVGAHHIRITWITDDRSAPSVVDYGTSPGQYDASETGYQATYQFLSYTSGAIHHVTIGPLEPSTTYYYRCGSAGDEFSFRAPPATLPIDFVVIGDGRPFCSVASDVGQTEWAASTLSQIGAADHDMMLLPGDLSYADRQQVLWDSWGRLVQPLASARPWMVTEGNHEKETLRELGTVRRFVAYNARWRMPHEESGSRSNLYYSFDASGGAVHVVMLGSYADLEEGWSEQHAWLRRDLAAVDRRRTPWLLVLMHVPWYNTNRAHQGEAEAMRRDMESLLYEARVDVVFACHTHAYERFARVYDKKANSQGPMYITIGDAGNNKAEKFMSGHELAHLSLFREPSFGYGRLRIIDNRRAVWTWHRNNDKDAQVSDEVWLESLATSP

SEQ ID NO: 10821 - protein, 194 aa, Zea mays
  VARIANT 96: note = Ancestral polymorphism is E, Derived polymorphism is G
  VARIANT 107: note = Ancestral polymorphism is A, Derived polymorphism is T
  VARIANT 166: note = Ancestral polymorphism is A, Derived polymorphism is V
MRLQGRYAAFLRRASALPSLPLVASLHAAVLRRGVPALLASSLIQGYSACGDLDSARALFDETPPTLSSRTALAGALSAHGRCAEALDLLNVPEAGVDDRAVTVLLAACARAGMVAEGRRVFARVPRPALQHYTCMVEMLGRVGEVEEAERLVAGMEARPDRVILAALLTACRVHGRVDVAERVAGLMRRYAVA

SEQ ID NO: 10822 - protein, 671 aa, Zea mays
  VARIANT 556..671: note = Derived polymorphism lacks residues 556 to 671
  VARIANT 548..671: note = Derived polymorphism lacks residues 548 to 671
  VARIANT 267..671: note = Derived polymorphism lacks residues 267 to 671
  VARIANT 152..671: note = Derived polymorphism lacks residues 152 to 671
MAAYYHGGAGTDIQASTDGLQTLYLMNPSYAGGYADDGGASTPGAANMMLLNSAVTTMTPASFAHHHQQQSPPAAQQHFVGIPLQVQAPPPSGYNLWTPAMAGGAADMSPQAQAQTPGAAGAAGVSAVLSLSSREAPPVTVAAVAACTDEGKYLGVSATPQGQMVMSSKYLKAAQELLDEVVSVSKGVEDAKTAAAAATKSLAAVKKKEDSEGASGGGTDDGAGAKSGGGAAPEMSTAERQEMQMKKSKLLNMLDEVEQRYRQYHGQMQAVSSSFEAAAGAGSARTYTALALRTISRQFRCLRDAIASQVRAASRALGEDADAAVAGGRTVGSRLRYIDHQLRQQRALQQLGMMQGGAWRPQRGLPERSVSILRAWLFEHFLHPYPKDSDKIMLAKQTGLTRSQVSNWFINARVRLWKPMVEEMYLEETKDQDAGGGGNDEGKSGGGGSKSSDTVDGVMPRADVMSKSAVRVGGGGAGAESASTNKGIHGSSLLELGGGDHQQSHAGFYDDDEDDGDDVMGRRLKKARGNEPAPAFHHVHDIATLHAQAAAAARQQHEEVSHRELLMKFMESGGGGGVRDHHQDGGGYSLFAPGPYGQFTTEPFAFAGNGGVSLTLGLPHGAGGSAEQTASFLMGSTTAGDSGSHGAATSYDMNMQSTKSFAAQLMRDFVA

SEQ ID NO: 10823 - protein, 454 aa, Zea mays
  VARIANT 284: note = Ancestral polymorphism is M, Derived polymorphism is T
  VARIANT 81: note = Ancestral polymorphism is Y, Derived polymorphism is C
  VARIANT 11: note = Ancestral polymorphism is S, Derived polymorphism is F
MELVAWLVIVFSVSLAGLLPVVSASTTTPQQQCGGNNVGPAGVRAGYWSPSSNRYSAVGSIDASLYTHLYYSAVTIDETSYAVAPPPPTAEDASLLAAFSGAVKSASPSTRTVLSVGTDEYRVGESNAAFSRMASDAGLRAVFINSSLNLARANGFDGLDLSWIFPATQADMQNLGALLAEWRARITEESVAKSLPPQPQPLLLTATLYFSNHLFGTPDGNLDYPVDAIASSLDWANVLTFGFRGDSGVTAADAPLYDTSSHFSASYGVVSWLDAGLPPCRLVMGIPLFGRSWFLRNKAKNGLGAPAAAAGTKQRRSNQTGIIAYAETEEYLSSQGTVVTYDDQSVAEYFCSGDLWVSFDGAQVVQRKLEFAARSQLLGYFLWTVGFDDSNSTISRKASESWHQYAQGGFGIMHAGGSNQYVAFNSSSVSLGSCYSRSLSCLLSSVLLLVILFR

SEQ ID NO: 10824 - protein, 365 aa, Zea mays
  VARIANT 53: note = Ancestral polymorphism is G, Derived polymorphism is C
MGSIMEQRCNNDQQALLDAQLELWHSTFAFIKSMAFKSALELGIADAIHCHGGTATLTQIATKAALHPSKTPCLRRLMRALTVAGIFSVAKNSSDDDGDQHVYGLTPASRLLVGSSQNLAPTLSLILNNVFVAPFLDLGTWFESALPATDLPLFELSHRKNVWDVVGHDPSVSQLFNAGMVADTRFLMDIAVRECGDVFQGIRSLVDVGGGHGAAAQAISAAFPAIQCTVLDLAHVVATAPACAGLSFVAGDMFEAIPPANAVFLKWIMHDWGDTECVTILKNCKKAIPPRDAGGKVIIVDTVVGAGPPNLKNKETQVMSDLFFMIVNGLERDEQEWRNVIFEAGFSDYIIIPVLGVRSIIELYP

SEQ ID NO: 10825 - protein, 121 aa, Zea mays
  VARIANT 97..121: note = Derived polymorphism lacks residues 97 to 121
  VARIANT 96: note = Ancestral polymorphism is T, Derived polymorphism is I
  VARIANT 93: note = Ancestral polymorphism is C, Derived polymorphism is R
  VARIANT 92: note = Ancestral polymorphism is Q, Derived polymorphism is R
  VARIANT 69: note = Ancestral polymorphism is E, Derived polymorphism is K
  VARIANT 67: note = Ancestral polymorphism is V, Derived polymorphism is L
  VARIANT 64: note = Ancestral polymorphism is D, Derived polymorphism is N
  VARIANT 63: note = Ancestral polymorphism is C, Derived polymorphism is Y
  VARIANT 54: note = Ancestral polymorphism is W, Derived polymorphism is C
  VARIANT 38: note = Ancestral polymorphism is S, Derived polymorphism is N
  VARIANT 27: note = Ancestral polymorphism is E, Derived polymorphism is V
  VARIANT 14: note = Ancestral polymorphism is S, Derived polymorphism is N
  VARIANT 8: note = Ancestral polymorphism is V, Derived polymorphism is I
MEDTDIAVELYKLSVSTLDLLKLASKEEQGAYVGAWYNMLLSCAQELKHGVALWQEFYHANVCDRVVSEGGHYLIALGEIYRVAQILYLSLQCFKTWVLADPGMLSKMLSCLDSCSFQRNK

SEQ ID NO: 10826 - protein, 297 aa, Zea mays
  VARIANT 9: note = Ancestral polymorphism is I, Derived polymorphism is T
MSCVVALTIVLLAQCCVASSRSLQLVSSSVANAPEGSQAGAPAPAAVLEPQPPAADAAAPPVGTPEYAPVAGAPPPLTGHGQHVKSKHQDHEKAPPKPKHHHPKAPPKHHGHHAPPEPDVSPPAPEPDDGQPTPGVPPADSPHGQNPPWPFPWPRPGTGQWPPFHPPPFPAWPHPGPDGKWPPLPPFPFHPPPLPAWPQPHRRNNPWPPLPPFQSPPFPAWPHPGPGGKWPPLPPFPFHPPPLPAGGNWPPLAPFHFHPPPTPAWPWPHHPGNPWAPPSMHGSDGVPATTVQQNPEN

SEQ ID NO: 10827 - protein, 148 aa, Zea mays
  VARIANT 108..148: note = Derived polymorphism lacks residues 108 to 148
  VARIANT 93: note = Ancestral polymorphism is R, Derived polymorphism is W
  VARIANT 90: note = Ancestral polymorphism is L, Derived polymorphism is Q
  VARIANT 88: note = Ancestral polymorphism is A, Derived polymorphism is V
  VARIANT 67: note = Ancestral polymorphism is R, Derived polymorphism is G
  VARIANT 66: note = Ancestral polymorphism is R, Derived polymorphism is H
  VARIANT 61: note = Ancestral polymorphism is Y, Derived polymorphism is S
  VARIANT 58: note = Ancestral polymorphism is R, Derived polymorphism is C
  VARIANT 52: note = Ancestral polymorphism is G, Derived polymorphism is R
  VARIANT 44: note = Ancestral polymorphism is E, Derived polymorphism is D
  VARIANT 43..148: note = Derived polymorphism lacks residues 43 to 148
  VARIANT 42: note = Ancestral polymorphism is S, Derived polymorphism is L
  VARIANT 41: note = Ancestral polymorphism is P, Derived polymorphism is S
  VARIANT 32: note = Ancestral polymorphism is P, Derived polymorphism is S
  VARIANT 19: note = Ancestral polymorphism is G, Derived polymorphism is S
MLHMFCKTLTASDTSTHVGFSVPHRAAEDCFPPLDYSQQRPSQELVAKDLHGTEWRFRHIYRGQPRRHLLTTGWSAFVNKKKLVSRDAVLFLRGDNGELRLGVRRAAQLKNGSAFPALYNQCSNLGSLPNVAHVVATKSVFHIYYNPR

SEQ ID NO: 10828 - protein, 138 aa, Zea mays
  VARIANT 93..138: note = Derived polymorphism lacks residues 93 to 138
  VARIANT 44: note = Ancestral polymorphism is S, Derived polymorphism is Y
  VARIANT 41: note = Ancestral polymorphism is K, Derived polymorphism is I
  VARIANT 36..138: note = Derived polymorphism lacks residues 36 to 138
MESCHGEENFWYKCKNSVSTCWIDFRKQLNGRHFSQLYSVIGDSRTSLEAYAYASYMKGALFSEQDKNIDATIINFKNTRAIYEESGKSGSIENELLCYQCIEEVDPMIDLCSHKLGGSYLQAHELLDTANDLLNEDE

SEQ ID NO: 10829 - protein, 1693 aa, Zea mays
  VARIANT 21: note = Ancestral polymorphism is P, Derived polymorphism is L
MVHVGEMLASAVIKEVVRRLPALLQAPVKGPAKMIRSFREDLDEMKMTLESIKATMAEAEQRSINDETARLWLKRLKRAAYDISDMFDEFEHGSPPGKKLQGPSWFEIMFSRDMAKKMKKMNKRLKEIAEQWKNYGGIGRVSCEPKNDAAEEQETTSSSSSAVVVGRRAEKQAVINILLSSNNTYPQETISHCTVIHGLGGVGKSELATSVFNDERIKEAFPQRAWVWLGQNFREKDIGRAIISIVECGSCNLEILESIYQHLRKVLLGRCLIVLDNLWDSVHLAKLQGELGSNVSILVTSRREIQLNMPRSTLFRLDPLSERFSLDLVKEVASSYFPAGDIPETAMEEIVKMCGGVPLALKSVASQLRPERSVKELLSLIRAISPPKSDYGTTDIQDRVLASLKLTYHLMSPSLKLCFAYCAIFAKGDEIDREGLCHQWIALGLTEKMYAEDRVRDLLTMSFLRDPEPPAITRSSSGGSSKLKMHDLVHDLAMLVADDELLVINQECVVFKSDSPRYAMVFACKLENLHKNKLLAGLRALHIKDSDGLKFKWYNFSFVKCLRIMDISGLCTEKLPSSIGNMMQLRYLNASGIQCEVLPKAIGSLSKLQYLNLHGSRISALPDSVTKLGQLMHLDISDCVHLQTLPNSFCNLESLCFLSLKNCCRLSSLPDDLARLENLEKLNLSGCSCLDTLPKSLGELDSLKLLDLSGCMKLTMLPKSFISLTSLQYLNISSCSELDIPVDALNKLTKLNYIDMSCCPKLVGLPQEFCSLKHLHTLNLSDCSKLAYLPEKLGQMESIKFILLDGCTESVRKPILKHRLGAGLQSLPAFVVERKADSIRSNIFQLEQEKFSELELYRLENIHTVDEAKALKMPDRSGLRSLGLMWTLNVDRFVEDEALLQALEPHENLKKLTVQGYMGERFPKWKLELGSSRQGHLHEVGLMHFPMCSSLPQLGQLANLKKLYLSRMPKIRRLGRELSDNTGGLRNLQIFTLEYMENLEEWCTTMTSATGQQQQEEFMFPALQELTIYHCPLLTMRPCPPRSIDYWEVRASSGAAQLLLQKDGMMQSVADYMGLQCPFAYTSELHVSGSSSSSTLLPTDGWKFNGSLITLKDLTSDCCSLIDRLLAKGNSMQCLVNLEVSGIKNTNSLLEEVESVAYYTRSSLAKSWPDWFLQEQGINRASPHFIVTGYANCGVDGWIHKVTSFLGNLIRINMENLPMCDCLPPLGQLPMLQELRLKGMPKIRSIDRDFCGSGSGSQQSSHTLFFPRLTRFVLNDMPNLEDWVTKVSGASDPYGQEEFMFPKLVKLTIWNCPKLKLKPCPPRAMEWDINNSDQVIASNYDINSGGYLVTMLQVLLCKVPPSNWKLLHQLPGIQSLAIVSCHGMEALPDSIQYLSSLHSLTVSKCHGLKHLPDWLGDLTSLERLMVVSCPLEFLPGSLRRLPFLRSLTLSRCDRLAALPGWMGDLKSLVTITIEECKSLKSLPKLYHLEHLHIQCNDELERWCKSEVNQHKFSQTLRKGFFLESPMGTNSCILPARSLSILWGQDDRYWRLNSIPESRFALSMELIAVWWLEIEGWVPFEFLSTDTSYDIFLVYKLADEHDGLRWGESYVAVDGVHTTDGVVSFVDEDAVRVDRVAYPVTRSEGWMELWLGEFYNKYVDREVKVSVWEKTDTYAKIGLIIEGMEIRKKSGSIS

SEQ ID NO: 10830 - protein, 296 aa, Zea mays
  VARIANT 55: note = Ancestral polymorphism is A, Derived polymorphism is T
MEGIQQLPADVLVSVISRAAAGPRDACIAATVSPAFRAAADSDTVWSRFLPADLAPLVYPTPPPRSKKELFLRLSETHALVEDGLMSAWLDRETGAKSYMIAARAMAIIWVDTPDYWRWIVREDSREAWVARFIGGGFKLASSGIRGELHGFSTCAELLAVCWLDISGCMPCRMLSGDTRYAAYLVFKMADDCFGLDSPLQEASVSVGEGGTSTAHWIRLQSYHVGDEENGVTEEGAPPRLPHERPDGWMEVELGDWYNHGGDDDLVVRASVKEARFGGNWKKGLIVQGLEIRPKN

SEQ ID NO: 10831 - protein, 176 aa, Zea mays
  VARIANT 128: note = Ancestral polymorphism is G, Derived polymorphism is S
MAAEGEKKMITLKSSDGEEFEVEEAVAMESQTIRHMIEDDCADNGIPLPNVNSKILSKVIEYCNKHVHAAAAAAAASKAGSDDVGAASANSTAASGEDLKNWDADFVKVDQATLFDLILAANYLNIKGLLDLTCQTVADMIKGKTPEEIRKTFNIKNDFTPEEEEEIRRENQWAFE

SEQ ID NO: 10832 - protein, 135 aa, Zea mays
  VARIANT 108: note = Ancestral polymorphism is S, Derived polymorphism is L
  VARIANT 97..135: note = Derived polymorphism lacks residues 97 to 135
  VARIANT 75: note = Ancestral polymorphism is C, Derived polymorphism is Y
  VARIANT 61: note = Ancestral polymorphism is A, Derived polymorphism is T
MAKHKSDLEGFKLDVYGSGEDSQEVQSTARRCKVFKNLSISDVLCTTRAEALAMGKFVICAKHPSNDFFMSFLNCLTYKNSEEFIARVKEAMDREPQPLTPEQRYNLLWEAATERFMEYSDLEKVLNSEAAQPEQ

SEQ ID NO: 10833 - protein, 92 aa, Zea mays
  VARIANT 77: note = Ancestral polymorphism is R, Derived polymorphism is W
  VARIANT 73: note = Ancestral polymorphism is R, Derived polymorphism is L
  VARIANT 35..92: note = Derived polymorphism lacks residues 35 to 92
  VARIANT 33: note = Ancestral polymorphism is P, Derived polymorphism is L
  VARIANT 2: note = Ancestral polymorphism is P, Derived polymorphism is S
MPQIPPPASTSAGDAAGGDTIFFVGTTAGVCGPIRPVEQMARWSTAAVCATGGAAITSIGAGEGAGVGGSSPRFKIRTSSMTRRRLGFSLDL

SEQ ID NO: 10834 - protein, 377 aa, Zea mays
  VARIANT 283: note = Ancestral polymorphism is S, Derived polymorphism is C
  VARIANT 299: note = Ancestral polymorphism is I, Derived polymorphism is N
MADGEDIQPLVCDNGTGMVKAGFAGDDAPRAVFPSIVGRPRHTGVMVGMGQKDAYVGDEAQSKRGILTLKYPIEHGIVSNWDDMEKIWHHTFYNELRVAPEEHPVLLTEAPLNPKANREKMTQIMFETFNVPAMYVAIQAVLSLYASGRTTGIVLDSGDGVSHTVPIYEGYALPHAILRLDLAGRDLTDSLMKILTERGYSFTTTAEREIVRDIKEKLAYVALDYDQELENAKSSSSVEKSYELPDGQVITIGAERFRCPEVLFQPSFIGMEAPGIHETTYNSIMKCDVDIRKDLYGNIVLSGGTTMFPGIADRMSKEITALAPSSMKIKVVAPPERKYSVWIGGSILASLSTFQQMWISKAEYDESGPAIVHRKCF

SEQ ID NO: 10835 - protein, 73 aa, Zea mays
  VARIANT 32: note = Ancestral polymorphism is C, Derived polymorphism is F
  VARIANT 45: note = Ancestral polymorphism is G, Derived polymorphism is R
MKREYVEFKVMVNGLVAKAQKVPEEGWIVQDFTPWPGNNTRDHPGMIQVFLGHSGGLDTEGNELPRLVYVSRE

SEQ ID NO: 10836 - protein, 420 aa, Zea mays
  VARIANT 7..420: note = Derived polymorphism lacks residues 7 to 420
  VARIANT 123: note = Ancestral polymorphism is A, Derived polymorphism is V
MPATDLQGSSPFSSFGRTLLSLRRDAPASASAAAAMPPPGVDPELEEFHAHVAAHLADLSGPGAAGEEEFMSIAWIRRLLEAFLLCQEEFRVAVAEARRRRAGATPPAGERLVAEFGDRAVKALDVCNAARDGVDQARRWERLAGIAASALLAPADGQIHEGQLRRARKALSDLSVLLIDDAAAAAATGPAGGLASILASHRNRSFGRARASPSRASSSSSSSSSPSAHFRSLSWSVSRTWSAARQLQAIGAGLAAPRASEASWSLAAPAYAMGCLLHLAAWALVAAVPCPDRAAALQAHHLPAAPPRAAFPWAPPLLALQERLAEEGKRKDRRNSCGLLREIHALEKCAQRLAEAIDAAPVPLTGEREAEVREAAAQLAAACSAMKDGLDPLERQVREVFHRIVRSRMEGLDSPMPNAD

SEQ ID NO: 10837 - protein, 481 aa, Zea mays
  VARIANT 61..481: note = Derived polymorphism lacks residues 61 to 481
MDPSVSVCRLHPGVAVTGFCPACLRDRLSGLHPPSAADLRRCKSFSYARSAAAVEPQRRSCDLFRHGQPIAAAVPEEEEDQQEHGRSHSHQSKKSSSLGGLLGNKLQQWRRKNKKEPEMEVPSSWDARLGPVPALGRLPATMLSLPVEEDDDSMAAPAVPRSDGQIPVEEDYCYYYDNANNINAAAAVPGGSEQTRDYYLDSSSSSRRRRSVDRSTTSGRNSFSDANSSEAACRMMMMMNAAANGNARVSPAGIAAAESLHHYHESHHHHHHQSVLVHHQCYREEDEQQQEAYNLRAGDFSGSNGVPASKPNKKGIKGWSIWGLISKKSSSSRKHSAAGGGAVAGGGGGGGEYEYPWPELRARGYNGQMLRCNSSISARSSFSGTGTGSGRRSVSGVDMRDKYNSNNGGLRTRRDEVLLERHLSTRSSSYSRSGHHDLDPAAMAPPQMGMQLSSRPPNIPRRSSSNSKHELGKTRRSTLGL

SEQ ID NO: 10838 - protein, 157 aa, Zea mays
  VARIANT 84..157: note = Derived polymorphism lacks residues 84 to 157
  VARIANT 23: note = Ancestral polymorphism is G, Derived polymorphism is S
MRLPWPWRRKPAPQHDDVPVAVSTHLHVAAGDDDDDDNGVDSESTASSERSHLTLPVEEPVHVHDEADPQDGVHAHYEVAGSVSDEDTLSGSGSDSDPNGAGHRSRAAKRHHNPRGGRRRRSARVPAFTVAGTAAAVMLLVLAVLVAWKRRQRAAGC

SEQ ID NO: 10839 - protein, 60 aa, Zea mays
  VARIANT 27: note = Ancestral polymorphism is A, Derived polymorphism is V
  VARIANT 47: note = Ancestral polymorphism is E, Derived polymorphism is G
MGSILTEIDTKTSIKDLTISSNEKFLAVNRSSGPCIDWITADALADGKQSTGEPETCFVS

SEQ ID NO: 10840 - protein, 109 aa, Zea mays
  VARIANT 19: note = Ancestral polymorphism is P, Derived polymorphism is L
  VARIANT 26: note = Ancestral polymorphism is R, Derived polymorphism is C
  VARIANT 29: note = Ancestral polymorphism is V, Derived polymorphism is M
  VARIANT 42: note = Ancestral polymorphism is A, Derived polymorphism is T
  VARIANT 58: note = Ancestral polymorphism is R, Derived polymorphism is H
  VARIANT 75: note = Ancestral polymorphism is M, Derived polymorphism is T
  VARIANT 90..109: note = Derived polymorphism lacks residues 90 to 109
MDADGNGTVEFDELSSLAPLLLGPCRPAVAVDHAQLAEAFRAFDRDGNGFISAAELARSMALMGHPICYVELTDMMKEADTDGDGVISFQEFTAIMAKSAVDFLGLAAL

SEQ ID NO: 10841 - protein, 359 aa, Zea mays
  VARIANT 100..359: note = Derived polymorphism lacks residues 100 to 359
MDRGERLGRALDAFGGNLWALVDAALDAAARDRPDELRARRDSIVERLYAAAAGCSNCAGRPPSVAALAAAGLEEEDGEEAAPASPWAEADAQAGGAEAQTEVLGAGEPDLESKIVAIRDFLEDPNQPENELVSLLQNLADMDVTYNALQETDIGRQVNGLRKHPSAEVRRLVKQLIRKWKEIVDDWVRLDNSGGDGSASVMTADGDSPHKIQGRSHQSPRVSGFQYSPSPQRFNGSTSEMANNGFESTMDAKRRASPVPAHHNSRQMNNNHHSTTITTSTSSAPASVQKVTREQKQSLVDLDRLDSARKRLQENYQEAQNAKKQRTIQVMDINDIPKPKSRNAFIRKSGSGGLPARHR

SEQ ID NO: 10842 - protein, 203 aa, Zea mays
  VARIANT 125..203: note = Derived polymorphism lacks residues 125 to 203
  VARIANT 169..203: note = Derived polymorphism lacks residues 169 to 203
MTARSALDEVTYTGDFDRSPSTFRSSVSRDGRFPTVTAHVVIKLNGLATKVEKSRKQMKERKNRVTKIRGVKKTKAGDAKKKGGIRHTTRCLAFLKLKGLDHAIGVTVVKPIFERTKESDEHLGWVFPAAADEEPGAEPNPLNDARSVRELYEIASSNYAGKPTIPVLWDKQLKTVVNNESSEIIRMLNAEFNGIARNPGLDL

SEQ ID NO: 10843 - protein, 233 aa, Zea mays
  VARIANT 19: note = Ancestral polymorphism is Q, Derived polymorphism is H
  VARIANT 68: note = Ancestral polymorphism is V, Derived polymorphism is I
  VARIANT 78: note = Ancestral polymorphism is A, Derived polymorphism is V
  VARIANT 107: note = Ancestral polymorphism is T, Derived polymorphism is I
  VARIANT 127: note = Ancestral polymorphism is R, Derived polymorphism is Q
MYGHSWLFDVVYRFLICLQLLNTEAPDLYIRQNPVPNAYTLAINSKKPFIVVHTSLVELLTPRELHTIVYSKQTHRLVVLAHELGHLKCDHGVWLTFANILTMGAYTVPGFGMVTGFLEEQLYRWLRAAELTCDRTTLLVVQDPKVVISVLMKLAGGCPSLADKLNVDAFLEQARSYDKAASNPVGWYIRNAQTRELSHPLPVMRAREIDEWSRSQEYKTLMQKMFQMGLNRV

SEQ ID NO: 10844 - protein, 315 aa, Zea mays
  VARIANT 194: note = Ancestral polymorphism is G, Derived polymorphism is D
  VARIANT 198: note = Ancestral polymorphism is N, Derived polymorphism is K
MAAENYWRYADARQQQQAMVAAAAAAAGMAPAATVAAAQTVGSAAAAMNQQAAAAAMAQQAAAAPPLKRARPDFGDVSGGQDMTGYYPRETDRSGYHSLRENDTLGASYDRYLRNGMASVGANDTSRAAGMGAGLAAGMTAGMGAGMAAGMAGYGVDGQRMMGVVGMDSRGMGYGGRPEPPLPPDASSTLYIEGLPANCTRREVSHIFRPFVGFREVRLVNKESRHPGGDPHVLCFVDFDNPAQATIALEALQGETSYICGYGLCSCVDFLILCFVDFKFCMYMFVKFYHACCMSIVCREACFGIGKFLFIPHLT

SEQ ID NO: 10845 - protein, 1266 aa, Zea mays
  VARIANT 84..1266: note = Derived polymorphism lacks residues 84 to 1266
  VARIANT 227..1266: note = Derived polymorphism lacks residues 227 to 1266
  VARIANT 284..1266: note = Derived polymorphism lacks residues 284 to 1266
  VARIANT 324..1266: note = Derived polymorphism lacks residues 324 to 1266
  VARIANT 564..1266: note = Derived polymorphism lacks residues 564 to 1266
  VARIANT 592: note = Ancestral polymorphism is A, Derived polymorphism is V
  VARIANT 601..1266: note = Derived polymorphism lacks residues 601 to 1266
  VARIANT 707..1266: note = Derived polymorphism lacks residues 707 to 1266
  VARIANT 742: note = Ancestral polymorphism is L, Derived polymorphism is P
  VARIANT 746: note = Ancestral polymorphism is E, Derived polymorphism is G
  VARIANT 754..1266: note = Derived polymorphism lacks residues 754 to 1266
  VARIANT 1097..1266: note = Derived polymorphism lacks residues 1097 to 1266
  VARIANT 1187..1266: note = Derived polymorphism lacks residues 1187 to 1266
MQSDTLNQSSIATEDPTYTPKFVHPTADAKEPDGSIIAVYDWVIPKFVNAPFLPSPTQTEDVASPDMYTDPLKHKHHVPHGERQAILARQNHQFEATISRKVGTSIEDTSGDAVVGDDWTQRHTTMKITNNGDDDEGVIFEDDDDENEGYLFAAQYEDIEIDGTQDESIATDVSDPYDKVYNNIPEETHMLNPVPNCGYCTTKKFEYEPPSMTTNVRDSGIYTFRAQGMMYHNIKSFGREDSSRGIQSNTSWKRLFQQFAVDTYIKIESSRLDFIHKVGKQTVLSTSFIGGPRDMRRRYMDAMDLVRKFGKPDIFLTMTCNPNWDEIRRELLPGKTLQDRPDLVVHVFHAMLHELKHRLTKQDIIGKVPAYVYVMEFQKRGSPHAHFLLIMQRKYKLTCPEQYDLLISAEIPSNKYPELQKMVIKHMMHGPCGSLNPNCPCTKGRKSCKNHYPQPFSDTTLQGKDSYPVYRRRDDGRNEKVLGCELDNRWVVPYNPYLLRLFNYHINVEACGSIRAVKYLFKYIYKGHDRASVVMRDASKAHDDVDEIKQYRDARWVTPPEALWRIYDFELSQISPPMMQLQLHLPNMHMVAFHKRQMVERVINRQGVDRSMLTAYFEANRLHEEARGILYRDFPEWYTWQSGKGKVWQQRKRDMGGQVGRIVSAHPAKGECYYLRVLLNHVTGATFYVDLRTIDGGTLPTFHEAAERRGLLELDNTLDECLTEHALFQMPSALRWLFATILVYCELSDVAVLWQKHLDSMFEDYQHRSQCKTHVEQMVLIDIWNMLQSMEKDIKTFPLPPIMDAYDDAIGTAREVYKEEIIELAAGDVALKDSLNKEQRAAYDKILFAIDTDQGGLFFMDGPGGTGKTYLYRVLLATLRGQGKIVVATTTSSIAASIMPRGRTAHSRFKIPLTIDDGAVCSFTKQSGTAELLRKASLIIWDEASMTKRQAVEALDNSMRDIMGRLGLSFGGKTIVFGGDFRQVLPVVRKGSRAQVVASSLRMSYLWESMSHLKLVNNMRAKNDPWFAKYLLRVGGGTGDTNSDGDIRLPDEVCVPYSGSDSDLDNLIDFIFPNLNKNMSDSTYITSRVILSTRNDWVDMINVQMIDHFQGEHMVYHSFDSAMDDPHNYYPPEFLNTLTPNGLPPHVLKLKIGCLVILLWNIDPANGLCNGTRLVVRGFQRNSIDAEIVLGQHVGKWIFLPRIPLCPSDEEMFPFQFKRKQFLVRLSFAVMVNKAQGQTIPNVGVYLPEPVFSHGQLYVALSRAIA

SEQ ID NO: 10846 - protein, 543 aa, Zea mays
  VARIANT 417: note = Ancestral polymorphism is H, Derived polymorphism is Y
  VARIANT 279: note = Ancestral polymorphism is A, Derived polymorphism is V
  VARIANT 23: note = Ancestral polymorphism is P, Derived polymorphism is L
MAPPTEDCGWLLYLSLAAKCGDPQRLLGFAAVFVAACVVTSLLHWASPGGPAWGWYWWTRRAGLGIVRAAIPGPRGLPVVGSMGLMTGLAHRKLSAAAERQASRRRLMAFSLGETRVVVTADPDVARELLASAAFADRPVKESAYGLLFHRAIGFAPHGAYWRALRRVASAHLFSPRQIAASAAQRAAIARQMVDATTTAAAHAPVVVARRFLKRASLHNVMWSVFGRRYDLMADSREAEELKALVDEGYDLLGQLNWSDHLPWLARFDLQKTRARCCALVPRVNRFVGNIIGEHRARLGRGVDTAVMDFTDVLLSLQGDDKLSDADMIAVLWEMIFRGTDTVAVLIEWVLARLVLHQDVQSKVQEELDRVVGLGQAVTESDTASLPYLQAVIKEVLRLHPPGPLLSWARLATSDVHVGGYLVPAGTTAMVNMWAITHDPSLWPEPMEFRPERFMGPAAEDVPIMGSDLRLAPFGSGRRSCPGKSLAVATVGFWVATLLYEFKWLPPSDEPRGGGVDLSEVLRLSCEMAAPLEARVVPRHAVC

SEQ ID NO: 10847 - protein, 122 aa, Zea mays
  VARIANT 52: note = Ancestral polymorphism is S, Derived polymorphism is G
  VARIANT 37: note = Ancestral polymorphism is S, Derived polymorphism is Y
  VARIANT 31..122: note = Derived polymorphism lacks residues 31 to 122
  VARIANT 30: note = Ancestral polymorphism is D, Derived polymorphism is N
  VARIANT 26: note = Ancestral polymorphism is G, Derived polymorphism is E
  VARIANT 22: note = Ancestral polymorphism is R, Derived polymorphism is S
MHSRSGRLVVGTRKTLVFYRGRAPRGEKTDWVMHEYSMGERRSSALLRGAQSEWVICRVFTRKQHPAVISNDRKLPEMEEAAVHGHDHRSPGHLLATEAADDDYDSEQESAVPKQTPGSHIG

SEQ ID NO: 10848 - protein, 347 aa, Zea mays
  VARIANT 84: note = Ancestral polymorphism is I, Derived polymorphism is T
  VARIANT 101..347: note = Derived polymorphism lacks residues 101 to 347
  VARIANT 105..347: note = Derived polymorphism lacks residues 105 to 347
  VARIANT 156: note = Ancestral polymorphism is F, Derived polymorphism is I
  VARIANT 180..347: note = Derived polymorphism lacks residues 180 to 347
  VARIANT 191: note = Ancestral polymorphism is T, Derived polymorphism is K
  VARIANT 255: note = Ancestral polymorphism is S, Derived polymorphism is L
  VARIANT 283..347: note = Derived polymorphism lacks residues 283 to 347
MMGFANDAFVGCAHGNKQVKGFMFEKPVDLKVGVNHVILLSSTMGMKDSGGELAEVKGGIQECLIQGLNTGTLDLQVNGWGHKIYHATFSCPPWFSSGARKFIKCILDPNHDTRIKIAEILEDEWFKKGYNLDDVDAAFNGSEVNPHTHQLKLCDFGSAKVLVKGEPNISYICSRYYRARELIFGATEYTTAIDVWSAGCVLAELLLGQPLFPGESGVDQIVEIIKVLGTPTREEIKCMNPNYTEFKFPQIKAHSWHKIFHKRMPAEAVDLVPRLLQYSPKLRSTALEALVHPFFDELRDPNTRLLNGRFLPPLFNFKPHELKNVPTDFMVKLIPEHARKQCAFVGW

SEQ ID NO: 10849 - protein, 109 aa, Zea mays
  VARIANT 52: note = Ancestral polymorphism is L, Derived polymorphism is Q
  VARIANT 58: note = Ancestral polymorphism is T, Derived polymorphism is M
MPATTKPILLPRAWAAAPLLLLLLLVLHGRGGHCVGMEAAELEMDSEAHRRLLWEATTGRRYISYDALRGDVVPCSRTGVPYYNCRISTTANPYTRGCESITRCRDADP

SEQ ID NO: 10850 - protein, 140 aa, Zea mays
  VARIANT 23: note = Ancestral polymorphism is A, Derived polymorphism is E
  VARIANT 49: note = Ancestral polymorphism is V, Derived polymorphism is I
  VARIANT 51: note = Ancestral polymorphism is G, Derived polymorphism is V
MISAPLRLSAPRAAVGGSFLLGASKSKPSRIRCAAGVGRGAAAATLYEVLGLRAGATGREIKAAYRRLARERHPDVATAPGAAAEFVRLHDAYATLSDPDSRARYDRSAVAAVAVAQRPWRSGVGVYGRPLRTWETDQCW

SEQ ID NO: 10851 - protein, 340 aa, Zea mays
  VARIANT 2: note = Ancestral polymorphism is A, Derived polymorphism is T
MASRARLPGTPASIAVLILSFFQGSVCGTTFTFSNRCGDTVWPGLLAGSGTPPLETTGFALAPGQSRALYAPQGWSGRFWGRSGCDFDAASAKGSCATGDCGSGEVECRGAGASPPATLAEFTLDGAGGKDFYDVSLVDGYNLPMLVRATAPECPDTGCLVDLNGLCPDELRAAHGRACRSACEAFGSPEYCCNGAYGNPNTCHPSQYSQLFKSACPNSYSYAYDDATSTFTCNHTDYTITFCPKSTPTRSLPKSDHSFTSSFNFSCNFELDKSEHSSRRPSHEQLEDSVWLASLKASDASALATTSWSASIVLRSALAIAVATLLAAQLAPDHPMVSLL

SEQ ID NO: 10852 - protein, 354 aa, Zea mays
  VARIANT 110: note = Ancestral polymorphism is A, Derived polymorphism is G
  VARIANT 233..354: note = Derived polymorphism lacks residues 233 to 354
  VARIANT 235: note = Ancestral polymorphism is R, Derived polymorphism is C
  VARIANT 256: note = Ancestral polymorphism is W, Derived polymorphism is C
MSSSFSPEVDGNHSDDEKDGVGVLPEDQVFEILTRVPLDDLATCRMVSTRWRRITYEPAFAPLHCSRTAAVSGYLVQSLTHNRYRADFVSMPCSPPAPAVAISLDFLPSAHVRVVAVAAHRGLVCCVDVDAMRPTCYYVCKPATRQWRALPNPRVRFDTVAVAMEARPSGATRAEFKIVRFSRSVVVKPGDRLRCEVFDSRQFAWSQAPHVPLGPFSLQAQAPAVRAHGAMHWLRWSDHNTGAQDVFAFDVEAVKWRLIALPQEVDQMDNPWARKKIGAVEGRLCLLVLTHAAGAVNEEVLEVWEMANYGEGRWTKKMTISLKDLHEHDRRAVIHGVLHSSDVAFFCSFYRVMW

SEQ ID NO: 10853 - protein, 169 aa, Zea mays
  VARIANT 19: note = Ancestral polymorphism is D, Derived polymorphism is N
  VARIANT 29: note = Ancestral polymorphism is N, Derived polymorphism is H
  VARIANT 78: note = Ancestral polymorphism is A, Derived polymorphism is S
MAASDDHDPKALLQVRVSDEDGALVDALNRRAAVSAAAPSFFEGFALHGIRVESIRPGHILCSFTVPARLTSGSDHIAPGAVVALVDEIGSAASVSDGHHLKVSVDMSVNFVDLDAAAPGDALRITARALGHKGAYSGTHVIVANAATGLVVAEGRHSLFGKMKIRSNI

SEQ ID NO: 10854 - protein, 135 aa, Zea mays
  VARIANT 2: note = Ancestral polymorphism is P, Derived polymorphism is L
  VARIANT 22: note = Ancestral polymorphism is V, Derived polymorphism is L
  VARIANT 30: note = Ancestral polymorphism is C, Derived polymorphism is S
  VARIANT 49: note = Ancestral polymorphism is C, Derived polymorphism is Y
  VARIANT 57: note = Ancestral polymorphism is S, Derived polymorphism is Y
  VARIANT 70: note = Ancestral polymorphism is E, Derived polymorphism is K
  VARIANT 87: note = Ancestral polymorphism is R, Derived polymorphism is H
MPTRRAKVWEYFEQELVEVDRVMKAICKYCGTKLTNGMAIAYGSIDKICDLVRHIISSPSHIQAFNEIAERSGLPSKARLILDVPNHWNSTHNMIMEAIEYKVVLKRYAEEQLEPSPDDEEWTNSEAIGEFLGAF

SEQ ID NO: 10855 - protein, 260 aa, Zea mays
  VARIANT 118: note = Ancestral polymorphism is G, Derived polymorphism is C
  VARIANT 18: note = Ancestral polymorphism is T, Derived polymorphism is N
MGRSPCCEKAHTNRGAWTKEEDERLVAYVRAHGEGCWRSLPRAAGLLRCGKSCRLRWINYLRPDLKRGNFTADEDDLIVKLHSLLGNKWSLIAARLPGRTDNEIKNYWNTHIRRKLLGSGIDPVTHRRVAGGAATTISFQPSPNTAVAAAAETAAQAPIKAEETAAVKAPRCPDLNLDLCISPPCQHEDDGEEEEEELDLIKPAVVKREALQAGHGHGHGLCLGCGLGGQKGAAGCSCSNGHHFLGLRTSVLDFRGLEMK

SEQ ID NO: 10856 - protein, 163 aa, Zea mays
  VARIANT 140: note = Ancestral polymorphism is A, Derived polymorphism is D
  VARIANT 40: note = Ancestral polymorphism is A, Derived polymorphism is V
  VARIANT 13: note = Ancestral polymorphism is T, Derived polymorphism is A
MLDDWEENLAIITANRTKGDVLVITHLGDCLWKEKNEVAAAHSCYLVAELNIDSYSESARLCLIGADHLKCPRTFASPEAIQRTEVYEYAKVLGNSQYILLSFQPYKLIYAYMLVEVGKVSASLRYCQASIKVLKASGRAPELEVWKQLFSSLEERIRTHQQV

SEQ ID NO: 10857 - protein, 846 aa, Zea mays
  VARIANT 26: note = Ancestral polymorphism is P, Derived polymorphism is S
  VARIANT 31: note = Ancestral polymorphism is A, Derived polymorphism is V
MHVDMSHRVRLAAAALVVVAALALAPGAAAAWQLTKNGTVVSYDRRSLIIDGRREIFFSGSIHYPRSPPDMWPELIAKAKEGGLNTIETYIFWNIHEPEKGQFDFEGRYDIVRFFKLIQEHNMYAMVRLGPFIQAEWNHGGLPYWLREIPDIVFRTNNEPYKMHMETFVKIIIKRLKDANLFASQGGPIILAQIENEYQHLEAAFKNDGTKYIKWAANMAISTNVGIPWIMCKQTKAPSDVIPTCNGRNCGDTWPGPMNKSMPLLWTENWTAQYRVFGDPPSQRSAEDIAFAVARFFSVGGTMTNYYMYHGGTNFGRTSAAFVMPKYYDEAPLDEFGLYKEPKWGHLRDLHLALKLCKKALLWGKTSTEKLGKQFEARVFEIPEQKVCVAFLSNHNTKDDVTLTFRGQSYFVPRHSISILADCKTVVFGTQHVNAQHNQRTFHFADQTTQNNVWQMFDEEKVPKYKQSKIRLRKAGDLYNLTKDKTDYVWYTSSFKLEADDMPIRRDIKTVLEVNSHGHASVAFVNTKFVGCGHGTKMNKAFTLEKPMDLKKGVNHVAVLASTMGMMDSGAYLEHRLAGVDRVQIKGLNAGTLDLTNNGWGHIVGLVGEQKQIYTDKGMGSVTWKPAVNDRPLTWYKRHFDMPSGEDPIVLDMSTMGKGLMFVNGQGIGRYWISYKHALGRPSQQLYHIPRSFLRQKDNVLVLFEEEFGRPDAIMILTVKRDNICTFISERNPAHIKSWERKDSQITVTAADLKPRATLTCSPKKLIQQVVFASYGNPMGICGNYTIGSCHTPRAKELVEKACLGKRICTLPVSADVYGGDVNCPGTTATLAVQAKCSKRSPRAAQ

SEQ ID NO: 10858 - protein, 344 aa, Zea mays
  VARIANT 93: note = Ancestral polymorphism is S, Derived polymorphism is L
  VARIANT 114..344: note = Derived polymorphism lacks residues 114 to 344
  VARIANT 141: note = Ancestral polymorphism is P, Derived polymorphism is L
  VARIANT 158: note = Ancestral polymorphism is P, Derived polymorphism is H
  VARIANT 181: note = Ancestral polymorphism is D, Derived polymorphism is H
  VARIANT 211: note = Ancestral polymorphism is F, Derived polymorphism is C
  VARIANT 258: note = Ancestral polymorphism is P, Derived polymorphism is L
  VARIANT 260..344: note = Derived polymorphism lacks residues 260 to 344
  VARIANT 263: note = Ancestral polymorphism is T, Derived polymorphism is I
  VARIANT 276..344: note = Derived polymorphism lacks residues 276 to 344
  VARIANT 303..344: note = Derived polymorphism lacks residues 303 to 344
MGGSSTVAANWAHTGHPLSPQLPPNRSRGLGEAHCPRARPQFGFEHDRRRGSNLTAETAMVLPEGALERSAWSGEATLSRLVGALIAFKPLYSVLKLASREVIIRTAEKSNIPWREMTKEVLESDVYEVFERIQDPNLVYPDCQLTSPCLAFSFLSFPFLQPSQPFSCLRLRESIMAGNLDIGCSVGVSTRYLAKKFPSAQAVGLDLSPYFLAVAAQKEEKLSRPKPIRWVHANGEATGLSSDSFDLVSLAYVCHECPARAITGLVKEAFRVLRPGGTIALTDNSEQEGEAIVEETKKSNHVQRKIEKRQQDRALDTHIEEQFGSGRLLAYISARPGQCGRADG

SEQ ID NO: 10859 - protein, 140 aa, Zea mays
  VARIANT 64: note = Ancestral polymorphism is M, Derived polymorphism is L
  VARIANT 15: note = Ancestral polymorphism is Q, Derived polymorphism is R
  VARIANT 2: note = Ancestral polymorphism is A, Derived polymorphism is E
  VARIANT 1: note = Ancestral polymorphism is M, Derived polymorphism is T
MENAKTRSILLHGIRPETFRVLLRFMYTDALPGDELVESSSDVDLFHDLLAAADMHQLGRLKLLCARKLWDCVSPETVAKILGCAETNNCSELKSACLDFFLLEENFKVAVLTDEYFQLMQSFPSVIDEIRARRGFDRQT

SEQ ID NO: 10860 - protein, 124 aa, Zea mays
  VARIANT 106: note = Ancestral polymorphism is A, Derived polymorphism is S
MEMEVVEATKAPPASVSSSMTSLASASGPAGGGEFTADDLAAADQLVQLSVSGGGGGDEEDQCCSTSPRSVNNAEDDACRGLVDRRARKRYRLVSELYAATRKVKAAGAGGGGRRRKGRDGVKK

SEQ ID NO: 10861 - protein, 132 aa, Zea mays
  VARIANT 82: note = Ancestral polymorphism is Q, Derived polymorphism is R
  VARIANT 108: note = Ancestral polymorphism is K, Derived polymorphism is E
MADAQAPSPARFTARELAAAEQLIHLSESSSSSYAALPRGSVASASSTSSPRSVNAPPPPATPPPAGLLAAPAEDDEDDLDQQEVRGRPRRNRRYRLIAEIYAASEPKPIVGGARRRKVDRPSTDGAPEARK

SEQ ID NO: 10862 - protein, 508 aa, Zea mays
  VARIANT 92: note = Ancestral polymorphism is V, Derived polymorphism is A
MTEDVQMNDSEPQPAASAPAVGAPALSTLHHLKEIASVIEAGSLSKEVRRISRAFRLTVALRRRLAARDVSAFLAFALPASSEAYGRLTALVPKVKFTFPPLLLAIATRRLEDDTEMDVDAAAPATQISIKHGLPEIEIYCYLLVLIFLIDHKKYDEAKACASVSIARLKNLNRRTVDVLASRLYFYYSYVYELTNSLAEIRGNLLALHRMATLHRDELGQETLLNLLLRNYLHYNLYDQAEKLRSKAPRFEAHSNQQFCRYLFYLGKIRTIQLEYTDAKESLLQAARKAPITACGFRIQCNKWAIIVRLLLGEIPERTVFMQKGMKKALIPYFELTNAVRVGDLELFRAVADKFASTFSADRTRNLIVRLRHNVIRTGLRNISISYSRISLADIAKKLRLDSENPIADAESIVAKAIRDGAIDATIDHANGWMVSKETGDVYSTNEPQIAFNSRIAFCLNMHNEAVKAMRFPPNSHKEKESAEKRRERLQQEEELAKHMAEDDDDDF

SEQ ID NO: 10863 - protein, 171 aa, Zea mays
  VARIANT 112: note = Ancestral polymorphism is S, Derived polymorphism is Y
  VARIANT 109: note = Ancestral polymorphism is Q, Derived polymorphism is R
  VARIANT 101..171: note = Derived polymorphism lacks residues 101 to 171
  VARIANT 89: note = Ancestral polymorphism is S, Derived polymorphism is L
  VARIANT 86: note = Ancestral polymorphism is R, Derived polymorphism is M
  VARIANT 72: note = Ancestral polymorphism is G, Derived polymorphism is C
  VARIANT 68: note = Ancestral polymorphism is G, Derived polymorphism is S
MRRPASTRRRPRRRKRTMASRSAASTIAVSATAPCSPTNPTTRETAIMATDALALMDHLGWKKAHVFGHSMGAMIACKLDVMAPHRLCSLALLNVTRGGFQCFPKVDAQMLSLAFRFLRAKTPEERALVDLETHYTKVFLPCLGCAHYLQRTQGSRRKIPKTQKILDWTAG

SEQ ID NO: 10864 - protein, 506 aa, Zea mays
  VARIANT 81: note = Ancestral polymorphism is A, Derived polymorphism is D
MAGTSGHSERADEPLKEALLAARNGSGSDGDGEKDLEEIRSVGSFLRHAAEENRKLWYLAGPAIITSITQYSLGGITQVFAGHLTTLELDAISTENNVIAGLAFGIMLGMGSALETLCGQAYGAKQLHMLGVYMQRSLIILNAMAVLMLPLYLFATPILRFFHQDAEIAALTGRLALYMIPQLFAYAFNFPIQKFLQAQSKVMAMAVVSVAALLLHVAISWLLVGPMGMGIVGLAVALNASWWLVVLGQLAYILMGYCPGAWNGFDWLAFSDLSGFARLSLGSAVMLCLEFWFYMFLIVIVGNLENAQVAVAAVSICTNLFGWQIMVFFGFNAAISVRVSNELGAGRPRAAKFAILVVLMSSVAIGLAFFVLVLAFRDVYGAPFTESPEVVRAVASLGVVFAFSLLLNSVQPVLSGVAVGAGWQWLVAYINLGCYYLVGIPVGYIIAFPLRGGVQGMWGGMLTGVGLQTLILVAITLRTNWDKEASEAHSRIQKWGGSAAAKVSHA

SEQ ID NO: 10865 - protein, 825 aa, Zea mays
  VARIANT 53..825: note = Derived polymorphism lacks residues 53 to 825
MARSFNICPQIDPLVVTRVPGVALDMLFLVIIQALAVILLAKFIHLFLQRYNQPSAVSQILAGVAVGGMGLRNAILHVDVDDVEDMYGGYITLARVVYMFLVGLDLDLAALRNSTRRCVALAYATVAASLLVAAIVSSGMYGSMMHSPVKTPELLAATLMLALTNTSSITISRIAGELNLTVTENGRLLVAAAIITNLICVVGDSVLSSTALAKEKSQDLYHTSPQIKKGFLALAVAGVAVWQVRPVVTRINQRNVGQHHVRSRDLVIILLGIWFISNIQQLLGFDGMPTSLALGMAFPREGPAARSVADALMPPVNGLVLPFYFATIGMRLDYNSMSGAIIVPGLLLTLLGLVAKAIGATAASTYLNIPISDALRYSVLLNVKGHVDTMNMKFAKSEGVGSYSAQVWAEQALYAMIIGNLISTIIAGPAAAAVLSREKEEYKTRHQAMESLSAEKELRMLVCAHSAHAAPGVLSLVELLVITPHEQPAVPVLHFFEAPRDRSARTPYHQRTRGDEGAEDKGGPDPVTQMNMVVDVFSKTTGISFRQIDVVSLGASRDAAVACRGAEEAHASLLLLPCYKEQRFDGKMACRLEERWKLNHDVLERAPCTVGLLVDRPYRGGGTSFQTPIDIAPETGRTLVHPCSDRTVTHVIAAVFLGGPDDREAVSFACRLAEHPAIGLTVFRFVKRSTYDTVTSSTSRAAAAVAAGGDELDVPFKEGHVDERFLWRFYENYASRELAMYVEKVVESPADVVETLEGMSGMFSLVVLGRGGRQPVELMAGLERWSEAGSEIGPVGEILASHESLEMGSVLVMQQHTVALSPPCQ

SEQ ID NO: 10866 - protein, 97 aa, Zea mays
  VARIANT 88: note = Ancestral polymorphism is L, Derived polymorphism is P
  VARIANT 84: note = Ancestral polymorphism is V, Derived polymorphism is A
  VARIANT 81: note = Ancestral polymorphism is P, Derived polymorphism is A
  VARIANT 80: note = Ancestral polymorphism is W, Derived polymorphism is C
  VARIANT 2: note = Ancestral polymorphism is E, Derived polymorphism is K
  VARIANT 1: note = Ancestral polymorphism is M, Derived polymorphism is I
MEDVHLSPKNTHAHALLGKYYEKKGLIAEAWEAFKTATSIDPDHAMNLRSSEAKLFIKMALFRLVVWHVMMASNHQCYGWPPQARGLLQLLDRDLWC

SEQ ID NO: 10867 - protein, 91 aa, Zea mays
  VARIANT 71..91: note = Derived polymorphism lacks residues 71 to 91
  VARIANT 65: note = Ancestral polymorphism is V, Derived polymorphism is D
  VARIANT 51: note = Ancestral polymorphism is T, Derived polymorphism is S
  VARIANT 46: note = Ancestral polymorphism is Q, Derived polymorphism is L
  VARIANT 42: note = Ancestral polymorphism is T, Derived polymorphism is I
  VARIANT 35: note = Ancestral polymorphism is D, Derived polymorphism is N
  VARIANT 34: note = Ancestral polymorphism is A, Derived polymorphism is V
  VARIANT 31: note = Ancestral polymorphism is S, Derived polymorphism is Y
  VARIANT 27: note = Ancestral polymorphism is L, Derived polymorphism is S
  VARIANT 25: note = Ancestral polymorphism is F, Derived polymorphism is S
  VARIANT 21: note = Ancestral polymorphism is Q, Derived polymorphism is L
  VARIANT 17: note = Ancestral polymorphism is E, Derived polymorphism is K
  VARIANT 14: note = Ancestral polymorphism is S, Derived polymorphism is N
  VARIANT 12: note = Ancestral polymorphism is E, Derived polymorphism is K
  VARIANT 7: note = Ancestral polymorphism is I, Derived polymorphism is N
  VARIANT 5: note = Ancestral polymorphism is P, Derived polymorphism is T
  VARIANT 4: note = Ancestral polymorphism is W, Derived polymorphism is R
  VARIANT 3..91: note = Ancestral polymorphism lacks residues 3 to 91
  VARIANT 2: note = Ancestral polymorphism is G, Derived polymorphism is A
MGRWPSIVLHCELSVPEGVHQVSHFVLPFTYLMADLNGDVSTATTQFDHFTLHGGRLLGKYYENVMGMLRQFLMMIQLTNQMAGSMTMKAR

SEQ ID NO: 10868 - protein, 239 aa, Zea mays
  VARIANT 52: note = Ancestral polymorphism is R, Derived polymorphism is W
  VARIANT 38: note = Ancestral polymorphism is R, Derived polymorphism is C
  VARIANT 23..239: note = Derived polymorphism lacks residues 23 to 239
MGDNKSSSDKFFGGNQQSHSTPKKPQEKFDVGVLETSCSYSAAVPAGTSSKRHVARKWKRSLSDPFCSRPHSAPELVSGCKGSPLVPVAPEDRDACITIQQRSLSMFEDGLQNFLQLLQVFKRKVEEQCSKIEDLRNNMFQGEIFVCSFDYLFISARQTYMKGIVSQSSDNQYWDIWNRQKLSPEFEVKRQNILRANQDLTNQLVELERHFNNLEMNRSGETGRVASNLRAVYSNKSSS

SEQ ID NO: 10869 - protein, 218 aa, Zea mays
  VARIANT 19: note = Ancestral polymorphism is S, Derived polymorphism is A
  VARIANT 120: note = Ancestral polymorphism is A, Derived polymorphism is V
MAIRRLFLFISMLLAMACSCAIASDPSLLQDFCVADKTSQVRVNGFACKDAKDVVAEDFFFSGLHKAGNTSNRQGSAVTAANVAQIPGLNTMGISMVRIDYAPKGLNPPHTHPRATEMLAVLEGSLYVGFVTSNPNNTLVSKVLSKGDVFVFPKGLVHFQYNYGTDSAAALAALSSQNPGVITVANTVFGSDPLISDDVLAKAFQVDQKAVNWIQAQF

SEQ ID NO: 10870 - protein, 157 aa, Zea mays
  VARIANT 15: note = Ancestral polymorphism is S, Derived polymorphism is R
  VARIANT 28: note = Ancestral polymorphism is I, Derived polymorphism is S
  VARIANT 30: note = Ancestral polymorphism is G, Derived polymorphism is A
  VARIANT 38: note = Ancestral polymorphism is G, Derived polymorphism is W
  VARIANT 40: note = Ancestral polymorphism is R, Derived polymorphism is G
  VARIANT 42: note = Ancestral polymorphism is C, Derived polymorphism is S
  VARIANT 68: note = Ancestral polymorphism is G, Derived polymorphism is V
  VARIANT 78: note = Ancestral polymorphism is S, Derived polymorphism is G
  VARIANT 79: note = Ancestral polymorphism is C, Derived polymorphism is Y
  VARIANT 80: note = Ancestral polymorphism is A, Derived polymorphism is V
  VARIANT 84: note = Ancestral polymorphism is A, Derived polymorphism is T
  VARIANT 85: note = Ancestral polymorphism is A, Derived polymorphism is V
  VARIANT 89..157: note = Derived polymorphism lacks residues 89 to 157
  VARIANT 97: note = Ancestral polymorphism is P, Derived polymorphism is L
  VARIANT 104: note = Ancestral polymorphism is T, Derived polymorphism is K
MKLHLIETDYYAYMSTPMSFTGSAPAVSGGIWIGSASGIRICDAETVKVMMKNQQNCSMIGKLVSEVGLWANQEVEQSCAYLVAAAIHQMPRSSLGPSSARSITRWPRREAIGGAGSPQGTGFGCALPHHLGVHLYTHVLYKDLRSRRTQQARWMYS

SEQ ID NO: 10871 - protein, 346 aa, Zea mays
  VARIANT 183..346: note = Derived polymorphism lacks residues 183 to 346
MAAAAVHGRRRRLLLLLAALLHLLLVVPVPPVQAARVTALIVFGDSTVDAGNNNVIPTVARSNFPPYGRNFPPEGRASGRFSDGRLATDFYSEALGLGRAFVPAYLDPHYGIRDFAIGRVIPLWKQLDMFREYMSRLDDHLGATEAHAVVAGAVYAVSIGTNDFIENYFALTTTRFLEFTPGEYTDYLVGLARGFLAELYSLGARKIGFTGLAPMGCLPLERARALGRCAEEYNAAARAFNAALVGMVRELGEQLPGSDIRVAEVYDFFEDMVRDPGRHGFARADVGCCGTGTYEMGYACGAWAAAPAGTCPDADRYVFWDAVHPTERASRLVADHLMNTTFGRFA

SEQ ID NO: 10872 - protein, 259 aa, Zea mays
  VARIANT 8..259: note = Derived polymorphism lacks residues 8 to 259
  VARIANT 193..259: note = Derived polymorphism lacks residues 193 to 259
  VARIANT 198..259: note = Derived polymorphism lacks residues 198 to 259
  VARIANT 212..259: note = Derived polymorphism lacks residues 212 to 259
  VARIANT 232: note = Ancestral polymorphism is S, Derived polymorphism is L
MAGASNLGSLTDEWLPPPTPSPRTLVSSFLNEEFSPGPFSGLFSKHGANRPHDQSEKGRGALNSSEEFPTHVVKDPFQNGFSLEPNLFSANHISNSNGGLAERRAARAGFSVPKIDTSRVGSSAAQPSPTTGTLPFLTATNDKLTIPPATKITEDSAFYNDVFSFQPHLGSQETGFSTAEKDYGAYQQKHSLWNIHQQESSLQSSFTAAKDYWGSGNSLVLLRLDADIVLNSLVLFFRKLELDALGAIAIATTYVYMLL

SEQ ID NO: 10873 - protein, 500 aa, Zea mays
  VARIANT 287: note = Ancestral polymorphism is N, Derived polymorphism is I
MVEAAAGRRSGTSRRRPSGSGGEHQRLVALAVAARVAMVSTRSAGPAVAGGDGAGAAGTGAGPAAGRGRCMEDFFDCLLGLLGALGMTWATARPQRQPLPPLPRGVGAGPEPTDARRFAAALRATPGRIAGNGACAVASLYTLQGKKGVNQDAMIFWENFCSRDDTIFCGVFDGHGPYGHLVAKRVRDLLPLKLGADLGMEDGRVASTGNIKLNTNDVASSEHIVRGGTAVSSEAQQNGDYPEVFPALRTSFLKAFHVMDRDLKLHKNIDCFFSGTTAVAVIKQGHNLIIGNLGDSRAVLGTRDENNQLVAVQLTVDLKPDIPSESQRIRQRRGRIFALPEEPEVARVWLPRYNSPGLAMARAFGDFCLKDHGVISVPDVSYHHITEKDEFVVLATDGVWDVLSNDEVVNTVSRVTSRASAARFLVESAHRAWRTRFPTSKVDDCAAVCLFLNTNEASESSSSLANNLADAVQVSTAQCSKTIQVSAPIDGNEVSVVETR

SEQ ID NO: 10874 - protein, 227 aa, Zea mays
  VARIANT 66..227: note = Derived polymorphism lacks residues 66 to 227
MAPQPGTYLEALKGLRLLAVPSFVVFLLRGNSEKPRSILAVHSKELDVGFVMTEETLADVMTNEEWLTLSVIANAQKLELDHDNIFLKDYDAWIYIKEGGVTYRHDTDMSSIRHRYISFKYTFFAQFLQYSPFLNDIRSEDAGATVSSGSLAALHEVVSLPGPTPPDAALGYEVIDVVASYRFEARAMPAAEEDVLMRTLQALLACLRVPALGDRRVVAAAAGEGKK

SEQ ID NO: 10875 - protein, 168 aa, Zea mays
  VARIANT 78: note = Ancestral polymorphism is W, Derived polymorphism is C
  VARIANT 77: note = Ancestral polymorphism is T, Derived polymorphism is M
  VARIANT 74: note = Ancestral polymorphism is P, Derived polymorphism is L
  VARIANT 71: note = Ancestral polymorphism is D, Derived polymorphism is N
  VARIANT 68: note = Ancestral polymorphism is I, Derived polymorphism is S
  VARIANT 54: note = Ancestral polymorphism is I, Derived polymorphism is N
  VARIANT 52: note = Ancestral polymorphism is S, Derived polymorphism is C
  VARIANT 48: note = Ancestral polymorphism is K, Derived polymorphism is E
  VARIANT 46: note = Ancestral polymorphism is G, Derived polymorphism is W
  VARIANT 43: note = Ancestral polymorphism is N, Derived polymorphism is S
  VARIANT 30: note = Ancestral polymorphism is G, Derived polymorphism is E
MVAAFAWAAWLKEYHEKVLVEIYRFVHVEGLDLSFLNEGLLKNRRGFKLFYSIIFGGTTIHVSMTLNILADLSPLFTWDTKQVFVFVAAECETPHDAFIQVSLSVIILHESIYYLWSCNVVVFKYGSGLIIVAIFVLKLTSVKEKSLGLLTQNFVKLFFTMKVETISL

SEQ ID NO: 10876 - protein, 349 aa, Zea mays
  VARIANT 170: note = Ancestral polymorphism is E, Derived polymorphism is K
  VARIANT 100: note = Ancestral polymorphism is D, Derived polymorphism is Y
  VARIANT 96: note = Ancestral polymorphism is R, Derived polymorphism is C
  VARIANT 84: note = Ancestral polymorphism is C, Derived polymorphism is Y
  VARIANT 69: note = Ancestral polymorphism is P, Derived polymorphism is S
  VARIANT 47..349: note = Derived polymorphism lacks residues 47 to 349
  VARIANT 43..349: note = Derived polymorphism lacks residues 43 to 349
  VARIANT 40: note = Ancestral polymorphism is A, Derived polymorphism is V
  VARIANT 32: note = Ancestral polymorphism is P, Derived polymorphism is S
MPVARPEPQEPRVIAHVDMDCFYVQVEQRRNPTLRGQPTVVVQYNGWKGGGLIAISYEARGFGVKRRVPFLSSSMRGDEAKRVCSGINLVQVPVARGKADLNLYISAGVEVVAILASKGKCERASIDEVYLDLTDAAKEMLLQAPPDSPEGIFMEAAKSNILGLPADASEKEKNVRAWLCQSEANYQDKLLACGAIIVAQLRVRVLEETQFTCSAGIAHNKMLAKLVSGMHKPAQQTVVPSSSVQDLLASLPMKRIKQLGGKLGSSLQDDLGVETIGDLLSFTEEKVQEQYGVNTGTWLWKTARGISGEEVEDRLLPKSHGCGKTFPGPRALKYSASVSLLLFLGLDLR

SEQ ID NO: 10877 - protein, 103 aa, Zea mays
  VARIANT 14: note = Ancestral polymorphism is T, Derived polymorphism is I
  VARIANT 36..103: note = Derived polymorphism lacks residues 36 to 103
MSPAAPQHKLREAIAMVDEVGPPEKPAMEPAPAAKQIMVPEKPEEMLRAQHMLTTLVDEVRPPEKPEETPENTSAVDQMGLMERGAFAASWLAKGILTYIHPA

SEQ ID NO: 10878 - protein, 261 aa, Zea mays
  VARIANT 208: note = Ancestral polymorphism is R, Derived polymorphism is C
MAPTAVDPGPSDHLLAPAPAAMAGGGDGGDGQMEVVFNVSSSDTDSDDLGAGGGKRSRPVAGQGGGRDREDKKARILAAAATVPAGFLEPLSPVRLLPPPAPGRSVTKQFWKAGDYVGKPDHLLAVVAAQHSDSGMDHVRVHPKFLHSNATSHKWALGAFAELLDNSLDEVVHGATYVNIDMIESKKDGTPMLLVQDNGGGMNPDKMRHCMSLGYSAKSKVKNTIGQYGNGFKTSTMRLGADVLVFSCSRGIEGTRLSSLP

SEQ ID NO: 10879 - protein, 450 aa, Zea mays
  VARIANT 251: note = Ancestral polymorphism is D, Derived polymorphism is G
MEAMDTEPSSPAPAAAVNLPPPPYHHCPAPADEVAATPQPKPKQSTAGPGLRTPSPPPSVQVSGYSLHDLLLLSPPPPSSRRHRSSTRGAAGTSVDESLEIVAVAGTPTPPRRRRRGGAEQCVTPVLASPRNARRARRRLEKDVEAVEDAGRRARRRKSTRAAPKAAAAADKAEAALNEEDITMAVVPACPAATCGTDFLEQSDLEGLWERIVELVMWRNMAKSALWFGFGSMFFSCSLSRDVTFRHANFDIQFTRNPISALCHLGVMILGLAFFKDSVPQRPQVENERRFRLTEEDMLRASQAVLPFANSMISTAQVIFSGEPSMTLKVLPLLLFGAKYGGLVTVWRLLAAGFFISFTVPKLYSCYSSRIHKRVEILRDQALEAWKSCPRKKLVAAIIVTMFWNMFSVKTRVMAAFVSLVILRYNKKHHKAAEVGSYRDEQGQTMEMDS

SEQ ID NO: 10880 - protein, 485 aa, Zea mays
  VARIANT 118..485: note = Derived polymorphism lacks residues 118 to 485
MALSVEKTSSGREYKVKDLSQADFGRLEIELAEVEMPGLMACRAEFGPSKPFAGARISGSLHMTIQTAVLIETLTALGAEVRWCSCNIFSTQDHAAAAIARDSAAVFAWKGETLEEYWWCTERCLDWGEAGGPDLIVDDGGDATLLIHEGVKAEEDYEKTGKIPDPESTDNAEFKIVLTIIRDGLKADPKKYRKMKERLVGVSEETTTGVKRLYQMQETGALLFPAINVNDSVTKSKFDNLYGCRHSLPDGLMRATDVMIAGKVAVVCGYGDVGKGCAAALKQAGARVIVTEIDPICALQALMEGLQVLPLEDVVSEADIFVTTTGNKDIIMVDHMRKMKNNAIVCNIGHFDNEIDMLGLETYPGVKRITIKPQTDRWVFPETNTGIIVLAEGRLMNLGCATGHPSFVMSCSFTNQVIAQLELWKEKSSGKYEKKVYVLPKHLDEKVAALHLGKLGAKLTKLTKSQADYISVPIEGPYKPAHYRY

SEQ ID NO: 10881 - protein, 360 aa, Zea mays
  VARIANT 219..360: note = Derived polymorphism lacks residues 219 to 360
  VARIANT 212..360: note = Derived polymorphism lacks residues 212 to 360
  VARIANT 198..360: note = Derived polymorphism lacks residues 198 to 360
  VARIANT 162..360: note = Derived polymorphism lacks residues 162 to 360
  VARIANT 21: note = Ancestral polymorphism is Y, Derived polymorphism is D
MTMNCGFFYQGLSPMNVRYLYAALFLVANVVAWFSRENHSSYFLNQRVGGCQGKIAHLGAGIFLLVQLVSFMRFITRLNYKFCQTNYEESDYKCFVFGLLGTVYSTFSTGSDYKCMQLWNIVESEDDVPYGYGFFHFVFAVGSMYVGMVFVGWDTHHTMKQWNVDIGWMSTWVHIVNEALVVVFYIAILLARIFGIGWLRHLLAKVFGTGDQLHSGESQTTTTSDEMYTTSSSLSPFYQTTEETMTTSDGMYTASSSLSSLYLTPEETPDNNAISISNYNTDEPPSPPPISLVSDEIDISEASPPPSPPPHTVDEMDNSEASPPPLSHTIELKMFEVPTTSGNNEEDEEDDDSIKEWQSD

SEQ ID NO: 10882 - protein, 381 aa, Zea mays
  VARIANT 211: note = Ancestral polymorphism is T, Derived polymorphism is M
MTSRAAAEAALLLPLRLHSAPLRLRFFCTSASRLRWACSAAALLAVVSLVTAICAMPDAGAGTNVEADAGALRLEIEALRLKVARLESLLEANSKALDIKASILEEDNKLNEAMEREIQLLTNGPDRTKNSQSKSYSAGNIKSMEDEVRQLQHEIIKINSNSYTVESLAHDTEKRVEALSLEVKKIEDMTAEQWIQIRQLEQAFVLTKMMTSKVHERSRPSDTVYKWPGKEIIVKYVRNIKLDGIYIRGASYVRSCFSHTYKQSRSFVQAISRCYHETSRFRKAIRHRYTSDINKPDVFFLGGTISRSNISLPYNQFKIFISLARKFHYKAQGFIRDVMESNKYSCGLSNEPVTFILAYLVVISPLWIAWFLYSTWFSSRK

SEQ ID NO: 10883 - protein, 384 aa, Zea mays
  VARIANT 22: note = Ancestral polymorphism is T, Derived polymorphism is M
  VARIANT 60: note = Ancestral polymorphism is P, Derived polymorphism is Q
  VARIANT 69: note = Ancestral polymorphism is G, Derived polymorphism is R
  VARIANT 76..384: note = Derived polymorphism lacks residues 76 to 384
  VARIANT 81: note = Ancestral polymorphism is D, Derived polymorphism is G
  VARIANT 85: note = Ancestral polymorphism is R, Derived polymorphism is H
  VARIANT 98: note = Ancestral polymorphism is W, Derived polymorphism is R
  VARIANT 106: note = Ancestral polymorphism is V, Derived polymorphism is M
  VARIANT 117: note = Ancestral polymorphism is C, Derived polymorphism is Y
  VARIANT 145: note = Ancestral polymorphism is S, Derived polymorphism is R
  VARIANT 183: note = Ancestral polymorphism is G, Derived polymorphism is R
  VARIANT 197: note = Ancestral polymorphism is L, Derived polymorphism is I
  VARIANT 222..384: note = Derived polymorphism lacks residues 222 to 384
  VARIANT 227: note = Ancestral polymorphism is P, Derived polymorphism is H
  VARIANT 360..384: note = Derived polymorphism lacks residues 360 to 384
MVRLEEELRHLMVRHAVPIDLTDLFFSLRRLSLESMDNLDICPDFDAATPHSLDATPAGPETARGASLGSNPFEDQRLSIGDVQRIEWKLLNDKMKKWVHGVKTVVRVLLAGERRLCDQVLDASDELMYACFLESTKGCIMHILSFGGVVAVCPRSPKKVPWILDMYEALAEVIPEMKDLCIGCSRDGVISDVQAILDRLGDAMWGSGTLGENDPFWKASSEVDILHGGQFARVYHYFAASEIYNAICVFIACYVWMTGFGNFSYYYIKKDFSIARFAQMMWRLNFFVAFCCIVLDNDLMLYYICPMHTLFTLMVYGSLGLFNKCNEVPSIMAIKIVCLDMAAGPSDGVDAVLNVLASMQEQNHRVLFDVANGRIGFSRELCTA

SEQ ID NO: 10884 - protein, 130 aa, Zea mays
  VARIANT 83: note = Ancestral polymorphism is E, Derived polymorphism is K
MLGRWKAHPRDPLAPASLTFDGRRIPGILHGRALPSSPHASCPPARILRSAARAISASSARPHPPRLSLNHLRAYTSSPRRDEWRRHPMVGNPLRHTTPGLDIAIVGFGIYLIVEAAYNRLKRPSGNHHH

SEQ ID NO: 10885 - protein, 632 aa, Zea mays
  VARIANT 23: note = Ancestral polymorphism is S, Derived polymorphism is L
MAMSSPGVVWRSGFPTIGCLLHSSLRGLLVYARRWLSDSRGGCGRADDAEMARAAERRMRAGGQEAWGEDGRARPWRIPGMRLPSKACVITSQKIGGNRNSSGSCISRLFALDYICTQGDLALIDFIKEIPCEPRVEVVLIDDAFVERKSMECLFQPNAYLGDEVIDFYINLIKAQKHLKCRSGGRVHIENAFQFNFLKRDGDVDIKIEELYPIEDMTQICSAERRVLLYLDHDMVFIPINIRETHWYLVVIHARNMEIQVLDSLGTSQDRKDLTDSDDMSHFRKKMAAILLSSELNKRRGCLLYKNDKEVDSGSPSDVEILENPTDSKKRKLLHVLDDNEVVYEDEEGPITQADLQKWFVDDWDKRTHVKVSNDGCTNDFLMVGLSTKDMPVTKADSIDVLCDYIMAIEDDTTLEMTWVRSFNPFKIEISVKNLQNILTINKDMTLRCFDMAVRLLANKESCRPKGEIINNRKHYMDMRFWVLMPWKFNGCHALFVIDHVKKHVTFIDFTPTQDWCKHMPYKRFAEAIIMTSKKYKIAYSKKRSGWAEDIFKWEHTIQTGVPIDLRGFNTSYLVLQAMAMWRNDRRMKFVGDAKIVRRSFVIDLLSYEDNSCRYAIPANIQQRLIDIAKKD

SEQ ID NO: 10886 - protein, 434 aa, Zea mays
  VARIANT 125: note = Ancestral polymorphism is G, Derived polymorphism is E
  VARIANT 322: note = Ancestral polymorphism is F, Derived polymorphism is S
  VARIANT 333: note = Ancestral polymorphism is S, Derived polymorphism is L
MATHASDNGSGHAEWRFARAAKEGALAVAGDKMSIRAARFKISASVDGRDPRPVLPLAHGDPSVFPAFRTAAEAEDAVAAALRTGKFNCYPAGVGLPEARRALAEHLSSDLPYKLSTDDIFLTAGGTQAIEVVVSVLAQPGANILLPRPGYPNYEARAGLHNLQVRHFDLIPERGWEIDIDSLESIADKNTTAMVIINPNNPCGSVYTREHLAKVAEVARKLGILVIADEVYGNLVFGDTPYVPMGVFGHIAPVLSIGSLSKRWIVPGWRLGWVAVCDPNKILQETKIIASITNFLNVSTDPATFVQGALPHILGNTKEDFFRRIIGLLAETSEICYREIKDIKCITCPHKPEGSMFVMVKLNLYLLEGIHDDIDFCCKLAKEESVILCPGSVLGMENWIRITFAIDSSSLLDGLERIKSFCQRHKKKNLLNGH

SEQ ID NO: 10887 - protein, 183 aa, Zea mays
  VARIANT 13: note = Ancestral polymorphism is H, Derived polymorphism is Y
MGDPLQAAVAAAHALSLLWRKPLMEVNHCVARTSRCQAVASVKYPIYDQTVYLNDYHKKMLKDQYEGLKTIEQITMDSASVETNMFKLCKVMSVQFGQKGIPYLNTYDGRTIRYPDPLIKANDTIKIDLETNKIMDFINFDVGNVVMVTGGRNTGRVGAIKNREKHKGSFETIHVLLGAFCYV

SEQ ID NO: 10888 - protein, 702 aa, Zea mays
  VARIANT 490..702: note = Derived polymorphism lacks residues 490 to 702
  VARIANT 234: note = Ancestral polymorphism is P, Derived polymorphism is L
MDITEVTVVHHAALVLAALWVAAASGWTHPALFLVGLLYIFAVNQRYTMRLWRRIQYEERKCANQRKLLSDAETVRWLNYAVEKIWPVCMERVASQQFLLPIFPWFLEKFKPWTARKAVIQSLYLGRNPPMFTDIRVVNQSTDDDHLTVKQLKFTCQVLEIGMNFLSADDMDARMAVQLRKRLGFGITTNMHITGMHVEGKVLVGVRFLRQWPFIGRVRVCFVEPPYFQMTVKPLFGHGLDVTELPGISGWLDRMLDVAFGQTLVEPNMLVIDLEKFASESTGPFSFIHLAKSLMLRHAAVQGKHLLAADNWFSVDEKPPIAYARVEILEGADMKPSDPNGLADPYVKGQLGPYRFRTKIHKKTLDPKWLEEFKIPITSWEALNLLHLQVRDKDPIFDDALGDCSISINKLRGGIRHDIWIALKNIKTGRIHVAVTVLEEENEKVSNDEEEQCGIHKVDKASTPRSSFSSRTNHESECSDEFRKMSDEFEPVDIEGSEKPDVWVHRPGSYVTSTWEPRKGRARCQDSRIHRENDSCSDSPRSSVSGSHRSDSSTEEPTSSKSHRHLQKVKKGLGKLAGAVLHRSPKENDDEASPCVTPHQNIRPVGESRVSVTYVVDQDPAGVDGSGSRRDDHQQSPEREELDSPSKRHLRKKAVHMVKHAGKTAHNLKSMFSKKGLDKSKEEHRSDEECDEEGDVVAARRV

SEQ ID NO: 10889 - protein, 146 aa, Zea mays
  VARIANT 109: note = Ancestral polymorphism is A, Derived polymorphism is T
MGALTVAPQLSSAPKGKIAGKKVQVDERFTEITKIVLRLYPLYLGVFNKYENKSSRILIELDDQKVAWTIWKKIQLESSVLDSKSAMRVTVLSHSPHLLFFTREKELATVKINLADVEIIASLIYRFLGIIIESYETSISQGDEEI

SEQ ID NO: 10890 - protein, 146 aa, Zea mays
  VARIANT 84: note = Ancestral polymorphism is A, Derived polymorphism is V
  VARIANT 100: note = Ancestral polymorphism is P, Derived polymorphism is L
  VARIANT 104: note = Ancestral polymorphism is R, Derived polymorphism is H
  VARIANT 115: note = Ancestral polymorphism is G, Derived polymorphism is S
  VARIANT 130: note = Ancestral polymorphism is W, Derived polymorphism is S
  VARIANT 133: note = Ancestral polymorphism is A, Derived polymorphism is D
MAQSSSASVKLLVLVVLPALLLFLVQAQGARPAAANTTTPTPATTTGCAASSVTVSQSNTGDRAGYDPVFEVTVSNACRCAVRAVRLRSEGFASSVPVDPRLFRRAGRDYLVADGRRIEPGADARFRYAWDRAFRMTAAAVRDDCS

SEQ ID NO: 10891 - protein, 366 aa, Zea mays
  VARIANT 347..366: note = Derived polymorphism lacks residues 347 to 366
  VARIANT 333..366: note = Derived polymorphism lacks residues 333 to 366
  VARIANT 288: note = Ancestral polymorphism is A, Derived polymorphism is T
  VARIANT 283: note = Ancestral polymorphism is D, Derived polymorphism is Y
  VARIANT 227: note = Ancestral polymorphism is D, Derived polymorphism is Y
  VARIANT 198: note = Ancestral polymorphism is R, Derived polymorphism is W
MKVEECFLKVEQSPPESTSNALQLATAALVKKELLAHADSNIILVVASCISEITWITAPDAPYDDDAMKDVLSLIVEAFKHLDDIESPFFGRRTSILDTIAKVQSCVDGTWSTITGSCTVVRDVKDLLFHSYFSLMDDLRLQKPPDGEPYEIRNQGEDLVNRGVITMKDIEEMKSGKVGSGVLNVGLPAYVILNALLRSAKADSVGLILSDGSEITSDNRPKNTIFDWFFDPLMVIKEQIKAENLTDEEEEYLKMCVLLAGDPSRLKGSLPHVPSLIERKKADIDAFTRRLQGITKSISRYPTSKSRFDVLVKALLSELERTMGQSGNGSQSQAHRLRNSVARMLSQKSMGKTANIREKRKRRNYL

SEQ ID NO: 10892 - protein, 483 aa, Zea mays
  VARIANT 103..483: note = Derived polymorphism lacks residues 103 to 483
MHESLSNGAGGTPPLPNGRAAAAGAARSRLGRDGPPSELDVMKEKFSKLLLGEDMSGTGKGVPSALALSNAITNLAASVFGEQRKLEPMAPDTKERWKREVGWLLSVTDLIVEFVPTRQTAENGTTMEIMSTAQRRDLAMNIPALRKLDAMLIGYMDNFVDQTEFWYEKGGDNKRDDDKWWMPTVKVPSEGLSDVTRKWLQYQKECVNQVLKAAMAINAQVLVEMEIPEIYIESLPKKGKTSLGDAIYRSITEETFDPLEFLAGMDLSTEHKVLDLKNRIEASTVIWKRKMQTKDSKSSWSSIVSFEKREQFEERAETILHLLKLQFPGTPQSQLDISKIQYNRDVGYALLESYSRVLESLAYSVMSRIEDVLSADAAAQNLTASEAARRALESTSAELPAARKLDAKEELEKLNEAPASMTLFDFMGWHFDQDELMKRREDGTLDADGEAMLLKKAPSMAPKKFSYVDSLSSGGMRSPSARH

SEQ ID NO: 10893 - protein, 564 aa, Zea mays
  VARIANT 74..564: note = Derived polymorphism lacks residues 74 to 564
  VARIANT 102..564: note = Derived polymorphism lacks residues 102 to 564
  VARIANT 129..564: note = Derived polymorphism lacks residues 129 to 564
  VARIANT 158..564: note = Derived polymorphism lacks residues 158 to 564
MEFGPEDDKVDDDLDFTFSRVRMMAKPKTDIGHSCKDAQHGLAISKMEVGSTTRDGRLEVGKEKQGCLGLSLAQVFRHSWRPINPKWLWVPRSNILSGKGYQARPEEVRRLGQRARRIKRVEPPTPFVRSFSQVVKEGRMAWRRESGGNSWKRPPKDWMEEDDLLDSEFSREEDLRSKLQRAPGEHTEQDQQDVGHHRQGSFTDSSFGESQEDMEEDAGVEGTLQEIYDEIPIAAFHPTKGFFSSDLKKVEDHTDTVNSSEVLMLNKEIEQKIISDSQLSDVLDNEGSVDDRAKVAPEKSQIEMMKQRVDDQTFCSNKEINTLTNSRVNRNSIGLDGMNHFGGRINLQLANQEKKDQDLKLMLDDFPIEDNEEDWHGNIMEQVELYHTEEDGEHEWEKALSKKGKKKSRRNFPVIATRASSRIARDGIPILEKATKRAREKNQLQGTSRPNPFLILNNESNENLSTVMKDIGIVLENYDNQIDLFKAEERVRATIAEANYNKYVDKINSKNAPQTEEDLQELAMEAITNKERLEAPLISQEGPGGAEPEKNKKKGRPGKQSKKG

SEQ ID NO: 10894 - protein, 184 aa, Zea mays
  VARIANT 51: note = Ancestral polymorphism is R, Derived polymorphism is K
  VARIANT 40: note = Ancestral polymorphism is R, Derived polymorphism is S
  VARIANT 27: note = Ancestral polymorphism is L, Derived polymorphism is I
MDVSVGSRARHLTDVDGDLWDLVRRDLQLKATFLYIDLNSLIACNECEERREEITLLANDFFYCKDEDDEDPFLPAGFVSAFSAFSLERHPVLARSASTFSGHLAELERALAVDFATAASNPDPAGPMVSVDSLRAYLQIVDVASILRLDGDIADHAFELFKDCSSATCLRNRSVEALATAALV

SEQ ID NO: 10895 - protein, 342 aa, Zea mays
  VARIANT 5: note = Ancestral polymorphism is S, Derived polymorphism is F
  VARIANT 8: note = Ancestral polymorphism is P, Derived polymorphism is L
  VARIANT 9: note = Ancestral polymorphism is R, Derived polymorphism is H
  VARIANT 10: note = Ancestral polymorphism is G, Derived polymorphism is D
  VARIANT 13: note = Ancestral polymorphism is A, Derived polymorphism is V
  VARIANT 15..342: note = Derived polymorphism lacks residues 15 to 342
  VARIANT 172..342: note = Derived polymorphism lacks residues 172 to 342
MRLPSDVPRGHFAVYVGEWRRRFVVHIALLDRLEFRPCCGAPRRSSGSRAPAVPSSSPARRSPSAPSPPRSPAPGERAPVSCRHMLGICMPGPRPLQRRLFIRFIGSARAPYLSIIREEEQERRRSPPGHRNPDEMDDNTRFAAESQKKPIVPDDDLVELLWHNGSVIAQPQAHHRPAPPSDRDRPGTSGLTTEETAAWFLNTLDDPLEKDLYTQLWYSTIADAAPQHEGTFPGPTSHPSSPPPPVGSSGVESSWAGDICSTFYGSNQVPRTPTGIRGKDTALQSEVPSDAGAHDGTSSSGGSESNYGGSGLPSDSVHGHKRKGMCRDESDSRSEVFTFVFV

SEQ ID NO: 10896 - protein, 243 aa, Zea mays
  VARIANT 124: note = Ancestral polymorphism is R, Derived polymorphism is C
  VARIANT 133: note = Ancestral polymorphism is A, Derived polymorphism is V
  VARIANT 154..243: note = Derived polymorphism lacks residues 154 to 243
MQFQILLRLITAVHCVSFWMCFSELCIFCHVFPENKFGADPNSDRACTLCLWKCVSRWRSIATLEKPLICLLTNLFTAPSMGNFLFCLMGDMSYTPHHHDGCWKAPLHCSELTDEQMIAFIVHRVRASVVFLAAFPSLLRKYVKALLHTWARGRGAMPLVSFMFLRDLCIQVGSNCLDTCLKGIYKAYLVNCKLSKSICGSKQQHIQILGNCARELYSLDPQCVSACFCFHPSTGGYPKRSSY

SEQ ID NO: 10897 - protein, 1084 aa, Zea mays
  VARIANT 946..1084: note = Derived polymorphism lacks residues 946 to 1084
MGCSASKCCSQLKCSLCSNGCLGQAPDSPRESRGKSSRGRGRVDSSGSDDSSGDDLGEDDDAFNHMNATRESTAGISRLSRVSSQFLPPDASRKVQVPLGNYDLRYSFLSQRGYYPESLDKANQDSYCVHTPFGPSPDDHLFGVFDGHGEYGAQCSQFVKRRLCENLLRDNRFRTDAVLALHSAFVATNTQLHADNLDDSMSGTTAVTILVRGKTIYVANTGDSRAVIAEKQGDDIVAVDLSIDQTPYRFDELERVKECGARVLTLDQIEGLKNPDVQCWGTEESDDGDPPRLWVQNGMYPGTAFTRSIGDSVAESIGVIADPEIFVLDLNSNNPFFVLASDGVFEFLSSQTVVDMVSKYKDPRDACAEIVAESYRLWLQYETRTDDITIILVHINGLTDKESTQTVTKVTLQPSQQVVGLAGPESPLIVSSNTNNQRSKHDLSRARLRALESSLENGQLWVPPSPSHRKTWEEQAHIERVLHDHFLFRKLTDSQCHVLLDCMQRVEVKPRDIVVQQGGEGDCFYVVGSGEYEVLAIQEENGKEITKVLHRYTADKLSSFGELALMHNKPLQASVRAVTSGTLWALKREDFRGILMSEFSNIPSLKLLRSVQLFTRFTVLQLSQLAESLVEVSFADGQIIVDKNDKFSSLYIIQRGRVRLILATDQMTSDTWDLISAETKQAQSSRENGNYVLDIDEGGHFGEWSLIGETIAFTAIAVGDVTCSTIMKEKFDSIVGPFPKLSQADSKIKESLVTLENVADGDFPFRRVKLSDLEWKMCIYAADCSEIGLVQVRGYDKMRTLKRFYIKRVQDLHKEVQVFEEKDLMKSLSKSTCVPEVLSTCADQSYLGILLNCCLCCSLASILHTPLNETSARFFAASVVVALEELHQKSIIYRGVSADILMLDRSGHLQLVDFRFAKKLEGQRTYTICGIADSLAPEIVLGRGHGFPADWWALGVLIYFMLQSDMPFGSWRESELEPITKIAKGHLVMPVSFSAEVVDLITKLLVVDENARLGTSGAEAVKKHPWFDGTDWERIASGTCAAPEEITERINYCIETLNEDLSASPSVPIEDPDDLTAPEWIQDW

SEQ ID NO: 10898 - protein, 657 aa, Zea mays
  VARIANT 295..657: note = Derived polymorphism lacks residues 295 to 657
  VARIANT 80..657: note = Derived polymorphism lacks residues 80 to 657
  VARIANT 71..657: note = Derived polymorphism lacks residues 71 to 657
MGALRRVCVPRPWTSPTVFAFRIGFLTSLTARSTSSRFIGYVPIPAPYSRPICTFGILAALIGSLSGSVIQWKNLNPGNWFLIAVLPRLRSLIWLVNQLCQMRSVRASTGLKQRQSVFDQISFPLRTVSDHGAVVRPHFQNYSNRRIGRKVRSGFRSSLGGPALPHGPHAVLSSTNASPSTELALFTKPHSTSLPWKNPSPSCSLLSVVPPPPSHSSTLGATEDMAFRRVDPAPFLPHGFVAQQVDHREIMGIVLVHPLPEHEVNFHIFDDIIREYLVEVRRVQVRSIQRSHLGQALVRFRVLMWDPDPNNATRLLVRARVTSLQEVPQFIAFSVAEGFQGVSWTVQCDIVQQFMLGAQPQDEDPVPPYPHDGVNAEEDVAINADEGWDPWPVKQAQPPEPVVIANNANVAINEEEQFSYQLSGLEDLPSDDSGNNVEGQDDMQIEENINVGLMLHLDQTNPDPAFEDFMARKCSSSWADLFPGNDGSVFVPKLSLHLSHPAWTPFQSEFPPIVFLPPVRTPLLSHSPLPSQRQLSEKRQPISVDTTVRRSARLRAKAKGFKNCPRIGKKNCSCCTQYTPTLQLDVIKKLGAEFCKMIPSKLNPEDLSRSKATGIAIQRPVVPPSSKDDEPEPSDEQVGDPHFNDDNDDESSTSAGL

SEQ ID NO: 10899 - protein, 263 aa, Zea mays
  VARIANT 174..263: note = Derived polymorphism lacks residues 174 to 263
  VARIANT 152: note = Ancestral polymorphism is A, Derived polymorphism is V
  VARIANT 134: note = Ancestral polymorphism is Q, Derived polymorphism is R
  VARIANT 128: note = Ancestral polymorphism is A, Derived polymorphism is T
  VARIANT 107: note = Ancestral polymorphism is P, Derived polymorphism is L
  VARIANT 74..263: note = Derived polymorphism lacks residues 74 to 263
  VARIANT 34: note = Ancestral polymorphism is I, Derived polymorphism is S
MATKILALLALLALLVSATNAFIIPQCSLAPSASIPQFLPPVTSMGFEHPAVQAYRLQLALAASALQQPIAQLQQQSLAHLTLQTIATQQQQQQFLPSLSHLAVVNPVTYLQQQLLASNPLALANVAAYQQQQQLQQFMPVLSQLAMVNPAVYLQLLSSSPLAVGNAPTYLQQQLLQQIVPALTQLAVANPAAYLQQLLPFNQLAVSNSAAYLQQRQQLLNPLAVANPLVATFLQQQQQLLPYNQFSLMNPALQQPIVGGAIF

SEQ ID NO: 10900 - protein, 426 aa, Zea mays
  VARIANT 278..426: note = Derived polymorphism lacks residues 278 to 426
MDRIVGSKYKLGRKIGSGSFGEIYLATHVDTYEIVAVKIESSKTNHPQLLYEAKLYNALQGGTGIANIKWCGIDGDENILVIDLLGPSLEDLFVYCGRRFSLKTVLMLADQMITRIEFMHSKGYLHRDIKPDNFLMGLGRKANQVYVIDFGLAKRYRDSATNRHIPYRENKNLTGTARYASRNTHLGIVLLPEQSRRDDLESIGYVLLYFLRGSLPWQGLKAATKKQKYDKISEKKLSTPIEALCKSHPVEFASYFHYCHSLTFDQRPDYSFLRHVFRELFEREGYQFDYVYDWTLLKCKQSQKAKVQQGCSHDAGVSSRPVATNVDKHQGSLCSIKLVGVARPINASGLLEAEQRPAIRMQLNSRSNNLHPERLGVSASHNNVLLQSTSLDNADAPMDHATHSKAQGSIDPHTRGSYSPGPSNRT

SEQ ID NO: 10901 - protein, 397 aa, Zea mays
  VARIANT 349..397: note = Derived polymorphism lacks residues 349 to 397
MASRRFFYDDPYDYYYTSPYHYAYPYYRYQHPAPSRGVGGFFPAAAEAAPEAVKVDPRPRVESSRSVSVPVRFVGSDPEPVRGAARMPQAAVLRKRAPSSEAAAIRLQAAARGFMARKSVRAVREVEREAAEVGEKVAREAEALRGDARARIAVGETLMKMLLRLDAVRGAREYRKRVTKRVLALQDAVDALEPKPAPDSEVVAEENESEVTSEMVDDSAEATEMPVAAEHSGGVGVNAAAETVADMEVDGGKADSEAVPEAVKESENKQDDGHINGDQTEVSNEGEWEMVADEAEPTTAATGSTEAPPQTPMTSEVMRPTGEAGAADSALDTRKVMEMVAALCEQNAQQCAVIGALAERVDALERAVRRVEDAERRRRRGKKLKKDGKGSNRCYTD

SEQ ID NO: 10902 - protein, 291 aa, Zea mays
  VARIANT 20: note = Ancestral polymorphism is A, Derived polymorphism is V
  VARIANT 10: note = Ancestral polymorphism is L, Derived polymorphism is I
MVRLRTMALLLVAVTAAAVAGLAAANFRDDCDIPWEPQNARFTSDGNGLSMALVSNSSGCMLRTKKQYVYGTVSTLIQLVPGNSAGTVTTYYASSVGDNHDEIDFEFLGNVSGQPYTFHTNIYANGVGNKEIQFKPWFDPTTGYHNYTISWSPCMIVWYVDSVPIRVFRNYQQSYGVAYPTSRPMHAYSSIWAAEDWATQGGRVKTDWSKAPFVANYRNIHLDICDCPGGYACSTNCAAAAAPNSGACQLSPEQRGLMQSLQKDYAIYDYCVDSKRWVNGVKPTECGLPQY

SEQ ID NO: 10903 - protein, 683 aa, Zea mays
  VARIANT 184..683: note = Derived polymorphism lacks residues 184 to 683
MSSLLKLVVFLGLTFATSFARSNDPMFAYNGFSNTNLELDGTASITENGLLELTNGKVMSKGHAFFPDPLRFRRSPNSTVQSFSASFVFGIISVYNNLSSHGLAMFVAPGKDFSAATPVGYLGLFNAQNDGNGTNRVFALELDTYQNSEFQDIDNNHVGINVNGLHSVESHAAGFYRDRNGTSESFEDLTLCSQQAMQVWVDYDSESARISSTVAPLNTARPKRPTVSASYNLSAVLADVAYVGFSSSTGKINSRHYVLGWSFAMNGPAPAIDTSSLPKLPLARSKPHRPVLEVVLPVATAALLVAAGAVVFLSVRRHIRYAELREDWEVEFGPHRFSYKDLFRATEGFGDKNLLGTGGFGRVYRGVLPRSKLKVAVKKVSHDSKQGMKEFIAEVVSIGRLQHRNLVKLLGYCRRKGELLLVYDYVPNGSLDRYLYGRNGNQQAMAAAPATLDWSRRFRIIKGIACGLLYLHEEWEKVVIHRDIKASNVLLDDDMNARLGDFGLARLYDHGVDPQTTHVVGTIGYLAPELACTGKATPLTDVFAFGVFVLEVACGRRPIKHSEAQQNRLVLFDWVFQHLQNGSLTDAIDGRLKGDYDVDEACLALKLGLLCSHPFASARPSMRQVMQYLHGDVSPPELAPTHQSFEALALMQEDGFDPYIMSYPSSTATASIGTVSATMSQGR

SEQ ID NO: 10904 - protein, 67 aa, Zea mays
  VARIANT 52: note = Ancestral polymorphism is A, Derived polymorphism is G
  VARIANT 45: note = Ancestral polymorphism is A, Derived polymorphism is T
  VARIANT 36: note = Ancestral polymorphism is G, Derived polymorphism is S
  VARIANT 13: note = Ancestral polymorphism is L, Derived polymorphism is F
  VARIANT 4: note = Ancestral polymorphism is P, Derived polymorphism is S
MRGPKRASKMRKLFNLSKDDVHKYVNTYRTFTTKNGKKRKRARITDKKKKIAKESEAAEYQNLLARG

SEQ ID NO: 10905 - protein, 476 aa, Zea mays
  VARIANT 49: note = Ancestral polymorphism is V, Derived polymorphism is L
  VARIANT 171: note = Ancestral polymorphism is P, Derived polymorphism is L
  VARIANT 234: note = Ancestral polymorphism is S, Derived polymorphism is F
  VARIANT 264: note = Ancestral polymorphism is G, Derived polymorphism is D
  VARIANT 289: note = Ancestral polymorphism is I, Derived polymorphism is T
  VARIANT 293: note = Ancestral polymorphism is L, Derived polymorphism is V
MSCRSRYEFAVYHKTSSHKPSPYLIANLRKHEALQKRCGPGTAAHKKAVRRLDSGEGVVDDDDGCRYLVYISYRGLGNRMLGITSAFLYAVLTERVLLVDGGKDTGALFCEPFPGTTWLLPQAGWFSFSPLSRLQGYEGGSKENLGDMLQSGGITVSADGNVSWSAPRPPLYLYLHLSGSYGFHDKLFFCDAHQRLLGEVPWLFMWTDNYIVPGLFLTPAFSDELEAMFPEKESVFYHLGRYLFHPTNRVWHAIKSYYHANLADVDQRVGVQIRVFQKKQPPRFVLEQILSCLRDVKLLSGTKTDAAGGGNGTSSSFSRAVLVTSLSSWYYDRIRDEYGGRISGGVHQPSHEGRQRWRDAAHDMRALSEIYLLSMCDVLVTSGYSTFGYVAQGLAGLRPWVMPRAPMWAADWREELDPRDMPCRRADSVEPCFHAPSAYRCAAGRDVDLGKVSPYIRRCVDVKYGINLVNESSGQW

SEQ ID NO: 10906 - protein, 123 aa, Zea mays
  VARIANT 101..123: note = Derived polymorphism lacks residues 101 to 123
  VARIANT 28: note = Ancestral polymorphism is A, Derived polymorphism is P
  VARIANT 14: note = Ancestral polymorphism is L, Derived polymorphism is Q
  VARIANT 12: note = Ancestral polymorphism is A, Derived polymorphism is T
MNAMRLTPILLAVLMMTCLVFAANCAIAGGHDVETKPASGLRRPPPDGEKTMLGSSDINIKLCLKAQCAGYKSCYCCFTLPGLPCWPDQNTCWQECPNRHRLRSTRSMKHADAMPSIGPSKFS

SEQ ID NO: 10907 - protein, 495 aa, Zea mays
  VARIANT 108: note = Ancestral polymorphism is A, Derived polymorphism is T
MRWKLNSSVYKRVPSRETAMEPDVETPMRMTDGGGSGAGPSWRMSLPHVCVATLTSFLFGYHSGVVNEPLEVISADLGFAGNTLAEGLVVSICLGGAFVGCLFSGSIADGIGRRRAFQLSALPMIIGAAISALSNSLEGMLLGRFLVGTGMGLGPPVASLYITEVSPSTVRGTYGSFVQIATCLGIIVSLLIGTPVKDIDRWWRVCFWVAVIPATLQALGMEFCAESPQWLYKCGKISEAEMQFEKLLGPLHVKSAMAELSRYERVDDGESVKYSELFYGRHFNVVFIGTTLFALQQLSGINSVFYFSSTVFRSVGVPSNLANICMGISNLSGSIVAMLLMDKLGRKVLLSGSFLGMAFAMGLQAVGANRQYLGSACVYLSVGGILLFVLSFSLGAGPVPGLLLPEIFPNKIRAKAMALCMSVHWFYICYILTYHMKVLKVNLEVGAGTYLTWLEPWAGCLLNRNKLALQKLIPEVIGNALQMVSGKFQICACDS

SEQ ID NO: 10908 - protein, 40 aa, Zea mays
  VARIANT 33: note = Ancestral polymorphism is A, Derived polymorphism is T
  VARIANT 31: note = Ancestral polymorphism is S, Derived polymorphism is N
  VARIANT 21: note = Ancestral polymorphism is A, Derived polymorphism is P
  VARIANT 20..40: note = Derived polymorphism lacks residues 20 to 40
  VARIANT 18: note = Ancestral polymorphism is A, Derived polymorphism is T
  VARIANT 1: note = Ancestral polymorphism is M, Derived polymorphism is I
MLGGNMMQRLYKEIFEPAIQATLFATVGQCSAAVTLRMLY

SEQ ID NO: 10909 - protein, 132 aa, Zea mays
  VARIANT 102: note = Ancestral polymorphism is G, Derived polymorphism is E
  VARIANT 50: note = Ancestral polymorphism is A, Derived polymorphism is V
  VARIANT 37: note = Ancestral polymorphism is A, Derived polymorphism is T
  VARIANT 20: note = Ancestral polymorphism is T, Derived polymorphism is M
  VARIANT 5: note = Ancestral polymorphism is R, Derived polymorphism is H
MVYARMKEDPWNSIVMGAATGGFLSMRQGMGAAGRFTLMGGILLALIKGAGLMLNRVLVLANPPLPANDPNLTATICGNPFPGLPQAPPEATTSSGAGGLFGDCLAGRRRRRNQVQAGASRRSWRASTRPAV

SEQ ID NO: 10910 - protein, 83 aa, Zea mays
  VARIANT 77: note = Ancestral polymorphism is P, Derived polymorphism is A
  VARIANT 53: note = Ancestral polymorphism is G, Derived polymorphism is E
MVTARMRLPSTAHPRDPPRLSLNHLRAYTSSPWRDEWRRHPMVGNPLRHTTPGLDIAIVGFGIYLIVEAAYNRLKRPSGNHHH

SEQ ID NO: 10911 - protein, 633 aa, Zea mays
  VARIANT 6: note = Ancestral polymorphism is P, Derived polymorphism is S
MAMSSPGVVWRSGFPTIGCLLHSSLHGLLVYARRWLSDSRGGSLGCAVDGRRILAVTMTDDLGDPALIDFIKEIPCEPRVEVVLIDDAFVERKSMECLFQPNAYLGDEVIDCYINLIKAQKHLKCRSGGRVHIENAFQFNFLKRDGDVEIKTEELYPIEDMTQICSAERRVLLYLDHDMVFIPINIRETHWYLAVIHASNMEIQVLDSLGTSQDRKDLTDSIKGLQRQIDMISQRKELKDHRWPNLQVASWPLREIDMGYAKQTDSSSCGLFLLNYIEYWTGDELSDSFTQKMDAILLSSELNKRRGCLLYKNDKEVDSGSPSDVEILENPTDSKKRKLLHVLDDSEVVYEDEEGPITQADLQKWFVDDWDKRTPVKVSNDGCTNDFLMVGLSTKDMPVTKADSIDVLCDYVMAIEDDTTLEMTWVRSFNPFKIEISVKDLQNILTINKDMTLRCFDMAVRLLANKESCRPKGEIINNRKHYMDMRFWRMVGFGKLPKYHQDPTAEELAKTLDCWPSMNYYITGCRYVLMPWKFNGCHALFVIDHVKKHVTFIDFTPTQDWCKHMPYKRFNTSYLVLQAIAMWGNDRRMKFVGDAKIVRRNFVIDLLSYEDNSCRYVIPANIQQRLIDIAKKD

SEQ ID NO: 10912 - protein, 346 aa, Zea mays
  VARIANT 106: note = Ancestral polymorphism is D, Derived polymorphism is G
  VARIANT 168: note = Ancestral polymorphism is E, Derived polymorphism is V
MRDFLGFLFGVAAAAACFGLLLLHVPCPRGLLPAQQGLIILGRSTTNGTNADPTPSTKKPGIAPAPAPGDDKLEALLRRASMADLDKTVILTFASQAWTAPGSLQDLLLQSFRLGVGTEPLLKHLVIVADGAKAYEQCQLVHPLCYHLEAGGVDYAAQQSYMAKGYLEIVWRKFLSQARVLNLGYSFVFTDMDIIWLRNPLLRIPIGADLAMSCDKYYGDNPYDLDKLANTGFMYVKASPRMVAFYESWYKARLSYRYTHEQYVFQQVKDKLPAQHGIRVQFVDTAYFTGFCQLRKDFNKVCTVHANCLVGLKSKQEKLTQVLDEWKEFKKKAALLGSNTTTALTH

SEQ ID NO: 10913 - protein, 96 aa, Zea mays
  VARIANT 20: note = Ancestral polymorphism is P, Derived polymorphism is L
  VARIANT 21: note = Ancestral polymorphism is G, Derived polymorphism is R
  VARIANT 26: note = Ancestral polymorphism is V, Derived polymorphism is L
MLVHISTAKQLHLVYLEKNPGVILLVSLICRDMLVRSSLVGSCFMKWMQLERRVPAWKRATFLQLHSLWCKSTITHDFVLKIIVHTNRQIDVEIFC

SEQ ID NO: 10914 - protein, 123 aa, Zea mays
  VARIANT 53: note = Ancestral polymorphism is A, Derived polymorphism is E
  VARIANT 33: note = Ancestral polymorphism is R, Derived polymorphism is P
MAMHRAAALALRRLAAAATVAAPRPVSLLAPFRPVAAAAATNTGFLLLPTTAAAAAALFTRRGYAARGGGDRKAVSEEEGDFYDEIEFETMGSDVEFYGDYDDEDLDVLEDSEDLEHDAGPSR

SEQ ID NO: 10915 - protein, 345 aa, Zea mays
  VARIANT 28..345: note = Derived polymorphism lacks residues 28 to 345
MAVERDIFGISGPTYLKSIDWNCEHNRRSVAASLVQAVYVLERDRQLNHQSFEALAPAWWEFLHFELIRKLIDDADMSIFGAIFEFNPPKEEASGANAPRFVIAFRGTITEKDTISRDLSLDLHLVQNGLHRTSRFNIAMQAVQNVASVFPGSTIWLAGHSLGAGLAILTGRNMVKKGVLLESFLFNPPFVAAPVERIRDERVKHGFRIARSVITAGLTIAMKAKTEGSSQRSVAEESFSILSSWTPYLFVNPGDHICSEYIGYFQHRKNMEDLGAGFIEKLATQNSIGDLFFKALGWESEPLHLLPSADLIVNVSPSSDFKYAHGISQWWQPELNLQCSKYRYS

SEQ ID NO: 10916 - protein, 130 aa, Zea mays
  VARIANT 22..130: note = Derived polymorphism lacks residues 22 to 130
MDALTMRCYRYSPSVAMVPMRKTSRTTMTRASISTDGCSSSEPKKKSHSVSFAGKANKVYEDKDMGILCYTDENGELVCEGLDEGPRLTWQDMEKKNENQERQRRQRTPPPTVGRIDWSSLHAAVSMGKN

SEQ ID NO: 10917 - protein, 302 aa, Zea mays
  VARIANT 43: note = Ancestral polymorphism is G, Derived polymorphism is S
  VARIANT 51: note = Ancestral polymorphism is P, Derived polymorphism is L
  VARIANT 54: note = Ancestral polymorphism is S, Derived polymorphism is I
  VARIANT 60: note = Ancestral polymorphism is G, Derived polymorphism is V
  VARIANT 61: note = Ancestral polymorphism is R, Derived polymorphism is W
  VARIANT 65: note = Ancestral polymorphism is R, Derived polymorphism is H
  VARIANT 92: note = Ancestral polymorphism is R, Derived polymorphism is W
  VARIANT 99: note = Ancestral polymorphism is P, Derived polymorphism is L
  VARIANT 105: note = Ancestral polymorphism is P, Derived polymorphism is L
  VARIANT 107: note = Ancestral polymorphism is C, Derived polymorphism is Y
  VARIANT 130: note = Ancestral polymorphism is N, Derived polymorphism is I
  VARIANT 135: note = Ancestral polymorphism is E, Derived polymorphism is V
  VARIANT 145: note = Ancestral polymorphism is D, Derived polymorphism is N
  VARIANT 166: note = Ancestral polymorphism is S, Derived polymorphism is W
MAKSGGESTVEVPIPASASATRPKAKHRIEIEGYPVDGVSIGGQETCVIFPTLSLAFDIGRCPQRAVSQEFLFVSHGHLDHIGGLPMYVATRGLFRLRPPTIFVPACLRDLVERLFEVHRAMDQSELNHNLVPLEVGEEYELRRDLKVRAFRTYHAIPSQGYVIYSVKQKLKQEFIGLPGSEIKRLKLSGVEITNTVSTPEIAFSGDTTADFILDPDNADVLQAKILVVESTFLDDSISVEHAREYGHTHLFEITSQADKLQNKAILLIHFSARYTTEEIDAAINKLPPSFRSRVYALKEGF

SEQ ID NO: 10918 - protein, 302 aa, Zea mays
  VARIANT 247: note = Ancestral polymorphism is V, Derived polymorphism is A
MAEKPPLSAKPPLPSKPRPKAASAARPTTTTPAPGSRPAASPFKKPTLAPPQVLPLKPPPAHQYRQQQQQQHPAPPGGARKPRAYRQQQPHPHRRGRGCSCRRACCLATGLALLALCLALAAACLAYLYYRPRAPSFHLQPLAPVRLRLGSNASTVDATVGARVVSWNPNERVEFRYGDGEGRVALADPDGDVALGWAPVRGFAHAPRRVAAVAFVATARGVVLDDAVAARVRDRYRRRRQGFRVVVDAHVGVRVGALRTGMVPLRLLCDDGVMAPRAVGSSDGAVVGPMTKCQVLLFRVRW

SEQ ID NO: 10919 - protein, 267 aa, Zea mays
  VARIANT 239..267: note = Derived polymorphism lacks residues 239 to 267
  VARIANT 184: note = Ancestral polymorphism is E, Derived polymorphism is G
  VARIANT 159: note = Ancestral polymorphism is G, Derived polymorphism is D
  VARIANT 141: note = Ancestral polymorphism is P, Derived polymorphism is T
  VARIANT 137: note = Ancestral polymorphism is Q, Derived polymorphism is K
  VARIANT 132: note = Ancestral polymorphism is T, Derived polymorphism is N
  VARIANT 112: note = Ancestral polymorphism is V, Derived polymorphism is I
  VARIANT 110: note = Ancestral polymorphism is A, Derived polymorphism is V
  VARIANT 94: note = Ancestral polymorphism is A, Derived polymorphism is V
  VARIANT 86..267: note = Derived polymorphism lacks residues 86 to 267
  VARIANT 83: note = Ancestral polymorphism is G, Derived polymorphism is R
  VARIANT 70: note = Ancestral polymorphism is P, Derived polymorphism is L
  VARIANT 60: note = Ancestral polymorphism is P, Derived polymorphism is S
  VARIANT 48..267: note = Derived polymorphism lacks residues 48 to 267
  VARIANT 43: note = Ancestral polymorphism is G, Derived polymorphism is E
  VARIANT 1: note = Ancestral polymorphism is L, Derived polymorphism is M
MGMDNMLALVCKTFDGVKGLEKYDKDGIIDKISGVHGLGRSVGKFLDGRFTVFCLENLRSFSGDVIIDDPQRKLILHRPRFPGGESHPGFLDFAINMIHLDRAHLRFLTVSVHGLRETLFYTLFSHLQVYKNRTDIQSALPLIKDGVVSLDGGLLRPNGSFCLGRSKNLEVKFVVTTDVSSLPENVAEMEEQVKHKNWEKEMVLEYMKREEDLLKQVKELYRKQKQELMDYVTQPAVTQTSCESPATHSPATPGSNPFGAKLSNKWR

SEQ ID NO: 10920 - protein, 405 aa, Zea mays
  VARIANT 204: note = Ancestral polymorphism is F, Derived polymorphism is L
MGSEEWELYPSSDIGSQVIEYRPVSEDSDDDQNGDVAVSLDVVLPDDLLEKVLSFLPVASIIRSGSVCKRWHEIVHARRHAWSKIVPQKPWYFMFTCSEDAVSGFAYDPSLRKWYGFDFPCIEKSNWSTSSSAGLVCLMDSETRRRIVVCNPITKDWKRLLDAPGGKTAGYSALAFSVDIRSHHYTVAVARSNQVPSEYYHWELTIHLYESVSGSWMTPFTGVLVGWRGGDECVICDGVLYYLLYFTGILVNNNEHRHCLVMYDLTARPNHTSLISMAIPVPCVLTCGRLMNLSKKLVLVGGIGKQDRPGIIKGIGIWELHNKEWREVARMPHKFFQGFGEFDDVFASCGADDLIYIQSYGSPALLTFEVNHKSWKWSVKSPVSKRFPLQLFTGFSFEPRLDVAL

SEQ ID NO: 10921 - protein, 270 aa, Zea mays
  VARIANT 37: note = Ancestral polymorphism is P, Derived polymorphism is L
  VARIANT 8: note = Ancestral polymorphism is A, Derived polymorphism is G
MRWDASEAEVALERIWELHDRLSDAILAASRAHLFLLAPQPPPVPSAPPVKGAHRVSGGRNGCVFVKGGGEALAAAAESVSEVRSLHAIRSALEDVEDHLEFLHTVQSRHQAERDSAIARLEQSRLVLATRLAEHQGKKHRIIDEVLAFVGEVSDKSQFISFEDVCATHSRSEDDAEDNRGNGSRIMSNMLSSSLSLAKNSFRLDKIGGALGNAAMFAVSVLAFFQLHQITFGSKTPAMEYRKRIEYSIQPRSSQSNGKGKLLEVYLARG

SEQ ID NO: 10922 - protein, 369 aa, Zea mays
  VARIANT 142..369: note = Derived polymorphism lacks residues 142 to 369
  VARIANT 45: note = Ancestral polymorphism is E, Derived polymorphism is G
  VARIANT 42: note = Ancestral polymorphism is G, Derived polymorphism is R
MEDTLAWHGDPKGNFSVKSAYALASRRRDHHNNADAYSSISGRGENVWKSIWNVNVTNKIKMFLWRLAHNSHPVRVNIARRGIKIETLCPMCFRLDEDGGHLFFKCKKVKQVWRCLCLEDTRILLASKASALEVIESILTLREETKIKVVLLLWCWWSARNKAIQGERCGSTEEVCNTVAYHLMNMEKLQIGKSARAPPMNLKWQPPPAGFYKINCDGSYLAKSGLGGWGCIIRGHDGSFLAAGAGTLTGISSTLHAESVACMKGLELAVFLGMQNVMIETDAAILKTALTSQEYDLSALGVVFKEIRSRMFSEFACCIVSKCQRTCNLVADCLTAHGANSGDVDSSLWLDHAPDFICNIVSGDVPRAA

SEQ ID NO: 10923 - protein, 183 aa, Zea mays
  VARIANT 75: note = Ancestral polymorphism is T, Derived polymorphism is M
  VARIANT 57..183: note = Derived polymorphism lacks residues 57 to 183
  VARIANT 46..183: note = Derived polymorphism lacks residues 46 to 183
MSCGRRLPKKTAAVAGVWAAPNLTFLRWGIAYCVKGGLEKELKAMQYLERIECEYDQKISIDFYKEGDPLKPAVTGFLVFVSTPDPIGNKYYLGPAPLQYMARQIATANGPTGYNRDYLFSMEKALASISHEDDSIIDLANEVRKVLNRTKDTKITGANASLKSHAHYVFYYDLARELFYYLK

SEQ ID NO: 10924 - protein, 141 aa, Zea mays
  VARIANT 32: note = Ancestral polymorphism is G, Derived polymorphism is D
  VARIANT 34..141: note = Derived polymorphism lacks residues 34 to 141
  VARIANT 35: note = Ancestral polymorphism is V, Derived polymorphism is L
MQYLERIECEYDQKISIDFYKEGDPLKPAVTGFLVFVSTPDPIGNKYYLGPAPLQYMARQIATANGPTGYNRDYLFSMEKALASISHEDDSIIDLANEVRKVLNRTKDTKITGANASLKSHAHYVFYYDLARELFYYLKGE

SEQ ID NO: 10925 - protein, 93 aa, Zea mays
  VARIANT 55: note = Ancestral polymorphism is G, Derived polymorphism is R
  VARIANT 72..93: note = Derived polymorphism lacks residues 72 to 93
MAVNEGMNEIDVWSVGCIFAEMVNQKPLFPGDSEIDELFKIFRVLGTPNEQSWPGVSCLPDFKTAFPRWQSQDLATIVPNLEPAGLDLLSKML

SEQ ID NO: 10926 - protein, 204 aa, Zea mays
  VARIANT 183: note = Ancestral polymorphism is T, Derived polymorphism is P
  VARIANT 155: note = Ancestral polymorphism is F, Derived polymorphism is S
  VARIANT 154..204: note = Derived polymorphism lacks residues 154 to 204
  VARIANT 152: note = Ancestral polymorphism is W, Derived polymorphism is L
  VARIANT 148..204: note = Derived polymorphism lacks residues 148 to 204
  VARIANT 143..204: note = Derived polymorphism lacks residues 143 to 204
  VARIANT 133: note = Ancestral polymorphism is I, Derived polymorphism is T
  VARIANT 130: note = Ancestral polymorphism is P, Derived polymorphism is L
  VARIANT 125..204: note = Derived polymorphism lacks residues 125 to 204
  VARIANT 118: note = Ancestral polymorphism is P, Derived polymorphism is L
  VARIANT 115: note = Ancestral polymorphism is T, Derived polymorphism is I
  VARIANT 114: note = Ancestral polymorphism is R, Derived polymorphism is M
  VARIANT 112: note = Ancestral polymorphism is R, Derived polymorphism is H
  VARIANT 109: note = Ancestral polymorphism is Q, Derived polymorphism is K
  VARIANT 96: note = Ancestral polymorphism is R, Derived polymorphism is W
  VARIANT 93: note = Ancestral polymorphism is V, Derived polymorphism is I
  VARIANT 88..204: note = Derived polymorphism lacks residues 88 to 204
  VARIANT 79: note = Ancestral polymorphism is N, Derived polymorphism is I
  VARIANT 72: note = Ancestral polymorphism is R, Derived polymorphism is C
  VARIANT 55..204: note = Derived polymorphism lacks residues 55 to 204
MENREPIETNQMGNNADHTPFTNISNTIIRGYENGSNSLGPNVDAKECKRQMENERYATMSVEHKNEKSKKRREIFLWNTYHTPYSAQDVVVVATRRIMRPTKKGSTVQRPRTRTLTPVHDGILEDVVFPVEIMRKRVRYPRWCQGHREIFWIQFMVWLISCCKIFLDLKERNNIEYKLETYTPVYHSLCGKDVVFEYPMIDIA

SEQ ID NO: 10927 - protein, 672 aa, Zea mays
  VARIANT 27..672: note = Derived polymorphism lacks residues 27 to 672
  VARIANT 118..672: note = Derived polymorphism lacks residues 118 to 672
MAEAAGSWPCLPSTLPLFLCDVKQHNQNAEGFPSHRSKRMSLEVSMQKSLGFGLKSDNGKHDYVANDTVQSLHKQDSKIVIKKTIKLLDGPPYPKRPKLEPAQTGRDAEAKGHEFISQKNVPDLTPCTTSEKSRLLKQKRISDGKRTDKKNIRSGVRSKHDCFSSKAGLANFDSGFSGNSVLGAHGLKSDIRDITHHIENLSLIELLDGTYKYSSLGRDKGKKVLHTKEELLVSVRKTFSMLSDMDYRHGKDSNLILSPKLSSASTSSCDIKEQCGDKPPLLVKVSKIFSVTTNIMSVPQSLFDLFNTTTQDPSQINLCDSALCHPKDILSRLTLPHRQDLDSLLAPGRESTAAVKPYMPSMTVHGASLPPFPWSHSQAGGCRQGVDCGKHGSSRSNSQWQWVRVGSNLTSLDHEDTSVHRIDDLLQEMDAAKLCILDPCDGQHNLCGTESTSGSLVQNIHSRKIGGEHGSQQLQPQDHLDSLDGFQKHDIDYSLLKTSQVSPKIQCAAEILCDMRRSTESWIGQGYSNGTIKWPKSPPEKAMKARKPSSQFGTTESSSGSRNNEATWNGSSHSTKKIVDRNNDSARLNNPGKGTIRWPVPVEDNASPVRSERGLMVDMRQPHGNGGRHLVQVSSQTRLEKEYENQQKLRKATLTSSLGSAGDWNREKNRRM

SEQ ID NO: 10928 - protein, 273 aa, Zea mays
  VARIANT 8: note = Ancestral polymorphism is G, Derived polymorphism is R
MVLELSKGFHWQGFRAQQSLVSLAPTPLATETRSPSPALPSSVAAMPRYYCDYCDTYLTHDSPSVRKQHNAGYKHKANVRTYYQQFEEQQTQSLIDQRIKEHLGQAAAFQAGAPFNQHLLAFPGAMARPRLPILPTPGMPHGFPQAPGAPLMPGIRPPILPAPGYPGPPPTMQQPGAPPGSMPQPGAPPGSMPQPGAPPGSMPMQMAPLPRPPTLPPPTSGVPGAPIPNSGAPPAIYQANPQASAGPTSGAPPAPPTAPQPAFSYAPPSEGNH

SEQ ID NO: 10929 - protein, 507 aa, Zea mays
  VARIANT 242: note = Ancestral polymorphism is R, Derived polymorphism is C
  VARIANT 229: note = Ancestral polymorphism is S, Derived polymorphism is L
MPGSQNGGPRPRPVKVETIHDLARAGDLAGVQRKLLENPSLLNDKNPVPMRFFCGSFCLCRFDAFWAKKMMCQTPLHVAAGYNNTEIVKFLLNQQGTETVDLEAKNMYGETPLHMAVKNSSCGSTNLLLEHGAHIEAKANNGMTPLHLAVWHAIQAGDFSTVSVLLSYNPDCFVKDDEGKMPLNHIPGGAGSEKLLKLLTHHMEEQRKRKALMSCLEGKAMSEFEEAMSQIVGLQELKMQLRRWARGMFFDEKRRAMGLGIAKRRAPHMAFLGNPGTGKTMVARILGKLLHMVGILPTDKVTEVQRTDLVGEFVGHTGPKTRRKIHDAEGGILFVDEAYRLIPMQKSDDKDYGLEALEEIMSVMDSGKIVVVFAGYCEPMKRVIASNDGFCRRVTKFFYFDDFSTTELAEILHMKMKSPSDCSLLYGFKLHPSCSIEAIGELIAREITEEQRKQMNGGLVDTLLINARENLDSRLDFSCNDADTMITITLEDLEAGLRQISRQRHLQ

SEQ ID NO: 10930 - protein, 227 aa, Zea mays
  VARIANT 47: note = Ancestral polymorphism is R, Derived polymorphism is C
  VARIANT 114: note = Ancestral polymorphism is M, Derived polymorphism is I
MAQYYRCPPLSSSMTSLPAAVMATATTLPLGLLPSKTLTLSPLPSARRSLSIAAVEPRRWLLRAAAEEAPEAVEVEFVEPDAEAEEEPAVPEPVEAQLAAAGAGKDADIFAVVMIGSRQYIVMPGRYIYTQRLKGANVNDQIILNKVLLVSTREKAYIGMPVVTNAAVHAVVEEQGRDDKVIVFKYKKKKKYQRKLGHRQPNTRLRITGISGYEEYPADPILDPAAA

SEQ ID NO: 10931 - protein, 116 aa, Zea mays
  VARIANT 6: note = Ancestral polymorphism is A, Derived polymorphism is D
  VARIANT 16: note = Ancestral polymorphism is A, Derived polymorphism is E
  VARIANT 35: note = Ancestral polymorphism is G, Derived polymorphism is R
MLKNPDILLLDEATSALDSESEKLEQEALDRFMIRRTTLAIAHMLSNIREADVVAVLQGDAVSKMGAHNELMAKGENDTYDKLIHMQEQAQEAALVNAHRRSARPSSTRNSVARPS

SEQ ID NO: 10932 - protein, 307 aa, Zea mays
  VARIANT 191..307: note = Derived polymorphism lacks residues 191 to 307
MVCFRERGNLCFMLVEMAHAPILTLQTISSGRPGTTTESSAPELCGSFFSKYSPAIDMWSIGCIFAEILIGKPLFPGKNVVHQLDLMTDLLGTPSADTISQKFTKEDVKELIFQEILQYHPQLLKDYKNGSEKTSFLYPSAVDRFRRQFASLEENGERNVALDRKHVSLPRTTTVHSTPIPAKEGPAATSQVAQRIPAGNWSHFLICGYPSLDQESGRPGTRWYRAPELCGSFFSKYSPAIDMWSISCTFAEILTGKPLFPGKNVVHQLDLMTDLLGTPSADTISQMQHYRTKLDGSLHLWCYFSLF

SEQ ID NO: 10933 - protein, 121 aa, Zea mays
  VARIANT 9: note = Ancestral polymorphism is D, Derived polymorphism is N
MGKWASASDAEVHQELEKGTSYTYRFHVPKEGSLKVNDLIRADSFIKVSWNLDTLGDFVIMRSNGQPVYNFCVTVDDATMQISHVIRAEEHLPNTLRQALIYKVIPSTFCYLVFHNLYPDT

SEQ ID NO: 10934 - protein, 375 aa, Zea mays
  VARIANT 149: note = Ancestral polymorphism is S, Derived polymorphism is Y
MEDGGMCELVIGDHRNLRHRLSGAEDLFSIVGTWEERTNGASGGGGGGGGSSAAAVRAYSQGCTAGTAGAKTAAGTNNSRRRTGDEEKGGSAPAQKKHKGSSAVSDDEGAAKMSHITVERNRRKQMNEHLAVLRSLMPCFYVKRGDQASIIGGVVDYIKELQQVLRSLETKKHRKAYAEQVLSPRPLPAVKSTPPLSPHVAVPMSPRTPTPGSPYKPASGAAATTTGSCRLPHRAAAAAAAYIGTPTTSSSSSSYSHDQQRHYSTYLPTLDSLVTELAAQAAACSRPAASGGLTRLPDVKVEFAGPNLVLKTVSHRSPGQALKIIAALESLPLEILHVSVSTVDDTMVHSFTIKIGIECELSAEELVQEIQQTLL

SEQ ID NO: 10935 - protein, 344 aa, Zea mays
  VARIANT 97: note = Ancestral polymorphism is W, Derived polymorphism is L
MARLSATAALLLLVLSLLAVAHCGALAVAAEHDTEPESTAAVAVSDDNVLSDPTVHAEAGTASATEEEAIPAEQQQHGFELLRLPSHRLHHHHHLWLKRHHGIYRDASHKFPCSGHGARREQAVSHLAILPASAEVAREAGEEMPVAEPDPDRSLPDSDGEGEVAITSEQPSPFADADGHDDESAAAVRAWKHEMLRRWFRFHFHHDMRRHRLHHVQHEEEEEEATTAPQTTESMGMKRHRFHFHHHHDEDEEKNMAARKRLRHADEHDEDSDDEEDEQMEEMVRRFRKAIMRRRFGHGHGHGRRSRFFHHIVHRHAEEAKKQADVEEEESGVLAWIKGLMNRF

SEQ ID NO: 10936 - protein, 451 aa, Zea mays
  VARIANT 123: note = Ancestral polymorphism is R, Derived polymorphism is G
MAAATSRGPASVAICALAVLHAMAALCDSATAAAATCAGLAPAKHRPEVISIADFGGVGDGRTLNTWAFRKAVYRIQHQRRRGGTTLHVPAGTWLAGSFNLTSHMTLFLARGAVLKATQDTRGWPLVEPLPSYGRGRELPGPRYASFIHGDGLRDVVITGDRGVIDGQGEVWWNMWRRRTLEHTRPNLVEFMHSTGIHISNIVLKNSPFWNIHPVYCDNVVVTNMMILAPRDSPNTDGVDPDSSSNVCIEDSYISTGDDLVAIKSGWDEYGIAYGRPSAGVTVRRVRGSSPFSGIAIGSEASGGVRDVLVEDCAIFDSGYGIHIKTNVGRGGYIRNVTVDGVRLTGVRSGVRIAGDVGDHPDAHFSQLAVPTVDAVRISNVWGVNVQQPGSLEGIRASPFTRICLSNVKLFGWRSDAAWKCRDVRGAALGVQPSPCAELATSFASARSSCS

SEQ ID NO: 10937 - protein, 740 aa, Zea mays
  VARIANT 296: note = Ancestral polymorphism is W, Derived polymorphism is R
MDEVHRSALAAARRRRYVSWYPLASHSHMAAAAQARSSFLVLLVATWSLSPRLAGASTSTEAAAAGRGVTLRLDASQVVVDNGAVQVALSAPEGRITGVSYSGDGETTNLLGYDAGEGDSGGYWDSVWNYPGSGLPGQYNTLDSTEFNVVSSSEDQVELSFRSTYNPSHRNSLRLNIDKRCQNPSHGWFRLVMLRGSSGFYCYAIFEHDRAYPALNITEARLVFKLNTAKFNYMAITDDIQRYMPSAADREEPRAVPLAYKEAVLLVDPKEPQFRGEVDDKYQYSLDNKDNVVHGWISRGDPNAVGFWVITPSNEFKSGGPLKRELTSHVGPTSLTMFMGTHYVGKYMVANINDGEAWKKVLGPVFIYLNSGPSRGELWEDAKARARAEAASWPYSFLASPEFPKAAERGSVVGRLLVRDSHEKHGMPAGSSAFVGLASPGPPGSWATESKGYQFWTRAAPDGTFRIANVREGVYGLYAFVPGFLGDYCYGSPLTVAPGRAIGVGDLVFEPPRSGPTVWEIGVPDRTAAEFYVPDPDPRYVNRLFVVRDRYRQYGLWERYADLYPDKDLVFTVGESDESKDWFFAHVTRKVGQVAVPTTWQIRFSLDRVVADDDTYTLRISLAASQMCRLQVQVNGDARRGRDFTTPDMGDDNAITRHGIHGSQWSLECVVGGHLLRQGDNTIDIKLIAQQGPKGPAMVAGVMYDYIRLEGPPSRGVASSRIPAFSLHRILFLLAFLVMS

SEQ ID NO: 10938 - protein, 328 aa, Zea mays
  VARIANT 25: note = Ancestral polymorphism is W, Derived polymorphism is R
  VARIANT 82..328: note = Derived polymorphism lacks residues 82 to 328
  VARIANT 108: note = Ancestral polymorphism is S, Derived polymorphism is P
  VARIANT 146..328: note = Derived polymorphism lacks residues 146 to 328
  VARIANT 152..328: note = Derived polymorphism lacks residues 152 to 328
  VARIANT 153..328: note = Derived polymorphism lacks residues 153 to 328
  VARIANT 168..328: note = Derived polymorphism lacks residues 168 to 328
  VARIANT 182..328: note = Derived polymorphism lacks residues 182 to 328
  VARIANT 186..328: note = Derived polymorphism lacks residues 186 to 328
  VARIANT 278..328: note = Derived polymorphism lacks residues 278 to 328
MPTLFVPVLRWGLPGAATAYDAMSWAVAVAQVAYVTRHCRERGWDGLSWDALGTLALHQTLHPLEEDRRKIKELKNKSADWQLDLLQFGSNTSEVIVITTGHFAFLHSCRHTFSSLALKELNHRKNKDRSTSPDSMPMKKLIAVAQARRFSRSTSFPDNFLNAKYIPETSINIPSKEGPHRQFSPSNRIIMSTSGNDNVNSRSPFDNIQQKKLAAHGANAARRSFKDFLSTLTRTKESISRATRVAMECAKFGIAGEVMYDAFGVRLHAGKQAKVLNQIVYELPLEHPLAETRPLRELLGHTPPQVFAGGVLGFAVATFIAMIAGLGS

SEQ ID NO: 10939 - protein, 357 aa, Zea mays
  VARIANT 6: note = Ancestral polymorphism is S, Derived polymorphism is I
MVCIGSLLRALVLSAAASAGRRRGPRILCGHEADVRVTPRHGHGWRGFRAVTGRMMLDSSDCASAAAAAETGQVQPQRRAVGAVPLAHDGGYASGGWEREDGKLSCGYSSFRGKRATMEDFYDVKLTEIDGQAVSLFGVFDGHGGSRAAEYLREHLFDNLLKHPDFLTDTKLAISETYQKTDTDFLESEASAFRDDGSTASTALLVGDHLYVANVGDSRAVISKAGKAMALSEDHKPNRIDERKRIENAGGIVIWAGTWRVGGVLAMSRAFGNRLLKPYVVAEPEIQEEQVSGGLECLVLASDGLWDVVENEEAVFLGRSEDTPESAARKLTEIAYSRGSADNITCIVVQFHHDKTG

SEQ ID NO: 10940 - protein, 713 aa, Zea mays
  VARIANT 17..713: note = Derived polymorphism lacks residues 17 to 713
MAGREERYVRSVWELAEALEKKNYTHGAGNYGFQQLYRVVSEKGHNIFGLLKDRTAGAFSFLGNSSHSEALNKLGLGEKSKTKVLDPQGPFLQRWNKIFVISCLFAVFVDPLFLYVPVIDGGNNCLYLDKKLETTASILRFFTDIFYLLHILFQFRTGFIAPSSRVFGRGALVKDTFAIAKRYLSTLFLVDFLAVLPLPQVFVLVVLPKLQGPEIMKAKIVLLVIIICQYVPRLLRIIPLYLQITRSAGILTETAWAGAAFNLIIYMLASHGFGALWYILSIQREDTCWRQACINQTGCDPTSLYCGYHSLANNSFLQNACPTNSTANPDPIFGIFLPALQNVSQSTSFFEKLFYCFWWGLQNLSSLGQNMKTSTNTLENLFAVFVSTSGLVLFALLIGNVQTYLQSASVRIEEMRVKRRDTEQWMAHRLLPENLKDRIMRHEQYRWQETRGVDEEGLLKNLPKDLRREIKRHLCLSLLMKVPMFENMDEQLLDAMCDRLKPMLYTEGSCIIREGDPVNEMLFIMRGTLESTTTNGGQTGFFNSNVLKGGDFCGEELLTWALDPTSASNLPGSTRTVKTLSEVEAFALRADDLKFVATQFRRLHSKQLQHTFRFYSQQWRTWAACFIQAAWHRYCRKKLEEALYEKEKRLQAAIVSDGTTSLSLGAALYASRFAGNMMRILRRNATRKARLQERVPARLLQKPAEPNFFAEDS

SEQ ID NO: 10941 - protein, 299 aa, Zea mays
  VARIANT 66: note = Ancestral polymorphism is M, Derived polymorphism is K
  VARIANT 217..299: note = Derived polymorphism lacks residues 217 to 299
MRVRRRDMEQWMSYRLLPEHIKERILRHHQYRWQETQGVDEEGLLVNLPKDLRRDIKRHLCLSLLKRVPMFENMDDQLLDAMCDRVKPMLYTEGSHIVREGDPVNEMFFIMRGRLESTTTDGGRAGFFNSNVLEGGDFCGEELLTWALDPASGSNLPSSTRTARTLSEVEGFSLRARHLRFVASQYRRLHSKQLRHTFRFYSHQWRTWAACFVQAAWHRYCRRRLEEGVREKERMFRAAAVTDISSSRSLGAALYAAHFARNMVRTLRRNAARKARLLDTVSSRLLQKPAEPNFFAEED

SEQ ID NO: 10942 - protein, 387 aa, Zea mays
  VARIANT 7..387: note = Derived polymorphism lacks residues 7 to 387
  VARIANT 267: note = Ancestral polymorphism is I, Derived polymorphism is V
MEAGGAGSGLNGAVQAKGTGADDGSAKRLPPCCVKARAAAPESEARCHATVVSGWFTEPRSRCGKASKVQYYNNPMWPGEANSLKVEKILYQGKSLYQEVLVFESSTYGKVLVLDGIVQLTDKDECAYQEMITHLPLCSIPSPKKVLVIGGGDGGVLREVSRHSSVESIDICEIDQLVIDVCKDFFPHLSVGFQDPRVQLHVGDAVEFLRNAPEGTYDAIIVDSSDPIGPAQELVEKPFFDTIARALRPGGVLCNQAESMWLHTHLIQDMLSICRETFKGSVRYAWTSVPTYPSGVIGFLLCAKEGPLVNFLTPINPIEKLEGATKAGREIRFYNSEMHRAAFVLPTFARRELEAYCVSTETEQAEETPAAPLKLTLASRSEIFATS

SEQ ID NO: 10943 - protein, 128 aa, Zea mays
  VARIANT 42: note = Ancestral polymorphism is E, Derived polymorphism is G
  VARIANT 47: note = Ancestral polymorphism is I, Derived polymorphism is M
  VARIANT 52: note = Ancestral polymorphism is A, Derived polymorphism is T
MGNCVQISSGGVGVGGSRSCAAAVEAGCQQPQRRRSTAGGDEEEAIIDQAMTPSSILKVKMVLTKGELGWLVAQLKAGDRRLADVLREMARKREGRAAADGWRPSLESIVECPAETAPAPDATSDNSD

SEQ ID NO: 10944 - protein, 242 aa, Zea mays
  VARIANT 205: note = Ancestral polymorphism is K, Derived polymorphism is M
  VARIANT 202..242: note = Derived polymorphism lacks residues 202 to 242
MLVYERLYHGSLDKLLFGRSDGRFMDWSKRLKVALGAARGLAFLHDEGPFQATYNEFSTLNIQIDKGFTAKLSGYGCVGFNTEEISNAPMSASNLSVETLEKGLLTPKRNVWSFGVMLLELITGRKNLDPNYSKEEHNIFSRSRPFLTDDSHLCLIMDSRIKGRFPTKAARIVADIILKCLRKDPSERPTMRDVVEALARVQEIMVPCRYPLQEPFFVLELGGSSVPSGPCNLITQLPLDTF

SEQ ID NO: 10945 - protein, 437 aa, Zea mays
  VARIANT 140: note = Ancestral polymorphism is R, Derived polymorphism is I
MATETESFYSAQSSPEPEVAPMAPNVEPASQPAKPAAPQPVEPASQPAEPAARPADRLEILIERGLGQRREGESSMMTIFRVPAHVRDASKELYEPRLVSIGPYYRDRAALRTMEQHKWRYMRELMRRPHSLPPLDSYVRAVRNVEQEARCCYSERTDIFGSTAQSEPSGGGEIEEAHSPGFAEMLMLDGCFILEFFLKWHKSEKDKLCDVAWGLTLLHSDLLLLENQIPFFVLEALLHVVGAWFSKLLSLIRSTSADSTPTLVVPSVTQLREAGVRFEKKESPRHMFDIAFDRNTGVLEMPQMELDYANKALLVNLVAFEQTRDLPGAAKRLSSYVALVGALVRTGKDVEHLQKHDIIQNLLDGDDEAATNFFQHLGDCSSLDYKNHMFADMFKELRDFYDSSWQRHRAKFLRDHCSSPWAIFVEFISSSKLQYEM

SEQ ID NO: 10946 - protein, 117 aa, Zea mays
  VARIANT 110: note = Ancestral polymorphism is L, Derived polymorphism is I
  VARIANT 61: note = Ancestral polymorphism is N, Derived polymorphism is K
MAGRGGNGVPAEQEFPGWSVAKAQEDPHPPVRHVHAARGLPAQARHKNEEGPAHFIPGISNSMPSHHHQFPGAQWSKNPTPHVPSPVEFIIEAFQHQKDELKEKARQKLIRLSGGGN

SEQ ID NO: 10947 - protein, 139 aa, Zea mays
  VARIANT 66: note = Ancestral polymorphism is A, Derived polymorphism is T
  VARIANT 84: note = Ancestral polymorphism is Y, Derived polymorphism is C
MRHPRRASLWPGTGAASLEAEGGTRRASPSVVLQTSLIVLRHNKVSCTAGDANVDHPIRFGMPATAYSELLDRRAISGAANISYRPRAHQAWLEAGISGDFPLDSLYNKYCERMLVFHKIIVQLMKIQDIVTAAEFFLL

SEQ ID NO: 10948 - protein, 450 aa, Zea mays
  VARIANT 142..450: note = Derived polymorphism lacks residues 142 to 450
  VARIANT 14: note = Ancestral polymorphism is G, Derived polymorphism is W
MAMPTAACRHLMAGVYKWKLASYKQMERTKVASERLSLRSNSTKHHDTVHLGLGHFGKDGNLICRSLKSILKPKARQYAIVKVHNKDVDEGCSSKDNEIISSPSDRKEGSQLRALESYFSKFNPSQQLYSLPQKKHKSGPSSSNEVDAIIADEDANLKNRADSLQVQIDRGHTGIKSNQNTPNEVYKEYLIFDEKSLLDMHTDDQASGFCLTNLLAGVNIAVLLFEIASPVKNSENEYLSLPLLYGAKINNLILSGEWWRLLTPMCLHSGFLHIALGCWALLIFGPRVCRAYGQRTFFLIYILGGICGNLSSFVHTPEITVCGTGPVFSLIGAWLVYQGQNKQVIDKDVSESMFWQAVIAAALSFLLSIFGRIDNWAHLGATISGIFFGYLTCPSVEFDNSAKNGQKEAVALIRQQAHPCKSAAVFFITILAFAVLAFAYGTQFNNMDLE

SEQ ID NO: 10949 - protein, 214 aa, Zea mays
  VARIANT 143..214: note = Derived polymorphism lacks residues 143 to 214
  VARIANT 112: note = Ancestral polymorphism is R, Derived polymorphism is W
  VARIANT 107: note = Ancestral polymorphism is R, Derived polymorphism is C
  VARIANT 90..214: note = Derived polymorphism lacks residues 90 to 214
MKEMETSQTANLGIHQELGPEISQNPMGNHVNPEKETNEIPGSEVNQELVEICQGAVVETDTIQENQAVPEAGLEVNEETVETCQETAAESDVNLEKQTSDPGVIYRCRKCRRMLATQEFVVTHEVGAGGKSFRAGKRSNVHEDDEKPECPCIFVEPMKWMQTVEEGYVAKKLFCMGCKARLGQFNWAGMQCSCGAWVIPAFQLTKSKIDQCSM

SEQ ID NO: 10950 - protein, 218 aa, Zea mays
  VARIANT 63..218: note = Derived polymorphism lacks residues 63 to 218
  VARIANT 70..218: note = Derived polymorphism lacks residues 70 to 218
  VARIANT 80..218: note = Derived polymorphism lacks residues 80 to 218
  VARIANT 87..218: note = Derived polymorphism lacks residues 87 to 218
  VARIANT 122: note = Ancestral polymorphism is Y, Derived polymorphism is C
MEASIPSFESMPILCGMKEMETSQTSNLGIHQELGPEISQNPMGNHINPEKETNETPGSEVNQELVEICQGAVVETDMSQENQAVPEAGLEVNEETMETCQETAAESDVNPEKQTSDPGVIYRCRKCRRMLATQEFVVTHEVGAGGKSFRAGKRSNVHEDDEKPECPCIFVEPMKWMQTVEEGYVANKLFCMGCKAHLGQFNWAGMQCSCRAWVIPAF

SEQ ID NO: 10951 - protein, 181 aa, Zea mays
  VARIANT 13: note = Ancestral polymorphism is P, Derived polymorphism is L
MSAVDGSGSGTPPPPGHRGCCASGATLELVGAFTAVCLVLYGVILYMNYLYVRWSGRDGVHRTDSGLAGLPAQKRPAGGMDRAALAAMPVLRFRADAHGGESPAECAVCLSALQDGDAVRALPGCRHAFHAACVDAWLCARATCPVCRARPVLPPPQQAPKAGAKVVAGSSGRQLDLESQV

SEQ ID NO: 10952 - protein, 146 aa, Zea mays
  VARIANT 58: note = Ancestral polymorphism is G, Derived polymorphism is R
MEAYAPAGSYRPVCDTVVFVCLASASALIVFMVAVCFRNAFAANGYATAAVATNGAAGATAANGRSRCGLAPSALSAIPVLAYRRRGAGWAQCAICLALVRDGETVRLLPACGHLFHVECIDLWLRSHATCPLCRRGVVEAPVEKV

SEQ ID NO: 10953 - protein, 189 aa, Zea mays
  VARIANT 5..189: note = Derived polymorphism lacks residues 5 to 189
MEQPWNQNQQREAGGFGFGVAMGESSCHAAADLGQGGAGLCEVDGALLLMELMQEQDPPSSDLLLLDGDGDGDRRLSHVIRSLEAEIGGGEAVAMVADDDGGVSMDRIEDALSSDGTDGYDYEGACASSSSFGYWPPSSLLLAGGYDDAEGWCVYANGYEGPGGHVVGYDDYCCCAEGSAELMYLPLWE

SEQ ID NO: 10954 - protein, 758 aa, Zea mays
  VARIANT 426..758: note = Derived polymorphism lacks residues 426 to 758
MPVTCSIYRSSLQPSTPSACRVERQRKKKKTNMTQAHSKSCFQQFWDGVQVKRNSGSFTIELLPSLGATINQSNKLRKFIISPYDPCYRYWELFLIVLVIYSAWICPFELAFLRDLPSKLLLAENIVNGFFAVDIVLTFFVAYVDSKTHLLVDDQKRIAVRYLSTWFIFDVCSTAPFQPISLLFTRKGNGLAFKILNMLRLWRLHRVSSLFASRLEKDIRFNYFWTRCSKLISVTLFAVHCAGCFNYMIADRYPDPEKTWIGAVMPTFRSESLWARYVTALYWSITTLTTTGYGDLHAENPREMLFDICYMLFNLGLTAYLIGNMTNLVVHGTSRTRSFRDSIQSASEFASRNQLPDKIKQQMLSHFCLQFKTEGLSQQAMLNCLPKGIRSGIAYNLFFTIIRKAYLFHGVSNSFIAELVMEVQAEYFPPMEDIMLQNEAAADIYIIVSGVANLITTANGNEQVYEKVEEGDMFGEVGALCDIPQPFTCRTTTLSQLLRIRKIRLTEIMQEHKEDSKILMNNLFQKLKLHESLPELKQLDRRFMHKYELFHAPQEAWLLPQPYLQYTEHKLEDIGKKIPTFCGDHGSTKLAAETNQMRLTQQGNSHDHGNYMATDGMAGEEGERNEVHINCETKEVSIHINSEDCDAASHWQTDHETVRLGSSHNTSDGITMRENQDSSNIKSSNKRVTIHTYPRNAAGSLVQNGKLINLPGSLDEIFEIGCQKFPGLRPTKLFSGDYAEIDDISVIRDGDHLFLLQM

SEQ ID NO: 10955 - protein, 431 aa, Zea mays
  VARIANT 92..431: note = Derived polymorphism lacks residues 92 to 431
  VARIANT 199..431: note = Derived polymorphism lacks residues 199 to 431
MGNRIGGRRKPGVEERFTRPQGLYEHKDIDQKKLRKLILEAKLAPCYPGADDAAAGGGDLDLEECPICFLYYPSLNRSKCCSKGICTECFLQMKPTHTARPTQCPFCKTANYAVEYRGVKTKEERSIEQFEEQKVIEAQLRMRQKELQDEEAKMKRKQSRCSSSRTVTPTTEVEYRDICSTSFSVPSYQCTEQGNECCSSEPSCSSQANMRPFHSRHNRDDNVDMNLEDMMVMEAIWRSIQQEQGHLVNPVCGSYFPVIEPPSRERQAFVPAAPLEMPHPGGYSCAVAALAEHQAPSMDFSYMSGSSTYPVFDMIRRPCNMSSGSLCGAENSSLDTWSGIAPSCSREVVRDEGECSADHWSEGAEAGTSYAGSDIMADAGAMQPLPFAENFAMGPSHFRPESVEEQMMFSMAVSLAEAHHGRTQAQGLAWL

SEQ ID NO: 10956 - protein, 230 aa, Zea mays
  VARIANT 27..230: note = Derived polymorphism lacks residues 27 to 230
  VARIANT 32: note = Ancestral polymorphism is A, Derived polymorphism is V
  VARIANT 165: note = Ancestral polymorphism is D, Derived polymorphism is Y
  VARIANT 167..230: note = Derived polymorphism lacks residues 167 to 230
  VARIANT 185: note = Ancestral polymorphism is C, Derived polymorphism is R
MQLPQNIKIIATHTDSPNVLIWDVEAQPNRHAVLGASESRPDMIWLTESGNFHITVLIWDVEAQPNRHVVLGASESRPDLILTGHKENAEFALAMCPAEPYVLSRGKDKSVVLWSIQDHISALGDSSSSPGASGSKQSVKTANEKESPKVDPRGIFHGHDNTVEDVQFCPSSCAHEFCSVGDDACLILWDARTGTAPAVKVEKAHSGDVHCLDWNPLDVNYILTGYDGIK

SEQ ID NO: 10957 - protein, 896 aa, Zea mays
  VARIANT 639..896: note = Derived polymorphism lacks residues 639 to 896
MPERHQSIDAQLRLLAPGKVSEDDKLVEYDALLVDRFLDILQDLHGPHLREFVQECYELSAEYENDRDEARLGELGSKLTSLPPGDSIVVASSFSHMLNLANLAEEVQIAHRRRIKLKRGDFADEASAPTESDIEETLKRLVSQLGKSREEVFDALKSQTVDLVFTAHPTQSVRRSLLQKHGRIRNCLRQLYAKDITADDKQELDEALQREIQAAFRTDEIRRTPPTPQDEMRAGLSYFHETIWKGVPKFLRRIDTALKNIGINERLPYNAPLIQFSSWMGGDRDEFWKQVPPNEPYRVILGDVRDKLYYTRERSRHLLTSGISEIPEEATFTNVEQFLEPLELCYRSLCACGDKPIADGSLLDFLRQVSTFGLALVKLDIRQESDRHTDVLDSITTHLGIGSYAEWSEEKRQDWLLSELRGKRPLFGSDLPQTEETADVLGTFHVLAELPADCFGAYIISMATAPSDVLAVELLQRECHVKQPLRVVPLFEKLADLEAAPAAVARLFSIDWYMNRINGKQEVMIGYSDSGKDAGRLSAAWQMYKAQEELIKVAKHYGVKLTMFHGRGGTVGRGGGPTHLAILSQPPDTIHGSLRVTVQGEVIEHSFGEEHLCFRTLQRYTAATLEHGMHPPISPKPEWRALMDEMAVVATKEYRSIVFQEPRFVEYFRSATPETEYGRMNIGSRPSKRKPSGGIESLRAIPWIFAWTQTRFHLPVWLGFGAAIKHIMQKDIRNIHILKEMYNEWPFFRVTLDLLEMVFAKGDPGIAAVYDKLLVADDLQSFGEQLRKNYEETKELLLQVAGHKDVLEGDPYLKQRLRLRESYITTLNVCQAYTLKRIRDPSFQVSPQPPLSKEFTDESQPAELVQLNEQSEYAPGLEDTLILTMKGIAAGMQNTG

SEQ ID NO: 10958 - protein, 485 aa, Zea mays
  VARIANT 1: note = Ancestral polymorphism is M, Derived polymorphism is I
  VARIANT 456..485: note = Derived polymorphism lacks residues 456 to 485
MEKLPSQQQVVLLASPGAGHLIPMVELAQRLAADHGFAVTLVTIPGMSNPATEAVVLSSLPSYVLTAVLPAVPLDDLPSDIGFGALVFEFVRRSLPNLRALMEDASRGSVTALVCDFFGTSALPLAAELGVQGYVFLPNSFAMISIMRHLAGLHGDAAAPGEYRDLPDLLPLPAGGLVLHHADLPEGFQDRKDPVYAYHVEEARRYGRANGFLVNSFEELEVVMVETFKRDAEDGAFPPVYPVGPFVRSSSSEEADESGCLEWLDRQPENSVVYLSFGTGGSLSVEQTAELAAGLEMSGHRFLWVVRMPSLDGNPCAYGSMPGDKDDPLAWLPEGFLERTSGRGLAVVAWAPQVRVLSHSATACFVSHCGWNSTLESVAAGVPMVAWPLYAEQKMNAAILTEVTGVALRPAARGNGHGLVTREEIAASVKELMEGEKGSAVRGRTRELREASKRAWSSEGSSRRALGEVAGKLKAALVNGNGSAP

SEQ ID NO: 10959 - protein, 329 aa, Zea mays
  VARIANT 26..329: note = Derived polymorphism lacks residues 26 to 329
MDARAPASAAPSAARPVAAAPAHAVQEAPLTALLEYSGILRPDPGGGIQQPGTGAGPGEVSIRIVAPGEAGTSSERAEEVIVEEEEEDGQATRTRPEDSSPAAGGGEGGRESSSSYQRYDIQQVARWVEQILPFSLLLLVVFIRQHLQGFFVTIWIAAVMFKSNDILCKQTALKIGDCFVELLRERKIPVLVGITILFVVHVSGFYWCYKNGDLIRPLMMLPPKEIPPFWHAIFIILVNDTMVRQTAMVVKCLLLMYYKNSRGRSYRRQGQMLTIVEYFLLLYRALLPTPVWYRFFLNKEYGSLFSSLTTGLYLTFKLTSVVEKVLYVH

SEQ ID NO: 10960 - protein, 358 aa, Zea mays
  VARIANT 179: note = Ancestral polymorphism is G, Derived polymorphism is S
  VARIANT 39: note = Ancestral polymorphism is R, Derived polymorphism is S
MTREMHAILAGIPQSLRPAVLIASTCALLLLATALLLPRAPPAAPAAALTTVTDADAVRLDASVTRRNGNEVLWQLPPPSSPLRAALFAAPGCTIRATDFFDASPGCPRCTGLPEERRFTRAALSRGYAVLAVSSRAKCWSLDDAGGGEDGSELAAVQSIIKWWTTEKYPQLAGLPLFGIGASSGGYFLSALAARVKFSSVTVMIAEGMYGTMAEIPTGYPPALFVHMPKDTERARLVAESMDKLREKHVDVREIQCDDFAVSAEFLAERVPGLTWAFANALVDMLRRKGFVDEKGMLKKDGRRTPWKEAAEEAKVLPERFGLERHVTEELNVAYAYHEFTSLKNTEVFQWFESHMNH

SEQ ID NO: 10961 - protein, 119 aa, Zea mays
  VARIANT 8: note = Ancestral polymorphism is D, Derived polymorphism is N
  VARIANT 40: note = Ancestral polymorphism is A, Derived polymorphism is V
  VARIANT 48: note = Ancestral polymorphism is A, Derived polymorphism is V
  VARIANT 61: note = Ancestral polymorphism is C, Derived polymorphism is Y
  VARIANT 68: note = Ancestral polymorphism is G, Derived polymorphism is R
  VARIANT 71: note = Ancestral polymorphism is V, Derived polymorphism is M
  VARIANT 76: note = Ancestral polymorphism is C, Derived polymorphism is Y
  VARIANT 82: note = Ancestral polymorphism is R, Derived polymorphism is C
MGATVAADLVVVEVREVKGGRGGRTHRGGRGGGMNGGSKAVVVVHKHVGVFISKSKEDALCTKNMVSGESVYGEKCASVQVRDCLFLMMIEQRLNTGCGTPSVRSWLLLCLVVLTTSRL

SEQ ID NO: 10962 - protein, 136 aa, Zea mays
  VARIANT 90: note = Ancestral polymorphism is G, Derived polymorphism is D
  VARIANT 69: note = Ancestral polymorphism is R, Derived polymorphism is H
  VARIANT 20..136: note = Derived polymorphism lacks residues 20 to 136
  VARIANT 1: note = Ancestral polymorphism is M, Derived polymorphism is I
MYNGIGLQTARGSGTNGYAQSNKFFVKPRSTSGGGPGGPHRPLRSDAAGADGGGMRKPNKEILEHDRKRQVELKLLVLRNALEEHGYTEDEIEERVAEARKAAEAEAAAAAEEAGIGRGAGRPPLLGRGYGSVGVI

SEQ ID NO: 10963 - protein, 78 aa, Zea mays
  VARIANT 73..78: note = Derived polymorphism lacks residues 73 to 78
  VARIANT 62: note = Ancestral polymorphism is A, Derived polymorphism is T
  VARIANT 54: note = Ancestral polymorphism is E, Derived polymorphism is D
  VARIANT 36: note = Ancestral polymorphism is D, Derived polymorphism is Y
  VARIANT 35: note = Ancestral polymorphism is E, Derived polymorphism is K
  VARIANT 18: note = Ancestral polymorphism is E, Derived polymorphism is K
  VARIANT 10: note = Ancestral polymorphism is E, Derived polymorphism is K
  VARIANT 2: note = Ancestral polymorphism is R, Derived polymorphism is C
MRKPNKEILEHDRKRQVELKLLVLRDALEEHGYTEDEIEERVAEARKAAAVAADEAGSGRGTGRPPLPVRGYGSVGVI

SEQ ID NO: 10964 - protein, 141 aa, Zea mays
  VARIANT 9: note = Ancestral polymorphism is T, Derived polymorphism is I
MYNGIGLQTARGSGTNGYAQSNTFFVKPRPRSTTSGGGPGRPHRPLPPDAAGADGGGMRKPNKEILEHDRKRQVELKLLVLRDALEEHGYTEDEIEERVAEARKAAEAEAAAAVAAEEAGSGRGAGRPPLPVRGYGSVGVF

SEQ ID NO: 10965 - protein, 109 aa, Zea mays
  VARIANT 53: note = Ancestral polymorphism is G, Derived polymorphism is C
MYNGIGLQTARGSGTNGYAQSNTFFVKPRSTTSGGGPGGPHRPLPPDAAGADGGGMRKPNKEILEHDRKRQVELKLLVLRDALEEHGYTEDEMEERVAEARKAAEAEAA

SEQ ID NO: 10966 - protein, 136 aa, Zea mays
  VARIANT 79: note = Ancestral polymorphism is R, Derived polymorphism is M
  VARIANT 46..136: note = Derived polymorphism lacks residues 46 to 136
MYNGIGLQTARGSGTNGYAQSNKFLVKPRSTSGWGPGGRHRPLPLEAAGADGGGMRKPNKEILEHDRKRQVEVKLLVLRDALEEHGYTEDEIEERVAEARKAAEAEAAVAAEEAGSGRGAGRPPLPGRGYGSVGVV

SEQ ID NO: 10967 - protein, 282 aa, Zea mays
  VARIANT 30: note = Ancestral polymorphism is A, Derived polymorphism is S
  VARIANT 36: note = Ancestral polymorphism is P, Derived polymorphism is L
  VARIANT 45: note = Ancestral polymorphism is N, Derived polymorphism is K
  VARIANT 59: note = Ancestral polymorphism is D, Derived polymorphism is H
  VARIANT 62: note = Ancestral polymorphism is K, Derived polymorphism is E
  VARIANT 63: note = Ancestral polymorphism is R, Derived polymorphism is C
  VARIANT 92: note = Ancestral polymorphism is C, Derived polymorphism is Y
  VARIANT 112: note = Ancestral polymorphism is R, Derived polymorphism is H
  VARIANT 127..282: note = Derived polymorphism lacks residues 127 to 282
MVDIRLRPTTLGDYVDRGKQSLETICLLLAYKVKYPENFFLLRGNHECASVNRIYGFYDECKRRFSVKLWKTFTDCFNCLPVSALIDEKILCMHGGLSLELNKLEQILNLNRPTDVPDTGLLCDLLWSDPSNEATGWAINDRGVSFTFGPDKVSEFLEKHDLDLICRAHQVVVFLKMGPSYGYRGRVMLAFEDNGSSKIGVRFDKQIPDGNDLGGLCEEDHGFFCSAESLCPDFSAGEEVERLAMTELIEVISEENKSGPLIVLLKDVEKSFIGVTESLSSL

SEQ ID NO: 10968 - protein, 187 aa, Zea mays
  VARIANT 41: note = Ancestral polymorphism is A, Derived polymorphism is S
  VARIANT 49: note = Ancestral polymorphism is G, Derived polymorphism is S
  VARIANT 99: note = Ancestral polymorphism is L, Derived polymorphism is F
  VARIANT 147: note = Ancestral polymorphism is R, Derived polymorphism is C
MWRVPQASEKKQSNPMREIKVQKLVLNISVGESGDRLTRAAKVLEQLSGQTPVFSKARYTVRSFGIRRNEKIACYVTVRGDKAMQLLESGLKVKEYELLRRNFSDTGCFGFGIQEHIDLGIKYDPSTGIYGMDFYVVLERAGYRVARRRRCKSRVGIQHRVTKEDSMKWFQVKYEGVILNKAQASTI

SEQ ID NO: 10969 - protein, 548 aa, Zea mays
  VARIANT 498: note = Ancestral polymorphism is A, Derived polymorphism is V
  VARIANT 476: note = Ancestral polymorphism is A, Derived polymorphism is V
  VARIANT 1: note = Ancestral polymorphism is M, Derived polymorphism is V
MAIPSPAEPESGDPGLAECLNLLEAVPAAADSSPAFRRHWPSISASLAALSASLASPAFPPAAPLLAPLAAALRALLSVAGDAPRLGHLHTVSLLSSTAASLSQHAADARLLAAPAPAASDAGSAADALVSRLRLGSAASRAAALEELASTAAALPAPSATAAVSAVAVLLDSACGGGGGGGGDLRDRAVAALAALASSDAARPSLAQEAGAVVPHLCRALESGASAAEHACAALLPLTAASRDAAAAVAARGGVAALLAACAGGTPAAQATAAGVLRNLAAFPDLLPAFRDEGALPLLLQLVSLGTPRAQELALACLQSLTTGDGGDEAQRLRVEAFQEGALGCVSDFLDGRRGDEPGLAPALGLLRNMASFRYIAEIAASGGLAAHAAAALGSDRSATRAEAALALAELCGNAGKAGLRQEAVVADAVPRLVWMLEAKPAGERDAAARALAAVLDASSGCRKAFRKDERGVVNAVQLLDPSAPGVETRFPVSVLLAVAQSRRCRKQMVAAGACGFLQGLVASEVVGAKRLAERLGKGKMLGVFPRT

SEQ ID NO: 10970 - protein, 324 aa, Zea mays
  VARIANT 6: note = Ancestral polymorphism is T, Derived polymorphism is I
  VARIANT 23: note = Ancestral polymorphism is A, Derived polymorphism is V
MASFRTSWHCLLAACLFLLASAAHGQQLSSSFYAATCPTLELIVRTTMLTALLAERRMGASLVRLFFHDCFVQGCDGSILLDDVGSFVGEKGAGPNVNSLRGFDVIDQIKANVELICPGVVSCADIVALAARDGTFLLGGPSWAVPLGRRDSTTASLALANSDLPSPVSGLAALLAAFGNKGLGPGDLTALSGAHTIGFSQCQNFRAHIYNDTDIDPAFASLRQRTCPAAPGTGDSSLAPLDVQTQLVFDNAYYRNLLAKRGLLRSDQALFNGGSQDALVRQYSANPALFASDFANAMIKMGNISPLTGTAGQIRANCRVVNSS

SEQ ID NO: 10971 - protein, 89 aa, Zea mays
  VARIANT 78: note = Ancestral polymorphism is A, Derived polymorphism is V
  VARIANT 66..89: note = Derived polymorphism lacks residues 66 to 89
  VARIANT 49: note = Ancestral polymorphism is F, Derived polymorphism is I
  VARIANT 46: note = Ancestral polymorphism is R, Derived polymorphism is Q
MWPAATMFALGFLLCPFPALSPSARNLTALLPELRDLFGSLYRHCRQEFVLLASTRRRRRVHGQSRHPLKMLRPRMKVILLVPLNLKCK

SEQ ID NO: 10972 - protein, 105 aa, Zea mays
  VARIANT 6: note = Ancestral polymorphism is C, Derived polymorphism is Y
MAETDCGLLLINCMLFEIEQTSLFSDNQSMQSKVSATREKEVVQTACHKDITESPWDPSYLFMVHDESDWEKVIESSKQITVRMAKALPNEIRIPDPTPDVCFFF

SEQ ID NO: 10973 - protein, 685 aa, Zea mays
  VARIANT 247: note = Ancestral polymorphism is T, Derived polymorphism is I
MAGSVGKARAALRSSPKRYSGTDPPLSLAGPTLADLQRTAELEKFLVEAGLYEGKEESAKREDVLSEIGLIVKEWVKQLTRKKGYAEQLVEQANAILFTFGSYRLGVSASLVHGPGADIDTLCVGPSYVNREEDFFVTLHGILAEKEEVAELQPVPDAHVPVLKFKFRGISIDLLYASISLSVIPADFDISQGSVLCDVDEATVRSLNGCRVADQILRLVPNVENFRTTLRCLKYWAKRRGVYSNITGFLGGVNWALLVARVCQLYPNAVPSMLVSRFFRVFTQWQWPNPVMLCAIENNDLGFSIWDPRKNPRDRNHLMPIITPAYPCMNSSYNVSTSTLRVIMEQFQFGNKVCQEIELNKANWNALFEPFHFFEAYRKFLVVDIVAEDDDDLRLWKGWIESRLRQLTLKIERDTKGILQCHPYPCEYSDPTIECAHCAFYMGLSRKEGLKKRGQQFDIRGTVDEFMREIGMYSLWKPGMDLAVTHVHREQVPSYVFEQGYKKPCPTMHANQQEQSDGDGTFSPYLESQLKRKYISDGDGHVDLCKSVKRASVSPPGVGTPPHLGNSVSNVVCDSPVKFVSSVVCSGAHASSSHDDINIEQAQLTTSPYGSEDTSASGTSCAAVGAVILADESSKLGNLTSDLEVDTIQTMPLHTSLECVAQKGETKLEEIRRLASNNCAEFLES

SEQ ID NO: 10974 - protein, 491 aa, Zea mays
  VARIANT 366: note = Ancestral polymorphism is E, Derived polymorphism is D
MARRLAYTTALTTLFSYGLLFAFGQLRDLFRHLLGCFRPNKDDDVKQGYAPICVGLEDFFVRRLYLRVQDCFGRPIASAPDSWFDVVERTSDDNNKTLQRTSKTTRCLNLTSYNYLGFAAADEYCVPRVVDSLKKYSASTCSARVDGGTTKLHTELEELVARFVGKPAAVVFGMGYVTNSATIPCLIGKGGLIISDSLNHNSIVNGARGSDATVRVFRHNCPAHLEKVLREQVAGGQPRTHRAWKKIVVVVEGIYSMEGELCKLPEIIAVCKKYKAYTYLDEAHSIGAVGRSGRGVCELLGVDPADVDVMMGTFTKSFGSCGGYIAASEEIVQHLKHTCPGHLYATSMSPPAVQQVISAIRVVLGEDGSSRGAQKLARIRENSNFFRSELKKMGFEVLGDNDSPVMPIMLYNPAKIPAFSRECFRQKVAVITVAFPVTPLLLARARFCISASHTREDLTKALDVISRVGDLVGIKYFPAQRPKIAEAGHGN

SEQ ID NO: 10975 - protein, 773 aa, Zea mays
  VARIANT 378..773: note = Derived polymorphism lacks residues 378 to 773
  VARIANT 346..773: note = Derived polymorphism lacks residues 346 to 773
  VARIANT 231: note = Ancestral polymorphism is R, Derived polymorphism is I
  VARIANT 188..773: note = Derived polymorphism lacks residues 188 to 773
  VARIANT 184..773: note = Derived polymorphism lacks residues 184 to 773
MFHRNVHYCDNLEKIKSRGELYKCRHLVCKGFSPSYPFVHAPCSRRPNPSNPSSAMADDHYSSKRKYDDPSPPPRRTGFSSGPPPASPLAGGAPSYNSVPPPPDEIQLAKQRAQEIAARIFNAAEAKRPRVDNGDDDSGGFGVGLGSTGGGGRIGGGGLGFSSSAGGGHGASIPQLSSQSSAPQYSSYGGYQGTSKKIEIPNGRVGVIIGKAGETIRYIQLQSGAKIQVTRDHEAEPGALTRQVELSGKPEQISKAEQLIKEVLAEADAGSSGAGSGGRKYNATQPGAETFQMKIANNKVGLIIGKGGETIKSMQANSGARIQVIPLHLPAGDTSTERTVHIDGTQEQIEAAKQLISEVTSESQLVSLACQEDCKLSWRADVQTIFLQNRARNPMSGGYSQQGYRPPRPQSNWGPPSVPPQQPGYGYMQPGAYPGAPPQYGAPQQPYGSYPPTSGGYQTGWDQSQNQQSHTTPPGTGYDYYSQQQQPQQQSAPGTAASTDATSYNYGQPSTYASQGYDSTYTQQSGGQQAYGHDGYTGYQTQGQQQGYSQQTGYDQQGYGTSAYGSAASSTQDGSNYGGPGGASQASPGQQTSNPAAGSQPGYTSQPPTSAAATYPPQGSAPSGYGAPPSQSGYGTQPPQQAGYGQGAYGQPSPQGQKPPALSPYGQAPPPGSAQAGYGQYGYSQPAYGAPPAYPGAPIASHQGYGQQQSYGQQQSYGDAYGSASYGQPPAYSTEATPPAASQDHSAAPAAALGTTASTAPENSGGAQTSAET

SEQ ID NO: 10976 - protein, 540 aa, Zea mays
  VARIANT 13: note = Ancestral polymorphism is S, Derived polymorphism is Y
  VARIANT 33: note = Ancestral polymorphism is R, Derived polymorphism is W
MVSFSGIDLKLASSFLFFPVLINSSLCCVTACRLLFSVLFISLDICCVGLICSPAKSVCILISMLHVSVDIISAIEFDKSGNHLATGDRGGRVVLFERTDIADNACRGELERQEYLVSRHPEFRYKTEFQSHEPEFDYLKSLEIEEKINKIKWCQTTNNALFLLSTNDKTIKYWKVQEKKVKRVSVMNLDTSQSSDNGSTSSPGTSSCRALLPNGGCTGKMYSPNNNMSFPPGGCTSLRLPVVVTGQEFTHVARSRRVYAHAHDYHINSISNNSDGETFISADDLRINLWNLEISNQSFNIVDVKPANMEDLTEVITCAEFHPTHCNTLAYSSSKGTIRLIDLRQSALCDNHAKLFEEHEAPGSRSFFTEIIASVSDIKFARDGRHILSRDYMTLKLWDLNMDSGPVATFQVHEYLRPKLCDLYENDSIFDKFECCLSGDGLHVATGSYSNLFRVFGCSPESVEASTLEASRNPMRRQVADPARPARTLTGAVRRGGENTSVDASGNSCDLSTKLLHLAWHPTENSIACAAANSLYMYYA

SEQ ID NO: 10977 - protein, 454 aa, Zea mays
  VARIANT 391: note = Ancestral polymorphism is S, Derived polymorphism is F
  VARIANT 256: note = Ancestral polymorphism is G, Derived polymorphism is D
  VARIANT 239: note = Ancestral polymorphism is A, Derived polymorphism is T
  VARIANT 236: note = Ancestral polymorphism is A, Derived polymorphism is T
  VARIANT 178: note = Ancestral polymorphism is M, Derived polymorphism is T
MGICASSKRVEQEEEDSDENVVYVVMDGQGGGGGGGWGGDGRGAAWERTVAASLFSQKGKKGPNQDAVILCQRFLCCGLSSSPGNAAVLAHALDLGLGVGGQKIPGTVLPITSTKKITAATHHQFTVRSDKCTATTTNSPYFSEGFGMEDGVFCGVFDGHGRCGQLVSKLARDHLPFMILSQRNALLLGSDDDGDGPAFSDASPAASSSTDGSRSERSSPAPAQMLEEWREACANAFEAMDRELGVQAKVDCDFSGTTAVCAIKQGEDLVVANLGDSRAVLATVSETGYLKAVQLTTDQKPNVPQEAERIKRCNGRVFALKDEASVPRVWLPDEDCPGLAMARSLGDHRLKRHGVVSEPEVAHRRVAPGDLFLVLATDGVWDVLSNQEVVSIVCATPRKQHASKAVAQAAAQRWRTRYPASRVDDCSAACLFLRDQDWATSVAAAPKAKAAASR

SEQ ID NO: 10978 - protein, 166 aa, Zea mays
  VARIANT 132..166: note = Ancestral polymorphism lacks residues 132 to 166
  VARIANT 125..166: note = Derived polymorphism lacks residues 125 to 166
  VARIANT 106..166: note = Derived polymorphism lacks residues 106 to 166
  VARIANT 89..166: note = Derived polymorphism lacks residues 89 to 166
  VARIANT 88: note = Ancestral polymorphism is S, Derived polymorphism is R
MMRTIWSPDGPNKIHPDVDLTAPDAGRPDDDPAWFCLRVGCDQSHERVDPEALDRSFFMRVMAARSPNVRLQRLSTGRTRGTDNFHLSWMFHLRFRFIVRILILTQLDAEMPALCAAEASETSRRPAARNRWATMLPNASYSNSSMTAHADLCFHHLCSEETKRPD

SEQ ID NO: 10979 - protein, 549 aa, Zea mays
  VARIANT 12: note = Ancestral polymorphism is R, Derived polymorphism is C
  VARIANT 28: note = Ancestral polymorphism is T, Derived polymorphism is A
  VARIANT 200: note = Ancestral polymorphism is E, Derived polymorphism is V
  VARIANT 231..549: note = Derived polymorphism lacks residues 231 to 549
  VARIANT 262: note = Ancestral polymorphism is G, Derived polymorphism is E
MKVALVVLTGERDLCGSFNNNVLKKVETRMEELEQLGLQYTVISVGKKGNAYFQRRPYIPLERGLEVNDVPTVKDSQATCDLVYSLFVSEEVDKVELLYSAGALRPHHLDAAPHVPQGRLFPEVCSMAGYPEDNQHELNGYDEEVDEEEGHPGRRVGRDGGSGYAVAVGEDGRGAGGDSLGKIFVGGVAWETTEGMLLCEIFFPVHLQSLVCYFCDSVLSKLTNLYGFICLYVESFSKHFEKYGAITDSVIMKDKHTKMPRGFGFVTFSDPSVIDKVLEDDHVIDGRTVEVKRTVPREEMITKDGPKTRKIFIGGLPPSLTEDELKDHFSSYGNVVEHQIMLDHSTGRSRGFGFITFESEDSVERVISEGRMRDLGGKQVEIKKAEPKKHGSDHSSNGRSNHGGGAYRNSYRSGGGAGSGSSGGGGGYGYGGAYRSAAAGYGYDGGAGAGYGYGRGYGYGGNAGFGSSFGGGYGGSMYGGAAYGAYGAYGGGAYGGGAYGGGAYGGGAAYGGAPGGYGTGGYGSYGGAGSTGGGSTGARGSSRYHPYGK

SEQ ID NO: 10980 - protein, 69 aa, Zea mays
  VARIANT 47: note = Ancestral polymorphism is D, Derived polymorphism is N
  VARIANT 50: note = Ancestral polymorphism is T, Derived polymorphism is I
MKVDISGVNVEKFDDKYFATKDLPQLKKDDQKAVDAELIKAIEVVPNLKTYLGAWFSLRDGDKPHEIVF

SEQ ID NO: 10981 - protein, 437 aa, Zea mays
  VARIANT 9: note = Ancestral polymorphism is L, Derived polymorphism is P
MAPLGLFLLLCFCSHLFRCSPDLALPVLHANSGNKNAFKTLIAAEYSGVKVELVKDFQMGVSNKTPEFLKMNPIGKIPVLETPDGPVFESNAIARYVTRLKADNPLYGSSLIDYAHIEQWIDFAATEIDANIGKWLYPRMGFYPHAGVVEESTIAALKRALGSLSTHLASNTFLVGHSVTLADIVMTCNLCMGFSRILTKSFTSEFPHVERYFWTMVNQPNFKKVIGDVKQAEAVPLVPQKAAPAKVQKPKETKKEAPKPKVTEKSAEEEEAPKPKPKNPLDLLPPSKMILDDWKRLYSNTKTNFREVAIKGFWDMYDPEGYSLWFCDYKYNDENTVSFVTMNKVGGFLQRMDLCRKYAFGKMLVVGSEPPFKVKGLWLFRGSEIPKFVMDEVYDMELYEWTKVDLSDEAQKERVNAMIEDQEPFEGEALLDAKCFK

SEQ ID NO: 10982 - protein, 552 aa, Zea mays
  VARIANT 368: note = Ancestral polymorphism is A, Derived polymorphism is P
MSPPIALCCRKTSMARRTRFVAVAALLASFLSVAAGHPRPLPAAGLPGDLFGLGIASRIRTDSNSTAKAATDFGQMVRAAPEAVFHPATPADIAALVRFSATSAAPFPVAPRGQGHSWRGQALAPGGVVVDMGSLGRGPRINVSAATGAEPFVDAGGEQLWVDVLRATLRHGLAPRVWTDYLRLTVGGTLSNAGIGGQAFRHGPQIANVHELDVVTGTGEMVTCSMDVNSDLFMAALGGLGQFGVITRARIRLEPAPKRVRWVRLAYTDVATFTKDQEFLISNRTSQVGFDYVEGQVQLNRSLVEGPKSTPFFSGADLARLAGLASRTGPTAIYYIEGAMYYTEDTAISVDKKMKALLDQLSFEPGFPFTKDVTFVQFLDRVREEERVLRSAGAWEVPHPWLNLFVPRSRILDFDDGVFKALLKDANPAGIILMYPMNKDRWDDRMTAMTPATDDDDNVFYAVSFLWSALSADDVPQLERWNKAVLDFCDRSGIECKQYLPHYTSQDGWRRHFGAKWSRIAELKARYDPRALLSPGQRIFPVPVESSGIASA

SEQ ID NO: 10983 - protein, 494 aa, Zea mays
  VARIANT 252: note = Ancestral polymorphism is D, Derived polymorphism is N
  VARIANT 348: note = Ancestral polymorphism is P, Derived polymorphism is T
MARTRFVAVAALLTSFLSVAVGQPRPLPAAVLPSDLFGLGIASRIRTDRNSTAKAATDFGQMARAAPEAVFHPATPADIAALVRFSASSVAPFPVAPRGQGHSWRGQALAPGGVVVDMGSLGRGPRINVSVAEPFVDVGGEQLWVDVLRATLRHGLAPRVWTDYLRLTVGGTLSNAGIGGQAFRHGPQIANVHELDVVTGTGEMVTCSMDVNSDLFMAALGGLGQFGVITRARIRLEPAPRRVRWVPLAYTDVATFTKDQEFLISNRASQVGFDYVEGQVQLSRSLVEGPKSTPFFSGADLARLAGLASRTGPTAIYYIEGAMYYTEDTAISVDKKMKALLDQLSFEPGFAFTKDVTFVQFLDRVREEERVLRSAGAWEVPHPWLNLFVPRSRILDFDDGVFKALLKDSNPAGIILMYPMNKDRWDDRMTAMTPATNDDDVFYAVSFLWSALSADDVPQLERWNKAVLDFCDRSGIECKQYLPHYTSQDGIAKT

SEQ ID NO: 10984 - protein, 100 aa, Zea mays
  VARIANT 44: note = Ancestral polymorphism is G, Derived polymorphism is S
  VARIANT 22: note = Ancestral polymorphism is A, Derived polymorphism is V
  VARIANT 21: note = Ancestral polymorphism is A, Derived polymorphism is T
  VARIANT 13: note = Ancestral polymorphism is R, Derived polymorphism is L
MLLIITFFQGFGRLSLVAASAVQSAASVVQVGTKEIQSKMRDGSYDQKVNETVNVVANKTAEIGSKTWGIMRGVMAMASQKVEEYTERLGRGLATQRAEW

SEQ ID NO: 10985 - protein, 127 aa, Zea mays
  VARIANT 32: note = Ancestral polymorphism is L, Derived polymorphism is P
  VARIANT 36: note = Ancestral polymorphism is A, Derived polymorphism is D
  VARIANT 37: note = Ancestral polymorphism is T, Derived polymorphism is I
  VARIANT 54: note = Ancestral polymorphism is G, Derived polymorphism is D
MVIPAGVQAYLAGLTFVLSVLPCSTPILATLLGYVATSRDPIIGGSLLLTYTTGNVARLPTIASFARALQVGPYSALNNCKSVPSMYLQRHRWIMVLQFYEVVASTWSSVSNHDCGPSSLLVLANTG

SEQ ID NO: 10986 - protein, 509 aa, Zea mays
  VARIANT 310: note = Ancestral polymorphism is W, Derived polymorphism is S
  VARIANT 80: note = Ancestral polymorphism is S, Derived polymorphism is F
MASKRANAGDEQQKLSPSGLPVHKIPGSYGVPFFTPLRDRLDYFYFQGAEEYFRFRVAKHGGATVLRVNMPPGPFLSGDSRVVAVLDARSFRVLLDDSRVDKDGTLDGTYMPSLALFGGHRPLAFLDGADPRHAALKRVMIRLAAAGMQHVAPAFGAAFTATFDAVEAGMAGGASAVEFNKHNMRHMLDFTCASLFGGKLPSKAIGDGAAAKAFKWLVFQLHPLASKAIRPWPLEDLLLHTFRLPPFLVRRDYAELTAYFADVAAGVLDDAEKAEPGAVPRDELLHNLIFLAIFNAYGGYKIFLPHVVKWLARSGPELHARLADEVRAVVPPGSASAGDAITLSDVEKMPLVKSFVWETLRMNPPVEFQYGRARQDMVVESHDAAYEVKKGEMLFGYQPLATRDERVFRRGREFVPDRFAVCSDDERRRLLDHVVWSNGPETGAAAERNKQCPGKNAVVAVGRLMVAELFRRYDTFVASVHETPVEPVVTFTSLTRASSAAGHGSSVKP

SEQ ID NO: 10987 - protein, 738 aa, Zea mays
  VARIANT 368..738: note = Derived polymorphism lacks residues 368 to 738
  VARIANT 152..738: note = Derived polymorphism lacks residues 152 to 738
MASGGAPPTVAVAVRPGGSGSRLAARWVAAGLPGNGRATAITVVHVIPELSYEPSPTGERVPMPLVGREPAEAYAWDRRARAEEALLPFRRLYCCGLANVTVETVVVEGDGVAEALLRYIRESGVRSLVLGSASFRWFRRALSIPDVPESNRNLRIESISHETFALSHRSLLFDNFGDDEAQSDSFSQSHSSHSASNVVSSSESSEQVASGSSGVNYAATEGSKNYDSLSSWGEDPWVASNSSEECQSTDDVSKLRKELQETLVVYDKACANLVSVKKKIQVLSIECSEEARKVEHALEWEEALKQTVSDEKAKQLEVISEVEQAGKSFTREAYSRYKTEMAASMICQDKVQIVDAILTKSRSCRRYSKRDIELATDNFSEERKIGEGGYGNVYRCTLDHTEVAVKVIQENSIDKTDEFLKEVEILSQLRHPNLVLLLGFCPEIGCLVYEYLKNGSLEDQLFNSEGCQPLHWFLRFQVVFEVSCGLAFLHARSPEPVVHRDLKPANILLDRNYVGKVGDVGFAKFVSDLVPDWQTEYKDTIVAGTLYYTDPEYQQTGTVRPKSDVFALGVVILQLLTGRRPDGLVASAENAVRNGRLADILDWSQAGWPLAEAEVFARLGLRCAALRCRDRPDLESEVLPELDEILHRITFAVSLRSPKLTSVPSHFVCPITQELMEDPHVAADGHTYEHYAIRAWLKRHRTSPVTRSKLQNSSVIPNHSLRGAIQQWKSQLPAQTNE

SEQ ID NO: 10988 - protein, 315 aa, Zea mays
  VARIANT 207..315: note = Derived polymorphism lacks residues 207 to 315
  VARIANT 242..315: note = Derived polymorphism lacks residues 242 to 315
  VARIANT 252: note = Ancestral polymorphism is P, Derived polymorphism is L
MPSHGDLDRQIAQLRDCKYLPEAEVKVLCEQAKAILMEEWNVQPVRCPVTVCGDIHGQFYDLIELFRIGGDSPDTNYLFMGDYVDRGYYSVETVSLLVALKVRYRDRITILRGNHESRQITQVYGFYDECLRKYGNANVWKYFTDLFDYLPLTALIENQVFCLHGGLSPSLDTLDNIRSLDRIQEPWASQNHIFTPFPPIEPAATLKRAAGSNYGAHGPSACACRFPSLLWPDPDLSTNLQWLPLLPGADLPLLSATIAGGWVPSCSLQAVLDSTDACWAPSILKISFALVPCLALALLLLLLILPHALLLLLSD

SEQ ID NO: 10989 - protein, 439 aa, Zea mays
  VARIANT 114: note = Ancestral polymorphism is T, Derived polymorphism is I
MAAATTAGAGAATPQPPRQYKLAPQSELRVEVLPDAPLRVRLVTGTAEIFGTELPPEGWVPVPPRSKIAIFTWHGATVELDGVSESEYTSDETPMVIYVNTHAILDARRARARTAAAQGGDKEASQGPRVIVVGPTDSGKSTLCKMLLSWAAKLGWKPTYVDLDIGQGSITIPGCISATPIEKPIDIIDGIPLEMPLVYFYGHPNPSINADVYKVLMKELAKTLEKQFSGNAESRAAGMVINTMGWVEGLGYELLLNAIETFKANVVLVLGQEKLWKMLKDAVQSKSNIDVVKLHKSEGVVLRNSKYRQRTRSFRIKEYFYGIANDLAPHSNIVNFSDVSVYKIGGGHQAPRSALPIGAEPVADPTRLVAVNISTDMIHTVLAISYAKEPEEIISSNVAGFIHVTDVDIQRKKLTYIAPCPGDLPSRLLIASSLTWYEA

SEQ ID NO: 10990 - protein, 457 aa, Zea mays
  VARIANT 343..457: note = Derived polymorphism lacks residues 343 to 457
METTTKLRWSRPGSFLLVAAAFLASAAASGVNVGQFDDHLQKRKELAEASAREAYRPDPYNVTNSFNAAVHRHVLALPQRLGDGPAAPGPLRQRLRARDHRRPRRQDLRGDRPHRPRRGEPAPRHAALGRHPARPAVDHLRAVHDHPALAGAAHEQRQDHRRARRAGAHRQRRRDHGAAGAKRHHPQPARARRQAHHGRPHARLPHAHRLPHQGRRRRHLPLLRHQRLDRPHLHVQLRGRPHRRRAELHGDHHLQLPLHQPQRRHALRRQRLLAAGPDHADHRRLQPLRQGPGAADAKVPLGLLPRCQQRLHALAHVRHWRRRRANHHQPGQPLHSTTKHRRQSDHQALRGRRRVEELGVAHGGRPVHERRHLQSVRRRPQAGRHQRVGQAQARNLRYKAHPLLRHTVLLHGQAVLKAGRWASEAASSSSWPGHARSRWLRFISWKKARMDHRLSFC

SEQ ID NO: 10991 - protein, 103 aa, Zea mays
  VARIANT 45: note = Ancestral polymorphism is P, Derived polymorphism is S
  VARIANT 2: note = Ancestral polymorphism is N, Derived polymorphism is D
MNAKRLTPILLAVLMMTCLVSAANCAIAGGHDVETTPASGLRWPPSPDAEKTMLESSDINVILCLKAQCAGYKSCYCCFTLPGLPCWPDQKTCWQECPSHKRL

SEQ ID NO: 10992 - protein, 203 aa, Zea mays
  VARIANT 42: note = Ancestral polymorphism is D, Derived polymorphism is Y
  VARIANT 49: note = Ancestral polymorphism is E, Derived polymorphism is K
  VARIANT 73: note = Ancestral polymorphism is R, Derived polymorphism is I
  VARIANT 141..203: note = Derived polymorphism lacks residues 141 to 203
  VARIANT 163..203: note = Derived polymorphism lacks residues 163 to 203
  VARIANT 181: note = Ancestral polymorphism is P, Derived polymorphism is L
  VARIANT 194..203: note = Derived polymorphism lacks residues 194 to 203
MFFDKFNIRHNIAELLEYLWDVPTKEEEKGVYLNFLNFLINDSIYLLDESLNKILELKEIEAEMTNIVEWERRPAQEREERLRVFHQWENIVRFDMRLANEDVGMLAFTSEQIPAPFLLPEMVERVVSMLNYFLLQLSGPQRKSLTVKDPEKYEFKPKQLLKQIATIYVHISRGDKESVFPAAISKDGRAYNDQSSPTENRLL

SEQ ID NO: 10993 - protein, 115 aa, Zea mays
  VARIANT 50: note = Ancestral polymorphism is R, Derived polymorphism is W
  VARIANT 78: note = Ancestral polymorphism is V, Derived polymorphism is I
  VARIANT 79: note = Ancestral polymorphism is V, Derived polymorphism is I
  VARIANT 86: note = Ancestral polymorphism is A, Derived polymorphism is V
MGAVASTAPCTLWPCRHGDMAICPRCAGGTPVSPLHHCSSNPVAIWYRRRTPRRMTGGKRFGGGRVPTGTPSLAWSSVVIVASLLVGASIVHNIYKPDMTIPPVEGAAGGGGQES

SEQ ID NO: 10994 - protein, 1080 aa, Zea mays
  VARIANT 522..1080: note = Derived polymorphism lacks residues 522 to 1080
  VARIANT 485..1080: note = Derived polymorphism lacks residues 485 to 1080
  VARIANT 403..1080: note = Derived polymorphism lacks residues 403 to 1080
  VARIANT 316..1080: note = Derived polymorphism lacks residues 316 to 1080
  VARIANT 130..1080: note = Derived polymorphism lacks residues 130 to 1080
  VARIANT 122..1080: note = Derived polymorphism lacks residues 122 to 1080
  VARIANT 69..1080: note = Derived polymorphism lacks residues 69 to 1080
  VARIANT 66..1080: note = Derived polymorphism lacks residues 66 to 1080
MEFSKQGQAPMPNNIGLQPLPSSNVQSNQTEYPSLFYPSSLPGDWSSHMGTSVPVSSYYIVPMNQQSVQLGASRPEVSHPAQPLLSRVSLRPPQQVLNIQTSLPAMAGSQPSPSMAGRKSQQKVASPKVQMLKSPSFQSSNKRSAQKELPSKVQHHQLESVRSKFRESLIAALSLDLDQQNRSQSPDNVQSDGSTDKFKPAAGDVVQDLAANTSKDVCTTNSGVATTVAPSRCEENEKLISGLASEMTMSINDDMQQPSNQVSSEDDLLGQCMVADELLQGHGLSWVSDHVAGISKPNAEPNDLKRPQTSDVESESKRIKSANELAMDEEKFNQRAESLAFRIEEELFKLFRGVNKKYKEKGRSLLFNLKDKSNPELRERVLSGDIAPERLCSMTAEELASKELSEWRLAKAEEFAQMVVLPNMEVDPRRLVRKTHKGEFQVEVEEPDGFSVEVELGSNLTNIPSKTVEDQAKSNGTDGKEDVQEKDKASDGTSQDEGGRTGNNDMPGDVQYIDNEKADLMQELILDDMKDTVNLPPIPSLDEFMQGLDSEPPFVDLSVGTPQEDVNDSEEPGTTMEPEDLPETEDNASTPEKFESESDKSSAQVNSEPKLESPGDTAVPNSDLTEPRDGELNKSSPSHGKGEAKKTTTDNASNPDSVHQDQAASIPMIRESIWEGAIQLNVSSLSNVVAIFKSGEKPSLKVWRSFVEIKGRVKLSAFQEFVEQLPKSRSRAIMITELCWKEGSSESGRQHILQTIDAYISDGRVGLAEPAEGIELYLCPSHGKTVEILSRHLPKEHQESLAVAGSSFIGVVVWRRPDIPRVPTSRHRHDGSKRQSILGKPPVTNPAAARPSLPLNSYGAPPGFPNQRHQEEEDVADDAPPGFGPGVARDEDDLPEFNFVNPTHHAANVTARAYMGRPHVPPPSARPAEQMRELVQKYGKRSSVQAPRTWDDDDDDIPEWNPSQTIKQPPPLPHAPQQQPLPPPPVQQMDAYQQQYHITSAVQPQVPVASLTHAYLQIQQPGQAWQQPSNPWWPAQGVAAAAAQMTNIVHHQPQYGVVPGSSGVQGYDYSSASGMAWRPR

SEQ ID NO: 10995 - protein, 326 aa, Zea mays
  VARIANT 55: note = Ancestral polymorphism is T, Derived polymorphism is A
MAVDEVNSVYVGSLPYEANEEMLRDAFGYYGTIVSVKVINDHTIKGKCYGFVTFTHPRAAEQAIAGMDGKKLGNRIIRVNEVRTRGPRDFGRDGFRRDPRRYGRDPYWDRRDREQSYDRERDPYHDRDSDRSREHDRERDYEHGGFNREVDYPMDRDHEVDDIHPREHDRAAETHNMDSDNDKYKEHGSRKSHPKGRDSKDLSSSSDLQNDGKHQLDKTIQMREDLENEVSQIKDKISAKGQHIADLQKKAQKLEDELAAARKVSSERQLAVTDLYKHFLQLQDYNDRVKTAEHRLQSLVDAAMAELDMAEDATTRDGSMYENGVV

SEQ ID NO: 10996 - protein, 422 aa, Zea mays
  VARIANT 110: note = Ancestral polymorphism is Y, Derived polymorphism is H
MATVAMDISKPTPAASGDEAAAAAKGRSGGGGEGLRQYYLQHIHDLQLQIRQKTHNLNRLEAQRNDLNSRVRMLREELQLLQEPGSYVGEVVKVMGKSKVLVKVHPEGKYVVDIDKSIDITKITPSTRVALRNDSYMLHLILPSKVDPLVNLMKVEKVPDSTYDMIGGLDQQIKEIKEVIELPIKHPELFESLGIAQPKGVLLYGPPGTGKTLLARAVAHHTDCTFIRVSGSELVQKYIGEGSRMVRELFVMAREHAPSIIFMDEIDSIGSARMESGTGNGDSEVQRTMLELLNQLDGFEASNKIKVLMATNRIDILDQALLRPGRIDRKIEFPNPNEDSRFDILKIHSRKMNLMRGIDLKKIAEKMNGASGAELKAVCTEAGMFALRERRVHVTQEDFEMAVAKVMKKDTEKNMSLRKLWK

SEQ ID NO: 10997 - protein, 557 aa, Zea mays
  VARIANT 250: note = Ancestral polymorphism is A, Derived polymorphism is S
  VARIANT 440: note = Ancestral polymorphism is I, Derived polymorphism is T
MGEDMDAAGAGWLSWRAAAVAVLAWLALHVAARVADALWWRPRRLEAHFAAQGVRGPPYRFLLGSVKEMVGLMAEASSKPMSPPTSHNALPRVLAFYHYWRKIYGPNFLIWFGPTPRLTVAEPELVREIFLTRAEAFDRYEAHPVVRQLEGDGLVSLHGDKWALHRRVLADAFYPDNLKRLVPHVGRSVAALAEKWRAMASASSSGEVEVDVAEWFQAVTEEAITRATFGRSYDDGRVVFAMQGRLMAYASEAFRKVLVPGYRFLPTKKNWQSWKLDREIRRSLTRLIARRSDEAEAEEEEMGSHSGGFRDLLGAMINAGERKTPPAGAIPVADMLEECKTFFFAGKQTTTNLLAWATVLLAMHPEWQERARREVLDVLGPDELPSKEHLPRLKTVSEVCSPRGWQVGMIINETLRLYPPAVATIRRAKTDVQLSNGCLIPRDTELLIPIMAIHHDARLWGADAAQFNPARFAGGAARAAKHPLAFIPFGLGARACIGQNLARLEAQLTVAVLLQRFEIRASPNYVHAPTVLMLLYPQYGAPVIFRPRRPARPAAAS

SEQ ID NO: 10998 - protein, 86 aa, Zea mays
  VARIANT 57: note = Ancestral polymorphism is R, Derived polymorphism is M
  VARIANT 43: note = Ancestral polymorphism is I, Derived polymorphism is S
  VARIANT 26: note = Ancestral polymorphism is R, Derived polymorphism is Q
  VARIANT 7: note = Ancestral polymorphism is G, Derived polymorphism is R
  VARIANT 6: note = Ancestral polymorphism is L, Derived polymorphism is V
MKGAYLGVILLIGHQNTQVVDVILLRDTHLQDNIIHLLLIACILVEEITVTGTWFTRVPDIDHRRSPARDSVNANENKLLLFICYS

SEQ ID NO: 10999 - protein, 423 aa, Zea mays
  VARIANT 196: note = Ancestral polymorphism is R, Derived polymorphism is C
  VARIANT 202: note = Ancestral polymorphism is R, Derived polymorphism is C
MRAAVNSSQISARHGASLPALPARAGSDEAAAVPGPATAIFQAPVAAAAVVGAPLALPPPRPRMRPPPRYPPWLPRPQHLAVHLRRVLRMVAEYRQPLVKIEGASLSITQVATGAGEARVKLDESARSRVKASSDWIMNSMMNRTDSYGVTTGFDAMSHRRTKEGGALQRELIRFLNAGAFGTGTDGHVLPAKATCATMLVRINTLLQGYSGIRFEILEAIVKLLNANVTPCLPLRGTVTASRDLVPLSYIADLVTGRENFVALAPDGSKVNATEAFKIAGIQGGFFELQPKEGLAMVNGTTLGSGLASTVLFEANILAILAEVLSAVFCEVMNGKPEYTDHLTHKLKHHPGQIEAAAIMEHILEGSSFMKLAKKLGELDPLMKPKQDRLDYGFKGAEIAMASYCYELQFLGNPVTNHVLKYV

SEQ ID NO: 11000 - protein, 1041 aa, Zea mays
  VARIANT 98..1041: note = Derived polymorphism lacks residues 98 to 1041
  VARIANT 137..1041: note = Derived polymorphism lacks residues 137 to 1041
  VARIANT 199..1041: note = Derived polymorphism lacks residues 199 to 1041
  VARIANT 318..1041: note = Derived polymorphism lacks residues 318 to 1041
  VARIANT 323..1041: note = Derived polymorphism lacks residues 323 to 1041
MDVVQVLASATQLVSAMVSAVGALEQAASDLAEAPRRLQVLEDFVSDLDALTQQSRQRHAHKLHGPQLDRQFQSLGRLMDQLRGNVAKARKVLGSKGKGKGFARLVRSSVVGDPLIKYARLIRDDLNQWLELQELTQSIGNVIASTARSTPSLVRVKSEHGYPVSKKCSYVRELLERDGAHRVVLIVGLSGIGKSCLARQIASDPPLSFVDGAIEIGFGRWCSRAACNGSRSEYHKRLARKICTFLVKIGSMTLKEETGIDLDDVCCLLQTALVGRSMLILLDDVWEQDIVDRFTRLYDNDCRYLVTTRDEAIYEIAEAEKVEICKDDIKEISTEILLYHSLLSAGELPPVAEVLLDRCGHHPLTVAVMGKALRKETRVEKWEKAISNLSTYATCAPGPVSYVNEKDVETTLTIFGSFEFSLEAMPENSRIFFMALAAISWEEPVPEACLESIWSALEQCGLFSLVVSKLVEGSLIIKLEDQPLYHMHDMVSLYLENKTNDATRALLSDSISYNVALVAPWLFVFGKECMKRPAEQKMGSFFSLLEFMDIEILLVNTTQALMACRSLSELETNRIGFSKILGPRIAEIISIGSLDLIFAVTAAITVIFSPSDYINLAHSLEIAGSIDKLIDLLGACEDTSTLANLSSVLTKISEHVDATIADEILSRIPMVRIADLLTAENEQWHEIVFTTLASLTKVGKLKAVETMIESGIDNKLLVLLGNGSEISQHHAIITLKTFCELGAPLQGCIGPAVLLHLPWHARISLERFVLSDRNVPQSPKPQQSFEVILHNILQRDNKNIIKGIQGLLSLAETANDTRVQDLLLGSHLFDRLAWLLQRREVEKNQVRSQTAFLVMKLACTGGEPYVHRFLELNIVHELIDMLQCNIDELQDSAYYALHQIVFAKGGSLVLQRFLQLRTIEKLVNLLDRKSLKTKDLAMQFLVDITEVGTKPCIERMLASQIVEKLVALEKAGDPFGGAVSRYIQGLNMCKKLQSAERAVMKQHILRKVRSAVRGHKLEAILVASVEASIAEGFKGASSSRK

SEQ ID NO: 11001 - protein, 284 aa, Zea mays
  VARIANT 132: note = Ancestral polymorphism is Y, Derived polymorphism is H
MLAASARRLSAAASFSSSSMRSSQLAAVLNQQRWMHDRNKKAMELVAKGWSALQEVDRVIDYADLNDKRLIPLLRGAKENFELALEIDNGNTHARYWLGKMHFKYHVPGACKAVGAALLVEAANMGDPDAQYELGCRLRIENDYVQSDQQAFHYIEQAVDQLHPGALYLLGAVYLTGDCVKRDMASALWCFHRASEKGHAGAAIAYGSLLLKGAEIPEVITRFNSGKSPSTGKMRKRTQQQDPVKLAKEQFQIAAEAGCDLGLRWLKRLEAYENQEEKLKQVQQ

SEQ ID NO: 11002 - protein, 139 aa, Zea mays
  VARIANT 21: note = Ancestral polymorphism is G, Derived polymorphism is V
  VARIANT 24: note = Ancestral polymorphism is A, Derived polymorphism is P
  VARIANT 48: note = Ancestral polymorphism is A, Derived polymorphism is S
MDEVTEAVNNLNISGVGAAGVAGAEGHKKNRIQVSNTKKPLFFYVNLAKRYMQLHNEVELSALGMAIATVVTVAEILKNNGLAVAKSIMTSTVDIKDETRTRPIQKAKIEILLGKTEKFDELMAAAAEEREANGAEEQS

SEQ ID NO: 11003 - protein, 295 aa, Zea mays
  VARIANT 118: note = Ancestral polymorphism is V, Derived polymorphism is L
  VARIANT 17: note = Ancestral polymorphism is D, Derived polymorphism is N
MKFGKSLNNQIVETLPDWRDKFLSYKDLKKRLKQIGAGSGERRSKRQRVGDGRGGSSPPAMTPEEAGFVALLDAELDKFNAFFLEKEEDYVIRLKNSGLIRVSVVGIERAQELQDRVVSAAEVGSAEELLRVRKEIVDFHGEMVLLENYSALNYTGLVKILKKYDKRTGALIRLPFIRNVMQEPFCATDVLYKLVKGCEEMLDQLLLPRNQQRPVPSDNGGEGDSDGDDDKQRPAEPGASSLPSGGGGGAGDMELEEIEDMESMYMKSTVAALRALREIRSGSSTVSAFSLPPLR

SEQ ID NO: 11004 - protein, 412 aa, Zea mays
  VARIANT 258: note = Ancestral polymorphism is V, Derived polymorphism is G
MAFGRRSPGSSRHPPALTIVTALLLASLYFAAAAAALSPTDAMHNNNWAVLVCTSRFWFNYRHMANTLSLYRTVKRLGIPDERIILMLADDMACNPRNSYPAQVFNNENHQLNLYGDNVEVDYRGYEVTVENFLRVLTGRHESAVPRSKRLLSDEGSHILLYMTGHGGDEFLKFQDSEELQSHDLADAVKQMKEKHRFKELLIMVDTCQAATLFSQLQSPGVLAIGSSMKGENSYSHHLDSDVRTFFPFTVLVGVSVVDRFTYYTLAFFEKLNMYSNASLNSLFTSYNPSMLLSTAYYRMDLYERPLNEVPVTNFFGSVMKTLHTDSAYTGFLAAHDNETPMSTGDNLDDHFMLKGRAIARRSTIEKEAQLTPHGWTEVLAEQLEGKNTDTVVMYGLGAMGILLALSTWLSM

SEQ ID NO: 11005 - protein, 291 aa, Zea mays
  VARIANT 246: note = Ancestral polymorphism is Q, Derived polymorphism is H
  VARIANT 215: note = Ancestral polymorphism is P, Derived polymorphism is S
  VARIANT 137..291: note = Derived polymorphism lacks residues 137 to 291
MDPPQELAAAGRKRRRRGGVRNRKRLSSQKGLPPATAPPTPASPPVKRRRKDIAGQAAAMPKRGNTSSLLDKMRARLSGGHFRMLNEKLYTCSGEDAFDYFKNDPNLFDVYHTGYQEQMSHWPEQPVNVIINWLKSQNASWTVADFGCGNAAVAKNLKNKVFSIDLVSDEPSVIACDMAHTPLEPSSIDVAIFCLSLMGINYPSYLEEANRVLKPSGWLVIAEVRSRLDPSNGGADPEKFSKAIIQLGFSLVSKDVKNRMFILFYFRKKEKSKVAKSIDWPQLKPCLYKRR

SEQ ID NO: 11006 - protein, 187 aa, Zea mays
  VARIANT 149: note = Ancestral polymorphism is E, Derived polymorphism is K
  VARIANT 137..187: note = Derived polymorphism lacks residues 137 to 187
  VARIANT 66: note = Ancestral polymorphism is T, Derived polymorphism is I
  VARIANT 52: note = Ancestral polymorphism is P, Derived polymorphism is H
  VARIANT 37: note = Ancestral polymorphism is G, Derived polymorphism is S
MDRFRDRIYAVAGQLKPEEVAGIIKDFNEPGTLAPTGLFVGGTKYMVIQGEPGVVIRGKKGASVVTSTTSAGIQLLPEKHCADEACGAMARSNGPEGVPVVTSADDPPTRADIPFLCNSVDETCEATGDGSAPLDAQICTGFSKLISLEVKKGLQKCATFPPSSGQPQQEDCSCSHVGDGLTGAPAF

SEQ ID NO: 11007 - protein, 221 aa, Zea mays
  VARIANT 63: note = Ancestral polymorphism is T, Derived polymorphism is I
MGISRDSMHKRRATGGKQKAWRKKRKYELGRQPANTKLSSNKTVRRVRVRGGNVKWRALRLDTGNYSWGSEAVTRKTRILDVVYNASNNELVRTQTLVKSAIVQVDAAPFKQWYLTHYGVDIGRKKKTPAAKKDNAEGQEVEAAAEETKKSNHVTRKLEKRKEGRTLDPHIEEQFGSGRLLACISSRPGQCGRADGYILEGKELEFYMKKLQRKKGKSAVA

SEQ ID NO: 11008 - protein, 221 aa, Zea mays; identical to SEQ ID NO: 11007
  VARIANT 20: note = Ancestral polymorphism is A, Derived polymorphism is T

SEQ ID NO: 11009 - protein, 141 aa, Zea mays
  VARIANT 32: note = Ancestral polymorphism is V, Derived polymorphism is I
  VARIANT 44: note = Ancestral polymorphism is L, Derived polymorphism is Q
MATLSAISANVGYCKAPTLSWKGSGVPGRIVVSMSTTRRGLVSLRRRSPRFRVYAAKAETVSKVMDIVKQQLALAADVGLTAETKFTDLGADSLDTVEIVMTLEEEFKITVEEDNAQSIATIQDAADLIDKLVDQKPRDSD

SEQ ID NO: 11010 - protein, 190 aa, Zea mays
  VARIANT 2: note = Ancestral polymorphism is P, Derived polymorphism is L
  VARIANT 4: note = Ancestral polymorphism is T, Derived polymorphism is M
  VARIANT 40: note = Ancestral polymorphism is R, Derived polymorphism is C
  VARIANT 85: note = Ancestral polymorphism is P, Derived polymorphism is L
  VARIANT 103: note = Ancestral polymorphism is D, Derived polymorphism is G
  VARIANT 112: note = Ancestral polymorphism is L, Derived polymorphism is I
  VARIANT 141..190: note = Derived polymorphism lacks residues 141 to 190
  VARIANT 147: note = Ancestral polymorphism is S, Derived polymorphism is L
  VARIANT 174..190: note = Derived polymorphism lacks residues 174 to 190
MPGTVLILLMGRFMGKRVVFLKQLKSSLLLRLGAFAIPFCILKHKDPWSNHVIRKISEWIKFSFSKKQNECWCTFMHAYVFLLPLGVFVAIMPKLSINFARPGQYECIALHLPLWLRLSLEKSDPMDGDLDKINNNNHTLQSEMADLWELWNSFRLLCDHSSQLCVALDISLFLQMQEDIFVYQSVIRGC

SEQ ID NO: 11011 - protein, 529 aa, Zea mays
  VARIANT 303: note = Ancestral polymorphism is R, Derived polymorphism is I
  VARIANT 152: note = Ancestral polymorphism is F, Derived polymorphism is S
  VARIANT 108: note = Ancestral polymorphism is G, Derived polymorphism is R
MSGSALQAVEPRPAAAATTAAASPAATAQPAAVAAARGARGCGGPARASGPEATMEHVLLALRETEAEREARIRGVFGFFDAAGQGHLEHAQITAGLIALRVPEETSGAGAEAEDYARALLRACDRDRDGRVGYDDFRRYMDDKELELYRIFQAIDVEHNGCILPEELWHALVKAGIEIDDEELARFVEHVDKDNDGIITFEEWRDFLLLYPHEATMENIYHHWERVCLVDIGEQAAIPEGINKHVSASKYLIAGGIAGAASRTATAPLDRLKVNMQVQTNCIAVVDVVKGIWREGGLLGFFRGNGLNVVKVAPESAIRFYTYEMLKEYIMKSKGENKGDIGTSGRLMAGGLAGAIAQTVIYPMDLVKTRLQTYEGGRIPSLGALSRDIWTHEGPRAFYRGLVPSLLGMVPYAGIDLTVYETLKEMSRTYALVDKDPGPLVQLGCGTVSGALGATCVYPLQVIRTRMQAQPANSEDPYRGMTDCFRITLRREGVSGFYKGLVPNLLKVVPAASITYLVYETMKKSLSLD

SEQ ID NO: 11012 - protein, 201 aa, Zea mays
  VARIANT 132: note = Ancestral polymorphism is G, Derived polymorphism is C
  VARIANT 94..201: note = Derived polymorphism lacks residues 94 to 201
  VARIANT 27: note = Ancestral polymorphism is V, Derived polymorphism is A
MLLSCGSLSSWVRRFVACVGIFFISAVMRQLPGSTNRFLANPGLQQSRGCFGCAQPTPIIAVDKPTKGLRIQGRSVKRRNVSDDFWSSSPHEMENSALQSRHSMSSISTAAQPNDQHVSGTSSSPNEFVNQGLLLWHQTRQQWIGNRRLNSQGQQSQEPKISCNATYESLLGSSKPFPQPTPLGEMVDFLVVSWEQEGLYG

SEQ ID NO: 11013 - protein, 651 aa, Zea mays
  VARIANT 77: note = Ancestral polymorphism is L, Derived polymorphism is M
MPALYAYYGDGGCLVSAPAELAGLFCRGAVQQRKRTLVTASAVAAAAAEFVRAAKKQRQLPLPSLDALPDECLFEILRRVPGGRGRGASACVSRRWLALLGSIRASELGQAAAAAADTPSLPDLNEEFVMEEDNEESPADRCVDRVLEGKEATDVRLAAMAVVAGSRGGLEKLAVRGSHPTRGVTDQGLSAVARGSPNLSSLALWDVPLITDAGLAEIAAGCPSLERLDICRCPLITDKGLVAVAQGCPNLVSLTIEACPGVANEGLRAIGRSCVKLQAVNIKNCPLVGDQGISSLVCSATAALTKIRLQGLNITDASLAVIGYYGKAITDLTLTRLAAVGERGFWVMANAAGLQNLRCMSVTSCPGVTDLALASIAKFCPNLKQLYLRKCGYVSDAGLKAFTESAKVFENLHLEECNRVSLVGILAFLLNCREKFRALSLVKCMGIKDICSAPAQLPLCRSLRFLTIKDCPGFTDASLAAVGMICPQLEQVDLSGLGEVTDNGLLPLIQSSEAGLVKVDLSGCKNITDVAVSSLVKGHGKSLKKINLEGCSKITDAILFTMSESCTELAELNLSNCMVSDYGVAILASARHLKLRVLSLSGCSKVTQKSVLFLGNLGQSIEGLNLQFCDMIGNHNIASLEKKLWWCDILA

SEQ ID NO: 11014 - protein, 413 aa, Zea mays
  VARIANT 11..413: note = Derived polymorphism lacks residues 11 to 413
  VARIANT 20: note = Ancestral polymorphism is K, Derived polymorphism is N
  VARIANT 44: note = Ancestral polymorphism is A, Derived polymorphism is D
  VARIANT 55: note = Ancestral polymorphism is E, Derived polymorphism is Q
  VARIANT 72: note = Ancestral polymorphism is R, Derived polymorphism is C
  VARIANT 77..413: note = Derived polymorphism lacks residues 77 to 413
  VARIANT 106: note = Ancestral polymorphism is L, Derived polymorphism is H
  VARIANT 269..413: note = Derived polymorphism lacks residues 269 to 413
  VARIANT 373: note = Ancestral polymorphism is L, Derived polymorphism is P
MAAAAEDDATWDRAISAATKATSAPKILTLDAAVKSSTGRLLSAALIGRFAASLQEFSVTGAALSSLMGLPCLPTLWRLSFPDNRLSGPAALAAVAEACGATLRHHDLGNNSFAEVEELAPLTRVGVELLDLYQCPVTKVKGLKHLDGADAEGNERLEMDDDEDDEEDNEKGDEREGWGEVQLLAFSIADELFMRSKLFRSLLADSLDGFLPLAIGFRRANPLPPPTTSAALLRKATVQALERWHHLFGAHYRQLRLAVEYLKESARVQFSGLRATVDARAAHETRMQEIYAGKVEQLRENLASIKAEIRSTIDEIRNGLEIICAEHKKVEGYYVDDEEEIASLLMRSIRTASLMAGEWVPETQENEAVFDALREAHRLLVSNHLVTVQEWITVLVRDHCSELGLDLDNFHMR

SEQ ID NO: 11015 - protein, 345 aa, Zea mays
  VARIANT 241: note = Ancestral polymorphism is G, Derived polymorphism is S
  VARIANT 39: note = Ancestral polymorphism is C, Derived polymorphism is R
MGADSEDAVKQLSLLMEQGACFLCWSQASRHFSGLLRGRCGVFCLSDSAILGPDLCSGGPAEEIVSAIPLSIICLFVCVCIAKFDFLFLINVCTVHLQRPIVPVDLYRSIRDSQLIGLSGYTKEGLPIFGIGVGHSTYDKASVHYYVQSHIQINEYRDRIILPRLTQQFGRPVTSCIKVLDMTGLKLSALSQIKVLDDLNYPEKTETYYVVNVPYIFSACWKVVKPLLQERTKKKVKVLTGCGRDELLKIMDYSSLPHFCRREASGSSKHSSTDVDNCFSLDHPFHKELYGHIREQASRRELIKMGSLHVSIPEPDPDDAKIVEVIQAEFQKIGEQDESTNSHKD

SEQ ID NO: 11016 - protein, 400 aa, Zea mays
  VARIANT 187: note = Ancestral polymorphism is K, Derived polymorphism is T
MADGEDAAAARRRAAITDYRKKLLNCRELESRVGTVRESLKTAKKDFTKTEDDLKSLQSVGQIIGEVLRPLDNERFIVKASSGPRYVVGCRSKVDKEKLTSGTRVVLDMTTLTIMRTLPREVDPVVYNMLHEDPGNVSYSAVGGLSDQIRELRESIELPLMNPELFLRVGIKPPKGVLLYGPPGTGKTLLARAIASNIDANFLKIVSSAIIDKYIGESARLIREMFGYARDHQPCIIFMDEIDAIGGRRFSEGTSADREIQRTLMELLNQLDGFDELGKVKMIMATNRPDVLDPALLRPGRLDRKIEIPLPNEQSRMEVLKIHAAGIAKHGEIDYEAVVKLAEGFNGADLRNVCTEAGMAAIRAERDYVVHEDFMKAVRKLNDAKKLESSAHYSADFGKE

SEQ ID NO: 11017 - protein, 427 aa, Zea mays
  VARIANT 107: note = Ancestral polymorphism is N, Derived polymorphism is K
  VARIANT 43: note = Ancestral polymorphism is S, Derived polymorphism is G
  VARIANT 14: note = Ancestral polymorphism is A, Derived polymorphism is V
MDCNSDDLDKQNEVTGSRVFIPQDAQGVILAFLPGRDVVKLRSVCKFWLECVEEHSFMDRHLNNACRYHQSIACFTSLDHGLVHMYTFDPATMNFRSVELVFSSRFNMSAPCNGLVCAYDIKGDAEVLNPTTRKHLRLPDSALKSRSLYSEYFVGFVHSTKQYKVVSIRHHVRFLTFEICTIGTPSWRTIHESAELLVATKAVIVKDGMYWLLLDEASSYSSREILTLNLTDERFSKIAIPDAVKSHKLELFEGEGKLRLLSTHSDGSSNIVSDIWVADLAGEDWIHLQTIIPLTHLGISPFFQLKTKVFFGNQKRLLCVDLQDGTVSYINMPSGETLISCGMFVESFAPAATGLVSSTASYGDRSRLAEPSMADPGPSFRGAGSSSASRGRSSGLTGWSSADLEQSFKRTKRTTNMQWKISKHRAI

SEQ ID NO: 11018 - protein, 253 aa, Zea mays
  VARIANT 30..253: note = Ancestral polymorphism lacks residues 30 to 253
  VARIANT 160: note = Ancestral polymorphism is R, Derived polymorphism is L
MPASIGPEEEDPAGAPQQGSVSEGDLRTLQAEGSLRPGAPRTGYAVPQRFLEAATMELKSLANPFPCRRPPDPKKKIRPARRSRAPYLKSTCALSRRRAVSDMAVVGAVALSTPTPALAEQPDVTRYRKVGSGVILEDVVEGEGPEAREGDLVQFNYVCRRANGYFVHSTVDQFSGESRPVTLALGGEEMIRGLRDVLIGMKSGGKRRALIPPEAGYVSETLKPIPEEFGPRRSLLSHAKEPLVFEVQLLKVL

SEQ ID NO: 11019 - protein, 371 aa, Zea mays
  VARIANT 36: note = Ancestral polymorphism is P, Derived polymorphism is L
  VARIANT 172..371: note = Derived polymorphism lacks residues 172 to 371
MPSAPSTPPAAASPSSVPPVTRYSAPALATASNLAPWILTSGASTMDREFPSYVVSSTTTPRQLQLPMQPLRSKDAYVPDSLQTKAKGKIAVCLRGINRRVAKGEAVKQAGGVGMVLANDAARATRSSPTRTCSRPHRSSTATACSSTPTSTPPTRHHGARGERDRRVDPRQLADGPRLRSAARGLQLGVRASGTSMSYPHVSGVVGLLRTLHPEWSPAAIKSAVMTTGKPHCACRADRRFTMDGRTLTAVSSFCEYAATEMDDRGELILNASSLPSSPFGYGAGRAMNPGLVYDVGDADYPGFLCALKYNATAIATFNGAPYTCPSEASRRVADLNYPSITVVNVTAAGATAQDRHVRPSLPSPLASPSW

SEQ ID NO: 11020 - protein, 163 aa, Zea mays
  VARIANT 1: note = Ancestral polymorphism is T, Derived polymorphism is M
  VARIANT 28: note = Ancestral polymorphism is A, Derived polymorphism is T
  VARIANT 39: note = Ancestral polymorphism is A, Derived polymorphism is T
  VARIANT 49: note = Ancestral polymorphism is G, Derived polymorphism is S
  VARIANT 62: note = Ancestral polymorphism is R, Derived polymorphism is W
  VARIANT 69: note = Ancestral polymorphism is R, Derived polymorphism is W
  VARIANT 86: note = Ancestral polymorphism is A, Derived polymorphism is D
  VARIANT 117: note = Ancestral polymorphism is A, Derived polymorphism is V
MRSRPRSPSPSTSTAASRRQGAPARASAYLAADPAPPAASVEVVKRLLGNLLREPENDKFRRVRLSNPRIKEAVADREGGMALLEAVGFRVRDEGGEPFAVMNEVPRDARLNGIRRVVLLLEGAHPSAPPVKAEVEAKESCSNVADLQDGAKNIDRQVTTGFS

SEQ ID NO: 11021 - protein, 225 aa, Zea mays
  VARIANT 165: note = Ancestral polymorphism is S, Derived polymorphism is I
MGGVISGDSPRHTSPASKLEKKMVEAMQQRALKGTSVKSLNSVIMKFPKIDESLRKCRTIFQQFDEDSNGEIDQLELKHCFQNLGIESTDQEIKDLFQACDIYENMGMKFNEFIVFLCLVYLLDDPAVSEVRKRMGLGSLEPTFETLVESFVFLDKNKDGYVSKSEMIQAINETIGGERSSGRIGMKRFEEMDWDKNGTVTFKEFLFAFTHWVGINNEEDEDEEE

SEQ ID NO: 11022 - protein, 59 aa, Zea mays
  VARIANT 51: note = Ancestral polymorphism is A, Derived polymorphism is G
  VARIANT 54: note = Ancestral polymorphism is G, Derived polymorphism is S
MGMGGRGVVGDRWSQRILWICALGSAVSIYFVAVERQAQNRARAVAEGLKGLDGAGDDV

SEQ ID NO: 11023 - protein, 449 aa, Zea mays
  VARIANT 121: note = Ancestral polymorphism is I, Derived polymorphism is T
  VARIANT 334: note = Ancestral polymorphism is V, Derived polymorphism is A
MAEPSQQLRSFVEVPAGSHFPIQNLPFGVFRRRGVQAQAPRPAVAIGDFALDLAAVADAGLFDGPALSGSPCFHQVPALLLNPLICFDCSAVTDGRMETLNMFLGMGRPAWREARATLQKILSADEPVLRDNEALRNKCLVPMSDIEMVLPITVGGYTDFFCSVHHAMNCGFIFRGPQTPVNPNWFYLPVGYNGRASSIVVSGTNVIRPRGQGHPTGNSAPYFGPSQKLDFELEMAAIVGPGNELGKPIDINDAEEHIFGLTLMNDWSARDIQAWETIPLGPFLGKSFSTTVSPWIVTLDALKPFMCDAPKQEPEPLPYLAEKNHINYDIPLEAWIKPKDQNDASIVTKTNFKHLYWTLTQQLAHHTINGCNMRPGDIFATGTLSGPEPDSLGCLLELTWNGQKEIPVGNLTRKFLEDGDEVILTGCCKGEGYNIGFGTCTGKVLPALP

SEQ ID NO: 11024 - protein, 418 aa, Zea mays
  VARIANT 125..418: note = Derived polymorphism lacks residues 125 to 418
MAFISSAAMKAAVAALLVFAAVSPAARAVAAEAEAKAKAVGGAPSVPAGSLDIAQLGAKGDGKSDSTPMVLKAWKHACEATGQQKIVIPKGNYLTGALDLVGPCKSSIIIRLDGNLLGTGDLNAYKRNWIEIQNVDNLSINGHGTIDGQGALVWNKNECQRSYNCKILPNSLVLDFVTNAQIRGITLLNSKFFHMNIFGSKNVVIDKVTIKAPGNSPNTDGIHIGDSSNVTISGTTIAVGDDCVSIGPGSKTIRVKGVKCGPGHGISVGSLGRYKDEKDVEDVKVTGCTLAGTTNGLRIKSYEDSKSSLKATKFLYQDVTMDNVSYPIIIDQKYCPNNICVKSGASKVAVNDVVFKNIHGTSNTPEAITLNCANNLPCQGVQLINVDIKYNRSDNKTMSVCKNAIGKSIGMAKELACV

SEQ ID NO: 11025 - protein, 286 aa, Zea mays
  VARIANT 236..286: note = Derived polymorphism lacks residues 236 to 286
  VARIANT 216..286: note = Derived polymorphism lacks residues 216 to 286
  VARIANT 201..286: note = Derived polymorphism lacks residues 201 to 286
  VARIANT 82..286: note = Derived polymorphism lacks residues 82 to 286
  VARIANT 62: note = Ancestral polymorphism is R, Derived polymorphism is C
  VARIANT 60: note = Ancestral polymorphism is A, Derived polymorphism is T
  VARIANT 51..286: note = Derived polymorphism lacks residues 51 to 286
  VARIANT 44: note = Ancestral polymorphism is E, Derived polymorphism is G
  VARIANT 9: note = Ancestral polymorphism is K, Derived polymorphism is E
MGRNRKGRKARVSHDADADADADGSEDERATTAGRSLYEILGVEKTASQQEIKKAYHKLALRLHPDKNPGDEEAKEKFQQLQKVISILGDVEKRALYDETGITDDDALVGEAANNLQEYFRTMYKKVTEADIEEFEAKYRGSDSEKTDLKELYTKYKGNMNRLFCAMICSEPKLDSHRFKDIIDEAIGEGELKSTKVYEKWAKKISGMEPPTNPLERRVKKRKNSEENDLILAISQRRAERKKQFNSILSNIMSKCDSKASSSEPTEEEFEQAQQRLESRRAKRRK

SEQ ID NO: 11026 - protein, 94 aa, Zea mays
  VARIANT 91: note = Ancestral polymorphism is R, Derived polymorphism is C
  VARIANT 86: note = Ancestral polymorphism is V, Derived polymorphism is I
  VARIANT 73: note = Ancestral polymorphism is A, Derived polymorphism is T
  VARIANT 70: note = Ancestral polymorphism is R, Derived polymorphism is H
  VARIANT 48: note = Ancestral polymorphism is S, Derived polymorphism is L
  VARIANT 47: note = Ancestral polymorphism is R, Derived polymorphism is S
  VARIANT 33: note = Ancestral polymorphism is T, Derived polymorphism is M
  VARIANT 24: note = Ancestral polymorphism is A, Derived polymorphism is T
  VARIANT 10: note = Ancestral polymorphism is R, Derived polymorphism is C
MVRPFLDDFCFDDANAVVASGSLAALHKVVSLTGQALREVINAVGSSLGLSPPEEDMLMRMLQVVIECLHVPAAAALKDQHVCMVVNTCFRVVH

SEQ ID NO: 11027 - protein, 879 aa, Zea mays
  VARIANT 12: note = Ancestral polymorphism is A, Derived polymorphism is E
MARAPSMPAATAVGIVVVMLLAAGFRGAEGKSCTNAFPGLTSHTERAAAQLRPGPPATVLQPIIHHHRHGREQHLTPTDESTWMSLMPRRALRREEAFDWLMLYRELRGGGGSARPGVAAGAFLSEASLHDVRLEPGSMYWRAQQTNLEYLLLLDVDRLVWSFRKQAGLTAPGTPYGGWEGPGIQLRGHFVGHYLSATAKMWASTHNDTLNAKMSSVVDALYDCQKKMGTGYLSAFPSDFFDCLEAIKSVWAPYYTIHKIMQGLLDQYTVAGNSMALDMVIKMANYFSDRVKNVIQNYSIERHWESLNEETGGMNDVLYQLYTITHDMKHLTLAHLFDKPCFLGLLAVQADSISGFHSNTHIPVVIGAQMRYEVTGDPLYKQIASFFMDTINSSHSYATGGTSAGEFWTDPKRLAGTLSTENEESCTTYNMLKVSRNLFRWTKEIAYADYYERALINGVLSIQRGTDPGVMIYMLPQAPGHSKAVSYHGWGTKYDSFWCCYGTGIESFSKLGDSIYFEEKGDPPALNIIQYIPSTYNWKAAGLTVTQQIKTLSSSDQYLQISFSISANTSGQTANINFRIPSWTFADGAGATLNGKDLGSISPGSFLSITKQWNSDDHLALHFPIRLRTEAIKDDRLEYASLQAVLFGPFVLAGLSTGDWDAKAGNGSAISDWIAAVPPAHNSQLVTFTQVSNGKAFVLSSANGTLTMQERPEVDGTDAAIHATFRAHPQEDSTELHDIYSTTLTGTSILLEPFDLPGTVITNNLTLSAQKSSDSLFNIVPGLDGNPNSVSLELGTKPGCFLVTGTNYSAGTRIEVNCKSSLESIGGILEQAASFSQTDPLRQYHPISFVAKGVARNFLLEPLYSLRDEFYTVYFNVRV

SEQ ID NO: 11028 - protein, 641 aa, Zea mays
  VARIANT 92: note = Ancestral polymorphism is L, Derived polymorphism is P
MNQKRREDPHRRSPPSLHASRVAAMADEALDQPPDATPSPTPATPPVPATPSPTVLLRPRREAFEHGLLPIPKLIFPEGTLAQTLAQLKEKLAASAPDGRVRAAALAEALQIPQEQAALALATLAAVLPAEDPALGDGAVDGSAADIRDMLLFLYIQSYKRLVPRSAHKDSPVVADVWPSTSAFDGYLSALSPIQLVRSNSRRFMPSQADEEIHQLSYLQKHMANILTLLADSVEGDGDDSLVLTMETFEHLGFLVQFSEGTSLSQAATFFACSDPDMPDVPVPAAQVLDWMSQKIAFSLEYSAERSAAKESNQQTMSDLDVTMAEANTSHPRNSTPSANPAYYRNVTFVEGFSKTSVVKHASDVKGNSIKLFLVLLVRMIPLASLVVKVEHCERVHIIAAAKRICIANCRECIFYIGVNHQPLVLGDNHKLQVAPFNTCYPQLHEHMIQVAVDPSVNKWDQPFVLGVVDPHDSLSHPAGVSDVKAESATCLDPDLFTNFLIPSWFGDERQGTTNRNPFPLPEIYGTSQSKKRSALEDIQKMIRELQLDENRKRELATALHLQAISASSTVYRAINDGICKTDYPFADSYSKTFDNCRKLTFLSLGERIPTRAEGCEDVLLPTFLQIHLGIFPLLRVGGTN

SEQ ID NO: 11029 - protein, 61 aa, Zea mays
  VARIANT 9: note = Ancestral polymorphism is W, Derived polymorphism is C
MHNIGEDPWTIVSVSDDGESTGGGGTLQIWRMSDLIYRPEDEVLAELENFKAHLASCAPKN

SEQ ID NO: 11030 - protein, 101 aa, Zea mays
  VARIANT 42: note = Ancestral polymorphism is S, Derived polymorphism is F
  VARIANT 43: note = Ancestral polymorphism is V, Derived polymorphism is I
  VARIANT 51: note = Ancestral polymorphism is D, Derived polymorphism is N
MGMLLISKIGEEYPDRMMLTFSVFPSPEVSDTVVEPYNATMSVHRLVENADECMVLNNEALYDICFRTLKLTTPSFGDLNHLITATMSGVTCCRNKKQAGI

SEQ ID NO: 11031 - protein, 358 aa, Zea mays
  VARIANT 138..358: note = Derived polymorphism lacks residues 138 to 358
  VARIANT 53: note = Ancestral polymorphism is E, Derived polymorphism is G
MDGSRKRVDAEDVKGDSTGGKRLRASESFQSGVGSKVKLCTNFFSTYGCPFGEGCHFVHYFPGDYRAVSEMTNLGGATIAPPGGMMMDGPPTPIVKTRLCNKYNTAEGCKWGDRCHFAHGESELGKSMMDNYMPPPIGPPPTGYFAPPPMAPPPMAPPPMAPPPMAPLPMAPPPMAPPPMAPPPMAPPPMAPLPMAPPPMAPPPMAPPPMAPPPMAPLPMAPPPMAPPPMANPGLATPASFGAYATAKISVDASLAGGIIGKGGANIKQISSVTGAKVVIQEDRHESDTSLKNIEFEGTFDQIRNASAMVIELIVSISGIGSNFKTKMCENFAKGSCSYGGKCHFAHGESELRKPAAA

SEQ ID NO: 11032 - protein, 484 aa, Zea mays
  VARIANT 326: note = Ancestral polymorphism is V, Derived polymorphism is A
MAFFRGLTAVSRLRSRMAQEATTLGGVRWLQMQSASDLVGQLVFLLLYIADLKSQLRELIPEQQDRLKKLKSEHGKVQLGNITVDMVLGGMRGIIGMLWETSLVDPEEGIRFRGLSIPECRKVLPTAVEGGEPLPEGLLWLLLTGKVPTKDQVDALSKELLARSTVPAHVYKVIDALPVTAHPMTQFTAGIMALQVESEFQKAYGNGLPKSKLWEPTYEDCLNLIARLPPVASYVYRRIFKDGKSIEADDSLDYAANLSHMLGFDDPRMLELMRLHVTIHADHEGGNISSHTGHLVGSALSDPYLSFASSVNGLAGPLHGLANQEALLWLKSIIQETGSDVTTDQLKDYVWKTLKSGKVVHGFGHGVLRRTDPRYLCQREFALKYLPEDPLFQLLSKLYEVVPPILTELGKVKNPWPNVDAHSGLLLNHFGLSETRYHTVLFGVSRSMGVGSQLIWDRALGLPLERPKSVTMEWLENYCKNKAA

SEQ ID NO: 11033 - protein, 472 aa, Zea mays
  VARIANT 53: note = Ancestral polymorphism is D, Derived polymorphism is N
  VARIANT 130: note = Ancestral polymorphism is L, Derived polymorphism is F
MAFFRGLTAVSRLRSRMAQEATTLGGVRWLQMQSASDLDLKSQLQELIPEQQDRLKKLKSEHGKVQLGNITVDMVLGGMRGMIGMLWETSLLDPEEGIRFRGLSIPECQKVLPTAVKGGEPLPEGLLWLLLTGKVPTKEQVDALSKELLARSTVPAHVYKAIDALPVTAHPMTQFTTGVMALQVESEFQKAYDNGLPKSKFWEPTYEDCLNMIARLPPVASYVYRRIFKGGKSIETDNSLDYAANFSHMLGFDDPKMLELMRLYVTIHTDHEGGNVSAHTGHLVGSALSDPYLSFAAALNGLAGPLHGLANQEVLLWIKSVIQETGSDVTTDQLKEYVWKTLKSGKVVPGFGHGVLRKTDPRYSCQREFALKHLPEDPLFQLVSKLYEVVPPILTELGKVKNPWPNVDAHSGVLLNHFGLSEARYYTVLFGVSRSMGIGSQLIWDRALGLPLERPKSVTMEWLENYCNNKAA

SEQ ID NO: 11034 - protein, 114 aa, Zea mays
  VARIANT 22: note = Ancestral polymorphism is L, Derived polymorphism is I
  VARIANT 13: note = Ancestral polymorphism is V, Derived polymorphism is G
MDRQASRRGRRRGRHVRLGSLLRLRVRLFGGLAGLVARCLEELNCCPTRRTTTRRRRSHKMAVSHGDRRHHRPAPAEREENSLHAEAIADCLEFIKRSYLPAAAGAGGDRKPDR

SEQ ID NO: 11035 - protein, 680 aa, Zea mays
  VARIANT 138: note = Ancestral polymorphism is S, Derived polymorphism is R
MAPPPQPELPAAALALLVLLLAAAVPARAQQEYEANKQNACYATNASSVLGYTCNATAASTPACESYLIFRSSPSYYNTPVSISYLLNSSPATVAAANAVPTVSPLAASSLVLVPVPCACTPGGYYQHNSSYTIEFQSETYFIIANITYQGLTTCQALIAQNPLHDSRGLVAGNNLTVPLRCACPSPAQAAKGFRYLLSYLVMWGDGVPSIAARFRVDPQAVLDANSLTADDIIFPFTTLLIPLKAAPTPDMLASPAPPPSPTPPQPTPAPSGGSGSGKWVGVGVGLGCGALALAAILGLLFLRTRRRRGQRFADGESVRQGSKVVIDVSSSAEYGALASGKQTSNTTTSTTSSATRSLVASDVRGAVESLTVYKYSELEKATAGFAEERQVPGTSVFRAVINGDAAAVKLVAGDVRDEVSILMRVNHSCLVRLSGLCVHRGDTYLVFEFAENGALSDWIHGGGGSTLRWRQRVQVAFDVADGLNYLHHYTNPPCVHKNLKSSNVLLDADLRAKVSSFGLARTVAASDGGAQLTRHVAGTQGYLAPEYLEDGLITPKLDVFAFGVVLLELLSGKEAAFADAGTGEETLLWEAAEEALVADGGEDVDRAKVRAFMDPRLHGDFPIDLALAMAALALRCVATEPRARPAMDEVFVSLTAVHNSTLDWDPSDYGTSGSSMVGR

SEQ ID NO: 11036 - protein, 568 aa, Zea mays
  VARIANT 147: note = Ancestral polymorphism is Q, Derived polymorphism is R
MDALPEAWSQVRAPVIVPLLRLAVAVCLTMSVLLFLERVYMAVVISGVRLLRLRPDRRYRCDPLPEDDPELGSSAFPVVLVQIPMFNEREVRTPPPAAALHCSAMPPLPAKRPLQRFYSGFVGSLITLVALRWCHGRAGVRSLQVYQLSIGAVCGLSWPADRLVVQVLDDSTDEVIKEMVRMECERWARKGINITYQIREDRKGYKAGALRAGMRHAYVRDCEYVAIFDADFQPDPDYLKRTIPYLVHNPEIALVQARWRFVNADECLMTRMQEMSLDYHFTVEQEVSSSVCAFFGFNGTAGVWRISAVNEAGGWKDRTTVEDMDLAIRASLKGWKFVYLGDVQVKSELPSTFKAFRFQQHRWSCGPANLFRKMLMEIVTNKKVTIWKKIHVIYNFFLIRKIIAHIITFSFYCVIIPATIFVPEVRIPKWGCVYIPSAITLLNSVGTPRSFHLLFFWVAFENVMSLHRTKATLIGLLEAGRANEWVVTAKLGSAMKMKSANKAGLRKQFMRIWERLHVTELGVAAFLFSCGWYDLAYGRDHFFIYLFFQSVAFFIVGVGYVGTIVPQS

SEQ ID NO: 11037 - protein, 1118 aa, Zea mays
  VARIANT 40: note = Ancestral polymorphism is R, Derived polymorphism is H
  VARIANT 52: note = Ancestral polymorphism is P, Derived polymorphism is L
  VARIANT 130..1118: note = Derived polymorphism lacks residues 130 to 1118
  VARIANT 156..1118: note = Derived polymorphism lacks residues 156 to 1118
  VARIANT 357: note = Ancestral polymorphism is S, Derived polymorphism is I
MMGRFRRLLNELELVEIDLLGRQFTWSNEREAPTLVRLDRVFVTTDWDQLFPDCILQALASSISDHCPLLLGLRDSFMGKRRFHFESFWPKLDGFMEVVQQSWEQPIMAVCPLQRLADKLRRLAKNLQSWSHRKTGNIKRQLLLAREIIHQLESAQDSRLLSSLEIWLRRQLKHHILGLSSFERTRARMRSGLRWLKEGDANTAYFQHHARYRKKKNFIASLKTEDRVFTDQKDKIEVVWDFYSNLLGSAGQRNFTLDLQSFHRSAVDLTELDRIIDEEEIWNTIKSMPSDKAPGPDGFTGRFYKMAWQIIKVDFMAAVNILFQGDDSRLFLLNSAYITLLPKKVDVEEVKDFRPISLIHSFAKIITKLLANRLSGKLSQLVSPNQSAFVKGRYILDNFVLVQQMARVLHRQKEPRVLLKLDITKAFDSVSWPFLLEVLQHLGFGARWCDMLAKLLRSSSTRVLVNGEPGELIYHQRGLRQGDPLSPMLFVCVMDVLNSIILKAESYGLLQPLLRRGIGQRISLYADDVVLFMHPVRCDLETVKQVLKVFGEASGLVTNLAKSSFTPICCNDQEVLAIQETLSCNLVNFPCKYLGLPLSIRKLSRRDLLPLVEKVADRLPGWKAALIHPAGRATLVKSVLSAIPVYHLIALQCPKWVIKAIDKIRRGFLWKGRKNINGGHCLVGWQKVCVPLTLGGLGVPNLEVMGWSLNLRWLWLKKTQPERPWAFLDVQVHPNAAALFAASVQSVVGSGTDTKFWTDRWLHGKRIADWAPSLFAAVNKKAVRSRTVQEAINGSSWVLDIRGNFSSMAFSEFFQIWDLVREVQLLSDVPDQHIWTPSPSGSYSSKSAYDLFMMGRVGFAPAELIRRNWAPPRCKFFLWLATRDRCWTADRLAKRGLDHPVQCPLCDQEDETARATPTGLADLSGVPGGAGLRSGFDPSRGNAYDGSHVANFSSSKTGTHDASRGATGFDSLKGSGYDASKAHVTGQASATAAHGGIAGYYGSNQAAHAWGQSASPYGSVQVPPSYASGSNTSYGAAAAAAVRPYGSAQAQPSYGQTQAPSAYGHTQLPSSYSLAQAQSPFTAAQGSSPYGLAAQPPAYGSGRAGSNAGSYEAPQGRK

SEQ ID NO: 11038 - protein, 554 aa, Zea mays
  VARIANT 415..554: note = Derived polymorphism lacks residues 415 to 554
  VARIANT 375: note = Ancestral polymorphism is P, Derived polymorphism is L
  VARIANT 354..554: note = Derived polymorphism lacks residues 354 to 554
  VARIANT 293: note = Ancestral polymorphism is R, Derived polymorphism is C
  VARIANT 250..554: note = Derived polymorphism lacks residues 250 to 554
  VARIANT 215: note = Ancestral polymorphism is K, Derived polymorphism is Q
  VARIANT 189: note = Ancestral polymorphism is R, Derived polymorphism is W
MLLVHLGRVCRARRPRSPSSSSPSSKCGARVRRAGSICDITFTFTNRCGDTVWPGLLSGSRTPPLETTGFALAPGQLRSLYAPQGWSGRFWGRSGCTFDASGKGSCATGDCGSGEVECRGAGASPPAMLAEFTLDDDGDKDFYDCLPSGVQGEVGSLNDARYLENILLLLTGRQLDTATEIAASRGDVRLAILLSQAGGSMSNRSDLAQTLDQWKMNGLDFDYIEEDWLKVYMLLAGNVQAAFLDLLIDWKRYLGLIMWYQLSPDTPLDIQTMFSAFSSSFDPLDYHFIWHQRSILEAVEAFSSNDLHLLDLSFVYQLLCLGRCHWAIYVILHMLYLDDAPYIHEKLIREVLSQYCESWSRDDAQRQYIVELGIPEEWMHEALALYHEYYGDKQGALENLIHHFIRCYFGSANHQEVWRITSALENHKYEIADWDLGAGIYVDFYVLKNSMQERNAMDDSGSLEEMSKSCRSFFGRLNESLLVWGSKLPVESRACYSKMAEELCALLVDTPSETLNLPMGCLLTMLNAPVPDESRSSYLQDALSVFTEILCSDP

SEQ ID NO: 11039 - protein, 115 aa, Zea mays
  VARIANT 22: note = Ancestral polymorphism is R, Derived polymorphism is Q
  VARIANT 28: note = Ancestral polymorphism is G, Derived polymorphism is A
MIPQSQSSSLQRLQHVEKRIVRVLELAGAVMEELGYSQGPRTDAVGAHCREFMMAMKEIQTTLREEIKSACEYRPFEKCDYSARIANEICCKKLEYVLEKLDTMQQNLEQSTDNV

SEQ ID NO: 11040 - protein, 72 aa, Zea mays
  VARIANT 7..72: note = Derived polymorphism lacks residues 7 to 72
  VARIANT 42..72: note = Derived polymorphism lacks residues 42 to 72
MISTSYQELYLFFWIIHDHVLSSHKPHSKSSCLFRFMECKDQTKHSSVMLPYTFLPTMATRKPRDAANKVYC

SEQ ID NO: 11041 - protein, 90 aa, Zea mays
  VARIANT 10: note = Ancestral polymorphism is R, Derived polymorphism is Q
MHSAAANKQRVAVVVAHELTHQWFGNFVTMKWWTHLWLNEGFATWVSYLAADHFFPEWNVWTQFLEESTIGFKLDALAGSHPIEMYILHS

SEQ ID NO: 11042 - protein, 139 aa, Zea mays
  VARIANT 64: note = Ancestral polymorphism is R, Derived polymorphism is H
  VARIANT 67: note = Ancestral polymorphism is R, Derived polymorphism is Q
  VARIANT 77: note = Ancestral polymorphism is Q, Derived polymorphism is P
  VARIANT 99: note = Ancestral polymorphism is A, Derived polymorphism is T
MAAPATSSLLSTLLQLPLAPFSGKSSPPSVVHVARRAPTAVVAAKGFNVQILVDENEGEESIFRRFRREVMRAGVLQEIKRRRRYESKTDEKKRKAREAGRRNRRRRMMDEPRFPEEDADATSKARDEDNDNWEVDGIL

SEQ ID NO: 11043 - protein, 274 aa, Zea mays
  VARIANT 9: note = Ancestral polymorphism is R, Derived polymorphism is G
MQALLLPARAAPPPPAILRQRAVSASTCASQGCRLLLGASGCLSCGVRSRLRLTVVAASSSSSGPLYPTPPPTEEEVERVKLEQVMRRLEKTARYFKNLGTLGFWSQLVCTIVSAGILAFSTVVTGKVTAPFTFYATAAGIAAAFISSFWSFGYIRLSERLRRTSKEPAKAPPRADVVNSLKNGIVLNILGMGAAVLGMQATVGALVAKALTTSAVPYYQAAAPGQSPVLALDVFLVQASANTILSHFLGLASSLELLRSVSLPPAEAAAPAGA

SEQ ID NO: 11044 - protein, 874 aa, Zea mays
  VARIANT 837: note = Ancestral polymorphism is S, Derived polymorphism is L
  VARIANT 451..874: note = Derived polymorphism lacks residues 451 to 874
  VARIANT 410: note = Ancestral polymorphism is S, Derived polymorphism is L
MVALASLSSLCPCGIARRRAAAASSPAAVSISCCAVATPSSSGKGPQESRTPRRRLRKTEGASKSLEDSVKRKMEQFYEGSDGPPLRVLPIGGLGEIGMNCMLVGNYDRYILIDAGVMFPDYDEFGVQKIIPDTTFIKKWSHKIEAVIITHGHEDHIGALPWVIPALDSTTPIFASSFTMELIKKRLKEFGIFLSSRLKVLRIKKRFQAGPFEVEPIRVTHSIPDCCGLVLRCGDGIIFHTGDWKIDESPVDGKNFDRQALEELSKEGVTLMMSDSTNVLSPGRSISESVVAGSLLRHISEAKGRVITTQFASNIHRIGSIKAAADLTGRKMVFVGMSLRTYLEAAFKDGKAPLDPSTLIKVEDMDAYAPKDLLVVTTGSQGEPRAALNLASYGGSHALKLSKEDVLLYSAKVIPGNETRVMKMMNRLTDLGPKIIMGKDSGLHTSGHAYREELEEVLRIVKPQHFLPVHGELLFLKEHESLGRSTGIRHTTVIKNGEMLGVSHLRNRRVLSNGFVSLGKEDLQLMYSDGDKAFGTSTDLCIDERLRIASDGIIFVSMEIFRPQKEHGLAQSGLKGKFKITTRCLWLDNGRLLDALYKAAHAALSSCPVNCPLSHMERMVAEILRKMVRKYSGKRPDVIAVAMENTTASFSEHLDAKSSGNFGPSSATSHLSMSPAMSLEGSYKTHPDNPEVEAEETLPEAARTAPDDATTSSNGEAFFSSDLHQPKTLEHFWESFKSPTAVKIARIVNGGKKQNLGKIGIMGKDSSIQSAPAPAKSSKKNKWKPEEIKSLIQMRGEMNERFQSVKGRMILWEEISDNMLKQGISRTPAQCKSLWTSLVQKYEESKDAESMKTWPYFLAMDRILSQQGEMATKG

SEQ ID NO: 11045 - protein, 403 aa, Zea mays
  VARIANT 345: note = Ancestral polymorphism is D, Derived polymorphism is Y
  VARIANT 317: note = Ancestral polymorphism is P, Derived polymorphism is L
  VARIANT 274: note = Ancestral polymorphism is R, Derived polymorphism is W
  VARIANT 169..403: note = Derived polymorphism lacks residues 169 to 403
  VARIANT 166..403: note = Derived polymorphism lacks residues 166 to 403
MAGRLTGAAASSPLSRALLLLAALGLFSISFLSLRSLRPAADPALAAAADKSRPLLRLHSSSTVYHSPEAFAVGYAEMERSFKVYIYPDGDPKTFYQTPRKLTGKYASEGYFFQNIRESRFRTDDPDQAHLFFVPISPHKMRGKGTSYENMTVIVKDYVEGLINKYPYWNRTLGADHFFVTCHDVGVRAFEGLKFMVKNSIRVVCSPSYNVDFIPHKDIALPQVLQPFALHEGGNDIDNRVILGFWAGHRNSKIRVILARVWENDTELAISNNRISRAIGELVYQKQFYRTKFCICPGGSQVNSARISDSIHYGCVPVILSDYYDLPFNDALDWRKFAVILRERDVYQLKNILKSISQEEFISLHKSLVQVQKHFVWHSPPVSYDAFHMVMYELWLRHNVIKY

SEQ ID NO: 11046 - protein, 271 aa, Zea mays
  VARIANT 207: note = Ancestral polymorphism is G, Derived polymorphism is V
MGGALLLTLLLAAVPLSLGGGGGAHPGYSDDDESACTVDAGAELLRRMEERGPDRRIIDITHAVVPDLPAFATGAVAGPMLRLRESMADGSEYNLSELRMECHTGTHVDAPGHINQAHFAAGLDVDTLDLHVLNGPALLVDVPRNTNITAEAMEFLNIPRGVRRVLFRTLNTDRKLMWRKGGDMSYVGFTEDGAQWLVDNTDIKLVGVDGLSVASFDHLISAHVVFFKTPDIIPVESLNLDDIEAGIYMLHCLPLRLVGAEGAPTRCILIK

SEQ ID NO: 11047 - protein, 178 aa, Zea mays
  VARIANT 121: note = Ancestral polymorphism is K, Derived polymorphism is Q
  VARIANT 120: note = Ancestral polymorphism is M, Derived polymorphism is T
  VARIANT 117: note = Ancestral polymorphism is K, Derived polymorphism is N
MDSGSDSDGAPEELTAVQGVEKHEEISQVEKDSAIRVTREGKERRKRWAQRRTSSKPDKKAPKEVVEDEGTKQSEETDTMPGMLPTSVIEILAAREKQTFASDSEEENVKQKVQKRKKRMKTAGPETILLKDVRSTQHVKNALDFLEQRKKQVPRSNAVLKNASKALRLLSSKGNFLS

SEQ ID NO: 11048 - protein, 377 aa, Zea mays
  VARIANT 139: note = Ancestral polymorphism is W, Derived polymorphism is C
MGWASCCKRSDGAEPGRRRRKKKDTAWRIFSLKELQSATNNFNYDNKLGEGGFGSVYWGQLWDGSQIAVKRLKSWSNKAETEFAVEVEVLARVRHRSLLSLRGYCAEGQERLIVYDYMPNLSIHSQLHGQHAAECNLSWERRMRIAVDSAEGIAYLHHSATPHIIHRDVKASNVLLDADFQARVADFGFAKLVPDGATHVTTKVKGTLGYLAPEYAMLGKASESCDVFSFGVTLLELASGRRPVEKLSPTAAAKQTVTEWALPLARARRFGEIADPKLGGGFVEEELKRVVLVGLVCAQDRPELRPTMSEVVQLLKGESAEKLDSLENDCLFKPGGGSFQGSDCVGEGEGEGEGRSPGADGGIQEAVDSSETVSSAS

SEQ ID NO: 11049 - protein, 859 aa, Zea mays
  VARIANT 31..859: note = Derived polymorphism lacks residues 31 to 859
  VARIANT 171..859: note = Derived polymorphism lacks residues 171 to 859
MINRTPDNTLLPNTNAFTHQSSLTFAHLAASSSFPFFYKAPAPGCAAARLSSLPFPVPCHSPPRFVVRRAKASRKQNPSASAVGVVAYALRPMAAAAILPELGTQVLIPVAAAVGIAFSVLQWVLVSKVRLAPERRADGGGAVKSGPSDYLIEEEEGLNDHNVVVKCAEIQNAISEGATSFLFTEYKYVGLFMGIFAILIFLFLGSVEGFSTKSQPCHYSKDKTCKPALANAIFSTIAFVLGAVTSLVSGFLGMKIATYANARTTLEARKGVGKAFITAFRSGAVMGFLLAASGLLVLYIAINLFGIYYGDDWEGLFEAITGYGLGGSSMALFGRVGGGIYTKAADVGADLVGKVERNIPEDDPRNPAVIADNVGDNVGDIAGMGSDLFGSYAESSCAALVVASISSFGINHQFTPMVYPLLVSSVGIIACLITTLFATDFFEIKAVNEIEPALKKQLIISTVVMTIGIALISWLGLPYTFTIYNFGAQKTVQSWQLFLCVAVGLWAGLVIGFITEYYTSNAYSPVQVVADSCRTGAATNVIFGLALGYKSVIIPIFAIAFSIFLSFSLAAMYGVAVAALGMLSTIATGLAIDAYGPISDNAGGIAEMAGMSHRIRERTDALDAAGNTTAAIGKGFAIGSAALVSLALFGAFVSRAAISTVDVLTPKVFIGLIVGAMLPYWFSAMTMKSVGSAALKMVEEVRRQFNTIPGLMEGTTKPDYATCVKISTDASIKEMIPPGALVMLTPLIVGILFGVETLAGVLAGALVSGVQIAISASNTGGAWDNAKKYIEAGASEHARTLGPKGSDPHKAAVIGDTIGDPLKDTSGPSLNILIKLMAVESLVFAPFFAAHGGIIFKWL

SEQ ID NO: 11050 - protein, 246 aa, Zea mays
  VARIANT 36..246: note = Derived polymorphism lacks residues 36 to 246
MEALFGSNNHGGHKAADLASLIITQVALEVPRLVRWLSTASRILGSTPCGSEFRAGVENIPLVCPTQKHRISLALPSRELQWSGGPCHCLRSAMEELSRVGVEGVVVAVILHNEIFTSGGDQNLITRILGKSEDETNPENKDDGESDDDNDDEGDDDDAENEEEDDGGDEGSDDNENEEDDDGDDDDPAANGEGGSDDDEDDGGEDEEDDDDDDDDGDDGNEEEEEESEEDDDDDEVPQPPTKKRK

SEQ ID NO: 11051 - protein, 341 aa, Zea mays
  VARIANT 281..341: note = Derived polymorphism lacks residues 281 to 341
  VARIANT 215: note = Ancestral polymorphism is A, Derived polymorphism is S
MAKQAVLLPMAALALVLGALATIPAGVRSIGVCYGMNGDDLPSASDVVQLYKDNGIDSMRIYSPDTDVLQALSGSGIAVTVGVPNADVGGLASRPSAAAAWVQSYVLAFPAVQFRYIAVGNEVVAGGRVLLPAMRNLDRALSAAGLADDIKVSTAVAIDVVGSSFPPSAGTFAPSAGYMARVARYLQSTGAPLLANLYPYYSYISDPGAVDINYALLAMPAGTVVVQDGGYSYDSLFDAMVDCFYSALENAGAGNVTVVVSESGWPSAGSDAANTTNSQAYSQNLINHVGQGTPKRPGPIEAYIFATFNEDQKLGDDETRRHFGLFNKDRSLAYPIDFVNP

SEQ ID NO: 11052 - protein, 546 aa, Zea mays
  VARIANT 2..546: note = Derived polymorphism lacks residues 2 to 546
  VARIANT 17: note = Ancestral polymorphism is R, Derived polymorphism is W
  VARIANT 33: note = Ancestral polymorphism is G, Derived polymorphism is D
  VARIANT 35: note = Ancestral polymorphism is G, Derived polymorphism is D
  VARIANT 54: note = Ancestral polymorphism is A, Derived polymorphism is D
MWKGKKSGPLAPRGRKREFPIRAADYELLEPIGDGATAVVRRARCLPHGGEIVAVKVMNMAHRTESDVNNASEEVKTMIMIDHPNLLSAYCSFTEGEALWIVMPYMAGGSCYHLMKSSYPKGFDDENFIAFVLRETLKGLEYLHENGHIHRDVKAGNILLDQDKGVKLSDFGVTASLYDSIINRHGKRKTLVGTPCWMAPEVMEQKDYDFKADIWSFGITALELAIGHAPFSSQPPAKVFLMTLQHAPPSLHNTKEKKFSDSFKSMIATCLIKDPTKRPPAKKLLKHPFFRRARSDHNAVKCMLNKLPSLAERMQFIKENEAKLQADKKPLDNCKEKASQEEYRRGVSEWNFDIADLKAQAALYPDENEAEDFLRFLFELDIVDETTQLKDIRAESHSINNDGTNVADDGLGKSNSTSPMSSSQSVKQLDKGSPNGLVRISTCNDVDEYLEKTAFQKGRFKVIHDYSKLEGATPREKELLDRISSLEQMLLATQDEVERLKAKGKYAIMLSHKEQKDDCNNNSSEVEVKFNCYLELVMIESSCSTF

SEQ ID NO: 11053 - protein, 319 aa, Zea mays
  VARIANT 180..319: note = Derived polymorphism lacks residues 180 to 319
  VARIANT 111: note = Ancestral polymorphism is H, Derived polymorphism is Y
  VARIANT 43: note = Ancestral polymorphism is A, Derived polymorphism is V
  VARIANT 8: note = Ancestral polymorphism is P, Derived polymorphism is L
MATATTKPAAGRGGRRYALLLALWDSEYAKEVYGGYYNVFVAAFGADDVVGGGGEGPAGDRWHCFRVIAGEFPAPEDLASYDGFVVSGSPQDAHGDEPWIRRLCALIQTVHAMRKRVLGVCFGHQVLCRALGGRVGRARNGWDVGVRKVTFARDRLEGLEFLGDLVEELPRSASLIEVHQDEVWEIPPAATVLAYSEKTRVEVFAVGEHALGIQGHPEYTVDILHNLIDRLTRQNDIRRSVGEEARRTVAETGGPDRAFWTALCKGFLGGGGAGGDRPQPSAALPAVRETAPPEVTTSCAVAGCFASAAGAMVQMARSN

SEQ ID NO: 11054 - protein, 368 aa, Zea mays
  VARIANT 253..368: note = Derived polymorphism lacks residues 253 to 368
  VARIANT 262: note = Ancestral polymorphism is N, Derived polymorphism is I
  VARIANT 276..368: note = Derived polymorphism lacks residues 276 to 368
MKLTVKTLKGTHFEIRVQPNDTIMAVKKNIEEIQGKDSYPWGQQLLIFNGKVLKDESTLEENKVNEDGFLVVMLSKGKTSGSTGTSSSQHSNTPATRQAPPLEAPQQAPQPPVAPITTSQPEGLPAQAPNTHDNAASNLLSGRNVDTIINQLMEMGGGSWDKDKVQRALRAAYNNPERAVEYLYSGIPVTAEIAVPIGGQGANTTDRAPTGEAGLSGIPNTAPLDLFPQGASNAGGGAGGGPLDFLRNNPQFQAVREMVHTNPQILQPMLVELSKQNPQILRLIEENHDEFLQLLNEPFEGGEGDFLDQPEEDEMPHAISVTPEEQEAIGRLESMGFDRARVIEAFLACDRNEELAANYLLEHAGEED

SEQ ID NO: 11055 - protein, 351 aa, Zea mays
  VARIANT 40: note = Ancestral polymorphism is P, Derived polymorphism is L
MGAATGPTKRSRVPSKRQEEEEAMARAAGVEAQAQARRRPRLVGYEELPEYLKDNEYIRGHYRAEWPVRDALLSAFAWHNETLNVWTHLGGFLFFLALAVAGGWTEAADEAAPGIMRFVVTPANASWGSAQHLGVPSHDGRASQSGVPRWPRTVFLVGAMSCLAISATAHLLACHSRRASVVFWQLDYAGISVMIVASFVPPVYYAFLCHPPARAAYLSAIAALGALVVAALLSPSCSSPRYRRLRAALFLAMGLSGVVPALHALWLNWGHAACYLALGLEVAMGLAYATGAWFYVSRVPEKWRPGVFDVVGHSHQIFHVLVLVGAVTHYVAVAVLIHWREKVAAACGAAS

SEQ ID NO: 11056 - protein, 655 aa, Zea mays
  VARIANT 393: note = Ancestral polymorphism is K, Derived polymorphism is M
  VARIANT 299..655: note = Derived polymorphism lacks residues 299 to 655
MAITVGIADAPYILVGPPEARQSHSAALATGAALAPTREEFPDLTDAFSNEFAALAAAAGPGGKALTENFSPTFVSSGDPCLDFFFHVVPGTPAASVESLLGAAWAADPDTALRLVANLRGVRGSGKSDREGFYASALWLHARHPRTLAQNAASLADFGYLKDLPELLHRIVHGGVSTRTPGKKARLTTKCSRGRGRRVCFGNRTRCSRAERAATRVGSTEERVAASLERDRGLAAAAVVARRTRRAEAAARAVEMYSNDPAYRFLHDRTADLFAGLIAEDMRKLAAGKVREFSLAAKWCPSLDSSYDHSTLICEAVARRLFPKGSAPELAADLADEHYAYRARERLRRVALVPLRRALKLPEVFISARAWESVRYTRVASVAMKNYTDLFLKHDADRFNAYLADVKSGKKRIAAGALLPHEIIASLENHSGGEVADLQWQRMVDDMRALGKLSNCVAVCDVSGSMYGRPMEVCVALGLLVSELSDDPWRGRVVTFSRRPELHRIAGETLSEKTRFIQSMAWGTNTDFQAVFDKILEVAVGARLAPERMVRRVFVFSDMEFDQATENPWETDYEAIVRKFTEAGYGAAVPEVVFWNLRDSKAMPVEAGQKGVALVSGFSKNLLKVFLDGGGIVAPRAVMEKAIAGPEYNKLTVID

SEQ ID NO: 11057 - protein, 1139 aa, Zea mays
  VARIANT 979..1139: note = Derived polymorphism lacks residues 979 to 1139
  VARIANT 907..1139: note = Derived polymorphism lacks residues 907 to 1139
  VARIANT 895..1139: note = Derived polymorphism lacks residues 895 to 1139
  VARIANT 647..1139: note = Derived polymorphism lacks residues 647 to 1139
MSSGSAVTGGGAEEAAAVPLGQKLIVHVAENGHTLEFQCGGDTLVEAIQHSIQLHCEIPPADQLLLCGNISLDGANALATYKLPRDDREVFLYNKARLLADSRPPAPESLYIPEPNIPPPPRPQGSPPSDASADPALKALVSYETRFRYHFQVANAVYQSSLAKFELCRRLLREGQVQERALDTAGSNLEHTFRKLSQRYSEFLRCFTQQHRSHVEMLANFERDVQKLRAVRLHPALQSEGRHCLMDLLKENDLRKLADECFCSHKKFEVKVSQLKANFLELKKRVEGLFHAMSSGGCKDVEKLIKEHQGVIGDQKIIMQALSKDVDTSKKLVDDCSSCQLSASLRPHDAVSAVGRIYEVHEKDNLPSIRDFDQRLTKLLEKCKDKKNEMNTLVHVCMQRVKSSQISIKGMMSELVAFQEVMGHQEDFDNLKIVSGLGHAYRACVAEVARRKSYFKLYTGLAGKYAETLAIECQNEKTRREDFHRTWSRYIPDDVMCSMGLFDSPSQCDVKVAPFDLDLLPIDVDDVEKLAPQSILGSFLKSERSQLAKPLLSNSTSGNLNKSEQHSLSADDKMDFQDFLGGYDTIDIAGTSKLEVENARLKAELASAIAILCGAGYGYESIDEGQIDAVLKKAREKTAEALAAKDEFAYQLQSLLTAKQEKCLAYEKRIQDLEERLTNQYMQGHMVSGSKGMSDSLLSAFKSNECNLDLSEGRQPQIRDESSVAMDEVSSTSEQPSKQTEGGDENMTDISGALNLQLIDSAACTNLDAFMTELPRDNEHKIVNINKEGHMLTQLTMADTSDVPIEDPLSNLNSRTDDHHALELRDKELLVSELQNTLDQKSKQLGETEIKLSAMMDEVNSLKKELEQTRGLLDESQMNCAHLENCLHEAREEARTNKCSADRRAVEYDALRSSALRIHGLFERLNNCITAPGVTGFAESLHSLAASLASSVKKDEADTTVQFQQCIKILADKVYLLTRQSAELLERYSAMQAVHGGITKELDEKKELIKNLYNKLQQEKQASKEKISFGRFEVHELAVFFRNPAGHYEAINRNCSNYYLSEESVALFTEQHSQHPVYIIGQIVHIERRVARPDQMGGAPRPDSSGGHRSPASMLNPYNLPGGCEYFVVTVAMLPDAAS

SEQ ID NO: 11058 - protein, 221 aa, Zea mays
  VARIANT 123..221: note = Derived polymorphism lacks residues 123 to 221
  VARIANT 151..221: note = Derived polymorphism lacks residues 151 to 221
MAPSAALAPVAFRSAFSTPLASNPTRNRINIEGTFCLPCSARKRASYRSFRVYSLFGGKKDKDENGDEAPSKAGIFGNMQNLYETVKKAQMVVQVEAVRVQKELAATEIDGYCEGELIKVPLGRPSIILSVTLSGNQQPIRVEITEAAMELGAEVTSTFQFVVNQLLTSTPHLLCTFQKLSELVNDAYKDAHQRSVQAMKERMSDLAQSLGMPAGLGDGLK

SEQ ID NO: 11059 - protein, 443 aa, Zea mays
  VARIANT 26: note = Ancestral polymorphism is L, Derived polymorphism is P
  VARIANT 35: note = Ancestral polymorphism is L, Derived polymorphism is Q
  VARIANT 294..443: note = Derived polymorphism lacks residues 294 to 443
  VARIANT 314: note = Ancestral polymorphism is S, Derived polymorphism is F
  VARIANT 339: note = Ancestral polymorphism is P, Derived polymorphism is T
MGVVDEAKPVKKTTIRVREFDVERDLRAVEELERLCQVGLSGDQGSDHPVADHYGGAEKTTRSSKKKKGMSLYVEQIGDPFARVRHAPDNVILVAEYGEEDEVVGVIKACTRMVSRGKKKQSLGSSSKQFVKVACLLGLRVSPSHSALTGPSTIVSVCRRLGVATELIRRAETWCAARGAAYATMATTESNAASLALFTGRFAYAPFRRPAFLGRPVHRHRVRVPRAHRVLRLPPPLASAAYAALLPPSAAEFLPADLPALLNHKLTLGTYLAIQRGGPEEPARAPSFAMLSVWDATRSLRLRVGGAPALLRASLAAARALDRHAPWLQVPSVPDIFRPFGTYLLYGLRMSGPEGPALLRSLCQHAHNVARKNPACAVLAADLGPGDPAKAVVPHWPKFSCDEDVWCIKKLGASAASDNAGNDDDDWTTSPPPSVLFVDPREF

SEQ ID NO: 11060 - protein, 261 aa, Zea mays
  VARIANT 43..261: note = Derived polymorphism lacks residues 43 to 261
MAASSADELVAAAAGIICSMRGADLAAGWAPPRRKQQEPAREGALIWPAVARGKRSRRRSPSAGFSSSGKARWGGRASPASTLDYSGGSGSGSGSGSAASTSGGEDGGFCSLPHRPVGATDRPQLIFPTPPLPRLAGQRPRKKLRLPEMQQLVRSLAVDNERLREVTVTHRSSSQEMRDLQGACEALSKENDELETRLGQSSRQSEVASKEQRGKGLLDPRQPARDSFALPDLNLPPQDSADVSTVSLIAPDHPADRHTVV

SEQ ID NO: 11061 - protein, 319 aa, Zea mays
  VARIANT 52: note = Ancestral polymorphism is R, Derived polymorphism is C
  VARIANT 82: note = Ancestral polymorphism is P, Derived polymorphism is L
  VARIANT 112: note = Ancestral polymorphism is A, Derived polymorphism is P
  VARIANT 117: note = Ancestral polymorphism is D, Derived polymorphism is Y
  VARIANT 126: note = Ancestral polymorphism is Q, Derived polymorphism is H
MSFHYHDHGLSMDAAAAAAAAAASSPNPSGFSPGIGGEREKAAIAAHPLYERLLEAHVACLRVATPVDQLPRIDAQIAARPPPLAAAAGAAAAGAAAAGGPSGGEELDLFMAFLFPDSNIFLFLLQTHYVLLLCSFKEQLQQHVRVHAMEAVMGCWELEQSLQSLTGASPGEGTGGTMSDDEDNQVDSEANMFDGNDGSDGMGFGPLILTEGERSLVERVRKELKNELKQGYKEKLVDIREEIMRKRRAGKLPGDTASVLKAWWQAHSKWPYPTEDDKARLVQETGLQLKQINNWFINQRKRNWHSNPTSSAEKTKKKR

SEQ ID NO: 11062 - protein, 438 aa, Zea mays
  VARIANT 146: note = Ancestral polymorphism is E, Derived polymorphism is Q
  VARIANT 142: note = Ancestral polymorphism is S, Derived polymorphism is L
  VARIANT 97: note = Ancestral polymorphism is D, Derived polymorphism is Y
  VARIANT 46: note = Ancestral polymorphism is G, Derived polymorphism is A
MAASHAPASVAAATDGVIEENVMAILDSSGIKDSRDLHDDLIWCHGVLSRDFCPSARRMYDGVFQILQNSSSLELAVASFHLLTELGKQYPRTYVADSGGHQSLVVVKESWVPFLFGNGAVSSEIGGNVRSSDHLFDPSRFSLLIEAIVEPTNGTDDNNGIKAIENMMLFQYLVNTLEADFVPRQIATKESLDWVIFRESLLSMLLGSRKLVFKSFVKNCMCILLNQYYHEAKDDYEDIIPSERETESTSYHNFSLNYLSFELKKTLISLRKLFVMVMKLDLTRKEADTLGLTSRADRFRNSIMDIILDELTYNSSYLSPFLLAFVERKWKLEIILQYFSKYCGKGAVRTRRSDNSQEDLKLENVLNFFVTATSAKAIVRKMSAEIAQLLLTHAYQACLSAEDANSNSADTPEKVGATLQEISSNFIAAFQNIRKVSP

SEQ ID NO: 11063 - protein, 86 aa, Zea mays
  VARIANT 8: note = Ancestral polymorphism is P, Derived polymorphism is L
  VARIANT 15: note = Ancestral polymorphism is L, Derived polymorphism is V
  VARIANT 20: note = Ancestral polymorphism is V, Derived polymorphism is I
  VARIANT 30..86: note = Derived polymorphism lacks residues 30 to 86
MATVPVNPKPFLNNLTGKPVIVKLKWGMEYKGYLASVDSYMNLQLANTEEYIDGQFSGNLGEILIRCNNVMYLRGVPEDAEIEDAE

SEQ ID NO: 11064 - protein, 305 aa, Zea mays
  VARIANT 55: note = Ancestral polymorphism is A, Derived polymorphism is D
  VARIANT 59: note = Ancestral polymorphism is P, Derived polymorphism is L
  VARIANT 64: note = Ancestral polymorphism is R, Derived polymorphism is C
  VARIANT 136: note = Ancestral polymorphism is S, Derived polymorphism is T
  VARIANT 184: note = Ancestral polymorphism is D, Derived polymorphism is Y
  VARIANT 207..305: note = Derived polymorphism lacks residues 207 to 305
MSGAASVKDRATGLIDKFVLREARGSSVEVYLYGGQVTFWKNNFGQQLLFISNKATFKPPKAVRGGIQICFPQLGNHGVLEQHGFARNRFWSVDESPPPFPVATSNCHVDLILKSSPEDLKIWPHSYEFRLRVALSPRGDLILTSRIKNISSDSKPFQFTFAYHTYFSVSDISEVRVEGLETLDYLDNLHSKKRFTEQGDAVVFESEVDKVYLSAPPKVAIIDHEKKRTFVLRKEGLPDVVVWNPWDKKDEGYKSMLCVGAAAIEKSVTLKPGEEWTGKQEISAVPSSYSSGQLDPELIRRMHTI

SEQ ID NO: 11065 - protein, 388 aa, Zea mays
  VARIANT 23: note = Ancestral polymorphism is A, Derived polymorphism is T
MKQVWGRSSKDMTTMPPPRHRGAAKKPMWIIVLLSLVCVALMGAYVYPPRHYSACYFFASSVCTPFKDWLPAVVRERTDEEIVSSVVIRNLLSMPMAVSKNPKIAFMFLTPGSLPFEKLWEEFLQGHDGRYSIYIHASREIPVHSSSLFVGREIRSEKVVWGRISMVDAEKRLLANALEDVDNQFFVLLSDSCVPVHTFDYIYNYLMGTNVSFIDCFLDPGPHGTGRYSMEMLPEIEQRDFRKGAQWFAITRRHALLILADNLYYNKFKLYCKPAEGRNCIADEHYLPTFFNMVDPGGIANWSVTHVDWSEGKWHPRSYRAADVTYELLKNITSVNENFRITSDDKKVVTRIPCMWNGTKRPCYLFARKFYPESLNNLLKLFSSYTSA

SEQ ID NO: 11066 - protein, 17 aa, Zea mays
  VARIANT 3: note = Ancestral polymorphism is M, Derived polymorphism is I
  VARIANT 1: note = Ancestral polymorphism is M, Derived polymorphism is I
MKMGYWIYHMLQMLVTI

SEQ ID NO: 11067 - protein, 621 aa, Zea mays
  VARIANT 538: note = Ancestral polymorphism is S, Derived polymorphism is F
  VARIANT 59..621: note = Derived polymorphism lacks residues 59 to 621
MAYGDRVTTFEDSEKESEYGYVRKVSGPVVVADGMGGAAMYELVRVGHDNLIGEIIRLEGDSATIQVYEETAGLMVNDPVLRTRKPLSVELGPGILGNIFDGIQRPLKTIAIKSGDVYIPRGVSVPALDKDVLWEFQPTKLGVGDVITGGDLYATVFENTLMQHHVALPPGSMGKISYIAPAGQYNLQDTVLELEFQGIKKKFTMLQTWPVRSPRPVASKLAADTPLLTGQRVLDALFPSVLGGTCAIPGAFGCGKTVISQALSKYSNSEAVVYVGCGERGNEMAEVLMDFPQLTMTLPDGREESVMKRTTLVANTSNMPVAAREASIYTGITIAEYFRDMGYNVSMMADSTSRWAEALREISGRLAEMPADSGYPAYLAARLASFYERAGKVKCLGSPDRNGSVTIVGAVSPPGGDFSDPVTSATLSIVQVFWGLDKKLAQRKHFPSVNWLISYSKYSKALESFYEKFDPDFIDIRTKAREVLQREDDLNEIVQLVGKDALAESDKITLETAKLLREDYLAQNAFTPYDKFCPFYKSVWMMRNIIHFNTLANQAVERAAGTDGHKITYSVIKHRLGDLFYRLVSQKFEDPAEGEEALVGKFKKLYDDLTTGFRNLEDEAR

SEQ ID NO: 11068 - protein, 140 aa, Zea mays
  VARIANT 40: note = Ancestral polymorphism is C, Derived polymorphism is F
  VARIANT 47: note = Ancestral polymorphism is I, Derived polymorphism is K
  VARIANT 54: note = Ancestral polymorphism is G, Derived polymorphism is E
  VARIANT 62: note = Ancestral polymorphism is K, Derived polymorphism is R
  VARIANT 105: note = Ancestral polymorphism is D, Derived polymorphism is Y
  VARIANT 123: note = Ancestral polymorphism is R, Derived polymorphism is G
MYLTSRCSRKFLAGGFGFTETSCSSVLSTAPEDQPAVSDCLEWSHAILMNVRKGLCQCKESKCKNTWGSYEYGCSEGLLYMKEHDTCIRITGYALYKYRARRYMDSEICAIMAHYMPCTTKDRSKSILITLRCEAVGHRL

SEQ ID NO: 11069 - protein, 353 aa, Zea mays
  VARIANT 305: note = Ancestral polymorphism is M, Derived polymorphism is R
MQDNVINGFDNIPYYQKFGEGSHMSVDSVDGFNLTNCAGGSVAMSVDSSSVGSNESRTVILKHPGLRDAPTASYSVNNSVFRPNRVAAHTLNEDALAQVLMDPNHPTEVGHGGSFCSRSLWKLYRGIYNGEDVAIKLLEKSENDPERAHSMEQQFVQEVMMLSRLSHPNIVRFIGACRKSVVWCTITEYAKGGSVRQFLARRDLKSDNLLISADKSIKIADFGVARIEVKTEGMTPETNLPVDGTHRPYDHNVDVYSFGIVLWELITGMLPFTNMTAVQAAFAVVNKGARPVIPQDCLSSLSHIMTRCWDANPEVRPPFTEIVCMLESAEMELLSNVRKARFRCCISEPMTTD

SEQ ID NO: 11070 - protein, 190 aa, Zea mays
  VARIANT 142: note = Ancestral polymorphism is M, Derived polymorphism is R
  VARIANT 143: note = Ancestral polymorphism is T, Derived polymorphism is A
  VARIANT 157: note = Ancestral polymorphism is T, Derived polymorphism is I
MTEAARFHGMIGGGGGKGMQDNVINGFDNIPYYQKFGEGSHMSVDSVDGFNLTNCAGGSVAMSVDSSSVGSNESRTVILKHPGLRDAPTASYSVNNSVFRPNRVAAHTLNEDALAQAAFAVVNKGARPVIPQDCLPSLRHIMTRCWDANPEVHPPFTEIVCMLESAEMELLSNVRKARFRCCISEPMTTD

SEQ ID NO: 11071 - protein, 331 aa, Zea mays
  VARIANT 19..331: note = Derived polymorphism lacks residues 19 to 331
MEWTAPKRAASPPSPPLLWDWGGDHAGATGSGSGSSGDAPARRGGREREAKRARADDGEVRCQVEGCGLDLSRVKEYHRKHRVCEAHTKSPRVVVAGQERRFCQQCSRFHALSEFDQKKRSCRRRLSDHNARRRKPQPDAFAFASARLPSSSFDDRRQISFVWNKAPVSHPFTSPWDSSSELPHAKEIREVSTKVGTITGQVHLDKSYVSNAVPSLTHGKDEPWPMKGPDMSIAASKFDGAPDLQRALSLLSVGACGLPDPVHQTSCVIQFTSASENSGDLHLSHGANSGLASCGDGQHIASQPQAQLVRFTMDTSNSVYEPSFFSVNQIN

SEQ ID NO: 11072 - protein, 349 aa, Zea mays
  VARIANT 222..349: note = Derived polymorphism lacks residues 222 to 349
  VARIANT 252: note = Ancestral polymorphism is P, Derived polymorphism is S
  VARIANT 283: note = Ancestral polymorphism is S, Derived polymorphism is I
MDSHAAGSSSGGSGDGGAQPRRSSRKPTYSKFTQQELPACKPILTPKWVISVFVLVGVIFVSIGIVSLRASRQVVEIVDRYDDACVPAGVTDKLAYIRNDSIPKSCTRNLTITKDMKQPIFVYYQLDDFYQNHRRYVKSRNDAQLRDKSKASDFTNCDPEAKTVDGKPIVPCGLIAWSLFNDTYKLIHNNVTLRVEKKDISWKSDRDHKFGSDVFPTNFQKGPLKGGKTLDPSIPLSKQEDLIVWMRTAALPTFRKLYGRIYVDLKENDTITVQLDNNYNTYSFGGKKKLVLSTATWLGGKNDFLGLAYLTVGGLCFFLAFAFTLLYLIKPRKMGDNSYLSWNRPPSGR

SEQ ID NO: 11073 - protein, 132 aa, Zea mays
  VARIANT 13: note = Ancestral polymorphism is T, Derived polymorphism is M
  VARIANT 14: note = Ancestral polymorphism is V, Derived polymorphism is E
  VARIANT 26..132: note = Derived polymorphism lacks residues 26 to 132
  VARIANT 58: note = Ancestral polymorphism is D, Derived polymorphism is Y
MSSPLLSRLRLVTVDVTGTLITYRGQLGDYYCMAAKHAGMPCPDYGRVHEGFKLAYADMGRGRSGTSGCSRAGVVGVEKPDPRIYEVALRQAGGGGGGGGVAPGEALHIGDSLRKNYARPRAEPRCEDPRLW

SEQ ID NO: 11074 - protein, 607 aa, Zea mays
  VARIANT 530..607: note = Derived polymorphism lacks residues 530 to 607
MAAATLLQGPAAASPRLGAAASAPSASHGRRRLTFSFRCQSTSVDKQQERPPKPKQRNLLDNASNLLTNFLSGGNLGAMPVAEGAVTDLFGKPLFFSLYDWFLEHGSVYKLAFGPKSFVVVSDPIVARHILRENAFYYDKGVLAEILKPIMGKGLIPADLDTWKQRRKVITPGFHALFIEAMVRTFTRCSERTISKLEELTESEGREQNSTIVDLEAEFSNLALDIIGLGVFNFDFDSVTKESPVIKAVYGTLFEAEHRSTFYIPYWNLPLTKWIVPRQRKFHSDLKVINNCLDNLIKNAKETRQEADVEKLQQRDYSSLKDASLLRFLVDMRGADADDRQLRDDLMTMLIAGHETTAAVLTWSVFLLAQSPTRMRKAQAEVDSVLSNGAITVESLKKLEYIKLIILEALRLYPQPPLLIRRSLRPDKLPGGCNGAKEGYEIPAGTDIFVSVYNLHRSPYFWDRPNEFEPERFSVPKKDESIEGWSGFDPDRSPGAMYPNEVRFNSLFFLSLFDRCTNLSPVYIKKPRAYQFATYQIIADFAFLPFGGGPRKCVGDQFALLESTVALALLLRKFDVELRGSPDEVEMVTGATIHTKNGLWCRLRRRT

SEQ ID NO: 11075 - protein, 129 aa, Zea mays
  VARIANT 32: note = Ancestral polymorphism is F, Derived polymorphism is L
MKRNEIAAAAMVLLLLTLGAEAQICYSRSKTFKGWCYHSTNCISVCITEGEISGFCQHGICMCTYECLTGNEASLPGGGGGGEDPQLLHVATPNGDGARPLSLEDDKKETSTETAMRGAKSHSPRYMRR

SEQ ID NO: 11076 - protein, 115 aa, Zea mays
  VARIANT 25..115: note = Derived polymorphism lacks residues 25 to 115
MHSGLYIGRQDTSALCFLLAQQSSSLEFNSAMRSQVAAVAMFLLLLALGAEADLCVTRSRTFKGWCHQSENCITVCKSEGNTGGFCKLGACMCTKECVRSTDAAGANKAPQHHLS

SEQ ID NO: 11077 - protein, 88 aa, Zea mays
  VARIANT 9: note = Ancestral polymorphism is V, Derived polymorphism is F
  VARIANT 3: note = Ancestral polymorphism is R, Derived polymorphism is S
MARQATALVASALLLLAVAFMSHDAGVEAWCLEYPAPDPNACHGSNGLRYCRNECVAVGNGFVGGECNKGTCYCLKCADEPLPAPRAL

SEQ ID NO: 11078 - protein, 88 aa, Zea mays
  VARIANT 57: note = Ancestral polymorphism is A, Derived polymorphism is P
  VARIANT 25: note = Ancestral polymorphism is A, Derived polymorphism is V
  VARIANT 22: note = Ancestral polymorphism is S, Derived polymorphism is P
  VARIANT 21: note = Ancestral polymorphism is M, Derived polymorphism is T
  VARIANT 9: note = Ancestral polymorphism is V, Derived polymorphism is F
  VARIANT 5: note = Ancestral polymorphism is A, Derived polymorphism is V
  VARIANT 4: note = Ancestral polymorphism is Q, Derived polymorphism is H
MARQATALFASALLLLAVAFMSHDAGVEAWCLEYPAPDPNVCHGSDGLRYCRNDCVAIGNGFVGGECNKGTCYCLKCADEPPPAPRAL

SEQ ID NO: 11079 - protein, 415 aa, Zea mays
  VARIANT 25: note = Ancestral polymorphism is P, Derived polymorphism is R
MAALSVPLHAAAGSRAAAADPVKVPCVRSTGSAHFGRAFPSVAVSSLAARHIEPMRAIATQAPPAVPQYLSGEKTKIGINGFGRIGRLVLRIATSRDDIEVVAVNDPFVDAKYMAYMFKYDSTHGPFKGSICVVDDSTLEINGKKVTITSKRDPAEIPWGNFGAEYVVESSGVFTTTDKASAHLKGGAKKVVISAPSADAPMFVVGVNENSYDSKMNVVSNASCTTNCLAPLAKVVHEEFGIVEGLMTTVHATTATQKTVDGPSMKDWRGGRGAGQNIIPSSTGAAKAVGKVLPELNGKLTGMAFRVPTPNVSVVDLTCRIEKNASYDDVKAAIKEQPCAYYQPSYGGSYAAYLFSRAASEGALKGILGYTDEDVVSNDFVGDSRSSIFDAKAGIGLSSSFMKLVSWYDNEWGYR

SEQ ID NO: 11080 - protein, 571 aa, Zea mays
  VARIANT 92..571: note = Derived polymorphism lacks residues 92 to 571
MSCPARHPSSPLLPIQRAIHHPTTKPSPSRLPNPRRIRAPGGTRGAGSPTASRPRGPALRTGELDSRRRRRLYFISISRSLRRSSGERGSERRKQRTTDQYKMAVSFKYWDDCLDPEDMRLMWQDPVVSKEWNDAGEEQGQKVHLSRDPDGEAYLTQTEMMAVAAITVHRHFKSQLDPYMIGALAEIASGRRLFVDTYDRKTKETKVGILQVAPEVAQWLGRELGYKSYDIEDNTNLLYWPLVNVYFGAAYAKWLFSCDDRQRTEEFVVRAYKGGKKKAAHKSTSPIFQRYLYVKENLLSIRQPEICHDLAPDQEKLSSTESQLIYWDSKVSEADMDAMWKHPDVYKEWIKSGERRGNVRFSHDAKNRPYLSRVEVKVNRIINICNNLSAYAVAEIIISRHLSTRGVKPEALAALAEVCSMRFVHGVSTRTGLMGIDYPTAVWLSRQVDCGYRAYTLISVDDLYNPFASMYFGASYLAWLSQYEGREQSYEFIVQAYLGGPENVSLQETGPFWNQFLESLTQYQDPKKYACAFCLTQLHKETLICTFLIIPVKTVHFSGTIIIAAVSCEVI

SEQ ID NO: 11081 - protein, 184 aa, Zea mays
  VARIANT 48: note = Ancestral polymorphism is L, Derived polymorphism is P
MAMAAASRSRALWASRAAAYLRISTFPRAFSTGTSSLPVPALFPALWLVGSRLLATVLKDLKYADTHEWVKVEGDSATVGITDHAQDHLGDVVYVELPEVGVSVSQGKNFGAVESVKATSDINSPVSGEVVEVNRKLSEEPGLVNASPYEKGWIIKVKLSDSGELSSLMDGDKYSKFCEEEDGH

SEQ ID NO: 11082 - protein, 360 aa, Zea mays
  VARIANT 197: note = Ancestral polymorphism is S, Derived polymorphism is N
MARYLLAPTSTSSSTFLPKDGVKNSPTSRPLRLRALGSRTSKARHIMAVASEQAAPPARYPKVAAPTTGPIPAAELLGVIEAAAKAGADVIMEAVNKPRNIHYKGVADLVTDTDKLSESVILEVVTKNFKDHLILGEEGGLVGDSLSEYLWCIDPLDGTTNFAHGYPSFSVSISVLFRGKPAASTVVEFCGGPMCWSTRTISASAGGGAYCNGQKIHVSQTDKVEQSLLVTGFGYEHDDAWTTNMNLFKEFTDISRGVRRLGSAAADMSHIGLGITEAYWEYRLKPWDMAAGVLIVEEAGGVVTRMDGGEFTVFDRSVLVSNGLVHGQLLDRIGPPTEDLKKKGIDFSLWFKPDKYPTDF

SEQ ID NO: 11083 - protein, 160 aa, Zea mays
  VARIANT 89: note = Ancestral polymorphism is E, Derived polymorphism is K
  VARIANT 98: note = Ancestral polymorphism is K, Derived polymorphism is R
  VARIANT 102: note = Ancestral polymorphism is D, Derived polymorphism is G
  VARIANT 108: note = Ancestral polymorphism is D, Derived polymorphism is G
  VARIANT 119: note = Ancestral polymorphism is S, Derived polymorphism is T
  VARIANT 121: note = Ancestral polymorphism is R, Derived polymorphism is G
  VARIANT 123: note = Ancestral polymorphism is G, Derived polymorphism is V
  VARIANT 124: note = Ancestral polymorphism is L, Derived polymorphism is F
  VARIANT 125: note = Ancestral polymorphism is P, Derived polymorphism is S
  VARIANT 127: note = Ancestral polymorphism is P, Derived polymorphism is L
  VARIANT 128: note = Ancestral polymorphism is G, Derived polymorphism is V
  VARIANT 129..160: note = Derived polymorphism lacks residues 129 to 160
  VARIANT 131: note = Ancestral polymorphism is L, Derived polymorphism is Q
  VARIANT 132: note = Ancestral polymorphism is S, Derived polymorphism is R
  VARIANT 133: note = Ancestral polymorphism is F, Derived polymorphism is L
  VARIANT 137: note = Ancestral polymorphism is I, Derived polymorphism is T
  VARIANT 142: note = Ancestral polymorphism is A, Derived polymorphism is G
MNMPAACCWSMVHVCPPPILEIYPPPMQTEYSLQPAFQGQRSFAFEREGQPMDDVRKIERSLHIGAGQVKLPIPPEKKLMPPGKVADIERSSLILCGKAFADSAIVKDAITAMIAPILSARGGLPVPGWILSFGGSIVLLFAPVENHDVLRRNPYCSIVH

SEQ ID NO: 11084 - protein, 209 aa, Zea mays
  VARIANT 90: note = Ancestral polymorphism is A, Derived polymorphism is V
MVTTAVAAVAGAVPPARKAQAVTVATTTALPPTLTRRQLLAAVATASTLPTAAASAAAPRFAEIPGSGGVKALDLREGSGEIPAVGDQVAVHYYGRLAAKQGWRFDSTYDHKDETGDPMPFVFTLGSGKVIPGMEAAVKSMRVGGLRRVIIPPSQGYQNTSQEPVPPNFFDRQRLFTTIFNPTRLANGEGSTLGTLIFDIELINIRQRP

SEQ ID NO: 11085 - protein, 408 aa, Zea mays
  VARIANT 239: note = Ancestral polymorphism is G, Derived polymorphism is A
  VARIANT 354: note = Ancestral polymorphism is F, Derived polymorphism is S
MVSLRCTTAHHSLLGSPTCLARPRRRACPVVRAAVAVEAGAQAKVSLIRIGTRGSVYKDVVFTSLFFDLGRCLDSPLALAQAHETREKLKATHSELAEERAIEIVIIKTTGDMILDKPLADIGGKGLFTKEIDDALLQGRIDIAVHSMKDVPTYLPEGTILPCNLPREDVRDAFICLTANSLAELPAGSVIGSASLRRQSQILYRYPSLKVVNFRGNVQTRLRKLKEGDVSATLLALAGLRRLNMAENATAVLSVEEMLPAVAQGAIGIACRSNDDKMMEYLSALNHEDTRLAVACEREFLAVLDGNCRTPIAAYAYRDNDGNCSFRGLLSSPDGSKGILDFRLKRAYSDFVVSIIERQHLVTFMVLLTVFETTRSGPYSFDDMVEMGKDAGHELKAKAGPGFFDSLQ

SEQ ID NO: 11086 - protein, 186 aa, Zea mays
  VARIANT 134..186: note = Derived polymorphism lacks residues 134 to 186
  VARIANT 123: note = Ancestral polymorphism is V, Derived polymorphism is D
  VARIANT 104: note = Ancestral polymorphism is G, Derived polymorphism is E
  VARIANT 103: note = Ancestral polymorphism is V, Derived polymorphism is A
MLWAKAPRSTAAYDEIHRRGTCCDKQGCFTLDERRTGLNFQVTRPSSFQDFYIYAFRYCLTEDKKKCIEIPAACELLNLVLGLQFRPQVDKLNNYLMIAGMAVGFNLVFEHDNLITAICFASVVVNLLPYTLSRLVKCSDGMYKHLALPNHVESDPTTTNLRVLNVMKSDVWEIVAGHGVLNVVGK

SEQ ID NO: 11087 - protein, 115 aa, Zea mays
  VARIANT 13: note = Ancestral polymorphism is R, Derived polymorphism is C
  VARIANT 35: note = Ancestral polymorphism is F, Derived polymorphism is S
  VARIANT 36: note = Ancestral polymorphism is K, Derived polymorphism is R
MQERQYCPVLYLRSCVKHPSFFSKRLTILPNQNAFKLCNSKKLEKDWHPLIHEKVMKVMHRHDRRVFAWTVHDISSMKKMLYEHVDAIMTSNSSLLQRLMQETRAEYMEDGFILP

SEQ ID NO: 11088 - protein, 1270 aa, Zea mays
  VARIANT 380..1270: note = Derived polymorphism lacks residues 380 to 1270
  VARIANT 428..1270: note = Derived polymorphism lacks residues 428 to 1270
  VARIANT 948..1270: note = Derived polymorphism lacks residues 948 to 1270
  VARIANT 976..1270: note = Derived polymorphism lacks residues 976 to 1270
  VARIANT 1047..1270: note = Derived polymorphism lacks residues 1047 to 1270
MGRRARGSAWGRTALIAAAVGRRVGDPRALIGGDMVSIEELVALMAGGLAKMANLNITNILEKMTGKDKDYRYMATSDLLSELNKESFKADQDLEPKLTITVLQQLEDASGDVSGLAVKCLAPLVKKVGEDRVVEMTNKLCDKLINGKDQHRDTASIALKTIIAEVTTPSLAEKILLSLAPQLIKGVNTAKSAEIKCECLDILADVLHRFGNLITKDHEYMLNALLSQLGSNPASVRKKSISCIASLAPSLSDDLLAKATLQVVQLLKNRGAKSEITRTNIQMIGSLSRSVGYRFGPHLAETVPLLISYCTSASENDEELREYSLQALESFMLRCPRDISPYCEGILNLALEYVSYDPNFTDSMDEDTDEEAKEEDDDDESANEYTDDEDASWKVRRASAKCLSAIIVSRPEMLSKMFLEACPKLIERFREREENVKMDIFNTFIELLRQTGNVTKGQGDIDESSPRWLLKQEVPKVVKSINRQLREKSIKTKVGAFSVLKELVVVLPDCLADHFGSLVPGIEKALNDKSSTSNLKIEALVLTRLVMASHSPSVFHPYIKALSAPILSAIRDRYYKVTAEALRVCGELVRVLRPNLETTSVDFKPYIGPIYNAILGRLANQDQDQEVKECAISCMSLVVSTFGDGLERELPACLPILVDRMGNEITRLTAVKAFSVIANSPLRIDLSCVLDHVVSELTAFLRKANRALRQATLGTLNSLVVTYGGQIGSSSYETIIAELSTLISDMDLHMTALALELCCTIMVDRKSIQNVGLAVRDKVLPQALVLIRSALLQGQALQALQRFFASLVQSANTSFDALLESLISAAKPSHSGSLAKQALSSIAKCVAVLCLAAGDQKCASTIEMLKGILKDDSTTNSAKQHMALLCLGEIGRRKDLSNHVQIENIVIESFQSPFEEIKSAASYALGNIAVGNLSKYLPFILDQIDNQQKKQYLLLHSLKEVIVRQSVDHTGQSELQDSNIEKILALLFNHCESEEEGVRNVVAECLGKISLIEPKKLVPALEVRTSSPAANTRATVAIAIKYSIVERPEKIDEIMYSKISTFLMLIKDSDRHVRRAAVLALSTAAHNKPNLIKGLLPEILPLLYDQTVIKQELIRTVDLGPFKHVVDDGLELRKAAFECVDTLLDSCLDQVNPSSFIVPFLLSGLGDHYDVKMPCHLILSKLADKCPSAVLAVLDSIVEPIEKTISHKPKGDAVKQEVDRNEDMIRSALRAISSLSRISGSDYSIRFKNLMNKITATPALAEKYNSVRGE

SEQ ID NO: 11089 - protein, 126 aa, Zea mays
  VARIANT 47: note = Ancestral polymorphism is E, Derived polymorphism is Q
MKRLLRRLSRTVSVSVAGEDGGPAARPSSKHKHRRRRKGKKAGAVPEGHVPVCVGEEGGPAERFAVRAELLGEPPLAALLRRAAQEYGYAHPGALRIPCPVDDFRRLLLRLSHGPSSPAPDAMPRA

SEQ ID NO: 11090 - protein, 346 aa, Zea mays
  VARIANT 121: note = Ancestral polymorphism is N, Derived polymorphism is K
  VARIANT 106: note = Ancestral polymorphism is S, Derived polymorphism is L
  VARIANT 54: note = Ancestral polymorphism is S, Derived polymorphism is F
  VARIANT 51: note = Ancestral polymorphism is L, Derived polymorphism is I
MLPPTETVRRPRSLGLSAARRSVMAQDDPVVSAQWLHEHLGMPDVKFRDILLLSPALLVLDASWYMPVENRDPWKEYQVAHIPGALFFDLDGIVDRTTDLPHMLPSEEAFAAAISELDIKNQDKVIVYDGKGFFSAPRVWWMFRVFGHKKVWVLDGGLPQWQASGFNVEKASPDDDAVLKSIAANRAVKRVYNGEQTNTISFQTEFQPNLFWALEKVAQNVTAKTYQQIDARAKGRFDGVAPEPREGVRSGHIPGSVCVPFPEMFDGAPPSLLLPADELRRKFQHAGISLDRPIVVTCGSGVTACILALGLYRIGKRDVPVYDGSWTEWEGQSDSDYPKVTAPGTA

SEQ ID NO: 11091 - protein, 919 aa, Zea mays
  VARIANT 780..919: note = Derived polymorphism lacks residues 780 to 919
  VARIANT 533..919: note = Derived polymorphism lacks residues 533 to 919
  VARIANT 32..919: note = Derived polymorphism lacks residues 32 to 919
MKLSPSASGGLQDQPASPEEAEEHKCLNSELWHACAGPLVSLPSVGSRVVYFPQGHGEQVAASTNKEMEAQIPNYPSLPPQLICQLHNVTMHADAETDEVYAQMTLQPLSPQELKDPFLPAELGTASNQPTNYFCKTLTASDTSTHGGFSVPRRAAEKVFPPLDFNQQPPAQELIAKDLHGNDWKFRHIFRGQPKRHLLTTGWSVFVSAKRLVAGDSVLFIWNDNNQLLLGIRRANRPQTVMPSSVLSSDSMHIGLLAAAAHAASTNSRFTIFYNPRASPCEFVIPMAKYVKAVYHTRISVGMRFRMLFETEESSVRRYVKPIYMGTITGISDLDPVRWPNSHWRSVKVGWDESTAGEKQPRVSLWEIEPLTTFPMYPSPFALGLKRPWPAGLPSLYGGRGDGLTSSLMWLRDRANPGFQSLNFSGLGMSPWMQPRLDNSLLGLQSDMYQTIAAAAALQSTTKQVPPSAMQFQQPQNIADRSALLSSQILQQVQPRFQQIYPQNLNENKIQGHTQPEYLQVQQQLQRCQSFNEQKPPMHPQQQQQEPQQQQCVQTPQDQQMQEQKHLHNFHSLPDALSAFSQLSPATHSPPSALQTVPAFSHQQNFPDTNISSLSPSTGPSMHGMLGRLPSEAASSLPCVAMNAPVSVSDPWSSKRVAVESVNPCRPHVSPHIEHLDMATCNMPQSSALAPLPGRECLVDEDGCSDPQNHLLFGVHIDSHSLLMQGGIPALQNDNSSGTIPYSTSNFLSPSENDFPLNQPLRSAGCLDESDYLPCAENAEQANQQFATFVKVYKSGTVGRLLDITRFSSYDELRSEVGRLFGLEGQLEDPLRSGWQLVFVDREDDVLLVGDDPWQEFVNSVSCIKILSPEEVQRMGKPGIQLLSSAPSRRLGNGCDSYASMQEPRGLDAGMAPVGSVEF

SEQ ID NO: 11092 - protein, 257 aa, Zea mays
  VARIANT 238: note = Ancestral polymorphism is W, Derived polymorphism is L
MDGVVVRRVIPSDNSCLFNAVGYVMEHNRNKASELRQLPFSSPLCSKVIAATVAGDPEKFNEVFLGKPNEAYCAWILDPEKWGGAIELSILSEYYGREIAAYDIQTTRCDLYGQEKNYSERAMLIYDGLHYDALAMSPAEGAPEEFDQTIFPVNHDRSIGPAEGLALNLVREAQRKRSYTDTANFTLRCGVCQIGVIGQQARLLRLWNMRKPLATSTSKNTNDSTRSDCCAVNLTIIWFQLIFSSRWIWLALHCITV

SEQ ID NO: 11093 - protein, 101 aa, Zea mays
  VARIANT 42: note = Ancestral polymorphism is A, Derived polymorphism is S
MDRRHRAVPYSARQQQQRFLRPGALARLRDSRIVARSVRSSACLLLPRSAPPSPSPAPPVVAADELAAAPRFLGTTSGSGRYPLRRRVVAARGVAFSPSSP

SEQ ID NO: 11094 - protein, 177 aa, Zea mays
  VARIANT 21: note = Ancestral polymorphism is V, Derived polymorphism is A
  VARIANT 14: note = Ancestral polymorphism is T, Derived polymorphism is M
  VARIANT 13: note = Ancestral polymorphism is M, Derived polymorphism is T
MAKAQAQVAARFMMEAPPPQVVSVMRRRKAPRSLSTIAEDDREMLAPCGSPSDHGHAQAQVAARFTTEVAPPQVVSVMRRRKGPRSLDTIAEDDREQQLACGSPSDHGLATAWSSLQRIPTPPQPPRERAGGSVTRDLSKNFLDSHGCQQASGWEGGHMLGHRRAVHALELHKVGAC

SEQ ID NO: 11095 - protein, 275 aa, Zea mays
  VARIANT 109: note = Ancestral polymorphism is I, Derived polymorphism is T
  VARIANT 65: note = Ancestral polymorphism is P, Derived polymorphism is T
  VARIANT 15: note = Ancestral polymorphism is V, Derived polymorphism is A
  VARIANT 8: note = Ancestral polymorphism is G, Derived polymorphism is C
MAKPSSYGLALLACAAVAAAVAGGTQFTVGGANGWSVPAAGAEPFNAWAERTRFQIGDALVFVYPKDQDAVLLVEPAGYNACNTSSYVRKFDDGDTVVALDSAGPLFFISGVEANCRADEKLIVMVLAARSNGTGAPAPSTAPPPPAPASSAPPTPASPAPKGAPPTTAASPPPPSASAPATTPATPPPAASAAPPAPRASSTPPPPSAPAGAPPAPAASSPAPSAHGATDNSTGTPSSPPAGSSKDKNGAAFTVATGLASSFGTCILGYAMLAL

SEQ ID NO: 11096 - protein, 213 aa, Zea mays
  VARIANT 57: note = Ancestral polymorphism is I, Derived polymorphism is K
  VARIANT 41..213: note = Derived polymorphism lacks residues 41 to 213
  VARIANT 27..213: note = Derived polymorphism lacks residues 27 to 213
  VARIANT 17: note = Ancestral polymorphism is R, Derived polymorphism is S
MVPLDACRAASVWEIWRVNFAPKIQKRKLLVGAAQLREQFQRSSLSSCRRVSPVMAKKMKGIFKGLKIISQMFVHKEHEMEIGYPKDVKHVAHIGLGTSDTSPSWTAEFKGTDDSSAGSVRSTAAQSRQTSWASADFEQPRSMLVPIEIFQDNDRPGMPRGPRKAKKRKTKAKKKNRASSPASSARSSSSRSRASFATAYDAFCESRRGFRVA

SEQ ID NO: 11097 - protein, 135 aa, Zea mays
  VARIANT 111..135: note = Derived polymorphism lacks residues 111 to 135
  VARIANT 38..135: note = Derived polymorphism lacks residues 38 to 135
MTARKAKEMTVEIKLKIHPKQKNTRSRRQKKLKAYDLSALSESLPEPGAPKQKPEAKLNCKSRQSLVLREAAHLKAVLGKMQFQLDPFAAIHQHLLATQPPAAAKDDAVKQGKDSKNKKRRRKKGTSSSSQAMDI

SEQ ID NO: 11098 - protein, 381 aa, Zea mays
  VARIANT 28: note = Ancestral polymorphism is A, Derived polymorphism is T
MQIFVKTLTGKTITLEVESSDTIDNVKAKIQDKEGIPPDQQRLIFAGKQLEDGRTLADYNIQKESTLHLVLRLRGGMQIFVKTLTGKTITLEVESSDTIDNVKAKIQDKEGIPPDQQRLIFAGKQLEDGRTLADYNIQKESTLHLVLRLRGGMQIFVKTLTGKTITLEVESSDTIDNVKAKIQDKEGIPPDQQRLIFAGKQLEDGRTLADYNIQKESTLHLVLRLRGGMQIFVKTLTGKTITLEVESSDTIDNVKAKIQDKEGIPPDQQRLIFAGKQLEDGRTLADYNIQKESTLHLVLRLRGGMQIFVKTLTGKTITLEVESSDTIDNVKAKIQDKEGIPPDQQRLIFAGKQLEDGRTLADYNIQKESTLHLVLRLRGGY

SEQ ID NO: 11099 - protein, 95 aa, Zea mays
  VARIANT 4: note = Ancestral polymorphism is V, Derived polymorphism is M
  VARIANT 16: note = Ancestral polymorphism is G, Derived polymorphism is R
  VARIANT 27: note = Ancestral polymorphism is V, Derived polymorphism is I
  VARIANT 36: note = Ancestral polymorphism is A, Derived polymorphism is G
  VARIANT 50: note = Ancestral polymorphism is H, Derived polymorphism is R
  VARIANT 56: note = Ancestral polymorphism is N, Derived polymorphism is S
  VARIANT 60: note = Ancestral polymorphism is G, Derived polymorphism is R
MEHVFGGKFKLGKKIGSGSFGELYLGVNIHSGEEVAIKLLLDNLILFVHHFSLSWSYMPGIRHEFVPYANISWSTIASNGFVKNLCVDYGMTENG

SEQ ID NO: 11100 - protein, 535 aa, Zea mays
  VARIANT 37: note = Ancestral polymorphism is G, Derived polymorphism is S
MQMQIFVKTLTGKTITLEVESSDTIDNVKAKIQDKEGIPPDQQRLIFAGKQLEDGRTLADYNIQKESTLHLVLRLRGGMQIFVKTLTGKTITLEVESSDTIDNVKAKIQDKEGIPPDQQRLIFAGKQLEDGRTLADYNIQKESTLHLVLRLRGGMQIFVKTLTGKTITLEVESSDTIDNVKAKIQDKEGIPPDQQRLIFAGKQLEDGRTLADYNIQKESTLHLVLRLRGGMQIFVKTLTGKTITLEVESSDTIDNVKAKIQDKEGIPPDQQRLIFAGKQLEDGRTLADYNIQKESTLHLVLRLRGGMQIFVKTLTGKTITLEVESSDTIDNVKAKIQDKEGIPPDQQRLIFAGKQLEDGRTLADYNIQKESTLHLVLRLRGGMQIFVKTLTGKTITLEVESSDTIDNVKAKIQDKEGIPPDQQRLIFAGKQLEDGRTLADYNIQKESTLHLVLRLRGGMQIFVKTLTGKTITLEVESSDTIDNVKAKIQDKEGIPPDQQRLIFAGKQLEDGRTLADYNIQKESTLHLVLRLRGGQ

SEQ ID NO: 11101 - protein, 222 aa, Zea mays
  VARIANT 164: note = Ancestral polymorphism is G, Derived polymorphism is R
MAVVPAAPVVLGVAMVLVVLAASAGAAGQLRMGFYAESCPGVERVVGDFVRQHVRRVPTVAAALLRLHFHDCFVRGCDASVLLNSTAGSVAEKDAPPNLTLRGFDLVDRVKALVEDACPGVVSCADVLALAARDAVVAIVRELARHSTFHHATSRSGGAWTMDGSSSTMHGGPSWRVATGRRDGTVSAMQEALDDIPKHTMTFPQLASLFASKGLGLSTDRF

SEQ ID NO: 11102 - protein, 98 aa, Zea mays
  VARIANT 54: note = Ancestral polymorphism is S, Derived polymorphism is F
  VARIANT 29: note = Ancestral polymorphism is G, Derived polymorphism is S
MAAAASGKAPSLVVAASMGAVEALKDQAGLCRWDYALRSLYHRAAAAPRIRALSAALSDSVSVPADAPPRASRPPPPPAPRDADRMRKAYHLVCWGPN

SEQ ID NO: 11103 - protein, 70 aa, Zea mays
  VARIANT 14: note = Ancestral polymorphism is P, Derived polymorphism is L
MSSGSESTTASRWPELATLRALARDAAEQLRLPRAGTSASASSPWRGREDHLHGHGKTAKVMHLLLWGPK

SEQ ID NO: 11104 - protein, 497 aa, Zea mays
  VARIANT 4: note = Ancestral polymorphism is H, Derived polymorphism is Y
MAGHGEKRRRTGGAHEKPEEEEEDRISDLPDVLRLHILSLLPLKSAIRTGALSSRWRRLWAYRWPEPSSVTIRLPPGAAGAAAAARAEALAGIDRRGRRRVDGFSLAFHGGQLAHADLKRCVDYAAACEAEDLHLRADGGAGAARGSRGATRRPGALAVQFPVGSPLLARLSVRGLSLTAVNNAMVATLEVIHLHSVFLTDAALRRMVAACPRLRELDLRYCRRLRRVDFSSVGVPNLSSFTVVDCSRTTELRVPVAPRLRSFRFSGTFLSSNILSGAKGSLEHLYLCSGGPETGLPATNLPYAVPRLSNLTVLTLCSIALQYVSSFTAKAGSEGNLHGLRELQLLTFGMANSNLADIYSFLKTCPCPRLERLFVQLPTNTGDAFTENFLEVAEEDPPKGGLENLCLAKLTNFKGHRNEMQLVGFLLRKSCSLKKLFLIAPKEDHPQGLRKTLSDTLPDFLKKEILHLERASTDTQIFFSEPDAQTQQLHSEVFVRF

SEQ ID NO: 11105 - protein, 284 aa, Zea mays
  VARIANT 8: note = Ancestral polymorphism is G, Derived polymorphism is W
MLHSLMRGSGSRGGGAGADDDDDTPVHDDTLSSSPPPPPLPSRPTPRGRRPSRSRRRVRVQDTWPARAPPPPLSPVEEDVTTAATEGVVSPSVSVVEELGRKAAEAEARLREKEEENAALKRQIESYHVRWLEHEIRAKALEEAFHEQVAALQDDARMAQGTAHDRRGAGSSEETAAEEDPPPVRLWHGRDRMSSSAGAMRGAVGRLLVVAEFRRQSRTLEHAAEPPPPWQPAAPVANSAADLKKLKAQLRAWAKDYKARLRRAQAGIGRDRWRRGNCWIRTST

SEQ ID NO: 11106 - protein, 76 aa, Zea mays
  VARIANT 10: note = Ancestral polymorphism is A, Derived polymorphism is P
  VARIANT 20: note = Ancestral polymorphism is T, Derived polymorphism is S
  VARIANT 22: note = Ancestral polymorphism is P, Derived polymorphism is R
  VARIANT 33: note = Ancestral polymorphism is H, Derived polymorphism is D
  VARIANT 63: note = Ancestral polymorphism is D, Derived polymorphism is E
  VARIANT 66: note = Ancestral polymorphism is R, Derived polymorphism is C
  VARIANT 68: note = Ancestral polymorphism is V, Derived polymorphism is I
MGLLPLFLRAVARLAACLASRPLPETAATVLFHAGALPRDPALERLVCDDVLDGGGGGEGDCDILRFVVGVMRSLG

SEQ ID NO: 11107 - protein, 685 aa, Zea mays
  VARIANT 522..685: note = Derived polymorphism lacks residues 522 to 685
  VARIANT 511..685: note = Derived polymorphism lacks residues 511 to 685
  VARIANT 504..685: note = Derived polymorphism lacks residues 504 to 685
  VARIANT 503..685: note = Derived polymorphism lacks residues 503 to 685
  VARIANT 246..685: note = Derived polymorphism lacks residues 246 to 685
  VARIANT 147..685: note = Derived polymorphism lacks residues 147 to 685
  VARIANT 144..685: note = Derived polymorphism lacks residues 144 to 685
MFDSLLNSKFYNKCKHAIKCTRTRLDLLRRKKQAMVKFLKKDVADLLTSGLESHAFARMEGLIIEMNQASCYDTIEEYCEYIVKQLSHMQKESECPQEALEAVSTLIFAAARFPDLPELCDLRHIFTERYGSSVEPFVNSEFVQNLQNKSFTDEEKLRVMKRVAEEFSVPFDSRALQWKITCGSQNKHDLPKKSSLKHDMERDGHKVDRHAVHERKSKAMPEGYEQKQEMNVKPKDIHVVPDGIGQLGEKNRKNYSDKPSERRHVDNPLPPLDMKEKNGQKEMKKSGKKDSDRRRELMDVEVLDINGLKKQDVGAMKPSGGPDRSWGHADLGLKTLGIEKQEIDPISTLNGKAVNKPPPYSKPYRAPMGEKVAEDRQPVPEKATNMRPPYVKPNFEKHANQGANGHKQSGTEETIYQKREPIYDPVSVRSRVPRPPAHADEYAGMEEKMANQAPDGRRRHSSKRNGAHDNHDQRVAHVVPPLEGMGVDDDINNARPFHRVPSERRKHKSRQNGSTSGSDYNWASEGHESDGDDVNTSIDFGNLLPRAPSSHRKHRSRSADPRKAGGRGDDEERMMDKLLMHYSKKGLDREERKERANKSRTLFPRDDQRGDGAGELSSKGGGASAHRPERAASLPSESASPKAKAKAKPPARSMSMQPEMSRGNVHPSMPDFDELAARISALRNA

SEQ ID NO: 11108 - protein, 262 aa, Zea mays
  VARIANT 68: note = Ancestral polymorphism is W, Derived polymorphism is R
  VARIANT 70: note = Ancestral polymorphism is G, Derived polymorphism is D
  VARIANT 78: note = Ancestral polymorphism is P, Derived polymorphism is Q
  VARIANT 79: note = Ancestral polymorphism is R, Derived polymorphism is C
  VARIANT 81: note = Ancestral polymorphism is V, Derived polymorphism is E
  VARIANT 83: note = Ancestral polymorphism is V, Derived polymorphism is M
  VARIANT 84: note = Ancestral polymorphism is R, Derived polymorphism is H
  VARIANT 89: note = Ancestral polymorphism is G, Derived polymorphism is A
  VARIANT 96: note = Ancestral polymorphism is R, Derived polymorphism is P
  VARIANT 132: note = Ancestral polymorphism is G, Derived polymorphism is C
  VARIANT 177..262: note = Derived polymorphism lacks residues 177 to 262
MAAADPPPREKVVPTLKRSASIDRIPVDARRILHRLAGDLWGGDMDPGALAVSQLRGAMTNEVFRITWLGGEAEGNGPRKVLVRIYGRGVEVFFDRADEVRTFECMSRHGQGPPPPGPLCQRPRRGVHQLQCTLRLYHPKCVMCLLGSNPRLVFVMAHSRVARVLALPNPLRRGSARPGNVRRDLLPPSTPYSPPRSRDLLRSCHQCPPPPSLSSPSRLRSATVTRCEAAINAHVLLRAATFPGSRALLRRHTFWFSGTPSP

SEQ ID NO: 11109 - protein, 274 aa, Zea mays
  VARIANT 66: note = Ancestral polymorphism is S, Derived polymorphism is C
MIAHFLGFGASVGRNSLAPSPPPVRGARSVHLGRGDLRGDETMLRLSRFLPSACRRGFDLKESLWSGSLTFQQAVSTAATNLDGNLSGKKFASYTVFKGKAALSIHPILPSFSKLESGGSRVSKNGSVMLTFFPAVGQRKYDYTKKQLFALSPTEVGSLISLGPAESCEFFHDPSMKSSNEGTVKKSLSITPLGSDSGYFVNITVVNSAERTNDRLSVPITKAEFAVIRTTLSFALPHIMGWDQALTNHHPAPAPPASSRPTVERPHPDSEWER

SEQ ID NO: 11110 - protein, 196 aa, Zea mays
  VARIANT 29: note = Ancestral polymorphism is R, Derived polymorphism is W
  VARIANT 37: note = Ancestral polymorphism is A, Derived polymorphism is T
  VARIANT 41: note = Ancestral polymorphism is D, Derived polymorphism is N
MRRARLPPVPVPTAPGDAGPEVKYRGVRRRPSGRYAAEIRDPARKTPIWLGTFDSAEAAARAYDAAARTIRGAAARTNFPSAPTSAAVAPPPPLPASTAAAAGAATSSLSSTVESWSGGGGGGAPAGILRAAAAPAAEEDCRSYCGSSSSVLCEDGASGPGCGDEAAAPPPLPFDLNVPDPAADDMDWRCDTLLRL

SEQ ID NO: 11111 - protein, 125 aa, Zea mays
  VARIANT 80: note = Ancestral polymorphism is D, Derived polymorphism is A
  VARIANT 62: note = Ancestral polymorphism is G, Derived polymorphism is V
MASAVTSSDKEQAVPTIDADEAHALLSSGHGYVDVRMRGDFHKAHAPGARNVPYYLSVTPQGKEKNPHFVEEVAAFCGKDDVFIVGCNTGNRSRFATADLLNAGFKNVRNLQGGYRSFQQRAQQQ

SEQ ID NO: 11112 - protein, 989 aa, Zea mays
  VARIANT 319..989: note = Derived polymorphism lacks residues 319 to 989
  VARIANT 816..989: note = Derived polymorphism lacks residues 816 to 989
MVSLKVPKRLAASVLKCGKGKVWLDPNEVSEISMANSRHNIRKLVKDGFIIKKPQKIHSRSRARRAHEAKQKGRHSGYGKRRGTREARLPTKVLWMRRMRVLRRLLRKYREAKKIDKHMYHDMYMKVKGNSFKNKRVLMESIHKSKAEKAREKTLSDQFEARRAKSKASRERKNARREERLAQGPREIPPPVSATAPTTGDCIRNPDSTSISTLQKRYPIIERPTNLLRDTGADQSILSSVPAGPWKIDTMRPLHCHSSRNNSRAAGGPWSARSLALALLPLLSLLSPTGCASSTEQDGVSLLKFLQGLSQDSGLATSWRNGTDWCTWKGITCDADGAVTEVSLASLGLEGRISPALGEMPSLLRLNLSLNSLSGGLPAELLLSRSLLALDVSFNNLNGDLPELPSTFAGQGRQPIKLLNVSSNQLTGQIPPLTLAGMTKLVTLNVSNNSLTGEIPSTICARTPFLSALDLSFNQLNGSVPVNLGRCSALRVLKAGHNELHGTLPDELYDATSLEHISFPNNRLQGALSAERLAELRSLVVLDLAENGLTGGIPDSIGRLERLEELRLEHNSMSGELPPALSRCSSLRTVILRSNGFHGDLNSVDFSTLPRLKVLDFMDNNFTGTVPESLYSCSDLTALRLSSNGFHGQLSPGIGRLKSLRFLSLTNNSFTNVTNALQVLKSAPSLTTLLIGANFRGEAMPEDETIEGYRSLQVLSLADCSLSGEIPRWVSGLENLRELFLSSNRLTGPIPAWLSGLSLLFVLDVSNNSLAGEIPTALADLPMLRSETTVDDDDDDGGSSSQSAFPLPVYMAASLQYHRANYCPKLLNLGDNRLTGAVPPEIGRLKGLTQLNLSFNSLRGEVPQAVGNLTNLEVLDLSSNRLTGKIPRALESLHFLSYFNVSNNDLDGPVPAGGQFCTFPSSSFAGNPGMCGPMLVRRCSAASVEAGLPAPVRDAGLCGGDVVVFAVTFGVFVGVGVLYDQMVLSRYFG

SEQ ID NO: 11113 - protein, 615 aa, Zea mays
  VARIANT 199..615: note = Derived polymorphism lacks residues 199 to 615
  VARIANT 453..615: note = Derived polymorphism lacks residues 453 to 615
MDNNFTGTVPESLYSCSDLTALRLSSNGFHGQLSPGIGRLKSLRFLSLTNNSFTNVTNALQVLKSAPSLTTLLIGANFRGEAMPEDETIEGYRSLQVLSLADCSLSGEIPRWVSGLENLRELFLSSNRLTGPIPAWLSGLSLLFVLDVSNNSLAGEIPTALADLPMLRSETTVDDDDDDGGSSSQSAFPLPVYMAASLQYHRANYCPKLLNLGDNRLTGAVPPEIGRLKGLTQLNLSFNSLRGEVPQAVGNLTNLEVLDLSSNRLTGKIPRALESLHFLSYFNVSNNDLDGPVPAGGQFCTFPSSSFAGNPGMCGPMLVRRCSAASVEAGLPAPVRDAGLCGGDVVVFAVTFGVFVGVGVLINRLTAQGRREDNGYLETSTFNSSLEHGVIMVPQGKGNENKLTFSDIVKATNNFNKENIIGCGGYGLVYKAELPDGCKLAIKKLNDEMCLMEREFTAEVEALSMAQHDHLVPLWGYCIQGNSRFLIYSYMENGSLDDWLHNRDDDASTFLDWPTRLRIAQGASRGLSYIHNDCKPQIVHRDIKCSNILLDKELKAYVADFGLSRLILPNKTHVTTELVGTLGYIPPELATCSGPDNIKRTCPMGAGDELSGKAG

SEQ ID NO: 11114 - protein, 1088 aa, Zea mays
  VARIANT 53..1088: note = Derived polymorphism lacks residues 53 to 1088
  VARIANT 834..1088: note = Derived polymorphism lacks residues 834 to 1088
MLVPIPTRSHAATPRFMQEKPEPEPEPEHTARTSFHRPRALALALLLISISWESCASACGEPERASLLQFLAELSYDAGLTGLWRGTDCCKWEGITCDDQYGTAVTVSAISLPGRGLEGRISQSLASLAGLRRLNLSYNSLSGDLPLGLVSASGSVAVLDVSFNQLSGDLPSPAPGQRPLQLQVLNISSNSFTGQLTSTAWERMRSLVALNASNNSLTGQIPDQFCATAPSFAVLELSYNKFSGGVPPGLGNCSMLRVLRAGHNNLSGTLPRELFNATSLERLSFSSNFLHGTVDGAHVAKLSNLVVLDLGDNSFGGKIPDTIGQLKRLQELHLDYNSMYGELPPALSNCTDLITLDLRSNGFSGELSRVDFSNMPSLRTIDLMLNNFSGTIPESIYSCRNLTALRLASNKFHGQLSEGLGNLKSLSFLSLTNNSLSNITNALQILRSSKNLTTLLLGINFFEETIPDDAVIYGFENLQVLDIGNCLLSGEIPLWISKLVNLEMLFLDGNRLSGPIPTWIHTLEYLFYLDISNNSLTGEIPKEVVSIPMLTSERTAAHLDASVFDLPVYDGPSRQYRIPIAFPKVLNLSSNRFTGQIPPEIGQLKGLLSLDISSNSLTGPIPTSICNLTNLLVLDLSSNDLTGKIPVALENLHFLSTFNVSNNDLEGPIPTGGQFGTFQNSSFLGNPKLCGFMIGRRCDSADVPLVSTGGRNKKAILAIAFGVFFAMIAILLLLWRLLVSIRINRLTAQGRREDNGYLETSTFNSSLEHGVIMVPQGKGNENKLTFSDIVKATNNFNKENIIGCGGYGLVYKAELPDGCKLAIKKLNDEMCLMEREFTAEVEALSMAQHDHLVPLWGYCIQGNSRFLIYSYMENGSLDDWLHNRDDDASTFLDWPTRLRIAQGASRGLSYIHNDCKPQIVHRDIKCSNILLDKELKAYVADFGLSRLILPNKTHVTTELVGTLGYIPPEYAHGWVATLRGDIYSFGVVLLELLTGLRPVPVLTTSKELVPWVLEMSSQGKLVDVLDPTLCGTGHEEQMLKVLGLACKCVNNNPAMRPHIMEVVTCLESINVGLQAQKSVKTIQLASYT

SEQ ID NO: 11115 - protein, 150 aa, Zea mays
  VARIANT 27: note = Ancestral polymorphism is G, Derived polymorphism is R
MPTTMAAAAAASAPSSLRVSRQGTIGGGHVLYSRSQRAATVSARASMNITCCANQTQTAQRKSYSGTTSPPSGSVKEKVKPRLDDGGVGFPPFRFGGGGGGGGGGGSSSSGGFILFVVVLLLDYLKEFERNLQNGPRRSGGGYDDGLAPQ

SEQ ID NO: 11116 - protein, 393 aa, Zea mays
  VARIANT 162: note = Ancestral polymorphism is S, Derived polymorphism is Y
  VARIANT 180: note = Ancestral polymorphism is V, Derived polymorphism is G
  VARIANT 182: note = Ancestral polymorphism is D, Derived polymorphism is Y
MEHTDIAELEHSDIAEMEHTDIAELQADIVDEATFLDCSSIVNLVAGEETEVVNTEDGLGCEDDGDVDKVLHDSVDDTILIDCSSENVEMEKAGNVTREMPENQAALDEDVDKPNEVVIGDMPQDTVTDKVVQEEREVLITDEMQQGTAGMHDEIEDDQFESVFVQADRVVTVDNLLEQVIYREITVDENTTLIVGERQQSTNAMDEDVVEDHSETDGDHSNEHIEAVTTDKVPELKLIEDIFVQSDHAVAADNLPKQVRDCEITLETTSLIVDEKQQIMVTVDGDLVKDDSETDNVHDDEHMEVVTADEVLEDTGITVEDVEEKQKSTVTVDKDMEASTTDEVLELTEADYEVVDEKQQSTYTMNGCIENDHFKNHVAHADEKKEVVATDVP

SEQ ID NO: 11117 - protein, 271 aa, Zea mays
  VARIANT 50: note = Ancestral polymorphism is R, Derived polymorphism is G
MQARVVVFPVKGRAWCFALPRASAAAPAADGALPRPTLRDLWRGISSGSRTAPEKAEAVVDFVADKMNRAWVGFGSAPEGSMKSRIHSFGLKLLSRVRPSEVLLKSVTKDVSALEIVHPASINSRLVRRRLRHIAVRGASVHKKFLYGSVCLLPVTSVFMVLPLPNIPFFWVLFRAYSHWRALQGSERLELLVSDCSDKWKVLEEKINSVKDGKPSENARNSPWKLRPSEKLDRFLEGRNLDEGLDCDTILSICQEYDLDKIDVLKYRDLL

SEQ ID NO: 11118 - protein, 660 aa, Zea mays
  VARIANT 162..660: note = Derived polymorphism lacks residues 162 to 660
  VARIANT 587..660: note = Derived polymorphism lacks residues 587 to 660
MEKGDVLVDLDKLPMKRLEAIDETGNEHYPPDTSNEEQRLAAIRRIDFSWVIEKDAKKAKKAAEADTTQQAWPWQGLMESLQQAHQELSVVIDLIGTVEANDAMAVASTTKPKSQPNEILVDMAVCAATKLQCLRHLSRYFKQSATTMEQQFQKETRFYSSLIRLQQNWKVKRQRSVGSPGSEGFMFDLVDTSQLDTTTMPRLSPLSLIPIDQDSSGTLSVQIPQKCFHSLSLRFHGDIANNAESSAVKRKEGTLTNTTTGAENDVLENDDVNKSTEHAHSILRDIHKSIFEEQVFDMVIQETFIQSQGINVTGMCEDFLQLAIGQECSLCLSHDLSGQNNNSGTVGQEDHMDIDHTGNLAVATVNGKESSNKDVRGFPNPKSLEIYLLHVFHEGILRKLREKSRHVVRYQSSAQGTPDECGLLSHFCMTVSHRIFSSKVHLELESVVSRVPYLHLCSLPTWHSRTSSWSLCLKVPQPILATDRVRRPSDYSELKCKSRSQFGTKVILKDGQISLMGEGSPSIAGSLAGKPSDGRLVNSYNCDLEDLPMMLLQQVASQVIHWLHDEAVVLGMNATIDFLCLYLDLDQGETLGLVAHVDPDDTYGCVSWYLTLDHHPTEEGKMSAGSPELEERRFLGYLSPELLYSTLMDLVKLCSTGVQR

SEQ ID NO: 11119 - protein, 760 aa, Zea mays
  VARIANT 176..760: note = Derived polymorphism lacks residues 176 to 760
  VARIANT 398: note = Ancestral polymorphism is T, Derived polymorphism is I
MPAAPVTSGPVIDPAKCRLMSVDEKRELVRDLSKSPESAPDRLQSWTRREIVEILCSDLGRERKYTGLSKQRMLDYLFRLVSGKSSGPVEHVQEKEKGREKGKEREKESIPEPNTTNHHQSPAKRPRKSDNPSRLPIITNNSAASDVTGPTNNSRFCQNVACRAILRDNFCRRCSCCICFSYDDNKDPSLWLSCSSDQHLQKDTCGFSCHLECALKDERTGILQSGQCKKLDGGYYCTRCWKQNDLLGSWKKQLVIAKDARRLDVLCHRIYLSHKILVSTEKYLVLHEIVDTALKKLEAEVGPISGAPNMSRGIVSRLTVGAEVQKLCAQAIDAMESLFSGVSPAGSRIPRPCMVPPNFVKFEAITQTSVMVFLDLVHYPMLAQEATSFNIWHRMAVTEAYLTNPTGIILPPSKKLPVTGLAPATSYIFKIIAFKNSIELGSWEIRTKTSYQKDDPRGSMPGGTRLGHNSESLKANSDGQSDPSSEGVDSNNNTAVYADLNKSPESDFEYCENPEILDSDKASRRLSEHIDDLQNIQMAADRVTEVTELEESPGLSASALDEEPNACVQAVLLREPNPLGHNQRTVVPRSQHASNVLGGNELVIVGPRYAGSVPPIATRGLENSKESGGRGFKPKPCNNIFQNGSSKPEREPGNSSNKRTAGKTEDLGHKDSSSEVSYEYCVRVVRWLECEGYIETNFRVKFLTWFSLRATPQERKIVGVYVDTLIEDPVSLSGQLVDSFSEAVYSKKRTPSGFCMDLWH

SEQ ID NO: 11120 - protein, 322 aa, Zea mays
  VARIANT 14: note = Ancestral polymorphism is A, Derived polymorphism is D
  VARIANT 167: note = Ancestral polymorphism is V, Derived polymorphism is A
  VARIANT 194: note = Ancestral polymorphism is S, Derived polymorphism is R
MMHRLVVEARRRAAPVAMAAGGVAGGERWMSSSAASKGRLVGKIALITGGASGLGKAAAREFIEEGAGAVVLADINSKLGLETAHELGPDAHFVHCDVAVEDSVAAAVDAAVARHGRLDVMLNSAGVVGPLTPGTSRVASLDLAQFDSVMSVNVRGTLAGIKHAARAMLAAAPAGAGGGGGGAGGSILCMASVSGILGGLGTYPYSVSKFAIAGIVKAAAAELSRLGVRVNCISPYAVPTPMVLGQFSAMLGGAADEAQVAAIVRGLGELRGATCEAVDIARAAVYLASDDAKYVSGHNLVVDGGFTSYKHMNLPFPTKPHE

SEQ ID NO: 11121 - protein, 473 aa, Zea mays
  VARIANT 104..473: note = Derived polymorphism lacks residues 104 to 473
  VARIANT 93..473: note = Derived polymorphism lacks residues 93 to 473
MSSSCIPTGLRLDLDMVKAAASPVGAHSSPLRPAHYSSPSSTLSSEASNASSSSATSVSLKRARAPRKRPNQAYNEAAALLASIHPSVFPVNKSPKTAPPRPPQLSVLAAALDASPDLLPPLPVLADSAFLLRDQDTPSPKPRSPSGAKNCPSPAPVSSAFRDFRDPPSSASLDAVGADELGEIDFDDDGFNADSILDVGDAAAGGLDGIMGSLTVDVESGTAARSDDSILSSSGIHPYLRRLMVVGLAGRFELGLGSQHGARPSLNRALKRRDDDGAWWMWPAVPVKDLTIAPPAPPAPPAPNAAVPQAAAAAAPEKKKSKKKKVVKAMAKGNEELLPNAKCKEEEADASVDDAAANGDGDSDSAPTNAPKAGLGLKLDADEVLKAWSDKGSMFAEGSGPELPTSAAEVRAKLADIDLFPENGAGGGGVREASVLRYKEKRRTRLFSKKIRYQVRKVNADCRPRMKASTRTD

SEQ ID NO: 11122 - protein, 423 aa, Zea mays
  VARIANT 194..423: note = Derived polymorphism lacks residues 194 to 423
MGKHEFLTPKAIANRIKAKGLQKLRWYCQMCQKQCRDENGFKCHCMSESHQRQMQVFGMAPDRVVEGFSEEFLESFLSLIRRAHRHSRVAATVVYNEYIADRHHVHMNSTRWATLTEFVKLLGREGYCKVEDTPKGWFMTYIDRDSEQAVKDRLKRKRIKSDMAEDERQERMIARQIERAHKSLAKPNDGDAAEGEPESGGEEEYSGSDDDGEELEDVSKEANKATGKIAIALQTAVRGPKVNPFEDKPEVKFRFDEEGDLGTGEEKDELAKKKGKDVKAADARRSALDELMKEEEMAKERSNRKDYWLCPGIVVKVMSKSLAEKGYYKQKGVVRKVMDKYVGEIEMLESKHVLRVDQDELETVIPQIGGLVRILNGAYRGSNARLLSVDTEKFCAKVQVEKGLYDGKVLRAVKYEDICKISS

SEQ ID NO: 11123 - protein, 132 aa, Zea mays
  VARIANT 50: note = Ancestral polymorphism is F, Derived polymorphism is L
  VARIANT 104: note = Ancestral polymorphism is G, Derived polymorphism is V
  VARIANT 131: note = Ancestral polymorphism is C, Derived polymorphism is G
MGEQGRPSSNRIRDIVRLRQLLKKWKQIALSPKAGKSGGGGGSHGVPKGFFTVCVGKEMERFVIPTEYLGHWAFEELLKEAEEEFGFQHEGALRIPCDVKAFEGILRLVGRKDAAAADRYCSSQHGMMILCR

SEQ ID NO: 11124 - protein, 760 aa, Zea mays
  VARIANT 97: note = Ancestral polymorphism is R, Derived polymorphism is S
  VARIANT 115: note = Ancestral polymorphism is D, Derived polymorphism is H
  VARIANT 534: note = Ancestral polymorphism is E, Derived polymorphism is V
  VARIANT 559: note = Ancestral polymorphism is P, Derived polymorphism is L
MWRLRIAEGGGDPWLRTKNAHVGRQVWEFDASADPDPAVDAARRAFAGSRGHLKHSADLLMRIQFAKENPLELDLPAIKLGEHEDVTEEAVSTTLRRAISRLSTLQAHDGHWPGDYGGPMFLMPGLLLIVIILYPDHNIVCDWSTKHCLVIRTPEGDPSNEDGGWGLHIEGPSTMFGSALTYVTLRLLGEGPDSGDGAMEKGRNWILDHGGATYITSWGKFWLSVLGVFEWSGNNPVPPEVWLLPYLLPFHPGRMWCHCRMVYLPMCYIYGKRFVGRITPLVLELRKELFKDPYSKIDWDKARNLCAKEDLYYPHPFVQDVLWATLHKFVEPVMMSWPGSKLREKALETAMQHVHYEDENTRYICIGPVNKVLNMLACWIEDPNSEAFKLHIPRVYDYLWLAEDGMKMQGYNGSQLWDTAFIVQAIVATNLTEEFGPTLKLAHNYIKKSQVLDDCPGDLNDWYRHTSKGAWPFSTADHGWPISDCTAEGLKASLLLSKISPEIVGGPIEANRFYDAVSCLMSYMNDNGGFATYELTRSYAWLELINPAETFGDIVIDYPYVECTSAAIQALTSFRKLYPGHRRKEVDSCISKAANFIESIQKSDGSWYGSWAVCFTYGTWFGVKGLIAAGRTFESSPAIRKACGFLLSKELPSGGWGESYLSSQDQVYTNLKGNRAHAANTGWAMLALIDAGQAQRDPAPLHRAAKVLINLQSEDGEFPQQEIIGVFNKNCMISYSQYRNTFPIWALGEYRCRVLGAGKR

SEQ ID NO: 11125 - protein, 520 aa, Zea mays
  VARIANT 71: note = Ancestral polymorphism is A, Derived polymorphism is T
  VARIANT 91: note = Ancestral polymorphism is A, Derived polymorphism is V
  VARIANT 174: note = Ancestral polymorphism is K, Derived polymorphism is N
  VARIANT 379: note = Ancestral polymorphism is F, Derived polymorphism is S
  VARIANT 401: note = Ancestral polymorphism is G, Derived polymorphism is E
MGAQEEAVDEMLRAAAAEVSTSSVKRRLRIFHHTLPPLIAKAIESPSDTVLLVDLIFQTLPIYDDRASRKAVDDLVIQALGEPTFMKPFAAVLVQSMEKNLKVTNPLTSLKLLRWSHYLLKWSQFATLTKGAFTRLANAQAVLCQVLMDGSFRRRRTCKQLFIHLFSEHSGIYKMYIEELRDLRISMRDSPAFLNLILDFTITSPSLSTQYQSVFLDLYVKIILSSKDRPPKAATEAFKPLFLNIGHEDFKNTIIPSCIKMLKRNPEIVLQSIGYLLKTVHLDLSKYSMEFMPVVLHQARHSDEERRINALSIIGTLSEKSSDPDALPSMVNAIKAVLGGSEGKLSLLYQRIGMINALEQLSRSPPKQIGRLAPSVSTFLLTCYKDDGIEEVKLAILSAIGSWALVSAEAVQPDVVSFIAAGLKEKDTLRKGHLKFLRVICKNSESLTKVASLLDHLIQLSKTGFSKATQRLDGIYALFAVSRLAAVDTKADGAILKEKLWTLIAQNEPSLISLQLVILF

SEQ ID NO: 11126 - protein, 1615 aa, Zea mays
  VARIANT 1067..1615: note = Derived polymorphism lacks residues 1067 to 1615
MKVGQVQKDLSLMLDALGKLAIANPIFTHGQLPSLVNYVEPLLSSPIVSDAAFCTMLRLARCTAPPLCNWALDIAAAIRVISVGDFEMVLDLTPVIMEDDSKKPSSGIFEQIVNGLTIACKAGPLPADSFTFVFPVLYHVLSTVPAYQPSVGPMLNELCLGLRGHELAQALVGVYAKELHVRLACLTAIKCVPVHSVQRDLQVSTSLWIAAHDPEKVVAELAEELWDRFGFDAITDYSGIFNALSHKNYNVRAASAEALAAALDENQDKMQDALSTLFSLYIRDIGTSVEFGDAHWLGRQGIALALHSIADVLASKDLPVVMTFLISRALADPNVDVRGRMINAGILIIDRHGKENVPLLFPIFESYLNKRASTTFLLIIASDEKTYDLVREGVVIFTGALAKHLSKDDPKVHSVIEKLLDVLNTPSEAVQRAVSDCLSPLMVSKQEEGQALVSRLLDRMMKCEKYGERRGAAFGLAGVVKGFGISSLKKYGIAVTLQKNLEDRMSAKSREGALLGFECLCEKLGKLFEPYVIQMLPFLLVCFSDQVLAVREAAECAARAMMSQLTGPGVKLVLPSLLKVGSVIKNPEISALVPILLSALMDPNAHTKHSLDILLQTTFINSIDAPSLALLVPIVHRGLRERGVETKKKAAQIVGNMSSLVTEPKDMIPYIGLLLPEVKKVLVDPIPEVRAVAARALGSLISGMGEEIFPDLVPWLLDTLKSDNSNVERSGAAQGLSEVLAALSQDYFDHILPDIIRNCSHQKASVRDGHLTLLRYLPRSLGGVFQNYLQAVLPAILDGLADENESVRDAALSAGHVFVEHYATTSLPLLLPAIEDGIFSDNWRIRQSSVELLGDLLFKVAGTSGKAILEGGSDDEGASTEAQGRAIIEVLGREKRNEVLAAIYMVRSDVSLTVRQAALHVWKTIVANTPRTLKEIMPVLMDTLIASLASSSSERRQVAGRSLGELVRKLGERVLPSIIPILSQGLKDPSASRRQGVCIGLSEVMGSAGKHQLLSFMDELIPTIRTALCDSTQEVRESAGLAFSTLYKSAGLQAIDEIVPTLLRALEDDDTSATALDGLKQILSVRTAAVLPHILPKLVQPPLSSFNAHALGALAEVAGPGLNSHIGTVLPALILAMDDEDADVQNSARKAAETVLLVIDEEGVETLIPELLRGINDSQASMRRGSAYLIGFLFKNTKLYLADEASDMMSTLIILLSDTDKATVSAALEAFSRVVASVPKEQLPTHIKLVRDAVSTARDKERRRRKGVPILVPGLCLPKALQPFLPIYQQGLISGSAETKEQAAEGLGELIDVTSEKTLKEVVVPITGPLIRILGDRFPWQVKSAILSTLTIIIMKGGIALKPFLPQLQTTFVKCLQDNNRSVRARAAAALGKLSALSTRVDPLVSDLLSMLQSGDESVKESVLSALKGVIKHAGKSVSSAIRSRGCALLEDLLQAEADDVRSCAAKVIGTLSQFPVREVATRTLGKILCFELQPEAGTLQLVQLLILALRDDSSEVRRRSLSCIKAAAKTNHSALATHHSILGPAIAEALKDSSMPVRLAAERCALHVFQLTKGPDNVTAAQKYLGMTGLEVKKIAKLDVDSDGSESSDDDKRT

SEQ ID NO: 11127 - protein, 829 aa, Zea mays
  VARIANT 172: note = Ancestral polymorphism is M, Derived polymorphism is T
  VARIANT 623..829: note = Derived polymorphism lacks residues 623 to 829
MLSKIKGQQGCRYWGGSGDEQDLIDSIRQHLQGKSYFIVIDDLWATSVWDFLSRAFPKDNCGSRIVITTQVTEVAFACCNNHTVDIFNMKPLDDDQSLQLFYSRVKHINGYNAEECKAISHGIVSNCGNLSPLAIINIAGMLAGWADFNMNDWEYVSKCCTSTANLTTEEATERFLNLMYNKLPAKLKTCLLYLSMYPEGCVIGKDDLVRQWAAEGIFSQVVEPKGREHEVGFIYFDELLKRGLIQPVDTDYNDQVLSCIVHQVVLEFITKKSMQENFITVVDYRETGTVLDDNKVHRLSARFEGAKSAQIPRSFRVRQVRSFMFSGFIKSLPSLLKYCLVRVLILHVWSDDQGKTVVLDLSPVGNMLHVRYLKVVSNMIVKLPLIIRGLRHLETLEVDAEEVAVPLDVFILKSLLHLRLPSKAYQPDSDIQRIDLTNTFPLRFLPFVRALSMLGRFLLSHGHRIRHLTSLQSLGYFDLSTCSRYTVWQLGKLTNLRDLHLTCSAVRSRHRISNIQCLASVLGKCTSLESLTIRGEASSNQSISFDGLSSLSSPPYNLVSFVLSPRIFKMAKLPKWIGQLSRLSTLKIAVGELSSEDVDILKGLSALTALSLYVRRNPKKGSWILFSKGFAVLKYFKFTCTALCVKFSEQAMPAVQRLIVCFNANTMQQYRPEDAGIWYLSGLQVISARIGAAGIDQASREAAKSRLLDAILSNHPKPPPIRNVQMVDWVIHGDTEECSTGVMIRKDESSREHTRSFLSQFPFRRRPLLPSIFTRRGQDDEQHKIEENDVLQDSIILRKSSSLMQKPGTLHSYICLLIIILHHIYSVLV

SEQ ID NO: 11128 - protein, 490 aa, Zea mays
  VARIANT 326: note = Ancestral polymorphism is P, Derived polymorphism is L
  VARIANT 312: note = Ancestral polymorphism is T, Derived polymorphism is M
  VARIANT 303: note = Ancestral polymorphism is T, Derived polymorphism is M
  VARIANT 170..490: note = Derived polymorphism lacks residues 170 to 490
  VARIANT 164: note = Ancestral polymorphism is V, Derived polymorphism is I
  VARIANT 159: note = Ancestral polymorphism is G, Derived polymorphism is D
  VARIANT 158: note = Ancestral polymorphism is D, Derived polymorphism is G
  VARIANT 145..490: note = Derived polymorphism lacks residues 145 to 490
  VARIANT 113: note = Ancestral polymorphism is P, Derived polymorphism is S
  VARIANT 107..490: note = Derived polymorphism lacks residues 107 to 490
  VARIANT 79: note = Ancestral polymorphism is P, Derived polymorphism is S
  VARIANT 56: note = Ancestral polymorphism is S, Derived polymorphism is L
  VARIANT 54..490: note = Derived polymorphism lacks residues 54 to 490
  VARIANT 43: note = Ancestral polymorphism is A, Derived polymorphism is S
  VARIANT 39: note = Ancestral polymorphism is P, Derived polymorphism is S
MELELAPAPPVNGAGGLTARRIVAAHWLPLRAAEDPDSPFGFAFSIDHEAVAFQLSRGLPMPVTFIGTLPTSVESKVVPSDYLMENFSCLPVYLDDGRHSEFYDDFCKHYLWPLVHYLLPLSPAHDADLRFDTGMYRTFLAVNMQFADRVIEVFSPDDDDLVIVHDYHLWTSDYARHFMTCYSGHLSVSSGARSGHTASITYHGRNVVVKTLSVGLDMVQLRDTLASPEATAKAREIADAYRGQTLIVGVNDVDRFKGVKLKLLAMEKMLESHSDVHEQVVLVQINNPTRSRGRDVDGIRDETHQILQRINMRFARAGTASSGPAPVVMIDGPVPMSEKVAYYAAADCCVVSAVRDGLNRVPYFYTTCREEAPDAQKGSAVVVSEFAGCSPTLGGAIRVDPWDLDGMADAMHATVTTMSTEEKQARHRGNYDYLHANDAVTWAQAFDDALQLACKDHSMMWFVSFRLGMSYRAAAIQPSFRMLATATHLL

SEQ ID NO: 11129 - protein, 148 aa, Zea mays
  VARIANT 90: note = Ancestral polymorphism is K, Derived polymorphism is R
  VARIANT 91: note = Ancestral polymorphism is E, Derived polymorphism is D
  VARIANT 100: note = Ancestral polymorphism is S, Derived polymorphism is C
MALRRIIKELKDLQRDPPTSCSAGPVSDDMFHWQATIMGPSDSPYSGGVFLVAIHFPPDYPFKPPKVAFKTKVFHPNINSNGSICLDILKEQWSPALTVSKVLLSVCSLLTDPNPDDPLVPEIAHMCKTDRLRYESTARGWTHKYAMG

SEQ ID NO: 11130 - protein, 232 aa, Zea mays
  VARIANT 113: note = Ancestral polymorphism is P, Derived polymorphism is S
MSASRFIKCVTVGDGAVGKTCMLISYTSNTFPTDYVPTVFDNFSANVVVDGNTVNLGLWDTAGQEDYNRLRPLSYRGADVFLLAFSLIILQNPFLNRINIDGSQTFCLLTLNPFYFQWIPELKHYAPGVPIILVGTKLDLRDDKQFFVDHPGAVPITTAQGEELRKQIGAPYYIECSSKTQLVLPSAQSFAKHAQYYVENVKGVFDAAIKVVLQPPKAKKKKKVQRGACSIL

SEQ ID NO: 11131 - protein, 584 aa, Zea mays
  VARIANT 499: note = Ancestral polymorphism is K, Derived polymorphism is I
  VARIANT 250: note = Ancestral polymorphism is P, Derived polymorphism is S
  VARIANT 172..584: note = Derived polymorphism lacks residues 172 to 584
MAASALLTGSPWLRMRLLPDAPARPFRRLHLCRALSARASAATGGAEGNSGPVRVRFAPSPTGNLHVGGARTALFNYLFARSKGGRFVLRVEDTDLERSTRKSEEAVLADLAWLGLEWDEGPDVGGEFGPYRQSERNSLYKKYAEKLLDSGAVYRCFCSNEELEQMKEVAKQRQLPPVYMGKWASASDAEVHQELEKGTPYTYRFHVPKEGSLKINDLIRGEVISDSFIKVSWNLDTLGDFVIMRSNGQPVYNFCVTVDDATMQISHVIRAEEHLPNTLRQALIYKALGFAMPSFAHVSLILAPDRSKLSKRHGATSVGQYKEMGYLPQAMVNYLALLGWGDGTENEFFTIDDLAWCYFSFAVHKFTINRVNKSGAVFDATKLKWMNGQHLRSFPHDELIKAFEDRWKDTGILQESESSFAKEAAELLKDGIDLITDADAALTNLLSYPLHTTLSSEEAKPVVQDKISEVASSLISAYDSGELTQALAEGRDGWQKWVKGFGKSIKRKGKGLFMPLRVLLTGKLHGPDIGGAIALIHKAGVCGAVTPQSNFVTLDERFRVLKEIDWDSLAKEQETPAESAVPAT

SEQ ID NO: 11132 - protein, 249 aa, Zea mays
  VARIANT 203..249: note = Derived polymorphism lacks residues 203 to 249
MAAAARQRGTVKWFNDTKGFGFISPEDGSEDLFVHQSSIKSEGFRSLAEGEEVEFSVSEGDDGRTKAVDVTGPDGSFVRGGGGGGGGGGGYGSRGGGGSGGGGRSYGGSWGGGRRSGGGGGPGACYKCGEPGHMARDCPSADGGGGYGGGGYGGGGYGGGGGGGGGCFKCGEPGHMARDCSSGGGGYGGGGGGGGGGCYNCGQAGHMARDCPSGGGGGGGRFGGGGGGGGDRSCYNCGEAGHIARDCPT

SEQ ID NO: 11133 - protein, 719 aa, Zea mays
  VARIANT 401..719: note = Derived polymorphism lacks residues 401 to 719
MPLSPSGAAGGLLRRCPRAAVLPAAAAAATTARLEAMQIGDRYGRKASLEAFVFSSLSFSQMLLVAPSWNMDPCCLKRQFAKTVPCLAVLATRLPRRHACFVTLIAAAYRSSSPGYSGKEMRGEEHRAALRQKRLKKAKCFKWRPSKGDMDSKVEAGGAGSGQVCDDAVLCSLSTASFSGLVSWQRVRTLGKVAEGCDAADPPVPRKLRSAINKRAGRFASAPSRHVKKRRHLSAISAQISSVGQETRSNGSSLFTEQEEAIADVLLSLSQVPSHSEVTADKAVADSSNTNDASTSFSKGPTKEDDQTAELPSAANELASQCACINKAVEQSNIVPNADPVAAAANQSSNSIPLLSANEQMQDLSMETAVNLPSPSKDTSINSAQKHHELQFDDSKCHPAQKPEAPLWLVNSDQSEGVLLHEREKAKNNSAQDSVALYPSWVLSKHPVLRNVGAPKAWKRSITHVYVSHVIQMHVNKEKAAASSSLQSQARPEERLLARCPRPPNGSSTTSHKAAAARDERLYTVHFDVRVPAHQPPAGICDAGAGRQKIVSGSSWQNLPATSAAAAAAAQHVRYLHPQMARPPATPRDATPYSFPHFPYSRGSLPPAAALQQMPQYVCGPAYGLRPASSSAMMMKQLQQPMPTQQQHQQMWQYHVSQYQPRPDATLSPAAAWHGISSSLRPMGMLAPPEMPSPPRPPQMELFCAPYQGGRQPQQLRLM

SEQ ID NO: 11134 - protein, 352 aa, Zea mays
  VARIANT 47..352: note = Derived polymorphism lacks residues 47 to 352
MLPPPVPAWAAVGLSRPASFPSTHAASLPILPPLSSSAPLRSCVAVECRPGLHSIPPVARSPRAAGAPVPSVPGIKMIGSFITGMLTLVLGYAYPAYDCYKTVELNRPEVEQLRFWCQYWILLAFLTVLERVGESFVSWLPMYSEAKLAFIVYLWYPKTRGTAYVYESFFKPYIAKHETEIDRNLLELRTRAGDMAVLYFQRVTNYAQTRSYEILQYIASQSPTQRQAHQQQQRPPPPRTRQVNPAPPPIPAPSAPPMPPQPAQAQVPPTPPRPLVPVVPPGAVPPAPPPTAPEATATNGLQDTETMQVDPPRASLSGPPLPPEETLIEEAIRLTRGRLRRRLAGGSGPPQN

SEQ ID NO: 11135 - protein, 445 aa, Zea mays
  VARIANT 308: note = Ancestral polymorphism is P, Derived polymorphism is S
  VARIANT 287: note = Ancestral polymorphism is A, Derived polymorphism is T
  VARIANT 273: note = Ancestral polymorphism is A, Derived polymorphism is S
  VARIANT 242: note = Ancestral polymorphism is Y, Derived polymorphism is F
  VARIANT 189: note = Ancestral polymorphism is Y, Derived polymorphism is H
  VARIANT 97: note = Ancestral polymorphism is S, Derived polymorphism is L
MMMSTVDRRRLNMHGCTALHIPADDVLRRFTDDDDSGGEFRLDLSKDIRGLLSLHDMSHLDMGGEELLCKARVFSRHHLASAVRYLEPSLGEYVRQSLDHPYHLSLTQYKARHHLAYLQSLPVRDTALERLVAAEFQLNRSLHQKEMQAIKRWWMELGLVQEIPVVRDQVLKWYMWSMTALQGRSFSRHRVQITKIIALVYVVDDIFDLVATLDELSLFAEAVKMWNSTAAESLPSYMRSCYKALYTVTNEIADTAEKEHGLNHVNHLRKAWAALFDGFMVEARWLATDKVPTAEDYLTNGVVTSGVPLTFVHIFIMLGCDDDQSTQALVDHMPSVISCPAKILRLWDDMGSAEDEAQEGFDGSYRDFYLMENPRCSRSDAEAHMRSLIAREWEELNRECLCKRTFSSSFTHVCLNAARMISVMYSYNKEQRLLVLEDYARMLIL

SEQ ID NO: 11136 - protein, 991 aa, Zea mays
  VARIANT 386..991: note = Derived polymorphism lacks residues 386 to 991
MLAFEQQVLADLVEDPNGGLVVLSSGLPLASLAATLLLHLHQTPGNAAGGGCLLVLSATDTLKARIRRRLQDKLQVHDVPPDLAAQQRATLYASGAALFLSPRALAADLLTSRLLPSRVQALLLLSAHRSTDTSSDAFICRLLRQRNLLPVYAFSDCPHAMVAGFSKAERTMKSLYVRRLHLWPRFHVLAAADLERAPPDVVDVRVPMTPPMRGIQAAVLATMDACLKELRRTNKVDVEDLTVDKGLFKSFDEIVRRQLDPIWHTLGKKTKQLVADLRTLRKLLDYLVRYDAVTYLKYLDTLRVSEGVRSVWILADSSHRIFELAKRRVYQAVRTDGVNVSIDNKGTPTKKRKVAHNSTKKGKVTGSCSWPLHLQVPTLRRLILMWALYWKRFWRRHRNGKCYGLQELLQEIAEQRMKSSAGNVHDEDKNDESGIVLVSCKDERTCLQLQECILKGPCQVMREEWEKYLIGKAELHGLNKDKRKSEQPKGVGVLDGEVQMGSSESVCPVSISKLETNALLAAASELRNISNEADVKSSSNSSCSKAGGAKGKPKKTTSKRQGSNRKNKSKEGNDNSQGTGLDSEGQSGKADVQAEIVASKMSAYDASMSASTSNVKFNHSSAFGNLANAKPLPPVQFHALDSDHQVLDVWKPSVIIVYHPDITFVREIEVYKAENSSRKLKVYFLFYEDSTEVQKYESSIRRENEAFESLIRQKSLMMIPVDQDGRCIGPTVANEPEPPLCQNSITRKAGGKKAPEKEMQVIVDMREFMSSLPNVLHQKGIRIVPVTLEVGDYVLSPLICVERKSIADLFQSFASGRLYNQVETMARYYKIPVLLIEFSQDKSFSFQSANEIGDDVSPTNIISKLSLLVLHFPRLRIIWSRSLHATAEIFMSLKTNQDEPDEKKATRVGVPSEDGIVEDDVRSENYNTSAIEFLRRLPGVTDSNYRAIMDGCNSLAELALLPVERLAELMGGQKAARTLKEFLDAKCPTML

SEQ ID NO: 11137 - protein, 286 aa, Zea mays
  VARIANT 57: note = Ancestral polymorphism is E, Derived polymorphism is Q
  VARIANT 74: note = Ancestral polymorphism is A, Derived polymorphism is V
  VARIANT 104..286: note = Derived polymorphism lacks residues 104 to 286
  VARIANT 151: note = Ancestral polymorphism is P, Derived polymorphism is S
  VARIANT 183: note = Ancestral polymorphism is K, Derived polymorphism is M
  VARIANT 242: note = Ancestral polymorphism is L, Derived polymorphism is F
MPQGTLPCYECRVLKWYMWSMTALQGSSFSRFRVEMTKIISLVYVVDDIFDFVGTLEELSLFTEAVKMWDTVAADSLPSYMRSCYNALYTITNEIAEMAEKKHGLNSINHLRKAWATLFDGFMVEARWLAIDQVPTAEDYLRNGVVTSGVPLTFVHIFTLMGCEQSIEALIDQMPSVISCPAKILRLQDDMGSAKDEAQEGFDGSYRDFYLKENPRCNRNDAEAHMRSLIAREWEELNRECLYTRTFSSNCTRVCLNTARMIGVMYSYNKEQRLLVLEDYAKMLIL

SEQ ID NO: 11138 - protein, 211 aa, Zea mays
  VARIANT 158: note = Ancestral polymorphism is A, Derived polymorphism is T
  VARIANT 44: note = Ancestral polymorphism is P, Derived polymorphism is S
  VARIANT 40: note = Ancestral polymorphism is S, Derived polymorphism is I
MAGMTDMPMRPARPGPPMQHRGPPPMARLRPEPIDREKVSSYTPCVPLAHGVSLLNLPSAAQGFHKDSAERFESSNYDIFLKGQFTASLLTLGIILEMKKLIISYCFQVAGHHQNEEFSVRGKEPKDEVQIYTWKDATLRELTDLVKEVALPARKRNARLSFAFVYPDKNGRFVVRQVGSTFAYGHGRGDDAKTLAELGFQIGDYLSVAIM

SEQ ID NO: 11139 - protein, 1000 aa, Zea mays
  VARIANT 538..1000: note = Derived polymorphism lacks residues 538 to 1000
  VARIANT 458..1000: note = Derived polymorphism lacks residues 458 to 1000
  VARIANT 367..1000: note = Derived polymorphism lacks residues 367 to 1000
  VARIANT 350..1000: note = Derived polymorphism lacks residues 350 to 1000
MEGVHSLLARPNSAPFAFSPLPLRRSHRPPPPGPSTCRAASRWADRLFADFHLLPAAADPPAAASSSSSSPFVPIFPEAADRALPLPVDFYKILGAEPHFLGDGIRRAFESRIAKPPQYGYSTEALVGRRQMLQIAHDTLTNQSSRTEYDRALSEDRDAALTMDVAWDKVPGVLCVLQEAGEAQLVLATGEHLLQDRPPKRFKQDVVLAMALAYVDISRDAMAASPPDVICCCEVLERALKLLQEDGASNLAPELLAQIDETLEEITPRCVLELLALPTDEKHKNKRQEGLQGAKNILWSVGRGGIATVGGGFSREAFMNEAFLQMTSAEQMDFFSKTPNSIPPEWFEIYSVALAHIAQAIASKRPQFIMMADELFEQLQKFNIGSQYPYENEMDLALERALCSLLVGDICNCRMWLGIDNESSSYRDPKNIEFVVNNSSMNEENDLLPGLCKLLETWLVSEVFPRSRDTRGTQFRLGDYYDDPKVLSYLERMEGGGASHLAAAAAIAKLGAQATAALGTVKSSALQAFSKVFPLTEQLDMSGKDIPSDDLDKSLEKLAQGSVAGDAIHDSRNDALKIISAGTLLALFAVLGLKCLPRNKSLPALRGEYGSVAVVDSIDGPAADEEPLEIPRMDAKLAEDIVRRWQSIKSKALGPEHTVTALQEVLGGNMLKVWADRAAEIERHGWFWEYALSGVTIDSITVSVDGRRAAVEATIEEVGRLTDVTDPKNDDAYDTKYTARSSETIDLNEGGSASLLTTSLRQTRSLLRLYPADSEEFQPVVPVVKAEPLKNQWADEDVEEDDVKESWEEEEEEEKPKPAPVEKVAAKPSTKAPAKKGKQQALTSAEEPDEPPLSPTSQKIRQQRLVEEADFKSTTELFAKKGSEQKSLDTFIPKSESDFAEYAELIANKLRPYEKSFHYMALLKNVMRLSMTSLKGADAKDISSSVTAIANEKIKAEKEAAAGKKKQGAKKKQLHIEKGDDDFIPGRGGGYDDPDEYDFM

SEQ ID NO: 11140 - protein, 236 aa, Zea mays
  VARIANT 189: note = Ancestral polymorphism is I, Derived polymorphism is T
  VARIANT 126: note = Ancestral polymorphism is C, Derived polymorphism is Y
MHVLITTPFHPAYVTAERIKKAKNLELLLTAGIGSDHIDLPAAAAAGLTVAEVTGSNTVSVAEDELLRILILLRNFLPGYQQVVQGEWNVAGIAHGAYDLEGKTVGTVGAGRIGRLLLQRLKPFNCNLLYHDRLQIDLELEKEIGAKFEEDLDAMLPKCDVIVINTPLTEKTRGMFNKERIAKMKKGVIVVNNARGAIMDARAVADACSSGHIAGTYYVNMFSLSLYTTVLLHKLV

SEQ ID NO: 11141 - protein, 167 aa, Zea mays
  VARIANT 142: note = Ancestral polymorphism is D, Derived polymorphism is Y
  VARIANT 111: note = Ancestral polymorphism is D, Derived polymorphism is H
  VARIANT 108: note = Ancestral polymorphism is I, Derived polymorphism is F
  VARIANT 102: note = Ancestral polymorphism is V, Derived polymorphism is L
  VARIANT 82: note = Ancestral polymorphism is R, Derived polymorphism is G
  VARIANT 70: note = Ancestral polymorphism is A, Derived polymorphism is D
  VARIANT 66: note = Ancestral polymorphism is A, Derived polymorphism is V
  VARIANT 64: note = Ancestral polymorphism is A, Derived polymorphism is G
  VARIANT 57: note = Ancestral polymorphism is D, Derived polymorphism is E
  VARIANT 56: note = Ancestral polymorphism is P, Derived polymorphism is A
  VARIANT 49: note = Ancestral polymorphism is P, Derived polymorphism is R
MAASASRARAGAGGAGEEYEDLLPVMGERLGVAGLLAELRAGFRLLADRERGAITPDSLRRGAAAALGVAGMAHADAAAMVREGDADGDGALSEAEFCVLMVRLSPGIMAHAEAWLADAIAADEMQLVDDAMPMDAAAADDYGGAGSRGHAAAAPDSDTAPARRSSV

SEQ ID NO: 11142 - protein, 381 aa, Zea mays
  VARIANT 254: note = Ancestral polymorphism is R, Derived polymorphism is K
  VARIANT 244: note = Ancestral polymorphism is K, Derived polymorphism is E
  VARIANT 232..381: note = Derived polymorphism lacks residues 232 to 381
MVELTSLSPGPPRPSRLTPRRRPPPPTPHVHTSSRRRGRILGAATATPGADDYHSTIRSLNSRGRHVPRKSLGQNYTLNSKVNEELVAAAGVEEGDVVLEIGPGTGSLTSALLQAGATVFAVEKVCNVALLGDKHMATLVKDRFGSTEQLKVIEEDITKFHIRSHFLPFMKEKYGATKKLAKVASNLPFNVSTEVVKLLLPMGDVFSVVVLMLQDETAVRLADASIQSPEYRSINVFVDFYSGKLFRYVAFIDKNIFCFLFSEPEYKFRVDRENFFPRPKVIYFLHVDGAVISFKLKNAEEYPPVSSPKSFFSMVNSAFMGKRKMLRKSLQHICSSSEIEAALDNIGLPVTVSFRSLLLRPLLPLSLRACAVVLTCQLLAG

SEQ ID NO: 11143 - protein, 384 aa, Zea mays
  VARIANT 215: note = Ancestral polymorphism is L, Derived polymorphism is P
  VARIANT 240: note = Ancestral polymorphism is G, Derived polymorphism is A
  VARIANT 242: note = Ancestral polymorphism is G, Derived polymorphism is E
  VARIANT 320: note = Ancestral polymorphism is H, Derived polymorphism is Y
MEAYKLWVRRNRDLVRSLESLANGLTWILPERFANSEIAPEAVYALLGIVSSVNQHIIDAPTENHSFASKEQSIPWGLVVSVLKDVEAVVEVAAQHFVGDDRKWSFLAVTEAVKAGVRLAAFRESGYKMLLQGGEVVNEEEVTVLENSYGVNGNGVPAIYPMDGHAENGHKTMAKGLDGKNGFVSKSLEKRAVAALNKFGENAKMMSDPMWIRRLQPTPEPTVMVAEKPTLASIWSAKGGTGRLFVLGEVVHIFRPLVYVLLIRKFGIKSWTPWLVSLAVELTSLGVHSHATDMNHRLGKVHQLSSAERDEATILLVRFYQLKRRKMMWALYVMRDPFFASYSKRHLLKAEQVLNPVPLIGFLTGKLVELLEGIQTRYTYTSGS

SEQ ID NO: 11144 - protein, 318 aa, Zea mays
  VARIANT 262..318: note = Derived polymorphism lacks residues 262 to 318
  VARIANT 256: note = Ancestral polymorphism is V, Derived polymorphism is A
  VARIANT 253: note = Ancestral polymorphism is A, Derived polymorphism is V
  VARIANT 245: note = Ancestral polymorphism is A, Derived polymorphism is T
  VARIANT 136: note = Ancestral polymorphism is T, Derived polymorphism is N
  VARIANT 99: note = Ancestral polymorphism is Q, Derived polymorphism is H
  VARIANT 39: note = Ancestral polymorphism is G, Derived polymorphism is D
MAASVALSSGHRMPAVGLGVWRMEKADIRGLIHTALRVGYRHLDCAADYQNEAEVGDALAEAFQTGLVKREDLFITTKLWNSDHGHVLEACKDSLKKLQLDYLDLYLIHFPVATRHTGVGTTSSALGDDGVLDIDTTISLETTWHAMEELVSMGLQIVILGQLSSDWCSNYDIFLTRDCLAYAKIKPAVNQIETHPYFQRDSLVKFCQKHGICVTAHTPLGGSTANAEWFGTVSCLDDPVIKSLADKYGKTPAQLVLRWGLQRDTVVIPKTSKVERLQENFDVFGFDISGEDMERMKAIDRKYRTNQPAKFWGIDLYA

SEQ ID NO: 11145 - protein, 87 aa, Zea mays
  VARIANT 29: note = Ancestral polymorphism is P, Derived polymorphism is S
MGRGGLSARSATAVVVDGGDNKELKSSWPETVGKHMVEAIAIIKSERQDVILELHTADDPQPPDYNDQRVCLFLDDSLIVVRTPVVG

SEQ ID NO: 11146 - protein, 405 aa, Zea mays
  VARIANT 16: note = Ancestral polymorphism is Q, Derived polymorphism is H
  VARIANT 19..405: note = Derived polymorphism lacks residues 19 to 405
  VARIANT 26: note = Ancestral polymorphism is A, Derived polymorphism is E
  VARIANT 275..405: note = Derived polymorphism lacks residues 275 to 405
MAEAAPHFVLVPMLAQGHLLPMLDLARVLASHGARATVVLTPVNAARNRDFLEQAAGAGLTINFAELAFPGPALGLAAGCKRVDMLQDLSLIVPFYDAVWLLAEPLEAYLLSLPRMPDCLVSDSFMAWTASVARRHGILRFVVHFSPASYVLAAHILETRGVYDRAADDFEPFEVPEFPVRAVVNRATAQGVFQWPAGMERFRRDTLDAEATADGILFNTCAALEGAFVERFASEVGKKIWAVGPLFLLGSGSDAGGMAGRGNRAAVDADQIVSWLDARPAASVLYISFGSIGRLFPAQAAELAAGLEASRLPFIWDGVERAVTDLMDEGPAGAARRARAKELGQQMRAAMAKGGSSDTDVRDLVRHVVEVARKKGEHEDTALAGGDHVITSKEKAMNGTGGKHY

SEQ ID NO: 11147 - protein, 1663 aa, Zea mays
  VARIANT 1136..1663: note = Derived polymorphism lacks residues 1136 to 1663
  VARIANT 1140..1663: note = Derived polymorphism lacks residues 1140 to 1663
MFHSKSLPRPKDTSVVVVVLETTEVYIVISLSTRRDTQVVYVDPTTGALRYLGKHGEDVFDSEAAALNHITNGSRVLSKSTTYAKAVLGYAVLGSHALLLVATQLSASVPNLPGGGCIYTLAESQWIKIQLQNPQPQGTGEQKNIRELANLDIDGKFFFCETRDVTRPFPSPITLREPDEEFVWNEWLSKPFKDIGLPGHCVILLQGFAECRNFGGAGQQGGLVALIARRSRLHPGTRYLARGLNACSGTGNEVECEQLVWVPRKGGQRIPFSSYIWRRGTIPIWWGAEIKNAVSVEAEIYVANDPYNGSLQYYQRLGKRYGNKSSEANVSRQKSSGRVPIICVNLLRYGEGKTESVLVDHFKESIRYMNSTGKLGSTWIQLINYDWHATVKLKGQQQTVEGLWRHLKPPTMVIGFSEGNYYDARQQLNECKGSVICNDDVNGGFCMESIQNGVIRFNCADSLDRTNAASYFGALQVFVEQCSRLSISLDIDAMFGLSSRYSEYDGRNTRSLPPGWEERFDSVTGKSFYIDHNTRTTTWEHPCQEAPQKPWKRFDMTFDQFKGSTMLAPVNQLAELFLLAGDIHATLYTGSKAMHSDILNIFKEETGKFSKFSAVENVKITVLRRYQNFMNDSSRQKQLEMFLGLRLYRHLPSIPMFPLKVLSRPSGCMLKPVPSIIPMADGGSSLLSFKRKDLIWVCQQGADYVELFIYLGEPCHVCQLLLTVSHGAEDSSYPATVDVRVGSSIDSLKLVVEGACIPQCSNGTNLLIPVTGRTDPEDLAVTGKSARPNVQESSYLPLLYDFEELEGELNFLNRVVALSFHPSAVSRTPITLGEIEVLGVSLPWADMLTNSERAPEFMEFINKKSSSAHCNLGSKSFGNSSMPGNDSHGIDESYTKSSSLVQPCGSENLLDFLTGDFDMSESHITQNTFGAGEQTNFLDDGFDVNPFAPALEVPVPVAKVNKEVEECGSTQLYIKFFESLSGYNKGKGLDFEQTMKLEIKRLRLGLSAAERDQALLSIGVIPATLDPNRLIDYSYLLKLSSLADNLALLGHTVLEDRANASIGLEKGSEHAIDFWNISENDEFCYGGACEVRALSSLQALASRENQSVFMECFQCEKTVCKACCAGKGAFLLLNTYRELKIYGGSQSGGYSALTDSFVCKSCCSEIIKRALYVDYVRVLHSLRRKDRSEKAALSAVNQVCQLEYKKASDLSQSIQFGQRQLKQILDGEESLAEFPYANFLQMVFLNFVPSDHKLHSCMISCPVLSIHSDVFGTLLMLPMDHVETANDSEPLLSLLAPFGTGEYTSYWKAPQGITSVEFSIVLGGLSDIAGVSIIVSSCGYSASDCPIVEIWASNKIHREDRTFIGKWDVQDIISSSPQLRGPEKSSRLSEEPRHIKFHFPNPIRCRIISIKMTLSHRGSHSTKFSEEFDLLSLNDSSSYESKPTNLHNSFIHAKRIVVFGSLLRKEMEPDTSGGIMRMKSYLDRSPALGRFRIPVEAERLRDNDLVLEQYLLANSPGIAGFRLDSFSVIRPRVTHSPSSSELDMREFSLTRMEDRFINPAILYIQVTVVKESGKLVVEEYRLPEVKANTPLYFDFPDLQQDARCVIFRLLGDVTAFVDDISELENLNLRNLPLASGLSLSNKIKLYYYADTYEMGKIGSLSAV

SEQ ID NO: 11148 - protein, 294 aa, Zea mays
  VARIANT 13: note = Ancestral polymorphism is P, Derived polymorphism is S
  VARIANT 213..294: note = Derived polymorphism lacks residues 213 to 294
MVTGKKRTFVLYPSLGVGHLIPMVELAKHLLRHGHGALIAVVNPPDTDAVSVAAVERLAAANPAIAFRLLPVPASPDAGADWVKRDLDTLRLANPVLRDFLLRSQPATALILDMFCVDALDVAAELGVPAYFFFASAAGDLAMFLNLPYLYPTLPSFRDMSEALVRCPGMPPVRAMDMPLTVQDRDSDRIKVRMYQFRRIPEGRGVLVNSFAWLEPMALRALGDGVCVPGRPTPRVFCVGPLVNDGSSTAGSGGRHECLAWLDTQPKRSVVFLCFGSKDACSVLIALFLYHQFY

SEQ ID NO: 11149 - protein, 249 aa, Zea mays
  VARIANT 22: note = Ancestral polymorphism is R, Derived polymorphism is P
MGYVLSAVARVLEQPTAWGAAPEMALLAGPLWAAVLLGLLLGWAWRPRWAAGLVAAPAPAAAAQPPFATLGFWKAQLPARLRAPLGSAAAVRHGEEEEEDEVSVRGSSEAGSEELAVGKRDLANLWRLVEGRDGGPAWIKMMDRSLPTMTYQAWRRDAQTGPPQYQSSSIFEDATPEEVRDFFGDDEFRVSNKWDDMLVYHKTLEECQTTGTMKVHWVRKFPFFCSDREYIIARRIWKLGGAYYCVTKH

SEQ ID NO: 11150 - protein, 77 aa, Zea mays
  VARIANT 14: note = Ancestral polymorphism is R, Derived polymorphism is C
MNNAISDKSRWSFRRRSTRHRVLKNSDISEPETLSSSKAKADITPSNNVYTSTYSYASEKPLQQDKPDEEGSPILII

SEQ ID NO: 11151 - protein, 235 aa, Zea mays
  VARIANT 206: note = Ancestral polymorphism is R, Derived polymorphism is M
MDEIHVLSGTDATQEGDGSLVVGGAAIVVVGRHVARRDVLAADGWMDMIDDEQLWVDGGGVVRACVKVFGERCFWFWLFIRPRGDDRSALIHSLDIFKKEFGARVWDREKLVVIPDHYIFTSDDRANRNVDILRDFCAEQNVKYFYDIKDLRQRFRSYKGVCHCRPGEVLLGTDSHTCNAGAFGQFATGIGNTDAYKLCYICSFLRIYHIIGEISVSGATYKSMEFVGSTVESLT

SEQ ID NO: 11152 - protein, 239 aa, Zea mays
  VARIANT 87..239: note = Derived polymorphism lacks residues 87 to 239
  VARIANT 135: note = Ancestral polymorphism is D, Derived polymorphism is A
MAMATSTFSPRPASLRPLRAGGKPVGLLPFPRRLACATASGEAPPVEQRDEAEPALAAASNGAAVKSEAPPPPPAPAPVPAFRDARWVNGTWDLAKFDKGSGVDWDAVIDAEARRRRWLEDYPEATNTDEAVVFATSIIPWWAWMKRFHLPEAEKLNGRAAMVGFFMAYFVDSLTGAGLVDQMGNFFCKTLLFAAVAGVLLVRKNEDVESLKKLVDETTFYDRQWQATWQDDSAGGPNN

SEQ ID NO: 11153 - protein, 382 aa, Zea mays
  VARIANT 254..382: note = Derived polymorphism lacks residues 254 to 382
MQHYLSIAGSLVFVPLILVPAMGGSDEDTATVISTMLLVSGLTTILHTFLGSRLPLIQGSSFVYLAPALVIANSEEFRNLSDNCIQDPIWGLFEKGRSIGAKSLGGFLGQSLLFVYQKFKHIMRELQGAILVGSVFQIILGYTGLMSLFLRLINPVVVAPTIAAVGLAFFSYGFPQAGSCVEISMPLILLVLLCTLVPLSVAIVWAYAFFLTAGGAYNFKGCRSNIPSSNILLDSCRRHLETMRRCRTDVSTAWKTAAWVRVPYPFQWGPPTFHFKTGIIMIIVSLVAPVDSLSSYHAASLLLNYAVNVLLSINVVVALLVALILDNTVPGSRQERGVYIWTDPKSLEVDPATLEPYRLPEKVSCWLRWAKCDKVLLFLTQH

SEQ ID NO: 11154 - protein, 294 aa, Zea mays
  VARIANT 179: note = Ancestral polymorphism is P, Derived polymorphism is L
  VARIANT 165: note = Ancestral polymorphism is A, Derived polymorphism is V
  VARIANT 160: note = Ancestral polymorphism is P, Derived polymorphism is S
  VARIANT 137: note = Ancestral polymorphism is R, Derived polymorphism is M
  VARIANT 131: note = Ancestral polymorphism is C, Derived polymorphism is R
  VARIANT 66: note = Ancestral polymorphism is S, Derived polymorphism is P
  VARIANT 29: note = Ancestral polymorphism is A, Derived polymorphism is V
  VARIANT 28: note = Ancestral polymorphism is A, Derived polymorphism is P
MTSAHSKLYSDDVSLVVVVVDTNPFFWAAAALPFADFFAHLIHFVNSLLLLNHLNRVVVIAAGVSSCAYILDSSDASPSGGVAVSDTFDKASRKAEEFIAQDARATAGNGSVASANAASLLSGALSISLCCYLDIQRIFRSGSRHPQPRILCLQGSPDGPEQYVAVMNSIFSAQRSMVPIDSCIVGTQDSAFLQQASYITGGVYLKPQELNGLFQYLAAVFATDLHSRAFLRLPKTLGVDFRASCFCHKKTIDMGYVCSICLSIFCKNQKKCSTCGSEFSRAMPDLNSVPDQSK

SEQ ID NO: 11155 - protein, 596 aa, Zea mays
  VARIANT 178: note = Ancestral polymorphism is A, Derived polymorphism is V
  VARIANT 13: note = Ancestral polymorphism is G, Derived polymorphism is E
MDPRREELLHELGGMWDEIGEAEEDRRGMLQALEEECLNVYRAKLEKVRQHRAQLKREIADSVAEVAAICATIGEPPSTVHTACSSLQVNANQCTRARIQSSAAVMMSTVTADRDQGTGSLKEELGLIAPELAEMRRRRDERRRQFADVAQRVNKIQQEMDLQLGGGGGQGQPHAHVAVDGSDLTTTKLDELRAYLRRLQQEKESRTKKVAELMATLHSSSLVLGMDPRETNSVVHGGVQTQASGISDSAISGLAGGIERLREIKRSRMEKLQDLLGSMLELWNLMDTPAEEQRRFQGVACNIAASEDEITEPGALSMAFIRNVEAEVMRLENLKECRMRELVVKKHEELKEIRRRARLPEDDTTVMVFDAMDSDAERAMILERLELQISKAKDLEFSRKDVLEKMDRWQAALEEESWLEEYSRNENRYNTGKGTHLVLKRAEKARSLVCKMPAMAEALVAKVVAWEKERGARFEYDGEVLLDLLEDYGNARKEKEQERKRQRDQRRLVQGAAAADRDVSSPVARPPPKAIKNVTRSLSIGRNAAAAAAAGGGGSPRKAAPASSRPGTPSFLKSPLSARRGGGDEGAQMLSPDSFE

SEQ ID NO: 11156 - protein, 352 aa, Zea mays
  VARIANT 239..352: note = Derived polymorphism lacks residues 239 to 352
MVCLTPAAAALLLLVVVLAAAVSALPAINVTTMAFEDGYAPLFGHGNILRSADHRTVSLLLDRSTGSGFISSSMYQHGFFSASIKLPSDYTAGVVVAFYVRVQRRRVREAARRAGLRVPGQHPGQAMAGADQRVRKRQRGPGPGGAVRAPLRPNHGVPPLLHPVDARRRGLLRGRRAGARGAAVGRHGRGLPLQAHVRVRHRVGRLHLGHRRGPVPRQLPLRALRRLLHRPGPPRLPRRRAHPADDGGAVRRSRRGTQGVGRGRHDGGEAAGHAQVPGAQHGLLLLLRHAALPRRVPRVRRRRVGAQAVQGHRTPPLRAAAADEPATLPRQGGQQGQGQGAQEARGGHVAFV

SEQ ID NO: 11157 - protein, 184 aa, Zea mays
  VARIANT 131: note = Ancestral polymorphism is R, Derived polymorphism is L
  VARIANT 134: note = Ancestral polymorphism is R, Derived polymorphism is L
MSMLTSILGRKHQPPPQQQQQQKGGGARTGTGAGAGTEAAAVEPVSIDIAEQGPLVDAITLAAFAAPALGLPPFATASMDWKETPTAHVFMADLPGLRRDEVKVEVEEERLLRISGQRQRAAEEKGDRWHRVERSSDRFVRTVRLPPNANTDGAQAALQDGVLTVTVPKDNDRKAYGRLITITN

SEQ ID NO: 11158 - protein, 154 aa, Zea mays
  VARIANT 3: note = Ancestral polymorphism is F, Derived polymorphism is L
  VARIANT 114: note = Ancestral polymorphism is S, Derived polymorphism is I
  VARIANT 117: note = Ancestral polymorphism is F, Derived polymorphism is L
MGFFRRIAGFLGISRDDADHPDSPTSVGGAAAAAELPHDRAAAHGVRQGFSVKVPVHVERQVPVPVLVPCPQGDGGVQGFRWYTRRLRIDEDGDVADEFLDEIIPEGSISNDKSARFQVKYNNKPAAVALRKQVIAVDGDIRHSLEHQGQLRWV

SEQ ID NO: 11159 - protein, 314 aa, Zea mays
  VARIANT 180..314: note = Derived polymorphism lacks residues 180 to 314
  VARIANT 193: note = Ancestral polymorphism is G, Derived polymorphism is R
MGSNDPNTPSKASKASEQDQPPATTTSSGTASVYPEWPSFQAYSAIPPHAFFPPTVAANPQAHPYMWGAQPIVPPYGTPPPPPYVMYPPGTVYAHPSTPPAMHPFGHYPMPTNGHAETHDSHSKDNDGKEDGNSQNGMSYSGSQGVVNQTMAMLPMQPGAMVGGVPSSTAANLNIGVDYWAAPGSAAVPAAHGKAPAGSARGDQWDERELKKQKRKQSNRESARRSRLRKQAECEELGQRAEALRSENSSLRAELERIRKEYEQLLSQNASLKEKLGAASSDSLPDMNEQNDGDGDGGYRKQPDSDGHQPGSES

SEQ ID NO: 11160 - protein, 456 aa, Zea mays
  VARIANT 59: note = Ancestral polymorphism is Q, Derived polymorphism is R
MRIEEVQSTSKKQRIATHTHIKGLGLDQANGMAIALAAGFVGQAAAREAAGLAVDMIRQKKMAGRAVLLAGPPATGKTALALGIAQELGSKVPFCPMVGSEVYSSEVKKTEVLMENFRRAIGLRIKENKEVYEGEVTELSPEEAESTTGGYAKSISHVIISLKTVKGTKQLKLDSSIYDALIKEKVAVGDVIYIEANSGAVKRVGRCDSFATEYDLEAEEYVPIPKGEVHKKKEIVQDVTLHDLDAANAQPQGGQDILSLMGQMMKPRKTEITEKLRQEINKVVNRYIDEGIAELVPGVLFIDEVHMLDIECFSYLNRALESPLSPIVILATNRGICNVRGTDMTSPHGIPVDLLDRLVIIRTETYGPTEMIQILAIRAQVEEIDMDEESLAYLGEIGQQTSLRHAIQLISPASVVSKTNGREKICKADLEEVSGLYLDAKSSARLLQEQQERYIT

SEQ ID NO: 11161 - protein, 777 aa, Zea mays
  VARIANT 188..777: note = Derived polymorphism lacks residues 188 to 777
  VARIANT 120..777: note = Derived polymorphism lacks residues 120 to 777
MDGGLDDEWEASFLDEVIRATDEAEAVVSRNPNPTPTPAPAPIPTYYPLAAAPVSYLPASSVSYIPAASHLRSAISFSPPRDLSQRPPLPPPTAATSTRDALATGADVGRDFSPPPQLSQRPAADEGSLVAFAASSSASDRRFISTGCGEAGAKREAREIERLKRELDRVSKERNELKNECTALKKDRTKKDLQIKAKEAEIQNLKKANVSSMKDVCSAGMNIDQSFHAPANEALHTGVSSRRTDKMSGKDKDAHSLRDDLYLKQGHQTDLLEALELRRRTMIDNGMSTSGVVSLEEDTHFEPRNATCKEIKAIGVQTDNTSDNEHLDCKKLLVERISGNLRAMWGMSPNSLSSRNLISKINVSCSEEILSLLQHTRLSDNCEPSSQAISSMNEAISQLYDTFIKMNSGKMSIQTFLEALLNLCAFDDAAIVSRTLRVFLKVLQHLLQHGAKSSERNNVSVEPYVNVLMENNHKDCSTLLRPVDAEDSLRLHNMFLPFTFWSSLFTGMLQIGVKYSQETIRTDALSIMILIVRTTDPIEERQKFGFTSVMTRLHLLLQKENGLLVKKHSVRLLFLLLNCPVMLKLLCSGGKDGSKQMGSEACESNRSQEVISSVLVDLSDCLTCGETCSLGIELCRLVIILLAYIASSGKLGYEVLLVPVSARGASFLEMIMEVLASQMQYETRELLKERCLVMREALILLNRLASHANYSKPTLEVLTRSKLCATWTIDVANRLPHTWMANDLAELAQKFRSRVYAFIEEKPLTSDGTNLGASNKR

SEQ ID NO: 11162 - protein, 450 aa, Zea mays
  VARIANT 86: note = Ancestral polymorphism is A, Derived polymorphism is D
  VARIANT 101: note = Ancestral polymorphism is A, Derived polymorphism is P
MEAEEYGEMMESVDEVTFALDGLRPAAQKRTRRASLLALRGICASAERRRVPPRAPVPRVSASKAPLFPCAQPRTSIRLVQQIIDAILVLDIDDPPCAIAPGALLFVLASDPVSKVLCKLRRLEQGGPCELEVLGKKGMVQLNGRLVQQIIDAILVLDIDDPPCAIAAGALLFVLASDPVSKVLCKLRRLEQGGPCELEVLGKKGMVQLNGRSISSGTKVPLTGGDEVIFNSCGNHAYIFQHPLSDKVPKTVPSSAVSLIESPVASVKRIRTYKRTGDTSAIALAVHFSTCCRGLARVGVCARDGGLHRNHWTKIKSAVNQIETHPYFQRDSLVKFCQKHGICVTAHTPLGGSTTNAEWFGRVSCLDDPVIKSSAEKYGKTPAQLVLRWGLQRDTVVIPKTSKVERLQENFDVFGFDISGEDMERMKAVDRKYQTNQPAKLWASTCMLSF

SEQ ID NO: 11163 - protein, 294 aa, Zea mays
  VARIANT 265: note = Ancestral polymorphism is G, Derived polymorphism is V
  VARIANT 209: note = Ancestral polymorphism is S, Derived polymorphism is F
  VARIANT 189: note = Ancestral polymorphism is R, Derived polymorphism is G
  VARIANT 156: note = Ancestral polymorphism is L, Derived polymorphism is Q
  VARIANT 91: note = Ancestral polymorphism is P, Derived polymorphism is S
  VARIANT 78: note = Ancestral polymorphism is C, Derived polymorphism is Y
  VARIANT 73: note = Ancestral polymorphism is C, Derived polymorphism is Y
  VARIANT 65..294: note = Derived polymorphism lacks residues 65 to 294
  VARIANT 64: note = Ancestral polymorphism is T, Derived polymorphism is I
  VARIANT 51: note = Ancestral polymorphism is G, Derived polymorphism is D
  VARIANT 50: note = Ancestral polymorphism is P, Derived polymorphism is L
  VARIANT 12: note = Ancestral polymorphism is D, Derived polymorphism is N
  VARIANT 2: note = Ancestral polymorphism is A, Derived polymorphism is T
MALDRSITLLSDDAVVFLSGATYNTKKGGDDTGSSKPKGGGSFVPRHLRPGDTSSLLLGTTLATEGHILLLCCVNHVCHFRSCPMSWIRNPHKFRQVIDASIVYDPWTRESQGFGFVTMPCVKEAYRYIKYLNRFVMQDQVITAEKPLGLNFFDNLLSDIMPADLELSPTDKHIFIEELLLNALNKQVRSAEDSGGRRTLKMCLGMLKFMRNRSDQNFVAYRKVYPSWRWYEKQDGIEHIQSNSEDQAPEFYNIMLERSKGDRYGYDLVFVDAMHKANYASRICHSCNPNCEAK

SEQ ID NO: 11164 - protein, 424 aa, Zea mays
  VARIANT 136..424: note = Ancestral polymorphism lacks residues 136 to 424
MDYYNILKVNRNATLEDLKKSYRRLARTWHPDKNLTGGAEAEAKFKQITEAYEASESSRRAFLPVMMYLGIHMITYFWKKRIAMNRLHGLVLIVFILLSVCSAEKSLHTIFQECECKSSVLGAVLIICSLLINSRWLVQVLSDPEKRAIYDQYGEEGLKGMPPPGSQSRSSTTAGPSGPSNFHYNPSDPDDFFAEFMASNKTYSFDHDRRRFQPRSHWTSARNSRSEAPSGSQKENGASTSNIEKPPPVEKTLLCTLEELYNGTKRKMKITRNVAKPDGRIEVETEVLAVEVLPGWKKGTKITFPNKGDKLHGQLAQDLTFVLDSKPHDVYNLEGNNLLVKQVIPLVDALAGAEINLTTLDGRNLPVRVEEVVRPGYEVVLENEGWPIRKEPGKKGKLVIKFDVTFPMRLSPSQRAAIRRIMGS

SEQ ID NO: 11165 - protein, 303 aa, Zea mays
  VARIANT 82: note = Ancestral polymorphism is G, Derived polymorphism is E
  VARIANT 36: note = Ancestral polymorphism is N, Derived polymorphism is K
MVPITATGDHTASNWIPATISNGNGTGGMFTVASRKSRNGFQFCAVTGDPGSRNVSDVNFPSDYTELLTQAKEAAESAFKDGKQLLVIAFSDGEGGNEMTGSMLLIREFCDRFVPAEKATRTRVFFPEANEVSFARQSAFEGCSLKLDYLTKPSLFEDFGFTTKVKMADRVKPQDETFLVAYPYFNVNEMLVVEELYKEAVVGTSRKLIIFNGELDRIRSGSKDYPAFFYPKLAELSKTFLPKLDTVYYIHNFKGAKGGTLFRCYPEPWKVLRKASSGNYVCLHQQEEMPSLKEVALDILPSV

SEQ ID NO: 11166 - protein, 597 aa, Zea mays
  VARIANT 408: note = Ancestral polymorphism is G, Derived polymorphism is V
  VARIANT 488: note = Ancestral polymorphism is L, Derived polymorphism is P
MKHPLHRDGESYPSPPPQRRPRGFASAPAPAAGASPRRRGVQEREREREKERTKLRERHRRAITGRMLAGLRQHGNFPLPARADMNDVLAALARAAGWTVQPDGTTFRSSNQPLLPPPPQLHGAFQVASVETPALINTLSSYAIGTPLDSQASALQTDDSLSPSSLDSVVADRRIKTENHGNSSSVSSLNCMDNDQLTRSVLFPDDYTKTPYIPVYASLPMGIINSHCQLVDPESVRAELRQLKSLNVDGVVVDCWWGIVEAWTPRKYEWSGYRDLFGIIKEFKLKVQVVLSFHGSGETGSGDVLISLPKWIMEIAKENQDIFFTDREGRRNTECLSWGIDKERVLRGRTGIEVLGHTWYMQKNLRQSALSRGHLFWARGPDNAGYYNSRPHETGFFCDGGDYDSYYGRFFLNWYSGVLMDHVDQVLSLATLAFDGAEIVVKVPSIYWWYRTASHAAELTAGFYNTTNRDGYSPVFRMLKKHSVILKLVCYGPEYTVHEKDDDEAFADPEGLTWQVINAAWDQGLPLCIESALPCRNGEAYSRILDTAKPRDDPDRHHAASFAYRQQQQPPLREACLSELCTFVKCMHGEAPQNGEG

SEQ ID NO: 11167 - protein, 248 aa, Zea mays
  VARIANT 151: note = Ancestral polymorphism is M, Derived polymorphism is K
  VARIANT 95: note = Ancestral polymorphism is P, Derived polymorphism is L
  VARIANT 87: note = Ancestral polymorphism is T, Derived polymorphism is A
  VARIANT 84: note = Ancestral polymorphism is R, Derived polymorphism is C
  VARIANT 80: note = Ancestral polymorphism is N, Derived polymorphism is K
  VARIANT 78: note = Ancestral polymorphism is A, Derived polymorphism is T
  VARIANT 71: note = Ancestral polymorphism is R, Derived polymorphism is C
  VARIANT 65: note = Ancestral polymorphism is D, Derived polymorphism is V
  VARIANT 57: note = Ancestral polymorphism is P, Derived polymorphism is R
  VARIANT 37: note = Ancestral polymorphism is T, Derived polymorphism is I
  VARIANT 35: note = Ancestral polymorphism is D, Derived polymorphism is N
  VARIANT 29: note = Ancestral polymorphism is G, Derived polymorphism is S
  VARIANT 17: note = Ancestral polymorphism is P, Derived polymorphism is L
MAASSSFKPNPLSLSVPDPALDRWLRDTGYLDLLDSTPTGGPSSASAPSTSSPAAGPDSSGVAVDILAFARTLASLLALNPFARLSATDLAAPTPSWSLAFLGTPGAASYSWPPTPTQARLRVQENVRRYARNYAALTILVFACCLYRMPMALLGMLVSLAVWEGVRYCRDHWGLTTRAPGVAQALLHCAQIATAILLYVCNLQFALVYAIGLSYALMMLHASLRKLTPSSLPDPSSKQNRRAQPRRI

SEQ ID NO: 11168 - protein, 314 aa, Zea mays
  VARIANT 118: note = Ancestral polymorphism is G, Derived polymorphism is E
MLPLLSPPRPRAARPRASATVSATARPAVILPGLGNNTGDYARLAAALRDDHGLPAAVVARVTRPDWLRNAAGLADASYWRGTLRPRPVLDWYLKRVDDAVSEARELCAPGGKISLIGHSAGGWLARVYMAEFDASDISLLLTLGTPHLPPPKGVPGVIDQTRGLLNYVEENCAPAVYTPELRYVCIAGRYIQGAPLLGNSAAASDEILAADTPSEGGHAVIVSSSDNSTSTPSAVSWRARFVGQGYKQIHDQVCGRADVWGDGVVPEMAAHLEGALNVSFDGVYHSPVGSDDEQRPWYGSPAILKQWVHHLLS

SEQ ID NO: 11169 - protein, 134 aa, Zea mays
  VARIANT 98: note = Ancestral polymorphism is K, Derived polymorphism is N
MAAAARVFRGSLFLMSPAAGAKASAAKKAGAAAAAAAVAKKTEAATTKPRLPTGITKPMPVSDEFRRFAGGAPEVARSEAIKLIWAHIKAHGLQNPAKKTEINCDATLKSLFGGRDKVGMLEINRLLNAHFPKN

SEQ ID NO: 11170 - protein, 379 aa, Zea mays
  VARIANT 70..379: note = Derived polymorphism lacks residues 70 to 379
  VARIANT 266..379: note = Derived polymorphism lacks residues 266 to 379
MASTDARLAGIASSIRVIPDVPKPDPLGVQGRKILGQGKYGCRECIKWAQRQNEYRATRLVLSSLDPPSSRVAVFGFCRLFGGDDKGRNGSCAKAKGCATDLVRTSCSRALVESKLLSGTTLIVDRYSYSGVAFSAAKGLDIEWCKAPENGLIAPDLVIYLDVQPEKAAERGGYGGERYEKIEFQKKVAEHYHSLRDSTWKFALCSDISGMSELMFLKCSKAKKKQEHQKKVKCRNASKQVHALEVAGRETAPPVPREKFEKRFGQSDAFLASTLQDNGEGCRFDMLKSLDDCIHVLSCGYENKTQWGKEVGWIYGSVTEDILTGFKMHCHGWRSVYCMPKRPAFKGSAPINLTNRLHQVLRWALGSVEIFLSKHCPIC

SEQ ID NO: 11171 - protein, 259 aa, Zea mays
  VARIANT 190: note = Ancestral polymorphism is D, Derived polymorphism is H
  VARIANT 187..259: note = Derived polymorphism lacks residues 187 to 259
  VARIANT 52: note = Ancestral polymorphism is M, Derived polymorphism is I
  VARIANT 2: note = Ancestral polymorphism is A, Derived polymorphism is T
MAVVGVLALQGSYNEHMAALRRIGVKGVEVRKPEQLLGIDSLIIPGGESTTMAKLANYHNLFPALREFVGGGKPVWGTCAGLIFLANKAVVLLSGQKTGGQELVGGLDCTVHRNFFGSQLQSFETELSVPKLSEKEGGNDTCRGVFIRAPAILEVGPDVEILADCPVPVDRPSITISFGEGTEEEEYSKDRVIVAVRQGNILATAFHPELTSDSRWHRFFLDMDKESPAKAFSALSLSSSSRDTEGLPKNKPFDLPIFE

SEQ ID NO: 11172 - protein, 667 aa, Zea mays
  VARIANT 27: note = Ancestral polymorphism is L, Derived polymorphism is P
MEGAASGRCRMGMAIAAAVCLMPLLQLWGCVAVEANAGPYHFVKRHLDEVDRMRYKDPTQPLNTRIDDLLGRMTLAEKIGQMSQIERENATADVVSKYLVGSVLSGGGSVPAKNAPPEAWVEMVNGMQRAAMSTRLGIPVIYGIDAVHGHGNVYKATIFPHNVGLGCTREPELARRIGAAVALEVRATGIPYVFAPCVAVCRDPRWGRCYESFSEDPEVVRDMTAIISGFQGEIPDATDAGRPYVAPGHRNVAACSKHYVGDGGTTKGVNEGNTVASFHDLMAVHMPPYYNAVIRGVSTVMVSFSSWNGVKMHANHFLVTDHLKNRLRFRARSRLDSIVRVLQAISNEWMLFQGFIISDWQGLDRITTPDHADYLLSIKLGILAGIDMVMIPYTYTEFIDDLTLLVRNGTIPMSRIDDAVRRILRVKFTMGLFDHPYADASLAGELGKQEHRDLAREAVRKSLVLLKNGKPGAGPMLPLPKNGAVLVAGSHADDLGSQCGGWTITWQGLTGNNLTAGTTILDGVRRAVAPGTDVVYSENPDAAFLQQNRARFGYAIVVVGEPPYAETFGDNLNLTIPAPGPDVIRNVCGAIKCVVVLVSGRPLVVEPFVDVIDALVAAWLPGTEGQGVSDVLFGDYGFTGKLSRTWFRSVDQLPMNVGDAHCEDALF

SEQ ID NO: 11173 - protein, 282 aa, Zea mays
  VARIANT 79: note = Ancestral polymorphism is T, Derived polymorphism is A
  VARIANT 60..282: note = Derived polymorphism lacks residues 60 to 282
  VARIANT 50: note = Ancestral polymorphism is L, Derived polymorphism is R
MALAARLVSRSRQLHSVQAAFANGGATQVRSFAKDAAPADRPPVSGDGKLLTLLFCVSYWLKNCFGHGIFFEVKKKFETALGVLKKEKITIDPDDPAAVSRYAQVMKTVREKADLLSDSQRIKYTIETFTKGIPDARTYLNTLQQLRIKYILPLLHVFSLKKVLNVTFLCSPSGLIDHIGIEPLMMEALEKIEKDIKKPLLRSDKKNMATLMAEFDKINAKLGIRKEDLPKIEKELELEIAKSELTELKKECVEAMETQLKREEFQDEEMPDVRKLDIRNFL

SEQ ID NO: 11174 - protein, 558 aa, Zea mays
  VARIANT 64: note = Ancestral polymorphism is P, Derived polymorphism is L
MDLAGPRGATDPAGSRAAPPHEELDGRGGGACSGAAAVEGSAWRLAVAGLGDPRAGVLESLGQPEAHLHTCTMDVPQLTAEGATQLGDRVSLLHQTGTLQSETPCLTLGRDSNAVSMEKLHASDCLPCGKENVGTGLQPKSDPERADNRMSVARLGLDLNTVDSPDVAEPNPFFPYKKLGQSKVSDPSECGSTTGAIEESESHRKWREMKQNGFLSSFHGNAVVPRPRGRPPKRKRDDEFKKSSSTQHVQANKSVKVAAPSGLLSGLNPGIINHVRNSKQVYSIIKAMVHSERLENENHSSQTGERGREVNERIQDQKYGGGFMKCHLLINDNNAVFHQTLPNTSQFLAQDGDSLKLQLPSAVTMSSDRTFSTSADDPASNHDYMTVLSVKAASVASQWLELLHQDIRGRLAALKRSRKRVRNALHTELPYLTATEFSSNQENESSIANTSEIGCTDKAVSEAHVARWRSLFVQMDKTLQEEGKQLENKLKQVQEMQLNCDKGLKHMTCEAPLLGPMAELWKLKNPNISESEWAVQAAAASIYSTCNMVMRTENVPCF

SEQ ID NO: 11175 - protein, 162 aa, Zea mays
  VARIANT 32: note = Ancestral polymorphism is A, Derived polymorphism is S
MASSSGSGSGSSGFLSAALDLAAAGTEEELRALMAQRRAKRMLSNRESARRSRMRKQRHLDELTAQAAHLRRENAHVATALGLTAQGLLAVDADNAVLRTQAAELAARLGSLNDILACMNTTNAAAAAAFSDPYLAFDGAATALDDLLRSCPDSMMFEYQLC

SEQ ID NO: 11176 - protein, 94 aa, Zea mays
  VARIANT 80: note = Ancestral polymorphism is S, Derived polymorphism is F
  VARIANT 75: note = Ancestral polymorphism is G, Derived polymorphism is R
  VARIANT 57: note = Ancestral polymorphism is V, Derived polymorphism is I
  VARIANT 49..94: note = Derived polymorphism lacks residues 49 to 94
MDIMICQVLRSQQCLAFSMFFLPIMESSQQMIQPTTWTQPCSSLSHDWSPFVMELAVATTLSTLNVKDVIDVMPGLMKSSVALLNQADLGWYFL

SEQ ID NO: 11177 - protein, 301 aa, Zea mays
  VARIANT 79..301: note = Derived polymorphism lacks residues 79 to 301
MYGRTIRDRLAPLQPFRRARLEKSPAPNSPAGDNEPDDLALHHPQQRSKNTRSHRSGLDQVMEQEVHSVDEVYVVTKAWAPNNGILISGCQTNQTTADATTPLGVSFGALSNSIQTILANEHGKVTNEDLVMKAPELLSRQGLYDSDIGGRPWNKKSLYKCSGLPPMSEAEAHAFEVNSFGLYNELSELVELGGADNNLNTSNVETTDYLMLPPDRELSANDYMELNDLLALDPSFSSEFSAQDNQYMQHPLAQYNGHYDLSGPSEPTMPSIFDVFPPNNGVLATDDPANYLDPAMQFPFS

SEQ ID NO: 11178 - protein, 666 aa, Zea mays
  VARIANT 247: note = Ancestral polymorphism is L, Derived polymorphism is W
  VARIANT 343: note = Ancestral polymorphism is L, Derived polymorphism is Q
  VARIANT 391: note = Ancestral polymorphism is H, Derived polymorphism is Y
  VARIANT 404..666: note = Derived polymorphism lacks residues 404 to 666
  VARIANT 490..666: note = Derived polymorphism lacks residues 490 to 666
  VARIANT 558: note = Ancestral polymorphism is P, Derived polymorphism is L
MNAGRSVPGFGRRRGDVRRCAGGSVRARRTGIRRPSSSTPMSGHLDRFARPCFEGCSSHDERRDHKSDFEVSEDEKKTRISSLKKKAIDASTKIRHSLKKTRRKSGSRVLSVSIEDVRDLEELQAVEAFRQALLLDELLPARHDDYHMMLRFLKARKFDIDKAKQMWIDMLQWRREYGTDTIVEDFEYTELSTVLQYYPHGYHGVDKEGRPVYIERLGKVDPSKLMNVTTMDRYVRYHVKEFERSFLIKFPACSLAAKRHIDSSTTILDVHGVGLKNFSKTARELIQRLQKIDNDNYPETLYQMFIVNAGPGFRLLWNTVKSFLDPKTTAKIHVLGNKYQSKLLETIDASELPEFLGGTCTCPEYGGCLKAEKGPWKDPNILKIVQSGGVHCARQIVTISNGEEKFITYAKPKRHAMRGSDTSTAESGSEADDAVSPKALRSYISHPKLTPVREEVKMVRATSFSTRVPEYDVPVVDKAVDATWKREQPRKAPSVPQDADSSVKTASKPSGRPWDKIAANLMACLMAIVMLVRSIKDLATMRLSSKGGSEESYCTLYPDSVQKEEFRPPSPFPGFAEADLFAVVLQRLGELEEKVQMLQEKPSEMPCEKEELLNAAVRRVDALEAELIVTKKALHEALIRQEELLANIDSKEIARAQRKKKTMFCY

SEQ ID NO: 11179 - protein, 538 aa, Zea mays
  VARIANT 133..538: note = Derived polymorphism lacks residues 133 to 538
MLRTKTPRPRGGKARRAAPGAASAVKPAKADGRSPSGELSLQLEHVSLTSLLSDRRPASGLTRFEVLLEEEESGCYRADPTPQPPRLPEPQSMPPPPPPPPISQASPVDADETMEEKDCCILSQDFFWHVPDRASVTPDYITPEMPQVANEFDDDDKENIPCPKSPEKSANPRSKRYRTDCSPKAREVTDFSFDHQITPVLFDSLTRDDSEEEQPKQPALEKRGGYVSQSAVALRCRVMPPPCVKNPYLNTDPCIDAAVYGGRQCNSAVFSPSIGGNGLSRYRTDFHEIEKIGYGNFSVVFKVLNRIDGCLYAVKRSIKQLHNDMERRQAVKEVQAMAALGSHENIVRYFTSWFENEQLYIQMELCDRCLSMNRNQPVKRGEALELLYQICKGLDFMHERGIAHLDVKPDNIYVRNGIYKLGDFGCATLVNRSLAIEDGDSRYMPPEMLNDKYEHLDKVDIFSLGAAVYELIRGTPLPESGSHFTSIREGKIALLPGCPMQFQSLIKSMMDPDPVRRPSAKEILRHPSFDKLHKASSK

SEQ ID NO: 11180 - protein, 491 aa, Zea mays
  VARIANT 149..491: note = Derived polymorphism lacks residues 149 to 491
  VARIANT 219..491: note = Derived polymorphism lacks residues 219 to 491
  VARIANT 247: note = Ancestral polymorphism is T, Derived polymorphism is M
  VARIANT 461: note = Ancestral polymorphism is K, Derived polymorphism is M
MKSSLRSRQESRRVSNGVIIGAMLLSLCVLSFVKARYCATPLGKAEDQLEEQMNASIRMEPEESSPARTPGEEEDEQEAEEENVVTKPPPPPPAVTANRGSKKKKGKGKPTCYMTSKRSERCDASGDIRVDGNRSTIYVGGIEREWRTKPYARYHDPVAMAHVREYTLKALPEPGAAAAPACTRNHSVPGFLFSNGGFSGNLYHDYTDVLVPLFISTHQFRGRVQFLVSGMKPWWVGKFTPFFRQLTRHDVIDVDKDGEVHCFPRIVVGATFHRDMGVDPRRAPGHVSAVDFKRALRAAFGLKREAASRGGGGGATGDGKPRLLIISRRGSRRFLNSREMAVAAGDAGFEVRVAEPDQRTDMAAFAALVNSADAMVGVHGAGLTNMVFLPRGAVLVQVVPFGGLEWLTGVTFKEPAADMEVSYMDYHVRLEESSLVDQYPRGHQVLTDPYAVHRQGWDALKTAYLDKQNIRMDLDRFRATLREVMARLPSP

SEQ ID NO: 11181 - protein, 689 aa, Zea mays
  VARIANT 214: note = Ancestral polymorphism is R, Derived polymorphism is M
  VARIANT 236..689: note = Derived polymorphism lacks residues 236 to 689
  VARIANT 241: note = Ancestral polymorphism is S, Derived polymorphism is L
  VARIANT 287: note = Ancestral polymorphism is C, Derived polymorphism is Y
  VARIANT 305: note = Ancestral polymorphism is D, Derived polymorphism is Y
  VARIANT 307..689: note = Derived polymorphism lacks residues 307 to 689
  VARIANT 330: note = Ancestral polymorphism is P, Derived polymorphism is L
  VARIANT 471: note = Ancestral polymorphism is S, Derived polymorphism is F
  VARIANT 486..689: note = Derived polymorphism lacks residues 486 to 689
MPLGQRPGDKSDARYCGVEVLDFPAGEDLPAVLNHSLASAFDFILVPLVDPNYRPAPGSVLPVSASDLILGPAQWSNHVVGKISEWIDLDSEDERLRLDSELTLKQEIAWASHVSLQACVLPAPRRSFCGNYARVVNQILQGLTNMHLWLRLPLEKSEPMDDDLDKIKNNSHTSEIVDSWELWNSFRLLCDHSSQLCVALDILSTLPSINSLARWFGEPVRAAILQTEAFLTNAKGYPCLSKRHQSLLTGFFKHSVQVIISGRSNHNVFPVSEGVLSGDESYAEVHCTHYTSVFLILLSTRKKQDFLTSNGLKGFVVVVLDSRVRHALTPYLEYIAYLYRKMDPLPEQERIEPLMDNLEAQTYETFEKDVVKYTQYLCLLILCFTSCEQYRRAVAKALVDRVADDAVSTTRTVLMVVGAGRGPLVRASLQAAEETGRKLKVYAVEKNPNAVITLHSLIKLEGWESLVTVISSDMRCWDAPEKADVLVSELLGSFGDNELSPECLDGAQRFLKPDGISIPSSYTSFIQPITASKLHNDIKAHKDIAHFETAYVVKLHRIATLAPPQQVFTFTHPNFSPNASNQRYTKLQFEMLPDMGSCLVHGFAGYFDSVLYKDVHLGIEPNTATPNMFSWFPIFFPLRKPIYVPEGSPIEVHFWRCCAPTKVWYEWAVTTPTLSPIHNSNGRSYWVGL

SEQ ID NO: 11182 - protein, 341 aa, Zea mays
  VARIANT 149: note = Ancestral polymorphism is A, Derived polymorphism is D
  VARIANT 139: note = Ancestral polymorphism is M, Derived polymorphism is T
MVMETGDPGKLLRGHSLSRVPPASPFPRLRPQGDLVRAGDERARASGMPGEEDVRKVSREDIQLVQNLIERCLQLYMNQKEVVDTLSFQAKIEPSFTEIVWQRLEEENRDFFKAYYARLMLMNQIVSFNKLLEQQHQIMNKDHHYGMPAMPSTAPNGSNTNMLNQAMPFLPDTIPSTAMQDNLLSNGGSSSIVNGAPSNDQCSYSGKVAHGLPGVMDASSSLLAAHKSTVGQFNGHNGTTTKTESDYSSNSDFGLGNETVFLEQSFGDISGGSFSSSELNGQPVGSSSYGFLSQIPCNFSLSDWTDCFSQSSEIFENYGGSPFIPYDANNIPESSARENTG

SEQ ID NO: 11183 - protein, 435 aa, Zea mays
  VARIANT 260..435: note = Derived polymorphism lacks residues 260 to 435
  VARIANT 278..435: note = Derived polymorphism lacks residues 278 to 435
  VARIANT 293: note = Ancestral polymorphism is P, Derived polymorphism is L
  VARIANT 314: note = Ancestral polymorphism is G, Derived polymorphism is R
  VARIANT 329: note = Ancestral polymorphism is Q, Derived polymorphism is L
MLQCIFLLSDSGEVMVEKQMAAHCVDRAICAWFWDYVVAHAAGDPSKVKPPALTNFGLFLRDAKQVLQVVVSPTHYLFQIYRNGVTFLACTQVEMAPLMAVEFLSRVADVLTDYLGDLNEDIIKDNFVIVYQILDEMMDNGFPLTTEPNILKEMITPPNIVNKMLNVVTGKSSTLGSKLPDAAASFVPWRRTTVKDASNEVYVNIVEELDACVNREGVLVKCEAYGEVQVNCSLPGVPELTMSFANPAIINDVTFHPCVRFRPWESNQILSFVPPDGQFKLMSYRVQKLKKTPIYVKPQLTSDSGNCRVSVMVGIRNDPGKPIDSITVQFQLPPLIVSADLTANYGTVDILADKTCLWTIGQIPKDKAPALSGNLRLEEGLAQLHALPTFQVKFRIMGVALSGLQIDKLDVKNTPNAPYKGFRAQTQAGKYEVRS

SEQ ID NO: 11184 - protein, 376 aa, Zea mays
  VARIANT 68: note = Ancestral polymorphism is K, Derived polymorphism is N
  VARIANT 108: note = Ancestral polymorphism is S, Derived polymorphism is F
  VARIANT 119: note = Ancestral polymorphism is T, Derived polymorphism is P
  VARIANT 143: note = Ancestral polymorphism is P, Derived polymorphism is H
  VARIANT 147: note = Ancestral polymorphism is P, Derived polymorphism is L
  VARIANT 178: note = Ancestral polymorphism is G, Derived polymorphism is D
  VARIANT 180: note = Ancestral polymorphism is R, Derived polymorphism is S
MGKARHAAKLSLALIPKTKLRSHAASPSTQPPSAHPPANPTKPGKNPHGSSKNFTAVAPVAAVHEERKPIRTPADLAAAIRAAADADIDAAAALALSAPPDVPLPTHSLALLLRRLFTTRSVAAARSLLDKLHPSGEDGCPRPNPAPRGALLALADAVCRRGEPREISRVLPVLRDHGVRADAHLYNALMKANVAADDPGAVLRVFRQMRSDGVDPDLVTYNTLIFGLARAGMVAKARAFLDAMAAEGHLPDVVTYTSLMNGMCVKGDALGALKLLEEMQGKGCQPNERTYSTLLMGLCKNKKLDKAVEVYKSMAAAGTKLESPAYASFVRALCRSGSVADAYEVFDYAIQTKSFAEVTAYSELENSLKWLRRMSS

SEQ ID NO: 11185 - protein, 466 aa, Zea mays
  VARIANT 109: note = Ancestral polymorphism is L, Derived polymorphism is F
  VARIANT 100: note = Ancestral polymorphism is A, Derived polymorphism is S
  VARIANT 91: note = Ancestral polymorphism is H, Derived polymorphism is Y
  VARIANT 17: note = Ancestral polymorphism is L, Derived polymorphism is P
MSAAYPRLLLCLLTLALALAGVAAGKISAPRTPISRDIYHSSKLSMDTIKTSNKGYSAELFVVTFNHVKERMDNGSKVHILLVSFQLRFLHSLPQHTIYASLEQLLSILIQYLRVKYECSVANCNILHQRFIVFQSFGQHGRELITSEVALRLLYVLTEKPKIAGVDISSFEKLLENLVIKVVPMENMNGRKRVEEGELCDRRNGRGVDLNRNWSVDWGKKEKDYDPYEENPGIAPFSEPEAQIMRELSRSFKPHIWVNVHSGMEALFMPYDHKNTTPNGASAHSMRSVLENLNRRHFQDSCLVGSGGGSVGYLAHGTTTDYMYDIAKVPMPFTFEIYGDEKASSDDCFKMFNPVDKKTFDRVVNKWCMAFLILFEEGLRNLRDAQIVSQGTLENWVPIGGDIVEINVERKSSIRERRKLEGLDLGMQELRTYFRLFLLSTFLLMFMFCARISKNRNRDSGNLFDP

SEQ ID NO: 11186 - protein, 1060 aa, Zea mays
  VARIANT 832..1060: note = Derived polymorphism lacks residues 832 to 1060
MVMVATGCISMILAWSVLISILAVGGAATASDEAALLAFRAGLSPGALASWNSSGGFCRWYGVVCSRRRRPGRVRVVALSLASSNLSGTLSPAIGNLTFLRVLNLSSNALHGGIPETVGRLRRLTALDVGHNSISGALPANLSSCVSLEYLRLEYNQLGGRVPPDIGNTLARLRTLVLRNNSFTGPVPASLANLSSLRYLAVDGNHLGGPIPPGLGGIAGLQHLHLDQNRLDGELPRSLWNLSSLVAFQVNYNMLHGSIPPDIGDKLPAIQYLWLDGNRFSGAIPPSLFNLSGLVSLGLSLNGFTGLVPPTIGSLRSVTSLYLGENQLEADDGGGWEFVASLANCSSLQVLTLSDNYFSGQLPRAVANLSTTLQQLYLHNNSISGSIPEGIGNLVGLDLLSLGINPISGVIPESLGRLTNLVTLGLYSTSLAGHIPASLGNLTNLVYLDAHNSDLGGLIPASLGKLHKLVLLDLSHSRLNGSVPREILELSSLSLSLDLSNNFLSGPIPSEVGALANLNTLSLSGNQFTGNIPDSIGGCEVLEFLSLDRNTLDGGLPQSLGKLKGLNVLNLTMNSLSGRIPDALGSIGNLQQLGLAHNRFSGPVPETLQSLKLLWSLDVSFNDLRGRLPDEGVFRNLTYTTVEGNGGLCGGIPSLLLPPCPALAASMGRKRWPRILNTALPVIGAVVVVFVSAAVLVLVRQTKLKQRRKREAVSEVNDKQFQRVSYHTLSRGTDGFSEANLLGRGRYGSVYRCTLEEEEEGAGAAATVAVKVFNLQQSGSSKSFEAECETLRRVRHRCLLKIVTCCSSAGPQGEEFKALVFEFMANGSLDDWIHPRSSNPTAENTLSLSQRLGIAADIFDALDYLHNHSHPSIVHCDLKPSNVLLADDMSARIGDFGISRILPLGTVAKAMQNSESSIGIRGSIGYIAPEYAEGCAVSGLGDVYSLGILLLEMFTGRSPTDDMFKDSLDLHRFAAAALPDRAIEVADQTIWLHEEADGNGDVVHGRVTTSVIRQCLVSVLRLGISCSKQQPRERVLLADAVTEMHSIRDGYLRSCSMVEQ

SEQ ID NO: 11187 - protein, 430 aa, Zea mays
  VARIANT 342..430: note = Derived polymorphism lacks residues 342 to 430
  VARIANT 74..430: note = Derived polymorphism lacks residues 74 to 430
MGNICGGSGKDRVAEDFRPSSPGTTMTSKTSGSITTSLSTTGKLSSVGSSFMASASSRSTSGGFDEGAKYSDGQILEAPNLRTFTFVELKTATKNFRPDSVLGEGGFGRVYKGWVDEKTMAPTRNSTGMVVAVKKLNSESMQGFEEWQSEINFLGRLSHPNLVKLLGYCWEDKELLLVYEFMAKGSLENHLFRRGCAPLSWELRLKIAIGAARGLAFLHASEKQVIYRDFKASNILLDANYNAKLSDFGLAKLGPTGSNSHITTRVMGTYGYAAPEYVATGHLYVKSDVYGFGVVMLEMLSGQRALDPNRPSGQLSLADWAKPYLADRRRLARLMDPRFEGQYNSRQAFQAAQLTLGCLAGDPRSRPSMKEVVETLERVEAVKSRARGGGSGSGSGRAGAAAHHRSPRVGGGARAASRPAANGHNARPAR

SEQ ID NO: 11188 - protein, 218 aa, Zea mays
  VARIANT 14: note = Ancestral polymorphism is R, Derived polymorphism is C
MASSALPSRTLHRRALPSSTPCHPATETFAPGAVSRRRAAVRLLSAGFLTAVAPPPSLAARRGRVVVPPEDYATAPDGLKYYDLVEGKGPTAEKGSTVLVHFDCIYRGITAVSSRESKLLAGNRSIAQPYEFIVGSLPGKERKRDFADNANGLYSAQAAPKPPAAMYTITEGMKVGGKRRVIVPPELGYGKRGMSEIPPDAPFELDIELLEAVSPAKE

SEQ ID NO: 11189 - protein, 951 aa, Zea mays
  VARIANT 138: note = Ancestral polymorphism is P, Derived polymorphism is S
MRIAFLVLLVLSLFLLPNGIGKSLAARPSVVNIGSILRLNSTTGGVSDVAIRAAVEDINSDPTVLNGTTLHVQTRDTNCDDGFLGMVQALQFMETDVIAIIGPQCSPIAHIISYVANELQVPLMSFASDATLSSIQFPFFVRTMPSDLYQMAAVAAVIDYYQWKIVTAIYVDDDYGRNGIAALDDELTARRCKISFKIGFRSNAKKSDLLNLLVTVSNMESRVIILHTGSEPGLKLLSLANGLNMMGNGYVWIATDWLSAYLDANSSVSAETINGMQGVLTVRPHTPKSKVKSNLVSKWSSLSKKYNHSDLRTSAYGFYVYDSVWTVARALDAFFDDGGRISFTNDSRLRDETGGTLHLEAMSVFDMGNKLLNKIRNVNFTGVSGQVQFNAQFELIHPAYDIISIIGNGMRTIGFWSNYTRLLSTVLPEDLYSKPPNTSLANQQLYDVIWPGETAQRPRGWAFPSNAKELKIGVPNRFSFKDFVSKDNATGSMKGYCIDVFTQALALLPYPVTYRFIPFGNGTENPHYSQLVQMVADNVSVDMHFFPPHFIMYSSDKSKLILQDFDAAIGDIVITMSRTKAVDFTQPFIESGLVILSPIKKHITNSWAFLQPFTLGMWCVTGLSFLVVGVVIWILEHRINNDFRGSPRQQIITIVWFSFSTLFFAHRENTMSTLGRGVLLIWLFVVLIIQSSYTASLTSILTVQQLDTSIRGLDDLKNSDYPIGFQVGSFVEEYMIKELNISQSRLKALGSPEEYAENLKLGPKKGGVMAIVDERPYVELFLSTYCKIAVAGSDFTSGGWGFAFPRDSPLQIDLSTAILTLSENGELQRIHDKWLKTGDCSTDNAEFVDSNQLRLESFMGLFLICGAACVLALLIYLGITIRQYLRHEQPGPAISVDAGSSTSKRSLRKFISFADDKQPPPKKKRAMSLSRSSMPTMPMSNRPGADIDVES

SEQ ID NO: 11190 - protein, 374 aa, Zea mays
  VARIANT 175: note = Ancestral polymorphism is D, Derived polymorphism is Y
  VARIANT 91..374: note = Derived polymorphism lacks residues 91 to 374
  VARIANT 90: note = Ancestral polymorphism is I, Derived polymorphism is L
  VARIANT 87: note = Ancestral polymorphism is M, Derived polymorphism is T
  VARIANT 6..374: note = Derived polymorphism lacks residues 6 to 374
MSRAAQNMSLSPVILRATTAYDDNCSTPPPPTAVLPAPHMVRCAVAVAHEQLPPARKDDNGDHEVGVGLVLNFSNAHVVPSARHLATIFLRFGPVKEVWADNSTALVVFDSGAHADEAFSGATEIGSISVSLVSFHVTSSLPAAPGDPAAQPQTQSMSSDASPVEALRIGDKEIDFYSQFHIIVLGLDSIAQARATALESREVIAVEALKQAKDEHVQKLMEAYLVTHNQRRALRIQEPASSSPVQPMRDPQILEGHQISTRGEKKAWELPEGAIVLEGIPVFPQAMDKQEHLESSQDPPPELCEPLTMKKIPAPSLEVKEEAASTPPAPPPSEELQEPAPLEEEFDPVLPSQSLPEEVINISSLLTHLGDVSD

SEQ ID NO: 11191 - protein, 91 aa, Zea mays
  VARIANT 5: note = Ancestral polymorphism is S, Derived polymorphism is R
  VARIANT 25: note = Ancestral polymorphism is L, Derived polymorphism is M
  VARIANT 37: note = Ancestral polymorphism is A, Derived polymorphism is V
MAMASRSSTTGTAVLCFLVVVSLFLAPSLFVAGTEAAAAYGAGAGAGRKMKQAAAGAVATKQDGYGYPATSSPAGYPAVPCCPHPPEGGRG

SEQ ID NO: 11192 - protein, 625 aa, Zea mays
  VARIANT 26..625: note = Derived polymorphism lacks residues 26 to 625
MYYPADQGEAPLTEEERAERLRGMTKEINKSNTRLHGRATADDARPKEEEGAAILYALVASSTPGGMAYHDPDKLKKYDLEDLRKTPNPFYLESDKKAGNGYSFVRTPSPAPGVDESPFMTWGEIDGTPLRLDPDETPGGSERAHFKMPPPPARDIKAHLLSRDAARKIKERSKPFHRPPLPSPARGVSASPRTLSPAAQKFVRNAISKSSKSSSAIDESLRASYRGSTPSASTPKSRFSRDPGLTSRSPSTRQGSTPPCILPSGDTYDTIGRKPNKNKLLFRRPTPAMSGEDENDVPPPCEDNDSFSRILDKVNQRRRERYAHLLEPPPPAEAGSKPSEDAKRNRITDGYGTSGQPPSTLEVAKFTAKNQLMYYPADQGEAPLTEEERAERLRGMTKEINKSNTRLHGRATADDARPKEEEGAAILYALVAGSTPGGMAYHDPDKLKKYDLEDLRKTPNPFYLESDKKAGNGYSFVRTPSPAPGVDESPFMTWGEIDGTPLRLDSDETPGGSERAHFKMPPPPARDVKAHLLSRDAARKIKERSNTFHRPPLPSPARGVSASPRTLSRAAQKFVRNAISKSAKSSSAIDESLRASYRGSTPSASTPKSRFSRDPGLASRSPSTR

SEQ ID NO: 11193 - protein, 493 aa, Zea mays
  VARIANT 326..493: note = Derived polymorphism lacks residues 326 to 493
MLRSPGNSPRLLSPSPTPAPSTPRPASPPPSNAPSSKRRRSEVLDEDTYVAAIERIIERDYFPDLPRLRDRLDWLQAVRSHDPLILRDAQLKILDRRRRAQRHAAGPVPTPTPATSTALRSPSFLTTPAGSVAGGVRGPDADHDDDVAAALSLDGFFHRFTSEDNDSFSRILDKVNQRRRERYAHLLEPPPPVEAGTKPSEDAKRNRITDGYGTSGQPPSTLEGAKFTAKNLLMYYPADQGEAPLTEEERAERLRGMTKEIDKSNTRLHGRATADDARPKEEEGAAILYALVAGSTPGGMAYHDPDKLKKYDLEDLRKTPNPFYLESDKKAGNGYSFVRTPSPAPGVDESPFMTWGEIDGTPLRLDPDETPGGSERAHFKMPPPPARDVKAHLLSRDAARKIKERSKPFHRPPLPSPARGVSASPRTLSPAAQKFVRNAISKSSKSSSAIDESLRASYRGSTPSASTPKSRFSRDPGLASRSPSTRQGSTPPW

SEQ ID NO: 11194 - protein, 144 aa, Zea mays
  VARIANT 37..144: note = Derived polymorphism lacks residues 37 to 144
  VARIANT 41: note = Ancestral polymorphism is Q, Derived polymorphism is L
MSGEEEENAAELKIGEEFLKAKCLMNCEVAIILEHKYEQIQQHASSESDPSSQVSQVFEKSLQYVKRFSRYKNPDAVRQVRETLSRYGLAEFELCTLGNLCPDTSGEATALVPSLKSGGRFVGDPGDEKIEKMLNDLSLIKKFE

SEQ ID NO: 11195 - protein, 416 aa, Zea mays
  VARIANT 101: note = Ancestral polymorphism is G, Derived polymorphism is W
  VARIANT 85: note = Ancestral polymorphism is P, Derived polymorphism is L
MAGELRHRRVPSEDGDEGAAASQGPDPAAGNGKAGTASEGAEPRRGKRDALGWLEWGRGWMAVVGEFLFQRIAASHLANPLELPPLDGVSVVVTGATSGIGLEIARQLALAGAHVVMAVRRPKVAQDLIQRWQNQNSETGRPLNAEVMELDLLSLDSVANFADAWNARMAPLHVLINNAGIFAIGEPQRFSKDGHEEHMQVNHLAPALLAMLLIPSLLRGSPSRIVNVNSIVSSLSSPLVMHTVGFVDAEDMNLRKHKYRSWLGYSNSKLAQVKFSSMLHKKIPAEAGIGVVCASPGIVDTNVARDLPKIVVAAYHLIPYFIFDAQEGSRSALFAASDPQVPEYCETLKSEDWPVCACINYDCSPMNASEEAHNLETSQLVWEKTLEMVGLPPDALEKLIAGESVQCRYGQQDTTF

SEQ ID NO: 11196 - protein, 663 aa, Zea mays
  VARIANT 308..663: note = Derived polymorphism lacks residues 308 to 663
  VARIANT 310..663: note = Derived polymorphism lacks residues 310 to 663
  VARIANT 368..663: note = Derived polymorphism lacks residues 368 to 663
MDRVRGSAFLLGVLLAGSLFAFSVAKEETKKLGTVIGIDLGTTYSCVGVYKNGHVEIIANDQGNRITPSWVAFTDSERLIGEAAKNQAAVNPERTIFDVKRLIGRKFQDKEVQRDMKLVPYKIINKDGKPYIQVKIKDGENKVFSPEEISAMILGKMKDTAEAYLGKKINDAVVTVPAYFNDAQRQATKDAGVIAGLNVARIINEPTAAAIAYGLDKKGGEKNILVFDLGGGTFDVSILTIDNGVFEVLATNGDTHLGGEDFDQRIMEYFIKLIKKKYSKDIGKDNRALGKLRREAERAKRALSNQHQVRVEIESLFDGTDFSEPLTRARFEELNNDLFRKTMGPVKKAMEDAGLEKSQIHEIVLVGGSTRIPKVQQLLKDYFNGKEPNKGVNPDEAVAFGAAVQGSILSGEGGDETKDILLLDVAPLTLGIETVGGVMTKLIPRNTVIPTKKSQVFTTYQDQQTTVSIQVFEGERSMTKDCRLLGKFDLNGIPSAPRGTPQIEVTFEVDANGILNVKAEDKGTGKSEKITITNEKGRLSQEEIDRMVREAEEFAEEDKKVKERIDARNQLETYVYNMKNTVGDKDKLADKLEAEEKEKVEEALKEALEWLDDNQSAEKEDYEEKLKEVEAVCNPIVSAVYQRSGGAPGGDADGGVDDDHDEL

SEQ ID NO: 11197 - protein, 175 aa, Zea mays
  VARIANT 119: note = Ancestral polymorphism is R, Derived polymorphism is S
MASSAYAAWDAAEEADIDASASQEELIGRARFISRDNEEEGEGEGEEEEEVEVFSTPPLTHQDPQSQGEEVIVMCSIPFTQPDPTPPPAPAPSPPSDSKSRRPERVKLKPRKKVCKRKRVCKRKVRRANKIRSPTPSRSPELDPLARAVLMIPTAPSTITGGEDILEVARSRGIF

SEQ ID NO: 11198 - protein, 582 aa, Zea mays
  VARIANT 275: note = Ancestral polymorphism is R, Derived polymorphism is I
MEAWPPLAPAAAAAATPVAASDDAAVTPAGSGAWGPAATAQRKAVEQESAAQAVSRIVASCANSSGVAVAVVDANAVISGAPALSTSAGRLVTVPEVLEEVRDAAARRRLGLLPIPVETVDPAPEFVKKVTKFARETGDIQTLSDVDIKIIALAYMLEAEIHGSSHLREHPPPLLEVNVRKLSEAPLPGWGSNVPNLKEWEELDQMSEAGGDINSRILPLKDIENQDLPMSETNSVCEAQEDTEDQPSEKDAPVAWEEDENNVGWMPAVSRSTHRRYLRRKARRDALKESGQSFETSSVAASIDSDKVLSENGGLEHGLTSTGGLSSVPEKISASSDGFELQADPEIAGEQLHSDQLSYGDDTDACTKELDKLDIKGEDEGGDDAHSVDYESSEQSWALRSLSESTIACVTSDYAMQNVILQIGLRLIAPGGMQIRQMHRWVLRCHACYKVTQEVGKIFCPKCGNGGTLRKVSVTVGENGITMASRRPRVTLRGTKFSLPMPQGGRDAITKNPILREDQLPQKVLHPKLKKSSKADDFLGVEDIFSHSGDKKASLKPPVGKALAMFSGKRNPNDNHFSRKKH

SEQ ID NO: 11199 - protein, 412 aa, Zea mays
  VARIANT 18: note = Ancestral polymorphism is D, Derived polymorphism is G
MAAKAKLILWELKNVKAGLAFAKECCAQLEEENKMLCESYDNSDNPEDDDLDQFLNYGLCPHFELWFKLIRLRGPLRRLPLCLAYASWRLLFTLNKMVNEHLPMPSLLVDAASLLQRSDKNHEICQKKTAKQAVSEANGRAYDDLYWRLSTKEGKKDAYKIARIRERNTRNLNQVKCINNEMDQLLVKGQDIKQRWQRIQESEVKETLKRMKGGKTMGPDGILIEVWKCLGDIAIVWLVKLFNHIFRSNKMPDEWSTLVPIFKNKEDIQRCTNYRGIKLMSHTMKLWERVIEHRRRGMTHITMNQFGFMSRRSTMEAIFLIKHVMERYKEQKKDFHMVFIDMEKAYDKIPRNLMWWPLDKHKVPIKYVTLIKDMYDKVVTRVRTTDGDTNVFPINKGLHQGSALSPICFGDR

SEQ ID NO: 11200 - protein, 222 aa, Zea mays
  VARIANT 129..222: note = Derived polymorphism lacks residues 129 to 222
  VARIANT 102..222: note = Derived polymorphism lacks residues 102 to 222
  VARIANT 86..222: note = Derived polymorphism lacks residues 86 to 222
  VARIANT 71: note = Ancestral polymorphism is S, Derived polymorphism is A
  VARIANT 67: note = Ancestral polymorphism is E, Derived polymorphism is V
  VARIANT 65: note = Ancestral polymorphism is A, Derived polymorphism is V
  VARIANT 51: note = Ancestral polymorphism is F, Derived polymorphism is L
  VARIANT 48: note = Ancestral polymorphism is D, Derived polymorphism is V
  VARIANT 35: note = Ancestral polymorphism is H, Derived polymorphism is Q
  VARIANT 28: note = Ancestral polymorphism is G, Derived polymorphism is C
MRLEVDAHLGRLRGGVTGLESYALSGNGRAIGGAHLGMSLDVMLIEIDERFNALKLLMGSVFRQAKEMLGSVNSSVSDLQSENELQLEVFGAIIGECVNGLQEELERKLYAQMSITNTMSRNWKEAITQFATMLIAASPRLLNVGDPSFGKSLVASKKRLVGDVEEQLEPDKNDDGVQATQQQLELTKENTEARASTCSTSQELQHVLLRWLRRQASHPPRF

SEQ ID NO: 11201 - protein, 239 aa, Zea mays
  VARIANT 29: note = Ancestral polymorphism is A, Derived polymorphism is V
  VARIANT 86: note = Ancestral polymorphism is A, Derived polymorphism is T
  VARIANT 92: note = Ancestral polymorphism is R, Derived polymorphism is C
  VARIANT 93: note = Ancestral polymorphism is R, Derived polymorphism is C
  VARIANT 105: note = Ancestral polymorphism is L, Derived polymorphism is I
  VARIANT 112: note = Ancestral polymorphism is A, Derived polymorphism is V
  VARIANT 183: note = Ancestral polymorphism is P, Derived polymorphism is L
  VARIANT 195: note = Ancestral polymorphism is R, Derived polymorphism is H
  VARIANT 224: note = Ancestral polymorphism is D, Derived polymorphism is Y
MAASTTRSPAAIDRHAVRLITRVSIAMAAVATLSLFYLLRHASIYRFPASHQSALTISLAPFPRSSCDAASRRVVPPDHRLAKLRASPRWRRRAASLATSAFPPLRGLGILVAPSRVLCLAAGTGHAVDVFRAAGTRDAIGVDLVEFPPLVRRADPHHLPFSDGAFDLVFSDDPSATSGALFPSRLAREAERAVRRGGGIALAFDREIETVAVATLFKRSRVLDVKDVTLDGSQASRRS

SEQ ID NO: 11202 - protein, 94 aa, Zea mays
  VARIANT 40: note = Ancestral polymorphism is P, Derived polymorphism is L
  VARIANT 38: note = Ancestral polymorphism is G, Derived polymorphism is D
  VARIANT 37: note = Ancestral polymorphism is C, Derived polymorphism is Y
  VARIANT 25: note = Ancestral polymorphism is R, Derived polymorphism is C
  VARIANT 24: note = Ancestral polymorphism is R, Derived polymorphism is C
  VARIANT 23: note = Ancestral polymorphism is G, Derived polymorphism is S
  VARIANT 22: note = Ancestral polymorphism is C, Derived polymorphism is Y
  VARIANT 19: note = Ancestral polymorphism is C, Derived polymorphism is Y
  VARIANT 9: note = Ancestral polymorphism is G, Derived polymorphism is S
MGKGTGSFGKRRNKTHTLCIRCGRRSFHLQKSTCSSCGYPAARIRKYNWSVKAIRRKTTGTGRMRYMRHVPRRFKSNFREGTEAAPKKGVAAAN

SEQ ID NO: 11203 - protein, 571 aa, Zea mays
  VARIANT 406: note = Ancestral polymorphism is R, Derived polymorphism is W
MTSTAYSRSSKLPGGERRLPPRLMRGFASKIEPKKLGVGLIAGCCLALLTYVSLAKLFAIYSPVFASSANTSALMQQNAPPTSSKPSVPETETIPPQETIGGGGDSSDPVDLREGATGSEEPGLPEAALTRKDMAAGSDEPGLPTRKDDGEDAAAEPTTKPSEDGKGNGSGGGQGVGKMICDENGVDEGFPYARPTVCELSGDVRVSPKQRTVYLVNPSGGGGFDERGEKRVRPYARKDDFLLPGVTEVTVKSVPSAAVAPKCTRQHTAPAVVFSVAGYTDNFFHDMADALIPLFLTTAHLDGDVQLLVTNYKPWWVQKYTPVLRKLSRHDVMSFDAADEDDAVHCFPAGAFLGLYRDRDLILSPHPTRNPRNLTMVDFARFLRGALALPRDRPAALGEQPGARPRMLIVSRAGTRRLLNLDEVAAAADELGFNVTSAEAGADVPAFAAQVNAADVLVGVHGAGLTNQVFLPTEAVVVQIVPWGKMDWMATNFYARPAAGLGLRYLEYYVGAEETSLKDKYPREHVVFSDPMALHKQGWQALAQTVMKQDVTVNLTMFRPVLLQALDKLQQ

SEQ ID NO: 11204 - protein, 999 aa, Zea mays
  VARIANT 213..999: note = Derived polymorphism lacks residues 213 to 999
MPPPTRGRGRGRGRGRGRGRGRGRGRPSKDTVAEDSAHATEESGEENLQEKVQEGGKVNLTEKVQEGGEENLTEKVQEGGEENLTEKENEGIVEVSKPPQRRRKDPVADPSSLESSGFMRFRERRNASAVQEQGPKKRRITEDSNMCHQCQRNDSGRVVRCQGCVVRKRKYRYCVKCIKRWYPHLSEDDFANNCPVCQNNCNCKACLRGDITRANSRKKKKLLQINSGGYSVSEQDKIKFSMRIVHFLLPWLKQFHQEQMQEKSAEAATKGIDADKLEVPLTICGKKERIYCNNCRTSIVDFHRTCNKCNYDLCLQCCQELRRGLVSGNDAKVDGGGKQDFLSGVSHDKIISKGPSDGQNDMLIDSVVPGENNTSSLRQWSVNKDGTIPCPPNAFGGCGSSLLELKCLFKEKFIAELLEKANSALNNEMEVKIEGSKCPCFTESGDMDDGISRKSSCRENSCDNYIYCPTATDVQNGSLDHFQEHWLKGEPVIVRDTLALTSGLSWEPMVMWRALREKKEKVERLSVLALECLGWCEVDVNIHMFFAGYSSGLVGPDDLPLLLKLKDWPPHSSFEERLPRHGAEFMSALPFREYTDPKWGPLNLAVKLPDNVNKPDLGPKTYIAYGVSKELGIGDSVTKLHCDMSDAVNILTHTDEIKLKAKRIAAVEKKKRCLGMKILSTKEASGGLQRCADYFGMPTAPSESNKEPRPEECVNELGIKQPVQHVASEEQEGVQDDAKADANVMNVSFGKGKSEDSFGTINGTNSGDKIESPSGLAERTLTQPTTKGCSKQRGRSSNGRGNRTKKIEEGNASGLIAVAPESEDDDDDAAFIDGNQAEGGALWDIFRREDVSKLHDYLMKHAHEFRHCNFEPVKQVTHPIHDQCFYLTIEHKRKLKEEYGVEPWTFEQKLGEAVFIPAGCPHQVRNLKSCIKVALDFVSPENVRECIRLTEGFRLLPKWHKVNEDKLEVKKIALHAFNQAIKDITDESSNSNESKWIRR

SEQ ID NO: 11205 - protein, 374 aa, Zea mays
  VARIANT 45..374: note = Derived polymorphism lacks residues 45 to 374
MDAAMALALLFFCVLLLASGAIAFLLIRHCLARAPPHRHRQAQPEAAAKQLQQQALLAIKKEPAPRRLAWREVEALTGGFDEAAVVGRGGSSTVYLARLLDGSPVAVKVHRWCGGERRLRAFRQELDLLRRLRHPHIVALLAYSDDHEDEGALVLEYLGGGTLADALHGTAAAPLPWAQRMRVLHDVACALEHLHGGGGGGASVVHGDVSASNVLLSDGGVRLCDLGSACEGFSAAVAPARAAVASPGYADPFFLRTGIVSSRSDVYGFGVLLLEAVTGLPAASEAENLTARILPRVRARGVAGLVDGRLGDGGHDEEEAAGVARLAVECVAAQPGLRPSMAQVRAAIAEKAARSIAKAGCGHHIQLSKLLELT

SEQ ID NO: 11206 - protein, 429 aa, Zea mays
  VARIANT 336: note = Ancestral polymorphism is T, Derived polymorphism is P
  VARIANT 168..429: note = Derived polymorphism lacks residues 168 to 429
METISSCPICNIQVLTAELEWHANSHFDDDQLQMDMELAHQMSVAESSTDAMNDPKHYSGSFTSDSNALGALSSHSGYSHHYSELLDEQISCLVRAQIRSKVQEVEGGILSLLRSCLESEAGSSTSMISCYIDHHQSLSSEDKGWGCGWRNIQMLSSHLLKQRPEAREVLFGGSGFVPDIPSLQRWLEIAWDKKFDTIGSSHFHNKIYGAKKWIGTTECAALFRSFGLRARIVDFDSTESSDLHSNNGSRAASQVRGPMDKFLIKNKPPKSSSELCREDAESTRGQQALVDWVWNYFASERSDRLATQRVTVSNKTPLYFQHQGHSRTIVGIQKKPDRRGSQEQYSLLILDPGHLSLWLRPSKCFPLMPQRTADLERCLRSKKGWQRLVKRGVHTLRKPQYQLCYVDPGIASSEEVERLKTIDGTLVRF

SEQ ID NO: 11207 - protein, 548 aa, Zea mays
  VARIANT 208: note = Ancestral polymorphism is T, Derived polymorphism is I
MADTQPPPLPYSYVPLPAADAASADVSGAGSRRQALCAAALGLLAVAALAGVVPVPGRGAVGMPETASSPRSSSRGPEAGVSEKTSGAWDGRIRGAAAAGGGGNAFPWSNAMLQWQRTGFHFQPQKNWMNDPNGPVYYKGWYHLFYQYNPDAAVWGNKIAWGHAASRDLVHWRHLPLAMVPDHWYDTNGVWTGSATTLPDGRLAMLYTGSTNASVQVQCLAVPADDADPLLTNWTKYERNPVLYPPRGIGPRDFRDPTTAWLDPSDGAWRIVIGSKDDHDHDHAGIAVVYRSRDLVHFDLLPGLLHRVVGTGMWECIDFYPVATTGGVDMSDTSIGTNDVLHRRRVLWGWVGEADSERADVSKGWASLQGVPRTVLLDTKTGANLLQWPVEEVETLRANSTDLSGITVDHGSVFPLDLRRATQLDIEAEFQLDRRAIAAALDDDVGYSCSTSGGAAARGALGPFGLLVLADRRRRGEQTAVYFYVDGSLATHFCQDESRSSRANDVVGSAVPVLEDEATLSLRVLVDHSIVESFAQGGRSTATSRVYS

SEQ ID NO: 11208 - protein, 1529 aa, Zea mays
  VARIANT 825..1529: note = Derived polymorphism lacks residues 825 to 1529
MASSSSFAPDDQTDADFFDKLVDDDDPATSLPDDPPIPEPQAPPEGSGKGGAGVHTAVKQVQWASFGGGADDGPDPFAHLSGGAGDDDGFLVTTAGTQTASDHAFFGGTQSLAAEVTDQDFFAGSNSSNQHNVSGQHDQGGGSTAVDSADPMSLEAMYPGWKYDEASQQWYQLDDSVNSTGNAAQVLDNSTRYAQQQQQLHASYLHNSVHSGLETIAEEGTTATGAVSSWGQGAASEYPPNMLFYAEYPGWYFDTNTQQWHSLELYQQAAMQAGTASMGQTVIANDGVAATSSLTGYNAAQNEDLAAHDQVTQHNSFSNSFAHQNQWQITDAFGNNVRSECATENSLASSSYGFQQHRNADSTSSSTNQRAGFNAAETVTDHYGGRKGVESPSIQSGYSTSDIQQSSHKAFEPYTGYQDHYKAFEPATGHHASNNMFKQSTGNQGGYKAFEPAMDNQSGYKAYEPSMGHHSASWEPVPSTGHQTDFKGSGASTVHQAGYKEFETSTGYNTSLKAFEPSSSQHAGYMGSQSNYMGFDTSTNHHGYGDANVVASTQGFVPMQTTYQGQTQAIANSQVHLSNSYLGIDNSMNFNQQQFLGANASNLQFSHSPHDGRAGRPPHALVSFGFGGKLIVMKEASSMPASFNNGIQGNSSGTVSVLNLSEVVMDKIDSSSITNGSALSYFHALCRQPVPGPLVGGSAASKDVNKWIDEMIAWYDSSSELQRSDTRKLLISLLKILSQHYGKLRSPFASDPSQEETDGPEMAVTKLFSSFKSTVNMGDYGSIVSCMKNIPSESQMQAVAQEVQNLLVSGRRKEALQCAQGGQLWGPAIILALQLGDMFYVDTVKKMAHFHFVSGSPLRTLCLLIAGQPADVFNVDNNVNIDYGTSHQPMECHDFWVSLTNNFPAFLFTFFFDNLFFLSQPGPNGMLDDWEENLAIITANRTKGDDLVITHLGDCLWKEKNEIAAAHSCYLVAELNIDSYSESARLCLIGADHLKCPRTFASPEAIQRTEVYEYAKVLGNSQYILLPFQPYKLIYAYMLVEVGKVSDSLRYCQASMKVLKASGRAPELEVWKQLISSLEERIRTHQQGGYGTNLAPAKLVGKIFTSLDKSISRMMGTPSAPLPPLPHGSVSDRESHSMPEAAKFINSQSVMAMSSLMPSASMQSMTEIAENSDGTGRKMAHNRSVSEPDFGRTSKQGGGSDGTQSSAAGSGSSRFGWLVQKTMGLVSKSHRQDPISVLKAKLGDQNKFYYDEKLKRWVEEGAVVPAEEPPLPPPPTKSSFQNGMPDHKLNGHMSVGHAPSGVTEWKSSNYSEQGLGMPPIPPSQNQFSSRGRMGVRSRYVDTFNKSGASGAVPSYNKPAAPSVTPPAGAKFFIPTAAPVAADQMMPHQAAEIHSETMQQDERAASPPAGTSFSSTPPPTQFSSPPPHTQFSSPMQSTIHRQSSMANISTPYQSSGVSSLSSDTSFSKSRAASWSGTYSEQFSAFAGTRSPDGQTVRSPLMPGKPSHSRSNSNSSVQLNGLTEDLHEVEL

SEQ ID NO: 11209 - protein, 261 aa, Zea mays
  VARIANT 154..261: note = Derived polymorphism lacks residues 154 to 261
  VARIANT 97: note = Ancestral polymorphism is R, Derived polymorphism is Q
MPRDRDEPAAVRVYTVCDESRYLIVRNVPSLGCGDDLASLFGTYGPVEECTPMDAEDSEPYTDVFFVKFSQVNNASSSLPAAQVLPSFLAVKVQNQRPPFEMQNWCSCCRFAKRKLDESVFLGNRLQVTYAPQFESPQDTKEKLEVRRKEVLGRIKCVPTLYFLVSTALPEGSSPAQGSSSGNHHQMNSNKREYMKTIHASPIEDPRFSHVSSDKDYFPSESMNATVKLVRGKLDKIQSGGDNSSTSAASRKPGVDKRRRI

SEQ ID NO: 11210 - protein, 540 aa, Zea mays
  VARIANT 281: note = Ancestral polymorphism is G, Derived polymorphism is E
  VARIANT 270..540: note = Derived polymorphism lacks residues 270 to 540
  VARIANT 261..540: note = Derived polymorphism lacks residues 261 to 540
MASPHLPFLSFPKTLPPLPPPLKTHAHRTSLAAAPAPPPAPPDGAGPAAPTRGDRFLGRQLATEAAARVLAPEDADRRRRRKEKRRALARKPSGLASCYGCGAPLQTAEEAAPGYVDPDTYQLKKRHHQLRTVLCGRCKLLSHGHMVTAVGGHGGYPGGKKFVSAEQLREKLSYLRHEKALIVKLVDIVDFNGSFLARVRDFAGANPIILVITKVDLLPRDTDLNCIGDWVVESVVKKKLNVLSVHLTSSKSLVGITGVISEIHQERKGRDVYILGSANVGKSAFISAMLRTMAYKDPVAAAAQKYKPIQSAVPGTTLGPIQIEAFLGGGKLYDTPGVHLHHRQAAVIHADDLPSLAPQSRLKGRCFPANDTDVELSGNSLFWAGLVRIDVIKALPRSRLTFYGPKKLKINMVPTTEADQFYETEVGVTLTPPTGKERAEGWTGLQGVRELKIKYEERDRPACDIAISGLGWISVEPSGVPSNSAEEVYDGGELHLVVHVPKPVEVFMRPPLPVGKAASQWYRYQELTEEEEELRPKWHY

SEQ ID NO: 11211 - protein, 1008 aa, Zea mays
  VARIANT 118..1008: note = Derived polymorphism lacks residues 118 to 1008
  VARIANT 508..1008: note = Derived polymorphism lacks residues 508 to 1008
MASINQEIRQIGRMMVISGNILEPPEWILQAQDLACDVQDFTDIYTWLQSKSRRRALAHIGYIAQLKDRISSLREWQQRGGSSSSSSQQERAAALSFSRRSCGPCAPEDVLVGIDQPRKELSDLIFEREDVVHIVQQKPRVVSVVGYSGIGKTALARAVYYDRSVRSAFDDVAWVVASECSHGCDLVSKICQQVKDEQAGNGAVVVPDCYRLKEIMRDKRFLIVIDDLHGAGMWNDIKGVFSETHSGSRIIVTTSIQSVAAACTPEPRYIYRMPSLGNLDSEKLLWMRVGRHASRTPALEHALGNDTLKKCGGLPLALISVANHLCLGKALFEEMDRVLAKCYDSLPDNAHRMCLLSLSTFPQGHVMKRKRLIRRWIAEGLAVVGDCELSAEQVAGNIFDVLIDRNVTEPVLTAGHGSRSKVKACLVLGVIKDFINKTAVSNETVAIIQNDELLLPNRMLVAHRPVRRLLVHGGTTKKSEAVAKAIGLDQVRSLTICNAVPFDFQGCWLLRVLDLEACQGIDKSILGSICKLVFLKYLSLRGTDVYGIPKKVKKLQCLETLDLRDTRVEELPIQVLMLPRLAHLFGKFELPPQLKHGHRTARRRRSRLQAFFSQRSRLQTLSGFVMVDDSNSFEHMMITIKSLRKVKVWCKNSISSHQERHLASSLQQRLVAGNSNPLESLSIDFGNESINFLNDVGAISALIGSMKLQGRLTSLPSFMTSYDTTLSQLQLSSTGLGIEALSLLQILRRLVSLKLAQDGDGFWGDCFAVKKDGFPSLLRLCIQARELPQLHIHEGGMSSLTSLELLCPMFASRGQSDSDSDSDSDNLSPVAFRYAYAETYSEKRSKQVLSVEKPKAVDPGISFKEPSSETRSEGTEIQEIDSPKTSKEAGPSIGFKEPSSETRSEGTEIQEIDSPKTSKEAGPSIGFKDIILPENTFRRNFSKQVKSRFDLKQHFKGMEYLQCLNELVLHRSVSDEIQVTKKKKKKKEKEKKKKKKKKKKKKKNVLVK

SEQ ID NO: 11212 - protein, 283 aa, Zea mays
  VARIANT 49: note = Ancestral polymorphism is T, Derived polymorphism is M
MAGTGTVKVHNVSLKASEQDISEFFSFFGEIVHVELKSCDERSQFAYITFRDNQGAERDMLLTGATIEDMAVIITPAIDYKLPAFVLADLESKNTGGMESALQKAEDIAVSMLAKGFVLGMDAVEKAKAFVEKHQLTSTATAKVASLDRTMGLSQKFSTRTLVVNEKMKEMDEKYQVAEKTKSALAATEQTVSTASSVIMSNRYILTGAAWVTDAYNKVATTTTDASKSIKERMMAEQEGANQSGETAKVDLLEISEANEQEWKRHEDDSTKNVVQESPEMTC

SEQ ID NO: 11213 - protein, 139 aa, Zea mays
  VARIANT 29..139: note = Derived polymorphism lacks residues 29 to 139
MTVAVYGDGDKPTLIMYPDVALNYMSCFQGFFFCSEVASLLLHNFCVYHTNPQGHEMGAAPMSSDVPVPCVADLADQVADVLHFFSTDLDDEPDGENPCGVKKDLEAMVFHPEQAGSRYDMVLLAPCGSARPSLLAALM

SEQ ID NO: 11214 - protein, 190 aa, Zea mays
  VARIANT 27: note = Ancestral polymorphism is V, Derived polymorphism is M
MKTILATETMDIPEGVTVTVAAKLVTVEGPRGKLTRNFKHLNLDFQLQDGGRKLKVDAWFGTRRTMAAIRTAISHVQNLIAGVTKGFRYKMRFVYAHFPINASITNANSAIEIRNFLGEKKVRKVDMLEGVTILRSEKVKDELVLEGNDVELVSRSAALINQKCHVKKKDIRKFLDGIYVSDKGPIFDEQ

SEQ ID NO: 11215 - protein, 617 aa, Zea mays
  VARIANT 91..617: note = Derived polymorphism lacks residues 91 to 617
MASAFGTASTCGIKHAPAGVALAAPMKHLSLVSPSLVSLPRKMRPRRKYNFRVNAAKELHFNKDGSAIRKMQNGVNKLADLVGVTLGPKGRNVVLESKYGSPKIVNDGVTVAKEVELEDPVENIGAKLVRQAAAKTNDLAGDGTTTSVVLAQGMITEGVKVVAAGANPVQITRGIEKTAKALVSELQKMSKEVEDSELADVAAVSAGNNYEIGNMIAEAMKKVGRQGVVTLEEGKSAENNLYSVEGMQFDRGYISPYFVTDSEKMTVEYENCKLLLVDKKINNARDLITILEDAIRSGYPILIVAEDIEQEALATLVVNRLRGALKIAAIKAPGFGERKSQYLDDIATLTGGTVIREEVGLSLDKADNAVLGTAAKVVVTKDSTTIVGDGTTQEEVNKRVTQIKNQIEATEQEYEREKLNERIAKLSGGVAVIQVGAQTETELKEKKLRVEDALNATKVNATYGGSHSIPAAVEEGIVVGGGCTLLRLASKVDAIIETLENDEQKVGAEIVRKSLSYPLKLIAKNAGVNGSVVTEKVLANENFRYGYNAATGEYEDLMAAGIIDPTKVVRCCLEHAASVAKTFITSDAVVVDAKVAEQAPSSPANPMAMGGGSGFGF

SEQ ID NO: 11216 - protein, 136 aa, Zea mays
  VARIANT 127..136: note = Derived polymorphism lacks residues 127 to 136
  VARIANT 117: note = Ancestral polymorphism is V, Derived polymorphism is I
  VARIANT 105: note = Ancestral polymorphism is R, Derived polymorphism is C
  VARIANT 103..136: note = Derived polymorphism lacks residues 103 to 136
  VARIANT 70: note = Ancestral polymorphism is A, Derived polymorphism is P
MAACVPTVDAEEACALLSSSTHHYLDVRMWEDFDKGHVAGARNVPYYLSVTPHGKEKNPQFVEQVSALYAKDQNLIVGCRSGIRSKLATADLVNAVIYAISHWLRTWAVLRLLVQVVKDFYFQAYGWRPSHRIDCH

SEQ ID NO: 11217 - protein, 355 aa, Zea mays
  VARIANT 32: note = Ancestral polymorphism is A, Derived polymorphism is S
MVKEPRHMMVINTSRLLLTLLLLEFAAVAVPAMASTVVAGMVFCDQCKDGARGLFDYPLYGARVAIQCGGGDTPLTVRESNTNWFGGFSVRMEGSPDMNRCTARVVQGTGHCGAASSSGGGAVPRELTLAFRMLGLSLYTVPPLLSQPEEAMDFCPGHDHDRFRRGRPSSQAQAQAQAPAPASPSSSPPFFWRRRSRFLPPVWRKPLPQTLQPPPPPPTTAASQGSSACTYDMWSSPEHRCHWKVVTPNTTVAMAFGPLAAQRYGSELTLGEALEGRGDMYRTLLREATAALLNAYYNAPGGPFLYPTTASVMDHMNGALLSSGQRVLLEGARFRRANAGGGGRTRLMCDFTTCS

SEQ ID NO: 11218 - protein, 126 aa, Zea mays
  VARIANT 2: note = Ancestral polymorphism is E, Derived polymorphism is K
  VARIANT 15: note = Ancestral polymorphism is L, Derived polymorphism is M
  VARIANT 17: note = Ancestral polymorphism is F, Derived polymorphism is S
  VARIANT 53: note = Ancestral polymorphism is E, Derived polymorphism is V
  VARIANT 58: note = Ancestral polymorphism is C, Derived polymorphism is S
METSKMVKNIALVLLLFSISNQGNAAGACSLSDLAVTQTAVPSKANVYAVTVENRCICTQANVKLACDGFSSSVAVDPGVLSVDGKLCTLNGGRPIGMGPEYAVKFSYASPSQFAFKPVSSSIACS

SEQ ID NO: 11219 - protein, 379 aa, Zea mays
  VARIANT 167: note = Ancestral polymorphism is A, Derived polymorphism is D
  VARIANT 111: note = Ancestral polymorphism is R, Derived polymorphism is H
MAAAAPHFVLVPMLAQGHLLPMLDLARLIASHGARATVVLTPINAARNRAFLEQAARAGLTINFAELAFPGPALGLAAGCERVDMLDDISLIIPFYDAVWLLAEPLEAYLRSLPRLPDCLVSDSCMPWTASVTRRHGILRFVVHFPSAFYILAAHILEKRGLYDRADDDDDFEPFEVPEFPVRAVVSRATAQGLFQWPAGMERFRRDTLDAEATADGILFNTCAALEGAFVERLASELGKKIWVVGPLCLLSSDSDAGAMAGRGNRAAVDADRIVSWLDARPAASVLYISFGSIARLFPAQVWRDGVDRAVTDLMDEGPAGAARRARAKELGQQMRAAMAKGGSSDTDVRDLVRHVVEVARKKGEHEDTALAVLLESST

SEQ ID NO: 11220 - protein, 1059 aa, Zea mays
  VARIANT 906..1059: note = Derived polymorphism lacks residues 906 to 1059
MSPSILLLLLPYVLQLMPTSFAQVSTLPLPFGNETATDRDALLQFKASLSQQSPTLVSWNKTSDFCHWTGVTCSLRHKGRVSALNLSSAGLVGSLSPAIGNLTFLKILDLSSNNLQGGIPSTIGRLRRLQYLVFTGNSLHGGITDGLSNCTGLVIIFLGNNHLTGEIPSWLGGFPKLAALDLSKNNLTGSIPPSLGNLTSLQELYLQINQLEGSIPKELGRLKNVQWFALFVNHLSGEVPEAVFNLSSVVAFGVDQNDLHGTLPSNWGNNQPDLEFIYLAINHFTGNVPASLANATMMDTIDLSVNNFTGRMPPEIGTLCPRIFSFDSNQIEASATEGWEFVTLLTNCTRLRVLSFRNNMLAGELPPSVGNLSSTHLQVLYTGWNEIYGNIPPGISNLVNLQKLFLSQNHFTGALPNTIGRLKMMRALGIDGNLLSGTIPPSIGNLTLLQIITMDNNNLEGSLPSSISNLQMLSIATLSRNAFAGPIPKQIFNLSSLSYILDLSDNLFNGSLPPEVGRLTKLVYLNISRNNLSGSLPDLSNCQSLLQLHLDGNSFSGSLPASITEMYGLVVLNLTENSLSGAIPQEFGRMKGLEELYLAHNNLSGQIPTTLQNMTSLSQLDISFNHLSGQVPMQGVFAKSTGFLFVGNDRLCGGVQELHLPACPVHSRKHRDMKSRVVLVIIISTGSLFCVMLVLLSFYWRRKKGPRATAMAGAAVSLLDDKYPKVSYAELFRGTNGFSDGNLIGRGRYGSVYKGTLSLTNVETQVAVKVFDLQQSGSSKSFVVECEALRKIRHRNLISVITCCSSTDSEQNNFKAIVFEFMPNQSLDKWLHDLDPDSDASGRVPGLTLLQRLNIAVNVADAMDYLHNNCEPPIVHCDLKPGNVLLNADFVACVGDFGIAKILSDSDGDPVTNSSTFTGIRGTVGYVPPEYGECRQVSSCGDVFSFGVTLLEMFTGKAPTDAMFEDGLTLQGFVEIAFPEKLMDIVDPVLLSTDERFARKPRHRSVGGEEIENAIASVTKLALSCTKLTPSERKPMGDAAAEMRKIRDCYLADLTRANN

SEQ ID NO: 11221 - protein, 483 aa, Zea mays
  VARIANT 2: note = Ancestral polymorphism is A, Derived polymorphism is D
  VARIANT 85: note = Ancestral polymorphism is C, Derived polymorphism is Y
  VARIANT 97..483: note = Derived polymorphism lacks residues 97 to 483
  VARIANT 142..483: note = Derived polymorphism lacks residues 142 to 483
  VARIANT 171: note = Ancestral polymorphism is E, Derived polymorphism is K
  VARIANT 183..483: note = Derived polymorphism lacks residues 183 to 483
  VARIANT 200: note = Ancestral polymorphism is A, Derived polymorphism is T
  VARIANT 204..483: note = Derived polymorphism lacks residues 204 to 483
  VARIANT 226..483: note = Derived polymorphism lacks residues 226 to 483
  VARIANT 262..483: note = Derived polymorphism lacks residues 262 to 483
  VARIANT 279..483: note = Derived polymorphism lacks residues 279 to 483
MAQVGIQVNTITFNVLIDGYAKSGQMHQASAAYREMQARGLVPDSCTFNIIAARAHKFRYAAQLVHDHDMFSSHMSADGLDMLVCRLCWDHRLDDAWELRLGAIEQGVPLRVTGFNALIAAYNKEGLHEEASELYRIINKLGLTPSSSTFNYLIMGLCNQVRLDEAQLLLEHMVSKGYCLSTSFTICLDAYFRDGNAVGALKCWDDMGKIDLQTDFIAFSAYINGRSRLDYVNEAYQAFAEMTSRGIVPNNITYNSIISALCKAGNMTEAFKLEQNMRQSGLVPDIYTSNILIDGLCREGKLKMVDNLLLDMCSNGLTPDTVTYNTIINAYCRAQDMNSAMNFMNKMLVAGCEPDIFTYNIWMHSLYRNHMLNQAGKLLDELVAVDCSPNSVTYNTLMDGICSDVLDRAMILTGRLIKMAFKPNTITLNVFLSHFCKQGFGNRALMWAEKLREDSYVFYGATRNIIDWARREMEDDPRLTTRT

SEQ ID NO: 11222 - protein, 958 aa, Zea mays
  VARIANT 553..958: note = Derived polymorphism lacks residues 553 to 958
MEATSPHPPTTIRRNPPRRARPPPTPLAGDKSKPSPLSRLLEGEAAFAASVPCPPQEERLKVFLRIRPLPDRDRSRPLPAAKDPRRKPKQVGAPGELCLAPDGPNSVVLTVPRSKLVDPKRGRTEVFDGFSAVFPSDSTQHDIFAQVMNPLVDDFLGGKSGLLVAMGPTGSGKTHTIFGSPRNPGILPLTLRRIFNAQGESKVSRKPTRSFFFSMFEIFSEGKGERILDLLSDTVECVLQQSVIKGLQEVSLSNPADAESLVSRGMLKRSTAATNANSNSRHALAVLLSLRICSLVLSRSQCIITIRADSEHLLSSAVLTIADLAGAEREKRTRNQGSRLLESNFINNTSMVFSLCLRSLLEHQKNQKKPLEKHFKNSMLTRYLRDYLEGRKKMTLILNVKPGDDDYLDTSFLLRQASPYMKIKYTSLDDSFDLASQKRINVSLICQENKKKRKVQKPAVLVVERKENVDTDDISKVSEKDGVHHVSLNPEMPRVSRSEAIMTNFARALLTVLRQYKHKLLESENAVESMKELIRDKDIEIMELKKELKAVRYCSCKSSPINEDDSVDHDDSSSFGQAAQSLVNISNQADLGSNDASEDNFHVELQALHKESDKSESFTVPTPAPTGGAMPASSYSDQSFTEDDALLCLNTEQTSTVGQSDEETEELSKITLENKDIQLDINIREEKHHESCSSSQQVNFDTEGTRSSEASLLGTVGSEKKLEELKQKSGRCVSAVEKANVELEHGIDGGQALDEKCDHASAKAAKAPPSKGREADETADTDKEAFGSRTEKTRRRLQPAAAMLLREFTGADIDADNERVPAVATQRRRPSSHRRPPHAPPATRERTPICPLVTPTFLSPSPSPPVRFLAGLQAHGDESRQLQSLMQLCEMRSIGSEDLLAAFVPILVGMLGQPATAGASPGVMLLAARALANLVYVLPSCSAVVHYGAILLCSTAHR

SEQ ID NO: 11223 - protein, 323 aa, Zea mays
  VARIANT 52: note = Ancestral polymorphism is S, Derived polymorphism is L
  VARIANT 57: note = Ancestral polymorphism is D, Derived polymorphism is Y
  VARIANT 153: note = Ancestral polymorphism is P, Derived polymorphism is L
  VARIANT 155: note = Ancestral polymorphism is N, Derived polymorphism is K
  VARIANT 157: note = Ancestral polymorphism is T, Derived polymorphism is A
  VARIANT 166: note = Ancestral polymorphism is W, Derived polymorphism is C
  VARIANT 176: note = Ancestral polymorphism is L, Derived polymorphism is S
  VARIANT 203: note = Ancestral polymorphism is L, Derived polymorphism is P
  VARIANT 205: note = Ancestral polymorphism is R, Derived polymorphism is W
  VARIANT 229: note = Ancestral polymorphism is A, Derived polymorphism is V
  VARIANT 272: note = Ancestral polymorphism is D, Derived polymorphism is H
MMARKAKETTVEIKPKIHPKDGLKPIQVAALRNNREFLELLLALTIPFLSVSNWSFDGITKYMLSKAAVGESQVKEATSLNSASLAGPQSAGSQVKEATSLNSASLAGPQSAGVSSSAKGDSMEANLRGYDAYKNENYIGAVDAYTQAIDLDPSNATLWSNKSLCWLLLGMAETALEDAKQSRTLRPDSGIACYREGAALHELQRFFEAAIAFYEGANLKPENQEYLSAFMSGASRPVGGREGSLLKDLKYCVFGLGNTQYEHFNKVAKMVHELLQEQGGKRLVPVGLALETMMSASRISPHGMKATIMQSGCIPSPGRHYAI

SEQ ID NO: 11224 - protein, 143 aa, Zea mays
  VARIANT 99..143: note = Derived polymorphism lacks residues 99 to 143
MFCYTFFYCLQYFLPFEIMLYSYKLNMYLCDNLVFQKQFSSLFQNMIWYFVKFFVCLLVQTLMNLSIDERCRKNNLSTSMIALSQKMALHTLPRRHLHQSRLLMLMEVPLVMSPSKYNLGKLITSSSFPNAGSVLSMFSALTS

SEQ ID NO: 11225 - protein, 582 aa, Zea mays
  VARIANT 219: note = Ancestral polymorphism is C, Derived polymorphism is G
  VARIANT 223: note = Ancestral polymorphism is R, Derived polymorphism is L
  VARIANT 344: note = Ancestral polymorphism is I, Derived polymorphism is S
  VARIANT 399: note = Ancestral polymorphism is P, Derived polymorphism is L
MSGLGHPESKELFLRTAYGDAHPTPGVADAFEEISGACDGLPLALVSAAHVWRERQGKGWEGKYAFEEVNRAFSWWYESLADAAHMLSLGIFPYGHSINRKSLIRRWIAERLVSAEKDGDKRFHELVDQSIVEPVLITGSSDFKVKRFRLRRPVLEFIVRESVSKNMVKLLEGDEPLPREGGGPVLSIYQTTDTETSRGNIMSFSIFNKGVAFDDLQQCTYLRVLDLERCRGVDHSVVAGICKLSLLRYLSLRGSDVRQIPRETERLRYLETLDIRETVVNNLPVEALMLPRLVHLFGKFELPQELEDGRIRGKLERFFREESRLQTLAGLIVAKYNGYEHIVSHIRLLRKIKIWYQNHLLHYSTLLNELLIRNTALDSLSVDFGGSLMFPHISDIFGPCVLRSIKLRGRHWPLPAIIASSANYLSDVQLSSTVLPLTYLSTLQSLGRLLYLKLVAYEFVGDDTDTFTVKKDGFPSLERLCIEAPKLPHLRIVEGAMPALTSLHLLCPTTMPKHPGQMGEIDEPEATSETKLGKEWGIEYLRNLNDLVLPYTVGDEQLDFWKEKARSNMNRPKVTRQPKPLP

SEQ ID NO: 11226 - protein, 266 aa, Zea mays
  VARIANT 204: note = Ancestral polymorphism is G, Derived polymorphism is C
MGSGEEDTGGGGGAVRGAVLKALVVVGGVLLLRRLRRSTTRWDHARAVADALSGEKFSREQARKDPDNFFNLRMLTCPATEMVDGSRVLYFEQAFWRSPEKPFRQRFYMVKPCPKEMKCDVELSSYAIRDAEEYKNFCDRQKDQRPQAEEVIADIAEHLTTIHLSRCGRGKRCLYEGSTPPEGFPNNWSGASYCTSDLSIHKNGEVHIWDKGFDDEGNQVWGTKAGPYEFKPAPKSKYDDMFSPLNFSAPLSLEKKLDKAYVIDDQ

SEQ ID NO: 11227 - protein, 491 aa, Zea mays
  VARIANT 44: note = Ancestral polymorphism is P, Derived polymorphism is H
  VARIANT 283: note = Ancestral polymorphism is T, Derived polymorphism is I
MSLTDKHLLIAGAVLLVTTISMLKLLVWSGSRVRSRRRLPPTIPAMPIIGGLIRFMRGPITMIREEYARLGSVFTLSTLGHRITFLIGPEVSEHLFNGPESEMSQQEVYRFTVAAFGRGVAFDVPYSVRQEQIRIFAEGLRGNKLRGYVNLMVCEAEEYFSKWGESGTVDLKHELEQVILLITCRCLLGREVRQNLSDDVAALFHDLCNGMQPVSVIFPYLPIPAHRRRDRARQRLREMFATIIRARKASGRSEEDMLQCLIDYRYKDGRATTEDEIAGLLITVLFGGQQTSSITSTWTGAYLLQFRRYLAAAVEEQEEAIRRCGDRIDHDVLAEMDVLHRCIKEALRLQPPLPIVFRWSHSDFAVTTREGEELVVPKGQMVAASPAVANRLPHVYKDPELYDPDRFAPGRREDKAAGALSYISFGGGKHWCLGEFFAYLEIKTVWAHLLRNFELELMSPFPENEWNSMVVGVKGKLMVKYTRRQLVVDGN

SEQ ID NO: 11228 - protein, 890 aa, Zea mays
  VARIANT 210: note = Ancestral polymorphism is P, Derived polymorphism is L
MHVTVTCKAASIGNIEREMRVAMVGSGLSGLVAAHELARSGGVRVTVYEKEDHLGGAKTVAVDGGAEEGRVLVDLGPVVFNPVTSPNLMEWFERLGVEMCTSDMSFSASMRLNKSSESFEWGSRSGMSGVLAQKSNLLSPRFWLVVHEIFKFKNHALKYLEDHRSGPNRNETLGQFILSHRYSQLFQDAYLIPMCACIWPSPSHEILGFPALFVLSFFRDNQLLEILSGSKWLTVKGGSGSYVNKIREELESNGCQIKIGCEVNSISKSNDGYQILEVDGSVETYDRIIIGINAHDALKVLGAEATNEELKNLGAFHFIRSIAYLHSDESLMPRNSSAWSARNFLGTTSSGVCVTSWLNILENIESAGPLLVTLNPPRVPNHVLLKCHISHPIPSIAAAKANLQLNSIQGKRGIWFCGSYQGYGYHEDSVKAGKAAALGLLGRKCDLLSNPKPMVSSWTEAGARLLVARSLDQYITIGNFCILEEGGTTFSFGKACEKCHVKSAIRVHDPQFYWKAATEGDLGFASAYINGQISFVDHRKGLVNLVRVRSIILANRGEFKRLSSTASGNTRKAWWSPLLGITGVSFAKYFLRHALRKNSVSKARKNISEHYDLSNDFFALYLDPSMTYSSGIFKVAEESLETAQLRKLDSLINKAKVEPGHHVLDIGCGWGTLAIRLVKQTGCKYTGITLSEEQLKYAKRKVKESGLEDRITLLLCDYRQLPAGDKFDRIISCEMIEHVGHEYMDDFFGCCEYHLAEHGLLVLQSIALPEELYDKMRMRPEFLKTYIFPGGCLPSLGRIVSAMSNASRLNIQHLENIGDHYYTTLMNWRDNFVANREKASALGFDDKFIRTWEYYLSYAAALFKSRTAIDYQIVFARPGDSKLPSYVAIA

SEQ ID NO: 11229 - protein, 507 aa, Zea mays
  VARIANT 36: note = Ancestral polymorphism is F, Derived polymorphism is L
  VARIANT 45: note = Ancestral polymorphism is G, Derived polymorphism is D
  VARIANT 59: note = Ancestral polymorphism is P, Derived polymorphism is Q
  VARIANT 290: note = Ancestral polymorphism is D, Derived polymorphism is N
MAIDLNLQETMSLITEKHQGRLIAGAVLLVTTIVSFIKLLLMWSDSRVRSRSRLPPTIPAVPIIGGLIRFMRGPISMIREEYARLGSVFTLNALGYRITFLIGPEVSEHLFNGAESEMSQREVYRFTVAAFGRGVAFDVPYSLRLEQIRIFAEGLRGNKLRGYATLMVCEAEEYFSKWGESGTVDLKHELEQVILRITSRCLLGREVRENLFDDVATLFHDLCNGMQPVSVIFPYLPIPAHWRRDRARQRLREMFGTIIRARKASGRSEEDMLQRLIDYRYKDGRATTEDEIAGLLITVLFGGQQTSSITSTWTGAYLLQFRRYLAAAVEEQEEAIWRHGDRIDHDVFAEMDVLYRCIKEALRLQPPVAIMFRWSHSDFAVTTREGEELVVPKGQMVAASPAVANRLPHVYKDPDLYDPERFAPGRSEDKAAGALSYISFGGGKHWCLGEFFAYLEIKTVWAHLLRNFEMELVSPFPENEWNSMLVGVKGKLMVKYTRRKLVVVDGK

SEQ ID NO: 11230 - protein, 415 aa, Zea mays
  VARIANT 383: note = Ancestral polymorphism is T, Derived polymorphism is M
  VARIANT 213: note = Ancestral polymorphism is V, Derived polymorphism is I
  VARIANT 123: note = Ancestral polymorphism is S, Derived polymorphism is P
  VARIANT 99: note = Ancestral polymorphism is H, Derived polymorphism is P
  VARIANT 78: note = Ancestral polymorphism is P, Derived polymorphism is T
  VARIANT 46: note = Ancestral polymorphism is L, Derived polymorphism is I
MRRHMAPIKEQKHTTSAEQQVMLDAELQLWNHTFGYVKSMALKAAIDLGIPEAIHQHGGTATLPQIVTRVKLHPSKTPCLRRLMRVLTLTGVFGAQEPHDDDGGCDDELVYTLTPASRLLVGSPGQNVGPFLTLMLGPIFVSSFLDLRGWFQHETPDPSPFKMTHGRDIWELAAHDAAFGRLFDAGMVADSSFIMDVVVRECGGVFEGISSLVDVAGGLGGATQTIAKAFPNLECSVLDLPNVVASAPADTAVKYVPGDMFESVPAADAVFLKWIMHDWGDADCVKILKNCKKAIPAQGGKVIILDIVVGAGSSCDRKNVETQCLFDLFIMFINGAERDERQWKKIIFEAGFTSYKIIPDDGTGGHDVDPGHAEDGARAMKSMNAGLGLPCTAARTPPSLELMSGDHACVGVHVS

SEQ ID NO: 11231 - protein, 424 aa, Zea mays
  VARIANT 255: note = Ancestral polymorphism is K, Derived polymorphism is T
MAPAARTRVCLVALVVALAFLFLLDGGVHAASSAAEQRRRQVRSLLRRLNKPAVATIESPDGDTIDCVDISKQPAFDHPSLKNHTIQMMPSCHPQQGGLYNKSNDVAHSALTQTWHQNGKCPENTVPIRRTREEDVLDIVQRYGRKKWPSSWSNDPNRYDDDVPDAASVLRGHQHAIASAPGDDNYYGTQATFNLWEPTVERNQGFSLAQLWITSGSYANNDLNTIEAGWQVYPGLYKDSHTRLFVYWTRDAYNKTGCYNLICSGFVQTSNQIAIGASNSYFSPVSIYGGSQYDITILVWKDPKQGNWWLQVGGQDLGYWPSSIFSKLSGSAASVDWGGEVASSPDAGQTSTQMGSGHFPDEGFSKASYIKNIQLVDSTNSLKSASGVKLTAKWPMCYNVQNGTSADWGTYIFYGGPGKNPNCP

SEQ ID NO: 11232 - protein, 99 aa, Zea mays
  VARIANT 27: note = Ancestral polymorphism is C, Derived polymorphism is Y
  VARIANT 80: note = Ancestral polymorphism is T, Derived polymorphism is M
MKSPTAKQALAAALSALLILLFFVLLCGPSSSSSSPSSQPLQLQPSVVRVRSRRLLSTQCRDSCSTPVGGFSQAFKAPATVLFESLKTTPKSRSNPSHN

SEQ ID NO: 11233 - protein, 126 aa, Zea mays
  VARIANT 82: note = Ancestral polymorphism is G, Derived polymorphism is R
  VARIANT 47..126: note = Derived polymorphism lacks residues 47 to 126
  VARIANT 46: note = Ancestral polymorphism is H, Derived polymorphism is Y
  VARIANT 31..126: note = Derived polymorphism lacks residues 31 to 126
  VARIANT 25: note = Ancestral polymorphism is L, Derived polymorphism is Q
  VARIANT 24: note = Ancestral polymorphism is G, Derived polymorphism is R
MGLGIDIHAQVLEMGIIVHSVVIGLGMGASQNVCTIRPLVTAMCFHQLFEGMGLGGCILQAEYNARMKVGLVFFFSTMTLFGIALGLALTKVYRENSPTVLIVVGLLNAASAGLLVFLKLEDWVAQ

SEQ ID NO: 11234 - protein, 191 aa, Zea mays
  VARIANT 25: note = Ancestral polymorphism is S, Derived polymorphism is I
MATLPQRFKLLATRCAAGAPSPSRSPAPAYAGAASPGYRLRRRVRGAGTTTATARRRGRLRRFLSRRGGGAAAGAEALAAARQEDDRKPLFGGRPGGGRTLRDLFVASPEAGRRRGGCSCDCGDDEDDDGGRVGGAGADPGGGGGGGAWLGGRRFSSGGLRSLLMRRSWRPVLVAIPEADGNKIELGAIEE

SEQ ID NO: 11235 - protein, 163 aa, Zea mays
  VARIANT 49: note = Ancestral polymorphism is Q, Derived polymorphism is H
  VARIANT 28: note = Ancestral polymorphism is Q, Derived polymorphism is E
  VARIANT 3: note = Ancestral polymorphism is R, Derived polymorphism is G
MKRCRGVYERQPGRWVAEFRSHRHRTREWIGTFATEVESRAAYDDFEKHFMQSRRCNLPLPALEKRGGRAAGVNRSCALPRRQRHPPPEIEKKRQIVHTTLAANSSTSATPPPPPLENNAQPQHADALPSAHSVWADEPAGEDLPDLDTDFGPLDLSLFDDFF

SEQ ID NO: 11236 - protein, 311 aa, Zea mays
  VARIANT 30: note = Ancestral polymorphism is C, Derived polymorphism is W
  VARIANT 58..311: note = Derived polymorphism lacks residues 58 to 311
  VARIANT 210..311: note = Derived polymorphism lacks residues 210 to 311
MLEDVLTEGYFAHEQEIELIGPEVETPESCFRALNKPNGMTSNFVQNKTNLKAQTSGWDVLYDKFEKLNGDCLLDNGFYHDGGSTSRGTCRVLRKSSTSKKLGTAAGCVEGLEVDAIDQMNFPDIHALWNSDLIDRSSLKDTLNHFSHPSLLADTPCSHPRTLHILNRTSDKCFCSWNYENIDINVRFSNDSSIIFEGTKFFDNINNEIQPLNYFNDNCGSTDQLGSKEDLITWKSKFDVRLSVNISPKTAGDNGCHLNVPSLNMANGNLFTQDLLNQHNSGLNQRPRTSKCSRFRSHSAPPFYKRETEIL

SEQ ID NO: 11237 - protein, 226 aa, Zea mays
  VARIANT 182..226: note = Derived polymorphism lacks residues 182 to 226
  VARIANT 144: note = Ancestral polymorphism is D, Derived polymorphism is E
MGPPSDFDPAKTHDVPVRVKNSYNPKALGTLITRQRDMDKHSAQVKCHYVGHFEHSDAWSVWFSWQGTDGILGAKDQGTVTSKERPRLLLQGAVQRPWESNQILSFVPPDGQFKLMSYSAVPVAPLIVSVDLTANYGTVDILADKTCLWTIGQIPKDKAPALSGNLRLEEGLAQLHALPTFQVKFRIMGVALFGLQIDKLDVKNTSNAPYKGFRAQAQAGNYEVRS

SEQ ID NO: 11238 - protein, 522 aa, Zea mays
  VARIANT 33: note = Ancestral polymorphism is R, Derived polymorphism is G
MDDHGAYYCYWYCLAAVLPLVYFLLNLKPLWKRPAASNSIALGLPPGPWKLPVIGSIHHLLVRGSHVHHTLRDLSLLHGPLMFLKLGQIPVVVASTPAAAKELMKTHDAIFSARPISTAMEIIYKDGRGLVFTPNDQHWRQLRKICVVELLSAKRVLSFRPVREEVASRMVEAISSSTTTTTASPLVDVGMLVSMYVADASVHAVLGRRLKDQDAFLHRLDQVVQLAGRLTPRDLFPTSTLVRVLSRRAIREIEACQQSLFTFMDGVIREHLERKSHGEEEEEQENMIDVLLRIQQEGNLQFPLTTRTIEAVIFDLMGAGVESGSTTLHWAMAELMRHPAIMSKAQAEIRGVFMGQNKVTEERLRLGELSYLELIIKETLRLHPPGPLMIPRECQEQCRVLGYDVPKGAVVLVNVWAIGRDPDNWEEPDAFNPDRFLGDARDFKGSDFDLLPFGAGRRVCPGMAFGLASMELALANLLFHFDWSLPEGVGPSELDMTETMGITARRKADLLLSATPRVPHPC

SEQ ID NO: 11239 - protein, 50 aa, Zea mays
  VARIANT 12: note = Ancestral polymorphism is I, Derived polymorphism is F
  VARIANT 15: note = Ancestral polymorphism is T, Derived polymorphism is I
  VARIANT 41: note = Ancestral polymorphism is L, Derived polymorphism is S
MYHYFLLLIFSILRTYPLFRIEKLCLYRSLTRSFKFAIVGLILYLCCSTC

SEQ ID NO: 11240 - protein, 545 aa, Zea mays
  VARIANT 243..545: note = Derived polymorphism lacks residues 243 to 545
  VARIANT 253..545: note = Derived polymorphism lacks residues 253 to 545
  VARIANT 297..545: note = Derived polymorphism lacks residues 297 to 545
  VARIANT 365..545: note = Derived polymorphism lacks residues 365 to 545
  VARIANT 428..545: note = Derived polymorphism lacks residues 428 to 545
  VARIANT 429: note = Ancestral polymorphism is A, Derived polymorphism is D
  VARIANT 445: note = Ancestral polymorphism is P, Derived polymorphism is S
  VARIANT 458: note = Ancestral polymorphism is V, Derived polymorphism is G
  VARIANT 460: note = Ancestral polymorphism is L, Derived polymorphism is Q
  VARIANT 464: note = Ancestral polymorphism is F, Derived polymorphism is S
MEMKPNRKPLGCNPLSDAPYRNPGMALNGKEPGCHPVGGAPCRDLDAVSSEQGSGRRFLSGALHRRPSVVTNVGLSESEKRKFWEDLDDMVRTVPTNENLFIDLNGHVGSKNVGYELAHGGFGYGSRNQEEDILDFAVAYNLVIANTFFRNRDSHLVTFSSGHRSSQIDFVLTRRKDNQACLDCKVILRESVVPQHNLVVANFRFRISTHRVKQVKIARTKWWELKGERSKVFRERVFVEGAWSEEEDANIMWVKMATCIRKVASEVFRVTKVSGGESKDTWWWTEDVQKAIKEKKECYRSLFHDRSAFNIERYKVAKKTTKRAVSEAKGRAYDDLYQRLSTKKGEKDVYKIARIQERETRDLNQVKCIKDEMDQLLVKGQDIKQRWQRYFDNLFNGENETMDTQLDDSFDDLNKCFVRRIQESEVKEALKRMKGGKAMGLDGIPIEVWKCLGDSAIVWLTKLFNHIFRSNRMPGEWRSTLVSIFKNKGYIQSCTNYRDIKLMSHTMKLWERVIEHRLRGMTHITMNQFRFMPARSTMEAIFLIR

SEQ ID NO: 11241 - protein, 187 aa, Zea mays
  VARIANT 37: note = Ancestral polymorphism is R, Derived polymorphism is S
  VARIANT 35: note = Ancestral polymorphism is L, Derived polymorphism is Q
MALVADDDAELKAKAKAKAEVYYGDEACQLCAQLLLREAGLPNGLLPLEDLTECGYVQETGYVWLKQGRRVDHVFRSLGRLVSYGAEITGYAEKGRIRKVKGIKTRELMLWVPVEEIAALGDPAAGGKLVCKSVAGITRTFPASAFHVPEKAAAAEEVKVDCARAPPATPVLVLMDRSGAPPVVKNN

SEQ ID NO: 11242 - protein, 70 aa, Zea mays
  VARIANT 60: note = Ancestral polymorphism is T, Derived polymorphism is I
  VARIANT 49: note = Ancestral polymorphism is E, Derived polymorphism is K
  VARIANT 31: note = Ancestral polymorphism is A, Derived polymorphism is T
  VARIANT 30..70: note = Derived polymorphism lacks residues 30 to 70
  VARIANT 25: note = Ancestral polymorphism is E, Derived polymorphism is K
  VARIANT 12: note = Ancestral polymorphism is S, Derived polymorphism is L
  VARIANT 11: note = Ancestral polymorphism is E, Derived polymorphism is A
  VARIANT 8: note = Ancestral polymorphism is R, Derived polymorphism is I
  VARIANT 1: note = Ancestral polymorphism is M, Derived polymorphism is T
MGGALIGRRYALSAAAVDSTDPPAEKHEYQAEVNRLMDLIVHSLYSNKKVFHQELVRWVIVTHTIFFQLT

SEQ ID NO: 11243 - protein, 137 aa, Zea mays
  VARIANT 120: note = Ancestral polymorphism is R, Derived polymorphism is W
  VARIANT 13: note = Ancestral polymorphism is P, Derived polymorphism is L
MDDGDTPRRKSVPEWLNSPIWSAPPPSPRHSSLPPTAPSPPQPPPSPLPPPQPRRDPTPIPPPNAPRDADVSDDEGKGAGAPSCAHLVAEFKVALDRKVVDLAELRRLACQGVPDAAGIRPIVWKVRGSPHDLLNSL

SEQ ID NO: 11244 - protein, 248 aa, Zea mays
  VARIANT 219: note = Ancestral polymorphism is D, Derived polymorphism is Y
MSDVCDEKPHPEVSADPICSRNCIYGDDDWVIVKKQRITILIPPQPPVAANPQSNMPTISSKQSCITRSKRDWDAARKKHPEKFAAKKYLDSPPVHGSIIHEDVPFMTGDKSQHGSAIPVAKSEWTKDPDHAVRELFHQETGKATSFFRNIVQPRTPLVSSPVADKIIRAQLLEKQVAGFGGLRNWLFGCGLGWFVNILDSEKLGTYQLASLTMEQLKDMGLVAVGPRRKLIHAIDSLCGPHHAEMLS

SEQ ID NO: 11245 - protein, 446 aa, Zea mays
  VARIANT 326: note = Ancestral polymorphism is V, Derived polymorphism is L
  VARIANT 319: note = Ancestral polymorphism is P, Derived polymorphism is T
  VARIANT 203: note = Ancestral polymorphism is R, Derived polymorphism is W
  VARIANT 202: note = Ancestral polymorphism is L, Derived polymorphism is R
  VARIANT 200: note = Ancestral polymorphism is K, Derived polymorphism is N
  VARIANT 178: note = Ancestral polymorphism is R, Derived polymorphism is G
MDAHAVDIPSLAEELRKELATADALAARSASLYPVVIAEVGPRTRNVCPEDYDPSHVSIGPYHHIKNPKLVRKQDKIRSLSTVMSAAARVDVKSYIDVVAGIEAKARSCYANTFDNHIDSNDFVRMLLLDACYVLVNFGGIGGGGHRGSDMMEDVGVVRDVIYLAENQIPFFVVDEIRKLTIPDGGGGSAPDAITGYVRKLLRELQYSVATPAVAEPPGPDNLLHLLHMHLMPTVALPSSRSTVGTGKPRRFGRWRSATEYYCAGVGFRSRPLGGKGARSILEVKLDYYGRTLEIPHLKIDAETSRLLRNLMALEQSNPEEVGSHVTAYCVFLSQLAGTVQDVELLSRRGIIAHGLGSHNEVATSLANLCKGIAFGGDDPESNYLRATWEGLEESFRSRPRRWAAWLMLKYFRNPWLAVGLAAAGVGLVCTVVQAVYAVLAYTSNP

SEQ ID NO: 11246 - protein, 139 aa, Zea mays
  VARIANT 5: note = Ancestral polymorphism is P, Derived polymorphism is L
MVKGPWNMACYLLEVFALRHLLVVVPVVGILLDRQAFKPALNIAEVDEIFDVPLEMFLKDENRTSEEREKMGQTFTVHYFTYENGIQKYLIWGLTARVLIHAASVVYERPPDFTERRAHFKLPKFTKDCSSMLAGPAKH

SEQ ID NO: 11247 - protein, 292 aa, Zea mays
  VARIANT 217..292: note = Derived polymorphism lacks residues 217 to 292
  VARIANT 195..292: note = Derived polymorphism lacks residues 195 to 292
  VARIANT 150..292: note = Derived polymorphism lacks residues 150 to 292
  VARIANT 130: note = Ancestral polymorphism is P, Derived polymorphism is S
  VARIANT 129: note = Ancestral polymorphism is T, Derived polymorphism is M
  VARIANT 123..292: note = Derived polymorphism lacks residues 123 to 292
  VARIANT 90: note = Ancestral polymorphism is R, Derived polymorphism is C
MRKPASTAAATLSSHPLALRRLARLLALLARPPQPCGYLLPILRRGLHISRSRSLLPAADADQQPWMPQLLSVACLTITAKMEETVVLRRLDIHQNQVPSEKYNFDLDAIQRMEIYVLDSLNWRMEVVTPFSYINYFVDKFTGGKPLSCGFISRCTGSLEATKLLQFRPFEMAAVVLSAAAESQENVRRCHEALQEVGLVKKKIDYTASPSRVLDASCFSFKTDDNQTTGSALTVLFASDIRTVFVMRLSFNRDAQFGLFDGDGKPAKALDARPLTNVVNDLEAKMKGGQSS

SEQ ID NO: 11248 - protein, 528 aa, Zea mays
  VARIANT 143..528: note = Derived polymorphism lacks residues 143 to 528
MAEYMLVVQSNLNQCNNEDIPLSGTKIEMESYEQESSDSSDEEWSTLSTPRKTKLQGNEKVSLTESVRFAKRCSRRAPAREQNNEHTQSEQLHGSASELESNFMVLSGDASKCHFGPIVTQKLKEHFEKDPYPCHATKEGLAQELGLAFNQISKWFSATRHYSRVIVAKNQKYPGENTTENNSSAIFDGIQVIEPNFGLIDKPDADTNDMISEKLMVQINLNEGIEEDIPPSQYTTRCEEKLTMTQAAISREAGPPGYDPGENCLQVSSMITSCEQSVIMAPSAIARGVGPPGYTPGEHQGNGAPWNTSYERRPFTSPVTSSREVRPPGYGPEENQGSGISCNTSREQILFMSPTTISRELGPPGYLPRENQRSDTSWNTSCESGLFMSLATTSIEHEIAQSFSQQRKKREGGGPTYHETFAYAQGPFARVPEAYVLSLGIYLLPNRECTRTLFTCGIPTIKMWEQQVLSICDLDKTPGPGRQLLLYSVNCLVMRFLLYLVNCVVLRTHCRSFCIKCSSDEELLLSLS

SEQ ID NO: 11249 - protein, 327 aa, Zea mays
  VARIANT 259: note = Ancestral polymorphism is M, Derived polymorphism is I
  VARIANT 274: note = Ancestral polymorphism is G, Derived polymorphism is A
  VARIANT 279: note = Ancestral polymorphism is A, Derived polymorphism is V
MSSSSPSLLSSRLLSPAILFTKKPASLRSISSATARHGVRVVVAAASAAAASPVSAARVRPSAAEVARTVVELAASGTLSMVGPDGWPLGVGAHFVADSAGAPALCLSAARVAAPDAPASFHVEFRQSGARTPQCTMLGALTKPSDESVLKKLSTRWQKKFGEEIDQDLLYLISVDRILHMEDFNEAGHSTYNYLVIMSGLLMDGMWVVPSDYTSAEPDPLRNFAENIVEEFNNKNAEDVRRIYNIYVESDLQVADVKMIWVDRLGFDLHAHSAEGVLAVRVPFPREVSDEKGVKSSFNMMSHHAWEVEKSYASPEFEKVQFLKKVR

SEQ ID NO: 11250 - protein, 279 aa, Zea mays
  VARIANT 212: note = Ancestral polymorphism is R, Derived polymorphism is C
  VARIANT 26: note = Ancestral polymorphism is Y, Derived polymorphism is F
MGGEGSTSPAPGGAACAVCGGAAVVYCVADAAALCSPCDAAVHAANLLASRHERVPLSMAAVPSASGAYDDLFAPDDVDAAAPAQAQGLGSPRNGSSSASFTTSGDSGAEGSSLFDFDLLSGVDLAACVTDGVAPLHHDDAAPLWAQPGLAVAWATAWSPADSAAAVVAAAAEREARVQRYREKRKNRRFHKTIRYASRKAYAEARPRIKGRFVKRAAGTSSSSSSGAGTPDDGNDATGAAAKFWLSFSDDARDGFYVDAGAYGVVPSFYRVRSEQLTS

SEQ ID NO: 11251 - protein, 717 aa, Zea mays
  VARIANT 359..717: note = Derived polymorphism lacks residues 359 to 717
MRRKRSTALHTPPWALARLAARGCAAYYKARASSCRPERRACCLPCLAFACQSNPVLHLLGRLVAGQSSGASFDSSAVAGCLSSQLARRLVAPPGREGVCVCLADRDRIREIEREAMDDAERSQAPPESCVDWRGRPCRPRHGGMRAAAFVLVFQASQTMALAAVGSNLITFVFGELHFPLPQAANVVTNFVGTVFILSPLGGFLSDSYAGCLRTLLAFAAVELAGLVLLAVQAHLPQLRSAPCNMLTMEGSCERAGGTRAAVFFVALYLVALGAGCVMPNMTAYGGDQFAAGEKGAKRLSTYFNLSYLGYCVAEVAALTAVVWAQTRFGMAVGFGLAAAALGAGLLALASGAAVYRNKPPRGSVIFTPIARVFVAAFSKRKQICPSGSSNPAHTAAGDAAAVVDGGDFRHANKFRFLDKACIRDAADTVPESEWRLCTAGEVRQTKTLLAVLPIVACTVVTNTVLAQLQTFSVQQGSAMDTRLAPSSFRIPPASLQAIPYAMLLALVPAYELLLVPLARRLTGARAGIAPLQRIGVGLCLVALSMASAAAVERRRRDAAVPASGGRRQQQLSVLWLVPQFFVFGLSELFTNVGLMEFFYEQASSTAGTAAHMQAFFMAFFYCSFSFGFYLSSVLVSLVNRATAGGGRPGWLGDNDLNKDRLDLFYWVLAALSVLNFFCYLLCARWYNSGAAGSGPDGAAPGGEVASEEEDDGKGLI

SEQ ID NO: 11252 - protein, 137 aa, Zea mays
  VARIANT 110: note = Ancestral polymorphism is L, Derived polymorphism is P
  VARIANT 98: note = Ancestral polymorphism is A, Derived polymorphism is V
  VARIANT 78: note = Ancestral polymorphism is M, Derived polymorphism is I
  VARIANT 66: note = Ancestral polymorphism is R, Derived polymorphism is W
MIIQCDLTVVRDPELCKTKGGFEIQVPPSDLAEQFGKLLLEEEETDVVFSVGGETFPAHKVVLAARSPVFKAQLYGNMKEAKARRVAVEDMQPGVFRALLKFIYIYTDALPVIGDDNICDDDYDEIIRHLLVAAACR

SEQ ID NO: 11253 - protein, 242 aa, Zea mays
  VARIANT 29: note = Ancestral polymorphism is R, Derived polymorphism is H
  VARIANT 168: note = Ancestral polymorphism is M, Derived polymorphism is R
MPAPGPGPLPRGTPERNTQQRLTSQPPPRSISFLSLGSSALLPELLASLPASSRPHGQTAPHLRFHSIRAKVNSSVGGARAGKRWEGPGSELSCAPRATDTQVSSSHANLLLLLSYRLMRAYISSSSLRKSALRALAKALTTDQLFYLREQFTLFGPNKSGHISLQNMKTALMKNSSGAMNDSRILDFVNSICNIQYGMIDFEEFSAAAISVYQMEGLETWEEHAQQAYELFDKVGKGLLKD

SEQ ID NO: 11254 - protein, 160 aa, Zea mays
  VARIANT 6: note = Ancestral polymorphism is R, Derived polymorphism is Q
  VARIANT 7: note = Ancestral polymorphism is R, Derived polymorphism is M
  VARIANT 11: note = Ancestral polymorphism is S, Derived polymorphism is L
  VARIANT 37: note = Ancestral polymorphism is R, Derived polymorphism is L
  VARIANT 52: note = Ancestral polymorphism is T, Derived polymorphism is A
  VARIANT 67: note = Ancestral polymorphism is A, Derived polymorphism is V
  VARIANT 81: note = Ancestral polymorphism is L, Derived polymorphism is F
  VARIANT 84: note = Ancestral polymorphism is P, Derived polymorphism is L
  VARIANT 86: note = Ancestral polymorphism is R, Derived polymorphism is C
  VARIANT 113: note = Ancestral polymorphism is G, Derived polymorphism is D
  VARIANT 115: note = Ancestral polymorphism is R, Derived polymorphism is C
  VARIANT 117: note = Ancestral polymorphism is L, Derived polymorphism is P
  VARIANT 124: note = Ancestral polymorphism is T, Derived polymorphism is I
  VARIANT 129: note = Ancestral polymorphism is G, Derived polymorphism is E
  VARIANT 149: note = Ancestral polymorphism is I, Derived polymorphism is K
  VARIANT 151: note = Ancestral polymorphism is A, Derived polymorphism is V
MRIRRRRPNSSSRRLGSFVLCRCTCLSRRFSFSFQERNVDLFKNLVHEYDYACWSCSVARLGYSGTVVISRVQPISVQYGLGIPERDQEGMLITLEFDDFYLVNAYVPNSGRGLRRLIKASVGTDEDAGESNPEANELELSRVSEMQLILADHGQCILLN

SEQ ID NO: 11255 - protein, 115 aa, Zea mays
  VARIANT 30: note = Ancestral polymorphism is R, Derived polymorphism is H
  VARIANT 15: note = Ancestral polymorphism is C, Derived polymorphism is Y
MLDLLPCACLCCIICVVPYPCCHVRPCRVRYAVMPHAPLTLVHYSDGPIVVKGGEEGWECGTKGLFGSEPANLAWECSARKVDPAAALKINVLGELPGPGRFVRARTKQALSAKR

SEQ ID NO: 11256 - protein, 319 aa, Zea mays
  VARIANT 222: note = Ancestral polymorphism is I, Derived polymorphism is T
MAARVPAADLNQHLSSPFIARRCHGPEAQPGSGGGRRREPLRRGAVSARLPVPDHIRRPPYVGTAAVPEVCPDRQVHDGESIMRMLDACELAARVLHHAGAMVKPSVTTDEIDRAVHQMIVDAGAYPSPLGYGGFPKSVCTSVNECTCHGIPDSRELQDGDIINIDVTVYLNGYHGDTSRTYLCGEVDDATKQLVKVTEECMMRGISACRHGASFKEIGQRISEHAEKYGYGIDPFVGHGVGRMFHCEPIIWHTYDYEPGFMVAGQTFTVEPTLSMGSTQCVVWDDGWTAVAADGSLSAQFEHTVLVTGDGAEVLTGFP

SEQ ID NO: 11257 - protein, 393 aa, Zea mays
  VARIANT 244..393: note = Derived polymorphism lacks residues 244 to 393
  VARIANT 207..393: note = Derived polymorphism lacks residues 207 to 393
MLASAEVASKVSILVIQQQPPKKTIATIKLFCFLALAAKRGLTDWEGGYFPVTLHFTENYPSNPPTCKFPRRFFHVNVYDSGDVCLSILGDAWAPSITVQQILIGIQELLENPNPASPAQDFAYDVFAELRLFELNSKVLLHFFYSRLVPLVLLLVEGSTPIDIGEHGWEMLLVVKKATQEAGSKFELLGFAAVHNFYHYPESIRLRISQGEGHGLGLLEAINYIAQSKNIYDVTIESPSDYLQYVRSSVDCLRLLMFDPIKPALGAIVSSLKETNLSKRAQSLRMDHKSMDNFRACIYDLMKGEILGSASGTNRKRLLQMPTSFNKEASFAVYWTHEIGDEDEQTVEQQPEDLRTQEQQLNKLVDIQIEEIDGVAKNVTSRGKDKMAELAVQ

SEQ ID NO: 11258 - protein, 189 aa, Zea mays
  VARIANT 16: note = Ancestral polymorphism is D, Derived polymorphism is N
  VARIANT 42: note = Ancestral polymorphism is P, Derived polymorphism is S
  VARIANT 149: note = Ancestral polymorphism is W, Derived polymorphism is R
MQVKKRKARVPLDVADAVMEPVRRSGRLANLPDKPVYREKVPDFGMKIRRTYGSVRRDLTNRVYATDDARSYAISKAEDLEQELDSSFPIFIKPMTQSHVTGGFWLGLPIHFCRKYLPKRDEMITLVDEDDDESDTLYLAMKRGLSAGWRGFAVQQKLVDGDCLVFQLIEQTKFKVYITRASSYYESED

SEQ ID NO: 11259 - protein, 471 aa, Zea mays
  VARIANT 367: note = Ancestral polymorphism is V, Derived polymorphism is L
  VARIANT 165: note = Ancestral polymorphism is S, Derived polymorphism is L
MRRLLQTLRPLQALPLNPAPGIPTPLRLLSTASSAASSDSDSAASPAVAPPPAADADFDSADYDLPTPGPAPSRKINNPAAALRKVRFDPSLRARADEALFGKGLGAAAVDEEDEDRSRDVALALLDAALEAPDEDEEDLGEVREEDQMSLSVGIVGAPNAGKSSLTNTMVGTKVAAVSRKTNTTTHEILGVLTKGNTQICFFDTPGLMLGHHGFPYRDVTVRVESAWSSINLYDLLIVMFDVNRHLNLPDSRVIKLIKRLGTEVNPNQRRILCMNKVDLVEDKKDLLKVAKEFEDLPGYERYFMVSGLKGKGVKDLVQYLMEQAVRRPWDEEPTVMTEEVMKTITLEVVREKMLHHIHQVILLHFLYTTGSDLLQEIPYVIEHRLMGWKELKDGSLRVEQHFIAPKQSQRQILVGKNGSKIGTISDILTYLIWGKSVRRIGIEANEELRSIFKRDVHLILQVRVAKKRSA

SEQ ID NO: 11260 - protein, 437 aa, Zea mays
  VARIANT 120: note = Ancestral polymorphism is V, Derived polymorphism is A
  VARIANT 127: note = Ancestral polymorphism is D, Derived polymorphism is V
  VARIANT 162: note = Ancestral polymorphism is T, Derived polymorphism is I
  VARIANT 171: note = Ancestral polymorphism is C, Derived polymorphism is F
MSSSSSAATAPPWADLLPELCDLVMEHLDPITILRFPAVCRGWSEACEENPRLLRAGAPALLTPGLDPDGCETESNVDAGAFCLHDVSAAGGGGGRRSFCGEAEGLKGRAWVGGNHGWLATADWRCDVELLNPVTGARVRLPSFATIPGVEVEVNFHVVARTAGGYSLGKFHKILKVALCRTPSHADGHLAIAIFSGGLLAFTAAGGGDKGECRWTALKNAAADVSYMDAIALDGKLYAVDELGRLYSWDIDDGAMTEPTVVQGPENDEMSRYGTDLCGFYLAASVCGQRLMLMCIHGYDVARAYLYGRRSRCWDSRVWSRLVFDDRRSFCELGMSLHELDAGGGSWRRVTDLGGDRALFLGANYPFYLTVRHRFGSADLEADCVYLSDTPYGYDTAIFDLKEGIGGDGHIKQQLYYSLVADPLQMPMWFVPTDYPH

SEQ ID NO: 11261 - protein, 831 aa, Zea mays
  VARIANT 263..831: note = Derived polymorphism lacks residues 263 to 831
MDSGNSSCSRTRSGLLRLKGLLDSSGVSSSRTRSGLLRIKSFVDSSDGSCSRSQSDHAVTKDDSGMRTLPNGSLSEDMPSRTRSGLVRRSPTVKVQKKVINGLADGSLKEDMPLGTRSGLTPDGWMKNDKAAGTRSGLGGGRLTVSKDKRAVEGLPDGWRKEYRPRKNGSFLDVYYIDPVSGYEFRSFKDVHRYLETGDIRQCAVRPKKSTICEVHIIESQTHASASPQHTRPGTADKGIQCEILTSDGIMVPLGELIAPYNGNDTEHTVLPEPENLKAIQGSDNKLETSEHVSVQPVSARNGSRQTKSVKRKERNAEVKSKKRKTSSAVTAVRASPRLAALKVQLEVSIKHEDAMVSINHVDQVQTIEESAIDQAHKSQSGSVDEIHGNLESTFSQLQLSQADTANGMQAMQENTTIHSQPSQLDTLNPTHRSQENSGNQLQSVLTDSSIPKRTTQECTIDEPSQPGINHIHTDQEFTGNQFRSNLPDDTVISLRDIEECTAHSKPSNTDSTGQIQANEENTANQVQSSLTDTVIPVPVIQEYATGYSQLSKANTSNKKQANQEYIADQVQSSLTDTVIPVQVIKEYTTGYPHINKADISNQMQANQENTDDHLYLSQVGCVTQMQIIEENLPKQPQLSQSGTGGRIQIDLESTTNHLLPNYDENSMLQCGLSWAPEQNSGALSTDFWKNVETQASSVSMPINGAPVASFPANVRFHNAAAAAEPALPPQVAPAEAGSDQSGLAFQSVFGNIWSDPCIEFAFKTLTGDIPVLDDTTAVTDYFPEQQDLNKGPAPNRAGSVDNSRNHTQVDVNLPPPALDDFYNGNWFPPQ

SEQ ID NO: 11262 - protein, 448 aa, Zea mays
  VARIANT 381: note = Ancestral polymorphism is E, Derived polymorphism is G
  VARIANT 353: note = Ancestral polymorphism is G, Derived polymorphism is C
  VARIANT 249..448: note = Derived polymorphism lacks residues 249 to 448
  VARIANT 245: note = Ancestral polymorphism is E, Derived polymorphism is G
  VARIANT 139..448: note = Derived polymorphism lacks residues 139 to 448
  VARIANT 109..448: note = Derived polymorphism lacks residues 109 to 448
  VARIANT 73..448: note = Derived polymorphism lacks residues 73 to 448
MFDEMHQRIEFQLITGQLLRVIKYCFYNFSEQMRRFFQPLSRGSNTGANNNVNNTPTVGGTFNPDDIVADPALRRQIYEYDKDVQDQVRRAYVLNGPCQPKGLDFPRRQYGQSSRPFKEEWYDKYDWLEYSESKDAVYCFYCFLFKQAVKGDKYNNWKDAVQRLKSHVGGVNSIHNNARLHFDDFNNQRQSISTIMSSASREAEDLYKIRLTSSLACSRFLLMQGLAFRGHDESSSSLNKGNFLELIYWMKDKIKEVRDAFDHAPRNCIMISPHIQKDLAKCCAQQITENILGEIGDRNFSILIDESRDVSVKEQMAVILRYVNNQGHVMERFLALKHVKDTTSDALKEAIFGLLDHHGLSISKISGQGYDGASNMRASVERIFSAMNIIKRELRNKIEDDWMNDLMVCYTEKEIFKSLDDEIITRRFQRLKTRRMQLPRVTTTRLTT

SEQ ID NO: 11263 - protein, 582 aa, Zea mays
  VARIANT 29: note = Ancestral polymorphism is V, Derived polymorphism is A
MKPFLLSSSLPAAAAHAVVVVVAAISIVVLSATSMMPVAAVEHTFVVSQVKMTRMCKQIPVTVVNGQLPGPTIEVTEGHSVTVHVVNMSPYNLTIHWHGVYQLLNCWNDGVPMVTQRPIPPNANFTYRFDVAGQEGTLWWHAHDAFLRATVYGALIIRPRNGAASYPFPKPHKEIPILIGEWWEKDLAAVDRNFTRGHYDEFSSGSTINGKLGDLFNCSGVFEDGYVLDVEPGKTYLLRVINAALFSEYFIKIAGHKFTVVAADANYVTPYATDVIVIAPGETMDALVIADAAPVHRQHQHTRNNKSSPVDDDDAVAPDMPDQHDTIKSFYFHGNLTGLRQRQRQRARVPARADERLLVTLGLGSICRLPGRRSCKRGDHPESMVVANMNNVSFHDAAAAAPLLEAHYYHRRGGNGGVGTAGLPDRPPSAFNYTDPALIPFGPQEMRLEPTRRATAVRRFRHGAVVDVVFQSTAMLQGDSNPMHLHGHDMFVLAQGIGNYDAATDEGKYNLVNPPRKNTVLVPNLGWAAIRFVADNPGAWFIHCHFEFHLAMGMAAVFIVEDGPTPNTSLPPPPPGFLDGRP

SEQ ID NO: 11264 - protein, 514 aa, Zea mays
  VARIANT 318: note = Ancestral polymorphism is R, Derived polymorphism is I
MLYLISSRFCLIAFHHAVTQVSKLVKYIASAGSLQGGHSLSEPSARHYSSEPSLQATEENGFKGHSMLAPFTAGWQSTDVHPLVIERSEGSYVYDSNGKKYIDALAGLWCTALGGNEPRLVKAATEQLNKLPFYHSFWNRTTKPSLDLANDILSMFTAREMGKVFFTNSGSEANDSQVKLVWYYNNALGRPDKKKFIARSKSYHGSTLIAASLSGLPALHQKFDLPAPFVLHTDCPHYWRFRLPDETEEEFSTRLANNLENLVLKEGPETIAAFIAEPVMGAGGVILPPKTYFEKIQAVLKKYDILLIADEVITAFGRLGTMFGCDMYNIKPDLVSIAKALSSAYMPIGAILVSPEITDVIYSQSNKLGSFAHGFTYSGHPVSCAVAVETLKIYKERNIVEHVNKIAPRFQEGIKAFSGSPIVGEIRGLGLILGTEFVDNKSPNDPFPAEWGVGSIFGAECEKRGMLIRVAGDSIMLSPPLIMTPNEVEEIISKFGDALKATEERIVELKSRKN

SEQ ID NO: 11265 - protein, 213 aa, Zea mays
  VARIANT 77: note = Ancestral polymorphism is R, Derived polymorphism is Q
MTLDAHYLRGSMAAIYSLLKHASCPESLFFHFMLATQLMEDCVTSPDVNVEVGSYVNTNDVFKEPNDVFKEPGSNKRFLELGSTLEPGKPVKADKVAILSDATLMVIQLRLEAQQLKETNGSLEEKIKELKAKKDELRDEKQKLKLENESLEHQMKLMTSTPTYMPHPTLMPVPFPQAPLAPFHAQGQATWQKLMMPFVSYPGYPMWQFMPPS

SEQ ID NO: 11266 - protein, 163 aa, Zea mays
  VARIANT 94..163: note = Derived polymorphism lacks residues 94 to 163
MNPSSNAPHPHALSPKLQAPGDTIVYLSPAYLLSSRLDIQAAIAKDTELRALHGSLLQSGSATAYNVGAYASASRSPRRHLPTVDRVVDVSARQAGPPGHDDQGVPRVCPRYNIYDNGDEMMEANVQTKLVLCEFVMSNPSDTTQPLSNTLPSSFKTSARGAT

SEQ ID NO: 11267 - protein, 99 aa, Zea mays
  VARIANT 14: note = Ancestral polymorphism is E, Derived polymorphism is K
  VARIANT 29: note = Ancestral polymorphism is K, Derived polymorphism is E
  VARIANT 63: note = Ancestral polymorphism is E, Derived polymorphism is V
MHVDDTVDPVRDMETVSEELRLKDLEFMEKKLEDLDKSMKRSNDKQLKIEHELCERVIAHLEERKDVRLGDWKAAEVEILNTFQLLSAKPVVYLVWISY

SEQ ID NO: 11268 - protein, 146 aa, Zea mays
  VARIANT 40: note = Ancestral polymorphism is A, Derived polymorphism is D
MALSSMFKRINVKDLTSKVSVYTSATELSGGLNMIFRRWATKRTAGSTKNGRDSNPKYLGVKKFGGEKVLPGNIIVRQRGTRFHPGNYVGMGKDHTLFCLKEGNVRFERNKLSGRKWVHVDPVAGHDLHPIYADGFATTSDTEPMQ

SEQ ID NO: 11269 - protein, 327 aa, Zea mays
  VARIANT 43..327: note = Derived polymorphism lacks residues 43 to 327
MLAFNKHSIRFVTFFHSITYTNAFLFLYPVDWYSKLSMLFWFWTLMILPALLLQELFYLFWQVMKLLMKVPFGVGKVPVPSKSSWHVNSTLEIGCGVSGWVQDNNLLSSETCVHFLLKLLNPPVNVVDAKAPSIGSKLLGIGKFQMLNGSNKDVDSCSEDILSKVEENLLSCKEIKPADRDYKRTTRPELCSKWLALLTMEKACLSVVALEDTSDMVLELGGNFKETLRQLGGLDDIFNVMVNCHSELEVRSYLCVCMFSNSLYKTIKLALFVILFCYGKGWLTFEPCTIHAPVYLELQSDEYYFEQHEKHVARQGYVAVIALVEMF

SEQ ID NO: 11270 - protein, 428 aa, Zea mays
  VARIANT 325..428: note = Derived polymorphism lacks residues 325 to 428
  VARIANT 335..428: note = Derived polymorphism lacks residues 335 to 428
  VARIANT 346..428: note = Derived polymorphism lacks residues 346 to 428
MFKVYIVGDAIRVVRQFSLPNVDEGDLSNNAGGLRLFDIDMIREHGTRDRFYVIDMNYFLGMWLFPCVASPFAGKGAPSPVVPLPTLVVVTEDVFSLIVEAFMPLDDIESPFFGRRTSILDTVTKVWSCVVMLDLECDDLINDMFHHFLVTVKSQPVQMMQILTLVLLGLRLFDIDMIREHGTRDRFYVIDMNYFLGMWLFPCVASPFAGKGAPSPVVPLPTLVVVTEDVFSLIVEAFMPLDDIESPFFGRRTSILDTVTKVWSCVVMLDLECDDLINDMFHHFLVTVNRIIWLGGLNYRIALSYCLAKALVEMHKQLLEKDQLQIERRCGCIFQGWKEGMINFLRYINTHSTQIVTLVCGPKKIGGHLLGAITLCGLLQLSYIRGESRFSDHRPVYNLFMAKVESACHRRSNLSLIMISGVEGTMID

SEQ ID NO: 11271 - protein, 700 aa, Zea mays
  VARIANT 534..700: note = Derived polymorphism lacks residues 534 to 700
MGKSSKKAAAVAAAPAAVPKGKKREAEEEIEKAVSAKKQKAAPPAKAVPTSKKDAKKSKKQPPPKKAESSSSDSEEDSESEEEVKKVQPKKAPAPKIAKQESSDDDTSDETSESDEEPAKKPAAKPLAAVAKNGSKTVKQESSSDEDSSEDESDDDSDDEPAKKAAAKPLGAVAKNGLKKGKQESSSDGSSSDDESDDDVKPAAPLKKTSVAVAQKKKGDSSESDSDDDSDEEVPPKSKAPAATIKKEDSSESESESDSEVEDASKTQPAKRAASKMKDESSDDSDTDEDEEPPQKKQKEALSAAKKESSSEDEDDSSEESSDDEPTKVEEKKAPKVSENSGSEDESSEDESDKDSEEPANTPKKAAVHASEKKTATKEPKTPTGSQSESTEVNTLFMGNVPWKAEFDDVKEFFEDVGEVVDVRFPTHDDGNRKGFCYVEFVSAEAAAKAYKEKQSKELHGREVRLDFAKGRSTQTPRSGNDGSFQKAARGNSSSIFIRGFDKNLSEDEIRSSLEQHFSDCGEMTRVSIPTDHESGAIKGMAYIDFKDQDSVSKALELSGSDIGGGYELYVDEAKPRGDGQRGGGRSGGRSGGRFGDRSGGRRGGGRFGERSGGRDGGGRFGGRRGGRDGGRGRGGRGFGNKHSAGTPSAGTTHPVIVKFTAFWFEQKNCRPVVSGFKKLEVTAVLPLICTGKKTTFGDD

SEQ ID NO: 11272 - protein, 122 aa, Zea mays
  VARIANT 4: note = Ancestral polymorphism is G, Derived polymorphism is R
  VARIANT 16: note = Ancestral polymorphism is R, Derived polymorphism is L
  VARIANT 24: note = Ancestral polymorphism is R, Derived polymorphism is M
  VARIANT 32: note = Ancestral polymorphism is M, Derived polymorphism is V
MATRSEASFRVGDLELSIKFYEKRSSLILILMHGMKLLRKKDVPDYKVAIGTNDVYKSAEAVDLATKELVGGKILRQPGPLPGINTKIASFVDPDGWKVVLVDNTDTSSGNSSENRTGAPRY

SEQ ID NO: 11273 - protein, 45 aa, Zea mays
  VARIANT 23: note = Ancestral polymorphism is K, Derived polymorphism is M
  VARIANT 14: note = Ancestral polymorphism is G, Derived polymorphism is R
  VARIANT 5..45: note = Derived polymorphism lacks residues 5 to 45
  VARIANT 4..45: note = Derived polymorphism lacks residues 4 to 45
MDPQQPEPVSYLCGDCGAENTLKPTDVIQCREWGYRILYKKRTHR

SEQ ID NO: 11274 - protein, 461 aa, Zea mays
  VARIANT 65: note = Ancestral polymorphism is S, Derived polymorphism is F
  VARIANT 142: note = Ancestral polymorphism is R, Derived polymorphism is C
  VARIANT 157..461: note = Derived polymorphism lacks residues 157 to 461
  VARIANT 233: note = Ancestral polymorphism is R, Derived polymorphism is W
  VARIANT 245..461: note = Derived polymorphism lacks residues 245 to 461
  VARIANT 290: note = Ancestral polymorphism is P, Derived polymorphism is L
MITAEKSPEREEEEANPRAEAFLEIICRVPAGEVEAALSACGIGPTAEVEELVLKSRECYKRPKSAVRFFRWAGQSVSHTAYAWNLLVDILGKAAMFESMWDAIRSMKQEGGSGLVSVATFASYCTAGNIKDAIAALDVMDRYGLKHDAVALNSLLSAICRVEGRVQDAQDVFERTKATIPPDGDTFAILLEAWEKEGNAVRAKSVFGEMVVRIGWDAANVSAYDSFLSTLVRGGLLDEAFKFLQVMRSKGCLPGINFFSTAVDLVVRKGDYLNAVAIWHMMVSEAGLVPNFSMYSAMIGLHCNAGSIDDALGLLDEMPLNDVFANSVTYHTILEGFIKHRKAREAESFLTEMSKNEQLPTASNCAAAISLFFKEFNPSASIDVWRCIEEHNITLAEDSAKELIAGLLDFGRFTEVTKRADEMIDMRVELSRSTMENMKRAFAKAGRHQSYDNIARRLKRY

SEQ ID NO: 11275 - protein, 340 aa, Zea mays
  VARIANT 189..340: note = Derived polymorphism lacks residues 189 to 340
MTMLPRGAADKIISHTLAGAMLSGLGIWHLFNHMRLLVSLAPTAPSSSSSRVAVLAPAAWFPAPRVRRLEPIAMLAAGAYGLATQMLAYSPMPFRADGSIPPERLPNHEHAIIYASLLVYAGSAIYLDDDDDRAGPRHAAPAPTTLCMLLLAALFAQELFVFHVHSSTDDHAGVEARLHWFLQASAAACLAAALLGAARLPADLQLAAGLVRSASLAFQGLWCVVIGVAWVPGMLPAGCYLDGSGVHLRCRGEDSLRHAIAVVNLQFGWCMVLVVGIYVYVCKRYPAGAWSHGEVYGRLPEAEAADEDDDSHHHDMKTPNCKQLAAHDDVHEFTSLEIDV

SEQ ID NO: 11276 - protein, 1047 aa, Zea mays
  VARIANT 169..1047: note = Derived polymorphism lacks residues 169 to 1047
MAKTSEVIAGIALGIPLMNGVLVPIITILVNRFFSILLTDTSRKLSNLENLTIPSLKETLVQVEEQRMVRAPKDAQSESDLRTLDGLTTELKAALYEAEEILDLVDYYRIKKRIADDAEENGRSRWVQQTLRAFRTSMARCQGSSWVRHLHDCVGLCVACCKGTLFRRSGEQLPISHASSVSMAQRLRGWYRHLVHHIPSSSRSVMQWLRHWFQHLVFNFAKLCESGTQTLPGLPAADVIATNQDWSYKVIGINSNQNDGTATASFLLTIARHNLTKRIEHIENVLNDLKKSHLLNQQSTISSSSNKEKSSRHEDIQYLYRSIERKVIGRDKEREKLIRSGKSTLAQYVCDYEKAEGQHFDPVMFIHVSQTFRVDKIFRDMLREIRKDRQSDSNSVKCLHDELKEKLRGKCFLLVLDDLWVSRENQEERAILLTVLDAGQSGSRVLVTAQKKDVAAAFIAIGRKIAKKLGRSPIAAVTVAARLRSNSSIDFWETTANLDMLDETMGALWWSYQQLGVDVRRCFAYCSTFPRGYRLVRDELVHIWIAQGFINTRVNATEQPEDIGLHYINELRTFSFLQIERTVFGTETEAFTIHDLLHELAERVSGSECFRVVSNSSPKHIPQEVRHLFVGTGTDSRSAITKKILGLVNLRTLIIVEEYSENKRKTFAAEDAEERSGRALVNEEVLDRMFRSLRKLRALVVTTRQYHERALLVPASIDQMKHLRYLSFNLDCSHRSVELIFPSTFSKLYHMQSIYAEKISCAKDVTQNLTSLRHSSSSSMGFANVGRLTSLQSLRYFQVKREQGHELKQLKHLNNLRGTLAIDGLGIVRSKEEALEAHLASKERLRKLELSFSVRQAGDPNAVAEILNRLLPPEDPTNHRYHGWMMGGQTPDVAAEVLEGLCPPKDLAALTINRYKGSRYPSWMLSSQSPGALKYLQELELHNCNRLASFPEEGTELFSCLRELRVSFCDWDSMPENMELLVSLQSVLIMRCDRMERLPTLPPSLAKVEIHGCRVLSRTCQAEGHENWRKILHIPEKNISPRRSMAQ

SEQ ID NO: 11277 - protein, 68 aa, Zea mays
  VARIANT 39..68: note = Derived polymorphism lacks residues 39 to 68
MLTGGMSERLPDRGKKLLATLDAIHREQDHRQARGDGARAPLGSLTSGNWNAVIVQYSDGLGNEACER

SEQ ID NO: 11278 - protein, 72 aa, Zea mays
  VARIANT 45: note = Ancestral polymorphism is A, Derived polymorphism is T
  VARIANT 42: note = Ancestral polymorphism is R, Derived polymorphism is P
  VARIANT 40: note = Ancestral polymorphism is D, Derived polymorphism is A
  VARIANT 37: note = Ancestral polymorphism is Q, Derived polymorphism is K
  VARIANT 35: note = Ancestral polymorphism is T, Derived polymorphism is M
  VARIANT 19: note = Ancestral polymorphism is R, Derived polymorphism is W
  VARIANT 10: note = Ancestral polymorphism is D, Derived polymorphism is E
MAHPFLQGLDALLLLRLGRPLEEGAAAVEVAVTVTGQQLDARVAALVRMLVAKGKAGMLAEALAEFAAICML

SEQ ID NO: 11279 - protein, 228 aa, Zea mays
  VARIANT 194: note = Ancestral polymorphism is G, Derived polymorphism is E
  VARIANT 184: note = Ancestral polymorphism is G, Derived polymorphism is R
  VARIANT 174: note = Ancestral polymorphism is A, Derived polymorphism is V
  VARIANT 138: note = Ancestral polymorphism is N, Derived polymorphism is S
  VARIANT 117..228: note = Derived polymorphism lacks residues 117 to 228
MAALTYFLLVAFLALVTSQAIASDPSPLQDFCVADKYSPVKVNGFVCKDPMAVNADDFFKAAKLDQPRDTKNKVGSNVTLINAMQLPGLNTLGISLARIDYAPLGQNPPHTHPRATEILTVLEGKLYVGFVTSNQANNNNKLFTKVLNKGDVFVFPQGLIHFQFNPVHDKPAVAIAALSSQNPGVITIANAVFGSKPPISDDVLAKAFQVQKGTIDWLQAQFWENNHY

SEQ ID NO: 11280 - protein, 200 aa, Zea mays
  VARIANT 89: note = Ancestral polymorphism is P, Derived polymorphism is L
  VARIANT 83: note = Ancestral polymorphism is P, Derived polymorphism is Q
  VARIANT 76: note = Ancestral polymorphism is I, Derived polymorphism is V
  VARIANT 67: note = Ancestral polymorphism is P, Derived polymorphism is T
  VARIANT 48: note = Ancestral polymorphism is R, Derived polymorphism is L
  VARIANT 25: note = Ancestral polymorphism is P, Derived polymorphism is L
MSAHTASAPAHPAEPGDGGISSLWPALKLDSGASVHIVRDPSLLSDLRDAPEELLVTAAAHGGNKMTVNKIGDIRVLDRFTIPNVYLLPELRDDGLISVRQLARQGICTFFVGDRARLYAGTDLVGVAVAELDDPYGLYVLHSLFVPKIIASARRACGGRSWWCAWRWRPSFAADDAGAAATAADEQQENMLSLTDSYRY

SEQ ID NO: 11281 - protein, 228 aa, Zea mays
  VARIANT 176: note = Ancestral polymorphism is A, Derived polymorphism is V
  VARIANT 116: note = Ancestral polymorphism is T, Derived polymorphism is I
MAASTYFLLVAFLALVTSQSIASDPSPLQDFCVADKYSPVKVNGFVCKDPMAVNADDFFKAAKLDQPRDTKNKVGSNVTLINVMQLPGLNTLGISLARIDYAPLGQNPPHTHPRATEILTVLEGKLYVGFVTSNQANSNNKLFTKVLNKGDVFVFPQGLIHFQFNPVHDKPAVAIAALSSQNPGVITIANAVFGSKPPISDDVLAKAFQVQKGTIDWLQAQFWENNHY

SEQ ID NO: 11282 - protein, 228 aa, Zea mays
  VARIANT 2: note = Ancestral polymorphism is A, Derived polymorphism is T
  VARIANT 7: note = Ancestral polymorphism is L, Derived polymorphism is F
  VARIANT 9: note = Ancestral polymorphism is V, Derived polymorphism is I
  VARIANT 88: note = Ancestral polymorphism is G, Derived polymorphism is R
  VARIANT 106..228: note = Derived polymorphism lacks residues 106 to 228
  VARIANT 147: note = Ancestral polymorphism is L, Derived polymorphism is F
  VARIANT 189: note = Ancestral polymorphism is A, Derived polymorphism is V
MTASTFLLVAFLALVTSQAIASDPSPLQDFCVADKDSPVKVNGFVCKDPMAVNADDFFKAAKLDQPRDTTKSKVGSNVTLINVMQLPGLNTLGISLARIDYAPLGQNPPHTHPRATEILTVLEGTLYVGFVTSNQADRSNKLFAKVLNKGDVFVFPQGLIHFQFNPVHDKPAVALAALSSQNPGAITIANAVFGSKPPISDDVLAKAFQVQKGTIDWLQAQFWENNHY

SEQ ID NO: 11283 - protein, 229 aa, Zea mays
  VARIANT 66..229: note = Derived polymorphism lacks residues 66 to 229
  VARIANT 148: note = Ancestral polymorphism is L, Derived polymorphism is F
MAASTYFLLVAFLALVTSHAIASDPSPLQDFCVADKDSPVKVNGFVCKDPMAVNADDFFKAAKLDQPRDTTKSKVGSNVTLINVLQLPGLNTLGISLARIDYAPLGQNPPHTHPRATEILTVLEGTLYVGFVTSNQADRSNKLFAKVLNKGDVFVFPQGLIHFQFNPIHDKPAVALAALSSENPGAITIANAVFGSKPSISDDVLAKAFQVQKGTIDWLQAQFWENNHY

SEQ ID NO: 11284 - protein, 229 aa, Zea mays
  VARIANT 15: note = Ancestral polymorphism is L, Derived polymorphism is S
  VARIANT 29..229: note = Derived polymorphism lacks residues 29 to 229
  VARIANT 66..229: note = Derived polymorphism lacks residues 66 to 229
  VARIANT 76..229: note = Derived polymorphism lacks residues 76 to 229
  VARIANT 130: note = Ancestral polymorphism is G, Derived polymorphism is A
  VARIANT 148: note = Ancestral polymorphism is L, Derived polymorphism is F
  VARIANT 169: note = Ancestral polymorphism is H, Derived polymorphism is Y
  VARIANT 170: note = Ancestral polymorphism is D, Derived polymorphism is G
  VARIANT 175: note = Ancestral polymorphism is A, Derived polymorphism is V
MAASTYFLLVAFLALVTSHAIASDPSPLQDFCVADKDSPVKVNGFVCKDPMAVNADDFFKAAKLDQPRDTTKSKVGSNVTLINVLQLPGLNTLGISLARIDYEPLGQNPPHTHPRATEILTVLEGTLYVGFVTSNQADRSNKLFAKVLNKGDVFVFPQGLIHFQFNPAHDKPAVALAALSSQNPGAITIANAVFGSKPPISDDVLAKAFQVQKGTIDWLQAQFWENNHY

SEQ ID NO: 11285 - protein, 145 aa, Zea mays
  VARIANT 8: note = Ancestral polymorphism is T, Derived polymorphism is M
  VARIANT 10: note = Ancestral polymorphism is G, Derived polymorphism is A
  VARIANT 15: note = Ancestral polymorphism is R, Derived polymorphism is H
  VARIANT 30: note = Ancestral polymorphism is P, Derived polymorphism is L
  VARIANT 85: note = Ancestral polymorphism is H, Derived polymorphism is Y
MQLPGLNTLGISLARIDYMPLGQNPPHTHPRATEILTVLEGTLYVGFVTSNQADRSNKLFAKVLNKGDVFVFPQGLIHFQFNPAHDKPAVALAALSSQNPGAITIANAVFGSKPPISDDVLAKAFQVQKGTIDWLQAQFWENNHY

SEQ ID NO: 11286 - protein, 160 aa, Zea mays
  VARIANT 23: note = Ancestral polymorphism is T, Derived polymorphism is M
  VARIANT 25: note = Ancestral polymorphism is G, Derived polymorphism is A
  VARIANT 30: note = Ancestral polymorphism is R, Derived polymorphism is H
  VARIANT 45: note = Ancestral polymorphism is P, Derived polymorphism is L
  VARIANT 100: note = Ancestral polymorphism is H, Derived polymorphism is Y
MACSPSNCLPSSIHTVKLPGLNTLGISLARIDYMPLGQNPPHTHPRATEILTVLEGTLYVGFVTSNQADRSNKLFAKVLNKGDVFVFPQGLIHFQFNPAHDKPAVALAALSSQNPGAITIANAVFGSKPPISDDVLAKAFQVQKGTIDWLQAQFWENNHY

SEQ ID NO: 11287 - protein, 229 aa, Zea mays
  VARIANT 5: note = Ancestral polymorphism is T, Derived polymorphism is I
  VARIANT 89: note = Ancestral polymorphism is G, Derived polymorphism is R
  VARIANT 148: note = Ancestral polymorphism is L, Derived polymorphism is F
  VARIANT 210..229: note = Derived polymorphism lacks residues 210 to 229
MAASTYFLLVAFLALVTSHAIASDPSPLQDFCVADKDSPVKVNGFVCKDPMAVNADDFFKAAKLDQPRDTSKSKVGSNVTLINVMQLLGLNTLGISLARIDYAPLGQNPPHTHPRATEILTVLEGTLYVGFVTSNQADRSNKLFAKVLNKGDVFVFPQGLIHFQFNPVHDKPAVALAALSSQNPGAITIANAVFGSKPPISDDVLAKAFQVQKGTIDWLQAQFWENNHY

SEQ ID NO: 11288 - protein, 156 aa, Zea mays
  VARIANT 23: note = Ancestral polymorphism is V, Derived polymorphism is A
  VARIANT 25: note = Ancestral polymorphism is Q, Derived polymorphism is P
  VARIANT 28: note = Ancestral polymorphism is G, Derived polymorphism is R
MTSSRLQNLTKSKVGSNVTLINAMPLPGLNTLGISLAHIDYAPLGQNPQHTHPRATEILTVLEGTLYVGIVTSNQADRSNKLFVKVLNKGDVFVFPQGLIHLQFNPVHDKPVVALAALSSQNPRAITIANAVFGSKPPISDDVLAKAFQVQKGSID

SEQ ID NO: 11289 - protein, 229 aa, Zea mays
  VARIANT 5: note = Ancestral polymorphism is T, Derived polymorphism is I
  VARIANT 88: note = Ancestral polymorphism is P, Derived polymorphism is R
  VARIANT 96: note = Ancestral polymorphism is S, Derived polymorphism is L
  VARIANT 107..229: note = Derived polymorphism lacks residues 107 to 229
  VARIANT 130..229: note = Derived polymorphism lacks residues 130 to 229
MAASTYFLLVAFLALVTSHAIASDPSPLQDFCVADKDSPVKVNGFVCKDPIAVNADDFFKAAKLDQPRDTTKSKVGSNVTLINVMQLPGLNTLGISLARIDYMPLGQNPPHTHPRATEILTVLEGTLYVGFVTSNQADRSNKLFAKVLNKGDVFVFPQGLIHFQFNPAHDKPAVALAALSSQNPGAITIANAVFGSKPPISDDVLAKAFQVQKGTIDWLQAQFWENNHY

SEQ ID NO: 11290 - protein, 228 aa, Zea mays
  VARIANT 15: note = Ancestral polymorphism is L, Derived polymorphism is S
  VARIANT 44: note = Ancestral polymorphism is G, Derived polymorphism is V
  VARIANT 129..228: note = Derived polymorphism lacks residues 129 to 228
  VARIANT 163..228: note = Derived polymorphism lacks residues 163 to 228
  VARIANT 172: note = Ancestral polymorphism is A, Derived polymorphism is V
  VARIANT 217..228: note = Derived polymorphism lacks residues 217 to 228
MAASTYFLLVAFLALVTSHAIASDPSPLQDFCVADKDSPVKVNGFVCKDPMAVNADDFFKAAKLDQPRDTTSKVGSNVTLINVLQLPGLNTLGISLARIDYAPLGQNPPHTHPRATEILTVLEGTLYVGFVTSNQADKSNKLFAKVLNKGDVFVFPQGLIHFQFNPVPDKPAVALAALSSQNPGAITIANAVFGSKPPISNDVLAKAFQVQKGTIDWLQAQFWENNHN

SEQ ID NO: 11291 - protein, 222 aa, Zea mays
  VARIANT 18: note = Ancestral polymorphism is Q, Derived polymorphism is L
  VARIANT 20: note = Ancestral polymorphism is I, Derived polymorphism is T
  VARIANT 22: note = Ancestral polymorphism is S, Derived polymorphism is C
  VARIANT 88: note = Ancestral polymorphism is G, Derived polymorphism is R
  VARIANT 120: note = Ancestral polymorphism is T, Derived polymorphism is N
  VARIANT 172: note = Ancestral polymorphism is A, Derived polymorphism is V
  VARIANT 187: note = Ancestral polymorphism is T, Derived polymorphism is I
  VARIANT 213: note = Ancestral polymorphism is G, Derived polymorphism is R
MAASTFLLIAFLALITSQAIASDPSPLQDFCVADKDSPVKVNGFVCKDPMAVNADDFFKAAKLDQPRDTTKSKVGSNVTLINVMQLPGLNTLGISLARIDYAPLGQNPPHTHPRATEILTVLEGTLYVGFVTSNQADRSNRLFAKVLNKGDVFVFPQGLIHFQFNPVHDKPAVALAALSSQNPGAITIANAVFGSKPPISDDVLAKAFQVQKGTIDWLQAQF

SEQ ID NO: 11292 - protein, 143 aa, Zea mays
  VARIANT 3: note = Ancestral polymorphism is P, Derived polymorphism is L
MHPVKVNGFVCKDPMAVNADDFFKAAKLDQPRDTTKSKGTLYVGFVTSNQADRSNRLFAKVLNKGDVFVFPQGLIHFQFNPVHDKPAVALAALSSQNPGAITIANAVFGSKPPISDDVLAKAFQVQKGTIDWLQAQFWENNHY

SEQ ID NO: 11293 - protein, 655 aa, Zea mays
  VARIANT 96..655: note = Derived polymorphism lacks residues 96 to 655
  VARIANT 124..655: note = Derived polymorphism lacks residues 124 to 655
  VARIANT 315..655: note = Derived polymorphism lacks residues 315 to 655
  VARIANT 380..655: note = Derived polymorphism lacks residues 380 to 655
  VARIANT 385: note = Ancestral polymorphism is S, Derived polymorphism is F
MYNGGRAGLTFWSPNVNIFRDPRWGRGQETPGEDPAVSARYAAAYVRGLQQPYAAPNGGHRNRLKLAACCKHFTAYDLDKWGGTDRFHFNAVVAAQDLEDTFNVPFRACVEDGRAASVMCSYNQVNGVPTCADAAFLRGTIRGRWGLDGYIVSDCDSVDVFFRDQHYTRTPEDAAAATLRAGLDLDCGPFLALYAGSAVAAGKVADADVDAALLNTVTVQMRLGMFDGDPAAGPFGRLGPADVCTREHQDLALDAARQGVVLLKNRRGARHNRDVLPLRPAAHRVVAVVGPHADATVAMIGNYAGKPCRYTTPLQGVAAYAARVAHQAGCTDVACRGNQPIAAAVEAARQADATVVVAGLDQRVEAEGLDRTTLLLPGRQAELISAVAKASKGPVILVLMSGGPIDIAFAQNDPRIDGILWVGYPGQAGGQAIADVIFGHHNPGAKLPVTWYHQDYLQKVPMTNMAMRANPARGYPGRTYRFYTGPTIYPFGHGLSYTQFTHTLAHAPTQLTVRLSGSGHSAASAASLLNATLARPVRAVRVAHARCEGLTVPVHVDVSNVGDRDGAHAVLVYHAAPSPSHAAPGADAPARQLVAFEKVHVPAGGVARVEMRIGVCDRLSVADRNGVRRVPVGEHRLMIGELTHSVSLGVEQLGV

SEQ ID NO: 11294 - protein, 115 aa, Zea mays
  VARIANT 74: note = Ancestral polymorphism is C, Derived polymorphism is R
  VARIANT 64: note = Ancestral polymorphism is G, Derived polymorphism is S
  VARIANT 45: note = Ancestral polymorphism is S, Derived polymorphism is R
  VARIANT 40: note = Ancestral polymorphism is S, Derived polymorphism is R
  VARIANT 37: note = Ancestral polymorphism is M, Derived polymorphism is I
  VARIANT 34: note = Ancestral polymorphism is A, Derived polymorphism is V
  VARIANT 18: note = Ancestral polymorphism is V, Derived polymorphism is G
  VARIANT 12: note = Ancestral polymorphism is A, Derived polymorphism is V
MLQGFHDSGFHAEKPLLVLPSCLLLLLLAPLVSAVPMPRSLRLGSHQQHPPTLKLSSSQVLPSSYFRQQPEAMRNGYWCCCQYTTTIAIEDRKAMIITAVISSRIRFQYGSIAVC

SEQ ID NO: 11295 - protein, 85 aa, Zea mays
  VARIANT 8: note = Ancestral polymorphism is S, Derived polymorphism is L
  VARIANT 64: note = Ancestral polymorphism is S, Derived polymorphism is N
  VARIANT 76..85: note = Derived polymorphism lacks residues 76 to 85
MIAFPLLLCLILSIFYMFWFSATLHLFSSGQVVRNDCNTDCCSYDLKLGKVNCDYNIHYTPHISIAILFHLFGCYWVTQFILTCS

SEQ ID NO: 11296 - protein, 516 aa, Zea mays
  VARIANT 158: note = Ancestral polymorphism is R, Derived polymorphism is H
MPLAAGDPSPPPSTAHAITTPDGWHPRTAERHLLHLLHHCPLARGRPLELLAFAVRRALPYSPPSPHHHALAALLLLSSPPPPALPILRLLPPEPTPPLPLLNAAVKALSASSPPDDAFRLLSTLRQFHAPDRLTFLPLIGCASSLPLLYALHSLLLRLGFLSHHVISLALLKPYPLPQARVLFDDMPQKNKCTVAYNTLITACLRVRDIRAARHLFDEMQWHRRSRRSVVSWNLMIAGCARCGRDDMAVSCFERMIREGEVAPDDGTLVAVLPACGRTGNVRAGRWAHEYARKSGLLDGTVHVANALMDMYCKSGDVNSAREVFMTTRPRSVVSWNTLIAGFSLNGRGVEGIDLFQEMRRQGMEPNAVTFLAVLGCCAHAGAVDIGREIFRSMLSEHGTEAAIEHYGCMVDLFGRSGLLEEAHVLIQGMPMKPNAAIWGALLSACRAHAGLGLAEVALKELINLEPWNSGNYVLLANLYVETERWDEAGEVRRLMRRMSVNKAPGQSFMEEAEFS

SEQ ID NO: 11297 - protein, 127 aa, Zea mays
  VARIANT 64: note = Ancestral polymorphism is P, Derived polymorphism is A
  VARIANT 87: note = Ancestral polymorphism is V, Derived polymorphism is A
MSTPGSRARAIGLTITLLSVSGGIHFSSTCGFGLLLSFTGILAGANLVAFGVSKADDNPAPTFPTAFDSARALAAFMRRSTATAGLVMASCAVTAVSSGEADPVLFFAMFALLLLGVSLVIAGARGE

SEQ ID NO: 11298 - protein, 222 aa, Zea mays
  VARIANT 87: note = Ancestral polymorphism is S, Derived polymorphism is F
MGRPRATTTAASSKPKPKPKPKPKPRSRAKPRATPSPVSLLSGISSPYACRTPSPAAADLSFLSPSSPPAEPGTRNSSPLAAPTTMSTIGDLRSLAASHLDSLKRRLDALHGDYVRDLEASHSRISKRVKMESHGCLQLAEEVDKEQQKIADKIAERAELVKTSYKKFVAEVQASTSRGTFAHGKKYFSVFLSGSTSMCSFLSSTCCVITLLVAASVQGDCP

SEQ ID NO: 11299 - protein, 74 aa, Zea mays
  VARIANT 8: note = Ancestral polymorphism is S, Derived polymorphism is L
  VARIANT 44: note = Ancestral polymorphism is S, Derived polymorphism is I
MKHRELASEAHGTHVSHLCVEAEAATSKSGMRTSGQPLLSTNHSFRKPSNGHRGHQRLVNQHGTTSFQPALTHG

SEQ ID NO: 11300 - protein, 85 aa, Zea mays
  VARIANT 19..85: note = Derived polymorphism lacks residues 19 to 85
  VARIANT 22: note = Ancestral polymorphism is G, Derived polymorphism is D
  VARIANT 69: note = Ancestral polymorphism is P, Derived polymorphism is L
  VARIANT 81: note = Ancestral polymorphism is S, Derived polymorphism is Y
MAAAAAAPPIPAPNPTDDWVDGSWTVDCSCGVTFDDGEEMSVTPCESKVGKMDIGGGPEVTLIGSLEMPKDDIWLVTAILSGLIE

SEQ ID NO: 11301 - protein, 630 aa, Zea mays
  VARIANT 156..630: note = Derived polymorphism lacks residues 156 to 630
  VARIANT 377: note = Ancestral polymorphism is P, Derived polymorphism is L
MQQRARDGEQHRLLDLAVESGFDRDLAASCLARLLEVYGEDGLDMVTVDNCGNDFLASLADATQPTDDWDDLKGIETEACGNLNDMMMKNVPDCNGGVAIDSRYTSREPNSSSQRAPNHLEAFKFASDDSDFEMDNLPDKSCSMQRQTQSRNSGMQTRSSAKSTVTRETSRYEPTTPTSNREMPPAAFHQRRELLSYEQLCCLDDVNFANAVIFGNKGFRPLQYEACRAAMDNQDCFILMPTGGGKSLCYQLPATLHPGVTVVVSPLLSLIQDQIVALTYRFAVPAAFLNSQQTSAQASAVIQELRCGKPAFKLLYVTPERIVTNYSFMETLRGLDQRGLLARFVIDEAHCVSQWGHDFRPDYRGLGCLKQNFPRVPIMALTATATESVRKDVLGALRIPNAVVLKRSFDRLNLNYEVIGKTKTFQKQLGDLLKERFMNESGIVYCLSKNECADTAKFLREKYKIKCAHYHASLAARQRTSVQEKWHSGEVKVICATIAFGMGIDKPDVFVNICEFSFTVQRFVIHNTLSKSIESYYQESGRAGRDELPAHCIVLYQKKDFSRIVCMLRNGENFRSESFRVAMEQAKKMQAYCELKTECRRQALLQHFGEQYDRRRCRDGPSPCDNCLKT

SEQ ID NO: 11302 - protein, 443 aa, Zea mays
  VARIANT 175..443: note = Derived polymorphism lacks residues 175 to 443
  VARIANT 115..443: note = Derived polymorphism lacks residues 115 to 443
  VARIANT 114..443: note = Derived polymorphism lacks residues 114 to 443
  VARIANT 65..443: note = Derived polymorphism lacks residues 65 to 443
  VARIANT 12: note = Ancestral polymorphism is C, Derived polymorphism is Y
MSKKHAIQCKYCDKVIHGGITRVKYHLANIGGFNVTKCKKVPAPVNQELEALLTKKTSEKEQRKKEKQRERDEIDLDKSDGSNEEDNEHENDIVVLKSTRGKKANKVVASEGFWKNVDMAINFFEPLANVLRRMDSDVPAMGFFHGCMLEAKKEIATRFDNNESKYKAAWDIIDKRWDNKLKTPLHLAGYYLNPYFYYPNKSSIELDGSFRAAVISCITKMFDDEDTQDSIIEELNIYQDQQGAFGHDIAVRQRRNKTFNPAKWWMNHGTTTPHLRILATRILNLTCSSSGCERDWSVFEQIHTKKQNKLLHDRMRDLVFVKFNSKLREKRDNKSKDPIEKELNDILEDGGNEFITDVVPDENVDQDEYHEGAHDEPSQEPSISKAQLPAKRKRHGHPRKKKLRSLKSLLSGDLEPATCASSSESEDNESMQIEASNSDSGDE

SEQ ID NO: 11303 - protein, 289 aa, Zea mays
  VARIANT 67: note = Ancestral polymorphism is P, Derived polymorphism is L
MRLSVGVAREFFALQDRLGFDKASKTVNWLLAQSKPAIDRLNRARLGSERQFVAPPNRTRPEQFIAPHGLSKVFGRRRDWAFCKRHDLSARGSNADLIARLDAAIGRAVSAEEEVAGVAARKGCVRQTGGDADETKKVTFVEVGGDVPLKLSRRNSLAAHVPVTRSRRNSLGADVLVRQSSRNSLCAEAQDCELRSQVTCSPVVAKPRGKSVQAGSVEVGAVVPLRRSRRNSLRAAESEEVQVVVFVDRKRKCKNQENDKGVALSAQVGASSRVTRRSSHALSSLKPRE

SEQ ID NO: 11304 - protein, 141 aa, Zea mays
  VARIANT 18: note = Ancestral polymorphism is R, Derived polymorphism is L
  VARIANT 30: note = Ancestral polymorphism is P, Derived polymorphism is S
  VARIANT 62: note = Ancestral polymorphism is A, Derived polymorphism is T
  VARIANT 63: note = Ancestral polymorphism is T, Derived polymorphism is M
  VARIANT 66: note = Ancestral polymorphism is D, Derived polymorphism is N
  VARIANT 67: note = Ancestral polymorphism is R, Derived polymorphism is H
  VARIANT 68: note = Ancestral polymorphism is R, Derived polymorphism is Q
  VARIANT 74..141: note = Derived polymorphism lacks residues 74 to 141
  VARIANT 76: note = Ancestral polymorphism is S, Derived polymorphism is I
  VARIANT 102: note = Ancestral polymorphism is G, Derived polymorphism is V
MAPASSSRAARDPLLFARFDLPAGWGCRKSLAFCREAQDMDDAPVASEPAATAAPPRVSRTATGPNRRREWPQWCSRRPRRGRWRRKLPGNSGTCGSGRRGGIIARKLGSMDAGGNRRLSLSVKLTRQEIDADFTKITGSK

SEQ ID NO: 11305 - protein, 83 aa, Zea mays
  VARIANT 9..83: note = Derived polymorphism lacks residues 9 to 83
  VARIANT 34..83: note = Derived polymorphism lacks residues 34 to 83
  VARIANT 65..83: note = Derived polymorphism lacks residues 65 to 83
MKQIQDALSTPLGASADFDEDELEAELEELEGDELESQLLEPVAALPVHPVHVPGNKQPARPAPQKATAEDDELAALQAEMAL

SEQ ID NO: 11306 - protein, 182 aa, Zea mays
  VARIANT 33: note = Ancestral polymorphism is R, Derived polymorphism is K
  VARIANT 100: note = Ancestral polymorphism is T, Derived polymorphism is M
  VARIANT 105: note = Ancestral polymorphism is G, Derived polymorphism is V
  VARIANT 134: note = Ancestral polymorphism is A, Derived polymorphism is V
  VARIANT 140: note = Ancestral polymorphism is L, Derived polymorphism is S
  VARIANT 146..182: note = Derived polymorphism lacks residues 146 to 182
  VARIANT 149: note = Ancestral polymorphism is E, Derived polymorphism is A
  VARIANT 157: note = Ancestral polymorphism is T, Derived polymorphism is I
  VARIANT 158: note = Ancestral polymorphism is M, Derived polymorphism is T
MLPHRRPRPPPTPHPVHGGGRVPAHVAPPLISRQAPVPQIWVHLCRGARHRGVLARPAHYLKTHYAAIVSLVVASWVTVLLHSLVSHNDSQQGDSFIFETQRHNGIRELCPANGEHKLIRARALIPLHEPNSVAINHQGLSYCIIQFIEKDYKLADTMIWGLLKHWPVRNCQEVIGFDQIIN

SEQ ID NO: 11307 - protein, 76 aa, Zea mays
  VARIANT 21: note = Ancestral polymorphism is C, Derived polymorphism is Y
  VARIANT 30: note = Ancestral polymorphism is S, Derived polymorphism is F
  VARIANT 31: note = Ancestral polymorphism is D, Derived polymorphism is G
  VARIANT 32: note = Ancestral polymorphism is C, Derived polymorphism is Y
  VARIANT 36: note = Ancestral polymorphism is A, Derived polymorphism is T
  VARIANT 39..76: note = Derived polymorphism lacks residues 39 to 76
  VARIANT 42: note = Ancestral polymorphism is P, Derived polymorphism is A
  VARIANT 51: note = Ancestral polymorphism is S, Derived polymorphism is P
  VARIANT 56: note = Ancestral polymorphism is L, Derived polymorphism is V
  VARIANT 57: note = Ancestral polymorphism is V, Derived polymorphism is I
  VARIANT 65: note = Ancestral polymorphism is A, Derived polymorphism is T
MVLKHTDPTAHAEVTAIREACKKLGKIELSDCEIYASCEPCPMCFGAVHLSRIKKLVYGAKAEAAIAIDLQCTTLL

SEQ ID NO: 11308 - protein, 619 aa, Zea mays
  VARIANT 191..619: note = Derived polymorphism lacks residues 191 to 619
  VARIANT 240..619: note = Derived polymorphism lacks residues 240 to 619
  VARIANT 394..619: note = Derived polymorphism lacks residues 394 to 619
MEQDQSADSGFDFATGIVTSGSAVAPHSGEQAEASAYQADDRMAFNETYWEEKGGNSLRVLVATDCHLGYLEKDEVRGFDSFDTFEEICSLAVKNKVDFLLLCGNLFHENKPSNSTLVKAIEILRRYCMNDCPVQFQVISDQAASLQNRFCQVNYEDPNYKIGLPVFTIHGDQDYPTGTDNLSVNDILTAGNFLNYFGKTDLGCTGVGKVTVYPVVIRKEPGAVNWMQPEFQDETPSSDWFNILVLHQKRTRGSPGDAISELLLPRFVDMVIWGHEHECLIDPQVKLIDPQEVPGMGFHITQPGSSIATSLINTEANPKHALFLEIKVVLEDQVDVDPGDEASIHEHLHKVVSNLIDKSREEASSSGSKPKLPLVRIKVHHTGLSTINSKQFGQHYVGKVVNPQDILLLTRSRQRHQTMQESCNISEDLCPNELNQQTVEALIADSNIVPNFLLILSFLKPQVLPIDDFNSALHEFVEGDDKRAFHACVQQNIEEAILQEKKSLTRERTSSENLQTDALGVFEKQKRSTTTEEQRALDSDDEPIESSDPEESGGSQQAGKKRRAAPGGGSAAAGARRKTDLAAFQRVPVKEDDAATARKRRPPVAAGRYGAVIRRRMPK

SEQ ID NO: 11309 - protein, 239 aa, Zea mays
  VARIANT 59..239: note = Derived polymorphism lacks residues 59 to 239
MGSRTQDTEECYSYHNQNQNVDYGRMAEILVRRAGSTDEFTRLTSITWINEFVKLGGEQLVPYYADILGAVLPCISDEEEKIRVVARETNEELRAIKADPAEGFDIGAILSIAKRELNSEHEATRIEALHWFFTLLDRYCAEFLAYLNDIFDPLLNALSDPSDAPAHEKIGVVDSQWIVHQVIPSLGNQGQSENGRAPWEGLRERCRKEWGLFQTRMAEAEKAYYEMMGITPPNVIFVS

SEQ ID NO: 11310 - protein, 176 aa, Zea mays
  VARIANT 1: note = Ancestral polymorphism is M, Derived polymorphism is I
  VARIANT 44: note = Ancestral polymorphism is H, Derived polymorphism is Y
  VARIANT 56: note = Ancestral polymorphism is R, Derived polymorphism is M
  VARIANT 63..176: note = Derived polymorphism lacks residues 63 to 176
  VARIANT 71: note = Ancestral polymorphism is A, Derived polymorphism is V
  VARIANT 73: note = Ancestral polymorphism is V, Derived polymorphism is D
  VARIANT 81: note = Ancestral polymorphism is V, Derived polymorphism is I
  VARIANT 131: note = Ancestral polymorphism is G, Derived polymorphism is R
  VARIANT 142..176: note = Derived polymorphism lacks residues 142 to 176
  VARIANT 168..176: note = Derived polymorphism lacks residues 168 to 176
MVIWGHEPECLIDPQEVPGLGFHITQPGSSIATSLINTEANPKHALFLEIKGREYRTTKIPLQSVRPFEYAEVVLEDQVDVDPGDEASIHEHLHKVWLYVSNLIEKSREEASSSGSKPKLPLVRIKVHHTGLSTINSKQFGQHYVGKVVNPQDILLLTRSRQRHQTMQVNEEISDG

SEQ ID NO: 11311 - protein, 222 aa, Zea mays
  VARIANT 36: note = Ancestral polymorphism is L, Derived polymorphism is R
  VARIANT 60: note = Ancestral polymorphism is Q, Derived polymorphism is H
  VARIANT 76..222: note = Derived polymorphism lacks residues 76 to 222
  VARIANT 77: note = Ancestral polymorphism is P, Derived polymorphism is L
  VARIANT 79: note = Ancestral polymorphism is A, Derived polymorphism is S
  VARIANT 112..222: note = Derived polymorphism lacks residues 112 to 222
  VARIANT 138: note = Ancestral polymorphism is S, Derived polymorphism is N
  VARIANT 153..222: note = Derived polymorphism lacks residues 153 to 222
  VARIANT 173..222: note = Derived polymorphism lacks residues 173 to 222
MATKIFCFLMLLGLSASAATATIFPQCSQAPIASLLPPYLSPAVSSVCENPILQPYRIQQAIAAGILPLSPLFLQQPSALLQQLPLVHLLAQNIRAQQLQQLVLANLAAYSQQQQFLPFNQLAALNSAAYLQQQLPFSQLAVVYPQQFLPFNQLATLNSAAYLQQQQLPPFNQLANLLSFYLHAAPNAGTLLQLQQLLPFNQLALTNPAAFYQQPIIGGALF

SEQ ID NO: 11312 - protein, 133 aa, Zea mays
  VARIANT 28: note = Ancestral polymorphism is A, Derived polymorphism is D
  VARIANT 35: note = Ancestral polymorphism is Q, Derived polymorphism is K
  VARIANT 52: note = Ancestral polymorphism is T, Derived polymorphism is I
  VARIANT 54: note = Ancestral polymorphism is G, Derived polymorphism is R
MTLQWVVELYREQRHKTSISHDKLLLKATKEVVGQLWMNHGGGKVEYRWLNTCGKDGILTNATKTRVKMEGAAWEVNGPLEKCYSEKSKVFHGSIKALEKKRKEMIHVKWMGWGWGHMCKKMGFLSALNVISG

SEQ ID NO: 11313 - protein, 659 aa, Zea mays
  VARIANT 303..659: note = Derived polymorphism lacks residues 303 to 659
  VARIANT 296..659: note = Derived polymorphism lacks residues 296 to 659
  VARIANT 194..659: note = Derived polymorphism lacks residues 194 to 659
  VARIANT 91..659: note = Derived polymorphism lacks residues 91 to 659
MAEAEPRRRWAVWALLLLLHPAALVLANTEGDALHSLRTNLNDPNNVLQSWDPTLVNPCTWFHVTCNNDNSVIRVESFTLFTVILEMLHYQELWFRNLDSSKTCSTCENISGMTAHIRNILFIILITYMKIRELYSNNISGIIPSGFGNLTNLVSLDLYLNNFTGPIPDSLGKLLKLRFLRLNNNSLSGSIPKSLTAITALQVLDLSNNNLSGEVPSTGSFSLFTPISFANNPNLCGPGTTKPCPGAPPFSPPPYNPTPPVQSPGSSSSSTGAIAGGVAAGTALLFAVPAISFAYWQRRKPQEHFFEVPAEEDPEVHLGQLKRFSLRELQVATDGFCNKNILGRGGFGKVYKGRLADGSLVAVKRLKEERTPGGELQFQTEVEMISMAVHRNLLRLRGFCMTPTERLLVYPYMANGSVASRLRDRAPAEPPLDWQTRRRIALGSARGLSYLHDHCDPKIIHRDVKAANILLDEDFEAVVGDFGLAKLMDYKDTHVTTAVRGTIGHIAPEYLSTGKSSEKTDVFGYGITLLELITGQRAFDLACLANDDDVMLLDWVKGLLKEKKLESLVDQDLEHNYVDVEVESLVQVALLCTQSNPMERPKMSEVVRMLEGDGLAERWEEWQKAEVVRQEVELGPHRTSEWILDLTDNLHAEQLSGPR

SEQ ID NO: 11314 - protein, 344 aa, Zea mays
  VARIANT 313: note = Ancestral polymorphism is V, Derived polymorphism is M
  VARIANT 292: note = Ancestral polymorphism is H, Derived polymorphism is Y
  VARIANT 273: note = Ancestral polymorphism is G, Derived polymorphism is V
  VARIANT 270: note = Ancestral polymorphism is N, Derived polymorphism is K
  VARIANT 252: note = Ancestral polymorphism is S, Derived polymorphism is P
  VARIANT 160: note = Ancestral polymorphism is E, Derived polymorphism is K
  VARIANT 145: note = Ancestral polymorphism is P, Derived polymorphism is L
  VARIANT 144: note = Ancestral polymorphism is C, Derived polymorphism is Y
  VARIANT 142: note = Ancestral polymorphism is R, Derived polymorphism is T
MALWNGIGQVASIAQLAGVDAYGLISMIVEAAKTVKRNRETCQLLARRARMIGDLLHQLERTQLMQHMETRNPVEHLEETLRHAYVLITSCRNSSYLYNCCMGGKQADRLREVQNEITFYLQLFPLVSFVDNTRTWERLLSRACPLCTTLIVFVRYKPTEIRIHNPRLKVMPGSYLPYFLFVIKENMDELHAAAHHVEHEDGIRSEAIKATKFENLGSHPTLKPDIDQMEGQVMRMGGLVNLIGGTKGAELSCFTFSHILAATDNFSEKNLVGKGGFGYVYKAHKYNPKTLHKLVDPLLRVDEHERAQIMECVRVAQLCVDHRAKHRPVMSEVVTMLGMAASKG

SEQ ID NO: 11315 - protein, 569 aa, Zea mays
  VARIANT 452: note = Ancestral polymorphism is M, Derived polymorphism is T
  VARIANT 359..569: note = Derived polymorphism lacks residues 359 to 569
  VARIANT 345: note = Ancestral polymorphism is G, Derived polymorphism is R
  VARIANT 264: note = Ancestral polymorphism is L, Derived polymorphism is I
MSMATTPEEFFIKDLMEQPPLSPPVFLDLPHKPNASNEDRHHVPNNDMTLPYISRMLMEDDDDELGDHPALLQVQQPFAEILSSPPLVGNNTNNSEGPNDFLHEGTYELLDQTEESNIINSRVNRAVMMTTNELEDRCANEMVDKMILHAYETCIGGMERVTIDVEKRNRKRKAAAAARGGVVDIRRVLTSCAQALAADDHATARELLKRIKQHASATGDTTQRLAHCFAKGLEARILGTGGRIWPLLVLEYPSGVELLKAYSLYSEACCFITVTFIFSAMIIMQAMAGKSRLHIVDYGTRFGFQWAGLLRLLASKEGDLPEVEITAIARPTPICYPGEQIEKVGSRLMQCAHELGLPSFKFHAVTKNWEDATCTMEDHLHRDADEVLVVIDLFSFSILMEESMFFDAPSPRDTVLCNIRKMRPDVFIQSVVNRSYGSSFLSRFREILFYCTAMFDMLDATLPRESESRLVFEKLVLGCYAFNGISCEGSDLVLRPEKYRQWQARNERAGLRQLPLKPSIVKVVKDEVMKHYHKDFLVCQDGQWLLQGWMGRVLTAHTTWVANGDASSG

SEQ ID NO: 11316 - protein, 484 aa, Zea mays
  VARIANT 357..484: note = Derived polymorphism lacks residues 357 to 484
  VARIANT 334: note = Ancestral polymorphism is E, Derived polymorphism is D
  VARIANT 328: note = Ancestral polymorphism is T, Derived polymorphism is M
  VARIANT 28: note = Ancestral polymorphism is R, Derived polymorphism is C
MERYKLAAAKRAERLFAEGHKLDHLVQCLLQEQDKIRAPYHRFLELSDQTLAWMMAIDTCFLLDFLESYDHRHEATAGMVSSATHWIDATVRDAMMLENQIPLFLFSQALALRHPNAAADALHAVLGRFIKEVSPIKTTAELAVADVARHAHMLELLYHFLVPGFDGDDGAREPPPMVPEEFVTIDMLDPSQQQQQLPDYDKVKQACMQVSGLDVAPVRFIKKNLISRPMRVASSLPGKITRKVPLLAAVAPLVTKLMASSSTDGDAEARLKGVDLGSIISSALAQEITIPSVSTLARWGVRFAPAPEGIAGICFDAATATLRLPVVTLDGNTEVVLRNLVAYEAVAVRGPLVLARYTELMNGIVDTPKDVKILRQSGVVVNHLKSDKEAADLWNGMCRATRLCKVPRLDAAIRAVNAHRSRRAASRARKLLKKYVFRSWRILTLLAALVLLLMTATQTFCSVYPCTRSLGSVFQTPQVGGTRR

SEQ ID NO: 11317 - protein, 629 aa, Zea mays
  VARIANT 36..629: note = Derived polymorphism lacks residues 36 to 629
MATTPEEFFSKGLMEQSPPSPPVFPDLLEKPNDSSEGQHHVPNEMMLSYVSHVLMEDNDFDDKFSDHPALLQVQQPFAQILSSPSSGTDTGNREGCNEFLHEVNVDKSMLSSALSKGTDAAGTFLKGMEEANVLLPKDNNFRRDELVNQTVRENSSHSGVKKRHSRDDHLQMEIRTRKAAMTVIEEPQENLANETLDEMMLLGYKECIRDMDKLRVTTDNNKVVKQNRNSKETRDNNVVDIRRLMISCAQEVSVNNHSRARELLKQIIQHASETGDATQRLAQCFTKGLEARLVGTGSLLWELLMAERPSVVEFTKASNLYFEACCFNKVALSFSEMTIMQAMVGKNKLHIVDYGMQFGYQWVSLFRSLASREGALPEVKITAIGLPKPKSYPTENIEEIRCRLGRSAHEFGLPLFKFHAIKTNWEDACIEDLNLEADEVLVVNDLFSFSTLMDEGISFDDLSPRDIVLCNISKMRPHVFIQSVYNCSYGSSFLSRFREMLFYYMALFDIFDATIPRESKSRMVLEQVVLGRSALNALSCEGVDLVERPERYRQWHTRNQRAGLRQLSLKMSTVELVRDMVKKHHHKDFLISQDGQWLLQGWRGRVHFAHSTWVAADASSRGLGSSNAE

SEQ ID NO: 11318 - protein, 504 aa, Zea mays
  VARIANT 391..504: note = Derived polymorphism lacks residues 391 to 504
MTATPAVIGLSAGHRLLATSFGSPDLASPDAHSSLQFAAAAPKLTVVAHRAPASSSSSSPPNVGRGSSAAGHARARAIRALRNHSAPALATPPPPPLPADPTPDLDSEFESSLEAIVLLQRSMLEKQWELPFEDDIISTDDEQDDRVSKATVVAARSGVSARQRRMSGRRRGAGRKSVAISPELMQSRNRIYLRGTVSKDLLTHKQVIQLSRKIKDGIWLQHQRSKLKEKLGNEPSYKQLAQSLRISAPELRARMRESFLAREMLTMSNIRLVISIAHKYDNLGVDLADLIQGGLIGLLRGIEKFDASRGFRISTYVYWWIRQGVSRALADNSKTFRLPTYLHERLIAIRGAKYALEDQGIAPTIENIAESLNISEKKVHNATEAVNKVLSLDQQAFPSLNGLPGDTLHSYIEDQNVANDPWHGFEEMYLKEEVNNLINSNLNERERDIIRLYHGIGKQCHTWEDISRQFGLSRERVRQVGLVAMEKLKHAARRKHLDALLEDY

SEQ ID NO: 11319 - protein, 231 aa, Zea mays
  VARIANT 200: note = Ancestral polymorphism is K, Derived polymorphism is M
  VARIANT 172: note = Ancestral polymorphism is F, Derived polymorphism is I
  VARIANT 148: note = Ancestral polymorphism is F, Derived polymorphism is L
  VARIANT 122: note = Ancestral polymorphism is P, Derived polymorphism is S
  VARIANT 111: note = Ancestral polymorphism is Y, Derived polymorphism is H
  VARIANT 10..231: note = Derived polymorphism lacks residues 10 to 231
MAVVSNHVSRGRHFSRFGVTHGPANQKTFRPKKSAPSGSKGAQLRKHIDATLGSGNLREAVRLPPGEDINEWLAVNTVDFFNQVNMLYGTLTEFCTPESCPTMTAGPKYEYRWADGVQIKKPIEVSAPKYMEYLMDWIEGQLDDESIFPQKLGTPFPPNFKEVVKTIFKRLFRVYAHIYHSHFQKIVSLKEEAHLNTCFKHFILFTNEFGLIDKKELAPLQELIESIIVPY

SEQ ID NO: 11320 - protein, 208 aa, Zea mays
  VARIANT 172: note = Ancestral polymorphism is P, Derived polymorphism is L
  VARIANT 134..208: note = Derived polymorphism lacks residues 134 to 208
  VARIANT 27: note = Ancestral polymorphism is R, Derived polymorphism is W
MLSPTTRPAARTDERSGTSPEKPLLRRWVLRAPSRGSTWLGLQSPSAMRSRTPSPTTLCTGSGTMSAGGEAEMKELPEELACLACETSAQVVAAGPAASAPLMCRMTSPAPTRFVSVPDYDEEYNDCDDDDYDGTEYGINHPVNMGKVVYIYRKKGEPIKLVFTGKKKGITPVASFSALDKEGEDPTPSAAAEPKPSNDPAEDDISTL

SEQ ID NO: 11321 - protein, 515 aa, Zea mays
  VARIANT 273: note = Ancestral polymorphism is A, Derived polymorphism is T
MAGKRRHPAIGIDLGTTYSCIGVWQNDRVEIIANDQGNRTTPSYVAFTGSRRLIGDAAKNQAEMNPSNTIFDSKRLIGRRFSDASVQSDIKHWPFKVISGPDDKPLIVVQYRGVEHQFAAEEISSMVLVKMRETAEAYLGTTIRDAVVTVPACSTDLQRQATWNAGVLASLNVMRIIPEPTAAALAYGLDRKSAQVQGLYNVLVFDLGGGTFDVSVLDKVEGVFEVLATAGAAHLGGEDFDNRMVNHFVQEFKRKTKEDISGNPRALRRLRTACERAKRTLSSTLEATIEIDCLYEDINFYSTITRARFEELNMDLFRKCIDIVEDCLSDAKMDVGSVHDVVLVGGSSRIPKVQQFLQELFNGKKLFKSINPDEAVAYGATIQAAIMSGEDEIQDYLMNDATPLSLGLATDGGVMTVLIPKNATIPTRKEVVLSTDSDNQPCIRIQVYEGEGAMARDNNLLGEFEFSIPPAPKGVPQITITFHIDADCILDVAAEDKTTGEKMRKTITKRFRLKH

SEQ ID NO: 11322 - protein, 254 aa, Zea mays
  VARIANT 125: note = Ancestral polymorphism is S, Derived polymorphism is F
  VARIANT 129: note = Ancestral polymorphism is S, Derived polymorphism is R
MATQISKKKKFVSDGVFYAELNEMLTRELAEDGYSGVEVRVTPMRTEIIIRATRTQNVLGEKGRRIRELTSVVQKRFNFPENGVELYAEKVVNRGLCAIAQAESLRYKLLGGLAVRRYNLIRPYSLPASCSLIFFYVPPFYPSACYGVLRFVMESGAKGCEVIVSGKLRAQRAKSMKFKDGYMISSGQPVNEYIDSAVRHVLLRQGVLGIKVKIMLDWDPKGKVGPITPLPDLVTIHTPKEEDELRPPVLAAEV

SEQ ID NO: 11323 - protein, 281 aa, Zea mays
  VARIANT 125: note = Ancestral polymorphism is P, Derived polymorphism is T
  VARIANT 193: note = Ancestral polymorphism is A, Derived polymorphism is V
MRGPCPGGGVSASFAPSFNGSRAMIWPATVNCTRRIRISFIQTAKTGPFRAGDRATGGICYASQAVELLPTLYPEIVVRDARLEDCWEVADTHCSSFFPGYKFPLDLVLRIDRYIALLSGFSVPPGCMRTCLVAVNSNSVNSSFNIECGDATDANFEKYNLSRGSVAGILTLDTVADYLPRRGPLKQRRTGIAYIANVAVRKEERRKGIAKMLVQEAEARARSWGCRSMALHCDVNNVAALRLYRNQGFKCIRVPEGAKWPEPKIAKGAEYNFMMKLVPKA

SEQ ID NO: 11324 - protein, 490 aa, Zea mays
  VARIANT 172: note = Ancestral polymorphism is S, Derived polymorphism is R
MADKQEHQQQPHGHGHHFLVVAYGMQSHVNPGRALAHRLARLSCIDGRPILATLSVPVAAQRRLFPSPTTMVDKEACSDGVISYVPHSDGFDDGASAPKTAEDWARRRRATAASLSAVVARFAAAGTPVTCIVVTMVGPAMVDVARDHGIPFAVYWIQPAAVLAAEYHYFHSYDDDHARAREVSLPGLRRPLPVRDFPSFLVDTTGSVLAKVITEMFRELFESMDRWRPKVLVNTLEELEAGVLAGMRRHLDLVAVGPMLGASADDARIHLFEHDDDVDKKRYMDWLRARPDSSVVYASFGSVTKVTRHQMGEVAAGLRQCGRPYLLVVRRDGLQDDDDESSSSLHVPLGSESCQQGMVVGWCDQLEVLSHPAVGCFVSHCGWNSTIEAMASGGVPIVGVPDSFDQPTNAYLVEEEWGVGIRTGRNSDGVLSGTELARCIELVMGDGARAVAIRERMKGLKTMAQAAADTGGSVETNLRHFVKTFQALEP

SEQ ID NO: 11325 - protein, 182 aa, Zea mays
  VARIANT 26: note = Ancestral polymorphism is R, Derived polymorphism is H
  VARIANT 30: note = Ancestral polymorphism is R, Derived polymorphism is H
  VARIANT 34: note = Ancestral polymorphism is R, Derived polymorphism is H
  VARIANT 36..182: note = Derived polymorphism lacks residues 36 to 182
  VARIANT 49: note = Ancestral polymorphism is S, Derived polymorphism is T
  VARIANT 63..182: note = Derived polymorphism lacks residues 63 to 182
  VARIANT 79: note = Ancestral polymorphism is A, Derived polymorphism is S
  VARIANT 106..182: note = Derived polymorphism lacks residues 106 to 182
  VARIANT 120: note = Ancestral polymorphism is I, Derived polymorphism is T
  VARIANT 149: note = Ancestral polymorphism is S, Derived polymorphism is C
  VARIANT 158: note = Ancestral polymorphism is A, Derived polymorphism is V
  VARIANT 166: note = Ancestral polymorphism is S, Derived polymorphism is I
  VARIANT 171: note = Ancestral polymorphism is V, Derived polymorphism is I
MKPSVRVSSSRDLAPAPSMEGSPPVRAYARNLARAQDVALSPTVVLASSLQHLLSFSLNGVDQDGPRGGSHLRKPCAPALAPASPDRSDTVQLTGTQYASSLDLLWLFTYNTLNDYKSKTVRILTLNASYFLKNDGHFVILIKGNCIDSTLSAETVFAVEVGEVQSTSIQVCLAGDVGALRA

SEQ ID NO: 11326 - protein, 149 aa, Zea mays
  VARIANT 130: note = Ancestral polymorphism is E, Derived polymorphism is K
  VARIANT 129: note = Ancestral polymorphism is G, Derived polymorphism is R
  VARIANT 117: note = Ancestral polymorphism is T, Derived polymorphism is S
  VARIANT 116: note = Ancestral polymorphism is S, Derived polymorphism is C
  VARIANT 113: note = Ancestral polymorphism is C, Derived polymorphism is Y
  VARIANT 112: note = Ancestral polymorphism is N, Derived polymorphism is D
  VARIANT 26..149: note = Derived polymorphism lacks residues 26 to 149
MSPLPTVVLASSLRDLLSFSLHGVDQDGPRGASHLRQSCAPALALASPARSDTGLFVFASISSLAHSTHRHWTCSGSSPTTPYMTTRVRILTLNASYFLKNDGHFVILIKGNCIDSTLSAETVFAVEVGEAQSTSIQACLAGDDGALRA

SEQ ID NO: 11327 - protein, 150 aa, Zea mays
  VARIANT 9: note = Ancestral polymorphism is G, Derived polymorphism is D
  VARIANT 99..150: note = Derived polymorphism lacks residues 99 to 150
  VARIANT 102: note = Ancestral polymorphism is R, Derived polymorphism is W
  VARIANT 108: note = Ancestral polymorphism is R, Derived polymorphism is W
MAVDKCVKGVLGGGHGRSSRNMAVEHYDGQAKSFTAGLLDFRAKDVVWSWSDAGAAASLDDKRVLHAIAMEDERSVCVINQYDDLGFLDLRSGAGGVRWSSRSKLRNRKVPGEESCYPKLATHGGQLFSSMNDSISVFSNLGLLAIHLLV

SEQ ID NO: 11328 - protein, 215 aa, Zea mays
  VARIANT 134: note = Ancestral polymorphism is C, Derived polymorphism is G
MTGTPPRGRGASSRCLVRRLTAGAAAAMVAAGAAQASQRHRKMFFKTKLCCKFWARTCPYVTNCNFAHGMEELCKPPPNWQEIVATHEDATTKQGEEHQIPIMTSRSVIAGDDGGGGRAYKGRHCKKFYTEEGCPYGDTCTFLHDEQSKARESVAISLLPTIGGGGYNAASASGSMAQNSSNWKTRICNKWEMTGYCPFGSKCHFAHGSTVIPNL

SEQ ID NO: 11329 - protein, 299 aa, Zea mays
  VARIANT 106: note = Ancestral polymorphism is V, Derived polymorphism is L
  VARIANT 98: note = Ancestral polymorphism is A, Derived polymorphism is S
MADLDLGASSYLHQQHHHQQLLPLHLHHEDGGGAAGGSDDGQDSLSPGSGGGGGPPSTAGGAGIGGGDVVARRPRGRPPGSKNKPKPPVIITRESANALRAHILEVAAGCDVFEALTAYARRRQRGVCVLSAAGTVANVTLRQPQSAQTGPAASAPAVATLQGRFEILSLAGSFLPPPAPPGATSLAAFLAAGQGQVVGGSVAGALIAAGPVVVVAASFSNVAYERLPLEEGDEVAPPPPPAGTDQQPAGMPFDPAAAAAAGGLPFFNLPLGMPPMPMDDHAGWPAGAPGGGVGRSPFS

SEQ ID NO: 11330 - protein, 633 aa, Zea mays
  VARIANT 142: note = Ancestral polymorphism is A, Derived polymorphism is V
  VARIANT 124: note = Ancestral polymorphism is E, Derived polymorphism is K
  VARIANT 116: note = Ancestral polymorphism is H, Derived polymorphism is Q
MVLITLVRDYIDRMLHDIPGMKVLVLDPQTVRAPSPGRPQLRLAARSSPIFDLTRSVPSQVGMVSVVYSQSDLLRKEVFLVETMDNASSSRESMAHLKAVYFLRPSANNVQKLRRQLAMPRFAEYHLFFSSILKVPQIQILADSDEQEVVQQVQEFYADFCAIDPYHFTLNIQNNHMYMLPTVVDPPGMQGFCDRAVDGIASVFLALKRRPVIRYQRTSDVAKRIAQETARLMYEQESGLFDFRRTENSSLLLVIDRRDDPVTPLLNQWTYQAMVHELIGIENNKVDLMGFANIPKDQQEVVLSSVQDDFFRANMFENFGDLGMNLKRMVDDFQHLSKSSLNLQSIVVLGDMAKFVSNYPEYRKTHGNVTKHVNLVSELSRIVEERKLMLVSQTEQELACTSGQAAAFEAVTSLLNNESVSDIDRLRLVMLYALRYEKESPVQLMQLFNKLASHSAKYKSGSRLFFQGELVKGTVLMESWLLSLGTRQPNSCVHLVQFLLKQAGIDKRTGDLYGNRDLLNIARNMARGLKGVENVYTQHQPLLFQTMEGIVKGRLRDADYPLVGNHFQQGRPQDVVIFIVGGTTYEEARSVALYNAANPGVRFFLGGSVVLSSKRFLEDLGEAQRISKSSTII

SEQ ID NO: 11331 - protein, 299 aa, Zea mays
  VARIANT 159: note = Ancestral polymorphism is V, Derived polymorphism is A
  VARIANT 122: note = Ancestral polymorphism is R, Derived polymorphism is G
  VARIANT 27..299: note = Derived polymorphism lacks residues 27 to 299
MELFPDGAFVRLQSRARRTYVHADGDWAGVSLRPNGPVPPLNAVWRVEHLVWSDQGDTFVLLQNAAYGRYLSFSIQEAPPGHRGRCTTQLDRNEPHALSPSSPWMWRVQRLDPPDHGYVRLRYFGCDLRANGRHRTWNTCVTVDVNRGRRVSTMMQWTAHVVAASSVPPPLPASPQPQIGVCCGLLFWRRTGVHQHPPRTIRHVRASDEGDFDQNPHNWPSFVSYDHSVMNLRIQLGQLQDDWDGEMFGFTLCMRPGSHGRLTPLVTDLPRSLDPMDIVVFRTGSPGDYSACTCYSFSI

SEQ ID NO: 11332 - protein, 1254 aa, Zea mays
  VARIANT 97..1254: note = Derived polymorphism lacks residues 97 to 1254
  VARIANT 664..1254: note = Derived polymorphism lacks residues 664 to 1254
  VARIANT 733..1254: note = Derived polymorphism lacks residues 733 to 1254
  VARIANT 1027..1254: note = Derived polymorphism lacks residues 1027 to 1254
MVETRRSSAAAAGKRTSPSPSSSSVPPPKRSKAESSGSPTASAPGRAEEDSVAGAAPARSAGSVDDAAAVAQKDQGVDKPSSAAAESSKRRKEQEQQQPAVPWAKLLSECSQTPHYPISVDQISVGQSKNCNLWLKDQPVSKVLCKLRRLEQGGPCELEVIGKKGMVQLNGRSVSPGTKVPLTGGDEVIFSSCGKHTYIFLYPLNDKVPKTVLSSAVSLLEAPVASVKRIRTDKRTGDTSAVAGTEMMTSTSNQKDVAAVPPASAGENSQRVVRPLASSASDKLKGRAVSPEKEFANGENANEVNSNIEDSPMVVAAAPISPDAAANDTCQQNGFVSDSHLGAEIGKTATYKIRPVLRMITGSTISEFDLTGDDLFKALEDQRDHIIRELNASTNVPPSRCQAFKDGMKQGIINPSDIDVTFENFPYYLSENTKNVLLSSAFIHLKKKEFIKQFVEISSINQRILLSGPAGSEIYQETLVKALAKHFSARLLVVDSLLLPGAPSKDPEFQKDVGKADKSGDKAAAEKFAIYQKHRSSLADTVHFRRPAAPTSSVNADIVGTSTLHSASLPKQESSTATSKSYTFREGFVIGCVMWVQLNHARCHKGTLIANIIPAIRFIQCLLLRGPSYGYRGRVMLAFEDNGSSKIGVRFDKQIPDGNDLGGLCEEDHGFFCSAELLRPDFSAGEEVERLAMTELIEVISEENKSGPLIVLLKDVEKSFTGVTESLSSLRSKLESLPPGVLIIGSHTQMDSRKEKAHPGGFLFTKFASSSQTLFDLFPDSFGSRLHERSKESPKTMKHLNKLFPNKILIQLPQDEALLTDWKQQLDRDVETLKAKSNIGSIRMFLSRNGIECNDLEELFIKDQSLSNENVDKIVGYAVSYHLNQNKIETSKDAKLVLTTESLKHGLNMLQSMQNDNKSSKKSLKDVVTENEFEKRLLADVIPPNDIGVTFDDIGALENVKDTLKELVMLPLQRPELFCKGQLTKPCKGILLFGPPGTGKTMLAKAVATEAGANFINISMSSITSKWFGEGEKYVKAVFSLASKIAPSVIFIDEVDSMLGRRENPGEHEAMRKMKNEFMVNWDGLRTKDKERVLVLGATNRPFDLDEAVIRRFPRRLMVNLPDASNREKILKVILAKEELGSDVDMDSLANMTDGYSGSDLKNLCVTAAHYPIREILEKEKKEKNLAKTEGRPEPALYGSEDIRPLSIDDFKSAHEQVCASVSSDSANMNELLQWNDLYGEGGSRKKKALSYFM

SEQ ID NO: 11333 - protein, 190 aa, Zea mays
  VARIANT 94: note = Ancestral polymorphism is C, Derived polymorphism is Y
  VARIANT 98: note = Ancestral polymorphism is S, Derived polymorphism is Y
  VARIANT 103: note = Ancestral polymorphism is A, Derived polymorphism is T
  VARIANT 125..190: note = Derived polymorphism lacks residues 125 to 190
  VARIANT 153: note = Ancestral polymorphism is S, Derived polymorphism is F
MPLPRPATTADAPTTDAPALGPGRPYRIRPPPPRTPPPTSTPGQPLTHDEALLSRDIHLLQDGVSSGRTLDLASSLDVGSAAPQASGDAPPDDYNLRYVLTITFQFPYETHLQDSVATMAHQYVCSVVSTVQRVSMAISPSESGLNAGQRMLSGFPEAATLARWVCQSYHYHLGVETLFASGGIDHHSSL

SEQ ID NO: 11334 - protein, 113 aa, Zea mays
  VARIANT 59: note = Ancestral polymorphism is T, Derived polymorphism is I
  VARIANT 53..113: note = Derived polymorphism lacks residues 53 to 113
  VARIANT 13: note = Ancestral polymorphism is V, Derived polymorphism is M
  VARIANT 1: note = Ancestral polymorphism is M, Derived polymorphism is I
MAYSCALWTVASVVAFLVIRVAEARYGGPGQWRRPAPGDPSTRKREVTAALAQISHETTGGWATAPDDQYAWCLCYKEEIRPASNYCDATDEQWPCYPSKSYHGRGFNYGPTS

SEQ ID NO: 11335 - protein, 255 aa, Zea mays
  VARIANT 7: note = Ancestral polymorphism is T, Derived polymorphism is M
  VARIANT 109..255: note = Derived polymorphism lacks residues 109 to 255
MTRKATTEATVHKAQEYAIVSDDQLSRMFGRGSPRMNLIQAATMKKISPRSTANKRKKRTSPKGNIAEGTMNFTSIEPSRPPVTQPCQATFTQPSEATFTQPSEATFTQPSQAAFTQPSQANISQAICDEDDELRVFDPPAPASLSKRAKNVGTGNSRTRINKRTQDGNVVEMMGGFLEMKEKQAEADERATTNANEDDFPIQTCIAIMDGMEEFSDDEKVDAYDVFKDAQNRAIFMTAKDATRIKWLRKKIART

SEQ ID NO: 11336 - protein, 328 aa, Zea mays
  VARIANT 6: note = Ancestral polymorphism is D, Derived polymorphism is N
MELFPDGGFVRLQNRANRRYVHADEDWVGVSLRPNGPVPSLNAVWRVEHWVSPLWPNDGDTFVLLQNAAYGRYLSSSMDEAPHGHLGQRATQHNRDDPQVLDIHPPWIWSVERLHAPDDDYVRLRHYAHNLRANGRYKIWNIGVTVDYNLQYPASSTMIQWAVHAVEASPSPQPLPLTLQHQGARRGLFFWRRTRIRGPGIVRQAGRRIRHVRASDEGNFDQNQYNWSSFFFYDSSLVNLRYELGRRQDDWNEDMLAFTLCMRPGSHGRLMPMVTDLPGSLDPMSIVVLRTGSPGDYSAIFSTICAACALTVSACEMFNVQRVTARAT

SEQ ID NO: 11337 - protein, 297 aa, Zea mays
  VARIANT 45: note = Ancestral polymorphism is A, Derived polymorphism is S
MKLAGLKSVDGAHEESIWAAAWAPAADHRPTAVLLTGALDETVRAWLPDDLAALGSPTRGHALGVVSLAAHPAGSLAAAVSLDSFIRVFDGNALAAAGGGSGSVKLWDTEKWKAITSLAVPRPEGARPDKTGSGKFVLSVAWSPDGRLLACGSMDGTIAVYDAVRMKFLHHLEGHHMPVRSMVFSPVDPHVLFTACDDCHVHIYDAREKGLVGAMSGHASWVLSIDASPDGLAVATGSSDRTVRLWDLNMRTSVQTMSNHSDQVWAVAFRPPGGAGVRAGRLASASDDKSVSLYDYS

SEQ ID NO: 11338 - protein, 536 aa, Zea mays
  VARIANT 47..536: note = Derived polymorphism lacks residues 47 to 536
  VARIANT 65..536: note = Derived polymorphism lacks residues 65 to 536
MAGAATPPPSSSSSASCGTDAAYLLFRGETLLPDGVHASLYAVALAYCFVGLSAVTARFFKSMEQIMRHSREVVVGVDPRTGAPVVRRDKVWNYTVADIALLAFGTSFPQISLATIDAIRNLGQLTAGGLGPGTLVGSAAFDLFPIHAVCVLMPRAGSKKKISDLGVWLVELFWSFWAYIWLYVILEVWTPRVITLWEASLTVLQYGLLLLHAYAQDKRCPFVSIPFARGERPEDWVPPEDVSAVYYAKCDGIDETLPMGADGNDGIVDIFSAHSYYDAAEYSQLAEEDMEGSSTMDQVVKNTQDNMSWLSIWWQQFVDASMLESPESMKMDSVCLRYTRIFWNLIIAPWKFLFAFVPPYHIAHGWIAFICSLIFISGIAYGVTKLTDQISCVTGVSPYVIAFTALAAGTSWPDLVASKIAAERQVTADSAIANITCSNSVNIYVGIGVPWLIDTVYNFFVYREPLYIDNAAGLSFSLLVFFATSFGCITVLVLRRIILGAELGGPRLWAWVTSVYFMILWVVFVVFSSLRVSGVI

SEQ ID NO: 11339 - protein, 399 aa, Zea mays
  VARIANT 215: note = Ancestral polymorphism is E, Derived polymorphism is K
  VARIANT 219: note = Ancestral polymorphism is R, Derived polymorphism is H
MTALCKTLALPPFSAQPSTPSPHSLLNSAMQSKIDAPGPCAVLRFDPPEPPVNWGMNIVPEKKAFVVERFGKYLKTLDSGFHLLIPAVDRIAYVHSLKEETIPIPDQNAITKDNVTIQIDSVIYIKIMDPYLASYGVEDPIYAVLQLAQTTMRSELGKITLDKTFEERDALNEKIVSAINEAATDWGLKCIRYEIRDITPPTGIRQAMEMQAEAKRRKRAQILESEGKKQAQILESEGKKTAQVLESEGAMLDLANRAKGAAEAILAKSEATARGMRLVSDAMTTEGSAKAASLKLAEQYIEAFSNLAQKTNTMLLPGDSASPASFVAQAMKTYQQIHSHSQALKYHPQIEGLEESGETSPAAPSSEASKTPPFVGEADSNHTFSLQRPRIRSELPSSA

SEQ ID NO: 11340 - protein, 544 aa, Zea mays
  VARIANT 39: note = Ancestral polymorphism is A, Derived polymorphism is P
  VARIANT 40: note = Ancestral polymorphism is D, Derived polymorphism is A
MTMHTMVAAAALALHLFAVSATRASAQLSSSPPPPVAAAAICSCLLSNGVTNFSLPSSPSYTPLLDSSIRNLRFELPTVNKPAAIVVPATRRDLQRAVLCARNSSLAIRVRSGGHSYEGQSYTTQNRVPFALIDLSGLNRVRVDGASGTAWVESGATLGEVYRAVGRSSRALAFPAGSCATVGVGGHAAGGGFGLLSRKFGLAADNVLDAVLVDAGGRALTRDTMHGDVFWAIRGGGGGSWGVVYAWKFRLVPVPDSVTVFSVVRTGPTELVAGLVHRWQYVGPSLPDEFYLSAYIPTPTGRSSDGNHSVSFTGQVLGPKRLAMSVLSRTYPELGLAESELSEVSWIESAAKFAGLSTVADLTDRQPGVGRYSKSKSDYVRAPISMQDVVKILRYMATGPAEGSMQLDPYGGAMARIGSAATPFPHRAGYLYSIQYGVSWKASDVDREDEYVGWLRSFYAFMAPYVTKNPRAAYVNYLDLDLGTNDWMNATGGMSSGSVGHAASWGERYFMTNFGRLVRAKTRADPGNVFNNAQSIPPLYSRNV

SEQ ID NO: 11341 - protein, 91 aa, Zea mays
  VARIANT 6: note = Ancestral polymorphism is R, Derived polymorphism is Q
  VARIANT 15: note = Ancestral polymorphism is P, Derived polymorphism is L
  VARIANT 17: note = Ancestral polymorphism is R, Derived polymorphism is Q
  VARIANT 26..91: note = Derived polymorphism lacks residues 26 to 91
  VARIANT 38: note = Ancestral polymorphism is R, Derived polymorphism is I
  VARIANT 52: note = Ancestral polymorphism is R, Derived polymorphism is H
MEDKLRFTCDPAGMPSRNGTFNLVLLQRLEVSVGSNGRLQGRIEVSRAFGDHQFKKITGLMNNSYFDGAHEVLHYVTKHSDLGRIVLEVAK

SEQ ID NO: 11342 - protein, 364 aa, Zea mays
  VARIANT 337: note = Ancestral polymorphism is R, Derived polymorphism is S
  VARIANT 334: note = Ancestral polymorphism is R, Derived polymorphism is S
  VARIANT 147: note = Ancestral polymorphism is A, Derived polymorphism is T
  VARIANT 104: note = Ancestral polymorphism is E, Derived polymorphism is V
  VARIANT 101: note = Ancestral polymorphism is G, Derived polymorphism is D
MGSTAGDVAAVVDEEACMYAMQLASSSILPMTLKNAIELGLLEVLQKEAGGGKAALAPEEVVARMPAAPGDPAAAAAMVDRMLRLLASYDVVRCQMEDRDGRYERRYSAAPVCKWLTPNEDGVSMAALALMNQDKVLMESWYYLKDAVLDGGIPFNKAYGMTAFEYHGTDSRFNRVFNEGMKNHSVIITKKLLDFYTGFEGVSTLVDVGGGVGATLHAITSRHPHISGVNFDLPHVISEAPPFPGVRHVGGDMFASVPAGDAILMKWILHDWSDAHCATLLKNCYDALPENGKVIVVECVLPVNTEATPKAQGVFHVDMIMLAHNPGGKERYEREFRELAKGAGFSGFKATYIYANAWAIEFIK

SEQ ID NO: 11343 - protein, 454 aa, Zea mays
  VARIANT 111..454: note = Derived polymorphism lacks residues 111 to 454
  VARIANT 361: note = Ancestral polymorphism is A, Derived polymorphism is V
  VARIANT 412: note = Ancestral polymorphism is S, Derived polymorphism is L
MASNMYGTTVACRMCYRDQYRPPPRDFTCEARKSEARRWGNGYHLIPRLCQWKPRGSKSDGSLLGDGHGGRDARCHSCGSHNSCECETRDCDAMEDAAASSYRDFKQHSRGNPQFSDDQVSSKNKSAYASQGLAEACKFVYNDAKFVNERAQNDILLLSRGITRLNKRACQDAAVLGLGFLKLDARARKDTQKIDHTVKERAALLNHFARAFKERAQSDLKKAADKHWSDGALEADLRRADLVVKRRAMEDAFMALKFVQDIHDMMVNRLYEQLPKDGSSSRTNSTGFITLEKNGKALELFPGEVSADQIYAIEEAYQSMASAFSEADGIDYTDPEELELLVATLIDLDAMDGKRSVSLIAECSSSPDVNTRKALANALATAPSMWTLGNAGMGALQRLAQDPNYAVARAASRAIDELKKQWELEEGDSLRFVMNQNLASRDTEDDNSPADDAA

SEQ ID NO: 11344 - protein, 154 aa, Zea mays
  VARIANT 83: note = Ancestral polymorphism is Q, Derived polymorphism is H
MADNAGLVGLLLEQHQLRPPAAASRAPPQITSKATRPLLATAKNDVVDKGSSAAASFSRSSSSSSSRAPAPTVSPTTACPFLHRCFFCHGELADGRDIYMYRGERAFCSEECRCRHILAEEDDDDTTTSVGVVAAAADCSTQLRHQALAASFTF

SEQ ID NO: 11345 - protein, 94 aa, Zea mays
  VARIANT 36: note = Ancestral polymorphism is A, Derived polymorphism is D
  VARIANT 26..94: note = Derived polymorphism lacks residues 26 to 94
  VARIANT 19: note = Ancestral polymorphism is Q, Derived polymorphism is K
  VARIANT 18..94: note = Derived polymorphism lacks residues 18 to 94
MSLFEKSNMASPFAVQQQQLVFMSQQQALLMATLKDGNSPQIVPGNTNQLNTNVSNPPLGTLPFQNWTNLGYQNPGLTLAAAQNGATMRSISVS

SEQ ID NO: 11346 - protein, 103 aa, Zea mays
  VARIANT 6..103: note = Derived polymorphism lacks residues 6 to 103
  VARIANT 16: note = Ancestral polymorphism is S, Derived polymorphism is Y
  VARIANT 23: note = Ancestral polymorphism is Y, Derived polymorphism is C
  VARIANT 47: note = Ancestral polymorphism is D, Derived polymorphism is G
  VARIANT 71: note = Ancestral polymorphism is S, Derived polymorphism is C
MMDTDWKTTFVLHKLSMAKAKRYLEDIIAHRQSIVFWRYCVKDLVVGNLYVSLIQVNLAQKQHRHKDTYMSSPCHSELFLLEKEDPMKKEVRKRAKRSESRRG

SEQ ID NO: 11347 - protein, 358 aa, Zea mays
  VARIANT 68: note = Ancestral polymorphism is R, Derived polymorphism is P
MAEANVAAASLFGADGRLCSADILAPPEVRARIEVAVLNFLAALASPSSPAISVLPLISRSSANCSLRSGLLNDVSSVYLSYTFCKRSLTHNPKAFVRVWKVMEMCYKILGEGKLVQQRELFYKLLSDSPKYFSCQRHVNQAIQDVVSLLRCTRQSLGVMASSRGALIGRLVLHEPDGEQIDCSILGASGHAITGDLNLLSKLNLSSGSRYIIVVEKVHLASTEPDISEYADFRISGLIALIFFSRNPAGLAILCTYKYGSISMGLESYRYACNVKWLGVRGGDLHLIPEDAFQELKPRDLQIAKSLMSSKFLQESHRAELALMVERGKRADIEALYSHGFDFLGKYIARKIVQGDYI

SEQ ID NO: 11348 - protein, 531 aa, Zea mays
  VARIANT 17: note = Ancestral polymorphism is A, Derived polymorphism is P
MAADELSPYILLLPLLALPLVVALLARRRALGRDDARLPPGPWAMPVIGHLHHVAGDAPPHRALRDLSRTYGPLMALRLRTVPVVVASSPAAAREVTGTHDAAFASRPAAPALRLLTGGAEGVTFAPYGDAWRRMRRACAAGLFSAPRVRSFRAVREDELGRLLRAVAAAASAPAPAPVNLTRRMSRFAFDSSARAVAGSRSEHRDEVLRALQDALKTLPKLSLLDFFPSSRLAALASHVPRVVARRRAAMRPIGPGLDAVVDSIVLEHLERRDSDVDDDEDLLDLLLRMQKDVDSQYPFTTLNIKSVIMPSSTHTHTQDLFVAGGETSATAMQWAMTELIRNPRAMRKAQAEVRSALAGQSTVTEAGLTDLHYLRLVIKETLRLHPPAPVLLRECLSAREVLGYHVPRGAMVLVNAWAIGRDPAHWDAPEEFAPERFQELDGARDDFRGAADFEYVPFGAGRRMCPGAALGLAHVELALAALLFHFDWEMPEGMVAEEMDVTEAAGITMPPRSELLLVAIPRVPVPVPVD

SEQ ID NO: 11349 - protein, 133 aa, Zea mays
  VARIANT 60: note = Ancestral polymorphism is S, Derived polymorphism is F
  VARIANT 16..133: note = Derived polymorphism lacks residues 16 to 133
  VARIANT 14: note = Ancestral polymorphism is A, Derived polymorphism is G
  VARIANT 8: note = Ancestral polymorphism is R, Derived polymorphism is Q
MVQRLTYRKRHSYATKSNQTRVVKTPGGKLVYQYTKKRASGPKCPVTGKKIQGVCAAHLSILSSRYCIPHLRPAEYKRSRLARNQRTVNRPYGGVLSGTAVRERIIRAFLVEEQKIVKKVLKIQKTKDKASKS

SEQ ID NO: 11350 - protein, 494 aa, Zea mays
  VARIANT 232: note = Ancestral polymorphism is P, Derived polymorphism is S
MNGGRALIATAGDLVVTDGGATPTPMRLRCGFLVPVVLALVLAAALGPATAPAPARAQLRRDHQAPPGPRPHSVTITEFGAVGDGRTLNTVPFQNAVFYVRSFADKGGAQLYVPRGRWLTGSFNLTSHLTLYLEEGAVIVGAKDSSQWLIVEPLPSYGQGLDLPGPRHQSLISGYNLTDVVITGNNGVIDGQGLVWWQWLRSHELNHSRPNLLEFLYSEDIVISNLTFLNSPAWSIHPVYCRCSAINLALCVHNVTIKTSLDAPLTDGIVPDSCSNLCIEDSTISVSHEAISLKSGWDRYGISFGRPTSDIRISRVDLLSSSGAALAFGSEMSGGISDIHVNHLRIHDSSKGISFKTSPGRGGYIEDVVISEVQMENVHVGIEFTGNCSTHPDDSFDPSDLPAIDHVTMKNMAGTNISVAGVLSGIEGAPFTAICLSNLNFSMAAGSGPSSWSCSDVSGYSEAVFPEPCTELRDPSSSSSVCYSLASYSAIETA

SEQ ID NO: 11351 - protein, 130 aa, Zea mays
  VARIANT 91: note = Ancestral polymorphism is G, Derived polymorphism is E
  VARIANT 62: note = Ancestral polymorphism is R, Derived polymorphism is W
  VARIANT 41..130: note = Derived polymorphism lacks residues 41 to 130
MALFAAIGGQPSCALMASVELIEGLGGLPVDGSPAATAAPRSTMLLPGSARGALSKGRPKKRISMLSGAACSTLHLPDVVLRRRRARVEVELLWLEGGGEEWIGRWEGEEGLAVGRNTRMAIREGTTAIY

SEQ ID NO: 11352 - protein, 136 aa, Zea mays
  VARIANT 44: note = Ancestral polymorphism is R, Derived polymorphism is I
  VARIANT 108: note = Ancestral polymorphism is L, Derived polymorphism is F
  VARIANT 122: note = Ancestral polymorphism is R, Derived polymorphism is W
  VARIANT 123: note = Ancestral polymorphism is R, Derived polymorphism is Q
MHICSEWRMQLRSWSTVQRHLLLVILILLSLCSFGMFATGGCDRFVNVWDDINKKILYQVKQLKSFASLGCFIGKYINTPLIEEHSCGELGWIKHLGESSSRRAGVLLPVLLAARGVDEMQRRNAKVISCMLCKHA

SEQ ID NO: 11353 - protein, 920 aa, Zea mays
  VARIANT 40..920: note = Derived polymorphism lacks residues 40 to 920
MAVVNPTNLAIDDDDDDTPISFKRTSNSTKTARPTPSKHEGSSGGNGAPVRIPKPVSPNPQKNGATGASRPLHMKPPSSSPNHRPSGSGQPNSLAQHSSKANSIDMSKLKRPLVKDERSDDSDDEVPIGLRRKVEEKKLKGVDTRVQKTDDSDDDDKPLGLKINSSRMSSNRVNKPVLQRTVPKVEQPDEDSDDDKPLASRLPSNAGPKSGGDVSEDSEDEKPLAARFSKVAGSGNPKIASSSKGLTSDTNGQQSLGKRPLDNSNQTSSALKKAKPSNVSASAIVRREIKTDDNTPLAQRLKMGESSKGKSSAKSVFKKSPASVKKDIKKMKGKGKLKKNMKNSQFSKIMKVPPGSGGGKKWTTLEHNGVIFPPPYKPHGVKMLYNGKPIDLTPEQEEVATMFAVMKDTDYAAKPTFIDNFFTDWRKVLGKNHIIKNFELCDFTPIYEWHLREKERKKQMTTEASEKKTLREDKLKQEEKYMWAVVDGVKEKVGNFRVEPPGLFRGRGEHPKMGKLKRRILPSDITINIGKGAPVPECPIPGESWKEVKHDNTVTWLAFWNDPINPKDFKYVFLAASSSLKGQSDKEKYEKSRKLKGHIQRIRENYTKDFKNKDVTRRQIAVATYLIDKLALRAGNEKDDDEADTVGCCTLKVDNVTCMPPNQIQFDFLGKDSIRYFNTVEVEELVYKAIEGFRAGKKPGQDLFDKIDTSRLNAHLKDLMPGLTAKVFRTYNASITLDGILHEETEDGTVLEKIAVYQRANKEVAIICNHQRSVSKSHESQMTRMNEKIDELKSQMEELKADLNKAKKGKPLGYDSEGKPKRNLAPEATKSRVGNLTKPTCRIQKKVATLEGKIEKMEMDKRIKEDLKTVALGTSKINYLDPRITVAWCKRHEVPIEKIFNKSLLAKFVWAMDVDPEFRF

SEQ ID NO: 11354 - protein, 447 aa, Zea mays
  VARIANT 19..447: note = Derived polymorphism lacks residues 19 to 447
  VARIANT 5: note = Ancestral polymorphism is A, Derived polymorphism is D
MVVEAAVAAVLVEEMWWRQLDSIVSAVSFGLMSMFLAIAILEHFLRPLAHTLEHAPPRGIRHRLLLFLSRGGERSAAPSLDLEAATKLQAHAPLEMGPMRTRIRNWTMGPTGWPRGGCGSRSPSALMSSASVSRSSGSSTEQGAAMPFHGVPHQLSEVHKKRTLYHPELPSASRDEATGNSPFTVFIYFCSPDVRPKHTTRKILHILSFPLNLIRQAAQNIANIPVVTLNQVNMSTDRTEPLFDGADDTMAIFLALRSPKLEVLGLTTTFGNVHTALATRNALHLVPPPTFLPLSPPPCSGIPSNDQESHQAEDRKLCPRFRRPEDRKLRPRFRRPLWIEVRQVGAPPRIVGSTETTSSPTSSYASMLNIVTGSHIWVEDKDLSWVDGEVFRIDGQNAHVRTTKGKAGWRIVAATRDRCSCVAVTTIPWSQGNVSKLIFQIGIYGSF

SEQ ID NO: 11355 - protein, 309 aa, Zea mays
  VARIANT 217: note = Ancestral polymorphism is R, Derived polymorphism is C
MGMKKEELDYVLVPLGLAVMAGYHAWLLLRVRRQPATTVIGVNAINRRIWVRHIMEVGLGSVSSSPHRISRALKLRIVCMNACKSRTDTRFSDVILDRLSSQEPSGKHAVLAVQTIRNNIMASTLLASTAITLSSLIAVLMSSGDGGGATAASSSKGGLLPGAPLVVGATGAPALSAKFFAILVCFLVAFLLNVQSIRYYSHASVLVNVPAAEAARRRRAVGYVTDMVNRGSYFWSLGARAFYFSCPVFLWLFGPIPMFVACVALVCALYFLDVCKDWEEEEGDGHGHRCTSDDERRATTQGKDAEQQV

SEQ ID NO: 11356 - protein, 169 aa, Zea mays
  VARIANT 134: note = Ancestral polymorphism is Q, Derived polymorphism is P
  VARIANT 111: note = Ancestral polymorphism is G, Derived polymorphism is R
  VARIANT 108: note = Ancestral polymorphism is L, Derived polymorphism is M
  VARIANT 94: note = Ancestral polymorphism is R, Derived polymorphism is H
  VARIANT 90: note = Ancestral polymorphism is F, Derived polymorphism is Y
  VARIANT 79: note = Ancestral polymorphism is P, Derived polymorphism is L
  VARIANT 78: note = Ancestral polymorphism is V, Derived polymorphism is I
  VARIANT 73: note = Ancestral polymorphism is P, Derived polymorphism is L
  VARIANT 72: note = Ancestral polymorphism is R, Derived polymorphism is H
  VARIANT 66: note = Ancestral polymorphism is G, Derived polymorphism is D
  VARIANT 60: note = Ancestral polymorphism is S, Derived polymorphism is I
  VARIANT 57: note = Ancestral polymorphism is P, Derived polymorphism is L
  VARIANT 48: note = Ancestral polymorphism is G, Derived polymorphism is S
  VARIANT 42: note = Ancestral polymorphism is V, Derived polymorphism is M
  VARIANT 38: note = Ancestral polymorphism is E, Derived polymorphism is K
  VARIANT 24: note = Ancestral polymorphism is A, Derived polymorphism is V
MAKSCGEYTVEVASSSSSPIPASASATRSKAKHHIEIKGYPVDGVSIGGQETCVIFPTLSLAFDIGRCPQLRPPTIFVPACLRDLVERLFEVHHAMDQSDLNHNLVPLEVREEYELRRDLKGYVIYSVKQKLKQEFIGLPGSEIKRLKLSGVEVCLAWWLWSSKIEAWF

SEQ ID NO: 11357 - protein, 372 aa, Zea mays
  VARIANT 98: note = Ancestral polymorphism is K, Derived polymorphism is E
MSEEERKGGGGGGDDGAAAAARAAEQARELQDAAAALLTRTRAEEEALRRRAAALQGELRRLREAAAAHADSEKVEEDLDRATCLITEGDVASLLPSKTQGTFLRMFLGPVNLRAPRKEVQLKVKEEYNSYRDRTALLFLGFPVILLFLRQWLWNRCFPALPVQLYQAWLLFLYTSLALRENILRVNGSDIRPWWILHHYSAMLMSVISLTWEIKGQPNCARKQRGVELFLCWAIMQGFVMMLQNRYQRQRLYTRIALGKAKRMDVVWGETAGVEGQLLLLCPLLFLLQGFEGYVGFLLLRTAHTGVVPEWQVVVCGILLISMAIGNFANTLDTLMAKSRFKAKMKKSKGKRDLDTCPSPTGSSPTDSATRA

SEQ ID NO: 11358 - protein, 490 aa, Zea mays
  VARIANT 179: note = Ancestral polymorphism is G, Derived polymorphism is E
MSSRGLVRLPVSCSAAVDGVNGCLTYSTCRSRNYYYQYSHTTNLQISPVDQMPLPRKLKKSIQRNAYFLTQKRKLVPHCSSDLSTSCRGVPNYLSINVLQDQSNTKQGAIRKALVILNPNSGFRSSRDVFYQKVQSTLKLSGFKMEVIETAYAGHAKVLSSTVDLKKFPDGIICVGGDGIVNEVISFPIFLSFCKENQLEYSFVLNGLLSRDDFDVAIRFPIGIIPAGSDNSLVWTVLGIRDPVSAAIALAKGDFTPIDVFAVKWIQAGVTHFGLTASYYGFVADVLQLSEKFRVQLGPFRYVVAGLLKFLSLPQYRFEVDYLPSSLQGRSSESRPLAEKRHEQLSDDGKVRRGTQTNGRIKDDWVTRNGEFLGIFVCNHFCKPAQGLLSPVIAPKARHDDGSLDLILVHGSGRLRLFCFFVAYQLCWHLLLPYVEYVKIKEVKVRPVGSTHSGCGVDGELLDGERGAEWQCSLLPAQGRLLGQDPGAFN

SEQ ID NO: 11359 - protein, 520 aa, Zea mays
  VARIANT 154: note = Ancestral polymorphism is A, Derived polymorphism is T
  VARIANT 215: note = Ancestral polymorphism is E, Derived polymorphism is G
  VARIANT 227: note = Ancestral polymorphism is D, Derived polymorphism is A
  VARIANT 335: note = Ancestral polymorphism is L, Derived polymorphism is P
MEDLLYYSLTVAICIAVIGLLSILRSFTATGPPPALPPGPSLLSLITPLLFLGRTNFGIERILSAARSRYGPVFTLYLLPSRPAIFIADHVVAHRVLVQGGAAFADRPPASLPFRLFSSGQRNITSGAYGPVWRALRHNLTGNVFHPSRMGRFAAARRRALRGLVAGVARDAGSRAVVVEGLLHRAMFHVLVTMCFGERLATDAVVASVEALQREFLKSVLGFQVFDVCPALTSLLFRRRWKQMLSLRRRQEELFAPLIRACRAQRGSDANAGADTYVDTLLDLRIPEDGGRNLTEGEMVSLCAEFVAVGTDNTATEAQWIMANLVAHPEIQARLRAEIHQVTGGAGVQEQDLPRMPYLRAVVLEGLRRHPPGHFAIPHAATGIQDDDGGGDHATIEGFRVPRRASLNFTLVALGLDEAVWPDPLRFRPERFLPGGEGADVDLTGAKEVKMIPFGAGRRICPGMALALLHLEFFVASLVAEFEWLQVPGEPVEFAEKQELSVVMRRPLRATVVRCTRNAN

SEQ ID NO: 11360 - protein, 193 aa, Zea mays
  VARIANT 178: note = Ancestral polymorphism is E, Derived polymorphism is K
  VARIANT 168: note = Ancestral polymorphism is I, Derived polymorphism is T
  VARIANT 162: note = Ancestral polymorphism is P, Derived polymorphism is H
  VARIANT 137: note = Ancestral polymorphism is E, Derived polymorphism is K
  VARIANT 132: note = Ancestral polymorphism is P, Derived polymorphism is L
  VARIANT 123..193: note = Derived polymorphism lacks residues 123 to 193
  VARIANT 91: note = Ancestral polymorphism is C, Derived polymorphism is Y
  VARIANT 88: note = Ancestral polymorphism is G, Derived polymorphism is R
  VARIANT 74: note = Ancestral polymorphism is E, Derived polymorphism is K
  VARIANT 42: note = Ancestral polymorphism is A, Derived polymorphism is T
  VARIANT 38: note = Ancestral polymorphism is T, Derived polymorphism is M
  VARIANT 36: note = Ancestral polymorphism is P, Derived polymorphism is L
MKRLLEDRDIFIYLGEKAFCSDECRNRNLGMDLPVLATLARTPARSQARAGKVEAEPPPRRSPAFYSSVFAQIEEIGWKQLVSATGDGVSCLTFHVVRLSKAGALHTEFCQFDSCSKRDEPGQMHLLEITLPMGYPESPPSISTGEFYNYSGCGNNFNCNHPVMRGFTEDCLRYWVIEMHVYGVRFDLALHIQ

SEQ ID NO: 11361 - protein, 296 aa, Zea mays
  VARIANT 15..296: note = Derived polymorphism lacks residues 15 to 296
MADDGRRRNVSMDFSVSIPSAAAASMLVDKENTSDDRISIIIPHSRSPSSKILPLGFQRNEAPSDHSPARPVSAKRVALALTKKVAAELLGTFLLVFTVLSALITNEAHGGALGVLGVAVAGGTAVVVVVSSIFHVSGGHVNPAVSVAMAVFGHLPPAHLALYAAAQLLGSVAASFVAKALYAGPANLLGPTVATVPSVGASQAFWVEFITTFVVLFVVTALATDPKAVKEMVAVGAGAAVMMSALISGESTGASMNPARTLGTAIATGTYTKIWVYMVAPPLGAIAGCGAYHALK

SEQ ID NO: 11362 - protein, 395 aa, Zea mays
  VARIANT 38: note = Ancestral polymorphism is E, Derived polymorphism is V
  VARIANT 67: note = Ancestral polymorphism is I, Derived polymorphism is N
  VARIANT 75: note = Ancestral polymorphism is S, Derived polymorphism is C
  VARIANT 194..395: note = Derived polymorphism lacks residues 194 to 395
  VARIANT 197: note = Ancestral polymorphism is Y, Derived polymorphism is C
  VARIANT 220: note = Ancestral polymorphism is C, Derived polymorphism is Y
  VARIANT 223: note = Ancestral polymorphism is A, Derived polymorphism is T
  VARIANT 224: note = Ancestral polymorphism is D, Derived polymorphism is N
  VARIANT 227..395: note = Derived polymorphism lacks residues 227 to 395
MDSTPAPEAAPGASSSSPAAAAAAEGLAGGVAAMTLDERFEMLRGIGEECIQEDELRRLLENKPVPICYDGFEPSGRMHIAQGVVKTINVNKMVNAGCKVKIWIADWFAQLNNKMGGDLKKIQTVGRYMIEIWKAAGMNLDGVEFLWSSEEINKRAHEYWPIVMDIARKNNVKRIMRCCQIMGRSDQDDLTAAQIFYPCMQCADIFFLKASIYDAIAFHCLKADICQLGMDQRKVNVLAREYCDDIKRKNKPIILSHHMLPGFKEGQEKMSKSDPSSAIFMEDDEAQVNVKIKQAFCPPKIVEGNPCLEYIKYIVFPWFGRFEVIRKESNGGNKTFTCMNELISDYETGALHPADVKPALAKAINEILQPVRDHFNNNNEAKVLLNTVKKYRVTN

SEQ ID NO: 11363 - protein, 102 aa, Zea mays
  VARIANT 1: note = Ancestral polymorphism is M, Derived polymorphism is I
  VARIANT 24: note = Ancestral polymorphism is G, Derived polymorphism is R
  VARIANT 32: note = Ancestral polymorphism is G, Derived polymorphism is D
  VARIANT 37: note = Ancestral polymorphism is E, Derived polymorphism is V
  VARIANT 41: note = Ancestral polymorphism is D, Derived polymorphism is N
  VARIANT 44: note = Ancestral polymorphism is I, Derived polymorphism is T
  VARIANT 48..102: note = Derived polymorphism lacks residues 48 to 102
  VARIANT 52..102: note = Derived polymorphism lacks residues 52 to 102
  VARIANT 54: note = Ancestral polymorphism is V, Derived polymorphism is A
  VARIANT 56: note = Ancestral polymorphism is A, Derived polymorphism is V
  VARIANT 68..102: note = Derived polymorphism lacks residues 68 to 102
  VARIANT 73: note = Ancestral polymorphism is C, Derived polymorphism is S
  VARIANT 75: note = Ancestral polymorphism is V, Derived polymorphism is I
  VARIANT 76: note = Ancestral polymorphism is C, Derived polymorphism is Y
  VARIANT 81: note = Ancestral polymorphism is G, Derived polymorphism is W
MKFLSPTCFHRVELFNGVGRLAEGFIHKVDKGGSDVELLEDARIIAPQGIQWHVFAAFGTLKGGRADWLIEKCTVCYTHFGSSYSLSTSKSVLFSYLGTWIF

SEQ ID NO: 11364 - protein, 495 aa, Zea mays
  VARIANT 283..495: note = Derived polymorphism lacks residues 283 to 495
  VARIANT 81: note = Ancestral polymorphism is P, Derived polymorphism is R
  VARIANT 36: note = Ancestral polymorphism is R, Derived polymorphism is C
  VARIANT 31: note = Ancestral polymorphism is D, Derived polymorphism is Y
  VARIANT 21: note = Ancestral polymorphism is S, Derived polymorphism is N
MMDLQVVSQLRTKLWRERKLNVGYHAGNNNDWCYTRVTIHYMALVQFNGALLPQLGEKPRPLSSPPAVARATYADARFLAPKTSSRGRGKHLLSPSYSLHSQTSSEQINHVPSSRSRQKRGSSFVVRAEADFYNVLGVSRNASKSEIKSGWYLLFTYRKLARSYHPDVNKDPGAEQKFKEISNAYEVLSDDEKRSIYDKYGEAGLKGAGMGTGDYSNPFDLFESLFEGFGGMGGMGGGRAARNRPMQGDDESYNLVLNFKDAVFGVEKEIEITRLEGCNTCDGSGAKPGTKATTCKTCGGQGQVVSSTRTPLGIFQQVSTCNTCGGTGEFSTPCNTCSGDGRVRRTKRISLKVPAGVDSGSRLRVRSEGNAGRRGGPPGDLYVFIDVLSDPVLKRDGTNILYTCKVSYIDAILGTTVKVPTVDGMVDLKIPSGTQPGTTLVMAKKGVPLLGKSNARGDQLVRVQVEIPKRLSSDEKKLVEELANLNKAQTANSRS

SEQ ID NO: 11365 - protein, 359 aa, Zea mays
  VARIANT 12: note = Ancestral polymorphism is P, Derived polymorphism is R
  VARIANT 107..359: note = Derived polymorphism lacks residues 107 to 359
MALSSSRAPLLPLLCLLLTVVAAAKHPKQEKPTPAALAPVVTLEGCPDKCGNVSIPYPFGTKDGCFRPGFFVVCNDTFDPPRPFINSSLALGTDDTRTQIVVEDLYYLTAEDGMPETTPTRSAWPIELAGVSLSDAKARLLGAFSYECRLNETHHSVRRQRINFGVYRSPFLLSDADNVLMGIGSNVVAEQTTGPLCQSYLNLISLSDGPVNGSCSGQGCCQANLPPVRSDSTVTIQKGTMYEDGGYGGGGGGRVDCSYAMIVEKAWYNFSSVDLDSDAFLRRNAAGVVPVVADFTIDGGGCPDAGEPTPKDFACISDNSKCVDRLVYDNSRGHYCSCSVGYQGNPYIHGGCQGTSVVT

SEQ ID NO: 11366 - protein, 549 aa, Zea mays
  VARIANT 322: note = Ancestral polymorphism is C, Derived polymorphism is Y
  VARIANT 307..549: note = Derived polymorphism lacks residues 307 to 549
  VARIANT 295: note = Ancestral polymorphism is P, Derived polymorphism is S
  VARIANT 267..549: note = Derived polymorphism lacks residues 267 to 549
  VARIANT 265..549: note = Derived polymorphism lacks residues 265 to 549
  VARIANT 261: note = Ancestral polymorphism is L, Derived polymorphism is P
  VARIANT 238..549: note = Derived polymorphism lacks residues 238 to 549
  VARIANT 192..549: note = Derived polymorphism lacks residues 192 to 549
  VARIANT 112: note = Ancestral polymorphism is T, Derived polymorphism is A
  VARIANT 83: note = Ancestral polymorphism is Y, Derived polymorphism is H
  VARIANT 79..549: note = Derived polymorphism lacks residues 79 to 549
  VARIANT 56: note = Ancestral polymorphism is K, Derived polymorphism is N
  VARIANT 55: note = Ancestral polymorphism is D, Derived polymorphism is H
  VARIANT 39: note = Ancestral polymorphism is G, Derived polymorphism is A
  VARIANT 16: note = Ancestral polymorphism is P, Derived polymorphism is L
  VARIANT 8: note = Ancestral polymorphism is L, Derived polymorphism is S
MYNIILLLGMEFTLIPDLVPQNRHAVIKVYVSRKWIFRGAMDNGPIHHIDLVLIDKEGHGICAEIPRNLAEEKGSIIEENKIYEISRFRISSARLMFKPVHMDKMIHFTYHTIINASLDTPPAFSRYVYHLTPFDQLESYIQKNEYFLDVLGVITQVSALKPVGTHTQESSNVIKEIIIKDINDITMRVTLWAERARAFKLENVYDPLEQKPIVTLFVGCLAKNFQGIYLNGGTACRWYFNPDIREAAPYYQRFESQKIKLHISSEQEQLYVTKETNVEHKTLHELLELHPYAFPKQGYQCTATIIEVPTTSRWWFPACTKCGRACKPQNGGYYCPYCKSEAYILRYKLTFMGSDGTATAQMFCFDTVAQHVVGRSCETVLKQVTEAAPIPPDLAQIVSLKFTFRVTVSNQTFSQREQRPTVLQINSIVAVHGRQRSLPKGIQTIIDQGPSTPNKEATLKLLKESPSTSMERLSTKLLTDVGRKLTYSTQAEDITKSQILDAPQETNADKEVPADKDKEIEPNLRSPPKRHKQEPLIIKDSTEPEHRQE

SEQ ID NO: 11367 - protein, 534 aa, Zea mays
  VARIANT 28: note = Ancestral polymorphism is L, Derived polymorphism is P
MALQAAYEYLQQAVGHGAWSSTQTLTLLLIAVPTVLLLLASLAKSTSSSGRGKPPLPPSPPGTLPIVGHLHHIGPQTHISLQELVAKYGHNGFLFLRAGAVPTLIVSSPSAAEAVMRTHDHIFASRPWSMASHILRYNTCDVAFSPLGEYWQQTRKLMNTHLLSNKKVYSFRHGREEEVCLVVDNLREAAAKSPSTAVDMSEVLAAYTNDVVSRSVLGSTHRKKGRNTLFREMTMTNVDLLVGFNLEYYIPRWPLTDLLFRLVCWKVTRHLKRWDALLEEVIHEHVEMRKLSGDKEKESDDFIDIFLSRYEEYGFTMDNVKSLLMNVFEAAIETSYLVLESAMAELMNHRRVMKKLQAEVRAYGAEKKLDMIREDDLSSLPYLKASMKEALRLHPPGPLLLPHYSTADCQIDGYHIPANTRVLVNGWAIGRDPAVWEKPEEFMPERFMRDGWDKSNSYSGQDFRYLPFGSGRRICPGANFALATMEIMLANLMYHFDWEVPNEKEDGGGKVSMDETFGLMLRRNEPLYLVPRAV

SEQ ID NO: 11368 - protein, 510 aa, Zea mays
  VARIANT 119..510: note = Derived polymorphism lacks residues 119 to 510
  VARIANT 279: note = Ancestral polymorphism is R, Derived polymorphism is W
  VARIANT 303..510: note = Derived polymorphism lacks residues 303 to 510
MQHSLTFLLLIPLTLFILIFCRRRHAWAREAAYARLAAVKSAVVKKLPGLGRQPPEVFVTDRFTAHRLLVGGAAAGGAFSDRPPSTVPSAVLSRRRHYNINSAPYGPLWRAIRRNLTSEVFHPTRLRQHGRARRLALHGLVADLDRQRRASGSAVLAAESLRAAMFGLLATMCFGVGVDEGVVRAMADAQDDLVQCFLGLRVFATLPALTGLVYRDRWRKLLQLRRQQEEAYLPLIEAHRAGRQRRNGEPPAYVDTLVDLRVPADEHAAASGSGGGKRRKRQRRLTDGELVGLCSEFLGAGTEPAAALLQWIMANLVKRPDVQRALRQEIDAAVGVDADEVGEEVVARLEYLNAVIMEGLRLHPTVPRVFRKVMPDDHVVLDGRRLPAGTAVHFPLARLARDQTTWTDPREFRPERFLAGGEGEGVSLVAAAGSAGEIRMMPFGAGRRMCPGMGVAVLHLGYFVANLVREFEWAEAEGELGVDLRPHLGFFTVMKRPLRAHLTRLRREVS

SEQ ID NO: 11369 - protein, 183 aa, Zea mays
  VARIANT 115: note = Ancestral polymorphism is R, Derived polymorphism is H
  VARIANT 134: note = Ancestral polymorphism is A, Derived polymorphism is T
MKTAAATTLVLAAFLFVAGDACANVPQMRWTEACVKAGETAELYHVCQETLQHGPDAAELTAYVVLAARLATWSYDDTVGSAEQLIADGSLPGAQRASYQQCISSYGTARVQMVRVMEELAGCDFTRAGPELAAAVAAMESCGKGLVAGTPLAAWNAADRDRTAVVYDLGALIVGRAPGSMNP

SEQ ID NO: 11370 - protein, 592 aa, Zea mays
  VARIANT 40: note = Ancestral polymorphism is G, Derived polymorphism is R
MRWSAFLWEAASGRRPGVSNLLLVVAAASSGGLVAYADSGSDAAVEQPQLPPRKKVVVLGTGWGGTTFLRNLDSRLYDVQVISPRNYFAFTPLLPSVTSGTVEPRSIVEPIRRVLEKVCCSAEFIVGSFSLLIGGEIKFWEAECFKIDPQSKKIHCRSNVGTSLEGNGEFLVDYDYLVVAVGARTNTFNTPGVVENCHFLKEVEDAQKIRRSVMDCFERASLPFLNEEERKKNLHFVVVGGGPTGVEFAASLHDFVTEDLSKLYPSIQHLVKISLIEAADHILTMFDKRITNFAEDKFGRDGIDVKTGYKVVKVSKDDITMQNPATGDISVPYGMAVWSTGIGTRPFVVEFMKQIGQANRRVLATDEWLRVRECDGVYAIGDCATINQRKVMEDISEIFRVADKDKSGTLTVKEIQDILDDIYVRYPQVQLYLKSKQMNGIADLVRSAKGDAEKESVELNIEEFKKALSLVDSQVKFLPATAQVASQQGQYLARCFNKMKDAEENPEGPIRIRGEGRHRFRPFRYRHLGQFAPLGGEQTAAQLPGDWISIGHSSQWLWYSVYATKQISWRTRMLVVSDWTRRFIFGRDSSCI

SEQ ID NO: 11371 - protein, 346 aa, Zea mays
  VARIANT 54..346: note = Derived polymorphism lacks residues 54 to 346
  VARIANT 44..346: note = Derived polymorphism lacks residues 44 to 346
  VARIANT 37..346: note = Derived polymorphism lacks residues 37 to 346
  VARIANT 24..346: note = Derived polymorphism lacks residues 24 to 346
MDDLAGASSSSSSMAATSSSYSSQTVSYPKRNRKQAQAPDLTLQSNGKPGGVEREALLGGRSRSLRSRRRVWPLRGVLLADGDGGRNFIFSVAIETRYLYASNRELGDHFQTKRDGENGVDASIEKRTPKLLQFTFQELKSATLNFRPDNILGEGGFSYVFKGRIEPNSTAPAKPGTGVTVAVKSLKPDAPQGHREWVLHHKHLVKLIGYCIEDDQRLLVYEFMARGSLENHLFRRALPLPWSNRMKIPLGVAKGLAFLHGGPKPVIYRDFKTSNVLLDVEYNAKLSDFGLAKAGPHGDKTHVSTRVVGTYGYAAPEYVMTDALFLRPSPKGNNGDDQRLGLSRGS

SEQ ID NO: 11372 - protein, 352 aa, Zea mays
  VARIANT 24: note = Ancestral polymorphism is S, Derived polymorphism is R
  VARIANT 49: note = Ancestral polymorphism is D, Derived polymorphism is G
MEMDDMVNHLYQITKFVVSLFILSINCSLVLLEFKLGPEELERWFTKIDHIFEHTRISPVGEVLTPFYKTTVKKLQHYDLPLVSHVNHNFSVHAIHMGEDVLSVFEHAIKVLSCKDDLMDSRYVVSEYPLFPFCSSSGALGLISRLNIGALELGDYLALGAIFSATDSVCTLQNFDPRNISGAKLLDFIGSFLYLFGSSTILGVASGLLSAYTIKKKFEGHNQVSSFIPSVWTFAFDHAFFGNDYANVLLDGSHACLCNIVIYLRDFFVSLCCPVKSIALSSTILALVLVSRAAFVFPLSFLSNLTKKTPNGKISFRQQVIVWWAGLMRGVVSIVLAYNKINLVFGLSGLSF

SEQ ID NO: 11373 - protein, 510 aa, Zea mays
  VARIANT 119..510: note = Derived polymorphism lacks residues 119 to 510
  VARIANT 186: note = Ancestral polymorphism is G, Derived polymorphism is D
  VARIANT 200: note = Ancestral polymorphism is A, Derived polymorphism is T
  VARIANT 300: note = Ancestral polymorphism is P, Derived polymorphism is L
MSALGDNACSGFQPLNPDDVRSYLHKAVDFISDYYKSVESLPVLPDVKPGYLRNELQSAPPTSSAPFDVTMKELTASVVPGMTHWASPNFFAFFPSTNSAATIAGDLIASAMNTVGFTWQAAPAATEMEVLALDWLAQLLRLPPSFMNRTGGAARGSGGGVILATTSEAMLVTLVAARDAALRRSGSHGVSQLPRLAVYAADQTHSTFFKACRLAGFDPANIRCIPTGPETDYGLDPARLLEVMQADVDAGLVPTYVCATVGTTSSNAVDPVRAIADAAAVFNAWVHIDAAYAGSACICPEFRHHLDGVERVDSISMSPHKWLMTCLDCTCLWVRDTHRLTGSLETNPEYLKNDASESGNVTDLKDMQVGVGRRFRGLKLWMVMRTYGASKLQEHIRSDVAMAKMFEDAVRADDRFEVVVPRNFALVCFRIKPRGGMTEEDADEVNRELMERLNRTGKAYLAHTVVGGRFVLRFAVGSSLQEERHVRSAWELINKTTNEIMLEPEQIVVE

SEQ ID NO: 11374 - protein, 86 aa, Zea mays
  VARIANT 26: note = Ancestral polymorphism is K, Derived polymorphism is Q
  VARIANT 14: note = Ancestral polymorphism is Y, Derived polymorphism is H
MNAASLLCIQTLGYILIAKPKFMLQKDRLNLIETTPSSEVDYDSRNEVCVGAGAGDSNITGGIIQLYWSSILERCLDTNDQSLKEA

SEQ ID NO: 11375 - protein, 509 aa, Zea mays
  VARIANT 327: note = Ancestral polymorphism is L, Derived polymorphism is P
MATPSHGIPLRALLLLALSLLSIPIVFQLLHRPTPSPMPPPLLRITCADAASQSPRANPPPLASDVHVPPPAPKPEEASEPTSLRHVVFGIASSRRTLPLRLPLLRLWLRAPARAFLFLDAPAPDARDLPPGLALRVSADASRFPYTHRRGLPSAVRVARIAGELVSALNQQEEEDVRWLVLADDDTAFVLPNLLHTLRRYDHGEPWYLGARSESAAQNALHGFAMAYGGAGIAVSWPLARRLAPALDSCVLRYPHLYGSDGRIYACLAELGVELTHEPGFHQIDLHGDISGLLRSHPLSPLVSLHHLDHVHPLYPGTDRAGSAQRLFRAADADPARVLQQTVCYDRARSLTASVSWGYAVQVLSGNVPLPDLLAAQRTFAPWRRSGGRGRGRNATDVLYMFDTRRYPGDECRRGALFFLESVAVAPAGEEGGTATVTTYGRLAPRKCPPGLVPLKSLRLVKVTSEPLQLAPGKALRRHCCDIAPSSSDASMDINIRRCKDDELIAMHS

SEQ ID NO: 11376 - protein, 461 aa, Zea mays
  VARIANT 81: note = Ancestral polymorphism is R, Derived polymorphism is W
MPPSKARRKRSLRDITATVATGTVANSKPGSSSTNEGKQQDKKKEGPQEPDIPPLPPVVVNIVPRQGLGCEVVEGLLVPSRKREYKPNSKYTVGNHPIYAIGFNFIDMRYYDVFAIASCNSVIIYRCLENGGFGLLQNYVDEDKDESFYTLSWTIDQVDSSPLLVAAGSNRIIRVINCATEKLDKSLVGHGGSIHEIRTHASKPSLIISASKDESIRLWNVHTGICILVFAGAGGHRHDVLSVDFHPTEVGIFASCGMDNTVKIWSMKEFWIYVEKSYSWTGHPSKFPTRNIQFPVLTAAVHSDYVDCTRWLGDFILSKSVKNAVLLWEPKPDKRRPGEGSVDVLQKYPVPKCSLWFMKFSCDFYSNQMAIGNNKGEIYVWEVQSSPPVLIDRLCNQECKSPIRQTAVSFDGSTILGAADDGAIWRWDEVDPAASSSKPDQAAAPAAGVGAGAGADADADA

SEQ ID NO: 11377 - protein, 164 aa, Zea mays
  VARIANT 134: note = Ancestral polymorphism is K, Derived polymorphism is N
MDIITQLQDQLDEMAVLAVNTFGTLQRDAPPDRLSSSYPDPLNPNPKPEDDSKPQVQAQPGAPPPPPAQAQAQAQPPAPDLTEQPKAMSRALVLAAKKFDALVAAVPLSSEEDQVKRIQELQAENEVVGLELQKQLEAAERELKQVEVLFNEATDNCINFKKLD

SEQ ID NO: 11378 - protein, 180 aa, Zea mays
  VARIANT 154: note = Ancestral polymorphism is R, Derived polymorphism is C
MILVGSARILPAHSHRHNNKTKRRKRCIIPLQPYSSSVEHSSSRAARRVKHICRCQGLQEDPMIHHPVSAPPTRFTGNETLTASKEALTGVSDGDYAGAVEEAVPRVPPPGLVVGVHGHRRPRQQAVGLGAAAGALDGAAVALGAGELQVAPQRRLLRRRLGHAPCVAPMVQGFCRRRCC

SEQ ID NO: 11379 - protein, 122 aa, Zea mays
  VARIANT 3: note = Ancestral polymorphism is S, Derived polymorphism is L
MASPNVTFLAFFVALALSALHTDAAAAAAETLHHRSDTWCVAKPSTQEAALRGNLEFACSESDCGAIQGTGGCAQPDSLLSRASVAMNAYYQARGRNSWNCFFNGTGIITITDPSLGTCKYA

SEQ ID NO: 11380 - protein, 818 aa, Zea mays
  VARIANT 176: note = Ancestral polymorphism is L, Derived polymorphism is M
  VARIANT 399..818: note = Ancestral polymorphism lacks residues 399 to 818
  VARIANT 430..818: note = Derived polymorphism lacks residues 430 to 818
  VARIANT 469..818: note = Derived polymorphism lacks residues 469 to 818
MAQASSLVAVLRRRTPAAARLLPHRLVSSAPAPAFASSSLVPLPLPSLIEGDRCGGGLSASFGSHSRLRLPRRHHAVAMATRTAHQVASSPESPAAVTSLSSSEASTSTAASEHSELVDFIKSAFGKLEGQNHCWFNIMNDTWMNLNHEGIYLLLLYQSCGTLNNDGKHLIAFESLKHLQQRYPRLNVFALQHGSDVSSLASQSQAFRTIVKEYITFPILISDKNFSNMTNGACYLLFEGSKDPVLFTNWVEEPDVMIKAIDELTTSKEKPSENVLSRVSWQKEEVVKEPSVGSFRNLLLYHPACVSVDEDGDRIFISDSNHHRIIISNSNGMILDYIGSSPGYEDGEFESAKFLRPASSFYHAAEDCLFIVDSEMFLTFHIRLIKTGKVFGNIGIFVWSYKNHAVRKADLGRRTLQTVYPVFNKSNGIWSWITDKLGMRKEATPTIQDFHADSMALPWHLIQISEDTLLVADRSFETPWTLTISTGEKQDIGRGRAEIMESYQKTVKERCALIKDMHMNWSSSARVLSDSVQKIPNNELISSIARFQNYIVFCDTDGQRVLKHDLDTKTTSTIQFSDCEVLGLPYWSVCNLERVSTWGYSSGQLQEHAQQVDVLPGRCNITVYVDIPVGTELAAPLVDNCIWRQVRGSGAEVSGSDGPDTATEKVGIAQQWYDELDNLAFSEVAEEPTAAAHGDGNTDDQSYQEQRRVQFTCTVNVSPGTCELVASVALYLRLAGKRTTTDGVELVKRVMGGCQFREEQAGVELLARCREDDDATGLVVVKPVHLRLRLVCGDHPAGATNKETISTESSLKINVTLD

SEQ ID NO: 11381 - protein, 496 aa, Zea mays
  VARIANT 46: note = Ancestral polymorphism is L, Derived polymorphism is R
  VARIANT 61..496: note = Derived polymorphism lacks residues 61 to 496
  VARIANT 135: note = Ancestral polymorphism is G, Derived polymorphism is D
MANSHHRCTSVASELEGTLLISGSLFPYFFLVALEAGGPLRALLLLAVYPLVALLGAAFSWDDLPLLAMTFLSTAGLDVGDVTAAARATLPRFFLADLRGSAFRALSRHAGGGERYVVTHLPRLVAEPFVREYLGADVRVVGTELRVVAGKRFSGTVVVASPGVAAAAAGADRSLGALVAVLGSDRVVGVGLYCPGAGGDQQPAFLQACQERRMVSAPEKAAAVPLPRSEYPRPLVFHDGRLVRRPDPLACLAILLWLPLGVLLSVTRLLFGFLPHGAGLLLSAATGFRMRGSLGGAAAAGPRRGTLFACNHQTLMDPVILATVLRRKVTAVTYSLSSFSELIAPIPTVRLTRDRGRDSRIMQRELARGDLVVCPEGTTCREPYLLRFSPLFAEIADEVTPTAVRAGGAMFHGSTVRGHKWLDSVFFLMNPAPWYEIRILATCSGSGGASSLDVANGVQRMIGDELGFECTGLTRRDKYRMIAGHDGVDARSSPSS

SEQ ID NO: 11382 - protein, 641 aa, Zea mays
  VARIANT 426: note = Ancestral polymorphism is S, Derived polymorphism is F
  VARIANT 423: note = Ancestral polymorphism is I, Derived polymorphism is T
  VARIANT 409..641: note = Derived polymorphism lacks residues 409 to 641
  VARIANT 348: note = Ancestral polymorphism is G, Derived polymorphism is W
  VARIANT 126..641: note = Derived polymorphism lacks residues 126 to 641
MARRVRPSHLVLALAAAYLLLISLKFRRVLDLAATDLADDPAAAAAAAFSSPSSADHLPPPGSASATSSSSSPPFPVRPFWHRYDRVSLPDLASRNRSALDRMADDAWALGLTAWEDAAAFAGDPWALLAAATSRASDAAKCPSAVSQRARGRVVFLPCGLAAGSSITVVGTPRASHREYVPQLARMRQGDGTVMVSQFMVELQGLRAVDGEDPPRILHLNPRLRGDWSQHPILEHNTCYRMQWGAAQRCDGTPPDDNDDKVDGFPKCEKWIRNDIVDTKESKTTSWLKRFIGRAKKPAMTWPFPFVEERLFVLTIQAGVEGFHIYVGGRHVTSFPYRPGFTLEDATGLFVKGDVDIHSVYATALPSSHPSFSLQQVLEMSEKWRSRPLPKGPVSLFIGILSASNHFAERMAVRKTWMQAPEIKSSEAVARFFVALNSRKEVNVMLKKEAEYFGDIVILPFIDRYELVVLKTIAICEYGVQNLTAANIMKCDDDTFVRVDVVLRRIKLNNGDKPLYMGNLNLLHRPLRTGKWAVTDEEWPEDIYPPYANGPGYVISGDIAKFIVSQHANQSLRLFKMEDVSMGLWVEKFNSTNPVQYSHSWKFCQYGCLENYYTAHYQSPRQMLCLWDKLVRGQASCCNYR

SEQ ID NO: 11383 - protein, 144 aa, Zea mays
  VARIANT 44: note = Ancestral polymorphism is C, Derived polymorphism is R
  VARIANT 47: note = Ancestral polymorphism is R, Derived polymorphism is W
  VARIANT 50: note = Ancestral polymorphism is G, Derived polymorphism is R
  VARIANT 53: note = Ancestral polymorphism is P, Derived polymorphism is Q
  VARIANT 82: note = Ancestral polymorphism is P, Derived polymorphism is S
  VARIANT 91: note = Ancestral polymorphism is P, Derived polymorphism is L
  VARIANT 92: note = Ancestral polymorphism is G, Derived polymorphism is D
  VARIANT 103: note = Ancestral polymorphism is N, Derived polymorphism is K
  VARIANT 107..144: note = Derived polymorphism lacks residues 107 to 144
MGEIWGVAQSIETRETPEEGKDDVAAASFALPGAVEGARAEVLCVHRYSGSMPLGTAATISCSYLVSTATMVYAQHLSRGLPDPAVDLLCPGVLVFAVGLAGNKPLWRSRDPVASEAGSSAQPAAEPSPGLRSHAIETESGREE

SEQ ID NO: 11384 - protein, 159 aa, Zea mays
  VARIANT 95: note = Ancestral polymorphism is D, Derived polymorphism is N
  VARIANT 92..159: note = Derived polymorphism lacks residues 92 to 159
  VARIANT 90: note = Ancestral polymorphism is P, Derived polymorphism is L
  VARIANT 84: note = Ancestral polymorphism is G, Derived polymorphism is S
  VARIANT 78: note = Ancestral polymorphism is K, Derived polymorphism is N
  VARIANT 61: note = Ancestral polymorphism is A, Derived polymorphism is T
  VARIANT 56: note = Ancestral polymorphism is R, Derived polymorphism is H
  VARIANT 47: note = Ancestral polymorphism is G, Derived polymorphism is W
  VARIANT 38: note = Ancestral polymorphism is A, Derived polymorphism is S
MATVPSDAPAEVAELVPTDSSPEPVYGAGHVVEAGARARVPGEAPHGVPVLGRGRHYSRRAGLAASMEGFRLAVTVRKAETKDSSVQTPLCWVRNVVADFDETLVVKFALPSCSLDRTVVAWTVPLAVSSRREERDHRGCVELPTISSTRLVLVQGGVR

SEQ ID NO: 11385 - protein, 268 aa, Zea mays
  VARIANT 20..268: note = Derived polymorphism lacks residues 20 to 268
MLAAPAWPSPCCLLSCFATQCSLSSLQLKCSADKLRKALAEPVESLFDVADQTTWQSIRNIYKRETEAILPEFLNNLCQFEMEYAPAEEMVSKLKDYAQSVVESKAKEESSKVLIHMKERFTTVFSHDKDSIPRVWTGKEDVHAIAKEARSTALKLLSVMAAIRWDDEPDRIESILTSTLLEGSVVSKIASAASADPLASTTWEEVTLCWNPIYLFLLFVGYLMVKALAMQLDVSREFQNGVVPGIISVSVKLLPTIQNLLSKLSYFV

SEQ ID NO: 11386 - protein, 482 aa, Zea mays
  VARIANT 150: note = Ancestral polymorphism is R, Derived polymorphism is W
  VARIANT 185: note = Ancestral polymorphism is A, Derived polymorphism is V
  VARIANT 186: note = Ancestral polymorphism is G, Derived polymorphism is D
  VARIANT 190: note = Ancestral polymorphism is P, Derived polymorphism is L
  VARIANT 255: note = Ancestral polymorphism is D, Derived polymorphism is H
MAAVDATTKEMDALHVGQNDETKETLIKEDKAANSNHSVVAAQSLLPEDDDDDEAQADGPSQDGAAAAVKKKKKKNKSKKKKGPLQQTDPPSIPVDELFPSGEFPEGEIQQYKDDNLWRTTSEEKRDLERLQKPIYNSVRQAAEVHRQVRKYMRSIIKPGMLMVDLCETLENMVRKLIKENGLQAGIAFPTGCSLNWYAFFYTVSVDMVCLNVSPSFHSVQELMKKYAFLRVAAHWTPNAGDKTVLQYDDVMKLDFGTHIDGYIVDCAFTVAFNPMFDPLLQATRDATNTGIKEAGIDARLGDVGAAIQEVMESYEVEINGKVFQVKSVRNLNGHSIGPYQIHAGKSVPIVKGGEQTKMEEGEFYAIETFGSTGKGFVREDLECSHYMKNFDVGHVPLRLAKAKQLLGTINHNFGTLAFCRRYLDRLGETKYLMALKNLCDNGIVQPYPPLCDVRGSYVSQFEHTILLRPTCKEVISRGDDY

SEQ ID NO: 11387 - protein, 381 aa, Zea mays
  VARIANT 126..381: note = Derived polymorphism lacks residues 126 to 381
  VARIANT 222: note = Ancestral polymorphism is S, Derived polymorphism is L
MPDVKSAAATVAKAVAGDSPSPAATPPAPAVASSNGTPQKPPPIPAATFDMPKPNLRGLNKPKCIQCGNVARSRCPFQCCKSCCYKAQNPCHIHVLKQSNTLPDKPSPATASSTEQPSTNLPATSSASRLAALQKLPQHFLKSLQTKKSLTKKDAVAINKWRFMKLREHMQGDIDDENEAYERYTQNVRLLEETFYPMEYADVEPEAEAPSSDEERMDLLVSEAKVRLKSDNEIADRFKERVAAILDQKLKKLLESQSADEDDKLSDPDQDDHLNPAKFSAKQKAERSASLNELLGKLTRARSEDDLKPCRDLIEQLFGKEKGSSTDRQAGVEMEQRDQESAAAAVAQPYSVPELCARMEVDEDFAAKISDEFSLSQVAQL

SEQ ID NO: 11388 - protein, 368 aa, Zea mays
  VARIANT 15: note = Ancestral polymorphism is S, Derived polymorphism is C
MRGQPQVVKINSCSSTSTCLILFSVLQVYDWDTMERFWQQCIFNYLRCNPEEHYFLLTDSPVSTPESRECTGEIMFETFNVPGLYISVQSVLSLSAGYAYLKSLSDDDSDTRSDMTGVVVDIGDGAPQIVPVVNGYVIGSSIKSFPSSGSDVTQFISQLLQERGELLAPEDSLDISRKVKEVYCYTCSDIVKEFKKHDKKPDKYIKHWSAVKPKTGVPYTIDIGYERFLGPEIFFNPEIYSADFSTPLPELIDNCVQSAPIDTRRALYKNIVLSGGSTMFKDFHKRLQTDIKKIVDDRVAATNARHRVEVRPIEVNVVAHPIQSYAVWFGGSVAASNPEFFEFCHTKEEYEEHGASICRTSPVFKGMY

SEQ ID NO: 11389 - protein, 414 aa, Zea mays
  VARIANT 341: note = Ancestral polymorphism is P, Derived polymorphism is A
MAASKPLRLRLAVPLALALLLALALVTNFLWASSSRRVSPLSAPSSSRTDSLTIAPLDRAPAQVMGKSAKAVWRLNATYADLPAPHWDWEEMPAAPVPRLDGASVQIGDLLYVFAGYGNIDHVHSHVDVYNFTSNTWTQRFHMPKEMAHSHLGMASDGRYIYAVSGQYGPQCRASINRNFVFDTETREWHGLPPLPLPRYAPATQLWRGRLHVMGGGKEDRHEPGLEHWSLAVKDGKALENEWRAEVPIPRGGPHRACIVANDKLFVIGGQEGDFMAKPGSPIFKCVRRHEVVYGDVYMLDDGAKWKELSPMPKPDSHIEFAWVVVNNSIVIVGGTTEKHPITKKMILVGEVFRFDLEALTWSVIGRMPFRIKTALAGYWEGWLYFTSGQRDRGPDNPAPKKVVGSMWRTRLHL

SEQ ID NO: 11390 - protein, 98 aa, Zea mays
  VARIANT 24: note = Ancestral polymorphism is A, Derived polymorphism is V
  VARIANT 59: note = Ancestral polymorphism is F, Derived polymorphism is L
MAAAEARRRSAVWALLPLRLLHPVALVLANTEGSVGENMFHWQATIMGPSDTPFAGGLFLVNIHFPPDYPFKPPKVSFHTKVFDLNINDNNNICLGHS

SEQ ID NO: 11391 - protein, 479 aa, Zea mays
  VARIANT 202: note = Ancestral polymorphism is L, Derived polymorphism is S
MGASLGSAASKDRQQEHGGEAPRPDPCKKTRLSSPLCTIHGSHGHPRLIPGLPDEVSLQILARMPRMGYLKAKMVSRSWKAAVTGAELYRLRKELGVAEEWLYILTKAAAGGQKLVWHALDPVSNQWQRLPLMPGIECRSGGVYGLGLRDLVSVGVGIFDVIRGWLGQKELSGGVPPFCGCAVGAAGGCLYVLGGFSGASASKRVWRYDPSANSWREVSPMRAGRAFCKASLLNDKLYVVGGVSKGENGLIAPLRSAEVFDPATGAWAELPDMLFSKSQAMPTAIADLLKPVAAGVTSYGGKLHVPQSFYSWPFAVDVGGEVFDPETNSWEQMPAGMGEGWPARQAGTRLSAVVEGDLYALEPTTSSSGGCEIKMYDAQEDAWKVAVSQVRAGAFDESDSPCLLAAFLGKLHLVVKDMGSRISVVQMDSLMKPVDSPALSAATTCRTPDVSSEQTHVWKAIASKNIAAAELVSCQVLSI

SEQ ID NO: 11392 - protein, 88 aa, Zea mays
  VARIANT 23: note = Ancestral polymorphism is S, Derived polymorphism is R
  VARIANT 28: note = Ancestral polymorphism is L, Derived polymorphism is F
  VARIANT 39..88: note = Derived polymorphism lacks residues 39 to 88
MTNHITGDKAKDRSLGECSLCYSALHMLKVTRILFASIQKLNLLKPYEPWADGMWPAWKPDAPEVPEAPRAIGRRTRMVRRGEAKLTV

SEQ ID NO: 11393 - protein, 534 aa, Zea mays
  VARIANT 374..534: note = Derived polymorphism lacks residues 374 to 534
MATASVTFKSREDHRKQLELEEARKAGLAPAEVDEDGNEINPHIPQYMSSAPWYLNAEKPSLKHQRKWKSDPNYTKSWYDRGAKLFQANKYRKGACENCGAMTHDKKSCMERPRNVGAKWTNVNIAPDEKVESFELDYDGKRDRWNGYDASTYTRVIADYEAREEARKKYLKEQQLKKLEEKDTEKDDENAGSEDEEDDLRIDEAKVDESAQMDFAKVEKRVRTTGGGSTGTVRNLRIREDTAKYLLNLDVNSAYYDPKTRSMREDPLPDADPNDKFYVGDNQNRLSGQALEFKQLNIHAWEAFEKGQDIHMQAAPSQAELLYKSFKIKKEMLKSEHKDKIIEKYGNAASEDTIPRELLLGQSEREIEYDRTGRIIKGQDVALPKSKYEEDVFINNHTSVWGSWWKDHQWGYKCCKQTIKNSYCTGLAGIEAAEASADLMKANMARKEAAEDEPVQHEEKRLATWGTDVPQDLVLNEKKLEESLKKETARRKEEKDERKRKYNVKWNDEVTAEDMEAYRMKRIHHDDPMKDFLN

SEQ ID NO: 11394 - protein, 351 aa, Zea mays
  VARIANT 283: note = Ancestral polymorphism is Q, Derived polymorphism is H
MAFAPKTSSSSSLSSALQAAQSPPLLLRRMSSTATPRRRYDAAVVVTTTTTARAAAAAVTVPAAPPQAPAPAPVPPKQAAAPAERRSRPVSDTMAALMAKGKTAFIPYITAGDPDLATTAEALRLLDGCGADVIELGVPCSDPYIDGPIIQASVARALASGTTMDAVLEMLREVTPELSCPVVLLSYYKPIMSRSLAEMKEAGVHGLIVPDLPYVAAHSLWSEAKNNNLELEHMQVLLTTPAIPEDRMKEITKASEGFVYLVSVNGVTGPRANVNPRVESLIQEVKKVTNKPVAVGFGISKPEHVKQIAQWGADGVIIGSAMVRQLGEAASPKQGLRRLEEYARGMKNALP

SEQ ID NO: 11395 - protein, 291 aa, Zea mays
  VARIANT 233: note = Ancestral polymorphism is R, Derived polymorphism is C
MASATATAPAFALASSLSRRGFLPLSRRAGRPVPQSLRFVASAVRRRRSAVVVAADAAAAAGSAEFGDEENPYELLGIRPLDSFDHMKMAYKKKRKDAEETGDDEFLAKLDRAHDTVMMQQLRYRKKGVTYGSVQVSKDIKYADNQPIVLWGPRFSRSTVKDMRINMAISAAFVVWIAIMGNADWKPLQFLCFAFFCRILQKLRATEPLITPIYNEYGEVEGRGIRMAKRVVRALGLIFGCVFTASLAYTAASNMVELSLQYTPRMFYYYQELIVTVAASVLLYITASWYR

SEQ ID NO: 11396 - protein, 491 aa, Zea mays
  VARIANT 225: note = Ancestral polymorphism is A, Derived polymorphism is S
MENANASSCRNGDGTQTPPPHVAMLATPGMGHLIPLAELAKRLAQRHGVTSTLITFASTASATQRAFLASMPPAVASMALPPVDMSDLPRDAAIETLMSEECVRAVPALTEALLSLKQRPTTTGRLVAFVTDLFGADAFDAARAAGVQRRYLFFPTNLTALTLMLHLPELDASIPGEFRDLAEPLRLPGCVPLPGTETMKPLQDKSNPSYRWMVHHGAKFREATAILVNSFDAVEPGPAEVLRQPEPGRPPVRTIGPLVRAEDGGGSKDDAPCPCVEWLDRQPAKSVIFVSFGSGGTLPAEEMRELALGLELSGQRFLWVVRSPSEGGVGNDNYYDSASKKDPFSYLPQGFLERTKDVGLVVPSWAPQPKVLAHQSTGGFLTHCGWNSTLESLVHGVPMLAWPLFADQRQNAVLLCDGVGAALRVPGAKGREDIAAVVRELMTAEGKGAAVRAKVEELQKAAAEGLRDGGATAAALAEVVKEWTSADDSVY

SEQ ID NO: 11397 - protein, 449 aa, Zea mays
  VARIANT 380: note = Ancestral polymorphism is R, Derived polymorphism is G
  VARIANT 391: note = Ancestral polymorphism is H, Derived polymorphism is D
MYHLDRPMYLLGYIANQSRVYLIDKELNVIGYTLLLSLIEYKTLVMRGDLDHANKILSSIPKAQYNSFLHSFSVFRPTSCRVCSLLASVLVSLSYGSVAHFLESRGMLEEALEIATDADYKFDLAVQLGKLDVAKAIAIEAQSESKWKQLGELAMSTGKLEMAEECLLQAKDLSGLLLLYSSLRDAEGIEKLASLAKEHGKNNVAFLCLFMLGKVEDCIQLLVDSNRIPEAALLARSYLPSKVPEILAIWRDDLSKINPKAAESLADPSEYPNLFEDWQVALTVEKSVASQRGNYLPADQYLNHAEKSDMTIVEAFKRMQVVQHEEPEDVAEENGELDQQALRDPYFKGLARVEREPSCQPIRKVEFDFEHKRMSKEEIRELIFREILEYHPQLLSSYINGTERTTFLYPSAVDQFKKQFSHLEESGGNGPSVPTDRKHASLPRFSLMA

SEQ ID NO: 11398 - protein, 602 aa, Zea mays
  VARIANT 47: note = Ancestral polymorphism is R, Derived polymorphism is C
  VARIANT 51: note = Ancestral polymorphism is K, Derived polymorphism is N
  VARIANT 148: note = Ancestral polymorphism is S, Derived polymorphism is F
MRSYHSREICVGFGFRFGLFANEFTGNAPDLGWNGTLPSEYIRKNSRHHMKNVSVHPFALFLHYRRGAHVLVSDAATFRPVLRTAWPAATLNAISSDARARRGGSSADTTVLPSVQIRHAVAMPDRVLLILKDGPLLPSPERFQCLYSPANSSELRRHRPLLAASSPDGPSLVHCPAEPSCVDVSLSLSLSPPVAPLQWDRLVYAALVDSRDNSTVVFAKGMNLRPGRLGVASRYQCVFGRDLWKPKQRVLTSPVISAAQEVFRCVTPARVRRHLRMTTDPNGNGNGNDKPMLVSIRTKGQRDSTLPSIAEPEPLPPRHNYRHHRRRPKAHSMCVCTMLRNQARFLREWIIYHSRIGVERWFIYDNNSDDGIEQVLGTMDPSTHNVTRHLWPWTKSQEAGFAHCALRARESCEWVGFIDVDEFLHFPGNQTTLPDILRSYSNRPRVGELRTACHSFGPSGRTRIPKQGVTTGYTCRLAAPERHKSIVRPDALNPSLVNVVHHFHLREGARYVNVGQGAMLVNHYKYQVWEVFKDKFSGRVATYVADWRDEENVGSRDRAPGLGTRPVEPEDWPRRFCEVYDTGLKDFVQKAFADPATGSLPW

SEQ ID NO: 11399 - protein, 172 aa, Zea mays
  VARIANT 117: note = Ancestral polymorphism is M, Derived polymorphism is I
  VARIANT 90: note = Ancestral polymorphism is R, Derived polymorphism is C
  VARIANT 89: note = Ancestral polymorphism is L, Derived polymorphism is M
  VARIANT 59: note = Ancestral polymorphism is F, Derived polymorphism is I
  VARIANT 56..172: note = Derived polymorphism lacks residues 56 to 172
  VARIANT 47: note = Ancestral polymorphism is C, Derived polymorphism is F
  VARIANT 15: note = Ancestral polymorphism is A, Derived polymorphism is V
MTVLIGHRLLLKNTAGTSRRAGVLLPVLLAGRGVDEMQRRNAKVITCSLSRSQFNYLIFCLFFYHLKILGVGKTTSQQEIKKAYHKLALRLHPDKNPGDEALVGEAANNLQEYFRTMYKKVMEADIEEFEAKYRGSDYEKTDLKDLYTKYKGNMNRNNYLLYHIVKSETVLL

SEQ ID NO: 11400 - protein, 77 aa, Zea mays
  VARIANT 53: note = Ancestral polymorphism is G, Derived polymorphism is R
  VARIANT 49: note = Ancestral polymorphism is A, Derived polymorphism is V
  VARIANT 44: note = Ancestral polymorphism is A, Derived polymorphism is T
  VARIANT 40: note = Ancestral polymorphism is R, Derived polymorphism is C
  VARIANT 33..77: note = Derived polymorphism lacks residues 33 to 77
  VARIANT 28: note = Ancestral polymorphism is N, Derived polymorphism is K
  VARIANT 22: note = Ancestral polymorphism is K, Derived polymorphism is N
  VARIANT 15..77: note = Derived polymorphism lacks residues 15 to 77
  VARIANT 14: note = Ancestral polymorphism is L, Derived polymorphism is M
  VARIANT 8: note = Ancestral polymorphism is A, Derived polymorphism is S
MRLSVGVAREFLALQDRLGFDKASKTLKWLLAQSKPPIDCLVDAADQVAVVTGGRPTLVKGREQGSNSSICCLTDSR

SEQ ID NO: 11401 - protein, 509 aa, Zea mays
  VARIANT 58..509: note = Derived polymorphism lacks residues 58 to 509
  VARIANT 47..509: note = Derived polymorphism lacks residues 47 to 509
MDSSVEVAGVRSNKMIDGRRHSVDIPVSRALLAIMRSRSLRDPDTNSLAKFSAKKTIWEGSSLDEDEMEGANNKNAYGRHSFSYNAISKSVTHELIGDVSDDELLDLLNLAMSSDAATIVRRARELLSSKVDPLQLLAQLANHIMDILAGKHPSDSSEVRRVTGKHTSADVDVHKLRNALEILSETEKQLKTTKNQSTWLTAALLQFNMREPYCLDDTAVSSMFTESHTDDGTAALKDESLDTSSHLCSQNKISSLDMNLGDPDVLETIWMKALENCSSPPLQNLLLKDGKLSSLYTTQGVAVAELQFCHPEVVPTSKNFWKPLCASLQNLLRCSVDIRINLSPISGNGAGSKDSSVSLVMESREEDREAQDPATSNCRTVVSSGRDCPSPPLGQAKERSSHILGCLHGGAGGDAVDTEPRILSYQKISVVPAASTPGNTPLKAAAAAAGDESKVDDGGVRPGCCSHILPCGACAPRQKPRTREKRRAKLFSCCFCKIGPDCKAKGEAG

SEQ ID NO: 11402 - protein, 196 aa, Zea mays
  VARIANT 30: note = Ancestral polymorphism is L, Derived polymorphism is M
MATIATMALLKPARIVARSAPPSTSGSVSLRVPARAKKAAVSASVSSALAGAFFSALASSDAALAAQRVADVAAAADSGSDNRGQLLLFVVAPAIGWVLYNILQPALNQLNRMRSQAVVAGLGLGAAAAGMAAAPEASAAAAAQDLAALAAAAAAAAPADDNRGLLLLIVVTPAIGWVLFNILQPALNQINRMKSD

SEQ ID NO: 11403 - protein, 425 aa, Zea mays
  VARIANT 151: note = Ancestral polymorphism is L, Derived polymorphism is I
MESLEALVAHIQGLSGSPEELAHLHSLLKQADGEPLRAHAAALVPFLAHLSPETHSLGYLYLLEACATSSSNLSDFGGGDFLVTIGGFLTACSADQIRLAPDKFLNVCRVLKDQVMQLNMPIRGIAPLRAAVPKIQSSPEQLTPVHADYLILCLLAKQYKAGLSVLEGDIFEVDQPKDLFLYCYYGGMIYVGLKKFPKALELLHNAVTAPMSSLNAIAVEAYKKYILVSLIVNGQVPPFPKYTSISAQRSMRNHAQIYAELSTSYSNGSKTDLETFIQSNSAAFQSDNNLGLVKQVLSSMYKRNIQRLTQTYLTLSLEDIARSVQLETPRDAEMHVLRMIEDGEIHASINQKDGMVSFHEDPEQYKSVEMVEHIDTSIHRLTALSKKLASIDQNMSCDTAYLMQTGRDRGRFDYDDFDSVPHKYF

SEQ ID NO: 11404 - protein, 154 aa, Zea mays
  VARIANT 8: note = Ancestral polymorphism is S, Derived polymorphism is F
  VARIANT 16: note = Ancestral polymorphism is A, Derived polymorphism is T
  VARIANT 22: note = Ancestral polymorphism is C, Derived polymorphism is Y
  VARIANT 23..154: note = Derived polymorphism lacks residues 23 to 154
  VARIANT 36: note = Ancestral polymorphism is P, Derived polymorphism is S
  VARIANT 54: note = Ancestral polymorphism is A, Derived polymorphism is T
  VARIANT 68: note = Ancestral polymorphism is G, Derived polymorphism is W
  VARIANT 72..154: note = Derived polymorphism lacks residues 72 to 154
  VARIANT 73: note = Ancestral polymorphism is C, Derived polymorphism is S
  VARIANT 85: note = Ancestral polymorphism is P, Derived polymorphism is L
  VARIANT 93..154: note = Derived polymorphism lacks residues 93 to 154
  VARIANT 97..154: note = Derived polymorphism lacks residues 97 to 154
  VARIANT 101: note = Ancestral polymorphism is T, Derived polymorphism is I
  VARIANT 110..154: note = Derived polymorphism lacks residues 110 to 154
  VARIANT 123: note = Ancestral polymorphism is T, Derived polymorphism is I
  VARIANT 132: note = Ancestral polymorphism is T, Derived polymorphism is M
MATVAPASVDGFNCTANRTYPCQAYALYRAGFTGVSLDLTAIDDLFAVSCFMVTHANNLSTTAAPANGQPLQCSCPSRSSSSYAPMQYQIGPWDTYWIVSTTKLQNLTQYQAVERVNPTLVPTDLDVGTMVTFPIFCQCPTVADNATMLVTYVM

SEQ ID NO: 11405 - protein, 214 aa, Zea mays
  VARIANT 115..214: note = Derived polymorphism lacks residues 115 to 214
  VARIANT 131: note = Ancestral polymorphism is T, Derived polymorphism is P
  VARIANT 154..214: note = Derived polymorphism lacks residues 154 to 214
MSKTCVSLCGVPWMTRQGVDGCRGVAIEARRGWKVAATMEGVRTRVGWSAACRRKEVALETTEAICREIGVFGPHENISSKSFTGKEFTGLSDKKELLRQQGGILFSRAEPKHKQEIVRLLKEDSEVVAMTGDGVNDAPALKLADIGVAMGITGTEVCTIVAGVGEGRSIYNNMEAFIRYMISSNIGEVASIFLTSALGIPKGLIPVQLLWVNM

SEQ ID NO: 11406 - protein, 240 aa, Zea mays
  VARIANT 189: note = Ancestral polymorphism is G, Derived polymorphism is S
  VARIANT 149: note = Ancestral polymorphism is E, Derived polymorphism is A
  VARIANT 125: note = Ancestral polymorphism is T, Derived polymorphism is M
  VARIANT 75: note = Ancestral polymorphism is A, Derived polymorphism is S
  VARIANT 22: note = Ancestral polymorphism is A, Derived polymorphism is T
MADAGNEAEGLTLLGLHVSPFALRVRMALSLKGLSYEYIEQDLFHKGELLLSSNPVHKKVPVLIHHGKPICESLAVVEYVDEVWPGAAATILPADPHGRATARFWAAYIDGKLFPAWTGIMKAATEEARADKLRETHAAVLNLEKAFAEISSSSSNDGAAFFGGDSVGYLDLALGCSLPWFGALRAMLGVEIIDAAQAPLLVAWAERFGETPVAKEVLPQPDEAVAYAKKIQAYWASAKN

SEQ ID NO: 11407 - protein, 101 aa, Zea mays
  VARIANT 21: note = Ancestral polymorphism is S, Derived polymorphism is P
MAAGKLGQQLMTRLHLARTRPSATADVPRGHLAVYVGEGRKRLVIPTACLSHPAFVTLLKRVEDEFGFDHRCGGLTIPCASETEFAHIVGAAAAGDGHHHH

SEQ ID NO: 11408 - protein, 432 aa, Zea mays
  VARIANT 154: note = Ancestral polymorphism is V, Derived polymorphism is G
  VARIANT 158: note = Ancestral polymorphism is R, Derived polymorphism is G
MEWLDEYEKLVVRMNTPRVVIDNAVCPTATLVQVDSARKRGLLLEAVQVLADLDLSINKAYISSDGRWFMDVFHVTDRLGRKLTDDSVITYIQQSLGTWNEPARPAALEGLTALELTGPDRTGLLSEVFAVLADLQCGVVDARAWTHRGRLACVAFLRGEGDADRVARILARLGHLVRGDGEAPGAVAAVPAAAVAHVDRRLHQLMAADHNNSATPYPAAAVSVQSWAERGYSVVTVQCRDRPKLLFDVVCALHCLDYVVFHGTVDTAAGDRARQEFYIRSADGSPIRSEAERERLAQCLQAAIDRRSLEGVRLELCTPDRPGLLSEVTRTFRENGLLVAHAEVSTKGGLASNVFYVTDADGKAAGQSAIEAVRARVGADCLVVGEEPRPPRVFPEAGPGDRDHGGGGLGLVYLGNLVKRNLYNLGLIKSCS

SEQ ID NO: 11409 - protein, 350 aa, Zea mays
  VARIANT 55..350: note = Derived polymorphism lacks residues 55 to 350
  VARIANT 67..350: note = Derived polymorphism lacks residues 67 to 350
MQGGRGGRQGLFGFGDPSGGSGGFGQPGSLMPGFFGGANPFDDPFFTNPFGSMMQTSFSAPFSGMMQPSFMNPFGSMVQPSLLGPSMFAPHGNLNGGMFGSQTHLGQGISNGSGFIQQAPEPSRPKGPIIKELSSDDEDDVDDDEEGEKKNGNFRKHQRESKEPYVEDPDDEEDNKRPKHGQFGREFSRVNTSRPQPQTFMFQSSTVTYGGPNGACYTSSTTRRTGADGFTLEENKEADTTTGKATHRISRGIGIKGHSLTRNLNSDGRVNTLQTLHNLNEDELGGFEESWQRNTRENMPGWDPRMNMLGNGNVRSDFRDVNQMPALPAPELYRGTNFQNGSSMGRAPRT

SEQ ID NO: 11410 - protein, 139 aa, Zea mays
  VARIANT 87: note = Ancestral polymorphism is A, Derived polymorphism is T
  VARIANT 65: note = Ancestral polymorphism is G, Derived polymorphism is S
MGCFGCFAPEADEDLRPSKHDDSSGADARRKVAPDVASGYAHSFTFKDLLVATGYFNEANFIGEGGFGKVYKGKINGQTILRSKDTAGWRYGFTALFLSVRSLEFFQGMECIWSFSSMLNGSDSVISFYHPLFVDPSIH

SEQ ID NO: 11411 - protein, 183 aa, Zea mays
  VARIANT 127: note = Ancestral polymorphism is R, Derived polymorphism is C
MGRMHSRGKGISSSALPYKRTPPTWLKTAASDVEEMITKAAKKGQMPSQIGVLLRDQHGIPLVKSVTGSKILRILKAHGLAPEIPEDLYFLIKKAVAIRKHLERNRKDKDSKFRLILVESRIHRLARYYKRTKKLPPTWKYMTTERVNHCKHSGGLSEELSVRRLKPRALLEIIFMYRFKSLE

SEQ ID NO: 11412 - protein, 377 aa, Zea mays
  VARIANT 325: note = Ancestral polymorphism is G, Derived polymorphism is E
  VARIANT 294..377: note = Derived polymorphism lacks residues 294 to 377
  VARIANT 274: note = Ancestral polymorphism is S, Derived polymorphism is L
  VARIANT 177: note = Ancestral polymorphism is T, Derived polymorphism is I
  VARIANT 148..377: note = Derived polymorphism lacks residues 148 to 377
MCIMLMNDGHSGRASIQPPPQVLASVPLLVYEYEDAAAVDPADDSAPTAFKMLMYSLPERSIVYTHDNRPPMMMEGNFCFTTPQGWLVILGQESEASMWHPLTGETITLPPIHDIPVTCKCLLTHSSVAHPDCAVVLLDVTDPLMWFCRVNGEADRRRWGQHAYDIGDYFFPEEFRTPTTPTKNVIHDVAALGGKLYFRFTESDQHKMGVVDLDFPSDPGHPPTAVFDEFDVCAEFDLVPEGICAACIHLVESMGELLAICYYYVDFDPTNISSARIFKMEKTYDDEDEELVAWRPVDDVGDRAFLLTGTNMATWCYASTNNLRGNTFYFLAHLVSGHRDLCIYDVQKQTMEVVQVHDYEDMEIVRTMPYWINVPPC

SEQ ID NO: 11413 - protein, 182 aa, Zea mays
  VARIANT 141..182: note = Derived polymorphism lacks residues 141 to 182
  VARIANT 34..182: note = Derived polymorphism lacks residues 34 to 182
MWSSSTPRVYRSWVRIQNKFRGWKGRKEFMFIRQKIVKILVRKNYRKVVWSVGIMEKVILRWRRKGRGLRGFQPEKQLEGPSWQIQPAKAEAEDEYDFLKDGRKQATGRLDRALARVRSMNQYPEARDQYRRLQACVNSLRESQAMQDRMLADSAGTDGGDFMTELEELCRDDGDAPMSTIS

SEQ ID NO: 11414 - protein, 406 aa, Zea mays
  VARIANT 322: note = Ancestral polymorphism is T, Derived polymorphism is M
  VARIANT 291: note = Ancestral polymorphism is K, Derived polymorphism is N
MLMSQRLTTTWPRRYWRWGRSCYPPPTLSPRNDAPTSPSPGGPSGSLSARRRPPTTPSARTASSSARPTPARRPPRRSRRRRRSSRPRPWPPGSGSAARKPTASPSLPGLPRRLPPDRARPGSTQSPLARSPPQPPSPGNLRLTLSSSASSTARKYTPERRQKFIGGQRSNHEKIHTATMKILMYQLCNSVAFVHDPKVLHRELKLHILLKDHKTMVLKIVEYVEDIYRFYKSTEVQYRLTLMPETLYLTVYIIDQYLSMESVPRKELQFVGISAMLIASKYEEIWAPLVKDLMCLCDNAFTRDQVLTKEKAILDRLHWNLTVPTMYMFIVRYLKAAMCDTELENMAFFYSELALVHYSMLVYPPSVTAAAAVYAARSTLGMNPPWTDILEHHTGLAEPQLLYVLR

SEQ ID NO: 11415 - protein, 189 aa, Zea mays
  VARIANT 102: note = Ancestral polymorphism is S, Derived polymorphism is C
  VARIANT 42: note = Ancestral polymorphism is R, Derived polymorphism is W
MAAVNLLAELSRRRQGDKKLLDKFIDHSTGDPLDLLDQKTVRLALKSAAGKKRAAPDDDDEKFEVDPEGRIIVREEREKWKKKPVPRDDEEADGKSSVRSQSIKKRRTSGSGWAYTGHEYTSKRASGDLKKKDKMEPYAYWPLDRKLLNRRSDRKVSARKGMSSVMKITKKLEGKSASAALSAKRSGKT

SEQ ID NO: 11416 - protein, 109 aa, Zea mays
  VARIANT 77: note = Ancestral polymorphism is A, Derived polymorphism is V
  VARIANT 38: note = Ancestral polymorphism is V, Derived polymorphism is L
  VARIANT 29: note = Ancestral polymorphism is T, Derived polymorphism is A
MASGELACTYAALILSDDGIAITAEKIATIVKAANIKVESYWPALFAKLLEKRSVEDLILSVGSGGGAAPVAASAPAGGAAAAAAPAAEEKKEEPKEESDDDMGFSLFD

SEQ ID NO: 11417 - protein, 342 aa, Zea mays
  VARIANT 103: note = Ancestral polymorphism is R, Derived polymorphism is S
MAIVETAAAAAAAAAAADHTAPPREEEAPGAAADAGEREMRDLEDLLSKLNPMAEEFVPPSLASPISGAGAGHGALTPAPLSPAAYGFYPVNAGFAVASPGHRGVVSFPAVADAHAGRGMKKDGAGGFGGHGHGHPGRRRTNSRTSMAQRDEAIRRTVYVSDIDHQVTEENLAALFINCGQVVDCRMCGDPNSVLRFAFIEFTDEEGARAALNLSGTVLGYYPVKVLPSKTAIAPVNETFLPRSDDEREMCARTIYCTNIDKKVTQADLKLFFESICGEVFRLRLLGDYHHSTRIAFVEFVMAESATAALNCSGVVLGSLPIRVSPSKTPVRPRVPRHLMSY

SEQ ID NO: 11418 - protein, 467 aa, Zea mays
  VARIANT 186: note = Ancestral polymorphism is R, Derived polymorphism is M
  VARIANT 133: note = Ancestral polymorphism is E, Derived polymorphism is V
  VARIANT 125: note = Ancestral polymorphism is C, Derived polymorphism is F
  VARIANT 64..467: note = Derived polymorphism lacks residues 64 to 467
MSDRQPSEEPEEQVDLEGDDDGMDDDDAGYRRRGSRDDSEEPEEDDDNDERHGDADDDAGMEPEPAGSKGGDDTGKGPDVAGGGPEDEEERSKWDDMLALPPHGSEVFIGGLPRDITEEDLRELCEPLGEIYEVRLTKDKDTKENKGFAFVTFMDKEAAQRAIEDVQDREFKGRTLRCSLSQAKHRLFVGNVPKGLSEEELTNTIKGKGPGVINIEMFKDQHDPNRNRGFLFVEYYNHACADYARQKLSSPNFKVDGSQLTVSWAEPKGSTDASSAAAQVKTIYVKNLPENVSKEKIKDLFDKHGEVTKIVLPPAKAGHKRDFGFVHFAERSSALKAVKGSEKYEIDGQVLEVSMAKPLADKKPDHSHRPGGGPNYPLPPYGGGGYMGDPYGAYGGGGPAYNQPMIYGRGPAPAGMRMVPMVLPDGRLGYVLQQPGGMPPPPPPRRGSDRRDSGRGGEGHSRRYRPY

SEQ ID NO: 11419 - protein, 216 aa, Zea mays
  VARIANT 130: note = Ancestral polymorphism is D, Derived polymorphism is E
  VARIANT 184: note = Ancestral polymorphism is S, Derived polymorphism is F
MEKISVAVHFRPPNLVAANTSPASSGGGSDREWRIDDTHVSLLRRAAGPVPGASFTFDHVFDDATNNEQIYGTVVQELIGAVVGGFNGTAFAYDQTSSGKTFTMNGSDADPGIIPRAVRDVFDTVLQADEREFLIRVSYMEIYNEEINDLLTLEGQKLKIRESLDVIESSGKDQTDDGDAIRVSVLNLVDLAGSERIIKIGTEGVRLNEGKYINKS

SEQ ID NO: 11420 - protein, 239 aa, Zea mays
  VARIANT 115..239: note = Derived polymorphism lacks residues 115 to 239
  VARIANT 85: note = Ancestral polymorphism is G, Derived polymorphism is S
  VARIANT 82: note = Ancestral polymorphism is G, Derived polymorphism is R
  VARIANT 81: note = Ancestral polymorphism is F, Derived polymorphism is S
  VARIANT 65: note = Ancestral polymorphism is T, Derived polymorphism is I
MPSAPAAPPTPGRPRPLPRPAPDAPSPRRPPPPRSSRPPPRPSPPSAPPAPVEIFLTYYGQDLITASSIHSLQPCKGILLFGPPGTGKTMLAKAVATEAGANFINISMSSITSKWFGEGEKYVKVVFSLASKIAPSVIFIDEVDSMLGRRENPGEHEAMRKMKNEFMVNWDGLHTKDKECVVVLGVTNRPFDLDEAVIRRFPRREKILKVILAKEELGSDVDMDSLANMTNGYSGSDLK

SEQ ID NO: 11421 - protein, 447 aa, Zea mays
  VARIANT 20: note = Ancestral polymorphism is R, Derived polymorphism is S
MDDDDLHGNGKNKPLPPTRRRCYCCSCTTAATLLMFLLTNAVSVAVVSSGAGSSLLRRYGGGYRPAATIVRLWDGSAALHADLNATQAALAAGRADLADLHARVRTANELLRTLLHAMREELSATGGGEWKREPAGELRLAVGVGPRHHDVTEAAVPVLGHACVRVQDDLERYMDYAPGGECPSDEQLAHRLMLSGCEPLPRRRCRPRSPKGYPQPAPLPRSLWTTPPDTTVVWDAYACKSYSCLAAARGNITGCGGDGDGGSCFDLRRGRGRWARDDGALSYSIDAVLRARPNGTVRIGLDLGGGSPSGTFAARMLERAGATVLTAAVDSGAPFGSFVASRGLVALHVTPAHRLPLFDGAMDIVHAGHGLGAGDMLEFALYDVYRVLRPGGLFWLDHFVCAAMQLNATLAPMLDRVGFRKLRWNTGHRGKEKDQWYVSALLEKPMT

SEQ ID NO: 11422 - protein, 155 aa, Zea mays
  VARIANT 20: note = Ancestral polymorphism is F, Derived polymorphism is S
  VARIANT 58: note = Ancestral polymorphism is A, Derived polymorphism is V
  VARIANT 68: note = Ancestral polymorphism is A, Derived polymorphism is V
  VARIANT 88: note = Ancestral polymorphism is P, Derived polymorphism is L
  VARIANT 124: note = Ancestral polymorphism is A, Derived polymorphism is G
  VARIANT 143: note = Ancestral polymorphism is L, Derived polymorphism is P
MGIGEHFEGVKQHWASNFAFLDYYKKVYGRAEPLPKWSDADVDEFIASDPVYGPQLKALRESRKFALAGAFAGAAHLGGVALKYSKAPHGVVLATGFGAITGAVLGSEVAEHWYQLYKMDKQGANLRFIYWWEDKVSGPSCPPCHLVLSDDPVPV

SEQ ID NO: 11423 - protein, 263 aa, Zea mays
  VARIANT 48: note = Ancestral polymorphism is F, Derived polymorphism is Y
MARGKVQLRRVENPVHRQVTFCKRRAGLLKKARELSVLCDASVGIIVFSAHGKLYDLATTGTMEELIERYKAASAGEATTDGCGRHNRMDPKHETTVLQQEINLLQKGLRYIYGNRANEHMNVDELNALERYLEIWMYNTRSAKMQIMAQEIQALKSKACQNPVHINSTKTRGFQHPFTSLKVSACTQEGMLKAANEILQEKIVEQSSLLDVGMVVADQQNGRFSTVPLVEEALDKPFRSAPGIVSSCLLLLQNEEILSIEEI

SEQ ID NO: 11424 - protein, 397 aa, Zea mays
  VARIANT 42: note = Ancestral polymorphism is P, Derived polymorphism is L
  VARIANT 54..397: note = Derived polymorphism lacks residues 54 to 397
  VARIANT 68: note = Ancestral polymorphism is L, Derived polymorphism is H
  VARIANT 135..397: note = Derived polymorphism lacks residues 135 to 397
  VARIANT 154: note = Ancestral polymorphism is R, Derived polymorphism is W
MAGRLSAPVHRLPPVHAAQCSAEMQGGHSQMRAVVEGIVWSPTLVLTLVAVSAQRSHILIEATDHGFLLGSSYDCERQREVFKVTAWCSSPNSIPREFKLEIVDPVTTDGGMLRRSTVYPIRVSVKIIDRPNMLQSLQPSPPLAEDDPDQGRRRRRRRSRRSSFGITAPRKSSTAVVLPRLSVHQRLGPRVQSFVKEGVRVPRLPVHKRLGPLGIFNAEKGAFKKVKRVCIPKRRLKSSVSVWIPKTSSAFVSPLPAAVDDALLEATSSIVVTEDALAGSPSTVLCQEVIPVDVGACSEAAIISDAIGDVLATYPLSSQSRIPMVESELQDVTVYSGGVGLPIVESKLQDLHLMESSLTRNHLMSPSLLVYSRKRPQKIQLIDDIAENGSVGLQQML

SEQ ID NO: 11425 - protein, 310 aa, Zea mays
  VARIANT 277..310: note = Derived polymorphism lacks residues 277 to 310
  VARIANT 194: note = Ancestral polymorphism is R, Derived polymorphism is W
  VARIANT 167..310: note = Derived polymorphism lacks residues 167 to 310
  VARIANT 124..310: note = Derived polymorphism lacks residues 124 to 310
  VARIANT 75: note = Ancestral polymorphism is A, Derived polymorphism is T
  VARIANT 69: note = Ancestral polymorphism is A, Derived polymorphism is T
  VARIANT 64: note = Ancestral polymorphism is A, Derived polymorphism is T
MSNWFARAVERIGRARHPNLVTLVGACRSARAVVYELVPGGSLEERLDPGGGSGSAAPPLPWHAWCGVAYGACSALAFLHSTLPRPTVHGDVRAANILVLEDNTPHGWSCKLVGLGTRGLVEKREQPRPSAADGPYSDPWRPAFLARKAAREAVDGRASWQEVAGGWPTERAREVALLGLRCCGVDVEAEQRLRLPAALLLEEARGVLEAAVSAKPSRSPSSLSESDSAPSYFLCPILKEVMRDPQISSDGFTYEAEAIREWLRSGQGQRWHAHHSQADEILGAEEDFALAPRRGWPSKEGASSKEAAGA

SEQ ID NO: 11426 - protein, 180 aa, Zea mays
  VARIANT 34: note = Ancestral polymorphism is P, Derived polymorphism is L
  VARIANT 62: note = Ancestral polymorphism is G, Derived polymorphism is R
MTKMEGSTGSVQIMSRRLVQPESGSSLDMVPSELEIVHLTAWDLALFTVGHIQKGILLPKAGTGGAQLVDDLASSFASVLGHFYPLAGCLTASEITNGVVSPSLAITLCCNDKCTKFIHAMAPEVTISRVVLPAEQAAECGSTHGLHPCAGHVDELLLSHWGSDENTLGSYTFDGGEQTP

SEQ ID NO: 11427 - protein, 769 aa, Zea mays
  VARIANT 296..769: note = Derived polymorphism lacks residues 296 to 769
  VARIANT 410..769: note = Derived polymorphism lacks residues 410 to 769
MGCVSSKQFHGGDDHGDGKPRRRPSSNSLKRLVSYSSSKRHEELEEEDEVGAAVAATSSSGGRRAGNDASTARLIRKPPALVVEAVPALSEEAATLAVGVVDAERAVAAATGNRKRPPADVHINGAAEQGLSSVGVRTEGEAKPRIRDVPNGVQGEHVVAGWPRWLTEVAAEAVRGWQPRRAESFEKLDKIGQGTYSSVYKARDLENGKIVALKKVRFANMDPESVRFMAREIHILRRLDHPNVIKLEGLVTSRMSSSLYLVFEYMEHDLAGLAATPGLKFSEPQVKCYMQQLLSGLDHCHNRGVLHRDIKGANLLLDNNGILKIADFGLATFFNPKQKQHLTSRVVTLWYRPPELLLGATNYGAAVDLWSAGCILAELLSGKPIMPGRTEVEQLHKIFKLCGSPSEEFWANLKLSRATIFKPQHPYRRCVNDVYKDFPTTALTLLDHLLAVEPGNRGTAASALDSEFFTTKPYACDPSSLPKYPPSKEYDAKLRDEEARRQRAAAKGQEAEAGRRKQPPAPDGNSGLQVLGIHLKYQAVYINFQHRRVQMNPKSSSYKFTPKEDAVSGFPIDPPARAAADNGYPQRVPLMQAGRSSSTLGRSSGMDPKAQRFHTSQIVTTEMSGQSTASGQRGNAPKMSNLGESARRQYLREHRSSSRYSQLTAADPSDRPEWNHQFQERPSSSHRKDDAVANKEHTVVNGTKKNRIHYSGPLMPPGVNMDEILREHERQIQQAVRRARLDKGKGKHSGERDQSESLLCTTGNLRADR

SEQ ID NO: 11428 - protein, 238 aa, Zea mays
  VARIANT 194: note = Ancestral polymorphism is V, Derived polymorphism is M
MQCLVRNVCRAGSRGAAARLLELAAAGPGATQPSVAVKLLRPPYEFTRPIGVVQPVRVQSRAVSRDGLVPAAATSGFGLCAQVIVAMRGLSTVGSAAEVASDSDDSTSPAVEHPPRIKFKRPDKTARHIMNILNKEAVEKVRSEREIPDVQPGCIIQMRLQVPENKRRESTLKGIVIGRRNAGINTTFRLRRLVAGVGVESVFPLYSPNIKEIKVLDRKKVRRAKLYYLRDRMNALRK

SEQ ID NO: 11429 - protein, 480 aa, Zea mays
  VARIANT 357: note = Ancestral polymorphism is W, Derived polymorphism is G
MEGATGCGVHVVSRRMVRPFTPPPPPAVNGNGCNRPKEETEVIHLAPWDLRLLSIDYIQKGILLPKPPSEGDDNDLHLVNALRSSFARALRIFYPFAGRLTSEERADDGTVSVFLRCTGEGAEFVHAVAPEVAAADIVSSLYTPPVVWKFYPLALVLGADAAIERLPVLAAQVTVLADSVFIGMTLNHSVGDGTAFWHFFNTWSEINRATGGGADLSTPPPVFGRWFPEACPVPIPLPFRRLEDIVRRFERTEVKECFFTFSAASVRKLKARANDEMAGSATATISSLQSVLAHLWRAVCRARRLPPEHGTFYSVVVGCRGRVDGVPPGYVGNAMVFGRAEATAGEIEEKGLGWTAWLLNRAVASFDEAAVRESLERWVGEPDFTYMDNLSSAGTALVTGSSPRFDVFGNDFGWGKPLAVRSGSGNKADGKATVFEGPERGGSISLEVCIAPDALQRLVADHEFMDAVSTYVRRHDELDA

SEQ ID NO: 11430 - protein, 706 aa, Zea mays
  VARIANT 296..706: note = Derived polymorphism lacks residues 296 to 706
MADADDAPPTPPPEVVAPEEHPAVAESAVAAQQEGAATAQVDNKRKLEEAGADAEANGTGEDAKRPRVDGEPDAATGIEQQNDGSSVNVSVNVEEPAAAEEDKVAPTDGAATDGDNDTAAPATDSQAGSDDKPLEAAAEAPQPESDAAAVAQEISRMIEVPNSRVGVLIGKAGETIRNLQMSSGAKIQITKDADADSNALTRPVELVGTLGSVDKAELLIKSVIAEAEAGGSPALIARGFGSGQPGSEQFEMTVPDNKVGLIIGKGGDAIKGMQTKSGARIQLIPQHPPEGVTLTERIVRVTGNKKQIELAKDLIKQAMNQTFSRHTNQSGGYGPQGYRPQGQGAASQWGPRSQNHGYGYPPRGMPPPQNYNTPYGSYPPQQGPPRGGMGWDQRQGPPPHPSYQGGASDYYKQGSQPYDSQPPSYPPGPGNYNSYGQSQGPNYGQPQYPQHAPQQNYSHGYGDPRYNAPPPNQQYYGQPPMGPQQGYPQQPDPYARPPYSGPGQWPPRGAPAADGSYQAPAASYGPPSQHPSAYGQTYSAATGSDGYAQQGYPQQGGQAPAPYGQSAPAAPGYPQQQGGYAQYPQTQPAYGEQAAQTNASYGYQGAPADPNYGSAYPQPGYGPPGQATGQAGYASSAASQPAYGQAGYTQPPTNPPGYEQSAAPATTQSGYAAPPANPQQPAAAKGVSPQPGGGAAAYGAGGQWTA

SEQ ID NO: 11431 - protein, 882 aa, Zea mays
  VARIANT 845..882: note = Derived polymorphism lacks residues 845 to 882
MDNLSPATLLNSISCLGALTSDVSTARPKPIHKYCKNVYDISSIVTPLLEDLCKSPEEQLDEVLRDLDTAVNEASGLIGNWHQTTSKMYFGWRIESVISDIQGCSLQLCQLVNSLLPSLTARACMCIEKLQDINHEHVFDLVKEVAMELAATSAVSSVNLLKLSSLLSLSTNMELYTEAVSLENLKTRALRCESREELDLAEQMIPLVNYMHDHLLKEKQQLSINGVPIPADFCCPLSLELMSDPVIVASGQTYERVYIKLWLDEGFTICPKTLQRLGHSNLIPNYTVKALIANWCESHDIRLPDPMKSLKLNFPSAASFLEDLSAADGSPLHPIVVSRANIPGSPEVDVYLRNLNGASPPHSLVNQNSHAHANRHGHEVSTSQTSEKTNGSVPDVSRLSLASSEARESSLEGRRGGSIGQISEHSTEEAFQSSNLDRDLQDNLANSSLNGSLPNSGQLDGECDNGVTRVPSDRTNYSSDASGEVTNGGGAPVASSVPQREHLIPPRLGMGTKQFIRRQPSDRGFPRIISSSTMDARSDLSAIENQVRKLIDDLKSDSIDVQRSAASDLRLLSKHNMENRIAIANCGAVNLLVGRLHSPDAKTQEHAVTALLNLSINDNNKIAIANADAVDPLIHVLETGNPEAKENSAATLFSLSVIEENKVKIGRSGAIKPLVDLLGNGTPRGKRDAATALFNLSILHENKARIVQADAVNHLVELMDPAAGMVDKAVAVLANLATIPEGRNAIGQARGIPALVEVVELGSARGKENAAAALLQLCTNSNRFCSIVLQEGAVPPLVALSQSGTSASELLPQPKTWEFSKEIAFCFFPFFVVVYIKRCILCPSSRLGSCLLLLIGTGRCVGWNYAVPCALFIDGDCYAHLM

SEQ ID NO: 11432 - protein, 339 aa, Zea mays
  VARIANT 53: note = Ancestral polymorphism is L, Derived polymorphism is F
MEDLSVEELASNLSTYKEQLREVKKLIKEKKDDAGISEYIDMEKELQEVSSFLILSCNVIPHARVATRLYYYKFRCCCCCSKLDLEIWAHVITLTEEILATAKQTESAQNVAGLSPPSYSAGVQSEGLDDLSHSHKFAVGTRVQAVWSEDGEWYNATVEALTPNGYYVAYDGWGNSEEVDPDNVRLLEEEAADALGQAEKEAEATKMAIKRKIEQAATSDFQARSLPAKLRIEPSDPEDVKAAKRKKIHAFKSKSRFEQLEFAQNKRQNAWQQFQTKGKAKKVGFFSGRKKESIFKSPDDHRGKVGVTGSGKGLTDFQRREKHLHLKGGSGDAADDDEE

SEQ ID NO: 11433 - protein, 233 aa, Zea mays
  VARIANT 70: note = Ancestral polymorphism is Q, Derived polymorphism is R
  VARIANT 58: note = Ancestral polymorphism is R, Derived polymorphism is G
MKLKQEQADDDCSKMQGGRGLMSSLELRLGMSSDNGDASCGGDPWLGVGVHPWSLASRQAEKVALEQDHQQRSPPQPVGWPPVGAFRRSHLQVSSKTVEEPAGKVKSGGERLAPAATMFVKVNMEGCAVGRKVDLLAHRGYASLSRALQAMFRGFLSDGQWRIVGSEDDADDDNEQQPEPTKKGGSKSNKKAYILLYEDNEGDRMLVGDVPWELFMASVKRLYIAQDPRKTKN

SEQ ID NO: 11434 - protein, 398 aa, Zea mays
  VARIANT 287: note = Ancestral polymorphism is R, Derived polymorphism is W
  VARIANT 70: note = Ancestral polymorphism is G, Derived polymorphism is R
MAAEMVKAATSDKLKEMDWAKNIEICELVAQDPGNAKDVIKSIKKSVGSKNKSTQHFAVMLLEMLLNNCGEPVHRQVVDNSLLPILVKIVKKKTDLPVREKIFLLLDATQTSLGGAKAKFPQYYEAYYELVSAGVQFSNRPNVVVTRAEVPVPETRTEPNNVSLSARLHEAQQEVHTQPALDTSIVQKACSVMEVLRDVLNSMDPRHPEGATDEFVLDLVEQCTFQKQRMMHLVMTSRDEMVVSQAIELNEELHKVLVRHDVLLSVHPTTTVASNINEEENAESLYRRLRKGKALSQDYTDDSVPSFRSMPEDKLRRPLTIQSPHPDKRLGALNIHLPDGEEPRHDPAPLIPPPPAKHAERERFFQEKSIDEHRRRSGQPAGSPEGPVAAQPGQQQLV

SEQ ID NO: 11435 - protein, 405 aa, Zea mays
  VARIANT 350..405: note = Derived polymorphism lacks residues 350 to 405
MEAFLAGLFRAPPRAVPAPRGTPLPSLPLFYGRRRRRPSSSVVCMAEPYLIAKLDSAEKAWKEMSVRLADPDIVSDPSEYQKIAQSVSELDQVVTTYRQFKDCERQLEATKALEKENEGDPDMLEMIASELEALSNQLAELEEKMKFLLLPSDPLDSRNILLEVRAGAGGDEAGIWAGDLVRMYQRYCERNNWKFKPVSCSEAEMGGYKTYVMEVKGKQVYSKLKFESGVHRVQRVPLTEAMGRVHTSTATVAIMPEADEVDVVIDPKDIELKTARSGGAGGQNVNKVETAVDLIHKPTGIRIFCTEERSQLQNRERAFQLLRAKLYEIKLREQQESLRNQRKLQMINAQIEQSSSVVDIFENILCYDGAAGAVGGNGQFRGRSKRMIQANSALRPGHQTEPRNS

SEQ ID NO: 11436 - protein, 287 aa, Zea mays
  VARIANT 173: note = Ancestral polymorphism is R, Derived polymorphism is Q
  VARIANT 178: note = Ancestral polymorphism is I, Derived polymorphism is V
  VARIANT 205: note = Ancestral polymorphism is K, Derived polymorphism is M
  VARIANT 209: note = Ancestral polymorphism is R, Derived polymorphism is H
  VARIANT 274: note = Ancestral polymorphism is G, Derived polymorphism is E
MNNITQHNSSSSWDLDMSLGTHHHPLLFDSHPNPGPPPPPLSFHLSSSSHHPPAPHPAHHHPSLGPSLSSSLFPQPPHHHHHRLHRLGLDIDDPSSHSHGHRGNDELEEMRKQHEAAAEHVDEELGAMKEMMYRIAAMQPVDIDPATVKKPRRRNVRISEDPQSVAARHRRERISERVRVLQRLVPGGTKMDTASMLDEAIRYIKFLKRQVQELQHPAHAAAGAGAGPSVSAVGGLPLIDWAGLVRPVDIHGPTSPSSSSSMGGAGAHAALGFGFSSAGGQSSHGMH

SEQ ID NO: 11437 - protein, 222 aa, Zea mays
  VARIANT 19: note = Ancestral polymorphism is M, Derived polymorphism is I
MATTKKEKVILVLLFSLTMLPLSTLGTRSGPAAVQHHGHGGTTKHPSPPSPATAALVRSTCNSTAYYDVCVSALGADPSSATADVRGLSTIAVSAAAANASGGAATAAALANGTGTAASSSNAQAAPATASAAAALLRTCAAKYGQARDALAAAGDSIAQQDYDVASVHVSAAAEYPQVCRVLFRRQKPGQYPAELAAREETLRQLCSVALDIIGLASTNTN

SEQ ID NO: 11438 - protein, 653 aa, Zea mays
  VARIANT 407..653: note = Derived polymorphism lacks residues 407 to 653
  VARIANT 289..653: note = Derived polymorphism lacks residues 289 to 653
  VARIANT 262..653: note = Derived polymorphism lacks residues 262 to 653
  VARIANT 224: note = Ancestral polymorphism is P, Derived polymorphism is L
MPIEMPRGLPFAVDTWTPASALKRHRFLTHAHRDHLAGITATSAVSASSSPVYASRLTILIALRIFPQLDRAAFVELDVGQPPLRVPDPDGDFTVTAVDANHCPGAVMFLFEGPFGDVLHTGDCRLTPDCLSALTSHLARRIDYLFLDCTFARCSLRFPATQDSIRQVIDCVWKHPSAPVVYLVCDMLGQEDVLVEVSKAFGSKIYVDREKNSDCHQRLAHVAPEILAADDAAPSTRFHVLPFPRLSERATEILAQARAARQPEPLIIRPSSQWYAYYDPPPPEEASTQQQQKPVLTEAMRDEFGVWHVCLSMHSSREELEQALGILKPKWVVSTTPPCMAVDLSYVRKHCSLSRFGPDDPIWKLLGISDGMSTVTSSAQAVLLTVEAVEKREEVFSACAPSDDISQAPEEGAEAAVVDFEVRVEPPVTLFGSARFGLPQHEPELWNYEYESAEIIGDDELEAKDSATELEFCRHSKPIQVVGLTEAATREHNPICDESELLNDIKSDDGVEVVDLTEGGKKGVETEHDRGNTAAELGAQEQNLNARARLTAGVCRHKMTTDEGTEATEGMVSAAHVLEDGTTATPGTGRSTDHQYSERASDSSTVVGSSKGLNASLRRLYRSMNVPVPRPLPSLVQLMAASKRPRVSQTAQL

SEQ ID NO: 11439 - protein, 420 aa, Zea mays
  VARIANT 265..420: note = Derived polymorphism lacks residues 265 to 420
  VARIANT 230..420: note = Derived polymorphism lacks residues 230 to 420
  VARIANT 106..420: note = Derived polymorphism lacks residues 106 to 420
MGSRVLHLDVPANSEAYLMRNVPGSVSSPPMNGEKGLFRNQNAGFTALASPVRREIGNRHIVITEKRHSQTLSCLCNEISSTRSFCVDDNDLEDGKASKERESSAQSLRLPKIQNQALLSGLAYCISSCSMILVNKFVLSSYGFSAPVFLMLYQNIVSVTIVSTLSLSGAVPTEPLTWNLIKVWLPVNIIFVGMLITSMFSLKYINVAMLTILKNVANVLTASGETYFFKKQHGTQVWVALMLMIISAVAGGITDLSFHAVGYIWQTLNCVLTAAYSLTLRHVMDSAKQVTKSGNLNELSMVLLNNVLSLPLGIILVLGLNEMEYLLQTSLLRMPEFWLVITASGVLGLGISFTSMWFLHQTSATTYSLVGSLNKIPLSIAGIVLFNVRTSVQNSLSILFGLLAGVFFARAKLRDNSPTL

SEQ ID NO: 11440 - protein, 724 aa, Zea mays
  VARIANT 5..724: note = Ancestral polymorphism lacks residues 5 to 724
MKQRQPMACNRRRKLLCACLLLACAAPAAAAAVNISVYWGQNSNEGSLGQTCSSGRYALVAMAFLSTFGSGQTPVLNLAGHCDPASGGCTALAADIAACQARGVRVLLSIGGGAGSYNLSSASDAESVATYLWDNFLGGTSSSRPLGDAVLDGIDMDIEISPSSHFDGLARNLTSLYGGDRRGRKYLLTAAPQCPYPDASLGAALATGLFDHVWVQFYNNPGCEYQQKDGDGVANLAASWKAWTQSLPSSASVFLGLPASPAAAGSGYVPPDDLVSRVLPAVSGSANYGGLMLWNRYYDNSTGYSARILSSITADRPNSSPVPGGSGDESPPPDNSPAPPPSTGRSRKRRIKTYIIAGTAGVSGLCAIIALAALMWWYKRRYGMVIPWRRGVSGVESFLQKQGALLHPKGYTYSEVKRMTRSFAHKLGQGGYGAVYRGSMPDGREVAVKMLTGMLEGDGEEFMNEVASISRTSHVNIVTLVGYCLQGPKRALLYEYMPNGSLERYTFGSSSGEDALSWDRLFGIVVGVARGLEYLHTGCNTRIVHFDIKPHNILLDQDMCPKISDFGLAKLCGQKASRVSIAGARGTVGYIAPEVFSRSYEAVGSKADVYSYGMVVLEMVGARKNVHVSATDDGGNSSSSRYFPQWLYENLDQFCRPTTTSNGEIRGDDDDATEVLLVRKMVVVGLWCIQSKPDSRPSMGQVLEMLESNAADLQLPPKALCTAY

SEQ ID NO: 11441 - protein, 695 aa, Zea mays
  VARIANT 164: note = Ancestral polymorphism is V, Derived polymorphism is A
MPKMFGFSRRRMKLGRLKGHLHDHFHGPRSPSRTTKRSSSHHNAEDPLATSVSGRADDLAWRCSSDTFDLNGRDFESSENWAVLSTEGDKPAPRFDHAAAMVGSKMVVFGGDSGQSLLDDTKILSLDKLTWDSVAPKVRPPLNGRSLKLRPCRGHCLVSWGKNVILVGGKSDQPYDKISVWTFNTESELWSHMEAKGDIPVSRSGHTVIRAGPVLILFGGEDAKGKKLHDLHMFDLKSLTWLPLNYKGAGPSPRSNHVAALYDDRVLLIFGGQSKSKTLNDIHALDFETMVWSRVKTHGHHPSPRAGCCGALCGTKWYIAGGGSKKKRHPETWVFDVLESRWSVCVVPPSSSITTKKGFSMVPLYYRDKIVLVAFGGNKKEPSDKVEVLVVLQNEHCFSWRSAPEVEPLLYDESPPGSRELADHLSSCAPPYPTSSAARSGLAATAENSCGRKPLPDSLLRTSNLGGSSLRRQFRQEEECSSLAQKLQKPIDDDRYKDAADECSEHQPPSATNPKPRNDARRSSPEVVVDAKARRLLGRSSSDMNNHQDARVAALVRRNVALEEQLSAALASKDEAEKNLSLVIDSKDGLEKRLAEKDREVEALREKATGLELAQEEANSLSNTVHADNVRLEREVAFLKAVMDETQKELHSTRGVLAGERARAFQLQVEVFHLKQRLQTMEGRSPAAPRKPQNA

SEQ ID NO: 11442 - protein, 405 aa, Zea mays
  VARIANT 22: note = Ancestral polymorphism is A, Derived polymorphism is P
  VARIANT 158: note = Ancestral polymorphism is S, Derived polymorphism is L
MACPRGRTPFPLCFFLMICLMAQLGASNVVLMANNTTLSLDDVEATFSGCYTLLHYLHVSLYMSIKNLAYLTLFILPAAPAVEGSGVSGVLYAVEPKDACSPLRAKAIQGSVSPFALIIRGGCQFDDKIRNAQNAGFKAAVVYNNEDNDILVSMAGSSLGVQIYAVFISKASGEELKKYSGQTDAELWIIPTYENSAWPIMAISFVSLLAMSAILVACFFARRHQIRRDRARLPRAQESHGMSSQLVKAIPSLIFTKVQEDNCTSATCAICLEDYSVGEKIRVLPCRHSSSILRTPDSRFDANSSICTSGSNLDLANVPSPCRYVGSSRMSHGSSGQQHPHLRHCTLSGPSLFTMVPQSPQQNQLQHGGYSETNLSAAASAQSFRQLYLQHCPDSDTSSQSLPGC

SEQ ID NO: 11443 - protein, 281 aa, Zea mays
  VARIANT 229: note = Ancestral polymorphism is S, Derived polymorphism is Y
  VARIANT 225..281: note = Derived polymorphism lacks residues 225 to 281
  VARIANT 207: note = Ancestral polymorphism is C, Derived polymorphism is Y
  VARIANT 193: note = Ancestral polymorphism is G, Derived polymorphism is R
  VARIANT 179: note = Ancestral polymorphism is V, Derived polymorphism is F
  VARIANT 81: note = Ancestral polymorphism is P, Derived polymorphism is L
  VARIANT 55: note = Ancestral polymorphism is W, Derived polymorphism is L
  VARIANT 24..281: note = Derived polymorphism lacks residues 24 to 281
MVAELTPFLLCLDRFQGQPLYKLRPSKFRAAIEEAFLAERGFFYLQTDEVVAGLWILSVHGSCCNFLTLSYIVFVVLYTVLVLYEHLLLSRNCRPPPHLEDRRAVRRGGPSQATTTTSVVASKTSRHRCDLKPSSMPIKVCVLVVFLPHAFDGPRSICSTPLVCSLFRNIGHRCALKRFMVNDIHNRDGFVLGTSRGGHDTAKIIDCLQDRDTNQIYIIEGDGIQKGASVIDKSFGFHAAVEEAQRALNAAHVEAESVDNGIGVVKLMGHNCCFTAVCFSS

SEQ ID NO: 11444 - protein, 110 aa, Zea mays
  VARIANT 85: note = Ancestral polymorphism is G, Derived polymorphism is W
  VARIANT 67: note = Ancestral polymorphism is G, Derived polymorphism is E
  VARIANT 62: note = Ancestral polymorphism is A, Derived polymorphism is G
MDRVAKLASERAVVVFTASNCSMGDVVTSLLSSLGVSAAVHELDSDPRGQEMERELARRLGGGSAAERGTTALPAVFVGGSLVGGTNRVMALHLAGELVPMLKSAGALWL

SEQ ID NO: 11445 - protein, 111 aa, Zea mays
  VARIANT 87: note = Ancestral polymorphism is T, Derived polymorphism is I
MDHVARLASERAVVVFTASNCSMGDVVTSLLSSLGVNAAVHDLDRDPRGMEMERELARRLGGGGGRGTTTTPTVPAVFVGGDLVGGTNRVMALHLSGELVPMLRKAGALWL

SEQ ID NO: 11446 - protein, 359 aa, Zea mays
  VARIANT 82: note = Ancestral polymorphism is G, Derived polymorphism is C
  VARIANT 3..359: note = Derived polymorphism lacks residues 3 to 359
MAWLRRTETLVLLLVVLLASASTSAAAAAAGEEEERVIRLKHSDGGYSYNHTLAHILVEYASAVYTSDLTSLFSWTCPRCKGHTKGFEVIEIIVDVENCLQAFVGVAPDPRSIIIAFRGTQQHSVSNWIEDLFWKQLDVTYPGMPDAMVHHGFYSAYYNTTLRYEILKSIKWARKTYGNLPINVVGHSMGGALASFCALDLSVKFGSQEVELMTFGQPRIGNPAFAVYFGEQVPRTIRVTHQNDIVPHLPPYYYYLGEWTYHHFAREVWLHESIDGNVVTRNETVCDDSGEDPTCSRSVYGMSVADHLEYYDVTLHADSRGTCQFVIGAANQVYNYVREVDGSIILSRYPQEPQALESM

SEQ ID NO: 11447 - protein, 155 aa, Zea mays
  VARIANT 139..155: note = Derived polymorphism lacks residues 139 to 155
  VARIANT 83: note = Ancestral polymorphism is H, Derived polymorphism is Y
MAAAAAALVSSNSLRAPAAFSVVVRAASRPAPVVAVVTPLPAAKAAAARGARLRAQATHNVKLITPDGEVQLKMPGDVYILDHAEERGLDLPYSCRAGACSSCVGKIVSGSVNQFDQSFLDDDQVAEGFVLTCIAYPTSDLVIQTHKEDALVESY

SEQ ID NO: 11448 - protein, 269 aa, Zea mays
  VARIANT 55: note = Ancestral polymorphism is L, Derived polymorphism is S
  VARIANT 35..269: note = Derived polymorphism lacks residues 35 to 269
  VARIANT 7: note = Ancestral polymorphism is M, Derived polymorphism is K
MTELREMDKDGSSERSRPDHGDVKKLKFRPKVPPQKQKPQQEDPKPIDEEVMKILRVDSPSGCKKCTKHRRLINLSYVLSVVLFLCQMNPLQIPRSFPVPVNSGLVYEEESCDDDDDNDSDNVGLLETQPDSIESEALTCPAEELDLLQQEGSKERMFFFQFPKSLPLPKRSSSAGKEVMEGSNLQQLPQGYLGKKAVNLSQVADNTGPFLCIQYTLSIMGPVMDALVVVRRVSVELRMIITSTSSAHLRKTSLRKCLKEWNGEPLSIC

SEQ ID NO: 11449 - protein, 566 aa, Zea mays
  VARIANT 208: note = Ancestral polymorphism is S, Derived polymorphism is F
MLAVARDGADLILSLPEDVLALISAHLRPRDLLALSAASRRLRRALSADKAWLAQCRRLLPSQPHLLAWRAAAAGSSLAVCRFLHSAAPLLGLWAHQNPELGNLVAAVPGFLSVVAARAIPQELSPRLRWAPVFELLADAHGRPALLFLHGHHHAHLFPGLLASLQPHANVIFLEAHIARDPFASSSSSSPHRFARLSFGDRRRLLDSLVAACRVTLPPDLVDAPLFACSEDDLPLLAARREAMLRLHRESAGGMVRTPEVQGLLLEARKKATTTTTTDGGHRIPLRRSLSAVAGYFRNGLRQMVTRSVSANSRADNVDAKHLSLSDFLHDGESVGLSLRGARMRLSTYRAWPSMHDNRFALYKLRVQAPMPGREYAGLWGGTFGWPPGRPDDGCKPKKALFFLLLSYEEDSEGKLQLIATKVLEGTHYVVHPNGSSMFITRMSEPSTEPFPWQTDGEFDVERSFAGEGIANGYGFRYPSSKPGSLFVLQNGLLAFVWRETGAVLTLQRLDLDELLKKGERVPALQPVPNFAYLTKSYSNVFTSFPVGAASPRIILTFENSAGQIC

SEQ ID NO: 11450 - protein, 179 aa, Zea mays
  VARIANT 114..179: note = Derived polymorphism lacks residues 114 to 179
MGHEAAAPGSSVLGRAVEEVRSALNEHADVVADLFGRVSSEVRTGFAPAVDSFVGFFHAVDWKEPWLISILSFHAILLLVTIISRRNINFQLILSALTFSGVFLAERLNTFLAQNWKSFSTQNYFDPQGLFISVIWSGPLLLITILILVNTLVTLCTLMVRWKRAELRHRARQARDKQD

SEQ ID NO: 11451 - protein, 264 aa, Zea mays
  VARIANT 41: note = Ancestral polymorphism is A, Derived polymorphism is V
  VARIANT 54: note = Ancestral polymorphism is E, Derived polymorphism is D
  VARIANT 67: note = Ancestral polymorphism is V, Derived polymorphism is A
  VARIANT 68: note = Ancestral polymorphism is T, Derived polymorphism is I
MVAAGRNRAERWNLAGATALVTGGSKGIGHAIVEELAGFGARVHTCSRNAAELEECRRRWDEKGLQVTVSACDVSARADRERLVATVGATFGGRLDILVNNAGQSLFKRTAECTGEDYSRIMATNLESCFHLSQLAHPLLRLASGGGGGSVVHVSSVAGFVGLPALAVYSMSKGALNQLTRSLAAEWAGDGIRVNCVAPGGIRTDISSDKTIDPELAKREMARVPMGRIGEPEEVASMVAFLCMPAASYMTGQVICIDGGRTIA

SEQ ID NO: 11452 - protein, 284 aa, Zea mays
  VARIANT 69..284: note = Derived polymorphism lacks residues 69 to 284
MDTSGAGHRVVTNDWMILRYRIKHKKVDIRALKKWSRQILSGLVYLHNHDPPVIHRDLKCDNIFVNGNQGEVKIGDLGLATILDNACSAHSIIGTPEFMAPELYDEEYNELVDIYAFGMCLLELVTFEYPYCECSNAAQIYRKVSDGEKPGSLAKIGDPEVKLFIEKCIAKVTKRLSANELLMDPFLLDVSDEKIFYPVHPNINTTDTGSPKPSSSFRYDGVASSAGRHDRSGHAQNIHFPFDSEADTSISVATEMVVQLDLTDQDVTAIAEMIDVEICSHIPS

SEQ ID NO: 11453 - protein, 449 aa, Zea mays
  VARIANT 74: note = Ancestral polymorphism is L, Derived polymorphism is Q
  VARIANT 207..449: note = Derived polymorphism lacks residues 207 to 449
MDSESEEQGSSPETESDPPPSPSQLPLLLNPAYARCKSVVHDELRSFRVFLQWCALDHSTCAGRAASYAVFVALALLVPAAVSLSLRADTALSRASASAIAFNRVAQAPATGLAVVSFATLAAFFRRFGGLRQLLFLDGALRDDTAFVRRGYARELDRAFRTLAALLLPSLCVEAAHKAVFFFCTVRVEPPAAVLLPFATPPLVLPWRAVALVATVASWVYRTGVFLLVCVLFRLTCELQILRFEGIYRMFDVEARPTAAEIFAEHRRIRTQLLATSHRYRVFILCCLVTITISQLGALIVVLSSRDAKSFSNTGDLVVGSAVQLSGFFMCLLGAARITHRAQRIVSIASQWHMSLESSSTHNCKSSSASDAVDASSHVSGSSTAAVSQLAEPSAPCSYSSRQALVTYLRHNGGGITLFGFTLDRGLLHTIFVFEMTLVLWILSKVVVF

SEQ ID NO: 11454 - protein, 200 aa, Zea mays
  VARIANT 174: note = Ancestral polymorphism is P, Derived polymorphism is S
  VARIANT 155: note = Ancestral polymorphism is K, Derived polymorphism is N
  VARIANT 154: note = Ancestral polymorphism is G, Derived polymorphism is R
  VARIANT 123: note = Ancestral polymorphism is R, Derived polymorphism is W
  VARIANT 87: note = Ancestral polymorphism is P, Derived polymorphism is L
  VARIANT 38: note = Ancestral polymorphism is L, Derived polymorphism is V
  VARIANT 35: note = Ancestral polymorphism is P, Derived polymorphism is L
  VARIANT 34: note = Ancestral polymorphism is D, Derived polymorphism is G
  VARIANT 33: note = Ancestral polymorphism is E, Derived polymorphism is D
  VARIANT 29..200: note = Derived polymorphism lacks residues 29 to 200
  VARIANT 28: note = Ancestral polymorphism is A, Derived polymorphism is T
  VARIANT 25: note = Ancestral polymorphism is I, Derived polymorphism is T
  VARIANT 22..200: note = Derived polymorphism lacks residues 22 to 200
  VARIANT 20: note = Ancestral polymorphism is D, Derived polymorphism is N
  VARIANT 11: note = Ancestral polymorphism is D, Derived polymorphism is Y
  VARIANT 8: note = Ancestral polymorphism is S, Derived polymorphism is C
MLLQPVTSIEYVVVVEDALDDEEVTLVAQTTFEDPIFLTTIEDSPSHSMVEPVLVEDAPVDEEATLAVHGPLSMVEGNTKPRLVEDPLIEIGSSSSTRDKKDEYFACPPLAPPSHSTMTVRRWRKSYNSLPLRRSACLAQCGVFKDLDIVGIDGKPDESSIQAYTDHLKDLLPPDLLKKLLSLKCCAFWDSVVEVYFPIH

SEQ ID NO: 11455 - protein, 265 aa, Zea mays
  VARIANT 13: note = Ancestral polymorphism is F, Derived polymorphism is L
  VARIANT 17: note = Ancestral polymorphism is V, Derived polymorphism is L
  VARIANT 20: note = Ancestral polymorphism is A, Derived polymorphism is T
  VARIANT 21: note = Ancestral polymorphism is M, Derived polymorphism is T
  VARIANT 23: note = Ancestral polymorphism is S, Derived polymorphism is A
  VARIANT 35: note = Ancestral polymorphism is G, Derived polymorphism is V
  VARIANT 45..265: note = Derived polymorphism lacks residues 45 to 265
  VARIANT 64: note = Ancestral polymorphism is A, Derived polymorphism is V
  VARIANT 199: note = Ancestral polymorphism is F, Derived polymorphism is C
MAMKLFYHDKVCFEKLVKIAMLSLCSQQASINHHGFYVEHLLLVQQIIDAILVLDIDDPPCAIAAGALLFVLASDVQDNNLLSSETCVHFLLKLLNPPVNVVDAKAPSIGSKLLGIGKFQMLNGSNKDVDSCSEDILSKVEEILLSCKEIKPADRDYKRTTRPELCSKWLALLTMEKACLSVVALEDTSDKVLELGGNFKETLRQLGGLDDIFNVMVNCHSELEVRPYLCVLYLELQSDEYYFEQHEKHVARQGYVAVIALVEMF

SEQ ID NO: 11456 - protein, 224 aa, Zea mays
  VARIANT 36: note = Ancestral polymorphism is A, Derived polymorphism is V
  VARIANT 38: note = Ancestral polymorphism is L, Derived polymorphism is Q
  VARIANT 96: note = Ancestral polymorphism is G, Derived polymorphism is V
  VARIANT 105: note = Ancestral polymorphism is A, Derived polymorphism is T
  VARIANT 134: note = Ancestral polymorphism is H, Derived polymorphism is D
  VARIANT 157: note = Ancestral polymorphism is I, Derived polymorphism is N
  VARIANT 193: note = Ancestral polymorphism is P, Derived polymorphism is L
MAAAERDRERWILPGATALVTGGSKGIGHAIVEELAALGARVHTCSRNAAELEECRRRWAEKGGGLLQQVTVSVCDVAVRADREALMATVRDVFGGKLDILVNNAAQVVFKPAVECTGEEYTRIMATNLESCFHLSQLAHPLLRDASLAGGGSVVHISSTAGLLGFRGAVLYSTAKGISIEVHSIDVYKARGPLARHEARYFSTARARHDTTRIEASPGSARPG

SEQ ID NO: 11457 - protein, 201 aa, Zea mays
  VARIANT 163: note = Ancestral polymorphism is A, Derived polymorphism is D
MHDDEEKKESKTATAISIAGRIAGMGLAVAAAVLMATASQCTVYAAYGARPRTVTYTDFPPLVFLVGAASIAAFLEAIAIFLCVWKKGKDKKAKVLMPLLGAAVPALLYAATGAAFAASSNMSYCSAYGRRLNVCTADGGGSGSNFCRQVHISVYLALAAAIAVSVAEVVRGIGGTASGGGSDSDSDSSSDGCDHSCRHKH

SEQ ID NO: 11458 - protein, 203 aa, Zea mays
  VARIANT 14: note = Ancestral polymorphism is S, Derived polymorphism is L
MAAAGDGGGKSDGSSSNAACLALRIATVALSVASAVMMASASQRSCTGCSPATASQQPVSYRDYSSLSYSLVANVVSAALQALAAWLTASGKADKGKVFKSLSELVDTAAQVLLYSSSALSFSVDDFGTCGRRVAGVCKAAGEFCQRARASGAVSIAAAVALAASNYLKDVPVSTWFRAGDDGPKGKPAGCGRGGCHCRHHHH

SEQ ID NO: 11459 - protein, 482 aa, Zea mays
  VARIANT 260: note = Ancestral polymorphism is G, Derived polymorphism is D
  VARIANT 225: note = Ancestral polymorphism is A, Derived polymorphism is S
  VARIANT 70..482: note = Derived polymorphism lacks residues 70 to 482
MDFFKIKKFRKGNKSARGGGEVIESDDDASAGNVTPRGLVEQKPGIGEGNNAEVAVDGGGAGNGVVEEEEDDDDDFITNEVKRRLKELRKNSFMVLIPEDECAEVEEDGDEEEGGSPTEWLESGVGDGFPLCGLDSLKSDGFGKTFVESLNMSKKSPRSASKLASTLRNLSFKRKDELPEDCEQLQQQQSGYDPYQTLETAYVAHIALSWEALHCTYVHLSLIVAAQPDNPTTYNSAAQAFQQFQVLLQRFIENEPFEHGTRVEIYARSRSLLSKLLQVPTFQGKIIWIKLLHFLHKCSLLPSKCVPEHSTVVYCVEYGFFSISCPSNSGEDIGSVVDRKDNTDDQMEPAISAHDLIKLLEESILTFRLFLKKDKRKGGVLMSAHGHTGSSIQQVQSSLDKKEAKVKELLKKRKGWKSKTWPGTVEEVQLLLALIDVKVVSRVLRVGKLSREQLLWCEEKLSKVGLTENRLRRDGSPILFPC

SEQ ID NO: 11460 - protein, 329 aa, Zea mays
  VARIANT 23: note = Ancestral polymorphism is W, Derived polymorphism is R
  VARIANT 45..329: note = Derived polymorphism lacks residues 45 to 329
MGEASRASSSAYPLLLVLALAHWRGVAAASSTTFTVSNYCSQPIWPGTLAGAGTPQLPTTGFRLDPGQSALVPAPAGWSGRLWARTGCAFGAGGEGTCQTGDCGGRLECAGAGGAPPATLFEVTLGKGATGLDYYDVSLVDGYNLPVVAYSLGCSDAFCVHMCLAACPKELQVERGGTVACRSACEAFGQDQYCCSGAYATPAACRPTAYSSIFKSACPRAYSYAYDDGSSTFTCHSAAGYTIAFCLPPSSGLHGSDVTPLVSPPASGQSTGRVGGDGVGSADQPPHPATGNSDGGGYHQLWMTMSLASTLHDQLWLLLPLPAVLLLLL

SEQ ID NO: 11461 - protein, 106 aa, Zea mays
  VARIANT 73..106: note = Derived polymorphism lacks residues 73 to 106
  VARIANT 99: note = Ancestral polymorphism is P, Derived polymorphism is L
MSSTAIDVLSALPPIRTAAPEPGAEKKQQEEDGSEAQEPEPTTPTSEASRLRPPSECPPAPRKPARPPSTPAKRRFPAPRRAFFPVPRDLNAVFRALPPKKRIRAG

SEQ ID NO: 11462 - protein, 293 aa, Zea mays
  VARIANT 220..293: note = Derived polymorphism lacks residues 220 to 293
  VARIANT 192: note = Ancestral polymorphism is N, Derived polymorphism is D
MESLLLNTEAPDLYIRQNPVPNAYTLAINDKKPFIVVHTSLVELLTPRELQAVLAHELGHLKCDHGVWLTFANILTMGAYTVPGFGMVAGFLEEQLYRWLRAAELTCDRAALLVVQDPKVTVFSDSPAATGWWRPSRGQRGSRSTTRRCLWRSTGLDLSFLNEGLLKNRRGFKLFYSIIFGGTAIHVSMTLNILAYLSPLLTWDTKQVFVFVAAECETPQDAFIQVSLSVIILHESIYYLWSCNVVVFKYGSGLIIVAIFVLKLTSVKEKSLGLLTQNFVKLFFTMKVETISL

SEQ ID NO: 11463 - protein, 345 aa, Zea mays
  VARIANT 255..345: note = Derived polymorphism lacks residues 255 to 345
  VARIANT 123: note = Ancestral polymorphism is E, Derived polymorphism is V
  VARIANT 27: note = Ancestral polymorphism is D, Derived polymorphism is N
  VARIANT 17: note = Ancestral polymorphism is F, Derived polymorphism is L
MATRCRSSGFIEIKVDFAGSISRPAIDHTVRSDDFSAGGHIWSVEFHLTGDTTGNGVYFSLSLQLVNESKSKSVKAITDAFLLGRGGTPSSSHGKRWVHVYPTPDGSPSSRNYLKFVKRSVLESGYYVTDGYITFMVGVIVLGVGDSPIPVPSSDIADHLGHLLDHADSSNDVTFSVGLKTFGAHRAVLAARSPVFKAQLFGSMADAEMRCITLHGIRPETFRILLRFIYTDALTAGDDCDGDEMQSSSDIDLFQDLLAAADMYQLDRLKLMCARKLWGCVSVETVAKILGCAELYNCSELKSECLDFFLLEKNFKIAVLTDGWFQLMQSFPSVIDEIRARVPQT

SEQ ID NO: 11464 - protein, 168 aa, Zea mays
  VARIANT 73..168: note = Derived polymorphism lacks residues 73 to 168
  VARIANT 54..168: note = Derived polymorphism lacks residues 54 to 168
  VARIANT 27..168: note = Derived polymorphism lacks residues 27 to 168
  VARIANT 3: note = Ancestral polymorphism is P, Derived polymorphism is A
MKPLQDLVPSCNKGSRETEPVGSSSTRAGTTGSAAIHAFGSQSPDGADPKGACWAAQSWNCVKISPTTTFVARSRQTEHSRTFPVAGSPSFLHKFMMFRVLPCNIQSRRPWRHRYTVPTLPPSMRRSSLVSRGLNGAAVDADAMRMVTHTFDEVRAAVAAMGSAADVE

SEQ ID NO: 11465 - protein, 357 aa, Zea mays
  VARIANT 269: note = Ancestral polymorphism is L, Derived polymorphism is S
  VARIANT 268: note = Ancestral polymorphism is D, Derived polymorphism is E
  VARIANT 217..357: note = Derived polymorphism lacks residues 217 to 357
  VARIANT 84: note = Ancestral polymorphism is R, Derived polymorphism is S
  VARIANT 81: note = Ancestral polymorphism is L, Derived polymorphism is Q
  VARIANT 77: note = Ancestral polymorphism is I, Derived polymorphism is T
  VARIANT 75: note = Ancestral polymorphism is A, Derived polymorphism is V
  VARIANT 67: note = Ancestral polymorphism is D, Derived polymorphism is N
  VARIANT 48: note = Ancestral polymorphism is Q, Derived polymorphism is K
  VARIANT 19: note = Ancestral polymorphism is A, Derived polymorphism is T
MATRCQSAGFIEFKLDFAASNHLAVGDIVRSDDFSAGGHLWRVICYPKGDEVGNGNYLSLYLRLVSDSKSEKIKAIIDAFLLGRNGAPSSSSHGKRWVHVYSSPDGSRSRGFPEFVKRSVLDQSDCVTDGFVTFMVVVIVLRDSPMAIPVPSSDIADHLGRLLDHANDGSTDVTFTVGTETFHAHRAVLAARSPVFKAQLFGSMADAKITLQGIRPEVFRILLRFMYTDAFPGDDSDNDNDDAEDSLPRDDDDEDEQEGYSDIDLFQDLLAAADMYHLDRLKLMCARKLWDRVSGETVAKLLVCAELRDCSELKSACLDFFLVEKNFKVAVLTDGYLQLMQSFPSVIAEIKARVRQI

SEQ ID NO: 11466 - protein, 391 aa, Zea mays
  VARIANT 303: note = Ancestral polymorphism is H, Derived polymorphism is Y
  VARIANT 201: note = Ancestral polymorphism is G, Derived polymorphism is S
  VARIANT 133: note = Ancestral polymorphism is G, Derived polymorphism is E
MGASGAGRWDLGARQWPPPSALASAYEAELKEMEGQSREEYIGSLRRMQSEAPISDYCVLQFDLEDSETKNIAIGHSISYDDISLGGHLWGINCYPRGDREEEKGEYFSLFLYLIGDSKGKGVNVIFHVFCLEREGEASAFSSFSDDKRLAKVFSSKCPEYPEGHRSHGWHKFMKRSVLESFFIVNGRVTLICTIMVLGAGTIPVPPSNISSDLGCLLKSNVGTDVSFILKGKMIQAHRAVLAARSPVFKAQLFGNMADATASSITLQDMEPATFEAMLAFMYTDEMPEDNELGGSPTQMVQHLLAAADRYALDRLKLMCARKLWDIISMDTFASTLACAYMHSCAELKSKCIGFFAVENNFKKIVFTAGFIWLVQEFPDLADELKETIGI

SEQ ID NO: 11467 - protein, 99 aa, Zea mays
  VARIANT 71: note = Ancestral polymorphism is A, Derived polymorphism is T
  VARIANT 56: note = Ancestral polymorphism is R, Derived polymorphism is C
MGESHAFRNMEEMDFFYVFDMLVALGIHAPNEDDLLDNCYLLQCPLGVYSGVDGQRLKLVCAKWALHLEPAAAEGLAQRGTSDITGRVASVGFNYVRLT

SEQ ID NO: 11468 - protein, 196 aa, Zea mays
  VARIANT 3: note = Ancestral polymorphism is K, Derived polymorphism is E
MNKKKRRRRRQQQGGRPVLVTFYVTQPRDRGGSTASSSSHHHHHNRQERHDDHHRRSHGGSGGRPGMQRRRRNDGKAQSGDRRADLLEYSRQLRALARQTASATTPAAVGVHSEEQQGAPAVNHRLGRAMSQQQQVRPRCFGGDGWSWKKVLVLVLPSHSESRRPRRSNRDDSEKNVKINQTGRAAASSLLVGKLT

SEQ ID NO: 11469 - protein, 1134 aa, Zea mays
  VARIANT 597: note = Ancestral polymorphism is D, Derived polymorphism is Y
MDPDDEPAAQRKAVDLHLPRDTEPASSPACTRRAAPRVLSYCDVPFASASAQRCASFPQRHGELAHARSASFAAWIEGGSASAPAAALERAMSQYGGADGALPEFVGAGGGEGIFRVPLRAAMHPARPPPLEVRPHPLRETQAGAFLRTLACDPRRRQLWAGAESGVRVWGLHEVFRGWWPGAGPRRRGDEEAAPFRESVPVPPALCAAVDGANGMVWTGHRDGRIRAWRMDHAAPAGGYSAGSAPMFKEALSWQAYSRTPVLAIVVTLYGEIWSGSEGGAIKAWPWDTIAKSLSFTSGERHNAASLVEKSYIDLRNHATIGNMCSLPAADVKHMLADNCRAKIWSLTSMTFALWDAKTRELLKVFGIDGQVDLARPEAPVMPEQFIEEEIKVKPTKRERPQGSFTFFQKSRNALMGAADAVRRVATKGTFVEDNRRTEAVAQAMNGTIWSGCTDGSIIVWDGNGNRLREFHYHSSSVRCIKTLGDKVWVGYASGTIQVVDVEGNLQAGWIGHSCPVIDMAISDSYIFSLAHHGGIRGWPLSSPSSLDDILCYELASRELLYTRLENLKILVGTWNVAQEKASPEALRSWLGGAFFDVGLVVVGLQEVEMGAGVLAMAAAKESVGLEGSANGQWWIDSIGKTLDEGISFHRVGSRQLAGLLIAAWATNDLRPHVGDVDTAAVPCGFGRAIGNKGGVGLRIRVFGRRICFVNNHFAAHQENVSRRNADFDRIYRTMTFTKPQGSAASATAVQLHKAANENQADEGRPDLAEADMVIFLGDLNYRLDGITYDEARDMVSQRSFDWLRERDQLRAEMKAGNVFQGMREGPIRFPPTYKFQRHQSGLSGYDSGEKKRIPAWCDRILYRDSRPVPIAECSLECPVVAAITAYESCMDVTDSDHKPVRCTFSVDIARVDELIRRQEFGKIIESNKKVRSLLRELRSVPDTVVNANNITLENHQEDVILRITNNCETSKAAFEILCEGQTVRKQGGTQSEELLPRASFGFPLWLEVQPSMGLIGPGETAEVVVRHDDFLTQEEYVDGAQRNRWREATRDLEVVLSVTVTGSSSSSAEAVAHRVTVRHCCPAPPAPLPANRRSAAASPRDDVAASDNQSNHLHRSDLASFGSSEVRDLCGGL

SEQ ID NO: 11470 - protein, 397 aa, Zea mays
  VARIANT 41: note = Ancestral polymorphism is R, Derived polymorphism is C
MSFPRLLLAVLAATVAAAYAPARAAGAGAGACAAEKLSSNRVFQTCADLPRLGASLHWSYDAAASSLSVAFLAAPPSAGGWVAWGLNPKGQSMDGTQALVAVPSGGGGGGGAYEVQTYSISGTSLGSPGAPLAYPTSDLAAELGGDGRVRIFGTLKLPNGTGGAEVNQVWQVGPYSGGIQIHEMKGDNMNAKGTLNLLTGATAAASGGGSILRKKNTHGILNAVSWGLLLPMGATFARYLKTFRSADPAWFYLHVACQLAGYGVGVSGWATGIHLGNLSKGITYSLHRNIGITVFALGTLQVFALFLRPKKEHKYRVYWNAYHHSVGYTVIVLGVVNVFKGMAILDVERRWRTGYVAAVSVLAAVAVALEAVTWGVVLRRRKQEEKTSNAGRLPLSM

SEQ ID NO: 11471 - protein, 688 aa, Zea mays
  VARIANT 260..688: note = Derived polymorphism lacks residues 260 to 688
MLAAGGGGREASSLTSDRLAVQRRRRRRGGGGGRRRRSALGLRRRMKKETMEGHVPLPLPLLPDGETAVGYSKDDASSPLQEEISSLRSRQRRVDRRRREALDRLVELKGSVRVFCRVRPLAHTNSLHAQSSPVTVEQERITVKAAGIKREFGADRVFGQESTQEDVFEEVKPILRSALDGHNVCILAYGQTGTGKTYTMEGTGGNKLGVVPRAIQELFSRASEDGSCAYSFSMSMLEVYLGSLRDLLAAPRQPLFRRTECKAAACSSSLSILATKGGAVEVEGLTDVSTPDLKNASQWYRRGRRARSTAWTNVNDASSRSHCLTRITIRRRMRHGGGGGVSKLWLVDLGGSERLLKTGASGLTMDEGKAINLSLSALGDVIAALRRKRPHVPYRNSKLTQILSDSLGDGSKVVMVVHVSLSEDDVGETVCSLNLAKRARSIEPNREIPQDLKTLKQKRVAELDREIRAAEEELKRLDEQIRRAEEKEISLEEEEEEEEEKKLFASSVCQALSDDEKGSPRSTLVVVGHTDAAESPRATTEKAKGRRPPPARGHGGSAAPHFMSSTVCSRQRRCAGGYHSVGNGKPRLTAVSVNRYPPPAAELSGSQNAAARASRSASVALSSGVHKLRCLRVNKSDQVNVISNSSVDSTAASAPPPRRRESCFGSRPVLQRAAAPLHLHRRRMSSLT

SEQ ID NO: 11472 - protein, 299 aa, Zea mays
  VARIANT 35: note = Ancestral polymorphism is M, Derived polymorphism is R
  VARIANT 30: note = Ancestral polymorphism is T, Derived polymorphism is I
MDRNSTRFAPNASRYSQVKKCAYSPYIINTEEYKMAIRSSKTPIPYKDIPSNNVIHTCGRITSSIYQCCHKSAYVLGMLTQIKPSSETSSSKIQGQPYLSSTTASSWYFNPRIPEAQTYYNRLQNNDLQLIQPTAAEEEILLSQPPNLEQKTVEELLNIDPDMFPPEGYRCTVTISRIVQNSKLWYPSCSRCHKSSSQTSTGYHCTSCGCTDINFRYKLSFIATDGTCEAEFFCFDSIARKIVGKPCDNLVTAVATSQGPPAALAAIVCLKFTLAVTINMSAYSVTNRVFSILSILTNQ

SEQ ID NO: 11473 - protein, 546 aa, Zea mays
  VARIANT 32..546: note = Derived polymorphism lacks residues 32 to 546
  VARIANT 164..546: note = Derived polymorphism lacks residues 164 to 546
  VARIANT 285..546: note = Derived polymorphism lacks residues 285 to 546
  VARIANT 382..546: note = Derived polymorphism lacks residues 382 to 546
MGLGAAMALALGDPPADYASIAAVGLFVALMCVCIVVGHLLEENRWMNESITALFIGLGTGAVILFASSGKHSRVLVFSEDLFFIYLLPPIIFNAGFQVKKKQFFRNFITITLFGAVGTLISFTVISLGALGLISRLNIGALELGDYLALGAIFSATDSVCTLQVLSQDETPFLYSLVFGEGVVNDATSVVLFNAIQNFDPGNISSAKLLNFIGSFLYLFGSSTILGVASGLLSAYTIKKLYFGRHSTDREVSIMMLMAYLSYMLAELLDLSGILTVFFCGIVMSHYTWHNVTESSRVTTKHAFATLSFISETFLFLYVGMDALDIEKWKIVGQTYSPVKSIALSSTILALVLVSRAAFVFPLSFVSNLTKKTPNGKISFRQQVIVWWAGLMRGAVSIALAYNKFTRSGHTQQPSNAIMITSTISVVLFSTIVFGLLTKPLIRLLIPSRHLSREPSALSEPSSPKSFFEQLAANSPGHPDLENGISLRRPASLRFLLVSPARSVHHYWRKFDDSFMRPVFGGRGFVPFVPGSPTESSLPLLPGNEN

SEQ ID NO: 11474 - protein, 133 aa, Zea mays
  VARIANT 63..133: note = Derived polymorphism lacks residues 63 to 133
  VARIANT 67..133: note = Derived polymorphism lacks residues 67 to 133
MAVPLLTKKIVKKRVKQFKRPHLDRYKCLKPSWRRPKGIDSRVRRKFKGCTLMPNIGYGSDKSTRHYLPNKFKKFVVHNVSELELLMMHNRTYCAEIAHNVSTKKRKEIVERAAQLDIVVTNKLARLRSQEDE

SEQ ID NO: 11475 - protein, 179 aa, Zea mays
  VARIANT 75: note = Ancestral polymorphism is G, Derived polymorphism is E
  VARIANT 97: note = Ancestral polymorphism is A, Derived polymorphism is S
  VARIANT 99: note = Ancestral polymorphism is R, Derived polymorphism is H
  VARIANT 115: note = Ancestral polymorphism is P, Derived polymorphism is Q
  VARIANT 137: note = Ancestral polymorphism is V, Derived polymorphism is M
  VARIANT 146..179: note = Derived polymorphism lacks residues 146 to 179
MKSHRAGGNRSPIPSTGAQPRSPSTDLVLTFHSHLRRVCQPVVSRLDHVVAEASRAAGGRSRGSGAGRTAVWDTESSLYDSYELAAVRRLLDKRLLALRDAEETRGKGRQLVVVPVVSSRGVHHRRKATLRALFRAVATCAAPPRQAPPLACACAAGMVHDHQGGSAVEPEDLPSHGQL

SEQ ID NO: 11476 - protein, 214 aa, Zea mays
  VARIANT 62: note = Ancestral polymorphism is A, Derived polymorphism is E
  VARIANT 60: note = Ancestral polymorphism is R, Derived polymorphism is W
  VARIANT 44: note = Ancestral polymorphism is G, Derived polymorphism is C
  VARIANT 22: note = Ancestral polymorphism is T, Derived polymorphism is I
  VARIANT 13: note = Ancestral polymorphism is C, Derived polymorphism is Y
MPAAQAQASGGACLGGAAQVATALKSALSVAFLLWWTPLLLTTGTTTSCLPLPLVSSASRRARRRLSRSRRTAASSRAGGGTGSCKRAARWRRTGELASQRTGGSEVGGGDQRSQLCASREIDRGGKDRERDWGERRRSVAAANVEGEHEIGGRGSRLSARRWNGGAVSTCAMALHPRLAPAGEFGVGGERGGPVGRDATDAWGAGAASIADAG

SEQ ID NO: 11477 - protein, 456 aa, Zea mays
  VARIANT 234..456: note = Derived polymorphism lacks residues 234 to 456
MSAAAVLCRLGLRLRRLSTLSELPAVAAGAPQPQHPTSKDAYFAAVHHLSTIVRRDFYLERTLNRLRLPSPFPTDLALRVIRAAAPAAPLHATRFLSWLRAKPSFAASAEHFDALLLPLARARLFPHLWSLASDMRGLGLPLSPTTFSAVISSYGHSRLPDQAVEVFNRLPRFGCPQTTEVYNALLDALCANGNFTGAYKLLRRMARKGVAPDRATFSTLVDSWCAAGKLQEAQAFLDDMAGRGLRPPVRGRDLLVDGLVRAGHLEQAKAFALRMTKEGILPDVATFNSLAEALCNAGDVDFAVSLLADASSRGLCPDISTYKVMLPAVAKVGKIEEAFRLFYAAVEDGHRPFPSLYAAIIKALCKAGRFADAFAFFGDMKTKGHPPNRPVYVMLVKMCVRGGRFVEAANYLVEMSEAGFTPRAPTFSAVVDGLRHCGKHDLARRLEQLEVSLKGN

SEQ ID NO: 11478 - protein, 116 aa, Zea mays
  VARIANT 40: note = Ancestral polymorphism is T, Derived polymorphism is N
  VARIANT 30: note = Ancestral polymorphism is D, Derived polymorphism is A
  VARIANT 28: note = Ancestral polymorphism is L, Derived polymorphism is V
  VARIANT 21..116: note = Derived polymorphism lacks residues 21 to 116
  VARIANT 20: note = Ancestral polymorphism is A, Derived polymorphism is S
  VARIANT 8: note = Ancestral polymorphism is D, Derived polymorphism is N
  VARIANT 2: note = Ancestral polymorphism is G, Derived polymorphism is D
MDEILSIDADVSEVELGRRAQFFCGDKLTDILYIYFVDVTSRHIYCLLVELNLVAATKKGGRCGGDAGAQPPGMYGIDLGTIVGLELDVDIVAANTTTKKLLAYISTNGRVSGRQS

SEQ ID NO: 11479 - protein, 242 aa, Zea mays
  VARIANT 93: note = Ancestral polymorphism is K, Derived polymorphism is E
MVSRRRPSLSTPSCLAMSGGVLNSRSFGSSLGGSAVAELGSRPHRGLRRPTSPIIARGTTSRTQSKRQGFPMVDTRRFLEFSYPEMLRCLLRENLPLLSSSQVDSEREFFSREPRLFNGGYGFGSRGTLGDCASWKRLLSCQLSYFKFGLTIIVRSFVLHLLPLVVTQEQLDCAKEAIKSTVLMNLESRIVVVLIKSWMASDNPSLHPAVFHLSNISVCSQWLEPLQVHLALVTNLQIHNIS

SEQ ID NO: 11480 - protein, 163 aa, Zea mays
  VARIANT 35: note = Ancestral polymorphism is S, Derived polymorphism is F
MSSVKFSTTTLPGPLLLLDPTLGGISDCCAPPEVSCSFLWRRRRHHRTSANCNAMKKTRCHRRHHRTSANCNATKKTRKATGAAGRGERQNMVHGWSTLEAYRVVKIKALVSMVVLRHIFTENPLPSFQINTHFSPCTIPTTQQTPARRAQGLDTTPALAASA

SEQ ID NO: 11481 - protein, 324 aa, Zea mays
  VARIANT 15: note = Ancestral polymorphism is E, Derived polymorphism is Q
  VARIANT 38: note = Ancestral polymorphism is S, Derived polymorphism is F
  VARIANT 285: note = Ancestral polymorphism is L, Derived polymorphism is F
MAVPQVDKKMLGELEAMGFPTARSVRALHFSGNSNLESAVNWLLEHESDPDIDRLPLIPREISIECGDTSDEVRNDVEGMRDTVQEQKPKEHTETGRQNETSQLEREPNADGQEEEDRKRILALYKQKRDEEGRARGRIRSQLQEDQRERIRAAKDLMEAKRSLEENQRKRVMESRVADQEEEKRARERIRQRIADDKVKPAGRAVVASEQLRDCLRTVKKNHRDDPAAVARAYQVLLKIVGNVAKNPGEEKFRRIRLSNPVFKDRVGSVRGGVEFLELCGFRRFSGIGYLVMPRDKVDVALLTAAGVEIASALENPYFGLLSK

SEQ ID NO: 11482 - protein, 75 aa, Zea mays
  VARIANT 47: note = Ancestral polymorphism is A, Derived polymorphism is S
  VARIANT 45: note = Ancestral polymorphism is L, Derived polymorphism is V
  VARIANT 12: note = Ancestral polymorphism is R, Derived polymorphism is S
MRQQRGGAGAGRRADDPGLLKRAFDRVFRFVRLAEFEIFFVLFFLIAFFLFKDLMARPQYNQLFVKKPDLDDSWP

SEQ ID NO: 11483 - protein, 135 aa, Zea mays
  VARIANT 70: note = Ancestral polymorphism is C, Derived polymorphism is Y
  VARIANT 68: note = Ancestral polymorphism is A, Derived polymorphism is T
  VARIANT 36: note = Ancestral polymorphism is E, Derived polymorphism is K
  VARIANT 31: note = Ancestral polymorphism is C, Derived polymorphism is F
  VARIANT 30: note = Ancestral polymorphism is V, Derived polymorphism is M
  VARIANT 29: note = Ancestral polymorphism is A, Derived polymorphism is V
  VARIANT 27: note = Ancestral polymorphism is C, Derived polymorphism is Y
  VARIANT 26: note = Ancestral polymorphism is A, Derived polymorphism is V
  VARIANT 23: note = Ancestral polymorphism is S, Derived polymorphism is P
  VARIANT 20: note = Ancestral polymorphism is S, Derived polymorphism is L
  VARIANT 18: note = Ancestral polymorphism is R, Derived polymorphism is W
  VARIANT 15: note = Ancestral polymorphism is V, Derived polymorphism is I
  VARIANT 14: note = Ancestral polymorphism is N, Derived polymorphism is I
  VARIANT 11: note = Ancestral polymorphism is V, Derived polymorphism is A
  VARIANT 5: note = Ancestral polymorphism is G, Derived polymorphism is D
MTSQGPASNEVLVIVFQRLSPRSVTVCRAVCLRLSELLSSLRLEFLADVDDGNADSSACFAGLGGASAGCARRRRRRRDWILPSRQPDRTTVYKNRALRTPFVKLGHNSTLRIEIDDHVVQDIESLIFDDTHNKW

SEQ ID NO: 11484 - protein, 240 aa, Zea mays
  VARIANT 198: note = Ancestral polymorphism is R, Derived polymorphism is P
MGTTAAHRRRPGSIVVLSPSAVALALLFLSTTLRLAAAVQPYGGGGPCALAVAPLGYPCEEHQVTTADGYILSLQRIPSGGRGGHGGGAGAGASSSRAGQPVLLQHGVLVQDGMSWLLASPEESLPFILADRGFDVWIANNRGTRWSRRHVSLDPSSRLYWNWSWDDLVVNDLPAMVDFVVKQTGQKPHYVGHSMDLRGHDQDKLTVQYLDKFAHLDFIIGVCAKDYVYKDMIDFLNRFN

SEQ ID NO: 11485 - protein, 152 aa, Zea mays
  VARIANT 1: note = Ancestral polymorphism is M, Derived polymorphism is I
  VARIANT 45: note = Ancestral polymorphism is A, Derived polymorphism is T
  VARIANT 49: note = Ancestral polymorphism is R, Derived polymorphism is H
  VARIANT 52: note = Ancestral polymorphism is A, Derived polymorphism is S
MPPSTAPLRRSSSFLRSKPRALAATTTDAAAVAPRVRIYVYDLPARFNREWAAADARCSRHLFAAEVAVHEALLAYVGRAARPEDADLFFVPVYVSCNFSTPNGFPCCRTPEVCSPTPSTSSGPGCRTGTASRGPTTSSSRPTTSAPASIPW

SEQ ID NO: 11486 - protein, 171 aa, Zea mays
  VARIANT 66: note = Ancestral polymorphism is G, Derived polymorphism is V
  VARIANT 63..171: note = Derived polymorphism lacks residues 63 to 171
  VARIANT 51: note = Ancestral polymorphism is V, Derived polymorphism is D
  VARIANT 40: note = Ancestral polymorphism is P, Derived polymorphism is S
MVKYSQEPGNPTKSAKAMGRDLRVHFKNTRETAFALRKLPLTKAKRYLEDVIAHKQAIPFRRYCGGVGRTAQAKSRHSNGQGRWPVKSARFILDLLKNAESNADVKGLDVDNLYVSHIQVNQAQKQRRRTYRAHGRINPYMSSPCHIELILSEKEEPVKKEADNIVAARKQ

SEQ ID NO: 11487 - protein, 273 aa, Zea mays
  VARIANT 129: note = Ancestral polymorphism is A, Derived polymorphism is V
  VARIANT 218..273: note = Derived polymorphism lacks residues 218 to 273
  VARIANT 229: note = Ancestral polymorphism is P, Derived polymorphism is H
MRVCQVLEMGSLKMAGKAPGAAALPESSCAYLLQELKMIWDEVGQDQSERERILGELEQECQEVYRSKVNSANMSRIQLHQALAESEAEFTNLLLSLGERSFPARVNILILRVSPYLAGNRRLGNEAVAVDEEDLSLKRLQEFQSELQRLKREKSDRLCKVEEYKALVDNFAKVMENKKIQTLLVKRHENSIMSRANTSFSRPSSRSFNTSPGSTSIWSNQVSAKVQLPALENFPAEKDMHTKRVRNRGMQGVLGNNRSCSISNEDKTEVCLT

SEQ ID NO: 11488 - protein, 987 aa, Zea mays
  VARIANT 73..987: note = Derived polymorphism lacks residues 73 to 987
MPEPQAILPLRALPPDAPLPFPVPAPFHPQAPGPGGTAPATPPNPTPPQPLTPAAPPSSSSTRPPHPWEISARAWLESFPDGRPPTEPEVDAYIDVHRPELPSLPRSQLHQRLLALRGDQVLDADQSAFPYRFQRTDLWKPVYQWLESLELDSLVATQQISDWLTSNPKIMDRMVEKHSKYHLIHYTQRMHLKMLKKKGKLPKTLQLSAARATVRPIAAPFTPEENIVPLQKTITPVTGLLSMYYIFYRSATSVVHESKMTFWKLQVDFPVPVQGDNRAVPQADFPVPVQGDNRAVPQADFKVEMQLLGTRRRHCPKRKKLCSNTNCILTDLQNQLTAVLLKQCRTVAIKETDSSYVESPNPETNMSIQGTTTANASAPSEAKNVFINEQSVPAGATESEPGHKRKRNPIIVTPAWCYSEASAGTLQNEINPSSNSDVSRNFNIWRGHANPLVSHRDTKKNILFCLEGRETGVSCSQAASYGGYAGRNCERWTPFLEGTFVCSFFLKRWNSPAFQFEGPAVHVVRKSYLSWCPTSCAYTSSAPSAQPHGRQGIRKVLDVKFHPEGLPQLVSSSNEAPNELLLFNLLSGRAIQLRGHNTKIQSIAFAVKGASVVSCASNLLKVWDCITGSCLYTLGGDDQNSVGHTQKINAMAVNKWQSCLVVTSGAKGDGKLLLWNALRGELASDLNSNLRSQDMIYPSVDTMEFYSENHLACGSDCDYGGSAVVQLWDIDSPESYLSFSASDSYITSLKVNPAGNTLITGSGDGTIGLFDIRTCSAISHLSVGSSCEVTSVSFSNCGTYFSASSTSNNTLVWDTRLVPINQSKDVLRSRDMRFFRPLHCFSHGSQMPTAEYTSQLPGHVDEGDQGVNATQWLHNEPVLVTVSGDGSVGMWDVTLGQPCVRHIVAHTRCANAVAVAPNDKYLCTGGSDQKVVSCLFVLLVSYVAYVMSYWKRFYIITEVGVHILIGVFHILCKEMIDMLPEIIELFR

SEQ ID NO: 11489 - protein, 628 aa, Zea mays
  VARIANT 536..628: note = Derived polymorphism lacks residues 536 to 628
  VARIANT 470: note = Ancestral polymorphism is L, Derived polymorphism is P
  VARIANT 372..628: note = Derived polymorphism lacks residues 372 to 628
  VARIANT 272: note = Ancestral polymorphism is G, Derived polymorphism is D
  VARIANT 271: note = Ancestral polymorphism is Y, Derived polymorphism is D
  VARIANT 111..628: note = Derived polymorphism lacks residues 111 to 628
  VARIANT 60: note = Ancestral polymorphism is I, Derived polymorphism is T
  VARIANT 57..628: note = Derived polymorphism lacks residues 57 to 628
MLYGDIRAGKVGKRTVLSTSFIGGRCDMRRRYMDVMALVRKFGKPDIFLTMTCNPNWDDTRRELLSGQTLQDRPDLVVCVFHAKLQELKHRLTKQDILGKVRAYIYVVEFQKRGLPHAHFLLIMKRKYKLTCLEKYDLLISAEIPSNKYPELRKMVIKHMMHDPCGSLNPNCPCTKGRKSCKNHYPWPFSDTTLQGKDSYPIYRRHDDDRKEKACGSIKAIKYLFKYIYQGYDCAFVVMRDASKAYDDVDEIKQYKDARWVTPLEALWRIYGFELSQISPSVMQLQLHLPNMHMVAFHARQMVERVVNRPGVDRSMLTAYFEANRLHEEACSILYRDFPEWYTWQSCKGKKRLYSMSEDYQHRSQNKTLVEQMVLIDIRNMLQSMGKDRKSSPLPPIIDAYDDAIGTAREVYEEESIEPTTRDVALKDSLNEEQRAAYDKIMSVVDTDQGRLFFVDRLGGTGKTYLYKVLLAMLRKQGKIAVATSTSSVASSIMPGGRAAHSHFNIPLTIDDGVVCSFTKQSGTAELLRKASLIIWDEASMTKRQVVEALDNSMHDIMGRLGLPFGGKTIVFGGDSRQVLPIVRKGSRAQVAVSSLQMSYLWESMSHLKLVSNMRAKTTLDLRSFCCV

SEQ ID NO: 11490 - protein, 455 aa, Zea mays
  VARIANT 65: note = Ancestral polymorphism is S, Derived polymorphism is T
  VARIANT 86..455: note = Derived polymorphism lacks residues 86 to 455
MAPTAHHQAARDDELEKSRRKPGGGGKAAAVRCHPVLAEERKASIRGVVGDLLAMAGGGRRSLISLGVGDASSHACFRRGGEFAAEAVAHAALSGAFDCYAPSFGFPDARRCCAVCRAEPTDQTNSAVAAHLSTGAVHRTHEADVFMTAGGTGAITAIATVLGGAPGANVLLPRPGFAPYEAACEVAGAEPRFYDLLPRRGWEADLAGVRALADAATAALVVINPNNPCGAVYSAHHLRQLAETARELGIPIVADEVYAHMVFGGSRFVPMASLAHIAPVVSIGALSKRFMLPGWRLGWLAFCDPNGALKHVRAATEMLLNVTSGPASIVQAAVPKILSAEHHEFHRNVVHLLESAADALYRRVNQIEALRCYSKPEGSMFMMVEINTSILHGVANDMDFARELIKEECVLVLPGSVIGLKNWVRIFFGAPVSLILEACDRIEMFCRRRTLKQNN

SEQ ID NO: 11491 - protein, 130 aa, Zea mays
  VARIANT 119: note = Ancestral polymorphism is V, Derived polymorphism is I
  VARIANT 107: note = Ancestral polymorphism is G, Derived polymorphism is S
  VARIANT 105: note = Ancestral polymorphism is I, Derived polymorphism is T
  VARIANT 84: note = Ancestral polymorphism is R, Derived polymorphism is W
  VARIANT 82: note = Ancestral polymorphism is P, Derived polymorphism is S
  VARIANT 76: note = Ancestral polymorphism is P, Derived polymorphism is L
  VARIANT 63: note = Ancestral polymorphism is E, Derived polymorphism is K
  VARIANT 54: note = Ancestral polymorphism is G, Derived polymorphism is S
  VARIANT 53: note = Ancestral polymorphism is P, Derived polymorphism is S
  VARIANT 50: note = Ancestral polymorphism is T, Derived polymorphism is M
  VARIANT 41..130: note = Derived polymorphism lacks residues 41 to 130
  VARIANT 38: note = Ancestral polymorphism is A, Derived polymorphism is T
  VARIANT 19: note = Ancestral polymorphism is S, Derived polymorphism is L
  VARIANT 14: note = Ancestral polymorphism is P, Derived polymorphism is S
  VARIANT 9: note = Ancestral polymorphism is P, Derived polymorphism is L
  VARIANT 7: note = Ancestral polymorphism is E, Derived polymorphism is K
MRSPSPEIPGGDAPALELSRAELAAIFQVMADLLGDTTWPQLHPRPYTDTPWPSLQCELAPDEACVLRATRLHLGPDVTTPPCRPGARLDPASLRGLPHLRTLSIFGCFGAARAVHIIILARADRAQVQP

SEQ ID NO: 11492 - protein, 251 aa, Zea mays
  VARIANT 70..251: note = Derived polymorphism lacks residues 70 to 251
  VARIANT 192..251: note = Derived polymorphism lacks residues 192 to 251
MAAEAGPISKVLIVIAMQKEATPLVHKFNLVEAPAHQSTFPKGAPWVWYHGSYKGLHIDLVLPGMDAVLGVDSVGTVPVAVVTSFSIQTLKPDLIINAGTAGGFKAKGASITDVFLASDVAFHDRRIPIPIFDMYGTGARKTFAAPNILKELNLKVGKLSTGDSLDMCPQDKELILRNDATIKDMEGAAVAYVADMFSTPAIFVKAVTDIVDGVKPTYEEFLQNLIAVTTALELAVTKVVDFISGKRISDL

SEQ ID NO: 11493 - protein, 65 aa, Zea mays
  VARIANT 35: note = Ancestral polymorphism is L, Derived polymorphism is P
  VARIANT 10: note = Ancestral polymorphism is R, Derived polymorphism is W
MNPCNGVRVWLLVLVITMVAMDKVMRLMAVGLHNLRTLTCMVMALMLVIPISNGNQLHISHNNNR

SEQ ID NO: 11494 - protein, 196 aa, Zea mays
  VARIANT 130: note = Ancestral polymorphism is P, Derived polymorphism is R
MLGLFVAQAQPPNPDSVAFFRRQPRPAAPPPRAKFPCDPLCPPLLSHTSTPLSLSPSSRNPRCVPTGGGGEVMAMDPDAVAKAFVEHYYRTFDTNRAALVGLYQETSMLTFEGQKFQGPSAIAGKLGSLPFQACEHQIVTVDCQPSGPQGGMLVFVSGSIRTGPEEHPIKFSQAFHLLPAAGSFFVQNDMFRLNYG

SEQ ID NO: 11495 - protein, 155 aa, Zea mays
  VARIANT 99: note = Ancestral polymorphism is G, Derived polymorphism is R
  VARIANT 17: note = Ancestral polymorphism is D, Derived polymorphism is N
  VARIANT 15: note = Ancestral polymorphism is E, Derived polymorphism is K
MPLWGTAASTQPAAKGDAARAPSGSGGGGVKVIRSLLPTRRRLRLDPPAKLYFPYEPGKQVRSAVRIKNISKSHVAFKFQTTAPKSCFMRPPGGVLAPGESIIATVFKFVEHPENNEKPLDKCKVKFKIVSLKVKGPVEYVPELVNPLSTFLGRL

SEQ ID NO: 11496 - protein, 185 aa, Zea mays
  VARIANT 119: note = Ancestral polymorphism is S, Derived polymorphism is T
  VARIANT 77: note = Ancestral polymorphism is P, Derived polymorphism is L
MACTRRQLWWACLLAAWCCAGAAAAAQPPAADADPLQSRCQGDFGKLTDCMDYATGHAASPSSTCCGDAGGTQKARPECLCYIIQQVHAGRDQVQSLGLRFDRLLALPAACSLPNANVSLCINLLNLKPGSPDYALFANASKITPSAGGSPASDTAAGSAVIRLQAGVRGSVALAVVSAIVSSVF

SEQ ID NO: 11497 - protein, 120 aa, Zea mays
  VARIANT 15: note = Ancestral polymorphism is A, Derived polymorphism is S
  VARIANT 58: note = Ancestral polymorphism is G, Derived polymorphism is S
MASRSSIVLATVMLAALFAVGFCTTPLTFQVGKGSKPGHLILTPNVATISDVEIKEHGGDDFSFTLKEGPTGTWTLDTKAPLKYPLCIRFAVKSGGYRIADDVIPADFKAGTTYKTTLSI

SEQ ID NO: 11498 - protein, 120 aa, Zea mays
  VARIANT 7: note = Ancestral polymorphism is I, Derived polymorphism is N
  VARIANT 28: note = Ancestral polymorphism is T, Derived polymorphism is I
  VARIANT 44: note = Ancestral polymorphism is P, Derived polymorphism is H
  VARIANT 70: note = Ancestral polymorphism is P, Derived polymorphism is L
MASRSSILLAMVMLAALFVVGLCTTPLTFQVGKGSKPGHLILTPNVATISDVEIKEHGGDDFSFTLKEGPTGTWTLDTKAPLKYPLCIRFAVKSGGYRIADDVIPADFKADTTYKTTLSI

SEQ ID NO: 11499 - protein, 117 aa, Zea mays
  VARIANT 6: note = Ancestral polymorphism is L, Derived polymorphism is F
  VARIANT 7: note = Ancestral polymorphism is A, Derived polymorphism is V
  VARIANT 23: note = Ancestral polymorphism is P, Derived polymorphism is L
MSSILLATAMLAALFAVGLCTTPLTFQVGKGSKPGHLILTPNVATISDVEIKEHGGDDFSFTLKEGPTGTWTLDTKASLKYPLCIRFAVKSGGYRIADDVIPADFKAGTTYKTTLSI

SEQ ID NO: 11500 - protein, 120 aa, Zea mays
  VARIANT 15: note = Ancestral polymorphism is A, Derived polymorphism is V
  VARIANT 16: note = Ancestral polymorphism is A, Derived polymorphism is V
  VARIANT 26: note = Ancestral polymorphism is P, Derived polymorphism is L
  VARIANT 52: note = Ancestral polymorphism is V, Derived polymorphism is A
MASRSSILLATSMLAALFAVGLCTTPLTFQVGKGSKPGHLILTPNVATISDVEIKEHGGDDFSFTLKEGPTGTWTLDTKAPLKYPLCIRFAVKSGGYRIADDVIPADFKAGTTYKTTLSI

SEQ ID NO: 11501 - protein, 120 aa, Zea mays
  VARIANT 19: note = Ancestral polymorphism is A, Derived polymorphism is T
MASRSSIVLATAMLATLFAVGLCTTPLTFQVGKGSKPGHLILTPNVATISDVEIKEHGGDDFSFTLKEGPTGTWTLDTKAPLKYPLCIRFAVKSGGYRIADDVIPADFKAGTTYKTTLSI

SEQ ID NO: 11502 - protein, 146 aa, Zea mays
  VARIANT 87..146: note = Derived polymorphism lacks residues 87 to 146
MSPRLQTPARVQSRQDARYAAGRRPPPPSLLRVSAQKRKRKEVFIYGNYRNYYGYRIDRNVGEDPRLEAFKKQWFEKKDCLDIGCNQGLVTIGLVKQPHGSDCGIVNVNIPTNGAEIGGAFGGEKAAGGGREAGSDSWKQYMRRAT

SEQ ID NO: 11503 - protein, 107 aa, Zea mays
  VARIANT 63..107: note = Ancestral polymorphism lacks residues 63 to 107
  VARIANT 73: note = Ancestral polymorphism is T, Derived polymorphism is I
MAATPSSTRPPCTAPWKKEAAKKPMQTRLSKLLKNQGYVLTIIHIRETLAKREQSTRSNKNQYDMCGRQCNSIGNIIAFKVLFYQFCDADFDLTGHLVWPRAVLMNN

SEQ ID NO: 11504 - protein, 505 aa, Zea mays
  VARIANT 410: note = Ancestral polymorphism is G, Derived polymorphism is V
MACGSRSRRTSETVDEYEKLVLRMNPPRVTVDNDSDMTATLVDSANKYGTLLEVVQVLTDLKLTINRAYISSDGEWFMDVFHVVDQDGNKLYDGQVIDRIEQSLGAGSLSFRGPPERLVAVEAEAEEAQTTIELVGRDRPGLLSEVFAVLADLRCNVVASEVWTHDGRVAALVHVTDADTLGAIDDPARLDTVKRLLRHVLRGSSRDKKAARAAVSSARVEHAPRRLHQMMQADRSARREGGGDGDGEEERERGEASGNGNGVPVVAVEDCAERGYTLVNVRCRDRPKLLFDTVCTLTDMQYVVFHGTVIAEGSEAYQEYYIRHLDDSSGEDRDRLCRGLEAAIQRRCTEVHVHAAPVHTLAFLSLTPGSSQLCLNARGPLLVQGLRLELCCEDRVGLLSDVTRIFREHGLSVTHAEVETRGARAANVFYVVDASGEPVQAQAAVDAVRAEIGEQVLLLVREQQQDAAGGPKSPAGAGGRRSLGNMIRSRSEKFLYNLGLIRSCS

SEQ ID NO: 11505 - protein, 399 aa, Zea mays
  VARIANT 19: note = Ancestral polymorphism is T, Derived polymorphism is M
MASRLLPLVAALLLLLLLTAASSEATLHPVDYLALQAVRRALSDLPGSRFFASWDFTGDPCSFAGVSCTADGARVETLALGDPRAGAPGLGGAFPSAAVARLPALTSLSLVPGRVTGGLPAAVAALPALRFLALAGNLLSGDLPRAFAPALRTVDLSKNGFTGTVPAPLLQLRGLRTLVLSHNALSGEIPRSVRAPLLHLDLRGNRLSGGVPPLPGTLAYLSLAGNRLSGPVGGVLRRLPRLTFLDLGRNWLSGEVPGEVFAFRRIAYLQLRKNAFSGELRPAGRVPAGATVDLSHNALSGRVPPELATAGAVYLNGNRLAGEVPREVAAAAEAGRMRVLFLQDNFLTGVGVGGALPASAAVCAHWNCVAPPPAVVAACPAKGGRGRRRPQAQCRGRTG

SEQ ID NO: 11506 - protein, 336 aa, Zea mays
  VARIANT 28: note = Ancestral polymorphism is C, Derived polymorphism is Y
  VARIANT 136: note = Ancestral polymorphism is S, Derived polymorphism is C
  VARIANT 211: note = Ancestral polymorphism is N, Derived polymorphism is K
MSGRALKDLNVSQSADLENGKDNSVKSCITKPVLNGNKCANKEEKAPSACHDAVTNGNAAAIADVEYIDSENLVDLPDVDAALSTLAKRLDSKDWVMTCEALNNVRQLAMYHKERLQELLEPLVPLIVKSVKNPRSAVCKTALMTCADIFKAYGDLMVHSIDPLLVQLFLKASQDKRFVCEAAEAALISMTSWISPLLLLPRMLPYLKNKNPRIRAKASVCFSKSVPRLDVVGIKEYGMDKLIQIAATQLSDQLPESREAARNLALELQAFYEKSQASTSDEHEVEASASPDAESWEAFCQSKLSALSAQAILRVTSTTTKECVTSAPKEGLAVGC

SEQ ID NO: 11507 - protein, 190 aa, Zea mays
  VARIANT 151..190: note = Derived polymorphism lacks residues 151 to 190
  VARIANT 71: note = Ancestral polymorphism is S, Derived polymorphism is L
MAGGPNFPQPNRPQSPLLPSPFTFRETSSPPTSPLKSRQPSAHVRSLYDKLQNMPQVGVIQLALQNNSTGLVLSWQNDVFVVAEPGELADRFLQSVKTILSTLLRGCNRKGAYSLSKISCLSELVAEWPSFEIGGIHHRYIGRQTQLVLNRVLMLGSQAQTVIGRPILPDAVVHAVVEEHYRAACMMPVS

SEQ ID NO: 11508 - protein, 137 aa, Zea mays
  VARIANT 83: note = Ancestral polymorphism is V, Derived polymorphism is E
MAAETKPAAAIGVAGEMEVEAYRRLFPVAFLERHLGESVRIDARRLREARTTTVALGAVSSAHGSALVRVGDTAMLASVKLEVMSPSAEYPDEGSVSVEFHMPPICSPLVRPGRSAEVAPVISKALEDVLMRFLSLR

SEQ ID NO: 11509 - protein, 280 aa, Zea mays
  VARIANT 16: note = Ancestral polymorphism is C, Derived polymorphism is S
  VARIANT 28: note = Ancestral polymorphism is L, Derived polymorphism is H
  VARIANT 53: note = Ancestral polymorphism is A, Derived polymorphism is V
  VARIANT 58: note = Ancestral polymorphism is D, Derived polymorphism is E
  VARIANT 62: note = Ancestral polymorphism is W, Derived polymorphism is S
  VARIANT 182: note = Ancestral polymorphism is W, Derived polymorphism is C
MLKPAKVDRMMVVTTCSHIYTPQKISSLVFKKITNRVAYKTVIKAHSDVVLKAKSMADKVEWANKTKVVIQSKGGSFKGPSIEGGSMRQINLDGALVNMDYGLDPTIGKAIIQAAEEVVEGKLDDHFPLVTWQTGSGTQSNMNANEVNMDYGLDPTIGKAIIQAAEEVAEGKLDDHFPLVIWQTGSGTQSNMNANEVIANRASEILGHKGGQKFVHPNDHVNRSQSSNDTFPTVMHIATTVEIHSRFIPSLQQLHDSLHSKVLTSPFLRNYFTMLVKCLP

SEQ ID NO: 11510 - protein, 216 aa, Zea mays
  VARIANT 3: note = Ancestral polymorphism is W, Derived polymorphism is R
  VARIANT 7: note = Ancestral polymorphism is G, Derived polymorphism is R
MVRTASGEHRGSVIDAAEIGLGTLRYPFRRIRPSPSLLATPCSRMLNLKDLCLITGKASWLAYLDIYCLNADGSLFDAALISAVAAFTHLEIPLVSVGDDGKLFTVGGNDGKNKFELVNREKRKLTLGDIPLSLTCALHKGSILTDPTSEEESIIETYVTVVVDSSDRLVSLQKVGGTVTSMATIKECISLAKERRLRLREILIDSVKAMEVDHTE

SEQ ID NO: 11511 - protein, 328 aa, Zea mays
  VARIANT 19: note = Ancestral polymorphism is D, Derived polymorphism is H
MERILRCFNLGPTGSEDDDISFTLTVETFSFEELSAATDNFSSTLRIGSGGQATVYEGHIPHIGQVAVKRLRTNDFPSKQRAFLMEVYVLNSTNHPHIVKLLGCCSEGTERLLVYEYVKGGTLRHRLKELNWYTRMRIARDTATVLEKLHLQSDPPIIHRDFKSDNILLSTNLSPKVSDFGIAKIAPAGDELTAATSETLGTYGYASPGIFRPLNATVMTDIYSFGVVLLEIITGKPAIDHSKEGDEHYLVHWAASKSKDGNFEEVLDPRLRGSVSRMVLSEALAVVDRCTGTEPVGRPRIREIIRALRHVVSISQDDTPGASSSAAS

SEQ ID NO: 11512 - protein, 286 aa, Zea mays
  VARIANT 265: note = Ancestral polymorphism is W, Derived polymorphism is C
  VARIANT 208: note = Ancestral polymorphism is I, Derived polymorphism is K
  VARIANT 27: note = Ancestral polymorphism is S, Derived polymorphism is C
  VARIANT 21: note = Ancestral polymorphism is F, Derived polymorphism is S
  VARIANT 14: note = Ancestral polymorphism is N, Derived polymorphism is S
MVSRFCSRLPVLLNIVVLLLSTTISDSINSNSDLNALLSFKSLITKDPMGALSSWDGDASNRSAPHFCRWNGVTCSSHQHGSHVTALRLRAFGLEGNISQSLGNLSHLQTLDLSNNNLEGDIPSSIGLTILSATENYMTGRIPDWLGNLTDLTDLNLAWNNFSGQIPQALGKLTNLARLTTQDHTSFDGATSLVKHVEMAYPYRLLEILDATMLQGSTSHSTQETMDMVIIPVVRIGLACCRTAASQRIRMDEVVKELNDIKKTWEDHFAKITGATGRAADGRALH

SEQ ID NO: 11513 - protein, 292 aa, Zea mays
  VARIANT 5: note = Ancestral polymorphism is P, Derived polymorphism is L
  VARIANT 7: note = Ancestral polymorphism is P, Derived polymorphism is L
  VARIANT 29: note = Ancestral polymorphism is F, Derived polymorphism is Y
  VARIANT 62: note = Ancestral polymorphism is G, Derived polymorphism is R
  VARIANT 89: note = Ancestral polymorphism is L, Derived polymorphism is Q
  VARIANT 96: note = Ancestral polymorphism is G, Derived polymorphism is E
  VARIANT 99: note = Ancestral polymorphism is P, Derived polymorphism is L
  VARIANT 107: note = Ancestral polymorphism is G, Derived polymorphism is R
  VARIANT 113: note = Ancestral polymorphism is W, Derived polymorphism is L
  VARIANT 177: note = Ancestral polymorphism is A, Derived polymorphism is V
  VARIANT 184: note = Ancestral polymorphism is F, Derived polymorphism is I
MFSIPPPVIPAPATVVGRLQIVSVGASNFMEELDRIGLLLQMFPYVAIDTEYPGTLHGAPAGPALTTAARYYAFVKANVDELPALQLGLTLCDEGGKLPEAIDDYGRSLQLAWEFNFSDFDIARGRHAPESVQFLMSQGFHFDVAREYGVPSAYFADWLAGVLARLPHWCQPPTWVAFGGAFDFAYMVKMLSGGQPLPDTPEELVARARYLLRGSVFDAKCMAEHCGRPELCGAGLRTVAAVLGVPQLHPAPPRLAGPKSHTACRIYTVMRTLVHGGDGYAYAYEGLIDGIY

SEQ ID NO: 11514 - protein, 164 aa, Zea mays
  VARIANT 90: note = Ancestral polymorphism is G, Derived polymorphism is W
  VARIANT 27: note = Ancestral polymorphism is G, Derived polymorphism is R
  VARIANT 18: note = Ancestral polymorphism is T, Derived polymorphism is I
  VARIANT 3: note = Ancestral polymorphism is K, Derived polymorphism is T
MGKTAQAAAAHAALFCFILLLALRVDGRTAYSWWLFDIHFQLAVYKWSLDSLVAKKSVGVLLPKSAIKFERYLMDEILSIDADVSEVEFGKKTCFVPRQRLPKFDLHLQVAATKKGGRCGGDAGAQPPGMYGIDLGTIVGLELDVDIVVANATTKKLQTPKQNL

SEQ ID NO: 11515 - protein, 228 aa, Zea mays
  VARIANT 94: note = Ancestral polymorphism is G, Derived polymorphism is V
  VARIANT 108: note = Ancestral polymorphism is P, Derived polymorphism is L
  VARIANT 127: note = Ancestral polymorphism is L, Derived polymorphism is Q
MAAEGAPVLVRHAGGVEELRQLPPGFRFRPTDEELVVQYLRRKALGAPLPAAVIPVVRDLYSLDPWDAVDVPAAPDASSQGERYFFAVRPAGGVGSARRATASGRWRPAGKEKPVALPRPCGGGSLLVGVKRAMAFVPRRKKKKAAAAAALAIGWVMHEYRLAAPLHKHGCSLAQAQGEWVVCRVFQKGSGRPRRRRQRPVSPSPSSASSCVTDGSSSSSSDMDEVSS

SEQ ID NO: 11516 - protein, 293 aa, Zea mays
  VARIANT 29: note = Ancestral polymorphism is Q, Derived polymorphism is K
  VARIANT 47: note = Ancestral polymorphism is P, Derived polymorphism is L
MDSLGAIVVCTYLRSRELFTTKFLLFLYQGNIANYLSLAEVDSIYLPVPVNFIFIGFDGNGRHELKLGPEELERWFTKIDHVFEHTRIPPVGEVLTPFYKTTVKKLQQYDLPLVGHVNHNFSVHAIHMGEDVLSVFEHAIKVLSCKDDLVDSRYVVSEYPLFPFCSSSYKCSNIGKVIVDLCLDCVRKLADNCTGLQGFLVFNAVGGGTGSGLGSLLLERLSVDYGNKSKLGFTIYPSPQAGKQARPEKFEIPSKIKKKAEDYINSLQQEAQAKAQALHFEDELARKRMPLYV

SEQ ID NO: 11517 - protein, 293 aa, Zea mays
  VARIANT 23: note = Ancestral polymorphism is S, Derived polymorphism is Y
  VARIANT 41: note = Ancestral polymorphism is Q, Derived polymorphism is K
  VARIANT 71: note = Ancestral polymorphism is Y, Derived polymorphism is H
  VARIANT 126: note = Ancestral polymorphism is R, Derived polymorphism is C
  VARIANT 148..293: note = Derived polymorphism lacks residues 148 to 293
  VARIANT 175..293: note = Derived polymorphism lacks residues 175 to 293
MFPIPPPVIPAPATVVGRLQIVSVGASNYIEELNRIGFLLQMFPYVAIDTEYPGTLHGAPAGPALTTAARYYAFVKANVDELPALQLGLTLCDEGGKLPEAIDDQGGSLQLAWEFNFSDFDIARGRHAPESVRFLMSQGFHFDVAREYGVPSAYFADWLAGVLARLPHWCQPPTWVAFGGAFDFAYMVKMLSGGQPLPDTPEELVARARYLLRGSVFDAKCMAEHCGRPELCGAGLRTVAAVLGVPQLHPAPPRLAGPKSHAACRIYSVMRTTLVHGGVGYAYAYEGLIDGIY

SEQ ID NO: 11518 - protein, 172 aa, Zea mays
  VARIANT 6: note = Ancestral polymorphism is A, Derived polymorphism is D
  VARIANT 13..172: note = Derived polymorphism lacks residues 13 to 172
MTTKAAAAVATAYVRTRTTVALRLLAFAASLAAAVVVVTNRQDRWGITVTFKMFAVWEAFVAINFACAAYALLTAVYAKKLASKHWLHHMDQFSVNLQAASTAGAGAIGSVAMWGNEASGWFAVCRFYRLYCDRGAVSLALAFVALAALAVATGLSRFPAHDTQAVVDHPDD

SEQ ID NO: 11519 - protein, 156 aa, Zea mays
  VARIANT 38: note = Ancestral polymorphism is G, Derived polymorphism is D
  VARIANT 12: note = Ancestral polymorphism is T, Derived polymorphism is A
MLLKQLVPPLSTQLSDRRSSIVKQACHLLNILSKELLGDFEPCAKLFIPMLFKLVVITVLVIAESADTCIKTILQNCKVGRILPRIVDTTKNDRSAILRARCCEYALLILEYWADASGIQRSADLYEDMIKCYTVVNAMSFSSIGAIFSLSHISLF

SEQ ID NO: 11520 - protein, 95 aa, Zea mays
  VARIANT 18: note = Ancestral polymorphism is A, Derived polymorphism is P
MCTRLPLGAMDIHHHPMACTRRRRRVLTPHHSSLHRGTRATSTTSSVLTTRRRMESINTTTTRETRVAPLGSSKDVWLLSAAAACWRNAAAASET

SEQ ID NO: 11521 - protein, 195 aa, Zea mays
  VARIANT 108: note = Ancestral polymorphism is A, Derived polymorphism is V
MEAALEAARAKDTKERLARVERLHEALNAAACRGLTTTEGGLQALSAAAIVSGNHFKIHLNALVPAAVERLGDGKQPVHDAARQLLITLMEMLFKLVVITVLVIAESADTCIKTILQNCKVGRILPRIVDTTKNDRSAILRARCCEYALLILEYWADASGIQRSADLYEDMIKCYTVVNAMSFSSIGVIFSLSHI

SEQ ID NO: 11522 - protein, 319 aa, Zea mays
  VARIANT 107: note = Ancestral polymorphism is K, Derived polymorphism is M
  VARIANT 103: note = Ancestral polymorphism is S, Derived polymorphism is R
MADADLTPNHSLLLKMPAASAHAHSPSLSSLLLYGQESHGEAAPANANANAAAATVEDAASLETSSAVVDSASPMERKRKATAEDSAAISSPQPKDCKQESKSRRGKRPRKETEEKSSTDEDEASKGYIHVRARRGQATDSHSLAERVRRERISERMRMLQALVPGCDKVTGKAMVLDEIINYVQSLQNQVEFLSMRIASMSPVLYGFGTNSEGLHDHHAPKMGGVSFQEAAIAVPAGPAAAVSQASSRPAPSEATMNTACTTTPYSVSLQAQASISFSPSQENGGTYYLVQQAVGEQATRQEELLLSQLVFSNMCSFQ

SEQ ID NO: 11523 - protein, 191 aa, Zea mays
  VARIANT 128: note = Ancestral polymorphism is N, Derived polymorphism is I
MDENQLAQQMWNSVAANDKKAAYSLIVRSRANVNLVHGEIHSSPFLTLGKALQQEQPASPPVGSPRFFDCNSHDKISREPLSPASTSSCRDGMEDGCEGLSLLHLACRVADVGMVELLLQYGASVNMNDSMGRTPLHHCILKGRHRHAKLLLSRGADSQAMDRDGRTALQYAINGGTSDEDILALLQDHSR

SEQ ID NO: 11524 - protein, 549 aa, Zea mays
  VARIANT 364..549: note = Derived polymorphism lacks residues 364 to 549
  VARIANT 336..549: note = Derived polymorphism lacks residues 336 to 549
  VARIANT 325..549: note = Derived polymorphism lacks residues 325 to 549
  VARIANT 17..549: note = Derived polymorphism lacks residues 17 to 549
MHFAKLDDSPMFRTQIQSLEESAELLRERCLKFHKGCRKYAEGLGEAYDGDIAFASSLETFGGGHNDPISVAFGGPVMTKFTIALREIGTYKEVLRSQVEHMLNDRLLNFVDIDLHDVKDAHKRFDKASLSYDQIREKYLSLKKGTRPDITTAIEDVTSLSHVEAKKRYEFLEAVSATMDSHLRYFKQVLAYAQQSRERANKEQASLVERMHEYKRQIDRETRSSINGLNDSYNGDGIQTIGRSSHKQIEAVMQSTSKGKVQTIRQGYLSKRSSNLRADWKRRLFSSHYHGIVHDEKSVARHTVNLLTSTIKVDADQSDLRFCFRIISPTKIYTLQAESAVDQMDWIEKITGVIASLLNSQSPEQCFLSSPKGSGHDRSTSDGSSFTSSVEFEPSVSDDLVLEKKSGNGQHDVRGTHHHRTSTKPEKPIDLLRKVDGNNMCADCGASEPDWASLNLGALLCIECSGVHRNLGVHISKVRSLTLDVRVWEPSVINLFQSLGNMFVNSIWEETLPDDNSSADGSDTSQYLSVSKPKHKDVFSAKEKFIHAK

SEQ ID NO: 11525 - protein, 344 aa, Zea mays
  VARIANT 292: note = Ancestral polymorphism is R, Derived polymorphism is C
  VARIANT 286: note = Ancestral polymorphism is A, Derived polymorphism is V
  VARIANT 280: note = Ancestral polymorphism is G, Derived polymorphism is D
  VARIANT 188..344: note = Derived polymorphism lacks residues 188 to 344
  VARIANT 183..344: note = Derived polymorphism lacks residues 183 to 344
  VARIANT 97..344: note = Derived polymorphism lacks residues 97 to 344
MCLEVPALVPAGSPNANKSKSRGNDPDDDMYLMDLDGNNLKPDSTSAELGTLNEALQELIKEISSGVRENDYLTDDGVFCSGVSKSSSSKFFGGNQRSHSTPKKLQEKFNVGVPETSRSHFAAVPTGTSSKRHAARKWKRSLSDPFRSRPHSAPELVSGCKGSPPVPVAPEARQTYMKGIVSQSSDNQYWDIWNRQKLSPEFEVKRQNILRANQVLTNQLVELERHYISSSGKLGYQVLLSPRSHMSQQLEGNQHLPNPIHSALGAKIMWWLVCFIAQFGQSLVRADYLILRKGFIMVVEKSLLSVAVIPAFADGLYVYTLTRLTSKSWESQFFSLRDSFFLVM

SEQ ID NO: 11526 - protein, 187 aa, Zea mays
  VARIANT 73: note = Ancestral polymorphism is K, Derived polymorphism is E
MSEVVAMAGQAYMKQLQAHPLRTKAITSGVLAGCSDAVAQKISGVSKLQLRRLLLIALYGFAYAGPFGHFLHKLMDRFFKGKKGKETTAKKVLVEQLTASPWNNMMFMMYFGLVVEGRPFGQVKNKVKKDYASVQLTAWRFWPIVSWINYEYMPLQLRVLFHSFVASCWAVFLNLKAARSIANTKKA

SEQ ID NO: 11527 - protein, 292 aa, Zea mays
  VARIANT 23: note = Ancestral polymorphism is S, Derived polymorphism is Y
  VARIANT 71: note = Ancestral polymorphism is Y, Derived polymorphism is H
  VARIANT 126: note = Ancestral polymorphism is R, Derived polymorphism is C
  VARIANT 157: note = Ancestral polymorphism is G, Derived polymorphism is D
  VARIANT 161: note = Ancestral polymorphism is G, Derived polymorphism is C
  VARIANT 168: note = Ancestral polymorphism is H, Derived polymorphism is P
  VARIANT 175..292: note = Derived polymorphism lacks residues 175 to 292
  VARIANT 179: note = Ancestral polymorphism is G, Derived polymorphism is A
  VARIANT 181: note = Ancestral polymorphism is A, Derived polymorphism is T
  VARIANT 202..292: note = Derived polymorphism lacks residues 202 to 292
  VARIANT 229: note = Ancestral polymorphism is P, Derived polymorphism is L
MFPIPPPVIPAPATVVGRFQIVSVGASNYIEELNRIGFLLQMFPYVAIDTEYPGTLHGAPAGPALTTASRYYAFVKANVDELPALQLGLTLCDEGGKLPEAIDDYGRSLQLAWEFNFSDFDIARGRHAPESVRFLMSQGFNFDVARQYGVPSAYFAGWLAGVLARLPHWCQPPTWVAFGGAFDFAYMVKMLSGGQPLPDTPEELVAWARFLLRGRVFDAKCMAEHCGRPELCGAGLRTVAAVLGVPQLDPAPPRLAGPKSHTACRIYTVMRTLVHAGDGYAYAYEGLIDGIY

SEQ ID NO: 11528 - protein, 153 aa, Zea mays
  VARIANT 106: note = Ancestral polymorphism is P, Derived polymorphism is L
  VARIANT 97: note = Ancestral polymorphism is D, Derived polymorphism is Y
  VARIANT 73: note = Ancestral polymorphism is P, Derived polymorphism is L
  VARIANT 58: note = Ancestral polymorphism is P, Derived polymorphism is S
  VARIANT 42: note = Ancestral polymorphism is G, Derived polymorphism is R
MGITSKNIAHRYGVTRQEQDQTAVSSSLSINCNSSQVSDGAGAVLLMKRSVALKKGLPILGVFRSFAAVGVDPADMGVGPAVAIPAAVKFAGLEIGDIDLFELNEPFASQFVYCCNKLGLDRSKVNVNGGAIALGHPLDATGNETSTYLLYFF

SEQ ID NO: 11529 - protein, 524 aa, Zea mays
  VARIANT 445: note = Ancestral polymorphism is F, Derived polymorphism is C
MGSLSGTSSSLAAAFDADSERFQPLNADDVRSYLHKAVDFIYDYYKSVESVPVLPSVEPGYLARQLKSAPPNAAAPFDVAMHELREAVVPGTTHWASPNFFAFFPATNSAAAIAGELVASAMNTVGFTWQANPAAAELEALALDWLAQLLLLPDSFMNRPCSAVVAGRGAGTRGGGVILGTTSEAMLVTLVAARDAALRRSGSDGVAGITRLTVYAADQTHSTFFKACRLAGFDPANVRSIPTGADTDYALDPARLLEAMRRDAGAGLVPTYVCVTVGTTSSNAVDPVGAAADAAAEFGAWVHVDAAYAGSACICPEFRHHLDGVERVDSLSLSPHKWLLTCLDCTCLWVRDTRRLTDSLETRPEYLRNHATESGAVTDLKDMQVGVGRRFRGLKLWMVMRTYGAAKLRQHIRSDVAIAKVFEESVRADHRFEVVVPRNFALVCFRIRPSATASMTEEDAEVANRELMERLNKSGRAFLANTVIGGKFVLRFAVGSTLQEERHVRNAWDLIKMTTTEIINGEVD

SEQ ID NO: 11530 - protein, 637 aa, Zea mays
  VARIANT 503: note = Ancestral polymorphism is G, Derived polymorphism is S
MVAYLLSKPNGSWKASMKVWVGLPAAAAVVVVFLIFAGVAALPAAMAAVVEHTFVVSQVNLTRLCKETLVTVVNGQLPGPAIEVTEGDSVVVHVVNRSPYNMTIHWHGVKQRLNCWADGVPMVTQCPILPGRSFTYRFNVAGQEGTLWWHAHVPCLRATLHGALIIRPRHSPYPFAPKPDREIPVVIGEWWDMDLAQLDRNTMDGFLVDVPTGSTINGKLGDLYSCSGAAQDGFVLEVEPGKTYLLRLMNAALFSEYYLKVAGHRMTVVASDANYVRPYTTDVVAIAPGETMDVLLPADAPPGRSYYMAALAIQAPEPDVQVPPTITRGIVQYRSSSSDVAVDGVVVPAADPAVVMPDMPDQHDTTISFHFHGNLSSLRRRHRVPPARADDHMLVTLSLGSVCRDGGRACARSDSDESIIVGTMNDVSFRAPTAAAMPLLEAHYYGRGDMAMAAAAGVELRALPDAPLRVFNFTDPAYIPYGPKEAPLEPTEKQTTVRRFRHGAVVEVVFQDTAVMQSDSNPMHLHGHDMFVLAHGLGNYDAARDVATYNLLDPPLKNTVVVPRLGWVAVRFVADNPGTWYIHCHFDFHLSMGMVAVFIVEDGSSADTYLPPPPADLPKCGSNKGGLYLPEEFYLQK

SEQ ID NO: 11531 - protein, 743 aa, Zea mays
  VARIANT 227..743: note = Derived polymorphism lacks residues 227 to 743
MSSNKERAKKALNAMKLLGFSKKQATPVLKELLNIFNNNWEPIEDECYRALADAILDRQDNKQTPPSQQGNQAAHAHSEHDRQQYVSAIHDDRGEDDNETPLVKRPRMGTANFRAELQPFESGPQQPTVSTQGALSVSPQNSRGVTRSLTVVLQDAGCEYPLAVDDSFIVKEPKPEPQIDIAEINIGDHLTEPQVDIAEISVGDHLTDRDFLTGPDAIQLSDGSSEQTAGSGARGSMVKQAQSLGRSKQKAPLCKNGVGSMIQNTQETSFVEVDVASSANGEVKMSLKCSLESSNFSISMEEVFKMVEEKCLHSYKVLPPDFSIGKLMSEVCQSVVQLGTMHSEVNRDSGSLHNEVVAPFVKPIACEAAVDINDNVAGGSSVLDSSEPCLQNSLVAWDPEFAHCKQKTTHDTTDISKGEERVRIPIVNEFGSEKCPPSFYYVPRNLVFQNAYVNISIARIGDEDCCADCSGNCLSSLVPCGCARVTGGEFPYTPEGLLKTEFLDECTSVNHFPQEHHRFYCTVCPLERSKNKASPGPCKGHLMRKFIKECWSKCGCGMQCGNRVIQRGITCKLQVFFTREGKGWGVRTVEDLPKGSFVCEYVGEVLTSSELHERAIENARNGKHKHQVLLDAGWGSGVLRDEDALSLDGSFYGNVGRFINHRCYDANLVQIPVEVETPDHHYYHLAFFTNKKVEAFEELTWDYGIGFDDTEGPSKPFRCMCGSRYCRDPNNLRRMARAAAKRK

SEQ ID NO: 11532 - protein, 352 aa, Zea mays
  VARIANT 186: note = Ancestral polymorphism is M, Derived polymorphism is R
MDRLAPPVAVEVPVVHRQQQQQFVHHSQVHQQQRTHQQQQHQNGGGSKPGGRKCCPLRRSRKGCMKGKGGPDNQQCPFRGVRQRTWGKWVAEIREPNRGARLWLGTFGSALEAARAYDAAARALYGDCARLNLQLPPPSAAAGGGPAIVASPSPDTVAGPAAAAAGGHSRHHQYLQQQQPSMAAPMMMVHSSCCSADASSSNSDSNSNSSSSPVTMAAAATSPTYTHHQTTFQMPPPPPSSCGVMMAAVQGCHVDDTTTTTMAMQRHQQMLRELAAAPLHQEADDFEDFMTRLPKAEDFGLQGFQEVPPEVFDEAAGIWDHTAAWSSPTMMIDSAGAQRQQVVDSSSLFNSR

SEQ ID NO: 11533 - protein, 207 aa, Zea mays
  VARIANT 197: note = Ancestral polymorphism is A, Derived polymorphism is V
MAGGGSSGEWSAWKAASIVFRIATVALSLASAIMTATSTQCLYREDGSPDGTISYSDYGSLKYSAFANLPTAVLQGVAIYLEVTGHEKAAKTVELIDKLVLALTSTSAPLLFAVDDITSCGGPPRAGGRARGQPSKGFTKKIQTASFASLGTLASAAGAAYTARVERIVAAAPTLPTPTLPSPDLDVNILYKNNIMAGLPEWLRGKT

SEQ ID NO: 11534 - protein, 216 aa, Zea mays
  VARIANT 102..216: note = Derived polymorphism lacks residues 102 to 216
  VARIANT 71..216: note = Derived polymorphism lacks residues 71 to 216
  VARIANT 65: note = Ancestral polymorphism is G, Derived polymorphism is C
  VARIANT 31: note = Ancestral polymorphism is A, Derived polymorphism is V
  VARIANT 26: note = Ancestral polymorphism is A, Derived polymorphism is V
MAITEFFLDGCPDSNRLLKILGDFKAVLASAFAKNDSKKVVAATSCVLQLNLQYRTTLSIVLGMGLTVVLGLAMRFGAGIFTSDVPMIQVIHRGIPFVAGTQTINSLAFVFDGINFGASDYIYSAYSMFSHRFQTLAQIRLQKQSKQLAEWNTAGFSSELTATKHKEDNVECPVTRLVGTPRWKFFTSKIMKSICDLDKTPGPGRQVKYDNLEVHF

SEQ ID NO: 11535 - protein, 87 aa, Zea mays
  VARIANT 75: note = Ancestral polymorphism is T, Derived polymorphism is I
  VARIANT 73: note = Ancestral polymorphism is F, Derived polymorphism is L
  VARIANT 49: note = Ancestral polymorphism is L, Derived polymorphism is P
  VARIANT 48: note = Ancestral polymorphism is S, Derived polymorphism is G
  VARIANT 39: note = Ancestral polymorphism is D, Derived polymorphism is G
  VARIANT 38..87: note = Derived polymorphism lacks residues 38 to 87
  VARIANT 28: note = Ancestral polymorphism is V, Derived polymorphism is M
  VARIANT 24: note = Ancestral polymorphism is K, Derived polymorphism is N
  VARIANT 9: note = Ancestral polymorphism is D, Derived polymorphism is N
MGSVLTEIDTKTSIKDLTISSDEKFLAVNRSSGPCRVWDLQSSEVVASLPRETGEIFGFCRFSNKADNSHVLFITVMEGDIKAIMEK

SEQ ID NO: 11536 - protein, 142 aa, Zea mays
  VARIANT 107..142: note = Derived polymorphism lacks residues 107 to 142
  VARIANT 75: note = Ancestral polymorphism is I, Derived polymorphism is V
  VARIANT 47..142: note = Derived polymorphism lacks residues 47 to 142
  VARIANT 44: note = Ancestral polymorphism is Y, Derived polymorphism is C
  VARIANT 39: note = Ancestral polymorphism is A, Derived polymorphism is V
  VARIANT 21: note = Ancestral polymorphism is D, Derived polymorphism is N
  VARIANT 1: note = Ancestral polymorphism is M, Derived polymorphism is L
MLLEDIGKESASVYTSWYLNDVDYYGGFEQDELDELFEAMQSIYKAWCLGFAPLCVGGDMESVAVQEFSRTLFNIRPDIALNVAQTIFQSDVRSLLPHVSAPCHIVQSTKDLTVPVVVSEYLHRHLGGDSIVEVMPSEGHLP

SEQ ID NO: 11537 - protein, 697 aa, Zea mays
  VARIANT 42: note = Ancestral polymorphism is R, Derived polymorphism is M
  VARIANT 114..697: note = Derived polymorphism lacks residues 114 to 697
MPATASGGARPEEEEEEVSPAPSPSTSASACMGTRAEELTARLAATGPRPGAGRGAAAAGGEEVEHERVRALREIKNQIIGNRTKKLLYLRLGAVPSVVAALAEPGASPAALVQAAAAAGSFACGVDDGARAVLAAGAVGHLTRLLAHPDEKVVDASARALRMIYQSRLAPKFDVNSGENVDFVLSLLDSENENVTELAAAIVSHSCESSAEQLSLCSAGVPQKLVSLFGCSMNLRDACLGSIIAVIQNNQDVASRFASTDHGKGFRSVVGLIHDRSPRTRLLACLCLIALGHASPDHFQDNQIKTKLIMVLLELIEEPGHVGDEAPLALTTLIKDSFELQRQALTTNAVEKLSSHLLANPLGTRRAVTILLALSELCSKLEESRSQLMSVEVSTLLLEALKHDWADIRVAACSCLKNISRSPKILSGGRLSCDTVIGPLVQLLNDSSTSVQVAALGAICNIAINLTPRKSVLLHSGVVSQLVHLSKSMDPMLRLKSVCALRNIMFLLSPKDKDFIVKELTLSTLSSLICDSEHFVQEQTLALVHNLVDGYVVSANYVIGEDGMVMDAIARQLNNASAPGVCIQGMYVLANIAAGNEWNKEAVMNVLLPHRADRIKPSFAVNFLKSKDRQLRVATLWCVLNLIYPKCEASSGRAVRLQSAGVILQVKRMINDPCLDCKLRVRMVLDHCLDNADDCFM

SEQ ID NO: 11538 - protein, 71 aa, Zea mays
  VARIANT 30: note = Ancestral polymorphism is M, Derived polymorphism is T
  VARIANT 50: note = Ancestral polymorphism is R, Derived polymorphism is S
MNNSTSPAVDWGDDSAGEMDSEDAAPSSSMGISIAIGSMMEVDADDRQPSPPPDADFFNAFPDDFDDQDLD

SEQ ID NO: 11539 - protein, 124 aa, Zea mays
  VARIANT 49: note = Ancestral polymorphism is A, Derived polymorphism is S
MDDGGEPTKYRGVRRRPSGKFAAEIRDSSRQSVRMWLGTFDTAEEAARAYDRAAYAMRGQIAVLNFPAEARNYVRGGSSSSRQQQQGGGGGGGSGGGAGQQVIELECLDDQVLQEMLKGGDGKK

SEQ ID NO: 11540 - protein, 234 aa, Zea mays
  VARIANT 202: note = Ancestral polymorphism is S, Derived polymorphism is L
  VARIANT 139..234: note = Derived polymorphism lacks residues 139 to 234
  VARIANT 137: note = Ancestral polymorphism is P, Derived polymorphism is L
  VARIANT 130: note = Ancestral polymorphism is A, Derived polymorphism is S
  VARIANT 122..234: note = Derived polymorphism lacks residues 122 to 234
  VARIANT 121..234: note = Derived polymorphism lacks residues 121 to 234
  VARIANT 97..234: note = Derived polymorphism lacks residues 97 to 234
  VARIANT 73..234: note = Derived polymorphism lacks residues 73 to 234
  VARIANT 58: note = Ancestral polymorphism is K, Derived polymorphism is N
  VARIANT 57: note = Ancestral polymorphism is G, Derived polymorphism is R
MPGARGKVAGAAEAGVPLFYAPWGSGPPRRRGPVPRAVLEPAMQGKDMIGRARTGTGKTLAFGIPIMDKILSYNEKNGFGRNPLAIILAPTRELARQVEKEFRESAPLDTLCVYGGVPINQQMRALKYGADIVVGTPGRVIDLLRRGVLNLSQIQFVVLDEADQMLAVGFDEDVEVIMEQLPQNRQSMLFSATMPSWIRKNSNKYLKDPVIIDLESMAMVPSHYSAFYLCSRLQ

SEQ ID NO: 11541 - protein, 163 aa, Zea mays
  VARIANT 91: note = Ancestral polymorphism is G, Derived polymorphism is D
  VARIANT 77..163: note = Derived polymorphism lacks residues 77 to 163
  VARIANT 76: note = Ancestral polymorphism is R, Derived polymorphism is C
  VARIANT 56..163: note = Derived polymorphism lacks residues 56 to 163
  VARIANT 12: note = Ancestral polymorphism is R, Derived polymorphism is Q
MKRNPRVTSSRRKCRKAHFTAPSSVRRVLMSAGLSTELRHKYNMRSIPIRKDDEVQVVRGTFKGREGKVVQVYRRCWIIHVERITREKVNGSTVNVGIHPSKVIVTKLKLDKDHKALLDRKAGAAPPTKLRASLLPTTSPRPPLAPPPPAPLSRRSTRLFTVI

SEQ ID NO: 11542 - protein, 591 aa, Zea mays
  VARIANT 133..591: note = Derived polymorphism lacks residues 133 to 591
MVSDASKKKAAQKKAAAAAKRGAKVPTPSSSSSADAKSIGAVAALKLSDRTCTGVLASHPLSRDIHIESLSLTFHGHDLIVDSELELNYGRRYGLLGLNGCGKSTLLTAIGCRELPIPEHMDIYHLTHEIEASDMSALQAVVCCDEERMKLEKEAEILAAQDDGGGDALDRVYERLEAIDASTAEKRAAEILYGLGFNKQMQAKKTRDFSGGWRMRIALARALFMNPTILLLDEPTNHLDLEACVWLEETLKKFDRILVVISHSQDFLNGVCTNIIHMQNKKLKLYTGNYDQYIQTRSELEENQMKQFRWEQEQIASMKEYIARFGHGSAKLARQAQSKEKTLAKMERGGLTEKVVRDKILVFRFTNVGKLPPPVLQFVEVTFGYTPDNLLYKKLDFGVDLDSRIALVGPNGAGKSTLLKLMTGELVPLDGMVRRHNHLRIAQFHQHLAEKLDLDMSALQYMMKEYPGNEEERMRAAVGKFGLSGKAQVMPMRNLSDGQRSRVIFAWLAYRQPQLLLLDEPTNHLDIETIDSLAEALNEWDGGLVLVSHDFRLINQVAHEIWVCENQAVTRWEGDIMDFKEHLRSKACLSD

SEQ ID NO: 11543 - protein, 265 aa, Zea mays
  VARIANT 199: note = Ancestral polymorphism is Q, Derived polymorphism is K
MAPSSKDGATEQPTSGGSGDDRENGTGEPKEGAVVTGNRRPRGRPPGSKNKPKPPIFVTRDSPNALRSHVMEVAGGADVAESIAHFARRRQRGVCVLSGAGTVTDVALRQPTAPGAVVALRGRFEILSITGTFLPGPAPPGSTGLTVYLAGGQGQVVGGSVVGTLIAAGPVMVMASTFANATYERLPLDDAEEDPGQAQLPPGPGGGPPLIMGGIADPSAMPMFGGGGGGVPPSLMMPGGAAASGAGLQLGHEGLAWARARPPPY

SEQ ID NO: 11544 - protein, 150 aa, Zea mays
  VARIANT 40: note = Ancestral polymorphism is D, Derived polymorphism is N
  VARIANT 36..150: note = Derived polymorphism lacks residues 36 to 150
  VARIANT 32..150: note = Derived polymorphism lacks residues 32 to 150
  VARIANT 28: note = Ancestral polymorphism is N, Derived polymorphism is D
  VARIANT 25: note = Ancestral polymorphism is D, Derived polymorphism is A
MSSSSSSSQRKEEEKAMAPAADAEAKKNPRLQRMTQEQIDSLIRYQTVHMPEEAFRRLSRRTKELLTPEELAYQGDFPVPMGQIDDYLANICREINQTEARFLRERDRILNDYYNKGYAYADQQPSSSSSGNRRRFPPGLTKKKQTKQVV

SEQ ID NO: 11545 - protein, 265 aa, Zea mays
  VARIANT 90..265: note = Derived polymorphism lacks residues 90 to 265
  VARIANT 145: note = Ancestral polymorphism is M, Derived polymorphism is K
  VARIANT 174: note = Ancestral polymorphism is D, Derived polymorphism is Y
  VARIANT 218: note = Ancestral polymorphism is P, Derived polymorphism is L
  VARIANT 255: note = Ancestral polymorphism is L, Derived polymorphism is V
MQGRRRSPSRDSTTTKQDDYVPDTLHTEQMTEQAGLNCSGHSECVEGEEVGSLPCLFQEMYMKGEEGRDTNASRFLHCDGSSDQSRFSMQLLLNALKKQVRHFTGLGNTLMTYNLRPVIEEIQRSAEDSGDRRNLKMCLGMLKSMRNRCDQNFVAYRKGLGVVCNKKGGFGVDDFVVEFFGEVYPSWRWYEKQDGIKHIQNNSEDQAPEFYNIMLERPKGNRDGYDLVFVDAMRPTTRVESATPVTLTAKQSKILLRFRFQPREC

SEQ ID NO: 11546 - protein, 638 aa, Zea mays
  VARIANT 349..638: note = Derived polymorphism lacks residues 349 to 638
MNHPSSSSSSAQPPPAPAVAAEATSLAPGFRFHPTDEELVSYYLKRKVLGRPLKVDAIADVDLYKLEPWDLPARSRLRSRDSQWYFFSRLDRKHANRARTNRATSGGYWKTTGKDREVRHGPRLVGMKKTLVFHAGRAPKGERTNWVMHEYRLEGDDAAGIPQDSFVVCRIFQKAGPGPQNGAQYGAPFVEEEWEEDDTDDGLLPVEGVAAADPEVPLASVEIPGALDRGYLQMSDLIQGLDDQNGNGTPSLPVSDTSNNSNHSEDVDGNSGDILSDPNLGSNFLQYAEPGEQNSLMLNGTIISNANAGDFFDNSSHSDGFLELKDFGDAANLDFPLGNGSSIWPLDCWAWKTPDSAESLNGTNDEIPPLPDDQTFQPDELEQLLQSIQEDSHLGSSIIDPPHSSMTNSVLPDEDCLMFYDAPFDSTMCDDGFAQNGILGSAATNLSGIGMVDDGMPYFDAMDGNLFNDILGSIQQPDGSSSHAFNGPVLTQEVNNTMFTYSPTQKVLEPNIVVGAPSSARLPEAGSQLNCVVLPGEFPSNHRKSLARISGARPNTLHVSAEVIHIGSLAVPSGADKWALQKDQGMELLFSADFEPDARIHCGCNTITAVLRGGFCLFFVSAIMLLVSYEVGMCIYGK

SEQ ID NO: 11547 - protein, 127 aa, Zea mays
  VARIANT 48: note = Ancestral polymorphism is D, Derived polymorphism is N
MKFTNKFDVCRLQVLVLDPNLIPQFVDIVIGDHLYELQFRVEENVDSDNPILMDMDDEGFGDDEPYGADGNGPVPQDKEGGTRKKNDLASSSTSKIGGDGQNGRRVLEAVLQEQFVPADTVTRSHGD

SEQ ID NO: 11548 - protein, 139 aa, Zea mays
  VARIANT 15..139: note = Derived polymorphism lacks residues 15 to 139
  VARIANT 17: note = Ancestral polymorphism is V, Derived polymorphism is M
  VARIANT 37..139: note = Derived polymorphism lacks residues 37 to 139
  VARIANT 63: note = Ancestral polymorphism is L, Derived polymorphism is M
  VARIANT 105: note = Ancestral polymorphism is E, Derived polymorphism is V
MSRGRSPEPLDFFIWTVQVLRLLSFFVLSFNLDVGLWLEEINLGSYRQAFEENGVNGEYLESLSVFTTEQILRFIRRCHMKWGDFITLCKELRRIKVACLKGEQEVRRPWWAPSCLSVVFTRVARHNRQSRVVSLKLEA

SEQ ID NO: 11549 - protein, 70 aa, Zea mays
  VARIANT 35: note = Ancestral polymorphism is E, Derived polymorphism is G
MTTSRRLADRKTAKFQKNITRRGSVPETAVKKGKGNGYAAGPVVLGFFVFVVIGSSLFQIIRTATSGGMA

SEQ ID NO: 11550 - protein, 481 aa, Zea mays
  VARIANT 10: note = Ancestral polymorphism is P, Derived polymorphism is Q
MADETETAAPLLRSAPLVADAPRRNRFAFVCATLASMTTILMGYNLALMSGAQLFIRQDLGLSDVQVEVLTGSMNLFMLVSILGAGWAADLLGRRGTLVLANAFLMAGALAMSAGGSYAALVAARFVTSVGVGFARVVAPVYNAEISPASTRGVLSSLLDMFINVGILLSYVSNYAFAGLPVHTGWRVMFAVGALPPVFLAAGVLAMPESPRWLVMRGRYGEARAVLLRTTPAEADLRLQEIKEAVEAPRAPADSGGGGGVGVWKEMLWRPTKTVRRILVCAIGVLFFQQASGIDAIVLYSPLVFQKSGMSSNSAILGATVAVGVVKTCFILVATLLSDCVGRRPLLLASAAGSAATLASVALTLCVGSTSTVSTAACVASVLAFVAAFSVGFGPLAPTYSSEIIPLRLRAQGTGLGTAVNRLTCALVTMTFISLADWLTMPGCFFLYAGVAAAAFVFVYLELPETSGRSLEDMHELFAAK

SEQ ID NO: 11551 - protein, 821 aa, Zea mays
  VARIANT 225..821: note = Derived polymorphism lacks residues 225 to 821
MAGSESSMEYQLKKYLLLLATLVATVTYAAGLNPPGGSWLEDDRAAGELAGDSILRDTNYVRYIIFYCFNAVSFAASLVVSLLLLLLHRDAAASLLKLTRAVMVVDLLALMGAYAAGTSHDRFTTVCASVLVIATAVYVIVAVPRFSISTSASAQTEQPQPPSPGDLEKHEILMVLAVFVATVAYVAGLNPPGGFWRTTLLDANGRLRHTAGDPVLQALHPIRYKFFFFSNSTAFIASLLAITFTVHYEKLKLKSIRVPLYGLVVVAILGIGGAYAAGSCRDSKHTIYVLCLVVAVLLCIFLQWFLVGSAFQLPCYGTGPTTRKGSGKGIDDDDDLDKIREFIQLLVILAATVAYQAGVDPPGGVWAENGEGHSAGDPIFLTTHPGRFKVFFYFNSAAFVASLVIMVMLQNEFLVRRHALEAVMILDLFCLIGAYAAGSCRDTSTSIYMLAMAGGVLVYVVIHIVFFTLDPNREKDNNKADDEGNATNSEQEKKRKKDRLEKKREVLLLLAILAATLTYQAGLTPPGGLWENDRFGHRAGFPVLQDKYPRRYKAFLYCNTASFMASVALIVLLLNPNLYGPGINCYALFVCMVAGMFSLIGAYAAGSSLHLRTSIVLLLLVLAVFAAVLYVTIKHRRHARENKDSSSPADRQEQKPRKPSGAAAMYLMLVGILAASVTYLTGLKPPGGLWMEDDGDGHSAGNPVLYDIDKHRYNAFFYNNSVSFMASVTVIVLLLPRMLRDNDDERNKRPLWPMHTAMFLGMLALLGAYAAGSARDWCTSKNVILLLLPIVGFVALLFFWKKGKASEGTQHGQSARLPSST

SEQ ID NO: 11552 - protein, 501 aa, Zea mays
  VARIANT 152..501: note = Derived polymorphism lacks residues 152 to 501
MAQAAVGSNDGTEAPLLPSSAGGPTPPPAGAPRRNRFAFVCATLASVTTMLHGYNLTLMSGAELFMREDVGLTDAEVEVLAGSMNVFMLASTLAAGWVADHLGRRRTLVLANAFLMAGALAMSLGTSFAALMAARFVTSLGSGLARVVAPVYNAEISPASTRGALSSMLDVFVNVGILLSYVSNYAFSGLPVHLGWRAMYAVGVVPPVFIAAGVLLVMPESPRWLAMRGRQSDARAVLLRTLDTPAEADLWLGEIKRAVADAEPPPPPAGRGAGASVSIWKQLLVRPSTNVRRILTCVLGLHFFVQASGVDAILLYSPLIFRAVGMASDSAILGATVAMGAVKSCFILVGMLFTDRLGRRPLLLASTAGVAVTATALAVTLYVGTSTTTSTSPATTAACLASVLAVVATYSVGYGSVVSAYSAEVLPLRLRAQGSSLAMAVNKLMAGVVSMTFISLADAITMPGCFFLYAAVTAAAFVFVYTRLPETKGRSLEDMEVLFHK

SEQ ID NO: 11553 - protein, 317 aa, Zea mays
  VARIANT 37: note = Ancestral polymorphism is K, Derived polymorphism is N
  VARIANT 33: note = Ancestral polymorphism is E, Derived polymorphism is K
  VARIANT 25: note = Ancestral polymorphism is S, Derived polymorphism is L
MASSLLGVTFPPSHFLFFIQGFTKSLAMTVLSEIGDKTFFPAAAAATLRSQRSPQHPRSWKVRRALPFFQRVSCSVDRDWKTIEACVGSKTVIQFLKLFYYKDNLPSDSKVQQITVQVAQRVRLVLGQLLKQLSKKLWFHHSVCCDGADARAEKSAHSAYKWVGYIRPGSNELGIVAQLVFGLVGSVPRRLTFRRKKSYVYNSSSLHMTASFFSLLDSFHFCPSDTSWVDQFTCFKKYSTDSMRMDYTNKKGSVGENMFHWQATIMGPSDTPFAGGVFLVNIHFPPNYPFKPPKVSFHTKVFDLNINDNNNICLGHS

SEQ ID NO: 11554 - protein, 472 aa, Zea mays
  VARIANT 239: note = Ancestral polymorphism is F, Derived polymorphism is V
  VARIANT 76: note = Ancestral polymorphism is G, Derived polymorphism is W
MAPPPHALVIPYPAQGHVIPLLELAHALVDRGFTVTFANSEFNHRRVVAAAAMSESSTLLGRGVRLVAVPDGMEPGEDRNNLVRLTLLMAEHMAPRVEDLIRRSSDDGGAEGGPITCVVADYNVGAWALDVARRTGVRSAAIWPASAAVLASLLSIDKLVQDKIIDPQDGSALAQGTFQLSVDMPVMQTSQLAWNCIGNHDGQEALFRYLVGGIRAVDKCDFVLCNSFHGAEPATFARFPRIVPVGPLLTGERRGSGSKTAVVGHFWRPEDDACMSWLDAQAAMSVVYVAFGSFTMFDTRQFRELALGLELSGRPFLWVVRPDIVLGGDVHDYPDGFLDRVRATGRGMVVAWSPQQRVLSHPSVACFVSHCGWNSTMEGVRNGVPFLAWPYFADQFVNQGYICDVWKVGLRAEADGSGVITKEHIAGRVEELMSDASMRERVEAMKKAALESINRGGSSLSNFDMFVDAMKA

SEQ ID NO: 11555 - protein, 139 aa, Zea mays
  VARIANT 5: note = Ancestral polymorphism is R, Derived polymorphism is M
  VARIANT 7..139: note = Derived polymorphism lacks residues 7 to 139
  VARIANT 14: note = Ancestral polymorphism is T, Derived polymorphism is P
  VARIANT 19: note = Ancestral polymorphism is I, Derived polymorphism is T
  VARIANT 21: note = Ancestral polymorphism is K, Derived polymorphism is T
  VARIANT 22: note = Ancestral polymorphism is S, Derived polymorphism is Y
  VARIANT 26: note = Ancestral polymorphism is A, Derived polymorphism is T
  VARIANT 34: note = Ancestral polymorphism is P, Derived polymorphism is L
  VARIANT 36: note = Ancestral polymorphism is N, Derived polymorphism is I
  VARIANT 39: note = Ancestral polymorphism is G, Derived polymorphism is E
  VARIANT 40: note = Ancestral polymorphism is H, Derived polymorphism is D
  VARIANT 43: note = Ancestral polymorphism is G, Derived polymorphism is R
  VARIANT 89: note = Ancestral polymorphism is D, Derived polymorphism is V
  VARIANT 107..139: note = Derived polymorphism lacks residues 107 to 139
MVHHRFYSAYDNTTLLYEILKSIKWARKTYGNLPVNVVGHSIGGDLASFCVLGLFVHIYLSILDTYFLCVFHIICVFLKKWVYGMSVADHLEYYSVTLHADSRGTCQFVIGTTNQVYNYIREVDGSIILLRYICKNHEL

SEQ ID NO: 11556 - protein, 690 aa, Zea mays
  VARIANT 50..690: note = Derived polymorphism lacks residues 50 to 690
MAAAAASPPVPLGPDASDLLDGDLRLKPAVAISWDSEALHSHAERCEIESKVCVIDPSLLPALDDLLQDIYESLQPQPVDYEHRNLMVNVFNKIVGEIFGKNNELPIVEPFGSFTMDLFTPQSDLDLSVNFNTDANDQYPRKNKISAIRKLAHVLFSHQRHGRCYGVSPIVTARVPVLKVIDKGTGVECDISVENKDGMSRSAIFKFISSIDKRFRILCYLMKFWAKVHDVNCPKDRTMSSMAIISLVSFHLQTRCPPILPAFSAVLKDGTDFASIEKNVSLFQGFGHSNKESIAELFVSLMSKLVSVEGLWEQGLCASNFEGTWISKTWAKGVGNLNVEDFLDRSQNFARSVGVKEMQKICECLRASVSDLSKFSKGEIAAPKLKALLFKPLNQVNPVIKPHQKTIKRKRTNPNKTRTNPIQKNAKKKKALEQDKLAISPGQKDGKKTLDQEKSVSSPIQKGAKKTKPLNQDKLVISPGQEDDKKPLVQDEPIVVSPIQKNNNKYVDQEKSLQQEKQIISPGQKDDKKSSKVGPDSACNHVQQKKVKATVSTGRAANTHVSSSRPRSVFIPQAHWPSQPIVDRFAHIPEHLISPSAFSYGLPQPLMHPAYPHPHSHQGLVGQGQGNFLHFNPGIELQHQGQAFFGPPAVYHPMVNGFHPFGINGAQQVQYIDNRMVQRPPYGFGPGFWG

SEQ ID NO: 11557 - protein, 86 aa, Zea mays
  VARIANT 17: note = Ancestral polymorphism is M, Derived polymorphism is I
  VARIANT 28: note = Ancestral polymorphism is L, Derived polymorphism is F
MPPVVPRSGRIVRRTAMIGAATAAYLLLTADYGPDFLDPIRGSLALFSKSDTDKDNVHQAEQDRRSNMEPDGVVVKSSSASSRTRN

SEQ ID NO: 11558 - protein, 179 aa, Zea mays
  VARIANT 137: note = Ancestral polymorphism is G, Derived polymorphism is W
MVRSLAPHRPLDPTACRANFFVYILAGPEEGQGPAAVVEAGQVRWWQAKEEEVEQGKAKGEGKQRGAVRPGYLRQAALGGAQVQANHPFHPLRASEDQRLPCSEGHQGLDGAWPHSDGLGPLKPADLHQGNQYIRMGKRSKMHCLPSLQEELVFRTVAIFVKSCQCYVTGDEFQVTATF

SEQ ID NO: 11559 - protein, 123 aa, Zea mays
  VARIANT 111: note = Ancestral polymorphism is P, Derived polymorphism is L
  VARIANT 40: note = Ancestral polymorphism is S, Derived polymorphism is L
  VARIANT 38: note = Ancestral polymorphism is V, Derived polymorphism is F
  VARIANT 36..123: note = Derived polymorphism lacks residues 36 to 123
  VARIANT 34: note = Ancestral polymorphism is N, Derived polymorphism is T
  VARIANT 21: note = Ancestral polymorphism is M, Derived polymorphism is I
  VARIANT 11: note = Ancestral polymorphism is S, Derived polymorphism is C
MKGNMASLVGSILKRCLLCYMLKKLNLLLCYLLNLKRVGSGCFACRRCLRDEERAMVAARHEEQAILVECKAGSPPPCGKRKDRTKSPEGSARACTCPDTLQTKSPRGLFPYPIFILITAWFP

SEQ ID NO: 11560 - protein, 198 aa, Zea mays
  VARIANT 182: note = Ancestral polymorphism is F, Derived polymorphism is L
  VARIANT 157: note = Ancestral polymorphism is K, Derived polymorphism is R
  VARIANT 149: note = Ancestral polymorphism is P, Derived polymorphism is L
  VARIANT 145: note = Ancestral polymorphism is G, Derived polymorphism is R
  VARIANT 141: note = Ancestral polymorphism is T, Derived polymorphism is I
  VARIANT 140: note = Ancestral polymorphism is E, Derived polymorphism is K
  VARIANT 111: note = Ancestral polymorphism is E, Derived polymorphism is K
  VARIANT 102: note = Ancestral polymorphism is G, Derived polymorphism is R
  VARIANT 98: note = Ancestral polymorphism is V, Derived polymorphism is M
  VARIANT 80..198: note = Derived polymorphism lacks residues 80 to 198
  VARIANT 76..198: note = Derived polymorphism lacks residues 76 to 198
  VARIANT 70: note = Ancestral polymorphism is V, Derived polymorphism is M
  VARIANT 64..198: note = Derived polymorphism lacks residues 64 to 198
  VARIANT 63: note = Ancestral polymorphism is E, Derived polymorphism is K
  VARIANT 60: note = Ancestral polymorphism is R, Derived polymorphism is C
  VARIANT 58: note = Ancestral polymorphism is S, Derived polymorphism is R
  VARIANT 55: note = Ancestral polymorphism is K, Derived polymorphism is M
  VARIANT 54..198: note = Derived polymorphism lacks residues 54 to 198
  VARIANT 47: note = Ancestral polymorphism is A, Derived polymorphism is T
  VARIANT 45: note = Ancestral polymorphism is T, Derived polymorphism is M
  VARIANT 43: note = Ancestral polymorphism is G, Derived polymorphism is E
  VARIANT 42: note = Ancestral polymorphism is S, Derived polymorphism is T
  VARIANT 36: note = Ancestral polymorphism is A, Derived polymorphism is V
  VARIANT 29: note = Ancestral polymorphism is P, Derived polymorphism is S
  VARIANT 28: note = Ancestral polymorphism is S, Derived polymorphism is L
  VARIANT 14: note = Ancestral polymorphism is S, Derived polymorphism is N
  VARIANT 13: note = Ancestral polymorphism is L, Derived polymorphism is F
  VARIANT 10..198: note = Derived polymorphism lacks residues 10 to 198
  VARIANT 3: note = Ancestral polymorphism is A, Derived polymorphism is T
MGAFALPTLQELLSNYEGEQAFFSYMLSPTRKDLIALVQIGSGKTVTFMLPILQKLLSNRQAEQSFFACVLLPMRELVIQIVEQFEALRSTIGLRYSMENIGEIGGAIGIENGNTGEARKWCGVVTSGYGRIAGHHRLRETHLLGRFIPGACFRQVKYPSFLIFTSLHFHYNIAQFSMLKSFYILLRIFFEHVTYLHY

SEQ ID NO: 11561 - protein, 257 aa, Zea mays
  VARIANT 94: note = Ancestral polymorphism is A, Derived polymorphism is S
MSDYNRYGHSYSYGGGYGQGPAPSAPPAPHMPTATSAAPPSSSSYGAYAGYPPAYPPPPSQAAGGFGPAGSGYGFVPVAFPPGTHPDVERAFRAADRDCSGAIDERELQGALSSAYHRFSVRTVRLLMFLFNDPSSSTPSRMGPTQFVSLWDCLGQWRGIFDRYDRDRSGKIDSRELTEALRSLGYAVPPSVIELLIANYSNGVPSNGALDFDNFVECGMIVKGLTEKFKEKDTRYTGSATLTYDGFLSMVIPFIVP

SEQ ID NO: 11562 - protein, 261 aa, Zea mays
  VARIANT 98..261: note = Derived polymorphism lacks residues 98 to 261
  VARIANT 102: note = Ancestral polymorphism is G, Derived polymorphism is C
MGRAPPPSSASRLFCLRWRSGGRANGVVGCFGFLHAVLYEVQPYQLPLQSLNRSVMLLIEHQVRYELGRQPANTKLSSNKTVRRVYVRGGYVKWRALQLDTCNYSWGSEALTRKTGILDVVYNASNNELVRTQTLVKSAIVQVDAAPFKQWYLTHYGVDIGRKKKVIIAKKDATERKIEKRQQDRALDTHIEEQFGSGRLLACISTCPGQCGRADGYILEDKELEFYMKKLQRVQFLKGWECVQEDKGIDPPNLRYQFKQQ

SEQ ID NO: 11563 - protein, 246 aa, Zea mays
  VARIANT 219: note = Ancestral polymorphism is L, Derived polymorphism is F
  VARIANT 172: note = Ancestral polymorphism is S, Derived polymorphism is F
  VARIANT 160: note = Ancestral polymorphism is P, Derived polymorphism is S
  VARIANT 155: note = Ancestral polymorphism is P, Derived polymorphism is L
  VARIANT 148: note = Ancestral polymorphism is E, Derived polymorphism is K
  VARIANT 46: note = Ancestral polymorphism is R, Derived polymorphism is S
MSKLHSELLKDCISQIVQDAKKNRKFTETVELQISLKNYDPQKDKRFSGSVKLPHIPRPKMKVCMLGDAQHVEEVNRQLMMHLKIPSPHLIPFAIKSAYTNPAQLHGRLKAEKMGLDYMDVEALKKMNKNKKLVKKLAKKYHAFLASETIIKQIPRLLGPGKFPTLVTHQESLESKVNETKATVKFQLKKVLCMGVAVGNLSMEEKQIQQNIQMSINFLVSLLKKNWQNVRCLYIKSTMGKPFRIF

SEQ ID NO: 11564 - protein, 133 aa, Zea mays
  VARIANT 93..133: note = Derived polymorphism lacks residues 93 to 133
  VARIANT 77: note = Ancestral polymorphism is S, Derived polymorphism is L
  VARIANT 62..133: note = Derived polymorphism lacks residues 62 to 133
  VARIANT 52: note = Ancestral polymorphism is G, Derived polymorphism is D
  VARIANT 45: note = Ancestral polymorphism is V, Derived polymorphism is M
  VARIANT 40: note = Ancestral polymorphism is R, Derived polymorphism is H
  VARIANT 20..133: note = Derived polymorphism lacks residues 20 to 133
  VARIANT 19: note = Ancestral polymorphism is S, Derived polymorphism is L
MDTLHLTVFTSAAAVGWWSRVATSQISRLQCNFPPMDRRRLMVFVPTLVACGAEASIRTYDQERTTPSSSPAVRPSSLMWDLAESAAPTLLCQVMELDMQASSNYALLGLNWIMVLHWWLARSVKPTNAEASL

SEQ ID NO: 11565 - protein, 108 aa, Zea mays
  VARIANT 88..108: note = Derived polymorphism lacks residues 88 to 108
  VARIANT 81: note = Ancestral polymorphism is A, Derived polymorphism is V
  VARIANT 68: note = Ancestral polymorphism is N, Derived polymorphism is I
  VARIANT 60: note = Ancestral polymorphism is K, Derived polymorphism is E
  VARIANT 21..108: note = Derived polymorphism lacks residues 21 to 108
MSTGQQGYRCRRTSPAKNALQIYPAMESTVNPKAYPLADAQLTMGILDIIQHSTNYKQLKKGANEATNTLNRGISEFVVMAADTEPLEILLHLPLLAEDKGTLQLAAE

SEQ ID NO: 11566 - protein, 308 aa, Zea mays
  VARIANT 9: note = Ancestral polymorphism is E, Derived polymorphism is Q
  VARIANT 46: note = Ancestral polymorphism is G, Derived polymorphism is D
  VARIANT 49: note = Ancestral polymorphism is S, Derived polymorphism is T
  VARIANT 105: note = Ancestral polymorphism is P, Derived polymorphism is L
  VARIANT 174..308: note = Derived polymorphism lacks residues 174 to 308
  VARIANT 257: note = Ancestral polymorphism is G, Derived polymorphism is E
  VARIANT 281: note = Ancestral polymorphism is R, Derived polymorphism is L
MLRLDYLSERPNLPLLQVTDALAQAGLESSNLIVGIDFTKSNEWTGKFSFHGRSLYHISNTPNPYEQAISIIGRTLSKFDEDNLIPCFGFGDASTHDQDVFYFSPDEKPCNGFEEALDRYRELVPHLRLAGPTSFAPIIEMAMTIVEQSGGQYHVLLIIADGQVTRSVDTASGQLSSQEQKTVDAIVKASELPLSIVLVGVGDGPWDMMKEFDDNIPARAFDNFQLFSSSGSSDGGAGPALRRSSSVSSKVENPVQGLIAYCKRSQQLAFVRKSASDAGFRFLSSSASRIAAESESDDLDELTEICRG

SEQ ID NO: 11567 - protein, 500 aa, Zea mays
  VARIANT 2: note = Ancestral polymorphism is M, Derived polymorphism is T
  VARIANT 381: note = Ancestral polymorphism is P, Derived polymorphism is S
  VARIANT 395: note = Ancestral polymorphism is H, Derived polymorphism is Y
MMMDAARIVEYFKGKCILVTGSTGFLGKILVEKILRVQPDVRKIYLLVRAVDEPSAKQRVQQEVIDTELFGLLREKHGKGFQQFVEAKVVALAGDIVYDGLGLEAAVLDALAKDVDVIVNIAATTNFYERYDVSLDVNVLGVKHLCMFAKQCARLRMLMHVSTAFVSGFREGLILEKPIKPGESLREGTYLDVDAELRLVKEVKKSLAANGDGDGDSTERKAMKELGLRRARHFGWSNTYVFTKAMGEAVLGQQLRGGDVPVAVMRPSIITSVRRDPLPGWMQGTRTIDSIIIGYAKQNLSCFLADLRLVMDVIPGDMVVNAMMAAVVAHSEAFAPPLPQVVVYHATSSLRNPATYDVLYQSGRRHFYENPRVGKDGRVIPTREMYFFTSIARFHLYMTLIYKVPLEILHLVNLLLCGLLSRLYNDLNRKYKFVMHLVDVYGPFAFFKGCFDDINLERLRLAMAMKTPEDQMFNFDPKTIDWDDYFTRIHIPGILKYVCK

SEQ ID NO: 11568 - protein, 180 aa, Zea mays
  VARIANT 160: note = Ancestral polymorphism is R, Derived polymorphism is C
  VARIANT 20: note = Ancestral polymorphism is L, Derived polymorphism is R
MSAANQLAALVSNMYATGLLDDQFQQLQMLQNASTPDFVSEVVTLFCQDGERIIGELAKLLEKPNVDFDRVDAFVHQLKGSSASIGAQKVKNTCIQFRESCQQKSKDGCLKTLETVKINFYDLRDKFQTMLQILCSVRSMAVPPASEQDGGVELHVGMMRASFKFQNILNKLLNWLLGSL

SEQ ID NO: 11569 - protein, 275 aa, Zea mays
  VARIANT 247: note = Ancestral polymorphism is Q, Derived polymorphism is R
  VARIANT 246: note = Ancestral polymorphism is I, Derived polymorphism is V
  VARIANT 76: note = Ancestral polymorphism is T, Derived polymorphism is R
MLARAPPPRPCSSGVCIARAHPRAAAVAARPGTTRTTTTVAAAAAEAASNGSAAAAVAGISSSSSALVTSTVGKSTNILWHECAIGQKERQGLLNQKGCVVWITGLSGSGKSTLACALSRELHGRGHLTYVLDGDNLRHGLNRDLSFGAEDRAENIRRVGEVAKLFADAGLVCIASLISPYRSDRSACRDLLPKHSFIEVFLDVPLQVCEARDPKGLYKLARAGKIKGFTGIDDPYEPPSDCEIVIQCKVGDCPSPESMAGHVVSYLETNGFLQD

SEQ ID NO: 11570 - protein, 233 aa, Zea mays
  VARIANT 214: note = Ancestral polymorphism is W, Derived polymorphism is L
  VARIANT 196: note = Ancestral polymorphism is Q, Derived polymorphism is P
  VARIANT 180: note = Ancestral polymorphism is P, Derived polymorphism is T
  VARIANT 179: note = Ancestral polymorphism is I, Derived polymorphism is V
  VARIANT 174: note = Ancestral polymorphism is T, Derived polymorphism is A
  VARIANT 147..233: note = Derived polymorphism lacks residues 147 to 233
  VARIANT 35: note = Ancestral polymorphism is P, Derived polymorphism is L
MFWSGSNADACLSSPNSSASSCVEPSTSPTALFLPLAENQRCDKEQCQNTGAVRCFGHKSQVLAPITNEVTANKRVCLMDENRKSTDAKRPCTVPPWVSRKNSIAPADEINTTEPVNKSCSWCCSSEDDSAGACEEPIVLKQSTSSRGPSRSSKDSQSLYAKRRRERINEKLRTLQQLIPNGTKVDMSTMLEEAVQYVKFLQLQIKLLSSEETWMYAPLAYTHLGPNVAVNQP

SEQ ID NO: 11571 - protein, 60 aa, Zea mays
  VARIANT 56: note = Ancestral polymorphism is Y, Derived polymorphism is C
  VARIANT 5: note = Ancestral polymorphism is N, Derived polymorphism is H
MGHSNVWNSHPKNYGPGSRVCRVCANPHGLIRKYGLMCCRQCFRSNAKDIGFIKVYILVH

SEQ ID NO: 11572 - protein, 780 aa, Zea mays
  VARIANT 590..780: note = Derived polymorphism lacks residues 590 to 780
MASFSYGGAPPPSHSGLRHYPTVHRPGLLPATAACTRGGAELLRRQSRATTPRTKLAEKMVREKLLMGLPPPSSYDTAWLAMVPAPGSARASRFPQCVEWIMQNQRSDGSWGLQGRQGDDPSLLIKDALSSTLACVLALKTWGVGDEHVGKGLRFIGHNLSSVTTYGDVGSRPVGFNVIFPGMLARCIGMGVEMPLAPADVDGIFRLRDKELPSLAAGSKAFRAYLAEGLGNWDEAMAYQRKNGSLFNSPATTAAAAIHSYDRGAVQYLDSLVNLFGSSGPGLANDEEIMLDMTTCAMAFRLLRMHGYDVSSDASLGQFSEESSFHDSIQGCLGDTEALLELHKASQVQIREQETAILRSIGSWSAKLLEQQLRSNKVSRNIDPAEVDYALKHPFYTTLDRLEHRRNIEHFKTTAIQVLKSAYRACVPAGEEIAALAAADFHASQTVYQEELQCLESWVKELRLQELEFARIMPLICFFPPAATLFPCEQHEARMAMSKHNILLTVVDDLFDVGGSREEMENLVKLVEMWDAHNRVGFCSERVEIVFRAIYDTSNHLAAKAAAVQKRNIIHHLAELWANTVRAMMAEANWAMTGHLPTFEEYMAAGEPSFGLGPIVLASLYLVGPELPEDVVTSQEYNEMFRHMNVCGRLLNDLQSYEREKEQGKVNSVLLLLALEEEGGSIEAVKREVRRAIEASRIQLLRLVLRNESEVPWPCRQVFWNICKVVHQFYVHVDGYASAKQMMHSCTPGTRWCITRCRSHARRPTYNKFSQLSLGVGVHC

SEQ ID NO: 11573 - protein, 236 aa, Zea mays
  VARIANT 43..236: note = Derived polymorphism lacks residues 43 to 236
  VARIANT 39: note = Ancestral polymorphism is P, Derived polymorphism is S
MEGGLGSAPSRLLGMCPCAGARPSTATASPSGYAVGRHPPLLRFSIINGRNQGVHAFVAQIMDEDGTVLPNIHIADCGHKIGLNGVDNGRIWWVILAQTRLVMVVSVLSSVTQTRLATSIIRGNLQYAYLSALRRLSLDPGNQTFLQRDVQGLRNLRYSAWLLCFYDLDKYSYFFLEIFSAMICPVCRGIYNCSICRTKKGWFPTGSACRKAVGLGYKSVAHFLIAKHNNKQVPLI

SEQ ID NO: 11574 - protein, 196 aa, Zea mays
  VARIANT 9: note = Ancestral polymorphism is A, Derived polymorphism is T
  VARIANT 24: note = Ancestral polymorphism is L, Derived polymorphism is R
  VARIANT 39: note = Ancestral polymorphism is A, Derived polymorphism is V
  VARIANT 49: note = Ancestral polymorphism is D, Derived polymorphism is G
  VARIANT 74: note = Ancestral polymorphism is H, Derived polymorphism is L
  VARIANT 77: note = Ancestral polymorphism is S, Derived polymorphism is N
MDREQMRMAILNQERIFRQQVHELHRLYHAQKQLMMQQAQTAPAPAVVDAEPRPRPPQLDIWCGERATASPQQHIISFHEAAAPAAALAKECNLELTLATGRASSSSSSDAERRQGIIKRLKAAPSNSDSGATAVSSTSTDSELAPFREVVEDVATPVRFRGEVSGRRRMDEVGQGPWLYQPQPEYGVMTMLYSTS

SEQ ID NO: 11575 - protein, 307 aa, Zea mays
  VARIANT 247..307: note = Derived polymorphism lacks residues 247 to 307
  VARIANT 209: note = Ancestral polymorphism is I, Derived polymorphism is N
  VARIANT 195: note = Ancestral polymorphism is A, Derived polymorphism is T
  VARIANT 174: note = Ancestral polymorphism is P, Derived polymorphism is S
  VARIANT 172: note = Ancestral polymorphism is Y, Derived polymorphism is N
  VARIANT 165..307: note = Derived polymorphism lacks residues 165 to 307
MAAARGINQLLKRILHNQSAGPWLLSSFRGNHEESSAGLRALALLGVGASGLLSFATIASADEAEHGLAAPDYPWPHAGIMSSYDHASIRRGHQVYTQVCASCHSMSLISYRDLVGVAYTEEETKAMAAEIEVVDGPNDEGEMFTRPGKLSDRFPQPYANEQAARFANGGAYPPDLSLITKVIAARHNGQNYVFALLTGYRDPPAGVQIREGLHYNPYFPGGAIAMPKMLNDGAVEYEDGTPATEAQMGKDVVSFLSWAAEPEMEERKLMGVKWIFLLSLALLQAAYYRRMRWSVLKSRKLVLDVVN

SEQ ID NO: 11576 - protein, 331 aa, Zea mays
  VARIANT 225: note = Ancestral polymorphism is V, Derived polymorphism is A
  VARIANT 253: note = Ancestral polymorphism is R, Derived polymorphism is G
MLTHPNGVVRPSTKEPLFSFGVIADVQYADIPDGRSFLGVPRYYRHSIAVLRRAVERWNGERSVRFCINFGDIVDGFCPKDRSLAAVQAVVREFDGFRGGPTYHMLGNHCLYNLPRSELVSVLRMPSASPGRAYYDFSPWPGYRFVVLDAYDFSAVGWPRGHPVSAAARRFLEKRNPNHDKNSPSGLEGTDRRFVMFNGGVGEAQLRWLDGVLRRAERRGEKAVVCSHLPMHPGAASPTGLMWNYEEVMDVVRRHGGCVVACLAGHVHKGGYAVDDSGVHHRTLEAALECPPGTDAFGHVEVHPDRLRLVGSDRMASTEMLLSPSNELASA

SEQ ID NO: 11577 - protein, 275 aa, Zea mays
  VARIANT 261: note = Ancestral polymorphism is L, Derived polymorphism is P
  VARIANT 153..275: note = Derived polymorphism lacks residues 153 to 275
  VARIANT 43: note = Ancestral polymorphism is N, Derived polymorphism is I
  VARIANT 26: note = Ancestral polymorphism is G, Derived polymorphism is S
MEMKASAFDETLAAVLDHLKPHIFPGKPFTYFIGCHALFLESNYFDPIGKASDLALLSILIFILLVASTLTDLNGAFGWLAIHIDNLEVNFRCTFDGLRYGGAFNPLQCAIMLLRRMAEKLPVLLRYQSLHVHTYFKNSSEKLKEGEDIYIYQGDKSFCSTECRENFMVDEMEGEPESMQGRLEAPFLHGSCMQRNYWQKTNFDQILECAKEIRERGHSLKNCPNKSEGNLKKFAITVVNLDTLFPSAPSPLRMGYEFCKLLYLQSARAFEQKLP

SEQ ID NO: 11578 - protein, 137 aa, Zea mays
  VARIANT 118: note = Ancestral polymorphism is T, Derived polymorphism is M
MSVNCSMQAVVRDLRQLAAKYASNRKDGSKLQALCNAAKNCASLPHDELNRKIHLVAVPGHSVFVAKHEDKRALRNIFILLFRHKEPNGTLTKQEVVAAAAKHIKREITDREYHQVVTEICISTEDGHLLLKNGDEP

SEQ ID NO: 11579 - protein, 174 aa, Zea mays
  VARIANT 130: note = Ancestral polymorphism is T, Derived polymorphism is I
  VARIANT 84: note = Ancestral polymorphism is T, Derived polymorphism is I
  VARIANT 76: note = Ancestral polymorphism is S, Derived polymorphism is R
  VARIANT 70: note = Ancestral polymorphism is G, Derived polymorphism is D
  VARIANT 57: note = Ancestral polymorphism is A, Derived polymorphism is T
  VARIANT 51: note = Ancestral polymorphism is A, Derived polymorphism is T
  VARIANT 45: note = Ancestral polymorphism is A, Derived polymorphism is T
MCLVHSRASASKELDSSYPLPNPTTTSGRRAARPGRMVTASSFTAIFFSSAFVACSAEVKAFFVRGAVVDDVSLLRKNLAALATGVIAIFVANPTDLVKVRLQADGKANTVKRSFSGALNAYATIIRHVTLTIMGSKCTRLFLFSLSLNSFMFPGRYWSFVDWPWPKCRTQCHI

SEQ ID NO: 11580 - protein, 382 aa, Zea mays
  VARIANT 102: note = Ancestral polymorphism is A, Derived polymorphism is V
MTASAAAGVQMVAARPCISASPGILTARVSRTDCMLSTTATFPKISCSWPLRFKRNDVVVRAISEECGPQGLPIDLRGKRAFIAGVADDNGYGWAIAKALAAAGAEILVGTWVPALNIFETSLRRGKFDESRKLPDGSLMDIVKVYPLDAVYDSPDDVPEDVMFLFFIPVLQHGFHRASNWTVKEVVESVRNDFGSIDILVHSLANGPEVTKPLLETSRRGYLAAISASSYSYVSLLQHFLPIMNPAFCNGAIFMLWHLVTVILSLFSHRYGGGMSSAKAALESDTRVLAFEAGRKGKIRVNTISAGPLGSRAAKAIGFIEKMIEYSYVNAPLQKELLADEVGNTAAFLVSSLASAITGSTVYVDNGLNTMGLAIDSPTITS

SEQ ID NO: 11581 - protein, 296 aa, Zea mays
  VARIANT 44: note = Ancestral polymorphism is A, Derived polymorphism is D
  VARIANT 135: note = Ancestral polymorphism is R, Derived polymorphism is M
  VARIANT 179: note = Ancestral polymorphism is S, Derived polymorphism is L
  VARIANT 189: note = Ancestral polymorphism is V, Derived polymorphism is E
  VARIANT 241: note = Ancestral polymorphism is Y, Derived polymorphism is C
  VARIANT 269: note = Ancestral polymorphism is A, Derived polymorphism is V
  VARIANT 283..296: note = Derived polymorphism lacks residues 283 to 296
  VARIANT 285: note = Ancestral polymorphism is V, Derived polymorphism is G
MAGLISLRAGPRSSPSLARSSSAWASPPASHVAVRLPSPLFRCAKLRRSRSLLAAALEISKDGSAAVLANSLPSQGAIETLRNADAVCFDVDSTVILDEGIDELADFCGAGKAVAEWTAKAMTGTVPFEEALAARLSLIKPSLSQVEECLEKRPPRISPGMADLVKKLKSNNIDVFLVSGGFRHMIKPVAFELGIPPENITANQLLFGTLGEYAGFDPTEPTSRSGGKAKAVQQIKQDHGYKTVVMIGDGATDLEARQPGGADLFICYAGVQMREPVAAQADWVVFDFQELITKLP

SEQ ID NO: 11582 - protein, 113 aa, Zea mays
  VARIANT 2: note = Ancestral polymorphism is G, Derived polymorphism is S
  VARIANT 11: note = Ancestral polymorphism is G, Derived polymorphism is V
MGRGRGVSYGGGQSSLSYLFGGGGGDEAAAAPAKPAAAAPAPAPVPAAADGEKLKGIPAGVRGNQSQTNNYFRAQGQNCGNFLTDRPSTKVHAAPGGGSSLGYLFGGGPPGSK

SEQ ID NO: 11583 - protein, 30 aa, Zea mays
  VARIANT 14: note = Ancestral polymorphism is P, Derived polymorphism is L
  VARIANT 11: note = Ancestral polymorphism is A, Derived polymorphism is V
MFGSAQQDFLAMSPLRLGICLSTFTSSLYF

SEQ ID NO: 11584 - protein, 185 aa, Zea mays
  VARIANT 126: note = Ancestral polymorphism is P, Derived polymorphism is L
  VARIANT 97: note = Ancestral polymorphism is E, Derived polymorphism is K
  VARIANT 54: note = Ancestral polymorphism is A, Derived polymorphism is V
  VARIANT 53: note = Ancestral polymorphism is A, Derived polymorphism is V
  VARIANT 47: note = Ancestral polymorphism is A, Derived polymorphism is D
MATLSTIGGLASAMGPSVEKSSKGILADVLKCLGDNKKHMRECTLTALDSLVAAAQLEKMVAYIIVSLGDQKTVQKGEKISLIGCLSMFKKWDKSSEVRKAAESFMNEILRICGQEMVGRNLKDLLSPTLAIVSERLKLSTVHEGFSESVKVVSTSMSLPSKSGLKNNKHGPNYRGSNVGKPVSQ

SEQ ID NO: 11585 - protein, 155 aa, Zea mays
  VARIANT 5: note = Ancestral polymorphism is D, Derived polymorphism is N
  VARIANT 6: note = Ancestral polymorphism is A, Derived polymorphism is T
  VARIANT 7: note = Ancestral polymorphism is A, Derived polymorphism is T
  VARIANT 30: note = Ancestral polymorphism is Q, Derived polymorphism is H
  VARIANT 39: note = Ancestral polymorphism is G, Derived polymorphism is D
  VARIANT 45: note = Ancestral polymorphism is K, Derived polymorphism is Q
MEEIDAAKLTKDDVDVRLKWFGLFHRYKHQWVLAFLVHGFIAQVKMPAFYITYYICMEKHVEVDLCIGKICSLHKDANDRSSTQALLDHPFLSVYDDLHVDRTRSPLATFKFMRLSSFHFNANPAGQHHVTKQRKRARVVGKKKRIAKKKSEAAE

SEQ ID NO: 11586 - protein, 332 aa, Zea mays
  VARIANT 18: note = Ancestral polymorphism is P, Derived polymorphism is L
MGCFHSTAKRQHPGYEDPVHLASQTSFSVSEVEALFKLFKSISGSVIDDGLINKDNPSEKDINQGMLVIFNVDPSITNNDIHQIFSEYGDIKEIHDAPQKGHHKIIEFYDVRAAEGAARALNRSDLACKKIKLETGRLSGARRSTQHMSKELGQEEFGVYNLGSPSTNSPSLPSLGSSNIVAMTSCGRENGSMHGLHSGLLTSMSPFREASFLGLSSTLPQSLSSPIGIASAATHSNQAPLGELSHSLSRMNRHVNYGFQGLGAIHPHSLPDVHNGANNGTPYNLNTITPVGVNKNSRTVEAVDSRHLHKVGSGNLNGRSFDRAGEGVVKWW

SEQ ID NO: 11587 - protein, 348 aa, Zea mays
  VARIANT 58: note = Ancestral polymorphism is K, Derived polymorphism is M
MGDHEARGDDFEKKAEKKLSGWGLFGSKYEDAADLFDKAANSFKLAKNWSRAASVYIKIANCHLKGDSKHEAASAYVEAANCYKKFSPQEAAQALNQSVNLFLEIGRLNMAARYSKDIGEIYQQEQDLEKATDYLERAADLFDSEGQSSQSNTIKQKVAEIAAQLEQYPKATEIFEAIARQSINNNLLKYSVRGILLNAGICQLCRGDPIAITNSLERYQEIDPTFSGTREYKLLADLAASMDEGDVAKFTDAIKEFDSMTRLHGTLQQHASTTSLAIVARSSTYIFVGGDAYQLRCALRAVFITSCMADDARGNHTRIGVPDPWKTTLLLRAKNELKKKEDDEDDLT

SEQ ID NO: 11588 - protein, 154 aa, Zea mays
  VARIANT 35: note = Ancestral polymorphism is A, Derived polymorphism is T
  VARIANT 42..154: note = Derived polymorphism lacks residues 42 to 154
  VARIANT 59: note = Ancestral polymorphism is C, Derived polymorphism is Y
  VARIANT 108: note = Ancestral polymorphism is A, Derived polymorphism is V
  VARIANT 135: note = Ancestral polymorphism is L, Derived polymorphism is P
  VARIANT 138..154: note = Derived polymorphism lacks residues 138 to 154
MENRKTFSWLKEQMIPSISVSIMIYVITRTSISNAYPIFAQQGYENPREATGRIVCANCHLDNKPVDIEVPQAVLPDTVFEAVLRIPYDIQLKQVLANGKKGGLNVGAVLILPEGFELAPPDRISPELKEKIGNLSFQSYHPNKKYSCDRPCSQ

SEQ ID NO: 11589 - protein, 196 aa, Zea mays
  VARIANT 5: note = Ancestral polymorphism is R, Derived polymorphism is H
  VARIANT 29..196: note = Derived polymorphism lacks residues 29 to 196
  VARIANT 51: note = Ancestral polymorphism is T, Derived polymorphism is M
  VARIANT 66: note = Ancestral polymorphism is G, Derived polymorphism is S
  VARIANT 88: note = Ancestral polymorphism is H, Derived polymorphism is D
  VARIANT 91: note = Ancestral polymorphism is D, Derived polymorphism is G
  VARIANT 102: note = Ancestral polymorphism is T, Derived polymorphism is I
  VARIANT 118: note = Ancestral polymorphism is S, Derived polymorphism is F
  VARIANT 119: note = Ancestral polymorphism is W, Derived polymorphism is S
  VARIANT 136: note = Ancestral polymorphism is P, Derived polymorphism is L
  VARIANT 140: note = Ancestral polymorphism is T, Derived polymorphism is M
  VARIANT 141..196: note = Derived polymorphism lacks residues 141 to 196
MVRYRGDALEKALTTTTTRTVADDDLLLQLKINYYPRCPQPELAVGVEAHTDVSALSFILHNGVSGLQVLHGARWVTARHEPGTIIVDVGGALEILSNGRYISVLHSGLVNREVVRISWVVFCEPPPDSVLLHPLPEFVTEGHPARFTPRTFKQPVDRKLFKKKQQHKAQAEEENGGNGDHHHHELAMDARSLVLL

SEQ ID NO: 11590 - protein, 420 aa, Zea mays
  VARIANT 274..420: note = Derived polymorphism lacks residues 274 to 420
  VARIANT 98: note = Ancestral polymorphism is G, Derived polymorphism is C
MASSLKFTVRRGPAVLVAPASATPRELKRLSDIDDQDGLRLHVPIIQFYRQNALMGGREPAPVIRDAIARALVPYYPFAGRLRELEGRKLAVDCTGEGVLFIEAEADVRLDHFGDELQPPFPCLEELIFDVPGSSEVLGSPLLLFQARDGVLVTRLACGGFILGVRLHHTMADAQGLVQFLGAVAELARGAAGPTVRPVWGRELLEARDPPRPAFAHREYDEVPDTKGSIIPLDDMVHRSFFFGRHEVAAIRANLPPDLRSRASKFDLLTGLLWKCRTAALALDADEVMRMICVVTAHGGKSGVAIPKGYYGNAFALPAAVATAGDLVAKPLGYAVELVKRAKGEVNVEYMRSVADLMVLRGRPHFTVVRAYLASDLTKAGFSNLDFGWGNPVYGGPANVGVGTSPGMATFLVPCVLVVI

SEQ ID NO: 11591 - protein, 1112 aa, Zea mays
  VARIANT 30: note = Ancestral polymorphism is L, Derived polymorphism is P
MDGEQAARWAAAQEGVPVGADLVAAALRQLRFLAAVDRRRWLYDEGPLLDRAIRRYKACWLPLLDKHTKGVVVDGPLVVPLDCEWIWHCHRLNPVQYIRDCKKVYGRILNNNNVESSTQTKSTLESEKVWKELYPEEPFELLFTRTFDTAVDVNPAGAEEDITYDLVSAVKRQSSFYYQVGTPTMHDPRFLQEALARYKAFLYLIKMNQEKGLQRFRVPTYDVDLLWHTHQLHPITYRNDMVKLLGKVLEHDDTDADRSEGKKLDVGFTETTEQFESTFGVRYWKAGCMYRGNVPSPVTSTPQTFSAEVGTGSYICKAQKDLNALDVTVVELYLQIVDIKNLPSAVQKENVYVRFAKNQSDMFISDGGRLDISTVTGKNTGVCLQCEPTGELILAVMVDQLSKKPEPIGKVSFPLHDLTGPDSKLSFEKWFELKAHGGHAASPPVSLRVAASATVPSSAQKVFTMVRMEPFSLKSCLLPHSIKDQNTGSWTRFVNDCGTELIRLQIREHKAKNSMAVVRELVGVLKSTKKQIQLAEFKENKWTLKDSNLPISHGTDGSLLDLKGDNHLIKLYRGRKLEYERKCCSAHSEDVSAVTAVKFCAEHPYGKAVALLDTEAQLIMVNEDWLLLPWISISVLFMDGDGGTKLGGGAMVQKGTVFGSDTSMVLETQTVGAGSVASNLAQCGTCSAVFGGDDKEMANCKVEHASSGASRTVVASGENGHTETAGCGGGCGSNCGPMMAEDPKAGNAKSGGCGSGCGGGCGGAGGCGTMANEGQSRSGGVGTLLSSNAMGGEGQQAHSAGCGSGCGGGCGSGMVIEGSKVNNVNAMSGGCGSGCGGGCGSGMVIEGSKANNAMSGGCGSGCGGGCGSGMLIEGSKANKAMSGGCGSGCGGGCGSGMVIECSKANNTMSGGCGSGCGGGCGSGMVIEGSKANNAMSGGCGSGCGGGCGSGMVNEGSKAANTMSGGCGSGCGGGCGALFNASTAAGEGLHNKSAGCGGGGCGSGCGGGGGCGSGMAIEGFKANHAKSGGCGSGCGGGGCGTLFSSSAAASQGQSRSGGCGSGCGGGGCGTGSMVAEGSNGGNAKSGGCGGGCGGGGGCGGGGCGGGCGAVFNA

SEQ ID NO: 11592 - protein, 388 aa, Zea mays
  VARIANT 6: note = Ancestral polymorphism is Q, Derived polymorphism is R
  VARIANT 12: note = Ancestral polymorphism is T, Derived polymorphism is K
MTTARQWWRRATAAVKDRRSLYLRRVAALRPRPASGVAAAVLWSPELEAAVIRATSHDERSVDYGNAARVFALARASPVSVQPLMWALARRAGRTRCWAVALKALMLAHGLLLRPDLAPRSVRLGRIPFDLADFRDRSSPPSKSSGFSAFVRAYFRFLDTRSLFIAQDLDAVADTGETDGEDARLDHVTKQQHLLHLLLQIRPYGDGMELGLIFEAMDCVVIEIFEVYSEICTGIARFLVAVLGSAPMTPRPRPGETLAAARRRRAVQGMRVLKNAAEQSAQLSSYFELCQSLGVLNAAEFPAVERVADDDIRDLEKIIMNHVVEESREDKQMKALVAVEETPPASKTVVTTEWVVFDDDDNAAAGARPRNFEGYLNPFVTAPWDATP

SEQ ID NO: 11593 - protein, 296 aa, Zea mays
  VARIANT 2: note = Ancestral polymorphism is G, Derived polymorphism is E
  VARIANT 47: note = Ancestral polymorphism is P, Derived polymorphism is R
MGSFKGHVLPGTLFLAVGLWRVWSSAARHAADPSSFRVRAWSPAPAPGPARLLELYVVAGGALADMCVEVLYSTHLRIFAGGEVNPAHLNDLEHGGMLLMFFLFGALALASQLWPRHFPLTDGALCLVAATAFTAELVLFYFHSTTHMGLEGYYHYLLVLLVGLCVAAAVLGALLPDSFPADLASGVLVALQGLWFYQTALALYGPMLPAGCARDADAHVECRSRAAQERAEQLAISQLFALVLLAFLYALGCYAVAAARYGQPPELAVVRHRHAAAVELECRQGDDAGALEECAI

SEQ ID NO: 11594 - protein, 90 aa, Zea mays
  VARIANT 32: note = Ancestral polymorphism is L, Derived polymorphism is F
  VARIANT 26: note = Ancestral polymorphism is A, Derived polymorphism is T
  VARIANT 24: note = Ancestral polymorphism is L, Derived polymorphism is R
  VARIANT 17: note = Ancestral polymorphism is A, Derived polymorphism is T
  VARIANT 14: note = Ancestral polymorphism is G, Derived polymorphism is S
  VARIANT 12: note = Ancestral polymorphism is R, Derived polymorphism is Q
  VARIANT 7..90: note = Derived polymorphism lacks residues 7 to 90
MDRVGLQAFCKRHGLSARGSNADLIARLDAALGILGVEKTTSQQEIKKVYHKLALRLHLDKNPGDEEAKEKFQQLQKVISILRDAEKRAL

SEQ ID NO: 11595 - protein, 153 aa, Zea mays
  VARIANT 25: note = Ancestral polymorphism is A, Derived polymorphism is V
  VARIANT 26: note = Ancestral polymorphism is T, Derived polymorphism is M
  VARIANT 29..153: note = Derived polymorphism lacks residues 29 to 153
  VARIANT 37..153: note = Derived polymorphism lacks residues 37 to 153
  VARIANT 38: note = Ancestral polymorphism is R, Derived polymorphism is Q
  VARIANT 41: note = Ancestral polymorphism is L, Derived polymorphism is I
  VARIANT 51: note = Ancestral polymorphism is G, Derived polymorphism is A
  VARIANT 53: note = Ancestral polymorphism is A, Derived polymorphism is T
  VARIANT 67: note = Ancestral polymorphism is L, Derived polymorphism is P
  VARIANT 68: note = Ancestral polymorphism is R, Derived polymorphism is H
  VARIANT 82: note = Ancestral polymorphism is A, Derived polymorphism is T
  VARIANT 89: note = Ancestral polymorphism is D, Derived polymorphism is N
  VARIANT 103: note = Ancestral polymorphism is P, Derived polymorphism is L
  VARIANT 107: note = Ancestral polymorphism is N, Derived polymorphism is K
  VARIANT 140..153: note = Derived polymorphism lacks residues 140 to 153
MSGTVGDGKSVGRFLVRRWSISFAATEIREEDAREAQRLKLVAVASILASGTAGVLVPLLGRSASTPRTNGDVFFAVKAFSTGVILTTDMVHILPAPFDALVPACGNSARTISFPYADLVAMCSTMATMMVDSTAVAYYQCAHFRKARPVDGG

SEQ ID NO: 11596 - protein, 266 aa, Zea mays
  VARIANT 15..266: note = Derived polymorphism lacks residues 15 to 266
  VARIANT 28: note = Ancestral polymorphism is S, Derived polymorphism is L
  VARIANT 31: note = Ancestral polymorphism is P, Derived polymorphism is H
  VARIANT 40: note = Ancestral polymorphism is P, Derived polymorphism is R
  VARIANT 54: note = Ancestral polymorphism is A, Derived polymorphism is S
  VARIANT 59..266: note = Derived polymorphism lacks residues 59 to 266
  VARIANT 60: note = Ancestral polymorphism is A, Derived polymorphism is V
  VARIANT 72..266: note = Derived polymorphism lacks residues 72 to 266
  VARIANT 76..266: note = Derived polymorphism lacks residues 76 to 266
  VARIANT 82: note = Ancestral polymorphism is T, Derived polymorphism is I
  VARIANT 96: note = Ancestral polymorphism is P, Derived polymorphism is L
  VARIANT 103: note = Ancestral polymorphism is V, Derived polymorphism is A
  VARIANT 108: note = Ancestral polymorphism is S, Derived polymorphism is F
  VARIANT 119: note = Ancestral polymorphism is P, Derived polymorphism is L
  VARIANT 133..266: note = Derived polymorphism lacks residues 133 to 266
MATKILALLALLSLSVSATTAFIIPQCSLAPNAIIPQFLPSVTSMGIEHPIVQAYRLQQALAASVLQQPFAQLQQQSLAHLTIQTIATQLEQQFVPALSQLAAVNPVSYLQQQLLASNPLALANTAAYQQQLQLQQFLPALSQLAMVNPATYLQQQQLLSSSPLAVGNAATYLQQQLLQQIVPALSQLVVANPTAYLQQLLPFNQLDVANSAAYLQQRQQLLNPLAAANPLVAAFLQQQQFLPYNQISLMNLALSRQQPIVGGAIF

SEQ ID NO: 11597 - protein, 254 aa, Zea mays
  VARIANT 37..254: note = Derived polymorphism lacks residues 37 to 254
  VARIANT 41: note = Ancestral polymorphism is P, Derived polymorphism is L
  VARIANT 63: note = Ancestral polymorphism is A, Derived polymorphism is V
  VARIANT 87: note = Ancestral polymorphism is A, Derived polymorphism is T
  VARIANT 143..254: note = Derived polymorphism lacks residues 143 to 254
MATKILSLLAILALLVSATNAFIIPQCSLAPSAIIPQFLPPVTSMGFEHPVVQAYRLQQALAASVLQQPIAQLQQQSLAHLTIQTIATQQQQQFLPTLSHLAMVNPAAYLQQQLLASNPIALANFLPVLSQLAMVNPAAYLQQQQLLSSSPLAMANAPTYLQQQLLQHIVPALTQLAMANPAVYLQQLLPFNQLTVSNSATYLQHRQHLLNPLAVANPLVVAFQQQQQLLPYNQFSLMNHVLSRQQPIVGGAIF

SEQ ID NO: 11598 - protein, 675 aa, Zea mays
  VARIANT 558: note = Ancestral polymorphism is V, Derived polymorphism is A
MAAVEPRQFGRLEPGSSPVRVATNGAKAYPPPASHLPRRADSPVRGCSFPPLVSPPRRLDDASDDEDEEQEDWRELYGSHLQLEVEPAVQDARDEGTADAWIERNPCLVRLTGKHPLNCEPPLARLMHHGFITPAPLHYVRNHGAVPRGDWATWTVEVTGLVRRPARLTMEELARDFPAVEIPVTLACAGNRRKEQNMVQQTVGFNWGAAGVSTSVWRGARLRDVLRRCGIVPRKGGALNVCFEGAEDLPGGGGSKYGTSVTREWALDPSRDIMLAYMQNGEPLLPDHGFPVRVIIPGCIGGRMVKWLKRIIVTPAESDNYYHFKDNRVLPSHVDAELANAEAWWYKPEYIINELNINSVITTPGHDEILPINSITTQRGYTMKGYAYSGGGKKVTRVEVTLDGGETWLVCHLDHPEKPNKYGKYWCWCFWSVEVEVLDLLGAKEIAVRAWDQSLNTQPEKLIWNLMGMMNNCWFKVKVNVCRPHKGEIGLVFEHPTQPGNQPGGWMARQKHLETAEAAAPGLKRSTSTPFMNTTDVGKQFTMSEVRKHASQESAWIVIIQAVLREQPEDHTEMHLVYANRTEDDILLRDELDRWAAEYPDRLKVWYVIDQVKRPEEGWKYSVGFVTEAVLREHVPEGGDDTLALACGPPPMIQFAISPNLEKMKYDMANSFVVF

SEQ ID NO: 11599 - protein, 266 aa, Zea mays
  VARIANT 14: note = Ancestral polymorphism is L, Derived polymorphism is H
  VARIANT 33: note = Ancestral polymorphism is S, Derived polymorphism is F
  VARIANT 37..266: note = Derived polymorphism lacks residues 37 to 266
  VARIANT 63: note = Ancestral polymorphism is A, Derived polymorphism is T
  VARIANT 157..266: note = Derived polymorphism lacks residues 157 to 266
MATKILSLLALLALFASATNAFIIPQCSLAPSSIITQFLPPVTSMGFEHPAVQAYRLQQAIAASVLQQPISQLQQQSLAHLTIQTIATQQQQQFLPALSHLAMVNPAAYLQQQLLASNPLALANVVANQPQQQLQQFLPALSQLAMVNPAAYLQQQQLLSSSPLAVANAPTYLQQQLLQQIVPALTQLVVANPAAYLQQLLPFNQLTMSNSAAYLQQRQQLLNPLAVANPLVAAFLQQQQLLPYNQFSLINPVLSRQQPIVGGAIF

SEQ ID NO: 11600 - protein, 179 aa, Zea mays
  VARIANT 25: note = Ancestral polymorphism is P, Derived polymorphism is S
  VARIANT 28: note = Ancestral polymorphism is S, Derived polymorphism is P
  VARIANT 30: note = Ancestral polymorphism is A, Derived polymorphism is P
  VARIANT 39: note = Ancestral polymorphism is L, Derived polymorphism is H
  VARIANT 60: note = Ancestral polymorphism is A, Derived polymorphism is V
  VARIANT 77: note = Ancestral polymorphism is S, Derived polymorphism is C
  VARIANT 86: note = Ancestral polymorphism is I, Derived polymorphism is F
  VARIANT 90..179: note = Derived polymorphism lacks residues 90 to 179
  VARIANT 103: note = Ancestral polymorphism is M, Derived polymorphism is I
  VARIANT 107: note = Ancestral polymorphism is A, Derived polymorphism is T
  VARIANT 116: note = Ancestral polymorphism is A, Derived polymorphism is T
MATKILALLALLALFVSATNAFIISQCSLAPSAIIPQFLPPVTSMGFEHPAVHAYRLQQALAASVLQQPIAQLQQQSLAHLTIQTIATQQQQQFLPALSHLAMVNPAAYLQQQLLASNPLALANVVAHQQQQQLQQFLPALSQLAMVNPAAYLQQQQLLSSTPLVLANAPTYLQQQLLQ

SEQ ID NO: 11601 - protein, 419 aa, Zea mays
  VARIANT 217: note = Ancestral polymorphism is P, Derived polymorphism is L
  VARIANT 152: note = Ancestral polymorphism is R, Derived polymorphism is S
MDALPDGVVQHILSQLSNARDVAACAAVARCWRDCMPFLPSLYFPRGAFESVGVGPASAVAAADDVIGRMVDAAARLEELVVYCPFSASLLPHWLAARAATLRVLELRVESAADDKSGHLDSIGVATSLEELRLWALRMTRAPAWGQMERLRVLEVVGAVLEDAAVNGAVAACPNLTDLALLGCECAGEAVISLAHLERCRLDFVGSGNTSLRFAAPRVSSLEVQGFSLIYLQGGNRLKHLTISKNTGSVYHVEMGKLPELDHLSLRGVQWSWGAISSVLQCAGEVKHLVMKVEFCGDYDTLQPFPELDLVEFFNSHPKLHKFEIHGAMFAALCQKNSLKKLDSRFVIPFLEHVLVTVRSPLNAEQKLDTLESLVRYSVRLRRMVIRISQMKNCHGAADDFFAEICKFAYMNSGRVCIE

SEQ ID NO: 11602 - protein, 267 aa, Zea mays
  VARIANT 1: note = Ancestral polymorphism is M, Derived polymorphism is I
  VARIANT 22: note = Ancestral polymorphism is F, Derived polymorphism is S
  VARIANT 32: note = Ancestral polymorphism is S, Derived polymorphism is G
  VARIANT 48: note = Ancestral polymorphism is E, Derived polymorphism is K
  VARIANT 50: note = Ancestral polymorphism is P, Derived polymorphism is L
  VARIANT 56: note = Ancestral polymorphism is R, Derived polymorphism is K
  VARIANT 60: note = Ancestral polymorphism is A, Derived polymorphism is V
  VARIANT 63: note = Ancestral polymorphism is A, Derived polymorphism is V
  VARIANT 87: note = Ancestral polymorphism is A, Derived polymorphism is S
  VARIANT 88: note = Ancestral polymorphism is T, Derived polymorphism is M
  VARIANT 90..267: note = Derived polymorphism lacks residues 90 to 267
  VARIANT 156..267: note = Derived polymorphism lacks residues 156 to 267
  VARIANT 215..267: note = Derived polymorphism lacks residues 215 to 267
  VARIANT 239..267: note = Derived polymorphism lacks residues 239 to 267
  VARIANT 247..267: note = Derived polymorphism lacks residues 247 to 267
MASKTLSLLALLALFVSATNAFIIPQCSLAPSAIIPQFLPPVTSMGFEHPAVQAYRLQQALAASVLEQPIAQLQQQSLAHLTIQTIATQQQQALSHLAVVNPIAYLQQQLLASNPLALANVAAYQQQQQLQQFLPALSQLAMVNPIAYLQQQQLLSSSPLAMGNAPTYLQQQLLQQQLLQQIVPALTQLAVANPAAYLQQLLPFNQLTVSNSAAYLQQRQQLLNPLAVANPLVAAFLQQQQLLPYNQFSLMNPALSWQQPIVGGAIF

SEQ ID NO: 11603 - protein, 266 aa, Zea mays
  VARIANT 6..266: note = Derived polymorphism lacks residues 6 to 266
  VARIANT 14: note = Ancestral polymorphism is L, Derived polymorphism is F
  VARIANT 37: note = Ancestral polymorphism is Q, Derived polymorphism is E
  VARIANT 40: note = Ancestral polymorphism is P, Derived polymorphism is R
  VARIANT 84..266: note = Derived polymorphism lacks residues 84 to 266
  VARIANT 94: note = Ancestral polymorphism is F, Derived polymorphism is S
  VARIANT 96: note = Ancestral polymorphism is P, Derived polymorphism is L
  VARIANT 132..266: note = Derived polymorphism lacks residues 132 to 266
  VARIANT 180..266: note = Derived polymorphism lacks residues 180 to 266
MATKILALLALLALFVSATNAFIIPQCSLAPSAIIPQFLRPVTSMGFEHLAVQAYKLQQALAASVLQQPINQLQQQSLAHLTIQTIATQQQQQFLPALSQLDVVNPVAYLQQQVLASNPLALANVAAYQQQQQLQQFLPALSQLAMVNPAAYLQQQQLLSSSPLVVGNAPTYLQQQLLQQIVPALTQLAVANPAAYLQQLLPFNQLTVSNSAAYLQQRQQLLNPLAVPNPLVTAFLQQQQLLPYSQFSLMNPALSWQQPIVGGAIF

SEQ ID NO: 11604 - protein, 196 aa, Zea mays
  VARIANT 21: note = Ancestral polymorphism is A, Derived polymorphism is V
MASTTSTAVLLVSTAILVAAATYFRHGTLSGGGGTAGTHLHFFMHDQYTGANPTAALIVPGRPPLSNATATATATGSGDDDEHPRRFGDIAVMNNALTEGPGRGSARVGTAQGFTVRVAERGSVNALSMHLVLEAGEHAGSSLVVSGRVDTDLAVRESVVVGGTGRFRLARGYALSRSYDYDLAKGGVVEVDVYLQ

SEQ ID NO: 11605 - protein, 416 aa, Zea mays
  VARIANT 150: note = Ancestral polymorphism is G, Derived polymorphism is V
  VARIANT 226: note = Ancestral polymorphism is Y, Derived polymorphism is H
MDGHGGGAGKLTRTPSSLLRSPTMRAGPGTASFHALDDPEPDDKKAQAPLGKPRALLRRAHHRFRPGPAQSALLLLLPVLALAALLMRGGDGGHHLALLAAAAGFALAAAAAVARLRGARPRSPALEASVRWFIGEDDDEEQRDWKRRAGLGLGLGLGRRAEVREGVEFYSNGDRYEGEFHGGRCSGSGVYSFFGKGKYEGDWVDGKYDGHGVESWARGSRYRGQYRQGLRHGHGVYRFYSGDDYAGEWAGGQSHGIGAQTCSDGSTYAGEFKCGVKHGLGCYHFRNGDLYAGEYFADKIQGFGAYRFANGHSYEGSWHEGKKQGFGMYVFGSGDERAGEWDSGILKSSLPLSDPAVQRALQAARRAADSAFHLPRVQEQVNKAVMAANRAATAARVAAIKAVQNRIDGKLCFIDV

SEQ ID NO: 11606 - protein, 266 aa, Zea mays
  VARIANT 10: note = Ancestral polymorphism is A, Derived polymorphism is G
  VARIANT 25: note = Ancestral polymorphism is P, Derived polymorphism is T
  VARIANT 37..266: note = Derived polymorphism lacks residues 37 to 266
  VARIANT 63: note = Ancestral polymorphism is A, Derived polymorphism is T
  VARIANT 79: note = Ancestral polymorphism is A, Derived polymorphism is P
  VARIANT 86: note = Ancestral polymorphism is I, Derived polymorphism is F
  VARIANT 88: note = Ancestral polymorphism is T, Derived polymorphism is M
  VARIANT 112: note = Ancestral polymorphism is Q, Derived polymorphism is E
  VARIANT 135..266: note = Derived polymorphism lacks residues 135 to 266
  VARIANT 136..266: note = Derived polymorphism lacks residues 136 to 266
  VARIANT 140: note = Ancestral polymorphism is A, Derived polymorphism is T
  VARIANT 147: note = Ancestral polymorphism is V, Derived polymorphism is A
MATKILALLALLALFVSATNAFIIPQCSLAPSAIIPQFLPPVTSMGFEHLAVQANMQQQALAASVLQQPIAQLQQQSLPHLTIQAITTQQQQQFLPALSHLAMVNPAAYLQEQLLASNPLALANVVANQQQQQLQQFLPTLSQLAMVNPAAYVQQQQLLSSSPLAVGNAPTYLQQQLLQQIVPALTQLAVANPVAYLQQLLPFNQLTLSNSAAYLQQRQQLLNPLVVANPLVAAFLQQQQLLPYNQFSLMNPVLSRQQPIVGGAIF

SEQ ID NO: 11607 - protein, 98 aa, Zea mays
  VARIANT 16: note = Ancestral polymorphism is F, Derived polymorphism is S
  VARIANT 18: note = Ancestral polymorphism is R, Derived polymorphism is G
  VARIANT 19..98: note = Derived polymorphism lacks residues 19 to 98
  VARIANT 27: note = Ancestral polymorphism is T, Derived polymorphism is I
  VARIANT 28: note = Ancestral polymorphism is V, Derived polymorphism is I
  VARIANT 30: note = Ancestral polymorphism is A, Derived polymorphism is D
  VARIANT 35: note = Ancestral polymorphism is S, Derived polymorphism is Y
  VARIANT 36: note = Ancestral polymorphism is G, Derived polymorphism is R
  VARIANT 43: note = Ancestral polymorphism is C, Derived polymorphism is S
  VARIANT 51: note = Ancestral polymorphism is R, Derived polymorphism is T
  VARIANT 53: note = Ancestral polymorphism is M, Derived polymorphism is I
  VARIANT 55: note = Ancestral polymorphism is K, Derived polymorphism is N
  VARIANT 61: note = Ancestral polymorphism is R, Derived polymorphism is H
  VARIANT 69: note = Ancestral polymorphism is Q, Derived polymorphism is P
  VARIANT 70: note = Ancestral polymorphism is R, Derived polymorphism is H
MPYYSASCFKIGPQFFSRQKVLLPLSTVAALKPSSGPPKSRECLPLILIIRNMLKYALTYREVISILMQHHVLVDGKFKLCKVRFVQFGQKGIPYLNT

SEQ ID NO: 11608 - protein, 315 aa, Zea mays
  VARIANT 254..315: note = Derived polymorphism lacks residues 254 to 315
MGHLRGLTAARLLAAAFLLSVAVPAARAQEETEHEEEFSYVVGDENGPEHWGSIKAEWGNCSAGRMQSPIDLSHERVSLVRSLGYLTHSYRPAEAAIANRGHDIMVRFKGDAGFLVINGTAYYLKQMHWHSPTEHTVDGRRYDMELHLVHESSANKAAVIGMLYEIGAEDPFLQALEPSIHRIADRQDREEAIGVVDPRRARGRASVYYRYVGSLTTPPCTEGVIWTVVKRVSGRGPAAQFSSPNSNQTASFDRSSAPCPGTSWSCSGKPCTTAWRRTRGRFRTSTTGTSASSAQSHTSTTSTSYGIGCTVQQRA

SEQ ID NO: 11609 - protein, 204 aa, Zea mays
  VARIANT 161: note = Ancestral polymorphism is G, Derived polymorphism is W
  VARIANT 157: note = Ancestral polymorphism is A, Derived polymorphism is G
  VARIANT 134..204: note = Derived polymorphism lacks residues 134 to 204
  VARIANT 127: note = Ancestral polymorphism is P, Derived polymorphism is L
  VARIANT 97: note = Ancestral polymorphism is A, Derived polymorphism is S
  VARIANT 49: note = Ancestral polymorphism is S, Derived polymorphism is L
  VARIANT 48: note = Ancestral polymorphism is D, Derived polymorphism is V
  VARIANT 42: note = Ancestral polymorphism is Q, Derived polymorphism is K
MCKYIPTVGAHILHTNRELLEALCVNLRGMAISNGLTHPVAKVATHADLAYFLSNLNARQKQELEALQSELVSLTHAQRWVASSDMRGQVLSRAKAALDVRGDVAWEECIDTVGAAMQADVMRNVVPQMESLLWSTTCVLLYQGVRDLWDDVVSTKAWLGGVRFDSLRAFLDAERAVWRMAGSSRATCSSRARWRTWWCMAWGT

SEQ ID NO: 11610 - protein, 266 aa, Zea mays
  VARIANT 10: note = Ancestral polymorphism is A, Derived polymorphism is P
  VARIANT 37..266: note = Derived polymorphism lacks residues 37 to 266
  VARIANT 52: note = Ancestral polymorphism is V, Derived polymorphism is L
  VARIANT 55: note = Ancestral polymorphism is Y, Derived polymorphism is C
  VARIANT 60: note = Ancestral polymorphism is A, Derived polymorphism is V
  VARIANT 63: note = Ancestral polymorphism is A, Derived polymorphism is T
  VARIANT 71: note = Ancestral polymorphism is A, Derived polymorphism is S
  VARIANT 75..266: note = Derived polymorphism lacks residues 75 to 266
  VARIANT 93..266: note = Derived polymorphism lacks residues 93 to 266
  VARIANT 94: note = Ancestral polymorphism is F, Derived polymorphism is S
  VARIANT 112..266: note = Derived polymorphism lacks residues 112 to 266
  VARIANT 116: note = Ancestral polymorphism is A, Derived polymorphism is T
  VARIANT 133..266: note = Derived polymorphism lacks residues 133 to 266
  VARIANT 136..266: note = Derived polymorphism lacks residues 136 to 266
  VARIANT 154..266: note = Derived polymorphism lacks residues 154 to 266
  VARIANT 156..266: note = Derived polymorphism lacks residues 156 to 266
  VARIANT 199..266: note = Derived polymorphism lacks residues 199 to 266
  VARIANT 246..266: note = Derived polymorphism lacks residues 246 to 266
MATKILSLFALLALFVSATNAFIIPQCSLAPSAIIPQFLPPVTSMGFEHPAVQAYRLQQALAASVLQQPIAQLQQQSLAHLTIQTIATQQQQQFLPALSQLAVVNPVAYLQQQLLASNPLALANIVAYQQQQQLQQFLPALSQLAMVNPAAYLQQQQLISSSPLAVVNAPTYLQQQLLQQIVPALTQLAVANPAAYLQQLLPFNQLTVSNSAAYLQQRQQLLNPLAVANPLVVAFLQQQQLLPYNQFSLMNPALLWQQPIVGGAIF

SEQ ID NO: 11611 - protein, 255 aa, Zea mays
  VARIANT 9: note = Ancestral polymorphism is L, Derived polymorphism is H
  VARIANT 10: note = Ancestral polymorphism is A, Derived polymorphism is G
  VARIANT 14: note = Ancestral polymorphism is L, Derived polymorphism is F
  VARIANT 32: note = Ancestral polymorphism is S, Derived polymorphism is C
  VARIANT 39: note = Ancestral polymorphism is L, Derived polymorphism is H
  VARIANT 40: note = Ancestral polymorphism is P, Derived polymorphism is S
  VARIANT 41: note = Ancestral polymorphism is P, Derived polymorphism is S
  VARIANT 44: note = Ancestral polymorphism is S, Derived polymorphism is L
  VARIANT 45: note = Ancestral polymorphism is M, Derived polymorphism is I
  VARIANT 64: note = Ancestral polymorphism is S, Derived polymorphism is N
  VARIANT 71: note = Ancestral polymorphism is D, Derived polymorphism is N
  VARIANT 93..255: note = Derived polymorphism lacks residues 93 to 255
  VARIANT 102: note = Ancestral polymorphism is A, Derived polymorphism is V
  VARIANT 122..255: note = Derived polymorphism lacks residues 122 to 255
  VARIANT 128: note = Ancestral polymorphism is P, Derived polymorphism is R
  VARIANT 148: note = Ancestral polymorphism is L, Derived polymorphism is H
  VARIANT 169: note = Ancestral polymorphism is Q, Derived polymorphism is L
  VARIANT 182: note = Ancestral polymorphism is P, Derived polymorphism is L
  VARIANT 219: note = Ancestral polymorphism is P, Derived polymorphism is L
MATKILALLALLALFVSATNAFIIPQCSLAPSAIIPQFLPPVTSMGFEHLAVQAYMLQQALAASVLQQPIDQLQQQSLAHLTIQTIATQQQQQFLPALSQLAVMLASNPLALANVATYQQQQLQQFLPALSQLAMVNPAAYLQQQQLLSSSPLAMVNAPTYLQQQLLQQIVPALTQLAVANPAAYLQQLLPFNQLTVSNSAAYLQQRQPLLNPLAVANPLVVAFLQQQQLLPYNQFSLMNPALSWQQPIVGGAIF

SEQ ID NO: 11612 - protein, 123 aa, Zea mays
  VARIANT 16: note = Ancestral polymorphism is L, Derived polymorphism is Q
  VARIANT 42: note = Ancestral polymorphism is T, Derived polymorphism is M
  VARIANT 59: note = Ancestral polymorphism is N, Derived polymorphism is Y
  VARIANT 60: note = Ancestral polymorphism is A, Derived polymorphism is V
  VARIANT 75..123: note = Derived polymorphism lacks residues 75 to 123
  VARIANT 87: note = Ancestral polymorphism is S, Derived polymorphism is L
  VARIANT 90: note = Ancestral polymorphism is T, Derived polymorphism is I
MLRSDTTRSHLILAVLKVYMLEAKPAVNRDVVEHALVVVLATSSWCRMAFRKDEHGVVNAVPLLDLAASGLGAEQEYGKYKHIVELSKATFGLRVNSVQWEPELQKSWDDNQVLEGYLKGTLG

SEQ ID NO: 11613 - protein, 241 aa, Zea mays
  VARIANT 104: note = Ancestral polymorphism is Q, Derived polymorphism is K
MDFDMLNSHPEAQLELMKAMLQLEQLTAFPLPDHGAMMMVPSTPPSPGMPQATTHHHYFSSVPHHMSAGANGRGVYDDDHQYSQGTAAPCNGSARSSEYVAHAQGPVAGGGNSGESTAATSVGSSSSAMREMIFRVAALQPVNIDPEMVRPPKRRNVRISTDPQSVAARMRRERISERIRILQRLVPGGTKMDTASMLDEAIHYVKFLKTQVQSLERAAAASGRRPAAPAVADNGAMNGQW

SEQ ID NO: 11614 - protein, 499 aa, Zea mays
  VARIANT 42: note = Ancestral polymorphism is P, Derived polymorphism is T
  VARIANT 217: note = Ancestral polymorphism is P, Derived polymorphism is L
  VARIANT 298: note = Ancestral polymorphism is N, Derived polymorphism is S
  VARIANT 309: note = Ancestral polymorphism is T, Derived polymorphism is A
  VARIANT 332: note = Ancestral polymorphism is T, Derived polymorphism is A
  VARIANT 404: note = Ancestral polymorphism is T, Derived polymorphism is M
  VARIANT 426..499: note = Derived polymorphism lacks residues 426 to 499
MAFIVLLAAAAAAIALVLHHLLSAQKKRSSRSAGSTSYSLPPGDLGVPVIGQTFSLLHALRSNTDDQWFRARIKRYGPVSKMSVLGSPTVLLAGTEANHFIFTNQGLILTQTRALRSLLRRSILTLTGDDLKQVRSALQGYLRPEMVRGYVGKMDAEVRRQLKLNWVGRSTVNVLPMARSLTLGVICSVVFGEEAAAIVDALATDFQQLGDAILSFPVNIPFTRFGKGMRSSAKIREAITKFARKKEEEYSLLLSQDEGCTTATATATTSAATDFVTYMLLLRSRGAHSLSLADIVDNVMGIVIGAHGTTSTLITFMVRHLANEPDVLAKITQEQDEIAGRNGRDGALTWEDVSSMKYTWRAALETLRTVPPVFGSFRTATKDIEYQGYLIPKGWKVFASQSITHMDPRFFAEPTKFDPSRFEKRSSIPPYSFLPFGGGPRMCPGTEFSRVETMVAMHYLVTRFRWKLRFEDEAYNKDPKPTPVFGCPVELELRKTPAI

SEQ ID NO: 11615 - protein, 667 aa, Zea mays
  VARIANT 312..667: note = Derived polymorphism lacks residues 312 to 667
MVTLLAFRLPPLFFFFLVLLPLIAAAADDGNMPQEGAEAMAALLNLKKSFADPTGRLEAWSAASPFAPCDAASPWPGVQCYKGSLVGIRLTHMNLSGTFDFGAVAKLPRLHSVNLKHNALSGPLPPSLGTLRGLRALYLSSNNFSGPIPAAVFANMRWLKKLYLDNNRITGPLPADAIASAPRLIELHLDHNQIDGPVPSKLPDSLKRFNVSHNRLSGSIPPSVAVRYDASSFAGNPGLCGSQGSDAAVCVAAGPALPPAMPSPTEADYAATEEETSVFVVVGIILLVILLVSGAMVLMLRQDERNSAAPAWDYYAGTAVGAGASASKSAAPRAGEMVAVDVAGGSSSHGGRRMGEFVLLNDHIPAFGLPDLMKASAEVLGNGTLGSAYKAAMRNGVTVAVKRLRDMNRVGREEFEQHVQMLGGLHHPNVLPPVGYHYRKEEKLIVSEYMPRGSLLYILHGDQSPNRLILDWQGRLRVAVGVVRGLAFLHERLGIPAGRLVSMDGADFDAPPPPPPHGNLKSGNILLDADMEPRLVDYGFFPLVNAAQAPQAMFAFRSPEGTTRGVVSARSDVYCLGVVLLELVTGRFPSQYLLNARGGTDVVNWAATAVAEGGERDLVDPAIAAAGRDAAVSLLRVGVRCANPEPERRLSVAEAASMVEEIGAGAS

SEQ ID NO: 11616 - protein, 652 aa, Zea mays
  VARIANT 445..652: note = Derived polymorphism lacks residues 445 to 652
  VARIANT 423..652: note = Derived polymorphism lacks residues 423 to 652
  VARIANT 324..652: note = Derived polymorphism lacks residues 324 to 652
  VARIANT 240..652: note = Derived polymorphism lacks residues 240 to 652
MKSTVFSTAVVSIGYALLGWDFAALSEANHHMEKEFELLNGPSIEGITLAASTFGAIVITIFSGALLDWLGRRVILVYSSLVLFSGGVLMLWSPNIYIVLLARLIVGSGSGLVFTCVPIYISETSPSNMRGLLGTMPQFMFFIGTIFSYCLIFWLTLMSSPSWRIMIGAIFAPSIVYFALLVYYLPESPRWLASDGKISEARVSLQWLRGKKHDVSGEIAAIVEGVDIISDSTVGAARAQSFSGTSASHTWPRSTFYWQLSDPLVDLLGSVHENMSEGGSRRNSFFPVFNSFSFPEHEHMNEHRDGNSDQQTRETYYAGEANNGDGLRASLLSQAASVEVNDTNTSFTSEGSSSYLRRHGTSVLAQEFMASIHDYDIEEEEEEIHGFALPHQSAPRDMESTGRHPFRHQIVRLSETADMKFKWRVLLQPGIRHALCYGMLIQALQQSTGISGLLRCAPEIFEQSGVASLFSDIGLSPHSTSILMSTLNALLILPCITAAMLLMDVCGRRVIVLATTPVLILSLSVMSMSTLVNMGPFESAVLFHFALTICFWSYVIGLGPIPNILCSEIFPTKARATCASFCSLSFWFGGLLSAYCFPVMLSTIGLGGACGIYALVCCAPLFLVYYRIPETKMLNLELIAELFKLSRQEHVQ

SEQ ID NO: 11617 - protein, 447 aa, Zea mays
  VARIANT 92..447: note = Derived polymorphism lacks residues 92 to 447
MHHQQRMKQAAAAAAAAQQQQLMQQALLLQQQQQSQAQPPLFPGHHPHPGLLAAPQIEPIVSGNLPPGFDSSTCRSVYVGNIHLQVTDTVLQEVFQSIGPVEGCKLIRKEKSSFGFIDYYDRRYAALAILSLNGRQLYGQPIKVNWAYTSTPREDTSGHFNIFVGDLCPEVTDATLFAFFSGYSTCSDARVMWDQKTGRSRGFGFVSFRNQQDAQSAINDLNGKWLGNRQIRCNWATKGANAGEEKQILDTKVDLSNGSSESGKENPNEDGPENNPQFTTVYVGNLPHEATMNDVHLFFHSLGAGSIEEVRVTRDKGFGFVRYSTHEEAALAIQMGNGQLIGGRQIKCSWGSKPTPQGTASLPLPPPALAPFSTGVSATDLLAYQRLALSKMASNHPALMGQHSLKQVAALGIGGGASQSIYDGGFQGINTVTGTTSAQQQQQLMYY

SEQ ID NO: 11618 - protein, 504 aa, Zea mays
  VARIANT 242: note = Ancestral polymorphism is G, Derived polymorphism is R
MAFFLAVACIYIVSLTLLVLLLDASRRRRTTGGGSSSTEEHKLPPGSLGLPFLGETLQLYSQNPKVFFASRLKRYGEVFKTHVLGCPCVILASPEAARMVLVSQAHLFKPTYPPSKERMIGAQALFFHQGDYHLRLRRLVKGWLGPDALRGLVPDVEAAVASTLDGWEGRVTSTFHTMKRLTFDVGVIAIFGHRLAGHVKEELRRNYFTMEKGYNSFPIPVACTSYSQAIKARQRLGAVLSGILAERRARRSDDDDDHGLLNALMRSRDDSGAAPPLSDDQIADNVIGVLFAAQDTTASVLTWILKFLHDNPKLLEAVKVEQMAAYEENDGGRLPLTWAQTRKMSITHLVILESLRLASIIAFTFREAVEDVHYQGFLIPKGWKVMPLFSNLHYSPDYFEDPHKFDPSRFKVAPRPGTFLPFGSGVHACPGNDLAKLEMLVLIHRLVTTYRWEVVGSSDDVTYSPFPVPKRGLLARLSRATTGSAVVGRAPPLDIGGPAGASYS

SEQ ID NO: 11619 - protein, 175 aa, Zea mays
  VARIANT 33: note = Ancestral polymorphism is V, Derived polymorphism is L
  VARIANT 61: note = Ancestral polymorphism is D, Derived polymorphism is V
  VARIANT 71: note = Ancestral polymorphism is R, Derived polymorphism is M
  VARIANT 77: note = Ancestral polymorphism is P, Derived polymorphism is S
  VARIANT 84: note = Ancestral polymorphism is I, Derived polymorphism is V
  VARIANT 145: note = Ancestral polymorphism is A, Derived polymorphism is V
MPGFAQRLAGIPWRSIARQGLSRVFLVAKAYCVIHVVNDHLCSVTLVRGASMLPSLNLAGDAVAVDRVSVRLGRVAPGDIVLMISPEDPRKSVVKRVVGMQGDSVTYLVDPGKSDSSRTVVVPQDHVWVQGDNIFASNDSRQFGAVPYGLITGKIFCRVWPPESFGAIDDATKQS

SEQ ID NO: 11620 - protein, 111 aa, Zea mays
  VARIANT 66: note = Ancestral polymorphism is C, Derived polymorphism is W
MASSKVVVMAATDALLLIMFSFLILPSPSDGKGMCPLFRSIVPECRDAPLLCIARCQDKGYVGGFCTTQQICMCAQCKSSLLLLQQQHHRFQLAAAAAPEPSATAAAAAST

SEQ ID NO: 11621 - protein, 471 aa, Zea mays
  VARIANT 376: note = Ancestral polymorphism is L, Derived polymorphism is M
MQTPAMSTSTATTTRAMAPAKPPARRHCCSYLLLLLPSTGHRRSVAAWSAKKKNPWLDPFDDGPDEEFDYQGMFSGGKQEEDPRPPEDPANPYGFLRFPQGYNPELDSLASKVRGDVRRACCVVSGGVYENVLFLPVVQMLKDRYPGVLVDVVASPRGKQVYEMCKNVRYANVYDPDDDWPEPAEYTHMLGVLKNRYYDLIVSTRLAGIGHALFLFMSSARDKVGYVYPNVNSVGAGLFLNEMFKAPTNNLADGGYHMYKDMLEWIGRPAKNVPRQPTQPLRVSISKKLRAYVEDKYSRAGVEKGKYVVVHGIASDSVASMTSRGDDDCLLPLEHWAQIAKEISSGDKGLKPLFVIPHDKHREEVEEEVGDDTNILFITTPGQLTCLINDSAGVVATNTAAVQLANARDKPCVALFSSAEKARLFLPYVEDKSSCTVISSMTGKLIDIDINAVKNAVKDLEPAPSFALAQK

SEQ ID NO: 11622 - protein, 1386 aa, Zea mays
  VARIANT 1330..1386: note = Derived polymorphism lacks residues 1330 to 1386
MALFRKFFYRKPPDGLLEITERVYVFDSCFTTDVFDDDKYRDYIGDIVAQLQSHFADASFMVFNFRDGDSQSLLANILSSYDMVVMDYPRQYEGCPLLTIEMIHHYLRSGESWLSLGQQNVLIMHCERGGWAVLAFMLAGLLLYRKQFIGEQRTLEMIYRQAPHELVQLWSPLNPMPSQIRYLHYISRRNVSSEWPPQDRALTLDCVILRNIPGFNEEGGCRPIFRIYGQDPLPATNNTPKVLFATPKRSKYVRLYKKADCELIKIDIHCHIQGDVVLECISIDVDQEREEMMFRVMFNTAFIRSNILMLNRDEIDILWDAKDRFPKEFRAEVLLSEMDTANQLGPMEVAGIGEKGGLPVEAFAKVQEMFSNVDWLDPTGDAAVQLFQRLTSSENIQLRQGFLSPSKKEAESLELGSISPIDKHFDNVQQEPSKVEHPTVYVNKLENVGQERLVLLEQTTNSEVKTGISVVQENPGSLVHKVDSNAKQSISLEKAVPSTMKSIDPVLKDQNAKLDEQHGSGQHSFPTIIMSQRFPISSSCPALSGYSSPRLLSACPRFNSAPSALGITALLEDHAGSAENRCGSTTLTFDTTGTPVVTKGMPLLRPPPSPLDLLVSDSTMMSEAKGSSQPTLNNSGLPSHPERQLTFQSLGTTTPATNHQKSSTTVTIELLPTSAPPPPPLPPPSSVFSSRIYHLPPSPTSFRSPAPAAPQPPPVPPPPPPMPRPFPVRSHAPQPLTPQPPALSSSLILSGTPQSPPSPPPSRCSLSKPPAPPPPPPPPPLLASTSSTIRPAASHLPLFASTSSPVRPAAPPPPPAPTSSPIRASALPPPPPPGTSSSPRPPPPPCYSSKQSSSPMGKSMPSPPVPPPPSHGGRNGASGNIVPPPAPPGSNAKLFGPQGRGPAPPSGPMSKSFQSGQAVLRRSNLKPLHWVKVTRAMHGSLWAESQKPDETLKAPVFDMSELENLFSAALPSSDSRRSDKSGSRASGSKPEKIHLIDLRRANNCGIMLTKVKMPLPDLMSAILALDDTVLDADQVENLIKFTPTKDEIELLKGYKGDKQVLGECEQFFMELMKLPRVESKLRVFSFKIQFRSQVSDLKRNLNIVNSSAEEIRGSVKLKRIMQTILSLGNALNQGTARGSAVGFRLDSLLKLSDTRARNNKMTLMHYLSKVLSEKLPELLDFPKDLSSLELAAKIQLKSLAEEMQAVNKGLEKVEQELTTSENDGPVSEIFRKTLKDFLIGAEAEVRSLTSLYSNVGRNADALALYFGEDPARCPFEQVVTTLQNFVRLFTRSHEENCKQLDLEKKKALKEAEDNSKQLDLEKKKTQKEAETEKIKKKSDSEKACKKELENDKSSKKDSANEKGKLNNPIKELDISLQSPAQTASAK

SEQ ID NO: 11623 - protein, 1051 aa, Zea mays
  VARIANT 6: note = Ancestral polymorphism is R, Derived polymorphism is S
MSLPTRLVLLLPLLLLHGILPAPTSASAAPLRSETDREALLELKAVLGQRSSRLSSWNSSASLCLWPGVTCSHRHGGRVSALHLSSAGLAGTIPASVGNLTFLTSIDLSQNKLEGEIPAAVGRLHRLRYLDMSNNSLQSEIPAGLRNCSSLVSIRLGGNQLTGGVPGWLGGLPKLQGVLLGPNNLTGLIPRSLANLTSSLREINLETNHLARGHHPRGLRKPYLRRHPRGPLLNVSSLITLAVSDNTMHGTLPSDMGAGLPMIRYLLLSRNLFAGGVPPSLGNATMLHVIDLSVNSLTGTIPPGVGRLCPDTLAFDDNMLEASSAQDWEFITSFTNCTRGLRLLSLQYNLLGGELPSSVANLSSQLQLLYLSANEISGKIPLDIGNLAGLQALKLDYNQFSGSLPTSIGRLSTLKLLQFSNNNLSGSLPSSIGNLTQLQILLAYKNAFVGPLPSSLGNLQQLNGVGLSNNKFTGPLPKEIFNLSSLTDDLYLSYNYFVGSLPPEVGSLTNLVHLYISGNNLSGPLPDSLGNCLSMMELRLDGNSFSGAIPTSFSSMRGLVLLNLTDNMLSGKIPQELSRISGLEELYLAHNNLSGPIPHTFGNMTSLNHLDLSFNQLSGQIPVQGVFTNVTGFSFAGNDELCGGVQELHLPACANKPLWHSRRNHHIILKVVIPVAGALLLFMTLAVLVRTLQKKSKAQSEAAPVTVEGALQLMDDVYPRVSYADLVRGTDGFSLSNRIGTGRYGSVYKGSLVINNATTIVAVKVFDLQQSGSLRSFMSECEALRKVRHRNLVSVITCCSGYDSNQNNFKAIVLEYMTNGSLDKWIHPDQGGQSTDPVGLTLMQRLNIAIDTCDAMDYLHNSCQPPIVHCDLKPSNILLNEDFGALVGDFGIAKILRDSTGDPSNMNSRSSTGTGIRGTIGYVAPEYGEGHQVSPCGDVYSFGILLLELFTGKAPTNDMFADGLSLQGYVQAAFPDHLVDIVDPAIVAAEENYAHDVHSGTSNGPRGQNNSVMVSVTGLALLCTKQAPAERISMRNAATELRKIRAHFIRQ

SEQ ID NO: 11624 - protein, 526 aa, Zea mays
  VARIANT 211: note = Ancestral polymorphism is D, Derived polymorphism is A
MAAIASASPRTLIPPRPRHHGAAPSPSTSDVSSLRLLRAHPRHVRRSRGVSISMPVARSRSFVFSPRAVADSKSSQTCLDPDASTSVLGIILGGGAGTRLYPLTKKRAKPAVPLGANYRLIDIPVSNCLNSNISKIYVLTQFNSASLNRHLSRAYGSNIGGYKNEGFVEVLAAQQSPDNPNWFQGTADAVRQYLWLFEEHNVMEFLILAGDHLYRMDYEKFIQAHRETNADITVAALPMDEKRATAFGLMKIDEEGRIIEFAEKPKGEQLKAMMVDTTILGLDDVRAKEMPYIASMGIYVFSKDVMLQLLREQFPEANDFGSEVIPGATSIGKREQLTRKPRQVQAYLYDGYWEDIGTIAAFYNANLGITKKPIPDFSFYDRFAPIYTQPRHLPPSKVLDADVTDSVIGEGCVIKNCKINHSVVGLRSCISEGAIIEDSLLMGADYYETEADKKLLAEKGGIPIGIGKNSCIRRAIIDKNARIGDNVKILNADNVQEAAMETDGYFIKGGIVTVIKDALLPSGTVI

SEQ ID NO: 11625 - protein, 220 aa, Zea mays
  VARIANT 1: note = Ancestral polymorphism is M, Derived polymorphism is T
  VARIANT 4..220: note = Derived polymorphism lacks residues 4 to 220
  VARIANT 90: note = Ancestral polymorphism is M, Derived polymorphism is V
MQQQMPMPPAPAAAAAAAPPAAGITTEQIQKYLDENKQLILAILENQNLGKLAECAQYQAQLQKNLLYLAAIADAQPQPPQNPAGRPQMMQPGIVPGAGHYMSQVPMFPPRTPLTPQQMQEQQQQQQFQQQQQQVQALTFPGQMVMRPGTINGMQQQQPMQADPARAAAELQQAAPIPADGRGSKQDTAGGASSEPSANESHKSATGADTEAGGDVAEKS

SEQ ID NO: 11626 - protein, 115 aa, Zea mays
  VARIANT 103: note = Ancestral polymorphism is M, Derived polymorphism is I
  VARIANT 96..115: note = Derived polymorphism lacks residues 96 to 115
  VARIANT 90: note = Ancestral polymorphism is Y, Derived polymorphism is C
  VARIANT 76: note = Ancestral polymorphism is T, Derived polymorphism is I
  VARIANT 59: note = Ancestral polymorphism is V, Derived polymorphism is I
  VARIANT 58: note = Ancestral polymorphism is A, Derived polymorphism is P
  VARIANT 26: note = Ancestral polymorphism is C, Derived polymorphism is Y
  VARIANT 9: note = Ancestral polymorphism is V, Derived polymorphism is M
  VARIANT 3: note = Ancestral polymorphism is S, Derived polymorphism is L
MASEMVKAMTSDKLKEMDWAKNIEIYELVAQDPRKAKDVIKSVKKCIGSRSKTTQLFPVMTDLPVREKIFLLLDATQTSLGGAKARFPQCYEAYYELVVGLNMQKLGFLNYKRAD

SEQ ID NO: 11627 - protein, 158 aa, Zea mays
  VARIANT 18..158: note = Derived polymorphism lacks residues 18 to 158
  VARIANT 25..158: note = Derived polymorphism lacks residues 25 to 158
  VARIANT 36: note = Ancestral polymorphism is R, Derived polymorphism is H
  VARIANT 74: note = Ancestral polymorphism is R, Derived polymorphism is C
  VARIANT 85: note = Ancestral polymorphism is L, Derived polymorphism is P
MLFIESMERLELGGDRDWYMKLMERPSEVDCIYYVRLGSCGYEERCHYNHPGCDHDHVASVSAPFMSFHPFVLCCFVLFYFTGVLSAPDVLTPTMTDEPIQGDKRRRDVDLEGEALPSFHGGVLAPEQCKALESVLLPKLSSKRIYMEIDECKETTMH

SEQ ID NO: 11628 - protein, 295 aa, Zea mays
  VARIANT 90..295: note = Derived polymorphism lacks residues 90 to 295
  VARIANT 59..295: note = Derived polymorphism lacks residues 59 to 295
MEDDEQQQQQAAGACVPPGFRFHPTEEELVGYYLARKVACQKIHLDIVREVDLYRIEPWDLQERCGYYGGGQDQEEPTEYYFFSYKDRKYPSGTRTNRATAAGFWKATGRDKPVLSSSTAAVIGMRKTLVFYRGRAPNGRRTDWIIHEYRLQGNEHEHAQEEGWVVCRAFHKPMPNQHQHMMLRHAAGCYYPPPIFGYDDGPAQLMSGSGSPLAAESKLHVQQLLADMPPPLHSPAVDVVGVHHHSYNANDHAAAEPTTVDWNLLNSLLPPAQLNFHHPPSPASPSSCSKNNNGA

SEQ ID NO: 11629 - protein, 379 aa, Zea mays
  VARIANT 270: note = Ancestral polymorphism is S, Derived polymorphism is F
  VARIANT 238: note = Ancestral polymorphism is I, Derived polymorphism is V
  VARIANT 180: note = Ancestral polymorphism is G, Derived polymorphism is R
  VARIANT 14..379: note = Derived polymorphism lacks residues 14 to 379
MKLKTDSCGIGSGQESFFFSFSDFSVTIGHTMIIFSATLSGYYRDRYFYWLHFCHVVRLMAMEGPVLCRPAMQAKSPAAALVNNSLTRFGQLGTISKYRNVSRFISPISQPSTKNIGPCCSFSSSSDGNGYMAGNFSDSDEDYVNSTVLEAVEVRSGSEGYVIKMRDGKNLRCVHNNSQGRNIPESAPQPAIVLRIEDGSETLLPIIVLEMPSVLLMAAIRNVHIARPTIYQVVKEMIDKMGYEVKLVRVNKRIQEAYCAELCLTKIDDSTDSITFDLRPSDAINIAVRCKVPVQVHRSLAYSDGIRPVEPARMAVAAGLSDGLLFTELDRPDGQASVEAQEFGLVKNMLIAAVEERYKDAASWKDKLMRLRSKRKNWA

SEQ ID NO: 11630 - protein, 132 aa, Zea mays
  VARIANT 36..132: note = Derived polymorphism lacks residues 36 to 132
  VARIANT 27: note = Ancestral polymorphism is S, Derived polymorphism is Y
  VARIANT 23: note = Ancestral polymorphism is S, Derived polymorphism is L
  VARIANT 15: note = Ancestral polymorphism is D, Derived polymorphism is N
  VARIANT 6: note = Ancestral polymorphism is E, Derived polymorphism is D
MYEVVEAPCVKKYKNVYVVSTISEFSSSLETAGGHWRVDCLLRAKGMPSYFAVLDQGARSVSSDMDLGGFLHIRKAGRAFLNSDFFANSGVMVKQSFVCMYQQLKCKHDIIIVEYRNNYLLYLIAKSETVLL

SEQ ID NO: 11631 - protein, 146 aa, Zea mays
  VARIANT 6..146: note = Derived polymorphism lacks residues 6 to 146
MAASRGVENRNEGGRDEADAPTVAGTGSSAGLQHGAVVAATGSSVGLQHSVVVAATAVLFLHGGTVLPLRRLSTPSSITRSRLGENPLPLLQQSKRGTRGVSSTTVAKSCVGPSRPDLADTEHLCLQAPPEQRRNRCPRSGSRAPR

SEQ ID NO: 11632 - protein, 212 aa, Zea mays
  VARIANT 31: note = Ancestral polymorphism is R, Derived polymorphism is H
  VARIANT 32: note = Ancestral polymorphism is R, Derived polymorphism is W
  VARIANT 134: note = Ancestral polymorphism is H, Derived polymorphism is Y
  VARIANT 139..212: note = Derived polymorphism lacks residues 139 to 212
  VARIANT 155..212: note = Derived polymorphism lacks residues 155 to 212
MPPPPPPVHDAPTAPHRPRESASGHQKARFRRKRLAVARRPTPRHLAHTPTSIAHRTVSISTSYSSSSVSPTTSHPVVVTLTAAPAIEACGDVLLRYPLQPGGSAPHPTPAPAGRAGPVPHQHAALHEHHHIRHAHLRRGQRLAALHVPPRPPRRAEKTPSTAASSPAAASTSNHALAYASVATRRSVTLAGTPGGSVRLFSPSVAPLMARW

SEQ ID NO: 11633 - protein, 249 aa, Zea mays
  VARIANT 181..249: note = Derived polymorphism lacks residues 181 to 249
  VARIANT 161..249: note = Derived polymorphism lacks residues 161 to 249
  VARIANT 133: note = Ancestral polymorphism is P, Derived polymorphism is H
  VARIANT 118: note = Ancestral polymorphism is G, Derived polymorphism is R
  VARIANT 116..249: note = Derived polymorphism lacks residues 116 to 249
  VARIANT 115: note = Ancestral polymorphism is Q, Derived polymorphism is R
  VARIANT 102..249: note = Derived polymorphism lacks residues 102 to 249
  VARIANT 100..249: note = Derived polymorphism lacks residues 100 to 249
  VARIANT 44..249: note = Derived polymorphism lacks residues 44 to 249
MFRRGSPRMNLIQAAAMQRVSPRSTTNKRKKRTSPKVGRLRANWNSGLEKGLVQILQDHNNDCYKGQNGWSSEAWNRIVKLFHEKFPYVTFTKCQIQDKEKELKRDYKALKEARQQSGVSWDERLCRIEAKEPIWNNLTTSNERLKKFRTKSFPLFEALGELHDGNIAEGTMNFTSIEPSRPPVTQPCQDDDLRVLDLIAPTSMSKRAKNVGAGSSRTRIDKRGQDGKVVEMMERFLEMKENKMRWRKG

SEQ ID NO: 11634 - protein, 358 aa, Zea mays
  VARIANT 32: note = Ancestral polymorphism is C, Derived polymorphism is W
  VARIANT 58: note = Ancestral polymorphism is P, Derived polymorphism is T
  VARIANT 312: note = Ancestral polymorphism is E, Derived polymorphism is D
MESEHHLFEIAAARLERSSAFLDEDYCSWSPCIQGYHWRCVCSADPAAGTASFTVSLPYSSTREPLNASFKLSLLDRGGLPVPSRTRATLFQNCLIQQMWQWECPGFLTRDDLERHEYYLDSDGGRCFRVRCDIAIKPFAAATAGDGDAFVAAPPSDDLHRHLGDLLARKDGADVTFQLVDAGGETFSAHRCVLAARSPVFRAQLFGEMMESSKGTGVVIPVEDMEAQVFSALLAFIYTDSLPPETGSGDDDDDDDDEAMVQYQLLLAAADRYGVDRMKLVCQEKLCKHIRADSVATMLVLADRHHCPALKEACFRFLSSSGNLGSFTQTTDGFEVLNASCPAVLKELLAKLATVLIF

SEQ ID NO: 11635 - protein, 39 aa, Zea mays
  VARIANT 21: note = Ancestral polymorphism is R, Derived polymorphism is K
MIQDKYCLRGAEWGSGTAPRRACQTRREEGLHFGAQEES

SEQ ID NO: 11636 - protein, 217 aa, Zea mays
  VARIANT 42: note = Ancestral polymorphism is E, Derived polymorphism is K
MVQFLMSRPDWEFHHASSSPSRPESSLLPAPAISAAACGPAEMGSTSSMLTQYDIEEVQDHCNHAFSQQEIVSLYHRFCQLDRNGGGFVSADEFMSVPEFAVNPLSQRLLRMLDGLNFKEFVAFLSAFSPRTSLQQKIEFIFRVYDTDCNGKVAFDDILSILRDLTGSFMTEQQRQKVLIHVLEEAGYTKDSHFTLPDFMKIIGNSELKMEVEVPID

SEQ ID NO: 11637 - protein, 133 aa, Zea mays
  VARIANT 66: note = Ancestral polymorphism is P, Derived polymorphism is L
MKPVVGIVVSNKMQKSVVVAVDRLFHNKVYNRYVKRTSKFMAHDDDDSCNIGDRVCNSCSFDSSPPLPRSDFVRLWKLAMLTSVRLDPSRPLSRHKHWVVAEILRRAKVYVPPAATASSERGSKSQQAGGATK

SEQ ID NO: 11638 - protein, 191 aa, Zea mays
  VARIANT 122: note = Ancestral polymorphism is G, Derived polymorphism is R
MAHAKAVAVLGVVIASLLLAAESRHIARKDLGVGLGGGGSGGGGGSLGVGTGGGVGVGTGGGLGVGTGGGLGVGSGIGAGAGVGGGGSGSGSYSGSGSGSWSGSGSGSGAPGSSAGSYAESGSGSNAGPGGAGAGSYAGSRAGSYAGSSSGGAGSDAGSDAGSYAGPHGGSGAGSYAGSHAGSYAGSGHGK

SEQ ID NO: 11639 - protein, 131 aa, Zea mays
  VARIANT 2: note = Ancestral polymorphism is G, Derived polymorphism is S
  VARIANT 8: note = Ancestral polymorphism is R, Derived polymorphism is C
  VARIANT 14: note = Ancestral polymorphism is S, Derived polymorphism is C
  VARIANT 20: note = Ancestral polymorphism is E, Derived polymorphism is G
  VARIANT 22: note = Ancestral polymorphism is W, Derived polymorphism is S
  VARIANT 28: note = Ancestral polymorphism is E, Derived polymorphism is K
  VARIANT 58..131: note = Derived polymorphism lacks residues 58 to 131
  VARIANT 65: note = Ancestral polymorphism is E, Derived polymorphism is K
MGFALLERLTEIFSFPEVKEFWFMRHPEYSSFLIWTVGTQGLLCNLLSTVALTLVLWRFFSKQLEKHGRTVPESKAKEEVGRVLICMKDRLDPDSLLFVSAVEDASDALEYCSADGRPLMKCFPESCILHH

SEQ ID NO: 11640 - protein, 267 aa, Zea mays
  VARIANT 2: note = Ancestral polymorphism is A, Derived polymorphism is V
  VARIANT 60: note = Ancestral polymorphism is Q, Derived polymorphism is H
  VARIANT 63: note = Ancestral polymorphism is A, Derived polymorphism is V
  VARIANT 64: note = Ancestral polymorphism is A, Derived polymorphism is S
  VARIANT 65: note = Ancestral polymorphism is G, Derived polymorphism is D
  VARIANT 116..267: note = Derived polymorphism lacks residues 116 to 267
  VARIANT 129..267: note = Derived polymorphism lacks residues 129 to 267
  VARIANT 146..267: note = Derived polymorphism lacks residues 146 to 267
  VARIANT 177: note = Ancestral polymorphism is A, Derived polymorphism is T
  VARIANT 229: note = Ancestral polymorphism is A, Derived polymorphism is T
MAAKIFCLIMLLGLSASAATASIFPQCSQAPIASLLPPYLSPAMSSVCENPILLPYRIQQAIAAGILPLSPLFLQQSSALLQQLPLVHLLAQNIRAQQLQQLVLANLAAYSQQQQLPLVHLLAQNIRAQQLQQLVLANLAAYSQQQQFLPFNQLAALNSAAYLQQQQLLPFSQLAAAYPRQFLPFNQLAALNSHAYVQQQQLLPFSQLAAVSPAAFLTQQHLLPFYLHTAPNVGTLLQLQQLLPFDQLALTNPAVFYQQPIIGGALF

SEQ ID NO: 11641 - protein, 177 aa, Zea mays
  VARIANT 108: note = Ancestral polymorphism is S, Derived polymorphism is Y
  VARIANT 96: note = Ancestral polymorphism is V, Derived polymorphism is I
  VARIANT 82: note = Ancestral polymorphism is L, Derived polymorphism is H
MVGASLYGSRRSKSTAIVDQMYNDRNIFNDPEARGNLLGYQLEVANLVKSDIQYIGENRLQAQHPSVPLPCSVVQLRYYYILCGMGRSQWKDFVAVRFSKTTTINWEYFGLSIEPNGHCDNFFIAGFCQKHFEDVHPRMSKKHFFYPKVGNVSWVWSPGMVLGHGSFFLYVSPGLQV

SEQ ID NO: 11642 - protein, 744 aa, Zea mays
  VARIANT 53..744: note = Derived polymorphism lacks residues 53 to 744
MLSVSASDGDRSPCPVEARRIVVTHRLPLHAEPNPDAPYGFDFSLDADALPLQLARGLPRPVVFVGALPSAAASISASEELEADLLARFGCSPVFLDPGLHKDFYDGFCKRYLWPMLHYLLPFTLTPFFGSGGLKFKANLYRAYLTANTQYAERVLEQLNPDEDLVFIHDYHLLALPTILRHKSPRARIGFFLHTPFPTSELFRTVPVREDLLRSLLNADLVGFHNYDYARHFLSACTRLLGVTSHTHRGYISIDYCGRAVSVKILAGGVDIGQLREVLSSPETEAKAKEVATKFAGRQLLLGVDDVDLFKGIGLKLLAMERLLESQPELHGQVVLVQINNPVRSPGYDTDEICAELQAMRKRINARFATPAGYEPIVIIEDPMTMHEKLAFYTSADICLVTAVRDGLNRTPYIYTVCRQEGPISSGVVGAPKEGAIVLSEFVGCATSLGGAVHINPWNVDAVAEGMHMALRFNGREKQVRQEKHYRFVSTHDIAYWGRSLDQDLQRASKDHASMKFMSVGLAMSYHIVVLSPNFQKLSPEHINPSYQRAGNRLILLDYDETVMFHPGLLDRHPSQRLIGILNELCSDPKNTVFVVSGRSKDELARWLEPCERLGISAEHGYFTRWSRYSPWESPDLKEVDKGTAVQRIIAAMRDRGRMPDFILCVGDDASDEDMFKAVTAPSNKSAFPEDAEVFACTIGTKPSLAKYYLDDPVEVLSMLKGLIKSSVEERPGDGEGPSRVSFD

SEQ ID NO: 11643 - protein, 140 aa, Zea mays
  VARIANT 1: note = Ancestral polymorphism is M, Derived polymorphism is L
  VARIANT 21..140: note = Derived polymorphism lacks residues 21 to 140
  VARIANT 28: note = Ancestral polymorphism is P, Derived polymorphism is L
MQLVIFQGQTETSNTTPTEQERVEPEPPIIEDVENNDDFESVRLNRTTSSEDNDSDDTYIYGIEHDPGLMTPISSYSINNQDAVTRAYIALGPCRPKMKKDDFPQHECGDNNKFPGGDAFVNEGFRNWNVKARLLKGWCC

SEQ ID NO: 11644 - protein, 1170 aa, Zea mays
  VARIANT 86: note = Ancestral polymorphism is P, Derived polymorphism is L
  VARIANT 72: note = Ancestral polymorphism is D, Derived polymorphism is Y
METSLGWGGARLGVGRYAEGNRMASRGLRSSIGGNAPWEHRELEGNKMKLVFWHWIFLFFVLLSTSQGMSSDGLALLALSKTLILPSFIRTNWSASDATPCTWNGVGCNGRNRVISLDLSSSEVSGFIGPEIGRLKYLQVLILSANNISGLIPLELGNCSMLEQLDLSQNLLSGNIPASMGSLKKLSSLSLYYNSFHGTIPEELFKNQFLEQVYLHGNQLSGWIPFSVGEMTSLKSLWLHENMLSGVLPSSIGNCTKLEELYLLHNQLSGSIPETLSKIEGLKVFDATANSFTGEISFSFENCKLEIFILSFNNIKGEIPSWLGNCRSLQQLGFVNNSLSGKIPNFIGLFSNLTYLLLSQNSLTGLIPPEIGNCRLLQWLELDANQLEGTVPEEFANLRYLSKLFLFENHLMGDFPESIWSIQTLESVLLYSNKFTGRLPSVLAELKSLKNITLFDNFFTGVIPQELGVNSPLVQIDFTNNSFVGGIPPNICSGKALRILDLGFNHLNGSIPSSVLDCPSLERVIVENNNLVGSIPQFINCANLSYMDLSHNSLSGNIPSSFSRCVKIAEINWSENNIFGAIPPEIGKLVNLKRLDLSHNLLHGSIPVQISSCSKLYSLDLGFNSLNGSALSTVSSLKFLTQLRLQENRFSGGLPDPFSQLEMLIELQLGGNILGGSIPSSLGQLVKLGTTLNLSSNGLVGDIPSQFGNLVELQNLDLSFNNLTGGLATLRSLRFLQALNVSYNQFSGPVPDNLVKFLSSTTNSFDGNPGLCISCSTSDSSCMGANVLKPCGGSKKRAVHGRFKIVLIVLGSLFVGAVLVLILWCILLKSRDQKKNSEEAVSHMFEGSSSKLNEVIEATECFDDKYIIGKGGHGTVYKATLRSGDVYAIKKLVISAHKGSYKSMVGELKTLGKIKHRNLIKLKESWLRNDNGFILYDFMEKGSLHDVLHVVQPAPALDWCVRYDIALGTAHGLAYLHDDCRPAIIHRDIKPSNILLDKDMVPHISDFGIAKLLEQPSTAPQTTGVVGTIGYMAPELAFSTKSSMESDVYSYGVVLLELLTRRAAVDPSFPDGTDIVSWASSALNGTDKIEAVCDPALMEEVFGTVEMEEVSKVLSVALRCAAREASQRPSMTAVVKELTDARPATGGGRSLSKSKQGKPGSQSNSSAYRQ

SEQ ID NO: 11645 - protein, 467 aa, Zea mays
  VARIANT 161..467: note = Derived polymorphism lacks residues 161 to 467
MKLVFWHRFFLLFVLVSTSQGMSSDGLALLALSKTLILPSFIRTNWSGSDATPCTWNGVGCNGRNRVISLDLSSSEVSGFIGPEIGRLKYMQVLILSANNISGLIPLELGNCSMLEQLDLSQNLLSGNIPASMGSLKKLSSLSLYYNSFNGTIPEELFKNQFLEQVYLHGNQLSGSIPPSRSIGNCTKLEELYLLNNQLSGSIPESLSKIEGLKVFDATANSFTGEISFSFENCKLEIFILSFNNIKGEIPSWLGNCRSLQQLGFVNNSLSGKIPNFIGLSSNLTYLLLSQNSLTGLIPPEIGNCRLLQWLELDANQLEGTVPEEFANLRNLSKLFLFENHLMGLFPESIWSIQTLESVLLYRNKFTGRLPSVLAELKSLKNITLFDNFFTGVIPQELGVNSPLVQIDFTNNSFVGGIPPNICSGKALRILDLGFNHLNGSIPSSVLDCPSLERLILRDNNLSGSIM

SEQ ID NO: 11646 - protein, 533 aa, Zea mays
  VARIANT 73: note = Ancestral polymorphism is A, Derived polymorphism is T
MLTCGRFISSSAATSTASFFPFRTLTRSLVRRPAPHLLSSASAAAATAVELDTNGDGSAGGGAGVVRPQWKAAIDFKWIRDNRDAVADNIRTRNSTANLDLVFELYDQYLTLQKEVERLRAERNAVANKMKGKLDPSVRQALVEEGKNLKEGLIALEEDLVQLTDKLQLEAQSIPNTTHPDVPVGGEESSVLRKEVGSQRSFNFAIKDHLQLGKELDLFDFDAAAEILSDTPKSSNCMMSSLYSVAQVSGSKFYYLKNEAVLLEMALVNWAISEVSKKGFTPLITPEIVRSSVVEKCGFQPRAKNTQVYSIEDSDQCLIGTAEIPVGGIHMDSILAESALPLKYVAYSHCFRTEAGAAGAATRGLYRVHQFSKVEMFIFCRPEESGKWHEELITIEEDLYASLGLHFKTLDMATGDLGAPAYRKFDIEAWMPGLERYGEISSASNCTDYQSRRLGIRYRPSPSEPPSTSTKKGKGAASGPTQFVHTLNATAVAVPRLIVCILENFQQGDGSIVVPEPLRPYMGGLELLSPKFK

SEQ ID NO: 11647 - protein, 583 aa, Zea mays
  VARIANT 62..583: note = Derived polymorphism lacks residues 62 to 583
MDIPTAVIHRLQSSLREAIFAPSVEDAPAPPFPSVSDAVAAFDSGAASVSAEFRCVGCGSAGGLLRGAQSALCAYCGCPRRGEEAEGGGSGGIAFRNSAAYRCLLGSLGLDGSEFVEFDTDTTALNKSKDAPPPNSVNDDEAFDEWQEFTASGNQDSLSNAGENMEEPLRGDSSEKDVIDPWPVGNKESPNNVIEDSNQWQAFASMSGQARDFVISVERSSGHRLNLVRPDVVEETMSSISHQHSSEINPVDLWPVGNVEALNAAEMFKETNDYFGDWQDFTTTGQVQDTSLNQTGDMIEVRKATHKETDMDSWFIGNIREPANTGTMNENNMLDNRQGFTCSDQAHQTSSSPGAEMISVPLELHDVSVSVQSWANGSSKDAATPSSTNIESNTFNVRQDFAKSGHLQENISSLGRELSSVSPEPVEENDSLDLWLTSNFKESKCSDVVGRTNASSDGWQDFASFDHAQSNAALFDITSAAWPDAFGGLEFGGALQLAASENLKDKKEASNEAKTSPSDDHLKSTNGMQQMDDVDSLSSLWPTNKPDPANTNVEQLLAQMHDLSFMLKDELSAPDKLIDRSKS

SEQ ID NO: 11648 - protein, 393 aa, Zea mays
  VARIANT 239: note = Ancestral polymorphism is F, Derived polymorphism is S
  VARIANT 277..393: note = Derived polymorphism lacks residues 277 to 393
MVTRGGGSQSYGFPIYCAAWLPLAHIIKPDPPAAEADADDPSSSTPSLPMAVLGGGGGEGRSGVPNKLVVAALATGEEAAPALSPDTVVEVNSEEEVPYRMAVHPRGDGVFCAFPNGCRLYRWESQEGEGPQRLALEPDQDALAELKDVGLQLAVSFSGEGSILAIGGEDGYLRVFNWPTMGSVLTEIDTKTSIKDLTISSDEKFLAVNRSSGPCRVWDLQSSEVVASLPRETGEIFGFCRFSNKADNSHVLFITVMEGDYGKIVSWNTTSWTRTGSKKITREAISAFAVSPNGALLAIGTIEGSIIVVGSKDMRTLVTVKKAHLGIVTTLTFSQDSRTLLSTSFDSSARVTSVGSPKSNGTSIWPMLLVVILAILVYYCTQHKEDILAMLQR

SEQ ID NO: 11649 - protein, 317 aa, Zea mays
  VARIANT 25: note = Ancestral polymorphism is S, Derived polymorphism is I
MAWASPRGTAPQLLLVLSLLLAAASASLLPLSNNAPPPRLPPAAKAREGGASVSAGLLSTLREALDAVKDVTSIISSFPIGGILGDGGGDLRLSSAVADCLDLLDLSSDEMSWSMSMSTDSSGAGGGRLGTGDARSDLQSWLSGALGNQDTCKEGLDATGSVLGSLVAAGLDAVTSLLADGLGQVAGGDDATAPASSLPPSSSRRGAAPPRWLRARERRLLQMPVGPGGLAVDAVVAQDGSGNFTTVGAAVEAAPAQSAARYVVYVRKGVYRETVEVKKKKWNLMLVGDGMGATVISGRRSYGDGYTTYRSATVGPT

SEQ ID NO: 11650 - protein, 283 aa, Zea mays
  VARIANT 15: note = Ancestral polymorphism is L, Derived polymorphism is Q
  VARIANT 45: note = Ancestral polymorphism is P, Derived polymorphism is T
  VARIANT 74: note = Ancestral polymorphism is P, Derived polymorphism is L
  VARIANT 98: note = Ancestral polymorphism is L, Derived polymorphism is P
  VARIANT 151..283: note = Derived polymorphism lacks residues 151 to 283
MGDFVGHVLPGTLLLAVGLWRVWASVARFAADPAAFRVRAWNPVPAAGPRLLELHVVAGGAFLDMCVELYYANPLRVLTGGGVDPGHLGGLEHASMLLMFFLFGALALVSEKTRYLPLSDGALSLVFASAFTAEFLLFYFHSTTHAGLEGYYHRLLLAVLALCIAALVAGALLPASFPADLGAGVLIAVQGLWFYQAALALYGPMLPAGCVRHFDSPHSDARIECHGGTAQERAEQLANFQLFGLVFLAFVYALGCYAVAAARYGNNLELTTVHHTHVAATAM

SEQ ID NO: 11651 - protein, 242 aa, Zea mays
  VARIANT 176: note = Ancestral polymorphism is T, Derived polymorphism is I
  VARIANT 166: note = Ancestral polymorphism is G, Derived polymorphism is R
  VARIANT 155: note = Ancestral polymorphism is A, Derived polymorphism is V
  VARIANT 132: note = Ancestral polymorphism is F, Derived polymorphism is L
  VARIANT 90: note = Ancestral polymorphism is P, Derived polymorphism is L
  VARIANT 77: note = Ancestral polymorphism is D, Derived polymorphism is Y
MLASEFPLLLNNRSSLPRLVTLCDQTPSTPFDVVRNVVEKQLGKNFDDMFEFFDVEPVGSASIAQVHRAKLKLSKTYVAVKAVPELQGEPEYISKEKARIAASQVNGHVLVEDTCLCFNALKGLPGPYIKWFLEKIGHEGLNNLLNSYEDKSVFAMCIFSLALGHGEEPITFVGKTAGKIVPARGPNDFGWDPVFQPDGFEQTYAEMPKSVKNQISHRGKALALVKEHFASASYTVQSDDSA

SEQ ID NO: 11652 - protein, 343 aa, Zea mays
  VARIANT 28..343: note = Derived polymorphism lacks residues 28 to 343
MAASMTSPDFLAVGAVLGKPTMLVGSGREDLPSPSRSLASPPSASRSTTFSLARASSALAPVTITDISLAADDKTDELFAKISLRLGPPYCLLQFPSLLVSTILPSSVSFTLGVLDSRLGGTHCDRFDPSSSAAVHSLHGSIARLERETLVPVFLFIPHFSEFSSPSPSIESKEAEPAEKGRFDFPVGCLGSRRDAAKFVSVLLPKSTIKFERYLMDEILSIDADVSEVEFGKKTCFVPRQRLPKFDLHLQVAATKKGGRYGDDAGAQPPGMYGIDLGTIVGLELDVDIVATNATTKKEDSPDLFTNEEKIDEVESMDIGLLLTRLLSMVKLTYHISNELSGQ

SEQ ID NO: 11653 - protein, 802 aa, Zea mays
  VARIANT 156: note = Ancestral polymorphism is D, Derived polymorphism is H
  VARIANT 230: note = Ancestral polymorphism is G, Derived polymorphism is R
  VARIANT 528..802: note = Derived polymorphism lacks residues 528 to 802
  VARIANT 556..802: note = Derived polymorphism lacks residues 556 to 802
MPLQLMPPHYYPVLLPLLVLAAVAGVSAGGGGDGDVVERTYIVRVDADAKPSVYPTHAHWYEAAVLAAAGDGSEWPEGGPLIHTYSAAFQGFSARMSPAAAEALASAPGVAAVVPERVRQLATTRSPRFLGLLSSPPSALLAESDFGADLVIAIVDTGISPAHRSFHDRGLGPVPGRWRGLCASGPGFPPSSCNRKLVGARFFSKGYEATSGRMNETAEVRSALDTDGHGTHTASIAAGRYVFPASTLGYARGVAAGMAPKARLAAYKVCWVGGCFDSDILAAFDAAVADGVDVVSLSVGGVVVPYYLDAIAIGAFGATEAGIVVSASAGNGGPGGLTVTNVAPWMATVGAGSMDRAFPANVRLGDGQVLDGVSVYGGPALESGKLYELVYAGASGGGASSASDGYSASMCLDGSLDPAAVRGKIVVCDRGVNSRAAKGDVVRRAGGVGMVLANGAFDGEGLVADCHVLPATAVGAAAGDRLRKYIASATKQRPATGTILFEGTHLGVHPAPVVAAFSARGPNPQSPEILKPDLIAPGLNILAAWPSGVGPAGIPSDGRSTEFNILSGTSMACPHVSGLAALLKAAHPSWSPAAIKSALMTTAYVRDNSNGTVADESTGAAAGAFDLGAGHVDPMRAMDPGLVYDIGPSDYVSFLCNLNYTERNIRAVTRRPADCRGARRAGHAGNLNYPSLSATFVAAGAAAAAAASRTHFIRTVTNVGGGSAVYRASVTAPEGCNVTVQPRRLAFRRDGQRLSFAVRVEAALGGRMEPGSSLVRSGALTWSDGRHVVRSPIVVTVQAPLQ

SEQ ID NO: 11654 - protein, 135 aa, Zea mays
  VARIANT 24: note = Ancestral polymorphism is V, Derived polymorphism is L
  VARIANT 59: note = Ancestral polymorphism is L, Derived polymorphism is M
MAKGGLSKLRCMVKRRWHSSSRIVSRAPSPPAHADAVAATSGNARGASFHGADEAPKGLHAVYVGRSRRRYLVAQELVGHPLFQTLVHRAGGAGGPAGTVIVGCEVVLFEHLLWMLEHADPQPESLDELVDYYAC

SEQ ID NO: 11655 - protein, 626 aa, Zea mays
  VARIANT 18..626: note = Derived polymorphism lacks residues 18 to 626
  VARIANT 148..626: note = Derived polymorphism lacks residues 148 to 626
  VARIANT 186..626: note = Derived polymorphism lacks residues 186 to 626
  VARIANT 189: note = Ancestral polymorphism is A, Derived polymorphism is V
  VARIANT 315: note = Ancestral polymorphism is S, Derived polymorphism is F
  VARIANT 455: note = Ancestral polymorphism is S, Derived polymorphism is L
  VARIANT 503: note = Ancestral polymorphism is S, Derived polymorphism is L
MDGSAAELEAAERVVMRWDSSLACGGTDEPMLFDGGGNRAEADRFLRAVDDLRRLAPPSPAVVGSPRRLSSSSAARSGAVLVAMTRLEDEFRHVLSSRALDHEIEALADLSSLSINGDRSNSASSADLSAADEDDSVSSSIGRRSTAYRSLRSIREIDLLPDDAVADLRAIASRMAAAEHGRECAQVYASVRKPSVDASLRRLGVERLSIGDVQRLEWDALEAKIRRWIRAARAAVRGVFASERRLCFHIFHDLPISAASAPATHDTPFAEAVKGAALQLFGFAEAISIDRRSPEKLFKIIDLHDALSDLLPDVSDIFAASKVAESIYVQAVEIRSRLADAVRGIFSEFENAVLHDPPKTAVPGGTVHPLTRYVMNYSSLICDYKATLSELIVSRPSASARLAAEGNELVPSLADLELPELENQLPLASHIVWIIVILEHNLEGKATLYKDPALSHLFMMNNVHYIVHKVKDSPDLWGMIADDYLKRLTGKFTMAATNYQQASWLKILNCLRDEGLHVSGGFSSGISKSALRERFKSFNAAFEDAHRVQSGWCVPDNQLREELRISIAEKLLPAYQSFLGRFRHHIENGKHPELYIKYSVEDLEIAVGDFFEGVPPSPHHRRRSHG

SEQ ID NO: 11656 - protein, 236 aa, Zea mays
  VARIANT 3: note = Ancestral polymorphism is G, Derived polymorphism is C
  VARIANT 20: note = Ancestral polymorphism is G, Derived polymorphism is V
  VARIANT 28: note = Ancestral polymorphism is A, Derived polymorphism is D
  VARIANT 43..236: note = Derived polymorphism lacks residues 43 to 236
MEGGLGSTPSRLLGMCPCAGARPSTATASPSGYAVGRHPPLLRFSIINGRNQGVHAFVAQIMDEDGTVLPNIHIADCGHKIGLNGVDNGRIWWVILAQTRLVMVVSVLSSVTQTRLATSIIRGNLQYAYLSALRRLSLDPGNQTFLQRDVQGLRNLRYSAWLLCFYDLDKYSYFFLEIFSAMICPVCRGIYNCSICRTKKGWFPTGSACRKAVGLGYKSVAHFLIAKHNNKQVPLI

SEQ ID NO: 11657 - protein, 140 aa, Zea mays
  VARIANT 106..140: note = Derived polymorphism lacks residues 106 to 140
MVDRDPNDTSPSSSSRKRPIGRDVAKAAKKKASSVSLSHEYASKMHDLYVQKIELFKETEDERKVRLDEIVSLEKVKVEEAREHRKTMIELERERLALDKQRLNMEAEKKRRKRRSAFWPSTLINANPFNTCTIKLCRRI

SEQ ID NO: 11658 - protein, 150 aa, Zea mays
  VARIANT 122: note = Ancestral polymorphism is T, Derived polymorphism is S
  VARIANT 121: note = Ancestral polymorphism is Q, Derived polymorphism is L
  VARIANT 113: note = Ancestral polymorphism is P, Derived polymorphism is L
  VARIANT 108: note = Ancestral polymorphism is R, Derived polymorphism is W
  VARIANT 103: note = Ancestral polymorphism is A, Derived polymorphism is P
  VARIANT 72: note = Ancestral polymorphism is K, Derived polymorphism is E
  VARIANT 68: note = Ancestral polymorphism is F, Derived polymorphism is Y
  VARIANT 19: note = Ancestral polymorphism is P, Derived polymorphism is L
MAPKAEKKPAAKKPAEEEPAAEKAPAGKKPKAEKRVPAGKSAGKEGGEGKRGRKKGKKSVETYKIYIFKVLKQVHPDIGISSKAMSIMNSFINDIFEKLAAEAAKLARYNKKPTITSREIQTSVRLVLPGELAKHAVSEGTKAVTKFTSS

SEQ ID NO: 11659 - protein, 281 aa, Zea mays
  VARIANT 36: note = Ancestral polymorphism is R, Derived polymorphism is W
MATTVTDEPEFSRGSHHHQAVSLPLMFGPFPYQGPRPQVLKQAMFVPLPRYSGTESIGGATVAADAREYGNAAGSLLQPLNLGTGPHGHDELAAMTAYTESNDPPVAEAATNPTIEEVLNNGDSFSTYSTSLMAPNQVLDDMASDVNELAMAGGAIFSNDDASFTAPQDLAAALDGGQLAPGALDAISASLMETDGNPGLELEAMFSPDQYENTLFPLEALLGLDDAPVYEDGQDYRQGGGSADDEAAGTSLIGGADDSLDVLDDYLFMDSAGDFNDDERD

SEQ ID NO: 11660 - protein, 1446 aa, Zea mays
  VARIANT 409..1446: note = Derived polymorphism lacks residues 409 to 1446
  VARIANT 413..1446: note = Derived polymorphism lacks residues 413 to 1446
  VARIANT 451..1446: note = Derived polymorphism lacks residues 451 to 1446
  VARIANT 502..1446: note = Derived polymorphism lacks residues 502 to 1446
MEDDSRRVDTMQMGSNLDGSLLRRSSSWWASRGNNAFWWPAREDDDEEALRWAAIEKLPTYDRMRKGILTAVGDGIQEVDIQGLNMQERKCLIQRLIRIPEEDNERFLLKLCERMERVGIQNPTIEVRFEHLTIDTEIYVGKQGVPTFTNFFSNKVRDALIALHIISSGKRPICILHGISGIVRPNRMSLLLGAPGSGKTSLLLALAGKLDSTLKMSGRVTYNGHAMDEFVPQSTSAYIGQHDVHIGEMTVRETLAFAARCQGVGTRYDMLTELSRREKHAKIKPDPDIDVYMKAISQEGQENFITDYVLKILGLDICADIMVGDSMIRGISGGQKKRVTIGEMLVGPANTLFMDEISNGLDSATAYQIVNSLRQSVHILGATALISLLQPAPEIYELFDDIVLLAEGQIVYQGPRENVLEFFEAMGFRCPDRKGVADFLQEVTSRKDQYQYWCTRDEPYRYISVNDFVDSFKAFHVGHALQSELELPFDRTKNHPAALTTSKFGISKMELLKACFCREWLMMKRNSFVYIIKIVQLIILGTITMTVFLHTKMHRHSVEDGVIFLGAMFLGLVTHLFNGFAEVAMSIAKLPIFYKQRDNLFYPSWAYALPTWLIKIPISFLECAVWTGMTYYVIGFDPSIERFFRHYLLLVLISQMASGLFRLLAAVGREMVVADTFGSFAQIVLLILGGFLIARNNIKKSWIWGYWSSPLMYAQNAIAVNEFLGNSWQVDRAENNDTLGVQILKARGIFVGPKWYWIGVGALLGYIMIFNLLFVLFLDWLGPLRKGQTVVSEEELREKHVNRTGENVELALLGTDCQNSPSDGSGEISRADTKNKKGMVLPFTPLSITFNNIKYSVDMPQEMKDKDITEDRLLLLKGVSGAFRPGTLTALMGVSGAGKTTLLDVLAGRKTSGYIEGDIYISGYPKKQETFARIAGYCEQSDIHSPHVTVYESLLFSAWLRLPPEVDLEARKMHVEDVAELVELIPLRGALVGLPGVNGLSTEQRKRLTIAVELVANPSIIFMDEPTSGLDATAAAIVMRTVRNTVDTGRTVVCTIHQPSIDIFEAFDELFLLKWGGEEIYVGPLGHKSCHLIKYFEGLQGVKKIKDGCNPATWMLEVTTVAQEAILGCNFAEVYRNSYLYRKNKILVSELSTPPPGSKDLYFPTQYSQSFITQCMACLWKQHKSYWRNPSYTANRIFFTALIAFVFGTIFLSLGKKVGKRQDLFDALGSMYAAVLLIGVQNGLTVQPIVDVERTVFYREKAAGMYSALPYAFAQVVIEIPHIFLQTVVYGLIIYTLIGFDWTVQKFFWYMFFMYFTFMYFTFYGMMAVAMTPNSDIAALASTAFYAIWNIFAGFIIPRPRIPIWWRWYSWACPVAWTLYGLVASQFGDITDVKLEDGEIVKDFIDRFFGFTHDHLGYAATAVVGFTVLFSFMFAFSIKVFNFQIR

SEQ ID NO: 11661 - protein, 481 aa, Zea mays
  VARIANT 392..481: note = Derived polymorphism lacks residues 392 to 481
  VARIANT 381: note = Ancestral polymorphism is S, Derived polymorphism is L
  VARIANT 288..481: note = Derived polymorphism lacks residues 288 to 481
  VARIANT 280: note = Ancestral polymorphism is C, Derived polymorphism is Y
  VARIANT 278: note = Ancestral polymorphism is T, Derived polymorphism is M
  VARIANT 265: note = Ancestral polymorphism is P, Derived polymorphism is S
  VARIANT 259: note = Ancestral polymorphism is G, Derived polymorphism is D
  VARIANT 257: note = Ancestral polymorphism is P, Derived polymorphism is L
  VARIANT 245..481: note = Derived polymorphism lacks residues 245 to 481
  VARIANT 233..481: note = Derived polymorphism lacks residues 233 to 481
  VARIANT 221..481: note = Derived polymorphism lacks residues 221 to 481
  VARIANT 220: note = Ancestral polymorphism is R, Derived polymorphism is K
  VARIANT 204: note = Ancestral polymorphism is R, Derived polymorphism is T
  VARIANT 201..481: note = Derived polymorphism lacks residues 201 to 481
  VARIANT 187..481: note = Derived polymorphism lacks residues 187 to 481
  VARIANT 165..481: note = Derived polymorphism lacks residues 165 to 481
  VARIANT 164..481: note = Derived polymorphism lacks residues 164 to 481
  VARIANT 148..481: note = Derived polymorphism lacks residues 148 to 481
  VARIANT 54..481: note = Derived polymorphism lacks residues 54 to 481
  VARIANT 39..481: note = Derived polymorphism lacks residues 39 to 481
  VARIANT 19..481: note = Derived polymorphism lacks residues 19 to 481
MDGFQALVDSNAKDTSMSQSTGKKKRMRLGSINGLRFTQLKLVILAFFMLFVLWKWEKGSSYYDSEILQPDPLVLTHPANLKFVDQHTSPEEDFSSADRSHRSVGKVEKPVTSALPPLSTIGYSVDVADGNEVPPPEKKECEYRNGKWVSDNRRPLYSGFGCKQWLSESWSCRLTQRKDFAYEKFRWQPEACEMPEFEASQFLRRMQDKTIAYVGDSLGRQMFQSMMCMVTGGKERLDVEDVGAEYGFVLAPGAKRPDGWAYRFPSTNTTILYHWSSTLCDLEPLNPSDRATSYAMHLDRPPAFLKSNLHRLHVLVLNTGHHWNRGKLRANRWEMYLGGAPNSDRNTAVIWKAKNFTVHSVVRWVDTQLPRHPKLKAFYRSISPRHFFNGDWDTGGSCDNTSPLAKGGSGVHLDRSEDADAEGAVRGTGVRLLDVTALSRLRDEGHISRYSIKATSGVQDCLHWCLPGVPDTWNEILAAQL

SEQ ID NO: 11662 - protein, 903 aa, Zea mays
  VARIANT 212..903: note = Derived polymorphism lacks residues 212 to 903
MPRPSSRAKAASPPEAVAGASQRTPAPSPSTSLRLGIGPVASDDNRGAGSLDLKQPAAGPRRHSLRLMGAALGLGLGPVSHHDDCGAGCPNLSPPAAVPPRRSLRLAGPALGTPNTLSARDGSSSGFGSGGSEKRSGRARARVPASSLATSISPRTGNSNSDGGGSGADRVSASGDSSGGSDPFTTLRSGFRIAKRRMEAGGEAETGSSRRGQVHNEMLHQHVDTPTKRCKTILVGGVETEHVSDTKGDSDEDCMMLGPSGTELNYVATKTEKGDVDDPANASNGESLQTHNLLPAANGGVVEQLVYASGSPASFEAQVSADMCLKEGSSQCSSRKEGKVKEKLVLGNNKSCAYANVGSAVDTCSHKFNPDSKGKEKMVAEDSLSSLTSSEDEPDFDPVDSKETQLNSGSVSASMESYRRQTVKERAIKLAPKFAFFKADKDEHSEDDDEELEPGPDTEDWPGPFATAARIYEEREAKLRARELNSLKLDESANRVIRWSPSKDRKNLVQAQVAPSLTSVCLNTLAEHSEWIQSLEGVPEELKHKLLKILCDSRKMNTHLLNKLLCDSPTELHLSECSWLSEDDFEKTFGKCSTESLQDLQLDISGRCIPDYILPTTLAKVPNCMPLLRKISLKGNYRLSDNGLVTIISAAPSLCSLNLCECSLLTSSGIDILANKLCSVLRELYIDDCTNVDAMTILPSLQKIKHLEVLSMSRIQSVCDKFVKGLIPVHGLNLKELAFAGCLKLTSSSIKTIGEYCQKITSLDLCNLNRLRDSAMMHLRGCRLIRKLKLQRNAFSDEAVSQYLEASGGCLTELMLNNVEVGDLTALAISRKCYVSLEALDLSFCRELTDEALGLIVDSCPSLRILKLFGCTQVTDLFLKGHSNTSVKIVGIGGSILVQMDSR

SEQ ID NO: 11663 - protein, 223 aa, Zea mays
  VARIANT 167: note = Ancestral polymorphism is K, Derived polymorphism is R
MAMFARPLLATLLLLPAFLLSAASAADSKSNPADELVALINSNRTAGKASSVSDNQGLGCIALQYIKAYEGHCDQVDDKKPMESSFTDTFAPTCGVQATTLSKITGRLVACQSQYLAPAEAFGVLLVNDAKGLQILRSKNHTEVGAAVSGTDGGGPYFWCVLFSDGKPTTSFKVDGEVPKAAIHPGCFSGNNDDCSGPTNGAVLTSAGALRLVTAILFAVAAL

SEQ ID NO: 11664 - protein, 534 aa, Zea mays
  VARIANT 46: note = Ancestral polymorphism is R, Derived polymorphism is P
  VARIANT 124..534: note = Derived polymorphism lacks residues 124 to 534
MDAAKKRVAIVGAGPSGLAACKHALAKGFRPVVLEAGGAAGGVWTRTLACTRLQTPWTMYRFSDFPWPAEAAVEEFPRHDRVLAYLTAYARRFGVLDCIRFGSKVLGAEYAGAPEREVAAWERWSGSGEAFGDGTGEWHLTVHHTESGTTETHKFDFLILCVGRFGVAKIPAFPHKKGGPELFRGHVVHSADYSRMAHEDAAELIRGKRVVVVGAGKSGLDIAAQCAQANGSKHPCTLVYRSAHWLVDLRFPWCAKLGNLMTSRMAEAMVHKPGEGFARSLVATLLNPLVWLTGKLAEKLYKAYIPTPEHGVVPDFSLTQSMRAWRLAVLPEGFNGAVEQGSVVLKKHGSFSFSDDGLGLVLDGTGVGERVDADVVIFATGFDGDRLLKDVFVSSWFRQIVAGPSNSNTAMLPLYRHCVHPRIPQMAVVGYLDSASSIYPCEMMAKWVAHLLAGAFRLPSVAAMEASVGEWERWAQRNNRRNGGLCLKSCFASVTTWYNDQLCRDMGYATKRKQGGVLAEWLQPYGPADYAGIQ

SEQ ID NO: 11665 - protein, 357 aa, Zea mays
  VARIANT 30: note = Ancestral polymorphism is S, Derived polymorphism is R
  VARIANT 41: note = Ancestral polymorphism is R, Derived polymorphism is G
  VARIANT 275: note = Ancestral polymorphism is N, Derived polymorphism is D
  VARIANT 278: note = Ancestral polymorphism is A, Derived polymorphism is P
MTYDPTNMALSPYGERWRQLRKICVLELLSAARVQSFRRIRQEEVARLVATVAAAAAVRSSVDMSARVKTFVYDTIMRECVGSRSRHQDGYLDAFHMAMLATGPRKGVACRDRMQRVLEQILSEKKESMGTERGGGDETAQETFVGVLLRLQKEGRAPIEITDGTIGSLMFRRKRHLGERTDLVHECMTELIRSPTAMARVQAEVREAFKSKSTITEEDISRADADADADVYLKLVIKETLRMHTQLPLLIPRRCRRTCRIMGYDIPEGTTVMVDVWAICRDPVHWDDPEQFMPERFENRSLDLDYKGTNKLRVPPVRLRPSYVPRRKPWAGKYQPRAGQPSVPLRLEAVRWRWTGA

SEQ ID NO: 11666 - protein, 392 aa, Zea mays
  VARIANT 92..392: note = Derived polymorphism lacks residues 92 to 392
  VARIANT 49: note = Ancestral polymorphism is S, Derived polymorphism is I
  VARIANT 37: note = Ancestral polymorphism is P, Derived polymorphism is R
MMLLPRYSTMSTSSNAGPARLRSGQAEYLMELAIGTPPVPFVALADTGSDLTWTQCKPCKLCFPQDTPIYDTAASASFSPVPCASATCLPIWRSSRNCTATTTSPCRYRYAYDDGAYSAGVLGTETLTFAGSSPGAPGPGVSVGGVAFGCGVDNGGLSYNSTGTVGLGRGSLSLVAQLGVGKFSYCLTDFFNTSLGSPVLFGSLAELAAPSTIGGAAVQSTPLVQGPYNPSRYYVSLEGISLGDARLPIPNGTFDLRDDGSGGMIVDSGTIFTVLVESAFRVVVNHVAGVLNQPVVNASSLDSPCFPATAGEQQLPDMPDMLLHFAGGADMRLHRDNYMSFNQESSSFCLNIAGAPSAYGSILGNFQQQNIQMLFDITVDNRRRKNISYEQK

SEQ ID NO: 11667 - protein, 516 aa, Zea mays
  VARIANT 346: note = Ancestral polymorphism is A, Derived polymorphism is P
  VARIANT 340..516: note = Derived polymorphism lacks residues 340 to 516
  VARIANT 253: note = Ancestral polymorphism is Q, Derived polymorphism is L
  VARIANT 233: note = Ancestral polymorphism is S, Derived polymorphism is F
  VARIANT 150..516: note = Derived polymorphism lacks residues 150 to 516
  VARIANT 118: note = Ancestral polymorphism is D, Derived polymorphism is Y
  VARIANT 87: note = Ancestral polymorphism is S, Derived polymorphism is L
  VARIANT 43: note = Ancestral polymorphism is W, Derived polymorphism is C
MLSATALLFLLLLVSVIVLLVSSYHGNNNTGTKSKKKRPPGPCRLPFIGSIHHLLTSQPQATLRDLAQKHGPVMYLRLGQVDTVVVSSPAVAQVVLRDKDINFASRPYLLATEIIGYDGHDFAFAPYGAYWRALRKLCTLELLSARKVRQLAPIRDSETMSLVTEIRRRSCGARGEPAAVNLGSLLVSCANNITGLATFGDRFSSEHKAKFLSTMAVVLSSGSGFCVSDLFPSMRFLDVATGMRRRLQVAHEQLDQVLDQIIEACEARQNIKNAEAEDDDILSTMLRIKDEEEFDFPFNITHIKAVIIDLFIGGTETTSSVAEWVMSELMRNPEAMAKAQAEVRRALDSKNPGDHESLLGSLSYTGMVIKETMRLHPSLPLLLPRLCREDCDVGGFEVPKGTRVIVNSWAMARSPELWDEAEEFRPERFVASTADYKGTQFEYLPFGSGRRMCPGMGFGLVTLELIVVRLLYYFDWSLPAGIRAEELDMDTTVGATARRTRQLHLVAMPYEQAMEI

SEQ ID NO: 11668 - protein, 420 aa, Zea mays
  VARIANT 25..420: note = Derived polymorphism lacks residues 25 to 420
  VARIANT 140: note = Ancestral polymorphism is G, Derived polymorphism is R
  VARIANT 157..420: note = Derived polymorphism lacks residues 157 to 420
  VARIANT 184..420: note = Derived polymorphism lacks residues 184 to 420
  VARIANT 210..420: note = Derived polymorphism lacks residues 210 to 420
  VARIANT 316..420: note = Derived polymorphism lacks residues 316 to 420
MAASGSRCPRVLVLLQGWVAYIKKQRSCPCVAVNSHSRESIKEIGQAMASSAVSGGFAIVLKVVQARIREIKHGDNNCTGTALLVGIPNVGKSAIVNAMHQIGRIAAAEKGKLKHAIVSSHPGETRDIHGYLFSPGGWSRTPGQLSMADIVKMGRSQGKASSKPMVTAERGYAGQYPSLPSTNQNLKQSGSMVSPAELDKGLQPTDNLVQTLGNSHLELDENNTFALRSTPASERHFEPSDSIPEYNDGILNNSSSYQPHNYSYTEQEVEDSSADVSAAAENFQSLSLHNDDFGSGAFSGLLPQKTTDSNVEFLVREDSATVDPIDARNQDYYESGAVTSPAEENLEAVLGTNMENVDAPSISQANELSQDVLDPSILKYDEPSVSSHAYSNMNTPQPSTIEDPQGNNQAHTLSHLSNMM

SEQ ID NO: 11669 - protein, 353 aa, Zea mays
  VARIANT 57: note = Ancestral polymorphism is T, Derived polymorphism is M
  VARIANT 98..353: note = Derived polymorphism lacks residues 98 to 353
MAKYGEGDKRWIVEERADGTNVHNWHWAERDCIEWSRARLSSLLAGLTVLDGEDGLTLRTVALDNLDGEAYVNIRKGKVIPGYELSLTLSWEAEAASESGAVKVAGTAEVPYLADENADEDPDLHITVRGDETPLALRAKDAFLSRGKPMVLEKIREFVAAMAKGGPAKDELDSKKTPAKVAAAAPGAAPAKKEEVVAPAPAAGKKKAKGKDKEGFKTIKMTETFYCRSKDIYEILMDENRWKGFTQSNAKISREVGGEFSLFDGCITGVNEDLQEGKLIAQKWRFGSWPDGLYSSVRLMLDEPESGVTVIKLKQTGVPEEDKYGNSTVVENTERGWRDLIFQRIRGMFGFGI

SEQ ID NO: 11670 - protein, 180 aa, Zea mays
  VARIANT 32: note = Ancestral polymorphism is S, Derived polymorphism is F
  VARIANT 37: note = Ancestral polymorphism is P, Derived polymorphism is L
  VARIANT 46: note = Ancestral polymorphism is K, Derived polymorphism is T
  VARIANT 55: note = Ancestral polymorphism is G, Derived polymorphism is D
MAAASRMSRRTRASSNHHSTPRTTGTATAVASSVETPHMQKLNTVKATTVVIVTGDGDMVQQKLEEVDQYRREERVSDGLENMSSNDMKKGVDGAVRASKVINWDNMAKHHITKFYALKSQLQGVSLRIQKIMREFEMQNKKMEMVGELMNDAFDDALEGDEEEKMEYNSNFGDRTSVET

SEQ ID NO: 11671 - protein, 332 aa, Zea mays
  VARIANT 60..332: note = Derived polymorphism lacks residues 60 to 332
  VARIANT 33: note = Ancestral polymorphism is S, Derived polymorphism is L
MASAARLLAPISRRGVVSVALAGVERRRPEAASLLGAPVLATVEACASIKVIPLSNQLARYSTTAFQRFGFSTSAPQQDDKETNKHTDDGVNRSVGASTGASSEANNVPGTEKAQEAGSLDSISKSNRKRTAKRTAFSDSDSEDLDLSKEDLVKLLLEKDESLKSKDEEFKDMKDKVLRSYAEMENVLARTKRESENTKKYAIQSFSKSLLDVADNLSRASSVVKASFSKIDSSNDSDEAVTLLKTLLEGVEMTEKQLGEVFKKFGVEKFDPLNEKFDPNRHYAIFQIPDPSKPSGTVAAVVKVGYMLHDRVLRPAEVGVTEGGPTEEEPEE

SEQ ID NO: 11672 - protein, 531 aa, Zea mays
  VARIANT 14: note = Ancestral polymorphism is D, Derived polymorphism is G
  VARIANT 31..531: note = Derived polymorphism lacks residues 31 to 531
  VARIANT 54: note = Ancestral polymorphism is P, Derived polymorphism is H
  VARIANT 61: note = Ancestral polymorphism is D, Derived polymorphism is G
  VARIANT 155: note = Ancestral polymorphism is S, Derived polymorphism is L
  VARIANT 169: note = Ancestral polymorphism is P, Derived polymorphism is T
  VARIANT 345..531: note = Derived polymorphism lacks residues 345 to 531
MIEAIRAALGSTGDGEINISAYDTAWVALVKSLNGDEGPQFPSCIDWIAQNQLPDGSWGDGIFFLVQDRIISTLACIIALKSWKIHDDACKKGVFKRFENGDGQFVCYARQSNQSVSAMYNLYRAADQGSFPGDDPVLQRAKSYSRAFLRERRASDQLNDKWIISEGLPSEVGYGLDFPWEACLPRIETRMYLEQYGGSHDVWIGKVLYRMNMVSNDMYLKAAKADFGNFQRLCRLEWHDLKRWCDKISNIETYGVASRGALLRAYFLAAACIFEPSRAAERLAWARAAVLAEAISCCLLSNVDDACACNKTTAEWLVQEFTNGDDIADSYEYSPARRDDDGPNSPAWGASSLAGVLRELVNLQASGNAAVAGCLRGAWIEWLMAWTGKETEKASRAGDTALLLARTVEICSGRRCGTEKDLDLLLRDYSKLQQLTRCICSRLATEAPALIESNAVNQNGETMDKIDALDRMVGLEMRELAQCVFRSGGSSVDRETRQTFLHVTKSYYYVALCSPETVEHHISKVLFEDVV

SEQ ID NO: 11673 - protein, 429 aa, Zea mays
  VARIANT 377..429: note = Derived polymorphism lacks residues 377 to 429
  VARIANT 367: note = Ancestral polymorphism is A, Derived polymorphism is E
  VARIANT 266: note = Ancestral polymorphism is R, Derived polymorphism is S
  VARIANT 147..429: note = Derived polymorphism lacks residues 147 to 429
MRGEQKGNDRGGGREKISGLEKRVAMVTLKDVTPSRVGQREAPNCQSVTIRATLKNNPGSSSCCSAANQTPRHHLYDGLHRQETEPSGPKSRKGQATSTAQHSTSTPSVLGRRGEGNPGPGRVVGRGSAAEEMEEREKLVCLAKLAEQAERYDGFVNLGLVGQHIDLSTNRNLLPPNNQFSCHLPLSLSNLRTFRNMVEFMKNLARMDVDMSAEERHLFSVGFKNTIGAKRASWRIICSHEQKVAADRQTGVMIDAYKKKVEEELRKVCNEVLSVIAIHCLPLASTGENIVFFYKMKGDYYRYLAEFSTGTEKKAASDQSLMAYQHAMVVASSELSPAHQIRLGLALNLSVFFYEIMNSHERACQVAKQAFDEALTEINSGEGVYKDSTLMMQLLKDNLALWTSELTGGEASKGNGDVDMEVRRPCPMT

SEQ ID NO: 11674 - protein, 455 aa, Zea mays
  VARIANT 51: note = Ancestral polymorphism is F, Derived polymorphism is L
  VARIANT 67: note = Ancestral polymorphism is A, Derived polymorphism is P
  VARIANT 102: note = Ancestral polymorphism is A, Derived polymorphism is P
  VARIANT 197: note = Ancestral polymorphism is S, Derived polymorphism is C
MMKITVESWKVVTPSSSCCSGGRPSPDADGAVPLTAFDKVTYDLYMHGLYLFPPPAPPSSVLVAGLAAALAEYPEWAGRLGVDAHGNRAILLNGKGARFVEATADVPLRSVLPLEPATSETLSLHPAAGAESDDAAVGGEVLLLQVTRFPCGSFVVGTAAQHLVSDGAALRSFLNAWAQASRGAAIDDPVPLHDRVCFFLPRDPLRVEFEHRGAEYKPHPRTEKSRNKVDDRVVIHRVNFSRKFVAELKARASAGAPRPRSTLQCVAAHLWRCVTKARRLGDLRTATELRIAVNGRRRMKNPRVPEEYTGNVVLWARPTTTSAELLRSPLRQVVELVSKAVTAMDDVYFRSFVDFASSGVVEEEGLLPTADPLETVLSPNVEVDSMLGLPFQDFDFGGGPPFFFMPSYSPVEGLICIVSSFSGDGSIDAYVPLFSQAMDVFKNCCRSLAATDARL

SEQ ID NO: 11675 - protein, 464 aa, Zea mays
  VARIANT 189: note = Ancestral polymorphism is S, Derived polymorphism is L
  VARIANT 67: note = Ancestral polymorphism is A, Derived polymorphism is T
  VARIANT 46..464: note = Derived polymorphism lacks residues 46 to 464
MEITVHSSKAVKPEPDYGGHSDGNASVAVVPLSVFDKVNYDEYIFYVYAFHPPAPPNAVLEAALAKALAEYREWAGRLGVEASGNPAIVLNDAGARFVEATADAEFGGSTVALLSTGGKVLSRLYPSCDGVEELLLVQVTRFRCASLVLGFTMHHKVADGPGMWNFMVAWGQATRGVAIDPVPVHDRTSSLFARRRERDSRVKFEHRGAEFKVKPRGEGPPASDGVGAVVRADDEVVVVHRVHFSREWITELKSRASQGAPSRQYTTLQCVAAHLWRCITEARGLHGREATRIRIAVNGRARMVRPPVPEGYTGSVVLWAWPATTVRELLDRPLRYAVELISREVARIDDAYFRSFVDFAGSGAVEKEQLVPTADAAEVPLCTDIDVDCLLAIPFHKLNFGCGPPFYFRPGYGHAPVAGAIYVLRSFQGDGSVDAYVPLFRRTMDAFKKCCHSFPMTTTTGARL

SEQ ID NO: 11676 - protein, 462 aa, Zea mays
  VARIANT 287: note = Ancestral polymorphism is G, Derived polymorphism is E
  VARIANT 219: note = Ancestral polymorphism is D, Derived polymorphism is Y
  VARIANT 83: note = Ancestral polymorphism is G, Derived polymorphism is S
  VARIANT 81: note = Ancestral polymorphism is M, Derived polymorphism is K
MEIIVHSSRSVKPNYGDRSDGGAVAASVEVVHLSVFDKISYDEYITGVCAFHPPAPPNHILEAGLATALAVYREWAGRLGMDGTGNRAIVLNDAGARYVEATADAELSSSVVLELTTGANLLSLYPPSCDGAKELLLAQVTRFRCGSIIVGVSVHHRVADGHAIWAFLFAWGQATRGVRIDDSIPVQQRHDRLSLFAPRDPPQVKFDHRGNEFKPHVGDASGGNGAAHAGDEVVIHRVHFSKEWIMELKSQSQAAASEGAAATARPYTTTLQCVAAHLWRCITAARGLDGNQTTRMRIAVNGRSRMKDPRVPVGYTGNAVLWAWPTTTARELGRQHIRETVELISREVARIDDAYFRSFIDFAGSGAVEKEQLVPTADSLELTLSPNVEVDSLLGIPFYDMDFGGARPFFFVPGYSTVPVDGFIYVLQSFEGDGSVDAYVPLFSTTIEAFKRCCYSLQPTAS

SEQ ID NO: 11677 - protein, 778 aa, Zea mays
  VARIANT 473: note = Ancestral polymorphism is K, Derived polymorphism is I
  VARIANT 361..778: note = Derived polymorphism lacks residues 361 to 778
  VARIANT 343..778: note = Derived polymorphism lacks residues 343 to 778
  VARIANT 330: note = Ancestral polymorphism is R, Derived polymorphism is L
  VARIANT 237: note = Ancestral polymorphism is A, Derived polymorphism is V
  VARIANT 214: note = Ancestral polymorphism is W, Derived polymorphism is R
  VARIANT 118..778: note = Derived polymorphism lacks residues 118 to 778
  VARIANT 91: note = Ancestral polymorphism is G, Derived polymorphism is E
  VARIANT 87..778: note = Derived polymorphism lacks residues 87 to 778
  VARIANT 82..778: note = Derived polymorphism lacks residues 82 to 778
  VARIANT 80: note = Ancestral polymorphism is I, Derived polymorphism is S
  VARIANT 34: note = Ancestral polymorphism is M, Derived polymorphism is K
MGATKGEKLKTLGHDLLVPATPQHKDKQSGMPEMIEAIRVALRSMGDGEISISAYDTAWVALVRSLNNNGDDGPEFPSCIDWIAQNQLPDGSWGHDIFFLAQDRIINTLACVIALKSWKIHDDACTKGLSFITENMWRLTRDDENWALSGFEIIFPMLLEKAKHLGIDIPLDDPMLEAIRAKRELKLNKIPREALHAEPTTFLLSIEGMPGLDWKRLRKLQCPDGSYMSSPAPTAYALMQTGDAKCFEFLDKLIDKFNGGVPFVYPMEMFGRLWAVDRLERLGISGYFKSEIEDYLDYVYRHWSEEGLAYTKGCLVKDIDDTAMGFRLLRLHGYDHVSPCVFKRFENGDGQFVCYARQSSQSVSAMYNLYRAADQASFPGDDDDHVLRRARSYSRAFLRQRRASGQLNDKWIISEGLPDEVGYGLDFPWGASLPRIETRMYLEQYGGSRDVWIGKVLYRMNMVSNDMYLEVAKVDFSNFQRLCRLEWHDLKRWCDKSDLETYGVAPGGALRAYFLAAACIFEPGQAAERLAWARAAVLAKAISCCLLSNNDTCACNKTTAEWLVREFTNGDNVAGYYYDYNPARRDDDEPNSPAWGASSLAGVLRELVHLQASGNAAVAECLRGAWMEWLMAWTEKETEEASHAGDTALLLARTVEICSGRLRGTEQDLELRLPDYSKLQQLTRCICSRLATEAPALIESNVLKQNGETMDKVDALDRMVGLEMRELAQCVFRSGGSSVDRETRQTFLHVTKSYYYVALCSPETLEHHISKVLFEDVV

SEQ ID NO: 11678 - protein, 205 aa, Zea mays
  VARIANT 12: note = Ancestral polymorphism is W, Derived polymorphism is L
  VARIANT 62: note = Ancestral polymorphism is V, Derived polymorphism is A
  VARIANT 166..205: note = Derived polymorphism lacks residues 166 to 205
MDFQKESTFDMLSTVGLSSKGENDSFKVLALIHQNVIPSMSNPSILCDFLTRSYDIGGVISVMALSGLFILMTQHGLEYRKFYEKLYALLTPAVFMAKHRSVFLQDKQLKSHPPKNVESKILCEHIKKEREVAKARKRPYYLKKSELHERKLMNKYNELKFTSPIRRYVDLLAHYQINMLMSEERFYSIQETKYLCIFYFDVLAL

SEQ ID NO: 11679 - protein, 491 aa, Zea mays
  VARIANT 67: note = Ancestral polymorphism is S, Derived polymorphism is F
MAASGEGASLPSPAGGEDAHRRRVSYFYEPSIGDYYYGQGHPMKPHRIRMAHSLVVHYGLHRLLELSRPYPASEADIRRFHSDDYVAFLASATGNPGVLDPRAIKRFNVGEDCPVFDGLFPFCQASAGGSIGAAVKLNRGDADITVNWAGGLHHAKKSEASGFCYVNDIVLAILELLKFHRGGYFDHFKCEIDAPLILVFAFKLQTVCCSDSYIVHLFQRVLYVDIDVHHGDGVEEAFFTTNRVMTVSFHKYGDFFPGTGHITDVGAAEGKHYALNVPLSDGIDDTTFRGLFQCIIKKVMEVYQPDVVVLQCGADSLAGDRLGCFNLSVKGHADCLRFLRSYNVPMMVLGGGGYTIRNVARCWCYETAVAVGVEPDNKLPYNDYYEYFGPDYTLHIQPKSVENLNTTKDLENIKNMILENLSKIEHVPSTQFHDRPSDPEAPEEKEEDMDKRPPQRSRLWSGGAYDSDTEDPDSLKSEGKDVTANFQMKAG

SEQ ID NO: 11680 - protein, 502 aa, Zea mays
  VARIANT 177: note = Ancestral polymorphism is Y, Derived polymorphism is N
  VARIANT 230: note = Ancestral polymorphism is R, Derived polymorphism is C
MLSATALLLFLLLLVSVIALLVSSNHGNHNTGTKSKKKRPPGPWRLPFIGSIHHLLTSQPQATLRDLAQKHGPVMYLRLGQVDTVVVSSPAVAQVVLRDKDINFASRPYPYLLATEIIGYGGHGFALAPYGAYWRALRKLCMLELLSARKVRQLAPIRDNETMSLVREIRHRSCANYITGLATFGDRFSSEHKAKFLSVMAVVLSSGSGFCVSDLFPSMRFLDVATGMRRRLQVAHEQLDQVLDQIIEACEARQKVKNAEAAEDDDIVSTMLRIKDEEEFDFPFNITHIKAVIIDLFIGGTETTSSMAEWVMSELMRNPEAMDKAQAEVRRALDSKNPGDHESLLGCLSYTGMVIKETMRLHPSLPLLLPRLCREDCDVGGFEVPKGTRVIVNSWAMARSPELWDEAEEFRPDRFVASTTDYKGTQFEYLPFGSGRRMCPGMGFGLVTLELIVVRLLYYFDWSLPAGIRAEELDMDTTVGATARRTRQLHLVAMPNEEAMEI

SEQ ID NO: 11681 - protein, 404 aa, Zea mays
  VARIANT 121: note = Ancestral polymorphism is H, Derived polymorphism is Q
MRSNPILMVLSAAAIGLLVGVSSPIRIAPTVLPLFSSLGGGGGGGGDDANCTSAGAGGRNMAARLSAALPFFGNSTTSTATPMKVSPPAKSEEAKKGAERLLPPDIVVRESDLHLRRLWGQPREDTPVRKYLVALTVGYSERANVNATVHKFSDNFDVMLFHYDGRTTEWDAEFEWSRQAIHVSARKQAKWWYAKRFMHPSVVAPYEYVFLWDQDLGAETFDAEEYIRVARKHGLEISQPGLDIVRGVKNYDVNVRRNDTEVHTSTSAGRCSAQDAARRPPCSAFVEVMAPVFTRRAWACVWHMIQNDLVHGWGLDWNFWRCVDEPGRQMGVVDAQYVAHHHGFTLGDKGNDTVDGSRRKVRLRASAEFGEFKARLYNADRAQQAAAALLAQSKAAAAAAPPPS

SEQ ID NO: 11682 - protein, 384 aa, Zea mays
  VARIANT 352: note = Ancestral polymorphism is S, Derived polymorphism is W
  VARIANT 135: note = Ancestral polymorphism is K, Derived polymorphism is M
MRYPVVLTAAFSAAAIGFLIGISFPVQITPKVYPSSFVADDADSSTLGLGDSNVLGRFSTARNSCSRATSTVGASPPPSPILQQPNATAAEKVVVVGPGKPKGAARLPPGIVVEDSDLHLRRLWGNPHEDTPPRKYLLVLTVGYSEKDSVNAIVQKFSENFDIMLFHYDGQTTEWDAEFEWSRQAVHVSARKQAKWWYAKRFMHPSVLAPYEYVFLWDQDLGVEAFEAEAYLRIVRRHALEISQPGLDIVRGVKTYDVNVRREEGGEIHTSDGFVEVMAPVFTREAWTCVWHMIQNDLVHGWGLDWNFWRCVNEPKKHIGVVDAQYIAHHFGFTLGDQGTEGNRGQVRDRASVEFGIFKSRVDNAEKAWTATTLPVPSDPNSKS

SEQ ID NO: 11683 - protein, 98 aa, Zea mays
  VARIANT 58..98: note = Ancestral polymorphism lacks residues 58 to 98
  VARIANT 57: note = Ancestral polymorphism is A, Derived polymorphism is G
  VARIANT 16: note = Ancestral polymorphism is V, Derived polymorphism is E
MTKASPPFFYYLVITEVEMCSEVESLPVVPESIKVHYASIGFATKGKQARSTGGNKARSTGVGGTALMASKQSRVKQTDTGKTKTTVTRRSQRGNNCT

SEQ ID NO: 11684 - protein, 491 aa, Zea mays
  VARIANT 107..491: note = Derived polymorphism lacks residues 107 to 491
  VARIANT 373: note = Ancestral polymorphism is D, Derived polymorphism is Y
MINNISISNMEAKAKEFNEVIQEQYYPWFAQYMVMKRASIEPNFHDLYMNFFDKVNSKSLNKEILKATYENCKVLLRSDLIKSSSEERSLLKNLGSWLGKFTIGRNQALRAKKIDPKSLIVEVLLLCIKLIGVQFTSIDSICLLIIFGEFFLQACEKGLMIAVIPFTSKILEPCQSSIANRPPNPWTMGILSLLAEIYNLPNLKMNLKFDIEVLFKNLTVDIKDVKPTSLLKDHLREVEGNLDFSNKDVTASQTPVVAEVPSGTIPSLTHMEQQPEINITSRAMILPNILNQYAAPVRLPTNSTVEDDKVALMMPEQVPSLTQVSPAQTQSTSPSPFSVNQLMVAIPREEIRFKINPKLGSLGPQLQYSKIMDLALDKANREIILPVIQRSVTIASRTTKELILKDYALESDNNTITRSAHLMVGTLAGSLAHVTCKEPLRVALYSNLRNLIQNLMSGSETIEQLIHTLINDNLDLGCAIIEAVATRQVAS

SEQ ID NO: 11685 - protein, 210 aa, Zea mays
  VARIANT 2: note = Ancestral polymorphism is S, Derived polymorphism is L
  VARIANT 19: note = Ancestral polymorphism is V, Derived polymorphism is M
  VARIANT 31: note = Ancestral polymorphism is E, Derived polymorphism is G
  VARIANT 41: note = Ancestral polymorphism is V, Derived polymorphism is L
  VARIANT 43: note = Ancestral polymorphism is H, Derived polymorphism is Q
  VARIANT 67: note = Ancestral polymorphism is R, Derived polymorphism is W
  VARIANT 80: note = Ancestral polymorphism is A, Derived polymorphism is V
  VARIANT 110: note = Ancestral polymorphism is Y, Derived polymorphism is D
  VARIANT 111: note = Ancestral polymorphism is S, Derived polymorphism is N
  VARIANT 125: note = Ancestral polymorphism is E, Derived polymorphism is K
  VARIANT 128: note = Ancestral polymorphism is G, Derived polymorphism is C
  VARIANT 129: note = Ancestral polymorphism is G, Derived polymorphism is D
  VARIANT 142..210: note = Derived polymorphism lacks residues 142 to 210
  VARIANT 155: note = Ancestral polymorphism is A, Derived polymorphism is V
  VARIANT 161..210: note = Derived polymorphism lacks residues 161 to 210
  VARIANT 173..210: note = Derived polymorphism lacks residues 173 to 210
MSGAACSPAMVDEEELTVVEVTVVVEYESMESRASTLWQALFHWAMWRALLGHGKQPSRIFLLPRGRRLLLRRLLVLLGVDCAEILSWSAASTAESCCIAGILYLLMEDYSIQIYNLFDDAEISEKFGGRWICLRIKSHTSWTPPSNPRMRRLRAELLNLQTELERKRAKALEEYNQDMTRINKIARGARSMAEVIQVMSLKVLKGKPIQ

SEQ ID NO: 11686 - protein, 377 aa, Zea mays
  VARIANT 35: note = Ancestral polymorphism is G, Derived polymorphism is R
  VARIANT 70: note = Ancestral polymorphism is T, Derived polymorphism is M
MEARPRLLLVAAVAVFVSVSAAAGAAVVINVKNYGAHGNGVNDDTKPLMAAWKAACGSAGAVTMVVAPGTYYIGPGTLKAATDLKRFGNDWIEFGWVNGLTVAGGVIDGQGAASWPFNKCPIRKDCKVLPTSVLFVNSQNTVVRDVTSVNPKFFHMALLSVKNVRMSGLRIRAPPNSPNTDGIHIERSSGVSIVDTHIGTGDDCISVGQGNDNVEVSRVQCGPGHGMSVGSLGRYSGEGDVTRVHVRDMTFTGTTNGVRIKTWENSPSRSNAAHMVFENMVMKDVQNPIIIDQKYCPYYNCEHKYVSGVTLKDIHFRNIKGTATTPVAVLLRCGVPCQGLVLQDVDLRYKGQGATSAKCENAKAKYVGYQFPKPCSP

SEQ ID NO: 11687 - protein, 569 aa, Zea mays
  VARIANT 118..569: note = Derived polymorphism lacks residues 118 to 569
MSVSSPAMASPPLAAPGTHRGPCFSTLCRLPSPSCYPPLSASSSPAISTVSAFAVLKHKPRGLGLRCQAAEEAPPPARGKTSLKVMISGAPASGKGTQCRMIVEKYGLVHISTGDLLRAEVSSGTEIGKKAKEYMDNGKLVPDQVVTDMVVSRLSQPDIQERGWLLDGYPRSFSQAQHLENLKIRPNIFIVLEVPDDVLIDRCVGRRLDPVTGKIYHLKNYPPENEEISARLITRSDDTFEKVKSRLDTYKQNSEAILPTYSDLLNKIDGNCPAEVVFQAIDFLLQKICENTSASKLTKTNGKRPDSADTGSKNEWRGIPTRLNNIPHSREIREYFYNDVLKATKLAIEDKKTRLQIDINIPELNPEMDVYRIGTLMELVRELSLSFADDGKRVKVCVQGSMGQGAFAGIPLQLAGTRKILEFMDWGDYGAKGTFINIGAVAEVGYRASTLFCMDMRAMTDAAGDRPVILVNPRLKDMPASSGVMQTMGRDIRLKYAASFETCYSFRLLYYAGSFYPIMGALRMAYPNKYEIYRRVDTLNGKENYILIAEFTNKPTPDEITSAFKGQKR

SEQ ID NO: 11688 - protein, 137 aa, Zea mays
  VARIANT 117: note = Ancestral polymorphism is E, Derived polymorphism is K
  VARIANT 111: note = Ancestral polymorphism is E, Derived polymorphism is K
  VARIANT 84: note = Ancestral polymorphism is P, Derived polymorphism is S
  VARIANT 78..137: note = Derived polymorphism lacks residues 78 to 137
MASKLSFKRADSIAESMPDALRQSRYQMKKCFHRYVSKGRRLLKNQQLIEELDKSLDDKVEREKLVEGFLGYIICSTQEAVVLSPYVAFAVRMNPGIWEYVKVHSDDLSVEGITPSEYLKFKETLYDENWSAFFTDL

SEQ ID NO: 11689 - protein, 808 aa, Zea mays
  VARIANT 159..808: note = Derived polymorphism lacks residues 159 to 808
  VARIANT 350..808: note = Derived polymorphism lacks residues 350 to 808
  VARIANT 447..808: note = Derived polymorphism lacks residues 447 to 808
MAVAVVDPRGTAAVWCVCRGSDSGGERDDPDPHHRVRGVQRERDGVAVQHGRQGRDEDDTEAGPFAQRRLPPTASVRPARTASPAAGALHRLTPTRERIKSSPAPAGAAVSAPKPSNFQSHAGEYTPERLWELQKKARPLPGSLLRAQPRTPATEPRSQKLSGTPASSTPATTTAAATEMVVVLKGLVKPMSEASIGLRIPKHDKEEDKSEEEGKGDEEDEGRQPRHAAPDYISLDVGGVLSSRNATGESSDEDDNEITDQIAMYTDKPGDGPRSTKGVFSGISNRGPATSLGAFSDGSRKVVDDRDDDDDEEEERKWEEEQFRKGIGRRMDDASTQRSANGVPAAMQVQPQPFRYPVSSHYQPSLSGVVPAASVFASGTAEFLSIAQQADVVNKALQDNIQKLRETHKTIVSALVKTDTHLNEALSEISSLESGLHDAEKRFVYMQELRDYISVMCDFLNDKAFLLELEENIQQLHEKRALAISERRATDLADESGVIEAAVSAAVSILSKGSSSTCLSAASNAAQAAAAAARGSSNLQPELDEFGRDINMQKRMDLKRMEEDRRQRKTQSETKRLASAAKNKDIKKIEGELSTDESDSESTSYVSSRDEFLKAADHVFIDAKEEYSSLRIVKDKFEGWKAQYPSAYRDAHVALSAPSVFSPYVRLELLKWDPLHETTDFFDMDWHKVLFDYGVQDDESPSAETSEKDYRGLHEECKAKMLQACVVPPLVFPVLLFPVFKDAQDLGLSIELLPLSHPDEQFDMSPFYALHPSSLVVRPNRITFLYVVFSVLKRWQAILLDLALSTLE

SEQ ID NO: 11690 - protein, 197 aa, Zea mays
  VARIANT 83: note = Ancestral polymorphism is G, Derived polymorphism is S
MAVSDSLAHPGLAIVVMGVSGCGKSTVAAMLAEALGCSFIEADDYHSEANKAKMSAGVPLSDADRAPWLESVRDAIRGRLDGGEDVAVSCSALRLGYRDVLRAADRAYEPGRYAACRVRFVCLRAPAEVLAERVLRRSVEGEHFMPASLLRSQLDLLRVDPAEGVAEADATARPDDIVRDTVALFRDELAVSSGVPA

SEQ ID NO: 11691 - protein, 527 aa, Zea mays
  VARIANT 144: note = Ancestral polymorphism is F, Derived polymorphism is L
  VARIANT 59: note = Ancestral polymorphism is I, Derived polymorphism is M
MAPYPALHLQQQVHLRHASKPTNPAPVHHHGHGNPKPDAVAASLRRGAPADARGLRALIKALSSSASSTSTAAAVHAHATKIGLDRERTVRNGLIALYLARGERAAAVTLFDAFPGDGPDVVSWTAMVTGHARLGLARDAVALFLAMLELGDGVSVDAVAAAAGFAACAEARDLALAREAHRRVAAAGVALDVVAWNALVDMYAKCGDVAAARRWFRRIPLPRTVVSWNTMLAALARAGEYGEALALFREMQRAGVCPDGGTFVAVLGACAQLGALDTGRWVHAYMRRQLGRDADAGGVVSNALLDMYAKCGAVDQAMIVFDGMAQRDVYTYGSMIAGLATHGRAEEALALFAAMRRTGVRPNGVTLLGVLSACCHAGLVNEGLHHLGAMAEAYGVAPGIEHYGCAIDMLGRAGRLDEAEALAAAMPVPPDALVRGSLLAACRARGNVERAERVMRRVVVAADSGGGEAGDHVLLSNMYASKGRHGRAVRVRKQMRRSKIVKDPGCSSIEIDGVVHEFQAVPANAIA

SEQ ID NO: 11692 - protein, 183 aa, Zea mays
  VARIANT 140: note = Ancestral polymorphism is G, Derived polymorphism is R
  VARIANT 120: note = Ancestral polymorphism is S, Derived polymorphism is F
  VARIANT 82..183: note = Derived polymorphism lacks residues 82 to 183
  VARIANT 4: note = Ancestral polymorphism is C, Derived polymorphism is W
MRRCLMSGNRTSETSTLFDCDITLDDYLLKSYYKTASLIAASTKSAAIFSGVSTTICEKMYAYGRNLGLSFQVVDDMLDFTQSAEQLGKPAASDLAKGNLTAPVIFALQSEPELREIIDSEFSDTDSLAAAIELVHRSGGIRRAHELAREKSDLAIQNLQCLPRSDFRSALEKMVEYNLERIE

SEQ ID NO: 11693 - protein, 226 aa, Zea mays
  VARIANT 26: note = Ancestral polymorphism is K, Derived polymorphism is T
  VARIANT 36: note = Ancestral polymorphism is N, Derived polymorphism is K
  VARIANT 48..226: note = Derived polymorphism lacks residues 48 to 226
  VARIANT 53..226: note = Derived polymorphism lacks residues 53 to 226
  VARIANT 62: note = Ancestral polymorphism is A, Derived polymorphism is T
  VARIANT 80: note = Ancestral polymorphism is V, Derived polymorphism is I
  VARIANT 151: note = Ancestral polymorphism is S, Derived polymorphism is L
  VARIANT 162..226: note = Derived polymorphism lacks residues 162 to 226
  VARIANT 175: note = Ancestral polymorphism is T, Derived polymorphism is I
MHKTKACCAEMLVQMDSAFLTIYLMTLIPKIFTRKNPMGCTTRGSPLRWRLTEKFDWAMSTAKTRAVAVSIKRTISFVTILSSSSPCIFFISSDGQLCLNSTQVLKPATKQKLRFEGDSYKKALAEFLQAMPAFLGGKCSCLRCESPRDDSVIPAGEGSKKQLRLVSVDDGSPVTDLDFDLDEEEIPSPYSCENAIRAAIIGLLMVCIFVAFLAGMIDPASVPASA

SEQ ID NO: 11694 - protein, 138 aa, Zea mays
  VARIANT 89: note = Ancestral polymorphism is E, Derived polymorphism is K
  VARIANT 79: note = Ancestral polymorphism is A, Derived polymorphism is T
  VARIANT 30: note = Ancestral polymorphism is A, Derived polymorphism is V
  VARIANT 12: note = Ancestral polymorphism is T, Derived polymorphism is I
MKKIQGLLELRIVTNEMVRLIETATARVLAVDIAGNINGWNKKAAELTGLPVMEAIGRPLIDLVVADSVEVVKQILDSALQGIEEQNLKIKLKTFHEQECCGPVILMINSNALSFNRTNGLAISHLLVLWYIMARYAD

SEQ ID NO: 11695 - protein, 84 aa, Zea mays
  VARIANT 78: note = Ancestral polymorphism is R, Derived polymorphism is K
  VARIANT 75: note = Ancestral polymorphism is R, Derived polymorphism is G
  VARIANT 71: note = Ancestral polymorphism is M, Derived polymorphism is I
  VARIANT 48: note = Ancestral polymorphism is Y, Derived polymorphism is H
MAATKKTKIVLAQPAVGAPTSRLPFFSRAPGPVRGAGDEAAHRASLRYRSLLQDYQELIKETQAKKERLYMERLRKKRLLAEVK

SEQ ID NO: 11696 - protein, 651 aa, Zea mays
  VARIANT 18: note = Ancestral polymorphism is R, Derived polymorphism is W
MGIALLALLLVLPASHARVCPPCGSTAVPYPLSTGDGCGDPAYKVRCAAATNSSTSSPTLMFDALNGTSYRITSISAATQRLVVAPAPLVAQGSRCVSEGRGGGVQLNASLPFNVSSSNTIMLLNCTSALLLSPLNCSSNSLCHVYANATGSTAAACAPLPLCCTFVAGGSSTSYSIRVSPQFCSAYRSFVGLDPAAQPPATWGRRLGLELQWATPREPLCRTQADCEDGANATCADDPLTPAARRCFCVPGLSWSPLAGACQLNPSDCQIAGGCGGSNHAPLIAGLVCGLGGALLLAAAGLLAYRRQRRVRLARERLAKEREEILNANNASGRTARNFSGRELKRATGNFSRDNLLGAGGYGEVYRGVLGDGTVVAVKCAKLGNTKSTDQVLNEVRVLSQVNHRSLVRLLGCCVDLDQPLMVYEFVPNGTLADHLHGATSLSRPPTLGWRQRLAIARQTAEGVAYLHSAAVPPIYHRDIKSSNILLDARLDAKVSDFGLSRLAEPGLSHVSTCAQGTLGYLDPEYYRNYQLTDKSDVYSFGVVLLELLTSKRAIDFARGADDVNLAVHVQRAADEERLMDVVDPAIKDGATQLQLDTMKALGFLALGCLEERRQNRPSMKEVAEEIEYIINIEAAGHPIEQQRTCLDSSE

SEQ ID NO: 11697 - protein, 214 aa, Zea mays
  VARIANT 184..214: note = Derived polymorphism lacks residues 184 to 214
  VARIANT 174..214: note = Derived polymorphism lacks residues 174 to 214
  VARIANT 164: note = Ancestral polymorphism is G, Derived polymorphism is R
  VARIANT 122: note = Ancestral polymorphism is G, Derived polymorphism is D
MASDTASAVPSSVVSAAEETLGYTESVGDHLSHLLAAAAADPDAVAELPPLLRARAFLALAQAATSLLGVRLRCSGVDPDEHPIRKEFVRTELVAPLRPSTTLNTQAAARFIGHSLSHLTSGTYLDIKFMWILDYYGMEMRFFYSDQKRSMHEISRGERRSWSGQKRKPEPSVEKKSVRAAAEEFLAKASQELIGHSDSRVKGPVILISDEDED

SEQ ID NO: 11698 - protein, 316 aa, Zea mays
  VARIANT 162: note = Ancestral polymorphism is S, Derived polymorphism is C
MATGDESETAVRASEELRDWSDMTPVCLAEAFSRLALEDLWRGAMPCCRSWRDAARSRPGLFAVLDLEPGFAESTPGAEAAAWWTPSFQRRVDAMVRSAATFAVGELCEIHVRHCSDDALAFAAERSPRLSILSVKTSPAVTDRSMLIVGACCPMLTELDISNCYEISYKSLEVIGQSCQNLRVLKRNVFNWIDPSEHAGVVPEDYLRECPEDGNREAITISRFMPKLRHLELRFSKLTAVALGSIPEGCKDLEVLDLFGCANLTSRGIDQAAASLKSLVTLVKPNFYIPRSSFHMGRYGHWQLYDERFQTNVFQI

SEQ ID NO: 11699 - protein, 431 aa, Zea mays
  VARIANT 21: note = Ancestral polymorphism is V, Derived polymorphism is A
MALSIFLYLFISTVVILIVSVYMYIKSRGSENPLLPIDWPVVGILPSFVANLRNFHDYLTAVLAASGCNFKRAKTQGILSNPEMVSSMATCCRGKVADGLLPFLARMASAAAPFDMQELCARLVFDQTATPVFGVDPGCLSPHMPSMRVADAMDTVMEVGFFRQTVSPSLWKAMRWLDVGPERRLAAAHTVLHGFVTEMMEKRNAARQLGSEGGVLDGKVVDIVSHYVDDPECSDAMLRKTLLNYMIGGRDTIGTALPWLLYSLANNPRVVSSIRKELAPIASRKDDRGKMVVFEPSETKPLVYLQATLFESLRLYPPGPLERKNVVADDVLPSGHRVRRGEAILVSIYAMGRMESVWGKDSHEFRPERWLSEDGTKLRFSHSDTEVIGTGAWRTCMHFAHGFCENGSTCRFWMPPSRVVMRAKALVVVPP

SEQ ID NO: 11700 - protein, 458 aa, Zea mays
  VARIANT 325: note = Ancestral polymorphism is L, Derived polymorphism is I
MALPIFLYLFISTLALTVSSYLYIRSRGSSDNSLLRKNWPIARILPFLANLRNFHDYLTAILAASGCNSSVQVGLTSRPFILTSDPSNVQHMFTTNHANYVKGEIFPEIFDIVSDTILTVDGEAWRQQRAKGKTMLCSQKMTSWVASCCHGKVAKGLLPFLARMASTRAPFNMQELMGRLVFDQTATLVFGVDPGCLSLLDEMPSMRVADAMDTVMEVAFFRQIVFNHLWKLMRWLNISFEWKLAAAHVVLHAFVTEMVEKRNFARHHHQDIDGDKVTCVDVLSYYITDPECRSDGNLLRKMLLVYMIGGRDTVGTALPWVFYNLAKNPGVVSSIRKELAPLASRKGGTTVVSTDDAGNQMVVFESEETKPLVYLQATLFESLRLYPPAPVEGKAVVNDDVLPSGHQVRRGEVILISIYAMGRMESVWGKDCHEFRPERWLSEDGTKLQYLYVLSHIL

SEQ ID NO: 11701 - protein, 332 aa, Zea mays
  VARIANT 281: note = Ancestral polymorphism is E, Derived polymorphism is G
  VARIANT 22: note = Ancestral polymorphism is D, Derived polymorphism is N
MSMAAEGIVVVAPETADMQRDDQVQTGTHPLARGPDEVGRGGPCDDIAVSLDGHLNDLRDHLLDDLRDDLGKRATYTRCLGSCAFFFLCHALGELFLELCCCSRCLPCLEVSTPRHLAPENRTQKFFAFFAKNLSKLWVTTLLVLFIRWVLFRPIDVKPHLGTSAVHEFALLQPSSSDDAADADAFAGLSAAGVPRLRFNLTAYLLFKNGHDYYDINYDNLAVSVLYAGEKIGPVDDELPSFKQHPHGSTVMRLAFVGQLRNASSTVAEMFSGDRDKGLFEMVVRIRVTLGYKSWPLKEEYFTIYDCPVSSPFPQVGEPALSSPAWCTANDI

SEQ ID NO: 11702 - protein, 634 aa, Zea mays
  VARIANT 369: note = Ancestral polymorphism is Y, Derived polymorphism is C
MAPTPEDPAADDSEPFSPSIFLDLPPTPHPGDDGKDSMIDLHFIRRLLMEDDDVQFQYADHHALLQAAEEPFAQILAGSAGSSVSGSATADTTAIYYPDGTGFHFHQQTAGPTSTTGDDGVVTMDMLNRAFLKGMEEANKFLPVVASSTHTSLLCRDYASKHRVVDGIGMPLFFQESSGNNRRGRGCHHDDDGDDEADTRSAKLIAPELEESGEVTDGVFLRGYEVALEKMNGLSTNVPGAMSRQGQGRQQRSSGNEAVDLRTLLVHCAEAVSTGNRPGATELLRQIRQRSSPRGDASQRLAHCFAQGLELRLAGTGAKPKRAPAGVHLLKAYLLSMQVCCFRMVAFKSCHMAISKAVAGRKKVHIVDYGVDHGFHWLLLLGAWATRVGGPPEVRITGIDFPQPGFRSATRTEGAGRRLSDFARQCGVPFKFRSIVATKWEMIFAEDLEIEPDEVLVVNGLFYFGKLMDDEGVDGDCPSPRDMVLGNISRMRPEVFVLYVDNSSHNAPFFATRFREALFYYSALFDMMDATTPRDSDDRVLVERELLGRCALNVITCEGSERVERPETYRQWQVRCSRAGLRQLPLDPSTVKCLSDLVKEGYHKDFVIDVDQQWLLQGWKGRILYAMSTWAADR

SEQ ID NO: 11703 - protein, 199 aa, Zea mays
  VARIANT 104..199: note = Derived polymorphism lacks residues 104 to 199
MGVFGTSRPASVTLCAFLTFLNLFAFLLAVGAERRRSTGKVVPDEYDERSYCLYDTDASTVYGVSAFFVLLLQQAIVTAATRCLCFGPVLSSRGCAVTAFVLSWATFLIAEACLIGGSVRNAKHTKYLGYYTKHDLVSCATLRKGVFAAAAAMMLVNLLASLVCCWSYSKAATGGFMKHQNEVGVGMTDYGLDRGVSGP

SEQ ID NO: 11704 - protein, 525 aa, Zea mays
  VARIANT 272: note = Ancestral polymorphism is A, Derived polymorphism is V
MSKGNVCTGALRFFFPFAVPVFFFACPRSICGLNAGAGPSIMGLLGMMGDSFGCSATGERLVSAARDGDIQEARALLELNPRLARYSTFGIRNSPLHYSAAKGHHEIVSLLIESGVNINLRNCRGQTALMQACLYGHWKVVQILVLFKANIHRRDCFSGATAIHFAALKGHTRCIRLLVADYVPSLSEFWTIMRGKSTDEMKKGAFDAASLQRLVNGKSDGGVTPLHLAALHGHAESVQLLLDLGASVSEVTVNDGSTIDLIGSGSTPLHYAACGGSAVCCQLLIAAGANMGAQNVNGLTPLLVARSWHKTSIEGILSKQPENRMRILPSPYLCLPLMSIVKIARECGWRKTSASSTCQDPCVICLEVECTVAAEGCGHEFCTKCALYLCSTTSSSTSTRGVPGSISCPLCRHAIVSFMRLTSTTPIKELPWTSASLALCAAGSNTGRPEHGGSLHRRPDLRRLRSISVQLGCSSFRSIGSGKLSSMKLNCTGAEEAVPCLVSCLRPDVQRSSSYRGRIRRYSEF

SEQ ID NO: 11705 - protein, 700 aa, Zea mays
  VARIANT 440..700: note = Derived polymorphism lacks residues 440 to 700
MSRLLPRRRHLSCTSTASLSELASLLDAGRFHRAVDLAKSLLSSHPPAANVPDLYQALAATADTKDDPRARPHSFLCDAASALVVASARLCQPDGALRLLSLLASAGDGACAGEVCSPLPSLSSCNLLLESLLFVGRHADVRAAFGLLVAAGARPDTFAWNKVVQACVAAGDLDVALAMVRRMGRSEGAPPPDAFSYNVVIAGLWRSGKGSDALKVFDEMVDMGVVPNWITYNTMIDGHVKGGDLEAGFRLRDQMLHDGPKPNIVTYNVLLSGLCRAGRMDETRVLMDEMASHSMFPDGFTYSILFDGLTRTGESRTMLSLFAESLKKGVMLGAYTCSILLNGLCKDGKVAKAEQVLEMLVHTGLVPTTVIYNTLINGYCQVRDLRGAFCIFEQMKSRHIRPDHITYNALINGLCKLEMVTKAEDLVMEMEKSGVDPSVETFNTLIDAYGTAGQLEKCFTVLSDMQQKGIKSDVISFGSVVKAFCKNGKIPEAVAILDDMIYKDVAPNAQVYNSIIDAYIESGDTEQAFLLVEKMKNSGVSASIVTYNLLLKGLCRSSQIDEAEELIYTLRNQGLRPDVVSYNTIISACCNKGDTDKALELLQEMNKYGIRPTLRTYHTLVSALASAGRVHDMECLYQQMLHKNVEPSSSIYGIMVDAYVRCENDSKVASLKKEMSEKGIAFDDTKRSNHELDRIIASPI

SEQ ID NO: 11706 - protein, 413 aa, Zea mays
  VARIANT 185: note = Ancestral polymorphism is L, Derived polymorphism is H
MTSSVSPAAAASQSQLHITTTGTGTGSTAIISPSSNQSTSNANARSSSSSSSSPHSASSPPRARGPSTTGGTGSSGGSGSGSGCTNQACAACKYQRRKCNTDCPLAPYFPADQQERFLNAHRLFGVRKILKTLENISPELSADAMATLIFQSDMRAQDPVGGCYHLILSLERQLQIETAELSAMLQTLALFGQATTTTTMPPDQGGGGTAGLDYTASSNLLHNAQQEVLYALYKNKHEEADIVHSDNEVVRHHGGGGHGPNKDDHGRQQHQVLNYFYCNNATASDDVDNMQQFHFNDSCAAADKVDLTPPAGADEMRHHHQHLDENCQIDHKDYFEIKAAAALVDDAFHMRQEVVDVSAEVDMEDIKTVDVNNAGIGGVDIKAMAMNANVVDVTPQMAAESSHCRLGLGFSSF

SEQ ID NO: 11707 - protein, 180 aa, Zea mays
  VARIANT 28: note = Ancestral polymorphism is R, Derived polymorphism is C
MARLLTQTLTLARPAASSSPTAAFASLRCLATKVEIVEIDLTEEDAGSSAHGSSPSSPSIEVVGIRRLEEAIHGVMVRRAAPDWLPFVPGGSYWVPPLRLPHEVTAFVGRIAASGGASGVAKFMDGVAAPGGAGAVGGAFEVVELDDDELMEEEEEEALCFSTTRGWPSASFFVQGESRS

SEQ ID NO: 11708 - protein, 614 aa, Zea mays
  VARIANT 38..614: note = Derived polymorphism lacks residues 38 to 614
MATGSAAGEESSAAARRLRRLSLHLLQPAPAPADRHQQPLALAACARRVEGGADVAAALAAYLRGRHRAAQMRLFDFFRARPDLQTPVELPTAAHRELCYRQLRALVREAGVRPLTLMATDPAEYFAVMEAAGGADISLGVKLGVQYSLWGGSVINLGTKKHRDKYFDGIDNLDYPGCFAMTELHHGSNVQALQTTATFDPVTDEFIINTPNDGAIKWWIGNAALHGKFATVFARLILPLQGKGGEAADMGIHAFIVPIRDLETHAVLPGIEINDCGHKIGLNGVDNGALRFRSVRIPRDNLLNRFGDVSRDGKYTSSLPTINKRFAATLGELVGGRVGIAYCSVGVLKVAVTIAVRYALLRHQFGPPKQPEISVLDYQSHQHKLMPMLASSYAFHFATVQLVDKYSEMKKTNDEDLIADVHVLSSGLKAYITSYTAKSISVCREACGGHGYAAVNRFGALRNDHDIFQTFEGDNTVLLQQKHSKTLGGFGAWNRCLNHLLTLAESHIESVILAKFIESVKSCPDEKSREVLKLVCDLYALDRIWQDIGTYRNVDYVAPNKAKAIHKLTDYLSYQVRLVARELVDAFDLPDLIIRAPIGMQSEAYAQYTQYVGF

SEQ ID NO: 11709 - protein, 229 aa, Zea mays
  VARIANT 71: note = Ancestral polymorphism is E, Derived polymorphism is G
MDPDSVKSTLSNLAFGNVIAAAARDLQKEMVAKDKAQSAPASHDEVDLDELLDDPELEKLHAERIAALKKEVEKREVLKRQGHGEYREITEGDFLGEVTGSEKVICHFYHREFYRCKIMDKHLKALAPVYVGTKFVKLDAENAPFFVAKLAIKTLPCVILFKKGIAVDRLVGFQDLRSKDDFPTRALENILKTKGIIDEKKKDDDDDDEESEAKNRRVRSSTAQDSDSD

SEQ ID NO: 11710 - protein, 245 aa, Zea mays
  VARIANT 84: note = Ancestral polymorphism is A, Derived polymorphism is T
  VARIANT 93: note = Ancestral polymorphism is R, Derived polymorphism is L
  VARIANT 128: note = Ancestral polymorphism is N, Derived polymorphism is K
MSAAEAKAAAVPESVLRKRKREEQWAADKKEKALADRKKALESRKIIFARAKQYAEEYHAQEKELVQLKREARLKGGFYVSPEAKLLFVVRIRGINAMHPKTRKILQLLRLRQIFNGVFLKVNKATINMLRRVEPYVAYGYPNLKSVRELIYKRGYGKLNKQRIPLSNNSVIEEGLGKHNIICIEDLVHEIMTVGPHFKEANNFLWPFKLKAPLGGLKKKRNHYVEGGDAGNRENYINELIKRMN

SEQ ID NO: 11711 - protein, 146 aa, Zea mays
  VARIANT 69: note = Ancestral polymorphism is L, Derived polymorphism is R
MALLNKDAKALCFAALIVMAAIFSSCEAGESALSTLMALLNKDAKALCFAVLIVMAVIFSSCEAGESALSALMALLNKDAKALCFAALIVMAAIFSSCEAGGNRCHAFPGCDSILCWAECDRLGYSNPKPRCLYPKPNHDGDECCC

SEQ ID NO: 11712 - protein, 264 aa, Zea mays
  VARIANT 117: note = Ancestral polymorphism is T, Derived polymorphism is M
  VARIANT 252: note = Ancestral polymorphism is L, Derived polymorphism is H
MPSSAQVLLCLAAVLAAAAATTAEAHSQCLDNPPDRSIHGRQLAEAGEVVHDLPGGLRAYVSGAASSSRAVVLASDVFGYEAPLLRQIADKVAKAGYFVVVPDFLKGDYLDDKKNFTEWLEAHSPVKAAEDAKPLFAALKKEGKSVAVGGYCWGGKLSVEVGKTSDVKAVCLSHPYSVTADDMKEVKWPIEILGAQNDTTTPPKEVYRFVHVLRERHEVPYYAKIFQGVEHGFACRYNTTDPFAVKTAETALAYMVSWFNKHLN

SEQ ID NO: 11713 - protein, 113 aa, Zea mays
  VARIANT 40: note = Ancestral polymorphism is Q, Derived polymorphism is H
  VARIANT 14: note = Ancestral polymorphism is Q, Derived polymorphism is E
MSTPRSTAWSLRYQRGLLQIQALVLSEEAQVSRRFKSNGQILAIDEIFECNPTTIKSCGIWLCYQCRTGYHDLHKEYRNTTLNGAMEQMYNETASCHRVVTLHTDHQDGNNQL

SEQ ID NO: 11714 - protein, 124 aa, Zea mays
  VARIANT 21: note = Ancestral polymorphism is A, Derived polymorphism is T
  VARIANT 29: note = Ancestral polymorphism is N, Derived polymorphism is S
MATQSPHVLVVDHSRVDCLVASIVLNSFNIRVTVAGGAMEALEFLDANNSHVDLILTDYCMPDMTGYDLLREVKESPRLKHIPVVITCTDVIPERIIECFEGGAEEYMIKPLKVSDVPRILSYM

SEQ ID NO: 11715 - protein, 435 aa, Zea mays
  VARIANT 211: note = Ancestral polymorphism is S, Derived polymorphism is I
MLGDQRMILGLDSATSSSTAPDLTRAEEDPSVSRSCVIDRLQVGWAQKGGQVEGLVNCYSKKKNKTGSGSRNLAARAWSSEMEGSDEGGEVNTGDLIGGIGRELAISCLLRLPRSYYYDVACVNRSFYSLVRFGELYRLRREAGIVEQMIYCSCNVLEWEGFDPRRQRWFSIPSMPPIECFTLADKESLAVGTNILVFGKRVEAHVVLRYSLLTNSWTTGEMMNTPRCLFGSASFGEKAIVAGGIGQNGTLDSAELYDSEMQTWTTLPSMNRARQMCSGFFMDGKFYVIGGKSERHNEILSCAEEFDLESSTWRLIPDMAQGLNGGSGAPPLVAVVNNELYAADYATKEVRKYDKENNAWITLGLLPGRYTSVHGWGIAFRSCGDMLIVIGAMSAGGSGVIEICSWVPNNGLPDWKIIGTRRSGSFVYNCAVMSC

SEQ ID NO: 11716 - protein, 291 aa, Zea mays
  VARIANT 211: note = Ancestral polymorphism is R, Derived polymorphism is Q
MGQASRAHQLLASLAAIYVTLAISITQHHVAGNMTDDLEIMWGNAKVVTDGSGQQAIALALDRSTSSAFRSKKTCQFCRVDIEIKLVPGNSAGTVTTFYMITENPWQFHDEIDIEFLGNSSGQPYTMHTNMYARGQGAREKQYKFDFDPTQDYHKYTIIWNKDWILFLVDDKLYRQIKNNQIDGAPYPYYYPMRVYATIWNADEWATQGGRVKTDWSQAPFTAYFRNYRAISCNSFMASPLCLPGSGWFDQQLDESRKQQLAQVDSSNKIYDYCTDSRRYKNGLPRECQVH

SEQ ID NO: 11717 - protein, 355 aa, Zea mays
  VARIANT 265..355: note = Derived polymorphism lacks residues 265 to 355
  VARIANT 56: note = Ancestral polymorphism is G, Derived polymorphism is C
MAGPAPAVAASAAASQSPPMQLPSPFAELVKGSSGLEKIVLRGARNCCAEIYLYGGQVTSWKNDNGEELLFLSSKAIFKPPKAIRGGIPICFPQFGTHGNLEQHGFARNRFWTIDNNPPPLPVNPAIKAYVDLILKPSEEDLKIWPHSFEFRLRVSLGPSGDLSLTSRIRNTNTDGRPFSYTFAYHTYFSVSDISEVRVEGLETMDYLDNLKAKERFTEQGDAIVFESEVDKVYLAAPSKIAIIDHEKKRTFVVTKEGLPDAVVWNPWDKKAKAMQDFGDAEYKSMLCVEPAAVERPITLKPGEEWKGRLVLSAVPSSYCSGQSSLPLIFDAGLASTPHVPFAISTPYISGPFCI

SEQ ID NO: 11718 - protein, 389 aa, Zea mays
  VARIANT 320..389: note = Derived polymorphism lacks residues 320 to 389
  VARIANT 305..389: note = Derived polymorphism lacks residues 305 to 389
MSSSARFDLRASSHQLQPPPSHASMSSDGGAFANAENLEHCARYLNQTLVTFGFPASLDLFATDPVSIARTCNCIYALLQQRQRDIEFRESTNDQRQRMQSDISRLEAKIERMDAQLAAKDRELATLTRTEAKNTAALKSQIDKLQQERDEFQKMVIGNQQVRTQQIHEMKKKEKEYIKLQEKLNQVLMEKKKESSRSGMEIMNLLQKEGRQRGTWNGKKNDNDYYKMIVDAYEVKKQELMQENADLRALLRSMQMDMRDFLNAPNGSSQSTVTDNGRQESGSPQSPLGGKTDVFDLPFHMARDQIEESLRTKMTSIKARMTQLQDAQKGAEVTSEATDRELELEAQLVEARSIIQEQACIMSKHFKSDKPSGRRHSGLDGEREASAEV

SEQ ID NO: 11719 - protein, 433 aa, Zea mays
  VARIANT 71: note = Ancestral polymorphism is G, Derived polymorphism is V
MGRRKMSAAAPPSRSWSNVGGSVIPELLAKHKMDLENLTLTKHPIRTLHFFLLAMLQYLKRLATYILRKSGLFFLLIVLVVASGILLSISDGLHKKHVQEFLNYAKFVLWWISLGVASSIGLGSGLHTFVLYLGPHIALFTIKAVQCGRIDLKTAPYDTIQLKVGPSWLDKKCSEFGPPVYPASAHSVRIPVFDLLPQIQLEAVLWGIGTALGELPPYFISRAARLSGSKSKAVKELDAATSKEDGTVASTLDRSKRWLLSHSQHLNFFSILILASVPNPLFDLAGIMCGQFGVPFWEFFFATLIGKAIIKTHIQTLFIVSLCNNQLLYLMEKELIWIFGHIPGFSATLPSVIAKLHAAKDKYLSPPTPVSASSQMEEKSWNLSFTLVWNSIVWLVLLNFSVKIITSTAQDYLKKQQDMEMERVSDSPPPEQN

SEQ ID NO: 11720 - protein, 301 aa, Zea mays
  VARIANT 7: note = Ancestral polymorphism is R, Derived polymorphism is H
  VARIANT 54: note = Ancestral polymorphism is T, Derived polymorphism is A
  VARIANT 237..301: note = Derived polymorphism lacks residues 237 to 301
MAFTRRRPCGILLLSLLAASGSLSLAATGPGDVAVFWGRNKDEGTLREACDTGTYTTVIISFLRGFGHGAAYYSLDLSGHPLAGVGADVKHCQAKGILVLLSIGGPPNTNTGAGAGYSLPSARAAADLAAYLWDAYLGGSRAGLRRPFGDAALDGVDLYIDQGGVDGHYDELARRLYAYNRSYRGRLGVTLTATVRCAYPDPRAQAALATGLVSRVHVRLYGDLKCTWSDREAWEKWAAAYPASRVFVGVVASPEADKDAYMFQKDLYYNVLQFAQKAPNYGGLMIWDRYYDKMNHYISSS

SEQ ID NO: 11721 - protein, 353 aa, Zea mays
  VARIANT 253..353: note = Derived polymorphism lacks residues 253 to 353
  VARIANT 230..353: note = Derived polymorphism lacks residues 230 to 353
  VARIANT 149: note = Ancestral polymorphism is D, Derived polymorphism is V
  VARIANT 69..353: note = Derived polymorphism lacks residues 69 to 353
MPSPPQPWSSRASPSVHPLRASLLPRHQVHARSFLRAGMALQPQLAPALSYGALPPPPLLSMAALPASWCAAGPHTIVDGKEVVNFALANYLGLIGNEKIVRMTFKILASVHWRNMVLVLVVHVVFMEQLVYVHLDCESKIAKFLGTPDSILYSYGISTIFSVIPAFYKKGDIIVADEGVHWAVQNGLHLSRSTVVYFKHNDMASLASTLEKLTRGNKRAEKIRRYIVVESIYQNSGQIAPLDEIVRLKEKYRFHVILEESHSFGVLGKSGCGLAEHYGVPVSVWPQLFLMFHRNAPPVVSDWGALLPSSQTRPNCLVKCLGQTGQQEWSHGTSAGGLRQRQPMYPMDSLVLT

SEQ ID NO: 11722 - protein, 180 aa, Zea mays
  VARIANT 129: note = Ancestral polymorphism is R, Derived polymorphism is S
  VARIANT 139: note = Ancestral polymorphism is A, Derived polymorphism is P
MRELGSSLSPPSVTVLTIAAHELRCRCAPYDGYNGDDDFELTPLLFRTRRSARTERPRIVAVQVAAITVAQPQPPQRPRRGAPSGVAAVAATPAPAPQRKKQQQQVRWHDMAFGTVRLPAATSMGEIRRRLRARQALQAGGAANEPSSSAAAWAPWRLIRSLSCRGVEAVSAAAAPVRLV

SEQ ID NO: 11723 - protein, 212 aa, Zea mays
  VARIANT 26..212: note = Derived polymorphism lacks residues 26 to 212
MDEVVSQILEKQVLSAAKAVEDKLDEEIAALDRLDPDDIEALRERRIQQMRRAAERRAKWRALGHGEYTEVPEKEFFSIAKASERLVCHFYRDNWPCKVVDKHLSALAKQHVETRFVKVHAEKAPFLTEKLRIVVLPTLAIVKNAKVEDYVVGFDELGGKDDFSTEDLEERLARSQVVFLDGEGSAHASKQAAAATKRSVRQSGTGDSSDSE

SEQ ID NO: 11724 - protein, 381 aa, Zea mays
  VARIANT 14: note = Ancestral polymorphism is R, Derived polymorphism is W
  VARIANT 19: note = Ancestral polymorphism is R, Derived polymorphism is C
  VARIANT 20: note = Ancestral polymorphism is V, Derived polymorphism is A
  VARIANT 27: note = Ancestral polymorphism is R, Derived polymorphism is H
  VARIANT 48..381: note = Derived polymorphism lacks residues 48 to 381
  VARIANT 81: note = Ancestral polymorphism is T, Derived polymorphism is M
  VARIANT 141..381: note = Derived polymorphism lacks residues 141 to 381
  VARIANT 233..381: note = Derived polymorphism lacks residues 233 to 381
  VARIANT 237: note = Ancestral polymorphism is V, Derived polymorphism is I
  VARIANT 252: note = Ancestral polymorphism is R, Derived polymorphism is H
  VARIANT 261: note = Ancestral polymorphism is G, Derived polymorphism is S
MALLASRPPTALGRLTNLRALSLCSNRVLGTIPNNVLQLPGLKALFLQHNLLSGPIPPGIQRLGGLERLVLSYLSGPIPFTLNSLTALRVLRLDGNRLSGSIPSISIAGLGSFDVSDNNLNGPIPKSLSHFPRESFVGNLQLCGDPLPPCSSPFFPPAPSPGGPGPAPGSSKKQKLSGAAIAGIVVGAVVPPPASGVGSVLTSSSKEDLGGDAFGSAAAVAAAAAAAAGEQSRLVFVGKGAGYSFNLEDLLRPSAEVLGKGSVGTSYKAVLEEGTTVVVKRLKDVAVQRREFDAHMEALGRVEHQNVLPIRAYYFSKDEKLLVYDYLPNGSLSAMLHGIENLTICAVLISGGGIAHGIIFDIMQERCKYKIRDATTISYRL

SEQ ID NO: 11725 - protein, 76 aa, Zea mays
  VARIANT 24: note = Ancestral polymorphism is A, Derived polymorphism is S
MGTSQAPRQHLSQNRASLTSKVTAKIRKILLKAKAPRKKKTTMYPVLAAALKFHKDDDVCPAAAGVKQQQQHNKEM

SEQ ID NO: 11726 - protein, 260 aa, Zea mays
  VARIANT 173..260: note = Derived polymorphism lacks residues 173 to 260
  VARIANT 180..260: note = Derived polymorphism lacks residues 180 to 260
MINQYRNRSEYGEPNSRKGREIRSAHAWWVLFASLDATQLLRRSHTCKKQHLEELRGHGERRRNTTTTAATQSEDDTSASLSVGAGVGELAQLWLRHEKRGLFHTTRDEDGATRFGILLLKLRKPEAQRQARVGAIQAVRQPAVASRFRVEVFREASGRLPCEDGAGTSACIWMASGGGGSGACLAHGCWATWMRTGRRGSDGGGAYGCSPFGDEDRRWIRREAGEMRGRVDGWHRPSAIARWGWSGGMVVPSLHYRLKE

SEQ ID NO: 11727 - protein, 322 aa, Zea mays
  VARIANT 230: note = Ancestral polymorphism is P, Derived polymorphism is S
  VARIANT 211: note = Ancestral polymorphism is A, Derived polymorphism is V
  VARIANT 187: note = Ancestral polymorphism is S, Derived polymorphism is F
  VARIANT 182: note = Ancestral polymorphism is K, Derived polymorphism is N
  VARIANT 168: note = Ancestral polymorphism is L, Derived polymorphism is V
MAATDFFFVSECKGQKTIDGEQVPLVLAPSGDDGKSNGYEALVEALKANREWVEAKVVANSGLLLRGFDVRDAAEFNAVVEALGWPDIRYVGPAPRTHVHGRVWTANEGPLEEFIYYHHEMVLIKEFPGKVILFCEVPPPSGGETPFVPSFRVTERALEEFPEMVEELDDKGLRYTFTALSKNDTKSMRGRGWEDAFATSDKAEAERRARALGMDVEWLPDGGVRTILGPRKLTRVFPGRRNRRMWFNTVVGMHGKELSSATLADGSEIPADFVRRCGEIIEEESIQFRWEKGDILILDNLATLHGRRPSLPPRKVLVATCK

SEQ ID NO: 11728 - protein, 117 aa, Zea mays
  VARIANT 5: note = Ancestral polymorphism is I, Derived polymorphism is T
MEIIIIISLVILLALGALFAIPKSQNKGKSKGTDLGAGMTSRSFTKEEISKHNTRKDCWIVIKDKVYDVTPYVEEHPGGDAILNNAGGDSTEGFFGPQHGTRVFDIIEDFCIGQLKA

SEQ ID NO: 11729 - protein, 236 aa, Zea mays
  VARIANT 29: note = Ancestral polymorphism is R, Derived polymorphism is C
  VARIANT 99: note = Ancestral polymorphism is P, Derived polymorphism is L
  VARIANT 170: note = Ancestral polymorphism is P, Derived polymorphism is S
MFSQLMTQLAFILYVDLGALSFVTQASTCRFSYCISDRDDAGVLLLGNSDLPFLPLNYTPLYQPTPPLPYFDRVAYSVQLLGIRVGGKPLPIPPSVLAPDHTGAGQTMVDSGTQFTFLLGDAYSAVKAEFLKQTKPLLPALEDPSFAFQEAFDTCFRVPKGRPPPSARLPPVTLLFNGAQMSVAGDRLLYKVPGERRGAEGVWCLTFGNADMVPLTAYVIGHHHQMNLWVEYDLPH

SEQ ID NO: 11730 - protein, 143 aa, Zea mays
  VARIANT 108: note = Ancestral polymorphism is L, Derived polymorphism is V
MTIRFVLFVNKQGQTRLAQYYEHLSLDERRALEGEIVRKCLARTDQQCSFVEHRNYKVVYRRYASLFFLVGVDSDENELAILEFIHLLVETMDRHFGNVCELDIMFHLEKVHFMLEEMVMNGCIVETSKQNILAPIQLMEKTS

SEQ ID NO: 11731 - protein, 256 aa, Zea mays
  VARIANT 2: note = Ancestral polymorphism is D, Derived polymorphism is N
MDEWIRQTEVWVHQTDSWIRQQPPEQIYVAAAVVAVTILLLIVASCLKSSRPNTIVLSGLSGSGKTTIYYQLRDGSSHQGTVTSMEENSDTFVLHSEQERKDKVKPVHIIDVPGHARLKPKLDEVLPKAAAVVFVVDAQDFLSSMQAAAEYLYDILTKATVVKKKVPVLIFCNKTDKVTAHSKEFIKKQLEKELNKLRESRNAVSSADISDEVQLGVPGEAFNFSQCQNKVAVAEGAGLTGDVSAVEQFIREHVKA

SEQ ID NO: 11732 - protein, 983 aa, Zea mays
  VARIANT 283..983: note = Derived polymorphism lacks residues 283 to 983
MESRRSRGLARFSRQVHALFLKNLSFQRRNARTNAAIAAFPVLLCVLLVSIQHVVDSELERPPFRCGCAGADQCGIQHSTPIQALACAVPVPPRWPALLQVPATEARALTRLRPRPCKAPENCPATVLLTGQNRLLAQGLGSLLFPPLPPQYARRMPGAAAAASNSSDYLDLFSAVVPGSSSLPAHVLFIEPGLVPEETLYLLQPNCWSETRNISAHFDGIPIESELQCVQALSSWCDNSSVINRQMFMGYKGGDRRRRSNEFLAGYDFLDTSKRRFHVYVWYNSSFSRDNGHHSMTVLRVSRLVNMASTAYLNLLLKGGTTEMRLEFLKEMPKAAIKMRLDLTTLLDALFFTWTVQLLLPVSQVLLYSLSFSELVNKVNSFSYIGNVDIPCLREAAEAKTNDEDARAEGRALLADILRLFPGPFSSLHGVLHHLWVHHRELLFLHFALVVRAGLDIFRLNSYGIQSLFYFVCINLQIVLAFLLATFFSSVRTASVIGYMYVFGSSLLGEALLKVFIEDATFPRRWLVAMELVPGFSLYRGIYELAEYAAAGRNMGKPGMRWGDMDDPVNGMRGVLVVMSVEWIVLLLVAFLLDRRPAWQPLFLFGFLSTKHSSPSERQKKESRRVHVYGTKPDVSLERKVVRRLLKDMDMGDMIICNNLKKVYPGKNGNPDKHAVRGLSLALRKGQCFGMLGPNGAGKTSFINMMIGLVKPTYGTAYVHGMDLRTEMNEIYTSIGVCPQHDLLWEPLTGREHLMFYGRMKNLTGAALTQLCPLIQAVEDSLKSVNLFHSGFGDKSVSKYSGGMKRRLSVAVALIGSPKVVYMDEPSTGLDSRSRSDLWSIIRRAKKDCTIILTTHSMEEAEQLCDRIGIFINGSFHCIGTPKELKARYGGTRILTITTSPEHEEAVELIVSRLAPGYSRIYSVSGTQKFALPRREVGLGCVFGAVEVARREFPVLGWGVADATLEDVFVRVAKEARAFHVLS

SEQ ID NO: 11733 - protein, 224 aa, Zea mays
  VARIANT 38: note = Ancestral polymorphism is A, Derived polymorphism is G
  VARIANT 47: note = Ancestral polymorphism is G, Derived polymorphism is S
  VARIANT 81: note = Ancestral polymorphism is D, Derived polymorphism is N
  VARIANT 106..224: note = Derived polymorphism lacks residues 106 to 224
  VARIANT 157: note = Ancestral polymorphism is P, Derived polymorphism is R
  VARIANT 185: note = Ancestral polymorphism is N, Derived polymorphism is S
  VARIANT 209: note = Ancestral polymorphism is G, Derived polymorphism is A
MGLEMVEVMSETVPTVVPAAARENGVDIYPLSRYYFGARDAAGVPRGLETAADRALRLKANFAAHGLRTSVHGVLLVELFDHPHVLLLQVRNSSFLLPGGRLRPGEEEVRGLKRKLSSKLSVVDDVEAVEEEDWQIGQCIGMWWRSEFEAIPFPYMPPRFRAAKECMKLFLIRLPMSRQFIVPRNMKLLAVPLSQIHGNAQVYGPIIAAIPSLLSKFSFNVISD

SEQ ID NO: 11734 - protein, 207 aa, Zea mays
  VARIANT 123: note = Ancestral polymorphism is T, Derived polymorphism is I
  VARIANT 103: note = Ancestral polymorphism is S, Derived polymorphism is N
  VARIANT 92..207: note = Derived polymorphism lacks residues 92 to 207
  VARIANT 87: note = Ancestral polymorphism is A, Derived polymorphism is V
  VARIANT 81: note = Ancestral polymorphism is G, Derived polymorphism is A
  VARIANT 80: note = Ancestral polymorphism is Q, Derived polymorphism is L
  VARIANT 72: note = Ancestral polymorphism is D, Derived polymorphism is Y
  VARIANT 61: note = Ancestral polymorphism is D, Derived polymorphism is N
  VARIANT 54: note = Ancestral polymorphism is E, Derived polymorphism is K
  VARIANT 51: note = Ancestral polymorphism is K, Derived polymorphism is I
  VARIANT 39: note = Ancestral polymorphism is I, Derived polymorphism is N
  VARIANT 36: note = Ancestral polymorphism is F, Derived polymorphism is L
  VARIANT 35: note = Ancestral polymorphism is R, Derived polymorphism is M
  VARIANT 31: note = Ancestral polymorphism is T, Derived polymorphism is M
MMDRQDALRSPRLLLAVWRVAGNPHRYTDGTTYNRFCIIVKTIRDEKEVLKAIEYVHELLDKEVAAETSPTDILVCGMSQGGALAKASVLLYPKTLGGCAIFNGSVPISKSFAQKVPSESRKTSIMVSWNGSTRTKPLPDQKALEIIFEKIQRKDTYGVFVEAVDPVEIYKKEKIIVSPIVSMPASSKVPEKIEWNSNFGGRKSVET

SEQ ID NO: 11735 - protein, 319 aa, Zea mays
  VARIANT 197..319: note = Derived polymorphism lacks residues 197 to 319
  VARIANT 119: note = Ancestral polymorphism is R, Derived polymorphism is C
MFSEEEIAVAEDSGEIVSVMEPVSVVGTSGEMETEVSAERDVRAMKDHIDLEASQSQQPRKLPSKDLKEIVGSFWLATSTFSKKWQKWRGKQKLKAGGKENRGSDPPLPRGVQGRRVRRRRPRVLGAMAGPARPRQLDDGSNAPVTYVLKGSQAEQMLCPQWQPQTMENTPVTTNSTLEKQIQEDFCQRAMSQDGTQQPFSSDWRLSNCTATSIDPALPKPAAGGFEQDQTMDNDDAQIGVAKTQGKYWGIFICWLLGNGCLFGFNEMLTIEDYYVYLFPKYHPTRIITLTYQPFVLATTAIFTYHEAKVNADRSFSKP

SEQ ID NO: 11736 - protein, 222 aa, Zea mays
  VARIANT 191: note = Ancestral polymorphism is F, Derived polymorphism is L
  VARIANT 189: note = Ancestral polymorphism is V, Derived polymorphism is M
  VARIANT 175: note = Ancestral polymorphism is G, Derived polymorphism is D
  VARIANT 171: note = Ancestral polymorphism is A, Derived polymorphism is G
  VARIANT 134: note = Ancestral polymorphism is D, Derived polymorphism is H
  VARIANT 108: note = Ancestral polymorphism is D, Derived polymorphism is N
  VARIANT 92: note = Ancestral polymorphism is Q, Derived polymorphism is K
  VARIANT 87: note = Ancestral polymorphism is H, Derived polymorphism is Y
  VARIANT 86: note = Ancestral polymorphism is A, Derived polymorphism is T
  VARIANT 62..222: note = Derived polymorphism lacks residues 62 to 222
  VARIANT 61: note = Ancestral polymorphism is L, Derived polymorphism is S
  VARIANT 53: note = Ancestral polymorphism is A, Derived polymorphism is T
  VARIANT 46: note = Ancestral polymorphism is L, Derived polymorphism is P
  VARIANT 37: note = Ancestral polymorphism is E, Derived polymorphism is Q
  VARIANT 31: note = Ancestral polymorphism is T, Derived polymorphism is I
  VARIANT 28: note = Ancestral polymorphism is R, Derived polymorphism is W
  VARIANT 20..222: note = Derived polymorphism lacks residues 20 to 222
  VARIANT 10: note = Ancestral polymorphism is E, Derived polymorphism is K
MASPRGGFDEQDRRTEKGTEVFVGGLPWSATESMLRQVGLLLMFLPVCRLHTASFLAFSLLWQSGIDIDLYSINKYFSSCGEIIDAYVMKGQSGHSKGYGFVRFAKRDYANTAKRQKNGIELQGKRLVFELSMDQDTVFFGNLCKEWTLEEFEELIHKAFKDVVSVDLAMASNLDSSNKKNINRGFGFVRFSSHAVSLSLTGGQKFSFSVHSAFFINLNIVL

SEQ ID NO: 11737 - protein, 137 aa, Zea mays
  VARIANT 127..137: note = Derived polymorphism lacks residues 127 to 137
  VARIANT 57..137: note = Derived polymorphism lacks residues 57 to 137
  VARIANT 25: note = Ancestral polymorphism is S, Derived polymorphism is R
MEEEVIKLQKCLQDKDEQLCSSTSSTEQYHHELDDLRTHLSFTKAIGEAGEQIDLLQKDVQAREVSQMQLKDKVIRIETDIMDEVAKAFEIAMLRGEIRILSAHSTNKTKNLESQLKKNRRTDHELKKRVLKIEFCL

SEQ ID NO: 11738 - protein, 112 aa, Zea mays
  VARIANT 104..112: note = Derived polymorphism lacks residues 104 to 112
  VARIANT 47: note = Ancestral polymorphism is Q, Derived polymorphism is R
  VARIANT 26: note = Ancestral polymorphism is T, Derived polymorphism is I
MARLRLAVVAVALALCCCLMIHAPTTGAAAAADDASFPPGLEVAAQQQDTRVAAPPPSSSPGAQHHQEAAGGAVAAEAAPVGRKRTELELVEDYPGSGANDRHSPWAQKRRN

SEQ ID NO: 11739 - protein, 129 aa, Zea mays
  VARIANT 125: note = Ancestral polymorphism is G, Derived polymorphism is V
  VARIANT 115..129: note = Derived polymorphism lacks residues 115 to 129
  VARIANT 114: note = Ancestral polymorphism is V, Derived polymorphism is D
  VARIANT 108: note = Ancestral polymorphism is G, Derived polymorphism is D
  VARIANT 107: note = Ancestral polymorphism is A, Derived polymorphism is V
  VARIANT 96: note = Ancestral polymorphism is D, Derived polymorphism is N
  VARIANT 30..129: note = Derived polymorphism lacks residues 30 to 129
MDSSWDPATESMGMSSGAGDDGGAAMDGSWDCATKSGARGRDIIMPNLKSSVTTTASAVEYTDEVLKALLPVCRSVSSVVVVVFSVHPSALKYKVDSLEEAAKAKEAGVDGIIDQGCEAGGHVIGQFLR

SEQ ID NO: 11740 - protein, 90 aa, Zea mays
  VARIANT 86: note = Ancestral polymorphism is A, Derived polymorphism is V
  VARIANT 83: note = Ancestral polymorphism is L, Derived polymorphism is H
  VARIANT 73: note = Ancestral polymorphism is S, Derived polymorphism is C
  VARIANT 69..90: note = Derived polymorphism lacks residues 69 to 90
  VARIANT 65: note = Ancestral polymorphism is F, Derived polymorphism is I
  VARIANT 63: note = Ancestral polymorphism is E, Derived polymorphism is K
  VARIANT 62: note = Ancestral polymorphism is D, Derived polymorphism is N
  VARIANT 54..90: note = Derived polymorphism lacks residues 54 to 90
  VARIANT 40: note = Ancestral polymorphism is R, Derived polymorphism is C
  VARIANT 38: note = Ancestral polymorphism is A, Derived polymorphism is T
  VARIANT 36..90: note = Derived polymorphism lacks residues 36 to 90
  VARIANT 29: note = Ancestral polymorphism is R, Derived polymorphism is S
  VARIANT 27: note = Ancestral polymorphism is S, Derived polymorphism is L
  VARIANT 22: note = Ancestral polymorphism is R, Derived polymorphism is H
  VARIANT 15: note = Ancestral polymorphism is A, Derived polymorphism is V
  VARIANT 13: note = Ancestral polymorphism is A, Derived polymorphism is V
  VARIANT 6: note = Ancestral polymorphism is E, Derived polymorphism is K
  VARIANT 2: note = Ancestral polymorphism is A, Derived polymorphism is P
MASLIERATSTTAHAVDPVLLRAIKYSARASDAAIQDAFCLILSLMSKPHSHVQLLAFSIADELFMRSKLFRSLLADSLDGFLPLAVGFR

SEQ ID NO: 11741 - protein, 201 aa, Zea mays
  VARIANT 18: note = Ancestral polymorphism is A, Derived polymorphism is P
MENSSSAAACHCLVLQEPCGINLFLKFLTWSVSVFQILLPCSCKPCNCNCSCSCNQGSAEKVIQTPVITTADKEVTETRNKDQDDETALAQEDIKTVMRNIGFNLDQPENGMAIGDDSVARVFDEDEPSLQEVWQAFSVFDHNNDGYFDASDLQRVLGSLGLREGLGMDECEQMIAKYDTNKDGRIDVAEFTRVLESAGIC

SEQ ID NO: 11742 - protein, 297 aa, Zea mays
  VARIANT 114..297: note = Derived polymorphism lacks residues 114 to 297
  VARIANT 141..297: note = Derived polymorphism lacks residues 141 to 297
  VARIANT 154: note = Ancestral polymorphism is P, Derived polymorphism is L
  VARIANT 173: note = Ancestral polymorphism is V, Derived polymorphism is D
  VARIANT 288..297: note = Derived polymorphism lacks residues 288 to 297
MRALMPEQRKGRSRLAAVRVGRSPAAASPSRRRRKSGSGSTAARPVPTPGPSRSRTRTRREGKRRALARSASEPLLWFGDARVHDVPPHGPGLGLGLDCPPSPPPPPLERPHTCFDVFAPEFGRSPSYASLTSPCPREEAKVVVSVTVEGSVGPVKAMVRLGASVGEAIAAVVERYAREGRSPRLDPAAAESFQLHHSHFSLESLNKKDRIGDVGGRNFYLHKNDSSNDGLYLQGQEEPGADPSGGDISRHSSSGVGQASGGATSQHQVLTIVISKLDKIGRRTRRIWRFITCNNCA

SEQ ID NO: 11743 - protein, 166 aa, Zea mays
  VARIANT 10..166: note = Derived polymorphism lacks residues 10 to 166
  VARIANT 61: note = Ancestral polymorphism is Q, Derived polymorphism is P
MASTSGVYPWTSTVGAAPKRWCFQRGGAADGGGDPRQARVGGRHHHHHHLPSSPAGDAHAQWCRDADEGTGHMESLDGELLVLPPRRYRRATKQRRADPDLRLPANMGTQTSMVVDDGSQGRARQCDRWGVDDGAWVWDWGVTANAAVTWGGGRRHGGGARARLLR

SEQ ID NO: 11744 - protein, 134 aa, Zea mays
  VARIANT 112: note = Ancestral polymorphism is T, Derived polymorphism is I
  VARIANT 79: note = Ancestral polymorphism is G, Derived polymorphism is W
  VARIANT 6: note = Ancestral polymorphism is G, Derived polymorphism is D
  VARIANT 4..134: note = Derived polymorphism lacks residues 4 to 134
MIWQSGIKCVQLNGAMNITEKGRAIDTFTHDADYKVFLMSLKAGGVALNLTVASHVFLMDNWWNPAVENQAQDRIHRIGQFKPIKSTRFVIKDTVEERILQLQQKQLVFEGTVGDSLDAMSKLTEADLKFLFQI

SEQ ID NO: 11745 - protein, 839 aa, Zea mays
  VARIANT 104..839: note = Derived polymorphism lacks residues 104 to 839
MNAGGVLGTNLLSWAGPLASAYTILRSDQRREGRIYHRQSRPPWFHPSAGPRGIYHRRGPRTWTCARLAFARDVNATSLARPLHHRGCSVESVYNCSPFGGSRLNDHFILAVADIHCPVLSRRAPDDLVLRVRPPRCPRTPEGDGGAGCAEEARADIPFARRPDCKAPSPKLQVRKLINSVRKMVHREPAEAAAAAAAGGETSISTQPPSSSQQAAPPPAVLVYKVGYPPRRSLATEFTSTLRETFFHDSPLKQCKDQSVSTKLQMGLQLLFPVLGWGRTYSLSMFKGDLVAGLTIASLCIPQDIGYSKLAYLDPEYGLYSSFVPPLIYAAMGSSKDIAIGPVAVVSLLLGSLLQKEADHDKDREEYLRLAFTATFFAGITQAALGFLRLGFLIDFLSHAAIVGFMGGAAVTIALQQLKYVLGIRSFTKETDIVSVMESVWGSVRHGVLTLPLNLLISTGKRNKKYFWVPAIAPVTSVILATLFVYLFRADKQGVQIVNKIKKGVNPSSVHKIYFTGPFVAKGFKIGAVCGMIGLTEAVAIGRTFAAMKDYQLDGNKEMVALGTMNIVGSMTSCYIATGSFSRSAVNFMAGCRTPVSNVVMSTVVLLTLLLITPLFKYTPNAILGSIIISAVIGLVDYEAAILIWKVDKMDFVACMGAFFGVVFKSVEIGLLIAVSISFAKILVQVTRPRTVLLGNLPGTTIYRNTEQYPHARHVPGVVIVRVDSAIYFSNSNYVRERILRWLTDEEDRVSAEGLPRISFLVVEMSPVIDIDTSGIHALEDLYKNLQKRGIQLLLSNPGSAVIEKLQSSKLTEHIGNGHIFLTVADAVRFCTSKSMQEP

SEQ ID NO: 11746 - protein, 504 aa, Zea mays
  VARIANT 354..504: note = Derived polymorphism lacks residues 354 to 504
  VARIANT 425..504: note = Derived polymorphism lacks residues 425 to 504
MARAAARLLPIFLPWRRPPPPCLLRRGFLNPSSPRTSARVDTLVLPGDERLPFPSPPRLPNQLRPDYGSGGGGGAPSTIAAIVTSLGGGPAAVGIVRISGPDAVAVADRVFRPAGTRRASTPWQPRSHFVEYGLALDADGSVIDEVLVVPMLSPRSYTREDVVELQCHGNDLCLRRVLRACLEAGARLADPGEFTLRAFLNGRLDLAQAENVSRLISAKSAAAADSALAGIQGGFSTLVKSLRSRCIELLTEIEARLDFEDEMPPLDPVMLVSKINCMRKEVQDALDTSNYDKLLQSGLQIAIIGRPNVGKSSLLNAWSKEICTSIIPHTICLNNVACRWIFFVDIGIYMFSLQSERAIVTEIAGTTRDVVEANVSINGVPVTLLDTAGIRETDDVVEKIGVKRSEAAAMGADLIVMAISAVDGWTDDDTKLMEHVSVNRRQFEQLLRTKEAFARLESSINEQLPMDFWTVDLREAALALATISGEDISEEVLSSIFSKFCIGK

SEQ ID NO: 11747 - protein, 185 aa, Zea mays
  VARIANT 128: note = Ancestral polymorphism is G, Derived polymorphism is V
  VARIANT 116: note = Ancestral polymorphism is R, Derived polymorphism is C
  VARIANT 89: note = Ancestral polymorphism is A, Derived polymorphism is V
  VARIANT 83: note = Ancestral polymorphism is R, Derived polymorphism is L
  VARIANT 72: note = Ancestral polymorphism is G, Derived polymorphism is R
MMLGKRSGRPSPTARQHMRRTTSLTEFAAPDKVLADVAEEEDEELQLLPAHAEAAELEGPYGWAIGGAAAAGRADWLAAYRARAAPVLAGLRRNSADFSAAETAAFLRACGLCNRRLGPGRDTFVYRGDTAFCSLECRQQHITIEEWKEKCALATPPASDPVVPLPPRPSGAGSDKPATVLASKS

SEQ ID NO: 11748 - protein, 85 aa, Zea mays
  VARIANT 40..85: note = Derived polymorphism lacks residues 40 to 85
  VARIANT 46: note = Ancestral polymorphism is D, Derived polymorphism is Y
  VARIANT 68..85: note = Derived polymorphism lacks residues 68 to 85
  VARIANT 70: note = Ancestral polymorphism is I, Derived polymorphism is T
MNPPTRIWAPAPPRAIGLRPLTTGRWDVGGSNGRWDGGGGRVMATDFFWSYTDELHTSRRREILAKYSQIKELFRPDPWGFLKVP

SEQ ID NO: 11749 - protein, 1915 aa, Zea mays
  VARIANT 76..1915: note = Derived polymorphism lacks residues 76 to 1915
  VARIANT 49..1915: note = Derived polymorphism lacks residues 49 to 1915
MVDDMQDAEIATELVLMHHQLCRRRVLHRFSLLGTTTALIIMLAEDDTWTIDAELASIRGLHIFIILKNHTSTKNKDAWHGMDDQNFDQELQQGFFMENGEPTETDQMEHNDGRTPLTNISNTITIADENGSKSLGPNVDAKERKRQRERERYAVMTVEQKNEKSRKCRELVFQMAVAQMISQTLQHKICSHENHFATVDLAVPNVNQDDDSDWLHRNETFKSDDVFTTRDLLTPGSVHETVGNTPNHNLGRAAYFRERYKNLTPAERELRRECLRLYNNTPKRKGSKIEYIRKRRALLADTLSQESIAMESPTYTPEVVHPTAIEPDGSTVTPCDWVIPDIASNPFLPASTQTEDADSLRMSTRPLRRKHVPRGERQAILARRNWQFEASISRNMATATEDTISDAEEGDDWTEQGSGVDHTQSKPRVISNVDDNDGVVYEDDADENEGYLFTRQYEDTDEDIEIDGSQDELTATDVPDPYDKVYSNIPEETHMLKIVPNCGYCTAKKFEYETPGFCCRGGKVELAPLETPPQLKRFFNGHFSFTNLYCCLDSMTTNVRDSGIYTFRAQGMMYHNIKSFGREGGAEHKHLELYFYDDDPTLEHQYHKCREEHQQKDKEDRLRVDLYQGLVDSMPDGDIRAEKFGKPDIFLTMTWNPNWDEIRRELLPGQTPQDRPDLVVRVFHAKLQELKHRLTKHDILGKVRAYVYVVEFQKRGLSHAHFLLIMQRKYKLTCPEQCDLLISAEIPSNKYPELRKMVIKHMMHGPCGLLNPNCPCTKGRKSCKNHYPRPFSDTTLQGKDSYPVYKRRDDDHKEKARGCEPDNRWVVPYNPYLLRLFNCHINVKACGSIKAVKYLFKYIYKGHDRASVVMRDASKADDDVDEIKQYRDARWVTPPEALWRIYGFELSQISPPMMQLQLHLPNMHMVAFHERQMVERVVNRPGVDRSMLTSYFEANRLHDEGERYYLRVLLNRVTGATSYVDLRTVDGVTLPTFREAAERRGLLESDNTLDECLTERAIFQMPSSLRWLFATILVYCEPSDVAVLWHKHKDSMFEDYQHKSQNKTHVEQMVLIDIRNMLQSMGKDIKTFPIPPIIDAYDDAIGTAREVYEEESIEPTTGDVALKYSLNKEQRAAYDKIMSAIDTDQGGLFFVDGPGGTGKTYLYKTGTTELLRKASLIIWDEASMTKRQAVEALDNSMRDIMGRPALPFGGKTIVFGGDFRQVLLVVCKGSRAQVVASSLRMSYLCESMSHLKLVSNMRAKNDPWFAEFLLRVGGGTEDTNSDGDIRLPDDVCVPYSGSDSDLDNLIDFAFPNLNENMSDSTYITSRAILSTRNDWVDMINVKMIDRFQGEHMNIDPANGLCNGTRLVVRGFQRNSIDAEIVLGQHIGKQIFLPRIPPCPSDEEMFPFQFKRKQFPVRLSFVMTVNKAQGQTIPNVGVYLPEPVFSHGQLYVALSRATTRSNINILVIPAVDGRKKSWKGVKKNPTVDCGTYTKNIVYKEVIDCYINLIKAQKHLKCRSGGRVHIENAFQFNFLKQDGDVEIKTEELYPIKDMTQICSAERRVLLYLGHDMVFIPINIRETHWYLAIIHARNMETQVLDSLGTSQDRKDLTDSIKGLQRQIDMISQRKELKDHRWPDLQVASWPLREIDMGYAKHTDSSSCGLFLLNYIEYWTGDELSDSFTQDDMSHFRKKMAAILLSSDLNKRRGCLLNKNEKEVDSGSPSDVEILENPTDSNKRKLLHVLDDSEVLMPWKFNGCHALFVIDHVKKHVTFIDFTPTQDWCKHVPYKRFNTSYLVLQAMAMWGNDRRLKFVGRNLNSLGVDGRLFIIGFQGGIAAEVNLQAVLARRLTIQAAGLRNKSLANKAEIVSEVEKNVWPAVTAGKVKPVIYKTFPLCEAAEAHRLMEATTHIGKILLLP

SEQ ID NO: 11750 - protein, 868 aa, Zea mays
  VARIANT 534..868: note = Derived polymorphism lacks residues 534 to 868
MVSKSYSNLLDMTPGDGFDFRRPFKSLPRVVTSPSIISDHDWDSISDGDSVGSAFSIERKIIVANFLPLNCTRDETGELSFSLDHDSLLMQLKDGFSNETDAVYVGSLKVHVDPREQDQVAQKLLREYRCIPTFLPSDLQQQFYHGFCKQQLWPLFHYMLPICLDKGELFDRTLFQAYVRANKLFADKVMEAINTDDDYVWVHDYHLMLLPTFLRKRLHRIKIGFFLHSPFPSSEIYRTLPVRDEILKSLLNADLIGFQTFDYARHFLSCCSRLLGLHYESKRGYIGIEYFGRTVSLKILSVGVHVGRLESVLKLPATVSKVEEIEQRYKGKILMLGVDDMDIFKGISLKLLALELLLDRNPKLREKVVLVQIINPARSTGKDVQEAITEAVSVAERVNTKYGSSSYKPVVLIDNRIPFYEKVAFYAASDCCIVNAVRDGMNLVPYEYTVCRQGNEEIDRVRGLDKDTHHTSTLIVSEFVGCSPSLSGAFRVNPWSVDDVADALCRATDLSESEKRLRHEKHYRYVSTHDVAYWAHSFAQDLERACRDHYSRRCWAIGFGLNFRVIALSPGFRKLSSEHFVSSYNRASRRAIFLDYDGTLVPQSSINKAPSEEVISILNTLCNDPKNVVFIVSGRGRDSLDEWFSPCEKLRLAAEHGYFIRWSKEAAWESSYSSPRQEWKHIAEPVMQVYTETTDGSSVESKESALVWHYLDADHDFGSFQAKELKDHLERVLSNEPVVVKCGHYIVEVKPQGVSKGRAVDKLIQALANNNGKAQDFLMCVGNDRSDEDMFECINGMASNDVSSTTVPEVFACSVGQKPSKAKYYVDDTSEVIRLLRDATRFSSSQRREDVNASRGRVTFRDALDYVD

SEQ ID NO: 11751 - protein, 206 aa, Zea mays
  VARIANT 137: note = Ancestral polymorphism is R, Derived polymorphism is Q
  VARIANT 74..206: note = Derived polymorphism lacks residues 74 to 206
MCSTARAKQFDMSLFYPIAPAEVEGLLLSHPEILDAIVIPLPNAEAGEVPIAYVVRSPDSSLTKVDVQKFIEKQVSLCYGHESYRDTQISQSKCGSDIGGGYELYVDEAKPRGDDQRGDGRSSGCSGGRFGDRSGGRRGGGRFGERSGGRDGGGRCDGRRGGRDGGRGFGNKQSAGTPSAGKKTTLVMIDDERGGCCKRRNDLLIQ

SEQ ID NO: 11752 - protein, 92 aa, Zea mays
  VARIANT 34: note = Ancestral polymorphism is S, Derived polymorphism is F
MKAMKYGSVPVQLNFSSDESRESKGHECRNTVMSQYIISTYGDLSLSQALDDFKNDPSHWDRQIKDGMARGSSWDAKCYSLHWEAYSSITKL

SEQ ID NO: 11753 - protein, 485 aa, Zea mays
  VARIANT 428..485: note = Derived polymorphism lacks residues 428 to 485
  VARIANT 383..485: note = Derived polymorphism lacks residues 383 to 485
  VARIANT 298..485: note = Derived polymorphism lacks residues 298 to 485
  VARIANT 137..485: note = Derived polymorphism lacks residues 137 to 485
  VARIANT 47..485: note = Derived polymorphism lacks residues 47 to 485
  VARIANT 31..485: note = Derived polymorphism lacks residues 31 to 485
  VARIANT 5: note = Ancestral polymorphism is N, Derived polymorphism is K
MDIFKTFIELLRQTGNVTKGQGDIDESSPRWLLKQEVPKVVKSINRQLREKSIKTKVGAFSVLKELVVVLPDCLADHFGSLVPGIEKALNDKSSTSNLKIEALVLTRLVMASHSPSVFHPYIKALSAPILSVIRDRYYKVTTEALRVCGELVRVLRPNLEKTVVDFEPYIGPIYNAILGRLANQDQDQWMNMPNLLEVIDFKDTFLDANHVQQSFPDYQEMYEDASQVAVDAVGSIRTVASFCAEKIVVAAYRDKCEALRKQGIRNGVIGGLGYGFSFLMLFFTYGLCFYVGAQFVRQGKTTFPDVFKVFFALVLAAIGVSQASALASDATKARDSAISIFSVLDRESKIDSSSGDGMTLEDVSGKIDFRNVSFKYPLCLDVQIFSDFTLRIPSGKTVALVRESGSGKSTIIALLERLYDPDSGRISQDGVECTQMTNLTCSYWVQCPSGSSYGLTETCAGAAFTEWDDTSVGRVGPPLPCCYVK

SEQ ID NO: 11754 - protein, 181 aa, Zea mays
  VARIANT 95: note = Ancestral polymorphism is Y, Derived polymorphism is H
MGGSGVGGGGRKARNFATFCLFPRAGAADPNDRVFVRVDNNDYTVPGFADEDSFDPSLSDPSFGDGNFLSASGPLPEYVRREILELGLPDDGYNYLSHLRELRPAAVAASSFVPSSTARPEPVPLDVKAYDASRVRVGPSEGELDEGKTMCKVAAKTAPVRRIEKAVDDCWMRMRMSQSQE

SEQ ID NO: 11755 - protein, 215 aa, Zea mays
  VARIANT 184: note = Ancestral polymorphism is R, Derived polymorphism is H
  VARIANT 178..215: note = Derived polymorphism lacks residues 178 to 215
  VARIANT 168..215: note = Derived polymorphism lacks residues 168 to 215
  VARIANT 146..215: note = Derived polymorphism lacks residues 146 to 215
  VARIANT 118: note = Ancestral polymorphism is Y, Derived polymorphism is S
  VARIANT 76..215: note = Derived polymorphism lacks residues 76 to 215
  VARIANT 45..215: note = Derived polymorphism lacks residues 45 to 215
  VARIANT 41: note = Ancestral polymorphism is R, Derived polymorphism is L
  VARIANT 40: note = Ancestral polymorphism is L, Derived polymorphism is H
MGMRDKKRNQKRVLARRTAAPRPGEGKDFLPLEGGPGKKHLKVQQPEEPENTATIVYIGHIPHGFYEDEMKGFFKQFGDIKRLRIARNRKTGKSKHYGFIEFENPAVAKVVADEMNNYLLFERTLQVALVEPEKVHPKLWKGVRRGFIPVDRVAIERKRHNKDKTVAEHKKMVEGIVKRDGKRRKRIKAAGIDYECPALVSKPFVAAFSLFNGIS

SEQ ID NO: 11756 - protein, 71 aa, Zea mays
  VARIANT 53: note = Ancestral polymorphism is P, Derived polymorphism is S
  VARIANT 51..71: note = Derived polymorphism lacks residues 51 to 71
MQRSEVALCRVGWWTHPRPWPTAAPQPASSSSRRPSPTSGSKARVGLLAPWWPIPNVGPGWLQGIPNFGPI

SEQ ID NO: 11757 - protein, 91 aa, Zea mays
  VARIANT 80: note = Ancestral polymorphism is L, Derived polymorphism is R
  VARIANT 23: note = Ancestral polymorphism is C, Derived polymorphism is F
  VARIANT 15: note = Ancestral polymorphism is I, Derived polymorphism is V
MRTAVHAALCIVLVIMSSTLSSCEDDEKVSIACDTGCNAAISRLKCFLMAYSEGKVLVSSNCETPTRCGCVFRHKQDATLIAGDVGNKKGY

SEQ ID NO: 11758 - protein, 694 aa, Zea mays
  VARIANT 58: note = Ancestral polymorphism is A, Derived polymorphism is G
  VARIANT 165: note = Ancestral polymorphism is A, Derived polymorphism is S
MAPRPRRRMLALPAVYPCEAIEPAPLLASLISLAADIAGLRAADVDALPALRGAAREAVRIVGLVLVLLDGIVRDAPAPDQAAVLGLSELHVALQKLRLLLADCARKGARLWVLMNAELSASELRVLLGSVATAMDALPGDVVRASADAEELAGLVSRQAWRAASRLRPDPEDDRAARAVRSVLARFASGVSPDAEDARLVLACVGVDTWLDCSEEAAFLEAELLERLETGSDSDNDNDLVLIGGLMAFLLYCRVVLFDRIDDSGKAATANRLPPRWAAGVNLNLEALQCPITLELMTDPVTVATGQTYDRASIKKWIKSGCRTCPVTGERLRSAELVPNVAARAVIEQLLLSRGVPLHEPSSKHRCAVDKTATPFGAAAAGGVRLSAAFLMARLSSGAPEDQKKATYEARKLSKRNVFYRACLVEADAVPWLLHLLSSTDASVQDNSVAGLLNLSKHPAGRRALVEAGGLGLVVDAVNVAAKVEARQNAAAILFYLSSNLEYCEEISRMPEAVPTLVRLAREGAYRGRKNALVSLYGLLQCADAHGRAVSAGAVDALAGLLGSSAGDDDLALDAVALLARLAEQPAGARAVMESSELVTRLVDLFGEAASRSAKEHCVALLALLGRHCGDKVLTLLGKLPGLMPALYAVIADGTPQAGKKARWLVNEIHRHYEQRQTPASAPAPTTGDRVIHV

SEQ ID NO: 11759 - protein, 202 aa, Zea mays
  VARIANT 39: note = Ancestral polymorphism is G, Derived polymorphism is S
MAKGGRGGLAVRWQGARTVEHGGGGSGRVRAPREARSTGWTDAGTGQAASPAQGRWANATREVVLRDRGRGLRASNTNTNQGMWLGYGVPVGAGGGAWASVHTQAGGLGVDASVVVGVGQESGWRGVCGVGGGGMIGGDGGDSGGAGTKLRAAAAAPDPCIPDDALVETFGLLPANSVHRFKCVSKAWCGLITDPLHRQRFA

SEQ ID NO: 11760 - protein, 304 aa, Zea mays
  VARIANT 27: note = Ancestral polymorphism is G, Derived polymorphism is R
  VARIANT 38: note = Ancestral polymorphism is T, Derived polymorphism is S
  VARIANT 46..304: note = Derived polymorphism lacks residues 46 to 304
  VARIANT 59: note = Ancestral polymorphism is P, Derived polymorphism is L
  VARIANT 93: note = Ancestral polymorphism is C, Derived polymorphism is Y
  VARIANT 97: note = Ancestral polymorphism is S, Derived polymorphism is C
  VARIANT 116: note = Ancestral polymorphism is W, Derived polymorphism is G
  VARIANT 133: note = Ancestral polymorphism is N, Derived polymorphism is K
  VARIANT 139: note = Ancestral polymorphism is P, Derived polymorphism is L
  VARIANT 201: note = Ancestral polymorphism is P, Derived polymorphism is L
MEERRNEAVIELILGISMQLERRHLVGKWATDLCRKKTMQSPRMAREMLKLAIHLTPAPDDMILVYEVSTELMNLMASGDDGDSSDTFHIINCKTKSSLAALSLQMIESSLTELDGGFGKLKAMLTLGYDCANIDEDQPADEIMLRLALEKGLYSRSTLVVQVLSSFAHMSPMDTQAEHFLKLTVKFYKLLTRMSKSQIAPKGYRQSIPSLKFQKLAEFIASEPFNVGGFDWAIYFYPDGKSGEDSAAYVSLFIALASEGTDLRALFELTLVDQSGKGQNKVHTHFGRSLESGPYTLKYRSSMW

SEQ ID NO: 11761 - protein, 158 aa, Zea mays
  VARIANT 43: note = Ancestral polymorphism is G, Derived polymorphism is E
  VARIANT 46: note = Ancestral polymorphism is R, Derived polymorphism is P
  VARIANT 106..158: note = Derived polymorphism lacks residues 106 to 158
  VARIANT 108: note = Ancestral polymorphism is L, Derived polymorphism is P
  VARIANT 142: note = Ancestral polymorphism is A, Derived polymorphism is V
  VARIANT 146: note = Ancestral polymorphism is Y, Derived polymorphism is C
MRQQPLPSHSTVGKQPFPMAVAMHLRKKKGGKHSMRENKKLTGTARYASVNTHLSCKLYSSTNLDALIDEFGLTFLHLLTEQSRRDDLESLCYVLMYFLRGSLPWQGLKAGTKKQKYDRISEKKMLTPVEVLCKSHPSEFTAYFHYCRSLRFEDVYGV

SEQ ID NO: 11762 - protein, 892 aa, Zea mays
  VARIANT 762..892: note = Derived polymorphism lacks residues 762 to 892
MAAVAPPPDNMDPPPATPPAATPAATLTPPPAATSTPPNPATPGPAAPSPNPNLPPAPASAPPAAFAPPMPPAPVSFAATFRPLGAPAPPPPHQVPQYGALPPNPGYPMPPPMQPPGVPVVMPPGSVRPPVMYGPPQPGAYMPQQGAAVPHPGMPRYPAPYPMVRPGFVPRPMPPPGVVTIQRPPIISGIRAIPPLVALTARPPPPAVMLADKPPTAVYVGKIAPTVDNGFLLSLLQLCGPVKSWKRAEDPSNGKPKGFGFCEFESAEGILRATRLLNKLSLDGQELVININDATKEYLKKHVEEKKRAQVKSKDASGDGTTAVAENESSKSVPDESDKETGDAGDKDSDESTKKFGIVTDEDSQADKDVAEKISSMIEQWLKTRPPPPPPPVQPSADSSGVDKAKNDSADKTDADTVKRAVNETERSETASPDRRKDREHDKDKRDKDIERHDRERERERIRRDREKDHKHREVDRLYRDRLKEWESREREKEYQRYSEKEKEKDREHNRRREILKQEDESDEEDNRKRKRRSSSSLEDRKRRRQREKEEDLADKIREEEEIAEARRRAVELQQQADEAAAAAAAAAEESATLMEVDADDEKETDAQNEPSVVEADNIPSFANSVGAVSFFSFSHWPGGLGKENNSEEISMVPSHTKQNNNVPVKKLGFGLIGLGKRTSVPSVFAEEDDENNVDKSIRPLVPIDYNEELQAVQANSSTGANVAAAAEFAKRISVSNSKEEKADTEKDRNRRSSEGRPSDERREKLHDREKDKSKSENKKILDAKQLIDMIPRTKEELFAYDINWVIYDKNELHERMRPWISKKIIEFLGEEESTLVDYIVSCTKDHVQAEKMLELLQSILDVEAEMFVLKMWRMLIFEIKKVESGLSGRAK

SEQ ID NO: 11763 - protein, 317 aa, Zea mays
  VARIANT 199: note = Ancestral polymorphism is E, Derived polymorphism is K
  VARIANT 200: note = Ancestral polymorphism is V, Derived polymorphism is M
  VARIANT 250: note = Ancestral polymorphism is S, Derived polymorphism is W
MEIATVDLRGVVPGGAGWEAARAAVTASMVAHGCVVVAHDAVGADLRQALFSRALPELFALPLEAKQRTVSPNGEFRGYIGQRPGMDWESLRVGKPTDAASVSGFAETLWPEGNPEFCDTIVAFAENMMELEGTVETLVLEGLGARGQSIRAHFGSLDHAVRLSHYGVPPDTESSMSMQPHYDDSVVTAIVQHEVEGLEMHAGDGRWVAVPAEVGTLTFVAGEQFRVVTNGRVPACLHRVRTPSNRERFSVLFGRRQKDGVAVRAMEDLVDAEHPLAYNPLRHEEYSRWRVTPGFRRQTECEPCTCQDQLFTYTAVT

SEQ ID NO: 11764 - protein, 272 aa, Zea mays
  VARIANT 134: note = Ancestral polymorphism is P, Derived polymorphism is S
  VARIANT 204: note = Ancestral polymorphism is M, Derived polymorphism is T
MPPIKVYAHRWSSPSRAVIIFCRVNKIDFEEVTVDLFKSRHRTPEFKKINPMAQVPVIVDGRFKLFERLKLTASLVTSSLEGGTQGDAVAVTGKARTSSGGRLQPTATDELGADWEQWKLGSLGTTSHCLISCPIQVRTKVTHGRPRPETTKHAEKSLMQSLARIESVWLKGDAKFLLGRSHPSIADLILVCSIMHLEVLDDDMRNRFLGGRKRILAWIDNVKKATSPHFEEAHVFLLEVKAQMQSKAAAAATAAKQGGSEASSELKFSSKL

SEQ ID NO: 11765 - protein, 387 aa, Zea mays
  VARIANT 296: note = Ancestral polymorphism is P, Derived polymorphism is L
  VARIANT 195: note = Ancestral polymorphism is W, Derived polymorphism is C
MEPTPAAPRIHLQSPQTAVPTRAVEPGRTRRITVAAPPLPPAALQRRTRVVLYYRADAAGADGRASVRLWEEAMWAKESLSEAVADHPEMGGRLRRHADGSWEVKLNDAGVRFTEATAEATLDEFLATAQDKDRAPSWEAALAPWADVNAEDPDVSALVYVQLTRFQGDGGFAVGVSCSLMLSDPLSLARFLASWARTHARMKAQNDAAAHPLMQYASYFRRPDARAARALVKSVPLDAFASADAAETVLFRARPTMLPAGAGAPPAPDHRALAVACVAQARERLGDGKVVPPQFPLVVFDCEGGVSVETCAAAAYGQPPSPSGGGRYKIDVALWEELGLEELVLRDSKPLHVSYSILGAGCDGLAVAMPAGAAGELLVAATVPKPK

SEQ ID NO: 11766 - protein, 502 aa, Zea mays
  VARIANT 23: note = Ancestral polymorphism is G, Derived polymorphism is A
  VARIANT 30: note = Ancestral polymorphism is A, Derived polymorphism is S
  VARIANT 49..502: note = Derived polymorphism lacks residues 49 to 502
MDNGGSNGSATASACCNGKINRGPHVAMLATPGMGHLIPLAELAKRLASRHGATATLITFASTASPTQRAFLASLPPAVSSLSLPPVDLSDLPRAAAIETRMSEECARSVPALTAVLAGLRRSTAGRLAAFVADLFGADSLDAARAAGVRRRCIFFPSNLHVLTLILHLPDLDAAVPGAFRDMPEPLRLPGCVPVPGPDVLMPLQDKADPCYRWMVHHGAKYRDAHAILVNSFDAVEPGPAKVLRQPESGGPSRRWPAVYPIGPLIHADGGRKDGASSSPCLEWLDRQPPRSVVFVSFGSGGALPAEQMRELALGLELSGQRFLWVVRSPSDGGAVNDNYYDAESKRDPFAYLPEGFVDRTCAAGVGLVVPSWAPQTQVLAHAATGAFLTHCGWNSVLESLVYGVPMVAWPLYAEQRQNAVLLSDGVGAALRVPESSKRREIIADTVREVMRGEGKGAAVRAKVAELQKAAAEGLRDGGAAAAALAEVVQGWTTTTGGGEKD

SEQ ID NO: 11767 - protein, 93 aa, Zea mays
  VARIANT 11: note = Ancestral polymorphism is P, Derived polymorphism is T
  VARIANT 58..93: note = Derived polymorphism lacks residues 58 to 93
MWLLAMVLISPCLVLIDHGHFQYNCISLGLTLGAIAGVLSRNELVAAALFTLAINHKQVDRILDKENFILEELLDEDEINQECKALNSILINL

SEQ ID NO: 11768 - protein, 422 aa, Zea mays
  VARIANT 70: note = Ancestral polymorphism is L, Derived polymorphism is P
  VARIANT 236: note = Ancestral polymorphism is R, Derived polymorphism is G
MQAAIDQSPHLRFRAGMDDKSCYVATGLSLAAILLVLHRLVVRAGGKGNAAARRLPPSPPAVPFLGHLHLLASECPLHSSLARLAARHGPVLSLRLGSRAAVVVSSPECAEACFTEHDVAFANRPRLTSQALASFGGAALAVSSYGPYWRNLRRVAAVRLLSTHRVACMCPVISAEVRAMLRRVGRAAEAAGRVQLKASLFELSLSVLMETIAQTKTSRADDADDAVSPEAHEFRRIVDEILPYLGATNLWDYLPLLRRFDVLGVRNKIRDVVGRRDAFLQRLIDAERRRLDGDGDGDEKKSMIAVMLSLQKSEPDVYTDTMIMALCGEPDEFRPERFRDGKAEGRLMLPFGMGRRRCPGETLALRTAGLVLATLIQCFHWDRIDGAEIDMTESGGLTMPRAVPLEATCKPREAMRHVLQQL

SEQ ID NO: 11769 - protein, 203 aa, Zea mays
  VARIANT 112: note = Ancestral polymorphism is H, Derived polymorphism is R
MAVAEVAIEILPQQQQQQPPPPPREPAVVPPNLSVPRVLQYLYLLSAWVACAGVAAGTVARRALGDSSPLVYGFLKVSIGALVFPALLILVFALRVLRAMLAVGFRRSLRTHAREIQIQATKIFRALTWKVLQDPIVLAWLASLLFILLLAASVLVFVGLLPMEESRRERIGYALSDVGVLGAMAMYCLIIIPSFALKIWRSK

SEQ ID NO: 11770 - protein, 566 aa, Zea mays
  VARIANT 217..566: note = Derived polymorphism lacks residues 217 to 566
  VARIANT 98: note = Ancestral polymorphism is D, Derived polymorphism is Y
MAAAQEKRLAIIGAGSSGLTACKHALAKGFRPVVFEAADAVGGVWARTLACTRLQSPAEAYRFSDFPWPPEVRPEEFPRSDQVAAYMAAYARQFGVVDCVRFGSKVLGAEYVGASEAEVAAWEQWSGNGEAFGDGTGVWHLTVQHGETEETQKYEFDFLIICLGRYGIAKVPTFPQGRGPEVFQGQVLHSMDYSRMPHADAHELIRGKRVVVVGSGKSGMDTVAQCARANGSKYPCTMVYRSANWMVDPNLAWGAFFKKMIGSRLAELMVHKPGEGFALSLLATVLTPMRWLMAKLAETYYRELMPMRKHGMAPGYNLSESMLLGWRIGLLPDRFYDMVEQGGIVLRRCDSFGFCADGLELDDGTGERVGADVVILATGFDDERLLTSVFVSPWFREIIVPKPSHTMLPLYRSVRRLSFKLLALARRPVRLIDLTMYISRSIAVSSARHCVHPRIPQMAVVCYVESAASIYPYEMMAKWVAHLLDGVVRLPSVAAMEENVAEWERWGRWAKRRSGAFFVKSCIAAVTTWYSDQLCRDMGRNPRRKRRGLLADWLQPYGPSDYAGIQ

SEQ ID NO: 11771 - protein, 403 aa, Zea mays
  VARIANT 360..403: note = Derived polymorphism lacks residues 360 to 403
MKRKNSGTTDLRAFLARAVAKKQSEQTSVAPSCNERHMQLVIFQERSNGGTCTIPSEQVKVEVEPPTIEHGEDSSDSESAHLNQFDSSDEGDRDGIYGIEHNPSLRLPISSYDVNDQDTIRRAYVALGPCRPNMNKDIFPQPECGDNNKFPGGDSFVSGGFRNWNMKVRFLRHAGAWWRDQDIVNAMDLLDFTKVELDVLRKDTGWEEFLKNVNSFCEKHKVKIVDMDEKQLVELNNRFDEVNTELLRCMPSFSPAKNFSAFDVEKLVKLAGHYPHDFQFEEKAQLPFQLNRYIEDVRNDENFKNLKVLAKLSMMLVKTDKILRYDIVYKLLKLVLVLPVATAGDERIFSSMNYIKNKLRSKMGQKILNGCLVTFIEREFFLYVKDEDIIAQFQSMKDQKVRL

SEQ ID NO: 11772 - protein, 240 aa, Zea mays
  VARIANT 16: note = Ancestral polymorphism is V, Derived polymorphism is M
MASVLEKIDEMLLLAVYNKVCTSLGASRRRWAPKPFVARSFKPPTTYSKPTPPRAMIGPVSSLSEPSPGPPSPSSSPSPAASSSGDEWGYTAIFERENGGGFLTDHFPTAGRPSGISKESMRTPLRYQIQEGTAGWHKVANEAARTIPGRENGGNCDIKNLSRGSKVYLPVFVEGANLSTGDMHFSQGDGEVSFCGAIEMSGFLELKFDMPRAYYHSRFEEESQDSAGVVLLLIQLPYWQ

SEQ ID NO: 11773 - protein, 216 aa, Zea mays
  VARIANT 3: note = Ancestral polymorphism is K, Derived polymorphism is N
MAKTKQGNKDVDSYTIGGTNKVVYVGDCVLMRASDSDNQPYVARVEKMEGDGRGSVRVQVRWYYRPEESKGGRRQFHGAKELFLSDHFDLQSAHTIEGKCVVHSFKNYTRLDNVGPEDFFCRFEYKAATGSFTPDRVAVYCKCEMPYNPDDLMVQCDACKHWFHPSCVAMTIEQAKKLDHFVCSDCFKENGSKRLSNAYATSPNFEPKAEPKRQRR

SEQ ID NO: 11774 - protein, 282 aa, Zea mays
  VARIANT 20..282: note = Derived polymorphism lacks residues 20 to 282
  VARIANT 185: note = Ancestral polymorphism is A, Derived polymorphism is D
  VARIANT 199: note = Ancestral polymorphism is G, Derived polymorphism is R
MNAGASTPVGIPIHGDELRWEERTRVRREVGHAQERNTLENELRLYGQPEKSIADSPEGQYFLLDSKVPEVVTRVEGLLADSDLGSGSEIFDVIVCGGTLGIFVATALSSKGLRIGIIERNIIKGREQEWNISRKELMEIVEIGILSEAELEQIISSDFNPNRCGFEDKGEIWVENILNLGVSPAKLVENMKERFISSGGAIFEEKSLSSIYVYDDLAVSKIIFFTTLLSLCKIRSGRKPDGMCLVVGACAHGFEKNTTSDIIFSSSSVKRAGNSGVQLFWE

SEQ ID NO: 11775 - protein, 272 aa, Zea mays
  VARIANT 50: note = Ancestral polymorphism is R, Derived polymorphism is Q
  VARIANT 56: note = Ancestral polymorphism is A, Derived polymorphism is V
MFTYVDPTFGGPKLEELLEVFWDLMPAYQDVLLQNLDIRRVIFGIFPTYRDSPLPAAFDRILQACDFLLTEALLLLHLQVFSITDALAFQVGDASGIQSPVSFGGFGSLTRHLGRLSSGICEAVEGDFLDAHSLQLLNPYMPNLSASWLFQRAMSVRPHVNVSPTFINELLFANFQSMQDVIQFGPLVKTLGLVMITRPQILPSIFKQVGLGVILEWSGHFMMLGYYTFLSTYIDPILRSWVESLPPRDKYQWKRYLEAWRYGAGLDYRQGE

SEQ ID NO: 11776 - protein, 390 aa, Zea mays
  VARIANT 323: note = Ancestral polymorphism is A, Derived polymorphism is V
  VARIANT 36..390: note = Derived polymorphism lacks residues 36 to 390
MVQLNGRSISLGTKVPLTGGDEVIFNSCGNHAYIFQHPLSDKVPKTVPSSAISLIESPVASVKRIRTYNCSFELPRKISGRLVVLLQYCFLSYLNDDRRNLLMNLYRTADLVEGVLQENISILHTPHHPISAAQFSIGQSKHCNLWLKYQPVSKVLCKLRRLEQGGPCELEVLGKKGMVQLNGRSISSGTKVPLTGGDEVIFNSCGNHAYIFQHPLSDKVPKTVPSSAVSLIESPVASVKRIRTYKRTGDTSAIALAVHFSTCCRGLARRDSLVKFCQKHGICVTAHTPLGGSTANAEWFGRVSCLDDPVIKSLAEKYGKTLAQLVLRWGLQRDTVVIPKTSKVERLQENFDVFGFDISGEDMERMKAVDRKYWTNQPAKLWASTCMLSF

SEQ ID NO: 11777 - protein, 93 aa, Zea mays
  VARIANT 50: note = Ancestral polymorphism is R, Derived polymorphism is L
  VARIANT 7: note = Ancestral polymorphism is G, Derived polymorphism is E
MEAEEYGEMMESVDEVTFALDELRPAAQKRTRRASLLALRGICASAERRRVLRSQGLVQQIIDAILVLDIDDPPCAIAAGALLFVLASDVSTS

SEQ ID NO: 11778 - protein, 172 aa, Zea mays
  VARIANT 109: note = Ancestral polymorphism is N, Derived polymorphism is D
  VARIANT 77: note = Ancestral polymorphism is R, Derived polymorphism is T
  VARIANT 62: note = Ancestral polymorphism is R, Derived polymorphism is I
  VARIANT 50: note = Ancestral polymorphism is V, Derived polymorphism is I
  VARIANT 49: note = Ancestral polymorphism is A, Derived polymorphism is V
  VARIANT 48: note = Ancestral polymorphism is V, Derived polymorphism is M
  VARIANT 45: note = Ancestral polymorphism is A, Derived polymorphism is T
  VARIANT 43: note = Ancestral polymorphism is D, Derived polymorphism is G
  VARIANT 42: note = Ancestral polymorphism is V, Derived polymorphism is I
  VARIANT 40: note = Ancestral polymorphism is C, Derived polymorphism is Y
  VARIANT 35: note = Ancestral polymorphism is K, Derived polymorphism is M
  VARIANT 33..172: note = Derived polymorphism lacks residues 33 to 172
  VARIANT 32: note = Ancestral polymorphism is T, Derived polymorphism is A
  VARIANT 29..172: note = Derived polymorphism lacks residues 29 to 172
  VARIANT 24: note = Ancestral polymorphism is S, Derived polymorphism is R
  VARIANT 13: note = Ancestral polymorphism is A, Derived polymorphism is T
  VARIANT 9..172: note = Derived polymorphism lacks residues 9 to 172
  VARIANT 5: note = Ancestral polymorphism is V, Derived polymorphism is A
MRLSVGVAREFLALQDRLGFDKASKTLNWLLAQSKPPIDCLVDAADQVAVVTGGRPTLVKGREQGSNSSTCCLTDLRAGVLLPVLLAGRGVDEMQRPNAKALVGEAANNLQEYFRTMYKKVAEADIEEFEAKYRGSDYEKTDLKDLYTKYKGNMNRNNYLLYHIVKSEIVLQ

SEQ ID NO: 11779 - protein, 522 aa, Zea mays
  VARIANT 87: note = Ancestral polymorphism is P, Derived polymorphism is L
MAALPRRRLLLFLALLRVLICGAAPFRARDLLPLLPRRMAWQLMGATAHSAVDLLPSFVGAVAPGGPAAAWRGACFDENQAVLDLTPGRNGTAGGLGGAVLRLKTASPQSWTCMDLYVFATPYRVAWDYYMRSNENHTFEIKAWEDAAEMEYVKQHGIAVFLMPSGMLGTLLSLADVAPLFSNTGWGQDANLAFLGKHMGASFERRRSANTIIRREDVRSGDFLALSKIRGRWGGFQTLEKWVTGAFAGHTAVVLKDGDANLWVAESGYENNKGDEIISMTPWDEWWGMALKDESNPQIALLPLHPDVRARFDESAAWEFARSMCGKPYGYHNMIFSWIDTASDNYPPPLDANLVMAIMSMWTRLQPRYASNMWNEALNKRLGTEKLDLHGIIRETERRGLSFNQLLTVPERDDWEYSDGKSTTCVAFILSMYKAAGVFAPYTESIQVTEFTIRDAYMLKIFEDNQTRLPSWCNAAADGLPFCQILGEYKMGLPEYNTIEPYANMNENCPSAPPTYSRPSRC

SEQ ID NO: 11780 - protein, 169 aa, Zea mays
  VARIANT 21: note = Ancestral polymorphism is P, Derived polymorphism is S
MERGAVVLPLQGAGVGRVLLPVQVRVRSFLRSRRATERRRRLASSAAPARCSKMYVPGFGEGSPERKAAINLQHFFNYIAVSIVLAQLECMKLLRHVWFRLLETNSLEDSGGILTLSDELMRLQVRSAYVKNEFEWDNLKELSFKMVDEANTKLMRDYVVEVSHIEDEN

SEQ ID NO: 11781 - protein, 220 aa, Zea mays
  VARIANT 120: note = Ancestral polymorphism is I, Derived polymorphism is F
  VARIANT 150: note = Ancestral polymorphism is V, Derived polymorphism is D
  VARIANT 170: note = Ancestral polymorphism is N, Derived polymorphism is S
  VARIANT 177..220: note = Derived polymorphism lacks residues 177 to 220
MPEAHANLASAYKDSGHVETAIISYKQALRLRPDFPKATSYILYRYVSSDFGNHPLSHLMGSVFGMYDRANIEVFCYALSQNDGTEWRQRIRSEAEHFVDVSAMTSDNIAELINQDKIQILINLNGYTKVINNDVRSVNSLSILDISVIVSVISCLVSSNDCRLLFSCCNMYLWVFWGKLFSLTFEDCDCYFVGTTDICYWCYIESEYLAMELSRFIRKQ

SEQ ID NO: 11782 - protein, 249 aa, Zea mays
  VARIANT 173: note = Ancestral polymorphism is T, Derived polymorphism is I
  VARIANT 168: note = Ancestral polymorphism is T, Derived polymorphism is I
  VARIANT 150: note = Ancestral polymorphism is K, Derived polymorphism is N
  VARIANT 143: note = Ancestral polymorphism is I, Derived polymorphism is K
  VARIANT 123: note = Ancestral polymorphism is G, Derived polymorphism is E
  VARIANT 117: note = Ancestral polymorphism is E, Derived polymorphism is K
  VARIANT 83..249: note = Derived polymorphism lacks residues 83 to 249
  VARIANT 1: note = Ancestral polymorphism is M, Derived polymorphism is I
MMDEICNWASYRGQILTRTVRGMMYYRKALEIQCLQDMTDPAKVDQDRPIGSYQGLQSDIEMAQAIVDIKFTYVVSCQVYGMQKKSKDLNEKRRYQNILSLMIMNPSLRVAFINEVEAPTRNGATEKTYYSVLVKGGEKYDEILERENLKTKIMDFIKFDVGNVVMVTGGRNTGRVGVIKNREKHKGSFETIHVEDSVGHQFATQMGNVFTIGKGNKPWVSLPKGRGIKLSIIEEQRRRDFIAQAAANA

SEQ ID NO: 11783 - protein, 177 aa, Zea mays
  VARIANT 150: note = Ancestral polymorphism is D, Derived polymorphism is Y
  VARIANT 100: note = Ancestral polymorphism is G, Derived polymorphism is R
  VARIANT 35..177: note = Derived polymorphism lacks residues 35 to 177
  VARIANT 25: note = Ancestral polymorphism is S, Derived polymorphism is N
  VARIANT 24: note = Ancestral polymorphism is G, Derived polymorphism is R
MVKGENLMNGECTKIKVWLNDLAGSEWAAKTDAQGERLKQAQNVVAILNYRNSKLTQLLKDSLSGDSKTLMFVQISPNENDVGETLCSLNFTRVWSIELGQAKKQVDVGELSRYKLMVGRAKQDSKNKNAHNKSMEERIQALEVKNKVKDMLTLNLREKSNPTQYLVMEPNPIDTQS

SEQ ID NO: 11784 - protein, 317 aa, Zea mays
  VARIANT 47: note = Ancestral polymorphism is A, Derived polymorphism is S
  VARIANT 76: note = Ancestral polymorphism is A, Derived polymorphism is V
  VARIANT 214: note = Ancestral polymorphism is D, Derived polymorphism is G
  VARIANT 286: note = Ancestral polymorphism is R, Derived polymorphism is S
MASLTMPPVPAWPRQDAIDLHKAFRGFGCDSTTVTNILAHRDATQRSLIQQEYRAVFNQDLARRIASELSGHHKRAMLLWILDPATRDATILKQALTGDITNLRAATEIVCSRTPSQLQIMRQTYRARFGCYVEHDVTERTSGDHQRLLLAYLAIPRAEGHEVDPSTVTLDARDLYKAGERRLGTDERAFIRIFSQRSWAHMAAVARAYHHMYDRPLERAVKSETSGNFGFGLLTVLRCADSPARYFAKELHRAMKGLGTSDSVLIRVVVTRAEIDMQYIKAEYHSMYKRSLADAIHAETSGNYRTFLLSLVGRDRT

SEQ ID NO: 11785 - protein, 276 aa, Zea mays
  VARIANT 195..276: note = Derived polymorphism lacks residues 195 to 276
MDVDGPAPADASARPATNGEAPSGAREVDVGEEDTLAGVLRSFVDGVWYPDEPLLRRLRAASCDAAPRLRGASRNSARDLLEWTRRGSGLRAILVISVGTITLIALTGLLTFMFFLLVATANAIIVSVLMSLAAAGGFLAIFFACLVAVYIGAVSVAIFVISATVISAVVGILVATALTKNSCRYDSLEKMKGYYDAQYLERLGWVLLDYLVHRKEEHGPDEALLRHDELGNPIVFRVPASEAEACRLRLVGCVLYEADISIYVNHGFAVCLFVRV

SEQ ID NO: 11786 - protein, 445 aa, Zea mays
  VARIANT 106: note = Ancestral polymorphism is H, Derived polymorphism is D
  VARIANT 243: note = Ancestral polymorphism is A, Derived polymorphism is V
MVLVVEKNKENELTWRCGALQGILKEAHSLFAMFHGPIRTLLHKQPSAELARGHLRTFLTDYLSGGTDFNVGKKLQFPTYRDSLKERGTVQMLTVSREVALDVQLHRFILFIPTIEVLVFQSLATVLGSCLGNVTCQSLVLFEDLLVSTTLPPDDTLNLYTYAVLRLTPRALYSNASSWSYLRKGTSVSAGQTSSSSNGTTAGERYRSRSRDTSPGGQNQMNRNFRPLLREKLSKGKDGFVAADFTATEARCAVPSTPILWFQQADECMHLCIYQHKSLTILLLVPASSVINGEEGITHVKKAMLENASQKIVTVEQKLTRGWGGENAYHVSGYRYLLVDPERRVSRASPPGKVTTLAKDSLLALNMLRQEVDLEKSRYKRGDPCHDKDFEVCIRTKNNAWVIAKISQGRELYMALEKGGETLLYASTAVEKFSNRYCEGAFSTD

SEQ ID NO: 11787 - protein, 695 aa, Zea mays
  VARIANT 432: note = Ancestral polymorphism is R, Derived polymorphism is W
  VARIANT 404: note = Ancestral polymorphism is S, Derived polymorphism is L
  VARIANT 141..695: note = Derived polymorphism lacks residues 141 to 695
MPLASLIYTQVPSALLACLEAADIAAAPAMARQRRAIGGARAAVPFALLALLASALPGLMAQNLAGDRAALLALRSALDSRGLLPWDTTELSPCGWRGVVCDNQTQAAGPGSRRVVELRLPGKRLVGTIPLGTVGNLTVLQTLSLRRNAITGGIPADIGNCAQLTVVNLTANQFTGAVPEGLFSLAALRQVDLSRNRLVGGVSEEFNRLKQLDTLFLDSNDLAGLLPPGLYLPNLSRFNVSFNAQLIGPVPASLARMPASAFRGTGLCDGPLPACTDSTPPAPPPAASSAGGEKKKHLSRWAIVGIVGGAALVLLLIMALVACFRRRQAAAAAAAGRPAGAAAANVHEATAPVTVTLARTDSDAVKQSHAPPLAPAMISEGKKLVFLGSTPERPYDLETLLRASAEVLAKGPLGTTYRATLDGGEPVLAVKRLREVHLSEDEFCNKATALGALHHHNLTRLRAYFYSKEEKLLVYDFVGAGSLSAVLHDGGAEGRARLDFTARARIALAAARGVAFIHHSGAKSSHGNIKSSNIVVTGTRDGAYVSDYGIAQLTGAAAPPRRGAGYNAPEVNDARSVPQSADVYSFGVVVLELLSGRAPLHALREGADGVNLPRWVRSVVQEEWTSEVFDAGIANEPRVEGEMMRLLQLGMECTEQRPDRRPTMTLVEARIERIVEDACQKADFSSTDGSRSVSA

SEQ ID NO: 11788 - protein, 320 aa, Zea mays
  VARIANT 87: note = Ancestral polymorphism is A, Derived polymorphism is T
  VARIANT 137: note = Ancestral polymorphism is I, Derived polymorphism is N
  VARIANT 217: note = Ancestral polymorphism is D, Derived polymorphism is Y
MLPTTATAAAPPPPTAGPASSPSEPHAALLLALTYMRLRELLSCARTCRGLREAVAGDPLLWLRLVVEPPLSHRITDEALLALTDRAQGRLRSLHLLGCPRVSDAGLLRIVERNHDVTELFVPRCTGLTADGLVKIIHFLHGQHKGNLSRVRLHGICKVNNHHLDIIKSLMCRGSQQQDAQALHYNHRVHEVLNTDDGRPIDVDLCPLCRNVRLVFDCTRKNCREVKDGRSRCRGCFFCVARCETCGGCIDLEELGESGLACSDFLCMDCWLKLPKCCTCNRPYCERHSNLKENLSASGQFTCQECAAFATSLRSRGEGY

SEQ ID NO: 11789 - protein, 464 aa, Zea mays
  VARIANT 101: note = Ancestral polymorphism is R, Derived polymorphism is C
MDRGKSTVARGRRRGPPPPLPVHAPHGRWRDTPPPSAAAWVQARRSTERPPAPEPARPSAGRELELLSWADLPADILGLIVSRLPRVDDRARLRSVCRAWRAAARVYGRPPPPLPLLVLSDFSFSALCAGGAMTGTRRIPLPSQEMAAGVRCVGSSDGWLVGVQLNEGRYFGDSQCFLMNAFYQDVVRLPPPSVNTHSLDAFSKSLPIANGSGAVQCTVNGARYVMSFCKVLLSSSPDHDGNCIVAAFSVHRSTASLALWRPGMASWCVCQGGCISKFSDIALYQGKVYMFSKVTTNLFVFDISEDERGLMVSRVERCVTELPDVKDSYGQRWNLVEWRGKLLLVVIYLGPEGWYNICKVGVFEVDLSTNPFRFTETNSLDGDCIFISPCSSNSFCACPYDGVEDDLIYFIGSLNHSRNASPLDKFVYNMRDGTLAPFALEITDDDLRAPDGSRMNPTWLLPSE

SEQ ID NO: 11790 - protein, 256 aa, Zea mays
  VARIANT 18: note = Ancestral polymorphism is R, Derived polymorphism is S
MSREENVYMAKLAEQAERYEEMVEYMEKVAKTVDVEELTVEERNLLSVAYKNVIGARRASWRIVSSIEQKEESRKNEEHVNLIKEYRGKIEAELSNICDGILKLLDSHLVPSSTAAESKVFYLKMKGDYHRYLAEFKTGAERKESAESTMVAYKAAQDIALAELAPTHPIRLGLALNFSVFYYEILNSPDKACNLAKQAFDEAISELDSLGEESYKDSTLIMQLLRDNLTLWTSDLTEDGADEGKDAPKGDAGEGQ

SEQ ID NO: 11791 - protein, 669 aa, Zea mays
  VARIANT 110..669: note = Derived polymorphism lacks residues 110 to 669
  VARIANT 181..669: note = Derived polymorphism lacks residues 181 to 669
MDEAATAALAAARGRWTQWEEVVVSNDRGSRLVHYYLRGNSEEKQLAVVGRERSPRHMSYAVQGRFLRALAAAAGAVAVAPSPSRSPLPAAGADGGAPRRWRSRREVVDWLSSLVSGHNYGSSSMATRCSRDSYDDSVNNCTQVTASKDVSSREPSNVFTWLGAPCYCPQRLKHYKSFCRRGITISVHSFVFIMSEEMKRLIAYVEDLYEDTNSCNMVKVQWFDKVDEVGVPLPMDFDDREIFFSLGRQDLNVECIDGLAAVLSVQHYEKFKGDTRYNLWQPYFCCRQIDNGDIKPFDVTQLQGYWSQEVLRTMFNATSSLKVRFKVPKSRPSSDGGLKRKRDAFNDDANPQKFISSGASTSRFYGENIQQLCPGCHVEVLSQDSGIRGCWFRCLILKRHKDKIKVRYLELQDADETGNLEEWVMLTRVAKPDQLGVRFLGRPMVRPQRVEQSKASCFDVGAIVDAWWHGGWWEGIVLYQVGSGRLQVYFPGEKRTAEFGEDELRCSLEWVGNKWNPLKGRKDVTSKLTSTADCGSEYLIAKQDPLNFHVPKNSEPQLEGHQYDKRGIEKSSVSTISRDQKRVLADLTNDLKLDNLRWRPRKRSRRSGSRKQSDTSSGSSSGDMDLFSPSPSGSFGQHNLVPDEETCKSSGEQTFMGVPVQVPNLVMSR

SEQ ID NO: 11792 - protein, 522 aa, Zea mays
  VARIANT 335: note = Ancestral polymorphism is D, Derived polymorphism is V
  VARIANT 27..522: note = Derived polymorphism lacks residues 27 to 522
MTASSEFPKPSSPRFLRPSSLVCIPIYPTRTSQKPTLLLASASDIEHSSSMATAPAPLSLSASTLPARLRAGVVPAGTRWRQPRRGRMVVRAKIREIFMPALSSTMTEGKIVSWSAGEGDRVSKGDAVVVVESDKADMDVETFHDGIVAVVLVQAGESAPVGAPIALLAESEEEVPLALAKAQELSNGQPQQAPPAPTEDAAAAPPPLPAATTAPAPVAAGTKGITSPHAKKLAKQHRVDLAKITGTGPYGRITPADIEAAAGIKPKSEPTPAAAAAPPPVAAPSVGAVPQAAVLPPVPGATVVPFTTMQAAVSKNMVESLAVPAFRVGYPIVTDKLDELYEKVKPKGVTMTVLLAKAAAMALAQHPVVNSTCRDGKSFTYNSNINIAVAVAIDGGLITPVLQDADKLDIYLLSQNWKDLVKKARAKQLQPNDYNSGTFTLSNLGMFGVDRFDAILPPGQGAIMAVGASKPTVVADKDGFFSVKSKMLVNVTADHRIVYGADLAAFLQTFAKIIEDPESLTL

SEQ ID NO: 11793 - protein, 132 aa, Zea mays
  VARIANT 38: note = Ancestral polymorphism is S, Derived polymorphism is N
MHKLMFYAIFHCRQLLGQQLSGLNVGDLQNLENKLETSLRNIRLKKDQLIFYQIQELNRKGSLMHQESMELYNKVNLLHQHNTELRRKVYGQGVNNEQTSTTVRHSTRNTENLPINLELSVQRDKSETPSVG

SEQ ID NO: 11794 - protein, 350 aa, Zea mays
  VARIANT 1: note = Ancestral polymorphism is L, Derived polymorphism is M
  VARIANT 17: note = Ancestral polymorphism is G, Derived polymorphism is S
  VARIANT 307..350: note = Derived polymorphism lacks residues 307 to 350
MQGRNGTVFYYGATGAGKTYTMLGTMENPEVMVLAMNYLFSKVTQKNHSIKLSYLEIYNETVSDLLSHGSPLNLREDKQAIVAASLTQRNVYSMDEVVIEYRSLDGVNVKRVGKLSLIDLAGSERALATDQRMQRSIEGANINRSLLAFSSCISALVEGKKHIPYRNSKLTQLLKDSTQQTTVNEEVLDQPDSESMLVLELQKENRVLREQLAKQQHKLLTAKAQLLTSKTSPQRSPAPLSHVSTPGSTQRKTRQSILAGGGGNYFSTLDSKRHAADNAQVRELQRKVSTLEPEIKKMKKEHLLQLKRKDDEHQRQQPFSSCCQRKKDSKPRGNRDTKESILQAASGIGI

SEQ ID NO: 11795 - protein, 137 aa, Zea mays
  VARIANT 11: note = Ancestral polymorphism is E, Derived polymorphism is G
  VARIANT 13: note = Ancestral polymorphism is G, Derived polymorphism is E
  VARIANT 19: note = Ancestral polymorphism is C, Derived polymorphism is Y
  VARIANT 32: note = Ancestral polymorphism is C, Derived polymorphism is Y
  VARIANT 47: note = Ancestral polymorphism is C, Derived polymorphism is Y
  VARIANT 56..137: note = Derived polymorphism lacks residues 56 to 137
  VARIANT 73: note = Ancestral polymorphism is W, Derived polymorphism is C
MNVGGEFFVGGAGLFGVICLCHRLRMSVAKFCEHAGGIPEKAGEIVCLENGMSIAQWFKFCIGVGGSIANTRCDWPEWAHMKSSPEEHILKSLASRNSGTGKMGLLSRYGKITGHMNKSTYSSDLSIEGGGHTNVNK

SEQ ID NO: 11796 - protein, 160 aa, Zea mays
  VARIANT 79: note = Ancestral polymorphism is M, Derived polymorphism is I
  VARIANT 70: note = Ancestral polymorphism is E, Derived polymorphism is K
MMASVPSRVALSAASRLPNLHAVAGDRSFIYKRRCPSLSIPMALSAAAPGKGGGVLDRPVEKITPGRQSEFDVKKSRKMTPPFRVILHNDNHNRREYVVQVLMKVIPGMTVDNALNIMQEAHVNGLSVVIVCSQSEAEEHCTSLRGNGLRSSIEPASGGC

SEQ ID NO: 11797 - protein, 370 aa, Zea mays
  VARIANT 235: note = Ancestral polymorphism is G, Derived polymorphism is S
MWEGGGFHGSHEALLLQAAGSGAADYGHGAGPALLPWLGPAAGAAPGFSYMAPHHAQPGPSGAEAAASPFGFGGGGYSDGGVGGQFGVFGGPETALPAPHGLAAAAGGGTSAMQHGSRMVSGLLGTLQMELGRMAAKEIMDAKALAASRSHSEAERRRRQRINSHLARLRSLLPNTSKTDKASLLAEVIEHVKELKRQTSAVLDVEGEEAAAARQRLQLLPTEADDLAVDATEDGEGRLVVRASLCCEDRAGLIPDIARALAALRLRAHRAEIATLGGRVRNVLLITAAADDDDGEGEGDDDDDDVEGDGGCAGGNASSSRRHELVASIQEALRGVMDCKTASSDTSSSSNGGGSMKRQRMSGAHEQGSL

SEQ ID NO: 11798 - protein, 177 aa, Zea mays
  VARIANT 21: note = Ancestral polymorphism is L, Derived polymorphism is I
  VARIANT 36: note = Ancestral polymorphism is L, Derived polymorphism is P
  VARIANT 64: note = Ancestral polymorphism is G, Derived polymorphism is A
  VARIANT 79: note = Ancestral polymorphism is D, Derived polymorphism is G
  VARIANT 81: note = Ancestral polymorphism is K, Derived polymorphism is N
  VARIANT 85: note = Ancestral polymorphism is E, Derived polymorphism is V
  VARIANT 92: note = Ancestral polymorphism is R, Derived polymorphism is H
  VARIANT 100: note = Ancestral polymorphism is V, Derived polymorphism is M
  VARIANT 118: note = Ancestral polymorphism is R, Derived polymorphism is I
  VARIANT 130: note = Ancestral polymorphism is A, Derived polymorphism is P
MMTISTVGVPNTIKMLASHKLQSTLAVSLHAPNQKLRETIVPSTKSYPLGALMDDCKSYFLETGCRVSFEYTLLAGINDEKEHAVELAELLRMCGGGYHVNLIPYNPIEGSEYKRPYRKVVQAFVDALEARKITVSVRRTRGLDANAACGQLRNEFQKNPLLEIELSPSTERTLITA

SEQ ID NO: 11799 - protein, 355 aa, Zea mays
  VARIANT 18: note = Ancestral polymorphism is T, Derived polymorphism is A
MGRSPCCEKIGLKKGPWTPEEDEKLLAFVEEHGHGSWRALPAKAGLQRCGKSCRLRWTNYLRPDIKRGKFSLQEEQTIIQLHALLGNRWSAIATHLPNRTDNEIKNHWNTHLKKRLAKIGIDPVTHKSTCGTLTGTTNDRSAKAAASLSHMAQWENARLEAEARLARESKTRTATPTPSALHAQPMDLPASAASPWLDVLHAWQGAKIDLESPTSTLTFTGSNGGMLPTPRTNGPEVSESNSAMSHYQMSDELEGEETYWQIFSKHQVPEVDSKESEDDFIGCEEPWFSGMAGVGAGMLLDVSNEHELSECWGESSSGQTVEHSKQASDKEDKDYWNWVLDRVNSELTAQSPSLV

SEQ ID NO: 11800 - protein, 178 aa, Zea mays
  VARIANT 80: note = Ancestral polymorphism is C, Derived polymorphism is Y
MAAARASVEELATAVQAESSSFVDPHRAGPPPDHACLGCRLRPASVVLLPYRHLSLWAAEREARRGRPRRSPSRLPRSPCTRSWSVEELAATGGDAGQAESSASAFVDPRCAGPPLDHTCLGCRLRPAFVVLLPCRHLSLYGAAMPCPACGRGAWRPSSAELSPPLIIDHPAVHLMSR

SEQ ID NO: 11801 - protein, 244 aa, Zea mays
  VARIANT 100: note = Ancestral polymorphism is A, Derived polymorphism is T
MASVTARAPVAALRPSSSSAFLGHSSRLGRTATASPTRRSLKAEAKGEWLPGLPSPAYLDGSLPGDNGFDPLGLAEDPENLRWYVQAELVNGRWAMLGVAGMLIPEVLTKAGLINAPQWYDAGKSEYFASSSTLFVIEFILFHYVEIRRWQDIKNPGSVNQDPIFKSYSLPPHECGYPGSVFNPLNFAPTLEAKEKELANGRLAMLAFLAFLIQHNVTGKGPFDNLLQHLSDPWHNTIIQTLSG

SEQ ID NO: 11802 - protein, 381 aa, Zea mays
  VARIANT 59: note = Ancestral polymorphism is P, Derived polymorphism is A
MEGERNDINVQRSDEILMPGFRFHPTDEELVSFYLRRKIQQKPISIELIRQLDIYKYDPWDLPKLASTGEKEWYFYCPRDRKYRNSVRPNRVTAAGFWKATGTDRPIYSSEGTKCVGLKKSLVFYRGRAARGMKTDWMMHEFRLPSLTDPKRPVDKTIPLNDSWTICRIFKKTSSMAQRALSHTWGPPLPGATAEADMFAALQSVQASELALERSLSLQAAPPAPAAGQFTSTHGLHSQHHHQQQKGVNNPSLDGASCRLINFTSSPSEEPENFPITFPFEVQAPHRAAAPVFFGAHPDNRLGGFVVDSSADVSGCIGGRSQDSSTGKPSSGFSANSSDWETAGRINFPFDLGADSSEEWRCSIPWESFLSPAAVQAELPR

SEQ ID NO: 11803 - protein, 119 aa, Zea mays
  VARIANT 48: note = Ancestral polymorphism is G, Derived polymorphism is W
  VARIANT 24: note = Ancestral polymorphism is K, Derived polymorphism is T
  VARIANT 9: note = Ancestral polymorphism is K, Derived polymorphism is N
MVQRLTYRKRHSYATKSNQTRVVKTPGGKLVYQYTKKRASGPKCPVTGKKIQGIPHLRPAEYKRSRLSRNRRTVNRPYGGVLSGIAVRERIIRAFLVEEQKIVKKVLKIQKTKDKTAAK

SEQ ID NO: 11804 - protein, 295 aa, Zea mays
  VARIANT 7: note = Ancestral polymorphism is H, Derived polymorphism is D
MAVRAIDTPLLLCTMVVVLTGLVSPSTAGLSLDTVRDFLTREEDTIVFSLIERAKYPLNRPAYDPLHSAAGRRLNASFVELFIRESEAVQSKAGRYQSLQEIPFFAYRVPSALAPPYNFTSDLYPAAASVNVNDAIWSMYFDELLPRLAKNGDDGNYAVAADADLACLQVRKQSPESITNVLSRRINYGRYVAEVKFRGDQQTYTSLIQAKDRDALVKLLTSEAQEDVVKRRVEKKAAVFGQSVTLDGPVQTDANSQANSSLFKVDPSVVYELYGQRVIPLTKQVEVEYLLHRLD

SEQ ID NO: 11805 - protein, 363 aa, Zea mays
  VARIANT 46: note = Ancestral polymorphism is W, Derived polymorphism is L
MTVVVDAVVPTDAAGAPAAAAAAPAVRPGNGQTVCVTGAAGYIASWLVKLLLEKGYTVKGTVRNPGTAHLKALDGAAERLVLCKADLLDYDAIRRAVHGCQGVFHTASPVTDDPEQMVEPAVRGTQYVVNAAAEAGTVRRVVFTSSIGAVTMDPGRGPDVVVDESCWSDLEFCKRTRNWYCYGKAVAEQAARDLCRQRGLELAVVNPVLVVGPLLQPAVNASIGHVLKYLDGSARTFANAVQAYVDVRDVADAHLRVFESPRASGGRYLCAESVLHREDVVRILAKLFPEYPVPTRFSNQKLRDLGLVFRPVSQSLYDTVKNLQEKGHLAVLGEQTTTTTTEAGREECPAADLQQQGGIAIRA

SEQ ID NO: 11806 - protein, 468 aa, Zea mays
  VARIANT 372: note = Ancestral polymorphism is G, Derived polymorphism is V
  VARIANT 69: note = Ancestral polymorphism is R, Derived polymorphism is P
MVEGEAEAEAEVKKGGVLQGRYELGHVLGHGNFGRVHEARDLRTGRGVAVKVLAKDKLLRTGMMEQIKREIAVMKRVSHPNIVELHEVMATRTKIYLALELVRGGDLLARIARSGRVREDVARRYFRQLVSAVDFCHARGVFHRDLKPENLLVDEAGNLKVVDFGLSALADHARADGLLHTICGTPGYVAPEVFRNRGYDGAKADVWSCGVVLYVLLAGSLPFPKDSIAAMFIKMSRRDYRCPPWLSTEARRLIPKLLDPDPDTRITVAQIVETPWFNKPSVSRAVTAAAAEPPAEAACSAKDSGGGDKDELPETLNAFHLISLSAGLDLSPLFDVEGGPARGHREDGMRFATREPASGVVSRLEEVAARSGGRMRVTKSGARGVRLEGAGRGGRKGRLAVAADIFCLAPSVLVVDIKKDGGDTLEYRSFCSEVLRPALKDIVWAADPHPAAAAVDAVRPPSDHCSGS

SEQ ID NO: 11807 - protein, 164 aa, Zea mays
  VARIANT 133..164: note = Derived polymorphism lacks residues 133 to 164
MSNGGGKGCRPRAKSMPPEKQLGISSFLPEPPSLPSSGKDSTSGANSISGTKRTLCARDSQGIPGSSSVGAKSVTNGDATARLPLEPGIDGTNTQVIASATGIVSIEDDKEDDEGHVGGNNQKRHKRCTSWVWEYFTKKNVVIEENGKKYEQVWGHCNFARCKA

SEQ ID NO: 11808 - protein, 83 aa, Zea mays
  VARIANT 50..83: note = Derived polymorphism lacks residues 50 to 83
  VARIANT 48: note = Ancestral polymorphism is S, Derived polymorphism is P
  VARIANT 38..83: note = Derived polymorphism lacks residues 38 to 83
MELTSFQRKRPSTANDSALLWRVSSWQSRSASLGCLNQESRTRAQKLPFQTALMRKQRKHHCWQNGPDHDSRKLSYKAQLECA

SEQ ID NO: 11809 - protein, 167 aa, Zea mays
  VARIANT 56: note = Ancestral polymorphism is A, Derived polymorphism is T
  VARIANT 27: note = Ancestral polymorphism is T, Derived polymorphism is I
MWSPQRRSRVGSGVDFDPFTVALLEATKAPSPLDGKDDVGGVAAVAPHGSSPTRPATCTASRSAEWRRWRLSDLLLFRSSSDGGRVNSSTCPSRGRAQQPSTVTIKASAAKREDMGKGWKHGDGDAAAAADSVAGCARLSPLQRLAKGLGAYSWHNHRGMAAPATKG

SEQ ID NO: 11810 - protein, 216 aa, Zea mays
  VARIANT 21: note = Ancestral polymorphism is I, Derived polymorphism is V
  VARIANT 23: note = Ancestral polymorphism is G, Derived polymorphism is R
MAASLLVLAVAFLVGSGSGGIDGGAAAPVEVEGTEVAYGSVIKLMHEKTKHRLHSHDVPYGSGSGQQSVTGFPEGDDSNSYWIIRPTPDSSSKQGDAIETGGIIRLQHMRTRRWLHSHLHASPLSGNLEVSCFGGDELSDSGDHWRLEIEGSGKVWKRDQKVRLRHVDTGGYLHSHNKKYNRLGGGQQEVCGVREKRAENIWLTAEGVYLPVNGSK

SEQ ID NO: 11811 - protein, 280 aa, Zea mays
  VARIANT 92: note = Ancestral polymorphism is G, Derived polymorphism is W
MDAPAPAVEIREVWASNLEEEFEVIRDVVDAYPYVGMDTEFPGFVVQPIAEYRFTCDRIYAGLEGNVNVLKLIQLGLTFSNEAGTLPPCGTGGQCCIWQFNFRGFNPHTDPYSPDSIDLLRRSGIDFDLFAVEGVDSTRFAELMMSSGIVLNDDVQWVTFHGSHDFGYLLRLLTGREMPNTLDEFLKLTKIFFPVMYDVKHLMKFCGPGLYGGLSRLGKLLKVERVGTGHQAGSDCLLTLQCFMKLKQLYLKESVKLYDGLLFGLIPGEVEIKTAPPPIG

SEQ ID NO: 11812 - protein, 597 aa, Zea mays
  VARIANT 482: note = Ancestral polymorphism is S, Derived polymorphism is L
MAAPRAAAASAKQVTRQNFAEAVLELRAHLEACDYVAVAAQKTGAPTGWRRALPVDTAETAYLKAKLAAESFQPLQIAVCPFRQRNSYPSTLVAYPYNFHLFPRDELQLGMPSYSFSCQPCYLSTIANDGFDFNMCIYDGISYLSRVQESLAREKIFTPRPHQLLSSPNTSVADSVFMNRIKSRIVNWRKRYADPSKKHDGSLVSSLSRLILGAETYGSRPSMSIDVCSDRQVQLVLEAVNHISDDLVSLVPHKAGVGRAVRVIFTNSKEDKNLLLMDIQKLEDEQNFKFRGFREVIDLLSSSQKPIISYSCLNDLTMLHTKFIAPLPPNMHEFMCSLKMVFPNVVDISHLWRQIGPLRKAKNIQAALSYLQRQYFVPIEIEIPQQDGTSSITKNEQNVLRITKLFAKLSNLLKISPECQLQSREQCTAVEEYCNIFYPSCVVGGSDDANFAFESDTTETVSTDNIIFLWGFREKSVKELKSYLIGLHQAFSEDFEVKLLDKTCSALIFRDSNTAMQLLKEIGSEGPSLNRFFSEGLKAAGFEVYKKVCRLGLWDSDLAEVLEDVSSELGVPTLPECSTSQIYWNSELMLDLKEYLE

SEQ ID NO: 11813 - protein, 548 aa, Zea mays
  VARIANT 376: note = Ancestral polymorphism is G, Derived polymorphism is S
  VARIANT 258..548: note = Derived polymorphism lacks residues 258 to 548
  VARIANT 125: note = Ancestral polymorphism is I, Derived polymorphism is T
  VARIANT 50: note = Ancestral polymorphism is D, Derived polymorphism is Y
MRAPSFSPSSDVLFVFPAFAPFFLPNLLPPPTVTTASRPMLVDTELYIFDTKNEIENRIRALTNEEPGEQDIDPEIGTAMYAEVPQEAIYTLQPRLQESKILIMRKIYVDNAKLSFKPVHGKYMIRLHPKTLLEEVNEDPQDFPKYTFHLTPFPELPQLEGNNEYFIDVIGCITALSDATPFQTSSGIVRMKRLIHLVDLRGNKIEVSLWGRRAEEFPGQQVFKASEMNHVIVIFVGTSVKSYRGSPPFLSGTAACRWYINLPEIHEINTFYASIGEQYQSIQKLHIQTMNEMQNKIEQKTFLEMKLVDPFDDMSKRFECTMIVTRIADNKPWFYQGCTKCNTSTRYEGKTYICKQGHISSQMVHRYKISLYATDGTYELEFVLFDERATSLIGKTVEKLLRQSNKSELPEEIKAIVGEKLTVVTKLFPGKSIKKRGPNKDNKDPTFDILSIKKRHGKDLLLSVFKKEEPVVLHSASSSQLPKLPPLVPIEPKTQDIQLMEIDQTSCFDNLSVSYKRNFNAIDDSDKEETHGADQLSVFAKRPKMKNN

SEQ ID NO: 11814 - protein, 322 aa, Zea mays
  VARIANT 191..322: note = Derived polymorphism lacks residues 191 to 322
  VARIANT 184..322: note = Derived polymorphism lacks residues 184 to 322
  VARIANT 153: note = Ancestral polymorphism is R, Derived polymorphism is W
  VARIANT 38: note = Ancestral polymorphism is C, Derived polymorphism is Y
MLWDILNSTYAFKAILKSHFKLLQKGSGCCSRIADCLCCMCCIRNNTVYDMFLCLSVEVAWRLPSFYTHHFCGIRDGQLSIPVTKRAESRSASTQGLGNAVSPSWNPSEIVGKKIKQVLGKVEDATKVQTLLFSATLPDWVNKLSMRFLKVDRKTVDLVGNEKLKASASVKHLALPCNKAARAQVIPDIIRCNTGVAVMLYEPRYKHSVSRLEWESGVKFEHISVPQPTDVAQSAGSEAADAIASVSDSVIPIFRQQAEQLLSSSSLSAADLLAKALAKAVVKICVLGLHGLKEKIIVIFLGGLQYTTSSNWQTDVVTWVSD

SEQ ID NO: 11815 - protein, 259 aa, Zea mays
  VARIANT 180: note = Ancestral polymorphism is P, Derived polymorphism is L
  VARIANT 174: note = Ancestral polymorphism is K, Derived polymorphism is N
  VARIANT 124: note = Ancestral polymorphism is S, Derived polymorphism is N
MRRTSKKSSSSTATASAGVEQVNEKQNRKRKGVSTNLTSRKAQRGPTKAVSKEVERIDQFFYTYADNSSGMIDPEGIETLCSHLEVPHTDVRILMLAWKMGCDKQGYFTLDEWRTGLKALRADSISKLKKAFPELVQEVILSPQILSYVQVTRPSNFQDFYIYAFRYCLTEDKKKCIEIPVACELLNLVLGLQFRPQVDKLNNYLMYQNDYKVITMDQWMGFIRFCNEINFPSLDNYDSDLAWPLILDNFVEWLRENKS

SEQ ID NO: 11816 - protein, 145 aa, Zea mays
  VARIANT 65: note = Ancestral polymorphism is R, Derived polymorphism is W
  VARIANT 58: note = Ancestral polymorphism is E, Derived polymorphism is K
MSDCRTDVYVNEVLMVLKSTKADNADLRGALRRFAVHMDDDIILMVLQKQRSNWAYTEMLDILGRMKKVRHMRQLFDEIPEERGYQMVVSSVLLVGYFKLIENILEKHNLYPSFFRSADDCIFMYEGLPIPVFFSYVGMHMTEDD

SEQ ID NO: 11817 - protein, 140 aa, Zea mays
  VARIANT 10: note = Ancestral polymorphism is R, Derived polymorphism is W
  VARIANT 31..140: note = Derived polymorphism lacks residues 31 to 140
  VARIANT 33: note = Ancestral polymorphism is V, Derived polymorphism is M
  VARIANT 38: note = Ancestral polymorphism is S, Derived polymorphism is T
  VARIANT 52..140: note = Derived polymorphism lacks residues 52 to 140
  VARIANT 82: note = Ancestral polymorphism is A, Derived polymorphism is T
MLLGGEDMHRFPVRSPRMDCGDLIRSPVARQIVSNYFSMFGPVQDVRIPYQQKRMFGFATFVYAETVKAILSKGNPHFMCDARVLVKPYKEKGKVPGRFRKLLHAHHGGAEFVGCASPTGLLDSRDPYALLLLSGAQVFS

SEQ ID NO: 11818 - protein, 133 aa, Zea mays
  VARIANT 100: note = Ancestral polymorphism is R, Derived polymorphism is S
  VARIANT 25..133: note = Derived polymorphism lacks residues 25 to 133
MEDNYDDEGEPIVNLDDREPSPEHQPYEDLDDDLDDGGDWTRDRSPTPVHGDDGGAGSSSKPRKHLLKKRDGGDMPSDDGLDDFGLADEDADPSAEERKRKGRASKEPLFPSPSARVRRRRSALVSPPTTPRQ

SEQ ID NO: 11819 - protein, 113 aa, Zea mays
  VARIANT 4: note = Ancestral polymorphism is N, Derived polymorphism is S
  VARIANT 6: note = Ancestral polymorphism is D, Derived polymorphism is H
  VARIANT 12: note = Ancestral polymorphism is A, Derived polymorphism is D
  VARIANT 13: note = Ancestral polymorphism is K, Derived polymorphism is T
  VARIANT 29: note = Ancestral polymorphism is V, Derived polymorphism is I
MAVNADDFFKAAKLDQPWDTTKSKVGSNVTLINVIQLPGLNMLGISLARIDYTPLGQNPPHTHPHAIEILTVLKGTLYIGFVTSNQADRSNKLFAKVLNKGVVFVFPQGLIHF

SEQ ID NO: 11820 - protein, 285 aa, Zea mays
  VARIANT 47: note = Ancestral polymorphism is P, Derived polymorphism is L
  VARIANT 39: note = Ancestral polymorphism is G, Derived polymorphism is E
MGIGKDGVLPWKLPGDLKFFKELTLTTSDLVKKNAVIMERKTWESIPVKSRPLPGRLNVILTRSGTFDFATVENVVICGSMESALELLASTPYCLSIEKVFVIGGGQVLREYLKGPACEAIHLTDIQSSIECVTFIPPVDFSVFQPWYSSFPVIESNIRHLFVSFVRVRKSVAETHESNGKESTEVDTKNDKFEKENFSFLPKMVYDRHEEYQYLNLVEDIIRSGAQKNDRTGTGTLSKFGCQMRFNLRKKIPLLTTKRVFWRGVVEELLWFISGSTNAKVCSDS

SEQ ID NO: 11821 - protein, 209 aa, Zea mays
  VARIANT 62: note = Ancestral polymorphism is R, Derived polymorphism is H
  VARIANT 85: note = Ancestral polymorphism is G, Derived polymorphism is D
  VARIANT 129: note = Ancestral polymorphism is R, Derived polymorphism is C
  VARIANT 131: note = Ancestral polymorphism is G, Derived polymorphism is D
  VARIANT 182: note = Ancestral polymorphism is G, Derived polymorphism is R
  VARIANT 193: note = Ancestral polymorphism is R, Derived polymorphism is S
  VARIANT 196: note = Ancestral polymorphism is A, Derived polymorphism is V
MPPVAAAPAAADQCGRHHAMILRRPGPSSNRITSLFHALALGSGGTLQGLDLLLEGGLLLVRGLQLVPEPCTPAHLLLMASLLRGEETLKALDLAVKRGGLALVGDSSLLGGGDLLRSAATRWTWIRGCYGRGLHLGVDLEVDVDVEEDVLSGEARLTVRWLNRSINRGHHHQRLIGFDADGGWSPSASSKVRFEAQAHDGATRLLLTR

SEQ ID NO: 11822 - protein, 127 aa, Zea mays
  VARIANT 26: note = Ancestral polymorphism is R, Derived polymorphism is P
  VARIANT 60: note = Ancestral polymorphism is E, Derived polymorphism is Q
  VARIANT 70: note = Ancestral polymorphism is A, Derived polymorphism is T
  VARIANT 75: note = Ancestral polymorphism is H, Derived polymorphism is Q
  VARIANT 76: note = Ancestral polymorphism is R, Derived polymorphism is S
MMKRMVIVRRCHPPPPPPVLLFGGCPSAGGVRYGECRRNHAASMGGHAVDGCREFLAEGEEGTAAVLHCAACGCHRSFHRRMVQRSCCFCCDSADVAVAAAAAAAAAAERWDDDCSPESSASSSTPR

SEQ ID NO: 11823 - protein, 263 aa, Zea mays
  VARIANT 175: note = Ancestral polymorphism is A, Derived polymorphism is T
  VARIANT 49: note = Ancestral polymorphism is G, Derived polymorphism is C
MAPDDAHLHAVQVAVVEREVATLERLVGGVVHEVALAAAAACIDEDVVGVLVVEVPSGGDDARGDGLAHVEESTGDVADAGLRRGVEANDADLGAVVEGVADEDAGDVADEADLTVEPVAGGEHLAGGAEVMAIADADGGLLELVPATKRLKGEPRAADERVADEACTCLELEVAWRRRGLALSEAMDGDAVVADSTDVALLEASNGASLSHRWALIVVPVGVEDRNPRYCSPEYYDRHGAACRSGRFRHPLEARYETSLMFV

SEQ ID NO: 11824 - protein, 211 aa, Zea mays
  VARIANT 42: note = Ancestral polymorphism is K, Derived polymorphism is N
  VARIANT 141..211: note = Derived polymorphism lacks residues 141 to 211
MFTAAQKDFGFIGFTARQSALDCIKMVNKDGVGEGSGKVPIKASLQRPRHAFKKYSRQGSSSLLGVRRGFVDKSSSGRGHHSDRYRHFSPVRPPSYKYGRTHLETRISEEYAEGRYTSKYPKHRYVMHGTMERDAYCRIKYGHSYQERAHRTCPYCKLCGQNYNYPNGEEFSTISGCQEAYYQTDRDLIPSTSQVASHCEGSCCKVGINKH

SEQ ID NO: 11825 - protein, 456 aa, Zea mays
  VARIANT 358: note = Ancestral polymorphism is G, Derived polymorphism is V
  VARIANT 270: note = Ancestral polymorphism is R, Derived polymorphism is S
  VARIANT 135: note = Ancestral polymorphism is A, Derived polymorphism is V
  VARIANT 109: note = Ancestral polymorphism is M, Derived polymorphism is V
MEHSCKFGPDGGYDSSSSGGSSPPASPRSGPSDSDGSSSSNADEVDRGTSRQLVTVSESSACVLHDIDRHQQRMLALLPAFSPPARAGARADALSRWLAGFDAGWVLDVGALDGGRDGGGLLSRREVGRRVKAWVQALSTMEHVFRLRHQKLKAAHVVAMGEFAAASAGAMLKLAGAVAALGSSPSKLLATLDVYVPVSEAFPVLARLFSWGPAHPVSVAVETALAELVDAARRCRRDLRSSFIRSHYPWRMPQGGEVHPCVGFWMGYFRCLLRNRISLYFILGGGDDHSDSEAPPPRAPAGGLGLVAELISCLETVLEEKSAALAFPGLRQVFMLNNTFAIVCRAMRSELKLLLPPGWVRVREQRMEAYINGYMDASWKPVVSLLDGGGTRTKPGAALGRRSNRLSAFFTSLENACSAQRCWKIPNPVIRGILRKTVTENVMPVYRRYLQEHPEA

SEQ ID NO: 11826 - protein, 64 aa, Zea mays
  VARIANT 55: note = Ancestral polymorphism is A, Derived polymorphism is T
  VARIANT 54: note = Ancestral polymorphism is D, Derived polymorphism is G
  VARIANT 33: note = Ancestral polymorphism is G, Derived polymorphism is S
  VARIANT 31: note = Ancestral polymorphism is A, Derived polymorphism is S
  VARIANT 29: note = Ancestral polymorphism is A, Derived polymorphism is V
  VARIANT 28: note = Ancestral polymorphism is V, Derived polymorphism is M
  VARIANT 24: note = Ancestral polymorphism is S, Derived polymorphism is G
  VARIANT 10: note = Ancestral polymorphism is L, Derived polymorphism is F
MAPHYQAATLIASLSYPNAIAWSGDNLVAVASSHIVTILFSMFEENIIKEACLDALKHEVELWR

SEQ ID NO: 11827 - protein, 387 aa, Zea mays
  VARIANT 2..387: note = Derived polymorphism lacks residues 2 to 387
MRSKCAMAISSSTSRTQDLVPLLCLLLMAAAAPQHSCASPPLPVTLPGCPDKCGNISIPYPFGTKEGCFKPDFEVLCNDSFHPPRAFIQMAGAKITVDDTYYKTNEDGMPDNDIGSSEWPIELVDVSVSEGKARVLGAFSYDCKMNDTYHAVRRQEIDLGYWMPFSMSDADDVLMGIGSNVVAKQTSGPQCQSYLLYQLSTRKTDDPVNGSCSGQGCCSANLRSGGMAATEVTIQKNTKDDGGFYGDGVSCSYAMIVDKSWYNFSSPDVDSDAFLRRNAAGVPVVVNFSFGVDGCPNASEPTPDDFACVSNYSTCIERPPVLDNVSIPYFCSCSAGYEGNPYIHGGCQDRRCGRLVGEGGTPVTSGRRRGYQGGGQGSGKHEQIDDW

SEQ ID NO: 11828 - protein, 59 aa, Zea mays
  VARIANT 56: note = Ancestral polymorphism is A, Derived polymorphism is V
  VARIANT 54..59: note = Derived polymorphism lacks residues 54 to 59
  VARIANT 37: note = Ancestral polymorphism is R, Derived polymorphism is S
  VARIANT 25: note = Ancestral polymorphism is S, Derived polymorphism is Y
  VARIANT 20: note = Ancestral polymorphism is D, Derived polymorphism is V
  VARIANT 15: note = Ancestral polymorphism is E, Derived polymorphism is K
MSTALYLTALRRKSEVNVIDAKTMSADLVAVVELPNRVPYGFHAFFVTEDQLARQAEGQ

SEQ ID NO: 11829 - protein, 196 aa, Zea mays
  VARIANT 136: note = Ancestral polymorphism is C, Derived polymorphism is Y
  VARIANT 127..196: note = Derived polymorphism lacks residues 127 to 196
  VARIANT 114: note = Ancestral polymorphism is V, Derived polymorphism is L
  VARIANT 102: note = Ancestral polymorphism is H, Derived polymorphism is Y
  VARIANT 35..196: note = Derived polymorphism lacks residues 35 to 196
  VARIANT 34: note = Ancestral polymorphism is R, Derived polymorphism is C
  VARIANT 30..196: note = Derived polymorphism lacks residues 30 to 196
  VARIANT 28: note = Ancestral polymorphism is A, Derived polymorphism is S
  VARIANT 22: note = Ancestral polymorphism is G, Derived polymorphism is R
  VARIANT 19: note = Ancestral polymorphism is V, Derived polymorphism is I
  VARIANT 17: note = Ancestral polymorphism is K, Derived polymorphism is N
MLDIAKCLYDAISRLEKAVEQGSVLAASIEGVECQLGGNFSAPHNLLETLRERMFKRSLSTIITENTKVATVSLSDPVCVATRKMRDLRVNSVIIMAGNSLHGIFTSKDVLMRVVAQNISPELTLVEKVMTAHPDCATLDTTILDALHIMHDGKFLHIPVLDGAKNLFVRYSLTEVLKLKHPKLHYQRSAVLTTME

SEQ ID NO: 11830 - protein, 398 aa, Zea mays
  VARIANT 297: note = Ancestral polymorphism is D, Derived polymorphism is Y
  VARIANT 282: note = Ancestral polymorphism is S, Derived polymorphism is L
  VARIANT 179: note = Ancestral polymorphism is T, Derived polymorphism is K
  VARIANT 68..398: note = Derived polymorphism lacks residues 68 to 398
  VARIANT 15: note = Ancestral polymorphism is R, Derived polymorphism is W
  VARIANT 10: note = Ancestral polymorphism is D, Derived polymorphism is V
MVGRRRVALDLCGVRHTSISKLATGLSGFIAQKRRTVCVLKLSEVRLGNGDGYQHGQCWRDVYDAICQARRLIYIIGWSMFHTIHLVRDGHDDMALGDLLRRKSQEGVQVLLLVWDDPTSRRLLGIKMEGYMGTRDEETRRFFKHSSVQILLCPRSAGKRHSWVKQQETGTILTHHQKTVILDADAGNHRRKIVAFMGGLDLCGGRYDTPKHTLFRTLQTFHKEDYYNPNFAVEDARGPREPWHDLHSKIDGPEAYDVLKNFEERWLKASKRSAAKKLSKLSRSHNDSLLWINKIPDIIAIDDEIYSNDDDPERWDVQNLVCGKNVLIDMSVHTAYVNAIRGAQHFIYIENQYFLGSSFNWDSHRDVGEHKNLLLPYDHLKFPKFRTVKYSTLQVLII

SEQ ID NO: 11831 - protein, 341 aa, Zea mays
  VARIANT 115: note = Ancestral polymorphism is R, Derived polymorphism is H
  VARIANT 99: note = Ancestral polymorphism is S, Derived polymorphism is I
MDGFGDDGLRDLFPRSDQIVGLGGYDFFSQSESSIPHGDPHGFQALDLNSQVQEFPDMSMYTCIIEGSGARVTGGGRAFSAAGLRAPRQGTRGGGRTVIAIGLRVPRNSTRGGGRGRSMPARADSGGARAGTMAVGAAGGTSSCGSMVFGVVGRGSRSMSASAASVGVVGRGGRRVASGRAQDVAGQETINLDGEQEGADEGFAPDPKMMKEWVDRWSNVEAENSKVLRQVLEEKKLALEEKKLAQEEKKQAKEDKRQAKEAMKQAMEEIKQAKEQALDAKIKMCEDMALECGASPDNIEFFFACATIVRDEYNREFFCNIPTPEASLVFLKRWCQMNNMY

SEQ ID NO: 11832 - protein, 74 aa, Zea mays
  VARIANT 7: note = Ancestral polymorphism is E, Derived polymorphism is K
  VARIANT 10: note = Ancestral polymorphism is E, Derived polymorphism is K
  VARIANT 39: note = Ancestral polymorphism is K, Derived polymorphism is N
  VARIANT 41: note = Ancestral polymorphism is A, Derived polymorphism is T
  VARIANT 43: note = Ancestral polymorphism is R, Derived polymorphism is C
MHMGNFEDAEGLLLESLNKDAKDTETLANLTVCSLNLGKPATRYLNQLKLAHPDLVKRMSSAAESFDRACQAMV

SEQ ID NO: 11833 - protein, 379 aa, Zea mays
  VARIANT 327..379: note = Derived polymorphism lacks residues 327 to 379
MAGSLSFSSALLLLLNMASALLAPSALPRAPASVGATADGGDGDIDFFFFPFLVFYKSGRVQRFMGTDTVPASTDPATGVDSRDVVVDAAAGLAVRLYLPSLATNCTGTTVTDDDGCGRGRLPLLVFYHGGAFVTESAFSPTYHRYLNALVSRARVLALSVEYHLAPEHRLPTGYDDAWAALRWALTNARSGPDPWLWRHADLARLFLAGDSAGGNIAHNVALRAGQEGLDGGATVRGLALLDPYFWGKRPVPSETSDEDTRRWHERTWSFVCGGRYGIDHPVINPVAMPREEWQRLACARVLVTVAGLDMLSARGRAYVHALKASEWRGDAELYETPGEYHVYFLDKPDSEKAAKEMDVVVNFINGGQVNKPASRMLT

SEQ ID NO: 11834 - protein, 463 aa, Zea mays
  VARIANT 65..463: note = Derived polymorphism lacks residues 65 to 463
MAAAAAFSSTSVVAALAASGFLGKKLVTSIIIRNKKKGYDSLHGATTTIRVRAMAVNKETEQDRWRGLALDTSDDQQDITRGKGRVDPLFQAPMGDGTHVAVLSSYDYISQGLRHYSLDNMMDGYYIAPAFMDKLVVHIAKNFMPLPNIKVPLILGIWGGKGQGKSFQCELVLAKMGINPIVMSAGELESGNAGEPAKLIRQRYREAADMIKKGKMCVLFINDLDAGAGRMGGTTQYTVNNQMVNATLMNIADNPTNVQLPGMYNKEENPRVPIIVTGNDFSTLYAPLIRDGRMDKFYWAPTREDRVGVCKGIFRSDGVPDEDVVRLVDAFPGQSIDFFGALRARVYDDEVRRWVAETGVENIARRLVNSKEGPPTFEQPRMTLDKLMEYGRMLVEEQENVKRVQLADKYLSEAALGDANDDDDLYGKAAQHVRVPVPEGCTDPKAGNFDPTARSDDGSCVYN

SEQ ID NO: 11835 - protein, 433 aa, Zea mays
  VARIANT 284: note = Ancestral polymorphism is S, Derived polymorphism is C
MAAAFSSTVGAPASTPTRSSFLGKKLNKPQVSAAVTYHGKSSSSNSRFKAMAAKEVDETKQTDEDRWKGLAYDISDDQQDITRGKGLVDNLFQAPMGDGTHVAVLSSYDYISQGQKSYNFDNMMDGFYIAKGFMDKLVVHLSKNFMTLPNIKVPLILGIWGGKGQGKSFQCELVFAKMGITPIMMSAGELESGNAGEPAKLIRQRYREASDLIKKGKMSCLFINDLDAGAGRMGGTTQYTVNNQMVNATLMNIADNPTNVQLPGMYNKEDNPRVPIIVTGNDFSTLYAPLIRDGRMEKFYWAPTREDRIGVCKGIFRTDGVDEEHVVQLVDTFPGQSIDFFGALRARVYDDEVRRWVSETGVENIARKLVNSKEGPPTFEQPKITIEKLLEYGHMLVAEQENVKRVQLADKYLNEAALGEANEDAMKTGSFFK

SEQ ID NO: 11836 - protein, 90 aa, Zea mays
  VARIANT 70: note = Ancestral polymorphism is A, Derived polymorphism is V
  VARIANT 58..90: note = Derived polymorphism lacks residues 58 to 90
  VARIANT 48: note = Ancestral polymorphism is A, Derived polymorphism is V
  VARIANT 46..90: note = Derived polymorphism lacks residues 46 to 90
  VARIANT 38..90: note = Derived polymorphism lacks residues 38 to 90
  VARIANT 11: note = Ancestral polymorphism is L, Derived polymorphism is P
  VARIANT 5: note = Ancestral polymorphism is T, Derived polymorphism is I
MFATTAVMDILGPLGSFILSVTWRGSQRIFYSHTVLTQKSPLGTVWIAAHFELFEQCQILSSIWWRLKSAVLSMASGANAVESCDTSSIM

SEQ ID NO: 11837 - protein, 206 aa, Zea mays
  VARIANT 156: note = Ancestral polymorphism is G, Derived polymorphism is W
  VARIANT 99: note = Ancestral polymorphism is E, Derived polymorphism is D
  VARIANT 90: note = Ancestral polymorphism is G, Derived polymorphism is R
  VARIANT 66: note = Ancestral polymorphism is L, Derived polymorphism is R
  VARIANT 37: note = Ancestral polymorphism is L, Derived polymorphism is M
  VARIANT 34: note = Ancestral polymorphism is Q, Derived polymorphism is K
  VARIANT 18..206: note = Derived polymorphism lacks residues 18 to 206
MIHVYVCFSNFGDRVKYWSTINEPNVETIGGYDQGILPPRRCSSPFSFGCEEGNSTMEPYVAAHHRLLVHACTVSLYRDKYQAEQGGRIGLTLLGWWYDPRTQTPNDVAVAARMDDFHIGWFMHPMVFGDYPPVMRKNVGSRLPTFTDEEAARVRGSFNFVRFNHALTRPPRNWIEAACRVVGQRFRLWRCWRGIGTREDSEFEME

SEQ ID NO: 11838 - protein, 300 aa, Zea mays
  VARIANT 241: note = Ancestral polymorphism is R, Derived polymorphism is W
  VARIANT 236: note = Ancestral polymorphism is S, Derived polymorphism is F
  VARIANT 215: note = Ancestral polymorphism is K, Derived polymorphism is N
  VARIANT 197: note = Ancestral polymorphism is R, Derived polymorphism is G
  VARIANT 171..300: note = Derived polymorphism lacks residues 171 to 300
MALAASSPLHAVPPAPALHTPPEKRGGTPSTGCTAGRHSVAHPSRWSGPPPSQHDSTSGDQVLGSQRPAVPAVQHDSDSTSGPRLRAFCCAGSSLCRAHCLCLCRSAVQVTSARSPRLTASAVQVLAFCCPRLRASRRMCIPSFGIPSLLPCWYSKLNVPLWSQKSVLDRGGKILFGGSAIESEGNFVQPTIVEITRSAPVVKEELFGPVLYVMKFQTLKEAIEINNSVPQGLSSFIFTKWPDIIFKWLGPHGSDCGIVNVNIPTNGAEIGGAFGGEKAAGGGREAGSDSWKQYMRRATW

SEQ ID NO: 11839 - protein, 391 aa, Zea mays
  VARIANT 258: note = Ancestral polymorphism is L, Derived polymorphism is I
  VARIANT 339: note = Ancestral polymorphism is S, Derived polymorphism is C
MALPKPRPPTPTASAATGTSSSRIDSPSLKAALAMALIHYNRLPGKANATAGTSPPSLLHWKRKAKDRKREILRLREELKVLQDGVRGEEMEPPVASCRCHFFDGCRDLRPQQGGGGGEHWVDEVLRRRFLRLVRWKEKRRRVDRSLPSSSLIDFNSEDEMQQLSMSTDFLVELSDGIFAKSEAGHSFATFSHQAVDFILATLKNILSSEREKDLVGEIIDSLVTRLMKRMCTVPEKLVTSDSGSTGCSDAQFSVQHLFRKLGNDEFIGQRVILVVSQKISNVSERLFLADPFADAFPDMHDNIFIMIQLLEFLISDYMKVWLCCEHINKRLFEECTRSILKARNDLQILENMNGLYVVYIERVVGRLARDVAPAAHQGKLDLEVFSKLLC

SEQ ID NO: 11840 - protein, 399 aa, Zea mays
  VARIANT 116: note = Ancestral polymorphism is S, Derived polymorphism is F
  VARIANT 107: note = Ancestral polymorphism is G, Derived polymorphism is S
  VARIANT 104: note = Ancestral polymorphism is G, Derived polymorphism is R
  VARIANT 95..399: note = Derived polymorphism lacks residues 95 to 399
MQGGSSGIVYGGLKYQASKQAPAAPSGTFFEPSALTTLSSLSALAGTVYRRRARGRQLDHLPRRDPQPQGGERGEGFGASVWKIPELNGQSNSPQLEQLFELSGHTGKIRRWTPVSVAASDVYHLYWFLTPLSCSFCSVIWWPLGKHDKLISIDDRNIFLWNVDMSNKSAKVISQGSADMLPNLSGGAWDPHNHNSIASISDSSLHLWDLRSMEKSSAIEHAHIRDVDYNPKKQHIIATTEDDFGICLWDLRMLKLPLKDLPGHSHWTWAIQHNPEYDELLLSAGTDSTVNLWLAKVSNNDSEPNSPSGSPNRQEEPLLNSYTDYEDSIYGTLQPSYFAYQLELREGITGLIKIVGIAWSSHDPSLFASLSYDGRVCCLGISQALLAEKMNLAGLTFGL

SEQ ID NO: 11841 - protein, 331 aa, Zea mays
  VARIANT 134: note = Ancestral polymorphism is A, Derived polymorphism is E
  VARIANT 143..331: note = Derived polymorphism lacks residues 143 to 331
  VARIANT 182: note = Ancestral polymorphism is N, Derived polymorphism is S
  VARIANT 203: note = Ancestral polymorphism is E, Derived polymorphism is K
  VARIANT 206: note = Ancestral polymorphism is G, Derived polymorphism is R
  VARIANT 214: note = Ancestral polymorphism is L, Derived polymorphism is M
  VARIANT 226: note = Ancestral polymorphism is S, Derived polymorphism is F
  VARIANT 244..331: note = Derived polymorphism lacks residues 244 to 331
  VARIANT 247: note = Ancestral polymorphism is D, Derived polymorphism is Y
  VARIANT 258..331: note = Derived polymorphism lacks residues 258 to 331
  VARIANT 272: note = Ancestral polymorphism is V, Derived polymorphism is M
  VARIANT 278: note = Ancestral polymorphism is H, Derived polymorphism is Y
MTANVRDSGIYTFQAQGMMYHNIKSFGKEGGSEHKHLELYFYDDDPSLEHQYHKCREKYLQKDKEVIKQIVGILHGNPYSEHLRIMGHVENLGDYHIALNLDQTLTQKTYNTPLTLEVGVSMDEVDAYHVTHRANNSNDEDAESATIYVCLYVTTTTTNSRFVPRRRDDGRKEKVRGCELDNRWVVPYNPYLLRLFNCHINVEACRIIKAVKYLFKYIYKGHDRASVVMRDASKADDDGDEIKQYRDARWVTPLEALWRIYDFELSQNSPPVMQLQLYLPNMHKVSFHERQMVERVINRPGADRSILTAYFEANRLHEGARGILYRDFPEW

SEQ ID NO: 11842 - protein, 82 aa, Zea mays
  VARIANT 10: note = Ancestral polymorphism is R, Derived polymorphism is C
  VARIANT 20: note = Ancestral polymorphism is S, Derived polymorphism is N
MWCDSYFKPCERKLKGSGLSCIRSNFSPLIQPLLRQFLGRLCIPSRLCDTSGNGEVTNFKYKHHCKIETDTCLYLKFVFSTQ

SEQ ID NO: 11843 - protein, 86 aa, Zea mays
  VARIANT 3: note = Ancestral polymorphism is G, Derived polymorphism is R
  VARIANT 4: note = Ancestral polymorphism is I, Derived polymorphism is N
  VARIANT 5: note = Ancestral polymorphism is V, Derived polymorphism is I
  VARIANT 7: note = Ancestral polymorphism is P, Derived polymorphism is L
  VARIANT 26: note = Ancestral polymorphism is L, Derived polymorphism is P
  VARIANT 27: note = Ancestral polymorphism is S, Derived polymorphism is L
  VARIANT 28: note = Ancestral polymorphism is Q, Derived polymorphism is P
  VARIANT 41: note = Ancestral polymorphism is L, Derived polymorphism is P
  VARIANT 42: note = Ancestral polymorphism is L, Derived polymorphism is R
MLGIVDLTKKRSTDDEAMFVTILRALSQAVSKIDIVYHHALLHNVMVNISYLVLQAVVMWGNGRQIEFVRDARILRRNFVIDLLSY

SEQ ID NO: 11844 - protein, 145 aa, Zea mays
  VARIANT 24: note = Ancestral polymorphism is R, Derived polymorphism is M
  VARIANT 76: note = Ancestral polymorphism is Q, Derived polymorphism is R
  VARIANT 124: note = Ancestral polymorphism is H, Derived polymorphism is R
MISSKKLAQLSKKMQGMGAVGRRRVTVVRKEINPSCSSIVAGKGNCIVYSSDGKRFEIPLSYLHTAVFVELLKLSQEEFGFTSDGRITLPCDKAVMEYVMCLLRREASEDVEKALLSSIVMSCHHTNRMVQPPSGVNHHFAVCSS

SEQ ID NO: 11845 - protein, 79 aa, Zea mays
  VARIANT 28: note = Ancestral polymorphism is L, Derived polymorphism is F
  VARIANT 26: note = Ancestral polymorphism is A, Derived polymorphism is S
  VARIANT 21: note = Ancestral polymorphism is P, Derived polymorphism is L
  VARIANT 6..79: note = Derived polymorphism lacks residues 6 to 79
MAATEQLKELGEKLQAVAPAPADELAKLLELIAEAWDAGGLYQVGQFPHWNVWSEWNGKVRYLKRLESLFATWYFLNNK

SEQ ID NO: 11846 - protein, 173 aa, Zea mays
  VARIANT 165: note = Ancestral polymorphism is S, Derived polymorphism is F
  VARIANT 157: note = Ancestral polymorphism is L, Derived polymorphism is S
  VARIANT 140: note = Ancestral polymorphism is P, Derived polymorphism is L
  VARIANT 130..173: note = Derived polymorphism lacks residues 130 to 173
  VARIANT 125: note = Ancestral polymorphism is Q, Derived polymorphism is K
  VARIANT 117: note = Ancestral polymorphism is V, Derived polymorphism is A
  VARIANT 105: note = Ancestral polymorphism is R, Derived polymorphism is W
  VARIANT 104: note = Ancestral polymorphism is D, Derived polymorphism is Y
  VARIANT 79: note = Ancestral polymorphism is E, Derived polymorphism is D
  VARIANT 71: note = Ancestral polymorphism is R, Derived polymorphism is W
  VARIANT 70: note = Ancestral polymorphism is R, Derived polymorphism is C
  VARIANT 44: note = Ancestral polymorphism is G, Derived polymorphism is R
  VARIANT 42: note = Ancestral polymorphism is R, Derived polymorphism is C
  VARIANT 38: note = Ancestral polymorphism is T, Derived polymorphism is M
  VARIANT 18: note = Ancestral polymorphism is P, Derived polymorphism is L
  VARIANT 16: note = Ancestral polymorphism is G, Derived polymorphism is E
MAGGGGAATAAGAAVGMPSQATLPVRRWCEGTAMGAITLDLRSRLGVGPFTLGGVMFKVYIIGDAIRVVRRFSLPNVDEGDMSNNAGGLRLFDIDMIREHGTRDWFYVIDMNYFPGAITLCGLLKSSYIRGESRFSDHRPVYNIFMAKVESARHRRSNLSLIMISGVEGTMID

SEQ ID NO: 11847 - protein, 165 aa, Zea mays
  VARIANT 53: note = Ancestral polymorphism is G, Derived polymorphism is C
  VARIANT 72: note = Ancestral polymorphism is G, Derived polymorphism is R
  VARIANT 76: note = Ancestral polymorphism is Y, Derived polymorphism is H
  VARIANT 84..165: note = Derived polymorphism lacks residues 84 to 165
  VARIANT 90: note = Ancestral polymorphism is M, Derived polymorphism is K
  VARIANT 95: note = Ancestral polymorphism is S, Derived polymorphism is F
  VARIANT 107: note = Ancestral polymorphism is P, Derived polymorphism is H
  VARIANT 110: note = Ancestral polymorphism is S, Derived polymorphism is L
  VARIANT 128: note = Ancestral polymorphism is G, Derived polymorphism is S
  VARIANT 130: note = Ancestral polymorphism is R, Derived polymorphism is H
MVMVVGATVATDLVVVEVREEKGGRGGRTPRGGRGGGMNGESKAVVVVHKHAGVFISKSKEDALCTKNIVSGDSVYGEKRASIQRSRWVMQIRVSNALMPNEMVWNPFRSKLATIVLGGVDNIWIAPSTRVLYLGVASGTIVSHMSDIQNPFPFIVHMCNDRKKR

SEQ ID NO: 11848 - protein, 612 aa, Zea mays
  VARIANT 537..612: note = Derived polymorphism lacks residues 537 to 612
  VARIANT 244: note = Ancestral polymorphism is H, Derived polymorphism is L
  VARIANT 210: note = Ancestral polymorphism is S, Derived polymorphism is F
MEAAGDEVVRALGAGFDLTSDFRMRFAKASEGRRLVELGEETRDVPLPGGGGATLRAVPRDVGVDKGDRIRFRSDVLEFNQMSELLNQKSSVQGKVPSGYFNALFELSGAWLTDAKETKHLAFDGYFISLYNLHLKASPLVLRDEVKKAVPSKWDPIALSWFIKNYGTHIIVEMGIGGQDVICVKQSHSSTISTVDLKLHLEDLGDFLFSDGKNHSPIHRKTKDGKSKVPDVFVRIVQQPNNLHLSSYSETSTKDGLTVTCSKRGGEAYLPNHSKWLQTVAKKPDAIMFKFVPITSLLTGIPGSGYLSHAINLYLRYKPDLQDLQYFLEFQVPLQWAPMFNELVLGPQKRKSSYPSMQFRFLGPRLQVSTSQVSSSQKPVVGLRLYLEGRKCNRLAIHVQHLSSVPSMIGDSVASSMSEWRESQDSDPGYVEAIQWKKYSCVCTSVVKYNPEWHKRAPGGVFIVTGAQLVTKGAWSKKVLHLRLLYTHIPNCTIQRTEWTNAPAASQKGSFLTTISTTLSSPFTQRDTHQGKHEPVQLNSGVYPDGPPVPLRSRKLLKFVDISEVVKGPHDVPGHWLVIAAKLVKERRKIGIHVKFALLGYEGLSQNDSFMG

SEQ ID NO: 11849 - protein, 137 aa, Zea mays
  VARIANT 5: note = Ancestral polymorphism is K, Derived polymorphism is E
  VARIANT 17: note = Ancestral polymorphism is F, Derived polymorphism is S
  VARIANT 24: note = Ancestral polymorphism is T, Derived polymorphism is M
  VARIANT 99: note = Ancestral polymorphism is C, Derived polymorphism is Y
  VARIANT 127: note = Ancestral polymorphism is S, Derived polymorphism is F
  VARIANT 128..137: note = Derived polymorphism lacks residues 128 to 137
MVMSKHMLILSLLLVLFELVSLPTTSCNRVVSFNSWVRHQPANATQDAGCAKKDDALSSANTIKVRNYIDPASELRPEDGGYTTISESIANIPDDNTKCYVLTLKPGVVFREKLLLGRSKPFLTIISEDPMNPAIIV

SEQ ID NO: 11850 - protein, 503 aa, Zea mays
  VARIANT 20: note = Ancestral polymorphism is S, Derived polymorphism is L
MAAVPRASSFFSMLLVLLSLLSVERAAATGLFQVRRKFPRHGGGDVVEHRLAALLRHDMGRNGRLLGAVDLPLGGVGLPTATGLYYTRIEIGSPPKGYYVQVDTGSDILWVNGISCDGCPTRSGLGIELTQYDSAGSGTTVGCEQEFCVANSAASGVPPACPSAASPCQFRITYGDGSSTTGFYVTDFVQYNQVSGNGQTTPSNVSITFGCGAQLGGDLGSSSQALDGILGFGQSDASMLSQLAAACKVRKIFAHCLDTVRGGGIFAIGNVVQPPIVKTTPLVPNARVRALCSAFPPTHYNVNLQGISVGGATLQLPTSTFDSGDSKGTIIDSGTTLAYLPREVYRTLLTAVFDKHPDLAVRNYEDFICFQFSGSLDEEFPVITFSFEGDPTLNVYPHDYLFQNGNDLYCMGFLDGGVQTKDGKDMVLLGDLVLSNKLVVYDLEKQVIGWTDYNCSSSIKIEDDKTGSVYTVDAQNISAGRRFQWHKSLILLLVTSIWSCLML

SEQ ID NO: 11851 - protein, 448 aa, Zea mays
  VARIANT 68: note = Ancestral polymorphism is C, Derived polymorphism is Y
MPSSIPPPPQNFLPLPSPGVGQSTRINLGEIKLKLVKRIGLERAKRYFEHLQRFLSLKLSKSLFDKFCLTILGDDNIQLHNHLVCSILHNACQASGPSTVSTPKSIGVAKNSNHVLSPTVPFSDIGDVLHHHVKDHYPRSRNAHVVQENGVVRLSKLKRFPQPHSELVELLSKRSRVENAYSNLSDPINSNCPGVSGREYVEAVAQHARGPIIAPLGVAFCSGHFGGNSKTLTLPSGASSDDSICCYDLGQLCDTSSLRQRMGRIAETEGLDAVSLECANSLNNGVDFYLKYLIGSCIELVRARSQHDRINHMALKQQLSQKLINGVQLQNQVHGQSATTCPQISSVSLQDFKALSETIPQLLGVNASLEHFVNVDSCLSNMSWTNEDVDVADMAKEKLEREATTTKLEAETKHAMETVRRAFLRKRQRDQHPRASLRSWKNLEVPNA

SEQ ID NO: 11852 - protein, 193 aa, Zea mays
  VARIANT 169: note = Ancestral polymorphism is G, Derived polymorphism is C
  VARIANT 164: note = Ancestral polymorphism is V, Derived polymorphism is D
  VARIANT 151: note = Ancestral polymorphism is A, Derived polymorphism is T
  VARIANT 95: note = Ancestral polymorphism is G, Derived polymorphism is V
  VARIANT 63: note = Ancestral polymorphism is G, Derived polymorphism is S
  VARIANT 44: note = Ancestral polymorphism is L, Derived polymorphism is Q
  VARIANT 33: note = Ancestral polymorphism is A, Derived polymorphism is V
MTKFHNELEELPARFVGKPAAILFGMGYVTNSAIIPCLIGKGGLIISDSLNYNSIVNGARGSGATVRVFQHNCAQKLAHIRENSNFFRSELKKMVFEVLGDNDSPVMPIMLYNPAKIPAFSRECLRQKVAVVTVAFPATPLLARARICISTSHTREDLIKALDVISRVGDLVGIKYFPVEPPKIAGADHDKLE

SEQ ID NO: 11853 - protein, 406 aa, Zea mays
  VARIANT 312..406: note = Derived polymorphism lacks residues 312 to 406
  VARIANT 255: note = Ancestral polymorphism is R, Derived polymorphism is I
  VARIANT 220..406: note = Derived polymorphism lacks residues 220 to 406
  VARIANT 99..406: note = Derived polymorphism lacks residues 99 to 406
  VARIANT 43..406: note = Derived polymorphism lacks residues 43 to 406
MVLPCFLICLCCLLHVLHKIFVCPQSLYSNIDKCPKSLYASKQTFGIVVHIGFNTTSVVPERLVMIAGSWYKTIILVCGSSCLPGLPVGTLCGQVRKRYPKGDAKEIKIHKIKDFLLTARRNDAHFVKIKRSKDVVKFKVRPLQVQPVPPNSAPAFTHRNSDIGKRKLESPASGMATGEEHVAAPAVEDTLEKKQASTTELPAPSGWTKKGVPMFYMGDEYGHTKGGNNNTYCHDHYVNYFCWDKKEEQSSDLYRFCRLMTKFRKSCAVYVATVYSYSFGVQYTECESLGLEDFPTSERLQWHGHQPGKPDWLEASRFVAFTMKDETKGEIYVAFNTSHLPVVVGLPERSGFRWEPVVDTGKEAPYDFLTDGPARSCCHRLPVLSFPQLQSLSYAQLLLHHPCIAP

SEQ ID NO: 11854 - protein, 119 aa, Zea mays
  VARIANT 3: note = Ancestral polymorphism is L, Derived polymorphism is Q
  VARIANT 20..119: note = Derived polymorphism lacks residues 20 to 119
  VARIANT 91: note = Ancestral polymorphism is E, Derived polymorphism is K
  VARIANT 96: note = Ancestral polymorphism is G, Derived polymorphism is E
MGQYWWRTPAYVLMRSKAYQDPTSYEDKSAFAMCIFSLALGPGEEPITFVGKTAGKIVPARGPNDFGWDPVFQPDGFEQTYAEMPKSVKNEISHRGKALALVKEHFASASYIVQSDDSA

SEQ ID NO: 11855 - protein, 128 aa, Zea mays
  VARIANT 36: note = Ancestral polymorphism is H, Derived polymorphism is Y
MPSRSSSSSSSRPTSWPSCAFPSLFLFFVPRVYTVHALSRPDPDFSPLFLLPVGVLDVQAGFREATTPEEDTVTAPIYAIGDPSLASLSVPFSCEPVPSRTFRPSIIQRYPYSLSICFIYTYCILGIV

SEQ ID NO: 11856 - protein, 119 aa, Zea mays
  VARIANT 10: note = Ancestral polymorphism is S, Derived polymorphism is F
  VARIANT 27: note = Ancestral polymorphism is P, Derived polymorphism is S
  VARIANT 36: note = Ancestral polymorphism is W, Derived polymorphism is S
  VARIANT 62: note = Ancestral polymorphism is V, Derived polymorphism is M
MLRHKVVAVSGVATLGLDTYDAHMFRPKNPTYKEVWHTASLYHLVHTAALLGAPITKRPNVVIRRAPRRWDRALLWNVSICPPLAKTCYTVAYLEDRKFSSPAPLGGFAFIAAWASLLF

SEQ ID NO: 11857 - protein, 256 aa, Zea mays
  VARIANT 35: note = Ancestral polymorphism is V, Derived polymorphism is E
MALASNKLLIKYSFVTVAFLVASTRGSGTIQLILVNNCAESIWPGLLGTAGQPTPQSGGLHLAPGDEAAFDVPVGWSGRVWPRRGCSFDQRERGQCATGDCGGVLRCDGRPGAAPATVVEMTLGTPKSPLHFYDVSLVDGFNAPVSMAPVGGGAGCGVAGCQADLNVCCPSALEVRDREGRVAGCRSACKAMGGDRYCCTGDYASPDRCRPTIFAHVFKAVCPKAYSYAYDDATSLNRCKASRYLITFCPPPTSRK

SEQ ID NO: 11858 - protein, 523 aa, Zea mays
  VARIANT 249..523: note = Derived polymorphism lacks residues 249 to 523
  VARIANT 199..523: note = Derived polymorphism lacks residues 199 to 523
  VARIANT 151..523: note = Derived polymorphism lacks residues 151 to 523
MARGMRKCIIQSQEEYLVEEPIGETSHRPRDAAYDHHPSARERQKESDNGNEFNDLDHHKKDTTSFETTSGVYPSPDDADIEDSVEGQTNEAISRGPNKLKHVWNLQKGKRIVVNCNELGQPIGEEAGVLGKFLGMVARNGCLCSLSFKDWRLLIGKKDKNNEQKNKQDVLKQVKMRFLYPARMEKWILRTIGVLDDQWVALVNNWFTTKSQDISEANRINCAKRKATHTSGTKSFARNREDMREQDPEKKYPHRVVLYINTHKSNITKNTNPHVVALKELLVQEPSLADTSHGKVAWKGDALSQILGEEKPGHIHGIGLVPNPDQVFGGSTSRHLKHLNLTSLDATSSEDVVSLRLQVEKLIDRVQKQDDTILNLQNTLELQKSHHECLDEPLSASKDLQPTMNQKVNLLDELNSTMADEIKHDGYEELQAQCKKSKIQEKGKPPMPRGGLQGGRVSTSLNVKNRSNAAKVMNQDTARNSSNHEPYKNKGSLENYLPSTKDDQSTSKRKVCISILNFSIVDV

SEQ ID NO: 11859 - protein, 448 aa, Zea mays
  VARIANT 367: note = Ancestral polymorphism is I, Derived polymorphism is T
MAGLSLLCGDCGAQLRSVEEAQAHAEATNHANFVESTEAVLNFVCSDCGKPCRSQTEVDLHTKRTGHTEFADKTAEAAKPIDLEAPLKPASEDVMDVDTSASASGEPQEMVVPEVNKEMLTDLEGMGFSTARATRVLHFSGNSTIEGAINWLSEHQEDIDIDEMPLVPANSKTEDNKPSLTPEEMKIKAQELRDRARKKKEEEERRMEREREKMLSSVMCGRTYTRRALDVRRGAERAARTQEGKERIRIGKELLEAKRIEEQNERKRMIELRKLEKEEEKRAREKIRQKLEEDKAERRRKLGLPPEDPAAAKPSAPLPVEEKKSALPVRPATKAERMRDCLRNLKQQNKDDDAKVKRAFQTLLTYIGNVAKNPDEEKFRKIRLTNATFQERVGNLHVGIEFLELCGFEKLEGNEYLFLAREKVDKAILNTAGAELNSAITNPFFGVL

SEQ ID NO: 11860 - protein, 440 aa, Zea mays
  VARIANT 382: note = Ancestral polymorphism is R, Derived polymorphism is H
  VARIANT 381: note = Ancestral polymorphism is V, Derived polymorphism is D
MATVTSLSFSGSCRHGPRYTARPAASSRSSQLLNDQLARASRRLQVAAGMAVAAFPSCGAFAPPCLVSTRRAFSSVVAMASAAPVRAPSRKPFAPPREVHRPVAHSLPPQKREIFESLESWAADNILVLLKPVERSWQPQDYLPDAASESFDDEVRELRERAREIPDDYFVCFVGDMVTEEALPTYQTMLNTLDGGVRDETGASSTSWAVWTRAWAAEENRHGDLMNKYLFLTGRVDMRQIEKTVQYLIASGMDPKTETNPYMGFVYTSFQERATFISHGNTARHARRYGDTKLAQICGTIAADEKRHESAYERIVEKLFEVDPDYTVRAFADTMRKKVAMPAHLMYDGQDDGLFARFSAVAQRIGVYTARDYVDILEFLVRRWGVQELTGLSGEGRRAQEFVCELGPRFRRLEERAHDNKAKDPEFAPFSWIHGRQVQL

SEQ ID NO: 11861 - protein, 487 aa, Zea mays
  VARIANT 79: note = Ancestral polymorphism is R, Derived polymorphism is W
MAAEPPAYLLLLPLIAIPLIVFLVLSRRRDDQRRFPPAPWALPVIGHLHHLAGAPPHRALRDLARRHGPLMTLRFCELRVVVASSPDAAREILRTHDVDFASRPIGPMLQLVFRGAEGLIFAPYGDGWRQLRKICTLELLSARRVHSFRPVREDEVGRLLGSVASAAAAGLPVNLSERITAFVADAAVRAIIGSRSEHRDEFLRLLMDGLKIIPGLSLPDLFPSSRLAMLVSSVPGKIERRRKGLLDIVDPIILEHQEKRAAGGIDEDEDLLDVLLRLQKDMDSQYPLTTDNIKSVLIDMFGASSETSATTLKWTMAELMRNPAVMRKAQDEVRGALAGHDEVAEDSLVNLRYLQLVIKETLRPAAAPAGAIAAAAGVPQPVPGRDPALWDAPEDFVPERFEESGRDFKGMDFEFIPFGAGRRMCPGMAFGLAHIELALAALLFHFDWKLPEGVVAEEIDMAEAVAITAPPRSDLVVLPVTRLPVSI

SEQ ID NO: 11862 - protein, 250 aa, Zea mays
  VARIANT 92: note = Ancestral polymorphism is C, Derived polymorphism is R
  VARIANT 61..250: note = Derived polymorphism lacks residues 61 to 250
  VARIANT 47: note = Ancestral polymorphism is L, Derived polymorphism is F
  VARIANT 43: note = Ancestral polymorphism is A, Derived polymorphism is V
  VARIANT 6: note = Ancestral polymorphism is L, Derived polymorphism is F
MATRQLLRLLMAQLIWRTPSVLVLLPTRELANQVHADFEFYGATFGLSACCVYGGSPYRPQEMALRRGVDIVVGTPGRVKDFIVKATLNLKCLKFRVLDEADEMLNMGFVDDVELILGKVEDATKVQTLLFSATLPDWVNKLSLRFLKVDTESGVKFEHVSAPQPTDVAQSAGSEAADAIASVSDSVIPIFRQQAEQLLSSSSLSGADLLAKALAKAVFDVGNMVMVTGGRNIGRVGVIKNWEKHKGIFE

SEQ ID NO: 11863 - protein, 796 aa, Zea mays
  VARIANT 286..796: note = Derived polymorphism lacks residues 286 to 796
  VARIANT 73: note = Ancestral polymorphism is C, Derived polymorphism is Y
  VARIANT 52: note = Ancestral polymorphism is G, Derived polymorphism is D
MTRARARGLWALLLVALVAAAVAPGALVLAQGGTLTSRSDLVGLYALRGSLGLRARDWPRRADPCAAWAGVGCRAGRVVSLSVAGLRRTRLARLSPRFDVDGLRNLTRLEAFSAAGFGLPGSIPAWLGAGLAPTLQSLDISACAVSGEIPASALLGLGNLTTLNLAGNQLSGQLPATALPRLTRLRTLNLSRNAFSGALPHAVWSLPGLSVLDVSRNNLTGALPTPGLALPANAQVVDLSGNFFYGGVPETFRRLFAQVLLANISGNYFDGELGVSDGGGGNVSFQLNCFLDVLGQRTQVDCQQFYASRGLPYDGPVIPPAPQPAPSPVRKKHKNLKYILIGAIGGGLLLIAVVAAIVFCFVCSGSTGRRNHQRESGASPSAPSGVSATGTAAATGGTQPSALSANTVKVGDSFAYDQLVNATSGFGENRLIKHGHSGDLYHGVLQDGTAVVVKRITSRVPRKDAYLAELDLFAKGVHETLVPLLGHCLDKEEEKVLVYRFVRNGDLSNALHRKSREENEGLQSLDWIKRLKIATGVAEALCYLHHECSPPMVHRDVQASSILLDDKFDVRLGSLSKVCPQEGEGHQNVITKLLRFSSTADQGSSGSPSATCPYDVYCFGKVLLELVTGRLGISASNNAATSEWLDATLRYVDIYEKELMSKIIDPTLIIDEDHLEEVWAMAIVAKSCLNPRSSKRPPMKYILKALENPLKVVREDNGNSSARLRATSSRGSWNAALFGSWRHSSSDVGPSRDDNILKRSETIRSSGGSNGDHSSSRRRQSKEIFPEPSGSRDTED

SEQ ID NO: 11864 - protein, 508 aa, Zea mays
  VARIANT 164: note = Ancestral polymorphism is A, Derived polymorphism is D
MAADPTLLLLVPFLAIPLYFFLATRRRTPRGGARLPPGPWALPVVGHLHHLARGLPHRVMRDLARRHGPLMMLRFGEVPVVVASSPAAAREVMRTHDAAFASRPIGPVSRLWFQGAEGILFAPYGDDWRHLRRVCTQELLTARRVQSFRPVREDELRRLLASVASTSGPVNLTEKISTYIADSTVRAIIGSRRLKDRDAYLRMLKGLFGIMPGMSLPDLFPSSRLAMLLSRAPARIQAYRRSMRRIMDGIIQEHRDRAAAGDGDEEDFVDVLLRLQKEVDSQFPLTTENIKTVMLVTNPPLQKFIHCHHDIFGASTETSTTTLDWAMAELLRNPRVMEKAQREVRQALSGHGAVTEDRLAGLRYLRFVIKESLRLHPPATMLVPRQCQSACQVLGYDVPAGITVIVNAWAIGRDPAHWDEPDKFLPERFEQSTRDFKGADFEFIPFGAGRRICPGMTFGLAHIEIALAALLFHFDWSLPGGLAAEELDMTEAFGIATPRRSDLLKTTK

SEQ ID NO: 11865 - protein, 121 aa, Zea mays
  VARIANT 85: note = Ancestral polymorphism is D, Derived polymorphism is V
MVKDGGVKKVAVAAPAPAPEEATPTGLTATPTLTVQLLAPEAREKCYKKTVGEEATFLEIAKDYFNQFKEVPAQKHWICFKSYFDQKRGSVFGNRKQKIDPAVKDETPEVVKPAAAAVESH

SEQ ID NO: 11866 - protein, 135 aa, Zea mays
  VARIANT 42: note = Ancestral polymorphism is G, Derived polymorphism is R
  VARIANT 58..135: note = Derived polymorphism lacks residues 58 to 135
  VARIANT 66: note = Ancestral polymorphism is R, Derived polymorphism is S
MWALGERPSKGCMADDMLEIRLTPVRPFEKRMEEENIGLAMGRVSSAPEMDDVISIDQSSRSTKRRAKVWDYVDSELVDGKEKAICKYCKAHLSSVAGKEWGLVGDLFTLTLDNASVNRSSVLLFKHWVLKVNQG

SEQ ID NO: 11867 - protein, 133 aa, Zea mays
  VARIANT 109: note = Ancestral polymorphism is G, Derived polymorphism is R
  VARIANT 94: note = Ancestral polymorphism is A, Derived polymorphism is T
  VARIANT 90: note = Ancestral polymorphism is S, Derived polymorphism is P
  VARIANT 63: note = Ancestral polymorphism is V, Derived polymorphism is M
MLDISQSIRFDDDVEDGKSHELKVYSLDRIRAVTINFSDSNKLGEGGFGPVYMGTLPGGEVAVKRLCRNSGQGLEEFKNEVILIANGYMSTEYAMEGIFSVKSDVYGFGVLILSFHCHEDSLNIAGYVNTGGY

SEQ ID NO: 11868 - protein, 263 aa, Zea mays
  VARIANT 135: note = Ancestral polymorphism is L, Derived polymorphism is R
MASSVSGNYPRFKVRVSLRISLLELRNLVKVSRSIKVLCLLVRPLTLKVILGSSSPARREILADMGYEFTVMVGWLYWNPVTLVRPQSADIDERAIRREEPEQLVKALAEAKAEAIKQKLQGDSAPVTDGDQPARLLITSDQVMVSKGVIRERPRSAEEAREFINGYSGDRAFAVNFVLVTDLSTGTTRGGWDVPEIRFQHIPDEFIDQVVNQGDMTCVAGGLKLTHPSVQPFVKELVGTVDSVRGLPRELTEKLIRESLQGK

SEQ ID NO: 11869 - protein, 197 aa, Zea mays
  VARIANT 180..197: note = Derived polymorphism lacks residues 180 to 197
  VARIANT 153: note = Ancestral polymorphism is H, Derived polymorphism is Y
  VARIANT 138: note = Ancestral polymorphism is E, Derived polymorphism is K
  VARIANT 113: note = Ancestral polymorphism is Y, Derived polymorphism is F
  VARIANT 77: note = Ancestral polymorphism is D, Derived polymorphism is Y
  VARIANT 72: note = Ancestral polymorphism is S, Derived polymorphism is C
  VARIANT 57: note = Ancestral polymorphism is Y, Derived polymorphism is F
  VARIANT 51: note = Ancestral polymorphism is T, Derived polymorphism is I
  VARIANT 49: note = Ancestral polymorphism is M, Derived polymorphism is K
  VARIANT 47: note = Ancestral polymorphism is V, Derived polymorphism is A
  VARIANT 23: note = Ancestral polymorphism is E, Derived polymorphism is K
  VARIANT 20: note = Ancestral polymorphism is E, Derived polymorphism is K
  VARIANT 9: note = Ancestral polymorphism is G, Derived polymorphism is R
  VARIANT 3: note = Ancestral polymorphism is P, Derived polymorphism is H
MMPDIFATGDVDLKKLLNAEDRELISQIKSILGPFILRRLKSNVKFVVMGTEQSEAYKNAINEYRAACQARSAKSSDGISNNIAGLIPKRQISNYFTQFRKIANHPLVIRCIYGDKDVDRIARLLYPKGAFGFECSLERAIQELKNYSDFNIHQLLLSYGDVGTKGALKDEHVFASAKCQVYFFLQHLFLYVLLFYL

SEQ ID NO: 11870 - protein, 205 aa, Zea mays
  VARIANT 150..205: note = Derived polymorphism lacks residues 150 to 205
  VARIANT 141: note = Ancestral polymorphism is R, Derived polymorphism is M
  VARIANT 140: note = Ancestral polymorphism is H, Derived polymorphism is Y
  VARIANT 135: note = Ancestral polymorphism is H, Derived polymorphism is Y
  VARIANT 134: note = Ancestral polymorphism is P, Derived polymorphism is L
  VARIANT 127: note = Ancestral polymorphism is T, Derived polymorphism is A
  VARIANT 121..205: note = Derived polymorphism lacks residues 121 to 205
  VARIANT 117: note = Ancestral polymorphism is S, Derived polymorphism is G
  VARIANT 110: note = Ancestral polymorphism is K, Derived polymorphism is R
  VARIANT 94: note = Ancestral polymorphism is L, Derived polymorphism is V
  VARIANT 84: note = Ancestral polymorphism is M, Derived polymorphism is V
  VARIANT 75: note = Ancestral polymorphism is G, Derived polymorphism is R
  VARIANT 74: note = Ancestral polymorphism is S, Derived polymorphism is Y
  VARIANT 68: note = Ancestral polymorphism is T, Derived polymorphism is I
  VARIANT 63: note = Ancestral polymorphism is G, Derived polymorphism is S
  VARIANT 45: note = Ancestral polymorphism is N, Derived polymorphism is S
  VARIANT 44: note = Ancestral polymorphism is M, Derived polymorphism is I
  VARIANT 22: note = Ancestral polymorphism is R, Derived polymorphism is T
MIAFSCCVYDGGDEEKEMDAAREIGWRRKFTKRGRVIRPGIIRMNGKCPLTPLEVGLMLRGMGFSNKTAIFLASGKIYKAEKNMASLLEMFPLLQTKETLASEEELAPFKMAVVDYSICAQSEVFVTTQGGNFPHFLMGHRRYLYGGHSKTIKPDKRRLAVLFNNPRIGYDNTTCPSSFKHLTILFVKITIFIHPQVDGIEAALA

SEQ ID NO: 11871 - protein, 275 aa, Zea mays
  VARIANT 17: note = Ancestral polymorphism is S, Derived polymorphism is P
MDAAPLLALLLAAVSLSAAAAGDGAHPGYSDEGTCTVDAAGAGVGSGPELRRLEERRPGRIIDITHAYVPDLLAFAPGAVTGPLVHLKESMANGSEYNLSELRLECHMGTHVDAPGHMNQGHFAAGLDVDTLDLDVLNGPALLVDVPRDTNITAEAMEFLNIPRGVRRVLFRTLNTDRKLMWRKGGDMSYVGFTEDGAQWLVDNTDIKLVGIDSLSVAAFEHLISAHVVFFKTPDIIPVEGLKLDNIETGIYMLHCLPLRLVGAEGAPTRCILIK

SEQ ID NO: 11872 - protein, 465 aa, Zea mays
  VARIANT 397..465: note = Derived polymorphism lacks residues 397 to 465
  VARIANT 162..465: note = Derived polymorphism lacks residues 162 to 465
  VARIANT 127..465: note = Derived polymorphism lacks residues 127 to 465
  VARIANT 35..465: note = Derived polymorphism lacks residues 35 to 465
  VARIANT 5..465: note = Derived polymorphism lacks residues 5 to 465
  VARIANT 3..465: note = Derived polymorphism lacks residues 3 to 465
MVQVRAAVNTRDLRWSPDPHGGGSSHPGIFGSVSESGLACPEPLAVDAAVGTGTTTNAARVTDIRLDNLTTALLGPNLNSAATLTHLCELRAELSLSSPASYLLQLVTREEEVFASYGRVELVHIIGGLDPVLAHVVLETKHEATDAFGELHGRNIYDSCCQLDIQWCSSQDPRNTNLAFSCGDTMVTTAAARPATSVLGQDELSNTNNSIEVATTFEIVSGVTNIAPPAPVFAKAAGDTSLVASRTYSNVKLHGISVGDATLQLPTSTVDSDDSSEEPYELVEAPVSTPLEDFKLISACALEAFQLISGCSKSVSNYLTYNGLEGTHIKVIEFVRDNDYLVCGPGSIVQLDTSSTLSDFIKMLEEHPKLQLSKAIVMHEGNNMYMQLRKVLEHMTWTNLSVPMFELLKEVPYTIASDRSCTQLEFDIAGTGLTYESSNCIGVYTENCPGVVEEAERWLGYSPDS

SEQ ID NO: 11873 - protein, 238 aa, Zea mays
  VARIANT 38..238: note = Derived polymorphism lacks residues 38 to 238
  VARIANT 231: note = Ancestral polymorphism is D, Derived polymorphism is V
MLNDKRTSAGNFDEISGCLQKMNSAHQQIGRPTEEDLGSWGHHCDPSTIPDTILQCSAGEEDCKSHVMRIAGGVLCHDRAPGPNLISPAAGRDWRANFVDSLVRTARRSICLLLIIVVFRDKYLSSDPNKLTDMKQDVFGSYRNIFGYSGNTRDDMLALSSTSEESRFMKMEENNFRKTGDSVTTLKELQCTVEGYNLVFQACPSLADGLVGKESYAQVQIGRQILGKRDDRKWHICC

SEQ ID NO: 11874 - protein, 169 aa, Zea mays
  VARIANT 1: note = Ancestral polymorphism is M, Derived polymorphism is I
  VARIANT 69: note = Ancestral polymorphism is S, Derived polymorphism is W
  VARIANT 109..169: note = Derived polymorphism lacks residues 109 to 169
MVALASLSSLCPCGIARRRAASATSSTAFSISCCAVATPSFSGKGPQESRTPRRRLRKTEGATKSLEDSVKRKMEQFYEGADGPPLRVLPIGGLGEIGMNCMLVGNYDRYILIDAGVMFPDYDEFGVQKIIPDTTFIKKWSHKIEAVIITHGHEDHIGALPWVNNSPAY

SEQ ID NO: 11875 - protein, 459 aa, Zea mays
  VARIANT 102..459: note = Derived polymorphism lacks residues 102 to 459
  VARIANT 199: note = Ancestral polymorphism is D, Derived polymorphism is Y
  VARIANT 340..459: note = Derived polymorphism lacks residues 340 to 459
MDAYAPKDLLVVTTGSQVIPGNETRVMKMMNRLTDLGPKIIMGKDSGLHTSGHAYREELEEVLRIVKPQHFLPVHGELLFLKEHELLGRSTGIRHTTVIKNGEMLGVSHLRNRRVLSNGFVSLGKEDLQLMYSDGDKAFGTSTDLCVDERLRIASDGIIFVSMEIFRPQKEHGLAQSGLKGKFKITTRCLWLDNGRLLDALYKAAHAALSSCPVNCPHSHMERMVAEILRKMVRKYSGKRPDVIAVATENTTAGFSEHLDTKASGNFGPSSATSHLSRSPATSLEGSYKTHPDNPEVDAEEILPETVRTTPDDATTSSNGEALFSSDLHQPKTLEHFWESFKSPTAVKIARIVNGGDKQNFGKIGIMGQDSLIQSAPAPVKSSKRNKWKPEEIKSLIQMRGEMNEKFQSVKGRMVLWKEISDTMLNQGESKDTESMKTWPYFSAMDKILSQQGEMATKG

SEQ ID NO: 11876 - protein, 144 aa, Zea mays
  VARIANT 25: note = Ancestral polymorphism is G, Derived polymorphism is R
  VARIANT 34: note = Ancestral polymorphism is K, Derived polymorphism is M
  VARIANT 53: note = Ancestral polymorphism is G, Derived polymorphism is S
  VARIANT 111..144: note = Derived polymorphism lacks residues 111 to 144
  VARIANT 127: note = Ancestral polymorphism is K, Derived polymorphism is E
MDVLDHSDDDEEHRRQYATSSGRSGSRLGACRRKRRSGGSSHQHLLLMDRVGGRDRGDGALEDTVPLPDYERLSQSTPVHDDADDNAKNPPPALLLAVEEEEQEQQKAPAWRCGQGTGKNNEKKKKKRSSWLPDPDRRWPVQGF

SEQ ID NO: 11877 - protein, 150 aa, Zea mays
  VARIANT 119: note = Ancestral polymorphism is M, Derived polymorphism is L
  VARIANT 101: note = Ancestral polymorphism is M, Derived polymorphism is T
  VARIANT 97: note = Ancestral polymorphism is A, Derived polymorphism is T
  VARIANT 91: note = Ancestral polymorphism is R, Derived polymorphism is W
  VARIANT 90..150: note = Derived polymorphism lacks residues 90 to 150
  VARIANT 89: note = Ancestral polymorphism is E, Derived polymorphism is V
  VARIANT 59: note = Ancestral polymorphism is A, Derived polymorphism is V
  VARIANT 43: note = Ancestral polymorphism is S, Derived polymorphism is F
  VARIANT 38: note = Ancestral polymorphism is A, Derived polymorphism is V
  VARIANT 36: note = Ancestral polymorphism is R, Derived polymorphism is W
  VARIANT 34: note = Ancestral polymorphism is S, Derived polymorphism is R
  VARIANT 12: note = Ancestral polymorphism is G, Derived polymorphism is R
MEDDVFCGVFDGHDRCGQLVSKLARDHLPFMILSQRNVLLLGSDDDDDGDGDDTAFSDASPAASSSTDGSRSGRPSPSLAPAPAQMLEVWREAYANAFETTDRELGVQSRVDWDFSGTMVVCAIKQGRTSSSPSSVTPGPCWRPCRRWAT

SEQ ID NO: 11878 - protein, 179 aa, Zea mays
  VARIANT 173: note = Ancestral polymorphism is R, Derived polymorphism is W
  VARIANT 171: note = Ancestral polymorphism is R, Derived polymorphism is H
  VARIANT 160: note = Ancestral polymorphism is I, Derived polymorphism is T
  VARIANT 159: note = Ancestral polymorphism is A, Derived polymorphism is V
  VARIANT 128: note = Ancestral polymorphism is E, Derived polymorphism is K
  VARIANT 111: note = Ancestral polymorphism is R, Derived polymorphism is T
  VARIANT 109: note = Ancestral polymorphism is E, Derived polymorphism is K
  VARIANT 90: note = Ancestral polymorphism is V, Derived polymorphism is A
  VARIANT 88..179: note = Derived polymorphism lacks residues 88 to 179
MVCAYHSILGDHGLHTSSLHPLPRDASLPPFASIHHSRGRKEPAPPLQRTKPDPPPPSPSHVSQHALAATLARHSSAKTASAPRGVDREALVDMGQIKYSEKYFNDTYEYRILTLISCLYMILVLPPEVAKLLPKNRLLSENEWRAIGVQQSRGSVHYAIHHLETHIMLFRRRINYQQQ

SEQ ID NO: 11879 - protein, 304 aa, Zea mays
  VARIANT 271: note = Ancestral polymorphism is A, Derived polymorphism is V
  VARIANT 285: note = Ancestral polymorphism is Q, Derived polymorphism is L
MGVESECDRIKGPWSPEEDEALRRLVERHGARNWTAIGRGIPGRSGKSCRLRWCNQLSPQVERRPFTPEEDAAILAAHARLGNRWAAIARLLPGRTDNAVKNHWNSSLKRKLATATATSSGSDAERACKRASPGPGSPTASDRSDLSHGCGAAQVFRPVPRAGGFDAISAADVRPPPPPAVADEDPLTSLSLSLPGLDQSPSGFHHDSARSHFQELSPSSSPSPQSTPPAFPPQAAPSQSSYAFSGELVAAMQEMIRAEVRKYMSGAGLRAGCGPGAVGEVCMPQLVEGVMRAAAERVGVVTRP

SEQ ID NO: 11880 - protein, 624 aa, Zea mays
  VARIANT 117: note = Ancestral polymorphism is G, Derived polymorphism is V
  VARIANT 347: note = Ancestral polymorphism is C, Derived polymorphism is R
MNYGSSTPRRLAAVPESVELDSFATSLLWQSSYRDTIRSVSIGAGRSARFYPRSDGDAERASSFSSSASSTSLLAASYSGSGLSSTDGMSSFRGWGTAGFNGVHELRGIALQMLNDGYIRGIIQAFSGGSSVEANGGGPDHEKLIVERWLSELDVEWILHLGANSAVGQGWSESPSIFMEEGAERRRGAIMAREMEDEEPLLGSPTTSSTLHTGEGKGEDMVQLHLDLDLDLESLRDLMERWIRALLVMVHVLFITYLELRAKRSTVGGVRTVRKTIRYIQMLIGVATPGATGETASSQEEEVTLFARFAEVSVLRMLTFVDAVCHAVPTYYWAPEALPGMLQVYACVADASPTVLALFKQAASSTTVFEGMNAAFLRKRTNLSNTIWSLMGMVRASFFTEDCCRISLESSGPGVHETTRLMMNYIALLWSNQGALNLVLQDHHFSVFVSEDEGFNSVVSLIIDMISSLEKHLVDASHSIAEHGLRYIFLMNNCDFITQQVRSLDLPAWFPSDDSKIQGYIDAYLHASWTPVLSCLYVDIPFGPRRYASLSKFESQFNTICDSHRLWKVPDPELRKRLRKAIIEKVIPWYARYLEQRAATGRRTTSRSSTPHQLQEVLEELFEG

SEQ ID NO: 11881 - protein, 478 aa, Zea mays
  VARIANT 342: note = Ancestral polymorphism is A, Derived polymorphism is T
  VARIANT 260: note = Ancestral polymorphism is C, Derived polymorphism is Y
  VARIANT 243: note = Ancestral polymorphism is A, Derived polymorphism is V
  VARIANT 177: note = Ancestral polymorphism is S, Derived polymorphism is C
  VARIANT 150: note = Ancestral polymorphism is D, Derived polymorphism is G
  VARIANT 94: note = Ancestral polymorphism is A, Derived polymorphism is T
MSLRKRQRSASSSRLTAFCSPPSPPAPPSTSSSPNPHTFPNADVVLRLFLNPSSPDDVDVKPDIDRHLSAAVSSGTFVDLHVSSASLLRSRYFAALLSDRWPTAATGRLSLAVVAPPSCPRPFDAHIEVLRLLHTLDFAGAIRSPDDALDLLPIALLLLFDACVEACIRFLEAVPWSEDEEARIIDLARLLPADEAADLLARVSPPPVAAGPSAAGVAPRSPSEAMLHGLIHSAIHGHPVHAATKAFVAMLLKDYPSRNCVHKVLDEAFQSRLDTIKELMGKYASPDFRVAVDSDEREAIQRLNLQSAVLNVKHLYWLIERMVDLRVADNAVTLWSDQAALATDLQKLLNDADMWRNMTPGLPMLVTRCTLKLANSVITGETLVPRQVRRMLVRSWLPVLNVCRDIVQPMHSQKSTNCQELEGAFLQIISTLPFLEAQELLQQCLGFSTRNVDDCPHLVTAFKTWFRRAGRAPLGGEN

SEQ ID NO: 11882 - protein, 185 aa, Zea mays
  VARIANT 169: note = Ancestral polymorphism is T, Derived polymorphism is M
  VARIANT 151..185: note = Derived polymorphism lacks residues 151 to 185
  VARIANT 150..185: note = Derived polymorphism lacks residues 150 to 185
  VARIANT 117..185: note = Derived polymorphism lacks residues 117 to 185
  VARIANT 64..185: note = Derived polymorphism lacks residues 64 to 185
  VARIANT 40: note = Ancestral polymorphism is R, Derived polymorphism is G
  VARIANT 39: note = Ancestral polymorphism is R, Derived polymorphism is L
  VARIANT 19..185: note = Derived polymorphism lacks residues 19 to 185
  VARIANT 4..185: note = Derived polymorphism lacks residues 4 to 185
MLKSCFDVFQESQQPPQQQQPQVQVQQAQPQNQAAPVMRRASSIAARQAAMAQQSQETKPVQSSPKIKRQTSARSGSVASTKPPIAASAPKPGGSPKKGEVKPAADPVQTPTTGADSPKPEPSARSLPGVEGVDKMAIDEASGDAPEGAEELDPALEEETPIEEMIRVTRAKLRRRTTTEVPVGN

SEQ ID NO: 11883 - protein, 172 aa, Zea mays
  VARIANT 25: note = Ancestral polymorphism is R, Derived polymorphism is W
MYPYTFRAAASSSSSSTALGFALGRIGGTTRSGGVAAPGLVVPAAGVARGRSVSSTPAGSAPVPGDQGVGMEQPKQQQQQPKVPPQDAAGGENKRDDMHKHTRDVMTHSFGEGYSTRSDEEGFGGVYGGNDPVEHPGAEIHPSHSEYDTSQGSEVKEKEKARHLKDEKHATA

SEQ ID NO: 11884 - protein, 569 aa, Zea mays
  VARIANT 429..569: note = Derived polymorphism lacks residues 429 to 569
  VARIANT 406: note = Ancestral polymorphism is Y, Derived polymorphism is C
  VARIANT 369: note = Ancestral polymorphism is G, Derived polymorphism is R
  VARIANT 368: note = Ancestral polymorphism is L, Derived polymorphism is I
MAYMCADSGNLMAIAQQVIQQQQQQQQQEHQRHHHHHLPMPLPLPPPPRQALPMPPATAPPHGQIPAASLPYGGGAWPQADHFFPDAFVGTSAADAVFSDLAAAADFDSDVWMNSLIGDAPVFADSDLERLIFTTPPPPPPVPAPAPAPASAVAPVDAAAQPEAATPASLPQPAAVAAPAACSSPSSLDAACSAPILQSLLACSRTAAAGTGLAAAELAEVRAAASDDGDPAERVAFYFADALARRLACGGGAQAQPSLAVDSRFAPDELTLCYKTLNDACPYSKFAHLTANQAILEATGAATKIHIVDFGIVQGIQWAALLQALATRPGEKPSRVRISGVPSPYLGPKPAASLAATSARLRDFAKLLGVDFEFVPLLRPVHELDRSDFLVEPDETVAVNFMLQLYHLLGDSDEPVRRVLRLVKSLDPSVVTLGEYEVSLNRAGFVDRFANALLYYKPVFESLDVAMPRDSPERVRVERCMFGERIRRAIGPEEGAERTDRMAASREWQTLMEWCGFEPVKLSNYAMSQADLLLWNYDSKYKYSLVELPPAFLSLAWEKQPLLTVSAWR

SEQ ID NO: 11885 - protein, 491 aa, Zea mays
  VARIANT 171: note = Ancestral polymorphism is F, Derived polymorphism is S
  VARIANT 96: note = Ancestral polymorphism is D, Derived polymorphism is V
MGEEEGAPTVAAAAESAPPHLLLICFPGQGHVNPMLRLAKRIAAKGLLVTFSSISRVGAMLAASVGVSAGGDGVPVGRGRVRFEFMDDEDPGPDLDDLLRHLAKDGPPAFAELLERQADAGRPVACVVVNPFMPWAVDVAADAGIPSAVLWVQSCAVFSLYYHHVHGLVEFPPEDDLDARFTLPGLPEMSVADVPSFLLPSNPYKLLVDAIIAQFHTIDRASWVLVNSFTELEPDVAAALPGVTPRPPELIPVGPLIEVDEQHDGDGDGAGSGAVRGDLMKAADDCVEWLDAQAPRSMVYASVGSVVRLNAEEVGEMAHGLASTGRPFLWVVRPDTRPLLPEGFLDSVAGRGTVVPWSPQDRVLAHPSIACFLTHCGWNSTLETIAAGVPVVAFPQWGDQCTDAKFLVEELRIGVRLRGPLRRDAVREAVDAAVAGPEADAMLANARRWSAAAREAVALGGSSDAHIQAFVDEVARRACVVPPSSEIPSPS

SEQ ID NO: 11886 - protein, 130 aa, Zea mays
  VARIANT 24: note = Ancestral polymorphism is A, Derived polymorphism is T
  VARIANT 115: note = Ancestral polymorphism is A, Derived polymorphism is V
MHHGYPKETLVRFLKAREWNVAKAHKMIVECLNWRIQNEIDSVLERPITPVDLYRSICDSQLIGLSGYTKEGLPIFGIGVGHSTYDKASVITLMLAICLVGYNYSQNHKSVWFEAIGTKPNKDVDFHIGS

SEQ ID NO: 11887 - protein, 139 aa, Zea mays
  VARIANT 98..139: note = Derived polymorphism lacks residues 98 to 139
  VARIANT 67: note = Ancestral polymorphism is R, Derived polymorphism is W
  VARIANT 65: note = Ancestral polymorphism is R, Derived polymorphism is G
  VARIANT 60: note = Ancestral polymorphism is E, Derived polymorphism is D
  VARIANT 37: note = Ancestral polymorphism is A, Derived polymorphism is G
  VARIANT 20: note = Ancestral polymorphism is P, Derived polymorphism is L
MAAPATTSLLSTLLNLPLAPLSGKSSPPSVVHVARRGPMVVVAAKGYNVQILVDENEGEESIFRRFRREVMRAGVLQEIKRRRRYESKTDEKKRKAREAGRRNRRRRMMDEPRFPEEDADATAKARDEDDDNWEIDGIL

SEQ ID NO: 11888 - protein, 238 aa, Zea mays
  VARIANT 130: note = Ancestral polymorphism is E, Derived polymorphism is D
  VARIANT 189: note = Ancestral polymorphism is V, Derived polymorphism is A
  VARIANT 193: note = Ancestral polymorphism is D, Derived polymorphism is V
  VARIANT 195: note = Ancestral polymorphism is S, Derived polymorphism is P
  VARIANT 207: note = Ancestral polymorphism is S, Derived polymorphism is N
  VARIANT 212..238: note = Derived polymorphism lacks residues 212 to 238
  VARIANT 213: note = Ancestral polymorphism is S, Derived polymorphism is P
MPLFPRSELAQLPSHVCSPLSVSLRAAACRRRPVSSTRARCLMGVEVVEHVAEVTEKLAADAASSMPENGSLHKVAVEVECVAEAMDKDAHKVEAVNDKDLPAAHPQRLIMPHDRAQATASLCYTEHISEASIQFDLHRRRDFAIVASSGLCSFTLARDNSQSVLTRLKLCISMLFRFCTTGLPSDVTVEVGDVSFHLHKFLLLSKSAFLEWSIEENSDQEECIIKLNVIPGVPSHLS

SEQ ID NO: 11889 - protein, 361 aa, Zea mays
  VARIANT 261: note = Ancestral polymorphism is R, Derived polymorphism is C
MSALRHSLPIILLQLYILSGRPAAAKVPALFVFGDSTVDTGNNNYISTLMKSDFAPYGRDLWPGSGGGSTSSGQSTGRFSNGRLAVDFISEAFGLPPLVPAYLDPDANMSSLATGACFASAGAGYDNATSDLFSVLPLWKELDYFKEYAAKLRTFQGDDKAQETLSEALYIVSMGTNDFLENYYAVPSGHAAQYAAASDYAGYLLGVAESFARKLHALGARKLDLNGLPPMGCLPLERHAATGACTEEYNAVAQAFNAGLRDLVARLDAGLGGGARVVYGDVYGPVADVLADPAAYGFEDVGAGCCGTTGRFEMGYMCNEASLLTCPDAGKYAFWDAIHPTEHLHRFLADRKMNTTLYVFQ

SEQ ID NO: 11890 - protein, 542 aa, Zea mays
  VARIANT 346: note = Ancestral polymorphism is S, Derived polymorphism is F
MEVALVERLEAAVARLEAAVASGASLASTAPRDFDALEARSDPAIMAYDEFVAEAVGRLTAAAEKIGGKVLDATKVLAEAFAVAKDMLVQAKQHQKPASMADAQGFVKPLSDVMAKATAMTEGRRPDYFNHLKSVADSLPALAWVAFLGKDCGMSFPTAHVEESWQMAEFYNNKVLVEYRNKDPDHVEWAKALKDLYMPGLRDYVKKHYPLGPVWGPAGGAVVSQPKAAAPTPKAPAVKAPPPPAPPAAPLFSTEKSPKSSKPKEGMSAVFQEISSKPVTAGLRKVTDDMKSKNRADRSGVVSSTAPAPAAAPEKTSRAGLCAEFEPNGLISFHKDKTVHHSILTSVMLDQNYVLTWYQMMSMFQYVPSLVIIDRWVVENQVGKKTLAIDDCDSRQSVYVYGCKDSVLQVNGKVNNITVDKCTKFGIVFKDVVAAFEIVNCNGVEVQCQGTSPTISIDNTSGCQLYLSKDSLGASITSAKSSEINVMVPSGGADGDWVRSAPYICTFGCMRKLNVEHALPQQYIHSFKDGQFTTSPVSHSGA

SEQ ID NO: 11891 - protein, 442 aa, Zea mays
  VARIANT 258: note = Ancestral polymorphism is D, Derived polymorphism is Y
  VARIANT 190..442: note = Derived polymorphism lacks residues 190 to 442
MTGRRELLLLALLGVLQLALRLPSAASQSFIGINYGEVADNLPPPSSTARLVQSTTITKVRLYGTDPAIISAFSGTGVSLLLGATNGDIANLASSPAAAAAWVAAHLPASSPAVSTVSVGNEVLFADASLASQLVPAMQNLHDALPPNSSVKVSTVNAMDVLASSDPPSSGAFKPELAAALDPLLAFLSKTGSPFLINPYPYFAYLSDPRPETLAFCLFQPNAGRPDAGSSLTYTNMFDAQVDAVRAALDAKGYKDVDIVVAETGWPHKGDPDEAGATVENARAFVSGLVSHLRSLSGTPRAPGKSVETYIFAMYDEDLKPGKASERYFGLFQTSLAETYPTGLLRNGTAGPIPATAPAPAPTTSAATLKPTPGQQTQVTPAQQGSTAAAGPSGICRPGPGTATSRGTTTACAQPSAAESSRASSMLPIIAGFPVIALLMFT

SEQ ID NO: 11892 - protein, 137 aa, Zea mays
  VARIANT 88..137: note = Derived polymorphism lacks residues 88 to 137
  VARIANT 84: note = Ancestral polymorphism is P, Derived polymorphism is S
  VARIANT 81: note = Ancestral polymorphism is R, Derived polymorphism is C
  VARIANT 41: note = Ancestral polymorphism is G, Derived polymorphism is R
  VARIANT 10: note = Ancestral polymorphism is G, Derived polymorphism is R
  VARIANT 8: note = Ancestral polymorphism is G, Derived polymorphism is D
MSSTGGGGRGKAKPATKSVSRSSKAGLQFPVGRIARYLKAGKYAERVGAGAPVYLSAVLEYLAAEVLELAGNAARDNKKNRIVPRHIQLAVRNDEELSKLLGTVTIAAGGVMPNIHQTLLPKKAGQKGDIGSASQEF

SEQ ID NO: 11893 - protein, 143 aa, Zea mays
  VARIANT 37: note = Ancestral polymorphism is E, Derived polymorphism is K
  VARIANT 32..143: note = Derived polymorphism lacks residues 32 to 143
MNNRFTKIREQGSKGKKSNPLVLEELLWENEWVQESEEDEELWSAVDEVLGATQATQGRNLPRASAARGGRTYSETYVRSRKRQKVAVAQDLQQGDGSDSDSHNENDHQKQTQNDQDAAGKAIDEEEESVAASDQFKLDDDLI

SEQ ID NO: 11894 - protein, 103 aa, Zea mays
  VARIANT 55: note = Ancestral polymorphism is I, Derived polymorphism is M
  VARIANT 49: note = Ancestral polymorphism is P, Derived polymorphism is S
MAYALEYNYQKGISFFTDLLVVSENRQTFDLEGDSGSLIILTSQDSEKPRPIGIMWGATANRGRLKLRCDHGPQNCTSGVDLGHLLDRLELDLIITSESLKDN

SEQ ID NO: 11895 - protein, 413 aa, Zea mays
  VARIANT 200..413: note = Derived polymorphism lacks residues 200 to 413
  VARIANT 202..413: note = Derived polymorphism lacks residues 202 to 413
  VARIANT 317: note = Ancestral polymorphism is P, Derived polymorphism is L
MGVPTVSENGGSQYELLRQPSLGNLSSSPSRNTLGRPGPSSNSSVQSQTSNNTSPILLQWLDCISQLLRLYPSAFQFSSKFLVDFMDCVLSCRFGNFLCNRYALYFSFLPWNGHAKDIAKWRAKDIKLKLESMKQYLQREKRINSIALVTARSAQRENAATPRVTRAATPPPPQHPPLPPSSSLAVARADSRESVQMRGWRQRGHGRGTSPPASPAWLGRRAWNQIRWRACSVGCGPRQRRSCLCSWGMELAAAGGPSRGGRWPQQIGLGAAVRSGGPVAGFAVPEADAGCGAPAGELPMVPRPFRTDGGGVPDVTPFLKASLLLAGAEQRIKVLEVSLVKNRSCLEWGVSWLGPDAPADHFCESFCPFRTREGCRWPDAPCAQLGSQFVGLKANFDAFDRLSIHDYYLDRSS

SEQ ID NO: 11896 - protein, 579 aa, Zea mays
  VARIANT 309: note = Ancestral polymorphism is Y, Derived polymorphism is C
MRRRWDSCFSGSDVRVGGRVPPEEPEPEVFSFAEPLPSWPTGGGFARGRIRIGGGELELAAATAFQKICTLSSRRRGGGGSATFYRPVGVPEGFSLLGYYCQPNCRPLHGHVLVARAGERPSGASPQPPPPPLCKPLDYTLIWEFQASGDTGYGYGRSDAYFWIPVPPERYRALGCLVTTEPRRPPLEEVVCVREDLTDECEPHGSLLCLEQPRPSSFFTVRGVRPVRRGIREKGVCVGTFCCAADGLPPREHGMACLGNVELDLSAMPTLEQAHAVIRHYGPTLFFHPKEVYLPSSVSWFFKNGAALYRRGGDTAGEEIDGEGSNLPGGGCNDGEFWIDVPSGERGRAVCRGSIDSAELYAHVKPAMGGTCTDVAMWVFCPFNGPARLKLGPISLPLGKTGRHVGDWEHFTFRVSNLTGELMGVYYSQHSGGHWVDASALEYIDGNRPVVYSSRNGHASYAYPGVYLQGSAALGVGIRNDAARSSLFVDSSARYRIVAAGYLGEGAVVEPQWLQFMREWGPTVVYKWRKRMEWVIGRLPPWLRCRAESMLNKMPNELSREEGPTGPKEKNNWEGDERW

SEQ ID NO: 11897 - protein, 451 aa, Zea mays
  VARIANT 80..451: note = Derived polymorphism lacks residues 80 to 451
MGSSRNVPHKVMQDEITPLLPIKAEEDAVHEFDGASFSGAVFNLSTTIVGAGIMALPASIKMLGLIPGILMIILVALLTETSIDMLVRCSHQGKITSYGWLMGDTFGQWGRIALQASVVINNVGVLIVYMIIIGDVLSGTSSTGVHHSGVLEGWFGPHMWNSRPIVLLATTLLVFAPLVSFKRLDSLRYTSALSVALAVVFVVITAGVAIVRLIQGTVEIPKLFPEIDGVSSVWKLFTAVPVLVTAYICHYNVHSIDNELEDKTQIKPIVQTSLGLCSSVYIATSFFAYLLFGEATLADVLANFDSDLRIPLSSAFNDIVRVSYVVHIMLVFPIVFFALRLNLDGLLFPTARHISGDNKRFTIITISLIAVIYLAAIFIPSIWDAFQFTGATAAVLIGFIFPAMIILRDPYGVSTKRDKVLAVTMIVLAVVSNCVALYSDAFNIFYRKQEA

SEQ ID NO: 11898 - protein, 240 aa, Zea mays
  VARIANT 126: note = Ancestral polymorphism is A, Derived polymorphism is D
  VARIANT 109: note = Ancestral polymorphism is M, Derived polymorphism is V
  VARIANT 56: note = Ancestral polymorphism is R, Derived polymorphism is Q
  VARIANT 32: note = Ancestral polymorphism is E, Derived polymorphism is D
  VARIANT 27..240: note = Derived polymorphism lacks residues 27 to 240
MCTRGHWRPSEDEKLKELVALYGPHNWNAIAEKLQGRSGKSCRLRWFNQLDPRINRSPFSEQEEALLLASHRVHGNRWAVIARLFPGRTDNAVKNHWHVIMARRCRERMRLSNRGGAAAGQHGAVDTGAVEDGSNPRNAKKLRPDASSVASFLDKYRREFSVVVPFAINHDRKQQDYCSTTNEADANKSVEFYDFLQVNANSSDTKCGSSIEEQEENRDDQAEGQVQFIDFLEVGVSHPQ

SEQ ID NO: 11899 - protein, 113 aa, Zea mays
  VARIANT 50: note = Ancestral polymorphism is A, Derived polymorphism is T
MGSLKLTEIVSKKWGVGGSSKVTSPSAAACPRGHFAAYTREGRRFFVPIAYLASDTFRELLSMAEEEFGEPGARPIVLPCSADRLEQILDAFRSGGGAKKKSAGTAGRIVKIW

SEQ ID NO: 11900 - protein, 1131 aa, Zea mays
  VARIANT 73..1131: note = Derived polymorphism lacks residues 73 to 1131
  VARIANT 143..1131: note = Derived polymorphism lacks residues 143 to 1131
MSSSRPAHSSSSSSRTRQSSRARILAQTTLDAELNAEYEESGDSFDYSKLVEAQRSTPPEQQGRSGKVIAYLQHIQRGKLIQPFGCLLALDEKSFRVIAFSENAPEMLTTVSHAVPNVDDPPKLGIGTNVRSLFTDPGATALQKALGFADVSLLNPILVQCKTSGKPFYAIVHRATGCLVVDFEPVKPTEFPATAAGALQSYKLAAKAISKIQSLPGGSMEALCNTVVKEVFDLTGYDRVMAYKFHEDEHGEVFAEITKPGIEPYIGLHYPATDIPQAARFLFMKNKVRMICDCRARSVKIIEDEALSIDISLCGSTLRAPHSCHLKYMENMNSIASLVMAVVVNENEEDDEPEPEQPPQQQKKKRLWGLIVCHHESPRYVPFPLRYACEFLAQVFAVHVNKEFELEKQIREKNILRMQTMLSDMLFKESSPLSIVSGSPNIMDLVKCDGAALLYGDKVWRLQTAPTESQIRDIAFWLSEVHGDSTGLSTDSLQDAGYPGAASLGDMICGMAVAKITSKDILFWFRSHTAAEIKWGGAKHDPSDKDDNRRMHPRLSFKAFLEVVKTKSLPWSDYEMDAIHSLQLILRGTLNDASKPAQASGLDNQIGDLKLDGLAELQAVTSEMVRLMETATVPILAVDGNGLVNGWNQKVAELSGLRVDEAIGRHILTLVEDSSVSLVQRMLYLALQGREEKEVRFELKTHGSKRDDGPVILVVNACASRDLHDHVVGVCFVAQDMTVHKLVMDKFTRVEGDYKAIIHNPNPLIPPIFGADQFGWCSEWNAAMTKLTGWHRDEVVDKMLLGEVFNSSNASCLLKSKDAFVRLCIVINSALAGEEAEKASFGFFDRNEKYVECLLSVNRKVNADGVVTGVFCFIHVPSDDLQHALHVQQASEQTAQRKLKAFSYMRHAINKPLSGMLYSRETLKSTGLNEEQMRQVRVGDNCHRQLNKILADLDQDNITDKSSCLDLDMAEFVLQDVVVSAVSQVLIGCQAKGIRVACNLPERSMKQKVYGDGIRLQQIVSDFLFVSVKFSPAGGSVDISSKLTKNSIGENLHLIDFELRIKHRGAGVPAEILSQMYEEDNKEQSEEGFSLAVSRNLLRLMNGDIRHLREAGMSTFILTAELAAAPSAVGR

SEQ ID NO: 11901 - protein, 157 aa, Zea mays
  VARIANT 65: note = Ancestral polymorphism is R, Derived polymorphism is Q
  VARIANT 70: note = Ancestral polymorphism is G, Derived polymorphism is A
  VARIANT 135: note = Ancestral polymorphism is G, Derived polymorphism is V
MDGATALNSREEWHGSPVYVLSTPQPLASDEGSSSSTSTSPPLLWLDSGASHHAVGDARILCNFQDPSAATAVRLADDFRLLVTKVGDIQSANIQIPDVYLVPRLQTNVISVRQLAKSKIIPTFYENHTELWRQGELVSGAIADEETSLYRLYYLAS

SEQ ID NO: 11902 - protein, 1124 aa, Zea mays
  VARIANT 794..1124: note = Derived polymorphism lacks residues 794 to 1124
MPENIDLVLEFLRKNRFAKAEAALRGELTGCADSNGMTVQRCVAELKEDDEQEDLVSSNGGPNGAVTERSADSSREFIVKEVDVGALPNGLDGKKGSGIGQPQENNVGDLYPWTFSIANSTAEQLAELLVSEEVPRHRRAAMLAEKRDRGVGTEQPGPLLEQKVSSGRGKGKVDAAGRTAINEQGHSRDKNLVPEKEEMLNGCTVKTVLPFPGENPSSSYNSTHHENERKEVRRSINADGVGKGAKGHFDEGNRQNYFEKSLDTDQVSDRCFDLQLVGDNQREELPKLPPVRLKSEDKLVNMNWEDKINHHGSGAKQSSADHAFMIGSYLDVPIGQDITSSGFFPCGRRTIGSSWLSVSQGITEDTSGFARLDDDSLEYPIGEYWDSDEYDDDDDVGYTRQPIEDETWFLAHEIDYPSDNEKATDHTRGPDRHDRPTKDEDDDQSFVEEDSYISGEQYFHGKNIAQIGTSEGPMVNGIPDNDMIAQYDGQLLDPEELNLMHSEPAWQGFVLQNSELGMLGNGKFLNDSERPHPDDPFVEDDQHGSVRSIGVGISSDAADIGSEVRESLIGGSSEGDIEYFNESSLSVSGKRHSQQDPEKKRVGAKGVKHDQINYAAGIQKGNLLPGAADGGFSFPPPLHSVKNHDSDTKTLWSKKDEMYCINDLDDCQNGVASDDMLATWKKKNSESSLRSSRDEMTSDVVRSRNSSPSYGETEDTTNVRRHKLDDAQEDTGTNLDDEEAAALQEQVRQIKVQEEEFETFNLKIVHRKNRTGFEEDKNFHVVLNSVIAGRYHVSEYLGSAAFSKAIQAHDLHTGMDVCVKIIKNNKDFFDQSLDEIKLLKYVNKHDPGDKYHLLRLYDYFYYRQNYFEIFQIHPLEWLDTACGHLEHLLIVCELLKANLYEFQKFNRESGGEVYFTMPRLQSIAIQCLEALQFLHGLGLIHCDLKPENILVKSYSRCEIKVIDLGSSCFETDHLCSYVQSRSYRAPEVILGLPYDKKIDIWSLGCILAELCTGNVLFQNDSPATLLARVMGIIGAIEQAMLAQGRDTFKYFTKNHMLYERNQESNRLEYLIPKKTSLRYRLPMADQGFIEFVACLLEVNPKKRPSASEALKHPWLSFPYEPISS

SEQ ID NO: 11903 - protein, 389 aa, Zea mays
  VARIANT 74..389: note = Derived polymorphism lacks residues 74 to 389
  VARIANT 82: note = Ancestral polymorphism is G, Derived polymorphism is V
  VARIANT 108: note = Ancestral polymorphism is R, Derived polymorphism is W
  VARIANT 348: note = Ancestral polymorphism is Y, Derived polymorphism is H
MAGSMQAADAAGRLSALLSLLALRRLLAVLQPLALLLLLPFRWRSRPGAGAAASAPGASGKKGKSASSSSSSSSVVLRVPAGSPMVAARRQASARREVAMRRAREAGREYELIPTARGETLFTQCWWPRPSSTVKPRALVVVMHGLNEHSGRYDHLARRLNDIGIKVYGMDWTGHGGSDGLHGYVQSLDHAVNDLKMYLKKVSAENPGLPCFCFGHSTGGGIILKAALDPDVETLISGVVLTSPAVRVQPAHPIIAAMAPIFALIAPRYQLTASHRNGPPVSRDPEALRAKYADQLVFTGAIRVRTGYEILRLTSYLQPHLQRVAVPLLVMHGADDLVTDPEGSRALYERASSADKSLRLYHGLLHDLLIEPEKDRVMDDIVAWLSRRV

SEQ ID NO: 11904 - protein, 25 aa, Zea mays
  VARIANT 1: note = Ancestral polymorphism is M, Derived polymorphism is T
  VARIANT 15..25: note = Ancestral polymorphism lacks residues 15 to 25
MAAAAYGTESLPLQRRTNCTHSSKS

SEQ ID NO: 11905 - protein, 225 aa, Zea mays
  VARIANT 172..225: note = Derived polymorphism lacks residues 172 to 225
  VARIANT 79: note = Ancestral polymorphism is Q, Derived polymorphism is R
  VARIANT 61: note = Ancestral polymorphism is D, Derived polymorphism is G
MTVYLFAKEELNCNLTAVKENLMKPVTVSFKEGLGQKFRQPSGTGIDFSVFEESDLLKQGDMDVYPLAVKAETALPVDQPPEGDDQKMKTPNSQITQAVFEKKENGDYHVRVVCQILWVNGTRYELQEIYGIGNSVEGDADANDPGKECVICLSEPRDTTVLPCRHMCMCSECAKVLRYQTTRCPICRQPVERLLEIKVNNKSEDQQQMPQSPPLPALAPQQEEV

SEQ ID NO: 11906 - protein, 279 aa, Zea mays
  VARIANT 190: note = Ancestral polymorphism is R, Derived polymorphism is C
  VARIANT 187..279: note = Derived polymorphism lacks residues 187 to 279
  VARIANT 186..279: note = Derived polymorphism lacks residues 186 to 279
  VARIANT 183: note = Ancestral polymorphism is P, Derived polymorphism is S
  VARIANT 136: note = Ancestral polymorphism is S, Derived polymorphism is L
  VARIANT 114: note = Ancestral polymorphism is S, Derived polymorphism is L
  VARIANT 47: note = Ancestral polymorphism is S, Derived polymorphism is F
MIFATKYGKEFVAAASELMPDCGVNRQAGQLHLVKPYMVAVQSNNVSAMNEALNELYVEDEDYERLRESVDMHDNFDQIGLAQKLEKHELLEMRRIAAYIYKKAGRWKQSIALSKKDNMYKDCMETCSQSGDRELSEDLLVYFIEKGKKECFASCLFICYDLIRPDVALELAWMNNMVDFAFPYLLQFIREYTSKVDDLVKDKIESQKEERAKEKEEKDLAAQQNMYAQLLPLALPAPPMPGMGGPPPPMGGMGMPPMAGMGMPPMGPGPMPAFGMGGY

SEQ ID NO: 11907 - protein, 212 aa, Zea mays
  VARIANT 179..212: note = Derived polymorphism lacks residues 179 to 212
MALSVHKVTVKSSSMGWKTLSSTIIITISEIQMAPHTRLREFLNLQNIFRELLLAFVERSKQRPKQLIFYRDGVSEGQFKQVLEQEIHEIEKAWTALYNEKPKITFVVVQKRHHTRLFPSKPKDRQYADKSGNIRAGTVVDNNICHPTEFDFFLCGHAGAKLLVELQGTSRPTHYHVLRDDNTFTADVYGLNASSFLCVAILGTYLEAACSN

SEQ ID NO: 11908 - protein, 152 aa, Zea mays
  VARIANT 28..152: note = Derived polymorphism lacks residues 28 to 152
MVSLLLCIIFFALLQCVCDWENRDDMFRDVEEIIRRQIKMSVLPSVQPFHAIAYPIDPLLALEINRKYVAHCSLIASRFGLPPFVHPPPVPVKAEGKHCRLEVGYVSSDFGNHPLSHLMGSVFGMHDRANIEVLFPLNLSLFTLCCGSLSDP

SEQ ID NO: 11909 - protein, 150 aa, Zea mays
  VARIANT 38: note = Ancestral polymorphism is G, Derived polymorphism is S
  VARIANT 40: note = Ancestral polymorphism is G, Derived polymorphism is D
  VARIANT 43: note = Ancestral polymorphism is R, Derived polymorphism is C
MLTCFHGSGGGNSRITKSVGFIVKSMKALSLLKVKTAGDGHPRAPRRHRRWHRRRSPEADELQDKDVTAASSSASSSAKIAPAQPHEATAVTFGETASTKTRSCGSKEELNTGTATSAARHWKTTWRRPPRVRRTWQATRSGRRSRSPAC

SEQ ID NO: 11910 - protein, 377 aa, Zea mays; identical to SEQ ID NO: 1695
  VARIANT 299: note = Ancestral polymorphism is I, Derived polymorphism is T
  VARIANT 259: note = Ancestral polymorphism is C, Derived polymorphism is G
  VARIANT 241: note = Ancestral polymorphism is S, Derived polymorphism is C
  VARIANT 232: note = Ancestral polymorphism is A, Derived polymorphism is T
  VARIANT 137: note = Ancestral polymorphism is A, Derived polymorphism is S
  VARIANT 105: note = Ancestral polymorphism is V, Derived polymorphism is A
  VARIANT 101: note = Ancestral polymorphism is E, Derived polymorphism is K
  VARIANT 88..377: note = Derived polymorphism lacks residues 88 to 377
  VARIANT 70: note = Ancestral polymorphism is K, Derived polymorphism is R
  VARIANT 63: note = Ancestral polymorphism is K, Derived polymorphism is N

SEQ ID NO: 11911 - protein, 416 aa, Zea mays
  VARIANT 365: note = Ancestral polymorphism is I, Derived polymorphism is V
  VARIANT 282: note = Ancestral polymorphism is V, Derived polymorphism is L
MEAAVAAALKSPTAARPSWRPAAPGATSLPFDRRRSFAFGSIKGLGRQQLTSRTRRRSSVVRASWSPSESLPPSSSMAPLRMESPAGQLLSQILHTHPHLLPAAAEQQLELLQTDREAEKNKDKESDAGDKLAPTGVDLVLYRRIAQVKEKERRRTLEEILYALVVEKFVEAGVSLVPALSRSIDSSGRVDQWAETVEGRLQRLHSPEAYEMIENHLALILGQRQSDATIAAISKLRVGQVYAASVMYGYFLKRVDQRFQLEKTMKSLPWGSEEEDGALYQVMTTDSMPSAQSSSSHPEMGSWTAAPDFNAGGPSESIKPCRLRSYVMSFDPDTLQRYATVRSKEAFGIIEKHTEALFGKAEIVVTPGGTVGSSKDEHIRISFAGLRRLVLEAVTFGSFLWDVESFVDSSYHFVTS

SEQ ID NO: 11912 - protein, 1029 aa, Zea mays
  VARIANT 228..1029: note = Derived polymorphism lacks residues 228 to 1029
MGVGGGGGQAAVSAPAPVPAEEAGKDAEEGGGWTVKAKLIAAAVLVWVLGSAALWVFLHSYFRHAALRKAEEALVSMCEERARMLQDQFAVSVNHVHALAILVATFHYEKHPPALDQNTFADYTARTSFERPLLSGVAYAQRVVHADREGFERHQGWIIKTMKHEPSPAQDEYAPVVYSQETVSYIEGLDMMSGEVCGDVSRSFLADGLQLFSAGVGSEPGCVSVVLQEDRENILRSRASGKAVLTRPFRLMSNHLGVVLTFPVYHADLPSDAKEEDRVAATAGYLGGAFDVESLVENLLRQLAGNQELVVNVYDVTNISNPLVMYGSEVPLGNPSPSHICMLDFGDPFRKHHMVCRYRNKPHVPWSAISTPSGVFVICMLVGYIAGAAWSRYDNVKEDCRKMEELKKQAEAADVAKSQFLATVSHEIRTPMNGVLGMLDMLLDTDLTSTQRDFAQTAQVCGKALISLINEVLDRAKIEARKLDLESVPFDLRSILDDVISLFSSKSREKGIELDVYVSERVPEILLGDPGRFRQIITNLVGNSIKFTERGHIFVQVHLADHSNLATESKVEPVANGMNGHTDEKTAVATSVSLNTLSGFEAADSRNSWENFKLLLSYEKNEMPYESVSDKVTLVVSVEDTGIGIPLDAQAKVFTPFMQADSSTSRTYGGTGIGLSISKCLVELMGGQINFVSRPHVGSTFTFTAVLKRCDRSAIGDSKPVMLHPLPSSFKGLSALLVDRRPVRATVTKYHLQRLGIACDVVATIELALGVLSGRNGSSLTSMKQPCMLLIESDSWGFNIDVSLRSRLLEMKQNGHTHVLPKIILLAAAESGKLKEHYAVDSVITKPLKASALAACLFQTLGIKQSSNERSDNSGSLYGLLLGKNILVVDDNKVNLRVAAGTLKKFGAKVECVESGKDALALLQVPYKFHLCLMDIQMPEMDGFEATKQIRAMEAKANEQAVACDNSEIDGATRAARWRLPVLAMTADVIQATHEECTKCGMDGYVTKPFEEKQLFQALQKFLDPGMSC

SEQ ID NO: 11913 - protein, 443 aa, Zea mays
  VARIANT 32: note = Ancestral polymorphism is R, Derived polymorphism is W
  VARIANT 45: note = Ancestral polymorphism is A, Derived polymorphism is T
  VARIANT 171..443: note = Derived polymorphism lacks residues 171 to 443
  VARIANT 186: note = Ancestral polymorphism is P, Derived polymorphism is T
  VARIANT 240: note = Ancestral polymorphism is A, Derived polymorphism is S
  VARIANT 311: note = Ancestral polymorphism is L, Derived polymorphism is S
  VARIANT 313..443: note = Derived polymorphism lacks residues 313 to 443
  VARIANT 328..443: note = Derived polymorphism lacks residues 328 to 443
  VARIANT 423: note = Ancestral polymorphism is V, Derived polymorphism is L
MEGDSTNLDAAIESLLNVEKQMRLAGDVAGTRKAVIDIVELCYKAGAWKTLNDQIVLLSKRRGQLKQAITAMVQKAMDYIDLTPDIDTRVELIKTLSSVSAGKIYVEIERARLIKRLANIKEEQGKIDEAADLMQEVAVETFGSMAKTEKIAFILEQVRLCLDRQDYVRAQILSRKISTRVFDADPSKEKKKPKEGDNIVQDAPADIPSLLELKRIYYELMIRYYLHNNDYLEICRCYKAIYDIPAIKEDPTKWIPILRKICWYLVLAPHDPMQSSLLNATLEDKNLSEIPNFRLLLKQLVTMEVIQWTALWEFSKHEFENEKNLLGGALGAKAAEDLKLRIIEHNILVVSKYYSRVTIKRLADLLCLSLQEAEKHLSDMVNSKSLTAKIDRPMGVVSFRVVQDCNGTLNSWATNLEQLLDLVEKSCHQIHKETMIHKAVLKA

SEQ ID NO: 11914 - protein, 254 aa, Zea mays
  VARIANT 151: note = Ancestral polymorphism is N, Derived polymorphism is I
MFFWDFRCYFKNLTVDIKDVKPTSLLKDRLREVEGNPDFSNKDVTASQTSVVAEVPSGTIPSLTHMEQQPEINITSRAMSLPNILNQYAAPVCLPTNNTVEDDKVALMMPEQVPSLTQVSPAQTQSTSPSPFSVNQLMAAIPREEICFKINPKLGSLGPQLQYSKIMDLALDKANREIILPVIQRSVTIASRTTKELILKDYALESDNNTITRSAHLMVRTLAGSLAHVTCKEPLRVALYSNLRNLIQNLMSGS

SEQ ID NO: 11915 - protein, 172 aa, Zea mays
  VARIANT 139..172: note = Derived polymorphism lacks residues 139 to 172
MAASAPAVRPLARAAIPIPLSARPRTARVSLLPLAPLAPAQRLALGRTGQARLPARSRSVRCLAALSPEMRETLDKVVGSSKVLLFMKGTKDFPQCGFSHTVVQILRSLDVPFETLDVLANEALRQGLKEYSSWPTFPQLYIDGEFFGGCDITVEAYKSGELQETLEKAMCS

SEQ ID NO: 11916 - protein, 454 aa, Zea mays
  VARIANT 226: note = Ancestral polymorphism is P, Derived polymorphism is L
MASTVVLRNACSRRLFCYSTLRAAAILGPAAPPDAPAAASAQPPPMAGTLWARSMATFTRTKPHVNVGTIGHVDHGKTTLTAAITKVLAEAGKAKAVAFDEIDKAPEERARGITIATVGFKHAHVEYETAKRHYAHVDCPGHADYVKNMITGAAQMDGGILVVSAPDGPMPQTKEHILLARQVGVPSLVCFLNKVDAVDDPELLELVEMELRELLSFYKFPGDEIPIIRGSALSALQGNNDEIGKNAILKLMDAVDEYIPDPVRQLDKAFLMPIEDVFSIQVNFFMSYYPYCIPTAPICCDEIYSWLQSGPLKTTVTGVEMFKKILDHGEAGDNVGLLLRGLKRGDVERGQVVCKPGSLKTYKKFEAEIYVLTKDEGGRHTAFVTNYTPQFYFRTADVTGKVELLGETKMVLPGDNVTANFELISPVPLETGQRFAMREGGRTVGAGVVSKVIS

SEQ ID NO: 11917 - protein, 68 aa, Zea mays
  VARIANT 24: note = Ancestral polymorphism is V, Derived polymorphism is L
MGSCFSSMGEDAAGYGDERRVRRVWPSDDDGGEWDVDNRAAIYIATFHSHQKNDQHQQQQAPAATAAQ

SEQ ID NO: 11918 - protein, 108 aa, Zea mays
  VARIANT 57..108: note = Derived polymorphism lacks residues 57 to 108
MDEQARSSQHLSSSTAEISLPPSEDSDRMSGQVENDDGLGLVQSDTPVGAADGDSTQITSTLTTFSAYCHKDPNIHTTNEAQLYELVEPNVHPQALASSSQVNVTLEF

SEQ ID NO: 11919 - protein, 105 aa, Zea mays
  VARIANT 80: note = Ancestral polymorphism is S, Derived polymorphism is Y
  VARIANT 53: note = Ancestral polymorphism is V, Derived polymorphism is I
  VARIANT 36: note = Ancestral polymorphism is P, Derived polymorphism is L
  VARIANT 7: note = Ancestral polymorphism is P, Derived polymorphism is S
MQLDCLPAMVQTNLSIDKINAMLKAFDHTRGVILIPVLHMKLSIVLLCSCSMITTLARGTTCSLCGQSRTTNIYHFNFHSHGGCLRSLESKWETSYAECFVICFS

SEQ ID NO: 11920 - protein, 242 aa, Zea mays
  VARIANT 183: note = Ancestral polymorphism is A, Derived polymorphism is V
  VARIANT 210: note = Ancestral polymorphism is L, Derived polymorphism is Q
MADLRPPEPGTNGSSAVVVAALPAVEAAKAAAAAAAAACGAQPPAPPYSKRRRRPSVRLGDIDAPPPRRNHKPSSSSHSRPPRRPHPDDPDTHGGRGPKPPAQRRPRTAWIPAGPAEGCYDDEERYYDDEDQSDSAAAAAAAAAMARVSGSRDAGGDESDGVADWGLPNGRLSSAMRHGRVKAWLDGLGLSRYAPVFEIHEVDGEVLPLLTLEDLKDMGIGAVGSRRKMYAAILKLRSDNAS

SEQ ID NO: 11921 - protein, 982 aa, Zea mays
  VARIANT 88: note = Ancestral polymorphism is H, Derived polymorphism is Y
  VARIANT 99: note = Ancestral polymorphism is A, Derived polymorphism is V
  VARIANT 153: note = Ancestral polymorphism is T, Derived polymorphism is I
  VARIANT 660: note = Ancestral polymorphism is R, Derived polymorphism is G
MEVPPEMLDALAGWFAQSLSPDTAARRGAEQSIASAASSPGFALALLGLAASPRHDLQARLAASVHFKNLLRRRWPKPDADADADVDHLPASDCAIIKAHLLQLLLTTPPLIQAQLSEALAAAAASDFPARWESLLPSIVSSLGTAVNAGDITATNSLLAAVVSLFSRFRNAFDNNALRLDLKYCLDIFAAPLLEVFLFASRRLQAAATTANPLELRPVFECLRLCCEIFYSLNSIDLPEFFEDNMRQWMTEFQAFLTTSYPPPVEADGAPDALRAAVCDNLQLYMEKYEEEFRGYLKEFVEAVWGLLMAQTASPSRVQLAVTAIRFLTTVAESVHHALFGSPEAMKQICDSVVVPNLRLRDEDEELFEGNWVEYVRRDSEGSDADTLRRAACRLLRGLAANYQEQVAALVSAQVQQMLVAYAANRSNNWKEKDAAIYLVIALMQKPGATGGGTPVVDMESFFTSVIVPELQAPDWQSEPMLKATVLRFLKEFKDQIPKATALALLQSVMRFLMHESNVVHSYAATFIENLLIIKDAVPVPGVTTVIRSPRYVAADINPFAPQIIQNLSTALGFPDSQENPYLMKCLMRVLGIANIAGQIVHEITAQLVGILMEVCNNPKNPDFNHYLFEALAAVIGRTGEQDPTLLPAFETSLFPVLQRILVEDISEFWPYAFQIFAQLVNLSRPPLSQNYMQLFGVLLSNATWDRPPCVPALVRLLRAFLRKILNELNQEGRLPNILAISRSLLSRSSTEDSAFYMLNTLVENVGFDILNPYISEIWSALFTRLQTRQTVKFVNSLVVFMSLVLVKYGSSVLVNSVDAIQPNLFTQILQRFWIPNLNLIKGALEVKLTAVASIKLLCESAVLLDAAAAQLWGKLLDSIVTLLSRMNQDGSQQEHNDGTDAVDTQKTSSYSVSFVRLQYAGKSEDDLLKEVNDPKQFVVTSLATISAQFPGRFGPVIEQHVDLANKSVLLQLCAAYNANIV

SEQ ID NO: 11922 - protein, 269 aa, Zea mays
  VARIANT 17: note = Ancestral polymorphism is G, Derived polymorphism is D
  VARIANT 24: note = Ancestral polymorphism is I, Derived polymorphism is L
  VARIANT 36: note = Ancestral polymorphism is V, Derived polymorphism is I
  VARIANT 48: note = Ancestral polymorphism is E, Derived polymorphism is D
  VARIANT 78: note = Ancestral polymorphism is A, Derived polymorphism is T
  VARIANT 141: note = Ancestral polymorphism is S, Derived polymorphism is F
  VARIANT 179: note = Ancestral polymorphism is S, Derived polymorphism is C
MGDADAYAKRVLLTAAGDTVSRGIASTLTKHGCRLVLLGDEGALAATEEEARRCGVGGGCVELVGLDFKACGEAAADAAVDRAWRCFAGLDAFVNCYSYEGEVQDCLSISEDEYMKTIKVNVITPWFLMKAIAKRFQDTKSGGSIVFLTQIIGAERGLYPGAAAYGTSLGAIHQLVRLCAMELGKHKIRVNAACRGLHLQDKFPVSVGKEKAEKATAEVMPLRRWLDPEKDLASTVLYLVGDESRYMTGTTIFVDGAQSIVRPRLRSFM

SEQ ID NO: 11923 - protein, 521 aa, Zea mays
  VARIANT 185..521: note = Derived polymorphism lacks residues 185 to 521
  VARIANT 19: note = Ancestral polymorphism is N, Derived polymorphism is S
MKYFSLARIALERRKFLKNANIAVQRQMTWSNLAHEMTAEFRSLCAEEAYLQQELEKLQDMRNKAKLEGELWDERLSGSSGQNSHLVSKATRLWESILARKGQHEVLASGPIEDLIAHREHRYRISGSQLLAAMDMSSSVPHSELLSSKAGETSIILEKQEEFSQLFQEKEEALTRSDDRNGRTQQTVDVAEILRRWTHALQRIHKQSLHLAKANDGEGPELLRSASSGEASTHSDSLTATLAEHRQHLVSIQGLINQLKEAIPAMQQSIDELSEEVNSVSINSMDQLNSRLPLPVQIAGFGTSEESSSEVSEINSKLSSTHLDKPGGSPALKLPPLFSLTPSSSGKGIQTQKRSALARQRSQDITSEQKTLTIPSTKDQMNGSMHENDDYSAHDIRRSVREAALSKPLKNTERPQDKNSDDGSEHFFIPLSISAAKKEMDSVANRCNQRLGLSPQMKFPKSTSYNADTPINKSPILLSELNGHDSISAMSFLDPAGGPPGTVQPRRSAPAASARPQLVAL

SEQ ID NO: 11924 - protein, 326 aa, Zea mays
  VARIANT 7: note = Ancestral polymorphism is E, Derived polymorphism is V
  VARIANT 118: note = Ancestral polymorphism is V, Derived polymorphism is A
  VARIANT 136: note = Ancestral polymorphism is R, Derived polymorphism is P
MALTARVRRLPQLHISLDVPSCAFRHHNPPAAASTSASRASGEFRLSDFDRLAVLGRGNGGTVYKVAHRRTSALYALKVLHRGDPGAASEVDALRRADSSPHVVRCHSVLPAAAPGEVALLLELVDGGSLDAVAARRGAFAEAALAEVAAQALAGLAHLHARRVVHRDVKPANLLVSAAGEVKIADFGIAKVLSRAGDHCAAYEGTAAYMSPERFDTERHSHADPCAADVWSLGVTVLELLMGRYPLLPAGQKPSWAGLMCAICFGELPSLPDGAASPELRAFVAACLEKDYTKRASVAQLIAHPFVARRDVAASKDALRRLVAGA

SEQ ID NO: 11925 - protein, 77 aa, Zea mays
  VARIANT 8: note = Ancestral polymorphism is L, Derived polymorphism is F
  VARIANT 7: note = Ancestral polymorphism is E, Derived polymorphism is K
MQQSIDELSEEVNSVSINSMDQLNSRLPLPVQIAGFGHAAAVLAHARGQGRRGAGHDDHASRRVPRGAYHLLGLQAS

SEQ ID NO: 11926 - protein, 366 aa, Zea mays
  VARIANT 201: note = Ancestral polymorphism is N, Derived polymorphism is S
MKGGDMSSVSPLVSFVLGAAMATVCVLFFMSAAPARRLVDISAFTSNSNSTADLLLDSSDSPAAADLAEAAPPAPAPVQAPPSPWGDLEEVLARAATKDRTVIMTQINAAWTRPGSLLDLFFESFRTGEGGVARLLDHLVIVTMDPAAYEGCRAVHSHCYFLRTGNGVDYRSEKVFMSKDYLEMMWGRNRFQQTVLELGYNFLFTDVDVMWFRDPFRHISMAADIAISSDVYMGDPYSLRNFPNGGFLFVRASDKTVAFYRAWQQGRWRFLGKHEQDVFNLIKHEEAPRLDLAIQFLDTAYISGFCQLSKDLNRICTLHANCCVGLGAKLHDLRGVLDVWRNYTAGTPEERRAGKFQWKLPGICIH

SEQ ID NO: 11927 - protein, 84 aa, Zea mays
  VARIANT 65..84: note = Derived polymorphism lacks residues 65 to 84
  VARIANT 10..84: note = Derived polymorphism lacks residues 10 to 84
MYPQGPDGERDVSHCLVPATLAGNDTREANEVTATEVHVEEDTARRDAALVMQTTPNMDESRTEGDPDPTGSGSGILGPSAAER

SEQ ID NO: 11928 - protein, 283 aa, Zea mays
  VARIANT 79: note = Ancestral polymorphism is Y, Derived polymorphism is N
  VARIANT 41: note = Ancestral polymorphism is W, Derived polymorphism is R
  VARIANT 15: note = Ancestral polymorphism is A, Derived polymorphism is V
  VARIANT 6: note = Ancestral polymorphism is V, Derived polymorphism is I
MEVKTVKVSNLSLNVLKRELTEFFSFSGDIEYVEMQSESEWSQLAYVTFKDSQGADTAVLLSGATIVDRAVIITPAENYQLPPEAHKQLSGANVSTESAVRKAEDVVSSMLAKGFVLSKDALNLARSFDERHNILSNATATVASLDRQYGLSEKINLGRAIVGSKVKEVDERYQVSELTKSALAAAEQKASFAGSAILSNQYVSVGASWLTSAFTLVTKAAGDMTSMAKDKVERAEEERKAIMWEERNGLVSDYAKIHLDEPSSWEPAVLPLESVDEQKLQAV

SEQ ID NO: 11929 - protein, 347 aa, Zea mays
  VARIANT 56..347: note = Derived polymorphism lacks residues 56 to 347
  VARIANT 93: note = Ancestral polymorphism is R, Derived polymorphism is C
  VARIANT 333: note = Ancestral polymorphism is R, Derived polymorphism is W
MDGFGDDGFGDDGLRDLFPRSDRTVRLGGYDFFSQSESSVPHGDPHGFQALDLNSQVQEFPDLSMYTGIIEGSGARVTGGGRAFSAARLRAPRQGTRGGGRTVSAIGLRAPRNSTRGGGRGRSMSARADSGGARAGTMVVGAAGGTSSCGSMVSDVVGRGSRSMSVGAASVGGVGRGGRQVAMSGGAQDVVGEETINLDGEQEGGDEGFAPDPKKAKTPMVKMMKEWVDRWSNVEAENSKVLRQVLEEKKLALEEKKQAKEDKRQAKEAMKQAMEEMKQAKEQALAAKIKMCQDMALECGASPDSIEFFACATIVRDEYNREFFCNIPTPEARLVFLKRWCQMNNMY

SEQ ID NO: 11930 - protein, 385 aa, Zea mays
  VARIANT 86: note = Ancestral polymorphism is I, Derived polymorphism is T
  VARIANT 162..385: note = Derived polymorphism lacks residues 162 to 385
MAADADAAEVERLYELGERLSSAKDKSELAADYEAIIAAVKGQSVKAKQLAAQLIPRFFRSFPALATRAMSAMFDLVDMEELAIRIQAIRGFPLLGKDTEFVSKIADVLGQLLTSEENVERDAVHKALMSLIREDVKNSLQPLFKHVEQGSEIREKIICFLRDKVFPLKAELLKPQAEMERFITDLVKKSVQDVTGSEFELFMGFLRSLSIFGDSAPRESFQELIEIIQAQADLNSQFNVSDIDHIERWISCMYMALPIFMRGASASKFLNYFVKQIVPAFEKIPEEKKLDLLKTIASSSPYATAQDSRQLLPSVVQLLNKYMPGKKVDDINHNYVECLLYTYHHLAHKTPNTTNSLCGYKIVTGQPSDRLGEDFTEHYKDFTER

SEQ ID NO: 11931 - protein, 739 aa, Zea mays
  VARIANT 65: note = Ancestral polymorphism is G, Derived polymorphism is R
  VARIANT 94: note = Ancestral polymorphism is P, Derived polymorphism is L
MADLATDLFGEPIEAHPPWFKPDAFLRASFDPDAYVAELRSYVPLESLAAELRAHLDALRAELVGLINRDYADFVGLSARLKGVDAAAARMRAPLADLRDKVAAFRAGASAALAALRAGLEQRAAAAAARELLELLLDAFHVVSKVEKLIKELPTAPSDLSNAEVPNSDTGTPNGVAGTGVSETQSILLERIASEMNRLKFYISHAQNLPFIENMEKRVQGATKLLDGSLERCFVDGLEHRDAKVIYNCLRAYAAIDNTSSAEELFRTAVVSPLIQKIIPQNYARAVAGASSDELEEDYQQIKECVQKDCKFILEISSSENSGLHVFDFLGNSILKEVLSTIQKGKPGAFSPGKPKEFLRNYKASLGFLDFLEGYCISKSAVTKFRSELAYTDFMRQWNVGVYFSLRFQEIAGGLDSTLTNTFSPTGLNEAQGKPLLLKQSIKLLESLDSCWSDEVLVFSHCDKFLRLSLQLISRYTTWLSSGLTARKASDGSPNSPADAEWALSIPIEDFIYIMHDVHAVIGELSESGSFIGHVNQLLGSCPIEVFNLVKQSILQAVEPLKERLPAIINVMIGIIVKKSNEDLKHLKGITATYRMTSKLPVRHSPYVSGILHPLKVFLEGDRIRYLSEDDKTKLCRGSTDKITAIYYDLVSEVVTVARKTESSLQRLRQGAQRRVGASTDASDNIISDTDKICMQLFLDIQEYARNLRAIGIDAREIDSYRALWQCVAPKDRQENIQF

SEQ ID NO: 11932 - protein, 266 aa, Zea mays
  VARIANT 120: note = Ancestral polymorphism is R, Derived polymorphism is W
MGYAQLVIGPAGSGKSTYCSSLYDHCQTVGRTIHIVNLDPAAEHFDYPVDMDIRELISLDDVMEEIGLGPNGGLIYCMEHLEDSLDDWFDEQLENYLDDDYLVFDCPGQIELFTHVPVLRNFVEHLKRKNFNVCAVYLLDSQFVSDVTKYISGCMASLSAMIQLELPHINILSKMDLVSNKKDVEEYLDPNAQVLLSQLNRQMAPRFGKLNKCLAELVDDYSMVNFIPLDLRKESSIQYVLSSIDTCIQYGEDADVKVRDFEEDED

SEQ ID NO: 11933 - protein, 349 aa, Zea mays
  VARIANT 1: note = Ancestral polymorphism is T, Derived polymorphism is M
  VARIANT 59: note = Ancestral polymorphism is R, Derived polymorphism is Q
  VARIANT 116: note = Ancestral polymorphism is A, Derived polymorphism is T
  VARIANT 166: note = Ancestral polymorphism is G, Derived polymorphism is D
  VARIANT 171: note = Ancestral polymorphism is E, Derived polymorphism is D
  VARIANT 198..349: note = Derived polymorphism lacks residues 198 to 349
  VARIANT 215: note = Ancestral polymorphism is T, Derived polymorphism is N
  VARIANT 280..349: note = Derived polymorphism lacks residues 280 to 349
  VARIANT 284..349: note = Derived polymorphism lacks residues 284 to 349
  VARIANT 289..349: note = Derived polymorphism lacks residues 289 to 349
  VARIANT 306..349: note = Derived polymorphism lacks residues 306 to 349
MAATLPRKGLTGSREDSFRASQSMYADVECFTGFRKPSEKACIKLWAKGDLPTQHILPRRRVVVFNTMGLMEVIFNRPVDILRKLFDGNTLRSQIEEFFNRFGAGEAAAMCLMIAAKLLYAEDSLISNSVSKKVAEAFEDPGLVGMPQIADYFIPYGIMVIQRPAGTNKCEDGVIVCRLSAGAMKILESKIHSLETFLRSRRNKRRSHAVPLTLNLKVHGLSFFPLQVIYDSLPVALNLLTMLGRKKISERMKLLQDLVPECSKITGKAVMLDEIINYVQSLQRQVEFLSMKLATVNPELGFDIEQIISKQVKPPTRSPCLPLGDESNNQISLDFYCSFLCAFVPILNN

SEQ ID NO: 11934 - protein, 609 aa, Zea mays
  VARIANT 179..609: note = Derived polymorphism lacks residues 179 to 609
MSLRSGGRQLSFELLAGDLTADDPDDISPRSLPDTSSDGQRRRRRRSKRKRGFRSPPIQEAVSEGEQQPRVEGGGNSAAAFRVLDLKSTAETVCESSDAERSAASCVTYVGVELRQRSVSGGGRVVAASADDGTSSCGSSTRESAAAAAAVADVAAMAWRPEANGGMKKKLEKESSLDWEKYMKDNNKILGEFERLDKSPFRYFLGELYGGNSLRSTIAVGNEKKRQRVYNTMFHVPWRCERLIVAGFFVCLDSFLSLLTIMPARIVVTIWRVMKTRKFRRPNAADLSDYGCFVVLALGVASLQMIDISLIYHVIRGQGTIKLYVVYNVLEIFDKLCQSFGEDVLQVLFNSAEGLSACSTDNVTFELMRFILDEAIAVVAFDILFCRLHQLIFLLVTVAQAITLSTCIIAHNNALLALLVSNNFAEIKSNVFKRVSKENLHNLVYYDIIERFHIMAFLLFVLAQNILEAEGPWFDSFLINASLVFLCEVLIDAIKHSFLAKFNEIKPVAYSEFLEDLCKQILNDKPDDRQKDLTFIPLAPACVVIRVLTPVYATLLPAGPFIWRIFWILLWSVLTYFMLAIFKIIVGLILRCLANWYVNLRLTRKQHVD

SEQ ID NO: 11935 - protein, 125 aa, Zea mays
  VARIANT 5: note = Ancestral polymorphism is G, Derived polymorphism is R
  VARIANT 8..125: note = Derived polymorphism lacks residues 8 to 125
  VARIANT 77..125: note = Derived polymorphism lacks residues 77 to 125
MLLFRAAQMVLPFISNFHSMAWLSVVAAVMSFTYATIGLGLGLAKTIVHKGKMILADDTCKILEILADEYWNNHLARNDSVIVDTCHVSRRLGSRLKTSSAVISDVKCDNPKEEGKVQQTKRCEM

SEQ ID NO: 11936 - protein, 370 aa, Zea mays
  VARIANT 162: note = Ancestral polymorphism is A, Derived polymorphism is V
MALAGDERLPPFHLSLNVPSRPAVQESSFRHANPPSSTKAIARNKRLPPFHLSLNVPSRPAAQEPSSRHANPPVAAPEPASTPLARSTQFRLADFDRLAVLGRGNGGTVYKVRHRETCALYALKVLHEDAGAEADILGRLASPFVVRCHAVLPASCSAGDVALLLELVDGGSLDAVSRRRGAFAEAALAEVAAQALSGLAYLHARRVVHLDVKPSNLLATAAGEIKVADFGIARVLSRSGDHCTSYVGTAAYMSPERFDPEAHGGHYDPCAADVWSLGVTVLELLMGRYPLLPAGQQPNWAALMCAICFGEPPALPDGAASPELRSFISACLHKDYCRRASVAELLAHPFIVGRDVLASRDALQQLVAEA

SEQ ID NO: 11937 - protein, 586 aa, Zea mays
  VARIANT 96: note = Ancestral polymorphism is R, Derived polymorphism is W
  VARIANT 233..586: note = Derived polymorphism lacks residues 233 to 586
  VARIANT 514: note = Ancestral polymorphism is S, Derived polymorphism is L
MGRLALAVPVMLLLLCTTCRLTLGITDGLLPNGNFERSPLPSQLRGTRVVGASAIPSWQTSGFVEYISSGQKQGDMVLVVPEGAYAVRLGNEASIRQRLRGAARGARYSLTFSAARTCAQAEQLNVSASGQSGLLAMQTMYSSNGWDSYAWAWVANADEVDIVIHNPGVTEDPACGPLIDSVAIKTLNPPRRTNKNLVKNGDFEEGPYIIPGTKWGVLIPSRVVEDHSPLPGWMVESLKAIKYIDGESFAVPRGRRAVELLAGRESAIAQVIRTVPGRQYVLSFTIGDASNACRGSLMVEAYAGRESTKVAYESAGKGGVKRAVLPFRAASARTRLVFFSSFYSTRSDDLSSLCGPVLDDVVVVSGNFIAQMNPACHYFTVLLLYSRNYLERKKPSEAKFFNKPLENYHYMAIIFGNQQGTGLFAKCTSDPLGFDTSESAGTYGVDYSGDLAGHESNNASPTHDSGESLNPSGPIRDGGDSSTRSGARRNRGCMMMEDEDPLICTVTEAFKTLSDAIKQSAPQPRLIIPPNLWTMMKQIPVFERKHIAHYYGYLCENPALAYAFLEMGLDDQMVWVSMYIKTHLSD

SEQ ID NO: 11938 - protein, 178 aa, Zea mays
  VARIANT 139: note = Ancestral polymorphism is V, Derived polymorphism is F
  VARIANT 141: note = Ancestral polymorphism is P, Derived polymorphism is Q
MVLQLHCATPTITISPPPARPRHYPHHLYGASGALQAPARGLGHLPRLLVGVRDPRADGAVCHVRRQVRYDEDDEEDDDGEEWGHNEDVARMERYSEDARDQALLVKARVDDEVEVVLVFRGFSSSLSGGTAADPARSVLPERAIIQSVDVVKGPFDPNNIEYLEKGVGWEDFRSRLR

SEQ ID NO: 11939 - protein, 603 aa, Zea mays
  VARIANT 117: note = Ancestral polymorphism is S, Derived polymorphism is L
MAAAATTASPSASFPAASLRRDARRTSCVAAAAAATTAAEAGLAAVPAPPPTPMVRVVPESLQRESGCLVEGFRARGACAADGEGFGDAAGEGGGPGAMEYLTSVLSSKVYDVAIESPLQLASKLSHRLGVNIWIKREDLQPVFSFKLRGAYNMMAKLSREQLERGVICSSAGNHAQGVALSAQRLGCDAVIVMPVTTPEIKWKSVERLGATVVLEGDSYDEAQSYAKLRCQQEDRTFIPPFDHPDVITGQGTVGMEIVRQLQGPLHAIFVPVGGGGLIAGIAAYVKRVRPEVKIIGVEPSDANAMALSLYHGKRVMLEHVGGFADGVAVKAVGEETFRLCRELVDGIVMVSRDAICASIKDMFEEKRSILEPAGALALAGAEAYCKYYNLKGDTVVAITSGANMNFDRLRLVTELADVGRKREAVLATFLPEEHGSFKKFTELVGRMNITEFKYRYDFNAKDALVLYSVGIYTDNELGAMVDRMELAKLKTVNLTDNDLAKDHLRYFIGGRSEIKDELVYRFIFPERPGALMKFLDAFSPRWNISLFHYRAQGETGANVLVGIQVPPVDFDEFKSHADNLGYEYMSENNNEIYRLLLRDPEV

SEQ ID NO: 11940 - protein, 116 aa, Zea mays
  VARIANT 62: note = Ancestral polymorphism is E, Derived polymorphism is A
  VARIANT 76: note = Ancestral polymorphism is C, Derived polymorphism is Y
  VARIANT 107: note = Ancestral polymorphism is Y, Derived polymorphism is H
MIEFMEKVVIQLILWSSLEEHYLLLVACKNVFGIRSASWCILSSIEYMEEGCVNMDCVTLIEDYHNKIEFELNKIYDGILKLFASHLPPSLTVPKSKVFYLKMKGDYYRYLAEFET

SEQ ID NO: 11941 - protein, 213 aa, Zea mays
  VARIANT 51: note = Ancestral polymorphism is R, Derived polymorphism is G
  VARIANT 18..213: note = Derived polymorphism lacks residues 18 to 213
  VARIANT 11: note = Ancestral polymorphism is A, Derived polymorphism is V
MCLQVFSSASARGSSSCCCSQFTTSVTWMVCPFVLVPEFPLPRSREAQQTGGGAQVSHAASRQQWTSPELLLNPVLICRNEAEKCLIETSINSIRISMKVKQADELENILAKKFLRFLSMRAEAFQVLRRKPVQVSNLTLITLSSVLCTKHELPGYDISFLITNYHCEDMHKHKLIDFIVQFMEDIDKEISELKLSVNTRGRLVATEFLKQFL

SEQ ID NO: 11942 - protein, 174 aa, Zea mays
  VARIANT 110: note = Ancestral polymorphism is G, Derived polymorphism is V
  VARIANT 64: note = Ancestral polymorphism is R, Derived polymorphism is Q
  VARIANT 47: note = Ancestral polymorphism is R, Derived polymorphism is Q
  VARIANT 41: note = Ancestral polymorphism is A, Derived polymorphism is G
MGSEGSSGPVVVPRNFRLLEELERGEKGIGDGTVSYGMDDADDIYMRSWTGTIIGPPNTVHEGRIYQLKLFCDTDYPDKPPTVRFQTRINMTCVNQETGLVEPSLFPMLGKWEREHTMEDILSSLKREMSTPQNRRLYQPHEVDNFFLSPEAGKVARYRNQMSMAVSDLLHYAL

SEQ ID NO: 11943 - protein, 569 aa, Zea mays
  VARIANT 416: note = Ancestral polymorphism is P, Derived polymorphism is L
  VARIANT 474..569: note = Derived polymorphism lacks residues 474 to 569
MREEMDIDATGAGWLSWREAAVAVLAWLVLHVATRVADALWWRPRRLEAHFAEQGVRGPPYRFLLGSVKEMVGLMAEASAKPMSPPTSHNALPRVLAFYHYWRKIYGPSFLIWFGPTPRLTVAEPELVREIFLTRAEAFDRYEAHPVVRQLEGDGLVSLHGDKWALHRRVLTDAFYPDNLNRLVPHVGRSVAALAAKWNAMAAAAGNGEVEVDVAEWFQAVTEEAITRVTFGRSYDDGRVVFAMQGRLMAYASEAFRKVLVPGYRCVLPDGGASRLRLGFSFKIRRVVCRFLPTKKNWQSWKLGREIRRSLTRLIARRSGMAEEEEEVQAGHSGGFRDLLGAMINAGERKTPAAIPVADMLEECKTFFFAGKQTTTNLLVWATVLLAMHPEWQERARSEVLDICGPDELPSKEHLPRLKTLGMIINETLRLYPPAVATIRRAKTDVQLSDGCMIPRDTELLIPIMAIHHDARFWGPDAAQFNPARFAGGTARAAKHPLAFIPFGLGSRMCIGQNLARLEAKLTMAILLQRFEMKASPNYIHAPTVLMLLYPQYGAPVIFRPRSAHPAAS

SEQ ID NO: 11944 - protein, 70 aa, Zea mays
  VARIANT 25: note = Ancestral polymorphism is A, Derived polymorphism is V
MDHAESATAALNCSGVVLGSLPIRAILVCFQGEPVQDASASPCPSPADVVLVQALQGEVLFSLARKASPT

SEQ ID NO: 11945 - protein, 94 aa, Zea mays
  VARIANT 52: note = Ancestral polymorphism is S, Derived polymorphism is L
MPREYIYEPWTAPTSIQKKANCIIGKDYPKPVVDHETASKECRKRMGEAYALSRVDAKPSKGKTLNSRRKMLHGDRDTSNSTIAKRLKRNSRAE

SEQ ID NO: 11946 - protein, 364 aa, Zea mays
  VARIANT 34: note = Ancestral polymorphism is A, Derived polymorphism is V
MEAATAATAAMMWFRKGLRVHDNPALDAARRHGAGAASARLYPVFVLDPRYLRPDAVAASPGSARAGVARIRFLLESLSDLDARLRRLGSRLLLLRARDDVADAVCAALKDWNIGKLCFESDTEPYALARDKKVTDFALASGIEVLTPVSHTLFDPEEIIKKVFETRMLIIQNGGRPPLTYQSFVSIAGEPPAPAMEEYSELPPLGDTGEYELLPVPTVEELGYGDISQEEIPPFHGGETEALRRMKESLQNKEWVAKFEKPKGDPSAFVKPSTTVLSPYLKDVHRSVRNHTKPPVSLTGQLLWRDFFYTVSYGTPNFDRMKGNKICKQLRNWGWMHHLARHSVACFLTRGDMVCPVICKACIE

SEQ ID NO: 11947 - protein, 859 aa, Zea mays
  VARIANT 287..859: note = Derived polymorphism lacks residues 287 to 859
MGRKKNPIVFLDVSVGDEPDERMIFELFADVAPLTTENFRALCTGELGIGQKTKKPLCYKGTLFHRVIKGFMAQSVPCFLVHDVGCKTDDIDCFSYHIVFKGGDIAKENDSCVTSCFENDYDFNYGTGSGGENIYSGKFTDETCVLLHDDRGLLTTADTGFKPSGSQFCITFKPNSHLDRKHTVFGKLVVGSDVLKRIEQVDVQSPDSTPVIPVTIVNCGELIERKDIGSMSIEIDKKRAAKSKLTRDITSDEESNEGQHKRRRNKSSKRRRKKRRYSYSESDSSSESETESSDYESDSDTYSSDSSDVSSSSDDRRRRRKRHSKKNKRKHSRRKRDHRRERRRRKRGRKSKQKSKSSEDARSKRHRRGRKFKASSQVSEENLAGVAALKDATSPQQKSGIQRSPAQDVSSLQNGEVHTNGVNDSKIERNAAVMPVLTGNRSKSRSQSMSVNHSMSKSMSISPRRSPMKRSSTSPKRSLSRSPVDNNHSRSPIRTPKRSVSRSPARRQIMSRSPARSPPRNSSRSLHISRSPVKAHRRSISRSSARSMQQRSPSRSLERTHVRKSISPSPPLEKGRSITRTSVVSPLRSVSRSPARISRSPHRPSRRSPMRSPRWNIRRSLSRSPARIPRRSVSRSPVRGGRPRRNISRSPSPHRRVVTPPNNGRSPSRSGSPDGSPKRIRRGRGFTQRYSYARQYRSPSADRSHRYGGRNDRDRYMGYRGSRHRSPPRRYRSPPRGRVSSPRYRRRSRSASRSPVYRERGRGGGYSKSPIRSSSPPARKPRSHGDRARSVSRSHLSGSVSRSPPVHHPSPPDSPSVKHASDEKSQSASPALSLSGSPNRGGKKGLVSYGDGSPDSAGK

SEQ ID NO: 11948 - protein, 202 aa, Zea mays
  VARIANT 7: note = Ancestral polymorphism is A, Derived polymorphism is T
  VARIANT 8: note = Ancestral polymorphism is A, Derived polymorphism is D
  VARIANT 50: note = Ancestral polymorphism is A, Derived polymorphism is S
MIVAAIAALAEENGSSQAAIARRIEAQARGDLPASHPALVAAHLSRMSAAGELVAVAGGKYALPPPPAQPAPESPADDGEDDDDDDDCADEVDEEEEAPEPLLVPVPVPQPPAKRGRGRPPKPRPAGFPIGVPGAAASPAAAPRRRGRPPKPRDPHAPPKIPRPRGRPRKNPLPEGMAPRPRPGAPASAKAARPQFAEVGFV

SEQ ID NO: 11949 - protein, 104 aa, Zea mays
  VARIANT 62: note = Ancestral polymorphism is S, Derived polymorphism is N
  VARIANT 39: note = Ancestral polymorphism is P, Derived polymorphism is L
  VARIANT 34: note = Ancestral polymorphism is A, Derived polymorphism is V
MAAAAAVYRRVLKAVQKHVGGGATKQHFRDFVAAEFRAPVGSKADARARLRLAGDYAYLLTSVQHHKDLLLSYNIAVDRSDEMKKILNKSAASVGLQLPDVYQP

SEQ ID NO: 11950 - protein, 434 aa, Zea mays
  VARIANT 349: note = Ancestral polymorphism is H, Derived polymorphism is L
MAAFASAILFTVHLALAFPFRLSSAEAPPLLGAVVGEQQPLLEEARTPRFVTWLRGVRRRIHQRPELAFQEHRTSELVRAELDAIGVPYRWPVAQTGVVATIAGSAGPTVALRADMDALPVQEMVDWAYKSQESGKMHACGHDAHTTMLLGAAKLLQARKGDLKGAVKLVFQPSEEGYGGAYYVLQEGALDGVSAIFGLHVDPALPVGVVASRPGPFTATAGRFSATIRGKGGHAAVPHESVDPVVVAATAILSLQQIVAREVDPLHGAVVSITFVKGGEAFNVIPESVTFGGTMRSMTDEGLSYLMKRVKEIVEGHSSVHHCTASLDFMEEEMRPYPAVANDERMYAHARAVGESLLGENHVKVAPQVMGAEDFGFYARRMAGAFFTIGVGNESTMVTVQQPHSPYFVIDEDALPVGAAFHAAVAIDFLKKHS

SEQ ID NO: 11951 - protein, 724 aa, Zea mays
  VARIANT 470: note = Ancestral polymorphism is R, Derived polymorphism is L
MAAATVVGGTWTRTSRSSLSLVVVFLLLHMGVGATATPPRHHTAAASGITLRVDDYLHQVAVDNGLVQVTLSKPQGHITGVRYNGHRNLLHYDGSQNSGGYWDVVWNYPGSDQPGGMMDTLDSTEFKVVVSSEDQVELSFSSAYTPSSPTSVHLHVDKRLVVLKGSSGFYCYAILEHARDWPALNVTEARLAFKLNTDAFKYMAVSDDIQRYMPSAADRAEPRGAPLAYKEAVLLVNPQEPRFRGEVDDKYQYSMDNKDSTVHGWTTAGGVERSPNDNPVVGFWVITPSNEFKSGGPTKRELTSHVGPTTLTMFLGTHYVGNDIVLSISGGEYWKKVMGPVFVYLNSRPRRGGIGGCDHSRALWADAKAQARAEAGKWPYSFPKSPDFAKAGERGGVTGRLLVRDDDRFTTDDDNNDAAAAPMPVGTEAYVGLAAPGQAGSWVTECKGYQFWTATTATEDGFVFTIANVREGVYSLYAWVPGVLGEYVHASPVTVAVGGAVVDLGDLVFRPPRSGPTLWEIGVPDRKAAEFFVPDVDPRFANRLFLHKDRYRQYGLWARYAELYPDGDPVFTVGRSEPWKDWFFAHVTRKVGEGRYAPTTREIRFRLYRVVADGTYTLRVSLAAAHMSRLQVRVNGRGGGGAAELTTPEFGGGNAIARHGIHGVQWNFQFPIRGYLLREGDNSVSITQTRADGEFLGVLYDYVRLEAPPAHCRDPTATATTWRT

SEQ ID NO: 11952 - protein, 418 aa, Zea mays
  VARIANT 130: note = Ancestral polymorphism is G, Derived polymorphism is E
MDRRNRPAPLVDSSACFCRVDRSSAAAAARRIPVSKACVQPSLRASIHPLKPRPGAERSRGGACPLLPGLPDDLAIACLIRVPRADHWKLRLVCRKWCRLLAGNYFYGLRRRLGLAEQWLYAVKRDGRDGRVSWDVLDPSRGEWRALPPVPGEYAEADGFGCAVLGGCHLYLLGGRDPRRGSAMRRVVFYSARSNRWHRAPDMLRRRQFFDVCVMGNRLYVAGGEGGGGGLRSAEVFDPAKNRWSFVAEMAAPMAPFVSAVHGGRWFVKGIGAQQQVLSQAYSPESDSWSIVLDGMVTGWRSASACLNGRLYAAECMDGCRLRAYDEAVDAWSTCADSKQHRGSSQAAAIVALHGRLFVVRNDMSVSAVQVAAEAGKQRWQTLAGKAHTKSFVTGLLSNLAGRSRAKNNILHCQVLEV

SEQ ID NO: 11953 - protein, 343 aa, Zea mays
  VARIANT 228: note = Ancestral polymorphism is G, Derived polymorphism is R
  VARIANT 173: note = Ancestral polymorphism is W, Derived polymorphism is L
  VARIANT 148: note = Ancestral polymorphism is A, Derived polymorphism is V
  VARIANT 133..343: note = Derived polymorphism lacks residues 133 to 343
  VARIANT 109: note = Ancestral polymorphism is R, Derived polymorphism is C
  VARIANT 108: note = Ancestral polymorphism is Y, Derived polymorphism is D
  VARIANT 91..343: note = Derived polymorphism lacks residues 91 to 343
  VARIANT 4..343: note = Derived polymorphism lacks residues 4 to 343
MASQCAPPLPPRPRATAPFLLGHAPPHARPPRCAALTPSVLAATRPCFLASTRVLLRPQSEEAPASCSWSPSDPLLCASPASALLVAWRRRHSPAMGCKACDKPKPNYRKGLWSLEEDQKLRDYILLHGHGCWSALPMKAGTNVKIAAIPSSVVVLTSETFDSIVLDEFYAPWCGHCKHLAPIYEKLASVFKQDDSVVIANLDADKHTDLAKKYGVSSFPTLKFFPKGNKAGEDYDGGRDLDDFVKFINEKCGTSRDPKGHLTSEARLVPSLNPLVKEFLNAVDDKRKEVLSKIEEDVAKLSGSAAKHGNIYVTAAKKIMDKGSDYTKKETERLHRMLEKVGI

SEQ ID NO: 11954 - protein, 629 aa, Zea mays
  VARIANT 277..629: note = Derived polymorphism lacks residues 277 to 629
MLQKKDPKLCSHIFHNQPQYDEHHDSSPVLVSKYHRWDCSRCLDSVEVSGHRPTSENVSMQQNGMNDGCSISIVWILPNSVDSRRLFSCTHQSSQGNDRLTLSKTAQECNSKCSSPGNKAITAMNVPVAEENVPEALVDTRVPSIEVLQASPNSIDLSANILNAVSKNVSDLPDDVEENGTQNPHSLKPCVAPNEDENNIANDDLNEPNVCKPVSGHKSKQVCNMGPRRASSKRNVESDGKRKRNKSTKLPGISDLKFCQRKPKKTRLLSELIGSEQVGVSGDAVQVDHTNSVDLCEGGKRKMHLEVGKGNDTTNQQVDKIQSRAVKNKAKYTGVDKLEDGSSLMNWLKSTNKEVRTKKKDSEHKNLDSSSISRSYPDIVASNDMHHDFLPSVGDVGQADVPSTTSAKHGNGNAQNDKLEQNMQKMDGLCENESRNLKQRFFSNEKSTILLKRKVLSTSVVHDENIENSNIKRDMLRSDDLPQKEPEVSVQRYLAKVSLGKQKIQNVSGLHKKNIPKNKKGKQKVHEKQNVIDDFPMDIVELLARNQHKRQLMTDTNSLENCHTQPKVAQVDCAAFAAKGCPTNASNEFNTNFQKSLASESKQKSLQSVKQRENHFCDSRGNFFITIAI

SEQ ID NO: 11955 - protein, 124 aa, Zea mays
  VARIANT 99..124: note = Derived polymorphism lacks residues 99 to 124
  VARIANT 84: note = Ancestral polymorphism is G, Derived polymorphism is W
  VARIANT 63: note = Ancestral polymorphism is A, Derived polymorphism is T
MHMHKVDPVPLSALILRILFQELLEFVRLFGVSGWWKSATDVVPFQIMIIDYKLTYPSGTATAVLINGFHTTHGDATAKQQVNWFTKYFAISFFWSFFQWFYSGGDNCGFSQFPTFGLRAWKQT

SEQ ID NO: 11956 - protein, 228 aa, Zea mays
  VARIANT 32: note = Ancestral polymorphism is T, Derived polymorphism is I
MPSPPKDRPSGRVGRLLAALCPSRAGPLPVQTGFPTSLIVKNHGRLKKQPSPSSKRGRRAAAAAASLSPSPCSPTTSPSPSPSSASPPPPVAASAVSPSDRPRPDLPPAQPPRRNSGLGLGFLAVSDKTCMNMSPRRGQGKEERIEINGGERAKDVHLEKAVLGSVVDEQDDARAGNLDDVGGRGGVVILSPAPSARCETMPGRPQESDDTSAQVATAGVGGGGITVV

SEQ ID NO: 11957 - protein, 213 aa, Zea mays
  VARIANT 197: note = Ancestral polymorphism is S, Derived polymorphism is R
  VARIANT 186: note = Ancestral polymorphism is A, Derived polymorphism is T
  VARIANT 72: note = Ancestral polymorphism is P, Derived polymorphism is L
MTENLHSRKMVQPKKFRGVRQRHWGSWVSEIRHPLLKRRVWLGTFETAEEAARAYDEAAVLMSGRNAKTNFPIQRSSTGEPTPAAGRDARSNFSSGSSTTNLSQILSAKLRKCCKAPSPSLTCLRLDPEKSHIGVWQKRAGARADSNWVMTVELNKDAASTDAASQSTSATTAPPATPMDEEERIALQMIEELLSSSSPASPSNGDDQGRFII

SEQ ID NO: 11958 - protein, 318 aa, Zea mays
  VARIANT 100: note = Ancestral polymorphism is D, Derived polymorphism is V
  VARIANT 124: note = Ancestral polymorphism is L, Derived polymorphism is R
  VARIANT 138: note = Ancestral polymorphism is A, Derived polymorphism is T
MAAAAAVASATTAEDEARLLRLEEQAEHGGGGAWEYLCLARRLRARRPAHVLRVGLALLNNASARSGLASEQWTLYEQVATAAMDCQRLDVAKASGLLMVLQDCIGVLSKQFPGSTRVARLEARLFEAKGEWAEAERAYALILENNPFDQIVHKRKIAIAKAQGGMSIVIDYLNKYLELFMADHDAWRELAETYSSLQMYKQAAFCYEELILAQPTIPLYHIAYAEVLYTMGGLENLQTAKKYYASTIQLTGGKNTRALFGVCLCTSAINQLTKGRNKEEEDSELQSLAAEVLLKNYKQQAPSKAPLISSMLKNMKLS

SEQ ID NO: 11959 - protein, 700 aa, Zea mays
  VARIANT 95..700: note = Derived polymorphism lacks residues 95 to 700
  VARIANT 59..700: note = Derived polymorphism lacks residues 59 to 700
MEPSPAQAGASDRDRSPPPPPPPPSQSSTAATISSPLAVVCSFWKDFDLEKERSGLDEQGLKIAENQETSQKNRRKLAENTRDFKKASSDEKLSLLNSLLKSYQEEVDNLTKRAKFGENAFLNIYQKLYEAPDPYPALASMTDQDQKLSELETENRKMKLELEEYRAEAAHLKNQQATIRRLEERNRQLEQQMEEKVREMVEMKQRSMAEDSQKTLEALKDRERSLQDQLRQATESVKNMQKLHESAQSQLFELRTQSEEDRAAKEVEVSLLMDEVERAQARLVSLEREKGDLRSQLQTTNEDASKSSDYLESSDILESSLNAKEKIISELNAELRNIESTLSSEREMHVNELKKLTTLLTEQESALMELKKELQERPTQKLVDDLKKKVQILQAVGYNSIEAEDWELATNGEEMSKLEALLLDKNRKMEHELTQLKVKISEKTSVLEEAEKRIVELTSKVEEQQKLILKLEDDILKGYSSTDRRGSLLNDWDIQEIGSSEASEGSDPRHASADQDQSSMLKVICNQRDRFRARLRETEEELRRLKEKHEMLTVELEKTKADNVQLYGKIRYVQDYSHDKIVSRGPKKYAEDIESGSSDVEAKYKKMYEDDINPFAAFSKKEKDQRYKELGLRDKITLSSGRFVLGNKYARTFIFFYSIGLHLLVFTLLYRMSALSYLNTTTQQDEIILDAGNQRLTHML

SEQ ID NO: 11960 - protein, 80 aa, Zea mays
  VARIANT 24: note = Ancestral polymorphism is P, Derived polymorphism is L
MWRDGSHLRAHRSSKMPSAPLYQPISDLNNSVGSNMMHPKSSEEEEEMGERNAAVPFKNLIQDQSLLQVHTMARLEAFKC

SEQ ID NO: 11961 - protein, 585 aa, Zea mays
  VARIANT 40: note = Ancestral polymorphism is A, Derived polymorphism is V
  VARIANT 50: note = Ancestral polymorphism is T, Derived polymorphism is N
  VARIANT 69: note = Ancestral polymorphism is R, Derived polymorphism is W
  VARIANT 96: note = Ancestral polymorphism is R, Derived polymorphism is C
  VARIANT 380..585: note = Derived polymorphism lacks residues 380 to 585
MPLGDDAEAADFVLLDELQAALPRDPYEQLDLARRITALAVSGRVSGLDTTRATPRAAAYRRLSALIHRGDLDAALRLVGSLPRPLDVPLANHLVRDLCRWGRPANAVCVVEAYGPEATAATYGALVDGYCRVGLLEDARRVAWAECPRTCRPAARTPTTRSSTRSASAGGSRTPSWSSTACSAAGGVQGERIPAGPELIDFMRAEGCEPNNVTYNVIIDAMCREGDVDQARELLNSLPSRSCKPNTVNYNTVLKGFCSIERWVDANEILDEVVSENCPPNEATLNVTINTLCRKGLLQKVTRYLEKMSKHGCTTNVVTYNAIIGGLCEQGNVDSALELLSNMQSFGCKPDIVTYNTVLKGLCSADRWEDAEELMIKMSQNDRLRDNSTFNTIISFWCQKGLILQALEVFKQMPEKGCNPNSTTYSTIIGGLVKASKMEQALELLNEMANKGFNTDKMYLVLTKSLNKEDKIEEVVQVVHKLQDSGISPQTVLYNTVLLGLCRNGKTNYAIDVLADMVSCGCMPDESTYIILIEGCEHIRLYTWFDVYFLDSRLAKASSYPKYKSFQARTLDQYSLFLFGEEERL

SEQ ID NO: 11962 - protein, 587 aa, Zea mays
  VARIANT 140: note = Ancestral polymorphism is A, Derived polymorphism is V
  VARIANT 146: note = Ancestral polymorphism is D, Derived polymorphism is Y
MLSEPPPQQPRARSFAAADVEEQSEDEKRWVGWVEKSLRHETAEALGAAAKVFSVPRSLRDTNPDAYAPHVFSLGPYHQARPELMDMQRFKLAGAKRFEMLLTGGHTIEHIKDRFLVGGLELKIRAIYHRFLDLNDTTLVWMMAIDACFLLDFIENYHRREATDVVSSSANWINAVVRDAMMLENQIPLFVFARTLELRHSTRHEAAKALHAVVLRFIMDVCPFKDKRGEVAIGDLAKHAHLLEVLYHFLVPDATLLDDSTTGGGGDQGVMVEEEIPATAAADGEEVDDDVEAQQAMKPPLEEEDCEKVKQALSQASRLNVAPLRFIKKNLIARPMALVGKIAHKVPALAALVPVLSKLMQSVNVEAQLNGGAEQAPEDGAITAPRADEIRIPSVEELARCGVRFTPAPEGIEGIAFDRASATLRLPVITLDANTEVVLRNLVAYEAVAVRGPLVLARYTELMNGIIDTSKDVKILRRSGVLVNHMKSNKEAAGMWNGMARATRLTKVPRLDAVISAVNAHRSRSAAARVRKLFRKYVFRSWKMLTLLASIGLLLMTALQTFCSAYPCENHWFSGMVLPGTTDDPAQ

SEQ ID NO: 11963 - protein, 57 aa, Zea mays
  VARIANT 16: note = Ancestral polymorphism is P, Derived polymorphism is L
  VARIANT 52: note = Ancestral polymorphism is N, Derived polymorphism is K
MPKTLEKYQKCSFAGPETALQNRENEQLKSSRNEYLKLKARVDNLQWTQRHNTWLIN

SEQ ID NO: 11964 - protein, 132 aa, Zea mays
  VARIANT 17: note = Ancestral polymorphism is A, Derived polymorphism is T
  VARIANT 30: note = Ancestral polymorphism is R, Derived polymorphism is G
  VARIANT 31: note = Ancestral polymorphism is G, Derived polymorphism is C
  VARIANT 40: note = Ancestral polymorphism is T, Derived polymorphism is M
MAQVRGSARGTGSGSSAAALALVLLCALLRGEFAESAVYTVGDRGGWSFNTASWPNGKRFRAGDVLVFRYDARAHNVVPVSAAGYSSCSAPEGARALATGNDRVTLRRGANYFICSFPGHCQAGMKVAVTAA

SEQ ID NO: 11965 - protein, 291 aa, Zea mays
  VARIANT 246: note = Ancestral polymorphism is S, Derived polymorphism is L
  VARIANT 244..291: note = Derived polymorphism lacks residues 244 to 291
  VARIANT 239..291: note = Derived polymorphism lacks residues 239 to 291
  VARIANT 223..291: note = Derived polymorphism lacks residues 223 to 291
  VARIANT 197: note = Ancestral polymorphism is R, Derived polymorphism is W
  VARIANT 179..291: note = Derived polymorphism lacks residues 179 to 291
  VARIANT 162: note = Ancestral polymorphism is A, Derived polymorphism is T
  VARIANT 144: note = Ancestral polymorphism is G, Derived polymorphism is E
  VARIANT 143: note = Ancestral polymorphism is G, Derived polymorphism is S
  VARIANT 126: note = Ancestral polymorphism is Y, Derived polymorphism is D
  VARIANT 124: note = Ancestral polymorphism is G, Derived polymorphism is R
  VARIANT 104: note = Ancestral polymorphism is E, Derived polymorphism is K
  VARIANT 90: note = Ancestral polymorphism is S, Derived polymorphism is N
  VARIANT 87: note = Ancestral polymorphism is T, Derived polymorphism is I
  VARIANT 85: note = Ancestral polymorphism is V, Derived polymorphism is L
  VARIANT 33: note = Ancestral polymorphism is T, Derived polymorphism is M
  VARIANT 6: note = Ancestral polymorphism is R, Derived polymorphism is H
  VARIANT 1: note = Ancestral polymorphism is V, Derived polymorphism is M
MWIYLREVHDSQAKACGIPYEKKKKCKRTQQTTEPSTSSSATAVGSGRATTTTVAASAAQAGGTMSVSPPQETNVTFGMLLKDVVYIATNHVYYELLNYLSFNKWVGIVFYGRKSLGGHNVVWRLYEAIKAHYQNIKLTGFLGGSDGLLAQRTLDITNEVLASYKNQGGFDMLSRTKDQILFLTLIDKEHEGEQIGRAVLKNVLDIFVEIGLGQMECYENDFEDFLLKDTTEYYSVKAQSRIFEDSYQDYMIKGVQKHEEVSKVEDDIVLRYQLILLILLNISGKFYFVLF

SEQ ID NO: 11966 - protein, 178 aa, Zea mays
  VARIANT 133: note = Ancestral polymorphism is R, Derived polymorphism is C
MPTTRADHNEHDIQGTAGDDSVVVNRKSTTGTKGMTLGIMKRQRAQISCRPTMPATNTHHASAAHSDATTRAMANKELGRFDGHRRAQIGATETKTRRGSRKGAPAFDEAISELDSLGEESYKDSTVIMQLLRDNLTLWTSDMQVNTWNSVVMSEDGGDEMWDQYRIIYMYRNIQSVR

SEQ ID NO: 11967 - protein, 327 aa, Zea mays
  VARIANT 196: note = Ancestral polymorphism is P, Derived polymorphism is S
  VARIANT 188..327: note = Derived polymorphism lacks residues 188 to 327
  VARIANT 184: note = Ancestral polymorphism is P, Derived polymorphism is R
  VARIANT 50: note = Ancestral polymorphism is V, Derived polymorphism is I
MGADSEDAVKQLSLLMEQVEAPLKRSFQNMHQGYPKETLVRFLKAREWNVPKAHKMIVDSLDWRIENEIDSVLERPIVPVDLYRSIRDSQLIGLSGYTKEGLPVFGIGVGHSTYDKASVHYYVQSHIQINEYRDRIILPRLTQQFERPVVRCIKVLDMTGLKLSALSQIKMLTSISTVDDLNYPEKTETYYVVNVPYIFSACWKVVKPLLQERTKKKVKVLSGCGRDELLKIMDYSSLPHFCRREGSGSSKHSSADVDDCYSLDHPFHKELYDHIKEQASRRELIKMGSLHVSIPEPDPEDAKIVEVIQAEFQKIGEQDESTTGHKD

SEQ ID NO: 11968 - protein, 247 aa, Zea mays
  VARIANT 90: note = Ancestral polymorphism is S, Derived polymorphism is P
  VARIANT 151: note = Ancestral polymorphism is A, Derived polymorphism is V
MASDQQALSVPVPVPVPSNPNPSALADPTPPSASAPRKLPIKRRSPRPSSSPPSSSPDSSDPLRAPAAGGGGGGSDKQQQPPFKFQRIWSESDELRFLQGLLGCGAQGLVFPRDLNVFYDRFSESMPQPYTRAQLSEKLRRLKNKFRSMSARVAEGLDPARLAPHDRDVLHLCSRLWDPANAATSPFVASAGTISNFNFVFCYNEFTVEILVAGRSFAIPPRGAGRIHGIHHGEQHPARAEHKIGSG

SEQ ID NO: 11969 - protein, 807 aa, Zea mays
  VARIANT 692..807: note = Derived polymorphism lacks residues 692 to 807
MVSQAPMAGAGAGAGANLTAALCRKSNRVARVLAYALLEWVLIALLLADGVFSYLISRFAAFFGLAPPCALCSRLGVDSLFETHPRHRGVGAEPLRRLLCDVHAAELSRVGYCSAHRRLADAGDMCEDCAAAAAAAPGKALLSWMGQSELGERDLACACCGVALESGFYSPPFLLTASAPRGSDCGHKEEEEAARPNGDVVFVSEEGPVIELFDEKPFVEGDSIGVLACGAEVVANVERLVPLESIDSLPVAMATMLSQSVEASEHVTVTQIEEKQVQQAEVTQELDSLPICSREQAEVTQAGLEQDCGSVPIDSGEHGCLTSYAHTDVEQAEVKQKVTSVTRDVLDYAAGTFNVNTNTWKEDIEEDPTEAALTAIYQISYEPLTNLDKFSPDHSVSEEDRQLNALTHIEDICDSQEPLDSKAAVSDAKSVDSGVATLSTDLESTELVNADQLKSALASTRKSLNTLYFELENERNAAAIAADETMAMINRLQEQKAAMQMEAIQYQRLMEEQSEYDQEALERLNELVVKREKEKQDLERELELYRHKVHLYEIKVRKMSRHKADDQNGSSSTSSSAEDSDDLSQSFYEGDESSHGLNGSNGSIPTDVVLQETARHLVIIDGSLADFEEERLSILEQLKVLEDKLFDLDDDDESDSRKHFPEENHFSGASNGFSDDDSCSKLRDKRRVVTYRGKELLPLFDDATTVEAGNVPNGDEAHHPAEATLDLARERHKLVIANEIDQVNERLQALEADREYIKQCVRALKRGGEGFDLLQEILQHLRDLRRIEQRGRNSGELSPHYLHLYTD

SEQ ID NO: 11970 - protein, 734 aa, Zea mays
  VARIANT 22: note = Ancestral polymorphism is R, Derived polymorphism is W
MKRSADAMTEPVKPVFLTKAERERLALERRQAAVSDQRRTALDLIQSLPRPPPPPTSGGPPPSGSNPARRDSSNSNRDSDRDRDRDQDRERRRDDDSRRDRYRDRDRDRDRDRDDSSRRDRDRDRRDRDRDRDRDRDRDRGDRERDRLEKIAEREREKELDAIKEQYLGSKKPKKRVIKPSEKFRFSFDWENTEDTSRDMNALYQSPHEARLLFGRGFLAGIDRREQKKAAAVHEKETRAELRRKAGVEDRPEDDAVDKKKAAAAEIYDAFDMRVDRHWSEKTLEEMTERDWRIFREDFNISYKGSRIPRPMRKWSESKLGTELLRAIDKAGYEKPSPIQMAAIPLGLQQRDVIGIAETGSGKTAAFVLPMLSYITRLPPISEENEAEGPYAVVMAPTRELAQQIEEETVKFATYLGLKVVSIVGGQSIEEQGFKIRQGCEIVIATPGRLLDCLERRYAVLNQCNYVVLDEADRMIDMGFEPQVVGVLDAMPSSNLKPENEDEELDEKRIYRTTYMFSATMPPAVERLARKYLRNPVVVTIGTAGKATDLITQNVIMVKESEKMPRLQKILTDLGDKTAIVFCNTKKTADMRAKDLDKAGFRVTTLHGGKSQDQREISLDGFRNRRFNVLVATDVAGRGIDIPDVAHVINYEMPSSIDTYTHRIGRTGRAGKKGVASSFLTYENTDIFFDLKQMLMQSNSPVPPELARHEASKFKPGSIPDRPPRRNDTVFANH

SEQ ID NO: 11971 - protein, 456 aa, Zea mays
  VARIANT 395..456: note = Derived polymorphism lacks residues 395 to 456
MAGREAGDCGGEEPAREIPDDITGEILLRLPSRSALARAAVASCAFHALVASPRFLRRHRSLHRDPGSLLGVFTFPLVPDGGRGGGDGSGFHPTEPPHPAASTASAVAAAADFSFGFLPADPSATAGSEAAEWMVRDYRDGRFLLDRVPSGTGSTVFTELAVCDPLSRRYVLLPPIPEDLADTVHSVLTVFGGRRACEPFLAPAETCGADDVDADPPLTVFWTARSPRKMVAFAFSSRDGRWRALESPNCFIWRRHRSPFSCPMAPISTVWNRRHYAHGCFYWVDCLTSRWLVLDGRTMELSLAMIPSPAGYWEEHVAVVEAPDGKLGVFAHGFHHPDGKANLHYYTIVHDKEAAGDTKRWQLEKTIQLPWPSDHRSFCLRGTANGCLNVGLIIEVGEKKSVFMGSHRIRDAELFKIDVKSFQLQKICRARCAGSAAGECCWPYFGFPPSLSLPTV

SEQ ID NO: 11972 - protein, 492 aa, Zea mays
  VARIANT 275: note = Ancestral polymorphism is F, Derived polymorphism is S
  VARIANT 244: note = Ancestral polymorphism is V, Derived polymorphism is A
  VARIANT 204..492: note = Derived polymorphism lacks residues 204 to 492
MAGVGEAAIEGGRPSVWRLADRRGQAGSNSGRDRFQTVDRRALRGRGPRLDRGRGSWRGRGGRFGGRSFLESDRRVIRDMPESSRGVVSSNAFDEDAKKRAADTVDDGALADGKGKKRREDLCCEICEGDHVPLDCQVYNGPKPHAILCGFGSGESGFFQIPNFGSKGLIPLKESSTAFITAKEGTITAELVKSELAHLIPVRWTWAVQSHANGFVVPFPSKVELQRMVAMKYVHAAYGKSIMVIQELEQKIEPVQHLEKAWVNIYGVPYEIRSFLPLWAVGTIIGATQKVDLRYTKRMGVVRLLVGVTNVDKIPESIDIVVGEGLYEIFFKIDKVCKDGVWSEYYYPSDKKDDYFESKDEDFDGLDNIQPKFDDTTKDTVMKDVSGSKVDNSSNVQHATQQNCDIRQTGVPSDFGSLAQSTESFIPHINTSSLDCPVALEKCLVAVNRSSVFRENVAAPTAVAHGVVYDNKWTEAKGTIILNAKQTAQKER

SEQ ID NO: 11973 - protein, 253 aa, Zea mays
  VARIANT 2: note = Ancestral polymorphism is A, Derived polymorphism is V
  VARIANT 134: note = Ancestral polymorphism is Y, Derived polymorphism is S
MATFLGSSPALLARPIAKPHISCAQTPRPPSAQNQPPSSEQPQAQTQQQSVQAQPQQATARPKRAGGADSTDWVASSLTRRFGIGAGLAWAGFLAVGVVSEQLKTRFEVAQQQANTKDVEQEQEVVLPNGVRYYEMRVGGGDVPRPGDLVVIDLQGRVAGSGGGGEAFVDTFVDGKRPLALVMGSRPYTRGMCEGVEYALRSMRAGGKRRVVVPPGLGFGDDGADFGEEHVQVPPGATLEYIVQVDRVSIAPA

SEQ ID NO: 11974 - protein, 192 aa, Zea mays
  VARIANT 96: note = Ancestral polymorphism is A, Derived polymorphism is G
  VARIANT 44: note = Ancestral polymorphism is Y, Derived polymorphism is C
  VARIANT 40: note = Ancestral polymorphism is K, Derived polymorphism is M
  VARIANT 18: note = Ancestral polymorphism is P, Derived polymorphism is L
MFWDLRSAKFAAGSGAEPAGGYYIALVSNDEVVLLLGDGMKDACKRTKSRASLEDAVLVCRRESVFGGRSFAARARLVAKRSKEHEIVIDCTLAAAGSSRYPEMWITVDGFVLLHVKSLQWKFRGNETLLVDQAPVQVIWDVHDWLFAGPGAQAVFVFKPGAPPEIKEDSGGNSIEDDGTDFCFFLQARRME

SEQ ID NO: 11975 - protein, 40 aa, Zea mays
  VARIANT 19: note = Ancestral polymorphism is A, Derived polymorphism is T
  VARIANT 23: note = Ancestral polymorphism is M, Derived polymorphism is T
  VARIANT 28: note = Ancestral polymorphism is V, Derived polymorphism is A
MAKKRTNVIPIIEDVRHPARYQMLVGMVDVIFSDVAQPYQ

SEQ ID NO: 11976 - protein, 203 aa, Zea mays
  VARIANT 143: note = Ancestral polymorphism is G, Derived polymorphism is S
  VARIANT 142: note = Ancestral polymorphism is E, Derived polymorphism is K
MPSPLSPPSPSGVETKGARVSPGAVSRAEGEGLKEATLQVKQKVYEFYKGTVERVTAPCTVSAFLEKGVLSVPEFILAGDNLVAKCPTWSWEAGDPSKRKPYLPANKQFLVTRNVPCLRRAISVEEEYDAAGAEVVLDEDGEGWLATHGVQGQYPYKCCLVFHSEFYDLNCFFWAAAEPSYFIAEEPEDDNILHTRTYDVSIT

SEQ ID NO: 11977 - protein, 119 aa, Zea mays
  VARIANT 17: note = Ancestral polymorphism is I, Derived polymorphism is M
  VARIANT 87: note = Ancestral polymorphism is H, Derived polymorphism is Y
  VARIANT 105: note = Ancestral polymorphism is N, Derived polymorphism is S
MYIFKVLVVRWCRTRIIHSFTRNLEHAQEGLVRRMIRDENGTHFDCPSPAYDQKEFVPLEVKSGALVVIHGDLIHQSFENLSPASRYAFSLHVIDTEGCEWSKDNWIQRKTAPEPLYVS

SEQ ID NO: 11978 - protein, 442 aa, Zea mays
  VARIANT 63: note = Ancestral polymorphism is L, Derived polymorphism is P
  VARIANT 115: note = Ancestral polymorphism is Y, Derived polymorphism is H
  VARIANT 129: note = Ancestral polymorphism is G, Derived polymorphism is R
MASSGSAANLWVLLGLGIAGILLAARRLRRPARPDHGAFIARLELLPPPQPPPPQAPHPLTGLCFAIADALLYVVKVDMLCQLTVNFLTLDKFVHGLPEPKRINKGVKMKVKVLYYSHFEYLICCICNGMMSLRGLCSVFPNGIDSIGGVRIPCAYCGVLAFRPSHAVVSSSGVIPVAPSLDTTGWFARDPSVLHRVGHLLLRLPYAGIRQPRIIYIADDCFELSKIPARRLTQVVKKSVEKLFGRQVRHVNLENYLSSRISGLSNYSNGHKNGDSKREFKDQHMEWINSVKPAVDARIVSDLSEDGDSDIDDCQDVRKEARSALSELLKDDGILVIPTALGCPPKLNAKQLSSEIYNSQTLRLLSLASMSGCCQVSIPLGTHDKCPISVSFIARHGGDRFLLDTQTMYTTIQEQGEILAKSSVSSKQAMNEEAAEAAKDKS

SEQ ID NO: 11979 - protein, 88 aa, Zea mays
  VARIANT 53..88: note = Derived polymorphism lacks residues 53 to 88
MAGGSMVFEPHAGTVAGGDVVFCAAIVCLSLLSMIIFAASGSSGAGDGEEGVKPRRRGRSNGPVFVGGRGCGCGGCGAGAGVCGTYLS

SEQ ID NO: 11980 - protein, 252 aa, Zea mays
  VARIANT 4: note = Ancestral polymorphism is M, Derived polymorphism is L
  VARIANT 11..252: note = Derived polymorphism lacks residues 11 to 252
  VARIANT 86..252: note = Derived polymorphism lacks residues 86 to 252
  VARIANT 98..252: note = Derived polymorphism lacks residues 98 to 252
  VARIANT 107: note = Ancestral polymorphism is Y, Derived polymorphism is N
  VARIANT 112..252: note = Derived polymorphism lacks residues 112 to 252
  VARIANT 179: note = Ancestral polymorphism is S, Derived polymorphism is N
MPNMTAYDDNQFAAEKDVKQLSTHFSLSYLDYCVAESVIFFILAVASCGGAWDQHQLAEEEDVDPLPEAVITEINENIGTTGVVSQECKAIVSQCGQQILDLLLAEYSSKRQPFRSYDIKIFSGPKPMKLMAHAHLDSYAQACYWDIASWCRVSHMTIALCFLGSSSEIELRRVDYFSSKELPQVLERKSLEKWSFVKSEQKRSEIQGLMELVLQRSSCLDLLDDILLGYKAEWPMNIGITVDALKIHAKIL

SEQ ID NO: 11981 - protein, 97 aa, Zea mays
  VARIANT 81: note = Ancestral polymorphism is A, Derived polymorphism is V
MGANGHHELRRGCNGTVCNGSIRPLDYFGDVHPWTAWAYKPRMISLLLTGTCLLIWASGALDPERSSSADRVWSVKRGVFAMIAVFLSCSFLQAPST

SEQ ID NO: 11982 - protein, 517 aa, Zea mays
  VARIANT 104..517: note = Derived polymorphism lacks residues 104 to 517
  VARIANT 195..517: note = Derived polymorphism lacks residues 195 to 517
MANSKFGLLDLADGESGEAAVSVAITKVEAAAAAAARKAEAASDAAGTGKEKAPHKNHLYFTKLQLDNGTCIHTIHSLSGSRCMRNIEHELKRLRDVLIKLRGEETKLKENMEDGGRLMQLLSEEQRKLRQEQTKLWAQQAKLRLQRKEFYLEHGFPLGAGEEGPQVPNRAETVHGCDNAGAAANVNGSCNGGRQGYPEVRYKRKVQKYVVKTKQPSSGPATAGAEHKPEEKVTSDASSEADHHDEAATPANVEVAAASVAAACNNGQDGPRTNNVFVRKEKLNGSVKRKNKNSKNGGSNDKLKKQDLSETEEPPREQEKKTLDEYEREQKKSSEDASRTEARKVCDDEFRGLQMLKNKVDDGEAIMIKAEKLQQKSKKPQPEAKVVIPLKDLSFAPPRRTFFLEDGSSNGGGFRGRSRDNGRVVQNEASNGAPRGGGGDGYHDQGSNGGTGYYHHQQSGYARRPRGRGYSGNGRHPAPATKPILVEEFPPLPAFSAAARGAAPAAAAAPAAARAQA

SEQ ID NO: 11983 - protein, 314 aa, Zea mays
  VARIANT 76..314: note = Derived polymorphism lacks residues 76 to 314
MPRSDGVHQPSCVTVPLGKSVRRALRAAIGMPKKKKKNPPPPPLGVSMELSSSSSVAARKEAVVRVVMRGGVVEVYPSVVLACTVIRNHPPGLCLAHPDVFRNPHGAVVRPLEPLFPGQKFLLLPESTVVRLKQKIPESSIGAFADDDVEEDDDDEEEEEGDGAAVVSSSEGEAAAEGDGTTSTTTSMPSCSAREYFVSRDRWSECRSRELVPVEQGLAMEPRPSKDDDEPAERKQEKTRTKKGNKKKRRKGRRRRDRSSPVPQLPMELIRGVGRTWEPSLPSVEEEQEEAAAVVIVSPLHPPPSDATAHNTRS

SEQ ID NO: 11984 - protein, 171 aa, Zea mays
  VARIANT 125: note = Ancestral polymorphism is D, Derived polymorphism is N
  VARIANT 44: note = Ancestral polymorphism is P, Derived polymorphism is R
  VARIANT 26..171: note = Derived polymorphism lacks residues 26 to 171
  VARIANT 21: note = Ancestral polymorphism is P, Derived polymorphism is L
MATPASTPTPPNPNLVSGNPPSLLLQQQQEEEVPEPVPETAPMPLTTSIDPTPSGGEESESDDSSSVWSTPSSAPTPVPAPTLAPAAKDILHISFNQDYGFFTAGTNSGFHIYNCDPFREIFRQDLAVEGGVGVGGGGGGIDVVEMLFRCNILALVGGGDNPHYPPNKVMI

SEQ ID NO: 11985 - protein, 359 aa, Zea mays
  VARIANT 119: note = Ancestral polymorphism is R, Derived polymorphism is W
  VARIANT 111: note = Ancestral polymorphism is T, Derived polymorphism is I
MDSPLYQQLQLSPPSPKPDQSSSFYCYPCSPPFAAADASFHLSYHIGSSATDTHPQTVVNSPEIPVFPLMEQTPAPATEQGAGACGAQGAGVSLDRAYAAPRKDWHSKICTAGAMRDRRMRLSLDVARKFFELQDMLGFDKASKTVQWLINTSKAAIQEIMADDASSECVEDGSSSLSVDGKYNPAELGGGNEKSNGNACSEWKKPAMVRKAATTTKPPRKSGNNAHPVPDKETRAKARERARERTKEKHRMRWVKLASAIDVEVAAASVASDRPSSNNLSHHSLSSMNIPRAAAAELEERERSLLAPNNRGRMQEITGASDVVGFGNGGGYGCDDGNYYCQEQWELGGVVFQQNSGFY

SEQ ID NO: 11986 - protein, 511 aa, Zea mays
  VARIANT 69..511: note = Derived polymorphism lacks residues 69 to 511
MLAIATKLVLCNNSSSETLAPESGLTTSQSQDHTTSIPRPRALPNCGLLLAVQQCVCSACYSDLRGQARLPLHTFLKAAKMSVAVYRGPAAVPAFEAPCWLRPAEPYKQPEAVVDDRPAQVDIWNAIQADVDRASAGAKKASKPYVHRSRSLMSQKSLEVCTESLGNETGSGDFTSSLDMAFLFDSPLPAGAAAEEESFWQHDGSRRCEEEQWESEDLAAVNYHCSAGTRPLNRRSFPPPLPSMSRRDGPCLQMRPRRQDGRLVVEAVAVRPRGYLHAKRQGGRLRLSFVECSARAQSAASRITAAAAEAPYFPAVEPKNAQEEEAAVEVVDDDDEEVMEEEEEEVEVLDRGTVVEVKVSTQPQAPTAGKVHRSRLVINKFVGSTPLSVDQPRCDDGARQPEANTRDDETTAAAQPSRPTMRRVPSSTTTLAAAVAAASTGTDVPPAPEDDDECGGLHLPAPAAAETKQLLLLSFTSRRGDKQDLLQSVRRCRQLRQKKLFILEPYCIATS

SEQ ID NO: 11987 - protein, 275 aa, Zea mays
  VARIANT 114: note = Ancestral polymorphism is T, Derived polymorphism is I
MAVPPCISPVTGPSPSHVMLVPCLLPHRPTSPATRKQLDASPSQSSIAAAQLVPDILLSRDSRVLMIYKSLLYGKSAGNMLHLIIEACISRKLIDTSAYLWPGYVVPSGTLKDTTLPQESPWLNFMKGSRLSGPLIDALVASPASRCFKLCKVRSVQFGQKGIPYLNTYDGRTIRYPDPFIKANDTIKIDLETNKIMDFFKFDVSNVVMVTGGRNTGRVGVIKNWEKHKGSFEVIDVLLGAFCMLCLVFLLFVVQENIEWNSNLVVAKVWRLEFI

SEQ ID NO: 11988 - protein, 277 aa, Zea mays
  VARIANT 80: note = Ancestral polymorphism is G, Derived polymorphism is D
  VARIANT 96: note = Ancestral polymorphism is K, Derived polymorphism is M
  VARIANT 97: note = Ancestral polymorphism is T, Derived polymorphism is I
  VARIANT 125: note = Ancestral polymorphism is N, Derived polymorphism is D
  VARIANT 184: note = Ancestral polymorphism is N, Derived polymorphism is K
  VARIANT 190: note = Ancestral polymorphism is G, Derived polymorphism is V
  VARIANT 232: note = Ancestral polymorphism is C, Derived polymorphism is W
  VARIANT 248..277: note = Derived polymorphism lacks residues 248 to 277
MAGRADGHGRGRREGEGIGWEDRKWGDGDRIRKISYECEVQYIASANNLIPIEIALKIANKIYSNERFSAYIVVPMWPEGNPTGTLTQRILYWQKMTMQMMYEIIYKALKEVGLDGTYEPQDYLNFFCLGNREAEDTTCTSSGPFSASNPQDQARKNRRFMVYVHSKGMIVDDEYVIIGSANINQRSMEGTRDTEIAMAAYQPQHTWANMLSAPRGQVICLSSDNCDKLVTCNCRSATLFCISYFLWQNDKNRSSYHNLNCVISLPTFQEHLGDFFR

SEQ ID NO: 11989 - protein, 148 aa, Zea mays
  VARIANT 23..148: note = Derived polymorphism lacks residues 23 to 148
MIRIHGVKCGPGHGISVGSLGRYKDEKDVEDVKVTGCTLAGTTNGLRIKSYEDSKSSPKASKSTAPNNICVKSGASKVAVNDVVFKNIHGTSNTPEAITLNCANNLPCEGVQLVNIDIKYNGSGNKTMAVCKNAIGKSIGLAKELACI

SEQ ID NO: 11990 - protein, 435 aa, Zea mays
  VARIANT 81..435: note = Derived polymorphism lacks residues 81 to 435
  VARIANT 36: note = Ancestral polymorphism is V, Derived polymorphism is M
MCSSAPPQPRHRHESAILSNTKMAFISNIAVKAAAVAALLLVAAVSPAARAAAVAVAGGAPSVPAGPLDIAQLGAKGDGKSDSTPMILKAWKNACEATGVQKIVIPPGNYLTGGLELKGPCKSSIIIRLDGNLLGTGDLSAYQRNWIEIENVENLSINGHGTIDGQGALVWSKNQCQHSYNCKILPNSLVLDFVTNVQIRGITLLNSKFFHLNIFECKNVLIDKVTVKAPGDSPNTDGIHIGDSSNVTISSTTIGVGDDCISIGPGSKMIRIHGVKCGPGHGISVGSLGRYKDEKDVEDVQVTGCTIAGTTNGLRIKSYEDSKSSLKASKFLYEGITMDNVSYPIIIDQKYCPNNICVKSGASKVAVNDVVFKNIHGTSNTPEAITLNCANNLPCQGVQLVNVDIKYNGSGNKTMAVCKNAIGKSIGLAKELACI

SEQ ID NO: 11991 - protein, 405 aa, Zea mays
  VARIANT 58..405: note = Derived polymorphism lacks residues 58 to 405
  VARIANT 330..405: note = Derived polymorphism lacks residues 330 to 405
MTSVPPPLGSSRMPTRPSGPLKLTVLMVTVPPAPPTTLLPVRPSASLPTKKYTRFEAQVLALRADPATFTVEPEDSEGFGKWSALFSIDEMKEQIETVLHESPELESFVERLVPSVVDFTLLHVSTVKSTILEVGNIELFELNEVISSFLRIMLFFCILSSAVLPKNEKPITESGDEISYEGAKAKHPISLLLGLRRRSTQVVSNLTEGGNQQRHSMGGMVVARFVNGVADISAVWHLSRPSITRQSPLALCTTPIKCSITLGQSSELEKLVVSSPKASTNPLNISLTTEGGSVFPINDPIITITDTVSNPMAYCLAAMKSEGVNLIRGYSVGNSRSNLPVNSNPSCVPPRPALGPNSYTREATKGASPNGTQVNVLQPSASFSPKLHCNRNVLVAAALLFLLIL

SEQ ID NO: 11992 - protein, 507 aa, Zea mays
  VARIANT 291: note = Ancestral polymorphism is A, Derived polymorphism is T
  VARIANT 325..507: note = Derived polymorphism lacks residues 325 to 507
MEEDKNSQRGPRGKGKEKRTTLACLYLRKETSGFLCAGGRMASWLEQLQRELAARGLTVASIPGKGRGLIATCTFFPGDVILNQEPYASTPNKILVGSSCDHCFTSGNLRKCSMCRVTWYCSSNCQVLAKPTLYSTYISIDCAIKEEWKLHQLECRAMAALTEDRKKMLTPTIRLMVRLALKRKLQNEKVIPSSSIDNYNLVDGLESHISKVDENQLVLYAQMANLVSLILPFIELDLKEIAQTFSKFACNAHTICDPELRPLGTGLYPVISIINHSCVPNAVLIFDGRTAYVRALQPINKDEEVSISYIETATVTKKRNNDLKQYFFTCTCPRCVKGFDEDALLEGFRCKNQACDGFLLPNSGKKAYTCQKCGASRDVEEIKNMRSEILQLSDKASSFLSSGSILIYLELQDWWTALTYCRLTIPVYERVYPPFHPMIGLQFYTCGKLEWLLEFTEDALKSLTRAADILKVTHGVKSQFMKELFGKLEEARAEVSFRLSSRHGHDE

SEQ ID NO: 11993 - protein, 160 aa, Zea mays
  VARIANT 115..160: note = Derived polymorphism lacks residues 115 to 160
  VARIANT 69: note = Ancestral polymorphism is C, Derived polymorphism is Y
MAEKVSTLVVTLNHGCCRCFTRIRKTVCKLQETEDIRAISFDEVSGTVTISGAFDPLVLPCKLRRKAGCVIRDIQLVAAELKLTPQRPAMPSKPPGPAPAPPCCCGMCICGCGGYGYGYGCRCQFVDHPPCYEGLPLRQYPKIEVTCDCEEASSAACKIV

SEQ ID NO: 11994 - protein, 178 aa, Zea mays
  VARIANT 44..178: note = Derived polymorphism lacks residues 44 to 178
MLFFCILSSAVLPKNEKPITESGDEISYEGAKAKHPISLLLGLRRRSTPKASTNPLNISLTTEGGSVFPINDPIITITDTVSNPMAYCLAAMKSEGVNLIRGYSVGNSRSNLPVNSNPSCVPPRPALGPNSYTREATKGASPNGTQVNVLQPSASFSPKLHCNRNVLIAAALLFLLIL

SEQ ID NO: 11995 - protein, 201 aa, Zea mays
  VARIANT 93..201: note = Derived polymorphism lacks residues 93 to 201
  VARIANT 57: note = Ancestral polymorphism is P, Derived polymorphism is S
  VARIANT 15: note = Ancestral polymorphism is S, Derived polymorphism is F
MPFGSKAKAYSDSKFPTYLTAEQALADFVVLLTDLKRNLSAEGSPVVLFGGSYGGTPILQFEDIVPSTIFYDLVSDDFRRKSLGCFLTIKDSWKELDDQANEQDGLLKLSKTTLKTSGDLSDWLSSAYSYLAMVDYPLPSEFLRPLPANPIKEVCGNIDSQPKGIGTLERIYAGVNVYYNYTDIVDCFDLNDDPHGMGGWD

SEQ ID NO: 11996 - protein, 189 aa, Zea mays
  VARIANT 172..189: note = Derived polymorphism lacks residues 172 to 189
  VARIANT 133: note = Ancestral polymorphism is G, Derived polymorphism is R
  VARIANT 125: note = Ancestral polymorphism is T, Derived polymorphism is I
  VARIANT 113: note = Ancestral polymorphism is C, Derived polymorphism is Y
  VARIANT 88: note = Ancestral polymorphism is V, Derived polymorphism is F
  VARIANT 80: note = Ancestral polymorphism is G, Derived polymorphism is S
MASRARLPGSPASIAVLILSFFQAISIGRRYGRTDEIGVPFVVAMDSTNVTIRERDDKEQIRVDINEIMADALTMLEQIGRIENTKVVYVGDGNNIVHSWLLLADVLPFHFVCACPKGFEPDAHIVEMARGAGISKIEITNSPREAVKGADVVYTDVWASMGQKEEVDYRKQKFQGFTVDETLMEIAGP

SEQ ID NO: 11997 - protein, 322 aa, Zea mays
  VARIANT 65: note = Ancestral polymorphism is S, Derived polymorphism is R
  VARIANT 67: note = Ancestral polymorphism is R, Derived polymorphism is G
  VARIANT 69: note = Ancestral polymorphism is S, Derived polymorphism is R
  VARIANT 76..322: note = Derived polymorphism lacks residues 76 to 322
MPLPPQPRSTVLGTAPRTGRSSARICLRRLASTKRGSAEAAEGSGEKEMRSAWEEEKKIDAEMRSRRSSRRRRAPRARSPPATSAPPAPLATTSRKEVGAAPNPLLVNQLKLLLPCPAWHPRGGERRGDTAGAGDGRRVGIGLVGRRRGRASQGGGRQAGAGGRAQPVIDVSGKEFKFTWASERGELCDIYEERRSGEDGNGLLLECGSAWRKVNVQRILDESTKNLVKMRSKEAERLSKSRKSIVLDPANPSVKSQARSMAAAAVEGLFIAEFMSFSAFHRRVHVAQDLDKAYLSVFVWFRLHYSSLTLVATIIFSYIICN

SEQ ID NO: 11998 - protein, 658 aa, Zea mays
  VARIANT 108..658: note = Derived polymorphism lacks residues 108 to 658
  VARIANT 58..658: note = Derived polymorphism lacks residues 58 to 658
MSPSLSAPESEFADPIGFISARTWAWLPGTSGPVWRTSAIVPIFYASGFQVDQTEWIQSCSKLASCVNKQAPSATRFMGMQQSLGIQPTQLGKDAPAAGAARRVSAQRKMIEVESVVAADKQEIREDDYAAEKLDIELSGSYLLPPRYSEGALIKKLEELGIGRPSTYASIMKVLLLCDQVTGDVICHGEKNFLQDGRKSFPSGHTSRSREATVDLFLKSAEYLDYAVHHLWRWLEARRGLREPAPERWAVRGVPRGGPEDVLLTVCPWDPRVRGGTLFHQTTFSLPVRRAVLFVAEVHRLRDLEPRALCGVELYDDILMRYVKASTAYLGKPAPRGEPSGDMVDFDITYYRSCDPGQARLFEDVLEEVEQMGIFKYGGLPHWGKNRNLAFVGAARKYPGLPRFLRVKDAYDPDGLFSSSGSERCGQLRALVLLVEHDVGNEAQEITLYWYSSQVNVSQDLASLPFTQITATPWTLVLRIAAKDFGKDGECVLQWPNSIKTWYRRKWFQIVDVDQSHTVESNVTLTQQPQFYKEMLVSLSLKTPHSKACRSLYFSLSPEESIWRSNVRFNVLMISSNNCAMMPEVSASLARNFLRYFEPPLFQRAAGGLASARMWLNVVAAARQSRRFWRSNHLLQRQRLGHGLQEQVPSRHSLSFPQ

SEQ ID NO: 11999 - protein, 613 aa, Zea mays
  VARIANT 81..613: note = Derived polymorphism lacks residues 81 to 613
  VARIANT 126..613: note = Derived polymorphism lacks residues 126 to 613
  VARIANT 130..613: note = Derived polymorphism lacks residues 130 to 613
MFSWNRKQSSSSGSPSPSSSRGGGGSGSGSGSRGRSPRLDRRNAVKRVDYEAGAGASVSVAASWSSSSSADQQRSPGPGLQPSRSLDVAPGADLRISGSVEGEVDELCRSLGLSGPEDFAIPVAAWEARKSRSNSDLLPRSHPDPSTPADEPSPIARVVSAPDVQPTRFVPAPIPATVAAPEESPKAAPAVAVAAPVGGLPLPSPRRGGGEVGIRGARPPLLSPPPPIGALAPPPVRRSFVDDDMTRSAWDIVQSFAPREQGSEPGERLDTRCNSDTEEESEAEDGVAAVEGELKELRIGETFEGLTGTSSLSTTNDDDASSTTTEAMFIISPNGKFKRKIKSWMRGALLGSGSFGMVYEGISDEGAFFAVKEVSLLDQGSNAQQSIVALEQEIALLGQFEHENIVQYYGTDKEESKLYIFIELVTQGSLSSLYQKYKLRESQVSAYTRQILNGLVYLHERNVVHRDIKCANILVHANGSVKLADFGLAKEMSKINMLRSCKGSVYWMAPEVINPKKMYGPSADIWSLGCTVLEMLTRQIPFPNIEWTNAFFMIGRGEQPTIPCYLSKEAQDFIGQCVRVDPESRPSASQLLEHPFVNRPLRASFESSSPPAI

SEQ ID NO: 12000 - protein, 284 aa, Zea mays
  VARIANT 60: note = Ancestral polymorphism is R, Derived polymorphism is H
MGRKGRKARVSRDADVDGSEDEMAAAPAAAAGRSLYEILGVEKTASQQEIKKAYHKLALRLHPDKNPGDEEAKEKFQQLQKVISILGDAEKRALYDETGITDDDALVGEAANDLQEYFRTMYKKVTEADIEEFEAKYRGSDSEKTDLKELYTKYKGNMNRLFCTMICSEPKLDSHRFKDIIDGAIAEGELKSTKAYEKWSKKISEMEPPTNPLERRAKSRKKSEENDLILAISQRRAERKNQFNSILSNIMSKCDSKASSSEPTEEEFELARQRLESKMAKRRK

SEQ ID NO: 12001 - protein, 366 aa, Zea mays
  VARIANT 306: note = Ancestral polymorphism is P, Derived polymorphism is S
MVSVNLGLVHYVLDHIYGTLLHRTKLGTPFFSKGWGGTKLDLLEKMVKQLFPEARCQNWPPTAVQPMWKTVWETNNSCLREGVFRTTCDERLIDALPPESHNARVAFLTPKNVTPEKMSCVVHLAGTGDHTFERRLRLGGPLLKNNIATMVLESPYYGQRRPSMQRGAKLQCVSDLLLLGKATIDEARSLLYWLQNEAGYGKMGICGLSMGGVHAAMVGSLHPTPVATLPFLAPHSAVVPFCEGVYKYATAWDALRKDAAVLTQDVTLLAEDAAQKSGITIEQVRDRLRSVLSLTDVTRFPVPKNPQAVIFVGATDDGYIPRHSVMELQKAWPGSEVRWVTGGHVSSFFLHNDAFRKAIVDALDRL

SEQ ID NO: 12002 - protein, 269 aa, Zea mays
  VARIANT 247..269: note = Derived polymorphism lacks residues 247 to 269
  VARIANT 233: note = Ancestral polymorphism is R, Derived polymorphism is G
  VARIANT 100: note = Ancestral polymorphism is C, Derived polymorphism is Y
MNIASMHMHGRAEAAWFDMEHARWQEEHGKVMRHLRAALEAEYAATATTPAAAAADAQLRQLVDAAAAHHGALAELKAVAASADAFHLVSGAWVSAAERCFLWIGGFRPSELIKIAARHAEPLTEQQAMSVCGVQQWARDAEAALDHELQAMHSSVSEAISSDAAALLYPYSDVPGFMATMSLAISKLASLEAFVRQADALRLQTLHRLPQILTARQSARCFLAIADYSHRLRALSELWHTRQGHERAASTQAARPSQTPPYQSRDGLL

SEQ ID NO: 12003 - protein, 437 aa, Zea mays
  VARIANT 279: note = Ancestral polymorphism is V, Derived polymorphism is L
  VARIANT 187: note = Ancestral polymorphism is L, Derived polymorphism is F
  VARIANT 41: note = Ancestral polymorphism is R, Derived polymorphism is G
MSDGQETDKNIEIWKIKKLIKALESARGNGTSMISLIMPPRDQISRVTKMLGDEYGTASNIKSRVNRQSVLAAITSAQQRLKLYNKVPPNGLVLYTGTIVTEDGKEKKVTIDFEPFKPINASLYLCDNKFHTEALNELLESDDKFGFIVMDGNGTLFGTLSGNTREVLHKFTVDLPKKHGRGGQSALRFARLRMEKRHNYVRKTAELATQFFINPATSQPNVAGLILAGSADFKTELSQSDMFDQRLQAKILNVVDVSYGGENGFNQAIELSAEILANVKFIQEKKLIGKYFEEISQDTGKYVFGVDDTLKALEMGAVETLIVWENLDVNRYVLKNTATGETVIKHLNKEQEADQSHFRDPSTNAELEVQEKTSLLEWFANEYKKFGCTLEFVTNKSQEGSQFCRGFGGIGGMLRYQLDIRSFDELSDDEGVYEDSD

SEQ ID NO: 12004 - protein, 208 aa, Zea mays
  VARIANT 190: note = Ancestral polymorphism is P, Derived polymorphism is L
  VARIANT 36: note = Ancestral polymorphism is R, Derived polymorphism is C
MASSSPPQHAGAGSSADLARFKSSGVRSMNMDDIIRNIYDPEAVNAAAAESAGVGPAEPSLAARRLRLGGRRRSSGGSGAVEMTLEDFLARDSCGRAAVMEGNMALGFPDGDRDAAGRVAGGVGGVRGGGKRALLDHADCAVMQRQKRMKKNQESAARSRDKKQEESMISIADALCQSPNTEVYVSLSCPMVLSFFDPFMSDSLDKVT

SEQ ID NO: 12005 - protein, 220 aa, Zea mays
  VARIANT 185: note = Ancestral polymorphism is R, Derived polymorphism is S
MVRALRLDGRATAAARWCTCRRAAVALCVANLIAALLVARALYALGSFAFAPKREEATKAFAREEKTQKGLPLELNQKVSLEILQRLHDLGEGSNTMEQQEAIEAWRVGKLKDMGSTSSKNLSNFGLSSEDSNEEIIPGPPLPPELHTELHTDYGGTAVRWGLTHHKESVADCCQACIDQAKRARPGALKCNIWVYCRSEYGCYSPDKYENKHQECWLKQ

SEQ ID NO: 12006 - protein, 150 aa, Zea mays
  VARIANT 6: note = Ancestral polymorphism is G, Derived polymorphism is V
MITLTGFMFLLTSAFLGFLYSPHLDTTPPRWVHLAHGLLLFLYQTFDAVDGKQARRTNSSSPLGELFDHECDVLVCAVRPPVNIFYFKCNDFQVVGFTTSLPTAIEVEGTTRMVEEQTAMQILLVYRQMRLISSRKATLGTLVEPLRLTR

SEQ ID NO: 12007 - protein, 636 aa, Zea mays
  VARIANT 156..636: note = Derived polymorphism lacks residues 156 to 636
MADEALDQPPDAAPSPSLAPATPPAPATSSPAALLRPRREAFEHGLLPIPKLIFPEGMLAQTLAQLKEKLAASVPDGRVRAAALAEALQIPQEQAALALGTLAAVLPAEDPVLGDGAMDGAAADIRDVLLFLYIQSYKRLVPRSAHKDSPAVADVWPSTSAFDGYLSALSPIQLVRSNSRRFMPSQADEEIHQLSFLQKHMANILTLLADSVEGEGDDSLVLTMETFEHLGFLVQFSEGTSLSQAATFFANSDPDMPAVPVPAAQVLDWMSQNIAFSLEYSSERSVAKESNQQTMSDLDVTMAEANTSHSRNSTPSANPAYYRNVTFVEGFSKTSVVKHASDVKGNSIKVLNCHDSVIYILAPLKYATVYGCSDATVVLGAVGKVVKVEHCERVHIIAAAKRICIANCRECIFYLGVNHQPLVLGDNHKLQVAPFNTCYPQLQDHMMQVGVDPSVNKWDQPFVLGVVDPHDSLSHPAGVADVKAESATCLDPDLFTSFLIPSWFGDEGQEPINCNPFPLPEIYEAFQSKKRSALEDIQKMIRELQLDENRKRELAAALHAQFKDWLYGNVLASHRHLRAISASSTVYKVINGAIYKTDYPLPTPQKHSTIVEADLFLPWKGLPPCSPAVFTQVCKK

SEQ ID NO: 12008 - protein, 68 aa, Zea mays
  VARIANT 64: note = Ancestral polymorphism is G, Derived polymorphism is R
  VARIANT 54: note = Ancestral polymorphism is S, Derived polymorphism is L
  VARIANT 51: note = Ancestral polymorphism is L, Derived polymorphism is I
  VARIANT 50: note = Ancestral polymorphism is I, Derived polymorphism is T
  VARIANT 42: note = Ancestral polymorphism is I, Derived polymorphism is N
  VARIANT 39: note = Ancestral polymorphism is V, Derived polymorphism is M
  VARIANT 26: note = Ancestral polymorphism is L, Derived polymorphism is F
  VARIANT 22..68: note = Derived polymorphism lacks residues 22 to 68
  VARIANT 7: note = Ancestral polymorphism is S, Derived polymorphism is L
  VARIANT 5: note = Ancestral polymorphism is R, Derived polymorphism is W
MRYLRGSGARTKHVTAFYCPTQVKRLIIHAKKCGASRDVEEIKKKMRSEILQLSDETSLFLSSGSILV

SEQ ID NO: 12009 - protein, 438 aa, Zea mays
  VARIANT 21: note = Ancestral polymorphism is R, Derived polymorphism is C
  VARIANT 25: note = Ancestral polymorphism is E, Derived polymorphism is D
  VARIANT 96..438: note = Derived polymorphism lacks residues 96 to 438
MAAATEKTAEDIRRELQELQRQHREVHLFLCPAHLEAPSLRAVCPDPRVVPSQITERLRDPRGLRRGAPGPGPGPGPPRPLRGFVRPHVGAEVADQAPQKRRLLSAVVKVDGAENNEEGTKDANGEGQEAGSGATEGSDRRTFNTGGFRRDGSLWMQRRVDYNSLPEPAPRELPRNEDPSLVRRNKRMLGQLLVGTLEKFQQEDKKLSNSEAFLRRSETQRKAEQKVREESERLRQQEREQIAEKRKRDMTLRARVAAKAEEKRLELLYIQWTEHHKRLSNFLRTKAEPPIYYMPTKPIIDDPAIVEQNKEKVFEEWKSMRRAELTRFQKQVEEQYLSNVERQLERIQNARNARKANGPGNMQEMDKELDTHRAEHGPKPRRVPEEGGNDDDEDAEDMAAEDELMDEVLGINDAINEDPSKPSEEATTEGQPATEEAQ

SEQ ID NO: 12010 - protein, 634 aa, Zea mays
  VARIANT 485: note = Ancestral polymorphism is S, Derived polymorphism is F
MDGCDCIEPLWPTDDLLVKYQYISDFFIALAYFSIPLELIYFVKKSSFFPYRWVLIQFGAFIVLCGATHLINLWTFTTHTKTVAMVMTIAKISTAVVSCATALMLVHIIPDLLSVKTRELFLKNKAEELDREMGLIRTQEETGRHVRMLTHEIRSTLDRHTILKTTLVELGRTLGLEECALWMPSRSGSSLQLSHTLRHQITVGSSVPMNLPVVNQVFSSNRAIIIPHTSSLARVRPLAGRYVPPEVAAVRVPLLHLSNFQINDWPELSAKSFAIMVLMLPSDSARKWHVHELELVEVVADQVAVALSHAAILEESMRARDLLMEQNVALDLARREAEMAIRARNDFLAVMNHEMRTPMNAIIALSSLLLETELTPEQRLMVETVLKSSNLLATLINDVLDLSKLEDGSLELEIKAFNLHAVFKEVMGFIKPIASIKRLSVSVMLAPDLPLCAIGDEKRLMQTILNISGNAVKFTKEGHITLVASIVKADSLREFRTPEFHPTASDEHFYLKVQVKDTGCGVSPQDLPHVFTKFAHPQSGGNRGFNGSGLGLAICKRFVSLMGGHIWIDSEGTGRGCTATFVIKLGVCDNTNTYQQQLVPLVWPSSADSNLSAPKVLPDGRGSVSLKSRYQRSV

SEQ ID NO: 12011 - protein, 710 aa, Zea mays
  VARIANT 413..710: note = Derived polymorphism lacks residues 413 to 710
  VARIANT 80..710: note = Derived polymorphism lacks residues 80 to 710
MSATSTTMPSYAPSSGCLPLVLSLHAHALRSGLATDRSVASNLLTAYAAFARAGDRDQAFRDCVAADAASSFTYDFMVSEHVKAGDIASARRLFYGMPEKSVVSYTTMVDALMKRGSVRDAVELYERCPLHSVAFFTAMISGFVRNELHKDAFTVFRKMLTCSVRPNVVTLICVIKACVGAGEFDLAMGVVGLAVKCNLFEKSIEVHNSLITLYLRMGDAAAARRVFDDMEVRDVVSWTALLDVYADLGDLDGARRVLDAMPARNEVSWGTLIARHEQKGDTAEALKLYSQMLADGCRPNISCFSSVLSACATLQDLRGGTRIHANALKMGSSTNLFVSSSLIDMYCKCKQCTYAQRVFNSLPEKNTVCWNSLISGYSWNGKMVEAEGLFNKMPARNSVSWNTMISGYAENRRFGDALNYFYAMLASGHIPGEITLSSVLLACANLCSLEMGRMVHAEIVKLGIEDNIFMGTALCDMYAKSGDLDSSRRVFYQMPEKNNITWTAMVQGLAENGFAEESISLFEDMIENGIAPNEHTFLAILFACSHCGLVEQAIHYFETMQAHGIPPKSKHYTCMVDVLARAGCLPEAEELLMKVSSELDTSSWSSLLSACSTYRNKEIGERAAKKLHELEKDNTAGYVLLSNMYASCGKWKDAAETRILMQGASLKKDAGCSWLQLRGQYHAFFSWKEKHPLSLEIYEILDLLMLELTT

SEQ ID NO: 12012 - protein, 488 aa, Zea mays
  VARIANT 151: note = Ancestral polymorphism is K, Derived polymorphism is M
MAFYRGLTAVSRLRSRMAQEATTLGGVRWLQMQSASDLDLKSQLQELIPEQQDRLKKLKSEHGKTQLGNITVDMVLGGMRGMTGMLWETSLLDPEEGIRFRGLSIPECQKVLPTAVKGGEPLPEGLLWLLLTGKVYAFLYSFNLNLKMCQMCSVKNTFLAYLCISIPLIYFSFFPNSHPISISFKAVFFFLFQVPTKEQVDALSKELLARSTVPAHVYKTIDALPVDAHPMTQFTTGVMALQVESEFQKAYDNGLPKSKFWEPTYEDCLNLIARLPPVASYVYRSDHEGGNVSAHTGHLVGSALSDPYLSFAAALNGLAGPLHGLANQEVLLWIKSVIEETGSGVTTDQLKDYVWKTLKSGKVVPGFGHGVLRKTDPRYSCQREFALKHLPKDPLFQLVSKLYEVVPPILTELGKVKNPWPNVDAHSGVLLNHFGLSEARYYTVLFGVSRSMGIGSQLIWDRALGLPLERPKSVTMEWLENYCKNKAA

SEQ ID NO: 12013 - protein, 126 aa, Zea mays
  VARIANT 18: note = Ancestral polymorphism is I, Derived polymorphism is L
  VARIANT 47: note = Ancestral polymorphism is V, Derived polymorphism is M
  VARIANT 53: note = Ancestral polymorphism is P, Derived polymorphism is L
  VARIANT 56: note = Ancestral polymorphism is A, Derived polymorphism is D
MMEKLNEIVFDILEKSIIRGNLQYASLSALRRHPLDLGNQAFLHRAVEGNMTPEAALDHLKVCRNGTIKIDLETNKIMDFIKFDVGNVVMVTGGRNTGRVGVIKNREKHKGSFETIHVLLGAFCYV

SEQ ID NO: 12014 - protein, 497 aa, Zea mays
  VARIANT 105..497: note = Derived polymorphism lacks residues 105 to 497
MAAPSHLHLHLPGCPQTLALPLPSPGGFSAWPGLRSCSRSRQPRIRPVAALGPADAGDLLGRVEAFLYTVADAAVNAEPVAAAADTGTKEAAAGDWLSGITNSMETVLKVLKDGLSALHVPYSYGFAIILLTVLVKAATFPLTKKQVESALAMRSLQPQVKAIQQRYAGDQERIQLETARLYKLSGVDPLAGCLPTLVTIPVWIGLYRALSNVANEGLLTEGFFWIPSLAGPTTIAARQNGQGISWLFPFTDGHPPLGWSDTLAYIVLPVLLVISQYISTQVMQPPQSNDPNQQGAQAVTKFLPLLIGYFALSVPSGLRLYWLTNNILSTAQQVWLQKLGGAKNPVKEYIDKLSREETTTVQKNDSTVQSEPLSKHSKPQPSQEPKPSGPQRGERFRKLKEEESMRKEVMGQGKQSEQSSSESRVTDGTQNSDVSSGDQKDQQGSHENGPVVASINGGVNHIRNEKTQNLSSEKEAADDHSPDVHKLTDRENGNDAV

SEQ ID NO: 12015 - protein, 556 aa, Zea mays
  VARIANT 98..556: note = Derived polymorphism lacks residues 98 to 556
  VARIANT 39..556: note = Derived polymorphism lacks residues 39 to 556
MNSVHSIESLAAGDAQHKLFQTLGPTLLISMAYIDLGKWLVAVDAGSRFGYDLVLLVLFFNFSAILFQYLSTCIGMVTGKNLAEVRFTVIFLVLAVAEIIRGTLASQYNHCAEISLILVDISFGDINLILYFYMTDRSAAWNTIAGMAVGFNLVFEHDNLITAICFASVVVNLLPYTLSRLDKVAGICNACIAGFTLLCFVLGLLISHPHTPVNMNAMFPKLSGESAYSLMALLGANIIVHNFYTHSAFVQVQRRSSHTLGSLFHDHLFSILFIFTGIYLVNYILLSSAADESSETVVMNFQDATELMHQIFTNPAGPIVLLVILLFSSHIISLTCIVSGEVISENFFGVKLPLSAHHLLPKGLAMVLNIYFAKVAGPEGIYQLLIMCPVIQAMLLPSSIIPILRVSSSRLLMGRYRIALCIEIFAFLAFLLVVFTNIIFTAEIMFGTSTWTNNLKGDTGSPAILPYSVVVLISCASIGFTLLLAVTPLKSASNEAQTHLSSMHSQRGALGTTQREATSLKKFEHEEVQSCSVGAVLMGSSEGHKKSVHLRRTLSG

SEQ ID NO: 12016 - protein, 234 aa, Zea mays
  VARIANT 49: note = Ancestral polymorphism is M, Derived polymorphism is V
  VARIANT 65: note = Ancestral polymorphism is A, Derived polymorphism is T
  VARIANT 82: note = Ancestral polymorphism is A, Derived polymorphism is E
  VARIANT 87: note = Ancestral polymorphism is S, Derived polymorphism is F
  VARIANT 117: note = Ancestral polymorphism is I, Derived polymorphism is V
  VARIANT 129: note = Ancestral polymorphism is E, Derived polymorphism is K
  VARIANT 134: note = Ancestral polymorphism is G, Derived polymorphism is S
  VARIANT 138: note = Ancestral polymorphism is A, Derived polymorphism is V
  VARIANT 146: note = Ancestral polymorphism is R, Derived polymorphism is W
  VARIANT 157: note = Ancestral polymorphism is V, Derived polymorphism is A
  VARIANT 169: note = Ancestral polymorphism is R, Derived polymorphism is W
  VARIANT 194: note = Ancestral polymorphism is C, Derived polymorphism is W
  VARIANT 195: note = Ancestral polymorphism is P, Derived polymorphism is L
  VARIANT 227..234: note = Derived polymorphism lacks residues 227 to 234
MEKNFYSSENAKILGCEKVPSNVDWECSFMYRHQPESNSHDIPELLRAMVSEYAEEVIKLAEQLAAAMSENLGLDKGYIEKEFSKPFVGVKVAKYPRCSHPELVMGLREHTDAGGIILLFQDELIPGLEFLKDGRWMAVPPTQGNRILVNLGDQIEVITNGTYKSICHRVLPNKNGSRLSIATFYNPGADAIICPASKLTYPSQYRFQDYLDFYSTTKFTDKVFRFQTTKAILK

SEQ ID NO: 12017 - protein, 217 aa, Zea mays
  VARIANT 28: note = Ancestral polymorphism is P, Derived polymorphism is Q
MECVVQGIIENQHVDALEVLLQGLSGVPKERFRVHELCLKSGPNLGVVPSEVRLLCDLAQPTPSWTIRHVGGAMRGAGAEQISVLVRTVVESKASKNVLHYFYTLGYKLDHELLKSGFAFRFHRGAQITVTVTSANKMSRLHATDEATPVTPAIQLVEITAPAAADNYNDVVSAVTAFCEYLAPLLHLSKPGHSTGIVPTAAAAAASLMSSGGGKTL

SEQ ID NO: 12018 - protein, 387 aa, Zea mays
  VARIANT 100: note = Ancestral polymorphism is S, Derived polymorphism is Y
MAAAEEMMAVLDKETLALMGLGNAAAAVVAECEKFKENARPLKRGRDVSKLNHALKAHADPAQRATLLEARKKLIEAIYEYQGEDPLQPWLDCIKWVQEYFPTGGECSGLVVLYEQCVRTLLDDERYKDDLRFLKVWLEYAGNCADAEVIYRFLEANQIGQGHAIYYMSYASLLESKNKLRKANEIFDLGIARKAKPLEKLEAVYRAFLRRSIKKREQEDDTVDDDLPKRSFGNNLKRDENRNQQAGNSHLGRPRALQRPLSVYKDESPLPNQGLDRVRSKENNTSWRVLGTRAERNKENNMMPAKWTSHKIPQKLGARGAVQSTRASCSIEVFVEEDCTQEPARPVPKSPNPSVLKLRQTTSKSLKKETELLKENPLRNFPLSRLR

SEQ ID NO: 12019 - protein, 186 aa, Zea mays
  VARIANT 46: note = Ancestral polymorphism is S, Derived polymorphism is L
MADRDRSGIYGGAHATYGQQQQQGGGGRPMGEQVKGMLHDKGPTASQALTVATLFPLGGLLLVLSGLALTASVVGLAVATPVFLIFSPVLVPAALLIGTAVMGFLTSGALGLGGLSSLTCLANTARQAFQRTPDYVEEAHRRMAEAAAHAGHKTAQAGQAIQGRAQEAGAGGGAGAGAGGGGRASS

SEQ ID NO: 12020 - protein, 214 aa, Zea mays
  VARIANT 100: note = Ancestral polymorphism is A, Derived polymorphism is V
MGLKLSCIHQGSLSRQAHQPASPAPARVIAADASLKELPASSSSSSVSDVLGRSGGDDMAVASSSFFMCNSDALYFNEPPPALPTGEVLRPGQIYFVLPAAMLGRPLSTADMAALAVRATTALSSSCKPRRHGRRRARGGGKKKKAVRVVPVREQMEDGGEDAFFNEKLNQQTLGDFGMLLLSQAKKDDKLAVAAAAATARLKRALSIIQEDAE

SEQ ID NO: 12021 - protein, 267 aa, Zea mays
  VARIANT 173..267: note = Derived polymorphism lacks residues 173 to 267
  VARIANT 16: note = Ancestral polymorphism is V, Derived polymorphism is M
  VARIANT 15: note = Ancestral polymorphism is A, Derived polymorphism is V
  VARIANT 10: note = Ancestral polymorphism is E, Derived polymorphism is K
MASVLEKIDEMLLLAVYKKVCTSLGASRRRWAPKPFVARSFKPPTTYSKPTPPRAMIGPVSSLSEPSPGPPSPSSSPSPAASSRKAIWYFEGIYAYSPQIPGVRFPGLTHPGIVGTAPSAKLLNVWNEREKRLAETSPQTLKLFEVLHQRPLANLPTPENCLLGKIQEGTAGWHKVANEAAKTIPGRENGGNCDIKNLSRGSKVYLPVFVEGANLSTGDMHFSQGDGEVSFCGAIEMSGFLELNFFQGFIPLIHPSKTKFSAAVVLL

SEQ ID NO: 12022 - protein, 583 aa, Zea mays
  VARIANT 59..583: note = Derived polymorphism lacks residues 59 to 583
  VARIANT 71: note = Ancestral polymorphism is R, Derived polymorphism is W
  VARIANT 235..583: note = Derived polymorphism lacks residues 235 to 583
MAHPPRAGVSQLQHGRTEVNAELKKEAEFFRDIVFVPFLDNYDLVVMKTLAICEYGHGQQTTGNKVAEDRRRAEVFRDNLRLHDVVHSEKRIYLVFEYLDLDLEKFMDSCPEFAKNPSMIKNLLIDRRTNALKLANFGLARVFGIPVRTFTHEVVTLWYRAPEILLGERQYSMPVDVWVLGTPNEQSWPGVTSLPDFKSAFPKCQSQDLAAVVPNLEPTGLDLLSPIYVFIAHGQKMLRYEPSKRITARQALEHDYFKDLEMENMTTTSKKIVETVISPLAKELNEGDVDKIVPQNVDVNIKKEAKVDTNVKGPTISKKIHQRIATDDVKKPLESVSRYLHKLRRVMTNQSKAESASHGVGTQSQIDNFEKEDVPPKFVNGRPFLTTVQLSKLSTSEIRMHEWYMVASNKYKLEDFTFVVPEDAFWSKDNIDPVRHLFFDDIWSLYHRQRMETNYLTLFCFAYRFYWKDLGGEHPEDKPNLSISLFPYGDKQPPGTVMCGYYVCEWCRVIFHYMVNREDVPKSKINAEWLERDMVSVDVAKVVKDLLYFMRREVLHQQGLFYNTNGNLQQFPELSLYTISHSV

SEQ ID NO: 12023 - protein, 147 aa, Zea mays
  VARIANT 132..147: note = Derived polymorphism lacks residues 132 to 147
MGDNMTADDSLQFLLKWLDRFPEYKGRDFFIAGESYAGHYVLELAASILAAKNARPKDMASVNLKGIAIGNAILEFAAEQSALYEYLWQHAFLSDTAHTLIGQRCKNAEDNSPLCSGTKDVAYNQLGNIDAYNIYAMTCHDKKVKPT

SEQ ID NO: 12024 - protein, 184 aa, Zea mays
  VARIANT 32: note = Ancestral polymorphism is A, Derived polymorphism is T
  VARIANT 35: note = Ancestral polymorphism is C, Derived polymorphism is F
  VARIANT 39: note = Ancestral polymorphism is A, Derived polymorphism is T
  VARIANT 40: note = Ancestral polymorphism is A, Derived polymorphism is T
  VARIANT 46: note = Ancestral polymorphism is R, Derived polymorphism is C
  VARIANT 59: note = Ancestral polymorphism is A, Derived polymorphism is D
  VARIANT 81: note = Ancestral polymorphism is G, Derived polymorphism is R
  VARIANT 91: note = Ancestral polymorphism is S, Derived polymorphism is L
  VARIANT 102: note = Ancestral polymorphism is P, Derived polymorphism is S
  VARIANT 104: note = Ancestral polymorphism is R, Derived polymorphism is W
  VARIANT 110: note = Ancestral polymorphism is S, Derived polymorphism is L
  VARIANT 111: note = Ancestral polymorphism is G, Derived polymorphism is R
  VARIANT 138: note = Ancestral polymorphism is H, Derived polymorphism is Y
MRISAAPKAKAQKARFLEIGRTVGATVSFAAAVICGYLAAVLVLRRLVLPRLPVLSSPALRGASAAHNAVLLTLSAYMAAGCALSTVTTASAPRWAWPFCFPPWGTTEVSGPIFFWAHVFYLSKVYELGDTLLILLAHRASRFPLGLAPSPRKRNVWSKCWMRKPSKPARVMSAWSAAPCFQMR

SEQ ID NO: 12025 - protein, 151 aa, Zea mays
  VARIANT 82: note = Ancestral polymorphism is R, Derived polymorphism is W
  VARIANT 55: note = Ancestral polymorphism is A, Derived polymorphism is T
  VARIANT 51: note = Ancestral polymorphism is G, Derived polymorphism is S
MVHLTVCYPVGSGGVEPTRRDQDLYLNLDDGRSMRPSHGGGEASDGGCRYGGEAAAGDRGGVLGVGLPALPVAGHQFLPQGRHGRCCLLIADPPGLHQPTHGHQAAPWPPLGCRPHALRRHRRDNQMCYFSAYNPRLFPMVCLSMVERKSD

SEQ ID NO: 12026 - protein, 747 aa, Zea mays
  VARIANT 108: note = Ancestral polymorphism is R, Derived polymorphism is C
MDGTPISASSTAGVDVGAVATGTPMKNAMTAAAVTEMARHLTVDTEDAFAGLLELAADDNAEGLRRALERAPPAAADEAGLWYGRRKVLEHRTPLMVAATYGSLAALRLLVSLSSVDVNRRSGTDGTTALHCAASGGSRSAVEAVKLLLGAGADTDTTDDAGRRPADVISVPPKMFDAKFALQDLLGFPKSEHGMLRVVTRSTNSISSPVSSPTAEDARSPSASVLMMTKFADLPRVATSEKKEYPVDPSLPDIKNSIYASDEFRMYSFKVRPCSRAYSHDWTECPFVHPGENARRRDPRKYHYSCVPCPDFRKGVCRRGDMCEYAHGVFECWLHPAQYRTRLCKDGTSCNRRVCFFAHTTDELRPLYVSTGSAVPSPRASATAAMEMAAAMGLMPGSPSSVSAVMSPFTPPMSPSGNGMPPSLGWQQPNVPTLHLPGSSLQSSRLRTSLSARDMPADDYSLMPDFDSQLMNDLCYSRLGSSTGNHSARTKSLNPSNLDDLFSAELVSSPRYSNGDQGAMFSPSHKAAILNQFQQQQQALLSPINTGVYSPKAVDNKQLPSHPSLLHASLGMPSPGRMSPRCVESGSPMNSHLAAALAQREKQQQTMRSLSSRDLGPSAARASALGSPLSTSWSKWGSPSGVPDWGVDGEELGKLRRSSSFELRSGGDDPDLSWVHTLVKESPPEKQVTTSESINSVGPSPLMPPSMNNGGEGSGLNTQLDGRDQAAVLGALLEQMQLDQQIGSLAT

SEQ ID NO: 12027 - protein, 408 aa, Zea mays
  VARIANT 276: note = Ancestral polymorphism is M, Derived polymorphism is I
  VARIANT 179: note = Ancestral polymorphism is A, Derived polymorphism is T
  VARIANT 94: note = Ancestral polymorphism is Y, Derived polymorphism is N
MADELHDDLMDLILVRVPCKVDRASISLVCRAWRDKVARLGGQAPPPLPWLLLPSRFGNDPTFRAACVLSGCSVHPQHNLLTTIPPGARFVGSYDGAWNFLYFDETRTHRLFNARTRQVRMLPEAIYVNRDGHQSICNMVILAATLSSSPDDSMYVGAAIITRAQGPHEVLQPYNRWIAFWRMGWEMALGLDVVDMGMYLTEDVVYHCRAFYFLLIYGGRYEILVCTPNENPEYPRNLNINVEFRRFMPLALGERISPLHSVIARYLVMSRGELLMVVRFTAVADQQRSQFKVFRAASRPQMPDGGGHFPVAQYPWAWSDLDTLDGRILFVGYGCSRSYQADAYLGFKPGIYFLDDGMFYEALYFGGANTRPYPCTDNGMWSESEVRIQRCFPTPDSSEYSPPVWLLP

SEQ ID NO: 12028 - protein, 152 aa, Zea mays
  VARIANT 56..152: note = Derived polymorphism lacks residues 56 to 152
  VARIANT 40: note = Ancestral polymorphism is R, Derived polymorphism is C
  VARIANT 38: note = Ancestral polymorphism is R, Derived polymorphism is W
  VARIANT 36..152: note = Derived polymorphism lacks residues 36 to 152
  VARIANT 21..152: note = Derived polymorphism lacks residues 21 to 152
  VARIANT 14..152: note = Derived polymorphism lacks residues 14 to 152
MVVVARSGISVRQRRMNDRRQGTGRKSVTISPELTQSRNRVHLRSIFSKDLLTHKQCGAKKVVTYADAPMFVVGVNENSYDPKMNVVSNANCTTNCLAPLAKSPSALGGLDECAQEHLQKPELVTMLAELSSGFWEAVQSREGAFWPLQTEQ

SEQ ID NO: 12029 - protein, 378 aa, Zea mays
  VARIANT 74: note = Ancestral polymorphism is K, Derived polymorphism is N
MVVGEQDYYYSSSDSDDEDVSRYVFLARQPVPVGRHHPEEDDRDASFANDDDDGDGGDGTAGEEESEGGVCRRKKRPLLEILDDDAPPPTKKAQVELIIASPLATQTPPSGSESNLASPPLAGESGSEGSHEHRAPREQGRAKNATKNQRGACGKRGRSSGCDVDGDRDAHRHAVAVAAKTGASSSATSGRFTFTCSLCDRCFDSHQALGGHVLGHHRKRAKIAIAAGAVHDVVDDKVHGKGKGGVGEPVFAGSHDIAVSSGHGFTYGNSRSDKKMDIGTASPNRKVVVAGTCREGANGNGNGHGDGCRTRYKCKVCGTECLTGRALGGHMGKHQKRLPVGGGGKADRSPSPATRTTTARPLAQLFGAERLQREIRPS

SEQ ID NO: 12030 - protein, 150 aa, Zea mays
  VARIANT 7: note = Ancestral polymorphism is S, Derived polymorphism is L
  VARIANT 29: note = Ancestral polymorphism is S, Derived polymorphism is L
  VARIANT 37: note = Ancestral polymorphism is P, Derived polymorphism is H
  VARIANT 63..150: note = Derived polymorphism lacks residues 63 to 150
MCGDPNSVLRFAFIEFADEEGARAALNLSGTVLGYYPVNVLPSKLPLHQSKKHSYPCLTMNVKCVQGLSTAQTLTRRFGTCTHATTTRNGTIKIDLETNKIMDFIKFDVGNVVMVTSGRNTGHVGVIKNREKHKGSFETIHVLLGAFCYV

SEQ ID NO: 12031 - protein, 126 aa, Zea mays
  VARIANT 90: note = Ancestral polymorphism is E, Derived polymorphism is G
  VARIANT 46: note = Ancestral polymorphism is T, Derived polymorphism is S
  VARIANT 14: note = Ancestral polymorphism is P, Derived polymorphism is L
  VARIANT 4: note = Ancestral polymorphism is R, Derived polymorphism is Q
  VARIANT 3: note = Ancestral polymorphism is S, Derived polymorphism is T
MLSRPGGTTNLVEPRGQAAALPSGGPAVQPWWNIKQMEALLVKKGTMPHRRHLLWCQSFCSISISCSIAVLRPLLRRRCCSLWKSRCVSEEPVYVNAKQYRGILRRRQSRAKAELERKRWSKQESG

SEQ ID NO: 12032 - protein, 144 aa, Zea mays
  VARIANT 1: note = Ancestral polymorphism is M, Derived polymorphism is I
  VARIANT 10: note = Ancestral polymorphism is P, Derived polymorphism is R
  VARIANT 86: note = Ancestral polymorphism is E, Derived polymorphism is K
  VARIANT 88: note = Ancestral polymorphism is A, Derived polymorphism is T
  VARIANT 99: note = Ancestral polymorphism is T, Derived polymorphism is M
  VARIANT 100: note = Ancestral polymorphism is A, Derived polymorphism is V
  VARIANT 107: note = Ancestral polymorphism is S, Derived polymorphism is N
  VARIANT 120: note = Ancestral polymorphism is Y, Derived polymorphism is C
MGGVSAVSRPAVVLLLWVESCTSLLSRLARSSPKSCLCRPLHFTSLLALAGGRGSGASCRTPSETLQPFRERCCSCSCRRPCYQPERACVGGARQFQCTAWIQFSISELHIQLPLSQIDCIRLFLTSPFHSSTSATGVTKQVSL

SEQ ID NO: 12033 - protein, 203 aa, Zea mays
  VARIANT 191: note = Ancestral polymorphism is H, Derived polymorphism is R
  VARIANT 62: note = Ancestral polymorphism is A, Derived polymorphism is V
MEGTTQPTAGAREKLLPTSAAASLPPYLDPHPADSSSYAVLLVPVRRRLRRGGRCIAPCLTALLLALAGFLLWPADPDISLARFHLGHVSVVARPAVAVTISAALKVRVRNPDLFALDYTRLDVAIGYRGKPLGLVTSGGGRVQARAVSYVDANLQLDGIRVVEDAIYLLKDLARGSVPFDALAEVEGHLHFFFLSIPVKVKC

SEQ ID NO: 12034 - protein, 216 aa, Zea mays
  VARIANT 114: note = Ancestral polymorphism is K, Derived polymorphism is M
MECVLGLVGRDFAVVAADTSAVQSILVHKTDEDKVMVLDSHKLLGASGEPGDRVQFTEFIQKNLHLYQFRNTIPLSTAAAANFTRGELATALRKVPIQINLVSLFALLGLPCKKDVGASLYYIDYIATLHKIDKGAFGYGSYFCLSLMDKLYRPDMTVEEAVDLVDKCIKEIRLRLVVAPQNFVIKIVDKDGAREYARRELVGDSAPAEAAATVAA

SEQ ID NO: 12035 - protein, 386 aa, Zea mays
  VARIANT 331: note = Ancestral polymorphism is V, Derived polymorphism is A
MAAASLLEATRFLSTPHPRSRSRPLPFPPGSGLHPHLLRTPRLSTLRVHLHRPAPLGAQEPARPGALLAVDALRRSVLDSLAALKRPALALLLAGVLLAAASAGGPHAAALAASGGRVGGSAFSSRSSSPRSYGYSAPAPRGGYTAAPFYSPSPFVSVGPALGIGFGGSGFLVTLMGFAAFLYLAGFLSDSSGATSVLTETEKTTVLKLQVGLLGMARSFQKELDQIAEKADTSTPAGLSYVLTETTLALLRHPDCCISAYSSVDVKRSIDNGEKRFNQLSIEERGKFDEETLVNVNSIKRNKGGSQRSSGFSNEYIVITILVAAEGVHKVPVINSSNDLKTALQKMGAIPSRKILAVEVLWTPQNENDTLSERELLEDYPLLRPL

SEQ ID NO: 12036 - protein, 682 aa, Zea mays
  VARIANT 483..682: note = Derived polymorphism lacks residues 483 to 682
MPTPRASLLTLLLLLAVQLPPAAAASKHRHASESAPAPPASYFLVSWASNLTLLGSASIQPGATAVALTTPSHDGVGAGRALFSEPVRLFVPSSSAAASFSTRFTFRITPAPTFGDGLAFLLTSSRTFLGASNGFLGLFPSSSASDEGEADLGGVTTVAIEFDTHRDVALRDPDGNHVALDAGSIFSVASASPGVDLRAGVPITAWVEYRARRRRLSVWLSYSPFRRPEKPALSADADLSGLMRTYMYAGFSASNGNGAALHVVERWTFRTFGLANSSRASPPSEPPTEPSKPLLPPNKPQLLTGNHKHQHLIYKVVGGVIGGIVLLVFAIVASVVWFSKPVRRPSEEEERTVTSEDKPYGTMSMEVVRAATKGFDSGNVIGIGGSGATVYEGVLPSGSRVAVKRFQAIWPCTKSFVSELAAMLNCPNHPNLVRLAGWCCSKAELVLVYEFMPNGNLDSALHTMGGATLPWEARFRAVLGMASALEYLHDGCDRRILHRDVKSSNVLLDGEFNARLGDFGLARLVSHGGLPLTTQPAGTLGYLAPEYVHSGVATERSDVYSFGVLALEVATGRRPTERGISVVDWVWGLWGRRRLVDAADQRLQGRFVAEEMRRVLLVGLSCVHPDCRKRPGMRRVVKMLDGTAPLTMVPDKKPPVLLQTQVDEASSMNSVDTVNTTFYSCR

SEQ ID NO: 12037 - protein, 683 aa, Zea mays
  VARIANT 129..683: note = Derived polymorphism lacks residues 129 to 683
  VARIANT 100..683: note = Derived polymorphism lacks residues 100 to 683
MATTTFPTSTPFFAAHHGPRRSRPSISAAVYSRSRRWRPLRVACEKVVGIDLGTTNSAVAAMEGGKPTIVTNAEGARTTPSVVAYTKSGDRLVGQIAKRQAVVNPENTFFSVKRFIGRKMNEVDEESKQVSYRVIRDDNGNVKLDCPAIGKQFAAEEISAQVLRKLVDDASKFLNDKVTKAVITVPAYFNDSQRTATKDAGRIAGLEVLRIINEPTAASLAYGFEKKNNETILVFDLGGGTFDVSVLEVGDGVFEVLSTSGDTHLGGDDFDKRIVDWLAGNFKNDEGIDLLKDKQALQRLTEAAEKAKMELSSLTQTNISLPFITATADGPKHIETTLTRAKFEELCSDLLDRLRTPVDNALRDAKLQFKDIDEVILVGGSTRIPAVQELVKKMTGKDPNVTVNPDEVVALGAAVQAGVLSGDVSDIVLLDVTPLSLGLETLGGVMTKIIPRNTTLPTSKSEVFSTAADGQTSVEINVLQGEREFVRDNKSLGSFRLDGIPPAPRGVPQIEVKFDIDANGILSVTAVDKGTGKKQDITITGASTLPKDEVERMVDEAEKFAKEDKEKRDAIDTKNQAESVIYQTEKQLKELGDKVPGDVKGKVESKLQELKDAVAGGSTQTMKDAISALNQEVMQIGQSLYSQQGAPGAGPGPADASAGSAAGTSEKPGDDGDVIDADFTDSK

SEQ ID NO: 12038 - protein, 1236 aa, Zea mays
  VARIANT 149..1236: note = Derived polymorphism lacks residues 149 to 1236
  VARIANT 469..1236: note = Derived polymorphism lacks residues 469 to 1236
MAPAAAEAGPGDDGLRKLEYLSLVSKVCSELETHIGVGDKVLAEFITELGRDSTTVPEFDAKLKEKGADFPDYFVRTLLTIIHAILQPTASNPSAATVAEGPAGAESAKFPGLARPDDPDHARNLRLELERDADAAPPAPMRDDRDRRWDGRGRDRDYGRGGREHDQDRGGRDHDRDRRDRDRGRDREYGRDRDRGRDREYGHDRDRGRDREYGRDRDHDHVRDRDGERLHDGDRDTGRNRVRDLGRSRRYADDEEEERGNVGRGREVAVSNPSGEPELYQVYRGRVTRVMDTGCFVRLDDVRGGHEGLVHVSQMASRRVANAKEVVKRDQEVYVKVVSVKGQKLSLSMRDVDQDTGKDLLPMQRGGDDAPRVNPSGGRGSGMGSGKRLGLSGIVITEEDEAAPTSRRPLKRMSSPERWEAKQLIASGVLDVRDYPMFDEDGDGMMYQEEGAEEELEIELNEDEPAFLQGQSRFSIDMSPVKIFKNPEGSLSRAAALQTALIKERREVREQEQRAMLDSIPKDLNRPWEDPMPDTGERHLAQELRGVGLSAYDMPEWKKEAYGKALTFGQRSKLSIQEQRQSLPIYKLKKELIQAVHDNQVLVVIGETGSGKTTQVTQYLAEAGYTTRGKIGCTQPRRVAAMSVAKRVAEEFGCRLGEEVGYAIRFEDCTGPDTVIKYMTDGMLLREILVDENLSQYSVIMLDEAHERTIHTDVLFGLLKQLIKRRSDMRLIVTSATLDAEKFSGYFFNCNIFTIPGRTFPVEILYTKQPESDYLDAALITVLQIHLTEPEGDILVFLTGQEEIDHACQCLYERMKGLGRDVPELIILPVYSALPSEMQSKIFDPAPPGKRKVVVATNIAEASLTIDGIYYVVDPGFAKINVYNSKQGLDSLVITPISQASAKQRAGRAGRTGPGKCYRLYTESAYRNEMSPTTIPEIQRINLGSTVLNMKAMGINDLLSFDFMDPPAPQALISAMEQLYSLGALDEEGLLTKLGRKMAEFPLDPPLSKMLLASVDLGCSDEILTIIAMIQTGNIFYRPREKQAQADQKRAKFFQPEGDHLTLLAVYEAWKAKNFSGPWCFENFVQSRSLRRAQDVRKQLLTIMDRYKLDVVSAGKNFTKIRKAITAGFFFHAARKDPQEGYRTLVENQPVYIHPSSALFQRQPDWVIYHELVMTTKEYMREVTVIDPKWLVELAPRFYKGADPTKMSKRKRQERIEPLYDRYHEPNSWRLSKRRA

SEQ ID NO: 12039 - protein, 615 aa, Zea mays
  VARIANT 462..615: note = Derived polymorphism lacks residues 462 to 615
  VARIANT 434..615: note = Derived polymorphism lacks residues 434 to 615
  VARIANT 433..615: note = Derived polymorphism lacks residues 433 to 615
  VARIANT 296: note = Ancestral polymorphism is P, Derived polymorphism is S
  VARIANT 279..615: note = Derived polymorphism lacks residues 279 to 615
  VARIANT 248: note = Ancestral polymorphism is T, Derived polymorphism is M
  VARIANT 183..615: note = Derived polymorphism lacks residues 183 to 615
MPISQTLSPASHHRKTPTIPVPASRLPVHAVPFNYPAAKASSSTPPTPPSSPATQTYLDAYAPKNMLASSSSCPPDFMLPSAGASKASCMEGPLGLGRAALPKAHCSSPPRRMVDICIDSRNGKAPVEPVFAPSRSPSLGRRSPPSGPGSPVPRSGSPPSWTGSGTGNDSGSFPKPDLAIPVQSPSLDLGGTRNSDGSSLDWDGRTPHIEAWVPQGCRETNDKLIYAYLDQHLPLSAAEEFIQNILRTAAPGIQFQMLPSSRGIKLLHFYSRADRDEVRLMSPLLADGLQLKLECPEETDNRFFRQPQWLAFAMIVDFPTEHWSEASIRRCFGACCEVAEVDPRCLTGDNFGPIRVLLELNHYLDLPSEIWVTTMDGVSRGGCIAQVLPLRVWPRADQLGPDGRLRRFFQHMSPPPAPPMLSEVPAALPHVPQQQNASPVRNAQQQANTTTSQTSSAFSTAQLLCLSAMLAQLTGPRTTETQSQLPPQQNTTPQSHCSSKRQPTSPTTFNATRHKRAGRPPRNNVPKPIQRKSSRLAAKANGNFVDMTNKAVKLKELRDTLQGCSTAVKGGVQKKGLLSRSMASISIPALRKLVRAAGLGCSAANAVGVVPLAKE

SEQ ID NO: 12040 - protein, 235 aa, Zea mays
  VARIANT 135: note = Ancestral polymorphism is R, Derived polymorphism is S
  VARIANT 103: note = Ancestral polymorphism is G, Derived polymorphism is V
  VARIANT 97..235: note = Derived polymorphism lacks residues 97 to 235
  VARIANT 61: note = Ancestral polymorphism is L, Derived polymorphism is Q
MRVEKGDRLYHNCSKLWLAHSNHPQQAVENYLVFDQLVAAQMLNLVIIQSGIPGVISGALLYIRDDFAAVEKSTVLRETIVSMAVAGAIFGAAFGGWMNDKFGRRPSIILTDALFFGGAVIMAFSPTPRVIIVGRVFVVLGVGMASMTSPLYISEASPTRIRGALVSTNGLLITGGQFLAYLINLAFTKVPGTWRWMLGIAGVPALVQFVLMLMLPESPRWLYRKVDSSICFYKK

SEQ ID NO: 12041 - protein, 150 aa, Zea mays
  VARIANT 4: note = Ancestral polymorphism is G, Derived polymorphism is D
  VARIANT 7..150: note = Derived polymorphism lacks residues 7 to 150
  VARIANT 79: note = Ancestral polymorphism is R, Derived polymorphism is C
  VARIANT 109: note = Ancestral polymorphism is P, Derived polymorphism is L
MECGSSWRLPAVVVGILFCAALFSPPAVALNIAIQSAGDGVVDGMLGRRENPGEHEAMRKMKNEFMVNWDGLRTREKERVLVLAATNRPFDLDEAVVRRLPRRLMVNLLDASNRRKILSVILAKEDMADDVDLETIANLTEGYSGSDLKV

SEQ ID NO: 12042 - protein, 233 aa, Zea mays
  VARIANT 9: note = Ancestral polymorphism is L, Derived polymorphism is I
MAPKILVILVFLAVASPAALAAFDVIEMLADKPTYSTFLKLLQDTKVAGEANQLRSATLLVVPDKLAKPLASLPADKVRPAVENHVLLSYFDPIKLDEMKTRTAILPTLLSVTDKKLGVLNYTRADDGQMYFGAPGAPCVAKLVKVVAARPYSVSIMEISEPILPAALPSPVAAPGRRGKGGKRKIKPSAATHEDSNMIPRKPVEAVVVGKGKVAKDTVSESPAPSPAPVSAP

SEQ ID NO: 12043 - protein, 149 aa, Zea mays
  VARIANT 111: note = Ancestral polymorphism is G, Derived polymorphism is R
  VARIANT 82: note = Ancestral polymorphism is I, Derived polymorphism is N
  VARIANT 67: note = Ancestral polymorphism is P, Derived polymorphism is T
  VARIANT 36: note = Ancestral polymorphism is A, Derived polymorphism is T
  VARIANT 17: note = Ancestral polymorphism is A, Derived polymorphism is V
  VARIANT 11: note = Ancestral polymorphism is S, Derived polymorphism is F
MSDLARLSQHSKAYLFAANAGITDGVRPILDSRWAAVAASTISVAVLLLLPLFMFIALVRRMGPYLPLLHHTLLLAQAYLAIYFATLALTAMVDLVAVFSGTTSPEDDDNGDAAKAFGLVQMVVGLAVGVHYYVVVFHRAAARAAPRAN

SEQ ID NO: 12044 - protein, 341 aa, Zea mays
  VARIANT 75..341: note = Derived polymorphism lacks residues 75 to 341
  VARIANT 101..341: note = Derived polymorphism lacks residues 101 to 341
  VARIANT 229: note = Ancestral polymorphism is S, Derived polymorphism is F
  VARIANT 317..341: note = Derived polymorphism lacks residues 317 to 341
MAAKSPETGQTASEGGLGSSVRAGTGEEGPANSLQDSSRENETRDGRTALGSPTAPTIPRSRRAPSPANPSTTQQQIHHRRARRAPRRGTLDPAQQEAANQSSSPPAPTPPAAASGVRYRTPSSPDLLLPADAAKMRRYSALPNDGLQEMLADHAHRYWGVVLVILAPLALISLVLLLMPRSPAGTMGGARSHRGNASESDGRRAPSARWCRWERFALEKPLKVNNVVSFSAATRWSSVMRKRKHMSAALALVDSTKWKSPRYAVIFDVGSSGSRIHVFRFDANLDLVRIGSEIELFVQATAGLRNLGAQKSEALLQAVRDLLREKSSFKNQPDWVTVLDY

SEQ ID NO: 12045 - protein, 120 aa, Zea mays
  VARIANT 38: note = Ancestral polymorphism is G, Derived polymorphism is C
  VARIANT 59: note = Ancestral polymorphism is M, Derived polymorphism is T
MQAVARAARGLAAAAAAAAARPSATEAGHRGQVQQARGIVVQVRDGNLERALSIMERKMRSSGMERLIRARTHHHVKDSEKRVLARKGLMQRVRSQELGKKLREILIKKIRACDCYVETT

SEQ ID NO: 12046 - protein, 79 aa, Zea mays
  VARIANT 8: note = Ancestral polymorphism is A, Derived polymorphism is G
  VARIANT 23: note = Ancestral polymorphism is E, Derived polymorphism is D
  VARIANT 27: note = Ancestral polymorphism is A, Derived polymorphism is V
  VARIANT 33: note = Ancestral polymorphism is T, Derived polymorphism is M
  VARIANT 38..79: note = Derived polymorphism lacks residues 38 to 79
  VARIANT 64: note = Ancestral polymorphism is A, Derived polymorphism is S
MAHPFLQGLDALLLLRLERPLEEGTAAVEAVVTVAGQQLDAQVAALVRMLVAKGRAGMLAEALAEFAAICMLWTRGCSS

SEQ ID NO: 12047 - protein, 142 aa, Zea mays
  VARIANT 39: note = Ancestral polymorphism is T, Derived polymorphism is P
MPKNKGKGGKNRKRGKNEADDEKRELVFKEDGQEYAQVTRMLGNGRCEALCIDGTKRLCHIRGKMHKKVWIAAGDIVLVGLRDYQDDKADVILKYMNDEARLLKAYGEIPDNVRLNEGVVDEEEAGAQDDYIQFEDEDIDKI

SEQ ID NO: 12048 - protein, 127 aa, Zea mays
  VARIANT 57: note = Ancestral polymorphism is R, Derived polymorphism is L
  VARIANT 52: note = Ancestral polymorphism is A, Derived polymorphism is E
MAMHRAAALALRRLSAAAAAVAPSPVSLTHLRPVVVAATATNARFVMQPTTAAAALRLRRGYAAGGGAGRKAVIEDEDDDEDELEAMGSDGEFDGDFDDDFDGDFDDEDLDEFEDDSDDGSEREAGP

SEQ ID NO: 12049 - protein, 523 aa, Zea mays
  VARIANT 494..523: note = Derived polymorphism lacks residues 494 to 523
MISAISGIMEDVVRIGSFDLDAVSGAYPTTLPSPRMVAAGRELQLIHSPRQPSSGFRESLNPIYTDHDTTTTTTTTATTDSSPLAAAANHAATAAAAAARADGGGSSVPARRHTASAAGNGRWEAIRVAEPPLSLGHFRLLRRLGYGDIGSVYLVELRGGRGALFAMKVMDKGSLAGRNKLPRAHTEREILGLLDHPFLPTLYSHFETDKFCCLLMEYCCGGNLHALRQKQPNKRFTEDAARFYASEVLLALEYLHMLGVVYRDLKPENVLVREEGHIMLSDFDLSLRCSVSPALVRSPSGRVSGGGGLAHGCMLPRILQVKKKKKGDKANKANKLDNETVTSKKPSSLEFTAEPTSARSMSFVGTHEYLAPEIIRGEGHGSAVDWWTFGIFLYELLHGATPFKGSGNRATLFNVVAQPLRFPDAPVVSAAARDLVRGLLAKEPHNRLASRRGAAEVKQHPFFEGVNWALVRSAQPPYIPDAAVDHCSHFACDGAAQGATPKSSARKTGSRRTDSSHVDIEYF

SEQ ID NO: 12050 - protein, 225 aa, Zea mays
  VARIANT 156..225: note = Derived polymorphism lacks residues 156 to 225
  VARIANT 144..225: note = Derived polymorphism lacks residues 144 to 225
  VARIANT 119: note = Ancestral polymorphism is G, Derived polymorphism is R
  VARIANT 3..225: note = Derived polymorphism lacks residues 3 to 225
MDWPQVTTYKALVSAQAHREEIIQNLGGMIRELLISFNKRAGKKPKRIIFYRDGISEGQFNHVLLLEMDTKRHHTRLFPGVHGRRDVTDRSGNILPGTVVDTEICHPREFDFYLCSHAGIQGTSRPIHYHVLYDENRFSADGLQILTNSLCYTYARCTRAVSVVPPAYYAHLAAFRGRYYNEQGSPAPDGTSVVGGDAAAAGDDPPACRRLPQIKENVKEVMFFC

SEQ ID NO: 12051 - protein, 288 aa, Zea mays
  VARIANT 67: note = Ancestral polymorphism is Q, Derived polymorphism is R
  VARIANT 71: note = Ancestral polymorphism is T, Derived polymorphism is K
  VARIANT 140: note = Ancestral polymorphism is T, Derived polymorphism is I
  VARIANT 141: note = Ancestral polymorphism is V, Derived polymorphism is F
  VARIANT 175: note = Ancestral polymorphism is S, Derived polymorphism is W
  VARIANT 213..288: note = Derived polymorphism lacks residues 213 to 288
  VARIANT 245: note = Ancestral polymorphism is S, Derived polymorphism is L
  VARIANT 265..288: note = Derived polymorphism lacks residues 265 to 288
MDCASMMKEVQTPHFHTLFHNASISVLKLYFFSVKLGNYHSSVAAVVNNDTSAQEDEQHTIRSILDQGKTTTTIGKVNNDNLSRLLTEYLGMDNMLALVCKTYDGVKGLEKYDKDDIIDKTSGIHGLGRSVGKFVDGRFIVFCLENLRPFSSDVIIDDPQRKLILHRPRLPGGESPPGFLDFVVNMIHLDRAHLRFLIASGHGLRETLFSHLQVYKTRTNIQSSLPLIKDGVVSLDGGLLRPNGSFCLGHSKNLEVKFAVTTDVSSLLENVVEMEEQVKRKNWEKEMV

SEQ ID NO: 12052 - protein, 101 aa, Zea mays
  VARIANT 40: note = Ancestral polymorphism is G, Derived polymorphism is E
  VARIANT 43: note = Ancestral polymorphism is D, Derived polymorphism is Y
  VARIANT 47: note = Ancestral polymorphism is L, Derived polymorphism is P
  VARIANT 55: note = Ancestral polymorphism is G, Derived polymorphism is C
  VARIANT 58: note = Ancestral polymorphism is G, Derived polymorphism is C
  VARIANT 60: note = Ancestral polymorphism is D, Derived polymorphism is H
  VARIANT 69: note = Ancestral polymorphism is R, Derived polymorphism is T
  VARIANT 74..101: note = Derived polymorphism lacks residues 74 to 101
  VARIANT 79: note = Ancestral polymorphism is S, Derived polymorphism is R
  VARIANT 89: note = Ancestral polymorphism is T, Derived polymorphism is I
MQGRRRSPSRDSTTTKQEDYVPDTLHTEQMTEQAGLNCSGHSDILGLGVVCNKKGGFGVDDFVVEFLGRFTLLGDGMKSKMVLNIYKTTVKIKLLSFTTLC

SEQ ID NO: 12053 - protein, 294 aa, Zea mays
  VARIANT 203: note = Ancestral polymorphism is P, Derived polymorphism is H
MGSSSNTNTSGGASDKEEKKKEDKIKGKDSSGPSFKENERVLAYHGPLLYEAKFNDNGTLYILSHFSRFKGSKTMKMNGATLSIISVGIRTDAKADKDDTKSLISVKGKKRKSQLGTEIQDKEKRSSHSLLVLQFPLPLKKQLVDDWEFVTQMGKLVKLPRSPTVDDILKKYLEHRAKKDGKINDSYAEILKGLRCYFDKALPAMLLYKKERDQYAEEVKGDVSPSTVYGAEHLLRLFVKLPELLASVNMEEDALNKLQLKLLDVLKFLQKNQITFFTSAYDGSCKGADEDKTK

SEQ ID NO: 12054 - protein, 117 aa, Zea mays
  VARIANT 22: note = Ancestral polymorphism is M, Derived polymorphism is T
  VARIANT 48: note = Ancestral polymorphism is S, Derived polymorphism is Y
  VARIANT 75..117: note = Derived polymorphism lacks residues 75 to 117
  VARIANT 81: note = Ancestral polymorphism is A, Derived polymorphism is T
MSKGKEKIERTIVWDEDQSKFMLGWFTDFIKEQHAGFKIKKQHHFKCSEALNRQFNMGVTATQVERHYRHYKENWKFVAAALSKSGNTFDTTRSMVLISESEKANLKVLALFMLLAT

SEQ ID NO: 12055 - protein, 84 aa, Zea mays
  VARIANT 7: note = Ancestral polymorphism is R, Derived polymorphism is P
MALLSRPMAAAPFFVVVLLVLVAAERTMGRVVVEETLCLSQSHAFKGVCLSNTNCDNVCKTEKFTGGECKMDGVMRKCYCKKVC

SEQ ID NO: 12056 - protein, 133 aa, Zea mays
  VARIANT 4: note = Ancestral polymorphism is A, Derived polymorphism is V
  VARIANT 13: note = Ancestral polymorphism is P, Derived polymorphism is L
  VARIANT 19: note = Ancestral polymorphism is S, Derived polymorphism is L
  VARIANT 29: note = Ancestral polymorphism is E, Derived polymorphism is K
  VARIANT 33: note = Ancestral polymorphism is E, Derived polymorphism is D
  VARIANT 34: note = Ancestral polymorphism is D, Derived polymorphism is G
  VARIANT 62: note = Ancestral polymorphism is R, Derived polymorphism is M
  VARIANT 65..133: note = Derived polymorphism lacks residues 65 to 133
MIYAISGEVPDEPVVSKMSGLLFERRLIERYIEDHSKCPITKEELTMDDIVPIKTNKVVKPRPLQATSIPGLLGIFQNEWDVLMLSNFALERQLHTARQELSHALYQARGLKKHLKRLNKPKHWMLDKLGGAF

SEQ ID NO: 12057 - protein, 122 aa, Zea mays
  VARIANT 2: note = Ancestral polymorphism is G, Derived polymorphism is E
  VARIANT 15: note = Ancestral polymorphism is T, Derived polymorphism is M
  VARIANT 56: note = Ancestral polymorphism is D, Derived polymorphism is A
  VARIANT 80: note = Ancestral polymorphism is R, Derived polymorphism is W
MGRKWNELSSAPWRMGEAAEDEDATRMSREGKVSITSNPEEMPTMSVPRSRRPDLDLTIDDFEEDEIDPELRYSFQRNNRFLKRVFSVDALVKPLPPVMAYSVSRNINFFFRIFTQFWGKFW

SEQ ID NO: 12058 - protein, 104 aa, Zea mays
  VARIANT 1: note = Ancestral polymorphism is V, Derived polymorphism is M
  VARIANT 6..104: note = Derived polymorphism lacks residues 6 to 104
  VARIANT 22: note = Ancestral polymorphism is R, Derived polymorphism is Q
  VARIANT 31: note = Ancestral polymorphism is P, Derived polymorphism is H
  VARIANT 42: note = Ancestral polymorphism is K, Derived polymorphism is N
  VARIANT 46: note = Ancestral polymorphism is R, Derived polymorphism is W
  VARIANT 49: note = Ancestral polymorphism is I, Derived polymorphism is T
  VARIANT 87: note = Ancestral polymorphism is Q, Derived polymorphism is H
  VARIANT 88..104: note = Derived polymorphism lacks residues 88 to 104
  VARIANT 98: note = Ancestral polymorphism is S, Derived polymorphism is L
MLPLLQDFYLDLAEDNRKITPRDYLELALRPVQGGGRDISAKNVIRDSIRALFPDRECFTLVQPLNNEKDLQRLDQLPVSISSFELQLLFVALYLKFSANIICC

SEQ ID NO: 12059 - protein, 89 aa, Zea mays
  VARIANT 6..89: note = Derived polymorphism lacks residues 6 to 89
  VARIANT 8: note = Ancestral polymorphism is A, Derived polymorphism is T
  VARIANT 12: note = Ancestral polymorphism is S, Derived polymorphism is L
  VARIANT 14: note = Ancestral polymorphism is A, Derived polymorphism is V
  VARIANT 21: note = Ancestral polymorphism is R, Derived polymorphism is M
  VARIANT 34: note = Ancestral polymorphism is A, Derived polymorphism is G
  VARIANT 37: note = Ancestral polymorphism is P, Derived polymorphism is L
  VARIANT 42: note = Ancestral polymorphism is R, Derived polymorphism is S
  VARIANT 45: note = Ancestral polymorphism is T, Derived polymorphism is A
  VARIANT 57: note = Ancestral polymorphism is D, Derived polymorphism is N
  VARIANT 68: note = Ancestral polymorphism is A, Derived polymorphism is V
  VARIANT 69: note = Ancestral polymorphism is E, Derived polymorphism is K
  VARIANT 72: note = Ancestral polymorphism is A, Derived polymorphism is T
  VARIANT 78: note = Ancestral polymorphism is N, Derived polymorphism is H
MESKVRAACNSSNAKLDDIVRLLDDLLTEYESTAYGPGKWKRLATFLQQCLAGPVLDLFRRQLEHIDAERNALRLKCNSRDVELSEKIF

SEQ ID NO: 12060 - protein, 145 aa, Zea mays
  VARIANT 44..145: note = Derived polymorphism lacks residues 44 to 145
  VARIANT 60..145: note = Derived polymorphism lacks residues 60 to 145
  VARIANT 65: note = Ancestral polymorphism is A, Derived polymorphism is S
  VARIANT 80: note = Ancestral polymorphism is R, Derived polymorphism is W
  VARIANT 85..145: note = Derived polymorphism lacks residues 85 to 145
  VARIANT 101: note = Ancestral polymorphism is G, Derived polymorphism is C
  VARIANT 107: note = Ancestral polymorphism is L, Derived polymorphism is H
  VARIANT 121: note = Ancestral polymorphism is E, Derived polymorphism is V
  VARIANT 130: note = Ancestral polymorphism is S, Derived polymorphism is T
MQTEIDIEATPNNDVINDTINDHTETENNVEIEDIIIDADDSFQPDIFDPRYCDSLDSKQIDILSQRGPRRDLSVQKDFWEALLQVADADNDAKTNSEAKGLANNEHGEYEFIVAIVIWYEVLYDVNIVSKHLQAKDMLIDDVID

SEQ ID NO: 12061 - protein, 417 aa, Zea mays
  VARIANT 181: note = Ancestral polymorphism is Y, Derived polymorphism is C
  VARIANT 185: note = Ancestral polymorphism is E, Derived polymorphism is K
MGMEIERPPQPPPVAAAMAAAAAISTVLGDDDLLREILVRLGLPTSLLRAALVCRRWLRHASDPAFLRRFRDLNPPRLLGVYLSTSSGPAPRLRFLPIRPVPELAAAARRAGSFFNAFKGSSAAVYDSRGGRLLVTTFDDRHDSTHQVCRPLSPGGDTTVVPPPPPPPPIQLNNDEECLIYHYGEFLRDDGDGRSYFCVVMGFSELQTTVYLYELHNINWVVKASAAVLLALLPPKPRVMLFDSANFYMLSATNRILVCDFPSSSISVMELPNGVENKPGGCIMLSRGDSSGIFLIYVKEFQLHIFHHRMGINYPSNWSLVDSVSLRQVCANLDMARWPSVNGPSAGVKLCAVGDNAEFVLLEIFGTIVFLDITSRQAEKVYELTPEDKELVSVRPLMLIWPPVFPQLKDAYYDKKE

SEQ ID NO: 12062 - protein, 341 aa, Zea mays
  VARIANT 233: note = Ancestral polymorphism is H, Derived polymorphism is R
MELDSIECMSYSDSMGDDDTDAVTSSQLPRPFLKSSSTAGTAAVNVVVVSDRVGAAGPVAGAGSLVISPATGVHELLECPVCTNSMYPPIHQCQNGHTLCSTCKTRVHNRCPTCRQELGDIRCLALEKVAESLELPCKYYSLGCSEVFPYYSKLKHESQCNFRPYNCPYAGSECSVVGDISFLVAHLRDDHKVDMHSGCTFNHRYVKSNPREVENATWMLTVFHCFGQYFCLHFEAFQLGMAPVYMAFLRFMGDENDARNYSYSLEVGANGRKMIWEGTPRSIRDSHRKVRDSHDGLIIQRNMALFFSGGERKELKLRVTGRIWKEQQNPDSGACIPNLFS

SEQ ID NO: 12063 - protein, 96 aa, Zea mays
  VARIANT 3: note = Ancestral polymorphism is T, Derived polymorphism is M
  VARIANT 29: note = Ancestral polymorphism is E, Derived polymorphism is K
  VARIANT 82: note = Ancestral polymorphism is A, Derived polymorphism is T
  VARIANT 88: note = Ancestral polymorphism is G, Derived polymorphism is E
METTIPFRERLKILGRVANLEDLPLSGAERKLMHAYNEKPVLSRPQHLFYLGDNYFEIDIDKHRFSYISRKGFETFLDRLKACVLDIGLTIHVSQS

SEQ ID NO: 12064 - protein, 169 aa, Zea mays
  VARIANT 29..169: note = Derived polymorphism lacks residues 29 to 169
  VARIANT 113: note = Ancestral polymorphism is S, Derived polymorphism is L
MHSTDCFTREKIRGFACENADSAIGIGLGYRLIDDHVEKIKAFPMETTIPFRERLKILGRVANLEDLPLSAAERKLMHAYNEKPVLSRPQHLFYLGDNYFEIDIDMHRFSYISRKGFETFLDRLKACVLDVGLTIQGNKAEELPEQILCCVRLNGIDYTKYQPLLTHAA

SEQ ID NO: 12065 - protein, 172 aa, Zea mays
  VARIANT 16: note = Ancestral polymorphism is A, Derived polymorphism is V
  VARIANT 19: note = Ancestral polymorphism is A, Derived polymorphism is V
  VARIANT 22: note = Ancestral polymorphism is A, Derived polymorphism is V
  VARIANT 24: note = Ancestral polymorphism is A, Derived polymorphism is V
  VARIANT 25: note = Ancestral polymorphism is A, Derived polymorphism is T
  VARIANT 26: note = Ancestral polymorphism is S, Derived polymorphism is A
  VARIANT 29: note = Ancestral polymorphism is G, Derived polymorphism is S
  VARIANT 35: note = Ancestral polymorphism is L, Derived polymorphism is V
  VARIANT 41: note = Ancestral polymorphism is P, Derived polymorphism is L
  VARIANT 44: note = Ancestral polymorphism is L, Derived polymorphism is H
  VARIANT 48: note = Ancestral polymorphism is S, Derived polymorphism is F
  VARIANT 52: note = Ancestral polymorphism is Y, Derived polymorphism is C
  VARIANT 59: note = Ancestral polymorphism is G, Derived polymorphism is S
  VARIANT 64: note = Ancestral polymorphism is H, Derived polymorphism is Y
  VARIANT 67: note = Ancestral polymorphism is G, Derived polymorphism is D
  VARIANT 103: note = Ancestral polymorphism is K, Derived polymorphism is I
  VARIANT 136: note = Ancestral polymorphism is S, Derived polymorphism is L
  VARIANT 145: note = Ancestral polymorphism is G, Derived polymorphism is S
MSPLPRIVLLAVAAAAAAAVTASATSLSGAANDLLPKYGLPKGLIPDSVASYSFDEATGAFEIHLAGTCYVHFGSHLVYYERTITGKLSKGAISDLSGVQAKKLFLWVYVTGMVAHPDQGTIEFQAGFISESLSASMFDEVPTCGSSVGAQLRGAAGVIGELGLLPVAQLGV

SEQ ID NO: 12066 - protein, 383 aa, Zea mays
  VARIANT 299: note = Ancestral polymorphism is Y, Derived polymorphism is F
MASAAATATMGTGKVVCVTGASGYIASWIVRLLLDRGYTVRATVRDTADPKKTLHLTALDGAKDRLHLFKASLLEEGSFDAAVHGCDTVFHTASPFYHNVKDAKVCLMKTSWKEEFPSAARFIIHLQFLSASSGILPMSPPDTQIFVLSFSGNEQAELLDPAVKGTLNVLGSCKKASIKKVVVTSSMAAVAYNRRPRTPEVTVDETWFSDPQICETNQQWYILSKTLAEEAAWKFSRDNGLEIVTINPAMVIGPLLQPTLNTSAEAILKLINGSSSTYPNFCFGWVNVKDVALAHILAYEVPSSNGRYCMVERVVHYSELVNIIRNMYPTLPLPDKCADDKPFVPPYQVSKEKIKSIGIELIPLETSVKETIESLKEKGFASF

SEQ ID NO: 12067 - protein, 307 aa, Zea mays
  VARIANT 188: note = Ancestral polymorphism is G, Derived polymorphism is D
  VARIANT 205: note = Ancestral polymorphism is A, Derived polymorphism is T
MAEWRNESEVRWNKVMNQFDLFVSDLVAAQFLGRATTSAYGEASYDRNTYCFNEEPVFDKGPIFYEEPVIDLELSSFNNVAPFNCSTYCLSQVIDVMTSKIASFDEGPLFDRYVIDEWPMLDGELDCSTEPDEDRIPLKAARAMHPGAGLEENVQGLEVRLDELTALSQLNSDEHVQLQGLLKVAIDDPCYDSTQPLTLRLSSHAKWSAWQKLGSMHPEIALEKYINLLSQVIPRWLRSEIMDTKKYETKCYSVGFISRAATSDQQNYWESEDINSKRKDGRNMLLFWSTENVDRALEPYLMSNHNP

SEQ ID NO: 12068 - protein, 231 aa, Zea mays
  VARIANT 190..231: note = Derived polymorphism lacks residues 190 to 231
  VARIANT 123: note = Ancestral polymorphism is G, Derived polymorphism is R
  VARIANT 101..231: note = Derived polymorphism lacks residues 101 to 231
  VARIANT 62..231: note = Derived polymorphism lacks residues 62 to 231
  VARIANT 60: note = Ancestral polymorphism is I, Derived polymorphism is N
  VARIANT 30: note = Ancestral polymorphism is R, Derived polymorphism is W
  VARIANT 21..231: note = Derived polymorphism lacks residues 21 to 231
  VARIANT 15: note = Ancestral polymorphism is E, Derived polymorphism is K
MTKTMQVLNEASWQETFKALWISTLRLVQRAREPLEGPIPHLDARLCMLLALIPLSIAANLQEESDMFGVEGNKILPQRQGLISSLQNLIQYSGLLVPPSSVVNAANVAASKAAIFKANYKAGVGNTSMMDQTDSSMKAEILNIIRNEETLNGEIESNQQSKLMLANPVENLTIIVDADDDLLKVGTGICSSTPKIVEPQQHNCTSVTEDHLIIPKEADNVCGQHYPITEQ

SEQ ID NO: 12069 - protein, 796 aa, Zea mays
  VARIANT 90: note = Ancestral polymorphism is D, Derived polymorphism is G
  VARIANT 204: note = Ancestral polymorphism is Y, Derived polymorphism is H
  VARIANT 271: note = Ancestral polymorphism is P, Derived polymorphism is L
MRSVDAAGAESSDHHNLKKPRLEPRTKMPLADAVAAGDSGGGVDAAAAGADFFGMTVEEIVQHPLPGYGAPAVLSFSPDDRRVAYLYSPDGTLHRKVFTFDTARRCQELLFGPPDGGGLEEGNLSAEERLRRERARERGLGVTRYEWRSRHSGESSRAGIVVPLPSGVYFQDLSGSEPVLKLRSSPTSPIIDPFLSPNGSMIAYVRDDELHTMGFSNGETRQLTYGARENRKVHGLAEYIAQEEMERKVGFWWSPDSKHLAFTEVDSTEIPLYRIMHQGKSSVGPDAQEDHAYPFAGAANVKVRLGVVHSHGGEVTWMDLLCGDPNGPHSDEEYLARVNWMHNSALAVQVLNRSHTKLKLLKFDISTGEREVLLEEQHDVWITLHDCFTPLDKGVNNKHPGGFIWASEKTGFRHLYVHGNDGACLGPLTQGDWMVEHIAGINESNGLIYFTGTLDGPLETNLYHTNLFPDWSLPLQTPKRLTRGTGRHSVILDHQLLKFIDVYDTAKSPPVILLCSLLDGSVIIPLFEQPLTIPPLKKFQQLSPEIVEITAKDGTNLYGALYLPDERKYGPPPYKTLVNVYGGPSVQLVSDSWMCTVDMRAQYLRSKGILVWKMDNRGSARRGLHFEGQLKYNIGRVDAEDQLEGAEWLIKKGLAKPGHIGIYGWSYGGFLSAMCLARFPDTFCCAVSGAPVTAWDGYDTFYTEKYLGLPAEHPDAYEYGSIMYHAKNLKGKLLLIHGMIDENVHFRHTARLINSLMAEGKPYEILLFPDERHMPRRLGDRIYMEERIFGFFERSL

SEQ ID NO: 12070 - protein, 401 aa, Zea mays
  VARIANT 227: note = Ancestral polymorphism is N, Derived polymorphism is I
MAKPLNGSGRSMPRSNEGMRLIFSAVVGVMLGYLFGISFPTVNITKLHFPSSIISYIEDRNSGITTQTLLNHAWASANNHKKNSSESNTDEIPEIYVPTNPKGAERLPPGIVVSETDLYPRRLWGDPSEDLTSEPRYLVTFTVGIGQKANIDAAVRKFSDKFTIMLFHYDGRTTEWDEFEWSKRAIHVSARKQTKWWYAKRFLHPDVVARYDYIFIWDEDLGVEHFNAEKYIELVRKHGLEISQPGLQPDRGLTWQMTKRRGDQEVHKVTEERPGWCTDPHLPPCAAFVEIMATVFSRNAWRCVWHMIQNDLVHGWGLDFALRKCVEPAHEKIGVVDAQWIVHQSVPSLGNQGKSDNGRPPWEGVRARCRKEWGIFQTRLADAEKAYYLERGITPPNSTSV

SEQ ID NO: 12071 - protein, 70 aa, Zea mays
  VARIANT 45: note = Ancestral polymorphism is A, Derived polymorphism is V
MSALFNFHSFVTVVLLLICTCTYLKMHFPSLLIRRTGFRGFFWKAARIGERLSPWVAIGCSVMGISILFW

SEQ ID NO: 12072 - protein, 618 aa, Zea mays
  VARIANT 339: note = Ancestral polymorphism is R, Derived polymorphism is C
  VARIANT 248: note = Ancestral polymorphism is L, Derived polymorphism is Q
MEARPEWDLRKMRELRFVVLLLVISLPCFSASDRQGDALYDMKQKLNVTGGQLSDWNQNQVNPCTWNSVICDNNNNVIQVTLAARGFTGVLSPRIGELQNLSVLSLAGNRITGTIPEEFGNLSSLTSLDLEDNLLVGEVPASLGNLSKLQLLILSQNNFNGSIPGSIANISSLTDIRLAYNNLSGQIPGLLFQVARYNFSGNHLNCGPNFPHYCASNTSYPSGSHNSKIGLILGTVGGILGLIIVGALFLICNARRKSHLREVFVDVAGEDDRRIAFGQLKRFAWRELQIATDNFNERNVLGQGGFGKVYKGVLPDGTKIAVKRLTDYESPGGEAAFLREVELISVAVHRNLLRLIGFCTTQTERLLVYPFMQNLSVAYRLRDFKPGEAILDWPSRKRVAIGTARGLEYLHEHCNPKIIHRDVKAANVLLDEDFEPVVGDFGLAKLVDVQKTSVTTQVRGTMGHIAPEYLSTGKSSERTDVFGYGIMLLELVTGQRAIDFSRLEDEDDVLLLDHVKKLQREGELDSIVDSNLNQNYDGEDIEMIIQIALLCTQASPEDRPSMSEVVRMLEGEGLAERWEEWQHVEVTRRQEYERMQRRFDWGEDSFYNQEAIELSAGR

SEQ ID NO: 12073 - protein, 101 aa, Zea mays
  VARIANT 21: note = Ancestral polymorphism is M, Derived polymorphism is T
MAGRLHACLLICTVLSSAAIMASCTRPAAGTVGGAAPVAATTPATSSAGSGVRPPAPPPPATLATTAGTNKAPPAVQQQQSPLDSKRKVPNGPDPIHNRLN

SEQ ID NO: 12074 - protein, 1101 aa, Zea mays
  VARIANT 378..1101: note = Derived polymorphism lacks residues 378 to 1101
  VARIANT 109..1101: note = Derived polymorphism lacks residues 109 to 1101
MPNNWHQISNPSRSAPLNVSTLGFRYPHSHRASPRTDPWIGAALARSVHAELLTPMSRSFFPTCSSQKAEIEEMGKELDDLRAKVEALTAQLRANSDLADGLKRAGADQAAWLRDARAEAERNAVEAAASSEEAAATGDRCGVLESRLAKNGQALRHLYAAHEALKGTLREKIEGLEGDKRGLLTALEDAEGRRVEHEAALRACDNEIARLRGLLSEKDWRGSEAEKRVLTPREVVMRDDMLVKPEEEKATVEGKLNWKAEQFRHLEEALNKLHDGFRAVKKEWGLDRSTSVDRIGTLEDDLDSKTRVTEDFPSRLDMCSQALAHEEGCRKRVEAELSELRLMYGYVVSEYEGAKSMMESLSSKTDGGIAYLRRALAEKVTLLKEIGYSKAHLEQENEDLRSSLKEYQEAQIGGTYAVVSLKSLWEKFRALEQTHRSCTKKLRDKEEEWRIQMTKLVNDLVECISDLESKDILIGQLQNELRGSYRSLELQTVESWEALIFLTVVLGKFHESCSFVDTAKLNMQHHCQEIEKEIGFAKRQLEEQSCIIVQSQAEQKQQSKVIAKLHAKIEELEHMEQKQKKMQMQLDAYKEMLDNTSRDANRRKVEASKKENTLQEKLREALSALDERNCALADRKSELSQLEINLHHQKQAIEHLKKLKDDMQTEAESYMYDNRILKRDLDAALVANVKAEELLRQEKVKLICALDEAKFTLSERNNELTEFKINLEKVKVDMETELKICIDENCVLKRDLDVVLIAKMEADECHTKEKQELCGIINDKGMMVDKLQQRIVVLEEENMVQKLDLGSLIKMEYEKSIHEVKNRYYEIVEVSDKKLLELEERIRFFEQKFACREQELMEMFNQEKADRYTLIAEKEIAISDIQQTVESVQVDIEHLLEAAATKVAEVELEVNQLYGFAETLNSLNVIQGHDTVFKDMLIAECERELDSLQVSLLQEKHQSRNLKNLMEQLKARTASEMSEKAKQHLEVANKLKLLEERNETLEEHVRELKSKTADMSVVVLQERNQLVNELTGLTDTIGEVIYGGESMMSNLRRISQKINEEEPCNDRLTSEKTNDRSSAPVIRKKPRHDPVRRSPLKEQNY

SEQ ID NO: 12075 - protein, 181 aa, Zea mays
  VARIANT 84: note = Ancestral polymorphism is E, Derived polymorphism is K
MLKFLSKVVVEYCPLDPRKAAAVELLAQCNGRKAKDSNPACSVELRRLPSPAPSTDLKSQPTLPPPRVLVTYFTGAEEAIVFAEGATAQGIRDQIVARGRLIDTEKMFRDGGEKWPVVIPEEELGMSFPGIKDSRALEGGLWWRHGVEAGATHWRVEARVEASAAATRWSRGPPEQRAAME

SEQ ID NO: 12076 - protein, 358 aa, Zea mays
  VARIANT 293: note = Ancestral polymorphism is Q, Derived polymorphism is L
  VARIANT 177: note = Ancestral polymorphism is G, Derived polymorphism is V
  VARIANT 101: note = Ancestral polymorphism is M, Derived polymorphism is T
  VARIANT 24: note = Ancestral polymorphism is P, Derived polymorphism is R
MAAPAADEAWCRKTVPRVMELVCRRLPQRDACALLAVSPWCYRALVANSRLWEVLDLREMKNAGNRLISALSLARYRHLKVLNLEFAQDIEDRYFVHLKEMASFAPFSHFSGISLENLEFLNLNACQKISDKGIEAVTSLCPNLQRLAIYWIVGLTDSSIGHITKNCKHLVHLNLSGCKNIKDKGMQLIANNYQGLKRLNITRCVKLTDDGLNQVLLKCSSLESLNLYALSSFTDSVYREIGSLSNLTFLDLCGAQNLTDDGLACISRCGRLTYLNLSWCVRVTDTGIVAIALGCRALELLSLFGIVGVTDACLEALSKSCSSSLTTLDVNGCIGIKRRSRDDLLKLFPSLSCFKVHS

SEQ ID NO: 12077 - protein, 699 aa, Zea mays
  VARIANT 458: note = Ancestral polymorphism is S, Derived polymorphism is F
  VARIANT 435: note = Ancestral polymorphism is F, Derived polymorphism is L
  VARIANT 374..699: note = Derived polymorphism lacks residues 374 to 699
  VARIANT 345..699: note = Derived polymorphism lacks residues 345 to 699
  VARIANT 323..699: note = Derived polymorphism lacks residues 323 to 699
  VARIANT 228..699: note = Derived polymorphism lacks residues 228 to 699
MIFVLAARSICGGAGASAAEPWPVDGRCRGGSAGDGEAKLVALRTTHIPVRHRHSDNKVWIDLVSHRRAEQCQCTGRHHSPLVPLPPKAGTSPPFPSSNLFRSAPSRLAMAIRAGRSALHLHALAFLILAASPCLQVQALVDHRKQISDWGRQPNFELQNMSSSQRDGSHLLGRSKEITHRKLRGRIGVRNKMEVVQQDDEALVKLENTGIERSKAVDSAVLGKYSIWRRENENEKADSRVRLMRDQMIMARIYSVLAKSRGKLDLYQELLARLKESQRSLGEATADAELPKSASDRIKAMGQVLSKARDLLYDCKEITQRLRAMLQSADEQVRSLKKQSTFLSQLAAKTIPNGIHCLSMRLTIDYYLLSPEKRKFPNSENLENPDLYHYALFSDNVLAASVVVNSTIMNAKEPEKHVFHLVTDKLNFGAMNMWFLLNPPGDATMHVENVDDFKWLNSSYCPVLKQLESAAMKEYYFKADRPKTLSAGSSNLKYRNPKYLSMLNHLRFYLPQVYPKLNKILFLDDDIVVQRDLTGLWEVDLNGNVNGAVETCGESFHRFDKYLNFSNPNIAQNFDPNACGWAYGMNMFDLEEWKKKDITGIYHKWQNMNENRLLWKLGTLPPGLLTFYKLTHPLDKSWHVLGLGYNPTVERSEIDNAAVIHYNGNMKPWLEIAMTKYRPYWTKYINYEHPYIHGCKFSQ

SEQ ID NO: 12078 - protein, 390 aa, Zea mays
  VARIANT 165..390: note = Derived polymorphism lacks residues 165 to 390
MAGKGAKATAAKSADKDKGKKAGGPVSRSSRAAPQASLLPPPLGSTRCRLIRGCFRFGVDADMEKPMENSTPKKDVYQLFAEKVRDNKQLESRWAIMQETRVEYFRGKDFNAFIKNYPEVREILGPDKDLEVEDIVNTLLTKNLVIRCDRVMKTVRPGKKKLSSWPAHLEIHNEQVFTENDGFYAWMFLKRRTLWQTVLSFVWPLFALAVCLFPVYPYQCKIVVLYSLRAAIFGILWVLLGKRVWFFPNINAEETTFRELVRFWPEKDEGERPKWTSRLFYALVALLVILLLRHHAPDEAARARYQKKVSNIIDDVLEWSPKLAISGMIEKHTGANITEESNYTSRAASSHVPPSTKAKASEAGSDTDIEANLDEAQDSEYADDTRSNEA

SEQ ID NO: 12079 - protein, 301 aa, Zea mays
  VARIANT 25: note = Ancestral polymorphism is F, Derived polymorphism is S
  VARIANT 6: note = Ancestral polymorphism is G, Derived polymorphism is R
MMITGGQRNPARLQVSSSFLLALVFASSVLVGIVAGGSFYEECDATWEPQNCWAYDDGNRLSLALVSSSSGSMIRSKRQFVYGTVSTMIQLVPGDSAGTVTTYYTSSLGDNHDEIDFEFLGNVSGQPYTIHTNVYAAGVGNKEMQFKPWFDPTADYHNYTISWTPCMIAWYVDGVPIRVFRNYAASHGVAFPTSQPMYAYSSIWAAEDWATQGGRVKADWSKAPFVANYHGIDLGVCECYGGGACVSSCAAAFAASHCSLSDAQVGEMRWVQGSYRIYDYCVDPKRLVNGQRPVECDLPQY

SEQ ID NO: 12080 - protein, 181 aa, Zea mays
  VARIANT 93: note = Ancestral polymorphism is G, Derived polymorphism is E
  VARIANT 91: note = Ancestral polymorphism is P, Derived polymorphism is S
  VARIANT 90: note = Ancestral polymorphism is T, Derived polymorphism is M
  VARIANT 88: note = Ancestral polymorphism is T, Derived polymorphism is M
  VARIANT 81: note = Ancestral polymorphism is G, Derived polymorphism is R
  VARIANT 80: note = Ancestral polymorphism is A, Derived polymorphism is P
  VARIANT 67: note = Ancestral polymorphism is G, Derived polymorphism is D
  VARIANT 64: note = Ancestral polymorphism is G, Derived polymorphism is R
  VARIANT 48: note = Ancestral polymorphism is R, Derived polymorphism is L
  VARIANT 41: note = Ancestral polymorphism is S, Derived polymorphism is L
MEGPRVRSPYATSSSSSPPHCAATSSSDARMEGPRPCTPKSQNVCTIRPLVTVMCFHQLSEGMGLGGCILQAKYVARMKAGLVFFFSTTTPFGIALELALTKMYRENSPTTLIVVGLFVYPIVKKGLPKKIREVTDCYFLPRRSWPSALTTYGVVCAASFGAGMLLEVWINKRSKVYSCIS

SEQ ID NO: 12081 - protein, 343 aa, Zea mays
  VARIANT 246: note = Ancestral polymorphism is T, Derived polymorphism is I
MRAPSSEQCQIWSGTPRRAVSNPRTRHGSACRLPRAPEVRFGSAVPLPFFSYAIDCELRPSPSPPTRPVPRRRTTETAPPPRPLALTTAMAAAALRSSARRLLRLAPAASSALSAGSRPTAGAAPLTRPIAALSEPQTEGGWTGGSDIGAATEPVSVEGELGGNNPISWKLRRFYSSNEKHLPAISDPEIESAFKDLLAASWNELPDSLVAEAKKAASKATDDSAGQEALKNVFRAAEACEEFSGTLVTLRMALDDLCGLTGENVGPLPGYIEDAVKAAYNRYMTYLESFGPEENYLRKKVETELGTKMIHLKMRCSGIGSEWGKISLIGTSGISGSYVELRA

SEQ ID NO: 12082 - protein, 163 aa, Zea mays
  VARIANT 1: note = Ancestral polymorphism is M, Derived polymorphism is L
  VARIANT 14: note = Ancestral polymorphism is V, Derived polymorphism is A
  VARIANT 18: note = Ancestral polymorphism is L, Derived polymorphism is S
MLADPFPLSAYTMATMGLMKLKEEDNAEERDFAVCDVQIGGTSSVQMALERSVGYSGRVEAARATLDQVRVEDIDTDVVFLKELLFPLIEIDKRLLALAGWEEPFKSYVFLLCFLYMAYSTREEHSPMKIIDFGLSDFIRPDINRFAEKHQEHSKTFMLTPDK

SEQ ID NO: 12083 - protein, 153 aa, Zea mays
  VARIANT 12: note = Ancestral polymorphism is D, Derived polymorphism is E
  VARIANT 38: note = Ancestral polymorphism is K, Derived polymorphism is E
  VARIANT 42: note = Ancestral polymorphism is P, Derived polymorphism is L
  VARIANT 49: note = Ancestral polymorphism is V, Derived polymorphism is L
  VARIANT 52: note = Ancestral polymorphism is P, Derived polymorphism is L
  VARIANT 69: note = Ancestral polymorphism is G, Derived polymorphism is R
  VARIANT 104: note = Ancestral polymorphism is N, Derived polymorphism is Y
MSPVEFQPSVSEDLVLEKKSGNGQHDVRGTHHHRTSMKPEKPIDLLRKVDEPDWASLNLGALLCIECSGVHRNLGVHISKVRSLTLDVRVWEPSVINLFQSLGNMFVNSIWEEMLPDDNSSADGSDTSQYLSVSKPKHKDVFSAKEKFIHAKV

SEQ ID NO: 12084 - protein, 239 aa, Zea mays
  VARIANT 224: note = Ancestral polymorphism is P, Derived polymorphism is T
  VARIANT 207: note = Ancestral polymorphism is K, Derived polymorphism is I
  VARIANT 108: note = Ancestral polymorphism is D, Derived polymorphism is Y
  VARIANT 49: note = Ancestral polymorphism is E, Derived polymorphism is G
MLVVQLPPPEVAGEDESNSRGVFVEFMTKVAQFNELVESGERLLGRFREELEYFRRPQISKEADVMNQILKSNCTVRMRSYIETGCRVHCQNISNINQLSSCENGLKDHIKKVKTLLEELECLVENVYGITLTASLSALEVSDSQCLDSMLSTDRCSVEGVCTQQEDRSADRLDRDVSFATVMVMVRNALKADYTMQEKIVCALSLKTPSSELEGYCLMWNLRPYIDDDVMRLAWKMCP

SEQ ID NO: 12085 - protein, 243 aa, Zea mays
  VARIANT 105: note = Ancestral polymorphism is V, Derived polymorphism is A
  VARIANT 106: note = Ancestral polymorphism is W, Derived polymorphism is R
MPSHLALLSCLLVLLLSFDKFLFHYLKRRWFSGGSGATVPRPPAKSRRNMAAAKWSETAMLVIDMQKDFVDPAMRSPMLVAGGEAVVPAVAGAVAVARERGIFVVWVVREHDPSGRDVELFRRHHYSGGKGPTVKGLKGAELADGLVIKEGEYKLVKTRFSAFFATHLDSVLKTAGIKNLVIVGVQTPNCIRQTVFDAIALDYEKVTVLIDATAAARPEIHLSNIRDMKNIGVDTPTLEEWRR

SEQ ID NO: 12086 - protein, 604 aa, Zea mays
  VARIANT 71: note = Ancestral polymorphism is S, Derived polymorphism is L
  VARIANT 285: note = Ancestral polymorphism is D, Derived polymorphism is N
MAASALASRALRPPHGRHPPAPSPRPRPRSATAAAPRTRCRAVAADERPADPAFPERQNRGISGLRLLIASQLSTRAVERPEADVVVIGSGLGGLCCAGLLARYGQDVLVLESHDRPGGAAHSFDIKGFNFDSGPSLFSGFQSRGPQANPLAQVLDALGESVPCASYDSWMVYVPEGQFLSRIGPTEFLKDLEMFVGVDAVQEWKKLLDAVIPMSAAAMALPPLSIRGDLGIISTAVGRYTPSLLKSFIQMGPQGALGATKLLRPFKEIVDSLELKNPFVRNWIDLLCFLLAGVKSDGALSAEMVYMFAEWYKPGCLLEYPLGGTGAIIDALVSGIEKFGGRLALRSHVEKILIENGRAVGVKLQSGQVIRAKKAVVSNASMWDTLDLLPPDAVPKSYEDRVKATPQCESFMHLHLGFDAENAREDLGIHHIVVDDWNKGVDGEQNVVLISVPSVLSKDLAPPGKHILHAYTPGTEPFSLWEGLDRKSAEYRRLKEERSEVMWKAVELALGPKFSREKCDVKLVGTPLTHRRFLRRNRGTYGPAIKAGEATFPGQATPIPQLFCCGDSTFPGIGVPAVAASGAIVANTLVPVSQHSELLDAVGI

SEQ ID NO: 12087 - protein, 308 aa, Zea mays
  VARIANT 283..308: note = Derived polymorphism lacks residues 283 to 308
  VARIANT 152: note = Ancestral polymorphism is G, Derived polymorphism is S
  VARIANT 87..308: note = Derived polymorphism lacks residues 87 to 308
  VARIANT 7..308: note = Derived polymorphism lacks residues 7 to 308
MLSAYARGRRVGDAERLFAGMPDRSMVSWTAMVSGYMQNGRHEEAVRTFLDMWDGAGVRPNELAVCSVLPACAALGALALGRKVERYARGRGMLRNVYVANALVEMYAKCGSIRRGAKPDVITFVVVILACTHGSLVDEGKLLFNSMRGEFGLKPRIEHYGCMVDLLGRAGLLKEADSLTASMPMEPDAVIWAALLGACSFHGNLELAETAVEKLMHLEPHNTANLVILSNIYASCGKWDGVARVWKLLKEKDHKKSAGYSVIELDGRMHKFLVEDKSHPRSEKVYDALDSITLAMKLVSSENPKVES

SEQ ID NO: 12088 - protein, 426 aa, Zea mays
  VARIANT 301..426: note = Derived polymorphism lacks residues 301 to 426
  VARIANT 203..426: note = Derived polymorphism lacks residues 203 to 426
  VARIANT 111..426: note = Derived polymorphism lacks residues 111 to 426
  VARIANT 64..426: note = Derived polymorphism lacks residues 64 to 426
MSTFASRSESVLGGYRRDLEDLGSGLCLETVALWAAAARAASALHDTLEVGASVVSNRLESVGQVVDDLRATTAGLLSHANKALRSAEADGVDVRPSASLSTKKYTRFEAQVLALRADPATFTREPEDSEGFGKWSALFSIDEMKEQIETVLHESPGLESFVEGLVPSVNPVMPASVGASTQYCATFFCLSDQVSTVKSTILEVGNIELFELNEVLASQFVYYCSKLGWIIPKNPALPLSGTSDIVRQNLLGSVFSLANDLPEGGIIFLYEWGHEINVPSDQSQTRLSGYTSVPYTSFPAQAELTVVGCSKGLDAKGRWTRARVAQLTSNLSLRYTTVTFLASFEFGEENSNVFADLKDDNGSDSGINFDYNDPDMPNNIDVDLDVPTYPDEVSFCNGSIIHLHLWGYSPFASILYSCVATNILVA

SEQ ID NO: 12089 - protein, 147 aa, Zea mays
  VARIANT 19: note = Ancestral polymorphism is G, Derived polymorphism is C
  VARIANT 50: note = Ancestral polymorphism is H, Derived polymorphism is Q
  VARIANT 61: note = Ancestral polymorphism is Y, Derived polymorphism is C
  VARIANT 95..147: note = Derived polymorphism lacks residues 95 to 147
  VARIANT 96: note = Ancestral polymorphism is I, Derived polymorphism is F
  VARIANT 110..147: note = Derived polymorphism lacks residues 110 to 147
MPFGTSSAMAHRAVDAVMGLRTVRHEIVISEAAAAAPPAPVMNANACSIHSKAFQDCLNNYGSEISKCQFYLDMLNECRRGVVCLSFCSNWDYSWILFSLPCISLIRHRETFNPLHECTMASRVHLVESVVTFSLSCVVGTDFCLFW

SEQ ID NO: 12090 - protein, 301 aa, Zea mays
  VARIANT 230: note = Ancestral polymorphism is R, Derived polymorphism is H
  VARIANT 109: note = Ancestral polymorphism is I, Derived polymorphism is T
  VARIANT 104: note = Ancestral polymorphism is A, Derived polymorphism is T
  VARIANT 80: note = Ancestral polymorphism is A, Derived polymorphism is V
  VARIANT 78: note = Ancestral polymorphism is A, Derived polymorphism is T
  VARIANT 74: note = Ancestral polymorphism is L, Derived polymorphism is V
  VARIANT 72: note = Ancestral polymorphism is G, Derived polymorphism is A
  VARIANT 70: note = Ancestral polymorphism is V, Derived polymorphism is I
  VARIANT 69: note = Ancestral polymorphism is A, Derived polymorphism is V
  VARIANT 66: note = Ancestral polymorphism is V, Derived polymorphism is L
  VARIANT 65: note = Ancestral polymorphism is R, Derived polymorphism is W
  VARIANT 64: note = Ancestral polymorphism is W, Derived polymorphism is S
  VARIANT 55: note = Ancestral polymorphism is A, Derived polymorphism is V
  VARIANT 54: note = Ancestral polymorphism is R, Derived polymorphism is C
  VARIANT 48: note = Ancestral polymorphism is G, Derived polymorphism is S
  VARIANT 47: note = Ancestral polymorphism is G, Derived polymorphism is D
  VARIANT 42: note = Ancestral polymorphism is V, Derived polymorphism is G
  VARIANT 36: note = Ancestral polymorphism is G, Derived polymorphism is S
MGMGPLDNAASAALEAAAAAAAAPSRAGSYAVLQCGEDSEYVRQKYGGYFAVFRALLEEDGERWRVYSAVRGELPADAEAAGFDGFVISGSCADAHGDEPWILALVDLTRRVHAAGKRVLGVCFGHQILCRALGGRTGRSAKGWDIGVSCIHPTAAAARLFAPLKLPVHMPVIEFHQDEVWELPPGAEALARSDKTRVEMFRLGGRAMGVQGHPEYSKDVLMSIADRLLRHNHILDCQVEVAKTSFDVRQPDKELWSKDCQVEVAKTSFDVRQPDKELWSKVCRGFLKGRLQSSQQQGVAL

SEQ ID NO: 12091 - protein, 103 aa, Zea mays
  VARIANT 89: note = Ancestral polymorphism is G, Derived polymorphism is S
  VARIANT 65: note = Ancestral polymorphism is M, Derived polymorphism is K
  VARIANT 58: note = Ancestral polymorphism is C, Derived polymorphism is F
  VARIANT 49: note = Ancestral polymorphism is G, Derived polymorphism is S
MTKYGMKMMAGHPESSSAASKKIYSLSKELADSMLNESLCLVLGSEGNGLTAETLQAFELVNIPKEGTFESLNVSVAGGIFLFMLQPKSQIDKKNFNPKEYFV

SEQ ID NO: 12092 - protein, 1076 aa, Zea mays
  VARIANT 49..1076: note = Derived polymorphism lacks residues 49 to 1076
  VARIANT 254..1076: note = Derived polymorphism lacks residues 254 to 1076
  VARIANT 279..1076: note = Derived polymorphism lacks residues 279 to 1076
  VARIANT 285..1076: note = Derived polymorphism lacks residues 285 to 1076
MEGVPLALTCPRRSLLPIAGARMLIPAQKVGAIIGHKGERVRRLCEETRACVRIIGGHLCAAEQAVIIFGREQLDEPLPPAMDALLRVYQQTINNDSLDVGPDNVIVRQILAPSEQATSLIGEHGVMINSIMEASQTDICVLGNELPSDLIDTLLKWIPSNDEELRLRLSSRSTATPHASVAASASAPVSHTAPWLGKFIASEPFNVGGFDWAIYFYPDGKSGEDDLKRKDGLCPLTPEVSHQVFYCIILAGVQAVRRDNKQRFSLLEEDGELLIRANQGHTVIQVHCDAVKWGLDLDTSVSNVLVKMYGECGAMSDYWKVFNSMAEHDEVSWNTMMGVMASSQTPISEIVKVFNNMMRGGLIPNKVTFINLLAALSPLSVLEDNVVDNALISCYAKSGDMDSCEHLFTNMSDRRDAISWNSMISGYIYNGNLQEAMDCVWLMIHSGQIMDCCTFSIILNACASVAALERGMELHAFGIRSHLESDVVVESALVDMYSKCGRVDYASKLFNSMTQRNEFSWNSMIYGYARHGLGRKAIEIFEEMLRSRESPDHVTFVIVLSACIHAGLVERGLEYFEMMPDHECRPYWHSSLFLHRMHVYISQQTVTVPANSRTADRRKLLLLKDKCLTAQLPHCWSGGMAYSGQRHAGVGSSSRPANGFKGAANSVEFLGREMLGMRLRDAKPDTDDEREMWSSSDVTDSSSNEAGHVIATTVHGRNGLPKQSVTYIAEHVVGTGSFGVVYQAKCRETGEIVAIKKVLQDKRYKNRELQIMHMLDHPNIIGLKHYFFSTTERDELYLNLVLEFVPETVNRIARQYNRMNQRMPLIYVKLYTYQICRALAYIHNCIGICHRDIKPQNVLVNPHTHQLKICDFGSAKVLVRGEPNISYICSRYYRAPELIFGATEYTTAIDLWSTGCVMAELLLGQALFPGESGVDQLVEIIKVLGTPTREEIKCMNPNYTEFKFPQIKAHPWHKVFQRRLPPEAVDLVSRFLQYSPNLRCTALEACMHPFFDELRDPNTRLPNGRPLPPLFNFRSQAKTDQMFAILTELKGVPPEVIDRLVPEHSRRQSLFMALRT

SEQ ID NO: 12093 - protein, 213 aa, Zea mays
  VARIANT 39..213: note = Derived polymorphism lacks residues 39 to 213
MVLANGPFDREGLVADCHILPAIPEVPADVHALLLREGQLPPGGGTGGQPQHRRHQLFFASTMPQLGTCSLPGAAIYGTSTRRFGGLEFQQHKVNHISFGRKASVKATLKTVRCNATQTQSVQKKSSSATIQRDKKGNVQGPKLDDGSGGFPPFRFGKGGGGGGGGGGGSNYFGGFLLFSCVLLLDYLKEFEKYLLAQRHRAGDDGGNGLLQA

SEQ ID NO: 12094 - protein, 466 aa, Zea mays
  VARIANT 179..466: note = Derived polymorphism lacks residues 179 to 466
  VARIANT 97..466: note = Derived polymorphism lacks residues 97 to 466
  VARIANT 64..466: note = Derived polymorphism lacks residues 64 to 466
MDDNNVSGHEPIFNSSPTENANVDEQSDFIEDICDPRNWNNLDNKIFNFEKCKSSLAHDGFRDWKHINDRLKEHEANHIRRIKNNEVHYHYLSHKIQNELVYLLASDITKSIIKTVKEAKYFSVILDCTPDVDDTSGEGLFNSLIDSIKYFGLNIEDVRGQGYDNGSNMKGKNKVVQRRLLDINPRALYMPCACHSLNLTLCDMAKSCVKAISFFGIVQQIYVLFSSSTKRWDVLINHVESLSVKSWSNTRWESRIKSVKAIRFQAPKIRSALLQLSKDKDVEAKDRSDAKIYLKCLEPLSLYLSIEDTICFFENYRNEGFASSLITTKEIASELGLQPSFPVKRRATRKKHYDETSNEEENLEAQKAFEVNYFLVMVDIATSSLKSRFEELQSFKGSTSDQKLVAASASETSGKQSCLQQPVAAIISSSVPLSKQLHLKISFGRFVFEWHCISQSVVNSCHTRGG

SEQ ID NO: 12095 - protein, 736 aa, Zea mays
  VARIANT 320..736: note = Derived polymorphism lacks residues 320 to 736
  VARIANT 329..736: note = Derived polymorphism lacks residues 329 to 736
  VARIANT 607: note = Ancestral polymorphism is G, Derived polymorphism is V
MAYLSSLHHAPYPRLLLHHRYLFFSASSPPPVVTTRRLVPTLACHGRDLLDVMPYRDSRPSGTEGSRAGPGGAPRVTNSSTVRGNATAQEAHMPMWRERTPGTPRTWKKGDRVMLQEHAEGESQEKSWRRGLTRSLESKGPMVRKSWTRDGNGMRAKESGKVGNSRDEGTGRRNACKKMKKPPDGEYAGKLRVELDMCSKRGDVMGAITLYDSAVEEGIKLGQHHYNVLLYLCSSASLGFVQPAKSGNMGSGIASIGPAQKLDPSPSRSLGGSEGDNAYASESHVQDQGKNKADLIPGGLKAQTVSIPVEDELGDYARARGFEIFDKMCSEKERVQMSEAALTAKARMALSMGDSDMAFEIVKQMKGLGLKPKLRSYGPALTAFCNSGNVEKAFEVEAHMLESGITPEEAELETLLRASVVGRRGDKVYYLLHKFRTAVRQVSHSTAELFEAWFRSPTASKVGKRKWDAGAIAKAIENNGGGWHGFGWLGRGKWTVAHSNINENGVCLACGEKLAIIDLDPKETEDFATFVAKLAIKRERKSNFENFQKWLEKHGPFEAVVDAANVGLFSHKHLSLSKVNSVADAIRLRFTSKKWPLIVLHNKHLIGERMKKLNDHKLVQKWKQENSIYATPTGSNDDWYWLYAAIRCKCLIITNDEMRDHTFQILERNFFPKWKERHQVHFTLEDRCVTFQMPPPYSVVIQESDKGHWHIPVSEEGLLEKDRTWLCVTRQNSQAQ

SEQ ID NO: 12096 - protein, 245 aa, Zea mays
  VARIANT 63: note = Ancestral polymorphism is S, Derived polymorphism is R
MASLQSQSLLGIGSSSIVLARARVQQCLAAASRSHAPLLQANGGRTGLPSSSILNAGNAISFSRRRRKDLRVVAEAAAAGPTKVTPASSGGVSISDVLWPSAGAFLAMAVLGKMDQVVAFKGVSLTIPPLGAVCCVLFSAPDSPAAKKYNMFVAQIGCAALGVLALSLFGPGWLARGAALSACIAFMTITGASHPPAASLPLLFIDGPKFHSLQLWYALFPGAVGCIVLCLIQEVVVYLKKNIKF

SEQ ID NO: 12097 - protein, 703 aa, Zea mays
  VARIANT 14: note = Ancestral polymorphism is H, Derived polymorphism is N
MLSPKETHLAVPVHRHLVLFLLLGLAIASLATGDDQFVVTGFTQSSFNLEGAVTVTNGGLLDLSTGTSYLKGHALYPTPLHFRKTPNGKVQSFSACFVFSIVNTYPLLSDDGMAFFIAPANTSFAGATPGMYFGLVNSKDDGKPSNRIFAVELDTYQNSELHDMNDNHVGIDINGATSLSSAAAGFYDDESGGAFRNLTLNDHSEMQLWVDYDERSTRINVTLAELRAAAKPSRPLLSTTYDLSAVLGDPAYVGFSATAGPINVRDYVLGWSFGINTPAPPIDVSKLPRLPRVGPKPRSKLLEIILPVSTAVLILAVGAATAMVALTRWRYAEVREDWEAEFGPHRFSYRELWRATGGFKRKHLLGEGGFGKVYKGVLPVPGSNGGTIDIAVKSMSHESRQGMKEFISEVVSIGKLRHRNLVQLLGYCRRKGELFLVYDYMANGSLDKYIHCCSGDDGHRSDPTLNWSQRFQVIKGIASALLYLHEKWDKVVIHRDVKASNVLLDHEMNGRLGDFGLARLYDHGTDPQTTHMVGTMGYLAPELVRTGKASTDTDVFAFGMFLLEVTCGKRPLMMMMMQSTAEGRRDRQFFLVDWVLEHWKNGSLTEAVDRRVQYLDDGYDADEACTVLKIGLLCLHPFPSSRPSMRKIMEYFDGDMPLPELTPTKLNANVLRVLQSNAFSPTVMSYPQLTSSFGTVSDLSGGR

SEQ ID NO: 12098 - protein, 78 aa, Zea mays
  VARIANT 20: note = Ancestral polymorphism is V, Derived polymorphism is M
  VARIANT 35: note = Ancestral polymorphism is A, Derived polymorphism is T
  VARIANT 55: note = Ancestral polymorphism is R, Derived polymorphism is Q
MASEKKQSNPMREMKVQKLMLNISIGESGDRLTRTAKQPCCDIAARYTVRSFGIRRNEKITCYVTVRGEKAMQLLESG

SEQ ID NO: 12099 - protein, 1175 aa, Zea mays
  VARIANT 90..1175: note = Derived polymorphism lacks residues 90 to 1175
  VARIANT 805..1175: note = Derived polymorphism lacks residues 805 to 1175
MSSLTLCCRNSDLYSSVLPARLLLILVSKPSVLGFTLDSASSHDHYTHHKSCGAMALNIKPRLTTLTECRRIWRRYHVIRMVSEQLHEDWELLMNQPNIDLTTQWISKKMLRPFLFFITQPSSWYIGQWSKTVESILTCFKIILNSINSMDARKNFCSFAVGIPEERSIWLYQAKKLISLCSSILARYDHSCCKDGSIVDMTAIAMRLAVSLTDCKTWKSLNSENTSAADASVQSLIEFIGTCQSGMYNCVRQYIKSLGPHVTSAKKSSATATDDDFLITASAVTLALRPFDSKKAKGGVDLNGASKKYFTLILTIPDLCKRMPPLLLPALKHFSVLQPSLNILLISKDKIFEEIIKLEQSEVSASIIPCSGWALGNIVNLATNHDDLSNSGCFIQELDFCLYVDVINCISENLLESFEKSKGTSQNVGNITFHADTSVAEEEDTNDDCRMRTLFMDLLKPIYQQWHLRKLLMLAKEDFPCRRATDYDPNLKNIHFRILKLSDVICFYYHMLRIFSSLNPSIGAMPILNMLAFSPGFLVDLWEALEMPIFGPPIQNSQETGHEKQLATSSSGVQVSSMRQRRNAKDTANRWSNVLQKITGKSNDSEEGTLSDSILFSHESNDDALTSWDIEAMRHASEGIGKDLMCIMYLFCAIYGHLLLVLDDIEFYEKQVPFTLEQQRKIASALNTFVYNSFIQNSGSYSNPLVDVAVRCLNLLYERDSRHKFCPISLWLAPARNGRIPIAAAARSHEAAFGIFPGIPHRSSVLTTLPHVYPFEERVQMFREFIESDKASRRVTGEVSGPGPGSIEIVIRRGHIIDDGYRQLNCLRSKLKSCIHVSFVSECGLPEAGLDYGGLSKEFLTDLSKSAFSPEYGLFSQTSASDTSLIPSNSAKLLDNGIDMIEFLGRVVGKALYEGILLDYSFSPVFVQKLLGRYNFLDELSTLDPELYRNLMQLKHYDGDVEDLFLDFTVTEELGGKRIVHELRPGGKNISVTNENKLHYVHAMADFKLNRQILPFANAFYRGLSDLISPYWLSLFNANEFNQLLSGGLQDFDVDDLRNNTKYTGGYTESSRTVKLFWEVIKAFKPTERCLLLKFVTSCSRAPLLGFKYLQPSFTIHKVPCDVTLWASIGGQDVDRLPSASTCYNTLKLPTYKRSSTLRSKLLYAISSNTGFELS

SEQ ID NO: 12100 - protein, 449 aa, Zea mays
  VARIANT 148..449: note = Derived polymorphism lacks residues 148 to 449
  VARIANT 81..449: note = Derived polymorphism lacks residues 81 to 449
MDVLNRTGMADALHEYIQRDRPFLGICLGLQLLFDSSEENGPGKLFSTPLLSGLGVIPGVVRRFDSSNGLIVPHIGWNALQITKDTPLLQGADGQHVYFVHSYRVLPSDANRDWISSICNYGDSFISSISMGNIQAIQFHPEKSGATELSILKEFLRPNSLGTKNEGDEMASKVAFDHPERFSEKFEFSADNIKPLVQTCMTTLSSKISACFRRNVWLGDLNYRINLPYEKTHELISKQDWNELFGKDQLKVELKKGICLKDGPKGSSTFLQRVHVHNLVIEQSLVSQSTEFEAVIQNGDKSSLRALCEKNTKNLCRSDEERETWGFLRVMFEDGDFARTKLLAHLGFEPPQAPPASSTNELSQILADTLNIDHAAVTDNADAQFLIDNGDDFFNNPQPSEASLAEESVSTNGQQIEQEVSGDAVPSDPSIDKSIQHALVVGDYKGEVN

SEQ ID NO: 12101 - protein, 465 aa, Zea mays
  VARIANT 72: note = Ancestral polymorphism is E, Derived polymorphism is K
  VARIANT 39: note = Ancestral polymorphism is F, Derived polymorphism is C
  VARIANT 38: note = Ancestral polymorphism is S, Derived polymorphism is Y
  VARIANT 37: note = Ancestral polymorphism is I, Derived polymorphism is T
  VARIANT 5: note = Ancestral polymorphism is A, Derived polymorphism is G
MAELAKVFINHGFDVTMVVVPEFSSQFKRVAAANPSISFHVLPPVSPPPADVAGSGKHPLLSMLKTLRRYNEELERFLCSVTSRQHLHSLVIDMFCVDAIGVAARLGVPAYTFAPSSASALAVLTQVPTLLASSQRGLKELGDTPLEFLGVPPVPASHLNAELLERPEEELCSTVASVFRRGMDTRGVLVNTFQALETRALQALGDPRCVPGKAALPPIYCVGPLVGNSARDPPARAGERHDECLRWLDAQPERSVVFLCFGSMGAFSQEQLKEIATGLDKSGHRFLWVVRRPASSIFDPKRFLGRQPKLDLDAVLPEGFLERTRGRGLVVRSWAPQGEVLQHPATSSFVTHCGWNSVLEGVMAGVPMLCWPLYAEQRMNKVFMTGDMGVAVEMEGYQTGFVKAEAIEAKIRLVMESEEGRELRVRVAARTKEATAAMEAGGSSRVAFAQFLADVRSTRHNVCKL

SEQ ID NO: 12102 - protein, 523 aa, Zea mays
  VARIANT 143: note = Ancestral polymorphism is P, Derived polymorphism is L
MFNKIIKRGNRKGARGDSAEVAARPAAPSSSSGSGGGGAGGAAPVTVNHASRATAPSPSSPTSPHVTPSAFATNPAVGAASPPLLEPLPLLRDVAAADRPGLILRKLRLVAALFDLSDSLKHPREKEAKRQALLELVDYVQAPAQAAGANAPTRLPDHVQEALVLAISANIFRPLPPALHESAAAIDPGAAPDDDEEPYLDPSWPHLQLVYELLLRYVVSPDTDTKVAKRYVDHAFVLRILDLFDSEDPREREYLKTVLHRIYGKFMVHRPFIRKAINNVFYRFIFETQRYNGIGELLEILGSIINGFALPMKEEHKLFLARALIPLHKPKSVVIYHQQLSYCIVEFVEKDYKLADTVIRGLLKYWPVTNCQKEVLFLGELEEVLEATQPAEFQRCMVPLFKQIARCLNSSHFQVAERALFLWNNDHIVSLIAQNRGVIFPIIFEALERNIHSHWNQAVHGLTANVRKMFLDMDSELFEECQQQYMDKQAKAKEMQEQRESAWRQLEAVVAAKAAGDDMVLVN

SEQ ID NO: 12103 - protein, 255 aa, Zea mays
  VARIANT 8: note = Ancestral polymorphism is S, Derived polymorphism is N
  VARIANT 23: note = Ancestral polymorphism is A, Derived polymorphism is V
  VARIANT 26: note = Ancestral polymorphism is T, Derived polymorphism is I
  VARIANT 30: note = Ancestral polymorphism is K, Derived polymorphism is N
  VARIANT 34: note = Ancestral polymorphism is A, Derived polymorphism is D
  VARIANT 47: note = Ancestral polymorphism is G, Derived polymorphism is D
  VARIANT 49: note = Ancestral polymorphism is G, Derived polymorphism is E
  VARIANT 51: note = Ancestral polymorphism is S, Derived polymorphism is N
  VARIANT 64: note = Ancestral polymorphism is C, Derived polymorphism is R
  VARIANT 72: note = Ancestral polymorphism is V, Derived polymorphism is I
  VARIANT 82: note = Ancestral polymorphism is A, Derived polymorphism is D
  VARIANT 85: note = Ancestral polymorphism is E, Derived polymorphism is K
  VARIANT 93: note = Ancestral polymorphism is D, Derived polymorphism is V
  VARIANT 103: note = Ancestral polymorphism is C, Derived polymorphism is R
  VARIANT 194: note = Ancestral polymorphism is P, Derived polymorphism is S
  VARIANT 204..255: note = Derived polymorphism lacks residues 204 to 255
  VARIANT 227: note = Ancestral polymorphism is A, Derived polymorphism is T
  VARIANT 233: note = Ancestral polymorphism is D, Derived polymorphism is H
MNISEAASAGVIKSILYTFSAPAEATGVGKALQAQGLTRGLLAITLGAGSSSLEIMEESHPQLCRALDCLVVITFVGASDLAETELSLKAMWDLMLSNRTCKCGHCKKLALEYENVAKALSKHDPPIVLAKVDANEEKNMPLATKYEVQGFPTIKIFRDQGKNIQEYNGPREADGIVDYLKKQVGPASKEIKSPEDAAALIDDKKIYIVGIFAEFSGTEFTNFMEVAEKLRSDYDLLGSYSYLINIWQWALLSIL

SEQ ID NO: 12104 - protein, 289 aa, Zea mays
  VARIANT 25: note = Ancestral polymorphism is A, Derived polymorphism is E
  VARIANT 83: note = Ancestral polymorphism is G, Derived polymorphism is R
  VARIANT 85: note = Ancestral polymorphism is V, Derived polymorphism is I
  VARIANT 151: note = Ancestral polymorphism is E, Derived polymorphism is K
MPSGHLAFANWWSKHLVLINPITGARQSVQVEEPRRSLVLAAAAGGDSFISVGTDELTLWRRAGDDGGEEWSRWTVPAAATHGIVNIAWAAVCCGCFYMLDDDGHVFVIDVGAPPPLRVEKLPVASLFDGDHAMAVLSPATKGHLLESDGEVLFVRPVLASKDEVGRAGGATTFCNHDAAVFPAILGFEVYRLDLKDRRWARVKKLPGDRRALFVSHGSSFAVRSSETAGCRSNCIYFVGNKWYCSLCNRDAGKTWGVYSMEDREVLFEHAVTEPGPCSAATWFLPSVV

SEQ ID NO: 12105 - protein, 278 aa, Zea mays
  VARIANT 86: note = Ancestral polymorphism is A, Derived polymorphism is E
  VARIANT 188: note = Ancestral polymorphism is R, Derived polymorphism is I
  VARIANT 200: note = Ancestral polymorphism is E, Derived polymorphism is G
MAMGDAKPLVLIPMPSCDRDLLVPTAAVATYASPSARSVADSDDDESKPSSASAAAQTGREAFHKVVHSWASKKFMTGCVILFPIAVTFYVTWWFFRFVDGFFSPIYAHLGIKIFGLGFVTSISFIFVVGVFMSSWLGASVLGLGEWFIKRMPFVRHIYDASKQISAAISPDQNKHAFKELVIIRHPRIGEYAFGFITSEVLLQGYSGEEQMYCVYVPTNHLYIGDIFLVSSSDVIRPNMSVREGIEIVVSVGTSMPGVLSILETEPNQLDRMRSTRS

SEQ ID NO: 12106 - protein, 210 aa, Zea mays
  VARIANT 62..210: note = Derived polymorphism lacks residues 62 to 210
  VARIANT 5: note = Ancestral polymorphism is G, Derived polymorphism is S
MAVPGRVFTLLMMLTAAGTMAASDAAVVRATTSPSPAPTGWLKAHATFYGGADASDTMGGACGYGNLFTQGYGTRTAALSTVLFNDGASCGQCYKIACDRKRADPMFCRPGVTVTVTATNFCPPNLALPDGGWCNQQRPHFDMAQPAWEKIGVYGGGIIPVMYQRVPCVKRGGVRFTINGHDYFNLVLVTNVAAAGSIRSMDVKASNSTG

SEQ ID NO: 12107 - protein, 210 aa, Zea mays
  VARIANT 52: note = Ancestral polymorphism is P, Derived polymorphism is L
MASPSSSSFPSRKALSKIACRRLQKELTEWQVNPPAGFEHRVTDNLQRCRFPIAALPIPFLTKQSLRWVVDVAGAPGTLYTGETYKLQVDFSEHYPMEAPQVIFLHPAPMHPHIYSNGHICLDILYDSWSPAMTVSSICISILSMLSSSPAKVTYFLYISLFNRWVLLSDCNTYMYRLQQRPADNDRYVRNCRNGRSPKETTWWFHDDTV

SEQ ID NO: 12108 - protein, 269 aa, Zea mays
  VARIANT 219..269: note = Derived polymorphism lacks residues 219 to 269
  VARIANT 217..269: note = Derived polymorphism lacks residues 217 to 269
  VARIANT 95..269: note = Derived polymorphism lacks residues 95 to 269
MAAPSRVFTLLMMLTAASTMAASDAAVVPATTSPPSPAPIGWLKAHATFYGGADASDTMGGACGYGNLFTQGYGTRTAALSTVLFNDGASCGQCYKIACDRKRADPMFCRPGVTVTVTATNFCPPNLALPEGGWCNQQRPHFDMAQPAWEKIGVYGGGIIPVMYQRVPCVKRGGVRFTINGHDYFNLVLVTNVAAAGSIRSMDVKTSNSTGWTRMARNWGANWHSLAYLTGQALSFRVTDTDGQTIEFANVVPQGWKFGQTFASGLQFK

SEQ ID NO: 12109 - protein, 249 aa, Zea mays
  VARIANT 140: note = Ancestral polymorphism is S, Derived polymorphism is R
MQRISLRLLRSSYTAASASLSTTSSSLRGLAVSHGGWTTRPSLQPPVRTAAPVDLTRWPPRRGYSQFASGFTPLKPKPLGSILDIERAKGLSPDHLVAAWDDYHLGRGHIGASMKAKLYHLLEQRSASCRHFVIPLWKGSGYTTMFMQVQMPYMVFTGLEDYKARGTQASPYYTVTHYTEFAETKDTVLIRGDVVFTSKLTDSEAKTLLETAHSFYLNDVRYRLVERFNKETHDFEFGDVLKVLDMPTM

SEQ ID NO: 12110 - protein, 639 aa, Zea mays
  VARIANT 55..639: note = Derived polymorphism lacks residues 55 to 639
MATYYSSPDSERDSQTMYSTESGNASYPVPSALGNFLYLNSASSGPYTEFNGIVQSQQNFMELTGHPSAISHDSSSNEATNIGTSLTEQRSFGPLKDMRNEMLMHLMDGAHSSGSDLIHNDDHSTAQLEFGMLNNHNSTSLPSASGQGLSLSLNTHILAPSYPYWSAKQDLLTPNSYQGDDNRMKNMQSEASQAIRNSKYLKAAQELLDEIVSVWKSVKQKTDKGPSEAGKSDGKETDGGTKSEGVSFDPQESGANTAAELSTAEKQELQNKMVKLMAMLDEVDRKYKHYYHRMQLVMSSFDMVAGSGAAKPYTAVALQTISRHFRCLKDAINDQISVIRKKLGEDDDASGKEGKLIRLRYIDQQIRQQRAFQQYGMLQQNAWRPQRGLPENSVSILRAWLFEHFLHPYPKDSEKLMLSRQTGLTRSQISNWFINARVRLWKPMIEDMYKEEIGEAELDSNSSSDNVQPNKDKPPSSEEKDHKTSTSQVCQTSQLGESKANIGGVVSFCGAPAGGFHNDANPDDSFMSLMLKAQRPGETDGSGLLHDAVAHHSDESARFMAYHLTEFGRYGNNNVSLTLGLQHAENTQPGFPGVRDQDIYNSTAPLNVTSTSSEYDSASQIDQQRQLFEVSPLMHDFVA

SEQ ID NO: 12111 - protein, 604 aa, Zea mays
  VARIANT 81..604: note = Derived polymorphism lacks residues 81 to 604
MRRRRRPLPIPASAFSPSATPRSSYPAPIQITAEQILREARERQEPEIRPPKQKITDPQELSEYRLRKRKEFEDVIRRVRWSVSAWVKYARWEEQQLDFARARSVYERTLDVAHRDHTLWLKYAEFEMRNRFVNHARNVWDRAVSLLPRVDQLWYKYIHMEELLGAVANARQVFERWMSWRPDTAGWNSYIKFELRYGEVERARAIYERFVAEHPRPDTFIRYAKFEMKRGEVERARRVYERAADLLADDEDAEVLFVAFAEFEERCREVERARAIYKYALDRVPKGRAEELYRKFLAFEKQFGDREGIEDAIVGKRRFQYEDEVRKNPLNYDSWFDYIRLEESVGNNDRIREVYERAIANVPPCRSAEEKRYWQRTLYEKYIEWSPANCYAWRRYAELEKNLSDTDRARSIYELAIVQTALDMPEILWKEYLQFEIDENEFERTRQLYERLLDRTKHLKVWTSYAEFEASAGLGGEDSEGEEKKNDKEQKMEQVKKCRAIFERAFDYFRTSASELKEERAMLLEEWLNKEVIFGDLGDVTLVQKKAPRKVKRKRPIPTEDGSTIAYEEYIDYIFPDEVALAPNLKILEAAYKWKKQRTDDDNV

SEQ ID NO: 12112 - protein, 471 aa, Zea mays
  VARIANT 133..471: note = Derived polymorphism lacks residues 133 to 471
MDAGTYSISSEKSHTAAAARPPLQEAGTRPYMPSLSTGSRNPSAKCYGDRFIPDRSAMDMDMAHYLLTEPRRDKENAVAASPSKEAYRRLLAEKLLNNRTRILAFRNKPPVSENVSAAITASSHHAKLVKQRRHIPQSAERTLDAPELVDDYYLNLLDWGSNNVLSIALGDTVYLWDASSGSTSELVTIHEDSGPITSVNWAPDGHHIAIGLNSSDIQLWDTSSNRLLRTLRGVHEERVGSLAWNNNILTTGSMDGKIVNNDVRIRNHVVQTYEGHSQEVCGLKWSGSGQQLASGGNDNLLHIWDVSMASPMSTAGRNQWLHRLEDHMSAVKALAWCPFQSNLLATGGGGSDRCIKFWNTHTGACLNSVNTGSQVCALLWNKNERELLSSHGFTQNQLTLWKYPSMVKMAELSGHTSRVLFMAQSPDGCTVASAAADETLRFWNVFGDPEVAKPAAKASHTGMFNSFNHIR

SEQ ID NO: 12113 - protein, 180 aa, Zea mays
  VARIANT 48..180: note = Derived polymorphism lacks residues 48 to 180
MARKAKPAAQGTAVVAAATGVQYWLLKTEPGEWSWSDQARAPGGVAPWDGVRNRQAMSSLRAMRPGDRCLFYHSGAGAASRRVVGVVEVARPWYEGEGEEAVAGGAVDVRAVGEFRNPVPLGVIKKAAGEVEGMKDFALLRQARLSVMPVPAKIWDWVCDAGGGLVQDGEGEDEEEEEEA

SEQ ID NO: 12114 - protein, 230 aa, Zea mays
  VARIANT 157..230: note = Derived polymorphism lacks residues 157 to 230
MAAPAEETLAAEDTASPPPPARSAGFWFLGEDKSVHKALGGGKTADVLLWKDKKTSAAVVGGATVLWVLFEIVEYHLLTLVSHVLIAALTILFLWSNATVFIKKSPPDVPEVQISEDLAVNIALALRADINKALALLREIALGHNLMKFLGVVVALWILSEIGELCDLLRLMYIVVLILHTVPILYHKYQDQVDNFAAKAHRELCKQYAVLDAKVLSKIPRAPPKDKKQN

SEQ ID NO: 12115 - protein, 369 aa, Zea mays
  VARIANT 56..369: note = Derived polymorphism lacks residues 56 to 369
  VARIANT 57..369: note = Derived polymorphism lacks residues 57 to 369
  VARIANT 310: note = Ancestral polymorphism is R, Derived polymorphism is C
MTEVALLRGPTNLASTVSRASASSPSSTLCYLANADSDVLPRSGSPERTAGSARSRRLLEQRGQEAVEEEEEWTVGGGGEGEHGGGGMEIRLPTDVQHVAHITFDRFHGFLGLPVEFKPEVPLRAPSVHKTKVIKLDGVLIKPFEEKYQKDAYTYQARHVFIPINIRGTHCGVVGILFFCSNRHRLQVYFRNKFMQCVSAMCWVQSYIGQSQCTEFKRKQYSNMACSYLVFLFVCVVSCMFYTKSLYPQSLYSNIDKCPKSLYASKQTFGIVVHIGFNTSSVVPKDKTKGEIYVAFNTSHLPVVVGLLERSGFRWEPVVDTGKEAPYDFLTDGLPDRAVTVYQFSHFLNSNLYPMLSYSSIILVLRPDV

SEQ ID NO: 12116 - protein, 172 aa, Zea mays
  VARIANT 15: note = Ancestral polymorphism is R, Derived polymorphism is L
  VARIANT 66..172: note = Derived polymorphism lacks residues 66 to 172
  VARIANT 124: note = Ancestral polymorphism is Y, Derived polymorphism is H
MVLVLALGDLHIPHRVPDLPAKFKSMLVPGKIQHIICAGNLCIKVSFTFLSSIDLTVLICSILLRWLGPIAVWIVVPWGDLDSLAMLQRQLDVDILVTGHSHQFKAYKHEGGVVINPGSATGAYSSITYDVNPSFVLMDIEGLRVVVYVYELIDGEVKVDKIDFKKAATMQA

SEQ ID NO: 12117 - protein, 325 aa, Zea mays
  VARIANT 298: note = Ancestral polymorphism is I, Derived polymorphism is T
MAAARRLSELLQEQQEPFLVETARARRPRRGRGAVGAGVAGGGLGCCPAAACRRLFRLCNQGFKKRRAAAAAGGGSGSGVASGLRLALSKVLCGRGMRRVLRLDDLCGGGGCFSGASACGAREFRRLRRSLGDSGECDPRAMVLPGDDGEEEQMGWKADMDVDSSRQLSPVSVLELHSDDDDDESPVHSHWGDEKPSTSGTGSSPPSESFLGPTPTSPCFSYDLQDKFCEMEVDEAEEEETVRTGRSIEEQVSSWEKIAGDISRIPAMMELDLSRSTRQWREPEPEVREVGARIEVLIFDDIRRETVCDMLASHCRLAAAAATSC

SEQ ID NO: 12118 - protein, 383 aa, Zea mays
  VARIANT 142..383: note = Derived polymorphism lacks residues 142 to 383
MEEERCFNNWDLDAVVRLGCRRRLSPPRQPDPFASLLPPTLPSPSPSPPQKEKPVVPALAKGPEPEPYAGWRFPNLGAGGGQDGDELMRAMLAVQPSLPQPLPTTTPTPTPTLPPAAGEHRQSTVTAVDVPLPQVRPAPAARAQPSGRQVPGAVPRSKRRKNQVKKVVCHVPADGSSSDMWAWRKYGQKPIKGSPYPRGYYRCSSSKGCAARKQVERSRADPNTFILTYTGEHNHAAPTHRNSLAGTTRNKFPSSAAPPPPPPSVVVGGAGAGDAQHQQPSPSPASTSTAGLSPTTPLRTPSMEEEEMDDDDDELLVEDMEMVGEDELLFLNIDADAEADAGAPLEPMPSLFDVVDEPFLNSPWLTATSSAGEPATGAAGARS

SEQ ID NO: 12119 - protein, 248 aa, Zea mays
  VARIANT 223..248: note = Derived polymorphism lacks residues 223 to 248
  VARIANT 214: note = Ancestral polymorphism is S, Derived polymorphism is L
  VARIANT 202..248: note = Derived polymorphism lacks residues 202 to 248
  VARIANT 190: note = Ancestral polymorphism is D, Derived polymorphism is V
  VARIANT 180: note = Ancestral polymorphism is S, Derived polymorphism is F
  VARIANT 170: note = Ancestral polymorphism is T, Derived polymorphism is I
  VARIANT 152: note = Ancestral polymorphism is G, Derived polymorphism is S
  VARIANT 147: note = Ancestral polymorphism is P, Derived polymorphism is S
  VARIANT 128..248: note = Derived polymorphism lacks residues 128 to 248
  VARIANT 94: note = Ancestral polymorphism is C, Derived polymorphism is Y
  VARIANT 59: note = Ancestral polymorphism is G, Derived polymorphism is S
  VARIANT 46: note = Ancestral polymorphism is G, Derived polymorphism is D
  VARIANT 15: note = Ancestral polymorphism is I, Derived polymorphism is M
  VARIANT 8: note = Ancestral polymorphism is P, Derived polymorphism is L
  VARIANT 7: note = Ancestral polymorphism is L, Derived polymorphism is S
MAPSPVLPAVVLVTIGWALAMAADGVVAANAPSPTGWLRAHATFYGGADASGTMGGACGYGNLYSQGYGSRTAALSTVLFQDGASCGQCYKIACDRKTAPTLCKSGVTVTVTATNFCPPNSALPDGGWCNQQRPHASSPSSTRGQVPCVRRGGVRFMINGHNYFNLVLVTNVGGAGSIKSMAVKSSDSTDWMPMARNWGANWHSMSYLSGKRLSFRITITDDQTLVFNNVVPAGWTFGLTFTSNLQFK

SEQ ID NO: 12120 - protein, 436 aa, Zea mays
  VARIANT 20: note = Ancestral polymorphism is D, Derived polymorphism is V
MSAEFCAAAGVVAMELGVGDVLGLQQGIAITAPSPRDSDLGLLKRAGLTQAAAAAPYPSPFLDEEKMLRFSKAAHTLHSGLDFGGPGEQAFLLSRTKMPFTPSQWMELEHQALIYKYLNAKAPPYLPACSFQSARASDHPIESLTDFSNAVSWRPLYQGYTNADSDPEPGRCRRTDGKKWRCSKEAMADHKYCERHINRNRHRSRKPVENQPKKTTKEVPAAAGSLPCAGPQGSLKKAKVNDSKPGTVSYWADSLNRTMLSREKANKPTEDSSLLLTSTNSQPTLSLLSQLKQQNKPDKLGPTLENESNPDTILKAWGGNQPSHKSISSTERHDAESLQSVLQNFSLAQNEKMESEKNKYSDSVLVSSTFYSADGPRATCLTPNMTQVKQDCISSSWEMPQGGPLGEILTNSKNSKDLSKCKPRSYGWLLNLDHAP

SEQ ID NO: 12121 - protein, 275 aa, Zea mays
  VARIANT 198: note = Ancestral polymorphism is A, Derived polymorphism is V
  VARIANT 163: note = Ancestral polymorphism is S, Derived polymorphism is N
  VARIANT 156: note = Ancestral polymorphism is F, Derived polymorphism is L
  VARIANT 150: note = Ancestral polymorphism is L, Derived polymorphism is M
  VARIANT 119..275: note = Derived polymorphism lacks residues 119 to 275
  VARIANT 111: note = Ancestral polymorphism is G, Derived polymorphism is A
  VARIANT 91..275: note = Derived polymorphism lacks residues 91 to 275
  VARIANT 85: note = Ancestral polymorphism is R, Derived polymorphism is P
  VARIANT 68..275: note = Derived polymorphism lacks residues 68 to 275
  VARIANT 62: note = Ancestral polymorphism is A, Derived polymorphism is P
  VARIANT 59: note = Ancestral polymorphism is C, Derived polymorphism is Y
  VARIANT 31: note = Ancestral polymorphism is Q, Derived polymorphism is K
MDALAPRSRARPPPPSPTGITTPPPSPSPWQSRIGACPSPVENLTGIKGLSEAKVDKICEAAEKLLNQGFMTGNDLLLKRKSVVRITIGSQALDELLGGGIETLCITEAFGEFRSGKTQLAHTLCVSTQLPIHMHGGNGKVAYIDTEGTLYLWELFVKLILKSLYLFLSSPNCFLNEVFSRPERIVPIAERFGMDANAVLDNIIYARAYTYEHQYNLLLGLAAKMAEEPFKWGGARLDVPPGRWLTGSFNLTSRFRTNIFFFTGKSGSKNCAFSR

SEQ ID NO: 12122 - protein, 226 aa, Zea mays
  VARIANT 194: note = Ancestral polymorphism is Y, Derived polymorphism is N
  VARIANT 189..226: note = Derived polymorphism lacks residues 189 to 226
  VARIANT 178..226: note = Derived polymorphism lacks residues 178 to 226
  VARIANT 156: note = Ancestral polymorphism is V, Derived polymorphism is A
  VARIANT 138..226: note = Derived polymorphism lacks residues 138 to 226
  VARIANT 131..226: note = Derived polymorphism lacks residues 131 to 226
  VARIANT 20: note = Ancestral polymorphism is A, Derived polymorphism is V
  VARIANT 14: note = Ancestral polymorphism is T, Derived polymorphism is I
  VARIANT 3: note = Ancestral polymorphism is P, Derived polymorphism is T
MATSSVLPAVVLVIVGWALAVAADGIVAANAPSPTGWLRAHATFYGGADASGTMASCGQCYKIACDRKTAPTLCKPGVTVTVTATNFCPPNSALPDGGWCNQQRPHFDMAQPAWENIGSTVSAGIMPVIYQRVPCVRRGGVRFMINGHNYFNLVLVTNVGGAGSIKSMAVKSSDSTDWMPMVRNWGANWHSMAYLSLGKGSCSESQSQMTKHSYLLMWCRLAGPLA

SEQ ID NO: 12123 - protein, 475 aa, Zea mays
  VARIANT 40..475: note = Derived polymorphism lacks residues 40 to 475
  VARIANT 54: note = Ancestral polymorphism is S, Derived polymorphism is F
  VARIANT 86..475: note = Derived polymorphism lacks residues 86 to 475
  VARIANT 129..475: note = Derived polymorphism lacks residues 129 to 475
  VARIANT 249..475: note = Derived polymorphism lacks residues 249 to 475
  VARIANT 256: note = Ancestral polymorphism is T, Derived polymorphism is M
  VARIANT 294..475: note = Derived polymorphism lacks residues 294 to 475
  VARIANT 317..475: note = Derived polymorphism lacks residues 317 to 475
  VARIANT 386: note = Ancestral polymorphism is R, Derived polymorphism is W
MSHHLPRHRSSIHDSLFSFRIPDPSSPRCAFLYGFVFNCQRQDERLPRGGEQKSVVILSHAPTPLSSACCRKSSARSSLTSVLPHWPWWRCTLPCGRRRRHGTQWSFQLAVPRCACTSRLRLTILAHRQRCCPPTPRCRTEYGLFHDADLFAAFCGLFQSPGNGMNGTPGKLKLEKLAINKFSPTSLLNSIKLRREGPLSLMTEHKEALWSTYSPTTKPDTSVLNRLIDAGVSPRIEESMSVVNNEILWQHFLELTTNFLVPFGPYLRTTTPSEGTSPFVDPPLLPPFHAEISQGPNFMPWFRQRRAAAEQEQQRLWRQARMNVNIEKLMSNMSEIERIDSFDAVERYLLREMEAEIEKVKKIREERAIEKAHHEEEMVKSEIRLREGRTKPIDVLLKNLNFSDEFDIELNDPYLVFKLLYILTPSHSTSNAFYNQFEEEDGSFSPQLMHGNEYEDAIDPEEDKAELVEFYVSIF

SEQ ID NO: 12124 - protein, 75 aa, Zea mays
  VARIANT 47: note = Ancestral polymorphism is L, Derived polymorphism is P
  VARIANT 31: note = Ancestral polymorphism is P, Derived polymorphism is L
MAVVRAPLGAVAVAALVVAIFMPAAAAAQAPAPAPTSDGTLPLSLSLSSPFLFCAITLRSGPWAARNRVMFIPPL

SEQ ID NO: 12125 - protein, 275 aa, Zea mays
  VARIANT 250: note = Ancestral polymorphism is I, Derived polymorphism is T
MRWDAAEAEAALERIWDLHDRLSDAILAVSRAHLLLPAPPPPPVPSAPSAKGAHRIGVGRNGCVFVKDGAAGGGGEALAAAAEALAEARSLHAIRSALEDVEDHLEFLHTVQSQQRAERDAAIARLEQSRLVLAMRLAEHRGKKYKVIDEALAFVGEVSDKSQFISPEDVRATHSRSEDNADDNRGSGSRIMSNVLSCSLSLAKNSFRLDKIGGTLGNAAVFAVSMLAFLQLHQITFGSKTPAMECRKRIEYNLQSGSSQPNGKGKLLEVYLARG

SEQ ID NO: 12126 - protein, 297 aa, Zea mays
  VARIANT 232: note = Ancestral polymorphism is D, Derived polymorphism is N
  VARIANT 216: note = Ancestral polymorphism is T, Derived polymorphism is I
  VARIANT 215: note = Ancestral polymorphism is A, Derived polymorphism is V
MAEKPPKPKPPLPSKPRPAAGIPTSTPGPGSRLAAPPLKKPTLAPPPQVLPLKPPPAHQYRQQQQQPGGARKPRGYRQQQQQAHRRGGGCSCRRACCLATGLALLALCLALAAACLAYLYYRPRAPSFHLRPLAPVRLRLGGNSSSAVPAMDATVGARLVSWNPNERVAFRYGDGEGRVALAGDGDGDGDVALGWAPVRGFAHAPRSVAAVAFVATARGVVLDDAVAARVRDRYRRRQQRFRVVVDAHVGVRVGALRTGMVPLRLLCDDGVMAAGSPDGTAAGPMSKCQVLLFRVRW

SEQ ID NO: 12127 - protein, 145 aa, Zea mays
  VARIANT 3: note = Ancestral polymorphism is S, Derived polymorphism is L
  VARIANT 80..145: note = Derived polymorphism lacks residues 80 to 145
MASPVVVAATLLVVALAAFCGTDPLRTDNMVDFPGFESHLVDLPDPAEMPTHADEWERLCGADVRFCGEVQGPESIAFDQQGHTRASPTAGSSSGTVVALTESIGKLLVEVLKELGKRVPDSLVKTRVEDDGFTINSRRGFQTPL

SEQ ID NO: 12128 - protein, 415 aa, Zea mays
  VARIANT 187: note = Ancestral polymorphism is T, Derived polymorphism is N
  VARIANT 160: note = Ancestral polymorphism is W, Derived polymorphism is C
MGTEEWELYPCSYSGSQVIEYRPVSEDEDGEDDQNGADVAVSLDAVLPDDLLEKVLSLLPVASVIRSGSVCRRWHEIVHAQRHAWSKTVPEKPWYFMFTCSQDAVSGFAYDPSLRKWYGFDFPCIERSNWATSSSAGLVCLMDSENRRSVLVCNPITKDWKRLPDAPAVGGRTADYSGLAFSVDRSTHRYTVAVARSSQVPSEYYQWEFSIHLYDSVSGTWATPFTGVLLGWRGGDECVICDGVLYYLVYSTGVVMNDSEHRHCLVMYDLDARHSSSSSSHTSLLSMAIPAPCALTCGRLMNLSERLVLVGGIGKQDRPGVIKGIGIWELRRKEWHEVARMPHRYFQGFGEFDDVFASCGARDLIYIQSYGSPALLTFEMNHRSWRWSAKSPVSKRFPLQLFTGFSFEPRLDIAL

SEQ ID NO: 12129 - protein, 227 aa, Zea mays
  VARIANT 158: note = Ancestral polymorphism is R, Derived polymorphism is L
  VARIANT 142: note = Ancestral polymorphism is A, Derived polymorphism is T
  VARIANT 134: note = Ancestral polymorphism is S, Derived polymorphism is I
  VARIANT 54: note = Ancestral polymorphism is R, Derived polymorphism is G
  VARIANT 42: note = Ancestral polymorphism is A, Derived polymorphism is V
  VARIANT 21..227: note = Derived polymorphism lacks residues 21 to 227
MLLRMYVRWGEKQRYKTRVVEKSPGEEAGIKSATVELEGRYAYGYLSGEKGTHRIVRQSPFNAKGLRQTSFAGVEVMPLLPEESMAVDIPEEDLEISFTRARGKGGQNVNKVETAVHMVHIPTGIAVRCSEERSQLANKIKTLSRLKAKLLVIALEQRASEIKQIRGDIVKAEWGQQIRNYVFHPYKLVKDVRTGCETSDITSVMDGELDPFIRAYLKYKLTAVATS

SEQ ID NO: 12130 - protein, 1304 aa, Zea mays
  VARIANT 796..1304: note = Derived polymorphism lacks residues 796 to 1304
  VARIANT 456..1304: note = Derived polymorphism lacks residues 456 to 1304
MYPANRHMDPYYSHYRNHVPYPYYPPARWEIPSGHPQAMDSSYYYRPPNCGTWPYHDISHPSEFHCCCNRAYLPDYYSFRPPFPQELPPPHLYYHVPSPHHPNACPSYFVPSHPYPFDQTPYGYEKFKSHCCGCPTHVCPGAEKNNVKIEEQRPDVKLESGEHKNADSDSIIQHPNKKYPFIWLPSGNMKGKENGEHYELSPQVLNEWAPVSGKWLGDVKQQGQDNEKGKQFQWPIVWMPAGYDAPNQKAKDMNDTEETPKSPKISEVSPQSPKIIPLSWFGNGHHHDQKSAARNGSGDHNNGSAVKNQPVVTDHQDSMILEGNPKITPAVPKSIHVGKKPPRENCKTIPVVPEKEINEKKASTYRTIPVIKESDEKKIGMREKRESKEANSAEMVEENRKTKHNDSSVVKHSKLPPVCLRVDPLPRKKPGNGSSRSPSPPRKDTDNTKKDVDEAQSQILEPKQSSTSKDITVSEVKEKSPYEMKKEVGFRNETVEAASVEHLQEEEAPTSKDGQKVQAASTTVGDQENAALNSIEEDHVQENAGAGSLNGCDKRKNEDGTVIESETAKDDARTYGVNLSESDAAVRIQSAYRGYDVRKWQPLDKLWKIKHVHEQMQVVRKQIQCLLDSCSKPTQKEQVAIGETIMNLLLKLDAIQGLHPSVREARKSVARELICLQEKLDTLCKAASGDLNHTDSNDDESEGTKNIIQTEAPTVITEASDRQKRTIELGKVQEPCSVDSMEPCNTVPSGVSWEVRPDVDASEEKNEKQESCSTTVDEAHEQGKTEGQIEIQVASSMDMISDEAFTADNQEHGIGESNVTSVEQVTEEEKPASEDEVKEPPLVNSTALLYDTTSSGDSSGLKQYTASTDQNLYAESNTGSSPASTEDIDISTLAVESEVAAENDGPINSQVHETVALENVEMKDDVSSAENEHNRSSSPVIHLEDPLVSLKDVEQHGPTPTKDFVVPNTEDQQEARDISLQVQAVDSMKDCGEVPDGTIEASTNDDELELGTSADVEKNDQPTLLEPRSESVSVPELSVLDESDDKMQCGVSGKDEEAHVEEKTVTIAVDKVTGGSANFEDPLCEASRKEPDIEKSHPSLGEEEDDTIGGTVFPGSGSCELSCPQDGGIAVYEGPEMVSPESQTDARKENIHSDVAETDECTKTQKAALAGTEGENSAEDSGVPVSEMDKCNEMPKDAPTLTAAGANPAEDEASLKDLSVQTENKASSASPAPDDPKASDEKTLAEENQKLKELLQKLLASGNDQMGVITDLSEKVKVLERRLARKKRPKVRVHKPSRHASCVH

SEQ ID NO: 12131 - protein, 236 aa, Zea mays
  VARIANT 48: note = Ancestral polymorphism is P, Derived polymorphism is L
MIPGLSSSENSTPSSSMRPLPAAAMATATLPLRLLPSKTLTLSTLPSLRRSLSVAALEPRRWRLRAAAEEAPEAVEVEFVEPETEAEEKPAVPEPIEAQLAAAGAGKDADIFAVVMIGSRQYIVMPGRYIYTQRLKGANVNDQIILNKVLLVSTREKAYIGMPVVTNAAVHAVVEEQACLMHGRDDKVIVFKYKKKKKYQRKLGHRQPNTRLRITGISGYEEYPADPILDPAAALN

SEQ ID NO: 12132 - protein, 190 aa, Zea mays
  VARIANT 173..190: note = Derived polymorphism lacks residues 173 to 190
  VARIANT 95: note = Ancestral polymorphism is R, Derived polymorphism is C
  VARIANT 88: note = Ancestral polymorphism is I, Derived polymorphism is T
  VARIANT 58: note = Ancestral polymorphism is K, Derived polymorphism is N
MSKVKNNNGYHGVTEPISLSGPTEKYLMQTDEVEKYLSDARLYERQDEAILREEVLGKLDQTVKAWIKKATRINGYGEQFVHEANAKTFTFGSYCLGVHGPDADIDTLCVGPRHATRNEYFFRWLHDILAEMPEVSELHPVPDAHVPVLGFKINGVSIDLLYANLAHAVIPESREIMIHYKHRKDGDYDS

SEQ ID NO: 12133 - protein, 163 aa, Zea mays
  VARIANT 22: note = Ancestral polymorphism is T, Derived polymorphism is I
  VARIANT 25: note = Ancestral polymorphism is P, Derived polymorphism is L
  VARIANT 30..163: note = Derived polymorphism lacks residues 30 to 163
  VARIANT 56: note = Ancestral polymorphism is S, Derived polymorphism is F
  VARIANT 64: note = Ancestral polymorphism is M, Derived polymorphism is I
  VARIANT 70: note = Ancestral polymorphism is P, Derived polymorphism is S
  VARIANT 80: note = Ancestral polymorphism is R, Derived polymorphism is W
  VARIANT 83: note = Ancestral polymorphism is G, Derived polymorphism is R
  VARIANT 90: note = Ancestral polymorphism is G, Derived polymorphism is V
  VARIANT 111..163: note = Derived polymorphism lacks residues 111 to 163
  VARIANT 119..163: note = Derived polymorphism lacks residues 119 to 163
MEVEEELPASADLTGGSKQATTTTPFYLALDHTASATSSPPPAAPLPCAANSERGSEIIKAKIMSHPLYPAVLRAFIDCRKVGAPPEIVGRLSALADDVEMNSDDKQEQRRAADPELDQFMEIYCHMLVRYRQELTRPIQEADEFFRSMEAQIDAFSLLGDYV

SEQ ID NO: 12134 - protein, 218 aa, Zea mays
  VARIANT 62: note = Ancestral polymorphism is R, Derived polymorphism is C
  VARIANT 64: note = Ancestral polymorphism is R, Derived polymorphism is Q
  VARIANT 66: note = Ancestral polymorphism is A, Derived polymorphism is T
  VARIANT 144..218: note = Derived polymorphism lacks residues 144 to 218
  VARIANT 201..218: note = Ancestral polymorphism lacks residues 201 to 218
MVAAAPGILPWPHLPLPSSSHPSDASDAAAAATDANTSAYDIQIFEPTSIEERRRLLIQRRRLRLAASHASRLTVASRVSSKLISATASCSSGVASDLPPPLLMARRCLPPLPQPRPCRPWRIPNPTTSSVGPRRRGCAMNFRRKKPATIQGSILTTRTRGDANKVYVNLSWGVDNLALANLFTEQGPSMTDLDDRSVLRYQHQSRLEAILNFHLRCE

SEQ ID NO: 12135 - protein, 487 aa, Zea mays
  VARIANT 276: note = Ancestral polymorphism is K, Derived polymorphism is N
MATAAVESKRGSARGRKALVAVLDNEANISAGKAAQAADLSSCSAQKKAKRAPSRSSKAKAAAASAAVVVDDIAELQGMLERLRLEKEKAEEMVRERDEVIRKKEEEIETRDKEQERLQAELRKAQRAKEFKPTVSFPLVKSLLEKEQEADDKGKKKKGKGGHERKKPCPAYVLWLKDQWTEVKKENPEADFKEVSNTLGAKWKALGAEEKQPYEDRYRQEKEAYLQVVGQEKREAEAMKLLEEQQMQWTAKELLDQYLKFRQEAEEGDCKKGRKKKSKKDKDPSKPKQPMSAYFVYSQERRATLVAEKKNVPEIGKITGEEWKNMTEGQRAPYEEVARKQKEEYHKQMEVYKQKKAEEAASLEKEEQEHKKIMKHEALQLLKKKEKADNIIKKTKEKRQKKKQENADPNRPKRPASSFLLFSKEERKQLIEERPGINNSTLNALITVKWKELSGEERQAWNAKAAPAMAAYKKEMEEYTKAQSSSA

SEQ ID NO: 12136 - protein, 44 aa, Zea mays
  VARIANT 36: note = Ancestral polymorphism is G, Derived polymorphism is V
MALATANYMLGPHDGGGSSSSASAAGLRVEEQYFTGGSSYPRGP

SEQ ID NO: 12137 - protein, 136 aa, Zea mays
  VARIANT 65: note = Ancestral polymorphism is E, Derived polymorphism is D
MPWFPAVPPALAAADEARIVKKRAGLPRLLHKLFIKVLRLRPALAAEEYYGAYRMGMGVGAADEDCCYYYSYGGAGSSSWAGVLSSIPEEDYDDSSDEGTPDVAMPGPAVLRKAKSERFVVGPPDGAAVLHVEVLL

SEQ ID NO: 12138 - protein, 139 aa, Zea mays
  VARIANT 55: note = Ancestral polymorphism is T, Derived polymorphism is I
  VARIANT 44: note = Ancestral polymorphism is S, Derived polymorphism is L
  VARIANT 5: note = Ancestral polymorphism is L, Derived polymorphism is F
MEDVLSLLPHVKKDNQDKVESKQSKGNMPNKLLELRSCSNYLSSRLYEHNSTVKTEFLGLCRTSPLVSLHVYFKQLRSVTPIDIFPRQETRAREPGHAEGERKERRKKKWVSSSMSSARSSSSRSRATFAMAYDALSES

SEQ ID NO: 12139 - protein, 161 aa, Zea mays
  VARIANT 8: note = Ancestral polymorphism is P, Derived polymorphism is Q
  VARIANT 9: note = Ancestral polymorphism is R, Derived polymorphism is G
  VARIANT 36: note = Ancestral polymorphism is P, Derived polymorphism is S
  VARIANT 65: note = Ancestral polymorphism is R, Derived polymorphism is H
MPPAGRIPGVIVLALGVGALGFPDAMRLVAGRPRNPLLDIAACAVAMVVATAYALGTMLLARFVRSGGGDAPPADAFARLTFVVSLAAALLVSACLLFLPAPAPGAGGLPCHTVDAIAGESDVVVSALVAVGAVAAVVPFARRMLRLRTAPASTSSPTSSS

SEQ ID NO: 12140 - protein, 235 aa, Zea mays
  VARIANT 39: note = Ancestral polymorphism is S, Derived polymorphism is C
  VARIANT 69: note = Ancestral polymorphism is R, Derived polymorphism is L
MAGTGPIPGVIVLALGAGALGFPDALRQLLDAVAGRPRSPLLDIAACVLAMAVATAYALGTMLLARFVRKAPGGLGAAAGVGGDAPRADLFALLTLVVSLGAALLVSACLFLTAPGAGGLLYRTVDVLAGKSGVVSALVAVAAAAAIPFVRRVLCAAPASTRILGFAVVGLFVLAAFVLLPTLGGGLYKHRVSVSVGVMVMALARRFGKLARAASLAIVIVSFALIGLLTTACAK

SEQ ID NO: 12141 - protein, 159 aa, Zea mays
  VARIANT 54: note = Ancestral polymorphism is D, Derived polymorphism is Y
MGHLFLLLVALLLLTSTRAAAAVHAKASVIEVSRQWQQPDNGYGGEFRWHQRRDRIQAADLRGEVQVLWPLRGSAGARISAAASEEEEGGSRPWQQQSCCCCCRWKSKSNAGLLLRPLQLQAPELAMQVWAAHPGPLKDETPALVDRNQSSAALVDIMY

SEQ ID NO: 12142 - protein, 297 aa, Zea mays
  VARIANT 5..297: note = Ancestral polymorphism lacks residues 5 to 297
  VARIANT 205..297: note = Derived polymorphism lacks residues 205 to 297
MLVPRILIPIFPICAGDNYCPVPLWERKFCCNAYDIPWKRFCKKKQTIELYKNVMDWDDSGALENFEAAKERFGAKYHGEPFEDPLLDPDMYIDEVDHLCEVDPELVADLDKVPDVDKVVELQLVANLGCGEPVADLVPMGHGELGAIPTPTGWGEQDANLTPTGWGEQDANLAPIGWGEPVANVAPMGWGEPISLTPGTAWEGQTNQTQHSNKWSNNNFGWNSPLDQPQCTLSNWNDNSHGDRSSNNWYQQEVDLGHMPFGTRRNLNGNSRRWIWAACLLGLGGSRMVMVVAAAIV

SEQ ID NO: 12143 - protein, 398 aa, Zea mays
  VARIANT 144: note = Ancestral polymorphism is G, Derived polymorphism is A
MSSYYRGMALLCAPIESYLRANAPYPTCVVSDFVHPWTKELAANLGVPRLTFFSMCAFGLLCQRNLERFNAYDGVQGSDEPVVVPGLEKRFVVTRAQAPGGSFFRGIPVPWWEEFADYVERAQAEADGIIINTFLELEAEYVAGFAAARDLKVWTVGPVSMYHMSRTTLASTLASRGLRASVIDPDECHQWLDGKEPGSVVYVCFGSISQAEAKQVVELGLGLEASGHPFIWAVKNAGEYDETVREFLRDLEARVAGRGLLLRGWAPQLLILSHDAVGGFVTHCGWNSTLEAITAGLPVVTWPHFVDQFLNEKMAVEVLGIGVSVGVKEPLTYQITKKEILVGRDVVEAAVRSVMGGSEDAEDRRRRARALASKAQLATQIGGSSHGNLQDLVKRFEA

SEQ ID NO: 12144 - protein, 393 aa, Zea mays
  VARIANT 352: note = Ancestral polymorphism is Q, Derived polymorphism is H
MGDGQCELVVDNHCQLRHRLDLSGAEDLFSVIGTWEERTDDGGAGDGGGGGSSAPAMRAYRQISCSAGAVAATRLTGKSRRRTGEEEEEKGSGGSAPGPAHKKHNKAGSAVTDDDEGAPKISHVAVERNRRKQMNEHLTVLRSLMPCFYVKRGDQASIIGGVVDYIKELQQVLRSLEAKKHRKAYAEQVLSPRPSAGGVSTSVSAASPRHLAVKSVAPLSPRMAVPISPRTPTPGSPYKAAASGVAGCCRLPLLPPYMLSSSAAAAAASYSHDQQQHYSTQTTTYLPTLDSLVTELATQQAACRPAAAAAGLALPDVKVEFAGPNLVLKTVSHRAPGQALKIIAALESLSLQILHVSVSAVDDTMLHSFTIKIGIECELSAEELVQEIQQTLL

SEQ ID NO: 12145 - protein, 164 aa, Zea mays
  VARIANT 26: note = Ancestral polymorphism is S, Derived polymorphism is F
MWQQKELCDCRETTAVASVAEDLWLSSFPVGTEWENIDKIKEFNWSFENLEKALEEGGELHGKTVYLFGSTEPQLLDVNGESKIVLIPIVVAVDCPFPPSDKIGINSVQRENEEIVPMKAMKMAWVPYVPLEDRLSRIDSLKTKIFTLGCTQRRSALKHLKHTW

SEQ ID NO: 12146 - protein, 787 aa, Zea mays
  VARIANT 58..787: note = Derived polymorphism lacks residues 58 to 787
MSIAAVRSSSPGPSPRPCCGLRRSADSSPFRPAVSPLDSPQRSSSVCKNSGRASPRTWGAEKENDPRDAAPAASARTHKVRSSGGGGGGAKSFMAPTISASSKAVAPAFTPRKKVFGERNNDAVPSSPVDLAHSSKPRAAHPLLPEEALGVPRRLRLSLDGASALPSAAGPVVSRGAPSFGGDEAAVMVENPAVSESHHDVALADAEVVAAPYDPKTNYLSPRPRYLRYQPNRRLEIYRHGGGSVRGLEDMFASQSSSEEVDTATTTEEEVSGEGQPDDSSEEETSAMAPPPEARAQSTAPALDRLLLPQPALDSPLARVLTPEPKESPRAGGVLIPERERAVSPARARPKKKRSPVRFLLAPLALVLLMAAAFVCVPPPPGYPVMLNTSMSKVSVLLSVQELHPVELAARLKQWSSSSLDFVTSYWEAIASYQERPVLGPHLAANVTAAAAEVDADYAVGFYYSAAQTSPTSLELGTHDVVSENDTEMIAGPDVEDPVTCDDPDAEPIDDIEMEQEDLSEVPSAMEEVNVDAVVEEFDDEMAEEVSGGSSGEETAAFIQNSDIPSQSTPEPEQAKGIDEVSLQQDVQTEDSEDHADGKEDQPAQHGQKLGSDMWSSYLDKVSDPAAIGAALAAIIVAAVVAFLYMRQKQTRVASNEPAEQVEQVEQVERVEQVEQVDQVETLSDSGSSQGHVVAKGSLFHSPGVEASGPSQYSSSLSSGLGRRRNTKGEGLEPVVSRRDSTAQSTSSYGSFTTYQKIPAKKGNKEDEAMTPVRRSSRLRNVKTPES

SEQ ID NO: 12147 - protein, 311 aa, Zea mays
  VARIANT 3: note = Ancestral polymorphism is R, Derived polymorphism is I
  VARIANT 6: note = Ancestral polymorphism is G, Derived polymorphism is R
  VARIANT 77: note = Ancestral polymorphism is R, Derived polymorphism is L
  VARIANT 166: note = Ancestral polymorphism is S, Derived polymorphism is F
  VARIANT 243: note = Ancestral polymorphism is P, Derived polymorphism is T
  VARIANT 250: note = Ancestral polymorphism is R, Derived polymorphism is W
  VARIANT 255: note = Ancestral polymorphism is E, Derived polymorphism is V
  VARIANT 280..311: note = Derived polymorphism lacks residues 280 to 311
  VARIANT 282..311: note = Derived polymorphism lacks residues 282 to 311
  VARIANT 285: note = Ancestral polymorphism is A, Derived polymorphism is V
  VARIANT 287: note = Ancestral polymorphism is A, Derived polymorphism is V
MEIRFGRQLYLIPRTLPFMQLNAMSSFSAGHGRRPKKKPYHREPGLDKAMDLQKKPALLLRLRDLILAQKTGSLLVRDLEKEVGFVQKWDFLSLIGRHPNIFHVSGGSASRKPISVTLTEKARKISCEDADARELMEPILVRNLRKLLMMSMDCQIPMEKIELIQFELGLPKNFKSNLIPRYPDFFSIHDVKGLDRLCMEHWDSSLAVTIREKKSFEGFQICSRGIPKDGNVLGPFAFKLKYPAGFRPNWKYLEEVVRWQKMAFPSPYLNVRRVESATPQARKRAIAVLHEILSLTMERRLTSDKLDIFSQ

SEQ ID NO: 12148 - protein, 129 aa, Zea mays
  VARIANT 59: note = Ancestral polymorphism is A, Derived polymorphism is P
  VARIANT 48..129: note = Derived polymorphism lacks residues 48 to 129
MQGCRGRHQRHPPAIPADCLACPSILLPTPPSILARALRTHSIHASLQQQTPIPVVALASLLFVASASASTPLFDAFAADSDFWCTLFSTARARAALAMASTGTRRSYRSSSSRVVRGSREQHAGIRRS

SEQ ID NO: 12149 - protein, 190 aa, Zea mays
  VARIANT 37: note = Ancestral polymorphism is C, Derived polymorphism is W
  VARIANT 53: note = Ancestral polymorphism is A, Derived polymorphism is V
  VARIANT 64: note = Ancestral polymorphism is G, Derived polymorphism is R
  VARIANT 90: note = Ancestral polymorphism is T, Derived polymorphism is M
MEGPRVRSPYATSSSSSPPHCAATSSSDARMEGPRPCAPKSQNVCTIRPLVTAMCFHQLSEGMGLGGCILQAKYVARMKAGLVFFFSTTTAFGIALELALTKMYRENSPTTLIVVSLFVYPIVKKGLPKKIREVTDCYFLPHRSWPSALTTYGVVCAASFGAGMLLEVWINKRKWSVSGRWISHYGHSQL

SEQ ID NO: 12150 - protein, 396 aa, Zea mays
  VARIANT 282..396: note = Derived polymorphism lacks residues 282 to 396
  VARIANT 280: note = Ancestral polymorphism is D, Derived polymorphism is V
MVCIGSLLRALVLRAASSAGRRRGPRILCGRATDVRVTPRHGHGWRGFRAVTGRMMLDSSESASSAAAAAAEAGAGAVAGQAQPQRRAVGAVPQAHDGGYASGGWEREDGKLSCGYSSFRGKRATMEDFYDVKLTEIDGQAISLFGVFDGHGGSRAAEYLREHLFENLLKHPDFLTDTKLAISISSLQLYCRLPVAIIVGATTCLSAKLEFKTGETYQKTDTDFLESEASAFRDDGSTASTAILVGDRLYVANVGDSRAVISKAGKAMALSEDHKPNRIDERKRIENAGGIVIWAGTWRVGGVLAMSRAFGNRLLKPYVVAEPEIQEEQFSDELECLVLASDGLWDVVENEEAVSLGKSEDTPESAARKLTEIAYSRGSADNITCIVVQFHHDKTG

SEQ ID NO: 12151 - protein, 248 aa, Zea mays
  VARIANT 214: note = Ancestral polymorphism is A, Derived polymorphism is V
  VARIANT 187: note = Ancestral polymorphism is R, Derived polymorphism is K
  VARIANT 180..248: note = Derived polymorphism lacks residues 180 to 248
  VARIANT 173: note = Ancestral polymorphism is D, Derived polymorphism is V
  VARIANT 169: note = Ancestral polymorphism is R, Derived polymorphism is W
  VARIANT 165: note = Ancestral polymorphism is Y, Derived polymorphism is D
  VARIANT 151: note = Ancestral polymorphism is P, Derived polymorphism is H
  VARIANT 136..248: note = Derived polymorphism lacks residues 136 to 248
  VARIANT 126: note = Ancestral polymorphism is M, Derived polymorphism is T
  VARIANT 122: note = Ancestral polymorphism is I, Derived polymorphism is L
  VARIANT 103: note = Ancestral polymorphism is L, Derived polymorphism is Q
  VARIANT 96: note = Ancestral polymorphism is C, Derived polymorphism is Y
  VARIANT 77: note = Ancestral polymorphism is Y, Derived polymorphism is D
  VARIANT 73: note = Ancestral polymorphism is Y, Derived polymorphism is C
  VARIANT 71: note = Ancestral polymorphism is A, Derived polymorphism is T
  VARIANT 67: note = Ancestral polymorphism is E, Derived polymorphism is K
  VARIANT 66: note = Ancestral polymorphism is S, Derived polymorphism is L
  VARIANT 37: note = Ancestral polymorphism is G, Derived polymorphism is R
MTTSMDCEQLEKEKVVIKQPVEILKGKPYSEHLRSMGHVDNIEDYHIALNLDQTLNQKLYNVPFTLKNDLAIYGCLYVTIIATDSKVAQRKYKLTCPEQYDLLISDEIPNKNKYPQLYKMVLKHMMHGPCELINPKCPCTEGHASCKNHYPIAFSNSMLQGKDSYSIYRHRDDGRKETVRGWELDNRWVVPYNPYLHRLLNCHINVEACGSIKAVNTCSNTYTKAMIVPLWLRDANKSDGDVDEIKQY

SEQ ID NO: 12152 - protein, 547 aa, Zea mays
  VARIANT 11: note = Ancestral polymorphism is T, Derived polymorphism is M
  VARIANT 15: note = Ancestral polymorphism is E, Derived polymorphism is G
MEFSPRAAELMTLLESRMINFYTNLKVDEIGRVVSVGDGIARVYGLNEIQAGEMVEFASGVKGIALNLENENVGIVVFGSDTAIKEGDLVKRTGSIVDVPAGKAMLGRVVDALGVPIDGKGALSDHERRRVEVKAPGIIERKYVHEPMQTGLKAVDSLVPIGHGQRELIIEDRQTGKTAIAIDTILNQKQMNSRKTLGQIHLRKRITAKNRTPRSHFSFSKVQYRSHKGASPISSGDANASPTRGPPTLNCATFLLLADRGSLVHSSGFPAASGSGPSLNPDVASTPSSSFFQGVGSALEAATAPAEPGEEVQQGAIEALNVAALPGVPQDELFGAISQNLGIALPQVPAAPPAAPIHQDIEPMIQSAKSSIYNNLTTLHGSMDPKEATELMETIFYKKSQILQELERLNGLINGPILWKDGWDTIRNPQSGKEYQPNTLDMIWRSLQRYGLNSDYYKNFLNERVHTMENEKSTKLKLEDLTIAKLDSLNQAKLIVGRLELENEIRIIKKELRYLDFSSMKKVGKCIAMIGYKSQNSSYTMLENKLI

SEQ ID NO: 12153 - protein, 349 aa, Zea mays
  VARIANT 39: note = Ancestral polymorphism is L, Derived polymorphism is H
MHPSCSPLAVPPGFRFHPTDEELLYYYLRKKVAYEPIDLDVIREVDLNKLEPWDLKDRCRIGTAEPQDEWYFFSHKDRKYPTGTRTNRATTAGFWKATGRDKAIFLGNAGRRIGLRKTLVFYTGRAPHGKKTDWIMHEYRLNDDNVEVPPITEDGWVVCRVFKKKSIQRGFDQLGTASAGDDDELQSFHSPGGVMTTLAEQKHGLLHQLTHGGVVVPAFDPCMNLPHLTSAEGQLAATAAFTSGTSAVAMNLLDMGRCSRHNHNHNMLKMTTTPCGSASDMPLNSGERFGAAADWSILDKLLASHQNLDQLFHCKFGGTTFAVPHHYQQEMQQQHMEISASSLHRLPLH

SEQ ID NO: 12154 - protein, 129 aa, Zea mays
  VARIANT 45: note = Ancestral polymorphism is V, Derived polymorphism is L
  VARIANT 67: note = Ancestral polymorphism is E, Derived polymorphism is K
  VARIANT 111: note = Ancestral polymorphism is A, Derived polymorphism is D
MARGGNGIPPASQDAHHFAAIPASQDRGWSFAQEDPHHPSVRRHVHAAGTTCASRGLPAQARHKNEEKPAHFIPGISNSRPSHQATEEQWDSKPTSSVAIILMEALQHQKAELKEKAHQLKGRFPYFRK

SEQ ID NO: 12155 - protein, 146 aa, Zea mays
  VARIANT 14: note = Ancestral polymorphism is N, Derived polymorphism is H
MDRTYEMATSFYSNSKQQTSVAPIAEEADAHRLRTREQFARGAARSRRMDEIPAGPPVSGASERALPAQERSKQEAAGQEHHIPVFSNPDLGQQEQEEQPSSWPTPAAPPARAPMDDHSKTQAVKDRLKDKTAKVAAKAVRVLFGN

SEQ ID NO: 12156 - protein, 122 aa, Zea mays
  VARIANT 104: note = Ancestral polymorphism is D, Derived polymorphism is G
MVNVKDVDRMRREMQAIEDDIANAEKGKAALEDKVWEVEAKLVTKLEELERHADQCNQALKKLKPTVAFQYMIDSKGSSPAEMLGMDFHELIEIPHDNRRRYHDDVSVIVISFEGRIWRSCV

SEQ ID NO: 12157 - protein, 211 aa, Zea mays
  VARIANT 2: note = Ancestral polymorphism is E, Derived polymorphism is V
  VARIANT 104..211: note = Derived polymorphism lacks residues 104 to 211
MELLVLGPFEVLRSELHQEGAPVEPLLRGNPMESAQERRVIVWPRRPLDDFSPVFHNPESPTHHGVAESTCNCKPTKSSRAPTPPNRVASEIEQGLEEPGERPSEEEDQQQAGGGGEVVGVGGRGIYDDNPVEAGGATARLPDPIPAQVNPPPVSIPLNLKPQPVTPPSNNGVVTVAVCSDLVGLDAGGARFGSISLWLGFVSELQWVELH

SEQ ID NO: 12158 - protein, 380 aa, Zea mays
  VARIANT 249: note = Ancestral polymorphism is K, Derived polymorphism is T
  VARIANT 220: note = Ancestral polymorphism is G, Derived polymorphism is C
MESPRTLEALTNDLVVEIFLRIGSPADLVRASAACVAFCRLIANPSFLRRYRSVHPPLLLGLLDPYGDIEPTETPHPSAALAGAVARAADLRFGEYFPSSKLSGYCVSDVRDGHVLLTITPYLEDDEDEKLVPDLAVCDPLARVCLRLPPIPDDLLASVQVQQQDLVHYSCDTFLVPSGDEEDVTSFRVIVMMRSTQMLVAFIFSSTTGDWSAGSPFSLGSLRIPYDNIPSYAYGCFYWKVESENRLLTLNMSSMEFSVVDLPPGPDRSFVIMVEAGESRLGMFSLINHGTTLCYAIRQIGSEKSNQLEMDSVIPLPEGYIYFRIHGSYEGHILIFGYAFSEDACFALEIKTMKIERVCRKWRGFCPYFVFLPSMSQRRI

SEQ ID NO: 12159 - protein, 139 aa, Zea mays
  VARIANT 113..139: note = Derived polymorphism lacks residues 113 to 139
MEAAGGGSYRVCDTVVLVCLACASALIVSTMAVCFRRAFANGYTASAGATAANGRSQCGLAPSALSAIPKLAYRRGAGAGAGWAQCAICLALVRDGETVRLLPACGHLFHVECIDLWLRSHATCPLCRRDVGEEPHEKV

SEQ ID NO: 12160 - protein, 201 aa, Zea mays
  VARIANT 67: note = Ancestral polymorphism is R, Derived polymorphism is W
  VARIANT 145..201: note = Derived polymorphism lacks residues 145 to 201
MPRQHRQRQPPSVRPNGCSLVCYGIVVATASLLLLAILAATVSIVKACALAGAVAVVFSAAGYVSRWCAAEDGAAHALALPTTMATPAARGRAVCGLVDAAIDALPAFAYARPATCGAESSSKSGRLALCPVCLEEVEAGEMVRQLPACGHLFHVECIDMWLHSHASCPLCRCDVSPQAVAMTVTEAADPPHGALPVMVSC

SEQ ID NO: 12161 - protein, 204 aa, Zea mays
  VARIANT 82: note = Ancestral polymorphism is R, Derived polymorphism is S
MDWCLCCIRVYTLSIANSLYLGVTGILVYVLARSHSRTTSGIVVASVFLVLWVSIGAVIYASLCFAFFPWAALENARLCCVRCTAGWLRRPSGGGGSALPQYAVRSRSHAMNELPGEPTVRAGEARVAAAADIPAYELRDDAWQGQPDGSSDCAVCLGEMETGDMVKRLPVCLHMFHQQCVDKWLNNNSTCPVCRCVVFAPLPS

SEQ ID NO: 12162 - protein, 183 aa, Zea mays
  VARIANT 104..183: note = Derived polymorphism lacks residues 104 to 183
MSADEPDTSCYRWSRDFVVAHAIFASGLVTAPVAVLLLVNRPHSGRAIFFAAFAALCTAVSLVLCLHFYAELRSPPWPRWLSASSTSGPRQDEEASRSYVAGEGTTTLAMSTHALRHPEQLAIHRAEVHAAVLAAGRFFPSYDSVGDNGVAAEDCAVCLGEVETGESLRQLPACQHYRIRSHT

SEQ ID NO: 12163 - protein, 481 aa, Zea mays
  VARIANT 423..481: note = Derived polymorphism lacks residues 423 to 481
MAMDLLAMPVLLSADSAAAVLVLLSVATVVALKHLLSSWRRSPRRRLPPSPTPLPVIGHLHLLRPPVHRTFHELATRLGAPLMHIRLGSTHCVVVGSADVARELIHDHDATISGRPVSVLSRLFSYGSAGFAFTPYSPHWRFLRRLCVSEVLGPRTVEQLRHVRRGSLVSLLRSVLASSARGDNKVDLTRELIRFSTTSIIRMVASDVGVTDEAQELVKGVAELLGAFNLEDYVPLCRGWDLQGLRRKANGVHRRFDAVLEQMIRHKEEARDRERSRGGAAQEDKKGWPATCKQRNKDLLDILLDMAENETAEVKLTRENMKAFIVATFKETLRLHPGAPIAHRESTGEMVVRGFTVPPRTAVFFNLWAIGRDPSCWEEPLAFRPERFMPGGASEGLPPRGQQFQFIPFGSGRRACPGMGLAQQSVPTVLAALVQCFDWAAVDGETAAMGMDESDGGLVCARKHPLVLRPTARLNPFPAVV

SEQ ID NO: 12164 - protein, 1095 aa, Zea mays
  VARIANT 60..1095: note = Derived polymorphism lacks residues 60 to 1095
MRLVICTVCFVIPTAKRQPSTCCSSAPSARTTGNTWASSGTLSLTFFRLFEDAKKAFGRQFFMEIVAVVAWTIWKQRNDCIFRNVIPSFHSCRICFNDTLKLQMFRFSSTLKLHVSLWFINEQKHRHEVTILLQDIVDIVVQDMIVDPQSILNVVNSSKRLISDDDGAFSYYEPELFASVSSRTSIRYPYFDQQKEQVKRFYLLLSTKEKAAEIPSNLEARRRISFFATSLFMHMPAAPKVRSMLSFSVITPYFMEEVKFSDEELHSNQDEASTLSYMQKIYPDQWKNFLERVDTKVTNDEIRYWASYRGQTLSRTVRGMMYYRKALKLQALLDMTNDQDLYEALLAIEQGKNKRNIHQALAAELEALADMKFSYVISCQKFGEQKIKGDPHAQDIIDLMMRCPALRVAYIEEKEVIVNNCSHMVEGKEVIVNNCPHKVYSSVLIKAENNLDQEIYRIKLPGPPIIGEGKPENQNHAIIFTRGDALQTIDMNQDNYLEEAYKMRNVLQEFVRHPRDKAPTILGLREHIFTGSVSSLAGFMSYQETSFVTIGQRFLAEPLRVRFHYGHPDIFDRIFHLTRGGISKASKTINLSEDVFAGYNSILRRGNIIYSEYIQVGKGRDVGLNQISKFEAKVANGNSEQTISRDIHRLGRRFDFFRMLSCYFTTVGFYFNSLISVVGVYVFLYGQLYLVLSGLQRALLLEAQTQNIKSLETALASQSFLQLGLLTGLPMVMELGLEKGFRAALSDFILMQLQLASVFFTFSLGTKAHYYGRTILHGGAKYRPTGRKFVVFHASFTENYQLYSRSHFVKGFELIFLLIVYHIFRRSYVSNVVHVMITYSTWFMAVAWLFTPFLFNPAGFAWQKIVDDWADWNRWMKNQGGIGVQPEKSWESWWNSENAHLRYSVLSSRILEVLLSLRFFIYQYGLVYHLNISQDNKNFLVYLLSWVVIIAIIGFVKLVNCASRRLSTKHQLVFRLIKLLTFLSVVTSLVLLYCLCRLSIMDLIICCLAFIPTGWGLLLIVQVLRPKIEYYAVWEPIQVIAHAYDYGMGSLLFFPIAVLAWMPVISAIQTRVLFNRAFSRQLQIQPFIAGKTKRR

SEQ ID NO: 12165 - protein, 218 aa, Zea mays
  VARIANT 45: note = Ancestral polymorphism is P, Derived polymorphism is L
  VARIANT 85: note = Ancestral polymorphism is A, Derived polymorphism is V
MVIDLLGPSLKGLFNYCSRKFSLKTVLMLADQIVSLSYGSTFFLPNNPAQGVAPLGSTNPSVNINDNSLNLVSRSPLYDTNPRYARVQREGLVSRHEKSINLAQEESLALRRNASSSGIEHLAAQKKRNSTENEGEYKVHRSESTKSLSTKAYSSSYAVVASEDEDVCPTCLEEYTPDNPKIITKCCHHFHLGCIYEWMERSDTCPICGKEMEFCESP

SEQ ID NO: 12166 - protein, 68 aa, Zea mays
  VARIANT 7: note = Ancestral polymorphism is A, Derived polymorphism is E
MEEFQAAVRGGDSRGSAEAEAEIYNAGGAEQCDVLEVSNNTEIAAGEARKPDLTAKKAKLGESMASAR

SEQ ID NO: 12167 - protein, 195 aa, Zea mays
  VARIANT 10: note = Ancestral polymorphism is D, Derived polymorphism is Y
  VARIANT 38: note = Ancestral polymorphism is P, Derived polymorphism is S
  VARIANT 62: note = Ancestral polymorphism is G, Derived polymorphism is R
MDCLSCVMPDVGFTDFAMQSQQAMQFCRGFEEASKFLPDESKLVIDLEKPASVTSLVANIKGENRFAEVKAEKADVQAEIHRGKKHFYGDDLDAEEGRRSKHSAPAIDTDHLVREMMDKVLLCNGETCSKGVKELHEALQHDVAKNSHGVHGKGPQRGQHKEGMVSSIASLPAWSRSRTTTSRWSRRHPSRALTP

SEQ ID NO: 12168 - protein, 319 aa, Zea mays
  VARIANT 78: note = Ancestral polymorphism is C, Derived polymorphism is S
MPAFKAPAPGFAVRFSPFHENRLLAATSQHFGLVGNGHLIVLDLAGGGPGAAPAPVFSFPTSDALFDCAWSESHDSLCAAASGDGSVRLFDAALPPAQNPVRLLREHAREVHGLDWNPVRRDAFISASWDDTLKLWSPDRPASVRTFRGHEYCVYAAAWSARHPDVFASASGDRTARVWDVRDPAPTLILPAHDHEVLSLDWDKYDPSILATASVDKSIRVWDVRAPRAPIAQLAGHSYAVKRVRFSPHRQGMLMSCSYDMTVCMWDYRAEDALLARYNHHTEFVAGIDMSVLVDGLLASTGWDEMVYIWPFGTDPRAM

SEQ ID NO: 12169 - protein, 201 aa, Zea mays
  VARIANT 22: note = Ancestral polymorphism is P, Derived polymorphism is L
  VARIANT 26: note = Ancestral polymorphism is E, Derived polymorphism is V
  VARIANT 27: note = Ancestral polymorphism is E, Derived polymorphism is G
  VARIANT 31: note = Ancestral polymorphism is T, Derived polymorphism is M
  VARIANT 40: note = Ancestral polymorphism is M, Derived polymorphism is L
  VARIANT 48: note = Ancestral polymorphism is R, Derived polymorphism is I
  VARIANT 139: note = Ancestral polymorphism is L, Derived polymorphism is H
  VARIANT 153: note = Ancestral polymorphism is R, Derived polymorphism is W
MFGSAEVILTGSVKRKSFVFDPISIEELIATPLLIHNFHMRLINLENRVAFARIFFPSEAKIVMRIAQADSTEEFVGITNFSKLKEVDLNETPTMQNTRLRERLDALTKTVELGRRYFPHCSDVLDKFLNEESTDLIFLETGSPEDQRLKRMRFSELKEDVRKAFTKDKAAVAAIASSASSSSSPRCEGRGRSNKRSRPSR

SEQ ID NO: 12170 - protein, 176 aa, Zea mays
  VARIANT 19: note = Ancestral polymorphism is T, Derived polymorphism is I
  VARIANT 20: note = Ancestral polymorphism is E, Derived polymorphism is K
  VARIANT 24..176: note = Derived polymorphism lacks residues 24 to 176
MTWHAVRCGDEASATHLETECFKKYEKAGKTFYNSQIAATVRWLSSATPSQMRDCLDALIDRTKDDGASGCPDIVPESPPTSPEIVVGARSGETSNDKPQHICELKSSDESAKGAAASTGNMVLPAIPTFKEFLSQKGRDRAKCYSNSNATNQPSGICRKSSGHVDKEEASKRMKS

SEQ ID NO: 12171 - protein, 225 aa, Zea mays
  VARIANT 127: note = Ancestral polymorphism is A, Derived polymorphism is T
  VARIANT 122: note = Ancestral polymorphism is A, Derived polymorphism is S
  VARIANT 112: note = Ancestral polymorphism is A, Derived polymorphism is V
  VARIANT 103: note = Ancestral polymorphism is T, Derived polymorphism is I
MLNSFLDQDSRVRYYACEALYNIAKVVRGDFIIYFNKNFDALCKLSADSDANVQSAAHLLDRLVKINEFVKLGGEQLVPYYADILIAFTLITDFFVCKVARETNEELRAIKADPTEGFDTRAILSIAKRFSIKSFGNEITNKKFEAKIYVLTKDEGGRHTAFVTNYNPQFYFRTTDVTRRVELLGEMKMVLPGDNGWDQDAHDQGAVDNSSFPTVLNCVVNSQHA

SEQ ID NO: 12172 - protein, 447 aa, Zea mays
  VARIANT 47..447: note = Derived polymorphism lacks residues 47 to 447
  VARIANT 92: note = Ancestral polymorphism is G, Derived polymorphism is D
  VARIANT 286..447: note = Derived polymorphism lacks residues 286 to 447
MDDRLPHGQCFFQMLLRRVRIGEHVDFVHHVDEVCDVVPGILVADLEPVPGYCSVWYFYCAKKYTDTQGKLQVYRKRTITGGGGACWHPEIDRKIVQGSGGGTFCKLTYGRKTVDGSFDRMGWHLVEYDDDLAVTASNYVLCKVYVKAKSSLPSSSSGQNENASSSKPPTTAKKMKQARDGGDQPETSSPAKLIQQPEDVQVSDHQHGHGGGGDHPEAPPAKLSQQQESYPPGEDVQESDHQHGHGGGLDLDFQEFSAKDCMDIMEMLRDEPNHPEAPPASLIVQQQEDVQQAAGPYAAESEEHGHGGGFDFKNFEEVNADEYKDILAEMLRDEPEPEPEPGMQQPTRVVVAEPPEHEDENVQEPEPEMQQPTTVAVAEPPEHEDENVQEPEPELGMQQPTTVAVVEPPEHEDENVQLHAEWGAHICNQDAARSSLLQGPAPHSLLF

SEQ ID NO: 12173 - protein, 396 aa, Zea mays
  VARIANT 77..396: note = Derived polymorphism lacks residues 77 to 396
  VARIANT 265..396: note = Derived polymorphism lacks residues 265 to 396
  VARIANT 272: note = Ancestral polymorphism is P, Derived polymorphism is S
MVFTAEEEEVPQQLPKTSSTSLTTSIGDGIDSPQPLPALTVAWTSLSCFTGRMSEPARCQGEGGFGRVYKGHMENGQVIAVKQLDRNGFQGNREFLVEVLMLSLLHHPNLVRLIGYCADGDQRLLVYEYMLLGSLENRLFGPAGKEPLDWNTRMKIAAGAAKGLEYLHDKANPPVIYRDFKSSNILLGEDYYPKLSDFGLAKLGPVGRKAIDHTQPSGEQNLVAWARPLFRDRRKFCQLADPLLHGRYPKRGLYQAIAVAAMCLQEQAASRPLIGDVVTALSYLAAHPYDPNAPSTKDSKTCPSTPRAKTHRRTTSVPDAQHAAESLILNFPDMRKETVRGGEFEKDRTEGSGSSSSFGRNDCLDVPRLLSVPNGKVCSEGNNIQKSTVKVGTREN

SEQ ID NO: 12174 - protein, 322 aa, Zea mays
  VARIANT 192: note = Ancestral polymorphism is S, Derived polymorphism is F
MASSTTGHCIFLALLLLLASTACYGQLSTSFYSTSCPALESTVRSVVSSAVASNRRMGASLVRLFFHDCFVQGCDASILLDDVPGSFVGEKTAGPNANSVLGYDVINSIKTAVEANCPGVVSCADIVALAARDGTVLLGGPSWNVPLGRHDSTTASLSQANSDLPSPASSLSTLIAKFGNKGLSPTDMTALSGAHSVGFAQCRNYRNRIYNDADINQQFAKLLRTNCSATQGASDTNLAPLDVATQLSFDNAYYGNLLKKKGLLHSDQELFNGGSQDALVQNYSSNANFFFADFVTAMIKMGNINPLNGTAGQIRAKCSVVN

SEQ ID NO: 12175 - protein, 104 aa, Zea mays
  VARIANT 76: note = Ancestral polymorphism is C, Derived polymorphism is R
  VARIANT 61: note = Ancestral polymorphism is R, Derived polymorphism is L
  VARIANT 51: note = Ancestral polymorphism is S, Derived polymorphism is I
  VARIANT 32: note = Ancestral polymorphism is V, Derived polymorphism is L
  VARIANT 22: note = Ancestral polymorphism is W, Derived polymorphism is R
MLCLPRLWQPRLQDRVDFSSLWRWKIRLDASVMLSKGNESLLIPDNAQVISSSVVDRCPHRSETQSVAHAEGEDDCLILGTIDSYGHLIVSRLDIMADGNFTIL

SEQ ID NO: 12176 - protein, 317 aa, Zea mays
  VARIANT 23: note = Ancestral polymorphism is S, Derived polymorphism is F
MASSTITTGGRHYFLLVAFSLLSSAAYGQLSQEYYASNCPSLDQIIKAEVDRTLFTDQPPAGGRRMGASLLRLFFHDCFVQGCDASVLLDDDLTKLIVSEKKAAPNDKSLRGFDVINRIKGEVEKACPAVVSCADILALVAKQAVISLGGQGWPLLLGRRDSTTASMVQASTDLPSPNSDLPTLIAAFDKKKLTAREMVALSGAHSIGLAQCANADKTTQQQRCSNANSNSLLPLDVQTPEGFDNLYYGNLPNKGLLHSDRVLTDRADLRDLVRQYASNQTLFFVDFASAMKKMSEMSLLTGANGEIRLNCTRVNYN

SEQ ID NO: 12177 - protein, 515 aa, Zea mays
  VARIANT 46: note = Ancestral polymorphism is G, Derived polymorphism is R
  VARIANT 54..515: note = Derived polymorphism lacks residues 54 to 515
  VARIANT 62: note = Ancestral polymorphism is G, Derived polymorphism is D
  VARIANT 65: note = Ancestral polymorphism is N, Derived polymorphism is I
  VARIANT 83: note = Ancestral polymorphism is P, Derived polymorphism is L
  VARIANT 99: note = Ancestral polymorphism is G, Derived polymorphism is D
  VARIANT 140..515: note = Derived polymorphism lacks residues 140 to 515
  VARIANT 143..515: note = Derived polymorphism lacks residues 143 to 515
  VARIANT 151..515: note = Derived polymorphism lacks residues 151 to 515
  VARIANT 160..515: note = Derived polymorphism lacks residues 160 to 515
MPSWKPLAGGKLKKPLTDKQRAAAEQRLSHLRAHLILRSLDSPAGGARSLPPPQEAALDALGLLIFFRLDLQSGAPRPDLIAPLVAYYDRVCKRSFVRGVRVGVSRHHIIRALCLPSKPASAAPAPADVDPAAVVAAVMQLLQDYVLLPFQGDDRCILPQQVAAAEQMVREGAAHRVDWGELIWGLVEKEMLELPKREDWVCYYGPHLQRLIYAQKPHLLELVEEGPVQEPSANVDLKRKSMVELEQGDGDREAGNNVKSKSLNDSESGKAGARNDGLDELELADAVTRNKVMGEFGLGDVDARKNSIVKLEVVDEDARCKCLNEIQAVDAINNNIVELDAANEDARCKSLNDESEPVEEDVKGPSFDDMNTVDEHVDGTNTDGSCLGFVAVEAVPAVNVEPDVVPDYPVIPTASPTNIKRLKTFHKPSTNTKSNIGQNFSRLLEEHPKIAYDICNGPINMYKCTKKLLECGFTGKVLHIAIKILKEDWEARQIFMALDRSESVTFISNAVGDYS

SEQ ID NO: 12178 - protein, 266 aa, Zea mays
  VARIANT 229: note = Ancestral polymorphism is K, Derived polymorphism is N
  VARIANT 184: note = Ancestral polymorphism is N, Derived polymorphism is Y
  VARIANT 64..266: note = Derived polymorphism lacks residues 64 to 266
  VARIANT 59: note = Ancestral polymorphism is G, Derived polymorphism is R
  VARIANT 44: note = Ancestral polymorphism is L, Derived polymorphism is F
  VARIANT 37: note = Ancestral polymorphism is R, Derived polymorphism is I
  VARIANT 27: note = Ancestral polymorphism is A, Derived polymorphism is T
MDDSSVKAEDQTMLLEEGGQAMAAKPAYTSLTSQILRLIFMDQLLLENRLTLRAISEFGGYLLYFYICDRTNLLGESAKNYSRDLFLFLYFLLIIVAAMTSFKDIKQRDEFICVQREIRRQPQHWTDHAKKQLRVMQQLDEDHTLTQLTNAWVDLVLGGSKIQEARLIFQDLSDKYPTTCTILNGKALCSTHMGNFEDAEGLLLESLNKDAKDTKTLANLTVCSLNLGKPTTRYLNQLKLAHPDHALVKRMSSAVESFDRACQAMA

SEQ ID NO: 12179 - protein, 360 aa, Zea mays
  VARIANT 147..360: note = Derived polymorphism lacks residues 147 to 360
MDDTMGGSATRGLLGHQARDDEQAARNVVVGAGALTVARDYRRGNWTLPETMLLIEAKRKVHEERHPGDQGLARWRWVEDYCWRAGCRRSQNQCNDRWDNLMRDYKKVRAYELSGTGAGAGGRAPSYWAMGREERKERGLPTNLLREIYDAMGEVIKRRMTMGCCGSGGGGLTAASSSSLLDVPMQASPLAQVLPRPLPPEQGTHGHSSPESPERKRRRPSLDELRPGSGTPSAPAGTHACRQGRQGRHGEEEEEDDGDESSAESETEYSDDDYNVLGGAIGRCAAILSEALESREAAEERRHREVMAAEERRGRARQERREAGEQCVAGLAAAVNQLAGSMLALAAAKHEDKGGPAAPK

SEQ ID NO: 12180 - protein, 95 aa, Zea mays
  VARIANT 5..95: note = Derived polymorphism lacks residues 5 to 95
  VARIANT 10: note = Ancestral polymorphism is P, Derived polymorphism is L
  VARIANT 39: note = Ancestral polymorphism is S, Derived polymorphism is I
  VARIANT 40: note = Ancestral polymorphism is G, Derived polymorphism is R
  VARIANT 43: note = Ancestral polymorphism is G, Derived polymorphism is E
  VARIANT 45: note = Ancestral polymorphism is P, Derived polymorphism is L
  VARIANT 68: note = Ancestral polymorphism is C, Derived polymorphism is Y
  VARIANT 72: note = Ancestral polymorphism is R, Derived polymorphism is C
MPPQQQMSSPRLLRYRSAPSTLLGEVMCGDQHFPVAAGSGGHGPPYHAATDNVLVLFLAGHHSESRDYKPPCLVAAAHFMDEAAASQQQQQQLMY

SEQ ID NO: 12181 - protein, 510 aa, Zea mays
  VARIANT 154: note = Ancestral polymorphism is D, Derived polymorphism is Y
  VARIANT 140: note = Ancestral polymorphism is R, Derived polymorphism is H
  VARIANT 111: note = Ancestral polymorphism is D, Derived polymorphism is G
  VARIANT 1: note = Ancestral polymorphism is I, Derived polymorphism is M
MSPVTSIISLPNSPYLIIGSEDGTVHLWRSPSFRIERILQIGCTRPVRSLCLVGSKRVLIEKMGEVSIMDIDTSIKEPPELLLHVHPTTLVFELQPGKLSQCSMQLTNDTDQHMAFKLSSTDSVDWLEQFLPWYGIVAARSTYTLILNVFLERDTAEKRFCDMILESCTCEYNDNNMYSATTYWEKFVDQETKKVVNEVKLTALLSSSQHRQSIVAPDKVSWVEKPWIRLLSVDAHPTEPWIITGHECGHLAIRNHDTQMLLCSFKVSRGGVFCVKFIAQKQWFICSSGEGFIHVFSYETQEIQNVNNFRAYDDNSRWLPISLAVHPSRPYVLSWCRYDSEIIMKLWDWDKGWECARTFRSGGINVDHIAFDPKETNRFVATDCLDGKVMIWSLDSPEPEYHLPKTDFKGIMFLEFFTRYGRQCLIIAHEDHKAHVWDFRLRKFVSEKRKLLSREASVFLRPNVSLLLTPSSKGTCRFWDAKKFSFYGVIDNSAGGDVLGIACLMGSKTR

SEQ ID NO: 12182 - protein, 125 aa, Zea mays
  VARIANT 34: note = Ancestral polymorphism is D, Derived polymorphism is N
  VARIANT 38: note = Ancestral polymorphism is K, Derived polymorphism is R
MAEATDTAAATPPPAPAMATLSPPPKSGIPPRYNLDAKWDACLDLSIRRVAYSSLAGALAGLLLFRSPTTRWASVTLGAGVGIGAAYTECSYLFSGGPPNWSPKVSTIPSAHSEVIALSFSLNPV

SEQ ID NO: 12183 - protein, 147 aa, Zea mays
  VARIANT 79: note = Ancestral polymorphism is V, Derived polymorphism is A
  VARIANT 124..147: note = Derived polymorphism lacks residues 124 to 147
  VARIANT 130: note = Ancestral polymorphism is K, Derived polymorphism is R
MSVSPAKFEQKGDVFVSKKTDKQKKRKIKKVEDKMLGWGGHDDKKLMIPATVILRHMFTPAELRVAHMRFMLHSSFIIVLTGFSPIISRRLMKSFFLSLRLIFREECIKFGLVDNVKVCENHPQGVILVRFKDRKDGAKCIEKMNGR

SEQ ID NO: 12184 - protein, 118 aa, Zea mays
  VARIANT 82: note = Ancestral polymorphism is E, Derived polymorphism is D
MNITEKGRAIDIFTHDADYRVFLMSLKAGGVTLNLTVASHVFLMDPWWNPEVENPAHDRIHRIGQFKPIKSTRFVIKGTVEERILQLQQKKQLVFEGTVGDSPDAMSKLTEADLKFLI

SEQ ID NO: 12185 - protein, 230 aa, Zea mays
  VARIANT 5: note = Ancestral polymorphism is V, Derived polymorphism is I
  VARIANT 6: note = Ancestral polymorphism is A, Derived polymorphism is T
  VARIANT 13: note = Ancestral polymorphism is G, Derived polymorphism is R
  VARIANT 48: note = Ancestral polymorphism is E, Derived polymorphism is K
  VARIANT 80: note = Ancestral polymorphism is H, Derived polymorphism is Y
  VARIANT 126: note = Ancestral polymorphism is A, Derived polymorphism is V
  VARIANT 128: note = Ancestral polymorphism is R, Derived polymorphism is Q
  VARIANT 140: note = Ancestral polymorphism is A, Derived polymorphism is V
  VARIANT 159: note = Ancestral polymorphism is E, Derived polymorphism is K
  VARIANT 172: note = Ancestral polymorphism is D, Derived polymorphism is N
MDLHVAIKRVSKRSKQGRKEYASEVRIISRLRHRNLVQLIGWCHGDSKLLLIYELMPNGSLDKHLYSSSDVGLLPWPVRHEIVLGPRLGRNDEALNLALLYKIRTRGTGCGGGRGGLGTGSGVTVALRGLGGAGGLLLLVLPALGGGHPGGLDMGGAVEAPALAAGAAAHVDAVLLGLVAAVLAADGARAGAASGAPAAARGARGGVIGEADDVGGVEVVVVLLRRVRRP

SEQ ID NO: 12186 - protein, 160 aa, Zea mays
  VARIANT 28: note = Ancestral polymorphism is S, Derived polymorphism is A
  VARIANT 35: note = Ancestral polymorphism is G, Derived polymorphism is D
  VARIANT 118: note = Ancestral polymorphism is S, Derived polymorphism is L
  VARIANT 124..160: note = Ancestral polymorphism lacks residues 124 to 160
  VARIANT 126: note = Ancestral polymorphism is M, Derived polymorphism is I
MPCHAMPRTISSRGDDAASPVPDAMMLSQSINWIGRCMCRSLDRDGSSPYERLCRLAAGDAGIPGSRAPTRCLTDCEGTGRRTAQVLALCTRVLTCGERTRHCLAPLLAFPFLNHAKSLRNDPWLMVLGFWTAWSFATLHFHCVSVPLRLRPFVSVLQFI

SEQ ID NO: 12187 - protein, 108 aa, Zea mays
  VARIANT 38..108: note = Derived polymorphism lacks residues 38 to 108
  VARIANT 30: note = Ancestral polymorphism is H, Derived polymorphism is L
  VARIANT 9: note = Ancestral polymorphism is E, Derived polymorphism is K
  VARIANT 1: note = Ancestral polymorphism is M, Derived polymorphism is I
MEIESVKCECCGLKEDCTPHYIASVRSGFHGQWLCGLCCEAVRDEACRRKAHHGVEEAVRAHMAFCNMFKLNPAVRVADGMRQMLRRRSGDMSKPESAKKYESSVTLY

SEQ ID NO: 12188 - protein, 190 aa, Zea mays
  VARIANT 158: note = Ancestral polymorphism is V, Derived polymorphism is A
  VARIANT 144: note = Ancestral polymorphism is A, Derived polymorphism is V
  VARIANT 44: note = Ancestral polymorphism is A, Derived polymorphism is S
MANSPGVPQAHEKKLSNPMREIKVQKLVLNISVGESGDRLTRAAKVLEQLSGQTPVFSKARYTVRSFGIRRNEKIACYVTVRGEKAMQLLESGLKVKEYELLRRNFSDTGCFGFGIQEHIDLGIKYDPSTGIYGMDFYVVLERAGYRVARRRRCKSRVGIQHRVTKEDSMKWFQVKYEGVILNKAQANTL

SEQ ID NO: 12189 - protein, 129 aa, Zea mays
  VARIANT 21: note = Ancestral polymorphism is S, Derived polymorphism is L
  VARIANT 64..129: note = Derived polymorphism lacks residues 64 to 129
  VARIANT 88: note = Ancestral polymorphism is E, Derived polymorphism is K
  VARIANT 117..129: note = Derived polymorphism lacks residues 117 to 129
MTAADSAPTLEVLSPNILDLSSLPLKSLIMPLPGFEEVAATEDLAITKKGVLPPLVAAQQCRRRRIEFDRDDELFATDGVSKRIKVFEFSTVVNEPSDVHCPVVEMATRSKLSCLSWNKYSKNIIASSD

SEQ ID NO: 12190 - protein, 221 aa, Zea mays
  VARIANT 122: note = Ancestral polymorphism is Y, Derived polymorphism is H
  VARIANT 112: note = Ancestral polymorphism is A, Derived polymorphism is V
  VARIANT 110: note = Ancestral polymorphism is S, Derived polymorphism is C
  VARIANT 43: note = Ancestral polymorphism is G, Derived polymorphism is S
MPDNPTGGGAYLQTSVMAANMRDYVEVVFKNAENLVQSWHIDGYAFWVVYHSSFADDDGITKACSCPLLPLKTHIKGPAPASDPDKADIVDEAITFFRANVFFKNFHVKCSADKLLIYLTFYINIALKRLEGCRTLAVGTKAIINLGLEKVPVPGEPGFPFPGLFTLPQSQEEAELLRNYLKQIREETSGRLLNCAYRANGFPNKWWLAFAKRKFMNIVIL

SEQ ID NO: 12191 - protein, 206 aa, Zea mays
  VARIANT 25: note = Ancestral polymorphism is I, Derived polymorphism is N
  VARIANT 27: note = Ancestral polymorphism is A, Derived polymorphism is V
  VARIANT 45: note = Ancestral polymorphism is D, Derived polymorphism is Y
  VARIANT 51..206: note = Derived polymorphism lacks residues 51 to 206
  VARIANT 79: note = Ancestral polymorphism is F, Derived polymorphism is V
  VARIANT 123: note = Ancestral polymorphism is L, Derived polymorphism is S
  VARIANT 139: note = Ancestral polymorphism is S, Derived polymorphism is L
MNVAVPPQSPHLRLYDCAKSAIIKIFAFPYATVCDLYCDSGMDTDKWCDAQVGHYIGIDASASGVNYARELWENRRKPFTAEFIELDPSDDGFEAQVQEKGIQADMVCCMQHLQASWLFSRTSCFENEERAKKLLNNVSSLPKPGGYFFGITPDSSTIWTKYQKNVEAAHNKGLKTVPNSIRSENYTITFEVEEEKYELKLYTKYT

SEQ ID NO: 12192 - protein, 105 aa, Zea mays
  VARIANT 87: note = Ancestral polymorphism is R, Derived polymorphism is H
MPPSPSLLDLMSLPPDLSPSAEEAADSSSSEGSSCGLVQVVPRDLSDELLGKFEDTSEFGFEYSQSGLWSPLVLRPEVLATAVRDRRRRSRRSWRRKVRMVFCCC

SEQ ID NO: 12193 - protein, 313 aa, Zea mays
  VARIANT 88..313: note = Derived polymorphism lacks residues 88 to 313
  VARIANT 74..313: note = Derived polymorphism lacks residues 74 to 313
MDIEVEEGNVDVGNTDEPSFDVVAGSDYSTHVPTKGNDIHELEQSLGVVAVGSDCSFDLVQVSSKANVGEQLEQIEQDNLDTLIRISQHNKPKKLNVARIVPQRKKVVVDIDSAWLNRNDMECLFHDDMQLNGEPMDKKCFNIAVRMIACNDALSLLEGKYHYMDLQFCSISQFGRDPRLRAKLDINMLTKLFECWPDMEYDISDCSHIILPYSFLGHFSLYVFNMNTRSIYIMDSMTIPSWFKGNHPSMHYIHKIHHITNNMNDAMKLANPEWKNGNVLSSNLLVELLKYNNNESKDNILEELQEIIRHIRV

SEQ ID NO: 12194 - protein, 191 aa, Zea mays
  VARIANT 142: note = Ancestral polymorphism is T, Derived polymorphism is M
MEPAADGDDVHGQRRDGGHHAPVVSLRALGLADADAFMAWASDDRVMRHLKRPLCATREQAVAQIRDTVLGHPWFRAVCFGDVPVGQVSVWPYADEGGRRANLGYALAHDQWGRGIAAAAVRMVVGTVFDDLPGLERLEAVTDVANVRSQRVLEKAGFHREGVLRRYIAGRRGSGARDAVIYSFLSSDDRA

SEQ ID NO: 12195 - protein, 1170 aa, Zea mays
  VARIANT 1045..1170: note = Derived polymorphism lacks residues 1045 to 1170
  VARIANT 754..1170: note = Derived polymorphism lacks residues 754 to 1170
  VARIANT 184: note = Ancestral polymorphism is S, Derived polymorphism is R
  VARIANT 75: note = Ancestral polymorphism is V, Derived polymorphism is F
  VARIANT 3: note = Ancestral polymorphism is R, Derived polymorphism is L
MARASYLLPLFLILIHHLRSSLASSTWYGNLTAPWCHPDHAAALLQLKRSFLFDYSTTTLASWEAGTDCCLWEGVGCDSVSGHVTVLDLGGRGLYSYSLDGALFNLTSLQRLDLSKNDFGGSPIPAAGFERLSVLTHLNLSYAGFYGHIPVVIGKLPSLISLDISSIHNIDGAEIDTLYNLFDSYNLLVLQEPSFETLLSNLTNLRELYLDGVDISSSGREDWGRTLGKYVPHLQVLSMEECRLVGPIHRHFLRLRSIEVINLKMNGISGVVPEFFADFLNLRVLQLSFNNLRGTFPPKIFQLKNLAVLDVSNNDQLSGLIPKFLHGSSLETLNLQDTHFSGVTLSYLGNLTSLTDLGIDGRSISMEPPYFFVDKMDHVSTLRLSSVNFSREARSNFSWIGDLQSLKTLKISDCYSTKTMPSWIGNLTSLRSLDIRYCGSIGPIPQLIGNLTTLEYLTISDCAFTGQLLSSVGNLENLRFLQISYNHQGLSGPITPTIGHLNKLTVLILRGCSFSGRIPNTIANMTKLIFVDLSQNDLVGGVPTFLFTLPSLLQLDLSSNQLSGPIQEFHTLSSCIEVVTLNDNKISGNIPSALFHLINLVILDLSSNNITGFVDLDDFWKLRKLAQMSLSNNKLYIKEGKRSNSTFRLLPKLTELDLKSCGLTEIPSFLVHLDHITILDLSCNKILGTIPNWIWHTWDHSLRNLNLSNNAFTNLQLTSYILPNSHLEFLDLSSNRIQGQIPIPNMLTMESNYEQVLDYSNNSFTSVMLNFTLYLSQTVYLKLSDNNIAGYIPPTLCNLTYLKVLDLANNDFRGKVPSCLIEDGNLNILNLRGNRFEGELTYKNYSSQCDLRTIDINGNNIQGQLPKALSQCTDLEVLDVGYNNIVDVFPSWLGNLSNLRVLVLRSNQFYGTLDDPFTSGNFQGYFLGIQIIDIALNNFSGYVKPQWFKMFKSMREKNNNTGQILGHSASNQYYQDTVAITVKGNYVSIDRILTALTAMDLSNNKLNGTIPDLVGNLVILHLLNMSHNAFTGNIPLQLGRMSQLESLDLSWNYLSGEIPQELTNLTFLETLDLSNNNLAGMIPQSRQFGTFENSSFEGNIGLCGAPLSRQCASSPQPNDLKQKMSQDHVDITLYMFIGLGFGLGFAVAILVMQVPLGKFYRTISILRNLS

SEQ ID NO: 12196 - protein, 559 aa, Zea mays
  VARIANT 184: note = Ancestral polymorphism is S, Derived polymorphism is R
  VARIANT 75: note = Ancestral polymorphism is V, Derived polymorphism is F
  VARIANT 3: note = Ancestral polymorphism is R, Derived polymorphism is L
MARASYLLPLFLILIHHLRSSLASSTWYGNLTAPWCHPDHAAALLQLKRSFLFDYSTTTLASWEAGTDCCLWEGVGCDSVSGHVTVLDLGGRGLYSYSLDGALFNLTSLQRLDLSKNDFGGSPIPAAGFERLSVLTHLNLSYAGFYGHIPVVIGKLPSLISLDISSIHNIDGAEIDTLYNLFDSYNLLVLQEPSFETLLSNLTNLRELYLDGVDISSSGREDWGRTLGKYVPHLQVLSMEECRLVGPIHRHFLRLRSIEVINLKMNGISGVVPEFFADFLNLRVLQLSFNNLRGTFPPKIFQLKNLAVLDVSNNDQLSGLIPKFLHGSSLETLNLQDTHFSGVTLSYLGNLTSLTDLGIDGRSISMEPPYFFVDKMDHVSTLRLSSVNFSREARSNFSWIGDLQSLKTLKISDCYSTKTMPSWIGNLTSLRSLDIRYCGSIGPIPQLIGNLTTLEYLTISDCAFTGQLLSSVGNLENLRFLQISYNHQGLSGPITPTIGHLNKLTVLILRGCSFSGRIPNTIANMTKLIFVDLSQNDLVGKIQNPILTLYLVICELFIK

SEQ ID NO: 12197 - protein, 379 aa, Zea mays
  VARIANT 224: note = Ancestral polymorphism is Q, Derived polymorphism is L
  VARIANT 262..379: note = Derived polymorphism lacks residues 262 to 379
MDPLSVLRDYAGRNELDKIIFSGDEIHFGSDYTFPASTPTAFASKQSGRPYPLSAAVFLAQHHDLKHTDFIQAARLRRIPPVSLPDRKTFLDFLRFGHNSLPSADPLLPSAFQPQEPHLHPPSPPPEDPAATEEATTGKQIRALERPFKDRNSILDARGRDFLAVFHAAVRRQDEQLKGGGKDAAPSSRPNSGSVAAALAKPKVLDRSLGDGVVPIILVPSASQTLITIYNVKEFLEDGVFVPSEERMRATKGGKPESVTVQKKLIRTERAGGAGGAVSFEVRDKPASLKSDDWGRVVAVFVLGKEWQFKDWPFKDHVEIFNRVIGFYVRFEDDSVEAAKVVKQWNVKIISISKNKRHQDRTAALEVWERLEEFMRART

SEQ ID NO: 12198 - protein, 163 aa, Zea mays
  VARIANT 9: note = Ancestral polymorphism is K, Derived polymorphism is N
  VARIANT 45: note = Ancestral polymorphism is T, Derived polymorphism is I
  VARIANT 63: note = Ancestral polymorphism is D, Derived polymorphism is Y
MFKSMREKNNNTGQILGHSASNQYYQDTVAITVKGKYISIDRILTALTAMDFSNNKLNGTIPDLVGNLVSLHILNMSRNAFTGNIPPQLGRMSQLESLDLSWNYLSGEIPQELTDLTFLEILDLSNNNLEVMIPQSRQFGTFENSSFEGNIGLCGAPLSRKCG

SEQ ID NO: 12199 - protein, 155 aa, Zea mays
  VARIANT 128: note = Ancestral polymorphism is A, Derived polymorphism is D
  VARIANT 124: note = Ancestral polymorphism is L, Derived polymorphism is P
  VARIANT 80: note = Ancestral polymorphism is K, Derived polymorphism is T
  VARIANT 75..155: note = Derived polymorphism lacks residues 75 to 155
  VARIANT 49: note = Ancestral polymorphism is W, Derived polymorphism is C
  VARIANT 42: note = Ancestral polymorphism is P, Derived polymorphism is R
  VARIANT 36: note = Ancestral polymorphism is I, Derived polymorphism is N
  VARIANT 33: note = Ancestral polymorphism is A, Derived polymorphism is T
  VARIANT 29..155: note = Derived polymorphism lacks residues 29 to 155
MGDYNCCFCNQIETIEHLFFCCSIAKVTWGLVAKCINRNDIPGDIDQCCLWLNNHLPGMKSIHIVGVVAICWSIWKARNKMCFENILIKSPNEILCHAYALMTYWAGLSKKELKDLLQDGAKLLMKAACAKLGSGRDEYAEDEDKERDRQQEDGA

SEQ ID NO: 12200 - protein, 729 aa, Zea mays
  VARIANT 423: note = Ancestral polymorphism is E, Derived polymorphism is A
  VARIANT 272: note = Ancestral polymorphism is S, Derived polymorphism is L
  VARIANT 258: note = Ancestral polymorphism is R, Derived polymorphism is Q
  VARIANT 217: note = Ancestral polymorphism is R, Derived polymorphism is C
MAAPASSPVEFLLHRPLPRQRRRPPLAGAFFAPTGLSGAPLLRALASLAADLLGTPPLPSQRRNIDALMRRLALLSALLDSLLLLLADEGEAAFSDAANLCFRELYVVLFRADLLVSYVASAGRAWALLRAPQLAASFRDLDAELAVVLDVLPAASLRLSWDAAQYLDFLRARCRRRAPAHYHDPAEAALGDCLLAALRHFELGQPPDPSMLRSLLRQIGISDAASCRSEIEYLEEQILNQEEDADLPLIGGVVALLRYCLFSLFDPSNTKSLRVWLSVGNRQRPLSWSCSDDTSFSVPKEFSCPISLDLMRDPVVVSTGQTYDRPSIIQWIEEGHSTCPNSGQALADNRLVPNRALRSLISQWCGVHGFQFDSPESNEGMIECVAVSCSSKAAIEANKATARILVKMLMEGSDNAKPVAAREIRLLAKTGKQNRAFIAELGAIPLLCRLLLSSDWMAQENAVTALLNLSIFEPNKTRIMEQEDCLHLIVSVLKNGLTTEAKENAAATLFSLSVVHDYKKKIMNEPGAVEELASMLTKGTARGKKDAVMALFNLSTHPESSGRMLESSAVVSLIESLRNDTVSEEAAGALALLMKQPSIVHLVGSSETVITSLVGLMRRGTPKGKENAVSALYEICRRGGSTLAQRVARIPGLNTVMQNITLTGTKRAKKKASLIVKMCQRSQMPSALALGSTLAVVDHSLVGNSRLRRAPSFGSGELSNPVSISVPVP

SEQ ID NO: 12201 - protein, 210 aa, Zea mays
  VARIANT 6: note = Ancestral polymorphism is L, Derived polymorphism is R
MAGRWLQVTLALVVVTAAATTLSSAQQTAASFPAMPSCPPAPLSLSPCIGYVFGVGSATLASCCSQLRGFLQAQAPCICAASKLAPSPIGVFLGQAQGMIPNVCDLPSPCDAGAAGEGSKPPAGDTSPVSTTTTPAAEPSTGAPAAAVPDASGAPPAPTSDDSATAMAPAGTASKLPELLHAAGATSSRDVAAGTVFVAVFLAALATMYV

SEQ ID NO: 12202 - protein, 88 aa, Zea mays
  VARIANT 12: note = Ancestral polymorphism is C, Derived polymorphism is Y
  VARIANT 13..88: note = Derived polymorphism lacks residues 13 to 88
  VARIANT 14: note = Ancestral polymorphism is V, Derived polymorphism is A
  VARIANT 22: note = Ancestral polymorphism is R, Derived polymorphism is H
  VARIANT 24: note = Ancestral polymorphism is A, Derived polymorphism is V
  VARIANT 27: note = Ancestral polymorphism is A, Derived polymorphism is V
  VARIANT 28: note = Ancestral polymorphism is D, Derived polymorphism is N
  VARIANT 29: note = Ancestral polymorphism is C, Derived polymorphism is Y
  VARIANT 32: note = Ancestral polymorphism is A, Derived polymorphism is P
  VARIANT 33: note = Ancestral polymorphism is A, Derived polymorphism is T
  VARIANT 36: note = Ancestral polymorphism is P, Derived polymorphism is L
  VARIANT 47: note = Ancestral polymorphism is A, Derived polymorphism is V
  VARIANT 48: note = Ancestral polymorphism is A, Derived polymorphism is V
  VARIANT 49: note = Ancestral polymorphism is A, Derived polymorphism is V
  VARIANT 59: note = Ancestral polymorphism is A, Derived polymorphism is D
  VARIANT 61: note = Ancestral polymorphism is G, Derived polymorphism is D
  VARIANT 72: note = Ancestral polymorphism is R, Derived polymorphism is H
MVLLYLDQPEICQVARLNSAFHGVASADCVWAAKLLANYRYLAALAVAVDDEGCGDGDASGKRLTKKEIYARLCRSTLFDATERNSGF

SEQ ID NO: 12203 - protein, 86 aa, Zea mays
  VARIANT 23..86: note = Derived polymorphism lacks residues 23 to 86
MLISLSVSLIGRDCGKQVYLGVRIALFLGGFDTAQATARFIDFFFLARICSLKHRKSEPSRRAQQKRANQSPSNGSIVFSPDLVAQ

SEQ ID NO: 12204 - protein, 75 aa, Zea mays
  VARIANT 52..75: note = Derived polymorphism lacks residues 52 to 75
  VARIANT 39: note = Ancestral polymorphism is S, Derived polymorphism is L
MDLDPEGIFRDDSDEDEDSVKGSFSSNGLTVSSKFPRFSDMYTLTIASVNPQSIAANKPIHFTKSVTKWYVPIDL

SEQ ID NO: 12205 - protein, 149 aa, Zea mays
  VARIANT 95..149: note = Derived polymorphism lacks residues 95 to 149
MGPRPRVCLFDYESVRQVLFNKSGHFFKDDAHPTILAMLGKGLVLVEGTDWVRHRRVVNPAFGMDKLKDELDDMAKTYPGRFKIYYVLNQPPENWNGGVGFVSKEMIQSHCPAPAEDIQILRCGPPPMNKAMAAHLDELNYTKEMQFQF

SEQ ID NO: 12206 - protein, 159 aa, Zea mays
  VARIANT 143: note = Ancestral polymorphism is P, Derived polymorphism is L
  VARIANT 122: note = Ancestral polymorphism is Y, Derived polymorphism is S
  VARIANT 115: note = Ancestral polymorphism is S, Derived polymorphism is L
  VARIANT 85: note = Ancestral polymorphism is G, Derived polymorphism is E
  VARIANT 83..159: note = Derived polymorphism lacks residues 83 to 159
  VARIANT 82: note = Ancestral polymorphism is G, Derived polymorphism is D
  VARIANT 13: note = Ancestral polymorphism is R, Derived polymorphism is W
MCAGIVRVFYRARPLVHTNSLHAQSPVTVEQERITVRAAGIKEFGADRVFGQESTQDDMFEEVKPILRSTLDGHNICILAYGQTGTGKTYTMEGTDSNKLGVMPRTIQELFSRASEDGSCAYSFSMSMLEIYLGSLRDLLAALRQPLYREQSAKQRHGK

SEQ ID NO: 12207 - protein, 204 aa, Zea mays
  VARIANT 62..204: note = Derived polymorphism lacks residues 62 to 204
  VARIANT 155..204: note = Derived polymorphism lacks residues 155 to 204
MEGAGGEAWILLPLHDFHMDPIHPGISVYSFHEGGVDWVEEVVPARAVYGRGSHDRHCRVDWAEARCAGEVRGMWWRLYPDIGRRLGARGMWGEVRGGGGRCGGYSLGRGGMLRSTRRDGGVGGVRFGGGILRSATETEVRGEGGSVAACRDLRWGQRCEGREVRWQLGGSRSCTSFWRSARYGGGQLLLADEDHTVAHQDPEG

SEQ ID NO: 12208 - protein, 570 aa, Zea mays
  VARIANT 430..570: note = Derived polymorphism lacks residues 430 to 570
  VARIANT 62..570: note = Derived polymorphism lacks residues 62 to 570
MRDDNSSKNKLSWSKTLVRKWFNIKTKAKDFHSDYAAEEAGVQWRTSFSDRDACKSKKSRTERLTKRNVERDGRVENGFDGAYITNTQDYRVFVATWNVGGRSPSSHLNLEDWLHTSPAADIYVIGFQEIVPLNAGNVLLTEDNGPAKKWVSLVRKTLNNLDQQGSGVYNYHTPSPAPDPIVELNVDFERSSRRQRNSSFFHRRSFQSLNRSSRIDMMDPHSLVDRRFSVCDRISFGSRPSDVDTSVRCGGSSDDETIDEESPSGMFFPPMPCAYGAPLCDGSRYCLVASKQMVGIFLMVWVRSDIREHVKNLKVSCVGRGLMGYLGNKTFSLSHTQGSISMSMSLHQTSFCFVCTHLTSGQKDGDQLRRNADVVEILRKTRFPHVHGAGEEKSPETILDHDRVIWLGDLNYRIALSYRSVKALVEMHNWKQLLEKDQLRIEQRFGRVFAGWREGRIYFPPTYKYSYNSDRYAGDDMRPNEKRRTPAWCDRILWYGRGLSQLCYVRGESRFSDHRPVYSVFTAEVRIPSQQQAAAQFGGGGGGITRSASLLGLALDELPYPRSYMDINFY

SEQ ID NO: 12209 - protein, 242 aa, Zea mays
  VARIANT 194: note = Ancestral polymorphism is D, Derived polymorphism is Y
  VARIANT 169: note = Ancestral polymorphism is H, Derived polymorphism is Y
  VARIANT 136..242: note = Derived polymorphism lacks residues 136 to 242
  VARIANT 135..242: note = Derived polymorphism lacks residues 135 to 242
  VARIANT 76..242: note = Derived polymorphism lacks residues 76 to 242
  VARIANT 63: note = Ancestral polymorphism is S, Derived polymorphism is Y
  VARIANT 37: note = Ancestral polymorphism is R, Derived polymorphism is G
  VARIANT 5..242: note = Derived polymorphism lacks residues 5 to 242
MEVVQQDDEALVKLENTGIERSKDVDSAVLGKYSIWRRENENEKADSRVRLMRDQMIMARIYSVLAKYRDKLDLYQELLARLNESQRSLGEATADAELPKSASDRIKAMGQVLSKARDLLYDCKEITQRLRAMLQSADEQVWSLKKQSTFLSQLAAKTIPNGIHCLSMHLRIDYYLLSPEKRKFPSSENLENPDLYHYALLSNNVLAASVAVNSTIMNAKEPEKHVFHLGKCMWKMLMTSNG

SEQ ID NO: 12210 - protein, 90 aa, Zea mays
  VARIANT 45: note = Ancestral polymorphism is R, Derived polymorphism is H
  VARIANT 37: note = Ancestral polymorphism is R, Derived polymorphism is H
  VARIANT 36..90: note = Derived polymorphism lacks residues 36 to 90
  VARIANT 22: note = Ancestral polymorphism is E, Derived polymorphism is V
  VARIANT 19: note = Ancestral polymorphism is P, Derived polymorphism is S
MCGVACLIYLAEMAAAAGPYKEMLEVVNACAARIRWRLRPASKRRLLNDILFLCTGLRPVVLVDYGGTMPQLQENLCGLLYLARQVISRL

SEQ ID NO: 12211 - protein, 128 aa, Zea mays
  VARIANT 19..128: note = Derived polymorphism lacks residues 19 to 128
MESRRKNQQKTSYIVISIQLLAALLLLELVSLVPGASCEELPLDFWVSALRGVGAKDVSTADGCTKKNKDTMLCSAQANTVTNFINPTNSEEQGYRTIGSPSLTSLMIAPNGTSSSSAVAPCTERRYW

SEQ ID NO: 12212 - protein, 149 aa, Zea mays
  VARIANT 8: note = Ancestral polymorphism is P, Derived polymorphism is S
  VARIANT 44: note = Ancestral polymorphism is R, Derived polymorphism is H
  VARIANT 141..149: note = Derived polymorphism lacks residues 141 to 149
MRRPWRRPRTTPAWLLRSRSSTRRACMGLRNGRVAIFRDRESERKDPDYDRSYDRVSRPVIHGHIPPRVPRAASPRLHPVRSLFRSIELSLFIPSHYCIEISSLIIFSWVSGKEKTRFMLSILDLQRSTEIHQHTSTFHTEQSRRDDME

SEQ ID NO: 12213 - protein, 818 aa, Zea mays
  VARIANT 319..818: note = Derived polymorphism lacks residues 319 to 818
  VARIANT 392..818: note = Derived polymorphism lacks residues 392 to 818
  VARIANT 393..818: note = Derived polymorphism lacks residues 393 to 818
  VARIANT 423..818: note = Derived polymorphism lacks residues 423 to 818
  VARIANT 425..818: note = Derived polymorphism lacks residues 425 to 818
MLVFLRRGLLLVRQPTTRVLAKPSLRPACLFVHHFAVDTMGEGSAAGKDAKGKGKGKTKAAAADSALVVRDDSYLEAVTQKRIRFFEEIQARQAVERLNIGGEVIKVTLPDGAIKEGKKWITTPMDIAKEISSGFAASCLIAQVDETLWDMGRPLEGDCKLQMFKFDTNEGRDTFWHSSAHILGESIERAYGCKLCIGPCTTRGEGFYYDAYYNDQTLNEEHFGIIENQAKKAVAEKQPFERIEVSRAEALEMFAENEFKATFLATVLFVSFLYHFAAYVKYIYDFHPFLQKSELYVQVEIINELPEDKTITVYRCGPLVDLCRGPHIPNTSFVKAFACLKASSSYWRGKVDRESLQRVYGISFPDSRRLTEYKHFLEEAKKRDHRILGKAQELFFFHELSPGSCFFLPHGARIYNKLMDFMRQQYRDRGYQEVLSPNIYNMQLWETSGHAANYKENMFVFEIEKQEFGLKPMNCPGHCLMFANRVRSYRELPLRMADFGVLHRNELSGALTGLTRVRRFQQDDAHIFCREDQIKDEVKAVLEFINYVYEIFGFKYELELSTRPEKYLGEVETWNKAEQQLTEALNEFGKPWKDFEGLFGSVLTGAAWPRLRSQHCFPMTLSCIERTYIDAFTQINEGDGAFYGPKIDIGVFDALKRKFQCATLQLDFQLPIRFKLAYSAEDEAKIERPVMIHRAILGSVERMLAILLEHYNGKWPLWLSPRQAIVCSVSSGSVEYAKQVLATLHEAGFHVDIDASDRTIQKKVREAQLAQFNYILVVGAQEAETGNICVRVRDNADLVTTSVDGFITRLREEIAAFK

SEQ ID NO: 12214 - protein, 182 aa, Zea mays
  VARIANT 4: note = Ancestral polymorphism is R, Derived polymorphism is H
MWLRCCWVAAAAQDGAHRGAVHECASHPAQRRRVQHHRLRPGRTRLVRELMLLVLPSPPGRGRRPVPRVVVRSGRLLACSAAEKTTEEDENALEGEGASADYNRRTMEGAQLLLEQRAAKAQQGGRRGERRQWSILWPYYLFSRDDGSSRMVSKPKLDLVEDLSSTYYREAADGGAVGISVY

SEQ ID NO: 12215 - protein, 178 aa, Zea mays
  VARIANT 115: note = Ancestral polymorphism is M, Derived polymorphism is T
  VARIANT 116: note = Ancestral polymorphism is E, Derived polymorphism is V
MQFFGGSSLTSVAPEATPAPAAPPGTGTGASAQVLYVFNRNGVCLLYREWHRPLRTLDPTQDHKLMFGLLFSLRSFTAKIDPTTAEKGNLGVPLLPGQGCSFYSFKTNTYKLNFTESPSGIKLILITHPRTGDQRDSLKHIYNLYVEYVVKNPLYAPGTPIKCELFNKHLDQYVRTII

SEQ ID NO: 12216 - protein, 220 aa, Zea mays
  VARIANT 82..220: note = Derived polymorphism lacks residues 82 to 220
MASVLRVLALLLVAAAVADAASIVVTNKCAYTVWPAALPGGGTVLNTGESWPIDVPAGTRSGRVWGRTGCGFVTNGTLGQCQTGDCGGTLACSKVGFEPITLAEYSLGGTGADRFDISLVHGFNAPMSFLPASGGGGGARCGRGGPSCPVQEITFDCPSEQRRVAGCGNPCDGKSSSCGPNNGTEYFKKACPQTITYPRDTTNTVFTCPAGTSYEITFCP

SEQ ID NO: 12217 - protein, 265 aa, Zea mays
  VARIANT 45: note = Ancestral polymorphism is I, Derived polymorphism is V
  VARIANT 46: note = Ancestral polymorphism is L, Derived polymorphism is I
  VARIANT 48: note = Ancestral polymorphism is I, Derived polymorphism is M
  VARIANT 52: note = Ancestral polymorphism is L, Derived polymorphism is F
  VARIANT 190: note = Ancestral polymorphism is G, Derived polymorphism is V
MARGLKKHLKRLNAPKHWMLDKLGGAFAPKPSSGPHKSRECLPLILIIRNRLKYALTYREVISILMQRHVLVDGKVRTDKTYPAGFMDVISIPKTNENYRLLYDTKGRFRLHPIRDEDAKFKLCKVRSVQFGQKGIPYLNTYDGRTIRYPDPLIKANDTIKIDLETNKIVDFIKFDVGNVVMVTGGRNTGRVGVIKNREKHKGSFETIHVEDSLGHQFATRMGNVFTIGKGNKPWVSLPKGKGIKLSIIEEQRKRDAAAQAAANA

SEQ ID NO: 12218 - protein, 376 aa, Zea mays
  VARIANT 280: note = Ancestral polymorphism is G, Derived polymorphism is S
  VARIANT 219: note = Ancestral polymorphism is T, Derived polymorphism is I
  VARIANT 215: note = Ancestral polymorphism is R, Derived polymorphism is Q
  VARIANT 207..376: note = Derived polymorphism lacks residues 207 to 376
  VARIANT 190..376: note = Derived polymorphism lacks residues 190 to 376
  VARIANT 188..376: note = Derived polymorphism lacks residues 188 to 376
  VARIANT 183: note = Ancestral polymorphism is W, Derived polymorphism is C
  VARIANT 163..376: note = Derived polymorphism lacks residues 163 to 376
  VARIANT 132..376: note = Derived polymorphism lacks residues 132 to 376
  VARIANT 83..376: note = Derived polymorphism lacks residues 83 to 376
  VARIANT 81..376: note = Derived polymorphism lacks residues 81 to 376
  VARIANT 18..376: note = Derived polymorphism lacks residues 18 to 376
MEGTAAEVGDADAAGDVQIKGAKENAQPMAVAQQQLSGSEALEKENIKNLYESEPTLGFLCLASEAMQPPHQPSMNGQHAQPQPQGPGVPMPPQQQAPPLPYYQQHPPPQYYQQALLQPWGQQQQYAAPPLQYPPPPQTQQYATPPQQYAPLPQQQYAPPPQQQYAPSPYGTTPGSGEVRTLWIGDLQHWMDENYLHYNAFAAVAQQIASVKIIRNKQTGHSEGYGFIEFSSRATAEHTLMNFNGQMMPNVEMTFKLNWASASTGDKRGDSGSDHTIFVGDLAHDVTDSMLEDVFRAKYPSVRRANVVVDRMTGWPKGYGFVRFGDLNEQAHAMTEMNGMLLSTRQMRIGATANKKNRDAQQTYATDGMYLSNIFI

SEQ ID NO: 12219 - protein, 184 aa, Zea mays
  VARIANT 32: note = Ancestral polymorphism is M, Derived polymorphism is L
MANDSLVTARVIGDVLDPFYSSIDLMVLFNGLPIVSGVELRPPAVSERPRVEIGGDDYRVACTLVMVDPDAPNPSNPTLREYLHWMVTDIPASTDDTHGREVMCYEAPNPTTGIHRMVLVLFRQLGRETVYAPSRRHNFSTRAFARRYNLGAPVAAMYFNCQRQNGSGGRRFTGPYTGGRRGGA

SEQ ID NO: 12220 - protein, 407 aa, Zea mays
  VARIANT 357: note = Ancestral polymorphism is A, Derived polymorphism is D
MPSPPKDRSSGRLGRFLAALRPSRAGPLPVQTGFPTSLADLVVKNHGRLKKQPSPSSKRGRRAAAAAAAASPSPSPCSPTTSPSPSPSPPPASPPPPAAAAAVSPSDRPRPDLPPAQPPRGFGLGFLAVSGVVSLALLVIWSKKVVAAVTVAAFSLYLLESVRSSSLPRRRPRPRPGPGAAERRLCLDGRGRVSPIREVDAADTEPSRPSCSDSDRASEAEGRSGVLDESSNTKAKARNKSWKKLLAVAGAKKLQRGRRSKEADSSGSFRSDGDREDAATACGGGGNARAADSSGSRRGSASQSDVLAEDGAAREADSSMGSRRSQGVEVEIDADVIEVEEEEEQAGTGFPALVLVAVVLVGLVAGKAVALALTVLCSAFLSSDRRSPCGGGGGGCSQGRRLEPSMP

SEQ ID NO: 12221 - protein, 303 aa, Zea mays
  VARIANT 7..303: note = Derived polymorphism lacks residues 7 to 303
  VARIANT 38: note = Ancestral polymorphism is C, Derived polymorphism is Y
  VARIANT 41: note = Ancestral polymorphism is C, Derived polymorphism is W
  VARIANT 94..303: note = Derived polymorphism lacks residues 94 to 303
  VARIANT 131..303: note = Derived polymorphism lacks residues 131 to 303
MKCNACWRDLEGQAVSTTCGHLLCADDARKILNNDGTCPICDQVLSKSHMKPMDINPGDDWTNMAMVGISPQILMKSAYRSVMFYIGQKELEMQYKMNRIVGQCRQKCELMQAKFTEKLEEVHTAYQKMAKRCQLLEQENENLNRDKHELQEKFAEKSRQKRKLDEMYDQLRNEYESVKRSALQPANNYLARPQPDLFAGMPNVMDGGDHLRQGSVDLPKTPGQRDEGWGPPPRQRHCTSGPFDLSTGSPAHAVAPPADIRPRQQTRSVFGATLNNPSSTLRNLIISPVKRPQTSRNRQHIFT

SEQ ID NO: 12222 - protein, 257 aa, Zea mays
  VARIANT 171: note = Ancestral polymorphism is A, Derived polymorphism is V
  VARIANT 133: note = Ancestral polymorphism is V, Derived polymorphism is L
  VARIANT 102: note = Ancestral polymorphism is V, Derived polymorphism is G
  VARIANT 99: note = Ancestral polymorphism is G, Derived polymorphism is A
  VARIANT 76: note = Ancestral polymorphism is R, Derived polymorphism is P
MDSNRSMATSGVAPFVAKTYRMVDDPATDGVVAWGRDNNSFVVADPFAFSQTLLPAHFKHSNFSSFVRQLNTYGFRKVDPDRWEFAHVSFLRGQTHLLGQIVRRSNGGKRKDDGNGAGSGSADDEDAVAMEVVRLRREQRAIEEQVAAMWRRVQETERRPKQMLAFLVKVAGDPQVLRRLVSGAGGDAVFAAAEPEDGASIKRARLLLDAGSGGDGAVDFSGLYSTTAGSEDDGVGFGSDYLQPPPPYVFPVNSGGY

SEQ ID NO: 12223 - protein, 201 aa, Zea mays
  VARIANT 48..201: note = Derived polymorphism lacks residues 48 to 201
  VARIANT 24: note = Ancestral polymorphism is S, Derived polymorphism is R
  VARIANT 5: note = Ancestral polymorphism is R, Derived polymorphism is S
MSSSSVLLVSAVLVALVTLSSCRSLGELSEQKTYSSAPSYGGSPTPTYASGEGHEPTPTPSHHGTTPTPSYGTTPSTPAHGVPEIPKHGFVGSCDYWKSHPDMIIAVVGSLGNIGKTFGAACSLLVGKKLENLHDALSNTRTDGVGALLREGSAAFLNSIVNKKFPFTTQQVKDCIAVSVTSDNAASAQAGIFKKANEYHY

SEQ ID NO: 12224 - protein, 205 aa, Zea mays
  VARIANT 195: note = Ancestral polymorphism is H, Derived polymorphism is R
  VARIANT 171: note = Ancestral polymorphism is S, Derived polymorphism is C
  VARIANT 153: note = Ancestral polymorphism is R, Derived polymorphism is G
MEMPPPPPPPPFGGPAAAAGGSKLDRKTVERNRRNQMNALYSRLDTLVRAGSSPSSAAAPVQRGPPAMTRPDRLEEAAAYIRQTTERVERLKERKRELVASARASSSSQGSRSGSGSSSAGAAEVEVQHLGSGLHAILVTTGAPPSEGAPFHRAVRAVEEAGGEVQNAHFSVVGARAIYTIHALVAEGGIERVVHRLKAALRGDA

SEQ ID NO: 12225 - protein, 207 aa, Zea mays
  VARIANT 4: note = Ancestral polymorphism is H, Derived polymorphism is R
  VARIANT 36..207: note = Derived polymorphism lacks residues 36 to 207
  VARIANT 46: note = Ancestral polymorphism is G, Derived polymorphism is D
  VARIANT 89..207: note = Derived polymorphism lacks residues 89 to 207
MSSHDSVSMVFKCMLKGATDFLVKPIRKNELRNLWQHVWRKQLANGGPNVQHIQREENFAERIQQKTGVTQADNLDRDVPCKNRECSEQESDAQSSCTRSELEAESKQTNNILEYKQSTQRHLSIPSHKNVELNGQTKIQTAKGNNLILAREDDLSPNKRTCLNENNSERASRDMELVHIMENQKYNTQREVAVCRLTAAKMPLPLP

SEQ ID NO: 12226 - protein, 711 aa, Zea mays
  VARIANT 274: note = Ancestral polymorphism is N, Derived polymorphism is S
MASDPDDDGGEVAPVEDAAPAEVASDPSPSAEVAAPESEPAKAGAGSIVPAAAAESSHPEGLSLNYEEARALLGRLEFQKGNVEVALRVFDGIDLQAAIQQFQPSLSDKTPSKKGRTKSEIPSSVPQNNPASLVLEAIYLKSLSLQKLGKSTEAANQCKSVLDSVESIFQNGAPDIEQKLQETVNKSVELLPEAWKHAGSNQEALASYRRALLSPWNLDDECRTRVQKRFASFLLYNNNIDWSPPSMAQQVEGCFVPKNSVEEAVLLLMVVLRSWYQGKTHWDPSVMEHLTYALSLCGEPLVLAKQLEEVLPGVYPRTERWATLALCYYVAGQKDVALNFLRKSLNKLENPNDVLALLLAAKICSKERHLASEGVEYARRVIACAESSDPHLKSVGLHFLGSCLGNKSKVVSSDYQRSLLQTETLKSFAESIGLNRYNADLIFDMGVEYAEQRNMNAALRCAKEFIEATGGSVSKGWRLLALILSAQQRFSEAEVATDAALDETAKLDQGSLLRVKAKLKVAQSSPMEAVEAYRALLALVQAQKNSPGGSCKSATEDADGSVSEFEIWQGLANLYSSLSYWRDAEICLNKARALKLYSAATLHAEGYMHEARDQTTDALAAYVNAFSTELEHVPSKVAIGAMLSKQGPRFLPAARCFLSDALRVEPTNRMAWLYLGKVHRSDGRISDAADCFQAAVMLEESDPVESFSSLS

SEQ ID NO: 12227 - protein, 254 aa, Zea mays
  VARIANT 47: note = Ancestral polymorphism is T, Derived polymorphism is A
MPEGDQVSSSSSRSSQASSGGTSSSPPWSPAGKKAGAAEKRARARETTTDPPSSYRGVRMRAWGKWVSEIREPRKKSRIWLGTFPTPEMAARAHDAAALVVKGPAAVLNFPDMAAALPRPASASPRDVQAAAARAAAMEMEPAAALHEPPDGPADEAAALQMQPAAAAPPAGGQQQDEELEAIVELPRLDEDCAVATLGATPCLSSSFHDVLAPAPWWVDDAAGYVAAAHDVDLFGLDGDHGWAQSVGALLWNL

SEQ ID NO: 12228 - protein, 77 aa, Zea mays
  VARIANT 19: note = Ancestral polymorphism is A, Derived polymorphism is V
MAAEALGFMARGANGGRAAELVTRDFLGGCAATGDARDASARNGTVPGRVAQQKHACPATPMDLNLLTIKLFHTSLH

SEQ ID NO: 12229 - protein, 185 aa, Zea mays
  VARIANT 156..185: note = Derived polymorphism lacks residues 156 to 185
  VARIANT 126: note = Ancestral polymorphism is R, Derived polymorphism is Q
  VARIANT 40..185: note = Derived polymorphism lacks residues 40 to 185
  VARIANT 27: note = Ancestral polymorphism is T, Derived polymorphism is I
MVVELIKILLMALVLANITYHLILIVTVITVKRRIVGLHQNTTTGSTDITDMWEPLEECLLLLETTRHVSMITITLSKKEVDTSSIGYQSPLPADEVKPLVKCDNDEDAHSPGGRGRGRSGRGRGQGRGGRGNGFNVFADAGWEDDHAPAYMGNGYARGRGRSFRGRGRRGGYNNQTEYKQDGGY

SEQ ID NO: 12230 - protein, 251 aa, Zea mays
  VARIANT 92..251: note = Derived polymorphism lacks residues 92 to 251
MAEAECRASDSADDFEFCILSSGGIVPAGESAGTDMCVADEVFCQGKLIPLRASSAAATDGASVATLPRSESVASTVGLVSRSGSRSASSSSSGSSSGCVSRSQPSKSASSDHGAGAPPPRRSLSSSLFYAHPSPSPRLRSARPRRRTGSAQPAAVAWGLFRFHLGVVGTPNVYPPPPRPAADAKVAAATRGGGSRSAQFEQVAAAVDRIGAGQLGERGAWGGGMDRGSRCSREAWACFGVGCCGVASDGR

SEQ ID NO: 12231 - protein, 139 aa, Zea mays
  VARIANT 104: note = Ancestral polymorphism is H, Derived polymorphism is Q
  VARIANT 89: note = Ancestral polymorphism is M, Derived polymorphism is T
MSPPAGVPPLLQLAAALGELRQRLPLHDRHTQRWRGRDIANTAGGGGLGSPYTALVAASSIEGQYSVVRSDSSGCAELGGSGSGRGCDMITPFIIINEQLNKQHYLYGIINKIEFSWSLCWKECYEIAIMITLNEYELD

SEQ ID NO: 12232 - protein, 205 aa, Zea mays
  VARIANT 160: note = Ancestral polymorphism is G, Derived polymorphism is W
MAPNGESPAMTAVAPLLATIFGGEHRRQRVPSSHELRSCVAGDHHHHKETELASPAGDDPRDAAARPPAEVEDAECECCGMSEECTPSYIAAVRRRFSGRWVCGLCAEAVAEEAAKNGGDRAAALAAHMAVCRRFNGFGRTHPALFQAGAVIGIVRKLSGSPGPRSPKSSAAGTRPVVISDGAVDGSSGCRSLVAGVRNGQVVTN

SEQ ID NO: 12233 - protein, 99 aa, Zea mays
  VARIANT 67: note = Ancestral polymorphism is R, Derived polymorphism is Q
MSLWRNGNNGGADGSNAGSTVLDLQLRLAQPTGRIEVNSGNGSGSSSSSSCVSSDISSVLVLGGCKRCWRYCMVSKELPICINCKQPCFIGFNTEEKHG

SEQ ID NO: 12234 - protein, 137 aa, Zea mays
  VARIANT 50: note = Ancestral polymorphism is A, Derived polymorphism is S
MADTKASPAVTLRTRKFMTNRLLSRKQFVLEVLHPGRANVSKAELKERLAKMYEVKDPNCIFVFKFRTHFGGGKSTGFGLIYDNVDSAKKFEPKYRLIRNGLATKVEKSRKQMKERKNRAKKIRGVKKTKAGDAKKK

SEQ ID NO: 12235 - protein, 103 aa, Zea mays
  VARIANT 40: note = Ancestral polymorphism is Y, Derived polymorphism is C
  VARIANT 29: note = Ancestral polymorphism is Q, Derived polymorphism is E
MGVSLSVFAALFLLHLGKNAVNPKIRKIQFRGYGYSSSSYELLETSKIWKVPGPRITVPRSLRWASCGAVSMSATSALLVRLFSPECEPQNIAAFDKPELKAQ

SEQ ID NO: 12236 - protein, 208 aa, Zea mays
  VARIANT 182: note = Ancestral polymorphism is P, Derived polymorphism is A
  VARIANT 165..208: note = Derived polymorphism lacks residues 165 to 208
  VARIANT 120: note = Ancestral polymorphism is G, Derived polymorphism is D
  VARIANT 88..208: note = Derived polymorphism lacks residues 88 to 208
  VARIANT 47..208: note = Derived polymorphism lacks residues 47 to 208
  VARIANT 31: note = Ancestral polymorphism is G, Derived polymorphism is R
MGLHLLHLQFFIMLSCLISVSVNFSTFLVIGKTSPVTYKVLGHLKTCLVLTFGYVLLHDLFSWRNILGILIVVIGMVLYLYFCTRETQQIPAEASPQVVQMKLYVHGFSFVLYLSAGTLGLNGAFSKVAKLELGILVHPADCKSMLDAFIAGCDFHSRIAMNMYQHIRETIEEEKVILEWHPQPDQEKPLVLLLKDAFGAERRKAIRC

SEQ ID NO: 12237 - protein, 275 aa, Zea mays
  VARIANT 250: note = Ancestral polymorphism is R, Derived polymorphism is S
MRLLHELDVSNNRLSGGFPQHILCLPSVRYVDLRFNDLRGLVPPTLFDKPLDAIFLNDSRFDFELPDSLGNSPALFDKPLDAIFVNDRRFDFELPDSLGNSPASVLVLANLRLRGCIPRSVGRMAGTLAELVALNSGLRSCLPQELGWLRELTRVPESMAGLHGLQQLHVERNELWGHVPEGVCALPALRNFTYSYNYFCSEPSRCLDVLQVDDRQNCIAARFTRRVSNALASASTVMPPSPGPSRRKRSIQICGAGVWSQLLHGARWRDWGGGC

SEQ ID NO: 12238 - protein, 1036 aa, Zea mays
  VARIANT 68: note = Ancestral polymorphism is G, Derived polymorphism is R
MTTRMADSYLVLLFLLVFVTSNSSSQSMAQITDASELAILLAIKKGWGSPSALSSWSSQNASYCSWAGVRCVNGQVSALSFQNLSIANPVPVPAASICNLKNLSSLDLSYNKLTGQFPTALYSCSAARFLDLSNNRFSGALPADINRLSSAMEHLNLSSNGFTGSVPRAIAAFTKLRSLVLDTNSFDGTYPGSAIAGLSELETLTLANNPFVPGPIPDDFGKLTKLQTLWMSGMNLTGRIPDKLSSLTELTTLALSVNKLHGEIPAWVWSLQKLQILYLYDNSFTGAIGPDITAVSLQEIDLSSNWLNGTIPESMGDLRDLTLLFLYFNNLTGPIPSSVGLLPNLTDIRLFNNRLSGPLPPELGKHSPLANLEVSNNLLRGELPDTLCLNRKLYDLVVFNNSFSGVFPANLADCDTVNNIMAYNNLFTGEFPEKVWSGFPVLTTVMIQNNSFTGTMPSAISSNITRIEMGNNRFSGDVPTSAPGLKTFKAGNNQFSGTLPEDMSGLANLIELNLAGNTISGAIPPSIGSLQRLNYLNLSSNQISGAIPPGIGLLPVLTILDLSSNELTGEIPEDFNDLHTSFLNLSSNQLTGELPESLKNPAYDRSFLGNRGLCAAVNPNVNFPACRYRRHSQMSIGLIILVSVVAGAILVGAVGCFIVRRKKQRCNVTSWKMMPFRKLDFSECDVLITNLRDEDVIGSGGSGKVYRVHLPARGRGRGCAGTVVAVKKLCSRGKAEEKLDREFDTEVKILGDIRHNNIVSLLCYISSEDTKLLVYEYMENGSLDRWLHPKDNAATAALDWPTRLGIAIDAARGLSYMHDECAQPIMHRDVKSSNILLDPGFRAKIADFGLARILLKSGEPESVSAVSGTFGYMAPEYGRGAKVNQKVDVYSFGVVLLELATGRVANDSSKDAADCCLVEWAWRRYKAGDPLHDVVDETIQDRAVYIDDAVAMFKLGVMCTGDDAPSRPSMKQVLQQLARYDRTASVAGACQDDRGVELGHLPKGKQGRHQVAKRSLDAGSFLGGDEESGNFVAHPV

SEQ ID NO: 12239 - protein, 198 aa, Zea mays
  VARIANT 4: note = Ancestral polymorphism is P, Derived polymorphism is S
  VARIANT 29..198: note = Derived polymorphism lacks residues 29 to 198
  VARIANT 136..198: note = Derived polymorphism lacks residues 136 to 198
MAEPYNLAPHGVPSCHKEICNKPGDESSESYNSFSGASSGSLCSSASNVSDDATSSPPGHRSEPSSASSSTLHLDAEGPLYELSSLLDELPIRKGLSNYYQGKAQSFTSISDATSVQDLAKKVSYSKRMRASKSYSVGLDMNQRTIIVSRPCNKMIAKRPSNGSFARVMPGTSNTSNLNISTKSYAHQNKRVATHIDL

SEQ ID NO: 12240 - protein, 239 aa, Zea mays
  VARIANT 92..239: note = Derived polymorphism lacks residues 92 to 239
MTVSFSSVAEIDSVRPLVPGAKLHAVVDACHNDSVLDLPFLCNMSRTGNWQWEDHRPPSSVCKGTSGGQAVLISGYSDDKSKFSMRHASEEQFSRFLLYEVDAIRKACASLEEGYLPPVTFIVVQKRHHTRFCPEDHCSHKQTDRRGNILPGTAVDTKICHPSESDFYLCSHSSIHDELDAKPEELEGEELESQLLELVAALSMHPVHVPGNKQPARPASQKATAKDDKLATLQAEMTL

SEQ ID NO: 12241 - protein, 207 aa, Zea mays
  VARIANT 189..207: note = Derived polymorphism lacks residues 189 to 207
  VARIANT 33: note = Ancestral polymorphism is K, Derived polymorphism is M
MDSYLTFFSMDMMVELLIAEATKMFQSLDNENKAFTLIHCWNILKDEDKWKAKRLELVELEKQPNKKKQKSTKMSRPRDDEATNNEEVPEDGIKKAKEALRRGGGKACMEALDNMWAKKEAFDKEIEKAKEERFNIALELEKKRVSAEEKKAEAKLIKVSAEDKKAEAELIKEEKEIMSIDMTSLSPLQRQYYETMQEKIVVRRLAN

SEQ ID NO: 12242 - protein, 137 aa, Zea mays
  VARIANT 16: note = Ancestral polymorphism is N, Derived polymorphism is D
  VARIANT 17: note = Ancestral polymorphism is V, Derived polymorphism is D
  VARIANT 36..137: note = Derived polymorphism lacks residues 36 to 137
  VARIANT 40: note = Ancestral polymorphism is Q, Derived polymorphism is E
  VARIANT 41: note = Ancestral polymorphism is E, Derived polymorphism is Q
  VARIANT 43: note = Ancestral polymorphism is S, Derived polymorphism is F
  VARIANT 60: note = Ancestral polymorphism is P, Derived polymorphism is L
  VARIANT 66: note = Ancestral polymorphism is D, Derived polymorphism is E
  VARIANT 69: note = Ancestral polymorphism is R, Derived polymorphism is W
  VARIANT 71: note = Ancestral polymorphism is P, Derived polymorphism is S
  VARIANT 88: note = Ancestral polymorphism is C, Derived polymorphism is Y
  VARIANT 112: note = Ancestral polymorphism is T, Derived polymorphism is I
MFVVGVNENNYDPKMNDVSNANCTTNCLAPLAKPFWKVLQEGFSRGRSVVGVFEVNFIEPSHDKQEFERNPLFIRIETRLRQIIIDFCRVQVPLGGLDECAQEHLQKPELVIMLAELSSGFWEAVQSREGAFLAPTN

SEQ ID NO: 12243 - protein, 335 aa, Zea mays
  VARIANT 103..335: note = Derived polymorphism lacks residues 103 to 335
MDARAREAAETSGPGLPLAVRELLAGGVAGGVAKTAVAPLERVKILFQTRRAEFHGSGLIGSFRTIYRTEGLLGFYRGNGASVARIVPYAALHYMAYEEYRRWIILGFPNVEQGPVLDLVAGSIAGGTAVICTYPLDLVRTKLAYQVKGAVSVGFRESKPSEQVYKGIMDCVKTIYRQNGLKGIYRGMAPSLYGIFPYSGLKFYFYEKMKSHVPEEHRKGIIAKLGCGSVAGLLGQTITYPLDVVRRQMQVQALSSSSLVGRGTFESLVMIAKQQGWRQLFSGLSINYLKVVPSVAIGFTVYDSMKVCLKVPSREETAVAVLAEERSNTAPIPSS

SEQ ID NO: 12244 - protein, 361 aa, Zea mays
  VARIANT 217: note = Ancestral polymorphism is T, Derived polymorphism is I
  VARIANT 273: note = Ancestral polymorphism is R, Derived polymorphism is C
  VARIANT 339: note = Ancestral polymorphism is E, Derived polymorphism is K
  VARIANT 344: note = Ancestral polymorphism is R, Derived polymorphism is S
MSPREGLSAASSSTRGQHGRVDDMLACIDACICQFALQVCAMPEEGRPSRRETDCKNGTAKQAKISFFLDQEQVGRMASQFAKPRSEPLEERDDVKLPSYRGDNVNGDDFTEKSRVPDPQRMIRAYSQSVATLNLLRVLATGAYAAMQRVTQWNLDFMDPSEQGDRYRELAHRVDEALGFMTAAGLTVSDKMNPSDLVKLIEILNPSNKPGRIIIITRMGAENMRVKLPHLIRVVRNAGLIVTWITDPMHGNTIKAPCGLKTRPFDSILAEVRAFFDMHDQEGSHPGGIHLEMTGQNVTECIGGSRTVTFDDLSDRYHTHCDPRLNASQSLELAFIIAERLRKRRMRSGLNNSLPLPPLAF

SEQ ID NO: 12245 - protein, 325 aa, Zea mays
  VARIANT 285: note = Ancestral polymorphism is L, Derived polymorphism is P
  VARIANT 222: note = Ancestral polymorphism is T, Derived polymorphism is S
  VARIANT 105: note = Ancestral polymorphism is C, Derived polymorphism is F
  VARIANT 50: note = Ancestral polymorphism is N, Derived polymorphism is Y
  VARIANT 49: note = Ancestral polymorphism is W, Derived polymorphism is C
  VARIANT 43: note = Ancestral polymorphism is L, Derived polymorphism is F
MRMAAASNGAPLVVFDFDKTIVDCDSDNWVVDALGATRRFDELLRHLPWNHAIDAMMGELHSEGKTAEDIRGSLRRAPLSPHVVAAIKTAYALGYVRAARLRLRCPLAPSLPCEFSLDPPQILLFFRCELRILSDANAFFVDTILAHHGLADYFSGTDTNPAHVDAAGRLRIRPYHEFGAAAHGHGCALPTCPPNMCKGKVMERILLQEEAAAAAAAASAKSRRRRAVVYLGDGRGDYCPSLKLRGGDYVMPRAGHPLCDLIAASPPAAAVRGWAGFEDLARVLLGIVDGEIARAAAEEGAGAGVVVVVPARQEALMPQAVRVPN

SEQ ID NO: 12246 - protein, 889 aa, Zea mays
  VARIANT 159..889: note = Derived polymorphism lacks residues 159 to 889
  VARIANT 63..889: note = Derived polymorphism lacks residues 63 to 889
MYLAHSLTICQKPVIEQQFRGELREDEEHLREGSVDDDATHARSAGELSAKVDLGALKMLMLRAKVARQVVVVWGAWTRRASPSSMEIAIEAAKAKLRLTRAQTGRGGAGRRERLSDEQCAGINHFVALYAVPVLIFHMVSTNDPYHTNERLIAADTLQKAVMLLALTAWAFWSHLSRRRDGGRGKRQVVQGAESPIKWVVTNFSVASLPRVPGGPRIGHCSTADATASGCRAGPASPAATRCTTLEFAYLPSAVVSASSSDDAAYVVRDAVRVHVQPVIRKERFRFGTHRRHGSVWSAPAARRPVDIGCDSPRLCYKNAMVDHALGACCLGELWRNVDETLNSLPFSISGSRSIMSFPSALAASNRQRRRSRVHHMLPGEPLSTTLPLDRSYVDALKDAYPERSYYGGPEHVCPYCHAVFWFQERVKNDSFSTQRKIVYNLCCKGGKVNLKPFEYPPPLLADLLKFDGGTRSRRFLRLIRSYNSLFAFTSFGAAIDKTINNGTAPYVFKINGLVHHRIGTLLPQRGTQPKFAQLYTYDTEHETQNRLGIFETDDGAGSQPDPEMVSSLLDMLNENNSLVKAFRCARERLEREGDQKITLRLLGCNTRHDVQYILPSNGEIAAIIVGDYTTGEYTYDVLVHDRECGLKRVSCLHPAYMPLQYPLLFPYGEHGFHLGIRYFGDDDVGSSKRKYVTMLEFVRRHMHYRLDEPNPYTCYGRLSDQIDVDAYSTIEGNRLQYIASHQSDLRSETVQGIADAIDKGFVNADSIGCRVVVPASFTGGRRYHVMNYQDAMAICRVYGPPDIFVTFTCNTKWREIADALRFEPGQQPCDRSDLVLLMCAMYRLDREFLVIVTVKKIGDRWWYNACKKMHPHSCGSWRFLQVQRSILR

SEQ ID NO: 12247 - protein, 203 aa, Zea mays
  VARIANT 6: note = Ancestral polymorphism is R, Derived polymorphism is L
  VARIANT 23: note = Ancestral polymorphism is A, Derived polymorphism is G
  VARIANT 87: note = Ancestral polymorphism is H, Derived polymorphism is Y
  VARIANT 91: note = Ancestral polymorphism is K, Derived polymorphism is R
  VARIANT 95: note = Ancestral polymorphism is Y, Derived polymorphism is C
  VARIANT 143: note = Ancestral polymorphism is T, Derived polymorphism is I
MASVGRAGRGGKGDGGKGEGSLARRAWRQYLLQLQQHPLRTKMITAGCLAGVSDSVAQKLSGFQKIEKRRLLLKMLFGFAYGGPFGHFLHKILDYIFQGKKDTKTIAKKVLLEQVTSSPWNNILFLFYYGYVVERRPLKEVTTRVKKQYPSVQLSAWMFWPIVSWINHQYMPLQFRVIFHSFVACCWGIFLNLRARAMSLKQA

SEQ ID NO: 12248 - protein, 444 aa, Zea mays
  VARIANT 348: note = Ancestral polymorphism is V, Derived polymorphism is E
MAAALQPQRLFSTASTSTSASSSSSFATRPRRPTTAAATCRAGLRVPSGVQTTTTAASPSSSPAADAGLGGIKLDWIDVTALSVGSPSPAGRSNAAEKLRAVAEAAADRAEMHDIIGRQRDNWNHLLLHSTNSLALAASVMAALAPAAPAPALRASAGALLATAAVTMAAANRLQPSQLAEEQRNATRLWRQLERDVRATLQQHREEGEAQLAQADVQDAVDRVLALDAAYPLPLLPGMLEKFPKAVEPARWWPRRRPQQQAKSASSSRSRSFGRRGGNGWGQEVEEEMRGLLRVLRAKDEQEYLRVGKLVLGVNRGLAVAGPALAGAAAVATAFIGGDAAWASGAAVTCGALAAAVNTVEHGAQLGMLFELLRNCAGFYRKLQEDIEAALGEPDVERRENGDVFRTKVALLLGRDASELRQFRRMASVSVKDDDIKDYAGKLF

SEQ ID NO: 12249 - protein, 106 aa, Zea mays
  VARIANT 97: note = Ancestral polymorphism is A, Derived polymorphism is T
  VARIANT 93: note = Ancestral polymorphism is V, Derived polymorphism is I
MAWKRKNGSASGSPARGAGAGYEEAEKVPRGHVPMLVAGGDDDGDGGQRVLVPVRLLSDPSIAELLDMAAQRYGYGQPGVLRVPCDAGHFRQVLDGAMHRCGISLA

SEQ ID NO: 12250 - protein, 348 aa, Zea mays
  VARIANT 218: note = Ancestral polymorphism is S, Derived polymorphism is I
MGDSGGSVVSVDVERISFGGKEHHIQTNHGPVSVAVYGDHDKPALVTYPDIALNHMSCFQGLLFCPEAASLLLHNFCIYHISPPGHELGAAPISPNAPIPSVDDLADQVVDVLDFFGLGSVMCFGVTAGAYILTLFASKYRERVLGLILVSPLCKGPTWTEWLYSKVISNLLYYYGMCGLVKECLLQRYFSKEVQGFSELPESDIVQACRSLLDQRQSMNVWRFVQTMNQRYDLTEQLKLLQCRTLIFVGENSQFHAEAVHMTSKLDRRYCALVEVQACGSLVTEEQPHAMLIPMEYFFMGYGMYRPSQLDCSPRSPLSPFCISPDLLSPESMGVKLKPIKTRVRLEV

SEQ ID NO: 12251 - protein, 509 aa, Zea mays
  VARIANT 246: note = Ancestral polymorphism is A, Derived polymorphism is S
  VARIANT 263..509: note = Derived polymorphism lacks residues 263 to 509
MADSTHHTIRRAAARPRGWCCSFAGVPESPEHRRALPAPASAADAVPKPPPPPPPKSPLAPSSHGSPSSKLAGLIDTRRILSPGRVSPIDSEGSPAAAPREQAAPFVAVREDEDEGGDGGEAPALDLRLCLRASDGRCVAMDLDSAVLCGSSAFFAGMVPDASAAGGRRVEVDGVDDLEAFKDAVELMFEPDALRWLARAGVSRATAVLQVCSSIAFDKGVESCLKYIEAVPWSESEEEKLKHVFARCTFGESVSKDVLARLQQQCASGSEDLAVQLVESITSGANNGARKEMQSLVSGLLSRSSVYHKDLSGVNKGGLYRICRSCLSSLVELFMEDSDGGQAMAPSGRRPMVERISQQTENLNWLLDILLNNDMAEEYVELWGTQEELIRMHERASPMFRYELSRVSASVFMALGRGRIQCPSDTRSQLFRGWFRPMLVDFGWLQRCSKGLDVRVLEENLGQALLTLPLHLQQSLFVEWFQCFASRGTGGCPNLSRAFQVWWRRSFVN

SEQ ID NO: 12252 - protein, 93 aa, Zea mays
  VARIANT 57: note = Ancestral polymorphism is A, Derived polymorphism is T
  VARIANT 53: note = Ancestral polymorphism is T, Derived polymorphism is A
  VARIANT 38..93: note = Derived polymorphism lacks residues 38 to 93
  VARIANT 34: note = Ancestral polymorphism is R, Derived polymorphism is H
  VARIANT 30: note = Ancestral polymorphism is E, Derived polymorphism is K
  VARIANT 29: note = Ancestral polymorphism is S, Derived polymorphism is L
  VARIANT 26..93: note = Derived polymorphism lacks residues 26 to 93
  VARIANT 24..93: note = Derived polymorphism lacks residues 24 to 93
  VARIANT 8..93: note = Derived polymorphism lacks residues 8 to 93
MEIDYSHWVDEQKRHTAELTSVLQGQQTSELELRLLVETGLSNYERLFRIKAAAANADVFYVMSGLWKTPAERFFLWIGGFRPSDVLKKCRTI

SEQ ID NO: 12253 - protein, 689 aa, Zea mays
  VARIANT 240..689: note = Derived polymorphism lacks residues 240 to 689
  VARIANT 148: note = Ancestral polymorphism is S, Derived polymorphism is F
  VARIANT 3: note = Ancestral polymorphism is S, Derived polymorphism is C
MACRATLLPLFLFLLVAPEPALATSGTIVFTTLGRSRYAFDVFALTIAPLSAASAELRLTDGASVNYNGNFAPSSSGPPSLLFVSERNGSLNLYLTPVPTSASARRRDALEEEEEDSAPPTPLLPWDPIALKDRPSLTPDGAHLVYVSTAEPAGAPRRSWAAVYSTSLAPGRATRRLTPRGVADFSPAVSPSGVWTAAASPGPRGWAGEVEDLRTDIYVFRTSDGSRRALAVPDGGWPTWADDTTVFFHRRDADGWYGVYRARLTFTDDDVASVVDRITPPGFHAFTPAASPGAPGLVAVATRRPGSDYRHIEVIDLSGGGGGANNRSAYYEVTRPVAPRAHHFNPFISPDGERVGYHRCRGSGNGDSPLLLESIKGPAPDTFSLFRIDGSFPSFSHDGKRIAFVGLPGLYVVNSDGSGGRRRVFSGNAFPTTWDWKRKGVIYTSVGPDFASESTEVDVVAVSLGDGDGDDPSVSIKKLTVGGENNAFPSPSPDGKWVVFRSGRSGHKNLYIMDAEDGEAGGIRRLTEGPWSDTMCNWSPDGEWIAFASDRHNPGGGSFAIYMVHPNGTGLRRVVHSADGGRTNHPWFSPDSKTLVFTSDYAAVSAEPISNPHHYQPYGEIFTVNIDGSGIRRLTHNSFEDGTPSWTPYHLKAEDVGETLQASGTCAFEDCHWLNIAARPDGLMCGKHA

SEQ ID NO: 12254 - protein, 356 aa, Zea mays
  VARIANT 260: note = Ancestral polymorphism is S, Derived polymorphism is F
  VARIANT 151..356: note = Derived polymorphism lacks residues 151 to 356
  VARIANT 148..356: note = Derived polymorphism lacks residues 148 to 356
  VARIANT 146..356: note = Derived polymorphism lacks residues 146 to 356
  VARIANT 121..356: note = Derived polymorphism lacks residues 121 to 356
  VARIANT 107: note = Ancestral polymorphism is P, Derived polymorphism is S
  VARIANT 93: note = Ancestral polymorphism is S, Derived polymorphism is G
  VARIANT 83..356: note = Derived polymorphism lacks residues 83 to 356
  VARIANT 45: note = Ancestral polymorphism is P, Derived polymorphism is L
  VARIANT 37: note = Ancestral polymorphism is A, Derived polymorphism is V
  VARIANT 31: note = Ancestral polymorphism is V, Derived polymorphism is G
  VARIANT 3..356: note = Derived polymorphism lacks residues 3 to 356
MAQFLKDEGVVLSPEDENKREKVIRELKKIVMHWANAVAYEQSVPQGLATATVLTYDSYTLGAHGPESNIDLLCLGPCIATLQYHFFVVLRPSVVYWILCGLIREWSGHSYNLLSSLTSLGIVTISAMCSARDSASPSSQVMNNQQLCNCRITVSYAYKKETEGDAMAHQHFFEYVEAVKLTGDLSVPAGQITFRAKIGKGKRLEHRGVYPEEFGVIASYKCQGRIAQPGFKNPRWVDGELLVLNGKVHPDKKNLFLNVSSNNSSTPYLRERMTNHITGDKAKDRSLGECSLCYSALHMLKVTRILFASIQKLNLLKPYEPWADGMWPAWKPDAPEVPEAPCATGRRTRMVRRGGS

SEQ ID NO: 12255 - protein, 208 aa, Zea mays
  VARIANT 33: note = Ancestral polymorphism is S, Derived polymorphism is F
  VARIANT 37: note = Ancestral polymorphism is D, Derived polymorphism is N
  VARIANT 41: note = Ancestral polymorphism is S, Derived polymorphism is L
  VARIANT 109..208: note = Derived polymorphism lacks residues 109 to 208
  VARIANT 166..208: note = Derived polymorphism lacks residues 166 to 208
MPDVKAYLFFRWLKIHEKTMKRILSLVLYFRVSECYDKEVSEHFKESMMRFFEDETEKVKGFTSESTVSYRDRLKIMVGLVNPDDLQLGSTERKLVQAYNEKPVLSRPQHSFYEINHLPSNLPSLHRQGEDYLEVDLDIHRFSYIARKGLDSFRARLKDDILDLGLTIQAQKQSKLPEQVLCCVRLNKIDFTDQEVPTIVTVDAEVPE

SEQ ID NO: 12256 - protein, 157 aa, Zea mays
  VARIANT 60: note = Ancestral polymorphism is P, Derived polymorphism is L
  VARIANT 56: note = Ancestral polymorphism is P, Derived polymorphism is H
  VARIANT 52: note = Ancestral polymorphism is R, Derived polymorphism is C
  VARIANT 49: note = Ancestral polymorphism is P, Derived polymorphism is S
  VARIANT 46: note = Ancestral polymorphism is E, Derived polymorphism is K
  VARIANT 40: note = Ancestral polymorphism is R, Derived polymorphism is C
  VARIANT 31: note = Ancestral polymorphism is A, Derived polymorphism is V
  VARIANT 13: note = Ancestral polymorphism is A, Derived polymorphism is V
  VARIANT 1: note = Ancestral polymorphism is R, Derived polymorphism is M
MVVVFEDFPAEKAAKVMRLATDDDLPIARKASLQRFLAKRKDRLVERAPYARPSSPAEEPEKKTVKPASALASWLGLGSTEADRLTIALFCPPSTGGPHLRASISCCSSPTEPRPPPHSQDFCRARYLVCPAVFPRSCETWVHPVATPPPLSTSKPR

SEQ ID NO: 12257 - protein, 283 aa, Zea mays
  VARIANT 120..283: note = Derived polymorphism lacks residues 120 to 283
  VARIANT 101..283: note = Derived polymorphism lacks residues 101 to 283
  VARIANT 78: note = Ancestral polymorphism is R, Derived polymorphism is C
  VARIANT 70..283: note = Ancestral polymorphism lacks residues 70 to 283
MSRSISSAEVDRFAGGAGSPPSSSSSAQSPVRSTPVSVVLIWSCCRSTSSRHFQWRATTVQLYLPIVCLYLYAHSLARFQGGSPYIYPLYGLGELPQGFARLSAVYGGTYMLNKPDCKVEFDMEGKVCGVTSEGETAKCKKVVCDPSYLQNKVRKIGRVVRAIAIMSHPIPNTNESHSVQIILPQKQLGRRSNIYDISVGILFLDEIFYDIYDRYEPVNEPSLDNCFVSTLNLNHHIIGELLELSENEVPPEDIVFHRFYLNKTGPVKHKAKWKDSVLDEGIV

SEQ ID NO: 12258 - protein, 690 aa, Zea mays
  VARIANT 240..690: note = Derived polymorphism lacks residues 240 to 690
  VARIANT 229..690: note = Derived polymorphism lacks residues 229 to 690
  VARIANT 128..690: note = Derived polymorphism lacks residues 128 to 690
MADDHYSSKRKYDDPSPPPRRTGFSSGPPPASPPAGGAPSYNSVAPPPDEIQLAKQRAQEIAARIFNAAEAKRPRVDNGDDDVGGFGGGSSLGGSGGGGGGRIGGAGLGFSSSAGGGHGASIPPLSSQSSAPQYSYGGHQGTSKKIEIPNGRVGVIIGKAGETIRYIQLQSGAKIQVTRDHEAEPGALTRQVELSGNPEQISKAEQLIKEVIAEADAGSSGAVSGGRKYNAPQPGAETFQMKIANNKVGLIIGKGGETIKSMQAKSGARIQVIPLHLPAGDTSTERTVHIDGTQEQIEHAKQLVAEVTSENRARNPMSGGYSQQGYHPPRPQSNWGPPSAPPQQSGYGYMQPGAYPGAPPQYGAPQQPYGSYPPTSGGYQTGWDQSQNQQSHTTPPGTGYDYYSQQQQPQQQQSAPGTAASTDATSYNYGQPSTYASQGYDSTYTQHSGGQQAYGHDGYSGYQTQGQQQGYSQQTGYDQQGYGASAYGSAANSTQDGSSYGGPGGATQASPGQQTSTPAAGSHPGYASQPPTSAAASYPVQGSAPSGYGAPPPQPGYGTQPPQQGGYGPGAYGQPSPHGEKPPASSPYGQAPPPGSAQGGYVQYGYSQPAYGAPPAYPGAPTASHPGYGQQQSYGDAYGSGSYGQPTAYTTEAAAPAASQDHSAAPAAAPGTTAAPAPDNNGGAKTSAET

SEQ ID NO: 12259 - protein, 343 aa, Zea mays
  VARIANT 29: note = Ancestral polymorphism is Q, Derived polymorphism is L
  VARIANT 49..343: note = Derived polymorphism lacks residues 49 to 343
  VARIANT 101..343: note = Derived polymorphism lacks residues 101 to 343
MPLGDGAEAADFVLPDELLAALPRDPYEQLDLARRITALAVSGRVSGLEREAGRLRAEAAGKDRENAELRERVVLLDTALQETNARLRAALEDNIKLSKERDSLAQTSKKLARDLQKLESFKRHLMQSLRDDSSSQPQETVDITTCDQPVATKASFSGDGGSGSHPTTNIFSESLDAGSTNRDGTASRPPIQKYALSSHITPWLTPKATPKIMSTSASPRQISTTATPKLMSGATSPTKSRIEAHMSMTPWYPSSKQSSAASSPPRGGSNPGRTPRVDGKEFFRQARSRLSYEQFGAFLANIKELNAHKQSREETLKKAEEIFGPENKDLYLSFRGLLNRSMP

SEQ ID NO: 12260 - protein, 210 aa, Zea mays
  VARIANT 28: note = Ancestral polymorphism is R, Derived polymorphism is K
MAASNGGGGPGPGPISAEAEAALGEAIRLVFGRWTALQMAVENQWGGRDSRAKADQLGESILFWFCRTKESICTNKVSFSGPYYFEDLVDMMYDKISESFNAYFEDNSIEEVAEQFLIIHEECLQNNYSSIEKLRNSPVPGNAVSQSRQIVGDDDDDSDSSDDGDDTSMVADEEAGPEEMAVDRPRPPKPTPDADGWTVVPPRRGGRSKK

SEQ ID NO: 12261 - protein, 615 aa, Zea mays
  VARIANT 7..615: note = Derived polymorphism lacks residues 7 to 615
  VARIANT 31..615: note = Derived polymorphism lacks residues 31 to 615
MGVVYYQYKSEKEICSMPVPHAFISVSELKQLIMTSGRHGRGRTRGRATEDIVISNAQTGEEYADERASIPQNTTVLVRRISIPGQLSEKIVLSPRPEVTEECSVPCKSVVTDSSSKSCSSTVVQDEDAVIAAVIDAAELKWEQLPSKRGQDSGRFTSRRNYGPLEGETPPPGYVCRSCGVPGHFIQHCSQENKMPPPGYICYRCRIPGHFIHHCPSIGDPKFDNNKMSRSLVPVVTPVDGILDSLVPSAPAGAVDDLPAELHCRLCKKVMRDAVLTSKCCFDSFCDRCIRDYIIKESKCICGVETLADDLIPNQTLRSTISNMLGTQTSSGGSGTTRHRSSSGSNPNPKIQSHTASVASAREVKQSIDHQLPAVSAPDYVLQVATEGDLVNQPLEKLAATAEILSKYEGNSAEVSVEKAVANAEALKVKDGSETTSNATTVSGSREHDVTRTDQAKKKRKKADLTKNVQPNNVGYGYNVSFDPAYYNPFINGHPWATEPYMYSSMGMPYAGYPMDPYCANPMDPYCEYPMDPYCVNPMQGYPASYQRPETEPMRRGSTAAARAPLKHRERSDRHRPKDTRLQPQSTEHKRRLVSSHGTRSNSDRRDHGHSYGAS

SEQ ID NO: 12262 - protein, 145 aa, Zea mays
  VARIANT 107..145: note = Derived polymorphism lacks residues 107 to 145
  VARIANT 59..145: note = Derived polymorphism lacks residues 59 to 145
  VARIANT 33: note = Ancestral polymorphism is G, Derived polymorphism is V
  VARIANT 25: note = Ancestral polymorphism is T, Derived polymorphism is I
  VARIANT 17: note = Ancestral polymorphism is S, Derived polymorphism is P
  VARIANT 15: note = Ancestral polymorphism is G, Derived polymorphism is R
MPILSVTKDTITQFGMSNSAQLAITLLVLHMTGLLEFGQLINPAFVNNGWHLSDVDCVQWHVNCNYIATGSSDKTVRLWDVQTGECIRMFIGHRSMVLSLAMSPDGRYMASGDEDGTIMIWDLSTGRCVSPLLGHNSCVWTLAFR

SEQ ID NO: 12263 - protein, 769 aa, Zea mays
  VARIANT 372..769: note = Derived polymorphism lacks residues 372 to 769
  VARIANT 440..769: note = Derived polymorphism lacks residues 440 to 769
MKVSSRKKPPPQQQREETEEQGSSGAAEAMDAAAAAAVQEEAEAEAEAEAEGRTVLVGVRADAESRALLTWVLVNVAAPLDRVVAVHVAPPSAAEAVDFDAMLAVYEGFCNLKQINLNLKICKDSSVRKALVREASLFGAAKVVLGVAKKRRAISSSHSVAKYCAKKLPAKCAVLAVSNGKIEFRRESSVHPGKVSAEVLPCGDDEMYCVVPFRARQAKGGALSLQENKDDGEGDATRDFGTKGSELENLSTDQVEIDADPSSTNAEESTVKQGDEISELPGKGASVLYCVLPERSSGSVASTSSRQDQDSVDLPSEGAGELYCLLPPRNGHSVRSIGDSKRSNASQKDDKPANPSLEGDGDLYCRLPRTGRPGRNSGGSNRSAGIRGAVRRSSSFSSDIHLSSETSPIKKDGSVSMTATERSSSAVSTEAEDSPKYTARTAETPSSSPMSLRRMILKPSVDAIHEFVTEVETVTSLQHENIVALRGFSFENYNLVLAYDYMPRGSLDKALHGKNDGTEFLVWERRIKIAIDIARALEFLHLGGVTQSVIHGDVKSSNILLSEDFGARLCDFGLAKRVSASTPHLTCTDITGTFGYMAPEYFSHGEVNEKIDVYAFGVVLLEIVSGRRPITPGSAKGQESLVGWAKPLLSSGGIKHLVDPFLGNDYDCDEMERMTLAASLCTRTSWHSRPEMSLVLKLLQGDDETMGWARSASFDGSDEEAIAAGPDLNMQSHLSLALLGVDADDTLSRCSSTERTSADGYWSRSSSFD

SEQ ID NO: 12264 - protein, 86 aa, Zea mays
  VARIANT 13: note = Ancestral polymorphism is D, Derived polymorphism is N
  VARIANT 39: note = Ancestral polymorphism is R, Derived polymorphism is S
  VARIANT 40: note = Ancestral polymorphism is V, Derived polymorphism is A
  VARIANT 46: note = Ancestral polymorphism is D, Derived polymorphism is N
  VARIANT 47: note = Ancestral polymorphism is D, Derived polymorphism is N
MDYRGVANINVTDNQFVEQLFLKFPSKLTPHPPSSSAHRVVFAACDDHCSLQSLRRRLNTSYLILQAMTMWGNDRRMEFVRDAKIL

SEQ ID NO: 12265 - protein, 201 aa, Zea mays
  VARIANT 181: note = Ancestral polymorphism is S, Derived polymorphism is L
  VARIANT 35..201: note = Derived polymorphism lacks residues 35 to 201
  VARIANT 27: note = Ancestral polymorphism is Y, Derived polymorphism is C
MPMERSVSCAERGSTFGGGAAVDVRSYSASYARPQPRPPTSRVQRARSVSAWTRPAPPPVQRTGSTKSGAAAARPTPGLNLRSYSASYAASYGPSLVGGGGGGGGGGELKRSGSVTNWTSANRRSVNLRGYTPSFAALDDTAAAVPAPRKVQAVMDDAELQRRKRLVVYKTYDVEGKVRESVRRGVNWIKGKCSSVVYGWW

SEQ ID NO: 12266 - protein, 691 aa, Zea mays
  VARIANT 575..691: note = Derived polymorphism lacks residues 575 to 691
  VARIANT 530: note = Ancestral polymorphism is P, Derived polymorphism is T
  VARIANT 445..691: note = Derived polymorphism lacks residues 445 to 691
  VARIANT 426..691: note = Derived polymorphism lacks residues 426 to 691
  VARIANT 300..691: note = Derived polymorphism lacks residues 300 to 691
  VARIANT 267..691: note = Derived polymorphism lacks residues 267 to 691
  VARIANT 256..691: note = Derived polymorphism lacks residues 256 to 691
  VARIANT 86..691: note = Derived polymorphism lacks residues 86 to 691
  VARIANT 80..691: note = Derived polymorphism lacks residues 80 to 691
  VARIANT 76..691: note = Derived polymorphism lacks residues 76 to 691
  VARIANT 61..691: note = Derived polymorphism lacks residues 61 to 691
  VARIANT 42..691: note = Derived polymorphism lacks residues 42 to 691
  VARIANT 35..691: note = Derived polymorphism lacks residues 35 to 691
MSDTGGRHRASIEAIKDRLPPPPEQQPQGGKIKHQISPEEHWAFSYSMLQKVSRSFALVIQQLGPELRIAAKVSCWTNTGERQAARIKALCLKAILRQDNSFFDMEMITGQVVEKMAGDTFLIQDAIGEKTSFYGHLYSPSYVTIIILETVVFMLQSLLKVTSHADLTKLFELFICDHEIGKAFSELTDPIDQLIAIRYHQALRGEQGPPLRLLLRQAAAASRKKATKSRKKATKSCTSLTLSSCGLFLLNYIEYWTGDELSDSFTQDDMSHFRKKLADILLSSDMNKRKGCPLYKYEKEVDMGSPSDVQLLDSPINPKKSKLLCASDDTKVLMVDEDGPITQAELERWFVHDWDKRTPIKVSIDECTNDFLMTGLSTKDMPVTKYDLMDVLCDYIMEIQDDTTLEMTWVQSFNPFKIEISVKDLQNILKINLDMTLKCFDVAVRLLDNKESRRPKDEKIKDIKHYIDMRFWVSLLPINNVVIYSIYLHLILMLPINNVVIYRMIGFGKLPKYHEDPSPEELAKTLDYWPSMNYYITGCKYVLMPWKFNECYVLFVIDHGKKHITFINFTPTQDWCKHLPYKRFAEAIIMASKKYKIAYNKNRSGWAENIFKWEHTIRTVVPFDLKGVNTSYLVLQAMVMWGNNRPMEFVKDAKVLRRNFVIDLLSYEDNSCRYVFPVNIQHRLINISKKD

SEQ ID NO: 12267 - protein, 392 aa, Zea mays
  VARIANT 358..392: note = Derived polymorphism lacks residues 358 to 392
  VARIANT 32: note = Ancestral polymorphism is Y, Derived polymorphism is C
MAEPGLEGSQPVDLSKHPSGIVPTLHGIFLKCVGSSVPLNRGMKPFLAAISVSPGASAFKRRGTWGSFELKESGGNEMDGEYARHWMSADVKSRVSSSVGRSGSDDLFRPYEISGWAGYASLVAAILKLHETVRMDWPNSWAAVVPSSSVMLRDCGTMLKIRLCSHEEGNKDRNIVSTVNLDCKLDLKAIALQARNAEYNPKRFAAVIMRIREPKTTALIFASGKMVCTGAKSEQQSKLAARKYARIIQKLGFPAKFKDFKIQNIVGSCDVKFPIRLEGLAYSHGAFSSYEPELFPGLIYRMKQPKIVLLIFVSGKIVLTGAKVREETYTAFENIYPVLSEFRKIQQWVDGYSVQLTYVMYSFMEHVWDWAPMTCDVKVTFFKLQASSRILV

SEQ ID NO: 12268 - protein, 283 aa, Zea mays
  VARIANT 239: note = Ancestral polymorphism is I, Derived polymorphism is T
  VARIANT 201..283: note = Derived polymorphism lacks residues 201 to 283
  VARIANT 164: note = Ancestral polymorphism is S, Derived polymorphism is Y
  VARIANT 134: note = Ancestral polymorphism is C, Derived polymorphism is Y
  VARIANT 132: note = Ancestral polymorphism is A, Derived polymorphism is D
  VARIANT 108: note = Ancestral polymorphism is F, Derived polymorphism is L
MEAAPSARAFSPSSSPSAGARPSLPLAGLASRRARVLAAPPPPRAVASSRAPLVVSSPPPPEDSGTHNPAHAKVDRSGRFCSPRAARELALMISYAACLEGTDVVRLFDRRISARRVKTHGFLAFHGYILLAVCPLISVSTRLLRTRKQMYFQLLQNLFTTTMYYGIPSFLPHSTKGIRLSRELLVAVASGWDKHVVIIDKIIPQAWKDEPVARILELCILHIAMAEMASKGTPHKVVINEAVDLAKRFCDGGAPRVINGCLRTFVKDHVDVAGTSQEAKSKS

SEQ ID NO: 12269 - protein, 384 aa, Zea mays
  VARIANT 128: note = Ancestral polymorphism is R, Derived polymorphism is M
MAGYPEDNQHALNGYDDEEVDEEGHPGRRGGRDGASGYGDAGGEDVRGAGGDSSGKIFVGGVAWETTEESFSKHFEKYGAITDSVIMKDKHTKMPRGFGFVTFSDPSVIDKVLEDEHVIDGRTVEVKRTVPREEMNTKDGPKTRKIFIGGLPASLTEDELKDHFSLYGKVLEHQIMLDHSTGRSRGFGFVTFESEDSVERVISEGRMRDLGGKQVEIKKAEPKKHGSDNIGNGRSSQGGGGYRSTYRGGGGAGSGSSGSGGGGYGFGDAYRSAAASYGYDGGAGAGYGYGRGYGYGGNAGFASGFGGGYGGSMYGGAYGAYGAYGGGAYGGGAYGGGAYGGSAYGGAPGGGYGTGGYGSYGGAGGTGGGSTGARGSSRYHPYGK

SEQ ID NO: 12270 - protein, 504 aa, Zea mays
  VARIANT 194..504: note = Derived polymorphism lacks residues 194 to 504
MCVEKKVFSCSLSLCFRLQLLTSRAEGHMSPQAVQRVRVVLKSRLCQSNNYLLLHLCKVRGALLAMTHRTIWSSAERNTDGDCSQYCALITSSLWKLSDGDCCWELRECGRSFLACFSSEDRVSSRLVMLTVEQDRAEDEGSVKEHGKELNAAQSIFPEEPRSLAGEIKDKKTNAPAATRASTKRTTMGNSKPGGCSLGLTTDRHSAKLSDRRADARPDDVRDRESDRSTRPVPRCQGLHLQSCTYRRHECPRGPGNCVSSRSAQVAIGTPGRVLDLLGRDALRRDHIRMLVLDEADELLTGGFKDQVSYLPACRHVASIIQYLPARIQVGLFSGAFSSEALETSHWFMDDDKHVTIKVPRGEELKDIGIKQFYFYRRVDSKEEKARSALRRALLDALEPAARTVVFANTKQGVRTLVQDARGKGYTVSASHGGMSQLGRDDAAVQEFRAGSSRVLVATDLRGTSLGRVPVVINYDLPTQLMQYISRVQQQRRCCGHQFRDSCR

SEQ ID NO: 12271 - protein, 892 aa, Zea mays
  VARIANT 464..892: note = Derived polymorphism lacks residues 464 to 892
MAGQREGMHLVSEMTDARVSSQVVEDRGTEKTMPEEQLSVTLSDGKGCFACNERSHNLEQCKTKYKLVPAAHQFGYATKFPFTVIQPSNEMVEKKKFFQHCLLIESNLANLDESMLKDELKKLWNLPGDWELRRECSTTFLASFSSEDDLTSCLKNPEIQTLLDNKEVKLTVTRWNESDDGSPGLVEEWLLVSGVPRMYRNWKELYEVASALGVLIDVDEESLQVGDKEPIRLKLKTAFRSFDAAPFSYYFAFGCWSSRLVMVTAVQDKTQGMEHKIKELDCKEHKKELNVAKSIMLEEPNSTEESRSNGKAKVNKISAPAATITDSEVIAAIESSKPEGVQSIAQSPRSMTGEENFRGIQKPPIKHVFKRRGKKQPVTTEAINKSPSNKMDKEVAPHSQSNATRTGASTGCDMLDQKECSKMEPKRELNMEGITPAGESKKAEKIGACRNSEYSKVASSTIKSKKTQILGDTSRAPRDELITKYPKGDGMDQMGSSAQGDEKEDASIIDTGLLPNSEEVGVYDSFSEMGLQENLLKGIYQYGLEKPSAVHQRGIVPLCKGFDVLHRSLSGTTETICSGVLQRVDYGSAECQALILVPTPDLAQETLKVLEALGEFLGVTAQTCTGGTSAHADQQALLSGAQVLVGTPDCILDMLQKHAVCPDHVRMLFLDEADELLTGGSKDQIYKIIVHLPDKIQVGLFSATYSTEAIESSRRLMDKPVAVIVPRDEELKNVKQYYLAVENEGLKLRKLLALFKTTGTEQLVIFANTRDKVLSLAEDVGKRYAVSASHDGMDQRARDAAVQKFRSGSSSILIATDHGGTTNAMPQVPIIINYDLPTESMRYVRRLQQQNRQFRRSVSVAISFVTPADRRTLSAITSFCKCYMGELPTDLK

SEQ ID NO: 12272 - protein, 576 aa, Zea mays
  VARIANT 537: note = Ancestral polymorphism is A, Derived polymorphism is P
MDTLFVLGQESRLRILQQAAARVPGCAYLCAWAAAIPSQPHRPASSSSSAAAATTSARLLCCIDAWLCDGGRPSLGDDAHRLRALFDAYRGSLCAPVSGCVPGWAYKDGRAYMELPAHDLTTSASLPVQQQFYQEAGIQMAAFMGCESGEVEIGMYTAPTSGTSPMSLESTLQQVFSEDFFQQSLLEELLQLPPTRPSSPSVSVGSPAADALTSLPRTMAATPTPSSSVERRAPPVPPPPPPHARPPVFPVPFARHGPGHVRFPSADTDDAAMAQAMIDVISGASSSSALPTPPSTATAPPPPGKHHRARRRRGAATAFRAYNAALAPRAPWRPPGVPGQRMIKMGISILRRMHMLRFSRERTGTTMAQRGQEGEDDLSSPAVPTSSQLNHMISERRRRERLNESFEALRGLLPPGSKKDKATVLAKTLDYMSILVAQIADLEAKNRSLESRAQHHHRHANGGSNGGRVVVLQGLMSGTSSSERVQVHVTAGAGDVGTSASSPSAGPPPPASREVEETVRVHARAARSDVAELVARALAAIKGMGRFTVVAVDAGRSSDGGGDFAQATFTLRATNG

SEQ ID NO: 12273 - protein, 166 aa, Zea mays
  VARIANT 3: note = Ancestral polymorphism is A, Derived polymorphism is V
  VARIANT 7: note = Ancestral polymorphism is S, Derived polymorphism is F
  VARIANT 58..166: note = Derived polymorphism lacks residues 58 to 166
  VARIANT 67: note = Ancestral polymorphism is N, Derived polymorphism is H
  VARIANT 80: note = Ancestral polymorphism is K, Derived polymorphism is R
MLVVQPFGKARRYMEDGMVDLADSSRHPIDMHNELLCAQETIRILRREVSEKESEIAQCNAHISELNVHVEAVAQEYKHKMNSKKDEELSAAKQRIVELEGIAARRQREEATEGNNKDSSDTQAKEKFQQLQKVISILGDTEKRALYDETDISDDDVRTSFIALQF

SEQ ID NO: 12274 - protein, 304 aa, Zea mays
  VARIANT 275: note = Ancestral polymorphism is R, Derived polymorphism is S
  VARIANT 258: note = Ancestral polymorphism is V, Derived polymorphism is L
  VARIANT 236: note = Ancestral polymorphism is S, Derived polymorphism is F
  VARIANT 218..304: note = Derived polymorphism lacks residues 218 to 304
  VARIANT 196..304: note = Derived polymorphism lacks residues 196 to 304
  VARIANT 191..304: note = Derived polymorphism lacks residues 191 to 304
  VARIANT 20..304: note = Derived polymorphism lacks residues 20 to 304
MDASFEVMDGEISEPEFITGHEPIRELKCCLGKRENKRIWTYYEDEELIKSLYEISLDPKWKSEGGFKNGYCSALENKLKARLPGCGLSAIPHIESRDNPDAKGLYGIAFPHFDTLAAIYGKDIATGEGAEGLGEAVTNMEKEIAMGEDCLVVEEDMVSMDTPQRSMDNRNSDHSTSSSSKRRKKHKDSMSSDPFLDLASGVRGDLNKASQHFGRMAEVMEMEAKKDQMQELQEKSVVELTRLGFGGSELLKAAAVFVKVPNQMTMLFALLETLRREFILNMIVDEAQRKLLVKLSMKNVRSIW

SEQ ID NO: 12275 - protein, 424 aa, Zea mays
  VARIANT 55: note = Ancestral polymorphism is P, Derived polymorphism is L
  VARIANT 17: note = Ancestral polymorphism is T, Derived polymorphism is A
MALVLHAGSSNKNAFKTLIAADYSGIKVELVKDFQMGVSNKTPEFLKMNPIGKVPVLETPDGPVFESNAIARYVTRLKANNPLYGSSLIDYAHIEQWMDFAATEVDASIGKWLYPRMGFYPYAAVTEESAIAALKRAFGSLNTHLASNTFLVGHSVTLADIVLTCNLYMGFSRILTKSFTSEFPHIERYFWTMVNQPNFKKVIGDVKQAEAVPLLPKKIAPAKEQKPKEAKKEAPKPKEAEKPAEEEEAPKPKPKNPLDLLPPSKLILDDWKRLYSNTKTNFREVAIKGFWDMYDPEGYSLWFCDYKYNDENTVSFVTMNKVGGFLQRMDLCRKYAFGKMLVVGSEPPFKVKGLWLFRGPEIPKFVMDEVYDMELYEWTKVDLSDEAQKERVNAMIEDQEPFEGEALLDAKCFNSGKSCLGFWV

SEQ ID NO: 12276 - protein, 483 aa, Zea mays
  VARIANT 141: note = Ancestral polymorphism is L, Derived polymorphism is Q
  VARIANT 238..483: note = Derived polymorphism lacks residues 238 to 483
  VARIANT 247: note = Ancestral polymorphism is S, Derived polymorphism is F
MVNSPPTENASVDEQPVFTEDIYDSINWDNLDNKSKDILVEKGSIRDENIEFPLDTNGRHFSYTHYSRKMSNGEVYDRKWLVDSKHVDRVFCFSCKLFNTENCNSSLGYEGFRDWRNINERLKEHEASIKHITSMNPWNELRVRLDKHETIDKNIQQQITKEKERIRQVLQRIIAVVKFLGKRNLAFRGPSEKLYNDQNGNFLACVEMIAEFDLVMQDHLRHIQNNEIHYHYLSHKIQNEFISLLASDITKSIINTVKEAKYFSVILDCTPDVDDTSGEGLFNSLLDSIKSRGLNIEDVRGQSYDNGSNMKGKHKGVQRPLLDINPRALFMPCACHSLNLALCDMAKSCGKAISFFGIVHRVYTLFSSSTKRWDVLKDHVESLTAKSWCNTRWESRIKSVKAIRFQAPQIRSALLQLSTDKDTEPKDKSDAKKLFDLLGTFDFILGMVIWYDILFTVNKVSKQLQSSSMCIDATLMRIEDTVN

SEQ ID NO: 12277 - protein, 242 aa, Zea mays
  VARIANT 61: note = Ancestral polymorphism is P, Derived polymorphism is T
MAEQSGGRRDGADPRPPSIDGLAAMACDGEGKGGGCSVRAPSRAGGADGWQQSRAEGGADPMQRGRRSSDPWVRARSPSIDRAGLWRRGARTTGMCERGEDRGIASMAWTSIAGAGRRGQLGASDGGRAAWVPVVVGEASGGLASVAERGEDHRESVPRPGKRARSKRGGGVHHGRDPRVGSMRGHREVEHRQRERRCGEEGRGSAAPSIGGKRTFHPRGIGRIVHHSIVDAYTLLLRSSRE

SEQ ID NO: 12278 - protein, 182 aa, Zea mays
  VARIANT 40: note = Ancestral polymorphism is V, Derived polymorphism is I
  VARIANT 114: note = Ancestral polymorphism is D, Derived polymorphism is G
MAAGLKVPEMALRLCVVPLSLASLWEMATNAQADDTYGEVKFSDLSGFSYLVGVNAVTAAYAVASVLASSFKRPLAARYDWVVLVMDQASAYLLVTSASAAAELLQLARHGDRGVSWGEACSYFGRFCGKATVSLALHAAALACFAALSLVSAFRVFSSRCHPPPDADGQPPKHARDEEQRV

SEQ ID NO: 12279 - protein, 270 aa, Zea mays
  VARIANT 162..270: note = Derived polymorphism lacks residues 162 to 270
MAVSNNITACVTLLALICAVPVIASGVWFASAQGEECARLARWPVAILGGLLLLAALAGFVGAYWNRRGLLAFYLFAMASLVVLLIALLAFAFAVTRGSGAYPVLGRAYDDYRLDGFSMWLRGYVSDDPGRWDKVRACLAVSDTCKKLARQAAFTSADQFYQSHLSPLQSGCCKPPSVCGFSYVSPTVWSAPAARPAADADCGLWSNDPGQLCYGCESCKAGLLEALRDQWHKANVALVVATVALVILYLVGCSAYKNAQAAAIFGRRKY

SEQ ID NO: 12280 - protein, 617 aa, Zea mays
  VARIANT 173..617: note = Derived polymorphism lacks residues 173 to 617
MSAAQLLRHSRKLRSLQNPVGCENFSFVRHFSSGSGSFIARENVLIHCMPFIVAIENVMPLVMSGIGKRTRGTRFSQHNQPAKQLETFSAGVNGSCTWRIASNSLTPSAASWLSGSFSCGQVVSARPFSSSAAKILACLHCIGKFEYLLILGVVSASFLFPTLNALIPLAKAWFYAFCNNISHTVPDLPPHQEIGMPSLSPTMTEGNIAKWLKKEGDKVSPGEVLCEVETDKATVEMECMEEGYLAKIIHGDGAKEIKVGEVIAITVEEEGDIEKLKDYKPSSSAEPVAPAEPKAEPEPSQPKAEEKKPTQAPEAKTPKIEEASQSGDRIFASPLARKLAEDNNVPLSSVKGTGPDGRILKADIEDYLASVAKGGLRESFADPGLGYVDIPNAQIRKVTANRLLASKQTIPHYYLTVDARVDKLVQLRGELNPLQDASGGKKISINDLVIKAAALALRKVPQCNSSWMNDFIRQYHNVNINVAVQTEHGLFVPVIRDADKKGLGAIAEEVKQLAQKARDNSLKPADYEGGTFTVSNLGGPFGIKQFCAIINPPQSAILAIGSAEKRVIPGSADGQFEFGSFMSATLSCDHRVIDGAIGAEFLKAFKGYIENPTSMLL

SEQ ID NO: 12281 - protein, 117 aa, Zea mays
  VARIANT 16: note = Ancestral polymorphism is L, Derived polymorphism is I
  VARIANT 8: note = Ancestral polymorphism is T, Derived polymorphism is I
MKRSAASTVPLALVLIAVATTAAAADMTGASNYLVYVEPHPPGVDCQAYQLGILAAALGGEAQAKAAMLYNYRNVMSGFSARLTPPELEAVKKQPQVSRVLPSATLSLMSSKFDGVS

SEQ ID NO: 12282 - protein, 125 aa, Zea mays
  VARIANT 16: note = Ancestral polymorphism is A, Derived polymorphism is V
  VARIANT 21: note = Ancestral polymorphism is S, Derived polymorphism is P
  VARIANT 45: note = Ancestral polymorphism is S, Derived polymorphism is G
  VARIANT 58: note = Ancestral polymorphism is R, Derived polymorphism is H
  VARIANT 86: note = Ancestral polymorphism is F, Derived polymorphism is S
  VARIANT 92: note = Ancestral polymorphism is A, Derived polymorphism is T
  VARIANT 100: note = Ancestral polymorphism is M, Derived polymorphism is K
MVLLEERIYLCFLAFAENAFSTQVELAHGDRGQSYSYDRSSSYSSACRGGVSRRSNFRGCYGHWFTLIGIMARSEGPAGKNSLLHFRTTCGALVMYVSLMYTVRLENGCGHQSPMCPGYPPIVEE

SEQ ID NO: 12283 - protein, 261 aa, Zea mays
  VARIANT 158: note = Ancestral polymorphism is M, Derived polymorphism is I
  VARIANT 70: note = Ancestral polymorphism is K, Derived polymorphism is E
  VARIANT 55: note = Ancestral polymorphism is D, Derived polymorphism is N
  VARIANT 48: note = Ancestral polymorphism is E, Derived polymorphism is K
  VARIANT 11: note = Ancestral polymorphism is D, Derived polymorphism is N
  VARIANT 10: note = Ancestral polymorphism is P, Derived polymorphism is L
MTASTAPEAPDFLVANLYRFLLRELRGIFYKEADPESKQLWQFLADGEDEDSELDFSGSGRFALSLARLKEQRHPLWAHAAAVGDGQSGREWGVKRLTVAPAVRDHRAVLSALARALATTESTYLDKTSQSMGSRLELAVTGACLVVVLLRDDDVYVMNLGDSRAIVAQRWDDEDCLIGSMQVEDIGVSLETETRIPGYSAIGLEALQLSTDHSTSIEEEVQRIRHEHPDDDQCVVNDRVKGRLTVTRAFGAGYLKQVKKL
